United States Patent Application Publication US 2007/0067865 A1 - sequence listing, part 52

SEQ ID NO: 320707 - DNA, 292 bp, Zea mays
agtcaggggtacgctggtatttgacagccgagtttccagtctccagcctcaaggatcgcgtacgggggagggggtacccagatcggcagacgtgcatccaaatgtacacacgtcgcgttccaatagaggacgatcagaggatccacgctagctaccaaaggctctatgacagaagggtcaaacgagtgctcgatctacggtagaacagaagtgttagcgatggcgagaggcctcataagtagaacgtgccttgtcaacactagcggcgggaactctgaccagcttgtcgagg

SEQ ID NO: 320708 - DNA, 415 bp, Zea mays
  unsure (1)..(415): unsure at all n locations
attgagaccaactagcaacatagaaagcacaatagtgtaccaacaatggcagccaagatattttgcttccttatgctccttggtctttctgcaagtgttgctaccggaaccattttcccacaatgctcacaagctcctatagcttcccttcttcccccatacctctcaccagcggtgtcttcaatgtgtgaaaacccaattgttcaaccctacaggatccaacaggcaatcgcaacaggcatcttaccattatcacccttgttcctccaacaaccgtcagccctattacagcagttacctttggtccatgtggtggcacaaaacatcagggcacaacaactacaacaactngtgctagcaaaccttgctgcatactctcagcaacattcagttcttccattcaaccaactggctg

SEQ ID NO: 320709 - DNA, 360 bp, Zea mays
gagcattcagaaacacaccaagcgaagcacattagcaacaacctaacaacaatggctaccaagatattatccctccttgcgcttcttgcgctttttgcgagcgcaacaaatgcgttcattattccacaatgctcacttgctccaagttccattattacacagttactcccaccagttacttcaatgggcttcgaacacccagctgtgcaagcctataggctacaacaagcaattgctgcgagcgtcttacaacaaccaatttcccagttgcaacaacaatccttggcacatctaacaatacaaaccatcgcaacgcaacagcaacaacaattcctaccagcactgagccacctaaccatg

SEQ ID NO: 320710 - DNA, 385 bp, Zea mays
gagaccaactagcaacatataaagcacaatagtgtaccaacaatggcagccaaaatgttttgcctccttatgctccttggtctttctgcaagtgctgctacggcgaccattttcccgcaatgctcgcaagctcctatagcttcccttcttcccccgtacctctcaccagcggtgtcttcggtatgtgaaaacccaattcttcaaccctacaggatccaacaggcaatcgcagctggcatcttacctttatcacccttgttcctccaacaatcatcagccctattacaacagttacctttggtgcatttattggcacaaaacatcagggcacaacaactacaacaacttgtgctagcaaaccttgctgcctactctcagcaacagc

SEQ ID NO: 320711 - DNA, 438 bp, Zea mays
gcaacatagaaagcacaatagtgtaccaacaatggcagccaaaatattttgcctccttatgctccttggtctttctgcaagtgctgctacggcgaccattttcccacaatgctcacaagctcctatagcttcccttcttcccccgtacctctcaccagcggtgtcttcggtatgtgaaaacccaattcttcaaccctataggatccaacaggcaatcgcagctggcatcttacctttatcacccttgttcctacaacaatcatcagccctattacagcagttacctttggtgcatttattggcacaaaacatcagggcacaacaactacaacaacttgtgctagcaaaccttgctgcctactctcagcaacaacaagttcttccattcaaccaactagctgcattgaactctgcttcttatttgcaacaacaacaact

SEQ ID NO: 320712 - DNA, 236 bp, Zea mays
gaggaaggtgctctagcggatgccgactgagctattgcaagtggataccaaaagggggataggcaaccgcgctattaacatgaccgtgtgcgcatcgcccaactacgtacgccattgccgcgatgtcagcctgcgtctgctggatacctgatgcattgacctgtactaccagtatcaactctatgccatcgtacatatttatgatacgatcggtgagctgaaatactgtgcatatg

SEQ ID NO: 320713 - DNA, 360 bp, Zea mays
caactagcaacatagaaagcacaatagtgtaccaacaatggcagccaaaatattttgcctccttatgctccttggtctttctgcaagtgctgctacggcgaccattttcccacaatgctcacaagctcctatagcttcccttcttcccccgtacctctcaccagcggtgtcttcggtatgtgaaaacccaattcttcaaccctataggatccaacaggcaatcgcagctggcatcttacctttatcacccttgttcctccaacaatcatcagccctattacagcagttacctttggtgcatttattggcacaaaacatcaaggcacaacaactacaacaacttgtgctagcaaaccttgc

SEQ ID NO: 320714 - DNA, 193 bp, Zea mays
cattcaaccaacttgctttgtcaaacccaacagcattctaccaacaacccatcattggtggtgccctcttttagatttcttatgagttatagttcaataataaagctttttgtctgatgtttgtggcttcccagaaataacaaagtacatttatcaatactacaagtatcaactctataccaacgtaaaaata

SEQ ID NO: 320715 - DNA, 440 bp, Zea mays
cccagctcttcagccctataggctcctaacaagcaatcgcagcaagcaacatacctggatcacccttgttgtttcaacaatcgccagccctatctttggtgcagtcattggtacaaaccatcagggcacagcagctgcagcaactcgtgctacctgtgatcaaccaagtagctctggcaaacctttctccctactctcagcaacaacaatttcttccattcaaccaactgtctacactgaaccctgctgcttatttgcagcaacaactattaccattcagccagctagctactgcctactctcagcaacaacaacttcttccatttaaccaattggccgcactgaaccccgctgcttatttgcagcagcaaatactactaccatttagccagctagctgcagcaaaccgtgcttccttcttgacacagcaacagttgctg

SEQ ID NO: 320716 - DNA, 153 bp, Zea mays
actagttctagatcgcgagcggccgtgcttattcttgttggtataagaactttgtgggtagattagtagattgtacagctacgggagggggctatataaaattacggaagtcggccaaaaaaattacatgagagccatatagttctactttct

SEQ ID NO: 320717 - DNA, 344 bp, Zea mays
gcaacatagaaagtggaatccagtatcaacaatagagcaacaatggcgaccaagagattttgcctccttatgctccttgctctttctacatgtgttgctaacgcgacaattttccctcaatgctcacaagctcctatagcttcccttcttcccccataccttccatcaattatagcttcaatatgtgaaaacccagctcttcaaccatataggcttcaacaagcaatcgcagcaagcaacatacctttatcgcccttgttgtttcaacaatcgccagccctatctttggtgcagtcattggtacaaaccatcagggcacaacagctgcagcaactcgtgctacc

SEQ ID NO: 320718 - DNA, 375 bp, Zea mays
gcaacatagaaagcacaatagtgtaccaacaatggcagccaaaatatttggcttcgttatgctccttggtctttctgcaagtgttgctaccgcaaccattttcccacaatgctcacaagctcctatagcttcccttcttcccccatacctctcaccagcggtgtcttcaatgtgtgaaaccccaattgttcaaccctacaggatccaacaggcaatcgcaacaggcatcttaccattatcacccttgttccttcaacaaccgtcagccctattacagcagttacctttggtccatttggtggcacaaaacatcaaggcacaacaactacaacaacttgtgctagcaaaccttgctgcatactctcagcaacatca

SEQ ID NO: 320719 - DNA, 399 bp, Zea mays
cccacgcgtccgaagatattttccctccttatgctccttgctctttctacatgtgttgctaacgcgacaatcttccctcaatgctcacaagctcctatagcttcccttcttcccccataccttccatcaattatagcttcagtatgtgaaaacccagctcttcaaccatataggcttcaacaagcaatcgcagcacgcaacatacctttatcgcccttggtgtttcaacaatcaccagccctatctttggtgcagtcattggtacaaaccatcagggcacaacagctgcagcaactcgtgctacctgtgatcaaccaagtagctgtggcaaacctttctccctactctcagcaacaacaatcttctgcattcaaccaactgtctacactgaaccctgct

SEQ ID NO: 320720 - DNA, 452 bp, Zea mays
ggcatcgaccgacgcgacccacgcgtccgatggagaccaactagcaacatagaaagcacaatagtgtaccaacaatggcagccaagatattttgcctccttatgctacttggtctttctgcaagtgctgttacggtgaccattttccctcaatgctcgcaagctcctatagcttgccttcttccaccgtacctctcaccagcggtgtcttccgtatgtgaaaacccaattcttcaaccctacaggatccaacaggcaatcgcagctggcatcttacctttatcacccttgttactccaacaatcatcagccctattacaacagttacctttggtgcatatattggcacaaaacatcagggcacaacaactacaacaacttgtgctagcaaaccttgctgcctactctcagcaacagcagtttcttccattcaaccaactaggttcattgaac

SEQ ID NO: 320721 - DNA, 429 bp, Zea mays
attgagaccaactagcaacatagaaagcacaatagtgtaccaacaatggcagccaaaatattttgcttccttatgctccttggtctttctgcaagtgctgctaccgcaaccattttcccacaatgctcacaagctcctatagcttcctttcttcccccatacctctcaccagcggtgtcttcagtatgtgaaaacccaattcttcaaccctacaggatccaacaggcaatcgcagcaggcatcttacctttatcacccttgttcctccaacaaccgtcagccctattacagcagttacctttggtgcatttgttggcacaaaacatcaaggcacaacaactacaacaacttgtgctaggaaaccttgctgcctactctcagcaacagcagtttcttccattcaaccaactggctgcattgaactctgct

SEQ ID NO: 320722 - DNA, 288 bp, Zea mays
gagccacgcgtccgcgagatattagccctccttgcgcttcttgcccttttagtgaccgcaacaaatgcgtgcattattccacagtgctcacttgctcctagtgccattattccacagttcctcccaccagttacttcaatgggcttcgaacatccagccgtgcaagcctacaggctacaactagcgcttgcggcgagcgccttacaacaaccaattgcccaattgcaacaacaatccttggcacatctaaccctacaaaccattgcaacgcaacaacaacaacaacaa

SEQ ID NO: 320723 - DNA, 356 bp, Zea mays
cgggatattagccctccttgcgctttttgcccttttagtgagcgcaacaaatgcgtgcattattccacagtgctcacttgctcctagtgccattattccacagttcctcccaccagttacttcaatgggcttcgaacatccagccgtgcaagcctacaggctacaactagcgcttgcggcgagcgccttacaacaaccaattgcccaattgcaacaacaatccttggcacatctaaccctacaaaccattgcaacgcaacaacaacaacaacaacagtttctgccatcactgaaccacctagccgtggtgaaccctgtcacctactttgcacagcagctgcttgcattccacccaa

SEQ ID NO: 320724 - DNA, 270 bp, Zea mays
ctagcaacatagaaagcacaatagtgtaccaacaatggcagccaaaatattttgcttgcttatgctccttggtctttctgcaagtgctgctaccgcaaccattttcccacaatgctcacaagctcctatagcttcctttcttcccccatacctctcaccagcggtgtcttcagtatgtgaaaacccaattcttcaaccctacaggatccaacaggcaatcgcagcaggcatcttacctttatcacccttgttcctccaaccaacgcgtca

SEQ ID NO: 320725 - DNA, 370 bp, Zea mays
cgcttatttgcagcaacaacaactactaccattcagccagctagctgctgcctaccgccggcgatttcttccattcaaccaactggcagcattgaactctcatgcttatgtacaacaacaacaactactaccattcagccagctagctgctgtgagccctgctgccttcttgacacagcaacatttgttgccgttctacctgcacactgcgcctaacgttggcaccctcttacaactgcaacaattgctgccattcgaccaacttgctttgacaaacccagcagtgttctaccaacaacccatcattggtggtgccctcttttagattgcttatgagttatagttcaataataaagttttttttgctgat

SEQ ID NO: 320726 - DNA, 268 bp, Zea mays
  unsure (1)..(268): unsure at all n locations
cagcaagcaacatagaaagtagaatccattagcaacaatagagcaacaatggcgaccgagatgattttccctccttatgctccttgctctttctacatgtgttgctaacgcgacaattttccctcaatgctcacaagctcctatagcttcccttcttcccccataccttccatcaattatagcttcagtatgtgaaaacccagctcttcaaccatataggcttcaacaagcaatcgcagcaagcaacatancctttatncgcccttgt

SEQ ID NO: 320727 - DNA, 267 bp, Zea mays
ctctctctcacacacacacttttttctccggacgcgctcgttcgttcgcgaaggcgcgcctgcctgccctcacatccgctcctccctccccgacaccgaccgacccctcgtccgctcgcctccctccccgatccccaccgccatggccgccgccgccgccgccgcgtcctcctcttcctcctccgaggttccgatcgccgcccgcacctgcgtctccgtcggcgaggtggcggtgggcgcggtggctacaggcagcaggcgaccggg

SEQ ID NO: 320728 - DNA, 266 bp, Zea mays
aaacacgttcacatggaatacccttagcaagaagaaggtcaagccacttgagcgcgagggcttacttgattgtgcgcctagctttctatacatgtcatacttgcacgacattgcctcgtcctggctgacgatctaatatcgctgtacatcttgcctgatactatgactgaattctagcttgcgtatgagcaaacccaggattactaccatacaggctggaccaggcaatatgaataagcaacatacctaaatcgtacacttgttga

SEQ ID NO: 320729 - DNA, 297 bp, Zea mays
gaccggaatctgccggctccgacccaggcgaccggtctgtcgcacacacacactttattctccggacgcgctcgttcgttcgcgaaggcgcgccgggctgacctcacatccgctcctccctacccgacaccgaccgacccctagtccgctcgcctccctccccgatccccaccgccatggccgccgccgccgccgccgcgtcctcctcttcctcctccgaggttccgatcgccgcccgcacctgcgtctccgtcggcgaggtggccgtgggcgcggtggctacaggcagcaggcgac

SEQ ID NO: 320730 - DNA, 291 bp, Zea mays
accgttcggattccgggcccaattcttcaacctacaggatccaacaggcaatcgcagctggcatcttacctttatcacccttgtgcctgcaacaatcatcagccctattacaacagttacctttggtgcatttattggcacaaaacatcagggcacaacaactacaacaacttgtgctagcaaaccttgctgcctactctcagcaacagcagtttcttccattcaaccaactaggttcattgaactctgcttcttatttgcaacaacaacaactaccattcagccagctac

SEQ ID NO: 320731 - DNA, 266 bp, Zea mays
gcaacatagagagtggaatacagtagcaaacatagagcaacaatggcggccaagatagtctgcatccttatgctccttgctctttctgcatgtgttgctaacgcgaccatttttcctcaatactcacaagctcctatagctgcccttcttcccccatacctttcatcaatgaccgctttagtatgtgaaaacccagcccttcaaccctacaggatccagcaagcaatcgtagcaagcaacttacctttatcacacctgttctttca

SEQ ID NO: 320732 - DNA, 426 bp, Zea mays
cgcaacatagaaagcacaatagtgcaccaacaatggcagccaaaatattacgcctcctgatgcgccttggtctttctgcaagtgctgctacggcgaccattttcccacaatgctcacaagctcctatagcttcccttcttcccccgtacctctcaccagcggtgtcttcggtatgtgaaaacccaattcttcaaccctataggatccaacaggcaatcgcagctggcatcttacctttatcacccttgttcctccaacaatcatcagccctattacagcagttacctttggtgcatttattggcacaaaacatcagggcacaacaactacaacaacttgtgctagcaaaccttgctgcctactctcagcaacaacagtttcttccattcaaccaactagctgcattgaactctgcttcttatttgc

SEQ ID NO: 320733 - DNA, 426 bp, Zea mays
ccagcaagcaacatagaaagtagaatccattagcaacaatagagcaacactggcgagcaagagattttccctccttatgctccttgctctttctacatgtgttgctaacgcgacaattttccctcaatgctcacaagctcctatagcttcccttcttcccccataccttccatcaattatagcttcagtatgtgaaaacccagctcttcaaccatataggcttcaacaagcaatcgcagcaagcaacatacctttatcgcccttgttgtttcaacaatcaccagccctatctttggtgcagtcattggtacaaaccatcagggcacaacagctgcagcaactcgtgctacctgtgatcaaccaagtagctctggcaaacctttctccctactctcagcaacaacaatttcttccattcaaccaact

SEQ ID NO: 320734 - DNA, 424 bp, Zea mays
gcaattagctcatcgactccagattggagaactcgacaccatgaaggtgctgatcgtggccgttgctctcctggcgctcgctgcgagcgccgcctccagtacaagcggcggctgtggctgccagacaccaccgtttcatctaccgcctccgttctatatgccgcctccgttctatctgccgccgcagcagcagccgcagccatggcaataccccactcaaccaccgcagctaagcccgtgccagcagttcggatcctgcggcgtcggcagcgtcggcagcccgttcctgggccagtgcgtcgagttcctgaggcaccagtgcagcccggcggcgacgccctacggctcgccacagtgccaggcgctgcagcagcagtgctgccaccagatcaggcaggtggagccgctgcagcggtaccaggcg

SEQ ID NO: 320735 - DNA, 269 bp, Zea mays
gcaacatagaaagtagaatccattagcaacaatagagcaacaatggcgaccaagatagtttcgctccttatgctccttgctctttctacatgtgttgctaacgcgacaattttccctcaatgctcacaagctcctatagcttcccttcttcccccataccttccatcaattatagcttcagtatgtgaaaacccagctcttcaaccatataggcttcaacaagcaatcgcagcaagcaacatacctttatcgcccttgttgtttcaacc

SEQ ID NO: 320736 - DNA, 249 bp, Zea mays
atacaatgaataatacaatatttatatttcatcaccttcttccgctaaaagcgtacgcatccaaatcctgcatgatctcacaatacttactatcaacaaattccattattacacacttttctacaatctcttacttcaatccacttctaacattcaactaaataaatatattcaatactactagcaatttccactatcatcttataccatccaatttactacttactacatcaattcatcacccatata

SEQ ID NO: 320737 - DNA, 266 bp, Zea mays
ctcaatgctcacaagctcctatagcttcccttcttcccccataccttccatcaattagagcgtcaatatgtgaaaacccagctcttcaaccatataggcttcaacaagcaatcgcagcaagcaacatacctttatcgcccttgttgtttcaacaatcgccagccctatctttggtgcagtcattggtacaaaccatcagggcacaacagctgcagcaactcgtgctacctctgatcaaccaagtagctctggcaaaacctttctcc

SEQ ID NO: 320738 - DNA, 248 bp, Zea mays
gttgttgcaacaatcgccagccctatctttggtgccgtcattggtacaaaccgtcagggcacataagctgcaggaactcgcgctacctgtgatcaaccaagtcgctctggcaaacctttctccctactctcagcaacaacaatttcttccattcaaccaactgtctacactgaaccctgctgcttatttgcagcaacaactattaccattcagacagctagctactgcctactctcagcaacaacaac

SEQ ID NO: 320739 - DNA, 260 bp, Zea mays
caacaatggctaccaagatattatccctccttgcgcttcttgcgctttttgcgagcgcaacaaatgcgttcattattccacaatgctcacttgctccaagttccattattacacagttcctcccaccagttacttcaatgggcttcgaacacccagctgtgcaagcctataggctacaacaagcaattgcggcgagcgtcttacaacaaccaatttcccagttgcaacaacaatccttggcacatctaacaatacaaacc

SEQ ID NO: 320740 - DNA, 393 bp, Zea mays
  unsure (1)..(393): unsure at all n locations
acgaacaagcaacatagaaagtggaatccagtagcaacaatagagcaacaatggcgaccgggatggtttccctccttatgctccttgctctttctgcatgtgttgctaacgcgacaattttccctcaatgctcacaagctcctatagcttcccttcttcccccataccttccatcaatgatagcttcagtatgtgaaaacccagctcttcaaccctataggctccaacaagcaatcgcagcaagcaacatacctttatcacccttgtttcaacaatcgccagccctatctttggtgcagtcattggtacaaaccatcaaggcacagcagctgcagcaactcgtgctacctgtgatcaaccaagtagctctggcaaacctttcntcctactatc

SEQ ID NO: 320741 - DNA, 420 bp, Zea mays
gcaacatagaaagcacaatagtgtaccaacattggcagccaaaatattttgcctggttaggctccttggtctttctgcaagtgctgctacggcgaccattttcccacaatgctcacaagctcctatagcttcccttcttcccccgtacctctcaccagcggtgtcttcggtatgtgaaaacccaattcttcaaccctataggatccaacaggcaatcgcagctggcatcttacctttatcacccttgttcctccaacaatcatcagccctattacagcaattacctttggtgcatttattggcacaaaacatcaaggcacaacaactacaacaacttgtgctagcaaaccttgctgactactctcagcaacaacagtttcttccattcaaccaactagctgcattgaactctgcttctta

SEQ ID NO: 320742 - DNA, 267 bp, Zea mays
gaaagcacaatagtgtaccaacaatggcagccaatattttgcttccttatgctccggggtgtttctgcaagtgttgctaccgcaaccattttcccacaatgctcacaagctcctatagcttcccttcttcccccatacctctcaccagcggtgtcttcaatgtgtgaaaacccaattgttcaaccctacaggatccaacaggcaatcgcaacaggcatcttaccattatcacccttgttcctccaacaacccgtcaagccctattac

SEQ ID NO: 320743 - DNA, 260 bp, Zea mays
atagaaagcacaatagtgtaccaacaatggcagccaaaatattttgcctccttatgcgccttggtctttctgcaagtgctgctacggcgaccattttcccgcaatgctcgcaagctcctatagcttcccttcttcccccgtacctctcaccagcggtgtcttcggtatgtgaaaacccaattcttcaaccctacaggatccaacaggcaatcacagctggcatcttacctttatcacccttgttcctccaacaatcatca

SEQ ID NO: 320744 - DNA, 260 bp, Zea mays
gaccaactagcaacatagaaagcacaatagtgtaccaacaatggcagccaaagtatggtgcttccttatgctccttggtctttctgcaagtgttgctacctgaaccattttcccacaatgctcacaagctcctatagcttccctacttcccccatacctctcaccagcggtgtcttcaatgtgtgaaaccccaattgttcaaccctacaggatccaacaggcaatcgcaacaggcatcttaccattatcacccttgttcc

SEQ ID NO: 320745 - DNA, 266 bp, Zea mays
ctcaatgctcacaagctcctatagcttcccttcttcccccataccttccatcaatgagagctgcagtatgtgaaaacgcagctcttcagccctataggctccaacaagcaatcgcagcaagcaacatacctttatcacccttgttgtttcaacaatcgccagccctatctttggtgcagtcattggtacaaaccatcagggcacagcagctgcagcaactcgtgctacctgtgatcaaccaagtagctctggcaaaccatttctcc

SEQ ID NO: 320746 - DNA, 423 bp, Zea mays
cgaagaacccgatcgacaccatgagggtgttgctcgttgccctcgctctcctggctcgcgcggggagcgccacctccacgcatacaagcggcggctgcggctgccagccaccgccgccggttcatctaccgccgccggtgcatctgccacctccggttcacctgccacctccggtgcatctaccaccgccggtccacctgccgccgccggtccacctgccaccggcggtccatgtgccgccgccggttcatctgccgacgccaccatgccactaccctactcaaccgccccggcctcagcctcatccccagccacacccatgcccgtgccaacagccgcatacaagcccgtgccagctgcagggaacctgcggcgttggcagcaccccgatcctgggccagtgcgtcgagtttctgaggcatc

SEQ ID NO: 320747 - DNA, 342 bp, Zea mays
tatattatattttcttttttttgtttccaccaaacgcacagccggattattgaaactaacgtaggacattagataaatacggaaatattgcatgcatgaaacattaattatactgatgatcgaacacgacacacaacatttgagcacccatgcaagctgctctttcattcaaaagattcccaggagcagagactacgacaacttccttctgatcctgcatgcatgtaaccctctaaccacgaaagacgttgccgcaactaggctcatgatcctacttctaattggaagtaaggccggcaacgaaattaccataaacgatgctacaaacgcccaatccaacaa

SEQ ID NO: 320748 - DNA, 267 bp, Zea mays
ctccggtgcatctcccaccgccggtccacctgccgccgccggtccacctgccaccgggggtgcatgtgccgccgccggttcatctgccgccgccaccatgccactaccctactcaaccgccccggcctcagcctcatccccagccacacccatgcccgtgccaacagccgcatccaagcccgtgccagctgcagggaacctgcggcgttggcagcaccccgatcctgggccagtgcgtcgagtttctgaggcatcagtgcagcccga

SEQ ID NO: 320749 - DNA, 295 bp, Zea mays
ggaattcccgggctcgtcgtgtgcctggctctgtcagctgccagcgcctctgcaatgcagatgccctgcccctgcgcggggctgcgaggggttgtacggcgctggcgccggcctgacgacgatgatgggcgccggcgggctgtacccctacgcggagtacctgaggcagccgcagtgcagcccgctggcggcggcgccctactacgccgggtgtgggcagccgagcgccatgttccagccgctccggcaacagtgctgccagcagcagatgaggatgatggacgtgcagtccgtc

SEQ ID NO: 320750 - DNA, 261 bp, Zea mays
caacaactaccattcagccagctacctgctgcctacccccagcaatttcttgcattcgaccaactggcagcattgaactctcctgcttatttacagcagcaacaactactaccattcagccagctagctggtgtgagccctgctaccttcttgatacaaccacagttgttgccgttctaccagcacgctgcgcctaacgctggcaccctcttacaactgcaacaattgctgccattcaaccaacttgctttgacaaaccca

SEQ ID NO: 320751 - DNA, 264 bp, Zea mays
gcagcttctgcttgctctggggggaaggagagagagagagcgagagagatcgggtggagaggctagctaggtggtcctcgaacgaagatgttggcggtgttcagcggtcaggtggtggaggtgccggctgatctggtggcggcgggcagccggacgccgtcgcccaagacgaaggcgtcgcagctggtggggcgcttcctggccgcctccgagccggccgtgtccgtgcagctcggcgaccacggccatcctcgcctactccac

SEQ ID NO: 320752 - DNA, 148 bp, Zea mays
cgccggcctgacgacaacgatgcacacccgcgcactataccactacgctgactacctgatacagccataatgcaacacgttctccgaccagccatactactccgcttgtaacaagtagctctccatgctacaatccatcaaccaacac

SEQ ID NO: 320753 - DNA, 267 bp, Zea mays
cagaaacacaccaagcgaagcgcactagcaacgacctaacaacaatggctaccaagagattagccctccttgcgcttcttgccctttttgtgagcgcaacaaatgcgttcattattccacaatgctcacttgctcctagtgccattattccacagttcctcccaccagttacttcaatgggcttcgaacacctagctgtgcaagccaacatgcaacaacaagcgcttgcggcgagcgtcttacaacaaccaattgtcccaattgcaa

SEQ ID NO: 320754 - DNA, 273 bp, Zea mays
cacccgtgcgcccaggcaggcaggtcggcgattaggttaggaagaccgaagaccgagccgggggggggctcgggacgggaacgggacacgaccccaaaatctcagatccttcctgcccgcccgcccgtgcccgtcgacgcgtcgttcttgccggccgcgcctcacctccgccctctcctcctccagggggatcggatacgccacaggctgcgcgatggtgctgtgggtcttcggctacggctccctcatctggaaccccggcttcgacttcga

SEQ ID NO: 320755 - DNA, 419 bp, Zea mays
caagcggcagtgcgtagagaggatcgtccaacagaacagcatgaagatggtcatcgggctggtcgtgtgcctggctctgtcagctgccagcgcctctgcaatgcagatgccctgcccctgcgcggggctgcaaggcttgtacggcgctggcgccggcctgacgaccatgatgggcgccggcgggctgtacccctacgcggagtacctgaggcagccgcagtgcagcccgctggcggcggcgccctactacgcccggtgtgggcagccgagcgccatgttccagccgctccggcaacagtgctgccagcagcagatgaagatgatggacgtgcagtccgtcgcgcagcagctgcagatgatgatgcagcttgagcgtgccgctgccggcagcagcagcctgtacgagccagctctgatgc

SEQ ID NO: 320756 - DNA, 267 bp, Zea mays
gcacaatagtgtaccaacaatggcagccaaaatattttgcctccttatgctccttggtcttggctgcaagtgctgctacggcgaccattttcccgcaatgctcgcaagctcctatagcttcccttcttcccccgtacctctcaccagcggtgtcttcggtatgtgaaaacccaattcttcaaccctacaggatccaacaggcaatcgcagctggcatcttacctttatcacccttgttcctccaacaatcatcagctcctattacaa

SEQ ID NO: 320757 - DNA, 154 bp, Zea mays
acgcaaccaaatataccacatcaagtatttatttccaaaaaccatgaagctggtgctggtagggtcatactttcattgcttaagcttcttgctcttgctgcacgcatacataactctacaattttccctcatatgctcacaagctcctatagat

SEQ ID NO: 320758 - DNA, 391 bp, Zea mays
ctgctatcaatgctatcaatcatcatttattttagtagtataggcaccaaatcaagtgggggcatcaattatctaactccaaaaaccatgaagctggcgcttgtggttcttgctttcattgctttattatccattgtttattgtacacagtcaggcagctacaactgctattaccaccgctaccatcatccgtacatcgttcacaactcatgatacaacaaccaccaccactagcgataaccaacacttctgcatactctcaaccacacccaacaattagtttacatgcaatcacttaatcgtaatctgctacttgattgcaacgtccaccactaccatccctaccgctacatgatcactaacaacagcaactacttcacttacagcaact

SEQ ID NO: 320759 - DNA, 270 bp, Zea mays
gacccacaccacccatgcaccgaatcaagtacgacgcctattaatttacgcagaccgaacaccaaccccggggggggctaataacaggaacgggacaccaccccataatctcacatccttcctcaccacatcgcccgtaccattccacacatatctcttgccagacgcccctcacatccgcactctcctcctccagacccatcagatacacaacatgatccaccatgatgctgacaaatttctcatcccactccctcatctcgcacccca

SEQ ID NO: 320760 - DNA, 268 bp, Zea mays
attttgagcattcagaaacacaccaagcgaagcgcactagcaacgacctaacaacaggggctaccaagatattagccctccttgcgcttcttgccctttttgtgagcgcaacaaatgcgttcattattccacaatgctcacttgctcctagtgccattattccacagttcctcccaccagttacttcaatgggcttcgaacacctagctgtgcaagccaacatgcaacaacaagcgcttgcggcgagcgtcttacaacaaccaattgg

SEQ ID NO: 320761 - DNA, 262 bp, Zea mays
ggtctttctgcaagtgctgctaccgcatccattttcccacaatgctcacaagctcggatagcttcctttcttcccccatacctctcaccagcggtgtcttcagtatgtgaaaacccaattcttcaaccctacaggatccaacaggcaatcgcagcaggcatcttacctttatcacccttgttcctccaacaaccgtcagccctattacagcagttacctttggtgcatttgttggcacaaaacatcaaggcacaacaactac

SEQ ID NO: 320762 - DNA, 222 bp, Zea mays
tcgcgagctagacgctgctccctctggatttgtccgacactgccgacatgctggggtgggttgatgacgaggaggatgcctctgactatcggtgtgttgagtatgtgaaaaccttgttgttggatggtatcggatacaacgaggagggccagcaggcagtgcacctgtattacactatgacctagtacagcgagagctggacacgacagcgagcacgacaag

SEQ ID NO: 320763 - DNA, 263 bp, Zea mays
gcaacagcagatgcttacattcaaccaactagctgcattgaactctgcttgtgatctgcaacaacaacaactaccattcagccagctacctgctgcctacccccagcaatttcttccattcaaccaactggcagcattgaactctcctgcttatttacagcagcaacaactactaccattcagccagctagctggtgtgagccctgctaccttcttgatacaaccacagttgctgccgttctaccagcacgctgaagcctaac

SEQ ID NO: 320764 - DNA, 212 bp, Zea mays
gtcgcttgcagccgccgccgccgcgtttgcctcgcccagcgcagcagccggggtagcgacatcgctatctcgatctcagccatggcggaggtggagcagcatcaggacacgccgaagctgttcaaccgctggaccttcgatgatgtccaggtgaacgacatatcgctgaaagactacctcgttgtgaacgcgacgaagctcgcacagtacct

SEQ ID NO: 320765 - DNA, 266 bp, Zea mays
gggcacaacaactacaacaacttgtgctagcaaaccttgctgcatactctcagcaacgtcaggttcttccattcaaccaactggctgcattgaactctgctgcttatttgcaacaacaattaccattcagccagctagttgctgcctacccccagcaattacttccattcaaccaactagcatcattgaactctgctgcttatttacagcatcaacaactactaccattcagccagctagctgatgtgagccctgctgccttcttg

SEQ ID NO: 320766 - DNA, 243 bp, Zea mays
atcgataacagccgcctccatttagtttacctcgcacaccgcaccatccggggcagggcatctatctatggagctcagccatcacccaggtggatcatcaacacgacacgccgaaactgttcaaccgctggaccttatatgatgtacagaacaactacatctatctgaaccactacctacttctaaactcgaccaagcacgctacgtacctgccgcacaccttgttgcctcactaacagaagc

SEQ ID NO: 320767 - DNA, 258 bp, Zea mays
caactagcaacataaaaagcacaatactgtaccaacaatggcagccaaaatatgttcggctccttatgctccttggtctttctgcaagtgctgctactgcgaccattttaccgcaatgctcacatgctcctataacttcccttcttcccccgtacctctcaccagcggcgactacagtatgtgaaaacccaattcttcaaccatacaggatccaacaggcaatcacagcttgcatcttacctttatcacccttgttcc

SEQ ID NO: 320768 - DNA, 278 bp, Zea mays
gcgagcatcaacgcttcatatccatgtcaacctacatgtatctacatgtacactaactggtgactgcgcaacatctatcaactggctataatctacttcagtttgtattctatgctactgttcaacgccaccattttttgctcattacatcccattgctcctatatcatacccttctgcttatatacatcttcatcaatctcctactcaagtgtcctaaatacctacaacattcaaccgtatactctttgacaagcaatagctgcattgcaacttacc

SEQ ID NO: 320769 - DNA, 269 bp, Zea mays
cctgctgcttatttgcagcaacaactattaccattcagccagctagctactgcgctagtctcatcaacaacaagttcttccatttaaccaattggccgcactgaacctcgctgcttatttgcagcagcaaatattactaccatttagccagctagctgcagcaagccgtgcttccttcttgacacaacaacagttgctgcctttctaccaacaatttggggataaccccgcaaccctcttacaacttacctccattggtggcccttttt

SEQ ID NO: 320770 - DNA, 267 bp, Zea mays
attcagaaacacaccaagcgaagcgcactagcaacaacctaacaacaatggctaccaggatgttatccctccttgcgcttcttgcgctttttgcgagcgcaacaaatgcgtccattattccacaatgctcacttgctcctagttccattattccacagttcctcccaccagttacttcaatggccttcgaacacccagctgtgcaagcctataggctacaacaagcgattgcggcgagcgtcttacaacaaccaattgctccaattg

SEQ ID NO: 320771 - DNA, 332 bp, Zea mays
cgacctcacgcgtacgctctgctgcttatttacagcagcaacaactactaccattcagccagctagctgatgggagcgctgctgccttcttgacacaacaacagttgttgccattctacctgcacgctatgcctaacgctggcaccctcttacaactgcaacaattgctgccattcaaccaacttgctttgacaaacccaacagtgttctaccaacaacccatcattggtggtgccctcttttagattgcttatgagttatagttcaataatgaagttttttggatgatgtttgtggcgtcccagaaataagaaagtacatttctagattct

SEQ ID NO: 320772 - DNA, 268 bp, Zea mays
acgcatctgccacctacggttcacctgccacctccggtgcatctcccaccgccggtccagctgccgccgccggtccacctgccaccgccggtccatgtgccgtcgccggttcatctgccgacgacaccatgccactaccctactcaaccgccccggcctcagcctcatccccagccacacccatgcccgtgccaacagccgcatccaagcccgtgccagctgcagggaacctgcggcgttggcagcaccccgatcctgggccagtgcg

SEQ ID NO: 320773 - DNA, 264 bp, Zea mays
acaagctcctatagctgcccttcttcccccataccttccatcaatgaccgctttagtgtgtgaaaacccagcccttcaaccctacaggatccagcaagcaatcgcaacaagcaacttacctttatcacacctgttctttcaacaatcgccagccctatctttggtgcagtcattggtacaaaccatcagggcagaacagttgcagcaactcgtgctaccagtgatcagccaagtagctctggcaaacctttccccctactctca

SEQ ID NO: 320774 - DNA, 263 bp, Zea mays
acccatactctagtatatcttcccttattcttccattccttccatcaatcaccgctttagtgtaggataactcaaccattcaggcctacacaatccaccactcaatcacaacaatcaactcacctacattacacctcttcttttaacaatactcagacatatttttcttgcatatattcgtacaatccattactacataacacattcaacaactattactaccatttatcatccaactcattatcactaacctttaccctcta

SEQ ID NO: 320775 - DNA, 426 bp, Zea mays
gtgtcttgcattcaaccaactagctgcattgaactctgcttcttatttgcaacaacagcaacgaccattcagccagctacctgctgcctacccccagcaatttcttccattcaaccaactggcagcattgaactctcctgcttatttacagcagcaacaactactaccattcagccagctagctggtgtgagccctgctaccttcttgatacaaccacagttgttgccgttctaccagcacgctgcgcctaacgctggcaccctcttacaactgcaacaattgctgccattcaaccaacttgctttgacaaacccagcagcgttctaccaacaacccatcattggtggtgccctctcttagatttcttatgagttatagttcaataataaagttctttgtctgatgtttgtggcttcccagaaata

SEQ ID NO: 320776 - DNA, 388 bp, Zea mays
tcgagccacgcgtacgcacagttcctgccaccagttacttcaatgggcttcgaacacccagctgtgcaagcctgtaggctacaacaagcaattgcggcgagcgtcttacaacaaccaatttcccagttgcaacaacaatccttggcacatctaacaatacaaaccatcgcaacgcaacagcaacaacaattcctaccagcactgagccacctagccatggtgaaccctgccgactacttgcaacagcagttgcttgcatcaaacccacttgctctggcaaacgtagttgcaaaccagccacaacaacagctgcaacagtttctgccagcgctcagtcaactagccatggtgaaccctgccgtctacctacaacagcaacaactgcttt

SEQ ID NO: 320777 - DNA, 418 bp, Zea mays
ctgcattgaactctgcttcttatttgcaacaacaacaactaccattcagccaggtacctgttgcctacccccaacaatttcttccattcaaccaactggcagcattgaactctcctgcttatttacagcagcaacaactactaccattcagccagctagctggtgtgagccctgctaccttcttgacacaaccacagttgttgccgttctaccagcacgctgcgcctaacgctggcaccctcttacaactgcaacaattgctgccattcaaccaacttgctttgacaaacctagcagtgttctaccaacaacccatcattggtggtgccctcttttagatttcttatgagttatagttcaataataaagttttttgtctgatgtttgtggcttcccagaaataggaaagtacattttt

SEQ ID NO: 320778 - DNA, 408 bp, Zea mays
gcaacatagaaagtggaatccagtagcaacaatagagcaacaatggcgaccaagatactttccctccttatgctccttgctctttctgcatgtgttgctaacgcgacaattttccctcaatgctcacaagctcctatagcttcccttcttcccccataccttccatcaatgatagcttcagtatgtgaaaacccagctcttcaaccctataggctccaacaagcaatcgcagcaagcaacatacctttatcacccttgtttcaacaatcgccagccctatctttggtgcagtcattggtacaaaccatcaaggcacagcagctgcagcaactcgtgctacctgtgatcaaccaagtagctctggcaaacctttctccctactatcagcaacaacaatttcttgcattc

SEQ ID NO: 320779 - DNA, 411 bp, Zea mays
caatttcttccattcaaccaactgtctacactgaaccctgctgcttatttgcagcaagaactattaccatttagccagctagctactgcctactctcagcaacaacaacttcttccatttaaccaattggccgcactgaaccccgctgcttatttgcagcagcaaatactactgccatttagcgagctagctgcagcaagtcgtgcttccttcttgacacagcaacagttgctgcctttctacaagcagtttgcggctaaccccgcaaccctcttacaactacaacaattgttgccctttgtccaacttgctttgacaaacccagcagccttctaccaacaacacatcattggtggtgccctcttttagattgattattagttggaattcaataataaagttttttggatg

SEQ ID NO: 320780 - DNA, 432 bp, Zea mays
  unsure (1)..(432): unsure at all n locations
agcaacatagaaagtagaatccatgagcaacaatagagcaacaatggcgaccaagatggttgccctccttatgctccttgctctttctacatgtgttgctaacgcgacaattttccctcaatgctcacaagctcctatagcttcccttcttcccccataccttccatcaattatagcttcagtatgtgaaaacccagctcttcaaccatataggcttcaacaagcaatcgcagcaagcaacatacctttatcgcccttgttgtttcaacaatcaccagccctatctttggtgcagtcattggtacaaaccatcagggcacaacagctgcagcaactcgtgctacctgtgatcaaccaagtagctctggcaaacctttctccctactctcagcaacaacaatntcttccattcaaccaactgtctacactgaa

SEQ ID NO: 320781 - DNA, 387 bp, Zea mays
gcaacatagaagcacaatagtgtaccaacaatggcagccaaaatattttgcctccttaggctccttggtctttctgcaagtgctgctacggcgaccattttcccgcaatgctcgcaagctcctatagcttcccttcttcccccgtacctctcaccagcggtgtcttcggtatgtgaaaacccaattcttcaaccctacaggatccaacaggcaatcgcagctggcatcttacctttatcacccttgttcctccaacaatcatcagccctattacaacagttacctttggtgcatttattggcacaaaacatcagggcacaacaactacaacaacttgtgctagcaaaccttgctgcctactctcagcaacagcagtttcttccattc

SEQ ID NO: 320782 - DNA, 429 bp, Zea mays
gtgaaaacccagctcttcaaccctataggctccaacaagcaatcgcagcaagcggcatagctttatcacccttgtttcaacaatcgccagccctatctttggtgcagtcattggtacaaaccatcaaggcacagcagctgcagcaactcgtgctacctgtgatcaaccaagtagctctggcaaacctttctccctactatcagcaacaacaatttcttccattcaaccaactatctacactgaaccctgctgcttatttgcagcaacaactattaccattcagccagctagctactgcctactctcatcaacaacaacttcttccatttaaccaattggccgcactgaacctcgctgcttatttgcagcagcaaatattactaccatttagccagctagctgcagcaagccgtgcttccttcttgacac

SEQ ID NO: 320783 - DNA, 388 bp, Zea mays
gcaacatagaaagcacaatagtgtaccaacaatggcagccaaaatattttgcttcctgatgcgccttggtctttctgcaagtgttgctaccgcaaccattttcccacaatgctcacaagctcctatagcttcccttcttcccccatacctctcaccagcggtgtcttcaatgtgtgaaaccccaattgttcaaccctacaggatccaacaggcaatcgcaacaggcatcttaccattatcacccttgttcctccaacaaccgtcagccctattacagcagttacctttggtccatttggtggcacaaaacatcagggcacaacaactacaacaacttgtgctagcaaaccttgctgcatactctcagcaacatcagtttcttccattc

SEQ ID NO: 320784 - DNA, 422 bp, Zea mays
catcaaccatattattgagaccaacaagcaacatagaaagtggaatccagtagcaacgatagagcaacaatggcgaccaagatattttccctccttatgctccttgctctttctacatgtgttgctaacgcgacaattttccctcaatgctcacaagctcctatagcttcccttcttcccccataccttccatcaattatagcttcaatatgtgaaaacccagctcttcaaccatataggcttcaacaagcaatcgcagcaagcaacatacctttatcgcccttgttgtttcaacaatcgccagccctatctttggtgcagtcattggtacaaaccatcagggcacaacagctgcagcaactcgtgctacctctgatcaaccaagtagctcttgcaaacctttcttcctactctcagcaaca

SEQ ID NO: 320785 - DNA, 399 bp, Zea mays
cacaatagtgtaccaacaatggcagccaaaatattttgcctccttatgctccttggtctgtctggaagtgctgctacggcgaccattttcccgcaatgctcgcaagctcctatagcttcccttcttcccccgtacctctcaccagcggtgtcttcggtatgtgaaaacccaattcttcaaccctacaggatccaacaggcaatcacagctggcatcttacctttatcacccttgttccttcaacaatcatcagccctattacatcagttacctctggtgcatttattggcacaaaacatcagggcacaacatctacaacaacttgtgctagcaaaccttgctgcctactctcagcaacagcagtttcttccattcaaccaactagctgcattgaactct

SEQ ID NO: 320786 - DNA, 387 bp, Zea mays
gcattcagaaacacaccaagcgaagcgcactagcaacaacctaacaacaatggcgaccaggatattatccctccttgcgcttcttgcgctttttgcgagcgcaacaaatgcgtccattattccacaatgctcacttgctcctagttccattattccacagttgctcccaccagttacttaaatggccttcgaacacccagctgtgcaagcctataggctacaacaagcgattgcggcgagcgtcttacaacaaccaattgcccaattgcaacaacaatccttggcacatctaacaatacaaactattgcaacgcaacagcaacagcagttcctaccagcactgagccacctagccatggtgaaccctgtcgtctacttgcaacagca

SEQ ID NO: 320787 - DNA, 280 bp, Zea mays
acgaagacgcgtactatgccatccatcatgttcaaaatattcagcccaaatttcctcgcatgggtgccatgaagtgctgccacagtgaacttaatgccctcatgctctcacaactatatgcgttcactaattctcacagcccacttactacatcttgctctatgaacctgacaactcaaacattcaaacctacaggatccacaacaggatcatacctaacattctgctctacaacaagcctattgctcctaacctcatacaccttccgaatacagacacc

SEQ ID NO: 320788 - DNA, 418 bp, Zea mays
attgagaccagcaagcaacatagaaagtagaatccattagcaacaatagagcaacaatggcgacggagatattttccctccttatgctccttgctctttctacatgtgttgctaacgcgacaattttccctcaatgctcacaagctcctatagcttcccttcttcccccataccttccatcaattatagcttcagtatgtgaaaacccagctcttcaaccatataggcttcaacaagcaatcgcagcaagcaacatacctttatcgcccttgttgtttcaacaatcaccagccctatctttggtgcagtcattggtacaaaccatcagggcacaacagctgcagcaactcgtgctacctgtgatcaaccaagtagctctggcaaacctttctccctactctcagcaacaacaatttct

SEQ ID NO: 320789 - DNA, 394 bp, Zea mays
caactagcaacatagaaagcacaatagtgtaccaacaatggcagccaaaatattttagctccttatgctccttggtatttctgcaagtgctgctacggcgaccattttcccgcaatgctcacaagctcctatagcttcccttcttcccccgtacctctcaccagcggtgtcttcggtatgtgaaaacccaattcttcaaccctacaggatccaacaggcaatcgcagctggcatcttacctttatcacccttgttcctccaacaatcatcagccctattacagcagttacctttggtgcatttattggcacaaaacatcagggcacaacaactacaacaacttgtgctagcaaaccttgctgcctactctcagcaacagcagtttctttcattc

SEQ ID NO: 320790 - DNA, 53 bp, Zea mays
gagattattgaagctgatcttgtccttttagctttggtattcttggctcctga

SEQ ID NO: 320791 - DNA, 435 bp, Zea mays
acgcccacgcgtgcgcataaacacaccaagctaagcgcactagcaacgacctaacaacaatggctacggggatattagcccttcttgcgcttcttgccctttttgtgagcgcaacaaatgcgttcattattccacaatgcttacttgctcctagtgccattattccacagttcctcccaccatttacttcaatgggcttccaacacctagctgtgcaagccaacatgcaacaacaagcgcttgcggctagcgtcttacaacaaccaattgcccaattgcaacaacaatatttgccacatctaacaatacaatccattacaacgcaacagcagcaacagtttctaccagcactgagccacctagccatggtgaaccctgccgcctacttgcaagagcagctgcttgcatccaacccacttgctatggcgaacgtag

SEQ ID NO: 320792 - DNA, 443 bp, Zea mays
acgattgagaccagcaagcaacatagaaagtttaagctattagcaacaatagagcaacaatggcgacgaagatattttccgtccttatgctccttgctctttctacatgtgttgctaacgcgacaattttccctcaatgctcacaagctcctatagcttcccttcttcccccataccttccatcaattatagcttcagtatgtgaaaacccagctcttcaaccatataggcttcaacaagcaatcgcagcaagcaacatacctttatcgcccttgttgtttcaacaatcaccagccctatctttggtgcagtcattggtacaaaccatcagggcacaacagctgcagcaactcgtgctacctgtgatcaaccaagtagctctggcaaacctttctccctactctcagcaacaacaatgtcttccattcaaccaactgtctaca

SEQ ID NO: 320793 - DNA, 428 bp, Zea mays
cagaccattagctttatctactccagagcgcagaagaacccgatcgacaccagggggggggtgctcgttgccctcgctctcctggctctcgctgcgagcgccacctccacgcatacaagcggcggctgcggctgccagccaccgccgccggttcatctaccgccgccggtgcatctgccacctccggttcacctgccacctccggtgcatctcccaccgccggtccacctgccgccgccggtccacctgccaccgccggtccatgtgccgccgccggttcatctgccgccgccaccatgccactaccctactcaaccgccccggcctcagcctcatccccagccacacccatgcccgtgccaacagccgcatccaagcccgtgccagctgcagggaacctgcggcgttggcagcaccccgatcctggg

SEQ ID NO: 320794 - DNA, 412 bp, Zea mays
cccacgcgtgcgattcaaaaacacaccaagcgaagcgcactagcaacgacctaacaccggtggctaccaagatattagccctccttgcgcttcttgcccttttagtgagcgcaacaaatgcgttcattattccacagtgctcacttgctcctagtgccattattccacagttcctcccaccagttacttcaatgggcttcgaacatccagccgtgcaagcctacaggctacaactagcgcttgcggcgagcgccttacaacaaccaattgcccaattgcaacaacaatccttggcacatctaaccctacaaaccattgcaacgcaacaacaacaacaacaacagtttctgccatcactgagccacctagccgtggtgaaccctgtcacctacttgcaacagcagctgcttgc

SEQ ID NO: 320795 - DNA, 387 bp, Zea mays
tcgcagaaacacaccaagcgaagcgcactatcaacaacctaacaacaatggctaccaagggattatccctccttgcgcttcttgcgctttttgcgagcgcaacaaatgcgtccattattccacaatgctcacttgctcctagttccattattccacagttcctcccaccagttacttcaatggccttcgaacacccagctgtgcaagcctataggctacaacaagcgattgcggcgagcgtcttacaacaaccaattgcccaattgcaacaacaatccttggcacatctaacaatacaaaccatcgcaacgcaacagcaacaacagttcctaccagcactgagccacctagccatggtgaaccctgtcgcctacttgcaacagcagc

SEQ ID NO: 320796 - DNA, 464 bp, Zea mays
ggaattcccgggatagaaagcacaatagtgtaccaacaatggcagccaaaatattttgcttccttatgctccttggtctttctgcaagtgttgctaccgcaaccattttcccacaatgctcacaagctcctatagcttcccttcttcccccatacctctcaccagcggtgtcttcaatgtgtgaaaacccaattgttcaaccctacaggatccaacaggcaatcgcaacaggcatcttaccattatcacccttgttcctccaacaaccgtcagccctattacagcagttacctttggtccatttggtggcacaaaacatcagggcacaacaactacaacaacttgtgctagcaaaccttgctgcatactctcagcaacatcagtttcttccattcaaccaactggctgcattgaactctgctgcttatttgcaacaacaattaccattcagccagctagttgct

SEQ ID NO: 320797 - DNA, 431 bp, Zea mays
cccatacctctcaccagcggtgtcttcaatgtgtgaaaccccaattgttcaaccctacgggatccaacaggcaatcgcaacaggcatcttaccattatcacccttgttcctccaacaaccgtcagccctattacagcagttacctttggtccatttggtggcacaaaacatcagggcacaacaactacaacaacttgtgctagcaaaccttgctgcatactctcagcaacatcagtttcttccattcaaccaactggctgcattgaactctgctgcttatttgcaacaacaattaccattcagccagctagttgctgcctacccccagcaatttcttccattcaaccaactagcagcattgaactctgctgcttatttacagcagcaacaactactaccattcagccagctagctgatgtgacccctgctg

SEQ ID NO: 320798 - DNA, 440 bp, Zea mays
cagaaacacaccaagcgaagcgcactagcaacgacctaacaacaatggctaccaagatgtgagccgtccttgcgcttcttgccctttttgtgagcgcaacaaatgcgttcattattccacaatgctcacttgctcctagtgccattattccacagttcctcccaccagttacttcaatgggcttcgaacacctagctgtgcaagccaacatgcaacaacaagcgcttgcggcgagcgtcttacaacaaccaattgcccaattgcaacaacaatccttgccacatctaacaatacaagccatcacaacgcaacagcaacaacagttcctaccagcactgagccacctagccatggtgaaccctgccgcctacttgcaagagcagctgcttgcattcaacccacttgctctggcgaacgtagtttgcaaccagcaacaacaa

SEQ ID NO: 320799 - DNA, 437 bp, Zea mays
ccaacaagcaacatagaaagtggaatacagtagcatcaatagagcaacaatggcggccgggatagtttccatccttatgctccttgctctttctgcatgtgttgctaacgcgaccatttttcctcaatactcacaagctcctatagctgcccttcttaccccataccttccatcaatgaccgcttcagtttgtgaaaacccagcccttcaaccctacaggctccaacaagcaatcgcaacaagcaacttacctttatcacccctgttctttcaacaatcgccagccctatctttggtgcagtcattggtacaaaccatcagggcacaacagctgcaacaactcgtgctaccagtgatcagccaagtagctctggcaaaccttactgcctactctcagcatcaacaatttcttccattcaaccaactgtctacactga

SEQ ID NO: 320800 - DNA, 438 bp, Zea mays
caagcaacatagaaagtggaatccagtagcaacaatagagcaacaatggcgaccaagatgttttggctccttatgctccttgctctttctacatgtgttgctaacgcgacaattttccctcaatgctcacaagctcctatagcttcccttcttcccccataccttccatcaattatagcttcaatatgtgaaaacccagctcttcaaccatataggcttcaacaagcaatcgcagcaagcaacatacctttatcgcccttgttgtttcaacaatcgccagccctatctttggtgcagtcattggtacaaaccatcagggcacaacagctgcagcaactcgtgctacctctgatcaaccaagtagctctggcaaacctttctccctactctcagcaacaacaatttcttccattcaaccaactgtctacactgaaccct

SEQ ID NO: 320801 - DNA, 400 bp, Zea mays
ggacgtcagcctagcaattagctcatcgactccagattggagaactcgacaccatgaaggtgctgatcgttgcccttgctctcctggcgctcgctgcgagcgccgcctccagtacaagcggcggctgtggctgccagacaccaccgtttcatctaccgcctccgttctatatgccgcctccgttctatctgccgccgcagcagcagccgcagccatggcaataccccactcaaccaccgcagctaagcccgtgccagcagttcggatcctgcggcgtcggcagcgtcggcagcccgttcctgggccagtgcgtcgagttcctgaggcaccagtgcagcccggcggcgacgccctacggctcgtcacagtgccaggcgctgcagcagcagtgctgccacca

SEQ ID NO: 320802 - DNA, 440 bp, Zea mays
gacgccaacaagcgacatagaaagtggaatacattagcatcaatagagcaacaatggcagccaggatagtttccatccttatgctccttgctctttctgcatgtgttgctaacgcgaccatttttcctcaatactcacaagctcctatagctgcccttcttcctacataccttccatcaatgaccgcttcagtttgagaaaacccagcccttcaaccctacaggctccaacaagcaatcgcaacaagcaacttacctttatcacccctgttctttcaacaatcgccagccctatctttggtgcattcattggtacaaaccatcagggcacaacagctgcaacaactcgtgctaccagtgatcagccaagtagctctggcaaacctttctacttactctcagcaacaacaatttcttccattcaaccaactgtctacactg

SEQ ID NO: 320803 - DNA, 373 bp, Zea mays
  unsure (1)..(373): unsure at all n locations
gggtcttcagaccattagctttatctactccagagcgcagaagaacccgatcgacaccgtgagggtgttgctcgttgccctcgctctcctggctctcgctgcgagcgccacctccacgcatacaagcggcggctgcggctgccagccaccgccgccggttcatctaccgccgccggtgcatctgccacctccggttcacctgccacctccggtgcatctcccaccgccggtccacctgccgccgccggtccacctgccaccgccggtccatgtgccgccgccggttcatctgccgacgccaccatgccactaccctactcaaccgncccggcctcagcctcatccccagccacacccatgcccgtgccaacag

SEQ ID NO: 320804 - DNA, 385 bp, Zea mays
agaccaactagcaacatagaaagcacattagtgtaccatcaatggcaaccaaaatatggggcgtccttatgctccttggtctttctgcaagtgctgctaccgcgaccattttcccgcaatgctcacaagctactatagcttcccttcttaccccatacctctcaccatcggtgtcttcagtatgtgaaaacccaattcttcaaccctacaggatccaacatgcaatcgcagcaggcatcttacctttatcacccttgttcctccaacaaccgtcagccctattacagcagttaccttcggtgcatttgtcggcacaaaacatcagggcacatcaactacaacaacttgtgctagcaaaccttgctgcctactctcagcaacagca

SEQ ID NO: 320805 - DNA, 441 bp, Zea mays
acggaccaacaagcaacatagaaagtggaatacagtatcaaaaatagagcaacaatggcgggcgagagattttccatccttatgctccttgctctttctgcatgtgttgctaacgcgaccatttttcctcaatactcacaagctcctatagctgcccttcttcccccataccttccatcaatgaccgctttagtatgtgaaaacccagcccttcaaccctacaggatccagcaagcaatcgcaacaagcaacttacctttatcacacctgttctttcaacaatcgccagccctatctttggtgcagtcattggtacaaaccatcagggcagaacagttgcagcaactcgtgctaccagtgatcagccaagtagctctggcaaacctttccccctactctcagcaacaacaatttcttccattcaaccaactgtctatactg

SEQ ID NO: 320806 - DNA, 408 bp, Zea mays
  unsure (1)..(408): unsure at all n locations
tcgcagcttccaatgagattgaaggaggtctcagcgaccattcttgcanatgttgtggcagcnggtgcacgttntgagtccattccacttgatcataataggcagaccttggtgtctgaagacattgtacacaatctgcttcatctcataagcaacactggacctgcaattgagtgtaagttgctccaggttttcgttggtctaactgactcttcgacatctgtacaaaatatagttgatgctatcaaaagttcaggtgctattgtcagtttaattcagtttgttgaagcacctcaaagggaagtacgcatgaattccatcaagctcttgaataacatatcaccttatatgggtcaagaacttgctgatgcttttcgtggaaacttcagtcaactaagcagcttggtc

SEQ ID NO: 320807 - DNA, 308 bp, Zea mays
acggtaccatcaatcatcattcatcttagtagtataggcaccaaatcaaatctgcaacatcagttatgtaacttcaaaaaccatgaagctggtgcttgtggttctagctatcatagctttaatgttaagtgatgcttggacacacacagtcggcttcatcatgatgcaccatcatgaccatgcacagcagtatcaatcacctaacatgtgacacattaataactaccatggctatcacaactgcaattctacctgtagcaccatacgcaatatgaggactatatgcattcacatacacattagcttca

SEQ ID NO: 320808 - DNA, 433 bp, Zea mays
cccacgcgtccggcaacatagaaagcacaatagtgtaccaacaatggcagccagagataggttgcctccttatgctccttggtctttctgcaagtgctgctacggcgaccattttcccgcaatgctcgcaagctcctatagcttcccttcttcccccgtacctctcaccagcggtgtcttcggtatgtgaaaacccaattcttcaaccctacaggatccaacaggcaatcacagctggcatcttacctttatcacccttgttcctccaacaatcatcagccctattacatcagttacctttggtgcatttattggcacaaaacatcagggcacaacaactacaacaacttgtgctagcaaaccttgctgcctactctcagcaacagcagtttcttccattcaaccaactagctgcattgaactctgcttctta

SEQ ID NO: 320809 - DNA, 432 bp, Zea mays
acatagaaagtggaatacaggagcaaaaatagagcaacaatggcggccaggatagtttccatccttatgctccttgctctttctgcatgtgttgctaacgcgaccatttttcctcaatactcacaagctcctatagctgcccttcttcccccataccttccatcaatgaccgctttagtatgtgaaaacccagcccttcaaccctacaggatccagcaagcaatcgcaacaagcaacttacctttatcacacctgttctttcaacaatcgccagccctatctttggtgcagtcattggtacaaaccatcagggcagaacagttgcagcaactcgtgctaccagtgatcagccaagtagctctggcaaacctttccccctactctcagcaacaacaatttcttccattcaaccaactgtctatactgaaccct

SEQ ID NO: 320810 - DNA, 436 bp, Zea mays
atatcttggtagccattggtgttagccctccttgcgcttcttgcccttttagtgagcggggcaaatgcgttcattattccacagtgctcacttgctcctagtgccagtattccacagttcctcccaccagttacttcaatgggcttcgaacatccagccgtgcaagcctacaggctacaactagcgcttgcggcgagcgccttacaacaaccaattgcccaattgcaacaacaatccttggcacatctaaccctacaaaccattgcaacgcaacaacaacaacaacagtttctgccatcactgagccacctagccgtggtgaaccctgtcacctacttgcaacagcagctgcttgcatccaacccacttgctctggcgaacgtagctgcataccagcaacaacaacagctgcaacagtttatgccagtgctcagtc

SEQ ID NO: 320811 - DNA, 378 bp, Zea mays
acgattcagccagctacctgctgcctacccatagcaatttcttccattcaaccaactagcaggattgggctctcctgcttatttacagcatcaacaactactaccattcagccagctagctggtgtgagccctgctaccttcttgacacaaccacagttgttgccgttctaccagcacgttgcgcctaacgctggcaccctcttacaactgcaacaattgctgccattcaaccaacttgctttgacaaacccagcagtgttctaccaacaacccatcattggtggtgccctcttttagatttcttatgagttatagttcaataatcaagtgctttatctgatgtttgtggcttcccagaaataagaaagtacatttct

SEQ ID NO: 320812 - DNA, 400 bp, Zea mays
cgtcagcctagcaattagctcatcgactccagattggagaactcgacaccatgaaggtgctgatcgttgcccttgctctcctggcgctcgctgcgagcgccgcctccagtacaagcggcggctgtggctgccagacaccaccgtttcatctaccgcctccgttctatatgccgcctccgatctatctgccgccgcagcagcagccgcagccatggcaataccccactcaaccaccgcagctaagcccgtgccagcagttcggatcctgcggcgtcggcagcgtctgcagcccgttcctgggccagtgcgtcgagttcctgaggcaccagtgcagcccggcggcgacgccctacggctcgccacagtgccaggcgctgcagcagcagtgctgccaccagat

SEQ ID NO: 320813 - DNA, 399 bp, Zea mays
tcgcggacgcgtgggtttcagcattcaaaaacacaccaagcgaagcgcactagcaacgacctgagcaccaatggctaccaagatattagccctccttgcgctgcttgcccttttagtgagcgcaacaaatgcgttcattattccacagtgctcacttgctcctagtgccattattccacagttcctcccaccagttactttaatgggcttcgaacatccagccgtgcaagcctacaggctacaactagcgcttgcggcgagcgccttacaacaaccaattgcccaattgcaacaacaatccttggcacatgtaaccctacaaaccattgcaacgcaacaacaacaacaacaacagtttatgccatcactgagccacctagccgaggtgaaccctgtcac

SEQ ID NO: 320814 - DNA, 452 bp, Zea mays
caactagcaacatagaaagcacaatagtgtaccaacaatggcagctaaaatattttgcctccttatgctccttggtctttctgcaagtgctgctacggcgaccattttcccacaatgctcacaagctcctatagcttcccttcttcccccgtacctctcaccaacggtgtcttcggtatgtgaaaacccaattcttcaaccctacaggatccaacaggcaatcgcagctggcatcttacctttatcacccttgttcctccaacaatcatcagccctattacagcagttacctttggtgcatttattggcacaaaacatcagggcacaacaactacaacaacttgtgctagcaaaccttgctgcctactctcagcaacagcagtttcttccattcaaccaactagctgcattgaactctgcttcttatttgcaacaacaacaactaccattca

SEQ ID NO: 320815 - DNA, 316 bp, Zea mays
gatgaaggctgtgttgagaagcctgaacgtgaaaatatgtcccctagcacaagcgggggaggccgccaacaaatcattttttataatgctccaacataccttgtaaaaccgacctgtgaaaccattcgggccaggtgctttgtcaaggggtaagtcattaactgctgctcataattcctcttctgtgaatgggttgtccaggctggccaaatcatgctgttgcataccaatctcactaagattttttttcgaacacgcaggagagctgcgtatcattgaattaagaaaaggagggtctaaaaaatagatcgaatac

SEQ ID NO: 320816 - DNA, 451 bp, Zea mays
attgagaccaactagcaacatagaaagcacaatagtgtaccaacaatggcagccaaaatattttgcctgcttatgctccttggtctttctgcaagtgctgctacggcgaccattttcccgcaatgctcgcaagctcctatagcttcccttcttcccccgtacctctcaccagcggtgtcttcggtatgtgaaaacccaattcttcaaccctacaggatccaacaggcaatcacagctggcatcttacctttatcacccttgttcctccaacaatcatcagccctattacatcagttacctttggtgcatttattggcacaaaacatcagggcacaacaactacaacaacttgtgctagcaaaccttgctgcctactctcagcaacagcagtttcttccattcaaccaactagctgcattgaactctgcttcttatttgcaacaacaacaac

SEQ ID NO: 320817 - DNA, 335 bp, Zea mays
taaggaatctaaatataaagcattatgttttcattgcctatgtcaatgaacgggtggggagctaattgcatactagctgatgcccctaaagctcaagcacatgccagcaatcattagacagaacaacgaaaagtatactaagccacttctagacactgtctcatctcaatcatcagcagcatattgaccacaaatatctgaagagccacgtgcttgccagtctgcataggagaagcatatgtgaaataacgatctgacttatctaatcgactcacagctacagaagcatcatgatccaccatatcaccacatatccttaaagaacgctagatatc

SEQ ID NO: 320818 - DNA, 389 bp, Zea mays
gaccaactagcaacatagaaagcacaatagtgtaccaacaatggcagccaaaatatggtgcttccttatgctccttggtctttctgcaagtgctgctaccgcaaccattttcccacaatgctcacaagctcctatagcttcctttcttcccccatacctctcaccagcggtgtcttcagtatgtgaaaacccaattcttcaaccctacaggatccaacaggcaatcgcagcaggcatcttacctttatcacccttgttcctccaacaaccgtcagccctattacagcagttacctttggtgcatttgttggcacaaaacatcaaggcacaacaactacaacaacttgtgctaggaaaccttgctgcctactctcagcaacagcaagttc

SEQ ID NO: 320819 - DNA, 56 bp, Zea mays
aataaagttcaagctgattgcgaacctctagttaaaggtttagagctctatattat

SEQ ID NO: 320820 - DNA, 365 bp, Zea mays
tatgctccttgctctttctgcatgtgttgctaacgcgacaattttccctcaatgctcacaagctcctatagcttcccttcttcccccataccttccatcaatgatagcttcagtatgtgaaaacccagctcttcaaccctataggctccaacaagcaatcgcagcaagcaacatacctttatcacccttgtttcaacaatcgccagccctatctttggtgcagtcattggtacaaaccatcaaggcacagcagctgcagcaactcgtgctacctgtgatcaaccaagtagctctggcaaacctttctccctactatcagcaacaacaatttcttccattcaaccaactatctacactgaaccctg

SEQ ID NO: 320821 - DNA, 167 bp, Zea mays
gccgtgtgtgcctgtcagaattcctaagaattcttaggcattgtttgaaagggctgggacttttttttctgaaagcaccttgccgtgaagcttttagaacatctctaacaggagagatgtatagaactctagcgcaaaaaattgcttcaacgagagttctattttac

SEQ ID NO: 320822 - DNA, 435 bp, Zea mays
caacaacttgtgctagcaaaccttgctgcctactctcagcaacagcagtttcttccatgcaaccgactagctgcattgaactctgcttcttatttgcaacaacaacaactaccattcagccagctatctgctgcctacccccagcaatttcttccattcaaccaactgacagcattgaactctcctgcttatttacagcagcaacaactactaccattcagccagctagctggtgtgagccctgctaccttcttgacacaaccacagttgttgccgttctaccagcacgctgcgcctaacgctggcaccctcttacaactgcaacaattgctgccattcaaccaacttgctttgacaaacccagcagcattctaccaacaacccatcattggtggtgccctcttttagatttcttatgagttatagttcaataat

SEQ ID NO: 320823 - DNA, 395 bp, Zea mays
tccacgcgtccgcagaaacacacctagcgaagcgcactagcaacgacctaacaacaatggctaccaagatattatccctctttgcgcttcttgccctttttgtgagcgcaacaaatgcgttcattattccacaatgctcacttgctcctagtgccattattccacagttcctccctccagttacttcaatgggcttcgaacacccagctgtgcaagcctacaggctacaacaagcgcttgctgcgagcgtcttacaacaaccaattgcccaattacaacaacaatccttggcacatctaaccatacaaaccatcgcaacgcatcagcaacaacaatttctaccagcactgagccaactagctgtggtgaaccctgtcgcctacttgcaacagcag

SEQ ID NO: 320824 - DNA, 407 bp, Zea mays
gcagctagctgactgaatggtagttgttgcctacccccagcaatttcttccattcaacggactggcagcattgaactctgctgcttatttacaacagcaacagctaccaccattcagccagctagctgatgtgagccctgttgccttcttgacacaacaacagttgttgccgttctacctgcacgctgcgcctaacgctggcaccctcttacaactgcaacaattgctgccattcaaccaacttgctttgacaaacccaacagcgttctaccaacaacccatcattggtggtgccctcttttagattgcttatgagttatacttcaataatgaagttttttggatgatgtttgtggcttcccagaaataagatagtacatttctagattcttaaaagatagaataaa

SEQ ID NO: 320825 - DNA, 417 bp, Zea mays
caacaagcaacatagaaagtggaatccagtagcaacaatagagcaacaatggcgaccgagatattttccctccttatgctccttgctctttctacatgtgttgctaacgcgacaattttccctcaatgctcacaagctcctatagcttcccttcttcccccataccttccatcaattatagcttcaatatgtgaaaacccagctcttcaaccatataggcttcaacaagcaatcgcagcaagcaacatacctttatcgcccttgttgtttcaacaatcgccagccctatctttggtgcagtcattggtacaaaccatcagggcacaacagctgcagcaactcgtgctacctctgatcaaccaagtagctctggcaaacctttctccctactctcagcaacaacaatttcttccattc

SEQ ID NO: 320826 - DNA, 438 bp, Zea mays
caacaagcaacatagaaagtggaatccagtagcaacaatagagcaacaatggcgaccaagatacgttccctccttatgctccttgctctttctgcatgtgttgctaacgcgacaattttccctcaatgctcacaagctcctatagcttcccttcttcccccataccttccatcaatgatagcttcagtatgtgaaaacccagctcttcaaccctataggctccaacaagcaatcgcagcaagcaacatacctttatcacccttgtttcaacaatcgccagccctatctttggtgcagtcattggtacaaaccatcaaggcacagcagctgcagcaactcgtgctacctgtgatcaaccaagtagctctggcaaacctttctccctactatcagcaacaacaatttcttccattcaaccaactatctacactgaaccct

SEQ ID NO: 320827 - DNA, 426 bp, Zea mays
ccttcttcccccgtacctctcaccagcggtgtcttcggtatgtgaaaacccggttctgcaaccctacaggatccaacaggcaatcgcagctggcatcttacctttatcacccttgttcctccaacaatcatcagccctattacaacagttacctttggtgcatttattggcacaaaacatcagggcacaacaactacaacaacttgtgctagcaaaccttgctgcctactctcagcaacagcagtttcttccattcaaccaactaggttcattgaactctgcttcttatttgcaacaacaacaactaccattcagccagctacctgctgcctacccccagcaatttcttccattcaaccaactagcagcattgaactctcctgcttatttacagcagcaacaactactaccattcagccagctagc

SEQ ID NO: 320828 - DNA, 375 bp, Zea mays
gtttcttccattcaaccaactggctgcattgaactctgctgcttatttgcagcgaacaactaccattcagtcagctagctgctgcctacccccagcaatttcttccattcaaccaactggcagcattgaactctgctgcttatttacaacagcaacagctaccaccattcagccagctagctgatgtgagccctgttgccttcttgacacaacaacagttgttgccgttctacctgcacgctgcgcctaacgctggcaccctcttacaactgcaacaattgctgccattcaaccaacttgctttgacaaacccaacagcgttctaccaacaacccatcattggtggtgccctcttttagattgcttatgagttat

SEQ ID NO: 320829 - DNA, 433 bp, Zea mays
aaagcacaatagtgtaccaccattggcagtcaaaatattttgcctgcttatgctccttggtctggctgcaagtgctgctactgcgaccattttcccgcaatgctcgcaagctcctatagcttcccttcttcccccgtacctctcaccagcggtgtcttcggtatgtgaaaacccaattcttcaaccctacaggatccaacaggcaatcacagctggcatcttacctttatcacccttgttcctccaacaatcatcagccctattacatcagttacctttggtgcatttattggcacaaaacatcagggcacaacaactacaacaacttgtgctagcaaaccttgctgcctactctcagcaacagcagtttcttccattcaaccaactagctgcattgaactctgcttcttatttgcaacaacaacaactacca

SEQ ID NO: 320830 - DNA, 434 bp, Zea mays
gcaacatagaaagcacaatagtgtaccaacaatggcagccaaaatattttgcctccttgtgctccttggtctttctgcaagtgctgctacggcgaccattttcccacaatgctcacaagctcctatagcttcccttcttcccccgtacctctcaccagcggtgtcttcggtatgtgaaaacccaattcttcaaccctataggatccaacaggcaatcgcagctggcatcttacctttatcacccttgttcctccaacaatcatcagccctattacagcagttacctttggtgcatttattggcacaaaacatcagggcacatcaactacaacaacttgtgctagcaaaccttgctgcctactctcagcaacaacagtttcttccattcaaccaactagctgcattgaactctgcttcttatttgcaacaacaac

SEQ ID NO: 320831 - DNA, 433 bp, Zea mays
cccacgcgtccggttcattattccacaatgctcacttgctccaagttccattgttacggagttcctcccaccagttacttcaatgggcttcgaacacccagctgtgcaagcctataggctacaacaagcaattgcggcgagcgtcttacaacaaccaatttcccagttgcaacaacaatccttggcacatctaacaatacaaaccatcgcaacgcaacagcaacaacaattcctaccagcactgagccacctagccatggtgaaccctgccgtctacttgcaacagcagttgcttgcatcaaacccacttgctctggcaaacgtagttgcaaaccagccacatcaacagctgcaacagtttctgccagcgctcagtcaactagccatggtgaaccctgccgcctacctactacagcatcaactgctttcatct

SEQ ID NO: 320832 - DNA, 394 bp, Zea mays
gcggcggctgcggctgccagccaccgttcgccggttcatctaccgccgccggtgcatgtgccacctccggttcacctgccacctccggtgcatctcccaccgccggtccacctgccgccgccggtccacctgccaccgccggtccatgtgccgccgccggttcatctgccgccgccaccatgccactaccctactcaaccgccccggcctcagcctcatccccagccacacccatgcccgtgccaacagccgcatccaagcccgtgccagctgcagggaacctgcggcgttggcagcaccccgatcctgggccagtgcgtcgagtttctgaggcatcagtgcagcccgactgcgacgccctactgctcgcctcagtgccagtcgttgcggcagc

SEQ ID NO: 320833 - DNA, 416 bp, Zea mays
cttcaatgggcttcgaacatccagcctttcaagcctacaggctacaactagcgcttgcggcgagcgccttacaacaaccaattgcccaattgcaacaacaatccttggcacatctaaccctacaaaccattgcaacgcaacaacaacaacaacaacagtttctgccatcactgagccacctagccgtggtgaaccctgtcacctacttgcaacagcagctgcttgcatccaacccacttgctctggcgaacgtagctgcataccagcaacaacaacagctgcaacagtttatgccagtgctcagtcaactagccatggtgaaccctgccgtctacctacaactactttcatctagcccgctcgcggtgggcaatgcacctacgtaccttacacaacagttgctgcaacaaattgta

SEQ ID NO: 320834 - DNA, 395 bp, Zea mays
atgagctttatctactccagagcgcataagaacccgatcgacaccatgagggtgttgctcgttgccctcgctctcctggctctcgttgcgagcgccacctccacgcatacaagcggcggctgcggctgccagccaccgccgccggttcatctaccgccgccggtgcatctgccacctccggttcacctgccacctccggtgcatctcccaccgccggtccacctgccgccgccggtccacctgccaccgccggtccatgtgccgccgccggttcatctgccgccgccaccatgccactaccctactcaaccgccccggcctcagcctcatccccagccacacccatgcccgtgccaacagccgcatccaagcccgtgccagctgcagggaacctg

SEQ ID NO: 320835 - DNA, 340 bp, Zea mays
gttggcttctcctccccctccggttcgggttcgggttcgtgaggttctccggggttcggtttcgtgggtgagcggatcgagatggcggcgtcggatgttgagtaccgctgcttcgtcggcggcctcgcctgggccacggacgaccactccctccacaacgccttcagcacctacggcgaggtcctcgagtccaagatcatcctcgatcgggagacgcagaggtcccgcggcttcggcttcgtcaccttctccacggaggaggcgatgcggaacgccatcgagggcatgaacggcaaggagctggacggccgcaacatcaccgtcaacgaggcccagtccc

SEQ ID NO: 320836 - DNA, 416 bp, Zea mays
gctgcattgaactctgctgcttatttgcaacaacaactaccattcagtcagctagctgctgcctacccccagcaatttcttccattcaaccaactggcagcattgaactctgctgcttatttacaacagcaacagctaccaccattcagccagctagctgatgtgagccctgttgccttcttgacacaacaacagttgttgccgttctacctgcacgctgcgcctaacgctggcaccctcttacaactgcaacaattgctgccattcaaccaacttgctttgacaaacccaacagcgttctaccaacaacccatcattggtggtgccctcttttagattgcttatgagttatacttcaataatgaagttttttggatgatgtttgtggcttcccagaaataagaaagtacatttct

SEQ ID NO: 320837 - DNA, 396 bp, Zea mays
aaaacacaccaagcgaagcgcactatctacgacctaacaccaatggctaccaagatattagccctccttgcgcttcttgcccttttagtgagcgcaacaaatgcgttcattattccacagtgctcacttgctcctagtgccattattccacagttcctcccaccagttacttcaatgggcttcgaacatccagccgtgcaagcctacaggctacaactagcgcttgcggcgagcgccttacaacaaccaattgcccaattgcaacaacaatccttggcacatctaaccctacaaaccattgcaacgcatcaacaacaacaacaacagtttctgccatcactgagccacctagccgtggtgaaccctgtcacctacttgcaacagcagctgcttgca

SEQ ID NO: 320838 - DNA, 269 bp, Zea mays
aatcctttacaacaaacaactccacataaactctactcttattacaacagctaccctaccaccattcaacacctacccatttcaccactaaccttcttaacacaacaacaactttctcactctatcttaaccctcctcctaactctgtctccctattacatctacatcaactacttccacacaaccaactcgcttttacaaaccaaacaactttctaccaacaacccatcattcttcctgccctactttatactgctcaacatttatac

SEQ ID NO: 320839 - DNA, 414 bp, Zea mays
cccaattgttcaaccctacaggatccaacaggcaatcgcaacaggcatcttaccatgatcacccttgttcctccaacaaccgtcagccctattacagcagttacctttggtccatttggtggcacaaaacatcagggcacaacaactacaacaacttgtgctagcaaaccttgctgcatactctcagcaacatcagtttcttccattcaaccaactggctgcattgaactctgctgcttatttgcaacaacaattaccattcagccagctagttgctgcctacccccagcaatttcttccattcaaccaactagcagcattgaactctgctgcttatttacagcagcaacaactactaccattcagccagctagctgatgtgagccctgctgccttcttgacacaacaacagtt

SEQ ID NO: 320840 - DNA, 387 bp, Zea mays
gcaacatagaaagtggaatccagtagctacaatagagcaacaatggctaccaagatgggtttccctccttatgctccttgctctttctacatgtgttgctaacgcgacaattttacctcaatgctcacaagctcctatagcttcccttcttcccccataccttccatcaattatagcttcaatatgtgaaaacccagctcttcaaccatataggcttcaacaagcaatcgcagcatgcaacatacctttatcgcccttgttgtttcaacaatcgccagccctatctttggtgcagtcattggtacaaaccatcagggcacatcagctgcagcaactcgtgctacctctgatcaaccaagtagctctggcataaccttcttcctactc

SEQ ID NO: 320841 - DNA, 418 bp, Zea mays
tgacaagccacatattaagcggtacaggatccaaccggcagtcgaacaatgcatctcaggattggcaccattgttacgttaacaggtataagtgctagtgcagctgacacgaccgttgcatgtaatgactcacaacatcatatcgctgcacctactacaacatgcgctagataaccgagcggtctactctgagaaaccgcagtcatttaaggcgacaggctccgaccagaacatgcaggaagaacatctcctacatcacccgcgatctatcaacgatggctactcttatcttcagcacagtcagtgattcaaccaattaggtgacttcaactgtaacgattattggtagcagcgaccactactaccattctggcagatagctgttgctaatctcaggaactaccttgcattcaatcaa

SEQ ID NO: 320842 - DNA, 433 bp, Zea mays
ctagcaacatagaaagcacaatagtgtaccaacaatggcagccaaaatattttgcctggttatgctccttggtctttctgcaagtgctgctacggcgaccattttcccgcaatgctcgcaagctcctatagcttcccttcttcccccgtacctctcaccagcggtgtcttcggtatgtgaaaacccaattcttcaaccctacaggatccaacaggcaatcgcagctggcatcttacctttatcacccttgttcctccaacaatcatcagccctattacaacagttacctttggtgcatttattggcacaaaacatcagggcacatcatctacaacaacttgtgctagcaaaccttgctgcctactctcagcaacagcagtttcttgcattcaaccaactaggttcattgaactctgcttattatttgcaacaa

SEQ ID NO: 320843 - DNA, 433 bp, Zea mays
tcaactagcatcatataaagcacaatagtgtaccaacaatggcagccaaaatattttggtgtccttatgctccttggtctttctgcaagtgttgctaccgcaaccattttcccacaatgctcacaagctcctatagcttcccttcttcccccatacctctcaccagcggtgtcttcaatgtgtgaaaccccaattgttcaaccctacaggatccaacaggcaatcgcaacaggcatcttaccattatcacccttgttcctccaacaaccgtcagccctattacagcagttacctttggtccatttggtggcacaaaacatcaggtcacaacaactacaacaacttgtgctagcaaaccttgctgcatactctcagcaacatcagtttctttcattcaaccaactggctgcattgaactctgctgcttatttgc

SEQ ID NO: 320844 - DNA, 409 bp, Zea mays
tcttcctcagctagcaacatataaagcacaatattttaccaacaatggcagccataatatggtaggttccttatgctccttggtctttctgcaagtgttgctaccgcaaccattttcccacaatgctcacaagctcctatagcttcccttcttcccccatacctatcaccagcggtgtcttcaatgtgtgaaaccccaattgttcaaccctacaggatccaacagtcaatcgcaacaggcatcttaccattatcacccttgttcctccaacaaccgtcagccctattacagcagttaccttcggtccatttggtggcacaaaacatcagggcacaacaactacaacaactggtgctagcaaaccttgctgaatactctcagcaacatcagtttcttccattcaaccaac

SEQ ID NO: 320845 - DNA, 388 bp, Zea mays
gcaacatagaaagcacaatagtgtacctacaatggcagctaaaatattttgcctccgtatgctccttggtctttctgcaagtgctgctacggcgaccattttcccacaatgctcacaagctcctatagcttcccttcttcccccgtacctctcaccaacggtgtcttcggtatgtgaaaacccaattcttcaaccctacaggatccaacaggcaatcgcagctggcatcttacctttatcacccttgttcctccaacaatcatcagccctattacagcagttacctttggtgcatttattggcacaaaacatcagggcacatcaactacaacaacttgtgctagcaaaccttgctgcctactctcagcaacagcagtttcttccattc

SEQ ID NO: 320846 - DNA, 400 bp, Zea mays
gcaacatagaaagcacaatagtgttccaacaatggcagctaaaatattttgcctcgttatgctccttggtctttctgcaagtgctgctacggcgaccattttcccacaatgctcacaagctcctatagcttcccttcttcccccgtacctctcaccaacggtgtcttcggtatgtgaaaacccaattcttcaaccctacaggatccaacaggcaatcgcagctggcatcttacctttatcacccttgttcctccaacaatcatcagccctattacagcagttacctttggtgcatttattggcacaaaacatcagggcacaacaactacaacaacttgtgctagcaaaccttgctgcctactctcagcaacagcaagttcttccattcaaccaactagct

SEQ ID NO: 320847 - DNA, 393 bp, Zea mays
ttgaaaaacacaccatgcgaagcgctctagcaacgacctaacaccaatggctaccaagatattagccctccttgcgcttcttgcccttttagtgagcgcaacaaatgcgttcattattccacagtgctcacttgctcctagtgccattattccacagttcctgccaccagttacttcaatgggcttcgaacatccagccgtgcaagcctacaggctacaactagcgcttgcggcgagcgccttacatcaaccaattgcccaattgcaacaacaatccttggcacatctaaccctactaaccattgcaacgcaacaactacaacaacaacagtttctgccatcactgagccacctagccgtggtgaaccctgtcacctacttgcaacagcagct

SEQ ID NO: 320848 - DNA, 434 bp, Zea mays
aacaagcaacatagaaagtggaatccagtagcatcaatagagcaacaatggcgaccaagatatggtccctccttatgctccttgctctttctacatgtgttgctaacgcgacaattttccctcaatgctcacaagctcctatagcttcccttcttcccccataccttccatcaattatagcttcaatatgtgaaaacccagctcttcaaccatataggcttcaacaagcaatcgcagcaagcaacatacctttatcgcccttgttgtttcaacaatcgccagccctatctttggtgcagtcattggtacaaaccatcagggcacaacagctgcagcaactcgtgctacctctgatcaaccaagtagctctggcaaacctttctccctactctcagcaacaacaatttcttccattcaaccaactgtctacactg

SEQ ID NO: 320849 - DNA, 429 bp, Zea mays
ttgagcattcataaacacaccaagcgaagcgcactatcatcgactctaacaacaatggctaccaagatattagcgctccttgcgcttcttgccctttttgtgagcgcaacaaatgcgttcattattccacaatgctcacttgctcctagtgccattattccacagttccttccaccagttacttcaatgggcttcgaacacctagctatgcaagccaacatgcaacaacaagcgcttgcggcgagcgtcttacaacaaccaattgcccaattgcaacaacaatccttgccacatctaacaatacaagccatcacaacgcaacagcaacaactgttcctaccagcactgaaccacctagccatggtgaaccctgccgtctacttgcaagagcatctgcttgcattcaacccacttgctctggcgaacgta

SEQ ID NO: 320850 - DNA, 426 bp, Zea mays
gcaacatagaaagcacaatagtgtacctacaatggcagccaaaatattttgcctccttatgctccttggtatttctgcaagtgctgctacggcgaccattttcccgcaatgctcacaagctcctatagcttcccttcttcccccgtacctctcaccagcggtgtcttcggtatgtgaaaacccaattcttcaaccctacaggatccaacaggcaatcgcagctggcatcttacctttatcacccttgttcctccaacaatcatcagccctattacagcagttacctttggtgcatttattggcacaaaacatcagggcacaacaactacaacaacttgtgctagcaaaccttgctgcctactctcagcaacagcagtttcttccattcaaccaactagctgcattgaactctgcttcttatttgca

SEQ ID NO: 320851 - DNA, 417 bp, Zea mays
gtccgtgagcataaaaagctcaatagtgtactttcaatggcagccaaaatattttggctccgtatgctcctaggtatttctgcaagtgctgctacagcgaccattttaccgcaatgctcacaagctcctatagcttcccttcttaccccgtacctctcaccagcggtgtcttcggtatgtgaaaacccaattcttcaaccctacaggatccaacaggcaatcgcagctggcatcttacctttatcacccttgctcctccaacaatcatcagccctattacagcagttacctttggtgcatttattggcacaaaacatcagggcacaacaactacaacaacttgtgctagcaaaccttgctgcctactctcaacaacagcaagttcttccattcaaccaactagcttcattgaactct

SEQ ID NO: 320852 - DNA, 439 bp, Zea mays
gaccaactagcaacatagaaagcacaatagtgtaccaacaatggcagccaaaatattttgcctgcttatgctccttggtctttctgcaagtgctgctacggcgaccattttcccgcaatgctcgcaagctcctatagcttcccttcttcccccgtacctctcaccagcggtgtcttcggtatgtgaaaacccaattcttcaaccctacaggatccaacaggcaatcgcagctggcatcttacctttatcacccttgttccttcaacaatcatcagccctattacaacagttacctttggtgcatttattggcacaaaacatcatggcacaacaactacaacaacttgtgctagcaaaccttgctgcctactctcagcaacagcagtttcttccattcaaccaactaggttcattgaactctgcttcttatttgcaacaa

SEQ ID NO: 320853 - DNA, 436 bp, Zea mays
tccggttcggggttcgagggtcgcgccacgcgtccgactcgcgtgccgttgaactctgttcgttattgtagcacctactgctaccacggatcgagttacatgctgcctaggttcaggatcggctgccatggaaccaactggtggcacagatcgtctctgatgatgtacaggcggagcagctagtatcattcaaccagctatctgacgtgagcgctgttaccttgttgatccagccacacgtggtgccgttctaccagctcgctgaggctaacacttgctacaatcttacaactgacacaattgttgccagtctaccaactcgctatgactaactcagcaacgtgctagctactgcccatcatgggtggtgccacatgttagacctcttaggagttgtagttgagtatgcaagtttattgtcagatgatcgtggctc

SEQ ID NO: 320854 - DNA, 297 bp, Zea mays
tttacagcagcatcatctactaccattcatccagctagctggtgtgagccctgctaccgtcttgatacaaccacagttgttgccgttctaccagcacgctgcgcctaacgctggcaccctcttacaactgcaacaattgctgccattcaaccaacttgctttgacaaacccagcagcgttctaccaacaacccatcattggtggtgccctcttttagatttcttatgagttatagttcaataataaagttttttgtctgatgtttgtggcttcccagaaataagaaagtacatttct

SEQ ID NO: 320855 - DNA, 117 bp, Zea mays
acattttaaaaagtcatcgctggcctttaccatctaatacatcatgctgacgatcgcgcactttaacaaccatactaggattatctgagcaagtacactatcgctactgcgggctgc

SEQ ID NO: 320856 - DNA, 91 bp, Zea mays
gacccacgcgtccggtcgaacggtagtagtattcgagccagctttctacaacaagcccagctttattcgtgagagaacatcatgtgcttac

SEQ ID NO: 320857 - DNA, 421 bp, Zea mays
ctctcaccagcggtgtcttcagtatgtgtaaacccaattcttcaaccctacaggatccaacaggcaatcgcagcaggcatcttacctttatcacccttgttcctccaacaaccgtcagccctattacagcagttacctttggtgcatttgttggcacaaaacatcaaggcacaacaactacaacaacttgtgctaggaaaccttgctgcctactctcagcaacagcagtttcttacattcaaccaactggctgcattgaactctgctgcttatttgcaacaacaactaccattcagtcagctagctgctgcctacccccagcaatttcttccattcaaccaactggcagcattgaactctgctgcttatttacaacagcaacagctaccaccattcagccagctagctgatgtgagccctg

SEQ ID NO: 320858 - DNA, 310 bp, Zea mays
tgccaacaatgctctccagtatcaagagcaaaaccctcagcgagctggaagtacccctgcaggctcaggctccctcaaccaatttggttcccttttgctgtggttgctggaaggccgtccttcggatggcttagttccttcctccttaaggtccaaaaaggtcctgatcaagggccagaataccccgatccaacttgaaatggaaatgatccagggacataaaatcatggggattaaagtgggcccatgactgaactcgagtgctttggccgcagcagtctctttctaatatgatataatgccagcacct

SEQ ID NO: 320859 - DNA, 421 bp, Zea mays
gaccaactagcaacatagaaagcacaatagtgtaccaacaatggcagccaaaatattttgcctccttatgctccttggtctttctgcaagtgctgctacggcgaccattttcccacaatgctcacaagctcctatagcttcccttcttcccccgtacctctcaccagcggtgtcttcggtatgtgaaaacccaattcttcaaccctataggatccaacaggcaatcgcagctggcatcttacctttatcacccttgttcctccaacaatcatcagccctattacagcagttacctttggtgcatttattggcacaaaacatcagggcacaacaactacaacaacttgtgctagcaaaccttgctgcctactctcagcaacaacagtttcttccattcaaccaactagctgcattgaactct

SEQ ID NO: 320860 - DNA, 166 bp, Zea mays
ctgccattcaaccaacttgctttgacaatcccagcagcgttctaccaacaacccatcattggtggtgccctcttttagatttcttatgagttatagttcaataataaagttttttgtctgatgtttgtggcttcccagaaataagaaagtacatttctagattctt

SEQ ID NO: 320861 - DNA, 404 bp, Zea mays
cccacgcgtccggagaccaactagcatcatagaaagcacaatagtgtaccaacaatggcagctaaaatattttgcctccttatgctccttggtctttctgcaagtgctgctacggcgaccattttcccacaatgctcacaagctcctatagcttcccttcttcccccgtacctctcaccaacggtgtcttcggtatgtgaaaacccaattcttcaaccctacaggatccaacaggcaatcgcagctggcatcttacctttatcacccttgttcctccaacaatcatcagccctattacagcagttacctttggtgcatttattggcacaaaacatcatggcacaacaactacaacaacttgtgctagcaaaccttgctgcctactctcagcaacagcagtttct

SEQ ID NO: 320862 - DNA, 423 bp, Zea mays
caactagcaacatacaaagcacaatagtgtaccaacaatggcagccaaaatattttgcctccttatgctccttggtctttctgcaagtgctgctacggcgaccattttcccgcaatgctcgcaagctcctatagcttcccttcttcccccgtacctctcaccagcggtgtcttcggtatgtgaaaacccaattcttcaaccctacaggatccaacaggcaatcgcagctggcatcttacctttatcacccttgttccttcaacaatcatcagccctattacaacagttacctttggtgcatttattggcacataacatcagggcacaacaactacaacaacttgtgctagcaaaccttgctgcctactctcagcaacagcagtttctttcattcaaccaactaggttcattgaactctgcttc

SEQ ID NO: 320863 - DNA, 432 bp, Zea mays
cttacaacaaccaattgcccaattgcaacaacaatccttggcacatctaaccctacaaaccattgcaacgcaacaacaacaacaacagtttctgccatcactgagccacctagccgtggtgaaccctgtcacctacttgcaacagcagctgcttgcatccaacccacttgctctggcgaacgtagctgcataccagcaacaacaacagctgcaacagtttatgccagtgctcagtcaactagccatggtgaaccctgccgtctacctacaactactttcatctagcccgctcgcggtgggcaatgcacctacgtacctacaacaacagttgctgcaacaaattgtaccagctctgactcagctagctgtggcaaaccctgctgcctacttacaacagttgctttcattcaaccaactggctgtgtcaaactc

SEQ ID NO: 320864 - DNA, 373 bp, Zea mays
gatcagcaaagcggcagtgcgtagagtaggatcgtcgaacagaacagcatgaagatggtcatcgttctcgtcgtgtgcctggctctgtcagctgccagcgcctctgcaatgcagatgccctgcccctgcgcggggctgcagggcttgtacggcgctggcgccggcctgacgacgatgatgggcgccggcgggctgtacccctacgcggagtacctgaggcagccgcagtgcagcccgctggcggcggcgccctactacgccgggtgtgggcagccgagcgccatgttccagccgctccggcaacagtgctgccagcagcagatgaggatgatggacgtgcagtccgtcgcgcagcatctgcagatgatgatgc

SEQ ID NO: 320865 - DNA, 438 bp, Zea mays
gagaccagcaagcaacatagaaagtagattccattagcaacaatagagcaacaatggcgaccaagatattttccctccttatgctccttgctctttctacatgtgttgctaacgcgacaattttccctcaatgctcacaagctcctatagcttcccttcttcccccataccttccatcaattatagcttcagtatgtgaaaacccagctcttcaaccatataggcttcaacaagcaatcgcagcaagcaacatacctttatcgcccttgttgtttcaacaatcaccagccctatctttggtgcagtcattggtacaaaccatcagggcacaacagctgcagcaactcgtgctacctgtgatcaaccaagtagctctggcaaacctttctccctactctcagcaacaacaatttcttccattcaaccaactgtctacac

SEQ ID NO: 320866 - DNA, 425 bp, Zea mays
attgagaccaactagcaacatagaaagcacaatagtgtaccaacaatggcagctaaaatattttgcctccttatgctccttggtctttctgcaagtgctgctacggcgaccattttcccacaatgctcacaagctcctatagcttcccttcttcccccgtacctctcaccaacggtgtcttcggtatgtgaaaacccaattcttcaaccctacaggatccaacaggcaatcgcagctggcatcttacctttatcacccttgttcctccaacaatcatcagccctattacagcagttacctttggtgcatttattggcacaaaacatcagggcacaacaactacaacaacttgtgctagcaaaccttgctgcctactctcagcaacagcagtttcttccattcaaccaactagctgcattgaactc

SEQ ID NO: 320867 - DNA, 428 bp, Zea mays
cagaaacacaccaagcgaagtacattatcaacaacctaacaacaatggctaccaagatattatccctccttgcgcttcttgcgctttttgcgagcgcaacaaatgcgttcattattccacaatgctcacttgctccaagttccattattacacagttcctcccaccagttacttcaatgggcttcgaacacccagctgtgcaagcctataggctacaacaagcaattgcggcgagcgtcttacaacaaccaatttcccagttgcaacaacaatccttggcacatctaacaatacaaaccatcgcaacgcaacagcaacaacaattcctaccagcactgagccacctagccatggtgaaccctgccgcctacttgcaacagcagttgcttgcatcaaacccacttgctctggcaaacgtagttgcaaac

SEQ ID NO: 320868 - DNA, 410 bp, Zea mays
gtgccctgatggtttgtaccaatgactgctacaacagctgcagcaactcgtgctacctgtgatcaaccaagtagctctggcaaacctttctccctactctcagcaacaattgctgccattcaaccaacttgctttgacaaacccaacagcgttctaccaacaacccatcattggtggtgccctcttttagattgcttatgagttatacttcaataatgaagttttttggatgatgtttgtggcttcccagaaataagaaagtacatttctaaaaaaaaaatataaaaaaaaaaaaaaaaaaaacataaaaaaaaaaaaaaagaaacaaaaaaaaaaaaaacaacaactaaaaaaaacaaaaacttgtaaaccaaaataaacaaatataaaaaaaaaaagggggcgccctt

SEQ ID NO: 320869 - DNA, 229 bp, Zea mays
gcaacatttgttgccgttctacctgcacactgcgcctaacgttggcaccctcttacaactgcaacaattgctgccattcgaccaacttgctttgacaaacccagcagtgttctaccaacaacccatcattggtggtgccctcttttagattgcttatgagttatagttcaataataaagttttttttgctgatatttgtggcttcccagaaataagaaagtacatttct

SEQ ID NO: 320870 - DNA, 364 bp, Zea mays
ttgagaccaacatgcaacatagaatgtggaatccagtagcaacaacagagcaacaatggcgaccaagatattttccctccttatgctccttgctctatctgcatgtgttgctaacgcgacaattttccctcaatgctcacaagctcctatagcttcccttcttcccccataccttccatcaatgatagcttcagtatgtgaaaacccagctcttcagccctataggctccaacaagcaatcgcagcacgcaacatacctttatcacccttgtagtttcaacaatcgccagccctatctttggtgcagtcattggtacaaaccatcatggcacagcaactgcaccaacttgtgctacctgtgatc

SEQ ID NO: 320871 - DNA, 370 bp, Zea mays
gtcatcgatgcctaccgtactttgggtgaccgcggtcactacgcggccgatgaggcagttaaggacctcgtcggcacattcgccttcgtcgtacttcgacagccgctccggagcctaattatgcgtacttggcgccggctacacaagaatagcgcacacacctgtggactacggcgtctcagactattgcttcagattgatcagcgtctgaccggtatctcggtcaagcacggttgctgcgagagatacgcgcacttccgcgcagtctgcatgatgcacagagacgaacgtctcaacagcttcgagctcttcatgaacaggctaaatgtcatgccatgcgtacactgctaatgcgccatgtacggatcca

SEQ ID NO: 320872 - DNA, 389 bp, Zea mays
agaaacaggcgacgctgcaacaacgccgaccacattctcgtcgctggcgaccggtagcgccgcggccatgctgctgatgatgttggccacgactgcgactgaggccgctaacacagtgcaatccggcgcagctgacgccgtgctcggcgccggcgctgctctgagagcccgtgcctccgtcttgctgcgcgcagctgccgacgcatcaggggtgactatgctggtacgcgcgcagcccaaactacggtagctacattcgtaggcgcaacgcggcgaggcttttatgcatctgaaacctggacatgtcacgatgtcgtaatacgcggtcaacagtatatatactagctagctcttccaatacaatcatgctcagtcgctggaatatcgta

SEQ ID NO: 320873 - DNA, 432 bp, Zea mays
acatagaaagtagaatccattagcaacaatagagcaacaatggcgaccaagatattttccctccttatgctccttgctctttctacatgtgttgctaacgcgacaattttccctcaatgctcacaagctcctatagcttcccttcttcccccataccttccatcaattatagcttcagtatgtgaaaacccagctcttcaaccatataggcttcaacaagcaatcgcagcaagcaacatacctttatcgcccttgttgtttcaacaatcaccagccctatctttggtgcagtcattggtacaaaccatcagggcacaacagctgcagcaactcgtgctacctgtgatcaaccaagtagctctggcaaacctttctccctactctcagcaacaacaatttcttccattcaaccaactgtctacactgaaccct

SEQ ID NO: 320874 - DNA, 437 bp, Zea mays
ggcgaccaagatattttccctccttatgctccttgctctttctgcatgtgttgctaacgcgacaattttccctcaatgctcacaagctcctatagcttcccttcttcccccataccttccatcaatgatagcttcagtatgtgaaaacccagctcttcagccctataggctccaacaagcaatcgcagcaagcaacatacctttatcacccttgttgtttcaacaatcgccagccctatctttggtgcagtcattggtacaaaccatcagggcacagcagctgcagcaactcgtgctacctgtgatcaaccaagtagctctggcaaacctttctccctactctcagcaacaacaatttcttccattcaaccaactgtctacactgaaccctgctgcttatttgcagcaacaactattaccattcagccagcaaatac

SEQ ID NO: 320875 - DNA, 386 bp, Zea mays
cggacgcgtgggccagcaagcaacatataaagtagaatccattagcaacaatagagcaacaatggcgaccaagatattttccctccttatgctccttgctctttctacatgtgttgctaacgcgacaattttccctcaatgctcacaagctcctatagcttcccttcttcccccataccttccatcaattatagcttcagtatgtgaaaacccagctcttcaaccatataggcttcaacaagcaatcgcagcaagcaacatacctttatcgcccttgttgtttcaacaatcaccagccctatctttggtgcagtcattggtacaaaccatcagggcacaacagctgcagcaactcgtgctacctgtgatcaaccaagtagctctgg

SEQ ID NO: 320876 - DNA, 357 bp, Zea mays
cgcgagcgccgccctttttttttttttttttttttttttttttttttttttttttttttttttttttttttttttttttttttttttttttttttttttttttttttttttttttttttttttttttttttttttttttttttttttttttaaaaaaaaaaaaaaatgcaaaaaaaaaaaaatatttataaaaaaaataaaaaaaattataaatattgggccataaaaaaattttttaggattagttggaaaaaattttaaaaaaaaaaaatttatattttaacaaaggttaaaaatataaaagggaaaataaatgtaaaaaaaaatgggggtatttaaccaacagaaattttaaat

SEQ ID NO: 320877 - DNA, 415 bp, Zea mays
cgcgcgcgtgggccagcaagcaacatatcaagtagaatccattatcaacaatagagcgaacagtggcgaccaagatattttccctccttatgctccttgctctttctacatgtgttgctaacgcgacaattttccctcaatgctcacaagctcctatagcttcccttcttcccccataccttccatcaattatagcttcagtatgtgaaaacccagctcttcaaccatataggcttcaacaagcaatcgcagcaagcaacatacctttatcgcccttgttggttcaacaatcaccagccctatctttggtgcagtcattggtacaaaccatcagggcacaacagctgcagcaactcgtgctacctgtgatcaaccaagtgctctggcaaacctttttcctactcttagcaacaac

SEQ ID NO: 320878 - DNA, 423 bp, Zea mays
aactagcaacatagaaagcataatagtgtaccaacaatggcagccaaaatattttgcgctccttatgctccttggtctttctgcaagtgctgctacggcgaccattttcccgcaatgctcgcaagctcctatagcttcccttcttcccccgtacctttcaccagcggtgtcttcggtatgtgaaaacccaattcttcaaccctacaggatccaacaggcaatcgcagctggcatcttacctttatcacccttgttcctccaacaatcatcagccctattacaacagttacctttggtgcatttattggcacaaaacatcagggcacaacaactacaacaacttgtgctagcaaacctagctgcctactctcagcaacagcaggtacatccatttaaccaactatgttcattgaactttgcttc

SEQ ID NO: 320879 - DNA, 394 bp, Zea mays
cagctagcaacatagaaagcacaatattgtaccaacaatggcagccaaaatattttgcctccttatgctccttggtctttctgcaagtgctgctacggcgaccattttcccgcaatgctcgcaagctcctatagcttcccttcttcccccgtacctctcaccagcggtgtcttcggtatgtgaaaacccaattcttcaaccctacaggatccaacaggcaatcacagctggcatcttacctttatcacccttgttcctccaacaatcatcagccctattacatcagttacctttggtgcatttattggcacaaaacatcagggcacaacaactacaacaacttgtgctagcaaaccttgctgcctactctcagcaacagcagtttcttccattc

SEQ ID NO: 320880 - DNA, 254 bp, Zea mays
acgcgacgcgtacgattgacaccagcttttcacattaacagcagaatccattaacatcggtagagtatcaatgccgaccgagatattgtgactgcttatgctgcttgctctatctacatgtgctgataacgctacaattctacctttacgctgacaagcttatcaagcattcctttgtgcctcgaacactccaataattaatcgcttaggatgcgaaaagccagctcttcaagcatattagcttaaacaagcaa

SEQ ID NO: 320881 - DNA, 409 bp, Zea mays
gcgacgcgtccgattgagaccagcatttaacatagaaagtagaatccattagcaacggtagagcaacaatggcgaccaagatattttccctccttatgctccttgctctttctacatgtgttgctaacgcgacaattttccctcaatgctcacaagctcctatagcttcccttcttcccccataccttccatcaattatagcttcagtatgtgaaaacccagctcttcaaccatataggcttcaacaagcaatcgcagcaagcaacatacctttatcagccttggtggttcaacaatcaccagccctatctttggtgcagtcattggtacaaaccatcagggcacaacagctgcagcaacttgtgctacctgtgatcaaccaagtagctctggccaaccctttttccct

SEQ ID NO: 320882 - DNA, 421 bp, Zea mays
gaaacacacctagcgaagctcactatcaacgacctaacaacaatggcttccaagacattatccctccttgcgcttcttgccctttttgtgagtgcaacaaatgcgttcattattccacaatgctcacttgctccgagtgccattattccacagttcctccctccagttacttcaatgggcttcgaacacccagctgtgcaagcctataggctacaacaagcgcttgcggcgagcgtcttagaacaaccaattgcccaattacaacaacaatccttagcacatctaaccatacaaaccatcgcaacgcagcagcaacaagcactgagccacctagccgtggtgaaccctatcgcctacttgcaacaacagctgcttgcatccaacccacttgctttggcaaacgtagctgcataccaacaac

SEQ ID NO: 320883 - DNA, 422 bp, Zea mays
attcccgggccaattcttgaactcctacaggatccaacgaggctatcgcagctggtttctgacctttatcacccttgttcctccaacgaatcatgagccctattacagcagttacctttggtgcatttattggcacaaaacatcagggcacaacaactacaacaacttgtgctagcaaaccttgctgcctactctcagcatcagcagtttcttccattcaaccaactagctgcattgaactctgcttcttatttgcaacaactacttctaccattcagccagctatctgctggctaccttcagcaattccttccattcaaccaactgacagcattgaactctcctgcttatgtacagcagccacatctactaccattcagccagctagctggtgtgagccctgctaccttcttgacacaacc

SEQ ID NO: 320884 - DNA, 435 bp, Zea mays
cctacaacaatcatcagccctattacattagttacctttggtgcatttattggcacaaaacatcagggcacaacatctacaacaacttgtgctagcaaaccttgctgcctactctcagcaacagcagtttctttcattcaaccaactagctgcattgaactctgcttcttatttgcaacaacaacaactaccattcagccagctacctgctgcctacccccagcaatttcttccattcaaccaactggcagcattgaactctactgcttatttacagcagcaacaactactaccattcagccagctagctggtgtgagccctgctaccttcttgatacatccacagttgttgccgttctaccagcacgctgcgcctaacgctggcaccctcttacaactgcaacaattgctgccattcaaccaacttgctttgac

SEQ ID NO: 320885 - DNA, 427 bp, Zea mays
ctttggtgcatttattggcacaaaacatcagggcacaacaactacaacaacttgtgctagcaaaccttgctgcctactctcagcaacagcagtttcttccattcaaccaactagctgcattgaactctgcttcttatttgcaacaacaacaactaccattcagccagctacctgttgcctacccccaacaatttcttccattcaaccaactggcagcattgaactctcctgcttatttacagcagcaacaactactaccattcagccagctagctggtgtgagccctgctaccttcttgacacaaccacagttgttgccgttctaccagcacgctgcgcctaacgctggcaccctcttacaactgcaacaattgctgccattcaaccaacttgctttgacaaacctagcagtgttctaccaacaacc

SEQ ID NO: 320886 - DNA, 427 bp, Zea mays
attgacaccaactagcaacatagaatgcacaatagtgtaccaacaatggcagccaaaatattccgcttccttatgctccttggtctttctgcaagtgttgctaccgcaaccattttcccacaatgctcacaagctcctatagcttcccttcttcccccatacctctcaccagcggtgtcttcaatgtgtgaaaccccaattgttcaaccctacaggatccaacaggcaatcgcaacaggcatcttaccattatcacccttgttcctccaacaaccgtcagccctattacagcagttacctttggtccatttggtggcacagaacatcagggcacaacaactacaacaacttgtgctagcaaaccttgctgcatactctcagcaacatcagtttcttgcattcaaccaactggctgcattgaactctg

SEQ ID NO: 320887 - DNA, 350 bp, Zea mays
cactagcaacatataaagcacaattttgtaccaacaatggcagccaaaatattttgcctccttatgctccttggtctttctgcaagtgctgctacggcgaccattttcccacaatgctcacaagctcctatagcttcccttcttcccccgtacctctcaccagcggtgtcttcggtatgtgaaaacccaattcttcaaccctataggatccaacaggcaatcgcagctggcatcttacctttatcacccttgatcctccaacaatcatcagccctattacagcagttacctttggtgcatttattggcacaaaacatcagggcacaacaactacaacaccttgggctagc

SEQ ID NO: 320888 - DNA, 307 bp, Zea mays
caacaagcaacatagaaagtggaatacagtagcaacaatagagcaacaatggcggccaagatattttccatccttatgctccttgctctttctgcatgtgttgctaacgcgaccatttctcctcaatactcacaagctcctatagctgcccttctttccccataccttccatcaatgaccgcttcagtttgtgaaaacccagcccttcaaccctacaggctccaacaagcaatcgcatacaagcaacttacctttatcacccctgttctttcaacaatcgccagccctatctttggtgccatcattg

SEQ ID NO: 320889 - DNA, 437 bp, Zea mays
cggacgcgtggggagcattcagaaacactccaagcgaagctacctagcaacgacttaacaacaatggctaccaagatattagccctccttgcgcttcttgccctttttgtgagcgcaacaaatgcgttcattattccacaatgctcacttgctcctagtgccattataccacagttcctccgaccagttacttcaatgggcttcgaacacctagctgtgcaagcctacaggctacaacaagcgcttgcggcgagcgtcttacaacaaccaattaaccaattgcaacaacaatccttggcacatctaaccatacaaaccatcgcaacacaacagcaacaacagttcctaccagcactgagccaactagatgtggtgaaccctgtcgcctacttgcaacagcaggtgcttgcatccaacccacttgctctggcaaacgt

SEQ ID NO: 320890 - DNA, 441 bp, Zea mays
gaccaactagcaacatataaagcacaattgtgtaccaacaatggcagccaaaatattttgcctccttatgctccttggtctttctgcaagtgctgctacggcgaccattttcccgcaatgctcgcaagctcctatagcttcccttcttcccccgtacctctcaccagcggtgtcttcggtatgtgaaaacccaattcttcaaccctacaggatccaacaggcaatcacagctggcatcttacctttatcacccttgttcctccaacaatcatcagccctattacatcagttacctttggtgcatttattggcacaaaacatcagggcacaacaactacaacaacttgtgctagcaaaccttgctgcctactctcagcaacagcagtttcttccattcaaccaactagctgcattgaactctgcttcttatttgcaacaaca

SEQ ID NO: 320891 - DNA, 318 bp, Zea mays
cttatttatataaccctatttaatctatgaattagaaatagaacttacggggtgggggaacggtttagctcttgaccttttccttcataattaatgataaatacaagataactgtaccgtctattctagtggagaaaacagaaattttagatttacaatttacattacattcaagctaatctaaatttttacatatcactgatgtgtgctattgagcggggtacgaaatagcgaccaatttaaccatttgacgctatttatgcaaaaactttaccaatatgatttcatcttctagtgcgctatgtacatatcaatatt

SEQ ID NO: 320892 - DNA, 214 bp, Zea mays
cctgacatagagatatgtttgacttatcgattaagccttgcatgtgcggggctggggtactttttactgtcgaaactgtgaatgtcacattgaatcagttatacaacgtcagctggcgcttgcttctcggctaaccgccataactgtccgactgacactttacatacaacacaacttacgcgaagcgctcacatataacacatatgggttgcgc

SEQ ID NO: 320893 - DNA, 394 bp, Zea mays
cagcattcaaaaacacaccaagcgaagcgcactagcaacgacctaacaccaatggctaccaagatattagccctccttgcgcttcttgcccttttagtgagcgcaacaaatgcgttcattattccacagtgctcacttgctcctagtgccagtattccacagttcctcccaccagttacttcaatgggcttcgaacatccagccgtgcaagcctacaggctacaactagcgcttgcggcgagcgccttacaacaaccaattgcccaattgcaacaacaatccttggcacatctaaccctacaaaccattgcaacgcaacaacaacaacaacagtttctgccatcactgagccacctagccgtggtgaaccctgtcacctacttgcaacagcagc

SEQ ID NO: 320894 - DNA, 432 bp, Zea mays
caagcaacatagaaagtggaatccagtagcaacaatagagcaacaatggcgaccaagatactttccctccttatgctccttgctctttctgcatgtgttgctaacgcgacaattttccctcaatgctcacaagctcctatagcttcccttcttcccccataccttccatcaatgatagcttcagtatgtgaaaacccagctcttcaaccctataggctccaacaagcaatcgcagcaagcaacatacctttatcacccttgtttcaacaatcgccagccctatctttggtgcagtcattggtacaaaccatcaaggcacagcagctgcagcaactcgtgctacctgtgatcaaccaagtagctctggcaaacctttctccctactatcagcaacaacaatttcttccattcaaccaactatctacactgaac

SEQ ID NO: 320895 - DNA, 318 bp, Zea mays
ttcccggttttcctattcttttttttagaaatgtactttaccatgcgaggctttccatcaacatcatacaaccaaactgctatggtagaactataactcacttgcacatctagaccagggcaccaccgacgcagaggcgttggtagtatgcatggtgctatcgtgctactagtgctatgtttcgcagcatgctgcaaccatttacttaaattgactctcttcatccaaccgtgctagccttcaggctacaactagaagctttctgcagggtcttaaaactatgaattgtcctattgcaacaactattattggcaaaga

SEQ ID NO: 320896 - DNA, 437 bp, Zea mays
ctcatcgactccagattggagaactcgacaccatgaaggtgctgatcgttgcccttgctctcctggcgctcgctgcgagcgccgtcttcagtacaagcggcggctgtggctgccagacaccaccgtttcatctaccgcctccgttctatatgccgcctccgttctatctgccgccgcagcagcagccgcagccatggcaataccccactcaaccaccgcagctaagcccgtgccagcagttcggatcctgcggcgtcggcagcgtcggcagcccgttcctgggccagtgcgtcgagttcctgaggcaccagtgcagcccggcggcgacgccctacggctcgccacagtgccaggcgctgcagcagcagtgctgccaccagatcaggcaagtggagccgctgcaccggtaccaggcgacatacggtgtggtcctgcag

SEQ ID NO: 320897 - DNA, 405 bp, Zea mays
gcagtttcttccattcaaccatctggctgcattgaactctgctgcttatttgcgacaacaactaccattcagtcagctagctgctgcctacccccagcaatttcttccattcaaccaactggcagcattgaactctgctgcttatttacaacagcaacagctaccaccattcagccagctagctgatgtgagccctgttgccttcttgacacaacaacagttgttgccgttctacctgcacgctgcgcctaacgctggcaccctcttacaactgcaacaattgctgccattcaaccaacttgctttgacaaacccaacaacgttctaccaacaacccatcattggcggtgccctcttttagattgcttatgagttatagttcaataatgaagttttttggatgat

SEQ ID NO: 320898 - DNA, 331 bp, Zea mays
caacatatacaggacatgatcactgcagacacggctgataatcgagcatgaggttcttatgactacttggacacatctgcaagagctggtactagagccatgtttagcacaatgctcacatgctgctatagctatccttgatgctcagaacctataaactgaggtctcttccgtatgtgaaaaaccattgcttaatgacttcactatcctactagcaatcgcagctgacatattaaccacatcaaccttggtgatacaacaatcgatagccctattacatgcagtaagatttgctgcatcgattgacagatcatcatgacggcacaactac

SEQ ID NO: 320899 - DNA, 441 bp, Zea mays
gcaacatagaaagcacaatagtgtaccaacaatggcagctaaaatattttgcctccttatgctccttggtctttctgcaagtgctgctacggcgaccattttcccacaatgctcacaagctcctatagcttcccttcttcccccgtacctctcaccaacggtgtcttcggtatgtgaaaacccaattcttcaaccctacaggatccaacaggcaatcgcagctggcatcttacctttatcacccttgttcctccaacaatcatcagccctattacagcagttacctttggtgcatttattggcacaaaacatcagggcacaacaactacaacaacttgtgctagcaaaccttgctgcctactctcagcaacagcagtttcttccattcaaccaactagctgcattgaactctgcttcttatttgcaacaacaacaactacc

SEQ ID NO: 320900 - DNA, 447 bp, Zea mays
agaccattagctttatctactccagagcgcagaagaacccgatcgacaccatgagggtgttgctcgttgccctcgctctcctggctctcgctgcgagcgccacctccacgcatacaagcggcggctgcggctgccagccaccgccgccggttcatctaccgccgccggtgcatctgccacctccggttcacctgccacctccggtgcatctcccaccgccggtccacctgccgccgccggtccacctgccaccgccggtccatgtgccgccgccggttcatctgccgtcgccaccatgccactaccctactcaaccgccccggcctcagcctcatccccagccacacccatgcccgtgccaacagccgcatccaagcccgtgccagctgcagggaacctgcggcgttggcagcaccccgatcctgggccagtgcgtcgagtttctga

SEQ ID NO: 320901 - DNA, 265 bp, Zea mays
gctggtgtgagccctgctaccttcttgacacaaccacagttgttgccgttctaccagcacgctgcgcctaacgctggcaccctcttacaactgcaacaattgctgccattcaaccaacttgctttgacaaacccagcagcattctaccaacaacccatcattggtggtgccctcttttagatttcttatgagttatagttcaataataaagttttttgtctgatgtttgtggcttcccagaaataagaaagtacatttctagatt

SEQ ID NO: 320902 - DNA, 427 bp, Zea mays
gtggcacaaaacatcagggcacaacaactacaacaacttgtgctagcaaaccttgctgcatactctcagcaacatcagtttcttccattcaaccaactggctgcattgaactctgctgcttatttgcaacaacaattaccattcagccagctagttgctgcctacccccagcaatttcttacattcaaccaactagcagcattgaactctgctgcttatttacagcagcaacaactactaccattcagccagctagctgatgtgagccctgctgccttcttgacacaacaacagttgttgccgttctacctgcacgctatgcctaacgctggcaccctcttacaactgcaacaattgctgccattcaaccaacttgctttgacaaactcaacagtgttctaccaacaacccatcattggtggtgccc

SEQ ID NO: 320903 - DNA, 447 bp, Zea mays
gtggaatccagtagcaacaatacagcaacaatggcgaccaagatattttccctccttatgctccttgctctttctacatgtgttgctaacgcgacaattttccctcaatgctcacaagctcctatagcttcccttcttcccccataccttccatcaattatagcttcaatatgtgaaaacccagctcttcaaccatataggcttcaacaagcaatcgcagcaagcaacatacctttatcgcccttgttgtttcaacaatcgccagccctatctttggtgcagtcattggtacaaaccatcagggcacaacagctgcagcaactcgtgctacctctgatcaaccaagtagctctggcaaacctttctccctactctcagcaacaacaatttcttccattcaaccaactgtctacactgaaccctgctgcttatttgcagcaacaacta

SEQ ID NO: 320904 - DNA, 410 bp, Zea mays
caacaacaatttctaccagcactgagccaactagctgtggtgaaccctgtcgcctacttgcaacagcagttgcttgcatccaacccacttgctctggcaaacatagttgcataccaacaacaacaacaattgcaacagtttctaccagcgctcagtcaactagccatggtgaaccctgccgcctacctacaacagcaacaactgatttcatctagccctctcgctgtggttaatgcacctacatacctgcaacaacagttgctgcaacagattgtaccagctctgactcagctagctgtggcaaaccctgctgcctacttgcaacagctgcttccattcaaccaactgactgtgtcgaactctgctgcgtacctacaacagcgacaacagttacttaatccactagcggt

SEQ ID NO: 320905 - DNA, 442 bp, Zea mays
cacaaaacatcagggcacaacaactacaacaacttgtgctagcaaaccttgctgcatactctcagcaacatcagtttcttccattcaaccaactggctgcattgaactctgctgcttatttgcaacaacaattaccattcagccagctagttgctgcctacccccagcaatttcttccattcaaccaactagcagcattgaactctgctgcttatttacagcagcaacaactactaccattcagccagctagctgatgtgagccctgctgccttcttgacacatcaacagttgttgccgttctacctgcacgctatgcctaacgctggcaccctcttacaactgcaacaattgctgccattcaaccaacttgctttgacaaactcaacagtgttctaccaacaacccatcattggtggtgccctcttttagattgcttatga

SEQ ID NO: 320906 - DNA, 395 bp, Zea mays
attgagaccaactagcaacatagaaagcacaatagtgtaccaacaatggcagccaaaatattttgcctccttatgctccttggtctttctgcaagtgctgctacggcgaccattttcccgcaatgctcgcaagctcctatagcttcccttcttcccccgtacctctcaccagcggtgtcttcggtatgtgaaaacccaattcttcaaccctacaggatccaacaggcaatcgcagctggcatcttacctttatcacccttgttcctccaacaatcatcagccctattacaacagttacctttggtgcatttattggcacaaaacatcagggcacaacaactacaacaacttgtgctagcaaaccttgctgcctactctcagcaacaacaagtttc

SEQ ID NO: 320907 - DNA, 442 bp, Zea mays
aactagcaacatagaaagcacaatagtgttccaacaatggcagccaaaatattttgcctccttatgctccttggtctttctgcaagtgctgctacggcgaccattttcccgcaatgctcgcaagctcctatagcttcccttcttcccccgtacctctcaccagcggtgtcttcggtatgtgaaaacccaattcttcaaccctacaggatccaacaggcaatcgcagctggcatcttacctttatcacccttgttcctacaacaatcatcagccctattacaacagttacctttggtgcatttattggcacaaaacatcaaggcacaacaactacaacaacttgtgctagcaaaccttgctgcctactctcagcaacagcagattcttgcattcaaccaactaggttcattgaactctgcttcttaattgcaacaacaacaac

SEQ ID NO: 320908 - DNA, 432 bp, Zea mays
cccactcgtccgctgcctcattgcataattagcatcgaatatcgatgcgcatccgcggaatggagcgcggaggatgaggaataaggaggggtcgaggccaaatccggctgagagaagtggagctatggctaggctggcggtaccagcgaggtcgtcatcagatgagggctgcggacagggagtgtcaatagctcacggcgcgtccctgcggatcggcgctctgttcctgcgggatctgctgcgaggaagcggaggagaggcaagagctgatacgtaccgaggtgcagggttacatggccgagctccagaatgtgagccaggagcactcgcgctggcgcgtcagagctctgcatgctcgagttaccgaacagagcactatacactgacgtgcagcatgaatgacggatacacaaggctctctcgaccttctga

SEQ ID NO: 320909 - DNA, 127 bp, Zea mays
ggggagtcggtgaaccaccatcctgattacgagttcttcctgtctcgttgcgcctaggctaagcggttgtgatatgaaggaagaggggcttttctgcttctagctcctgaatgtagtagtgaccatg

SEQ ID NO: 320910 - DNA, 431 bp, Zea mays
caactagcaacatagaaagcacaatagtgtaccaacaatggcagccaaaatattttgcctccttatgctccttggtctttctgcaagtgctgctacggcgaccattttcccgcaatgctcgcaagctcctatagcttcccttcttcccccgtacctctcaccagcggtgtcttcggtatgtgaaaacccaattcttcaaccctacaggatccaacaggcaatcacagctggcatcttacctttatcacccttgttcctccaacaatcatcagccctattacatcagttacctttggtgcatttattggcacaaaacatcagggcacaacaactacaacaacttgtgctagcaaaccttgctgcctactctcagcaacagcagtttcttccattcaaccaactagctgcattgaactctgcttcttatttgc

SEQ ID NO: 320911 - DNA, 327 bp, Zea mays
tcgcccactcgttcgggccgcccttttttttttttttttaaaaaaggctcacatggattgaccacaggatcaaatgtgcggatgcccaaccatgtaggagtataaccaacataattactgaactatgacagttggtaaattactttacagatttatgccggatagtatattcacgacattcctctcaaccatgacgatgcacaagcaagcacacagttacaagcaagccagtattatggaagcacgatagcatggcatttcaatcatctttctgatgtaaagcacgagctagactattaccattcagtgcggcatggtacactcgct

SEQ ID NO: 320912 - DNA, 441 bp, Zea mays
gtggaatacagtagcaaaaatagagcatcaatggcggccaagatattttccatccttatgctccttgctctttctgcatgtgttgctaacgcgaccatttttcctcaatactcacaagctcctatagctgcccttcttcccccataccttccatcaatgaccgctttagtatgtgaaaacccagcccttcaaccctacaggatccagcaagcaatcgcaacaagcaacttacctttatcacacctgttctttcaacaatcgccagccctatctttggtgcagtcattggtacaaaccatcagggcagaacagttgcagcaactcgtgctaccagtgatcagccaagtagctctggcaaacctttccccctactctcaacaactactaccattcagccagctagctgatgtgagccctgctgccttcttgacacaacaacag

SEQ ID NO: 320913 - DNA, 427 bp, Zea mays
gaccaactagcaacatagaaagcacaatattgtaccaacaatggcagctaaaatattttgcctccttatgctccttggtctttctgcaagtgctgctacggcgaccattttcccacaatgctcacaagctcctatagcttcccttcttcccccgtacctctcaccaacggtgtcttcggtatgtgaaaacccaattcttcaaccctacaggatccaacaggcaatcgcagctggcatcttacctttatcacccttgttcctccaacaatcatcagccctattacagcaggtacctttggtgcatttattggcacaaaacatcagggcacaacaactacaacaacttgtgctagcaaaccttgctgcctactctcagcaacagcagtttcttccattcaaccaactagctgcattgaactctgcttct

SEQ ID NO: 320914 - DNA, 442 bp, Zea mays
agcaattagctcatcgactccagattggagaactcgacaccatgaaggtgctgatcgttgcccttgctctcctggcgctcgctgcgagcgccgcctccagtacaagcggcggctgtggctgccagacaccaccgtttcatctaccgcctccgttctatatgccgcctccgttctatctgccgccgcagcagcagccgcagccatggcaataccccactcaaccaccgcagctaagcccgtgccagcagttcggatcctgcggcgtcggcagcgtcggcagcccgttcctgggccagtgcgtcgagttcctgaggcaccagtgcagcccggcggcgacgccctacggctcgccacagtgccaggcgctgcagcagcagtgctgccaccagatcaggcaagtggagccgctgcaccggtaccaggcgacatacggtgtggtcct

SEQ ID NO: 320915 - DNA, 435 bp, Zea mays
gtcgctgccagcagtcagcaacagcagtttcttccattcaaccaactagctgcattgaactctgcttcttattcgcaacaacaacaactaccattcagccagctacctgttgcctacccccaacaatttcttccattcaaccaactggcagcattgaactctcctgcttatttacagcagcaacaactactaccattcagccagctagctggtgtgagccctgctaccttcttgacacaaccacagttgatgccgttctaccagcacgctgcgcctaacgctggcaccctcttacaactgcaacaattgctgccattcaaccaacttgctttgacaaacctagcagtgttctaccaacaacccatcattggtggtgccctcttttagatttcttatgagttatagttcaataataaagtttaacgtctgatgttt

SEQ ID NO: 320916 - DNA, 433 bp, Zea mays
gcaattagctcatcgactccagattggagaactcgacaccatgaaggtgctgatcgttgcccttgctctcctggcgctcgctgcgagcgccgcctccagtacaagcggcggctgtggctgccagacaccaccgtttcatctaccgcctccgttctatatgccgcctccgttctatctgccgccgcagcagcagccgcagccatggcaataccccactcaaccaccgcagctaagcccgtgccagcagttcggatcctgcggcgtcggcagcgtcggcagcccgttcctgggccagtgcgtcgagttcctgaggcaccagtgcagcccggcggcgacgccctacggctcgccacagtgccaggcgctgcagcagcagtgctgccaccagatcaggcaggtggagccgctgcaccggtaccaggcgacatacggt

SEQ ID NO: 320917 - DNA, 440 bp, Zea mays
cccacgcgtccgtgagcattcagaaacacaccaagcgaagcgcactagcaacaacctaacaacaatggctaccaagatattatccctccttgcgcttcttgcgctttttgcgagcgcaacaaatgcgtccattattccacaatgctcacttgctcctagttccattattccacagttcctcccaccagttacttcaatggccttcgaacacccagctgtgcaagcctataggctacaacaagcgattgcggcgagcgtcttacaacaaccaattgcccaattgcaacaacaatccttggcacatctaacaatacaaaccatcgcaacgcaacagcaacaacagttcctaccagcactgagccacctagccatggtgaaccctgtcgcctacttgcaacagcagctgcttgcatccaacccacttgctctagcaaacgtag

SEQ ID NO: 320918 - DNA, 431 bp, Zea mays
tgagcattcagaaacacacctagcgaagcgcactagcaacgacctaacaacaatggcttccaagacattatccctccttgcgcttcttgccctttttgtgagtgcaacaaatgcgttcattattccacaatgctcacttgctccgagtgccattattccacagttcctccctccagttacttcaatgggcttcgaacacccagctgtgcaagcctataggctacaacaagcgcttgcggcgagcgtcttagaacaaccaattgcccaattacaacaacaatccttggcacatctaaccatacaaaccatcgcaacgcagcagcaacaagcactgagccacctagccgtggtgaaccctatcgcctacttgcaacaacagctgcttgcattcaacccactagctttggcaaacgtaactgcataccaacaac

SEQ ID NO: 320919 - DNA, 434 bp, Zea mays
agaccattagctttatctactccagagcgcagaagaacccgatcgacaccatgagggtgttgctcgttgccctcgctctcctggctctcgctgcgagcgccacctccacgcatacaagcggcggctgcggctgccagccaccgccgccggttcatctaccgccgccggtgcatctgccacctccggttcacctgccacctccggtgcatctcccaccgccggtccacctgccgccgccggtccacctgccaccgccggtccatgtgccgccgccggttcatctgccgccgccaccatgccactaccctactcaaccgccccggcctcagcctcatccccagccacacccatgcccgtgccaacagccgcatccaagcccgtgccagctgcagggaacctgcggcgttggcagcaccccgatcctgggccagtgc

SEQ ID NO: 320920 - DNA, 433 bp, Zea mays
agaaagcacaatagtgtaccaacaatggcagccaaaatattttgcctccttatgctccttggtctttctgcaagtgctgctacggcgaccattttcccacaatgctcacaagctcctatagcttcccttcttcccccgtacctctcaccagcggtgtcttcggtatgtgaaaacccaattcttcaaccctataggatccaacaggcaatcgcagctggcatcttacctttatcacccttgttcctccaacaatcatcagccctattacagcagttacctttggtgcatttattggcacaaaacatcagggcacaacaactacaacaacttgtgctagcaaaccttgctgcctactctcagcaacaacagtttcttccattcaaccaactagctgcattgaactctgcttcttatttgcaacaacaacaactac

SEQ ID NO: 320921 - DNA, 447 bp, Zea mays
atagaaagcacaatagtgtaccaacaatggcagccaaaatattttgcctccttatgctccttggtctttctgcaagtgctgctacggcgaccattttcccgcaatgctcgcaagctcctatagcttcccttcttcccccgtacctctcaccagcggtgtcttcggtatgtgaaaacccaattcttcaaccctacaggatccaacaggcaatcacagctggcatcttacctttatcacccttgttcctccaacaatcatcagccctattacatcagttacctttggtgcatttattggcacaaaacatcagggcacaacaactacaacaacttgtgctagcaaaccttgctgcctactctcagcaacagcagtttcttccattcaaccaactagctgcattgaactctgcttcttatttgcaacaacaacaactaccattcagccagc

SEQ ID NO: 320922 - DNA, 445 bp, Zea mays
gtagcaacaatagagcaacaatggcgaccaagatattttccctccttatgctccttgctctttctacatgtgttgctaacgcgacaattttccctcaatgctcacaagctcctatagcttcccttcttcccccataccttccatcaattatagcttcaatatgtgaaaacccagctcttcaaccatataggcttcaacaagcaatcgcagcaagcaacatacctttatcgcccttgttgtttcaacaatcgccagccctatctttggtgcagtcattggtacaaaccatcagggcacaacagctgcagcaactcgtgctacctctgatcaaccaagtagctctggcaaacctttctccctactctcagcaacaacaatttcttccattcaaccaactgtctacactgaaccctgctgcttatttgcagcatcaactattaccatt

SEQ ID NO: 320923 - DNA, 187 bp, Zea mays
tgatgtatgtggccaaccagattatcatatgatacatattcacatcaaaatctggacatgctatctacaagagatgctatcacgacaacaccgcgtcaacgtttaactaactcaatagctgcctttaatgatagataacttacaacggtcatagaatcaaaacctgaaaacgataatgcacatgcac

SEQ ID NO: 320924 - DNA, 444 bp, Zea mays
ctccttgctctttctacatgtgttgctaacgcgacaattttccctcaatgctcacaagctcctatagcttcccttcttcccccataccttccatcaattatagcttcagtatgtgaaaacccagctcttcaaccatataggcttcaacaagcaatcgcagcaagcaacatacctttatcgcccttgttgtttcaacaatcaccagccctatctttggtgcagtcattggtacaaaccatcagggcacaacagctgcagcaactcgtgctacctgtgatcaaccaagtagctctggcaaacctttctccctactctcagcaacaacaatttcttccattcaaccaactgtctacactgaaccctgctgcttatttgcagcaacaactattaccatttagccagctagctactgcctactctcagcaacaacaacttcttccattt

SEQ ID NO: 320925 - DNA, 433 bp, Zea mays
cctggctctcgctgcgagcgccacctgcacgcatacaagcggcggctgcggctgccagccaccgccgccggttcatctaccgccgccggtgcatctgccacctccggttcacctgccacctccggtgcatctcccaccgccggtccacctgccgccgccggtccacctgccaccgtcggtccatgtgccgccgccggttcatctgccgccgccaccatgccactaccctactcaaccgccccggcctcagcctcatccccagccacacccatgcccgtgccaacagccgcatccaagcccgtgccagctgcagggaacctgcggcgttggcagcaccccgatcctgggccagtgcgtcgagtttctgaggcatcagtgcagcccgacggcgacgccctactgctcgcctcagtgccagtcgttgcggcagcag

SEQ ID NO: 320926 - DNA, 430 bp, Zea mays
gcaattagctcatcgactccagattggagaactcgacaccatgaaggtgctgatcgttgcccttgctctcctggcgctcgctgcgagcgccgcctccagtacaagcggcggctgtggctgccagacaccaccgtttcatctaccgcctccgttctatatgccgcctccgttctatctgccgccgcagcagcagccgcagccatggcaataccccactcaaccaccgcagctaagcccgtgccagcagttcggatcctgcggcgtcggcagcgtcggcagcccgttcctgggccagtgcgtcgagttcctgaggcaccagtgcagcccggcggcgacgccctacggctcgccacagtgccaggcgctgcagcagcagtgctgccaccagatcaggcaagtggagccgctgcaccggtaccaggcgacatac

SEQ ID NO: 320927 - DNA, 438 bp, Zea mays
ccaactagcaacatagaaagcacaatagtgtaccaacaatggcagccaaaatattttgcctccttatgctccttggtctttctgcaagtgctgctacggcgaccattttcccgcaatgctcgcaagctcctatagcttcccttcttcccccgtacctctcaccagcggtgtcttcggtatgtgaaaacccaattcttcaaccctacaggatccaacaggcaatcgcagctggcatcttacctttatcacccttgttcctccaacaatcatcagccctattacaacagttacctttggtgcatttattggcacaaaacatcagggcacaacaactacaacaacttgtgctagcaaaccttgctgcctactctcagcaacagcagtttcttccattcaaccaactaagttcattgaactctgcttcttatttgcaacaac

SEQ ID NO: 320928 - DNA, 446 bp, Zea mays
ggcaatcacagctggcatcttacctttatcacccttgttcctccaacaatcatcagccctattacatcagttacctttggtgcatttattggcacaaaacatcagggcacaacaactacaacaacttgtgctagcaaaccttgctgcctactctcagcaacagcagtttcttccattcaaccaactagctgcattgaactctgcttcttatttgcaacaacaacaactaccattcagccagctacctgctgcctacccccagcaatttcttccattcaaccaactggcagcattgaactctcctgcttatttacagcagcaacaactactaccattcagccagctagctggtgtgagccctgctaccttcttgatacaaccacagttgttgccgttctaccagcacgctgcgcctaacgctggcaccctcttacaactgcaacaat

SEQ ID NO: 320929 - DNA, 437 bp, Zea mays
gcaatcacagctggcatcttacctttatcacccttgttcctccaacaatcatcagccctattacatcagttacctttggtgcatttattggcacaaaacatcagggcacaacaactacaacaacttgtgctagcaaaccttgctgcctactctcagcaacagcagtttcttccattcaaccaactagctgcattgaactctgcttcttatttgcaacaacaacaactaccattcagccagctacctgctgcctacccccagcaatttcttccattcaaccaactggcagcattgaactctcctgcttatttacagcagcaacaactactaccattcagccagctagctggtgtgagccctgctaccttcttgatacaaccacagttgttgccgttctaccagcacgctgcgcctaacgctggcaccctcttacaact

SEQ ID NO: 320930 - DNA, 443 bp, Zea mays
tcgattgaaccagcaagcacatagaagtttaaccattatcacaatagagcaacaatggcgaccaagatattttccctccttatgctccttgctctttctacatgtgttgctaacgcgacaattttccctcaatgctcacaagctcctatagcttcccttcttcccccataccttccatcaattatagcttcagtatgtgaaaacccagctcttcaaccatataggcttcaacaagcaatcgcagctagcaacatacctttatcgcccttgttgtttcaacaatcaccagccctatctttggtgcagtcattggtacaaaccatcagggcacaacagctgcagcaactcgtgctacctgtgatcaaccaagtagctctggcaaacctttctccctactctcagcaacaacaatttcttccattcaaccaactgtctacactgaa

SEQ ID NO: 320931 - DNA, 443 bp, Zea mays
attgagaccaacaagcaacatagaaagtggaatacagtagcaacaatagagcaacaatggcggccaagatattttccatccttatgctccttgctctttctgcatgtgttgctaacgcgaccatttttcctcaatactcacaagctcctatagctgcccttcttcccccataccttccatcaatgaccgcttcagtttgtgaaaacccagcccttcaaccctacaggctccaacaagcaatcgcaacaagcaacttacctttatcacccctgttctttcaacaatcgccagccctatctttggtgcagtcattggtacaaaccatcagggcacaacagctgcaacaactcgtgctaccagtgatcagccaagtagctctggcaaacctttctccctactctcagcaacaacaatttcttccattcaaccaactgtctacactg

SEQ ID NO: 320932 - DNA, 431 bp, Zea mays
attcagaaacacaccaagcgaagctacctagcaacgacttaacaacaatggctaccaagatattagccctccttgcgcttcttgccctttttgtgagcgcaacaaatgcgttcattattccacaatgctcacttgctcctagtgccattataccacagttcctccgaccagttacttcaatgggcttcgaacacctagctgtgcaagcctacaggctacaacaagcgcttgcggcgagcgtcttacaacaaccaattaaccaattgcaacaacaatccttggcacatctaaccatacaaaccatcgcatcacaacagcaacaacagttcctaccagcactgagccaactagatgtggtgaaccctgtcgcctacttgcaacagcaggtgcttgcatccaacccacttgctctggcaaacgtagctgcatac

SEQ ID NO: 320933 - DNA, 195 bp, Zea mays
gggttctactccgctcacgctccagctttctctggcccgatcgatgctccatgccctcgggaagcttgttatctttcttcgtgctccttgggctacccaacccatcgacgagccctatctcgcagtacctcctccatattcgtccagctctctcgactctgaggactgacagagaaagagaggatgagatgggac

SEQ ID NO: 320934 - DNA, 404 bp, Zea mays
gcaacatagaaagtagaatccattagcatcaatagagcaacaatggcgaccaagatattttccctccttatgctccttgctctttctacatgtgttgctaacgcgacaattttccctcaatgctcacaagctcctatagcttcccttcttcccccataccttccatcaattatagcttcagtatgtgaaaacccagctcttcaaccatataggcttcaacaagcaatcgcagcaagcaacatacctttatcgcccttgttgtttcaacaatcaccagccctatctttggtgcagtcattggtacaaaccatcagggcacaacagctgcagcaactcgtgctacctgtgatcaaccaagtagctctggcaaacctttctccctactctcagcaacaacaatttct

SEQ ID NO: 320935 - DNA, 373 bp, Zea mays
agaaagcacaatagtgtaccaacaatggcagccaaaatattttgcttccttatgctccttggtctttctgcaagtgttgctaccgcaaccattttcccacaatgctcacaagctcctatagcttcccttcttcccccatacctctcaccagcggtgtcttcaatgtgtgaaaccccaattgttcaaccctacaggatccaacaggcaatcgcaacaggcatcttaccattatcacccttgttcctccaacaaccgtcagccctattacagcagttacctttggtccatttggtggcacataacatcagggcacatcaactacaacaacttgtgctagcaaaccttgctgcatactctcagcaacatcagtttc

SEQ ID NO: 320936 - DNA, 433 bp, Zea mays
caacatagaaagtggaatacagtagcaacaatagagcaacaatggcggccaagatattttgcatccttatgctccttgctctttctgcatgtgttgctaacgcgaccatttttcctcaatactcacaagctcctatagctgcccttattaccccataccttccatcaatgaccgcttcagtttgtgaaaacccagcccttcaaccctacaggctccaacatgcaatcgcaacaagcaacttacctttatcacccctgttctttcaacaatcgccagccctatctttggtgcagtcattggtacataccatcagggcacatcagctgcaacaactcgtgctaccagtgatcagccaagtagctctggcaaacctttctccctactctcatcaacaacaatttcttccattcaaccaactgtctacactgaaccc

SEQ ID NO: 320937 - DNA, 358 bp, Zea mays
caaagatacccatggtaatcgtgctgaaggaaaacatggtaacaagcatggcaattctctgtctcctgaccttgtttgcaagagcaaaaggattcctaagaaaagaacacttgacgaagattctgatgatggagatggtgaaatacgctatctacaaaaactcaaaggggcaaaagttgcaccagatcctgtgaacactggccataaagcttatgatttcgttgatgacgcactcaaaaaaaaggagctaaccaagctttctaaaattaaaaccttcccatatgaagtggacaagaactcaaaatggcttgggcttgccaggattgtaagaagaatttaagggattaccatgaagtta

SEQ ID NO: 320938 - DNA, 450 bp, Zea mays
accaactagcaacatagaaagcacaatagtgtaccaacaatggcagccaaaatattttgcttccttatgctccttggtctttctgcaagtgttgctaccgcaaccattttcccacaatgctcacaagctcctatagcttcccttcttcccccatacctctcaccagcggtgtcttcaatgtgtgaaaccccaattgttcaaccctacaggatccaacaggcaatcgcaacaggcatcttaccattatcacccttgttcctccaacaaccgtcagccctattacagcagttacctttggtccatttggtggcacaaaacatcagggcacaacaactacaacaacttgtgctagcaaaccttgctgcatactctcagcaacatcagtttcttccattcaaccaactggctgcattgaactctgctgcttatttgcaacaacaattaccattc

SEQ ID NO: 320939 - DNA, 203 bp, Zea mays
tgcccccgcccccgtctcctcccgcccgtcctacggaaaccccgtcgcgatttcatccgcgaacctccgcgagaaccgtccgccgcgaacctcaccgcaaacccagccgcgatcctcaagcccgcaaatccctccacaaatagcgccgcgaccgtctcgccggctcgccggcactaaccagcaaagagttgtccagcgcccac

SEQ ID NO: 320940 - DNA, 404 bp, Zea mays
  unsure (1)..(404): unsure at all n locations
cccacgcgtccgattgagaccaactagcatcatagaaagcacaatagtgtaccaacaatggcagccaaaatattttgcctccttatgctccttggtctttctgcaagtgctgctacggcgaccattttcccgcaatgctcgcaagctcctatagcttcccttcttcccccgtacctctcaccagcggtgtcttcggtatgtgaaaacccaattcttcaaccctacaggatccaacaggcaatcacagctggcatcttacctttatcacccttgttcctccaacaatcatcagccctattacatcagttacctttggtgcatttattggcacanaacatcanggcacaacaactacaacaacttgtgctagcaaaccttgctgcctactctcagcaacagcagtt

SEQ ID NO: 320941 - DNA, 389 bp, Zea mays
gcggctgccagccaccgccgccggttcatctaccgccgccggtgcatctgccacctccggttcacctgccacctccggtgcatctcccaccgccggtccacctgccgccgccggtccacctgccaccgccggtccatgtgccgccgccggttcatctgccgccgccaccatgccactaccctactcaaccgccccggcctcagcctcatccccagccacacccatgcccgtgccaacagccgcatccaagcccgtgccagctgcagggaacctgcagcgttggcagcaccccgatcctgggccagtgcgtcgagttcctgaagcatcaatgcagcccgacggcgacgccctactgctcgcctcagtgccagtcgttgcggcagcagtgt

SEQ ID NO: 320942 - DNA, 450 bp, Zea mays
ccaactagcaacatagaaagcacaatagtgtaccaacaatggcagccaaaatattttgcctccttatgctccttggtctttctgcaagtgctgctacggcgaccattttcccgcaatgctcgcaagctcctatagcttcccttcttcccccgtacctctcaccagcggtgtcttcggtatgtgaaaacccaattcttcaaccctacaggatccaacaggcaatcacagctggcatcttacctttatcacccttgttcctccaacaatcatcagccctattacatcagttacctttggtgcatttattggcacaaaacatcagggcacaacaactacaacaacttgtgctagcaaaccttgctgcctactctcagcaacagcagtttcttccattcaaccaactagctgcattgaactctgcttcttatttgcaacaacaacaactaccat

SEQ ID NO: 320943 - DNA, 400 bp, Zea mays
cccggacaagctcgccgacaagctgtgctgcaaggcgtgcaagatcatcaagcagatcgagatcgtcgagcccccgcccccgccgccgcccaagcccaaggaggagccgaagaaggaggagcaagccccgccgccgccggagaagaaggaggaggccgccccgcccccgccggcgaaggtggagccgcccaaggaggagccacccaaggagaagcccccgccacccaaggaggagccgcccaaggagaagccacccccgcccaaggaggagaagcccgccccggcaccgcccaaggaggagaagcccgccccgccgccgcccaaggtggtggaggtcccctacccgtggccgtacccgtacccgtaccctgcgtggccgtccgactgctgctgccaccac

SEQ ID NO: 320944 - DNA, 386 bp, Zea mays
gatcagcaaagcggcagtgcgtagagaggatcgtcgaacagaacagcatgaagatggtcatcgttctcgtcgtgtgcctggctctgtcagctgccagcgcctctgcaatgcagatgccctgcccctgcgcggggctgcagggcttgtacggcgctggcgccggcctgacgacgatgatgggcgccggcgggctgtacccctacgcggagtacctgaggcagccgcagtgcagcccgctggcggcggcgccctactacgccgggtgtggggcagacgagcgcccatgtacccagccgttccgcaacagtgctgccagcaacaaatgaagatgatggacgtgcagtccgtcgcgcatcagctgcagatgatgatgcagcttgagcgtg

SEQ ID NO: 320945 - DNA, 54 bp, Zea mays
ccagctagcaacatatatagcacaatagtgtactaacaatggcagccaaaatat

SEQ ID NO: 320946 - DNA, 421 bp, Zea mays
cccacgcgtccgcccacgcgtccgcaatggctaccaagatattatccctccttgcgcttcttgcgctttttgcgagcgcaacaaatgcgttcattattccacaatgctcacttgctccaagttccattattacacagttcctcccaccagttacttcaatgggcttcgaacacccagctgtgcaagcctataggctacaacaagcaattgcggcgagcgtcttacaacaaccaatttcccagttgcaacaacaatccttggcacatctaacaatacaaaccatcgcaacgcaacagcaacaacaattcctaccagcacttgaccacctagccatggtgaacccttgcgtctacttgcaacagcagttgcttgcatcaaaaccacttgctcttggcaacgtagttgcaaaccaaccacaaca

SEQ ID NO: 320947 - DNA, 415 bp, Zea mays
ctggcaagactatcaccttggaggtggagagctctgacaccattgacaatgtgaaggccaagatccaggacaaggagggcattcccccagaccagcagcgtctgatctttgcgggcaagcagctggaggatggccgcactctcgcggactacaacatccagaaggagagcacccttcaccttgttctccgcctcaggggtggtatgcagatctttgtgaagaccctgactggaaaaaccataaccctggaggttgagagctcggacaccatcgacaatgtgaaggcgaagatccaggacaaggagggcatccccccggaccagcagcgtctgatcttcgccggcaaacagctggaggatggccgcaccctagcagactacaacatccaaaaggagagcaccctacatcttgtgct

SEQ ID NO: 320948 - DNA, 197 bp, Zea mays
attggtggtgccctcttttagattgcttatgagttatagttcaataatgatgggttgtggatgaagcacggggcattccagaaataagaaagtacatttctacataaataaaaaaaacaaaaaaaagacaaacacaaaaaaacataaacaacaaaaaacataaaacacaaaaaaaaaacaagcataaaaaagaccaa

SEQ ID NO: 320949 - DNA, 431 bp, Zea mays
gcaacatagaaagtggaatacagtagcaacaatagagcaacaatggcggccaagatattgtccatccttatgctccttgctctttctgcatgtgttgctaacgcgaccatttttcctcaatactcacaagctcctatagctgcccttcttcccccataccttccatcaatgaccgcttcagtttgtgaaaacccagcccttcaaccctacaggctccaacaagcaatcgcaacaagcaacttacctttatcacccctgttctttcaacaatcgccagccctatctttggtgcagtcattggtacaaaccatcagggcacaacagctgcaacaactcgtgctaccagtgatcagccaagtagctctggcaaacctttctccctactctcagcaacaacaaattcttccattcaaccactgtctacactgaac

SEQ ID NO: 320950 - DNA, 459 bp, Zea mays
caacaagcaacatagaaagtggaatccagtagcaacaacagagcaacaatggcgaccaagatattttccctccttatgctccttgctctttctgcatgtgttgctaacgcgacaattttccctcaatgctcacaagctcctatagcttcccttcttcccccataccttccatcaatgatagcttcagtatgtgaaaacccagctcttcagccctataggctccaacaagcaatcgcagcaagcaacatacctttatcacccttgttgtttcaacaatcgccagccctatctttggtgcagtcattggtacaaaccatcagggcacagcagctgcagcaactcgtgctacctgtgatcaaccaagtagctctggcaaacctttctccctactctcagcaacaaacaatttcttccattcaaccaactgtctacactgaaccctgctgctaatttgcagca

SEQ ID NO: 320951 - DNA, 431 bp, Zea mays
tcagaccattagctttatctactccagatcgcacaagaacccgatcgacaccatgagggtgttgctcgttgccctcgctctcctggctctcgctgcgagcgccacctccacgcatacaagcggcggctgcggctgccagccaccgccgccggttcatctaccgccgccggtgcatctgccacctccggttcacctgccacctgcggtgcatcttccaccgccggtccacctgcccccgccggtccacctgccaccgccggtccatgtgccgacgccggttcatctgccgacgccaccatgccactaccctactcaaccgccccggcctcagcctcatccccagccacacccatgcccgtgccaacagccgcatccaagcccaggccagctgcagggaacctgctgcgttggcagcacccctatcctgggcc

SEQ ID NO: 320952 - DNA, 441 bp, Zea mays
cccacgcgtccgcgaacacctagctgtgcaagcctacaagctacaacaagcgcttgcggcgagcgtcttacaacaaccaattaaccaattgcaacaacaatccttggcacatctaaccatacaaaccatcgcaacacaacagcaacaacagttcctaccagcactgagccaactagatgtggtgaaccctgtcgcctacttgcaacagcaggtgcttgcatccaacccacttgctctggcaaacgtagctgcataccaacaacaacaacaattgcaacagtttctgccagcgctcagtcaactagccatggtgaaccctgccgcctacctacaacagcaacaactgctttcatctagccctctcgttgtgggtaatgcacctacatacctgcaacaacaattgctgcaacagattgtaccagctctgactcagctagctgt

SEQ ID NO: 320953 - DNA, 303 bp, Zea mays
gacgaggcgcatgatctgcacactctggtcccaacgccgcatccgatcgacactgggctgatgatgcggaagggacccaccgacgagatggtgctggagaggaggcaccgccgtgtgatcaagaccatatagtctgccttcatgccgcgtgccaggaagcaggcgtacataatggatctggaagctgagtggtaaaccttacgaccacatcaggcagtgccaaataagctcgtagcaatgctacacaagcacctggatcaagtactggacctattacaccagctacatggaccacatgcattg

SEQ ID NO: 320954 - DNA, 445 bp, Zea mays
  unsure (1)..(445): unsure at all n locations
cagcaaagcggcagtgcgtagagaggatcgtcgaacagaacagcatgaagatggtcatcgttctcgtcgtgtgcctggctctgtcagctgccagcgcctctgcaatgcagatgccctgcccctgcgcggggctgcagggcttgtacggcgctggcgccggcctgacgacgatgatgggcgccggcgggctgtacccctacgcggagtacctgaggcagccgcagtgcagcccgctggcggcggcgccctactacgccgggtgtgggcagccgagcgccatgttccagccgctccggcaacagtgctgccagcagcagatgaggatgatggacgtgcagtccgtcgcgcagcagctgcagatgatgatgcagcttgagcgtgccgctgccgncagcagcagcctgtacgagccagctctgatgcagcagcagcagcagctgctggc

SEQ ID NO: 320955 - DNA, 439 bp, Zea mays
ccctactcaaccgccccggcctcagcctcatccccagccacacccatgcccgtgccaacagccgcatccaagcccgtgccagctgcagggaacctgcggcgttggcagcaccccgatcctgggccagtgcgtcgagtttctgaggcatcagtgcagcccgacggcgacgccctactgctcgcctcagtgccagtcgttgcggcagcagtgttgccagcagctcaggcaggtggagccgcagcaccggtaccaggcgatcttcggcttggtcctccagtccatcctgcagcagcagccgcaaagcggccaggtcgcggggctgttggcggcgcagatagcgcagcaactgacggcgatgtgcggcctgcagcagccgactccatgcccctacgctgctgccggcggtgtcccccactgaagaaactatgtgctgtagtat

SEQ ID NO: 320956 - DNA, 428 bp, Zea mays
cccggacaagctcgccgacaagctgtgctgcaaggcgtgcaagatcatcaagcagatcgagatcgtcgagcccccgcccccgccgccgcccaagcccaaggaggagccgaagaaggaggagcaagccccgccgccgccggagaagaaggaggaggccgccccgcccccgccggcgaaggtggagccgcccaaggaggagccacccaaggagaagcccccgccacccaaggaggagccgcccaaggagaagccacccccgcccaaggaggagaagcccgccccggcaccgcccaaggaggagaagcccgccccgccgccgcccaaggtggtggaggtcccctacccgtggccgtacccgtacccgtaccctgcgtggccgtccgactgctgctgccaccacggccactgcgggtgccactgctgctcct

SEQ ID NO: 320957 - DNA, 358 bp, Zea mays
agaccaacaagcaacatagaaagtggaatccagtagcaacaatagagcaacaatggcgaccaagatactttccctccttatgctccttgctctttctgcatgtgttgctaacgcgacaattttccctcaatgctcacaagctcctatagcttcccttcttcccccataccttccatcaatgatagcttcagtatgtgaaaacccagctcttcaaccctataggctccaacaagcaatcgcagcaagcaacatacctttatcacccttgtttcaacaatcgccagccctatctttggtgcagtcattggtacaaaccatcaaggcacagcagctgcagcaactcgtgctacctgtgatc

SEQ ID NO: 320958 - DNA, 455 bp, Zea mays
attttgagcattcagaaacacacctagcgaagcgcactagcaacgacctaacaacaatggctaccaagatattatccctctttgcgcttcttgccctttttgtgagcgcaacaaatgcgttcattattccacaatgctcacttgctcctagtgccattattccacagttcctccctccagttacttcaatgggcttcgaacacccagctgtgcaagcctacaggctacaacaagcgcttgcggcgagcgtcttacaacaaccaattgcccaattacaacaacaatccttggcacatctaaccatacaaaccatcgcaacgcaacagcaacaacaatttctaccagcactgagccaactagctgtggtgaaccctgtcgcctacttgcaacagcagttgcttgcatccaacccacttgctctggcaaacatagttgcataccaacaacaacaacca

SEQ ID NO: 320959 - DNA, 363 bp, Zea mays
gccacctagccgtggtgaaccctgtcactctacttgcaacagcagctgcttgcatccaacccacttgctctggcgaacgtagctgcataccagcaacaacaacagctgcaacagtttatgccagtgctcagtcaactagccatggtgaaccctgccgtctacctacaactactttcatctagcccgctcgcggtgggcaatgcacctacgtacctacaacaacagttgctgcaacaaattgtaccagctctgactcagctagctgtggcaaaccctgctgcctacttacaacagttgcttccattcaaccaactggctgtgtcaaactctgctgcgtacctacaacagcgacaacagttactt

SEQ ID NO: 320960 - DNA, 448 bp, Zea mays
tgagcattcagaaacacacctagcgaagcgcactagcaacgacctaacaacaatggctaccaagatattatccctctttgcgcttcttgccctttttgtgagcgcaacaaatgcgttcattattccacaatgctcacttgctcctagtgccattattccacagttcctccctccagttacttcaatgggcttcgaacacccagctgtgcaagcctacaggctacaacaagcgcttgcggcgagcgtcttacaacaaccaattgcccaattacaacaacaatccttggcacatctaaccatacaaaccatcgcaacgcaacagcaacaacaatttctaccagcactgagccaactagctgtggtgaaccctgtcgcctacttgcaacagcagttgcttgcatccaacccacttgctctggcaaacatagttgcataccaacaacaacaa

SEQ ID NO: 320961 - DNA, 211 bp, Zea mays
ctgccattcaaccaacttgctttgacaatcctagcagtgttctaccaacaacccatcattggtggtgccctcttttagatttcttatgagttatagttcaataataaagttttttgtctgatgtttgtggctaaaaaaaaaaactaaagcaaaaaaaagaaaaataaaaagtaaaaaaacaaaaataataataaaaactacaagctacaaa

SEQ ID NO: 320962 - DNA, 141 bp, Zea mays
tcgcagctagcaacatagaaagcacattagtttaccaacaatggcagccaaaatattgggcgggcttatgctccttggtcttgtgtgcatatgctgatacagcgaccattttcccacaatgctcgcaagctcctatagctt

SEQ ID NO: 320963 - DNA, 362 bp, Zea mays
cgatcgacaccatgagggtgttgctcgttgccctcgctctcctggctctcgctgcgagcgccacctccacgcatacaagcggcggctgcggctgccagccaccgccgtcggttcatctaccgccgccggtgcatctgccacctccggttcacctgccacctccggtgcatctcccacccccggtccacctgccgccgccggtccacctgccaccgccggtccatgtgccgccgccggttcatctgccgtcgccaccatgccactaccctactcaaccgacccggcctcagcctcatccccagccacacccatgcccgtgccaacagccggatccaagcccgtgccagcttcagggaacctgc

SEQ ID NO: 320964 - DNA, 455 bp, Zea mays
agcaagcaacatacctttatcgcccttgttgtttcaacaatcaccagccctatctttggtgcagtcattggtacaaaccatcagggcacaacagctgcagcaactcgtgctacctgtgatcaaccaagtagctctggcaaacctttctccctactctcagcaacaacaatttcttccattcaaccaactgtctacactgaaccctgctgcttatttgcagcaacaactattaccatttagccagctagctactgcctactctcagcaacaacaacttcttccatttaaccaattggccgcactgaaccccgctgcttatttgcagcagcaaatactactgccatttagcgagctagctgcagcaagtcgtgcttccttcttgacacagcaacagttgctgcctttctacaagcagtttgcggctaaccccgcaaccctcttacaactacaacaat

SEQ ID NO: 320965 - DNA, 199 bp, Zea mays
gatcaaacagtagcgtcagcttttacattatatagcgagagtgatccggcgctgagaagagatggctaaacaccgccgaggttctcatcgctctctacacgcgtacgctcaaggagatcgaggccgtccccaaagaccatggctacctaatagtccgttatttccttcaccaatctccgactgcatatctaccatgagg

SEQ ID NO: 320966 - DNA, 451 bp, Zea mays
atacctctcaccagcggtgtcttcaatgtgtgaaaccccaattgttcaaccctacaggatccaacaggcaatcgcaacaggcatcttaccattatcacccttgttcctccaacaaccgtcagccctattacagcagttacctttggtccatttggtggcacaaaacatcagggcacaacaactacaacaacttgtgctagcaaaccttgctgcatactctcagcaacatcagtttcttccattcaaccaactggctgcattgaactctgctgcttatttgcaacaacaattaccattcagccagctaggtgcttgctacccccaacaatttctttcattcaaccaactagccacattgaactcttgtgcttatttacagcagcaacaactactaccattcagccagctagctgatgtgagccctgctgccttcttgacacaacaacagttg

SEQ ID NO: 320967 - DNA, 447 bp, Zea mays
aattatctaactccaaaaaccatgaagctggtgcttgtggttcttgctttcattgctttagtatcaagtgtttcttgtacacagacaggcggctgcagctgtggtcaacaacaaagccatgagcagcaacatcatccacaacaacatcatccacaaaaacaacaacatcaaccaccaccacaacatcaccagcagcagcaacaccaacaacaacaagttcacatgcaaccacaaaaacatcagcaacaacaagaagttcatgttcaacaacaacaacaacaaccgcagcaccaacaacaacaacaacaacaacagcaccaacaacaacatcaatgtgaaggccaacaacaacatcaccaacaatcacaaggccatgtgcaacaacacgaacagagccatgagcaacaccaaagacagaaccatgagcaacaacattaacaacaattt

SEQ ID NO: 320968 - DNA, 288 bp, Zea mays
ctactaccatttagccagctagctgcagcaaaccgtgcttccttcttgacacagcaacagttgctgcctttctaccagcagtttgcggctaaccccgcaaccctcttacaactacaacaattgttgccctttgtccaacttgctttgacagaccgagcggcctcctaccaacaacacatcattggtggtgccctcttttagattgcttattagttgtaattcaataataaagttttttggatgatgtatgtggccaaccagaaataagaagttacatttccagatttt

SEQ ID NO: 320969 - DNA, 450 bp, Zea mays
  unsure (1)..(450): unsure at all n locations
cccacgcgtccggagaccaacaagcaacatagaaagtggaatacagtagcaacaatagagcaacaatggcggccaagatattttccatccttatgctccttgctctttctgcatgtgttgctaacgcgaccatttttcctcaatactcacaagctcctatagctgcccttcttcccccataccttccatcaatgaccgcttcagtttgtgaaaacccagcccttcaaccctacaggctccaacaagcaatcgcaacaagcaacttacctttatcacccctgttctttcaacaatcgccagccctatctntggtgcagtcattggtacaaaccatcagggcacaacagctgcaacaactcgtgctaccagtgatcagccaagtagctctggcaaacctttctccctactctcaagcacaacaatttcttccattcaaccaactgtctacac

SEQ ID NO: 320970 - DNA, 438 bp, Zea mays
ttctgcaagtgctgctacggcgaccattttcccgcaatgctcacaagctcctatagctgcccttcttcccccgtacctctcaccagcggtgtcttcggtatgtgaaaacccaattcttcaaccctacaggatccaacaggcaatcgcagctggcatcttacctttatcacccttgttcctccaacaatcatcagccctattacagcagttacctttggtgcatttattggcacaaaacatcagggcacaacaactacaacaacttgtgctagcaaaccttgctgcctactctcagcaacagcagtttcttccattcaaccaactagctgcattgaactctgcttcttatttgcaacaacaacaactaccattcagccagctacctgttgcctacccccaacaatttcttccattcaaccaactggcagcattgaactc

SEQ ID NO: 320971 - DNA, 415 bp, Zea mays
caaccctacaggatccaacaggcaatcgcaacaggcatcttaccattatcacccttgttgctgcaacaaccgtcagccctattacagcagttacctttggtccatttggtggcacaaaacatcagggcacaacaactacaacaacttgtgctagcaaaccttgctgcatactctcagcaacatcagtttcttccattcaaccaactggctgcattgaactctgctgcttatttgcaacaacaattaccattcagccagctagttgctgcctacccccagcaatttcttccattcaaccaactagcagcattgaactctgctgcttatttacagcagcaacaactactaccattcaacccagtagcttatgtgagccctggtggctttttgacacaacaacaggtggtggcggtct

SEQ ID NO: 320972 - DNA, 454 bp, Zea mays
caaaaacacaccaagcgaagcgcactagcaacgacctaacaccaatggctaccaagatattagccctccttgcgcttcttgcccttttagtgagcgcaacaaatgcgttcattattccacagtgctcacttgctcctagtgccagtattccacagttcctcccaccagttacttcaatgggcttcgaacatccagccgtgcaagcctacaggctacaactagcgcttgcggcgagcgccttacaacaaccaattgcccaattgcaacaacaatccttggcacatctaaccctacaaaccattgcaacgcaacaacaacaacaacagtttctgccatcactgagccacctagccgtggtgaaccctgtcacctacttgcaacagcagctgcttgcatccaacccacttgctctggcgaacgtagctgcataccagcaacaacaacagctgcaaca

SEQ ID NO: 320973 - DNA, 465 bp, Zea mays
attgagaccaacaagcaacatagaaagtggaatacagtagcaaaaatagagcaacaatggcggccaagatattttccatccttatgctccttgctctttctgcatgtgttgctaacgcgaccatttttcctcaatactcacaagctcctatagctgcccttcttcccccataccttccatcaatgaccgctttagtatgtgaaaacccagcccttcaaccctacaggatccagcaagcaatcgcaacaagcaacttacctttatcacacctgttctttcaacaatcgccagccctatctttggtgcagtcattggtacaaaccatcagggcagaacagttgcagcaactcgtgctaccagtgatcagccaagtagctctggcaaacctttccccctactctcagcaacaacaatttcttccattcaaccaactgtctatactgaaccctgctgcttatttgcagc

SEQ ID NO: 320974 - DNA, 450 bp, Zea mays
agaaagcacaatagtgtaccaacaatggcagccaaaatattttgcttccttatgctccttggtctttctgcaagtgttgctaccgcaaccattttcccacaatgctcacaagctcctatagcttcccttcttcccccatacctctcaccagcggtgtcttcaatgtgtgaaaccccaattgttcaaccctacaggatccaacaggcaatcgcaacaggcatcttaccattatcacccttgttcctccaacaaccgtcagccctattacagcagttacctttggtccatttggtggcacaaaacatcagggcacaacaactacaacaacttgtgctagcaaaccttgctgcatactctcagcaacatcagtttcttccattcaaccaactggctgcattgaactctgctgcttatttgcaacaacaattaccattcaaccagctagttgct

SEQ ID NO: 320975 - DNA, 109 bp, Zea mays
gtaccatcattggcggtgccctcttttagattgcttatgagttatagttcaataatgaagttttttggatgatgtttgtggcttcccagaaataagaaagtacatttct

SEQ ID NO: 320976 - DNA, 454 bp, Zea mays
atgctcacttgctcctagtgccattattccacagttcctcccaccagttacttcaatgggcttcgaacacctagctgtgcaagccaacatgcaacaacaagcgcttgcggcgagcgtcttacaacaaccaattgcccaattgcaacaacaatccttgccacatctaacaatacaagccatcacaacgcaacagcaacaacagttcctaccagcactgagccacctagccatggtgaaccctgccgcctacttgcaagagcagctgcttgcatccaacccacttgctctggcgaacgtagttgcaaaccagcaacaacaacagctacaacagtttctgccaacgctcagtcaactagccatggtgaaccctgccgcctacgtacaacaacaacaactgctttcatctagcccgctcgctgtgggcaatgcacctacatacctgcaacaacaattg

SEQ ID NO: 320977 - DNA, 349 bp, Zea mays
attcagaaacacaccaagcgaagcacattagcaaccacctaacaacaatggctaccaaggatttatcccttcctgggcttcttgggctttttgccagcgcaacaaatgcgttcattattccacaatgctcacttgctccaagttccattattacacagttccttccaccagttacttcaatgggcttcgaacacccagctgtgcaagcctataggctacaacaagcaattgccgcgagcgtcttacaacaaccaatttcccagttgcaacaacaatccttggcacatctaacaatacaaaccatcgcaacgcaacagcaacaacaattcctaccagcactgagccacct

SEQ ID NO: 320978 - DNA, 457 bp, Zea mays
cagcattcaaaaacacaccaagcgaagcgcactagcaacgacctaacaccaatggctaccaagatattagccctccttgcgcttcttgcccttttagtgagcgcaacaaatgcgttcattattccacagtgctcacttgctcctagtgccattattccacagttcctcccaccagttacttcaatgggcttcgaacatccagccgtgcaagcctacaggctacaactagcgcttgcggcgagcgccttacaacaaccaattgcccaattgcaacaacaatccttggcacatctaaccctacaaaccattgcaacgcaacaacaacaacaacaacagtttctgccatcactgagccacctagccgtggtgaaccctgtcacctacttgcaacagcagctgcttgcatccaacccacttgctctggcgaacgtagctgcataccagcaacaacaacagc

SEQ ID NO: 320979 - DNA, 434 bp, Zea mays
caaaccttgctgcctactctcagcaacaacagtttcttccattcaaccaactagctgcattgaactctgcttcttatttgcaacaacaacaactaccattcagccagctatctgctgcctacccccagcaatttcttccattcaaccaactgacagctttgaactctcctgcttatttacagcagcaacaactactaccattcagccagctagctggtgtgagccctgctaccttcttgacacaaccacaattgttgccgttctaccagcacgctgcgcctaacgctggcaccctcttacaactgcaacaattgctgccattcaaccaacttgctttgacaaacccaacagcattctaccaacaacccatcattggtggtgccctcttttagatttcttatgagttatagttcaataataaaagtttttggctg

SEQ ID NO: 320980 - DNA, 453 bp, Zea mays
caactagcaacatagaaagcacaatagtgtaccaacaatggcagccaaaatattttgcttccttatgctccttggtctttctgcaagtgctgctaccgcaaccattttcccacaatgctcacaagctcctatagcttcctttcttcccccatacctctcaccagcggtgtcttcagtatgtgaaaacccaattcttcaaccctacaggatccaacaggcaatcgcagcaggcatcttacctttatcacccttgttcctccaacaaccgtcagccctattacagcagttacctttggtgcatttgttggcacaaaacatcaaggcacaacaactacaacaacttgtgctaggaaaccttgctgcctactctcagcaacagcagtttcttccattcaaccaactggctgcattgaactctgctgcttatttgcaacaacaactaccattcagtca

SEQ ID NO: 320981 - DNA, 57 bp, Zea mays
gaataagaatactaattgtaattataatgctaatatcatagtacaaacgtcatacgg

SEQ ID NO: 320982 - DNA, 126 bp, Zea mays
ggtaaatgggggagaatggagaactgtttataacttcacagccctgtgcatagggaatgccaaatacctttattctcatatcttgagtattatgtccccaaaaggctcttaaagctccaaatacat

SEQ ID NO: 320983 - DNA, 451 bp, Zea mays
gaccaactagcaacatagaaagctcaatagtgtaccaacaatggcagccaaaatatttggcctccttatgctccttggtctttctgcaagtgctgctacggcgaccattttcccgcaatgctcgcaagctcctatagcttcccttcttcccccgtacctctcaccagcggtgtcttcggtatgtgaaaacccaattcttcaaccctacaggatccaacaggcaatcacagctggcatcttacctttatcacccttgttcctccaacaatcatcagccctattacatcagttacctttggtgcatttattggcacaaaacatcagggcacaacaactacaacaacttgtgctagcaaaccttgctgcctactctcagcaacagcagtttcttccattcaaccaactagctgcattgaactctgcttcttatttgcaacaacaacaactacca

SEQ ID NO: 320984 - DNA, 430 bp, Zea mays
gagaccaactagcaacatagaaagcacaatagtgtaccaacaatggcagccaaaatattttgcctccttatgctccttggtctttctgcaagtgctgctacggcgaccattttcccgcaatgctcgcaagctcctatagcttcccttcttcccccgtacctctcaccagcggtgtcttcggtatgtgaaaacccaattcttcaaccctacaggatccaacaggcaatcacagctggcatcttacctttatcacccttgttcctccaacaatcatcagccctattacatcagttacctttggtgcatttattggcacaaaacatcagggcacaacaactacaacaacttgtgctagcaaaccttgctgcctactctcagcaacagcagtttcttccattcaaccaactagctgcattgaactctgcttctt

SEQ ID NO: 320985 - DNA, 289 bp, Zea mays
cagaggtgggctggcttctcctcccccttttaccaagtcctcctcgggttagggttccttagggttttgtggaggggcgatggcggcggctgatgtggagtaccgttgcttcgtcggcgggcttgcctgggccaccagcaacgagtcgctggagaatgccttcgcctcctacggcgagatcctcgactccaaggtcatcaccgaccgggagacggggaggtctcgcggcttcggcttcgttaccttcgccttcgagaactccatgctcgacgctatcgagaacatgaac

SEQ ID NO: 320986 - DNA, 468 bp, Zea mays
cagcaagcaacatagaaagtagaatccattagcaacaatagagcatcaatggcgaccaagatattttccctccttatgctccttgctctttctacatgtgttgctaacgcgacaattttccctcaatgctcacaagctcctatagcttcccttcttcccccataccttccatcaattatagcttcagtatgtgaaaacccagctcttcaaccatataggcttcaacaagcaatcgcagcaagcaacatacctttatcgcccttgttgtttcaacaatcaccagccctatctttggtgcagtcattggtacaaaccatcagggcacaacagctgcagcaactcgtgctacctgtgatcaaccaagtagctctggcaaacctttctccctactctcagcaacaacaatttcttccattcaaccaactgtctacactgaaccctgctgcttatttgcagcaacaactatta

SEQ ID NO: 320987 - DNA, 464 bp, Zea mays
acccacgcgtccgcatctagcaacatagaaagcacaatagtgtaccaacaatggcagccaaaatattttgcctccttatgctccttggtctttctgcaagtgctgctacggcgaccattttcccgcaatgctcgcaagctcctatagcttcccttcttcccccgtacctctcaccagcggtgtcttcggtatgtgaaaacccaattcttcaaccctacaggatccaacaggcaatcacagctggcatcttacctttatcacccttgttcctacaacaatcatcagccctattacatcagttacctttggtgcatttattggcacaaaacatcagggcacaacaactacaacaacttgtgctagcaaaccttgctgcctactctcagcaacagcagtttcttccattcaaccaactagctgcattgaactctgcttcttatttgcaacaacgacaactaccattc

SEQ ID NO: 320988 - DNA, 418 bp, Zea mays
gcaacatagaaagcacaatagtgtaccaacaatggcagccaaaatattttgcctgcttatgctccttggtctttctgcaagtgctgctacggcgaccattttcccacaatgctcacaagctcctatagcttcccttcttcccccgtacctctcaccagcggtgtcttcggtatgtgaaaacccaattcttcaaccctataggatccaacaggcaatcgcagctggcatcttacctttatcacccttgttcctccaacaatcatcagccctattacagcagttacctttggtgcatttattggcacaaaacatcagggcacaacaactacaacaacttgtgctagcaaaccttgctgcctactctcagcaacaacagtttcttccattcaaccaactagctgcattgaactctgcttct

SEQ ID NO: 320989 - DNA, 424 bp, Zea mays
gcaacatcaattatctaactccaaataccatgaagctggtgcttgggttcttgggtggttgctttagtatcaagtgtttcttgacacagacaggcggctgcagctgtggtcaacaacaaagccatgagcagcaacatcatccacaacaacatcatccacaaaaacaacagcatcaaccaccaccacaacatcaccagcagcagcaacaccaacaacaacaagttcacatgcaaccacaaaaacatcagcaacaacaagaagttcatgttcaacaactacaacaacaaccgcagcaccaacaacaacaacaacatcaacagcaccaacaacaacatcaatgtgaaggccaacaacaacatcaccaacaatcacaaggccatgtgcaacaacacgaacagagccatgagcaacaccaaggacagag

SEQ ID NO: 320990 - DNA, 445 bp, Zea mays
ccaacaagcaacatagaaagtggaatccagtagcaacaatagagcaacaatggcgaccaagatattttccctggttatgctccttgctctttctacatgtgttgctaacgcgacaattttccctcaatgctcacaagctcctatagcttcccttcttcccccataccttccatcaattatagcttcaatatgtgaaaacccagctcttcaaccatataggcttcaacaagcaatcgcagcaagcaacatacctttatcgcccttgttgtttcaacaatcgccagccctatctttggtgcagtcattggtacaaaccatcagggcacaacagctgcagcaactcgtgctacctctgatcaaccaagtagctctggcaaacctttctccctactctcagcaacaacaatttcttccattcaaccaactgtctacactgaaccctgct

SEQ ID NO: 320991 - DNA, 363 bp, Zea mays
ggcagggcggcgggccctcgtgcagtgtcatgtgaactagcatacccatgcatgcgtgtggggtggtgtcgctctcttgtcttgccattttccgtgctcgtgtttcgtctcgtggaaaataagcaatttaaacttagcttaatttcctgtatgtcatgtgttcgttttagtgtgtatgcctcctatatattatggtcgtatgtgtgtgtcgacatgcttgtgtctctcagtatgtgcgtgtgtctgtttgtatgtgtcagcatcagtgtatgtaagggtcggtttggtaagttctatcttattctgattcttcgtgagaattagttctatgacatataataactacagttagatttcttgaca

SEQ ID NO: 320992 - DNA, 398 bp, Zea mays
aatggcagccaaaatattttgcttccttatgctccttggtctttctgcaagtgttgctaccgcaaccattttcccacaatgctcacaagctcctatagcttcccttcttcccccatacctctcaccagcggtgtcttcaatgtgtgaaaccccaattgttcaaccctacaggatccaacaggcaatcgcaacaggcatcttaccattatcacccttgttcctccaacaaccgtcagccctattacagcagttacctttggtccatttggtggcacaaaacatcagggcacaacaactacaacaacttgtgctagcaaaccttgctgcatactctcagcaacatcagtttcttccattcaaccaactggctgcattgaactctgctgcttatttgcaac

SEQ ID NO: 320993 - DNA, 384 bp, Zea mays
cttttagattgcttatgagggcaccaccaaagatgccttcctcgcagaccccggtggcgctactatgcacgacccgtctgaaatccacaacctgctcatctacatcgactttgcccgcctccagcattggctcgttgaccgcaagcgactgccgcacgactgtcggaagcgcctcgacgatattagcgccctaatcgtgcccgctttctcacccctgccgctgaacctgcacccctcactcctacacctcgatccagaagaaattgtctaccttgaatcaaagaagatatacagcattctcctacaatccaacaccgacagtcgtaacatatttgaccaacttacggtatccccatttgaatgctagtcaattattaaagctta

SEQ ID NO: 320994 - DNA, 390 bp, Zea mays
ggctggtacgctgccttaactgctgctcttgatcgccgacggcggcggcgggggtgtgccgttccattcgtgctgctaatccaagcggtagaggttgtggtagatatcaacaaaaggaagaagaagaagagggggctttcggtttcccggcgtggggttcgtgtgtgtccgatccgatcattttgaggatcggatttgctgctagtcggtggacaagaacagattgttcttggctccttgctgcaaaattgccatatggtgatggcgattggagaataagaactgggcttgtttgtatatgcatctgatgtatcaaagattgatactgctgctagttcaactaatgtaaatacttcagtttggtgtgatgaattgcttcatgccttgtcc

SEQ ID NO: 320995 - DNA, 427 bp, Zea mays
gaccaactagcaacatagaaagcacaatagtgtaccaacaatggcagccaaagtatggtgcctccttatgctccttggtctttctgcaagtgctgctacggcgaccattttcccgcaatgctcgcaagctcctatagcttcccttcttcccccgtacctctcaccagcggtgtcttcggtatgtgaaaacccaattcttcaaccctacaggatccaacaggcaatcgcagctggcatcttacctttatcacccttgttcctccaacaatcatcagccctattacaacagttacctttggtgcatttattggcacataacatcaaggcacaacaactacaacaacttgtgctagcaaaccttgctgcctactctcagcaacagcagcttcttccattcaaccaactaggttcattgaactctgcttct

SEQ ID NO: 320996 - DNA, 262 bp, Zea mays
ccactcatccactgcaattatctcacaacatacaacttttctttacctaatcaacaaaacaacctaatgcggggatcaccacacactacccaacctccactcctaacccccttactaccactatctacccatccactccatcacataccaacatctcctacattccaaaatcatactaaaccaccaaacccatatgaaccctgccttctactttcaacactacttcattgaataatccatacttactttcatcaacatcatt

SEQ ID NO: 320997 - DNA, 431 bp, Zea mays
  unsure (1)..(431): unsure at all n locations
caactagcaacatagaaagcacaatattgtaccaataatggcagccaaaataggttgcctcattatgctccttggtctttctgcaagtgctgctacggcgagcattttcccgcaatgctcacaagctcctatagcttcccttcttcccccatacctctcaccagcgatgtcttcagtatgtgaaaatccaattcttctaccctacaggatccaacaggcaatcgcagcaggcatcttacctttatcacccttgttcctccaacaatcatcagccctattacagcagttacctttggtgcatttattggcacaaaacatcagggcacatcaactactacaactcgtgctagcaaaccttgctgcctactctcagcaacagcagttacctntggtgcatttgttggcacaaaacatcaaggcacaacaactac

SEQ ID NO: 320998 - DNA, 429 bp, Zea mays
cccacgcgtccgagaccaactagcaacatagaaagcacaatagtgtaccaacaatggcagccaaaatattttgcctccttatgctccttggtctttctgcaagtgctgctacggcgaccattttcccgcaatgctcgcaagctcctatagcttcccttcttcccccgtacctctcaccagcggtgtcttcggtatgtgaaaacccaattcttcaaccctacaggatccaacaggcaatcacagctggcatcttacctttatcacccttgttcctccaacaatcatcagccctattacatcagttacctttggtgcatttattggcacaaaacatcagggcacaacaactacaacaacttgtgctagcaaaccttgctgcctactctcagcaacagcagtttcttccattcaaccaactagctgcattga

SEQ ID NO: 320999 - DNA, 63 bp, Zea mays
gttttttggatgatgtatgtggccaaccagaaataagaagttacatttccagattctaatgtg

SEQ ID NO: 321000 - DNA, 422 bp, Zea mays
gtgaagtgctccgggaacacgcatctttgctgacctgatcgatacggcaagcatcgggatggggagcacctgatgattaccaagcggccacgtgtgagacccgtactagcactatctacacatcgacttcatcacctaccgccaggtcctacagttcataatcatactgaatcgcctaaccctgaggaaccgtggcttctacttgcaaaagttgttgatggcataagagatacttaatgtcatcaacgtcattaacgaccaggcactgcaacagctgcacatgaccgtgcaagaggtcaagtacctaggcatggcgaacacgtggcggctacctacaactacagcagctgccgtcatcgaggccgctacctcggtccaatgcacctacatagctgcagcaactactgctgcagcagattgta

SEQ ID NO: 321001 - DNA, 425 bp, Zea mays
caatagtgtaccaacaatggcagccaaaatattttgcctccttatgctccggggggtttctgcaagtgctgctacggcgaccattttcccacaatgctcacaagctcctatagcttcccttcttcccccgtacctctcaccagcggtgtcttcggtatgtgaaaacccaattcttcaaccctataggatccaacaggcaatcgcagctggcatcttacctttatcacccttgttcctccaacaatcatcagccctattacagcagttacctttggtgcatttattggcacaaaacatcagggcacaacaactacaacaacttgtgctagcaaaccttgctgcctactctcagcaacaacagtttcttccattcaaccaactagctgcattgaactctgcttcttatttgcaacaacaacaactac

SEQ ID NO: 321002 - DNA, 423 bp, Zea mays
agaccaactagcaacatagaaagcacaatagtgtaccaacaatggcagccaaaatagttggcctccttatgctccttggtctttctgcaagtgctgctacggcgaccattttcccgcaatgctcgcaagctcctatagcttcccttcttcccccgtacctctcaccagcggtgtcttcggtatgtgaaaacccaattcttcaaccctacaggatccaacaggcaatcacagctggcatcttacctttatcacccttgttcctccaacaatcatcagccctattacatcagttacctttggtgcatttattggcacaaaacatcagggcacaacaactacaacaacttgtgctagcaaaccttgctgcctactctcagcaacagcagtttcttccattcaaccaactagctgcattgaactctg

SEQ ID NO: 321003 - DNA, 424 bp, Zea mays
atgttcccgcaatgctcgcaagctcctatagcttcccttcttcccccgtaccgcgtcggcagcggtgtcttcggtatgtgaaaacccaattcttcaaccctacaggatccaacaggcaatcgcagctggcatcttacctttatcacccttgttcctccaacaatcatcagccctattacaacagttacctttggtgcatttattggcacaaaacatcagggcacaacaactacaacaacttgtgctagcaaaccttgctgcctactctcagcaacagcagtttcttccattcaaccaactaggttcattgaactctgcttcttatttgcaacaacaacaactaccattcagccagctacctgctgcctacccacagcaatttcttccattcaaccaactagcagcattgaactctcctgcttat

SEQ ID NO: 321004 - DNA, 421 bp, Zea mays
  unsure (1)..(421): unsure at all n locations
gcattcagaaacacacctagcgaagcgcactagcaacgacctaacaacaatggcttgcaagacattatccctccttgcgcttcttgccctttttgtgagtgcaacaaatgcgttcattattccacaatgctcacttgctccgagtgccattattccacagttcctccctccagttacttcaatgggcttcgaacacccagctgtgcaagcctataggctacaacaagcgcttgcggcgagcgtcttagaacaaccaattgcccaattacaacaacaatccttggcacatctaaccatacaaaccatcgcaacgcagcagcaacaagcactgaaccacctagccgtggtgaaccctatcgcctacttgcaacaacagctgcttgcatccaacccacttgctnntgcaaacgtagctgcatac

SEQ ID NO: 321005 - DNA, 430 bp, Zea mays
caccaagcgaagcacattagcaacaacctaacaacaatggctaccaagatattgtcgctccttgcgcttcttgcgctttttgcgagcgcaacaaatgcgttcattattccacaatgctcacttgctccaagttccattattacacagttcctcccaccagttacttcaatgggcttcgaacacccagctgtgcaagcctataggctacaacaagcaattgcggcgagcgtcttacaacaaccaatttcccagttgcaacaacaatccttggcacatctaacaatacaaaccatcgcaacgcaacagcaacaacaattcctaccagcactgagccacctagccatggtgaaccctgccgcctacttgcaacagcagttgcttgcatcaaacccacttgctctggcaaacgtagttgcaaaccagccacaac

SEQ ID NO: 321006 - DNA, 428 bp, Zea mays
caacaagcaacatagaaagtggaatccagtagcaacaacagagcaacaatggcgacgaagatattttccctccttatgctccttgctctttctgcatgtgttgctaacgcgacaattttccctcaatgctcacaagctcctatagcttcccttcttcccccataccttccatcaatgatagcttcagtatgtgaaaacccagctcttcagccctataggctccaacaagcaatcgcagcaagcaacatacctttatcacccttgttgtttcaacaatcgccagccctatctttggtgcagtcattggtacaaaccatcagggcacagcagctgcagcaactcgtgctacctgtgatcaaccaagtagctctggcaaacctttctccctactctcagcaacaacaatttcttccattcaaccaactgtc

SEQ ID NO: 321007 - DNA, 355 bp, Zea mays
tggacgtcagcctagcaattagctcatcgactccagattggagaactcgacaccatgaaggtgctgatcgttgcccttgctctcctggcgctcgctgcgagcgccgcctccagtacaagcggcggctgtggctgccagacaccaccgtttcatctaccgcctccgttctatatgccgcctccgttctatctgccgccgcagcagcagccgcagccatggcaataccccactcaaccaccgcagctaagcccgtgccagcagttcggatcctgcggcgtcggcagcgtcggcagcccgttcctgggccagtgcgtcgagttcctgaggcaccagtgcaagccggcggcgacgccct

SEQ ID NO: 321008 - DNA, 432 bp, Zea mays
gaccaactagcaacatagaaagcacaatagtgtaccaacaatggcagccaaaatatgtggggctccttatgctccttggtctttctgcaagtgctgctacggcgaccattttcccgcaatgctcgcaagctcctatagcttcccttcttcccccgtacctctcaccagcggtgtcttcggtatgtgaaaacccaattcttcaaccctacaggatccaacaggcaatcgcagctggcatcttacctttatcacccttgttcctccaacaatcatcagccctattacaacagttacctttggtgcatttattggcacaaaacatcagggcacaacaactacaacaacttgtgctagcaaaccttgctgcctactctcagcaacagcagtttcttccattcaaccaactaggttcattgaactctgcttcttatt

SEQ ID NO: 321009 - DNA, 428 bp, Zea mays
atgttgcctccttatgctccttggtctttctgcaagtgctgctacggcgaccatttgcccgcaatgctcgcaagctcctatagcttcccttcttcccccgtacctctcaccagcggtgtcttcggtatgtgaaaacccaattcttcaaccctacaggatccaacaggcaatcacagctggcatcttacctttatcacccttgttcctccaacaatcatcagccctattacatcagttacctttggtgcatttattggcacaaaacatcagggcacaacaactacaacaacttgtgctagcaaaccttgctgcctactctcagcaacagcagtttcttccattcaaccaactagctgcattgaactctgcttcttatttgcaacaacaacaactaccattcagccagctacctgctgcctacccccagc

SEQ ID NO: 321010 - DNA, 432 bp, Zea mays
  unsure (1)..(432): unsure at all n locations
gagcaaccaagtagctctggcaaacctttctccctactctcagcaacaacaatttcgtccattcaaccaactgtctacactgaaccctgctgcttatttgcagcaacaactattaccattcagccagctagctactgcctactctcagcaacaacaacttcttccatttaaccaattggccgcactgaaccccgctgcttatttgcagcagcaaatactactaccatttagccagctagctgcagcaaaccgtgcttccttcttgacacagcaacagttgctgcctttctaccagcagtttgcggctaaccccgcaaccctcttacaactacaacaattgttgccctttgtccaacttgctttgacagaccgagcggcctnctaccaacaacacatcattggtggtgccctcttttagattgcttattagtt

SEQ ID NO: 321011 - DNA, 422 bp, Zea mays
gcaacatagaaagcacaatagtgtaccaacaatggcagccaaaatattttgcttccgtatgctccttggtctttctgcaagtgttgctaccgcaaccattttcccacaatgctcacaagctcctatagcttcccttcttcccccatacctctcaccagcggtgtcttcaatgtgtgaaaccccaattgttcaaccctacaggatccaacaagcaatcgcaacaggcatcttaccattatcacccttgttcctgcaacaaccgtcagccctattacagcagttacctttggtccatttggtggcacaaaacatcaaggcacaacaactacaacaacttgggctagcaaaccctgctgcatactctcaacaacatcaagttcttccattcaaccaactggctgcattgaactctgcttgctatt

SEQ ID NO: 321012 - DNA, 372 bp, Zea mays
gccacgcgtaggggcgccatggacgtctgcttgccctaccccgacctggactaggtgatcaagcacgccagggacatcgagacggccgcctccttctaccacgccgacttgggctacaccgagcggcgcctctaccagcgccacatgtacgcggagctggagcgcgtcgcgagcaccatgccatagacgccgcattaccatcggtagacggacgagctgacggatccggctcagctatctgactcatactacagccttaggagctccgtggatgtctgcttaggcaacgcatgcttgactcgtgaggcaagaccgccgaagacgtaaatgcaaccgcggagcactcgctacgagaagcgccatgtataacaa

SEQ ID NO: 321013 - DNA, 422 bp, Zea mays
gcattcagaaacacaccaagcgaagcacattagcaacaacctaacaacaatggctagcaagatattatccctccttgcgcttcttgcgctttttgcgagcgcaacaaatgcgttcattattccacaatgctcacttgctccaagttccattattacacagttcctcccaccagttacttcaatgggcttcgaacacccagctgtgcaagcctataggctacaacaagcaattgcggcgagcgtcttacaacaaccaatttcccagttgcaacaacaatccttggcacatctaacaatacaaaccatcgcaacgcaacagcaacaacaattcctaccagcactgagccacctagccatggtgaaccctgccgtctacttgcaacagcagttgcttgcatcaaacccacttgctctggcaaacg

SEQ ID NO: 321014 - DNA, 423 bp, Zea mays
ctagcaacatagaaagcacaatagtgtaccaacaatggcagccaaaatattttgccgcctgatgctccttggtctttctgcaagtgctgctacggcgaccattttcccacaatgctcacaagctcctatagcttcccttcttcccccgtacctctcaccagcggtgtcttcggtatgtgaaaacccaattcttcaaccctataggatccaacaggcaatcgcagctggcatcttacctttatcacccttgttcctccaacaatcatcagccctattacagcagttacctttggtgcatttattggcacaaaacatcagggcacaacaactacaacaacttgtgctagcaaaccttgctgcctactctcagcaacaacagtttcttccattcaaccaactagctgcattgaactctgcttctta

SEQ ID NO: 321015 - DNA, 430 bp, Zea mays
cggacgcgtgggttcaaaaacacaccatagcgaagcgcactagcaacgacctagcgcgatggctaccaagatattagccctccttgcgcttcttgcccttttagtgagcgcaacaaatgcgttcattattccacagtgctcacaagctcctatagcttcccttcttcccccatacctctcaccagcggtgtcttcaatgtgtgaaaacccaattgttcaaccctacaggatccaacaggcaatcgcaacaggcatcttaccattatcacccttgttcctccaacaaccgtcagccctattacagcagttacctttggtccatttggtggcacaaaacatcagggcacaacaactacaacaacttgtgctagcaaaccttgctgcatactctcagcaacatcagtttcttccattcaaccaactggctgca

SEQ ID NO: 321016 - DNA, 431 bp, Zea mays
agcaattagctcatcgactccagattggagaactcgacaccatgaaggtgctgatcgttgcccttgctctcctggcgctcgctgcgagcgccgcctccagtacaagcggcggctgtggctgccagacaccaccgtttcatctaccgcctccgttctatatgccgcctccgttctatctgccgccgcagcagcagccgcagccatggcaataccccactcaaccaccgcagctaagcccgtgccagcagttcggatcctgcggcgtcggcagcgtcggcagcccgttcctgggccagtgcgtcgagttcctgaggcaccagtgcagcccggcggcgacgccctacggctcgccacagtgccaggcgctgcagcagcagtgctgccaccagatcaggcaggtggagccgctgcaccggtaccaggcgacatac

SEQ ID NO: 321017 - DNA, 424 bp, Zea mays
caagcaacatagaaagtggaatccagtagcaacaatagagcaacaatggcgaccaagatactttccctccttatgctccttgctctttctgcatgtgttgctaacgcgacaattttccctcaatgctcacaagctcctatagcttcccttcttcccccataccttccatcaatgatagcttcagtatgtgaaaacccagctcttcaaccctataggctccaacaagcaatcgcagcaagcaacatacctttatcacccttgtttcaacaatcgccagccctatctttggtgcagtcattggtacaaaccatcaaggcacagcagctgcagcaactcgtgctacctgtgatcaaccaagtagctctggcaaacctttctccctactatcagcaacaacaatttcttccattcaaccaactatcta

SEQ ID NO: 321018 - DNA, 429 bp, Zea mays
gggcacagcagctgcagcaactcgtgctacctgtgatcaaccaagtagctctggcagacctttctccctactctcagcaacaacaatttcttccattcaaccaactgtctacactgaaccctgctgcttatttgcagcaacaactattaccattcagccagctagctactgcctactctcagcaacaacaacttcttccatttaaccaattggccgcactgaaccccgctgcttatttgcagcagcaaatactactaccatttagccagctagctgcagcaaaccgtgcttccttcttgacacagcaacagttgctgcctttctaccagcagtttgcggctaaccccgcaaccctcttacaactacaacaattgttgccctttgtccaacttgctttgacagaccgagcggtcttctaccaacaacaca

SEQ ID NO: 321019 - DNA, 433 bp, Zea mays
cacaatagtgtaccaacaatggcagccaaaatattttgcctccttatgctccttgggctttctgcaagtgctgctacggcgaccattttcccacaatgctcacaagctcctatagcttcccttcttcccccgtacctctcaccagcggtgtcttcggtatgtgaaaacccaattcttcaaccctataggatccaacaggcaatcgcagctggcatcttacctttatcacccttgttcctccaacaatcatcagccctattacagcagttacctttggtgcatttattggcacaaaacatcagggcacaacaactacaacaacttgtgctagcaaaccttgctgcctactctcagcaacaacagtttcttccattcaaccaactagctgcattgaactctgcttcttatttgcaacaacaacaactaccattca

SEQ ID NO: 321020 - DNA, 425 bp, Zea mays
gttgtttcaacaatcaccagccctatctttggtgcagtcattggtacaaaccatcagggcacaacagctgcagcaactcgtgctacctgtgatcaaccaagtagctctggcaaacctttctccctactctcagcaacaacaatttcttccattcaaccaactgtctacactgaaccctgctgcttatttgcagcaacaactattaccatttagccagctagctactgcctactctcagcaacaacaacttcttccatttaaccaattggccgcactgaaccccgctgcttatttgcagcagcaaatactactgccatttagcgagctagctgcagcaagtcgtgcttccttcttgacacagcaacagttgctgcctttctacaagcagtttgcggctaaccccgcaaccctcttacaactacaac

SEQ ID NO: 321021 - DNA, 419 bp, Zea mays
aatcatcattcatcttagtagtataggcaccaaatcaaatctgcaacatcaatggtggaactccaaaaaccatgaagctggtgcttgtggttcttgctttcattgctttagtatcaagtgtttcttgtacacagacaggcggctgcagctgtggtcaacaacaaagccatgagcagcaacatcatccacaacaacatcatccacaaaaacaacaacatcaaccaccaccacaacatcaccagcagcagcaacaccaacaacaacaagttcacatgcaaccacaaaaacatcagcaacaacaagaagttcatgttcaacaacaacaacaacaaccgcagcaccaccaccaacaacaacaacaacagcaccaacatcaacatcaatgtgaaggccaacatcatcatcaccaacaatcacaa

SEQ ID NO: 321022 - DNA, 426 bp, Zea mays
gaccaactagcaacatagaaagcacaatagtgtaccaacaatggcagccaaaatatgttgcctccttatgctccttggtctttctgcaagtgctgctacggcgaccattttcccgcaatgctcgcaagctcctatagcttcccttcttcccccgtacctctcaccagcggtgtcttcggtatgtgaaaacccaattcttcaaccctacaggatccaacaggcaatcgcagctggcatcttacctttatcacccttgttcctccaacaatcatcagccctattacaacagttacctttggtgcatttattggcacaaaacatcaaggcacaacaactacaacaacttgtgctagcaaaccttgctgcctactctcagcaacagcagtttcttccattcaaccaactaggttcattgaactctgcttc

SEQ ID NO: 321023 - DNA, 428 bp, Zea mays
ccagcaagcaacatagaaagtagaatccattagcaacaatagagcaacaatggcgacgaagatattttccctccttatgctccttgctctttctacatgtgttgctaacgcgacaattttccctcaatgctcacaagctcctatagcttcccttcttcccccataccttccatcaattatagcttcagtatgtgaaaacccagctcttcaaccatataggcttcaacaagcaatcgcagcaagcaacatacctttatcgcccttgttgtttcaacaatcaccagccctatctttggtgcagtcattggtacaaaccatcagggcacaacagctgcagcaactcgtgctacctgtgatcaaccaagtagctctggcaaacctttctccctactctcagcaacaacaatttcttccattcaaccaactgt

SEQ ID NO: 321024 - DNA, 439 bp, Zea mays
gaccaacaagcaacatagaaagtggaatccagtagcaacaatagagcaacaatggcgaccaagatattttccctccttatgctccttgctctttctacatgtgttgctaacgcgacaattttccctcaatgctcacaagctcctatagcttcccttcttcccccataccttccatcaattatagcttcaatatgtgaaaacccagctcttcaaccatataggcttcaacaagcaatcgcagcaagcaacatacctttatcgcccttgttgtttcaacaatcgccagccctatctttggtgcagtcattggtacaaaccatcagggcacaacagctgcagcaactcgtgctacctctgatcaaccaagtagctctggcaaacctttctccctactctcagcaacaacaatttcttccattcaaccaactgtctacactga

SEQ ID NO: 321025 - DNA, 351 bp, Zea mays
cccactcaacctatgtatcttacactactaccaaactcataacaacccaatccacaacattacccctacggacctttctaaatctctcctggctctcaaatccatctacacctactccccaaccatcaccaccctccctacacatccacacacacaccttaatcaaacaacccactatccaatactacctactactcaccacccacctaccctccatcttaacattattatccacacacctacaacacccaacctccctactaacaaccatatactccacccatttcactactccaaccactacctccatcacacctactacaacatctcttaccaacactcatacacaca

SEQ ID NO: 321026 - DNA, 357 bp, Zea mays
ctttgattctacattccatgtaattagataatataacactcatttaccttgcctctagcgtactctttaaaagttaggtttccataaaaccattcaataccatatttacactcttatataaccacaccacaatttcacctttaaagctgcaatagaatacccaatatctatcattatcatcactttactacatatttttcctactatcttacattttcattcccacatatcatttcccaagcaacttttcatacaacctcatgatccaccatatgtactacagtttccttaccacaatcactccgaacataaatgctctttccccgatacttatcaacattatttaatgccttcaca

SEQ ID NO: 321027 - DNA, 446 bp, Zea mays
accaactagcaacatagaaagcacaatagtgtaccaacaatggcagccaaaatatttggcctgcttatgctccttggtctttctgcaagtgctgctacggcgaccattttcccgcaatgctcgcaagctcctatagcttcccttcttcccccgtacctctcaccagcggtgtcttcggtatgtgaaaacccaattcttcaaccctacaggatccaacaggcaatcgcagctggcatcttacctttatcacccttgttcctccaacaatcatcagccctattacaacagttacctttggtgcatttattggcacaaaacatcagggcacaacaactacaacaacttgtgctagcaaaccttgctgcctactctcagcaacagcagtttcttccattcaaccaactaggttcattgaactctgcttcttatttgcaacaacaacaact

SEQ ID NO: 321028 - DNA, 72 bp, Zea mays
gacagcatccattccacagtcaccagagcactagagcagagcaacaactgacaagagcagagcgagatcgtc

SEQ ID NO: 321029 - DNA, 413 bp, Zea mays
caacaacttgtgctagcaaaccttgctgcctactctcagcaacagcagtttcgtccattcaaccaactagctgcattgaactctgcttcttatttgcaacaacaacaactaccattcagccagctacctgctgcctacccccagcaatttcttccattcaaccaactggcagcattgaactctcctgcttatttacagcagcaacaactactaccattcagccagctagctggtgtgagccctgctaccttcttgatacaaccacagatcgctgacgttctaccagcacgctgcgcctaacactggcaccctcttacaactgctacaattgctgccattcaaccaacttgctttgacaaacccagtatcgttataccaacaacccatcattggtgctgccctcttttagatac

SEQ ID NO: 321030 - DNA, 391 bp, Zea mays
cagcaacaactaccattcagccagctatctgctgcctacccccagcaatttcgggcggtcaaccaactgacagctttgaactctcctgcttatttacagcagcaacaactactaccattcagccagctagctggtgtgagccctgctaccttcttgacacaaccacaattgttgccgttctaccagcacgctgcgcctaacgctggcaccctcttacaactgcaacaattgctgccattcaaccaacttgctttgacaaacccaacagcattctaccaacaacccatcattggtggtgccctcttttagatttcttatgagttatagttcaataataaagttttttgtctgatgtttgtggcttcccagaaataagaaagtacatttctag

SEQ ID NO: 321031 - DNA, 170 bp, Zea mays
acgacccgggtaatttaacgccgaactatcctatgctacatgctacataacggccacctaccgagcatcttacagcgattatccatatgccttcgacagtcctattgcctatggcggcacctatgcctacggcatttgattttccgaagaaaccatgcccatcaactact

SEQ ID NO: 321032 - DNA, 385 bp, Zea mays
cagaaacacaccaagcgaagcgcactagcaacaacctaacaacaatggctaccaagagattatccctccttgcgcttcttgcgctttttgcgagcgcaacaaatgcgtccattattccacaatgctcacttgctcctagttccattattccacagttcctcccaccagttacttcaatggccttcgaacacccagctgtgcaagcctataggctacaacaagcgattgcggcgagcgtcttacaacaaccaattgcccaattgcaacaacaatccttggcacatctaacaatacaaaccatcgcaacgcaacagcaacaacagttcctaccagcactgagccacctagccatggtgaaccctgtcgcctacttgcaacagcagct

SEQ ID NO: 321033 - DNA, 374 bp, Zea mays
ccgacgcgtccgagcttcccttctttcctcgtacctctcaccagcggtgtcttcggtgtgtgaatacccagttcttcaaccctacatgatccaacaggcaatcgcagctggcatcttacctttatcacccttgttccttcaacaatcatcagccctattacagcagttacctttggtgcatttattggcacataacatcaggtcacaacaactacaacaacttttgctatcaaaccttgctgcctactctcatcaacatctgtttcttcattcaaccatctatcttcattgatctctactttttattttttacaacatcttcttccattctattcagctttctttttcttaccttctatcatttttttttattt

SEQ ID NO: 321034 - DNA, 437 bp, Zea mays
gaaagcacaatagtgtaccaacaatggcagctaaaatattttgcctccttatgcgccttggtctttctgcaagtgctgctacggcgaccattttcccacaatgctcacaagctcctatagcttcccttcttcccccgtacctctcaccaacggtgtcttcggtatgtgaaaacccaattcttcaaccctacaggatccaacaggcaatcgcagctggcatcttacctttatcacccttgttcctccaacaatcatcagccctattacagcagttacctttggtgcatttattggcacaaaacatcagggcacaacaactacaacaacttgtgctagcaaaccttgctgcctactctcagcaacagcagtttcttccattcaaccaactagctgcattgaactctgcttcttatttgcaacaacaacaactaccattc

SEQ ID NO: 321035 - DNA, 443 bp, Zea mays
ttgagaccagcaagcaacatagaaagtagaatccattagcaacaatagagcggcagatggcgaccaagatattttccctccttatgctccttgctctttctacatgtgttgctaacgcgacaattttccctcaatgctcacaagctcctatagcttcccttcttcccccataccttccatcaattatagcttcagtatgtgaaaacccagctcttcaaccatataggcttcaacaagcaatcgcagcaagcaacatacctttatcgcccttgttgtttcaacaatcaccagccctatctttggtgcagtcattggtacaaaccatcagggcacaacagctgcagcaactcgtgctacctgtgatcaaccaagtagctctggcaaacctttctccctactctcagcaacaacaatttcttccattcaaccaactgtctacactg

SEQ ID NO: 321036 - DNA, 441 bp, Zea mays
agctcatcgactccagattggagaactcgacaccatgaaggtgctgatcgttgcccgtgcgctcctggcgctcgctgcgagcgccgcctccagtacaagcggcggctgtggctgccagacaccaccgtttcatctaccgcctccgttctatatgccgcctccgttctatctgccgccgcagcagcagccgcagccatggcaataccccactcaaccaccgcagctaagcccgtgccagcagttcggatcctgcggcgtcggcagcgtcggcagcccgttcctgggccagtgcgtcgagttcctgaggcaccagtgcagcccggcggcgacgccctacggctcgccacagtgccaggcgctgcagcagcagtgctgccaccagatcaggcaggtggagccgctgcaccggtaccaggcgacatacggtgtggtcctgcagtc

SEQ ID NO: 321037 - DNA, 371 bp, Zea mays
cgtaatcatcattcatcttaatgctttcggcaccagatcaaatatgtatcatcactgatgtaactacagcgacgaagattctagtgctcgtggcactagctatgatagctggaaccataaacgcatgcatgccacactcaatcatgcaacactggcttgacaactagatcgattatccgtacctgattctacaacaactgcatgcattaccgcttcagcctataccagcaatactgcatcacatgatgacgcataccatcatgcaaccgttgacgttccaccacatgatcataacaatcatcttgacgatcatgatcatcaacaacgacgacgacacaatgaccatgagacacagcatcagcagattatgc

SEQ ID NO: 321038 - DNA, 446 bp, Zea mays
caactagcaacatagaaagcacaatagtgtaccaacaatggcagccaaaatattttgcctccttatgctccttggtctttctgcaagtgctgctacggcgaccattttcccgcaatgctcgcaagctcctatagcttcccttcttcccccgtacctctcaccagcggtgtcttcggtatgtgaaaacccaattcttcaaccctacaggatccaacaggcaatcacagctggcatcttacctttatcacccttgttcctccaacaatcatcagccctattacatcagttacctttggtgcatttattggcacaaaacatcagggcacaacaactacaacaacttgtgctagcaaaccttgctgcctactctcagcaacagcagtttcttccattcaaccaactagctgcattgaactctgcttcttatttgcaacaacaacaactac

SEQ ID NO: 321039 - DNA, 413 bp, Zea mays
attgagaccaacaagcaacatagaaagtggaatacagtagcaaaaatagagcaacaatggcggccaagatatggtccatccttatgctccttgctctttctgcatgtgttgctaacgcgaccatttttcctcaatactcacaagctcctatagctgcccttcttcccccataccttccatcaatgaccgctttagtatgtgaaaacccagcccttcaaccctacaggatccagcaagcaatcgcaacaagcaacttacctttatcacacctgttctttcaacaatcgccagccctatctttggtgcagtcattggtacaaaccatcagggcagaacagttgcagcaactcgtgctaccagtgatcagccaagtagctctggcaaacctttccccctactctcagcaacaacaa

SEQ ID NO: 321040 - DNA, 445 bp, Zea mays
attttcagcattcaaaaacacaccaagcgaagcgcactagcaacgacctaacaccagtggcgaccaagatattagccctccttgcgcttcttgcccttttagtgagcgcaacaaatgcgttcattattccacagtgctcacttgctcctagtgccattattccacagttcctcccaccagttacttcaatgggcttcgaacatccagccgtgcaagcctacaggctacaactagcgcttgcggcgagcgccttacaacaaccaattgcccaattgcaacaacaatccttggcacatctaaccctacaaaccattgcaacgcaacaacaacaacaacaacagtttctgccatcactgagccacctagccgtggtgaaccctgtcacctacttgcaacagcagctgcttgcatccaacccacttgctctggcgaacgtagctgcata

SEQ ID NO: 321041 - DNA, 444 bp, Zea mays
gaccaactagcaacatagaaagcacaatagtgtaccaacaatggcagccaaaagatgtggcttccttatgctccttggtctttctgcaagtgttgctaccgcaaccattttcccacaatgctcacaagctcctatagcttcccttcttcccccatacctctcaccagcggtgtcttcaatgtgtgaaaacccaattgttcaaccctacaggatccaacaggcaatcgcaacaggcatcttaccattatcacccttgttcctccaacaaccgtcagccctattacagcagttacctttggtccatttggtggcacaaaacatcagggcacaacaactacaacaacttgtgctagcaaaccttgctgcatactctcagcaacatcagtttcttccattcaaccaactggctgcattgaactctgctgcttatttgcaacaacaatt

SEQ ID NO: 321042 - DNA, 81 bp, Zea mays
atgggttatagttcaataataaagttttttgtctgatgtttgtggcttcccagaaataagaaagtacatttctagattctt

SEQ ID NO: 321043 - DNA, 439 bp, Zea mays
gcaacatagaaagcacaatagtgtaccaacaatggcagccaaaatattttgcttccttatgctccttggtctttctgcaagtgctgctaccgcaaccattttcccacaatgctcacaagctcctatagcttcctttcttcccccatacctctcaccagcggtgtcttcagtatgtgaaaacccaattcttcaaccctacaggatccaacaggcaatcgcagcaggcatcttacctttatcacccttgttcctccaacaaccgtcagccctattacagcagttacctttggtgcatttgttggcacaaaacatcaaggcacaacaactacaacaacttgtgctaggaaaccttgctgcctactctcagcaacagcagtttcttccattcaaccaactggctgcattgaactctgctgcttatttgcaacaacaactacca

SEQ ID NO: 321044 - DNA, 154 bp, Zea mays
acccactcatcctcacaactaaccatttaacaactccggtatatctatatattctccttccttatcctcctgtctctctctacatgtatcactagcaccaacacttttccctaaacgctcacactcttctatatctcccattcttaccctatac

SEQ ID NO: 321045 - DNA, 388 bp, Zea mays
cagaaacacaccaagcgaagcgcactatcaacgacctaacaccaatggctaccaagagattagccctccttgcgcttcttgcccttttagtgagcgcaacaaatgcgttcattattccacagtgctcacttgctcctagtgccagtattccacagttcctcccaccagttacttcaatgggcttcgaacatccagccgtgcaagcctacaggctacaactagcgcttgcggcgagcgccttacaacaaccaattgcccaattgcaacaacaatccttggcacatctaaccctacaaaccattgcaacgcaacaacaacaacaacagtttctgccatcactgagccacctagccgtggtgaaccctgtcacctacttgcaacagcagct

SEQ ID NO: 321046 - DNA, 156 bp, Zea mays
gtccaacttgctttgacagacccagcggcctcctaccaacaacacatcattggtggtgccctcttttagattgcttattagttgtaattcaataataaagttttttggatgatgtatgtggccaaccagaaataagaagttacatttccagattct

SEQ ID NO: 321047 - DNA, 236 bp, Zea mays
ataatagcctttaacgaatacggcgagctagagatgcgcgttccttatcctgggtgctctctgtacatgaatcactaacgcaacacttttcgttgagcgctcacacgcttctatagcttcgattgttagcctatacttacgatcattgatctgctaaggactggataacctatctgttcaatcatattggactcatcaatctatcgtagaatgcagcatacctatatcgtgcttga

SEQ ID NO: 321048 - DNA, 446 bp, Zea mays
caactagcaacatagaaagcacaatagtgtaccaacaatggcagccaaaatattttggctcgttatgctccttggtctttctgcaagtgctgctacggcgaccattttcccacaatgctcacaagctcctatagcttcccttcttcccccgtacctctcaccagcggtgtcttcggtatgtgaaaacccaattcttcaaccctataggatccaacaggcaatcgcagctggcatcttacctttatcacccttgttcctccaacaatcatcagccctattacagcagttacctttggtgcatttattggcacaaaacatcagggcacaacaactacaacaacttgtgctagcaaaccttgctgcctactctcagcaacaacagtttcttccattcaaccaactagctgcattgaactctgcttcttatttgcaacaacaacaactac

SEQ ID NO: 321049 - DNA, 338 bp, Zea mays
atcaattatagcttcagtatgtgaaaacccagctcttcaaccatataggcttcaacgagcagtcgcagcaagcaacatacctttatcgcccttgttgtttcaacaatcaccagccctatctttggtgcagtcattggtacaaaccatcagggcacaacagctgcagcaactcgtgctacctgtgatcaaccaacttgctttgacaaacccagcagcattctaccaacaacccatcattggtggtgccctcttttagatttcttatgagttatagttcaataataaagttttttgtctgatgtttgtggcttcccagaaataagaaagtacatttctag

SEQ ID NO: 321050 - DNA, 428 bp, Zea mays
tgttttcaacaatcgccagccctatctttggtgcagtcattggtacaaaccatcagggcacagcagctgcagcaactcgtgctacctgtgatcaaccaagtagctctggcaaacctttctccctactctcagcaacaacaatttcttccattcaaccaactgtctacactgaaccctgctgcttatttgcagcaacaactattaccattcagccagctagctactgcctactctcagcaacaacaacttcttccatttaaccaattggccgcactgaaccccgctgcttatttgcagcagcaaatactactaccatttagccagctagctgcagcaaaccgtgcttccttcttgacacagcaacagttgctgcctttctaccagcagtttgcggctaaccccgcaaccctcttacaactacaacaatt

SEQ ID NO: 321051 - DNA, 440 bp, Zea mays
cagcattcaaaaacacaccaagcgaagcgcactagcaacgacctaacaccaatggctgccaagatattagccctccttgcgcttcttgcccttttagtgagcgcaacaaatgcgttcattattccacagtgctcacttgctcctagtgccattattccacagttcctcccaccagttacttcaatgggcttcgaacatccagccgtgcaagcctacaggctacaactagcgcttgcggcgagcgccttacaacaaccaattgcccaattgcaacaacaatccttggcacatctaaccctacaaaccattgcaacgcaacaacaacaacaacaacagtttctgccatcactgagccacctagccgtggtgaaccctgtcacctacttgcaacagcagctgcttgcatccaacccacttgctctggcgaacgtagctgcata

SEQ ID NO: 321052 - DNA, 461 bp, Zea mays
attgagaccaactagcaacatagaaagcacaatagtgtaccaacaatggcagccaaaatattttgcctccttaggcggcttggtctttctgcaagtgctgctacggcgaccattttcccacaatgctcacaagctcctatagcttcccttcttcccccgtacctctcaccagcggtgtcttcggtatgtgaaaacccaattcttcaaccctataggatccaacaggcaatcgcagctggcatcttacctttatcacccttgttcctccaacaatcatcagccctattacagcagttacctttggtgcatttattggcacaaaacatcagggcacaacaactacaacaacttgtgctagcaaaccttgctgcctactctcagcaacaacagtttcttccattcaaccaactagctgcattgaactctgcttcttatttgcaacaacaacaactaccattcag

SEQ ID NO: 321053 - DNA, 374 bp, Zea mays
gcaacatagaaagcacaatagtgtaccaacaatggcagccaaaatattttgcctcctgatgctccttggtctttctgcaagtgctgctacggcgaccattttcccgcaatgctcgcaagctcctatagcttcccttcttcccccgtacctctcaccagcggtgtcttcggtatgtgaaaacccaattcttcaaccctacaggatccaacaggcaatcacagctggcatcttacctttatcacccttgttcctccaacaatcatcagccctattacatcagttacctttggtgcatttattggcacaaaacatcagggcacaacaactacaacaacttgtgctagcaaaccttgctgcctactctcagcaacagc

SEQ ID NO: 321054 - DNA, 434 bp, Zea mays
caacaatggcagccaaaatattttgcctccttatgctccttggtctttctgcaagtgctgctacggcgaccattttcccgcaatgctcgcaagctcctatagcttcccttcttcccccgtacctctcaccagcggtgtcttcggtatgtgaaaacccaattcttcaaccctacaggatccaacaggcaatcacagctggcatcttacctttatcacccttgttcctccaacaatcatcagccctattacatcagttacctttggtgcatttattggcacaaaacatcagggcacaacaactacaacaacttgtgctagcaaaccttgctgcctactctcagcaacagcagtttcttccattcaaccaactagctgcattgaactctgcttcttatttgcaacaacaacaactaccattcagccagctacctgct

SEQ ID NO: 321055 - DNA, 442 bp, Zea mays
gcaacatagaaagcacaatagtgtaccaacaatggcagccaaaatattttgccgccgtatgctccttggtctttctgcaagtgctgctacggcgaccattttcccacaatgctcacaagctcctatagcttcccttcttcccccgtacctctcaccagcggtgtcttcggtatgtgaaaacccaattcttcaaccctataggatccaacaggcaatcgcagctggcatcttacctttatcacccttgttcctccaacaatcatcagccctattacagcagttacctttggtgcatttattggcacaaaacatcagggcacaacaactacaacaacttgtgctagcaaaccttgctgcctactctcagcaacaacagtttcttccattcaaccaactagctgcattgaactctgcttcttatttgcaacaacaacaactacca

SEQ ID NO: 321056 - DNA, 395 bp, Zea mays
  unsure (1)..(395): unsure at all n locations
ggattcccgccgagagtcgaagtgccaagccaacgcaggtgcagatggcggttgagcaccacctcccgccggagcacgcggagcacgactagnagcggcaggaagggggtccacgccgacgacctgaagccgctctggtggcgccgcagcccccggtacagctactactacggctgtggcgagggcagtggctcggtccgcgccctatgcttctccgacctcatactgatcctggccctggtgatcacccttctggttctctactatcattactgacacgtcacacccaaactatggcattacccttggtcgtcgttctggcccttcacatacgacccagattacgtgatcttgagcaccatcgcatgcctgttgctaggcatctagctcatcgc

SEQ ID NO: 321057 - DNA, 401 bp, Zea mays
gccactaccctactcaaccgccccggcctcagcctcatccccagccacacccatgggcgtgccaacagccgcatccaagcccgtgccagctgcagggaacctgcggcgttggcagcaccccgatcctgggccagtgcgtcgagttcctgaggcatcagtgcagcccgacggcgacgccctactgctcgcctcagtgccagtcgttgcggcagcagtgttgccagcagctcaggcaggtggagccgcagcaccggtaccaggcgatcttcggcttggtcctccagtccatcctgcagcagcagccgcaaagcggccaggtcgcggggctgttggcggcgcagatagcgcagcaactgacggcgatgtgcggcctgcagcagccgacttcatgcccctacgct

SEQ ID NO: 321058 - DNA, 442 bp, Zea mays
attgagaccaactagcaacatagaaagcacaatagtgtaccaacaatggcagccaaaatatgttgcctccttatgctccttggtctttctgcaagtgctgctacggcgaccattttcccgcaatgctcgcaagctcctatagcttcccttcttcccccgtacctctcaccagcggtgtcttcggtatgtgaaaacccaattcttcaaccctacaggatccaacaggcaatcgcagctggcatcttacctttatcacccttgttcctccaacaatcatcagccctattacaacagttacctttggtgcatttattggcacaaaacatcagggcacaacaactacaacaacttgtgctagcaaaccttgctgcctactctcagcaacagcagtttcttccattcaaccaactaggttcattgaactctgcttcttatttgcaac

SEQ ID NO: 321059 - DNA, 444 bp, Zea mays
aactagcaacatagaaagcacaatagtgtaccaacaatggcagccaaaatattttgcgtccgtatgctccttggtctttctgcaagtgctgctacggcgaccattttcccgcaatgctcgcaagctcctatagcttcccttcttcccccgtacctctcaccagcggtgtcttcggtatgtgaaaacccaattcttcaaccctacaggatccaacaggcaatcgcagctggcatcttacctttatcacccttgttcctccaacaatcatcagccctattacaacagttacctttggtgcatttattggcacaaaacatcagggcacaacaactacaacaacttgtgctagcaaaccttgctgcctactctcagcaacagcagtttcttccattcaaccaactaggttcattgaactctgcttcttatttgcaacaacaacaacta

SEQ ID NO: 321060 - DNA, 441 bp, Zea mays
aggcacaacaactacaacaacttgtgctaggaaaccttgctgcctactctcagcaacgagcagtttcttccattcaaccaactggctgcattgaactctgctgcttatttgcaacaacaactaccattcagtcagctagctgctgcctacccccagcaatttcttccattcaaccaactggcagcattgaactctgctgcttatttacaacagcaacagctaccaccattcagccagctagctgatgtgagccctgttgccttcttgacacaacaacagttgttgccgttctacctgcacgctgcgcctaacgctggcaccctcttacaactgcaacaattgctgccattcaaccaacttgctttgacaaacccaacaacgttctaccaacaacccatcattggcggtgccctcttttagattgcttatgagttatagttc

SEQ ID NO: 321061 - DNA, 399 bp, Zea mays
ccgtacctctcaccagcggtgtcttctgtatgtgaaaacccaattcttcaaccctagaggatccaacaggcaatcgcagctggcatcttacctttatcacccttgttcctccaacaatcatcagccctattacaacagttacctttggtgcatttattggcacaaaacatcagggcacaacaactacaacaacttgtgctagcaaaccttgctgcctactctcagcaacagcagtttcttccattcaaccaactaggttcattgaactctgcttcttatttgcaacaacaacaactaccattcagccagctacctgctgcctacccccagcaatttcttccattcaaccaactagcagcattgaactctcctgcttatttacagcagcaacaactacta

SEQ ID NO: 321062 - DNA, 446 bp, Zea mays
caatttcttccattcaaccaactgtctacactgaaccctgctgcttatttgcagcaagaacgattaccatttagccagctagctactgcctactctcagcaacaacaacttcttccatttaaccaattggccgcactgaaccccgctgcttatttgcagcagcaaatactactaccatttagccagctagctgcagcaaaccgtgcttccttcttgacacagcaacagttgctgcctttctaccagcagtttgcggctaaccccgcaaccctcttacaactacaacaattgttgccctttgtccaacttgctttgacagacccagcggcctcctaccaacaacacatcattggtggtgccctcttttagattgcttattagttgtaattcaataataaagttttttggatgatgtatgtggccaaccagaaataagaagttacatt

SEQ ID NO: 321063 - DNA, 391 bp, Zea mays
  unsure (1)..(391): unsure at all n locations
gaaacacaccaagcgaagcgcactagcaacgacctaacaacaatggctaccaagatgagtagccctccttgcgcttcttgccctttttgtgagcgcaacaaatgcgttcattattccacaatgctcacttgctcctagtgccattattccacagttcctcccaccagttacttcaatgggcttcgaacacctagctgtgcaagccaacatgcaacaacaagcgcttgcggcgagcgtcttacaacaaccaattgcccaattgcaacaacaatccttgccacatctaacaatacaagccatcacaacgcaacagcaacaacagttcctaccagcactgagccacctagccatggtgaaccctgccgnctacttgcaagagcagctgcttgca

SEQ ID NO: 321064 - DNA, 429 bp, Zea mays
  unsure (1)..(429): unsure at all n locations
cagaccattagctttatctactccagagcgcagaagaacccgatcgacaccatgagggtgttgctcgttgccctcgctctcctggctctcgctgcgagcgccacctccacgcatacaagcggcggctgcggctgccagccaccgccgccggttcatctaccgccgccggtgcatctgccacctccggttcacctgccacctccggtgcatctcccaccgccggtccacctgccgccgccggtccacctgccaccgccggtccatgtgccgncgncggttcatctgccgncgncaccatgccactaccctaactcaaccgcccggcctcagcctcatccccagccacacccatgcccgtgccaacagccgcatccaagcccgtgccagctgcagggaacctgccgcgttggcagcaccccgatcctgggc

SEQ ID NO: 321065 - DNA, 442 bp, Zea mays
ctagcaacatagaaagcacaatagtgtaccaacaatggcagccaaaatattttgcctgcttatgctccttggtctttctgcaagtgctgctacggcgaccattttcccgcaatgctcgcaagctcctatagcttcccttcttcccccgtacctctcaccagcggtgtcttcggtatgtgaaaacccaattcttcaaccctacaggatccaacaggcaatcacagctggcatcttacctttatcacccttgttcctccaacaatcatcagccctattacatcagttacctttggtgcatttattggcacaaaacatcagggcacaacaactacaacaacttgtgctagcaaaccttgctgcctactctcagcaacagcagtttcttccattcaaccaactagctgcattgaactctgcttcttatttgcaacaacaacaacta

SEQ ID NO: 321066 - DNA, 443 bp, Zea mays
ggaatacagtagcaacaatagagcaacaatggcggccaagatattttccatccttatgctcgttgctctttctgcatgtgttgctaacgcgaccatttttcctcaatactcacaagctcctatagctgcccttcttcccccataccttccatcaatgaccgcttcagtttgtgaaaacccagcccttcaaccctacaggctccaacaagcaatcgcaacaagcaacttacctttatcacccctgttctttcaacaatcgccagccctatctttggtgcagtcattggtacaaaccatcagggcacaacagctgcaacaactcgtgctaccagtgatcagccaagtagctctggcaaacctttctccctactctcagcaacaacaatttcttccattcaaccaactgtctacactgaaccctgctgcttatttacaacaacaac

SEQ ID NO: 321067 - DNA, 446 bp, Zea mays
  unsure (1)..(446): unsure at all n locations
attcagaaacacaccaagcgaagcgcactagcaacaacctaacaacaatggctgccgagatattatccctgcttgcgcttcttgcgctttttgcgagcgcaacaaatgcgtccattattccacaatgctcacttgctcctagttccattattccacagttcctcccaccagttacttcaatggccttcgaacacccagctgtgcaagcctataggctacaacaagcgattgcggcgagcgtcttacaacaaccaattgcccaattgcaacaacaatccttggcacatctaacaatacaaaccatcgcaacgcaacagcaacaacagttcctaccagcactgagccacctagccatggtgaaccctgtcgcctacttgcaacagcagctgcttgcatccaacccacttgctctagcanacgtagttgcaaaccagcaacaacaacaa

SEQ ID NO: 321068 - DNA, 434 bp, Zea mays
  unsure (1)..(434): unsure at all n locations
gggtcttcagaccattagctttatctactccagagcgcagaagaacccgatcgacaccatgagggtgttgctcgttgccctcgctctcctggctctcgctgcgagcgccacctccacgcatacaagcggcggctgcggctgccagccaccgccgccggttcatctaccgccgccggtgcatctgccacctccggttcacctgccacctccggtgcatctcccaccgccggtccacctgccgccgccggtccacctgccaccgccggtccatgtgccgccgccggttcatctgccgccgccaccatgccactaccctactcaaccgccccggcctcagcctcatccccagccacacccatgcccgtgccaacagccgcatccaagcccgtgccagctgcagggaacctgcngcgttggcagcaccccgatcctgg

SEQ ID NO: 321069 - DNA, 409 bp, Zea mays
caccagcggtgtcttcaatgtgtgaaatcccaattgttcaaccctacaggatccaacgggcaatcgcaacaggcatcttaccattatcacccttgttcctccaacaaccgtcagccctattacagcagttacctttggtccatttggtggcacaaaacatcagggcacaacaactacaacaacttgtgctagcaaaccttgctgcatactctcagcaacatcagtttcttccattcaaccaactggctgcattgaactctgctgcttatttgcaacaacaattaccattcagccagctagttgctgcctacccccagcaatttcttccattcaaccaactagcagcattgaactctgctgcttatttacagcagcaacaactactaccattcagccagctagctgatgt

SEQ ID NO: 321070 - DNA, 396 bp, Zea mays
agcattcaaaaacacaccaagcgaagcgcactagcaacgacctaacaccaatggctggcaagatattagccctccttgcgcttcttgcccttttagtgagcgcaacaaatgcgttcattattccacagtgctcacttgctcctagtgccattattccacagttccttccaccagttacttcaatgggcttcgaacatccagccgtgcaagcctacaggctacaactagcgcttgcggcgagcgccttacaacaaccaattgcccaattgcaacaacaatccttggcacatctaaccctacaaaccattgcaacgcaacaacaacaacaacaacagtttctgccatcactgagccacctagccgtggtgaaccctgtcacctacttgcaacagtagc

SEQ ID NO: 321071 - DNA, 334 bp, Zea mays
aacaaatgcgttcattattccacaatgctcacttgctccgagtgccattattccacagttgctccctccagttacttcaatgggcttcgaacacccagctgtgcaagcctataggctacaacaagcgcttgcggcgagcgtcttagaacaaccaattgcccaattacaacaacaatccttggcacatctaaccatacaaaccatcgcaacgcagcagcaacaagcactgagccacctagccgtggtgaaccctatcgcctacttgcaacaacagctgcttgcatccaacccacttgctttggcaaacgtagctgcataccaacaacaacaacag

SEQ ID NO: 321072 - DNA, 446 bp, Zea mays
caactagcaacatagaaagcacaatagtgtaccaacaatggcagccaaaatattttgggtccttatgctccttggtctttctgcaagtgctgctacggcgaccattttcccacaatgctcacaagctcctatagcttcccttcttcccccgtacctctcaccagcggtgtcttcggtatgtgaaaacccaattcttcaaccctatacgatccaacaggcaatcgcagctggcatcttacctttatcacccttgttcctccaacaatcatcagccctattacagcagttacctttggtgcatttattggcacaaaacatcagggcacaacaactacaacaacttgtgctagcaaaccttgctgcctactctcagcaacaacagtttcttccattcaaccaactagctgcattgaactctgcttcttatttgcaacaacaacaactac

SEQ ID NO: 321073 - DNA, 410 bp, Zea mays
gaaagcacatagtgtaccaacaatggcagccaaaatattttgcctccttatgctccgtgggctttctgcaagtgctgctacggcgaccattttcccgcaatgctcgcaagctcctatagcttcccttcttcccccgtacctctcaccagcggtgtcttcggtatgtgaaaacccaattcttcaaccctacaggatccaacaggcaatcgcagctggcatcttacctttatcacccttgttcctccaacaatcatcagccctattacaacagttacctttggtgcatttattggcacaaaacatcagggcacaacaactacaacaacttgtgctagcaaaccttgctgcctactctcagcaacagcagtttcttccattcaaccaactaggttcattgaactctgcttctt

SEQ ID NO: 321074 - DNA, 432 bp, Zea mays
cagcaacaagcactgagccacctagccgtggtgaaccctatcgcctacttgcgacaacagctgcttgcatccaacccacttgctttggcaaacgtagctgcataccaacaacaacaacagttgcaacagtttctaccagcgctcagtcaactagccatggtgaaccctatcgcctacctacaacagcaacaacttctttcatctagcccgctcgctatgggcaatgcacctacatacctgcaacaacagttgttgcaacaacagttgctgcaacaaattgtaccagctcttactcagctagctgtggcaaaccctgctgcctacttgcaacaactacttccattcaaccaactgactgtgtcgaactctgctgcgtacctacaacagcgacaacagttacttaatccactagcggtggctaacccattggtc

SEQ ID NO: 321075 - DNA, 442 bp, Zea mays
  unsure (1)..(442): unsure at all n locations
ggaaaaagaagaccgcatcccccggaactcaggatccccgtgggctctccgtgcctgatgccgccattggcaaaaccctgaaagccctaaaccttccgagacaaccatggacgagctcgtgtcggtggcgctggaggaggtgtgcgcgcgcctcgcgccggggatccccgtcgtggacctatggccagcgctccgtggcacgctcgatgcgacggggctcccgctaggcccagcagtcaagcgcgccctgtgggctcgcatccttgcgctccgcgtcgtcaacctggtggagggggatggggacggngtgcccatctcttgccgagacccggcggagaaggacttcgaggaggccgaacggcggtgcatgcggctcgtggcaagcgcggngatcagggacaacttcctggggttatacgagcgcagattcgcgaagtcggag

SEQ ID NO: 321076 - DNA, 391 bp, Zea mays
attcaaccaactggctgcattgaactctgctgcttatttgcaacaacaattaccattcagccagctagttgctgcctacccccagcaatttcttccattcaaccaactagcagcattgaactctgctgcttatttacagcagcaacaactactaccattcagccagctagctgatgtgagccctgctgccttcttgacacaacaacagttgttgccgttctacctgcacgctatgcctaacgctggcaccctcttacaactgcaacaattgctgccattcaaccaacttgctttgacaaactcaacagtgttctaccaacaacccatcattggtggtgccctcttttagattgcttatgagttatagttcaataatgaagttttttggatg

SEQ ID NO: 321077 - DNA, 141 bp, Zea mays
ctgtgacaaacccaacagtgttctactaacaacccatcattggtggtgccctcttttgtattgcttatgagttatagttcaataatgaagttttttggatgatgtttgtggcgtcccagaaataagaaagtacatttctag

SEQ ID NO: 321078 - DNA, 426 bp, Zea mays
cggacgcgtgggcaagctcctatagcttcccttcttcccccataccttccatcaatgatagcttcagtatgtgaaaacccagctcttcaaccctataggctccaacaagcaatcgcagcaagcaacatacctttatcacccttgtttcaacaatcgccagccctatctttggtgcagtcattggtacaaaccatcaaggcacagcagctgcagcaactcgtgctacctgtgatcaaccaagtagctctggcaaacctttctccctactatcagcaacaacaatttcttccattcaaccaactatctacactgaaccctgctgcttatttgcagcaacaactattaccattcagccagctagctactgcctactctcatcaacaacaacttcttccatttaaccaattggccgcactgaacctcgct

SEQ ID NO: 321079 - DNA, 406 bp, Zea mays
ccaagatattagccctccttgcgcttcttgccctttttgtgagcgcaacaaatgcggtcattattccacaatgctcacttgctcctagtgccattattccacagttcctcccaccagttacttcaatgggcttcgaacacctagctgtgcaagccaacatgcaacaacaagcgcttgcggcgagcgtcttacaacaaccaattgcccaattgcaacaacaatccttgccacatctaacaatacaagccatcacaacgcaacagcaacaacagttcctaccagcactgagccacctagccatggtgaaccctgccgcctacttgcaagagcagctgcttgcatccaacccacttgctctggcgaacgtagttgcaaaccagcaacaaccacagctacaaacagttct

SEQ ID NO: 321080 - DNA, 218 bp, Zea mays
agataggacaacccatcactgagactataggatcacggcatagctacagacgtcgccttcctgtgctgcgtggcgtcgctgtacatgatgttgctgagcgcgacattctgatcctgaatgctcacatgctcctatagccgctcttctttgcgcacacgtaccagctaacgtagctgcagtctgtgaagacacgcgtcatcaactcatatgcgcgccaa

SEQ ID NO: 321081 - DNA, 406 bp, Zea mays
caacaagcaacatagaaagtggaatccagtagcaacaatagagcaacaatggcgaccgggatactttccctccttatgctccttgctctttctgcatgtgttgctaacgcgacaattttccctcaatgctcacaagctcctatagcttcccttcttcccccataccttccatcaatgatagcttcagtatgtgaaaacccagctcttcaaccctataggctccaacaagcaatcgcagcaagcaacatacctttatcacccttgtttcaacaatcgccagccctatctttggtgcagtcattggtacaaaccatcaaggcacagcagctgcagcaactcgtgctacctgtgatcaaccaagtagctctggcaaacctttctccctactatcagcaacaacaatttc

SEQ ID NO: 321082 - DNA, 446 bp, Zea mays
actagcaacatagaaagcacaatagtgtaccaacaatggcagccaaaatattttgcttccttatgcgcctgggtctttctgcaagtgttgctaccgcaaccattttcccacaatgctcacaagctcctatagcttcccttcttcccccatacctctcaccagcggtgtcttcaatgtgtgaaaccccaattgttcaaccctacaggatccaacaggcaatcgcaacaggcatcttaccattatcacccttgttcctccaacaaccgtcagccctattacagcagttacctttggtccatttggtggcacaaaacatcagggcacaacaactacaacaacttgtgctagcaaaccttgctgcatactctcagcaacatcagtttcttccattcaaccaactggctgcattgaactctgctgcttatattcaacaacaattaccattc

SEQ ID NO: 321083 - DNA, 380 bp, Zea mays
gcgacatagaaagcacaatagtgtaccaacaatggcagccaaaatattttggctccgtatgctccttggtatttctgcaagtgctgctacggcgaccattttcccgcaatgctcacaagctcctatagcttcccttcttcccccgtacctctcaccagcggtgtcttcggtatgtgaaaacccaattcttcaaccctacaggatccaacaggcaatcgcagctggcatcttacctttatcacccttgttcctccaacaatcatcagccctattacagcagttacctttggtgcatttattggcacaaaacatcagggcacaacaactacaacaacttgtgctagcaaaccttgctgcctactctcagcaacagcagtttc

SEQ ID NO: 321084 - DNA, 420 bp, Zea mays
gtggaatccagtagcaacaatagagcatcaatggcgaccaagatactttccctccttatgctccttgctctttctgcatgtgttgctaacgcgacaattttccctcaatgctcacaagctcctatagcttcccttcttcccccataccttccatcaatgatagcttcagtatgtgaaaacccagctcttcaaccctataggctccaacaagcaatcgcagcaagcaacatacctttatcacccttgtttcaacaatcgccagccctatctttggtgcagtcattggtacaaaccatcaaggcacagcagctgcagcaactcgtgctacctgtgatcaaccaagtagctctggcaaacctttctccctactatcagcaacaacaatttcttccattcaaccaactatctacacttaaccct

SEQ ID NO: 321085 - DNA, 423 bp, Zea mays
cccacgcgtccgaacatagaaagcacaatagtgtaccaacaatggcagccaaaatatgttgggtccttatgctccttggtctttctgcaagtgctgctaccgcaaccattttcccacaatgctcacaagctcctatagcttcctttcttcccccatacctctcaccagcggtgtcttcagtatgtgaaaacccaattcttcaaccctacaggatccaacaggcaatcgcagcaggcatcttacctttatcacccttgttcctccaacaaccgtcagccctattacagcagttacctttggtgcatttgttggcacaaaacatcaaggcacaacaactacaacaacttgtgctaggaaaccttgctgcctactctcagcaacagcagtttcttccattcaaccaactggctgcattgaactctg

SEQ ID NO: 321086 - DNA, 371 bp, Zea mays
  unsure (1)..(371): unsure at all n locations
aatagtgtaccaacaatggcagccaaaatattttgcctccttatgctccttggtctgtctgcaagtgctgctacggcgaccattttcccacaatgctcacaagctcctatagcttcccttcttcccccgtacctctcaccagcggtgtcttcggtatgtgaaaacccaattcttcaaccctataggatccaacaggcaatcgcagctggcatcttacctttatcacccttgctcctccaacaatcatcagccctattacagcagttacctttggtgcatttattggcacanaacatcagggcacaacaactacaacaacttgtgctagcaaaccttgctgcctactctcagcaacaacagtttcttccatt

SEQ ID NO: 321087 - DNA, 421 bp, Zea mays
caactagcaacatagaaagcacaatagtgtaccaacaatggcagccaaaatatttggcttccttatgctccttggtctttctgcaagtgctgctaccgcaaccattttcccacaatgctcacaagctcctatagcttcctttcttcccccatacctctcaccagcggtgtcttcagtatgtgaaaacccaattcttcaaccctacaggatccaacaggcaatcgcagcaggcatcttacctttatcacccttgttcctccaacaaccgtcagccctattacagcagttacctttggtgcatttgttggcacaaaacatcaaggcacaacaactacaacaacttgtgctaagaaaccttgctgcctactctcagcaacagcagtttcttccattcaaccaactggctgcattgaactctgct

SEQ ID NO: 321088 - DNA, 408 bp, Zea mays
tccttagggttttgtggaggggcgatggcggctgctgatgtggagtaccgttgcttcgtcggcgggcttgcctgggccaccagcaacgagtcgctggagaatgccttcgcctcctacggcgagatcctcgactccaaggtcatcaccgaccgggagacggggaggtctcgcggcttcggcttcgttaccttctcctccgagaactccatgctcgacgctatcgagaacatgaacggcaaggagctcgacggccgtaacatcaccgttaaccaggcccagtcccgtggcggtggcggtggctgcggtggctacggcggctgtcgcggcggcggcggctatggtggcaggcgccgtgacagcggttatggcggcggtggcggctacggcggtcggcgcgagggtggtggc

SEQ ID NO: 321089 - DNA, 429 bp, Zea mays
gaccaactagcaacatagaaagcacaatagtgtaccaacaatggcagccaaaatatgttgcttccttatgctccttggtctttctgcaagtgctgctaccgcaaccattttcccacaatgctcacaagctcctatagcttcctttcttcccccatacctctcaccagcggtgtcttcagtatgtgaaaacccaattcttcaaccctacaggatccaacaggcaatcgcagcaggcatcttacctttatcacccttgttcctccaacaaccgtcagccctattacagcagttacctttggtgcatttgttggcacaaaacatcaaggcacaacaactacaacaacttgtgctaggaaaccttgctgcctactctcagcaacagcagtttcttccattcaaccaactggctgcattgaactctgctgctta

SEQ ID NO: 321090 - DNA, 432 bp, Zea mays
gagcattcagaaacacacctagcgaatcgcactagcaacgacctaacaacaatggcttccaagacattatccctccttgcgcttcttgccctttttgtgagtgcaacaaatgcgttcattattccacaatgctcacttgctccgagtgccattattccacagttcctccctccagttacttcaatgggcttcgaacacccagctgtgcaagcctataggctacaacaagcgcttgcggcgagcgtcttagaacaaccaattgcccaattacaacaacaatccttagcacatctaaccatacaaaccatcgcaacgcagcagcaacaagcactgagccacctagccgtggtgaaccctatcgcctacttgcaacaacagctgcttgcatccaacccacttgctttggcaaacgtagctgcataccaacaacaa

SEQ ID NO: 321091 - DNA, 430 bp, Zea mays
gcaacatagaaagcacaatagtgtaccaacaatggcagccaaaatattttgcttgcttatgctccttggtctttctgcaagtgttgctaccgcaaccattttcccacaatgctcacaagctcctatagcttcccttcttcccccatacctctcaccagcggtgtcttcaatgtgtgaaaccccaattgttcaaccctacaggatccaacaggcaatcgcaacaggcatcttaccattatcacccttgttcctccaacaaccgtcagccctattacagcagttacctttggtccatttggtggcacaaaacatcagggcacaacaactacaacaacttgtgctagcaaaccttgctgcatactctcagcaacatcagtttcttccattcaaccaactggctgcattgaactctgctgcttatttgcaacaa

SEQ ID NO: 321092 - DNA, 395 bp, Zea mays
caactagcaacatagaaagcacaatagtgtaccaacaatggcagccaaaatattttgcgctccttatgctccttggtctttctgcaagtgctgctacggcgaccattttcccgcaatgctcgcaagctcctatagcttcccttcttcccccgtacctctcaccagcggtgtcttcggtatgtgaaaacccaattcttcaaccctacaggatccaacaggcaatcgcagctggcatcttacctttatcacccttgttcctccaacaatcatcagccctattacaacagttacctttggtgcatttattggcacaaaacatcagggcacaacaactacaacaacttgtgctagcaaaccttgctgcctactctcagcaacagcagtttcttccattc

SEQ ID NO: 321093 - DNA, 424 bp, Zea mays
acatagaaagtagaatccattagcaacaatagagcaacaatggcgaccaaggtattttccctccttatgctccttgctctttctacatgtgttgctaacgcgacaattttccctcaatgctcacaagctcctatagcttcccttcttcccccataccttccatcaattatagcttcagtatgtgaaaacccagctcttcaaccatataggcttcaacaagcaatcgcagcaagcaacatacctttatcgcccttgttgtttcaacaatcaccagccctatctttggtgcagtcattggtacaaaccatcatggcacaacagctgcagcaactcgtgctacctgtgatcaaccaagtagctctggcaaacctttctccctactctcagcaacaacaatttcttccattcaaccaactgtctacac

SEQ ID NO: 321094 - DNA, 394 bp, Zea mays
caacaaccaattgcccaattgcaacaacaatccttgccacatctaacaatacaagccgtcaggacgcaacagcaacaacagttcctaccagcactgagccacctagccatggtgaaccctgccgcctacttgcaagagcagctgcttgcatccaacccacttgctctggcgaacgtagttgcaaaccagcaacaacaacagctacaacagtttctgccaacgctcagtcaactagccatggtgaaccctgccgcctacgtacaacaacaacaactgctttcatctagcccgctcgctgtgggcaatgcacctacatacctgcaacaacaattgttgcaacagattgtaccagctctgactcaactagctgtggcaaaacctgttgcctacttgc

SEQ ID NO: 321095 - DNA, 438 bp, Zea mays
  unsure (1)..(438): unsure at all n locations
tgctcacttgctcctagtgccattattccacagttcctcccaccagttacttcaatgggcttcgaacacctagctgtgcaagccaacatgcaacaacaagcgcttgcggcgagcgtcttacaacaaccaattgcccaattgcaacaacaatccttgccacatctaacaatacaagccatcacaacgcaacagcaacaacagttcctaccagcactgagccacctagccatggtgaaccctgccgcctacttgcaagagcagctgcttgcatccaacccacttgctctggcgaacgtagttgcaaaccagcaacaacaacagctacaacagtttctgccaacgctcagtcaactagccatggtgaaccctgccgnctacgtacaacaacaacaactgctttcatctagcccgctcgctgggggcaatgcacctacatac

SEQ ID NO: 321096 - DNA, 424 bp, Zea mays
attcttcaaccctacaggatccaacaggcaatcacagctggcatcttacctttatcggccttgttcctccaacaatcatcagccctattacatcagttacctttggtgcatttattggcacaaaacatcagggcacaacaactacaacaacttgtgctagcaaaccttgctgcctactctcagcaacagcagtttcttccattcaaccaactaactgcattgaactctgcttcttatttgcaacaacaacaactaccattcagccagctacctgctgcctacccccagcaatttcttccattcaaccaactggcagcattgaactctcctgcttatttacagcagcaacaactactaccattcagccagctagctggtgtgagccctgctaccttcttgatacaaccacagttgttgccgttct

SEQ ID NO: 321097 - DNA, 149 bp, Zea mays
ttgaccttcgtatgacctatggttctatctcaactaccatctttacaacatctaataatacaatccggcacgtctcatcaccaacaacggttcctaccatctctgaaccatctatccatgaagaaccctgcctactacttacaaagaca

SEQ ID NO: 321098 - DNA, 352 bp, Zea mays
atgagcttatctactaacatcgcataatacccgatcgacactatgaagatgagctctttgaccttactgactgactatggatgcgagcgcacattcagcatacaacacgctgctgtgctgacatccaccgcctacgtttatctaccgcacggcgacgcatccatcacctacagcaacctgacaacttcggggtatcagcgaccaccggtccacctgtcgccgacggtccacctgacactgacgagccatgagccgtcgcactgacataatggcgtatactgatgcctgtagcttactcaaacgaacaggacttagtaccattcagagacatagctatggcctagtctacaga

SEQ ID NO: 321099 - DNA, 442 bp, Zea mays
ggagcaacatagaaagcacaatagtgtaccaacaatggcagccaaaatattttgcctccttatgctccttgagctttgtgcaagtgctgctacggcgaccattttcccacaatgctcacaagctcctatagcttcccttcttcccccgtacctctcaccagcggtgtcttcggtatgtgaaaacccaattcttcaaccctataggatccaacaggcaatcgcagctggcatcttacctttatcacccttgttcctccaacaatcatcagccctattacagcagttacctttggtgcatttattggcacaaaacatcagggcacaacaactacaacaacttgtgctagcaaaccttgctgcctactctcagcaacaacagtttcttccattcaaccaactagcttcattgaactctgcttcttatttgcaaccacaacaacta

SEQ ID NO: 321100 - DNA, 434 bp, Zea mays
gaccaactagcaacatagaaagcacaatagtgtaccaacaatggcagccaaaatatggtgcctgcttatgctccttggtctttctgcaagtgctgctacggcgaccattttcccgcaatgctcgcaagctcctatagcttcccttcttcccccgtacctctcaccagcggtgtcttcggtatgtgaaaacccaattcttcaaccctacaggatccaacaggcaatcacagctggcatcttacctttatcacccttgttcctgcaacaatcatcagccctattacatcagttacctttggtgcatttattggcacaaaacatcagggcacaacaactacaacaacttgtgctagcaaaccttgctgcctactctcagcaacagcagtttcttccattcaaccaactagctgcattgaactctgcttcttatttgc

SEQ ID NO: 321101 - DNA, 367 bp, Zea mays
ggcagccaaaatattttgcctcattatgctccttggtctttctgcaagtgctgctacggcgagcattttcccgcaatgctcacaagctcctatagcttcccttcttcccccatacctctcaccagcgatgtcttcagtatgtgaaaatccaattcttctaccctacaggatccaacaggcaatcgcagcaggcatcttacctttatcacccttgttcctccaacaatcatcagccctattacagcagttacctttggtgcatttattggcacaaaacatcagggcacaacaactacaacaactcgtgctagcaaaccttgctgcctactctcagcaacagcagttacctttggtgcatttgttggca

SEQ ID NO: 321102 - DNA, 427 bp, Zea mays
agaaagcacaatagtgtaccaacaatggcagccaaaatattttgcctccttaggctgcttggtctttctgcaagtgctgctacggcgaccattttcccgcaatgctcgcaagctcctatagcttcccttcttcccccgtacctctcaccagcggtgtcttcggtatgtgaaaacccaattcttcaaccctacaggatccaacaggcaatcacagctggcatcttacctttatcacccttgttcctccaacaatcatcagccctattacatcagttacctttggtgcatttattggcacaaaacatcagggcacaacaactacaacaacttgtgctagcaaaccttgctgcctactctcagcaacagcagtttcttccattcaaccaactagctgcattgaactctgcttcttatttgcaacaaccac

SEQ ID NO: 321103 - DNA, 412 bp, Zea mays
cagaccattagctttatctactccagagcgcagaagaacccgatcgacaccatgagggtgttgctcgttgcccgcgctctcctggctctcgctgcgagcgccacctccacgcatacaagcggcggctgcggctgccagccaccgccgccggttcatctaccgccgccggtgcatctgccacctccggttcacctgccacctccggtgcatctcccaccgccggtccacctgccgccgccggtccacctgccaccgccggtccatgtgccgccgccggttcatctgccgccgccaccatgccactaccctactcaaccgccccggcctcagcctcatccccagccacacccatgcccgtgccaacagccgcatccaagcccgtgccagctgcagggaacctgcggcgtttgca

SEQ ID NO: 321104 - DNA, 417 bp, Zea mays
cattgaactctgctgcttatttgcaacaacaattaccattcagccagctagttgctggctacccccagcaatttcttccattcaaccaactagcagcattgaactctgctgcttatttacagcagcaacaactactaccattcagccagctagctgatgtgagccctgctgccttcttgacacaacaacagttgttgccgttctacctgcacgctatgcctaacgctggcaccctcttacaactgcaacaattgctgccattcaaccaacttgctttgacaaactcaacagtgttctaccaacaacccatcattggtggtgccctcttttagattgcttatgagttatagttcaataatgaaattttttggatgatgtttgtggcgtcccagaaataagaaagtacatttctagatt

SEQ ID NO: 321105 - DNA, 391 bp, Zea mays
cagcattcaaaaacacaccaagcgaagcgcactagcaacgacctaacaccaatggcgaccaagatattagccctccttgcgcttcttgcccttttagtgagcgcaacaaatgcgttcattattccacagtgctcacttgctcctagtgccattattccacagttcctcccaccagttacttcaatgggcttcgaacatccagccgtgcaagcctacaggctacaactagcgcttgcggcgagcgccttacaacaaccaattgcccaattgcaacaacaatccttggcacatctaaccctacaaaccattgcaacgcaacaacaacaacaacaacagtttctgccatcactgagccacctagccgtggtgaaccctgtcacctacttgcaac

SEQ ID NO: 321106 - DNA, 423 bp, Zea mays
tgagcattcagaaacacaccaagcgaagcacattagcaacaacctaacaacaatggggaccaagatattatccctccttgcgcttcttgcgctttttgcgagcgcaacaaatgcgttcattattccacaatgctcacttgctccaagttccattattacacagttcctcccaccagttacttcaatgggcttcgaacacccagctgtgcaagcctataggctacaacaagcaattgcggcgagcgtcttacaacaaccaatttcccagttgcaacaacaatccttggcacatctaacaatacaaaccatcgcaacgcaacagcaacaacaattcctaccagcactgagccacctagccatggtgaaccctgccggctacttgcaacagcagttgcttgcatcaaacccacttgctctggcaaa

SEQ ID NO: 321107 - DNA, 433 bp, Zea mays
cactagcaacatagaaagcacaatagtgtaccaacaatggcagccaaaatattttggttccttatgctccttggtctttctgcaagtgctgctaccgcaaccattttcccacaatgctcacaagctcctatagcttcctttcttcccccatacctctcaccagcggtgtcttcagtatgtgaaaacccaattcttcaaccctacaggatccaacaggcaatcgcagcaggcatcttacctttatcacccttgttcctccaacaaccgtcagccctattacagcagttacctttggtgcatttgttggcacaaaacatcaaggcacaacaactacaacaacttgtgctaggaaaccttgctgcctactctcagcaacagcagtttcttccattcaaccaactggctgcattgaactctgctgcttatttgcaac

SEQ ID NO: 321108 - DNA, 430 bp, Zea mays
caactagcaacatagaaagcacaatagtgtaccaacaatggcagccaaaatatttgagttccttatgctccttggtctttctgcaagtgctgctaccgcaaccattttcccacaatgctcacaagctcctatagcttcctttcttcccccatacctctcaccagcagtgacttcagtatgtgaaaacccaattcttcaaccctacaggatccaacaggcaatcgcagcaggcatcttacctttatcacccttgttcctccaacaaccgtcagccctattacagcatttacctttggtgcatttgatggcacaaaacatcaaggcacatcaactacaacaacttgtgcttggaaacctttctgcctactctcagcaacagcagtttcttccattcaaccaactggctgcattgaactctgctgcttatttg

SEQ ID NO: 321109 - DNA, 427 bp, Zea mays
cttcctttcttcccccatacctctcaccagcggtgtcttcagtatgtgaaaacccagttcttcaaccctacaggatccaacaggcaatcgcagcaggcatcttacctttatcacccttgttcctccaacaaccgtcagccctattacagcagttacctttggtgcatttgttggcacaaaacatcaaggcacaacaactacaacaacttgtgctaggaaaccttgctgcctactctcagcaacagcagtttcttccattcaaccaactggctgcattgaactctgctgcttatttgcaacaacaactaccattcagtcagctagctgctgcctacccccagcaatttcttccattcaaccaactggcagcattgaactctgctgcttatttacaacagcaacagctaccaccattcaaccagctagc

SEQ ID NO: 321110 - DNA, 337 bp, Zea mays
gcaatttcttccattcaaccaactagcagcattgaactctgctgcttatttacagcagcaacaactactaccattcagccagctagctgatgtgagccctgctgccttcttgacacaacaacagttgttgccgttctacctgcacgctatgcctaacgctggcaccctcttacaactgcaacaattgctgccattcaaccaacttgctttgacaaacccaacagtgttctaccaacaacccatcattggtggtgccctcttttagattgcttatgagttatagttcaataatgaagttttttggatgaaaaaaaaaaaagctaagctgatgactacc

SEQ ID NO: 321111 - DNA, 411 bp, Zea mays
cagcctagcaattagctcatcgactccagattggagaactcgacaccatgaaggtgctgatcgttgcccttgctctcctggcgctcgctgcgagcgccgcctccagtacaagcggcggctgtggctgccagacaccaccgtttcatctaccgcctccgttctatatgccgcctccgttctatctgccgccgcagcagcagccgcagccatggcaataccccactcaaccaccgcagctaagcccgtgccagcagttcggatcctgcggcgtcggcagcgtcggcagcccgttcctgggccagtgcgtcgagttcctgaagcaccagtgcagcccggcggcgacgccctacggctcgccacagtgccaggcgctgcagcagcagtgctgccaccagatcaggcaggtggagc

SEQ ID NO: 321112 - DNA, 352 bp, Zea mays
tttgagcattcagaaacacaccaagcgaagcgcactagcaacgacctaacaacagtggctaccaagatattagccctccttgcgcttcttgccctttttgtgagcgcaacaaatgcgttcattattccacaatgctcacttgctcctagtgccattattccacagttcctcccaccagttacttcaatgggcttcgaacacctagctgtgcaagccaacatgcaacaacaagcgcttgcggcgagcgtcttacaacaaccaattgcccaattgcaacaacaatccttgccacatctaacaatacaagccatcacaacgcaacagcaacaacagttcctaccaacactgagcc

SEQ ID NO: 321113 - DNA, 361 bp, Zea mays
attggcacaaaacatcagggcacaacaactacaacaacttgtgctagcaaacctggctgcctactctcagcaacagcagtttcttccattcaaccaactagctgcattgaactctgcttcttatttgcaacaacaacaactaccattcagccagctatctgctgcctacccccagcaatttcttccattcaaccaactgacagcattgaactctcctgcttatttacagcagcaacaactactaccattcagccagctagctggtgtgagccctgctaccttcttgacacaaccacagttgttgccgttctaccagcacgctgcgcctaacgctggcaccctcttacaactgcaacaattg

SEQ ID NO: 321114 - DNA, 426 bp, Zea mays
attgagaccaacaagcaacatagaaagtggaatacagtagcaacaatagagcaacagtggcggccaagatattttccatccttatgctccttgctctttctgcatgtgttgctaacgcgaccatttttcctcaatactcacaagctcctatagctgcccttcttcccccataccttccatcaatgaccgcttcagtttgtgaaaacccagcccttcaaccctacaggctccaacaagcaatcgcaacaagcaacttacctttatcacccctgttctttcaacaatcgccagccctatctttggtgcagtcattggtacaaaccatcagggcacaacagctgcaacaactcgtgctaccagtgatcagccaagtagctctggcaaacctttctccctactctcagcaacaacaatttctttccattc

SEQ ID NO: 321115 - DNA, 433 bp, Zea mays
gcacaatagtgtaccaacaatggcagccaaaatattttgcttccttatgctccttgggctttctgcaagtgctgctaccgcaaccattttcccacaatgctcacaagctcctatagcttcctttcttcccccatacctctcaccagcggtgtcttcagtatgtgaaaacccaattcttcaaccctacaggatccaacaggcaatcgcagcaggcatcttacctttatcacccttgttcctccaacaaccgtcagccctattacagcagttacctttggtgcatttgttggcacaaaacatcaaggcacaacaactacaacaacttgtgctaagaaaccttgctgcctactctcagcaacagcaggttcttccattcaaccaactggctgcattgaactctgctgcttattgcaacaacactaccaatcagtca

SEQ ID NO: 321116 - DNA, 434 bp, Zea mays
  unsure (1)..(434): unsure at all n locations
accattagctttatctactccagagcgcagaagaacccgatcgacaccatgagggtgttgctcgttgggctcgctctcctggctctcgctgcgagcgccacctccacgcatacaagcggcggctgcggctgccagccaccgccgccggttcatctaccgccgccggtgcatctgccacctccggttcacctgccacctccggtgcatctcccaccgccggtccacctgccgccgccggtccacctgccaccgccggtccatgtgccgccgccggttcatctgccgccgccaccatgccactaccctactcaaccgccccggcctcagcctcatccncagccacacccatgcccgtgccaacagccgcatccaagcccgtgccagctgcagggaacctgcggcgttggcagcaccccgatcctgggccagtgcgt

SEQ ID NO: 321117 - DNA, 401 bp, Zea mays
gcaacatagaaagcacaatagtgtaccaacaatggcagccaaaatattttgcctccgtatgctccttggtctttctgcaagtgctgctacggcgaccattttcccacaatgctcacaagctcctatagcttcccttcttcccccgtacctctcaccagcggtgtcttcggtatgtgaaaacccaattcttcaaccctataggatccaacaggcaatcgcagctggcatcttacctttatcacccttgttcctccaacaatcatcagccctattacagcagttacctttggtgcatttattggcacaaaacatcagggcacaacaactacaacaacttgtgctagcaaaccttgctgcctactctcagcaacaacagtttcttccattcaaccaactagctg

SEQ ID NO: 321118 - DNA, 411 bp, Zea mays
gaccaactagcaacatagaaagcacaatagtgtaccaacaatggcagctaaaatatggtgcctccttatgctccttggtctttctgcaagtgctgctacggcgaccattttcccacaatgctcacaagctcctatagcttcccttcttcccccgtacctctcaccaacggtgtcttcggtatgtgaaaacccaattcttcaaccctacaggatccaacaggcaatcgcagctggcatcttacctttatcacccttgttcctccaacaatcatcagccctattacagcagttacctttggtgcatttattggcacaaaacatcaaggcacaacaactacaacaacttgtgctagcaaaccttgctgcctactctcagcaacagcaagttcttccattcaaccaactagctgc

SEQ ID NO: 321119 - DNA, 437 bp, Zea mays
caactagcaacatagaaagcacaatagtgtaccaacaatggcagccaaaatattttgcctccttatgctccttggtctttctgcaagtgctgctacggcgaccattttcccgcaatgctcgcaagctcctatagcttcccttcttcccccgtacctctcaccagcggtgtcttcggtatgtgaaaacccaattcttcaaccctacaggatccaacaggcaatcgcagctggcatcttacctttatcacccttgttcctccaacaatcatcagccctattacaacagttacctttggtgcatttattggcacaaaacatcagggcacaacaactacaacaacttgtgctagcaaaccttgctgcctactctcagcaacagcagtttcttccattcaaccaactaggttcattgaactctgcttcttaattgcaacaac

SEQ ID NO: 321120 - DNA, 427 bp, Zea mays
ctttggtgcatttattggcacaaaacatcagggcacaacaactacaacaacttgtgctagcaaaccttgctgcctactctcagcaacagcagtttcttccattcaaccaactaggttcattgaactctgcttcttatttgcaacaacaacaactaccattcagccagctacctgctgcctacccccagcaatttcttccattcaaccaactagcagcattgaactctcctgcttatttacagcagcaacaactactaccattcagccagctagctggtgtgagccctgctaccttcttgacacaaccacagttgttgccgttctaccagcacgttgcgcctaacgctggcaccctcttacaactgcaacaattgctgccattcaaccaacttgctttgacaaacccagcagtgttctaacaacaacc

SEQ ID NO: 321121 - DNA, 429 bp, Zea mays
cccacgcgtccgcttcccttcttcccccataccttccatcaattatagcttgagtatgtgaaaacccagctcttcaaccatataggcttcaacaagcaatcgcagcaagcaacatacctttatcgcccttgttgtttcaacaatcaccagccctatctttggtgcagtcattggtacaaaccatcagggcacaacagctgcagcaactcgtgctacctgtgatcaaccaagtagctctggcaaacctttctccctactctcagcaacaacaatttcttccattcaaccaactgtctacactgaaccctgctgcttatttgcagcaacaactattaccatttagccagctagctactgcctactctcagcaacaacaacttcttccatttaaccaattggccgcactgaaccccgctgcttatttgcagc

SEQ ID NO: 321122 - DNA, 391 bp, Zea mays
ctggcagcattgaactctcctgcttatttacagcagcaactcgtgctacctctgatcaaccaagtagctctggcaaacctttctccctactctcagcaacaacaatttcttccattcaaccaactgtctacactgaaccctgctgcttatttgcagcaacaactattaccatttagccagctagctactgcctactctcagcaacaacaacttcttccatttaaccaattggccgcactgaaccccgctgcttatttgcagcagcaaatactactaccatttagccagctagctgcagcaaaccgtgcttccttcttgacacagcaacagttgctgcctttctaccagcagtttgcggctaaccccgcaaccctcttacaactacaacaat

SEQ ID NO: 321123 - DNA, 425 bp, Zea mays
attgagaccaacaagcaacatagaaagtggaatccagtagcaacaatagagcaacagtggcgaccaagatattttccctccttatgctccttgctctttctacatgtgttgctaacgcgacaattttccctcaatgctcacaagctcctatagcttcccttcttcccccataccttccatcaattatagcttcaatatgtgaaaacccagctcttcaaccatataggcttcaacaagcaatcgcagcaagcaacatacctttatcgcccttgttgtttcaacaatcgccagccctatctttggtgcagtcattggtacaaaccatcagggcacaacagctgcagcaactcgtgctacctctgatcaaccaagtagctctggcaaacctttctccctactctcagcaacaacaatttcttccattc

SEQ ID NO: 321124 - DNA, 375 bp, Zea mays
ccaacaagcaacatagaaagtggaatacagtagcaacaatagagcaacaatggcgggcaagagattttccatccttatgctccttgctctttctgcatgtgttgctaacgcgaccattattcctcaatactcacaagctcctatagctgcccttctttccccataccttccatcaatgaccgcttcagtttgtgaaaacccagcccttcaaccctacaggctgcaacaagcaatcgcaacaagcaacttacctttatcacccctgatctttcaacaatcgccagacctatctttggtgcagtcattggtacaaaccatcagggcacaacagctgctacaactcgtgctaccagtgatcagccaagtagctctggc

SEQ ID NO: 321125 - DNA, 432 bp, Zea mays
cccacgcgtccgattgagaccaactagcaacatagaaagcacaatagtgtaccaacaatggcagccaaaatattttgcctccttatgctccttggtctttctgcaagtgctgctacggcgaccattttcccgcaatgctcgcaagctcctatagcttcccttcttcccccgtacctctcaccagcggtgtcttcggtatgtgaaaacccaattcttcaaccctacaggatccaacaggcaatcacagctggcatcttacctttatcacccttgttcctccaacaatcatcagccctattacatcagttacctttggtgcatttattggcacaaaacatcagggcacaacaactacaacaacttgtgctagcaaaccttgctgcctactctcagcaacagcagtttcttccattcaaccaactagcttgcatg

SEQ ID NO: 321126 - DNA, 401 bp, Zea mays
ccaagatccaggacaaggagggcattccaccggaccagcagcgcctcatcttcgccgtcaagcagctggaggatggccgcaccctggcggattacaacatccagaaggagagcactctccacctggtgctccgcctcaggggtggcatgcagatttttgtgaagacattgactggcaagactatcaccttggaggtggagagctctgacaccattgacaatgtgaaggccaagatccaggacaaggagggcattcccccagaccagcagcgtctgatctttgcgggcaagcagctggaggatggccgcactctcgcggactacaacatccagaaggagagcacccttcaccttgttctccgcctcaggggtggtatgcagatctttgtgaagaccctgact

SEQ ID NO: 321127 - DNA, 428 bp, Zea mays
agaccaactagcaacatagaaagcacaatagtgtaccaacaatggcagccaaaatatgttgcctccttatgctccttggtctttctgcaagtgctgctacggcgaccattttcccgcaatgctcgcaagctcctatagcttcccttcttcccccgtacctctcaccagcggtgtcttcggtatgtgaaaacccaattcttcaaccctacaggatccaacaggcaatcgcagctggcatcttacctttatcacccttgttcctccaacaatcatcagccctattacaacagttacctttggtgcatttattggcacaaaacatcatggcacaacaactacaacaacttgtgctagcaaaccttgctgcctactctcagcaacagcagtttcttccattcaaccaactaggttcattgaactctgctttt

SEQ ID NO: 321128 - DNA, 371 bp, Zea mays
gaaagcacaatagtgtaccaacaatggcagccaaaatattttgcctccttatgctccgtggtctttctgcaagtgctgctacggcgaccattttcccgcaatgctcgcaagctcctatagcttcccttcttcccccgtacctctcaccagcggtgtcttcggtatgtgaaaacccaattcttcaaccctacaggatccaacaggcaatcacagctggcatcttacctttatcacccttgttcctccaacaatcatcagccctattacatcagttacctttggcgcatttattggcacaaaacatcagggcacaacaactacaacaacttgtgctagcaaaccttgctgcctactctcagcaacagcagttt

SEQ ID NO: 321129 - DNA, 362 bp, Zea mays
attgagaccaacaagcaacatagaaagtggaatccagtagcaacaatagagcgacagggcgaccaagatactttccctccttatgctccttgctctttctgcatgtgttgctaacgcgacaattttccctcaatgctcacaagctcctatagcttcccttcttcccccataccttccatcaatgatagcttcagtatgtgaaaacccagctcttcaaccctataggctccaacaagcaatcgcagcaagcaacatacctttatcacccttgtttcaacaatcgccagccctatctttggtgcagtcattggtacaaaccatcaaggcacagcagctgcagcaactcgtgctacctgtgatca

SEQ ID NO: 321130 - DNA, 364 bp, Zea mays
gaaacacaccaagcgaagcgcactagcaacaacctaacaacaatggctaccaggatagtatccctccttgcgcttcttgcgctttttgcgagcgcaacaaatgcgtccattattccacaatgctcacttgctcctagttccattattccacagttcctcccaccagttacttcaatggccttcgaacacccagctgtgcaagcctataggctacaacaagcgattgcggcgagcgtcttacaacaaccaattgcccaattgcaacaacaatccttggcacatctaacaatacaaaccatcgcaacgcaacagcaacaacagttcctaccagcactgagccacctagccatggtgaaccctgtcg

SEQ ID NO: 321131 - DNA, 320 bp, Zea mays
atcgacatataaacaacaatcatccatatacaatgtgcagcaatatatacaggtcatgtatgctcatcagcctgtatagctcgcgctatactcggaaccaccaagttactatgctaaaaagtttttattactctcatcattaacaaatacttctattcaaccaactgtttacactgaacactgctaattatttacaactacaacaatcaccatgcaatcagataactactgtctactctataacccttcaacttcttacatccaaccaacttatcacactgaaccgctttgctgcatttgcagaccaaatactactggca

SEQ ID NO: 321132 - DNA, 363 bp, Zea mays
aacatagaaagcacaatagtgtaccaacaatggcagccaaaatattttgcttccttgtgctcgttggtctttctgcaagtgctgctaccgcaaccattttcccacaatgctcacaagctcctatagcttcctttcttcccccatacctctcaccagcggtgtcttcagtatgtgaaaacccaattcttcaaccctacaggatccaacaggcaatcgcagcaggcatcttacctttatcacccttgttcctccaacaaccgtcagccctattacagcagttacctttggtgcatttgttggcacaaaacatcaaggcacaacaactacaacaacttgtgctaagaaaccttgctgcctactctc

SEQ ID NO: 321133 - DNA, 420 bp, Zea mays
gcacaatagtgtaccaacaatggcagccaaaatattttgcctccttatgctccttgggctttcgtgcaagtgctgctacggcgaccattttcccgcaatgctcgcaagctcctatagcttcccttcttcccccgtacctctcaccagcggtgtcttcggtatgtgaaaacccaattcttcaaccctacaggatccaacaggcaatcacagctggcatcttacctttatcacccttgttcctccaacaatcatcagccctattacatcagttacctttggtgcatttattggcacaaaacatcagggcacaacaactacaacaacttgtgctagcaaaccttgctgcctactctcagcaacagcagtttcttccattcaaccaactagctgcattgaactctgcttcttatttgcaacaac

SEQ ID NO: 321134 - DNA, 333 bp, Zea mays
cctccgtgtccactctcgatcttcccttccccctcggcgccggtctccaaacccgctgtccgcgtttcgtaccgcttccggttccgggggcgggcgggcagcaccgtctcggctctcggatactatggcttccggcgaggggtgggaggcggcggtgcgggcggaggtggtcgccgctgcattgttggaccacctgcagatggtggagctcggagcctgttcaaaggttcacaatgcacagcctatggactgactactaccaacggacctgttctggaaggtgccgctgcacccaattggcgatcgacaacatattggcactgaaggaggtga

SEQ ID NO: 321135 - DNA, 368 bp, Zea mays
gcgagcaacatagaaagtcgaatccattagcatcaatagagcaacaatggcgaccaaggataggtgtccctacttatgctgcttgctctttctacatgtgttgctaacgcgacaattctccctcaatgctcacaagctactatagcttcccttcttcccccataccttccatcaattatagcttcagtatgtgaaaacccagctcttcaaccatataggcttcaacaagcaatcgcagcaagcaacataccttcatcggccttgttgtatcaacaatcaccagccctatctttggtgcagacataggtacaaaccatcacggcacaacagctgcagcaactcgggctacctgtgatcaaccaagtagc

SEQ ID NO: 321136 - DNA, 369 bp, Zea mays
gcaacatagaaagtggaatacagtagctacaatagagcaacaatggcggccaagatagtttgcatccttatgctccttgctctttctgcatgtgttgctaacgcgaccatttttcctcaatactcacaagctcctatagctgcccttcttcccccataccttccatcaatgaccgcttcagtttgtgaaaacccagcccttcaaccctacaggctccaacaagcaatcgcaacaagcaacttacctttatcacccctgttctttcaacaatcgccagccctatctttggtgcagtcattggtacaaaccatcagggcacaacagctgcaacaactcgtgctaccagtgatcagccaagtagctctggca

SEQ ID NO: 321137 - DNA, 335 bp, Zea mays
gaaagcacaatagtgtaccaacaatggcagccaaaatattttgcttccttatgctgcttggtctttctgcaagtgttgctaccgcaaccattttcccacaatgctcacaagctcctatagcttcccttcttcccccatacctctcaccagcggtgtcttcaatgtgtgaaaccccaattgttcaaccctacaggatccaacaggcaatcgcaacaggcatcttaccattatcacccttgttcctccaacaaccgtcagccctattacagcaattacctttggtccatttgggggcaccaaacaatcaggcacaacaactaccaccaacttgtgct

SEQ ID NO: 321138 - DNA, 430 bp, Zea mays
acccacgcgtacgcctgccaccagttacttcaatgggcttttaacacccagctgtgcaagcctataggctgcaacgagcaattgcggcgagcgtcttacaacaaccaatttcccagttgcaacaacaatccttggcgcatctaacaatacaaaccatcgtatcgcaacagcaacaacaattcctaccagcactgagccacctagccatggtgaaccctgtcgcctacttgcaacagcagttgcttgcatcaaacccacttgctctggcaaacgtagctgcaaaccatccacaacaacagctgcaacagcttatgccagcgctcagtcaactagccatggtgaaccctgacgactacctacaacagctacaactgcttttatctagcccgctcgctgtggccaatgcacctacatacctgcaacaacaatt

SEQ ID NO: 321139 - DNA, 368 bp, Zea mays
gaccaactagcaacatagaaagcacaatagtgtaccaacaatggcagccaaaatattgtgcggccttatgctccttggtatttctgcaagtgctgctacggcgaccattttcccgcaatgctcacaagctcctatagcttcccttcttcccccgtacctctcaccagcggtgtcttcggtatgtgaaaacccaattcttcaaccctacaggatccaacaggcaatcgcagctggcatcttacctttatcacccttgttcctccaacaatcatcagccctattacagcagttacctttggtgcatttattggcacaaaacatcagggcacaacaactacaacaacttgtgctagcaaaccttgctgcct

SEQ ID NO: 321140 - DNA, 368 bp, Zea mays
gctccttggtctttctgcaagtgctgctacggcgaccattttcccgcaatgctcgcgagctgctatagcttcccttcttcccccgtacctctcaccagcggtgtcttcggtatgtgaaaacccaattcttcaaccctacaggatccaacaggcaatcacagctggcatcttacctttatcacccttgttcctccaacaatcatcagccctattacatcagttacctttggtgcatttattggcacaaaacatcagggcacaacaactacaacaacttgtgctagcaaaccttgctgcctactctcagcaacagcagtttcttccattcaaccaactagctgcattgaactctgcttcttatttgcaac

SEQ ID NO: 321141 - DNA, 360 bp, Zea mays
attgagaccaactagcaacatagaaagcacaatagtgtaccaacaatggcagccaaggtattttgcctccttatgctccttggtctttctgcaagtgctgctacggcgaccattttcccacaatgctcacaagctcctatagcttcccttcttcccccgtacctctcaccagcggtgtcttcggtatgtgaaaacccaattcttcaaccctataggatccaacaggcaatcgcagctggcatcttacctttatcacccttgttcctccaacaatcatcagccctattacagcagttacctttggtgcatttattggcacaaaacatcagggcacaacaactacaaacaacttgtgctagc

SEQ ID NO: 321142 - DNA, 366 bp, Zea mays
ccatcaatcatcattcatcttagtagtataggcaccaaatcaaatctgcaacgtcaagtatctaactccaaaaaccatgaagctggtgcttgtggttcttgctttcattgctttagtatcaagtgtttcttgtacacagacaggcggctgcagctgtggtcaacaacaaagccatgagcagcaacatcatccacaacaacatcatccacaaaaacaacaacatcaaccaccaccacaacatcaccagcagcagcaacaccaacaacaacaagttcacatgcaaccacaaaaacatcagcaacaacaagaagttcatgttcaacaacaacaacaacaaccgcagcaccaacaacaacaacaacaaca

SEQ ID NO: 321143 - DNA, 443 bp, Zea mays
atttagaccaactagcaacatagaaagcacaatagtgtaccaacaatggcagccaaaatattttgcctccttatgctccttggtatttctgcaagtgctgctacggcgaccattttcccgcaatgctcacaagctcctatagcttcccttcttcccccgtacctctcaccagcggtgtcttcggtatgtgaaaacccaattcttcaaccctacaggatccaacaggcaatcgcagctggcatcttacctttatcacccttgttcctccaacaatcatcagccctattacagcagttacctttggtgcatttattggcacaaaacatcagggcacaacaactacaacaacttgtgctagcaaaccttgctgcctactctcagcaacagcagtttcttccattcaaccaactagctgcattgaactctgcttcttatttgcaaca

SEQ ID NO: 321144 - DNA, 442 bp, Zea mays
attgagaccaactagcaacatagaaagcacaatagtgtaccaacaatggcagccaaaatattttgcctccttatgctccttggtctttctgcaagtgctgctacggcgaccattttcccacaatgctcacaagctcctatagcttcccttcttcccccgtacctctcaccagcggtgtcttcggtatgtgaaaacccaattcttcaaccctataggatccaacaggcaatcgcagctggcatcttacctttatcacccttgttcctccaacaatcatcagccctattacagcagttacctttggtgcatttattggcacaaaacatcagggcacaacaactacaacaacttgtgctagcaaaccttgctgcctactctcagcaacaacagtttcttccattcaaccaactagctgcattgaactctgcttcttatttgcaac

SEQ ID NO: 321145 - DNA, 362 bp, Zea mays
attcagaaacacaccaagcgaagctacctagcaacgacttaacaacaatggctaccaggatattagccctccttgcgcttcttgccctttttgtgagcgcaacaaatgcgttcattattccacaatgctcacttgctcctagtgccattataccacagttcctccgaccagttacttcaatgggcttcgaacacctagctgtgcaagcctacaggctacaacaagcgcttgcagcgagcgtcttacaacaaccaattaaccaattgcaacaacaatccttggcacatctaaccatacagaccatcgcatcacaacagcagcagcagttcctaccagcactgagccaactagatgtggtgaac

SEQ ID NO: 321146 - DNA, 426 bp, Zea mays
acgattgagaccaactagcaacatacaaagcacaatagtgtaccaacaatggcagccaagggattgtgcctccttatgctccttgggctttctgcaagtgctgctacggcgaccattttcccgcaatgctcgcaagctcctatagcttcccttcttcccccgtacctctcaccagcggtgtcttcagtatgtgaaaacccaattcttcaaccctacacgatccaacaggcaatcacagctggcatcatacctttatcaccctcgttcctccaacaatcatcagccctattacatcagttacctttggtgcatctattggcacaaaacatcacggcacaacaactacaacaacttgtgctagcatacctcgctgactactatcagcaacagcagtttcttccattcaaccaactagctgcattgaac

SEQ ID NO: 321147 - DNA, 413 bp, Zea mays
cacccttgttcctccaacaaccgtcagccctattacagcagttacctttggtccatttggtggcacaaaacatcagggcacaacaactacaacaacttgtgctagcaaaccttgctgcatactctcagcaacatcagtttcttccattcaaccaactggctgcattgaactctgctgcttatttgcaacaacaattaccattcagccagctagttgctgcctacccccagcaatttcttccattcaaccaactagcagcattgaactctgctgcttatttacagcagcaacaactactaccattcagccagctagctgatgtgagccctgctgccttcttgacacaacaacagttgttgccgttctacctgcacgctatgcctaacgctggcaccctcttacaactgcaacaa

SEQ ID NO: 321148 - DNA, 369 bp, Zea mays
ttcagaaacacacctagcgaagcgcactagcaacgacctaacaacaatggctaccaagatagtatccctctttgcgcttcttgccctttttgtgagcgcaacaaatgcgttcattattccacaatgctcacttgctcctagtgccattattccacagttcctccctccagttacttcaatgggcttcgaacacccagctgtgcaagcctacaggctacaacaagcgcttgcggcgagcgtcttacaacaaccaattgcccaattacaacaacaatccttggcacatctaaccatacaaaccatcgcaacgcaacagcaacaacaatttctaccagcactgagccaactagctgtggtgaaccctgtcgc

SEQ ID NO: 321149 - DNA, 294 bp, Zea mays
gcaacatagaaagcacaatagtgtaccaacaatggcagccaaaatattttgcctcctgatgctccttggtatttctgcaagtgctgctacggcgaccattttcccgcaatgctcacaagctcctatagcttcccttcttcccccgtacctctcaccagcggtgtcttcggtatgtgaaaacccaattcttcaaccctacaggatccaacaggcaatcgcagctggcatcttacctttatcacccttgctcctgcaacaatcatcagccctattacagcagttacctttggcgca

SEQ ID NO: 321150 - DNA, 424 bp, Zea mays
  unsure (1)..(424): unsure at all n locations
ggtcttcagaccattagctttatctactccagagcgcagaagaacccgatcgacaccgtgagggtgttgctcgttgccctcgctctcctggctctcgctgcgagcgccacctccacgcatacaagcggcggctgcggctgccagccaccgccgccggttcatctaccgccgccggtgcatctgccacctccggttcacctgccacctccggtgcatctgccaccgccggtccacctgccgccgccggtccacctgccaccgccggtccatgtgccgccgccggttcatctgccgtcgccaccatgccactaccctactcaaccgccccggcctcagcctcatccccagccacacccatgcccgtgccaacagccgcatncaagcccgtgccagctgcagggaacctgcggcgttggcagcaccc

SEQ ID NO: 321151 - DNA, 378 bp, Zea mays
aattagctcatcgactccagattggagaactcgacaccatgaaggtgctgatcgttggccttgctctcctggcgctcgctgcgagcgccgcctccagtacaagcggcggctgtggctgccagacaccaccgtttcatctaccgcctccgttctatatgccgcctccgttctatctgccgccgcagcagcagccgcagccatggcaataccccactcaaccaccgcagctaagcccgtgccagcagttcggatcctgcggcgtcggcagcgtcggcagcccgttcctgggccagtgcgtcgagttcctgaggcaccagtgcagcccggcggcgacgccctacggctcgccacagtgccaggcgctgcagcagcagtgct

SEQ ID NO: 321152 - DNA, 345 bp, Zea mays
agagcacaatagtgtaccaacaatggcagccaaaatattttgcctccttatgctccttggtagttctgcaagtgctgctacggcgaccattttcccgcaatgctcacaagctcctatagcttcccttcttcccccgtacctctcaccagcggtgtcttcggtatgtgaaaacccaattcttcaaccctacaggatccaacaggcaatcgcagctggcatcttacctttatcacccttgttcctccaacaatcatcagccctattacagcagttacctttggtgcatttattggcacaaaacatcagggcacaacaactactacaacttgtgctagcaaaccttgc

SEQ ID NO: 321153 - DNA, 368 bp, Zea mays
cagaccattagctttatctactccagagcgcagaagaacccgatcgacaccatgagggtgtggctcgttgccctcgctctcctggctctcgctgcgagcgccacctccacgcatacaagcggcggctgcggctgccagccaccgccgccggttcatctaccgccgccggtgcatctgccacctccggttcacctgccacctccggtgcatctcccaccgccggtccacctgccgccgccggtccacctgccaccgccggtccatgtgccgccgccggttcatctgccgccgccaccatgccactaccctactcaaccgccccggcctcagcctcatccccagccacacccatgcccgtgccaacagcc

SEQ ID NO: 321154 - DNA, 386 bp, Zea mays
accggtcggattccggcccaagcgaacgcctagcaacgactacaccaatggctaccaagatattaccctccttgcgctggtgcgctttatgagcgcatcaagcgtcattattccacagtgctcacttgctcctagtgccattatttcacagttccttccaccagttacttcaatgggcttcgaacatccagccgtgcaagcctacaggctacaactagcgcttgcggcgagcgccttacaacaaccaattgcccaattgcaacaacaatccttggcacatctaaccctacaaaccattgcaacgcaacaacaacaacaacaacagtttctgccatcactgagccacctatccgtggtgaaccctgtcacctacttgcaacagcagc

SEQ ID NO: 321155 - DNA, 283 bp, Zea mays
cggacgcgtgggttttttatctgatacttttagcaggcttccagcttaatttacagaggatgataacacaggggagctgctgcggttcgatcgaggtcaccgatcgacgacgacgacgacgacatgtacatgctacaaacacgctcacgctcacacaaacttactagtagcagagcacgcgcgcggctagctcgtggaggcagatgccgtatccggcggtgcattcaggcccggtgccgacgcagagaccctgcgcggcgacgaacgctgggcttccgcggct

SEQ ID NO: 321156 - DNA, 419 bp, Zea mays
gcaacatagaaagcacaatagtgtaccaacaatggcagccaaaatattttgcctcgttatgctccttggtctttctgcaagtgctgctacggcgaccattttcccgcaatgctcgcaagctcctatagcttcccttcttcccccgtacctctcaccagcggtgtcttcggtatgtgaaaacccaattcttcaaccctacaggatccaacaggcaatcgcagctggcatcttacctttatcacccttgttcctccaacaatcatcagccctattacaacagttacctttggtgcatttattggcacaaaacatcagggcacaacaactacaacaacttgtgctagcaaaccttgctgcctactctcagcaacagcagtttcttccattcaaccaactaggttcattgaactctgcttctt

SEQ ID NO: 321157 - DNA, 431 bp, Zea mays
acgcagcaacatagaaagcacaatagtgtaccaacaatggcagctaaaatattgtgcctcgttatgctccttggtctttctgcaagtgctgctacggcgaccattttgccacaatgctcacaagcttctatagcttgccttcttcccccgtacctctcaccaacggtgtcttcggtatgtgaaaacccaattcttcaaccctacaggatccaacaggcaatcgcagctggcatgttacctttatcacccttgttcctccaacaatcatcagccctattacagcagttacctttggtgcattcattggcacaaatcatcagggcacatcaactacaacaacttgtgctagcaaaccttgctgactactctcagcatcagcagtttcttacattcagccaactagctgcattgaactctgcttcttatatgca

SEQ ID NO: 321158 - DNA, 417 bp, Zea mays
caacaagcaacatagaaagtggaatccagtagcaacaacagagcaacaatggcgaccaagatattttccctccttatgctccttgctctttctgcatgtgttgctaacgcgacaattttccctcaatgctcacaagctcctatagcttcccttcttcccccataccttccatcaatgatagcttcagtatgtgaaaacccagctcttcagccctataggctccaacaagcaatcgcagcaagcaacatacctttatcacccttgttgtttcaacaatcgccagccctatctttggtgcagtcattggtacaaaccatcagggcacagcagctgcagcaactcgtgctacctgtgatcaaccaagtagctctggcaaacctttctccctactctcagcaacaacaatttcttccattc

SEQ ID NO: 321159 - DNA, 369 bp, Zea mays
ccaacaagcaacatagaaagtggaatccagtagcaacaatagagcaacaatggcgacggaagagactttccctccttatgctccttgctctttctgcatgtgatgctaacgcgacaattttccctcaatgctcacaagctcctatagctctccttcttcccccataccttccatgaacgatagcttcagtatgtgaaaacccagctcttcaaccctataggctccaacaagcaatcgcagcaagcaacatacctttatcacccttgttgcaacaatcgccagccctatctttggcgcagtcattggtacaaaccatcaaggcacagcagctgcagcaactcgtgctacctgtgatcaaccaagtagctc

SEQ ID NO: 321160 - DNA, 422 bp, Zea mays
ggcagccaaaatattttgcttccttatgctccttggtctttctgcaagtgctgctacggcagcgcattttcccacaatgctcacaagctcctatagcttcctttcttcccccatacctctcaccagcggtgtcttcagtatgtgaaaacccaattcttcaaccctacaggatccaacaggcaatcgcagcaggcatcttacctttatcacccttgttcctccaacaaccgtcagccctattacagcagttacctttggtgcatttgttggcacaaaacatcaaggcacaacaactacaacaacttgtgctaggaaaccttgctgcctactctcagcaacagcagtttcttccattcaaccaactggctgcattgaactctgctgcttatttgcaacaacaactaccattcagtcagctagct

SEQ ID NO: 321161 - DNA, 420 bp, Zea mays
gcaacatagaaagcacaatagtgtaccaacaatggcagccaaaatattttgcctcctgatgctccttggtctttctgcaagtgctgctacggcgaccattttcccgcaatgctcgcaagctcctatagcttcccttcttcccccgtacctctcaccagcggtgtcttcggtatgtgaaaacccaattcttcaaccctacaggatccaacaggcaatcgcagctggcatcttacctttatcacccttgttcctccaacaatcatcagccctattacaacagttacctttggtgcatttattggcacaaaacatcagggcacaacaactacaacaacttgtgctagcaaaccttgctgcctactctcagcaacagcagtttcttccattcaaccaactaggttcattgaactctgcttctta

SEQ ID NO: 321162 - DNA, 415 bp, Zea mays
acgatcgacaccatgagggtgttgctcgttgccctcgctctcctggctctcgctgcgagcgccacgttcacgcatacaagcggcggctgcggctgccagccaccgccggcggttcatctaccgccgccggtgcatctgccacctccggttcacctgccacctccggtgcatctcccaccgccggtccacctgccgccgccggtccacctgccaccgccggtccatgtgccgccgccggttcatctgccgccgtcaccatgccactaccctactcaaccgccccggcctcagcctcatgcccagccacactcatgcccgtgccaacagccgcatccaagcccgtgccagctgcagggaacctgcggcgttggcagcaccccgatcctgggccagtgcgtcgagttcctgaggcatc

SEQ ID NO: 321163 - DNA, 355 bp, Zea mays
  unsure (1)..(355): unsure at all n locations
tccgtccgcgcgtttaatcaacccttnnngttgtttcaaacccaatcgncgcagcccttatctnnnttggtgccagtgcgattgggtaccaaacncnnatcagtggcacccagcagcntnngcagcaaccctcgtgccctacctgtgnnnatcaaccannagtagnnctctggcanannacctttctcgcctaactctcagncaaccaaccaatnnttcttccatttcaaccccaactggtctacnnactgaacccnntgctgcttaaatttgcagcaaccannactattacncnnattcagccagcttanngctactgcnnctactcnntcagcaacaaccaactnnntcttcc

SEQ ID NO: 321164 - DNA, 421 bp, Zea mays
ggaatacagtagcaacaatagagcaacaatggcggccaagatattttccatgcttatgctccttgctctttctgcatgtgttgctaacgcgaccatttttcctcaatactcacaagctcctatagctgcccttcttcccccataccttccatcaatgaccgcttcagtttgtgaaaacccagcccttcaaccctacaggctccaacaagcaatcgcaacaagcaacttacctttatcacccctgttctttcaacaatcgccagccctatctttggtgcagtcattggtacaaaccatcagggcacaacagctgcaacaactcgtgttaccagtgatcagccaagtagctctggcaaacctttctccctactctcagcaacaacaatttcttccattcaaccaactgtctacactgaaccct

SEQ ID NO: 321165 - DNA, 324 bp, Zea mays
acggccgcccttttttttttttttttttttttttttttttttttttttttttttttttttgggttggtttttttttttttttttttttttaaaaagggccggatcaaaaaattcagtccccagtttttttttggagtttgaatatccagggggggacctttaaaaaacatttttaacatatcaaattttacggattcccaagggatgataacccctttttttggaccactttgccagttgacaacaatacattcgggttctggaaaggaatcaatcaaaggtacaattgggtcttttaccaaaatagaccattttaaaacgcaa

SEQ ID NO: 321166 - DNA, 423 bp, Zea mays
tgagaccaactagcaacatagaaagcacaatagtgtaccaacaatggcagccaaaatgttttgcttccttatgctccttggtctttctgcaagtgctgctaccgcaaccattttcccacaatgctcacaagctcctatagcttcctttcttcccccatacctctcaccagcggtgtcttcagtatgtgaaaacccaattcttcaaccctacaggatccaacaggcaatcgcagcaggcatcttacctttatcacccttgttcctccaacaaccgtcagccctattacagcagttacctttggtgcatttgttggcacaaaacatcaaggcacaacaactacaacaacttgtgctaggaaaccttgctgcctactctcagcaacagcagtttcttccattcaaccaactggctgcattgaactc

SEQ ID NO: 321167 - DNA, 347 bp, Zea mays
  unsure (1)..(347): unsure at all n locations
aacaagcaacatagaaagtggaatccagtagcatcaacagagcaacaatggcgaccaagatagtttccctccttatgctccttgctctttctgcatgtgttgctaacgcgacaattttccctcaatgctcacaagctcctatagcttcccttcttcccccataccttccatcaatgatagcttcagtatgtgaaaacccagctcttcagccctataggctccaacaagcaatcgcagcaagcaacatacctttatcaccnncttgtgttcaacaatcgccagccctatctttggtgcagtcattggtacaaaccatcagggcacagcagctgcagcaactcgtgcta

SEQ ID NO: 321168 - DNA, 412 bp, Zea mays
caagatattagccctccttgcgcttcttgcccttttagtgagcgcaacaaatgcgttgattattccacagtgctcacttgctcctagtgccattattccacagttcctcccaccagttacttcaatgggcttcgaacatccagccgtgcaagcctacaggctacaactagcgcttgcggcgagcgccttacaacaaccaattgcccaattgcaacaacaatccttggcacatctaaccctacaaaccattgcaacgcaacaacaacaacaacaacagtttctgccatcactgagccacctagccgtggtgaaccctgtcacctacttgcaacagcagctgcttgcatccaacccacttgctctggcgaacgtagctgcataccagcaacaacaacagctgcaacagtttatg

SEQ ID NO: 321169 - DNA, 78 bp, Zea mays
gcgagagttacacgctaatcgatcatatagtcaactggtcccttagctatcgacaccgtgagctccactgagcgcggt

SEQ ID NO: 321170 - DNA, 368 bp, Zea mays
  unsure (1)..(368): unsure at all n locations
acggacgagncggcaacatagaaagtagaattcattagcaacaatagagcaacaatggcggccaagatattttccctccttatgctccttgctctttctacatgtgttgctaacgcgacaattttccctcaatgctcacaagctcctatagcttcccttcttcccccataccttccatcaattatagcttcagtatgtgaaaacccagcttttcaaccatataggcttcaacaagcaatcgcagcaagcaacatacctttatcgcccttgttgtttcaacaatcaccagccctatctttggtgcagtcattggtacaaaccatcagggcacaacagttgcagcaactcgggctacctgtgatcaacca

SEQ ID NO: 321171 - DNA, 80 bp, Zea mays
aagaaaaaaaaaaaaaaaaaaaaaaatataaaataaaaaaaaaaaaaaaaaaaaaaaaggaaagggtccaacgatctaat

SEQ ID NO: 321172 - DNA, 349 bp, Zea mays
  unsure (1)..(349): unsure at all n locations
attgagaccaactagcaacatataaagcacaatagtgtaccaacaatggcaggcaagatattttgcctccttatgctccttggtctttctgcaagtgctgctacggcgaccattttcccgcaatgctcgcaagctcctatagcttcccttcttcccccgtacctctcaccagcggtgtcttcggtatgtgaaaacccaattcttcaaccctacaggatccaacaggcaatcacagctggcatcttacctttatcacccttgttcctccaacaatcatcagccctattacatcagttacctttggtgcatttattggcacanaacatcagggcacaacaactacaacaac

SEQ ID NO: 321173 - DNA, 309 bp, Zea mays
ctctgctgcttatttacaacagcaacagctaccaccattcagccagctagctgatgtgagccctgttgccttcttgacacaacaacagttgttgccgttctacctgcacgctgcgcctaacgctggcaccctcttacaactgcaacaattgctgccattcaaccaacttgctttgacaaacccaacagcgttctaccaacaacccatcattggtggtgccctcttttagattgcttatgagttatacttcaataatgaagttttttggatgatgtttgtggcttcccagaaataagaaagtacatttct

SEQ ID NO: 321174 - DNA, 419 bp, Zea mays
aacaacaatggctaccaagatattatccctccttgcgcttcttgcgctttttgcgagcgcaacaaatgcgttcattattccacaatgctcacttgctccaagttccattattacacagttcctcccaccagttacttcaatgggcttcgaacacccagctgtgcaagcctataggctacaacaagcaattgcggcgagcgtcttacaacaaccaatttcccagttgcaacaacaatccttggcacatctaacaatacaaaccatcgcaacgcaacagcaacaacaattcctaccagcactgagccacctagccatggtgaaccctgccgcctacttgcaacagcagttgcttgcatcaaacccacttgctctggcaaacgtagttgcaaaccagccacaacaacagctgcaacagtttc

SEQ ID NO: 321175 - DNA, 412 bp, Zea mays
gcaacatagaaagcacaatagtgtaccaacaatggcagccaaaatattgtgcctccttatgctccttggtctttctgcaagtgctgctacggcgaccattttcccgcaatgctcgcaagctcctatagcttcccttcttgccccgtacctatcaccagcggtgtcttcggtatgtgaaaacccaattcttcaaccctacaggatccaacaggcaatcacagctggcatcttacctttatcacccttgttcctgcaacaatcatcagccctattacatcagttaccttcggtgcatatattggcacataacatcagggcacaacaactacaacaacttgtgctagcaaaccctgctggctactctcaacaacagcagtttcttgcattcaaccaactagctgcattgaactct

SEQ ID NO: 321176 - DNA, 227 bp, Zea mays
gttcaagggctccacgctcctcatcaacgggatggtgacggaagggtccgacgagtgggcggtctacggcgggactggagcgtttgcgatggccaccggcgtcatcagaaggaagaacctttttgccggttgcggtgacagttgccggaacttcgaccagcttaacattgaagtgttctggccggtgttcgggttaacggaacaaccggccaaggaccaccaggatt

SEQ ID NO: 321177 - DNA, 420 bp, Zea mays
ttcagaaacacaccaagcgaagcgcactagcaacgacctaacaacaatggctaccaagatattagccctccttgcgcttcttgccctttttgtgagcgcaacaaatgcgttcattattccacaatgctcacttgctcctagtgccattattccacagttcctcccaccagttacttcaatgggcttcgaacacctagctgtgcaagccaacatgcaacaacaagcgcttgcggcgagcgtcttacaacaaccaattgcccaattgcaacaacaatccttgccacatctaacaatacaagccatcacaacgcaacagcaacaacagttcctaccagcactgagccacctagccatggtgaaccctgccgcctacttgcaagagcagctgcttgcatccaacccacttgctctggcgaacgt

SEQ ID NO: 321178 - DNA, 419 bp, Zea mays
attgagaccaacaagcaacatagaaagtggaatccagtagcaacaacagagcaacagtggcgaccaagatattttccctccttatgctccttgctctttctgcatgtgttgctaacgcgacaattttccctcaatgctcacaagctcctatagcttcccttcttcccccataccttccatcaatgatagcttcagtatgtgaaaacccagctcttcagccctataggctccaacaagcaatcgcagcaagcaacatacctttatcacccttgttgtttcaacaatcgccagccctatctttggtgcagtcattggtacaaaccatcagggcacagcagctgcagcaactcgtgctacctgtgatcaaccaagtagctctggcaaacctttctccctactctcagcaacaacaatttctt

SEQ ID NO: 321179 - DNA, 420 bp, Zea mays
gtggaatccagtagcaacaatagagcaacaatggcgaccaagatactttccctccttgggctgcttgctctttctgcatgtgttgctaacgcgacaattttccctcaatgctcacaagctcctatagcttcccttcttcccccataccttccatcaatgatagcttcagtatgtgaaaacccagctcttcaaccctataggctccaacaagcaatcgcagcaagcaacatacctttatcacccttgtttcaacaatcgccagccctatctttggtgcagtcattggtacaaaccatcaaggcacagcagctgcagcaactcgtgctacctgtgatcaaccaagtagctctggcaaacctttctccctactatcagcaacaacaatttcttccattcaaccaactatctacactgaaccct

SEQ ID NO: 321180 - DNA, 420 bp, Zea mays
gtggaatccagtagcaacaatagagcaacaatggcgaccaagatactttccctccttatgctccttgctctttctgcatgtgttgctaacgcgacaattttccctcaatgctcacaagctcctatagcttcccttcttcccccataccttccatcaatgatagcttcagtatgtgaaaacccagctcttcaaccctataggctccaacaagcaatcgcagcaagcaacatacctttatcacccttgtttcaacaatcgccagccctatctttggtgcagtcattggtacaaaccatcaaggcacagcagctgcagcaactcgtgctacctgtgatcaaccaagtagctctggcaaacctttctccctactatcagcaacaacaatttcttccattcaaccaactatctacactgaaccct

SEQ ID NO: 321181 - DNA, 424 bp, Zea mays
gcggcatagaaagcacaatagtgtaccatacaatggcagccaaaatattttgcctccggatgcgccttggtctttctgcaagtgctgctacggcgaccattttcccgcaatgctcgcaagctcctatagcttcccttcttcccccgtacctctcaccagcggtgtcttcggtatgtgaaaacccaattcttcaaccctacaggatccaacaggcaatcacagctggcatcttacctttatcacccttgttcctccaacaatcatcagccctattacatcagttacctttggtgcatttattggcacaaaacatcagggcacaacaactacaacaacttgtgctagcaaaccttgctgcctactctcagcaacagcagtttcttccattcaaccaactagctgcattgaactctgcttcttattt

SEQ ID NO: 321182 - DNA, 412 bp, Zea mays
atatgccgcctccgttctatctgccgtcgcagcagcagccgcagccatggcaataccgcactgaaccaccgcagctaagcccgtgccagcagttcggatcctgcggcgtcggcagcgtcggcagcccgttcctgggccagtgcgtcgagttcctgaggcaccagtgcagcccggcggcgacgccctacggctcgccacagtgccaggcgctgcagcagcagtgctgccaccagatcaggcaggtggagccgctgcaccggtaccaggcgacatacggtgtggtcctgcagtccttcctgcagcagcagccgcagggcgagctcgcggcgctgatggcggcccaggtagcgcagcagctgacggcgatgtgcggcctgcagctgcagcagccaggtccctgcccttgcaacgc

SEQ ID NO: 321183 - DNA, 415 bp, Zea mays
gaccaactagcaacatagaaagcacaatagtgtaccaacaatggcagccaaaatattgtgcctccttatgctccttggtctttctgcaagtgctgctacggcgaccattttcccgcaatgctcgcaagctcctatagcttcccttcttcccccgtacctctcaccagcggtgtcttcggtatgtgaaaacccaattcttcaaccctacaggatccaacaggcaatcgcagctggcatcttacctttatcacccttgttcctccaacaatcatcagccctattacaacagttacctttggtgcatttattggcacaaaacatcagggcacaacaactacaacaacttgtgctagcaaaccttgctgcctactctcagcaacagcagtttcttccattcaaccaactaggttcattg

SEQ ID NO: 321184 - DNA, 323 bp, Zea mays
ttttgagcattcagaaacacaccaagcgaagcgcactagcaacgacctaacaacagtggctaccaagatattagccctccttgcgcttcttgccctttttgtgagcgcaacaaatgcgttcattattccacaatgctcacttgctcctagtgccattattccacagttcctcccaccagttacttcaatgggcttcgaacacctagctgtgcaagccaacatgcaacaacaagcgcttgcggcgagcgtcttacaacaaccaattgcccaattgcaacaacaatccttgccacatctaacaatacaagccatcacaacgcaac

SEQ ID NO: 321185 - DNA, 365 bp, Zea mays
caaccacagttgttgccgttctaccagcacgttgcgcctaacgctggcaccgtcttacaactgcaacaattgctgccattcaaccaacttgctttgacaaacccagcagcattctaccaacaacccatcattggtggtgccctcttttagatttcttatgagttatagttcaataataaagttttttgtctgatgtttgtggcttcccagaaataagaaagtacatttctaaaaaaaaaaaaaaaaaaaaaaaaaataaaaaataaaaaaaaaaaaaaaaaaaaaataaaaaaaaaaataaaaataaaataataaaaaaaaaaaaattaaaggaaaaaaaaaaaaaaagggccggccgttttaaa

SEQ ID NO: 321186 - DNA, 425 bp, Zea mays
attgagaccaactagcaacatagaaagcacaatagtgtaccaacaatggcagccaaaggattttgcttccttatgctccttggtctttctgcaagtgttgctaccgcaaccattttcccacaatgctcacaagctcctatagcttcccttcttcccccatacctctcaccagcggtgtcttcaatgtgtgaaaacccaattgttcaaccctacaggatccaacaggcaatcgcaacaggcatcttaccattatcacccttgttcctccaacaaccgtcagccctattacagcagttacctttggtccatttggtggcacaaaacatcagggcacaacaactacaacaacttgtgctagcaaaccttgctgcatactctcagcaacatcagtttcttccattcaaccaactggctgcattgaactc

SEQ ID NO: 321187 - DNA, 423 bp, Zea mays
  unsure (1)..(423): unsure at all n locations
gcaaagcggcagtgcgtagagaggatcgtcgaacagaacagcatgaagatggtcatcggtctcgtcgtgtgcctggctctgtcagctgccagcgcctctgcaatgcagatgccctgcccctgcgcggggctgcagggcttgtacggcgctggcgccggcctgacgacgatgatgggcgccggcgggctgtacccctacgcggagtacctgaggcagccgcagtgcagcccgctggcggcggcgccctactacgccgggtgtgggcagccgagcgccatgttccagccgctccggcaacagtgctgccagcagcagatgaggatgatggacgtgcagtccgtcgcgcagcagctgcagatgatgatgcagcttgagcgtgccgctgccgncagcagcagcctgtacgagccagctctgatgcaa

SEQ ID NO: 321188 - DNA, 410 bp, Zea mays
accaactagcaacatagaaagcacaatattgtaccaacaatggcagccaaaatatttggcctgcttatgctccttggtctttctgcaagtgctgctacggcgaccattttcccgcaatgctcgcaagctcctatagcttcccttcttcccccgtacctctcaccagcggtgtcttcggtatgtaaaaacccaattcttcaaccctacaggatccaacaggcaatcacagctggcatcttacctttatcacccttgttcctccaacaatcatcagccctattacatcagttacctttggtgcatttattggcacaaaacatcagggcacaacaactacaacaacttgtgctagcaaaccttgctgcctactctcagcaacagcagtttcttccattcaaccaactagctgc

SEQ ID NO: 321189 - DNA, 412 bp, Zea mays
gcaacatagaaagcacaatagtgtaccaacaatggcagccaaaatattttgcctgggtatgctccttggtctttctgcaagtgctgctacggcgaccattttcccacaatgctcacaagctcctatagcttcccttcttcccccgtacctctcaccagcggtgtcttcggtatgtgaaaacccaattcttcaaccctataggatccaacaggcaatcgcagctggcatcttacctttatcacccttgttccttcaacaatcatcagccctattacagcagttacctttggtgcatttattggcacaaaacatcagggcacaacaactacaacaacttgtgctagcaaaccttgctgcctactctcagcaacaacagtttcttccattcaaccaactagctgcatttgactct

SEQ ID NO: 321190 - DNA, 419 bp, Zea mays
ccaactagcaacatagaaagcacaatagtgtaccaacaatggcagccaaaatatttgggttccttatgctccttggtctttctgcaagtgctgctaccgcaaccattttcccacaatgctcacaagctcctatagcttcctttcttcccccatacctctcaccagcggtgtcttcagtatgtgaaaacccaattcttcaaccctacaggatccaacaggcaatcgcagcaggcatcttacctttatcacccttgttcctccaacaaccgtcagccctattacagcagttacctttggtgcatttgttggcacaaaacatcaaggcacaacaactacaacaacttgtgctaagaaaccttgctgcctactctcagcaacagcagtttcttccattcaaccaactggctgcattgaactct

SEQ ID NO: 321191 - DNA, 328 bp, Zea mays
gggcgtcagcttcagctatccgcgaccgcgacgatgggtctgatcgtggccgtcacggtgccagctccggccggcgtgcgcgtgctcggcaggggcgccgcgcgcgtgacgccgacaccgtggacggttgtcgtgggcccgagacgcttctccgagcggatgtccgtcgagaccaccgacgccaccagcaccatcgacgtgggcggcctagatgaccacgcgctggaggctacgaactccaagacaggtgtggcggtcatgcttggaggtggcgccggtacataggctcttaccgctaaccagactgcagtccaagcccgcggtgcca

SEQ ID NO: 321192 - DNA, 414 bp, Zea mays
acgatgccgcctccgttctatctgccgccgtagcagcagccgcagccatggcaataccccggtcagaccaccgcagctaagcccgtgccagcagttcggatcctgcggcgtcggcagcgtcggcagcccgttcctgggccagtgcgtcgagttcctgaggcaccagtgcagcccggcggcgacgccctacggctcgccacagtgccaggcgctgcagcagcagtgctgccaccagatcaggcaggtggagccgctgcaccggtaccaggcgacatacggtgtggtcctgcagtccttcctgcagcagcagccgcagggcgagctcgcggcgctgatggcggcccaggtagcgcagcagctgacggcgatgtgcggtctgcagctgcagcagccaggtccctgcccttgcaacgc

SEQ ID NO: 321193 - DNA, 279 bp, Zea mays
aaaacatcaaggcacaacaactacaacaacttgtgctaggaaaccttgctggcgactgtcagcaacagcagtttcttccattcaaccaactggctgcattgaactctgctgcttatttgcaacaacaactaccattcagtcagctagctgctgcctacccccagcaatttcttccattcaaccaactggcagcattgaactctgctgcttatttacaacagcaacagctaccaccattcagccagctagctgatgtgagccctgttgccttcttgacac

SEQ ID NO: 321194 - DNA, 418 bp, Zea mays
ctaaccatacaaaccatcgcaacgcagcagcaacaagcactgagccacctagcgcgtggtgaaccctatcgcctacttgcaacaacagctgcttgcatccaacccacttgctttggcaaacgtagctgcataccaacaacaacaacagttgcaacagtttctaccagcgctcagtcaactagccatggtgaaccctatcgcctacctacaacagcaacaacttctttcatctagcccgctcgctatgggcaatgcacctacatacctgcaacaacagttgttgcaacaacagttgctgcaacaaattgtaccagctcttactcagctagctgtggcaaaccctgctgcctacttgcaacaactacttccattcaaccaactgactgtgtcgaactctgctgcgtacctacaacagcga

SEQ ID NO: 321195 - DNA, 395 bp, Zea mays
gcaacatacaaagtggaaactattagcatcaacatatcatcaatattgaccgggacggttaccatccatacggtccttgctctttctagcatgtagcagctaactgcgacaatactaactaaatgcttacaagcttctatagcttccattgtttccccataccttacataaatgatcgctagatcatttgaaaacctaattcttcatcgactatacgctccaacaagcaatctctaccatgcagcatatcttaatcactctagctgtttcaacaatgcgacagccgtatctcattgagcacatcattggtacgacaccatcaagccacagcataccgacaccacatcagctacctgtcactaaccaatgatgtctagcaaacctatctcactact

SEQ ID NO: 321196 - DNA, 268 bp, Zea mays
gggttcagcttgtattcccactctgtcgcacagcgacggccgtcgtcgctgagatcgcggggaagaaatggagctttctagcaagctcttcacggccggcctcctctgcatgctgctgatgctgtccgcagatgtcccgccggcggccgatgcggaggctccgacgtgccagtcgcagaaccacaagttgcagggcccgtgactccgcactgacatatgggccatcagctgcaggaacgaggggttatcctgcggcatgtgccgcggc

SEQ ID NO: 321197 - DNA, 347 bp, Zea mays
ctagcaacatagaaagcacaatagtgtaccaacaatggcagccaaaatattgtgccggcttatgctccttggtctttctgcaagtgctgctacagctaccattttcccgcaatgctctcaagctcctatagcttcccttctttccccgtacctatcaccagcggtgtcttctgtatgtgaaaacccaatactttaaccctacaagatccaacaggcaattgcagctggcatcttacctttatcacccttgttactacaacaatcattatccctattacaacagttaccttaggtgcatttattggcacacatcatcaaggcacaacaactactacaacttgtgctag

SEQ ID NO: 321198 - DNA, 403 bp, Zea mays
agcattcaaaaacacaccaagcgaagctcactatcaacgacctaacaccaatggctaggcgaagatattagccctccttgcgcttcttgcccttttagtgagcgcaacaaatgcgttcattattccacagtgctcacttgctcctagtgccagtattccacagttcctcccaccagttacttcaatgggcttcgaacatccagccgtgcaagcctacaggctacaactagcgcttgcggcgagcgccttacaacaaccaattgcccaattgcaacaacaatccttggcacatctaaccctacaaaccattgcaacgcaacaacaacaacaacagtttctgccatcactgagccacctagccgtggtgaaccctgtcacctacttgcaacaacaactgcttgca

SEQ ID NO: 321199 - DNA, 421 bp, Zea mays
agaccaactagcaacatagaaagcacaatagtgtaccaacaatggcagccaaaatatggtgcgtccttatgctccttggtctttctgcaagtgttgctaccgcaaccattttcccacaatgctcacaagctcctatagcttcccttcttcccccatacctctcaccagcggcgtcttcaatgtgtgaaaccccaattgttcaaccctacaggatccaacaggcaatcgcaacaggcatcttaccattatcacccttgttcctccaacaaccgtcagccctattacagcagttacctttggtccatatggtggcacaaaacatcagggcacaacaactacaacaacttgtgctagcaaaccttgctgcatactctcagcaacatcagtttcttccattcaaccaactggctgcattgaactc

SEQ ID NO: 321200 - DNA, 394 bp, Zea mays
cgaccattttcccgcaatgctcacaagctcctatagcttcccttcttccccggtaccgctcaccagcggtgtcttcggtatgtgaaaacccaattcttcaaccctacaggatccaacaggcaatcgcagctggcatcttacctttatcacccttgttcctccaacaatcatcagccctattacagcagttacctttggtgcatttattggcacaaaacatcagggcacaacaactacaacaacttgtgctagcaaaccttgctgcctactctcagcaacagcagtttcttccattcaaccaactagctgcattgaactctgcttcttatttgcaacaacaacaactaccattcagccagctacctgttgcctacccccaacaatttcttgcatt

SEQ ID NO: 321201 - DNA, 420 bp, Zea mays
  unsure (1)..(420): unsure at all n locations
agaacccgatcgacaccatgagggtgttgctcgttgccctcgctctcctggctctggctgcgagcgccacctgcacgcatacaagcggcggctgcggctgccagccaccgccgccggttcatctaccgccgccggtgcatctgccacctccggttcacctgccacctccggtgcatctcccaccgccggtccacctgccgccgccggtccacctgccaccgccggtccatgtgccgccgccggttcatctgccgccgncaccatgccactaccctactcaaccgccccggcctcagcctcatccccagccacacccatgcccgtgccaacagccgcatccaagcccgtgccagctgcagggaacctgcggcgttggcagcaccccgatcctgggccagtgcgtcgagttcctgaagcatc

SEQ ID NO: 321202 - DNA, 388 bp, Zea mays
acacgcatcacatgtagatgtagctagcttagctatgctcgcgtaaaaaccctagcggcagtcacacagcaagttgcatgtgtctcgggggcaacaagcaggcggccgaggcagcaggccgcatggagaaccaccggcgccattcgggctctccggcgagcagcaggcggcggcggctgcactacctcctcgccctggctgccgactacctcaggtacctcttcatgaagcggcgccggctcctgcacaaggtggcgcggagaacgctcgcgctcgtccaccgccacggcctgccgcagcgcggcggcaggaaccacgaccagtggcagtggcctcatcgcgcgctggcggagcacgagttctcgtgcgccgacagccccagccccgc

SEQ ID NO: 321203 - DNA, 405 bp, Zea mays
caaaaagggcaagaagcgcaacaaatgcgttcattattccacaatgctcacttgctcgtagtgccattataccacagttcctccgaccagttacttcaatgggcttcgaacacctagctgtgcaagcctacaggctacaacaagcgcttgcggcgagcgtcttacaacaaccaattaaccaattgcaacaacaatccttggcacatctaaccatacaaaccatcgcaacacaacagcaacaacagttcctaccagcactgagccaactagatgtggtgaaccctgtcgcctacttgcaacagcaggtgcttgcatccaacccacttgctctggcaaacgtagctgcataccaacaacaacaacaattgcaacagtttctgccagcgctcagtcaactagccatgg

SEQ ID NO: 321204 - DNA, 410 bp, Zea mays
gcgagcagtttcttccattcaaccaactagctgcattgaactctgcttcttattgggaacgacaacaactaccattcagccagctacctgctgcctacccccagcaatttcttccattcaaccaactggcagcattgaactctcctgcttatttacagcagcaacaactactaccattcagccagctagctggtgtgagccctgctaccttcttgatacaaccacagttgttgccgttctaccagcacgctgcgcctaacgctggcaccctcttacaactgcaacaattgctgccattcaaccaacttgctttgacaaacccagcagcgttctaccaacaacccatcattggtggtgccctcttttagatttcttatgagttatagttcaataataaagttttttgtctg

SEQ ID NO: 321205 - DNA, 384 bp, Zea mays
atggaacgcacagtggtgtactatcaattgctgccaagatattttgcttaatggtgcgggataggtccttgtgcaagtgttgctactgagtgccagtttcagcaccaatgctcatatgctctctatagcatacgcattcttatgcgcatacctcgataccaatgcgcgtacttcaatgataagagcacgttagtgtgcaaaccctacaggattgcactggtaatatcaccaagcatcgtaccattaagacccgtgttcctccaactaaattaaaccctatgacagcaggtaccgatggatcattatacgccactaaacatttgtgcacacaatttacgacggcttgtgctagcaaaccttgctgcatactttgatcaacatcaa

SEQ ID NO: 321206 - DNA, 153 bp, Zea mays
cctatagcttcccgttcttccccgcatacctgtacatcacattatagacttcagtatgtcgaaaacccctagctcttcgaaccatatagtgcttcaacaaagcaaatcgctagcaagcaaacataccctttatcagccctttgttgtttcaac

SEQ ID NO: 321207 - DNA, 436 bp, Zea mays
  unsure (1)..(436): unsure at all n locations
gaaacacaccaagcgaagcacattagcaacaacctaacaacaatggctaccaagatattatccctccttgcgcttcttgcgctttttgcgagcgcaacaaatgcgttcattattccacaatgctcacttgctccaagttccattattacacagttcctcccaccagttacttcaatgggcttcgaacacccagctgtgcaagcctataggctacaacaagcaattgcggcgagcgtcttacaacaaccaatttcccagttgcaacaacaatccttggcacatctaacaatacaaaccatcgcaacgcaacagcaacaacaattcctaccagcactgagccacctagccatggtgaaccctgccgcctacttgcaacagcagttgcttgcatcaaacccacttgctctggcanacgtagttgcaaaccagccacaac

SEQ ID NO: 321208 - DNA, 95 bp, Zea mays
cttttagatttcttatgagttatagttcaataataaagttttttgtctgatgtttgtggcttcccagaaataagagagtacatttctagattctt

SEQ ID NO: 321209 - DNA, 321 bp, Zea mays
caggatataaaggcccattatggaccaatcatggccagctaaataatttggcctcttagggttccttgtccttcttgcagttcctgtaacggcaaccattttcccccattgctaacaagctccaaaagctcccatagttcccctgtccttttaataactgtgaccttcggtttgtgaaaccccagttttcaacccttccggatcctacaagctatcgcaagttgcatcttaacgtttataaccattgtcatcctacaatcatcaaccctattacagcctattactttggtgcacttattggcacaaaacatcacggcacat

SEQ ID NO: 321210 - DNA, 301 bp, Zea mays
gtccgcgaattccatatgcaggacaaggttgcagggcggccttccaggaagttctgggggggggtgtccagggttgaaggaaacgtgaacccttcaaccgggcttgcaaggagggaagtttcatttcatttggggccggattggtttaatctgaatctgatggagcaatttggaatgctgaactattgtgcctgatccaaatgaataaggtgtaatgactcgtcttttcaattactgaaactgaacatgtttgaatttatctggtcacttgtatggtaaaatagcagcgttgtcaattgtc

SEQ ID NO: 321211 - DNA, 437 bp, Zea mays
attttgagcattcagaaacacaccaagcgaagcgcactagcaacgacctaacaacaatggctaccaagatattagccctccttgcgcttcttgccctttttgtgagcgcaacaaatgcgttcattattccacaatgctcacttgctcctagtgccattattccacagttcctcccaccagttacttcaatgggcttcgaacacctagctgtgcaagccaacatgcaacaacaagcgcttgcggcgagcgtcttacaacaaccaattgcccaattgcaacaacaatccttgccacatctaacaatacaagccatcacaacgcaacagcaacaacagttcctaccagcactgagccacctagccatggtgaaccctgccgcctacttgcaagagcagctgcttgcatccaacccacttgctctggcgaacgtagttgca

SEQ ID NO: 321212 - DNA, 395 bp, Zea mays
gctttatctactccagagcgcagaagaacccgatcgacaccatgagggtgttgctcgttgccctcgctctcctggctctcgctgcgagcgccacctccacgcatacaagcggcggctgcggctgccagccaccgccgccggttcatctaccgccgccggtgcatctgccacctccggttcacctgccacctccggtgcatctcccaccgccggtccacctgccgacgccggtccacctgccaccgccggtccatgtgccgacgccggttcatctgccgccgccaccatgccactaccctactcaaccgccccggactcagcctcatccccagccacacccatgcccgtgccaacagccgcatgcaaacccgtgccagctgcagggaacctgcggc

SEQ ID NO: 321213 - DNA, 66 bp, Zea mays
cagaaataagaagttacatttccagattctaatgtgaaaaaaaaaaaaaaaggccggcggttttaa

SEQ ID NO: 321214 - DNA, 119 bp, Zea mays
cccacgcggggccagcaatgatgcattatacatctataattaacttctatgtctcatgtttgtgtgttgcgataaataagaaagtacatttctatattcataaaaaaaaaacaaggcct

SEQ ID NO: 321215 - DNA, 339 bp, Zea mays
ttccattcaaccaactggcagcattgaactctcctgcttatttacagcagcaacgacggctaccattcagccagctagctggtgtgagccctgctaccttcttgacacaaccacagttgttgccgttctaccagcacgctgcgcctaacgctggcaccctcttacaactgcaacaattgctgccattcaaccaacttgctttgacaaacctagcagtgttctaccaacaacccatcattggtggtgccctcttttagatttcttatgagttatagttcaataataaagttttttgtctgatgtttgtggcttcccagaaataagaaagtacatttctag

SEQ ID NO: 321216 - DNA, 336 bp, Zea mays
acggaccagcatttgaacttgtaacacaatgtttttcagctgtctgctgtactatctgagctgcctatacccatcttagcacataacattactaaagctttaatgaatatgttgcacaaacggactcatctttacaagatctgtatcatgaactattatgagatgctgaattgattgactaagaatttatattagctgacttcacagttcttaaagacaacactgcaagaatgcgtgccaacctgcattgctactctctatgcaactggcatataaatttgggtgttaacatgtagataatatagaaactgcgattaacattgcatatgcatgcat

SEQ ID NO: 321217 - DNA, 428 bp, Zea mays
  unsure (1)..(428): unsure at all n locations
cggacgcgtgggcggctgccagccaccgccgccggttcatctaccgccgccggtgcatgtgccacctccggttcacctgccacctccggtgcatctcccaccgccggtccacctgccgccgccggtccacctgccaccgccggtccatgtgccgccgccggttcatctgccgccgccaccatgccactaccctactcaaccgccccggcctcagcctcatccccagccacacccatgcccgtgccaacagccgcatccaagcccgtgccagctgcagggaacctgcggcgttggcagcaccccgatcctgggccagtgcgtcgagtttctgaggcatcagtgcagcccgacggcgacgccctactgctcgcctcagtgccagtcgttgcggcagcagtggtgccagcagctcangcangtggagccgc

SEQ ID NO: 321218 - DNA, 316 bp, Zea mays
tctagatcgccgtggtcccccaattgagtaacctttgtccggaatattacccgttgcctggctggttagttaagccattaaccgccaataatggattattaaggggtaacgcttaaccatgggtggcatggtaagtgtaagcaatgacctgatggaccaatggaattgaaaagttaaacaaaaaaagcaaagattagaaggacccacaaaaaaaagctgatcactgagatcaacagaacaactacagttagacaaacgggacctgtccaaggtactggacactgaccttattcatacgcggtaataagataacaaa

SEQ ID NO: 321219 - DNA, 435 bp, Zea mays
caacaagcaacatagaaagtggaatacagtagcaacaatagagcaacaatggcggccaggatgttttccatccttatgctccttgctctttctgcatgtgttgctaacgcgaccatttttcctcaatactcacaagctcctatagctgcccttcttcccccataccttccatcaatgaccgcttcagtttgtgaaaacccagcccttcaaccctacaggctccaacaagcaatcgcaacaagcaacttacctttatcacccctgttctttcaacaatcgccagccctatctttggtgcagtcattggtacaaaccatcagggcacaacagctgcaacaactcgtgctaccagtgatcagccaagtagctctggcaaacctttctccctactctcagcaacaacaatttcttccattcaaccaactgtctacactg

SEQ ID NO: 321220 - DNA, 442 bp, Zea mays
catcaatcatcattcatcttagtagtataggcaccaaatcaaatctgcaacatcaattgtctaactccaaaaaccatgaagctggtgcttgtggttcttgctttcattgctttagtatcaagtgtttcttgtacacagacaggcggctgcagctgtggtcaacaacaaagccatgagcagcaacatcatccacaacaacatcatccacaaaaacaacaacatcaaccaccaccacaacatcaccagcagcagcaacaccaacaacaacaagttcacatgcaaccacaaaaacatcagcaacaacaagaagttcatgttcaacaacaacaacaacaaccgcagcaccaacaacaacaacaacaacaacagcaccaacaacaacatcaatgtgaaggccaacaacaacatcaccaacaatcacaaggccatgtgcaacaacacg

SEQ ID NO: 321221 - DNA, 68 bp, Zea mays
tatgatagatactactgctactgagtataattttgttttcatatgcatccttacagacgattgcactt

SEQ ID NO: 321222 - DNA, 397 bp, Zea mays
cccacgcgtccgcgacaagggccgtctctccaaggaggagatcgagaagatggttcaggacgctgagaagtacaagtctgaggatgaggagcacaagaagaaggtggaggccaagaactcgctggagaactactcctacaacatgcgcaacacgatcaaggacgagaagattgcgtccaagctgccggccgatgacaagaagaagatcgaggacgccatcgacgcggccatcagctggctggacgccaaccagctcgccgaggcggacgagttcgaggacaagatgaaggagctggagagcctctgcaaccccatcatcgccaagatgtaccagggcgcgggtgaagacatgggcggcgctggcggcatggacgaggacgcccctgccggcagcggc

SEQ ID NO: 321223 - DNA, 426 bp, Zea mays
attgagaccaactagcaacatagaaagcacaatagtgtaccaacaatggcagccaaaggattgtgcctccttatgctccttggtctttctgcaagtgctgctacggcgaccattttcccgcaatgctcgcaagctcctatagcttcccttcttcccccgtacctctcaccagcggtgtcttcggtatgtgaaaacccaattcttcaaccctacaggatccaacaggcaatcacagctggcatcttacctttatcacccttgttcctccaacaatcatcagccctattacatcagttacctttggtgcatttattggcacaaaacatcagggcacaacaactacaacaacttgtgctagcaaaccttgctgcctactctcagcaacagcagtttcttccattcaaccaactagctgcattgaactct

SEQ ID NO: 321224 - DNA, 431 bp, Zea mays
  unsure (1)..(431): unsure at all n locations
gttacctttggtgcatttattggcacaaaacatcagggcacaacaactacaacgactggtgctagcaaaccttgctgcctactctcagcaacagcagtttcttccattcaaccaactagctgcattgaactctgcttcttatttgcaacaacaacaactaccattcagccagctacctgctgcctacccccagcaatttcttccattcaaccaactggcagcattgaactctcctgcttatttacagcagcaacaactactaccattcagccagctagctggtgtgagccctgctaccttcttgatacaaccacagttgttgccgttctaccagcacgctgcgcctaacgctggcaccctcttacaactgcaacaattgctgccattcaaccaacttgctntgacaaacccagcagcgttctaccaacaac

SEQ ID NO: 321225 - DNA, 422 bp, Zea mays
tgagaccaacaagcaacatagaaagtggaatccagtagcaacaacagagcaacaatggcgaccaagatattttccctccttatgctccttgctctttctgcatgtgttgctaacgcgacaattttccctcaatgctcacaagctcctatagcttcccttcttcccccataccttccatcaatgatagcttcagtatgtgaaaacccagctcttcagccctataggctccaacaagcaatcgcacaagcaacatacctttatcacccttgttgtttcaacaatcgccagccctatctttggtgcagtcattggtacaaaccatcagggcacagcagctgcagcaactcgtgctacctgtgatcaaccaagtagctctggcaaacctttctccctactctcagcaacaacaatttcttccattc

SEQ ID NO: 321226 - DNA, 360 bp, Zea mays
gctgcctacccccagcaatttcttccattcaaccaactagcagcattgaactctcctgcgttatgtacagcagcaacaactactaccattcagccagctagctggtgtgagccctgctaccttcttgatacaaccacagttgttgccgttctaccagcacgctgcgcctaacgctggcaccctcttacaactgcaacaattgctgccattcaaccaacttgctttgacaaacccagcagcgttctaccaacaacccatcattggtggtgccctcttttagatttcttatgagttatagttcaataataaagttttttgtctgatgtttgtggcttcccagaaataagaaagtacatttct

SEQ ID NO: 321227 - DNA, 208 bp, Zea mays
ttggaacccggaagcggcctaacaaccttgaccagccagatcttgccaattgcttttgggggagtttccccaactggtaacattccaaaacaggaagggtaaaatggtgaacttttttttcccaagaaagtgttgggccacaaccaggatcttaattgccaaggacaatccttttgccaaaatcaacattggcaatttgaatccaaat

SEQ ID NO: 321228 - DNA, 438 bp, Zea mays
  unsure (1)..(438): unsure at all n locations
cagaaacacaccaagcgaagcgcactagcaacgacctaacaacaatggctaccaagatattagccctccttgcgcttcttgccctttttgtgagcgcaacaaatgcgttcattattccacaatgctcacttgctcctagtgccattattccacagttcctcccaccagttacttcaatgggcttcgaacacctagctgtgcaagccaacatgcaacaacaagcgcttgcggcgagcgtcttacaacaaccaattgcccaattgcaacaacaatccttgccacatctaacaatacaagccatcacaacgcaacagcaacaacagttcctaccagcactgagccacctagccatggtgaaccctgccgnctacttgcaagagcagctgcttgcatccaacccacttgctctggcgaacgtagttgcaaaccagcaacaac

SEQ ID NO: 321229 - DNA, 439 bp, Zea mays
cagaaacacaccaagcgaagcgcactagcaacaacctaacaacaatggctaccaagagtgttatccctccttgcgcttcttgcgctttttgcgagcgcaacaaatgcgtccattattccacaatgctcacttgctcctagttccattattccacagttcctcccaccagttacttcaatggccttcgaacacccagctgtgcaagcctataggctacaacaagcgattgcggcgagcgtcttacaacaaccaattgcccaattgcaacaacaatccttggcacatctaacaatacaaaccatcgcaacgcaacagcaacaacagttcctaccagcactgagccacctagccatggtgaaccctgtcgcctacttgcaacagcagctgcttgcatccaacccacttgctctagcaaacgtagttgcaaaccagcaacaac

SEQ ID NO: 321230 - DNA, 458 bp, Zea mays
tcccggccgacccacgcgtacgccgacgcgtccgcaaaaacacaccaagctaagctcactagcaacgacctaacaccaatggctagcaagatattagccctccttgcgcttcttgcccttttagtgagcgcaacaaatgcgttcattattccacagtgctcacttgctcctagtgccattattccacagttccttccaccagctacttcaatgggcttcgaacatccagccgtgcaagcctacaggctacaactagcgcttgcggcgagcgccttacaacaaccaattgcccaattgcaacaacaatccttggcacatctaaccctacaaaccattgcaacgcaacaacaacaacaacaacagtttctgccatcactgagccacctagccgtggtgaaccctgtcacctacttgcaacagcagctgcttgcatccaacccacttgctctggcgaacgt

SEQ ID NO: 321231 - DNA, 433 bp, Zea mays
agcattcagaaacacacctagcgaagcgcactagcaacgacctaacaacaatggctaccaagagattatccctctttgcgcttcttgccctttttgtgagcgcaacaaatgcgttcattattccacaatgctcacttgctcctagtgccattattccacagttcctccctccagttacttcaatgggcttcgaacacccagctgtgcaagcctacaggctacaacaagcgcttgcggcgagcgtcttacaacaaccaattgcccaattacaacaacaatccttggcacatctaaccatacaaaccatcgcaacgcaacagcaacaacaatttctaccagcactgagccaactagctgtggtgaaccctgtcgcctacttgcaacagcagttgcttgcatccaacccacttgctctggcaaacatagttgcata

SEQ ID NO: 321232 - DNA, 374 bp, Zea mays
cttcctaatcctcctgggtctttctgcaagtgttgctaccgcaaccattttcccacaatgctcacaagctcctatagcttcccttcttcccccatacctctcaccagcggtgtcttcaatgtgtgaaaccccaattgttcaaccctacaggatccaacaggcaatcgcaacaggcatcttaccattatcacccttgttcctccaacaaccgtcagccctattacagcagttacctttggtccatttggtggcacaaaacatcagggcacaacaactacaacaacttgtgctagcaaaccttgctgcatactctcagcaacatcagtttcttccattcaaccaactggctgcattgaactctgctgcttatttgc

SEQ ID NO: 321233 - DNA, 450 bp, Zea mays
  unsure (1)..(450): unsure at all n locations
ncgcttagcaacatagnaaagccccattatggtaccaaccattgggcagcaaaaaaattntgctttgccttaggcttcctgggtctttctgcaagtgctgctaccgcaaccattttcccacaatgctcacaagctcctatagcttcctttcttcccccatacctctcaccagcggtgtcttcagtatgtgaaaacccaattcttcaaccctacaggatccaacaggcaatcgcagcaggcatcttacctttatcacccttgttcctccaacaaccgtcagccctattacagcagttacctttggtgcatttgttggcacaaaacatcaaggcacaacaactacaacaacttgtgctaggaaaccttgctgcctactctcagcaacagcagtttcttccattcaaccaactggctgcattgaactctgctgcttatttgcaacaacaacta

SEQ ID NO: 321234 - DNA, 428 bp, Zea mays
ccgacgcgtccgctcaccagcggtgtcttcggtatgtgaaaacccaattcttcaaccgtataggatccaacaggcaatcgcagctggcatcttacctttatcacccttgttcctccaacaatcatcagccctattacagcagttacctttggtgcatttattggcacaaaacatcagggcacaacaactacaacaacttgtgctagcaaaccttgctgcctactctcagcaacaacagtttcttccattcaaccaactagctgcattgaactctgcttcttatttgcaacaacaacaactaccattcagccagctatctgctgcctacccccagcaatttcttccattcaaccaactgacagcttttgaactctcctgcttatttacagcagcaacaactactaccattcagccagctagctggtgtg

SEQ ID NO: 321235 - DNA, 286 bp, Zea mays
gatagtttactctaaggatcaatccgcttgactattgcctgacatacaccagacagcaggggtactgctctttcagtagcgccagttactcacgactgaccataagtgatactgacgtaccatcacttgctgacttagtcaacaagcagaagatcacagtattgcataatactggctctgatgatccaaactccaaaggtgcaccaaaggctgatcttgagagaatatgttgagtatgatcaagcacgagctctcataaccgatggttctggtgacgtacattgct

SEQ ID NO: 321236 - DNA, 443 bp, Zea mays
  unsure (1)..(443): unsure at all n locations
attttgagcattcagaaacacaccaagcgaagcgcactagcaacgacctaacaacagtggctaccaagatattagccctccttgcgcttcttgccctttttgtgagcgcaacaaatgcgttcattattccacaatgctcacttgctcctagtgccattattccacagttcctcccaccagttacttcaatgggcttcgaacacctagctgtgcaagccaacatgcaacaacaagcgcttgcggcgagcgtcttacaacaaccaattgcccaattgcaacaacaatccttgccacatctaacaatacaagccatcacaacgcaacagcaacaacagttcctaccagcactgagccacctagccatggtgaaccctgccgnctacttgcaagagcagctgcttgcatccaacccacttgctctggcgaacgtagttgcaaaccag

SEQ ID NO: 321237 - DNA, 218 bp, Zea mays
  unsure (1)..(218): unsure at all n locations
ccgtccgagttgagaaaccaactanngcaacatagtaaagtcacccaatagtcgtacccaacccaatggcagcgcgaaagatattttgacttcctttatnngctccttgcgtctttcgtgcaagtgcctgnnntaccgcaaccannttttcccaccaatggctcnaacaagctcnnctatagcnnttcactttctatttcccccaataccctttctca

SEQ ID NO: 321238 - DNA, 102 bp, Zea mays
caacaacccatcattgtggtagaactttgttgggtttgccaaagcaagttgggggagggtcatcaattgttacacttgtaagacgttgccagcgttatgcat

SEQ ID NO: 321239 - DNA, 435 bp, Zea mays
agaccaactagcaacatagaaagcacattagtgtaccaacaatggcagccaaaatatggtgcctccttatgctccttggtctttctgcaagtgctgctacggcgaccattttcccgcaatgctcgcaagctcctatagcttcccttcttcccccgtacctctcaccagcggtgtcttcggtatgtgaaaacccaattcttcaaccctacaggatccaacaggcaatcgcagctggcatcttacctttatcacccttgttcctccaacaatcatcagccctattacaacagttacctttggtgcatttattggcacaaaacatcagggcacaacaactacaacaacttgtgctagcaaaccttgctgcctactctcagcaacagcagtttcttccattcaaccaactaggttcattgaactctgcttcttaattgc

SEQ ID NO: 321240 - DNA, 400 bp, Zea mays
  unsure (1)..(400): unsure at all n locations
ggcgccacggttccgctgggcaaatcgatgcggcgcgcgctgcggaccgccatcggcgtacccaagaagaataagccgccgacgccgccgctgttgccaaacggcagcggcagggacccgggcgtgtccatggagctgagcagctcgtcgtcggtggcggcgaggaaggaggcggtggtgcgggtggtgatgcgcggcggngtggtggaagtgtacccgggcgtggtgctggcgtgcaccgtcatccggaaccacccgccggggctgtgcctggcgcacccggacgtgttccgcaacccgcacggcgccgtcgtccgcccgctcgagccgctcttccccggccagaagttcctgctgctccccgagaccaccgtggtccggctcaagcagaggatcccgg

SEQ ID NO: 321241 - DNA, 439 bp, Zea mays
gagagcacaatagtgtaccaacaatggcagctaaaatattttgcctccttatgctccggggtctttctgcaagtgctgctacggcgaccattttcccacaatgctcacaagctcctatagcttcccttcttcccccgtacctctcaccaacggtgtcttcggtatgtgaaaacccaattcttcaaccctacaggatccaacaggcaatcgcagctggcatcttacctttatcacccttgttcctccaacaatcatcagccctattacagcagttacctttggtgcatttattggcacaaaacatcagggcacaacaactacaacaacttgtgctagcaaaccttgctgcctactctcagcaacagcagtttcttccattcaaccaactagctgcattgaactctgcttcttatttgcaacaacaacaactaccattcag

SEQ ID NO: 321242 - DNA, 444 bp, Zea mays
caactagcaacatagaaagcacaatagtgtaccaacaatggcagccaaaatattttggttgcttatgctccttggtctttctgcaagtgctgctaccgcaaccattttcccacaatgctcacaagctcctatagcttcctttcttcccccatacctctcaccagcggtgtcttcagtatgtgaaaacccaattcttcaaccctacaggatccaacaggcaatcgcagcaggcatcttacctttatcacccttgttcctccaacaaccgtcagccctattacagcagttacctttggtgcatttgttggcacaaaacatcaaggcacaacaactacaacaacttgtgctaggaaaccttgctgcctactctcagcaacagcagtttcttccattcaaccaactggctgcattgaactctgctgcttatttgcaacaacaactacc

SEQ ID NO: 321243 - DNA, 439 bp, Zea mays
cgacctaacaccaatggctaccaagatattagccctccttgcgcttcttgccctttgagtgagcgcaacaaatgcgttcattattccacagtgctcacttgctcctagtgccagtattccacagttcctcccaccagttacttcaatgggcttcgaacatccagccgtgcaagcctacaggctacaactagcgcttgcggcgagcgccttacaacaaccaattgcccaattgcaacaacaatccttggcacatctaaccctacaaaccattgcaacgcaacaacaacaacaacagtttctgccatcactgagccacctagccgtggtgaaccctgtcacctacttgcaacagcagctgcttgcatccaacccacttgctctggcgaacgtagctgcataccagcaacaacaacagctgcaacagtttatgccagtgctc

SEQ ID NO: 321244 - DNA, 457 bp, Zea mays
ttcagcattcaaaaacacaccaagcgaagcgcactagcaactacctaacaccaatggctccaagatatgagccctccttgcgcttcttgcccttttagtgagcgcaacaaatgcgttcattattccacagtgctcacttgctcctagtgccattattccacagttcctcccaccagttacttcaatgggcttcgaacatccagccgtgcaagcctacaggctacaactagcgcttgcggcgagcgccttacaacaaccaattgcccaattgcaacaacaatccttggcacatctaaccctacaaaccattgcaacgcaacaacaacaacaacaacagtttctgccatcactgagccacctagccgtggtgaaccctgtcacctacttgcaacagcagctgcttgcatccaacccacttgctctggcgaacgtagctgcataccagcaacaacaacag

SEQ ID NO: 321245 - DNA, 408 bp, Zea mays
acatacctttatcacccttgtttcaacaatcgccagccctatctttggtgcggtcattggtacaaaccatcaaggcacagcagctgcagcaactcgtgctacctgtgatcaaccaagtagctctggcaaacctttctccctactatcagcaacaacaatttcttccattcaaccaactatctacactgaaccctgctgcttatttgcagcaacaactattaccattcagccagctagctactgcctactctcatcaacaacaacttcttccatttaaccaattggccgcactgaacctcgctgcttatttgcagcagcaaatattactaccatttagccagctagctgcagcaagccgtgcttccttcttgacacagcaacagttgctgcctttctaccagcagtttg

SEQ ID NO: 321246 - DNA, 441 bp, Zea mays
cgcacgcgtccgattgagaccaactagcatcatagaaagcacaatagtgtaccaacggtggcagccaaaatattttgcttccttatgctccttggtctttctgcaagtgctgctaccgcaaccattttcccacaatgctcacaagctcctatagcttcctttcttcccccatacctctcaccagcggtgtcttcagtatgtgaaaacccaattcttcaaccctacaggatccaacaggcaatcgcagcaggcatcttacctttatcacccttgttcctccaacaaccgtcagccctattacagcagttacctttggtgcatttgttggcacaaaacatcaaggcacaacaactacaacaacttgtgctaagaaaccttgctgcctactctcagcaacagcagtttcttccatcaaccaactggctgcattgaactctgctg

SEQ ID NO: 321247 - DNA, 438 bp, Zea mays
gcttcccttcttcccccataccttccatcaatgatagcttcagtatgtgaaaacccaggtctggagccctataggctccaacaagcaatcgcagcaagcaacatacctttatcacccttgttgtttcaacaatcgccagccctatctttggtgcagtcattggtacaaaccatcagggcacagcagctgcagcaactcgtgctacctgtgatcaaccaagtagctctggcaaacctttctccctactctcagcaacaacaatttcttccattcaaccaactgtctacactgaaccctgctgcttatttgcagcaacaactattaccattcagccagctagctactgcctactctcagcaacaacaacttcttccatttaaccaattggccgcactgaaccccgctgcttatttgcagcagcaaatactactaccattt

SEQ ID NO: 321248 - DNA, 446 bp, Zea mays
gagaccaacaagcaacatagaaagtggaatccagtagcaacaatagagcaacaatggcgaccgagatactttccctccttatgctccttgctctttctgcatgtgttgctaacgcgacaattttccctcaatgctcacaagctcctatagcttcccttcttcccccataccttccatcaatgatagcttcagtatgtgaaaacccagctcttcaaccctataggctccaacaagcaatcgcagcaagcaacatacctttatcacccttgtttcaacaatcgccagccctatctttggtgcagtcattggtacaaaccatcaaggcacagcagctgcagcaactcgtgctacctgtgatcaaccaagtagctctggcaaacctttctccctactatcagcaacaacaatttcttccattcaaccaactatctacactgaaccctgct

SEQ ID NO: 321249 - DNA, 436 bp, Zea mays
ccaacaagcaacatagaaagtggaatacagtagcaaaaatagagcaacaatggcggccaagatattttccatccttatgctccttgctctttctgcatgtgttgctaacgcgaccatttttcctcaatactcacaagctcctatagctgcccttcttcccccataccttccatcaatgaccgctttagtatgtgaaaacccagcccttcaaccctacaggatccagcaagcaatcgcaacaagcaacttacctttatcacacctgttctttcaacaatcgccagccctatctttggtgcagtcattggtacaaaccatcaaggcagaacagttgcagcaactcgtgctaccagtgatcagccaagtagctctggcaaacctttccccctactctcagcaacaacaatttcttccattcaaccaactgtctatactg

SEQ ID NO: 321250 - DNA, 440 bp, Zea mays
agcaacatagaaagcacaatagtgtaccaacaatggcagccaaaatattttgcttcgttatgctccttggtctttctgcaagtgctgctaccgcaaccattttcccacaatgctcacaagctcctatagcttcctttcttcccccatacctctcaccagcggtgtcttcagtatgtgaaaacccaattcttcaaccctacaggatccaacaggcaatcgcagcaggcatcttacctttatcacccttgttcctccaacaaccgtcagccctattacagcagttacctttggtgcatttgttggcacaaaacatcaaggcacaacaactacaacaacttgtgctaagaaaccttgctgcctactctcagcaacagcagtttcttccattcaaccaactggctgcattgaactctgctgcttatttgcaacaacaactacca

SEQ ID NO: 321251 - DNA, 441 bp, Zea mays
gagaccaacaagcaacatagaaagtgtaatacagtagcaaaaatagagcaacaatggcggccaagatattttccatccttatgctccttgctctttctgcatgtgttgctaacgcgaccatttttcctcaatactcacaagctcctatagctgcccttcttcccccataccttccatcaatgaccgctttagtatgtgaaaacccagcccttcaaccctacaggatccagcaagcaatcgcaacaagcaacttacctttatcacacctgttctttcaacaatcgccagccctatctttggtgcagtcattggtacaaaccatcagggcagaacagttgcagcaactcgtgctaccagtgatcagccaagtagctctggcaaacctttccccctactctcagcaacaacaatttcttccattcaaccaactgtctatactga

SEQ ID NO: 321252 - DNA, 437 bp, Zea mays
ccgcaatgctcgcaagctcctatagcttcccttcttcccccgtacctctcaccagcggtgtcttcggtatgtgaaaacccaattcttcaaccctacaggatccaacaggcaatcgcagctggcatcttacctttatcacccttgttcctccaacaatcatcagccctattacaacagttacctttggtgcatttattggcacaaaacatcagggcacaacaactacaacaacttgtgctagcaaaccttgctgcctactctcagcaacagcagtttcttccattcaaccaactaggttcattgaactctgcttcttatttgcaacaacaacaactaccattcagccagctacctgctgcctacccccagcaatttcttccattcaaccaactagcagcattgaactctcctgcttatttacagcagcaacaactact

SEQ ID NO: 321253 - DNA, 436 bp, Zea mays
attgagaccaactagcaacatataaagcacaatagtgtaccaacaatggcaggcaagatattttgcttccttatgctccttggtctttctgcaagtgctgctaccgcaaccattttcccacaatgctcacaagctcctatagcttcctttcttcccccatacctctcaccagcggtgtcttcagtatgtgaaaacccaattcttcaaccctacaggatccaacaggcaatcgcagcaggcatcttacctttatcacccttgttcctccaacaaccgtcagccctattacagcagttacctttggtgcatttgttggcacaaaacatcaaggcacaacaactacaacaacttgtgctaggaaaccttgctgcctactctcagcaacagcagtttcttccattcaaccaactggctgcattgaactctgctgcttatt

SEQ ID NO: 321254 - DNA, 438 bp, Zea mays
agcacacctagcgaagcgcactagcatcgacctaacaacaatggcttccaagacatgatccctccttgcgcttcttgccctttttgtgagtgcaacaaatgcgttcattattccacaatgctcacttgctccgagtgccattattccacagttcctccctccagttacttcaatgggcttcgaacacccagctgtgcaagcctataggctacaacaagcgcttgcggcgagcgtcttagaacaaccaattgcccaattacaacaacaatccttggcacatctaaccatacaaaccatcgcaacgcagcagcaacaagcactgagccacctagccgtggtgaaccctatcgcctacttgcaacaacagctgcttgcatccaacccacttgctttggcaaacgtagctgcataccaacaacaacaacagttgcaacagtt

SEQ ID NO: 321255 - DNA, 440 bp, Zea mays
caacatagaaagcacaatattgtaccaataatggcagccaaaatattttgcctcattatgctgcttggtctttctgcaagtgctgctacggcgagcattttcccgcaatgctcacaagctcctatagcttcccttcttcccccatacctctcaccagcgatgtcttcagtatgtgaaaatccaattcttctaccctacaggatccaacaggcaatcgcagcaggcatcttacctttatcacccttgttcctccaacaatcatcagccctattacagcagttacctttggtgcatttattggcacaaaacatcagggcacaacaactacaacaactcgtgctagcaaaccttgctgcctactctcagcaacagcagttacctttggtgcatttgttggcacaaaacatcagggcacaacaactacaacaactcgtgctagc

SEQ ID NO: 321256 - DNA, 249 bp, Zea mays
accaactaacaacatataaatcacaatcgtctaccaaccatcacatggaagatatataacttccttatgcacacccctctatctgcaaacacttctaccaaaaccatacacccacaatactcacaaacttctatacctacctttcttcccccatacctctcactacctcaaaaccccactatattaaaacccaattcttcaaccctacattatccaacactcaataccattaaacatcttaactttatc

SEQ ID NO: 321257 - DNA, 446 bp, Zea mays
gcagcatagaaagcacaatagtgtacctacaatggcagccaaaatattttgcctccttgtgctccttggtctttctgcaagtgctgctacggcgaccattttcccgcaatgctcgcaagctcctatagcttcccttcttcccccgtacctctcaccagcggtgtcttcggtatgtgaaaacccaattcttcaaccctacaggatccaacaggcaatcgcagctggcatcttacctttatcacccttgttcctccaacaatcatcagccctattacaacagttacctttggtgcatttattggcacaaaacatcagggcacaacaactacaacaacttgtgctagcaaaccttgctgcctactctcagcaacagcagtttcttccattcaaccaactaggttcattgaactctgcttcttatttgcaacaacaacaactaccattca

SEQ ID NO: 321258 - DNA, 376 bp, Zea mays
caagcgaagcgcactagcaacgacctatcaccaatggctaccaagatattagccctgcttgcgcttcttgcccttttagtgagcgcaacaaatgcgttcattattccacagtgctcacttgctcctagtgccagtattccacagttcctcccaccagttacttcaatgggcttcgaacatccagccgtgcaagcctacaggctacaactagcgcttgcggcgagcgccttacaacaaccaattgcccaattgcaacaacaatccttggcacatctaaccctacaaaccattgcaacgcaacaacaacaacaacagtttctgccatcactgagccacctagccgtggtgaaccctgtcacctacttgcaacagcagc

SEQ ID NO: 321259 - DNA, 416 bp, Zea mays
agcacccataatattttgagcattcataaacacacctagcgaagcgcactagcaacgacgtaacaacaatggctaccaagatattatccctctttgcgcttcttgccctttttgtgagcgcaacaaatgcgttcattattccacaatgctcacttgctcctagtgccattattccacagttcctccctccagttacttcaatgggcttcgaacacccagctgtgcaagcctacaggctacaacaagcgcttgcggcgagcgtcttacaacaaccaattgcccaattacaacaacaatccttggcacatctaaccatacaaaccatcgcaacgcaacagcaacaacaatttctaccagcactgagccaactagctgtggtgaaccctgtcgcctacttgcaacagcagttgcttgca

SEQ ID NO: 321260 - DNA, 435 bp, Zea mays
ccaactagcaacatagaaagcacaatagtgtaccaacaatggcagccaaaataggtggcctccttatgctccttggtctttctgcaagtgctgctacggcgaccattttcccgcaatgctcgcaagctcctatagcttcccttcttcccccgtacctctcaccagcggtgtcttcggtatgtgaaaacccaattcttcaaccctacaggatccaacaggcaatcacagctggcatcttacctttatcacccttgttcctccaacaatcatcagccctattacatcagttacctttggtgcatttattggcacaaaacatcaaggcacaacaactacaacaacttgtgctagcaaaccttgctgcctactctcagcaacagcagtttcttccattcaaccaactagctgcattgaactctgcttcttatttgcaac

SEQ ID NO: 321261 - DNA, 428 bp, Zea mays
  unsure (1)..(428): unsure at all n locations
cttagaggtgggttggcttctcctcctcctccggttcgggttcgggttcgtgaggtgctccggggttcggtttcgtgggtgagcggatcgagatggcggcgtcggatgttgagtaccgctgcttcgtcggcggcctcgcctgggccacggacgaccactccctccacaacgccttcagcacctacggcgaggtcctcgagtccaagatcatcctcgatcgggagacgcagaggtcccgcggcttcggcttcgtcaccttctccacggaggaggcgatgcggaacgccatcgagggcatgaacggcaaggagctggacggccgcaacatcaccgtcaacgaggcccagtcccgcggcggccgtggaggcggcggcggcggcgggtacggtggtggccgtggaggcggcggctacngcggtggcgggcgc

SEQ ID NO: 321262 - DNA, 446 bp, Zea mays
gcaacatagaaagcacaatagtgtaccaacaatggcagccaaaatattttgcctccttgtgcgggcttggtctttctgcaagtgctgctacggcgaccattttcccacaatgctcacaagctcctatagcttcccttcttcccccgtacctctcaccagcggtgtcttcggtatgtgaaaacccaattcttcaaccctataggatccaacaggcaatcgcagctggcatcttacctttatcacccttgttccttcaacaatcatcagccctattacagcagttacctttggtgcatttattggcacaaaacatcagggcacaacaactacaacaacttgtgctagcaaaccttgctgcctactctcagcaacaacagtttctttcattcaaccaactagctgcattgaactctgcttcttatttgcaacaacaactactaccattc

SEQ ID NO: 321263 - DNA, 427 bp, Zea mays
  unsure (1)..(427): unsure at all n locations
gctgtatctactccagagcgcagaagaacccgatcgacaccatgagggtgttgctgcgggccctcgctctcctggctctcgctgcgagcgccacctccacgcatacaagcggcggctgcggctgccagccaccgccgccggttcatctaccgccgccggtgcatctgccacctccggttcacctgccacctccggtgcatctnccaccgccggtccacctgccgncgccggtccacctgccaccgncggtccatgtgccgccgccggttcatctgccgncgncaccatgccactaccctactcaaccgccccggcctcagcctcatccccagccacacccatgcccgtgccaacagccgcatncaagcccgtgccagctgcagggaacctgcggcgttggcaagaccccgatcctgggccagtgcgt

SEQ ID NO: 321264 - DNA, 213 bp, Zea mays
tgcattagtaaggctgaattgatagataagttgaaacagtccgaggatgagaaaatgtcagggcaagaagaaaatagagagctacgagaagaaaatacagctacaaacagtcgtatgagccgtatggaacaggagtgggaagaactaaagaacagattaagttgtagttagacatacagttctagtataccatcatcgagttcagggcagcat

SEQ ID NO: 321265 - DNA, 434 bp, Zea mays
agaaagcacaatagtgtaccaacaatggcagccaaaatattttgcttccttatgctgcgttggtctttctgcaagtgttgctaccgcaaccattttcccacaatgctcacaagctcctatagcttcccttcttcccccatacctctcaccagcggtgtcttcaatgtgtgaaaccccaattgttcaaccctacaggatccaacaggcaatcgcaacaggcatcttaccattatcacccttgttcctccaacaaccgtcagccctattacagcagttacctttggtccatttggtggcacaaaacatcagggcacaacaactacaacaacttgtgctagcaaaccttgctgcatactctcaacaacatcagtttcttccattcaaccaactggctgcattgaactctgctgcttatttgcaacaacaattaccat

SEQ ID NO: 321266 - DNA, 176 bp, Zea mays
gagaccagcacgcacatagaacgttttaatctactatcacaacagcagcacagtggggccaacatatgtttactccgtacgctgcttgctatttgtacatgcgtcgataacgctacaatcagctctcaacggtcatatgctactatcgctaaccttcttcatccatacatttgatc

SEQ ID NO: 321267 - DNA, 444 bp, Zea mays
ccaactagcaacatagaaagcacaatagtgtaccaacaatggcagccaaaatattttgggtgcttatgctccttggtctttctgcaagtgctgctacggcgaccattttcccacaatgctcacaagctcctatagcttcccttcttcccccgtacctctcaccagcggtgtcttcggtatgtgaaaacccaattcttcaaccctataggatccaacaggcaatcgcagctggcatcttacctttatcacccttgttcctccaacaatcatcagccctattacagcagttacctttggtgcatttattggcacaaaacatcagggcacaacaactacaacaacttgtgctagcaaaccttgctgcctactctcagcaacaacagtttcttccattcaaccaactagctgcattgaactctgcttcttatttgcaacaacaacaac

SEQ ID NO: 321268 - DNA, 435 bp, Zea mays
gcacaatagtgtaccaacaatggcagccaaaatattttgcctccttatgctccttgggctttctgcaagtgctgctacggcgaccattttcccgcaatgctcgcaagctcctatagcttcccttcttcccccgtacctctcaccagcggtgtcttcggtatgtgaaaacccaattcttcaaccctacaggatccaacaggcaatcgcagctggcatcttacctttatcacccttgttcctccaacaatcatcagccctattacaacagttacctttggtgcatttattggcacaaaacatcaaggcacaacaactacaacaacttgtgctagcaaaccttgctgcctactctcagcaacagcagtttcttccattcaaccaactaggttcattgaactctgcttcttatttgcaacaacaacaactaccattcag

SEQ ID NO: 321269 - DNA, 431 bp, Zea mays
ctccctgctcggttgttgcagctaaatccgccgggaatctcggatttggcttcgccaggagggcaacttgatgcttgcccagccatatatagatggagcccataaaccggccttgccattgcgatccacgccgtggacaccaagcgtgcaagcgttgccatgggggtgagtgcataggggttcgaccgattgggggaattcgtggcggctgaatctctgctggcgctacaagcttattgggtgtgcgcctgatcttatccacactctttgcattcatcgtacgctagcgtacgcatagtacagcatctagcctggatgctactctgcgccatctttcgcctcggagcttgacattggctatacgccgacccttgagcggcttgttcgcaacgtgtgggtgacgttcatgacttcatacggcggtatttgtg

SEQ ID NO: 321270 - DNA, 214 bp, Zea mays
cgttctaccagcacgctgcgcctaacgctggcaccctcttacaactgcaacaattggtgccattcaaccaacttgctttgacaaacccagcagcgttctaccaacaacccatcattggtggtgccctcttttagatttcttatgagttatagttcaataataaagttttttgtctgatgtttgtggcttcccagaaataagaaagtacatttct

SEQ ID NO: 321271 - DNA, 439 bp, Zea mays
caatagtgtaccaacaatggcagccaaaatattttgcttccttatgctccttggtcttgctgcaagtgctgctaccgcaaccattttcccacaatgctcacaagctcctatagcttcctttcttcccccatacctctcaccagcggtgtcttcagtatgtgaaaacccaattcttcaaccctacaggatccaacaggcaatcgcagcaggcatcttacctttatcacccttgttcctccaacaaccgtcagccctattacagcagttacctttggtgcatttgttggcacaaaacatcaaggcacaacaactacaacaacttgtgctaggaaaccttgctgcctactctcagcaacagcagtttcttccattcaaccaactggctgcattgaactctgctgcttatttgcaacaacaactaccattcagtcagctagct

SEQ ID NO: 321272 - DNA, 399 bp, Zea mays
attttcagcattcaaaaacacaccaagctaagcgcactatcaacgacctaacaccaatggctgccaagatattagccctccttgcgcttcttgcccttttagtgagcgcaacaaatgcgttcattattccacagtgctcacttgctcctagtgccattattccacagttcctcccaccagttacttcaatgggcttcgaacattcagccgtgcaagcctacaagctacaactagcgcttgcggcgagcgccttacaacaaccaattgcccaattgcaacaacaatccttggcacatctaaccctacaaaccattgcaacgcaacaacaacaacaacaacagtttctgccatcactgagccacctagccgtggtgaaccctgtcacctacttgcaacagc

SEQ ID NO: 321273 - DNA, 436 bp, Zea mays
caactcgtgctaccagtgatcagccaagtagctctggcaaacctttctccctactgtgagcaacaacaatttcttccattcaaccaactgtctacactgaaccctgctgcttatttacaacaacaacaactactaccattcagccagctagctactgcctactctcagcagcaacaatttcttccatttaaccaattggccgcactgaacccctctgcttatttccagcagcaaatactactaccatttggccagctagctacaacaagccccacttcctttttgaaacaacaacaattgcttccgttctaccagcagtttgtggctaaccccgcaaccctcttacaactgcaacagttgctgccctttgtccaacttgctttgacaaacccagcagccttctaccaacaacacatcattggcggtgccatctttt

SEQ ID NO: 321274 - DNA, 320 bp, Zea mays
gcgagtttgagcattcagaaacacttcattcgaagcacattagcaacaacctaacaacagtggctaccaagatattatccctccttgctcttcttgcgcttctagcgagcgcatcaaatgcgttcattattccacaatgctcacttgctccaagttccattattacacagtgcctcctatcagttactataattggctgcatatacctagctgaccaagcctatatgctactacatgtctttgctgtgtgcgttctacatcaactaattatatatatgctgcatcactgctacgcacatctatctatctatactattata

SEQ ID NO: 321275 - DNA, 431 bp, Zea mays
cccacgcgtccgtgaaaacccagctcttcaaccatataggcttcaacaagcaatcgcgagcaagcaacatacctttatcgcccttgttgtttcaacaatcgccagccctatctttggtgcagtcattggtacaaaccatcagggcacaacagctgcagcaactcgtgctacctctgatcaaccaagtagctctggcaaacctttctccctactctcagcaacaacaatttcttccattcaaccaactgtctacactgaaccctgctgcttatttgcagcaacaactattaccatttagccagctagctactgcctactctcagcaacaacaacttcttccatttaaccaattggccgcactgaaccccgctgcttatttgcagcagcaaatactactaccatttagccagctagctgcagcaaaccgtgct

SEQ ID NO: 321276 - DNA, 463 bp, Zea mays
caacaagcaacatagaaagtggaatacagtagcaacaatagagcaacaatggcggccaagatattttccatcctgatgctccttgctctttctgcatgtgttgctaacgcgaccatttttcctcaatactcacaagctcctatagctgcccttcttcccccataccttccatcaatgaccgcttcagtttgtgaaaacccagcccttcaaccctacaggctccaacaagcaatcgcaacaagcaacttacctttatcacccctgttctttcaacaatcgccagccctatctttggtgcagtcattggtacaaaccatcagggcacaacagctgcaacaactcgtgctaccagtgatcagccaagtagctctggcaaacctttctccctactctcagcaacaacaatttcttccattcaaccaactgtctacactgaaccctgctgcttatttacaacaacaac

SEQ ID NO: 321277 - DNA, 439 bp, Zea mays
  unsure (1)..(439): unsure at all n locations
cagaccattagctttatctactccagagcgcagaagaacccgatcgacaccatgagggtgttgctcgttgccctcgctctcctggctctcgctgcgagcgccacctccacgcatacaagcggcggctgcggctgccagccaccgccgccggttcatctaccgccgccggtgcatctgccacctccggttcacctgccacctccggtgcatctcccaccgccggtccacctgccgccgccggtccacctgccaccgccggtccatgtgccgccgccggttcatctgccgccgccaccatgccactaccctnactcaaccgcccggcctcagcctcatccccagccacacccatgcccgtgccaacagccgcatccaagcccgtgccagctgcagggaacctgcggcgttggcagcaccccgatcctgggccagtgcgtcg

SEQ ID NO: 321278 - DNA, 434 bp, Zea mays
attgaaccaactagctgcattgaactctgcttcttatttgcaacaacaacaactaccagtcaggcagctatctgctgcctacccccagcaatttcttccattcaaccaactgacagcattgaactctcctgcttatttacagcagcaacaactactaccattcagccagctagctggtgtgagccctgctaccttcttgacacaaccacagttgttgccgttctaccagcacgctgcgcctaacgctggcaccctcttacaactgcaacaattgctgccattcaaccaacttgctttgacaaacccagcagcattctaccaacaacccatcattggtggtgccctcttttagatttcttatgagttatagttcaataataaagttttttgtctgatgtttgtggcttcccagaaataagaaagtacatttctag

SEQ ID NO: 321279 - DNA, 447 bp, Zea mays
cccacgcgtccgcaactagcaacatagaaagcacaatagtgtaccaacaatggcagcgtaagatattttgcctccttatgctccttggtctttctgcaagtgctgctacggcgaccattttcccacaatgctcacaagctcctatagcttcccttcttcccccgtacctctcaccaacggtgtcttcggtatgtgaaaacccaattcttcaaccctacaggatccaacaggcaatcgcagctggcatcttacctttatcacccttgttcctccaacaatcatcagccctattacagcagttacctttggtgcatttattggcacaaaacatcagggcacaacaactacaacaacttgtgctagcaaaccttgctgcctactctcagcaacagcagtttcttccattcaaccaactagctgcattgaactctgcttcttatttgcaac

SEQ ID NO: 321280 - DNA, 307 bp, Zea mays
cggacgcgtggggcaaatactactaccatttagccagctagctgcagcaaaccgtgcgtccttcttgacacagcaacagttgctgcctttctaccagcagtttgcggctaaccccgcaaccctcttacaactacaacaattgttgccctttgtccaacttgctttgacagaccgagcggcctcctaccaacaacacatcattggtggtgccctcttttagattgcttattagttgtaattcaataataaagttttttggatgatgtatgtggccaaccagaaataagaagttacatttccagatttt

SEQ ID NO: 321281 - DNA, 451 bp, Zea mays
gcgattgagaccaactagcaacatagaaagcacaatagtgtaccaacaatggcagccaagataggttgcctccttatgctccttggtctttctgcaagtgctgctacggcgaccattttcccacaatgctcacaagctcctatagcttcccttcttcccccgtacctctcaccagcggtgtcttcggtatgtgaaaacccaattcttcaaccctataggatccaacaggcaatcgcagctggcatcttacctttatcacccttgttcctccaacaatcatcagccctattacagcagttacctttggtgcatttattggcacaaaacatcagggcacaacaactacaacaacttgtgctagcaaaccttgctgcctactctcagcaacaacagtttcttccattcaaccaactagctgcattgaactctgcttcttatttgcacaaacaca

SEQ ID NO: 321282 - DNA, 427 bp, Zea mays
ccaaaatcatacatacaattagtattgtgtgattttaatcaaatatacattacagaaagtatgatttatgcgatcaacaatttttttaccctttgaaattttgaatactcggtctcaaattggtagattcagcatatagttgccttttcagggaatgcatcacaaggtggtaccacattacccatgatctacgtgctcggagactccctggcgcctgtctgagaacaacaataacctggtgacactgctcaaggccaacttactacgaaacaacatcgactacctatggcacaaggccaccggctgtttcagcaatggcaagaactccatcgacttcctcggaagaaggtatgggaaaagcatggaagtacgtcgtaccacggtgcctcgtgctatcgtcaacgatggagctcgctcaacaaccaca

SEQ ID NO: 321283 - DNA, 438 bp, Zea mays
gaccaactagcaacatagaaagcacaatagtgtaccaacaatggcagccaaaatattgtgcttccttatgctccttggtctttctgcaagtgttgctaccgcaaccattttcccacaatgctcacaagctcctatagcttcccttcttcccccatacctctcaccagcggtgtcttcaatgtgtgaaaccccaattgttcaaccctacaggatccaacaggcaatcgcaacaggcatcttaccattatcacccttgttcctccaacaaccgtcagccctattacagcagttacctttggtccatttggtggcacaaaacatcagggcacaacaactacaacaacttgtgctagcaaaccttgctgcatactctcagcaacatcagtttcttccattcaaccaactggctgcattgaactctgctgcttatttgcaaca

SEQ ID NO: 321284 - DNA, 431 bp, Zea mays
  unsure (1)..(431): unsure at all n locations
agaaagcacaatagtgtaccaacaatggcagccaaaatattttgcctccttatgctgggtggtctttctgcaagtgctgctacggcgaccattttcccgcaatgctcgcaagctcctatagcttcccttcttcccccgtacctctcaccagcggtgtcttcggtatgtgaaaacccaattcttcaaccctacaggatccaacaggcaatcgcagctggcatcttacctttatcacccttgttcctccaacaatcatcagccctattacaacagttacctttggtgcatttattggcacaaaacatcagggcacaacaactacaacaacttgtgctagcaaaccttgctgcctactctcagcaacagcagtttcttccattcaaccaactangttcattgaactcttgcttctatttgcaacaaacaacact

SEQ ID NO: 321285 - DNA, 352 bp, Zea mays
gtccctatcgtgtgtcgtccaaaggcatcaccccccacgtctctcccataccatccgggtgtagatttcaaatccgcgtcatacctcatgtctgggtctcctgcttcgccgacagttgcctccttcagtcgagatccgacgctggtgagaccactgaccatggaggccatggaggatctatcacagctcgacgagtcgatgcgccaggcgttgtcacttactagctacgacgacccctccgacgacgccgcgccgcgtcatcacaccagctttctcaacgccgtcgacctctacaacgtctgcactgacaagtccgccgtgctgaacagcctcatctgccacccgttcttgt

SEQ ID NO: 321286 - DNA, 382 bp, Zea mays
  unsure (1)..(382): unsure at all n locations
gcgagaaagcacaatagtgtaccaacaatggcagccaaaatattttgcttccttatgctccttggtggttgtgcaagtgttgctaccgcaaccattttcccacaatgctcacaagctcctatagcttcccttcttcccccatacctctcaccagcggtgtcttcaatgtgtgaaaacccaattgttcaaccctacaggatccaacaggcaatcgcaacaggcatcttaccattatcacccttgntcctncaacaaccgtcagccctattacagcagttacctttggtccaattggtggcacaaaacatcaaggcacaacaactacaacaacttgggctagcaaaccttgctgcatactcttagcaacatcagtttcttccat

SEQ ID NO: 321287 - DNA, 180 bp, Zea mays
  unsure (1)..(180): unsure at all n locations
ccaacaagcaacatanaaagtggaatcgagtagcatcaatagagcaacaatggcgaccaatagattggccctccttatgcggcttgctctttctacatgttttgctaacgcgacaattttccctcaatgctcacaagctcctataacatcccttcttcctccatactttccatcatttat

SEQ ID NO: 321288 - DNA, 415 bp, Zea mays
  unsure (1)..(415): unsure at all n locations
gaccattgcaacgcaccaccaacacgaccaacagtttctgccatcactgagccacctagccntggtgaaccctgtgacctacttgcaacagcagctgcttgcatccaacccacttgctctggcgaacgtagctgcataccagcaacaacaacagctgcaacagtttatgccagtgctcagtcaactagccatggtgaaccctgccgtctacctacaactactttcatctagcccgctcgcggtgggcaatgcacctacgtacctacaacaacagttgctgcaacaaattgtaccagctctgactcagctagctgtggcaaaccctgctgcctacttacaacagttgcttccattcaaccaactggctgtgtcaaactctgctgcgtacctacaacagcgacaacagttacttaat

SEQ ID NO: 321289 - DNA, 427 bp, Zea mays
cgcactagcaacatagaaagcacaatagtgtaccaacaatggcagccaaaatattttggctgcttatgctccttggtctttctgcaagtgctgctacggcgaccattttcccgcaatgctcgcaagctcctatagcttcccttcttcccccgtacctctcaccagcggtgtcttcggtatgtgaaaacccaattcttcaaccctacaggatccaacaggcaatcacagctggcatcttacctttatcacccttgttcctccaacaatcatcagccctattacatcagttacctttggtgcatttattggcacaaaacatcagggcacaacaactacaacaacttgtgctagcaaaccttgctgcctactctcagcaacagcagtttcttccattcaaccaactagctgcattgaactctgcttctta

SEQ ID NO: 321290 - DNA, 362 bp, Zea mays
gaccaacaagcaacatagaaagtggaatccagtagcaacaatagagcaacaatggcgaccaagagattgtccctccttatgctccttgctctttctacatgtgttgctaacgcgacaattttccctcaatgctcacaagctcctatagcttcccttcttcccccataccttccatcaattatagcttcaatatgtgaaaacccagctcttcaaccatataggcttcaacaagcaatcgcagcaagcaacatacctttatcgcccttgttgtttcaacaatcgccagccctatctttggtgcaatcattggtacaaaccattagggcacaacagctgcagcaactcgtgctacctctgatcaa

SEQ ID NO: 321291 - DNA, 342 bp, Zea mays
gaccaactagcaacatagaaagcacaagagtgtatcaacaatggcagccaaaatattttgccggctgaggctccttggtctttctgcaagtgctgctacggcgaccattttcccgcaatgctcgcaagctcctatagcttcccttcttcccccgtacctctcaccagcggtgtcttcggtatgtgaaaacccaattcttcaaccctacaggatccaacaggcaatcgcagctggcatcttacctttatcacccttgttcctccaacaatcatcagccctattacaacagttacctttggtgcatttattggcacaaaacatcaaggcaccacaacttccacc

SEQ ID NO: 321292 - DNA, 417 bp, Zea mays
attgagaccaacaagcaacatacagagtggaatccagtagcaacaacagagcaacagtggcgaccaagagattttccctccttatgctccttgctctttctgcatgtgttgctaacgcgacaattttccctcaatgctcacaagctcctatagcttcccttcttcccccataccttccatcaatgatagcttcagtatgtgaaaacccagctcttcagccctataggctccaacaagcaatcgcagcaagcaacatacctttatcacccttgttgtttcaacaatcgccagccctatctttggtgcagtcattggtacaaaccatcagggcacagcagctgcagcaactcgtgctacctgtgatcaaccaagtagctctggcaaacctttctccctactctcagcaacaacaatttc

SEQ ID NO: 321293 - DNA, 244 bp, Zea mays
acccgcccttcaaatttacctttccaccctttccttaatttgtttccattctccgcaccccccaacatcgtaaaatgtttgcatccataaacctacctaaatcttaacacttattccactaattccaaccaaactcttctcttcaacacccctactatcaatctcctataccagtacaccaataatatacccatctaccccaattatcccttcacctataataatatccatctcattccccatc

SEQ ID NO: 321294 - DNA, 341 bp, Zea mays
catccttatgctccttgctctttctgcatgtgttgctaacgcgaccatttttcctcaatactcacaagctcctatagctgcccttcttcccccataccttccatcaatgaccgcttcagtttgtgaaaacccaacccttcaaccctacaggctccaacaagcaatcgcaacaagcaacttacctttatcacccctgttctttcaacaatcgccagccctatctttggtgcagtcattggtacaaaccatcagggcacaacagctgcaacaactcgtgctaccagtgatcagccaagtagctctggcaaacctttctccctactctcagcaacaacaatttc

SEQ ID NO: 321295 - DNA, 275 bp, Zea mays
tgcccactgaagctgttgggggcattataattggggccccacctttttgtaggtggaagacaggtaggatgtaaacttgaatgtgttgctgactcaaacagaccagtgctctgctctggctaagcacctggccatcttacacatcgtgtaagccccatagtaacttgaatgtgttacacatcgtgtgcctgtctttgctatccagtctttacacagcatttcaggaaccaaaagatatattatgtaaaaattaattggaattttaagaattgatg

SEQ ID NO: 321296 - DNA, 425 bp, Zea mays
gctctcgctgcgagcgccacctccacgcatacaagcggcggctgcggctgccagccaccgccggcggttcatctaccgccgccggtgcatctgccacctccggttcacctgccacctccggtgcatctcccaccgccggtccacctgccgccgccggtccacctgccaccgccggtccatgtgccgccgccggttcatctgccgccgccaccatgccactaccctactcaaccgccccggcctcagcctcatccccagccacacccatgcccgtgccaacagccgcattcaagcccgtgccagctgcagggaacctgcggcgttggcagcaccccgatcctgggccagtgcgtcgagttcctgaggcatcagtgcagcccgacggcgacgccctactgctcgcctcagtgccagtcgttgcggca

SEQ ID NO: 321297 - DNA, 429 bp, Zea mays
  unsure (1)..(429): unsure at all n locations
cacaatgctcacaagctcctatagcttcccttcttcccccgtacctctcaccaacggggtgttcggtatgtgaaaacccaattcttcaaccctacaggatccaacaggcaatcgcagctggcatcttacctttatcacccttgttcctccaacaatcatcagccctattacagcagttacctttggtgcatttattggcacaaaacatcagggcacaacaactacaacaacttgtgctagcaaaccttgctgcctactctcagcaacagcagtttcttccattcaaccaactagctgcattgaactctgcttcttatttgcaacaacaacaactaccattcagccagctatctgctgcctacccccagcaatttcttccattcaaccaactgacagcattgaactctnctgcttatttacagcagcaac

SEQ ID NO: 321298 - DNA, 431 bp, Zea mays
gaccaactagcaacatagaaagcacaatagtgtaccaacaatggcagccaaaatatgttggctccttatgctccttggtctttctgcaagtgctgctacggcgaccattttcccacaatgctcacaagctcctatagcttcccttcttcccccgtacctctcaccagcggtgtcttcggtatgtgaaaacccaattcttcaaccctataggatccaacaggcaatcgcagctggcatcttacctttatcacccttgttcctccaacaatcatcagccctattacagcagttacctttggtgcatttattggcacaaaacatcagggcacaacaactacaacaacttgtgctagcaaaccttgctgcctactctcagcaacaacagtttcttccattcaaccaactagctgcattgaactcttgcttttatt

SEQ ID NO: 321299 - DNA, 425 bp, Zea mays
  unsure (1)..(425): unsure at all n locations
tgcaagtgctgctactgcgaccatgttcccgcaatgctcgcaagctcctatagcttgcctgcttcccccgtacctctcaccagcggtgtcttcggtatgtgaaaacccaattcttcaaccctacaggatccaacaggcaatcgcagctggcatcttacctttatcacccttgttcctccaacaatcatcagccctattacaacagttacctttggtgcatttattggcacataacatcagggcacaacaactacaacaacttgtgctagcaaaccttgctgcctactctcagcaacagcagtttcttccattcaaccaactaggttcattgaactctgcttcttatttgcaacaacaacaactaccattcagccagctacctgctgcctacccncagcaatttcttccattcaaccaactagcag

SEQ ID NO: 321300 - DNA, 456 bp, Zea mays
caactagcaacatagaaagcacaatagtgtaccaacaatggcagccaaaatattttgcctccggatgctccttggtctttctgcaagtgctgctacggcgaccattttcccgcaatgctcgcaagctcctatagcttcccttcttcccccgtacctctcaccagcggtgtcttcggtatgtgaaaacccaattcttcaaccttacaggatccaacaggcaatcgcagctggcatcttacctttataacccttgttcctacaacaatcatcacccttattacaacagtaacctttgcagcattaattggcacaaaacatcagggcacaacaactacaacaacttgtgctagcaaaccttgctgcctactttcagcatcagcagtttcttccattcaaccaactaggttcatagaactctgcttcttatttgcaacaacaccaattaccattcagcca

SEQ ID NO: 321301 - DNA, 295 bp, Zea mays
cccacgcgtacgagtgcttgcgttataccagcagttgtcgttggcccatttggtggcacaaaagatcaggcaacatcagctacaacaactggtgctagcaaaccttgctgcatacttttagcaacatcagtttcttccattaacccaactggctgcattgaactctgctgcttatttgcaacaacaattaccattcagccagctagttgctgcctacccccagcaatttcttccattcaaccaactagcagcattgaactctgctgcttatttacagcagcaacaactactacca

SEQ ID NO: 321302 - DNA, 372 bp, Zea mays
gctagctgctgcctactctcagcaacaacaacttcttccatttaaccaattggccgcactgaaccccgctgcttatttgcagcagcaaatactactaccatttagccagctagctgcagcaaaccgtgcttccttcttgacacagcaacagttgctgcctttctaccagcagtttgcggctaaccccgcaaccctcttacaactacaacaattgttgccctttgtccaacttgctttgacagacccagcggcctcctaccaacaacacatcattggtggtgccctcttttagaatgcttattagttggaattcaataataaaggtttttggatgatgtatgtggccaaccagaaataagaagttacatttcc

SEQ ID NO: 321303 - DNA, 161 bp, Zea mays
tactctcagcaaccaccacttattgcatttaacttttccacctcactcaaccccactacttattttgatcatcctatactactaccattcaaccatctatctccaacccaccttgctacacttctcacacactaacatatcctcccttcttaccacctacc

SEQ ID NO: 321304 - DNA, 400 bp, Zea mays
ccaactagcaacatagaaagcacaatagtgtaccaacaatggcagccaaaatattttgcctccgtatgctccttggtctttctgcaagtgctgctacggcgaccattttcccgcaatgctcgcaagctcctatagcttcccttcttcccccgtacctctcaccagcggtgtcttcggtatgtgaaaacccaattcttcaaccctacaggatccaacaggcaatcacagctggcatctaaccttaataacccttgttcctccaacaatcatcagccctattacatcagttacctttggtgcattaattggcccaaaccatcagggcccaccacctacaacaacttgggctagcaaaccttgctgcctactttaagcaccagcagttccttccattcaacca

SEQ ID NO: 321305 - DNA, 192 bp, Zea mays
catgcaggcaggtcggcgaggagggcaggattaccgaagaccgagccgtgcggtggctcggggcggtgactgtacaggaccccagaatctcagatccttcctgcccgcccgcccgtgcccgtcgacgcgtcgttcttgccggccgcgcctcacctccgccctctcctcctacagggggatcggatacgccac

SEQ ID NO: 321306 - DNA, 458 bp, Zea mays
caactagcaacatagaaagcacaatagtgtaccaacaatggcagccaaaatattttgcctgctgatgctccttggtctttctgcaagtgctgctacggcgaccattttcccgcaatgctcgcaagctcctatagcttcccttcttcccccgtacctctcaccagcggtgtcttcggtatgtgaaaacccaattcttcaaccctacaggatccaacaggcaatcacagctggcatcttacctttatcacccttggtccttcaacaatcatcagccctattacatcagttacctttggtgcatttattggcacaaaacatcagggcacaacaactacaacaacttgtgctagcaaaccttgctgcctactctcagcaacagcagtttcttccattcaaccaactagctgcattgaactctgcttcttatttgcaacaacaacaactaccattcagccagc

SEQ ID NO: 321307 - DNA, 269 bp, Zea mays
caggcaggcaggtcggcgaggagggcaggaagaccgaagaccgagccgtgcgggggctcggggcgggggcgggacaggaccccaaaatctcagatccttcctgcccgcccgcccgtgcccgtcgacgcgtcgttcttgccggccgcgcctcacctccgccctctcctcctccagggggatcggatacgccacaggctgcgcgatggtgctgtgggtcttcggctacggcttccttatctggaaccccggcttcgacttcgacgaccaaa

SEQ ID NO: 321308 - DNA, 425 bp, Zea mays
gctgcagcaactcgtgctacctgtgatcaaccaagtagctctggcaaacctttctcgctagtctcagcaacaacaatttcttccattcaaccaactgtctacactgaaccctgctgcttatttgcagcaacaactattaccatttagccagctagctactgcctactctcagcaacaacaacttcttccatttaaccaattggccgcactgaaccccgctgcttatttgcagcagcaaatactactgccatttagcgagctagctgcagcaagtcgtgcttccttcttgacacagcaacagttgctgcctttctacaagcagtttgcggctaaccccgcaaccctcttacaactacaacaattgttgccctttgtccaacttgctttgacaaacccagcagccttctaccaacaacacatcattg

SEQ ID NO: 321309 - DNA, 422 bp, Zea mays
  unsure (1)..(422): unsure at all n locations
ctccggggcatctcccaccgccggtccacctgccgccgccggtccacctgccaccggcgggccatgtgccgccgccggttcatctgccgccgccaccatgccactaccctactcaaccgccccggcctcagcctcatccccagccacacccatgcccgtgccaacagccgcatccaagcccgtgccagctgcagggaacctgcggcgttggcagcaccccgatcctgggccagtgcgtcgagtttctgaggcatcagtgcagcccgacggcgacgccctactgctcgcctcagtgccagtcgttgcggcagcagtgttgccagcagctcaggcaggtggagccgcagcaccggtaccaggcgatcttcggcttggtcctncagtccatcctgcagcagcagccgcaaagcggccaggtcgcg

SEQ ID NO: 321310 - DNA, 341 bp, Zea mays
attttgagcattcagaaacacaccaagcgaatcacattagcaacaacctaacaacaatggctggcaagatattatccctccttgcgcttcttgcgctttttgcgagcgcaacaaatgcgttcattattccacaatgctcacttgctccaagttccattattacacagttccttccaccagttacttcaatgggcttcgaacacccagctgtgcaagcctataggctacaacaagcaattgcggcgagcgtcttacaacaaccaatttccaagttgcaacaccaatccttggcccatttaacaatccaaaccatggaaacgcaacagcaccaccaattccta

SEQ ID NO: 321311 - DNA, 418 bp, Zea mays
  unsure (1)..(418): unsure at all n locations
tcggggtaattctgaatgagaccttttatgctactgcaacgtctgtgaccacaaatgactgttgcagcaagaccatactgcaggagtggagctgtctatatgaagagtgtaggtagagacaattggctaatattgtacaggttcagtttgcaggatcgtagcaacagggttcaaagacgtgtgtttgaaagggcagttgctgatgatcagcatgatggaaggtggngagttccattgctggtttaagctggagctagcttctgaagtccggtcaggtgtctgtatgtgttgcccttctttatttcatttcatgagagaggattgctatttgatccttgaactgtacttggtcgtacttgtgaataaatgttttagcattggtgttcaataaaaaatacttgcaacaacaaaaaatagg

SEQ ID NO: 321312 - DNA, 175 bp, Zea mays
gcgcttgcggcgagcgtcttacaacaaccaattgaccaattgcaacaacaattcttgcgacatgtaacaatacaagccatcacaacgcaacagcaacaacagttcctaccagcactgagccacctagccatggtgaaccctgccgtctacttgcaagagcagctgcttgcattca

SEQ ID NO: 321313 - DNA, 118 bp, Zea mays
ccaatgatgggttgtcggtgccctgttttagatctcttatgagttatagttcaataggagggttttttgtctgatgtttgtggcattccagaaataagaaagtacatttctagattct

SEQ ID NO: 321314 - DNA, 284 bp, Zea mays
caactagcaacatagaaagcacaatagtgtaccaacaatggcagctaaaatattttgcctccggatgctccttggtctttctgcaagtgctgctacggcgaccattttcccacaatgctcacaagctcctatagcttcccttcttaccccgtacctctcaccaacggtgtcttcggtttgtgaaaacccaattcttcaaccttacaggatccaacaggcaatcgcagctggcatcttacctttatcacccttgttcctacaacagtcatcacccctattacagc

SEQ ID NO: 321315 - DNA, 75 bp, Zea mays
attctaccttcgacatcgatcgtgtaagttacagggaccttaaaactagtaccagcgcgatgggccttgccatac

SEQ ID NO: 321316 - DNA, 447 bp, Zea mays
  unsure (1)..(447): unsure at all n locations
aactagcaacatagaaagcacaatagtgtaccaacaatggcagccaaaatattttgcttgcttgtgctccttggtctttctgcaagtgttgctaccgcaaccattttcccacaatgctcacaagctcctatagcttcccttcttcccccatacctctcaccagcggtgtcttcaatgtgtgaaaacccaattgttcaaccctacaggatccaacaggcaatcgcaacaggcatcttaccattatcacccttgttccttcaacaaccgtcagccctattacagcagttacctttggtccatttggtggcacaaaacattanggcacaacaacttcaacaacttgtgctagcaaaccttgctgcatactctcagcaacatcagtttcttccattcaaccaactggctgcattgaactctgctgcttatttgcaacaacaattaccattc

SEQ ID NO: 321317 - DNA, 56 bp, Zea mays
cagaccattagctttatctactccagagcgcagaagaacccgatcgacaccatgag

SEQ ID NO: 321318 - DNA, 329 bp, Zea mays
gcaacatagaaagcacaatagtgtaccaacaatggcagccaaaatattttgcttccttgatgctccttggtctttctgcaagtgttgctaccgcaaccattttcccacaatgctcacaagctcctatagcttcccttcttcccccatacctctcaccagcggtgtcttcaatgtgtgaaaccccaattgttcaaccctacaggatccaacaggcaatcgcaacaggcatcttaccattatcacccttgttcctccaacaaccgtcagccctattacagcagttacctttggtccatttggtggcacaaaacatcaaggcacaacaacta

SEQ ID NO: 321319 - DNA, 192 bp, Zea mays
attatcactcttgttcctccaacaaccgttagccctattacagcaggtagccttagttcattatgtggcacaaaacatcagggcacaactactacaacaacttgtgctagcaaaccttgctgcatactctcagcaacatcagagctttccattcaaccaactggctgcattgaactctgatacttatttgca

SEQ ID NO: 321320 - DNA, 405 bp, Zea mays
caacaagcaacatagaaagtggaatacagtagcaaaaatagagcaacaatggcgggcaggatattttccatccttatgctccttgctctttctgcatgtgttgctaacgcgaccatttttcctcaatactcacaagctcctatagctgcccttcttcccccataccttccatcaatgaccgctttagtatgtgaaaacccagcccttcaaccctacaggatccagcaagcaatcgcaacaagcaacttacctttatcacacctgttctttcaacaatcgccagccctatctttggtgcagtcattggtacaaaccatcagggcagaacagttgcagcaactcgtgctaccagtgatcagccaagtagctctggcaaacctttccccctactctcagcaacaacaa

SEQ ID NO: 321321 - DNA, 425 bp, Zea mays
ctttctacatgtgttgctaacgcgacaattttccctcaatgctcacaagctcctatagcgtcccttcttcccccataccttccatcaattatagcttcaatatgtgaaaacccagctcttcaaccatataggcttcaacaagcaatcgcagcaagcaacatacctttatcgcccttgttgtttcaacaatcgccagccctatctttggtgcagtcattggtacaaaccatcagggcacaacagctgcagcaactcgtgctacctctgatcaaccaagtagctctggcaaacctttctccctactctcagcaacaacaatttcttccattcaaccaactgtctacactgaaccctgctgcttatttgcagcaacaactattaccatttagccagctagctactgcctactctcagcaacaacaact

SEQ ID NO: 321322 - DNA, 428 bp, Zea mays
cgcatgcgcaggtagcaacatagaaagcacaatagtgtaccaacaatggcagccaaaatagggggcggccttatgctccttgggctttctgcaagtgctgctacggcgaccattttcccgcaatgctcgcaagctcctatagcttcccttcttcccccgtacctctcaccagcggtgtcttcggtatgtgaaaacccaattcttcaaccctacaggatccaacaggcaatcgcagctggcatcttacctttatcacccttggtcctccaacaatcatcagccctattacaacagttacctttggtgcatttattggcacataacatcagggcacaacaactacaacaacttgtgctagcaaaccttgctgcctactctcagcaacagcagtttcttccattcaaccaactaggttcattgaactctgc

SEQ ID NO: 321323 - DNA, 396 bp, Zea mays
gaccaactagcaacatagaaagctcaatagtgtaccaacaatggcagccaaaatattgtgcctccttatgctccttggtctttctgcaagtgctgctacggcgaccattttcccgcaatgctcgcaagctcctatagcttcccttcttcccccgtacctctcaccagcggtgtcttcggtatgtgaaaacccaattcttcaaccctacaggatccaacaggcaatcacagctggcatcttacctttatcacccttgtccttcaacaatcattaaccctattacattaagtacctttggtgcatttattggcacataacatcagggcacaacaactacaacaacttgtgctagcaaaccttgctgcctactctcagcaacagcagtttcttccattc

SEQ ID NO: 321324 - DNA, 392 bp, Zea mays
gcttaaagcaatgccttttccagaatgtatagtatattcatgttgttctttgtgccatgtcaagtaatggtccgctgtgcagatggtgtgatggcttgcagcttaactgatctgttctcctgtaatagctaagaggtttgatagcccatttcgactgccaaagtgacactgcacaagcttcaaatgcgatctcgagcgatataccagggggcatgattcttccggtagcatcagaatcgtcctcgagcggcggcgttgttggtggcactggaaacggggagcaaaattgagtaaactgcgccctgtataaagcacgtttggatcttagggacctacgtatattcttgcttccaaacccccaccgttgtatgttcagttagggtaatacacac

SEQ ID NO: 321325 - DNA, 457 bp, Zea mays
catggtccgcgggcatagccctgacgcacaccgtggcactggcgtccgcagatcttttcctttcctaccgcctacgccgtcgtcgcccagaggcaataccatgatccggtctcggccggcgtcgcacctgacctaaccctgagccctgtgatatgccggttcatgtcggaggcagcaaggtggcggacccgacgccggccaggttggtggacctatcgcccgtaggcgacaggtcccgcgcctgctccaagaagaaccgccgccgccacaagaaggccgacgccgcctcttccgtgtcgcccatgcaaaggctcttcgacaccagcagggaggtcttcgccaactcctacccgggcttcgtaccgacgccggacgccgtctgccgcctatcgggcctcctcagtgagctgaagcctcgtgacgtcagggttgacccaagcatgtccgtcttcaagca

SEQ ID NO: 321326 - DNA, 418 bp, Zea mays
  unsure (1)..(418): unsure at all n locations
caaccaattaaccaattgcaacaacaatccttggcacatctaaccatacaaaccatcggaacacaacagcaacaacagttcctaccagcactgagccaactagatgtggtgaaccctgtcgcctacttgcaacagcaggtgcttgcatccaacccacttgctctggcaaacgtagctgcataccaacaacaacaacaattgcaacagtttctgccagcgctcagtcaactagccatggtgaaccctgccgcctacctacaacagcaacaactgctttcatctagccctctcgttgtgggtaatgcacctacatacctgcaacaacaattgctgcaacagattgtaccagctctgactcagctagctgtggcaaaccctgctgcctacttgcaacagctgcttncattcaaccaactga

SEQ ID NO: 321327 - DNA, 380 bp, Zea mays
gcaattagctcatcgactccagattggagaactcgacaccatgaaggtgctgatcgggggccttgctctcctggcgctcgctgcgagcgccgcctccagtacaagcggcggctgcggctgccagacaccaccgtttcatctaccgcctccgctctatatgccgcctccgttctatctgccgacgcagcagcagccgcagccatggcaataccccactcaaccaccgcagctaagcccgtgccagcagttcggatcctgcggcgtcggcagcgtcggcagcccgttcctgggccagtgcgtcgagttcctgaggcaccagtgcagcccggcggcgacgccctacggctcgccacagtgccaggcgctgcagcagcagtgct

SEQ ID NO: 321328 - DNA, 384 bp, Zea mays
caccaagcgaagctacctagcaacgacttaacaacaatggctaccaagatattagcccggcgtgcgcttcttgccctttttgtgagcgcaacaaatgcgttcattattccacaatgctcacttgctcctagtgccattataccacagttcctccgaccagttacttcaatgggcttcgaacacctagctgtgcaagcctacaggctacaacaagcgcttgcggcgagcgtcttacaacaaccaattaaccaattgcaacaacaatccttggcacatctaaccatacaaaccatcgcaacacaacagcaacaacagttcctaccagcactgagccaactagatgtggtgaaccctgtcgcctacttgcaacagcaggtgcttgca

SEQ ID NO: 321329 - DNA, 413 bp, Zea mays
ctgccagccaccgccgccggttcatctaccgccgccggtgcatctgccacctccggttcacctgccacctgcggggcatctcccaccgccggtccacctgccgccgccggtccacctgccaccgccggtccatgtgccgccgccggttcatctgccgccgccaccatgccactaccctactcaaccgccccggcctcagcctcatccccagacacacctatgcccgtgccaacagccgcatccaagcccgtgccagctgcagggaacctgcggcgttggcagcaccccgatcctgggccagtgcgtcgagtttctgaggcatcagtgcaacccgacggcgacgccctactgctcgcctcagtgccagtcgttgcggcagcagtgttgccagcagctcaggcaggtgaagccga

SEQ ID NO: 321330 - DNA, 432 bp, Zea mays
cgcacggagcgaagctacctagcaacgacttatcatcaatggctaccaagatattactccggctggctcttattgccgggtgtgtgagcgcaacaaatgcgttcattattccacaatgctcacttgctcctagtgccattataccacagttcctccgaccagttacttcaatgggcttctaacacctagctgtgcaagcctacaggctacaacaagcgcttgcggcgagcgtcttacaacaaccaattaaccaattgcaacaacaatccttggcacatctaaccatacaaaccatcgcaacacaacagcaacaacagttactaccagcactgagccaactagatgtggtgaaccctgtcgcctacttgcaacaacaggtgcttgcatccaacccacttgctctggcaaacgtagctgcataccaacaacaac

SEQ ID NO: 321331 - DNA, 448 bp, Zea mays
ccggcgctttatctactccagagcgcagaagaacccgatcgacaccatgagggtgttgctcgttgccctcgctctcctggctctcgctgcgagcgccacctccacgcatacaagcggcggctgcggctgccagccaccgccgccggttcatctaccgccgccggtgcatctgccacctccggttcacctgccacctccggtgcatctcccaccgccggtccacctgccgtcgccggtccacctgccaccgccggtccatgttgccgccgccggtcatctgccgccgccaccatgccactaccctactcaaccgccccggcctcagcctcatccccagccacacccatgcccgtgccaacagccgcatccaagcccgtgccagctgcagggaacctgcggcgttggcagcaccccgatcctgggccagtgcgtcgagttcctgaggcat

SEQ ID NO: 321332 - DNA, 425 bp, Zea mays
gagaccaacaagcaacatagaaagtggaatacagtagcaacaatagagcaacaatggcggccaagatattttccatccttatgctccttgctctttctgcatgtgttgctaacgcgaccatttttcctcaatactcacaagctcctatagctgcccttcttcccccataccttccatcaagcaatcgcaacaagcaacttacctttatcacccctgttctttcaacaatcgccagccctatctttggtgcagtcattggtacaaaccatcagggcacaacagctgcaacaactcgtgctaccagtgatcagccaagtagctctggcaaacctttctccctactctcagcaacaacaatttcttccattcaaccaactgtctacactgaaccctgctgcttatttacaacaaccacaactactacc

SEQ ID NO: 321333 - DNA, 418 bp, Zea mays
  unsure (1)..(418): unsure at all n locations
gaccaactagcaacatagaaagcacaatattgtaccaataatggcagccaaaatatttggccgcattatgctccttggtctttctgcaagtgctgctacggcgagcattttcccgcaatgctcacaagctcctatagcttcccttcttcccccatacctctcaccagcgatgtcttcagtatgtgaaaatccaattcttctaccctacaggatccaacaggcaatcgcagcaggcatcttacctttatcacccttgttcctccaacaatcatcagccctattacagcagttacctttggtgcatttattggcacaaaacatcagggcacaacaactacaacaactcgtgctagcaaaccttgctgcctactctcagcaacagcagttacctttggtgcatntgttggcacaaaacatc

SEQ ID NO: 321334 - DNA, 146 bp, Zea mays
gtgtcaagaaggtagcagggctcacaccagctagctggctgaatggtagtagttgttggtgctgtaaataagcaggagagttcaataataaagttttttgtctgatgtttgtggcttcccagaaataagaaagtacatttctagat

SEQ ID NO: 321335 - DNA, 427 bp, Zea mays
attgtgagcattcagaaacacacctagcgtaacgcactagcaacgacctaacaacaatggctgtcaaaacattatccctgcttgcgcttcttgccctttttgtgagtgcaacaaatgcgttcattattccacaatgctcacttgctccgagtgccattattccacagttcctccctccagttacttcaatgggcttcgaacacccagctgtgcaagcctataggctacaacaagcgcttgcggcgagcgtcttagaacaaccaattgcccaattacaacaacaatccttggcacatctaaccatacaaaccatcgcaacgcagcagcaacaagcactgagccacctagccgtggtgaaccctatcgcctacttgcaacaacagctgcttgcatccaacccacttgctttggcaaacgtagctgcata

SEQ ID NO: 321336 - DNA, 420 bp, Zea mays
attgagaccaactagcaacatagaaagcacaatagtgtaccaacaatggcagccggaagattttgcttccttatgctccttggtctttctgcaagtgctgctaccgcaaccattttcccacaatgctcacaagctcctatagcttcctttcttcccccatacctctcaccagcggtgtcttcagtatgtgaaaacccaattcttcaaccctacaggatccaacaggcaatcgcagcaggcatcttacctttatcacccttgttccttcaacaaccgtcagccctattacagcagttacctttggtgcatttgttggcacaaaacatcaaggcacaacaactacaacaacttgtgctaggaaaccttgctgcctactctcagcaacagcagtttcttccattcaaccaactggctgcattg

SEQ ID NO: 321337 - DNA, 421 bp, Zea mays
gagaccaactagcaacatagaaagcacaatagtgtaccaacaatggcagccaaaatattttgcctccttatgctccttggtctttctgcaagtgctgctacggcgaccattttcccgcaatgctcgcaagctcctatagcttcccttcttcccccgtacctctcaccagcggtgtcttcggtatgtgaaaacccaattcttcaaccctacaggatccaacaggcaatcacagctggcatcttacctttatcacccttgttcctccaacaatcatcagccctattacatcagttacctttggtgcatttatggcacaaaacatcaaggcacaacaactaccacaacttgtgctagcaaaccttgctgcctactctcagcaacagcagtttcttccattcaaccaactagctgcattgaactc

SEQ ID NO: 321338 - DNA, 401 bp, Zea mays
cagcattcaaaaacacaccaagctaagcgcactagcaacgacctaacaccaatggctaggaagatattagccctgcttgcgcttcttgcccttttagtgagcgcaacaaatgcgttcattattccacagtgctcacttgctcctagtgccagtattccacagttcctcccaccagttacttcaatgggcttcgaacatccagccgtgcaagcctacaggctacaactagcgcttgcggcgagcgccttacaacaaccaattgcccaattgcaacaacaatccttggcacatctaaccctacaaaccattgcaacgcaacaacaacaacaacagtttctgccatcactgagccacctagccgtggtgaaccctgtcacctacttgcaacagcagctgcttgc

SEQ ID NO: 321339 - DNA, 422 bp, Zea mays
cgaagctacctagcaacgacttaacaacaatggctaccaagatattagccctccttgcgcttcttgccctttttgtgagcgcaacaaatgcgttcattattccacaatgctcacttgctcctagtgccattataccacagttcctccgaccagttacttcaatgggcttcgaacacctagctgtgcaagcctacaggctacaacaagcgcttgcggcgagcgtcttacaacaaccaattaaccaattgcaacaacaatccttggcacatctaaccatacaaaccatcgcaacacaacagcaacaacagttcctaccagcactgagccaactagatgtggtgaaccctgtcgcctacttgcaacagcaggtgcttgcatccaacccacttgctctggcaaacgtagctgcataccaacaacaa

SEQ ID NO: 321340 - DNA, 270 bp, Zea mays
gccagctagctggtgtgagccctgctaccttcttgacacaaccacagttgttgccggggtaccagcacgctgcgcctaacgctggcaccctcttacaactgcaacaattgctgccattcaaccaacttgctttgacaaacccagcagcattctaccaacaacccatcattggtggtgccctcttttagatttcttatgagttatagttcaataataaagttttttgtctgatgtttgtggcttcccagaaataagaaagtacatttctag

SEQ ID NO: 321341 - DNA, 424 bp, Zea mays
caatagtgtaccaacaatggcagccaaaatattttgcctccttatgctccttggtcttgctgcaagtgctgctacggcgaccattttcccgcaatgctcgcaagctcctatagcttcccttcttcccccgtacctctcaccagcggtgtcttcggtatgtgaaaacccaattcttcaaccctacaggatccaacaggcaatcacagctggcatcttacctttatcacccttgttcctccaacaatcatcagccctattacatcagttacctttggtgcatttattggcacaaaacatcagggcacaacaactacaacaacttgtgctagcaaaccttgctgcctactctcagcaacagcagtttcttccattcaaccaactagctgcattgaactctgcttcttatttgcaacaacaacaacta

SEQ ID NO: 321342 - DNA, 366 bp, Zea mays
cccacgcgtacgggttggcttcttctccccctgcggttcgggttcgggttcgtgaggggcttcggtgttcggtttggtgggtgagcggatcgagatggcggcgtcagatgttgagtaccgatgcttcgtcggcggcctcgcctgggccacggacgaccactctctacacaacgccttcagcacctacggcgaggtcctcgagtccaagatcatcctcgatcgggagacgcagaggttccgcggcttcggcttagtcaccttctccacggaggaggcgatgcggaacgccatcgagggcatgaacggcacggagctggacggccgtaacatcaccgtcaacgaggcccagtcccgctgatgtcgtgg

SEQ ID NO: 321343 - DNA, 410 bp, Zea mays
ggctaccaagatattagccctccttgcgcttcttgccctttttgtgagcgcaacaaatgcgttcattattccacaatgctcacttgctcctagtgccattattccacagttcctcccaccagttacttcaatgggcttcgaacacctagctgtgcaagccaacatgcaacaacaagcgcttgcggcgagcgtcttacaacaaccaattgcccaattgcaacaacaatccttgccacatctaacaatacaagccatcacaacgcaacagcaacaacagttcctaccagcactgagccacctagccatggtgaaccctgccgcctacttgcaagagcagctgcttgcatccaacccacttgctctggcgaacgtagttgcaaaccagcaacaacaacagctacaacagtttc

SEQ ID NO: 321344 - DNA, 158 bp, Zea mays
ggaattcccgggatgttcagcattcaaaaacagcaccaagcgaagcgcactatcaacttcctaacaccaatggctaccaagatatgagccctccttgcgcttcttgcccttttagtgagcgcaacaaatgcgttcattattccacagtgctcacttgc

SEQ ID NO: 321345 - DNA, 433 bp, Zea mays
gaaagcacaatagtgtaccaacaatggcagccaaaatattttgcttccttatgctcctgggtctttctgcaagtgttgctaccgcaaccattttcccacaatgctcacaagctcctatagcttcccttcttcccccatacctctcaccagcggtgtcttcaatgtgtgaaaccccaattgttcaaccctacaggatccaacaggcaatcgcaacaggcatcttaccattatcacccttgttcctccaacaaccgtcagccctattacagcagttacctttggtccatttggtggcacaaaacatcaaggcacaacaactacaacaacttgtgctagcaaaccttgctgcatactctcagcaacatcagtttcttccattcaaccaactggctgcattgaactctgctgcttatttgcaacaacaattaccatt

SEQ ID NO: 321346 - DNA, 428 bp, Zea mays
gcaacatagaaagcacaatagcgtaccaacaatggcagccaaaatattttgcctcctggtgctccttggtctttctgcaagtgctgctacggcgaccattttcccgcaatgctcgcaagctcctatagcttcccttcttcccccgtacctctcaccagcggtgtcttcggtatgtgaaaacccaattcttcaaccctacaggatccaacaggcaatcacagctggcatcttacctttatcacccttgttcctccaacaatcatcagccctattacatcagttacctttggtgcattcattggcacaaaacatcagggcacaacaactacaacaacttgtgctagcaaaccttgctgcctactctcagcaacagcagtttcttccattcaaccaactagctgcattgaactctgcttcttatttgcaac

SEQ ID NO: 321347 - DNA, 403 bp, Zea mays
  unsure (1)..(403): unsure at all n locations
cggcaacattagaaagcacaatagtgtaccaacaatggcagccaaaatattttgcttccttatgctccttggtctttctgcaagtgttgctaccgcaaccattttcccacaatgctcacaagctcctatagcttcccttcttcccccatacctctcaccagcggtgtcttcaatgtgtgaaaccccaattgttcaaccctacaggatccaacaggcaatcgcaacaggcatcttaccattatcacccttgttcctccaacaaccgtcagccctattacagcagttacctttggtccatttggtggcacaaaacatcanggcacaacaactacaacaactngtgctagcanaccttgctgcatactctcagcaacatcaagttcttccattcaaccaaactgct

SEQ ID NO: 321348 - DNA, 311 bp, Zea mays
gagaccaacaagcaacatagaaagtggaatccagtagcaacaacagagcaacaatggcgaccaggatattttccctccttatgctccttgctctttctgcatgtgttgctaacgcgacaattttccctcaatgctcacaagctcctatagcttcccttcttcccccataccttccatcaatgatagcttcagtatgtgaaaacccagctcttcagccctataggctccaacaagcaatcgcagcaagcaacatacctttatcacccttgttgtttcaacaatcgccagccctatctttggtgcagtcattg

SEQ ID NO: 321349 - DNA, 425 bp, Zea mays
gcaacatagaaagcacaatagtgtaccaacaatggcagccaaaatattttgcttccgtatgctccttggtctttctgcaagtgttgctaccgcaaccattttcccacaatgctcacaagctcctatagcttcccttcttcccccatacctctcaccagcggtgtcttcaatgtgtgaaaccccaattgttcaaccctacaggatccaacaggcaatcgcaacaggcatcttaccattatcacccttgttcctccaacaaccgtcagccctattacagcagttacctttggtccatttggtggcacaaaacatcagggcacaacaactacaacaacttgtgctagcaaaccttgctgcatactctcagcaacatcagtttcttccattcaaccaactggctgcattgaactctgctgcttatttgc

SEQ ID NO: 321350 - DNA, 432 bp, Zea mays
attttgagcattcagaaacacaccaagcgaagcacattagcaacaacctaacaacaatggctaccaagatattatccctccttgcgcttcttgcgctttttgcgagcgcaacaaatgcgttcattattccacaatgctcacttgctccaagttccattattacacagttcctcccaccagttacttcaatgggcttcgaacacccagctgtgcaagcctataggctacaacaagcaattgcggcgagcgtcttacaacaaccaatttcccagttgcaacaacaatccttggcacatctaacaatacaaaccatcgcaacgcaacagcaacaacaattcctaccagcactgagccacctagccatggtgaaccctgccgcctacttgcaacagcagttgcttgcatcaaacccacttgctctggcaaacgtaa

SEQ ID NO: 321351 - DNA, 446 bp, Zea mays
  unsure (1)..(446): unsure at all n locations
attttgagcattcagaaacacacctagcgaagcgcactagcaacgacctaacaacaatggctaccaagatattatccctctttgcgcttcttgccctttttgtgagcgcaacaaatgcgttcattattccacaatgctcacttgctcctagtgccattattccacagttcctccctccagttacttcaatgggcttcgaacacccagctgtgcaagcctacaggctacaacaagcgcttgcggcgagcgtcttacaacaaccaattgcccaattacaacaacaatccttggcacatctaaccatacaaaccatcgcaacgcaacagcaacaacaatttctaccagcactgagccaactagctgtggtgaaccctgtcgcctacttgcaacagcagttgcttgcatccaacccacttggtctggcnacatagttgcataccaacaac

SEQ ID NO: 321352 - DNA, 415 bp, Zea mays
ggcaccaaatcaaatctgcaacatcaattatctaactccaaaaaccatgaagctggtgcttgtggttcttgctttcattgctttagtatcaagtgtttcttgtacacagacaggcggctgcagctgtggtcaacaacaaagccatgagcagcatcatcatccacaacaacatcatccacaaaaacaacaacatcaaccaccaccacaacatcaccagcagcagcaacaccaacaacaacaagttcacatgcaaccacaaaaacatcagcaacaacaagaagttcatgttcaacaacaacaacaacaaccgcagcaccaccaccaacaacaacaacaacagcaccaacaacaacatcaatgtgaaggccaacaacaacatcaccaacaatcacaaggccatgtgcaacaacacgaa

SEQ ID NO: 321353 - DNA, 420 bp, Zea mays
attttgcctccttatgctccttggtctttctgcaagtgctgctacggcgaccatttgtgccgcaatgctcgcaagctcctatagcttcccttcttcccccgtacctctcaccagcggtgtcttcggtatgtgaaaacccaattcttcaaccctacaggatccaacaggcaatcacagctggcatcttacctttatcacccttgttcctccaacaatcatcagccctattacatcagttacctttggtgcatttattggcacaaaacatcagggcacaacaactaccacaacttgtgctagcaaaccttgctgcctactctcagcaacagcagtttcttccattcaaccaactagctgcattgaactgctgttcttaattgcaacaacatctactaccattcagccagctacctgctgcct

SEQ ID NO: 321354 - DNA, 426 bp, Zea mays
cagaaacacacctagcgaagcgcactatcaacgacctaacaacaatggcttccaggacgtgtatccctccttgcgcttcttgccctttttgtgagtgcaacaaatgcgttcattattccacaatgctcacttgctccgagtgccattattccacagttcctccctccagttacttcaatgggcttcgaacacccagctgtgcaagcctataggctacaacaagcgcttgcggcgagcgtcttagaacaaccaattgcccaattacaacaacaatccttggcacatgtaaccatacaaaccatcgcaacgcatcagcaacaagcactgagccacctagccgtggtgaaccctatcagctacttgcaacaacagctgcttgcatccaacccacttgctttggcaaacgtagctgcataccatcaacaa

SEQ ID NO: 321355 - DNA, 286 bp, Zea mays
gaaagcacaatagtgtaccaacaatggcagccaagatattttgcttccttatgctccgtggtctttctgcaagtgttgctaccgcaaccattttcccacaatgctcacaagctcctatagcttcccttcttcccccatacctctcaccagcggtgtcttcaatgtgtgaaaccccaattgttcaaccctacaggatccaacaggcaatcgcaacaggcatcttaccattatcacccttgttccttcaacaaccgtcagccctattacagcagttacctttggtcca

SEQ ID NO: 321356 - DNA, 411 bp, Zea mays
caactagcaacatagaaagcacaatagtgtaccaacaatggcagccaaaatattgtgcggtccttatgctccttggtctttctgcaagtgctgctacggcgaccattttcccgcaatgctcgcaagctcctatagcttcccttcttcccccgtacctctcaccagcggtgtcttcggtatgtgaaaacccaattcttcaaccctacaggatccaacaggcaatcacagctggcatcttacctttatcacccttgttcctccaacaatcatcagccctattacatcagttacctttggtgcatttattggcacaaaacatcaaggcacaacaactacaacaacttgtgctagcaaaccttgctgcctactctcagcaacagcagtttcttccattcaaccaactagctgcat

SEQ ID NO: 321357 - DNA, 418 bp, Zea mays
gaccattagctttatctactccagagcgcagaagaacccgatcgacaccatgagggtggtgctcgttgccctcgctctcctggctctcgctgcgagcgccacctccacgcatacaagcggcggctgcggctgccagccaccgccgccggttcatctaccgccgccggtgcatctgccacctccggttcacctgccacctccggtgcatctcccaccgccggtccacctgccgccgccggtccacctgccaccgccggtccatgtgccgccgccggttcatctgccgccgccaccatgccactaccctactcaaccgccccggcctcagcctcatccccagccacacccatgcccgtgccaacagccgcatccaagcccgtgccagctgcagggaacctgcggcgttggcagcaccccg

SEQ ID NO: 321358 - DNA, 106 bp, Zea mays
ctgggtttgtcaaagcaagttggttgaatggcagcaacccatcattggtggtgccctcttttagatttctgatgggttatagttcaatgataaagttttttatctg

SEQ ID NO: 321359 - DNA, 398 bp, Zea mays
tttcagcattcaaaaacacaccaagcgaagcgcactagcaacgacctaacaccaatggctaccaagatattagccctccttgcgcttcttgcccttttagtgagcgcaacaaatgcgttcattattccacagtgctcacttgctcctagtgccagtattccacagttcctcccaccagttacttcaatgggcttcgaacatccagccgtgcaagcctacaggctacaactagcgcttgcggcgagcgccttacaacaaccaattgcccaattgcaacaacaatccttggcacatctaaccctacaaaccattgcaacgcaacaacaacaacaacagtttctgccatcactgagccacctagccgtggtgaaccctgtcacctacttgcaacagcagct

SEQ ID NO: 321360 - DNA, 404 bp, Zea mays
cttgtatcagtaccatcaatcatcattcatcttagtagtataggcaccaaatcaaatcgtcggcatcaattatctaactgcaaaaaccatgaagctggtgcttgtggttcttgctttcattgctttagtatcaagtgtttcttgtacacagacaggcggctgcagctgtggtcaacaacaaagccatgagcagcaacatcatccacaacaacatcatccacaaaaacaacaacatcaaccactaccacaacatcaccagcagcagcaacaccaacaacaacaagttcacatgcaaccacaaaaacatcagcaacaacaaggagttcatgttcaacaacaacaactacaaccgcagcaccaacaacaacaacaacaacaacagcaccaacaacaacatcaatgtg

SEQ ID NO: 321361 - DNA, 185 bp, Zea mays
ccgacccaagcgacgcgtactagctgcattgaactctgcttcttatttgcaacaacaacaactaccattcagccggctgcctgctgcctacccccagcaatttcttccattcaaccaactggcagcattgaactctcctgcttatttacagcagcaacaactactaccattcagccagctagctg

SEQ ID NO: 321362 - DNA, 360 bp, Zea mays
gaccaacaagcaacatagaaagtggaatccagtagcatcaacagagcatcaatggcgagcaagatattatccctccttatgctccttgctctttctgcatgtgttgctaacgcgacaattttacctcaatgctcacaagcttctatagcttcccttcttcccccatacctttcatcaatgatagcttcagtatgtgaaaacccagctcttcagccctatacgctccaacaagcaatcgcagcaagcaacatacctttatcacccttgttgattcaacaatcgccagccctatctatggtgcagtcattgctacaaaccatcagggcacagcagctgcagcaactcgggctacctgtgatc

SEQ ID NO: 321363 - DNA, 426 bp, Zea mays
  unsure (1)..(426): unsure at all n locations
ttttgagcattcagaaacacaccaagctaagcacattagcaacaacctaacaacaatggctaccaagatattatccctccttgcgcttcttgcgctttttgcgagcgcaacaaatgcgttcattattccacaatgctcacttgctccaagttccattattacacagttcctcccaccagttacttcaatgggcttcgaacacccagctgtgcaagcctataggctacaacaagcaattgcggcgagcgtcttacaacaaccaatttcccagttgcaacaacaatccttggcacatctaacaatacaaaccatcgcaacgcaacagcaacaacaattcctaccagcactgagccacctagccatggtgaaccctgccgnctacttgcaacagcagttgcttgcatcaaacccacttgctctggcaaa

SEQ ID NO: 321364 - DNA, 406 bp, Zea mays
ctggacgtcagcctagcaattagctcatcgactccagattggagaactcgacaccatgaaggtgctgatcgttgcccttgctctcctggcgctcgctgcgagcgccgcctccagtacaagcggcggctgtggctgccagacaccaccgtttcatctaccgcctccgttctatatgccgcctccgttctatctgccgccgcagcagcagccgcagccatggcaataccccactcaaccaccgcagctaagcccgtgccagcagttcggatcctgcggcgtcggcagcgtcggcagcccgttcctgggccagtgcgtcgagttcctgaggcaccagtgcagcccggcggcgacgccctacggctcgccacagtgccaggcgctgcagcagcagtgctgccaccagatc

SEQ ID NO: 321365 - DNA, 447 bp, Zea mays
attgtgagcattcagaaacacaccaagcgaagctacctagcaacgacttaacaacaatggctaccaagatattagccctccttgcgcttcttgccctttttgtgagcgcaacaaatgcgttcattattccacaatgctcacttgctcctagtgccattataccacagttcctccgaccagttacttcaatgggcttcgaacacctagctgtgcaagcctacaagctacaacaagcgcttgcggcgagcgtcttacaacaaccaattaaccaattgcaacaacaatccttggcacatctaaccatacaaaccatcgcaacacaacagcaacaacagttcctaccagcactgagccaactagatgtggtgaaccctgtcgcctacttgcaacagcaggtgcttgcatccaacccacttgctctggcaaacgtagctgcataccaacaac

SEQ ID NO: 321366 - DNA, 445 bp, Zea mays
caggcaatcacagctggcatcttacctttatcacccttgttcctccaacaatcatcaggcctattacatcagttacctttggtgcatttattggcacaaaacatcagggcacaacaactacaacaacttgtgctagcaaaccttgctgcctactctcagcaacagcagtttcttccattcaaccaactagctgcattgaactctgcttcttatttgcaacaacaacaactaccattcagccagctacctgctgcctacccccagcaatttcttccattcaaccaactggcagcattgaactctcctgcttatttacagcagcaacaactactaccattcagccagctagctggtgtgagccctgctaccttcttgatacaaccacagttgttgccgttctaccagcacgctgcgcctaacgctggcaccctcttacaactgcaac

SEQ ID NO: 321367 - DNA, 223 bp, Zea mays
cgaactagcaacatacatagtgaagtacactagcaacatcttagcaccaatggcagccaagatttttgccatccttgccctccttgctctttcagcaagcgttgctaccgcgactattattccacaatgctcacaacaatacctctctccggtgacagccgcgagatttgaatacccaactatacaatcctacaggctacaagaggccatcgcagcaagcatc

SEQ ID NO: 321368 - DNA, 442 bp, Zea mays
  unsure (1)..(442): unsure at all n locations
agcaaagcggcagtgcgtagagaggatcgtcgaacagaacagcatgaagatggtcatcgttctcgtcgtgtgcctggctctgtcagctgccagcgcctctgcaatgcagatgccctgcccctgcgcggggctgcagggcttgtacggcgctggcgccggcctgacgacgatgatgggcgccggcgggctgtacccctacgcggagtacctgaggcagccgcagtgcagcccgctggcggcggcgccctactacgccgggtgtgggcagccgagcgccatgttccagccgctccggcaacagtgctgccagcagcagatgaggatgatggacgtgcagtccgtcgcgcagcagctgcagatgatgatgcagcttgagcgtgccgctgccgncagcagcagcctgtacgagccagctctgatgcagcagcagcagcagctgctg

SEQ ID NO: 321369 - DNA, 417 bp, Zea mays
ggttcgggttcgggttcgtgaggttctccggggttcggtttcgtgggtgagcggatcgagatggcggcgtcggatgttgagtaccgctgcttcgtcggcggcctcgcctgggccacggacgaccactccctccacaacgccttcagcacctacggcgaggtcctcgagtccaagatcatcctcgatcgggagacgcagaggtcccgcggcttcggcttcgtcaccttctccacggaggaggcgatgcggaacgccatcgagggcatgaacggcaaggagctggacggccgcaacatcaccgtcaacgaggcccagtcccgcggcggccgtggaggcggcggcggcggcgggtacggtggtggccgtggaggcggcggctacggcggtggcgggcgccgtgatggcggcggcggctac

SEQ ID NO: 321370 - DNA, 404 bp, Zea mays
attttgagcattcagaaacacaccaagcgaagcgcactagcaacgacctaacaacaatggctaccaagatattagccctccttgcgcttcttgccctttttgtgagcgcaacaaatgcgttcattattccacaatgctcacttgctcctagtgccattattccacagttcctcccaccagttacttcaatgggcttcgaacacctagctgtgcaagccaacatgcaacaacaagcgcttgcggcgagcgtcttacaacaaccaattgcccaattgcaacaacaatccttgccacatctaacaatacaagccatcacaacgcaacagcaacaacagttcctaccagcactgagccacctagccatggtgaaccctgccgcctacttgcaagagcagctgcttgca

SEQ ID NO: 321371 - DNA, 468 bp, Zea mays
cagggcacaacaactacaacaacttgtgctagcaaaccttgctgcctactctcagcaacagcagtttcttccatgcaaccaactagctgcattgaactctgcttcttatttgcaacaacaacaactaccattcagccagctacctgttgcctacccccaacaatttcttccattcaaccaactggcagcattgaactctcctgcttatttacagcagcaacaactactaccattcagccagctagctggtgtgagccctgctaccttcttgacacaaccacagttgttgccgttctaccagcacgctgcgcctaacgctggcaccctcttacaactgcaacaattgctgccattcaaccaacttgctttgacaaacctagcagtgttctaccaacaacccatcattggtggtgccctcttttagatttcttatgagttatagttcaataataaagttttttggctgat

SEQ ID NO: 321372 - DNA, 446 bp, Zea mays
cccatacctctcaccagcggtgtcttcagtatgtgaaaacccaattcttcaaccctacaggatccaacaggcaatcgcagcaggcatcttacctttatcacccttgttcctccaacaaccgtcagccctattacagcagttacctttggtgcatttgttggcacaaaacatcaaggcacaacaactacaacaacttgtgctaggaaaccttgctgcctactctcagcaacagcagtttcttccattcaaccaactggctgcattgaactctgctgcttatttgcaacaacaactaccattcagtcagctagctgctgcctacccccagcaatttcttccattcaaccaactggcagcattgaactctgctgcttatttacaacagcaacagctaccaccattcagccagctagctgatgtgagccctggtgccttcttgacacaac

SEQ ID NO: 321373 - DNA, 446 bp, Zea mays
attgagaccaacaagcaacatagaaagtggaatccagtagcaacaatagagcaacaatggcgaccaagatacttgccctccttatgctccttgctctttctgcatgtgttgctaacgcgacaattttccctcaatgctcacaagctcctatagcttcccttcttcccccataccttccatcaatgatagcttcagtatgtgaaaacccagctcttcaaccctataggctccaacaagcaatcgcagcaagcaacatacctttatcacccttgtttcaacaatcgccagccctatctttggtgcagtcattggtacaaaccatcaaggcacagcagctgcagcaactcgtgctacctgtgatcaaccaagtagctctggcaaacctttctccctactatcagcaacaacaatttcttccattcaaccaactatctacactgaaccct

SEQ ID NO: 321374 - DNA, 444 bp, Zea mays
tccagatcagcaaagcggcagtgcgtatagaggatcgtcgaacagaacagcatgaagatggtcatcgttctcgtcgtgtgcctggctctgtcagctgccagcgcctctgcaatgcagatgccctgcccctgcgcggggctgcagggcttgtacggcgctggcgccggcctgacgacgatgatgggcgccggcgggctgtacccctacgcggagtacctgaggcagccgcagtgcagcccgctggcggcgggccctactacgccgggtgtgggcagccgagcgccatgttccagccgctccggcaacagtgctgccagcagcagatgaggatgatggacgtgcagtccgtcgcgcagcagctgcagatgatgatgcagcttgagcgtgccgctgccggcagcagcagcctgtacgagccagctctgatgcagcagcagcagcagc

SEQ ID NO: 321375 - DNA, 442 bp, Zea mays
attgagaccaactagcaacatagaaagcacaatagtgtaccaacaatggcagccaaaagattttgcctccttatgctccttggtctttctgcaagtgctgctacggcgaccattttcccgcaatgctcgcaagctcctatagcttcccttcttcccccgtacctctcaccagcggtgtcttcggtatgtgaaaacccaattcttcaaccctacaggatccaacaggcaatcgcagctggcatcttacctttatcacccttgttcctccaacaatcatcagccctattacaacagttacctttggtgcatttattggcacaaaacatcagggcacaacaactacaacaacttgtgctagcaaaccttgctgcctactctcagcaacagcagtttcttccattcaaccaactaggttcattgaactctgcttcttatttgcaac

SEQ ID NO: 321376 - DNA, 428 bp, Zea mays
aacatagaaagcacaatagtgtaccaacaatggcagccaaaatattttgcttccttatgctccttggtctttctgcaagtgttgctaccgcaaccattttcccacaatgctcacaagctcctatagcttcccttcttcccccatacctctcaccagcggtgtcttcaatgtgtgaaaccccaattgttcaaccctacaggatccaacaggcaatcgcaacaggcatcttaccattatcacccttgttcctccaacaaccgtcagccctattacagcagttacctttggtccatttggtggcacaaaacatcagggcacaacaactacaacaacttgtgctagcaaaccttgctgcatactctcagcaacatcagtttcttccattcaaccaactggctgcattgaactctgctgcttatttgcaacac

SEQ ID NO: 321377 - DNA, 435 bp, Zea mays
aatattttgagcattcagaaacacaccaagcgaagcgcactagcaacgacctaagaacaatggctaccaagatattagccctccttgcgcttcttgccctttttgtgagcgcaacaaatgcgttcattattccacaatgctcacttgctcctagtgccattattccacagttcctcccaccagttacttcaatgggcttcgaacacctagctgtgcaagccaacatgcaacaacaagcgcttgcggcgagcgtcttacaacaaccaattgcccaattgcaacaacaatccttgccacatctaacaatacaagccatcacaacgcaacagcaacaacagttcctaccagcactgagccacctagccatggtgaaccctgccgcctacttgcaagagcagctgcttgcatccaacccacttgctctggcgaacgtag

SEQ ID NO: 321378 - DNA, 441 bp, Zea mays
cttcccttcttcccccgtacctctcaccagcggtgtcttcggtatgtgaaaacccaaggcttcaaccctataggatccaacaggcaatcgcagctggcatcttacctttatcacccttgttcctccaacaatcatcagccctattacagcagttacctttggtgcatttattggcacaaaacatcagggcacaacaactacaacaacttgtgctagcaaaccttgctgcctactctcagcaacaacagtttcttccattcaaccaactagctgcattgaactctgcttcttatttgcaacaacaacaactaccattcagccagctatctgctgcctacccccagcaatttcttccattcaaccaactgacagctttgaactctcctgcttatttacagcagcaacaactactaccattcagccagctagctggtgtgagcc

SEQ ID NO: 321379 - DNA, 282 bp, Zea mays
  unsure (1)..(282): unsure at all n locations
cggacgcgtgggtttcttatgagttatagttcaataataaatctaaaagaggtctcttgatatttataattttntgccgggcattgtaagttgcattttacctttcattccctatctcctgcaactattattatgtttattacatgtgctacctttggtgcctctattcatacataccttactgctacaacaacttcaactacttgtgctagctgacttcgctgactactctcagctacaacaatttttcctactcaatcaactgtattcatttgactatgc

SEQ ID NO: 321380 - DNA, 449 bp, Zea mays
gaccaacaagcaacatagaaagtggaatccagtagcaacaacagagcaacaatggcgagcaagatattttccctccttatgctccttgctctttctgcatgtgttgctaacgcgacaattttccctcaatgctcacaagctcctatagcttcccttcttcccccataccttccatcaatgatagcttcagtatgtgaaaacccagctcttcagccctataggctccaacaagcaatcgcagcaagcaacatacctttatcacccttgttgtttcaacaatcgccagccctatctttggtgcagtcattggtacaaaccatcaaggcacagcagctgcagcaactcgtgctacctgtgatcaaccaagtagctctggcaaacctttctccctactctcagcaacaacaatttcttccattcaaccaactgtctacactgaaccctgctgt

SEQ ID NO: 321381 - DNA, 447 bp, Zea mays
ctcagcaacaacagtttcttccattcaaccaactagctgcattgaactctgcttcttagttgcaacaacaacaactaccattcagccagctatctgctgcctacccccagcaatttcttccattcaaccaactgacagctttgaactctcctgcttatttacagcagcaacaactactaccattcagccagctagctggtgtgagccctgctaccttcttgacacaaccacaattgttgccgttctaccagcacgctgcgcctaacgctggcaccctcttacaactgcaacaattgctgccattcaaccaacttgctttgacaaacccaacagcattctaccaacaacccatcattggtggtgccctcttttagatttcttatgagttatagttcaataataaagttttttgtctgatgtttgtggcttcccagaaataagaaagta

SEQ ID NO: 321382 - DNA, 414 bp, Zea mays
gcagcaagcaacatacctttatcgcccttgttgtttcaacaatcgccagccctatctggggtgcagtcattggtacaaaccatcagggcacaacagctgcagcaactcgtgctacctctgatcaaccaagtagctctggcaaacctttctccctactctcagcaacaacaatttcttccattcaaccaactgtctacactgaaccctgctgcttatttgcagcaacaactattaccatttagccagctagctactgcctactctcagcaacaacaacttcttccatttaaccaattggccgcactgaaccccgctgcttatttgcagcagcaaatactactaccatttagccagctagctgcatcaaaccgagcttacttcttgacacagcaacagttgctgcctttctaccag

SEQ ID NO: 321383 - DNA, 435 bp, Zea mays
  unsure (1)..(435): unsure at all n locations
gctcacttgctccaagttccattattacacagttcctcccaccagttacttcaatgggcttcgaacacccagctgtgcaagcctataggctacaacaagcaattgcggcgagcgtcttacaacaaccaatttcccagttgcaacaacaatccttggcacatctaacaatacaaaccatcgcaacgcaacagcaacaacaattcctaccagcactgagccacctagccatggtgaaccctgccgcctacttgcaacagcagttgcttgcatcaaacccacttgctctggcaaacgtagttgcaaaccagccacaacaacagctgcaacagtttctgccagcgctcagtcaactagccatggtgaaccctgccgnctacctacaacagcaacaactgctttcatctagcccgctcgctgtggccaatgcacctacat

SEQ ID NO: 321384 - DNA, 442 bp, Zea mays
cagaaacacaccaagcgaagcacattatcaacaacctaacaacaatggctaccaagatgttatccctccttgcgcttcttgcgctttttgcgagcgcaacaaatgcgttcattattccacaatgctcacttgctccaagttccattattacacagttcctcccaccagttacttcaatgggcttcgaacacccagctgtgcaagcctataggctacaacaagcaattgcggcgagcgtcttacaacaaccaatttcccagttgcaacaacaatccttggcacatctaacaatacaaaccatcgcaacgcaacagcaacaacaattcctaccagcactgagccacctagccatggtgaaccctgccgcctacttgcaacagcagttgcttgcatcaaacccacttgctctggcaaacgtagttgcaaaccagccacaacaaca

SEQ ID NO: 321385 - DNA, 442 bp, Zea mays
gagaccaactagcaacatagaaagcacaatagtgtaccaacaatggcagccaaagtaggttgcttccttatgctccttggtctttctgcaagtgttgctaccgcaaccattttcccacaatgctcacaagctcctatagcttcccttcttcccccatacctctcaccagcggtgtcttcaatgtgtgaaaccccaattgttcaaccctacaggatccaacaggcaatcgcaacaggcatcttaccattatcacccttgttcctccaacaaccgtcagccctattacagcagttacctttggtccatttggtggcacaaaacatcagggcacaacaactacaacaacttgtgctagcaaaccttgctgcatactctcagcaacatcagtttcttccattcaaccaactggctgcattgaactctgctgcttatttgcaacaac

SEQ ID NO: 321386 - DNA, 441 bp, Zea mays
caactagcaacatagaaagcacaatagtgtaccaacaatggcagccaaaatattgtgcgtgcttatgctccttggtctttctgcaagtgctgctacggcgaccattttcccgcaatgctcgcaagctcctatagcttcccttcttcccccgtacctctcaccagcggtgtcttcggtatgtgaaaacccaattcttcaaccctacaggatccaacaggcaatcacagctggcatcttacctttatcacccttgttcctccaacaatcatcagccctattacatcagttacctttggtgcatttattggcacaaaacatcagggcacaacaactacaacaacttgtgctagcaaaccttgctgcctactctcagcaacagcagtttcttccattcaaccaactagctgcattgaactctgcttcttatttgcaacaacaaca

SEQ ID NO: 321387 - DNA, 441 bp, Zea mays
gcaacatagaaagtagaatccattagcaacaatagagcaacaatggcgaccaagatatgttccctccttatgctccttgctctttctacatgtgttgctaacgcgacaattttccctcaatgctcacaagctcctatagcttcccttcttcccccataccttccatcaattatagcttcagtatgtgaaaacccagctcttcaaccatataggcttcaacaagcaatcgcagcaagcaacatacctttatcgcccttgttgtttcaacaatcaccagccctatctttggtgcagtcattggtacaaaccatcagggcacaacagctgcagcaactcgtgctacctgtgatcaaccaagtagctctggcaaacctttctccctactctcagcaacaacaatttcttccattcaaccaactgtctacactgaaccctgctgct

SEQ ID NO: 321388 - DNA, 327 bp, Zea mays
cccacgcgtccgcttctctacgtggtttatcatgacgcgcatcaccatttgatgctcgctatgatgcttgcaaccgtcgatgcccctattgccttgtcagtgccgataccagcgcatagacgctcagatctcctatctagtcccgtagccagacgggacgcccaaattggcaggcttagctcgaagtgcaatgcctaccgactcggtggcgcggtggctcggcggggcaatcttcgcggctcgcccgtagcgacgcagatcgtcctcttcgcatcccgcttgcgtgcgatcctgcgcgccatacagcagcacccaacgcagagcgcg

SEQ ID NO: 321389 - DNA, 451 bp, Zea mays
cccacgcgtccgcaactagcaacatagaaagcacaatagtgtaccaacaatggcagccaaagtattttgcctccttatgctccttggtctttctgcaagtgctgctacggcgaccattttcccgcaatgctcgcaagctcctatagcttcccttcttcccccgtacctctcaccagcggtgtcttcggtatgtgaaaacccaattcttcaaccctacaggatccaacaggcaatcacagctggcatcttacctttatcacccttgttcctccaacaatcatcagccctattacatcagttacctttggtgcatttattggcacaaaacatcagggcacaacaactacaacaacttgtgctagcaaaccttgctgcctactctcagcaacagcagtttcttccattcaaccaactagctgcattgaactctgcttcttatttgcaacaacaa

SEQ ID NO: 321390 - DNA, 421 bp, Zea mays
cggaattcccggagttacctttggtgcatttattggcacaaaacatcagggcacatcaactacaacaacttgtgctagcaaaccttgctgcctactctcagcaacagcagtttcttccattcaaccaactagctgcattgaactctgcttcttatttgcaacaacaaatactactaccatttagccagctagctgcagcaaaccgtgcttccttcttgacacagcaacagttgctgcctttctaccagcagtttgcggctaaccccgcaaccctcttacaactacaacaattgttgccctttgtccaacttgctttgacagacccagcgggcttctaccaacaacacatcattggtggtgccctctttaaattgcttattagttgtaattcattaataaaggttttttggatgatgtatgt

SEQ ID NO: 321391 - DNA, 169 bp, Zea mays
ctcatgctcaagttcgtagtcaggtcgatttaaaccatcaccaccatttctagcaagagggtacctatcatagatactctttcgactcacgacaaccacatgtacaaggacgttattcaacaacatgccatcaatgccagaagagttcatggacaccctgtccatctta

SEQ ID NO: 321392 - DNA, 449 bp, Zea mays
gttggtacactattacagcagttacctttggtgcatttgttggcacaaaacatcaaggcacaacaactacaacaacttgtgctaggaaaccttgctgcctactctcagcaacagcagtttcttccattcaaccaactggctgcattgaactctgctgcttatttgcaacaacaactaccattcagtcagctagctgctgcctacccccagcaatttcttccattcaaccaactggcagcattgaactctgctgcttatttacaacagcaacagctaccaccattcagccagctagctgatgtgagccctgttgccttcttgacacaacaacagttgttgccgttctacctgcacgctgcgcctaacgctggcaccctcttacaactgcaacaattgctgccattcaaccaacttgctttgacaaacccaacaacgttctaccaacaacc

SEQ ID NO: 321393 - DNA, 444 bp, Zea mays
gcaacatagaaagcacaatagtgtaccaacaatggcagccaaaatattttgcctgctgatgctccttggtatttctgcaagtgctgctacggcgaccattttcccgcaatgctcacaagctcctatagcttcccttcttcccccgtacctctcaccagcggtgtcttcggtatgtgaaaacccaattcttcaaccctacaggatccaacaggcaatcgcagctggcatcttacctttatcacccttgttcctccaacaatcatcagccctattacagcagttacctttggtgcatttattggcacaaaacatcagggcacaacaactacaacaacttgtgctagcaaaccttgctgcctactctcagcaacagcagtttcttccattcaaccaactagctgcattgaactctgcttcttatttgcaacaacaacaactaccatt

SEQ ID NO: 321394 - DNA, 445 bp, Zea mays
gcacaatagtgtaccaacaatggcagccaaaatattttgcctccttatgctccttggtgtttctgcaagtgctgctacggcgaccattttcccacaatgctcacaagctcctatagcttcccttcttcccccgtacctctcaccagcggtgtcttcggtatgtgaaaacccaattcttcaaccctataggatccaacaggcaatcgcagctggcatcttacctttatcacccttgttcctccaacaatcatcagccctattacagcagttacctttggtgcatttattggcacaaaacatcagggcacaacaactacaacaacttgtgctagcaaaccttgctgcctactctcagcaacaacagtttcttccattcaaccaactagctgcattgaactctgcttcttatttgcaacaacaacaactaccattcagccagctatct

SEQ ID NO: 321395 - DNA, 443 bp, Zea mays
ggtcttcagaccattagctttatctactccagagcgcagaagaacccgatcgacaccgtgagggtgttgctcgttgccctcgctctcctggctctcgctgcgagcgccacctccacgcatacaagcggcggctgcggctgccagccaccgccgccggttcatctaccgccgccggtgcatctgccacctccggttcacctgccacctccggtgcatctcccaccgccggtccacctgccgccgccggtccacctgccaccgccggtccatgtgccgccgccggttcatctgccgccgccaccatgccactaccctactcaaccgccccggcctcagcctcatccccagccacacccatgcccgtgccaacagccgcatccaagcccgtgccagctgcagggaacctgcggcgttggcagcaccccgatcctgggccagtgcgt

SEQ ID NO: 321396 - DNA, 448 bp, Zea mays
ctacaacaacttgtgctagcaaaccttgctgcctactctcagcaacagcagtttcttccattcaaccaactagctgcattgaactctgcttcttatttgcaacaacaacaactaccattcagccagctacctgctgcctacccccagcaatttcttccattcaaccaactggcagcattgaactctcctgcttatttacagcagcaacaactactaccattcagccagctagctggtgtgagccctgctaccttcttgatacaaccacagttgttgccgttctaccagcacgctgcgcctaacgctggcaccctcttacaactgcaacaattgctgccattcaaccaacttgctttgacaaacccagcagcgttctaccaacaacccatcattggtggtgccctcttttagatttcttatgagttatagttcaataataaagtttttt

SEQ ID NO: 321397 - DNA, 398 bp, Zea mays
attttgcctccttatgctccttggtctttctgcaagtgctgctacggcgaccattttgccgcaatgctcgcaagctcctatagcttcccttcttcccccgtacctctcaccagcggtgtcttcggtatgtgaaaacccaattcttcaaccctacaggatccaacaggcaatcacagctggcatcttacctttatcacccttgttccttcaacaatcatcagccctattacatcagttacctttggtgcatttattggcacaaaacatcagggcacaacaactacaacaacttgtgctagcaaaccttgctggctactctcagcaacagcagtttcttccattcaaccaactagctgcattgaactctgctttttatttgcaacaacaacaactaccat

SEQ ID NO: 321398 - DNA, 442 bp, Zea mays
attgagaccaactagcaacatagaaagcacaatattgtaccaataatggcagccaaaggattttgcctcattatgctccttggtctttctgcaagtgctgctacggcgagcattttcccgcaatgctcacaagctcctatagcttcccttcttcccccatacctctcaccagcgatgtcttcagtatgtgaaaatccaattcttctaccctacaggatccaacaggcaatcgcagcaggcatcttacctttatcacccttgttcctccaacaatcatcagccctattacagcagttacctttggtgcatttattggcacaaaacatcagggcacaacaactacaacaactcgtgctagcaaaccttgctgcctactctcagcaacagcagttacctttggtgcatttgttggcacaaaacatcagggcacaacaactacaac

SEQ ID NO: 321399 - DNA, 445 bp, Zea mays
tgagcattcagaaacacacctagcgaagcgcactagcaacgacctaacaacaatggctgccaagacattatccctccttgcgcttcttgccctttttgtgagtgcaacaaatgcgttcattattccacaatgctcacttgctccgagtgccattattccacagttcctccctccagttacttcaatgggcttcgaacacccagctgtgcaagcctataggctacaacaagcgcttgcggcgagcgtcttagaacaaccaattgcccaattacaacaacaatccttagcacatctaaccatacaaaccatcgcaacgcagcagcaacaagcactgagccacctagccgtggtgaaccctatcgcctacttgcaacaacagctgcttgcatccaacccacttgctttggcaaacgtagctgcataccaacaacaacaacagttgcaa

SEQ ID NO: 321400 - DNA, 444 bp, Zea mays
gcacaatagtgtaccaacaatggcagctaaaatattttgcctccttatgctccttggtgtttctgcaagtgctgctacggcgaccattttcccacaatgctcacaagctcctatagcttcccttcttcccccgtacctctcaccaacggtgtcttcggtatgtgaaaacccaattcttcaaccctacaggatccaacaggcaatcgcagctggcatcttacctttatcacccttgttcctccaacaatcatcagccctattacagcagttacctttggtgcatttattggcacaaaacatcagggcacaacaactacaacaacttgtgctagcaaaccttgctgcctactctcagcaacagcagtttcttccattcaaccaactagctgcattgaactctgcttcttatttgcaacaacaacaactaccattcagccagctatc

SEQ ID NO: 321401 - DNA, 454 bp, Zea mays
atagaaagcacaatattgtaccaataatggcagccaaaatattttgcctcattatgctccttggtctttgtgcaggtgctgctacggcgagcattttcccgcaatgctcacaagctcctatagcttcccttcttcccccatacctctcaccagcgatgtcttcagtatgtgaaaatccaattcttctaccctacaggatccaacaggcaatcgcagcaggcatcttacctttatcacccttgttcctccaacaatcatcagccctattacagcagttacctttggtgcatttattggcacaaaacatcagggcacaacaactacaacaactcgtgctagcaaaccttgctgcctactctcagcaacagcagttacctttggtgcatttgttggcacaaaacatcaaggcacaacaactacaacaactcgtgctagcaaaccttgctgcctactc

SEQ ID NO: 321402 - DNA, 417 bp, Zea mays
gtgtaccaacaatggcagctaaaatattttgcctccttatgctccttggtctttctgcaagtgctgctacggcgaccattttcccacaatgctcacaagctcctatagcttcccttcttcccccgtacctctcaccaacggtgtcttcggtatgtgaaaacccaattcttcaaccctacaggatccaacaggcaatcgcagctggcatcttacctttatcacccttgttcctccaacaatcatcagccctattacagcaggtacctttggtgcatttattggcacaaaacatcagggcacaacaactacaacaacttgtgctagcaaaccttgctgcctactctcagcaacagcagtttcttccattcaaccaactagctgcattgaactctgcttcttatttggcacaacaacaac

SEQ ID NO: 321403 - DNA, 451 bp, Zea mays
cccgtacctctcaccagcggtgtcttcggtatgtgaaaacccaattcttcaaccctacaggatccaacaggcaatcgcagctggcatcttacctttatcacccttgttcctccaacaatcatcagccctattacaacagttacctttggtgcatttattggcacaaaacatcagggcacaacaactacaacaacttgtgctagcaaaccttgctgcctactctcagcaacagcagtttcttccattcaaccaactaggttcattgaactctgcttcttatttgcaacaacaacaactaccattcagccagctacctgctgcctacccccagcaatttcttccattcaaccaactagcagcattgaactctcctgcttatttacagcagcaacaactactaccattcagccagctagctggtgtgagccctgctaccttcttgacacaacca

SEQ ID NO: 321404 - DNA, 450 bp, Zea mays
cggacgcgtgggctagcaacatagaaagcacaatagtgtaccaacaatggcagccaaaatattttgcttccttatgctccttggtctttctgcaagtgctgctaccgcaaccattttcccacaatgctcacaagctcctatagcttcctttcttcccccatacctctcaccagcggtgtcttcagtatgtgaaaacccaattcttcaaccctacaggatccaacaggcaatcgcagcaggcatcttacctttatcacccttgttcctccaacaaccgtcagccctattacagcagttacctttggtgcatttgttggcacaaaacatcaaggcacaacaactacaacaacttgtgctaggaaaccttgctgcctactctcagcaacagcagtttcttccattcaaccaactggctgcattggactctgctggttatttcaacaacaacta

SEQ ID NO: 321405 - DNA, 430 bp, Zea mays
attttaaattaatttttatacaatatcatattttggtaaaaggatcggttgccatgttgtgctgttctttttgtgttccttagcacggggtagcattagtatttgacgcccttttgtgttgttggaaagacaaattagtttgaatgggaattacatatcttgttttactgttttagggttccttctttgctactgtgctcctgtgggtcggtactgcatttatgtttcttttttttttctggtctgatgtaatttgtgccactattctgttggcaaaggagttcaggattattttggccgtgtatagcaatagcaactgacaccttttgtgttcattgaaagtttttggtctagagtgtgcagtgttgcaagtcttaactgttgtcaagaaagtaatgtgttcaacatgattgtaaactgaatgcaattc

SEQ ID NO: 321406 - DNA, 439 bp, Zea mays
gcggcttcaacaagcaatcgcagcaagcaacatacctttatcgcccttgttgtttcaagaatgaccagccctatctttggtgcagtcattggtacaaaccatcagggcacaacagctgcagcaactcgtgctacctgtgatcaaccaagtagctctggcaaacctttctccctactctcagcaacaacaatttcttccattcaaccaactgtctacactgaaccctgctgcttatttgcagcaacaactattaccatttagccagctagctactgcctactctcagcaacaacaacttcttccatttaaccaattggccgcactgaaccccgctgcttatttgcagcagcaaatactactgccatttagcgagctagctgcagcaagtcgtgcttccttcttgacacagcaacagttgctgcctttctacaagcagttt

SEQ ID NO: 321407 - DNA, 251 bp, Zea mays
atttgacaacaaaggagatgatactgtttaatttactaatgtgaaatgtagcctgtgggggggtcacaaacttttgcttactggagtctattggctgattgttttcatgcattattcaagatggagagacaggctttctactaattcattatactacaactatgtatgtgtgatgttgctactgaatggaatatcactgtttggatagtttcttattgcaagtggaacttgattttgtttattggtatata

SEQ ID NO: 321408 - DNA, 442 bp, Zea mays
atcgcaacaggcatcttaccattatcacccttgttcctccaacaaccgtcagcggtagtacagcagttacctttggtccatttggtggcacaaaacatcagggcacaacaactacaacaacttgtgctagcaaaccttgctgcatactctcagcaacatcagtttcttccattcaaccaactggctgcattgaactctgctgcttatttgcaacaacaattaccattcagccagctagttgctgcctacctccagcaatttcttccattcaaccaactagcagcattgaactctgctgcttatttacagcagcaacaactactaccattcagccagctagctgatgtgagccctgctgccttcttgacacaacaacagttgttgccgttctacctgcacgctatgcctaacgctggcaccctcttacaactgcaacaattgc

SEQ ID NO: 321409 - DNA, 423 bp, Zea mays
caacaacaacaacagtttctgccatcactgagccacctagccgtggtgaaccctgtcagctacttgcaacagcagctgcttgcatccaacccacttgctctggcgaacgtagctgcataccagcaacaacaacagctgcaacagtttatgccagtgctcagtcaactagccatggtgaaccctgccgtctacctacaactactttcatctagcccgctcgcggtgggcaatgcacctacgtacctacaacaacagttgctgcaacaaattgtaccagctctgactcagctagctgtggcaaaccctgctgcctacttacaacagttgcttccattcaaccaactggctgtgtcaaactctgctgcgtacctacaacagcgacaacagttacttaatccattggcagtggctaacccattggtc

SEQ ID NO: 321410 - DNA, 431 bp, Zea mays
attgagaccaactagcaacatagaaagcacaatagtgtaccaacaatggcagccaaaagatggtgcctccttatgctccttggtctttctgcaagtgctgctacggcgaccattttcccgcaatgctcgcaagctcctatagcttcccttcttcccccgtacctctcaccagcggtgtcttcggtatgtgaaaacccaattcttcaaccctacaggatccaacaggcaatcgcagctggcatcttacctttatcacccttgttcctccaacaatcatcagccctattacaacagttacctttggtgcatttattggcacaaaacatcagggcacaacaactacaacaacttgtgctagcaaaccttgctgcctactctcagcaacagcagtttcttccattcaaccaactaagttcattgaactctgcttc

SEQ ID NO: 321411 - DNA, 442 bp, Zea mays
attgagaccaacaagcaacatagaaagtggaatccagtagcaacaacagagcaacaatggcgaccaagatattttccctccttatgctccttgctctttctgcatgtgttgctaacgcgacaattttccctcaatgctcacaagctcctatagcttcccttcttcccccataccttccatcaatgatagcttcagtatgtgaaaacccagctcttcagccctataggctccaacaagcaatcgcagcaagcaacatacctttatcacccttgttgtttcaacaatcgccagccctatctttggtgcagtcattggtacaaaccatcagggcacagcagctgcagcaactcgtgctacctgtgatcaaccaagtagctctggcaaacctttctccctactctcagcaacaacaatttcttccattcaaccaactgtctacact

SEQ ID NO: 321412 - DNA, 452 bp, Zea mays
acgagcaacatagaaagcacaatagtgtaccaacaatggcagccaaaatattttgcgtccgtatgctccttggtctttctgcaagtgctgctacggcgaccattttcccgcaatgctcgcaagctcctatagcttcccttcttgcaccgtacctctcaccagcggtgtcttcggtatgtgaaaacccaattcttcaactctacaggatccaacaggtaatcgcagctggcatcttacctttatcacccttgctcctccaacaatcatcagccctattacaacagttacctttggtgcattaattggcacactacatcagggcacagcatctacaacaactcgtgctagcaaaccttgctgcctactctcagcaacagcagcttcttccattcaaccaactaggttcattgaactctgcttgttatatgcagcaacaacaactaccattcagg

SEQ ID NO: 321413 - DNA, 170 bp, Zea mays
ctggcttctcctccccctcttaccaagtcctcttcgggttagggttacttagggttttgtggaggggcgatggcggcggctgatgtggagtaccgttgcttcgtcggcgggcttgcctgggccaccagcaacgagtcgctggagaatgccttcgccttctacggcgagat

SEQ ID NO: 321414 - DNA, 401 bp, Zea mays
ggaattcccggcagcaacatagaaagcacaatagtgtaccaacaatggcagccaaaatattttgcttccttatgctccttggtctttctgcaagtgttgctaccgcaaccattttcccacaatgctcacaagctcctatagcttcccttcttcccccatacctctcaccagcggtgtcttcaatgtgtgaaaacccaattgttcaaccctacaggatccaacaggcaatcgcaacaggcatcttaccattatcacccttgttcctccaacaaccgtcagccctattacagcagttacctttggtccatttggtggcacaaaacatcagggcacaacaactacaacaacttgtgctagcaaaccttgctgcatactctcagcaacatcagtttcttccattc

SEQ ID NO: 321415 - DNA, 379 bp, Zea mays
ctgggtcttcagaccattagctttatctactccagagcgcagaagaacccgatcgacaccatgagggtgttgctcgttgccctcgctctcctggctctcgctgcgagcgccacctccacgcatacaagcggcggctgcggctgccagccaccgccgccggttcatctaccgccgccggtgcatctgccacctccggttcacctgccacctccggtgcatctcccaccgccggtccacctgccgccgccggtccacctgccaccgccggtccatgtgccgccgccggttcatctgccgccgccaccatgccactaccctactcaaccgccccggcctcagcctcatccccagccacacccatgcccgtgccaacagccgc

SEQ ID NO: 321416 - DNA, 344 bp, Zea mays
gaccagcaggcaccttagaaggtggattccattaccaccattggagcaccattggcaaccaagattttttccttcctaaggctcctggttcttcttccaggggtggttacgccaccatttttccttaatggttacaaggttctatatggttccttttttccccatatactttcattaattatatggttagagtgtgagaaccccgatctttaaacctatatgcgttaacacgcgctctcagcgagcgacatacccttatagcccctgtggttgtaacaatcaccagacctatatttggtgcagacattggtgcaacaccatcatggcggcacaactgctgcaac

SEQ ID NO: 321417 - DNA, 385 bp, Zea mays
cccacgcgtccggcaacatagaaagcacaatagtgtaccaacaatggcagccaaaataggttgcctccttatgctccttggtctttctgcaagtgctgctacggcgaccattttcccgcaatgctcgcaagctcctatagcttcccttcttcccccgtacctctcaccagcggtgtcttcggtatgtgaaaacccaattcttcaaccctacaggatccaacaggcaatcgcagctggcatcttacctttatcacccttgttcctccaacaatggcagccaaaatattttgcctccttatgctccttggtctttctgcaagtgctgctacggcgaccattttcccgcaatgctcgcaagctcctatagcttcccttcttcccccgt

SEQ ID NO: 321418 - DNA, 379 bp, Zea mays
  unsure (1)..(379): unsure at all n locations
ctgtatcgcccttgttgtttcaacaatcgccagtcctatctttggtgcagtcattggggcaaaccatcagggcacaacagctgcagcaactcgtgctacctctgatcaaccaagtagctctggcaaacctttctccctactctcagcaacaacaatttcttccattcaaccaactgtctacactgaaccctgctgcttatttgcagcaacaactattaccatttagccagctagctactgcctactctcagcaacaacaacttcttccatttaaccaattggccgcactgaaccccgctgcttatttgcagcagcaaatactactaccatttagccagctagctgcagcaaaccgtgcttncttcttgacacagcaaca

SEQ ID NO: 321419 - DNA, 416 bp, Zea mays
acccacgcgtggcgattgtattgtcagcatgcgaagtgtgtgatgtatttcaatggactcatcgagatcgggcggcctgtagctactccataatgcttgtcaatgccggatgaaagtcgcatgccatgtgccaaggcacggatctcatactcgtacttcgcacactatgggtactgacaactgccaaggtcttttcggctgcaatgactagctaccacatatagtatgatagtgttgttagcgtgttcagagccattgcatcatgctggtatttgcggcttaaatcctgatataatggttactatgttcatgaacgaccccatatactggaccacctagaagcttgaattgactattgatagaatacgtgaaacgggttcataggattttacgcgtgcatcaagcatgcgaaagat

SEQ ID NO: 321420 - DNA, 393 bp, Zea mays
gcgattagcaacaatagagcaacaatggcgaccaagatattttccctccttatgctccttgctctttctacatgtgttgctaacgcgacaattttccctcaatgctcacaagctcctatagcttcccttcttcccccataccttccatcaattatagcttcagtatgtgaaaacccagctcttcaaccatataggcttcaacaagcaatcgcagcaagcaacatacctttatcgcccttgttgtttcaacaatcaccagccctatctttggtgcagtcattggtacaaaccatcagggcacaacagctgcagcaactcgtgctacctgtgatcaaccaagtagctctggcaaacctttctccctactctcagcaacaacaatttcttccattc

SEQ ID NO: 321421 - DNA, 356 bp, Zea mays
cagcaagcaacatagaaagtagaatccattagcaacaatagagcaacaatggcgaccaagatattttccctccttatgctccttgctctttctacatgtgttgctaacgcgacaattttccctcaatgctcacaagctcctatagcttcccttcttcccccataccttccatcaattatagcttcagtatgtgaaaacccagctcttcaaccatataggcttcaacaagcaatcgcagcaagcaacatacctttatcgcccttgttgtttcaacaatcaccagccctatctttggtgcagtcattggtacaaaccatcagggcacaacagctgcagcaactcgtgctacctgtgat

SEQ ID NO: 321422 - DNA, 384 bp, Zea mays
caagcaacatagaaagtagaatccattatcaacaatagagcaacaatggcgaccaagatgttttccctccttatgctccttgctctttctacatgtgttgctaacgcgacaattttccctcaatgctcacaagctcctatagcttcccttcttcccccataccttccatcaattatagcttcagtatgtgaaaacccagctcttcaaccatataggcttcaacaagcaatcgcagcaagcaacatacctttatcgcccttgttgtttcaacaatcaccagccctatctttggtgcagtcattggtacaaaccatcagggcacaacagctgcagcaactcgtgctacctgtgatcaaccaagtagctctggcaaacctttctccc

SEQ ID NO: 321423 - DNA, 425 bp, Zea mays
caacaagcaacatagaaagtggaatccagtagcaacaatagagcaacaatggcgaccaggatacgttccctccttatgctccttgctctttctgcatgtgttgctaacgcgacaattttccctcaatgctcacaagctcctatagcttcccttcttcccccataccttccatcaatgatagcttcagtatgtgaaaacccagctcttcaaccctataggctccaacaagcaatcgcagcaagcaacatacctttatcacccttgtttcaacaatcgccagccctatctttggtgcagtcattggtacaaaccatcaaggcacagcagctgcagcaactcgtgctacctgtgatcaaccaagtagctctggcaaacctttctccctactatcagcaaccaaaaaccccctaaaaaaattttttttt

SEQ ID NO: 321424 - DNA, 322 bp, Zea mays
cccaattggttggtataatcctttagcttcaatagagcaacaatggcgaccaggatatgttccctccttatgctgcttgctctttctacatgtgttgctaacgcgacaattttccctcaatgctcacaagctcctatagcttcccttcttcccccataccttccatcaattatagcttcagtatgtgaaaacccagctcttcaaccatataagcttcaacaagcaatcgcagcaagcaacatacctttatcgcccttgttgtttcaacaatcaccaaccctatctttggtgcagtcattggtacataccattaaggcacaac

SEQ ID NO: 321425 - DNA, 417 bp, Zea mays
ggaattcccgggctagcaacatagaaagcacaatagtgtaccaacaatggcagccaaaatattttgcctccttatgctccttggtcgttctgcaagtgctgctacggcgaccattttcccgcaatgctcgcaagctcctatagcttcccttcttcccccgtacctctcaccagcggtgtcttcggtatgtgaaaacccaattcttcaaccctacaggatccaacaggcaatcacagctggcatcttacctttatcacccttgttcctccaacaatcatcagccctattacatcagttacctttggtgcatttattggcacaaaacatcagggcacaacaactacaacaacttgtgctagcaaaccttgctgcctactctcagcaacagcagtttcttccattcaaccaactagctgc

SEQ ID NO: 321426 - DNA, 226 bp, Zea mays
gtttagatcgcgagggccgcccttttttttttttttttttttttttttttttttttttgtttttgtttttttttttttttttttattttttttttttttttttttttttttttattaataaaaaattatttttttttttatttttatattgtttattatttataattaaaaaaaaaaattattttataattaaaaaaaaaaaacaaaaataaaaagatacatttac

SEQ ID NO: 321427 - DNA, 230 bp, Zea mays
agttgctgcctttctaccagcagtttgcggctaaccccgcaaccctcttacaactacagcaattgttgccctttgtccaacttgctttgacaaacccagcagcctcctaccaacaacacatcattggtggtgccctcttttagattgcttattagttgtaattcaataataaagttttttggatgatgtatgtggccaaccagaaataagaagttacatttccagattct

SEQ ID NO: 321428 - DNA, 417 bp, Zea mays
ggcaatcacagctggcatcttacctttatcacccttgttcctccaacaatcatcagccgtattacatcagttacctttggtgcatttattggcacaaaacatcagggcacaacaactacaacaacttgtgctagcaaaccttgctgcctactctcagcaacagcagtttcttccattcaaccaactagctgcattgaactctgcttcttatttgcaacaacaacaactaccattcagccagctacctgctgcctacccccagcaatttcttccattcaaccaactggcagcattgaactctcctgcttatttacagcagcaacaactactaccattcagccagctagctggtgtgagccctgctaccttcttgatacaaccacagttgttgcccccgggttttttttcccccttttt

SEQ ID NO: 321429 - DNA, 226 bp, Zea mays
  unsure (1)..(226): unsure at all n locations
aattccggtcgacnacgcgtccggttgccctcgctctcctggctctcgctgcgagcgccacctccacgcatacaagcggcgggtgcggctgccagccaccgccgccggttcatctaccgccgccggtgcatctgccacctccggttcacctgccacctccggtgcatctcccaccgccggtccacctgccgccgccggtccacctgccaccgncggtccatgtgcc

SEQ ID NO: 321430 - DNA, 387 bp, Zea mays
gcgcccacgcgtccgacgcgtcaggtgcaccgagcacccgctgaattgaacacctcgactaccatggacatggaggcgcaggcggcaaaggcgagaaccgaggacccgcgacgtcctcccagcgacggcggggccgcaggagcgaagtgcgtggagggtggaggcgacggtgccagccggagcacggcgaagcgggaggccgagaaagcggctgccgtggaggcggagggcgccaagccgctgccgctgccgtacgaacgggtgccgcagccgcgcgacgtgtacaacgagcagctggagcggatgtgaatgcatgttttctgctcggcagtctcgatgaaccccaatcgacccaatgatcgatcgagcgatcctgctacaggccct

SEQ ID NO: 321431 - DNA, 302 bp, Zea mays
attgagaccagcaagcaacatagaaagtagaatccattagcaacaatagagcaacaatggcgaccaagatattttccctccttatgctccttgctctttctacatgtgttgctaacgcgacaattttccctcaatgctcacaagctcctatagcttcccttcttcccccataccttccatcaattatagcttcagtatgtgaaaacccagctcttcaaccatataggcttcaacaagcaatcgcagcaagcaacatacctttatcgcccttgttggttcaacaatcaccagccctatctttg

SEQ ID NO: 321432 - DNA, 143 bp, Zea mays
aagaccaaccagcaacatagaaaggcgtatacaggatcagcaatcaagacaccatgacgaccgagatagttctcgtcctgatgctgcttgctgtagctgcacagcgccgttagcgcgacaatgctctgtcaatgctcacaagc

SEQ ID NO: 321433 - DNA, 357 bp, Zea mays
  unsure (1)..(357): unsure at all n locations
ttttcagcattcaaaaacacaccaagcgaagcgcactagcaacgacctaacaccaatggctaccaagatattagccctccttgcgcttcttgcccttttagtgagcgcaacaaatgcgttcattattccacagtgctcacttgctcctagtgccattattccacagttcctcccaccagttacttcaatgggcttcgaacatccagccgtgcaagcctacaggctacaactagcgcttgcggcgagcgccttacaacaaccaattgcccaattgcaacaacaatccttggcacatctaaccctacaaaccattgcaacgcancaacaacaacaacaacagtttctgccatcactgag

SEQ ID NO: 321434 - DNA, 386 bp, Zea mays
gaaagcacaatagtgtaccaacaatggctgccaaaatattttgcctccttatgctcctgggtctttctgcaagtgctgctacggcgaccattttcccacaatgctcacaagctcctatagcttcccttcttcccccgtacctctcaccagcggtgtcttcggtatgtgaaaacccaattcttcaaccctataggatccaacaggcaatcgcagctggcatcttacctttatcacccttgttcctccaacaatcatcagccctattacagcagttacctttggtgcatttattggcacaaaacatcagggcacaacaactacaacaacttgtgctagcaaaccttgctgcctactctcagcaacaacagtttcttccattcaaccaa

SEQ ID NO: 321435 - DNA, 404 bp, Zea mays
gaagaaaacacctgggagcagtaatgccaaccatggtcatccaagacataagcgtcggcacgcagacgggtaaaacattgatcaaccatggtcattatttttttataactgatacaaccattattttccctatactatagatccatttcccctttaggttgggaaataatccaaaatatggtggtgtaaaatagggttggcttttcaatggatttttgagttttcaactggggattttgattttgattgggccaaataatggaagttggacaatgtaacctttaactgatttggtggcctggattaggttcaataacttataatggccaaacctaatggggaatttacagttttcccccttgaataatggggtttttgcccccaattttttgaatggaccttta

SEQ ID NO: 321436 - DNA, 312 bp, Zea mays
cagaaacacaccaagcgaagctacctagcaacgacttaacaacaatggctaccaagatgttagcgctccttgcgcttcttgccctttttgtgagcgcaacaaatgcgttcattattccacaatgctcacttgctcctagtgccattataccacagttcctccgaccagttacttcaatgggcttcgaacacctagctgtgcaagcctacaggctacaacaagcgcttgcggcgagcgtcttacaacaaccaattaaccaattgcaacaacaatccttggcacatctaaccatacaaaccaatcgaacacaac

SEQ ID NO: 321437 - DNA, 176 bp, Zea mays
ccactcccaagccagtaccgagtcctacgagcagtcgcacgcaagtgtcaagagacgaaacggtcgacatggctcgcacgcaatctgccgtagcggtcgccgtggtggccgcggtgctgctgctggcagcggcggcgacgacctcggaggccgccatcacctgcgggcaagtgagc

SEQ ID NO: 321438 - DNA, 348 bp, Zea mays
acatacctttatcgcccttgttgtttcaacaatcgccagcccgatcggtggtgcagtcattggtacaaaccatcagggcacaacagctgcagcaactcgtgctacctctgatcaaccaagtagctctggcaaacctttctccctactctcagcaacatagaaagtggaatccagtagcaacaatagagcaacaatggcgaccaagatattttccctccttatgctccttgctctttctacatgtgttgctaacgcgacaattttccctcaatgctcacaagctcctatagcttcccttcttcccccataccttccatcaattatagcttcaatatgtgaaaacccagc

SEQ ID NO: 321439 - DNA, 134 bp, Zea mays
gacccacgcgtccggcgggcacggcagcagttgctacctctttatcctttcctaccgcaagccaagctctctgtctgggactaccctacagcacgatcggagtccaagtccattccatccatacccactcgaca

SEQ ID NO: 321440 - DNA, 410 bp, Zea mays
  unsure (1)..(410): unsure at all n locations
ccgttatcacccttgttcctccaacaaccgtcagccctattacagcagttacctttggggcatttgttggcacaaaacatcaaggcacaacaactacaacaacttgtgctaggaaaccttgctgcctactctcagcaacagcagtttcttccattcaaccaactggctgcattgaactctgctgcttatttgcaacaacaactaccattcagtcagctagctgctgcctacccccagcaatttcttccattcaaccaactggcagcattgaactctgctgcttatttacaacagcaacagctaccaccattcagccagctagctgatgtgagccctgttgccttcttgacacaacaacagttgttgccgttctacctgcacgctgncgcctttaaaaaacccgggggggc

SEQ ID NO: 321441 - DNA, 410 bp, Zea mays
gtaccatcaatcatcattcatcttagtagtataggcaccaaatcaaatctgcgacatcgattatctaactccaaaaaccatgaagctggtgcttgtggttcttgctttcattgctttagtatcaagcgtttcttgtacacagacaggcggctgcagctgtggtcatcaacaaagccatgagcagcaacatcattcacatcaacatgatccacatagacagcaacatcgtccacgagcacagcatcaccagctgcagcaacactcatcagcaacgagttcacatgcatccactaaaacatcagcatcaactagaagttcatgttcaacaacaacaacaacaaccgtagcaccaactacgacagcaacaacaacagcaccaacaacaacatcaatgtggaaaaaaggggggg

SEQ ID NO: 321442 - DNA, 330 bp, Zea mays
atagaaagcacaatagtgtaccaacaatggcagccaaaatattttgcctccttatgctccgtggtctttctgcaagtgctgctacggcgaccattttcccgcaatgctcgcaagctcctatagcttcccttcttcccccgtacctctcaccagcggtgtcttcggtatgtgaaaacccaattcttcaaccctacaggatccaacaggcaatcacagctggcatcttacctttatcacccttgatcctacaacaatcatcagccctattacatcagttacctttggtgcatttattggcacaaaacatcagggcacaacaactacaacaac

SEQ ID NO: 321443 - DNA, 331 bp, Zea mays
cagacagctttcacagttaccttatcactatagcacagcatcaaccgggaaagtcacattgagatcgtggtcagcgagcccaccagataccagagagaggatggcggacatatcgttgctgttggcggagcacttcgagaagacagcaaggcgaggcgcccccggcggggacagcggtagcgacagcgggaccgccggcgagactaggaacttctgggccgcggccacagtgtggagctcttgtgtggagtccgcctccgccgccgcgtacggggtcagattcaccgtctcggtgcacatgtagcccaagaccgggctcgcgctggccgcc

SEQ ID NO: 321444 - DNA, 434 bp, Zea mays
caacatagaaagcacaatagtgtaccaacaatggcagccaaaatattttgcttgcttatgctccttggtctttctgcaagtgctgctaccgcaaccattttcccacaatgctcacaagctcctatagcttcctttcttcccccatacctctcaccagcggtgtcttcagtatgtgaaaacccaattcttcaaccctacaggatccaacaggcaatcgcagcaggcatcttacctttatcacccttgttcctccaacaaccgtcagccctattacagcagttacctttggtgcatttgttggcacaaaacatcaaggcacaacaactacaacaacttgtgctaggaaaccttgctgcctactctcagcaacagcagtttcttccattcaaccaactggctgcattgaactctgctgcttatttgcaacaacaact

SEQ ID NO: 321445 - DNA, 428 bp, Zea mays
attcagaaacacaccaagcgaagctacctagcaacgacttaacaacaatggctgccaagatattatccctccttgcgcttcttgccctttttgtgagcgcaacaaatgcgttcattattccacaatgctcacttgctcctagtgccattataccacagttcctccgaccagttacttcaatgggcttcgaacacctacctgtgcaagcctacaagctacaacaagcgcttgcggcgagcgtcttacaacaaccaattaaccaattgcaacaacaatccttggcacatctaaccatacaaaccatcgcaacacaacagccacaacagttcctaccagcactgagccaactagatgtggtgaaccctgtcgcctacttgcaacagcaggtgcttgcatccaacccacttgctctggcatacgtagctgca

SEQ ID NO: 321446 - DNA, 304 bp, Zea mays
cttctatcagtaccatcaatcatcattcatcttagtagtataggcaccaaatcaaagctgcaacatcaattatctaactccaaaaaccatgaagctggtgcttgtggttcttgctttcattgctttagtatcaagtgtttcttgtacacagacaggcggctgcagctgtggtcaacaacaaagccatgagcagcaacatcatccacaacaacatcatccacaaaaacaacaacatcaaccaccaccacaacatcaccagcagcagcaacaccaacaacaacaagttcacatgcaaccacaaaaa

SEQ ID NO: 321447 - DNA, 334 bp, Zea mays
gaaacacaccaagcgaagcacattagcaacaacctaacaacaatggctaccaagatgttatccctccttgcgcttcttgcgctttttgcgagcgcaacaaatgcgttcattattccacaatgctcacttgctccaagttccattattacacagttcctcccaccagttacttcaatgggcttcgaacacccagctgtgcaagcctataggctacaacaagcaattgcggcgagcgtcttacaacaaccaatttcccagttgcaacaacaatccttggcacatctaacaatacaaaccatcgcaacgcaacagcaacaacaattcctaaccagca

SEQ ID NO: 321448 - DNA, 295 bp, Zea mays
gggacacaccaagcgaagcacattagtttcaacctaacaacaatggctaccaaggaggtatccctccttgcgcgtcttgcgctttttgcgagcgcaacatatgcgttcattattccacaatgctcacttgctccaagttccattattacacagttcctaccaccagctacttcaatgggcttcgaacacccagctgtgcaagcctataggctacaacaagcaattgcggcgagcgtcttacaacaaccaatttcccagttgcaacaacaatccttggcacatctaacaatacaaa

SEQ ID NO: 321449 - DNA, 119 bp, Zea mays
ctttgacaaacccagcagcattctaccaacaacccatcattggtggtgccctcttttagatttcttatgagttatagttcaataataaagttttttgtctgatgtttgtggcttcccag

SEQ ID NO: 321450 - DNA, 329 bp, Zea mays
ctagatcgcgagcgggcgccctttattttttttttttttttttttttttttttggatggtttttaatatatttattataattattttttttttttttttttttttttattttatataattatttttttttttttattatattattttatttttttttttatattttattattatcaattaattttttattttttatatttttttaaatcaaaaaataattcataaattattaatcaaaaaaaaaaataacaaaaaataatatcatatatatttttataaattaaaaaacaaaaaaatatttacacatttaaacataccataatataata

SEQ ID NO: 321451 - DNA, 432 bp, Zea mays
caacatagaaagcacaatagtgtaccaacaatggcagccaaaatattttgcctgcttatgctccttggtctttctgcaagtgctgctacggcgaccattttcccacaatgctcacaagctcctatagcttcccttcttcccccgtacctctcaccagcggtgtcttcggtatgtgaaaacccaattcttcaaccctataggatccaacaggcaatcgcagctggcatcttacctttatcacccttgttcctccaacaatcatcagccctattacagcagttacctttggtgcatttattggcacaaaacatcagggcacaacaactacaacaacttgtgctagcaaaccttgctgcctactctcagcaacaacagtttcttccattcaaccaactagctgcattgaactctgcttcttatttgcaacaacaa

SEQ ID NO: 321452 - DNA, 87 bp, Zea mays
caccaatgatgggttatagttcaataataaagttctttgtctgatgtttgtggcttcccagaaataagaaagtacatttctagattc

SEQ ID NO: 321453 - DNA, 303 bp, Zea mays
ttcgtcgaccacgcgtcgagtacacagtctgcaacgctcatcaactagccatgggaaccctgcggtactcaacaacacactgcttcatctacccgtcgtgggcaatgcacctacatacctgacaacaatgtgcaacagattgaccagcttgactactagctgggcaaaccctgtgctacttgcacagtgcttcattaacaatgacttgcgaactctgtggtcctacaacacgacaacagtacttaatcattggtagggctaaccatgtcgccgacttctacagcagcaacaattgctgccata

SEQ ID NO: 321454 - DNA, 331 bp, Zea mays
cggactagcaacatacatagagaatttcactagcaacatcttaccaccaatgggacgcacaattatggccatcggtgccctccttgctctttcatcaagcaccactaccccaactatcattccacattgcatacatcacttcctttctccgttcacatcaccatagattggaatacccaactatacacccatacatactacactacaccatcccacatggcatcttacgttctatattaccgacctcacaataaccatatgcccaatcacaacacctattctatctgaatccataggtgcatacattctcacaacacatcctacaacaaca

SEQ ID NO: 321455 - DNA, 329 bp, Zea mays
caactagcaacatagaaagcacaatagtgtaccaacaatggcagccaaaatattttgcttccttatgctccttggtctttctgcaagtgttgctaccgcaaccattttcccacaatgctcacaagctcctatagcttcccttcttcccccatacctctcaccagcggtgtcttcaatgtgtgaaaacccaattgttcaaccctacaggatccaacaggcaatcgcaacaggcatcttaccattatcacccttgttcctacaacaaccgtcagccctattacagcagttacctttggtccattaggtggcacaaaacatcagggcacaac

SEQ ID NO: 321456 - DNA, 337 bp, Zea mays
caggcaatcgcagctggcatcttacctttatcacccttgttcctccaacaatcatcagccctattacaacagttacctttggtgcatttattggcacaaaacatcagggcacaacaactacaacaacttgtgctagcaaaccttgctgcctactctcagcaacagcagtttcttacattcaaccaactaggttcattgaactctgcttcttatttgcaacaacaacaactaccattcagccagctacctgctgcctacccccagcaatttcttccattcaaccaactagcagcattgaactctcctgcttatttacagcagcaacaactatctacca

SEQ ID NO: 321457 - DNA, 338 bp, Zea mays
agcattcaaaaacacaccaagcgaagcgcactagcaacgacctaacaccaatggctaccaagatattagccctccttgcgcttcttgcccttttagtgagcgcaacaaatgcgttcattattccacagtgctcacttgctcctagtgccattattccacagttcctcccaccagttacttcaatgggcttcgaacatccagccgtgcaagcctacaggctacaactagcgcttgcggcgagcgccttacaacaaccaattgcccaattgcaacaacaatccttggcacatctaaccctacaaaccattgcaacgcaacaacaacaacaacaaccagtt

SEQ ID NO: 321458 - DNA, 343 bp, Zea mays
  unsure (1)..(343): unsure at all n locations
accaattgttcaaccctacaggatccaacaggcaatcgcaacaggcatcttaccatgatcacccttgatccttcaacaaccgtcaggcctattacagcagctacctttggtccattaggaggcacaaaacatcagggcacaacaactacaacaacttgtgctagcaaaccttgctgcatactctgagcaacatcagtttcttccattcaaccaactggctgcattgaactctgctgcttatttgcaacaacaattaccattcagccagctagttgctgcctacccccagcaatttcttacattcaaccaactagcagcattgaactctgnctgcattatttac

SEQ ID NO: 321459 - DNA, 314 bp, Zea mays
  unsure (1)..(314): unsure at all n locations
cctcgctctcctggctctcgctgcgagcgctacctccacgcatacaagcggcggttgcgggtgccagccaccgccggcggttcatctaccgccgccggtgcatctgccacctccggttcacctgccacctccggtgcatctcccaccgccggtccacctgccgccgccggtccacctgccaccgncggtccatgtgccgacgncggttcatctagccgcgccaccatgccactaccctactcaaccgacccggcctcagcctcatccccaggcacacccatgcccgtgccaacagccgcattcaagcccgtgcc

SEQ ID NO: 321460 - DNA, 328 bp, Zea mays
  unsure (1)..(328): unsure at all n locations
gagaccaacaagcaacatagaaagtggaatccagtagcaacaatagagcaacaatggcgaccaagatactttccctccttatgctccttgctctttctgcatgtgttgctaacgcgacaattttccctcaatgctcacaagctcctatagcttcccttcttcccccataccttccatcaatgatagcttcagtatgtgaaaacccagctcttcaaccctataggctccaacaagcaatcgcagcaagcaacatacctttatcacccttgtttcaacaatcgccagccctatctatggtgcagtcattggtacanaccatcaaggcaca

SEQ ID NO: 321461 - DNA, 325 bp, Zea mays
acatagaaagtggaatacagtagcaaaaatagagcaacaatggcggccaagatattttccatccttatgctccttgctctttctgcatgtgttgctaacgcgaccatttttcctcaatactcacaagctcctatagctgcccttcttcccccataccttccatcaatgaccgctttagtatgtgaaaacccagcccttcaaccctacaggatccagcaagcaatcgcaacaagcaacttacctttatcacacctgttctttcaacaatcgccagccctatctttggtgcagtcattggtacaaaccatcagggcagaacagttgc

SEQ ID NO: 321462 - DNA, 345 bp, Zea mays
actagcaacatagaaagcacaatagtgtaccaacaatggcagccaaaatattttgcctccttatgctccttggtctttctgcaagtgctgctacggcgaccattttcccgcaatgctcgcaagctcctatagcttcccttcttcccccgtacctctcaccagcggtgtcttcggtatgtgaaaacccaattcttcaaccctacaggatccaacaggcaatcgcagctggcatcttacctttatcacccttgttcctccaacaatcatcagccctattacaacagttacctttggtgcatttattggcacaaaacatcagggcacaacaactaccaacaaaccttt

SEQ ID NO: 321463 - DNA, 337 bp, Zea mays
acatagaaagtggaatacagtagcaaaaatagagcaacaatggcggccaagagattgtccatccttatgctccttgctctttctgcatgtgttgctaacgcgaccatttttcctcaatactcacaagctcctatagctgcccttcttcccccataccttccatcaatgaccgctttagtatgtgaaaacccagcccttcaaccctacaggatccagcaagcaatcgcaacaagcaacttacctttatcacacctgttctttcaacaatcgccagccctatctttggtgcagtcattggtacaaaccatcagggcagaacagttgcaagcaacttcgt

SEQ ID NO: 321464 - DNA, 360 bp, Zea mays
ctcccaccgccggtccacctgccgccgccggtccacctgccaccgccggtccatgtgccgccgccggttcatctgccgccgccaccatgccactaccctactcaaccgccccggcctcagcctcatccccagccacacccatgcccgtgccaacagccgcatccaagcccgtgccagctgcagggaacctgcggcgttggcagcaccccgatcctgggccagtgcgtcgagtttctgaggcatcagtgcagcccgacggcgacgccctactgctcgcctcagtgccagtcgttgcggcagcagtgttgccagcagctcaggcaggtggagccgcagcaccggtaccaggcgatcttcggc

SEQ ID NO: 321465 - DNA, 348 bp, Zea mays
cgagaccaactagcaccatagaaagcacaatagtgtaccaacaatggcagccaaaatattttgcttccttatgctccttggtctttctgcaagtgctgctaccgcaaccattttcccacaatgctcacaagctcctatagcttcctttcttcccccatacctctcaccagcggtgtcttcagtatgtgaaaacccaattcttcaaccctacaggatccaacaggcaatcgcagcaggcatcttacctttatcacccttgttacttcaacaaccgtcagccctattacagcagttacctttggtgcatttgctggcacagaacatcaaggcacaacaactacaacaact

SEQ ID NO: 321466 - DNA, 109 bp, Zea mays
ccggaagcactcttacagaagcgcgctaacttcgacctaccatcgctggttaccaagatgttacccctaaaagggcggcatgcccaccttgggaccgcacaaacgcccg

SEQ ID NO: 321467 - DNA, 352 bp, Zea mays
  unsure (1)..(352): unsure at all n locations
cccgctcgaccacgcgtccgggcaatttgaagataaatttgacacacttgcacatataggaagggtatgggttcaaatatctttgatatatattaatgtctttggagtgcagatgacaatagtttcacccctccctattcctttacggtgatgtggtaagttgtttatggcttaatgcttgatataatttatttctgaaattttgatattgttttattaatgcggtagatatcgctggtcattggtgagaatgaagttgttattatgcttgtgatatacaagtatgcctatngttgtttcaccatgtttttcatgggtgaagtttattacaataatattggtatatatgctt

SEQ ID NO: 321468 - DNA, 338 bp, Zea mays
  unsure (1)..(338): unsure at all n locations
gcaagcaacatagaaagtagaatccattagcaacaatagagcaacaatggcgaccaagatattttccctccttatgctccttgctctttctacatgtgttgctaacgcgacaattttccctcaatgctcacaagctcctatagcttcccttcttcccccataccttccatcaattatagcttcagtatgtgaaaacccagctcttcaaccatataggcttcaacaagcaatcgcagcaagcaacatacctttatcgcccttgttgtttcaacaatcaccagccctatctttggtgcagtcattggtacaaaccatcagggcacaacagctnngcagca

SEQ ID NO: 321469 - DNA, 338 bp, Zea mays
  unsure (1)..(338): unsure at all n locations
ctgtctgcaagtgctgctacggcgaccattttcccgcaatgctcgcaagctcctatagcttcccttcttcccccgtacctctcaccagcggtgtcttcggtatgtgaaaacccaattcttcaaccctacaggatccaacaggcaatcgcagctggcatcttacctttatcacccttgttcctccaacaatcatcagccctattacaacagttacctttggtgcatttattggcacaaaacatcagggcacaacaactacaacaacttgtgctagcaaaccttgctgcctactctcagcaacagcagtttcttccattcaaccannactaggttcattg

SEQ ID NO: 321470 - DNA, 423 bp, Zea mays
gagaccaactagcaacatagaaagcacaatagtgtaccaacaatggcagccaaagtatgttgcctccttatgctccttggtctttctgcaagtgctgctacggcgaccattttcccacaatgctcacaagctcctatagcttcccttcttcccccgtacctctcaccagcggtgtcttcggtatgtgaaaacccaattcttcaaccctataggatccaacaggcaatcgcagctggcatcttacctttatcacccttgttcctccaacaatcatcagccctattacagcagttacctttggtgcatttattggcacaaaacatcagggcacaacaactacaacaacttgtgctagcaaaccttgctgcctactctcagcaacaacagtttcttccattcaaccaactagctgcattgaactct

SEQ ID NO: 321471 - DNA, 339 bp, Zea mays
  unsure (1)..(339): unsure at all n locations
ttattgagaccaacaagcaacatagaaagtggaatacagtagcaaaaatagagcagcaatggcggccaagatattttccatccttatgctccttgctctttctgcatgtgttgctaacgcgaccatttttcctcaatactcacaagctcctatagctgcccttcttcccccataccttccatcaatgaccgctttagtatgtgaaaacccagcccttcaaccctacaggatccagcaagcaatcgcaacaagcaacttacctttatcacacctgttctttcaacaatcgccagccctatctttggtgcagtcattggtacaaaccatcagnggcagaac

SEQ ID NO: 321472 - DNA, 428 bp, Zea mays
gcaacatagaaagcacaatagtgtaccaacaatggcagccaaaatattttgcttcctgatgctccttggtctttctgcaagtgctgctaccgcaaccattttcccacaatgctcacaagctcctatagcttcctttcttcccccatacctctcaccagcggtgtcttcagtatgtgaaaacccaattcttcaaccctacaggatccaacaggcaatcgcagcaggcatcttacctttatcacccttgttcctccaacaaccgtcagccctattacagcagttacctttggtgcatttgttggcacaaaacatcaaggcacaacaactacaacaacttgtgctaggaaaccttgctgcctactctcagcaacagcagtttcttccattcaaccaactggctgcattgaactctgctgcttatttgcaac

SEQ ID NO: 321473 - DNA, 422 bp, Zea mays
cacagttcctccgaccagttacttcaatgggcttcgaacacctagctgtgcaagcctagaggctacaacaagcgcttgcggcgagcgtcttacaacaaccaattaaccaattgcaacaacaatccttggcacatctaaccatacaaaccatcgcaacacaacagcaacaacagttcctaccagcactgagccaactagatgtggtgaaccctgtcgcctacttgcaacagcaggtgcttgcatccaacccacttgctctggcaaacgtagctgcataccaacaacaacaacaattgcaacagtttctgccagcgctcagtcaactagccatggtgaaccctgccgcctacctacaacagcaacaactgctttcatctagccctctcgttgagggtaatgcacctacatacctgcaacaacaa

SEQ ID NO: 321474 - DNA, 419 bp, Zea mays
  unsure (1)..(419): unsure at all n locations
gtggaatacagtagcaaaaatagagcatcaatggcggccaagatattttccatcctgatgctccttgctctttctgcatgtgttgctaacgcgaccatttttcctcaatactcacaagctcctatagctgcccttcttcccccataccttccatcaatgaccgctttagtatgtgaaaacccagcccttcaaccctacaggatccagcaagcaatcgcaacaagcaacttacctttatcacacctgttctttcaacaatcgccagccctatctttggtgcagtcattggtacaaaccatcagggcagaacagttgcagcaactcgtgctaccaagtgattcaagcccanaggttaaaggcctttcctttgggggcccaaaaaaaaaacccccccctttttttttttttccccccccccc

SEQ ID NO: 321475 - DNA, 347 bp, Zea mays
ccaactagcaacatagaaagcacaatagtgtaccaacaatggcagccaaaatatttggcctccttatgctccttggtctttctgcaagtgctgctacggcgaccattttcccgcaatgctcgcaagctcctatagcttcccttcttcccccgtacctctcaccagcggtgtcttcggtatgtgaaaacccaattcttcaaccctacaggatccaacaggcaatcgcagctggcatcttacctttatcacccttgttcctccaacaatcatcagccctattacaacagttacctttggtgcatttattggcacaaaacatcaaggcaccaacaactacccaacaactt

SEQ ID NO: 321476 - DNA, 432 bp, Zea mays
caacaagcaacatagaaagtggaatccagtagcaacaatagagcaacaatggcgaccaagatactttccctccttatgctccttgctctttctgcatgtgttgctaacgcgacaattttccctcaatgctcacaagctcctatagcttcccttcttcccccataccttccatcaatgatagcttcagtatgtgaaaacccagctcttcaaccctataggctccaacaagcaatcgcagcaagcaacatacctttatcacccttgtttcaacaatcgccagccctatctttggtgcagtcattggtacaaaccatcaaggcacagcagctgcagcaactcgtgctacctgtgatcaaccaagtagctctggcaaacctttctccctactatcagcaacaacaatttcttccattcaaccaactatctacactg

SEQ ID NO: 321477 - DNA, 429 bp, Zea mays
cggacgcgtgggttcaaaaacacaccaagcgaagcgcactagcaacgacctaagaccagatggctaccaagatattagccctccttgcgcttcttgcccttttagtgagcgcaacaaatgcgttcattattccacagtgctcacttgctcctagtgccattattccacagttcctcccaccagttacttcaatgggcttcgaacatccagccgtgcaagcctacaggctacaactagcgcttgcggcgagcgccttacaacaaccaattgcccaattgcaacaacaatccttggcacatctaaccctacaaaccattgcaacgcaacaacaacaacaacaacagtttctgccatcactgagccacctagccgtggtgaaccctgtcacctacttgcaacagcagctgcttgcatccaacccacttgctc

SEQ ID NO: 321478 - DNA, 334 bp, Zea mays
agcaacaactactaccattcagccagctagctggtgtgagccctgctaccttcttgacacaaccacagttgttgccgttctaccagcacgttgcgcctaacgctggcaccctcttacaactgcaacaattgctgccattcaaccaacttgctttgacaaacccagcagtgttctaccaacaacccatcattggtggtgccctcttttagatttcttatgagttatagttcaataataaagttttttatctgatgtttgtggcttcccagaaataagaaagtacatttctaaaaaaaaaaaaaaaaaaaaaaaaaaaaaaaaaaaacacacaaaa

SEQ ID NO: 321479 - DNA, 342 bp, Zea mays
cccacgcgtccggcaacatagaaagcacaatagtgtaccaacaatggcagccaagaagattttgcctccttatgctccttggtctttctgcaagtgctgctacggcgaccattttcccgcaatgctcgcaagctcctatagcttcccttcttcccccgtacctctcaccagcggtgtcttcggtatgtgaaaacccaattcttcaaccctacaggatccaacaggcaatcacagctggcatcttacctttatcacccttgttcctccaacaatcatcagccctattacatcagttacctttggtgcatttattggcacaaaacatcagggcacaaccaacct

SEQ ID NO: 321480 - DNA, 348 bp, Zea mays
cattcatcttagtagtaaggcaccaaatcaaatctgcaacatcaattatctaactccaaaaaccatgaagctggtgcttgtggttcttgctttcattgctttagtatcaagtgtttcttgtacacagacaggcggctgcagctgtggtcaacaacaaagccatgagcagcaacatcatccacaacaacatcatccacaaaaacaacaacatcaaccaccaccacaacatcaccagcagcagcaacaccaacaacaacaagttcacatgcaaccacaaaaacatcagcaacaacaagaagttcatgttcaacaacaacaacaacaaccgcagcaccaccaccaacaaca

SEQ ID NO: 321481 - DNA, 340 bp, Zea mays
atagaaagcacaatagtgtaccaacaatggcagccaaaatattttgcctccttatgctccttggtctttctgcaagtgctgctacggcgaccattttcccgcaatgctcgcaagctcctatagcttcccttcttcccccgtacctctcaccagcggtgtcttcggtatgtgaaaacccaattcttcaaccctacaggatccaacaggcaatcgcagctggcatcttacctttatcacccttgttcctccaacaatcatcagccctattacaacagttacctttggtgcatttattggcacaaaacatcagggcacaacaactacaacaacttggtggcta

SEQ ID NO: 321482 - DNA, 335 bp, Zea mays
  unsure (1)..(335): unsure at all n locations
agcaacatagaaagcacaatagtgtaccaacaatggcagccaaaatattttgcctgcttatgctccttggtctttctgcaagtgctgctacggcgaccattttcccacaatgctcacaagctcctatagcttcccttcttcccccgtacctctcaccagcggtgtcttcggtatgtgaaaacccaattcttcaaccctataggatccaacaggcaatcgcagctggcatcttacctttatcacccttgttcctccaacaatcatcagccctattacagcagttacctttggtgcatttattggcacanaacatcagggcacaacaactaccaaca

SEQ ID NO: 321483 - DNA, 245 bp, Zea mays
ccaccaaccaccactaccttcacaacaccttaaatacctactacaaatacctctaattccaaatcatacccaaattttaaaacccaaaaaccccaacattcactttcgacaacctttttaccacaaacacaatcccaaataccaaaacaatcattaacacatctaaccttaaaaaccataacaactcatcacaccacaccacttccccaacttaccctttccacccctaaccccttttcccttca

SEQ ID NO: 321484 - DNA, 319 bp, Zea mays
gtcgccattgttgctctattgttgctaatggcgaccaagatattttccctccttatgctccttgctctttctacatgtgttgctaacgcgacaattttccctcaatgctcacaagctcctatagcttcccttcttcccccataccttccatcaattatagcttcagtatgtgaaaacccagctcttcaaccatataggcttcaacaagcaatcgcagcaagcaacatacctttatcgcccttgttgtttcaacaatcaccagccctatctttggtgcagtcattggtacaaaccatcagggcacaacagctgcagcaac

SEQ ID NO: 321485 - DNA, 431 bp, Zea mays
gcattcaaaaacacaccaagcgaagcgcactagcaacgacctaacaccaatggctaccgaggatattagccctccttgcgcttcttgcccttttagtgagcgcaacaaatgcgttcattattccacagtgctcacttgctcctagtgccagtattccacagttcctcccaccagttacttcaatgggcttcgaacatccagccgtgcaagcctacaggctacaactagcgcttgcggcgagcgccttacaacaaccaattgcccaattgcaacaacaatccttggcacatctaaccctacaaaccattgcaacgcaacaacaacaacaacagtttctgccatcactgagccacctagccgtggtgaaccctgtcacctacttgcaacagcagctgcttgcatccaacccacttgctctggcgaacgtagct

SEQ ID NO: 321486 - DNA, 362 bp, Zea mays
ccgggctcgacgctatcgagaacatgaacggcaaggagctcgacggccgtaacatcaccgttaaccaggcccagtcccgtggcggtggcggtggcggcggtggctacggcggcggtcgcggcggcggcggctatggtggcgggcgccgtgacggcggttatggcggcggtggcggctacggcggtcggcgcgagggtggtggcggcggctacggaggcggtggcggctacggcggtcggcgcgagggtggtggtggcggctacggcggcggcggcggcggctggagggactgatgtgtgggcccatactggcttcggccgagttatctcatctatctatagtatcgtgttacccgtttcgct

SEQ ID NO: 321487 - DNA, 346 bp, Zea mays
ccaactagcaacatagaaagcacaatagtgtaccaacaatggcagccaaaatattttgcctccttatgctccttggtctttctgcaagtgctgctacggcgaccattttcccgcaatgctcgcaagctcctatagcttcccttcttcccccgtacctctcaccagcggtgtcttcggtatgtgaaaacccaattcttcaaccctacaggatccaacaggcaatcgcagctggcatcttacctttatcacccttgttcctccaacaatcatcagccctattacaacagttacctttggtgcatttattggcacaaaacatcagggcacaacaacctacccaacaaac

SEQ ID NO: 321488 - DNA, 339 bp, Zea mays
agaccagcaagcaacatagaaagtagaatccattagcaacaatagagcaacaatggcgaccaagatattttccctccttatgctccttgctctttctacatgtgttgctaacgcgacaattttccctcaatgctcacaagctcctatagcttcccttcttcccccataccttccatcaattatagcttcagtatgtgaaaacccagctcttcaaccatataggcttcaacaagcaatcgcagcaagcaacatacctttatcgcccttgttgtttcaacaatcaccagccctatctttggtgcagtcattggtacaaaccatcagggcaccaaccagctg

SEQ ID NO: 321489 - DNA, 335 bp, Zea mays
attcagaaacacaccaagcgaagcgcactagcaacgacctaacaacaatggctaccaagatattagccctccttgcgcttcttgccctttttgtgagcgcaacaaatgcgttcattattccacaatgctcacttgctcctagtgccattattccacagttcctcccaccagttacttcaatgggcttcgaacacctagctgtgcaagccaacatgcaacaacaagcgcttgcggcgagcgtcttacaacaaccaattgcccaattgcaacaacaatccttgccacatctaacaatacaagccatcacaacgcaacagcaacaacagttccttacc

SEQ ID NO: 321490 - DNA, 320 bp, Zea mays
  unsure (1)..(320): unsure at all n locations
gcaacatagaaagcacaatagtgtaccaacaatggcagccaaaatattttgcttcgttatgctccttggtctttctgcaagtgttgctaccgcaaccattttcccacaatgctcacaagctcctatagcttcccttcttcccccatacctctcaccagcggtgtcttcaatgtgtgaaaacccaattgttcaaccctacaggatccaacaggcaatcgcaacaggcatcttaccattatcacccttgttcctccaacaaccgtcagccctattacagcagttacctttggtccatttggtggcacanaacatcagggcac

SEQ ID NO: 321491 - DNA, 437 bp, Zea mays
gcggcaacatagaaagtagaatccattagcaacaatagagcaacaatggcgaccagtataggttccctccttatgctccttgctctttctacatgtgttgctaacgcgacaattttccctcaatgctcacaagctcctatagcttcccttcttgccccataccttccatcaattatagcttcagtatgtgaaaacccagctcttcaaccatatacgcttcaacaagcaatcgcagcaggcaacatacctttatcgcccttgatgtttcaacaatcaccagccctatctttggtgcagtcattggtacaaaccatcatggcacaacagctgcagcaactcgtgctacctgtgatcaaccaactagctctggcaaacctttctccctactctcagcatcagcactttcttgcattcaaccaactggatacactgaaccc

SEQ ID NO: 321492 - DNA, 431 bp, Zea mays
cagcaagcaacatagaaagtagaatccattagcaacaatagagcaacaatggcgaccaggatattttccctccttatgctccttgctctttctacatgtgttgctaacgcgacaattttccctcaatgctcacaagctcctatagcttcccttcttcccccataccttccatcaattatagcttcagtatgtgaaaacccagctcttcaaccatataggcttcaacaagcaatcgcagcaagcaacatacctttatcgcccttgttgtttcaacaatcaccagccctatctttggtgcagtcattggtacaaaccatcagggcacaacagctgcagcaactcgtgctacctgtgatcaaccaagtagctctggcaaacctttctccctactctcagcaacaacaatttcttccattcaaccaactgtctac

SEQ ID NO: 321493 - DNA, 280 bp, Zea mays
ttatttcattcgaccttcatctattcgaaccgtactctatcttaagttggaatttcaggatcgtgggacgattcactctcacccaattttttttttgtcctcctatacctcttcatatattgtagtaccctatttcaacctcagtcacacattctccacaccttgtcttatgcataaaccgtaccaatttataattgttataaatgaacctccaaaaacatataacacatttgatcttcttctcttctattctatatacctgccatttcaaacatacttc

SEQ ID NO: 321494 - DNA, 364 bp, Zea mays
gtcagcctagcaattagctcatcgactccagattggagaactcgacaccatgaaggtgctgatcgttgcccttgctctcctggcgctcgctgcgagcgccgcctccagtacaagcggcggctgtggctgccagacaccaccgtttcatctaccgcctccgttctatatgccgcctccgttctatctgccgccgcagcagcagccgcagccatggcaataccccactcaaccaccgcagctaagcccgtgccagcagttcggatcctgcggcgtcggcagcgtcggcagcccgttcctgggccagtgcgtcgagttcctgaggcaccagtgcaagccccgggccggggccggaaaccggcccccc

SEQ ID NO: 321495 - DNA, 341 bp, Zea mays
  unsure (1)..(341): unsure at all n locations
ctccagagcgcagaagaacccgatcgacaccatgagggtgttgctcgttgccctcgctctcctggctctcgctgcgagcgccacctccacgcatacaagcggcggctgcggctgccagccaccgccgccggttcatctaccgccgccggtgcatctgccacctccggttcacctgccacctccggtgcatctcccaccgccggtccacctgccgccgccggtccacctgccaccgccggtccatgtgccgccgccggttcatctgccgccgccaccatgccactaccctactcaaccgccccggcctcagcctcatccccagccacancccatnngcccgt

SEQ ID NO: 321496 - DNA, 98 bp, Zea mays
caccaccttttcatctacctccttctttctatatgccgcctcctatctatctgccttctcatcaacatctctcaaccatttcaataccccactcaacc

SEQ ID NO: 321497 - DNA, 408 bp, Zea mays
  unsure (1)..(408): unsure at all n locations
gagaccaacaagcaacatagaaagtggaatccagtagcaacaacagagcaacaatggcgagcaagatattgtccctccttatgctccttgctctttctgcatgtgttgctaacgcgacaattttccctcaatgctcacaagctcctatagcttcccttcttcccccataccttccatcaatgatagcttcagtatgtgaaaacccagctcttcagccctataggctccaacaagcaatcgcagcaagcaacatacctttatcacccttgttgtttcaacaatcgccagccctatctttggtgcagtcattggtacaaaccatcanggcacagcagctgcagcaactcgtgctacctgtgatcaaccaagtagctctggcaaacctttctccctactcttagcaacaac

SEQ ID NO: 321498 - DNA, 392 bp, Zea mays
ttatccctccttgcgcttcttgcgctgtttgcgagcgcagcaaatgcgtccattattccacaatgctcacttgctcctagttccattattccacagttcctcccaccagttacttcaatggccttcgaacacccagctgtgcaagcctataggctacaacaagcgattgcggcgagcgtcttacaacaaccaattgcccaattgcaacaacaatccttggcacatctaacattacaaaccatcgcaacgcaacagcaacaacaggtcctaccagcactgagccaactaaccatggtgaaccctggtcgctacttgcaacagcagctggttgcatccaacccacttgctctagcaaacgtagttgcaaaccagcaacaacaacaactgcaaca

SEQ ID NO: 321499 - DNA, 268 bp, Zea mays
gcaacaacctaacaacaatggctaccaagatattatccctccttgcgcttcttgcgctgtttgcgagcgcaacaaatgcgtccattattccacaatgctcacttgctcctagttccattattccacagttcctcccaccagttacttcaatggccttcgaacacccagctgtgcaagcctataggctacaacaagcgattgcggcgagcgtcttacaacaaccaattgcccaattgcaacaacaatccttggcacatctaacaataca

SEQ ID NO: 321500 - DNA, 266 bp, Zea mays
gacgtatagtagtacatatggtgcattattgcatgtagtgtagacgtatagtagtagatgcaataatgcaccacatgtacgcgtacgcgcgccgagctgtgtggacgccgcagctagcatgcacggccatcgttcctatacgtcgtcgtctgtcgttcgagtactcatgagctgtgtcgtcgacgtccacccatgcatccggccgccacgctttgatgatggtcatgacatcttgacaataaacacgtgcatgcagtattatatac

SEQ ID NO: 321501 - DNA, 125 bp, Zea mays
ggcctcgatccgatccgccgagtgcactctcacctttgcccactccgatcgaatcgaggggggcctaggtcgagaagaagatgataaccctcaaaagctccgatggctaggagttcgaggtggaa

SEQ ID NO: 321502 - DNA, 375 bp, Zea mays
  unsure (1)..(375): unsure at all n locations
gcacagagaagacggcggcgacatctacacttgctgaccggcgccattccgtcggtgtgcgcttctcgccgataattatccctgcaccagtttgagttggagaagacgaacttccaccgtcttgggaccctataccctctcctttagttagcaatggatgttgcactaagagatcaccttagacggaggagagatgaggaggaggatgatatgatgctgnttttttcctatgctacatatattgggttctagttcanacatagtaagggagaagaagcgaaggcatacatcanagttatcttagaagggaggggctggttcgtgatacaaggattaaggtcgagggaaagctagcattcttcttatacatgctca

SEQ ID NO: 321503 - DNA, 317 bp, Zea mays
ctctgctgcttatttacagcagcaacaactactaccattcagccagctagctgatgtgagccctgctgccttcttgacacaacaacagttgttgccgttctacctgcacgctatgcctaacgctggcaccctcttacaactgcaacaattgctgccattcaaccaacttgctttgacaaactcaacagtgttctaccaacaacccatcattggtggtgccctcttttagattgcttatgagttatagttcaataatgaagttttttggatgatgtttgtggcgtcccagaaataagaaagtacatttctagattctt

SEQ ID NO: 321504 - DNA, 255 bp, Zea mays
cagccatgatctaccttcaacccatcattgccggtgcacctctgcgagatcacttgtgaaacttcgatgaccattaaactgttgcgtctgatgcttgcggctatcgctttaatatcaagggtcatttgtacacagacaggcggctgcaactgtgctcaccatctaaacgatgcgcacttacatactccagcatgccatgatacacattttctatagcgtcaaccaccatcacatcattggccgcagcattaacac

SEQ ID NO: 321505 - DNA, 370 bp, Zea mays
gctccttggtctttctgcaagtgctgctacggcgaccattttcccgcaatgctcgcgagctcctatagctgcccttcttcccccgtacctctcaccagcggtgtcttcggtatgtgaaaacccaattcttcaaccctacaggatccaacaggcaatcacagctggcatcttacctttatcacccttgttcctccaacaatcatcagccctattacatcagttacctttggtgcatttattggcacaaaacatcagggcacaacaactacaacaacttgtgctagcaaaccttgctgcctactctcagcaacagcagtttcttccattcaaccaactagctgcattgaactctgcttcttatttgcaacac

SEQ ID NO: 321506 - DNA, 433 bp, Zea mays
ctatgacaacagttacctttggtgcatttattggcacaaaacatcagggcacaacaactacaacaacttgtgctagcaaaccttgctgcctactctcagcaacagcagtttcttccattcaaccaactaggttcattgaactctgcttcttatttgcaacaacaacaactaccattcagccagctacctgctgcctacccccagcaatttcttccattcaaccaactagcagcattgaactctcctgcttatttacagcagcaacaactactaccattcagccagctagctggtgtgagccctgctaccttcttgacacaaccacagttgttgccgttctaccagcacgttgcgcctaacgctggcaccctcttacaactgcaacaattgctgccattcaaccaacttgctttgacaaacccaacaatgttct

SEQ ID NO: 321507 - DNA, 161 bp, Zea mays
ctgcgacaaacccagcagcgttctacctacaacccatcattggtggtgccctcttttagatttcttatgagttatagttcgataataaagttttttgtctgatgtttgtggcttcccagaaataagaaagtacatttctaatacaacaaccaaatacataa

SEQ ID NO: 321508 - DNA, 330 bp, Zea mays
tgcgccttgcagctgtcacatctgtgtcctcgctcctgccgcgcgatgacctaacgctcatgtgctccacaaacccctccctcatggcgcatgctaccacgtggtggggccgcctggccgagcttgcgctggactctgcagacgctgtttccgccggtgcgtttgaggctcttgcacggctgttccaggagctagaggggcgccgcatgagccggctagctggagacaagcttgttgatggagaaggtgcgcttgcagtgcgtgcccagtgggcggctgatgccattgatttcatttggtcaaggcgcaacatgctgattgcgcgctcta

SEQ ID NO: 321509 - DNA, 443 bp, Zea mays
ccaactagcaacatagaaagcacaatagtgtaccaacaatggcagccaaaatattttgcttccttgggctccttggtctttctgcaagtgttgctaccgcaaccattttcccacaatgctcacaagctcctatagcttacctacttaccccatacctctcaccagcggtgtcttcaatgtgtgaaaacccaattgttcaaccctacaggatccaacaggcaatcgcaacaggcatcttaccattatcacccttgttcctccaacaaccgtcagccctattacagcagttacctttggtccatttggtggcacaaaacatcagggcacaacaactacaacaacttgtgctagcaaaccttgctgcatactctcagcaacatcaggttcttccattcaaccaactggctgcattgaactctgcttgctatttgcaacaacaatta

SEQ ID NO: 321510 - DNA, 193 bp, Zea mays
gacgcacgcgtccgaatcgctaatgcactctgctcgcccgctgagtcgctgcgcctcgcagctgtcacatctgtgtcctcgatactcccgcgcgaagacctaacgcttatgtgctgcacaaacccctccctaatggcgcatgctaccacgtctggaggccgactggccgagcttgggcctgactatgcagacg

SEQ ID NO: 321511 - DNA, 429 bp, Zea mays
acgcgcaatgctcgcaagctcctatagcttaccttcgtccgccgtacctctgaccagcggtgtcttcggtatgtgaaaacccaattcttcaaccctacaggatccaacaggcaatcgcagctggcatcttacctttatcacccttgttcctccaacaatcatcagccctattacaacagttacctttggtgcatttattggcacaaaacatcagggcacaacaactacaacaacttgtgctagcaaaccttgctgcctactctcagcaacagcagtttcttccattcaaccaactaggttcattgaactctgcttcttatttgcaacaacaacaactaccattcagccagctacctgctgcctacccccagcaatttcttccattcaaccaactagcagcattgaactctcctgcttatttacagcagc

SEQ ID NO: 321512 - DNA, 381 bp, Zea mays
  unsure (1)..(381): unsure at all n locations
gcaacatagaaagcacaatagtgtaccaacaatggcagccaaaatattttgcctccttatgctccttggtctttctgcaagtgctgctacggcgaccattttcccgcaatgctcgcaagctcctatagcttcccttcttcccccgtacctctcaccagcggtgtcttcggtatgtgaaaacccaattcttcaaccctacaggatccaacaggcaatcacagctggcatcttacctttatcacccttgttcctccaacaatcatcagccctattacatcagttacctttggtgcatttattggcacanaacatcagggcacaacaactacaacaacttgtgctagcaaaacctgctggctactctcagcaacagcaggttct

SEQ ID NO: 321513 - DNA, 423 bp, Zea mays
tgcaacgcaacaacaacaacaacaacagtttctgccatcactgagccacctagccgtggtgaaccctgtcacctacttgcaacagcagctgcttgcatccaacccacttgctctggcgaacgtagctgcataccagcaacaacaacagctgcaacagtttatgccagtgctcagtcaactagccatggtgaaccctgccgtctacctacaactactttcatctagcccgctcgcggtgggcaatgcacctacgtacctacaacaacagttgctgcaacaaattgtaccagctctgactcagctagctgtggcaaaccctgctgcctacttacaacagttgctttcattcaaccaaatggctgggtcaaactctgctgcgtacctacaacagcgacaacagttacttaatccattggcagtggc

SEQ ID NO: 321514 - DNA, 88 bp, Zea mays
tataacggtgttaagcaataaaataccatacattatgatgtttgtactatgatatttgaataagaatactaattgtaattataatgct

SEQ ID NO: 321515 - DNA, 425 bp, Zea mays
  unsure (1)..(425): unsure at all n locations
atagaaagtggaatgcagtagcaacaacagagcaacaatggcgaccaggatattttgcgctgttatgctgcttgctctttctgcatgtgttgctaacgcgacaattttccctcaatgctcacaagctcctatagcttcccttcttcccccataccttccatcaatgatagcttcagtatgtgaaaacccagctcttcagccctataggctccaacaagcaatcgcagcaagcaacatacctttatcacccttgttgtttcaacaatcgccagccctatctttggtgcagtcattggtacaaaccatcaaggcacagcagctgcagcaactcgtgctacctgtgatcaaccaagtagctctggcanaccttttctcctactctcagcaacaacaaattcttccattcaaccaactgtctacactga

SEQ ID NO: 321516 - DNA, 426 bp, Zea mays
gaccaactagcaacatagaaagcacaatagtgtaccaacaatggcagccaaaatattttgcttccttatgctccttggtctttctgcaagtgttgctaccgcaaccattttcccacaatgctcacaagctcctatagcttcccttcttcccccatacctctcaccagcggtgtcttcaatgtgtgaaaccccaattgttcaaccctacaggatccaacaggcaatcgcaacaggcatcttaccattatcacccttgttcctccaacaaccgtcagccctattacagcagttacctttggtccatttggtggcacaaaacatcagggcacaacaactacaacaacttgtgctagcaaaccttgctgcatactctcagcaacatcagtttcttccattcaaccaactggctgcattgaactctgctgc

SEQ ID NO: 321517 - DNA, 425 bp, Zea mays
tccacgcgtgcgcttctatcagtaccatcaatcatcattcatcttaggagtataggcagcaaatcaaatctgcaacatcaattatctaactccaaaaaccatgaagctggtgcttgtggttcttgctttcattgctttaatatcaagtgtttcttgtacacagacaggcggctgcagctgtggtcaacaacaaagccatgagcagcaacatcatccacaacaacatcatccacaaaaacaacaacatcaaccaccaccacaacatcaccagcagcagcaacaccaacaacaacaagttcacatgcaaccacaaaaacatcagcaacaacaagaagttcatgttcaacaacaacaacaacaaccgcagcaccaccaccaacaacaacaacaacagcaccaacaacaacatcaatgtgaaggccaac

SEQ ID NO: 321518 - DNA, 422 bp, Zea mays
aaaccacatgcgaatcgtatattgcctcttagtttatacatgtgaatatatgaaatatatgatgcatgtgttactagaattttcttattgtttttagtagcatatagtggtgggtttcgaagaacaatatggttttatggatccagctcaatagaataaggatcagttggattgcggtacgaaatcggagttcatacttcatataactatttcttattcgtgctgatattttttggtgttcatgtacctattcattatgcgtcgtttgcttggtacttgcacatgattctgtcgaattgtccgttacatggctcacaggttttggccccagttcattgatttgcttgttggtaccgctattgaccatccaatgcagtgttctcaaggtccaaagtacgtggaccttcagttggtgtaatcag

SEQ ID NO: 321519 - DNA, 427 bp, Zea mays
ccagcaagcaacatagaaagtagaatccattagcaacaatagagcaagggtggcgaccgagagattttccctgcttatgctccttgctctttctacatgtgttgctaacgcgacaattttccctcaatgctcacaagctcctatagcttcccttcttcccccataccttccatcaattatagcttcagtatgtgaaaacccagctcttcaaccatataggcttcaacaagcaatcgcagcaagcaacatacctttatcgcccttgttgtttcaacaatcaccagccctatctttggtgcagtcattggtacaaaccatcagggcacaacagctgcagcaactcgtgctacctgtgatcaaccaagtagctctggcaaacctttctccctactctcagcaacaacaatttcttccattcaaccaactg

SEQ ID NO: 321520 - DNA, 442 bp, Zea mays
ctcacgagctcctatagctgcccttcttcccccataccttccatcaatgaccgcttcagtttgtgaaaacccaggccttcaaccctacaggctccaacaagcaatcgcaacaagcaacttacctttatcacccctgttctttcaacaatcgccagccctatctttggtgcagtcattggtacaaaccatcagggcacaacagctgcaacaactcgtgctaccagtgatcagccaagtagctctggcaaacctttctccctactctcagcaacaacaatttcttccattcaaccaactgtctacactgaaccctgctgcttatttaacacaacaacaactactaccattcagccagctagctactgcctactctcagcagcaacaatttcttccatttaaccaattggccgcactgaacccctctgcttatttccagcagcaa

SEQ ID NO: 321521 - DNA, 429 bp, Zea mays
gagaccaactagcaacatagaaagcacaatagtgtaccaacaatggcagccaaaataggttgcctccttatgctccttggtctttctgcaagtgctgctacggcgaccattttcccgcaatgctcgcaagctcctatagcttcccttcttcccccgtacctctcaccagcggtgtcttcggtatgtgaaaacccaattcttcaaccctacaggatccaacaggcaatcgcagctggcatcttacctttatcacccttgttcctccaacaatcatcagccctattacaacagttacctttggtgcatttattggcacaaaacatcagggcacaacaactacaacaacttgtgctagcaaaccttgctgcctactctcagcaacagcagtttcttccattcaaccaactaggttcattgaactctgcttct

SEQ ID NO: 321522 - DNA, 292 bp, Zea mays
gctgtggtgaaccctgtcgcctacttgcaacagcagttgcttgcatccaacccacttgctctggcaaacatagttgcatacgaacaacaacaacaattgcaacagtttctaccagcgctcagtcaactagccatggtgaaccctgccgcctacctacaacagcaacaactgatttcatctagccctctcgctgtggttaatgcacctacatacctgcaacaacagttgctgcaacagattgtaccagctctgactcagctagctgtggcaaaccctgctgcctacttgcaac

SEQ ID NO: 321523 - DNA, 368 bp, Zea mays
ataggagcttgtgagcaacatacctttatcgcccttgttgtttcaacaatcgccagcggtatctttggtgcagtcattggtacaaaccatcagggcacaacagctgcagcaactcgtgctacctctgatcaaccaagtagctctggcaaacctttctccctactctcagcaacaacaatttcttccattcaaccaactgtctacactgaaccctgctgcttatttgcagcaacaactattaccatttagccagctagctactgcctactctcagcaacaacaacttcttccatttaaccaattgcccgaactgacccccgctgcttatttgcagcaacaaattactactaccattttaccagctagct

SEQ ID NO: 321524 - DNA, 435 bp, Zea mays
aggcaccaaatcaaatctgcaacatgaattatctaactccaaaaaccatgaagctggtgcgttgtggttcttgcgtttcattgctttagtatcaagtgtttcttgtacacagacaggcggctgcagctgtggtcaacaacaaagccatgagcagcaacatcatccacaacaacatcatccacaaaaacaacaacatcaaccaccaccacaacatcaccagcagcagcaacaccaacaacaacaagttcacatgcacccccaaaaccttaagcaccaccagaaggtcattgtcaaccaccacccacaccaacggaagaaccacaaccaccaccaccaccaccggacccaccaccaccttcatggtaaaggccaccaccaccttacccaccattaccaaggccttttccacaaccccaaccgagcccttagccacac

SEQ ID NO: 321525 - DNA, 137 bp, Zea mays
gctagctgcacgcagccgggcaggcttcatcacacacattcacgacacgcctgtgcgggggcaatgtgcagccatcaacgcgcccgctgtacacctactacagagattgcccctgggccacactctgatacacaccc

SEQ ID NO: 321526 - DNA, 311 bp, Zea mays
cgttctcgtcgtgtgcctggctccgtcagctgccagcgcctctgcaatgcagatgcgctgcccctgcgcggggctgcagggcttgtacggcgctggcgccggcctgacgacgatgatgggcgccggcgggctgtacccctacgcggagtacctgaggcagccgcagtgcagcccgctggcggcggcgccctactacgccgggtgtgggcagacgagcgccatgtaccagccgctccggcaacagtgctgccagcagcagatgaggatgatggacgtgcagtccgtcgcgcagcagctgcagatgatgatgc

SEQ ID NO: 321527 - DNA, 220 bp, Zea mays
aacatccttctatcagtaccatcactcatgcattcatcttagtactataggggcacagtgccatgtgctctgagatccttcctgctcgaccgcccgtgcccgtcgactcgtcgttcttgccggccgcgcctcaccttcgacctctccttctacagggggatcggatacgccacaggctgcacgacggtgctgtgggtcttcggctactgctccctcatct

SEQ ID NO: 321528 - DNA, 402 bp, Zea mays
caacaatggcagccaaaatagtttgcctccttatgctccttgggctttctgcaagtgctgctacggcgaccattttcccgcaatgctcgcaagctcctatagcttcccttcttcccccgtacctctcaccagcggtgtcttcggtatgtgaaaacccaattcttcaaccctacaggatccaacaggcaatcgcagctggcatcttacctttatcacccttgttcctccaacaatcatcagccctattacaacagttacctttggtgcatttattggcacaaaacatcagggcacaacaactacaacaacttgtgctagcaaaccttgctgtctactctcagcaacagcagcttcttccattcaaccaactatgttcattgaactctgcttcttatttgcaac

SEQ ID NO: 321529 - DNA, 430 bp, Zea mays
aacatccttctatcagtaccatcaatcatcattcatcttagtagtataggcaccaaatgaaatctgcaacatgaattatctaactccaaaaaccatgaagctggtgcttgtggttcttgctttcattgctttagtatcaagtgtttcttgtacacagacaggcggctgcagctgtggtcaacaacaaagccatgagcagcaacatcatccacaacaacatcatccacaaaaacaacaacatcaaccaccaccacaacatcaccagcagcagcaacaccaacaacaacaagttcacatgcaaccacaaaaacatcagcaacaacaagaagttcatgttcaacaacaacaacaacaaccgcagcaccaccaccaacaacaacaacaacagcaccaacaacaacatcaatgtgaaggccaacaacaacatcac

SEQ ID NO: 321530 - DNA, 308 bp, Zea mays
aaaaataataattaaaataaaataaatataaaaaaataaatataaaaaaacaataattaataaattcaaaataaaaaataaacatatataataaaacaactataaataaataaaataaaaatatataaataatatataaaaaaattaaaaaaaaaaatataatataaaaaaaaaaaataataaatattataaaaataattattttaaatataaaataaaataataaaaataaaaaaatataattataatatacaaaattataaataataaaatataaaatatatatataaataaaaaaaatacataat

SEQ ID NO: 321531 - DNA, 390 bp, Zea mays
aacatagaaagtagaatccattagcaacaatagagcaacaatggcgaccaagatattttccctccgtatgctccttgctctttctacatgtgttgctaacgcgacaattttccctcaatgctcacaagctcctatagcttcccttcttcccccataccttccatcaattatagcttcagtatgtgaaaacccagctcttcaaccatataggcttcaacaagcaatcgcagcaagcaacatacctttatcgcccttgttgtttcaacaatcaccagccctatctttggtgcagtcattggtacaaaccatcagggcacaacagctgcagcaactcgtgctacctgtgatcaaccaagtagctctggcaaaacctttctccctactctcagc

SEQ ID NO: 321532 - DNA, 166 bp, Zea mays
  unsure (1)..(166): unsure at all n locations
attttgagcattcagaaacacaccaagcgaagcacattagcaacaacgtaacaacaatggctaccaagatatgatccctccttgcgcttcttgcgctttttgcgagcgcaacanatgcgttcattattccacaatgctcacttgctccaagttccattattacaca

SEQ ID NO: 321533 - DNA, 371 bp, Zea mays
  unsure (1)..(371): unsure at all n locations
caactagcaacatagaaagcacaatagtgtaccaacaatggcagccaaaatattttgcggccttatgctccttggtatttctgcaagtgctgctacggcgaccattttcccgcaatgctcacaagctcctatagcttcccttcttcccccgtacctctcaccagcggtgtcttcggtatgtgaaaacccaattcttcaaccctacaggatccaacaggcaatcgcagctggcatcttacctttatcacccttgttcctccaacaatcatcagccctattacagcagttacctttggtgcatttattggcacanaacatcagggcacaacaactacaacaacttgtgctagcaaaccttgctgnctactctc

SEQ ID NO: 321534 - DNA, 244 bp, Zea mays
gtgcaatcacacgtacatcagtaacaccatgaagactatgttcatcaatagctcctacgaccgctgtgccctaaccatcaccgtctgctccggaaccaccaactccttcactgtgaacgccactaacagcataaccaacaatcacttggccatgtgcaacaacacgaacagagccatgagcaacaccatggacagagccctgcgtcacagcattggcaactatatcagggtgatgacaagctgc

SEQ ID NO: 321535 - DNA, 302 bp, Zea mays
cgtcgacgcacgcgtccgcgatcttcttcggctgttgaccgcccgtgcagtgctctacttgcttgggggcgtgcgtgagggacgcggtgaccgacttgcttgtcgtcagctgtgatggaggggcggatgctgcagactgctgcgcagctcgacgctggcggaccagctcgccgcggtcgctgaaggtcgggctccgcactgcgctgcgccacgttctggaagtgggtttcgtgaatctgatcggcgctttcaggtcagctctacattacagatggtggttgaaagcaaaaagggaacggatc

SEQ ID NO: 321536 - DNA, 196 bp, Zea mays
ctcccgatctagattgctaacctcttcgtcttctgtttcatgacctacttcttcgtgtcctcccggcgggtcttgatggagctgtacgccaactatgtgcccaataccgctcagaactttcgctctctgtgcactgtccacaattgcgtgctcaatttctttaagccgctatactacaattgctccatctttctac

SEQ ID NO: 321537 - DNA, 311 bp, Zea mays
attagctttatctactccagagcgcataagaacccgatcgacaccatgagggtgttgctcgttgccctcgctctcctggctctcgctgcgagcgccacctccacgcatacaagcggcggctgcggctgccagccaccgccgccggttcatctaccggcgccggtgcatctgccaacttcggttcacctgccacctccggtgcatctcccaccggcggtccaactgccggcggcggtccaactgccaccggcggtccatgtgccggcggcgggtcatctgccggcggcaccatgccactaccctacttaacc

SEQ ID NO: 321538 - DNA, 374 bp, Zea mays
ttcccgctcgagccacgcgtccggaaagaagcaagatcaagatcacggatatccaaatcaagcttagcagacagtgcgtgcaggacacctgaaggcccgagacctatcgctgtgcagcttaccatcacagagttctaccgctcgaagaaagcgcataacgtataatctgggaagaagccggcgggagaagggcacgccgcgagggaaggctcgagaaaatcttccgacagggacctcgacaagagcctgccgaagtctgttcagcgccgtctcctcttcgattgctgaggactatgtagcctggcttttttttggtgaacactgcactgtaatcttggtgccactgctgtagatgacctatggaatgccttaac

SEQ ID NO: 321539 - DNA, 418 bp, Zea mays
aagcacaatagtgtaccaacaatggcagccaaaatattttgcctccttatgctccttggtcttgctgcaagtgctgctacggcgaccattttcccgcaatgctcgcaagctcctatagcttcccttcttcccccgtacctctcaccagcggtgtcttcggtatgtgaaaacccaattcttcaaccctacaggatccaacaggcaatcgcagctggcatcttacctttatcacccttgttcctccaacaatcatcagccctattacaacagttacctttggtgcatttattggccccaaaccttaaggcaccaccacctccaccacctgggcctaccaaacttggttgctaattttaacaaccacaagttctttcattcaacccactaaggtcaatggactctgcttcttaattgcaac

SEQ ID NO: 321540 - DNA, 369 bp, Zea mays
  unsure (1)..(369): unsure at all n locations
caacatagaaagcacaatagtgtaccaacaatggcagcacaaactataacggatcatcagggtccacggggatattgcaagtgcttatactgcttactatttttgcatgtggcgctaacgctactatagttcctcaatgctcacaagctcctatagctacccttcttcccccataccttccatcaatgatagcttcagtatgtgaaaacccagctcttcagccctataggctccaacaagcaatcgcagcaagcaacatacctttatcacccttggtggttcaaccattggccagccctatctttggtgcagtcattggtacaaaccatcanggcacatcagctgcagcaactcgtgctacctgtgatc

SEQ ID NO: 321541 - DNA, 333 bp, Zea mays
gcagttacctttggtgcatttgttggcacaaaacatcaaggcacaacaactacaacgacttgtgctaggaaaccttgctgcctactctcagcaacagcagtttcttccattcaaccaactggctgcattgaactctgctgcttatttgcaacaacaactaccattcagtcagctagctgctgcctacccccagcaatttcttccattcaaccaactggcagcattgaactctgctgcttatttacaacagcaacagctaccaccattcagccagctagctgatgtgagccctgttgccttcttgacacaacaacagttgttgccgttctacct

SEQ ID NO: 321542 - DNA, 251 bp, Zea mays
tgccacgctcttccgccgcgacgcagcctcgtcctcgccgccgtccgcggaccctcccggctccagcggcgacgcccaggcccagcacccgttcctcgcgctcctgggcccgccgctgccgccggtcaccgaggcggcggagccctccggggaggaggaggcgccgccggatgaggcgctcgacggcaaggaggcggcgcaccacgcgaggacggtgtgcgcccagccgccgcggcgggccatgtcggaga

SEQ ID NO: 321543 - DNA, 331 bp, Zea mays
aacgagatctctttggcatacgtagagttaaactatcaaggaccaacgtcagcaaacaggaggtctacacatactcggctagtactatgagccagagcagcttacagacctcaaccacctctgtgttcataaattccgatcgcttctgctactgcacctaccttcctaccagctctgtgctagctacccatagcactaactgtcattcaacatgctgttagaaacgatgtagcctacttaaaagcgacagtttcatgaaaccccatgactctgacaaactgtggtgtacacctactacatcgactacaaagattcactccagagatagtgg

SEQ ID NO: 321544 - DNA, 436 bp, Zea mays
  unsure (1)..(436): unsure at all n locations
attgagaccaactagcaacatagaaagcacaatattgtaccaataatggcagccaaaggattttgcctcattatgctccttggtctttctgcaagtgctgctacggcgagcattttcccgcaatgctcacaagctcctatagcttcccttcttcccccatacctctcaccagcgatgtcttcagtatgtgaaaatccaattcttctaccctacaggatccaacaggcaatcgcagcaggcatcttacctttatcacccttgttcctccaacaatcatcagccctattacagcagttacctttggtgcatttattggcacataacatcagggcacaacaactacaacaactcgtgctagcaaaccttgctgcctactctcagcaacagcagttacctttggtgcatttgttggcacaaaacatcnaggcacaacaac

SEQ ID NO: 321545 - DNA, 373 bp, Zea mays
caacatagaaagcacaatagtgtaccaacaatggcagccaaaatattttgcttccttatgctccttggtctttctgcaagtgttgctaccgcaaccattttcccacaatgctcacaagctcctatagcttcccttcttcccccatacctctcaccagcggtgtcttcaatgtgtgaaaccccaattgttcaaccctacaggatccaacaggcaatcgcaacaggcatcttaccattatcacccttgttcctccaacaaccgtcagccctattacagcagttacctttggtccatttggtggcacaaaacatcaaggcacaacaactacaacaacttgtgctaacaaaccttgcttcatactctcagcaacatc

SEQ ID NO: 321546 - DNA, 320 bp, Zea mays
gagaccaactagcaacatagaaagcacaatagtgtaccaacaatggcagccaaaatatggggctggcttatgctccttggtctttctgcaagtgctgctaccgcaaccattttcccacaatgctcacaagctcctatagcttcctttcttcccccatacctctcaccagcggtgtcttcagtatgtgaaaacccaattcttcaaccctacaggatccaacaggcaatcgcagcaggcatcttacctttatcaaccttgttccttcaacaacccgcaggcctattacagcagttacctttggtgccattggtgggacaaaa

SEQ ID NO: 321547 - DNA, 272 bp, Zea mays
cccacgcgtccggagaccaacaagcaacatagaaagtggaatccagtagcaacagcggagcaacaatggcgaccaagatattttccctccttatgctccttgctctttctgcatgtgttgctaacgcgacaattttcccttaatgctcacaagctcctatagctttccttctttccccataccttccatcaatgatagcttcagtatgtgaaaacccagctcttcagacctataggcttcaacaagcgattgcagcaagcgacataccttta

SEQ ID NO: 321548 - DNA, 440 bp, Zea mays
cttcttcccccgtacctctcaccaacggtgtcttcggtatgtgaaaacccaattgttgaaccctacaggatccaagaggcaatcgcagctggcatcttacctttatcacccttgttcctccaacaatcatcagccctattacagcagttacctttggtgcatttattggcacaaaacatcagggcacaacaactacaacaacttgtgctagcaaaccttgctgcctactctcagcaacagcagtttcttccattcaaccaactagctgcattgaactctgcttcttatttgcaacaacaacaactaccattcagccagctatctgctgcctacccccagcaatttcttccattcaaccaactgacagcattgaactctcctgcttatttacagcagcaacaactactaccattcagccagctagctggtgtgagccctgc

SEQ ID NO: 321549 - DNA, 291 bp, Zea mays
  unsure (1)..(291): unsure at all n locations
caaatagagaaattgaaaaatcaaaaggagaagctcgaatccctgtgtcgaacacgtacaggcagaaaggaaacaaggcccctccgccagtattccagatgccccttctagccaagaagtgtcagcgacaagtcaagaatcttaacattccagttgccccttctagccaagatgtgtcagcaacaagtcaagaatcttggcagttgtgcttgtcaatataccgttggtgccagctacagctngcggagatttctgaagcctgacattcagctgtcaacctaccgtccgtct

SEQ ID NO: 321550 - DNA, 379 bp, Zea mays
aagtgcttacctcgtgatacgcacagtcatcttccagcagtgtcatgcaagacttagagtctgctaaatctaggaggtctgtctgctggcgctgctcctatcacatattcttctaccgtgctcactgacactgtatgctgtgcacctctttaccagcagcacgatcatgagtcggatgaaagagatgtgcatcccagactatcgatccatatctgacctaactctcgactgcatgtggaatctgacctcgataatcgtcggtaaatcgaccatgataatcattcttacaacatccacatgtccagtgtttattgactcgcaacatcatgtgctgacatctacgatagctcatgctgacagaacttgctacctactctta

SEQ ID NO: 321551 - DNA, 248 bp, Zea mays
ccaagatattatccctccttgcgcttcttgcgctttttgcgagcgcaacaaatgcgttcgttatgccacaatgctcgcttgctccaagttccattattacacagttcctcccaccagttacttcaatgggcttcgaacacccagctgtgcaagcctataagctacaacaagcaattgcggcgagcgtcttacaacaaccaatttcccagttgcaacaacaatccttggcacatctaacaatacaaacc

SEQ ID NO: 321552 - DNA, 445 bp, Zea mays
gcaacatagaaagcacaatagtgtaccaacaatggcagccaaaatattttgcctccttatgctccttggtctttctgcaagtgctgctacggcgaccattttcccgcaatgctcgcaagctcctatagcttcccttcttcccccgtacctctcaccagcggtgtcttcggtatgtgaaaacccaattcttcaaccctacaggatccaacaggcaatcacagctggcatcttacctttatcacccttgttcctccaacaatcatcagccctattacatcagttacctttggtgcatttattggcacaaaacatcaaggcacaacaactacaacaacttgtgctagcaaaccttgctgcctactctcaacaacagcagtttcttccattcaaccaactaactgcattgaactctgcttcttatttgcaaccacaacaactaccattc

SEQ ID NO: 321553 - DNA, 321 bp, Zea mays
tgagaccaactagcaacatagaaagcacaatagtgtaccaacaatggcagccaaaatagtttgcctccttatgctgcttggtctttctgcaagtgctgctacggcgaccattttcccgcaatgctcgcaagctcctatagcttcccttcttcccccgtacctctcaccagcggtgtcttcggtatgtgaaaacccaattcttcaaccctacaggatccaacaggcaatcgcagctggcatcttacctttatcacccttgttcctccaacaatcatcagccctattacaacagttacctttggtgcatttattggcaccaaa

SEQ ID NO: 321554 - DNA, 447 bp, Zea mays
gcaacatagaaagcacaatagtgtaccaacaatggcagccaaaatattttgcttccttgtgctccttggtctttctgcaagtgctgctaccgcaaccattttcccacaatgctcacaagctcctatagcttcctttcttcccccatacctctcaccagcggtgtcttcagtatgtgaaaacccaattcttcaaccctacaggatccaacaggcaatcgcagcaggcatcttacctttatcacccttgttcctccaacaaccgtcagccctattacagcagttacctttggtgcatttgttggcacaaaacatcaaagcacaacaactacaacaacttgggctaggaaaccttgctgcctactctcagcaacagcagtttctttcattcaaccaactggctgcattgaactttgctgcttatttgcaacaacaactaccattcagtca

SEQ ID NO: 321555 - DNA, 283 bp, Zea mays
  unsure (1)..(283): unsure at all n locations
cccacgcgtccgcaacaagcaacatagaaagtggaatccagtagcaacaatagaacaacgatanggaccaagatacgggccctccttatgctccttgctctttctgcatgtgttgctaacgcgacaatattccctcaatgctcacaagctcctatagcttcccttcttcccccataccttccatcaatgatagcttcagtatgtgaaaacccagctcttcaaccctataggctccaacaagcaatcgcagcaaggaacatacctttatcacccttggttcaac

SEQ ID NO: 321556 - DNA, 452 bp, Zea mays
atgttgagcattcagaaacacacctagcgaagcgcactagcaacgacctaacaacaatggcttccaagacattatgcctccttgcgcttcttgccctttttgtgagtgcaacaaatgcgttcattattccacaatgctcacttgctccgagtgccattattccacagttcctccctccagttacttcaatgggcttcgaacacccagctgtgcaagcctataggctacaacaagcgcttgcggcgagcgtcttagaacaaccaattgcccaattacaacaacaatccttggcacatctaaccatacaaaccatcgcaacgcagcagcaacaagcactgagccacctagccgtggtgaaccctatcgcctacttgcaacaacagctgcttgcattcaacccacttgctttggcaaacgtagctgcataccaacaacaacaacagttgcaacag

SEQ ID NO: 321557 - DNA, 334 bp, Zea mays
attcagaaacacaccaagctaatcgcactatcaacgacctaacaacaatggctaccaggagattatccctccttgcgggtcttgccctttttgtgagcgcatcaaatgcgttcattattccacaatgctcacttgctcctagtgccattattccacagttcctcccaccagttacttcaatgggcttcgaacacctagctgtgcaagccaacatgcaacaacaagcgcttgctgcgagcgtcttacaacaaccaattgcccaattgcaacaacaatccttgccacatctaacattacaagccatcacaactcatcatcaacatcagtttctacc

SEQ ID NO: 321558 - DNA, 431 bp, Zea mays
caaacattatccaaaatgccaacccggagcagtacctgaattggtgatgggactgaggcattctagacgtgttggcttcaatatgtgaacctgaccatcctcagctaatgcagttggccgtgattgtgcgtggacaatatttctatcaatggtctgatcctgtttacatttattctgcagatgggggagaaaagagacaaggctctcaaggagctcatggaccaggtggccatgaagcagcccaacagcatgtgccatggaaacaaggataatttctgggagagccagggcttcaggttcattgcctctatgtcgatgctggcgctagtgatcctcgcaaagcgttgaagcggcatagtttaagcagatgtgaatgtagcgtttacattagcttgtaagctcgggcagttgtgcatactgcatgccaaaat

SEQ ID NO: 321559 - DNA, 253 bp, Zea mays
cccactcatcctcaaacattatccaaaattccaacctttttcactacctgaatttctcatccaactgaagcattctaaacatgttggcgttaatatattaacctaaccatcctcaactaattcaattctcctttatatttcctaaacaatatttctatcaatcctcttatcctttttacatttattctacatatcttttaaaaattacacatttctctcaatcacctcattaaccaattacctcattaacatt

SEQ ID NO: 321560 - DNA, 289 bp, Zea mays
  unsure (1)..(289): unsure at all n locations
cattcagaaacacacctagcgaagcgcactagcaacgacctaacaacaatggctgccgagatattatccctgtttgcgcttcttgccctttttgtgagcgcaacanatgcgttcattattccacaatgctcacttgctcctagtgccattattccacagttccttccttccagttacttcaatgggcttcgaacaaccaacttttccagcctaacagctacaaccagccccttgcggcgagcgtcttacaacaaccaattgcccaattaccacaacaatccttggcaca

SEQ ID NO: 321561 - DNA, 391 bp, Zea mays
aaggcatacaaagcgcaatacagtgactacaattgcagccaaaatatattacctacttgagcgccttaatctatgagcgagtgctacttaccgcgactatattccatcaatgctcacaaggtcatatagattcactagtttacccgtacatcatcaccaacgagtgtctgcagtatgtaataacacaaatcttcaaacctatataatctaacagacacactcagctatgatatcacatctatcacacttattcttccaacaatgacaacccctataacaccacatacatcagctgcatatatagtgacacaacatttgggaccactaattacaacaacttgtgctacaaaaccttgctgaatactctcagatacaccagcgtcttccatac

SEQ ID NO: 321562 - DNA, 446 bp, Zea mays
ggaatccagtagcaacaacagagcaacaatggcgaccaagatattttccctccttatgcgccttgctctttctgcatgtgttgctaacgcgacaattttccctcaatgctcacaagctcctatagcttcccttcttcccccataccttccatcaatgatagcttcagtatgtgaaaacccagctcttcagccctataggctccaacaagcaatcgcagcaagcaacatacctttatcacccttgttgtttcaacaatcgccagccctatctttggtgcagtcattggtacaaaccatcaaggcacagcagctgcagcaactcgtgctacctgtgatcaaccaagtagctctggcaaacctttctccctactctcagcaacaacaatttcttccattcaaccaactgtctacactgaaccctgctgcttatttgcagcaacaactat

SEQ ID NO: 321563 - DNA, 353 bp, Zea mays
tgagcattcagaaacacaccaagcgaagcgcactagcaacgacctaacaacaatggctagcaagggattagccctccttgcgcttcttgccctttttgtgagcgcaacaaatgcgttcattattccacaatgctcacttgctcctagtgccattattccacagttcctcccaccagttacttcaatgggcttcgaacacctagctgtgcaagccaacatgcaacaacaagcgcttgcggcgagcgttttacaacaaccaattgcccaattgcacaacaatccttgccacatctaacaatacaagccatcacaacgcaacagcaacaacaggtcctaccagcacttgaccacct

SEQ ID NO: 321564 - DNA, 422 bp, Zea mays
caacaatttcttccattcaaccaactgtctacactgaaccctgctgcttatttgcagcagcaacgattaccatttagccagctagctactgcctactctcagcaacaacaacttcttccatttaaccaattggccgcactgaaccccgctgcttatttgcagcagcaaatactactgccatttagcgagctagctgcagcaagtcgtgcttccttcttgacacagcaacagttgctgcctttctacaagcagtttggggctaaccccgcaacccttttacaactacaacaattggtgccctttgtccaacttgctttgacaaacccagcagccttctaccaacaacacatcattggtggtgccctcttttagattgattattagttgtaattcaataataaagttttttggatgatgtatgt

SEQ ID NO: 321565 - DNA, 446 bp, Zea mays
atttagaccaactagcaacatagaaagcacaatagtgtaccaacaatggcagccaaagtattttgcctccttatgctccttggtatttctgcaagtgctgctacggcgaccattttcccgcaatgctcacaagctcctatagcttcccttcttcccccgtacctctcaccagcggtgtcttcggtatgtgaaaacccaattcttcaaccctacaggatccaacaggcaatcgcagctggcatcttacctttatcacccttgttcctccaacaatcatcagccctattacagcagttacctttggtgcatttattggcacaaaacatcagggcacaacaactacaacaacttgtgctagcaaaccttgctgcctactctcagcaacagcagtttcttccattcaaccaactagctgcattgaactctgcttcttatttgcaacaacc

SEQ ID NO: 321566 - DNA, 215 bp, Zea mays
  unsure (1)..(215): unsure at all n locations
attcccaactcgacgcactcatccaatttanaccaactatcaacatataaaattcattactacaccaacactcacaaccaacataggctttctcaaatatggtcggtcttactactctaactactactacattgaccattttaacccactacttacattcatctataactcccacttttcacatctacctctacacaatcacacacttacctatt

SEQ ID NO: 321567 - DNA, 443 bp, Zea mays
  unsure (1)..(443): unsure at all n locations
cggacgcgtggggcaacatagaaagtggaatacagtagcaaaaatagagcaacagtggcggccaagatattgtccatccttatgctccttgctctttctgcatgtgttgctaacgcgaccatttttcctcaatactcacaagctcctatagctgcccttcttcccccataccttccatcaatgaccgctttagtatgtgaaaacccagcccttcaaccctacaggatccagcaagcaatcgcaacaagcaacttacctttatcacacctgttctttcaacaatcgccagccctatctttggtgcagtcattggtacaaaccatcagggcagaacagttgcagcaactcgtgctaccagtgatcagccaagtagctctggcaaacctttccccctactctcagcaacaacaatntcttccattcaaccaactgtctatactgaa

SEQ ID NO: 321568 - DNA, 113 bp, Zea mays
ggcgatgattgagtaataatgtgtcacgcatcaccatgggtggcagtgtcagtgtgagcaatgacctgaatgaacaattgaaatgaaaagaaaaaaagtactccatctgttcc

SEQ ID NO: 321569 - DNA, 453 bp, Zea mays
attgagaccaacaagcaacatagaaagtggaatacagtagcaaaaatagagcaacaatggcggccgagatattttccatccttatgctccttgctctttctgcatgtgttgctaacgcgaccatttttcctcaatactcacaagctcctatagctgcccttcttcccccataccttccatcaatgaccgctttagtatgtgaaaacccagcccttcaaccctacaggatccagcaagcaatcgcaacaagcaacttacctttatcacacctgttctttcaacaatcgccagccctatctttggtgcagtcattggtacaaaccatcaaggcagaacaggtgcagcaactcgtgctaccagtgatcagcccagtagctctggcaaacctttccccctactcttaacaacaacaaatttcttgcatttcaccaactgtctatactgaaccctgct

SEQ ID NO: 321570 - DNA, 222 bp, Zea mays
gcaacatagaaagcacaatagtgtaccaacaatggcagccaaaatattttgcctgctgatgctccttggtctttgtgcaagtgctgctacggcgaccattttcccacaatgctcacaagctcctatagcttcccttcttcccccgtacctctcaccagcggtgtcttcggtatgtgaaaacccaattcttcaaccctataggatccaacaggcaatcgcagc

SEQ ID NO: 321571 - DNA, 440 bp, Zea mays
cactagcaacatagaaagcacaatagtgtaccaacaatggcagccaaaatattgggcttccttatgctccttggtctttctgcaagtgctgctaccgcaaccattttcccacaatgctcacaagctcctatagcttcctttcttcccccatacctctcaccagcggtgtcttcagtatgtgaaaacccaattcttcaaccctacaggatccaacaggcaatcgcagcaggcatcttacctttatcacccttgttcctccaacaaccgtcagccctattacagcagttacctttggtgcatttgttggcacaaaacatcaaggcacaacaactacaacaacttgtgctaggaaaccttgctgcctactctcagcaacagcagtttcttccattcaaccaactggctgcattgaactctgctgcttatttgcaacaacaact

SEQ ID NO: 321572 - DNA, 232 bp, Zea mays
caactacaacaactcgtgctagcaaaccttgctgcctactctcagcaacagcagttaccgttagggcatttgttggcacagaacatcatggcacaacaactacaacaactcgtgctagcaaaccttgctgcctactctcagcaacaacagtttctgccattcaaccaactagctgcattgaactctgctgcttatttgcagcaacaacaactactaccattcagccagctag

SEQ ID NO: 321573 - DNA, 456 bp, Zea mays
gcaacatagaaagtggaatccagtagcaacaatagagcaacaatggcgaccaagatacggtcccggcttatgctccttgctctttctgcatgtgttgctaacgcgacaattttccctcaatactcacaagctcctatagcttcccttcttcccccataccttccatcaatgatagcttcagtatgtgaaaacccagctcttcaaccctataggctccaacaagcaatcgcagcaagcaacatacctttatcacccttggttcaacaatcgccagccctatctttggtgcagtcattggtacaaaccatcaaggcacagcagctgcagcaactcgtgctacctgtgatcaaccaagtagctctggcaaacctttcttcctactatcagcaacaaccaattctttcatgcaaccaactatctacactgaacccctgctgcttatttgcagcaacaact

SEQ ID NO: 321574 - DNA, 332 bp, Zea mays
ctcagagtgggttggcttctcctcccccaccggttcgtgttcaggttctggttcgtgggcgagagggaagagatggcggcgtcagacgttgagtaccgttgcttcgttggcggcctctcctgggccaccgacgaccactccctcaacaacgccttcagcacctacggcgaggtcctcgagtcgaagatcatcctggatcgggagacgcagaggtcccgcggcttcggcttcgtcaccttctacacggaggacgcgatgcgcaacgccattcgaggcatgaacggcaaggaactcgacggccgcaacatcaccgttaacgaggcccactcccg

SEQ ID NO: 321575 - DNA, 413 bp, Zea mays
ggaattcccgggattttgagcattcagaaacacacctagcgaagcgcactagcaacgacctaacaacaatggctaccaagatattaggcctcgttgcgcttcttgccctttttgtgagcgcaacaaatgcgttcattattccacaatgctcacttgctcctagtgccattattccacagttcctccctccagttacttcaatgggcttcgaacacccagctgtgcaagcctacaggctacaacaagcgcttgcggcgagcgtcttacaacaaccaattgcccaattacaacaacaatccttggcacatctaaccatacaaaccatcgcaacgcaacagcaacaacaatttctaccagcactgagccaactagctgtggtgaaccctgtcgcctacttgcaacagcagttgctt

SEQ ID NO: 321576 - DNA, 442 bp, Zea mays
attgagaccaactagcaacatagaaagcacaatagtgtaccaacaatggcagccaaaggattttgcttccttatgctccttggtctttctgcaagtgttgctaccgcaaccattttcccacaatgctcacaagctcctatagcttcccttcttcccccatacctctcaccagcggtgtcttcaatgtgtgaaaccccaattgttcaaccctacaggatccaacaggcaatcgcaacaggcatcttaccattatcacccttgttcctccaacaaccgtcagccctattacagcagttacctttggtccatttggtggcacaaaacatcagggcacaacaactacaacaacttgtgctagcaaaccttgctgcatactctcagcaacatcagtttcttccattcaaccaactggctgcattgaactctgctgcttatttgcaac

SEQ ID NO: 321577 - DNA, 348 bp, Zea mays
ttcccttctcttttcaccaattcctttatatacccaacataatcattatcaatacgaatatttaaaaactcaccatccccatcaacattaccaccacaatatccaccaacttctatcatattcaaccttaattaccatacacatcctactcccatcactcatctttacaactacctcatacactcacacttaacatctttctacttcttctaccataacatcaacatcaaccacctctatccttccatcactaaattctttctatctctactcttcatcaaacctcatccccacttctcccataacatctacaaacttatccacaccctcatccttatccaaatcctt

SEQ ID NO: 321578 - DNA, 449 bp, Zea mays
gcaattagctcatcgactccagattggagaactcgacaccatgaaggtgctgatcgttggccttgctctcctggcgctcgctgcgagcgccgcctccagtacaagcggcggctgtggctgccagacaccaccgtttcatctaccgcctccgttctatatgccgcctccgttctatctgccgccgcagcagcagccgcagccatggcaataccccactcaaccaccgcagctaagcccgtgccagcagttcggatcctgcggcgtcggcagcgtcggcagcccgttcctgggccagtgcgtcgagttcctgaggcaccagtgcagcccggcggcgacgccctacggctcgccacagtgccaggcgctgcagcagcagtgctgccaccagatcaggcaggtggagccgctgcaccggtaccaggcgacatacggggtggtcctgcaatcct

SEQ ID NO: 321579 - DNA, 339 bp, Zea mays
attttcagcattcaaaaacacaccaagcgaagcgcactagcaacgacctaacaccaatggctaccgagatattagccctccttgcgcttcttgcccttttagtgagcgcaacaaatgcgttcattattccacagtgctcacttgctcctagtgccattattccacagttcctaccaccagttacttcaatgggcttcgaacatccagccgtgcaagcctacaggctacaactagcgcttgcggcgagcgccttacaacaaccaattgcccaattgcaacaacaatccttggcacatctaaccctacaaaccattgcaacgcaacaacaacaacaacaac

SEQ ID NO: 321580 - DNA, 380 bp, Zea mays
agcaaagcggcagtgcgtagagaggatcgtcgaacagaacagcatgaagatggtcatcggtctcgtcgtgtgcctggctctgtcagctgccagcgcctctgcaatgcagatgccctgcccctgcgcggggctgcagggcttgtacggcgctggcgccggcctgacgacgatgatgggcgccggcgggctgtacccctacgcggagtacctgaggcagccgcagtgcagcccgctggcggcggcgccctactacgccgggtgtgggcagccgagcgccatgttccagccgctccggcaacagtgctgccagcagcagatgaggatgatggacgtgcaagccgtcgcgcagcagctgcagatgatgatgcagcttgagcgtg

SEQ ID NO: 321581 - DNA, 462 bp, Zea mays
ctcaccagcggtgtcttcaatgtgtgaaaccccaattgttcaaccctacaggatccaacaggcaatcgcaacaggcatcttaccattatcacccttgttcctccaacaaccgtcagccctattacagcagttacctttggtccatttggtggcacaaaacatcagggcacaacaactacaacaacttgtgctagcaaaccttgctgcatactctcagcaacatcagtttcttccattcaaccaactggctgcattgaactctgctgcttatttgcaacaacaattaccattcagccagctagttgctgcctacccccagcaatttcttccattcaaccaactagcagcattgaactctgctgcttatttacagcagcaacaactactaccattcagccagctagctgatgtgagccctgctgccttcttgacacaacaacagttgttgccgttctacctgca

SEQ ID NO: 321582 - DNA, 443 bp, Zea mays
agaaagcacaatagtgtaccaacaatggcagccaaaatattttgcttccttatgctcgttggtctttctgcaagtgttgctaccgcaaccattttcccacaatgctcacaagctcctatagcttcccttcttcccccatacctctcaccagcggtgtcttcaatgtgtgaaaccccaattgttcaaccctacaggatccaacaggcaatcgcaacaggcatcttaccattatcacccttgttcctccaacaaccgtcagccctattacagcagttacctttggtccatttggtggcacaaaacatcagggcacaacaactacaacaacttgtgctagcaaaccttgctgcatactctcagcaacatcagtttcttccattcaaccaactggctgcattgaactctgctgcttatttgcaacaacaattaccattcagccagct

SEQ ID NO: 321583 - DNA, 451 bp, Zea mays
gaaagtggaatccagtagcaacaatagagcaacaatggcgaccaagatactttccctccgtatgcgccttgctctttctgcatgtgttgctaacgcgacaattttccctcaatgctcacaagctcctatagcttcccttcttcccccataccttccatcaatgatagcttcagtatgtgaaaacccagctcttcaaccctataggctccaacaagcaatcgcagcaagcaacatacctttatcacccttgtttcaacaatcgccagccctatctttggtgcagtcattggtacaaaccatcaaagcacagcagctgcagcaactcgtgctacctgtgatcaaccaagtagctctggcaaacctttctccctactatcagcaacaacaatttcttccattcaaccaactatctacactgaaccctgctgcttatttgcagcaacaactatta

SEQ ID NO: 321584 - DNA, 423 bp, Zea mays
gaccaactagcaacatagaaagcacaatagtgtaccaacaatggcagccaaaatattgtgcttccttatgctccttggtctttctgcaagtgctgctaccgcaaccattttcccacaatgctcacaagctcctatagcttcctttcttcccccatacctctcaccagcggtgtcttcagtatgtgaaaacccaattcttcaaccctacaggatccaacaggcaatcgcagcaggcatcttacctttatcacccttgttcctccaacaaccgtcagccctattacagcagttacctttggtgcatttgttggcacaaaacatcaaggcacaacaactacaacaacttgtgctaggaaaccttgctgcctactctcagcaacagcagtttcttccattcaaccaactggctgcattgaactctgc

SEQ ID NO: 321585 - DNA, 233 bp, Zea mays
  unsure (1)..(233): unsure at all n locations
gaaagtggaatccaatagcaacaatagaacaacaatggcgaccaaagatctttcccggcttatgctccttgctctntctgcatgtgttgctaacgcgacaattttccctcaatgctcacaagctcctatagcttcccttcttcccccataccttccatcaatgatagcttcagtatgtgaaaacccagctcttcaaccctatangctccaacangcaatcgcagcaagcaaca

SEQ ID NO: 321586 - DNA, 409 bp, Zea mays
ccaggcgtgacgccacgcgttcgcaactagcaacatagaaagcacaatagtgtaccaacaatggcagccaaaatattttgcctccttatgctccttggtatttctgcaagtgctgctacggcgaccattttcccgcaatgctcacaagctcctatagcttcccttcttcccccgtacctctcaccagcggtgtcttcggtatgtgaaaacccaattcttcaaccctacaggatccaacaggcaatcgcagctggcatcttacctttatcacccttgttcctccaacaatcatcagccctattacagcagttacctttggtgcatttattggcacaaaacatcagggcacaacaactacaacaacttgtgctagcaaaccttgctgcctactctcagcaacagcagtttc

SEQ ID NO: 321587 - DNA, 418 bp, Zea mays
attttgagcattcagaaacacacctagcgaagcgcactagcaacgacctaacaacaatggcttccaagacattatccctccttgcgcttcttgccctttttgtgagtgcaacaaatgcgttcattattccacaatgctcacttgctccgagtgccattattccacagttcctcccttcagttacttcaatgggcttcgaacacccagctgtgcaagcctataggctacaacaagcgcttgcggcgagcgtcttagaacaaccaattgcccaattacaacaacaatccttggcacatctaaccatacaaaccatcgcaacgcagcagcaacaagcactgagccacctagccgtggtgaaccctatcgcctacttgcaacaacagctgcttgcattcaacccacttgctttggcaaacgt

SEQ ID NO: 321588 - DNA, 377 bp, Zea mays
  unsure (1)..(377): unsure at all n locations
acctgcagtgcgtcgagaggatcggcgcacagaacagcatgaagatggtcatcggtctcgtcgtgtgcctggctctgtcagctgccagcgcctctgcaatgcagatgccctgcccctgcgcggggctgcagggcttgtacggcgctggcgccggcctgacgacgatgatgggcgccggcgggctgtacccctacgcggagtacctgaggcagccgcagtgcagcccgctggcggcggcgccctactacgccgggtgtgggcagccgagcgccatgttccagccgctccggcaacagtgctgccagcagcagatgaggatgatggacgtgcagtccgtcgcgcagcagctgcagatgatgatgcaactngagcgtgcc

SEQ ID NO: 321589 - DNA, 307 bp, Zea mays
tcggcaacatagaaagcacaatagtgtaccaacaatggcagccaaaatattttgcttccttatgctccttggtctttctgcaagtgttgctaccgcaaccattttcccacaatgctcacaagctcctatagcttcccttcttcccccatacctctcaccagcggtgtcttcaatgtgtgaaaccccaattgttcaaccctacaggatccaacaggcaatcgcaacaggcatcttaccattatcacccttgttcctccaacaaccgtcagccctattacagcagttacctttggtccatttggtggca

SEQ ID NO: 321590 - DNA, 429 bp, Zea mays
ggcaaacctttctccctactctcagcatcaacaatttcttccattcaaccaactgtggacactgaaccctgctgcttatttgcagcaacaactattaccatttagccagctagctactgcctactctcagcaacaacaacttcttccatttaaccaattggccgcactgaaccccgctgcttatttgcagcagcaaatactactgccatttagcgagctagctgcagcaagtcgtgcttccttcttgacacagcaacagttgctgcctttctacaagcagtttgcggctaaccccgcaaccctcttacaactacaacaattgttgccctttgtccaacttgctttgacaaacccagcagccttctaccaacaacacatcattggtggtgccctcttttaaattgattattagttgtaattcaataataa

SEQ ID NO: 321591 - DNA, 440 bp, Zea mays
  unsure (1)..(440): unsure at all n locations
gcctgctaggtttagagcggtggcacggaggagggacgcgagaggcgacgcgtgcggcgagcaagcggcggcgtgcggcgagcaagcgactacgccgtggagtgcgacctacagcctgcagcctccaggagtaaagttcataagaggaagaggaatgggtaaagaaacagaggtcaatgaatatgaactacagagggctgccaacataagagaaaatatgaagaggatgagatctcttaatctccctgtacctagtactatggttaatgaagcaaatggatcacatcgagccagcaagaaacacaagacaaggaaattagcatattcaactaatggtcctactttgcgatcaaggactcanagggatattgttgacgataaccatgaggatagtacttctgaaatagttatggagaatctaaatatcccatcaatgatga

SEQ ID NO: 321592 - DNA, 443 bp, Zea mays
cacatctaaccatacaaaccatcgcaacgcaacagcaacaacaatttctaccagcactgagccaactagctgtggtgaaccctgtcgcctacttgcaacagcagttgcttgcatccaacccacttgctctggcaaacatagttgcataccaacaacaacaacaattgcaacagtttctaccagcgctcagtcaactagccatggtgaaccctgccgcctacctacaacagcaacaactgatttcatctagccctctcgctgtggttaatgcacctacatacctgcaacaacagttgctgcaacagattgtaccagctctgactcagctagctgtggcaaaccctgctgcctacttgcaacagctgcttccattcaaccaactgactgtgtcgaactctgctgcgtacctacaacagcgacaacaggtacttaatccactagcg

SEQ ID NO: 321593 - DNA, 367 bp, Zea mays
cgactccagattggagaactcgacaccatgaaggtgctgatcgttgcccttgctctcctggcgctcgctgcgagcgccgcctccagtacaagcggcggctgtggctgccagacaccaccgtttcatctaccgcctccgttctatatgccgcctccgttctatctgccgccgcagcagcagccgcagccatggcaataccccactcaaccaccgcagctaagcccgtgccagcagttcggatcctgcggcgtcggcagcgtcggcagcccgttcctgggccagtgcgtcgagttcctgaggcaccagtgcagcccggcggcgacgccctacggctcgccacagtgccaggcgctgcagcagcagtgct

SEQ ID NO: 321594 - DNA, 392 bp, Zea mays
acatagaaagtggaatccagtatcaacaatagagcaacaatggcgaccaagatgctttccctccttatgctccttgctctttctgcatgtgttgctaacgcgacaattttccctcaatgctcacaagctcctatagcttcccttcttcccccataccttccatcaatgatagcttcagtatgtgaaaacccagctcttcaaccctataggctccaacaagcaatcgcagcaagcaacatacctttatcacccttgtttcaacaatcgccagccctatctttggtgcagtcattggtacaaaccatcaaggcacagcagctgcagcaactcgtgctacctgtgatcaaccaagtagctctggcaaacctttctccctactatcagcaacaaca

SEQ ID NO: 321595 - DNA, 394 bp, Zea mays
catgccactaccctactcaaccgccccggcctcagcctcatccccagccacacccatgcccgtgccaacagccgcatccaagcccgtgccagctgcagggaacctgcggcgttggcagcaccccgatcctgggccagtgcgtcgagttcctgaggcatcagtgcagcccgacggcgacgccctactgctcgcctcagtgccagtcgttgcggcagcagtgttgccagcagctcaggcaggtggagccgcagcaccggtaccaggcgatcttcggcttggtcctccagtccatcctgcagcagcagccgcaaagcggccaggtcgcggggctgttggcggcgcagatagcgcagcaactgacggcgatgtgcggcctgcagcagccgactccatg

SEQ ID NO: 321596 - DNA, 243 bp, Zea mays
tcgagaagtagaatccattgcaacaatagagcaacaatggcgaccaagatattttcccggcttatgctggctggtctttctacatggggtggtaacgcgacaattttccctcaatgctcacaagctcctatagcttcccttctttccccataccttccatcaattatagcttcagtatgtgaaaacccagctcttcaaccatataagcttcaacaagcaatcgcagcaagcaacataccttta

SEQ ID NO: 321597 - DNA, 423 bp, Zea mays
gaccaactagcaacatagaaagcacaatagtgtaccaacaatggcagccaaaatattgggcctccggatgctccttggtctttctgcaagtgctgctacggcgaccattttcccgcaatgctcgcaagctcctatagcttcccttcttcccccgtacctctcaccagcggtgtcttcggtatgtgaaaacccaattcttcaaccctacaggatccaacaggcaatcacagctggcatcttacctttatcacccttgttcctccaacaatcatcagccctattacatcagttacctttggtgcatttattggcacaaaacatcagggcacaacaactacaacaacttgtgctagcaaaccttgctgcctactctcagcaacagcagtttcttccattcaaccaactagctgcattgaactctgc

SEQ ID NO: 321598 - DNA, 446 bp, Zea mays
accaactagcaacatagaaagcacaatagtgtaccaacaatggcagctaaaatatttggcctccttatgctccttggtctttctgcaagtgctgctacggcgaccattttcccacaatgctcacaagctcctatagcttccctttcttcccccgtacctctcaccaacggtgtcttcggtatgtgaaaacccaattcttcaaccctacaggatccaacaggcaatcgcagctggcatcttacctttatcacccttgttcctccaacaatcatcagccctattacagcagttacctttggtgcatttattggcacaaaacatcagggcacaacaactacaacaacttgtgctagcaaaccttgctgcctactctcagcaacagcagtttcttccattcaaccaactagctgcattgaactctggttcttatttgcaacaacaacaac

SEQ ID NO: 321599 - DNA, 353 bp, Zea mays
ctgaaccctgctgtgaaccctgatgatcatctattaccactcatacagctatctactgagtactctaatgaccaccatcatcttccacttctcctatcgttcaacctgtaccccgctgttaacctggatgattatatgctactaccatttctactactatctacacagctccgtgcttccttcttgactcagttactgacgctgcatctgtacctgcatttctaccataaccccgcagctatcttacaactactacaactgctgccataagtgcaactcgctgtgacagacgctgcgacctactaccagcaacacttcattgatcacatcatctgtgataccgtttattagat

SEQ ID NO: 321600 - DNA, 363 bp, Zea mays
gaccaacaagcatcatagaaagtggaatccagtagcaacagtagagcaacaatggcgagcaagataggctccctccttatgctccttgctctttctacatgtgttgctaacgcgacaattttccctcaatgctcacaagctcctatagcttcccttcttaccccataccttccatcaattatagcttcaatatgtgaaaacccagctcttcaaccatataggcttcaacaagcaatcgcagcatgcaacatacctttatcgcccttgttgtttcaacaatcgccagccctatctttggtgcagtcattggtacaaaccatcagggcacaacagctgcagcaactcgtgctacctatgatcaac

SEQ ID NO: 321601 - DNA, 438 bp, Zea mays
gtttcttccattcaaccaactagctgcattgaactctgcttcttatttgcaacaacaacaactaccagtcagccagctatctgctgcctacccccagcaatttcttccattcaaccaactgacagcattgaactctcctgcttatttacagcagcaacaactactaccattcagccagctagctggtgtgagccctgctaccttcttgacacaaccacagttgttgccgttctaccagcacgctgcgcctaacgctggcaccctcttacaactgcaacaattgctgccattcaaccaacttgctttgacaaacccagcagcattctaccaacaacccatcattggtggtgccctcttttagatttcttatgagttatagttcaataataaagtttttgtctgatgttgtggcttcccagaaataagaagtacatttct

SEQ ID NO: 321602 - DNA, 373 bp, Zea mays
ccaacaagcaacatagaaagtggaatacagtagcaaaaatagagcaacaatggcggccaagatatttgccatccttatgctccttgctctttctgcatgtgttgctaacgcgaccatttttcctcaatactcacaagctcctatagctgcccttcttcccccataccttccatcaatgaccgctttagtatgtgaaaacccagcccttcaaccctacaggatccagcaagcaatcgcaacaagcaacttacctttatcacacctgttctttcaacaatcgccagccctatctttggtgcagtcattggtacaaaccatcagggcagaacagttgcagcaactcgtgctaccagtgatcagccaagtagctctg

SEQ ID NO: 321603 - DNA, 346 bp, Zea mays
ggcagccaaaatattttgcctccttatgctccttggtctttctgcaagtgctgctacggcgaccattgtcccgcaatgctcgcaagctcctatagcttcccttcttcccccgtacctctcaccagcggtgtcttcggtatgtgaaaacccaattcttcaaccctacaggatccaacaggcaatcgcagctggcatcttacctttatcacccttgttcctccaacaatcatcagccctattacaacagttacctttggtgcatttattggcacataacatcagggcacaacaactacaacaacttgtgctagcaaaccttgctgcctactctcagcaacagcagttt

SEQ ID NO: 321604 - DNA, 420 bp, Zea mays
  unsure (1)..(420): unsure at all n locations
attgtgagcattcagaaacacacctagcgaaacgcactaaccaccaacctaccaccattggcttccaagacattatccctccttgcgcttcttgccctttttgtgagtgcaacaaatgcgttcattattccacaatgctcactngctccgagtgccattattccacagttcctccctgcagttacttcaatgggcttcgaacacccagctgtgcaagcctataggctacaacaagcgcttgcggcgagcgtcttagaacaaccaattgcccaattacaacaacaatccttggcacatctaaccatacaaaccatcgcaacgcagcatcaacaagcactgagccacctagccgtggtgaaccctatcgcctacttgcaacaacagctgcttgcatccaacccacttgctttggcaaacgta

SEQ ID NO: 321605 - DNA, 415 bp, Zea mays
ctagcaacatagaaagcacaatagtgtaccaacaatggcagccaaaatattttgcctggttatgctccttggtatttctgcaagtgctgctacggcgaccattttcccgcaatgctcacaagctcctatagcttcccttcttcccccgtacctctcaccagcggcgtcttcggtatgtgaaaacccaattcttcaaccctacaggatccaacaggcaatcgcagctggcatcttacctttatcacccttgttcctccaacaatcatcagccctattacagcagttacctttggtgcatttattggcacaaaacatcaaggcacaacaactacaacaacttgtgctagcaaaccttgctgcctactctcagcaacagcagtttcttgcattcaaccaactagctgcattgaactct

SEQ ID NO: 321606 - DNA, 412 bp, Zea mays
cggacgcgtgggtttcaacattcaaaaacacaccaagcgaagcgcactaacaacgacctgacaccagtggctaccaagatattaacccttcttgggcttcttggccttttagtgagcgcaacaaatgcgttcattattccacagtgctcacttgctcctaatgccattattccacagttccttccaccagttacttcaatgggcttcgaacatccagccgtgcaagcctacaggctacaactagcgcttgcggcgagcgccttacaacaaccaattgcccaattgcaacaacaatccttggcacatctaaccctacaaaccattgcaacgcaacaacaacaacaacaacagtttctgccatcactgagccacctagccgtggtgaaccctgtcacctacttgcaacagcagc

SEQ ID NO: 321607 - DNA, 399 bp, Zea mays
cccacgcgtccgccaactagcaacatagaaagcacaatagtgtaccaacaatggcagcgaaaatattttgcttccttatgctccttggtctttctgcaagtgttgctaccgcaaccattttcccacaatgctcacaagctcctatagcttcccttcttcccccatacctctcaccagcggtgtcttcaatgtgtgaaaccccaattgttcaaccctacaggatccaacaggcaatcgcaacaggcatcttaccattatcacccttgttccttcaacaaccgtcagccctattacagcagttacctttggtccatttggtggcacaaaacatcagggcacaacaactacaacaacttgtgctagcaaaccttgctgcatactctcagcaacatcagtttc

SEQ ID NO: 321608 - DNA, 400 bp, Zea mays
tttcagcattcaaaaacacaccaagcgaagcgcactagcaacgacctaacaccaatgggtaccaagatattagccctccttgcgcttcttgcccttttagtgagcgcaacaaatgcgttcattattccacagtgctcacttgctcctagtgccattattccacagttcctcccaccagttacttcaatgggcttcgaacatccagccgtgcaagcctacaggctacaactagcgcttgcggcgagcgccttacaacaaccaattgcccaattgcaacaacaatccttggcacatctaaccctacaaaccattgcaacgcatcaacaacatcaacaacagtttctgccatcactgagccacctagccgtggtgaaccctgtcacctacttgcaacagcagc

SEQ ID NO: 321609 - DNA, 420 bp, Zea mays
attgagaccaactagcaacatagaaagcacaatagtgtaccaacaatggcagccaaaagattttgggtccttatgctccttggtctttctgcaagtgctgctaccgcaaccattttcccacaatgctcacaagctcctatagcttcctttcttcccccatacctctcaccagcggtgtcttcagtatgtgaaaacccaattcttcaaccctacaggatccaacaggcaatcgcagcaggcatcttacctttatcacccttgttcctccaacaaccgtcagccctattacagcagttacctttggtgcatttgttggcacaaaacatcaaagcacaacaactacaacaacttgtgctaagaaaccttgctgcctactctcagcaacagcagtttcttccattcaaccaactggctgcattg

SEQ ID NO: 321610 - DNA, 61 bp, Zea mays
gtggcttcccagaaataagaaagtacatttctagattaaaattaataagaaaaaaagggaa

SEQ ID NO: 321611 - DNA, 332 bp, Zea mays
caactagcagcattgaactctgctgcttatttacagcagcaacaactactaccattcggccagctagctgatgtgagccctgctgccttcttgacacaacaacagttgttgccgttctacctgcacgctatgcctaacgctggcaccctcttacaactgcaacaattgctgccattcaaccaacttgctttgacaaactcaacagtgttctaccaacaacccatcattggtggtgccctcttttagattgcttatgagttatagttcaataatgaagttttttggatgatgtttgtggcgtcccagaaataagaaagtacatttctagattc

SEQ ID NO: 321612 - DNA, 438 bp, Zea mays
gaccaacaagcaacatagaaagtggaatccagtagcaacaacagagcaacaatggcgaccaagatatgttccctccttatgctccttgctctttctgcatgtgttgctaacgcgacaattttccctcaatgctcacaagctcctatagcttcccttcttcccccataccttccatcaatgatagcttcagtatgtgaaaacccagctcttcagccctataggctccaacaagcaatcgcagcaagcaacatacctttatcacccttgttgtttcaacaatcgccagccctatctttggtgcagtcattggtacaaaccatcagggcacagcagctgcagcaactcgtgctacctgtgatcaaccaagtagctctggcaaaaccttctccctactctcagcaacaacaatttcttccattcaaccaactgtctacactg

SEQ ID NO: 321613 - DNA, 412 bp, Zea mays
gaaagcacaatagtgtaccaacaatggcagccaaaatattttgcttccttatgctccttggtctttctgcaagtgttgctaccgcaaccattttcccacaatgctcacaagctcctatagcttcccttcttcccccatacctctcaccagcggtgtcttcaatgtgtgaaaccccaattgttcaaccctacaggatccaacaggcaatcgcaacaggcatcttaccattatcacccttgttcctccaacaaccgtcagccctattacagcagttacctttggtccatttggtggcacaaaacatcagggcacaacaactacaacaacttgtgctagcaaaccttgctgcatactctcagccacatcagtttcttccattcaaccaactggctgcattgaactctgctgctta

SEQ ID NO: 321614 - DNA, 397 bp, Zea mays
attttgagcattcagaaacacaccaagcgaagcacattagcaacaacctaacaacaagggctaccaagatattatccctacttgcgcttcttgcgctttttgcgagcgcaacaaatgcgttcattattccacaatgctcacttgctccaagttccattattacacagttcctcccaccagttacttcaatgggcttcgaacacccagctgtgcaagcctataggctacaacaagcaattgcggcgagcgtcttacaacaaccaatttcccagttgcaacaacaatccttggcacatctaacaatacaaaccatcgcaacgcaacagcaacaacaattcctaccagcactgagccacctagccatggtgaaccctgccgcctacttgcaacagcagtt

SEQ ID NO: 321615 - DNA, 410 bp, Zea mays
  unsure (1)..(410): unsure at all n locations
ggtttctccccggctccagctcgccagctcgcgcccttcctgctcgcccagccatctcggcgcctaggtggccgctgcaccagccgagtccctccccatgtcagctgcaagcacgccgtgctttcttcccatggccgtctgcagcttctcccatggtgagctccctccagtgccctaggtttccatggccgtccctccctcatcttgctacccaagctgagctcgcccagcccctctctgctacctgagttctccccacgccagcagccatggcacctncttgccctgctcagcctccctctgtgcccagcctcctatctgatcttccgtggagcagtagccctactctaattctgcagcaacagctgccccttattcttatgatctccatgaatgaaagcccaagcgcc

SEQ ID NO: 321616 - DNA, 408 bp, Zea mays
  unsure (1)..(408): unsure at all n locations
aaatattntgctgtcttagcctctggtcttttgcaatgctggttcccgaaccaggttccacgatgctcacaagctcctatagcttcctttcttcccccatacctctcaccagcggtgtcttcagtatgtgaaaacccaattcttcaaccctacaggatccaacaggcaatcgcagcaggcatcttacctttatcacccttgttcctccaacaaccgtcagccctattacagcagttacctttggtgcatttgttggcacaaaacatcaaggcacaacaactacaacaacttgtgctaggaaaccttgctgcctactctcagcaacagcagtttcttccattcaaccaactggctgcattgaactctgctgcttatttgcaacaacaactaccattcagtcagctagct

SEQ ID NO: 321617 - DNA, 446 bp, Zea mays
caacaagcaacatagaaagtggaatacagtagcaaaaatagagcaacaatggcggccaagatattttccatccttatgctccttgctctttctgcatgtgttgctaacgcgaccatttttcctcaatactcacaagctcctatagctgcccttcttcccccataccttccatcaatgaccgctttagtatgtgaaaacccagcccttcaaccctacaggatccagcaagcaatcgcaacaagcaacttacctttatcacacctgttctttcaacaatcgccagccctatctttggtgcagtcattggtacaaaccatcagggcagaacagttgcagcaactcgtgctaccagtgatcagccaagtagctctggcaaacctttccccctactctcagcaacaacaatttcttccattcaaccaactgtctatactgaaccctgctgt

SEQ ID NO: 321618 - DNA, 395 bp, Zea mays
cccactcgtccgtccacgcgtccggaccaacaagcaacatagaaagtggaatccagtagcaacaatagagcaacaatggcgaccaagatattttccctccttatgctccttgctctttctacatgtgttgctaacgcgacaattttccctcaatgctcacaagctcctatagcttcccttcttcccccataccttccatcaattatagcttcaatatgtgaaaacccagctcttcaaccatataggcttcaacaagcaatcgcagcaagcaacatacctttatcgcccttgttgtttcaacaatcgccagccctatctttggtgcagtcattggtacaaaccatcagggcacaacagctgcagcaactcgtgctacctctgatcaaccaagtagc

SEQ ID NO: 321619 - DNA, 417 bp, Zea mays
  unsure (1)..(417): unsure at all n locations
gccctccttgcgcttcttgcccttttagtgagcgcaacaaatgcgttcattattcgacagtgcgcacttgctcctagtgccattattccacagttcctcccaccagttacttcaatgggcttcgaacatccagccgtgcaagcctacaggctacaactagcgcttgcggcgagcgccttacaacaaccaattgcccaattgcaacaacaatccttggcacatctaaccctacanaccattgcaacgcatcatcaacaacaacaacagtttctgccatcactgagccacctagccgtggtgaaccctgtcacctacttgcaacagcagctgcttgcatccaacccacttgctctggcgaacgtagctgcataccagcaacaacaacagctgcaacagtttatgccagtgctcagtcaa

SEQ ID NO: 321620 - DNA, 121 bp, Zea mays
caacaacccatcattggtggtgccctcttttagatttcttatgagttatagttcaatagtaaagttttttatctgatgtttgtggcttcccagaaataagaaagtacatttctagattctt

SEQ ID NO: 321621 - DNA, 419 bp, Zea mays
gttacttcaatgtgccttcgaaacacccagctgtgcaagcctataggctacaacaagcgattgcggcgagcgtcttacaacaaccaattgcccaattgcaacaacaatccttggcacatctaacaatacaaaccatcgcaacgcatcagcaacaacagttcctaccagcactgagccacctagccatggtgaaccctgtcgcctacttgcaacagcagctgcttgcatccaacccacttgctctagcaaacgtagttgcaaaccagcatcaacaacaactgcaacagtttctgccagcgcttagtcaactagccatggtgaaccctgccgcctacctacaacagcaacaactgctttcatctagcccgctcgctgtggccaatgcacctacatacctgcaacaagaattgttgcaacag

SEQ ID NO: 321622 - DNA, 420 bp, Zea mays
caaccaattgcccaattacaacaacaatccttggcacatctaaccatacaaaccatcggaacgcagcagcaacaacaatttctaccagcactgagccaactagctgtggtgaaccctgtcgcctacttgcaacagcagttgcttgcatccaacccacttgctctggcaaacatagttgcataccaacaacaacaacaattgcaacagtttctaccagcgctcagtcaactagccatggtgaaccctgccgcctacctacaacagcaacaactgatttcatctagccctctcgctgtggttaatgcacctacatacctgcaacaacagttgctgcaacagattgtaccagctctgactcagctagctgtggcaaaccctgctgcctacttgcaacagctgcttccattcaaccaactgact

SEQ ID NO: 321623 - DNA, 389 bp, Zea mays
cccacgcgtccggcaaagcggcagtgcgtagagaggatcgtcgaacagaacagcatgaagatggtcatcgttctcgtcgtgtgcctggctctgtcagctgccagcgcctctgcaatgcagatgccctgcccctgcgcggggctgcagggcttgtacggcgctggcgccggcctgacgacgatgatgggcgccggcgggctgtacccctacgcggagtacctgaggcagccgcagtgcagcccgctggcggcggcgccctactacgccgggtgtgggcagccgagcgccatgttccagccgctccggcaacagtgctgccagcagcagatgaggatgatggacgtgcagtccgtcgcgcagcagctgcagatgatgatgcagcttgagcg

SEQ ID NO: 321624 - DNA, 342 bp, Zea mays
gcattcagaaacacaccaagcgaagcgcactatcaacgacctaacaacaatggctaccgggatattagccctccttgcgcttcttgccctttctgtgagcgcaacaaatgcgttcattattccacaatgctcacttgctcctagtgccattattccacagttcctcccaccagttacttcaatgggcttcgaacacctagctgtgcaagccaacatgcaacaacaagcgcttgcggcgagcgtcttacaacaaccaattgcccaattgcaacagcaatccttgccacatctaacaatacaagccatcacaacgcaacagcaacaacagtttctaccagcact

SEQ ID NO: 321625 - DNA, 135 bp, Zea mays
  unsure (1)..(135): unsure at all n locations
cccacgcgtccgatttgcaacaacaacaactaccattcagccagctacctgctgcctacgccccagcaatttcttccattcaaccaaatggtagtaagttgttgnntgctgtnnataagcaggagagtgcagtgc

SEQ ID NO: 321626 - DNA, 389 bp, Zea mays
  unsure (1)..(389): unsure at all n locations
gaccattagctttatctactccagagcgcagaagaacccgatcgacaccatgagggtggtgctcgttgccctcgctctcctggctctcgctgcgagcgccacctccacgcatacaagcggcggctgcggctgccagccaccgccgccggttcatctaccgccgccggtgcatctgccacctccggttcacctgccacctccggtgcatctcccaccgccggtccacctgccgccgccggtccacctgccaccgccggtccatgtgccgtcgccggttcatctgccgtcgtcaccatgccactaccctactcaaccgccccggcctcagcctcatccccagccacacccatgcncgtgccaacagccgcatccaagcccgtgccagctgc

SEQ ID NO: 321627 - DNA, 417 bp, Zea mays
gctctttctgcatgtgttgctaacgcgacaattttccctcaatgctcacaagctcctatagcttgcgttcttcccccataccttccatcaatgatagcttcagtatgtgaaaacccagctcttcagccctataggctccaacaagcaatcgcagcaagcaacatacctttatcacccttgttgtttcaacaatcgccagccctatctttggtgcagtcattggtacaaaccatcagggcacagcagctgcagcaactcgtgctacctgtgatcaaccaagtagctctggcaaacctttctccctactctcagcaacaacaatttcttccattcaaccaactgtctacactgaaccctgctgcttatttgcagcaacaactattaccattcagccagctagctactgcctactctcag

SEQ ID NO: 321628 - DNA, 343 bp, Zea mays
gctcacaactaaccaattactccatcgatacttcgcacacataacaattcataccataggtgcatatgaacatctacaacctctacatgctctcatccaactacctgctctgaaccctctctcctaccagcaacagcacttgcacctattacatccacttgctctaccattcataacatccatactcaacaacatcacactattacaacaatcatctaccacctctaacatatctcctcatcttcatcgctcacagctaactacaacatgctcaactgatctcatctacatctctccctactgtcaatgcacctacatacctataacaacagacggtgctaca

SEQ ID NO: 321629 - DNA, 443 bp, Zea mays
caactagcaacatagaaagcacaatagtgtaccaacaatggcagccaaaatattttgcctccttatgctccttggtctttctgcaagtgctgctacggcgaccattttcccgcaatgctcgcaagctcctatagcttcccttcttcccccgtacctctcaccagcggtgtcttcggtatgtgaaaacccaattcttcaaccctacaggatccaacaggcaatcgcagctggcatcttacctttatcacccttgttcctccaacaatcatcagccctattacaacagttacctttggtgcatttattggcacataacatcagggcacaacaactacaacaacttgtgctagcaaaccttgctgcctactctcagcaacagcagtttcttccattcaaccaactaggttcattgaactctgcttcttatttgcaacaacaacaac

SEQ ID NO: 321630 - DNA, 432 bp, Zea mays
ctttggtgcagtcattggtacaaaccatcagggcacaacagctgcagcaactcgtgctacctctgatcaaccaagtagctctggcaaacctttctccctactctcagcaacaacaatttcttccattcaaccaactgtctacactgaaccctgctgcttatttgcagcaacaactattaccatttagccagctagctactgcctactctcagcaacaacaacttcttccatttaaccaattggccgcactgaaccccgctgcttatttgcagcagcaaatactactaccatttagccagctagctgcagcaaaccgtgcttccttcttgacacagcaacagttgctgcctttctaccagcagtttgcggctaaccccgcaaccctcttacaactacaacaattgttgccctttgtccaacttgctttgacag

SEQ ID NO: 321631 - DNA, 443 bp, Zea mays
attttgagcattcagaaacacacctagcgaagcgcactagcaacgacctaacaacaatggcttccaagacattatgcctccttgcgcttcttgccctttttgtgagtgcaacaaatgcgttcattattccacaatgctcacttgctccgagtgccattattccacagttcctccctccagttacttcaatgggcttcgaacacccagctgtgcaagcctataggctacaacaagcgcttgcggcgagcgtcttagaacaaccaattgcccaattacaacaacaatccttagcacatctaaccatacaaaccatcgcaacgcagcagcaacaagcactgagccacctagccgtggtgaaccctatcgcctacttgcaacaacagctgcttgcatccaacccacttgctttggcaaacgtagctgcataccaacaacaacaacag

SEQ ID NO: 321632 - DNA, 354 bp, Zea mays
  unsure (1)..(354): unsure at all n locations
ctggcaaagggcactgacggccgcggcggtgtcgatggagtggtggcagaaggcggtggtggtgccggtgaagcgcgcgtggatcgccgccgccgcccggctgacgacgcgacataagaaagaagacggcggccacggcgtcctggtgaagctccacgacgacgttcaaacgtgcgcgtacgaggacgtgcatgtgatggtgggaaatgctgaaccggcccaagccgaatagcttgcccgcgagcccttgcaaaaggcgcgcgcgcgctcgtctggctgcgccgtcaccacaagatggacccgcgccggcgctgctgangaggaggacgacgacgacaccctgatgcttttcct

SEQ ID NO: 321633 - DNA, 446 bp, Zea mays
gcgaccattttcccacaatgctcacaagctcctatagcttcccttcttgccccgtacgtctcaccagcggtgtcttcggtatgtgaaaacccaattcttcaaccctataggatccaacaggcaatcgcagctggcatcttacctttatcacccttgttcctccaacaatcatcagccctattacagcagttacctttggtgcatttattggcacaaaacatcagggcacaacaactacaacaacttgtgctagcaaaccttgctgcctactctcagcaacaacagtttcttccattcaaccaactagctgcattgaactctgcttcttatttgcaacaacaacaactaccattcagccagctatctgctgcctacccccagcaatttcttccatttaaccaactgacagctttggaactcttctgcttatttacagcagcaacaac

SEQ ID NO: 321634 - DNA, 419 bp, Zea mays
  unsure (1)..(419): unsure at all n locations
agcattcagaaacacaccaagcgaagctcattagcatcaacctaacaacaatggctacgaagatatgatccctccttgcgcttcttgcgctttttgcgagcgcaacaaatgcgttcattattccacaatgctcacttgctccaagttccattattacacagttcctcccaccagttacttcaatgggcttcgaacacccagctgtgcaagcctataggctacaacaagcaattgcggcgagcgtcttacaacaaccaatttcccagttgcaacaacaatccttggcacatctaacaatacaaaccatcgcaacgcaacagcaacaacaattcctaccagcactgagccacctagccatggtgaaccctgccgnctacttgcaacagcagttgcttgcatcaaacccacttgctctggca

SEQ ID NO: 321635 - DNA, 396 bp, Zea mays
gcaacaactactaccattcatccagctatctggtgtgagccctgctaccttcttgatggaaccacagttgttgccgttctaccagcacgctgcgcctaacgctggcaccctcttacaactgcaacaattgctgccattcaaccaacttgctttgacaaacccagcagcgttctaccaacaacccatcattggtggtgccctcttttagatttcttatgagttatagttcaataataaagttttttgtctgatgtttgtggcttcccagaaataagaaagtacatttctaaaaaaaaaataaaatataaaaatacatatggaaaaaaaaaaaaaagatacacaaaaacaacaataaaattaaaaaaaaataataaagacaaaaaacaaaagagctca

SEQ ID NO: 321636 - DNA, 434 bp, Zea mays
gggaaagaaatcaggtggggtggagctgtaacagttcgccacggctaggctcctctcccctctcagctctcagctgcccctcctgcatgccgatcgcctccaagctcgtctacttccagcgccgcccggcgccggcgccgcctgacgacccgggtcccgagcctcccgacccccgccgcccccgccgccgccgccgcagcggctccctctcctcctctcaccagaagccggagcatgatgttccagggcaccaaagggatcacgctgctgcagccaagcctccggggccagtcggaaaggcagcagggcttcttcacacggcctccagcgcagggctttttcaccaccgcagcacgtcggagtcggaccacggccggctttccgacgccgtgcagcaggccagggaacggctccttcagaggctcggcagcgtg

SEQ ID NO: 321637 - DNA, 452 bp, Zea mays
  unsure (1)..(452): unsure at all n locations
caacaagcaacatagaaagtggaatccagtagcaacaacagagcaacaatggcgaccgagatattttccctccttatgctccttgctctttctgcatgtgttgctaacgcgacaattttccctcaatgctcacaagctcctatagcttcccttcttcccccataccttccatcaatgatagcttcagtatgtgaaaacccagctcttcagccctataggctccaacaagcaatcgcagcaagcaacatacctttatcacccttgttgtttcaacaatcgccagccctatctttggtgcagtcattggtacaaaccatcagggcacagcagctgcagcaactcgtgctacctgtgatcaaccaagtagctcttggcaacctttnctcctactctcaggcaccacattttcttccattcaaccaactgtctacactgaaccctgctgcttattt

SEQ ID NO: 321638 - DNA, 429 bp, Zea mays
cagaaacacaccaagcgaagcacattagcaacaacctaacaacaatggctaccaagagattatccctccttgcgcttcttgcgctttttgcgagcgcaacaaatgcgttcattattccacaatgctcacttgctccaagttccattattacacagttcctcccaccagttacttcaatgggcttcgaacacccagctgtgcaagcctataggctacaacaagcaattgcggcgagcgtcttacaacaaccaatttcccagttgcaacaacaatccttggcacatctaacaatacaaaccatcgcaacgcaacagcaacaacaattcctaccagcactgagccacctagccatggtgaaccctgccgcctacttgcaacagcagttgcttgcatcaaacccacttgctctggcaaacgtagttgcaaacc

SEQ ID NO: 321639 - DNA, 438 bp, Zea mays
ccaacaagcaacatagaaagtggaatccagtagcaacaatagagcaacaatggcgacgaagatattgtccctccttatgctccttgctctttctacatgtgttgctaacgcgacaattttccctcaatgctcacaagctcctatagcttcccttcttcccccataccttccatcaattatagcttcaatatgtgaaaacccagctcttcaaccatataggcttcaacaagcaatcgcagcaagcaacatacctttatcgcccttgttgtttcaacaatcgccagccctatctttggtgcagtcattggtacaaaccatcagggcacaacagctgcagcaactcgtgctacctctgatcaaccaagtagctctggcaaacctttctccctactctcagcaacaacaatttcttccattcaaccaactgtctacactgaa

SEQ ID NO: 321640 - DNA, 403 bp, Zea mays
ctgccacctccggttcacctgccacctccggtgcatctcccaccgccggtccacctggcgccgccggtccacctgccaccgccggtccatgtgccgccgccggttcatctgccgccgccaccatgccactaccctactcaaccgccccggcctcagcctcatccccagccacacccatgcccgtgccaacagccgcatccaagcccgtgccagctgcagggaacctgcggcgttggcagcaccccgatcctgggccagtgcgtcgagttcctgaggcatcagtgcagcccgacggcgacgccctactgctcgcctcagtgccagtcgttgcggcagcagtgttgccagcagctcaggcaggtggagccgcagcaccggtaccaggcgatcttcggcttggtcc

SEQ ID NO: 321641 - DNA, 433 bp, Zea mays
  unsure (1)..(433): unsure at all n locations
cccacgcgtccgattttgagcattcagaaacacaccaagcgaagcacagtagcaacagcctaacaacaatggctaccaagatattatccctccttgcgcttcttgcgctttttgcgagcgcaacaaatgcgttcattattccacaatgctcacttgctccaagttccattattacacagttcctcccaccagttacttcaatgggcttcgaacacccagctgtgcaagcctataggctacaacaagcaattgcggcgagcgtcttacaacaaccaatttcccagttgcaacaacaatccttggcacatctaacaatacaaaccatcgcaacgcaacagcaacaacaattcctaccagcactgagccacctagccatggtgaaccctgccgnctacttgcaacagcagttgcttgcatcaaacccacttgctct

SEQ ID NO: 321642 - DNA, 434 bp, Zea mays
aacctttctccctactatcagcaacaacaatttcttccattcaaccaactatctacactgaaccctgctgcttatttgcagcaacaactattaccattcagccagctagctactgcctactctcatcaacaacaacttcttccatttaaccaattggccgcactgaacctcgctgcttatttgcagcagcaaatattactaccatttagccagctagctgcagcaagccgtgcttccttcttgacacagcaacagttgctgcctttctaccagcagtttgcggctaaccccgcaaccctcttacaactacaacaattgttgccctttgtccaacttgctttgacaaacccagcagcctcctaccaacaacacatcattggtggtgccctcttttagattgcttattagttgtaattcaataataaagttttttg

SEQ ID NO: 321643 - DNA, 77 bp, Zea mays
tgttctctggcgttcatgcgcgtgtgttcttgagctctgaagtctgaaatgaaaagatctgcgatcggattcgtatt

SEQ ID NO: 321644 - DNA, 415 bp, Zea mays
caacatagaaagcacaatagtgtaccaacaatggcagccaaaatattttgcttccttgtgctccttggtctttctgcaagtgctgctaccgcaaccattttcccacaatgctcacaagctcctatagcttcctttcttcccccatacctctcaccagcggtgtcttcagtatgtgaaaacccaattcttcaaccctacaggatccaacaggcaatcgcagcaggcatcttacctttatcacccttgttcctccaacaaccgtcagccctattacagcagttacctttggtgcatttgttggcacaaaacatcaaggcacaacaactacaacaacttgtgctaggaaaccttgctgcctactctcagcaacagcagtttcttccattcaaccaactggctgcattgaactctgctg

SEQ ID NO: 321645 - DNA, 374 bp, Zea mays
gcgagttcattgcgaccacactctgcatttaccttctttgctttacattctctattaagcaccattcgcgtctttaatacatctgtgattaatgaccagattcaccaacctcacacttatcaccaccttcattctatcatctatatctacatctaggtcgaaattgctatccttaaactcttctttacacaaaacataatcttcatctatcaatctatattcaactttgctctgatctgctccttcactataccttgttatgctgtacaataatctacactaatagaatcaaaacctctatcatccaaggattaacagatatgttacatacctctattaactgactcgactgtcttttacattaacactttctg

SEQ ID NO: 321646 - DNA, 418 bp, Zea mays
cccacgcgtccggcaacatagaaagcacaatagtgtaccaacaatggcggccaaaagagtttgcctgcttatgctccttggtatttctgcaagtgctgctacggcgaccattttcccgcaatgctcacaagctcctatagcttcccttcttcccccgtacctctcaccagcggtgtcttcggtatgtgaaaacccaattcttcaaccctacaggatccaacaggcaatcgcagctggcatcttacctttatcacccttgttcctccaacaatcatcagccctattacagcagttacctttggtgcatttattggcacaaaacatcagggcacaacaactacaacaacttgtgctagcaaaccttgctgcctactctcagcaacagcagtttcttccattcaaccaactagctgcattg

SEQ ID NO: 321647 - DNA, 409 bp, Zea mays
aaccttgctgcctactctcagcatcaacagtttctgccattcaaccaactagctgcagggaactctgctgcttatttgcagcagcaacaactactaccattcagccagctagctgctgactaccaccggcaatatcttacattcaaccaactggcagcattgaactctcatgcttatgtacaacaacaacaactactaccattcagccagctagctgctgtgagccctgctgccttcttgacacagcaacatttgttgccgttctacctgcacactgcgcctaacgttggcaccctcttacaactgcaacaattgctgccattcgaccaacttgctttgacaaacccagcagtgttctaccaacaacccatcattggtggtgccatcttttagattgcttatgagttat

SEQ ID NO: 321648 - DNA, 262 bp, Zea mays
tgagaccaactagcaacatagaaagcacaatagtgtaccaacaatggcagccaaaatattttgcgtccttatgctccttggtctttctgcaagtgttgctaccgcaaccattttcccacaatgctcacaagctcctatagcttcccttcttcccccatacctctcaccagcggtgtcttcaatgtgtgaaaacccaattgttcaaccctacaggatccaacaggcaatcgcaacaggcatcttaccattatcacccttgttc

SEQ ID NO: 321649 - DNA, 437 bp, Zea mays
  unsure (1)..(437): unsure at all n locations
gcaaagcggcagtgcgtagagaggatcgtcgaacagaacagcatgaagatggtcatcggtctcgtcgtgtgcctggctctgtcagctgccagcgcctctgcaatgcagatgccctgcccctgcgcggggctgcagggcttgtacggcgctggcgccggcctgacgacgatgatgggcgccggcgggctgtacccctacgcggagtacctgaggcagccgcagtgcagcccgctggcggcggcgccctactacgccgggtgtgggcagacgagcgccatgtaccagccgctccggcaacagtgctgccagcagcagatgaggatgatggacgtgcagtccgtcgcgcagcagctgcagatgatgatgcagcttgagcgtgccgctgccgncagcagcagcctgtacgagccagctctgatgcagcagcagcagcagct

SEQ ID NO: 321650 - DNA, 356 bp, Zea mays
cacgcgtccgcaaaagccacagggcataaaaagaattttacaacattacatcatcacgatgttcatgcgtcttgcgccttccctagctatataacctgccatcgcctcaaaaatccatatgcaatcaccctaatcgcgactttatttcatcaacaactctcacactcttctgacgactatgatactctctctctatctgtacccctacaattagtaccttatgcatacctatctcaacctcgttacaactacaccctaatacgcacagtttatgcatacaatcgccatgaaccactctctgcagaatcatttctatcatactgagattacgactatggacatacagaacaactatc

SEQ ID NO: 321651 - DNA, 433 bp, Zea mays
ggttcgtgaggttctccggggttcggtttcgtgggtgagcggatcgagatggcggcgtcggatgttgagtaccgctgcttcgtcggcggcctcgcctgggccacggacgaccactccctccacaacgccttcagcacctacggcgaggtcctcgagtccaagatcatcctcgatcgggagacgcagaggtcccgcggcttcggcttcgtcaccttctccacggaggaggcgatgcggaacgccatcgagggcatgaacggcaaggagctggacggccgcaacatcaccgtcaacgaggcccagtcccgcggcggccgtggaggcggcggcggcggcgggtacggtggtggccgtggaggcggcggctacggcggtggcgggcgccgtgatggcggcggcggctacggcggtggcggcggctacccgtggtggc

SEQ ID NO: 321652 - DNA, 434 bp, Zea mays
gcaacatagaaagcacaatagtgtaccaacaatggcagccaaaatattttgcctccggatgctccttggtctttctgcaagtgctgctacggcgaccattttcccgcaatgctcgcaagctcctatagcttcccttcttcccccgtacctctcaccagcggtgtcttcggtatgtgaaaacccaattcttcaaccctacaggatccaacaggcaatcgcagctggcatcttacctttatcacccttgttcctccaacaatcatcagccctattacaacagttacctttggtgcatttattggcacaaaacatcagggcacaacaactacaacaacttgtgctagcaaaccttgctgcctactctcagcaacagcagtttcttccattcaaccaactaggttcattgaactctgcttcttatttgcaacaacaac

SEQ ID NO: 321653 - DNA, 442 bp, Zea mays
cagaaagaccaaggagcataaggaagcaaccattttcccacaatgctcacaagctcctatagcttcctttcttcccccatacctctcaccagcggtgtcttcagtatgtgaaaacccaattcttcaaccctacaggatccaacaggcaatcgcagcaggcatcttacctttatcacccttgttcctccaacaaccgtcagccctattacagcagttacctttggtgcatttgttggcacaaaacatcaaggcacaacaactacaacaacttgtgctaggaaaccttgctgcctactctcagcaacagcagtttcttccattcaaccaactggctgcattgaactctgctgcttatttgcaacaccaactaccattcagtcagctagctgctgcctacccccagcaatttcttccattcaaccaactggcagcattgaactct

SEQ ID NO: 321654 - DNA, 437 bp, Zea mays
accaactagcaacatagaaagcacaatagtgtaccaacaatggcagccaaaatattttgcctcctgatgctccttggtctttctgcaagtgctgctacggcgaccattttcccgcaatgctcgcaagctcctatagcttcccttcttcccccgtacctctcaccagcggtgtcttcggtatgtgaaaacccaattcttcaaccctacaggatccaacaggcaatcgcagctggcatcttacctttatcacccttgttcctccaacaatcatcagccctattacaacagttacctttggtgcatttattggcacaaaacatcagggcacaacaactacaacaacttgtgctagcaaaccttgctgcctactctcagcaacagcagtttcttccattcaaccaactaggttcattgaactctgcttcttatttgcaaca

SEQ ID NO: 321655 - DNA, 412 bp, Zea mays
gcaacatagaaagtggaatccagtagcaacaatagagcaacaatggcgaccaagatacgtttccctccttatgctccttgctctttctgcatgtgttgctaacgcgacaattttccctcaatgctcacaagctcctatagcttcccttcttcccccataccttccatcaatgatagcttcagtatgtgaaaacccagctcttcaaccctataggctccaacaagcaatcgcagcaagcaacatacctttatcacccttgtttcaacaatcgccagccctatctttggtgcagtcattggtacaaaccatcaaggcacagcagctgcagcaactcgtgctacctgtgatcaaccaagtagctctggcaaacctttctccctactatcagcaacaacaatttcttccattcaac

SEQ ID NO: 321656 - DNA, 441 bp, Zea mays
gcaacatagaaagcacaatagtgtaccaacaatggcagctaaaatattttgcctcgttatgctgcttggtctttctgcaagtgctgctacggcgaccattttcccacaatgctcacaagctcctatagcttcccttcttcccccgtacctctcaccaacggtgtcttcggtatgtgaaaacccaattcttcaaccctacaggatccaacaggcaatcgcagctggcatcttacctttatcacccttgttcctccaacaatcatcagccctattacagcagttacctttggtgcatttattggcacaaaacatcagggcacaacaactacaacaacttgtgctagcaaaccttgctgcctactctcagcaacagcagtttcttccattcaaccaactagctgcattgaactctgcttcttattgcaacaacaacaactacca

SEQ ID NO: 321657 - DNA, 416 bp, Zea mays
attgagaccaactagcaacatagaaagcacaatagtgtaccaacaatggcagccaagatattttgcttccttatgctccttggtctttctgcaagtgttgctaccgcaaccattttcccacaatgctcacaagctcctatagcttcccttcttcccccatacctctcaccagcggtgtcttcaatgtgtgaaaccccaattgttcaaccctacaggatccaacaggcaatcgcaacaggcatcttaccattatcacccttgttcctccaacaaccgtcagccctattacagcagttacctttggtcccatttggtggcacaaaacatcagggcacaacaactacaacaacttgtgctagcaaaccttgctgcatactctcagcaacatcagtttcttccattcaaccaactggctg

SEQ ID NO: 321658 - DNA, 448 bp, Zea mays
caactagcaacatagaaagcacaatagtgtaccaacaatggcagccaaaatattttgcttccttatgctccttggtctttctgcaagtgctgctaccgcaaccattttcccacaatgctcacaagctcctatagcttcctttcttcccccatacctctcaccagcggtgtcttcagtatgtgaaaacccaattcttcaaccctacaggatccaacaggcaatcgcagcaggcatcttacctttatcacccttgttcctccaacaaccgtcagccctattacagcagttacctttggtgcatttgttggcacaaaacatcaaggcacaacaactaccacaacttgtgctaggaaaccttgctgcctactctcagccacagcagtttcttccattcaaccaactggctgcattgaactctgctgcttatttgcaacaacaactaccattc

SEQ ID NO: 321659 - DNA, 370 bp, Zea mays
tgaacttggagacacacacgaatttcagaacataagctcatccctagcatcaagggcatctacgataacatgaatgattccacttcttcagcttaaggctagaacaacaaatgaccacataatacactaattacaactacctccaagattctttaatacacaatgaaaccgacaaattactttaatcaacttctaacacagaactttgcactaactatttactgcatcaaccaacatggtccatcatctcaatacatccaatatcataattgcaacagcaatactcagcacatccaactttaccgaccattgtaactaaacatacacgtcatttcctaccataactgatccacctatcaattacctacat

SEQ ID NO: 321660 - DNA, 416 bp, Zea mays
attgagaccaactagcaacatagaaagcacaatagtgtaccaacaatggcagccaaaagattttgcttccttatgctccttggtctttctgcaagtgttgctaccgcaaccattttcccacaatgctcacaagctcctatagcttcccttcttcccccatacctctcaccagcggtgtcttcaatgtgtgaaaacccaattgttcaaccctacaggatccaacaggcaatcgcaacaggcatcttaccattatcacccttgttcctccaacaaccgtcagccctattacagcagttacctttggtccatttggtggcacaaaacatcagggcacaacaactacaacaacttgtgctagcaaaccttgctgcatactctcagcaacatcagtttcttccattcaaccaactggctgc

SEQ ID NO: 321661 - DNA, 454 bp, Zea mays
  unsure (1)..(454): unsure at all n locations
gcaacatagaaagcacaatagtgtaccaacaatggcagccaaaatattttgcttgcttatgctgcttggtctttctgcaagtgctgctaccgcaaccattttcccacaatgctcacaagctcctatagcttcctttcttcccccatacctctcaccagcggtgtcttcagtatgtgaaaacccaattcttcaaccctacaggatccaacaggcaatcgcagcaggcatcttacctttatcacccttgttcctccaacaaccgtcagccctattacagcagttacctttggtgcatttgttggcacanaacatcaaggcacaacaactacaacaacttgtgctaggaaaccttgctgcctactctcagcaacagcagtttcttccattcaaccaactggctgcattgaactctgctgcttatttgcaacaacaactaccattcagtcagctagct

SEQ ID NO: 321662 - DNA, 429 bp, Zea mays
cggcgagatcctcgactccaaggtcatcaccgaccgggagacggggaggtctcgcgggttcggcttcgttaccttctcctccgagaactccatgctcgacgctatcgagaacatgaacggcaaggagctcgacggccgtaacatcaccgttaaccaggcccagtcccgtggcggtggcggtggcggcggtggctacggcggcggtcgcggcggcggcggctatggtggcgggcgccgtgacggcggttatggcggcggtggcggctacggcggtcggcgcgagggtggtggcggcggctacggaggcggtggcggctacggcggtcggcgcgagggtggtggtggcggctacggcggcggcggcggcggctggagggactgatgtgtgggcccatcctggcttcggccgagttatcttatctatctata

SEQ ID NO: 321663 - DNA, 262 bp, Zea mays
gggcacaacagctgcagcaactcgtgctacctgtgatcaaccaagtagctctggcagacctttctccctactctcagcaacaacaatttcttccattcaaccaactgtctacactgaaccctgctggttatttacaggcaccaccaattacaaccattcagccagctagctactgcctactctcagcaacaacaacttcttccatttaaccaattgcccgcactgaaccccgctgcttatttgcagcagaaaatactactgc

SEQ ID NO: 321664 - DNA, 418 bp, Zea mays
ctaccggtgcatctacccaccgccggtccacctgccgccgccggtccacctgccaccggcggtccatgtgccgccgccggttcatctgccgccgccaccatgccactaccctactcaaccgccccggcctcagcctcatccccagccacacccatgcccgtgccaacagccgcatccaagcccgtgccagctgcagggaacctgcggcgttggcagcaccccgatcctgggccagtgcgtcgagttcctgaggcatcagtgcagcccgacggcgacgccctactgctcgcctcagtgccagtcgttgcggcagcagtgttgccagcagctcaggcaagtggagccgcagcaccggtaccaggcgatcttcggcttggtccttcagtccatcctgcagcagcagccgcaaagcggccag

SEQ ID NO: 321665 - DNA, 415 bp, Zea mays
ctcacttgctccgagtgccattattccacagttcctccctccagttacttcaatgggcttcgaacacccagctgtgcaagcctataggctacaacaagcgcttgcggcgagcgtcttagaacaaccaattgcccaattacaacaacaatccttggcacatctaaccatacaaaccatcgcaacgcagcagcaacaagcactgagccacctagccgtggtgaaccctatcgcctacttgcaacaacagctgcttgcatccaacccacttgctttggcaaacgtagctgcataccaacaacaacaacagttgcaacagtttctaccagcgctcagtcaactagccatggtgaaccctatcgcctacctacaacagcaacaacttctttcatctagcccgctcgctatgggcaatgca

SEQ ID NO: 321666 - DNA, 270 bp, Zea mays
attcaaccaactggctggattggactctggtgcttatttgcaacaaccattaccattgagccagcgggttgctgcctacccccagcaatttcttccattcaaccaactagcagcattgaactctgctgcttatttacagcagcaacaactactaccattcagccagctagctgatgtgagccctgctgccttcttgacacaacaacagttgttgccgttctacctgcacgctatgcctaacgctggcaccctcttacaactgcaacaatt

SEQ ID NO: 321667 - DNA, 446 bp, Zea mays
gagaccaactagcaacatagaaagcacaatagtgtaccaacaatggcagccaaaatattttgcttgcttatgctccttggtctttctgcaagtgttgctaccgcaaccattttcccacaatgctcacaagctcctatagcttcccttcttcccccatacctctcaccagcggtgtcttcaatgtgtgaaaccccaattgttcaaccctacaggatccaacaggcaatcgcaacaggcatcttaccattatcacccttgttcctccaacaaccgtcagccctattacagcagttacctttggtccatttggtggcacaaaacatcagggcacaacaactacaacaacttgtgctagcaaaccttgctgcatactctcagcaacatcagtttcttccattcaaccaactggctgcattgaactctgctgcttatttgcaacaacaatt

SEQ ID NO: 321668 - DNA, 353 bp, Zea mays
aacacaccaagcgaagcgcactagcaacgacctaacaacaatggctaccaagatatgagccctccttgcgcttcttgccctttttgtgagcgcaacaaatgcgttcattattccacaatgctcacttgctcctagtgccattattccacagttcctcccaccagttacttcaatgggcttcgaacacctagctgtgcaagccaacatgcaacaacaagcgcttgcggcgagcgtcttacaacaaccaattgcccaattgcaacaacaatccttgccacatctaacaatacaagccatcacaacgcaacagcaacaacagttcctaccagcactgagccacctagccatggtga

SEQ ID NO: 321669 - DNA, 455 bp, Zea mays
  unsure (1)..(455): unsure at all n locations
cagcaagcaacatagaaagtagaatccattagcaacaatagagcaacaatggcgaccaagatattttccctccgtatgctccttgctctttctacatgtgttgctaacgcgacaattttccctcaatgctcacaagctcctatagcttcccttcttcccccataccttccatcaattatagcttcagtatgtgaaaacccagctcttcaaccatataggcttcaacaagcaatcgcagcaagcaacatacctttatcgcccttgttgtttcaacaatcaccagccctatctttggtgcagtcattggtacaaaccatcagggcacaacagctgcagcaacttgtgctacctgggatcaacccagtaactcttgccaaacctttctccctactctcagcaccaacaattncttccattcaaccaactgtctacactggaccctgctgcttatttgc

SEQ ID NO: 321670 - DNA, 117 bp, Zea mays
accaccaatgatgggttgttggtgccctcttttagatttcttatgagttatagttcggtaataaagttgtttatctgatgtttgtggcttcccagaaataagaaagtacatttctag

SEQ ID NO: 321671 - DNA, 438 bp, Zea mays
gaaaacccagctcttcaaccatataggcttcaacaagcaatcgcagcaagcaacatacctttatcgcccttgttgtttcaacaatcaccagccctatctttggtgcagtcattggtacaaaccatcagggcacaacagctgcagcaactcgtgctacctgtgatcaaccaagtagctctggcaaacctttctccctactctcagcaacaacaatttcttccattcaaccaactgtctacactgaaccctgctgcttatttgcagcaacaactattaccatttagccagctagctactgcctactctcagcaacaacaacttcttccatttaaccaattggccgcactgaaccccgctgcttatttgcagcagcaaatactactgccatttagcgagctaactgcaacaagtcgtgctttcctcttgacacagcaacag

SEQ ID NO: 321672 - DNA, 411 bp, Zea mays
gcaacatagaaagtggaatccagtagcaacaacagagcaacaatggcgaccaagataggttccctccttatgctccttgctctttctgcatgtgttgctaacgcgacaattttccctcaatgctcacaagctcctatagcttcccttcttcccccataccttccatcaatgatagcttcagtatgtgaaaacccagctcttcagccctataggctccaacaagcaatcgcagcaagcaacatacctttatcacccttgttgtttcaacaatcgccagccctatctttggtgcagtcattggtacaaaccatcagggcacagcagctgcagcaactcgtgctacctgtgatcaaccaagtagctctggcaaacctttctccctactctcagcaacaacaatttcttccattc

SEQ ID NO: 321673 - DNA, 339 bp, Zea mays
agcatgcaaaaacacaccaagcgaagcgcactagcaacgacctaacaccaatggctaccaagatatgagccctccgtgcgcttcttgcccttttagtgagcgcaacaaatgcgttcattattccacagtgctcacttgctcctagtgccattattccacagttcctcccaccagttacttcaatgggcttcgaacattcagccgtgcaagcctacaagctacaactagcgcttgcggcgagcgccttaacacaaccaattgcccaattgcaacaacaatccttggcacatctaaccctacaaaccattgcaacgcaacaacaacaacaacaacagtttc

SEQ ID NO: 321674 - DNA, 206 bp, Zea mays
cagcacgctgcgcctaacgctggcagaatcttacaactgcaacaattgctgccattgggccaacttgctttgacaaacccagcagcattctaccaacaacccatcattggtggtgccctcttttagatttcttatgagttatagttcaataataaagttttttgtctgatgtttgtggcttcccagaaataagaaagtacatttct

SEQ ID NO: 321675 - DNA, 442 bp, Zea mays
gtggaatacagtagcaaaaatagagcaacaatggcggccaagatatttgccatccttatgctccttgctctttctgcatgtgttgctaacgcgaccatttttcctcaatactcacaagctcctatagctgcccttcttcccccataccttccatcaatgaccgctttagtatgtgaaaacccagcccttcaaccctacaggatccagcaagcaatcgcaacaagcaacttacctttatcacacctgttctttcaacaatcgccagccctatctttggtgcagtcattggtacaaaccatcagggcagaacagttgcagcaactcgtgctaccagtgatcagccaagtagctctggcaaacctttccccctactctcagcaacaacaatttcttccattcaaccaactgtctatactgaaccctgctgcttatttgcagcaac

SEQ ID NO: 321676 - DNA, 415 bp, Zea mays
tgagaccaactagcaacatagaaagcacaatagtgtaccaacaatggcagccaaaatattttgcttccttatgctccttggtctttctgcaagtgctgctaccgcaaccattttcccacaatgctcacaagctcctatagcttcctttcttcccccatacctctcaccagcggtgtcttcagtatgtgaaaacccaattcttcaaccctacaggatccaacaggcaatcgcagcaggcatcttacctttatcacccttgttcctccaacaaccgtcagccctattacagcagttacctttggtgcatttgttggcacaaaacatcaaggcacaacaactacaacaacttgtgctaggaaaccttgctgcctactctcagcaacagcagtttcttccattcaaccaactggctgca

SEQ ID NO: 321677 - DNA, 371 bp, Zea mays
gaccaactagcaacatagaaagcacaatagtgtaccaacaatggcagccaaaatattgtgcctccttatgctccttggtctttctgcaagtgctgctacggcgaccattttcccgcaatgctcgcaagctcctatagcttcccttcttcccccgtacctctcaccagcggtgtcttcggtatgtgaaaacccaattcttcaaccctacaggatccaacaggcaatcgcagctggcatcttacctttatcacccttgttcctccaacaatcatcagccctattacaacagttacctttggtgcatttattggcacaaaacatcagggcacaacaactaccacaacctgggcctaccaaaccttgctgcctac

SEQ ID NO: 321678 - DNA, 385 bp, Zea mays
  unsure (1)..(385): unsure at all n locations
gcattcagaaacacaccaagcgaagctacctagcaacgacttaacaacaatggctacgagagatattagccctccttgcgcttcttgccctttttgtgagcgcaacaaatgcgttcattattccacaatgctcacttgctcctagtgccattataccacagttcctccgaccagttacttcaatgggcttcgaacacctagctgtgcaagcctacaggctacaacaagcgcttgcggcgagcgtcttacaacaaccaattaaccaattgcaacaacaatccttggcacatctaaccatacaaaccatcgcaacacaacagcaacaacagttcctaccagcactgagccaactagatgtggtgaaccctgtcgnctacttgcaaca

SEQ ID NO: 321679 - DNA, 443 bp, Zea mays
ttcaaaaacacaccaagcgaagcgcactagcaacgacctaacaccaatggctgccaagagattagccctgcttgcgcttcttgcccttttagtgagcgcaacaaatgcgttcattattccacagtgctcacttgctcctagtgccagtattccacagttcctgccaccagttacttcaatgggcttcgaacatccagccgtgcaagcctacaggctacaactagcgcttgcggcgagcgccttacaacaaccaattgcccaattgcaacaacaatccttggcacatctaaccctacaaaccattgcaacgcaacaacaacaacaacagtttctgccatcactgagccacctagccgtggtgaaccctgtcacctacttgcaacagcagctgcttgcatccaacccacttgctctggcgaacgtagctgcataccagcaacaac

SEQ ID NO: 321680 - DNA, 440 bp, Zea mays
  unsure (1)..(440): unsure at all n locations
gaccaactagcaacatagaaagcacaatagtgtaccaacaatggcagccagaatattgtgcctacttatgctccttggtctttctgcaagtgctgctacggcgaccattttcccgcaatgctcgcaagctcctatagcttcccttcttcccccgtacctctcaccagcggtgtcttcggtatgtgaaaacccaattcttcaaccctacaggatccaacaggcaatcacagctggcatcttacctttatcacccttgttcctacaacaatcatcagccctattacatcagctacctttggtgcatttattggcacaaaacatcatggcacaacaactacaacaacttgtgctagcaaaccttgctgcctactctcagcaacagcagnttcttccattcaaccaactagctgcattgaactctgcttcttatttgcaacaac

SEQ ID NO: 321681 - DNA, 442 bp, Zea mays
cggaatcaaaactgcaacatcaatgatttaactacaaaaaccatgaagctggggctggtggttatcgctggcattggttgattatcaagtgtaacttgtacacagacacgcagcttcatgtgtagctaacaccacaaccatgagcagcatcatcactacacaacaacatcgtacactgatacatccacgtcaacacactatacataactatcacttagacagcaagtaactaccaacaacatacatgccacactatgctgcctcaacagcatcagccattacaagaaagacatgttcaacaactacatcgtcaaccgcagcatcaacaactacatgcactactacagaaacaacatcatcatcattgtcaacgccatcatcaacattaccatcaatcacaatgtactgtgcagcagcacgaacagtaccatgagcaatacca

SEQ ID NO: 321682 - DNA, 409 bp, Zea mays
cccacgcgtccgcaagcaacatagaaagtggaatccagtagcaacaacagagcaacagtggcgagcaagatattttccctccttatgctccttgctctttctgcatgtgttgctaacgcgacaattttccctcaatgctcacaagctcctatagcttcccttcttcccccataccttccatcaatgatagcttcagtatgtgaaaacccagctcttcagccctataggctccaacaagcaatcgcagcaagcaacatacctttatcacccttgttgtttcaacaatcgccagccctatctttggtgcagtcattggtacaaaccatcagggcacagcagctgcagcaactcgtgctacctgtgatcaaccaagtagctcttgcaaacctttctccctactctcagcaac

SEQ ID NO: 321683 - DNA, 439 bp, Zea mays
caactagcaacatagaaagcacaatagtgtaccaacaatggcagctaaaatattttggctccttatgctccttggtctttctgcaagtgctgctacggcgaccattttcccacaatgctcacaagctcctatagcttcccttcttcccccgtacctctcaccaacggtgtcttcggtatgtgaaaacccaattcttcaaccctacaggatccaacaggcaatcgcagctggcatcttacctttatcacccttgttcctccaacaatcatcagccctattacagcagttacctttggtgcatttattggcacataacatcatggcacaacaactacaacaacttgtgctagcaaaccttgctgcctactctcagcaacagcagtttctttcattcaaccaactagctgcattgaactctgcttcttatttgcaacaacaa

SEQ ID NO: 321684 - DNA, 450 bp, Zea mays
cacgcatccgcagctaccaacatagaaagcacaatattttaccaacaatggcagctaagggatttcggctccttatgctccttggtctgtctgcaagtgctgctactgcgaccattttcccacaatgctcacaagctcctatagcttcccttcttcccacgtacctctcaccaacagtgtcttcggtatgtgaaaacccaattcttcaaccctacatgatccaacaggcaatctcagctggcatctaacctttatcacccttcttcctccaacaatcatcagccctattacatcacttacctttggtgcatttattggcacataacatcatggcacaacaactacaacaacttgtgctatcaaaccttgctgcctactctcagtaacagcagttactttcattcaaccaactatctgcattgaactctgcttcttatttgcaacaacaac

SEQ ID NO: 321685 - DNA, 444 bp, Zea mays
gcaacatagaaagcacaatagtgtaccaacaatggcagccaaaatattttgcctcgttatgcgccttggtctttctgcaagtgctgctacggcgaccattttcccgcaatgctcgcaagctcctatagcttcccttcttcccccgtacctctcaccagcggtgtcttcggtatgtgaaaacccaattcttcaaccctacaggatccaacaggcaatcacagctggcatcttacctttatcacccttggtccttcaacaatcatcagccctattacatcaggtacctttggtgcatttattggcaccaaacattaaggcacaacaacttccaccacctgggctagccaaaccttgctgcctactttcaggcacagcagtttcttccattcaaccaactagctgcattgaactctgcttcttatttgcaacaacaacaactaccat

SEQ ID NO: 321686 - DNA, 345 bp, Zea mays
tgagcattcagaaacacacctagcgaagcgcactagcaacgacctaacaacaatggctaccaggatattatccctctttgcgcttcttgccctttttgtgagcgcaacaaatgcgttcattattccacaatgctcacttgctcctagtgccattattccacagttcctcccttcagttacttcaatgggcttcgaacacccagctgtgcaagcctacaggctacaacaagcgcttggcggcgagcgtcttacaacaaccaattgcccaattacaacaacaatccttggcacatctaaccatacaaaccatcgcaacgcaacagcaacaacaatttctaccagcac

SEQ ID NO: 321687 - DNA, 260 bp, Zea mays
aaaaaaaaaaaaaaaaaaaataaaaaattcaaaaataaaaaaaaaaataaaaaaaataggataaagaaaaaattaagggtggaaaattttattaaattaatattaaaaaaatcatacttattaaatcatatatcttttatatattacactgaaattattttaaatgttctttattttataacatatcaattttcaaaacttttactttatccaatttaatctcataaatccaatttgatttttatcaatattgtttttta

SEQ ID NO: 321688 - DNA, 416 bp, Zea mays
gtctcccacaaccgccgcgcgcaagccctagcccgatctcgccggcgacagacaccagatctcggcgcccgttgcgcgccgatacgcgccccgccggattcaccgctcctcgcgctgcagcacgcccgggcctggaaaaagaggcaactctgggggaataacggatttcaccttgtttacaggttactgcgtgacatgtagtattgtataattggaggttgtcaccatcaccacaaagcatatgttgtgatttgtcgatggcgaggagatgaaacaggtgtaggggcggagcagcaaggacatgacagccatgccgcatccgcgccaccgaggcgctgctaagaagcccatgtggatcatagtgctattgtctttggtttgtgttgcacttatgggggcctatgtctacccaccac

SEQ ID NO: 321689 - DNA, 435 bp, Zea mays
gcaacagcagtttcttccattcaaccaactagctgcattgaactctgctgcttattggcaacaacaacaactaccattcagccagctacctgctgcctacccccagcaatttcttccattcaaccaactggcagcattgaactctcctgcttatttacagcagcaacaactactaccattcagccagctagctggtgtgagccctgctaccttcttgatacaaccacagttgttgccgttctaccagcacgctgcgcctaacgctggcaccctcttacaactgcaacaattgctgccattcaaccaacttgctttgacaaacccagcagcgttctaccaacaacccatcattggtggtgccctcttttagatttcttatgagttatagttcaataataaagttttttgactgatgtttgtggcttcccagaaata

SEQ ID NO: 321690 - DNA, 435 bp, Zea mays
attgagaccaactagcaacatagaaagcacaatagtgtaccaacaatggcagctaagatattttgcctccttatgctccttggtctttctgcaagtgctgctacggcgaccattttcccacaatgctcacaagctcctatagcttcccttcttcccccgtacctctcaccaacggtgtcttcggtatgtgaaaacccaattcttcaaccctacaggatccaacaggcaatcgcagctggcatcttacctttatcacccttgttcctccaacaatcatcagccctattacagcagttacctttggtgcatttattggcacaaaacatcagggcacaacaactacaacaacttgtgctagcaaaccttgctgcctactctcagcaacagcagtttcttccattcaaccaactagctgcattgaactctgcttcttat

SEQ ID NO: 321691 - DNA, 444 bp, Zea mays
atcacagctggcatcttacgcttatcaaccctggtccttccacaatcatcagccctattacatcagttaccttgggtgcatttattggcacaaaacatcaaggcacaacaactacaacaacttgtgctagcaaaccttgctgcctactctcagcaacagcagtttcttccattcaaccaactagctgcattgaactctgcttcttatttgcaacaacaacaactaccattcagccagctacctgctgcctacccccagcaatttcttccattcaaccaactggcagcattgaaactctcctgcttatttacagcagcaacaactactaccattcagccagctagctggtgtgagccctgctaccttcttgatacaaccacagttgttgccgttctaccagcacgctgcgcctaacgctggcaccctcttacaactgcaacaatt

SEQ ID NO: 321692 - DNA, 443 bp, Zea mays
  unsure (1)..(443): unsure at all n locations
ccatcgcaacgcaacagcaacaacagttcctaccagcactgagccacctagccatggtgaaccctgtcgcctagttgcaagagcagctgcttgcatccaacccacttgctctagcaaacgtagttgcaaaccagcaacaacaacaactgcaacagtttctgccagcgcttagtcaactagccatggtgaaccctgccgcctacctacaacagcaacaactgctttcatctagcccgctcgctgtggccaatgcacctacataccttgcacangaattgttgcaacagattgtaccagctctaactcagctagctgtggcaaaccctgttgcctacttgcaacagctgcttccattcaaccaactaactatgtcgaactctgttgcgtacctacaacagcgacaacagttacttaatccattggcagtggctaacccattggtc

SEQ ID NO: 321693 - DNA, 305 bp, Zea mays
gttgcgcctaacgctggcaccctcttacaactgcaacaattgctgccatggaaccaacttgctttgacaaacccagcagtgttctaccaacaacccatcattggtggtgccctcttttagatttcttatgagttatagttcaataataaagttttttatctgatgtttgtggcttcccagaaataagaaagtacatttctagaaaaaaaaataaacaaagaaaaaattgaacatgtagactctggcaagtcgaccaccactggacacctgatctacaagctaggcttaattgacaagcgtgtgat

SEQ ID NO: 321694 - DNA, 438 bp, Zea mays
  unsure (1)..(438): unsure at all n locations
attattgagaccaactagcaacatagaaagcacaatagtgtaccaacaatggcagcgaaaatattttgcctccttatgctccttggtctttctgcaagtgctgctacggcgaccattttcccgcaatgctcgcaagctcctatagcttcccttcttcccccgtacctctcaccagcggtgtcttcggtatgtgaaaacccaattcttcaaccctacaggatccaacaggcaatcacagctggcatcttacctttatcacccttgttcctccaacaatcatcagccctattacatcagttacctttgggtgcatttattggcacanaacatcagggcacaacaactacaacaacttgtgctagcaaaccttgctgcctactctcagcaacagcagtttcttccattcaaccaactagctgcattgaactctgcttctta

SEQ ID NO: 321695 - DNA, 389 bp, Zea mays
  unsure (1)..(389): unsure at all n locations
tgaaagtgctgatcgttgcccttgctctcctggcgctcgctgcgagcgccgcctacagtacaggcggcggctgtggctgccagacaccaccgtttcatctaccgcctccgttctatatgccgcctccgttctatctgccgccgcagcagcagccgcagccatggcaataccccactcaaccaccgcagctaagcccgtgccagcagttcggatcctgccggcgtcggcagcgtcggcagcccgttcctgggccagtgcgtcgagttcctgaggcaccagtgcagcccggcggcgacgccctacggctcgccacagtgccaggcgctgcagcagcagtgctgccaccagatcangcaagtggagccgctgcaccggtaccaggcgacata

SEQ ID NO: 321696 - DNA, 197 bp, Zea mays
tggactcctaacactcaacacatcaattctatattctactataaacacttgtggccgttaacttataacgactatttgacctactacaataacaaccctttgtacatctaactataccaaccatatcatctctctaccaacactaactcatccatctagccttctttaacattaactattacttgcaacaacatctt

SEQ ID NO: 321697 - DNA, 423 bp, Zea mays
tgggcttcgaacacccagctgtgcaagcctataggctacaacaagcgcttgcggcgagcgtcttagaacaaccaattgcccaattacaacaacaatccttggcacatctaaccatacaaaccatcgcaacgcagcagcaacaagcactgagccacctagccgtggtgaaccctatcgcctacttgcaacaacagctgcttgcatccaacccacttgctttggcaaacgtagctgcataccaacaacaacaacagttgcaacagtttctaccagcgctcagtcaactagccatggtgaaccctatcgcctacctacaacagcaacaacttctttcatctagcccgctcgctatgggcaatgcacctacatacctgcaacaacagttgttgcaacaacagttgctgcaacaaattgtaccagctc

SEQ ID NO: 321698 - DNA, 430 bp, Zea mays
gcaacatagaaagtggaatacagtagcaacaatagagcaacaatggcgggcaagatggtgttccatccttatgctccttgctctttctgcatgtgttgctaacgcgaccatttttcctcaatactcacaagctcctatagctgcccttcttcccccataccttccatcaatgaccgcttcagtttgtgaaaacccagcccttcaaccctacaggctccaacaagcaatcgcaacaagcaacttacctttatcacccctgttctttcaacaatcgccagccctatctttggtgcagtcattggtacaaaccatcagggcacaacagctgcaacaactcgtgctaccagtgatcagccaagtagctctggcaaacctttctccctactctcagcaacaacaatttcttccattcaaccaactgtctacactg

SEQ ID NO: 321699 - DNA, 439 bp, Zea mays
gaagctggtgcttgtggttcttgctttcattgctttagtatcaagtgtttcgggtaggcagacaggcggctgcagctgtggtcaacaacaaagccatgagcagcaacatcatccacaacaacatcatccacaaaaacaacaacatcaaccaccaccacaacatcaccagcagcagcaacaccaacaacaacaagttcacatgcaaccacaaaaacatcagcaacaacaagaagttcatgttcaacaacaacaacaacaaccgcagcaccaacaacaacaacaacaacaacagcaccaacaacaacatcaatgtgaaggccaacaacaacatcaccaacaatcacaaggccatgtgcaacaacacgaacagagccatgagcaacaccaaggacagagccatgagcaacaacatcaacaacaattccagggtcatgacaag

SEQ ID NO: 321700 - DNA, 396 bp, Zea mays
  unsure (1)..(396): unsure at all n locations
gggtcttcagaccattagctttatctactccagagcgcagaagaacccgatcgacacgatgagggtgttgctcgttgccctcgctctcctggctctcgctgcgagcgccacctccacgcatacaagcggcggctgcggctgccagccaccgccgccggttcatctaccgccgccggtgcatctgccacctccggttcacctgccacctccggtgcatctcccaccgccggtccacctgccgncgccggtccacctgccaccgccggtccatgtgccgncgccggttcatctgccgncgncaccatgccactnaccctactcaaccgcccggcctcagcctcatccncagccacacccatgcccgtgccaacagccgcatccaagcccgtgccagct

SEQ ID NO: 321701 - DNA, 359 bp, Zea mays
acgctaccgcagccattttcccacaatgctcacaagctcctatagcttcccttcttccccgatacgtctcaccagcggtgtcttcaatgtgtgaaaccccaattgttcaaccctacaggatccaacaggcaatcacaacacgcatcttaccattatcacccttgttcctccaacaaccgtcagccctattacagcagttacctttggtccatttggtggcacaaaacatcagggcacaacaactacaacaactcgtgctagcaaacctcgctgcatactctcagcaacatcagatgcttacattcaaccaactggctgcctggaactctgctgctcatttgcagcatcaattaccattc

SEQ ID NO: 321702 - DNA, 116 bp, Zea mays
ctagatcgcgacggccgtcctcttttagatttcttatgagttatagttcaataataaagttttttgtctgatggtagtggcttcccagaaataagaaagtacatttctagattctt

SEQ ID NO: 321703 - DNA, 293 bp, Zea mays
cagcaagcaacatagaaagtagaatccattagcaacaatagagcaacaatggcgaccaggatatgttccctccttatgctccttgctctttctacatgtgttgctaacgcgacaattttccctcaatgctcacaagctcctatagcttcccttcttcccccataccttccatcaattatagcttcagtatgtgaaaacccagctcttcaaccatataggcttcaacaagcaatcgcagcaagcaacatacctttatcgcccttggtgtttcaacaatcaccagccctatcttt

SEQ ID NO: 321704 - DNA, 425 bp, Zea mays
gttggcttctcctccccctccggttcgggttcgggttcgtgaggttctccggggttgggtttcgggggtgggcggatcgagatggcggcgtcggatgttgagtaccgctgcttcgtcggcggcctcgcctgggccacggacgaccactccctccacaacgccttcagcacctacggcgaggtcctcgagtccaagatcatcctcgatcgggagacgcagaggtcccgcggcttcggcttcgtcaccttctccacggaggaggcgatgcggaacgccatcgagggcatgaacggcaaggagctggacggccggaacatcaccgtcaacgaggcccagtcccgcggccgccgttgaagcggcggctgcggctaccgtggtggccgtggaggcggcggctacggcggtggctggcgccgtgatggcgg

SEQ ID NO: 321705 - DNA, 429 bp, Zea mays
gctcctatagcttcccttcttcccccgtacctctcaccaacggtgtcttcggtatgggaaaacccaattcttcaaccctacaggatccaacaggcaatcgcagctggcatcttacctttatcacccttgttcctccaacaatcatcagccctattacagcagttacctttggtgcatttattggcacaaaacatcagggcacaacaactacaacaacttgtgctagcaaaccttgctgcctactctcagcaacagcagtttcttccattcaaccaactagctgcattgaactctgcttcttatttgcaacaacaacaactaccattcagccagctatctgctgcctacccccagcaatttcttccattcaaccaactgacagcattgaactctcctgcttatttacagcagcaacaactactaccattc

SEQ ID NO: 321706 - DNA, 411 bp, Zea mays
caacaagcaacatagaaagtggaatccagtagcaacaacacagcaacaatggcgaccgagatattttccctccttatgctccttgctctttctgcatgtgttgctaacgcgacaattttccctcaatgctcacaagctcctatagcttcccttcttcccccataccttccatcaatgatagcttcagtatgtgaaaacccagctcttcagccctataggctccaacaagcaatcgcagcaagcaacatacctttatcacccttgttgtttcaacaatcgccagccctatctttggtgcagtcattggtacaaaccatcagggcacagcagctgcagcaactcgtgctacctgtgatcaaccaagtagctctggcaaacctttctccctactctcagcaacaacaatttctt

SEQ ID NO: 321707 - DNA, 437 bp, Zea mays
  unsure (1)..(437): unsure at all n locations
gagaccaacaagcaacatagaaagtggaatccagtagcaacaatagagcagcaatggggaccaagatactttccctccttatgctccttgctctttctgcatgtgttgctaacgcgacaattttccctcaatgctcacaagctcctatagcttcccttcttcccccataccttccatcaatgatagcttcagtatgtgaaaacccagctcttcaaccctataggctccaacaagcaatcgcagcaagcaacatacctttatcacccttgtttcaacaatcgccagccctatctttggtgcagtcattggtacaaaccatcaaggcacagcagctgcagcaactcgtgctacctgtgatcaaccaagtagctctggcaaacctttctccctactatcagcaacaacaatntcttccattcaaccaactatctacactg

SEQ ID NO: 321708 - DNA, 426 bp, Zea mays
cagaccattagctttatctactccagagcgcagaagaacccgatcgacaccatgagggtgttgctcgttgccctcgctctcctggctctcgctgcgagcgccacctccacgcatacaagcggcggctgcggctgccagccaccgccgccggttcatctaccgccgccggtgcatctgccaccttcggttcacctgccacctgcggtgcatctgccaccgccggtccacctgccgccgccagtccacctgccaccgccggtccatgtgccgccgccggttcatctgccgccgccaccatgccactaccctactcaaccgccccggcctcagcctcatccccagccacacccatgcccgtgccaacagccgcatccaagcccgagccagctgcagggaacctgcggcgttggcagcaccccgatcctg

SEQ ID NO: 321709 - DNA, 437 bp, Zea mays
  unsure (1)..(437): unsure at all n locations
agcgcactagcaacgacctaacaccaatggctaccaagatattagccctccttgcgcttcttgccctttgagtgagcgcaacaaatgcgttcattattccacagtgctcacttgctcctagtgccagtattccacagttcctcccaccagttacttcaatgggcttcgaacatccagccgtgcaagcctacaggctacaactagcgcttgcggcgagcgccttacaacaaccaattgcccaattgcaacaacaatccttggcacatctaaccctacaaaccattgcaacgcaacaacaacaacaacagtttctgccatcactgagccacctagccgtggtgaacccttgtaactacttgcaacagcagctgcttgcattcaacccacttgctcntgcgaacgtagctgcataccagcaacaacaacagctgcaacag

SEQ ID NO: 321710 - DNA, 329 bp, Zea mays
  unsure (1)..(329): unsure at all n locations
agaaagcacaatagtggaccaacaatggcagctaaaatattttgccttcctaagctcgggggggtttctgcaagtgctggtacggcgaccattttcccacaatgctcacaagctcctatagcttaccttcttcccccgtacctctcaccaacggtgtcttccgtatgtgaaaacccaattctttaaccctacaggatccaacaggcaatcgcaactggcatcttaactttatcacccttggtccctccaacaatcattcagccctattacagcagttacctttggtgcatctattggcacanaacatcanggcacaacaactacaacaa

SEQ ID NO: 321711 - DNA, 355 bp, Zea mays
agcaagcaacatagaaagtagaatccattagcaacaatagagcaacaatggcgaccaggatattttccctccttatgctccttgctctttctacatgtgttgctaacgcgacaattttccctcaatgctcacaagctcctatagcttcccttcttcccccataccttccatcaattatagcttcagtatgtgaaaacccagctcttcaaccatataggcttcaacaagcaatcgcagcaagcaacatacctttatcgcccttgttgtttcaacaatcaccagccctatctttggtgcagtcattggtacaaaccatcagggcacaacagctgcagcaactcgtgctacctgtgat

SEQ ID NO: 321712 - DNA, 315 bp, Zea mays
cccacgcgtccgggaaaatggtcgccgtagcagcacttgcagaaataccaaggagcggaaggaggcaaaatattttcccgcaatgctcacaagctcctatagcttcccttcttcccccgtacctctcaccagcggtgtcttcggtatgtgaaaacccaattcttcaaccctacaggatccaacaggcaatcgcagctggcatcttacctttatcacccttgttcctccaacaatcatcagccctattacagcagttacctttggtgcatttattggcacaaaacattcagcacaacaactacaacaacttgtgct

SEQ ID NO: 321713 - DNA, 443 bp, Zea mays
ccacgcgtccgaggccataaaaggttcttacaaaaggaacattaacatacatcccacatgtcctacagcggcaacccatgcatcacagacatcacacataagtttttctttatttggatgcattactagcactaagactctactaggtaccacatttacaggttccaaatgctatacctagtggacctgtcagagtcgtacgagtcattgtcactgggctcatacaattctggtgaggaaggggggtgaaaggattttgggccactgggttcacttgctccaatacttttatttcttcctccatcctctccttctctgggtctgaccttgctttgctctctagtgcatcctgctccatgaggtctacctcctttcagattgcaaggagagcattgagaaggtaatgctcgtcacccaaatgcatgaaagcctcttctagaaag

SEQ ID NO: 321714 - DNA, 302 bp, Zea mays
gcttatttacagcagcaacaactactaccattcagccagctagctggtgtgagccctgctacgttcttgacacaaccacaattgttgccgttctaccagcacgctgcgcctaacgctggcaccctcttacaactgcaacaattgctgccattcaaccaacttgctttgacaaacccaacagcattctaccaacaacccatcattggtggtgccctcttttagatttcttatgagttatagttcaataataaagttttttgtctgatgtttgtggcttcccagaaataagaaagtacatttct

SEQ ID NO: 321715 - DNA, 347 bp, Zea mays
cagctagcaacatagaaagcacaatagtgtaccaacaatggcagctaaaatattttggctccttatgctccttggtctttctgcaagtgctgctacggcgaccattttcccacaatgctcacaagctcctatagcttcccttcttcccccgtacctctcaccaacggtgtcttcggtatgtgaaaacccaattcttcaaccctacaggatccaacaggcaatcgcagctggcatcttacctttatcacccttgttcctccaacaatcatcagccctattacagcagttacctttggtgcatttattggcacaaaacatcagggcacaacaactacaacaacttgtgc

SEQ ID NO: 321716 - DNA, 322 bp, Zea mays
cttccttatgctccttggtctttctgcaagtgttgcttaccgcaaccattttcccacaatgctcacaagctcctatagcttcccttcttcccccatacctctcaccagcggtgtcttcaatgtgtgaaaccccaattgttcaaccctacaggatccaacaggcaatcgcaacaggcatcttaccattatcacccttgttccttcaacaaccgtcagccctattacagcaattacctttggtccatttggtggcacaaaaccataaggcacaacaactacaacaacttgtgctagcaaaccttgctgcatactctcagcaaca

SEQ ID NO: 321717 - DNA, 456 bp, Zea mays
gaccgacgcgtccggcaattagctcatcgactccagattggagaactcgacaccatgaaggtgctgatcgtggccctggctctcctggcgctcgctgcgagcgccgcctccagtacaagcggcggctgtggctgccagacaccaccgtttcatctaccgcctccgttctatatgccgcctccgttctatctgccgccgcagcagcagccgcagccatggcaataccccactcaaccaccgcagctaagcccgtgccagcagttcggatcctgcggcgtcggcagcgtcggcagcccgttcctgggccagtgcgtcgagttcctgaggcaccagtgcagcccggcggcgacgccctacggctcgccacagtgccaggcgctgcagcagcagtgctgccaccagatcaggcaggtggagccgctgcaccggtaccaggcgacatacggtgtggtcctg

SEQ ID NO: 321718 - DNA, 281 bp, Zea mays
  unsure (1)..(281): unsure at all n locations
agcaacagatactgcacaccctagatccaacaatggctgattgaatacaatgcctcgggatgctggttggtctgaaatgactggctctgccgataccattaaaanacagtgctaacgggctcatatcacgtggaatggttccttgtatgtttaaccaaccatggctaaggactggcataacaacattcttaaacacatcatgatacagcacagcgtgaacaatcctgtcacaaacagatgagactctgaacagatacacttataacacggactacagaagc

SEQ ID NO: 321719 - DNA, 441 bp, Zea mays
ccaactagcaacatagaaagcacaatagtgtaccaacaatggcagccaaaatattgtgcttccttatgctccttggtctttctgcaagtgctgctaccgcaaccattttcccacaatgctcacaagctcctatagcttcctttcttcccccatacctctcaccagcggtgtcttcagtatgtgaaaacccaattcttcaaccctacaggatccaacaggcaatcgcagcaggcatcttacctttatcacccttgttcctccaacaaccgtcagccctattacagcagttacctttggtgcatttgttggcacaaaacatcaaggcacaacaactacaacaacttgtgctaggaaaccttgctgcctactctcagcaacagcagtttcttccattcaaccaactggctgcattgaactctgctgcttatttgcaacaacaac

SEQ ID NO: 321720 - DNA, 445 bp, Zea mays
ccacgcgtccgagcacacctagcgaagcgcactagcaacgacctaacaacaatggcttccaagacattatccctccttgcgcttcttgccctttttgtgagtgcaacaaatgcgttcattattccacaatgctcacttgctccgagtgccattattccacagttcctccctccagttacttcaatgggcttcgaacacccagctgtgcaagcctataggctacaacaagcgcttgcggcgagcgtcttagaacaaccaattgcccaattacaacaacaatccttggcacatctaaccatacaaaccatcgcaacgcagcagcaacaagcactgagccacctagccgtggtgaaccctatcgcctacttgcaacaacagctgcttgcatccaacccacttgctttggcaaacgtagctgcataccaacaacaacaacagttgcaac

SEQ ID NO: 321721 - DNA, 442 bp, Zea mays
caactagcaacatagaaagcacaatagtgtaccaacaatggcagccaaaaggttatgcttccttatgctccttggtctttctgcaagtgctgctaccgcaaccattttcccacaatgctcacaagctcctatagcttcctttcttcccccatacctctcaccagcggcgtcttcagtatgtgaaaacccaattcttcaaccctacaggatccaacaggcaatcgcagcaagcatcttacctttatcacccttgttcctacaacaaccgtcagccctattacagcagatacctttggtgcattcgttggcacaaaacatcaaggcacaacaactacaacaacttgtgctaggaaaccttgctgactactctcagcaacagcagttacttgcattcaaccaactggctgcattgaactctgctgcttatttgcaacaacaacta

SEQ ID NO: 321722 - DNA, 354 bp, Zea mays
gaccaactagcaacatagaaagcacaatagtgtaccaacaatggcagccaaaatatttggctgccttatgctccttggtctttctgcaagtgctgctaccgcaaccattttcccacaatgctcacaagctcctatagcttcctttcttcccccatacctctcaccagcggtgtcttcagtatgtgaaaacccaattcttcaaccctacaggatccaacaggcaatcgcagcaggcatcttacctttatcaacccttgttcctccaacaaccgtcagcccctattacagcagttacctttggtgcatttggttggcacaaaacatcaaagcacaacaactacaacaacttgtgct

SEQ ID NO: 321723 - DNA, 409 bp, Zea mays
ctttctgcaagtgctgctacggcgaccattttcccgcaatgctcgcaagctcctatagcttcccttcttcccccgtacctctcaccagcggtgtcttcggtatgtgaaaacccaattcttcaaccctacaggatccaacaggcaatcacagctggcatcttacctttatcacccttgttcctccaacaatcatcagccctattacatcagttacctttggtgcatttattggcacaaaacatcagggcacaacaactacaacaacttgtgctagcaaaccttgctgcctactctcagcaacagcagtttcttccattcaaccaactagctgcattgaactctgcttcttatttgcaacaacaacaactaccattcagccagctacctgctgcctacccccagcaatttc

SEQ ID NO: 321724 - DNA, 390 bp, Zea mays
gcaacaacaattaccattcagccagctagttgctgcctacccccagcaatttcttccattcaaccaactagcagcagtgaactctgctgcttatttacagcagcaacaactactaccattcagccagctagctgatgtgagccctgctgccttcttgacacaacaacagttgttgccgttctacctgcacgctatgcctaacgctggcaccctcttacaactgcaacaattgctgccattcaaccaacttgctttgacaaactcaacagtgttctaccaacaacccatcattggtggtgccctcttttagattgcttatgagttatagttcaataatgaagttttttggatgatgtttgtggcgtcccagaaataagaaagtacatttct

SEQ ID NO: 321725 - DNA, 410 bp, Zea mays
attgtcagcattcaaaaacacaccaagcgaagcgcactagcaacgacctaacaccaatggctaccaagatattagccctccttgcgcttcttgcccttttagtgagcgcaacaaatgcgttcattattccacagtgctcacttgctcctagtgccattattccacagttcctcccaccagttacttcaatgggcttcgaacatccagccgtgcaagcctacaggctacaactagcgcttgcggcgagcgccttacaacaaccaattgcccaattgcaacaacaatccttggcacatctaaccctacaaaccattgcaacgcaacaacaacaacaacaacagtttctgccatcactgagccacctagccgtggtgaaccctgtcacctacttgcaacagcagctgcttgca

SEQ ID NO: 321726 - DNA, 438 bp, Zea mays
caagcaacatagaaagtagaatccattagcaacaatagagcaacaatggcgaccaagagattttccctccttatgctccttgctctttctacatgtgttgctaacgcgacaattttccctcaatgctcacaagctcctatagcttcccttcttcccccataccttccatcaattatagcttcagtatgtgaaaacccagctcttcaaccatataggcttcaacaagcaatcgcagcaagcaacatacctttatcgcccttgttgtttcaacaatcaccagccctatctttggtgcagtcattggtacaaaccatcagggcacaacagctgcagcaactcgtgctacctgtgatcaaccaagtagctctggcaaacctttctccctactctcagcaacaacaatttcttccattcaaccaactgtctacactgaaccct

SEQ ID NO: 321727 - DNA, 61 bp, Zea mays
gaatccggtcgaccacgcgtccgtatatctccaagaatcattaaggatggcacgcaataca

SEQ ID NO: 321728 - DNA, 255 bp, Zea mays
ctttggtccatttggtggcacaaaacatcagggcacaacaactacaacaacttgtgctagcaaaccttgctgcatactctcagcaacatcagtttcttccattcaaccaactggctgcattgaactctgctgcttatttgcaacaacaattaccattcagccagctagttgctgactacccccagcaatttcttccattcaaccaactagcagcattgaactctgctgcttatttacagcagcaacaactactac

SEQ ID NO: 321729 - DNA, 431 bp, Zea mays
gcagcatagaaagcacaatagtgtaccatcaatggcagccaaaatattttgcctacttatgctccttggtctttctgcaagtgctgctacggcgaccattttcccgcaatgctcgcaagctcctatagcttcccttcttcccccgtacctctcaccagcggtgtcttcggtatgtgaaaacccaattcttcaaccctacaggatccaacaggcaatcgcagctggcatcttacctttatcacccttgttcctccaacaatcatcagccctattacaacagttacctttggtgcatttattggcacaaaacatcagggcacaacaactacaacatcttgtgctagcaaaccttgctgcctactctcagcaacagcagcttcttccattcaaccaactaggctcattgaactctgcttcttatttgcaacaac

SEQ ID NO: 321730 - DNA, 428 bp, Zea mays
gtggaatccagtagcaacaatagagcaacaatggcgaccaagatactttccctccttatgctccttgctctttctgcatgtgttgctaacgcgacaattttccctcaatgctcacaagctcctatagcttcccttcttcccccataccttccatcaatgatagcttcagtatgtgaaaacccagctcttcaaccctataggctccaacaagcaatcgcagcaagcaacatacctttatcacccttgtttcaacaatcgccagccctatctttggtgcagtcattggtacaaaccatcaaggcacagcagctgcagcaactcgtgctacctgtgatcaaccaagtagctctggcaaacctttctccctactatcagcaacaacaatttcttccattcaaccaactatctacactgaaccctgctgctta

SEQ ID NO: 321731 - DNA, 418 bp, Zea mays
ccattttcccacaatgctcacaagctcctatagcttcccttcttcccccgtacctctcacgcagcggtgtcttcggtatgtgaaaacccaattcttcaaccctataggatccaacaggcaatcgcagctggcatcttacctttatcacccttgttcctccaacaatcatcagccctattacagcagttacctttggtgcatttattggcacaaaacatcagggcacaacaactacaacaacttgtgctagcaaaccttgctgcctactctcagcaacaacagtttcttccattcaaccaactagctgcattgaactctgcttcttatttgcaacaacaacaactaccattcagccagctatctgctgcctacccccagcaatttcttccattcaaccaactgacagctttgaactctt

SEQ ID NO: 321732 - DNA, 432 bp, Zea mays
ggaattcccgggctgagccacctagccgtggtgaaccctgtcacctacttgcaacagcagctgcttgcatccaacccacttgctctggcgaacgtagctgcataccagcaacaacaacagctgcaacagtttatgccagtgctcagtcaactagccatggtgaaccctgccgtctacctacaactactttcatctagcccgctcgcggtgggcaatgcacctacgtacctacaacaacagttgctgcaacaaattgtaccagctctgactcagctagctgtggcaaaccctgctgcctacttacaacagttgcttccattcaaccaactggctgtgtcaaactctgctgcgtacctacaacagcgacaacagttacttaatccattggcagtggctaacccattggtcgctacctttctgcagcagcaacaa

SEQ ID NO: 321733 - DNA, 425 bp, Zea mays
aaagcacaatagtgtaccaacaatggcagccaaaatattttgcttccttatgctccttggtctttctgcaagtgttgctaccgcaaccattttcccacaatgctcacaagctcctatagcttcccttcttcccccatacctctcaccagcggtgtcttcaatgtgtgaaaacccaattgttcaaccctacaggatccaacaggcaatcgcaacaggcatcttaccattatcacccttgttcctccaacaaccgtcagccctattacagcagttacctttggtccatttggtggcacaaaacatcagggcacaacaactacaacaacttgtgctagcaaaccttgctgcatactctcagcaacatcagtttcttccattcaaccaactggctgcattgaactctgctgcttatttgcaacaacaat

SEQ ID NO: 321734 - DNA, 458 bp, Zea mays
aaaacacaccaagcgaagcgcactagcaacaacctaacaccaatggctaccaagatatgagccctccttgcgcttcttgcccttttagtgagcgcaacaaatgcgttcattattccacagtgctcacttgctcctagtgccattattccacagttcctcccaccagttacttcaatgggcttcgaacatccagccgtgcaagcctacaggctacaactagcgcttgcggcgagcgccttacaacaaccaattgcccaattgcaacaacaatccttggcacatctaaccctacaaaccattgcaacgcaacaacaacaacaacaacagtttctgccatcactgagccacctagccgtggtgaaccctgtcacctacttgcaacagcagctgcttgcatccaacccacttgctctggcgaacgtagctgcataccagcaacaacaacagctgcaacagtt

SEQ ID NO: 321735 - DNA, 431 bp, Zea mays
atttataccaactagcaacatagaaagcacaatagtgtaccaacaatggcaggcaaaaggttttgcctccttatgctccttggtatttctgcaagtgctgctacggcgaccattttcccgcaatgctcacaagctcctatagcttcccttcttcccccgtacctctcaccagcggtgtcttctgtatgtgaaaacccaattcttcaaccctacaggatccaacaggcaatcgcagctggcatcttacctttatcacccttgttcctccaacaatcatcagccctattacagcagttacctttggagcatttattggcacaaaacatcagggcacaacaactacaacaacttgtgctagcaaaccttgctgcctactctcagcaacagcagtttcttccattcaaccaactagctgcattgaactctgcttc

SEQ ID NO: 321736 - DNA, 428 bp, Zea mays
caattagctcatcgactccagattggagaactcgacaccatgaaggtgctgatcgttgcccttgctctcctggcgctcgctgcgagcgccgcctccagtacaagcggcggctgtggctgccagacaccaccgtttcatctaccgcctccgttctatatgccgcctccgttctatctgccgccgcagcagcagccgcagccatggcaataccccactcaaccaccgcagctaagcccgtgccagcagttcggatcctgcggcgtcggcagcgtcggcagcccgttcctgggccagtgcgtcgagttcctgaggcaccagtgcagcccggcggcgacgccctacggctcgccacagtgccaggcgctgcagcagcagtgctgccaccagatcaggcaggtggagccgctgcaccggtaccaggcgacata

SEQ ID NO: 321737 - DNA, 397 bp, Zea mays
acaatagtgtaccaacaatggcaaccaaaatattttgcttccttatgctccttggtctttctgcaagtgctgctaccgcgaccattttcccgcaatgctcacaagctcctatagcttcccttcttcccccatacctctcaccagcggtgtcttcagtatgtgaaaacccaattcttcaaccctacaggatccaacaggcaatcgcagcaggcatcttacctttatcacccttgttcctccaacaaccgtcagccctattacagcagttacctttggtgcatttgttggcacaaaacatcagggcacaacaactacaacaacttgtgctagcaaaccttgctgcctactctcagcaacagcagtttcttccattcaaccaactggctgcattgaactc

SEQ ID NO: 321738 - DNA, 446 bp, Zea mays
gagaccaacaagcaacatagaaagtggaatccagtagcaacaatagagcaacaatggcgaccaagatactttccctccttatgctccttgctctttctgcatgtgttgctaacgcgacaattttccctcaatgctcacaagctcctatagcttcccttcttcccccataccttccatcaatgatagcttcagtatgtgaaaacccagctcttcaaccctataggctccaacaagcaatcgcagcaagcaacatacctttatcacccttgtttcaacaatcgccagccctatctttggtgcagtcattggtacaaaccatcaaggcacagcagctgcagcaactcgtgctacctgtgatcaaccaagtagctctggcaaacctttctccctactatcagcaacaacaatgtcttccattcaaccaactatctacactgaaccctgct

SEQ ID NO: 321739 - DNA, 400 bp, Zea mays
tttcagcattcaaaaacacaccaagcgaagcgcactagcaacgacctaacaccaatgggtaccaagatattagccctccttgcgcttcttgcccttttagtgagcgcaacaaatgcgttcattattccacagtgctcacttgctcctagtgccattattccacagttcctcccaccagttacttcaatgggcttcgaacatccagccgtgcaagcctacaggctacaactagcgcttgcggcgagcgccttacaacaaccaattgcccaattgcaacaacaatccttggcacatctaaccctacaaaccattgcaacgcaacaacaacaacaacaacagtttctgccatcactgagccacctagccgtggtgaaccctgtcacctacttgcaacagcagc

SEQ ID NO: 321740 - DNA, 445 bp, Zea mays
agaccaactaccaacatagaaagcacaatagtgtaccaacaatggcagccaaaatattttgcctccttatgctccgtggtctttctgcaagtgctgctacggcgaccatttttccgcaatgctcgcaagctcctatagcttcccttcttaccccgtacctctcaccagcggtgtcttcggtatgtgaaaacccaattcttcaaccctacaggatccaacaggcaatcacagctggcatcttacctttatcacccttgttcctccaacaatcatcagccctattacatcagttacctttggtgcatttattggcacaaaacatcagggcacaacaactacaacaacttgtgctagcaaaccttgctgcctactctcagcaacagcagtttcttccattcaaccaactagctgcattgaactctgcttcttatttgcaacaacaaca

SEQ ID NO: 321741 - DNA, 425 bp, Zea mays
aatcgcagcaagcaacatacctttatcgcccttgttgtttcaacaatcaccagccctatgtttggtgcagtcattggtacaaaccatcagggcacaacagctgcagcaactcgtgctacctgtgatcaaccaagtagctctggcaaacctttctccctactctcagcaacaacaatttcttccattcaaccaactgtctatactgaaccctgctgcttatttgcagcaacaactattaccatttagccagctagctactgcctactctcagcaacaacaacttcttccatttaaccaattggccgcactgaaccccgctgcttatttgcagcagcaaatactactgccatttagcgagctagctgcagcaagtcgtgcttccttcttgacacagcaacagttgctgcctttctacaagcagtttg

SEQ ID NO: 321742 - DNA, 457 bp, Zea mays
gcaacatagaaagtggaatccagtagcaacaatagagcaacaatggcgaccaagatattttccctgcttatgctccttgctctttctacatgtgttgctaacgcgacaattttccctcaatgctcacaagctcctatagcttcccttcttcccccataccttccatcaattatagcttcaatatgtgaaaacccagctcttcaaccatataggcttcaacaagcaatcgcagcaagcaacatacctttatcgcccttgttgtttcaacaatcgccagccctatctttggtgcagtcattggtacaaaccatcagggcacaacagctgcagcaactcgtgctacctctgatcaaccaagtagctctggcaaacctttctccctactctcagcaacaacaatttcttccattcaaccaactgtctacactgaaccctgctgcttaattgcagcaacaac

SEQ ID NO: 321743 - DNA, 443 bp, Zea mays
  unsure (1)..(443): unsure at all n locations
cccacgcgtccgcaccaagcgaagcacattagcaacaacctaacaacaatggctaccaagatattatccctccttgcgcttcttgcgctttttgcgagcgcaacaaatgcgttcattattccacaatgctcacttgctccaagttccattattacacagttcctcccaccagttacttcaatgggcttcgaacacccagctgtgcaagcctataggctacaacaagcaattgcggcgagcgtcttacaacaaccaatttcccagttgcaacaacaatccttggcacatctaacaatacaaaccatcgcaacgcaacagcaacaacaattcctaccagcactgagccacctagccatggtgaaccctgccgcctacttgcaacagcagttgcttgcatcanacccacttgctctggcaaacgtagttgcaaaccagccacaaca

SEQ ID NO: 321744 - DNA, 428 bp, Zea mays
gcaacatagaaagcacaatagtgtaccaacaatggcagccaaaatattttgcctccttatgctcctgggtatttctgcaagtgctgctacggcgaccattttcccgcaatgctcacaagctcctatagcttcccttcttcccccgtacctctcaccagcggtgtcttcggtatgtgaaaacccaattcttcaaccctacaggatccaacaggcaatcgcagctggcatcttacctttatcacccttgatcctccaacaatcatcagccctattacagcagttacctttggtgcatttattggcacaaaacatcagggcacaacaactacaacaacttgtgctagcaaaccttgctgcctactctcagcaacagcagtttcttccattcaaccaactagctgcattgaactctgcttcttaattgcaac

SEQ ID NO: 321745 - DNA, 428 bp, Zea mays
cggctatcctgggaggcgcagcggctccgggacctccggttcatcgaccatgagctccgtgccgttgtggaggcgtcgtcggacgcggagctggacggcgtcaaggcccagatggccgacgcagaggacgctatcgcggagctggccgacgcgaacgcgaagctcctgaagaaggcggaggagttcacgtcggcgggcgacggttgcggcgacgtggacctgcggagccggagccagcgcaagatcctggagcgcgtacgcaagatgtcggagaaggccggtcggctggagctggagctgcagcggttccagcacgcgctgctgcggcacgaggaggagcgcgcggcgaggcgcgcggtcaaggcggcggcgtccaccgtcgtgcaggtgcagcggcggtcgcgggtgcatctggtggagtacctcta

SEQ ID NO: 321746 - DNA, 433 bp, Zea mays
ctagcaacatagaaagcacaatcgtgtaccgacaatggcagctaaaacatttggcctcggtatgctccttggtcttactgcaagtgctgctacggcgaccattttcccacaatgctcacaagctcctatagcttaccttcttaccccgtacctttcaccaacggtgccttcagtatgtgaaaacccaattcttgaaccctacaggatccaacaggcaatcgcagctggcatcttacctttatcacccttgatcctccaacaatcatcagccctattacagcagttacctttggtgcatttattggcacaaaacatcagggcacaacaactacaacaacttgtgctagcaaaccttgctgcctactctcagcaacagcaagttcttccattcaaccaactagctgcattgaactctgcttcttatttgcaacac

SEQ ID NO: 321747 - DNA, 452 bp, Zea mays
  unsure (1)..(452): unsure at all n locations
attttgagcattcagaaacacacctagcgaagcgcactagcaacgacctaacaacaatggcttccaagacattatccctccttgcgcttcttgccctttttgtgagtgcaacaaatgcgttcattattccacaatgctcacttgctccgagtgccattattccacagttcctccctccagttacttcaatgggcttcgaacacccagctgtgcaagcctataggctacaacaagcgcttgcggcgagcgtcttagaacaaccaattgcccaattacaacaacaatccttggcacatctaaccatacaaaccatcgcaacgcagcagcaacaagcactgagccacctagccgtggtgaaccctatcgcctacttgcaacaacagctgcttgcattcaacccacttgcnttggcaaacgtagctgcataccaacaacaacaacagttgcaacag

SEQ ID NO: 321748 - DNA, 452 bp, Zea mays
attgagaccaactagcaacatagaaagcacaatagtgtaccaacaatggcagctaaaatgttttgcctccttatgctccttggtctttctgcaagtgctgctacggcgaccattttcccacaatgctcacaagctcctatagcttcccttcttcccccgtacctctcaccaacggtgtcttcggtatgtgaaaacccaattcttcaaccctacaggatccaacaggcaatcgcagctggcatcttacctttatcacccttgttcctccaacaatcatcagccctattacagcagttacctttggtgcatttattggcacaaaacatcagggcacaacaactacaacaacttgtgctagcaaaccttgctgcctactctcagcaacagcagtttcttccattcaaccaactagctgcattgaactctgcttcttatttgcaacaacaacaact

SEQ ID NO: 321749 - DNA, 77 bp, Zea mays
cgtccggattcccgggagatttatctcgatcaatatattgattatttctaggacacacatctcagattcatgcctca

SEQ ID NO: 321750 - DNA, 193 bp, Zea mays
gcaacatttgttgccgttctacctgcacactgcgcctaacgttggcaccctcgtacaactgcaacaattgctgccattcgaccaacttgctttgacaaacccagcagtgttctaccaacaacccatcattggtggtgccctcttttagattgcttatgagttatagttcaataataaagttttttttgctgat

SEQ ID NO: 321751 - DNA, 426 bp, Zea mays
attctccctgctcatcggcggctactacgtagcactggggtaccatgagcttgaggccgggcacgagcacgtatccgtacaccgcgcttccgctgtctgctggcgacccgtacccttccactgtcactgctgccggacatggcgctgcgagcgtcgaaattacacaacggctacatgatggcactccgatgcacgtctaccagcaacgtgctcatgcctacgaggttcagcacgcagaacctgcgaccgttgaagcgcgtgatccttccagcctgaaagatcgatacttgggactggtaacaacacatgacactgagcctcacctccatggcgcatacctaccagcctgtgagacatctagctatcacgaacggtactgtattcgtgactatgggaacgattgcgtcgaacccaattgctacggat

SEQ ID NO: 321752 - DNA, 416 bp, Zea mays
gctgctcaccgtcccgctctgggcgcccgtagcggtactggcgctgctgacgggggccgcctcgctcgtcgcctgctgcgccggcctggccgcggtcgccgcgggcacgtgggcgcaccggtacttcacggggcgctactccgtcggcgcgcaccgggtgcagtccgccgatcagtacgcccgcgggggcacggtcgcggacgtggccagccgagtgagggggtactacgacgcctacgcgcgagagtacggcgggtacccgacgcgcccgcactctcgggtcaaggacgccgcgcccggggcgtaacgtagcttgtgtgtgctgagcggtctctccctctgtctctccctctctttgctccctcgtgctcacgtgctgtacatatgtttcgtcgatctagcagtcgtgtttcgct

SEQ ID NO: 321753 - DNA, 406 bp, Zea mays
gcaacatagaaagcacaatagtgtaccaacaatggcagccaaaatattttgcctcctgatgctgcttggtctttctgcaagtgctgctacggcgaccattttcccgcaatgctcgcaagctcctatagcttcccttcttcccccgtacctctcaccagcggtgtcttcggtatgtgaaaacccaattcttcaaccctacaggatccaacaggcaatcacagctggcatcttacctttatcacccttgttcctccaacaatcatcagccctattacatcagttacctttggtgcatttattggcacagaacatcagggcacaacaactacaacaacttgtgctagcaaaccttgctgcctactctcagcaacagcagtttctttcattcaaccaactagctgcattg

SEQ ID NO: 321754 - DNA, 447 bp, Zea mays
attgagaccaactagcaacatataaagcacaatagtgtaccaacaatggcagccaaaatattttgcttccttatgctccttggtctttctgcaagtgttgctaccgcaaccattttcccacaatgctcacaagctcctatagcttcccttcttcccccatacctctcaccagcggtgtcttcaatgtgtgaaaccccaattgttcaaccctacaggatccaacaggcaatcgcaacaggcatcttaccattatcacccttgttcctccaacaaccgtcagccctattacagcagttacctttggtccatttggtggcacaaaacatcagggcacaacaactacaacaacttgggctagcaaaccttgctgcatactctcagcaacatcaagttcttccattcaaccaactggctggcatggactcttgtgcttaattgcaaccacca

SEQ ID NO: 321755 - DNA, 389 bp, Zea mays
agcaacatagaaagcacaatagtgtaccaacaatggcagccaaaatattttgcctccttatgctccttggtctttctgcaagtgctgctacggcgaccattttcccgcaatgctcgcaagctcctatagcttcccttcttcccccgtacctctcaccagcggtgtcttcggtatgtgaaaacccaattcttcaaccctacaggatccaacaggcaatcgcagctggcatcttacctttatcacccttgttcctccaacaatcatcagccctattacaacagttacctttggtgcatttattggcacaaaacatcagggcacaacaactacaacaacttgtgctagcaaaccttgctgcctactctcagcaacagcagtttcttccattc

SEQ ID NO: 321756 - DNA, 342 bp, Zea mays
ccaactagcaacatagaaagcacaatagtgtaccaacaatggcagccaaaatattttgcgtccttatgctccttggtctttctgcaagtgctgctacggcgaccattttcccgcaatgctcgcaagctcctatagcttcccttctttccccgtacctctcaccagcggtgtcttcggcatgtgaaaacccaattcttcaaccctacaggatccaacaggcaatcgcagctggcatcttacctttatcacccttgcttctgcaacaatcatcagccctattacaacacgtacctttggtgcatttattggcacaaaacatcatggcacaacaactaccacaac

SEQ ID NO: 321757 - DNA, 421 bp, Zea mays
caactagcatcatagaaagcacaatagtgtaccaacaatggcagccaaaatattttgctgccttatgctccttggtctttctgcaagtgttgctaccgcaaccattttcccacaatgctcacaagctcctatagcttcccttcttcccccatacctctcaccagcggtgtcttcaatgtgtgaaaccccaattgttcaaccctacaggatccaacaggcaatcgcaacaggcatcttaccattatcacccttgttccttcaacaaccgtcagccctattacagcagttacctttggtccatttggtggcacaaaacatcagggcacaacaactacaacaacttgtgctagcaaaccttgctgcatactctcagcaacatcagtttcttccattcaaccaactggctgcattgaactctgct

SEQ ID NO: 321758 - DNA, 362 bp, Zea mays
tacacacgacagatattcaggcagatccacttgctgttgccgtcattctgatacaacctgacttgaggactctcaatgaagctgaaaggtgttgctgccttgcagaatgaagttttgagtccaatacatggaattcatatttggtggtgttgttttggaacttcaaaattttgaagccgtcagcattttccttgtttatctactagatgcctgcctgctctatttcttactcttcagtcttgactggtgcctactgtctgagtgcagattcagtgcgatagttacattctgctgatgtgctcacatgttcattgtaaacaaatttcttgctgagtaacttattaaacatgtgtgatatcttc

SEQ ID NO: 321759 - DNA, 451 bp, Zea mays
ccaactagcaacatagaaagcacaatagtgtaccaacaatggcagccaaaatattttgcgctccttatgctccttggtctttctgcaagtgctgctacggcgaccattttcccgcaatgctcgcaagctcctatagcttcccttcttcccccgtacctctcaccagcggtgtcttcggtatgtgaaaacccaattcttcaaccctacaggatccaacaggcaatcacagctggcatcttacctttatcacccttgttcctccaacaatcatcagccctattacatcagttacctttggtgcatttattggcacaaaacatcagggcacaacaactacaacaacttgtgctagcaaaccttgctgcctactctcagcaacagcagtttcttccattcaaccaactagctgcattgaactctgcttcttatttgcaacaacaacaacttccat

SEQ ID NO: 321760 - DNA, 358 bp, Zea mays
attagctttatctactccagagcgcagaagaacccgatcgacaccatgagggtgttgctcgttgccctcgctctcctggctctcgctgcgagcgccacctccacgcatacaagcggcggctgcggctgccagccaccgccgccggttcatctaccgccgccggtgcatctgccacctccggttcacctgccacctccggtgcatctcccaccgccggtccacctgccgccgccggtccacctgccaccgccggtccatgtgccgccgccggttcatctgccgccgccaccatgccactaccctactcaaccgccccggcctcagcctcatccccagccacacccatgcccgtgccaac

SEQ ID NO: 321761 - DNA, 101 bp, Zea mays
attggtggtgccctcttttagatttcttatgagttatagttcaataataaagttttttgtctgatgtttgtggcttcccagaaataagaaagtacatttct

SEQ ID NO: 321762 - DNA, 459 bp, Zea mays
  unsure (1)..(459): unsure at all n locations
tgctgatcgttgcccttgctctcctggcgctcgctgcgagcgccgcctccagtacaagcggcggctgtggctgccagacaccaccgtttcatctaccgcctccgttctatatgccgcctccgttctatctgccgccgcagcagcagccgcagccatggcaataccccactcaaccaccgcagctaagcccgtgccagcagttcggatcctgcggcgtcggcagcgtcggcagcccgttcctgggccagtgcgtcgagttcctgaggcaccagtgcagcccggcggcgacgccctacggctcgccacagtgccaggcgctgcagcagcagtgctgccaccagatcaggcaggtggagccgctgcaccggtaccaggcgacatacggtgtggtcctgcagtccttcctgcagcagcagccgcagggcgagctcgcggcgctgatggcggnccaagtagcgc

SEQ ID NO: 321763 - DNA, 325 bp, Zea mays
accattgaacagaagctattggacacgcaccatggactgtgtatttgtaacgggcctatgggagtgttagactttgacaagtttgcagctgtaactgatgcgactgccactaagctagctgtagcttacaaccatcgacggcgtcactatgatcatctacggggagtactttaggcatgctgatcgcaaggctgtgctggcggacaagttgtaccacatttgtgaccggacgagcgcgatgctcggaactgtacgaaggcatgactgtacatgaggtgataggactatatgacgcctagatccgctgctagctgctgctgatgat

SEQ ID NO: 321764 - DNA, 440 bp, Zea mays
aaaatattttgcctccttatgctccttggtctttctgcaagtgctgctacggggaccattttcccgcaatgctcgcaagctcctatagcttcccttcttcccccgtacctctcaccagcggtgtcttcggtatgtgaaaacccaattcttcaaccctacaggatccaacaggcaatcacagctggcatcttacctttatcacccttgttcctccaacaatcatcagccctattacatcagttacctttggtgcatttattggcacaaaacatcagggcacaacaactacaacaacttgtgctagcaaaccttgctgcctactctcagcaacagcagtttcttccattcaaccaactagctgcattgaactctgcttcttatttgcaacaacaacaactaccattcagccaggtacctgctgcctacccccagcaatttct

SEQ ID NO: 321765 - DNA, 442 bp, Zea mays
atatcttggtagccattggtgttagccctccttgcgcttcttgcccttttagtgagcgcaacaaatgcgttcattattccacagtgctcacttgctcctagtgccagtattccacagttcctcccaccagttacttcaatgggcttcgaacatccagccgtgcaagcctacaggctacaactagcgcttgcggcgagcgccttacaacaaccaattgcccaattgcaacaacaatccttggcacatctaaccctacaaaccattgcaacgcaacaacaacaacaacagtttctgccatcactgagccacctagccgtggtgaaccctgtcacctacttgcaacagcagctgcttgcatccaacccacttgctctggcgaacgtagctgcataccagcaacaacaacagctgcaacagtttatgccagtgctcagtcaactag

SEQ ID NO: 321766 - DNA, 362 bp, Zea mays
cttcaacatcaattatctaactccaaaatccatgaagctggtgcttgcggttctagcctggattgctttagtgtcaagtgtgccacggacacaaacaggccactgtgctcacaagctactacagattcatgagctccaacatacttcacaacaacagcgtccacagtatctgcaacctcaattattaacacatcatggatagcagctgcaacacgcaactgcgacagtatctatagcaccactgatacttcaacaataaccagaagtacatgtgcaactacctctgcgacatccattgcaccacaaccatcaacgctcaccacctacaacacctcgtcctagctgtgcttgctgactactct

SEQ ID NO: 321767 - DNA, 468 bp, Zea mays
tcggaattcccgggcagaaacacaccaagcgaagcgcactagcaacaacctaacaacaatggctaccaagatattatccctccttgcgcgtcttgcgctttttgcgagcgcaacaaatgcgtccattattccacaatgctcacttgctcctagttccattattccacagttcctcccaccagttacttcaatggccttcgaacacccagctgtgcaagcctataggctacaacaagcgattgcggcgagcgtcttacaacaaccaattgcccaattgcaacaacaatccttggcacatctaacaatacaaaccatcgcaacgcaacagcaacaacagttcctaccagcactgagccacctagccatggtgaaccctgtcgcctacttgcaacagcagctgcttgcatccaacccacttgctctagcaaacgtagttgcaaaccagcaacatcaacaactgcaacagtt

SEQ ID NO: 321768 - DNA, 453 bp, Zea mays
cacgcggccgacagtgctcacttgctcctagtgccattattccacagttcctcccaccagttacttcaatgggcttcgaacacctagctgtgcaagccaacatgcaacaacaagcgcttgtggcgagcgtcttacaacaaccaattgcccaattgcaacaacaatccttgccacatctaacaatacaagccatcacaacgcaacagcaacaacagttcctaccagcactgatccacctatccatggtgaaccctgccgcctacttgcaagagcagctgcttgcatccaacccacttgctctggcgaacgtagttgcaaaccagcaacaacaacagctacaacagtttctgccaacgctcagtcaactagccatggtgaaccctgccgtctacgtacaacatcatcaactgctttcatctagcccgctcgctgtgggcaatgcacctacatacc

SEQ ID NO: 321769 - DNA, 355 bp, Zea mays
catagaaagcacaatagtgtaccaacaatggcagctaaaatattttgcctccttatgctgcttggtctttctgcaagtgctgctacggcgaccattttaccacaatgctcacaagctcctatagctacccttattcccccgtacctatcaccaacggtgtcttcagtatgtgaaaacccaattcttaaaccctacaggatccaacaggcaatcgcagctggcatcttacctttatcacccttgttcctccaacaatcatcagccctattacagcagttacctttggtgcatttattggcacaaaacatcagggcacatcaactacaacaacttgggctagcaaaccttgctgcct

SEQ ID NO: 321770 - DNA, 424 bp, Zea mays
attttgagcattcagaaacacaccaagcgaagcacattagcaacaacctaacaacaatgggtaccaagatattatccctccttgcgcttcttgcgctttttgcgagcgcaacaaatgcgttcattattccacaatgctcacttgctccaagttccattattacacagttcctcccaccagttacttcaatgggcttcgaacacccagctgtgcaagcctataggctacaacaagcaattgcggcgagcgtcttacaacaaccaatttcccagttgcaacaacaatccttggcacatctaacaatacaaaccatcgcaacgcaacagcaacaacaattcctaccagcactgagccacctagccatggtgaaccctgccgcctacttgcaacagcagttgcttgcatcatacccacttgctctggc

SEQ ID NO: 321771 - DNA, 364 bp, Zea mays
  unsure (1)..(364): unsure at all n locations
cccacgcgtccgcagaaacacaccaagcgaagcacattagcaacaacctaacagcaatggctaccaagatattatccctccttgcgcttcttgcgctntttgcgagcgcaacaaatgcgttcattattccacaatgctcacttgctccaaggtccattattacacagttccttccaccagttacttcaatgggcttcgaacacccagctgtgcaagcctataggctacaacaagcaattgcggcgagcgtcttacaacaaccaatttcccagttgcaacaacaatccttggcacatctaacaatacaaaccatcgcaacgcaacagcaacaacaattcctaccagcactgagccacctatccat

SEQ ID NO: 321772 - DNA, 294 bp, Zea mays
aacaactactaccattcagccagctagctggtgtgagccctgctaccttcttgatacagccacagttgttgccgttctaccagcacgctgcgcctaacgctggcaccctcttacaactgcaacaattgctgccattcaaccaacttgctttgacaaacccagcagcgttctaccaacaacccatcattggtggtgccctcttttagatttcttatgagttatagttcaataataaagttttttgtctgatgtttgtggcttcccagaaataagaaagtacatttctagattctt

SEQ ID NO: 321773 - DNA, 446 bp, Zea mays
attcagaaacacaccaagcgaagctcactagcaacgacctaacaacaatggctaccaagatattagccctccttgcgcttcttgccctttttgtgagcgcaacaaatgcgttcattattccacaatgctcacttgctcctagtgccattattccacagttcctcccaccagttacttcaatgggcttcgaacacctagctgtgcaagcctacatgctacaacaagcgcttgcggcgagcgtcttacaacaaccaattgaccaattgcaacaacaatccttggcacatctaaccatacaaaccatcgcaacgcaacagcaacaacagttcctaccagcactgagccaactagctgtggtgaaccctatcgcctacttgcaatagcagatgcttgcatccaacccacttgctctggcaaatgtagctacataccaacaacaacaattg

SEQ ID NO: 321774 - DNA, 437 bp, Zea mays
cccacgcgtccggtgattttcctcttttcttttgcaagttgattgcttcgtcgggcaggaattctgcgttcctcaagtaagcacagcacgattcgtgtaagcggatttttttttcctatcgatttcttgagcgcggtaattagttgttacgattagctagctccagctgtcgctgccttgctaggagcggaattctttcgttcttcctctagggctattcgcagttcgcgagggtttcttgatatgggtacagataagctttattttgtcagtttagttgagtagttagcctgtgagcgccgaccagtatgtaatcgttgtcctcctgactgatatccctctgttcttgttggaaggcgcaggttcatatacgagtttaatatacgttggtaggaaatttcgattacatcacatttaaatattcattgatggattga

SEQ ID NO: 321775 - DNA, 445 bp, Zea mays
gaccaactagcatcatagaaagcacaatagtgtaccaacaatggcagccaaaatattttgcctccttatgctccttggtctttctgcaagtgctgctacggcgaccattttcccacaatgctcacaagctcctatagcttcccttcttcccccgtacctctcaccagcggtgtcttcggtatgtgaaaacccaattcttcaaccctataggatccaacaggcaatcgcagctggcatcttacctttatcacccttgttcctccaacaatcatcagccctattacagcagttacctttggtgcatttattggcacaaaacatcagggcacaacaactacaacaacttgtgctagcaaaccttgctgcctactctcagcaacaacagtttcttccattcaaccaactagctgcattgaactctgcttcttatttgcaacaacaacaa

SEQ ID NO: 321776 - DNA, 434 bp, Zea mays
gaaagcacaatagtgtaccaacaatggcagccaaaatattttgcctccttatgctccttggtctttctgcaagtgctgctacggcgaccattttcccgcaatgctcgcaagctcctatagcttcccttcttcccccgtacctctcaccagcggtgtcttcggtatgtgaaaacccaattcttcaaccctacaggatccaacaggcaatcacagctggcatcttacctttatcacccttgttcctccaacaatcatcagccctattacatcagttacctttggtgcatttattggcacaaaacatcagggcacaacaactacaacaacttgtgctagcaaaccttgctgcctactctcagcaacagcagtttcttccattcaaccaactagctgcattgaactctgcttcttatttgcaacaacaacaactacca

SEQ ID NO: 321777 - DNA, 443 bp, Zea mays
attgagaccaactagcaacatagaaagcacaatagtgtaccaacaatggcagccaaaatattttgcttccttatgctccttggtctttctgcaagtgttgctaccgcaaccattttcccacaatgctcacaagctcctatagcttcccttcttcccccatacctctcaccagcggtgtcttcaatgtgtgaaaccccaattgttcaaccctacaggatccaacaggcaatcgcaacaggcatcttaccattatcacccttgttcctccaacaaccgtcagccctattacagcagttacctttggtccatttggtggcacaaaacatcagggcacaacatctacaacaacttgtgctagcaaaccttgctgcatactctcagcaacatcagtttcttccattcaaccaactggctgcattgaactctgctgcttatttgcaaca

SEQ ID NO: 321778 - DNA, 432 bp, Zea mays
gcaacatagaaagtggaatacagtagcaacaatagagcaacaatggcggccaagatatggtccatccttatgctccttgctctttctgcatgtgttgctaacgcgaccatttttcctcaatactcacaagctcctatagctgcccttcttcccccataccttccatcaatgaccgcttcagtttgtgaaaacccagcccttcaaccctacaggctccaacaagcaatcgcaacaagcaacttacctttatcacccctgttctttcaacaatcgccagccctatctttggtgcagtcattggtacaaaccatcatggcacaacagctgcaacaactcgtgctaccagtgatcagccaagtagctctggcaaacctttctccctactctcagcaacaacaatttcttccattcaaccaactgtctacactgaac

SEQ ID NO: 321779 - DNA, 429 bp, Zea mays
cccacgcgtccgcaacaagcaacatagaaagtggaatacagtagcaacaatagagcaacggtggcggccaagatattttccatccttatgctccttgctctttctgcatgtgttgctaacgcgaccatttttcctcaatactcacaagctcctatagctgcccttcttcccccataccttccatcaatgaccgcttcagtttgtgaaaacccagcccttcaaccctacaggctccaacaagcaatcgcaacaagcaacttacctttatcacccctgttctttcaacaatcgccagccctatctttggtgcagtcattggtacaaaccatcagggcacaacagctgcaacaactcgtgctaccagtgatcagccaagtagctctggcaaacctttctccctactctcagcaacaacaatttcttccattc

SEQ ID NO: 321780 - DNA, 362 bp, Zea mays
aacacacaaacaaaacaagcaacataacataaaaaaaacaaaaaacaacaacagggtttcgggccaaactcaagctaccagccctagcttacgctaccagctaactctgcagctctccctctctcatccctaactcctttatactggccctctcatactcaatgaccttcctgcgacatcccctccattactgacctctaccgtctgccacaacctaccccttctgccatccaggctacttccctcacttccatcacgcatcgaacttccatattccctggccttccatctgtcgactgcaccacaccctgcactgccataccaacagtccatcaacgtgcagcatctggcgctcctccctc

SEQ ID NO: 321781 - DNA, 445 bp, Zea mays
attgagaccaactagcaacatagaaagcacaatagtgtaccaacaatggcagccaaaagagttttggttccttatgctccttggtctttctgcaagtgttgctaccgcaaccattttcccacaatgctcacaagctcctatagcttcccttcttcccccatacctctcaccagcggtgtcttcaatgtgtgaaaccccaattgttcaaccctacaggatccaacaggcaatcgcaacaggcatcttaccattatcacccttgttcctccaacaaccgtcagccctattacagcagttacctttggtccatttggtggcacaaaacatcagggcacaacaactacaacaacttgtgctagcaaaccttgctgcatactctcagcaacatcagtttcttccattcaaccaactggctgcattgaactctgctgcttatttgcaacaa

SEQ ID NO: 321782 - DNA, 418 bp, Zea mays
cagaaacacaccaagcgaagcgcactagcaacaacctaacaacaatggctaccaagataggatcccgccttgcgcttcttgcgctttttgcgagcgcaacaaatgcgtccattattccacaatgctcacttgctcctagttccattattccacagttcctcccaccagttacttcaatggccttcgaacacccagctgtgcaagcctataggctacaacaagcgattgcggcgagcgtcttacaacaaccaattgcccaattgcaacaacaatccttggcacatctaacaatacaaaccatcgcaacgcaacagcaacaacagttcctaccagcactgagccacctagccatggtgaaccctgtcgcctacttgcaacagcagctgcttgcatgcaacccacttgctctagcaaacgt

SEQ ID NO: 321783 - DNA, 425 bp, Zea mays
gtgaaaacccagctcttcagccctataggctccaacaagcaatcgcagcaagcggcatagctttatcacccttgttgtttcaacaatcgccagccctatctttggtgcagtcattggtacaaaccatcagggcacagcatctgcagcaactcgtgctacctgtgatcaaccaagtagctctggcaaacctttctccctactctcagcaacaacaatttcttccattcaaccaactgtctacactgaaccctgctgcttatttgcagcaacaactattaccattcagccagctagctactgcctactctcagcaacaacaacttcttacatttaaccaattggccgcactgaaccccgctgcttatttgcagcagcaaatactactaccatttagccagctagctgcagcaaaccgtgcttccttc

SEQ ID NO: 321784 - DNA, 447 bp, Zea mays
attgagaccaactagcatcatagaaagcacaatagtgtaccaacaatggcagccaaaagattttggttccttatgctccttggtctttctgcaagtgttgctaccgcaaccattttcccacaatgctcacaagctcctatagcttcccttcttcccccatacctctcaccagcggtgtcttcaatgtgtgaaaccccaattgttcaaccctacaggatccaacaggcaatcgcaacaggcatcttaccattatcacccttgttcctccaacaaccgtcagccctattacagcagttacctttggtccatttggtggcacaaaacatcagggcacaacaactacaacaacttgtgctagcaaaccttgctgcatactctcagcaacatcagtttcttccattcaaccaactggctgcattgaactctgctgcttatttgcaacaacaa

SEQ ID NO: 321785 - DNA, 447 bp, Zea mays
catgaatcatcattcatcttagtagtatatgcaccaaatcaaatctgcaacatcaattagctaactgcaaaaaccatgaagctggtgcttgtggttcttgctttcattgctttagtatcaagtgtttcttgtacacagacaggcggctgcagctgtggtcaacaacaaagccatgagcagcaacatcatccacaacaacatcatccacaaaaacaacaacatcaaccaccaccacaacatcaccagcagcagcaacaccaacaacatcaagttcacatgcaaccacaaaaacatcagcaacaacaagaagttcatgttcaacaacatcaacaacaaccgcagcaccaccaccaacaacaacaacaacagcaccaacaacaacatcaatgtgaaggccaacatcaacatcaccaacaatcacaaggccatgtgcaacatcacgaacag

SEQ ID NO: 321786 - DNA, 437 bp, Zea mays
gaccaactagcaacatagaaagcacaatattgtaccaacaatggcagccaaaatatttggcttccttatgctccttggtctttctgcaagtgctgctaccgcaaccattttcccacaatgctcacaagctcctatagctctctttcttcccccatacctctcaccagcggagtcttcagtatgtgaaaacccaattcttcaaccctacaggatccaacaggcaatcgcagcacgcatcttacctttatcacccttgttcctccaacaaccgtcagccctattacagcagttacctttggtgcatttgttggcacacaacatcaaggctcaacaactacaacaacttgtgctacgaaaccttgctgcctactctcagcaacagcagattcttccattcaaccaactggctgcattgaactctgctgcttatttgcaac

SEQ ID NO: 321787 - DNA, 294 bp, Zea mays
atacacgctgcagttactcaactgaaatgaggatagtatcgcagctttcgtgaataaaacctgaatcacccacaagaatgttctaagtactcagccagtggtatttactggttgacctactgtagtttgcgtcggaatagatatgtttttttactcttcgtggggcagttttgtactggtggattcataaggactctgattatggtgcgttcggaacttataataataagcacatgaaattttgcttcaaaaaaaaactatatcaccctcaatactacaacaacagtcagccac

SEQ ID NO: 321788 - DNA, 442 bp, Zea mays
attgagaccaactagcaacatagaaagcacaatagtgtaccaacaatggcagccaaaatgttttgcttccttatgctccttggtctttctgcaagtgctgctaccgcaaccattttcccacaatgctcacaagctcctatagcttcctttcttcccccatacctctcaccagcggtgtcttcagtatgtgaaaacccaattcttcaaccctacaggatccaacaggcaatcgcagcaggcatcttacctttatcacccttgttcctacaacaaccgtcagccctattacagcagttacctttggtgcatttgttggcacaaaacatcaaagcacaacaactacaacaacttgtgctaggaaaccttgctgcctactctcagcaacagcagtttcttccattcaaccaactggctgcattgaactctgctgcttatttgcaac

SEQ ID NO: 321789 - DNA, 445 bp, Zea mays
caaaaacacaccaagcgaagcgcactagcaacgacctaacaccaatggctaccaagatagtgagccctccttgcgcttcttgcccttttagtgagcgcaacaaatgcgttcattattccacagtgctcacttgctcctagtgccattattccacagttcctcccaccagttacttcaatgggcttcgaacatccagccgtgcaagcctacaggctacaactagcgcttgcggcgagcgccttacaacaaccaattgcccaattgcaacaacaatccttggcacatctaaccctacaaaccattgcaacgcaacaacaacaacaacaacagtttctgccatcactgagccacctagccgtggtgaaccctgtcacctacttgcaacagcagctgcttgcatccaacccacttgctctggcgaacgtagctgcataccagcaacaac

SEQ ID NO: 321790 - DNA, 436 bp, Zea mays
caatagtgtaccaacaatggcagataaaatattacgcctccttatgcgccttgggctttatgcaagtgctgctacggggaccattttcccacaatgctcacaagctcctatagcttgccttcttcccccgtacctctcaccaacggtgtcttgggtatgtgaaaacccaattctgcaaccctacaggatccaacaggcaatcgcagatggcatactacctttatcacccttgttcctgcaacaatcatgatgcctattacagcaattacctttggtgcatttattggcacataacatcagggcacatcagctacatcaacttgtgctagcaaaccttgctgcctactctcagcaacagcaagctcttccattcaaccaactagctgcattgaactctgctgcttatttgcaacaacagcaactaccattcagtcag

SEQ ID NO: 321791 - DNA, 406 bp, Zea mays
aacatagaaagtggaatccagtagcaacaatagagcaacaatggcgaccaagagactttgcctccttatgctccttgctctttctgcatgtgttgctaacgcgacaattttccctcaatgctcacaagctcctatagcttcccttcttcccccataccttccatcaatgatagcttcagtatgtgaaaacccagctcttcaaccctataggctccaacaagcaatcgcagcaagcaacatacctttatcaccctagtttcaacaatcgccagccctatctttggtgcagtcattggtacaaaccatcaaggcacagcagctgcagcaactcgtgctacctgtgatcaaccaagtagctctggcaaacctttctccttactatcagcaacaacaatttcttccattc

SEQ ID NO: 321792 - DNA, 454 bp, Zea mays
attttgagcattcagaaacacaccaagcgaagctacctagcaacgacttaacaacaatggctaccaagatattaggcctccttgcgcttcttgccctttttgtgagcgcaacaaatgcgttcattattccacaatgctcacttgctcctagtgccattataccacagttcctccgaccagttacttcaatgggcttcgaacacctagctgtgcaagcctacaggctacaacaagcgcttgcggcgagcgtcttacaacaaccaattaaccaattgcaacaacaatccttggcacatctaaccatacaaaccatcgcaacacaacagcaacaacagttcctaccagcactgagccaactagatgtggtgaaccctgtcgcctacttgcaacagcaggtgcttgcattcaacccacttgctctggcaaacgtagctgcataccaacaacaacaaca

SEQ ID NO: 321793 - DNA, 435 bp, Zea mays
gaccaacaagcaacatagaaagtggaatccagtagcaacaatagagcaacaatggcgaccaagatattttccctccttatgctccttgctctttctacatgtgttgctaacgcgacaattttccctcaatgctcacaagctcctatagcttcccttcttcccccataccttccatcaattatagcttcaatatgtgaaaacccagctcttcaaccatataggcttcaacaagcaatcgcagcaagcaacatacctttatcgcccttgttgtttcaacaatcgccagccctatctttggtgcagtcattggtacaaaccatcagggcacaacagctgcagcaactcgtgctacctctgatcaaccaagtagctctggcaaacctttcttcctactctcagcaacaacaatttcttccattcaaccaactgtctaca

SEQ ID NO: 321794 - DNA, 448 bp, Zea mays
cccacgcgtccgcttcccttcttcccccatacctctcaccagcggtgtcttcaatgtgtgaaaccgcaattgttcaaccctacaggatccaacaggcaatcgcaacaggcatcttaccattatcacccttgttcctccaacaaccgtcagccctattacagcagttacctttggtccatttggtggcacaaaacatcagggcacaacaactacaacaacttgtgctagcaaaccttgctgcatactctcagcaacatcagtttcttccattcaaccaactggctgcattgaactctgctgcttatttgcaacaacaattaccattcagccagctagttgctgcctacccccagcaatttcttccattcaaccaactagcagcattgaactctgctgcttatttacagcagcaacaactactaccattcagccagctagctgatgtgag

SEQ ID NO: 321795 - DNA, 444 bp, Zea mays
gttggcttctcctccccctccggttcgggttcgggttcgtgaggttctccggggttcgggttcgtgggtgagcggatcgagatggcggcgtcggatgttgagtaccgctgcttcgtcggcggcctcgcctgggccacggacgaccactccctccacaacgccttcagcacctacggcgaggtcctcgagtccaagatcatcctcgatcgtgagacgcagaggtcccgcggcttcggcttcgtcaccttctccacggaggaggcgatgcggaacgccatcgagggcatgaacggcaaggagctggacggccgcaacatcaccgtcaacgaggcccagtcccgcggcggccgtggaggcggcggctgctgcgggtacggtggtggccgtggaggcggcggctacggcggtggcgggcgccgtgatggcggcggcggctactgcggt

SEQ ID NO: 321796 - DNA, 444 bp, Zea mays
  unsure (1)..(444): unsure at all n locations
gccacctccggttcacctgccacctccggtgcatctcccaccgccggtccacctgccggcgccggtccacctgccaccgccggtccatgtgccgccgccggttcatctgccgccgccaccatgccactaccctactcaaccgccccggcctcagcctcatccccagccacacccatgcccgtgccaacagccgcatccaagcccgtgccagctgcagggaacctgcggcgttggcagcaccccgatcctgggccagtgcgtcgagttcctgaggcatcagtgcagcccgacggcgacgccctactgctcgcctcagtgccagtcgttgcggcagcagtgttgccagcagctcaggcaggtggagccgcagcaccggtaccaggcgatcttcggcttggtcctncagtccatcctgcagcagcagccgcaaagcggccaggtcgc

SEQ ID NO: 321797 - DNA, 437 bp, Zea mays
gacgctacctaacatctacttatctactttgcctaccaagctactaaccctgggttcgcgtgttgccctttctgtgtgcgcgacctatgcgtatgtgattccacaatgatcactcgctcttactgatatcacacttcaatccctcctacctgttacttcaacggtcttcgaccacttacatgtgcatgcgtaaaccctacagcatccgctagcgcctagcagtctgacatcttccaattacccatttccaacatcaatcactgacacatgcaaatataaacattatcaccacagcacagcaacagcaacaactactagtaccaacactgctacatctagatgtccttaacccttacttctacctgcaacagcatgcgcttagattaatcgcacttgctatggcaaacgtaactgcattaccaacaacaactgcaatt

SEQ ID NO: 321798 - DNA, 441 bp, Zea mays
cccacgcgtccgcatagaaagcacaatagtgtaccaacaatggcagccaaaatattttggctccttatgctccttggtctttctgcaagtgctgctacggcgaccattttcccgcaatgctcgcaagctcctatagcttcccttcttcccccgtacctctcaccagcggtgtcttcggtatgtgaaaacccaattcttcaaccctacaggatccaacaggcaatcacagctggcatcttacctttatcacccttgttcctccaacaatcatcagccctattacatcagttacctttggtgcatttattggcacaaaacatcagggcacaacaactacaacaacttgtgctagcaaaccttgctgcctactctcagcaacagcagtttcttccattcaaccaactagctgcattgaactctgcttcttatttgcaacaacac

SEQ ID NO: 321799 - DNA, 361 bp, Zea mays
cgagttcctgagggggttcaaggccattcaatgcaagctggtactaaatctcagcgacaggaccctcgatgcggtgataagagtcaaactaggaaaagctcttctaatccttcttattctaaggcacccattgcacgggtccctgatccctatctacttgattgctctttgaacaatggttatgctggctccaataagaaaaaagccgaaaagagcaggttccgaccatttgccatggaaaccccatcactctgaggactcaaatgagaagaaaaaaactcagaatgcatcaaaccaacattctgtcaaaacggatattgacgaagaatcacatgaacgtgtgcaacctcaaagggttggc

SEQ ID NO: 321800 - DNA, 425 bp, Zea mays
gcaacatataaagcacaatagtgtaccaacaatggcagccaaaatattttgcctccttatgctccttggtctttctgcaagtgctgctacggcgaccattttcccgcaatgctcgcaagctcctatagcttcccttcttcccccgtacctctcaccagcggtgtcttcagtatgtgaaaacccaattcttcaaccctacaggatccaacaggcaatcgcagctggcatcttacctttatcacccttgttcctccaacaatcatcagccctattacaacagttacctttggtgcatttattggcacaaaacatcagggcacatcaactacaacaacttgtgctagcaaaccttgctgcctactctcagcaacagcagtttcttccattcaaccaactaggttcattgaactctgcttcttatttgc

SEQ ID NO: 321801 - DNA, 402 bp, Zea mays
cccacgcgtccgatccagatcagcaaagcggcagtgcgtagagaggatcgtccaacagagcagcgtgaagatggccatcgttctcgtcgtgtgcctggctctgtcagctgccagcgcctctgcaatgcagatgccctgcccctgcgcggggctgcagggcttgtacggcgctggcgccggcctgacgacgatgatgggcgccggcgggctgtacccctacgcggagtacctgaggcagccgcagtgcagcccgctggcggcggcgccctactacgccgggtgtgggcagacgagcgccatgtaccagccgctccggcaacagtgctgccagcagcagatgaagatgatggacgtgcagtccgtcgcgcagcagctgcagatgatgatgcagcttgagcgtgc

SEQ ID NO: 321802 - DNA, 432 bp, Zea mays
tgctgatcgttgcccttgctctcctggctctcgctgcgagcgccgcctccagggcaaggggcggctgtggctgccagacaccaccgtttcatctaccgcctccgttctatatgccgcctccgttctatctgccgccgcagcagcagccgcagccatggcaataccccactcaaccaccgcagctaagcccgtgccagcagttcggatcctgcggcgtcggcagcgtcggcagcccgttcctgggccagtgcgtcgagttcctgaggcaccagtgcagcccggcggcgactccctacggctcgccacagtgccaggcgctgcagcagcagtgctgccaccagatcaggcaggtggagccgctgcaccggtaccaggcgacatacggcgtggtcctgcagtccttcctgcaacagcaaccgcaaggcgagctcg

SEQ ID NO: 321803 - DNA, 442 bp, Zea mays
ggacgtcagcctagcaattagctcatcgactccagattggagaactcgacaccatgaaggtgctgatcgttgcccttgctctcctggcgctcgctgcgagcgccgcctccagtacaagcggcggctgtggctgccagacaccaccgtttcatctaccgcctccgttctatatgccgcctccgttctatctgccgccgcagcagcagccgcagccatggcaataccccactcaaccaccgcagctaagcccgtgccagcagttcggatcctgcggcgtcggcagcgtcggcagcccgttcctgggccagtgcgtcgagttcctgaagcaccagtgcagcccggcggcgacgccctacggctcgccacagtgccaggcgctgcagcagcagtgctgccaccagatcaggcaggtggagccgctgcaccggtaccaggcgacata

SEQ ID NO: 321804 - DNA, 443 bp, Zea mays
gcaacatagaaagcacaatagtgtaccaacaatggcagctaaaatattttgcctccttatgctccttggtctttctgcaagtgctgctaccgcgaccattttcccacaatgctcacaagctcctatagcttcccttcttcccccgtacctctcaccaacggtgtcttcggtatgtgaaaacccaattcttcaaccctacaggatccaacaggcaatcgcagctggcatcttacctttatcacccttgttccttcaacaatcatcagccctattacagcagttacctttggtgcatttattggcacaaaacatcagggcacaacaactacaacaacttgtgctagcaaaccttgctgcctactctcagcaacagcagtttcttccattcaaccaactagctgcattgaactctgcttcttatttgcaacaacaacaactaccat

SEQ ID NO: 321805 - DNA, 440 bp, Zea mays
gagaccagcaagcaacatagaaagtagaatccattagcaacaatagagcaacaatggcgagcaagatattttccctccttatgctccttgctctttctacatgtgttgctaacgcgacaattttccctcaatgctcacaagctcctatagcttcccttcttcccccataccttccatcaattatagcttcagtatgtgaaaacccagctcttcaaccatataggcttcaacaagcaatcgcagcaagcaacatacctttatcgcccttgttgtttcaacaatcaccagccctatctttggtgcagtcattggtacaaaccatcaaggcacaacagctgcagcaactcgtgctacctgtgatcaaccaagtagctctggcaaacctttctccctactctcagcatcaacaatttcttccattcaaccaactgtctacactg

SEQ ID NO: 321806 - DNA, 452 bp, Zea mays
cagaaacacaccaagcgaagcgcactatcaacgacctaacaacaatggctaccaagatattagccgtccttgcgcttcttgccctttttgtgagcgcaacaaatgcgttcattattccacaatgctcacttgctcctagtgccattattccacagttcctcccaccagttacttcaatgggcttcgaacacctagctgtgcaagccaacatgcaacaacaagcgcttgcggcgagcgtcttacaacaaccaattgcccaattgcaacaacaatccttgccacatctaacaatacaagccatcacaacgcaacagcaacaacagttcctaccagcactgagccacctagccatggtgaaccctgccgcctacttgcaagagcagctgcttgcatacaacccacttgctctggcgaacgtagttgcaaaccagcatcaactacagctacaacag

SEQ ID NO: 321807 - DNA, 237 bp, Zea mays
ctcatcctaacctagtcactgtggacagtgaacatacagacctacatctacaagtgtaggtacagacagtacctgctatgagttacctagtctagcgctactgttctgcgtaatcttaatcgctgcctgcattaaacagcctgactatgccgaactctactacatgactgcagcagtgacagaatgtaactgatgcagtagctacggctaacacattggtcgctgccgttgtacata

SEQ ID NO: 321808 - DNA, 456 bp, Zea mays
tcagcattcaaaaacacaccaagcgaagcgcactagcaacgacctaacaccaatggctaccaagatattagccctccttgcgcttcttgcccttttagtgagcgcaacaaatgcgttcattattccacagtgctcacttgctcctagtgccattattccacagttcctcccaccagttacttcaatgggcttcgaacatccagccgtgcaagcctacaggctacaactagcgcttgcggcgagcgccttacaacaaccaattgcccaattgcaacaacaatccttggcacatctaaccctacaaaccattgcaacgcaacaacaacaacaacaacagtttctgccatcactgagccacctagccgtggtgaaccctgtcacctacttgcaacagcagctgcttgcatccaacccacttgctctggcgaacgtagctgcataccagcaacaacaaca

SEQ ID NO: 321809 - DNA, 309 bp, Zea mays
tcgcgttctaccagcacggcaacaattgtggccattgaaccaacttgctatgacataccctacataatgctggccacaaccgattattgtgggtcactgcttacacattactgattacatattcacatatacttgagcaccctgtctgatgattataactatgccattataagatagtacacttctagatagattgacttccttaatgtgcgctacatataacatacacaggatgtgctacacgtacatgcaatgctgtcaaaattgtacgatctaagctagactatgatacttgccaaaattgataat

SEQ ID NO: 321810 - DNA, 402 bp, Zea mays
agaaagtggaatccagtagcaacaatagagcatcaatggcgaccaagatactttccctccttatgctccttgctctttctgcatgtgttgctaacgcgacaattttccctcaatgctcacaagctcctatagcttcccttcttcccccataccttccatcaatgatagcttcagtatgtgaaaacccagctcttcaaccctataggctccaacaagcaatcgcagcaagcaacatacctttatcacccttgtttcaacaatcgccagccctatctttggtgcagtcattggtacaaaccatcaaggcacagcagctgcagcaactcgtgctacctgtgatcaaccaagtagctctggcaaacctttctccctactatcagcaacaacaatttcttccattca

SEQ ID NO: 321811 - DNA, 325 bp, Zea mays
ctactccagagcgcagaagaacccgatcgacaccatgagggtgttgctcgttgccctcgctctcctggctctcgctgcgagcgccacctccacgcatacaagcggcggctgcggctgccagccaccgacggcggatcatctaccgacgccggtgcatctgccaccttcggttcacctgccacctccggtgcatctcccaccgccggtccacctgccgacgccggtccacctgccagcgccggtccatgtgccgccgccggttcatctgccgccgccaccatgccactaccctactaaaccgccccggactaagcctaatccccag

SEQ ID NO: 321812 - DNA, 465 bp, Zea mays
gacccacgcgtccgcaactagcaacatagaaagcacaatagtgtaccaacaatggcagccaaaatatttcgcttcctgatgctgcttggtcttactgcaagtgctgctaccgcaaccattttcccacaatgctcacaagctcctatagcttacttacttcccccatacctctcaccagcggtgtcttcagtatgtgaaaacccaattcttcaaccctacaggatccaacaggcaatcgcagcaggcatcttacctttatcacccttgttgcgcaacaaccgtcagccctattacagcagttacctttggtgcatttgttggcacaaaacattcaggcacaacaactacaacaacttgtgctaagaaaccctgcttgctactctcagcaacagcagtttcttccattcaaccaactggctgcatcgaactctgctgcttatttgcaacatcaactaccattcagtc

SEQ ID NO: 321813 - DNA, 332 bp, Zea mays
agcggatcgagatggcggcgtcggatgttgagtaccgctgcttcgtcggcggcctcgcctgggcgcacggacgaccactccctccacaacgccttcagcacctacggcgaggtcctcgagtccaagatcatcctcgatcgggagacgcagaggtcccgcggcttcggcttcgtcaccttctccacggaggaggcgatgcggaacgccatcgagggcatgaacggcaaggagctggacggccgcaacatcaccgtcaacgaggcccagtcccgcggcggccgtggaggcggctgcggcggcgggtacggtggtggccgtggaggcggcggcta

SEQ ID NO: 321814 - DNA, 359 bp, Zea mays
ccgagccctgcgctacacgcccgcgccgcctactcccgagcgtcgtctcctcccgagccccgcgatacacgcccgcgccgtcttctcccgagcgtagtaagcccgcctgcgtcgagcgccggccgagcgcctgcctgcgtctagcgcctgcctgcggtggacggatgagctgtacccgcgatatgatagactgtacgtgcagtaatggtatacggagaggagaccatgagagactggagactacagagaatgtggtggactgctaggtttttgtttattggaaaaatcagaaccctaatgggtacagacacaagacagtgtaatatggggactcgatcaacttggggttcgtaaaggat

SEQ ID NO: 321815 - DNA, 417 bp, Zea mays
  unsure (1)..(417): unsure at all n locations
ggtcttcagaccattagctttatctactccagagcgcagaagaacccgatcgacaccatgagggtgttgctcgttgccctcgctctcctggctctcgctgcgagcgccacctccacgcatacaagcggcggctgcggctgccagccaccgccgccggttcatctaccgccgccggtgcatctgccacctccggttcacctgccacctccggtgcatctcccaccgccggtccacctgccgncgccggtccacctgccaccgccggtccatgtgccagccgccgttcatctgccgccgccaccatgccactaccctactcaaaccgcccggcctcagcctcatccccagccacacccatgcccgtgccaacagccgcatncaagcccgtgccagctgcagggaacctgcggcgttggc

SEQ ID NO: 321816 - DNA, 302 bp, Zea mays
gcttatttacagcagcaacaactactaccattcagccagctagctggtgtgagccctgctaccttcttgacacatccacagttgttgccgttctaccagcacgttgcgcctaacgctggcaccctcttacaactgcaacaattgctgccattcaaccaacttgctttgacaaacccagcagtgttctaccaacaacccatcattggtggtgccctcttttagatttcttatgagttatagttcaataataaagttttttatctgatgtttgtggcttcccagaaataagaaagtacatttct

SEQ ID NO: 321817 - DNA, 313 bp, Zea mays
acgcgttctttccgatcttccacttagcgtatctttgtccgccgtaacaccttcggtatcaatatcgtgtcagactgtcacacccctgacctctctcctatcgcaataaatgtgttcattatacaacaaatccctctaaaaacaactgcgattataactcacggaagatgacgatacaattgatgcagcctaggatacacattctttcatcgctacgacgaaccataaggtagcgatgcccgatgccatatcctctacgtaggctaatggaactaacaatcttcaccgatagtaaaccttctaatactacatc

SEQ ID NO: 321818 - DNA, 162 bp, Zea mays
ctgcagcgcagcaaacaacacgaaccatgctacaactaatttaaagtactttattgatcaccggggatgggaaactcgccgagaatactggaccttaggctactagacctcctgttctctttcaaacgcccggccgactaacacaactacttcttgcagcca

SEQ ID NO: 321819 - DNA, 457 bp, Zea mays
cggacgcgtgggtgagaccaactagcaacatagaaagcacaatagtgtaccaacaatggcagccaaaatattttgcttccttatgctccttggtctttctgcaagtgttgctaccgcaaccattttcccacaatgctcacaagctcctatagcttcccttcttcccccatacctctcaccagcggtgtcttcaatgtgtgaaaccccaattgttcaaccctacaggatccaacaggcaatcgcaacaggcatcttaccattatcacccttgttcctccaacaaccgtcagccctattacagcagttacctttggtccatttggtggcacaaaacatcagggcacaacaactacaacaacttgtgctagcaaaccttgctgcatactctcagcaacatcaggttcttccattcaaccaactggctgcattgaactctgctgcttatttgcaacaacaa

SEQ ID NO: 321820 - DNA, 405 bp, Zea mays
cccacgcgttcggcagcaggaagtgcaaattcttatcctgcctggggaaaccaacaagctggaggcatgaaccaaaatgttggctggagtgctcctgtgcagggaaatccaggtcaggcaaataacaacatgaactggaacgcaccaaatggtaatcctaattggaataatcaacagagagagaatgggggcaggcactctggacaccgtggtgcttttagtggtggtgactcaagcggaaggtcatggaagtcacgctcttgtggccatggtgggtcaaggggacataaccaattctaccattcaacaaacacagatggatatccattcaggactgatcggcattacgataggcagaatttaggcaactagaggcgatatgagaatcacaatgagagaaatggt

SEQ ID NO: 321821 - DNA, 234 bp, Zea mays
ctacttccactccacaaactctcaagataagttttaaattctaacctaccccatccacatctatatcttaatccatattcactctctaacccatttctccctaccttcactcaccaaccacaaccatcccccctacacaacccatcctctcccatcaaccctaccttacaacaaccacaacactctacctcccatttactacatcaccaactacaaccactctaccaattaaca

SEQ ID NO: 321822 - DNA, 246 bp, Zea mays
  unsure (1)..(246): unsure at all n locations
cactatatcccaactttacatttaaaacttacctcataatactacttaggctagtttcaaatacaacattagcattcccaaatcaatacaacacttataaantctacaattcaacacaatacccttaactcacacaaattttcataccaatcatcattactattccatacaacaacttacctttcattacataaatcttttaaacaaacttccttataaactcattcatatcattccaaaattcat

SEQ ID NO: 321823 - DNA, 455 bp, Zea mays
ctagcaacatagaaagcacaatagtgtaccaacaatggcagccaaaatattttgcctccttatgctccggggtctttctgcaagtgctgctacggcgaccattttcccgcaatgctcgcaagctcctatagcttcccttcttcccccgtacctctcaccagcggtgtcttcggtatgtgaaaacccaattcttcaaccctacaggatccaacaggcaatcgcagctggcatcttacctttatcacccttgttcctccaacaatcatcagccctattacaacagttacctttggtgcatttattggcacaaaacatcagggcacaacaactacaacaacttgtgctagcaaaccttgctgcctactctcagcaacagcagtttcttccattcaaccaactaggttcattgaactctgcttcttatttgcaacaacaacaactaccattcagccagc

SEQ ID NO: 321824 - DNA, 351 bp, Zea mays
cccacgcgtccggaccaactagcaacatagaaagcacaatagtgtaccaacaatggcagctaaggtatgttgcctccttatgctccttggtctttctgcaagtgctgctacggcgaccattttcccacaatgctcacaagctcctatagcttcccttcttcccccgtacctctcaccaacggtgtcttcggtatgtgaaaacccaattcttcaaccctacaggatccaacaggcaatcgcagctggcatcttacctttatcacccttgttcctccaacaatcatcagccctattacagcagttacctttggtgcatttattggcacaaaacatcagggcacaacaactaca

SEQ ID NO: 321825 - DNA, 453 bp, Zea mays
tgagcattcagaaacacacctagcgaagcgcactagcaacgacctaacaacaatggctaccaagatattatccctctttgcgcttcttgccctttttgtgagcgcaacaaatgcgttcattattccacaatgctcacttgctcctagtgccattattccacagttcctacctccagttacttcaatgggcttcgaacacccagctgtgcaagcctacaggctacaacaagcgcttgcggcgagcgtcttacaacaaccaattgcccaattacaacaacaatccttggcacatctaaccatacaaaccatcgcaacgcaacagcaacaacaatttctaccagcactgagccaactagctgtggtgaaccctgtcgcctacttgcaacagcagttgcttgcatccaacccacttgctctggcaaacatagttgcataccaacaacaacaacaatt

SEQ ID NO: 321826 - DNA, 390 bp, Zea mays
agaccaactagcaacatagaaagcacaatagtgtaccaacaatggcagccaaaatattttgcctggttatgctccttggtctttctgcaagtgctgctactgcgaccattttcccgcaatgctcgcaagctcctatagcttcccttcttcccccgtacctctcaccagcggcgtcttcggtatgtgaaaacccaattcttcaaccctacaggatccaacaggcaatcgcagctggcatcttacctttatcacccttgttactacaacaatcatcagccctattacaacagttacctttggtgcatttattggcacaaaacatcagggcacaacaactacaacaacttgtgctagcaaaccttgctgcctactctcagcaacagcagtttc

SEQ ID NO: 321827 - DNA, 359 bp, Zea mays
gtgcatttattggcacaaaacatcagggcacaacaactacaacaacttgtgctagcaaaccttgctgcctactctcagcaacagcagtttcttccattcaaccaactaggttcattgaactctgcttcttatttgcaacaacaacaactaccattcagccagctacctgctgcctacccccagcaatttcttccattcaaccaactagcagcattgaactctcctgcttatttacagcagcaacaactactaccattcagccagctagctggtgtgagccctgctaccttcttgacacaaccacagttgttgccgttctaccagcaccttgcgcctaacgcttgcacccttttacaact

SEQ ID NO: 321828 - DNA, 439 bp, Zea mays
gcgaagcgcactagcaacgacctaacaacaatggctaccaagatattagccctccttgcgcttcgtgccctttttgtgagcgcaacaaatgcgttcattattccacaatgctcacttgctcctagtgccattattccacagttcctaccaccagttacttcaatgggcttcgaacacctagctgtgcaagccaacatgcaacaacaagcgcttgcggcgagcgtcttacaacaaccaattgcccaattgcaacaacaatccttgccacatctaacaatacaagccatcacaacgcaacagcaacaacagttcctaccagcactgagccacctagccatggtgaaccctgccggctacttgcaagagcagctgcttgcatccaacccacttgctctggcgaacgtagttgcaaaccagcaacatcaacagctacaacagt

SEQ ID NO: 321829 - DNA, 389 bp, Zea mays
gaccaactagcatcatagaaagcacaatagtgtaccaacaatggcagccaaaatattttgcctacttatgctccttggtcgttctgcaagtgctgctacggcgaccattttcccgcaatgctcgcaagctcctatagcttcccttcttcccccgtacctctcaccagcggcgtcttcggtatgtgaaaacccaattcttcaaccctacaggatccaacaggcaatcgcagctggcatcttacctttatcacccttgttcctccaacaatcatcagccctattacaacagttacctttggtgcatttattggcacaaaacatcagggcacaacaactacaacaacttgtgctagcaaaccttgctgcctactctcagcaacagcagtttc

SEQ ID NO: 321830 - DNA, 456 bp, Zea mays
tcagtaccatcaatcatcattcatcttagtagtataggcaccaaatcaaatctgcaacatcggttaggtaactccaaaaaccatgaagctggtgcttgtggttcttgctttcattgctttagtatcaagtgtttcttgtacacagacaggctgctgcagctgtggtcaacaacaaagccatgagcagcaacatcattcacaacaacatcatccacaaaaaccaccacattaaccaacaacacaaccttaccaagagcagcaaccccaaccaccaccaggtcacatgccaccaccaaaaccttagcaaccaccagaaattcatggtcaacaaccaccaccaccaccggagtatcaccatcaacaacaaccaccaccgcgccaacaaccacattaatgtgaaggccaacaacaacattaccaacaatcacaaggccatgtgcaacaacacgaacagag

SEQ ID NO: 321831 - DNA, 458 bp, Zea mays
attttcagcattcaaaaacacaccaagcgaagcgcactagcaacgacctaacaccaatggctagcaaggtattagccctccttgcgcttcttgcccttttagtgagcgcaacaaatgcgttcattattccacagtgctcacttgctcctagtgccattattccacagttcctcccaccagttacttcaatgggcttcgaacatccagccgtgcaagcctacaggctacaactagcgcttgcggcgagcgccttacaacaaccaattgcccaattgcaacaacaatccttggcacatctaaccctacaaaccattgcaacgcaacaacaacaacaacaacagtttctgccatcactgagccacctagccgtggtgaaccctgtcacctacttgcaacagcagctgcttgcattcaacccacttgctttggcgaacgtagctgcataccagcaacaacaa

SEQ ID NO: 321832 - DNA, 395 bp, Zea mays
attatgtagaccaactagcaacatataaagcacaatagtgtaccaacaatggcagccagaatattttgcctccttatgctccttggtatttctgcaagtgctgctacggcgaccattttcccgcaatgctcacaagctcctatagcttcccttcttcctccgtacctctcaccagcggtgtcttcggtatgtgaaaacccaattcttcaaccctacaggatccaacaggcaatcgcagctggcatcttacctttatcacccttgttcctacaacaatcatcagccctattacaggaattacctttggtgcctttattggcacaaaacattagggcacaaccacttccacaacttgtgctagcaaaacttggtggctaattttaacaaccacagtt

SEQ ID NO: 321833 - DNA, 453 bp, Zea mays
gaagaacccgatcgacaccatgagggtgttgctcgttgccctcgctctcctggctctcgctgcgagcgccacctccacgcatacaagcggcggctgcggctgccagccaccgccgccggttcatctaccgccgccggtgcatctgccacctccggttcacctgccacctccggtgcatctcccaccgccggtccacctgccgccgccggtccacctgccaccgccggtccatgtgccgccgccggttcatctgccgccgccaccatgccactaccctactcaaccgccccggcctcagcctcatccccagccacacccatgcccgtgccaacagccgcatccaagcccgtgccagctgcagggaacctgcggcgttggcagcaccccgatcctgggccagtgcgtcgagtttctgaggcatcagtgcagcccgacggcgacgccctactgctc

SEQ ID NO: 321834 - DNA, 453 bp, Zea mays
ttttcagcattcaaaaacacaccaagcgaagcgcactagcaacgacctaacaccaatggctgccaagatattagccctccttgcgcttcttgcccttttagtgagcgcaacaaatgcgttcattattccacagtgctcacttgctcctagtgccattattccacagttcctcccaccagttacttcaatgggcttcgaacatccagccgtgcaagcctacaggctacaactagcgcttgcggcgagcgccttacaacaaccaattgcccaattgcaacaacaatccttggcacatctaaccctacaaaccattgcaacgcaacaacaacaacaacaacagtttctgccatcactgagccacctagccgtggtgaaccctgtcacctacttgcaacagcagctgcttgcattcaacccacttgctctggcgaacgtagctgcataccagcaaca

SEQ ID NO: 321835 - DNA, 387 bp, Zea mays
gaccaactagcaacatagaaagcacaatagtgtaccaacaatggcagccaaaatattttgcttccttatgctccttggtctttctgcaagtgctgctaccgcaaccattttcccacaatgctcacaagctcctatagcttcctttcttcccccatacctctcaccagcggtgtcttcagtatgtgaaaacccaattcttcaaccctacaggatccaacaggcaatcgcagcaggcatcttaccttaataaccctggttcctccaccacccgtaagccctattacagcagttaccttggggccattggttgccccaaaccatcaaggcccaccacctccaccacctggtgctaggaaaccttgctgcctactctaaccaccagcagtt

SEQ ID NO: 321836 - DNA, 435 bp, Zea mays
caacaatggcggccaagatattttccatccttatgctccttgctctttctgcatgtgttgctaacgcgagcatttttcctcaatactcacaagctcctatagctgcccttcttcccccataccttccatcaatgaccgcttcagtttgtgaaaacccagcccttcaaccctacaggctccaacaagcaatcgcaacaagcaacttacctttatcacccctgttctttcaacaatcgccagccctatctttggtgcagtcattggtacaaaccatcagggcacaacagctgcaacaactcgtgctaccagtgatcagccaagtagctctggcaaacctttctccctactctcagcaacaacaatttcttccattcaaccaactgtctacactgaaccctgctgcttatttacaacatcaacaactactaccattca

SEQ ID NO: 321837 - DNA, 194 bp, Zea mays
tgcatgaagtgtgtaactcagtgactgcagcaggacagcagcggctaatagaagcctatggcgcggtatactacctgcgcatggagatagtgtagtgaacgctgtcaagacgtctttaatgcaagagagattagatagctggtgttggctgccatgcgatcctatgatgatggctggcttattggaaaacctat

SEQ ID NO: 321838 - DNA, 408 bp, Zea mays
caacaagcaacatagaaagtggaatccagtagcaacaatagagcaacaatggcgaccaagatagtttccctccttatgctccttgctctttctgcatgtgttgctaacgcgacaattttccctcaatgctcacaagctcctatagcttcccttcttcccccataccttccatcaatgatagcttcagtatgtgaaaacccagctcttcaaccctataggctccaacaagcaatcgcagcaagcaacatacctttatcacccttggttcaacaatcgccagccctatctttggtgcagtcattggtacaaaccatcaaggcacagcagctgcagcaactcgtgctacctgtgatcaaccaagtagctctggcaaacctttctccctactatcagcaacaacaatttctt

SEQ ID NO: 321839 - DNA, 345 bp, Zea mays
ttttcagcattcaaaaacacaccaagcgaagcgcactagcaacgacctaacaccaatggctacgaagatattagccctccttgcgcttcttgcccttttagtgagcgcaacaaatgcgttcattattccacagtgctcacttgctcctagtgccattattccacagttcctcccaccagttacttcaatgggcttcgaacatccagccgtgcaagcctacaggctacaactagcgcttgcggcgagcgccttacaacaaccaattgcccaattgcaacaacaatccttggcacatctaaccctacaaaccattgcaacgcaacaaccacaacaacaaccgtttct

SEQ ID NO: 321840 - DNA, 447 bp, Zea mays
cgaagcgcactagcaacgacctaacaccaatggctaccaagatattagccctccttgcgcttgttgcccttttagtgagcgcaacaaatgcgttcattattccacagtgctcacttgctcctagtgccagtattccacagttcctcccaccagttacttcaatgggcttcgaacatccagccgtgcaagcctacaggctacaactagcgcttgcggcgagcgccttacaacaaccaattgcccaattgcaacaacaatccttggcacatctaaccctacaaaccattgcaacgcaacaacaacaacaacaagttctggcatcactgaaccaacctacccgtgtgaaaccctgtcacctacttgcaacagcagctgcttgcatccaacccacttgctctggcgaacgtagctgcttaccagcaacaacaacagcttgcacagtttatg

SEQ ID NO: 321841 - DNA, 316 bp, Zea mays
ctccttatgcgcgttggtctttctgcaagtgctgctacggcgaccattttcccgcaatgctcgcaagctcctatagcttcccttcttcccccgtacctctcaccagcggtgtcttcggtatgtgaaaacccaattcttcaaccctacaggatccaacaggcaatcacagcttgcatcttacctttatcacccttgttcctccaacaatcatcagccctattacatcagttacctttggtgcatttattggcacaaaacatcagggcacaacaactaccacaacttgggctaacaaaccttggtggctaattttaac

SEQ ID NO: 321842 - DNA, 407 bp, Zea mays
agaccaactagcaacatagaaagcacaatagtgtaccaacaatggcagccaaaatattttgcctccttatgctccttggtctttctgcaagtgctgctacggcgaccattttcccacaatgctcacaagctcctatagcttcccttcttcccccgtacctctcaccagcggtgtcttcggtatgtgaaaacccaattcttcaaccctataggatccaacaggcaatcgcagctggcatcttacctttatcacccttgttcctccaacaatcatcagccctattacagcagttacctttggtgcatttattggcacaaaacatcagggcacaacaactacaacaacttgtgctagcaaaccttgctgcctactttcagcaacaacagtttcttccattcaaccaacta

SEQ ID NO: 321843 - DNA, 361 bp, Zea mays
gcaacatagaaagcacaatagtgtaccaacaatggcttccaaaatattttgcctccttatgctaggggggctttctacaagtgctgctacggcgaccattttcccgcaatgctcacaagctcctatagcttcccttcttcccccgtacctatcaccagcggcgtcttacgtatgtgaaaacccaattcttcaaccctacatgatccaacaggcaatcgcagctggcatattacctttatcacccttgttccttcaacaatcatcagccctattacaacagttacctttggtgcatttattggcacaaaacatcaaggcacaacaactacaacaacttgtgctagcagaccttgctgcctac

SEQ ID NO: 321844 - DNA, 459 bp, Zea mays
gcaacatataaagcacaatagtgtaccaacaatggcagccaaaatattttgccttcttatgctgcttggtctttctgcaagtgctgctacggggaccattttcccgcaatgctcgcaagctcctataagttcccatctttccccgtacctctcaccagctgtgtcttcggttgggaaaacccagttcttcaaccctacaggatccaacaggcaatcacagctggcatcttacctttatcacccttgatcctccaacaatcatcagccctaatacatcagttacctttggtgcatttattggcacaaaacatcagggcacaacaactacaacaacttgtgctagcaaaccttggtgcctactcttagcaacagcagtttcttccattcaaccaactagctgcattgaactctgcttcttatttgcaacaacaacaactaccattcagccagctacctgct

SEQ ID NO: 321845 - DNA, 445 bp, Zea mays
gaccattagctttatctactccagagcgcagaagaacccgatcgacaccatgagggtgttgctggttgccctcgctctcctggctctcgctgcgagcgccacctccacgcatacaagcggcggctgcggctgccagccaccgccgccggttcatctaccgccgccggtgcatctgccacctccggttcacctgccacctccggtgcatctcccaccgccggtccacctgccgccgccggtccacctgccaccgccggtccatgtgccgccgccggttcatctgccgccgccaccatgccactaccctactcaaccgccccggcctcagcctcatccccagccacacccatgcccgtgccaacagccgcatccaagcccgtgccagctgcagggaacctgcggcgttggcagcaccccgatccctggccagtgcctcgagtttctg

SEQ ID NO: 321846 - DNA, 417 bp, Zea mays
agaccattagctgtatctactccagagcgcagaagaacccgatcgacaccatgagggtgttgctcgttgccctcgctctcctggctctcgctgcgagcgccacctccacgcatacaagcggcggctgcggctgccagccaccgccgccggttcatctaccgccgccggtgcatctgccacctccggttcacctgccacctccggtgcatctcccaccgccggtccacctgccgccgccggtccacctgccaccgccggtccatgtgccgccgccggttcatctgccgccgccaccatgccactaccctactcaaccgccccggcctcagcctcatccccagccacacccatgcccgtgccaacagccgcatccaagcccgtgccagctgcaaggaacctgccgcgttggcagcaccc

SEQ ID NO: 321847 - DNA, 176 bp, Zea mays
attatggaatgcttaacaattgtccgtatatttgaaaagagtcatctgttaagcaaattgtgtccagaaaccaatggatccccaaacgatttctgctcgtctcttttctacaactccaatcaatccacagttcacttatgttgcagccccatgacccagttatttcaaaaatgtta

SEQ ID NO: 321848 - DNA, 389 bp, Zea mays
  unsure (1)..(389): unsure at all n locations
attgagaccaactagcaacatagaaagcacaatagtgtaccaacaatggcagccaaaatatttggcctgcttatgctccttggtctttctgcaagtgctgctacggcgaccattttcccgcaatgctcgcaagctcctatagcttcccttcttcccccgtacctctcaccagcggtgtcttcggtatgtgaaaacccaattcttcaaccctacaggatccaacaggcaatcgcagctggcatcttacctttatcacccttgttcctccaacaatcatcagccctattacaacagttacctttggtgcatttattggcacanaacatcanggcacaacaactacaacaccttgtgctagcaaaccttgctgcctactctcagcaacagca

SEQ ID NO: 321849 - DNA, 443 bp, Zea mays
gcaattagctcatcgactccagattggagaactcgacaccatgaaggtgctgatcgttgcccttgctctcctggcgctcgctgcgagcgccgcctccagtacaagcggcggctgtggctgccagacaccaccgtttcatctaccgcctccgttctatatgccgcctccgttctatctgccgccgcagcagcagccgcagccatggcaataccccactcaaccaccgcagctaagcccgtgccagcagttcggatcctgcggcgtcggcagcgtcggcagcccgttcctgggccagtgcgtcgagttcctgaggcaccagtgcagcccggcggcgacgccctacggctcgccacagtgccaggcgctgcagcagcagtgctgccaccagatcaggcaggtggagccgctgcaccggtaccaggcgacatacggtgtggtcctgc

SEQ ID NO: 321850 - DNA, 341 bp, Zea mays
aacaagcaacatagaaagtggaatccagtagctacaatagagcaacaatggcgaccaagatattggccctccttatgctccttgctctttctacatgtgttgctaacgcgacaattttccctcaatgctcacaagctcctatagcttcccttcttcccccataccttccatcaattatagcttcaatatgtgaaaacccagctcttcaaccatataggcttcaacaagcaatcgcagcaagcaacatacctttatcgcccttgttgtttcaacaatcgccagccctatctttggtgcagtcattggtacaaaccatcaaggcacaacagctgcagcaactc

SEQ ID NO: 321851 - DNA, 355 bp, Zea mays
ctacatagaaagtataatccattagcaacattagatcaacaatggcgaccaagatattttcccgccttgtgctccttgctctttctacatgtgttgctaacgcgacaattttccctcaatgctcacaagctcctatagcttcccttcttcccccataccttccatcaattatagcttcagtatgtgaaaacccatctcttcaaccatatatgcttcaacaagcaatcgcagcaagcaacatacctttatcgcccttgttgtttcaacaatcaccagccctatctttggtgcagtcattggtacaaaccatcatggcacaacagctgcagcaactcatgctacctgtgatcaacca

SEQ ID NO: 321852 - DNA, 356 bp, Zea mays
cccacgcgtccgtagcaacatagaaagcacaatagtgtaccaacaatggcagccaaaatattttggctcggtatgctccttggtctttctgcaagtgctgctacggcgaccattttcccgcaatgctcgcaagctcctatagcttcccttcttcccccgtacctctcaccagcggtgtcttcggtatgtgaaaacccaattcttcaaccctacaggatccaacaggcaatcacagctggcatcttacctttatcacccttgttcctccaacaatcatcagccctattacatcagttacctttggtgcatttattggcacaaaacatcaaggcacaacaactaacacaacttgggct

SEQ ID NO: 321853 - DNA, 425 bp, Zea mays
  unsure (1)..(425): unsure at all n locations
caacatgcaacattgaaagtggaatacagtagcaaaaatagagcaacaatggcggccaagataggttgcatccttatgctcctagctctttctgcatgtgttgctaacgcgaccatacttcctcaatactcacaagctcctatagctgcccttcttccgccataccttccatcaatgaccgctttaatatgtgaaaacccagcccttcaaccctacaggatccagcaagcaatcgcaacaagcaacttacctttatcacacctgttctttcaacagtcgccagccctatctttggtgcaggcattggtacaaaccatcagggcagaacagttgcagcaactcgtgctaccagtgatcagtcaagtagctctggcaaacctttccccctactctcagcaacaacaatntcttgcattcaaccaact

SEQ ID NO: 321854 - DNA, 309 bp, Zea mays
ctcataatgttcctccaacaaatggtgaactttcaagccccaacaagcagagcccaaagaggagcccatcttgttcacgctcttctgatgccaagcctgaataaaattgctattctgttaaacgattgcatatggagtcaagagctcttcttttcttaacatttgtactctgctctactaccatcatagtctcatcgcagtacgagattgcatgatattaactatctgcatcagcttgtatcgatggactccaaatgttgcatctctcgttgactagagcactgaacgacccatttactttagctaaac

SEQ ID NO: 321855 - DNA, 464 bp, Zea mays
tgctaacgcgacaattttccctcaatgctcacaagctcctatagcttcccttcttcccccataccttccatcaatgatagcttcagtatgtgaaaacccagctcttcagccctataggctccaacaagcaatcgcagcaagcaacatacctttatcacccttgttgtttcaacaatcgccagccctatctttggtgcagtcattggtacaaaccatcagggcacagcagctgcagcaactcgtgctacctgtgatcaaccaagtagctctggcaaacctttctccctactctcagcaacaacaatttcttccattcaaccaactgtctacactgaaccctgctgcttatttgcagcaacaactattaccattcagccagctagctactgcctactctcagcaacaacaacttcttccatttaaccaattggccgcactgaaccccgctgcttatttgcagcagc

SEQ ID NO: 321856 - DNA, 455 bp, Zea mays
aacaagcaacatagaaagtggaatacagtagcaaaaatagagcaacaatggcggccaagatatggtccatccttatgctccttgctctttctgcatgtgttgctaacgcgaccatttttcctcaatactcacaagctcctatagctgcccttcttcccccataccttccatcaatgaccgctttagtatgtgaaaacccagcccttcaaccctacaggatccagcaagcaatcgcaacaagcaacttacctttatcacacctgttctttcaacaatcgccagccctatctttggtgcagtcattggtacaaaccatcagggcagaacagttgcagcaactcgtgctaccagtgatcagccaagtagctctggcaaacctttccccctactctcagcaacaacaatttcttccattcaaccaactgtctatactgaaccctgctgcttatttgcag

SEQ ID NO: 321857 - DNA, 434 bp, Zea mays
gcaacatagaaagtagaatccattagcaacaatagagcaacaatggcgaccaagatattttccctgcttgtgctccttgctctttctacatgtgttgctaacgcgacaattttccctcaatgctcacaagctcctatagcttcccttcttcccccataccttccatcaattatagcttcagtatgtgaaaacccagctcttcaaccatataggcttcaacaagcaatcgcagcaagcaacatacctttatcgcccttgttgtttcaacaatcaccagccctatctttggtgcagtcattggtacaaaccatcagggcacaacagctgcagcaactcgtgctacctgtgatcaaccaagtagctctggcaaacctttcttcctactctcagcaacaacaatttctttcattcaacccactggctacactgaaccc

SEQ ID NO: 321858 - DNA, 349 bp, Zea mays
attgagaccaactagcaacatagaaagcacaatagtgtaccaacaatggcagccaaaatattttgcctccttatgctccttggtctttctgcaagtgctgctacggcgaccattttcccgcaatgctcgcaagctcctatagcttcccttcttcccccgtacctctcaccagcggtgtcttcggtatgtgaaaacccaattcttcaaccctacaggatccaacaggcaatcacagctggcatcttacctttatcacccttggtcctccaacaatcatcagccctattacatcagttacctttggtgcatttattggcacaaaacatcaaggcacaacaactacaacaac

SEQ ID NO: 321859 - DNA, 363 bp, Zea mays
ggccggcaccctaccccctttatcccttggttggccaccccctctcctctcatggcaggcacgcgccatttcttcctcctgcctagatctccccctcccccacgcagcaaggatcgagatgatgacgagcaagaacggattgaagagaaaaaaaggatcacggaaacgttctaccccgccccccccatctatggaaaatcttctggggaaacccctaggggcttccactccaaaccttgcttagcccattcctctttcttcaataaaggaccttgatcaaggtggggaataagggaagtagcacaccgtcaaccttaattttcataatacccttgaccaggaccaaccatgattcaattaaaa

SEQ ID NO: 321860 - DNA, 119 bp, Zea mays
caacaacccatcattggtggtgccctcttttagattgcttatgagttatacttcaataatgaaggtttttggatgatgtttgtggcttcccagaaataagaaagtacatttctagattc

SEQ ID NO: 321861 - DNA, 113 bp, Zea mays
attgagaccaactatcaacatacattgcacaacaatgcaccaacaatggcctctaatagatatggtctccttatgctccttggtctttcttcaagtgctgcatactgcgacca

SEQ ID NO: 321862 - DNA, 441 bp, Zea mays
gcgtccggcaactagcaacatagaatgcacaatagtgtaccaacaatggcaaccaaaatattttgcgtactgatgctccttggtctttctgcaagtgctgctaccgcgaccattttcccgcaatgctcacaagctcctatagcttaccttcttcccccatacctctcaccagcggtgtcttcagtatgtgaaaacccaattcttcaaccctacaggatccaacaggcaatcgcagcacgcatcttacctttatcacccttgatcctacaacaaccgtcagccctattacagcagttacctttggtgcatttgttggcacaaaacatcagggcacaacaactacaacaacttgtgctagcaaaccttgctgactactctcagcaacagcagtttcttacattcaaccaactggctgcattgaactctgctgcttatttgcaa

SEQ ID NO: 321863 - DNA, 319 bp, Zea mays
gaccagctagcaacatagaaagcacactagtgtaccaacaatggcagccaaaatattttgcctgcttatgctccttggtctttctgcaagtgctgctacggcgaccattttcccgcaatgctcgcaagctcctatagcttcccttcttaccccgtacctctcaccagcggtgtcttccgtatgtgaaaacccaattcttcaaccctacaggatccaacaggcaatcacagctggcatcttacctttatcacccttgttcctacaacaatcatcagccctattacatcaattacctttggtgcatttattggcacaaaac

SEQ ID NO: 321864 - DNA, 429 bp, Zea mays
  unsure (1)..(429): unsure at all n locations
cagaaacacaccaagcgaagcacattagcaacaacctaacaacaatggctaccaagatattatcggtccttgcgcttcttgcgctttttgcgagcgcaacaaatgcgttcattattccacaatgctcacttgctccaagttccattattacacagttcctcccaccagttacttcaatgggcttcgaacacccagctgtgcaagcctataggctacaacaagcaattgcggcgagcgtcttacaacaaccaatttcccagttgcaacaacaatccttggcacatctaacaatacaaaccatcgcaacgcatcagcaacaacaattcctaccagcactgagccacctagccatggtgaaccctgccgnctacttgcaacagcagttgcttgcatcaaacccacttgctctggcaaacgtaattgcaaacc

SEQ ID NO: 321865 - DNA, 445 bp, Zea mays
caactagcaacatagaaagcacaatagtgtaccaacaatggcagccaaaatattttgcttccttgtgctgcttggtctttctgcaagtgttgctaccgcaaccattttcccacaatgctcacaagctcctatagcttcccttcttcccccatacctctcaccagcggtgtcttcaatgtgtgaaaccccaattgttcaaccctacaggatccaacaggcaatcgcaacaggcatcttaccattatcacccttgttcctccaacaaccgtcagccctattacagcagttacctttggtccatttggtggcacaaaacatcagggcacaacaactacaacaacttgtgctagcaaaccttgctgcatactctcagcaacatcagtttcttccattcaaccaactggctgcattgaactctgctgcttatttgcaacaacaattacca

SEQ ID NO: 321866 - DNA, 349 bp, Zea mays
gtgggttggcttctcctccccctacggttcgggttcgggttcgtgaggttctccggggttcggtttcgtgggtgagcggatcgagatggcggcgtcggatgttgagtaccgctgcttcgtcggcggcctcgcctgggccacggacgaccactacctccacaacgccttcagcacctacggcgaagtcctcgagttcaagatcatcctcgatcgggagacgcaaaagtcccgcggcttcggcttcgtcaccttcttcactgaggacgcgattcggaacgccatcgaaggcatgaaccgcaaggagctggacggtcgcaacatcaccgtcaacgaggcccagtcccgcggc

SEQ ID NO: 321867 - DNA, 460 bp, Zea mays
acatagaaagtagaatccattagcaacaatagagcaacaatggcgaccaagatagtttgcgctccttatgctccttgctctttctacatgtgttgctaacgcgacaattttccctcaatgctcacaagctcctatagcttccctatttcccccataccttccatcaattatagcttcagtatgtgaaaacccagctcttcaaccatataggcttcaacaagcaatcgcagcaagcaacatacctttatcgcccttgttgtttcaacaatcaccagccctatctttggtgcagtcattggtacaaaccatcagggcacaacagctgcagcaactcgtgctacctgtgatcaaccaagtagctctggcaaacctttctccctactctcagcaacaacaatttcttccattcaaccaactgtctacactgaaccctgctgcttatttgcagcaacaactatta

SEQ ID NO: 321868 - DNA, 434 bp, Zea mays
attgagaccaactagcaacatagaaagcacaatagtgtaccaacaatggcagccaaaatggttgggctccttatgctccttggtctttctgcaagtgctgctacggcgaccattttcccgcaatgctcgcaagctcctatagcttcccttcttcccccgtacctctcaccagcggtgtcttcggtatgtgaaaacccaattcttcaaccctacaggatccaacaggcaatcgcagctggcatcttacctttatcacccttgttcctccaacaatcatcagccctattacaacagttacctttggtgcatttattggcacaaaacatcagggcacaacaactacaacaacttgtgctagcaaaccttgctgcctactctcagcaacagcagtttcttccattcaaccaactaggttcattgaactctgcttctta

SEQ ID NO: 321869 - DNA, 64 bp, Zea mays
accttcgatgaaagtttttggacaatatttgtggctctctagaaataagaaagtacatctctag

SEQ ID NO: 321870 - DNA, 452 bp, Zea mays
cagaaacacacctagcgaagcgcactatcatcgacctaacaacaatggctaccaagatattatgcctctttgcgcttcttgccctttttgtgagcgcaacaaatgcgttcattattccacaatgctcacttgctcctagtgccattattccacagttccttcctccagttacttcaatgggcttcgaacacccagctgtgcaagcctacatgctacaacaagcgcttgccgccagcgtcttacaacaaccaattgcccaattacaacaacaatccttggcacatctaaccatacaaaccatcgcaacgcatcagcaacaacaatttctaccagcactgagccaactagctgtggtgaaccctgtcgcctacttgcaacagcaattgcttgcattcaacccacttgctctggcaaacatagttgcataccaactacaacaacaattgcaacag

SEQ ID NO: 321871 - DNA, 392 bp, Zea mays
agcattcagaaacacacctagcgaagcgcactatcaacgacctaacatcaatggctaccaagatggtatccctctttgcgcttcttgccctttttgtgagcgcatcaaatgcgttcattattccacaatgctcacttgctcctagtgccattattccacagttcctccctccagttacttcaatgggcttcgaacacccagctgtgcaagcctacaggctacaacaagcgcttgcggcgagcgtcttacaacaaccaattgcccaattacaacaacaatccttggcacatctaaccatacaaaccatcgcaacgcatcagcaacaacaatttctaccagcactgagccaactagctgtggtgaaccctgtcgcctacttgcaacagcagttg

SEQ ID NO: 321872 - DNA, 428 bp, Zea mays
cggacgcgtgggcggacgcgtgggagaccagcaagcaacatagaaagtagaatccattagcaacagtagagcaacaatggcgaccaagatattttccctccttatgctccttgctctttctacatgtgttgctaacgcgacaattttccctcaatgctcacaagctcctatagcttcccttcttcccccataccttccatcaattatagcttcagtatgtgaaaacccagctcttcaaccatataggcttcaacaagcaatcgcagcaagcaacatacctttatcgcccttgttgtttcaacaatcaccagccctatctttggtgcagtcattggtacaaaccatcagggcacaacagctgcagcaactcgtgctacctgtgatcaaccaagtagctctggcaaacctttctccctactctcagcaac

SEQ ID NO: 321873 - DNA, 449 bp, Zea mays
accatacctctcaccagcggtgtcttcaatgtgtgaaaccccaattgttcaaccctacacgatggaacaggcaatctcaacaggcatcttaccattatcacccttgttcctgcaacaaccgtcagccctattacagcagttacctttggtccatttggtggcacaaaacatcatggcacaacaactacaacaacttgtgctagcaaaccttgctgcatactctcagcaacatcagtttcttccattcaaccaactggctgcattgaactctgctgcttatttgcaacaacaattaccattcagccagctagttgctgcctacccccagcaatttcttccattcaaccaactagcagcattgaactctgctgcttatttacagcagcaacaactactaccattcagccagctagctgatgtgagccctgctgcctttttgacacaacaac

SEQ ID NO: 321874 - DNA, 197 bp, Zea mays
ttcagaaacacaccaagcgaagctacctagcatcgacttaacaacaatggctaccaatgtatgagccctccttgcgcttcttgccctttttgtgagcgcaacaaatgcgttcattattccacaatgctcacttgctcctagtgccattataccacagtttctccgaccagttacttcaatgggcttcgaacacctag

SEQ ID NO: 321875 - DNA, 429 bp, Zea mays
gcaacatagaaagtggaatccagtagcaacaacagagcaacaatggcgaccaagatattgtcccggcttatgctccttgctctttctgcatgtgttgctaacgcgacaattttccctcaatgctcacaagctcctatagcttcccttcttcccccataccttccatcaatgatagcttcagtatgtgaaaacccagctcttcagccctataggctccaacaagcaatcgcagcaagcaacatacctttatcacccttgttgtttcaacaatcgccagccctatctttggtgcagtcattggtacaaaccatcagggcacagcagctgcagcaactcgtgctacctgtgatcaaccaagtagctctggcaaacctttctccctactctcagcaacaacaatttcttccattcaaccaactgtctacactg

SEQ ID NO: 321876 - DNA, 370 bp, Zea mays
gaaagcacaatagtgtaccaacaatggcatctaaaatattttgcctccttatgctccttggtctttctgcaagtgctgctacggcgaccattttcccacaatgctcacaagctcctatagcttcccttcttcccccgtacctctcaccaacggtgtcttcggtatgtgaaaacccaattcttcaaccctacaggatccaacaggcaatcgcagctggcatcttacctttatcacccttgttcctccaacaatcatcagccctattacagcagttacctttggtgcattaattggcacaaaacatcagggcacaccacctccaacaacttgtgctagcaaaccttgctgcctactttaagcaccagcagtt

SEQ ID NO: 321877 - DNA, 437 bp, Zea mays
gcggcgagcgtcttacaacaaccaatttcccagttgcaacaacaatccttggcacatctaacagtgcaaaccatcgcaacgcaacagcaacaacaattcctaccagcactgagccacctagccatggtgaaccctgccgcctacttgcaacagcagttgcttgcatcaaacccacttgctctggcaaacgtagttgcaaaccagccacaacaacagctgcaacagtttctgccagcgctcagtcaactagccatggtgaaccctgccgcctacctacaacagcaacaactgctttcatctagcccgctcgctgtggccaatgcacctacatacctgcaacaacaattgttgcaacagattgtaccagctctgactcagctagttgtggcaaaccctgctgcctacttgcaacagctgcttccattcaaccaactgac

SEQ ID NO: 321878 - DNA, 406 bp, Zea mays
gttctagctcttgcactgtacgcttgcgtggtacgcgtggtgcgcgcgcatgctctgccgtagtgataggtgctgacggtggccacgccaccccgacctcttggcattttcctgcccttggtttgcagctcaccttcgacgtcggcgtcatcgccatcttcggccaccggctggccggccacgtgaaggaggagctgaggaggaactacttcaccatggagaaaggctacaacagcttccccatcccggtcgcctgcaccagctacagccaggccatcaaggcgaggcagcggctggccccggtgctgaccggcatcctggcggaccggaggccccggcgaaccgactactacgacgaccatggcctcctgaacgccctaatgcgctcccttgacaacagcggggc

SEQ ID NO: 321879 - DNA, 441 bp, Zea mays
acgctatcagtaccatcaatcatcattcatcttattagtataggcaccaaatcaaatctgcaacatcaattagctaactccaaaaaccatgaagctggtgcttgtggttcttgctttcattgctttagtatcaagtgtttcttgtacacagacaggcggctgcagctgtggtcaacaacaaagccatgagcagcaacatcatccacaacaacatcatccacataaacaacaacatcaaccaccaccacaacatcaccagcagcagcaacaccaacatcaacaagttcacatgcaaccacaaaaacatcagcatcaacaagaagttcatgttcaacaacaacaacaacaaccgtagtaccaacatcaacaacaacatcaacagtaccaacaacaacatcaatgtgaaggccaacaacaacataaccaacaataacaaggcca

SEQ ID NO: 321880 - DNA, 409 bp, Zea mays
caacaagcaacatagaaagtggaatccagtttcaacaacagagcaacaatggcgaccaagatatgttccctccttatgctccttgctctttctgcatgtgttgctaacgcgacaattttccctcaatgctcacaagctcctatagcttcccttcttcccccataccttccatcaatgatagcttcagtatgtgaaaacccagctcttcagccctataggctccaacaagcaatcgcagcaagcaacatacctttatcacccttgttgtttcaacaatcgccagccctatctttggtgcagtcattggtacaaaccatcagggcacagcagcttgagcaactcgtgctacctgtgatcaaccaagtagctctggcaaaccttttctcctactctcagcaacaacaatttc

SEQ ID NO: 321881 - DNA, 304 bp, Zea mays
acgcattggtggtggcctctctcccacactattattctcttattcttcctgtactatatatccttccgtctcagatcaacacttactagtgatgtcattccgcttgcttgattgtcacacatattcacacttcacccgatcctcttatcacgatatacctttctgcatcctacttgcttactgtcctcatctgaaactccaacccttccgctatcgatttgacttccattctggaatcttaccactttcaatcttacaactaaaacaatcaacttcctttttacaaaatttaccttaattacat

SEQ ID NO: 321882 - DNA, 330 bp, Zea mays
attcaaccaactagctgcattgaagaaactgttgttgctacaacttgagctccacgtagggagggggctatttgcttacttccaagacgtattggcatcatgctgccgtgctacaactttatgacgtccagaatgtgatctgttatgacaagctgtacgattacatcatagatctgtcggtctcattcttactgtccgtacattatcgccctaacagagtttgtatcttcactctaatcatatctcagacaccctacatctgctgatactatataatctaatcactctttcctctacttgaatcataacttgatatctatatatattcca

SEQ ID NO: 321883 - DNA, 430 bp, Zea mays
caacaagcaacatagaaagtggaatacagtagcaacaatagagcaacaatggcggccaagatatgttccatccttatgctccttgctctttctgcatgtgttgctaacgcgaccatttttcctcaatactcacaagctcctatagctgcccttcttcccccataccttccatcaatgaccgcttcagtttgtgaaaacccagcccttcaaccctacaggctccaacaagcaatcgcaacaagcaacttacctttatcacccctgttctttcaacaatcgccagccctatctttggtgcagtcattggtacaaaccatcagggcacaacagctgcaacaactcgtgctaccagtgatcagccaagtagctctggcaaacctttctccctactctcagcaacaacaatttcttccattcaaccaactgtcta

SEQ ID NO: 321884 - DNA, 451 bp, Zea mays
catctagcaacatagaaagcacaatagtgtaccaacaatggcagccaaaatattttgcctcctgatgctgcttggtctttctgcaagtgctgctacggcgaccattttcccgcaatgctcgcaagctcctatagcttcccttcttcccccgtacctctcaccagcggtgtcttcggtatgtgaaaacccaattcttcaaccctacaggatccaacatgcaatcacagctggcatcttacctttatcacccttgttcctccaacaatcatcagccctattacatcagttacctttggtgcatttattggcacaaaacatcagggcacatcaactacaacaacttgtgctagcaaaccttgctgcctactctcagcaacagcagtttcttccattcaaccaactagctgcattgaactctgcttcttatttgcaacaacaacaactaccattc

SEQ ID NO: 321885 - DNA, 447 bp, Zea mays
ctgaattcccggggaccaactagcatcatagaaagcacaatagtgtaccaacaatggcagccaaaatattttgcctccttatgctccttggtcgttctgcaagtgctgctacggcgaccattttcccgcaatgctcgcaagctcctatagcttcccttcttcccccgtacctctcaccagcggtgtcttcggtatgtgaaaacccaattcttcaaccctacaggatccaacaggcaatcgcagctggcatcttacctttatcacccttgttcctccaacaatcatcagccctattacaacagttacctttggtgcatttattggcacaaaacatcagggcacatcatctacaacaacttgtgctagcaaaccttgctgcctactctcagcaccagcagtttcttccattcaaccaactaggttaattgaactctgcttctaatttgc

SEQ ID NO: 321886 - DNA, 443 bp, Zea mays
gcaacatagaaagcacaatagtgtaccaacaatggcagacaaaatattctgcttgcggatgggccttggtctttctgcaagtgttgctaccgcaaccattttcccacaatgctcacaagctcctatagctgtccttcttaccacatacctctcaccagcggcgtcttcaatgtgtgaaaccccaattgttcaaccctacaggatccaacaggcaatcgcaacaggcatcttaccattatcacccttgatcctccaacaaccgtcagccctattacagccgttacctttggtccatttggtggcacaaaacatcacggcacaacaactaccacaacttgtgctaacaaaccttggtgcatactcttaagaacatcaatttatttcattcaaccaactggctgcattgaactctgctgcttatttgcaacaacaattaccattca

SEQ ID NO: 321887 - DNA, 464 bp, Zea mays
caactagcaacatagaaagcacaatagtgtaccaacaatggcagccaaaatattttgggtcctgatgctccttggtatttctgcaagtgctgctacggcgaccattttcccgcaatgctcacaagctcctatagcttcccttcttcccccgtacctctcaccagcggtgtcttcggtatgtgaaaacccaattcttcaaccctacaggatccaacaggcaatcgcagctggcatcttacctttatcacccttgttcctccaacaatcatcagccctattacagcagttacctttggtgcatttattggcacaaaacatcagggcacaacaactacaacaacttgtgctagcaaaccttgctgcctactctcagcaacagcagtttcttccattcaaccaactagctgcattgaactctgcttcttatttgcaacaacaacaactaccattcagccagctacctg

SEQ ID NO: 321888 - DNA, 451 bp, Zea mays
caactagcaacatagaaagcacaatagtgtaccaacaatggcagccaaaatattttgcctccttgtgctgcttggtctttctgcaagtgctgctacggcgaccattttcccgcaatgctcgcaagctcctatagcttcccttcttcccccgtacctctcaccagcggtgtcttcggtatgtgaaaacccaattcttcaaccctacaggatccaacaggcaatcacagctggcatcttacctttatcacccttgttcctccaacaatcatcagccctattacatcagttacctttggtgcatttattggcacaaaacatcagggcacaacaactacaacaacttgtgctagcaaaccttgctgcctactctcagcaacagcagtttcttccattcaaccaactagctgcattgaactctgcttcttatttgcaacaacaacaactaccattc

SEQ ID NO: 321889 - DNA, 437 bp, Zea mays
gcacaatagtgtaccaacaatggcagccaaaatattttgcttccttatgctccttggtctttctgcaagtgctgctaccgcaaccattttcccacaatgctcacaagctcctatagcttcctttcttcccccatacctctcaccagcggtgtcttcagtatgtgaaaacccaattcttcaaccctacaggatccaacaggcaatcgcagcaggcatcttacctttatcacccttgttcctacaacaaccgtcagccctattacagcagttacctttggtgcatgtgttggcacaaaacatcaaggcacaacaactacaacaacttgtgctaggaaaccttgctgcctactctcagcaacagcagtttcttccattcaaccaactggctgcattgaactctgctgcttatttgcaacaacaactaccattcagtcagc

SEQ ID NO: 321890 - DNA, 363 bp, Zea mays
gcggcggctgcggctgccagccaccgccgtcggttcatctaccgccgccggtgcatctgccacgtccgggtcacctgccacctccggtgcatctcccaccgccggtccacctgccgccgccggtccacctgccaccgccggtccatgtgccgccgccggttcatctgccgccgccaccatgccactaccctactcaaccgccccggcctcagcctcatccccagccacacccatgcccgtgccaacagccgcatccaagcccgtgccagctgcagggaacctgcggcgttggcagcaccccgatcctgggccagtgcgtcgagttcctgaagcatcagtgcagcccgacggcgacgccctact

SEQ ID NO: 321891 - DNA, 330 bp, Zea mays
attttgagcattcagaaacacaccaagcgaatcgcactagcaacaacctaacaacaatggctacgaagagattatccctccttgcgcttcttgcgctttttgcgagcgcaacaaatgcgtccattattccacaatgctcacttgctcctagttccattattccacagttcctcccaccagttacttcaatggccttcgaacacccagctgtgcaagcctataggctacaacaagcgattgcggcaagcgtcttacaacaaccaattgcccaattgcaacaacaatccttggcacatctaacaatacaaaccaatcgaacgcaacagcaac

SEQ ID NO: 321892 - DNA, 246 bp, Zea mays
catcttgctatgacaaaacaagtacacttgtaccaacatcacattattgtcgtagccctataggagatggattattagttatgattcaatagtagaaatatataggatgatgcaagttacctcatagaactaagaagttatattctcaattatattgagatcagatctgggatgcgaactatctagaataagctgagataagacataaggggcaatataatatggtgatgttgtcacttgaagcct

SEQ ID NO: 321893 - DNA, 424 bp, Zea mays
cccacgcgtccgcccacgcgtccgattggcacaaaacatcagggcacaacaactacaacaactggtgctagcaaaccttgctgcctactctcagcaacagcagtttcttccattcaaccaactagctgcattgaactctgcttcttatttgcaacaacaacaactaccattcagccagctacctgctgcctacccccagcaatttcttccattcaaccaactggcagcattgaactctcctgcttatttacagcagcaacaactactaccattcagccagctagctggtgtgagccctgctaccttcttgatacaaccacagttgttgccgttctaccagcacgctgcgcctaacgctggcaccctcttacaactgcaacaaattgctgccattcaaccaacttgctttgacaaacccagcagc

SEQ ID NO: 321894 - DNA, 439 bp, Zea mays
gcaacatagaaagcacaatagtgtaccaacaatggcagccaaaatattttgcctccttatgctcgttggtatttctgcaagtgctgctacggcgaccattttcccgcaatgctcacaagctcctatagcttcccttcttcccccgtacctctcaccagcggtgtcttcggtatgtgaaaacccaattcttcaaccctacaggatccaacaggcaatcgcagctggcatcttacctttatcacccttgttcctccaacaatcatcagccctattacagcagttacctttggtgcatttattggcacaaaacatcaaggcacaacaactacaacaacttgtgctagcaaaccttgctgcctactctcagcaacagcagtttcttccattcaaccaactagctgcattgaactctgcttcttatttgcaacaacaacaacta

SEQ ID NO: 321895 - DNA, 452 bp, Zea mays
agaccaactagcaacatagaaagcacaatagtgtaccaacaatggcagccaaaatattgtgcctgcttatgctccttggtctttctgcaagtgctgctacggcgaccattttcccgcaatgctcgcaagctcctatagcttcccttcttcccccgtacctctcaccagcggtgtcttcggtatgtgaaaacccaattcttcaaccctacaggatccaacaggcaatcgcagctggcatcttacctttatcacccttgttcctccaacaatcatcagccctattacaacagttacctttggtgcatttattggcacaaaacatcagggcacaacaactacaacaacttgtgctagcaaaccttgctgcctactctcagcaacagcagtttcttccattcaaccaactaagttcattgaactctgcttcttatttgcaacaacaacaactacca

SEQ ID NO: 321896 - DNA, 128 bp, Zea mays
caacaacccatcattggtggtgccctcttttagattgcttatgagttatacttcaataatgaagctttttggatgatgtttgtggctttccagaaataagaaagtacatttgtaaaaaaatacaatac

SEQ ID NO: 321897 - DNA, 445 bp, Zea mays
atggagaccaactagcaacatagaaagcacaatagtgtaccaacaatggcagccaaagtatggtgcctccttatgctccttggtctttctgcaagtgctgctacggcgaccattttcccgcaatgctcgcaagctcctatagcttcccttcttcccccgtacctctcaccagcggtgtcttcggtatgtgaaaacccaattcttcaaccctacaggatccaacaggcaatcacagctggcatcttacctttatcacccttgttcctccaacaatcatcagccctattacatcagttacctttggtgcatttattggcacaaaacatcagggcacaacaactacaacaacttgtgctagcaaaccttgctgcctactctcagcaacagcagtttcttccattcacccaactaactgcattgaactctgcttcttatttgcaacaac

SEQ ID NO: 321898 - DNA, 427 bp, Zea mays
  unsure (1)..(427): unsure at all n locations
catagaaagcacaatattgtaccaataatggcagccaaaatattttgcctcattatggtccttggtctttctgcaagtgctgctacggcgagcattttcccgcaatgctcacaagctcctatagcttcccttcttcccccatacctctcaccagcgatgtcttcagtatgtgaaaatccaattcttctaccctacaggatccaacaggcaatcgcagcaggcatcttacctttatcacccttgttcctccaacaatcatcagccctattacagcagttacctttggtgcatttattggcacaaaacatcagggcacaacaactacaacaactcgtgctagcaaaccttgctgcctactctcagcaacagcagttacctttggtgcatttgttggcacanaacatcagggcacaacaactacaacaac

SEQ ID NO: 321899 - DNA, 453 bp, Zea mays
  unsure (1)..(453): unsure at all n locations
ccaactagcaacatagaaagcacaatagtgtaccaacaatggcagccaaaatattttgcttgcttatgctccttggtctttctgcaagtgttgctaccgcaaccattttcccacaatgctcacaagctcctatagcttcccttcttcccccatacctctcaccagcggtgtcttcaatgtgtgaaaccccaattgttcaaccctacaggatccaacaggcaatcgcaacaggcatcttaccattatcacccttgttcctccaacaaccgtcagccctattacagcagttacctttggtccatttggtggcacaaaacatcagggcacaacaactacaacaacttgtgctagcaaaccttgctgcatactctcagcaacatcangttcttccatccacccaacttgctgcattgaactctgctgcttatttgcaacaacaattaccattcagcc

SEQ ID NO: 321900 - DNA, 443 bp, Zea mays
ctccggggttcggtttcgtgggtgggcggatcgagatggcggcgtcggatggggagggccgctgcttcgtcggcggcctcgcctgggccacggacgaccactccctccacaacgccttcagcacctacggcgaggtcctcgagtccaagatcatcctcgatcgggagacgcagaggtcccgcggcttcggcttcgtcaccttctccacggaggaggcgatgcggaacgccatcgagggcatgaacggcaaggagctggacggccgcaacatcaccgtcaacgaggcccagtcccgcggcggccgtggaagcggcggcggcggctacggtggtggccgtggaggcggcggctacggcggtggcgggcgccgtgatggctgcggcggctacagccgttggcgcggcggctacggtggcggcagtggctacggtggtggtggtggc

SEQ ID NO: 321901 - DNA, 82 bp, Zea mays
ctttcttatgagttatagttcaataataaatctaaaagagggatgttcgtggcttcccagaaataagaaggtacatttctag

SEQ ID NO: 321902 - DNA, 404 bp, Zea mays
cccacgcgtccgcgctgaaaaggacaaggcgttgtgtttttctgataaggaaaatcgaatgctaaaggaaaagttgtcaacactagaaaaagagcattttatccaaaataatcagcaagatctcgagctaatcatgcaagaaagtgaggaaatggttctccgtgatattgagatggagccacaaagatcatgtgagatttctgatcgagatatacagtacgaagggctcatcaagctgaatcaggttttagaaattgcctcaaccactgtaaaagaaatagaaacaaaaaggttgaatctcagtgatatccaaggtaaaagagagcaagaaaaacagctagaatgcatcctggtatttatcatgaattggtcaaaggaattaatgagactgaacatagagtgcc

SEQ ID NO: 321903 - DNA, 393 bp, Zea mays
cagaaacacaccaagcgaagcgcactagcaacgacctaacaacaatggctaccaagagattagccctccttgcgcttcttgccctttttgtgagcgcaacaaatgcgttcattattccacaatgctcacttgctcctagtgccattattccacagttcctcccaccagttacttcaatgggcttcgaacacctagctgtgcaagccaacatgcaacaacaagcgcttgcggcgagcgtcttacaacaaccaattgcccaattgcaacaacaatccttgccacatctaacaatacaagccatcacaacgcaacagcaacaacagttcctaccagcactgagccacctagccatggggaacccttgccgctacttgcaagagcagctgcttgcat

SEQ ID NO: 321904 - DNA, 433 bp, Zea mays
cagttacctttggtgcatttattggcacaaaacatcagggcacaacaactacgagacagcttgtgctagcaaaccttgctgcctactctcagcaacagcagtttcttccattcaaccaactaggttcattgaactctgcttcttatttgcaacaacaacaactaccattcagccagctacctgctgcctacccccagcaatttcttccattcaaccaactagcagcattgaactctcctgcttatttacagcagcaacaactactaccattcagccagctagctggtgtgagccctgctaccttcttgacacaaccacagttgttgccgttctaccagcacgttgcgcctaacgctggcaccctcttacaactgcaacaattgctgccattcaaccaacttggctttgacatacccagcagtgttctaccaac

SEQ ID NO: 321905 - DNA, 437 bp, Zea mays
  unsure (1)..(437): unsure at all n locations
gcaaagcggcagtgcgtagagaggatcgtcgaacagaacagcatgaagatggggatggttctcgtcgtgtgcctggctctgtcagctgccagcgcctctgcaatgcagatgccctgcccctgcgcggggctgcagggcttgtacggcgctggcgccggcctgacgacgatgatgggcgccggcgggctgtacccctacgcggagtacctgaggcagccgcagtgcagcccgctggcggcggcgccctactacgccgggtgtgggcagccgagcgccatgttccagccgctccggcaacagtgctgccagcagcagatgaggatgatggacgtgcagtccgtcgcgcagcagctgcagatgatgatgcagctngagcgtgccgctgccgncagcagcagcctgtacgagccagctctgatgcagcagcagcagcagct

SEQ ID NO: 321906 - DNA, 387 bp, Zea mays
cagaaacacaccaagcgaagcgcactagcaacgacctaacaccaatggctaccaagagattagccctccttgcgcttcttgcccttttagtgagcgcaacaaatgcgttcattattccacagtgctcacttgctcctagtgccattattccacagttcctcccaccagttacttcaatgggcttcgaacatccagccgtgcaagcctacaggctacaactagcgcttgcggcgagcgccttacaacaaccaattgcccaattgcaacaacaatccttggcacatctaaccctacaaaccattgcaacgcaacaacaacaacaacaacagtttctgccatcactgagccacctagccgtggtgaaccctgtcacctacttgcaacagc

SEQ ID NO: 321907 - DNA, 403 bp, Zea mays
agaccaactagcaacatagaaagcacaatagtgtaccaacaatggcagccaaaatgtgctgcctccttatgctccttggtctttctgcaagtgctgctacggcgaccattttcccacaatgctcacaagctcctatagcttcccttcttcccccgtacctctcaccagcggtgtcttcggtatgtgaaaacccaattcttcaaccctataggatccaacaggcaatcgcagctggcatcttacctttatcacccttgttcctccaacaatcatcagccctattacagcagttacctttggtgcatttattggcacataacatcaaggcacaacaactacaacaacttgtgctagcaaaccttgctgcctactctcaacaacaacagtatcttccattcaacca

SEQ ID NO: 321908 - DNA, 428 bp, Zea mays
acatagaaagtggaatacagtagcaacaatagagcaacaatggcggccaagggattttccatccttatgctccttgctctttctgcatgtgttgctaacgcgaccatttttcctcaatactcacaagctcctatagctgcccttcttcccccataccttccatcaatgaccgcttcagtttgtgaaaacccagcccttcaaccctacaggctccaacaagcaatcgcaacaagcaacttacctttatcacccctgttctttcaacaatcgccagccctatctttggtgcagtcattggtacaaaccatcagggcacaacagctgcaacaactcgtgctaccagtgatcagccaagtagctctggcaaacctttctccctactctcagcaacaacaatttcttccattcaaccaactgtctacactgaa

SEQ ID NO: 321909 - DNA, 396 bp, Zea mays
attttgagcattcagaaacacaccaagcgaagcgcactagcaacaacctaacaacagtggctaccaagatattatccctccttgcgcttcttgcgctttttgcgagcgcaacaaatgcgtccattattccacaatgctcacttgctcctagttccattattccacagttcctcccaccagttacttcaatggccttcgaacacccagctgtgcaagcctataggctacaacaagcgattgcggcgagcgtcttacaacaaccaattgcccaattgcaacaacaatccttggcacatctaacaatacaaaccatcgcaacgcaacagcaacaacagttcctaccagcactgagccacctagccatggtgaaccctgtcggctacttgcaacagcagc

SEQ ID NO: 321910 - DNA, 449 bp, Zea mays
  unsure (1)..(449): unsure at all n locations
ggcagtgcgtagagaggatcgtcgaacagaacagcatgaagatggtcatcgttctcgtcgtgtgcctggctctgtcagctgccagcgcctctgcaatgcagatgccctgcccctgcgcggggctgcagggcttgtacggcgctggcgccggcctgacgacgatgatgggcgccggcgggctgtacccctacgcggagtacctgaggcagccgcagtgcagcccgctggcggcggcgccctactacgccgggtgtgggcagccgagcgccatgttccagccgctccggcaacagtgctgccagcagcagatgaggatgatggacgtgcagtccgtcgcgcagcagctgcagatgatgatgcagcttgagcgtgccgctgccgncagcagcagcctgtacgagccagctctgatgcagcagcagcagcagctgctggcagcccagggtctc

SEQ ID NO: 321911 - DNA, 196 bp, Zea mays
acgaggacatcgactaaaggaacatcaatttaaacagcatgaataaaaacattggggaaggtctgatcctaacagatctatcatctatgcaccgctatagctaacatgctctatttatactctcattctactataattttacttgcactaacacatatactaacatcacttattgatctagagtattcaaacttac

SEQ ID NO: 321912 - DNA, 376 bp, Zea mays
gagaccaactagcagcatagaaagcacaatactgtaccaacaatggcacccaaaatattttgcctacttatgctccttggtctttctgcaagtgctgctacggcgaccattttcccgcaatgctctcaagctcctatagcttcccttcttcccccgtacctctcaccagcggtgtcttcactatgtgaaaacccaattcttcaaccctacacgatccaacacgcaatcgcacctggcatattacctctatcacacttgttcctacaacaatcatcagccctattacaacagttacctttggtgcatatattggcacaaaacatcagggcacaacatctacaacaacttgagctagcaaaccttgctggctactctc

SEQ ID NO: 321913 - DNA, 354 bp, Zea mays
  unsure (1)..(354): unsure at all n locations
gagaccaactagcaacatagaaagcacaatagtgtaccaacaatggcagccaaaatattttgcctccttatgctccttggtctttctgcaagtgctgctacggcgaccattttcccgcaatgctcgcaagctcctatagcttcccttcttcccccgtacctctcaccagcggtgtcttcggtatgtgaaaacccaattcttcaaccctacaggatccaacaggcaatcgcagctggcatcttacctttatcacccttgttcctccaacaatcatcagccctattacaacagttacctttggtgcatttattggcacanaacatcagggcacaacaactacaacaacttgtgcta

SEQ ID NO: 321914 - DNA, 446 bp, Zea mays
  unsure (1)..(446): unsure at all n locations
attgagaccaactagcaacatagaaagcacaatattgtaccaataatggcagccaaaatattttgcctcattatgctccttggtctttctgcaagtgctgctacggcgagcattttcccgcaatgctcacaagctcctatagcttcccttcttcccccatacctctcaccagcgatgtcttcagtatgtgaaaatccaattcttctaccctacaggatccaacaggcaatcgcagcaggcatcttacctttatcacccttgttcctccaacaatcatcagccctattacagcagttacctttggtgcatttattggcacanaacatcagggcacaacaactacaacaactcgtgctagcaaaccttgctgcctactctcagcaacagcagttacctttggtgcatttgttggcacataacatcanggcacaacaactacaacaact

SEQ ID NO: 321915 - DNA, 410 bp, Zea mays
gaccattagctttatctactccagagcgcagaagaacccgatcgacaccatgagggtgttgctcgttgccctcgctctcctggctctcgctgcgagcgccacctccacgcatacaagcggcggctgcggctgccagccaccgccgccggttcatctaccgccgccggtgcatctgccacctccggttcacctgccacctccggtgcatctcccaccgccggtccacctgccgccgccggtccacctgccaccgccggtccatgtgccgacgccggttcatctgccgccgccaccatgccactaccctactcaaccgccccggcctcagcctcatccgcagccacacccatgcccgtgccaacagccgcatccaagctcgtgccagctgcagggaacctgcggcgttggca

SEQ ID NO: 321916 - DNA, 394 bp, Zea mays
atcgcagcaagcaacatacctttatcgcccttgttgtttcaacaatcaccaggcctggctttggtgcagtcattggtacaaaccatcagggcacaacagctgcagcaactcgtgctacctgtgatcaaccaagtagctctggcaaacctttctccctactctcagcaacaacaatttcttccattcaaccaactgtctacactgaaccctgctgcttatttgcagcaacaactattaccatttagccagctagctactgcctactctcagcaacaacaacttcttccatttaaccaattggccgcactgaaccccgctgcttatttgcagcagcaaatactactgccatttagcgagctagctgcagcaagtcgtgccttcttcttgacacagc

SEQ ID NO: 321917 - DNA, 441 bp, Zea mays
caactagcaacatagaaagcacaatagtgtaccaacaatggcagccaaaatattggggctccttatgctccttggtctttctgcaagtgctgctacggcgaccattttcccgcaatgctcgcaagctcctatagcttcccttcttcccccgtacctctcaccagcggtgtcttcggtatgtgaaaacccaattcttcaaccctacaggatccaacaggcaatcgcagctggcatcttacctttatcacccttgttcctccaacaatcatcagccctattacaacagttacctttggtgcatttattggcacaaaacatcagggcacaacaactacaacaacttgtgctagcaaaccttgctgcctactctcagcaacagcaatttcttccattcaaccaactaggttcattgaactctgcttcttatttgcaacaacaaca

SEQ ID NO: 321918 - DNA, 415 bp, Zea mays
gctgcattgaactctgctgcttatttgcaacaacaattaccattcagccagctaggggctggctacccccagcaatttcttccattcaaccaactagcagcattgaactctgctgcttatttacagcagcaacaactactaccattcagccagctagctgatgtgagccctgctgccttcttgacacaacaacagttgttgccgttctacctgcacgctatgcctaacgctggcaccctcttacaactgcaacaattgctgccattcaaccaacttgctttgacaaacccaacagtgttctaccaacaacccatcattggtggtgcccttttttagattgcttatgaattatagttcaataatgaagttttttggatgatgcttgtggcgttccaaaaataaaaagtacattttt

SEQ ID NO: 321919 - DNA, 446 bp, Zea mays
gaaagcacaatagtgtaccaacaatggcagccaaaatattttgcctccttatgctccttggtctttctgcaagtgctgctacggcgaccattttcccgcaatgctcgcaagctcctatagcttcccttcttcccccgtacctctcaccagcggtgtcttcggtatgtgaaaacccaattcttcaaccctacaggatccaacaggcaatcacagctggcatcttacctttatcacccttgttcctccaacaatcatcagccctattacatcagttacctttggtgcatttattggcacaaaacatcagggcacaacaactacaacaacttgtgctagcaaaccttgctgcctactctcagcaacagcagtttcttccattcaaccaactagctgcattgaactctgcttcttatttgcaacaacaacaactaccattcagccagcta

SEQ ID NO: 321920 - DNA, 441 bp, Zea mays
caccaaatcaaatctgcaacatcaattatctaactccaaaaaccatgaagctggtgcgtgtggttcttgctttcattgctttagtatcaagtgtttcttgtacacagacaggcggctgcagctgtggtcaacaacaaagccatgagcagcaacatcatccacaacaacatcatccacaaaaacaacaacatcaaccaccaccacaacatcaccagcagcagcaacaccaacaacaacaagttcacatgcaaccacaaaaacatcagcaacaacaagaagttcatgttcaacaacaacaacaacaaccgcagcaccaacaacaacaacaacaacaacagcaccaacaacaacatcaatgtgaaggccaacaacaacatcaccaacaatcacatggccatgtgcaacaacacgaacagagccatgagcaacaccaaggacaga

SEQ ID NO: 321921 - DNA, 239 bp, Zea mays
ggattccgggtggagacacgcgtgcgcagactagcgacttgcatggctctacacgtgtcagcagcgctttagaagcatgactgtgaccgtcctgaccgttggtcctgctgcaaccaggcagcactattactagaccgtacctggaaggccatttcgagcagctgagcatgagagaccaacctgctagacaactattgcatagacgaggtgctgactactgctcaggagcatcgcgtaca

SEQ ID NO: 321922 - DNA, 375 bp, Zea mays
aaagcacaatagtgtaccaacaatggcagccaaaatattttgcctccttatgctccggggtatttctgcaagtgctgctacggcgaccattttcccgcaatgctcacaagctcctatagcttcccttcttcccccgtacctctcaccagcggtgtcttcggtatgtgaaaacccaattcttcaaccctacaggatccaacaggcaatcgcagctggcatcttacctttatcacccttgttcctccaacaatcatcagccctattacagcagttacctttggtgcatttattggcacaaaacatcagggcacaacaactacaacaacttgtgctagcaaaccttgctgcctactctcagcaacagcagtttctttc

SEQ ID NO: 321923 - DNA, 403 bp, Zea mays
atgggcttcgaacattcagccgtgcaagcctacaggctacaactagcgcttgcggcgggcgccttacaacaaccaattgcccaattgcaacaacaatccttggcacatctaaccctacaaaccattgcaacgcaacaacaacaacaacaacagtttctgccatcactgagccacctagccgtggtgaaccctgtcacctacttgcaacagcagctgcttgcatccaacccacttgctctggcgaacgtagctgcataccagcaacaacaacagctgcaacagtttatgccagtgctcagtcaactagccatggtgaaccctgccgtctacctacaactactttcatctatcccgctcgcggtgggcaatgcacctacgtacctacaacaacagttgctgcaac

SEQ ID NO: 321924 - DNA, 408 bp, Zea mays
gaccaactagcaacatagaaagcacattagtgtaccaacaatggcagccaaaaggtggggcttccttatgctccttggtctttctgcaagtgttgctaccgcaaccattttcccacaatgctcacaagctcctatagcttcccttcttcccccatacctctcaccagcggtgtcttcaatgtgtgaaaacccaattgttcaaccctacaggatccaacaggcaatcgcaacaggcatcttaccattatcacccttgttcctccaacaaccgtcagccctattacagcagttacctttggtccatttggtggcacaaaacatcagggcacaacaactacaacaacttgtgctagcaaaccttgctgcatactctcagcaacatcagtttctttcatttaaccaactggc

SEQ ID NO: 321925 - DNA, 359 bp, Zea mays
cagtagtgtaccaacaatggcagccaaaatattttgcttccttatgctccttggtcggtctgcaagtgttgctaccgcaaccattttcccacaatgctcacaagctcctatagcttcccttcttcccccatacctctcaccagcggtgtcttcaatgtgtgaaaacccaattgttcaaccctacaggatccaacaggcaatcgcaacaggcatcttaccattatcacccttgttcctccaacaaccgtcagccctattacagcagttacctttggtccatttggtggcacaaaacatcagggcacaacaactacaacaacttgtgctagcaaaccttgctgcatactctcagcaacatc

SEQ ID NO: 321926 - DNA, 328 bp, Zea mays
gctagctacaacaagccccacttcctttttgaaacaacaaccaacttgctttgacaagactcaacagtgttctaccaacaacccatcattggtggtgccctcttttagattgcttatgagttatagttcaataatgaagttttttggatgatgtttgtggcgtcccagaaataagaaagtacatttctagaaaaaaaaaaaaaaaaaaaaaaaaaaaaaaaaaataaaaaaaaaaaataaaaaaaaagaaaaaaaaaaataaaaaaaaaacataagaaaaattaaaaagagggaaaacataaggttttcaacaactacaacaacttgt

SEQ ID NO: 321927 - DNA, 439 bp, Zea mays
  unsure (1)..(439): unsure at all n locations
ctggcatcttacctttatcacccttgttcctccaacaatcatcagccctattacatcagttacctttggtgcatttattggcacaaaacatcagggcacaacaactacaacaacttgtgctagcaaaccttgctgcctactctcagcaacagcagtttcttccattcaaccaactagctgcattgaactctgcttcttatttgcaacaacaacaactaccattcagccagctacctgctgcctacccccagcaatttcttccattcaaccaactggcagcattgaactctcctgcttatttacagcagcaacaactactaccattcagccagctagctggtgtgagccctgctaccttcttgatacaaccacagntgttgccgttctaccagcacgctgcgcctaacgctggcacccttttacaactgcaacaattgct

SEQ ID NO: 321928 - DNA, 375 bp, Zea mays
  unsure (1)..(375): unsure at all n locations
ctttatcgcccttgttgtttcaacaatcgccagccctatctttggtgcagtcattgggacagaccatcagggcacaacagctgcagcaactcgtgctacctctgatcaaccaagtagctctggcaaacctttctccctactctcagcaacaacaatttcttccattcaaccaactgtctacactgaaccctgctgcttatttgcagcaacaactattaccatttagccagctagctactgcctactctcagcaacaacaacttcttccatttaaccaattggccgcactgaaccccgctgcttatttgcagcagcanatactactaccatttagccagctagctgcagcaaaacgtgctttcctcttgacacagc

SEQ ID NO: 321929 - DNA, 396 bp, Zea mays
gcaacatagaaagcacaatagtgtaccaacaatggcagccaaaatattttgcctccgtatgctccttggtctttctgcaagtgctgctacggcgaccattttcccgcaatgctcgcaagctcctatagcttcccttcttcccccgtacctctcaccagcggtgtcttcggtatgtgaaaacccaattcttcaaccctacaggatccaacaggcaatcacagctggcatcttacctttatcacccttgttcctccaacaatcatcagccctattacatcagttacctttggtgcatttattggcacaaaacatcatggcacaacaactacaacaacttgtgctagcaaaccttgctgcctactctcagcaacagcagtttcttccattcaaccaact

SEQ ID NO: 321930 - DNA, 317 bp, Zea mays
agggcccgggcgtcgtgcctcgtgggtcccacgcgccaccccgcggtccccgactgggcggggcgatccgacgggcatgagactcccgccgcggtgcgcatgggtcacggcgccggatcgggttcggctgcagtgggtacgaagttcggcacgccccggtctaccgaggagccgtggcaccacagggagctctggtctattcgtgcgggtaaagctgcccagacagcgacgtgcgactgggacattctgaggccagcagacggtggacgagcattggacgggacgcacggcactttgttgcgataacgatgaagctg

SEQ ID NO: 321931 - DNA, 89 bp, Zea mays
ctcttttagatttcttatgagttatagttcaataataaagttttttgtctgatgtttgtggcttcccagaaatgagaaagtacatttct

SEQ ID NO: 321932 - DNA, 349 bp, Zea mays
cccacgcgttcgaccacgcgtacgcccacgcgtacgaccacgcgttcgtccttgtcgtgatccgtccaggggagcaaacaagcaagcaagtaaacgggcgaggagctggatagaggccgacgactcgaagcaaccgccgatcggagccgcggctgaggaggaggaacaagctcgagattgtgggtctcggctgcggcagcacggcgcgtgcagagcacgttgtggccaacgcctgacgagagacggagtacgtgcgccgtctgcaccgccactcgccggccgagcaccattgtacttgcaccctcgtcaagcacattaaggcgcccgtccaccttgtgtgggagctggt

SEQ ID NO: 321933 - DNA, 324 bp, Zea mays
cgcaatgctcgcaagctcctatagcttcccttcttcccccgtacctctcaccagcggggtcttcggtatgtgaaaacccaattcttcaaccctacaggatccaacaggcaatcacagctggcatcttacctttatcacccttggtccttcaacaatcatcaaccctattacatcagttacctttggtgcatttattggcacaaaacatcagggcacaacaactaccacaacttgtgctagcaaaccttgctgcctacttttagcaacagcagtttcttccattcaaccaactaactgcattgaactctgcttcttatttgcaac

SEQ ID NO: 321934 - DNA, 51 bp, Zea mays
tcttgcgcgtacgcgtacacagccccgatccgaatcgtcctcctcgcgagc

SEQ ID NO: 321935 - DNA, 416 bp, Zea mays
gcaacatagaaagcacaatagtgtaccaacaatggcagccaaaatattttgcttgcttatgctccttggtctttctgcaagtgttgctaccgcaaccattttcccacaatgctcacaagctcctatagcttcccttcttcccccatacctctcaccagcggtgtcttcaatgtgtgaaaccccaattgttcaaccctacaggatccaacaggcaatcgcaacaggcatcttaccattatcacccttgttcctccaacaaccgtcagccctattacagcagttacctttggtccatttggtgggcacaaacatcagggcacaacaactacaacaacttgtgctagcaaaccttgctgcatactctcagcaacatcagtttcttcccattcaaccaactggctgcattgaactctgct

SEQ ID NO: 321936 - DNA, 453 bp, Zea mays
  unsure (1)..(453): unsure at all n locations
attgagaccaactagcaacatacaaagcacaatagtgtaccaacaatggcagctaaaatattttgcctgcttaggctccttggtctttctgcaagtgctgctacggcgaccattttcccacaatgctcacaagctcctatagcttcccttcttcccccgtacctctcaccaacggtgtcttcggtatgtgaaaacccaattcttcaaccctacaggatccaacaggcaatcgcagctggcatcttacctttatcacccttgttcctccaacaatcatcagccctattacagcagttacctttggtgcatttattggcacanaacatcaaggcacaacaactacaacaacttgtgctagcaaaccttgctgcctactctcagcaacagcagtttcttccattcaaccaactagctgcattgaactctgcttcttattngcaacancaacaacta

SEQ ID NO: 321937 - DNA, 425 bp, Zea mays
tgacacctgcggttcacctgccacctgcggtgcatctcccaccgccggtccacctgccgacgccggtccacgtgccaccgcgggtccatgtgccgccgccggttcatctgccgccgccaccatgccactaccctactcaaccgccccggcctcagcctcatccccagccacacccatgcccgtgccaacagccgcatccaagcccgtgccagctgcagggaacctgcggcgttggcagcaccccgatcctgggccagtgcgtcgagtttctgaggcatcagtgcagcccgacggcgacgccctactgctcgcctcagtgccagtcgatgcggcagcagtgttgccagcagctcatgcaggtggagccgcagcaccggtaccaggcgatcttcggctaggtcctccagtccatcctgcagcagcag

SEQ ID NO: 321938 - DNA, 454 bp, Zea mays
  unsure (1)..(454): unsure at all n locations
cggacgcgtgggtgaaaacccagctcttcaaccatataggcttcaacaagcaatcgcagcaagcaacatacctttatcgcccttgttgtttcaacaatcaccagccctatctttggtgcagtcattggtacaaaccatcagggcacaacagctgcagcaactcgtgctacctgtgatcaaccaagtagctctggcaaacctttctccctactctcagcaacaacaatttcttccattcaaccaactgtctacactgaaccctgctgcttatttgcagcaacaactattaccatttagccagctagctactgcctactctcagcaacaacaacttcttccatttaaccaattggccgcactgaaccccgctgcttatttgcagcagcaaatactactgccatttagcgagctagctgcagcaagtcgtgcttncttcttgacacagcaacagttg

SEQ ID NO: 321939 - DNA, 460 bp, Zea mays
gtcgaccagcgtccgcaccatgaagtgctgatcgttgcccttgctctcctggcgctcgctgcgagcgcggcctccagtacaagcggcggctgtggctgccagacaccaccgtttcatctaccgcctccgttctatatgccgcctccgttctatctgccgccgcagcagcagccgcagccatggcaataccccactcaaccaccgcagctaagcccgtgccagcagttcggatcctgcggcgtcggcagcgtcggcagcccgttcctgggccagtgcgtcgagttcctgaggcaccagtgcagcccggcggcgacgccctacggctcgccacagtgccaggcgctgcagcagcagtgctgccaccagatcaggcaggtggagccgctgcaccggtaccaggcgacatacggtgtggtcctgcagtccttcctgcagcagcagccgcagggcgagctcgcgg

SEQ ID NO: 321940 - DNA, 381 bp, Zea mays
tttcagcattcaaaaacacaccaagcgaagcgcactagcaacgacctaacaccaatggctaccaagatattagccctccttgcgcttcttgcccttttagtgagcgcaacaaatgcgttcattattccacagtgctcacttgctcctagtgccattattccacagttcctcccaccagttacttcaatgggcttcgaacatccagccgtgcaagcctacatgctacaactagcgcttgcagcgagcgccttacaacaaccaattgcccaattgcaacaacaatccttggcacatctaaccctacaaaccattgcaacgcaacaacaacaacaacaacagtttctgccatcactgagccacctagcccgtgtgaaccctgtc

SEQ ID NO: 321941 - DNA, 471 bp, Zea mays
  unsure (1)..(471): unsure at all n locations
gccacgcgtncgcagaaacacaccaagcgaaacacattagcaacaacctaacaacagtggctaccaagatattatccctccttgcgcttcttgcgctttttgcgagcgcaacaaatgcgttcattattccacaatgctcacttgctccaagttccattattacacagttccttccaccagttacttcaatgggcttcgaacacccagctgtgcaagcctataggctacaacaagcaattgcggcgagcgtcttacaacaaccaatttcccagttgcaacaacaatccttggcacatctaacaatacaaaccatcgcaacgcaacagcaacaacaattcctaccagcactgagccacctagccatggtgaaccctgccgnctacttgcaacagcangtgcttgcatcaaacccacttgctctggcaaacgtagttgcaaaccagccacaacaacagctgcaacagtttctgc

SEQ ID NO: 321942 - DNA, 454 bp, Zea mays
  unsure (1)..(454): unsure at all n locations
cagccctattacatcagttacctttggtgcatttattggcacaaaacatcagggcagaacaactacgaacaacttgtgctagcaaaccttgctgcctactctcagcaacagcagtttcttccattcaaccaactagctgcattgaactctgcttcttatttgcaacaacaacaactaccattcagccagctacctgctgcctacccccagcaatttcttccattcaaccaactggcagcattgaactctcctgcttatttacagcagcaacaactactaccattcagccagctagctggtgtgagccctgctaccttcttgatacaaccacagttgttgccgttctaccagcacgctgcgcctaacgctggcaccctcttacaactgcaacaattgctgccattcaaccaacttgctntgacaaacccagcagcgttctaccaacaacccatca

SEQ ID NO: 321943 - DNA, 460 bp, Zea mays
acatagaaagtggaatccagtagcaacaatagagcaacaatggcgaccaaggtattttccgtccttatgctccttgctctttctacatgtgttgctaacgcgacaattttccctcaatgctcacaagctcctatagcttcccttcttcccccataccttccatcaattatagcttcaatatgtgaaaacccagctcttcaaccatataggcttcaacaagcaatcgcagcaagcaacatacctttatcgcccttgttgtttcaacaatcgccagccctatctttggtgcagtcattggtacaaaccatcagggcacaacagctgcagcaactcgtgctacctctgatcaaccaagtagctctggcaaacctttctccctactctcagcaacaacaatttcttccattcaaccaactgtctacactgaaccctgctgcttatttgcagcaacaactattac

SEQ ID NO: 321944 - DNA, 455 bp, Zea mays
  unsure (1)..(455): unsure at all n locations
gcaattagctcatcgactccagattggagaactcgacaccatgaaggtgctgatcggtgcccttgctctcctggcgctcgctgcgagcgccgcctccagtacaagcggcggctgtggctgccagacaccaccgtttcatctaccgcctccgttctatatgccgcctccgttctatctgccgccgcagcagcagccgcagccatggcaataccccactcaaccaccgcagctaagcccgtgccagcagttcggatcctgcggcgtcggcagcgtcggcagcccgttcctgggccagtgcgtcgagttcctgaggcaccagtgcagcccggcggcgacgccctacggctcgccacagtgccaggcgctgcagcagcagtgctgccaccagatcaggcaggtggagccgctgcaccggtaccaggcgacatacggtgtgggcctgcagtccttnctgc

SEQ ID NO: 321945 - DNA, 260 bp, Zea mays
cggattctaatcttggacgggacaatagagctgcatcactaggagacaagatattttggctccttatgctcctctggctggatctggcaatgctaaatacagcaacgcctcatacgcgcagcgatcagaaagctgcacacttgtcgagcttgttgacgtctggacgaatgacgcccaacagtcatgctgtatggtcaaaaccaccatggaacactgctactggatacgactcgctaatcacatctggcatcttaccttta

SEQ ID NO: 321946 - DNA, 431 bp, Zea mays
gaaagcacaatagtgtaccaacaatggcagccaaaatattttgcctccttatgctgcgtggtctttctgcaagtgctgctacggcgaccattttcccgcaatgctcgcaagctcctatagcttcccttcttcccccgtacctctcaccagcggtgtcttcggtatgtgaaaacccaattcttcaaccctacaggatccaacaggcaatcacagctggcatcttacctttatcacccttgttcctccaacaatcatcagccctattacatcagttacctttggtgcatttattggcacaaaacatcagggcacaacaactacaacaacttgtgctagcaaaccttgctgcctactctcagcacagcaagttctccattcacccactagctgcatgaactctgttcttaattgaacaacaacactaccattca

SEQ ID NO: 321947 - DNA, 434 bp, Zea mays
gaaagcacaatagtgtaccaacaatggcagccaaaatattttgcttccttatgctccttggtctttctgcaagtgttgctaccgcaaccattttcccacaatgctcacaagctcctatagcttcccttcttcccccatacctctcaccagcggtgtcttcaatgtgtgaaaccccaattgttcaaccctacaggatccaacaggcaatcgcaacaggcatcttaccattatcacccttgttcctccaacaaccgtcagccctattacagcagttacctttggtccatttggtggcacaaaacatcagggcacaacaactacaacaacttgtgctagcaaaccttgctgcatactctcagcaacatcagtttcttccattcaaccaactggctgcattgaactctgctgcttatttgcaacaacaattaccattc

SEQ ID NO: 321948 - DNA, 451 bp, Zea mays
attgagaccagcaagcaacatagaaagtagaatccattagcaacaatagagcaacagtggcgaccaagatattttccctccttatgctccttgctctttctacatgtgttgctaacgcgacaattttccctcaatgctcacaagctcctatagcttcccttcttcccccataccttccatcaattatagcttcagtatgtgaaaacccagctcttcaaccatataggcttcaacaagcaatcgcagcaagcaacatacctttatcgcccttgttgtttcaacaatcaccagccctatctttggtgcagtcattggtacaaaccatcagggcacaacagctgcagcaactcgtgctacctgtgatcaaccaagtagctctggcaaacctttctccctactctcagcaacaacaatttcttccattcaaccaactgtctacactgaaccctgc

SEQ ID NO: 321949 - DNA, 457 bp, Zea mays
ctagcaacatagaaagcacaatagtgtaccaacaatggccgctaaaatattttgccggcttatgctgcttggtctttctgcaagtgctgctacggcgaccattttaccacaatgctcacaagctcctatagctatccttcttgcaccgtacctctcaccaacggtgtcttcggtatgtgaaaacccaattcttcaaccctacaggatccaacaggcaatcgcagctggcatcttacctttatcacccttgttcctacaacaatcatcagccctattacagcagttacctttggtgcatttattggcacaaaacatcagggcacaacaactacaacaacttgtgctagcaaaccttgctgcctactcttagcaacagcagtttcttgcattcaaccaactagctgcattgaactctgcttattatttgcaacaactgcaactaccattcagccagcta

SEQ ID NO: 321950 - DNA, 358 bp, Zea mays
attatttagaccaactagcaacatagaaagcacaatagtgtaccaacaatggcagccaaaatattttgcctggttatgctccttggtatttctgcaagtgctgctacggcgaccattttcccgcaatgctcacaagctcctatagcttcccttcttcccccgtacctctcaccagcggtgtcttcggtatgtgaaaacccaattcttcaaccctacaggatccaacaggcaatcgcagctggcatcttacctttatcacccttgttcctccaacaatcatcagccctattacagcagttacctttggtgcatttattggcacaaaacatcagggcacaacaactacaacaacttgggc

SEQ ID NO: 321951 - DNA, 458 bp, Zea mays
caagcaacatagaaagtggaatccagtagcaacaatagagcaacaatggcgaccaagatactttccgtccttatgctccttgctctttctgcatgtgttgctaacgcgacaattttccctcaatgctcacaagctcctatagcttcccttcttcccccataccttccatcaatgatagcttcagtatgtgaaaacccagctcttcaaccctataggctccaacaagcaatcgcagcaagcaacatacctttatcacccttgtttcaacaatcgccagccctatctttggtgcagtcattggtacaaaccatcaaagcacagcagctgcagcaactcgtgctacctgtgatcaaccaagtagctctggcaaacctttcttcctactatcagcaacaacaatttcttccatttcaccaactatctacactgaaccctgctgctaatttgcagcaacaact

SEQ ID NO: 321952 - DNA, 450 bp, Zea mays
aacatagaaagcacaatagtgtaccaacaatggcagccaaaatattttgcctccttgtgctccttggtctttctgcaagtgctgctacggcgaccattttcccgcaatgctcgcaagctcctatagcttcccttcttcccccgtacctctcaccagcggtgtcttcggtatgtgaaaacccaattcttcaaccctacaggatccaacaggcaatcacagctggcatcttacctttatcacccttgttcctccaacaatcatcagccctattacatcagttacctttggtgcatttattggcacaaaacatcagggcacaacaactacaacaacttgtgctagcaaaccttgctgcctactctcagcaacagcagtttcttccattcaaccaactagctgcattgaactctgcttcttatttgcaacaacaacaactaccattcagccagc

SEQ ID NO: 321953 - DNA, 409 bp, Zea mays
gtgaaaacccagctcttcagccctatatgctccaacaagcaatcgcagcaagcaacatacctttatcacccttgttgtttcaacaatcgccagccctatctttggtgcagtcattggtacaaaccatcagggcacagcagctgcagcaactcgtgctacctgtgatcaaccaagtagctctggcaaacctttctccctactctcagcaacaacaatttcttccattcaaccaactgtctacactgaaccctgctgcttatttgcagcaacaactattaccattcagccagctagctactgcctactctcagcaacaacaacttcttccatttaaccaattggccgcactgaaccccgctgcttatttgcagcagcaaatactactaccatttaaccagctagctgcagc

SEQ ID NO: 321954 - DNA, 343 bp, Zea mays
acgccttctatcaatgccatcaatcatcattcatcttagtagtataagcaccaaatcaagtctgcaacagcaattatctaactccaaaaaccatgaaactggtgcttgtggttcttgctttcattgctttagtatcaagtgtttcttgtacacagacaggctgctgcagctgtggtcaacaacaaagccatgagcagcaacatcatccacaacaacatcattcacaaaaacaacaacatcaaccaccaccacaacattaccagcaacagcaacaccaacaacaacaagttcacatgcaaccacaaaaacatcagctacaaccaggaagtttatgttcaacaac

SEQ ID NO: 321955 - DNA, 167 bp, Zea mays
gctcgacccacgcatccgatcatacaccatacatctaaccagctttttttcaaccttcatctcctctactcacctgaccctctatatagtctccaatgcctctcacttctatcattttatcttacctcacaaactttcttaatcaaacatttcacaacattcacata

SEQ ID NO: 321956 - DNA, 438 bp, Zea mays
ggcgtggacgccgcggcccgaggcggcggcggcctgcgccgcgcgggagccgtctggtctcaccgcgacctgcgccgcagccacctacagcgcggcggcggcaggggacgtcccgtccgtggcgttcgtggtcgccagctacggcgcgctcctgcttctgctgcgctccctgcgcgcctacgagctggcgccgccggaggcggctgcacgcagggaagcgctcacgcgcagggtctgggcgctctgcacgctactcagcgtgatgttcgcgtggaaggttgcgagcgtcgtcgcgacgccgtgaccggtcgctgtcagcgtttgggccgcggcggccgtcacatctgacgctgggttcgttctgctgttacgacagcagcagcgttgccaatgaacgagtgatcggtggatgtgtgttccgtctgtaacttgtaagct

SEQ ID NO: 321957 - DNA, 430 bp, Zea mays
gtgggttggcttctcctccccctccggttcgggttcgggttcgtgaggttctccggggttcggtttcgtgggtgagcggatcgagatggcggcgtcggatgttgagtaccgctgcttcgtcggcggcctcgcctgggccacggacgaccactccctccacaacgccttcagcacctacggcgaggtcctcgagtccaagatcatcctcgatcgggagacgcagaggtcccgcggcttcggcttcgtcaccttctccacggaggaggcgatgcggaacgccatcgagggcatgaacggcaaggagctggacggccgcaacatcaccgtcaacgaggcccagtcccgcggcggccgtggaggcggcggcggcggcggttacggtggtggccgtggaggcggctgctacggcggtggcgggcgccgtgatggc

SEQ ID NO: 321958 - DNA, 445 bp, Zea mays
gcaacatagaaagcacaatagtgtaccaacaatggcagccaaaatattttgcctgcggatgctccttggtctttctgcaagtgctgctacggcgaccattttcccgcaatgctcgcaagctcctatagctacccttcttcccccgtacctctcaccagcggtgtcttcggtatgtgaaaacccaattcttcaaccctacaggatccaacaggcaatcacagctggcatcttacctttatcacccttgttcctccaacaatcatcagccctattacatcaggtacctttggtgcatttattggcacaaaacatcaaggcacaacaactacaacaacttgtgctagcaaaccttgctgcctactctcagcaacagcagtttcttccattcaaccaactagctgcattgaactctgcttctaatttgcaacaacaacaactaccattc

SEQ ID NO: 321959 - DNA, 307 bp, Zea mays
gagcaccctcaaccctcactacccggcagccggtacaagctcatacgtcgattcaacgccatcaagcgaccggctaacagaagacatggcgcaatagctggcaggttcgatggcggcagccgcgagtcggcagccgcggccgtgggttccacggtggtagaggccagagactggacagaggaggcagaggttgcaggacccccagaagcggccgttacggcggtcacaagcatggccgctatggtcgcatgaacaccggcagccatgacgtcgtggtctaccacaagctcgaccatgtcttcatctg

SEQ ID NO: 321960 - DNA, 327 bp, Zea mays
gggacacggcacagctttgaacaggttttgagcgatctgagacgacgatatataccaggtgcttatgggagactgcgatgaatgtcgaatctagactcccaacagagcacacagagaggctaacactggtactgcactatatacacattattctcttggtcataagcctacgtagtacaagccccataccctaaatactgaccgagctcgacagaaagagagaaaaggtactagacgaatacaacctgcagatcacatcgatcaacacaatctatgtactaacaaaggcaatcatggacgagcgaatataccacgatgggcaaaaga

SEQ ID NO: 321961 - DNA, 221 bp, Zea mays
  unsure (1)..(221): unsure at all n locations
agcgaaaaacggggcgaccgagcctgctcggcctcggtttccggttcccttcccttcgtgcaataaccggtgcccttacccccaactacncgcgcccccgggggcccccgccggggtccttcttcctccgctcgctcggaaccagaggcctcgcgacgtctccgcctgcggnctcgcgactgctaggtttcttcgggggcgcggccatgtcgtcggcggcg

SEQ ID NO: 321962 - DNA, 459 bp, Zea mays
ccaacaagcaacatagaaagtggaatccagtagcacaatagaccaccatggcgagcaaaatcgtgtccttcttatgctccttgctctttctgcatgtgttgctaacgcgacaattttccctcaatgctcacaagctcctatagcttcccttcttcccccataccttccatcaatgatagcttcagtatgtgaaaacccagctcttcaaccctataggctccaacaagcaatcgcagcaagcaacatacctttatcacccttgtttcaacaatcgccagccctatctttggtgcagtcattggtacaaaccatcaaggcacagcagctgcagcaactcgtgctacctgtgatcaaccaagtagctctggcaaacctttctccctactatcagcaacaacaatttcttccattcaaccaactatctacactgaaccctgctgcttatttgcagcaacaact

SEQ ID NO: 321963 - DNA, 465 bp, Zea mays
tgtacatctatcatctaatctgatatatagctcataatcgcacgtatggacgaacacaacattatcgcgtgatacttggacctaataatacatgcatggtcataataaagtgttgctaactcgacaattttccctcaatgctcacaagctcctatagcttcccttcttcccccataccttccatcaatgatagcttcagtatgtgaaaacccagctcttcaaccctataggctccaacaagcaatcgcagcaagcaacatacctttatcacccttgtttcaacaatcgccagccctatctttggtgcagtcattggtacaaaccatcaaagcacagcagctgcagcaactcgtgctacctgtgatcaaccaagtagctctggcaaacctttctccctactatcagcaacaacaatttcttccattcaaccaactatctacactgaacccttctgcttatttgcag

SEQ ID NO: 321964 - DNA, 449 bp, Zea mays
  unsure (1)..(449): unsure at all n locations
gggagaaggcaaagcttggaagagttagagaggagtatgagaagatgatggagaccagggccgaatgggaaactgagaagaaggtgaaggcgagacgccaaaaagagcagaaagaggttttaacactgctactgcactattaattcattatttccttcgtcgaaagcatccgtagtacaagccccaaaccctaaaaaatgaccgagctggacagaaagagagaaaaggcactagaagaatacaacctggagatgacaaggatcagcaaaatctctggaggagcaagggcaatggcggaggagcgaaaatacaacgatgggaaaaagatcagagagaaagcgcgcaagatgcgatccacaggaaagcctnaccgcacgtgtgcttgcttttgagaacagctgcatacgctgaaatttgaaccaaaaccaaatgaaggacgtcattttgga

SEQ ID NO: 321965 - DNA, 336 bp, Zea mays
gcaacatagaaagcacaatagtgtaccaacaatggcagccaaaatattttgcctcctgatgctccttggtctttctgcaagtgctgctacggcgaccattttcccacaatgctcacaagctcctatagcttcccttcttcccccgtacctctcaccagcggtgtcttcggtatgtgaaaacccaattcttcaaccctataggatccaacaggcaatcgcagctggcatcttacctttatcacccttgttcctccaacaatcatcagccctattacagcagttacctttggtgcatttattggcacaaaacatcagggcacaacaactacaacaact

SEQ ID NO: 321966 - DNA, 448 bp, Zea mays
  unsure (1)..(448): unsure at all n locations
tcagaaacacaccaagcgaagcgcactagcaacgacctaacaacaatggctaccaagatattagccctccttgcgcttcttgccctttttgtgagcgcaacaaatgcgttcattattccacaatgctcacttgctcctagtgccattattccacagttcctcccaccagttacttcaatgggcttcgaacacctagctgtgcaagccaacatgcaacaacaagcgcttgcggcgagcgtcttacaacaaccaattgcccaattgcaacaacaatccttgccacatctaacaatacaagccatcacaacgcaacagcaacaacagttcctaccagcactgagccacctagccatggtgaaccctgccgnctacttgcaagagcagctgcttgcatccaacccacttgctctggcgaacgtagttgcaaaccagcaacaacaacagctac

SEQ ID NO: 321967 - DNA, 430 bp, Zea mays
attttcagcattcaaaaacacaccaagcgaagcgcactagcaacgacctaacaccgggggctaccaagatattagccctccttgcgcttcttgcccttttagtgagcgcaacaaatgcgttcattattccacagtgctcacttgctcctagtgccattattccacagttcctcccaccagttacttcaatgggcttcgaacatccagccgtgcaagcctacaggctacaactagcgcttgcggcgagcgccttacaacaaccaattgcccaattgcaacaacaatccttggcacatctaaccctacaaaccattgcaacgcaacatcaacaacaacaacagtttctgccatcactgagccacctagccgtggtgaaccctgtcacctacttgcaacagcagctgcttgcatccaacccacttgctctggc

SEQ ID NO: 321968 - DNA, 445 bp, Zea mays
cccacgcgtccgtgagcattcagaaacacaccaagcgaagcgcactagcaacagccgaacaacaatggctaccaagatattatccctccttgcgcttcttgcgctttttgcgagcgcaacaaatgcgtccattattccacaatgctcactcgctcctagttccattattccacagatactcccaccagttacttcaatggccttcgaacacccagctgtgcaagcctataggctacaacaagcgattacggcgagcgtcttacaacacccaattgcccaattgcaacagcaatccttggcacatctaacaatacaaaccatcgcaccgcaacagcaacaacagttgctaccagcactgagccacctagccatggtgaaccctgtcgcctacttgcaacagcagttgcttgcatccaacccatttgctctagcaaacgtagttgca

SEQ ID NO: 321969 - DNA, 272 bp, Zea mays
ttcagccagctagctggtgtgagccctgctaccttcttgatacaaccacagttgttggcgttctaccagcacgctgcgcctaacgctggcaccctcttacaactgcaacaattgctgccattcaaccaacttgctttgacaaacccagcagcgttctaccaacaacccatcattggtggtgccctcttttagatttcttatgagttatagttcaataataaagttttttgtctgatgtttgtggcttcccagaaataagaaagtacatttct

SEQ ID NO: 321970 - DNA, 426 bp, Zea mays
atggcagccaaaatattctgcctacttatgctccttggtctttctgcaagtgctggtacagcgacgatcttcccgcaatgctcgcaagctcctatagcttcccttcttcccccgtacctctcaccagcggtgtcttcggtatgtgaaaacccaattcttcaaccctacaggatccaacaggcaatcgcagctggcatcttacctttatcacccttgttcctccaacaatcatcagccctattacaacagttacctttggtgcatttattggcacaaaacatcagggcacaacaactacaacaacttgtgctagcaaaccttgctgactactctcagcaacagcagcttcttccattcaaccaactaggttcattgaactctgcttattatttgcaacaacaacaactaccattcagccagctacct

SEQ ID NO: 321971 - DNA, 400 bp, Zea mays
gaccattagctttatctactccagagcgcagaagaacccgatcgacaccatgagggtggtgctcgttgccctcgctctcctggctctcgctgcgagcgccacctccacgcatacaagcggcggctgcggctgccagccaccgccgtcggttcatctaccgccgccggtgcatctgccacctccggttcacctgccacctccggtgcatcttccaccgccggtccacctgccgccgccggtccacctgccaccgccggtccatgtgccgccgtcggttcatctgccgacgccaccatgccactaccctactcaaccgccccggcctcagcctcatccccagccacacccatgcgcgtgccaacagccgcatccaagcccgtgccagctgcagggaacctgc

SEQ ID NO: 321972 - DNA, 447 bp, Zea mays
  unsure (1)..(447): unsure at all n locations
caacaatcatcagccctattacagcagttacctttggtgcatttattggcacagaggatcatggcacaacaactacaacaacttgtgctagcaaaccttgctgcctactctcagcaacaacagtttcttccattcaaccaactagctgcattgaactctgcttcttatttgcaacaacaacaactaccattcagccagctatctgctgcctacccccagcaatttcttccattcaaccaactgacagctttgaactctcctgcttatttacagcagcaacaactactaccattcagccagctagctggtgtgagccctgctaccttcttgacacaaccacaattgttgccgttctaccagcacgctgcgcctaacgctggcaccctcttacaactgcaacaattgctgccattcaaccaactngctttgacaaacccaacagcattc

SEQ ID NO: 321973 - DNA, 446 bp, Zea mays
caatcgccagccctatctttggtgcagtcattggtacaaaccatcaaggcacagcagctgcagcaactcgtgctacctgtgatcaaccaagtagctctggcaaacctttctccctactatcagcaacaacaatttcttccattcaaccaactatctacactgaaccctgctgcttatttgcagcaacaactattaccattcagccagctagctactgcctactctcatcaacaacaacttcttccatttaaccaattggccgcactgaacctcgctgcttatttgcagcagcaaatattactaccatttagccagctagctgcagcaagccgtgcttccttcttgacacagcaacagttgctgcctttctaccagcagtttgcggctaaccccgcaaccctcttacaactacaacaattgttgccctttgtccaacttgctttgac

SEQ ID NO: 321974 - DNA, 454 bp, Zea mays
gcaacatagaaagcacaatagtgtaccaacaatggcagctaaaatattttgcctccgtatgctccgtggtctttctgcaagtgctgctacggcgaccattttcccacaatgctcacaagctcctatagcttcccttcttcccccgtacctctcaccaacggtgtcttcggtatgtgaaaacccaattcttcaaccctacaggatccaacaggcaatcgcagctggcatcttacctttatcacccttgttcctccaacaatcatcagccctattacagcagttacctttggtgcatttattggcacaaaacatcagggcacaacaactacaacaacttgtgctagcaaaccttgctgcctactctcagcaacagcagtttcttccattcaaccaactagctgcattgaactctgcttcttatttgcaacaacaacaactaccattcagccagcta

SEQ ID NO: 321975 - DNA, 439 bp, Zea mays
caacatagaaagcacaatagtgtaccaacaatggcagccaaaatgttttgcctcggtatgctccttggtctttctgcaagtgctgctacggcgaccattttcccgcaatgctcgcaagctcctatagcttcccttcttcccccgtacctctcaccagcggtgtcttcggtatgtgaaaacccaattcttcaaccctacaggatccaacaggcaatcacagctggcatcttacctttatcacccttgttcctccaacaatcatcagccctattacatcagttacctttggtgcatttattggcacaaaacatcagggcacaacaactacaacaacttgtgctagcaaaccttgctgcctactctcagcaacagcagtttcttccattcaaccaactagctgcattgaactctgcttcttatttgcaacaacaacaactac

SEQ ID NO: 321976 - DNA, 439 bp, Zea mays
agcttcccttcttcccccgtacctctcaccaacggtgtcttcggtatgtgaaaaccgagttcttcaaccctacaggatccaacaggcaatcgcagctggcatcttacctttatcacccttgttcctccaacaatcatcagccctattacagcagttacctttggtgcatttattggcacaaaacatcagggcacaacaactacaacaacttgtgctagcaaaccttgctgcctactctcagcaacagcagtttcttccattcaaccaactagctgcattgaactctgcttcttatttgcaacaacaacaactaccattcagccagctatctgctgcctacccccagcaatttcttccattcaaccaactgacagcattgaactctcctgcttatttacagcagcaacaactactaccattcagccagctagctggtgtg

SEQ ID NO: 321977 - DNA, 271 bp, Zea mays
gctagctgcagcaaaccgtgcttccttcttgacacagcaacagttgctgcctttctaggagcagtttgcggctaaccccgcaaccctcttacaactacaacaattgttgccctttgtccaacttgctttgacagacccagcggcctcctaccaacaacacatcattggtggtgccctcttttagattgcttattagttgtaattcaataataaagttttttggatgatgtatgtggccaaccagaaataagaagttacatttccagattct

SEQ ID NO: 321978 - DNA, 445 bp, Zea mays
gcaacatagaaagcacaatagtgtaccaacaatggcagctaaaatattttgcctccggatgctccttggtctctctgcaagtgctgctacggcgaccattttcccacaatgctcacaagctcctatagcttcccttcttcccccgtacctctcaccaacggtgtcttcggtatgtgaaaacccaattcttcaaccctacaggatccaacaggcaatcgcagctggcatcttacctttatcacccttgttcctccaacaatcatcagccctattacagcagttacctttggtgcatttattggcacaaaacatcagggcacaacaactacaacaacttgtgctagcaaaccttgctgcctactctcagcaacagcagtttcttccattcaaccaactagctgcattgaactctgcttcttatttgcaacaacaacaactaccattc

SEQ ID NO: 321979 - DNA, 468 bp, Zea mays
  unsure (1)..(468): unsure at all n locations
caacaagcaacatagaaagtggaatccagtagcaacaacagagcaacaatggcgaccaagatattttccctccgtatgctccttgctctttctgcatgtgttgctaacgcgacaattttccctcaatgctcacaagctcctatagcttcccttcttcccccataccttccatcaatgatagcttcagtatgtgaaaacccagctcttcagccctataggctccaacaagcaatcgcagcaagcaacatacctttatcacccttgttgtttcaacaatcgccagccctatctttggtgcagtcattggtacaaaccatcagggcacagcagctgcagcaactcgtgctacctgtgatcaaccaagtagctctggcaaaccttttctcctactctcagcnnacacaatttcttccattcaaccaactgtctacactgaaccctgcctgctaattgcagcaacaactatta

SEQ ID NO: 321980 - DNA, 450 bp, Zea mays
gcaacatagaaagcacaatagtgtaccaacaatggcagccaaaatattttgcctgcttatgctccttggtctttctgcaagtgctgctacggcgaccattttcccgcaatgctcgcaagctcctatagcttcccttcttcccccgtacctctcaccagcggtgtcttcggtatgtgaaaacccaattcttcaaccctacaggatccaacaggcaatcgcagctggcatcttacctttatcacccttgttcctccaacaatcatcagccctattacaacagttacctttggtgcatttattggcacaaaacatcagggcacaacaactacaacaacttgtgctagcaaaccttgctgcctactctcagcaacagcagtttcttccattcaaccaactaggttcattgaactctgcttcttaattgcaacaacaacaactaccattcagcca

SEQ ID NO: 321981 - DNA, 459 bp, Zea mays
  unsure (1)..(459): unsure at all n locations
ttttgagcattcagaaacacaccaagcgaagcgcactagcaacgacctaacaacaggggctaccaagatattagccctccttgcgcttattgccctttttgtgagcgcaacaaatgcgttcattattccacaatgctcacttgctcctagtgccattattccacagttcctaccaccagttacttcaatgggcttcgaacacctagctgtgcaagccaacatgcaacaacaagcgcttgcggcgagcgtcttacaacaaccaattgcccaattgcaacaacaatccttgccacatctaacaatacaagccatcacaacgcatcagcaacaacagttcctaccagcactgagccacctagccatggtgaaccctgccgnctacttgcaagagcagctgcttgcatccaacccacttgctctggcgaacgtagttgcacaccagcaacaacaacagctaca

SEQ ID NO: 321982 - DNA, 456 bp, Zea mays
gcaacatataaagcacaatagtgtaccaacaatggcagccaaaatattttgcttccgtatgctccttggtctttctgcaagtgctgctaccgcaaccattttcccacaatgctcacaagctcctatagcttcctttcttcccccatacctctcaccagcggtgtcttcagtatgtgaaaacccaattcttcaaccctacaggatccaacaggcaatcgcagcaggcatcttacctttatcacccttgttcctccaacaaccgtcagccctattacagcagttacctttggtgcatttgttggcacaaaacatcaaggcacaacaactacaacaacttgtgctaggaaaccttgcttgctactctcagcaacagcaagttcttccattcaaccaactggctgcattgaactctgctgcttatttgcaacaacaactaccattcagtcagctagctgc

SEQ ID NO: 321983 - DNA, 380 bp, Zea mays
ccgggttggaccaagccttccggagtattaggccccaattcaaatttgatccttcatttttttaattccaaaaccctggggcttggtcctgggggttctggctttaatggttttaatttcaatggttcttggtacacagaacaggcgctgcagctttggtcaacaacaagccatgagcagcaacatcatccacaacaacatcatccacaaaaacaacaacatcaaccaccaccacaacatcaccagcagcagcaacaccaacaacaacaagttcacatgcaaccacaaaaacatcagcaacaacaagaagttcatgttcaacaacaacaacaacaaccgcagcaccaacaacaacaaacacaacaacagcaccaacaaca

SEQ ID NO: 321984 - DNA, 294 bp, Zea mays
gaccaagccttcggttttaataccattcatcaatattcattttaattattttagccccaaattcaatttggcaccttcattatatttacttcaaaaaccacttaacttgtgcctgtggttctttggttcattgcgctagattctaatgtgtcttgtgcacacacacgcgggtttacatgtggggaacaacacagacctgtgcagcagcatcattatacacaacatcatcctccacaacaacaacatcatccaccaccaccacatcatcagcagcagcaacaacaacaacaacaa

SEQ ID NO: 321985 - DNA, 418 bp, Zea mays
acgcgtccgcccacgcgtccggcagctggccgtggccgtggaagggtacgacagcgacgagggcgtggtgacaggggaagaggttgctgccaaggtgcgatggctcttggagtccgatggcgtgaggatgctacggaagcgcacgctggcggccatgcggcaggccaaggactcgctgcgtgatggcggcgagtctgaggccacactgaccggattggtggacgagtggaaacgcatttgacgcggtacgtggggattgggaacgggtgacgttacgcgactgatgaagtgccagtcataattacttttcaatcaatatatattactaatatatgcatgtatagatcattgacagatactacctattgcaacaaatgcagatgatgatgcagcttgagcgtgctcgtgccgcaacaat

SEQ ID NO: 321986 - DNA, 441 bp, Zea mays
  unsure (1)..(441): unsure at all n locations
agcaacatagaaagcacaatagtgtaccttcaatggcagccaaaatattttgcctcctgtatgctccttggtctttctgcaagtgctgctacggcgaccattttcccgcaatgctcgcaagctcctatagcttcccttcttcccccgtacctctcaccagcggtgtcttcggtatgtgaaaacccaattcttcaaccctacaggatccaacaggcaatcgcaactggcatcttacctttataacccttgttcctccaacaatcatcagccctattacaacagttaccgttggtgcatttattggcacagaacatcagggcacaacaactacaacacctngtgctagcaaaccttggtgcctactttaagcaacagcagtttcttccattcaacccactaggttcattggactctgcttcttatttgcagcaacaacaacta

SEQ ID NO: 321987 - DNA, 457 bp, Zea mays
  unsure (1)..(457): unsure at all n locations
gcaacatagaaagcacaatagtgtaccaacaatggcagccaaaatattttgcctcggtatgctccttggtctttctgcaagtgctgctacggcgaccattttcccacaatgctcacaagctcctatagcttcccttcttcccccgtacctctcaccagcggtgtcttcggtatgtgaaaacccaattcttcaaccctataggatccaacaggcaatcgcagctggcatcttacctttatcacccttgttcctccaacaatcatcagccctattacagcagttacctttggtgcatttattggcacataacatcagggcacatcaactaccacaacttgtgctagcaaaccttgctgnctactctcagcaacaacagtttcttccattcaaccaactagctgcattgaactctgcttcttatttgcaacaacaacaactaccattcagccagctatct

SEQ ID NO: 321988 - DNA, 263 bp, Zea mays
aattcccggcattgagaccaactagcaacatagaaagcacaatagtgtaccaacaatggcagccaaaatattttgcctccttatgctgcttggtctttctgcaagtgctgctacggcgaccattttcccgcaatgctcgcaagctcctatagcttcccttcttcccccgtacctctgaccagcggtgtcttcggtatgtgaaaacccaattcttcaaccctacaggatccaacaagcaatcgcagctagcatcttacctttat

SEQ ID NO: 321989 - DNA, 419 bp, Zea mays
ttcccgggcttgaagaatcttatgacttatagcacaatacttacgtcgttagtacgacggctgctgcgtgccagatacgagggactacatttctaacctacacaccgacgacggcctcaagtcccatcgaggctcacctcgccggcaaaacctatgtgcctggcgactccattactaaggatgacattatagtcttcgcacgcggtgccgtcaaatcctgtcgctgagcttcctaatgccgcccgctggtacgagaccccctgtgcggctgcagcctcaacattccgtggtacggctgctgttgtacatctgcctgcatgatcagctgctgcggcagctgctccttcgccagaagctgagcatcatgaatgaccttgatctttgctcccatgaaactgacgaagacacgacggcagctg

SEQ ID NO: 321990 - DNA, 352 bp, Zea mays
ccgcctcgctgctgccggtgctcctcctcacaagcatgctgctgctgctgtgtcagacgccgtgaggggtccagatctgcagagcgagccatcattcaatgcgtgctgcacctgcatgcatgcatgcgctgtttctagtttctacaaggcggtgatcgatccagctggcgattcaattgtggttgggggtggcctgtgtattctaccggtactaaattgtaattgttgtttttttttacgattcggttcatttcctcgtcctctttcttcttctctttcggattcgtagcacagattgtacaaggaggggggcagcagttagtaataatctatagcatacccatttcatgtc

SEQ ID NO: 321991 - DNA, 472 bp, Zea mays
cagaaacacaccaagcgaagcgcactagcaacaacctaacaacaatggctaccaagatattatccctccttgcgcttcttgcgctttttgcgagcgcaacaaatgcgtccattattccacaatgctcacttgctcctagttccattattccacagttcctcccaccagttacttcaatggccttcgaacacccagctgtgcaagcctataggctacaacaagcgattgcggcgagcgtcttacaacaaccaattgcccaattgcaacaacaatccttggcacatctaacaatacaaaccatcgcaacgcaacagcaacaacagttcctaccagcactgagccacctagccatggtgaaccctgtcgcctacttgcaacagcagctgcttgcatccaacccacttgctctagcaaacgtagttgcaaaccagcaacaacaacaactgcaacagtttctgccagcgcttagtca

SEQ ID NO: 321992 - DNA, 274 bp, Zea mays
agccttcaagccgaccatcgcgcggcgacgacacacacagacacaggccacactagggcacctttcgctctcggggagcgcgcctaaacccacgcttactccatcatgctatccatccgatacgatcataacgtccaagatcttggtgacatctactccacaggtctgagaacacgaagctgcgcaagcctatatggctacaaacagcgattgccgccagcgccatactataaccaattgccaaattgctacaacaatcctgtgcacatctaac

SEQ ID NO: 321993 - DNA, 441 bp, Zea mays
gcgagagccatggaggacatcggcgagggccccgccgagaaccttccggagcccctgtgtccagccgtggaggccgaggacgaggacggcgacgagttcagcttccccgttcctccggtcgccgccgacgcgtgcatcgtgcccgtgtacccgatcttcggccggcccccgtccccgcctcggggggaggaggaggagccggagacggccaccgtgcgggtgccgctgagccggctcctgctggaggagcgggagttccgcgcgcgggagccggacgggcgatcggcgagtgcgcaggcgtggcaggacgaggacgaagacgacgcctcgggcggcgccggggacgaggatctgcaaggtgtgccggcggagagctactgcctgtgggcgcccggcgggcagtcgccggcgcccgcgtccccgcgccggtgccggaagagc

SEQ ID NO: 321994 - DNA, 443 bp, Zea mays
gagaccaactagcaacatagaaagcacaatagtgtaccaacaatggcagccaaaatatgttgcttccttatgctccttggtctttctgcaagtgctgctaccgcaaccattttcccacaatgctcacaagctcctatagcttcctttcttcccccatacctctcaccagcggtgtcttcagtatgtgaaaacccaattcttcaaccctacaggatccaacaggcaatcgcagcaggcatcttacctttatcacccttgttcctccaacaaccgtcagccctattacagcagttacctttggtgcatttgttggcacaaaacatcaaggcacaacaactacaacaacttgtgctaggaaaccttgctgcctactctcagcaacagcagtttcttccattcaaccaactggctgcattgaactctgctgcttatttgcaacaaca

SEQ ID NO: 321995 - DNA, 458 bp, Zea mays
gcaacatagaaagtggaatccagtagcaacaatagagcaacaatggcgaccaagatattttccctccttatgctgctggctctttctacatgtgttgctaacgcgacaattttccctcaatgctcacaagctcctatagcttcccttcttcccccataccttccatcaattatagcttcaatatgtgaaaacccagctcttcaaccatataggcttcaacaagcaatcgcagcaagcaacatacctttatcgcccttgttgtttcaacaatcgccagccctatctttggtgcagtcattggtacaaaccatcagggcacaacagctgcagcaactcgtgctacctctgatcaaccaagtagctctggcaaacctttctccctactctcagcaacaacaatttcttccattcaaccaactggctacactgaaccctggtgcttatttgcagcacaacta

SEQ ID NO: 321996 - DNA, 257 bp, Zea mays
ctcacgcatccgtcgacgcttgcgattctgaaactgttcaccatcgagatgacggggctagtcaacatcatgatcaagccgcctctgagatggattctagagctgttgatgctgtggcctctagaatactcacggataacatcgatcctacgcctgcagagatcattgatcctaagactgcagaggataatgtagttatgatatcgaccaatgcttgcattaggccactgaccacaacatctgtattgacgcatctc

SEQ ID NO: 321997 - DNA, 282 bp, Zea mays
gtcacgcatccggccacccatgatcttctggcattcttcaccatcgggatcactgggttacttaacacctttagctagcttcctctatcattgcttctacagctgttgctgccttgccttctagaatactcaccgacaacaccgtccctctgcctgcagatatcattgatactaagacttcagacgatactatactaagctcttgccacctgcttgcatctagtcactgaccacaccatctggattctcgaacatgactccatctgcttaaaaccatactac

SEQ ID NO: 321998 - DNA, 441 bp, Zea mays
caacgacctaacaccaatggctaccaagatattagccctccttgcgcttcttgccctgggagtgagcgcaacaaatgcgttcattattccacagtgctcacttgctcctagtgccattattccacagttcctcccaccagttacttgaatgggcttcgaacatccagccgtgcaagcctacaggctacaactagcgcttgcggcgagcgccttacaacaaccaattgcccaattgagaacaacaatccttggcacatgtaaccctacaaaccattgcaacgcagcaacaacaacaacaacagtgtctgccatcactgagccacctagccgtggtgaaccctgtcacctacttgcaacagcagctgcttgcatccaacccacttgctctggcgaacgtagctgcataccagcaacaacaacagctgcaacagtttatgccag

SEQ ID NO: 321999 - DNA, 444 bp, Zea mays
aacaggcaatcacagctggcatcttacctttatcacccttgttcctccaacaatcatcagccctattacatcagttacctttggtgcatttattggcacaaaacatcagggcacaacaactacaacaacttgtgctagcaaaccttgctgcctactctcagcaacagcagtttcttccattcaaccaactagctgcattgaactctgcttcttatttgcaacaacaacaactaccattcagccagctacctgctgcctacccccagcaatttcttccattcaaccaactggcagcattgaactctcctgcttatttacagcagcaacaactactaccattcagccagctagctggtgtgagccctgctaccttcttgatacaaccacagttgttgccgttctaccagcacgctgcgcctaacgctggcaccctcttacaactgc

SEQ ID NO: 322000 - DNA, 440 bp, Zea mays
tgagcattcagaaacacaccaagcgaagcgcactagcaacaacctaacaacaatggctaccaagatattatccctccttgcgcttcttgcgctttttgcgagcgcaacaaatgcgtccattattccacaatgctcacttgctcctagttccattattccacagttcctcccaccagttacttcaatggccttcgaacacccagctgtgcaagcctataggctacaacaagcgattgcggcgagcgtcttacaacaaccaattgcccaattgcaacaacaatccttggcacatctaacaatacaaaccatcgcaacgcaacagcaacaacagttcctaccagcactgagccacctagccatggtgaaccctgtcgcctacttgcaacagcagctgcttgcatccaacccacttgctctagcaaacgtagttgcaaaccagc

SEQ ID NO: 322001 - DNA, 441 bp, Zea mays
ttgaaaaacacaccaagcgaagcgcactatcaacgacctaacaccaatggctaccaaggtgattagccctccttgcgcttcttgcccttttagtgagcgcaacaaatgcgttcattattccacagtgctcacttgctcctagtgccattattccacagttcctcccaccagttacttcaatgggcttcgaacatccagccgtgcaagcctacaggctacaactagcgcttgcggcgagcgccttacaacaaccaattgcccaattgcaacaacaatccttggcacatctaaccctacaaaccattgcaacgcaacaacaacaacaacaacagtttctgccatcactgagccacctagccgtggtgaaccctgtcacctacttgcaacagcagctgcttgcatccaacccacttgctctggcgaacgtagctgcataccagc

SEQ ID NO: 322002 - DNA, 123 bp, Zea mays
ggttgaatggcagcaacccatcattggtggtgccctcttttagatgtcttatgagggatagttcaataataaagttttttgtctgatgtttgtggcttcccagaaataagaaagtacatttct

SEQ ID NO: 322003 - DNA, 374 bp, Zea mays
cggacgcgtgggcggacgcgtgggaactagcaacatagaaagcacaatagtgtaccaagaatggcagccaaaatattttgcctccttatgctccttggtctttctgcaagtgctgctacggcgaccattttcccgcaatgctcgcaagctcctatagcttcccttcttcccccgtacctctcaccagcggtgtcttcggtatgtgaaaacccaattcttcaaccctacaggatccaacaggcaatcgcagctggcatcttacctttatcacccttgttcctccaacaatcatcagccctattacaacagttacctttggtgcatttattggcacaaaacatcagggcacaacaactacaacaacttgtgctagc

SEQ ID NO: 322004 - DNA, 85 bp, Zea mays
gttctagatcgcgagcgatcgccctgttctttgtccggcacatatacaaatcaagcggttggcaatgaactctctctgggagact

SEQ ID NO: 322005 - DNA, 440 bp, Zea mays
gcaacatagaaagcacaatagtgtaccaacaatggcagccaaaatattttgcctccttatgctccttggtctttctgcaagtgctgctacggcgaccattttcccgcaatgctcgcaagctcctatagcttcccttcttcccccgtacctctcaccagcggtgtcttcggtatgtgaaaacccaattcttcaaccctacaggatccaacaggcaatcgcagctggcatcttacctttatcacccttgttcctccaacaatcatcagccctattacaacagttacctttggtgcatttattggcacaaaacatcagggcacaacaactacaacaacttgtgctagcaaaccttgctgcctactctcagcaacagcagtttcttccattcaaccaactaggttcattgaactctgcttcttatttgcaacaacaacaactac

SEQ ID NO: 322006 - DNA, 442 bp, Zea mays
gccatcactgagccacctagccgtggtgaaccctgtcacctacttgcaacagcagctgcttgcatccaacccacttgctctggcgaacgtagctgcataccagcaacaacaacagctgcaacagtttatgccagtgctcagtcaactagccatggtgaaccctgccgtctacctacaactactttcatctagcccgctcgcggtgggcaatgcacctacgtacctacaacaacagttgctgcaacaaattgtaccagctctgactcagctagctgtggcaaaccctgctgcctacttacaacagttgcttccattcaaccaactggctgtgtcaaactctgctgcgtacctacaacagcgacaacagttacttaatccattggcagtggctaacccattggtcgctaccttcctgcagcagcaacaacaattgctgccatac

SEQ ID NO: 322007 - DNA, 309 bp, Zea mays
ggcacacgcactgtctcacccacatctttccactaatccgccaccgcaacactaaggtccctttcaacacttacctgccccgcaacatctcacactccttctcccaccccctcgcccccaacaaatactccacatacaacaagtcccaccctaacacgcccccctccaccatctcttcactccatcaccaccatacccctcgtcttatccacttaatccatcaccactacctccctcgctattcacggcactcgttcaccaaactccgcacttcccctcacttcacttcattcaaaacctcctctttct

SEQ ID NO: 322008 - DNA, 274 bp, Zea mays
cagatcagcaaagcggcagtgcgtagagaggatcgtcgaacagaacagcatgaagatggtcatcgttctcgtcgtgtgcctggctctgtcagctgccagcgcctctgcaatgcagatgccctgcccctgcgcggggctgcagggcttgtacggcgctggcgccggcctgacgacgatgatgggcgccggcgggctgtacccctacgcggagtacctgaggcagccgcagtgcagcccgctggcggcggcgccctactacgccgggtgtgggcag

SEQ ID NO: 322009 - DNA, 372 bp, Zea mays
ctgtttgtgagcgcaacaaatgcgttcattattccacaatgctcacttgctcctagtgcgagtattccacagttcctcccaccagttacttcaatgggcttcgaacacctagctgtgcaagccaacatgcaacaacaagcgcttgcggcgagcgtcttacaacaaccaattgcccaattgcaacaacaatccttgccacatctaacaatacaagccatcacaacgcaacagcaacaacgagttcctaccagcacttaaccccctagccatggtgaacccttgccggctacttgcaagaaccagctgcttggattcaacccacttgctctggcgaaccgtagtgcaaaacagcaacaacaaccgctaccacag

SEQ ID NO: 322010 - DNA, 422 bp, Zea mays
ccttgctctttctgcatgtgttgctaacgcgacaattttccctcaatgctcacaagctgctatagcttcccttcttcccccataccttccatcaatgatagcttcagtatgtgaaaacccagctcttcaaccctataggctccaacaagcaatcgcagcaagcaacatacctttatcacccttgtttcaacaatcgccagccctatctttggtgcagtcattggtacaaaccatcaaggcacagcagctgcagcaactcgtgctacctgtgatcaaccaagtagctctggcaaacctttctccctactatccacaacaacaatttctttcattcaaccaactatctacactggaccctgctgcttaattgcagcaacaactattaccattcagccaggtagcttctgcctactctcatcaac

SEQ ID NO: 322011 - DNA, 328 bp, Zea mays
gcggcggctgtggctgccagacaccaccgtttcatctaccgcctccgttctatatggcgcctccgttctatctgccgccgcagcagcagccgcagccatggcaataccccactcaaccaccgcagctaagcccgtgccagcagttcggatcctgcgacgtcggcagcgtcggcagcccgttcctgggccagtgcgtcgagttcctgaagcaccagtgcagcccggcggcgacgcccgtacggctcgccacagtgccaggcgctgcagcagcagtgctgccaccggatcaggcaggtggagccgctgcaccggtaccaagcgaaatacg

SEQ ID NO: 322012 - DNA, 459 bp, Zea mays
ccaagcgaagcgcactagcaacaacctaacaacaatggctaccaagatattatccctccttgcgcttcttgcgctttttgcgagcgcaacaaatgcgtccattattccacaatgctcacttgctcctagttccattattccacagttcctcccaccagttacttcaatggccttcgaacacccagctgtgcaagcctataggctacaacaagcgattgcggcgagcgtcttacaacaaccaattgcccaatggcaacaacaatccttggcacatctaacaatacaaaccatcgcaacgcaacagcaacaacagttcctaccagcactgagccaactagccatggtgaaccctgtcgcctacttgcaacagcagctgcttgcatccaacccacttgctctagcaaacgtagttgcaaaccagcaacaacaacaactgcaacagtttctgccagcgcttaa

SEQ ID NO: 322013 - DNA, 307 bp, Zea mays
attgagaccaactagcaacatagaaagcacaatagtgtaccaacaatggcagccagaatattttgcctccttatgctccttggtctttctgcaagtgctgctacggcgaccattttcccacaatgctcacaagctcctatagcttcccttcttcccccgtacctctcaccagcggtgtcttcggtatgtgaaaacccaattcttcaaccctataggatccaacaggcaatcgcagctggcatcttacctttatcacccttgttcctccaacaatcatcagccctattacagcagttacctttggtgc

SEQ ID NO: 322014 - DNA, 361 bp, Zea mays
catcagcaacaacaagaagttcatgttcaacaacaacaacaacaaccgcagcaccggcaccaacaacaacaacaacagcaccaacaacaacatcaatgtgaaggccaacaacaacatcaccaacaatcacaaggccatgtgcaacaacacgaacagagccatgagcaacaccaaggacagagccatgagcaacaacatcaacaacaattccagggtcatgacaagcagcaacaaccacaacagcctcagcaatatcagcagggccaggaaaaatcacaacagcaacaatgtcattgccaggagcagcaacagactacaaggtgcagctataactactatagcagtagctcaaatctaaaaa

SEQ ID NO: 322015 - DNA, 455 bp, Zea mays
gtatcaagtgtttcttgtacacagacaggctgctgcagctgtggtcaacaacaaagcggtgagcagcaacatcatccacaacaacatcatccacaaaaacaacaacatcaaccaccaccacaacatcaccagcagcagcaacaccaacaacaacaagttcacatgcaaccacaaaaacatcagcaacaacaagaagttcatgttcaacaacaacaacaacaaccgcagcaccaccaccaacaacaacaacaacagcaccaacaacaacatcaatgtgaaggccaacaacaacatcaccaacaatcacaaggccatgtgcaacaacacgaacagaacccttaaccacaacaaagacagaaccatgaacaacaaccatcaccacaatttcagggtcatgacaagcagcaacaaccacaacaagctcagcaatatcaagcaggccaggaaaaatcaca

SEQ ID NO: 322016 - DNA, 184 bp, Zea mays
gtcttgatcgccatggcagagctttttagctatacgtgtggatgaacctgctgggaggcgttaccgcttatgtggacgatcttattggcgtgatcatgagtttatggatattgatactggtgggttaattactttgtcatagtgtcactcgtttgtatttgtagagcttgccgttaccactact

SEQ ID NO: 322017 - DNA, 442 bp, Zea mays
  unsure (1)..(442): unsure at all n locations
attgagaccaactagcaacatagaaagcacaatagtgtaccaacaatggcagctaaaatattttgcctccttatgctccttggtctttctgcaagtgctgctacggcgaccattttcccacaatgctcacaagctcctatagcttcccttcttcccccgtacctctcaccaacggtgtcttcggtatgtgaaaacccaattcttcaaccctacaggatccaacaggcaatcgcagctggcatcttacctttatcacccttgttcctccaacaatcatcagccctattacagcagttacctttggtgcatttattggcacanaacatcagggcacaacaactacaacaacttgtgctagcaaaccttggtggctactctcagcaacagcaggttcttccattcaaccaactagctgcattgaactctgcttcttatttgcaac

SEQ ID NO: 322018 - DNA, 392 bp, Zea mays
caagtagcaacatagaaagcacaatagtgtaccaacaatggcagccaaaatattttgccgccttatgctccttggtctttctgcaagtgctgctacggcgaccattttcccgcaatgctcgcaagctcctatagcttcccttcttcccccgtacctctcaccagcggtgtcttcggtatgtgaaaacccaattcttcaaccctacaggatccaacaggcaatcacagctggcatcttacctttatcacccttgttcctacaacagtcatcagccctattacatcagttacctttggtgcatttattggcacaaaacatcagggcacaacaactacaacaacttgtgctagcaaaccttgctggctactctcagcaacaagcagttcttccat

SEQ ID NO: 322019 - DNA, 355 bp, Zea mays
  unsure (1)..(355): unsure at all n locations
gaaagcacaatagtgtaccaacaatggcagccaaaatatttcgcctccttatgctccttggtctttctgcaagtgctgctacggcgaccattttcccgcaatgctcgcaagctcctatagcttcccttcttcccccgtacctctcaccagcggtgtcttcggtatgtgaaaacccaattcttcaaccctacaggatccaacaggcaatcacagctggcatcttacctttatcacccttgttcctccaacaatcatcagccctattacatcagctacctttggtgcatttattggcacanaacatcagggcacaacaactacaacaacttgtgctagcaaaccttgctgcctactc

SEQ ID NO: 322020 - DNA, 428 bp, Zea mays
gtaagatgcctgttgcgattatcacccttgttcctccaacaaccgtcagccctattagagcagttacctttggtccatttggtggcacaaaacatcagggcacaacaactacaacaacttgtgctagcaaaccttgctgcatactctcagcaacatcagtttcttccattcaaccaactggctgcattgaactctgctgcttatttgcaacaacaattaccattcagccagctagttgctgcctacccccagcaatttcttccattcaaccaactagcagcattgaactctgctgcttatttacagcagcaacaactactaccattcagccagctagctgatgtgagccctgctgccttcttgacacaacaacaattgttgccgttctacctgcacgctatgcctaacgctggcaccctcttacaact

SEQ ID NO: 322021 - DNA, 443 bp, Zea mays
  unsure (1)..(443): unsure at all n locations
caacaacctaacaacaatggctaccaagatattatccctccttgcgcttcttgcgcttggggcgagcgcaacaaatgcgttcattattccacaatgctcacttgctccaagttccattattacacagttcctcccaccagttacttcaatgggcttcgaacacccagctgtgcaagcctataggctacaacaagcaattgcggcgagcgtcttacaacaaccaatttcccagttgcaacaacaatccttggcacatctaacaatacaaaccatcgcaacgcagcagcaacaacaatgtctaccagcactgagccacctaaccatggtgaaccctgccgnctacttgcaacagcagttgcttgcatcaaacccacttgctctggcaaacgtagttgcaaaccagccacaacaacagctgcaacagtttctgccagcgctcagtc

SEQ ID NO: 322022 - DNA, 357 bp, Zea mays
attttcagcattcaaaaacacaccaagcgaagcgcactagcaacgacctaacaccaatggctaccaagatattagccgtccttgcgcttcttgcccttttagtgagcgcaacaaatgcgttcattattccacagtgctcacttgctcctagtgccagtattccacagttcctcccaccaattacttcaatgggcttcgaacatccagccgtgcaagcctacaggctacaactagcgcttgcagcgagcgccttacaacaaacaattgcccaattgcaacaacaatccttggcacatctaaccctacaaaccattgcaacgcaacaacaacaacaacagtttctgccatcactgaacc

SEQ ID NO: 322023 - DNA, 392 bp, Zea mays
agaaagcacaatagtgtaccaacaatggcagccaaaatattttgcctccttatgctccttggtctttctgcaagtgctgctacggcgaccattttcccgcaatgctcgcaagctcctatagcttcccttcttcccccgtacctctcaccagcggtgtcttcggtatgtgaaaacccaattcttcaaccctacaggatccaacaggcaatcacagctggcatcttacctttatcacccttgttcctccaacaatcatcagccctattacatcagttacctttggtgcatttattggcacaaaacatcagggcacaacaactacaacaacttgtgctagcaaaccttgctgcctactctcagcaacaacaggttctttcattcaacccactaac

SEQ ID NO: 322024 - DNA, 443 bp, Zea mays
agcaacatagaaagcacaatagtgtaccaacaatggcagccaaaatattttgcctccttatgctccttggtctttctgcaagtgctgctacggcgaccattttcccgcaatgctcgcaagctcctatagcttcccttcttcccccgtacctctcaccagcggtgtcttcggtatgtgaaaacccaattcttcaaccctacaggatccaacaggcaatcacagctggcatcttacctttatcacccttgttcctccaacaatcatcagccctattacatcagttacctttggtgcatttattggcacaaaacatcagggcacaacaactacaacaacttgtgctagcaaaccttgctgcctactctcagcaacagcagtttcttccattcaaccaactagctgcattgaactctgcttcttatttgcaacaacaacaactacca

SEQ ID NO: 322025 - DNA, 79 bp, Zea mays
  unsure (1)..(79): unsure at all n locations
cgcgtncgggataataaagttttttgtacgatgtttgtggcttaccagaaatgagaaagttcaggactagattcttaac

SEQ ID NO: 322026 - DNA, 349 bp, Zea mays
  unsure (1)..(349): unsure at all n locations
ccaactagcaacatagaaagcacaatagtgtaccaacagtggcagctaagatattttgcctccttatgctccttggtctttctgcaagtgctgctacggcgaccattttcccacaatgctcacaagctcctatagctttccttcttcccccgtacctctcaccaacggtgtcttcggtatgtgaaaacccaattcttcaaccctacaggatccaacaggcaatcgcagctggcatcttacctttatcacccttgttccttcaacaatcatcagccctattacagcagttacctttggtgcatttattggcacanaacatcanggcacaacaactacaacaacttgtgct

SEQ ID NO: 322027 - DNA, 418 bp, Zea mays
cagcattcaaaaacacaccaagcgaatcgcactagcaacgacctaacaccaatggctgcgaagatattagccctccttgcgcttcttgcccttttagtgagcgcaacaaatgcgttcattattccacagtgctcacttgctcctagtgccattattccacaagtcctaccaccagttacttcaatgggcttcgaacatccagtcgtgcaagcctacaggctacaactagcgcttgcggcgaaaagccttacaacaaccaattgcccaattgcaacaacaatccttggcacatctaaccctacaaaccattgcaacgcaacaacaacaacaacaacagtttctgccatcactgagccacctagccgtggtgaaccctgtcacctacttgcaacagcagctgcttgcattcaacccactt

SEQ ID NO: 322028 - DNA, 442 bp, Zea mays
cagcattcaaaaacacaccaagcgaagcgcactagcaacgacctaacaccaatggctacgaagatattagccctccttgcgcttcttgcccttttagtgagcgcaacaaatgcgttcattattccacagtgctcacttgctcctagtgccattattccacagttcctcccaccagttacttcaatgggcttcgaacatccagccgtgcaagcctacaggctacaactagcgcttgcggcgagcgccttacaacaaccaattgcccaattgcaacaacaatccttggcacatctaaccctacaaaccattgcaacgcaacaacaacaacaacaacagtttctgccatcactgagccacctagccggggtgaaccctgtcacctacttgcaacagcagctgcttgcatccaacccacttgctctggcgaacgtagctgcatacc

SEQ ID NO: 322029 - DNA, 383 bp, Zea mays
gagcatacagaaacacaccaagcgaagcgcactagcaacgacctaacaacaagggctaccaagatattagccctccttgcgcttcttgccctttttgtgagcgcaacaaatgcgttcatgattccacaatgctcacttgctcctagtgccattattccacagtgcctgcgaccaggtacttcaatgggcttcgaacacctagctgtgcaagccaacatgcaacaacaagcgcttgcggcgagcagacttacaacaaccaattgcccaattgcaacaacaatgcttggcgcaactaacaatacaagccatgagcacgcaacagcaacaacagttcctaccagcactggaccaactagccatggtgaaccctggcgactacttgc

SEQ ID NO: 322030 - DNA, 282 bp, Zea mays
ttatgcaccacgcactgccactgattcgctcactcgcccatcggactgctggcgtcctcatctatcgcgtcttgaccagtccatggctccatgcatgaataacaagggtgtgcgcggatctgtgatgccaaattctatcctcttcaagtgtcgaagcgttcgatcgtaggtctagtattgagcctgtgagcagcacacttactgttgcacatacatcagactctgcttcatgattcatcattatacatagcacaatgcatgcctactgatctacatcatact

SEQ ID NO: 322031 - DNA, 432 bp, Zea mays
agaccaactagcaacatagaaagcacaatagtgtaccaacaatggcagccaaaatattttgcctcgttatgctccttggtctttctgcaagtgctgctacggcgaccattttcccgcaatgctcgcaagctcctatagcttcccttcttcccccgtacctctcaccagcggtgtcttcggtatgtgaaaacccaattcttcaaccctacaggatccaacaggcaatcgcagctggcatcttacctttatcacccttgttcctccaacaatcatcagccctattacaacagttacccttggtgcatttattggcacaaaacatcagggcacaacaactacaacaacttgtgctagcaaaccttgctgcctactctcagcaacagcagtttcttccattcaaccaactaggttcattgaactctgcttcttatt

SEQ ID NO: 322032 - DNA, 441 bp, Zea mays
caacaagcaacatagaaagtggaatccagtagcaacaacagagcatcaatggcgaccaagatattctccctccttatgctccttgctctttctgcatgtgttgctaacgcgacaattttccctcaatgctcacaagctcctatagcttcccttcttcccccataccttccatcaatgatagcttcagtatgtgaaaacccagctcttcagccctataggctccaacaagcaatcgcagcaagcaacatacctttatcacccttgttgtttcaacaatcgccagccctatctttggtgcagtcattggtacaaaccatcagggcacagcagctgcagcaactcgtgctacctgtgatcaaccaagtagctctggcaaacctttctccctactctcagcaacaacaatttcttccattcaaccaactgtctacactgaaccct

SEQ ID NO: 322033 - DNA, 439 bp, Zea mays
gcaacatagacagcacaatagtgtaccaacaatggcagtcaaaatattttgcctccttatgctccttggtatttctgcaagtgctgctacggcgaccattttcccgcaatgctcacaagctcctatagcttcccttcttcccccgtacctctcaccagcggtgtcttcggtatgtgaaaacccaattcttcaaccctacaggatccaacaggcaatcgcagctggcatcttacctttatcacccttgttcctccaacaatcatcagccctattacagcagttacctttggtgcatttattggcacaaaacatcaaggcacaacaactacaacaacttgtgctagcaaaccttgctgcctactctcagcaacagcagtttcttccattcaaccaactagctgcattgaactctgcttcttatttgcaacaacaacaacta

SEQ ID NO: 322034 - DNA, 425 bp, Zea mays
attgagaccaacaagcaacatagaaagtggaatccagtagcaacaacagagcaacaatggcgaccaagatattttccctccttatgctccttgctctttctgcatgtgttgctaacgcgacaattttccctcaatgctcacaagctcctatagcttcccttcttcccccataccttccatcaatgatagcttcagtatgtgaaaacccagctcttcagccctataggctccaacaagcaatcgcagcaagcaacatacctttatcacccttgttgtttcaacaatcgccagccctatctttggtgcagtcattggtacaaaccatcagggcacagcagctgcagcaactcgtgctacctgtgatcaaccaagtagctctggcaaacctttctccctactctcagcaacaacaatttcttccattc

SEQ ID NO: 322035 - DNA, 425 bp, Zea mays
  unsure (1)..(425): unsure at all n locations
tgcatttattggcacanaacatcagggcacaacaactacaacaacttgtgctagcaaacgttgctgcctactctcagcaacagcagtttcttccattcaaccaactagctgcattgaactctgcttcttatttgcaacaacaacaactaccattcagccagctatctgctgcctacccccagcaatttcttccattcaaccaactgacagcattgaactctcctgcttatttacagcagcaacaactactaccattcagccagctagctggtgtgagccctgctaccttcttgacacaaccacagttgttgccgttctaccagcacgctgcgcctaacgctggcaccctcttacaactgcaacaattgctgccattcaaccaacttgctttgacaaacccagcagcattctaccaacaacccatc

SEQ ID NO: 322036 - DNA, 432 bp, Zea mays
attgagaccaactagcaacatagaaagcacaatagtgtaccaacaatggcagccaaaatgattttgcctccttatgctccttggtctttctgcaagtgctgctacggcgaccattttcccgcaatgctcgcaagctcctatagcttcccttcttcccccgtacctctcaccagcggtgtcttcggtatgtgaaaacccaattcttcaaccctacaggatccaacaggcaatcacagctggcatcttacctttatcacccttgttcctccaacaatcatcagccctattacatcagttacctttggtgcatttattggcacaaaacatcagggcacaacaactacaacaacttgtgctagcaaaccttgctgcctactctcagcaacagcagtttcttccattcaaccaactagctgcattgaactctgcttc

SEQ ID NO: 322037 - DNA, 372 bp, Zea mays
gttctagatgcgagcggccgcccttttacaactgcaacaattgctgccattcaaccaacttgctttgacaaaccgaacagtgttctaccaacaacccatcattggtggtgccctcttttagattgcttatgagttatagttcaataatgaagttttttggatgaaaaaaaaattaaaaaaaaaaaaaaaaaaaaaaacaaaaaaaattaaaaatatttaaaaattattaataaataaaacattaaaataaccccccttaaacttcttaataaaaagcctacttttcataattttccaatttttctttaattccacttccccttaaaactttccaaaaaaatatacccaaaaaaaaaaaaggggggccctttt

SEQ ID NO: 322038 - DNA, 120 bp, Zea mays
ccaacaacccatcattggtggtgccctcttttagacttcttatgagttatagctcaatactacagctttttgtctgaaacaaacaacaatacttgccacatataacaatacaagccaaaa

SEQ ID NO: 322039 - DNA, 438 bp, Zea mays
cagaaacacaccaagcgaagcacattagcaacaacctaacaacaatggctaccaagatgttatccctccttgcgcttcttgcgctttttgcgagcgcaacaaatgcgttcattattccacaatgctcacttgctccaagttccattattacacagttcctgccaccagttacttcaatgggcttcgaacacccagctgtgcaagcctataggctacaacaagcaattgcggcgagcgtcttacaacaaccaatttaccagttgcaacaacaatccttggcacatctaacaatacaaaccatcgcaacgcaacagcaacaacaattcctaccagcactgagccacctagccatggtgaaccctgccgcctacttgcaacagcagttgcttgcatcatacccacttgctctggcacacgtagttgcaaaccagccacaac

SEQ ID NO: 322040 - DNA, 435 bp, Zea mays
ggctaccaagatattagccctccttgcgcttcttgcccttttagtgagcgcaacaaatgcgttcattattccacagtgctcacttgctcctagtgccattattccacagttcctcccaccagttacttcaatgggcttcgaacatccagccgtgcaagcctacaggctacaactagcgcttgcggcgagcgccttacaacaaccaattgcccaattgcaacaacaatccttggcacatctaaccctacaaaccattgcaacgcaacaacaacaacaacaacagtttctgccatcactgagccacctagccgtggtgaaccctgtcacctacttgcaacagcagctgcttgcatccaacccacttgctctggcgaacgtagctgcataccagcaacaacaacagctgcaacagtttatgccagtgctcagtcaact

SEQ ID NO: 322041 - DNA, 430 bp, Zea mays
attggcacaaaacatcagggcacaacaactacaacaacttgtgctagcaaaccttgctgcctactctcagcaacagcagtttcttccattcaaccaactagctgcattgaactctgcttcttatttgcaacaacaacaactaccattcagccagctacctgctgcctacccccagcaatttcttccattcaaccaactggcagcattgaactctcctgcttatttacagcagcaacaactactaccattcagccagctagctggtgtgagccctgctaccttcttgatacaaccacagttgttgccgttctaccagcacgctgcgcctaacgctggcaccctcttacaactgcaacatttgctgccattcaaccaacttgctttgacaaacccagcagcgttctaccaacaacccatcattggtggtgcc

SEQ ID NO: 322042 - DNA, 433 bp, Zea mays
  unsure (1)..(433): unsure at all n locations
caactagcaacatagaaagcacaatagtgtaccaacaatggcagccaaaatattntgccgccttatgctccttggtctttctgcaagtgctgctacggcgaccattttcccgcaatgctcgcaagctcctatagcttcccttcttcccccgtacctctcaccagcggtgtcttcggtatgtgaaaacccaattcttcaaccctacaggatccaacaggcaatcacagctggcatcttacctttatcacccttgttcctccaacaatcatcagccctattacatcagttacctttggtgcatttattggcacaaaacatcagggcacaacaactacaacaacttgtgctagcaaaccttgctgcctactctcagcaacagcagtttcttccattcaaccaactagctgcattgaactctgcttcttatttgcaa

SEQ ID NO: 322043 - DNA, 430 bp, Zea mays
agaccattagctttatctactccagagcgcagaagaacccgatcgacaccatgagggtgttgctcgttgccctcgctctcctggctctcgctgcgagcgccacctccacgcatacaagcggcggctgcggctgccagccaccgccgccggttcatctaccgccgccggtgcatctgccacctccggttcacctgccacctccggtgcatctcccaccgccggtccacctgccgccgccggtccacctgccaccgccggtccatgtgccgccgccggttcatctgccgccgccaccatgccactaccctactcaaccgccccggcctcagcctcatccccagccacacccatgcccgtgccaacagccgcatccaagcccgtgccagctgcagggaacctgcggcgttggcagcaccccgatcctgggcca

SEQ ID NO: 322044 - DNA, 448 bp, Zea mays
  unsure (1)..(448): unsure at all n locations
caactagcnaacttagaaagcaccattagtggtcccaccaatggcaggcaaaaatatttggcgtgccttaggctcccttggtctttctgcaagtgttgctaccgcaaccattttcccacaatgctcacaagctcctatagcttcccttcttcccccatacctctcaccagcggtgtcttcaatgtgtgaaaacccaattgttcaaccctacaggatccaacaggcaatcgcaacaggcatcttaccattatcacccttgttcctccaacaaccgtcagccctattacagcagttacctttggtccatttggtggcacaaaacatcagggcacaacaactacaacaacttgtgctagcaaaccttgctgcatactctcagcaacatcagtttcttccattcaaccaactggctgcattgaactctgctgcttatttgcaacaacaatta

SEQ ID NO: 322045 - DNA, 435 bp, Zea mays
cagaaacacaccaagcgaagctacctagcaacgacttaacaacaatggctaccaagatattagccctccttgcgcttcttgccctttttgtgagcgcaacaaatgcgttcattattccacaatgctcacttgctcctagtgccattataccacagttcctccgaccagttacttcaatgggcttcgaacacctagctgtgcaagcctacaggctacaacaagcgcttgcggcgagcgtcttacaacaaccaattaaccaattgcaacaacaatccttggcacatctaaccatacaaaccatcgcaacacaacagcaacaacagttcctaccagcactgagccaactagatgtggtgaaccctgtcgcctacttgcaacagcaggtgcttgcatccaacccacttgctctggcaaacgtagctgcataccaacaac

SEQ ID NO: 322046 - DNA, 426 bp, Zea mays
ctttagtatgtgaaaacccagcccttcaaccctacaggatccagcaagcaatcgcaacaggcaacttacctttatcacacctgttctttcaacaatcgccagccctatctttggtgcagtcattggtacaaaccatcagggcagaacagttgcagcaactcgtgctaccagtgatcagccaagtagctctggcaaacctttccccctactctcagcaacaacaatttcttccattcaaccaactgtctatactgaaccctgctgcttatttgcagcaacaacaactactaccattcatgcagctagctactgcctactctcagcagcaacaatttcttccatttaaccaattggccgcactgaacccctatgcttatttccagcagcaaatactactaccatttggccagctagctacaacaagcc

SEQ ID NO: 322047 - DNA, 437 bp, Zea mays
caacatacaaagcacaatcgtgtaccaacaatggcagccaaaatattgtgcttccttatgctccttggtctttctgcaagtgctgctaccgcaaccatttttccacaatgctcacaagctcctatagcttactttcttaccccatacctctcaccagcggtgtcttcagtatgtgaaaacccaattcttcaaccctacaggatccaacaggcaatcgcagcacgcatcttacctttatcacccttgttcctacaacaaccgtcagtcctattacagcagttacctttgctgcatttgctggcacagaacatcaaggcacaacaactacaacaacttgtgctacgaaaccttgctgtctactctcagcaacagcagtttcttccattcaaccaactggctgcattgaactctgctgcttatttgcaacaacaactacc

SEQ ID NO: 322048 - DNA, 428 bp, Zea mays
atttagaccaactagcaacatagaaagcacaatagtgtaccaacaatggcagccaaaggattttgcctccttatgctccttggtatttctgcaagtgctgctacggcgaccattttcccgcaatgctcacaagctcctatagcttcccttcttcccccgtacctctcaccagcggtgtcttcggtatgtgaaaacccaattcttcaaccctacaggatccaacaggcaatcgcagctggcatcttacctttatcacccttgttcctccaacaatcatcagccctattacagcagttacctttggtgcatttattggcacaaaacatcagggcacaacaactacaacaacttgtgctagcaaaccttgctgcctactctcagcaacagcagtttcttccattcaaccaactagctgcattgaactctgc

SEQ ID NO: 322049 - DNA, 431 bp, Zea mays
aaaacacaccaagcgaagcgcactagcaacgacctaacaccaatggctaccaagatattagccctgcttgcgcttcttgcccttttagtgagcgcaacaaatgcgttcattattccacagtgctcacttgctcctagtgccattattccacagttccttccaccagttacttcaatgggcttcgaacattcagccgtgcaagcctacaggctacaactagcgcttgcggcgagcgccttacaacaaccaattgcccaattgcaacaacaatccttggcacatctaaccctacaaaccattgcaacgcaacaacaacaacaacaacagtttctgccatcactgagccacctagccgtggtgaaccctgtcacctacttgcaacagcagctgcttgcattcaacccacttgctctggcgaacgtagctgcata

SEQ ID NO: 322050 - DNA, 432 bp, Zea mays
caacaagcaacatagaaagtggaatccagtagcaacaatagagcaacaatggcgaccaagatactgtccctccttatgctccttgctctttctgcatgtgttgctaacgcgacaattttccctcaatgctcacaagctcctatagcttcccttcttcccccataccttccatcaatgatagcttcagtatgtgaaaacccagctcttcaaccctataggctccaacaagcaatcgcagcaagcaacatacctttatcacccttgtttcaacaatcgccagccctatctttggtgcagtcattggtacaaaccatcaaggcacagcagctgcagcaactcgtgctacctgtgatcaaccaagtagctctggcaaacctttctccctactatcagcaacaacaatttcttccattcaaccaactatctacactg

SEQ ID NO: 322051 - DNA, 456 bp, Zea mays
ggaattcccgggagaccattagctttatctactccagagcgcagaagaacccgatcgacaccatgagggtgttgctcgttgccctcgctctcctggctctcgctgcgagcgccacctccacgcatacaagcggcggctgcggctgccagccaccgccgccggttcatctaccgccgccggtgcatctgccacctccggttcacctgccacctccggtgcatctcccaccgccggtccacctgccgccgccggtccacctgccaccgccggtccatgtgccgccgccggttcatctgccgccgccaccatgccactaccctactcaaccgccccggcctcagcctcatccccagccacacccatgcccgtgccaacagccgcatccaagcccgtgccagctgcagggaacctgcggcgttggcagcaccccgatcctgggccagtgcgtcgagtttc

SEQ ID NO: 322052 - DNA, 225 bp, Zea mays
ctctcatcgacagagatagagcgagagtaacatgcgcgcgtggctgcagcgcacacgtgcggcgcggatcacaacaacagctgatcctcagaggtagggaagccatgttcagaaagtcgtgcaagaatgaagaattcgagaaatcctacgtgtatgacgaggcagatgagtggcagaaggacgacaaggataagtgagtaagttgcaagtgagactaggttaaag

SEQ ID NO: 322053 - DNA, 434 bp, Zea mays
agcaaagcggcagtgcgtagagaggatcgtcgaacagaacagcatgaagatggtcatcggtctcgtcgtgtgcctggctctgtcagctgccagcgcctctgcaatgcagatgccctgcccctgcgcggggctgcagggcttgtacggcgctggcgccggcctgacgacgatgatgggcgccggcgggctgtacccctacgcggagtacctgaggcagccgcagtgcagcccgctggcggcggcgccctactacgccgggtgtgggcagacgagcgccatgtaccagccgctccggcaacagtgctgccagcagcagatgaggatgatggacgtgcagtccgtcgcgcagcagctgcagatgatgatgcagcttgagcgtgccgctgccgccagcagcagcctgtacgagccagctctgatgcagcagcagcagc

SEQ ID NO: 322054 - DNA, 433 bp, Zea mays
gtcagcctagcaattagctcatcgactccagattggagaactcgacaccatgaaggtgctgatcgttgcccttgctctcctggcgctcgctgcgagcgccgcctccagtacaagcggcggctgtggctgccagacaccaccgtttcatctaccgcctccgttctatatgccgcctccgttctatctgccgccgcagcagcagccgcagccatggcaataccccactcaaccaccgcagctaagcccgtgccagcagttcggatcctgcggcgtcggcagcgtcggcagcccgttcctgggccagtgcgtcgagttcctgaggcaccagtgcagcccggcggcgacgccctacggctcgccacagtgccaggcgctgcagcagcagtgctgccaccagatcaggcaggtggagccgctgcaccggtaccaggcc

SEQ ID NO: 322055 - DNA, 410 bp, Zea mays
ttgagaccagcaagcaacatagaaagtagaatccattagcaacaatagagcaacaatggcgaccaagatattttcccttcttatgctccttggtctttctacatggggtggtaacgccacaatttttccttaatggttacaagcttctataggttcccttctttccccatacctttcatcaattatagcttcagtatgtgaaaacccagctcttcaaccatataggcttcaacaagcaatcgcagcaagcaacatacctttatcgccctttgttgttcaacaatcaccagccctatctttggtgcagtcattggtacaaaccatcagggcacaacagctgcagcaactcgtgctacctgtgatcaaccaagtagctctggcaaaccttttctcctactctcagcaacaac

SEQ ID NO: 322056 - DNA, 425 bp, Zea mays
cttacctttataacctggttcttccaccaataataagccctataacagaagttacctggggtggcattaattggcacaaaacatcagggcacaacaactacaacaacttgtgctagcaaaccttgctgcctactctcagcaacagcagtttcttccattcaaccaactagctgcattgaactctgcttcttatttgcaacaacaacaactaccattcagccagctatctgctgcctacccccagcaatttcttccattcaaccaactgacagcattgaactctcctgcttatttacagcagcaacaactactaccattcagccagctagctggtgtgagccctgctaccttcttgacacaaccacagttgttgccgttctaccagcacgctgcgcctaacgctggcaccctcttacaactgcaac

SEQ ID NO: 322057 - DNA, 436 bp, Zea mays
cggaatgaccgacgcgacccacgcgatcgcgccaaccttacatggccgtcacgccgctacagccgcctcagctccaagggagcccaagcgaaaccactctgcagaccaccatgaactatgccagctagctggttacagtgccgccctcccgcgtgtgcacgaccaccgcgtaagaggtagtcgccttatgaccggccaagaacagcggctcgctcgccgctgcacgccagcgccaaggatcccatcacggagtgagggcagaagtcaatgaatctggaagtgcatagactgttgatgcactctgacgaagctgacatgatctgcttccaagacttgatcgcaacagtgacctttctgagagcacatgacaggctgcagtgactacagcttcgatgagcacgaagtatagagcagatatcactgtagatgatattga

SEQ ID NO: 322058 - DNA, 438 bp, Zea mays
agccttcggccacgccttcggccaagccttccgccaatccttccggaaggcaggacaaaatggtggcggccgtggcgtcgccttcgtcggcggaaccttccgccggccgtccccatccgacatacaaggaggaccttcggcaaggtaggtcacaacaacaacgatcaatgatagggctacgggagggcccgcccataggcgtgcctgtgaggccgagaagaagatcaccgtgctgatcaaggatgtttgaatcggggtcaccatgcttgatcaactgtgtggtgagcatgacaaactagtggatatcatcaccgtactcagcgcagagcatgacatagtcgtgcgccgaccaatgatatggaaaaggatctcgttggttcgtcatctctatcactttgcaaaaatctatgctcaaggcatattcaccatgcttctggc

SEQ ID NO: 322059 - DNA, 428 bp, Zea mays
ggcaatcacagctggcatcttacctttatcacccttgttcctccaacaatcatcagccgtattacatcagttacctttggtgcatttattggcacaaaacatcagggcacaacaactacaacaacttgtgctagcaaaccttgctgcctactctcagcaacagcagtttcttccattcaaccaactagctgcattgaactctgcttcttatttgcaacaacaacaactaccattcagccagctacctgctgcctacccccagcaatttcttccattcaaccaactggcagcattgaactctcctgcttatttacagcagcaacaactactaccattcagccagctagctggtgtgagccctgctaccttcttgatacaaccacagttgttgccgttctaccagcacgctgcgcctaacgctggcaccc

SEQ ID NO: 322060 - DNA, 433 bp, Zea mays
aaagcacaatagtgtaccaacaatggcagccaaaatattttgcttccttatgctccttggtctttctgcaagtgttgctaccgcaaccattttcccacaatgctcacaagctcctatagcttcccttcttcccccatacctctcaccagcggtgtcttcaatgtgtgaaaacccaattgttcaaccctacaggatccaacaggcaatcgcaacaggcatcttaccattatcacccttgttcctccaacaaccgtcagccctattacagcagttacctttggtccatttggtggcacaaaacatcagggcacaacaactacaacaacttgtgctagcaaaccttgctgcatactctcagcaacatcagtttcttccattcaaccaactggctgcattgaactctgctgcttatttgcaacaacaattaccattc

SEQ ID NO: 322061 - DNA, 426 bp, Zea mays
acatagaaagtggaatccagtagcaacaatagagcaacaatggcgaccaagatactttccctccttatgctccttgctctttctgcatgtgttgctaacgcgacaattttccctcaatgctcacaagctcctatagcttcccttcttcccccataccttccatcaatgatagcttcagtatgtgaaaacccagctcttcaaccctataggctccaacaagcaatcgcagcaagcaacatacctttatcacccttgtttcaacaatcgccagccctatctttggtgcagtcattggtacaaaccatcaaggcacagcagctgcagcaactcgtgctacctgtgatcaaccaagtagctctggcaaacctttctccctactatcagcaacaacaatttcttccattcaaccaactatctacactgaac

SEQ ID NO: 322062 - DNA, 274 bp, Zea mays
gcattcaaaaaccccctaatgaaacgcaattaccaccaactaaccaccatgggttcccagaaaataatccttttttgggctcttggcctttttgggaaccccaccaaaggcgtcaatatttcacacaggttaattggttctataggccatatttcacaagttctctcttcacagtacactaagtggctttaacacacacatgtgcaagactatacggtataaaaagcgctcttggcgagcgcgtttcaacaacccaatgtgcaaattcaacaac

SEQ ID NO: 322063 - DNA, 419 bp, Zea mays
gctgcagcaactcgtgctacctgtgatcaaccaagtagctctggcaaacctttctccctactctcagcaacaacaatttcttccattcaaccaactgtctacactgaaccctgctgcttatttgcagcaacaactattaccatttagccagctagctactgcctactctcagcaacaacaacttcttccatttaaccaattggccgcactgaaccccgctgcttatttgcagcagcaaatactactgccatttagcgagctagctgcagcaagtcgtgcttccttcttgacacagcaacagttgctgcctttctacaagcagtttgcggctaaccccgcaaccctcttacaactacaacaattgttgccctttgtccaacttgctttgacaaacccagcagccttctaccaacaacaca

SEQ ID NO: 322064 - DNA, 321 bp, Zea mays
  unsure (1)..(321): unsure at all n locations
gtagcagcatcgagagcacactgtggtcaacccagtggcagtcacaaaattntgcctggtaatggagcaaggacaatgtgtaagattcgatacagtgaccacactgaagcatggcgcgcatgcgcagatacatctactaccatttaggcagctagcaacagccgactcttaggaacgagaacacccaacacttaaacaatacaggatacagcacgcacgctacagatggcaagcaacctatactaccgtcgttcatcgagcaagcatgagccctgacacactagctacctgacacagcatacagttggcacacaacataca

SEQ ID NO: 322065 - DNA, 439 bp, Zea mays
ctagcaacatagaaagcacattagtgtaccaacaatggcagccaaaatattttgcttccttatgcgccttggtctttctgcaagtgctgctaccgcaaccattttcccacaatgctcacaagctcctatagcttcctttcttcccccatacctctcaccagcggtgtcttcagtatgtgaaaacccaattcttcaaccctacaggatccaacaggcaatcgcagcaggcatcttacctttatcacccttgttcctccaacaaccgtcagccctattacagcagttacctttggtgcatttgttggcacaaaacatcaaggcacaacaactacaacaacttgtgctaggaaaccttgctgcctactctcagcaacagcagtttcttccattcaaccaactggctgcattgaactctgctgcttatttgcaacaacaacta

SEQ ID NO: 322066 - DNA, 339 bp, Zea mays
  unsure (1)..(339): unsure at all n locations
atctactccagagcgcagaagaacccgatcgacaccatgagggtgttgctcgttgcccgtggctctcctggctctcgctgcgagcgccacctccacgcatacaagcggcggctgcggctgccagccaccgccgccggttcatctaccgccgccggtgcatctgccacctccggttcacctgccacctccggtgcatctcccaccgccggtccacctgccgccgccggtccacctgccaccgncggtccatgtgccgccgccggttcatctgccgncgncaccatgccactaccctactcaaccgcgccgggctcagactcatacccagacacacccatg

SEQ ID NO: 322067 - DNA, 426 bp, Zea mays
acatagaaagtagaatccattagcaacaatagagcaacaatggcgaccaagatgttttccctccttatgctccttgctctttctacatgtgttgctaacgcgacaattttccctcaatgctcacaagctcctatagcttcccttcttcccccataccttccatcaattatagcttcagtatgtgaaaacccagctcttcaaccatataggcttcaacaagcaatcgcagcaagcaacatacctttatcgcccttgttgtttcaacaatcaccagccctatctttggtgcagtcattggtacaaaccatcaaggcacaacagctgcagcaactcgtgctacctgtgatcaaccaagtagctctggcaaacctttctccctactctcagcaacaacaatttcttccattcaaccaactgtctacactg

SEQ ID NO: 322068 - DNA, 428 bp, Zea mays
ggacgtcagcctagcaattagctcatcgactccagattggagaactcgacaccatgaaggtgctgatcgttgcccttgctctcctggcgctcgctgcgagcgccgcctccagtacaagcggcggctgtggctgccagacaccaccgtttcatctaccgcctccgttctatatgccgcctccgttctatctgccgccgcagcagcagccgcagccatggcaataccccactcaaccaccgcagctaagcccgtgccagcagttcggatcctgcggcgtcggcagcgtcggcagcccgttcctgggccagtgcgtcgagttcctgaggcaccagtgcagcccggcggcgacgccctacggctcgccacagtgccaggcgctgcagcagcagtgctgccaccagatcaggcaggtggagccgctgcaccgg

SEQ ID NO: 322069 - DNA, 433 bp, Zea mays
ctagcaacatagaaagcacaatagtgtaccaacaatggcagccaaaatattttgcctccgtatgctgcttggtctttctgcaagtgctgctacggcgaccattttcccgcaatgctcgcaagctcctatagcttcccttcttcccccgtacctctcaccagcggtgtcttcggtatgtgaaaacccaattcttcaaccctacaggatccaacaggcaatcacagctggcatcttacctttatcacccttgttcctccaacaatcatcagccctattacatcagttacctttggtgcatctattggcacaaaacatcaaggcacaacaactacaacaacttgtgctagcaaaccttgctgcctactctcagcaacagcagtttcttccattcaaccaactagctgcatagaactctgcttcttatttgcaacaa

SEQ ID NO: 322070 - DNA, 432 bp, Zea mays
caagcaacatagaaagtggaatccagtatcaacaatagagcaacaatggcgaccaagatgttctccctccttatgctccttgctctttctacatgtgatgctaacgcgacaattttccctcaatgctcacaagctcctatagcttcccttcttgccccataccttccatcaattatagcttcaatatgtgaaaacccagctcttcaaccatatatgcttcaacaagcaatcgcagcaagcaacatacctgtatcgcccttgttgcttcaacaatcgccagccctatctttggtgcagtcattggtacaaaccatcagggcacaacagctgcagcaactcgtgctacctctgatcaaccaagtaactcttgcaaacctttcctcctactctcagcaacaacaatttctttcattcaaccaactgtctacactg

SEQ ID NO: 322071 - DNA, 441 bp, Zea mays
tgagaccaactagcaacatagaaagcacaatagtgtaccaacaatggcagccaaaatatgttgcctccttatgctccttggtctttctgcaagtgctgctacggcgaccattttcccgcaatgctcgcaagctcctatagcttcccttcttcccccgtacctctcaccagcggtgtcttcggtatgtgaaaacccaattcttcaaccctacaggatccaacaggcaatcgcagctggcatcttacctttatcacccttgttcctccaacaatcatcagccctattacaacagttacctttggtgcatttattggcacaaaacatcagggcacaacaactacaacaacttgtgctagcaaaccttgctgcctactctcagcaacagcagtttcttccattcaaccaactaggttcattgaactctgcttcttatttgcaaca

SEQ ID NO: 322072 - DNA, 454 bp, Zea mays
  unsure (1)..(454): unsure at all n locations
gaccgacgcggtacgcgagcaacacgcaacttaaagggtggactacagtagcaaaaatagagcaccaatggcggccaagatattttccatccttatgctccttgctctttctgcatgtgttgctaacgcgaccatttttcctcaatactcacaagctcctatagctgcccttcttcccccataccttccatcaatgaccgctttagtatgtgaaaacccagcccttcaaccctacaggatccagcaagcaatcgcaacaagcaacttacctttatcacacctgttctttcaacaatcgccagccctatctttggtgcagtcattggtacaaaccatcagggcagaacagttgcagcaactcgtgctaccagtgatcagccaagtagctctggcaaacctttccccctactctcagcaacaacaatntcttccattcaaccaactgtctatactg

SEQ ID NO: 322073 - DNA, 451 bp, Zea mays
cattttgagcattcagaaacacaccaagcgaagcgcactagcaacgacctaacaacaatggctaccaagatattagccctccttgcgcttcttgccctttttgtgagcgcaacaaatgcgttcattattccacaatgctcacttgctcctagtgccattattccacagttcctcccaccagttacttcaatgggcttcgaacacctagctgtgcaagccaacatgcaacaacaagcgcttgcggcgagcgtcttacaacaaccaattgcccaattgcaacaacaatccttgccacatctaacaatacaagccatcacaacgcaacagcaacaacagttcctaccagcactgagccacctagccatggtgaaccctgccgcctacttgcaagagcagctgcttgcatccaacccacttgctctggcgaacgtagttgcaaaccagcaacaac

SEQ ID NO: 322074 - DNA, 429 bp, Zea mays
atggaaagcatgctatccaaaattttaatgtggggacttttttccttttttttaagggaaaattgtaatggtatatggtgatatgcctcgttgaatcaggtctatgtaggcaaagagaaacaaactgttgcagaaatgcttccttatttgagattaggatacatttcagatccagacgaaatgcagtctatactctcttctgaaggagatacatgtccagttagtccatgtacagagcgagctgtacttgatcagcttggtggttacctggaatctcggttggctggttatccaacaacattgaatgaagatgaagctatgttggcagatggcagtttggaaccaaagcaggaagttgctactaggcttgtgaggttggagaagaagatgctccatgcctgtctccaggccacaaatgagtttataact

SEQ ID NO: 322075 - DNA, 436 bp, Zea mays
  unsure (1)..(436): unsure at all n locations
gcgaagcggcagtgcgtagagaggatcgtcgaacagaacagcatgaagatggtcatcggtctcgtcgtgtgcctggctctgtcagctgccagcgcctctgcaatgcagatgccctgcccctgcgcggggctgcagggcttgtacggcgctggcgccggcctgacgacgatgatgggcgccggcgggctgtacccctacgcggagtacctgaggcagccgcagtgcagcccgctggcggcggcgccctactacgccgggtgtgggcagacgagcgccatgtaccagccgctccggcaacagtgctgccagcagcagatgaggatgatggacgtgcagtccgtcgcgcagcagctgcagatgatgatgcagctngagcgtgccgctgccgccagcagcagcctgtacgagccagctctgatgcagcagcagcagcagc

SEQ ID NO: 322076 - DNA, 436 bp, Zea mays
gaaagcacaatagtgtaccaacaatggcagccaaaatattttgcctccttatgctccttggtctttctgcaagtgctgctacggcgaccattttcccgcaatgctcgcaagctcctatagcttcccttcttcccccgtacctctcaccagcggtgtcttcggtatgtgaaaacccaattcttcaaccctacaggatccaacaggcaatcacagctggcatcttacctttatcacccttgttcctccaacaatcatcagccctattacatcagttacctttggtgcatttattggcacaaaacatcaaggcacaacaactacaacaacttgtgctagcaaaccttgctgcctactctcagcaacagcagtttcttccattcaaccaacttacttgcattgaactctgcttcttatttgcaacaacaacaactaccat

SEQ ID NO: 322077 - DNA, 359 bp, Zea mays
acatagaaagtggaatccagtatcaacaacagagcaacaatggcgaccaagaggttttgcctccttatgctccttgctcgttctgcatgtgttgctaacgcgacaattttccctcaatgctcacaagctcctatagcttcccttcttcccccataccttccatcaatgatagcttcagtatgtgaaaacccagctcttcagccctataggctccaacaagcaatcgcagcaagcaacatacctttatcacccttgttggttcaacaatcgccagccctatctttggtgcagtcattggtacaaaccatcaaggcacagcagctgcagcaactcgtgctacctgtgatcaaccaagtagc

SEQ ID NO: 322078 - DNA, 429 bp, Zea mays
  unsure (1)..(429): unsure at all n locations
aacangcaacatagaaagtggaatccagtagcaacaatagagcaacgatggcgaccaagatactttccctccttatgctccttgctctttctgcatgtgttgctaacgcgacaattttccctcaatgctcacaagctcctatagcttcccttcttcccccataccttccatcaatgatagcttcagtatgtgaaaacccagctcttcaaccctataggctccaacaagcaatcgcagcaagcaacatacctttatcacccttgtttcaacaatcgccagccctatctttggtgcagtcattggtacaaaccatcaaggcacagcagctgcagcaactcgtgctacctgtgatcaaccaagtagctctggcaaacctttctccctactatcagcaacaacaatttcttcctttcaaccaactatctacac

SEQ ID NO: 322079 - DNA, 437 bp, Zea mays
cacgcgtccggctccttggtctttctgcaagtgctgctacggcgaccattttcccgcaatgctcgcaggctcctatagcttcccttcttcccccgtacctctcaccagcggtgtcttcggtatgtgaaaacccaattcttcaaccctacaggatccaacaggcaatcgcagctggcatcttacctttatcacccttgttcctccaacaatcatcagccctattacaacagttacctttggtgcatttattggcacaaaacatcagggcacaacaactacaacaacttgtgctagcaaaccttgctgcctactctcagcaacagcagtttcttccattcaaccaactaggttcattgaactctgcttcttatttgcaacaacaacaactaccattcagccagctacctgctgcctacccccagcaatttcttccattc

SEQ ID NO: 322080 - DNA, 435 bp, Zea mays
caacaagcaacatagaaagtggaatccagtagcaacaacagagcaacaatggcgaccgagatagtttccctccttatgctccttgctctttctgcatgtgttgctaacgcgacaattttccctcaatgctcacaagctcctatagcttcccttcttcccccataccttccatcaatgatagcttcagtatgtgaaaacccagctcttcagccctataggctccaacaagcaatcgcagcaagcaacatacctttatcacccttgttgtttcaacaatcgccagccctatctttggtgcagtcattggtacaaaccatcagggcacagcagctgcagcaactcgtgctacctgtgatcaaccaagtagctctggcaaacctttctccctactctcagcaacaacaatttcttccattcaaccaactgtctacactg

SEQ ID NO: 322081 - DNA, 423 bp, Zea mays
  unsure (1)..(423): unsure at all n locations
agtgtaccaacaatggcagccaaaatattttgcttccttaagctccttggtctttctgcaagtgttgctaccggaaccattttcccacaatgctcacaagctcctataagcttccttcttcccccatacctctcaccagcggtgtcttcaatgtgggaaaccccaattgttcaaccctacangatccaacaggcaatcgcaacaggcatcttaccattatcacccttgttccttcaacaaccgtcagccctattacagcagttacctttggtccatttggtggcacanaacatcagggcacaacaactacaacaacttgtgctagcaaaccttgctgcatactctcagcaacatcagtttcttccattcaaccaactggctgcattgaactctgctgcttatttgcaacaacaattaccattc

SEQ ID NO: 322082 - DNA, 363 bp, Zea mays
gccacgcgtccggggacatacaacgcacactatttcagttataataacagccaaatcaacacgggtaaagatgctttttgagctctctctgtgtcgctgtttcagcaagcatattaccgtaatgctcacaagctgctattgatgttctaagaaacccatacctgttactttcgatgtatcaactatgtgaaaatcaactgtttatactcatacatcatccatatggcaaacctagcgtgcatattacgtttatcatccttgtacctcccacaatcattatgcctactacagcacatacctatgcatcattaattgacacaaataatcagggtacatcaactacgacaacttgagctagcaaac

SEQ ID NO: 322083 - DNA, 154 bp, Zea mays
gcacatcaaacaagtggcgacagactaagatttgtgagggtgatccgcgcggagagtagatggctaagatcgccgcggcggcggcggcggcgctgtgcttcgcggccctggtggccgtggccgtctgccaaagcgaggtcgagcggcagaagct

SEQ ID NO: 322084 - DNA, 341 bp, Zea mays
gcattcagaaacacaccaagcgaagcgcactagcaacgacctaacaacaatggctagcgagatattagccctccttgcgcttcttgccctttttgtgagcgcaacaaatgcgttcattattccacaatgctcacttgctcctagtgccattattccacagttcctcccaccagttacttcaatgggcttcgaacacctagctgtgcaagccaacatgcaacaacaagcgcttgcggcgagcgtcttacaacaaccaattgcccaattgcaacaacaatccttgccacatctaacaatacaagccatcacaacgcaacagcaacaacaagttctaccagcac

SEQ ID NO: 322085 - DNA, 463 bp, Zea mays
accgatccgcaattccagccacgcctacgcagaaagcacaatagtgtaccaacaatggcagctaaaatattctgcctccttatgcgggttggtctttctgcaagtgctgctacggcgaccattttcccgcaatgctcgcaagctcctatagcttcccttcttcccccgtacctctcaccagcggtgtcttcggtatgtgaaaacccaattcttcaaccctacaagatccaacaagcaattcacagctggcatcttacctttatcacccttgatccttcaacaatcatcagccctattacatcagttacctttggtgcatttattggcccaaaacatcaaggcacaacaactacaacaacttgtgctagcaaaccttgctggctactttcagcaacagcagtttcttccattcaaccaactagctgcattgaactcttgctctaatttgcaacaacaacaacta

SEQ ID NO: 322086 - DNA, 432 bp, Zea mays
cccacgcgtccggcaacatagaaagcacaatagtgtaccaacaatggcagccaaaatgttttgcctccttatgctccttggtctttctgcaagtgctgctacggcgaccattttcccacaatgctcacaagctcctatagcttcccttcttcccccgtacctctcaccagcggtgtcttcggtatgtgaaaacccaattcttcaaccctataggatccaacaggcaatcgcagctggcatcttacctttatcacccttgttcctccaacaatcatcagccctattacagcagttacctttggtgcatttattggcacaaaacatcagggcacaacaactacaacaacttgtgctagcaaaccttgctgcctactctcagcaacaacagtttcttccattcaaccaactagctgcattgaactctgcttctta

SEQ ID NO: 322087 - DNA, 430 bp, Zea mays
attattgagaccaactagcaacatacaaagcacaatagtgtaccaacaatggcgccgaaaatattctgcctccttatgctccttggtctttctgcaagtgctgctacggcgaccattttcccgcaatgctcgcaagctcctatagcttcccttcttcccccgtacctctcaccagcggtgtctacggtatgtgaaaacccaattcttcaaccctacaggatccaacaggcaatcacagctggcatcttacctttatcacccttgttcctccaacaatcatcagccctattacatcagttacctttggtgcatttattggcacataacatcaaggcacaaccactacaacaaccttggctaacaaaccttgcttgctactctcagcaacagcagtttcttccattcaaccaactagctgcattgaactctg

SEQ ID NO: 322088 - DNA, 442 bp, Zea mays
  unsure (1)..(442): unsure at all n locations
gccggaacggatcacgaggatgacgaataggctggcgctaggctgttcggcgtctcgatcgggcggaaacgaatgcgggacgagagcgaccaccacgccggcgtctgcgcagcggaggtgaaagccgagccggtggacgcgcgtcccgaccagcagcggcagcgcaacgccacggagccgcagtcgtggcccatttaccggcccaggcctgtgtaccacccgctccgggcctgcaacggctcgggcagcgctgggagcgaccacgacgggtccaacgactcgaggtgacgggagcaatcgtcgatctgccctcagtaaattagtattacacttactaatggtactaggtaactatattacaggttaaactaggatgtgagctctaaatctctaattatgtggngatttactgaccgatcctatgtaaaaatctccagtgttt

SEQ ID NO: 322089 - DNA, 434 bp, Zea mays
gtcgatcgcgtcgcgaccagtccatgtttccatgcatgaataacaagggtgtgctcggtctgggataaacaaatgtatgatcagagcgtccacaacccttccatctgcgcactagtagtgaaagtctaaccattgtactcccgttctaactacaatctggcatctgcatacatcatttcagccattatactatagacacattgtatcacgtccaagacctacatactactctctcagaaatttcaacgatttggtcattgctgagagcgaccacgacagatccaacgactagatgtgactgcatcaatcgtcgatctgacctcagtaaattagtattacacttactaatggtactaagtaactatattacacgttatactatgatgtgagctctaaatctctaattatgtgaaaatttactgaccgatcctata

SEQ ID NO: 322090 - DNA, 403 bp, Zea mays
gcaacatagaaagtggaatccagtagcaacaacagagcaacaatggcgaccaagatggtttccctccttatgctccttgctctttctgcatgtgttgctaacgcgacaattttccctcaatgctcacaagctcctatagcttcccttcttcccccataccttccatcaatgatagcttcagtatgtgaaaacccagctcttcagccctataggctccaacaagcaatcgcagcaagcaacatacctttatcacccttgttgtttcaacaatcgccagccctatctttggtgcagtcattggtacaaaccatcaaggcacagcagctgcagcaactcgtgctacctgtgatcaaccaagtagctctggcaaacctttctccctactctcagcaacaacaatttc

SEQ ID NO: 322091 - DNA, 400 bp, Zea mays
  unsure (1)..(400): unsure at all n locations
gagaccaacaagcaacatagaaagtggaatacagtagcaaaaatagagcaacagtgggggccaagatattttccatccttatgctccttgctctttctgcatgtgttgctaacgcgaccatttttcctcaatactcacaagctcctatagctgcccttcttcccccataccttccatcaatgaccgctttagtatgtgaaaacccagcccttcaaccctacaggatccagcaagcaatcgcaacaagcaacttacctttatcacacctgttctttcaacaatcgccagccctatctntggtgcagtcattggtacaaaccatcaaggcagaacagttgcagcaactcgtgctaccagtgatcagccaagtagctctggcaaacctttccccctactctca

SEQ ID NO: 322092 - DNA, 435 bp, Zea mays
cggacgcgtgggtcaatgtgtgaaaacccaattgttcaaccctacaggatccaacaggcaatcgcaacaggcatcttaccattatcacccttgttcctccaacaaccgtcagccctattacagcagttacctttggtccatttggtggcacaaaacatcagggcacaacaactacaacaacttgtgctagcaaaccttgctgcatactctcagcaacatcagtttcttccattcaaccaactggctgcattgaactctgctgcttatttgcaacaacaattaccattcagccagctagttgctgcctacccccagcaatttcttccattcaaccaactagcagcattgaactctgctgcttatttacagcagcaacaactactaccattcagccagctagctgatgtgagccctgctgccttcttgacacaacaa

SEQ ID NO: 322093 - DNA, 393 bp, Zea mays
  unsure (1)..(393): unsure at all n locations
gcaatccccgctccgtctagcggccctgcgcaatcagtcaaggttccatggccaacagcaacgtnccgcgccgaatcatcaaagtcccgctcgcgttctggtcgcccttttctcgctctccccagatctatcgcgttcctgttctgctttgtggaatcggatactctgtctgctggcctctgctgacgattaatctggttcggatttggatctgggccaggagacgcagcggctcctcagcgaaccaggtgcctgactagtttcccgcgagctctctcggaattttggtgcaattcggagtgtgctgctactacaccggtctcggttctctagcatgttatttgattccgcttttcttcttcttctacgcgtgcagcgccggggattagcgcg

SEQ ID NO: 322094 - DNA, 436 bp, Zea mays
attgagaccaacaagcaacatagaaagtggaatacagtagcaaaaatagagcaacaagggcgggcaagatattttccatccttatgctccttgctctttctgcatgtgttgctaacgcgaccatttttcctcaatactcacaagctcctatagctgcccttcttcccccataccttccatcaatgaccgctttagtatgtgaaaacccagcccttcaaccctacaggatccagcaagcaatcgcaacaagcaacttacctttatcacacctgttctttcaacaatcgccagccctatctttggtgcagtcattggtacaaaccatcagggcagaacagttgcagcaactcgtgctaccagtgatcagccaagtagctctggcaaacctttccccctactctcagcaacaacaatttcttccattcaaccaactgtc

SEQ ID NO: 322095 - DNA, 400 bp, Zea mays
gcaacatagaaagcacaatagtgtaccaacaatggcagccaaaatattttgcctccgtatgctccttggtctttctgcaagtgctgctacggcgaccattttcccgcaatgctcgcaagctcctatagcttcccttcttcccccgtacctctcaccagcggtgtcttcggtatgtgaaaacccaattcttcaaccctacaggatccaacaggcaatcacagctggcatcttacctttatcacccttgttcctccaacaatcatcagccctattacatcagttacctttggtgcatttattggcacaaaacatcagggcacaacaactacaacaacttgtgctagcaaaccttgctgcctactctcagcaacaggcagttcttccattcaaccaactagct

SEQ ID NO: 322096 - DNA, 431 bp, Zea mays
gcaacatagaaagcacaatagtgttctcaacaatggcagccaaaatattttgcctcgttatgctccttggtctttctgcaagtgctgctacggcgaccattttcccgcaatgctcgcaagctcctatagcttcccttcttcccccgtacctctcaccagcggtgtcttcggtatgtgaaaacccaattcttcaaccctacaggatccaacaggcaatcacagctggcatcttacctttatcacccttgttcctccaacaatcatcagccctattacatcagttacctttggtgcatttattggcacaaaacatcagggcacaacaactacaacaacttgtgctagcaaaccttgctgcctactctcagcaacagcagtttcttccattcaaccaactagctgcattgaactctgcttcttatttgcaacaa

SEQ ID NO: 322097 - DNA, 434 bp, Zea mays
agcaagcaacatagaaagtagaatccattagcaacaatagagcaacaatggggaccgggatattttccctccttatgctccttgctctttctacatgtgttgctaacgcgacaattttccctcaatgctcacaagctcctatagcttcccttcttcccccataccttccatcaattatagcttcagtatgtgaaaacccagctcttcaaccatataggcttcaacaagcaatcgcagcaagcaacatacctttatcgcccttgttgtttcaacaatcaccagccctatctttggtgcagtcattggtacaaaccatcagggcacaacagctgcagcaactcgtgctacctgtgatcaaccaagtagctctggcaaacctttctccctactctcagcaacaacaatttcttccattcaaccaactgtctacactg

SEQ ID NO: 322098 - DNA, 318 bp, Zea mays
caacaacctaacaacaatggctaccaagatattatccctccttgcgcttcttgcgctgtttgcgagcgcaacaaatgcgttcattattccacaatgctcacttgctccaagttccattattacacagttcctcccaccagttacttcaatgggcttcgaacacccagctgtgcaagcctataggctacaacaagcaattgcggcgagcgttttacaacaaccaatttcccagttgcaacaacaatccttggcacatctaacaatacaaaccatcgcaacgcaacagcaacaacaattcctaccagcacttgaccacct

SEQ ID NO: 322099 - DNA, 428 bp, Zea mays
gggtcttcagaccattagctttatctactccagagcgcagaagaacccgatcgacaccatgagggtgttgctcgttgccctcgctctcctggctctcgctgcgagcgccacctccacgcatacaagcggcggctgcggctgccagccaccgccgccggttcatctaccgccgccggtgcatctgccacctccggttcacctgccacctccggtgcatctcccaccgccggtccacctgccgccgccggtccacctgccaccgccggtccatgtgccgccgccggttcatctgccgccgccaccatgccactaccctactcaaccgccccggcctcagcctcatccccagccacacccatgcccgtgccaacagccgcatccaagcccgtgccagctgcagggaacctgcggcgttggcagcacccccg

SEQ ID NO: 322100 - DNA, 430 bp, Zea mays
agtccctgcacccggtgaatcttccggtgaatatgcggtctgtgacttattcgcagagccaaaattaccaacaagatgatttccataaaactggtgcacgggaccttgagccaaggatcaacaccgatgagcatggattttcatccacttcaacaaactcttcttcttgacaatggccacttctccccaagcgaaaaaaatctgctagaaaaccttaaagggctttaacattgggatggatatttgggcccttaccttgctttaagtggagattcagttttctgttttcacttaatatgacaactgaagagcgaaagactttgaagggcacagagtcttcagctccttctgttcctcctgatggaggagtcagcaaggaacctaaaaaagggggagattacccaatgggaggacaactggtccagcacgc

SEQ ID NO: 322101 - DNA, 257 bp, Zea mays
gtgctacctgtgatcaaccaagtagctctggcaaacctttctccctactctcagcaacgacaagttcttccattcaaccaactgtctacactgaaccctgctgcttatttgcagcaacaactattaccattcagccagctagctactgcctactctcagcaacaacaacttcttccatttaaccaattggccgcactgaaccccgctgcttatttgcagcagcaaatactactaccatttagccagctagctgcagc

SEQ ID NO: 322102 - DNA, 413 bp, Zea mays
attgaactctgctgcttatttgcaacaacaactaccattcagtcagctagctgctgggtacccccagcaatttcttccattcaaccaactggcagcattgaactctgctgcttatttacaacagcaacagctaccaccattcagccagctagctgatgtgagccctgttgccttcttgacacaacaacagttgttgccgttctacctgcacgctgcgcctaacgctggcaccctcttacaactgcaacaattgctgccattcaaccaacttgctttgacaaacccaacagcgttctaccaacaacccatcattggtggtgccctcttttagattgcttatgagttatacttcaataatgaagttttttggatgatgtttgtggcttcccagacataagaaagtacatttctag

SEQ ID NO: 322103 - DNA, 257 bp, Zea mays
gtcgtgcttccttcttgacacagcaacagttgctgcctttctacaagcagtttgcgggtaaccccgcaaccctcttacaactacaacaattgttgccctttgtccaacttgctttgacaaacccagcagcctcctaccaacaacacatcattggtggtgccctcttttagattgattattagttgtaattcaataataaagttttttggatgatgtatgtggccaaccagaaataagaagttacatttccagattct

SEQ ID NO: 322104 - DNA, 264 bp, Zea mays
attgagaccaacaagcaacatagaaagtggaatccagtagcaacaatagagcaacaatggcgaccaagatattttccctccttatgctccttgctctttctacatgtgttgctaacgcgacaattttccctcaatgctcacaagctcctatagcttcccttcttcccccataccttccatcaattatagcttcaatatgtgaaaacccagctcttcaaccatataggcttcaacaagcaatcgcaagcaagcaacataccttta

SEQ ID NO: 322105 - DNA, 318 bp, Zea mays
  unsure (1)..(318): unsure at all n locations
atagaaagcacaatagtgtaccaacaatggcagccaaaatattttgcctccttatgcgccttggtctttctgcaagtgctgctacggcgaccattttcccgcaatgctcgcaagctcctatagcttcccttcttcccccgtacctctcaccagcggtgtcttcggtatgtgaaaacccaattcttcaaccctacaggatccaacaggcaatcgcagctggcatcttacctttatcacccttgttcctccaacaatcatcagccctattacaacagttacctttggtgcatttattggcacaaaacatcanggcacaac

SEQ ID NO: 322106 - DNA, 429 bp, Zea mays
cagccaagtagctctggcaaacctttctccctactctcagcaacaacaattggttccgttcaaccaactgtctacactgaaccctgctgcttatttgcagcaacaactattaccattcagccagctagctactgcctactctcagcaacaacaacttcttccatttaaccaattggccgcactgaaccccgctgcttatttgcagcagcaaatactactaccatttagccagctagctgcagcaaaccgtgcttccttcttgacacagcaacagttgctgcctttctaccagcagtttgcggctaaccccgcaaccctcttacaactacaacaattgttgccctttgtccaacttgctttgacagaccgagcggcctcctaccaacaacacatcattggtggtgccctcttttagattgcttattagtt

SEQ ID NO: 322107 - DNA, 365 bp, Zea mays
cagccccaattgttcaaccgtacaggatccaacaggcaatcgcaacaggcatcttaccattatcacccttgttcgtccagcaaccgtcagccctattacagcagttacctttggtccatttggtggcacaaaacatcagggcacaacaactacaacaacttgtgctagcaaaccttgctgcatactctcagcaacatcagtttcttccattcaaccaactggctgcattgaactctgctgcttatttgcaacaacaattaccattcagccagctagttgctgcctacccccagcaatttcttccattcaaccaactagcagcattgaactcttgtggttaattacagcaacaacaactactacca

SEQ ID NO: 322108 - DNA, 360 bp, Zea mays
atcatcagccctattacagcagttacctttggtgcatttattggcacaaaacatcagggcacagcaactacaacaacttgtgctagcaaaccttgctgcctactctcagcaacagcagtttcttccattcaaccaactagctgcattgaactctgcttcttatttgcaacaacaacaactaccattcagccagctatctgctgcctacccccagcaatttcttccattcaaccaactgacagcattgaactctcctgcttatttacagcagcaacaactactaccattcagccagctagctggtgtgagccctgctaccttcttgacacaaccacagttgttgccgttctaccagcacgc

SEQ ID NO: 322109 - DNA, 403 bp, Zea mays
cccacgcgtccgagcattcagaaacacaccaagcgaagcgcactagcaacaacctaacgacagtggctaccaagatattatccctccttgcgcttcttgcgctttttgcgagcgcaacaaatgcgtccattattccacaatgctcacttgctcctagttccattattccacagttcctcccaccagttacttcaatggccttcgaacacccagctgtgcaagcctataggctacaacaagcgattgcggcgagcgtcttacaacaaccaattgcccaattgcaacaacaatccttggcacatctaacaatacaaaccatcgcaacgcaacagcaacaacagttcctaccagcactgagccacctagccatggtgaaccctgtcgcctacttgcaacagcagct

SEQ ID NO: 322110 - DNA, 265 bp, Zea mays
gtagcttcgatccattgctgactgttcactggcgctcaactagtgctgctgctgatgagcctagctagctaggcggtgttgtgatctattcgttaattaaatgatgtttttttttgctgttctcctggggtggcctacatgccaatgcatgtgtgtgttttcaggagaccagctgtggcgtggcagtcagtacaatggccgacctgccatgatgtaacatctctctgtacaatgtaccttttcgtttgttggattttctcctgct

SEQ ID NO: 322111 - DNA, 437 bp, Zea mays
cagcaagcaacatagaaagaggaatccaatagcaacaatatagcaacaatggggacggggacattttcccttcttatgctccttgctctttctacatgtgttgctaacgcgacaattttaccttactgctcacaagctcctatagcttcccttcttcctccataccttccatcaattatagctccaatatgtgaaaacccagctcttcaaccatataggcttcaacaagcaatcgcagcaagcaacatacctttatcggccttggtggttcaacaatcgccagccctatctttggtgcagtcattggtacaaaccatcagggcacaacagctgcagcaactcgtgctacctgtgatcaaccaagtagctctggcaaaccttactccctactctcagcaacaacaatttcttgcattcaaccaactttctacactgaa

SEQ ID NO: 322112 - DNA, 432 bp, Zea mays
attgagaccaactagcaacatagaaagcacaatagtgtaccaacaatggcagccagggtattttgcctccttatgctccttggtctttctgcaagtgctgctacggcgaccattttcccgcaatgctcgcaagctcctatagcttcccttcttcccccgtacctctcaccagcggtgtcttcggtatgtgaaaacccaattcttcaaccctacaggatccaacaggcaatcacagctggcatcttacctttatcacccttgttcctccaacaatcatcagccctattacatcagttacctttggtgcatttattggcacaaaacatcagggcacaacaactacaacaacttgtgctagcaaaccttgctgcctactctcagcaacagcagtttcttccattcaaccaactagctgcattgaactctgcttct

SEQ ID NO: 322113 - DNA, 424 bp, Zea mays
aagatattagccctccttgcgcttcttgccctttttgtgagcgcaacaaatgcgttcgttatggcacaatgctcacttgctcctagtgccattattccacagttcctcccaccagttacttcaatgggcttcgaacacctagctgtgcaagccaacatgcaacaacaagcgcttgcggcgagcgtcttacaacaaccaattgcccaattgcaacaacaatccttgccacatctaacaatacaagccatcacaacgcaacagcaacaacagttcctaccagcactgagccacctagccatggtgaaccctgccgcctacttgcaagagcagctgcttgcatccaacccacttgctctggcgaacgtagttgcaaaccagcaacaacaacagctacaacagtttctgccaacgctcagtcaactag

SEQ ID NO: 322114 - DNA, 426 bp, Zea mays
gaccaactagcaacatagaaagcacaatagtgtaccaacaatggcagctaaaatattgtgcctgcttatgctccttggtctttctgcaagtgctgctacggcgaccattttcccacaatgctcacaagctcctatagcttcccttcttcccccgtacctctcaccaacggtgtcttcggtatgtgaaaacccaattcttcaaccctacaggatccaacaggcaatcgcagctggcatcttacctttatcacccttgttcctccaacaatcatcagccctattacagcagttacctttggtgcatttattggcacaaaacatcagggcacaacaactacaacaacttgtgctagcaaaccttgctgcctactctcagcaacagcagtttcttccattcaaccaactagctgcattgaactctgcttc

SEQ ID NO: 322115 - DNA, 423 bp, Zea mays
  unsure (1)..(423): unsure at all n locations
ctccttggtctttctgcaagtgctgctaccgcaaccattttcccacaatgctcacaagctcctatagcttcctttgttgccccatacctctcaccagcggtgtcttcagtatgtgaaaacccaattcttcaaccctacaggatccaacaggcaatcgcagcaggcatcttacctttatcacccttgttcctccaacaaccgtcagccctattacagcagttacctttggtgcatttgttggcacaaaacatcaaggcacaacaactacaacaacttgtgctaggaaaccttgctgcctactctcagcaacagcagtttcttccattcaaccaactggctgcattgaactctgctgcttatttgcaacaacaactaccattcagtcagctagctgctgcctacccncagcaatttcttccattc

SEQ ID NO: 322116 - DNA, 435 bp, Zea mays
cctgccacctccggtgcatctcccaccgccggtccacctgccgccgccggggcaccgggcaccgccggtccatgtgccgccgccggttcatctgccgccgccaccatgccactaccctactcaaccgccccggcctcagcctcatccccagccacacccatgcccgtgccaacagccgcatccaagcccgtgccagctgcagggaacctgcggcgttggcagcaccccgatcctgggccagtgcgtcgagtttctgaggcatcagtgcagcccgacggcgacgccctactgctcgcctcagtgccagtcgttgcggcagcagtgttgccagcagctcaggcaggtggagccgcagcaccggtaccaggcgatcttcggcttggtcctccagtccatcctgcagcagcagccgcaaagcggccaggtcgcggtgct

SEQ ID NO: 322117 - DNA, 433 bp, Zea mays
attgagaccaactagcaacatagaaagcacaatagtgtaccaacaatggcagccaaagtattttgcttccttatgctccttggtctttctgcaagtgttgctaccgcaaccattttcccacaatgctcacaagctcctatagcttcccttcttcccccatacctctcaccagcggtgtcttcaatgtgtgaaaccccaattgttcaaccctacaggatccaacaggcaatcgcaacaggcatcttaccattatcacccttgttcctccaacaaccgtcagccctattacagcagttacctttggtccatttggtggcacaaaacatcagggcacaacaactacaacaacttgtgctagcaaaccttgctgcatactctcagcaacatcagtttcttccattcaaccaactggctgcattgaactctgctgctt

SEQ ID NO: 322118 - DNA, 436 bp, Zea mays
atgagcaacacgtacaaacacaccaagcgaagcacattagcaacaacctaacaacaatggctaccaggatatgatccctgcttgcgctgcttgcgctttttgcgagcgcaacaaatgcgttcattattccacaatgctcacttgctccaagttccattattacacagttcctcccaccagttacttcaatgggcttcgaacacccagctgtgcaagcctataggctacaacaagcaattgctgagagcgtcttacaacaaccaatttcccagttgcaacaacaatccttggcacatctaacaatacaaaccatcgcaacgcaacagcaacaacaattcctaccagcactgagccacctagccatggtgaaccctgccgcctacttgcaacagcagctgcttgcatcaaacccacttgctctggcaaacgtagttgc

SEQ ID NO: 322119 - DNA, 346 bp, Zea mays
acgtaacaacaaactaagcacattcaacactcaacaatcacagacaatatatatgtactgtttatgcttgcgcgtggcccgctcttcacgtgctcataccactatcatactataatactactctcatactataacatctctattaccacccatctactcaccaccaactacgtaatatattttacaacacaattcttcaccactacatcatccaccacgagataacatctagcttaatatcaccattaccattgttcatcctccaatcaacatcaatactacaacagcttccttcacttcagcatattatcacttaacatcactgcacatcatctacaacaactta

SEQ ID NO: 322120 - DNA, 415 bp, Zea mays
  unsure (1)..(415): unsure at all n locations
gcattattccacagttcctccctccagttacttcaatgggcttcgaacacccagctgtgcaagcctacaggctacaacaagcgcttgcggcgagcgtcttacaacaaccaattgcccaattacaacaacaatccttggcacatctaaccatacaaaccatcgcaacgcaacagcaacaacaatttctaccagcactgagccaactagctgtggtgaaccctgtcgcctacttgcaacagcagttgcttgcatccaacccacttgctctggcaaacatagttgcataccaacaacaacaacaattgcaacagtttctaccagcgctcagtcaactagccatggtgaaccctgccgnctacctacaacagcaacaactgatttcatctagccctctcgctgnggttaatgcacctac

SEQ ID NO: 322121 - DNA, 251 bp, Zea mays
attgagaccaactagcaacatagaaagcacaatagtgtaccaacaatggcagccaaagattttgcctccttatgctccgtggtctttctgcaagtgctgctacggcgaccattttcccgcaatgctcgcaagctcctatagcttcccttcttcccccgtacctctcaccagcggtgtcttcggtatgtgaaaacccaattcttcaaccctacaggatccaacaggcaatcacagctggcatcttaccttta

SEQ ID NO: 322122 - DNA, 436 bp, Zea mays
gaatacagtagcaaaaatagagcaacaatggcggccaagatattttccatccttatggtccttgctctttctgcatgtgttgctaacgcgaccatttttcctcaatactcacaagctcctatagctgcccttcttcccccataccttccatcaatgaccgctttagtatgtgaaaacccagcccttcaaccctacaggatccagcaagcaatcgcaacaagcaacttacctttatcacacctgttctttcaacaatcgccagccctatctttggtgcagtcattggtacaaaccatcagggcagaacagttgcagcaactcgtgctaccagtgatcagccaagtagctctggcaaacctttccccctactctcagcaacaacaatttcttccattcaaccaactgtctatactgaaccctgctgcttatttgcagc

SEQ ID NO: 322123 - DNA, 338 bp, Zea mays
cacaccaagcgaagcacattagcaacatcctaacaacaatggctaccaagatattatcgctcggtgcgcttcttgcgctgtttgcgagcgcaacaaatgcgttcattattccacaatgctcacttgctccaagttccattattacacagttcctcccaccagttacttcaatgggcttcgaacacccagctgtgcaagcctataggctacaacaagcaattgcggcgagcgtcttacaacaaccaattttccagttgcaacaacaatccttggcacatctaacaatacaaaccatcgcaacgcaacagcatcaacaattcctaccagcactgagccac

SEQ ID NO: 322124 - DNA, 453 bp, Zea mays
gcaacatagaaagcacaatagtgtaccaacaatggcagccaaaatattttgcttccttatgctccttggtctttctgcaagtgctgctaccgcaaccattttgccacaatgctcacaagctcctatagcttcctttcttcccccatacctctcaccagcggtgtcttcagtatgtgaaaacccaattcttcaaccctacaggatccaacaggcaatcgcagcaggcatcttacctttatcacccttgttcctccaacaaccgtcagccctattacagcagttacctttggtgcatttgttggcacaaaacatcaaggcacaacaactacaacaacttgtgctaggaaaccttgctgcctactctcagcaacagcagtttcttccattcaaccaactggctgcattgaactctgctgcttatttgcaacaacaactaccattcagtcagctagc

SEQ ID NO: 322125 - DNA, 393 bp, Zea mays
gagaccaacaagcaacatagaaagtggaatacagtagcaacaatagagcaacaatggcggccgatatattttccatccttatgctccttgctctttctgcatgtgttgctaacgcgaccatttttcctcaatactcacaagctcctatagctgcccttcttcccccataccttccatcaatgaccgcttcagtttgtgaaaacccagcccttcaaccctacaggctccaacaagcaatcgcaacaagcaacttacctttatcacccctgttctttcaacaatcgccagccctatctttggtgcagtcattggtacaaaccatcagggcacaacagctgcaacaactcgtgctaccagtgatcagccaagtagctctggcaaacctttctccct

SEQ ID NO: 322126 - DNA, 386 bp, Zea mays
  unsure (1)..(386): unsure at all n locations
tcgacccacgcgtacgcatctatcagcttaatgtcatcatcatgattaatgtggacttatctagactgtttttggatagagtagtagttagtgatttctgaaccgactatcatcactgcaatctttcatgttctttttatttagtctcactttgctcctttttcattaatggtttattcgtggacattttcaacttctaccatcaaaccttctgaagttggaactttatgttctattcaattattttacccataaaaagaacttggatttattttataccttttatctctactactacttaagtgtctattgtaggcgtccacaaagacggatggtgcacggttctgccggttccgcatnccgccggattgggatgatttcggcat

SEQ ID NO: 322127 - DNA, 435 bp, Zea mays
gtggcaacaatagagcaacaatggcgaccaagatactttccctccttatgctccttgctctttctgcatgtgttgctaacgcgacaattttccctcaatgctcacaagctcctatagcttcccttcttcccccataccttccatcaatgatagcttcagtatgtgaaaacccagctcttcaaccctataggctccaacaagcaatcgcagcaagcaacatacctttatcacccttgtttcaacaatcgccagccctatctttggtgcagtcattggtacaaaccatcaaggcacagcagctgcagcaactcgtgctacctgtgatcaaccaagtagctctggcaaacctttctccctactatcagcaacaacaatttcttccattcaaccaactatctacactgaaccctgctgctaattgcagcaacaactata

SEQ ID NO: 322128 - DNA, 420 bp, Zea mays
  unsure (1)..(420): unsure at all n locations
ccagactagcaacatagaaagcacaatagtgtaccaacaatggcagctaaaatattttgcctccttatgctccttggtctttctgcaagtgctgctacggcgaccattttcccacaatgctcacaagctcctatagcttcccttcttcccccgtacctctcaccaacggtgtcttcggtatgtgaaaacccaattcttcaaccctacaggatccaacaggcaatcgcaactggcattttacctttatcacccttgttccttcaacaatcatcaagcctattacagcagttaactttggtgcattaattgcacaaaacatcanggcacaacaactacaacaacttgtgctagcaaaccttgctgcctactctcagcaacagcagtttcttccattcaaccaactagctgcattgaactctg

SEQ ID NO: 322129 - DNA, 440 bp, Zea mays
cgtacgcaggatccaacaggcaatcgcagctggcatcttacctttatcacccttgttcgtccagcaatcatcagccctattacaacagttacctttggtgcatttattggcacaaaacatcagggcacaacaactacaacaacttgtgctagcaaaccttgctgcctactctcagcaacagcagtttcttccattcaaccaactaggttcattgaactctgcttcttatttgcaacaacaacaactaccattcagccagctacctgctgcctacccccagcaatttcttccattcaaccaactagcagcattgaactctcctgcttatttacagcagcaacaactactaccattcagccagctagctggtgtgagccctgctaccttcttgacacaaccacagttgttgccgttctaccagcacgttgcgcctaacgctg

SEQ ID NO: 322130 - DNA, 61 bp, Zea mays
cttatgagttatacttcaataataaatctattagaattctgcaactctctatccacatcca

SEQ ID NO: 322131 - DNA, 440 bp, Zea mays
catagaaagcacaatagtgtaccaacaatggcagccaaaatattttgcttccttatgctccttggtctttgtgcaagtgttgctaccgcaaccattttcccacaatgctcacaagctcctatagcttcccttcttcccccatacctctcaccagcggtgtcttcaatgtgtgaaaccccaattgttcaaccctacaggatccaacaggcaatcgcaacaggcatcttaccattatcacccttgttcctccaacaaccgtcagccctattacagcagttacctttggtccatttggtggcacaaaacatcagggcacaacaactacaacaacttgtgctagcaaaccttgctgcatactctcagcaacatcagtttcttccattcaaccaactggctgcattgaactctgctgcttatttgcaacaacaattaccattcag

SEQ ID NO: 322132 - DNA, 406 bp, Zea mays
gtgaaaacccaattcttcaaccctacaggatccaacaggcaatcgcagctggcatctgacctgtatcacccttgttcctgcaacaatcatcagccctattacaacagttacctttggtgcatttattggcacaaaacatcagggcacaacaactacaacaacttgtgctagcaaaccttgctgcctactctcagcaacagcagtttcttccattcaaccaactaggttcattgaactctgcttcttatttgcaacaacaacaactaccattcagccagctacctgctgcctacccccagcaatttcttccattcaaccaactagcagcattgaactctcctgcttatttacagcagcaacaactactaccattcagccagctagctggtgtgagccctgctacctt

SEQ ID NO: 322133 - DNA, 402 bp, Zea mays
ctcagcaacaacagtttcttccattcaaccaactagctgcattgaactctgcttctggtttgcaacaacaacaactaccattcagccagctatctgctgcctacccccagcaatttcttccattcaaccaactgacagctttgaactctcctgcttatttacagcagcaacaactactaccattcagccagctagctggtgtgagccctgctaccttcttgacacaaccacaattgttgccgttctaccagcacgctgcgcctaacgctggcaccctcttacaactgcaacaattgctgccattcaaccaacttgctttgacaaacccaacagcattctaccaacaacccatcattggtggtgccctcttttagatttcttatgagctatagttcaataata

SEQ ID NO: 322134 - DNA, 278 bp, Zea mays
gggcagcaatcattgactatagtgctagaatcggagacagtgttctgatacaggatggtgacgatggtctggaggctgcactggtaaccgactgttactatattaaaggagtaattgtaacagagactaatgatgcataattggctagaggaacagttatatctagtgaacgtatgacatgcacttacatgtctcgacagtcgacaatgatcagtacttgtctatatgacagttctgcatatgattcagccagagatcatgtgtactgtacccgagtc

SEQ ID NO: 322135 - DNA, 175 bp, Zea mays
acgctcagctgaagcgcgacaagcatgcgtataggtcatgcctgagcagcggataatattgacacgcctcttattctctggagcttgcttactgtgtaagtcttcagatattcttctagattgtgtgcctagaacgcattgcccccattattagtactgacttgtgagcatatgt

SEQ ID NO: 322136 - DNA, 165 bp, Zea mays
attctccgttcgacccactcgtccacccacacgtcctcacccttctaccaccctattatcattccattcacacaccttgtgactccataggcaagtttcatctttcacctggggctcatacactcacatctgctcacacctctcattatgatataccttctctac

SEQ ID NO: 322137 - DNA, 323 bp, Zea mays
tgcgctgtttgcgagcgcaacaaatgcgttcattattccacaatgctcacttgctccaagttccagtattgcacagttcctgccaccagttacttcaatgggcttcgaacacccagctgtgcaagcctataggctacaacaagcaattgcggcgagcgtcttacaacaaccaatttcccagttgcaacaacaatccttggcacatctaacaatacaaaccatcgcaacgcaacagcaacaacaatttctaccagcactgagccacctagccatggtgaacccttgcgcctacttgcaacagcagttgcttgcatcaaacccac

SEQ ID NO: 322138 - DNA, 420 bp, Zea mays
gctgcctactctcagcaacagcagtttcttccattcaaccaactagctgcattgaacgctgcgtcttatttgcaacagcgacaactaccattcagccagctacctgttgcctacccccaacaatttcttccattcaaccaactggcagcattgaactctcctgcttatttacagcagcaacaactactaccattcagccagctagctggtgtgagccctgctaccttcttgacacaaccacagttgttgccgttctaccagcacgctgcgcctaacgctggcaccctcttacaactgcaacaattgctgccattcaaccaacttgctttgacaaacctagcagtgttctaccaacaacccatcattggtggtgccctctttttagatttcttatgagttatagttcaataataaagtttt

SEQ ID NO: 322139 - DNA, 383 bp, Zea mays
ctaaccctgactgggttgttgtattaatatatacttaagtacatgggctgggccaaggcccattataacacatgatctgacatatatgacagtgctagcttattccattttttcatacaagcatcacatgccaataagctataggcctatagccttggaggttgtcgaaatgtcattttttggcattcatagaaggcgttagagtctaggctttgaaagttactggaggacttgcaactcgattacttacttaacagggttaaaaattgaaggtcaaaatagcacatagtgccttcagcaaatggtgtgtgtaccatggaggtaaaataatgacaagggggagaatctagatggacatctggattgggtcctttggactacta

SEQ ID NO: 322140 - DNA, 408 bp, Zea mays
ccctatctttggtgcagtcattggtacaaaccatcagggcacaacagctgcagcaacgggtgctacctctgatcaaccaagtagctctggcaaacctttctccctactctcagcaacaacaatttcttccattcaaccaactgtctacactgaaccctgctgcttatttgcagcaacaactattaccatttagccagctagctactgcctactctcagcaacaacaacttcttccatttaaccaattggccgcactgaaccccgctgcttatttgcagcagcaaatactactaccatttagccagctagctgcagcaaaccgtgcttccttcttgacacagcaacagttgctgcctttctaccagcagtttgcggctaaccccgcaaccctcttacaactacaacaat

SEQ ID NO: 322141 - DNA, 344 bp, Zea mays
caactagcaacatagaaagcacaatagtgtaccaacaatggcagccaaaatattttgcgctccttatgctccttggtctttctgcaagtgctgctacggcgaccattttcccgcaatgctcgcaagctcctatagcttcccttcttcccccgtacctctcaccagcggtgtcttcggtatgtgaaaacccaattcttcaaccctacaggatccaacaggcaatcacagctggcatcttacctttatcacccttgttcctccaacaatcatcagccctattacatcaattacctttggtgcatttattggcacaaaacatcagggcacaacaactaccacaactt

SEQ ID NO: 322142 - DNA, 362 bp, Zea mays
aaaaaaacttcaaaccctcgacaccattcatgcttcatttggtgtatgttttgctacgttttccttgaacgtaaaagcattcttctctgatatctgtaactgtaaaaagattattgttctataactatctgttatttattgttccatcgctacctcactacctatttcctatctgatgttttgctataacatcgccatcgctgtgttgttcagacttaagttatgtgatgcttgttctttttagatgtaaatcctacaattttcgcctccaaagtcacccattacaatattttttactgaatctatatcttttacttatgtgtcactctgcattttttaagattcaaaaaaacattccttat

SEQ ID NO: 322143 - DNA, 435 bp, Zea mays
aaaatattttgcctccttatgctccttggtctttctgcaagtgctgctacggcgaccattttcgggcaaggctcgcaagctcctatagcttcccttcttcccccgtacctatcaccagcggtgtcttcggcatgtgaaaacccaattcttcaaccctacaggatccaacaggcaatcacagctggcatcttacctttatcacccttgttcctccaacaatcatcagccctattacatcaattacctttggtgcatttattggcacaaaacatcagggcacaacaactacaacaacttgtgctagcaaaccttgctgactactatcaacaacagcagcttcttccattcaaccaactagctgcattgaactctgcttgttatttgcaacaacaacaactaccattcatccagctacctgctgtctacacccagcaa

SEQ ID NO: 322144 - DNA, 394 bp, Zea mays
cccacgcgtccggagaccaactagcatcatataaagcacaatagtgtaccaacaatggcagccagaatatggtgcctacttatgctccttggtctttctgcaagtgctgctacagcgaccattttcccgcaatgctcgcaagctcctatagcttcccttcttaccccgtacctctcaccagcggtgtcttcagtatgtgaaaacccaattcttcaaccctacaggatccaacaggcaatcgcagctggcatcttacctttatcacccttgttcctgcaacaatcatcagccctattacaacagttacctttggcgcatctattggcacaaaacatcaaggcacaactactacaacaacttgtgctagcaaaccttgctgactactctcaacaac

SEQ ID NO: 322145 - DNA, 374 bp, Zea mays
agaaagcacaatagtgtaccaacaatggcagccaaaatattttgcctccttatgctcgttgggctttctgcaagtgctgctacggcgaccattttcccacaatgctcacaagctcctatagcttcccttcttcccccgtacctctcaccagcggtgtcttcggtatgtgaaaacccaattcttcaaccctataggatccaacaggcaatcgcagctggcatcttacctttatcacccttgttcctccaacaatcatcagccctattacagcagttacctttggtgcatttattggcacaaaacatcagggcacaacaactacaacaacttgtgctagcaaaccttgctgcctactctcagcaacaacagtttct

SEQ ID NO: 322146 - DNA, 406 bp, Zea mays
agcaacatagaaagcacaatattgtaccaataatggcagccaaaatattttgggtcagtatgctccttggtctttctgcaagtgctgctacggcgagcattttcccgcaatgctcacaagctcctatagcttcccttcttcccccatacctctcaccagcgatgtcttcagtatgtgaaaatccaattcttctaccctacaggatccaacaggcaatcgcagcaggcatcttacctttatcacccttgttcctccaacaatcatcagccctattacagcagttacctttggtgcatttattggcacaaaacatcagggcacaacaactacaacaactcgtgctagcaaaccttgctgcctactctcagcaacagcagttacctttggtgcatttgttggcacaaaa

SEQ ID NO: 322147 - DNA, 331 bp, Zea mays
atcaggaccttcaatcatcattcatcccatttttatattcccctaatcaaatctgcaacatcaggtatctagctccattaaccatgaagctggggctagtagctattgctttgatagctttagtatcaagtgtttattgtacacatacaatccactgcagctgaagccaacaacaaactcatgagcagcaacataattcacaactacatcatccacaaaaacaacaacatgaaacaccaccacaacatttccagcatcatcatacccaacttcaacaagttcatattcaaactcaaaaacattctgctcaaccataaattcaatttcaaca

SEQ ID NO: 322148 - DNA, 378 bp, Zea mays
atccactcacacgcgatccctagcagtggctctccctatcagccccgctactcagcttggttcggcgctgtagaagcatctgcgatgccatccgccgccacttgaggccatcatctccggattctgcagccggattcagagatcctctagatgtcttggtcccgctcccgacgacatcctcgtctgcacctacttcgacagcttcttggacacaaatgctgctctttaagatgcttgtgaacaagtgatcgctggggaacaatattgtgatgttcctattgggctgcacgtaatccgtggagagaacgatgctttactcggagaatcagatcgcgaaaaggatcaactccctggtcacatgacctgcggttcagaagc

SEQ ID NO: 322149 - DNA, 356 bp, Zea mays
cagacctattacagcagttacctttgttgcatttattgacacaaaacatcatgccacgacagctacaacacctggtgcgagcaaaccttgctgcctactctcagcaacagcagttccttccattcaaccaactagctgcattgaactctgctacttattagcaccaccaccaactaccattcagccagttatatgatgcctacccccagcaattccttccattcaaccaactgacagcattgaactctcctgcttatttacagcagcaccaactactaccattcagccagctagctggtgtgagccctgctaccttcttgacacaaccacagttgttgccgttctaccagcacgct

SEQ ID NO: 322150 - DNA, 423 bp, Zea mays
  unsure (1)..(423): unsure at all n locations
caactagcaacatagaaagcacaatagtgtaccaacaatggcagccaaaatattttgcctccttatgctccttggtctttctgcaagtgctgctacggcgaccattttcccgcaatgctcgcaagctcctatagcttcccttcttcccccgtacctctcaccagcggtgtcttcggtatgtgaaaacccaattcttcaaccctacaggatccaacaggcaatcgcagctggcatcttacctttatcacccttgttcctccaacaatcatcagccctattacaacagttacctttggtgcatttattggcacanaacatcagggcacaacaactacaacaacttgtgctagcaaaccttgctgcctactctcagcaacagcagtttcttccattcaaccaactaggttcattgacctctgcttc

SEQ ID NO: 322151 - DNA, 338 bp, Zea mays
gcgacgtaccatccagaaacacactcaagctgaatcgccactaacaactaacctaacgacaatagagctaccaagatgggacttcatatatgcgcttgttgagctatacgcgcgcgcacccgctgctactattagaccccagcgctcactcgctcatatacgaccattataaataggaggcatacacactactacgaacgcatgacgtacaggaaattgagctagcctaaaagcgacaatttgccatgacaccaaacagtatcacacaacctggcaggacatgagagcgacactaccagacatgtatgcatgggcatgccgtccacatgacactgcaa

SEQ ID NO: 322152 - DNA, 328 bp, Zea mays
acgccgtcatcgatctcgtttcaaatccatccatcctcgtttcctccgtcccgcagcatctcaacccgatggggaagatcaagatcgggatcaatgggttcggcaggatcggaaggctggtggccagggtggccctgcagagtgacgatgtcgagctcgtcgccgtgaacgaccccttcatcagcaccgactacatgacctacatgttcaagtacgacactgtgcacggacagtggaagcaccatgaagtcaaggtgaaggactccaaaacccttctctttggtgagaaggaagttgctgtgtttggctgcaggaaccctgaggagat

SEQ ID NO: 322153 - DNA, 433 bp, Zea mays
caatagtgtaccaacaatggcagccaaaatattttgcttccttatgctccttggtctttgtgcaagtgctgctaccgcaaccattttcccacaatgctcacaagctcctatagcttcctttcttcccccatacctctcaccagcggtgtcttcagtatgtgaaaacccaattcttcaaccctacaggatccaacaggcaatcgcagcaggcatcttacctttatcacccttgttcctccaacaaccgtcagccctattacagcagttacctttggtgcatttgttggcacaaaacatcaaggcacaacaactacaacaacttgtgctaggaaaccttgctgcctactctcagcaacagcagtttcttccattcaaccaactggctgcattgaactctgctgcttatttgcaacaacaactaccattcagtcag

SEQ ID NO: 322154 - DNA, 423 bp, Zea mays
  unsure (1)..(423): unsure at all n locations
atcgttctcgtcgtgtgcctggctctgtcagctgccagcgcctctgcaatgcagatggcctgcccctgcgcggggctgcagggcttgtacggcgctggcgccggcctgacgacgatgatgggcgccggcgggctgtacccctacgcggagtacctgaggcagccgcagtgcagcccgctggcggcggcgccctactacgccgggtgtgggcagccgagcgccatgttccagccgctccggcaacagtgctgccagcagcagatgaggatgatggacgtgcagtccgtcgcgcagcagctgcagatgatgatgcagcttgagcgtgccgctgccgncagcagcagcctgtacgagccagctctgatgcagcagcagcagcagctgctggcagcccagggtctcaaccccatggccatgatgatg

SEQ ID NO: 322155 - DNA, 429 bp, Zea mays
ttcagaaacacaccaagcgaagcgcactagcaacaacctaacaacaatggctaccaagatattatccctccttgcgcttcttgcgctttttgcgagcgcaacaaatgcgtccattattccacaatgctcacttgctcctagttccattattccacagttcctcccaccagttacttcaatggccttcgaacacccagctgtgcaagcctataggctacaacaagcgattgcggcgagcgtcttacaacaaccaattgcccaattgcaacaacaatccttggcacatctaacaatacaaaccatcgcaacgcaacagcaacaacagttcctaccagcactgagccacctagccatggtgaaccctgtcgcctacttgcaacagcagctgcttgcatccaacccacttgctctagcaaacgtagttgcaaa

SEQ ID NO: 322156 - DNA, 309 bp, Zea mays
gaccaacaagcaacatagaaagtggaatccagtagcaacaatagagcaacaatggcgagcaagatattttccctgcttatgctccttgctctttctacatgtgttgctaacgcgacaattttccctcaatgctcacaagctcctatagcttcccttcttcccccataccttccatcaattatagcttcaatatgtgaaaacccagctcttcaaccatataggcttcaacaagcaatcgcagcaagcaacatacctttatcgcccttgttgtttcaacaatcgccagccctatctttggtgcagtcattg

SEQ ID NO: 322157 - DNA, 417 bp, Zea mays
aacaacttgtgctagcaaaccttgctgcctactctcagcaacagcagtttcttccattcaaccagctagctgcattgaactctgcttcttatttgcaacaacaacaactaccattcagccagctacctgctgcctacccccagcaatttcttccattcaaccaactggcagcattgaactctcctgcttatttacagcagcaacaactactaccattcagccagctagctggtgtgagccctgctaccttcttgatacaaccacagttgttgccgttctaccagcacgctgcgcctaacgctggcaccctcttacaactgcaacaattgctgccattcaaccaacttgctttgacaaacccagcagcgttctaacaacaacccatcattggtggtgccctcttttagatttcttatg

SEQ ID NO: 322158 - DNA, 362 bp, Zea mays
gaccaacaagcaacatataaagtggaatccattagcaacaatagagcaacaatggcgaccaagaggttttgcctccttatgctccttgcgtctttctacatgtgttgctaacgcgacaattttccctcaatgctcacaagctcctatagcttcccttctttccccataccttccatcaattatagcttcaatatgtgaaaacccagctcttcaaccatataggcttcaacaagcaatcgcagcaagcaacatacctttatcgcccttgttgtttcaacaatcgccagacctatctttggtgcacacattggtacaaaccatcagggcacaacagctgcaacaactcgtgctaactctgatca

SEQ ID NO: 322159 - DNA, 383 bp, Zea mays
cattgctttagtatcaagtgtttattgtacacagacaggcggctgcagctgtcgtcggcaacggagccatgagcagtagcatcgttcacaacaacatcatccacaaaaacaacaacatcaaccactaccacatcatcaccagctgcagcaacaccaacaacaacaagtttacatgcaaccacaaaaacatcatcaacaacaagaagttcatgttcaacatcagctacaacaaccgcagcaccaacaacaacaacaacaacaacagcaccaacaacaacatcaatgtgaaggccaacatcaacatcaccaacaatcacaaggccatgtgcaacaacacgaacagagccatgagcaacatcaaggacagaaccatgagcaacaac

SEQ ID NO: 322160 - DNA, 408 bp, Zea mays
agcattcagaaacacaccaagcgaagcacattagcaacaacctaacaacaatggctgcgaagatattatccctgcttgcgcttcttgcgctttttgcgagcgcaacacatgcgttcattattccacaatgctcacttgctccaagttccattattacacagttcctcccaccagttacttcaatgggcttcgaacacccagctgtgcaagcctataggctacaacaagcaattgcggcgagcgtcttacaacaaccaatttcccagttgcaacaacaatccttggcacatctaacaatacaaaccatcgcaacgcaacagcaacaacaattcctaccagcactgagccacctagccatggtgaaccctgccggctacttgcaacagcagttgcttgcattaaacccac

SEQ ID NO: 322161 - DNA, 453 bp, Zea mays
  unsure (1)..(453): unsure at all n locations
gcagaaacacaccaagcgaagcacattagcaacaacctaacaacaatggctaccaagatattatccctccttgcgcttcttgcgctttttgcgagcgcaacaaatgcgttcattattccacaatgctcacttgctccaagttccattattacacagttcctcccaccagttacttcaatgggcttcgaacacccagctgtgcaagcctataggctacaacaagcaattgcggcgagcgtcttacaacaaccaatttcccagttgcaacaacaatccttggcacatctaacaatacaaaccatcgcaacgcaacagcaacaacaattcctaccagcactgagccacctagccatggtgaaccctgccgnctacttgcaacagcagttgcttgcatcaaacccacttgctctggcaaacgtagttgcaaaccagccacaacaacagctgcaacaa

SEQ ID NO: 322162 - DNA, 217 bp, Zea mays
attctccgggtcgacgccactcgtccgctcactctttcgctcccttttttttttttttttgaaatctcactcttcattactagcacgccaggatcaggtcacacaacaccgtgggatagacctactactaactatatacctactacattctatcttccatcataacatcatcctcaaccattgcaatacctgactcaaccacctcaactaagcccat

SEQ ID NO: 322163 - DNA, 398 bp, Zea mays
gcaacatagaaagcacaatagtgtaccaacaatggcagccaaaatattttgcctccttatgcgccttggtctttctgcaagtgctgctacggcgaccattttcccgcaatgctcgcaagctcctatagcttcccttcttcccccgtacctctcaccagcggtgtcttcggtatgtgaaaacccaattcttcaaccctacaggatccaacaggcaatcacagctggcatcttacctttatcacccttgttcctccaacaatcatcagccctattacatcagttacctttggtgcatttattggcacaaaacatcagggcacaacaactacaacaacttgtgctagcaaaccttgctgcctactctcagcaacagcagtttcttccattcaccaactagc

SEQ ID NO: 322164 - DNA, 438 bp, Zea mays
ccaactagcaacatagaaagcacaatactgttccaacaatggcggccaaaatatcttgcctcctgatgctgcttgatctttctgcaagtgctgctactgcgaccattttcccgcaatgctcgcaagctcctatagcttcccttcttcccccgtacctctcaccagcggtgtcttccgtatgtgaaaacccaattcttcaaccctacaggatccaacaggcaatcacagctggcatcttacctttatcacccttgttcctccaacaatcatcagccctattacatcagttacctttggtgcatttattggcacaaaacatcaaggcacaacaactacaacaacttgtgctagcaaaccttgctgcctactctcagcaacagcagtttctttcattcaaccaactagctgcattgaactctgcttcttatttgcaacaac

SEQ ID NO: 322165 - DNA, 437 bp, Zea mays
  unsure (1)..(437): unsure at all n locations
atacagtagcaacaatagagcaacaatggcggtcaagatattttccatccttatgctgcttggtctttctgcatgtgttgctaacgcgaccatttttactcaatactcacaagctcctatagctgcccttcttcccccataccttccatcaatgaccgcttcagtttgtgaaaacccagcccttcaaccctacaggctccaacaagcaatcgcaacaagcaacttacctttatcacccctgttctttcaacaatcgccagccctatctttggtgcagtcattggtacaaaccatcatggcacaacagctgctacaactcgtgctaccagtgatcagccaactagctctggcaaacctttactcctactctcagcaacaacaatnacttccattcaaccaactgtctacacttgaaccctgtgcttatttacaacaac

SEQ ID NO: 322166 - DNA, 395 bp, Zea mays
cagatcagcaaagcggcagtgcgtagagaggatcgtcgaacagaacagcatgaagatggtcatcgttctcgtcgtgtgcctggctctgtcagctgccagcgcctctgcaatgcagatgccctgcccctgcgcggggctgcagggcttgtacggcgctggcgccggcctgacgacgatgatgggcgccggcgggctgtacccctacgcggagtacctgaggcagccgcagtgcagcccgctggcggcggcgccctactacgccgggtgtgggcagccgagcgccatgttccagccgctccggcaacagtgctgccagcagcagatgaggatgatggacgtgcagttcgtcgcgcaccacctgcagatgatgatgcagcttgagcgtgccgctgccg

SEQ ID NO: 322167 - DNA, 434 bp, Zea mays
gcaacatagaaagcacaatagtgtaccaacaatggcagccaaatattttgcttccttatgctccgtggtctttctgcaagtgttgctaccgcaaccattttcccacaatgctcacaagctcctatagcttcccttcttcccccatacctctcaccagcggtgtcttcaatgtgtgaaaccccaattgttcaaccctacaggatccaacaggcaatcgcaacaggcatcttaccattatcacccttgttcctccaacaaccgtcagccctattacagcagttacctttggtccatttggtggcacaaaacatcagggcacaacaactacaacaacttgtgctagcaaaccttgctgcatactctcagcaacatcagtttcttccattcaaccaactggctgcattgaactctgctgcttatttgcaacaacaatt

SEQ ID NO: 322168 - DNA, 379 bp, Zea mays
gcaacatagaaagcacaatagtgtaccaacattggcagccaaaatattttgcctccttgggctcgttggtctttctgcaagggctgctacggcgaccattttcccgcaatgctcgcaagctcctatagcttcccttcttcccccgtacctctaaccagcggtgtcttcggtatgtgaaaacccaattcttcaaccctacaggatccaacaggcaatcgcagctggcatcttacctttatcacccttgttcctccaacaatcatcaaccctattacaacagttacctttggtgcatttattggcccaaaacatcaaggcacaacaactacaacaacttgtgctaacaaaccttgctggctaactttaacaacaacaattt

SEQ ID NO: 322169 - DNA, 430 bp, Zea mays
  unsure (1)..(430): unsure at all n locations
acgcaacaagcaacatagaaagtggaatccagtagcatcaatagagcaacaatggcgaccaggatacgtttccctccttatgctccttgctctttctgcatgtgttgctaacgcgacaattttccctcaatgctcacaagctcctatagcttcccttcttcccccataccttccatcaatgatagcttcagtatgtgaaaacccagctcttcaaccctataagctccaacaagcaatcgcagcaagcaacatacctttatcacccttgtttcaacaatcgccagccctatctttggtgcagtcattggtacaaaccatcaaggcacagcagctgcagcaactcgtgctacctgcgatcaaccaagtagctctggcaaacctttctccctactatcagcaacaacaatntcttccattcaaccaactatct

SEQ ID NO: 322170 - DNA, 427 bp, Zea mays
cccacgcgtccgattgagaccagcaagcatcatagaaagtagaatccattagcaacagtggagcaacaatggcgaccaagatattttccctccttatgctccttgctctttctacatgtgttgctaacgcgacaattttccctcaatgctcacaagctcctatagcttcccttcttcccccataccttccatcaattatagcttcagtatgtgaaaacccagctcttcaaccatataggcttcaacaagcaatcgcagcaagcaacatacctttatcgcccttgttgtttcaacaatcaccagccctatctttggtgcagtcattggtacaaaccatcagggcacaacagctgcagcaactcgtgctacctgtgatcaaccaagtagctctggcaaacctttctccctactctcagcaacaacaatt

SEQ ID NO: 322171 - DNA, 420 bp, Zea mays
gaccagcaagcaacatagaaagtagaatccattagcaacaatagagcaacaatggcgaccaagatattttccctccttatgctccttgctctttctacatgtgttgctaacgcgacaattttccctcaatgctcacaagctcctatagcttcccttcttcccccataccttccatcaattatagcttcagtatgtgaaaacccagctcttcaaccatataggcttcaacaagcaatcgcagcaagcaacatacctttatcgcccttgttgtttcaacaatcaccagccctatctttggtgcagtcattggtacaaaccatcagggcacaacagctgcagcaactcgtgctacctgtgatcaaccaagtagctctggcaaacctttctccctactctcagcaacaacaatttcttccattc

SEQ ID NO: 322172 - DNA, 406 bp, Zea mays
acctacctccatttactaattttccaatacaagcaccaaatcctccacggtttcagtaccttattaaactactgtaattgccattcatctcatcatctattctctagcataactactactactaccactctatctgctcactaaacacagctctgcaaactatcaccagcattcataactcagaatgtgcaagtttaatttacttcattaccacttaaccaataatatcaacataagcctattcgctcttaaagatccaaccttaaaaacacattcattccacttaatacctcctctaatagtgttacctcaaaccaattcactaaccttcaatttacaaacgtatctacttgtaaaaccctaacatttcccaaactaattgtactacaactaattcccctttttt

SEQ ID NO: 322173 - DNA, 432 bp, Zea mays
tttcagcattcaaaaacacaccaagcgaagcgcactagcaacgacctaacaccaatggctaccgggatattagccctccttgcgcttgttgcccttttagtgagcgcaacaaatgcgttcattattccacagtgctcacttgctcctagtgccattattccacagttcctcccaccagttacttcaatgggcttcgaacatccagccgtgcaagcctacaggctacaactagcgcttgcggcgagcgccttacaacaaccaattgcccaattgcaacatcaatccttggcacatctaaccctacataccattgcaacgcaacaacaacaacaacaacagtttctgccatcactgagccacctagccgtggtgaaccctgtcacctacttgcaacagcagctgcttgcatccaacccacttgctctggcgaac

SEQ ID NO: 322174 - DNA, 287 bp, Zea mays
accggttccagttcgacctagacccacgcgtgcggctcacactaagcgtcgctccttcacctcaaatcggcacccatggttaccaggatatgataccttcttgggcttcttgctctcgccagtagcctcgcgcactcgccgactgacgaccctgccttgaacgcgctggccagatgatcggcacaaggaatgcgaagcagtactccaacgtccttgacaagcccatctgcccaggcatgcaggatgccacatggagtgcatgtgcatcgtttgacatcagccaattt

SEQ ID NO: 322175 - DNA, 405 bp, Zea mays
ttctcgtcgatgccctccgccgccgtctcgccgttcttcctcctctcatcgtcataggctccttgggtaggttctgtgagtttccaaaggtacagagcgtcgcgtaggctcgtagctaattgtcatttggtttcgtggttcttgctccgaatcgacaatcgtgttgtttctttgcaatttgtttgtcatctggtttcgtagttcttgctccgaattggcactcgtgttgtttctttgcaactgtggagcagaaatggcggtgcccgctgctgactcatgaggcctcacctcgacgactaagaatgccttgagttcttatccataattcttatctgaattctgaaatgatgcccgttgtatttgttgcagaccgtatcaatctgaatcttgattactgttttcatc

SEQ ID NO: 322176 - DNA, 437 bp, Zea mays
ccaactagcaacatataaagcacaatagtgtaccaacaatggcagccaaaatattttggctccggatgctccttggtatttctgcaagtgctgctacggcgaccattttcccgcaatgctcacaagctcctatagcttcccttcttcccccgtacctctcaccagcggtgtcttcggtatgtgaaaacccaattcttcaaccctacaggatccaacaggcaatcgcagctggcatcttacctttatcacccttgttcctccaacaatcatcagccctattacagcagttacctttggtgcatttattggcacaaaacatcagggcacaacaactacaacaacttgtgctagcaaaccttgctgcctactctcagcaacagcagtttcttccattcaaccaactagctgcattgaactctgcttcttatttgcaacaa

SEQ ID NO: 322177 - DNA, 451 bp, Zea mays
actgagaccaactagcaacatagaaagcacaatagtgtaccaacaatggcagccaaaatattttgcttccttatgctccgtggtctttctgcaagtgttgctaccgcaaccattttcccacaatgctcacaagctcctatagcttcccttcttcccccatacctctcaccagcggtgtcttcaatgtgtgaaaccccaattgttcaaccctacaggatccaacaggcaatcgcaacaggcatcttaccattatcacccttgttcctccaacaaccgtcagccctattacagcagttacctttggtccatttggtggcacaaaacatcatggcacatcaactacaacaacttgtgctagcaaaccttgctgcatactctcagcaacatcagtttcttccattcaaccaactggctgcattgaactctgctgcttatttgcaacaacaattac

SEQ ID NO: 322178 - DNA, 434 bp, Zea mays
cccacgcgtccgtagcaacatagaaagcacaatagtgtaccaacaatggcagccaaaatatttgggctccttatgctccttggtctttctgcaagtgctgctacggcgaccattttcccgcaatgctcgcaagctcctatagcttcccttcttcccccgtacctctcaccagcggtgtcttcggtatgtgaaaacccaattcttcaaccctacaggatccaacaggcaatcacagctggcatcttacctttatcacccttgttcctccaacaatcatcagccctattacatcagttacctttggtgcatttattggcacaaaacatcagggcacaacaactacaacaacttgtgctagcaaaccttgctgcctactctcagcaacagcagtttcttccattcaaccaactagctgcattgaactctgcttctta

SEQ ID NO: 322179 - DNA, 396 bp, Zea mays
cgttcattattccacagtgctcactagctcctagtgccattattccacagttcctccgaccaggtacttcaatgggcttggaacatccagccgtgcaagcctacaggctacaactagcgcttgcggcgagcgccttacaacaaccaattgcccaattgcaacaacaatccttggcacatctaaccctacaaaccattgcaacgcaacaacaacaacaacaacagtttctgccatcactgagccacctagccgtggtgaaccctgtcacctacttgcaacagcagctgcttgcatccaacccacttgctctggcgaacgtagctgcataccagcaacaacatcagctgcaacagtttatgccagtgctcagtcaactagccatggtgaaccctggcg

SEQ ID NO: 322180 - DNA, 402 bp, Zea mays
attgagaccaactaccaacatacaaagcacaatagtgtaccaacaatggcagccaaaatattttgcttccttaggctccttggtctttctgcaagtgttgctaccgcaaccattttcccacaatgctcacaagctcctatagcttcccttcttcccccatacctctcaccagcagtgtcttcaatgtgtgaaaacccaattgttcaaccctacaggatccaacaggcaatcgcaacaggcatcttaccattatcacccttgttcctccaacaaccgtcagccctattacagcagttacctttggtccatttggtggcacaaaacatcagggcacaacaactacaacaacttgtgctagcaaaccttgctgcatactctcagcaacatcaatttcttccattc

SEQ ID NO: 322181 - DNA, 249 bp, Zea mays
gcaacagttgctgcctttctaccagcagtttgcggctaaccccgcaaccctcttacaggtacaacaattgttgccctttgtccaacttgctttgacaaacccagcagcctcctaccaacaacacatcattggtggtgccctcttttagattgcttattagttgtaattcaataataaagttttttggatgatgtatgtggccaaccagaaataagaagttacatttccagattcaaaaaaacaaataaa

SEQ ID NO: 322182 - DNA, 402 bp, Zea mays
gatgagcaagagccagcacattctattcggtctaacagataccatgtgtgacttgagagcttcgggcagtatgagcgcttgggtaggtgtgtacaggctatcgtattcagtgtctcgacctgatctattgagcttaccccatacctgcagcactcagtgtcaaattgcttttgagaatggtagtctttcaagcatgactatggctgccgataagtttgagagtgccctcatcgattgagccatagatcgcgtacacgatgattgatcagtcggcagtctgatcacgatgaattatcacgaggtcttccatgctgacagaaacggtttatgcaacaaacttgaatgctgtgagtataggcacttcggacggacctcatgagtcatgtatcagtggacatattg

SEQ ID NO: 322183 - DNA, 432 bp, Zea mays
attttgagcattcagaaacacaccaagcgaagcgcactagcaacaacctaacaacaatggctacgaagatattatccctccttgcgcttcttgcgctttttgcgagcgcaacaaatgcgtccattattccacaatgctcacttgctcctagttccattattccacagttcctcccaccagttacttcaatggccttcgaacacccagctgtgcaagcctataggctacaacaagcgattgcggcaagcgtcttacaacaaccaattgcccaattgcaacaacaatccttggcacatctaacaatacaaaccatcgcaacgcaacagcaacaacagttcctaccagcactgagccacctagccatggtgaaccctgtcgcctacttgcaacagcagctgcttgcatccaacccacttgctctagcatacgtag

SEQ ID NO: 322184 - DNA, 402 bp, Zea mays
ctcatttttatacagccgacgcagtaggctcgctgtcttcttctccatcgcgcaagggggatgccacgggagcggcagcacgccaacgcaaggagcttccctagcttgtcgacagcgcagggagcaggtagcatgcatggcgctcggcacccttgtagcacggacaacgcacttccttactccatgtttatgtccatggcgagcaggagtcattccgtcccatggccgacggcttgcatatccatcagccatcatggccgaactccattggagcaggcgcttactaccgtggcgcactgcttcatggcgcttgctacctgctggagagcaggaggtgacccattcaccaccgtacatgattggagcgcacaggggcagaagcttcaggtgccatggacgccc

SEQ ID NO: 322185 - DNA, 422 bp, Zea mays
gagaccaactagcaacatagaaagcacaatattgtaccaacaatggcagtcaaactagggtgcttccttatgctccttggtctttctgcaagtgttgctaccgcaaccattttcccacactgctcacaagctcctatagcttcccttcttcccccatacctatcaccagcggtgtcttcaatgtgtgaaaacccaattgttcaaccctacaagatccaacaggctatcgcaacaggcatattaccattatcacccttgttcctacaacaaccgtcaaccctattacagcagttacctttggtccatttgctggcactaaacatcagggcacaacaactactacaactagtgctagcaaaccttgctgcatactctcagcaacatcagattcttccattcaaccaactggctgcattgaactc

SEQ ID NO: 322186 - DNA, 370 bp, Zea mays
ccaactagcaacatacaaagcacaatagtgtaccaacaatggcagccaaaatagttgggttccttatgctccttggtctttctgcaagtgttgctaccgcaaccattttcccacaatgctcacaagctcctatagctacccttcttcccccatacctctcaccagcggtgtcttcaatgtgtgaaaccccaattgttcaaccctacaggatccaacaggcaatcgcaacaggcatcttaccattatcacccttgttcctccaacaaccgtcagccctattacagcagttaccttaggtccatttggtggcacaaaacatcaaggcacaacaactacaacaacttgcgctagcaaaccttgctgcatactc

SEQ ID NO: 322187 - DNA, 405 bp, Zea mays
aagcatcatagaaagtagaatccattatcaacaatagagcaacaatggcgaccaagaggttttccctccttatgctccttgctctttctacatgtgttgctaacgcgacaattttccctcaatgctcacaagctcctatagcttcccttcttcccccataccttccatcaattatagcttcagtatgtgaaaacccagctcttcaaccatataggcttcaacaagcaatcgcagcatgcaacatacctttatcgcccttgttgtttcaacaatcaccagccctatctttggtgcagtcattggtacaaaccatcagggcacaacagctgcagcaactcgtgctacctgtgatcaaccaagtagctctggcaaacctttctccctactctcagcaacaacaatttc

SEQ ID NO: 322188 - DNA, 370 bp, Zea mays
acgactcatacgatagcacaataaatagtcaaacaacgggacccacaatagacggccaggttattcgccttgttaggccgggctgtctttatacatataccattatcgtgaccatctcgccagcatgcataaatgcttatatatcttcgtatctctcactacccatctcaaaagactggtatagcacgtgaaaacacccatatataaaccaatacgctatcacacgcgcaatcacacctcgaattacacctttagcacaacagttatgaacaatatcaaatcacatattacatgcacaacctttggcacaccaattggcaccaacaattatggcacaacatgtgcaacatcatggaccaacatactttga

SEQ ID NO: 322189 - DNA, 432 bp, Zea mays
caactagcaacatagaaagcacaatagtgtaccaacaatggcagccaaaatattttgcttcctgatgctccttggtctttctgcaagtgttgctaccgcaaccattttcccacaatgctcacaagctcctatagcttcccttcttcccccatacctctcaccagcggtgtcttcaatgtgtgaaaccccaattgttcaaccctacaggatccaacaggcaatcgcaacaggcatcttaccattatcacccttgttcctccaacaaccgtcagccctattacagcagttacctttggtccatttggtggcacaaaacatcagggcacaacaactacaacaacttgtgctagcaaaccttgctgcatactctcagcaacatcagtttcttccattcaaccaactggctgcattgaactctgctgcttatttgca

SEQ ID NO: 322190 - DNA, 209 bp, Zea mays
gagacgatcttgcatcttcgatggcaccatactgcacctacactggcagacagaatagagtgccttgttatgctcgtcggtctttctgaacgtgctacttcctccaccattctacaacactgatcatgaagcttgtatatgttaccttcataacgacgtacctcacaccagtagtgcatacgctatatgaaaacccagttatttaacac

SEQ ID NO: 322191 - DNA, 333 bp, Zea mays
cactttctgaaggtctatctaggtccttgtctgtcttttcaatatatgctgagcacgctgactggcttcagatatgggctgatgttgagctttgttcatcacaggataagctgaaatctgaaatggaagatgagacaagttggtcatgtagtggtcagcatgaccaacatggtcacatggaaaattcaacgaaatttattctatctaccagagaagactaccaagcttcttccgtgtgcgaattcggtatcaaaactggtttgtcaatggttgaaagaagccgggttctggcaaacaggggaatgcaaatcccgtattacagatccttttcgg

SEQ ID NO: 322192 - DNA, 432 bp, Zea mays
attgagaccaactagcaacatagaaagcactctagcgtaccaacaatggcagccaaaatattgggtctccttatgctccttggtctttctgcaagtgctgctacggctaccattttcccgcaatgctcgcaagctcctatagcttcccttattcccccgtacctctcaccagcggtgtcttcggtatgtgaaaacccaattcttcaaccctacaggatccaacaggcaatcgcagctggcatcttacctttatcacccttgttcctccaacaatcatcatccctattacaacagttacctttggtgcatctattggcacaaatcatcagggcacaacaactacaacatcttgtgctagcaaaccttgctgcctactctcagcaacagcagtttcttccattcaaccaactaggttcattgaactctgcttct

SEQ ID NO: 322193 - DNA, 286 bp, Zea mays
aactactacattaccacagtcactaccaatatttaggcagattctcttaagctcttggagttatcgctaccaataccatcattatacaacactgatcacctgctataacttccattataccacaatacctctcaccagctacttcaacaatgcttcaaacacctatctttccaaccctacaaactacaccaagcacttgaacagaccttttaacatcatcaaactaaccaattcaaccaccaatactcgtatcacataaccttacttaccatcatatcacatcaca

SEQ ID NO: 322194 - DNA, 327 bp, Zea mays
  unsure (1)..(327): unsure at all n locations
tcgcatgaaacacatccaagctgaagcatcattatcaacatacctaacaacaatggnctacgcaagaggattatccctccttgcgtcttcttgcagctttttgcagagctcaacaatatgcagttcaattattccacaatgnctcatcttgctccatagttccattattacatctgttcctcccaccagttaccttcaatgggncttcgaacatcccagctgtgcatagcctatanggctacatacaagcaattagcggcgagcgtcttacaacataccaatttcccagttggcaacaacatatccttggcacatnnctaacaatac

SEQ ID NO: 322195 - DNA, 390 bp, Zea mays
catctagccatttgcacacgatcatataatatattcgttcatgttagctgatgagtagccacagacttaattactaagtgggcactgggcatgccttgaacatctatcttggtgaattcattgaggctttagtggcattatatttgttgtataagcatcttgcatgagattctctctggctagtttagtgcacatgataattacagtatatgaatctgatgtgaagtctgtccatcctctgcaacggagtgcatagcatgattcactggtatatatccagcagttaaaatccatgccgtatttgcccgctgggaacctggaccaattaaaaatgggggttcctgaaccatgggccttgggccattagggttcaaaaaaccccccttggtt

SEQ ID NO: 322196 - DNA, 412 bp, Zea mays
agcaacatagaaagcacaatagtgtaccaacaatggcagccaaaatattttgcttccgtatgctccttggtctttctgcaagtgttgctaccgcaaccattttcccacaatgctcacaagctcctatagcttcccttcttcccccatacctctcaccagcggtgtcttcaatgtgtgaaaccccaattgttcaaccctacaggatccaacaggcaatcgcaacaggcatcttaccattatcacccttgttcctccaacaaccgtcagccctattacagcagttacctttggtccatttggtggcacaaaacatcagggcacaacaactacaacaacttgtgctagcaaaccttgctgcatactctcagcaacatcagtttcttccattcaaccaactggctgcattgaactc

SEQ ID NO: 322197 - DNA, 156 bp, Zea mays
atagcttcactctctgttatcctttctcttcaaccatattatcttttagataagttcacatttaagttggtgcctgcatcacccttatcatttcaacaatcaccatccctatctttttttcattcatttgtacaaaccatcaattcacaacatctt

SEQ ID NO: 322198 - DNA, 230 bp, Zea mays
attctgacaaagttctaaccacagatatgttctatcaaggtataaaaaccttaatcgggggcgggatcctaagacttacgtgcaatttgtctgaatgcttcaaacctttgtggcggaacctttgtatgtttgaacctctgttgtggaagatctaatgtgctgtaattgtctatgactcgcgatgagaatgtagagtatgatgactcatctgtgtaccttaaataaacatc

SEQ ID NO: 322199 - DNA, 446 bp, Zea mays
cgacaccatgaaagtgctgatcgttgcccttgctctcctggcgctcgctgcgagcgccgcctccagtacaagcggcgggtgtggctgccagacaccaccgtttcatctaccgcctccgttctatatgccgcctccgttctatctgccgccgcagcagcagccgcagccatggcaataccccactcaaccaccgcagctaagcccgtgccagcagttcggatcctgcggcgtcggcagcgtcggcagcccgttcctgggccagtgcgtcgagttcctgaggcaccagtgcagcccggcggcgacgccctacggctcgccacagtgccaggcgctgcagcagcagtgctgccaccagatcaggcaggtggagccgctgcaccggtaccaggcgacatacggtgtggtcctgcagtccttcctgcagcagcagccgcagggcgagctcg

SEQ ID NO: 322200 - DNA, 423 bp, Zea mays
caattatagcttcagtatgtgaaaacccagctcttcaaccatataggcttcagcaaggagtcgcagcaagcaacatacctttatcgcccttgttgtttcaacaatcaccagccctatctttggtgcagtcattggtacaaaccatcagggcacaacagctgcagcaactcgtgctacctgtgatcaaccaagtagctctggcaaacctttctccctactctcagcaacaacaatttcttccattcaaccaactgtctacactgaaccctgctgcttatttgcagcatcaactattaccatttagccagctagctactgcctactctcagcaacaacaacttcttccatttaaccaattggccgcactgaaccccgctgcttatttgcagcagcaaatactactgccatttagcgagctagctg

SEQ ID NO: 322201 - DNA, 426 bp, Zea mays
  unsure (1)..(426): unsure at all n locations
caactaccattcagccagctacctgctgcctacccccagcaatttcttccattgaaccgactggcagcattgaactctcctgcttatttacagcagcaacaactactaccattcagccagctagctggtgtgagccctgctaccttcttgatacaaccacagttgttgccgttctaccagcacgctgcgcctaacgctggcaccctcttacaactgcaacaattgctgccattcaaccaacttgctttgacaaacccaacagtgttctaccaacaacccatcattggtggtgccctcttttagattgcttatgagttatagttcaataatgaagttttttggatgatgtttgtggcgtcccagaaataagaaagtacatttctaaaaaaaaaaaanaagaagaaagaataaaatataatagaataa

SEQ ID NO: 322202 - DNA, 414 bp, Zea mays
cagttacctttggtccatttggtggcacaaaacatcagggcacaacaactacgacaagttgtgctagcaaaccttgctgcatactctcagcaacatcagtttcttccattcaaccaactggctgcattgaactctgctgcttatttgcaacatcaattaccattcagccagctagttgctgcctacccccagcaatttcttccattcaaccaactagcagcattgaactctgctgcttatttacagcagcaacaactactaccattcagccagctagctgatgtgagccctgctgccttcttgacacaacaacagttgttgccgttctacctgcacgctatgcctaacgctggcaccctcttacaactgcaacaattgctgccattcaaccaacttgctttgacaaacccaaca

SEQ ID NO: 322203 - DNA, 431 bp, Zea mays
ccaaaatattttgcctccttatgctccttggtatttctgcaagtgctgctacggcgacggttttgccgcaatgctcacaagctcctatagcttcccttcttcccccgtacctctcaccagcggtgtcttcggtatgtgaaaacccaattcttcaaccctacaggatccaacaggcaatcgcagctggcatcttacctttatcacccttgttccttcaacaatcatcagccctattacagcagttacctttggtgcatttattggcacaaaacatcagggcacaacaactacaacaacttgtgctagcaaaccttgctgcctactctcagcaacagcagtttcttccattcaaccaactagctgcattgaactctgcttcttatttgcaacaacaacaactaccattcagccagctacctgttgcctacccc

SEQ ID NO: 322204 - DNA, 428 bp, Zea mays
tcccggctggacccgatcgtccgccaacaagcaacatagaaagtggaatccagtatcaacaacagagcaacaatggctacggacatgttttacctcctgatgcgccttgctctttctgcatgtgttgctaacgcgacaattttccctcaatgctcacaagctcctatagcttcccttcttcccccataccttccatcaatgatagcttcagtatgtgaaaacccagctcttcagccctataagctccaacaagcaatcacagcatgcaacatacctttatcacccttgttgtttcaacaatcgccagccctatctttggtgcagtcattggtacaaaccatcatggcacatcaactgcaacaactcgtgctacctgtgatcaaccaagtagctctagccaacctttctccctactctcagcaacaaca

SEQ ID NO: 322205 - DNA, 442 bp, Zea mays
cggaattcccgggaggaaggcagaacatcagatattgaagtgcaaccaagatttttagtgctaggggcagttgatgactcgacacgtgtggaaaaactttgagcgttcaatgtagtattcctggaattaactacatgtgcataactacccgaagaatcagaaacatataaaactccaagatcatgctcttccggcaagcctccagtagttgttgaggatgatgaagcttatgagatactcttctgcgtgtatggatgcccatcactaaatacagaagctttcttgccactttgagagaaatgacggcatcggtctggacgaatggcgagctcgacgatctagagtcagatctggtggggaagaagtctggtcggtcattaccgacggcaacgctggctgcagagctgatcgtgccaccagcataagagatcaaggagttttt

SEQ ID NO: 322206 - DNA, 372 bp, Zea mays
gggtcttcagaccattagctttatctactccagagcgcagaagaacccgatcgacacggtgagggtgttgctcggggccctcgctctcctggctctcgctgcgagcgccacctccacgcatacaagcggcggctgcggctgccagccaccgccgccggttcatctaccgccgccggtgcatctgccacctccggttcacctgccacctccggtgcatctcccaccgccggtccacctgccgccgccggtccacctgccaccgccggtccatgtgccgccgccggttcatctgccgccgacaccatgccactaccctactcaaccgccccggcctcagcctcatccccagccacacccatgcccgtgccaaca

SEQ ID NO: 322207 - DNA, 381 bp, Zea mays
ccaactagcaacatagaaagcacaatagtgtaccaacaatggcagccaaaatattttgcttccttatgctccttggtctttctgcaagtgttgctaccgcaaccattttcccacaatgctcacaagctcctatagcttcccttcttcccccatacctctcaccagcggtgtcttcaatgtgtgaaaccccaattgttcaaccctacaggatccaacaggcaatcgcaacaggcatcttaccattatcacccttgttcctccaacaaccgtcagccctattacagcagttacctttggtccatttggtggcacaaaacatcagggcacaacaactacaacaacttgtgctagcaaaccttgctgcatactctcagcaacatc

SEQ ID NO: 322208 - DNA, 443 bp, Zea mays
gtggaatacagtagcaacaatagagcatcaatggcggccaagatattttccatccttatgctccttgctctttctgcatgtgttgctaacgcgaccatttttcctcaatactcacaagctcctatagctgcccttcttcccccataccttccatcaatgaccgcttcagtttgtgaaaacccagcccttcaaccctacaggctccaacaagcaatcgcaacaagcaacttacctttatcacccctgttctttcaacaatcgccagccctatctttggtgcagtcattggtacaaaccatcagggcacaacagctgcaacaactcgtgctaccagtgatcagccaagtagctctggcaaacctttctccctactctcagcaacaacaatttcttccattcaacccaatgtctacactgaaccctgctggttatttacaacaaca

SEQ ID NO: 322209 - DNA, 259 bp, Zea mays
gcggcagtggagcttcattggcgtccaatatactttccctccttatgctccttgctctggctgcatgtgttgctaacgcgacaattttccctcaatgctcacaagctcctatagcttacctgcttcccccataccttccatcaatgatagcttcagtatgtgaaaacccagctcttcaaccctataagctccaacaagcaatcgcagcatgcaacatacctttatcacccttgtttcaaacatcgccaggcctatcttt

SEQ ID NO: 322210 - DNA, 388 bp, Zea mays
ctgagaggagccatttcgatgagaaggctaatcatctccatggctccgttcccattggtgagaaggctgaaaggcatgctataaacagagatagacccgatcgtggtgtatgggcagcttgacgctatgacaaatctacatctgcaggtagtacacatcctccgtcgtcagagttgcctcaaatgcagtcacattctggagataatattttgcaactagcagatggtcatggatacagaaagacagacacatgggatcaaggtggtagccagggtgttcctgttgaaaatggacataggcacgcctaccgatgtggaccttcacgttgaccaatggaaactgaaatctctgcaaatgtgcctgaatgcgagaattcaaagctgggctc

SEQ ID NO: 322211 - DNA, 399 bp, Zea mays
gttcgatgctcaaagaacatcataacaaccagtacgctctgctactgaagccccggtgaccgtggttcagagttgctgttaaattcacaaagctactcgtatctattagattgctgaaaccagcgagtacgatcctttatgggatttgatctggtctaattgttgttaagtggaggtattgctctcagttgttttgtgctctgtttgtcggcatatgccaagagctagggcttctcaagttctaagcttttagacgagtggattccttccattgaagagccggcaaaagttctgccctgcacctgctaaaaatagatcttaccctggtccaatgctaaataatatgacgtgtcgccttctagatgtggatattatgtgaatgtacaatatgtctagata

SEQ ID NO: 322212 - DNA, 441 bp, Zea mays
cacttgctccgagtgccattattccacagttcctccctccagttacttcaatgggcttggaacacccagctgtgcaagcctataggctacaacaagcgcttgcggcgagcgtcttagaacaaccaattgcccaattacaacaacaatccttggcacatctaaccatacaaaccatcgcaacgcagcagcaacaagcactgagccacctagccgtggtgaaccctatcgcctacttgcaacaacagctgcttgcatccaacccacttgctttggcaaacgtaactgcataccaacaacaacaacagttgcaacagtttctaccagcgctcagtcaactagccatggtgaaccctatcgcctacctacaacagcaacaacttctttcatctagcccgctcgctatgggcaatgcacctacatacctgcaacaactgttggtgc

SEQ ID NO: 322213 - DNA, 420 bp, Zea mays
ccaactagcaacatagaaagcacaatagtgtaccaacaatggcagccaaaatattttgcttcgttatgctccttggtctttctgcaagtgttgctaccgcaaccattttcccacaatgctcacaagctcctatagcttcccttcttcccccatacctctcaccagcggtgtcttcaatgtgtgaaaccccaattgttcaaccctacaggatccaacaggcaatcgcaacaggcatcttaccattatcacccttgttcctccaacaaccgtcagccctattacagcagttacctttggtccatttggtggcacaaaacatcagggcacaacaactacaacaacttgtgctagcaaaccttgctgcatactctcagcaacatcaatttcttccattcaaccaactggctgcattgaactctg

SEQ ID NO: 322214 - DNA, 448 bp, Zea mays
caactagcaacatagaaagcacaatattgtaccaataatggcagccaaaatatgttgccggattatgctccttggtctttctgcaagtgctgctacggcgagcattttcccgcaatgctcacaagctcctatagcttcccttcttcccccatacctctcaccagcgatgtcttcagtatgtgaaaatccaattcttctaccctacaggatccaacaggcaatcgcagcaggcatcttacctttatcacccttgttcctccaacaatcatcagccctattacagcagttacctttggtgcatttattggcacaaaacatcagggcacaacaactacaacaactcgtgctagcaaaccttgctgcctactctcagcaacagcagttacctttggtgcatttgttggcacaaaacatcatggcacaacaactacaacaactcgtgctagca

SEQ ID NO: 322215 - DNA, 417 bp, Zea mays
caactagcaacatagaaagcacaatagtgtaccaacaatggcagccaaaatattctggtgccttatgctccttggtctttctgcaagtgttgctaccgcaaccattttcccacaatgctcacaagctcctatagctttccttctttccccatacctctcaccagcggtgtcttcaatgtgtgaaaacccaattgttcaaccctacaggatccaacaggcaatcgcaacaggcatcttaccattatcacccttgttccttcaacaaccgtcagccctattacagcagttacctttggtccatttggtggcacaaaacatcaaggcacaacaactacaacaacttgtgctagcaaaccttgctgcatactctcagcaacatcaggttctttcattcaaccaactggctgcattgaactc

SEQ ID NO: 322216 - DNA, 445 bp, Zea mays
cccacgcgtccgtgagcattcagaaacacacctagcgaagcgcactagcaacgacctagcaacaatggctaccaagatattatccctctttgcgcttcttgccctttttgtgagcgcaacaaatgcgttcattattccacaatgctcacttgctcctagtgccattattccacagttcctccctccagttacttcaatgggcttcgaacacccagctgtgcaagcctacaggctacaacaagcgcttgcggcgagcgtcttacaacaaccaattgcccaattacaacaacaatccttggcacatctaaccatacaaaccatcgcaacgcaacagcaacaacaatttctaccagcactgagccaactagctgtggtgaaccctgtcgcctacttgcaacagcagttgcttgcatccaacccacttgctctggcaaacatagttgca

SEQ ID NO: 322217 - DNA, 195 bp, Zea mays
gatccaacaggcaatcgcagcaggcatcttacctttatcacccttgttctaccaacaagccatcattggtggtgccctcttttagatttcttatgagttatagttcaataataaagttttttgtctgaaaaaaaaaaaaaaacaaaaaaaaaaaaaaaataaataaaaaaaacagaaacataaaagaggccagca

SEQ ID NO: 322218 - DNA, 446 bp, Zea mays
ctgagccacctagccgtggtgaaccctgtcacctacttgcaacatcagctgcttgcatccaacccacttgctgtggcgaacgtaactgcataccagcaacaacaacagctgcaacagtttatgccagtgctcagtcaactagccatggtgaaccctgccgtctacctacaactactttcatctagcccgctcgcggtgggcaatgcacctacgtacctacaacaacagttgctgcaacaaattgtaccagctctgactcagctagctgtggcaaaccctgctgcctacttacaacagttgcttccattcaaccaactggctgtgtcaaactctgctgcgtacctacaacagcgacaacagttacttaatccattggcagtggctaacccattggtcgctaccttcctgcagcaacaacaacaattgctgccatacaaccagttctc

SEQ ID NO: 322219 - DNA, 346 bp, Zea mays
cggacgcgtgggtagcaacatagaaagtacaatagtgtaccaacaatggcaggcaaaggattttgcctccttatgctccttggtctttctgcaagtgctgctacggcgaccattttcccgcaatgctcgcaagctcctatagcttcccttcttcccccgtacctctcaccagcggtgtcttcggtatgtgaaaacccaattcttcaaccctacaggatccaacaggcaatcacagctggcatcttacctttatcacccttgttcctacaacaatcatcagccctattacatcagttacctttggtgcatttattggcacataacatcagggcacaacaactacaac

SEQ ID NO: 322220 - DNA, 431 bp, Zea mays
cagcattcaaaaacacaccaagcgaagcgcactagcaacgacctaacaccaatggctagcaagatattagccctccttgcgcttcttgcccttttagtgagcgcaacaaatgcgttcattattccacagtgctcacttgctcctagtgccattattccacagttcctaccaccagttacttcaatgggcttcgaacatccagccgtgcaagcctacaggctacaactagcgcttgcggcgagcgccttacaacaaccaattgcccaattgcaacaacaatccttggcacatctaaccctacaaaccattgcaacgcaacaacaacaacaacaacagtttctgccatcactgagccacctagccgtggtgaaccctgtcacctacttgcaacagcagctgcttgcatccaacccacttgctctggcgaacgt

SEQ ID NO: 322221 - DNA, 451 bp, Zea mays
atttagaccaactagcaacatataaagcacaatagtgtaccaacaatggcagcgaaaatgttttgcctccttatgctccttggtatttctgcaagtgctgctacggcgaccattttcccgcaatgctcacaagctcctatagcttcccttcttcccccgtacctctcaccagcggtgtcttcggtatgtgaaaacccaattcttcaaccctacaggatccaacaggcaatcgcagctggcatcttacctttatcacccttgttcctacaacaatcatcagccctattacagcagttacctttggtgcatttattggcacaaaacatcagggcacaacaactacaacaacttgtgctagcaaaccttgctgcctactctcagcaacagcagtttcttccattcaaccaactagctgcattgaactctgcttcttatttgcaacaacaacaac

SEQ ID NO: 322222 - DNA, 422 bp, Zea mays
agatagttggttgaatggaagaaattgttgttgctgaaccctgctgcttatttgcagggacggctattaccattgagccagctagctactgcctactctcatcaacaacaacttcttccatttaaccaattggccgcactgaacctcgctgcttatttgcagcatcaaatattactaccatttagccagctagctgcagcaagccgtgcttccttcttgacacagcaacagttgctgcctttctaccagcagtttgcggctaaccccgcaaccctcttacaactacaacaattgttgccctttgtccaacttgctttgacaaacccagcagccttctaccaacaacacatcattggtggtgccctcttttagattgcttattagttgtaattcaataataaagttttttggatgatgtatgt

SEQ ID NO: 322223 - DNA, 387 bp, Zea mays
caactagctgcattgaactctgcttcttatttgcaacaacaacaactaccattcagccagctatctgctgcctagccccagcaatttgttccattcaaccaactgacagctttgaactctcctgcttatttacagcagcaacaactactaccattcagccagctagctggtgtgagccctgctaccttcttgacacaaccacaattgttgccgttctaccagcacgctgcgcctaacgctggcaccctcttacaactgcaacaattgctgccattcaaccaacttgctttgacaaacccaacagcattctaccaacaacccatcattggtggtgccctcttttagatttcttatgagttatagttcaataataaaggtttttgtctg

SEQ ID NO: 322224 - DNA, 107 bp, Zea mays
ccgaacatccggggtggtaactataacagaggggcacctacattaaatacactggccctcgacatacaacgccatgactggcaaaaccctcacagaacctaacttaa

SEQ ID NO: 322225 - DNA, 238 bp, Zea mays
gcgaacagcaccaagcaacacacggagagccctataccagcacaaacactggcgcgggggtttagaagcagccagcgcggactaatcctcgcagcacgacatcacgctgtccatgctccctgcatccaacgccagtgctgcgacgatccgcgtgccggcataccacaatccatacgacccgttacagagctgcccatggatcataacacgacccaacaggaaaaatacaccgcaagca

SEQ ID NO: 322226 - DNA, 279 bp, Zea mays
caggactaccacctgcatcaaatgaatcgcactactcgcgactaaacactacgacccgcgagcataccacagccgctaagcactaatcaactacagagccatgcctctccaagaccaacacacaagaagccacaccaccaccgacgccgcctcagcaagcacaccaagaacaagtccgtcactgagactgatacccaggacgcatacagctgagctacaagctacgactccaacgagaacgccgatcccaaccacgagccacaggacgacgtcaagata

SEQ ID NO: 322227 - DNA, 346 bp, Zea mays
  unsure (1)..(346): unsure at all n locations
gtcggcaccataccggtacaaatgctgctcgcatcgcggaacctccaaatcacgacctggggattctgcctgaattctggacttatgctgctactgcagttccagatatgggtctcatggcaatgaatcacatattacttattgccgctatgctagctgtgtgactgccatacggtgtctcggaacccgtgttaggcttcttacatacacctgttacgacacctgagttgctgtaacccttgctacatgagcctatgccgtnttacgtccatcattgataacaaatcagtctattacctaaagtacaaccattgaaacatggcatccggtctcaacgtccccagct

SEQ ID NO: 322228 - DNA, 440 bp, Zea mays
ttgagaccagcaagcaacatataaagtagaatccattatcaacaatagagcagcaagggcgaccaagatattttgcctgcttatgctccttgctctttctacatgtgttgctaacgcgacaattttccctcaatgctcacaagctcctatagcttcccttcttcccccataccttccatcaattatagcttcagtatgtgaaaacccagctcttcaaccatataagcttcaacaagcaatcgcagcaagcaacatacctttatcgcccttgttgtttcaacaatcaccagccctatctttggtgcagtcattggtacaaaccatcatggcacaacagctgcagcaactcgtgctacctgtgatcaaaccaattgctctggcaaacctttctccctactctcagcaacaacaatttcttccattcaaccaactgtctacac

SEQ ID NO: 322229 - DNA, 444 bp, Zea mays
attttgagcattcagaaacacaccaagcgaagcgcactagcaacgacctaacagcaatggctaccaagatattagccctccttgcgcttcttgccctttttgtgagcgcaacaaatgcgttcattattccacaatgctcacttgctcctagtgccattattccacagttcctcccaccagttacttcaatgggcttcgaacacctagctgtgcaagccaacatgcaacaacaagcgcttgcggcgagcgtcttacaacaaccaattgcccaattgcaacaacaatccttgccacatctaacaatacaagccatcacaacgcaacagcaacaacagttcctaccagcactgagccaactagccatggtgaaccctgccgcctacttgcaagagcagctgcttgcatccaacccacttgctctggcgaacgtagttgcaaaccagc

SEQ ID NO: 322230 - DNA, 442 bp, Zea mays
gcttcccttcttcccccgtacctctcaccagcggtgtcttcggtatgtgaaaacccaagtcttcaaccctacaggatccaacaggcaatcgcagctggcatcttacctttatcacccttgttcctccaacaatcatcagccctattacaacagttacctttggtgcatttattggcacaaaacatcagggcacaacaactacaacaacttgtgctagcaaaccttgctgcctactctcagcaacagcagtttcttccattcaaccaactaggttcattgaactctgcttcttatttgcaacaacaacaactaccattcagccagctacctgctgcctacccccagcaatttcttccattcaaccaactagcagcattgaactctcctgcttatttacagcagcaacaactactaccattcagccagctagctggtgtgagcc

SEQ ID NO: 322231 - DNA, 268 bp, Zea mays
gcaaaacagcaagagaaaggcaaccccaagacgagcaagacagcgacggacgacaagggccacataccaacgcgcacggacaatgacggaagcacaggtaacgcaaccagtaggccagactactcacacgacgcaatagctgcccgactgaactcagaacagcaatcacacagacctacagtatgggaaaaaccagggcgccagccataacgaaaccgtacaggacaaggaccacgaaaccgaaaagtgtcacacagaccacaacaac

SEQ ID NO: 322232 - DNA, 411 bp, Zea mays
gcaacatagaaagtggaatacagtagctaaaatagagcaacaatggcggccaagataggttggatccttatgctccttgctctttctgcatgtgttgctaacgcgaccatttttcctcaatactcacaagctcctatagctgcccttcttcccccataccttccatcaatgaccgctttagtatgtgaaaacccagcccttcaaccctacaggatccagcaagcaatcgcaacaagcaacttacctttatcacacctgttctttcaacaatcgccagccctatctttggtgcagtcattggtacaaaccatcaaggcagaacagttgcagcaactcgtgctaccagtgatcaaccaagtagctctggcaaacctttccccctactctcaacaacaacaatttcttccattc

SEQ ID NO: 322233 - DNA, 426 bp, Zea mays
acatagaaagtggaatacagtagcaacaatagagcaacaatggcggccaagagattttccatccttatgctccttgctctttctgcatgtgttgctaacgcgaccatttttcctcaatactcacaagctcctatagctgcccttcttcccccataccttccatcaatgaccgattcagtttgtgaaaacccagcccttcaaccctacaggctccaacaagcaatcgcaacaagcaacttacctttatcacccctgttctttcaacaatcgccagccctatctttggtgcagtcattggtacaaaccatcaaggcacaacagctgcaacaactcgtgctaccagtgatcagccaagtagctctggcaaacctttctccctactctcagcaacaacaatttcttccattcaaccaactgtctacactg

SEQ ID NO: 322234 - DNA, 351 bp, Zea mays
ctgcacaccctcaatcaccacacagtcctccactcctttagtagctcgtgattgggagggttactagaccactggtcgggtctctgacgacgacacatggtgcagggtcgcgtggccgcatcatggacggcagttccttctgctcgccggcgtgctgctggccgtcgcagacacggccggtgcggaggacagactggtcgaactaaaccgcccggcggacctgcggcggtgcaagcatgcagacaagtagcacaactgaaaggacaccccgaggaagagggaatgcgagagcgagtgccgcgagcggcaccatcaagatgacgcggtcgatgacagcaaccgcagcgacta

SEQ ID NO: 322235 - DNA, 437 bp, Zea mays
gttcaaccctacaggatccaacaggcaatcgcaacaggcatcttaccattatcgcccgggttcctccaacaaccgtcagccctattacagcagttacctttggtccatttggtggcacaaaacatcagggcacaacaactacaacaacttgtgctagcaaaccttgctgcatactctcagcaacatcagtttcttccattcaaccaactggctgcattgaactctgctgcttatttgcaacaacaattaccattcagccagctagttgctgcctacccccagcaatttcttccattcaaccaactagcagcattgaactctggtgcttatttacagcaacaacaactactaccattcagccagctagctgatgtgagccctgctgccttcttgacacaacaacagttggtggcgttctaccttgacgctatgcctaa

SEQ ID NO: 322236 - DNA, 203 bp, Zea mays
cgctgcggtctgatcgcgcccgcagcccgttcgaaccctcgactccccctgccgacgccgggatggacgacgaccgggaccacgaccactacccctacgcgtcacagccggccgtgccctgacgacggtccctgaagcggaagctgctcgcggacgcggaagtcgaggcggaccccgcggcgcggttcgaggccgacgacgag

SEQ ID NO: 322237 - DNA, 400 bp, Zea mays
cgtcagcctagcaattagctcatcgactccagattggagaactcgacaccatgaaggtgctgatcgttgcccttgctctcctggcgctcgctgcgagcgccgcctccagtacaagcggcggctgtggctgccagacaccaccgtttcgtctaccgcctccgttctatatgccgcctccgttctatctgccgccgcagcagcagccgcagccatggcaataccccactcaaccaccgcagctaagcccgtgccagcagttcggatcctgcggcgtcggcagcgtcggcagcccgttcctgggccagtgcgtcgagttcctgaggcaccagtgcagcccggcggcgacgccctacggctcgccacagtgccaggcgctgcagcagcagtgctggcaccagat

SEQ ID NO: 322238 - DNA, 390 bp, Zea mays
ataacaagtttgttgttcgtttataaaataaaatgacaatatgcactaggtttggtcgggtttaaaaaacccagggggtcacgggtttgggtactataggaacaaacccgtacccataaacccgctgggtacagatttatgcccattaacaaacccatgggtatgaaaattggcccaaacccgtaccctaatggggtaaaaacccatcgggtttcgggtacccattgccatctctagttgtaacccttcttcattcgtcaccaggtctgcactggatggggaatgtggtttccttgctgctaacctttatgcaaagagtgtttttggcgaggactctttggtgaacatcaacattgagaagcaacatgacggcaagctcagtggctacat

SEQ ID NO: 322239 - DNA, 380 bp, Zea mays
ccaactagcaacatagaaagcacaatagtgtaccaacaatggcagccaaaatatgtgggctccttatgctccttggtctttctgcaagtgctgctacggcgaccattttcccgcaatgctcgcaagctcctatagcttcccttcttcccccgtacctctcaccagcggtgtcttcggtatgtgaaaacccaattcttcaaccctacaggatccaacaggcaatcacagctggcatcttacctttatcacccttgttcctccaacaatcatcagccctattacatcagttacctttggtgcatttattggcacaaaacatcaaggcacaacaactacaacaacttgtgctagcaaaccttgctgcctactctcaacaacag

SEQ ID NO: 322240 - DNA, 445 bp, Zea mays
caaaaacacaccaagcgaagcgcactagcaacgacctaacaccaatggctaccaagatattagccctccttgcgcgtcttgcccttttagtgagcgcaacaaatgcgttcattattccacagtgctcacttgctcctagtgccattattccacagttcctcccaccagttacttcaatgggcttcgaacatccagccgtgcaagcctacaggctacaactagcgcttgcggcgagcgccttacaacaaccaattgcccaattgcaacaacaatccttggcacatctaaccctacaaaccattgcaacgcaacaacaacaacaacaacagtttctgccatcactgagccacctagccgtggtgaaccctgtcacctacttgcaacagcagctgcttgcattcaacccacttgctctggcgaacgtagctgcataccagcaacaaca

SEQ ID NO: 322241 - DNA, 435 bp, Zea mays
caacaagcaacatagaaagtggaatccagtagcaacaatagagcaacaatggcgaccgggagagtttacctccttatgctccttgctctttctacatgtgttgctaacgcgacaattttccctcaatgctcacaagctcctatagcttcccttcttcccccataccttccatcaattatagcttcaatatgtgaaaacccagctcttcaaccatataggcttcaacaagcaatcgcagcaagcaacatacctttatcgcccttgttgtttcaacaatcgccagccctatctttggtgcagtcattggtacaaaccatcagggcacaacagctgcagcaactcgtgctacctctgatcaaccaagtaactatggcaaacctttctccctactctcagcaacaacaatttcttccattcaaccaactggctacactg

SEQ ID NO: 322242 - DNA, 98 bp, Zea mays
  unsure (1)..(98): unsure at all n locations
aaaagattagagatctatattttattactgagaagttgcacatatcagtatgagaaatgtctcantaataaaagattagagatctatattttaagttc

SEQ ID NO: 322243 - DNA, 439 bp, Zea mays
attagctttatctactccagagcgcagaagaacccgatcgacaccatgagggtgttgctcgttgccctcgctctcctggctctcgctgcgagcgccacctccacgcatacaagcggcggctgcggctgccagccaccgccgccggttcatctaccgccgccggtgcatctgccacctccggttcacctgccacctccggtgcatctcccaccgccggtccacctgccgccgccggtccacctgccaccgccggtccatgtgccgccgccggttcatctgccgccgccaccatgccactaccctactcaaccgccccggcctcagcctcatccccagccacacccatgcccgtgccaacagccgcatccaagcccgtgccagctgcagggaacctgcggcgttggcagcaccccgatcctgggccagtgcgtcgagtttc

SEQ ID NO: 322244 - DNA, 455 bp, Zea mays
attgtgagcattcagaaacacaccaagcgaagcacattagcaacaacctaacaacaatggctaccaagatattatgccggcttgcgcttcttgcgctttttgcgagcgcaacaaatgcgttcattattccacaatgctcacttgctccaagttccattattacacagttcctcccaccagttacttcaatgggcttcgaacacccagctgtgcaagcctataggctacaacaagcaattgcggcgagcgtcttacaacaaccaatttcccagttgcaacaacaatccttggcacatctaacaatacaaaccatcgcaacgcaacagcaacaacaattcctaccagcactgagccacctagccatggtgaaccctgccgcctacttgcaacagcagttgcttgcatcaaacccacttgctctggcaaacgtagttgcaaaccagccacaacaacag

SEQ ID NO: 322245 - DNA, 437 bp, Zea mays
ctagcaacatagaaagcacaatagtgtaccaacaatggcagccaaaatattttgcttggttatgctccttggtctgtctgcaagtgctgctaccgcaaccattttcccacaatgctcacaagctcctatagcttcctttcttcccccatacctctcaccagcggtgtcttcagtatgtgaaaacccaattcttcaaccctacaggatccaacaggcaatcgcagcaagcatcttacctttatcacccttgttcctccaacaaccgtcagccctattacagcaattacctttggtgcatttgttggcacaaaacatcaaagcacaacaactacaacaacttgtgctaggaaaccttgctgcctactctcagcaacagcagtttcttccattcaaccaactggctgcattgaactctgctgcttatttgcaacaacaac

SEQ ID NO: 322246 - DNA, 451 bp, Zea mays
agcaacatagaaagcacaatagtgtaccaacaatggcagccaaaatattttgcttccttatgctccttggtctggctgcaagtgctgctaccgcaaccattttcccacaatgctcacaagctcctatagcttcctttcttcccccatacctctcaccagcggtgtcttcagtatgtgaaaacccaattcttcaaccctacaggatccaacaggcaatcgcagcaggcatcttacctttatcacccttgttcctccaacaaccgtcagccctattacagcagttacctttggtgcatttgttggcacaaaacatcaaggcacaacaactacaacaacttgtgctaggaaaccttgctgcctactctcagcaacagcagtttcttccattcaaccaactggctgcattgaactctgctgcttatttgcaacaacaactaccattcagtcagct

SEQ ID NO: 322247 - DNA, 427 bp, Zea mays
attgagaccaactagcaacatataaagcacaatagtgtaccaacaatggcagccaaaggattttgcttccttatgctccttggtctctctgcaagtgttgctaccgcaaccattttcccacaatgctcacaagctcctatagcttcccttcttcccccatacctgtcaccagcggtgtcttcaatgtgtgaaaccccaattgttcaaccctacaggatccaacaggcaatcgcaacaggcatcttaccattatcacccttgttcctacaacaaccgtcagccctattacagcagttacctttggtccatttggtggcacaaaacatcagggcacaacaactacaacaacttgtgctagcaaaccttgctgcatactctcagcaacatcaatttcttccattcaaccaactggctgcattgaactttg

SEQ ID NO: 322248 - DNA, 454 bp, Zea mays
cagcaagcaacatagaaagtagaatccattagcaacaatagagcatcaatggcgaccaagatattttccgtcctggtgctccttgctctttctacatgtgttgctaacgcgacaattttccctcaatgctcacaagctcctatagcttcccttcttcccccataccttccatcaattatagcttcagtatgtgaaaacccagctcttcaaccatataggcttcaacaagcaatcgcagcaagcaacatacctttatcgcccttgttgtttcaacaatcaccagccctatctttggtgcagtcattggtacaaaccatcagggcacaacagctgcagcaactcgtgctacctgtgatcaaccaagtagctctggcaaacctttctccctactctcagcaacaacaatttcttccattcaaccaactgtctacactgaaccctgctgcttatttgc

SEQ ID NO: 322249 - DNA, 450 bp, Zea mays
accaactagcaacatagaaagcacaatagtgtaccaacaatggcagccaaaatattttggctccttatgctccttggtctttctgcaagtgctgctacggcgaccattttcccgcaatgctcgcaagctcctatagcttcccttcttcccccgtacctctcaccagcggtgtcttcggtatgtgaaaacccaattcttcaaccctacaggatccaacaggcaatcgcagctggcatcttacctttatcacccttgttcctccaacaatcatcagccctattacaacagttacctttggtgcatttattggcacaaaacatcagggcacaacaactacaacaacttgtgctagcaaaccttgctgcctactctcagcaacagcagtttcttccattcaaccaactaagttcattgaactctgcttcttatttgcaacaacaacaactacca

SEQ ID NO: 322250 - DNA, 435 bp, Zea mays
aggcaatcgcagctggcatcttacctttatcacccttgttcctccaacaatcatcagggctaggacaacagttacgtttggtgcatttattggcacaaaacatcagggcacaacaactacaacaacttgtgctagcaaaccttgctgcctactctcagcaacagcagtttcttccattcaaccaactaggttcattgaactctgcttcttatttgcaacaacaacaactaccattcagccagctacctgctgcctacccccagcaatttcttccattcaaccaactagcagcattgaactctcctgcttatttacagcagcaacaactactaccattcagccagctagctggtgtgagccctgctaccttcttgacacaaccacagttgttgccgttctaccagcacgttgcgcctaacgctggcaccctcttac

SEQ ID NO: 322251 - DNA, 379 bp, Zea mays
cggacgcgtgggattttcagcattcaaaaacacaccaagcgaagcgcactagcggcgagctaacaccaatggctaccaagatattagccctccttgcgcttcttgcccttttagtgagcgcaacaaatgcgttcattattccacagtgctcacttgctcctagtgccattattccacagttcctcccaccagttacttcaatgggcttcgaacatccagccgtgcaagcctacaggctacaactagcgcttgcggcgagcgccttacaacaaccaattgcccaattgcaacaacaatccttggcacatctaaccctacaaaccattgcaacgcaacaacaacaacaacaacagtttctggcatcactggaccacctaac

SEQ ID NO: 322252 - DNA, 404 bp, Zea mays
caagcaacatagaaagtggaatccagtagcaacaatagagcaacaatggcgaccaagagactttccctccttatgctccttgctctttctgcatgtgttgctaacgcgacaattttccctcaatgctcacaagctcctatagcttcccttcttcccccataccttccatcaatgatagcttcagtatgtgaaaacccagctcttcaaccctataggctccaacaagcaatcgcagcaagcaacatacctttatcacccttgtttcaacaatcgccagccctatctttggtgcagtcattggtacaaaccatcaaggcacagcagctgcagcaactcgtgctacctgtgatcaaccaagtagctctggcaaacctttctccctactatcagcaacaacaatttct

SEQ ID NO: 322253 - DNA, 439 bp, Zea mays
cccgggcgccaagcgaagcgcactagcaacgacctaacaacaatggctaccaagatattagccctccttgcgcttgttgcgctttttgtgagcgcagcaaatgcgttcattattccacaatgctcacttgctcctagtgccattattccacagttcctcccaccagttacttcaatgggcttcgaacacctagctgtgcaagccaacatgcaacaacaagcgcttgcggcgagcgtcttacaacaaccaattgcccaattgcaacaacaatccttgccacatctaacaatacaagccatcacaacgcaacagcaacaacagttcctaccagcactgagccacctagccatggtgaaccctgccgcctacttgcaagagcagctgcttgcatccaacccacttgctctggcgaacgtaattgcaaaccagcaacaacaac

SEQ ID NO: 322254 - DNA, 449 bp, Zea mays
gcaacaatggcgaccaagatattttccctccttatgctccttgctctttctacatgtggggctaacgcgacaattttgcctcaatgctcacaagctcctatagcttcccttcttcccccataccttccatcaattatagcttcagtatgtgaaaacccagctcttcaaccatataggcttcaacaagcaatcgcagcaagcaacatacctttatcgcccttgttgtttcaacaatcaccagccctatctttggtgcagtcattggtacaaaccatcagggcacaacagctgcagcaactcgtgctacctgtgatcaaccaagtagctctggcaaacctttctccctactctcagcaacaacaatttcttccattcaaccaactgtctacactgaaccctgctgcttatttgcagcaacaactattaccatttagccagctagctactgc

SEQ ID NO: 322255 - DNA, 289 bp, Zea mays
tagggaaacgtgggcgacgcggccatcacccacgttctacacagcaagcaagagttcacgctcgacaacggcgtacgccacctactagtgctctccatcagagccagcgcctgctacaccggcgagtgcgacatttccagtactcccgttcccgctcattccttgtctgcgaaagagctgactcacgagaccaacgaggatgtcgagaacatcgaggactagtacatggtcacaggctacgggaacgcatacgtacacaactacttacgcgttcagtacggtatggagt

SEQ ID NO: 322256 - DNA, 247 bp, Zea mays
gcggcatcagccggcaacactggaccatcatcacatagtgcaacgacagtgacactcatggggggttgcatgagtctgatgagcttgatgcgagctgcaaattctagcattggcagagccatccttgagccacacatgggacagctagtacactcagagcaatgatcattcgtgccccaatggcgaacgaaattagtcatgacattcatgaacatgctattgacatagagtccaggatgccggaata

SEQ ID NO: 322257 - DNA, 202 bp, Zea mays
ttagagctaatgatcaacatcacgtaggaaacgacttcaacttcgcatcggaagatggagagattgcatagtcttgaggaggaacacatgaatgctcttcagagagcacagaccctggatgaaactcatgctgctgacctgtctgaagaggagattcatgaggatagcactgaaacatcctctgatactcatatctaaacaa

SEQ ID NO: 322258 - DNA, 99 bp, Zea mays
aagatgcactcccatgtctgtccgactattcactgcatgccgaagcgtcctggggtcgaatgtacttctcctatgaacgtatccaaccgacttgaccaa

SEQ ID NO: 322259 - DNA, 408 bp, Zea mays
gcatctcacatgataaaatgctgcctaaatatttcttggaagaactcttgagtggcccggaggtcgcccatggtgatgaacctgctgaagctggtagtgatgacagtgatgacgatagcgatgatgatgtgatggatgtagacatcgcggcaacctcttctaaaggttcaaggagtaaaaaggcaggtcaaggacagagttcgagtcagccggcatcggatttctatgcagatctatagtcgtcaagtttcctaagttagaagctgagtactctcctctatggttcattctgggttactgtacgcgagtgcgtgtgcgagtgggcaactttgaccgccggtgcatggcatgccaaatgttgttttatgtataagtatatcgctgatggcatttatcagaagtagaagc

SEQ ID NO: 322260 - DNA, 229 bp, Zea mays
ctagatcgcgagcggccgccctttttttttttttttgttttttttttttttttttttggtttttttttttttttttttttttttttttttttttttttttttttttttttttttttttttttttttttttttttttttttttttttttttttttttttttttttttttttttttttttttttttttttttttttatttttttttttaaaaaaagatcaccattaaaatg

SEQ ID NO: 322261 - DNA, 341 bp, Zea mays
cagatcgataccataccaggctccatcaatggactccaccaagttatccgcgctgctggcgctcgcagtgctcacgctctattcgacgtcgctcgctctcgcgtgggaaaaggcgcatcccgagtgccactcgtgcgagtcctgctcgccgccctcaaccggccttcccctgccccctatcagcataccgtcagtccccctgccatcagtcatcataccgtcagttccactgcccactgtcagtataccgtctgtccacatcccaccggtcacccatcttcccacagtcctcagactgccgccagtgacccttcctgccattccgatcatcggatgaagcc

SEQ ID NO: 322262 - DNA, 279 bp, Zea mays
cagaaatccagctcgcacctagtacactcttacgcacgatacctaacaacttcccaaggcgaccactttgtcgctcgcgctttgctatcaccggcagaccccaccctcaccctaaacgccttgactaaaagcacagacaacgaccttatactcctactactatacacagacgtcacgccgagcgcttggcgttacgattgccgcgtcactggtagtgctcaacgtggccttcctcgtatgcgctagccactgcagtctcgatggtcgtacaagcgatca

SEQ ID NO: 322263 - DNA, 420 bp, Zea mays
ggtaaaaggaccatcctgcacaaaggtaatttaataggatataaagcgaagttgggacgctaaagaggtgttaaaagaagttagccaattgttggaattgatgaacggtaaaacactactcgagcaagcgaggttaaatttgctagaaaacttagaacacgatacacttactaaatagtgaagtcatatcgttatattcaaatggtactacgaagaacgagatgcagtcacgagcttatcattgtgcccttggagtcaagttgtgctaacaatagaactctaccttagcaagggtcatgacatagtattagtatctatagtctactccggtgtatagatctgagtgtattttttgggagttcatcattaaaatgctggtgatgcaatctgtcgagagttggaacatggtgatactccaga

SEQ ID NO: 322264 - DNA, 285 bp, Zea mays
tcgacaccagcaccttgccggccacactggtctttctcacgagccacagcacacaggcacaggcaagctgtagagcttagtgcaatcatagcatgggatggcgtcgccgttcgccggggcaactggacagacagtgacggcctcggcggctaagaagcggtccgtctgcgtcacgtacgtcgagggcatgaacgcctacagctgcttcaggtgcttatctaggcgaacatgctcggggtgcgcatgaccgctgactactccttcgtcatggtcgtggcgtcgctc

SEQ ID NO: 322265 - DNA, 220 bp, Zea mays
aggacaggtactttcccggagacgatgcatacaatcattggtgggtcaccataggaacggtgaccttagttgtttgggccttgcattgaccttggtaaaggcattatctaaaattccgagtgtctttttctctttaatgaaaacctttgatttggccaaaaaaaaagcatccaatgcttaagaagcttaagaaaaggggggccggttttaggattcaagc

SEQ ID NO: 322266 - DNA, 403 bp, Zea mays
gaagagactcctcgactcgcgtcccgcgctcgggctattggaccgaggggttgcggtggatttggagcggggtggactcgtcgctgatggtattctccgatgcaagaggcagggagagagcgggacagggcggcggcggcggcggatctcggaggcgtcgccgctagcgtcaggccaacggatacagcagctgtaagcacaaagccggcaaagcgatacccactggccttatggataggcatattgggcctgataatgttagtcgctgtgtacatcttctcgttgtctctaaagccaaatgggatgcttttcgggctgatgcagacaaatttgatagaaaaggaaagggagaagccttgtcatgatcccagtattccagacacagaaatcccttacttgcact

SEQ ID NO: 322267 - DNA, 315 bp, Zea mays
ggccgcccttttttttttttttttttttctctttttcaaatatgacaaaacgagccaggatgcaatcaatgacttcagaataagcccaattcatgaattagatacccgtgtctaatactgatacttgaaactgaattagtctacaacaaattttcaaatgatccatttacagctgatatctagtgtacattcgatatttaacacctagtgcgagaagcatgggatgctcatcatggtggctggcgacagcatcattctgacacccccgctgatcatgacttccaatgaagtccaagaaatcataaacaaattctg

SEQ ID NO: 322268 - DNA, 424 bp, Zea mays
ggcttctcctccccctcttaccaagtcctcttcgggttagggttacttagggttttgtggaggggcgatggcggcggctgatgtggagtaccgttgcttcgtcggcgggcttgcctgggccaccagcaacgagtcgctggagaatgccttcgcctcctacggcgagatcctcgactccaaggtcatcaccgaccgggagacggggaggtctcgcggcttcggcttcgttaccttctcctccgagaactccatgctcgacgctatcgagaacatgaacggcaaggagctcgacggccgtaacatcaccgttaaccaggcccagtcccgtggcggtggcggtggcggcggtggctacggcggcggtcgcggcggcggcggctatggtggcgggcgccgtgacggcggttatggcggcggtggcggc

SEQ ID NO: 322269 - DNA, 400 bp, Zea mays
  unsure (1)..(400): unsure at all n locations
gagactcatcatctaaaagctcagtaggaaagctgacatattcaggcgtaacatagtggaacacgtgcaataatgcactccgatgattctcaatgtgtttagctcctgcatccataaagcaaaagcaaaaaaaaaatgcttgaatacgactgacatctgccggttgagtagcctgagttggaagtcatcttcagcttctttgggttgggtgtaaagactagcatgcatgacatcaatgctaataatgtatgcgctatgacttatttagtgacgataattgtttcgaatgtgtatgctactaggaaagaaggtaatgtaggcatactaattntggaaaatctgagataccgtaacaattgcttagcacctaaactaaaaagcgataccagatgtatatatg

SEQ ID NO: 322270 - DNA, 292 bp, Zea mays
gcggcgcccttttttttttttttttttttttttttttttttttttttttttttttggtgttttttttttattttatttttttatttttaattttatatattttttttattatattttttttttttatttttttatttattattatttttatttatatcagtatgaaaagaacataacctaaagcgagtgaaaaaaaaaaaaatcaaaaagacagacgaagatgggaactgtctattcagagctgttgctgatcaaacatatggagatgcagaaacttatgacaaggctaggc

SEQ ID NO: 322271 - DNA, 177 bp, Zea mays
ctccatcctcgcccatgagatgctttggtgcttcctgctgcctctctctccctggtcttcatgtgtaccattctctgattgaatatttgagtgaatggtgaatactgcatacctggatttcaggattcatatttgaatgaatggtggatacaccgcatacctggattccaggatcgt

SEQ ID NO: 322272 - DNA, 277 bp, Zea mays
gagaaatacttctgaaaacgacgaccaatatcaacgccaacaggcgtaacctaggggcggcttaccactaagtgtttgcatccatggcaaggatcttcaaaatactattctagacgctaaatgcctgcaatcattcattgctagacctgcttgcactatttcttgctcctatacgatcatctgcatctcacaagtatactaagttcctaactctaattctaattattaacaacacactccagaatgctactgaactactctacaagaaatacctata

SEQ ID NO: 322273 - DNA, 275 bp, Zea mays
caccaccatataacaagtcaacattttcaaacattctaacactactactcgacagcgtcattatcataaatctgtatgaaacaagaacaattattcttacttatacaaatatcaaccactaaatcatccatacttccactaatatccatactcatattatacaactgcattctaaccatattgacgtccattgcataacacctctataaatatcatcactcgtcataaaactatccaaattttcattcgatcaatccgatatctaatcacactta

SEQ ID NO: 322274 - DNA, 153 bp, Zea mays
atgggacaatgccaagaagtacatgcaccgcctaaggcgtcttcagaaacacgacaatgagcgatcaacagatatattgacattcaataaagagcgcatcaatcataatatgcaagagagaggtatggataaagactttgtaaaaggtatttg

SEQ ID NO: 322275 - DNA, 189 bp, Zea mays
gtcaaatacttcatctaaagtcgatcggtatgtaaggcatcagctgtaagatatcatcgggggatcaacaaatagcttgaaccacagcaaagaacgcatcattgataggattcaagatagaggtatggacgtatcctttgataaacgtattgacaatactaatagcgctcatacgagtaaagctaaata

SEQ ID NO: 322276 - DNA, 346 bp, Zea mays
gtccacgagtgcatattccaatgccagtccgatcgtgagctcagctcatctccggtcgtcctctccccgcacgcaccaccaccagcagcagtccatcaccatgtgcggcgccctgctcatcacgctgatcctcgcggccgtgcccctctccttgagcggcagccgcggtgcgcacccgggctactcggactacgactagagcgcgtagcacagtggacgcgtgcgcggagctgatgcgacgaatggaggagcgcggtcccagctggcgcatcatcatcgacatcacgcacgcaatcgtgccggacctgccagcgttcgccacgatggctgtcgcggcgcccatgct

SEQ ID NO: 322277 - DNA, 358 bp, Zea mays
gtcaaatccttcagcttcaatatttttttttggttgcaactagcgtgacctcatatgccgtttatcacaggctctacaatggtcaccacgatctatcgtccatatcatcgcattgctcaacttctacacacatctcttcccatatatctatcaaatccttctacgatcgtcactcattgactgcactttactcacatacatacccgctatcgatgtcctctcacaacccaatctacttatcaactcgtcaacacaattagatcatacccacttcttctcagtactctacttatctgcacctggatcctatctcgatgaatataacacatatctcaagcactcaactagattcatgttg

SEQ ID NO: 322278 - DNA, 411 bp, Zea mays
gttctagacgcgagcggccgccctttttttttttttttaatagaatgatgttgagtaggtcagtagaaaaacaataattatcctctagggatgagcaaacacataacagaaaccattactaaccaagtaaaattacatgagagtacacatcaaacctgttaacattcaaggcattagaacctccatctggaatccagattctggatggtcatgtacatcaatggtcagcattccatcaaatttactagagatgtcatttgtttgtttaacatcattactgtcctttgcacgtccagaaaccttcacagttgtcgtatatccacaatgcttgacaatcaccaccccgagtgttgaagaatcctggatgcatataaagagaggcatgcaatatccatagcacccgtttgacag

SEQ ID NO: 322279 - DNA, 271 bp, Zea mays
cggaattcccgccgcttctaaaccatcgatggattgactaatcaaaacactctaatactttcaccaacgtaataacatgtctgtcgctgcttattctaagcaacaccaacccgaaatgacactacatgcaacccttctctcacgctcaaaagttcaccctacagtataaaagatactttttaccaatgaaaagaatgcatctatggaattctacaacacaactctgaatacacatacacttgtgttaccgaagatggatattatgctcaat

SEQ ID NO: 322280 - DNA, 423 bp, Zea mays
gagaaggatagcatgcggtcgacggtgttggtggcgcggagcctgcagaaggcgtgcgtgccgccggccttgctctcagacccgacgcccggcagcctccagcccacccgcctcgccgcccatgtcaatggcgccggctcctcgtgctctgtttacctcgcctctggctgccgcgtctacaggatcgagatacgactggatgctagtgtgatgctgtgcaaaggaaaggagagcctgtcgattcctgataatgcacaggtcatcagttcgtcggttgtggatcgctgcccacatcgttctgagatccagagtgtagctctcgcagacggcgaagatgactgtctgattctgggaacggtgactcatatggtcatcttatcgaatctcgtgtggacatcgtggctgatgacatcgacaggacat

SEQ ID NO: 322281 - DNA, 306 bp, Zea mays
gactatggaccactcgaacgctttaagggccatgtaaactgtaatggtatgaacgtaggtagagattccagggatcacaagccttcacacaactgacatgagaactgttacgagcctgcatacgctgagtcagaactctatgtgacacgtgttctatatgatatgaaccgaaaggaggaaatgtctctgaggaaggcgtaccactaaacggatcagaccctgaaagacaatcacaacactcatgagaagttggcgcataaagttgatactatgacacaagctctggagtcacatgccaataaatct

SEQ ID NO: 322282 - DNA, 438 bp, Zea mays
aaaaagaacttgaaaggaattagcacaaccagagaaacgatttgttggctagcatgtgttctcttccagtattgatgttctatgtcttcttggcctgtatttgacacaaactttagttctcacagaaacaagtggtagtgtgctctatttgatcttgtcaatttgttagtcacttgtcgcacaggtcagtgggaggttttctcaattctttttttagttctcatttttaattgtaattccacctaaatgattatgtttctgggctatttttatttattcagactgttttctttactactgcctaatttatgtttctaggctatcttgtgtggatttcgtgctccagatcacctccctaccagatgagtacatcttacttcatgagaattatcaactttatgttcttccaaaagttctagaataaaagagaatggttgt

SEQ ID NO: 322283 - DNA, 419 bp, Zea mays
cgcccacaaatggtggactagctgtccagacaatgggtagtgcctctcaagttgcttttggttacccagcagtccagctaccaacacttgaaacgggctcttcatgggcatttggtgcttcctcgtctgctcatgctgaagatgagaaaaaggctgatagaggactctctcttatgggttctgccataaggccaggcatcgcaccaaatgtcaaatttggagggtctggatcatatccggatcttccctgggtttctaccatcggcgccggaccaaatggcagaaccatatcaggtgtgacatacaagtttggtagaaatgaggtaaagatagtatgtgcttgccatggcactcacatgtctccggaggagttcatgcggcatgcaagtgcagatgctccggcccaagataatagtgca

SEQ ID NO: 322284 - DNA, 238 bp, Zea mays
  unsure (1)..(238): unsure at all n locations
gtgttcgaagcccattgaagtaactggagggaggaactgtggaataaccaattgcccaattacggcaacaatccttagcacatctaaccatacaaaccatcgcaacgcagcagcaacaagcactgagccacctagccgtggtgaaccctatcgcctacttgcaacaacagctgcttgcattcaacccacttgctntggcaaacgtagctgcataccaacaacaacaacagttgcaaca

SEQ ID NO: 322285 - DNA, 207 bp, Zea mays
  unsure (1)..(207): unsure at all n locations
ccgggacgacccacgcgaccgctccggaggctccaccactagcaacccgngcagcgagcccgccccgaccacngccaagacgaggggcggcgacngggncgacgagaacaacggcgggaccggcggggccatcgccggagccganaaccgnaacgacgcggcggacacccgccccacaggcggaaacagcaaccccacgcgcgacca

SEQ ID NO: 322286 - DNA, 446 bp, Zea mays
ctatcagtaccatcaatcatcattcatcttattagtataggcaccaaatcaaatctgcaacatcgattatctaactccaaaaaccatgaagctggtgcttgtggttcttgctttcattgctttagtatcaagtgtttcttgtacacagacaggcggctgcagctgtggtcaacaacaaagccatgagcagcaacattatccacaacaacattatccacaaaaacaacaacatcaaccaccaacacaacctcaccagcagcagcaacaccaaccacaacaagtatacatgccaccacaaaaacctcagcaacaaccagaagtgcatggtcaacaaccaccacaaccaccgcagcaccaacaaccaccaccacaaccacagcaccaacaacaacctcaatgggaaggcgcacaacaacattaccaacaatcaccagggcatgtgcaac

SEQ ID NO: 322287 - DNA, 362 bp, Zea mays
attagctctaggctctagctagccgcgccactccttcgtgtagccatcagccttctcatcgccaccaatggccactgccgaggtccagaccccgaccgtcgtggcggccgaggaagcgcccgtggtggagaccccgccgccggccgtcgtgcccgaggagtctgcccccgccgaggccgaggccgaggccgaggctgctgctcctgctgatcccgaggagcttcccgcggccgagcagcaggcagccgccgaggcggaggccgcggctcctgctggtgccgaggagcccgtcgcggccgaaccggccgccgaggcggaggctgctgctcctgctggtcccgaggagactcctgcggtcgagc

SEQ ID NO: 322288 - DNA, 223 bp, Zea mays
acaggatgttgcaccaacagagtttatagaatcgaagaggcgtccaaatcacttgatgtcatatgaatttaaattctttcgacaaaacactatagtggtatttatgttcagaacaatgttcgtatatgatgcaccacaaatcatccatgttgatgctgttaatgacatggagcacttgctcggatgcaattggctcgtatatacacatcagattgttctactg

SEQ ID NO: 322289 - DNA, 386 bp, Zea mays
acatagacgccatcctcgaactttattagatgagattggactgctatctgtagcactccgcggccatcagcccacatgcttaaggtcatgtatcttagctaatctgcaattccatagattttgttagcgaactttatcaccttggcttggataatgaagaacggtgatgggaaattaggatgcactctacatgactcagaactggctaaacgtaaggctcgagtctatatggtatgctgagctagacattcatgattgactcagagcatgcctacttcgacattgaccatacggactatgatggactatacctacttgcggaacctgtacctaatcgtcagactgggactcgcgctgaacctaggctctagacacttgaactatgg

SEQ ID NO: 322290 - DNA, 369 bp, Zea mays
ggccgcccttttttttttttttttttttttttttttttttttttttttttttttttttggttgttttacagcatatcagcaaatgggtatttatggcacttattagcattatgtcactcgccacaagctggattactggaaataccgatgaaggatgagtaaccctgaaaaggttttactggcaacacatgtcctggaagcctgagttcagctaccatcaaccatggggggcacatcacttccacttcttgaacttgccgccgccgaacatgccgtgcccgtgcttgccatgcttgaacttgccgtgcccgtgcttgaacttgccgtgggggccgtgaccatgcttgaacttgccggggccaccatacc

SEQ ID NO: 322291 - DNA, 461 bp, Zea mays
gcaaaatattttagctgccattgttggtacactattgtgcctccttatgctccttggtctttctgcaagtgctgctacggcgaccattttcccacaatgctcacaagctcctatagcttcccttcttcccccgtacctctcaccaacggtgtcttcggtatgtgaaaacccaattcttcaaccctacaggatccaacaggcaatcgcagctggcatcttacctttatcacccttgttcctccaacaatcatcagccctattacagcagttacctttggtgcatttattggcacaaaacattaaggcacaacaactacaacaacttgtgctagcaaaccttgctgcctactctcaacaacagcagtttcttccattcaaccaactagctgcattgaactctgcttcttatttgcaacaacaacaactaccattcaaccagctatctgctgcctacccccaac

SEQ ID NO: 322292 - DNA, 158 bp, Zea mays
gagaaaatggcgtatttgtcccgcacagccgccgccgtcgccgtcgccgtgaggtcggcggtccgctccgcacctctcactggccgcgtcctcggagcgccactgccttcccttgcctcgccttccgctgcccggtccgcccgaatcctccgcaggac

SEQ ID NO: 322293 - DNA, 447 bp, Zea mays
caaatctgcaacatcaattatctaactccaataaccatgaagctggtgcttgtggttctggctggcattgctttagtatcaagtgtttcttgtacacagacaggcggctgcagctgtggtcaacaacaaagccatgagcagcaacatcatccacaacaacatcatccacaaaaacaacaacatcaaccaccaccacaacatcaccagcagcagcaacaccaacaacaacaagttcacatgcaaccacaaaaacatcagcagcaacaagaagttcatgttcaacaacgacaacaacaaccgcagcaccaccaccaacaaccacaactacagcaccaaccacaacatcaatgtgaaggccaacaacaacatcaccaaccatcacaaggccatgtgcaacaacaccaacagagcccttaaccacaccaaggacagagccctgagcaacaa

SEQ ID NO: 322294 - DNA, 305 bp, Zea mays
ctctaccgttcgtgaaccaagcggcggcggatggtcatctcacatccttcctgaataggcgtgcaccgttctggatcgctacaatatcgcgtgtgccgctgccgactcacaagatgacggactaaactgcttaagcggctcaccgaggccggcaaatacctatgctgcatggtgactcaagttactcatgatgcacattcaaggcttatccactggtgccgtcaggcgcctggctgctgggatgcataatgatgcctaatattgcgagaccgtctgtcaagatgacgactcactattttctggac

SEQ ID NO: 322295 - DNA, 357 bp, Zea mays
ctggacgtcagcctagcaattagctcatcgactccagattggagaactcgacaccatgaaggtgctgatcgttgcccttgctctcctggcgctcgctgcgagcgccgcctccagtacaagcggcggctgtggctgccagacaccaccgtttcatctaccgcctccgttctatatgccgcctccgttctatctgccgccgcagcagcagccgcagccatggcaataccccactcaaccaccgcagctaagcccgtgccagcagttcggatcctgcggcgtcggcagcgtcggcagcccgttcctgggccaatgcgtccagttcctgaagcaccagtgcagcccggcggcgacgcccta

SEQ ID NO: 322296 - DNA, 381 bp, Zea mays
cccacgcgtccgcttgccctttttgtgagcgcaacaaatgcgttcattattccacaatgctcactggctcctagtgccattattccacagttcctccctccagttacttcaatgggcttcgaacacccagctgtgcaagcctacaggctacaacaagcgcttgcggcgagcgtcttacaacaaccaattgcccaatttcaacaacaatccttggcacatctaaccatacaaaccatcgcaacgcaacagcaacaacaatttctaccagcactgagccaactagctgtggtgaaccctgtcgcctacttgcaacagcagtttcttgcattcaacccaatttggctctggcaaacattgttgcattccaacaaccaccaccat

SEQ ID NO: 322297 - DNA, 297 bp, Zea mays
gaccaacaagcaacatagaaagtggaatacagtagcaacaatagagcaacaatggcggccaagagattttccatccttatgctccttgctctttctgcatgtgttgctaacgcgaccatttttcctcaatactcacaagctcctatagctgcccttcttcccccataccttccatcaatgaccgcttcagtttgtgaaaacccagcccttcaaccctacaggctccaacaagcaatcgcaacaagcaacttacctttatcacccctgttctttcaacaatcgccagccctatctttg

SEQ ID NO: 322298 - DNA, 152 bp, Zea mays
ccaactagcaacatagaaagcacaatagtgtaccaacaatggcagccaaaatattttgcctcctgatgctccttggtctttctgcaagtgctgctacggcgaccattttcccgcaatgctcgcaagctcctatagcttcccttcttcccccg

SEQ ID NO: 322299 - DNA, 91 bp, Zea mays
aaaaaaaaaaaaaaaaaaagaaaaaaaaaaaaaaaaaaaaaaaattaaaaaaaaaaaaaaaaaaaaaaaaaaaaaggggaggaaaaaaaaa

SEQ ID NO: 322300 - DNA, 425 bp, Zea mays
  unsure (1)..(425): unsure at all n locations
cgcagagataggcgtcttcgtactcgcctacctccgcggctcaaacctttcccccttctcccaattcccgccgccgctccatcccgtaacgcgacaccatgagggagtgcatttcgatccacatcggccaggccggtatccaggtcggaaacgcgtgctgggagctgtactgccttgagcatggcattcaggctgacggtcagatgcccggtgacaagaccattgggggaggtgatgatgctttcaacaccttcttcagtgagactggtgctgggaagcacgtgccccgtgctgtttttgttgaccttgaacccactgtcatcgatgaggtgagaactggcacctaccgncagctcttccaccctgagcagctcatcagtgggaaggaggatgcagccaacaactttgcccgtggtcactacacc

SEQ ID NO: 322301 - DNA, 229 bp, Zea mays
gagaccaactagcaacatagaaagcacaatagtgtaccaacaatggcagccaaaatattgtgctgccttatgctccttggtctttctgcaagtgctgctaccgcaaccattttcccacaatgctcacaagctcctatagcttcctttcttcccccatacctttaaccagcggggtcttcagtatgtgaaaacccaattcttcaaccctacaggatccaacaggcaatcg

SEQ ID NO: 322302 - DNA, 140 bp, Zea mays
tccgagattcgttttgtggaacttatctcatttgagaggtaaatgtattgtttctcgcttgtctggcatttctttgcaagggaactgtaagatgaagaaatattgatttgaattactgtttatcaaaacccattatcagc

SEQ ID NO: 322303 - DNA, 421 bp, Zea mays
gtcacacacacacacacagacaagtggtttccaaagccaagtgtgtgtactagcaaccggctagctcgggcggcagcaggcagccatcatgtcggaggagaagcaccaccacttcttcaaccaccacaagaaggacgaggagcagcccgccggcgagtacgggtactccgagaccgaggtggtcaccgccaccggcgagggcgagtacgagaggtacaagaaggaggagaaggagcacaagcacaagcagcacctcggcgaggccggcgccatcgccgccggcgccttcgcactctacgagaagcacgaggcgaagaaggaccccgagcacgcgcacaggcacaagatcacggaggaggtcgctgccgcggcggccgtcggcgccggcggctacgtattccacgagcaccacgagaagaag

SEQ ID NO: 322304 - DNA, 432 bp, Zea mays
  unsure (1)..(432): unsure at all n locations
ccgtttcttgttttttcctctttctccttcctcctccttcctctcgctcgctcccctgccttccccgctccctctcctcctcctcctcctcctccctttcattccatggtctcctggcggcgcagcgcgtcctggctgtcgtcggcgtcgcgctcctcgctcggcgccgccgtcggcggggaggccaaggtcacgccggaggcggatccggcggcgcagcaccacgagcccgacgaggagcgctggtcgcgcctgctgccggagctgctcacggagatcatgcgccgcgtggacgccggcgccgagcgctggccgncgcgccgggacgtcgtggtctgcgcctgcgtgtgccgccggtggcgcgacgccgctgtctcggtcgtgcgcccgccgctcgagtgcggcaggatcaccttcccgtcgtcgctcaag

SEQ ID NO: 322305 - DNA, 186 bp, Zea mays
  unsure (1)..(186): unsure at all n locations
ccacacaaacaaaacaggtgacaacaggaataccaaccatgatcatccaatacataaacatcacaacgcagggcagtaaaacattnatcaaccatggtcattacatacttataactgatacaaccattattaaccctatactatagatccatttaccctttaagtttgctaataatacaaaatatt

SEQ ID NO: 322306 - DNA, 448 bp, Zea mays
cagtaccatcaatcatcattcatcttagtagtataggcaccaaatcaaatctgcaacatcaattatctaactccaaaaaccatgaagctggtgcttgtggttcttgctttcattgctttagtatcaagtgtttcttgtacacagacaggcggctgcagctgtggtcaacaacaaagccatgagcagcaacatcatccacaacaacatcatccacaaaaacaacaacatcaaccaccaccacaacatcaccagcagcagcaacaccaacaacaacaagttcacatgcaaccacaaagacatcagcaacaacaggaagttaatgttcaacaacaacaacaccaaccgcagaaccaccaccaacaacaacaacaacagcaccaacaacaacatcaatgtgaaggccaacagcaacatcaccaacaatcacaaggccatgtgcaacaacacg

SEQ ID NO: 322307 - DNA, 322 bp, Zea mays
gaattcccggggagaccaacaagcaacatagaaagtggaatacagtagcaacaatagagcaacaatggcggccaagatattttccatccttgtgctccttgctctttctgcatgtgttgctaacgcgaccatttttcctcaatactcacaagctcctatagctgcccttcttcccccataccttccatcaatgaccgcttcagtttgtgaaaacccagcccttcaaccctacaggctccaacaagcaatcgcaacaagcaacttacctttatcacccctgttctttcaacattcgccagccctatctttggtgcagtcattg

SEQ ID NO: 322308 - DNA, 393 bp, Zea mays
cgcgcgactagcagcttcagcaaacattcacaatcttctagctgcgtgctaccccataacgggcaggggtaaacaggcgtagagcagctgcccaactgcaacgatcccacatggaaaccagcgaagctgtctgctctttgcccagctctacgctgatagctacgcatcttttcataaattggggaatcaacctccgaactgtccccatgaaaagccctggatcacccagtacttcaaagatctgacgacaggagatgcacactgactgaagcgatccaccaatggcccgacctcacaagtcgacatatatatacgtacgcgtcatcgtgtccatcacgattgccctgatacaattcttttgctaccaatgcacactctactttctcgtctcta

SEQ ID NO: 322309 - DNA, 294 bp, Zea mays
atcaataaagcttgccgccgcctcgacgacatctcgtgccgatcccaacagtcatgttccaattgctctcttggctgctgcttcctcttcttccctcttggtcttggcggcggcttctttttcccttcttcggcgaagaaaatggccaggcacccaggcgtcgactggtcgacgacggctctgttccaacaagtccgcgtcgtcggcgtccggccgggcgcgctgcaaagtcatgacagaagaaaaaaaacatgcgcgagcgtgacgggcaagaaaactccagcagatcgagct

SEQ ID NO: 322310 - DNA, 368 bp, Zea mays
  unsure (1)..(368): unsure at all n locations
agtatcccatctttagccatgttcatgcagttctgatggttttttctgccacatctcggttgtntngagaggacgtaggtagggtggagatatgataggataacttaaatttgnattaaatttagaatttaagttatgttagtaataatggggttgaaaagacatattaacaaagaaagatcatattaaaagttgatgttacatttgcagatataggacgtaggaggttttctataaattagaaaatgtgtaagagcattttgaagtcaattgttttgttactagtgatgtaatggagaaacagagttttgtgtgtgtgtacaatcaagtaaaatgtggacacaaaatttttttagatgagaagataa

SEQ ID NO: 322311 - DNA, 211 bp, Zea mays
atcctctgtctcggcgtcggcgagcaacagaacagacagaggaggggaggcgaggcggaaatggggctccgcgtccgcgcctcctcgcttctgctatccctggccatcgagctcgcggccgtgctcgtctcagtgtcggcgcagcagaaattcgggatcaactacgggcagatcgcgaacaatctcccggacccgacgcacgtggcgaccc

SEQ ID NO: 322312 - DNA, 213 bp, Zea mays
gcctccctttccccttccctccctccctctccccgcgggccgccagaggcaatttcgccctcgattcgaccccgattcgtccgcccgcgaccgggattccctccgccaagcgcggatctgaacgctgcgctccgtgtcgtcgctcgaatccgccatgaagggggccaaatccaagggcgccgccaaggccgatgccaagctggcggtgaagag

SEQ ID NO: 322313 - DNA, 189 bp, Zea mays
ctaatatacaagataatggtaaattagcctgagttcgtgatctgctttagttcagtttaccattagcttgtatattatgagcctcagtttgtatcacttagggcctgttcgtttctgctggaacagaccaggattaattccaaatctctaaaacttatagtaattattgaaagaatccgagtcatattt

SEQ ID NO: 322314 - DNA, 221 bp, Zea mays
gggcgcagagaatccccaagcaaacaaacagggtagagggagaggagaggagaggagaggagaggttgggtctgggacaccatggctccgatgaagctgtacggtgcggtgatgtcgtgtaacgtgacgaggtgcgcaacggctctggaggaggctggctccgactacgagatcgtgcccatcaactgagtcaccgacgagcacaagagccccgagcacct

SEQ ID NO: 322315 - DNA, 215 bp, Zea mays
cgctgctgcacctgtcgtgagccccctcctgactgaccgactgactgacggggactactcgccttttgcagcaagagatacagggactcgagcgcattcagcccgtctcgcgatgtggcaatgagtgaataataaaaaccctctcttgcccctgccgctctacgctttctctcgtctggaactggaactggaactcagacatcgtcactggacca

SEQ ID NO: 322316 - DNA, 378 bp, Zea mays
ccctgggccacgcgacgagcctgccgccctacgccacacgaccggggcaggttgcgcaagacgctcatgctgctcttccagctcgacgactccaccggcagaggcgtcgcgcgtccgtccgaggggccccaatcggcggagttccagtccgtttccgaaggaggaggccgagggggcaagcggatctattttcccccctggcacgtctctctgtccaccgatctccgccgcctcactgctcgcatcgtcggcctcacccgccgcaggcagctcgcccagatcatggcggaggtggaagcagcgcggtgtcgtgtgcgtgggggcgggttgctcaacaccatcgtcatgaacgtggttctcgagccatgcgtgtgcggc

SEQ ID NO: 322317 - DNA, 110 bp, Zea mays
gggagagattgtagtgttttaggctgagtagtgaagagcttgtagttctgcacggaacatgcatgatggttattagttgatgcaacaacattgctgatataaaaaaaaga

SEQ ID NO: 322318 - DNA, 333 bp, Zea mays
  unsure (1)..(333): unsure at all n locations
tccggattcggtcgacccagcgtcggcagcacgacgagtatcttaatacgtatatacgaagcgcatgatgtggtgcatatctgggctgtactgtgtctatggcgggaacccgatggcaacggacatccccaaacagacagacgcgaatgcttcctgtcgattgaaaagaatacaggatccagagttctacatctgaacactattatacagacgccggccgcgatactgcngtggaatgggtacatgcacaaagcacccaggcggtcattgaactcaactcacagcaaagttgcaagctaatcttcatcttggaacctaccttcttaaatactg

SEQ ID NO: 322319 - DNA, 254 bp, Zea mays
gtcacacacacacacacagacaagtggtttccaaagccaagtgtgtgtactagcaaccagctagctcgggcggcagcaggcaggcatcatgtcggaggagaagcaccaccacttcttcaaccaccacaagaaggactatgagcagcccgccggcgagtacgggtactccgagaccgaggtggtcaccggcaccggcgagggcgagtacgagaggtacaagaaggaggagaaggagcacaagcacaagcagcacc

SEQ ID NO: 322320 - DNA, 245 bp, Zea mays
attcgagggctgtgatcaagtgtatcgaggagtacaagcttcataaggagtattcacttgtacgtgttcaagagcctgtttctgagctaaagcctaacggtgagaaaaggccatcaactgatgctggtgagcgtacttatgcaaagaagcctcgacgccctggcatttcatttaccaggagacctgacagttccattggttcagctgctcgcacgcctacatttccggactataactggcaccgt

SEQ ID NO: 322321 - DNA, 298 bp, Zea mays
aatctatagatctttgttgatcacagaataatgatcatgaagtttctaacgtggcggagttgtgggatgaatcgtctgaacactcttcataccaacatggtgttcacattggaaactggatcaagtcttactttggatcataactatgaagcttacaatgacatcaacttcatcttcgctaatgttcattaacactatcaaaacttcgatccacgttgatgatgagagctctagcgacatgtacactgcacagtcacaagacagccgctccatagtgacgaaggctgtggatattgaa

SEQ ID NO: 322322 - DNA, 169 bp, Zea mays
cagttgtgagagagaggggaagttatcgagatcgcatcggagtctatctctagcgggatccaagaactcatctctacgtgtcaagcctaatcctcagaaaaacccctcaactaatccttgtatgcctacttatccgaagaatccttcaagaccttgcatttcatttacc

SEQ ID NO: 322323 - DNA, 338 bp, Zea mays
catacgtcaaacaagttgtgctttcttccgtttgtctacaaaatttactctccagggagagtagagaatttatgcaaattgcagctaacgacaaattacagtagctgaaaatattttctcaacagattcttaattccataaaccgatgtaaagatccccaatggtataacctacatcgctactttgcagaagctagaatcagaaagcgcgccccataagcaattcaaagatacggcaatagcatagattcaaaagcaaatgagtcttgttcaacgtacaactgtgagcactcatttgttctctaaatatatcttttaaaccacaaatgcccgtcattt

SEQ ID NO: 322324 - DNA, 285 bp, Zea mays
cagcattgcgattctgcatacaactctgacttctttacgtatgggaaacaatcttacttccagtgctaatgcgtaattcatgcaaattgcatctaactacccatgataaagacctaaacttatatgctcatgcaactaattggttaaacaaccactgtttatatcacaagattcataaccaagatcactactttatgaagaatgaatcacaaagcagcgctccaaaaccacgtatgataaacggaactttcactgatccagaagttcatactgcacgtataaaat

SEQ ID NO: 322325 - DNA, 310 bp, Zea mays
gctagatagtgtattctaaaaattattccttttttactgtcacgtctgatgcatcagcgcatgatcgtgttctacataaggccaagccgccatcattaacgcttcttctgactcaaacttagaaagtcggtcacaagtctcttgactttatcatctatacttacatatttatcatatcaactacaacattctactctcaatgttgacagctgactgtgtgttaaccataacttacttctactacgtatgattatctagtaaccatagctccatcaatgaattttattatgatccaaatacaccttcattt

SEQ ID NO: 322326 - DNA, 414 bp, Zea mays
ccggattgttctctccgccggcactgctccccacaatgctgctgctgcagcctcacgacggctccccctgcgagttggccgggctcgccccaaggcgaagccgtcgcctacaccgctgctccagccacgaacgtcgcaggtggtccagccctccactttgccactgctcgccacgatgtcactgctccttgcaacggcgccccctaccctatgccccgaccgcggccccgctgcttctccagctctactgcccctgtcagacacgaccaatgcctctcaggcggagacagcatccgaccccgcgaacataggcaccgagggcttcacaccatgcttcaccagagcgcaaaactccctcatcagtccatgggagggactctagcaaacgacggatctgccaatgggaaagaaatg

SEQ ID NO: 322327 - DNA, 199 bp, Zea mays
ggcgaagcagcagcagcgagaggccaccacttacatggctaccacggcgtttctacccccggcgaagctgcggctgcatggacgtcggttcactagccccaaaacggcaggacgtatcactgtcacggtccctcctgctcgagcgcagcaagagcagcacgtgaaggacgatgaggccgaggctgcgagcgtgcacccg

SEQ ID NO: 322328 - DNA, 278 bp, Zea mays
ctcgtgcgaatcagcccactctgataacccaccaacgccatgacaccttgacagacgaatcccatcaccaacgcccacgtgccttagcccgtaagcataactcaaaatcatccataaacaaaccataatcgattataccatgacccaacatgacatcctctcgcactcagactaagtcatggacatacgcgctcccatcattatcgtgaatgcagctcctgacaggcacatagttatagacttatcaatcaacactgtaggtaacatcatcaagcata

SEQ ID NO: 322329 - DNA, 242 bp, Zea mays
cactcccatacggttttacgattttgccacgctgcaccaattccactgtcactttgaccactttttctgcgtctcttcgtcttataccaacttcaccaacaccaccaccaccactctttctgcttccccatctcttttccccattcctcatcctatatccgtgtacagctccatctttaactcttactactgttctactcattgcattctctttaagtaccacttttctcacgctccgttct

SEQ ID NO: 322330 - DNA, 265 bp, Zea mays
aatctgataagccagcaacagtttcaagacttaagcaaacaaatgccatcatcaacgggatcagggatgagccaggaaatctatgtccaacttactccagacgacaaagaaattttagattatatcatcacagaagctgacagccacttgcactctgactaagtcctggatcaatccgttgccattattaccgagaatgaaggtcttgacaaggacacagctgcagaactcacaatctacactgtaggtaacgttttcaagaatc

SEQ ID NO: 322331 - DNA, 345 bp, Zea mays
gtggaatcgaaatcattttgcttctgctttctttgtcttctttccatggcggagcggcagctggtattgtcctggtggaaatgtcagtgcagcctctttttgcttgtcttgttttgcaattgtttggctggcctccactttttgtccgatgtcgggggcgaacagggattcatcatcatatcgtgcgaatcttgctctggatgcacaagaaaattctctcttctactgctctttccccccccccacaaggcctattaacaaacacgatgcctaagctcatgatcaaaatctgatgggcatgcctgacctatctgcccggtcatgtcgtgatccaccttgcaaaat

SEQ ID NO: 322332 - DNA, 351 bp, Zea mays
ctatgaagcaccgtgtatctatcatcacttttgcaaccaccacaagaaggacgaggagcagccggccggctagtacgggtactccgagaccgaggtggtcaccgccaccggcgagggcgagtacgagaggtacaagaaggaggagaaggagcacaagcacaagcagcacctcggcgaggccggcgccatcgccgacggcgccttcgcactctacgagaagcacgaggcgaagaaggaccccgagcacgcgcacaggcacaagatcacggaagaggtcgctgccgcagcggccgtcggcgccggcggctacgtattccacgagcaccacgagaagaagaaggaccacaagga

SEQ ID NO: 322333 - DNA, 370 bp, Zea mays
cctgggattaggcggctgaccctagggcctagcttcgttttggcggtggctgctctggtgcgcagtgcagtgcctggcggctgcgcttcagcggttgtgcgcactgcgcagtgcgctccatgccttagtgcctgccgcggtgccgccctcccacctccagcgaatggcgacggtccagggctctaggcgtccagccctccagctccatccgttggactcctgctcgtcatccactcgagctcagctactcggcttactggttccttctcggcggctgttctagtgctcctagcctcctgctcgtcggtcggtcctggcccctgctgctcggctgctcacttgctcgttgggccctgctgctcgggttcca

SEQ ID NO: 322334 - DNA, 229 bp, Zea mays
agcacgcctgagctgtggcatataccatgcttgattgacatgcaggaaatggcagttactctggggtatgtctcctgtgtcatcagattagacagctcactcagtgcattgcgataccacttatgaatactgcactctgtgctcggactacaattcacactgctaacggtggactactctactgctctcccagaactgcgaagacgctattggctagggctataagtac

SEQ ID NO: 322335 - DNA, 269 bp, Zea mays
accaccgtcgacccacgcttcctaaaaacttattcttaacccatttcaacatttatctaattattccaacatatgcgactccagtgcaattattaagggcccttcgataacacctcataaatattgcattactcaacttacaatctaaattacaaactataatcctatactaactcatcaatttcaatttttaaccaaaattatccacccaaatgttcattataacacattttaaatttgctttgatatattaaacatttcatagatcc

SEQ ID NO: 322336 - DNA, 226 bp, Zea mays
gtcacgcactcgtcgctctagtatgttttgcttcgctgttctcgcgccgtgtcgggggactttactggtatctgttgactgcagtctacgaaccgaacgtgggtttaaatcttttttgaactcatcccaactaacacagtaactctaaagcaatcggaatggataccactcctagtcatcagtgctactttactacattcggatgggactgacagcattcccacac

SEQ ID NO: 322337 - DNA, 345 bp, Zea mays
atattaaatacatttatttccattgatttgtaatatttcatgtcatgcgtaatgagaacaattgtcgtggcattacatttacatgcatgaatgaactaatttctgattactagactgttactttgcattctaccaatgtcaaacctgcactgccaaaagcattaaataatatttttcactctcttcataatcatttcaactacatcatctatacctaagttcttcttaacactactaataattacataataaccaattgactacttgaacctttccatctttaaggcatgtttacattatggtgaatatcgtcacttcaaattcttgtatactattctgatacta

SEQ ID NO: 322338 - DNA, 340 bp, Zea mays
ctctaggtaatctgtggtacacactgacacacatgcttccaccaggcacattggtcatttcctagagctctcacactttcacatctgcctccttctctcgcgtgtccgtcctgtcgtaccgcttccctatgtcgacatatcaacgaccattcatgtcctgccaccctcttctccaatacgactgacccttctgccgctccttctcatgcgtgctgcgactctctgactttgtctaacctcaagttcctgttcggctacaataactctccctgtatgggcgtctacaacatcgacccctatcgctccatgtaactttctgccaagttctgccttatcactc

SEQ ID NO: 322339 - DNA, 400 bp, Zea mays
tcttgtttgtttttttttttttgtttttttttttttttttttttttttttttttttttttttttttttttatgttttttagattaatttttaaattttttttgattttatttattattttttttctttttcttattttattttttttaaaaaacaaaaaaacaaaaaaaaaaaaaattcataaaaaaaattttcctccccaaaaaactttttttaaaaaacaacctaaaaaattttaaaaatatttttcccactaaaaaaacgttaaaaaaattttcctatatctctaaccatacatttaaaaacataattttttaattttaccacaaaaaaaaaatcaccctttttaaaatattattttaaaaaaatttttattgcaaaaaaaaaaaaccccccttttt

SEQ ID NO: 322340 - DNA, 287 bp, Zea mays
gcggtagtgtgtggtctaaatcttgcatgtgcatgtagagactgtttcttcggtctgtgcaggctgtgcagttttgagcttgtttcttgagtcgtttcagacagttttttcagttttctgtgcagacatgtgctcgtctctactttgtcaaaaaaaagatagaattattcagactgcagttttcagcttgtttgttgattgggtttattgagttttcagttttcaaaaaaaaaaaaggcaaaatgctgcaaaatataatgcttcatgaagtcaataaatacatattt

SEQ ID NO: 322341 - DNA, 454 bp, Zea mays
agctgcagcacgacctcctggtgtcgatcatgacccgcgtgggcgcgccggacctcctctgggggggctctgggcgcgcctgctcttcgtggcgggccgcggcgcgggacccactcgcgtggcgacgcgtcgacctccgcgactgggtcgccctcacctccggccggcgcgccgcgagacctggacactccagctctcgcgtatccgttcacgccgcgctcgtcggcatcctggaggtcgccgccaagttggccgaagggcggatcgaggccgtgttgctccccgagtttgctgatgaagaccatctcttgttcctcgctgagaggtgcccaaacctgcactatttcagccttactagcacctgtatgacttacgatcagttctgcaaggcgaaaggtggacttcaatcgcttaaaggcatggcaatggatgagagtctgactaactatgatgt

SEQ ID NO: 322342 - DNA, 345 bp, Zea mays
gttctagatcgcgagcggtcgccctttttttttttattttttttttgtggtttactcatatttactgtaacagtacaagtggttttcacatttggttgtgcataccaaaaaattgggaagatgtaatgaagccctgtaagcctgtactgtggctgtgttgtcacttaacaaacattcatgcttcagctaaccgtcagccgttcagaattggttactagtgtcgtgaaaactcttgctggatctgatggccgaatgagttggtttcagcaacttgcctgtgctcggacatccgctgctgacactcactacaaccataaggggtggatttgtacggcgacgatgtgc

SEQ ID NO: 322343 - DNA, 224 bp, Zea mays
acttgctctcttgcgcttcctaggcgcttttgcacacatagcgacggtagtgcaactccgcgttcactcggacacacaagctcactgccgtctcctgatcacgaaagctcactccaagccgcccctctgctattctacaaaccatctactccaaagtagatatcaaccgcttgagcactgaacattacagcctgtacgttatctccatttaccagcacttcatg

SEQ ID NO: 322344 - DNA, 350 bp, Zea mays
tcggacagataggattctgatgcacaagtattatcatcttgtctctgttctcattttctatcctgcaggtatattgcagacttctttcttggacttggcatttggtgcatcatttacagttctcttgatattgtctatgatacgaatttcgtaaatatactctcttggacatgttgtgcatcagtttatgaactactttactgatcatcgtgttactaagactcttattgtcaaccactattcactcttactgtgctgagctcttcctaattgtacatcatccagattacatgactgagcacttgtccctttagccagaattttcaacttagcgataggtcataccatag

SEQ ID NO: 322345 - DNA, 79 bp, Zea mays
ggtatggttaatttgaagaatccttatgtactgaatctctgcaaaaagctatgtggtggacagaagtgtaacgtgccgg

SEQ ID NO: 322346 - DNA, 280 bp, Zea mays
gtcccgaattggcagcgcagagagccagaggatgcgttaatgttactctactcctatatagcagcggcactattggcctcctttccccacttccacttcgctctgtcctcccatgcgccggattaccactgaccacttcacagtcacagtagtacagagcggcagagtggagaagtagactctaagtgagatggcggccgtggtggcggcggtggaggcaggggtggtggcggtggcaagcgggaggggatgcagcaaccggctggtgcggggcctgtac

SEQ ID NO: 322347 - DNA, 404 bp, Zea mays
  unsure (1)..(404): unsure at all n locations
accgggtccgagccagcgcgtctcgggagaagcgaccaccactttcttcaaccaccacaatgaaggacgaggagacagcccggcggcgagtacggggtactctcgagtaccgatagtggtcaaccgtccaccggcgagggcgagtaccgagaggtacatagaagggangagaaaggagcaccaagcaccaagcagcactcttcggcgaggccggctgccattcgccgnncggcgccttcgcacttcttacgagaanngcacgaggcganagaaaggaaccccgagcactgcgcacaaggcaccaagatcacggganngaggtcgcttgccgcggcgggccgtcgggcgccgggcggctacgtatttccacgagcacccacgnagaagaagaagggacccacaag

SEQ ID NO: 322348 - DNA, 420 bp, Zea mays
ctgtcacacacacacacacagacaagtggtttccaaagccaagtgtgtgtactagcaaccagctagctcgggcggcagcaggcagccatcatgtcggaggagaagcaccaccacttcttcaaccaccacaagaaggacgaggagcagcccgccggcgagtacgggtactccgagaccgaggtggtcaccgccaccggcgagggcgagtacgagaggtacaagaaggaggagaaggagcacaagcacaagcagcacctcggcgaggccggcgccatcgccgccggcgccttcgcactctacgagaagcacgaggcgaagaaggacccagagcacgcgcacaggcacaagatcacggaggaggtcgctgccgcggcggccgtcggcgccggcggctacgtattccacgagcaccacgagaag

SEQ ID NO: 322349 - DNA, 72 bp, Zea mays
gtcggttgggttcttctgccccttcggttcgggttttggttcctgaaggtcttcggggttccgtttcggggg

SEQ ID NO: 322350 - DNA, 204 bp, Zea mays
actagttctagatcgcgagcggcgccctttttttttttttttataaaccttatttgggtacatggggattataaggattgaagaggataaaatctacttcaagtccatcaaaatatctgtgctccgctttatctccttggagaaaggactcccctagatattgaaccacagaataactatggaataactgagtacccaaacgca

SEQ ID NO: 322351 - DNA, 318 bp, Zea mays
ggaccgaccagagtaccggacacacagcgaggtggaggaagaaggaagcaagagggaggaccgaggaggcctaggccctagggtagtcccgtccggtcccctgcggcgcaagtccggccggcgggcgggctgactgcctggcgtcggtagggggcgacggcgatctatatctgtcgatgggctactggtgggaccgcgtcgtgctgccggtgcggcgggcctggctcggcgtcgcgtcccgcttcggagttcgccagaccggtacggcgcgagggcgaggctcggcgttcatcggcggcttccgtacaatcttccgtc

SEQ ID NO: 322352 - DNA, 265 bp, Zea mays
  unsure (1)..(265): unsure at all n locations
cccgctcgtcctcctcctctcctcctggacagcagagcacagcacaacacaccgagaaagaacaagcggccgccagcggagctcagaaccaccatcagcagcagcagcacacccggtcaaccttccacacacgcgcgcacacacacatggcgtcgcagcagaggcaacagcaagcgggagcggcggcggcggcgtccttcgccgtgggcttcgaggactatcctgccgtgatggcngagcggctgggcgaggaccggctgatgcg

SEQ ID NO: 322353 - DNA, 410 bp, Zea mays
  unsure (1)..(410): unsure at all n locations
ctccgctgggccaccagctttgaccgccgcctcccttcccctccgctactgctcctcctcaccccactcccccgcaggagcggcggcggcggcggcgaggtcgtaccccacatcggcgagcggcggcggcaccgccggaggcaaaggcaagatgttcgggcgcgcgccgaagaagagcgacaacaccaagtactacgagatcctcggggtgcccaagtcggcgtcccaggacgatctcaagaaggcctaccgcaaggctgctatcaagaaccaccccgacaagggcggtgaccccgagaagttcaaggagctcgcacaagcctatgaggttttgagtgatccanagaaacgtgagatttatgatcagtatggtgaagatgcccttaaggaanggaatggcggtggaggat

SEQ ID NO: 322354 - DNA, 195 bp, Zea mays
attcccggctaagacaaacaaaaaataaaaaaaaaaaaaaaaaaaaaaaaaaaattttaaaattaaaaaaaaaaaaaataaaaaaatatgaaaaatagtaaaaattataaaatacaaaataaaaacattaataaatattaaataataaaaattatttaatctatatttaacaaaactctccccttttttaaaatc

SEQ ID NO: 322355 - DNA, 173 bp, Zea mays
gaggacgccgcgctcgccgctatcattcgtttttggagactccttctagccccgccgccaccacaagaccaagagcaagactcggatcaaaggcgctcgccgtggtcgccgtcctggcagccgtcgtcctctcggttgcctccgctgccgatgctcccgcgcccagccccgtc

SEQ ID NO: 322356 - DNA, 195 bp, Zea mays
cccaagcatgcaggcaatgcgcatcatgtccgcttgcattggacgatgatgcaaattcgcatgtgattattgatgaatagtagaaagaggagtatactgagaacgagaacaggcatgcagacatatctgccgtgccttccgtggcatatctagagggagagaagaaagagtatggaggtgcaccatgaacaatca

SEQ ID NO: 322357 - DNA, 377 bp, Zea mays
cagccatcatgtcggaggagaagcaccaccacttcttcaaccaccacaagaaggacgaggagcagcccgccggcgagtacgggtactccgagaccgaggtggtcaccgccaccggcgagggcgagtacgagaggtacaagaaggaggagaaggagcacaagcacaagcagcacctcggcgaggccggcgccatcgccgccggcgccttcgcactctacgagaagcacgaggcgaagaaggaccccgagcacgcgcacaggcacaagatcacggaggaggtcgctgccgcggcggccgtcggcgccggcggctacgtattccacgagcaccacgagaagaagaaggaccacagggacgccgaggaggccagcggcgag

SEQ ID NO: 322358 - DNA, 361 bp, Zea mays
cacacacacacacagacaagtggtttccaaagccaagtgtgtgtactagcaaccagctagctcgggcggcagcaggcagccatcatgtcggaggagaagcaccaccacttcttcaaccaccacaagaaggacgaggagcagcccgccggcgagtacgggtactccgagaccgaggtggtcaccgccaccggcgagggcgagtacgagaggtacaagaaggaggagaaggagcacaagcacaagcagcacctcggcgaggccggcgccatcgccgccggcgccttcgcactctacgagaagcacgaggcgaagaaggaccccgagcacgcgcacaggcacaagatcacggaggaagtcgctg

SEQ ID NO: 322359 - DNA, 299 bp, Zea mays
  unsure (1)..(299): unsure at all n locations
tcccggcggatcatctagtagtattctagctctacctgctttccccactcgtgctctcgccattcgctcgaaccccgaagaactggcagtggcaggtgactagaggatcactactttgaactcattaaagtgtctaatgatggctgctgttttaaaaacaagtggcagtttttgtagtacacaacagcagcattttcagcaatcaagaagggatcagtttttgcatggttcttattcaaatttcaaacattgcanaagcaagaagataataagcctgctccactgtgtgctagagtgac

SEQ ID NO: 322360 - DNA, 220 bp, Zea mays
tccttcattcctccatacacctatatcatcaatctcctccaagactaggaacaagcactaacttgcaaccaatgctcgcctccaacatcctctcttaccaccaccccatcatcatcccctgcagtcatcgcaacaacactgagctccacgacttccttctcccacatcctcacgacacacagttttcacatgtacttcaatgcccatgaccactaccttc

SEQ ID NO: 322361 - DNA, 235 bp, Zea mays
tggctgcctcaaatattgagtaccgataattaatcatcagactcgcctggtccacttacgactacattttccacaacgccttatatatctatagcttaataatacacattactatcatcctctatcctctgactcacaagtctacctagttctgcttcttcactattctccacggatgaggtttatactaacaccatccactgcataaactgcactgaactataccatcatatca

SEQ ID NO: 322362 - DNA, 436 bp, Zea mays
agagattgctggtcgagaagaagagatgttacatatataataactactgtgtaggcagcggcatctgctgctgggacgaagattcaagaagctagctaagagagaagggcataacgagataataagcagcgcgcgaagatgcaagactgggcgccggtgttcgtctcgctggtgctcttcatcctgctgtcgccgggcctgctgttccagatgccgggcaagtgccggatcatcgaattcgggaacttccaaaacaagggcattttcaatcttggtcaaggcaatcctcttcttggccttggccgccttcttcctcgtcgccgtcggggtgcacatgtacctcggctcctaggcggcggcgcggggcgccgtaccttctctctctcgccgcgcgcgccatcgttctcttcttttatgttctctctctatatatata

SEQ ID NO: 322363 - DNA, 420 bp, Zea mays
aggctatatagctagtctgcagagatgcttgggaggagcaggaggaggagaggcggggcctcgccatccaagtcgcaggaacccaccaacaccggcgcggccgtcactgctgacgccggccagggcgcggcgaccggcgcctcgcggtcgcagctcgtcacgcggctcgatgagtctgccacgacgaggctgcaacgcatgagccacaggctgagcactgctcgagcagcacatggaaacactggaggccgacgttgccaaggccagcacggactcgtacgagtagagtactcctaggtagcatatcttagcagacgaacgagcttgtcacgctccagcgtcggattcagcatggctactccaccagccagtgctatctattgctcgggcggctaagtatataatttttaagaggatcat

SEQ ID NO: 322364 - DNA, 60 bp, Zea mays
aatggaattaaaggtccccggttaagaattcttcccgtgaatgcttccttcgaattaatg

SEQ ID NO: 322365 - DNA, 443 bp, Zea mays
gtgggtgagcggatcgagatggcggcgtcggatgttgagtaccgctgcttcgtcggcggcctcgcgtggggccacggacgaccactccctccacaacgccttcagcacctacggcgaggtcctcgagtccaagatcatcctcgatcgggagacgcagaggtcccgcggcttcggcttcgtcaccttctccacggaggaggcgatgcggaacgccatcgagggcatgaacggcaaggagctggacggccgcaacatcaccgtcaacgaggcccagtcccgcggcggccgtggaagcggcggcggcggcgggtacggtggtggccgtggaagcggcggctacggcggtggcgggcgccgtcgttgcgagctccccatcttccttcgttaaccatggcgacccagatcagcaagaagaagaagttcgtcagcgacggcgtgttcta

SEQ ID NO: 322366 - DNA, 224 bp, Zea mays
acgatccaccatcaccaacggcgccgcaaccactaacgtcaatctcaccgagaaaaacgtcctcgggcagtgagagctgtagcactgtagctgcagctgaactcgtcatgtgcatcaccgacccactggagccaaaacctccatgatcacgaccccactgcaggccgatcccattacaagatccacgctctgatccgttcgccgacgaccgagaccatgccgac

SEQ ID NO: 322367 - DNA, 303 bp, Zea mays
ccaagagatgcatgctgatctcgacctccatgccaacgccctcatcaagatccacaacgacatcaccaaaaaccaccatttcctcacgcactacaccatctagatccgctacaacaagctcatcctcacggatctttaactgatcagcgctaactccaacgtgtacaaactcatcgtacccttgctggtgaaccatgacctctagcaagccactgccaacgtcattaaacgcatctcgtacatctgctcaaagctgaaacgaatacatcacgctctcaaatacttgcaggacaagcactacac

SEQ ID NO: 322368 - DNA, 257 bp, Zea mays
cagacacacaatagcggctagggctggtggggactctcaaaaattgtaactgctgtaacaaggttgccccaagggtggcctaaatcgtcatcaacttcgtgaaggggtttgctttttgcgcacctatcaagagcaccatcacttttggaccatgaatgcttccctatagatatgaacctactgttagactatttgtggatatgtacatattgacttaacacctgcaagcacactgttgctaagtgttgatgtatgat

SEQ ID NO: 322369 - DNA, 96 bp, Zea mays
aaaaaaaaaaaaaaaaaaaaaaaaaaaataaaaaaaaaaaaaaaaaaaaaaaaaagaaatgaaaaataaaaaaaaaaaaaaaacaaggatgcccct

SEQ ID NO: 322370 - DNA, 432 bp, Zea mays
ggctagcggcgcgggcagcacgggccccccgcaaccggcgctcgccccctggttcccttgcccggccttccggccggggcggttccccgtggggcagcgtcaatggccctggcctaaacggcccggccgcaagcactggtggcgcgcacagacccggcaagtgcagccacggatcaggccaggtacgtccacggcgcggggtgctttgcgcggctccgcgacggcgcacaggcggctcaggcttgcgggctcgcggccccaacccccggctggcgcggccccggccctagcctcggcgcgggcgaggccttccggcgcgcggcccctgctgcgagcgcatcccggcggcgagcgcgacccctgctgcgagcgcgtcccggcggcgagcgcgacccctgcaagtcacaggctcggggcgggcagcctattcgc

SEQ ID NO: 322371 - DNA, 106 bp, Zea mays
ccatctccctacggctcgtctaacttaaaacctcacacgcccctaacactctcctctctactcaccccctcacactctaccacacaccctcatatacacccccctc

SEQ ID NO: 322372 - DNA, 398 bp, Zea mays
tcgtgcatagagtgggaagcccacagccggctttccaatgggcttacccttggctttcttaggggccgaaccaaagaacttgggtggccttttccgtcatgaccagggcattcctggaacctacatcggctttcaattgacggtcaatgctggcacagctgctgcagggtccgcgagtaggacggctctaatctctccatcacgtgttattatctggtgtttccataatgcgatttgatttcaatttggcgttagatgttgtacacgtgtatttaactgcttgagttgtacgtaatttgtatacttgtaactttgtttaataatatggctattactcaaaaaaaaaaaaaaaaaaaaaaaaaaaaaaaaaaaaaaatataaaaaaaaaaaaatataaa

SEQ ID NO: 322373 - DNA, 395 bp, Zea mays
gtagttctaaaagggaagcggccgcccttttttggtgaggtcgaaagcggcgagcgaagtagaagatgctggacaagctgtgggacgacgtggtggccgtgcctcgcccggagacgggcctcgagaagctccgcaaggccaccaccgcccgcccgctcgtcatcaacaaagacgcggacggcggcagctacaagcgggcgcagtcgatgccgtcgaccccgacgacgccggtgacgccgtcgtcgtcgacgtcgtcgacgacgcctctcgtcgccagccacgtgcggcacaccgttgttcagcacgcgtgcagagtagctagctatggcatctacgcagaccgtttcaaccggcatcaggatagatggaccagcgactacgactgactctacagc

SEQ ID NO: 322374 - DNA, 391 bp, Zea mays
acgggtggcttcttcttccccttcgggtccggttccggttcctgaaggttttccgggttcgggttgcgtggtcaaccggatcgagatggcggcgtcggatgttgaataccgctgcttcgtcggcggcctcgcctgggccacggacgaccactcccttcacaacgccttcagcacctacggcgaggtcctcgagtccaagatcatcctcgatcgggagacgcagaggtcccgcggcttcggcttcgtcaccttctccacggaggaggcgatgcggaacgccatcgaaggcatgaacggcaaggagctggacggccgcaacatcaccgtcaacgaggcccagtcccgcggcggccgtggaggcggcggcggcggcgggtacggtggtggccgt

SEQ ID NO: 322375 - DNA, 378 bp, Zea mays
cgaaagaagtgtatgacacactcactcgctattctgcatacgctgccttctacgatcggggacaccgtacaccatattgcttgctctcaaagaggaacagttgaaaaactcacacgccttttacatctcatcaccacgtcgatcgtcaaggaccttaactcggcgtcgaaacacacgaaaggcacacacgatcaactcgatgaaatgttcatggtcagctaaatttgtattgaaccagtatattgcgcctgtcatgttccttcgcacatactggatccacgagcatctctctacttttactaacgacctaaccgactacttgatcagacttcaatacgctctgatcagattgaatgtcgttttcataagtcatatgtg

SEQ ID NO: 322376 - DNA, 437 bp, Zea mays
ggaattcccggcgctactgatctctttaacatggtatcaatggatgggaccaccgagaaagggtcagagtcattttccaaccattgggatggcttggattgctttcaagctggacaacccggtcctaacctggaaggaaaaggatcttgccaaaccaccgaaagcttgcccaatcttccttttggaatgaaaaactaattaaaagatcgccagttgtgtcattatcctcagcttcagctgtttcccaagtaaatgcaaagaatgatatcatgagtttgtttgagaagtccaacatggcatcgccattcgctgtccaacagcagcagctggcgtttatgtctcagcagcaagctcttctaatggctgctcttaaagctggaaattcaccacaaatagttccagggaatgccaatcaactaaacactaacgtttctagt

SEQ ID NO: 322377 - DNA, 427 bp, Zea mays
  unsure (1)..(427): unsure at all n locations
ccttaacgggccggccgttagcgcctgcgcagctttcggattccctatccccgagggattggtgcctactgcgggggccatggcaagcctctctccatcttctatcggcccaaaattgcctgccaacacgccgacgggctcagccaagtcccccgcgggacgcgtcaccgtcgncggaggcctcgtcgccctcgccgcgctacccgtcgccgtcgcggccgggatcatgttctagagcatctaccggtcgtcttagactttgtgatttcttcgtcatcattcttcttacagcacacacatgtttgtgcattatggtactagttcgttaattcacgtacaaacagctagctgttccaggcacgagattcttccggatttgtttccttgtaataattccccttgatgagcgtgtgtttggtatgtttct

SEQ ID NO: 322378 - DNA, 327 bp, Zea mays
cggaattccaggcctacgacccacgcgtacgtctagaacgcatgcatctgcctatcttaagattatttcatttgttatacatggcttcggaacaattatctcatagggacaaatttcaacattacaatggacatattcctgagcatgaccagagccaaatttggcttactgattcatgccactcttactgcaaaggcggtttaaacatacagccatttcaaatactactctggcattacctattgctactgctcttcagatttaggcttcttacctccagatttaagcaaatctggtctgctcgatccttcaacatattgtgactat

SEQ ID NO: 322379 - DNA, 431 bp, Zea mays
gaggtgggctggcttctccttccccctcttaccaagtcctcttcgggttagggttactgagggtgttgtggaggggcgatggcggcggctgatgtggagtaccgttgcttcgtcggcgggcttgcctgggccaccagcaacgagtcgctggagaatgccttcgcctcctacggcgagatcctcgactccaaggtcatcaccgaccgggagacggggaggtctcgcggcttcggcttcgttaccttctcctccgagaactccatgctcgacgctatcgagaacatgaacggcaaggagctcgacggccgtaacatcaccgttaaccaggcccagtcccgtggcggtggcggtggcggcggtggctacggcggcggtcgcggcggcggcggctatggtggcgggcgccgtgacggcggttatggcggcggtgg

SEQ ID NO: 322380 - DNA, 165 bp, Zea mays
cttccactagttctaaatccccaaccgcttcccttttttttttttttttttttttctttcttatgcgttatttttaatacccatcagattttctatattccatttcaacaccactctaccgatatctttgacccaaatcccacaaaccagccaatcccccaaaaa

SEQ ID NO: 322381 - DNA, 423 bp, Zea mays
ctagaagaacgcgcccgcgcctagccagatctggtcgagccgcccagggcgagcagggcccacgtgggggccgggcgacggcgcctttgcgcgcgggcagtggccgaagcttacgccggacgcgcccgctgccggtccgtcaccgtttgcagcccgaaccgagaagccggagagcccagcccttgcgccggagcgccagcagcgctcgcactcgatccaggtggccgagcaacgctcgcagtcgcgccatggggggagcgatccaaccgtggtcgactagccgtgccgtcgcgcacacgtctgtgctagccgagccaccgaaccgcgaacgaggctgaggcctgccgtgcaccacggccgaccgagccgaggctgatgacggacgagcacgggccggtaggcggacgtagagcccgcttgccc

SEQ ID NO: 322382 - DNA, 365 bp, Zea mays
gaaactcagagagtacaaacccattacttgcacgtacatgatgtaccaagctggggcaattctagactactcggacaattcagactatactacgacgacacatagctcaccctctctctcccggtctcctccggctcccagcccgtcgccgaccgcaagcgcgcccactctgaccacaacaagccgtcatgcccaaatgcgcgctccgtacactgtccgactgtacaaacgtaccggcgcaacgcgctacacgaccaaggcaccaatctcgtaaaagtaaccaatgaccaatcaccgtaccttcctaaagatgacctcataacacacgacgggtactcacaccttcttctctcgctccacagcat

SEQ ID NO: 322383 - DNA, 213 bp, Zea mays
  unsure (1)..(213): unsure at all n locations
nctcgcgatggcgcgcatgcggtgccgtcaccggagcgcggcgagatggacgaggtggtatacgcggacccggatacggaagcggaagatcaggatgagaggtgggcgaggctgctgccggagctgctctgcgacgtggtgcggcgcgtctaggcgtccggcggcgagcggtggccggcgcggaaagacgtagactcctgcgcctgcctgtgc

SEQ ID NO: 322384 - DNA, 247 bp, Zea mays
tatattccacatagatccaccaataaacactcatctttacattgattcttttcacactccttccaaaagttactcttaagaattcctacaacattatgaatacttctaaatcacaaatcttccttccaagacagtacattatatctacaaagttacatctatatcactgaatccaaacattcctatgcaaatttttaatctaataatgattaaccctcctaaacctttagatatctcttaccttaac

SEQ ID NO: 322385 - DNA, 422 bp, Zea mays
  unsure (1)..(422): unsure at all n locations
cgccgcatcactccctcgccactcgcgcgcccgggctccttcccgccacgctcacgacgatgccttcaccgacgtcctatcttctcctgaatccctccaaaccctcctccttccgccgactctcggccccgcgcctgagccggtttcatgtctcctgcgacacgccacggggcggcgggaggagtggcggcgggaggcgcgaggtcatccccgccggtgccagcaaggccaagaaacagatcgtattcttcgatgccgccccgccggtgtcccaggagggcgggggcgccgtggagaaggcggggagcgagaagcttacccaggtgggcagcggcaacgcagcgctggcgttgttgaggagggcaaccaagaggacgctctcggtgctgtccaacctnccgctcgccatctccgagatgttc

SEQ ID NO: 322386 - DNA, 361 bp, Zea mays
gaattaccggctcaccatcaattcacgtgaatctaaaccacaaaaaagaagctttatgaacataaccaattaccaatgacactagctgatactagtagtattacgcatgcatgcagtagctatgtgtgtcgtcgtagtcgtagtatagctgccagtgtccggacgcggacggatcaatggcagattagcagctagccagctgggattgagatggatggatggatggatggaggtcgaggcacgccacgcgcagggcctagttcctgttgaccatggcgaggatggtgcagatgctctcggagctcaacaccgacatcgacgcctacgtcttcatcgactccaactacaacctaatcagctt

SEQ ID NO: 322387 - DNA, 434 bp, Zea mays
ggcttctcctcccccaccggttcgtgttcaggttctggttcgtgggcgagagggaagagatggcggcgtcggacgttgagtaccgttgcttcgttggcggcctcgcctgggccaccgacgaccactccctcaacaacgccttcagcacctacggcgaggtcctcgagtcgaagatcatcctggatcgggagacgcagaggtcccgcggcttcggcttcgtcaccttctccacggaggacgcgatgcgcagcgccatcgagggcatgaacggcaaggagctcgacggccgcaacatcaccgttaacgaggcccagtcccgcggcggccgtggaggcggcggtggcggatacggtggcgggcgccgtgatggaggcggctacggcggtggcggtggaggctaccgcggtggtcgtggaggctacggcggcggtggg

SEQ ID NO: 322388 - DNA, 316 bp, Zea mays
cctaccacaccctatcgcattaatacactgcactgtcagctaaactaaacgcagggcttcatctaacgatgcataccgccaataccacatctttcttacatctaacactgaccaccactacctcaacaacgactaacaaacctacggctatttctcgagtcaaagatcattctcaatctctaaacacctacgtcccttacatccctcaaaatcaccctcaccacaaagcacgcgattctcatcgacatccaattcatcatcagcaatgtactcaaccaactcaacatcacacgcaaccaatcccaatccatcacaa

SEQ ID NO: 322389 - DNA, 402 bp, Zea mays
cgttctagatcgcgagcggcgccctttttttttttttttttttggcgaaaatagttgtcacagtcgattcgtatgatgaaccggcgatgaaaattatcacaacgactggcaatgaaaaccatttcttacaaaaacagcaccgctacagtaacttaccgagaagctgaggctggcgtgagcggcggttaccaaacacaccacaccctatgagctagcgtgataggagagccttgtggcactggcagctgcggcagtgcttctccggtgcgttcttggcgtggaagtaccatccggagagcatgtcgaagaggatcccggctccgacgccgacggccaggtcgatggtgtagtgtcccctgcacgccagcagcctgaccccctggagcacgttgagcgcgtcgt

SEQ ID NO: 322390 - DNA, 242 bp, Zea mays
  unsure (1)..(242): unsure at all n locations
cgcgtgctgggaactttactgcctcgagcacggcatccagcctgatggccaagtgcctggagataagaccgcgggacatcacgatgatgccttcagcaccttcttcagccagactggtgctgggaagcacgttccccgtgcaatcttcgttgatctagaacccactgtgatcgatgaggtgcgcactggcacgtaccgncagctcttccaccctgagcagctcatcagtggcaaggaggatg

SEQ ID NO: 322391 - DNA, 443 bp, Zea mays
cttcttccctttattaagaacatgtacttactattatttaagggctcaaacattggagaagccaaagtgacaacttctgttattcgttttctaggactgttcttacccaagattttctaggttcttgccaagattttctaggttaattatcctgatcacaatcgttttaccaaacgtctatcacaaataccatctttctcatctgtgaaatgaaggaaatactaagcttctccatgaccaaagtccgcttcctataatctcacgtgagcctggcacgtagtaagcgctatagacattttaagtgtcacacgaagcttgaaaaaaatgagacgtgtgacattttagctatgactagtatttttttctacaatggaatcgttcaagatacactgctagaaaccgggtttcccgtcgtgcctaaaagtctcggtagcacgtgtctg

SEQ ID NO: 322392 - DNA, 419 bp, Zea mays
ccaagatccaggacaaggagggcattccaccggaccagcagcggctgatcttcgccggggagcagctggaggatggtcgcaccttggctgactacaacatccagaaggagagcaccctccacctggtgctccgcctcaggggtggtatgcagatttttgtgaagacattgactggcaagaccatcaccttggaggtggagtcgtctgacacaatcgataatgtcaaagccaagatccaggacaaggagggcattccaccggaccagcagcgcctgatctttgctggcaagcagctggaggatggccgtaccctcgccgactacaacatccagaaggagagcaccctccacctggtgctccgcttgcgaggtggtatgcagatctttgtgaagaccttgactggcaagaccataaccctg

SEQ ID NO: 322393 - DNA, 383 bp, Zea mays
  unsure (1)..(383): unsure at all n locations
ctcttcttcacctcactaacaccagctagcaactctttctctcctgcaataatggccgctcgctcctcctcctcccagccgcagctggtcgcggcggcggcggtcctggcagcggcgctgctgctgctggcggcgggggccgggacggcgtcggcggcggtgagctgcggcgaggtgacgtcgtcggtggcgccgtgcctcgggtacgcgatgggcagcgcggcgtcgccctccgcggcgtgctgcagcggggtgcgctcgctcaacagccgcgcgtcgtcggcggcggaccggcaggccacctgcaactgcctcaagagcatgacgggccggctcggcggcggcgtcagcatggccaacgccgncaacatccccggcaagtg

SEQ ID NO: 322394 - DNA, 164 bp, Zea mays
actagttctagatcgcgagcgtccgcctgttttattttttgtttctgccgtatgataggtaaccatttaacgttccctgttttttaattggaactcgctgcgattggcatctggcagttggttgggaaaaaaaaaaacaataaaaaaaagaaaaaaaaaataaa

SEQ ID NO: 322395 - DNA, 296 bp, Zea mays
tcctcgccgccggcggcttccgtccccgtgaggcgctcttcctctgggccgccgcagcgtcggcgtccagggtgctgcttgggcggcactacgtcctcgacgtcgtcgctggggcttgcctcggcgtgttcgaggcctggctcagcatcttgctcttgggattcatgtgcgctcaaagcaccttccttgtatgctaatccttgttatcgtagtaccacgaatccgccacattgtggtatacactgtgatacagcattgctgattgtgaagttacaatttcggttagcatttcagtc

SEQ ID NO: 322396 - DNA, 279 bp, Zea mays
agcaaagcgccggaaaccaaaccaccgccgtctcggctagctaacacgtacactagcggtgatccccatggcaatgctgccgcgtccaacagcgctcgtcgcagcggtggtggtggcggcggcgctggtgctcgggatggcgtcggcgcaggggccggccgccgcgcccgcgccgggcccggcgcccgggatcagcgacgagtgcttcaacgcggtgctcaacatgtcggactgcctgacgtacgtgacggcgggcagcaaggcgcggcacccggacac

SEQ ID NO: 322397 - DNA, 385 bp, Zea mays
caagtgtgtgtactagcaaccagctagctcgttcggcagcaggcagccatcatgtcggaggggaagcaccaccacttcttcaaccaccacaagaaggacgaggagcagcccgccggcgagtacgggtactccgagaccgaggtggtcaccgtcaccggcgagggcgagtacgagaggtacaagaaggaggagaaggagcacaagcacaagcagcacctcggcgaggccggcgccatcgccgccggcgccttcgcactctacgagaagcacgaggcgaagaaggaccccgagcacgcgcacaggcacaagatcacggaggaggtcgctgccgcggcggccgtcggcgccggcggctacgtattccacgagcaccacgagaagaaga

SEQ ID NO: 322398 - DNA, 347 bp, Zea mays
ggcgcgccgtgtcgcccgcgtgctatgtttcatcagttcgacgagcggctgcgtgtgggcacgtgcaagcagccatgtctttttgcgtatagggtactggttgctttactctatgggctggaccgctgggccaaaatttccaaattccaatcaaggcagatggatcgtccatgatttaatcggacgatcaagtttctggtcgctctgattacgtcgttaccgctgatcagcttcacagttacgatgggtcgattaatcatgattaatggacgatctgaaaacactgcaagtaactttgtaatacagactggtgcttgtggcggccacactgcacgacacattggaca

SEQ ID NO: 322399 - DNA, 429 bp, Zea mays
gttctagatcgccggccgcccttttttttttttttttagaatgaagaatggacatgtagcataccaatccaccgtcagtgttgttccaaataatacatccaagtaatacagcgtctagtttccaaaaaaaaagtaacccagcatcctaatggtattagttcacggctccaggcctacaatatctggtttcccatccgacggcagaaaactttccaagcatccactggtaggtacacactttgatgattcgttaatctttccactccagccagacaaaacccaatctcccatgtacatcaagtggcacttagtcattcaaacttgcactctctttctccatctcaacaatacaagctaatctatcatggacctctgaaagtttttgtgctgcttcttgtttgaacttctcgtcataccattctcggggta

SEQ ID NO: 322400 - DNA, 74 bp, Zea mays
cggacgcgtgggcaattttttcttgggactgaaaacaaagcccgttgctataagtggggatgggcacttcatat

SEQ ID NO: 322401 - DNA, 282 bp, Zea mays
  unsure (1)..(282): unsure at all n locations
cgtnctcggccttttggttactcatncnnttggggcttttcanngttttacttcttancgaataatnanntttcacaatgtgttgggttgttnnnttatgtacccaatgccncnnattgtgtacccatgagtnntcatanntttttcttattttgatctnnttgaanncatttcatttagtnnatgcatgtngnnactgttgcangnnattgatttgctnnngctggtaggaacgttttcttacganngaaaattggagccattattagttaatnnagtagg

SEQ ID NO: 322402 - DNA, 344 bp, Zea mays
cggcctttttcccctatttttatacacgaggagttaaaagagcgccagtctggtgatgccgaagctattacctcttgggatcttgtaatcctgcaatttatgtcttggggatccgaattcatttcatgaatttaccaaaaaaaaaaaaaaaaaaaaaaaaaaaaaaaaaaaaaaaaaaaaaaataaaaaaacgcaagcaaatatacaagaaccagcaatacaataaacatgcatgcaaagacaacagaaaatcaataaagtgacctaaatttaacaaactgacgcctgtgaaaccacggggggaccgcaaaaaccctgcctttacccaaattcatctttttgca

SEQ ID NO: 322403 - DNA, 404 bp, Zea mays
gccgtgtaaaaaagggaaaaagaaaaaaccagagcaacgcagccgcaggctgggtgagcggcgcgggtcttcgtcggccggccccttcaccggtggcgagcatccaccagaccaccagtggatgcgcccctgccccccatgccccaggtcgagtcggccactgcctcggaggcgccgccgccgcaggacgcatggctcgtcgagctcggcagtcgcctcccgcagtgggagtcgctgcgggattcctccaaggtcattatcccgatttcaatatctagggtgaaccagtttgatgctgcaaggctagatgttgagatgtcggccatgttgaaagagcagctagtcaaagtgttctctttgatgaagccaggactcttattccaatatgagcctgaacttgatgc

SEQ ID NO: 322404 - DNA, 387 bp, Zea mays
cccgatctctactatctaccgccgccttccttggtcgccgcgcgcggccttcctgggggcccaagccccaacctcgccgacgcgcctcgcgtcgtcgtcccgcctcggtcctcctctcgccctgccgatggatccggccgcccccgagcctgtccccgcacccgccactgacaccgatgccgagaccaatggttatgaggatgcctctgaattcgaggatgcggaggctgggggcgagggcgctggggccgggaccgagaccgggaccgggtccgggtccggaacgatgccggcgggcggtgtagcggagatgaaggagctgcccgaggagcttgccaagggggtggtgtgcctcgaatgcgagacatcggccgaagcggcggtgtc

SEQ ID NO: 322405 - DNA, 343 bp, Zea mays
cgcgaacctgccgctaccgcacgcccgcagtcgccgcaaaatccgccgccacgaaccggccgcacgccagcctaccacctccctacgcccgcctgcccgcccgcaatcctgccaccgccgcgatctggctgcttgcccgccacaatccagccaccccgccgcgaccgctccgtgcatgccgcaaccgctgcgatccgcccgccctcctcaatccgcccgcccgccgcaatctggccgcccgcccgccgtgaccggcgagatccggtgcagcggcaaatgcaggtgtagagggaggcgacaatgtcccagatgctgtggagtgtgggtctgaaaaggacgggca

SEQ ID NO: 322406 - DNA, 414 bp, Zea mays
  unsure (1)..(414): unsure at all n locations
ctccttatgctccttgtacnaaccgcaagagctgctacggggaccagtttcccacaatgctcacaagctcctatagcttcccttcttcccccgtacctctcaccagcggtgtcttcggtatgtgaaaacccaattcttcaaccctataggatccaacaggcaatcgcagctggcatcttacctttatcacccttgttcctccaacaatcatcagccctattacagcagttacctttggtgcatttattgacacaaaacatcagggcacaacaactacaacaacttgtgctagcaaaccttgctgcctactctcagcaacaacagtttcttccattcaaccaactagctgcattgaactctgcttcttatttgcaacaacaacaactaccattcagccagctatctgctgcctac

SEQ ID NO: 322407 - DNA, 425 bp, Zea mays
  unsure (1)..(425): unsure at all n locations
aaagaaagaaagaagccaagcccaccagggccggggaagctaagagaggagagctaaggaaggaaaggaaggaagatgatgagcaaggaggcagtggtgaacgcgttcctggggtgcttcatgcacgtggggctggcgctggtgctcgccgtctacctccccgtggcctttgtgtgccgcctcctccaccgcctcctcgtccgccccttcgccaggggcgaggacctccgcggcaaggtcgtcctcgtcaccggcgcgtcctccggcatcggcgagcacctggtgtacgagtacgcgaggcacggcgcgtgcgtggcgctggtggcgcgcacggaggtggcgctgcgcgccgtggccaaggcggcgcgcgacctgngcgcccccgacgtgctggtcgtgccggccgacgtcaccaaggtcgacga

SEQ ID NO: 322408 - DNA, 399 bp, Zea mays
atcaggcagctctaccgagcatgatgctgtctctgttcacaactcttccgagcacgccgctgtctcctttgtcatcatcatcagctcagatctagcagcttcgccttctcagattctaaatgaaattcttggagatagagagcgtatccaatctctgtattctgagattcctgggagaaccacaagcaatgccagtacctccagaagaacttgtaatttcagtgtggacgcaactggagatgaaagcctttctgttgaagcacacaattgtaaactcgacaatactgcgtctattttatccatgaggagctgcgctgacaagctgtggaagagaagaaaaggttcaaaactttaaaatcagaagataaaccagaggaagcaatgcaagctttcaagtat

SEQ ID NO: 322409 - DNA, 425 bp, Zea mays
cctaaatgcatattctacgctcgaacatcttggcatgcagttcttagactgcaggcatgctttgaagtctagtgttgaggcctttctcagtgaaaatgatactgacccagccacacctcaactggagaccaccatgtttgcccctggaagtagaatggagaactacaacaggaagcctgcaagtccaagggataccacagctcttgctaatttcaaagaagtcctacaggaatcaggtttagagattttgtacagcgtccctgtactacactgtccacaagcatttggagttgttttgaaggccatggaaaaagcgaacagcactggaaaggtaattccaggctggaaggttgtatattctggcgacacacgaccctgtccaggtcttatagacgcatccagagatgctacagtgctaatacatg

SEQ ID NO: 322410 - DNA, 116 bp, Zea mays
cggacgcgtgggcggcgcccttttttttttataggtggacttaatgtttgtgtaaggcgaggcataacatcatgtctcaatggacgttgccgttgcacattggtgcattttatttt

SEQ ID NO: 322411 - DNA, 440 bp, Zea mays
  unsure (1)..(440): unsure at all n locations
cctcactggaaagactatcaccctcgaggtggagtcttctgacaccatcgacaacgtcaaggccaagatccagggcaaggagggcatccctccagaccagcagcggctcatttttgccggcaagcagctcgaggacgggcgcacgctggccgactacaacattcagaaggagagcaccctccacttggtgctgcgtctcaggggcggcatgcagatcttcgtgaagactctgaccggcaagactatcacccttgaggtcgagtcttctgataccattgataatgtcaaggccaagatccaggacaaggagggcatccctccggaccagcagcggctcatttttgccggcaagcagctcgaggacgggcgcacgctggccgactacaacattcagaaggagagcaccctncacttggtgctgcgtctcaggggtggcatgc

SEQ ID NO: 322412 - DNA, 168 bp, Zea mays
tcttgtacacggaataagctcaatgattcaaaatatcctatggttcctgcgcatgagatagctggagttgtaactaacgtcaatgcagatgacaaacgctttaaagaggttgaccatgaaaataatgtaacatatgtgaactgttgccgtgattgtaagaactgaaat

SEQ ID NO: 322413 - DNA, 57 bp, Zea mays
acgcttgttcacctcactaacaacagctagcaactctttctctcctgcaataatggc

SEQ ID NO: 322414 - DNA, 254 bp, Zea mays
acccactcaaccgcactcttatacataatttaatacacacttttgcttaccttaaacattcctccggggggctatataaaaacctatggtcctgcagacgaacgttgccttcaatttttcctatctactttacatactttatatattttacaatcactcctactctcaatcgccagtactctgatcctcttactatatcttataccaactcaataccatcacaccattatccttacatcatcactcccaactat

SEQ ID NO: 322415 - DNA, 329 bp, Zea mays
caacgatgacggcggcggcggcaccggcggtcgctagcagggtgtgggagtgggaagggaaggtggcgtcggcggtggccgaggcgacggcggacgaggcgtgggcgctgctgtcggacttcctggcgttccaccggtggcacccgcgcgtggccgcgtgccgcctcgcgtccggcaccccgcgcgcgccgggctgcgtgcgctactgcgagggcaccgccaccgccgccgacggcgagccggcgcccgactgggcgcacgagacgctgctggagcacgacgccgagcgccgtttcttccgctacgagatgaacgacaacatcgtggtc

SEQ ID NO: 322416 - DNA, 206 bp, Zea mays
ccacctactctcacacctttttccacccactatataccttcactcccaccgtgcttattaaaaccacccgagcatctccaatcaaacacacaaacccaaccccctaacaacacccaaacccaacaacaaccactactactacacaaatcttacatatctacacaacaacaaatatcaacaaaaaccactcaatcaacttaatgcca

SEQ ID NO: 322417 - DNA, 440 bp, Zea mays
ctcgcgtatgccttcccagatccatcgactcgctcgggccgcccctcccgtcgtccccgttcgaaggtgcggcagccggcaagcgaacgatttcattcgacatgaatcccgagtagtaaggcctccgatcatccttcccttcagtttccttccgctgtcttccgcgttcgtgaccgtgatctatgtagcttttgctttcgtaattccgttggatttttcgtttgttgctgtggttgcgttgttcggatgggactttacggagatctgatcggatgcacgctggttgctcccaccagatttcgatctggatctgggaatctgtgttccaaatcgggattccctgaatgaaagggcctcctgcggccccggtgctttggtctgcccgcatgcagaaatttatgtactgcgccatgcaccttcgatggatgtgttcgctctcc

SEQ ID NO: 322418 - DNA, 445 bp, Zea mays
ctagcaaccagctagctcgggcggcagcaggcagccatcatgtcggaggagaagcaccaccacttcttcaaccgccacaagaaggacgaggagcagcccgccggcgagtacgggtactccgagaccgaggtggtcaccgccaccggcgagggcgagtacgagaggtacaagaaggaggagaaggagcacaagcacaagcagcacctcggcgaggccggcgccatcgccgccggcgccttcgcactctacgagaagcacgaggcgaagaaggaccccgagcacgcgcacaggcacaagatcacggaggaagtcgctgccgcggcggccgtcggcgccggcggctacgtattccacgagcaccacgagaagaagaaggaccacaaggacgccgaggaggccagcggcgagaagaagcaccaccacctcttcggctgaccgtagtacc

SEQ ID NO: 322419 - DNA, 425 bp, Zea mays
gatccatccaaagcttcgttagattgctcacggtcccagttgctgctgccgaccaggccggacagcggatgactgctgcggctgcactggtgccggtccagggagcgagaggggcaacaccaggaagaccaccaagatgccggcggctggactgaggagggccggcggccggtttcctcttgcgcgggacgtcgggagcagcggcgccaatgagcgctcctcctcggtccgccgcggcttcggcggcggcgttgcaatgccgcgcgcgttgctggaggactcggcgccggcgatggacgcccccgcgacgaccggcagggagccgccgcccccggcctcagccgcggcgtcgagggtcacgccggcggtgctgttcgtcacggtggtcctggccgtggtgctgctcgtctccggcctgctccacg

SEQ ID NO: 322420 - DNA, 418 bp, Zea mays
ggggaacaaaaaggaagggcgaggaggacagggagccgagcgcaagagctgaggcttggccgcgaaaccccagacctcgcgccgccccttcccctccgcggcgtcgtcctcgcacgctctccgatccaagatgtataagctggggagaggaaaccgcgacaaggtgcagcagttcatgaccattaccggcgccaggcactgaaagctagtgattggcacttggaaggagcttttgacttcttctatagccaacctcaggtttctgtggtcaatactcggcatcttgaagatattttcaacagatataaagaacctgatgctgatatgataatggtggaaggaatatctcaattttgcaatgatctacaggttgatcctcaggatattgtcatgcttgtcatatcatggcacatgaaag

SEQ ID NO: 322421 - DNA, 426 bp, Zea mays
gttctagatcgcgagcggccgtcctttttttttttttttttaaggggaacattcaacggttctacacagtgacacaacacatcaacacaacccaccgagcacaaacgggccagggccaggcccaggcgagtgaccagtcgtttcacgctcacacgaaacggacaatgcgctttatcaatcagtgaagtgccctccactccactccacctcaaggatgcagcgccgagtaggtccggtacctgtactccgacgccgcgtcgtcggccggctcgctggagctttggtatttgctgcggcacggaacgtagttgttgaccgggcatgacttgggctggcggaggaacttggcgcagtcctcgtgcgagcgctggttgggcgcccactggatgcagttgcggtcgacgttgagcctcccttccttgatca

SEQ ID NO: 322422 - DNA, 411 bp, Zea mays
cgccagcaagaagcgcgagggctccagccactccaacatgcaccggtcccgggcttctagggggccttaacaaactggtgagccttaccaaaggctgggccggcccaaaggccgcgggttaccaatggcgccggcaaggaaccggcggcggcggccacaaagcccgaccacaaccccggccccaacccgaggcttcgtcctaatgaggctgttcgacgtggtgtcggcgctcaagtcggggtacgtgaagctgcagcgggcgcacttcccgtacgaccccgacagggtggcctcggccgacgaggccgtggcgtcggagctcgactcggtggccgcgctgcattgcctgtgcagctcccgccgcgggatcgggccgctggtagacgaccggtggtccctggtgcagcgcct

SEQ ID NO: 322423 - DNA, 345 bp, Zea mays
gtgggttggcttctcctccccctccggttcgggttcgggttcgtgaggttctccggggttcggtttcgtgggtgagcggatcgagatggcggcgtcggatgttgagtaccgctgcttcgtcggcggcctcgcctgggccacggacgaccactccctccacaacgccttcagcacctacggcgaggtcctcgagtccaagatcatcctcgatcgggagacgcagaggtcccgcggcttcggcttcgtcaccttctccacggaggaggcgatgcggaacgccatcgagggcatgaacggcaaggagctggacggccgcaacatcaccgtcaacgaggcccagtcccg

SEQ ID NO: 322424 - DNA, 425 bp, Zea mays
gctgcgggccagctcaaggagaacctcacgcggcggcattctgtttcggctgcgggccggctcaaggagaacctcacgcggtcgaaacagaatgccgctgcctaaatcaattgctcctcctggctcaattcccctcccgcctgatcatgacactctattggcccagaactaccaactcctgcctacgttgaagacgccacctcaatctgaggaaaacgaggcttagaatgaagaatccaacccaagtatgacaccgaatccggcaaattctaatcctaccttctcgtaggatcagcgtagtaacgagcaacagcacactcctcagcatggacagagggtttcattccaactcaatgctttggcagctgctgctgcatagcgacctcggatgaccgtcgaccagctgaacatctgctaaccatcat

SEQ ID NO: 322425 - DNA, 302 bp, Zea mays
acccactcatccgaaggtctccaaacttctcccccccctctctccaattcctcttctcctcaacctcactggtcactttaaacacttgcgacgcctcctaatcatcaacactacctctacttctattacttacttcccttcaccaccatcaactaatctctcaacaatgccttcacctcctacatccatatcctctactccaaccacatcacacaccagcacacacatacctctatccacttcaactttcatacctactacttccagaactacattctcaacactatctagaacactaacta

SEQ ID NO: 322426 - DNA, 421 bp, Zea mays
aaagattcagtgctctgattcttcttgggttgtctttctccggcagatctctaacgaggagatgttctctcttcttttcttttcttcttttttttgaaagcttccctgtaacctgaaatcggctttacttaaatttcgagccaacttaatcttcttctttgccaattcttttttaaagaagaaagttgagagatgcctgtagttttttttttgggtgtgtttgtgactccagagtctgaaatcacaaatcagagctgtatagggagcaggtgatgactgagtgactgacaaacgtggggaagatggagacaaagaaacgcaagcctgtggtctactaaagacgggggcatcgccatcgagggcaaacggaggccacaggattagcagcttctccgaactcccctctcgtgctgctgcgtct

SEQ ID NO: 322427 - DNA, 399 bp, Zea mays
actagttctagatcgcgaactgtgcacttctgtagtcaaaaaaaaaaaaaaaaaaaaaggaaaaaaaaaaaaaaaaaaaaaaaaaaaaaaaaaaaaaaaaaaaaaaaaaaaaaaaaaaaaaaaaaataaaataaaataaaaaaaaaaaattaataattataataaaacaataataaaaataaagaaaaaaataaaacaaaaaactataaataaaattaaaaaaaaatgtttgagatatccatagtctaaaatcacaaatctagatcatctataagaaacaagattattgactgaagtgactgacaaacgttgtggaagatccaaaactaaaaaactcatgcctgtggaatactaaagactgctgcatcgttatcgacgtcaaacaaaagtcacatgatt

SEQ ID NO: 322428 - DNA, 82 bp, Zea mays
ggattgacattacgtattgtctttgtagagatacacctcataaacaggaaaaggggatcttaaaaaaatgacattatacacc

SEQ ID NO: 322429 - DNA, 340 bp, Zea mays
cgaagtcaagattatcttactgggacttcaggggacagttctggagctgcgcaagagaaggttgcaacgctattggtcacagtaaccagagtggactcgacagctgggagacggcacaaaatacaagtacagcaccggtgccgcagggagacgtattcgtcaagaggttataacttggcggatcgattctttgcttgaaccagagaattcagaagtactaggcgaacgatgttgatgtcccagtgtgcatagagatttgcatgttgtagaacaaaaatcctgtgatgagagtggcataaaaacgcggatttggagagttcaaatttattaatagtgtcgg

SEQ ID NO: 322430 - DNA, 351 bp, Zea mays
aatccctcatagatttgattctcctgatacctcttgccaaccaacggcggcttttaaaaaggtcggccgaccaatcaacttctctcttttcccttaccccttttcatgcctttttcatccaatctctaattaaagtcctcaaccttcctttcccccaaattttcatttacttcattgtctttaccatactttcctactacttctctgccatcaccatcaatattgttataatccccctcctcaatatattatatcacatcctcattcacttcaacaccattcctttcttcatttacataacatccaatccctactactcaacctttattaatatctccacttattctttca

SEQ ID NO: 322431 - DNA, 61 bp, Zea mays
aaaaaaaaaaaaaaaaaaaaaaaaaaaataaaaaaaaaaaaaaaaaaggacaaacaaatgg

SEQ ID NO: 322432 - DNA, 453 bp, Zea mays
  unsure (1)..(453): unsure at all n locations
gacgttctgtggcaagccatggataaatgtcttggaagatcttagaatccaggatacggatctgtggggttcaactagccaggacaaatgcttatggactgcaaagctttttcctgtcatgtctctcccagaaatgcttaatgtgggcatgtggcttatgggatcagaatgcgacccagatgggagaatagcttccttgtggcaaaaatcacagaggatcagcctggaagagctgcatcgtgctattgattacagacaactttgcaccgattcgagcaagcatcaggcaaatcttgcagctgacatagccaaggcttgcatgaactatggcttactcggtcgtaatctgtttcaactttgtgaggaaatgttacaaaaagatacatgtttagcagtctatgaangaatactttcattttttccaagtcacagtgaacagtatcctggggttct

SEQ ID NO: 322433 - DNA, 403 bp, Zea mays
tggcatcaccaagcatcagaatttcttccaaagatgaatgctggtttgatctttggtccaccagcactcgatggtcatgtcttgcgcgcattaattctgcgataacaggaccgatggttgcttggattatttcagattatggaccatttgcagtatgattgctcgagagaaatctggagctcctgttcagatccactttgtgacagcaaggcatgcttcagcatgaagatccatgtatgatacctctgaaaggtttacttaggcctagactcagtttgtctctgattctgtacattcttgatagattatatatttgctcaagaatgttgttcagtgcagcattcaactgcaaattttattgctggatgaatcgctatccactagtacataccgatttccaggc

SEQ ID NO: 322434 - DNA, 365 bp, Zea mays
cctctaccttttttctctctctttctcttcacctccctctcatccatccggcacctttattttaaaattccgctcggcctaccaccacttctactctcacaccttctcttttccatccactacctaccctcatcattctcacaccatccatataatctttttcatctttactaacaaccccacctcccaacttccctactttccttccttcataactaatcaacatttactctccttatcctactctctacccatactcataatcaatctcccacttctttcccatctcttcctctttattacacatctccctccttcctcattttatccttccttattctctccctttacctcttccttactat

SEQ ID NO: 322435 - DNA, 460 bp, Zea mays
ctgtcacacacacacacacagacaagtggtttccaaagccaagtgtgtgtactagcaaccagcgagctcgggcggcagcaggcagccatcatgtcggaggagaagcaccaccacttcttcaaccaccacaagaaggacgaggagcagcccgccggcgagtacgggtactccgagaccgaggtggtcaccgccaccggcgagggcgagtacgagaggtacaagaaggaggagaaggagcacaagcacaagcagcacctcggcgaggccggcgccatcgccgccggcgccttcgcactctacgagaagcacgaggcgaagaaggaccccgagcacgcgcacaggcacaagatcacggaggaggtcgctgccgcggcggccgtcggcgccggcggctacgtattccacgagcaccacgagaagaagaaggaccacaaggacgccgaggaggccagcggcgaga

SEQ ID NO: 322436 - DNA, 56 bp, Zea mays
  unsure (1)..(56): unsure at all n locations
caaggttgtcgtcactgaagttcttggtggtgggaagttntatgttcagacagtgg

SEQ ID NO: 322437 - DNA, 390 bp, Zea mays
  unsure (1)..(390): unsure at all n locations
ctgaatcagcatcagaagttgagcgatggataagaaaatgctttgcttaatggtggaataaggcgtgctaggtgctacgagtggcccaaactacgagttgggaaatgagatggcggtggatggttggttgcccaatgcgtggctgggagatgtggcagggcaaggcttgggcgccagtgatggtgcataggctaggtaggagagcacagcagggaattagtatgggactacattcatgaatatatgtaaggccaagttacaaatcctatccttcctcaatacaagctcaactgaattctaatccaatgtatcaatatctctagctaacaaaccgatgaactcatctnctaaacaaaaaagcacctatgactctgtaaaaaaaaacaaaaa

SEQ ID NO: 322438 - DNA, 448 bp, Zea mays
  unsure (1)..(448): unsure at all n locations
cggcggcctcgcctgggccacggacgaccactccctccacaacgccttcagcacctacggcgaggtcctcgagtccaagatcatcctcgatcgggagacgcagaggtcccgcggcttcggcttcgtcaccttctccacggaggaggcgatgcggaacgccatcgagggcatgaacggcaaggagctggacggccgcaacatcaccgtcaacgaggcccagtcccgcggcggccgtggaggcggcggcggcggcgggtacggtggtggccgtggaggcggcggctacggcggtggcgggcgccgtgatggcggcggcggctacggcggtggcggcggctacggtggtggcggcggcggctacggtggtggtggcggcggctacggcggtggcaaccgtggcggcggctacggcaactncgacgggaactggaggaactgagcggtgggg

SEQ ID NO: 322439 - DNA, 252 bp, Zea mays
aactccaccaactttaaccacaccttcatctatcttctcctccacatctaccacatcttcaactccaacacactctacatatattactacccaaccaaaccacccacatccaataccatcaacatcatctcctccaaatacaatatataccctattaactcatcctatttctcctcatcatcacaaccctaatcaaacatactctatcctgattaacgaacacataacatcataacaaactatcttaacttc

SEQ ID NO: 322440 - DNA, 375 bp, Zea mays
gcggacgcggccgtggtcgccgagctccgccacctcgcgcgcctccgcgaccgcttcggccgctccgcagccgtgggccacatcccgcgcccgaacccgtccgcgccgccgctgcgcgaggccgtggcgccgtacgaggcggcgctcgacgacctccagcgccagctccagtccaagcagggccaagggggccgcgctcaagaagaaactcgcggcgggcaacaacccgcggaaccggcgccaacaacacgttccggccttcaagcagaacggcggcgcgccgacggcggaactcttcaacaactgcgccgagcaagcccgcgcggcgacgccggccttcgcggggcacctcgggcacctgatgccccccggcgg

SEQ ID NO: 322441 - DNA, 108 bp, Zea mays
ggagagcgctggtgtttaggaccgcatgcattcagaagctctctgtgctgctggccagatgtgtcgttcgttgtatcatgtatgggtgtttctggctttcgttctggg

SEQ ID NO: 322442 - DNA, 427 bp, Zea mays
agctactcctgctcccacactcccagccgagctcacgcacacacgcgcgagcaggaggtccggcaagatccaaaattaattgtcccctgcccgcgcgcgtcggggccgggcgcaaagcggcaaagggatcatcggatggcggtgttcgcaggggcacgggcacggccgctgctgggcgccctgctgctttcagcgctcctgctcacggtcacggccgccgacagccagaacaaccctgccgaccagctcgttgcactgatcaacagcaaccgtaccgccagcaagtccgcttccgtttctgacaaccaaggcttgggatgcatcgctctgcagtacatcaaagcgtacgaaggtcactgtgaccaggtggacgacaagaagccgatggagtcgagtttcacggacacgttcgccccgacctgtggcg

SEQ ID NO: 322443 - DNA, 205 bp, Zea mays
  unsure (1)..(205): unsure at all n locations
gtcacacacacacacacagacaagtggtttccaaagccaagtgtgtgtactagcaaccggctagctcgggcggcagcaggcagccatcatgtcggaggagaagcaccaccacttcttcaaccaccacaagaaggacgaggagcagcccgccggcgagtacgggtactccgagaccgaggtggtcaccgncaccggcgagggcgag

SEQ ID NO: 322444 - DNA, 337 bp, Zea mays
gcgtgacggtccgggccaaggacgaaggcgaggacgtgaagccggcgcccaagcatcgccgccgtggcgccagcggcggcggagagcgcaaggaatccgagcggtcactcgccaaggtcatggggcagacggaggagcagttggtgccggaggcaggcccggcctcgggccccgcccccagctcctccaagcaaggggacgccgacacgccggccggcctcgacgccgacctggaggcgctcctgcagccgcacggggcgttgctcggccgccgagccggccggcagtggaggcccgcgctgcaaagcatcgccgaaggcaaagggtaaaggggggc

SEQ ID NO: 322445 - DNA, 369 bp, Zea mays
  unsure (1)..(369): unsure at all n locations
ctcttcttttaccgatggccaacgattccctcgcccaccacctgctgcttcctgtcggcggcggctgctggtccgacgtggaggaggaggagccgagcaacgtctccttcccctcgttctggccgcccttccccgctctctcgccggaccccgagtccgacgcaaacagcttcgtgcgtccgcgcatggaccggccccgggagaccgccgcgtcgtccttcttggggctcggcttccacgacggggaagacgacgagtgggcaccacccgacgaggatggggagctcgggctgcccctctgctgggactgcctgcagctggaggaccacgacgacgacgaccaccgaaggtgggacgtcngcgtcagcg

SEQ ID NO: 322446 - DNA, 443 bp, Zea mays
ggctgggaggcgctaccggaagagttggtagagtccaaagaataaacaagagggtgtgtggtgatctgtgcatccggttcacagttgctggatggagattatcagaaaacgtgttgaacttggtgagctgcacaaggtacttgaacttctagaccgagcatctttgaaacacagcgtgttcctagaggaagaagaagcacacagcttggttgaacttgtatctgctctggactgcttcatggcccttaaaactgtgttgctactcccacatgaatctctgagactgcagtgcctgcagatggtggaggtgaaaatgagggaaggaatcgtgtccacctcatcaaatgctgatgatcaggagcttcttgccttggttctttcctctggaactatgcacaagatcatcacagaagatgcatactctaaaattttctcttacatat

SEQ ID NO: 322447 - DNA, 270 bp, Zea mays
cccacgcgtccgagcagaccgcacgtcacacaccaccattgcagcaatggcgcgcgccgtcgctctctgcctggcgctgctgtgcctcgtagccgtgcactcggccgtggcgcagaaatccaccccggccccggccaccgcaccggccgccaccaccaccccaccggcgaccccgtccaagaagacgcccgcgccagccgcggcgccgcccaccacccccgccaccctggccccggccgccgcgccgtccaccacccctgccacccccga

SEQ ID NO: 322448 - DNA, 440 bp, Zea mays
cacacacacagacaagtggtttccaaagccaagtgtgtgtactagcaaccagctagctcgggcggcagcaggcaggcatcatgtcggaggagaagcaccaccacttcttcaaccaccacaagaaggacgaggagcagcccgccggcgagtacgggtactccgagaccgaggtggtcaccgacaccggcgagggcgagtacgagaggtacaagaaggaggagaaggagcacaagcacaagcagcacctcggcgaggccggcgccatcgccgccggcgccttcgcactctacgagaagcacgaggcgaagaaggaccccgagcacgcgcacaggcacaagatcacggaggaggtcgctgccgcggcggccgtccgcgccggcggctacgtattccacgagcaccacgagaagaagaaggaccacatggacgccgaggaggcc

SEQ ID NO: 322449 - DNA, 432 bp, Zea mays
gttggcttctcctccccctccggttcgggttcgggttcgtgaggttctccggggttcggtttcgtgggtgagcggatcgagatggcggcgtcggatgttgagtaccgctgcttcgtcggcggcctcgcctgggccacggacgaccactccctccacaacgccttcagcacctacggcgaggtcctcgagtccaagatcatcctcgatcgggagacgcagaggtcccgcggcttcggcttcgtcaccttctccacggaggaggcgatgcggaacgccatcgagggcatgaacggcaaggagctggacggccgcaacatcaccgtcaacgaggcccagtcccgcggcggccgtggaggcggcggcggcggcgggtacggtggtggccgtggaggcggcggctacggcggtggcgggcgccgtgatggcggcggc

SEQ ID NO: 322450 - DNA, 219 bp, Zea mays
cggttcggacattcccgacctcgacccacccgtcgcgcgggcccatggaagaacactcttttattgctcatgttgcgcggcttccacgcgtgcgagtaatgtagaagtcgggtgggcaggtattctcataccgtcattagtggatcattgaatttttctgtaagaaggttattgcaatgcaccttctctggccatgaataacacaaaggagacctgctt

SEQ ID NO: 322451 - DNA, 241 bp, Zea mays
aagctgatgctcttcacaatcatcaagccgttccacaacatgcgcagccctaatggtactgcgaggccattgttggcgcagctctcgcagcactcaccggcacaggtgctcaagaacttcacgcacgtcaagaaccttcggatcgagctcccctttggggatttgggtaccggagaaggaagtcttctggaatggccaaccaaatattggaacccaccttggaaatggggggaccctgggg

SEQ ID NO: 322452 - DNA, 285 bp, Zea mays
atccgcagcgcccggaatggcggcacctcttccacgtcctcccgttcctgtcccgcggcggcttgtgtgccgccttctccgcccgcgcccactctggctaccgggctagtctgctgcgctgctcggccgacgtcgatcatgcgagcttgttcactcgcctaggccggatcataaatgacaaggaccatacctacgtgcagaacatcatttgccacttgtacgcgaatggccagaactgatgtgacttcacaacactcgttacttactggaaccttgccgctcacg

SEQ ID NO: 322453 - DNA, 471 bp, Zea mays
gccggcatggctcgaccgacgcgtccggggctgagctgcatccacatccacaactaccccaccgctgccgctctcttcttgcacgcctgggcagccgcccaccgccggaccaccagcacgtacccgcccttccttcacccgccggcgttggcggtctccccgacctcgccgcctcctgcaccgcctctgctcgccgagaaagccagcgccgtctaccccaccagcacagatgccgccgccgccatgtcttccgccacgttccacttcccggccgccgcggtgcgcgcgctgctctcctccctggagccgggcaccaccccgttcgcggcgctcgccgcgctcttctggctccggatcaccggcgccgccgacggggagcgagagctcacactggcgctggacttccgcaagcggatgtacgcgccgctgccgtgggggtactacggcagctccgtccacttcacgcgcgcg

SEQ ID NO: 322454 - DNA, 289 bp, Zea mays
cggacgcgtgggcgacgcgggctctcccgtctcctctgatggacgggaaccaagccgggccgccccctacccccgcgccgccgcccttctcctcccggccccgcgcgtcgccgtccccggcgacgcaccgccggcgccgccggcactccaaaaaacataagccccggcccgcgccggcgccgacgccgcagggcgcggacttctccgcgctcccgccggatctcgtccaccgggcccctgcgggcgcgtgcgcctccgaccgtccggcggccagccgagcgtgccgcgc

SEQ ID NO: 322455 - DNA, 62 bp, Zea mays
  unsure (1)..(62): unsure at all n locations
ancggcggggcctccatgcgcagcaagcgtacgtcttctgctcaagccaccgcgtcctgccc

SEQ ID NO: 322456 - DNA, 403 bp, Zea mays
cttgcccacccggcgaccagaaactccctaaccggctgctgatggagtcttgacaagtgattcttgtggatcggccagctacggcggcggtggccacgaaacgatggaattaggtgcttctgtttccatgtctatcctggaaaagctcgtccagagctgttcctttccagattcatggcgggggccgccagacgctgaggtccaggctctcataggatatctcgaagagctacggtcctccgtcctggatctttccaaggaggatgaggacgaggatgactctgctacgtcgtcgtccacgctgaagatgagcctgacgagccagttgcaggaactttgttatgatgctgaggactatctggagatggcgcagcactcccgtggtggctgctcctggcagatc

SEQ ID NO: 322457 - DNA, 333 bp, Zea mays
acggctagtgacagatgctctagatccgctcatcctggcgggctagtgaggtcgtaagcggggatcgaatcaaaagatgctggacaagctgtgggacgacgtggtggccagtcctcaaccggagacgggcctcgagaagctccgcaaggccaccaccgcccgtccgctcgttatcaacatagacgcgaacggcggcagctacaagctggcgcagtcgatgccatcgaccccgacgactccgatgacgccttcatcgtcgtattcatcgacgacgccgcgcggcgcccgcaacatgtggcgcatagtcttgcacacggggatcaacctggccac

SEQ ID NO: 322458 - DNA, 204 bp, Zea mays
tcccgactcgacgcacgcaatccattctagatcgctagcttcctccctttttttttttttttatcggttaaacacccattggttgatcaaataccaggtaggtacacttcactacacaaaacaacaaacataaaactgtttaccgtaatatgcaccacctaatgaacaatacctaataactaccactattataattcacttcat

SEQ ID NO: 322459 - DNA, 237 bp, Zea mays
attcccgaccgacgcacgcattcatagatgtggctgcagctgttgcatgctttactcaaagtgtgcatggatcaaatagaagaagtgtttaaccatacattggtagcgctgcatatatacttgttaatttatggaatatcaattaagtcttcaacatgattgattgcatttgacattattttccaatttctttactaactgttttaaatttctcataactactcaccaaatgatttt

SEQ ID NO: 322460 - DNA, 400 bp, Zea mays
ctagttctagatcgcgagcgagctgcccttttattttttttttgctagaaccattactggggaaaggttcaatagttacaggcacaagtttcacttgacagataagaaccatacaaaatacaggatgatcgcgataatttcttaaatctagcacttcaaagctaccaacgttccattgttgttcgtggcaaatatgacctacaagtggtttttctgttggtctctttgtggtttattcttttctcaagggatcaagttctgaaagcaatgttgaaaaccacaaaatatgtccaaacctacaagttcataccactgatttatcaaattgattctagactttgcagctccatagatgctcaggcttcatttaactttcagattgcgttaacttctctttttg

SEQ ID NO: 322461 - DNA, 386 bp, Zea mays
agcaagccttccgaaataatcttaatcccctttcctttttctcgtcctggttcccggccgtccttcccaagaggatagttctttagccaagccatatcacacttctctctctaccgagccacacagaccagagcgagctctcatggcgatactgctccgcaaggtgtggggctccgtgctggcgcgcgccgcatcgccgggggccgacccgcgggcccgccgcgcgcacgcgcatctcgcggagcagtaccagtaccacagctcgctatcatctggtcgcgctcgacgacgtccccaccaacgtgctgctccagatcatgctgctgctggtcccgctcgtcgacgcgcgctgcagcaccgtctgccgcgcctggcgcgtcctcctc

SEQ ID NO: 322462 - DNA, 227 bp, Zea mays
cgcagtatgcctatctaaagggttatgcgcacccatcggatcagttgttgttggttgagaggccttcatcgacgagagggcctcacgaaaattaaacagttcacggtggattcatcttcggtcgagaccaatatggtgttcttcgatatcgtggatccacacatttcaccgagcaagctatgccaagtcttggaacaacgcaatgttcttgcaatgccagcaagttc

SEQ ID NO: 322463 - DNA, 297 bp, Zea mays
aatgggttgagatctatagtgtcgcacttgcccacattgctcaagcaattgcaagtaaaaggccacaattcatgatgagggcagatgaactcttcgaacaacttcagaagttcaatataggttctcaatatccttatgaaaacgagatggacctcgcattagaaagggcactctgctcgttacttgtgggggatatttgcaattgcagaatgtggcttggaattgataatgagtcctcgtcatatagggaccccaaaattatcgagtttgtggtgaataactctagcatgaacgaag

SEQ ID NO: 322464 - DNA, 284 bp, Zea mays
ttcccgccgttgttatcatacttttttattttttttttttttttttttttttttctttctatttttttttctttggctgtttacattcaaagtcgtgacgccattttttttttttttaacacaaacaacaaaccccccatactcatttaaactcaccaaccccaccaaccccaactctcaaacacctacatctcaccccaaatcaattaaaacatccaccaaatacaccatcttacctacaaaaaccctcaacttacccacaaaaaacaccccctaccacaaaa

SEQ ID NO: 322465 - DNA, 405 bp, Zea mays
cagacaagtggtttccaaagccaagtgtgtgtactagcaaccagctagctcgggcggcagcaggcagccatcatgtcggaggagaagcaccaccacttcttcaaccaccacaagaaggacgaggagcagcccgccggcgagtacgggtactccgagaccgaggtggtcaccgccaccggcgagggcgagtacgagaggtacaagaaggaggagaaggagcacaagcacaagcagcacctcggcgaggccggcgccatcgccgccggcgccttcgcactctacgagaagcacgaggcgaagaaggaccccgagcacgcgcacaggcacaagatcacggatgaggtcgctgccgcggcggccgttcggcgccggcggctacgtattccacgagcaccacgagaagaa

SEQ ID NO: 322466 - DNA, 93 bp, Zea mays
aatcgttgtactgagtagaccttctggataccggattctgagtagacctttgaatccgtgagggatcagccaatctcggaaaggaagtttcgt

SEQ ID NO: 322467 - DNA, 392 bp, Zea mays
cgccatctccatttccagcatagaagactcgatacagctcaaggacagcgctccgcaggcgcacgcaagccagaccggaccgaatcgaagcagcagcagcgtacagaagatcacaccctactgccgcgctgcactgcacaatgggcatctgcgtgtcgtgcgacgcggcggacgagggcgccgcgacggcggcgcgggtggtgctccccagcggagagctccgggagtacgcgccaccggccaccgccgcggaagcgctgcaagcggcgggcgagggctcgtcgtggctcctctgcgacgccgacgggatggcgttcgatggccccgtcgcagtcgcggcggtcgcgccggggtccgagctccaggcggtgcaaatctacttcgtgctcccc

SEQ ID NO: 322468 - DNA, 264 bp, Zea mays
gcttggtgatgcccagcatgttgaggaggccgagaagatgggacttgactacatggatgttgaggctctcaagaaaatgaacaagaacaagaagcttgttaagaggcttgccaagaagtaccatgctttcttggcatcagaggccatcatcaagcagattccccgtctccttggtcctggtctcaacaaggcaggcaagttcccgaccctggttactcaccaggaatccctcgaatccaaagtgaacgagactaaagcaacccg

SEQ ID NO: 322469 - DNA, 391 bp, Zea mays
  unsure (1)..(391): unsure at all n locations
cgggatgctggtgcagaagaggggcggcggtggcggcggcgacgacgagccgtcgccgagcgtgaagcccgtgcccaccatccgggtcaaggccaagcacgccggcgtcacgcacgagatctacatcagttccgaggcctccttcggtcagtccagccgtctgctctctctctctcgctcgctcgcgctgacggatgctgctgcgcaggggagctgaagaagctggtggccgccaagacggggctgcaccccgacgaccagaaggtgctgtacaaggacagggagcgtgactccaaggcgttcctggacacggccggcgtcagggaccgctccaaggtggtggtgctggaggatcccgaggcccgcgcgcgccgactcatcggngagcgcc

SEQ ID NO: 322470 - DNA, 280 bp, Zea mays
cgcactgtcagcggtgttcaaggtgggtgcagcatccagtgaggtgttcatggctgacgctgaggaggcttggtaacggtggtggcgttggattggagccatgggtgtgcattggcgatggacagaaggcggctgcagccgcatcatctggaaggaaagagaggaatggttgtagaattgagtgctactgcagttgggtgtttgtggcacggtgcgcggacgtcgaggtgtggagtcaggtgggattggcaccagaagccggtgggaaagaaagtgatga

SEQ ID NO: 322471 - DNA, 271 bp, Zea mays
  unsure (1)..(271): unsure at all n locations
tcgcgctcctgtccaccctgccaccgncgactcctctccgncgcagcaactggcaacctccgtatggcccctattaaggggcgccaagctccgggggaaaagcaagacggacctgcaggcgcagttcaaggagctgaagtctgagctctccctcctccgcgtagccaaggtcaccggcggggcacccaacaggttttccagatcaaagtggtgcgcacctctattgcgcgcgtgctcacagtgatctcgcacaaacagaaatctgcgtttc

SEQ ID NO: 322472 - DNA, 239 bp, Zea mays
agactttccgctctagattgctcatacttccattgtggttattagtggaacttttctcactggtcggagagggtcaagaccgtggacgtgcaccccacataggcatgtcaatttgtcggagagaggaccccatacatcaaacatgactaaagaagaagaagatgaacaataccttatagatgaataatatgcccttgcttgcgcaggtgggaacacatttagtttcacaacctttatgc

SEQ ID NO: 322473 - DNA, 359 bp, Zea mays
aagaagcagagcagcaacggcacagttagagagagagagagagaggcgcggagccagggaagcggagcagagcaacagcagcaggtcgaggaagaggagaagagaaggtccaggagacagcacagcagccaggaagagcaagagcaagatgctgcgcggtggcacgggcatgctgggggtggtgaacttcataaccttcctgatctcgatccctatccttggcggcggcatctggctggcgttgcgggccaactacaccgactgcatccgcttcctgcagtggcccatcatcgcggtggggctcggcctcatggtcggctgcctcatgggcttcgccggcgcctgctaccgccagacct

SEQ ID NO: 322474 - DNA, 133 bp, Zea mays
agctgattgaagatatttttgttcaatctgatcatgcagttgctgctgacaacctacgggagcaagtgagagattgtggaattaccatggagaccacttaactgatagttgatgagaaccaccggatcttggt

SEQ ID NO: 322475 - DNA, 246 bp, Zea mays
cggaattccggctgtgggtttcaaaacgtgaaggagatacgacgctatccttggagcacaattgttatctcatgatgctcggcgggtgcgattccttccattaagaccgttctatagtggtgaaattgtggccttgaagacaggccaagacggggaaaagctcaagtcttgtagggtccctggatatgtaagaaccttagctgggcaagcactttacagaatttcagtggagacaggttctggcga

SEQ ID NO: 322476 - DNA, 308 bp, Zea mays
  unsure (1)..(308): unsure at all n locations
actgattaaaagactgacaagttcatctaagggtgtgaagactgattactcggtaaaggtccaagagttacagagacaacttgcacttgacagagaagaagcagacaaaatacaggatgatcgcgataatttcttaaatctagcacttcaaggctaacaacgttccattgntgttggtggcaaatatgacctacaagtgggtttttcggttgtctcagtgtgatttagtcttttctcaaggcatcaagttgtgaaagcaatgttgaaaaccacaaaaagacgtcccaaaactacaaatgtcataccac

SEQ ID NO: 322477 - DNA, 440 bp, Zea mays
gttgacgagaagcacttaagttctttttatcagagtgggtgtttctttacatcaaaactactctttgttgaagtggaatgatttgtgggagactgagttctgggacaaagttgaaggtggcctcatgattcatgaacgagccaagggcattagggtaatcggtagcttttgacaacttgattaagagatttttatccttcttggccgatagttagtcttaattgtttcgtggatcattaaggacgatcaaattttcgtgcttaaagtcagctcagacctgctagcctgctctgttggctagattctcatcatcggttccttgtatatttttgcatattgcagttttggatgctagcaattgcgactggcttctcctattactatctgaagcttcgaacttggaagataactctctcggccttagcggtttggtgctgact

SEQ ID NO: 322478 - DNA, 89 bp, Zea mays
ctccaatcaaaggattgatagtctaggtaataatccatgttaatgaataaagtgggtggccatcttcacaagagattaaaaaagggcat

SEQ ID NO: 322479 - DNA, 253 bp, Zea mays
gactccgctctgttcatgccgcggaggtagagtccgcgggccggcggtggccacggcgagcctcctcggccgtcgggatgaagccgcggaggttcggctacggctacggctacggctacggctacggccgggtcaggcgcgcggcggcgctgctgctgctgctgctctgcctctgcctcagcagcctgttcctcctgcttctccatggctcctccacgccgctggagcccgcggcggcggcggcggaagcaag

SEQ ID NO: 322480 - DNA, 164 bp, Zea mays
accatattacgacattattatggtttgcatattgtcttgcgttttgagttgtgacaatgtgcaaaccatattacgacattattatggtttgcatattgtcgtaatatggaactcgtttatcatgttcattccatcctcccgttatgtgaaaaataagacaacaa

SEQ ID NO: 322481 - DNA, 424 bp, Zea mays
gcctttctgtgtgtatactgcaattccgatggtctgcaacgtctaccttcagaaaatgcccactattcagctctggaaggacggagagtggaaagcagaagtaataggtggtcacaaagcttggcttgtgatggatgaggtcagagaaatgatccagaagaacaagtgacttagcacccatgttatgcaatggccaatggatattgtaccgtgttcaatgtaaatagagatatcagacgatctcttcatatactaagctgaaatcaaacacaaatagagcaaccatgttggaaataaccaaccaaataatactgctccctactccctacgttcaattctctttgtatatgtatgttggaacaagatggatttttatgccagcacaaggaaacaaggagcacattcatattcagttacgcaacta

SEQ ID NO: 322482 - DNA, 305 bp, Zea mays
gtataaaaaaatttaggctgggttaaaaaatctcctgatttgtcccatgacaaagcattgttctaagcctcgaccccggtaatgtcttggtcattctcaaatgggctacgatgtcgctgctacgccaaagcataggtctaagactcgaccctggtgcggtattttagcatcccctttttagtttcaatagtgtattgttgttgtccctcaagtgttgtttattatttactttgtttgttgcagctgtcggccttccagttgttcaaaagcaacaccagcttcatgtcaccctattgttgtgtaat

SEQ ID NO: 322483 - DNA, 415 bp, Zea mays
  unsure (1)..(415): unsure at all n locations
ctcgttattgtggatggatgagagagaactatgttcctactttttgggatgcaattggtttacagctcatgacacatttgggctgctattttaccccgtgaagtgtgaactccaaccaggcctcttaagttagaattagctaatatcccgaattacagaaaagcaggtggttacaccaacagataatgaactgatagttgttggagatggtcattcaggtaccatatctgttcgtgcagctggtaacgaccttataagaccatttgatgttgctgttagtgtacccacttgagctagacccttttccatcgtacgcaacanattgattatatgacatactgatatttcatgtcagaggatcaatctcttttagttaggaatcgacagatccaagatgtagaaaactctacttttt

SEQ ID NO: 322484 - DNA, 350 bp, Zea mays
ggagaaggagcacaagcacaagcagcacctcggcgaggccggcgccatcgccgccggggccttcgcactctacgagaagcacgaggcgaagaaggaccccgagcacgcgcacaggcacaagatcacggaggaggtcgctgccgcggcggccgtcggcgccggcggctacgtattccacgagcaccacgagaagaagaaggaccacaaggacgccgaggaggccagcggcgagaagaagcaccaccacctcttcggctgaccgtagtaccggccggcgcgcgaccgagctagctagctccggcgcacacaaccacacacctggttaattctgtactgcatgcgtgtgtaat

SEQ ID NO: 322485 - DNA, 259 bp, Zea mays
gccagccagtcgttcgttaagaagagagcgagcgagcaagagagagagagagagggagaagggggaagatcagaacgaagagagggagatgagggggcaaacgcagacagcttccgcggggggccggtggcgaggcgacggcgctgcggcgtggtgttggtggtgggtggccgtggtcctcctgcttggccatttaccgagctgcgcgcgcgcggggctgctggaatccaacccgggcctggcctacaacttctacgag

SEQ ID NO: 322486 - DNA, 301 bp, Zea mays
cccggctcctccaaccctgcccacaccgcggccggagatgcggcggctgtcgtcgacggcggcgacttccgccaggccggcaagttcaggtccctggacaaggcgtgcatcagggacgccgcggacacggtgcctgagagcgagtggcggctgtgcacggcgggcgaagtgcggcagaccaagaccctgctggccgagctgcccatcgtggcgtgcaccgtcgtcaccaacaccgtgctggcgcagctgcagacgttctcggggcaaaagggcaaggccaaggacacgaggctggcgccgt

SEQ ID NO: 322487 - DNA, 193 bp, Zea mays
gaaggcagaagatctggaatccaagatcaagaagctaagagtagcacaggcaaaggcggaggtccgtcaagggaccataaaaaaggaggttctaaattggatgctaagctaattggactaacctttctgaataaatgtgatggccggatagaaaattggatcaccaaaaggtgatgtgtgtggaattaatgga

SEQ ID NO: 322488 - DNA, 178 bp, Zea mays
accacgccatggatttctgcagccacgcttgatatactggtgagctcgagactacatgaggtgcgcgtgcctatggtgccaaacggccaatacctgcatggcatcatcaactgacttcaaagaccgggctataggccaaagactcgatggacaagggtttcctgttgaatgcgaattg

SEQ ID NO: 322489 - DNA, 108 bp, Zea mays
agttctataaaactcttaagatgtatgctgaaaaagcataaccaggtggtaagcattggggttgcgggtcaagattggaacaaccgggaaacagactgatgtaaggag

SEQ ID NO: 322490 - DNA, 401 bp, Zea mays
agaagaaattctacatcccctgtaaaaaagcataaccagctggtaagcatcgcgaactgctgttccatgatcgatcatcatcgaccagaggactgaactgaagacgttgtcacccatcgtgcggccacaggaccccttcttagcaaggtaaataaacggtcctgtccgaggcgcttcaagcctagctctcgtaatgttatcgtcatgtatgtaaatgtgtcttatagtgagcctattttgttgttccaatccttacggtgttccattctgaggtgctgaacctcggggcaacaagaccgaagctggtagggacttcaattggagaactggggttcaagcatgtagaattttaaaatcggttcatttgtctggacaatgttcctgactagtaatgtgatcgc

SEQ ID NO: 322491 - DNA, 312 bp, Zea mays
agaagaaattctacatcccctgtaaaaaagcataaccaggtggtaagcattgtgtttgctgttgagttatggatcacacgggaacagaatgattgaaggaagatctggtcaccgtgttgggcggcttaaggaccggcttttgacaatggtgatcaactgcgccgtcgccggatcctgaggccatgactactacttggacgtggatagctgcagagcggcggtaccgctggcgcatcagcagtacgtgaacggtcggctcgtccatcttcagaccttgtacgtgttcgaggcgagcatgatggtcgtcaagat

SEQ ID NO: 322492 - DNA, 196 bp, Zea mays
gcgagcggccggcctttttttttttttttgaagttaaattcaagcatctagtattcgttgagttgtgcagctaatcaaagattctttacacaacggaaccaaaggatccattgctgccatgcaaaatacagtaactagcttttgacaataatatacccagcatgtatatgcatattaaaaaccacacccaattgtt

SEQ ID NO: 322493 - DNA, 427 bp, Zea mays
agcgggcgctagagcagagtgagcgtgcggttcttggtcatggagcgcggtgccgtcgtgcttgcgctccagggcgccggggttgggcgcgtcctcctccccgtgcaggtgcgggtacggtcgttcttgaggagcaggagggcgatggagcggcggcgcaggctcgcgagtaccgcggcgccggcgaggtgcagcaagatgtacgttcccggctttggggagggttcaccggagcggaaggcggcgatccaccttcagcacttctttaactacatcgctgtcagcattgtcctagcacagcttgagagttacaatagggaagcgtacatggagttgaaggagttcatcagccgcaccttcctgaatgacgccgagattttctgcgaaaaactgatgcgcgagtctccaaggctcaagggactagcct

SEQ ID NO: 322494 - DNA, 425 bp, Zea mays
ctttttggctgttggctagcgaatgcttttagaaaccacctcttctgtttagctattgttggcagtaagtctagcagtgctttgtattatgtaaataggcatttcaaatgtattaattgctgtcattgcattatagtatttgttttgggtgaaaaatttagtcttatctttgtcagtagatttcaagttttgttcgtctttccaatgttgtatagcattgtgaaaccagatggtggcattgtggaagtatttggtaagagttgctattgaacttcacgaatgtaacattgcacattttgtattgaagtacaaacagatgggatgattatccttctttatgttaataaatctgtatagaaacaaaatttgtcattcaataatcaatactattctcagaattacatttctgtactacaacaattatt

SEQ ID NO: 322495 - DNA, 286 bp, Zea mays
cagcagatgagtaatcatcaagaatgagtcaggtgatcatatattgtctgttggctagttgtgaagaatagatagattctttacatgatgtattaaaatatatacactgaaatacaggttggtctatctctattccatggcaaatttcttcttgaaacttttcagtaaacatcaagtttcatgcgcagacgtgtctggatgtacaacatagactggttcctcttcaatattagtttgtgtttgcataaaaaaaaaaaatcatcgagaccctgatgttactgtacat

SEQ ID NO: 322496 - DNA, 435 bp, Zea mays
cgctggaggccgcgtacagcttcgacggccagccgttcgagcgcgtgcaggtcgcggagagggcgagaagcagggcgccaggaagacggtggtgtaccacctggcctcgagctcggacgccaggggcgtggcgctgggcaacgccggcgaggccgagttcaggaaggagaacgcgacgggactgttcgaggtggaggtggcggtcaccggcaagttcaagtacacgctgcgcaagaccaagtgcaagatcgaggccacctgccccctcaaactgcagctcgccacgccgggggcggcgacgacgtcgtccgtcgtgttccagaaggttgactgcgaggtcgccaaatccgacgacaagtactgctagagatgatgatgggtttgcaaatgtcattgatttggagagatgatgtgttgggttttgctcatgcatgt

SEQ ID NO: 322497 - DNA, 423 bp, Zea mays
ctgtcacacacacacacacagacaagtggtttccaaagccaagtgtgtgtactagcaacgagctagctcgggcggcagcaggcagccatcatgtcggaggagaagcaccaccacttcttcaaccaccacaagaaggacgaggagcagcccgccggcgagtacgggtactccgagaccgaggtggtcaccgccaccggcgagggcgagtacgagaggtacaagaaggaggagaaggagcacaagcacaagcagcacctcggcgaggccggcgccatcgccgccggcgccttcgcactctacgagaagcacgaggcgaagaaggaccccgagcacgcgcacaggcacaagatcacggaagaggtcgctgccgcggcggccgtcggcgccggcggctacgtattccacgagcaccacgagaagaag

SEQ ID NO: 322498 - DNA, 392 bp, Zea mays
gtgcggcacgcgttctgctgccgcgaccctttctacgagtgggccatgtacctcattgtcgatgcgccatgggcgccaagatgcttgtacaggaagcccaagattgtccagcacatattgtgttgaaatgaacgaacacacggtatccatatcaccattggcacacaatgacatagtgtaagtcatgttcttatgatgtaacctaccgatgtctcgttgtaactatggacagagaaaggtccaagttcaagcatggccccatatccaaaggatgaacagccaggccctgcagatacatggtcattgttggttacctgcaacactatactgagagctatggatatgttgaacgtgtgtacagctgtgagaacatttataccgaggcatgctgc

SEQ ID NO: 322499 - DNA, 336 bp, Zea mays
ctaagcaattaatacatacatactttgttccaaaaattctactccacacctaccggcgggtcttatcactcgccatggctccctccaccgatccccattcgctcgacaattacaacctactcacgcatctcttctaccactccacatacttctatccctctaaaatactcactcccaacatcaactacctatcaacacatctttaactaattcaataccacaccttcaacattattaacatccctaccaatctcactcacaacttacaactcccctaccattcctaaaacaccaactactagatttacattccaatattaccacctacaactactc

SEQ ID NO: 322500 - DNA, 348 bp, Zea mays
cactcatacctacacaaccaacaacttcattgcattacttgatcacattcttcgttatgatttgtcagttttacatgccttcttgcttaacactttacattaaaacacctttaatactcatattattaattacacaaagactatctatccatatctaaaatgtaacaattttccaaccattttaacattatatactacttctaatacttactcccaaattaataccaatattatcactgatacactatccacattaacatactaacacttatccaatcttatcgctatacactctattcacattacatcttaatactcatttcaaacacattcaaattctacacttat

SEQ ID NO: 322501 - DNA, 308 bp, Zea mays
ctatactcatctcctcactctacctgattcgaaaactcggccactcatgactgcccgtagctgggatatcattgctctcaggtcacacgcacatgcatcttctcttgcagcacactcttcccgtccgcctggccctgctaatctacaaaactcatgcccgccatcatcaatatcgtctattacactcatgacaattacacactctacacctcattcgacattcacaatgactccgacttacaccccaactgtcgactcatttgggaaacaggatttcacagtcctgcacctactcaactgtcctcatt

SEQ ID NO: 322502 - DNA, 337 bp, Zea mays
ttgcgaggcactgcaagcagtactgataaaactgaaataacctagtttacgctgattactgggtcgattatccaaagaggcctgcagacctgaactatatatgcattcttcacgaagattacgtgatacaactaatgaggactgaattggacctacgtgtgctcactgggggaatctaggctgttacggttggtacttaaaggcctacataacgtactacataggctattgcatactatatgcaatacgatgcaatataggaggccctctgattaaaccttgttggcttcaacgtggacaatcgttctataagagacctgcttacttactctttcat

SEQ ID NO: 322503 - DNA, 176 bp, Zea mays
acactataaatatgctgcacaactcataccaacttactcatattccctcattcaacttcacatacattcatatcaacataataaatcctataatagatcctaatttctcacacacataaaacacttcaatctacaactcttaatcaaactaacactctatctcacatcaatctaac

SEQ ID NO: 322504 - DNA, 202 bp, Zea mays
cggacacatgggccaacggtttaacccgatcgagcgcggcaacgcaaacctgcgatgcctgctgagagcaagggatggcagcctcatggtcagtgctgtcggcagtcctcgtcgatgcacaagtggcttctgccgcgccggtcacagagccaacgttcactctgggcgcctatgaactacagattccgctctgatgatgcta

SEQ ID NO: 322505 - DNA, 250 bp, Zea mays
cggacccttccgccaactgtataacattatcaagcaccgtaactcaaacctcggcacgcctacttaaagcaggggatcgcaacctcatactcagacctctcggcagtcctcgtacttgcacaaatcacttctgccacacctgtcacagatccaacgttcactttacgcgcctaagatctactaattaccctatgatgatgctaacgacgtagtacattatcaaacaatctcaccacaaaacttagctaaa

SEQ ID NO: 322506 - DNA, 385 bp, Zea mays
tcgctcagaggcggccttgaccttagtaagcgagaacccagccactctggtctctctctggtctggctctgctctgctcttgggtctcgcgctcgcgactcctcgggcggcgcgcctcgccggtcgccatggcctcctcctcttctgaggttaggcccgcgagcaggaggatcgttgattacctcaacgacggcgaggagctcggggcccagggggcggcggtggagacgccgccgtgttcccctgctgcggttgcggtggggaaacaggccaagtcagcgctgcccaggttcaggtggccgcggctcgtcaggctgcggagagagggaggcggcgacgaggggaagccgggggtcgtggtggagaagggcgacgacctccacgt

SEQ ID NO: 322507 - DNA, 124 bp, Zea mays
ggggcttggaacacattctgatattattcaactataaagttcaagctatatgctctttgttcggattgcaagctaccatgcaaatgactgacaggaaaatgatcctagccacacgcatacaaaa

SEQ ID NO: 322508 - DNA, 358 bp, Zea mays
ctccgcgcattttccttgcaaccgattgcctatccccctcccaaccaaagaccgatggcgcccaaggccgagaggaagcccgcggcgaagaagccggtggaggaggagcccgcggccgagaagacgaccgccgggaagaagcccaaggcggagaagcgggtccccgctggcaagtccgccggcaaggagggcggcgagggcaagcgtggcaagaagaagggcaagaagagcgtggagacgtacaagatctacatcttcaaggtgctgaagcaggtgcacccggacatcggcatctcctccaaggccatgtccatcatgaactccttcatcaacgacttcttcgagaagctggccggcg

SEQ ID NO: 322509 - DNA, 412 bp, Zea mays
  unsure (1)..(412): unsure at all n locations
gcgggggnggnnnnnnnggnnngnnnnncttttttgactgctcaaaatacttcatattaaataaggttatacgggtcgtaacgacaaatttagagcctcaggactaagttttagagttctaaaagcttcagtgcactttagctcgctttaaaagctctaaagctttaatttaaggtgggcttataatgtttagaggtaacatgtaaatcatttgtttggagccttaactttaaaacttaaagaggttaattacccaaaaagaccccagggccaaataaccttaaccccattgccttgggtcccagcacggatcaaaatttcttcaaacgagatgaagaacggaatggttcgtcgcttcacatatagcgcgggtgtgccaagattcaggacggaaagttcagtttgtcaccgc

SEQ ID NO: 322510 - DNA, 424 bp, Zea mays
  unsure (1)..(424): unsure at all n locations
agccacgcgtccgggggcttggaacacattctgatattatgcaactataaagttcaagctatatgggcgtgtttggatggcagcctcccatgcaactgcctgacaggcaaatgatcctagccacaggcataggaaatcgaacgcccggcattgttgcctgngccaggcaagaaactgataaaacttaggcgtatagtgctggatgctccatccactggacatacacttaagcttctgtcagcttctgattggattgaaatgttccttactttgagcattaaggtgcttcggtagaaggtacgagcccgccatcttttcgacctatacgtgcgagatgtccgtgcttgaggtagctctatgtcgagggaaagacgtcgcctagagccatcccatctctgagcatcgnggtctccccgatgtggat

SEQ ID NO: 322511 - DNA, 347 bp, Zea mays
aagggatctccggtccccgggccccggctcctcccctcccgattccaatctggtctcaccgggcctggcggcgagggagagatggggaagaaccaggcgtacaaggcgatgcagcgggcgcggctggggtcctcgtccggcgcgccgggcgccgccgacgcccccgaagacggcatggaagaggaactgaaaaggggtgagctggaggctgacaaagacaaaatgatgagagagtatagagctcaactggatgctgaaagagctcaaaagctagcaaacggaagaaatcactcaaggtcaaactcaaaatcatcatcttccaagaaagagaggaaggataaggacgc

SEQ ID NO: 322512 - DNA, 166 bp, Zea mays
caaaatgcggtagcattggtgaagcacgagctgtatttgagagcattacatgcaaagacctggtgtcttggaactacttgatctttggatattcacagcatggccttgcgtgagcattgactatactggctaagagacttggatggacacatgataccggatgcac

SEQ ID NO: 322513 - DNA, 132 bp, Zea mays
  unsure (1)..(132): unsure at all n locations
atctgaggcaagatattgatcagctagtactcagaagacactagcccttcgtatctgaggataggtnctacggctcggctattctgaacggtaaaacttgcacaaggcaactctgacattacaacaatggat

SEQ ID NO: 322514 - DNA, 180 bp, Zea mays
agcgccagcggcggtcagcgtcagcgtcagcgcccgaccaaatttcccccctcacctcggcctgggccgtcgtcggcatggccaccgacgtgctgcgcgcgcgcaacgtcctcttgccggcgccgccgcagaggatccgggcggcggctgcggcgcgccggagggcatctggtagcgaca

SEQ ID NO: 322515 - DNA, 189 bp, Zea mays
acgaatgtgctgcctcctaatgccatagtttgaattggctctgagagttctgcatgcactgcggaaagaggacagtatcacataggggggaagatgaagaatacaagcaatgattggatttacccgaaacctatgatggattcaaattattggaacattcactgcatggcttctggtaacatgcaccac

SEQ ID NO: 322516 - DNA, 424 bp, Zea mays
gcagctcaacattgaagatgttgtgctgccagatattaaaagtacacaaaaacaggatggtgcatcaagtgaaagaggccctggaaatgagaatgtactggatgatttatacggggaggaaaatagttcaaattggttgaacgaagagcatgacgtacagatggctgatgtggaagaagagcatggcgaacagatggatgatgtcgaagaagagcatgatcttggaaatgatggtggtgatgatgatcttggggatgtttttgattggtactaagttgatcatggctggatgatgtggaagaagaacctgatcttggaaatgaatggggggaatatgatcctggggaatgttttgaatggttctaggttggacatggctgggaataagactcacggatttatgattatgattctgctaaatgtt

SEQ ID NO: 322517 - DNA, 449 bp, Zea mays
gtgaggttctccggggttcggtttcgtgggtgagcggatcgagatggcggcgtcggatgttgagtaccgctgcttcgtcggcggcctcgcctgggccacggacgaccactccctccacaacgccttcagcacctacggcgaggtcctcgagtccaagatcatcctcgatcgggagacgcagaggtcccgcggcttcggcttcgtcaccttctccacggaggaggcgatgcggaacgccatcgagggcatgaacggcaaggagctggacggccgcaacatcaccgtcaacgaggcccagtcccgccgcggccgtggaggcggcggcggcggcgggtacggtggtggccgtggaggcggcggctacggcggtggcgggcgccgtgatggcggcggcggctacggcggtggcggcggctacggtggtggcggcggcggctacggtggtggtg

SEQ ID NO: 322518 - DNA, 300 bp, Zea mays
gtttttctttctggttattatatctgccgcaggatgtatattttgatgatgaatctgcagagggagtaatctcctcccttcgccttggagacgaccaagaaaggtttattctttttatatttgatttgactactgttcttccttttgtaagcacatttggtgtttgatacaagaattggctaatgaagatgtcatttgcagtggctcgctctttacaaattccaactggtttgcatttgacgaggacaaggcactgaatgatggtttggttagcccagaagcttccccatctccaaattc

SEQ ID NO: 322519 - DNA, 213 bp, Zea mays
accaacaacaacagcaacggcgtggaggtgaagagctacttcaacaagtccgccgggagggcggcgagcagcaacaacaacaacagcagccacgccggcggcggcaacaagaagggcggcgccggggagtacggcaggaagaagcacgccaagagcgatggcgcggcggcggcggcggccacggacaagcagcggttcaagacgctgtcggcg

SEQ ID NO: 322520 - DNA, 303 bp, Zea mays
gcttctccgagtccatgccccagccctacacccgcgcccagctctccgagaagctccggcgccgcaagaacaagttccgcagcatgtccgcgcgcgtcgcggagggcctagacccggctcgcctcgcgccgcacgaccgcgacgtgctccacctctgctccaggctgtgggaccccgccaacgccgccacgtcgcccttcgtggccagcgccggaacgtccgggaacaagcgccgccgcgccaacctgcagggcacgtcactccctcccccagacgcgtctggggatagcaactcccatgact

SEQ ID NO: 322521 - DNA, 250 bp, Zea mays
caaagaccaagcaacgaaagagctgtcgacaatgtgagcaataagcagtcatcagatgagaagaagtcagagaccaagcaacgaatgagctgtcgacaatgtgagcaataagcagtcatcagatgagaaaggaacatgccaagagcagtcttcaagagctggcatgcctgctttagtgattgttggggaaaggcgtcacatgcggttagtgggtcgtgtagagagatgtagtggctggtgtcgggcccgt

SEQ ID NO: 322522 - DNA, 179 bp, Zea mays
cacttcacgccctacctcaccgacgcgctcctccaggactgccacacgggctacctctagctccacgtcaaagactacagccacgtgcgctgcaaaatcagcagctggatctccggccactaccacctcttcttcacatgccccgcgtatctcaccacacccggcggcaacatgcgccc

SEQ ID NO: 322523 - DNA, 278 bp, Zea mays
cggacgcgtgggagaaaaacccaagaaatatctctgcggccctgctcgtcccgagccgagccggcgagatggctgcgatgtctcgcgcgatccgcatcttcgccgtcacgtcccggcgaaccctgaccgctgcttcggggccggctctgccgaaggaagcggccgctgcggaagcgctgatgagggcagccgcgcccgtgcgcatgggacgggatctggtggacaggaagctcgtgcagcgggtgctcctagggtgccccctggtggggaagggctcc

SEQ ID NO: 322524 - DNA, 286 bp, Zea mays
cgacggtgcatgaatgtcacgtcattattccccaggtggtgaatctccaggccgagctgacctggctgcgagcacacctcgccacgctcgagctgccggccccgcccccgctgccggccccgccgcagatgcccatgccaggcccgttctccatctcggacctgccgttgtcgaccagcgtccccaccaccgtcgacctgtccgcgctcttcgacccgccaccaccgcagtgggcgacggcgcatcagccgcaccaccaccatcaacagccgccgcagcaccacca

SEQ ID NO: 322525 - DNA, 427 bp, Zea mays
ctcagaggtgggttggcttctcctcccccaccggttcgtgttcaggttctggttcgtgggcgagagggaagagatggcggcgtcggacgttgagtaccgttgcttcgttggcggcctcgcctgggccaccgacgaccactccctcaacaacgccttcagcacctacggcgaggtcctcgagtcgaagatcatcctggatcgggagacgcagaggtcccgcggcttcggcttcgtcaccttctccacggaggacgcgatgcgcagcgccatcgagggcatgaacggcaaggagctcgacggccgcaacatcaccgttaacgaggcccagtcccgcggcggccgtggaggcggcggtggcggatacggtggcgggcgccgtgatggaggcggctacggcggtggcggtggaggctacggcggtggtcgt

SEQ ID NO: 322526 - DNA, 368 bp, Zea mays
cccacgcgtccggacaaatttgctgcagtctgtatactccagggttatcttgacaacatgaacagaaaactgagatccacagataagtctgaagcataaaggtggcacctaagattccagtttgaactaaaccaaagagcaagggaaccttttttttttgatagaacaggaggggagggcccctactggaaattttatttaaaatttgaaaagaaaacaatgtttagaacaaacaagaagacaaattacagggggttaaggagagtttgtactgccattgatttctactgccattgttgaagccaagtcgggatggcagaatcaaatctatccaaagctctgtgaatgacaaggagcaatttatttgc

SEQ ID NO: 322527 - DNA, 334 bp, Zea mays
agcaggtggtcagatctacctaattggtggttttggaacaccacatgataagattggtgtatgagtcattaatcatcatgacggtatcattggctttcgtctagagcatgtagatccatgagtacatacacaggatctttcatggctactaaagagaacacatatggactctcctgctcatataaagatacgacaataaactcacgtttcaaataatcccgagcatgatgacaaacgatttttatcccccattgcataacacctgctatgaccttttgactaacatacatagcaatgaggacacttaagctttgttataaagtaaccagataaa

SEQ ID NO: 322528 - DNA, 432 bp, Zea mays
agcaggtggtaggatctacctaattggtggttatggaacaccacatgggaagagtaatgtatggggcggtaatcatcatgactttttgtttggttttggtatggagcatgtagagccatgagtaaatacagaggatctcttatgggtactaaagagaacagatatggtctctgctgggcataaaaagatagggaagtaaactcacgtttggaagaatcgtgagcaggaggagaagtgtcttttatcccccattgcataacacctgttttgcccttttgactagcatacatgggaatgaggacacttaagctttgtgatgaggtgaggtgagaaatgggagttgagagacagacttgagagggagagatgcaaagagcagaacaaaatgggcagcaatattggctatggaactgaagcacgagcacatggtag

SEQ ID NO: 322529 - DNA, 373 bp, Zea mays
catacattcctgcacgcgaagccttcgcgcgtggtcacgatctccctagaacactagagcgtcggagggtccttgtggtgagtgtccaacgcctatagtctaacgaagtactgaatcctgcttgccaagatgcctaatagcgttggctactgccctctgctgaatgacactgatcatggcctaaccatatgcctgctaggcttcacctcgaacagagtcaaagagtgtcagtcatgggaacgcgtgccactggaactacgttcatggtgaaccaataccgatatcatgaacttactaggacgcacatgcacctgccgaatatagtgtccatatgtgcgtttgaaaggccaggcgcttgatctgatacgctttt

SEQ ID NO: 322530 - DNA, 124 bp, Zea mays
ggttcataggaagcaaatcacctaggacaaggtgaaaccttctctgtaggcaagcaggcaaaagggaatagatgttcccatcctgatcaaaaggaataaaaatattctgaaaattgccacatcc

SEQ ID NO: 322531 - DNA, 171 bp, Zea mays
cccacctcaccttcccctctcccgtcgtcggtatggccaccgacgtgctgctcgcgcgcaacgggctcttgccggcgccgccgcagaggatccgggcggcggcggctgcgctcctgtggacatctgggagcatctggcggtaccccttctctaccaataccaggatgatgt

SEQ ID NO: 322532 - DNA, 327 bp, Zea mays
gaaaaagccatccggaccgcagccggcaacccgtccggcaaggtgcgactcgatctgccgacgctggcccggatggaatccttgcccgatcccaagcaggtcctgttcgacgccctgcgcacggccagcgagctgtctgccaaccggcttcgcaagttcaaccccgaagagaagcggcatcgtgtctccgacctgatggacagcctggaccggctacgccagattccctcgttcgcgcacctggaagaccagatccgcgcccatttcgccgcctgaatttccccatgctgcaattcgacctcctcgccaccgaaggccatgcccgcc

SEQ ID NO: 322533 - DNA, 421 bp, Zea mays
aacactcgtcctctagttctagatcgctatcggactgatgtatgaaaaggatggttacggactaaaaaaaaaaaaaaaaaaaaaaaaaaaaaaaaaaaaaaaaaaaaaaaaaaaaaaaaaaaaaaaaaaaaaaaaaaaaaaaaaaaaaaaaaaaaaaaaaaaaaaaaaaaaaaaaaaaaaaaaaaaaaaaaaaaaaaaaaaaaaaaaaaagagggggcccctttaaaagcaccaattttaactaccctttgcaacaaactgaaaaactttttaaaaggcgacccaaatttaaattaatggaacttgtttaaaaaacggataaattggaaaaccctggtattaaccaactttatcacctttaaaaaaaaaacccttttgaaaatatggttaatatacaaaaagacacaaccaattgatcttt

SEQ ID NO: 322534 - DNA, 236 bp, Zea mays
ggctgatctcactatgcggccactgaccatggccgacccgcctagcagcaaccttggcataggcctacaatacatcgacctaggccaagaacacaaatgaggagtgccaacgctcgtccatggctatgtagacgaacaaagcgcaccgcttcacgctgtacaccaacgacgagcgaaccgacgccgcgcttgtctaccagggacagcctccaccagctaaggatacatcgagctcg

SEQ ID NO: 322535 - DNA, 393 bp, Zea mays
gttcacaacgtggtacatgtggctatcgctctatgaagcgcaacttaagatctctcaatctaggactgacttatctagcggtaccgacagcgtgtacatctaattcacagttgtcgtcaagcaacatagtcggatatgtatgtagctctctaccactactgggcatgatacgattcagtactaaggtgcatattgcacaagcaagatatgaagattcatgtgtcaccaatatctcaattactagggacgtgcattacatataatcaagaccagcttgatgctacacgcacgttactcagatatggatgatgatatgtgtagagaatgaataggtctgattctgattgctgtttacaggttagaggtgcagtgcatttacaaagagatataaga

SEQ ID NO: 322536 - DNA, 223 bp, Zea mays
ctcacactcgcgaactccatttcgatcacattctaaatcaacgcattctcgtttatgtcctccagcattctctcagggtcagggccaatatcacaattggaaccaatgaaagacgcagcatcggaagtactctctcacgaatctcctcccataatctcctcgctacatgcgctggccacgctcgttcctttcctggcctacattcacgctttacctttgctcc

SEQ ID NO: 322537 - DNA, 375 bp, Zea mays
aattaccggatcgagcacgcgtacccttgaccctaacctctctcacattaaactttgtcttcatgaacacttacacatgggcctccagcgcaactttctacattcaggccgtctacaatacccaaaccaataatcagccccatctaaactcttagatctaactctaatcttcatacaatctagctacatcccttcttcacaactactctacctaacatcattcccactaaacatgtaccagcaaacccaattaagatctacaatataatacctaatctacaacatctgcaccatcctactaattctcaacaccaatgtgtagaaaccctactatcataccagacaaaaccttatgactaccttacatacttttac

SEQ ID NO: 322538 - DNA, 377 bp, Zea mays
cgggttcgtgaggttctccggggttcggtttcgtgggtgagcggatcgagatggcggcgtcggatgttgagtaccgctgctgcgtcggcggcctcgcctgggccacggacgaccactccctccacaacgccttcagcacctacggcgaggtcctcgagtccaagatcatcctcgatcgggagacgcagaggtcccgcggcttcggcttcgtcaccttctccacggaggatgcgatgcggaacgccatcgagggcatgaacggcaaggagctggacggccgcaacatcaccgtcaacgaggcccagtcccgcggcggccgtggaggcggcggcggcggcggtaacggtggtggccgtggagccggcggttacggcgtt

SEQ ID NO: 322539 - DNA, 140 bp, Zea mays
cacatgcaagaaaggattggaagatgagaccctcggtatcaaccgtagttaggccaactacagggtccacggccttgtccttaagcggaggcccaatgcgctgaattactgttcttcgtaactagacgcagcatacgcac

SEQ ID NO: 322540 - DNA, 377 bp, Zea mays
acggcagctgataatcaagatattgcgctgtttgtatgacaatctataggacgaggtagaggtaagcgtggatgaagaatgcagctcccaagagtcttacgtatggcgtagagtaacggggatgatttggccgactcaaattctcgactttcagtgattcattaataacctgtcgatactgatgcatcaacgtatattcatactgcttgaacattttattctttatctagctatgtgatcaactatgtttagtttttgtttgactaccagtcatctctaaagcagtttttgtaggatttcaaggatgatgggacagcttcttagctgtcacttgtaacatttaatatcatgcttgccttacaaaataatttagaatc

SEQ ID NO: 322541 - DNA, 282 bp, Zea mays
tacattaccactgcttacatgccctacatcttcaacttcatctcaattctctgacaatgttagctcagactcataactctcactctctcaaatacacttctatccctcgagaagcctatcaactactttagcatcatgaaccacgaatagatcccatttcgtgatgctaacacttactacgtcttaaagtcctacagtttattaactgaccatgacaaagcttatggacatctgaaagatctgcctaaaataatcttatctatctacaattcttacattcac

SEQ ID NO: 322542 - DNA, 347 bp, Zea mays
gacccactcgtgcgatacatcttccagaactaggcaaaagctcttcaaggctctcaagttctacaactctctgcggggccatgggcaccttcaagaagggggccgtcctagcgcttcccacggtcgccaccgaccacgacctcatcgtcaatgccaactagatagcctcacgccccgacattccaccacgtcactgtcccccgactcaaaaccctcgtcgccgacatcctcagtttcagttcattacgtatatccagtattagctaccatctcttcgcctgtacgatgacaccgcttaattccctctattaacccagctctcgtggagatttccccccgacgcatta

SEQ ID NO: 322543 - DNA, 404 bp, Zea mays
cataaggatgatgacggattcttcctggactttatctgggactatgctcttacacacttaggtgataccaagcagcacgcgggagggtctatgactttcacattgcctgcgaagttcatccattgataaacggacactatccacagatcatgcatagatctcaatgaatcgatcaggtctgcctcagcattcactacctgaacatgctaaactggagaatcgctcccctagactacatatgctatcaacgagtacacatccatctacatgaatgatcaaaaactgtatcacctgactcccaataactactctggccattgacacgatcactatactgctgtacacaattgcatacccattggaccacatgcgaattctaagttgctcttcattgcccctacaat

SEQ ID NO: 322544 - DNA, 386 bp, Zea mays
atatgaactatgaaggaatgctgatggtcaggatatccactggaggacaatagttaatgcagactcgagagtcaacatgcctaaaacgatgtatgatcatgagtgcgttatatattatatattggctctggttacctgtactatttagtgcatcatttggtacttattttaatagtccaacggaacatagcgtcatactgtagccattctgaggatagtgcgatactattagacacttagctatcataggttaccagttcagctcatggtagcgacatttggtgacgcattacagttaagcttgctgcataacgtacgcatgtcctatgtgatctcaactatacgatcaactcaccatatgtgaagacacaccaacttatatccaa

SEQ ID NO: 322545 - DNA, 424 bp, Zea mays
taataatcttctaatgcacatccttgctgatttattaaacagacctgttctcaagccaacgaacatataaaccacaggcctgcaatctgcatatgctgctgggttggctccaagagtttgcaccatagtgaaaggtattgcagatttgaacaaggataacacgaccgtcttaacgccgaaactggatgaaagcgcacatagagaaagatttgctaattcatactacaagcttctgtacaagatcattcaatatccatgaactttatctgtcaatttatactgtcaactctcctctatctggatatggaagctgcaaatgaataaactggtcttcgctgggactaatcttaactgcttgatatttatatataacatcacgatgtttataaaagtgagtacatgaatatcctcagattttcagcac

SEQ ID NO: 322546 - DNA, 432 bp, Zea mays
cgggaggcacccagatccacgctctctccgccgaccacgcaccaactctccatggaagggtgccaaccgcgccgagcccaacctcggctctccatggaagggcgcggtccacgccgaccccgacctcggctctccagggaagggtgcggtccacgccgaccccgacccggccaccacgtggctctacatggaaggcgctcagatccactctctcgatccaaccaccgagcgcgccccaacctagtcgctccatggaagggcgtgactcacgcacgacccagacccgactaccacatcaactgtccacggcgacatggataggcccacaccggttagaaagtcctacacatcaacgctggacctgctcatctacacggagggcgcatagcatgagtcgcaacagccgaccgcatcagacgccggaagctctca

SEQ ID NO: 322547 - DNA, 318 bp, Zea mays
cttgtttctggttcttttatgatgattgacgcaacaacaaaaatgcacttcatcgattatggcggctacctcgactgacataatgcctacctttgggtatgcttcttcttttctttaatctttcgcggttctatgtactaatggtcatcttgctaaattcacatgtgcacctttctattggcacctatacttttgtaccatttttctggattaatctactattaaaaatgccaaaatatataacgatccaaaaacgtgataggtttttttcggtagctagctttgttaatatgctggaaccaaatatttttaagaaac

SEQ ID NO: 322548 - DNA, 429 bp, Zea mays
cgcatcgatgaagaattgtatgtggtcaagaataacaatgacttggaacaaattcaaagggagcctgcaggacagttgataaatgaaattgataatgcaaggttttatttgtcaaatgaggtaaatgaaggtggtcacagtcccataaattctgatgatgagggtatatatgtgcataggtctctcggggtagattatgtgaggtttgacgatgctaccatgagacacccaattatggacgttggaacagtttttaccgatgtgaagcagttcagatcggcactaaagaatttcatctcactactggaatgcttgctgttttggtggtttcagtaattaggccacaaggtgaacgcctgctatgttgagatgaagtaggaacgcctgctgttttgctgttttgtttgcctaagctagctgcttaaatca

SEQ ID NO: 322549 - DNA, 126 bp, Zea mays
acggcttctactggaaggaccccaagaacaacctgctgaagttcatcgggattggagcgtgaggcgatggactgacgactgtacacgagtacggatattgcttaggagtctatttggacagacata

SEQ ID NO: 322550 - DNA, 406 bp, Zea mays
ccagggtacgccttcgaggaactgaacccggttcagtggcggtgcagcggcacgcccaggggcctgataccagtggccaacggcagcgaggagatggaggtgctcgtgaccgtcgacgtgctgcgccgggccaaggcggacgtcgtggtggcgtcggccgaggaggtcgtcgtcgcgcgccacggcaccaggatcgtcgccgacgcgcggctgcaggacgccgtcggccagcagttcgacctcatcgtcgtaccgggtggcatgccgggcgtgaagacgacgctggcagacaaggtggagctcatggcgctgctgaaggagcaggcggcggcgggcaaggcgtacggcgccatctgcgccgtcacggcgcatgtgctggagccgcacggtctcatccggggcagca

SEQ ID NO: 322551 - DNA, 209 bp, Zea mays
acagtcatcaactaacgaacgaactcttgctcgatcacgagctagctgaggtcgcgatgcggtggctgaacagcagaagacgccgagcggggtggcggctggtggcggggcgctgctggcttgccgttcggcggatcacctgcgcaggtggggtcgcgctggcgccggctcctgacgcgacggaggggcgagcgctccctgtcgagctg

SEQ ID NO: 322552 - DNA, 296 bp, Zea mays
cgttctagattccctcctttttttttttattttttttttttaaccatttttttttttattttagtaggttttattttacattttaatattttattaacaacttattatctttatctattttctttcaaaaataattcacactctatatttcctaacacaactcatcacaataccattccatactaccattttaacaccactccttatactccttaacaatatcagctcatgaatacaactatatcatactctcacactaaatactaaaatctataacgccgtctactcattcaccc

SEQ ID NO: 322553 - DNA, 334 bp, Zea mays
ctggggcgccgtcatattcgggccggatgatacgctttggaacggtggcacgtttaatctgagttggcagtttacacaagatgagccgcaacaagccatcaactgttctatttgtccctaggatgtttcatccaaatatatatgctgctggctgcatctgtctggatatcctacagaacgcaatgtagttctatatatgatgtcgctgcaattgtaacttatatccagtgcctgctaagcgatccaaacccactctccgctgcagactcagaatcagcaagagtgttcatcgataacatgctctagtatcaaccgtaaagtccgtgaaatcttt

SEQ ID NO: 322554 - DNA, 298 bp, Zea mays
tattcctaatagcttattctcattcaacccatgtgaaccagaaactgagtagggccaacctcactatagtagccgacactaacatcaaccttctacaacgtccaccctatccaaacatgaccacatccaaaacctcaacatcaatactatcatactctaccatgcagacctaaaactcaccaatatcaaaactcaacctatactaacttataacaataccagatgattaacttcttgattaaactctcacactggatcacaacaattctccaacagacctacctcatcattttatact

SEQ ID NO: 322555 - DNA, 215 bp, Zea mays
aatgagctcggcatgctaccagcaaattaacaccatgcttacgatacctcagccgatggacttaatactgtactaacattggaactgaccctgcggcagttcatctcacaaccgcttgagcgactcctcgcttcaactgtgatgatcaatgacaatcatagtgcagcagaccatcggaaccatgatacacgacgtacagtacatgctagaagaca

SEQ ID NO: 322556 - DNA, 427 bp, Zea mays
gaacaagtgaatatcctggcttggttatggctagtgcggcctattctacacagacaatggtaagggtttcattgtggcacaagagagtcttaaatacatttcaacattttccattgtttcagcacccagttgttggtagggcaggttcatgtattaaacccaaaggcaccaggcttgagcgaggtattcgtgacctccagaagattgctgcagaatgcaaatcagggaaagatccaagaacatgagctaatgaatcgcctcatgagcatagttggacaccttgttcagcgcaggacactatagcttgcagagttatggcctaaaggttacatggatagtgttggaatcaaagatgccatttatagatgaagggagcgaagaatattatactacagccagcaaaatgttcgcagcgaagagagaatga

SEQ ID NO: 322557 - DNA, 55 bp, Zea mays
aatagaatcttgatagagcatctattatccaccgttagctgctgcaactgtttcg

SEQ ID NO: 322558 - DNA, 269 bp, Zea mays
tcgcggacgcgtgggtttttttttttcatgaaggaagctagaagctcgcgctttgtgccgtgagcgcgtcgaactagactagatgtttacaagactatgtcacacggtggaacataacgcacggtcgatcgggccgtcaggagacgaggaccactgcatccgacttgatgctcaactagtggaaatagcagatgattacggtgaccagctgttctggacatacttgagctttgtgcaaggtggtattgccgcaagagaacttcctctat

SEQ ID NO: 322559 - DNA, 179 bp, Zea mays
attctaaatttgatactgtgattagtttaagggaatgaaacactctcatggtggtttcaaatgccatgcgggggtgaaatgcaatatccaagcctacatggtctctaatagtcctatccttcatttctaaatcacatacaggcaagtcaatctgattacctagcaatgaatttccaaaa

SEQ ID NO: 322560 - DNA, 435 bp, Zea mays
cagccagtcagcctccttttccaaccctatattccaaccctcctatatccacatcgtgtgtgtttgattggatttgatgcgatttgttgcgcttcgtcatctggtcgttgggaggattggttctgccaatcggttcccaacggactcgttcccttgaagctacataattccgttgtatcctgggccggctctttatcgtgtgccttcaattattccccatgaacaggggcaccgcgcggctcttacatacatggctctgttagaatgttgttttgtgctattgtttattcttgtctttcacatgatggctgtttagattttgaaatgatgcttgtgataacagtgacgaatccttacatagttacagatctgtgagattgttgcaagaagatcgcatcattcaaagcacatctaagctgacctgtcttcatttca

SEQ ID NO: 322561 - DNA, 198 bp, Zea mays
ctattctgatcgcgagcgccgcccttttttttttttttctttctttatcttttttttggtttttggtttttttttttttttttttttttttttttttttttttaaaaaaaccctcaatcaccaaagcattccctaaaaactcccccactccgccacatctacaccccacccatttaacctacacaaactaaccaaaaa

SEQ ID NO: 322562 - DNA, 212 bp, Zea mays
aaaaaaaaaaaaaaaacaaattaaaaatttaacaaaaaaaaaacaaaaaaacggaaaaaggtaaaaagaaggcggtgctcccggttcctcccttcctgtgatctccttccctagtcttcacccctatatcccttgacatctgactgcctaacttacctacgtggctcaccttactcacattgaaaaccacggtgacacttccctatccaaac

SEQ ID NO: 322563 - DNA, 384 bp, Zea mays
gtaggggatccacgcgataaatctccgtattctgatcacgctgaggattctactcagccggggcgggctcgacgagatggcgctccggaagctcattatcatccacattgacgaacgtgtgcacgcaactatgacggcgaccagacagtgcactgaggccaataactcggtgcggccgtccaacccgaatgctcctgtatgggcgctgaatacgaagcggacccaatacgtatagggctgtgacgcatgaaaccgatacacctacatcatcgagcgcatgacgaggatgaactaggcacggtcttggatcctgtgagaaagcgtctcagcgtcagcgtgatcatttttactgtaatcagctgacaggtcatgatcgacatgcaa

SEQ ID NO: 322564 - DNA, 372 bp, Zea mays
atttccgggtcgttttttggcagtttgatgatctttgttggtgctgtataggtttggtgaggcgttgctcctttttcttaggtgggtcgttagttcgacatatccttcggtctggttgtccacgatgtaaaatgtactcactgaatagttgcttatggatggcctgataaagtaccttccaatttcaagcgccggaaaagaagagtactgataggctacatgaagatcactaaacaccactgtacggtctaagctatcttgaaaaaggcttcttggtgggctaaacgactaaagaaaatatacatgactgcgtggtcattcaaacatcaactgatctatacagtaaccatgttttaagtgagttgccatgct

SEQ ID NO: 322565 - DNA, 467 bp, Zea mays
gaaagaagttcttctttatagaaaatgatttctagattgacacctcacatgcatatggggctgacaggaaacaggcgagcttgagagctgtagacattcagcaaagataacgccacacaaactgtacaaggcataatgacagtccctcttcatggtcggagaaatttggggcaatgactacaacctttacctacctctcatctctagagtgccgattgaaaagatccgctcattcacaccaagtgtcattgccaaagtttcttcaacaatcaccgtgaacatctatgtcatttcatatgttgctgctgctgctgatctgacatattatatagatagtaatgtaactgattggtgtttgccggaattgattacgttaggagccaagactctggtagttcctgggaacctcccaactaggtgtgccaaaatatatgttgatattcaagagtgatgacagagaagattat

SEQ ID NO: 322566 - DNA, 141 bp, Zea mays
tactactctgtccctcgtctccccaaactccatctacagcacaatggactccatcctctcgtagggctccattaaccaaggtcccacacccgatctcgatcacacaccccgcatcccaacacctacactgcacactcacac

SEQ ID NO: 322567 - DNA, 464 bp, Zea mays
  unsure (1)..(464): unsure at all n locations
gcaattgggtaccaagacctgtacatgatgcttaccatacaaaaacaaacggacctaaaggggaaccaagattggaactgaacctgtgggatttcagcacagaacctgatgattgtgtccttgatttaactctcagtctgaagccaagtttttctggaacagaccttggtaagcatgttccacgacgtacagaagaggaaattctcctgtacccgggatttgagaatacccctgtgaagtccggtatgtcccttgcgttaatttgctgagtctttttttttttttggattgtttcgtcgctcttgcccaccacagctaaatgtcaagcatggtatcacatttgctaaccctgaaaagggggctaacaattattgacatattattgacgccatgtcaggtttttggcctctggtgccatctgatcgtnccgttggtgatgttcctgccataccatcctggcagca

SEQ ID NO: 322568 - DNA, 407 bp, Zea mays
  unsure (1)..(407): unsure at all n locations
ggactagcaaggaggcacgggggagaaaacttgtctgtctattcaaggaatcccaatcacaggagtgccctgaggagtcggaatcatcgagcgctgatgtgttcgaaggcaacccgactgaggtagcaccagctcttgagtaggactagcaaggaggcacgggggagaaaacttgtctgtctattcaagctttagcaccagctcttcgcgtttgcagtatagatgtaaaaaggtttggttaaaatctgatgctacgaaaattggctggtaattattttgtactggatttccccttagaatcaaatatagatggatggctagtgcctggtggtgatgggattcaactgtgttattccaaaaaaaaaaaaacgtgtggtgatggtgggggtcaaaaaaaanaaananna

SEQ ID NO: 322569 - DNA, 299 bp, Zea mays
ttcccgggtcagaccgacccatccggcgctggttgctcctagatagaggacacgaagtactctgaagccatggagcacttggactcggctaaaagactgggcagagacgagcttatcgcggaagactacggcgaggcggatatcgcatatgaattagctcctgtgactgctcagctcgcttacgcgcaccagctacacggacaatctcacgaagctatgccaacatatgctcatatgataaatggtcagtcagctgatttatcatcactcgctgtggcaacaacatatctgatttcaat

SEQ ID NO: 322570 - DNA, 482 bp, Zea mays
aaagcaagcaccgtgagagagagggaaatcaacgtccaccatcgacgaccttgcgcgtgcaccggtgacgagccacagtagtgagctaggggtcttcgtcggtgagcgccgcgcgcgaagaaggtcttcctaggcgaaaacggtggtcgaagtgctgggaaatgctcgccggagccaatccctcgaggcggaaccgtgctgcgatgccaacatggctcgccgtcaactctaccgacgacgaacaagtgaccgaggaccctggtactcagcaggtggaaaactccgagcaggagctcattgaaggtgaagagcaggtagcccaggaggacgactgctacgaggagtttgacgaggtctaggagtcgtctcccagttgacttaatggcgccaaggaaataatattagttcggtttattgttatgatttatctttataagacactttcactttgtaaaaatgtttgcgatatttatctctaaaaa

SEQ ID NO: 322571 - DNA, 255 bp, Zea mays
caccaactaccccctcttccgctacgtttattacatacgttccataactcctctcctatacacacttatccactatattaatatcttctaccacaaccacaacatcttctatcctctctcatacctatccatttactatccatcaacttactcacacaatcctctaacctccctccacccctctattaatcaactctcatccacacaatccactaacactcatcacagatcactacacaaccactaaaacaaaca

SEQ ID NO: 322572 - DNA, 378 bp, Zea mays
tcgcttcaatgccgaacagacggcgcggtctttgctgcacaagcatcaaattcaacagctgggcgatgcctctctccttcgagtcgcacatgtgccgtttaacgggaatggcagaaactaccgtgcggcctttgagatgctggaggacattttgaactctgcacaccctctccatcgtgctgtgcaagaggactcctacaagctcgtgtgcatcgatgactcggctgccagggagattggggagatggtgcacagtgaggctttctggatagaggtggatgctgcgcattcgctcgtgaagctgatatatgatatggtgaatgagatggaagctgatctacctattgtagggcattgcctgccgctattgggaagaat

SEQ ID NO: 322573 - DNA, 79 bp, Zea mays
ctctggacttccagtcaagactctgtgacttcacgccgccacatgaagaaacccaggactctgactgagccgccagctg

SEQ ID NO: 322574 - DNA, 365 bp, Zea mays
caacatcatattccccactgtttaacccacatctttcaaacaacgcatcggtcgcatatcttacaatatacgatcacataactcatactccctccactccttccacatcttccccaatcataactcctacactctactctcctgcatcacactcatacatattaccatacactccaacaatcaccaaattcatcactactaccccataacccacttcgaacatctacatacatcatcaacaatataacaaacacctcttataacactaccacaattatacaatatctttgatacccattcatataactaaaacattagatcagtactaccactcctacaatacaaaagtttatcacacactccat

SEQ ID NO: 322575 - DNA, 297 bp, Zea mays
tatacatttatgaatcaacgcatgtatacttctagacgctggtctggtaatgctagctaggttgccaaaacaccttgcgcgacacatcttgctaactttcacttctggcaacaatattgtcatcactgcattacttatgcagaccttatggtaaaccaagagcatgcaacataccatcaatctaagcttgctatgcacctatacttgcaccagaccattttatccattgaatgctctctactatgctctatacatcccaattgcactctaacatcgctgcactacctgtgtttagct

SEQ ID NO: 322576 - DNA, 264 bp, Zea mays
ctcctccttcacatccagtacgggtcttctttcgtaaggtcctcctaagttctgtggggtgggttatcacatccagatggacgccaaatacgttcagtacccctcctttgtctgcggcatctactatcccactatcgaccacttacatatactctcacttaactcctaccatacagatcatatacccaagaccctattcaatcggtcgactcacatcatcctctgcttcaacatcatcttctagctcacccaggaggagtatct

SEQ ID NO: 322577 - DNA, 249 bp, Zea mays
ggagtacgcgatgtgtttgctcaggcgagacgcctccgaagaggttgtgagggcgttcttgagctccatggtcagaccctgccaccacagcgtcggtggctcggtgccaccgatgggactcgggcgccaaccagccatctgtgtatagctagctatatgattagctccatgatgtacaatattattaggtgtgtatgtatgtagccggatgggaatcacagggaaatcgtacagaaggttatttcgttt

SEQ ID NO: 322578 - DNA, 446 bp, Zea mays
attctgcaggaagagttgctcctggagcagttcagtagtttgatcagattcgtcaaatctggtccaggtaagttgagatctcatggcaactgtatgccctttttctttcttacttttgaatcacatttcatacttgacctttatcagcggatgagacggctgcaaattccgagaaagccagcattgccgaagttgagccactggtaaaggatttcgcgagccggtataaggccgcgatcgagctgatgcactatgatgtgatcacatctttcagcaactttctttgcgggatggagatcttgagagcgacgctcgcacagctcctgctatactacaccaggctctccgagtgtgtcaagagaatcaacggcggctctgctcttaacaaggaccttgtctccatatcctccatcctgttcgaaatcaagaagtattctaagacgttt

SEQ ID NO: 322579 - DNA, 258 bp, Zea mays
gtcaggacgcaactagacctagtctgattcttctcctcaaccatagctgcctcatggtgaggatcacctcctattcaaagacctatttcactcacacctccataccgcgcattcattattcgacctgaaaactctgttacgactactcacttgcataatactagatactaaatacttgagttctacatacgatacactaactcattcacttgcctatacatatacatgcataactattacactataatatccttctca

SEQ ID NO: 322580 - DNA, 244 bp, Zea mays
caataccaaacatcatactattttatctgaaactatctacatcatcaatggctgaatatcttcaactgtaagctaacttaaacaaacacccattctcaccattactcaatatatcattacttcttcaactacccattatgcattcacaaactccttatttattaatacattccaaacctatgtcagtctattgtaaaactcactctaattaaactatcacattctaacaaatatattcaattta

SEQ ID NO: 322581 - DNA, 400 bp, Zea mays
gctggtacactgatcctgctcatacgctgatgacagtggccacggacgacagaacgggggggggaagccacgactgtatgtagcgagataccggactactgctagagcactgtcactaatgctaggctatctcaatggagtgacctacatgtgcggttgtaggtgcaatggtgagctactgcttcttgggtatgacagtatagcactaacagatagatgatgctgaattgccaaaggtcctgaagctctgtctagcgtatctggacatgacagttaatcttaatgaagagtgactagactgcagtaagatcatggagtcgaccagtatctttcatggtcagatgatgcctgaacttagtatataagctggatgcacagcgtatgttggagtatgcaaagt

SEQ ID NO: 322582 - DNA, 326 bp, Zea mays
aatggaaaagggcaattgcagacgtcctgatattctatcgggaactctctacatgatggatgggtgaatatgggcacctggaaggtaagggaaacacacgcccattctcacaattgatcacatgttcatgcttcctggaactccccattatgcattcacaaggggataatttggtgatacatggcaaaccggtgtgagtctatagtataactggctgtaatggaactatcacatcctaggaaataggccaattaaatttgggcctggatttaaaatcgggattcttgttcaatatgaaagatagcactatattccaaaataaaaag

SEQ ID NO: 322583 - DNA, 149 bp, Zea mays
ttcccggtcgacgcatcgtactcccacacatacactcccataataaaaagcttctaatactccattcatcttactagccccagtttaacatcgagcggtgcttgagcccataatgttgcaatcgaaacccattcacttattcattcccc

SEQ ID NO: 322584 - DNA, 423 bp, Zea mays
ctgtcacacacacacacacagacaagtggtttccaaagccaagtgtgtgtactagcaacgagctagctcgggcggcagcaggcagccatcatgtcggaggagaagcaccaccacttcttcaaccaccacaagaaggacgaggagcagcccgccggcgagtacgggtactccgagaccgaggtggtcaccgccaccggcgagggcgagtacgagaggtacaagaaggaggagaaggagcacaagcacaagcagcacctcggcgaggccggcgccatcgccgccggcgccttcgcactctacgagaagcacgaggcgaagaaggaccccgagcacgcgcacaggcacaagatcacggaggaggtcgctgccgcggcggccgtcggcgccggcggctacgtattccacgagcaccacgagaagaag

SEQ ID NO: 322585 - DNA, 445 bp, Zea mays
cgccaagtcagcagcacaaattgataggaatcggcagggtaatcttcaagatgaagaacctagggggattagcatctaggattttctagagtagctgctcgatggaaaggtaatccacgagcaaacaaagtccgactttcaaaaatgtcggcccgcctgaatatcttgagctgaggagtgctggactcattattcagttccctcaaaattaaagaagaaagacatcccctacctatccacagcggttctctctaaattgtccctgctatatcatttttttgtgtcacatcaacattccatctgctactttttcaatctccgcaacagttccccctaaatacttttcctataccttaattccaccattaaatattaattcccataactattcattatccgttacattttttcgtcaactaacaaaccataacttacacagaaatcg

SEQ ID NO: 322586 - DNA, 372 bp, Zea mays
cggacgcgtggtctgcaatacttccatgagtatgcatcttttgctactgttgttggggctaatgcgactactgtgatggatctttgtgggacaataggttctcaaggagttgcctttcaaacagaagctgtgtatatacactgctacatgaaaatttaccaagaacactactgcttttgtcataactaatccagactaccattctacattaattacgtcggacaaatgtgacaccattaaagtgtctaagtgttatcaccatgatgataaacagagtgccttatctgtggctgatctaacccttacgctctcaacaaatgagaacacactcacaatcggtagactgtacacagttgatctcaagacagcttc

SEQ ID NO: 322587 - DNA, 444 bp, Zea mays
cttgatgctggcccttcacaagtttaaaacgtcagagaacctcaggagatattcaatcgatggcactgagcctcgcgtcctcttcgcgctctgctgtgggatgttctcttctcctgcggtaagtgaccgagtaaaaacaatgggaccctgttacagaaactaattataggggcgggtatgttcttgggatgctttcatgtatagttgctggagttagaaattttctcagcagatagcactgcatggcttgaagtaactaactgagcatggatctaaagaccgtttcttttcagaaaatttgcacacaataaattgtgtttccagtgtgctctgtcacaatacttagctcttcacttcttccctactcatattttggaaaaaaaatgacaacatcctatcaccccaggtaaggatcttctctgctgaaaacgttcgagctgagct

SEQ ID NO: 322588 - DNA, 483 bp, Zea mays
cgtgaggttctccggggttcggcttcgtgggtgagcggatcgagatggcggcgtcggatgttgagtaccggtgcttcgggggcggcctcgcctgggccacggacgaccactccctccacaacgccttcagcacctacggcgaggtcctcgagtccaagatcatcctcgatcgggagacgcagaggtcccgcggcttcggcttcgtcaccttctccacggaagaggcgatgcggaacgccatcgagggcatgaacggcaaggagctggacggccgcaacatcaccgtcaacgaggcccagtcccgcggcggccgtggaggcggcggcggcggcgggtacggtggtggccgtggaggcggcggctacggcggtggctggcgccgtgatggcggcggcggctacggcggtggcggcggctacggtggtggcggctgcggctacggtggtggtggcggcagctacggcggtggcaaccgtggcggcg

SEQ ID NO: 322589 - DNA, 225 bp, Zea mays
aactacccactcggtcggacctatatactaggcttcagaaataccccatttgagatcttttcatcccttgtttcctaacaggctatagggtcaacacttctaaatgcaatcaccttcagactaatccaatcaatcttagccactgtgcataccttactcatatcgatagtccagctcgcttcccgcttaaagatcaatggaaaacaatagcctcaacagatctgc

SEQ ID NO: 322590 - DNA, 226 bp, Zea mays
ggtgggtacaacactcaacacaactgagatcattcaactacctacatcacatcagggcatagggcgtactatccgacacacatgcccatacattaaaaaaccaacagatatgatccatggctgcaagtatctcatgtcgacgattagtcttacattatcgctgaaaaagcactggataacattgacaacaatgatctgccaaaacccactcatacagtacacgttc

SEQ ID NO: 322591 - DNA, 415 bp, Zea mays
tctattgtctcaatgacaacatgctcagaaacaactttaccatgcggtgctgaccttggtatctaggctaatgatgctcctactaacgctgcctttgattgatcactaattctaactatcaattatccatattattcatatcatataatcatgatttcaagtgagcaacatctgttatacatcatctatacatacattacactttaaaattaccatgatcttgaataaactcacttaacaatccaaccttatagacttaatgtgcccaaaatgttcaaatctctactatagtcaagttcacaaccattattgaacatatacgttacaaagtaccgtctttcaccccattgcttcttatgctacacaacatgtatcccataattggaaggctcttgacagatgactttataccata

SEQ ID NO: 322592 - DNA, 223 bp, Zea mays
ttgtcctactgctcgtccgctgtggcctagccgatctagcacttggagctcttcaaggcccgctcggagtcggtgtccttggtcgccgcatcaacgatggtctcctcgctacaagcgctggccacgctcgtaccgggcctgtcctacattcacgcaggaccggtgctccgactacagtccccggccgctgaggctcttggccccacgcaccttcttcacaccc

SEQ ID NO: 322593 - DNA, 412 bp, Zea mays
  unsure (1)..(412): unsure at all n locations
caaagagcaaggcacagtgctatagaggtaaaacgggggagaggacgagcgaggagacagtgggaacgagccttgcgcaggcggtgacggcgctgatgggcacgtgcgcgcggcagctgtcgcgggcggctcggcggctgcaccggcgcccgcgcgcgcggcaggcgctcgcggcgtccttgtcgtcgcgcgccatcgtgccgttcctcgagaaggccgccgggtccaagaggaggaggagacgcgaacaggatgagccgagcttcgaggcagaggaggacggggtgtggaggaaggagataatgatgggggagcgctgccagccgctggaattctccggggccatctactacgacgccgagggccgtcgtctcgagcagccgncgaccccgcgctcgccgcttcgcagccc

SEQ ID NO: 322594 - DNA, 306 bp, Zea mays
gtccggcgtcggagaacaacagaacaagaccaccggaccatggaatcgctgacgcttcgcgctgggaccggggtctcgccgctgcagcgactccggctgctccgcggaccgcagctcgcgacgtactttcgcgccacggcctccggcgccgagccggacactatccgtgcgcatgaacgggctgcacatgccctacccgttcgtgatcaggtcatcgacgacgggcaccacctacaccgtgacgaagtagcgcctctacgagggctactaccccgtgatcgacaagacagtgtcattgcatgctga

SEQ ID NO: 322595 - DNA, 400 bp, Zea mays
acccatgcgtcagcagacgaatctgcactgatcacagatgcgcaaagacaccatattgagggaacccggacccgatccaaggctgataacacttgcgtcccctaacctggccgacctgcatcccagcaaccatggcattggcctacaatacatcgacctaggccatgaacgcgaatgaggagtgccaacgctggttcatggatatgaagacgaacaaagtgcaccgcttcacgctgtacaacatcgacgagcggacgcacgccgtgctggtgtacaaggtacagcgtccaccagcaaggacacatcaagctcgtggtcgcactgcccgacgacgactgccagtacgccgtcttcgacttcgacttagtgactgttaactactgtcagaatagcatgatct

SEQ ID NO: 322596 - DNA, 78 bp, Zea mays
cggaactagccactcgtccgatcacagctatctagcactacatactaactatctcttcttcaccctacttaatccaac

SEQ ID NO: 322597 - DNA, 377 bp, Zea mays
cccactcgtcacgatccgcctattcacaaactatccttacactttcatgcttaaactccataatctacttcactcgcatcatcgcactacataaatatggcctgaaaactattcttcacaatgtctatcctaaattcattgttcaccgtcctcttatactctacattacaactaccattttctaacacttctttttttaaactgatcaacactaattaatccttaatctatctaaaaacttacgatcatacactaatcattttaactttcttttctaacaagaacacactctctctctttgaacagatcttataccatgacataaaccattctctcatcataaacactatcatcattttatctactgtctaacacat

SEQ ID NO: 322598 - DNA, 316 bp, Zea mays
acccactcggtcggaccttgacaggcagcctcccaaggcatacgtctgacgttccacggccacgtcatgcgtcataggaattgtgtgatctgatacgagttccgtcgcgactaatgaagaagggcgtgtgaggcataaaattatacttgtatgtttttttcatttgttttttcttttgcttcgctatctttactttttaccagtatattgccgtgagttgacagtgctagcttttggaattcacacatatatttggcgtaaaatgaattccaagagctatcagcgccattctttatcttgtcagcctaccctattt

SEQ ID NO: 322599 - DNA, 257 bp, Zea mays
actcccagctgctccctcctcgccttcggcttatgtcctcctgctcgtccgctggggccgtgccgatcgatcacttggtgctcttcaaggcccaatcggaggcggtagcctcgatcaccgcggcggcgataacctcctcgctgcaagcactgaccacgctcgttcctcaactactctacatccactcatgaccgctgctccagatacagcacccggacgactaaacacttggcctcacactactactccacaccctc

SEQ ID NO: 322600 - DNA, 220 bp, Zea mays
acatcttcatctaccacaatctctctaatcatgcgtgtccaaatcacggacgatgactaaaaactcgcgttccgtcaaacgaatcgtaaacgtacatcggagaagctccagtcatctgcagccttccagacagtgactggccatacagctgctctaataggtcatcgtgctgcactaaatatgatcgacaagatgatgtatctcatgcatgaatgcccaa

SEQ ID NO: 322601 - DNA, 310 bp, Zea mays
catcatccctctccttgttttatcgctttatcacatcattcacaatcactagaaccagggggtcctttatctgaccttcaatgtcaacaaaatgttatctgatatgcactaccatctcttctcctcatgcctctccaattacaacgactaataataaaaactctcatctctagaaacgaatcatacacttacttactagaatctctagtcatcttcatctttccagccatttactagccatacatctcttctaatatgccacccttcttcaacaaatctgatcgccaacattatcctactcattcattta

SEQ ID NO: 322602 - DNA, 143 bp, Zea mays
agttatggagttttaatgggaatgaaccggccaatggtcatggggattggattgaatgaacaacagactacaatggccatgaaccatcatcctatgggacatggcatgattgatgaaccaacaaccgatgtcaaataatgaac

SEQ ID NO: 322603 - DNA, 260 bp, Zea mays
cccacgcgtccgcccacgcgtccgccctactccacccctcgcagctcgctggtcgtcgcgccgtggtcgtgtttgaccaaatatcgcagcgagctccacctcgatctgtgcagccccagttgtgacctcgtcgaatcccggtgaggacccgttgttctccttgtgtttattcctctctggtacatgtattcgacgccgattaattaaatgcctaatcatgtgtatatgtgtgtgattatgcgtgtgatttttgcggagga

SEQ ID NO: 322604 - DNA, 222 bp, Zea mays
tcgcttgaggacactgttgtgtccttttccttaagaagggggctttaagaatgatatacggggggcattttgtccacatggatgcctaccccaatgtgggtatgtaaggcatgattatgcctgtccggctgaaaaaaaggctacctaaggaccctatacctgtccggactccagttttgtagatctattctttcactgaaagtacaattttaattgacaatt

SEQ ID NO: 322605 - DNA, 396 bp, Zea mays
agcagaagaagagggtcgaaaagcaagactaaagcagattactgaatttaaagaaagctgcacaggttggtgctttgtccagatatatacagcttgctgcaaaggccttgcccatcacaagaactaaagctgaccttccacaaaaatctagcaaagccgatcttggagagcgttagtagcatcgcttcctcaagtacaaccagccgcacaaatattgacgagaaccttccttgtgagaaaccttctaagcacccttgcaaaactacaaaggtacttccaatttctcaagggaaaggaattggccatcttgaaaaacatccagatgacgaaatccttgactgtctacttgccaaaaactctgattaacccattgatgttagcaaggcaaataccatg

SEQ ID NO: 322606 - DNA, 412 bp, Zea mays
ccggcagcctcctggcgggtacgacggccttcatgatctccggttgttgaggttgaggcctgcgtacccggcagcctcctggcggcgacagcagcattttgctgggctagcgtgcatatgaatcttgctgccctatgccgccgccgcacaggtggttggtccgtcagtgtgtggtcttgttttcgtggtcaggccatgtgtcccatctccggtccttcagatgatctggttcgcatctgtcttgtgtatggttttgatatgtgttggttgtgacatgccccatggaacaaccctatcgctatgctgttttgttgtgtacaatggatgacgtgtgctgccgttttgttgtgtgtacaatggatatgtctggttgttgaataagaagaaattggtatatggtaccaatagtccg

SEQ ID NO: 322607 - DNA, 293 bp, Zea mays
atctattacacaactctcatacatcatgtccaccttgcaaagggttcgttgatgcctgatgtagacagcacagtcgttatctgtgtgaggggatcgttgtgattcaaaaacgtgcgaagatactaccattactcgtacttggactaccgttctgtgcatagtctgaaggctgctatcaatagaggactactttagctaatgggatgcagactgactatgagactgatagctgacaatgaaacttccttgctcgaaaatggatggcattcccattcggtatttgggaaagaatt

SEQ ID NO: 322608 - DNA, 262 bp, Zea mays
gaattcccgggcgccggcgctgtccaacggcgcgctgcgggtgggcgccggcgttgcgctggcgctcgcgctgggaggcgtgtcgtggactgcgcgcggcgggagcgccggcgccgggcccgggcccgtcacgcagccggccatggtgtgcgccctcaacgccgtgaccgacgccgcggtccgcgccttcgcggagcagcgcggctcggcgaccatgaagacgagcgtggacgcgctctcggactcgctgttccgtcgggag

SEQ ID NO: 322609 - DNA, 112 bp, Zea mays
cgacgcggacgatgccggacacccaagagaatgacctcgcgtaagccgactacaaggacggggcccaaactcaggcaaagatctatggcgaagacaaaggaagagacaccga

SEQ ID NO: 322610 - DNA, 408 bp, Zea mays
acacagtacagcctcatcgccacttaccaccgtctaacgaaaaagcttcgacgagcgaagcgaaaaagatgccgccagctctgcggcgaacgatcctgctggccgcggcggcggcgacgacggcggtgctgctgctgtggccggccgtctgcgtcgcggacgacgacggcacgacgttcccgtcgtcggcgttccccttatgcccgacgcggacggccggggtctccacggtgccgttcccctggtcgacgccgacgtcgtcgtcagtggcggtgttcccgcaagatccggggttcttgacggcggacgcttgcgccgagccacggctgccggtgctcgctgggatctctgatctattggcggtattgcagagacttgctcgcggttgctgccctggactggatgcat

SEQ ID NO: 322611 - DNA, 360 bp, Zea mays
ccccagccccgagatctgctcaacaatggcgacgcggcgccacatcctcctgctcgccgctgccttcgtgtcccttctcgcgctcgaggctgtggagggcctcgaagaggggccccgcgggcgccggctgctggtcctgctggacgacctggccgtgcggtcgtcgcactcggccttcttcggctcgctccaggcgcgcgggttcgatctcgaattcgccttgcccaccaacccaagctcttggttgaaccgttcgggccggacccttaccaaggccttgggccggtcggccccttcaacccaaggtttgggggatccatggacccaaaccccagtcctggaattaatggagcctggcct

SEQ ID NO: 322612 - DNA, 395 bp, Zea mays
ggagaagcaccaccacttgttcaaccaccacaagaaggacgaggagcagcccgccggcgagtacgggtactccgagaccgaggtggtcaccgccaccggcgagggcgagtacgagaggtacaagaaggaagaagaagaagaggcagcaataaattaatcttaagcagctgtgggagcagcagtagtagtatcagttcaggtccagtagcggaaaaggcaggcagggcaaagatttgggaggcctttttgcaatccatctgccccatcataacccacttcgatctatccatgttagcagtacgtgtccgtccgtcctatagcatcatgcaggatgcaaaggttgccctgtgctggtgaatctttctgctatatactattctatttaattaacatat

SEQ ID NO: 322613 - DNA, 393 bp, Zea mays
gcgcccacgcgtccggttggctacctaggttctcaatgccacgtatttggcgtatgtatggaaataagtggcacattctaatcttcaattgtattattcgctctggcattgaagtgggtcgaaactgcattatactttctccgcaagacatgagcatggattatgttttaacaacagattatttgtactcttgattctttggttccatgctctcttcggtcatcttcatgttaatttgctttgcaaaccatttaatattaacagtgccgtcccctggaaatttccaaatggttatatgccttttgactattggaatttgcattataatttgcaaaccaaaaaaaacccttctttataaactacacacttgaaattcgaatttaaaaagggcaa

SEQ ID NO: 322614 - DNA, 310 bp, Zea mays
ttccagcttgtttcattattctgtggcgcctgcgatagactgggtggggggccaatcgcagcggaggaggacgccactcatctatgaccttcgaatctatcacacttaatagtcacatctgacccgctgcgcattgccaccttaaacatgtgtacctgaccctatgctccgcgctggccttctctgcactctgcgcgtaccttcacatccttctcaacgtccgaggcgccctaacgaccgtaggatgcgttgcctccattcactttctcattttcctgccccctttaccggaccaggataggaacctctt

SEQ ID NO: 322615 - DNA, 252 bp, Zea mays
tctaagaactgtatctcctacctaaaaagttttctatttcactgacacatattttcacctgctatcgggacttgcacaatgtctttactctcttattaaaagtcttgttgcacaaaccattttgagagatctacttttgcaatgttacattgatcaagcatctgatgtcttacaatattccctcgcacttcatttacacctttctaggaattgccaaatacattttcatccacacctttaagaatttcttac

SEQ ID NO: 322616 - DNA, 317 bp, Zea mays
  unsure (1)..(317): unsure at all n locations
ggcttctcctccccctccggttcgggttcgggttcgtgaggttctccggggttcgggggcntgggtgagcggatcgagatggcggcgtcggatgttgagtaccgctgcttcgtcggcggcctcgcctgggccacggacgaccactccctccacaacgccttcagcacctacggcgaggtcctcgagtccaagatcatcctcgatcgggagacgcataagtcccccggctttcgctttggcacctttttcaacgaagaagccaatccggaccgccttcaaggccttaaccggaaggaacctgaccggcccaacattac

SEQ ID NO: 322617 - DNA, 199 bp, Zea mays
gcacggaccatggacgcacgtcttcctgggcttatctatccttgggcctgttccgcttggccggtgaacatgaactgcatccgtggcagagtgcgaccgctgctgcagctgctgctgaatcaagtcatgcaactgcatgtcccttaacttggagaccgccgcccctagcagcatcacgaccatagccctagctgcgccg

SEQ ID NO: 322618 - DNA, 401 bp, Zea mays
gacggacgagctggctggcgtgccaacgtcgctccttcaggagctagcctacgcatcgacgacctatagtgtggcccagtaatggcgatatggcgaccagctaccaacatggaactcttcctctccatcaactaccagttcaagaatgtgggacaagagctcaccaagagcagatgaggacctggtgggcctagcaatggcagcatggcgcggtggcgacgagctgctatgtgcagctcttcctctcagtaactaccagttcacgacagtgtggtaggagttcatcaagatcggatagggatcgcaagttggacatgtttttttgtctatctacatactgtgtttggagatgtagtactttattctctacaatcggttaaccctggtgtcagcgtttcgag

SEQ ID NO: 322619 - DNA, 213 bp, Zea mays
aggcagcacagctccctacgaactcgatgctcctagctgtatctcctcttgttaaggggtgtggtcttggtaggagtaacaatagtttctggcagccgtcttcctcctcgctctctaccctaggagaggagaggagaggagaggagagaaatcctgatgctaatcttctcaagacgcataaagcgtgcctatatacaatcgactaaacacaga

SEQ ID NO: 322620 - DNA, 266 bp, Zea mays
tcccggggttctagatcgcgagcggccgccctttttttttttttttatgaaaattgtattctgggcttctcgagtgagcaggtcatatccttttaaccgcatcgcggtttcaggccatgtagcgatattgtttgtagtttgtaccgggaataacatatttggttgagcttctacgtattgaagaaacaacttatatgtgaaaaaaaaaaaaaaaaaaaaaaaaaataaaaaataaaaaaaaggaatgatcataaaaaatataaaaa

SEQ ID NO: 322621 - DNA, 264 bp, Zea mays
cggttcgggattcgaggcacgcgtcacacgtccggtgcgagacctaccaccggtgttcctattaattggcggctagctagctagcgggctggggctgctgctatcctggatcggcacagccggttcttgatgtggagggagcggccgctggcgctgctcctgctggtggccggcgcggcgctgggactgatcggtgccgcgctcgcgagcgcgccgccggaagccgcgctgaaggtacggttctaccatgccacgtgccccatc

SEQ ID NO: 322622 - DNA, 337 bp, Zea mays
aaaggcaagagtatgacaaaaaaggcattctatacgttcaagatcagaatgtagtgggattacgtgaaccggcacaaggggctaatacttacgtgcaatggtcttggtataaggtactcagtatggtgaacacgctcaagggcccacagtttgcactcatctgcagtcttggagaatctgtaatgtggggccagtggggatgaaaataatttctgatgacatacagggaagcctttgatctgaaaatggtatagtgcatcagtgccatgtttgaaagccaaatattgaccacttgagttcatcctacaagggtacaacagagttgatttttatttgt

SEQ ID NO: 322623 - DNA, 342 bp, Zea mays
  unsure (1)..(342): unsure at all n locations
cacacacacagacaagtggtttccaaagccaagtgtgtgtactagcaaccagctagctcgggcggcagcaggcagccatcatgtcggaggagaagcaccaccacttcttcaaccaccacaagaaggacgaggagcagcccgccggcgagtacgggtactccgagaccgaggtggtcaccgccaccggcgagggcgagtacgagaggtacaagaaggaggagaaggagcacaagcacaagcagcacctcggcgaggccggcgccatcgccgncggcgccttcgcactctacgagaagcacgaagcgaagaaggaccccgagcacgcgcacaagcacaagatca

SEQ ID NO: 322624 - DNA, 189 bp, Zea mays
gtcatttctgagggaatgcatagtctgtatgtggtttcgtacgtgtgtgttgggacggggacttgcacattacatcacatcattcattgcgttcatatacattcatttagacattcataggatcatcatcatcatatcatagagcacagacatttgcttcggttttaatgacaaggctttggcgaatac

SEQ ID NO: 322625 - DNA, 114 bp, Zea mays
ccttcttctcccgctcccgcagcggctagcgcggctgcgcccggcgggcaggctcgtcctcgccgcactcctgcgcggcgagcgcgccgccgttcccgtccccactcccactcc

SEQ ID NO: 322626 - DNA, 164 bp, Zea mays
ccctcccaagtcccaaagccgccgtcgtccgccagcccaccatggccgcgcagtcgtgcctgctcgccggcactgacgccgccaggtcccccgcggtcttcgccgctccctattcctgcgcacgccctttccactcggtccacttcgtcgccggcccgtggggc

SEQ ID NO: 322627 - DNA, 213 bp, Zea mays
cgattcccggtcttctcattcctcgacatggagatccagcacgacagctactggtgtctgtttttggcgattctgatagcgaggggtttctccaatgccgcgctgggagagacagcaccgtcggttgtggcgggtttggccaattgttgggatgtgccaggaggaacatgaacgccgaggcagcttttagaggtctttatgtggccatcaagt

SEQ ID NO: 322628 - DNA, 224 bp, Zea mays
gtggctgcttcgtccgtcccacccaatcgccctctcccctccgctccccaggggccaggaggagcagccagcccagccctgacgcttccttcccacccggtgcaatcgctcccaagcctgactcggtcgctggaccgaacacccgccggtggtgctctttccgcgtgctttttccggcttcttcttcgccgcccgccgcccgcggggcccttcctgaaggttcc

SEQ ID NO: 322629 - DNA, 161 bp, Zea mays
gatttcttgttgggaaaaaatcggttgttcagcggattagaggcggagatgggagccggggctgaggtcatgcatcaggtcgtgccgctgctggagccgccgctccaccggtgcgtcgttaagagcgtcgatgtcatggaggaagtggttgccgtggcgcc

SEQ ID NO: 322630 - DNA, 241 bp, Zea mays
acgttcagcaccagatccgatctcttacgccgttttcgtttgcccacctcctcacacaaaccctgaccggagcccgtaccgccggctcctactacatcaccgccgcattcgtctgccttcgtcgcctcgctaccaaggtcgatatcgacgagatcgacctcaccgaggaagacgctggctcctctgtccacggctcctacgcctcttcctcatcgatcgaagtggttgtgatccgtcacct

SEQ ID NO: 322631 - DNA, 111 bp, Zea mays
cccgggctcagacttctgctgcagcgcctccgccgccgctgccgcatctaacgcagttccctccgccgcagcccgaggcagggaggttctccagaacgacatggatctgct

SEQ ID NO: 322632 - DNA, 190 bp, Zea mays
acggtatggacattgctagagttacattacatcatcactagtatatataaggtggactgttatttgtaagcctaatgaaagtgaataattggatgcgtaatgtaagcctactctactatatatatgattgttttggaaaatcgagggagtgtgttacttgactatccccaatcacactcataaaaacttg

SEQ ID NO: 322633 - DNA, 181 bp, Zea mays
  unsure (1)..(181): unsure at all n locations
atccaatctagaagcgcccctctccctctctctctctctcttcgccgtccgaagctgggcacgcgaatctaatcgacacctagccgagatgggccgcaagttcttcgtcggtggcaactggaaatgcaatggaaccacagatcaggtcgagaagattgtcaaaaccctgaatgaangacag

SEQ ID NO: 322634 - DNA, 359 bp, Zea mays
gcgagagatcacagaagctggttttgtggaacctacccctatccaatcgcaaggttagccgatgggattgggaggccgcgaccttattggcattgccgacacaggatcacgcaaaactgtcgctgacgttcctgctgctgctgctgatgtgaatgcgcaggctattcattgccatgaccatagtgcaattctcttcgtgttagctgctacacatagacttgctaataacatatagcaagaaccagggcagaactgctgcatacttcctgactgaccgtacttggatatatgtgcactgtgccaaaaggtgcacaatttcctgatctttacaaaagtgttgaaattgctatagctacacc

SEQ ID NO: 322635 - DNA, 270 bp, Zea mays
acgatcgcggctccgctgccctgctctccaccttttccagacctgcaccatgtaccagccgcctgtacatccatccacgctcccccatgccctcaccaccgccgagtaacacctctctctccgactcccttgccttgactgattctaataattcgtcgaacgataatctcttattcccctgtcttcaaccgtactgcaatatcctgaatctatctttggacttttccccaacgtacatatcggcctaacctgcagtggctcctaccgtct

SEQ ID NO: 322636 - DNA, 117 bp, Zea mays
acgatcacatacgaacaaaagcatctcgatctcatccgacacacgaggaagaagagatcaagtggcggacgaacaggggagtcgtggatcgcgtgcacacagcaagggctgaatttg

SEQ ID NO: 322637 - DNA, 182 bp, Zea mays
ataaagcacggaatcttactttgtcgaacctatccttttccaatcgcatcgctggcccatgggattcgataccctgcaccttattgtcatctcatagacaggatcaatgaaaactcttgcttaccttttacctgtcattattcatctcaatgcgccgtctattcttttccccgtctatcatc

SEQ ID NO: 322638 - DNA, 232 bp, Zea mays
cttttcatgtatgagtatgatagctacttgcccatcacttgcaaggccaaatatgcatatttccccagcatttgtctctttccaatggccttggcacagagtcacttaacaatttagttcaaatcgtggtggttcccagcctgtattttctaattgattatttttagtttcgatctaaaatccaattcttgcatttggcaaaaaatttctaactattttgttggtatgattt

SEQ ID NO: 322639 - DNA, 241 bp, Zea mays
  unsure (1)..(241): unsure at all n locations
cgagcttcggtttcgacggacgcagccgtcaccgcctcaccggcccggccatgggcgccgccgccgcctgctctcttcgcctctgccacacgtcaccatccgctgcaacggtagggccgcgatgactccggcggttcgggtggggaatcctcgcgcgcccggtccgggcgccgcggtggtggaggacgnagaggaggcggcggtcgcttggcgggagctgcgcggcaaggcccgcggagtc

SEQ ID NO: 322640 - DNA, 211 bp, Zea mays
gtgaccgtcagcctgcccgtcgccggtgtgcagtgaggtctgtggccatcagcgggccagccgtcgattggagccagcaccgcgaggtctgttgccgtcgatcgttgattggagccgccgtccgacgagccgtgggctcgtggccgatgccgccgtcaattaggggtcatcagtcgctgattggagttgtcgcccgatgattggtgggttt

SEQ ID NO: 322641 - DNA, 115 bp, Zea mays
gccgcaggcggtggtggccgtgctggtggcggcggcgctgctggcttcgtccgcttcggcggcgatcacctgcaggcaggtggggtcatcgctggcgccgtgcatcccgtacgcg

SEQ ID NO: 322642 - DNA, 342 bp, Zea mays
gattcccggtcgcccacctccgagcgatggtgcggcgcgattcacgactgattcacagggcttcttccgacgcggctggctccatcttcaccagcaagcttttctataatgcagacgagagcacttcatcctgcgattaaatcagcactagtgttgcacaatggtacctattgcgtttgtcgtagcagctttattgggcatatcaggatatgcaggacaaggaagtggtgttagtgatgctagttcaaagaaggcacaaaagctcaagctctaaatgcatgagaggaagctgctttaaactagctatttaaatcatagttgttttagcaaatctagacggtt

SEQ ID NO: 322643 - DNA, 445 bp, Zea mays
gagcaaatgcaccttgtgtctcagcatccggcaaaatcctactgccacaacctgtggacatgttttctgctggtaaaagttgttttttacaatgatcatgtattgagtcttgacagatataaattttacacttgagccatcaacagtagtgatgaacctgccatcctggcttacttctgcactagtgacagaagccttggtttcaagagtttggacaatttttccaattctcacatcccatagcctgcacagtaccgtaaaaattaattaaaaaggaacataactatagtaaatatataggccaaccagtataaatgtttatcattgattgaagcatttctaacatgcacacaccttactccacccatgtcagtgcaggaactcaatatagtttggtcactatgaagccaaggagcagttcggacaaccaggtgctttgtcaagc

SEQ ID NO: 322644 - DNA, 395 bp, Zea mays
ggctatgtttaaattgtttgctcgaaacattcagttttaaaaaaaaaaaaaaaagggcggccgtcgcgatcgaaaactagaactgtgtaccgagtcgagttggtttgccagctgtttcgaggttacagagttgagatttggaattacaatggcgccattgccctcctccaacccccctttttcttcctcccataagttgcggtcactgtccttcttggactctctggcctttgttcttgtaaatgcgaaatgaagggatgtgaaataagaacatcttcgtcctgttgttgacagtatggtacagcatatttaattttttgtacttgaccggcgatgataaattggatcggtgccagcataagaattatggaaaaaaaaaaaaaaaaagggcggcc

SEQ ID NO: 322645 - DNA, 371 bp, Zea mays
cgaattcccggtcggccccgcgtccggtatctcgctttcgatcaggattgtggtcggtgcgtcgttctgcggtgcttatcgtggtttcggtttatcggtgcggggggttcacggtcaaattcgctgctgcgtggcgcttttgacattgtagccaattttatcattgctcctgcgtggagacaaagccggatggtctaaaagctgatggaactggctaaactccacagaatgtactgacatgtactgatggcttacaaccagtcatggcggctgatctgttgagaagactaccatgcttgcatcacgttcacgtgaactgcatctacaccatggctgcaccaacagggtccatgcccaatctgcacgcacca

SEQ ID NO: 322646 - DNA, 401 bp, Zea mays
cccaacatcacaacccaatcttctagctctctcatcccaactcactctcatggaacgttctcctattctagctatctacctatcaaagcatcaattctcgcaacaaacccaccaccctaccacaactcttctttccaaacgccatagacaacctaacctacaatcccaaccctaacccaccctacaaaaatcctctttaactcatcctatcctactacactactcaacaactcaccccactagacaacagcacccaaatgtatcttatcttagtaactcatccgcttacgaagctattctaccatccacaattcaatcaatagcataccatcaaaatcatctcatggctaaactaacttagaccaaaaactccatacacatcgaatcaactcttctcctcg

SEQ ID NO: 322647 - DNA, 321 bp, Zea mays
caacaacaccattttaaagtaaagcttaaactctcggatccactacctcgtacatgttacctgaataagtgatcaatctatctcacctaaaatcctcactacctaagatacccccataccacaattcatcttcacaaccataagaccaacaacaacatcagatccatggcctatgccaacgtcctcaagacctatttccttaccaacatcctccaatactgcaccaccaaacagctcacccgtctcaagaacaccaccgacatcaatcttatcctcgccaccgactacgtctataagctattctacaccccaaaatccatc

SEQ ID NO: 322648 - DNA, 345 bp, Zea mays
tcttcaaccaacatccgctcggttagagtacgacaaactatctgtgtctgtttaaactgtacgggcgcagcccccacttatctcaacaattaacatacacattacactatcatatatttccttcattattcttactcccaatcattcttcttttaacataaatatatcaaactaatttactcttatacaactctcctttttaccaatatcactaatatcataccttaaactttcttcaaactttatttcctctacatttacacatctcttctctccaatataataatttacaacacatatatattcttccaccatcttctctatcaaatcatttccaaacttaaa

SEQ ID NO: 322649 - DNA, 411 bp, Zea mays
gtttaagccttggtcaaatcacggattaaagatgaggcacctaaatgtcgtgttggtacctcagatatttggcaagacgatgatcacatacactaggagaacaatcttgctagccacccaactatccacatggatgacgactaaaacatgtcttttttcggacttagaagacgatcatttgaaatcacttatttgcaacttgcaaagcgagatatcgacttgtgtacaacaaaatgtatatgtcgacattgctccttaaaagaacacacacaccatcaaaacacgtggctttgttttgcattcaagtatcctgggtgatgccactgttaaagctaccggcctcaacacacagatgttatcactcgacatatggcaaacatattgcatagtgctacatttcactaacattat

SEQ ID NO: 322650 - DNA, 302 bp, Zea mays
ggtacgcgcacaaaatgaaaaagaaaaggcgaaggcaaatgaatcccagtcaggcaagcaaagggaagaaccagctgctggggagtgcggagatatcgtcgcagctgatcgaggagcacctgtccgactcggacgtacacgtctggcacgagctgtgcgagcacacgtaacgcgacttcatggtagacctcgacctccacgacagcctactaacgatgaccagactaggacgacgtgggctacaacccgtcgaccgcgttcgagtggctgcctcataccaacatgactgacccacaccttaa

SEQ ID NO: 322651 - DNA, 190 bp, Zea mays
gtgagatagacatgttttagatagtttcattggacacccaaacagagcggacagagtgtatggctgctaccttcaggatgactgaaagcagtacttgtaacgattttgtttagtaaaatttgtgagtgttactgctccaaacaacaccttatgcaaccatatttgaatatttcacaaataataaggactt

SEQ ID NO: 322652 - DNA, 322 bp, Zea mays
  unsure (1)..(322): unsure at all n locations
ctcactcttcaaatttctcaaggtctgctttttcggactggatttacaacttttttactgataaaattacaggtgatccaattttaaccnaatcccttcatcattaaatatcatctttaactacctctcatcctatcttctaataatatcactcatataatctcacattgacgatatatataatatcaacaccatgcatcaaataatatcaactataatgtatactactttaccatgtttatatatatataggttccctacatttcttttatacatatatataaactactccatataatatttctttacaacattatataca

SEQ ID NO: 322653 - DNA, 188 bp, Zea mays
ccggcgcgggcgtacggctacgcacacggacatgcgacgaactggctctgctaagttgccccatatatctggttccaggatgaaggcgtgggggcgtagtgatacacaaaacgctctggacgccaatctgacgatacttgcctacatctacgctgaggcctttaacaaaattagccagaacgacacac

SEQ ID NO: 322654 - DNA, 282 bp, Zea mays
aaagcacacatttttaagattatacatcaaacatgctcatcaaatgccaaatttcccattcacaggggtgacaaccttacattcccaaaaccttaaaaatcaatagatgaatcaatcaatgttcatgttaaagtacaccatagttctaataccactcaattatgatcaactaatctcttatataatactaaattactttaccaacaccataaccataaatatcgatccaattaatatattatagatcaaattgcttattaaccctccacaaatatcaatgat

SEQ ID NO: 322655 - DNA, 394 bp, Zea mays
  unsure (1)..(394): unsure at all n locations
caagaaaattaacaatgccagagatcttatcactatcctggaggatgctgttanagttngatggccaagggtaataggattttaccaaatgtacaaatggtgcacagttacaggcagaatctgacacctttagtgaaaatggacacaggagctttcttgcaatggctgattatcttgtcactgacaaaatcactgcattcctagcgcaaatgcaacgtgcagcaactgaagtccttaaagagaaacaactgaaagaccgtatgaacatggaccaagtattgcagacagtattacaaatattggacatgttcatggccctttctgaagataactcatggataaattatcttgtacctgagaatccccctgtttatgcacagttgatggctgtgtc

SEQ ID NO: 322656 - DNA, 412 bp, Zea mays
  unsure (1)..(412): unsure at all n locations
tgttaacatcattttttgtgcctgtcttaagctggatattatgctgtgtggtgggtatggtcccatatttctgacacattttcattctgattagtctttttgtagcacatttgtgaagctgttaatttaacaacaatgtatatctagagttattagattgcagtctcttcgagtcccttttgtttgatgcttacagaagccccccctcccttgacatagcctcaaaattttcaacaacatgncttgtgatgcaacagaaggcctaatttcattttttttatcttttctccaatagaatccaccctctgttccaacactggctgctgtaaaactggcaagttggctgagaggtgctaaatttattgttgattggcataagtttggatatacattgtcggngttgtcgcatggc

SEQ ID NO: 322657 - DNA, 400 bp, Zea mays
gtctgaggaagcagtgcacacaatgaaagattatgctggaacatgctcatcaaatcccagggtacccatgcagttgcgatgacgaccttgcattcccaggtcctgaaaaatcaggagatgaatcagtcaatgttgaggttaaagtacaccatggttctaatctgtctcagttaggatcaactgatctcttggatgatactgaattgcttcaccagggccataaccataaagatcgatccaatgaggatatgatagagcaggttgcttctgaaccctgcacaaatggggatgatatcgtggaggctgcggctgctaccaaatactttcgacaatggatctgttgtggctgttgctggtaagagaactccatctggttctggtcactatgaacacaatgtct

SEQ ID NO: 322658 - DNA, 378 bp, Zea mays
atcgggtcccacagactcatacgcatatatttttacagacacccatcagaagacacatgcacgtacaagttctaaccaccttggggaacctcaagtaaaacaacctatctatcctctaattacaacacattaactactatcattcttttataaccttcacattttatgattctgaaaacctgacaaatgcgaaaaccatcaaactgtaaatctactaatcccactccatgtataataatgccattattttgtatcaacctaaattatgactactgcgaacagataaatttatttacctgccgtatctctacaacttgcatctgcttcgcttctagttgctagatcaaaaccctcttttctacactaacggctcctaca

SEQ ID NO: 322659 - DNA, 308 bp, Zea mays
atcattctgaaaatgaagtcgtctttgggaattggcattcagatattcatctcagtctgccgtctacactaagtggggtaaatgtggcgattcaccacctacattttttgaactatgatctgccattccttcaatgcaaagaagaatctgactgctgtgccaagtcaagtatcgatttttcatttttgtccaatccacgcacataatcatccatattcttgtatacaccgtgcactatgtttacggccaattggttctatgctatgaacgcacattactcctttgttcactgcagctaacaatttaac

SEQ ID NO: 322660 - DNA, 325 bp, Zea mays
gcgtagcacggtctcctcagacggtcacattttgggcgcagcatcagcagcagaagcagccgtggtcgggaagctcgcgctggtgttcctgttcttcaacgccagctagggaagccagtgcctttcctcctcggcctccttcagcacggcggcgtcctggcagtggccgtcttgcacgcaggcgaggacgcgctccttccggtgcgagatcgtgtccatgcgccacgtcgacaccagcagcatgcgagaggagcacgacgggtacaagacgagcatgaacccagcctacgtcgtccacaactgctactccagctccatatccgac

SEQ ID NO: 322661 - DNA, 276 bp, Zea mays
ctctgcttcacctcactaacaccagctagcaactctttctctcctgcaataatggccgctcgctcctcctcctcccagccgcagctggtcgcggcggcggcggtcctggcagcggcgctgctgctgctggcggcgggggccgggacggcgtcggcggcggtgagctgcggcgaggtgacgtcgtcggtggcgccgtgcctcgggtacgcgatgggcagcgcggcgtcgccctccgcggcgtgctgcaaccgggtgcgctcgctcaacagccgcgcg

SEQ ID NO: 322662 - DNA, 132 bp, Zea mays
gcgctaagaacgatcttcattagccggtcaaattttacgctcatcaccagctgctttagcactggtgttttgtaaactatcactgggctcacgattattgaactacagacaaggcagcccgtgacaattttt

SEQ ID NO: 322663 - DNA, 376 bp, Zea mays
  unsure (1)..(376): unsure at all n locations
ctacgagccaggagctccttgaggccgtcgaggaagagcggaacgacgtgcaggaaaaccacgcgcgcacaaccaccgttttccgtcacccgctgctcggagatttcgaggtgctgacatatatagatctgatgttcacattcagagtggacagtggaagcttgcttccagtgatggcattggcgtgccagttgccatgccagctgtttctatgcatgattgtgtgctcgatcagtttctgcacagatatgatgcctgatgccaacaccgtttcttcgattccaggtaccggtggatgcagacgacgccgagatcgaggagcggatcatgcagcacctggccgncgncgtcgncattcgccggtcgcaccggcacg

SEQ ID NO: 322664 - DNA, 210 bp, Zea mays
gacttcgacctctagccctgtttctattccatgaatgctgtaaataaccctgggttggtgaccattgatgtgagcccagacgacggatttagctatgcaagctacgacgtcatgggcttgaacccggactctttctcttatggtgacctccctaagagggtgctgacgtgctttgttccaactgagttctctgttgccgtgaccatcttc

SEQ ID NO: 322665 - DNA, 259 bp, Zea mays
acgccggcctgatcgagggctacggcaccaagctgcagagggacctcgagggcaagaagacatgggacgacttactagtgcacgtggtcgagccgacggagaagagtggaccacgccgtctggccccggagcctcagctggtacagggaggccaccgaggagtactgccggcgaatgcatcggctgacgcgcgagctgttctagcaactgtcgacggggcctgggctctacgggagccccatggcggacgcattcgggg

SEQ ID NO: 322666 - DNA, 296 bp, Zea mays
cttgcctccgatccccaattcctccttcggatctcgcattcagcgcagcgcaggtgtgaaggaagggggacgcggaggaagatggggctcgcgttcgggaagctcttcagccggctcttcgccaagaaggagatgcggatcctcatggtcggcctcgacgccgccggtaaaaccaccatcctctacaagctcaagctcggcgagatcgtcaccaccatccccaccatcggtttcaatgttgaaactgttgagtacaagaacattagcttcactgtcttggatgtcgggggtcaaga

SEQ ID NO: 322667 - DNA, 374 bp, Zea mays
ccagagtctccctggggtggtcggcactagtcgtgaacttgcgatgctgctgtctgtggtcagcgtttccacggcacttaagggtcaacatttaaggaacactccgtcgtgctgaacccaagcactttgattgatggaatgctgaaaaaaaaacatgcgtgtggcccatgaaagcatggcaaggcctcccagaggttgagaacgtgtctccagaaactctgtatcatcttggtatactgatcgatcttggttgaatctaatcttctgttaccgaaaaattctgcggctgtcgggctcgaatctgtagacggctctggcaaggagtcccccgttgctggtttggttaattctttgttgggcgatcgatgaatgct

SEQ ID NO: 322668 - DNA, 419 bp, Zea mays
gcggatgtgccagaaaagattctttcacaagcacacggaaaagtacgaacagttgtggattttctgtatgagaatgttattgattgcattgacagtgaagctgttgatgatgcatgggctgtggtatcatatttgggtgaggcggattgtcttcttactggtggtccagtcgcatcatacaactcagaaaacatagcacagctcattgctgcctctgttgcggcacggggagttctttttggaaatgctcatgtcacaccatcaaggtggcatacaatccggagcccgaagctctggcaaactggtcaatcatcttgattcaataagggccacattctgaaaggaagatttgattggtcaaagacctgtgggttttggaacttcgctgacttggtcacagaatttaaaccattggagag

SEQ ID NO: 322669 - DNA, 159 bp, Zea mays
gctgggtctctccaacacctaccaaatcattttccttttgctgctactgtcgtccctgcgtgactaatgcatcagcgccgatgcgcaagctcctgagcaaaccacccaataacatcctgaagcaaccccgccgcgcccacggcgtctgacgacgacgac

SEQ ID NO: 322670 - DNA, 200 bp, Zea mays
aaaaggcaagtgggcagagtcaagcgaaaaccaagcacaagcagtacgaagcacacatgaactcccagcaggaaatgatgcatgcgccaactgaggatattcacaaggccacagaggacaaagaaaagcagcctgagaagcagatgcaggaagagcgctcaaaggccagacgcttcgatgatgatactggaactatgaaa

SEQ ID NO: 322671 - DNA, 122 bp, Zea mays
gccaggcgcacacccacaaaaagctttggctttctttatccagtcgttactcgagcgctcagggtaacacgaatgaagcctgagtggatgccaagaggactcattagagcgatctggacaca

SEQ ID NO: 322672 - DNA, 423 bp, Zea mays
  unsure (1)..(423): unsure at all n locations
ctaatccgagaatagctggagctgttcgttttcccttccaagaagactaaggcgggggcgaggcgagagtacctgttgcgcgcctgaggcggtgcaatgtcgtcttcctgcataccgaccggcctgcggctggacctggacatggtgaaggcggcggcgtcgccggtgggcgcgcactcgtcgccgctgcgcccggcgcactactcgtcgccgtcgtcgacgctgtcgtcggaggcgtccaacgcctcgtcatcgtcggcgacgtcggtgtcgctcaagcgggctcgcgcgccgcggaagcggcccaaccaggcgtacaacgaggccgncgcgctgctcgcgtccatccacccctccgtgttccccgtgaacaagagccccaagacggcgccgncgcgcccgccgcagctctccgtgctggcg

SEQ ID NO: 322673 - DNA, 368 bp, Zea mays
gtcgaatcgacaaatgcgtgcgtgtgcgcagggctgtcgtacaacgtcgcctggtggggcggggccgcgttcccgcctgagaggaagcacgggctgctgggcatgattcgctggagaccttcctggacctcggaaactgtaacaggaccgctggggcgccggccttgctcatactgtccatagtgcaacagccgatcgaggacgacgacatgcagccgagcagtagcactcgggccacggacattgtcacgacggcggcgtagcggctgccggacgagccgacggtgcgcctcgtctgcccggaaggtaagtgcgtggacgttccttacggctactactacaacggcaaccaaattcagatgtggagc

SEQ ID NO: 322674 - DNA, 246 bp, Zea mays
agccggaaagctcctcaacctgcactcctcgccagcaagcttacttcttgaggctccggggagcagcgccggtgctaggccaccaggtcaagcaaagcccttagttccgccgacgtacgaagaagcttgctggcacggctggttcgaccgcgacatggagacaatcgccttcgaatcaaatccagcgccgacccgaactataatcaagcaaaccgacaacctccggactggcagcagacgcagtcg

SEQ ID NO: 322675 - DNA, 139 bp, Zea mays
cggaattcccggcctgacgccacacatcactaacaccatctagcacctctaaatatcttgcaataaaggcacgatcgctcctcctacggccaagggcacatggtcgcggaagcagacgacctggcagcaacactgctgc

SEQ ID NO: 322676 - DNA, 204 bp, Zea mays
acgcgatctgcgacgcgcagcctacgtacaccgtctcgcggaagctgacgtcatgccggttcggggctgacatccggtacccggcgaagcgcgcgcgcgtctggctcggcaccttcgactagacgcccataccttggcccgctcctacaacgtgagcactcggaccgtgcgccggcctatcaccaggaccaactttcccgggct

SEQ ID NO: 322677 - DNA, 314 bp, Zea mays
cggaattccgcaggccagacagttctcggactcgtactctcacacttggagaatccatctcgtgctagatggaacatctccgggctggaataaacttcagaccgggtctcacgatgctgggagtataagctatgcccgccactaagcacaattctacgtcgcttgacaaacttgcactgcaccacaatctgcacacgactgattatcactcacagcttatcactacttgcaccaacataacgattctcgtgctaaggtacgtattcatcatctacctacagtcattcggagcgactacatccatgaagctccaa

SEQ ID NO: 322678 - DNA, 326 bp, Zea mays
cggaattcccggctggagacgtcttcctctgcatcatcaatatcatcctcagcgcttacgtcccaaatgctaatgccaagtgaaggagtacggctatcatcaagccgggtaatggcttacgtacctaaataaacaaccttccatgcattcaccaactttcaaagttaagtgtgtaataattaacggccggtatgtctgtacgacaactcgtcttgtttgtaataataaaccccttgttttgtacttccaataatacaccacttttcacgcaccttacacgtaaattcatgtttgcctggataaatactataaaaaacgccatccag

SEQ ID NO: 322679 - DNA, 329 bp, Zea mays
gaattcccaccggcacctacgcatccttgaccactgtttaacttcattttatttccgcactatatctccctagatcaggctgggaccatctacatactacatggcaactaaaccaattattgactatccagccatttatgaattaagaacaaccaaaacgtattccaaaaaagcaaatctatgcacacggatgagctgactctgatcctaactcaagttcacgagcaatatctcttaaatgtgcataggcatctgtataagatccacaatgtccgtaacgctttaaacgctaactgacattctaacattcacgaaatgtacaaggatct

SEQ ID NO: 322680 - DNA, 327 bp, Zea mays
ctcttcttcacctcactaacaccagctagcaactctttctctcctgcaataatggccgctcgctcctcctcgtcccagccgcagctggtcgcggcggcggcggtcctggcagcggcgctgctgctgctagggctgcgggggccgggacggcgtcggcggcggtgagctgcggcgaggtgacgtcgtcggtggcgccgtgcctcgggtacgcgatgggcagcgcggcgtcgccctccgcggcgtgctgcagcggggtgcgctcgctcaacagccgcgcgtcgtcggcggcggaccggcaggccacctgcaactgcctcaagagcatga

SEQ ID NO: 322681 - DNA, 305 bp, Zea mays
aacaactgcattgcacagcaagatcatgctggcgcttcttcccaaagctaatgccaagtgaagggtagggctatcatcatccccaataatggcttacgtacctaaataaacgaccttgcatgcatgcaccaactgtgagagttaattgtgcaataattaacggccggcatgtctgtacgactacgcgtcttggttgcaataataaacctctagttttgtacgtgtaatattaaaccactttccacgcaccttacacgtaaattcatgtcagactggatttctcctattactgagtactgccacta

SEQ ID NO: 322682 - DNA, 332 bp, Zea mays
ggaacaaaacggaagggcgaggaggacatgaagccaagcccgtcacctgcagctgggacactaaacagataagcttggaccaaggctttccctatgctcaagatattcaaggatgccatgtcagctccaacttgcatcctctacgactgatgactacctatgagagccgccagaagttgatgccagatccgacgcccaaacagcagcagctcctaaagcacgtctagcacactatgaccccctgtaatgagacctgtgaacgaccactggaacctgctaatgggaagcccaaaacgctcgtaccagatggtgtcacggcagaagttatagcg

SEQ ID NO: 322683 - DNA, 374 bp, Zea mays
acggcaccgcagaaaaagaaaaagataaggcataggcaaaggaatcccaatcaggcaagcgaaaggatgaaccagttgctgtggaatgcggagatatcgatgcatctgatcaaggagccattccatcgaacgcgtaggtgctcgtcgggctcaagctgtgcgagcgcaagtcgcgcgagttcatggtggagcttgtcctgctcgacctactccttccgctgcccagactggaccaggtgggctacaaccggtcgacggctttcgtgtcactgcgagcaggccgtcgcctgacccacaccttcggatacatcggcaagcaagtgtggtacgacagggaggttacggactttgatgaacctgagctgatgcacagc

SEQ ID NO: 322684 - DNA, 239 bp, Zea mays
gttctagatcgtgagctcgcgcactttcattagcttgttaatgtcctgacagatagggcaactactacataacgtctacatgctcttgcccaagccaagtacaaagatgattcataatgagacactttgcttaatatcctcccttgacattcacgtcgccctcagatcctagcattatctcctttatgacatggcatgtgagatgaacgacgaatatgattacgaactgctaaaattgt

SEQ ID NO: 322685 - DNA, 68 bp, Zea mays
cgctacgtggatagcgtcttcatatagtatcacgccaaacttcaattcagctggcacgctcgttttac

SEQ ID NO: 322686 - DNA, 369 bp, Zea mays
gtacgaacttggagatcagagagaccgaggcgcccgtggatgtgcttgccttccttgacccgttggggagggaattttctggagtctgcgactcgagcagggctgcgctggcgctgacatggatgatcctggttcgtgcgtggaggcagcggaagctgaagtggctgcgatgagaacactctcggtagcactgatctgtgcggggccagatcgtggcgctcacgtacttgatactgcatgccatgtccagaatgataccatgacacggcttgcagatcctggatcattaccggaagaacgatcacagcccgacatgcaacctaggcacttgaaaagacgcaaagcgcatacggttagagaaatctatgt

SEQ ID NO: 322687 - DNA, 375 bp, Zea mays
ctttcaatccttcatgaaagaaactaccttggtgttgtagatactggtgcactttgttaaagccttgggtcaaagagtgcgatcttatctataatcttacggacatctatagcgcatgaatatctgttgctgctgattatgtattcaagtgtttctgcgagagaaatcctaatggccaggcattattagcatcaactattgcttcacatccaaaccaaggagatattcatgaacctgctagtgacatgccttttggaagtgtacttttgcaagctctggattctagatactggtgcgtttgcaccgatgtcacactctgatgcttgtctaatcaaaagactaagtgatttaccaccttttgccggtttcatgatt

SEQ ID NO: 322688 - DNA, 299 bp, Zea mays
tttactagaacgagattaattgccaaactgagctttacatcgatatctacgaatactagatcacgaacatgatcttcatcatcgacaggcacatcagcatgaagaacttagtccttatcaacttcattcagactatagctatgtacgatactaactagttcatgttagaattacatgcaatctctaatttctctattatcaaacacttgccagagctgttgaactaaggatacctcgatgatgctagaatggtcgataccacgatccacatcgatgataaccagtacacctgtgaactc

SEQ ID NO: 322689 - DNA, 420 bp, Zea mays
ggtgggttggcttctcctccccctccggttcgggttcgggttcgtgaggttctccggggttcggtttcgtgggtgagcggatcgagatggcggcgtcggatgttgagtaccagcatgcttcgtcggcggcctcgcctgggccacggacgaccactccctccacaacgccttcagcacctacggcgaggtcctcgagtccaagatcatcctcgatcgggagacgcagaggtcccgcggcttcggcttcgtcaccttctccacggaggaggcgatgcggaacgccatcgagggcatgaacggcaaggagctggacggccgcaacatcaccgtcaacgaggcccagtcccgcggcggccgtggaggcggcggcagcggcaggtacggtggtggccgtggaggcggcggctacggcagtggcgg

SEQ ID NO: 322690 - DNA, 427 bp, Zea mays
accattcccgaatggacgccacgcgtccggcgtactacgcacagtacctcaacgcttgcgcctaaagcaacatcagatccacccgggtccatgtacactctccagtctccaccaatgctaacctctcaccagatcgatgcagggctatcagacgactaatattatcgaaagtcatcatcctatgagccaaagactaaaccttggcggctcaatggtcagacagacaacatcaagtgcttccgcagctgccccacagacaaggatcgacatgtttatctccggagactctccgaatagcgcgtctgatttgagcttacctaatgtccacagcgagcttagctctagcaactgcaactttgacagcctcctcaactccataatcaaagtgtaaaagagacgatgcttacttcagcgatgacctgggatg

SEQ ID NO: 322691 - DNA, 387 bp, Zea mays
tccacccacgcattcgcggtcacagttcactcgttgaccagcatccgatgctgaaaggagagctagaggctggcatggtgaagcgctaccgttcagctgatctgacgggctcactcttgaatgactgggatattctgaagaaaacgactcaagtgaagcattcaacggctctgatccaaggcatgcatccgccgatcaagatcaaagctcgatgctcaacgtcatttactaaccagaaggatcgtttccatgcacatctgcgctaaactgacgacgaactgacgagactactagataagcatcagatgctgactagtgaactggaaaaaactatagctgatgatgcgcaacttgttcgaaagattcaatcttatcaaaactataacc

SEQ ID NO: 322692 - DNA, 241 bp, Zea mays
tccacccacgcgtacgcgatcgggtgacacaggcaccacactagcttattcgacggctgcagaacggtaggggggagatcacatgcaccccgctcaacccaacctcctaccctttccgacaaggctacgcaaagcgaggcttgcccgctgtaccactgcatgctgctgctgaagacaatcggcaaccagtgacgtcctatctgaactggtgactcaaatggcgcgcatcgcatgccaaccc

SEQ ID NO: 322693 - DNA, 294 bp, Zea mays
ggaagccgtacctcataagattgctcttactgctgcctacaccgatgggctatctcagcccatgaaactggtcatataggcctgaccatacatggttcgacaacgtgccggacctggagctaaacatagataatgccgaacactactgcatacgcgtagacggactcagatcactctacgcttggtgcggtacaaagtttactgtcacagcattcgatcacgatgacgacatcatcatgctatctcacgtctacgacagatccatctatacgactctatgacagcttctatagc

SEQ ID NO: 322694 - DNA, 179 bp, Zea mays
gtcactataatattcctataatacctgcatccccataatgaactattcatgtagtataacatctcaaacggttctccaaacaagacgcacttaaatttactgaatcacaacttaatctacctccactttttatatactgatattatacattacacactataccacataattaacatact

SEQ ID NO: 322695 - DNA, 277 bp, Zea mays
attgggtccttgacctgcacacctcgctgggattgaccttgttgagtcgaccaactggtctggccctttcttccgagaggctcgtagttatcgttgccgacatgtactatttgctggcatcgttggccggaagccatggatggagactgatttgctgttaattgcttctacatgtccaccatcttcttggttcgctagagatctcttcttgacgtggtaccacgactcgagccctggctggtgacttggccttctgtcagttgaggcctatgctgct

SEQ ID NO: 322696 - DNA, 312 bp, Zea mays
ctttaatgggagcgtttagaagtgacgcacatgttggcacttggagttatcctcccacgatgcttgattgcagtgactggtgtcttcctggagtccctgatgcttggaatgaacttgtgttttcgtatcttttgacaaatggttggcgaaacatgccgggctgaaatttatggcagcattgctcaatctacccccactttttgtattttgatatttgacattaccaggtatactagagaattaacatactcccggtacatgagacagctgcatctgctgtaggtacggtggttcactagacttctgcattct

SEQ ID NO: 322697 - DNA, 313 bp, Zea mays
cagcaacgctatcgctctctactcacttccaactcgacgctacgactccagggtcaagtatacctgagcgaggtcaatggaatattccaaagatcccagcatactccataatgatagcctgaactgctaccatcacacctaccaactgctcctcgaaacatgacgccctcagctgtatcggccgatgacttaatcgacatccactatgaagattctgatcttttacatttccagctatactatatcctctacatacacctgggacaagacacaattgcaacggccgtacgcacgatgtttcactagacttctg

SEQ ID NO: 322698 - DNA, 187 bp, Zea mays
acggacgctcaagactgggaccttcaaagagcaattggactgatggacgttggatacacaggaggggagtttgcatcagcggcactgaccaagggaggtgcggattatgccacacgcaaaccgcttgattgttgcttcgtaaaggccaaggagcgggtgcttgaaaccgacggcaactgtcatgata

SEQ ID NO: 322699 - DNA, 398 bp, Zea mays
  unsure (1)..(398): unsure at all n locations
attgggtccttgacctgcgcacctcgctgggattgacctngttgagtcgacgaactgctctagcccttcttcgaaattctggtggttatcgttgccgacatgtacgatttgctggcatcgttggccggaagccatggatggagactgatttgctgttagttgctgctccatgtccaccatctccttggtttgctgttgttctcttcttgacgtggtcccacgacgcgagccctggctggtgcttcggccttctgtcagttgaggcctatgctgcttctgcaggtccttcttacaccctgcaacactaccgtttggtgtgctgacatggaaattggggcagcaggacagctaggtgtgttggggacgcccttaggaaatcgagtcacactagatgctga

SEQ ID NO: 322700 - DNA, 116 bp, Zea mays
acaaatgatctattgagcgattatgaaaataagtacttatttatgttacgccgtttggagtttagttgtgttggaattggccatgttatttacaatatgatctatacttaaattga

SEQ ID NO: 322701 - DNA, 139 bp, Zea mays
acaaatcatctattgagcgattttgattctaagtacttatatattttacgccgtgtgctgtttacatctggtcgaattgcccatcttatccacaatatcatctttactaaacttgatattactcctcatgaacttcctc

SEQ ID NO: 322702 - DNA, 117 bp, Zea mays
attcccacctcaacctacccgtccaacaaatcatctacttaccaattataattactaattacttatatatcttacacagtcagtattttatcaatggtcgtactccccaacctattt

SEQ ID NO: 322703 - DNA, 379 bp, Zea mays
ctgcaagtctcgctacgtagcagtgcaataaaaaaaagcagccgcaatggcgagcaggaccatggccctctcctccacggccttcgccggcaaggccgtgaacgtgccgtcgtcgtccgccttcggcgaggcccgcgtgacgatgcgcaagacggcggcgaaggccaagccggcggcggcgtccgggagcccgtggtacggccccgaccgcgtgctgtacctgggcccactgtccggcgagccgccgagctacctgacgggcgagttcccgggcgactacggctgggacaccgcggggctgtcggcggacccggagacgttcgccaagaaccgggagctggaggtgatccactcccgctgggccatgctgggcgcgctc

SEQ ID NO: 322704 - DNA, 319 bp, Zea mays
acggacgatcacgactgcaaccttcaagcggcactaatcatgacttaggttgcagacagatgcggtgtctattcgatggcggtgctcgccaacccatttacgcactatatgatctgctgactgcacgatgactcctatgttacggccaagtagcagatgattaactactacggcatcttgacttacactctcctttcagcgtactacatgtaaaacagctaccctcacttccataaacggacagagtaccactatcatgacatcctgaacattgaattgccatattgatctaatggctagattgtgacgaatgaccacc

SEQ ID NO: 322705 - DNA, 326 bp, Zea mays
ctttcagtatgacgactgatcttggaaatgtttgtgataagatctgcagacttgaatgctgagttgccacataatatcgggactacatattatatagtcattcaacgcaaggctatttgattatctaatatcgacggatgacacttaaacaaaggagaagcataccaattaggactatagataagaggcatcattgacccgcaaacggatcaagcaaaccaataaggtgaaccagatagagctaaacgtgtcccgcgaacatttgccacagactttacatgcttaatacggagttgtcagacgaactgactgcaaaaatgcattta

SEQ ID NO: 322706 - DNA, 140 bp, Zea mays
tctcacacacactcactcagacaattccttttgaaagcctagtgtgtgtactagcaaccagcttggttgctctgcagcaggcactcatcatgtctcatgagaagcaccttctcttcttcaaccaccacaagttacgacta

SEQ ID NO: 322707 - DNA, 263 bp, Zea mays
ccgattcccgtcgacccacgctccggcgtggacgttctcgggaacgaggtgcacgttgcacccaacgtcagtgctgcgggtggtaggcatgcgggctctcgcgcgctcctttgcaccccatcaagccaaggtctcactttcctactcccatcgcgctcgagtctcgtaatgctgtgcccgctcgcaggcttcaaatccctgacgattcatccattccattcattccatacagcacactcacagcaaaacgttcttttaccctc

SEQ ID NO: 322708 - DNA, 220 bp, Zea mays
  unsure (1)..(220): unsure at all n locations
agcttttccaagaaacctagctagctagctagtaagaggcacaggccggcaccatggggcaccaccattcccaccacaattctcattctcacaaccgtacccaccaccactctcactctcactccggaggaggtggaggcggcngcngcngtggcgccggcggtggaagcagaagcggagtggctaaatgccactgtgattgctcacaccatgatcattc

SEQ ID NO: 322709 - DNA, 168 bp, Zea mays
gtcacacacactctcacaaacaagttttttccaaagccaagtctatctactaccaggcagctatctcacgcgggaggaagctgccatcatctccgaccataaccaccaccacttcttcaaccaccacatcaatgacctgcatcataccgccgtccagctcctctactc

SEQ ID NO: 322710 - DNA, 150 bp, Zea mays
tcgattcccgggtattacaaatgggcaattggtgatgagctgcgaggagctagctttgcagatcgcagtgttgcttgggcggcgcatttcgggcggagacaccacactgctacactgaggcctgagccatggccactgacaccaaagcgg

SEQ ID NO: 322711 - DNA, 174 bp, Zea mays
acaacaaaaatgaccatactcttcctcatcactacaaccactactacattacaactcttgactaactctccctacaatacatattcaatagctacataaatgctgatcattatcacaatcacaagcaccaccacataaacatctaagccatcccctactacaacattgaccttt

SEQ ID NO: 322712 - DNA, 241 bp, Zea mays
  unsure (1)..(241): unsure at all n locations
cccactcgtccggcccaagacgatccttatctactacttggacaagttgcccagaaggtcgttcctttcnctaagggggatcggctgcgacaaggcaggcaaaaatggcggcaaaggctgcaagctcgcaagggtttttgagcataacgaaaagccggcaaggacggcaactcctcactcggcagccatcagcggcttgccgttcttgcaggggaacccatctgcgctctcgcggtcactg

SEQ ID NO: 322713 - DNA, 433 bp, Zea mays
cgcgttcagcaaccgctcccgtggacacggcaaggcagggccgggcctctgcgcacggcatccggccggctacagcccggagccgtggccatggcggcggccagccccgcccctagtcgacctcggctctccggtgagctgccctccatatcctggccgctcagtcgttcgccgcgccgatcgcccaggaagatctgcgatgctctcgtcgttgccgaggttggtggccgagtgaggctccctcttctccctttatccctcttcctctctggctgctccctccctccccacaggttcttccccggcgagtagccctgtctgccccctgccaagcagttcgtctcctcccggcgagcccctgcgcggctccccttccctccgatgtgtggccccagcgcatggccatggccgagtccctgcagtcgtgccccct

SEQ ID NO: 322714 - DNA, 224 bp, Zea mays
ataactcaaggagacacttgacgtggatgcactactcatagctactgtaagggcacccgttgggcaaaagacttgggtgggaaattatcaatgtcgttacacatcaaggttttgatcctgttgatgatcggatgcaagttattgatgcaactggcaatgtcggcatactaaacctgtaatctctaatttatatacgatcggacatgccaatggtaagctcatgc

SEQ ID NO: 322715 - DNA, 315 bp, Zea mays
aatctcatcacagtactgttttgtttctcgtattcgcttacggtaagggggcaggtaattttaaaaagaagggggggccaagaaatggccatgactgcacattccttccagccctactaaaggcggacttcttgctactgtttctagcatactttccacgagttggcacacgcctcactgtactcaataacctggcgcatattgcaatgtctgttgacgctaatgacacaactattctgttgtgcctctttctctactgcaaatgcgatgctcaaatccttggtggatctgactctgaatatactgtacggtcaa

SEQ ID NO: 322716 - DNA, 287 bp, Zea mays
cgcttaccataatttctcaaactcttttagatacttcgtctgatgaaattcggccagattattatgaacgtacaatgtgcaaaccaccaacggttcaagctaaaaacttctcatgcaaccatctatttcatctaccttgtttgtgcatcatacgcttgatcaatgactaatctaatgatactgctgtacaacttgttctacaccgttcttattatcatttgcacatccacaaatgtctacaaattcacatcgtgcaaatgttcatcaaattatctaacaacttacta

SEQ ID NO: 322717 - DNA, 402 bp, Zea mays
ggtgggttggcttctcctccccctccggttcgggttcgggttcgtgaggttctccggggttcggtttcgtgggtgagcggatcgagatggcggcgtcggatgttgagtaccgctgcttcgtcggcggcctcgcctgggccacggacgaccactccctccacaacgccttcagcacctacggcgaggtcctcgagtccaagatcatcctcgatcgggagacgcagaggtcccgcggcttcggcttcgtcaccttctccacggaggaggcgatgcggaacgccatcgagggcatgaacggcaaggagctggacggccgcaacatcaccgtcaacgaggcccagtcccgcggcggccgtggaggcggcggcggcggcgggtacggtggtggccgtggaggcggcg

SEQ ID NO: 322718 - DNA, 167 bp, Zea mays
ataagaaaagtggtgatcaacagtattctgcatatgaatatggccctgacacaactgatggttcaccatactttggagcaggatttactgtccaaatctcacaagcacatttcgatcaccaggccgaagatgacacccatcacaagcacggaatgaggcaccacgtg

SEQ ID NO: 322719 - DNA, 346 bp, Zea mays
gaaaatatcgcacttggcaatattataaatgatgaggtacctataccatctaatctgatgatgacactgatggaagctatcggctatgttattccttggccaactacacatgtgaagcaagctagaagctcatcttgtacccgacacgagttggtacctgctgcacgtggacaaagctagatggtaagcctaacataattgctacgcggatcaattagattctagtagacactaacacaataacgtgatatttgtatgacattgccactttgactatgcttcgttgtgaacacaactggcagatactgaacatgtatgctatctagtctgacagcaccgtgaaatt

SEQ ID NO: 322720 - DNA, 302 bp, Zea mays
gagcggtgcgggactgactgctatcctagagcacgtacctgccggccatcgtcaggggatccattcaccattggccgagtcaacgagcataagtacaagatggcccgcacgcgcaacttagataagaacatcgacgtcatagagagccagctctagaccaacatgaaggccatgagcatccagagagcacgctcgtggcaagcattccatgacagacgtgtatcagctcttgcccaatgttaataagtgataggactgaacttaggaaccattgctagttaggccagggggcgacccttggg

SEQ ID NO: 322721 - DNA, 107 bp, Zea mays
aacgaactggtgggtgggttactgggttggggctggaggtcgtcgccgacggccggtggaggtgctcgctcctgcctgtgtggatctgccgcccggtggtggctcgc

SEQ ID NO: 322722 - DNA, 237 bp, Zea mays
tacaaacttcttcacaatactcattttatctctcacttcttgtgtacagcacacccttaaaagcattagatcctaccatcattactccacattaccacactttaactcaatatttcatccacttttaagcccatgatcacaatgagacacaatttataacctctgacaataatgatgcatataacacgaccatattcatccaaaattcataaaaacccttcaacattatcactcaca

SEQ ID NO: 322723 - DNA, 340 bp, Zea mays
ctctaacccaatcattacttaccaagttctgtcctattcatatctagggctatccttcaaatacattcctattcatcatcaaattccaattcataactccattcatcgtctatctcatcttctacactatctcaatcaaaacacttttgatcaccataaaactattttaataccttataaacttcaaaatgaacctttacttacctaccaaactattcattattattctcatatcgctaataaaatctacatgttaaatatttcaaaacttcaaactcaagaacttattacacttcataaagctcatcttataactttatacaacccatacataatatca

SEQ ID NO: 322724 - DNA, 280 bp, Zea mays
gaacacgcacctcaagaagcggctcgccaagatgggaatcgaccccgtcacgcacaatgcccgcgccgacgtcgtggggggctggtcttgcgccggcaacaactctggagcgcgctacaaggccgtcgtgcacctcagtcacactgcgcagtgggagagcgcgcgcctcgaggccgatgcgcgtctggcgcgcgaggccaggctgcgtgcccttgccttgccaccgtcgccagggccgggacccgcttttagcgggctcgagtcgtcgacatcgactctg

SEQ ID NO: 322725 - DNA, 227 bp, Zea mays
gcaatactacaaaccaatctttgctttaacatccaactcctaccctatcgattatgctcattcaaccttatcctggttcaaatccactagatattcttccaacaatgcctcacatcttcatttaaaatactggatcttcaccttaatttcaatatccaatatcatcactgccagctgatcactaacttcttccacctatatcatcttccattgcataatctaatcat

SEQ ID NO: 322726 - DNA, 344 bp, Zea mays
cagcaacttattaattacctcttaaatttcgaaaactctaaaccaataatatggctaagtcatacttctggatgccaggatattatgcattatatgcacacaaactttgactcattcaaaaacgtttatagtgtcatcttgcatactcaactaactgacagtcagtataaagacactcttccggaaacatattaaatgatacaccttgcacgcaaactaattaaccactgtccacgaacctatctcatgcctagaaaagcaaactcatatgctcctattactgcctacagataccactacctttgttcatatataactcatgattacatcttcaattcacatct

SEQ ID NO: 322727 - DNA, 246 bp, Zea mays
attcccgctgcagggactcctaccaggtctgggtctgctggctcttcgacctgatgagctgcctgtacaaggagggggacagcatgatggtcagcctcatggcggtggtggcgtcgtacgtctactcctgggtatcatagccaccagattcatcaagccatcagcatcgtatagctgcacaaggcgtccctcgagcttatgactctgccgattcggtccctgcagtatgatccacttgtcttactc

SEQ ID NO: 322728 - DNA, 237 bp, Zea mays
tcgctcactcgtccggaggggagacacatctggttcggaggttccctgttgttaccatgaagcggaggctactgtacgtgaaaccgcagctcagttttgccaattttgatggggaacagtactaattgattcaagcattctggtagttggcatcgcatcatttggaacgtattatgaatatgctacagatcacatggaacatgtttgcattactttggttcatgcttcaatatgttt

SEQ ID NO: 322729 - DNA, 190 bp, Zea mays
tcggtcacaagccaaccatagtctcgtttctagccaagctaatcaagttaggggtagagactcattccagggctggttggctcctactaatgcagctgactacacatcaggctacattcctagttcggagcactcatccatgtccattgccggcactctcctacacattctcagactactctctcgatag

SEQ ID NO: 322730 - DNA, 388 bp, Zea mays
gcacatgataattataggagtaaattgaatacttgctgtttggactgtgttcagttttagtgtgcaggtagtttagtgaagtaaaccatgttttctgtagaaatgttatataggaaagttgtagatcacttctttatcttgcttgtgtataaatttcatgaccacaggtttagtagtttaggagttatgatttttccaagtacagtatacgaatctatccagattctgtacagatttcgaaaactgtcttgtttgattaagttaaacttagaatcagttcttagtaattataaagaagttgtagtacttttcttaagctttccaaaaaatttggatcaccctttttggggatctataaattaagttagtgcttgttgagttaggatct

SEQ ID NO: 322731 - DNA, 346 bp, Zea mays
taggaactcatcaattacctaataaattttgcaacttctgaatgagtaatacggcttagtcataatactacatgccagaatattatgcattatactctcacaaactttgcctgttctaaagcggcttctgaggtcatcttacaaaccccagttagctacaacaagcatatcaccactcctagccacacagctaacatgatcaacctttcaaccaaaattattagccaagatcatctaattcatgtgatgcctacaatagcaaactcatatgcttctattactgcctacaaattccacttcctttgatcatatatcagtgatgatgacatcttcagctcatatctaa

SEQ ID NO: 322732 - DNA, 209 bp, Zea mays
taacaaccaatgacagcacatcaagtactagaaataactttataaaaaatctggctagggagcataatccaagactcacgaactaaaaaaaaagccgcaatattactgcctcatctttttccagatcgatgtcaccttcagcagcaaatcagatcaatgcatgaaaagaatgtcagctaatacatatgacatactctaacaggccatta

SEQ ID NO: 322733 - DNA, 170 bp, Zea mays
attcccattcgccgacgcctccctcacacgatacttataataatacattcaattcttacttccactactgtcttcagttatatagtgcccgtaccttaattcagtgaaccatagttttcaacctacatattacatcggaaatgtgaccatcactcccaaatcttccttat

SEQ ID NO: 322734 - DNA, 253 bp, Zea mays
tgtcaaagtattttctggtaaaatgtatcaacaaagctaaaaggcaaaggactatgttctgtcttcgatagacctgcagtataaacttgaatgtttttgtgtgttctacagcttacagctaagtcggcaataggaataaaggtcgaaatcttgtttaacctgccctattagcaaatatacattccattgtggaccatgggctgtacaatggaatgtatatttgctaatagggcaggtttaacattccattgtg

SEQ ID NO: 322735 - DNA, 237 bp, Zea mays
agacagcttatgattgctccatttctatagctccactagatgctgatattatatgggtcccgcaatatcataacttgatacatgcattccaatctgcatattacagctgtaaatgttactctacgctatgaatcatatcgtcaacataatgcttgaaaactctcacattatgaacatccttgcatgcaaaggatcaaacaccatcattccttaattatatactctttaaccatcaaa

SEQ ID NO: 322736 - DNA, 390 bp, Zea mays
  unsure (1)..(390): unsure at all n locations
agcaactcatcagttacctaataaataaggaaaattctgaaggagtaatatggcttggtcatagtactggatgccaggatattgtgcattatatgcgcacaaactttgcctgttcgaaagcggtttctggggtcatcttgcaggccccagtaagtgacagggagtatagagcaactgtctcggaaacagctgaaatgatagacctggcagccaaactgattagcgagggtcgtggaatggatttgatgcctagaaaagcaaactcagatgctcctattactgcctacaggtaccactccctttgttcatatatgggtgatgatgacatgttcagttcagatctaagtgaagatcagctgangcagagacttggtcatatgtcaatcacac

SEQ ID NO: 322737 - DNA, 372 bp, Zea mays
caagatttcattggccagtgtgtaagagttgatcctgagagccggccttctgcatgacaacttttggagcacccattcgttaacagaccactgcgggcttcatttgaatcttcatctcccccagccatctgattgtactattgatatagtggggtgtttctcgttgtgagaccaatgcgcaagtcacgtgttggctttcagagcagaagcaggacaggattcaagaacgaggtacagtccttgcattgatgcaagcagcgacaagggtcttccgcttcggtggaggaaactacgtcacgcggtgcggcggggcaatcttcccgtgagagggtttctgtagaaagagctgcacgacttactgatccatggggc

SEQ ID NO: 322738 - DNA, 246 bp, Zea mays
ccgctgtcttgcatcaccacgagcgtgggctctctcctttctcgactacgactggtccaccgactctgccggctgcggcctgccgaactgcgccaggtgccaagcagccatgtcttcttgggacccttcgccggccactagcaccaccagctcaaagatggcgagcataccgtctctcgacagcatgaatgcgttcccacatgcggaagaccacttcgtgaagaagacttactctttcgctgttgt

SEQ ID NO: 322739 - DNA, 203 bp, Zea mays
tcttcggcaaatatggaagaatacgagtagtggagttgaatcgcgactatgcggttaagtagtccagtgaacatcgggatgcccatgaatcacggtgccaactagatcgctcagatgcagactaaactgtctcagcaaaaaatgcctgacaatcttcttcatttgcaggctataaattcacatcgtcctgatcgggctctaca

SEQ ID NO: 322740 - DNA, 184 bp, Zea mays
acagcattgaaagtgactgttcatcatcagaaatgtcaagaagttcgatatgcacgagatgttttggaatgccacagaggctccgctttctgcgggatgactgacgccgatgtacacaagcatatccagcacatggtgaagttcattcctcagtatgtcaaggacatggtgcattatatcgaag

SEQ ID NO: 322741 - DNA, 189 bp, Zea mays
taaaacttatatccaatgcttaagtcccaatatttgattgctctatctcagcacactctcctagtatgcatatctgaatattagaagcaagcttacttaaatatcttttccactaccgacacctacacattcttaaagtacttgactgcctgacatagtccatgcaccagttctttatgcacacatcac

SEQ ID NO: 322742 - DNA, 89 bp, Zea mays
aatcaagatcgatactatgcagattacatttatggcgcctaagactgaaaacgtcgagtaggtactcagcaacgtgagcattgcatacc

SEQ ID NO: 322743 - DNA, 213 bp, Zea mays
acctgtttcaatactgccacccataattagaagttaactacctcctcatgttcttgtgggatcggaaccttaatatcagaatcatgctttcctaactagcactgcaactaccgaggcctttttattatcaaagaccatcactgcctccacacataaccacaggataacaaacagcaccattcactttaacaactcaaaatgcaccacttattt

SEQ ID NO: 322744 - DNA, 377 bp, Zea mays
taactgcatcaacttctctccatctcctacttcaacttgctcgacatccatattctctccgggaacgttcactacaatatgttgatctcttcatgcaaaaatctcatgataataaaaggctctacctctaaggccagataatctctgatccatacataaacatatgctacacacactccacctgtcaactctcatccaagatcacacactgatcgtacttgacgaagaaagaggtaggatcagtgtggcttgagctctccaatgttgtacaaagacatgtttctttctgaacccaaaatggagaaacatgtatgaagcgtgtatataagatcttatctagcattttgttttcatttgtatgagcgatcgaaggctgt

SEQ ID NO: 322745 - DNA, 408 bp, Zea mays
  unsure (1)..(408): unsure at all n locations
gggagataggatcattaagtaatcttacatttctagacctatgtggtgctcagaatctaacggacgatggccttgcatgcatatcaagatgtggacgtctaacatacctcaatttgagttggtgtgtacgtgttactgacactggtattgtagctattgcgcaaggttgtcgagccctcgaactgttaagtttgtttggaatagttggggtgaccgatgcatgccttgaggctttgtcaaaatcttgctcgtccagcctcacaacactcgacgtaaatggctgcatagaggaggagccgggatgacctgctgaagctcttcccatcactgagttgcttcaaagtgcacagctagcatgcacggtggttctcgatggctttgtattctacatctnagaaagggaaagga

SEQ ID NO: 322746 - DNA, 204 bp, Zea mays
gcgcaagagatcacgctactactcatgactcgccaacatgcatatatcatggaacgcggcgctacggccactcactgaccggtcctggctgagctcctgctcttcctctacccgacctcgcccatcgacactgtgctctggaccctggacctagaccttttccaccacgtcccgcaagacctccgcgacaagttctacgcctac

SEQ ID NO: 322747 - DNA, 101 bp, Zea mays
atacgcgccctgtatccggccactaagcgctgtaacattggtgaacacgggctgattaaccgccacactttccatctcccgatcaaccgacattctcgcta

SEQ ID NO: 322748 - DNA, 253 bp, Zea mays
cgagaccatcgacgagcatcttcctgcatctgcaatggctgccgctaccgtgtccgtccaaggcatcgagcttaactaccaggggctagaggtatccgcgcacggccttgactgcatagccatgatctggtgatacaacacgtcctagcccattcctaacatgatcaagatgataaaccacgccatgaacagcgacgctacgactaatcgacactgactacaggtcaagaaacacacgaacgggctccatgca

SEQ ID NO: 322749 - DNA, 302 bp, Zea mays
tcgcgaagccatagcctatcacattttctcagttgctggatcgaacgttaccaactgtctgtccgtcaaagttgtcatatctggctgagcatacattgtctgagcagatcaaagagctcagtgcatacataagtgttcccgaataccgttacgcttgtggaggtggactccaatcacttaacgcttggtttgctccagagggtacagtgtcaccattgcaccatgatccggattacaacatactagctcatggtttgggcaggaagtgtattagactctatcctgctttcatagctgaggac

SEQ ID NO: 322750 - DNA, 322 bp, Zea mays
aaaaacaaataacatacaacataaaaacaataaatgctctgaaacacgaaaaatgtacggacagggatcattaactgtcacattctagttcaaggtccatagatgactcccagtcctcgcaaaacaagcagaacgtcaactgatctcgcgtcgttgctggcacaagtgcaccttcttgcattgcctgcattccaaagtctgatccgaactcttccacagatgctaaggttgtatcgacccatactgacattattcatgcaacggacctgatggaagctaccgttccgatcttggatgacttatacgtgccaaatataaaggt

SEQ ID NO: 322751 - DNA, 254 bp, Zea mays
accggttcggattcccggctggaacacaccgtccagaaacgaacacacattacttcacacactcataccacatggccgggctaattctcgacgacctatacatagacccacctgcaaactctattgcactcgcactatacaatcaattatacattcatctcaatcagataccaactgcctttatccactcttgagccaatctaagactctcattagcagcatgtcatagactacgacacttcacatcacaacta

SEQ ID NO: 322752 - DNA, 277 bp, Zea mays
cctgaattcccgtttctacccactcttcctgactagttctagatctctagcatcctcccttttttttatctttattatctcaatttagttagttattttaggacgatagtatataatttcttaaccattaccaaaattctttcaaattaaagctccaactaacttaaatattcctatcctaaaacctttttaattacaccatttcatccaaaaacttttaatccgaacctctatatcaacccttcccaactaaaactattccccaacaaactttcca

SEQ ID NO: 322753 - DNA, 354 bp, Zea mays
attccctacgctagccatctcatccttctcaatatcataaacttcctttgctttataatcacacttaataacactataagccagtttatctagaaagagtgcttccactttaatttcaccatcatcccttctaactacaactttccctatctctcatcatatttataatttcttatattacatttttttttcacatccatctaataaaaaataattttaactttattcatctttacaataaccactataatacatcacaatctctttcactatataattattaacaatattatatatcactaatcacatccacattatattaatctattccttttacattttcctataactcta

SEQ ID NO: 322754 - DNA, 230 bp, Zea mays
  unsure (1)..(230): unsure at all n locations
tccttttcccatcttcatacaacccttagtttcaaaacattgctaacatcaactctatggtacagttcactctaactaggtctgccatcaactcctaaactattaccaacaaatctttcaaacanaatctttaactaacttcantaatactcttccaaaactcatataatcccaacctaacataccatttattaaatccttaactactatattaatctcttcttactttt

SEQ ID NO: 322755 - DNA, 307 bp, Zea mays
cacttgacctgctcacctcgctgggattcaccttcgtgagtctacaaactgctctggccctttcttacagatgcttgtgcttatcgttgcctacatataccatttgctgccatcattatccgtaagccatggatcgagactgattttctgttagtttcttctccatgtccaccatctacttgatttgctgctattctcttcttgacattgtcccacgactcaagccctatcttgtgcttcagccttctatcacttgaggcctattctgcttctacatgtccttcttacaccctgcaacactaccgtt

SEQ ID NO: 322756 - DNA, 158 bp, Zea mays
ttccctctctacgcatcttcctagacactatctatcctatcctataggtttctgttcacagcatacatcaccactagaagttcactcaacatggtcgacttcaccaacaatatcatatacacctcattctccttcaacaccactaccacccattctcc

SEQ ID NO: 322757 - DNA, 221 bp, Zea mays
cctgaattcccttctctagccacgcttcccatcactcttcttctcatccacatcgactggttcatattcaacagctcatcaccattgcaagttctcctaaactggtccactctctcaaaacatttacttccgatcttaacaaatccttcctttccactatctaccactcactcaccactcttcactcctactaccctaccctaaattccaatatcctacta

SEQ ID NO: 322758 - DNA, 391 bp, Zea mays
agccactcgttttagtttttggaaattctctaaacttgagagtaatacttttaagttgtacatgaagtatttgttaggtttaatattgggtgccgaaaagaattgtttttgcaagttactttatacaacactacttgtctcacagtaatgcttctgcaatctactaaggtccactatactctgaagggatgagctgatgatgtgtttcctcttcccagacaattggctcctttcagaagaagtacaacattggatcatttgagctgctgagcaaaactgcgccaattcaggcactttcactcattatactgggcccctttgtggactactatctaaatgggcggtcattgttgaactaccctttttcaggaggggcaactttcttcatact

SEQ ID NO: 322759 - DNA, 222 bp, Zea mays
  unsure (1)..(222): unsure at all n locations
tcttcctgcttctcctccccctcctgttcgggttctggttcgtgaggttctcctgggttgggtggcntttttgagcggatcgagatggctgcgtcngatgttgagtaccgctgcttcgtcggcggcctctcctgggccactgactaccactccctccacaactccttcatcacctactgctaggtcctcgagtccaagatcatcctcgatcgggagactcat

SEQ ID NO: 322760 - DNA, 425 bp, Zea mays
  unsure (1)..(425): unsure at all n locations
tcttccttgaactcttcttgtaggtggccagaaagttgctgtggtgtattttagagctggctatgcaccaaatgattgtccttcagaagcagtatgaatacattggcctttgcctttcgttgaagtctttgttttcagctatgaagactaattgcccaaatataaaattctttcagacatttcagttttttctttaacatatttgagttgttctgagaagggtgggcctgcagtggtgaatcagcctctccgtatttgtggagaaaaggcttgtctcggtttatccctttccttgacccacttatatgggagcctttggcactgaatctgccctttttttgtatttgggtggtttagcatttccttgttacacgttaactntattttctatcttgcaagttgaaacataaaagtcaaattacttt

SEQ ID NO: 322761 - DNA, 334 bp, Zea mays
tcttcctcatagattcattaacatcaaaaccacaattctcctaacgtcccctataaattctatctgtctacatttagaggctgctcagttctctagcaacataacaactctatcaagtagattggagatatagatcgtagtggtcatgtatattggagatatagatggtagtgatacacgtcgcaacctatgtgtgacctctttctaactgtacaattccagtgtaacaccaagggtccaaccttaatttccccatttaacctttgtcctactaactgccctgccattgcccgatatctcctgttgctaaggctcaatctctgaaaatcctact

SEQ ID NO: 322762 - DNA, 217 bp, Zea mays
tcatcctggaactcttcttgtatgtggccagatttttgctgtggggtattttagatctggctatgcaccaaaggatggtccttcacactcagtattaatacatcgtcctttgcctttcgttgaactctttctcctcagctatgaacactaattgcccaaatataaacttctttcacacatttcacacttctctttaacatattcctacatgttctac

SEQ ID NO: 322763 - DNA, 376 bp, Zea mays
attcccgtctcgaggcactcatactcacactctctttctctctcacttcttgatctcttctatcgggtcaccaacttcagatgttttccctctatggacacggcgaaaatgttacaaccctctccctacccaacttaatctcattacaactcatcccactttcatccgatggcctaatacctaatataccctcaccgataccacttcccaacagacactcaccctgactgcctcactcgacacaccctgcatccactcattaagctctccagctttcttgcttactctcatcttcacctctacactttccatctccctatcacccgctcctttcactctcttcccttactttctttccacattcaccaactttccc

SEQ ID NO: 322764 - DNA, 330 bp, Zea mays
ccctcgtgctcgtctcactcttcagctccagctccggatctgaaaggccgatcagtcgttggtcgtttcgagtggtcagccagagcttctcggtgagtgcgagaattcgggccggagaactgggaaagcctcgaggagacatggatgggttacccggagagctgtgcctcaagatcttccacctcctggatcaccagtccctcgcctcttctccccaaggaaatggagggcgttgacctcggatgatgaactgtggcccaagctgttcaacgacaggtggggagcggacgccgcagcgttctacgcgccggagggatccaagtcttggaa

SEQ ID NO: 322765 - DNA, 263 bp, Zea mays
tcccgttcacagcttgtaaggagggagggagccatggttgtcagcacattcactgtctccgggattgagatcgggttcggggtcggctgcttctgcggggtacctttacaattcacatgaatgcctcttaacacgttcggctaggttatctgctgcaactgcaaagtcaagtctctcactatctattgcctcaatgaaatgctctaggttccaagtctcaatcttcaagatcactattccacagctttgcacttccataatac

SEQ ID NO: 322766 - DNA, 423 bp, Zea mays
attccttggtttagacactcatcctcctactaccttcaaatatggcttggtttatatctattctcctccattcaaccgataggtccttaatcaatgttggctgtacatttttaccaaaaataatctccctattactaaaaaatattctacttataaacaataagcttagtctataactcatttatcatataatactaaccattttcacaataatatttataatctccatcataacctttcactctacactcatattaaacatcaatttcacaatcctaaattttatacctacatttctacccatactatccattatttcccaacttattgctacatccttcatgttaaatatctccatttctacatgaataatcttcataataaaaatttcaatgatctttcatactacaacattcttttaac

SEQ ID NO: 322767 - DNA, 158 bp, Zea mays
tcttcctgctgatacttatccttatcggatgaggtttataccgagtatccaaaaaaaatagttcgctatatttaatttgcttgctgacttaattcccataatccccgtgtacatatctatcaccctgtgaatattctcagtttgtaatagggacgatt

SEQ ID NO: 322768 - DNA, 204 bp, Zea mays
ggtcgcgagcctattcacgtaaagggtgaggcgtcgtatcctacgcacttcaatcgggtgggcataaatcgtcgggactagttactactttatcgatcggatttgtctcatactgggagctatcactaattatgctatcttgaatacgaatcattacactcaatcgatcgatgcagatgaagtctattaagccattcagttcat

SEQ ID NO: 322769 - DNA, 204 bp, Zea mays
tcttcctcttactcttttatgcattctttaatgcttgatatcaggctagtacttttcctgaaaagtccttaaccgcgcgaacatgggttaatgtctaacctggatagattacctcattactacaatatccatcaagatgaaatccacaccaaacttttccaattattttaaaaaaggttccttccaattcttaaaaatttaccc

SEQ ID NO: 322770 - DNA, 397 bp, Zea mays
gggcaaggcaaaattaaccaacgagaccggctaacaaccaggcaactcttcttaactgttgcccctttgggcgtgggcgcgcggaggcaggggtggcgtacggcggcggcggcaaccatgaacatcaacgcgaacggcggcatcctgtcgtacgtgaacatggaggggtacgcccgttgggtggccactggcgtggcgtcggccttcttcgcgtccctggagcgcttctactgcatccacctacacaccgtcgaggacgactgcagcgacgaggaccccgacgaggccaaggaccgtcccctcatcttcttccgccccgacgccctacccgagtactactacagccgttccacattctgcgtcttcttcgccaagatgtgacatgcatgatctgatc

SEQ ID NO: 322771 - DNA, 361 bp, Zea mays
attcccaggtctagccactcatccttatctctccacaaaaccctcctccgctttacacccttgaatcctactactctgtcccgtaattattctcctgcacctctgcaacaaccaaacattatcaccatcttccctatccacatcgccatctcctgcatttacctctccttctatcacctcttcttatacacccaacttccttactctataataaccatcacttactataaccaacccgatctacctatcaataccctgatcactcatttcttgaaagtctgtcatctattcaaccatctattaccataaacagtctaacctgatctccaggtattccacgacttctactaattccaatact

SEQ ID NO: 322772 - DNA, 68 bp, Zea mays
attcccgggtctgctcacttcttcctaacaagtaatatggcttggtctggttctcaaccaatgagcat

SEQ ID NO: 322773 - DNA, 378 bp, Zea mays
tcctatacaactactccgtaggaggacacatgatgtcattttaatatcttaattcggatcggttctcctgagtcgctgctgctactctcacatcattattctttggatactctactcgctcagatactagaagtatgtgccaccacaaaacacgatgatccacaaggagccaaccacggtactctcacgaaccaacatctaacatcaaagagccactaatgacttaaatcgtaaacctcatgtgaacctccaaattctttgaaatttcccaactatttgagctaatccttgtcaacagaatcagattctctacactaaacttgatccgttaaatgactcatcaaaatcttcacaacagaatccaaacgattatggtcc

SEQ ID NO: 322774 - DNA, 334 bp, Zea mays
ctagttctaatcgcgagcggccgcgctttttttttttgtttttttttttttttgtttgttggtttaagtgggcgggaaagtgattttaggcagttattgttgttatggaaataagtgccacgcaatgatcaagcctctggaggtgtcattcttcttaataagtgacacgcaatgctcaagccgctggaggcagatttgtatttgcatttgtagtgtgtgtgtgtgtctatatatgctacctgtggtgtatataccgcctgtgctgcaatgttcggttgagactttagacaactatactttatgaatgatttacatggttctgctcaattatgtg

SEQ ID NO: 322775 - DNA, 407 bp, Zea mays
gccacgtctcctaaggcttcgtctgctgctgttttggagtcctctactggtcatccgtgctaccggatggttctctcggagacggacgtacagtgatattgacatctgcttggagaagtgccgaagtgatactatcggttgatgtgttaagtggcaaagtggcaagaataactccggaaggctcgtgctattcgtggcgtgctcttgcgttagatggcaccaatgttcttgctgtgtcaagtagtcccatctaccctcctttcatcatctactgacgacgtcttgccgtgacaccatctgagggtgaagcacgtatatagacctgggatgaagttactagtccattcatggcattcaacatcaaggttaagtccttgttgcttcatcacagccttagcatacttaaa

SEQ ID NO: 322776 - DNA, 347 bp, Zea mays
tagctcactcatccttactaataatctcttcttgacctgactaacaccacctagcaactctttctcggctgcaataatttccaatggctcctgctcctcccatcctcatctattctcaacttcaactatcctcacaacttctctactacttctaactcctagtacctggacttcttcttcaacattcagctgcaactaggtgacatcttccttttctcctttcctaaattactctattttcatctcttcttctccctccacatcttactacatcaagttacgctctctcaacatcctctcatattcatctgcataccatcattccacctgcaactgcctcaaaatca

SEQ ID NO: 322777 - DNA, 142 bp, Zea mays
tcatcatgctctgcatgctaacaggactcatctcaagcatcactgcagcatgtgcagcgatatcctgaacgacagcaacacctacggcaacatcaacatactgcctacacttcaaagaatcgtcaatcacaacataccactt

SEQ ID NO: 322778 - DNA, 181 bp, Zea mays
attccctctcgacgcactcttccttctcactctcctctcctctctcactgtttcaactccacgcttcactcaaccttaatatgttataatctctaagctctaactatccacaccactccttcatctatccattacccttctcatccacacaaactaccacctcctacttccaaacccccac

SEQ ID NO: 322779 - DNA, 300 bp, Zea mays
ccgtctgatccagcaaaaccttttcaagcaaggtacgctataaatcctcagcaatgccaggtaggtcatacacgcatgagcttcagaccagacgaataacggtacgcaccactcacgtacacaaatcacttgaagtacattcgttgctctaacttctaacagcgctgaacgactgttaaagctatctagcaactatcagtgatccaacatgtgaaaagccacacttactgtatagaccacacacattgcctgtctacatgagggatagtcattacccatgatacatccaataccacatca

SEQ ID NO: 322780 - DNA, 240 bp, Zea mays
attcccttctctagccacgcatcccatatcattctataaatcatatatagccatggttgaacacacaactaactcactactaggcagcgtctattgatgggacgtcagtcctcacactactatcttccgatccaacgacttataaaattcatatctgcaactaaaacaaacttctacgtaacatcaaacctattagatcactatcagaaaccaaacctatacacattcataaccactatc

SEQ ID NO: 322781 - DNA, 151 bp, Zea mays
taatcctcccattgacgtacgctaggggttcggagcatgccttcccaagaagtgggactgcttccttcgtcgggggggaaaattgggaagactccggtgcggattaaggccgttgtgtactccctgtttgcctttcatcataaggtgattc

SEQ ID NO: 322782 - DNA, 335 bp, Zea mays
cattcaccggggggggtgcaacgaccataatccaaatggcccgcaagcgcaacttggataagaacaatgaggccaatgggagccagctctagaccaacatgaaggccatgatcatccagagagcacgccgaggccaagcatcccaagacagacgtgtaccagtgcttcccccatctgaagaagtgaaaggcctgaacttagcaaccaatgctgatttgaccagcgggcgttccttgtgttgagggtgttcattccgtgttatcttcccgtcagtcatgcgtcctgtcctatgttaacctacataataaagtgatgtcatgtccacttctagtgaa

SEQ ID NO: 322783 - DNA, 214 bp, Zea mays
atcgacccacgcgtgggctgaaaacagccgtggaaaagttggttctgaaacggtgcttctaatcaaagggtccaaatggcacaggtgctgctgcttactgtggttttgcaaccaaaatactccaaaacaatcctgttgatcaaccaggacctaaaagtaacttggtttccaatgcataacttaaagggtcccatttttccacccatattaaatt

SEQ ID NO: 322784 - DNA, 327 bp, Zea mays
aacgccattgcccccgcaatccccttccaccgacggcgcggaccttccgacgacgaagccggtcttgggtggcgtcctctcggcctgcttggcctcagctgccgacactccccacactcgctttccctgggctgcgcgggtgaaggagcgcgcgcctgcgtacatgccggtggttggactcggatctgctgatgggtggggcgccggatggcgtcgttcgctgtgtccggcacgaggctcggggttgtgcagcccagcggctcggcgcgatctggtggcgagcgtacgagtgcggtggacttgtcgtcggagctcttcaagaggaag

SEQ ID NO: 322785 - DNA, 353 bp, Zea mays
acgagcgaagtccgcgactgtgaagtttgcaccggagaagcctaaacgtgttgtgacccaaccataggatggctctactcaacgaaagcgatctcgactaaatgctggtgcgaccaatgcattatccattaacgatcaactgcatgatctacgacccatctattgagcccgcgtgacaaaacaccgtatgccgctggcacctacgctgactctgaatgctgagcaagcatatgaccctctcgacgaggactattgatctgtgactcgatatactaccacatcatgcagagctgacccaactaatacaactgctcctgatggactataatgtgtgcagcgtcaccgtgctgacc

SEQ ID NO: 322786 - DNA, 475 bp, Zea mays
gatgcactcggagggccaccgcgaccgctccggtcggttccttcgaggtgccgcgcggtcgtaacagcagatacggtgcatacaaagctgcggttttgggggttgttgctgtttgattattttttttttgtgttatttattatctatttgatggtttgttcttatgttcttttttttttgtttttttttgtattttttttttttgttattattattttttattattttatttattttttattttttttttgtttttttttttgtttttttttttattttattattttttatttttatttttttttcttttattttttttattttattattttttttttatttttttttttttttttttttttttgttttttttttattttttttttatttttatattttttttattttttttttattttttatatttttattttttttttgttttttttttgttttattttttattttagttttt

SEQ ID NO: 322787 - DNA, 205 bp, Zea mays
acggcaagagcggagagtgactgttcacgatgacaatagggaacttaagctgctagtactggcttgggcatcagctgaagttacatgagcggaaaccgtgagttggagagacactttacgggtggtgctaatgcatcctgaaccagtataactgtctacatgtagctcaaactacagtattggacttgctaaagattggagctcc

SEQ ID NO: 322788 - DNA, 292 bp, Zea mays
attcctgttcgagatgcactctaaggtccaccgctacctctcctgtcgtttgcgtctaggtgcctctctttcgtaacaacagagacagttcaaacaaaactgtgattttggtattttattctttatatacatttattaatcaaacttcatattaaatttattttaatttatattttttttttatctattttttatttatttattttttatttttttatttattttttttttatttattaattttaattttttccttcttttaactttttctttttttatttttttatttttt

SEQ ID NO: 322789 - DNA, 418 bp, Zea mays
gactcttcaccctagatctcgagccgacgccctttatggttaatgatctggatcatttacctggaccattggaactcatccatggggattctgcactttatgccgacgagcatacaaacgcccaactacacaacatgagctcattcatcaaacccactttgaccctgctgtcgaggaccaactaccagacatattatcagtacgaaccaaccgtcgagtccctcactgctctttcccataccttcgatacgaaacggctgcagctcccaacggtcaatattcacatccccgggcctctctacatgacatacgaagaggcacacgacgtcaattcatctgcacattctgtaccgacatcacccagcacaagattctacccatacaacgataacttctacatcgactaatgctgcatcat

SEQ ID NO: 322790 - DNA, 269 bp, Zea mays
  unsure (1)..(269): unsure at all n locations
gacacttacacccacgcctccacccactcntcctttcactttttcgtgaacagcaagctcacctacccgtacctgttagctctccatcgcttcgtcgaaggctaacacctacttcccattccttctctatgtctgccattaccctccattgtcccttagctctcctcctcatctctctcctccttctgactctggtcttctccatacactgcctgtacgctcaccaccgctttctgaagctccttcggctgaagcactatatccattcc

SEQ ID NO: 322791 - DNA, 459 bp, Zea mays
gaattccgggctcgaccgacgcaatcgtatgctcttcacgtcactaacaccacctagcaactctttctcttctgcaataatggcggctcgcgtactcatcttcagacacgaaactggtccctgctacaaccccaacaccatcgcggctcactgttcttgcgcggccaacacctactaccataacaacaaggcaactgccgccacctgacacttcacctgcaccggcgccttcactaccagatacccaagttcttcatgctgcttcttaccctaccggagcaagcgtccgctggaaccataaccccgaccactgcaggcaccatgggaggaggaacctgaagtacctccacaggcacacgcacagccgtcgctggcatgtcgacaggcactgacaccggaactgcgggtacaggtttcggcggtctatgaccaggcacatacgctagcatggacactgca

SEQ ID NO: 322792 - DNA, 390 bp, Zea mays
ggaacgacccactcgaccgacgcgtacaagggaacgacaaggacaaggctttgagcgtcctgcgccaagaacccgatcccggccattggtgaccgacgtatgggcgctcgctggatgccgcccaccgtccaacgccgccgcagtagcagtagcagcccaccagttgcacgcgcatcatgcttctgctcccgtactaggaagacggaaggcccataagagagccctgccactgtcgttcaaaggcgtcaacaccaactgttgccaggaccaccagcttaaggcccccgacctcctcatccgtcggcggcgcgggctaccgtaccgcgcgctcaacctcgtgctcacctccgtctccgtccgcgctgaccggctctggccgtcgcttgtcct

SEQ ID NO: 322793 - DNA, 331 bp, Zea mays
tcggcccacgcgtacgcaaaggtaccgaatccttctgcgaggccccagcacctaatgccccaggacaacaaggcaccatggtttgagaggaagcggctagaggacctgctgtcgggctagaagacggcagtggcgggacgcccccggacgtcaggcggactgtcgctgcgggcgggccaactcgtcttcgtcgccgagtacatctgggccatggactacgtgcccgtgttcacgcatctacacaggcttctggtaacaggcattctttcgtttgctgctgcatgctcacctgcaagcgtagttagtgcttttcgaaagggatgcgtacttg

SEQ ID NO: 322794 - DNA, 463 bp, Zea mays
cacacacacacagacaagtggtttccaaagccaagtgtgtgtactagcaaccagctaggtcgggcggcagcaggcagccatcatgtcggaggagaagcaccaccacttcttcaaccaccacaagaaggacgaggagcagcccgccggcgagtacgggtactccgagaccgaggtggtcaccgccaccggcgagggcgagtacgagaggtacaagaaggaggagaaggagcacaagcacaagcagcacctcggcgaggccggcgccatcgccgccggcgccttcgcactctacgagaagcacgaggcgaagaaggaccccgagcacgcgcacaggcacaagatcacggaggaggtcgctgccgcggcggccgtcggcgccggcggctacgtattccacgagcaccacgagaagaagaaggaccacaaggacgccgaggaggccagcggcgagaagaagcaccac

SEQ ID NO: 322795 - DNA, 378 bp, Zea mays
  unsure (1)..(378): unsure at all n locations
tccatgctaagacataagtggggaaagcaatacggagaacatcattgcctgcaatcgtacataataataaacaccatgttgtccggctgaaagcctttgctactctgcaatgacntttcacgcgttcattgactgtgttcaatccatgcaagctcaagtcacctgcgccattgtccaccatgtccgacaacatctgccggtgcaacgatgctctaagtagcacgttggtctcctcctcaatgtctccgacctccaacaccaatatcatatgaccgggaatcaaaacactttgtgctaatagtcacaataattgctttcaatatcggacagagtttgttaacaccaaacattttgcaaatgacgacgttgcacaaaata

SEQ ID NO: 322796 - DNA, 418 bp, Zea mays
gaccccactgccacgaacgcgggctgcagaacgttagccatccaggcatctacagaagtcgtctcggtcagcgtactctaatgtcctggctatgccagtctagcaatggcggtgccactgaacaaatgacatacacggaacaaccgctagaaagactagactacttacgcacggagcttgatgaacactcatcataagccattaaagacttgctttcagatgcctcgctagtgcgatttattgaatcaaggaactgcaatgatgcataaagctagtgaaatgatgaaagcagctgtgaagtggccgcttgcattcaaacctgaaaacatatgctgggatgatatagcacaggaagcagacactgcaaagatatatagcgcagtattataaggacaaacatggcacaactgttattgta

SEQ ID NO: 322797 - DNA, 450 bp, Zea mays
ggatacctgacctcgttgatgtattgtgaagtcctcttggattcagcacatttcatcatgggatcctcgacagaagaaaacgtgaaggctttgctaaaagtccttgtagactgtgccgaagatgccaccaaatcactgggtggtttagtagatcatgcttcagaccacatgcatgatgaaaagatcgtatctagaaccttgtttgtcattaaagaaagactagaattgctacagcaagatgccttagatgcaaaagtgcaagcatttccagaaattgctaagtatcatggggatgacataagtcttgaacctacaactccatcgacctctccaactgttactgatcgatcttttgatgaatacgagaatgtactgacccgatgtcagtgatgagtggtacttcaccgattctgataggtctacacgcaatagctactggaatatttatta

SEQ ID NO: 322798 - DNA, 409 bp, Zea mays
tcggaggaatatgatgacattgtgaacgacatgaaggaggaaggacacaaatatggtatcattggagagggttacaattccactgccatgcccgagcggctctgctgttgctggtgtctgaaagatgtttagggctcaaccttggctaagaccggactgcattgtcggaaatacggcaggaacctcatagtagctcgtttctaccttgatgacaaatgcgaagctgatgcagacgactgaaacgatgctagaaccccgatcatacagttactgttatggcacacaatgctgttgattcgaccttatgtagttaacattggtgatcgatccgctgataaattatataagtatcatgcactggtattatataaatcgcagtgtatctgggctgaattggcttgacggttat

SEQ ID NO: 322799 - DNA, 425 bp, Zea mays
cgggcttcggtcccagccgccgccgcagcctctcccttccctcacctgggtcctctgtgtgctgaccaagcagcaacgggtgaggcctggccgagccgctctgcctggatgcacctgcaccgaccctagagccactatgagagttcggagcgatggccgagcggtacctatggagggggcgatctgggttcgatctcaggaggcgaggaccaaggcaacgcacaacggcgaccgagtgaacagtatcccgctctgacaccagctcctcgtatagcatcgtccatactagggctgcgtacaccgacatgctactgaaaaagagatagatctttatatacgcaaactggtggagatcgctttggcgaaagaaatgtattgctagcatcaagtctgtcgagacaatacaaccaatacaagcttgtgcc

SEQ ID NO: 322800 - DNA, 82 bp, Zea mays
cggaacgaccgcactcgtcggcaactgccaggtgtaccacctgcatgaaacattctggtcaatgatggacgtgatcagcacc

SEQ ID NO: 322801 - DNA, 471 bp, Zea mays
cctgttgcttctatagctccgggccaattacgcccagtgctcacatcttcttcgatcccatgtcgctgccgccgtacgggctgcacccacatgttcgtcgggcccttcgtcaccctctagcagcaccacgctgagctccacagtggttcttgcagaggtctgtgatatactactaggctgaatacacctacacaaagaagagaaaaggggatcttggagaggtttgtgacacactactgtggtgaatagacctatgcacaagagaaaaagggaaagagagaatgttctcaatgaattgaagtccctatgtcaaaaacaagagcaaggagctgttgtacaagtggcttgtggaaggagcatatcatatatttgtaggagataactttacacttgattcatgggcgactggattataggggcattgataaacatcgtttagaatgttgcaataaactttggtaccaaactttt

SEQ ID NO: 322802 - DNA, 321 bp, Zea mays
ccacccacgcttgcgccatacaactgatgcttctgttcatcctccctctgctatatctccacaataacacctgtaaccggatcagctcaaaatcctactgtggaaaggccctaaaaatctaccaaaatcatattccatggacttatactaaataaaataccactcttcttaactgacatatcaaccatatatcatactcagaatcaacaccagcaaactctcaagctacttcacaaagcctacaaactttacaacacttatgccctacagcataacaccattactgacattcaaccataaatgggcgttcttcactacatt

SEQ ID NO: 322803 - DNA, 430 bp, Zea mays
acggggatccccgatggggatttatccccggggataacggagatggggaagaaatgtcccccggagcgttcgtggggatccgcgcggggaagttttttcatcgcggggactgggatgggtagccaaaacccgacggtgaattccccgttgccatctctacttgccagtcgagatggaataaaataaatgtcaggcgcacgtactgacgtgttattacgatatttctcccctacagataaatgctctgtttattccctgcctaacttatctaacttttctatttaaagttgaagttagttatttaattcgaacaactaatcttaaatgaaatatggtatagttagccacaaatcagacagacctaaaaactcggtcagcaaggtggccaatggtattattatttaaaaaacttgatcttgcgaatttacac

SEQ ID NO: 322804 - DNA, 331 bp, Zea mays
acgctctcctcgagagatctcgcgctccggggatcgggcgcggcggacggaagatcgggaagtgccctgcccaccccggatgctcttcccgaaccgcatcaactacctggccccgatcctcgcctccgccgccatcctgctcctcctactctcgggctacttctagctccccttcatctccaccccgacaccactcctcgcggacgcaacgcgcttacccaccgcgctcgactccgtcagatcgcgcgaccgcaaccccttcacctcgctcctacaggccttcgcgtgctgggacaccgacgtaggctgcccccgcatccgcaccaagctc

SEQ ID NO: 322805 - DNA, 316 bp, Zea mays
cggaccccatcgccttcaacttcaggttttacccttactgcaccgaaccacggccatctggtgatcacctacggggcttcttcgctttacctggccccacttccgacactgcattttcatccgcagccctccttatccacctcgctcatgactgcacgcaagtactactacacctacatgctcatttcccggccctgcgacctcgctcccacgcctttgaccggaactgctccctcttcaggcggctcacggatcgggacctcctcatgctcaccgtcagaggggcaccgagccgtgccatcaacctgttgctcac

SEQ ID NO: 322806 - DNA, 248 bp, Zea mays
gaacgcacacacacacacacatacaagtggttggcaaagccaaatgtatgtactaccaaccagctggctcgggcagaatcagacggccatcatgtctgaggagaagcaccaccacttattcaaccaccacaagaaggactagtagcatctctacagcaagtacggatactccgagaccgaagtcttcaccttcaccggcaaaggctattactagaggtacaagaaggacgataacgagcacaaactca

SEQ ID NO: 322807 - DNA, 296 bp, Zea mays
  unsure (1)..(296): unsure at all n locations
ggactcntacngaatgaaattaaaagatttaagaaggagagactccatgatttgttggagatgctgggaggcgttgtatcagatgagcaatggatcgaatcttgcacgagctacagtcatacaaagtactaaaaagaaagagctggcttctcccgaggcttcgagcacatctgaaatgccactactataatgtggcacgaaagaagtacacaatgtggacgacacagcaataaccaatcaaatgactagacataatcattgcgcaatggcctaaatttgctgtgttcataccaaac

SEQ ID NO: 322808 - DNA, 404 bp, Zea mays
ccttcgacgagggccgcatcaccatgcgcaagaccttggacaatcccaaattggcgctgtggggaagctcctgggacggcctcgaccgtgtcacgtacctaaacacatacttttgcagctagcgaactacatacctgcaattgtgccaacaacatcaggtaatacaccgcctgccttctcgcccatctaaatacattctgcaagaactagacgctttaccttattcaatgccgttcagccatgcttgtctcgctcttctgcttctgttccaacctgatgttatgaaacgccgttaaattctaccataccgactacttcaagtctcatctgctagactttaacttatatctgcactgtactactcattaatcgcctagcttgattatgcccagagcatatacctc

SEQ ID NO: 322809 - DNA, 378 bp, Zea mays
acttatcgagttgatggtcttattaggctgatgaacggattcaagactggaccgattaacttctttaaccgaggtaagttccatctgcattgtaactcttgttgctatacaatgagctacctacccaatctgtgtcatttctgatatatacattctactggacccagctaactaagttggttctcatcttcctcacttgaatatatcattctgaaacttgctgagtatatcaatgacgttatttcaattatataatcacactccttttctcttccaaagctctgcaaaactctactgattactgacgcgactacttcaactcatcagttgattcacccatatataacactgactatgacttagtacactcctgacgat

SEQ ID NO: 322810 - DNA, 245 bp, Zea mays
tctagatcgcgagcggccgcccttttggttttttttggcagatccatcatcagggtaattgtctctaccgcatggcctttagactaatacgaaagtgatcttactgatctttcgtttcaaatctaaaacgattaaataaaatgtgatttgcaccttgccatgtactctaaaaaaaaaaaaaaaaccaaaaacaacaatacaaatataatacaaaaacatcaacaacaactacataccataacaaa

SEQ ID NO: 322811 - DNA, 312 bp, Zea mays
acggcatatttctgttgaattatgcgattgtagcaggtagcgggaaaactaattgggggttggggtcacccactcgagtcggaggataaggttgtcataaccatacccgttgagcttgttgatggccttctcggcgtcctctctgtgaacaaagttcacaaacccaaaccccctgctcgaatcgcatatttctgttgaattatatcagtatgtttgtttgaattactggtacctgagtcatgaatttatcttgttggtaaaacctgttatgtgtggtttggttggtcgagaataactatactcacttctttt

SEQ ID NO: 322812 - DNA, 438 bp, Zea mays
gaattcccgattcgacggacacggacgctcaagttcaatctaatcaatatggcggatcggggcatggagctgcgtgagcactgccgcggtatgggtgacaacgatgagcgacactatagattccattctctgtgcgtacaccaaggtgctagaaccattagttgggctaatgaacacggagcagcagcaacaatatcgtaaggagaatgcatacgttggacaaatggtatgccatatcttcagttctcttatgatgcttcaacgctgcatcttcagttttctcgggtaaaaacagatcatagtcaatagtatacctatgtgtgaaatactgtaaaacttgcatggtatatggacctcaaaaagtataggaaagcgctatgctatttgcatgtttgctgggagaaagaaaagatatatgaaaggaattatacaggttct

SEQ ID NO: 322813 - DNA, 433 bp, Zea mays
acggtgtgtactagcaaccagctagctcgggcggcagcaggcagccatcatgtcggaggagaggcaccaccacttcgggaaccaccacaagaaggacgaggagcagcccgccggcgagtacgggtactccgagaccgaggtggtcaccgccaccggcgagggcgagtacgagaggtacaagaaggaggagaaggagcacaagcacaagcagcacctcggcgaggccggcgccatcgccgccggcgccttcgcactctacgagaagcacgaggcgaagaaggaccccgagcacgcgcacaggcacaagatcacggaggaggtcgctgccgcggcggccgtcggcgccggcggctacgtattccacgagcaccacgagaagaagaaggaccacaaggacgccgaggaggccagcggcgagaagagcaccaccacc

SEQ ID NO: 322814 - DNA, 393 bp, Zea mays
gactgactcaatgtaattggattgcggccctgtacatgccaagccccccctattgccacggggactgggggcgggcaggacttcttgttcttgggagtgtcagcagtcagcaccttggactgggcagacggcggctggcttaacacccatctcatctgaagcaggtacagcatgctcatcgaccaggctcaggcgatcgtctggcaatctggcatggcgaacttgaccggaccatgtccggtgagtcgctcgctgtcatgctgttgccccaccggcactgcctatcttccacctcaaccagcgttcacgagtactatgcaaaataccttttatgctgctaaaataacgaaatggacgtgcgtgcagacggccggattactggcgctgccgctt

SEQ ID NO: 322815 - DNA, 407 bp, Zea mays
aatcgaccgatgcataggcgcataactccgttgactaagctttcctgctgtacggataatcatacgacgttatggcctaggtaaacgggaagtacttgacgtgatggcaatcatggtttctggaaaaagcactgtgctgaagatcatctctgaactcttaccttatcccctctttgatattgacaaatctgtggtgacagctacacacatgcacttgagccgatgatatattctacgcctacagataagccctctgtaatgatactcttagaatcttcttcacttatctgcatttcatgctacaattagcagttgccaccagatgcactcatgacatgctaactgctaacttcttatatatgaccattggcctatacgattatgtcgatgataccttgtatactctt

SEQ ID NO: 322816 - DNA, 302 bp, Zea mays
aattcccgttctgcgggggttgaggagtggtccaaatggaaggagaggcgttggttacgctgccgctgctgctgggacgacgcattggcaggggttgattgggtggtccttgggtgtaatcacacggtggcacgacaggtgccctcttgtcccccccccgtccccgtgaacggacctaagttttattggagcctagcatgaaccgcattgaatcggaccatgcatcctgcctgcattggaccacggtcgttgtaaatgagatgcttcaccggattattatttttggctgccattttacaagt

SEQ ID NO: 322817 - DNA, 314 bp, Zea mays
actgaaaaaggaggacgatgaggacgaccgtacataagtattgtagtaaaaagaaatggtacggtatgttttgacgggtgcctacattgcattgaaggcatacgagcccttacaaacgagcatgatgaaattaatcgctggtctgcttgtacacaacgtcaatttacgttctactgataatctgactgccaatttcgttgacttcataccaaagtgaaaattagtaccgagatgcttgttactggggttctgttcttttcaaatctttataccttatatcctattgtacttctatacctcgtattaataatcta

SEQ ID NO: 322818 - DNA, 215 bp, Zea mays
acggacgcgtccaccctctctcgcttaccaaagagcttccactacacaatcctcccaccatctctcaatgtgctggctcccgaccttggcgcagcatacccacaccatatacagatccactattcaaaaaaactactacctcaccaccatcgaccttaattcattcctatttcgcaccaacagttaccaaaacatacatcactggatctcataca

SEQ ID NO: 322819 - DNA, 377 bp, Zea mays
gaacgacccacgcgtggggaacagacatatgctgacgccttggccaaagttccggaccccgaagacagcactacccaggaggccgatggtccgcatgcgggggtgatactgattccgatatccgtacctcttatcagcactcatgatgctgcgctccaaccccatctgactcctcatcctacgatgcatctcatccagctctcactatctctgctattaacctaacgagcaggagccgacgataccacaagcccttagtcgaccaatacaacaacgcgcgcaacgctccatccttgtacaaggacgacactgacatcgtaacgaggatcatcggcgcaccttcttgccataacgtcatgaacctgcagatccgcgtc

SEQ ID NO: 322820 - DNA, 120 bp, Zea mays
caataatcgatccttataataacctttctcataacacagacaagtacgtacattacgcgatggttaaaacaaaagttggcgactaatcaccatatacagcgagcctaataccattatcac

SEQ ID NO: 322821 - DNA, 204 bp, Zea mays
gaattccgacccacgcgtacgcgcacgccagttgtacccgtgtctctaaactagtatctacaggttcagtcattcatcaacgtatagggcaatataatcccgaaccatgcgttcatacattcgaccagcaaccctcatagcatttaccactacaattcctatttctttaacgaccaaagagaactcttggactacgaatcaaca

SEQ ID NO: 322822 - DNA, 309 bp, Zea mays
gtgcaatggggtacgcgctggtgttctctttgccctgcatcttcctctccatcctgctcggcttcaactgctacttgctcggcaagcacaaggaccagcaggagatgctgaccgccgtccacacccacatctacagaacgcctctgccgccgcccgtcgtcaatagagcctcctcacagacacctgagccgttccacagcaagaaacaatggtccgaggctgtttgactaagatttacacttctctccatacatccattctactactactacatatatgacttggtggtaatcttgaatttatatactt

SEQ ID NO: 322823 - DNA, 332 bp, Zea mays
acgccagcgtagagacgtcgcttctacagacatttacatctccaatctcctcaccgacttgaagggtacgactgacagctttctacgctccgtctaagatcatcgtcgatcaccactccatcactcaccgacatctaccatgcgaacatcacttacctggaagagctacttctcccgatcctcatgacacacaacagttgacatgtacttgaatggccataaccactcgccttcacctcgtcagcagcagacacagtactcttcagctaccaaccagcgacggcaattccaatgcatcagctcgcaagttcaaacccaccactcacaaaatc

SEQ ID NO: 322824 - DNA, 204 bp, Zea mays
caccttcagcttggtctaacgcccgacggggacgggtactgctactggtggatcgacgacaaccaagagaactactacaatatgcacgcgcaccatggctgcgaggactgccgcggccttctcgacggcatactgtccgacttcgacgactactactggagcccagcacggccgatgtccccgcctgctccgtaccgcgtcgtc

SEQ ID NO: 322825 - DNA, 203 bp, Zea mays
cggaattcccggtcgtgtcgtcgcgtatggcctcgcctatgctctacttttaccccatccctgcacagcgccgctcaccgtcaccggaccagggtagcgatcgatggctgaggtacacatcgagccgcccttgatggtggacgacgttcggcacgcgccggagggccgtgagaacgacctcgaggccatcgagctcgcgcgct

SEQ ID NO: 322826 - DNA, 260 bp, Zea mays
gcgacataccatcatcggcacctcgctcttcttctcagctctccccctctagcctcaggtacgtatacacagacacttccgttgatcgattgagtttgaacccaccaggatcaggcttaggattacctcatgtctgcgtcgccggagttttacaggcccattgaagcattggacttttagctgtactgtgcaactcatccggtactgtaccctggctacatctactgttgcataacgcctacggacagcttcatctgcta

SEQ ID NO: 322827 - DNA, 194 bp, Zea mays
atttccggatggacggcacgcatcctatgctcccttgtattctcaagcccacctaacacccttagaaaagaagagacttaactgcgcgagtgcacgttacgagtggagaacgccacctccgccatcgctaagccgtcgctgtccaagaagccctctccgtcgttccgccttcggaacggcagcctcaacgcact

SEQ ID NO: 322828 - DNA, 167 bp, Zea mays
atgcggaagctgctagggctactgtgccactacgaagatgcacgtgaacataggggattatagatctgaactcatatacatctacatatctataaggcatactacgtacgcagaatgaggataggtccacagtggatcatatacctgaaccgacatgcttggacgaa

SEQ ID NO: 322829 - DNA, 302 bp, Zea mays
agacgtacgcgtccgcattgaacatgtactataaccagtatcaccttatctgcttctgcttcgcccatatggatgggttgcatatactcgcaggatggatattcttactggatatgcacgtctcattattgcatcactatcttgaacatacattggttgatcatcatgactaggacaatctgttcttgcttacgtacgtttccctgagcctatctctttactgccaagattatctactactgttcttgactgtaacatctccaactttataaaagcaattaagcaaagagaatcctattcta

SEQ ID NO: 322830 - DNA, 244 bp, Zea mays
ctgaccctttagccgtactaccggtattttcaatctgtacggcactgattcatctcaaggatgcattcataaagcaggggctgcaagcgcaagcccacaacttcaacgcccacacctcggagctcacgatccagctggcgttcgctcccaacctcaaggacatccgctccatacgaggtccacatccgccacaacgagaataaacagcacagcatgcttagcatttacgaccacatcctctcca

SEQ ID NO: 322831 - DNA, 251 bp, Zea mays
acgcagcgctacataacacaggctcatacacactcttgctttaaattaactggagcactgctcagctgaaggcgtcggtcacagatctgggactgcaagaggacgcacacagcttcaaccaccaagctcaaagctgaccttacacctatcgaccgcgccgaatacaaagaacatgagcaagtcctagttctgagacgccttcaatctattgtaaatatacacaacgcatccccttgtctatgtccctactg

SEQ ID NO: 322832 - DNA, 437 bp, Zea mays
gtggtttccaaagccaagtgtgtgtactagcaaccagctagctcgggcggcagcaggcagggatcatgtcggaggagaagcaccaccacttcttcaaccaccacaagaaggacgaggagcagcccgccggcgagtacgggtactccgagaccgaggtggtcaccgccaccggcgagggcgagtacgagaggtacaagaaggaggagaaggagcacaagcacaagcagcacctcggcgaggccggcgccatcgccgccggcgccttcgcactctacgagaagcacgaggcgaagaaggaccccgagcacgcgcacaggcacaagatcacggaggaggtcgctgccgcggcagccgtcggcgccggcggctacgtattccacgagcaccacgagaagaagaaggaccacaaggacgccgaggaggccagcggcgagaag

SEQ ID NO: 322833 - DNA, 360 bp, Zea mays
gaacttcaattccggcctcgacctacgcgtacggtagttaccaaagcactactgtacattctaataaccagctagcactatcagcaacaggctgtcatcatatcctaggacgtgcacctccacttatacaaccaccacaagaatgactaggaaccacatgcactccaatactcttactacgatacctaattatctacctccacagaccaatcctagtcctactgttacaaacacgaatacatggagcactatcacaagcaacacactcggctatgccgactccatctgcaaccgcacctttcaactctactagaaacacaatgcgacatataactccaaacacactcacactcacaagat

SEQ ID NO: 322834 - DNA, 263 bp, Zea mays
  unsure (1)..(263): unsure at all n locations
cgcaaacacttgtcgccgccactgtcctcacatggtaagggccgtccattgtgtctccgggttcggtgcgtnngtgctgcgaagcgcattcgtggtgtgactgcgctgccatccatcatgccctgggctcgtctctttcctcgatcattanngccaaggagctnnngctcaatgggcatgaagggtgagtcgtcgtcccgcttgcgaaggagaatctgcanntgtcgggccggccctcgtcccgtcagaaaggattgaagtac

SEQ ID NO: 322835 - DNA, 326 bp, Zea mays
aattccaattccgcgcctggcctactcactctcctggtactcatgacgcctgcatttccacttctgagctcacattattagtcagaggcttgggatccgtactcgggcaacacaatctcgaaaaactattcgatgcacataattcaggaccacattgacttcgctacccttcttaaatacatcaactagctcaatcatcacatcaatcttgaccgtgctatgcacgatgcccagaccattcgcactattgctcatgaaaacaacactttcttcattccaactggcaccctaactttaatgcccctcactaccgatggttacattta

SEQ ID NO: 322836 - DNA, 452 bp, Zea mays
cttcgtactcgcctatctccgcgacccaaagcgttcccccttctcccattcttctctcatttctcaccaccggcgcggctaccccctttcgacaacaccatgagggagtgcatctcgatccacatcggccaggccggtatccaggtcggaaacgcgtgctgggagctgtactgcctcgagcatggcattcaggctgatggtcagatgcccggtgacaagaccattgggggaggtgatgatgctttcaacaccttcttcagtgagactggcgctgggaagcacgtcccccgtgctgattttgttgaccttgagcccactgtcatcgatgaggtgaggactggcacctatcgccagctcttccatcctgagcagctcatcagtggcaaggaggatgcagccaacaacttcgctcgtggtcactacaccattggcaaggagattgttgacctgtg

SEQ ID NO: 322837 - DNA, 232 bp, Zea mays
gctttatgctgatgcacattgaaggactccgattggtggtatacgtatgggagcttgttgactgcgaacggaaagtggacacgatcaacttaagaaagcagccacgatgcaagcctatcactactatccttccacggcctgattgacgtcaagacacgtctatgatctcataatatctctcactgattcacaactccctcaacactctaactaccactcgagctaaaccttt

SEQ ID NO: 322838 - DNA, 229 bp, Zea mays
actcacacggtctacacatcaaccagcacacatttccctttggcggatcttaggagggaaggaggacatagacggcggggtggacgtgcacataaaccggcgtatcgaagtgtggaacgcctgccgagagaacctcgagttcaacttgcgctggacccgccgcacaatcgccctcgtaattctcttcagcctaggattgaggacaccattatacacatcaatggggagc

SEQ ID NO: 322839 - DNA, 258 bp, Zea mays
cggaattcccattgcaccatgcggtccaacggccaatgcctgaccagcaaccgcgactcgacttaagctaatgtggtggtagacaagtgccggttcttagctacggtccgagtgaacaggcacgtgcccatggaccgtaccaacacgctcaaatggtcaatcggcctggtgatggccgctacctcgtcgactctcttcgcggggctcacggtgcggcacgacgaccgccgcaccagccagtcgtggactacgaccaac

SEQ ID NO: 322840 - DNA, 145 bp, Zea mays
ttcgagctcgcgtcacgcactagcagagagagacagagcccatatctccatacctagacagacggatagagattccgtgccgggtacagtgcagatactgaagacgcctaggttgaactatagacagtcacttgagacagccttc

SEQ ID NO: 322841 - DNA, 253 bp, Zea mays
catatacactaactcccattacgttttaaataacacatctgcccacaacggaagtgtccaatctaaaagattggactgcctacaaacagctttctcttcaactcatactccatgaaccaagtgtacccatacaatctattccaacaaatttcagactcttcactttactcctctctttcacaagaacccgacagcaaaattacctgtcaaaccttatacaaaacgaactacattattctttttcactaaatca

SEQ ID NO: 322842 - DNA, 363 bp, Zea mays
gaaacagaacagagagcatatctctcgaagcaaagctctcacttcaccgtcgtcttccttccactacagactgacttacgacgctcaggcatcagggacatatatcaagctcctgcaacaattgaatcaccacacggatgcttcgcctctctcaaactcgctcacaggcgatctgtgcaaatacgccttcaccagaaggtgatcaccctcttgaacaactgtcttcacaatttcaagcccagctacacaatgccttccaagaaaacccacgtggttcaaaccgatgttactatcaaagatcgtgcatttaacactaagacatgcaacatttagaaccttcctaaggctttattgaccgttcaa

SEQ ID NO: 322843 - DNA, 451 bp, Zea mays
cctgagtgctctcgttctctctactccgctctctctcacgcgaggcagtgcatccttaatgcagtgcatctttgagccgccgccgccgtgaggagctccgcccatccgtcgtcatccgtcaaatcagttgatacgaagacattagaggatataatcggcccttcaacttcaatgaagtctcatacacatccagtgaagcctcgctttcaagtcagcaatcggcctaaatgcaatttgctaaataaaagttctattgattctgagcaaactatccaatcttctatagcctccaagataacaactttggtatgtgtacttctgaacagagaaaaaaactttactactgaattgcagtagaaaaattctcttgtgtcatgtcttgttaatttatgtcctagtgtactgttttcttgatttttagaataacgccacaggctaccaaagttacaaa

SEQ ID NO: 322844 - DNA, 421 bp, Zea mays
cgtgcttggagcaccatatagcctggctacaaggatcatctgataaattgcaggatacatggcaagagcaacatccaactgaactaggactagaaaatgagaacaatcacatgtctattttaagcattggtgttatcagcatgaaaagctgtgagcgagcattgttgcatgttgtatgcgagctatgctatcgcaaaaactgaagaatgtcattcgaaaatgtccatacaatggcagaccttgtttatgaagttgaactcattggatttgatgatggaaactacgttaaatacctaactgacattacacttgactagagtatcgcaactacagacaacaaaaatattgaggccaatgcatatctgaaagacaagaagcttgatgaggccatgcagcaatatgatatggctatcgcatacat

SEQ ID NO: 322845 - DNA, 211 bp, Zea mays
gccgatcctaaggacggaggaacccctcgatagcgcgatcacgcgcgtcatccgaaaggaatcggttaagatggccgagcctgacgtggcagcagacggcgacgttaggaagtcctgtggtggacgtggggctacttcatgagaggcgtgttcctgtaattctgtactcacttagttctctctgcatgcgtctataattgagttcaataga

SEQ ID NO: 322846 - DNA, 298 bp, Zea mays
aaattatacgagccatccaaaggggatgactcactcatcagtgaagagagctcagggggtgagaataagatggggataggctcttgaaccgaaagggttcagtttcctgagttggtttttttttccccgcgtcttctcgagcatcagtgcttgggtggagactcagtcgtctttgcagggagttggttaatcagtagactgatgggtgcgaataaagtcaagtcaaacagcttaaccatatgattaacacctttgcttttctatttctaaatctgagatgattgcaaacagttttggt

SEQ ID NO: 322847 - DNA, 274 bp, Zea mays
attcccggagttctagatcagctatgtcccgccctttttcttttcattcatttatatttatctttttaataattcacttacttttctgatttttgtttttactctaatttttttattttattacttttttcctacaccttatatatcatttcataacatcttttttacatcaactaacaatagatattcttttacactctcaccatatacatattatcccccacacttatgagtatatcaaaaagaacgctgcataaacatttatccaaaattt

SEQ ID NO: 322848 - DNA, 77 bp, Zea mays
aattcccgggcgtgaggcttcaatgtcatacgtttggattaagccactctgtgatcctctcattcaagctgatccca

SEQ ID NO: 322849 - DNA, 52 bp, Zea mays
ggaactacccactcgtcccagcatgcgaaatcactaagatcactatacctct

SEQ ID NO: 322850 - DNA, 296 bp, Zea mays
tcccgaatcgacgcaagcgcacgaatactgtgtgcgtatagcagactaaagtccaaagggccaggatgctcgggcaactcatgtaaagcgcttcaaaaatatgccaatggcagacatggagttggctctgcctgagaagaaaaacccgagcctcacacctatggactgggttcaatttattgtctctgttgtcattggacttgttacactcatcacttcactggacatgcctaaagctgatttctgagttgtaattgcaatactatctgcacttgcatgatattgcgcgaagatct

SEQ ID NO: 322851 - DNA, 167 bp, Zea mays
ggaattacccactcgacccaagcaaccaacgaactcttgctccgattactagctatcttacgtcgacaatcgcatgggtactagtaagcatgaagacgccgaacgcggtagctgccttcctgttgtcagcgacactgctagcttgatccacttcagctgcaatcacc

SEQ ID NO: 322852 - DNA, 322 bp, Zea mays
acggccagtgcgcgcacccaccgccgccacggtccagatctcccatccaaactgctggggccagcatcaagagcgcgggtgctacggcgaccgatactcgtctgacacagctggtggttgcctttgcgactatcacacacctaatccatctgctgctctcctggctataccgcttcacaacccagcgcgcgctcatcgatatccctctgatattattgcccaagcttacaccagagcggatgcgcacggcatgtccattgatcactcgctagctgtcgctctaatgagctactatcctattataccgtgacttgcgacatct

SEQ ID NO: 322853 - DNA, 196 bp, Zea mays
gaggagcacaggaagctcctgtacgggctaaggcatctggacaaggctcacgtggatgtcatcttcaaaggcttcgtcaccaccacgacatccacccatgtggccagccacccccagaaatactttctattgcagacccacccccggatgaaaaaacgcccttctagcctattctacttttgtatcacagactaca

SEQ ID NO: 322854 - DNA, 143 bp, Zea mays
ccgagccttacggtcctcgcccgcagctggcagcaggtcgcccgctgccgcgcctgggacatgggaggccatcgaggagctcgacgagctcgcctggctccatacctccttcatcaaactcgacgagcccatcaagaccatcc

SEQ ID NO: 322855 - DNA, 216 bp, Zea mays
agtcatcactgacagtgtgtagaggttgggttcatatataagcatgtaagttactggttcaggattaacctacagccttgacggcactcccacacactctggaaccagtccatcaacattgatactcatagcttgttctcctataatcattctcctactaaacacatacttttacaatacaagacctatcatagatatttcataaaaaatactcac

SEQ ID NO: 322856 - DNA, 130 bp, Zea mays
agagagagagagagagagagattgagactcgatccaccgacagaccgtcatgggctgggggctgtacggtatattcatatcacaactcttgagtgtatacacaaacacaaaaccatgacgctcgttatac

SEQ ID NO: 322857 - DNA, 165 bp, Zea mays
aggctacgacgctcacgcagtacagacaaggacgtggagcttattctaagtatagacctaaagaaagagagttgaagatgagtgtaccttgacatgctgttcacttgttatcggaagacatgtcatctattattaatactgctgattctgaatcttcctcacctg

SEQ ID NO: 322858 - DNA, 394 bp, Zea mays
gatcgtcatctacacgagagaggaagtcgtaaggatgaacccaggtgccctgaagtcaaagtctgaagatagtctatctgactcgctgggaagaggggtagcttccagagatccccgaggaggcgggtctacttcggctctcgattccgagaactgctagtttgttcagtcagtgaggcctttggaagtgaagcagacaaaaggcgtgaatcttgcggtgtaaagtgtagttggtacattgtgtgtatgcctgcgggtaagccctgcggtacccagtttgtgtcctggcgccagtttaccatttaagctaagtttttgggtgtgccttgtgctggggtctgggctctagttattgtagcagagcaggcaatgcatgcaagaaactgatgatgcg

SEQ ID NO: 322859 - DNA, 313 bp, Zea mays
gcgcatagctatttaccaaaatcattttctagcattgctaaacccatgagaccttaagtcacagtctcaatatagtctatgtcactcgctcccaagaggtctaccttccagagatcatccataagtccgctctacttaatctctcgactccgagaactgataacatactcagtcagtacaacctttataactgaaacatacaaaacgccttaatctacctctaaataatgcagatggtacattctatcaatgcactacacttaaccctatcctacccattttgttccctggcaccagtttaccatttaaacta

SEQ ID NO: 322860 - DNA, 395 bp, Zea mays
atttacaattctgttaagatttatctataccttactatcaccaaagtcctgttagacctctagggcttgtctaatgattactttaactttctcaataaattcctttcctcattcaaatggtcagatgatgaatcatctacaatttgtgattctaattattatgctttttcttcaatcatctagtttgttaaatcgcctaatctctttcaatgtgatttatctcaacattccttctttttcacatcttgagaaggactaaaattatcatttgttttattaacttcttaatatattcctttctaagaatctttattcctacttattattttaaatttcatacttctactttcttaaatttattaatcttattcatttcttatttttatcctatattt

SEQ ID NO: 322861 - DNA, 247 bp, Zea mays
  unsure (1)..(247): unsure at all n locations
ttcatttgtgttctctagagaaacganagctttataacatacgcggacgcacagattaatatacacagagcagacaggactaaagtcggtacaagtgaccttgatctaagacaatgctctccaattccttccatttaacacaagtatcaatacaaatagaactcatcctaagatccttgcatacttcactcgtatatactcatctgcatgcatacacaatagatatatcctaccattttatcatcca

SEQ ID NO: 322862 - DNA, 453 bp, Zea mays
gtgggttggcttctcctcccccaccggttcgtgttcaggttctggttcgtgggcgagggggaagagatggcggcgtcggacgttgagtaccgttgcttcgttggcggcctcgcctgggccaccgacgaccactccctcaacaacgccttcagcacctacggcgaggtcctcgagtcgaagatcatcctggatcgggagacgcagaggtcccgcggcttcggcttcgtcaccttctccacggaggacgcgatgcgcagcgccatcgagggcatgaacggcaaggagctcgacggccgcaacatcaccgttaacgaggcccagtcccgcggcggccgtggaggcggcggtggcggatacggtggcgggcgccgtgatggaggcggctacggcggtggcggtggaggctacggcggtggtcgtggaggctacggcggcggtgggggatacggtggt

SEQ ID NO: 322863 - DNA, 445 bp, Zea mays
agcacgatggctcgtcgaatagacctggatccttcaatggacgccaactaggtagcagagcgggtgacaatactacaaggcggaattatcttggccacatattcgggactatctacttgactggcattcaacaaaagtgcagcatgccattcgaatgtcacaatggctctatggagtatatgaattagcacaaccataggccacgctctacataatcgaacatacaaggcacagataacacctcaggatatgagacaagcgacaaaattgactatctgaatgatagctaactgtacaatcactgtgattttataaccgaatgcaaagataccaaattcttagtaataaagtcctacactgaggaccatgtacatagggtcatcaactataaagtttgcgccagcacactcatgtcgaacatgaatctggattctgcttaccatgc

SEQ ID NO: 322864 - DNA, 262 bp, Zea mays
gcaccttcgcctggcacatcctcggcggcgcggtttcctgcttcttcaccggcgtggctgcttgggcacggggtgcatgaccggcttgttcaccgacgtgaccgcctacttcttcgacaacgcggatgcctgcggcggacaaaacgtggcggactaccgggcggtcggatccgcgaacgaacaaatctacggcgccctgtaaatcttcggacgccgcacggcagactaccgggcggacggatccacggacgaacggatctcc

SEQ ID NO: 322865 - DNA, 326 bp, Zea mays
cacatgcatgaggcagttcacatgaacgtatgtctgtctgcgctagatcgaaaaaaaagtggtgaggttttgtcatgagagtatgattctactagctagcatccttagcacacttgagatgttgttgactcgtgtcctagtgtagtgtactctgtgtatatccatgtatgcacagtgatatatgtcggcactggaacatgttaacaccaaatgtttcaagcttcgtacttttgcctgatgtggacatgcatgcagcaggcatcccagtactacacctgctgttgaacttgaacactactgtattcagcctatgaatgattcatgct

SEQ ID NO: 322866 - DNA, 164 bp, Zea mays
cacgtcttacctgtcctatagtgccacctaaattaacttcactagccgatgattcacaacttcatgactttcaaaaccttatccctacccaaattaatcatattgcatatacataccactttagccagctcttgtcataacctataagcctaaacagatctccc

SEQ ID NO: 322867 - DNA, 389 bp, Zea mays
agcgaaccaggctctggtcaccatggcaggtcaattgctcagtccgctgcagcctggaacgggggattaccgcctgctagctcgcggtcactagtactttacagattctcctgcacgaacgatacccgtgcacagccatctcacaaacacgtgctacttaatcttgcgaggatcatatagcaccgacattgacgatacatcatgcaacgattctacagagacaggaagcgttgacaagaattcagccaaagatgtcaggcacatcttgaatacatgcgacaggtctttccaacgaacataatgacttgacactcatgatattgactacactcttgagaaatagggtatgctctctctcaaatagttggcatgaacctcagcggtatcat

SEQ ID NO: 322868 - DNA, 283 bp, Zea mays
gcagctgacgcgtttgcggacgcgtgggcagacgcttgggctggtgtttcagtaatgtcacaattagcaatggctcttaagtttgtgcaatatcacaattttcttaaaaaaaaaaaaaaaaaaaaaaaaaaataaaaaaaaaaaaaaaaacaaaaaaaaaaatttacaaaaaaaaccctataaaaaataaacacataaaacaaaaattattaaaccattttccaaaaaaaaaaaaaaggctgccctttttaaaagacccaagtttaaacaccctttatatcaa

SEQ ID NO: 322869 - DNA, 210 bp, Zea mays
tttcaccatactacccttcaactactgtttccctccatcaactaccctcctgccgtcggatttctaccatccgtagggctaccctactcactactctcatactcctcctccacatcatcatcttatcatccttccttccttcatttacacatactacattcttttctataccactttcttgcacttcatcctctcattaattaatcctaa

SEQ ID NO: 322870 - DNA, 103 bp, Zea mays
ctaagcttaccactctatacacgatccaactttatttacgcctgcatgctacctcatatctgttctgattctacacttagtttggcttcactctccatcactc

SEQ ID NO: 322871 - DNA, 425 bp, Zea mays
caaagtaacttgaaccacatatatatgttcttaaacattaccagaagatcagcgacacaaacagttgcacgcttgcacaccgttacaggtgaacagtcctaataccagtaatcatgatatatatacaggacatggacatgtcgtgcaatgtataattgttacatgcatgtatttttcagttctactacttatcgtcttttttcttctccctttggttcttttttcaacgaacacagtctttgacgcattctttttctttttcttttttttgatattttatcaatgtttaagcaagcagagcagtgtggatactggatatgcaccccatgtctttttttggctcgtcggcaagccagcctgatcaggtcagcgcgttggccaaatggcgcgagaacgggaacagccaaacctgtatgagatgcgtg

SEQ ID NO: 322872 - DNA, 104 bp, Zea mays
  unsure (1)..(104): unsure at all n locations
tccggaatctcccgggntcgagcccagcgcgtgccggcaacaacaattggtgacttcaaaccagtggatgatgtccttctacagtgtacaatgatgctccagaa

SEQ ID NO: 322873 - DNA, 182 bp, Zea mays
acgtgtggtctctatccaacttcataacttagcatctgactcctagtctccacataaccggaggggtacacatatatgaggggtaaagctttctcaacgcaagtcatggtggaagacttgctgatgataaccgcaggcacggatgagaccatgatggacgaaatatatatgcgaataggtca

SEQ ID NO: 322874 - DNA, 357 bp, Zea mays
ttaatttccgtgtcgaggcacgcgtgcactcagtttcaaaagcaagttgagtagcaatatctctcatatgtgtagaggcaatttgaaaggagccatgttgcttaaaacggtcggaaggttaactttctttttatacatacactaaatctactaataactttacacctacagctctactacattttccattacctaactctagaatttattttatatactcttacaattactatcaataacatatatattatcacactcttatgctgatcatctttacaacaatcattacattttctactacacttgtatatttctttctttttacttattgtataattttccatacttaacattttt

SEQ ID NO: 322875 - DNA, 335 bp, Zea mays
cacctaactattcttgaacttgattggcgactcaaccggcgaatcaaatccgatcagatagggcattacatcatggtgcccctattgtggtaagctacacattgcataacatgcgatggaccatatgaatcccttgccaaaaggcatgacttcaatgcaatagcatgacaccaacgatgagcactcaactgctccattcagctaacatacatactctatccacattaaggacctaacgatgctatccttgctaacgctgatggtgcggttcatgatgagtgatgttagtaatctaactacgaatgactggcatcatctaccacagtctacatatg

SEQ ID NO: 322876 - DNA, 225 bp, Zea mays
catttagcatcatgctgcatgtatatccttacttaactatgcagcaacatcctccattacaatgtacattgtcacttatcatgtggcacttaaatccctcacacattacttcatcctatttgctgactctcccttcattgctatcaaccattcataacttaattatcatctcatttacttctctctccttttactgtttactctttcaaatctacatgctttact

SEQ ID NO: 322877 - DNA, 263 bp, Zea mays
agaacgggcgacagagacctagctcgatcaatagctccccatggcgaccgtcaacctgtcgagggtgggggtcgctgtggacgggatccaggagagcatgttcgctctgcatttggcgctctacaacctccttctgcgccccgactgcaaactcttcgtgctgcacgtccagccgctgtccaacattgccacgtgactcaacccggcgcccatacgcttaagcggccctagcggtttggaagtgcccgcattcacgctggcca

SEQ ID NO: 322878 - DNA, 326 bp, Zea mays
ccgaaaaaaacaagcacaaagttggtcaacaaacttatattctctatcctccaacacattatcatggtcaccatcatatctagtggacctactaacctgacacacctcacaattcatatattaacatcatcttacaccccaacatcacaatcaatcaacccaccctaactatcatccttcgcacttaacatccctcatccatctactcaatcatatactcacacatgaatttcactacctgagcactacctacctatgcactacatcctccttctactagctgactccaactaactatttgctcatccaccccatgataacttacc

SEQ ID NO: 322879 - DNA, 394 bp, Zea mays
gcaacaatggcattcagaatgggtcttgataagagtgacgttgaaccggtggttcattgtatcttgccagaaatcgtgggagaatacatacatgtatattgcatgcagattccccccaccctcccattttcttctcttttctagacatcttactatgctctttctaggaaactggtcgtgctgattcaacaaaagtcaaagtcttttgcacaaatgaaaaaaaaaaaaaaaaaaaaaaaacaaaaaaaaaaaaaaaaaaaaaaaaaaaaaaaaaaaaaacaaaacaaaaaaaaaaggcggaccgcccttaaaggaccacagatgactaacatgcagttcctacgaattagctgttctataaaagaggccacagctcatttaactggccgccggg

SEQ ID NO: 322880 - DNA, 397 bp, Zea mays
gatccatctgcacacaactgacatgagctgcacctgctcatgggcctgccgtacagggataaggtctcatctatgaataggagggttatatatgggatataccatctgactaatatggttatggttcgcttcatctggttagtgaacctacacgtccccaaccttcggtccttcgaccaatgcccatggcttgaaatcggaaaggcgcacatatattgcacacctttagctgagagaagctttaatgcgcactgtaacgattaactaacactctttattggagactgtgcccatcctatgacactgttagaatatctcacggacactcatgttgaatatgcattgagcatcgctgcactggtcatacgtatggtcatctagattgggaacattaagc

SEQ ID NO: 322881 - DNA, 248 bp, Zea mays
ttaactcacttcaattacctacctcactgcttacattctacaaaatattctctaattaaatgtttcgatcatattgcaaatgtgctacgctaaacttctatctcattatcatttcaacctatctacacacattattcaatatttttatttctctttattatattttaaaatttatattttttatatacacatatattcatctccttattatttactctatcttctctatttttctatcattatatttt

SEQ ID NO: 322882 - DNA, 403 bp, Zea mays
ctggcaggagcagcagcagcatggccaccaccagcacgcctcgcctctccaccctcctggtgctcctggcggcggcgtgaccgctgctgagcgcaggtcaggaaggccgccccgaaggctccggcggcggcgaatgcggcgccagggccggcggcgtcgtcgtcgaacggcgcgggcgctgctgacgctgcccctcccacagacttgaacaaggcgctcaaggacgaccagttcagccagcttaagcaactgctgcaccacacgctcgttgacactcttattaacactcatctgacgttcagctactacggtctgaccattatggcgccgaccaatgccgacttccagccgatgaatgccggcctgcttaacatgcttttgccgcaggtgcagatccagctca

SEQ ID NO: 322883 - DNA, 416 bp, Zea mays
gattaagctggtcaccaagcagtttgtgcctttggggggaacattcatttttaatggaatcgagctcgaatctcaagttttggtgctataacatggatgtggagcgttggatttgagttggtccagattttgtgccagggcaccgcgctgcccaacgagtacccaagtctcgcagaaaatatcaatacttgcttcgtatgattttttgccaaatgactagcaaattcctagctaacgcggctgttatgcgtaaaaccagaagagctgctgcttttagattacgtctgttatatattaataggcgagaagtaatatgtcagtgggggcgtggggctgatgtggtaagatggatggtgttaaagactagcatgtgcccgatttgacgaaaacgactacaaaagcgggatgagcattga

SEQ ID NO: 322884 - DNA, 56 bp, Zea mays
ataaagacaacttacactaccatctctataaattaaaaatctcataatctatatcc

SEQ ID NO: 322885 - DNA, 460 bp, Zea mays
  unsure (1)..(460): unsure at all n locations
ggtgggctggcttctcctccccctcttaccaagtcctcttcgggttagggttacttagggttgtgtggaggggcgatggcggcggctgatgtggagtaccgttgcttcgtcggcgggcttgcctgggccaccagcaacgagtcgctggagaatgccttcgcctcctacggcgagatcctcgactccaaggtcatcaccgaccgggagacggggaggtctcgcggcttcggcttcgttaccttctcctccgagaactccatgctcgacgctatcgagaacatgaacggcaaggagctcgacggccgtaacatcaccgttaaccaggcccagtcccgtggcggtggcggtggcggcggtggctacggcggcggtcgcggcggcggcggctatggtggcgggcgccgtgacggcggttatggcggcngtggcggctacggcggtcggcgcgagggtggtggcc

SEQ ID NO: 322886 - DNA, 206 bp, Zea mays
cacagacacacagacaagtggtgtccaaagccaagtgtgtgtactagcatccagctagctcgggcggcagcaggcagccatcatgtctaaggagaagcacggccacttcttcaaccaccacaagaaggacgaggagcagcccgccggcgagtacgggtactccgagaccaaggggtgaaccgcacccgccaaggccaattccaaaa

SEQ ID NO: 322887 - DNA, 242 bp, Zea mays
tcataattaccttctaactaacaatcctaatattcgctttacgccttcgtcaatcatcaacccaggtgcgtaaaaatttaacagtaaggttgctaaataacaatccaactaccatcctaacagctattaaaactctctcacatccctatcaaatacatacaggataaacatcctatatctccttccacatatttctcttatcaaacattcatcactacttcaaatacatccttataaatcaa

SEQ ID NO: 322888 - DNA, 329 bp, Zea mays
catcccatggctgtactacatagagcagggctccactcgcatggacgcctagcacatacctgcaactgcaatgcagtggctgctatctatctatcgttcgcttcgctaccattccagtgctgcacttcaccgatggatgaagcatcgagcatgatatcatatacgacgcactcggtcgatttacatgcattcaccaattcatactataccattctgaaggtacgtttgaacttacttcacatgtattgcactatagctagctgcttaactaccggataaagaaccgaaacgtacacgatttctaccataatacaagtactactccattc

SEQ ID NO: 322889 - DNA, 339 bp, Zea mays
ccattttcccactcctcctcttcgctttcatccactatctcaactcactcatgcatgtttcatctaacatggtcgcctagcacttaactcccacttcattccactctactatatccatctattgactacttcactcacacttcaatttttcacttcaaccatacattatcactcttccataatactctatattacacaacccgctgatcttcatacattcattcacaactactatacctttcacaacttccatttcaactaatcccatcactataacactattgactaataccttaaatacccctttaatcatacataccttcctctatattactataa

SEQ ID NO: 322890 - DNA, 236 bp, Zea mays
gcttacgtacactagtaccacacactacgccagaatgggataggtcgaggttccgagggatagagacagagacgaggacagggagggccaggccacggactcctcactccgctcttctccgctgatctgcctgaacgacgcaactgcagctgcacatgcactactcgccattccaaccacctattcactgcgcatatatctcagcacccacaacattgaagcactccctacacgtc

SEQ ID NO: 322891 - DNA, 269 bp, Zea mays
taacatcctccttttaaaaactccagcacatcatctaatactataccatcataacacaaaattactctcatatctccaactgtaacccatgctaccttatcataagattatttcatttatactataacttcacacaatttacctcaattgattgattaaactcacactatacacatgcatataacatatcctaaactcttacatcctatacatcatcattttatacactcaactaaatcaaatacattaaattctatttatcacaacta

SEQ ID NO: 322892 - DNA, 119 bp, Zea mays
tcgattaagtgcggctatggaagtcttcacagaatgcttaacactctaccttggcgtgcggtatcgatgatcaaatgtcatgtatacacggtggactcatctcccgatctagcacactt

SEQ ID NO: 322893 - DNA, 141 bp, Zea mays
gaccacactagcgcagcgcgcacaggagcaaatgggggcatcctctatcgcgcgcgcgccatggccacgaggccgggccctttgactgaatggccatggcaaaagcttggaaacttcaagtacttggtgatggcttccgtg

SEQ ID NO: 322894 - DNA, 373 bp, Zea mays
tactagttctagatcgctagctcctcactatttttattattattccccaattaattcatacagtttatcatatattgaatagggagagtcctattatttttacactgcaactagtttggaccgtatgctatcgatatagtatatattatctttccgattcctctgatgctagcataccatatcatagtatgtcacgacacgtgatgaacaagagcagactaaatgagcaaaatgatattttgcctgtatcaatatatattgcacgagataaaaataatacaaggttacaaccatgatttatatcttgagccttactccgaccctacgcttctaaataaatatttacctttgaatgaatttcacgaaaacccat

SEQ ID NO: 322895 - DNA, 411 bp, Zea mays
gccttctagcttatttacaccccaattctattactagagtcagcagcggctacaatgcgtgcttacacgatcaagagcgacgatcagcactctcttctcatcctacttctgcaggccctccagctctattcatctcttcccaaacgaccttcatcccctaacaaccactgctgctgccgacaatgccccacctgctacagcgtctgtacctgctactacctcctcaccatgtgcaccgccccctgcactaactgcgtccctgtctccacgtacaaaggcgctaccaagtacacatatccaaacttccttacccaactctagccctgccccatccactccagactcatcctatcaaccatgtccacattctatcgacccttcttccatatgcatgctctcctaacttcatcc

SEQ ID NO: 322896 - DNA, 379 bp, Zea mays
acaccccataactgattctagcatcagcatcggctacaaggggtcgttaaacgatcaagagcgggagcagcactatcacaatgatcctatgtctccacgcccttctactatctacgactgctaccaaaagacctccttacccgaaaaagcaacgctcattcgacgagcacaccaactgagaggtcgtgtggacctgctacgaccttctcaccaagtacaccgccacctgcatgaactacatgcccgtctacacggacaaaggcgccaccaagtacacatgccgcgacttccttccctaaaactacagctgcaagatccactacatactcatgcaatcaaccatggtcacaaccgatggacccttcttccataagcatgc

SEQ ID NO: 322897 - DNA, 285 bp, Zea mays
ttaatactcatcaagtgtgcccattatataacatttacttttatttccacaaatatagccactacttcctagtcaccctcatgttattttctctcttacttctattgactgctaccactccaatgtattttcttctgccaaacatctccatcttttactgctttctatactttcatgtatcacatgtcaattatcactattattaccttcaccttagactttatttttattcttccctacacattatattaattttcatattataaaatcttatattaaattttc

SEQ ID NO: 322898 - DNA, 336 bp, Zea mays
cgtacgccccagaccggcaaccctagcgccggattccttcttctcggatccgcccgccgcctcgctggggtggttgtcacaggtgagcgagggggatagatacagcttgcgtggtctcattactgagagaggcatgggatgatgtccacacggtctttgaacccgatccgacatgttgcctacggtggtctgcccacagtctgagtcctgttccaccccaagtcacgctcacctcccgtgcttactattgccctactcctcctgggtgtcattcttctcgtcgactacttcatcagcggctcatgtgtaactggtacacgctgatagtctgttacc

SEQ ID NO: 322899 - DNA, 372 bp, Zea mays
  unsure (1)..(372): unsure at all n locations
catcgctgtgatccctccaccctcctcgtccccctagccgtgtcgcgatggccaccggcggcgccgccgccgccgccgcctgccctctcctgctcctcgccgcgctactcctcgcggtgtccgccaccacgagcgcgctcaccgacgacgtgctcgcattggtggtcttcaagatggacatctcggacccgtcgggccgcctcgcgacgtggaccgaggacgatgatcgtccctgctcctggccggccgttggctgcgacgcgcgcacgggccgcgtcacctcgctctctctcccggcggcgtcgctctcgggccgcttgccgcacgcgctgctccgnctcgacgcgctcctctccctcgcactcccgcgga

SEQ ID NO: 322900 - DNA, 335 bp, Zea mays
acaagacgagcgactactgccgacattgacacctgacttcacgctactaccagctatcgcggcgtgtgtgaccatacagagccccatgccgacacgatcagcgacgacaaccgcatataccgcaaagactaactacgttgacgcactgcctggcactctgcagaatgctactagacgaataatcgcccatggctgaaccatagatacacatggagcatgcagctggactgtacatgcactgaaatcaaatgcaacaacactatcgcccacaggaccatggtgaaactcttgcacggagggttcagcatcacgacttgtaactgcatggcacacca

SEQ ID NO: 322901 - DNA, 200 bp, Zea mays
taccataacgttagctcactactaacttcatattcatcaacatcatacatacatctatctagctagacacacgtgataggctctccactcacttcatcatttctttcaacctcaccatcactttccccgtcacaataccatttactgagctcctgattcttctaacaccttgttcatccacactagtcctaataaacacc

SEQ ID NO: 322902 - DNA, 353 bp, Zea mays
  unsure (1)..(353): unsure at all n locations
agacaaaacactcccactgtcccacacccttagtccacagactcgcactgcactcgggcaagccanngaggctgggaaggatcagggatccatccaccgttctgtcttctcaggtcgacaggaggccagaccaggtgcgcgcgtccgtgtcggcgatgagcgcgggcgggagccgggcgcggcagaacgcgatgcgctcaggggtggtggtgctgggcgccgtggccttcggctacctctccttccgcgtcggcttcaagccctacctcgaccaggctcaggaggccatcgactccgcccgcgaccccgaccctgaccncgccaccaccgncgcgagggacgcctncgacgat

SEQ ID NO: 322903 - DNA, 278 bp, Zea mays
aactaatacaccttctctaccacaaatctctcaaagacactctcaactaatccctccaccgacacctcttctaccaatactcttaatatcttcaacacaaaatcaaatccaacctacacatctataaccttcaccttatctatatactcatctacaatactcaacctcaatacattaacttccacaacccacatccctacattattccattatcaccaaaactacactaaattcacaataaatcccccttcacctaaaattatccaaatcattttcaa

SEQ ID NO: 322904 - DNA, 370 bp, Zea mays
cgtactctcatttctagacataccctgattttctacttttttttcatcaaagaggacacaaacacatgctgggttactacatatgggcggccggtaaacgcaactcttcttctatggacacatcttaccaccaccctttactacttcggctttccatgaagaggttgctcttatgcaccttccgatacaatcattctctcattcttttgtagatttcacgtttgagctgctgattctcacatccctactctacctccatgctcctcgattctcttatactgctcctgctcttaccatcttttcacatttttaagttgtagatccactacatgatgctactaaatatagactcttatcatattctatctat

SEQ ID NO: 322905 - DNA, 315 bp, Zea mays
  unsure (1)..(315): unsure at all n locations
aattccctaatcgacccaggcgtcctctaaacaatcgtnaaactctgataatccatttccttttcatcattctggatactaaaaaagggtagcgtaagaccaacactaggctggacagtaaagctgaccttcattttacatccatcatgactcaagctttcaactacatttttctcacatcaactgaactttcttaactcctctctcttcttaaaaactcattattttgattcctgtcgcaaggactagcttcatacattatatgcttcttgtcgccactatccgatgactacaatataattctgttcactttct

SEQ ID NO: 322906 - DNA, 312 bp, Zea mays
agtagagcatgcacaacctcaacttacagatcttaattggcagatgcacactgaggacaacgatgtgccactacgatggcgactgctaaggcagcttttagatacgattgatgatgaacaaccggctgatgctctgctagctattcgtacttgaggtgatccaaaatgttcgagcgacaactccaatgctgcatcatatgacaagctatgtcaaggcgtacaagcgtgaagaaccgatctgcatcttgggcatgaagttacctacacactacatacgaagaaagctcactgagtccagactgatatactact

SEQ ID NO: 322907 - DNA, 277 bp, Zea mays
  unsure (1)..(277): unsure at all n locations
ctctcgaccagactccccgtccgcaatcatgtctgaatccctctcaatccacttccgcgctggccatggaaggagaatcaggcgccccggatcgccgcccagcctccatggaaagggagtcctctcgatctgtgtccgcgctgtccatggaagaaaccttgctgtcagcgcgtctccacttggtgagtgatctttgggtagtcttgctatgaacaacaattccgtggtgctggtggacctgtggaagggcttgcggtcactaaagtgtangtggatg

SEQ ID NO: 322908 - DNA, 370 bp, Zea mays
  unsure (1)..(370): unsure at all n locations
catcacataaaaccantgcatttagaagcagcgcaatggcgagcagcaccatggtccgtctcctacacaggcttggccggcaaggcagtgaacgtgccgtcgtctctcttcggcgaggcccgcgtgacgatgcgcaagacggcggcgaaggcaaagccggcggcgagctccggcagcccgtggtacggccccgaccgcgtgctctacctgggcccgctgtccggcgcgcccccgagctacctgacgggcgagttcccgggcgactacggctgggacaccgcggggctgtcggcggacccggagacgttcgccaagaacccggagcctgaggtcatccactcncgctgggccatgctgggcgcgttgggct

SEQ ID NO: 322909 - DNA, 86 bp, Zea mays
cgggtgaaaaaaaaaaaataaaacaaaaaaattaaaaaaaaaaaaaaaaaaaaaaaaacaaaatgaaaaattaacaaactatttac

SEQ ID NO: 322910 - DNA, 401 bp, Zea mays
cacacactgttcgaccaacgcgacaactttctgcaggaattttggaagactctctatatgaggatgatgagcctgactatgggcctcggcgaacgccaggtcactgacgcttcgaggatcaattggaagctgaagcactatctgataagcgtatcatcaacgcgaagacgccaaatatgagctgtaatgttccccgtagaccaccagaccctactgctcgtatgccgagacgttaagctgatgaatactcacgatagcgatagggcggagtcatagctatcaaactgactgcgctgatcttgaacattcaccgtctcgtgcgaagcaagatgagctggactaggagcaagagatctatgaacaatgtgaggaagaagctcctatctcagatgaacaaatgc

SEQ ID NO: 322911 - DNA, 311 bp, Zea mays
  unsure (1)..(311): unsure at all n locations
ccgccaccgaccccgtccgtagaggtccccaaacccgaaccccccgatcaccacgatcccagtccctccgcccgtcgccggctgcccctcgctgccggggccgttgaggcgcaagaagagtggcatccgctcccgctctccacggccgacctttcccttccgctcacccttcccaccggccagaccttcctttggcgccgcaccttcctctccccgctccgcttcaccggtgccgtggggtcccacctcgtctccctcttccacctgcccgactccgacgatggccgnctcgcattcctnctncacaacga

SEQ ID NO: 322912 - DNA, 326 bp, Zea mays
cgtcgtagcgtccctcttccacctcttctctccctgcttccttgtctaaatcgatttgtcagccattgctttcgtccttactgcagtgtccgttttggttgtttggtgaaatctgtcgctatcttcgtcgactccagttcgtcgtccatttcttaaagttcaaaaaggcctgctttgtccccatttttcttccccgtcccaaggtacgtgattgcagcagatacgacttcctctgcttcggatctccttcaatcgtcatcttccacttcgcgttttcctcttcgtactcatatggctttgtctgcagcaatgctttacgggtcgcg

SEQ ID NO: 322913 - DNA, 227 bp, Zea mays
gaaaaaggaaaggaaaggacgaaggatcggttgcgaagtctatggcgtcgacggcggggtagctggcgcggccggcggcgcagaaaggagcggtgcccctgttctaccgaagggccctcaaggacaccctaaattggcccgtcaaccgcaactttttttaccagaacccgtcgaatttccggaacaagttcaaggccaaccgacccgtgaataacctgaacttggtc

SEQ ID NO: 322914 - DNA, 347 bp, Zea mays
gcagaaaagaaaagccgttctccctacgtttccccaaaccccaaggttcccaaccatggcaggcggggtcgattctgactgcgagcaaaaccctaaggacgccgagcggcacgtgctcaccgtcgaatccgacgccgatttcttcgaggaggactacgacgaggatggcgaggaggaataccaagaggaggaggagctggactggccggcggctgcggcggcagaacgggagcggatgcagtccgcgttacggaggctgtcatccgaccccgtgggcatccgcgtccacgacgtgatcatcaagggcaacaccaagacgcatgacgagctcatcgaggcggatgtcg

SEQ ID NO: 322915 - DNA, 299 bp, Zea mays
cttacactcatataactcctactgctcccatttatatttaccaatttttttcaattaacacgggcacgtttaatattaatgattgtattccacatacaaaacccatattatcaatatctattaatatatttaatacttcaaatacaaataaatctcactcaatactatactatacttatcatcattctataaacacacttaattaccctacactaatccacacaactactattactaattacatacactaacaatatttaccaactagttaacttcatcacttataaacttccaatctt

SEQ ID NO: 322916 - DNA, 302 bp, Zea mays
cattctctcattctcttcacctatttttactttatcaatctctcaacactactattgtcctgtttaaatattacagttggtaccataaatcactatcccctcttcactccatcttctacttcgctacaaacacttatccttcactacactttcattaccactatctatcactcaatgcttaccacttatactaccaaccctacatctcaatatgaaactaatctaatcttccctacacaactcctatttaatacctatacactccacaatctactacatcctataatccatatactatacca

SEQ ID NO: 322917 - DNA, 144 bp, Zea mays
tacaacaaaagctatatatataatcttaaacaaaccctgagataaaacataataccatattccacttcttatcttgcacatatactctatatatttcaccacctgatgatcaataaccactctacatatcactataataaatta

SEQ ID NO: 322918 - DNA, 118 bp, Zea mays
agccatgcctgaagggaataaggaaaaggacaaaagccggaaccctgatgcctcaagtccttcgccctttcgaggccccgcgtacaagaccaaactttgcgcgctttggaagggcaag

SEQ ID NO: 322919 - DNA, 424 bp, Zea mays
gaagactggcgtgacaaaagctgattatttgaacagtgatggtccccataaaaatagagaaggcagtgaacaagaaagtgatgctcaaagttcttgcacaaggtcagagttggaggctgaaagtaagcaaactaacaacattttggagtatatgcaatcaactgaaaggcatttgtttattcgtagccacaaggatttagagctaaatggagagaccaaaacacgaactaagggtaataacttgattccaacaagagaagacgatttattgccaaagaaaagaacatgtttgaatgacaatgattctgagagaacttccagagatatggagctagttcacattatggacaatcagcagaagcatgacacacagagggatgtggatactatgagaacaacattcaggggaaatgatgagaagaac

SEQ ID NO: 322920 - DNA, 280 bp, Zea mays
tagttctagatcgcgagcgggccctttttttttttttttttttttttttttttttgtttggttttttatttttgttttttttttttttttttttttaaaaatatttttactttttttacttttttattttttatattctatttaacacaatttcttttttttttacaaccctaaaacaacacccttaacttaacaactacaactcctttaaaaaaaaactctacaaccaaactaactttaaaaaaatttacaacataccatgtaccttttacaacacttt

SEQ ID NO: 322921 - DNA, 238 bp, Zea mays
tacattcacttatacatcatcttcacttaccacataataaataataatacaagaaagatctaactatatgaaggacatcaaaaacctatcaccaataccacaaaatcttaacatacaaaacaaatacatattacatacacacctaacaatatcacttctaatctcttaatagacatttcactataactcaataccacaatatctcttataaaatcaaccataacatctaatccaaatc

SEQ ID NO: 322922 - DNA, 401 bp, Zea mays
acaatctcgtttacacctaactatacagatcatctcatcttgcaccttacgactgaattatctagcacaggtcaacatttcatgcgcgtcggcaaaatctatatcatatagtctacatctctcatctcactacaaattgctactacattcttataaaagaacttcatcactctattctttcatggctatgcacccatctgactcaaataatattgatctatagtacacacaccttctacttcatgacaaacttatcctatattataaagatcttacgatctgtcacatcgtttactatgtctacaccgaatgttctaattatctatatccttccttcctacaactattaccgtatcttcccactctcacctcttaacctatcatatctgatcccaacattc

SEQ ID NO: 322923 - DNA, 359 bp, Zea mays
tatcgatcatcctaaaacctatactctaactctactactaactccaacctcttcccacacagtgtcggacacacatcacaggtagaatatatactactaactcactcaatcactcattcttacttctacacatcatacttatatccaacatcatttacatatatttcaaaaatctcatcctactcattcattacttaatcctcactcaaaatcatactacttaaagaatcatcatcccaatattcatatacatatcaacaactctccactatagcaaaaccaccttactaacatcacacataactactgcatatctacttcaattctacctacatcctcttaaacgcaaatacatataa

SEQ ID NO: 322924 - DNA, 378 bp, Zea mays
ggcttctcctccccctccggttcgggttcgggttcgtgaggttctccggggttcggttgcgggggtgagcggatcgagagggcggcgtctgatgttgagtaccgctgcttcgtcggcggcctcacctgggccacggacgaccactccctccacaacgccttcagcacctacggcgaggtcctcgagtccaagatcatcctcgatcgggagacgcagaggtcccgcggcttcggcttcgtcaccttctccacggaggaggcgatgcggaacgccatcgagggcatgaacggcaaggagctggacggccgcaacatcaccgtcaacgaggcccagtcccgcggcggccgttgaagcggctgcggcagcgggtacggtggt

SEQ ID NO: 322925 - DNA, 433 bp, Zea mays
attcccggcggctgtcattctaatggtggatggccaagttcacagccactggtgtcctcatactgttcgaataaacagcgggtgacataacttacagcggggaagcaacagctagctgcttccctttttgtttctccaccaactaaagctgaccagaaaccacaagcttctccaaagacagctaaggacataccctcaactcataaagtaactaccactaatgtagctgcacactctgataaccagcaagtaatccctgctgatgcaccaccgcctgatctgcttgatctacgtcaccagacagatccatcgaaccgaccatcacctgaccctttttcacagctacaaggtctacttggaccaacatctgctgctcctgcgctttctaggactccgtctaccactaccaatacttccaaaccaccatatctta

SEQ ID NO: 322926 - DNA, 416 bp, Zea mays
gagcgcacacacacacaaccagatctcccccaaatccacccgtgggcgcctccgcttcaagaggcggatctttgtgaaaaccctgaccggcaagactatcaccctcgaggtggagtcgtctgacaccattgacaacgttaaggccaagatccaggacaaggagggcatccccccagaccagcagcggctcatcttcgctggcaaacagcttgatgactggcgcacgcttgctgactacaacatccataaggagagcaccctccaccttgtgctccgcctcaagggaggcatgcagatctttgtgaaaaccctgaccggcaagactatcaccctcgaggtggagtcctatgacaccattgacaacgtcaaggccaagatccaggacaaggatggcctccctccagaccagcagcggc

SEQ ID NO: 322927 - DNA, 351 bp, Zea mays
attccctggccgacccactcatacgcttacaacccttaatacatcaatcctttttaacaccttactttaccccaaccatggccgacctttttcaatctgtggaacgctcttataaaccattaacctttcacttactacccaccaatcttccaaacctaatacactactatctctacaacattcctacttacatataacctaataccaattcttccacatcttctaccacaattacattcccaatcatctactccttcattctcaattcatcctacttataaactaaccatattcttactccatctccaactatactataacactgaactaaaccatcatctcttacatcta

SEQ ID NO: 322928 - DNA, 238 bp, Zea mays
acttctacttactagcccacgccatcaaccaccacatattcaacaatgccttcatcatcaaccataacatctctttacttcaacattcaatcacctccactctatgacatccaatcaataccgcaatcattttctttaccttttcctactagatctacttactcaattatcactctactactatccacatgactattctatcacatcaaacccttatctaccgacccacatcaatata

SEQ ID NO: 322929 - DNA, 326 bp, Zea mays
cacacacagacaagtggtttccaaagcctagtgtgtgtactagcaaccagctagcgccgacggcatcaagcagccagcatgtccgacgagaatcaccaccacttctttaaccaccacaagaaggaccaggagcatcccgcccacgagtacggttactccgatacccaggtggtcaccgtccccgacgacggccatttctagaggtacactaaacaggaaacataacttaagcacaagcatgactctcgctcaggccgattccatccaccgactacaattcgcctatcttataaacaataccattttctaacaccaagacttacatc

SEQ ID NO: 322930 - DNA, 433 bp, Zea mays
atcaagaagaacaatattgagtcacctaatttgtctgatcaaccactacaacgtgaccgtagtggtggcgccggtgaaacgaaggctagttgatgaatttaaatcttgtgacttgtctcaccgacagaagagaaaagttaagttgcagggaaactcactgcaaactcagacaccaagaagatcaccacgattggtaaacgtgaacaatacttgtaataagaacaaaaaagtgtcgaaaggaagagccaaagtgctgaaaacaccaccagatgcaacagatcaggtgaaggatagagcacataaatcatgtttgcttgatgagaaactagataatgccttgaaagctgttcatgaagaagcgacaggttccttatctcaggatctcaagaaactggattccccacggtgtgaggttggcttaagtaaagagcat

SEQ ID NO: 322931 - DNA, 371 bp, Zea mays
gttggcttctcctccccctccggttcgggttcgggttcgtgaggttctccggggttcgggttcgtgggtgagcggatcgagatggcggcgtcggatgttgagtaccgctgcttcgtcggcggcctcgcctgggccacggacgaccactccctccacaacgccttcagcacctacggcgaggtcctcgagtccaagatcatcctcgatcgggagacgcagaggtcccgcggcttcggcttcgtcaccttctccacggaggaggcgatgcggaacgccatcgagggcatgaacggcaaggagctggacggccgcaacatcaccgtcaacgaggcccagtcccgcggcggccgtggaggcggcggcggcggcgg

SEQ ID NO: 322932 - DNA, 425 bp, Zea mays
aaatctatacaagagaattaaataaaaaaaagcctataaaagcgttccatataccgggggcaatcttagacacgcgcgcttaccaactcctagctcttcatatatactcacctaaattacaatacactcatcattatcaccacaacgatttgactggaaaaactcatcacttcacccaacttaatctccttgcagaacatcccactactgccatctacataaatctctacaaggcccccacccttcaaccttcacatcagccacccagcctaaatcctgactgacactctccttaccacgcaccatatactcccgtgcaaacgttctctactcgcattataacccatacaattgccacaagtttatctcccgtttctttccctttcttcccatcctatctcatcacgttatcattctcttcccct

SEQ ID NO: 322933 - DNA, 458 bp, Zea mays
  unsure (1)..(458): unsure at all n locations
tggcccgttctcaagagaacctgtcggaggacaagtcgcggctggggtcgacgccgccgatctgccgcaaccggttgagcggctgcaacccctgcatgcccgtgcaggtgacgaccgcgcccgcggggctcgggcgcgcggcccgcgtcaccgacgccgacgcggtggccggcttctcccgctactccgactacaagccgctggggtggaaatgcggctgcgacggccgtctgtacgacccctagccgagcgtgcaacgccagtgcactctgctccggtccggtagggtgggggagactggaggccatccaggttcttggagtcatctgttcttggtttttgcatgcccatgggccatggcggcttgcttcacaagcttattatntctctctctattctctactagttcgagcttgcagcttgtaccagccgtagccggagccatttttttttttggc

SEQ ID NO: 322934 - DNA, 386 bp, Zea mays
cccaatccttgcgtcgtaggaaccaccattcacggtgacggctgtggttacacggcaaggaggcaccgcataggcacccacgatagaggctcactgcctagtgcccatggccaagttggacgagcatagtcgatctaccgccaagccgtcatatggtggtcgacctcgcccagccgccgatctaccgcgccggaggaccaccgccgattaacaggcacaccacatgcgcccacggcgaaggtccacctatagttgtcgcccaagtcgatggaccgaaaaggacgccggggttccaccatggtggcctcctggattcgatcgtcgcctctgcgtctcctcctcttcctctgctggttgttctgttccagggttcaaaggccaggtga

SEQ ID NO: 322935 - DNA, 320 bp, Zea mays
  unsure (1)..(320): unsure at all n locations
ccactccttccatatcataaactacttttcttacttatccttccgaatacacaatcaggaggctccacataacagcacgctatccaaacttaccttctcacacttacaacctattacatatatcatattanttataccttcattccaccatatgttctacactaattccctcacatcatatacaccatacctgaatactcactacaaccaactcacacactacatgcacacacagagcatattctcctttaatccttacacaattcattccacacaacatgtctcttctcctacaccatccgaaccacttccatactatc

SEQ ID NO: 322936 - DNA, 300 bp, Zea mays
caaatacctgcctaaggtacaccccaactcatacatcaatcatgatcagcatcatataactatcacactgctacatcatacttattgatacaaccacgtccatgcatccattcgaaacaactgttccttataacttccctcaacctcctgatcacaaacacgctggcttacatacctacatccttgtataagattacacacacttcgctcacgcacactttcacaacttacatgaccttttgatgaattacacaacctttaactaacaacagacatatacaacctttatttaccaaacac

SEQ ID NO: 322937 - DNA, 166 bp, Zea mays
cctgaattccctgtctcacaaagtcatatgtttattaggaggatctcatctatccaaaccatattcttcctatcttaccctacttcctccaagccgagtttcctatcaggtgacgacacacaacacctcatcataccctgatatttctataccattaaccactcca

SEQ ID NO: 322938 - DNA, 238 bp, Zea mays
gaagaacaacccatgcgaatcagcctgcacttcaggggccgtgaactgagatggagggaacgctgctgcaagcggcagggatgcataaagtactatccacaatgaacattaccattccgatagccgtatcatctctgctctgagcacactctactctgatccgagctcatcccactattatgaatgtgattcacactttgactataactaactcgtctgacacatgcgagtaatattc

SEQ ID NO: 322939 - DNA, 225 bp, Zea mays
acacttctggatttgctactgccaccttgcgctttcttcttccctgccaagccccactgacctggatcatggttaataatcacaatgcgtcccctatcgcaggatccttcaaaccagaatggtcgcaactggataattacattcacaaactcactttcaggtcgattctggcaagattcggtcctactaatagtacgcgaccagcttgagtatagcgatgatctc

SEQ ID NO: 322940 - DNA, 428 bp, Zea mays
  unsure (1)..(428): unsure at all n locations
ctcatcctccgcgcagccacagccgcgattcccgccgccccgccgcgctcacctaccagccgggccgcggatccctgatgttgagatctgggagctgaagctgaagatctcgcggatgcgggtgcggctgacggagctggagcgggagcaggggctaatgaagcagcaggggaggatgcgcggcggtgacggcggcggcggcgagcacgaccgcgccttccttgcgtcgctctcgaggggcatcggcagcatcaccatgttcggcgggcccgcggcggccgacagacggcgcaagaattgtggcggccggagctcccagtgctccgacggcanggcccgcangcggcagaaggcatccttccctatgactgatgcttcgctgctagcgtcgacagtggaggcgcggcagggcgtgatcgtggatggat

SEQ ID NO: 322941 - DNA, 309 bp, Zea mays
cggtcttgaattcccgggccggacgacactttctctcaacctcagatcaaacacctgcttcattttagagctctatcttcgctaacataggatccgtgtcaaggatcaatgctgcagggatctgatcattcaatctgattaccagtacagtgcagaaactgttttaagaactttatctagagcatagactatctaaatctgtactaaaagatacacggatgtcacatctgcggaatataacattatcgttcttttcacgcatcactatataatctcatagtgagtctatactagtacataacgtcttac

SEQ ID NO: 322942 - DNA, 450 bp, Zea mays
gtcggatccggtattcccgacggagatccctgaagatgggaaacccacaccgccggtgcagactccgggaggagacgccacgccgccggtgatgccagtgcagaccccgttgccgttggacgggatgccgctgacggcaatggagtaccgttccttcttcgagaacccggacatgaagcctgaggcacaaatcatcatgaagctacaagatttggatgggtggaagtacttcggcaggaacatgttctggctgggtgtcatcggcggcggcctcatcctcctgcacctcctcaccctcctctacttcaagctgaggtacagagacagggagcggcggcggcatggctacgccgcactgcttctccccaggctggagatcatggtcgtcgtcctggcgatgccgtgcgtcgcccaagcggcggcggcgctcatcaggggcgggaccacgtg

SEQ ID NO: 322943 - DNA, 142 bp, Zea mays
ccccaaactgcaagtccgccaagtttttgtatgcatagatggccttcacttcacctgcgaagattcacagcaaagaagcgtcgcaaacagagatcacaatgtatacctcaaaccatatctacgaaaatcattatcgataaac

SEQ ID NO: 322944 - DNA, 297 bp, Zea mays
acgcccgcggccagcacttgcacctacccggtttactacctcatatcgtacggcttatcactatgtctagccttctatcggatctgtgcccaacgctggattataagttccctaaactatctacttcagtcatatattgactacctattgtgcatatcatcaacaacaacgtatttaactttcatcgaagtctacttattgtttttcgacttaacctattacacattaacttcattgatagttctttttaactacctgtataagatctaatgtatgaattactatctaatgaccctt

SEQ ID NO: 322945 - DNA, 234 bp, Zea mays
ccaagaaggggacaagggcctctcttgagttttggtatgtcagcctcatcatattctcaatgactggactcaacgccaaaaaggggccacaaaaaggatataaaggactcacacccttaaagggccccctagaaaaaaacgcatctatagacacaccataaacaaaatttttctttcctataaacttgacatttaaaaagttctctttgcattgtatatcccacatgtttaaaa

SEQ ID NO: 322946 - DNA, 138 bp, Zea mays
gccgcttttctgctgcgtacacagaaacagctctttgctcgctgtcgtggagttcttcccctgttcgatggtcaccgggaggtactgcgacgcgaggctttgcgtgccctccgattgctgcataacgttgcttgatcg

SEQ ID NO: 322947 - DNA, 249 bp, Zea mays
gctaccgatgagctttaacaaacgacgaagctgacttgcatgaaagattggttgctatacgagaacggctaaaaggacataccgctgatcttcctaagagggtcaatacactggtatagacgtggcgacttctggctagcatgggtcctgccggacgcagcgttcatattcccagtggtccgcaagtatacgagctgggtgaaacagagcgtacttgaggccttacaacagctgacataggcagggatg

SEQ ID NO: 322948 - DNA, 78 bp, Zea mays
gacatactgtgctaaggtaggcagtaatagcttgcacgacacggtgaagaatcgctggacgggtactgaggtagcgac

SEQ ID NO: 322949 - DNA, 346 bp, Zea mays
ctctctctctccttcctgccttctgcctgctggcttcccatgtccgcggcgcccctactgggctgggagctgcttctccagcgaaaaggttgctgcgccttgacgcaccaccgatccaccgtcgcccaacccgagcgttctgtccggcagctaggtagcgagctgctcggtggctgcgaccggaagcacggaggcgcacaggacaccaaacgccagtcgattgccttgcttgcctgtgtgctccgcccggcacgagttggtcggtcgtgccatgcatggatgacaaggaacttatcttacagtctgacctgcactcattctaccatcagcatcagcagcaccaccg

SEQ ID NO: 322950 - DNA, 197 bp, Zea mays
tgcatactaactaacgaacacttgcgcttatcacgaactagctgtggttatcgagtgctgtttctctgaacagcgagaagtctcctcaggctatggtctccatgcatctttcgccggcaaatcagggctatctgatcctgaactatctaacaagctgctcattggctactacccttatcaaggaggggaacaagaca

SEQ ID NO: 322951 - DNA, 434 bp, Zea mays
tagaaagggagggtgcattgaaggcaagggagttagagttgctatcagttgagcacactgaaaggtcagcagacagaggtttaactgacaatgcaatttcaaaagatcaaatggaagctcttgttgagaagataagtaagttaaatacgctgtcaggcgagtcaaatgtgcaaaaggaacaggctacaagtccgcttgacaaactttttgttgtcattgatgaattcagtgcacttcaacatgaggttgagaccttaagatatgaaaatgaagatttacagttacatattgaatcctatactcgtgaaattgaacagctaagagaggtctccagaaatagtgatataactaatagggagttggaatccaaaggaagtgagcttcttgaggtagccgttagtatggagcgaatgattcagcggttaggatatctt

SEQ ID NO: 322952 - DNA, 231 bp, Zea mays
tcttacaaaccagcacatcatcagccacctccattcattttctttcccctcctctcttcactatgtaagttattattaaaaggtgggccgtccccatcccctatttcctctctctaactcacactaaattccaaactctacatcacatgtctctataaatcactaacacatactctatttcctctatctacatactaatattctacaccacttactaactttcactataca

SEQ ID NO: 322953 - DNA, 178 bp, Zea mays
taaaaaaaaaaaaaaaaaaaaaaaaaaaaaaaaaaaaaaaaaaaaaaaaaaaaaaaagaaaagaaaaaaaaaaaaaaaaagaaaaaaaaaaaaaaacccaaaaaaaaaaaaaaaaaaaaagggccgccctttttaaagatcccaactttacttccccttccttccaactttaaacctt

SEQ ID NO: 322954 - DNA, 294 bp, Zea mays
cacttgtcagcaaagcgccggaaaccaaaccaccgccgccttggctagctaacacgtgcacgtggcagtgatcccgatgggaatgctgccgcgtacaacagcgctcgtcgcatcggcggtggtggcggcggcgctggtgctcgggatggcgtcggcgcacgggccggccgccgcgcccgcgccgggcccggcgcccgggatcagcgacgagtgcttcaacgcggtgctcaacatgtctgactgactgacgtacgtgacggcgggcatcaaggcgcgtcacccggacacggcctg

SEQ ID NO: 322955 - DNA, 364 bp, Zea mays
tcgggagatccttttaaagctatttctgactatctactcatgcgaggttctgcatctctttggcggctcactaacatcagatgcgcgtacatgtctaccgtgtactacccatttactacggtcgatatgagcgatatatctcttatacatcatacagcctacttagtcaagtaactaggcttgccatagaatatactcattcagtctcatacgacgtgactcatgctcattacacttttcgtatactgctcggacaccatcaacgtggacaacaaactctctaaaacatctgatctcatcttgccatacctactcccaatctacacactgcttctcaagggcaatcacgttgaattactaccac

SEQ ID NO: 322956 - DNA, 221 bp, Zea mays
agagaattcgcaaagtggacttctggttgtaattctctcacaccatacatacacgcgctgaagagttttacgagatggcccggagagccctgggtgcgtgtatgtatggtgtgagagaattcgcaaagtggacttctggttgtaattcttagtcgtctctctctctttttgggttggtcaaggttctatgatccagcaatccactgaactgtttggtactg

SEQ ID NO: 322957 - DNA, 320 bp, Zea mays
taactacgtatctacctttctaagactctaatcttatgacactatttaacaaaatctcaaatttttaatttacatcaccatttatttacttcatttttttccaaaattttattaacaagaatccttgatccaaatccaattacggtatacaatatcacaaaagctgatcgaaataaaatactacccaaaacaatgtatcaattttggagagtctaaaacttactactatacttactagcacataaccaaacatatatgtatatgtaggaaagattcttttatggaagtatagaccacatgcatatatctaaatgaaacta

SEQ ID NO: 322958 - DNA, 324 bp, Zea mays
tcggtacaaaaccactacaaatcaccaactcatcaacaatcgtagaccatcattcattgcggggctaacaaattagtgcggctgggctctgattgaaacctttgcagccatgcctaggcttctcagccaactctgtctgcgacacgctcgtcgtggcctactctaatctgtcctgcctcttgtgcaacaacctccacaccgaccacgtctactactactcctggatcttgctcaccatcaacgtcgtcaacctcgcgctctacatggcgctcaccatccggtgcacttccaaccttgttgtcgctagcgagctctacccgatgc

SEQ ID NO: 322959 - DNA, 420 bp, Zea mays
tccctttcgaccgatcgtactctcgattctccttgacttctacacattctcccaattcatccccactcactccgatgttagcatgtcctttaactctgctgggcaccttatccctctccaacaccttcttatcctcgctctccagctccatctgccagatcacatccatgcaaccactaacattaaggttatccccgataacgacccctccgtcctcctactagctcccatccgtaaccttgcgtcgatatctcgcctagtctatatcgccaccttctacatctgtcccattttactttacaccttacacgatcctctaatccttccatccaccatgatagctcgtagcttctctctgattatctacatctaccctatgtccaagatctgatataccttcgaatctgtctgctgcaatca

SEQ ID NO: 322960 - DNA, 429 bp, Zea mays
caccagtccagcagcaccaggccagacaggcacacctcgaagaacaagagctggtcctggtggtaataagcgagagagagagagaggccaatggcagccaagtggtggctcgtcgcctccctgctgctctgcctcgccgtcgcatcggcggcggcaagagcaacgccccgcgactgcgacactactgccgccttcgcggcgggcgacggcagtgccggcgccgtggacgaggacgacgagcaggccaagaccgccgacgtgttcggtgggcggaccggcggcggcggactcttcggcggcgtccacggcccgctgggcggcagcgtcgctgggttcggcccgttcggcggggccgtcgccggcgcaggcccgttcggcgggttcggatgcggcggcggcctcggtggcggaggatgaggaggaggagga

SEQ ID NO: 322961 - DNA, 443 bp, Zea mays
ccggcttacactttcagcccttgcgcatgcggtgagagccaagaaggtgctgatactagctggaatgtgaatgatgccgataaaaacaacagcgaaagggaagatagtgatttagctctggagaaggagagtgctacattcacctgacagaagcagcacctggaagaattatctgacgcaaaggaaacatttattggaggtcctgaggcagaggccaaatccaacagcacacaggattctgacaatccaattgctaaggtgcggagcagtgtagcatctgacaagatgagagatgggtgcaatgctaatgccattccgtgtcctgctacttcaaatcatacaactgaacccagctacgtagcttcccaggaagccagtccagcaagtacaaaagacacagctatgcctgaacaagttgaaagaccaagttctgaggaattact

SEQ ID NO: 322962 - DNA, 53 bp, Zea mays
  unsure (1)..(53): unsure at all n locations
tctgttgcctctggcttgatctgtggtgatgggatctgctaattcntcacact

SEQ ID NO: 322963 - DNA, 437 bp, Zea mays
ctgtcacacacacacacacagacaagtggtttccaaagccaagtgtgtgtactagcagccaggtagctcgggcggcagcaggcagccatcatgtcggaggagaagcaccaccacttcttcaaccaccacaagaaggacgaggagcagcccgccggcgagtacgggtactccgagaccgaggtggtcaccgccaccggcgagggcgagtacgagaggtacaagaaggaggagaaggagcacaagcacaagcagcacctcggcgaggccggcgccatcgccgccggcgccttcgcactctacgagaagcacgaggcgaagaaggaccccgagcacgcgcacaggcacaagatcacggaggaggtcgctgccgcggcggccgtcggcgccggcggctacgtattccacgagcaccacgagaagaagaaggaccacaagga

SEQ ID NO: 322964 - DNA, 431 bp, Zea mays
ggactgagcatcgcacacgatcttcacgagcaggaagtatccaggatgctcacagggtggatgttttaagagtcagcatgtgggcatctcgcattaggatcaccattcacaaagcaggagcaccttaaggagtaaggaccaccattttatctggacctttccctctgaccgctttcttctcctgataattaaaaacgccataaggaatccccagctggttttctgagtctgggacaaggatgggctctatttcaacccccatccttgctgatatttccatgacaatttcatggttccaacatgatctttaggtgtttctagcatgtttccttgccgcatggtttgtagctgcatagcggcatggcatgcatgaagtagcgttctgtctctagggatccctaaaggcttgtaagaggagacgggttttatgc

SEQ ID NO: 322965 - DNA, 365 bp, Zea mays
gttggcttctcctccccctccggttcgggttcgggttcgtgaggttctccggggttgggttgcgtggttgagcggatcgagatggcggcgtctgatgttgagtaccgctgcttcgtcggcggcctcgcctgggccacggacgaccactccctccacaacgccttcagcacctactgcgaggtcctcgagtccaagatcatcctcgatcgggagactcagaggtcccgcggcttcggcttcgtcaccttctccacggaggaggcgatgcggaacgccatcgagggcatgaacggcaaggagctggacggacgcaacatcaccgtcaacgaggcccagtcccgctgctgccgtggaggcggcggctg

SEQ ID NO: 322966 - DNA, 417 bp, Zea mays
caatgcatcattttgtccactaagacagtgcatgccctcctgcatgttagctattgcagggtccgttgtgtccaaaccaaggaaaggagaggcaggttcctcacatctctcctgccatatctgctactccagaagctttcctccacctcctctctgcttcaagagttcaaggtagctggcgctgcacgctcctagcagcgagcttgcagccatggagcccaggaagtcgaattatctcgtcgccctcgtcttggcgtcgttcttgctctccgccgtcgcaggagggcataggaagaagctcgatgacgcatcagaatcaatggagacattggaatccatgcaggaagacgacgaaatggcggttgtggtccacaagagaattctcagccaggtgaagatgaacgactacgcgagata

SEQ ID NO: 322967 - DNA, 390 bp, Zea mays
gtacacaatgcatgattttgtccactaagacagctcattccctcctgcatgttatctattccagagtccgggtgtctccaaaccgagggaaggagaagcaagttcctcacatctctcctgccatatctgctacttcagaagctttccttcacctactctctgcttcaagaattcaaagtagctggctctgcactctcctagcaacgaacttgctgccatcgatcccatgaagtcgaactatctcgtcgacctcctcttggcatcactcttgctcttcctcgtcgcaggacggcatatgaagaatctcgatgacgcatcaaaatcaatggatacattggaatccatgcatgaagactaccaaatgacagatgttgtccacaagacaattct

SEQ ID NO: 322968 - DNA, 440 bp, Zea mays
cctgcgctggtctcgccatggccgccaaggtaaaccaatcgcctcagaactctcgctcgattcgcagagcttggggggcccggtggtttaatggctaacggagttcatcgctcactcggctcgtcgtgtcgtggcgcagaaggtggtgctgaagctggacctgcacgacaacagggacatgcagaaggtgctcaaggcagtctccactctccacggtactcctctcctctcccctgctctgctcccctccaccgtcactgtcatggaggccgcgcgcctgcaggagtaggaccctccgcgacctccctcaagtatattcgtagcgagtgagtccgtgtccgaattctggtctctgacgcggcggcaaccccacgcgcgtgcgcaggcatcgactccatcgcggtggacatgaaggagtccaagctgacggtagtcggtct

SEQ ID NO: 322969 - DNA, 227 bp, Zea mays
attgtcattaaaaatggcagtagtccaaggatatgggggagaaaactcgagatgtacatagagagcgtgggtgtgtagcatcggaaaagatcatttggtctgtaactacttatcgtaattggtcagtcagatcattttcttgtttgttgctgtctgattattcttacccaatggttaatccgttcattgtatcgaacataattcaagtaatctgtattacagaggtg

SEQ ID NO: 322970 - DNA, 352 bp, Zea mays
ggcttctcctccccctccggttcgggttcgggttcgtgaggttctccggggttcggtttcgtgggtgagcggatcgagatggcggcgtcggatgttgagtaccgctgcttcgtcggcggcctcgcctgggccacggacgaccactccctccacaacgccttcagcacctacggcgaggtcctcgagtccaagatcatcctcgatcgggagacgcagaggtcccgcggcttcggcttcgtcaccttctccacggaggaggcgatgcggaacgccatcgagggcatgaacggcaaggagctggacggccgcaacatcaccgtcaacgaggctccagtcccgcggcggccgtgga

SEQ ID NO: 322971 - DNA, 247 bp, Zea mays
caattccctcatcgaccgactcgtcctcaactgattccaaaccttactccttcactttatcgatccatagcttccattcatagattgcattcctatcttcttagaccattgcatctcccatatagttcatcatgccaagaacaataagaaattcactgacactgtttagctttaaattagtctgaataattatgatccacattaggacatacgcttcagccactctatcaagttgcctaacattcct

SEQ ID NO: 322972 - DNA, 300 bp, Zea mays
tcacgatcacgagggcttcccctactattgtgccttccatcactcgtccaccataacaccacatctcacagactgctggttgtcatgtcatgtcactctattcattttacagatccaacgatatgctcggcacgttcatcccccagctgtaaccctacacgtactttactcctgaatacaccaccccgtcatcaatgtttgcccggggagtcctactctgccaggaccaaggtacttacttacttggatccataaccagtcctttttcagttcaaacataatccgaatccttcaggctca

SEQ ID NO: 322973 - DNA, 281 bp, Zea mays
gcggtatcaacgcacatgctttgtgctttaatttactgagactagactcttgtactgggttcgagcaaaatattgccagtgtgtagtgttcgcatgaaattcgcaacctgatgtgtgcatttttctatccgttgcttcacagatcgtgttaattgttaggttcatgcttagaataaccctaattggtcaaaacatgcacacggcccttttccgatctgcgatgtcgccttctcagcattgtgttattttaagcatattgcactttgtcctatgtctaaaaa

SEQ ID NO: 322974 - DNA, 250 bp, Zea mays
gttctcaattactcatactgctataatcaaccttattacactgtactactcgatcttatttctaaatgtgctgtgctctgaactcactacatcacttcaaactcacactgtacctaatacattcgttctaatcacacctttcattaccttaatctatagccatatgttgcccaactaaatacactaccacctaatctctacattcaaacttaccttctctacactaatcagacgttttactcatccttaa

SEQ ID NO: 322975 - DNA, 454 bp, Zea mays
caattcgcgggccgaccgactcttactcttgctcctaacgtatcataagcttataatttaccttattggactgtactactaggtcgcgtctttgcatgtgctggcaactgaagtcagtaaagcactccatactaaccgattatcataaaagctacttcgtgcgaaactgatcattacgtggttataaggcttacaatttcccgaccaatactagtgccacccaatctctctaagtgagctcaccatggcttatggagcaaaatttttctccattcttaaccgcagaactgttcacacagcattacttctccggatcagtctggtgaacgtacacaaatgaccctaaagtacaaaaaggttcacacggtcacacgccataattagctgcctggcttgttatgcgccctttgtaaatatgtgtaagctttatgttcctcggccccccccccccact

SEQ ID NO: 322976 - DNA, 416 bp, Zea mays
aattcgggagtcgacccactcgtgcggttggcttctcctacccctccggttcagattcaagttcatgaggctctcctacgagctcaggtcttcttgaacgcatcgagatggcctcctcagatgctcagtacccttgcttcgtcacccaactctactgttccacgaaccaccacatctatccacaactacttcatcacctactccgacgtcctcgagtgcaaaatcatccttaatcgtgagactcacaagtcctcacgcttcagactttttacctactccaaaccggagaccattctaaacgccattcattgcatgaaccacaatgatcaacacagacgcatcatcatcgtccacaaagcccaacacaccgtcagacgccataactacctccctggctagtactgcgcccttcgtaa

SEQ ID NO: 322977 - DNA, 390 bp, Zea mays
gttggcttctcctccccctccggttcgggttcgggttcgtgaggttctccggggtggggttgcgtgggtgagcggatcgagatggcggcgtcggatgttgagtaccgctgcttcgtcggcggcctcgcctgggccacggacgaccactccctccacaacgccttcagcacctacggcgaggtcctcgagtccaagatcatcctcgatcgggagacgcagaggtcccgcggcttcggcttcgtcaccttctccacggaggaggcgatgcggaacgccatcgagggcatgaacggcaaggagctggacggccgcaacatcaccgtcaacgaggcccagtcccgcggcggccgtggaggcggcggcggcggcgggtacggtggtggccgtgga

SEQ ID NO: 322978 - DNA, 145 bp, Zea mays
aatgaaaacatcaaagcgcctgtcaataacactcatgacccatgtcgccttcaaggcgctgaccatcaaccccttcggcgagctcttcagcgaccgcttcaccgacatcgatctgatcaccatcatcgaccgcaaggccatgttc

SEQ ID NO: 322979 - DNA, 262 bp, Zea mays
gcaccacagtcaacaccatggccatgtctacccttagtcacgccgaccaatagcagcaggacgggcggtcttagaccatgagcaacgtctacgacaacatctaggcgccctactacaacaccgtcaactacgtcagcaacaaggtcctgatcatgaaccccctgctcgaccgtctcacgctccgcctgaccctcaacgacctcatgcgctacctgctccgccacagcctgctcacctactctgatgacgcacacagcaacag

SEQ ID NO: 322980 - DNA, 438 bp, Zea mays
  unsure (1)..(438): unsure at all n locations
aaaatgcagcagagaagggaatgcaagccagtgacctacttctagcaaaagcctggttccagagcactcaaccaatgactagaagtcgttcgtcagagttaaggaggaggtatgctgcgatgcaaactaatatggcaccaataacaataggaagcattgaaacacctaaccaattaaaacaagattttacaaacacaacaaacatcacaccaatgagcaacacacttgttcatacaccaaagtttgtatctccttcaagttcatcaacatcccctctggataatccacatgtggcagcacaagatactgttacctcagtggtgagcatgctcaaggacacacttgagcgcaagaagcttggtagccatgctaacaaagacacctnagcaagcaattcttttggattctatgacactcagcagtttcaacaaaacattc

SEQ ID NO: 322981 - DNA, 251 bp, Zea mays
aactgacatctccccgcatccaataagcttgtctcatctcagctcagttggttcctacattgtgagtggatgactgactgtggggctatgctgatggggttccacatgaggtactcggagacgcccaagctgctgatggaccttctcttcctcctcaaccacctgcgcaaggctctgctccttggctgctcatcctctcgtacgcctccgacgcctactccgacactgactctcactacactggtcatcct

SEQ ID NO: 322982 - DNA, 345 bp, Zea mays
acgcaaaagcaagagagaacggaatgcaagccaattacctacttttatcaaaaacctgggttcacgtcacttattcttatgactataaggcgttcgtcacaactaaagaagaagtatgctgcgatgcaaactaatatggcaccaataacaatacgaaacattgaaacacctaaccaattaaaacaagattttacaaacacaacaaacatcacaccaatgagcaacacaacttttcatacacccaaatttggatcttcttcaaattcatcaacataccctctggataaatcacatagtgcaacacaagatactgttaccccaaaggtgaacatgctcaaagacaca

SEQ ID NO: 322983 - DNA, 337 bp, Zea mays
tacgtttatttaatctgcccttctctataatgcccgtgggcttctaaacacaggcggcgagcttaaattttacatcatacgcatctgctcactaacatgaaatgacacatgaaaagccacaacacgtgcgcaaccctagccaaagattgcatacagacaccattcatacatgcactcacaccaatgactacatcacatgcccataaattattgccccataaagctcataaagatattctcacatcctactaaagacgtcttatcccataacacccccatcatatcgcacatgacaattgaccctcacaccgaaagcatgccatacaccttaagatct

SEQ ID NO: 322984 - DNA, 230 bp, Zea mays
  unsure (1)..(230): unsure at all n locations
agagaatggaaaaagggaaggtgcctgctttccgtcgttcccgattccatggcttgtaaaatctcaaattccctgttcctttgcttgggttctaatcaaagggccattangagccaaaccattgctattcattcttctaccgcgaggatccgtcatttgaattgggaccatcttcttggtaagggaattaacccttagaagggtataattcccttaagaaggataaagtc

SEQ ID NO: 322985 - DNA, 458 bp, Zea mays
gaaaagagcaatagatgttatctcagttgatcgcagacagaagagcatctcagcttcgtacatggcatttcttgagagtgaacacatgacagccatcccatgccgctttacgctgcacccgtgcaaagttggccatctggctggtgcaagctctagtggtaaggtgtttctctggaccagagcttgaagcaggctgatcatcgactgactgggatgtcctcggcctgttgctggccctgtcctgcccaagttcctgaccacggagatcctcatctcgcggttctgtactaatgatcgttagcattatcctgcttttaatgtataagggctagtttgagaactctattttttcaagggatttctgtttttttaatagaaaatgaactaatttctattggaaaaataaaaaaatcccttaaaaaaatgaggtggctaaactagccctaatagtttgcact

SEQ ID NO: 322986 - DNA, 387 bp, Zea mays
ttctctcatcttcacttgccttccctttaaagcttgtgggaatttgggtaaattttacagggtaaataatgacaagctttatatcgactcactgttgtaattggtcggttggagtgtcggaacacgtttgcagcagcaggggaagatttcataagcctccaggactcagatgttgtggtccatattttcatctcggtgggtttagtttttcccggggtcaggctcaatgctttgctgctacttcctctcaaagtcgtgggagatgtggtcctatcttttccggcgccgtcgatgatggtggcgctgactcgggtgatgctgaggatggggatggacagaaagaatcttcacaaagcgaaaaccaaggaacaaacggcgatatacttc

SEQ ID NO: 322987 - DNA, 387 bp, Zea mays
tttttcttcttgcccttttctctgtttctttcttcagacgatcttcaatctctgcaaacattttaggcaatgaagcccggagtgtcttcattgaacccatatgcagcatcatacatacctcttgccaaaagggaggccagtgataatgtgacagccaaagatattaaacacggcaatgagaatgcttggttcaaaccttcctcacactttgcatataacccgcacagtagcaatgcttttcttggctcttcagcctatggtactgaaaagcaccaggttgcagaaggttctgcagtgaaaagccatcctgctcatggttctttgatgcaaaatcctggtgaaatgactgacaagcagattgtggatgaagaatttgacatggatttt

SEQ ID NO: 322988 - DNA, 370 bp, Zea mays
ctcagaggtgggttggcttctcctcccccaccggttcgtgttcaggttctggttcgtgggcgagagggaagagatggcggcgtcggacgttgagtaccgttgcttcgttggcggcctcgcctgggccaccgacgaccactccctcaacaacgccttcagcacctacggcgaggtcctcgagtcgaagatcatcctggatcgggagacgcagaggtcccgcggcttcggcttcgtcaccttctccacggaggacgcgatgcgcagcgccatcgagggcatgaacggcaaggagctcgacggccgcaacatcaccgttaacgaggcccagtcccgcggcggccgtggaagcggcggtggcggatacggtggc

SEQ ID NO: 322989 - DNA, 174 bp, Zea mays
tcttactgcaatatcccccgttgctcctcctatcatctttctccgcttcctacttactatcctaggtaggcttcccacaatcaatcggtggcccacatactacacccaatcaaatcatccacctactccatttccatccccttccccacactaactctcgtaacctcctaccca

SEQ ID NO: 322990 - DNA, 389 bp, Zea mays
caaaattcagagaaatgggacctctcaactcccagagcgccatttcaaacccttgtttcatcaatctggttctcatggccattccatctctagtcaccgttgaacatatctagaaacacaacccaccagctttgagacaggcgaaggcttctgcatcaaaggccgagccaaccatcacgtgcagacgagacttggagaccaaaacttcccctttcacatttcgtaccacaatccccgaagcctacttaaaaccctggcagtcaaacggggcatcaaaattgattttaaggagcttgcctaaggtgttttccaattctcattctcaccaacaaaggtttttattcctgtttaaccaaaacgatcacaagccacaaccagaaaaaggtctt

SEQ ID NO: 322991 - DNA, 282 bp, Zea mays
tagctcggggcctatagaagtgttgcaggaacccgggcagtgctacttgatatctgtgcttgattttaaagtggcaatggagctaaatccgcggcagctgggtgaagattggccagtactactcgagaaaatttgtatgcattcttttgaatagtgaatgccctgcaaaattttggttatcctgaagctgtgattagatgtattcattctggttcaatggtcttgaccaatattgatcagtgaaggtcccaggtcttttccatcactgacacttaccaaatg

SEQ ID NO: 322992 - DNA, 287 bp, Zea mays
taattatcctttcgacccactcttacacttagtctaaaaccctatctacatcctaaacttactcactatgccaactccttctatgagagaatgtttaaaactcacagtgagacacacctcatatctactctaatcaatcataatctcaactataatcccaaaatatctccattaatcaaacattctttaccaacctctattaacatacatctatctttaaccaatctcctatcacacactaaaccacactttcacaaatataaatccattctccatactactatcac

SEQ ID NO: 322993 - DNA, 306 bp, Zea mays
tctttctcttatgttcctacaatacttccctcattattatccatgcccacttatacaacttctggcagggtacttctccatgccaggccatcatttacatccaatactaaatacctccatgcagatactgactatactactatcactatgatctgagctatattagttcttctacctttcttcaaccctctctttgatgaactcatcctcctacaagccatcatataaccactaccattcattactggtgtgtctgctatcctactttatcttcacctgaatgactatcctctcaatgaatttata

SEQ ID NO: 322994 - DNA, 276 bp, Zea mays
cccactcttactcatcactactaacacatcctactatacttttttctcactcacaccttcccacactcaagactgattctatccaaaatccggcaaccaacctacctcatactaccaacccacctaatacccaattcatcacatctatccaacaatcctcacctaacacacattaaatctaataattccaccatctctctctcaactactcacacaactatctaccacaatcataattccataccacaaacacctcaaaatacacttacttccata

SEQ ID NO: 322995 - DNA, 407 bp, Zea mays
ggccatctcacagaccgacaacgccctaggcaagcagcaagcgcacacgtaaacgtacaccgacctcggcgagcaaaagggaaaacgctgatcggagcaacgaagcccgcagccatgccgacggcgacggccacggccacggcagctcctcgccacgcggcgctcttcctgcccctgctgctgctcctgctcggcctccacgccacgtccgccgccgccgcgcgcgcgggcgtcgccgtggacgccgagctcacgtccaccaagccgtccccggtcccgaagaagcccagcgtgaagccgcccggccccggcgccgcgagcccgaccttcccgggcttcggcatccccgggatgggcggcggcgggtggggcggcggctacggcgggcccggcggcgggtacgcccg

SEQ ID NO: 322996 - DNA, 378 bp, Zea mays
gctggactctgttttctaaacaacattctccccgaagaattgaattggaaaatttcccttggcttcaaatttttcagtgttttcgtgatgggttttgtatattatatcacagttttcattttaattgaagattgggttggtttgcagacctcagctgggtctttaaattccatgatcttcaccaccttggtttgtctttgtgtcttgtctttcctcgttggtgtccttactgacccaagccgtgttccttcttcttatatccctgatgttgaagatacttcttttgcctcaaatcaagaacccaagaaaaatcttgcgtgtggattaatgatgcttgcattatcagtaacacttgggactctcttaggttggcatatc

SEQ ID NO: 322997 - DNA, 362 bp, Zea mays
aagcagcttgccttaaccacatttccagagaatcctggggcgattatacgccttgctaatttctacaaagaggtaatttctttagaaaatttctttaattctcttttgttttaaaggtttttagctgtttttatacgttaaaaaacgatcgagcatttatgtttttgctttagatctttgggttcgaggagattgagagcccagatttcggggagttcaaggtaatatggttgaatcttccgggatcttttcccatgcatttaattgaaaggaacccactcacgaaactttccgaaggtccgtacagttccacggcggccgttgctgaccctagtaatctttctagaagtcatcatatttgc

SEQ ID NO: 322998 - DNA, 439 bp, Zea mays
catgactaaaaaaacacacatcaatacgttaagtatttggttgataaaaatacttttatgggattttatgttgtttgataatagtcaccccactagattaaatttatttgatgcatgctctatgagtgtcttcatgattaaagcatgtgcccggcattggtgtagtgaggtttgggctaataatcatgttctcgctgctagcgggccaccactagttctcttgttaatgctcatttatttaatgaatgtagatacatgagtttagaatttgtcaacccttgactgataagtgttgttagtattgtttgtcatgaatttggtttgtttggtcaaagtggtgacgtggagcataggtttgaggtataaatgatgtgaagaatatgaattataggcagggtgtgatttgattaaaaatactctatctgctaagtcataaaat

SEQ ID NO: 322999 - DNA, 399 bp, Zea mays
ctatgcaaaggttgttgtttgtttagcaaattggatgccgagtgatttgtgacctgtgccggatgtttttaagataacaatgttcttcgctcggtggttcactgctgcttgtgtctatgaaaaaaaaaaaaaaaaaaaaaaaaaaaaaaaaaaaaaaaaaaaaaaaaaaaaaaaaaaaaaaaaaaaaaaaaaaaaaaaaaaaaaaaaaaaaaaaaaaaaaaaaaaaaaaaaaaaaaaaaaaaaaaaaaaggggcgccccttttaaggtaccaagcttaacttccccgtctttcaaaagtaatacctttttaaaggggacccaaaattaaattcaactgcccttgttttaaaaacttcttaccgggaaaacccttgcttttcccaaattaaatccctttg

SEQ ID NO: 323000 - DNA, 234 bp, Zea mays
gcaatctctatgctgtgcagcatcgcttgggatctaggatgatttatccaaaatctgtaaagttcctgtgttcgtatggattggcactctctaaatcagtacctctaaaaagaagatatgctgatgctcaacttgatgagcgttgcgcaccaggtttcaccatgatggcattgcctgttaaaaagttgttgaagcttttataccctagcttgattccaattgatgagtatcttt

SEQ ID NO: 323001 - DNA, 305 bp, Zea mays
aggaaaatctactataatagtcatgccctctttttcacatcttccaatccttcacaagcatagttcatcccacatgtcaggcatcatatctagcttacctagtcatcgttaccacccttaatccacattcaattccatattttactcttattattgctacattatacattctaatattatactgttattaagctttactccatatacacatctctcacacactatatctccctattcatatcctgtcaaccaacacaaacacacacattgattatcgtctatcatacttccaccaacaaaataca

SEQ ID NO: 323002 - DNA, 222 bp, Zea mays
gccgtgagacaggtctgcacgtccgaggcctccaccgatgcgctggccgacaactccgtcagcaagcacaggcagctggagtcggaatgctatctgcaactaattgacagcgcgtgtagtgcgctgctccccgggccggaaccttgcatgatcggaagcttgccatccgggcacacagcccagaccaacggcatccaggaagacgttacatagagctcggta

SEQ ID NO: 323003 - DNA, 440 bp, Zea mays
tttgatctagcttccacaggatgaagccctacttacagattggaagcagcagttggaagcggctcgcacggcaggtggatctcagcgctaggcaggtggaagcgtggttccagaacacacatgttcagataacacacatgttcatgctcatgctgaccccacacagaatgaatacttcttcaggtacagggatgaccggaatgcagcagaattttttagagctaatggtgatataaatggacttaaatcacactgtaatagtcagttaatatgcatgccactactttgttaaagcgaagatgcatgccacttcttctagagcaagtgaatgggggtatgagttggatgttttaggtctctgtttgatgtgggatggagaccatcagaagagatttgatcaccatcgaggtatggaggggaagcagtaggagttcccgggg

SEQ ID NO: 323004 - DNA, 385 bp, Zea mays
atctaacttcttgtgatagctttggataagaacttagaggatatgaattactacgtatagcttgctaggaagcctttacttgaccaggtacttgtggaacctttggaattagagtatagatatgcttcattgaaggtttttggtgcaatcaatggtttaactttattcaagatatcttctaatttggtctattgatttaagattgttttgtgattttttgatcctgtaaagtcctcatttctgggtttgacaaagttttctaggaagagatagatgtacttaagtttggttccaataagtgttactttatatagataattcatttctgttccctatgttaccatctaagacatacaaaattgattacgtacatgcttctcgggct

SEQ ID NO: 323005 - DNA, 395 bp, Zea mays
gattccatgaagtgatcatctgaaatgaactatgaggctgggagctgaaaattgtagcttcgcttgattcgctccacaagcagaatccttttgcatagaatttcaccaacataatcgcttctcttagagaatcacttctcagtcctcacagatccaggagtgcaggaggagctctagcgctctaccaaacaggcctaacaagagaacggaagttatgggagtagtgttgcctacttgtcttgctctctttatttaatttctccaacacttcttgatcactgtgtggcaggaggtagcaagagcaggctagattattgaactgcgactgatctggactgtaactcgctccacattttctaccgagctctgtgctctgcagctcgcacgcctttgat

SEQ ID NO: 323006 - DNA, 227 bp, Zea mays
aaaaccatctgctggtacgtacaagacgtcattcaaggatgcttgattgcttgactagctggacactgaagcaaacgtgatgcaccattgatattaactcgtgaaaatttgagaccgccatctactactgcactggaattgactctcctactcaacgtgactctaccatgaacatgcttaccactaccttgcattataactctactgtcataataactggttccatc

SEQ ID NO: 323007 - DNA, 333 bp, Zea mays
tcttcctgaccaatctaatctaaaacctccccttttattttcctttaacatagacacatactcgggacgagttacttaacactcagagcagaactcacaactcaaagcattccatgtacatacaaaacctactataaattacaatatacattaacatacttcacaatcacattctcaatcctaatgaagcaaactaataacaaatcacacacaatgatctattaccacaacaactcaaacctacttccacaccttcactcttttgatcaccacttttacactctactacactaattactctaacattctccacacatactcattaatcacttc

SEQ ID NO: 323008 - DNA, 361 bp, Zea mays
acggatctatccatgctttgaacctaatgtcaatttcacttaattgtcttgtgctattggggcagagatttatagaagctggggtatgaccaaatacaatattcattcgaattgcacacatatcgctgcgtctagttcagactctacgcaaggcgtacctggctcaaacagaagctttcaggatccatgcattgacatctgtcactctatgctcgatagttgatagactatcagcttactcttaaacatgttcgatggcatttaccattatttaccagtcgctcgacgatctctcgtacattgcctagagctactcacccaacgattccacaatcatctaggtctctactcttgcatgctg

SEQ ID NO: 323009 - DNA, 348 bp, Zea mays
gatctatccattctttaaacctaatttcactctcagataatcgtctccctctacggggtcagaatgacacagaagctgggtcataaccacatagactattcaatcaaattgcacacatatccctatcactattacattctctactcaagattcgcatctctcaaacacaagaattcatgatccatgcattgatatctttccatcaatgctccatatttcatccaatataacctaactctccaacatacactatctcatttaccattaccttccagtttctcgatcatctctcctacattagctagagctactcattcaacgatttcataatcatataagtatctctct

SEQ ID NO: 323010 - DNA, 375 bp, Zea mays
tcctcttcactcagctcattctcgtccatccttttctgtataattttctttgatctgtgggggttgcatccatgggacgccctcatcttcctgcactacagctggcctcctgtgcttactacgtcaatcattccctccatgagaaactccttctctcctacatcgccttagctatctacttcacaccagaagccattccgttccactaaccaatccatgactcttagtgcccaaactcggcgtcctatgtccccatatggatgagtcatgttcttggatccctgacatcacacatattaacacaaaccggccatccaaaatctggacatgcaagcttgcatagacatgtcttgaacagtcagatctgcaaacaac

SEQ ID NO: 323011 - DNA, 238 bp, Zea mays
aaaaaaaaaaaaaaaaaacaaaaaaaaaaaataaaataaaaaaaaaacaaaaaaaaaaaactggataaatttaaaaaaaaaactattcaaataccaaatataactaaaaaaatataataatatactattaataaaaccccctaatcactttcttattaaaaaaaatctccaccttttcatcatccacttttaactcacccttcctttccccaaataaccctttactaccggtccccaa

SEQ ID NO: 323012 - DNA, 244 bp, Zea mays
cgacaacgcggacaactgactgtcgctctgctgccgcgtcgactcaagcgtcgcatgatccgtatgcacgtacagggaccgaacagacactgcgagagtgagcatacttgtataccaagccgtgccagactactcctggctacaagcgttcaagtgcaacaactgcatgagaaccacagctatccaccgctacctacacagaaatggactacagctacaacatcacgaacatatgccagacagt

SEQ ID NO: 323013 - DNA, 397 bp, Zea mays
gcgtacgcaggatcgtctgcgacaacacgctggacgccaggctcagcgtctccttcaggcaaaagctgcctgagatcaggaagaaactcttcagctaccaagtatcctaatatcttttaattttttgctattattatattctctgatcgattgctttctgaaataaatcggaagcggttcgtcataacttggaactcggttgtctctgccaaaataatgcttaacaactggtcgtcgagtgatctgcttgctcctctctttttttccttggaggcatagtaaatctcctttgtcaagtgtactagcatgtagcacaaaaatgttctcttgtagacgaattttgaagctcatcgaaggctcgcgagcaggcaaaaaaaaaaaaaaagggcggccgttt

SEQ ID NO: 323014 - DNA, 402 bp, Zea mays
aacgcccgtgccgtaaaaaagggaatccatagcacagagccagacctggcggacctggacgtgcaaaaacgccgtcaaggatccttctctctctctctctctctctcttcacgtccatcaacctgaccgcaaacacgcgtgctatctcttcccgctctccactgcacagacatgaagatcgaacgaaacttgcatgttcgatatacccagctgctatatgtaacgaaaaactcgtgatcattgtgttgaattgcacactgtcatggagggatctacttgtcagatcccggtattaaagctgatggccttccattgcatggtatctgaagaataaatgggacaagcacactcgaatcaattgtgccattgccagacatatgctagcaagtatgcactactcag

SEQ ID NO: 323015 - DNA, 398 bp, Zea mays
acctcgtcggcaatgtcgggacctccaaacactaccaccgtgaaacctgcgccccggaagttctctccacatggcaggtcgcacttcctctcaagtctaccatatccctccatctacagctcacgacaaaacgtccacctaaacaatcttacctatagtgaaaatccaatcatctacatgacgatccacggatatatactctactgtgcactaaccagtgtgcctaagagacattagctcatcctgagcatttacctgtctatagccactcggattagccatcgccacagctttgcttgcatttagtaatcttaccaatggctatgcaaactgcttatgcgtactctacagcctgcttccagccttaaccctcttcctggccttcgatccgactttta

SEQ ID NO: 323016 - DNA, 448 bp, Zea mays
gtgaaagctgcagtcggacgtttgaatgggagcagattcagagagaccgcaccgaaagcaactggagggacttctaggagccagttcaaatagaaccagtgccgttggctctctaaatgctgtggtgaaaggaaaacaacccctgatcagagcatttccgtttctgagcatcgttgaagatagttggcattgggcccccggaggacctcgaggggctgcagaggttcctttgcttcagagcccctctgtacctattcatcaacgtggaccctggaggaccgttactgcctgctagtagcagctcgttattttgagctcatcttttgtgctgctcgtcagctcgtgttcaaaccaagcctactgctcatttgctttccctgcagcagcagcagcccctactgttgcatcgaagaaagcaatctcattagcgactgcgttgaactgtagt

SEQ ID NO: 323017 - DNA, 139 bp, Zea mays
atcatacatgacaactccgctcacttcgacgtcactaacaattctgcagcctaaatggctaatgttacgcgccctacagctgtgcattacctctcgcgtatgacaagtttacccacagctatacctgctacactgtgca

SEQ ID NO: 323018 - DNA, 394 bp, Zea mays
gtgagctgaagccgggtgagccacttttttttggctcatgccctctagttcattttggaaaagcacgtcactggtgaagccatttgaaaaagaggtgtttggcacaacttttgcatgagccagagccgaagctgaaaaataagccctaccaaagggccctaaatgattaaagcttaaactcacattatcatgcaagcttttctttcttgtctactgaacatgcatgcatgcatgcatggacggaataagcagtagataaaagaaatgcacaaccagtctgttctgttgaattgaattgaatgttcactactacgactaagcaaagaaaacctgcagtcgtcttcagctactaaccagcggcggcgggtccaaggcatgggctggcaagttcaag

SEQ ID NO: 323019 - DNA, 308 bp, Zea mays
cttagctcgagcttcttcaccgactaggccttgtctcattgcgaatagactactactcagagggggagccgttgtgaccggcccgaggagaaacctctgttcgcggagactggcatgacccacagcataagctgaaaaaaaatctttaccaacatgacttacatcattaaagcttagactaacattatcatgcaagcttctgttgatcgtctactgcacatgcatgcatgcatgcatcgacggcataagcatgatatcatagaactgcacaaccattctgatctgatgaattgaattgaaaagttact

SEQ ID NO: 323020 - DNA, 281 bp, Zea mays
atcattccattcctcatcatcactttgctcttcaatctaccaattcaatccaattgaaccgtctatatctataccctgtatgcctaactacaacctagtcacaccttccgcttaccataatcctactatatcaccactcatctgccctcataatcctaacacttagactcctcattccaacatatttcccagatcgctttctctctccagatcactcacataatttcccacacttatcctaatcccccatctagagaaccgtagactacccatgtttcacc

SEQ ID NO: 323021 - DNA, 441 bp, Zea mays
gttggcttctcctcccccaccggttcgtgttcaggttctggttcgtgggcgagagggaagagatggcggcgtcggacgttgagtaccgttgcttcgttggcggcctcgcctgggccaccgacgaccactccctcaacaacgccttcagcacctacggcgaggtcctcgagtcgaagatcatcctggatcgggagacgcagaggtcccgcggcttcggcttcgtcaccttctccacggaggacgcgatgcgcagcgccatcgagggcatgaacggcaaggagctcgacggccgcaacatcaccgttaacgaggcccagtcccgcggcggccgtggaggcggcggtggcggatacggtggcgggcgccgtgatggaggcggctaccgcggtggcggtggaagcttacggcgtggtcgtggaagcctaccgcggcgtgggggat

SEQ ID NO: 323022 - DNA, 399 bp, Zea mays
aaagagacttgtttcaactttttactccaaaacatttagttttgctctgcttaaggtaagtgtagtgagtatcttcgatattactttaactaccatttatgtttgtccttttgaaaatgtattaaccattaattttgctgagatagagctagatactcatgtacctctatgtttgtccttgtgatctcttgaaacttgctcttaattaagacctttaggccttgtagaattgtagtcttaatttatatgatgggtgacagagaagtagctttttctgaaatgggataattggataaactttttagtataattttgtggagtgttattggtgctgaaaaagatcgaggaagatagatttgtacttgttagtgtccaggggatttgcagaggaagcatttt

SEQ ID NO: 323023 - DNA, 328 bp, Zea mays
aatttccattcgacccacgcctacgcatgagactcgatctaactatctactccatatcactttcacttactttgctaatagcaaccgtcctagttattcttcctattactttacctccacaaatgcttatcttctaaaactctcaactcattaattttactcatatacaactatatacttatgtacctctaacttaactcttatcatatcttaccactctctcttaattaatacctttaatccttctcaaattaaattcctaatatatatcctcagaaacataaatatacctttttcttaaatcgcatttctagataaaccttttata

SEQ ID NO: 323024 - DNA, 421 bp, Zea mays
  unsure (1)..(421): unsure at all n locations
cggaanttcccgggntcggacccacgccccgtccggggaaaggaagccggagaatgaagggcgggaaggcagtcacgccggtgcggcgtagggcccagcgttttgagtgaaaagccgtatnnatagatatatcagtatatanntatatatanntcggcacgaaacatacatannctgttcataanntagtttgaaagtgcctttaaaggtcaacaaggggcatgtgtgtacaagtaagggnnttggcgtccctagggggttagtttgggtgaacccataaaaatggaggggaatctnnataaaggagagatcccgttngttaattcaaaaattaaaataaccaagaaggatcccctctttccataagattcccctcttccatttttctttgtcccacncaaaaccaaccccnntgagtttc

SEQ ID NO: 323025 - DNA, 295 bp, Zea mays
cctggatttactttgacggctcgcacagtcgcagctggtcattcctgggaggaactgcagaaggaccttgatggcttgctatctacatggaaaggaataactgagcatgctcaatctgctgccttggctgctgatgagggtgtggaaggtgctgttcctgtaatgttgcacagagcgaagggtcatactttatctgttgttcaagacgattttaatgaataggtcaagaggctggttgtggattctactggaacatatcatgaggttacaagctatcttgaagaagtcgcacctg

SEQ ID NO: 323026 - DNA, 427 bp, Zea mays
  unsure (1)..(427): unsure at all n locations
gcaggcgtgaagctgatatcagaaataagtacagcgcttgtatcgttaatgaaatctcctggaatggagggaaattatgttcatttacaaaattcataattccagtttcctaacccgttgctactgaaggttaaaattttaagctactatcttataccatattgtagatcgttgatacatttatgcggagcattgcagtagcttcaacatcagaatgttgcaaaaaaacaatcccattttcttttatcttgagatgttctgtaactgagctgattgttcatgcatgatgattgctccacctctgtcaaaccttgaaggtttaatgtcattagacgactttgacgatgctgaaggcggctccaagctggaacgattctcacgggagacgnctgatccatcattgtcatggaaagacgtggagtggctc

SEQ ID NO: 323027 - DNA, 443 bp, Zea mays
ctccacgcacgtcctcgacgagtaccctgcccttcccaaccgaactcggcacaatggtggacgtgttgagcgccttcggcttcggcaacctgtgtctggccttcaccttcctccatatctccaccttcccggacccgcagctcgctgcggacagcaccgctgaagccccactgctccacgtcgcggccgaggttctgccgtcattagcttctgcggcggtcctcttcctcgccgccgtccccgtggccggcgcgggcaacgggcggcggcggcgctcgatctcggggcttctcatcttcgtgctatgcgtcttcgacggcacgctcgagctcatcgtgttcgggaaggccgccgttggtggtactgcggaggctcgcgcgctcggcctgcctgatctcccagcgttgcctgccgcggcgacggccacgttctttttcgggatg

SEQ ID NO: 323028 - DNA, 182 bp, Zea mays
cacactctttcgtcatctcttctcccactaataacttcctttcattcaccaaatcacctattacagatctgttcacattcctcgctgagccattccacaatgacccattctctcactctcttctatatcacacttatcctaatgaacttcccgacacataagtcatctatcacatctaccac

SEQ ID NO: 323029 - DNA, 311 bp, Zea mays
acgcccacgcgtacgcccacgcgtacgcatagaagtgctcatgtccaaaatagatgctttaacggctggactctatgatgaaatggcgctgccatcacgacgacttacttaaatactgagatctttaggacacaatgtaaatttctgaaatcactaggagttcaatgcttatggatagacacccagacaccatgtctaagcaagataaagagatatgttctgcaatagaaaaactttcagactgtcaggaaaccatattgattcttatccgtcagatgacttctatacctgctccaattcaattactcggc

SEQ ID NO: 323030 - DNA, 246 bp, Zea mays
acgcactgatgtctatggagttctcaattggatgttcaaatcatctgaaccacaagctttggttcaattgcattcaactctgtggtgaatacacagaatggtaatacaagaacatatccactcgctctctctaaaagacttcgtctagaagcacaaagggatctgtaagatcgtgctcaggtcatttcacattggacaggcatcatgctgagatctcgtcatgttagagaatgtgaaagtcacatc

SEQ ID NO: 323031 - DNA, 350 bp, Zea mays
cacacacacacagacaagtggtttccaaagccaagtgtgtgtactagcaaccagctagctcgggcggcagcaggcagccatcatgtcggaggagaagcaccaccacttcttcaaccaccacaagaaggacgaggagcagcccgccggcgagtacgggtactccgagaccgaggtggtcaccgccaccggcgagggcgagtacgagaggtacaagaaggaggagaaggagcacaagcacaagcagcacctcggcgaggccggcgccatcgccgccggcgccttcgcactctacgagaagcacgaggcgaagaaggaccccgagcacgcgcacaagcacaagatcacggaag

SEQ ID NO: 323032 - DNA, 167 bp, Zea mays
acgcactgacatcgtggccaggtcaaccaagctgatcgctactcgcactcgcaattgtggccttgccagcatgcaactgtaactcagcccatgcatcatactcctaatcttgacaagtacctagcaaggaggtcctaaggcaaggcaatgacaggccatggcgctat

SEQ ID NO: 323033 - DNA, 223 bp, Zea mays
tccctgttctaccctctcttcctcttactctttttctacccacacatcttcattttcgttcactgactcttatccagtagcatagttagctttaatgggcagactgagaactcctttaccattctattcctaactacttatatctctacataatcaactacaacatactcattctttaaacactttcacaaattatactcaataatattaactacatatacta

SEQ ID NO: 323034 - DNA, 435 bp, Zea mays
  unsure (1)..(435): unsure at all n locations
gcagcctccatgtcttcttctccatcgcgcagcatgcatcccacggcagcagcagcagggagccgtgctcctctccatggcgcccaggcctgctccctcccctgctccatgggcgcgagctcctcccctcggccagccatggtgccccctgctccttcttcctccagcaacaagaagccagcgcccctccatttttcgccagcgtttccctctgctgtccgtgatgtgggcaagctctgatccatggcgccctnctccccttcttcttcctcaagccagcaggcgtctccctctactccctgtgcgcagcagccccctcccttccagacgcccctgctcttcctccttggcgcccagaaattacagcagcagctcggcccctttcctcctgcgcccagcttttctctccactgcgcagcagcaccccttcccatg

SEQ ID NO: 323035 - DNA, 162 bp, Zea mays
acaaaccaaacttttattttacctaactgcaccatcacaaaaggacagtttcattttcatccttacactggccatcttatccccaattcctactccaataaataacaacctctccaacttttaacacctacacaagctaactacatttcccctttcttttac

SEQ ID NO: 323036 - DNA, 287 bp, Zea mays
caattcccgtttcgaccgactcgtactttcaattctcaccatccatatccctttatatcgcatcatccatctaatacaatatcaaacgtgcagtgcactattgaagctgtgttaataatacactcttctcacatcctaaacctcacccctaaccatttctcattaccaatcactactaaatatcactatctgataaagacttataatcacattattatacaaacatttcattcttctcttcttaacatgcatgcatacatgccactactctatactaccatttatat

SEQ ID NO: 323037 - DNA, 436 bp, Zea mays
cgggcttgggtcggcacggctcaacgaagtcacgacgtggtttagggctaggctggaccattgtttttacactttaggctggcacgacacaacttaaatttttttgagctttcctggcccgaacacgaagcacgatgggctttggccgggcctaatcacgacagcgtctgatggctgcgtcacggtcaccctaccaaacttgttaaactttgtcagtgcagcacggctgcaaactgaccagcgccggcctacgtactacgcacaagttacaagtaccatcatgatgcttgacttaaatcatactgctacatacagtgatatatacaggattgacggactggatggacgctgctggtgcaggactgccacgtgcacgcgatcgcgcgggactacggggcgctgacggcgcataaccggcagagcatgctggaggaca

SEQ ID NO: 323038 - DNA, 232 bp, Zea mays
gcggtgagctgtgagcaatttgaacggcgatgagcttgaggttcatgatccgtgtgggcgcgcttgtggcgctggagagcacggccaggtaggtcaaggacaatgcgcatgcgctggcgcagtcagcgtccatgacgaggagcggccgcagctggtcaccagacgccgtgacggttgagtcacggtgagcgtgcgccgccgctgcagctgtggcagtcaagatgaaggcgga

SEQ ID NO: 323039 - DNA, 380 bp, Zea mays
gttgggttggagagttggcaaatacaggatctgaaatgaactgcaagctatcagggcagagggacatgtcccgaatcgagacattgtatcatgctgacaaggagaagactgaagcacttatcctggagctggtcgtgtggcttcatcatcttatcagtaaatcaagacacgccagtggaggtgtaaggtctcccatcaaatctccagtcagctcaccaacacaaaatggcgctgcaatcacactgttgccgggcaaaacgaaaatttcaccaccgattctcacccaagaggatcaggatatgctaatggatgtcaagtacaggaaaattgtccccaggataagcaaaagtcaggagtttgacacaaagtcaagtcacagc

SEQ ID NO: 323040 - DNA, 207 bp, Zea mays
ccgttcgaccgactcgtactcttcaatcctcgttaaacactcttccactctaaccttaatgctgctcctcttcatctacgcggactgagtcatttccatcttactttagctaccatccatcctcgaacttatgaaaatcaataacccattcattatcctcagctacagctacatactcctgcacctctataccatccctactgacct

SEQ ID NO: 323041 - DNA, 443 bp, Zea mays
caggctacatagagggagcggcggccgaaagtggtggaggcagagtggtcggcggtggcgggggccctgcagccagagtgacaagcgacactgtgacgaccgaacaaaggcgcgggcgggccgggggcaccggcgtgggcgtggggtcgccggacgaggcggaggcggcatcggtgtggtcaccagacagatggaggcgcacgagggggagaaatgaaacagaggtggttagaaaggaaagtcgagatatgggtaaagtcgtttttttggacgtacgtgttattttcgacgggctaaaaatagctacggccgacgaaaatgctattgttctattgtgtagcgtaactgtcgcactgatggagctcccatgcaaccatgatcggtgcaagcgtacttgtgacatgcacggtagtagtagcaagcaccagctagaatgatgatga

SEQ ID NO: 323042 - DNA, 198 bp, Zea mays
cacacagccacagcaaatcctaccgtaccgtaaagcacaggacatcaaaccgcgcaggaacgagcactaccaaacgtttcttgtaaccaccatacccaacatcacacaacaacatcaaccctacacacactaacgcacacacacataccatcatatacgagccaacatcacaactgaagctaccacaactgacaccaa

SEQ ID NO: 323043 - DNA, 384 bp, Zea mays
  unsure (1)..(384): unsure at all n locations
ggctagtttgcgtaaagtacgatgcgcctccccctcgctgccggggccgttgaggcgcaggaagagtggcatccgctcccgctctccacggccgacctttccctcccgctcaccctccccaccggccagaccttcctttggcgccgcacctncctctccccgctccgcttcaccggtgccgtggggtcccacctcgtctccctctcccacctgcccgactccgacgatggccgcctcgcattcctcctccacaacgacggcggttgccccgccttctcgttgcccgccgtccgcgccgcgctcctcgactatctcaacgcggccgtctcgctcgctgacctctggccgcagttcgccgccgcagatgagcgcttcgctgatgtc

SEQ ID NO: 323044 - DNA, 65 bp, Zea mays
gacttcttcctcccctcttctacgacaccattatcttttattctctatctacgtctcagtcctac

SEQ ID NO: 323045 - DNA, 204 bp, Zea mays
gcactcgttcgcggactcgtgttcgacgacgaccactgggaatccattccggcgcgtgcgcactctctgtcgggggggcgtcttcgccatggtgtgggtggccttcgactaggcctcgatcgagatcgttgcgatcaaatcggcgcgcgcctgtcaatccgtggcgcatctgcagctccaggcccctgtactccggtgcctctc

SEQ ID NO: 323046 - DNA, 108 bp, Zea mays
cttatatgtgaaaaacaaaaatcaccatgctttcattctagagctaaataaatttatcacaagtcaagtttccttagctaagccggaaaaaaaggccaccctttttat

SEQ ID NO: 323047 - DNA, 347 bp, Zea mays
gagcactgatgcagagctagcgaactgcgtgcccaaactctcacggccttctccagaatagctcgccatgtaacgctgctgcggcccctgatactgctggcctcgccggcagtcactcgcctagcgtccgccgcctgcgcagacgagaagttcccggcggctcgtgcgtactcgtcatgcgaggacctgccgaagctgctcgcgtcgctgcactggacgtacgacgcgtacaacagctgcctgtccatggcgtgcgcggcggcacccgatattacagctgatcactggcgtatggcctgaacccaactggcgatgtcatacactgtgcgcatgcacttacggcgctt

SEQ ID NO: 323048 - DNA, 264 bp, Zea mays
cacggacggcgagggcgtggcagctctaggtaggcgcgacatcgtcctggcatggcgcgggtcgaggacctccgcgaaatggggggaaggacgtcgaggttctgccgacgtgtccctggccggcgctgggcctgtaggaccactccgtcgggcacgggcacccgtgcgcccgcgtgcacagtggcttcctgtccttgtacacggagccacccaagcctgccaaagacaccaactccgacatggcgttctttgtcaacggcagcg

SEQ ID NO: 323049 - DNA, 79 bp, Zea mays
aattccctagcagaccgactcttcatctccactctaactattgccaacgtttttactcttactctaataactcacacta

SEQ ID NO: 323050 - DNA, 265 bp, Zea mays
taactctacacaattcctcctaacttatccttctacacactgaactatgctactgatactcaaaccacacaaattactacgattttgaccattcaatcctatcaatgtatcactctaccttaagacaacaagactccacactcagctctaaacacctctcaaatctatcacatgtctaatacattgttatcatcgtaataacctctctttgcacactaaatgacattacccgtgaattcctacacaaatacacttttgacctccc

SEQ ID NO: 323051 - DNA, 382 bp, Zea mays
aaacctgacatgcttggattgattgaataggcaactccctgactcgctgcagcatactccgtctctcctgctgggagaatcccagtgatgtgctcgacagcgccaagctatgcgactgctccaacgccaataactgcaggagcaccttcagccagagtctgttctgctatcaacactctcaactacaacatgacacttatcactcacgcgacaagcattgctcatgctatagatcttgctccaataatcgcgtccctaaacttgacaacaattaattactatcgtctagaaataccctcaacattcctgagcacacttgttcagtcaataacatagcatcagacagtcatatactctaaaaatgattctctctacgctgaat

SEQ ID NO: 323052 - DNA, 376 bp, Zea mays
caaccgcgcgcggagcacgcggtgacagaagagagacgacggtcgacggagagctggatggccgcaggagccgggttgtactactaccacccaggcgccgggaaggtgagcctcgaggcggtcgccccgtcctctccgtcgctggccctgaggccatcgcagagcaaggtgctgtgcgtcagcagcagccggtggtggatgaggcgaagatgggaggggaaggcgagcagcgtcagcagcagggcaagggcaagcgcaaggcctgccttgttctcccctgtggccatggactggcaggagtgcaccaccgagcttgaagttgatgttccatgctcggtggcctatcaggggtactcagaactgtagactatttctc

SEQ ID NO: 323053 - DNA, 345 bp, Zea mays
ctagttctagatcgcgagcggccgcccttttttttttcctggaattctttcggtagtttctcgttttcttatattactcaccagaagcttacaattcgtgggctgcacaaggtttggaccattttgttcagaaattgcgatttagggcagccgtaggcagtcatccatttgtatattcttccattgctgtgataagatggtaagaatgctcaaaatttttttttggttaaatgaaaataagaaaaactcagtttgattcaaaaaaaaaaaaaaaaaaaaaaaaaaaaacaaaattaaaaaaaaaaaaaaaaataaaaagagaaaatggtaaaaaaaatataagag

SEQ ID NO: 323054 - DNA, 359 bp, Zea mays
  unsure (1)..(359): unsure at all n locations
gcccaagcccaagcccaagcccaggccatggttgctcaccaacccgctcaaggcatggcgccgtcgcaatgtttgcccatgtgccatccgtccacgatggagatgcagcaagctcaagctggacacgtgacggcaccaccacctgtgccactcggcccttcattgatgatgcagcagcagcagcagcaaccttcacaagctgatacagtgataatggcacaaccgnctctgccactcgacccttcattgatgcagcagcagcagcagccttcacaagctgatacagtgataatggcacaaccgcctctgcctcttggctctgcgatgcttcagcaacagccttcacaggggggcacgat

SEQ ID NO: 323055 - DNA, 196 bp, Zea mays
gttctagatcgccacaccttttgtaggcatgtatttttgtaggacctgattttggtagggaatagaggggtaaggtaaaacaatgaaaaacgtaggagttcggaagtagttcggcaaaatgtccacacctatgtaattgtattgaaactgactaaagctagtgcaaggaactgacacttagttttgttttgtgttt

SEQ ID NO: 323056 - DNA, 71 bp, Zea mays
aaaacctcatgcgatacgtcagcgcctttgaatcagagatcaactgaacaacctgtggaatgtttcctttt

SEQ ID NO: 323057 - DNA, 301 bp, Zea mays
gcttgaatacatctcgttctggttttagcgaagacatccacatacctggtgttgcaaaaatagacatctgggaagcatctcatctccacctaatccctgaaaatcatgtccaacaaattgtcactcatcaaagccagatttccatacctttttactgctatcgaaaccccacaatacagcacacaccaaacaagacattccgcacaatgtatctaaacttatcaaaagatactagggataccacaacacttaacccacctacctcaaattactcaaatgatccatacaattacacgacata

SEQ ID NO: 323058 - DNA, 254 bp, Zea mays
gcagaacatgggcgataatcggccgcgttctgttatttcatagcttattcgggacggtcccatgcatgtttctgtattgacgatgcttaagctttgtactgtattgtatcagttatgcaagacgattatgatttagttacacgaaatgcactgttgtgatgctacttggggtgcgccacttttgggcctcgaatatgattgtataagctgatgcattatttattcacgtctatgtcacatttaaatgttttctt

SEQ ID NO: 323059 - DNA, 390 bp, Zea mays
  unsure (1)..(390): unsure at all n locations
aaaagagactaaaaaatcgccgttctgttttcccagttcgctcctcccatggcggcgggcgcgcgctctcgtctcgctgactcccgccgtctgcaggcatccccacctcctcttctgctccccttgccccccgccgcgccacatccgcctcgccccttcaaccgacacacccgcctcggacggaaacggcctcggacccggccccggtgtcttcctatcgccgcgcgcgctctcgcagctcgacgagctcgcggccttccgctacgagcacgccttcccgcacggtctgctcactgtgcgcgctctctcgcgcggccccgacgacgacgccgtggtcgaggcgctcgtccggctnctcgcctactccttctccgagaccgtgcgctgggc

SEQ ID NO: 323060 - DNA, 415 bp, Zea mays
gttcgtgaggttctccggggttcggtttcgtgggtgagcggatcgagatggcggcgtgggatgttgagtaccgctgcttcgtcggcggcctcgcctgggccacggacgaccactccctccacaacgccttcagcacctacggcgaggtcctcgagtccaagatcatcctcgatcgggagacgcagaggtcccgcggcttcggcttcgtcaccttctccacggaggaggcgatgcggaacgccatcgagggcatgaacggcaaggagctggacggccgcaacatcaccgtcaacgaggcccagtcccgcggcggccgtggaggcggcggcggcggcgggtacggtggtggccgtggaggcggcggctacggcggtggcgggcgccgtgatggcggcggcggctacggccgtggcgg

SEQ ID NO: 323061 - DNA, 97 bp, Zea mays
ctgctcgaaaccgcagccactggccagtcgatgcccatgactgcggtgcccaggaccggccccggttgcctggggtcgccgccggctcaggctctgt

SEQ ID NO: 323062 - DNA, 351 bp, Zea mays
ctgcttctggaatcaggaaaggagatcaccacttcactcaagaaggcaccctccctggccacgccttttccttgagatgacgacgacgatgaagaagaagcagcagcagcagctcctcctcctcctttctctcatgtttctcgttgctgtcacagcagccgctgttgctgccgatccacatccacagcaggtggtactacgcctactctcctcttctcctcggcatcatccaaactgaatcagattgaagaatcatcaggtcattaacatgttcagtgtgtgtccagcaggtgcaagtgcagcagcagcagcaagcacagatgaggattaacagggccaccagatcccttc

SEQ ID NO: 323063 - DNA, 223 bp, Zea mays
cccacgcgtccgcggacgcgttggctgtctcgcaccagctcatcccagctgggcccgcacccttgccttgccctgctgccaccggctctcccccaatccctcccaccaccaccagattcgcctcgccttctcgacgcccctccctcacccttgatgccacgccctccttccatggcgccacgcccgcgccccttaccacccgtccgagccgcgacgctgaccc

SEQ ID NO: 323064 - DNA, 287 bp, Zea mays
gtcgcctcttcttctacaacctcccctcgcctcttgactaggccagcgttggatccgaccccttcgccatccgatccgatggagggcggctactcgtccggcgccagcctcggcgcctgctccggttgcgccgtggccgcatccgccaagtggcggagcgactcgtcgaggtcgttccagtactacctgcaccgttacacgcctaacgctactgggcggtggctcggcacgctcgacaccgctgcaatctactcgctgacattctacatggcgcaaggcattctaca

SEQ ID NO: 323065 - DNA, 394 bp, Zea mays
  unsure (1)..(394): unsure at all n locations
cttttcttgagctccacaaatttccattgccgcgcgcgcgcgtttaagctagctgtgggcaccgatcaactgcaactctcacacacgtccacctgcaattgctgcaaaacaatggctcctcgcagcgcctacgtgcccgtgtgccttgttgccctgctcctgctcgccagccttagaccgtccagcgcgcggctgctccggccgccgatgggccgcgacggcgcaatcgatgtggctatggaggtgaaggacgccgtcgtcgacaagtacgcgccgctcctncttgccatgctgccgagggggccggcgccaccgtccgccccgagcggcggcaccaatgatatcccccggaattaaggaaccggtggccgtagtagttgtacgtacacgcatg

SEQ ID NO: 323066 - DNA, 330 bp, Zea mays
tcatacctagattcatatccatctagacttgctttaataaacaggctttctgactatgggaatggttcattctcaatgtagtctggcaaataaagcatcattgagaatcacgatgatctattaagagtctcatcatcactggaacgtacacatctacttgaaaattatctcatacaaagaaattattctgaacatgatacatcatatagttatacaatatctcactatatgtagagtgatcctatcatatagtataaagcctatcacatacaacgtatcaactctcacacacatatttacagctctcaagacattcactttctgttatct

SEQ ID NO: 323067 - DNA, 290 bp, Zea mays
cacgcgtccggagatttaaacgaggatcctcttaccttgctgaaccagctattaaccaatggtcctgaagcattcaaagaggagaggataaactaattccttaaccttcttcaccatgctcgccaagttgtatcaattactcactatccaatccatcggctatatacttacctcctagatgatatgcatgctaaacatgcctactcatgtactaacatatatctttccctaaagtgcctagatccacagagtaatgcactattgtcttacatgaagatttcgaataacat

SEQ ID NO: 323068 - DNA, 156 bp, Zea mays
tccctctccacccacacatacacattcattgtacacctcacctacgcattcacttactcgctcaactaatctacatcggcacagttaataaacaaaactgtcatacacatccatcttcaattacttccaaacaatgactactctcaacaactactt

SEQ ID NO: 323069 - DNA, 273 bp, Zea mays
actacacaaatttccatttcatttcacacgaccttaacctaactacggccacgtatcaactaaaactctcacacacatccaacttcaattactacaaaacaatcactcctctcatctcctacataccctttttcctcaatcccatactaattcttttcatacttatacctttcacctctcatctcctcctacctccaatattacactactcctcaatctatatttctattcaccttaacttactccattgtctacaaataccctcccctacta

SEQ ID NO: 323070 - DNA, 360 bp, Zea mays
gcggaccacccggccggccccattatattggacgatcgatgcagtcagtactcgaacgatagtgactgagtggcccgcagcagctctagcgcaaggacgactgcagctacactgtttgtttgttcaagaaagcctgtaggatcgatcggatcggatcggatcggacagagcgagctatagctagctagggctagctagctagatggcgaggctacgcctggcggtggtcgccgtcgccctggccttgtgctgctgcctcatgatccacgcgccgacgacaggtgccgctgctgccgccgacgacgcctcgtttcctcctggactggaggtggcggcgcagcagcaggatacccgagtggc

SEQ ID NO: 323071 - DNA, 186 bp, Zea mays
aaaaaaaaaaaaaaaaaacatttaaataaaaataaaaaaaataaaaaaaaaagagaaggggaaaaataaatggtggagagggctaatattgactattattaccttcgcgttcgtgtttcctgtttgctattctctagcttcccctggccgacgttttatcactggttatcttagacgattctcttg

SEQ ID NO: 323072 - DNA, 278 bp, Zea mays
ttcctcatccatttcatacatttactctgactattatacagacatgcacagtgacattcaaatatagggatcgactaatcatggctatgccccatcccttcacacgacctaaccctcatcaccaaccttttatgaatgctgaactgctagcaacatacggactctaagctcactctaacatctatcatattgagctataacctcaagctgaccctcttctagtacgacttagtcaaagtccattattcaagcttattaatcatcataacccacttcta

SEQ ID NO: 323073 - DNA, 418 bp, Zea mays
cggacgcgtgggcggacgcgtgggttgccaattggagatatacggatgatgaggtactcctcaaagattggtctgaggtcagatatagatccttctgccatttgaatggtagctcctgtaaggaaaactctagcaggcactgatggcactgaaccaaacatcatctttgaggagtaccttgccaattggagatatacggatgatgaggtttatgtttttgatggaggaaatgacagcacttcaaatggttttgtcgttaaatctattatgtcaactggccagtattttgaggtggcagaattgtatacagtaacattcctctgtattgtctctcaagatagtgaaactgctatctcatgggcagaaaaggctcatctaactgagcaaagccggcaggacctactaaaaaagcttcatg

SEQ ID NO: 323074 - DNA, 149 bp, Zea mays
tgcaccagccctatggcactatataatatataagactagggggagaagttttccttcccccggaaggcacggctgtacatattatattagggattggttggttgtttgtgcaggcatttttgtatgcatgatattcggcctgtatgggt

SEQ ID NO: 323075 - DNA, 323 bp, Zea mays
  unsure (1)..(323): unsure at all n locations
gtcgcatacataaaccagtgcagcagaagcagcgcatggcgagcagcaccatggccgtctggtcaagccttcgcggaaggcagtgaacgtgccgtcgctctcttcggcgaggcccgcgtgacgatgcgcaagacggcggcgaaggcaaagccggcggcgagctccggcagcccgtggtacggccccgaccgcgtgctctacctgggcccgctgtccggcgcgcccccgagctacctgacgggcgagttcccgggcgactacggctgggacaccgcggngctgtcggcggacccggagacgttcgccaagaaccgggagctgga

SEQ ID NO: 323076 - DNA, 388 bp, Zea mays
  unsure (1)..(388): unsure at all n locations
ctccttcaagttttagagaggcatcagattgatgcagaaatatccaatacttctgaagaaagagctctacatgaataatttggcacatgatcttgctaggtcagttgctggtgaagatatccttgtgatcttagatgctgagaatgtacgctgcaatagaaattatgattaccgttatgcacaagtgtcaacttctagcttacaatcaatagatagcaaggcttggccttccaaggcaaggtcactagttntcaagtcaagtgcagaattgcagcatgtcagcgaagttctttcagtgaacaaatatttgcgtgttttggatatcagtgggtgttctgtgaaggagatgcccgctccaatttttcagatgaaacaactgagatatctt

SEQ ID NO: 323077 - DNA, 107 bp, Zea mays
aattccctgtccatgccccgttattcaagacggcagcacgcatgacttgctatcctccggcttgtgcacttcgacagcctacttaccggcgaagccccttctaaacc

SEQ ID NO: 323078 - DNA, 163 bp, Zea mays
  unsure (1)..(163): unsure at all n locations
agaggagcagcatgtgcaccaaaaggatggcagcgccaggctccctgcgactttttcagggcccgtacttcgctgcggtcaagtgccagacgatgggtggncgtgcatccgcgcggtgagcgccacggtcactgttagacgtgcgcgcctaggctgttgacgc

SEQ ID NO: 323079 - DNA, 142 bp, Zea mays
gagaaacatccacgactctcctcccaactgttttcctaaagcgaaatgataacacttcttagtaatggtctatgctcactctatccttgcgctagcctctatgaccggacctaaactggtgtgtgagaaacattcacgactc

SEQ ID NO: 323080 - DNA, 342 bp, Zea mays
acgtacgcaccaatgactgttaggactgcgggcagcggaacccgatgatgaaccaagaaccggctaggacgacgacggcaatggtgcagcggtacgacccacagacatgctggatgcagtctcggtcgcatgaactgagcaacgggccgacaatggagcagtatagccgcggagatgcttggcagaacctcgagcgtggagtcgagccccgtgtgaccgcacgcgaggcctacgcacctgcaccaggacacgccagcagatcaagccatgccgtagtcggctgcatacgacaaaccggtggctcaactcgacgcgaactctgtgcgagcgaaactggagctc

SEQ ID NO: 323081 - DNA, 358 bp, Zea mays
caccacttcttcaaccaccacaagaaggactaggagcagcccgccggcgagtacgggtactgcgagaccgaggtggtcaccgccaccggcgagggcgagtacgagaggtacaagaaggaggagaaggagcacaagcacaagcagcacctcggcgaggccggcgccatcgccgccggcgccttcgcactctacgagaagcacgaggcgaagaaggaccccgagcacgcgcacaggcacaagatcacggaggaggtcgctgccgcggcggccgtcggcgccggcggctacgtattccacgagcaccacgagaagaagaaggaccacaaggacgccgaggaggccagcggcgaagagaagc

SEQ ID NO: 323082 - DNA, 328 bp, Zea mays
caacgttaactgcaacacgattaattaaatgaggcgtcctgtgcgcgtccgggcgaggaatgcatgcatggcggagagtaataaattcgtaaacggtgtatcgtggatgcatgttgccgcgagcagagtacgtaggcatgaaccgatgtgtgcgcttctgtctgtgtactctctctatgtagtaatgtgtggccagtgggtgctttgatccagatgtattcgctcgtgagtggtgagtcatggaagttgatcgtttcagtatcattaccgtgtattctctcttttacatgcgattctgaaaagggacctgcacgaagttccagtatac

SEQ ID NO: 323083 - DNA, 282 bp, Zea mays
gcaccagagaaaagggcaagccaaaaggcataccgcgcgacacatggcagctgctcaagccgggcaccctgatgcagcggcagatcggggcggcgccctttgctcgtgcgtccgccgtcgcgaactcgctgcaggcgttcggcgtcacccggcccgcaggatcaggctcctgcagactgcagcaggcgtgacccggaagctcgcggttgcgctgcactggcgctctcgttggcgcagcgcgaggacgccaaagctgcctacacagatcaagcaaacgtacat

SEQ ID NO: 323084 - DNA, 297 bp, Zea mays
ccagtttcaagcatgaaaaatcgtcagtcagctctcaataacttgtcacttgtgtgcataagtatgggcgcaactgatttgtggtcatcagggttggacagttttaaattaccacacaccttgttgaacagtgtatactgtatagcggtttccctctcaagcagccatttcaaaacttgaataaggataaggtactcgtcgtaactgtatcgctatctttatctttataagagatacttggatatgcaccaaaatgcatgtacataacataccacatatgacagtaaataatgcatg

SEQ ID NO: 323085 - DNA, 322 bp, Zea mays
gtgcctgcgagtcacggcctcactggggataagaggacactcgaggagatacaactgtgggctgttttcgcagcaattgtttttttgtcttggtggtatacttgttctcgtgttgctctgagtgtgtcttggtggtagagtattgtcatcaggaagagttgttaagatgtggcaattcatagggataccatactaccataccgatagccagctacagcgatctggatgtggttgtttgttggactcatagaacagatactgttggtgtgttatatgtgcattgatgctgctacgatgataaagaaattccttcttttattat

SEQ ID NO: 323086 - DNA, 229 bp, Zea mays
aaatttcaacgtgttatgagcaaaacaccagaattgccattttgcacgctaactactcatttctttgctaattatgctcttacttgaaaattatctacatttatatgtccacgataatattcacatggacctttcaaacatgtcatacagttatactacactcatacattgattatacttgtgatataacataattaagttaaaatgaccattactaaaatgcgtccaa

SEQ ID NO: 323087 - DNA, 337 bp, Zea mays
cggacgcgtgggcggacgcgtgggtttcaattgaatcgagatggtttatcttttttgtttgagagatagttagtgaaaatattgcactttttcttgatctctggcacaattctctcgtgattttccaggcatatatctgtacaaggagtagaagcttacaccaaaaattagtattcatctaaggatctaatttcatttttaagtttacagaacaaaaaaatgtggtacatatggattcactaaaaatggacttgttgcacaatatgtatcttattactttaataagcttttgcatattgctcttgtaacttgagcattctatcccatgtaggaacta

SEQ ID NO: 323088 - DNA, 344 bp, Zea mays
gtcgtctcgtcgggtgcccttgctgctgctgtgcctgggcgtgctggtgtcctgctccttcgcggcgggcagcttggaccaggagctggacatcacgtggggcgacgggcggggcaaggtccttgacaacgggcggctgctgacgctgtcgctggaccgcacgtccggctccgggttccagtcccggcacgagtacctgttcggcaagatcgacatgcagctgcggctggtgccgggcaactccgccggcaccgtcaccgcctactacctgtcgtcgcagggcggcgcgcacgacgagatcgacttcgagttcctgggcaacgtgtccggcgagccctacacgc

SEQ ID NO: 323089 - DNA, 226 bp, Zea mays
ttccgggtccgaccgaccttccgttttggtttcttttttcaacctgttttcccccgcttggcaagcaacgccaaccctgagccagcaacccccttcttggaagcttttcgcaaccgattaactaacccttcgcgccaagattcggggaaaaaaacccaccggaacttaacttgaaccggggtggttggttcctgttccgccgcaccaggattgacccgaaacccct

SEQ ID NO: 323090 - DNA, 390 bp, Zea mays
accaattgaaaattttatttgcatttattttcctcatgtttggtttgctattataattaatgaatctgagatcttttgccttttgtgctttcctgaactgtgaattagactaagagctgtagaagtttattggtcacttctgtatcctttgcagttcagatctttgttcttgtttgttgtttcacaataagtgctgcaaacattaatcagattatatcttagtcacttctttttatttttacatatgtctaagagattagccatgtctgattgacggaaccaagatctagttgttgtgcagatgactttcttcactttagtatggcaatacggtgtcttactagcgaaattggttatttgaatgccatattattttgataccatcttctt

SEQ ID NO: 323091 - DNA, 231 bp, Zea mays
  unsure (1)..(231): unsure at all n locations
aaaatatgtctgttgacatcgtttagagacacatgcctagttgagatagtccccagagatgccactccaacaagaggttagagttggatcctgtcctgtcttctccagttctctgtctatatcatgtatcaactatttatcctatcatcactctgaccactttggtattgtgatttcccttcattattatagagttntgttaagtttctggaatccacatgcacatataca

SEQ ID NO: 323092 - DNA, 175 bp, Zea mays
  unsure (1)..(175): unsure at all n locations
gcaacgtcgtccgtagaagagtgtcagccctcgctngttgcctttcctcactcaagtagccgatnggtggatctactcttgaggtacgtgcgtaccggtggtcgcaatgtgacggcgcagaagggcggtctaagaacctagtccttacctcaaggtagcttacttactcggtgca

SEQ ID NO: 323093 - DNA, 189 bp, Zea mays
  unsure (1)..(189): unsure at all n locations
gngctcaacgangcgcacaagaccaaggacaacgcagagaagannggcaagaggcaggncaggancaggccgncagccaagggcagcagcaagagccggacgggcaagcagcgccanggcnacagaggagagagcgaggacgnngangaccaccgancgggcaagaaggagggcgaacccaacgggagg

SEQ ID NO: 323094 - DNA, 363 bp, Zea mays
  unsure (1)..(363): unsure at all n locations
gnnntatatagtttcttgtcattttgtcataacactgactatggtatatccacacatggcgttcatgcaaattctcatactcataactgaaaagaatcgattgaaaacgagcataaacctgtccctcactcctatcctgaaccagtataatttaacttgcttcgagtggcagcattataaatttctgcatgacctatgtggtcagttctgcattattatttgtccatttgagatccaccagtgtatattatcagatcagtggagtatttgttttcataatgcaggggttatggtgccacttacgtggtcgatcagaatgaaaaatgcgctcggtgctgcgaatggacttgcttttctgcatga

SEQ ID NO: 323095 - DNA, 103 bp, Zea mays
  unsure (1)..(103): unsure at all n locations
cggactcgtgggtgcgacatgaatgatggatctttttaacatcctaaccatcatggtantcgctcattatcgtattttgtatagtatttatgggttcacggat

SEQ ID NO: 323096 - DNA, 203 bp, Zea mays
  unsure (1)..(203): unsure at all n locations
ccaccagangccgcanatccnccgccaccaccaggcccnggagncnacagnccngcacccccngcaccagggcaagcggccccaccaccgaaggggaggcaaganccaccaccaccaccacccccagcagcgccaagcccgccaccaggcacngcaccagcaagnganggagcacagaacgagccaccgggaggaacaccacc

SEQ ID NO: 323097 - DNA, 187 bp, Zea mays
cggtctcgaattccctgtcgacgcacacgtccactcccgatcagcacctgatcgctcactgttccaactcgatcatcccacacatgcgcgaacgttagcctctaccgctagctaggagctacccaatcggtcccgtacccatcacccacttcatcctcacccatctccactagtacggttcattctc

SEQ ID NO: 323098 - DNA, 158 bp, Zea mays
cgtggaggtcgggaaatggagtgtcgctgagcccgggtcgctgtgggggcaccagctggaccccaccggacgacgaggacgaggtctatccgtaccttggcgcgaggggagaggaagaggacacggtcacgttatggtgcttgacatctgctgaggag

SEQ ID NO: 323099 - DNA, 152 bp, Zea mays
  unsure (1)..(152): unsure at all n locations
ggaaaacangganccagagacggagcgagnagacgaggangggcnnggagnaagggagagcagggctgaggcngnaagagcagagagaagcaaccnnggcangcagccnngggagggaaccgacgaggacccaagcaaggcaagggcgcaca

SEQ ID NO: 323100 - DNA, 204 bp, Zea mays
cgcgtacggcacgcattactactcactcactcactcaattcgaatgccagctcagctctgctcagctggggacacgttacacccacatgcctgccgacacatcaccgccgatatcacagcaaagcggtatccaggtccgtcgtctacagcggcggcagccatgaacaaagacaagcaccacgagcactagcaccaccctactca

SEQ ID NO: 323101 - DNA, 327 bp, Zea mays
aagagtactccgaatgagagcatcttgcgttctcacggcttggagactcgcctattcaggggcgcgtgtgaaaccctgtgcgacaacggactaaaatggctgagctgcgcgaactagtatcttgtgtgctagagcatatacatcacgacttggatatcgttggttatacaaagagtgtatgcacctgaaagcattagtgcttgtgcaatgccatttcctgaacacgccaactacaccagggacacataatgaacattgaaatgagtgtctactcgagagcttatcaatcgggtacctcgaagagacttctttgtggataaacagatg

SEQ ID NO: 323102 - DNA, 279 bp, Zea mays
atcccgaaggctaggcgttgaaacccttaactctattacacctcgaatcagcactaggagggagagtgttagttgactcaggaggcatctgacgtaatgaaacttaacttctagaccctgatggtcaccaactctatgatcaaggctagatcccatacctcaatagattacgttattaggctcactcaaactattgcatgtcagagtacctacacagaataccatcccatgctcatatactatgggtaaattctgatggatgataccacttagcaaagc

SEQ ID NO: 323103 - DNA, 180 bp, Zea mays
tcgatcctgaatgacacgctttctaaccctaatttctcttatatctcgaagctgcccgaggagggggagtgttagcatactcactaggcggccttcgaaaataacctcaacgtcattaccctgatgggcaccaactccgatatcgaggcgaaccacgatccccttactgaaactttacaa

SEQ ID NO: 323104 - DNA, 182 bp, Zea mays
gtcactcttaagccgccagtcaagattagttcctcgtatgtggagatatcttgcgggtatggtagaaccagaagaaagcctggaatttattttttcactagaaacatgggattaaactagtatttatttagtacaagacatttattatatttctcaactatggttctgttaaccaaatacta

SEQ ID NO: 323105 - DNA, 299 bp, Zea mays
cgtctcgtgctgatagataggaatgggactcttcattagcggcctgccgatctattggggcaccatagggcaaccacgcttaaccgatgatgcggcattactcgttgctctgattattcagcattcgcctctgtcttatttctagtgctctactttgctgcgtatattaccatctttggtaggactgtcggattaaatccagaacctgtataacactcgggaaagtgtgcctaagacctgatgggtacctggaatggtaaaggtcgcgcgaagtggattccagcgcattggacattgct

SEQ ID NO: 323106 - DNA, 442 bp, Zea mays
acgcgcacgccacgcaatgggccatgtgccgccaccgcccttcctacggctctcatgtcggcccgccgctatcggagcccggaccacttcgcatacctcctcaccgcgccacgcacccgcctgcccacggccgtcctcctacccacagcgtccgccgcccgccggctagcgcgtctccccgcgcgcggacgcggcgaccgggacgggggatgtggaggcgctcagggccggggtgtccgtgtacaagccgcggtcctacgacgtgctcgtcaccgacgcggctcgctccctcgcctgcgccatcgacgacggcaagacccggctcgagatcgaattcccgcctctgccaagcagcatctcttcttacaagggctcctcagatgagttcatcgatgccaacatccagcttgctctcgttgttgctaggaagctcaaagagctc

SEQ ID NO: 323107 - DNA, 284 bp, Zea mays
gccacgcgtccgcagctcgctagctagcattctagctggtgcggctgactcttcgttcggagtcgccatggaggagaggcggaggccccgcgagagcgccatcgtctggaggcgcacgtcgtcgcgcgcgaactgtgctgcgctgcgaccaaaggtgccgcagctgcgccgtctcacgccctgcagctagtaggcgctcgaggggaccctgcttatccgcacggccgaatacatcgtatggatacgaactagggtggatcttctcagggcaataacatccgtct

SEQ ID NO: 323108 - DNA, 248 bp, Zea mays
ggagctcctgcaatgcccccatcttacgtttcctacccatctcgctctcgcatagagcgaggagaagctgaggcctagcgccggacccgccgccgcatcagtcatcagctatggcgctggccgctcgcctcaggctcacgctaccgacagctacatacggttcatgcagctatcgcgaatggaggtgtcactcaagtccggtcctttgccaacgatgcagctccagctgaccggcctcctgttagtgg

SEQ ID NO: 323109 - DNA, 222 bp, Zea mays
gtgaaaccactgataaagaaggctattaattcaatgcaaactcaatcagccaagcggaaacgctacattcccaacggtcacgttgctataaacatgatccaccacttctctatcgactagaacatcgacactattcacatgtagcttgagaacaataactacttctacctttgccataaactgctcgactaccagactatgctcttcaaagaatgcatcatc

SEQ ID NO: 323110 - DNA, 254 bp, Zea mays
caaacacaccaatgtccatctgacctttctatagctcttatttctacatctatataatttgtaactgtaacattctaacttacacttgatcgaataatactttgataccaacataaactcaatacattatacaacctttactaccaaatatcctttgttatactttctcatattatcatactaatcactatcaatattacaccaccattcttataaaattacgcatgctttatacttaatccaactcttcttct

SEQ ID NO: 323111 - DNA, 253 bp, Zea mays
aaaccaaatgtaggtgatgtatatcatcatttggatacttttgatcataacgagaatacggtagagactgttttcgatagagataggactaacctgcatgaatatgacctgagaaacactgagagttcagaatcagaaggacaagtcaacagtggagatagttatacagaagctaataataataagaatgaatatgaaaccaccagtctttttgaatgacgcatgcatgatactgaatccaactcttctgctt

SEQ ID NO: 323112 - DNA, 199 bp, Zea mays
tcggtcttgaattcccgggctgaccaacacatagtgatttcacacttgccctcataagtattgattttcttcaagatacccacgctaagagcaatggctctataccataagatctaccctgtgatgaatacgcatcacaactttatataaccatctctctaaaaatatatttaatctacacctccataaaccacatcac

SEQ ID NO: 323113 - DNA, 270 bp, Zea mays
  unsure (1)..(270): unsure at all n locations
caatccaatcccatttgcatttgcattacatcaacgccaacataagctttacatgcaaagggtngcttcacagggggctttagtctaatcaacctcctcactctgtctgtgtctattgtatataccacttgtcgtggatgtatgcctgtacattgttggcaaggatcaatatgatctgcttgctatctcttaagtgatcttagcaattacttcatctgtcaatgatgatttgtcgaaaccttctaccttgcgcctatttcttgacaaata

SEQ ID NO: 323114 - DNA, 158 bp, Zea mays
gactggactgcactcaaatacttaatcaaattgtactataacaagtctacaatccatcctggagatagtgacaatttgcatgatcttataactgctataacagatttcacatcactagccacttagcatttgcactgatttacacactaatcctaaac

SEQ ID NO: 323115 - DNA, 125 bp, Zea mays
atgaagcttcatgcatggaagctcgagcatatctttcaagatttggcatctagctacctacacttactcctaggatcagactctattaatggatgtcgtatccgtcctgcgatctgtgtctaaat

SEQ ID NO: 323116 - DNA, 352 bp, Zea mays
ctcttcttcacctcactaacaccagctagcaactctttctctcctgcaataatggccgctcgctcctgctcctcccagccgcagctggtcgcggcggcggcggtcctggcagcggcgctgctgctgctggcggcgggggccgggacggcgtcggcggcggtgagctgcggcgaggtgacgtcgtcggtggcgccgtgcctcgggtacgcgatgggcagcgcggcgtcgccctccgcggcgtgctgcagcggggtgcgctcgctcaacagccgcgcgtcgtcggcggcggaccggcaggccacctgcaactgcctcaagagcatgacgggccggctcggcggcggcgtcagca

SEQ ID NO: 323117 - DNA, 189 bp, Zea mays
gaccgcacgcttactccaaattttaaaaaactacattcatctaatttacattccagatctacatccttatcatgtgtatgtgttatcataagatcattcaccctgttaaactacatcataaccttccccaatattaacccttaaatccttttcctattcacaaacaaataactgtatacctacataatt

SEQ ID NO: 323118 - DNA, 302 bp, Zea mays
gcctctgcctcgaaaactcttactcgcggcgctgcagccaggggggcgaccggtgtgtgagccgctgccgctatggctgctgcttccgttccgccaacatcttcctccggtggctgggacttcacctgtaacctcgaagtcgattatgggtctgaagaacatgcatacatagtctacagaacgtatgcatgcgacaaggacttgaagcctgacaaggttaacacgctcatgacactctcatgcttcaagctgctagtatactgactagccatgcagtccctcatccatcaagccatcatcat

SEQ ID NO: 323119 - DNA, 450 bp, Zea mays
gggatatcccctcgatccgtaacccacgccggaatctctggcgtccgccgccccatggccctgcccaggcacacataagatggcccctgcgacctcctctatgccatcgacgagtagagaaaaacagtgagcgccatcagtaccaagccatggttgtgagaagctagcatgctccgcgacgccatctcccacctctgacccctgtggactccctcaagcccaagcgcgggacaccttcgcgtgctccatggtcgcgcgcgccaggccttctccatcggtggagcccggcgtagctcccttggccgcggtctgccgtggagctcgccctggcttccgcgacgttctttaccttcggtaacccgctgacgcctactgtgtacgcggcggcaaatggactccatgcgggcgggggcgaaggatctgcgcgaggacacatgtcatccgaaaagc

SEQ ID NO: 323120 - DNA, 333 bp, Zea mays
ctattttaattcttcatacctgtaccaatatgcaggcaaagcaatactgtcgttgacagaaatgagcgtgataccgacgactatgatgtgtatgatattttagtttgactcttgagttatgcatgaatttaaccccaagctatctagaaaagttttttttccctttgaaattcttctttgctctccttcctactggatcaaattactttttatgacaacaaactgcagctttctctttccttttcttttcctgcttcaccgcgacgataattgtgaaaatattttagctacgtggacatcaattatccacaacatctttgatatttataatat

SEQ ID NO: 323121 - DNA, 295 bp, Zea mays
ggagtggcggttgccatagtaatagctgctacatgcttgactgttatagttctaaggtctgtgtattttaaagtctcccgaatgaagtatttagatcgaaacggtgctcaaacctttgatccaggaactaacactgctactttaaagcttcaaccccagcctcagtcagggtacctttggaaaggtcctgactttcctgcatatcctgtttctccgtcaactactgcctttgaaagtactcacaaacccgtttgaaattgcccgatctcattttgagaagttgttccattttccc

SEQ ID NO: 323122 - DNA, 314 bp, Zea mays
ccgggccgacccacgcgtacgatctgttcacctcactaacacatctatcaactctgtctctcctgcaataatgggctctgtgtcctcctcctccaagacgaacatggtcgcagcagcaacagtcctggaagacatgctgctactactggcggcagggcccaatacagacatcccagcggcgagctacgcatacggaacgtccgtaagtggcactaatccaaggcaacgctacgggcagcgaggtatactattccaacaatgtctacaatggagtgaactacttcaacaaaacaaatctctttggatacatacca

SEQ ID NO: 323123 - DNA, 422 bp, Zea mays
  unsure (1)..(422): unsure at all n locations
ctgacgcctggtacatgaaacacggaacgagattgtgggcagacatagacaaagagagaatggacggtcaacaggagactgatcggctgttgcggcctgagtatgcgtgcctgagccaaaaagatccatggcgtgcccgagacgactgtaacgtgggagcgctcgtatatccacaccaggcagcacctgctagagaggtacatgacgttcgggatcaacatgcaggactagctgaacgcgctaactaagcgcgccgacgaggatgcccgggcgacgtgcacagtgtcgaaggaactcgacaacgacaacaacgagttcagcgacaagtaccagcagtggataatgcagaagcgaagcgcangcacgtgctagcgccagagcactgaactagctgctggctgtgcttagattagccatgatgc

SEQ ID NO: 323124 - DNA, 463 bp, Zea mays
caccgcaccctttcatcagcctgcctgtccactgttggcttggtgacttcctccgctccgctgccctgcggttccgaaccggcgaaccttgcattgcaacaacaactggctccaaggggcgggcgatcgctggaagcttcctcagccgggttcttaaccgcaagggcggcttggccaggaaggccctgcacgccttggcgtaccacaagaacctggaagacacatgcgcccccggtgtcttcccgacaaaatgatactcgaagccccgagagcccacacaagctctggagcccacaccaaaagaccggcgtgttcgcccccgcggcggtggaccccaatctgacacctggtggcgcgccgcacgccggcgcgaatgctccaaaaggcacggtgctggaccacaaggtgtggttccgcccgctcgaggacgtcgagaagccgccccccgccgcgtgagccgcgc

SEQ ID NO: 323125 - DNA, 324 bp, Zea mays
gagatcgagtatcttccgacatctcatccctgatgaaagtgttgctagtgaggtgcgctgccacttgtcatgtcaaggtggccctgcacgcggctctattgcgatacaccgtatcatccgcgcccaataagtgcagtcttgccctcgcagagaaagacactggattccttaccgtattccaaaagaatgtgcctgccggaccactgtcactaagaacgcgggtagcgacgaccgcacctgttgccacgccaatttccaatacggccgccaccgatgggaagaagaccgtgcgacagggcttggtggatatcacgggctcatact

SEQ ID NO: 323126 - DNA, 75 bp, Zea mays
gagatcgagtatcttccgacatctcatccctgatgaaagtgccgctagtgaggtccctgggagttgtcatgaaag

SEQ ID NO: 323127 - DNA, 370 bp, Zea mays
gcgttctacgcgaaggccggccagaccacggcgaagtgatcaaggaagggcagatgacgcgcgtgctcgagacggccgaagccgggttgatcgtgctgcccgagcacgactatcaggtgttacggcgcaggggcgacgatcaatacggattttgatccacggggaggaaaggtcgatgtcgatattcgagattgcgagttggattgccttggggacagtgccgattacggcgctggttacggtcgtgcggtcgatctacaccgggaactggatatggacgcgattcctggtgctgcccgtcatcctgacggcattgcttctatgttttgacatgacgcgcccacaacccgtgacaatagtcaacctgatc

SEQ ID NO: 323128 - DNA, 418 bp, Zea mays
cggttccggttcgagcacgcgtacgccaccaattcacttcgacagctaaaaagtttgccgtcgatggggtcgtcagtgaagaaggcggtagtggcggactccactgtacttcctggtaccatacggtggcctacttgctcattggcgctgctctagctcgaacctacctcgtgcactgagcaccttgcgatgaacaccagtgccaattctgatacattctacggaaaggatgacagacacgctggagatgacgtactatgattgaatcgcagccgaggattcgactatctacggtcgccaccgtacttcttatcgagctcaaccaaacccgtcgttattgtgaaacagatgtactacagatcttctattacgaacagtgctcatgacggcaaacatgtcatgcactcatgctccagga

SEQ ID NO: 323129 - DNA, 335 bp, Zea mays
ctgacaattttgaatctccggagctcctagtgccaacggcgtcagggactgataaaaatggcgcgtattgtctaccactcgatgacgcttcctcctattcgcctcgcgaaatcctgacgctcaacctgacagacaacaccttctcataaactgccatgccaaatgctgtacaaagccacaagctgaaactattccacctggaaagaacgctccatttattgttgacacattccgatggatctatcattatagtgtcacatatttggttatcgagacttatctcgtgaagactgagtccacttgcggactattatccccctgacgcatctgaacat

SEQ ID NO: 323130 - DNA, 173 bp, Zea mays
ctagttctgtcgcgagcgccgacctttttttttttttttgaattccaacctaaacgggatggcgaattaaagcaaattaactctggtactgatacattcgactacaatataatccaaaaatacttacggcaatattacttgccacacaaagcacacatatagctatgcaaaaa

SEQ ID NO: 323131 - DNA, 293 bp, Zea mays
attacgcgtccacaggtaacaaggtttccgatcaatggagtcgtgattgcatacgggggtagtggtgtactccagtgtgacttcctgctattctcatggtggcctatctgcacactggcgctgctctagtccagacttacctgaagcactgaccaccttgcgaccaaacaccagagtgcattctgatagactactatggagacgctgaccataacggtgcagatgacagactctgaattaatcgcagacgtaaatgcgcttatctacatgccccacctgactccatatctagc

SEQ ID NO: 323132 - DNA, 428 bp, Zea mays
cagtgaaagcaataaaaatttcaggtttgtctgcttaatccttacagtatatggtgtcattacttaccaagaacaagaagttgggtgtgttgaattctgcatgcagtcatttttcaggaaccttaatgttccattgaattaccagtatttacatgctaggtgtcaatggctatctaaatggacataatgttcaaatattacttgtgaaagactgatactacaaatgcatgcagatctgcaaaggaattcatctctaacaaggccttacattggttcgatattcggtccaccaggcatggattctaccatggaaccaaacggaagggacactcacatgcacacagtttcatctggtgacccaatgattccctaaccttcagtgacgtctggtctcagcaaatttacgaactaaatcagcatgcgaaacg

SEQ ID NO: 323133 - DNA, 364 bp, Zea mays
atttccgggctcgcattttccttgcaaccgattgcctatccccctcccaaccaaagaccgattgcgcccaaggccgataagaagccggcggcgaagaagccggtggaggaggagcccgcggccgagaagacgaccgtcgggaagaagcccaaggcggagaagcgggtccccgctggcaagtccgccggcaaggagggcggcgagggcaagcgtggcaagaagaagggcaagaagagcgtggagacgtacaagatctacatcttcaaagtgctgaagcaggtgcacccggacatcggcatctcctccaaggccatgtccatcatgaactccttcatcaacgacatcttcgagaagctggccggcg

SEQ ID NO: 323134 - DNA, 270 bp, Zea mays
aatcttattggggttaaagccctgaattccgaaaatagaattatggcaaagtttaattccttggttataagaaaaggtttcaatggtttttgtttaagaaccaattcccattttaccaaaccattaaattgcaaggtcaaggtgggcaattttcaaaatttcaaccttaaggccaaaaataacctttttccccaatttttggaccaattaggaagcttgattaaggtactttttataatcaagtccaacaagaattgcttgaaggccaaa

SEQ ID NO: 323135 - DNA, 177 bp, Zea mays
gcacgctgtaccctgtgatcacggactacatattgctgaacccgtgctacaacgcctctgggggagagcgaccggaagtgccgtagctgtcactgctgctcaacgactgtaccttgagggacttccctgcggagaactacatcctacggctgtacccggactgcatcatgtgcctgt

SEQ ID NO: 323136 - DNA, 200 bp, Zea mays
cgccatcatcaacgcttactataactcggattccgagaacgactactctcatctcttcagtgcgggcacatatgacactcaagtgacaagaatgcctgataaaactatggaccagaatgagttacattgcactgagaagacatcagacatctgcttcgatctatgaaataattgctatattacgaatatgccaacctacg

SEQ ID NO: 323137 - DNA, 303 bp, Zea mays
aagtaagacccacaccatggattctactaagcgggccttgcgatgataaggccgtaacgcgacgactgacacctgccacccgacaacgccgcacgcatacaagcctaacttcagaactacttcgacagcgtcccacagagacgcccatgcatgccaacacgcagcgacccctatcaagacaccttcccgcaaccatcagtcctacaagacgaagaccactacttgcctgaactacacaagcttctctaactatagactaagccccaaaatctgagcgctacaacgagagcgcagacacctact

SEQ ID NO: 323138 - DNA, 216 bp, Zea mays
caagttatggtacgctgacgctggcgcaagctgctacatacgtcgattagatgcgagcatgggaccattgtctggaccgtcgtgagtggaatctatccagtaggcttttatgcacgaactagtctaaggcgaaagacctagacgcattgtgctattatcgaatgttgagctgtcaatacctttggcgcttatgacgagaaataatatctgacaggt

SEQ ID NO: 323139 - DNA, 422 bp, Zea mays
  unsure (1)..(422): unsure at all n locations
ccccagcaagccgcggttcttttggctgcgctcttggccgtcagcttattaggcgcgagcgcgacggcttggaaggccgaggcggcagcgccgccggcggtcgtggttggctccgtcaagtgcttggactgctcccccagcgatgtcgatgccttcaaagacctgcaggtagcgatcaagtgcaagtccggcgccgacgagggctacgagacgaaggcgcgtgcccccctggacgacacgggcgtcttccgcatcccactcgccgcagagctcctgcgcgacgacgggagcacggaccgcgactgcttcgcccagctccgcagctcgcccgacgacacgccgtgcgtcggccaggccccgcccaggatgatcgcgcncaccagccaagtagacggaagcagcagcacgaacacgacctacta

SEQ ID NO: 323140 - DNA, 375 bp, Zea mays
cgagacgacccctgcgggcagatcttatcttccttgacctagccagttgtgcatgcgcctcgggggccggggcctgtccatctgagtgttagattacccacccgatgggcgtcgagctcgacctctacgacttggccgtgctccggccggtccagaccgcggcggcggccgactgcccggacgccgccgacacgggctgcgtcacgccgacggccgcgagctcccttctgccgcgcctgggcctgggcggcggcctactggacatcgactccgccgcgtgcgtgaccccgacggcgtcgccgtgcctgctgcggccggccacggtgtgccctccggcgccgcggaagccggtggcgcccggcagcaagaggggga

SEQ ID NO: 323141 - DNA, 212 bp, Zea mays
aattcgagggacgactcacgcatccggacattacacctgaacgatagcattgtttgatcagagcccaatacccatgcccgtgggctcaggcacaggggatatgtaccaatggtacaaactggggaagtctctgtgggagtcatgttgtcgaccatgatcatgtccatgctcctcgtctcgcggattcccaagaggcgcaaggctctcatgcg

SEQ ID NO: 323142 - DNA, 348 bp, Zea mays
acgagctgggccgcggcctcttcgccttcgacttctcgctgctcgccgaccgccgtgcgttcgggatgatctatcgcctcaccaagcagggatactatctgcacgagttccatagcgccctgcgcaagatgggccgcgtcggcttgcgaacggacgccatccgcggctagatccgcctgaactgccaggccatgatctagtagaatgcgactgtccataacgtaacgtctacgttgccacctttttgttgggcaaacattattggtttgctgcaataaatcatatggatgacattggatttagcccaagtggtaattagcatacatctatatacatgtatacctggaa

SEQ ID NO: 323143 - DNA, 306 bp, Zea mays
tcgagggacgcgccaggcgttcgatctgctcgctgactcaaaggcatccaagagcgggttaccttcgacatcactgatgctacggactacccgtcgctgctcgaagatccgccacagtatgctggggagattagggagcatcactgggtgctgatgggatggacatcgatcgccaacctggccctgacggtgcaggcatactgcatctgccataatgagctgatggacatgacagttagcctggatgagtacgccagggctgatctaccagctgcatgactgcagctgcctgtgggacctacaact

SEQ ID NO: 323144 - DNA, 79 bp, Zea mays
tgtgaagtggaaccctggtactaagacctgtaatttcagaccctaatctgttgtatggaaatctgaaagccttgagtcc

SEQ ID NO: 323145 - DNA, 342 bp, Zea mays
agctgggccgcggcctcttcgcctccgacgccgcgctgctcgccgaccgccgcgccgccggcatgatccaccgcctcaccaggcagggatacttcctccacgagttccagagcgccgtgcgcaagatgggccgcgtcggcgtgcgaacgggcgccgcccgcggggagatccgccggaactgcagggccgtcaactagtagaatgcgccggtccgtcacgtcacgtcaacgttgccacctctttttttttttttgcttatttgtttgtttccatcgatcatcttgtttacattgtatttagggaagtggtaattagtatacatatatatacatgtatacctgg

SEQ ID NO: 323146 - DNA, 254 bp, Zea mays
agctgggccgcgtcctgttcagataagactcctggctactggaactctggagcggggacggcttaattgaccgactgatcaggcaacgatactttctctacaagttccagagcgccatgcgcacgatgggccccgtaagcatgcgaacagtcgccgtacgcggggagatccgacggaactgcttggccaggatctaaaagaatgcgccgtgccaatacgtcacctgaactgggccaacgtgccaaagaattatg

SEQ ID NO: 323147 - DNA, 209 bp, Zea mays
tacttatcactctttatgcttttaccaatctataaactctctcgggcctgtttcaatccacgggggcaccggcatcttaaacaaccataacatctcaaccctcacgtcacatgcattttccggtcaatacttgcacaaactaaataacttacaaatatccaacactatgaaacccctctaattctacgtcaacctccacacacaataca

SEQ ID NO: 323148 - DNA, 93 bp, Zea mays
acgtgattcaatgctgcatgtgcatctaccagtggtacttgtgtatatgattttttgtttatactacggttgtcagcgtgctcggggaaggct

SEQ ID NO: 323149 - DNA, 349 bp, Zea mays
  unsure (1)..(349): unsure at all n locations
gccaaccgcatccagtccaccccattcccctcgaccccgacaaccccgagtcccgagccgatggcgcccaagggcgagaagaagccagcggagaagaagccggcggccgaggagaaggcggagaagacgaccgcaggtaagaagcccaagtccgagaagcgcctgcccgcctcgaagtcctccggcaaggagggcggcgagaagaaggggaagaagaaggccaagaagagcgtggagacctacaaaatctacatcttcaaggtcctgaagcaggtgcaccccgacatcggcatctnctccaaggccatgtccatcatgaactccttcatcaacgacatcttcgagaagc

SEQ ID NO: 323150 - DNA, 328 bp, Zea mays
gaggattcgaaagttcagtacctggcgtctagtgaagcacgctcccggcgccccgtggtgcgcagcgcaaagtcggcgggacactcgctctttggcggcggcggcataaaggaggtgcgaacgattttttttataggaggtgcgattgatatctggaagactgaaacgaagcccgagcatgactgtccgaggaatcgagaaaaactaatacgtaagattttaatggcccaacattagagtctcccgtgatatcacctaaattccatctttaaattcgttttttatggttttctctaaaaaattttttatttatatctcatttctcttt

SEQ ID NO: 323151 - DNA, 440 bp, Zea mays
cacagacaagtggtttccaaagccaagtgtgtgtactagcaaccagctagctcgggcggcagcaggcagccatcatgtcggaggagaagcaccaccacttcttcaaccaccacaagaaggacgaggagcagcccgccggcgagtacgggtactccgagaccgaggtggtcaccgccaccggcgagggcgagtacgagaggtacaagaaggaggagaaggagcacaagcacaagcagcacctcggcgaggccggcgccatcgccgccggcgccttcgcactctacgagaagcacgaggcgaagaaggaccccgagcacgcgcacaggcacaagatcacggaggaggtcgctgccgcggcggccgtcggcgccggcggctacgtattccacgagcaccacgagaagaagaaggaccacaaggacgccgaggaggccagcggc

SEQ ID NO: 323152 - DNA, 297 bp, Zea mays
cggtccggactgcccgccgcaagccacacgtccggcgaatcacagacgcgtctttctcattttgctgcgctgcactaccctgcggtgccagtatatattacgggagccctggcgagcgagagctatggataggcatggctgctccgaagctcgcgacgctggcgctggccgtgctcctggcggcgaccgtggtggctcccccggccgctgtgctcgcggcgatgtcgtgttccaccgtgtacagtacgctgatgccgtgcctgccgttcgtccaaatgggctgggccatgccgtccc

SEQ ID NO: 323153 - DNA, 429 bp, Zea mays
ctaacactagcgtacaagcgggtgccggatagagtggaggcaactaggaaggcagtgcttcgtgccctcaagctgttctgccttggtcttgttctccaaggtggatttttccatggcgtccacagtctcacgtttggtgttgacctaacgaagattcggttgatgggcatacttcagaggattgcaatagcctatctcctggctgcagtatgtgaaatctggctcaagggagacgatgatgtagattctgggtatggtttgctgaggagataccgttaccaactgtttgtaggattggtcctctctatagcgtactctattcttctgtacggcatatacgttccagactgggagtaccagatagcaggccctggttccagttccacagagaagtcgttctctgtgaaatgcggagtgagaggagacacc

SEQ ID NO: 323154 - DNA, 290 bp, Zea mays
gttctagatcgcgagcagccgcccttttttttttttttttttttttttttttttttgtttttggtttttttttggttgttttttttttttttttttttttttttttttttttttttttttttttttttttttttttttttttttttttttttttcccattatatttattttatttttttttataattttaaattcttaatcctggtaatgttggtcataatattgctcttcttcatttaataaattgttgttctattctattttataagtcttcattatatattcttttt

SEQ ID NO: 323155 - DNA, 242 bp, Zea mays
  unsure (1)..(242): unsure at all n locations
gtactcggttccggaattcgccggcgtcgacgccacgtcgnntccggggttggggcttnnctcctcccccttccggtttcnngggttcgtggttcgtgaggggttctccgggggtgtcggtttcgtaggggtgagccggatcnngagatggcngtngcgtcggatgggttgagtacctcgctgcntttcgtcggtcggcccttcgcctggggcccacgtgacccgaccactttcccttccac

SEQ ID NO: 323156 - DNA, 321 bp, Zea mays
tcagatacctagctacattcaacatctagttagcgtacagaacatcaactatcagtgtggggaccaattctaaggatgggccgcaccaacaccacagcacgagtattgcgcttcgtcagtggcgttccccctctcaattgctacagaatgcctactactgtcagacggcatgccctcgcctctcacagatcatgacccttcgaagcttagcctacagtactactccaagacttgccccatcgtgcaacaccacgtccatactgatatagactacgctgaacgctcctacacgctctacaccatactcattctcctactcca

SEQ ID NO: 323157 - DNA, 96 bp, Zea mays
ctttttatcctggcagattaaagcatgagtttatggtgtttttgacacgtatttttgccccgaccagacccagttttagtcaatgtttttcttttc

SEQ ID NO: 323158 - DNA, 387 bp, Zea mays
gttggcttctcctccccctccggttcgggttcgggttcgtgaggttctccggggttcggtttcgtgggtgagcggatcgagatggcggcgtcggatgttgagtaccgctgcttcgtcggcggcctcgcctgggccacggacgaccactccctccacaacgccttcagcacctacggcgaggtcctcgagtccaagatcatcctcgatcgggagacgcagaggtcccgcggcttcggcttcgtcaccttctccacggaggaggcgatgcggaacgccatcgagggcatgaacggcaaggagctggacggccgcaacatcaccgtcaacgaggcccagtcccgcggcggccgtggaggctgcggcggcggcgggtacggtggtggccgt

SEQ ID NO: 323159 - DNA, 329 bp, Zea mays
cgacccacacgtccgacagtatgctatcgcatggagttacggtttgacatcactcatatcgagtgtaagggatgggtggacttggagtcgacgattgtcaagtaccgagtataatgaccagatatatccgaaggtgaacgccttgttggctaggcataccacatctcttatgacagtgggccctgttgcaagtgctctgctacatactacatccaagatgggctacataggcccaagtttcaggtgctgatatcttaaacaaaatcaatgctatggtcgagtgaaactctctaatctattccatcatgaaactgtgttggataatatac

SEQ ID NO: 323160 - DNA, 244 bp, Zea mays
cccacgcatccgatcaaacacattcaatatacccgatattaccgtaccactacaacagccagttctaacgcgatggctcacaactcggactcgaacccatctgcatatacaccgacaaacgatgaaaaagcccctaacactactgaaggtcatatacccaaatccgaaactctcctgcacgactgtaagtcctcctgcaaggacgcctgctagtataacagcaagaataacgcccataagctca

SEQ ID NO: 323161 - DNA, 294 bp, Zea mays
cgttcgtatccttctctcgtcttcctctccttctccaattcctctccgagagcttctagtctagcactccgttaacaatcgagtaatccacggcgcggcagtaatgtacttatatgtgctaccaggtagtgagcagacgaaggctcggcagctgagcgacgggcaggcccggaagcggcggctgagcgacgggcaggcgcggttcctggagctcagcttcgggaaggagcggaagctggagacgccccgcaaggtgcagctggccgccgagctgggcctcgacgccaagcaagt

SEQ ID NO: 323162 - DNA, 227 bp, Zea mays
  unsure (1)..(227): unsure at all n locations
aggcaggcagccatcacgatggcgctggcccacctncccttcggcctcctgttggtggcgtccgtcggcggtttcggcggcggcgaccacgggcttacgcacattcacctgtacgtgcacgagacgtacaccggggcgaacgccacgggcggcggcgtgctggagtccccggttggcgccaacttgtcggtcgggagcatgggcctggtggaccaccagatacccct

SEQ ID NO: 323163 - DNA, 392 bp, Zea mays
  unsure (1)..(392): unsure at all n locations
cgcctactggctatcaccagcacgcaccgccgccgcctctcatctcatccccgcgctgcttccccacccgcccccggattggcgctgccgcacccagatcttccccacccaaatcgactccgccatcgcccggatccacgcagagccgtcgcggatcgacgtgctgccgccacagattgcgcgctgtcgtacggatcgagagacacccaccgcaagccttccgcgctggcgccgttcgggaagtaaggaggctacggagagggcacaagctggggggtgtcgaactccgtggagaacgcgcgggcggtggatgcctagctctggtgggagggtgaggaaaatcaggttcatcgactcgctgctcctnctcgaaagcagtggacccacgggca

SEQ ID NO: 323164 - DNA, 287 bp, Zea mays
agctagccgcgccactccttcgtgtagccatcagccttctcatcgccaccaatggccactgccgaggtccagaccccgaccgtcgtggcggccgaggaagcgcccgtggtggagaccccgccgccggccgtcgtgcccgaggagtctgcccccgccgaggccgaggccgaggccgaggctgctgctcctgctgatcccgaggagcttcccgcggccgagcagcaggcagccgccgaggcggaggccgcggctcctgctggtgccgaagagcccgtcgcggccgaacc

SEQ ID NO: 323165 - DNA, 227 bp, Zea mays
gctctctgctgcggccggatccaggctcgggcttctcccctccctggcgtacctttggaccgcggcagcaactcggctggcggacgcttgctgcccaacctgaccattggtttttccgattctttgtttgtttgtaaccgttacgctcaccaccaccttcgcctcctgcacaccgcgccagccaaaccactcccacccgtgaataaacctcgcaaattgccgaactg

SEQ ID NO: 323166 - DNA, 378 bp, Zea mays
cccctatccacgagcaaggcacagcagcaggggagtcggagtgacagccgcccgcaggatgccgacactaaacctgagcaccaacgtgccggtggacgcggtggtcgccgccgacatcctcagggactgctccaaggccgtcgccaggatcatcggcaagcccgaatccgtacgtcactcccgccccccacccgttcggcgcaatgcctcggtcgcacgtcccttctctttaccaatgcgtgtaggctccctcccggtcgctggtcagcggcggcttggctcagtgccctttctgatgaaacgaaacattccccacgtgctgcgctgcggcctgcggtgcaatatgtcatggtgtcggtcaacgggtcggtgcccatg

SEQ ID NO: 323167 - DNA, 397 bp, Zea mays
  unsure (1)..(397): unsure at all n locations
gtgaaggccaagatccaggacaaggagggcattcccccagaccagcagcgtctgatgtttgctggcaagcagctggaggatggtcgcaccctcgcggactacaacatccagaaggagagtacccttcaccttgttctccgcctcaggggtggtatgcagatctttgtgaagaccctgactggaaaaaccataaccctggaggttgagagctcggacaccatcgacaatgtgaaggcgaagatccaggacaaggagggcatccccccggaccagcagcgtctgatcttcgccggcaaacagctggaggatggccgcaccttagcagactacaacatccaaaaggagagcaccctncaccttgtgctccgtcttcgtggtggtcagtaagtcatgggtc

SEQ ID NO: 323168 - DNA, 325 bp, Zea mays
ctcttcttcacctcactaacaccagctagcaactctttctctcctgcaataatggccgctcgctcctcctcctcccagccgcagctggtcgcggcggcggcggtcctggcagcggcgctgctgctgctggcggcgggggccgggacggcgtcggcggcggtgagctgcggcgaggtgacgtcgtcggtggcgccgtgcctcgggtacgcgatgggcagcgcggcgtcgccctccgcggcgtgctgcagcggggtgcgctcgctcaacagccgcgcgtcgtcggcggcggaccggcaagccacctgcaactgcctcaagagcatga

SEQ ID NO: 323169 - DNA, 231 bp, Zea mays
gtgagtgagagtgtgagactgagggagtagaggtactcattattgtgaaccatcaagttacacacgcatgcagtacagaattaaacaggtgtgtggttgtgtgccctggatctagctatctagttcttagtgacagcggtctactcattgtatgagcaccacaactagaataaggaccacaaggacgtcgaggaggccatcggctacacgatgtacaactaggtcttccgc

SEQ ID NO: 323170 - DNA, 307 bp, Zea mays
atcacacttgactggagtttcgaacaaacaaaatgccttacaataagtttaactttgcaaactgtgaaaagttcactgatgccaggctaccagatatcctgcaattcctcaaaattctgcaatgaagcatgccaagagtatttgacttaataccttgattgcactatataaaatatcaagacatagtttgagtcattgattgatgacaaagttatccatacaatgtgttcaaagatgtcatgttactgatgaatatcattgaagaacttccatttacaatgtcacctattcgtctgcaccacagaaa

SEQ ID NO: 323171 - DNA, 360 bp, Zea mays
cccacgcgtccgcgaggttcaggtttcacgcagtgcggcgagagctggcagccatggagagggggagcccatggtcgctgcggctgctaatttgctgcgcggcaatggtggccatcgcgcttctcccccaacaaggaggccaggccgcttgtttcgtgccgacgccgggtccagctccggcaccgcccggctcctccgcgacgaacacgaacgactcctccgctgctcctcggccagccaagcccagcgcattcccacccccaatgtacggtggtgtcacccccggcagtctccagccacacgagtgcggcggccggtgcgcggggcggtgctcggcgacggcgtaccagaagccgtgcc

SEQ ID NO: 323172 - DNA, 386 bp, Zea mays
ctcgatctgaactaccagggcactgagtttccccacttcagtttgtatcagcgagtgctagagactggtgaaccaacaaacaacctaggattttcagatccgtgcattagaactggccgcacttcattccaaacaaccagatctactagtggaggcaagagagaaagaggaaacccgcctctggttcatggtcgagatgcatctagaggtattcgtggaggaagggggtggtccataggtttcggaggtgggagtggtcgtggtggtatctctgttcctgttgaatctttggaggatgaagcagaagctgaatctgaagctcgttcagttgtggatggaggaactgattttgtacaacaagcagccatgcttgtaagaatgagaaa

SEQ ID NO: 323173 - DNA, 78 bp, Zea mays
aacagtttatgtcctatgtttgtccggtcaaaaaaaaaaaaagaagaacaaaaaaatgggaagggaaaaaaaaaagga

SEQ ID NO: 323174 - DNA, 332 bp, Zea mays
gatcttatagagcttggctttcttcttgacggccagatcgccctggcagtccgatggggcgcgcttcacgccggctatggtggagacgtagactgcgccacgcctaggtgcaagcttgtacttgttgagccaatagacgtcagcgtcggcggcactgcgcttgcccatgccgttctttgactcctcatgcaggacgttctcgaagctttagatgaaggattttgaccgggacgcgaggacgatggagcgaatggccgtcagagatgcgacagatcatcaccatggaaggagaccatctgataggatgcggacgtgctatagtactctgcatc

SEQ ID NO: 323175 - DNA, 89 bp, Zea mays
gaaaacacagaccacacacaattcgattgcagcatgcaacgtcatgatgacggggcggcactctactattggagctagcaacatactca

SEQ ID NO: 323176 - DNA, 380 bp, Zea mays
  unsure (1)..(380): unsure at all n locations
aattattagagtaagtacgttaaataattaagaatgaaaaattaatccttactgcaggatggagcttcatttaggaggagagaacaggcaaggcttggcacgaagctccttgtgctgacgaggagatcgttcctgaacatgcacagggacgtagggtactactggatgcgtctggccgtctacatgggcattggcgtgtgcctaggcactatcttctaccaacttggctacagcagctacagctctatccagagtcgatgtgaagtaatcatgtacactatcgcactcctaactttcatgtctatcggaggatttccatccttcgtagaagacgtcaaggtgttcagaaaggagaggctgagcggncactacggcgtgtc

SEQ ID NO: 323177 - DNA, 401 bp, Zea mays
ctccggggttcggtttcgtgggtgagcggatcgagatggcggcgtcggatgttgagggccgctgcttcgtcggcggcctcgcctgggccacggacgaccactgcctgcacaacgccttcagcacctacggcgaggtcctcgagtccaagatcatcctcgatcgggagacgcagaggtcccgcggcttcggcttcgtcaccttctccacggaggaggcgatgcggaacgccatcgagggcatgaacggcacggagctggacggccgcaacatcaccgtcaacgaggcccagtcccgcggcggccgtggaggccgcggcggcggcggatacggtggcggacgtggaggcggcggctacggcggtggcgggcgccgcgatggcggcggcggctacggccgtggc

SEQ ID NO: 323178 - DNA, 377 bp, Zea mays
gtacacaacggcagtgcctcattcatcatgcaaaaatcactcccgttattaaaaatccgtgtggcagctgcatgccggggcttggtggcatcgtgcctgctggggacagagcaggagctccacagccctgcctggtcaaagttgtggccacgggacaggggccccaagtcccagcctacctcttacacaggggccagctgcggggtggggcgggaagtgaggttcagctccagggacttagtgcctcagtttctccacctgcaaaatggagacgctaatgatgcctcccatagggcggggtgagggtgtatgagattcttcagggagaggttcaaagggtgctggtggccatgtcgtaagtactgagaatgcctggc

SEQ ID NO: 323179 - DNA, 382 bp, Zea mays
  unsure (1)..(382): unsure at all n locations
gcgctgcgttccagagccagccaaagacgacgtgcccgccggagagcaccctggtgggatgccccgccgcagctgccatggacgcggcggccctcggggagaggaaagtcagggactactccagctacgtgacgtacgctactctgcatgactgagccggcgccacatcggcatgcagtaggaaacagagttccttgctgtcattttggctatttgttcttgtattcatgatgcgtgtgcactagtgtgtgttgtgattgttgtctatttgcattgcacgtgtgttgctgtcacatctagatcgtccatttgaactgccatgtccattatttcatgaaaaaagttgttggtgctntaataaagttgtaccttagttatcttc

SEQ ID NO: 323180 - DNA, 357 bp, Zea mays
  unsure (1)..(357): unsure at all n locations
cgactacgacgcanacgtccctgggggctcggcccagacgcgagattactacatggatacgtgaagccggaggcgccgcagccttgacaggtcgagctctgtgcggaggtcctttgaagtcaccgacccaaagccagtgccagtgccagtgccaatacctgttccagtgaccgcaccaccggccgccattgtcaacggcaaggaatcccctgcaatgggcagctcggagttctaccacttccaccacgccgaagacctgttcgaccaccgcttcagcaccaactcactcgtcgagggcttctccgncagcctggacgctgccttccacggccccgcgaaaaaccgccgcggtggcgc

SEQ ID NO: 323181 - DNA, 350 bp, Zea mays
cgcttctgccggtccgcgcttgtgcggtgggcgaagtgctgttgttggtgcgggaagcgtcacacaacctagcgggtgctgaccttggtgggggagcgaggagtcgacacaagggtgagaaccatgagtgatacagggtacactgtgcacgtcactaacctatagagcagagtatgttacagggatctgtatgagtccttttcgtgctatggccctattgaacatgtataacttatcacatcatgagaatacggagctactgcttatgggacatatactgagcgctttgccttgtaaactgcggtattgctaagtgaggctactattgtggatcagacggtatgcataac

SEQ ID NO: 323182 - DNA, 314 bp, Zea mays
tcgacccacgcgtacgagtcctgtgccatcgagaagatcgactattgctgaacggaaacaaccgaaaactggtgagcagtcgccacatcgcgacgggaaaattgaagacatagaccaggtcaatgtgaagctggtccggaagcaagaggacagaagactaccaatgctggacgtgcggcttatctaagctaaccgaagtcaagaggacccaagtttatgaccgcctacagcattcatgcatgctgtatgagaacaatcgtcatctcgacattccaaaacagaacaatcactggctgtaacgtccgaggagatct

SEQ ID NO: 323183 - DNA, 124 bp, Zea mays
agatgacccttttctatatcacggacatgatcacccactccgggacggacatgtcgaacgtgggcgcccgattcaccgacctgttcttttcgcacaaactcttcaacgaccccaccatgagcgt

SEQ ID NO: 323184 - DNA, 333 bp, Zea mays
tccgcaggccactctgcgcgagttgcttggcctgcttattggccctggagagggtcgtggtcttgctagccatcggcgcctattcgaagaaaacttactggcgaagggcctaaggcctgttaggatgccctgtcaacgacatcccaatctatctgcctccggcctaaatgtactctcctaacattcccgacaccacacagatatactcggaggcccccatcttattatgacctgccaaacactaccatgcctagctagatattcaacactcacctattgagctggctgtgcacgactcttgccagccctgatgactctcatatctctcttgaa

SEQ ID NO: 323185 - DNA, 404 bp, Zea mays
acggggccatttaagtacgcatatttgatttgagagctggaggagacaagatcacgcatgctttgagatgtatatgctggaggagcaaggacatccaagtagaggctggtaatcaagcactaccggagatagctgagatcctagctaaaatcaagctgacactgcatccatggacgttgagcttaagaggtggtcatcaagaacgcatacgatatggacacttgcccagttaaaaaagctgaagattacagaaatagtctgcatcaagaagcacatgcaaaagctcaagcattacactttgaacatgaattaccttgaagaagaatgcctatcatgcttcacaaaggcgataagatgctgaacttgtgaagatacaagaggcatcttcccagaggaaagaatct

SEQ ID NO: 323186 - DNA, 153 bp, Zea mays
aaaaaaaaataagataaaaaaaaatacatatatgaaagaagagaaaactcaatctgggagggacaagtagatcgaaggttggctgtgacgatgacgtgttttagtgcgctggatctgattcttgagccctgcatgagcgtgaccatcgtgtag

SEQ ID NO: 323187 - DNA, 386 bp, Zea mays
gtgggttggcttctcctccccctccggttcgggttcgggttcgtgaggttctccggggttcggtttcgtgggtgagcggatcgagatggcggcgtcggatgttgagtaccgctgcttcgtcggcggcctcgcctgggccacggacgaccactccctccacaacgccttcagcacctacggcgaggtcctcgagtccaagatcatcctcgatcgggagacgcagaggtcccgcggcttcggcttcgtcaccttctccacggaggaggcgatgcggaacgccatcgagggcatgaacggcaaggagctggacggccgcaacatcaccgtcaacgaggcccagtcccgcggcggccgtggaggcggcggcggcggcgggtacggtggtg

SEQ ID NO: 323188 - DNA, 411 bp, Zea mays
cgaggattatccctttcgtatttaacatctggttcgtgcgccagctcggcgcggacgatggcgctgtgtcgggcattgcactgcagcttcctctatttatgaactgcatcttatttttaagccgggaggggtttcgacgtgcatgtttgcgtaatgattcccagagtgatgtgttgacttctgaagcgatactaatggtcgcttggatggtaattccagtgtccatcttaattacttctgttggcagcatacttgtgttgagtttaaagagagtgaagctatctgacccctatgcgaaagctgtattgatcatcggatttgcttgtattctggaattactggcggaaccattatacattatttcccagaaaaagaaatactataatataagagtgtacgttgaaccgacag

SEQ ID NO: 323189 - DNA, 375 bp, Zea mays
ggaatacgcggcgcgagccacgcgtgcgcggcattcaccgcgtgcaacatttgtttgcgtcaagaaagcttcgtatatatggcaagcgccttgatctgatacactgatctgcatgcgcatctgctaacccagcttcacggagacactatgggatctcgaatgccttagctttacgctatgatgatatgcctgatgtataggacgacaccctatctgacaaacaaagcttggctaaacgagtggtctccaatgctatagacgagtttgatacttcaagctatggcgataattatgcccaaaaggaggcagatgctgccatcaagaaagcattcccagctagtgcttaaggccaaccgaaagaggtgactgatgcag

SEQ ID NO: 323190 - DNA, 344 bp, Zea mays
gtcgaccacgcgtacgccaacacgtaccaatcgagcactgaatatcgctccattgatatggttctcatgatacattctgtggcgtcagacgacgctggtgcatatgacgacaacgcggaggagccggtaactcgtaacgtggatcccgatctacatgacaactatcagtagctgatcgccaaggaccactagctgatctacgtgcaacggctcggcaaggttctacaatgacgactacaagcacgcttaccagatttccgtgcttaaagtcaatctgcacctcgcgcgccagctccatatgatagacccatgatccgatcacggtataactaagctcttcgacc

SEQ ID NO: 323191 - DNA, 208 bp, Zea mays
gataacacagcgccatgcgatgtatcttgtgacttgttgaattagtgatgcaggatgcctttgttaacaaagctaacgcttcaacttcgacttgagcattactttgattttttgttgaatcgtgcatatctgtatcaatttatttattttgggtttatggtattgtggttcgatcaaattataaacacactaaaaaaaaagagaaaaa

SEQ ID NO: 323192 - DNA, 395 bp, Zea mays
gacgcgcagaagggaacagagaacggcctcttcagcaggagctactaccgagccatgacctggtgccattaacgaagcacatgtatcacaagccgattacacacgggacggccacggaacactgttgatcgatgctgcattctcactgaaatacgtagtggatcttggatgagtaagaaagtcatgtgacgctcagaatgaggattacacggaccttgctaccggagataccaacgacatcgtgtgcctgtgcttcacatgcctgcacagcgaagcaatgataggcatcaacagggcccatgctgtatgacagaaccaacaggtgacagtacttgagctggtaagtagggactgcatgcacaagcacatgggctgtcaagcacatcgatgtactc

SEQ ID NO: 323193 - DNA, 419 bp, Zea mays
gatcccgcctggggccggctgagtggcacttaagcgggccatgccatgcaaccttgggcgctgccaaccgtgggcgagctctgggtgtgcgggcggcctggcgcggcgctccgctgtgtcagcgtgttatgatgccgtcccgtaccaacctggctactggaatccccagtagtaaagtgaaatattcaaggctctccagcacagacgatggctacattgaccttcagtttaagaaaacccctcctaagatcccttataaggccatcgcacttgccactgtgctgtttttgattggcgcctttctcattattataggctccctcctgctgtcaggctacatcagcaaagggggggcagaccgggccgttccagtgctgatcattggcattctggtgttcctacccggattttaccacctg

SEQ ID NO: 323194 - DNA, 364 bp, Zea mays
gggagggcctgggaggcctccatggagtgggctacagtgtgggaaggggcagcgaccataagggtgccttcccagtgagccttgccaaaccgccctgtttaaaagttcaccattccacactccctatccccctctgtgcctcagtttccctgtggaacgtataccatggaacatactattaacctgtcactcaccttccttattgtttgttccccacgtggaggaatggtgtctgacgttagctcgcttgcttgtttgtttgtctgtctgtacctctgctgggccctgtgcttggagcattgcctgcctcagaggtgcatacaatgatgaatgcctgaacagctgaaggctctcgatggacgat

SEQ ID NO: 323195 - DNA, 261 bp, Zea mays
cgctttgcttcaggtctgggctatgttcagaacctaagcaggctgtgagaggtagaggaggcagtattacatgttaggcccagaacaccatgggaaaaggtttatgtcgtgtatcttactgccctgcctagctgcctgtgggccacgctgacttctgatgttcacattagctcgtagctgaaccctgttgctgaatgccatccccgatctcgctgcaactattatatacgcgatgctatgccttgcattgcctgaggtaag

SEQ ID NO: 323196 - DNA, 229 bp, Zea mays
atgacaagaaaacaagggaaagagttaacctgtcacatagcaggttaactttttcagggtttgcagttagaggtattcgaccattcactggctgagccagatcacgggaacttgagagcttttactgtgattcttcaatgtaaaaaataaacaacaatgtcaaactgtgtttatatgatttgtataaagcctttttaagattactatttaaataaacattataccagag

SEQ ID NO: 323197 - DNA, 202 bp, Zea mays
gcactccacgcgtctcatcaaaatactacattagatagttcgaattttcactacacgtttttagtatccataggggtagagagtgaacttaaacaggcgcaaacagcatcaactcataaattgaaaataaaaaacacacaaagccaaatcaacactcaaaaataaccttattgatgaccaggaaagctagatgccatacatg

SEQ ID NO: 323198 - DNA, 414 bp, Zea mays
gctctgctgtggagacagagcagtgaccccaaggagctcacggtccctgaaggaggtgctagagaagagacttagcttctgatactgccaatttaatgtgagaacatggggtatactgcatcatttccattttcatcaataacatatgttttatgcaccttctttacctgaaacttactaagaatctaccagtaaacaaacatcctgtctttttgcaagtatgaatcacttaacctgctgatagttgaagaacactttaggagttttgtattcttgtatatagtttattttttccatgtgctagccaggtaaagattacacagttcttctggactgttaaattgtgcatggttttggaccccttctgctctactacagagagtgaagaagaaagtattaaagctcactttacca

SEQ ID NO: 323199 - DNA, 166 bp, Zea mays
aaccccggcgcgaccacgcatccaagcgactccatgcacgccggctttgccacacgccaaagcaagaccgcgccagggcggggagcttcgtctccctggggggggcaccctcacaaaaaaccacctgctaaaaaaaaaaaaaaaaaaaaggttttcctcttaaaaa

SEQ ID NO: 323200 - DNA, 118 bp, Zea mays
acgcgttcaataaatgtggatggcgcgtgcctctgtttcttcaggttcatgctgagtcttgacatgtttggcacttttggttccctggctggtaccatctgtgacaaatccgctcgct

SEQ ID NO: 323201 - DNA, 345 bp, Zea mays
atcctctcggctagctagctagctaggacagatgagggaggggaaggcgctggctatggcgactgctgcggcggcggcaacgtctgccatggacgatccggacgtactgaactgccgcgacatatcttgctggatcacttccggagtgttgctaccgtcgaccgccattgtgattgtgccggcaccgttcgactagtgcatttaccacatgctgaaccgatcctgactttaccatgcagcgaagcttgagacgtgtgactaggatgacaatgcggtgacgaccagtcgtgtggactgtgaactgtcggacttgtacaataacttcaacagcacactgcacgggac

SEQ ID NO: 323202 - DNA, 248 bp, Zea mays
cccgagcaggtacatagagcatccgagacctcgtcgaggggcgacgagcatacgtcggcccggcacgcgtctcgccttccttcaagctacacccgaggcaggtgctcgatgcttgcacgttcgcgcaagggagaagcattgagaacaggcggaccgacgacgaacaagggtggtgtacgtacaagacgtggtggacgagcgagcatggcggaccttctacaacgaacttcaagatcacgcctgaaggt

SEQ ID NO: 323203 - DNA, 345 bp, Zea mays
tctacgctttcggtggtttccaaagccaagtgtgtgtactagcaaccagctagctcgggcggcagcaggcagccatcatgtcggaggagaagcaccaccacttcttcaaccaccacaagaaggacgaggagcagcccgccggcgagtacgggtactccgagaccgacgtggtcaccgccaccggcgagggcgagtacgagaggtacaagaaggaggagaaggagcacaagcacaagcagcacctcggcgaggccggcgccatcgccgtcggcgccttcgcactctacgagaagcacgaagcgaagaaggaccccgagcacgcgcacaggcacaagatcacggagg

SEQ ID NO: 323204 - DNA, 181 bp, Zea mays
accaaaagagaaagaaaggtcgacagggcacttcttgcctggtgcgtatagaccaatgtgccttaaacaaaaaggtccatatgtctccgagacaactctaaccccgccgccttctatatccacacagtgcagcacctgataaaaaggtgcatgacgttcgggatgagcatgtaggagtgca

SEQ ID NO: 323205 - DNA, 140 bp, Zea mays
caatggaaaggtcgctgatgagtggacatgcagagtgacgccctacgtcatgctgacgatcaccatccctgggatcagaaaccattcatggtattccttctccataataacctcatgagcaatgtattccagaattccca

SEQ ID NO: 323206 - DNA, 72 bp, Zea mays
cacacacattaccaaacagctttctattctatacgaaaatgtaaagatagctcgacgggttactttttgccc

SEQ ID NO: 323207 - DNA, 406 bp, Zea mays
atcagctttgacttacctttgttatgggcaacatactttatgttatattggtattaaaaatcttttaccagacaatgatgaattgctgtttgaattagggtccatttggccgcacacatctctggctctgctggcagctgtggcctgtgagcagatggaggtgcaccaagtgcatatgggcgtctagcagaggatctggagccttaggtttatgtaagcggagccactcttggtgctccgtcgcccttctggcttggtaggattgcctgcacggagcctgcccaaacacgatcttagatgtagatcatagatgacctacttggggttccacatgagtgattttacaacattttgaactagattgtgatttattgttcttgacttcaattttcaatatttatatatc

SEQ ID NO: 323208 - DNA, 161 bp, Zea mays
gtaattcccggcccgacccactcttcctatcagctcttacttacctttgctatgaatcttacatactcaataacatatttataagacaagatttttaccatggctttcctgcataacaatattaacaataatacactcattctctttcttcatattctctt

SEQ ID NO: 323209 - DNA, 150 bp, Zea mays
attcccgacctgaacgacccgaacaatccaatcatactctacatatctctactctacctcgtaatcaactcgcctgatctgacgtctctacccaggggggacaatcccttaaaccttctacacaacctatctactcatctaaccaaccat

SEQ ID NO: 323210 - DNA, 347 bp, Zea mays
atcttatattacccctgcagacaatttcctcaccatttcaatgtacatagccgccagaggagattcacatcgagcaggaaaacagtatctagacgatcattacttacatatatactgaagaccaattaatacacgaattcgcaccctttaaacacgcactacttgtccacattcctgctcattcaccaacacatatgtacgaacaatataccccaattcatatttgcatgtgctagtaaacacctaaacacatacacaatcacaacactcatgctaatatagcaggtgatattattaatgcttcatcttactctgatcatttgacactacatgctcttgaaactact

SEQ ID NO: 323211 - DNA, 242 bp, Zea mays
ccgacgcaagccacgcatacgcgcagctattgccagagcacactctgttttaagtgcatgacatatcgctgcaggacgggtataatgaagacgacgaggctaatgctgagctatctctgcaggcatggaatggtgacatatctgatagctttgatgttaacaggcgaacaaacaatgcctttatgtctaacgaatacactgactgcgagacgatgttactcaacgttcctctactcacgtgc

SEQ ID NO: 323212 - DNA, 258 bp, Zea mays
tcggcagcgaagatggagcttgcacgggccaacgcacacacaacacagctcgtggagatggcgcgggggctagggtgctggcgctggacgcgcactgcatcgcgtggcgtccgggcggcggctactgaacgcgaaagacggatgcgctgaccactgggggcctgcgccgagctgcatacgtgcggggcagcccgcgcgccgacgccgactgctgggccgatgcgccagagctgggaagaccccaagtgctgtgcgtgc

SEQ ID NO: 323213 - DNA, 55 bp, Zea mays
tgtgggtctagatccactgctacccgtgctcactgatgatccgcgaacaggttga

SEQ ID NO: 323214 - DNA, 399 bp, Zea mays
gatatgaattaagtgaatcagatgaatctggtacagaagatgaggagacaacagtcaggaaaaatagggatgaatcattgaagtctggtggccaaagatcaagaagaacctcagcacttgaattggatgatgctagtctcacaccttataagttaaagtttaagaggggtaaaattgtagaactcccactagacagcatgggcccaaggaggctgaaatttacaagaaagtctgcacatgaagcttcaaatcgtgaaagccaaccagctagaaggatttatagaaggaacagcaccagtactgctgttcctactgatgtggaatctcctggcgtgaaactgagacatcaagatgcacaagagaagaaagatgcacaaggattgttcaataatggaattg

SEQ ID NO: 323215 - DNA, 338 bp, Zea mays
atatatcatcactatctagcaatgctgatggctcttattagccttacatgggagataaagggacagcctgattgttctagcaagcagaggggggtgcaacttttcttgcgctgggcaatcatgcaaggcattgcaatgcatctacagaatagataccagcggcaaagattgcgtactcgaatagctctaggaaaggctaaaagaatggatgtcgttgctggcgaaacagctggtgtggaggggcagctcttgctgctatatcctgtccttttcatattacaggtatgttgcgtgtgcaattcgaatcatggcagatccgggtggtttgtcgaactgag

SEQ ID NO: 323216 - DNA, 163 bp, Zea mays
acgtagccttcttagacaatcgtacttaaccgtcgttcgtgatacgtaccgggtcttgcgtatggaacattcaagcggagggtataccatctgctgtcgtactggccttatctacgaggcatggacaatgatgtacgttgtagacactacaggaatggataac

SEQ ID NO: 323217 - DNA, 393 bp, Zea mays
agttgttataatttatggaatctaagtaactagcaaactaattactaaccagtataggaaaatgttgcttgctatcacattggagccagcaattgtattaacactttgggtaggatatgaatattagactgtcatttgtcagaacatcagtaaggcgtgaagaatcagaagaatattcagtcgaagctggtgatgaattaacatgccatattgccatgctacttgaaacactggtcagcgctcgtgcatgtctcaccaactgcgctgcaggtacctgtgtccatgaccaactacaagaaagacacgaacggatgccagttcatcatcaccaccgtggaaggaagcaggtgctaagtgcacatttccgggcttacatacaagcattggagaaac

SEQ ID NO: 323218 - DNA, 280 bp, Zea mays
gctcgagacgagagccagctctcccatcacacgagcacatggcgttcaccaccctgggagctgtcttcctggtcgtggctgcgtccggaacgcccgctccggcttggttaacctgggaaccggaaggcccttttaaccttgaaccaggccctggggaacccggaaccgctgccaactttggacccaagcgttgcccgactgctgttcgtgggaccacctccggtgtaacgaccccggacccgtgaccaacgggttcatggacggtgcggacaacttgcgc

SEQ ID NO: 323219 - DNA, 300 bp, Zea mays
gatgcgttttagcagacagtttacaggttaatgctatactggcgaacctccagccttgtcgggatgactttgcgacttgacgcgtccagatgaataagcaaatgactctaactgaattgtctgctgctatacatgtggattaccgtgcaagggcaagtaacaatccatcctaccgactcgcagctcatgttgctgagaaccgcggtcattcgaaatttcacaagacgaagaggaactgtccatagaagaatttgaacctacctaatttcaaacagactaataataatgaggaccctatct

SEQ ID NO: 323220 - DNA, 157 bp, Zea mays
tcggatcatgtgatttaacatgaccacttgtcatatttggtccctgtatgagatgtgtaatgtgtggggatattttctctctttaatacaaagaagggcagctaatcttgtgtttttgaaaaaaaaaacaaaaattgagaaataaaaataagtatac

SEQ ID NO: 323221 - DNA, 219 bp, Zea mays
tttgacttgcttgaaacaacttttatagtttaaatactgtaaatgaatactactattgtttggatttataaaaggacttttagttgaagttacaagggtaggcctgttgcattggtgggagctgcattatgtttctgatttggtcgcggctgcactgctgtgtatgggcacttgcagggccaaggctttcattggttgacgccagtgcctcacatttta

SEQ ID NO: 323222 - DNA, 187 bp, Zea mays
cttactctagtccttttctagcactttacggacattgaatatcaatgggaagggtcaatcataagcgtaaagtaactcagatataaacgaatctgttactcataacaatcacggtcccaagagtgttccctatgcaatcgtcaacagacacacttccttaacatgaatgggtaaccttaattccata

SEQ ID NO: 323223 - DNA, 343 bp, Zea mays
accgcttccacatggccgagcccatacacgcgcgtctcctcccgctcgccttgcacccgaacccaaggcccaatctccacgcgagcggcacacgacgggtgccctggcccccgcgccaccgccgccgctgcttcgcgacgccgccgtcgcggaacgggagctcctcctcgccggagatcgactggtgcccggtgccgccggaccagcttcccgtgaacgagtacgaagcgcttgcgggctacctgcccttctcctgggccgcggggggcctccgcgtctactgcgtccgtctcgtgctcacgggcgccggcgtcgagctctttgtcgggctcccggtcgccga

SEQ ID NO: 323224 - DNA, 70 bp, Zea mays
aattcccggcccgactctaccctgcctctagctagttgctctactagatggcttttatagagcttcctgc

SEQ ID NO: 323225 - DNA, 296 bp, Zea mays
tattcatacgagcttcgccctctctcttttaccccttctcatctcctacgctagggctggctaccgacgtgagttagccgaccaagtcgtacgcgcaggatcgcctcgtgcacctgctgatctagcgcaactcacacgaactcattgtggatctctgccttgccgtcgagctcctcacggtatccaccctcgacgaggtagtgtacaaccgctcgactgagttcatgtggctgttgcagaccgccttcctgactgacaccttttgattcatcatcaagcaaatgtggttctacact

SEQ ID NO: 323226 - DNA, 60 bp, Zea mays
gttcttactgccatccattgaaacaagatggaagtcccaatgtcggccaaaagaaccggg

SEQ ID NO: 323227 - DNA, 84 bp, Zea mays
tcatgaatggtctgtgcattctcatagtgaactcttgaatacttctcaagatagggaaggtgcccttctccacaatgcgaccca

SEQ ID NO: 323228 - DNA, 323 bp, Zea mays
caactaggcagcatacagacgactagtctgttggtcacctgactaacaccagctagcggctcggtctctcctgcaataatggccgatcgctacttctcctaccagccgcagctggacgcggcggcagaggtcctggcaatggcgctgctgctgcaggcggccacagccgggacggcgtcggctgaagtgagctgcagccaggtgacgtactccgaggcgcccgacctcagatacacgatgagcaacacgacgtcaccctccacggcgagctggaacggggtgcgctcgctcaacatgcgggcggcgacagcggcggaccggca

SEQ ID NO: 323229 - DNA, 159 bp, Zea mays
tcttcctacagtcactaatctctaaaaatcattccaaacttttaaactattcactggggcaagctatattacctactatcaaagctttccacaccatttcatcatcaattcactcacaacatatcttacatctacaaagatctgactaccacccttctt

SEQ ID NO: 323230 - DNA, 70 bp, Zea mays
ggaggccgcgcctaccaccatcaccgtccaggtcaagttcgccgggcggacgatccccgtggaggtcccg

SEQ ID NO: 323231 - DNA, 220 bp, Zea mays
tcgggactctgggatcgaattcacagcatcaaacagtgtgaatcctggaatttccaaacccaaacccggccggagattccttccggaagccgacagggccccttgaccggcttcgtgccctgcgcgccttcccaactttttcggtcttcggttcccgtgcccgcgaaagcgaattgcttaattgaaggtgggggctcgtgcctgaatttgaattttgggg

SEQ ID NO: 323232 - DNA, 399 bp, Zea mays
catttctacacgccatgaatacatgcttatacctccatatcgcagatatgctggcgctggtcaccagctgcgctgctggcgcgagccccagcactggttcgttggaccgatgggtcgtctttcagctctattagctcccgacgacgtgcttgcacaacggtcttctgttggatgccgagctgcgatacctctatcgcgctggccaaggacacgctagataagtctatggcagcggacaacaagtcctctaagagtgtccagagtgaggcgcgcaccagttcctgcatgttcctcgagaagaagcacgatgaagtaccaacgacgatataggagaggatatctgcttggacattacattcaccagactaatggcgatagccattcagagattacactacc

SEQ ID NO: 323233 - DNA, 113 bp, Zea mays
gacgagagccagctctctacattacacaatcacatggcgtacaccaccgtcgtctatgacaaccggctcgtggttgttttcgacacgcaaactcgcaatggcacacatcgtaa

SEQ ID NO: 323234 - DNA, 144 bp, Zea mays
tcacagcagaagtgctcaatttttgctgcggagcccacaagtatgggcaccacaatgaggacttcatcgccatctactttgcttcttgcatggaatttatttgggtgtcattgctgcatatggttgccgtagacatcctaatgc

SEQ ID NO: 323235 - DNA, 97 bp, Zea mays
ccggggcgacccacgcgttcgcgctcgagacgagagccagctcttccagcacacgagcacatggcgtgcaccacccgccgggctgtcttactgctcg

SEQ ID NO: 323236 - DNA, 318 bp, Zea mays
gtcggaaatcagcttcctcgcgtcggccagcacgcgccgcctggccacattcccttgtttctctggtctcctgcctcggtccagctcttctctgaatgccgcggtggcccatcgaatctctgactgaactgatttccggttggtgcgtgcctttcttctctggcacggtacgcgcagtccgtttcgctgccggcgaacacgcatgcagaagcagactcgtcttatcgtgctcacctgaggcagaccgtcgtgcccgccgtgcccgaggtagaacgagctagcatgagcagccttcaaactgcctgctcgtcgtgggac

SEQ ID NO: 323237 - DNA, 242 bp, Zea mays
cacacacacacacacagacaagtggtttccaaagccaagtgtgtgtactagcaaccagggagctcgggcggcagcaggcagccatcatgtcggaggagaagcaccaccacttcttcaaccaccacaagaaggacgaggagcagcccgccggcgagtacgggtactccgagaccgaggtggtcaccgccaccggcgagggcgagtacgagaggtacaagaaggaggagaaggagcacaagcac

SEQ ID NO: 323238 - DNA, 410 bp, Zea mays
ctcagaacacacacaccgcgtgtggatgtctaagccatcgctgtccccatctgctagggcgcgggggccggacggggactcgatcatgtacaagcgtcggctccagaagcgctggatgcagtaccggaagtacttgcagcatcccggcgtgcagtactggcactccgagaacgaggtggtctccgaagacgtggtcgtcgaggactagagcgacatcaaggtggacaacgagctcagacgcatgcagcagctcgctcatgtcggaacgatcgacgacgggactttaggactctacgagaagcacgtggccatgattgacctcgatcacgaacacaggcacaatatcacagtagaagatcatagcgctgctgacgtttgtgccggcggttacgtattatagcagcaccatt

SEQ ID NO: 323239 - DNA, 294 bp, Zea mays
ttcgttctaaccctccctgcgactcttcgacccattactcgctatggactcggctggggtgctccagctaatcctgggcgtgacgctcgacgcgcttgtgctgctgcaggactccgtggagttacgcgctcatcgagcgcgcccatcattcgctgaacgagctagtctacgctcctgtcgtcacctcttgaaaacatttgctcgtggaattctgcacacgtgtggcaatagcccccatctcaaacgctgtacataagtctaagccacaatatgtaccagtcttcactaaagatc

SEQ ID NO: 323240 - DNA, 445 bp, Zea mays
  unsure (1)..(445): unsure at all n locations
cccacgcgtccgcagacaaaagatggcactataccagtatctttacaaggatagcagggtcgcatatccatgtaaagatactggtatagtgcagacaaaagatggcactttctgctcgtgcatgcttcgaaattctattgtctgtacgccacataatggcatgttttatgctgtttgtggctttcttgacttgaatgctaattcgcttctacatagaagtgatggcagtttccttagctacaaaacctattttaaggaaaggtacaaccttgatttaagatgtgaagatcaagctctcttggaagctcgtaaacttgtggaagtgcggaactttctccacaagtgtaactattaaaaagaaaaagaaaggagtggtaagagtgtggttgaattgccacccgaactgtgcatangtgtcatgtcaccaatgtccgcaattactttg

SEQ ID NO: 323241 - DNA, 408 bp, Zea mays
agttttcccagtatctgaatgagtgctctcaggtgatgagagctacgcagaagattggggtgttcgacatgcattaactgcttaccttgaatacattgcgtacctatatcagaagatggatccgattcctgagcaggtacgcattgatactaattacagggacttttggcagtatgactcgtgcgcctctaatggacaatttggaagctcaaacttatgagacatttgagaaggatgttgtgaactacactcagccggagaattttcaaagtaaaatgttcggtgaacaggatgcagaaaaagttaaaagctgcaacgataaggcaaacaaaatgttcccaaaggtgccctcaaagatcagcttcaacatagttctgagccaattactgaaaacaatgatgatatcac

SEQ ID NO: 323242 - DNA, 420 bp, Zea mays
agtgttcccactatctgcatgagtgctttcatgtcatgagagctacgcacatcattggggcgctctacatgcattataggctcacctttaatacattgcgtacctatattagaagatggatccgattgatgaccaggaacacatcgagattaatctcacggactctttgcagtatactctgcagcctttaatggacaatcttgaatcttatacttatgagacatttgacaaggatgctgacaagtacactcagccggagaactttccaagtactatgttcagcgaacaggatgcacaaaaagtcataagctgcaacgatgcggcgatgaaaaatgttccaaacgtgccctcaatgatcagcttccacatagttctgagcatattactgaaaacaatgatgatttcacacaattgtagttt

SEQ ID NO: 323243 - DNA, 308 bp, Zea mays
aaaatcaataccctggatgacacatatatagcgagaggcaaagatccttgcgaagagtgtatcaatcacagacaatctcataagctagctcctcacaggctcgtcattcttcacaccgaagtacctgtactatatctcgcgggtcctacaatgtcaccatgtgccacatattcatcatgaagcttatgcagctgaaaatagtagaattccacataccttgccttgtcacgatcctagaactgcttaacattacactgtcaaccacacaacttgtcgtactgatgcagatctacaaaggccagactgtc

SEQ ID NO: 323244 - DNA, 139 bp, Zea mays
cacgacctgctttcaccctctctactaaacaatccactatcgttagcctcaagcacaaactaattttcatcaatcccctcaagctcacattcctgacataatatctcatcacccagatctactcatgcactttctcaca

SEQ ID NO: 323245 - DNA, 362 bp, Zea mays
tctttgatcaatggtttcaaatatctttcgaatatgatcaacatgatctgatccatcggcttggtaatgttctacggcgatctcttctcagaaggctcaactctaatccagaaagagatctacctccaaagtactaatccatactcaaaggctctatatctcacacgcagaagcttcactattatactttacatctaaattcttctgatgcaagccaatccagttctgaatacgctagcaactgccaataaggctcaataaccatctcattaaactggtccaattctatccgaccaatatttctatcgcatgataaaactaaaggccttgaaagaatctaatcttgctttctctcaacatgg

SEQ ID NO: 323246 - DNA, 441 bp, Zea mays
  unsure (1)..(441): unsure at all n locations
ggcagtttttaattgggtccaagtaatgacattgttaatgggaagtttttgtgtatactcacgccaccaaattaaagcaaaatcagtaaattcactaatggcagccttcacttggctattagcaggaatatcatggcatgaaaatttctgttctacctctaattcccaatcaagatatgcagcaggatcatatttaccattaaaagatggaattttaaatttaatcttagaaaataagtcattagggggatgacgaaccacacgacgtgcacgaccacggcgatctccatcgtcctgctcagtgtcaccgccgtattcctgctccatctttgtggtcaatgcatcaaggcgtgccaggatggtgtcgagtgtggtgcgagtcgccgtttgagcaaggtcaagttggttgaaacgctncgtcgtcgaaatgatcggtggatc

SEQ ID NO: 323247 - DNA, 243 bp, Zea mays
aattccctcggctacccactcatctctcactctattaaatctattactactaatttcattgctaaagacaaatctatcagcatagttactctaaaaaattgaagcgcaatcaatcaatacactaatctccaccttcactacactattaacaacaatatcatatcattaaaattccttatctacctttaattcccaatcaataaatacatcataatcatatttaccatttaaacattcaatttt

SEQ ID NO: 323248 - DNA, 372 bp, Zea mays
gaaggattcggtggaaagtgtaataaagcagataagtggcattgctatttccgagtcagatgcaacgccgtccacagatactacaaacaattcacaaccggaatcatctgctccagacatagataagaaaattcgagcattgaaaaagaagatacgcttagctgaagcacaagtacaaggtgaccctgaaaaattgagatctgaggcactggaaaagatgaaaaagcttgatggatggcttatggagctgaagcttttggaggacaagagagcgcctgctgcttagacaaaatcaacttcggttctgatgtagagccaccgcgaccacaccatggtgccgatccagattcgaaagtgcaactgaatcaccat

SEQ ID NO: 323249 - DNA, 251 bp, Zea mays
cctcctcttttacacatttttactattaacacagatttctatctacatagcttggttcctttttcagttgctagtactattctatacacattacattcaaccatttaccttcaatcattccatctatcttaatatcctaaatccacaattatcaaaccatattttcactcttttaacttcattaccaacttcacttaacatttcaatcaacatatctcaaattcatatcaatctaacttattatttcaatt

SEQ ID NO: 323250 - DNA, 437 bp, Zea mays
tcgcggactcgtgggctgactcgtgggtggatccaataaaatgtggattgaattgtaatgttaattatctagctgtgtcatgttgtatggttgtatgattatgatttattctgaatcctgagtacctggatcgcagttccaaaactatttagatttagaggtacattgccagggaaacttgtgacctgtttgacaaataatcatcatgtgtgattataattgtgtgtgttcacaccatgacactttgatactatggttacattttggtctccgttgtaacccaggtttcattctgagatatggaaattttttgtggttgtgtttccctggcgtatagcttttctttctgtaggcacctttttggatgcctgttcttcaaagatggtgttaagacatgacaacattatgtacctatgtagtgctagactcatactcag

SEQ ID NO: 323251 - DNA, 238 bp, Zea mays
ctccatctcgaccgtcgctcaccgggaagctactctacgacgtaacatggcgtccagcgatcggccgcgcaacagaggtggtcctgcgcccattgaaaactctgatgactacagactcgcatatggccgccctcaagatgaatatcgtcaacccacacggcatctacgacgcgctcgttgcgtgaaccgcaagaccaaatgctcccaacacgacattcagctaacgagccatggacat

SEQ ID NO: 323252 - DNA, 258 bp, Zea mays
tcgcaaaaatatcattaaaggcatccaaggtttattatctcttgctgaaacggcaaatgagacagggtttcaggacctcctgctgggaagccatctgtttgataggttgtcttgactgctacaacgcagagaggttgaaaagaaccacgtgaggtcctagaccgtctctctggtgatgaaattggcctgcactggacgagagccatacgttcataggctcctggagcttaatactcgtcacgagcctattgacattct

SEQ ID NO: 323253 - DNA, 192 bp, Zea mays
tcttcctaaactatctctatttcacattactactcccatctctaccctctctactttcggcaacgattcacacttaactttgatggctacagactcatcctgtcgattactctaacgctctaacctccatgcatactggtacttgcatcaacgtatctacccacttcaatcgaatataaagcttcaaacatc

SEQ ID NO: 323254 - DNA, 324 bp, Zea mays
cctgaattccctcggctacccactcttcctaaactatctctatttcacatcactaaccccatctataccatatctactttctgcaacgattcccactcaatcttggtggcttcagactcatcctataaatcactctaacgctctaacatccatttctactgctaatggcatcaacgtatctacctatttcagtcaatataaagattcaaacatctcacatcataagtgtaaccaatcctcatctactcaatcatcagactctctttcaactgctctatatgatatatctcaaatcgctctctttactctaacgcatgctttcca

SEQ ID NO: 323255 - DNA, 344 bp, Zea mays
agtgcagatcactgacctcagcatggttcaacttcctgatgaactacggcgtgaccaggtgggctagctccccgacgcggatgctctgcacgttcttctacttcgtaccctactactccatcctgagcaaggcatctctcaagtccgacgacatcaacttcagcgtcgatctgctggagctcatgaccgacctgaaacctatccacaagtcttcattgactagggccgacaagagcctggctctatgggctacgtctactctgctatacatcccactatatgtcacgagactctcggacactacgctgcagtgcaagatccctacaattgagacgcatatcatg

SEQ ID NO: 323256 - DNA, 342 bp, Zea mays
tgctgctaccactcttcctatattaacccgtacaatttcttagttctctacatcatcacccaataccaccaggacggtttcatctatctgttggagatcctttccatccacttctcctactatatctacctcgttcagcacaacacctacgtgtgttcctatacacgcctatcctcattacacgttcatacgttctcatcacgcaatttacccacatctataatctcatgtacgccatgaactatgacccttatcttcatgaacctatacaactcttccacattcccctacacccttactttccccaacaccttcgacatctgccatatcacctacatcacc

SEQ ID NO: 323257 - DNA, 232 bp, Zea mays
ttcccggctctacccactcatcctctcgtcgtcaaaaaatccccattcgtttcccttctcgcctccactatccttcgcaaagttccctctcagctcttgtccgaatctcactctagccctaaccaaatcccatacccatcccagccctatccacaccaaccagctcgccagctaccatttttaacccgtacaatctgattatatcatatcttctacctcaattacacctttc

SEQ ID NO: 323258 - DNA, 448 bp, Zea mays
tcgctcctggagagctcctcctcccggatgccatccccgtgacgctcccagccgcctctcgcgacgccatccccacgagcgccttctccgacgccgtctccgctccgccgcattctccgacgccgtctccgctccgccgtcttctccgacgtcgtcaccttcccctcgacaagatatgggttcttgggaggagaaagttagacaatttttgttagatgaggaagaagacgacgatgagttgttctttgttattctccctgctataattccatacctctcagaagagaaagagcccatccacacctactcactcactggtgctaaaaagcttcctagctctatccaaactcataccaaaattgcaacagattataggttcatgccattgtttcagaactgcattggtgccatcgacggcacacatatacccatcaccatagcataacat

SEQ ID NO: 323259 - DNA, 213 bp, Zea mays
cggacgcgtgggctcctgctcagagtctcagttcgctttgttgtactagagcgctgagcagagcgttcatcgggggggcattaccgtccgaaagcgaggggtccacgatgctagtactgctggtcctggtgcgatgctcatcctccctcgcccaagaaggcgttctctccgacatgccgccgtgcaacaagctggagttgatactggcggggc

SEQ ID NO: 323260 - DNA, 332 bp, Zea mays
ttaattcccgactcgagccactcattcgacgtcaccttctttttttttccttcattcatcatacattcgtcagcctttcctgaaggaggactatctcttctagttggctgcaacagtagttgtgctacaattaggaacattttccccagcatcaggattacattcgcacgatttcaacttcattgactatctttcgtgcacgtgcaactacgctgttggatatggaaactgttcattcaagctctcgtcaacatacggagataccttatctcaccatgccaccggactctcacactaacttcgcctagttacagactgtatctcagacacac

SEQ ID NO: 323261 - DNA, 169 bp, Zea mays
tcgggctctccccaattctaagcgagactgtgcacaggaagaggagagcctaaaagcctagccccccgaatcggatgcggccgccggagcgcggaaccccaccccggccgccatggaaaagggagggatgagcgacgctgaacggctggtcttcttcgagatggcctgc

SEQ ID NO: 323262 - DNA, 93 bp, Zea mays
tttgtgatggatctaggggcctctttgtcaattcattcaataaacaaagtgtgaaatggaagcttaatgtgctggctgtatcctgctaaatga

SEQ ID NO: 323263 - DNA, 58 bp, Zea mays
ccgcttacgagcgcatcccttctccctcggagcggtcatctactggctcgtatctccc

SEQ ID NO: 323264 - DNA, 379 bp, Zea mays
tcggacggatctcttgattcagatgtcgaccatataatggatacactattgacgctcaacgagaggtcaactcaagctcatgcaggcagatcacaatctggagataacgaggggtactctacctccaacttaggactggtatgcatacatgctcaacttatcatgctctttgacagagacgtgctactacctgaccgtctatggcaactagtcatgcaatctccatccaccatactgcgagaccttattacaccgcgccacctggcgcgcctacaacgcgcgcctaatggtggacttcatcgcggacacactcggccttccgttcgtgcgaccgtatctgagctgacggatcgcggatgacttgcccggctgatccaac

SEQ ID NO: 323265 - DNA, 331 bp, Zea mays
tcgtgaactcaaaaggtttgtttgagaaaaaattgtcccaagattggattgcttgttaaagctcaatattgttaaaaaaaaaaaaaaaaaaaaaaaaaaaaaaaaaaaaaaaaaaaaaaaaaaaaaaaaaaaaaaaaaaaaaaaaaaaaaaaaaaaaaaaaaaaaaaaaaaaaaaaaaaaaaaaaaaaaaaaaaaaaaaaacaaaaactaaacaaaaaaaaaaaaaataacaaaacggggggtctattaaaaagatccaaattatccttcaaagtattgccactaactcatctatatcaatggacaccaaaattaaccaaatggcccgctt

SEQ ID NO: 323266 - DNA, 137 bp, Zea mays
ggtgtgcaaatcgcggcagtcgcagttcctgagcaacggcgatccggggacctcgggaggcctgtccctcgcgatcggcggcacggtcgttggtcactggactaacaagctgcaacacctgaagcagcatatgctgc

SEQ ID NO: 323267 - DNA, 449 bp, Zea mays
  unsure (1)..(449): unsure at all n locations
cggacgcgtgggcggacgcgtgggccattttttccctggtcgcccacttccctggtgctcgcccttgcacttccctggccgacgcccctccatggtcgagctcacccctgcagggtgcccctcccatggcgcctagtcctcttcccatgtcgagctcgcccaaccaatcgtctccatcgcaggtgctgtgttccccttccctttcctcaagtttggtcctcggcgcccaagcttctatgtccctacagcacgcacgacgttgcccctacccccatggtcggccgacctcgtcagtgagcccctggcgctaccctgcagctcgccctcaagcctagggtctcgctgttttcctttgccccacgcggatgctgtagccgggctatgtctctccctgtcgtagcaccccgcaaatgttntgtcgtcgccggtttgtcgtggaagaggaaagt

SEQ ID NO: 323268 - DNA, 160 bp, Zea mays
gagggtataaaatttcttctccaaataccaaccaaattcaggggttacctcttgtctctctctctctctctcttttccttttgattaaaagtaagtgaattaggcgagggtttaattatttattttgtcaaaacttatgtgagtcatgaaatgttgcatc

SEQ ID NO: 323269 - DNA, 378 bp, Zea mays
ctaatgtgcattcgccccatgtatacacaaataacgtttaccaaaaatcttgattacagatgtgttcctggtgagtataccgtacggttttgcttaggaaatggatgtgttcctaatgggtctgtcgtacggttttaccgtggtccattgaataatagtatctcacagcaaaaaaaaaaaaaaaaaaaaaaaaaaaaaaaaaaaaaaaaaaaaaaaaaaaaaaaaaaaaaaaaaaaaaaaaaaaaaaaaaaaaaaaaaaaaaataaaaaaaaaaaaaaaaaaaaaaaaaaaaaaaaagggggggcccttttaaagggtccaagttttttttcccggggtttcaacccttaaacctttttatagggggccctaaaatta

SEQ ID NO: 323270 - DNA, 375 bp, Zea mays
cggacgcgtgggcaccgttgcgcgggtagccgttgggagagattccagagaggggaagtgcgccgccgccatgggcgactggctgccggcgtcggtagatcctcggcgactggttggagcccctgccaagccctcggggagaggcgtctgtggtcttcggtgttgagaaagccgaccggagctgcacaattgctcgacggagtaccaacaccgtcgttgattcctgtgctgccgtgggcagcgtcgtctgcgccttgaccattgatcggcagtgaggtcacgaggatctaaaaaatcaccctggtacctggagtctcaagtgccagggaggttctcgggttgattttgctgcgatggcggtcagacgggagattc

SEQ ID NO: 323271 - DNA, 228 bp, Zea mays
  unsure (1)..(228): unsure at all n locations
cgaggcgtgcttcacggagcacgacgtggcgttcggcaaccggcccagactgaccttgcaggcgctggccttctttggcggcgccgcgctggccgtgtctagctacgggccctactggcgcaaccttcggcgcgtggncgccgtgcgccttctcttcacgcaccgcgtggcgtgcatgtgccccgtcatctcgggcgaagtgcgcgccatgctgcgccgggtggggcg

SEQ ID NO: 323272 - DNA, 348 bp, Zea mays
gcggaccgtgggtgagtatatgggtgtaaacatttcatcgtcatgaatcaagcctatatggatactgcattgaacatgcacttgtacaatacaactgaaacatgctgcaaggtcaaaataggcatatactctgagactcacattaaaacgcgatatcaatatataattatattactatccccaatacatgttttgaccactttaaacctcaggtccacgaaacccctggttgtcacacttcaacagatcctataaaccccattatgctcagttcacgtagtatataaagaccctgaagcgcccgaccttacaaaagattgttaaccactaagacgaaatggaacacat

SEQ ID NO: 323273 - DNA, 369 bp, Zea mays
cggagtcttacgtgcactcgtaccggaaccataatcgggattaaagactgggagggaagctcctacgacatgcgctggacacatacttatatcagacttaagactatacttcaacggtaattgctactgatattatgggaaagatgaaacatactacacatacaaccaaatgtaacacattacagaactcagaaacgaacacacatgtgtgtgcttaatccttcagtcatgttatgaatttgatgaactatagcccagcaggctcctctggccgtggaagtttccaggcaatactggagtgggttgctatttcctactccaaggaaactcatgtacaaagaggcaagaacatacaatggagaaaagaca

SEQ ID NO: 323274 - DNA, 457 bp, Zea mays
  unsure (1)..(457): unsure at all n locations
cgtcgaccccgccgatgagatcgccgccggcagcttccgccggtccagctactcccggcccgtggcgtgtgtggccgccaccgtcgcgctcgcgtcgtccatgtgctcggcatgcggtcgcaagccgaaggcggccacccgtgcagacccggccgcttcggaccagtccgccgggacgggctcgggctctgtctccggcagcggcggaagccaggaggctagcgccgaggaggcggaggaggaagtggtgagactgtcaccggagctggcgacgcacggcgccatcgacccggtgacgctgtcgtcgtcgacatcgaagcggcgcctgtccatcagcgtgagcaagaagctgagcatgaacatcccggacaagctgcggctgagccggcgggagcacaaggaccaccaccaacagcagcagcaccagcacgacgccccgggcgncttgcacgcctcg

SEQ ID NO: 323275 - DNA, 424 bp, Zea mays
aaaaaaaaaaaaataaaaaaaataaaaaaaattaaaataaaaaaaaataaaaaaaaaaaataacaaaaaaaaatatatataaaaagtcaaaaaatattatattataaaaaattaaattgggttgcctcgttttatggtttccatttttttttccccttaaattcaactttttagctttttttttgttccccctaatttctattctttgcccgtctttttacaactttttgttttttaaacctttggcttttcccaattttttcgctttgcataatatctctttttctcccgttgttttaatcctttttactcctttactttttgcttttcccaccatttttccatctcattttccaaatgtaatcccccttttactttcactttatccgcttcttttttgggggtttttcccatttttcccttt

SEQ ID NO: 323276 - DNA, 241 bp, Zea mays
cccacgcgtccgcccacgcgtccgcccacgcgtccgcccacgcgtccgcccacgcgtccgcccacgcgtccgcccacgcgtccgcccacgcgtccgcggacgcgtgggcgccactgcgctgccctagaaccttcgccgccgcccctctttaggattaccgtgtccccgatcgccccctggcacgcccgccccgatcgccccctggcacgcccgccccggatcctgcaccggaattccgtgt

SEQ ID NO: 323277 - DNA, 462 bp, Zea mays
  unsure (1)..(462): unsure at all n locations
tttcaaactaatatactcttctacatctttggggtatcctcgattaattgttcaggtctgatttgaataaacataatgtaatatgtgtgtgtgtgcaagaataatacaacttatgataaagttagcgtggtgcaacaataagctaaacaattatcctaatagtaaacatgtgtattgatattccttttttttacgaataggttccatgtttttggaattggaacaaggtcacttgggttcaacatcagggtacaagttaagaaaggttcatctgtatcggtaggatttgaaattctgcataagagttccaactagtatcacgtgaggactaaggcataaatcatcagattgctcatgccagtttcttgcttggttaagcatacattcccatgatctgtgctgagaaagttccacaaccttactatgttatttgtntattttgaaatcgttcttctttctaga

SEQ ID NO: 323278 - DNA, 55 bp, Zea mays
ccggcggcaataatggcctcggttccggctccggcgggtgaatatacatttatat

SEQ ID NO: 323279 - DNA, 105 bp, Zea mays
cccacgcgtccgcccacgcgtccgcccacgcgtccggtgtctcgggggtatctcggtcggaaagctgcggcctattctttaggattaggaggagccgtatgaagc

SEQ ID NO: 323280 - DNA, 306 bp, Zea mays
cgtgtaagcacggacagggactggcgctctcataagactagctctcaatctcaggtcaagatcggtactacgaacaagcacctgctgtagcttctggccgccctttacctacactagttgaacaagaacgcactcgagggttagcggatgcttccagtccatgtctgcgttgatctactactgctgatagtactggtagatcaaacactaggatttctgcgatcgaatctacacctgtggatcaagaccgaactggactattcgttttacaatcaatggtacagggatttcataatcaaagtgcat

SEQ ID NO: 323281 - DNA, 257 bp, Zea mays
cgcggagttaccggtgatctcgtacgatcccagccgtatacctcgttccattcaaaggcgcccctggcctaggtgactaccagaagcgatccatacttcattctcgacaacgtcaactagcgacacgtctgatctgaattacagacacacagaccattcaattttcccccaccgcgaacgctgcgtctgcaaagcacttcaactacaacgaacacatgtgtcttcgatcgaactactataagactagaacagcgccg

SEQ ID NO: 323282 - DNA, 464 bp, Zea mays
gagccacgcgtcacgcgtgcggcatgcatattaagaggaagaagaagaagatggtccttaaggagcacgctctaggagaagctatcgctcctcagggacagctgccacacgtgcggaccgaggactgcaccggcactcgcttagacgcatgctcagcaataggaggtagtgcacaggccaaacgactgcttggccacagatgtgagatctatatagcacgtaaatactcgacgacctggatgacatccaagcctacacgtagaccttgtcccttcatcatgacacagagtcggtttctggcggtgcattatacgggagcattgctaaggagctcgggaacctagtcagtctcatgatgctcgttgagatggactatgtagtgtcatgacctatgcgatgagacatatacatttacgcaagacgtgtgctcaatttaactgacgtgcatgtacatatcagatcta

SEQ ID NO: 323283 - DNA, 463 bp, Zea mays
caatgtttcatgcatcatcataacccatttgaaatttgcttatttttttaccaagctaatttatgttattactacttgaccatacctgtccgtatgttgtttcaggaatttacagagaattacttagcagggccttcgccatcgttccttgttccttggagaattgactgctttgcaacagatgtgagatagatttaaaacttaaattactccatgatctggataacatcgaaacctaaacctaattcttctcccttcatcaacacacaaggtcggtttctggcaatgcattatcaggaagtattgctaaggagctggggaaccttgtcaatctcataatcctgtaagaaatggactatgtagtgtcatgacctatctgataagaaatatagatttacaaaaaacgtgtcctcaatttaactcacgtgcatgtacatatcacaactattcaggtgtgtaatca

SEQ ID NO: 323284 - DNA, 459 bp, Zea mays
cccacgcgtccgttctctttcactaaaggatagatgtggcctcacgaccagatgaagcggccgtgatgaagactatgcccgtcggagatcaagcgaagccactacgtccccggctcgctgatgaagactcttcggtcttcccctcagagatcaagagaagccactaggtgaactgtgctgagaagcaaagtcaaacaagaaataaggagaaactggctcattcacaagacatggagttctgtctatgaagactgtgtagacactacacagaaccatatagcatgaaatggaaagcaaataactgaaccacctttaaatggaaaaactattataatcaaactagtcaagggtgttttagactttgggtatgccattatgaaggtgacgacctctataaatatcccctaaatatattgctcatagatattgaatcaatacccaatagagcttattcttgca

SEQ ID NO: 323285 - DNA, 209 bp, Zea mays
cgtccgagcacgcgttagctgacgcgtttgctctcacatctatacactcgtactgaggcataggctcatatatagagcctgagcggtcaaataaaaacccgattctatagcaactctacacactcgaacatggccggtctaaggattaacaacgaaatcgtcatcgtaataggcaactaactactaatataaatgggatgcatttaaat

SEQ ID NO: 323286 - DNA, 52 bp, Zea mays
cggacgcgtgggcggacgcgtgggcggagcgtgggctagttctagatcgcga

SEQ ID NO: 323287 - DNA, 99 bp, Zea mays
cagacgcatcaggacctctgggtctacgtaccagggatgcttgagcagattcgaggacgtttttgtcttttgaaaggcaatactggttcttagggaccc

SEQ ID NO: 323288 - DNA, 371 bp, Zea mays
acggactggttatagatcgtaggacatacacctttcacacttagaccctgcgtatgaactgtattcgcgcagagacaacttgcttatcaggaagatcacggagctacaatagactgcatcatgggccgaccccatgctgctgatgctcagaaagcatattaatgaactgtacaagcacaaaaagggctacccttacaacctgatcatcgcatgactgcaatgtaacgagacctgcggaaacaggcttgctagagcctttaataaggctcctgaccggacttttttccattaaactggtgccaacagctcttacaacactgtcgttccttgtggacgtacttgtacatgaaactgcgatgatagccaacctt

SEQ ID NO: 323289 - DNA, 118 bp, Zea mays
aaaaaaaaacaaaaaaaaaaaataaaaaaaaaaaaaaaacataaaaaaaaaacggaatggaaaaaaaagaaaagaggcatatcaaaaaggcttaccaatttaaaagggccctcctttt

SEQ ID NO: 323290 - DNA, 190 bp, Zea mays
caaggaccttcggcgcccgttcaggatccacatcttcccgagcgagttcttggttgagctcttcctcttcggaccacctccaaggctcttggtgtagcttgccactctcaccaatcaagttttcatgtctgatctcgacattcagatcccaactgccttcgatcccttcgctgaggccaatgctggggac

SEQ ID NO: 323291 - DNA, 54 bp, Zea mays
agccttccgcgacacccttggggcccggcttaaacgacaagattcgccattgcg

SEQ ID NO: 323292 - DNA, 78 bp, Zea mays
cccacgcgtgcgcccacgcgtccgcccacgcgtccgcatagactccctccacgtcgatggctacgccttcttcggcgt

SEQ ID NO: 323293 - DNA, 290 bp, Zea mays
gcaagacattctcgtacatcaatacttccacagaatctctgacacatattagggacgtttcaaaattgaggtggacatgagatagatctatgctgatctgctacgagatcctgattaaaccatatcatattgaccgcaaacagatcattgctcgcagcgaacaatgaaattaactaagcttctcaatcatacatacctatctaaatgcctgacgactttctacactagcttctatgagctaggacattttgtaaaaatgaagaagaatagagctggtggcacttttaact

SEQ ID NO: 323294 - DNA, 406 bp, Zea mays
cttttatttaaaaaaaaaaaaggtatcttattatatatgatgcagtgctgcttacaagaagcagatggtacattactacatttcaaacttcattgcaaagtagaatatatatggacataagatcacatggatgttgctccacactttttagcacacacagatatacaacgcaaatacacattgattgccttctctggaggcaattcaccacacgtgcgttcctttagttacccccaagaggatggcaacggcagcaacaacggcagcaattgtgcaagcaacgtatcctggtttctctcgttggtcatgtatattctactttgcaatgaagtttgaaatgtagtaatgtaccatctgcttcttgtaagcagcactgcatcatatataataaggaaccttttatttt

SEQ ID NO: 323295 - DNA, 416 bp, Zea mays
  unsure (1)..(416): unsure at all n locations
tcaccctcgaggtggagtcgtctgacaccattgacaacgttaaggccaagatccaggacaaggagggcatccccccagaccagcagcggctcatcttcgctggcaaacagcttgaggacgggcgcacgcttgctgactacaacatccagaaggagagcaccctccaccttgtgctccgcctcaggggaggcatgcagatctttgtgaaaaccctgaccggcaagactatcaccctcgaggtggagtcctctgacaccattgacaacgtcaaggccaagatccaggacaaggagggcatccctccagaccagcagcggctcatctttgctgggaagcagcttgaggacgggcgcacgcttgccgactacaacatccagaaggagagcaccctncacttggtgctgcgcctcagggga

SEQ ID NO: 323296 - DNA, 359 bp, Zea mays
cccacgcgtccgcccacgcgtccggacgtcgtcaacttcagcctcgacttcgagaagctgcagcgcgtcacgctcgacctcatcaccgaggcgtccggcaccatgtccgcaggcatcgccctgccaccctccaacgccggagcgccctcctacggcgcggcggcgccttccgggggctccgccgatgcccccgccggcgcctccgagggccctgcgagcgccagcggcccgtctggtgacgacgcgccggcgtccggtgctggtgccagcgcgtcggctgctgatgcttccgcggctgaacatgcaatgcgacccgtctagcccagccaaccgcatcaggcgcgcaatgcacgtctcga

SEQ ID NO: 323297 - DNA, 266 bp, Zea mays
acgcttgaatttgtgcctctctgattcccttgagccaaatccctcacctcatagttccctgtggcgcctgcagaattctgaggaataccaggtttcccccatccttttccataaaacatatttatgtatccatactaaagagtactttctgaggagtacttcatagattttttttttaattgccttgtttgccttcagtttccttaattttcatggtttacatggatgtgtgtgtaggggctatatttgtgtatatacacgtgggt

SEQ ID NO: 323298 - DNA, 165 bp, Zea mays
atcacagacaatgaataccaagaagaatgttgttctttgctgccttctgtgcgtgctcgttctgcatgcagatcacgctctagccaagtgtggctatacaactcctttaattccattctgcatagcgtggatgtgcaaggcggagtgttggacggaagctaagtt

SEQ ID NO: 323299 - DNA, 425 bp, Zea mays
acggctcatccagagggcaagcaatagttagttccgatctgtgtgtgtgaaagtcttggttagacacagatcctagggctcagcctggccgggaaggtagagcttaaccactaccagcgacaggaggaggttgcgagaatgtcacagcttttttcttcatgtttatcactatcatgtccatcatcggcgtggttttgtctttcgtcaagcacacctgtgaattaaacagcaaaagaggtaagaggaaaagagcatagcttaataggtatcaacacagttcagtgacgtttgtattctgagatgtttctcatctattaaagccttagttctttgttacctttttcacaactctgtactgttgcctcatattctgattgcgttttcaaaatgtgatgttggtgaaacaaaacgtattgatggtttgt

SEQ ID NO: 323300 - DNA, 415 bp, Zea mays
cttctcgaagctcgtggtgggggcttcaccagtggaggtggagatcttctcgaagttggtgctaccccccccacggccgacacttgtaagctctccaccactgccaccaatgacctacccacctccaccaactctggcgagctcaccgcctcctgcactgaggtcccctcctccaccggcgccaatcaactctccacccacaccggtcaaatcctcaccaccacctgctcctgtgagctcgccacctacaccagccttcccatcaccaccttcacctgcaccatcatcaccttcaccgtcggcacctgaggagttcatcttgccaccaatcatggctcaacattatgcgtcgacaccgtcggctctgttccaaggatactaagcggtgatcacagcgcgctctactgacgatgag

SEQ ID NO: 323301 - DNA, 277 bp, Zea mays
cggactcgtgggcggacgcgtgggttgatgagaaaaaaaaaaaaaaaaaaaaaaaaagggaaaaaaaaaaaaaaaaaaaaaaaaaaaaaaaaaaaaaaaaaaaaaaaaaaaaaaaaaaaaaaaaaaggaagaaaaaaataaaggaacaaaaattaaataaaaaataaatgaaaaataaaaaaaaaataaataggggcacctaaattaaattaattggccatatataaaaaacgtaattgactggaaaaacactggggtatccaaatttaatcgcttt

SEQ ID NO: 323302 - DNA, 85 bp, Zea mays
cccacgcgtccgcccacgcgtccgcccacgcgtccgcctggggagtaaaggatgcttgggatgggaaagtagtggcattctcaaa

SEQ ID NO: 323303 - DNA, 145 bp, Zea mays
cccacgcgtccgcccactcgttcgaaaaataaaaaaaaaaaacacaaaaaagaaaaaaaaaaaaaataaaaaataaaaaataaaaaaaaataaaaaaaaaattataaaaaaaaaaaaaaaaaaaaaaaactggccacctttttaa

SEQ ID NO: 323304 - DNA, 237 bp, Zea mays
ctacgcggacgcatgagtcaatccggtcctttttgatgaaccatcgaccctgattgtactggggacggttgaataagaccgaaggattcatctcatgttcaccatgtttgtgaatcatttcatagacgatcccgtcttgatgaattactgtgaactgtaacatgttgcttatatcagtttcatctgtacttctaggcctgttcctgatcttggcgttcttcttgaaggattatactg

SEQ ID NO: 323305 - DNA, 190 bp, Zea mays
aacaatccttgcacccctccccttcgtcaccccaccacatccggccagtccaacgaagatgtcgcgcgccacagctgcggtcctctcttaattcttggtcgtgcttgacttaagcgcggccgagcaacgggcagagtaaccgaaggcaggcagtcctgccaaggcaccggcgagtcaccgaaggcaggca

SEQ ID NO: 323306 - DNA, 141 bp, Zea mays
caccgttctcgacactctttaatactcaatggtaccactttcaccgacatccttatcgccctcatcatgttcttcacactacacctactacctcttctgcatcttcctcatgactaacctcctttgccacatctactacac

SEQ ID NO: 323307 - DNA, 250 bp, Zea mays
acaggacctggcgaagaatgtatggactcctcagcgtcgaccggctactggtccggccgatactgatgtcctgcctgtgcaacgcatacagcgacgagcaatacctcatcttcttgagactatggtgtgagcgctactgccatgtccatgttcactatgatctagaggaagcgcacggagcctgccaacttcaatgctttataccctctgcacaaaccaagtgcgacactaggaatgctccagaagaaag

SEQ ID NO: 323308 - DNA, 151 bp, Zea mays
cccacgcgtccgcccacgcgtccgatcgcgagcggccgtccttcttttctccggggtggggtttatgagtggcgggctgttctcatcaacgttatgtatactcactggcaaagtacatggcataagtgccgtcaacccgctgattaccggc

SEQ ID NO: 323309 - DNA, 88 bp, Zea mays
atgaggctactagcaaacaacaccatgtgttcggattgtcattggttattgatgtcttgtgaatgaataatataaattttttttggtc

SEQ ID NO: 323310 - DNA, 414 bp, Zea mays
cgacgcgctggcggagctgccgttcatgacgctcatcgggcacatcccaggtgccgtgaagccacgggacctcttcatcacgaggacgcgcaggatgatggggatcaagagcaaaccctacggcacgatgccgcacgtcatgtgagggagatcccatcgacgatgacgtccccggccccggtccggcgatccttcaattccgatgaccaaacggagactagctagataggctctctgtctctggattttgccacgttctagttctagctgatcatttgatctggtcgtctgagatgtacgcttggtgttatgagtgaacccggaatatggaagcacgatcacttgctatatgtattatacaggtatactagccggttgcgacggtttacaataatatccatgtaaactatgcat

SEQ ID NO: 323311 - DNA, 324 bp, Zea mays
gcggcgagggaagggctccgcgtcgagtccgttctcttactcctgctctctccggcggcccatccatcagcgctgccctacgcattgctcttgataccatccagtacatcgattctccccccaagatcaaaggccggagaaggaggaagaaaggctagggagtcggctatggcatgctgttcatgctgctgtgtggcagatgacgacaacgttggcaggaggacgaagcatgacgatccctatgttcctatccctgctcatgtctataatcctggacctagccggttcccatgcccaacccctgtcatctccactggcagagct

SEQ ID NO: 323312 - DNA, 371 bp, Zea mays
ctccgacgccatatcatatctcactcgacctgcaactgcaaagactccttttagcgcgctgctgatgcgtcgtcgaacgcggcacgcggtccttaaagcctgcatgcgaaagccaggcaggcgtggacgtagtgattagaaacggttcgggttagatgggtcgagaaaacccaggtgcggccgtgcgggtgccgggtggtgcttgtcgcagctggtgcggttcgctcagctggtttgatgactgatcggctctagcgagtggacgactcttcctcgtttggatctttactcaaggaattacgaacagcatgaagatcttgggtgctcttctacgcgtcgtcacatgctatggctaacaaaaatactttacg

SEQ ID NO: 323313 - DNA, 103 bp, Zea mays
catggtacccgccctgtatcggagcattaagcgcatctgatgtggtattgacacgcaccctgatccgtacaatttccagcgccctatgtgcctgtcacttcaa

SEQ ID NO: 323314 - DNA, 66 bp, Zea mays
cccacgcgtccgaaaaaaaaaaaaaattaaaaaaaaaaaaaaaaaaaaaaaaaaaggggggggggg

SEQ ID NO: 323315 - DNA, 428 bp, Zea mays
  unsure (1)..(428): unsure at all n locations
gttcccatccattggtgtggacgtgtggtggttgcgttgcgttgcgttgcttcgagttggaggttggagttggagtgggccgcgtgcgagaggatctgagcggagaggccatggagtggagtgattagcggttgctgggtcaggagaaggcggcgtgtgttttgatcctactcgcgtttgaggggccccgatttcgagcgggtgttcaattttggtgccggatttttaaggaggatccaatttaggaagaattttggttttggggacaatggttttggactgcctgatattcgattcataggacttcgagtcggcagatccaagggaacgccgaattttgcctgatttcttcgcgatttttggtccgatcaaagaggttcctagcctttttttttcctcgcgagaagcaaggggtctnccttttcttc

SEQ ID NO: 323316 - DNA, 309 bp, Zea mays
cagactgcgagcgccttcgcgccgagctccgccggatgccgccgccaaacggccgagccgtgctgctcttccgcaatcccgtgtggctgctctgcacttcttgatgcatttttgttgacatggtttgcgtttcattcaaacttagaatgcttcttaatttcttttcgttgcattgaaaatatccagcggtttattggtgtttgggctaataaatagataaactgttcacctatggttcaaaaaaaaaaaaaaaataaacaatataaaaaaaatacattaaaaaaaaaaaaaagggccgcccgtttaaaa

SEQ ID NO: 323317 - DNA, 401 bp, Zea mays
gaggtatcctgccctgcagttcctcctcggcggaaaccaagaccctagctctcgtcatcgtcgtcgtcggcggcggcggcgaccgcggcggatccgacagccagccctcgtcgcagccgggccgccatgccgtcgtccagctcccaagacggcgtacctccttatgttctccagatccggaaccgtgcggatggtgttcggggttcggcgaccggaaagaaaaacgttttggcccggtctcagctacgtacttcccttattctttgaccaagcctactgaggagaggaaagagcatgatcgcaagagcccggtgacagcattggaggtctatcccagcaaaaaaacagaccaccgatctttttgagaagaaacctcatcgctgatttacggccagcgtgtc

SEQ ID NO: 323318 - DNA, 95 bp, Zea mays
accacgcgttcgcaagcaactgcaaagcagcaagctctactcttcttctgtactgaacgtgtgactagataacaacaagcgtgaaccatggctga

SEQ ID NO: 323319 - DNA, 254 bp, Zea mays
cccacgcgtccgcggacgcgtggaaaaaaaaaaaatataataaatacaaaaataaaatgggtatttaataaataaaaacaaacttaaattaatatccgtccatctgattttctgccccttttatctggtgcgcgctcttttactttttcgttctcttacgctgtccttcatcttctttatcttcccattcctcttctgaaccatcgtttctacagcttctatttttaccttgtttcttagtctgcctcttgtta

SEQ ID NO: 323320 - DNA, 431 bp, Zea mays
aacacgatccttttttacagcctagaagagaagaattgcatcactacgctattccatggctcttgcatcaatcgaccccccttcaattcgatccatcgatctgatgttctgcagtttcaagctgaggagcctcctcttcctttggcgagctctaacgctggcgttggtctccttcatctcccaattcctctggtgaaccatcgctgcgacggcttggatttggttctgggttcgcagtctgcctcttgtgatgcatcaccatcgccggtggagggccgacgacgatgggatcaagggattactatgagatcctcaacgtcgaccggagcgccaccgatgacgacctccgcagggcctaccggcggctggccatgcggtggcaccccgataagaaccccgccggcaaggcagaggccgagacccggttcaag

SEQ ID NO: 323321 - DNA, 254 bp, Zea mays
cccacgcgtgcgcccacgcgtgcgcccacgcgtgcggcggtcgccctttttttaggccgatggcgttcgcatacccgtcgtatcactttggaacaaattgaactaattccaatcatacattttacacgtgctctggaactacttcccacggaaactactactacctgttctagtaaaattcatgtacttgtttacaccacatgagatagctcatcccaacatgcatctttgaagtatcagcatacgtctagacc

SEQ ID NO: 323322 - DNA, 427 bp, Zea mays
cccacgcgtccgcggacgcgtggggaaaaatccaagaatcagactgagatattgctagaactttctgcttcacaagccgaacaagagtcgttgagacaagaaattgaagaattgaaattgtctttgaaggtggctactgaacgacaaatagttggtggaatttccaaatctggtgatgcaatagatgtccaatttgagctaaaagatgaggtacagtttttgagggaatcaaatgaaaacttaacaatgcaactgaagaagagtcaagatgcaaatatagagcttgtttctattcttcaggaactggaagaaacaatagaggcacaaagaacaacaatctccaatttcactcaaatgagtaatatgattgatcaagatatacccacgaatgcattatcagcgcaagaggatgcagagtgggaaagaa

SEQ ID NO: 323323 - DNA, 428 bp, Zea mays
  unsure (1)..(428): unsure at all n locations
gggacttcctcgactggctcggcccggacatctccaccaccatcttccagctcctccacgaccccgcggacctcgcccgcgtcgccgccgtctcccgctcctggcgccgattcgtcgccgtgaacaaattcagcaagcacctgtgcaggcagatatgtccggaggccgccagcttcacccgcgcggtcgtggtggcccgattgccgccgccgccgccgccgccggcgcacgccgcgtgcgagtccagccaggtcgccgagtgcagggcccgcgatggggagcacgcggcctactcctacctcgccggcgcgctcgtctccggcaagcccgccacggacctcgtcatgcgctgcgtcggcgcctncagcaccgacaacttccctgacgagaccatcgagaacacgctcgtgccgcacgacatggttaac

SEQ ID NO: 323324 - DNA, 428 bp, Zea mays
cccacgcgtccgcccacgcgtccgagcggaagatcggcgtggcgatggacttctcgccgagcagcaagaaggcgctgcgttgggcgatcgacaacctggtccgcaagggcgacaccctcgtgctcctccacgtccggcaccacggccgtgaggagggcaagaacgtcctctggtcccgcaccggatcgccgctggtcccgctggaggagctcatggagccgcccgtgaggcagcgctacgacgtgccgtatgacgcggaggtgttcgacatgctcaacgccgcggcccggcagaaagagatgtacactgttgttttggtgaaaaaggctgccagataaactgcccagcttgtatcactacatgagaaagtcactggacagcatcactattaccattttttttaacaagggatagaatggctctgctta

SEQ ID NO: 323325 - DNA, 428 bp, Zea mays
gcgtacgaagacgactgatcctacacaatctacatttaactgacaggcaccaacctccaccaatagtggcgtaccaccgccggcgggttcgccactaagccctctagcaacaacccatccgccagcgtcggctgtagcaggtacggcaagcactccgatgaaggccccctcaactactgcgagtacggctcctccaggaacgactcggagaagtacctgaaagaggagaaggagcacaagcacaatgagcacctcggcaacataggcacccttgccgtcggagccttcgacctgtacgagaggcaccatgcgaagaatgacccggagcacgcgcagcatgcacaagatcgaagagggcctaactgctgtggctgccctgggcaacagccgcttaacgttccacgagcaccacgacaagaagaggccaa

SEQ ID NO: 323326 - DNA, 171 bp, Zea mays
ctgacgcgtcatcacagatgctcgtgtaccacacgtggcgattaggtgccctattctgaaggtcactgaacttctaatctgctgcaacattacatacgcttccttggacaatctttaacaaagcttgcccattctgaacactgtaaaccgtatctctcacatggtcattat

SEQ ID NO: 323327 - DNA, 337 bp, Zea mays
gaattggataagatgagattaggacgctcgcaagctgaatctgtggtgcaaaagatagtcgagcttactagcaatctcataggttctgtcaaaggcgaagaattcgacatttataacttgctggatgatgaaattttaagcacgagcacagcccttgagtacagtttgcataagcataaccaactggaggctgacatagacatgttaaaagaatccttgcgacagaaggacatggatctgactgctgcttataaagcgcttgacgccaaagatcgagagttgaaagccgtaattggaaaggtagatgttaaggataaggaactagaaaacttggaag

SEQ ID NO: 323328 - DNA, 291 bp, Zea mays
acggcatagcacaggtgaacgcgacgatagcatccctggctaataacatcattgtcgggggcgccgtccttacgagactggacgtcctcctgacgtgcgggcccccgaaggtgccactcggcccaaacatcaccaccaactacaacggcaagtggctcaccgctagtgccacctgctacggttagatcaacggagcactgcgctcctgacatcggctgtgcatgctggatcaacaacctgaacctgccacactacagcggactgacgttatgcgccaacgatgctatcttc

SEQ ID NO: 323329 - DNA, 182 bp, Zea mays
ctcccgtctcgaccgcacgcgtccgatccgccacatgttcaagacccagtacgcttgttgagagatagatttcctcgtaaatagcggtggttatatcgcacggccagtgctatcatactatctacactgcatcatctattctgagaataactgcaatctttacccctgatactctacattca

SEQ ID NO: 323330 - DNA, 286 bp, Zea mays
cccacgcgtccgcccacgcgtccgtatttatttattgcttgcggttgcctaattatgtgagcgtctgttgttccttccttccttggtgatcgtgtgggtcgccaagggggttttgtttctgtaatcctgcccgatcgatgctaatactatgatcccaatttggattttgcgatcctaaaaaaaaaaaaaaaaaaaaaaaaaataagaaatatcaaaaaaaaaaaaaaaaaaacaaaacaaaccaaaaatgataacaaatgcaagaataaaaaaactatagagaaaa

SEQ ID NO: 323331 - DNA, 405 bp, Zea mays
cgctcgcctgagccagcacatatgcattcaccaacaaattcaagaacgcggacgtgccggggaccctgatgaagtgcgcgccggactactgcaacatctacatcgcggccaaggtcaatgccggcaatgtccggctcgccaagtgctgcgtacggtccatgcaccgtggcgccgacagcccttctgacaccgacttcgtacaggaatccgctctgtacattcaccgtggctccaggggacacggacacctgccggcagtgatgcctgacgccaggcgctctatggacggacgcaataccatgtcggagctcagcaagctcccaccactccgcgagcgctctctctcgtaatcggccaccaagaacgtcgtcgagatgccgggaaaggactactccgaggcgccct

SEQ ID NO: 323332 - DNA, 333 bp, Zea mays
cccacgcctcagcatcaacatacgcctagtttaccatcttcaaaaaccacccaataactaagaacatctacaagagcgcgacgaacttacaaccactatacatatcagccacgaactcatccatccatcagccatttacataaagaagtttctctcccatgcactcttccccagctactcgttcacccacctacttgcctcagtaatctcctaagcacattcctattctctcaactgcacactcacacctgcaaatagccataccacactccacgccctctatgtcctcacaccctacaatatatcacctgacgactcatacatcacccacta

SEQ ID NO: 323333 - DNA, 101 bp, Zea mays
actagttctagatcgcgagctgccgacaaataaaaaaaaaaaaaaaacaaaaaaaaaaaaagaaaaaataataaatcataaaaaaaaaaaataacgacaaa

SEQ ID NO: 323334 - DNA, 467 bp, Zea mays
  unsure (1)..(467): unsure at all n locations
cccacgcgtccgtcttgttttgcagtaccattttatgcagaccttcatactttgctttgtgggtaccttttttttgagtaattgacctagctacatcatcctgctttgcttaatagtcctactcgtatgtatctttaatgtaagcagaatttacttttggtgcgtgcgaataagaacaccgagctttggaaattttctcttaaaaaaatattcgcttgctcgtacttttactgggagtcattttctgggggtgctgctccgtcttcttctcgcgtcaccgtcctttttcctcctttaccaaagcctcatatttgcattgtcgattgcagataacagtctgatacccccccacccactgccttcactgactgctagagcccctccttgtcagtacagtgtttggtgctgaatcaaatccactgaagatgccaagttctgaaccagacagtgatgatgttntctttgac

SEQ ID NO: 323335 - DNA, 188 bp, Zea mays
cccacgcgtccacagacgcatctacctacgcttggatcaacccgataaattcgtacagacacgtgatcgtttccaagctacctatgcttttaatcctactactctgcaatgaaagcactgtacataccctttaccacattgtacaagattcataccaaaagacacaattctataagatctaacttgac

SEQ ID NO: 323336 - DNA, 128 bp, Zea mays
cccacgcgtcctaaaaaaaaaaaaaaaaatttaaaatttacataaaaatcaaaattaaaaatgaaattgttataaaacaaacaaatatacataaacaaatatatttaaccaataactcatatataaaa

SEQ ID NO: 323337 - DNA, 387 bp, Zea mays
acgcccacgcgtccgcccacgcgtacggagctagctagccagccagccagcagccagcttgctgggcgcgcccgtccttcttcctcgcctccgttccgttccgttccgtcccgcccgccgccgccgccgcattcagggatggagatgaagaagatcgcctgcgccgtcctcgtcgccgcctcggcggccaccgtggcgctcgccgcggaggctccagctccgggccccaccagcggctccttcgccgtcgcgcccgccgtcggcgccagcctcggggccgacgtcggcttcttcttcgcctactacattcagtgagccggccgcagccggtcgcccggaggccgaagaagagactaagccggagagaaagtgacatggctgcgcgca

SEQ ID NO: 323338 - DNA, 314 bp, Zea mays
aaaaaaaaaaaataacaaaaatacacaaaattaaacttagacaacaaacaaaaaaacactatgctaagtcaaacatgcgcagacaagcacagtcaaaagacaaactatgcaaaaatgaactggccccgttgttccttccaacatcaccaacttgagctccttcgacaatagcaaaactcatagcacatccacttgccatgacgctacctcataatccaaccgagacacctggaaactcacgagcttcatactcaaactcaacatgctcgtatgaccactcatcttcacaggcctattcccggaaaacttcacca

SEQ ID NO: 323339 - DNA, 240 bp, Zea mays
cccacgcgtccgcccacgcgtccgcaccaattccgacgagaaattaaaagcgctccaacttgatatctatctcaacgccaagatatacataatataaacaacacacaaattccatacagacctcattctgattatcctactcattatgcccactccatacaacacatacaatgcaataccacaattacacacctctatacctcttccactcatactcgacaccatctacaccaatgtata

SEQ ID NO: 323340 - DNA, 59 bp, Zea mays
gtgggaaaaaaaaaaaaaaaaaattaaaaaaaaaaaaaaaaaaaaaaaaaaaagagaaa

SEQ ID NO: 323341 - DNA, 72 bp, Zea mays
cggacgcgtgggaaaaaaaaaaaaaaaaattaaaaaaaaaaaaaaaaaaaaaaaaaaaaaagaaaaggtcta

SEQ ID NO: 323342 - DNA, 118 bp, Zea mays
aaaaaaaaaaaaaaaaaacaaaaaaaaaaaaaaaaaaaaaaaaaaaaaaaaaaaaaaaaagagaaaaaaaaaaaaaaaaaaaagaaaaaaaaaaaaaaaaaaaaaacaaacaaaaaaa

SEQ ID NO: 323343 - DNA, 269 bp, Zea mays
cccacgcgtccgcaacgatttggaatttggagaaccctatgctggcctcccggacactgctgcccgcgtctttgatgctggcctcctcggcgcattcgccatggccggccacgcggaagacgccgaggtgcggttgcaggagatggtggtgacgtgcggtgacgagagcgtcgacagctacacgctcacggatgctgttgtgtacgtttaattattgggatgtaattattagtgatctgtgcagataagattttggggaaaaaaaaaga

SEQ ID NO: 323344 - DNA, 330 bp, Zea mays
cccacgcgtccggagagagagagtgagagagtgagagaggcctcaccgcttcgacgtggattctgtagacgagctgcaggcgtcggcgctcgcggcatgacgcgcggtacgccatggcgaggtgggcgacggcgagcgcgagcgacatgaggaacatggcctcgacggcgacgagctggccgttgccccgccacacgggcgcggcgccgaagacggcgacggccttggcgaggacgtagcagacggaggcggcgctgcaggcgacggcgacccacctgtaggcggcgccgtcgacttcggccggggcgtacgcgcagaggatgatgaggg

SEQ ID NO: 323345 - DNA, 312 bp, Zea mays
aaaaaaaaaaaaaaaaaaaaaaaataaaaaataaaaaaaaaaaaaaaatataaaaagaaaaagaaaaataataaaaaaaaaaaaaaaaaaaaaaaaaaaaaaaaaaaaaaaaaaaacaaaaaaaaaaattcggtaagggcccaattttaaaaatccaaatttaccatcccttttattaaaactataaattttttttttgggtacctctaattaaattacttggcccctaatttaaaatttatcaatttgtaaaacccttagattcccaaatttaattatcctttgaaataaatccctttttataaatttgac

SEQ ID NO: 323346 - DNA, 92 bp, Zea mays
cggacgcgtgggttgtatttagaatgctgatgataaatgtaattttacatacttgtgtctgttttattataaaaaatacagacttgatagtg

SEQ ID NO: 323347 - DNA, 433 bp, Zea mays
cccacgcgtccgcaacatcaactattgccatagagtctagcgtcttactcatcgctgtgaagactgctgttataacaatgttcttgtttgcagatctggttccagatctagacctcccaatgttcctcctctgatgcctcagttcatgagggctcatggcagcatcagcgaacagtaccaacagaattcatcatctagcttatttgctggggcccataggtcaggaggcatgcgacctgccccaacacctctaccagagaaccccacctttaccttgttcccgccaggttcatctggccatagctcgatggagactgatgatgctgggggaagccggttctacgcctgggagggtgaccggtttgccccatacccgttgatgccggtagactgcgagacaagctggcggacctcacagcagcagtcccaccag

SEQ ID NO: 323348 - DNA, 365 bp, Zea mays
cccacgcgtccgcatggatactgtctgccttagagcttccatggtcgatgaacatggagagtctaattcgtaaaattgctagtgcccttcctcagtatcgagacactctcaatcacgaagcatgaaaacatacttgatgtcaacttatactattgcaatgcaaaactctcccagtctacaactacaagctacgcgatgcaattgctaattacagtctctgacacttgctgctcatgatctctgaaacccttagcatcagaacacgataccactgatacttctctaaggaaagacagttgatcaacattaaacactcacattctatatcatttacccattaaaaggaacatttgcattgcaaccat

SEQ ID NO: 323349 - DNA, 438 bp, Zea mays
cccacgcgtccggctgctgctcgtggtggtggctgtgcaggtgcggagatcgtcgatcgatcgctgcggttcgtcggcggcggtgtcgagatgtcgatggacttcggtgccccggcggatgaccccaaggctttccgcaacatctgccgcgaccgtacgtctgcaccacgcgcgcgactttgattgatctccgctcttcctcacgtcgtctgctttacgaattgacgacccgactgctcggttccgctgttgctcgtttgtgctctcctcagggatactgaaggacctgcttaagcctgacaaggataaggagaccaaaagctcatggaaggtacataggcgtaatatttttgtcgtccgtgcgcatgcagcttgatctatgcacattctggtggtactgcttcatgtgctcagattcctactatctttcattttttg

SEQ ID NO: 323350 - DNA, 382 bp, Zea mays
cggacgcgtgggcagagatggagccgcgggccaaacggaggaagggccatcatttagggggagcgtatggccagggatattcgctgaaacctcaggaatacgctcatggtccctatggacgaggagccccaccgggctcactgggatttctcgccggtgttggcagacaacgccgacccgccgtgcgccgtggccaagcttcactgccgcctccatcttggagaacgatccggtcgaagagcccgaggaattcgcaggagaagcccctgagcagcagtcgtttggtggaggttgtcagcattgcaaccactgctcaggcgaagatgaagctgtggaaggagacttccaggagttccaagattacgacgagttctaggtgtgg

SEQ ID NO: 323351 - DNA, 352 bp, Zea mays
cccacgcgtccgcggacgcgtggggttctagatcgcgagcggccgcccgcgatgtggaacgtgctaatagaacgcgagtgaccatcagccggactacgatcctagcgctcatggatacactaactgccacggacgtcgattgccacaactcatctcacgatcgactatgtagatcaatacttgtccaaacgcacgccagattcccgacacacgaacatctgtagcacgctcattgatcacctaatctccaatgcctcgcgctttcacaccaacgtgcatgcacacgcctataggcgatgatccctcctgccggacgaggcatcagctaccggtattaccaaagcgcaagctc

SEQ ID NO: 323352 - DNA, 366 bp, Zea mays
gttcggagcgcacacacacacaaccagatctcccccaaatccacccgtcggcacctccggttcaagatgcagatctttgtgaaaaccctgaccggcaagactatcaccctcgaggtggagtcgtctgacaccattgacaacgttaaggccaagatccaggacaaggagggcatccccccagaccagcagcggctcatcttcgctggcaaacagcttgaggacgggcgcacgcttgctgactacaacatccagaaggagagcaccctccaccttgtgctccgcctcaggggaggcatgcagatctttgtgaaaaccctgaccggcaagactatcacccttgaggtggagtcctctgacaccattgac

SEQ ID NO: 323353 - DNA, 230 bp, Zea mays
gccaccgtcgcgaccgtatcggaccggggatcacttatcagcatactcggcttgaggcacccatacgtaccctagatgttatctcattaccttgtaacccctgaatcacttgggtagtcgctatgctttacatggttttgggaaatcatttatcacctctatgttccattcttgtatttattctgttgagttcatgttgttatcataatgttaattggaacatatagctt

SEQ ID NO: 323354 - DNA, 77 bp, Zea mays
aagaactatgtgttcgtacatgttactgaccttatcattatttgtacatctaaatttggatttagaatgctgatgat

SEQ ID NO: 323355 - DNA, 370 bp, Zea mays
caatacggcaaagaggagtcgacaccgtccgccccatgtactcggtgtcggtgtggggctgtgggcgcggcgctgcgtgtgggcgctcctctgttcggcaggaatcctcgttgcctcctcactactccaatctccatcgccattgtcggcgcaagcaaaggggcggagcagcatggcggggcgctatgacggcaaccccttcgaggaggaagacgtgaaccctttctcgcaacaaacgcgcggcaaggctggcgggcaatccaactttggcggtggcgcgttttatatgcctaacccccaaaacgtgcctccgacatccaattcacgcctttcgccgctccctactgaaccggcagactttagtgctaca

SEQ ID NO: 323356 - DNA, 404 bp, Zea mays
tgccgctaaatataggcactataggtatattattatcccacaacgaatgatcctgagaaagatccatcctaattcagacatctcaactagatgcaaacttttttggggaaaccgaacaattggttttattcctctgagctcctttgaacatattgcaatgtatctcctttgaacagttgttcctttttattcctttgaggagctaagtacccttttattcctttgtttatgtttatgttgtaagtatatttgaaatatgatttgtgctggagatatttattaacttatctattgttttatcttccaggcccaacgattgtggttcagctctgtttatcaactccctttcgagaagagatggccaccggcaggaacaacttatcgacattagtggccatgggaca

SEQ ID NO: 323357 - DNA, 430 bp, Zea mays
aaaaaaaacaaatttagcgtcggctgggcagacggtggcggcgcgcggggggagcgagctggcacgcgcccttctccctgccttcatctgctccatctgttcaagaacacgccagagaattcaagtgtcgcattgcacttgcactccgtcgagccccgatccatgcctgcgcctgcccctgccatcgccgtcgtcgtgccgccgccgccgtcgccatcgcttactggctgcgacggctgctactgactgatcgctctggatgtagctataggtacctctcgattggcatgctgttctgataacttctaacgagcctcgaacacaaaacaaagccgctctgccaccggctgccactggcgctggaagcaacgacctctcgttagccaggatggcaatcgcggtcggccatttccatggacctaagcccccc

SEQ ID NO: 323358 - DNA, 290 bp, Zea mays
cccacgcgtccgaccacacgtagacgagttacatcaacggacgcgtgcacgtactccgagaggactccatgatgaacaaggccatccgcatggacgcacatgacaagctagacctgagccccatagggaagcgcgaccctcgccactactctgaagtcaccaacaccatggacaaagtccagatctgataacaatattctggacgactccctttacaacactcagtgttatgctgggccagcttaatgtcttggtcattgacatggtctacgagctttacatgcaacact

SEQ ID NO: 323359 - DNA, 293 bp, Zea mays
aaaaaacataaaatcaaaaaaaaacaattaaaaaaaaaaaaaacataaaaaaaaaaagaggaaaaaataaaaaaaaaaaaaagaaaaaaaaaaaaaaaaaaaagggccagccgtttttaagctcccaagtttaattccgcttctttccaattccttaatgtttttatcgtgatctctaaattcaataccttgaccttcttttaacactattcagtctggaaaatcctttgcttgctcgatctaattcgttttgtgtccgatctctttttctccagctggttcaatcttaaaaa

SEQ ID NO: 323360 - DNA, 210 bp, Zea mays
catacgctgtcaactgtctggttcttcgcgtcgtgtcttcttgtgcgccatatgggccggtctatactgttcgaggtaaccatcgacatgcccacccagacaaacatgctcatggctcaccattgggagctttaggatcatatttgcgaaaccgctgctacttgtcgtcctcatgaatctatattctgaagccaccgccgatgccctcat

SEQ ID NO: 323361 - DNA, 54 bp, Zea mays
cggacgcgtgggaaaaaaaaaaaaaaataaaaataaaaaaaatatcataagttc

SEQ ID NO: 323362 - DNA, 406 bp, Zea mays
cccacgcgtccgccagccccagctatgcccgccgagccctcacccacggatccgaggagctcctacccctctgtcccattcgtcgctcccggccgcaccagctgtcgatgatgacgagagcccaaggatgactggcacggaatcccccgcaccatcccccatgagcggatcgatattattcgcagaggtggaccgcttcgcgggaggtgcgggctcccctccatcgtcgtcctcgtcggcccaatcgccgatcgggtcgaccccggtttctcaaactattttattacaaggacaacctacccagcgggagcaaggttctatcatgcctatggatattgctactgtgagaaacacaaatgcgaatgtggcagtgccatcatgggacgatactcttgctcaatctctt

SEQ ID NO: 323363 - DNA, 376 bp, Zea mays
cggacgcgtgggcggacgcgtggggtgcggtctaggccaggcacgcgggcgcggcggcgaggcgggctcaaccgcgacagcccgaccacagcagtgcgggggcgcggcccctggtaagcgagcgggcgcgacccccggtccgggcgcgacagctcggcggctcacgggcgcgcggcccagctcggcgtctcggacgcggtcgaccgaccctgctagcgtagacaccggcgcgcggccttcggccagagtgcaggcacgtggcccctgcagcacggacccagcggctcgtgatctctggcgacctatcgagttagcgtggcccgacgcgagtacatcggcttctgcgcgcggacgcgaacacaccgacccgtcgagc

SEQ ID NO: 323364 - DNA, 152 bp, Zea mays
caaaaaaaacacatgaaaatgattactaccgattaccacgaccccgaataatcgcaccaattgtgcggcgtactaaagggggtgcaccggtacttcggatccagacgcgccgatggacgtgcgctagcggatcgcttacctattcgcgatcc

SEQ ID NO: 323365 - DNA, 364 bp, Zea mays
gacggcacgcgtccgagccaatcgactgcgtacctcatttttcttcgatcatgtagcttttgctcagagcagtgtcagggcgcataagacctgcttctgtcgattttttctctgatcatttgccgctcaaaccattcatcaagcttttactcgtcagatagattgttcaagtcaccggagcacggcatggacttcagccctcaaagaaagagcggcgaacgcgatcccgtcagcttcgtcgaacacgatgacagtgatgacgacttcggagctgaatccaccgcctctaataagccgtctgcgcattcgcacgacaggaccaaatccaagcccaagacgagccatggcagttcaacccacgcga

SEQ ID NO: 323366 - DNA, 386 bp, Zea mays
cccacgcgtccgcgtccccgtcccccgcgtctaccatgctcctcgcccctccgaacgtggtcctctccatctagcgccacaaccaatgcacgcctccgggctcacgccgcgccaagcccgtggggaggcggatctcgcccacaggccgcagatctccttccaaactaggaggcaacagcctggcaaggggcgaccttgcatggtaggcggcccctttccacaaaggacacaatttcacccccttccatatttggcggtcatggcatgcactacgcccccttcctcgccctcattccaaattcagccctcaactgtgcatgcacccacctcaatcgactgctattgtctgaatcgacagtgctattggtctggttggttgggacttg

SEQ ID NO: 323367 - DNA, 358 bp, Zea mays
tcgtacggccgacgcgtgcgaactcgacgacgacaatcttcccgaatgcacgccaacacgctatatctatcagcacaacgcgggctgcatgcgaggctgcgggccaactaaactgatccactacactatcctatactagtctacttaactacacttgcaggctgcatcatgatgactccatgtctcactctatccatcccttggtctatacactctaccactgcctggcctatacaagtggcagctattccacacttacacacgcagtcattaatgtatacctacttccctgcatttgcgctgtcagctctatatattaaagatcctactctctactcacacgcgctactcagctaca

SEQ ID NO: 323368 - DNA, 281 bp, Zea mays
tcaccacgtccgactgccctctccaaactctaaccccgacgtgcctatccaactcgtccagcggcgtcgaccaacgatgcacaaattaccacagaccagccatcgggtacacaactgaccaacttgttgagcacctacagaaactcaagagacattacacgatctacgatcaccctgacatattgacagatgctgtacaggctatacatgtatgacatataggatgtgcactgagcaacaatctactctttatacacaagaagcatgtgttatatgttata

SEQ ID NO: 323369 - DNA, 475 bp, Zea mays
cggacgcgtgggtgacgccgccgccgccgcctccgtgcctcgcctgcctcctcaccctggtgctcctcgccgccggggcggcgccaccggccggcgccatctgcgtcccgcgcaatcccggtggccacagcaagccaggagcgccggccaagcccgcgccaccgaaactgaagcccctcacgcccgcggcgccggcgccgccgaagccgacgccgatggccccgggcgccgacatcgtgcggagcctgtgcctgaagaccgactaccccgacctgtgcatgtcggccatcgcgaagcagccgcagccgcagctgccggtcgggaagcggctggacggcgccggcgtgctgcggctggccatgggcgccgtgcgcaccaaggccgtcgaggccaaggccgcggcgggcgcgctcgccaacgacccccggacgcagccgctggcgcgcggcccgctgcacgactgcgtcgagtcgtt

SEQ ID NO: 323370 - DNA, 379 bp, Zea mays
ctgcctcgacggacgcgtccgcccacgcgtccggactagttctagatctgctgcattttttatgcaatatttggggaagctcgggtggagccaatggcgttatcagagcccacaaattgccagcctaatcgagaaaagtgcattaggcatttaccaaagcccatgatgcaaattttctcattaacattgggtaaaattcccatcgaaagagattcagtagaattatatggttacatggcggtgcgggatgatcaggatttattgcttaattatattgtcaatcggagcatggatgaagccattttactgcaaaaggattcccttatcgaaatgactggccctaagccaggcatctcaatgacatcctctgtacatgctg

SEQ ID NO: 323371 - DNA, 90 bp, Zea mays
gcgtattggcctatgagaatcgccagaatatttcactgttggatctgtactatagcctggtgctgaatgtcgtataagggctagttttgc

SEQ ID NO: 323372 - DNA, 229 bp, Zea mays
ccgcccacgcgtccgcccacgcgtacacgtttacatgaacagacacgtataccgggcaatgtataatttcgaaattttcgaaccaatacctgctaacgttcaagatactaatatacaaatgctactacatacttacttaccaagaacatgactatacttttataaattttatatttttatattatataatttttcttatatatatttatataaattatattatattaat

SEQ ID NO: 323373 - DNA, 210 bp, Zea mays
ctagatcgcgagcgccgccctttttttttttttttttttttttttttttttttttttattggtttttttaatatttttttttatttttataaaattttttatttatttatatttttattatttatttttttatttattataatatattttttaaatttatatattttaaatgtattctataattttcatctattttttcatttacaatat

SEQ ID NO: 323374 - DNA, 296 bp, Zea mays
tcccactcgtcctcccacgcttccgcccactcttccgattcaccaagcggaacacctcatgtgtctctatttaaaacgaacctctgtatcatcagacctatcattcaatatatctactataactcatatcactttcaatccaattcatatttcataaatcctatccatctctatccatattatacaatccatcatatgctccatgacctattcacctatcctatttatcaagttatagcctttcataccactgatctgtatcatgtccaccatctcaacaccatccttcaattctt

SEQ ID NO: 323375 - DNA, 408 bp, Zea mays
gcaactcaatttacagaactttgagttgctaccggagatgtacagccccggttttggtttggttaatccagatctttgggaataactctcgaaaccgaataaactttggatacagagatgccagttttcaggtgcctgcactatttgacattaatggtgcacctatggttccgaacagaggaacagttgaattctctggaggggctgaagcctgcacttgtgcagttgagattatatcatcgcgtcgatttattttggaacctgtattcagctggtgttgaggcatttgtttctgaggtgaaatgaactctccatgcccaacaactgaaactaaagacgacacgataaggtgcctgacctgaaccggcacatttcctgtggtcaggtttaatcatatatatgtagctg

SEQ ID NO: 323376 - DNA, 472 bp, Zea mays
gaatcagccctattacctgcttgaggagattctcccttcatctcttgtcctgtacattctggggaggattcctgcaaagctacggatatcccagtatcaccccgtgagcagcagctagagacgaggcattaccatctgctgagccaaaaatggtgactgctgacaagctatgaaaaatcaactgcaacgccctctatataatatttgtattggcagcctctctgcaaaatatatatagggataagacttgcctcggacatttcatttctagaccctactcacatggaagccatccaatatttttccgtaactcacctattgctaaccctgttagttcaatctgctaatgctatgatttttagtgcttgagcataatgaaggaaagcaccattgtaaaactgaactacatgaaaagttgaacatagattactttctctggagatgagtctaacagcgagttaccctttggaat

SEQ ID NO: 323377 - DNA, 227 bp, Zea mays
ggcaaatgatttatgttctctgcgtttatttccagaaagagaaggagcatcaaatcacgagtggttctcatgatattgaagatgcattgccctttaaaaatataatagatctcctcattgatcatcatccagactcttcagctaaaactcataactctttccctacattatactttgacatgtaccttgcagtgcattatattctggtcagatcatctctgttcata

SEQ ID NO: 323378 - DNA, 291 bp, Zea mays
attcccggtcgaccgactcgtccgcccacacatcctaccactcctacgtagatgttcaccagcatacctcaatacattccatctgatcgcacttaaaatggtgagacctcattctatatacattctcatactcatcttctactcgttcatcaacattatcattctcatttcatacattatattgaccatatataccttctactatcttcacatctctcatttttacaagcgcacgattatccatactctgaataatatctcctatcatctcacttattatcagactatctc

SEQ ID NO: 323379 - DNA, 284 bp, Zea mays
cacagttattaagtacgacaactagacacatactcatagtcgaacgcgaatctcgttgcggtacacacggataatcacgtcaaattacatgtactcatgttcactatcacattccaacacatcgataatcttctcttcatcctgaaactggacaccctaatgtctcacacaatacaattcgagatctacagtgagcctaactgtccgcatgccttatcccatacatctgatccaatgaatgcctctcttattcttactgtacttcatgtacatcacctttcgac

SEQ ID NO: 323380 - DNA, 211 bp, Zea mays
gaattccctgtcgaccgactcgtactcccacgcgtccgcccactcttccctaaatttttctcaataaatacatcgtcaatcccttagtcatcatatataggttgctggcaatatcaactttatgtactcttcactcaattaccatcctactcatattctgcttatcattctcattctttccatcattactactcatctcaccctaatatct

SEQ ID NO: 323381 - DNA, 415 bp, Zea mays
cacacaaacacgagcacacatacaatcactctttagctcacgactaacaacggcctatacgtgaggcatcatccaggcaacaacggcactggctactttctgtgtgatcggttcgctcactatgccactcaccttaaaggtaggcaaaggctgcaatcctgaacacctggtcctcaccccaaacattgccaccatcaccgaaacggagatcatggatcacggtctcgatgacttctcctttgagctcaaagagggccacgtcgacacctgtacgcttgacacaaaggccccactcaagtacacgctctgcatccgctttgccagcaaggttgacggctactcgcatctcgatgatgtcatccctgaaaattttaatgcacacaccagctacaagaccacgctcaaaatctgatca

SEQ ID NO: 323382 - DNA, 324 bp, Zea mays
accacacgttcgccctcgcgatctcaccctcctgtgctcaatcaaaagggatagctctacgggggcctactacttggatccgtgccttatcaccattgaactaggatacgactcatatttcctatatatctacgactcgtacctgatacaccaagctagtactgctctgcaatattaatcaatgactctaaacgtatcttggtacatctacatgtacattctacaactaggctctaacctcctgcacacacattatcacatatttgatacccacaattcatgactcgcacataagctactgagaccccatcggttactctacta

SEQ ID NO: 323383 - DNA, 272 bp, Zea mays
attccctcgtcgaccgactcctacgcccactcatccgcacactctttcgctatctttccctatctgaaatactctacttcacgttgaccactattaagggggccggcactagctctctacaactacgcctataacatctcactcttcaatctcatgactcaattactaataccctaatactactacactaacatcaacctctatccatgaactatctccacgtacaactcctactcagaacacacaatattcaatgtccgcacattcactaa

SEQ ID NO: 323384 - DNA, 230 bp, Zea mays
accacgcgtacgcccacgcatccgcgcattctctagatcgctacatatcgtatgccaggtgcgaattctatcatggtgacggttatatacaccactctaacacttccacgaaccagtcgccaacagatctccactccaatcatccttacacctgatgctctgcgtcgtacatcatatccaccgtaagttcatcttcaactacgcgcaaacccgaacacgcgacacttcta

SEQ ID NO: 323385 - DNA, 460 bp, Zea mays
cccacgcgtccggttctagatcgcgagcggtcgccctttttttttttttttttttttggtttttttttgtttagctaacaatgctcacttagacgtaggggtggtaatggattgtgatccatatggttcttcacaaaatgtcaaggcacttaataaattatagttcaaaaatgactaaaaatagagcctaatcttaacccgattcgatacttaaattttatagtgcaaaatttatagcccattgtcagccagttggacgttgatggttggcacttgcagagctagcaaaatataatagtactactagtgtgaaaggagggccttgtggcactggcagctccggcactgcttctccggtgcgttgctgctatcgccgttcttggcgtctaagtaccatccggagagcgtgtcgaagaggatgcccgcgccaacgccaacagccaggtcaatggtgtagtgt

SEQ ID NO: 323386 - DNA, 340 bp, Zea mays
  unsure (1)..(340): unsure at all n locations
cgactccactgcgtctcgtcccactgccgtccgtcccactgcgtctcgtcaactgtcgtgcatactcattnggatcannngtgcagagcagagccaanatgctcctaaagtgatgtngnnattcctaactctgcaatnngggaggaactnnngtggagatacctatggccannggtccnnaatgaactaagatgtcatgccctnctcttggtggacctggagaatctggactagcactagttatcagagtattcggtgactccactcatcctcagcgttcttgctgagggactattgcnnatttgctcgtggcgcgcccttcttcnntccgtgggccggt

SEQ ID NO: 323387 - DNA, 314 bp, Zea mays
cggacgcgtgggcggacgcgtgggggcgaactttgtgtacccgagtggggtggatcgtgttcaagaggcaattcgttcatctcgaagaaattgctgctaagggtgagaagactagcccacaattgcgacaacatacttccttaccaagaacaggtcgatgtgcacagatccttcttgcttggatgtaccttaaggctctcaggttttgagttgagcaatccttgttggcacaccatcaactggactgctcgcatactcagatatggtctactcatctttatttcgcttcggttttaagactactcactgggaaa

SEQ ID NO: 323388 - DNA, 289 bp, Zea mays
gcagaagacgcaagactcgcggataacggaggactccgcgatggcgatgatcgagcgggagaaggctcgggcgaaggcggccatggaggcggcggaggcgtcgcagcggatcgcggagatggaggtccagaagcggatcagcgcggagaagaagctgctcaaggaggccgaggagcgcaagaaccgcggcggcagcggcatgtcccacgaggcccggtaccggcgctacagcatcgaggagatcgagcaggcgacggacaacttcaacgacgcgcgcaaggtgagcgag

SEQ ID NO: 323389 - DNA, 424 bp, Zea mays
  unsure (1)..(424): unsure at all n locations
gatgaggtcgaagaagacgagggaagcatggacgacggcagcgccgaagaggatgatggcgagctgtccgacggaggggctctcggctcgccgcggcgacgcgccttctccgctccaggtattggacgtatggagataaatgggggaaatggagtgaggtcaatccaagaggggcagcaatggcatttatgtaaccatggaatcgagattgggcgtccatcaccaggaggggatgaacctggtaccatccccagagatgtgagagtggagaatgggcatggagttgttggaagaagagacggnggtcctgcatccagctattgggacctgttgagagcacacctctctgatcctttaacaggtgttctcatggatgatggcattgatttatcatgtggccattcatatggaagtagtggaatgc

SEQ ID NO: 323390 - DNA, 389 bp, Zea mays
tcccgatcgagccacgcgtccggctcatgctctcgcgtgggaccgacgccggtggccctgcggcgtcacgaatccatgggcgaactggggcccggactccgaggatgctgagcccgccccggctgcctacgtcgacccctcctcccgcctccactccggcggcacgtgcctcaaggccggcgcctccctcagctcggcccccacgcccaccaagccgacctagcccatcgacccggtcctggcacagcccatggaggacgtgcgcaccatatacaccgtgcccaacgagctcggacgcggccagttctgcatcaccagcctgcgcacgcacaaggacaccatggactcatgcgcgtgcatgaccatcgtcaagcataagctgtccacca

SEQ ID NO: 323391 - DNA, 67 bp, Zea mays
gttggactcctatatatagaggccttccggcacatataatatacgtcggaccaatattattgtgatc

SEQ ID NO: 323392 - DNA, 374 bp, Zea mays
cccacgcgtgcgcgccaaggtcctggtcgaggaggacttcctggccgtcgagaaagaggggtaggtgcaggtgcaggtgcaagcgctcgaggcggagctccggcgagccggccaggagaacagactcctcatcgacatgctccgagcggtggtggccaagtacgcggagctgcagggccaggtcaacggcatggcggcgccggtgtccacggcgggcaacatcgccgacgccgccgacgcctaccgccagttctccgcgtcgatcgacgacagcggctgcgcgtacggctcgtcgtacatgaagcggacgatccggaacgactgcctcaacaccgagccctagcatcacaaccgcaagccggcgacgtcgtacg

SEQ ID NO: 323393 - DNA, 431 bp, Zea mays
aattctccggatcgacggcacgcgtccggccttctaccacgcgggcctggtgctgttcaccctgtgcgccgccaccccttcactggggcctcgcacagcggtccacatcatcgagtcgagcgccccagcaaggaagatgcagtcatttacttgtttcaggaccctttaactaactacactgaggacaggcgcatggtcacgcgctctactcccgtaaggcatggattacacattcaactattcggcgacactaccaatggctgcaactcaaccgagcctccattttaaccctcataataaaccccatggagctacatttgacgacgaacgacatttgagcgacctgcgaaacatagtacccaatgaacattgatatgcagaagtgttcataagagacttacaaatttcattgagtgggcctcaatccatac

SEQ ID NO: 323394 - DNA, 156 bp, Zea mays
ctgacgcgtgggaaaaaaaaaaaaaaattaaattaaaaaaaaaaaaaaaaaacaaacacgctagggtatccaagcatcacatacacattcaaacaacatcataattcatattttgcttctacctaaattcactacactgtccttcattctacatcc

SEQ ID NO: 323395 - DNA, 421 bp, Zea mays
caactttctgagagtatgctgtgacgatagtggctaggctgatgctgctgccgaggctgctgcatatgttggcaccacaacatctcggggtggccttggttatggggagactgatgctttggaggcattggtggttgaggcagccaagaggattgatcgacatttgaggaatctgtttgaatgccttcgccaatcctgattttatttgactcttggctcacgtgtcactgtgccagcgcgatcaatattagtagttcctcttcatctcgtgcaaatggatgcttctgtttggggtgatgatgctgaccattataatcctcatcggttccttaaaagggacattgatcttggagaaatattaggagcacctaaaggatcaactacgataaatattttcagtgggtgtaccaagggcgaatca

SEQ ID NO: 323396 - DNA, 441 bp, Zea mays
  unsure (1)..(441): unsure at all n locations
accggatcggaatgttccgggtcagacgtacgcgtcgcagtgcgccacggctgctggtctcggcggacgagcagaatttggaccgtcgtgntgtgagagcgggaggagtacctgcatacgatggcgtgtgctgactgccgtgcggcagctggcgctgctgcatagtcgtggcgcatagcggaggggcgtatgtcgcaactaccggcgatcaacgggactacaatggcgatgagatgctgaaacgcgcgcgtgatggctcgctgcggcatatgacgtttgggctagcatggtgcgcggaggatatgattcaagcgggcgagctgcgctaggactatcaccgggtccatgtacatattccggcttctgcagcgcgagaacgattgtatgatccgcgtcagcacgctgaccaaaaaaatgggtttaagcctttcaaagggttat

SEQ ID NO: 323397 - DNA, 75 bp, Zea mays
tcgaaacaatcctaatgaaacaaaaataaaacacaaattacaatataaaaacaacaaaaagaacaaaaaacaaaa

SEQ ID NO: 323398 - DNA, 361 bp, Zea mays
ctgatgactggacatgaaaggaatgaacttgaaggcgcaaaacatagctcagtgaccggggagatggctgatatgacaacttactatcaatgtgctgttattgatgaaattcacatggttggctgctaatgacggggttattcgctcacacatgcacttgtgggacttcgttcatatgaacttcatgactgaggtgaccacacctgatcgacctcttatccagcaaattctcgaagctactggtgatgtagataccgatcaatattatgagagactatctactgtggatcctctgaacatctcactagggtgtttctgtaacatcacagcatgagattgcttattatgattctcaatacgt

SEQ ID NO: 323399 - DNA, 331 bp, Zea mays
gtcagggctcggcgggcaacacgccagggccaggcaaacagcagcgtagagctgggcctgggcagagcccccgagccgagcagttggtttggtggcgcgcctttactgccgctgccgctcactttcccagggaggggttaattgcctccgcgggcctcgctctcgcgtcgcgtccttcggatgccgcactgaccgccaccaagtcacgcagctcagccgcgcggcgcgatgggcgagaggaggaggcgtgcgagcactgcttccctcgggggtggaggtggaggcggagctggaggtagcggtgttgcgcccgcgcggaacgaggaggaca

SEQ ID NO: 323400 - DNA, 118 bp, Zea mays
attcaaacagcagcgtagagctgtgcgggagggtagccctcgtaccgagcagttagtttgaatactctcctttactgccgctgccgctcactttcccatggaagagttaattgcctcc

SEQ ID NO: 323401 - DNA, 361 bp, Zea mays
cggacgcgtgggcgcgagcggcgccctttttttttttttttttgacagaaattgcgattgcacataacacaaaaatcagctaataatcaagaaagcaaacaggaaaagccaaaagaaaaacgtacgtctagacaacaggatggaagaatcaaagcccacttcaccgcacaccggagctagctagagcctggtacaccagagtggtaagcggccggggccggccggccacggagaggatctcctcgccacacgacgacacctatgatatatctaggctaggggctgcagggcttggggaactggtagccaacgtacttggccctggcgttctcgcacttggccgatgtggcaccctggccct

SEQ ID NO: 323402 - DNA, 168 bp, Zea mays
atcaaatgcgtgcggcaaacgcatggaatgtgcttgcctagctagctaattgttgtttgttttgtctttacttttcttcatacctgtctctctctctcggttgtttaatttttcttcatgcatgtaatataatgtgatatacccaatatatacaacgcgctttaattc

SEQ ID NO: 323403 - DNA, 444 bp, Zea mays
cccacgcgtccgcggacgcgtgggtgcaagtggaaggagactctttgtagatacctatgatcgcaagactaaagaaaccaaggttggcatactgcaggtggcacctgaagttgctcaatggcttggaagggaactaggttacaagagttatgacattgaagataatactaatttgctgtactggcctcttgtgaatgtctattttggtgctgcttatgcaaaatggctcttctcttgtgatgacagacaaagaactgaagaatttgttgttagagcatataaaggcggcaaaaagaaggctgctcacaaatcaacttgccccatcttccagcgttatctttatgtgaaagagaacctgttgtctataagacaaccagaaatttgccatgacctcgctcctgatcaagaaaaactggcaagcgcagaatcacagttgatatattg

SEQ ID NO: 323404 - DNA, 362 bp, Zea mays
ggtagatttggcacaccattacccttcccaaaacccatgcatgtggtcgtgggtaaacctattgaagtcaataagattccccatcctacaattgacgaggtaggtttctggatttaatcaaaaccacttttttgagagaaacatttttgtaggctcatattgttctcatgctgcgtaatttttggaattggtccgaagtccaaacataaacaaacctaattaaaagtatatccatgaatttgaggtattgaataaaataatacgcttgttcttgcacaagaatgccaatatgtttcttatcttattgtaatgaaaagctcggtttgatattattgagctgttcaagttttttgaaaggaaca

SEQ ID NO: 323405 - DNA, 254 bp, Zea mays
aattctccgaatcgacgcacgcagtccagcccacgcgtccagccgacccatgatcgctatcggcatcccttcattattttttcacttttgtatattggtatcttgccaatagtttaatgaattcttttcttatcattaaccattatataatgtatttacacccaaattcaactcattactcaataaagtatcttatcatccaataataactataccacacattgaatataatcatgtcactgctgctacaattc

SEQ ID NO: 323406 - DNA, 84 bp, Zea mays
cagcaccatggcccgtatcttgtaaatatgtatatgtctatttcatatctatttttagtgatggcttataaaaaaagaaataaa

SEQ ID NO: 323407 - DNA, 332 bp, Zea mays
cactcggcctgcggatggcagccttgcccatccgcctgacgccatggcggaagctggcatgagcggcttgcgacggacctcgtttgcgcgcaagcgacaccaataccaaattcaacgtctgcgtcaggcacatgcggcggcggccggcatgcacgcagtgcactatgtgccgactcgcgggtgagggacggcgctgctggcgcggtctctagtggtggcgctagccataccttgcgggggcaggtagatccattctactaacaaacaaaatcataccacacaatttggttgcgtagaggaatcggagcctgtcgcataagacagttcggcta

SEQ ID NO: 323408 - DNA, 198 bp, Zea mays
tcgcccacacgttcgaaaaaaaaaaataattatataaaaaaaaaaaaaataactaaaaggaagatttatcctatatcgaaaaacctaaaaatccatacaaataacacttatatctacttctaactttatattcatacatatatatcattttttaatatttatttattatattatttaatttactctttaataattttt

SEQ ID NO: 323409 - DNA, 177 bp, Zea mays
ccgacgcgtccgcggacgcgtggggaataactttactaatcaaattcttattgtgatgtattcctccaaatgctgttctacttccaacaaggcaacaacaatctgatcctgactacaaacaaaacccaaataaaaacacacttaacccaataatccgatcccacagaaacttttctt

SEQ ID NO: 323410 - DNA, 173 bp, Zea mays
cgcacgcgtacgcatgcaccctaaactccaggctcgaagactgcctgcctgactcggtggggagaggtctatcttccaaagagccccggagcactccctcgacttcagatgtctattctcaaaaccgctctaactaccccagtcagtgagccctttataatgtcgccaaccag

SEQ ID NO: 323411 - DNA, 177 bp, Zea mays
gacatacgtaacttgacccttgagttcgacaatctggactgccaaacgcttgatgcgatcacgtacgcgtgctgtacgatgtagcaagtcatgcgcctgcctcactacaatgaaggacctccctgataaacagcgctcactcctttccggcagtatcatgatctctgatgaggctgc

SEQ ID NO: 323412 - DNA, 265 bp, Zea mays
tccaacgttcgtccacgcgttcaagagcagtgatccatccatcctatcccccgtgcgaagccctacccagctatgagcatcccgacgacgactcctcctcgcctcatccgacgccataacacctcttcctgttcgcaccccttctcactacgactaccctaccaagcgctcaacctggtcgcaacttctccacactctctcggcgctgctatgaccctgtcttcctgtctgcataacgtgtgcacaaccaccatctgctacgtca

SEQ ID NO: 323413 - DNA, 416 bp, Zea mays
gacgaccactccctccacaacgccttcagcacctacggcgaggtcctcgagtccaagatcatcctcgatcgggagacgcagaggtcccgcggcttcggcttcgtcaccttctccacggaggaggcgatgcggaacgccatcgagggcatgaacggcaaggagctggacggccgcaacatcaccgtcaacgaggcccagtcccgcggcggccgtggaggcggcggcggcggcgggtacggtggtggccgtggaggcggcggctacggcggtggcgggcgccgtgatggcggcggcggctacggcggtggcggcggctacggtggtggcggcggcggctacggtggtggtggcggctgctacggcggtggcaaccgtggcggcggctacggcaactccgacgggaactggaggaactg

SEQ ID NO: 323414 - DNA, 423 bp, Zea mays
cccacgcgtccgcagaatagtaggagttggatgcgcatgcacttcacgacaaatgaggggcaaacaaatttcaaaaagttcatacaaactacatttggtggcactactagaggagaaactgcaccatgtccatgttcaagatgtcgatgcatgtcctacaaaacacaatctcaggttcagagtcacttggttattagagggtttgatgagagcttcatcgaagaaggaaaccaagcaaacgattcagatgagggcaatgctgcaacagttgtcaatgatgatgaaacaggtgacagtggttctgtgaccgaactagtttcaacgctaatcagtggtgctatacatgaagacatcataggaaatattaatgaagagccaaatgcataagcaaaggcattctttaatctattaacagaggcaaag

SEQ ID NO: 323415 - DNA, 421 bp, Zea mays
aatatcctcttgtttgaagatgataggaatcgggcggattccctgatcgatctcagggtgtggtggtgggtgattggtggccagggtttgaggcgcgatgcacaacggcggggcgccgtgttcaccgcgcgcaagaggagagacgcgaggaaaggggcggctaggtcacagtaatcttccggctctctctggaaagccgaaacaatcttgtttctgcttaatccctatagagtggtgcttacaattatttatactcccttctagttcttatctaatgagataaatcccctattttctctctaacaaattttatctccttaatcttctaatccttatcatcttctaatccttatctgcatgcctatgctgttgcccggcgcctatagtggcggtcgatcataacagaagactttaaggcaaa

SEQ ID NO: 323416 - DNA, 395 bp, Zea mays
ctaattccctcctcgagccacgcatgcgtcctaacagctaatgcttcactactagcacctccagttcctgcactcgatcccacatggggcaaatttcctactatgctatacaatatcccatctgtacctatcaccatctaggaccatctcgcacacacctgctgaccccttaaatagctagatttttactgacccatttgatacggccaccatgctccttacactcttctcaacttatatgaacctcgatagtcttctctaagttcaccaatctccattaaggaccatttatcattgctgttggaaccaagcactcacaatgtacatcagtgttttctttaaccatcgcgctttgcaagtactcaacttgtacacattcttctaaaacgtccata

SEQ ID NO: 323417 - DNA, 422 bp, Zea mays
ggaggggatccaatcccgtgtgctaccaaccccaaccccaaacccaaacccaaaccgatgagattagagcatcgctcgcaactttttaggaactcgatgtggtgtgcatcctatttaggaatgtgtactgaaaccatggctctacgcctgtcacgggcaaaacccaccttctagaatctagattagggttacaacttataagtgcttcaagtgtgtgtcggggacctttttggaaggagcgtgtctttgcaaggagtcgaattagctcctggtgttgatcctgaagctctggaagttgctaaggattgtctggagtccatttttagtgttaactcaacagccactggtgacgcaatacaaccaggactgttgtttgagctatttgcttctctcgaagcaaatgaaagagaccaggcaagagc

SEQ ID NO: 323418 - DNA, 426 bp, Zea mays
cacagattagggtttcggcggcaacaatggttgcgcgacggcggaaccaacgcgcgtgggcgggtctaggctcgggcgatggaggctgatgtccggactacgatggcaagggcgggtggatccgacacgtgcgggcgcgacggtggctgacgtgcgaacacatggtcaggtgggatccgacacgaacgaggtgcggctctagccgacgcgcggcggggcgggtttgggatggacagaaggggtccgtgacggccggacgacaagtccgcgacatcggcggcccgccgctgacagatggatgacgaggaccatcaatcaggcatcgtcatccttgagacctagcccgtcataggaaacacatctgaggtgggagcggctgcaataaaaattcacaaaaaagggaggatgcaataaaacataagtgag

SEQ ID NO: 323419 - DNA, 417 bp, Zea mays
  unsure (1)..(417): unsure at all n locations
gcgaatcacactttcatagtatctcacgcggttccgattcacacgcttccacatcccacgaccgcgttgtcgccgatccgatcgccgctcctgtcgagctcatcacccagagcacctccgatcgcatcatcgtgctgtctgtgaacatcggccgtcccgacgatggatcagtcgagtgctgacgctggtctcgccaaatctactcacgccgacttactgttgatgctgcccgacaccacgcttgttactcacctaggcgtgttcgatctactctggccgctctactgctgctncagtcaggcgctgtccctattatcctgcggccaggcgagttcacgcttcttatggtccagacaggtgcgttgaatctggtctcgccggacgactgctactacaggcacgcactgaacgtttttc

SEQ ID NO: 323420 - DNA, 417 bp, Zea mays
cctcgctaaggttcttgtgctgcagccctgttgcatgccatagtcctagcatagctggcgggaatctcttgccctccttgcttcctgatcctgcgcccttggatcaccttccatgtgttcttggccttgttcactcgtgcatctgaccatcagttcttaagagtatatttccattggaagcaaattttagggtttcctgggagagactctgccaaccttttttttttgccctggtgcatctgcatcaacttgttcgtttctctctcgtaaaaaaaaaagctcactgtcgtaaacgttttcgccaattgatccatgatagactaacgtcgtgtagatgtcacaaatcctctccgaggtgagtcaccgctgcagatttatgaacaactcgacgctccggcgaggcacccatcttgttct

SEQ ID NO: 323421 - DNA, 155 bp, Zea mays
attcccgctgcgacccactcatccgaatctagatccttagcacacactgtctactactcaatcttacatacccttacgtgcgacaatttaactattacataccttcaactaaattcaactaactcaccgtctacattacacaatctatactcaca

SEQ ID NO: 323422 - DNA, 410 bp, Zea mays
cggacgcgtgggccggatcttgcgaagccgtgcaagtatcctgcttcgcggaggaggtcagtcatccgcctgccgagggccgagctcttccgagtttctgcggagagtgggcaacttttctcggtcccgaatcgatttgcctgctactcgcggtaggcgaagggaaggattcaaatcaacataacatggccgcagccaccgccgccgcttccaccatgtcgctgctcccgatctcccagctcaggcagcagcacggcgcgggcgccatgaggcggcggccctgggtcgcgcggcggaggcgatacgtcgttccgacggcgaggctgttcgggccggcgatcttcgaggcgtcgaagctgaaggtgctgttcctgggcgtggacgacgaggccggcagcaagcagcacggg

SEQ ID NO: 323423 - DNA, 268 bp, Zea mays
gtcctacgtcaccaggctcacgcgctacgccggctccctcgcctgcacgcccggcaggccctgctagatcaagccaccagcgaggacggccgacgaccagaggcagacctgcatgcattcgccggctcgccatgtatgaaacaggggagttgaaagcgcgacacaccagagaacgtgtctgtgtatactgtgcaaaggggctaaacgcaagagaatatgcacatatacaaagtcgcttattctgtctgcatattgaaggccaggtccg

SEQ ID NO: 323424 - DNA, 350 bp, Zea mays
ttaacatattgttatattgactgggttatttgtactgaaaaaaaaaaaaaaaaaaaaaaaaaaaaaaaaaaaaaaaaaaaaaaaaaaaaaaaaaaaaaaaaaaaaaaaaaaaaaaaaaaaaaaaaaaaaaaaaaaaaaaaaaaaaaaaaaaaaaaaaaaaaaaaaaaaaaaaaaaaaaaaaatatcataccttttaaaaaaaattaatattcttccattttttttaaaataaaatattttattattcgataaattaataaaatttatacgcctattgttaaaaatacattaaccaaaaaaacacttactttaaaatactaaaagaatttattaaaataacatttttaccc

SEQ ID NO: 323425 - DNA, 182 bp, Zea mays
tcggtcctgaattcctcggctctacccactcagtcctaaaaaaaataaatataaaaaaaacaattataaaaaataaaaaaaaaaaaaaaataatatagaatcttcacaaaaatttaatatatatattcaaatattttcctaattttttaaatctcatgtcctcttcttatttttttccaaat

SEQ ID NO: 323426 - DNA, 324 bp, Zea mays
aacacaccttcatctgcatctacgctggcacaactgcggatgaccctgatcaccgatgtaatggatcatgctggtcacagacgcccacgatatctccatcgtcaccggtaggacctccgaccaaaccgtcttcagtgcccaggactcgatcatgttccaagctatcaatgatggcaaagatctttacgccttcgatactattccatatattgacgatggcacacttcatcgacgcacgcacctggcctcacgatctaagtatttggaccctattgtcatataaagtgcttacacgtaatccgtcaggtccatcgctcatgtctt

SEQ ID NO: 323427 - DNA, 55 bp, Zea mays
cccacgcgtccgcccacgcgtccgcccacgcgtccggactagttctagatcgcga

SEQ ID NO: 323428 - DNA, 149 bp, Zea mays
aaaagagacaccacgccggccgcgaggaatgtcgcttgaaggccgacagacgcggcgggtgcgactatcgctctgagccgatgataaatgcccatgtggctctaacttcctatcatcaattgcaccctgccgatagcccattcagcaca

SEQ ID NO: 323429 - DNA, 423 bp, Zea mays
cccacgcgtccgcggacgcgtgggtgcaatcccatgcattctaatctgccaccagaggtcagatggtgggttcagtcacagccaaattttgggatccagaaggatattgttagcaagcggttatgttcgttgggcagggacattcatgagaagcaagtggaagattcagtgccacaacctaaacatgaggaaacattactctgtcaagcagttgacactagcactgaaaagattggagatgcgttggagcctccatggatggtttcgccagccttcacgaagtattcccttgaaacaggtttagaagagatgaagactgttggtagctattctcaagtgtcgaagtgtatagaaactctcagcaattgtttgtacaaggataatgaattcccagattttgaatgtattgacccagcacctttg

SEQ ID NO: 323430 - DNA, 74 bp, Zea mays
aaaaaaaaaaaaaaaaaaaaaaaaaaataaaaaaaaaaaaaaaaaaaaaaaaaaaaaagaaaaaaaaaaagggc

SEQ ID NO: 323431 - DNA, 368 bp, Zea mays
cccacgcgtccgatagagatttagaatcttgagagggaagtcattaaccttgcggggcaactatcttcaacacatggtgagcaagcaagctccattgttcatactattctttaggcctacatccttcgagcagacaatgtacaacttcatgatcatcttcatgatgcaaatgaacagttgagacattatgaatctctactagaagatatacacaaggagtcaaaaaggaagattaaatcccttaccgattcactcaatgtatctaaacaaaatgaataaatgctgaatatagatgccgacgatgtcataaagctgatagaagctgctaaattcaatgaagaaaattttataataacttcaaatgaact

SEQ ID NO: 323432 - DNA, 93 bp, Zea mays
attccctctctacccactcgtctccccactcgtcctcccactctttctatttaaaaaaaaaaatataaacaaaagacaagctaattataaaaa

SEQ ID NO: 323433 - DNA, 259 bp, Zea mays
cacgcgtccggttcattcgacgcgagaggaattgagtgggcatgtatgtgatggtaaactgttcacggttcaaacttgaaagcgcactgattcaagggcaaaaaatggtgtcagcaggagctgcaacgtcacagttttttagatttgtttgagcagtttaacattatgtatgtttggttagatcgtttgtagatctatatatatattcacttaaatccacatgtgttggagtggtattggtttttatatttttttattt

SEQ ID NO: 323434 - DNA, 173 bp, Zea mays
cgcactcttaatcgtattcatatctttatccaattgacatactcaaccattatactggcgagagactctttcatctacttacctcaacactataacatatacccaattcatatcctactatcagcatatacatattctcctccatattatcttcatcattaaccttacattat

SEQ ID NO: 323435 - DNA, 145 bp, Zea mays
gcgcccacgcgtccgccgcaagttcgacaacatgtacatccgcaacctcgagcggggtggaggcctgctcagcacagacaaggcactgtgaacagacatactcactaagccgccggtgctaagctagtcattgaacgccacagtc

SEQ ID NO: 323436 - DNA, 194 bp, Zea mays
cgggagcgggcgccgaccggttctgcgtgctctcactggccttgactgacggggtgggtggcttacaagggaggcagactcacttggataacaggtccctgctgatcaactcgaactcctgacgaaattgtgaagcctgattctctcaaggcaagcaacgatgaatgcatgcccatgtatcataggcccttcat

SEQ ID NO: 323437 - DNA, 253 bp, Zea mays
actacttcaagaggttgttcaacttcaagaaggatagggatggctattggaagtggtgtgctggcaacctggcctctggtggtgctgctggagcttcctctttgttttttgtgtactccctggactacgcgagaacaaggttggctaatgacgcgaaggctgccaagggaggaggtgaaaggcagttcaatgggcttgtcgatgtctaccgcaagacacataagtcagatggtattgctgggctttaccgtgg

SEQ ID NO: 323438 - DNA, 257 bp, Zea mays
cgcacgcttccgaacccaacaccctttcattaacgtgatccacatatcggaccgggctatctaagacgctgatcgacatactgaacccatcgaacaagcccggaggatcaccacacatcacaatgatggatgcacataatttcatggtctagttacctcaccttatcctcacggctctccatgctatacacaacgatatcttgatcactgacccgatatacagtatcaccatcaataatccttacagactaaacatt

SEQ ID NO: 323439 - DNA, 418 bp, Zea mays
gccacgcgttcggccaaattccccagcccacaccacctgcacacttcagttgtttcgggcgcaaagggttagggcttgctgtcggcgatgtcgagatcggcagccgtctgaggaaccggaggagcaggtggacctggagggggacgacgacggcatggacgactacgacgccgggtaccgtcgccgcggaagccgggacgactcgtaggagcccgaggaggatgacgacaatgactagcgccacggcgaggccgacgacgacgccaggatggagccggagccggccggaagtaaaggcggggatgacacggtcaaggggcccgacgtcgtcggtggcaggcccgaggacgaggaggataggagcaagtgggatgacatgctcgccctgccgacccatggctttgacgtcttcattggt

SEQ ID NO: 323440 - DNA, 431 bp, Zea mays
cccacgcgtccgagcgaacgaaccagcgaccgacgctccccgaccagcgtggtgaagaggacagcagtcagcagccaatggaggcagcactgacgcagcaggcgacaccgacgaggtggcggtgcgtgggggacgcgtcgctggctagccatggccagggccagcagcgagcaggcgccgtccggctcggagcggcgcggcgtgcggtcagcggggctgtccgggctagcagcagcaggcatctgggccccgtgcgggcgctcgtctccgaagaggccgccgccggcgagcgggcggcggagggcgagggaaaggacgccgcggtgaggctgttcgtgggccttcccgcggacgcggtggtctccgacggccgcggcgtgggccggcccaaggccgtctcggcggcgctgcgcgcgctcaagctgctcggc

SEQ ID NO: 323441 - DNA, 341 bp, Zea mays
attaactaatgcatgagctagcatggctggtaatgtcctaaccacttggacttcatggcgatcacatattgctagcgctgccgcacatggtgtgacgtggtgatcgcggcataggctagccctcccaatgtccttcatacgctaacatgccagtccactatggctggactgtctgtacgcgtgtacggacatggtatcatctgcctacctttgtcatgttatgaaacgacatttgccacgtggaactacaatgacccagaacactctggggctcctataacgtgtgctacatgctggcacatacgtatcagtgatgacggcttcggttgttggcaatgctt

SEQ ID NO: 323442 - DNA, 422 bp, Zea mays
gctaggaaagtagggttttcgatggattctctgagccggagggagcgggcacaccgcgccgtcgacgccatgaagcctctgggcttctcgaagaaggaggtcttcgccgtcctcaagaacctcctccagctgttcgataactcctgggagcccattgaggacgagtgctaccgcgccctcgccgatgctatcctcgaagcccgcgaccggccccagatgcattgcagcaacagtacaagaggggttcggcttccgccggaaggggagggctgccggccccggccttctacttcccgtgacatccacgacggtctggatggtgggaccgaggcccttcgcatcaagaggacgaggatcagcgctagttgctctatcgatccccagtcttccggctccgctgcggaagcccttgatgaacctat

SEQ ID NO: 323443 - DNA, 171 bp, Zea mays
ccagctcgttggcccgggccctgggccccgggcgccctcacgcccgctggccgctgtaaatagcgttcggcgttcctgtctccacccatcccaagaagagccgccctacctattccttctccccgccgccgacctgccaaaccaaaacaaccagcagccttaacttctttc

SEQ ID NO: 323444 - DNA, 173 bp, Zea mays
acgcgaacatatactcgtacttattctcataaccactacacgactacagccagtggccggtttacaaaactcattcttacatatacaaacatgcaactgcataaactgtatcattataaaagctaaactcacatccaatcttcccaactatacaacgaccataattctaaaac

SEQ ID NO: 323445 - DNA, 429 bp, Zea mays
cggacgcgtgggtgccaatgctatgtgggaagactatcatgcaaacactatttgatggttatgtattttccagtatctctatcatttgtatggacatgtatcttttatttgtaaggacatctatatgttattcgtgtggacatattgctaaattttggaagtatcttttatttgtatggacatgtatcttttatttatatggacatctaggtcatggataaggagacaagtggtgcaaaagctggtggtggactatgtcaatggacaccaactcaatccacatttgttctcacctttcttagcaacattgttgctgatggcactaaaacctgcactggcttcaagaaagttcatctcaatgcttgtgctaaggctctcaacgaccattttaaaattataaggacaggcgatcaagtggctaatcacttg

SEQ ID NO: 323446 - DNA, 105 bp, Zea mays
agataactctccagctgatacagcaatgatacaaaagctcgctcgaagaatcgaatggatggagcactgagaggagcccatgaattgggacagccaggtggcgcg

SEQ ID NO: 323447 - DNA, 427 bp, Zea mays
cccacgcgtccgcccacgcgtccgcccacgcgtccgcccacgcgtccgcccacgcgtgcggcggagaaggagactgccgccgccgccgcaacctcgaaggaggaggaggaggtggagtcgcccaagaaaggagcggctctgtcgccggtgccggaggctatcgtcatcgccaccgccgcaacctcgaaggaggaggaggaggaggaggtggtggagtcgcccaagaaagaagcggctctgtcgccggcgccggagcctatcgtcatcgccggcgcaacctcgaaggaggaggaggtggtggaatcgcccaagaaagaagcggctctgtcgtcgccgtcggcgccggaggccatcgttgccgtagcagcagtggaagacgtggtggcggacaagttcgtgacggttgtgaaggaggcgatcaagaagc

SEQ ID NO: 323448 - DNA, 100 bp, Zea mays
tcggccacgcgtccgaccaaccgtccattcataaggaaactcacacaatccaagggtctgtacaatatgaaaaacaataccctccataacttgatagtga

SEQ ID NO: 323449 - DNA, 133 bp, Zea mays
cgcacacacaaccccgcatttttctccttacaagtccactcagtacacaaggtgccgttgcaaatttagttccggtttgctgtcaagctcttcctgcttgcccttcggtaagcatttctcggagaagacgact

SEQ ID NO: 323450 - DNA, 74 bp, Zea mays
accacgcgtccggccacgcgtccgtccacgcgtccgcccacgcgtacgcccacgcgggcggttctagatcgcga

SEQ ID NO: 323451 - DNA, 98 bp, Zea mays
tttctatcactaggagctgcgagaatttatacccgtgcaatgatggaacggccacaaccttgcatctcgatgcttctagcataagggtcgccagtgca

SEQ ID NO: 323452 - DNA, 76 bp, Zea mays
acggacgctttagcagacgcgttagcctacacctgcgccagccaaggaagcccatgcggagcacacggaattcggg

SEQ ID NO: 323453 - DNA, 362 bp, Zea mays
cggtccagattcccgtcgagacacacgtacgcaaaatcaactacttaaactccatatattataccctgataacaaaatacgaacccattgagcatcataactagatctatgcacgccaaaacatatacttcatccaaatactactacatcaccatctcactcaaccaatactcatattactaaaccaacccctccaatatgataccgacctgtaccctacacaactactacctctcactccctcaatcctaaatcgtacttacactagcagctacacctaacattcctccaacttatacataatcttttcctgttgtacaatcttctacaaataaactttttcgccagcatctctgatcaat

SEQ ID NO: 323454 - DNA, 85 bp, Zea mays
gcgctacacagtgtattgtgcattacattggtgtgctgctattccatatagaatagtacggtggatgaacaaaaaggataggact

SEQ ID NO: 323455 - DNA, 184 bp, Zea mays
taacaagacaaaaaataatttgcccaaaaaattactagaataacagctcctatcctacgatgtcttcatcagcattcggcgacttctgtccgctcaccgagctccgtctctcccaaaaggcacggcatcagctcactcacatcatgatcgccgactcgactatctccatcatcatcatactcat

SEQ ID NO: 323456 - DNA, 363 bp, Zea mays
cccacgcgtccggtatatatgtggataacatagtagtcgagctgagcacggttgcgtagcctctgctgatgagggtgcacagggcgaatgagtcgttcgaacacggatgctctgactgggtgcctgtgaccatagagttcggcatccctttgtttagcccacagctctgcgagaggatctgcgagagggtcgtctagtcacagatgcttcagaaagacgacatcactgagcactactagacgatgcagaacgtgaggaggaggctgagagagctgtgcaccgagtaccaagcgaccggcccaacggcgaggctgttcaatcagcggggaggcttcaagaacaccttcccgcgcaaactggtgc

SEQ ID NO: 323457 - DNA, 346 bp, Zea mays
cgtcgccaccgtcggaacatttcactctccaggataacccgccccaacccaagagtgttcaaggcggggtgctaccaccaccttaccaaggccagtttgaccaccacctttggcttaaccttaagattaaccatcttaagattaaccaagccggcgcttccggcctcattaagcttccctttcgcggcgttccctacaacgtcaaccccatgttccccaaggggagcaacccccatttcaacacgttcaaaataaatgtttgggttaaccaagacttcaacaacgccaacgggaaagacaccggcgggaaaagcagttgccgcggcagcaacaacaacatcggcag

SEQ ID NO: 323458 - DNA, 342 bp, Zea mays
tccacacatcctataatactaataaaatgcttgcatgcatatattcatgcaattcccttacgtgtcctaaaaatgaagcaccaatctattctatacgtacaacataaccaaataacaaacacactgaacacaataatataatcacacaaaatactatatctgtatttctattaatatcgatattttctaagctaattgccagacaccaaaatataccaaaactataacttcaaacctaatctaacgcacaactgtcttcttgatcaatttaatgcataatactaataacgcttgttcgtacgtactactatacttctccacaaggaaaccagtaaacagcaa

SEQ ID NO: 323459 - DNA, 449 bp, Zea mays
cggacgcatgggcacatggcgtacagcgtcatcggactgcaggtggtgcagacaggaaagggggtgaggaaggccaagctgatcggcgccacggagatcgcggtggccagcctcgacgagctcgccatgatggccgtcgccctcgtcgctggggacgccgagcacttctgctgcctggcggcgctctcgggcgcatcggtcgccgacgacgattgcctgttctgcgcgtggctgaccaaccccaccgacgacctcatgaggctcttcccatgatgatacaggaataggactaggagacgcaattttttggataatagtcaattcgtgtacctagctccaaatatttagcaggtataagctccaatcatttacgcgtactgcatccactttgatttttgaaatcaatattataggaaagacataaacttgcaataactttatccaaaata

SEQ ID NO: 323460 - DNA, 265 bp, Zea mays
cataggaacaaattaaatccacatgccattggtcgaattcacatgcagggcagagtccttcagttagaaaaggaaaccaatctattaatcgagcatagcaggccgtatcacgagagggacttggctacgggggcggttgaaaggaggcctgatagcaagccgacgacaagcgctctgttgtacgtggtcggctcgttctgctgcacattctccctgtcgtcgacaaacgagtcgttcttgaacggcccgccgaccagctcgccca

SEQ ID NO: 323461 - DNA, 365 bp, Zea mays
cggacgcgtgggctgtaaagaggaaaatggtggaaaaaaaaaaaaaaaaacaaaaaaggaaaaaattaacagaaaggtgtggaatctcgaacatcttatctgatcccacctacgttatctttcatccgatgtgctacctcatttatactgtccacctgacaatgtctactggccggattgttacaacgacgccattcctaaaacccttaatttacctaaattaatcgctttggacaccatgcatatttcaactgatgccataataactaatattcccctaccgcacgtacgcttaaactagtactacactctgaatgtcatatggcacactctttctagcgtcacattaaactcggcctattttg

SEQ ID NO: 323462 - DNA, 303 bp, Zea mays
tccgacacctggattttccacttttttaatactactcttcctacactcttactatcaatccttcctctctttaatctctggtctgcaattcttatcatccctcctttttcaatctatcccactgtattactcttatcaaaaaccacactaatctaccaccctatcccacccacctctatctccgaattctagctcctctcatacacattctaccatttccccgactactaaaccactcataaaagcaaccatcatagacaccaactctaacaatatcaagatctctaattcccctccttacca

SEQ ID NO: 323463 - DNA, 455 bp, Zea mays
actcactcacgcgctatgcatgaccaggattatctgaacagggagatccaggagctgggcgataccattcctggtggggagtcagaggatcaccaagaacgtgttagaaccctacatgatgataatttcattcatcacactctagttaatccagctgatcgttatgccacccataatgagctacattcacctgtacattatccacacgctgaggaatttgaggatgactatgaaatctaacaactctctcaggatcattagaagaacatgaacaacaatgatcgacctcacgcatatattgcccatatagcggaacaatccattgctcaattccaagtatcatcctaagaacatgcaaacttgaataggccatcaataccagccattaacaaactcatgaagcttactctgctcatacattttctcttcaataataatcttcagcaggaatttct

SEQ ID NO: 323464 - DNA, 233 bp, Zea mays
cctcctatttctatcattcccaatatcctcctctaattaacaaccttactaatctcatgccccataccacccacctctaacttcaaatactaacacctcgactccatattctatattatccccaactactgcaccactcattcaaaccactatcgtacacgcaaactctaatctgctcaaaacctacatcgcatctccctaccattcacccctactggtaatgccacttaaaa

SEQ ID NO: 323465 - DNA, 175 bp, Zea mays
ctctcgtcgtgcccaccctttccatctggctgctggcccttttttgcaatcaatcggtgggctcttggttcttccgtctgctggggtgaatctctctctttctcttccgggagaaaccagaagagagagaaggaagaagaaaaatcgggaccagcctggtctttttgcccggaat

SEQ ID NO: 323466 - DNA, 361 bp, Zea mays
aattcggcgtcatcctcgtcggacaaaagcaagagaaaaaggtgatgggaacccatagaccagcctgtaaggccttggtcggggaacgaagtttatgtaaataatgcttctactgtgaagagttccatcatatttgttgctccagaaaagaccctcagaccggtgtttcctgaacccatattcatacaaagacatcagacgatgaataatgttgcgagtagtcaaataaaataaataacttgtatagtgaataactagaaactagcattcatcgttttggtattgtatagcgctagagtgtaattgtttggtcggactgtcttgtataatggtgtagggctcaaacgcattgtgacctagc

SEQ ID NO: 323467 - DNA, 425 bp, Zea mays
cccacgcgtccgcgtcgcaaccacggctgatagtttgtacgttgccgtcacgtttgctccaggggcgccatttattttcttatcatataaaaaaagagaacagatgattcccatggagaatatgctctccaaagttacaaccctattttttaaaggatttctatattactgaagaaaattagtttatttatttatggaaaaaatagaaattattaagcaaaatgggtcccaaactatacctggtcactagtgtagctggtaatccgccattccgcgcgagatcagtagggtgcgcgtgctggtgctggctacggccatggcgacgcccaccagcaccgtcacccgcggcggcaacaggcattggcattgtacccaagtgcttccactgctgttgctagtaccactatgcttcgcgcttctggttg

SEQ ID NO: 323468 - DNA, 86 bp, Zea mays
tctccaaccttcaataccctcttctccttattactcacatgctctacaatcctatctgagcacatattatactcgccctattatca

SEQ ID NO: 323469 - DNA, 310 bp, Zea mays
cccacgcgtccgggcaccaacacggcggcgctgagctagccagtcactcaatctaagggggctacattcacataagaggctaataccttctacaccgttatctgctcatccttctacttcactgataacctcatggcctacatacactactcatcgtaacactatgaactctcctcgttctatctcaacactaaccttctacaccctatctactacatcttccagctacttctacattcccagaaccatatacgagccacactccacgactctaaacacagatcacttcacaaactgtttcacatggcat

SEQ ID NO: 323470 - DNA, 439 bp, Zea mays
ctcaccttctcatcctcatccctccacaccaaccatcgactgagcaccagtcgtctcactccattccgtgggcgtgctctcatattcaacctactcccccccctcagtgccatcgcctttcccactggaattaccccactccgctgctcactcatttccccctttctcctcacttcaccacattatccactctatccatacctttacccctctcaactgttcgatttgcatcccactcacaacatttattatacagagcgccacactcccattgctcttcaaccaatttaatgccacgacgaagctaatatcactaaatacacatattcaactcattaaagaccatatgaataatattgatccaaaatcacttcattacctacaacctaatatttcaactctatttcaaaaacatggacttaatccacttactccaatt

SEQ ID NO: 323471 - DNA, 339 bp, Zea mays
tcgcccacgcgttcggagaactgtccgctgtcgtgactgacgttggggaggtcgtccgtgttcttgattgtgcgcagacctgatcttgtcgcagtctccttttccacgttgctactttactgtagcattgcggtagacgacatgatgagtgctgaaggttgatggcaatcaaccactgcatagaactatatagctgtcatcctgttctgtctgtcatctactgactgagaccaattatatgacagacggttgctattggctgtgctctagatcttagtctgactgacgtacttaacgcagcggtcttctacatacttattgacattgctggtaatagta

SEQ ID NO: 323472 - DNA, 394 bp, Zea mays
tcctcacgcatctaacacccgtactcgcctcgccaccatactacacagcatgacgtcggactctcaacggccggccctctaccaagaggaggtaaccctccttgacaccgccaagactcactcttaccacttcaacaagctcatgagcaaacccatcaaactaacacacctacacctaccaccatttattcctcattctaaaaactcatcttctttgtctgatctacctcaccttgcatatatcctcaaaacccacaatgataacgccaaacatgctcttgaccatgaaccacatggacatgaaatgcactctttaccatgcagactcttctaagcatatctaatctacatgctctttagcaaaaaagcttatgcccttacactcatgctcata

SEQ ID NO: 323473 - DNA, 98 bp, Zea mays
atatatacatatatatataatactaacaatcatacacataaaaataactaataataaagggggacaatatataaaaagagggaaaaagggctgcacgt

SEQ ID NO: 323474 - DNA, 377 bp, Zea mays
  unsure (1)..(377): unsure at all n locations
cccacgcgtccgcggacgcgtgggtccgaagctgaatggtagttcacgctgagcaacggcgattggcccgtgtggactcacttgtacatgaaactgtagtgccagccaaccagaataaatgtaaatctagtcggccggccttccaaagagaagttctttaggcctaggaaagaaatgtaatcctgttcttaagcttagcctccattaggggtccttcaatatccgattagccaatgaaattggtcttaggaccatggttttagtaaaccagttaatcaaatctatattcctggagttgcgtggcttaaaatnaaccttgatatatattcagcttcacaaaaggtggcagtatatacaaattttcttgtgaaattgta

SEQ ID NO: 323475 - DNA, 414 bp, Zea mays
cggacgcgtggggcagcatttaagctgcctcaacactgaagccttcgggaccgccaggtctattaagtgcagccatgggtgcctgtgcaacgaagcctaagacgcttgaggggaaagccccagctgaggccaccatctccacacccaaggttgcacctgagaccactgccatccacattgaggttgcggcgaaacaggcagtagttgagaaggtggaggaggacaaggaggaggcactaacagtggcggcgaaacaagagccagcagccaccatcgagcctcaacagattgctggtgaggtgaccacttcggaagtggcggtcgtcgttgtcgagcctgagaacaaagaggaggaggaagttgtggagaagaccgtcatcgagaaggagaagccatcagcagtccatgaagagg

SEQ ID NO: 323476 - DNA, 395 bp, Zea mays
atggattaacagtaaaacaaacaagcccttaatgagtctagttgatataaaatggattaagtgacatggaaaaaaaaagaaaaaaaaaaaaaaaaaaaaaaaaaaaaaaaaaaaaaaaaaaaaaaaaaaaaaaaaaaaaaaaaaaaaaaaaaaaaaaaaaaaaaaaaaaaaaaaataaaaaaactcaaaaaaaaaaaaaggggatctattttaaaattaccaaaattaaagttcactaattttaaagaataaatctatttaaaatattcacaaaatctaaattatatggccgctaataaaaacgtataatttggaaaaaccatcatttatcaagattaaatcctcagtgaataaattcattctatggcattagatacatttactaaaagacctat

SEQ ID NO: 323477 - DNA, 376 bp, Zea mays
cggacgcgtggggtttacctgaagcacaagaataaacgcagccgggcatgggcgaagctgagctgaacaacgtgaccgtcctgctggtggccctcctcctcctgagcagtggcgttcaggacgctgccgccatgccaggcacgttgaactacgacgcgattgtcgccgacgagccaaacggaaagaacaaggacctgtaccgtcccgtcgccaacgccaataaatacacccgcgggtgcgagcccatagaacgctgcaggggcgcgcgctgatcaccaagcatatacatatagcacatcgatttcttattattgcatgcacgtttatataaaaaaaaaaactaaatacataaaaaaatactatgaaaacaaataca

SEQ ID NO: 323478 - DNA, 273 bp, Zea mays
cacacgcgtacgcactcctattctctcatcactaagctcaaactgattaccctcagtgccattactggctcaagctcaaacccttctttaacaataccaacttctatgtctcatacgttgacctagcttaattctaaatatattatacttaccccatctacatacaagaattctcaacaccacgacaagccagtattagacctcatatcatcctataacttcctcatatacaatgaactttactggcttcccatctgatacactaaacatgaa

SEQ ID NO: 323479 - DNA, 326 bp, Zea mays
ctcactccttctctctcttcaattacctgctcaataaactgcaacgatgtcgaaccgtgtctcagaccgtttctacgagctttcatacattgatacatacattgctataccctatttaggacaacaacgtattcttatgcatatctccatgctgatcttactactccttatccatgaacggaccattacatagactcttgcccataatccttcacataatcctccaaaaaatcagaagcatcacctttagcatcaaatttatcttcaaaatcatcctcaaaatcaaactgtgcatcaaattcataatccaattcatcatccaaatc

SEQ ID NO: 323480 - DNA, 385 bp, Zea mays
ataccttcactcgtgagatagacctcgcacactttatcgttcacaactcctcatacatacctatgggcggaattcaccaccatctggtgaatctccttactactattctgaactattctatattgactatcccaaccaccaagctcttacctacattcagctactaaccttatacccatctacattctaatctcctgctctttctcacctatgcaccacttgctttcataatcatgccctatctagactatgactctcatcactactcacctcaatatctaaatcactgtcttatcagtaactcatatcattaccgggcaatcatctaagaacatgatacttacgattggaaatcataacgtcaatgaaccgtaaatgttctcat

SEQ ID NO: 323481 - DNA, 399 bp, Zea mays
tccactcgtgcgataaccctttcacagactctttttcacaacccttgctacacacctatcgttggtaacttaccttgctctgtccaatcttcttaccactaactatcaatattctatatttactattgcaaccaacacgtggttacctacacatcttctactacctatcaacccatttgtttcctattctcctgctcttgctcacctatgcagccctactttcatacaacttaccattctttatgattactttgttcaagaaccattacactatctaaatcaatgtttgctcaatcacttaaatcaataccatgcaatgatcgaacaacatcatacttgtagatcgaaattaaaacgacatggaacctgaaatcttcataatcgatctctattttatac

SEQ ID NO: 323482 - DNA, 252 bp, Zea mays
gcgattcgaaattattcgaaataaatcgctcatgaatccctgaagcctgcatatatgtgtggctcccaagattcaggcggatgagtcgccacccacgattcagccacgcggtaatcttcttttccttctcactgtgctcacctatatggaacacgcaaggcaatgcgacaagtacagtgaacaatttcctggctcattcattatcccataccactgggaccatttttaccccggcaaagacttttttgccca

SEQ ID NO: 323483 - DNA, 349 bp, Zea mays
cctgcaatttgtaagtgtaatgacctatatgatttaatcttccttttaaaaaaaaaatatgaaaaaaaaaataaaagagaaaaaaataaaaacaaaaaataaaaaaaaaaaataaatatactataaacaaccaaaaggccggcccttataaaggatccaaacttacttacccatgcttgctacttcatacctcttctatattcacacttaaattcaattaattgtccgtctttttacaacttaggaactgtaaaaacccttgctttaccaaacttaatcgctttgtatcaaatacccctttatacaactgacgtattacctaataagccctcatcgatcacctttccaa

SEQ ID NO: 323484 - DNA, 446 bp, Zea mays
  unsure (1)..(446): unsure at all n locations
acgcgagaaacggacaagggagttccgtgctggctgacgggacgcccttggacgctgcggctggatgatccagagctctgttcccggtcgatcgagtcgagtgcgttcagttttggacgggacgcgggggttggtggcatgtgcggctcctgatcagagatctcggcaggcatgcagcagcagctgaaggccgcaggtgcaccacgtccccccggctcagcatccgcggtggcgcctccgccggaggcccgctccccaggtccaaatcttgtcgggtccgagcagctgcctgttggccatgcacagcgcgacccggcgcatggcagcagatcgtgcctgccgcgacctgcgatgtgcacgcgccatgatcgatctggattctcgagtggaagccgtnccacgtgagcgggcggctcccttacgaaaaagatgaactatgggggtct

SEQ ID NO: 323485 - DNA, 418 bp, Zea mays
ccttcaccttcaccttccgaaaagagagaccgaggaggatcacaggaggacatccgggtaagcaggaatagaacaaccccataaaccatatcggaccatacatttgcaaaagcttgtcggttttctagcctccaatcgtccctcaactcaagcctgatgaaagaagaggaggtgaatccttaagagcaagcagactttgctgactgaacaagacatgtgacttggcaagaaagcatggtccttaaccatctgcagcttctggctgcgcctcacatcaagtaactcagctgcaagcggcaccttctggacatacctgacatcattaggaaaaatattggcattagcacgactccaaccaggttgtctgccatagttttgctggagggacaaaaacagaagcgttcctgactctacctca

SEQ ID NO: 323486 - DNA, 408 bp, Zea mays
  unsure (1)..(408): unsure at all n locations
cggacgcgtgggttagaggacctgtccaatagagtcgagctgagcacggttgggtgggttcggctgctaaggcttcacagggcgaatgagtcgtccgaacacggaagctttgagtgggtgcctctgaccatagagttcggcatccctttgtttagcccacagctctgcgagaggatctgcgagagggtcgtcgagtcacagatgcttcagaaagacgacatcgctgagcactacgagacgatgcagaacgtgaggaggaggctgagagagctgtgcaccgagtaccaagcgaccggcccaacggcgaggctgttcaatcagcggggaggctccaagaacacctncccgcgcaaactggtgcagatggtcagcggtagatggagcccgttccatgatccgtctacgccc

SEQ ID NO: 323487 - DNA, 125 bp, Zea mays
gtccttccaaattccgggtgcgacccacgctccggctatcaccggtaccttccttttccgctgctcgctatgtcgtcctgtctcttactactcgcggactgaccaactcctagttcactgcctac

SEQ ID NO: 323488 - DNA, 361 bp, Zea mays
tcccactcctcctaatacaataaatattaaaacaacaccaaacaaaaacataaaaaattggcaaattaaaaaaataagactgaaatctaaaatattaaaacctctaactaactactccacaaatccatttcgagaactacatcactatctccctcactgacaaccactgcccctccatgcacacaccaccacatctcgccctcgccatctactccacactttctgacatcaccatcaccataatcatgctcaccaacgctcgttccacctttagctcaatttctctcacttcgcgtccactacttccttgacgacaactccttcgttcttcaatccctagttccaccagatcctaaccttc

SEQ ID NO: 323489 - DNA, 281 bp, Zea mays
tgccacccgcgcttttttttttttttttttttcttgttcaacatcaacctgacattgcaacatctccccctaagggatggtcaatacacaaaatgcaattgccaaatgtacaacccgatttcaaccatggccaacacccaaacttaaggtttacctgccctctatgataaccttgctaacacccccattcaaaaaactttcatccatttttacatctatcaacgcgttcactatctacatcgctcctccataacatgccctcactaaacaggtatctctcc

SEQ ID NO: 323490 - DNA, 262 bp, Zea mays
cgcacgcgtccgcccacgcgttcgcccactcttactgtctagctgcttcatcctaaggggccctatataagtgtccatctgttgcatcctaaatccttcgctagttgcaacatgaacttctagccgaaagcatattcgtcgtcaaaaagggactccgagaggtccagaattaggtcctcggcggtgatctccgaaggtgccacattttccgactaagcccttgactgatatgggtcacacatcagtcccataagccgttcat

SEQ ID NO: 323491 - DNA, 421 bp, Zea mays
tactccactcatcctcccttttttttttttttttttttttttttttatttttttttttttttttttttttagtttttttttaatttttggtttatttttttattttttaaatttattttttttttttttttatttttaaaaaaaaaaaaaaaaacataattatcaaaaaaatttttaaaaatttttaaaattaaaaaaaaaattttttatctgttttttttataaaaacttaaaaaaaaattaatttcaaaaataaaattttaaccaaaaattccttaaaaaatttttgccttttgtacactttttcaaaatttaaaattattattttaatttaaaaaaaattttaacattcaaataaaaaaattttatttttatgaaaaaaaaccctttaaaaaaaatacccacattttttatttttttt

SEQ ID NO: 323492 - DNA, 61 bp, Zea mays
attttaaatgccgattgccttggtttcaaaaaaaaaatacaaaaacacaaacatggggaca

SEQ ID NO: 323493 - DNA, 408 bp, Zea mays
gaaatcgcatagaagcgaaagagaggacacacacattaggctaaagcgtcggttgagggcctcctacaccgctgcacggaaccagtctcgtcctcactgtcatcgccgatcacatgtcacaggctcgcagatccctggttttagatgttaccaaagaagtatcttttcatgagaagcaatggatatgatggagttctattctttattaagcatgcgctccctcgccacgccccgtctcgcactctcgccacacctcaccaccggtggaggagcagcagggggagaccgggttggaggcccgcaggaggcggagcccacgatgcctatgtccgtggggaaccagttgcagcggccggccgagtgcccgccagcgccgcggaagctggtgtgggcgcctccgcttccgtc

SEQ ID NO: 323494 - DNA, 341 bp, Zea mays
gggggtctgtcgaccccgctgcactgtcaaaccacttccggttcaagcgccggttgcgggactgcaagaccggagcacacatccagctctctgagcacatcatctacccactcacatgctactacactgcactatccgatccaacatccaattaccaatgacgtatcacactttgagacactctgggccgcttggtacgtgctatattgtcttaatcatgctctggatcaacacacattggctcacactctagatacacatcaccaaccacttatgaacatctactggagacctattttgaggctgatattatgccgaacctacattgcctattagcatgg

SEQ ID NO: 323495 - DNA, 255 bp, Zea mays
taataaccgaatacccagaccaaatctctcgtcaccttcgccttcacatcgcatcatgagcattctaaacttctgggaccgaatacattttcagacactcaattccaagatccattgttagatcctaccatacttcttcttcttcttcttgctcatctgatctctttttatattcatcaacaattctatccaactaatcttttttattaatcatgctctacctctccaaacatactctcgcactctcgacacacc

SEQ ID NO: 323496 - DNA, 96 bp, Zea mays
aaaaaaaaaaaaaaaaaaaaaaaaaataaaaaaaaaaaaaaaaaaaaaaaaaaaaaagaaaaataaaaaaaaagaaaaaaaaaaaaaaaaaaaagg

SEQ ID NO: 323497 - DNA, 354 bp, Zea mays
gcaaaaaaaaaaccatcacacaaaaaaaacaaaaaacaaaaaaaatttttaaaaaaaaaaaaaacaaacaaaaaaaacgggaacttttaaaatcttgtggttacctaaaaacatacctacatttctatccatccaccgttttcatacaccaccttcccacattataatttttctatacactaacttcaactcatttcaaagccccctctctttaaaactcttactcttctaaaaaacctttccttttcccatctcaatcccctacatccacttccccttttccccaactgtctttctcccaaaacccctccctacattcccctttccatcatttttacactcctaatttccctt

SEQ ID NO: 323498 - DNA, 367 bp, Zea mays
cccacgcgtccgatctatgggtgcgtgcgtttgttgtccgttggggttcatctgtgcttgttaatatgtactgggatcatgttgtgcgtatgtgtgtgtcgtcgttgttggttgattctttaatttggttccttttgctgtacttttgtgggccatgaaaacgggggaaacttggtaagaacataggatttctgatgtttctttaaagatcgactaaaaatttagtgttcatgatagacagacagtaacgattggatgggcttaaaataggggtctcagcaatgcacgtaaaataggggtctactttatatttttgacattgctggaagtaggatataaatggtatagatattattggtgtatactc

SEQ ID NO: 323499 - DNA, 296 bp, Zea mays
catctatatctactaacaatactggtactttatataattttgcgttcctcaacagctaaacattttttctactcacaactattactatcaccaaataaccttaatcgacatttttcacttaaaaccctcatctcatacctccacactatctaataaccccacaccacctttttcccataacataccatatactacattttcaacattataaatcaattctattcgctataacatctactacctacaaaactattactccgacctacctaatacattctcattcaacaccaatctat

SEQ ID NO: 323500 - DNA, 296 bp, Zea mays
aaaaaaaaaaaaatcaaaaaaaaaaattaaaaaaaaaacaaacaatataaaaaaaagcgagaattaataactcttgcgtgcgacaatatacactctcactcccctcttacctcccctcatttccttcaccttctttcttacaacttcattcctttttattccctttacattaccctactttgtcccctttcttcacatcccccttttgccaaaccccttactttcccaaattacctcacctatcttccttcccaacttttccacattctcattctttataagaacccccactgtat

SEQ ID NO: 323501 - DNA, 410 bp, Zea mays
actccgccaacccatcacaccttctcatccttttccccctaccccaacctcaacccaacgccgatcttttacaacgatgcggcggacatcctttcacattcatccgactcataaccatcaacaccagcacctttcccatagaaggtatcctccactactacggactcattccccactttttccgcacttcagcacattatccactctatccatacctttaccccgctaaactagttcgtgtccatcacccttacaacatttattatcaccatcgccacactcccgttcatcttcaaccacttgaacaccaccaccaatctaatagcaataaattcaaacatcgaaatcattaaagaccagatcaatactatctatccaaaatcaattcaatatgcacaagctaaaattaa

SEQ ID NO: 323502 - DNA, 306 bp, Zea mays
atttcgaataacacagttgagcgcgactatgggatccctcgctaataacatcatgggcgtgggtgtcgtcctggcagcgctcgtcgcctgcatgtcatgcgggccctcgaaggttcagcccgttctcaacatcatcactaactacaacgtcaagtggctcatcgtcagggacaactggtacggttagcctaacagcaccggctctcccgacttcaacagcgcgtacatgatcaacatcatgaacgtcttatactagccagggcagattgcgcctacaagcctgttcatctgacctaccgagtacat

SEQ ID NO: 323503 - DNA, 221 bp, Zea mays
cccacgcgtccgattctacaacaatgtcacgtacatgcaatgtaataataaaaaaagtatgtgatatatttaacaaaaaaaaaaaaaaaaaaaaaaaaaaaaaaaaaaaaaaaaaaaaaaaaaaaaaaaaaaaaaaaaaaaaaaaaaaaaaaaaaaaaaaaaaaaaaaaaaacaaaaaaaaaaaatacaaataaaattcaacatacaaaaaaataaaaaca

SEQ ID NO: 323504 - DNA, 343 bp, Zea mays
tctactgatgtttggagatgaaagtagaggaccgaaactagatgcatctgagagcaattttggtagcagcgtttctagtttcgaaggagatcaaagcaatgcatcacaacattctttcactaatattgggcaaaactgtaatgagaatacctacagaactccccatgattttgttgaggctgctgcttttcaatcaaacccatcaaatttcagtgggctgaactttaaattcggtgtgtcatcctctccacaaatctctgctgcggcagcggcacaaagacgtagcacaagaaggaagttaagaacaaagggtagtctagcatcgaaaccttcaactatcgac

SEQ ID NO: 323505 - DNA, 134 bp, Zea mays
ctcacgcgtccgggcgccgagtcggtcatcatcatgctgcaaagtatcggcacggggagcgcgctgatcctcggggctctagtcgtggcattgctcgtggagatgaaacgtctgagagctgcaacggacgcctg

SEQ ID NO: 323506 - DNA, 352 bp, Zea mays
cacctgtaatggtcgacatgtgcttacaatgactagaaatcttgagcgcgcaggggggggctcacttttgcagagcatgtgcggggtttcacccacacatctgtcatggagtcctgagcatcatgccacagatgttgattacacttggagcactgtacatacaccatttggtcctttttcatagaccaaatcactgtcttttgtgcagaatgatgcatctcgtaagaatgtgcttctgacaaccctgaactacacaattaccaacacaatagatgttttggagtccatggtagcacatggcggacagaattatcttataaagaatatgcatgttgaattcattcaaaggttg

SEQ ID NO: 323507 - DNA, 396 bp, Zea mays
gagccaccgtctgacggccgctcatctcgccatcggtagggcttcggcaatcccaggtccattcgccacctgcgcctttcctgctcccgcgccgcgaccatacacctactccacttcaccacctactcccgtcacaccacctcctatgcgactacgactactaccgctacccttcccgtctgccacccggtcacccccgacatcttccacgagtcgccgtcaccgcatctacaccattttgtgggccaccgccacaacggcaccgatgtccccatgccacattgccaccccagccgcatgcggtggcatcgctggaggagccgcttggcacggagatggaccaggctcatgtgctgcttgcgcaggaccagcggttgacgcacatggcgctcgtgc

SEQ ID NO: 323508 - DNA, 373 bp, Zea mays
tcttcctcacactcattctaacactcttaatctttaaacaaatcacacttaaacctaatcaaatgcaatcttacacaattggctcacttttacaataaactataaatccatccaaccattatatacttaaatctacatatatcataattcacaaataaattctataatcctaccaaataaattttatactattcctcaacataaactctcatattgcatcttccatatacgtataatctataaaaactcttctatcaccatttatatattcaatcaacttattcaattctatttctttaatttcatttcctaaaatataacatcatatacatatcatcattacaaaaagtttcatttcatacaaaatttcttt

SEQ ID NO: 323509 - DNA, 145 bp, Zea mays
gcgctcacgcgttcgctctcctattcggacatcaccatgctccatcggatcgtcacgtgtatcgtgctatccgttggcactctcgtagacaccttgctagcctagatgaaccggatgcaaccggacagggacaccgtcggcgaac

SEQ ID NO: 323510 - DNA, 270 bp, Zea mays
atcaaccttgcacggtacgaaacggcatactaccacactaaactatggatcaatctggcgcgtatcataccgttatcgagcggattagcggccttctacgatatcttgacggtgccatacagactaagattctacagttctgtgctggtgatactcgacgagccggtgagccatggtgtcaaggcaggcgccgtactccgactattcgccgtcacctaaggaccatctaaacctctggaagaagcggctctagcaattgcgcaagtagaa

SEQ ID NO: 323511 - DNA, 413 bp, Zea mays
gcgcttcccaaatcccccaatcccgacgcccacccgaccccgtcgccagatctcgcgcctcgtccccggggctcgatcggatcagcggcggtcggcgattcggggacggggtcatctcgcctaggcttgggcggggctgggctggtgggagccgccgagccggggagccatggcgtcggcgcaggcgccgtcctccgccgctgtgccgtcgcgcaaggaccatctcgaggccgggaagaagcggctcgagcagttccgcaagaagaaagcggcgaagaaggccactgcagctagtgcagagcaggcaaaagcgcctgcgcctgatgtagtggagaacccacctccaattgtcaatgctggtagcttgggagatggactggtgtctgatgtagacccaaaccaagcgagcacgt

SEQ ID NO: 323512 - DNA, 342 bp, Zea mays
cggacgcgtgggcggacgcgtgggtagagctggtgttgaaataagaactcttttgaacatacgagtcacataatattgtagggtctttgcaaaaatcttgatgtggtgtggcagctcagtttccttggtacacgctctgatacatagaaagacagtcataagaatccttatgatccatctcacagattgctccaggtatgccagtgggatggataatacaatttggctgacagctatttcatcggaacagtccgatatcctccgaaagaagaacaaaagaacaaaaggcattgctcaattttatagagtagtcaatccattcagttctatcaagagaattag

SEQ ID NO: 323513 - DNA, 288 bp, Zea mays
ggaacagtgaatgatttacaaagccgctgcgttccttattggacccgtccagttcgatcggttcgtccacgctaccttgtttctttgcgccatggaggccacgaggaagcccgcggtgtgccgtgcccttcttgtgctgctcatcgtcgtctccagcgcggcggtgtcgactgcccaggacgagagctgctggaaggacgacgaccaccaccctatctgcttgcccgaggactgcgtggcgacctgccgggatcacggccacgcggacggccgcttcaactgggcatg

SEQ ID NO: 323514 - DNA, 58 bp, Zea mays
aatcaaaaaaaaataaaataaaaaaaaaaataaaattaaaaaaaagacacacgtaata

SEQ ID NO: 323515 - DNA, 370 bp, Zea mays
gcggcagagagcgctccgccgcacctgctcctgatatgcttcccggggcagggccacgtgaacccgatgctccgcctggccaagcgcatcgcggccaagggcctcctggtgaccttctcctcgatctccagagtcggggcgatgctcgccgcgtccgtgggcgtgtcggccggcggtgacggcgtgcctgtgggccggggccgcgtccggttcgagttcatggacgatgaagaccccgggcctgacctggacgacctcttgcggcacctcgcgaaagacggcccgccggcgtttgccgagctgctggaacggcaagcggacgccgggcggcctgtggcgtgcgtggtggtaaacccgttcatgccgtggg

SEQ ID NO: 323516 - DNA, 364 bp, Zea mays
  unsure (1)..(364): unsure at all n locations
cccacgcgtccggactagttctagatcgcgagcgtccgccctttttttttttttttgtctcatgcgcgattattcccccctccggccgaccttttacacacgtacgattggctgtgatgatcatccacgcatgcatcgatcttccgccaactcatcaccgtctcttcgatctcctctcagcaatatacgtacaatccttcgtcgctcatcttgatcggagtagctagttctcttctgaaataatgcatatgccctagctgctcgctgcacacacgtacgcacggacacacctnctcttggatcgatcgtctcccttctcgccgtcgtcggccgccgtcgtgccccgggtcgatctcgatcgttg

SEQ ID NO: 323517 - DNA, 460 bp, Zea mays
cacccagcctagctgcgccacgctggcacgctccatgccaaggacagcagctaggctgggtggtcggcccgtcgtgctctgcttcgcgctcgtcatcacccacgtctccgcggccctgttcgcctagccaacggctaccggcgcggaaaccccaagaggggcaacggacccgcgatttaatccaggggtcgggatatccttcctactaattagagcatttattaaattaaagtgaccaatcagttaatctctggcctggaccttagagctaagacactatattttggtcaggatccatgcctggatttttttacacatttaatccttagacactttaaaacataacttaagacactcattatacatgccctaaatggacgccataaatggacgccatctacgtgtacctcggtatactataccgctacgccatataaacgtatacctgccgtctcactac

SEQ ID NO: 323518 - DNA, 87 bp, Zea mays
gccagacgagtgccccgctgacacgcttgatgcattatagcagctctctgggggggatgacgagctgctgtgcatgcgcacgtcatg

SEQ ID NO: 323519 - DNA, 150 bp, Zea mays
gcgaggacgcgccgccagttgttgcggagaccgctgacgccaccaccaccactgaggtcgaggtggacgtggagtcctgcaagaaaggagctgcgccggtgccatagcccatcgatgcttgcgacgcagaggacgacctggtggcggaca

SEQ ID NO: 323520 - DNA, 180 bp, Zea mays
cccacgcgtacgcccacacatgccatctacattgaacatatcacacttcatcgctacgattgtatccctaactaataacatcatgctctaaattatagtccttctagtgctcgatcccagatgttcatacagatcctatattgtgtcttcatgtcactacattaccaccaactacatctt

SEQ ID NO: 323521 - DNA, 248 bp, Zea mays
  unsure (1)..(248): unsure at all n locations
gatctgggctggagctanaaccgagggaggcgcgccatgttgctgcggctggctgctgcggctcccagttccgtatatatcatcgttattattattatggtataataactttgctcgcgagacaaatggaggttctctaggtagtgtctctaacctgtcgtactgacttctgtcgatagaagagaatggggccacaaacttctttattatccatggatggataggatagatcacgttctagatcgcga

SEQ ID NO: 323522 - DNA, 302 bp, Zea mays
ctaatgcgtgaccctccattaaccgtagccttaacactgctcgattgatcctggcttcaggggcacgtccgtgtcatggatcgaagattacttattaaatgtagacgaacacgcctcgaatggccactattaatgaaatacatgtactgcatgaaggacctgcgatgatacattcttctcacgtgctctaaactcaccttattcatacctaacattgcagcaccactgtcattttccttacagtcttagaagccttcacgtatgacatgtacctactcagctaagtgtacaaggcgcgcccg

SEQ ID NO: 323523 - DNA, 318 bp, Zea mays
aacaaacatacaaacacacaataaaaaagaattctaacaacaaaacaaaaaagatacaaatcagaaaaaaagaatagttaggtccgcgataatcaatcgaacgaagctgcatgctgctaccggccgaccgcaacatgaagatgacacggacgatgtgcctaggcctgctgcttctactactggcggcggcgtcgacagcgactgctcatttcacggtcggcgatgtggatgattacgtgtccaagcgcacgcaggagtccacccacatgaacatcggtggcgcagacatcgatgacctcatctccagtgcggcgcgct

SEQ ID NO: 323524 - DNA, 455 bp, Zea mays
  unsure (1)..(455): unsure at all n locations
accatgacgcaggaaaagacggtggtgctgtacccctccctgggcgttggccatctgaaccgcatggcgcagctggccaaggccatcctccgccacggcagcgtcgccgttaccatcgccgtcgtcgacccgcccgagaagcacgccgtgctagctgctgcgctggcccgcctggcagcggtcagtccctccatcacggtccacctcctccccatcccgccctgcgccaccagcaagcagcattcccaccccatcatgcccatcctggatgcgctccgcgccgcgaaccccgcgctccgggcgttccttgccgcgcgagtccctgccgtcgcccctcgtggtcgacatgttctgcaccgacgcgctcgacgtcgccgcggagctcgcgatccccgcgcacttcttctacccgtccgccgccggcgacctcgcggtctacctncaggttccagatc

SEQ ID NO: 323525 - DNA, 217 bp, Zea mays
accacgcctcaggatacgaccgtgctgcttttccaaatgctaagcgtgaactatctaaaccgaatattctacttgcacaaacaacattctcaacaccatactcatcctacttactatcatcgtcatagatcttacatagaaacactacctactcactactgtactactcctactagcaccctgttacattatcaacaacagtccatatcatacccat

SEQ ID NO: 323526 - DNA, 132 bp, Zea mays
  unsure (1)..(132): unsure at all n locations
cataggcgcccgcatggactctggccggatcatctacttcatctaacagaaggacgatgggggacgctacnagtcgcacctggcgtaactccagccttacagttccactaacgacaccgtgcacgcccatgt

SEQ ID NO: 323527 - DNA, 204 bp, Zea mays
ggcggtcccgaggcctcaaatccgtgccctacgtcggggcacactgcttctcttcctcgtcccgcgcatctactctgtgtccaggctgcaaccctgggctccagaaaagggtgtgtgcctgccacccccaaccgcgccgaagcggtctgaccatcttgtgctcggttctgccgccggacaggactctcctgactgtctacagtg

SEQ ID NO: 323528 - DNA, 102 bp, Zea mays
aaataaaaaaaaaaaaaaaaaaaaaaaaaaaaaaaaaaaaaaaaaaaaaaaaaaaaaaaaaaggagggaaaaaaaaaaaaaaaaaaaaaaaaaaaaaaaaaa

SEQ ID NO: 323529 - DNA, 304 bp, Zea mays
gagaaacagcgggctagtgcgggacgacgggcaggataagctaacagacttggagctggcgggtctcctcgactcaagctggtggtacgtacagtcggcgcaagcagctcgggcaaatggaggcggcagtcacgacagctgctgggcgaacgatgcagctcgaagtgactgggctcttagtcatgaggataagctgcacgacggcatctacaactgacagtgccgaatacgagcgagtacacctgttggtgtgcgtaaaaaggacaagatcagaaccgggccagactaatcatggggagcggct

SEQ ID NO: 323530 - DNA, 409 bp, Zea mays
  unsure (1)..(409): unsure at all n locations
gccacgcgtccgccacgcatcggtctggctcgaatcgaatgcacgatgagccgagatacgaagactcacaaacattaaccgtagctngcaggccctacgcggccgttgcccggtctgcggagaggaagccgatccaaggacgatgccgtcggacatataccattgcagacacgcagacccgtcaagtgctgactgaaaacatgctggcaatgcacaagagagcgtgtcagctctgaaaccatcatgcgggtctaaacaccatgtgcgcgtcgatacaaccgaaccaggcatccggcgagtgagtataaaaccggcaatctagaggagcctagatgcacatatcagaactgctcaagtcgcgtaaactgctatatcatattaaacaggcatacattacaacaataagcac

SEQ ID NO: 323531 - DNA, 309 bp, Zea mays
taattcccgtttctaccgactcttcctcccactcttccttccacacccactctaaagatttcccattatgatatcaatctaattataatgctctttcatacagtctcatacttcattcacatcttaaaccttacaacaacatctcaaccgatacataactgacatactcaacctctacaatgtactataactcactcacatacaccttcactacctcgtcccacatctcacacctcccattgtaatactactacttattctaatcaatcctaatactagcgtacacaatatatctctacactccactta

SEQ ID NO: 323532 - DNA, 350 bp, Zea mays
tcttcctgttctagatctctatcttcctcccttttttttttttttttttttttttagtttttttttttatgtttttattttttttttttttttttttttttataaaaaaattttatttttccatttaaaattaaaaaaattatttcaatttcaatttctactttttaaataaaaattttattaaaccaaaataaactactaaactgaaattgcaaaaaaacaaattataattaaccaaaacacaaaacaacatattatcatggatctcatcatcttctaaatacaatgatcactcatatcctataaaacctacaaattttttatccccctaataaaaaaattgcctaaaa

SEQ ID NO: 323533 - DNA, 298 bp, Zea mays
ggatggtcgtatcagctacccagagttcgaattgatgatgaaaggtgggtcagactggagtgatgcctgtagacgggactcgagagagaatttcagtagcctcagtcgaaagctgtgcaaagacaccttatgaaacaagaaagtagttttgcaagcagcagttactgactgacagtaccacgccctcgactaagcagcaagcgtcggaagacaatgcaaaagcaggattactggatctggtggaactgtggaaataagggttaaaggagatttgcgtcgattgacagactccgtcaaa

SEQ ID NO: 323534 - DNA, 288 bp, Zea mays
  unsure (1)..(288): unsure at all n locations
cccacgcgtccgacggcgtggtgggtctagagctggctggcgggcgtgctcctgctggtgtggggtttgtggcgtgtgggctggatctgcactcagcagctggcgctggcggccggtggcgggtgcatccatggcaggttgggggctcgtgcatgtgctgtggcacggggctctcttctttgccaccccttccctaccttaacggcctggctactggtaatggcgggcatcaccgtgcagccgtgaggagcgaaggatctggctnctcaatgggtggtgtgtggccgt

SEQ ID NO: 323535 - DNA, 345 bp, Zea mays
aattccctgttcgaccgactcttacttttatcttctgaaaaactcatcacatagagtttaatcctaagatatcataattgcactatagtttatttcggaccggtattcaagttacatattatatcatatacatatatataattattactaccatttcgataatacatatcaatactaaactatctattaagatttattacaactaaattatctacaattattaacatctaaattaaaactatacattataatattctactaaccataaatctctttcaaaaaaatcaaacctggtccatcacataattatacaattcaacatacaattcacctatcataatatca

SEQ ID NO: 323536 - DNA, 238 bp, Zea mays
ccactcgtccgcccacgcgttcgcggacgcgtgggcgagatgtgaaccagcagcctccaatagaagccagcgcatgggaagtaaaaccgacagacctcagccctcatgcaagcctaccgtcgacttaccaccgctccaacccgagagaaagatggagacgatcaagacgatcctcatagccgcgcttctcgtaatcgccgtctcggccaccgcagtgctgacctacaccgatgtcgac

SEQ ID NO: 323537 - DNA, 258 bp, Zea mays
ctgacgcgtgggctgacgcatgcgccgtcgtatacttactacttcgtctacatcttcgcccagcccagcgaaaacgtctacgcgattctccgtgctctcctaatccacaccgtatactccgcctcctgccgagacgacaggtacggcagcatccgtgactcaaccaacttactgctttcaacaacctccggctgcacaaagcgtacgtggctctccaagcgctgaaacactcgatcactcaagaccccatgaacttta

SEQ ID NO: 323538 - DNA, 360 bp, Zea mays
  unsure (1)..(360): unsure at all n locations
gcgcccacgcgtccgggccaatttgcccctattgattgcgaaattttaaaaaggggagctattaggagtcaacgaaatgttacctactagactgggggtcttaaatttatgtctggattggtagaagaaccactcttgaaaaaagggaaccaaggcggctaacttgttgagaattactacgtgaaaggaacccgcaaaaatcttatattattcggctcatggaaaggatttgagactgtcacaatcaaaataaaagtttgataaatggccccaagaaagctgatgcagttgtgtcggattgaaagcaganngaaaagtggcccagctcttcttaagcgacaaggatttaatttcaagatc

SEQ ID NO: 323539 - DNA, 410 bp, Zea mays
aacaaacatacaaacactcaataacatacacaactatacaatctatgtatattatacgagccccagcggcactcgacaccgaggcgcgcagggtagatcagatatccatcatccgcagaccacaagactcacttcaataggaatactggctccaactccgagtagcatgataaggtccttttcactgacctaaatcggatgacaaatgatgcgtgcatattaatttccgatgacaccacctgatcatgtacctatctgaacaaatgacactcgaactgatcttgtcaaagttgcatcatctcaaatggcaaactcatatcgtttgacactgtacggaacaaagtgttggatattactggaaggcatgaacatcatgttatggttgctgcttgcacctacagaatttgccc

SEQ ID NO: 323540 - DNA, 251 bp, Zea mays
cccacgcgtccggcggaccgtccctccagtctttcgctctccgtcactcccacgagctctacgatcactttcacgaggcgcgcggaaatcatatactacatacgatcatatctactgcctgaataacaatcataccgccttactaattcatatgaacctgaccttacctgtacccctctaaagcataactttcatgcatacatattacatacctattacactacctgatcatgtacttaactcaacaacta

SEQ ID NO: 323541 - DNA, 297 bp, Zea mays
cccacgcgtccgaaaaaaaaaaaaactaagtttataaattaaagcataaaaaaaaaaaaaaaaggttaaaggttaaaaaggaaaaagatgcgataaaaatctacttaaaaaataaaaataaataaaaaaataaaaaattaataaaataaaaaaaataaaaaaaaaaggcctctccttttaaaatttcccaatttaattccctttcttttacacctttaacttttttttattttcacctaaatttaaattactttgccccttttttaaaaattgatttttttaaaaacctttgttttt

SEQ ID NO: 323542 - DNA, 72 bp, Zea mays
gcctactgtctgttaccatgtatattatataaggaaggatgcgttcaccaatgtttgaaaggagacaatcaa

SEQ ID NO: 323543 - DNA, 343 bp, Zea mays
tttctgtcttcagtagtgcaaacaaaattgcttatggtgattctcgcacatatttacgcgacgtcatggctgactgtcagcacgttacaacctatccaaactccaaccataaatgtaatttaatacataccaatactatcatctcatatgctctatcgactacaaccacatcacatattctatcatacaccatcaccaatgtgccacatactataatatcatccattatcacagaattaaaacccaagctcatatattccatcatgactcaactcaacaaaccgatcacacctacacctacctctcttatcctgagtactcacaaaatacataatcatccaac

SEQ ID NO: 323544 - DNA, 355 bp, Zea mays
atcgtcacactggtgagctctgcattctgcattctgcttagctccgagcttcagtgccttcgttgctagctgttagctccacagttcacagttccacacacacattcagctgcactgtaacaatggcctacttcatggttcacgtattgactgatgctcccgactaggaagctgctgctgatgttgcagcggttgtacaccctccgcaactgtaagatctctatatcagagctgacgaaagcgctactgacgctgtggtccacctctgccgactaggtgcagcgcatgattgcctagatcctacaccgactgctactgctgcatcgacttcaacgagttcatcaccttcttcaac

SEQ ID NO: 323545 - DNA, 364 bp, Zea mays
  unsure (1)..(364): unsure at all n locations
ggcggcgagggaagggctccgcgtcgtgtcccttctcttcctcctcctctctccaacacccgatccatgagcgctgccctccgcattgctcttgataccatccagtacatcgattctgcccccaagatcaaaggccggagaaggaggaagaaaggttagggagtcggctatggcatgcttcttcctcctgccaacgttgtcgtcatctgccacacgcagcatcacaaatagagagagagacaaaaacaaagaggggtcgacaagcactgacacgacccatgtcaatgtggcgcgtcttccgctccctccttcgcgcccgnctaggcggtcgggcgcggcgccgtgcccagccggtgggtcccgc

SEQ ID NO: 323546 - DNA, 293 bp, Zea mays
cctgagatgcgcaaggaagctgtgttcgagcggggagacgcggtggatggactctccaacgtgagggacatgcaggcacataattttctatctaaggatgcgaagtagaggcgcagaaaaaccatccatcctagagcagcataagcctgctgcatttgtaatatattcgaaatccgtattttttttcttcacaagcactactctatatacgatgaataaaagggcgacaatacagtgtcaaaaaataaagacgcttgggtccaactatgccgacaaggtgcagcgcatgatgg

SEQ ID NO: 323547 - DNA, 421 bp, Zea mays
catgccggcaacgtcgcggtagcgcctgagcgtgaggagcaccaacgccgatccggtccgggcgatggtcaccaggccgagcgtcgccgacgcgtcattcccatcctcgtgttggacggaggaaagtagaggatcaaacgaatgtggcctcagctgaagtgctagacctcggcgataatggtggccatcgcggggggtgaggacgactagatgttgggtaggcgcagctgctgccgacagaggctgatgagctgttcgtggacacaggggtaggaagggaatgtagattctacaaatggccattaactccgaagccgataccaaacgttcaagaagaccagtattataatgtcagtgtgagaattgcgttcttcggaatgccatcttttttaagcccgttgtagccgatgccaacgttgaa

SEQ ID NO: 323548 - DNA, 416 bp, Zea mays
gtcggaacaaggaaggcgtgcgcgccacttttgccaagaaggcggcgctcctagggctggggttgtttaggcaaatggtggaggatgggctggagatctcagatgtcacggtgacaggcgtgctgcatgcttattctattactgctgataggaatgagtgcgagcagcgttatgcgaatgctatcacttgtggatgacgattcaagcttacatatattatatccagacattgcaatgtacatttcatatagcctatcctgagatgcatagacttactgatgcaaaagttcacgaagagcttgatgacactcgttctgctggtcagtctgttaaacaacaccactcggctgatctttaagagaaacttggtgacttgagtactgatctacaagtttggtcgtaaaaaaatgttctat

SEQ ID NO: 323549 - DNA, 338 bp, Zea mays
cccactcgtccgaggcatggtacgtaagaagttctctccacacttgcactctcgctttaggggacattgagactgacaccaccgacattcctcagcgtcctgggattgccatcacttatcattttgtccacttaaatactcggatctcatgtagctcatgccgcattaaccgcattcttatactgagaaatctacctatccgaagtcgccactttcgtaccacaaaagctcatttatgcacaaggtgtgattgcactccctcacttagatactctagtgtgcacagtaacgccgatgagacaactcctacatactgatccttacttagtattatcagt

SEQ ID NO: 323550 - DNA, 321 bp, Zea mays
gcgcccacgcgtccgaattatcctcttatgacacataatatcactagagatctcatctgtaccgggtcctagcgacctaatatttaaatgcttcgtgagattataatgaggcaccagacgatccaagaaaaaagttatactacatataccttctagcacattattgaattacgctcatatgcatgattacatacattaaaatacacttttattcaagacattttggagaaaaatatatgcatatggttgctcattattatagatccatgtcccctctaatagcctagcgttactatcctgcttccaaaactcacatctgcc

SEQ ID NO: 323551 - DNA, 341 bp, Zea mays
gctcctgattgcctgctcgctgcgcgctactgctgccacgctcggcagcggcaggtgcaggaggagacgacggtcgacaccggcgccctgcaccggcggatgtcagatcggcagctccgcccggtgcgctgcatcagaatcacaggggacggtcgatgcctgttcaagtgcgtcgactacggctcctgactgaggataggcaagcatgcgcccagcgactgcgcccagaacgaactggacgacgagctccgagccaaatgagctgctgagtacgttaagcgaacatgagacagccgaatggtaccttgaaaggcagctgtgagagttatgtgagacacatg

SEQ ID NO: 323552 - DNA, 391 bp, Zea mays
tcgcccacgcgttcgccgactcgttggagcgatcaaacgctcatcatggctgggaatgtgagacacgatgtaggcgtcaatgcgatctcaggctagaacggctgtaactctcgggagatcggcgagcaggcaatgatgcaggcctacctaagggcctgccagatcgaacatctcggctatctattgcaaggactgtctgtacgatcaatcgacacggtatgacatatcgactggtgtggctccctacaatcacactcggggctgcttgtacactgacgtgtacacgaccaccttcaatagcatgggcacatgctgcatcttaccaaccttcgaggattgtcagtgttgtaggtgccgcttatagatcatgtgccatcagcctgtaaagtgc

SEQ ID NO: 323553 - DNA, 126 bp, Zea mays
cccactcgttcgtgcatattcattctttcgctcatgcactccgatacggtgccggagttaaaaaaatgtggatcaatgtgcaaattcaaatgacatcttaaccagttgtgatcaatctgaaccgct

SEQ ID NO: 323554 - DNA, 352 bp, Zea mays
tctttctcacaatcttacgatctcgagttttcagactcttggctcatactacttctaagtgacatttgcctatgttacaagtatctactgatgtattatcttatctaacatttacagaaagatctacatatactattacctgatcttctaaacctatgcaaaactactcttatccacattcataataacaaactattgatacacctccattcaaagcaccacctcaacttaaatcaactcatcatctacaagatcaattttaaagcattcaaactagacgttcaacatatctctctccttatttttaatgattactactcaaatcttgatgatgtattatacattttaaatt

SEQ ID NO: 323555 - DNA, 395 bp, Zea mays
gtggattttccgcaatgacggccacgccggtaactacattatggtacacaatgaaaccccgtgcttttcggcgggattacattagaaatcagatagaaatgtatagttattgttacctttttggaaatacatggaggaaggaaactgttcaaggtgaaaaaaaaaaaaaaaaaaaaaaaaaaaaaaaaaaaaaaaaaaaaaaaaaaaaaaaaaaaaaaaaaaaaaaaaaaaaaaaaaaaaaaaaaaaaaaaaaagggggggcccttttaaagggatcaaagtttatttccccttccttccaacataaaaccttttttatagggtcccgaaattaaattcaagggcccttgttttaaaaaattagagattggaaaaaccttggttttcccaatttt

SEQ ID NO: 323556 - DNA, 358 bp, Zea mays
cccacgcgtccgcccacgcgtccgcacacagtctcggccgggccctctcgaggccgccgtggaaggacccccagcgatgggctccggcgaggaggacacaggaggcggaggaggggcggtgcggtgcgcggtgctgaaggcgctcgtggttgtcggctgcgtactgccgctccgtagactgcgccggtgtactacgcggaacgacctcgcactagccgacaccgactcgatcgataaagagcggtgatccttggaacatacacactcacatgccagatcgtttgtggactctagaatgcttgcacggatatgaacattgagcgtgcatgatgtaagtattgcacgctccttgtaagct

SEQ ID NO: 323557 - DNA, 172 bp, Zea mays
cacgtcagggtcacaactggcgtctgctggcattgctctaactgatgcatttagaactgagggttgtggcaatatttgaagaattaacaaaatgtaaatagctttggcagttactttacccttttagatgtaacaaactcatcccgttggttacatgtaccttgttttattt

SEQ ID NO: 323558 - DNA, 333 bp, Zea mays
aaaaatcactagtacaattaggcaactaactattatcgctagtgtattcaaacgctctcaggtagatattaaaacttcacctttttgaattgactggcactgctagcacactatgctatatctagacttcacacatcttgtcaggtgatttacttgcatcctttacctaaaagaataccacattgacctctaccgaaactggatccactgtaatctgcttaatttctctaaatccaaccactttaatgaactcaacattacatatcattcttaatacccaaacttcacttcataactcactttaacatgacatgcaatccaattatcaaacat

SEQ ID NO: 323559 - DNA, 335 bp, Zea mays
cccacgcgtccgcccacgcgtacgcccacgcgtacgcccacgcgtccgcccacgtcgactcggtcgagggagtccaggctgttgccagcgagcgatggctagcaacggctcgtcgctggtgcgccgagcctgctcaactgtgcgccgaatgcctagttggaagaagcggctcgtcttattcgccgtcggagttagcaccttatcttatgcttgtcaagataatcgagctcttcaaattcgtgatgttactggaaacaagaagaaggcggttatccttggaactggatggactgatgcaagttcattgagaaatatcgacacatctttgtatgatg

SEQ ID NO: 323560 - DNA, 379 bp, Zea mays
cccactcgtccgcccactcgtccgcccactcgtccgaaaaaaaaaaaaaaaagaaaaaaagaggaaaaaaaaaaaaaaaaaaaaaaaaaaaaaaaaaaaaaaaaaaaaaaaaaaaaaaaaaaaaaaaaaaaaaaaaaaaaaaaaaaaaaaaaaaaaaaaaaaaaaaaaaggggacgccaataaaaaaaaccatgataaatgccccaactattgaaaatctaaagcattcaaagggagccaaaaattaaaagaaactggactctttataaaaaacataatagataaaaaaacgatatactcacgcaatataaccgtgaacaaaaaaatcatcattaaaaaaaacgcataattaaaaaaagggcaaatacatatcccctac

SEQ ID NO: 323561 - DNA, 382 bp, Zea mays
tcgaaaaaaaaaaaacaaaacaaaacaaaaaaataaaataaaaaaaaaaaaaaaaaaaaaaaacgggaaaataaggaaaaaaaaaaaaaaaaaaaaaaacataaaaaaaaggggcgccccttctagaggaccaaatctaagttcccctcccttccaacgtaataccttttcattacgtgcccccaaattcaatcacattgcccgtcttttaaaaacttcttaccgggaaaacccctggctttccccatttaactccctttgcaacaaatcccctttcccccagttggtttaataccaaatagcccctcccttatcccctttccaaacatttgcccaccctaattgcaaattggaaccccccttttaccggccctttaacccc

SEQ ID NO: 323562 - DNA, 142 bp, Zea mays
acgtaaactcctcttctacctccttctctcaactttcacaatttctttactcaaaccttattcggtctcctgggctctactatcactatccactacattcccatatatccatcacactgtacatttcgaaaactatactaca

SEQ ID NO: 323563 - DNA, 309 bp, Zea mays
tcgcccactcgttcggttacatgatcagctcgatcacctatcaagccaaagactttctataaacgcaagaagggatgctccccagacgtaaaagaacgacacacaatacagcataacgtaacctttccatctgtttgtcgagtacaaatatcaccccaaatttgcaagaccaatataacgccatacgatatattgtcaaccacaacaggtacaacataatacaactctaattcaacaacaatagcccacctgttgctatatccgacgtgctcctctagataacttagcgcgctctatatcattcttgtt

SEQ ID NO: 323564 - DNA, 103 bp, Zea mays
tcttctctgatttttctgtacatcattaaatccatacttttctctatcaatctttacaatgtgtctctggtcatgtgtaacaatcaaaccttccataactttc

SEQ ID NO: 323565 - DNA, 342 bp, Zea mays
cggacgcgtgggtgttgagatactaatgctagcgacaactttatgctaagacgcatatatggctgattgttacaatggagggatgagaagacaggaaactctagcaatcagatatatatgcgtcttagcataaagttgttgagatactaatgctagcgacaactatgttgacttgtcgagtatgtagagatgggctcatcatttcgtggtgagcttgtacatatttcctgagattactttgtcctgccaaacatgcgccagttctccattggttgctaatgctcggctctgggattgtatattcgtatttaataaaagtacttgctcctattcgaattcgat

SEQ ID NO: 323566 - DNA, 58 bp, Zea mays
tcttactccttaaccgactagctactactgatttattaaacctagtgccatatgggat

SEQ ID NO: 323567 - DNA, 317 bp, Zea mays
tctcgtctgtcggtatgtatgtcgtctggaggaaaggaaatttaagttatatgaaatgaatatgctgttgatgtgtcaaattcaaaaaaaaaaaaaaaaaaaaaataaaaaaaaaaaaaaaaaaaaaaagaaaaaaaataaaaaaaaaaaaaaaaaaaaaaaaaaataaaaaaaaaaaaaaaaaaggggtttcccttttaaagaaccaatttcacaaaatccttcatttaaaggtattaactcttttaaagttcacctataattgaattaactgcctggcttttaaaaatctactctaccaaaaaaacatgtttttt

SEQ ID NO: 323568 - DNA, 238 bp, Zea mays
aacaatcgtccgccaactcgtaccgcaccactgacgaaaaaggaggcgacacgggtacagagtcacagcttatcgaggcgtgcttgctaactcgcaaatgctatatatatctacgtaattcaactattatttccgatcttatatatctccttcactctcaaaactctggcgatccccaactcagaagccattcaaagattcccactttatgcctgaaacgcgactgtgtgaacaaagg

SEQ ID NO: 323569 - DNA, 424 bp, Zea mays
accacattggccattgtcatccaactcttttctgtttaagtagcatcgattttgttccttaaaagggtgctaagttaggcacatttggagtattcagtcacattgcaatgattgacttggtagaaagattttcatgtgatttcttaaggtgggttagaggaaatagtcttttagggaagtgagctgaagtgttataccgtagagtgacctgattacacaaaatcagggtttcagtgtttttcttcttctcatattcagggatgagggagtggactacatggcttataggctgaacttgcacagtgaagtacttctgtaaaactcatagtgcttctaaaatcaaaatattgagaggaaatttattttttcagtttatgtggttttggttcttggaaaagtaaagcagttctcatggcagaaatat

SEQ ID NO: 323570 - DNA, 267 bp, Zea mays
gtcacgacggtcaaggacctctcctaggaacgggcctcactgctcagccgccagcatcaagggctccgatgaggctgcggctgcggctaccgggcagcccactgcaagtgcctagacctgcagcatcaacgatgaccgccactgctccattgacagcgtgcatgacgagccgcttcatcagctccacgattactataaccccgagatcgtccccgtcaagatcatacacgaggacacgtttacattcgacgcttcagaaaaagagac

SEQ ID NO: 323571 - DNA, 251 bp, Zea mays
tcttcctctcaccttactcattaattttctgtaccatatctatcctcttatctaatccagtctcgagagttccattgactccacttgacgttacacgatcctaaaactctaccaccgtaactagtaccgtgactttaatcatgcatcacacgtcaaatatactatcgatattaaacttatagcatctctaattacaaacaatctaactgtcatctaatgatacaaacgacaaatctttttaaataaccctt

SEQ ID NO: 323572 - DNA, 228 bp, Zea mays
tcgatcgtgaggcttgcacctcgatacgctactctatggaactttcgtcctaccaggcttccgagcactcgtccacccactcttccgtgcactcgtccgaatacccgtcttatcaacctttcctgttaactacatatcatctcatgtactcccattcaatactcaactcctaatccaggccacatcaaacaacctatttatagagaaccacttccttccagatacgac

SEQ ID NO: 323573 - DNA, 337 bp, Zea mays
aaaacacataaaaaaaaaaaaaaaaaaaaataaaaacaaatataataaaaaaaacaaactaaggctatttgggggaattcatcggactccacggttacatcgccttcattgcattacaatagcgtctactttcttgtcatataattccaatcccttgacttcaattaacaccgtcttctaccttcaaaatcccgacctaacacgcatttactgccatgtctgttgaatcaccttccaatacatggactacttcccaaactgccactacttacaaagacctgaccatttttcttcacgcttttatagtacatggcacgctcctctttcatcaatattt

SEQ ID NO: 323574 - DNA, 338 bp, Zea mays
tcgggagtctgatgaagttgatgaagaagggactgacaatggaggtgccaagcgacaagtcaagctttcaagcctaggcttcactggtttcaaaaggaaaaccgaggatatcgaatcaagcggaaaaggtcgttgcaaattcttccaggcttgcaaacttgagttggtcaggaagtttcagtgatgtgtcctaatttggtagtacgtacttatatttgtggtagctggagtgtttggtttagtttgttgtagagcctaatttgaaactggtctaaattggatgttgagattggaatgggaagataatgattttccccacataaaataaaattaataaa

SEQ ID NO: 323575 - DNA, 375 bp, Zea mays
tcgcccactcgttctcccactcgttctcggacgcgtgggaaaaagaaaaaaacaacaaaataaagctttaaaggctaaacttaaatggtaaaaaaaaaaaaaacaaaagatatcaaataaaagcgggaaaagtctttgcaaattattctaggcttgcaaacttgacttggtcaagaagtttcaatgatgtgtcctaaattaattaatacgtacttatatttataaaaactggagtgtaaaaaccagtttgttgcaaagcctaatttgatactggtataaattgtattttcagattggaatgtttaagaaaatgaccttccccaattgccttacaaaaaatttgcaaaacctaaatgcaaattggaacgccccttt

SEQ ID NO: 323576 - DNA, 389 bp, Zea mays
ttcactcgtcctaccactcgtcctcggactcgtgggttttttttttttttttggttttttggtgtttttttttttgtttttttattttttttttatatttttttttttttcaaaaaagggacaatcaaattataaaaatttgcaagttcaattacaccaataaaattattttactaaggaaaaattaacaaaagtttaaagaaaggtaaaaaaccgaggataaaataattaaagccttcaaaaaaattttgtaaaatttttaaaataatcaacttgatctagaaattgatgaatacctgtttatataatctgaatacaaattttattttacaaataaaacttaacattaatctaaaaaaaaacaattgaataaaatttggttaatttat

SEQ ID NO: 323577 - DNA, 333 bp, Zea mays
attcccgtgtgtcgacccactcttcctaaaaaaaataaaaaaaaaaatctataaaaaaacttaaaaaaaaaaaaaaaaaaagggacccttagcgtatctttttccccaagttcgcacactctttctctgctaccttatatcttttctatagtttcatctattttcttttctgtccccgtttttaaacaacgtcccctctgttaaccccctctcttccccttttttaatccttttacttcatatacccttttcctaatctctctttatccctaagagcccctcccttttctctctcccaaacttattctcaccttgtatctaatgtttcaccct

SEQ ID NO: 323578 - DNA, 347 bp, Zea mays
gcgactctgcatagatggataagcagatgcggattcactagcatcaacatgagagttctagacggatgtaacggagctgtcattcgcagctgacagcgctaatagctactcgcgtaacgatcattaacatgtactacatgttgcggcgcatggagactgctacgatgagttctctagagttctagattagagagtgctagtaaagtttgacctgctcagaacatgactgcttataacggatgaatctagctataatgtgtcacgctctcattctatagcaccagatgttgcatgccgatcatatgcaatcgagtcatcatacgtgtcggacttgctcacagctcaca

SEQ ID NO: 323579 - DNA, 343 bp, Zea mays
ctagatcgcgagcggccgaccttttttttttttttttttttttttttttttttttttttatgaaaaacaaccgagagagacatataataaataaagaaataaacaataattaggcaagcacattccatgtgtttgccactcgcattccatacactgatgcacgtacatgtttctatatcatcagggtgcaacgtatatactggtagttattccagagaatgaagaggtttttgcgtctagtcggaggagctgctgctggagggcgacgttgagcatcagaaggctaatgaggtgctcgctccagaggcggccgtcgccgagcccgaccacaaggaggaggaag

SEQ ID NO: 323580 - DNA, 236 bp, Zea mays
tcgcccacgcgtgcgggggccgccctttttttttttttttacacaagcataataatttgattagggggaatagccatctataacattgtaggcatcgtgttcaatgtaatgtatacacaagatcagtaataatactatggggtaccattaacgtgggaggaaagtatacattctattatccagctctagcgaactcagaacgaaaaggtctagtactaaaaacaaccacttgaagg

SEQ ID NO: 323581 - DNA, 445 bp, Zea mays
cccacgcgtccgctctgcctctcttctctaaaccggcgaccaggagaacttctcctgtcgacgggtagctcggcgtgggggcataaccctgccggcaaccacgggtcaaggctacgatctacgtagccgaggtcctcctaccttgggcaataccgcccttgacatgagctgtccgtcaacttttctctgtagagtgtgccacgggaggaggcatgggatgaggatacgggatgagagaagccgcaggtcatttaccatgcatattcacaaagtttgatagtcgtggctgtaaggagtgctcgctcgtcaggcctcacaacccatatggagctactacatccatgctgtataagctgccgaatacacctactcacggaagtctcatgggccctcatcgagctgacgccagagcttgttagtactgcgtctgcgtcttacactgata

SEQ ID NO: 323582 - DNA, 71 bp, Zea mays
aacggagtgaaaattggcattttgttgggaaatggatttattttaaggagtacaattttttttgacaatta

SEQ ID NO: 323583 - DNA, 186 bp, Zea mays
acgctcatccatatccccatcctcaccttaagctttcgaatctaacctcaaggttgaaatccacgtccagttctaacttatgagcgtgcacttcatttccatagactcatatcagtttaaatttattactcactatattctatccgtataaactttatacagtttctcttttcaataatcaatatt

SEQ ID NO: 323584 - DNA, 226 bp, Zea mays
cccacgcgtccggtctcggtctagaatccatgcacgtttcaagcggcaaaattccgattatgtccctcccgaagccagactatagctggattcttatcaaggttccacatgatcaggcgcctttcttcctcaagagttagagccacatatatgctggacagaatgagtggtcggaattggcctggggacagatactcatcatatggataagtgtctctcatatata

SEQ ID NO: 323585 - DNA, 179 bp, Zea mays
acgcgcttctatgatactgatttgctccgtaagctcccgtttctagccgcagggtttagatcctgattcggtgtctaactttcgagcgtgcgctgtttttctgtagacactgatctagtgaatattgtgactcaccgccttctatccacaggatctttttacaaattctcttttcaata

SEQ ID NO: 323586 - DNA, 300 bp, Zea mays
cccacgcgtccgcgtacgcgtgggctgacgcttgggcagacgcgtagatacaatcgcgtgggttatattcatacgctcgtcaggatcaaggcgccgtatcctgcgtgtccgcgctcatatggatcaagatatcatcacccacaacttgtatcacgtcatgaattaattaaggccacatgcatacatgcatcatgcatgcatgcttaatctacattccattattaagcttttacaatgcatgcatgcatatattaattaattatcatcaattatcatgtacatacgagacctacttactac

SEQ ID NO: 323587 - DNA, 74 bp, Zea mays
cccacgcgtccgcccacgcgtccgcccacgcgtccggttctagatcgcgatctagaactaggtctagatcgcga

SEQ ID NO: 323588 - DNA, 454 bp, Zea mays
gcggtgaaatgctattccaagtaattaatactcatataccatagaacattttctgtcatactagagcctataatacaagtaaccaatcctattgtaggttgctgactgctttctagagtacgaaatccatttttctacagcagtattaagcatgggatgtgctctaggattggcttatccacatactaagttggaccacaattaatcaaaactacatcattgtgctcgataggaaattttgtgctttcctttttacatatagatcatgtctataggtctcagaaaacttcatcaaatgtactcttgtttcacctacatggaaacatgggatgtgattgtatcggagtggtattattacaaggtacatatagtactagcttgaggaactgaagatgttttacatgtgatgtacatcggacttgagagctatgaatcaacaacatacgttttaaac

SEQ ID NO: 323589 - DNA, 214 bp, Zea mays
aattcccattcgacccacgacctactcttaaccttccacaacaccacttccacaactttctcatccctgctttccaacatccatttccgtcgggttattattacctccggaatcatctacaatcacaatctccatcatccatacattatacacaccctattctaatcatccctaactctcctccacatacaactctttcatcacactcacacta

SEQ ID NO: 323590 - DNA, 253 bp, Zea mays
gcgtctcgctcatctgcattcccatagccatgaagtccgccgagctcgagcaacgcccgcatcaggcagtccggccaatcccatctcaactgtggtgcaaaaactttggcaaggaatactgaaggaccttccaagtagcatgaagcgcggacaccttgcttttgccttcttttgattctctttctcttttggctcaatcatgttatatgagaaataaaataaatattggactcaaataagaaaccggtgattc

SEQ ID NO: 323591 - DNA, 340 bp, Zea mays
atcccattccccttccccctcttcgactacctctgtggcgtcggaccgaacccgaaccaggaagcctatactaaccctaggaggacagcagcctccgccaagctctactacacgctgtaggaagccgcggagctgaatggcctcaccaacctgcagccaccccacggatgccacgaccacaacttcctctactacctcaagctcaccaccaagaccttcgaggagatcaccaaccactacaactacgtcacccacaacctgcaacatctacacttcaaaactacaccgtccctgcttacctaatacaaaaatgcactcattatgccagatattcatattt

SEQ ID NO: 323592 - DNA, 54 bp, Zea mays
cgacgagctgccgatgctgactgtgcaccacggtcacctcaagtcatcgaacgt

SEQ ID NO: 323593 - DNA, 367 bp, Zea mays
  unsure (1)..(367): unsure at all n locations
cgtctcgaganaaggcaaggggcgccttcgctcgtccgtngcttcagtagggtggaccgtcctnncagcgactctcccggagcgatatgcctccactcgtnnattctgtcgtgccggacccgtgcgttngctcgcccggcgcctttggcgtcatctcnntggaagnnntcgccacgagcccttgcatatcgagcccgtgaattggagggatgatcccanngagtccctgaaggggcggctcgggagggttcgtggactcatctgcnntgctgctccgcgaatgccacaccacattcgacacccatgcgacnnctcttttttaaattccttaatgtggcgacgaattggcagaatggaaatgatgccg

SEQ ID NO: 323594 - DNA, 471 bp, Zea mays
cccacgcgtccgcccacgcgtccgcccacgcgtccgggagcacagagctagctagccagccagccagcagccagcttgctcgccgcgcccgtccttcttcctcgcctccgttccgttccgttccgtcccgcccgccgccgccgccgcattcagggatggagatgaagaagatcgcctgcgccgtcctcgtcgccgcctcggcggccaccgtggcgctcgccgcggaggctccggctccgggccccaccagcggctcctccgccgtcgcgcccgccgtcggcgccgccctcggtgccgccgtcgccttcttcttcgcctactacatttaatgaagccggccgcggccgtccgcccgaaggccgagaaaaaacgaaacgggagaaaaaatgacatggcttcgcgcattccgatgcgtgggcatgtttttgattcgacacaccttttgtcctctttttctttggtccctctttc

SEQ ID NO: 323595 - DNA, 322 bp, Zea mays
caagatcgctcgatcgctcgccatgcatcgacaacctattcttaataacgttcattatctcggtcttatttatgacgaatgtcatgtatgttctggtgactgtcatgtatattctgatgactgtcatgtatcttgttcatgtatgctcaaggttcattatcttgttcatgtattaagtatgttatgaataactcaatatttattattttgttcatgtatgaattatcttctaatgagctcaaggttcaaaaaaaaaaccaacaaactacataaccaaaaaaaaactcatttaataaccttttttaactttatagtcacttat

SEQ ID NO: 323596 - DNA, 450 bp, Zea mays
cggactcgtgggaaaaaaaaaaaaaaaaaaaaaaaaaaaaaaaaaaaaaaaaaaaaaaaaagggaaaaaaaaaaaaaaaaataaaaaaaaaaaaaaaaaaaggatgaacatttttaaagtttccttttttacttactcttatttactaacatattaatttttttttaatgtcccttaatttaaattccttgcccttatttttataactttttttctggaaaatccttgtttttcccctttttattttccttgaaacattttcacttttcgccttttggattatttgctaagagtttttgaccattggcttttgccatcatttgcccatttttattgggtatttgtacgcgctatttatagtttttttaatccctttggttttgctttttacccctatttttaccttttcttttgttagttccttatctccttctctttttattttcttcc

SEQ ID NO: 323597 - DNA, 136 bp, Zea mays
ccattatatactacatcactctcaaacctattacacatataccataacccatactctttccaaccctcaactcttctctacaacatacatctacacactaactttttccaaatacatcccttcattcttactacat

SEQ ID NO: 323598 - DNA, 68 bp, Zea mays
cccacgcgtccgcaagccgaaggtacaaatgtaatttaaatatcattgatatttactcatgattagat

SEQ ID NO: 323599 - DNA, 440 bp, Zea mays
ctgcccaaagtacacgcatgttatatgtcatgaataccgtgatcacctacatctgggggcgagctcgtttattttgagtgtgactgagtttgacaggtggaaagtcggatcttctcgaccaaaaggtgcataaccatctggctttcttcattgctctacaagattaatgaacaaacacatgcatatggaacaaaaccccaaacttggaggtgtgggacatgataaacatcatagctgcatatcagacaattctcgacacttacgcatcattctgctatcatgccatatcttaccctatggcacttattcataggctgctgtgtgggcacttaattttacaaaatcttctgaaatctaattggagaactctacatgtctcacgtactatcttatacactgaatatattaatccttaaatgcgtctttttacattttattta

SEQ ID NO: 323600 - DNA, 376 bp, Zea mays
gccacgcgtccggccacgcgtccgctcgtattctagcaccacagcaaacaggatcgaaggagaagaaactaatagttaccgtccaggtggtcgatcgaacgaagctcctgctgcataccggccgtgcgcacatgaccatgacacggacgatgtgcctagacctgctccttctactactggcggacgcgtctacagccacggtgcatttgactattcaccgatgtggatgactacctctccaagcgcacgcagtactaccgccacaagaacaacgatctcgcggccatatatgaccttaactccaaagcgcaacgcttccacatccactgacatgcacgctcctatggccctatatacgacctgcatgacgaggcaa

SEQ ID NO: 323601 - DNA, 73 bp, Zea mays
aaaaaaaaacaaaaaaaaaaaacataaaaatatttataataaaaaaagggcaggccgctctaatgagcgaggg

SEQ ID NO: 323602 - DNA, 52 bp, Zea mays
aaaaaaggaaaaaaaaaaaaaaaaaaaaaatattaaaaaaaaagaaaaaaaa

SEQ ID NO: 323603 - DNA, 308 bp, Zea mays
ctcaacacgacgacgattgaagagctcgtcggccgactacgcgttgcggaggacgccgacgcggacgacgccaaggcgaaggaggtctccacggagggcgtcgggcagctgttgctcactgaggcacagtgggaggcgcggcgtcgggaacggaacaagcagcgcaagccccgtgacggtgacaagaggcgcggcaatggcgatcgcggcaacaacggagacgatgagcacagcgacggcgacgacgatgcgagcagcatggcctcgggttcaagccggagaggctggagccgcaacagggccagtgc

SEQ ID NO: 323604 - DNA, 272 bp, Zea mays
tttatccacgccagcggtttctgctttaggatcgctttggtctcagtgatggcttgggacgtaaccttttgcttttgggggcgcagtgttagaacggacgtggacgatccgtcaaccaatgggacggcatcacgactgccaccatcatggtgcttaatgacaccatgacgctcttgtatcgattctgcgctgtgaagaccagcaacaaaccgtcgtcttactgattctttggaacctatgaacactgctttggctgttgcaagctttgggta

SEQ ID NO: 323605 - DNA, 199 bp, Zea mays
agaagctgaagctgccacgagccctttggggtacttttggagtggtttgctagtaacatttggatacgggctaccaagagtacggcgaactgaacttggagcacaagtatctctgtattaagggttgagctgtgccttttttttgttttgaaaaagctgctgtgagttatgtgttatacaatagctgttgtgagttgtg

SEQ ID NO: 323606 - DNA, 291 bp, Zea mays
taagcccgagaacgtgctgatccgtgccgactttcacgtcacgctaaccgacttctacctatgcgggcttgctcactcatacctgccttcgctcctctgcttaacctaaacggacgaacttctatcaagctccaacctgtactggtactgccgctacctcaaccagctaccgtactcgctctactaccgcatcttctaccgcgcagctcatacactttacattatctagattgtcttcgcactcacctagcttcacgccattgtcctcgattaccgggcacataatgactt

SEQ ID NO: 323607 - DNA, 64 bp, Zea mays
cggacgcgtgggaaaaaaaaaaaaaaaaaataaaaaaaaaaaaaaaaaaaaaaaaaggaagggg

SEQ ID NO: 323608 - DNA, 89 bp, Zea mays
cccacgcgtccgcccacgcgtccgagatgtcgtggcaggcgtacgtggactagcacctgatgtgcgagatcgagggccaccacctctcg

SEQ ID NO: 323609 - DNA, 101 bp, Zea mays
cccacgcgtccggacacgcatcctgtgtggcctgtgtcctgcaggcagcgcggcgaccgagcgtagcttagctagctgcccctgctccagaccaggtgcgg

SEQ ID NO: 323610 - DNA, 365 bp, Zea mays
attcccgttcgacggacgcgtgacgctctcaccgacgcttcccggcctacgaccctgcacgctcatacagcccgccttcattcacggggatggctgatgaggtgaggcctgctaccgatctcttttcgcgcactaatcccatctatctaccctccaatggccctctacttctatagcgacgaaatcccatgctcgagcctttcacgcgtggtatccatgagcctcaaatagaatgccgaccagcctttgtactggcttgcgacctccattactgcggctcctggacctgactatagctagcgttcatatccgtacgctaggctagagaacatcagatctgaagattctgggagtgaacgattgtg

SEQ ID NO: 323611 - DNA, 352 bp, Zea mays
  unsure (1)..(352): unsure at all n locations
tagatcgcgagcgccccctttttttttgtttttgagacngaacaaacaaataaaaccataggcaatagcacatcagcggagcgaagcaaagcaaagcaaccagtaaaacaaaattgggtaggcagaagaaccagcaatgtttgagaaccaaaccagccaaaatactggaacagcaatatagtctgctcacgaccaaccaaaccttcgactcataacatcctgaacaagcacttcatctctggcctggttatatgatattgctattgttttgttagaactagcctgcagcttgttcattcaaaagcccactgattctccctgctcaatttatcctctatcctcaactctgaaa

SEQ ID NO: 323612 - DNA, 211 bp, Zea mays
gcagagcgcgctggaggctgagatgaaggatatctttgtccgctacagaggattcgtcaagcgtaatggggtgggtgtcttcgcggtagtgttgtaagaggcagacgtgtccaaggccattctaggttacatcactgcaaacttgatccagagcattgcgctcgtcctttccagcataaatgcattcaccacgaaattcaagaacgcggac

SEQ ID NO: 323613 - DNA, 340 bp, Zea mays
gatcccgggtcgacccgcctccgcccacgcgtccctgactctggctgcgcttggtaaaacggacttccgttccatgctagcgcgctatctcatcggcctgcactccaccttcccgaaaaatcttaccctttgtgtttctctgtctgtctggcaatctatcgatctccatgacgacttccccgccgcgcacacacctgctcgccatggcactagcgctggcattcacctgcatgctgctcgtcaggtcctcggacaccaccacactctgctgctccgcttacaggtgcaaccctgccacggacaggacgttcagaccctatagcgtctgtgttgtgctatc

SEQ ID NO: 323614 - DNA, 350 bp, Zea mays
cccacgcgtccggtcgcgccctccgatgcggatttggctcgcgcggcggcgtcgggctccggttgctcgcgccaacgccaatgtcgtcgtccgatggcggccagtcgcgcaagaggctcgtggtcggcgtcctctctgtgtgcctgctcgtcgccatggttatcgggacggtcatgttcttcgtgagcgagaaggccggctacgactcggagctgaggaagcgcatcatgagcaagacgatgcgcagcgtggaactcttctgcgcgcccgcggactaccaaggcacgtgccacgagacgctggagacggcgctgtcgcggacggacccggccaagcacccgcacgccgcc

SEQ ID NO: 323615 - DNA, 80 bp, Zea mays
acgactagaagggataaactggcatcccagcgcaaacttgacgagctgagtctattataaacatgggggtctgagtttag

SEQ ID NO: 323616 - DNA, 214 bp, Zea mays
cgaatagatatagatagtgtttcaacaggccctcctcatcggatgtggtgttgtctgagctgaagtggttagttgtgacgagtgaattcagtgctctgcagacaacaactattatcataacctgagggtagagtgaattattcattgtaaaatatacctaaaaccataaatacataataaaaataaaaaaaaaaaaatacaaaaaacacatgat

SEQ ID NO: 323617 - DNA, 154 bp, Zea mays
attcaattctgtatcatctcactttggcggaattaaaaaacgggaatataacaatacaaatggatatggttaaagaagaaggagagcataaaaaaaagggccgcctctttaaaagatccaaacttaccatatcctactttccaattaaaaattt

SEQ ID NO: 323618 - DNA, 471 bp, Zea mays
  unsure (1)..(471): unsure at all n locations
cggacgcgtgggcggacgcgtgggtccaactttgttgtgcattagtgttcttgtagtcacgcctctatccaagggccaaaatgggaagctggtgtcgtaatggtttattgaaggggaaaaacagattgatacctggttcttggtcaatgttgctgggacgccttcacaccaatctgcaattttcatcatatttggctggtttttcctgctcctgatcagattttgaaagagctaaccattgcccacaatcaacttactgtccggttcggtcagggtgctgctagctcctcccaaagtttctctccaatatctatacaatttgtgccagtccatctaatcaccccgcgcccctagagaataggcattgaagaaactggtagcctgttcctcaagatcataggggggaaaaaagcacataatatataacgaactcatctgctgntctttcaataattgtatggtcatcacgga

SEQ ID NO: 323619 - DNA, 343 bp, Zea mays
ctcaatctctccctcgaacgacgccgcggggcccgaaggcgtcgcatgtcggcccggcagaggagccccgcgctggcctccaggcacgcgacgccggctgccgcaaggcccgccgccagcctgggagtgaaagagtcaacacggccctcgtcttcagtgggattagaaaaaatagattgatttagttaattgactcttgctcatcttcagtggcacacgcaaagacaaccgacgaaaaatgaatcgaatgtgctccaccatgttttctgtcgtgtgaccaaaatggagcaatatgcatagctttttttgcaaaaaaaaaaataagttaaaacacttataaaaa

SEQ ID NO: 323620 - DNA, 405 bp, Zea mays
ggccgccctttttttttttttttttttgtttttgttttttggttttttttttttttaaacgatgggggcctctgctctgacgaattattcacaaataatggggagaaataaatacataccatgtcttttggtgccaaccaagctggatgcaaatcagtagtccatggagccgaaatccggctcctgcggcctgggaagcatgatgaggctgtcggcccggacggatcgctggcgctgcacgccgcgcatggcgttcttggcaaaacgcgacacgaggagcgtggtcttgaacctgctcgtggaaaccccggacgcgtctgccttcatctcctccttccggcgcctttgcttggccgcctttcgtttgaggtaccttcttcatgcggcctttattaagcaagaggc

SEQ ID NO: 323621 - DNA, 215 bp, Zea mays
tcccactcttcctaccactcgtactctcagtcttacgaccacgcatcctaacaaacaggcgagtacacatacaaacacgcatcctaaaaaaaaattaaaaaataataaaaaaaaaaaaacaaacaataaaacaaaaccacaaaaattatctatcaagaaaaattaaaaaacacatttaaaattaaaaaatatttaaaccaacacaataaaaatat

SEQ ID NO: 323622 - DNA, 324 bp, Zea mays
cccacgcgtccgcccacgcgtcctcccacgcttccgcccacgcgtccgcttcctagcaccttgtcgtgttctattagggcgataattgctcttatttcccatccttaaccacacagcccacttaactatcattcatgcaatcttcttcggtcaggtgacatcagaggctatctatcaatggacctcatctatacaacgctggctgacatgccaaataaaggtcaaatctataacatttgccaagccaatatcctatgtcattacaatatctcttcttttattactagtgctttacgtctttcaactctctcattcttctttact

SEQ ID NO: 323623 - DNA, 152 bp, Zea mays
  unsure (1)..(152): unsure at all n locations
tcganctgcgtaccggtaatctgaagccttacanggaaccatttgaggtggatcatnggacccggattggtagggcctacttgaaagggtccggagtggtgagggggcagtcanagccttgcctttaccgcgacgtcaaggagtgcagcgat

SEQ ID NO: 323624 - DNA, 242 bp, Zea mays
cggacacgtggggagtgcgtctagaaagacccataaaacccctcgacattattgcattaagtattagaaaaaaaaaaaaagaaaaaaaaaaaaaaaaaaacaaaaaaaaaaaaaaaaaaaaaaaaaaaaaaaataaaaaaaaaaaaaaaaaaagacaaaaaaaaaaacaaaaaaaaacataaaacacgccaagcaaaaaaaaaacaaaacactaaatattaaaaaaacacaaaccatttaaa

SEQ ID NO: 323625 - DNA, 463 bp, Zea mays
cgacaacgacggtagcctagatgactaggcattcagaattggggcttatatatgacactggaatagtgtgcatggtggacatatagtgcagcaccatattggctatgggatgatatcagatgcacgaccctgtctagatgatgcaaccacgacatgagacatggctttaggaacctcctccatgcagggaagaggaatcaccatctccattgattgaggatcactcggtattagtactgggggccacctgtgaagaggagtcaccaaagcctaaaatgttgttattccactggaggatggggaacccaatggtcatgcgctaaggaggggacctaagaagactctaggggtggtgattaatgtgttgttgttcatgatctcagtagggttcaatgttgccgcaacgtaggttcacaactcaactactataactgacaggtttaatttcttactggttttctgt

SEQ ID NO: 323626 - DNA, 349 bp, Zea mays
cccacgcgtccgcgatccatcaattgcaagatgagcaagataccatcaccgtagcaccacaggcgaggtactaacaaggcgaccaacatctcaaggctgacctacgtagcatcggtagttctgaccctactgctaacgacaggtcctacaagtgccatcatcgccgacgtgatcgcgtcatctgacaatttgatcagctgcaaggtactgcgcaacttcgacaagtactattgccccgaggccatctccccagggaaacccttcaactactacacccgcggcttctacccgatcatcagctgtcaccgctgatcatatatctcttgtcaatgtgcgctcaaatgtaatg

SEQ ID NO: 323627 - DNA, 187 bp, Zea mays
actcccactcgtcctcacagatttgaaacaaagattaaaaaaaaagaaaaaaaaaaaaaaaaaaatgtaaaaattataaaggataaaaaaattaaaaaaaaataaataaaaaataataaataaaaatataaaataacttaaataaaattaaataaaacataattttacaattttctttactttaaaa

SEQ ID NO: 323628 - DNA, 450 bp, Zea mays
cccacgcgtccgcccacgcgtccgcccacgcgtccgcccacgcgtccgcccacgcgtccggggaagctgtgtcagcaagcaggccctcatctgctactcacttcatgggcatgcaccaaagccttggtattcagctggcgcagcttgggaaggatgcatctgcagcagcagctgcacgtagagttagtggtcaacgaaaggcggtcgaggttgagtctgttgcaactgctggtaaacaagagactcgagaagtagtgaagaagttattccgtgctgagtttgtcgagaggcaacatcaaggtttagatgaggataccgatttgagagctttggagaatggatttgtatcggtcacccctctgaatgttcatgggcaagtggagcctgaaatccaagccccagcttcagaatggctctcagcagctgtatcactagagaaagaaaaggaag

SEQ ID NO: 323629 - DNA, 382 bp, Zea mays
tcatcaaattcatcactctcagcttctggtttaaagcttaggaactctaccccggcatcggtctcctctacaaagctcgctcaaatgctctcaacctattccctcgaacaccataccctgtttttctcaccccccataatacatactccctttactagcctgtactcttaactaaaagcattcactcataatcattgcacaccgctacattagcaccactaacttcttaataccatcactataccctttcataatacaccgacccattctactactctaattaacatcccttctcctttcatcagtagtgcaaaactaacctctctcactacaatataaacccatctcaaacaccctatattgttaccaaccattcaccact

SEQ ID NO: 323630 - DNA, 304 bp, Zea mays
cggacgcgtgggcgagaggagaaccaggagcctgcaataagagccagccagagaaactaagaaaagtctcgccggcggcgtccgagcgaacaagccaaccgaccccgttcccaaggcaatccgtcgtctacttaccaccaccaccgcaggatccagatggaaatgtagagtatcctcttcgacgtcctactcgtcatctccgtctcggtcaccttagagctggcctacaccgatgccgccctcttatgctctacatctgcatacgagtcattctcgatgctccacttgacactcctcttgctct

SEQ ID NO: 323631 - DNA, 141 bp, Zea mays
cccacgcgtccgagttgatcgatgtactaagaacaggatgtcaggacagctagattgattgtgtaatttgtaaccatatatgtatcgtctgatgacattatgggcgtgtttgtttgctgtctgcgaggcagcttttcatct

SEQ ID NO: 323632 - DNA, 392 bp, Zea mays
actcagttgaggtactctgattgtttttgaaagctgggatctactgcaggagtttgagcttcagcatgaggtggaagatgcacatcaatggatattggtgccatctggtcaattcccaaccagatcagtctactagtctgtatttcatgggtcagtacagttcttaccaagcaatttgatctggaaaacctgtcttcgaaggaaatgcacgtgctttctatggtaggctgcacctaactgtagctggacaactgatacactagctcgctgcagcctgcctcacccagaacattgtctgctttgtgaccagctagaggagaacactaattacattatattatcatgtgactttgcacgacaatttttgcaccaccttttgggcattggcgggg

SEQ ID NO: 323633 - DNA, 125 bp, Zea mays
gttgattttgtcttgcaccggtctgaaccgtggccaccaaatatgttttggccgcttgtaaccagaaatgcaatcgcaaccattcaagggcctgtttgttttatcttaattcacattgatcggag

SEQ ID NO: 323634 - DNA, 226 bp, Zea mays
gaggctgatatggatgcaatgtggaaacatcctgatgtgtataaggagtggataaaatctggtgagagacgtggaaatgtacgattctcccatgatgcaaagaacaggccttacctttctcgcgtcgaggtgaaggctgttgccgaaataatcatatcacgccatttgagcacaagaggagtaaaaccagaagctctcgcagcacttgcagaggtttgcagtatgc

SEQ ID NO: 323635 - DNA, 273 bp, Zea mays
cccacgcgtccgcatcgatcacgacaagatggcgtgcacaaacaatgcgatgagagccttgttcctcctggtcctcttctgcatcgtgcatggtgagaaggaagagtcaaagggcatcgatgcgaaagcgtccgggcctggtgggtccttcgacatcaccaagttgggcgccttcggcaatggcaagacagacagcacgaaggctgtgcaggaggcatgggcatcggcgtgcggcggcactgggaagcagacaatcctcatacccaagggtga

SEQ ID NO: 323636 - DNA, 237 bp, Zea mays
gtacaccttgcgtactagaggataagctgtcagaaatcacgaacggtacagtcctggtaaactacgggacatcagccgacacgcatcaagtcgggagatcggagccgtcttactggacctagagggcgggttctttgggggcagcagctgcacacttgagctcatgacagtcgttcacgctggtgccggaagtgcataaggtcaagatgtcacacaggagctgcatgatcagagtgc

SEQ ID NO: 323637 - DNA, 103 bp, Zea mays
tcccggtcgaccccgcgtccgcccacgcgtcctcccacacaaactcacacacttcagacgccccacacacatcgtacaagaccgtacattctaacacactcat

SEQ ID NO: 323638 - DNA, 110 bp, Zea mays
cccacgcgtccgcaaaacatggctgtgaatgtgagcaccatgtggtcgttgatgcaggcacggtttgctatggttgtggcgttgtccttcttggtgagcggcgcatggtg

SEQ ID NO: 323639 - DNA, 221 bp, Zea mays
tgtgtacccatttgtgctgcacacgagtttacggatgggccgagtcgctagctgagtcgtcgtcatcatcaggttgcttgagcactcgagcctctcagagcaaattaaatctaaccgtcgtcgtgtcatccgggtatatttaccttgtacatcgtcttttcatattgcttggtgtgtcagtgttaccgatggaggcataacataaatgatccatgaattcc

SEQ ID NO: 323640 - DNA, 123 bp, Zea mays
ccgatccatctgggcgggcgccggcgtcggggccagccaagcttgccatggggcgtcggccgacagggtccacacacacgcgtcgagcgtggtcggacctcgggcgggcggggagccatgacc

SEQ ID NO: 323641 - DNA, 298 bp, Zea mays
tgctgatgtaccaccaaatactggagcataattggcctgaccaggatctgtgcccttcttgatgcgtctattgatgaagtctggtaactccgaaacaggttacagtcttgctacatggaatgacgcatccactacaaatggcttatctgggaagactaccatgttctcaaggctaaatgtgctacattaccgatctgcataccatgctgttctataacggggtattgtcactacagtgactacggatagtcagatggctaaagagtaaccgatttgatgcttgaaagctcaatgtctg

SEQ ID NO: 323642 - DNA, 361 bp, Zea mays
  unsure (1)..(361): unsure at all n locations
gccctacgcgnntccgcggaccgccgtgggtctggacgtcgtggggtgggacttactcatnaaaagcactctaaattggggcagaatnnaagcatgcgttcgagagcgccttaatnntgaacnntgcgacaanntatgacntnnggcacntnntttgctttagngaacccatntcangnntacttatntnnttcagaaatcangnaatcttgcangnnttgtgcnntgaatacntnnttgaaaggctatntnntattctccattttatgaaacnnctttnnnaagcaagggtatnngggcagaatgganngcgtgctatacnntctctgctgagaatgacaaagtattcgacatcccgtgg

SEQ ID NO: 323643 - DNA, 393 bp, Zea mays
  unsure (1)..(393): unsure at all n locations
gccgccctttttttttttttttttggtaaaactgtaagaacatgattattcttcactttcagctttcgactcaggttgtccggtgagggtgactgctgaagctcctcgacctcaactaggactaggaatctctgacgacggcggcacgacacatgctcgccgggccacctcgtccacgaacgcttggatatgcgcgtccgaggacccgccgagcgccacggcctcccgcgccgccgcgctccacctcctggcgttggcgagcatcgcgtcggcctcgggccccgccacggcggcgtctaccgnctcccgcacggcgtcccgccgcagcggcccgcggaagcggaccccaatcctgagttccttcaccaagaacttggcgtcagtgcactggtc

SEQ ID NO: 323644 - DNA, 125 bp, Zea mays
cccacgcgtccgaaacttttgcactcgtaaagtggattagcagagggccgttaatttgtttttcagttgtaaactgtttacgtgaatgctgtaccgataccgtgataccgtctgactttttcatc

SEQ ID NO: 323645 - DNA, 404 bp, Zea mays
ctagatcgcgagcggtcgcccttttttttttttttttttttttttttttttttttttttttggttttttttttttttttttttttttttttttttttttttttttttttttttttaccattaaattttttttaataatttccctttattttattacaggttttggaaataaaaaaattagggggctaaaaattgggggtgggttatggcccttaaaaaaacgagagccggccctttaaaacgtttttagggaaaatttttcattgcctggtgactggaccattaataggcccgttgcctggtttttttggaccaatttaccaaattgggcaggaaattcttcaacctaaaaaggttcccccaggggttagaatccccgggtttttttggaaattttgttaacaa

SEQ ID NO: 323646 - DNA, 317 bp, Zea mays
tctgactcgtttgaaaaaaaaaaagatttaaaaaaaaaaacaacaaaaaaaaaaaaatactaacatacaaacacatacatacaacaacaatatctattctataatctcacctactttcaattctcttctcctctttttacaacatcttaactaataaaaccctactgtcacccaacttaataatctttcaccacataaaccttttttcacctaacctaatatccaatacaccccctcctattttccttcctaacattttctcatcctaattaattacttatactccccctcttccttctcattattcacttctcttt

SEQ ID NO: 323647 - DNA, 62 bp, Zea mays
attcccgggccggtcggaacaaaaaacaccatcatacggccactcgctctatatgattttaa

SEQ ID NO: 323648 - DNA, 72 bp, Zea mays
ctcctaccgtgggcttcgatgagtcgattatatatatgagtatcatgtttataatagttcgagttattgcat

SEQ ID NO: 323649 - DNA, 67 bp, Zea mays
acagaggactactatgagtcgattatatatatgagtatcatgtttataatacttcgggttagtgcat

SEQ ID NO: 323650 - DNA, 243 bp, Zea mays
attccctgtcgaccgcacgcgtacccccacgcttccgcctcttcatagagcgcgtctttttctacagatgacctctctatgtgccagtatctttcaatgcaatcatcctccatataagaatcttgctattgtctcttccataatcaaaccagaatatccttaaaaatctttacaaccaaaatttcactcatatttcaagactctaacattccatttttaccctacattcaaatttcaccattc

SEQ ID NO: 323651 - DNA, 156 bp, Zea mays
aacctaactcttaactctgccacaactatactttaaaattctaatacatcttcacttacataaacacctttttatatactaaccaaaacattcattcatctacctacattcaaattccaccatattcccctacaatctctaatcacatactcacaa

SEQ ID NO: 323652 - DNA, 286 bp, Zea mays
tacataattcttcatcatctacactgtttgagatatacttcctcctcataacatcaagcatgttgatacatttaagccaacatactcccatcacatttaatatattcaacatccttatcaacttaatccttatcgatattattcaattcctaaatagatacctgatcccaaagacataaatcctcaatcatcatatcactattattatcctacatctaatcctacaatgatacctaatccataatacaacctaccatttaatcttaacaaaattcacaatcctaac

SEQ ID NO: 323653 - DNA, 276 bp, Zea mays
ccttctaggggcctccctttttttttttttttttttttttttttattttttttattttttcatcgttttgtttcaatttatagtccttacatcttaccctttattttcattaaccatctgaccttacctatccacatacaatatctcaccttaacaattttaaaatcaaaaaaacatctattttataatcacatatataatcaattcattttccatcatccaaatcttacttaactcgcaaaaccttacattcctaatcattaactccctccaaaa

SEQ ID NO: 323654 - DNA, 257 bp, Zea mays
actcctactcattcactacattgccaaacatgtttcttcattcatatgattctttacctcaaaagctcctgttataaatcacgtgagacttgacatgcacactagtactaatcaacccatcatctcaaaccatcgcatctttttactacatttcaaaactttcacacatctgttataccaacatcttatccccgaacaattcttctacatcatacatctccatctcatctaataaactaaaaaaaatatacaacata

SEQ ID NO: 323655 - DNA, 244 bp, Zea mays
gctgtttttatcaaaaaaaaaaaataaaaaaataaaaaaaaaaaaaaaaaaataaaaaaaaagaaaaagaaaaaaaaataagaaaataaaaataaaaacaaaaaaaaataaaaaaaaaaaataaaaaaaaaaaaaaaaataaaaaataaaaaaaatacaaaaaaaaaaatataaaaaaaaaagggccaacttttaatagtttcaaaaattactatacgctaaaatgaacttcattttctttatt

SEQ ID NO: 323656 - DNA, 226 bp, Zea mays
accacgcgtccgtccacgcgtccgaaaaaaaaaaaaaaaaaaaaaaaaaaaaaaaaaaaaagaaaaaaaaaaaaaaaaaaaaaaaaaaaaaaaaaaaaaaaaaaaaaaaaaaaaaaaaaaaaaaaaaaaaaaaaaaaaaaaaaaaaaaaataaaaaaaaaaaataaaacaaaaagaacaaataaataaaaaatgcaaaaacttaaaaagataaatatgacaataaa

SEQ ID NO: 323657 - DNA, 457 bp, Zea mays
gtatgtatctgcactcactccatggagattaaaatgaagtcttactttcttatgtgctaatgagagcttggacatgttatatgtctctttccgtgcacaattactggtgatataaatctcaaaatgttatgaccaatttcaatatatttcagaaattaatattactaggtaactcatgtataatggttgctttttaagcaaatgccaaacaaatatagagaagggggattcaaacagatatgatcttgcactatttacaatcttgttaaccatcttgtctatttctcttaaaatgttactcagatgatgatttgtattcaatacattcaccaatggccgacaaagatgacaatgatgaggacgaggccaaacacctgctgccagctccatccaacgaccagctttctgtagatgtaccgccaaagctagcgaaagatcttctctgaaccactccatg

SEQ ID NO: 323658 - DNA, 421 bp, Zea mays
  unsure (1)..(421): unsure at all n locations
actagccagagatctgaagtgtatgtggatacagatcaatgtgagctgcaattttgtgaacgtgtagagctggcaacaggaacagccgaacaggaccacgtcaatggaagtgggagcagccgccgccggcaagctgaatgcggagctgtttcagtggttggcgttcggccgcgtgatcccgttcatggagtttgccaagcgcctggcggcgaggtggccgcgccgtcaccttcctctccatgcagaggaacgtagccagactcccgcccgtcatggagggcctgcctgcccgagggcgccaagttcacggccgacgtgccgtcngagaagcactgttagcaacaatacaagaaagacgtcagaagctcaccagcactgaagatggagcactgaagatggaaaagctgaccaacaatactga

SEQ ID NO: 323659 - DNA, 339 bp, Zea mays
cctttctcttagcaggaggtgaggaaaggggacggaagcacgcagaccgggtcggatccagcggcccgcggaacggatcgaggccaccggcatcctcggctcgcgtcgcgtcgcggcgccgagctcgaaatccccggatcggtgcagctgccccctgccgccgcccgataacgcggcgggagggtggtggcctgtcgatctcgcggcgggagctggttaactacctgccaatttgtggatttgtgtgcgtgcttgattttggtgcgtgtgtggtggtgttgagtcgccggcgtggggtgtcggagctagggtttgggcgttcaggatgacggcgccggt

SEQ ID NO: 323660 - DNA, 284 bp, Zea mays
acgaacccaccttgttttgccccacccttcctttttttttgtatataatcagcttcagctgcctgcatggcataagccttgcctgttcagggtgattccatgtccctaaatactcaatcagctcttgttacaaaaaaaaaaaaaaaaaaaaaaaaaaataaaaaataaaaaaaaaaaaaaaaaaaaaaaaaaaaaaaataaatataataaaaaaaaaataaaaaaaataaaaaacaaaaaaatgaataataaaaaaaaacaaagttaaaaaaaaggggggcccc

SEQ ID NO: 323661 - DNA, 73 bp, Zea mays
cccacgcgtccgaaaaaaaaaaaaaaaaaaataaaaaaaaaaaaaaaaaaaaaaagaaaaaagaaaaaataaa

SEQ ID NO: 323662 - DNA, 163 bp, Zea mays
tcgtcacgtcccacagccgtccgctcactgcagccaccacgcacgcaagcgtcaacgaacagaccagcgtcgcgtaaaatagagtgaagagcgcgcagcatgaggatcatacagctcgagcatcttgggtgctacgccgctcggcgctagtcggcagggcact

SEQ ID NO: 323663 - DNA, 291 bp, Zea mays
ctcacacgttctccatcactaaaatctcatttatcagcaatatcttcatagaaagacgttgcgcgttatcacactacttgtgagggcacttataataactgtaccacccaactaatcattacctttgacaatagaaacactctcactttacaactttataatgaacatcacacagaatttatctacagcttacctttccttcttaagactattgaaaaagctatacacgttcattaacatttatcaggtgtcgcgaaccctgcacagttattataatgccactttacacgg

SEQ ID NO: 323664 - DNA, 328 bp, Zea mays
gttctagatcgcgacggccgaccttttttttttttttttcttttttttttttttttttttgtttttgttttttttttatttttttttttttaaggcccaacacaatcaagcaaaccgatttctgcattaccattaattattacatggcaaacagcccatacatgctagctatttttgaaactgttttttaatcattacatcagcaccgatatcccgggaatatcctccaagccatgcatacctgtgaatccaacatcgacttcgttttttaaatccatccatttcaagccaacccccccgacttggcccatttcattacactcttacg

SEQ ID NO: 323665 - DNA, 393 bp, Zea mays
ccgaggaggatcccgacgcctccgctgccgagggatgggtggacgagctccggcgactgcgcgtcgccgagctccgtcgcgacgtcgagcgatgcgatctctctatcgggacgctgcagtcaaaagtgaaacggctgaaagcggagcgggagcagagagcctccggcgaggctgtgagcgaccacgatcgcctctcaagcgaggagcccgggtgctcatgcagggagtcgaactccacagatctgaagccgcccaaacatcccagccagctaggcgacgggtctaaggaggagaaggttgcgaaacaggaagcgtccgttgagtcggcgggcgattccaaagacagcagcgaagtgcggagctcggcgagcttgtgcccgcggcggcgtggaa

SEQ ID NO: 323666 - DNA, 357 bp, Zea mays
cccacgcgtccggtgcaattcaccctcttaattttgtatatatagatctatagatcctgttgtaaatttgtacagattattattagtatgcatggtggggaggctcatgctgacaaatgtatgtactattgtactgtatatctcgagttcatggtaatacaacacacagattctgcaaaaaataaaaaatgaaaacaagaacgacaaatcacataaaaacagattaaaatcacacaaaatgaagtccctcaaacatatcaaatcttcaagtagcgatcactaaaaaaaaaaaaaggggcggcctatttaaaggacccaagtttaatgccccgggcttgcaacgtcaaaatttttttt

SEQ ID NO: 323667 - DNA, 177 bp, Zea mays
acgcttatgcatccgctacacatcaagctcagattcaactatacataaacactatacatcgccacggcaaatttgcacagtattatcaatactatctatactataatacctcatactttataacgtatgtactatcctactatatatactaaatctatactaatgcatcatacatat

SEQ ID NO: 323668 - DNA, 181 bp, Zea mays
acgcccacgcgtacgcccacgcgttcgcggacgcgtgggcacggctctcctctcggatgtctgagctgcgacccaataatggcagaagttctatcaggatctcatgaacaccgtctaagctctgccttagatggacactacgacgagaagaggacatgcaatgtggaacacacataggacg

SEQ ID NO: 323669 - DNA, 156 bp, Zea mays
acgcccacgcgtccggaaggccctgcccatgcctttgctacaggctctcttgttgcttaactgggcagggtgccattgatgctgtgagagatatgagcatctgacaacctgtgtgctatcgctgtgtcatattgatactcagactccacttagact

SEQ ID NO: 323670 - DNA, 132 bp, Zea mays
cccggtcgacccacgctccgccacctccgttaccctaaatcacgtttagacaccattgctcaataatgctaggggcttcaaatgtgtcactcgatagcaagtacgtcaatgcttaaacagttgacatctaaa

SEQ ID NO: 323671 - DNA, 60 bp, Zea mays
acgcggacgcgtgggccgcatagacaggcgtgttccgactctcctatctgtgcgacccaa

SEQ ID NO: 323672 - DNA, 331 bp, Zea mays
gcctcacctgtgtcactcatcctccgcctgttcctccgtctcgattcagacacacgtgattgtgttagctccggagcaggctacgtgcactgtacgtgtgagtgccgcatctgcttaagctgtcgcgccgtcaatggaagccacaacgtcaaacccgcactcctcaacctcacttactcccacgcccgcgccgtcaatggaaggaaagccaaatctccttgcccgcagtcctcggaaggttcgcacattcacctactgtctcgctcgtcatggaagccagatcttcaaacccgtcgaccttgcaacgtctattgaatgtccatcaacttct

SEQ ID NO: 323673 - DNA, 334 bp, Zea mays
gggggatgccgccatcgtcgctagggacagaaacaccgaggagagcagagatggagccgcgggccaaacggaggaagggccatcatttagattgagcgtatggccagggatattcgctgaaacctcaggaatacgctcatggtccctatggacgaggagccccaccgggctcactgggatttctcgccggtgttggcagacaacgccgacccgccgtgcgccgtggccaagcttcactgctgcctccatcttgggttgtcagcattgcaactactgttcaggcgataatgaacctttgtaaggagacttttaggagttccaggattacgacaag

SEQ ID NO: 323674 - DNA, 106 bp, Zea mays
gcctcacctgtgtcactaatcatcggcctgttcctcctgctcaattcagacacaggggattgtgtttgctcccgagctgtctacctgcactgcacgtttgagtccg

SEQ ID NO: 323675 - DNA, 420 bp, Zea mays
cggacgcgtgggcggacgcgtgggtgcgagtgaagccttccctggttaacatttgggtacgcttgcagggttgtgcagttgtattggtgcattcaacttgcaggagctacaagtccataccagaagctgaaagaagggggcaggatcaggtccctcacagccacacaggagaagacgaggatcggccatgcctcttgctgctccaggtgggcgatctcgagaagttcaagagcgtgtcactggctatggaaaagggccactctgcctccagagtcctggggactggggagggacgccgtccgtggagagagttgtgggtgatgagggaaaccgatggagaatgtgcttgtcttatgtgtgctggaagttgaaagtgtttttgaaaaaaaaaaaataaaaattaaaaaaaaaaatatataa

SEQ ID NO: 323676 - DNA, 264 bp, Zea mays
ctaacgcctgctgcacgccagtctcaacagacgaaacgggccacatggtttgaacgcaatcggccggagcgatcagctcggtggcctcattgctactgcttgcaacaaccgcgacaacctcataggctgccatcacctgcacgcatgcgaactccgccatctcgccatgcctcttctacccccgtggcacgagatccggaccctgcacatcctgctgtacccgcgtcaccaacctaaatagcacctgcagcaccgacgacgaca

SEQ ID NO: 323677 - DNA, 220 bp, Zea mays
ccgcaaggtcatcatcacgactgccgagaattcgaacatcccgaggagggagatcacgaaggaagtgctggaatctatcctatacgaagttttctacagaatccaagacccaaaccttgtgtacccttactaccatctcaacccgtatcatgcctacgactaacgtaatctatcatggctggctccaacatacgccgagcctgctacaatgtttatcgca

SEQ ID NO: 323678 - DNA, 240 bp, Zea mays
cccacgcgtacgagaacatatcgatgcttttaaatatcaatcagctccctcttgcaaggtatgtgctcgttgcacaggtgctcagatagctccttctatgcatctgctaccatcacataagatggcttactgagctttatttcatgtagatacatcctatgaacattcctttacttcggctaacgtatcatattacaatcccttatgattacgattttctttgaattatgcacctaacca

SEQ ID NO: 323679 - DNA, 326 bp, Zea mays
tccacacctcctcatacctctgcttgaaagcacacgcttcaatacccaacaactgcgggaggtatatatgtacagcggttacctttataataaccattaaatattgcgaatgaacctaaatctctacatctaatttacgcaacattcccattgatatataacatatctggaccattgattatgatgtttactagctgaaactcaattcaatttgagctatgcagtttgacactccttttcatgtatacctatttacatatttattagcctattcttctattatatttaaacttaccttcacttgcatgctacgttttaattctttt

SEQ ID NO: 323680 - DNA, 399 bp, Zea mays
gcgatcgaccttactcgaggacgactgaaacatgcgtcaccataccatggcccccagcaagctctgcgaggccctgtgcgcggtcaaggaccatacgagcatcgggctgcccaacgtcgacagcggccgctccctgcacgcggacctggacttggccatcgtcaaggccaccagccacagagtgatcattgcatatgcactgacctccatattctggcttagtcgcatctcttactctgctgtcaatgattcatatctctatatgcatatctctctgctctgccttgctggctggctcttctcatcattccctagcagatcgcatagtattagttgcatgcattatatagatgattcaggtccttcgtttagcaacatggcgttctatctaattgtttt

SEQ ID NO: 323681 - DNA, 222 bp, Zea mays
cgacggatgcagctaccgtcattcaggctccagtgccaccccgtgccatcgggctgcgtccgctatctaccgagcgttcgtgcatggaccagagcgtgggacggagcaatggatgttgagatggaggcagtcgaaggagagatggctacggacttgttatggtcttacactgacgagccgtacgcgttgcgccagcggaagatcatggctatgtacagttaa

SEQ ID NO: 323682 - DNA, 286 bp, Zea mays
cgacggaggcagctacagtaatacatgctggaatggcaccaggtgacatgcggctgggtcagctatctaacgagagaacctacatggaccagagcatagaacggagcaatggatattgaaatataagcaatcgaatgagatatgcctacggacaagttaccgaataaccctgtccaatcctacaacatgcaacagaggaacaagacagctatgaccagttcaagaagcgacttatggcgaccatatgcactcgtccggctcacaatagatgtgtatgcataaattg

SEQ ID NO: 323683 - DNA, 107 bp, Zea mays
acccatatcgcatccactaacactgctactagaactcattatactgaatccaacatggtgataggttaccttcgtcggattcgcaaatacctattccttaacgcata

SEQ ID NO: 323684 - DNA, 193 bp, Zea mays
atcgacgaaagctatatccagctagtgacaagagcaaaaacaccatcatcttatacgcccgtatcagacgccacctcaatggcccagagcacgaggatggtggcgctagccctggtggtcctcctggtggctgagacagctttcgtgtttaatgtcaccgagtacagctgtttccataactgctacaagcggt

SEQ ID NO: 323685 - DNA, 354 bp, Zea mays
gcgcagctacacttcatgctaaccacgatcaagcgccaggaatgaagacgctgttttatcggtaatatcgatctggccagggacgagaatgaacacatggccaagctcgatgaacaggcctaaaggtattaagaactggttgaaactatggtgaaggtggctaaaactgtatacgttggtagacctatctgatgaacagcgcaagctgttgacagacgtataccagaatgcgatcggagctctcacaacttgatacgccattgcgtcttacattgtacaaaatgaagagctgcttgccaacgaatagcctgtgaaccttatgaacgagttctgaacgatgatcgatgctgaact

SEQ ID NO: 323686 - DNA, 182 bp, Zea mays
cactttatgcttacaaggatctttcttctccaatggataccctacataagtgcgatatgtgtgacataccacgctggagttgcaactgatgatgccgctcgatgacttgacctcaaatccattaaaacaggttgcaactctgaattctcacattaaatcgatatgcatattcacccaaattg

SEQ ID NO: 323687 - DNA, 70 bp, Zea mays
aaaagacatacataaacaaaaaaaaataaaatcaaaaaaaaaataaaaaaaaaaaaacatggggcgtcgt

SEQ ID NO: 323688 - DNA, 288 bp, Zea mays
catccgagacctacgcgtccgcagaaaccctaattggaagggcactgcacggacgaaggagatggcggaagacaatcacatgctcctacacgagcccttacaactcgccttcgaacttttccccgccaagcctaaaagattccgcatcacttaccaagatagttggtacgctcgggcccaattcacactcgggtgagataattcaggaaagcctcactgctggaatgtcacatgcaccgtttgatttctcatggatagatgctgcgtatcaccagaagacccttgata

SEQ ID NO: 323689 - DNA, 195 bp, Zea mays
agactccacgcgtccggtatttctggtttgtattaacatttaccgatcgatttttattgctgagaagcatataaacattatactcacctttaaaaaaaataattaaaaaatatataaaaaaaaactaactaaaaaaacaattaataataaaaaataaaataaacaaaatcaaataatatataaaaaattttaaaa

SEQ ID NO: 323690 - DNA, 314 bp, Zea mays
ggattctaacgtttccctcgttgttttgccacacatggggtggcccaatcaactaacttggttgcagttttcagcgaaaaatcgtctgcggcgcaagagaagcgtacaactcaatttgcatgatccggattacagatgcagtcgaaatagatatttattcttttgggtcaactttataggattgttattgtacaaaatgcatttttcatagtacatcggaatacttcgtccaaaaaaaaaaaaaaaaaaaaaaaaaaaaaaaaaaagacaaacaatagggcggacccaaagctaaacatacaacgtgcatgcaa

SEQ ID NO: 323691 - DNA, 217 bp, Zea mays
gataggcgtacacggaacccgacagctgacacatgcacgaagcagacacctaatggaccgcgcactgggtcctcctcgagatgctcattatacccgacgacagcatgtcgccagctcgcggacgcggggcatatcgactgcggctatggcagatctatgcgcgtctgcggacgcaccgtgaagacatgctcgacgatggcggtcgagctcctggagc

SEQ ID NO: 323692 - DNA, 129 bp, Zea mays
tcccactcgtctcggttctagatcgcgagcgtattacattttgcagacgtctactacaccatggggatatgttgctcgattaggatgcctgcactactaccatacatgtctctaacctttcaaacacca

SEQ ID NO: 323693 - DNA, 292 bp, Zea mays
cacgcatacgagaccgctgccatcaatcacttgttcaagtttgggttccatgacaacattacgtggctgagctaactctccaaactgaccaagcttcaccacgagaacatcgctacatcattatctactacgccgacggaaaccatcggactcttgcttacgattccgtgccttgccgcaccttagaacatcacctgctcgatctaccggcagacaagaaaccaatagactcgtgcactatgatcaaagtggctcacggcgcaacacatgagctacagtacctgcacgagac

SEQ ID NO: 323694 - DNA, 187 bp, Zea mays
ataccgcgtccatcaagcagctgttcaagcttcgattccaggacaacatggcgttggtgaggggggtctccaatctgagcaagctccaccacaagaaccttgtccacatcattggctactgcgccgacggagaccaacggcttctggcataccaatccttgcccgccagcaccttagaagaacacct

SEQ ID NO: 323695 - DNA, 199 bp, Zea mays
ggaagactttgacgaggagcctgatgaatagtctatacataaaagcacctacgatctcaccgagatcgaggatcaagacttggtgaaagcccagaatataaacgacaacgtagtcgattatagctagactcgctacatctcatggcgcgaaatgacacgacattgttaaacacatagctcaccaacgttatatgaagct

SEQ ID NO: 323696 - DNA, 338 bp, Zea mays
ggaagaaggaatggatatggatggatggataggaagtggccgccatatgggcatgggccaaaccaaaccaaatcaattggtgggtttgtatcgtgccagcggcccatatgtagacttccaccagaccaagtccgtctgattccgcggatcatgcttacaattaattaattggtcttggggccaagaagaataagaagaagattaatgggccttcttgaagctttgggccaactagcccaacgtacataaaagatgaagaagatgaacatgcatgctcagcaaggctttcttcgtggggtggtagctgtcgaagaacacgtgctgcgagacgttgtcgc

SEQ ID NO: 323697 - DNA, 177 bp, Zea mays
caccacgaccagatattcttctccgacaattctatgataaccttgttactactaatcctagaatacatggaacattgttagaaggaatagtcaaaagccatagatacgaaagcgtcctcacctgttggatctatccacatcactaagttcagcacctgcgacaatggcaacacagac

SEQ ID NO: 323698 - DNA, 77 bp, Zea mays
aaaaaaaaaaaaaaaaaaaaaaacaaaaaattaaaataaaaaaaaaaaaacaaaattaaaagggactgaaaaaaaaa

SEQ ID NO: 323699 - DNA, 263 bp, Zea mays
accatcttcactgcacatttcaagacggtgcgttaaagcacgctccactacagacttattcggcgtcgtactcgttcctaagagcttggattccacatccgggaacatcctcctcgttataactctcatacgggtacgctcgcttacgatcatgcgagctaccacggtcacacttgcgtactcggatgtaaagctcgatcaacttgaacgggtattcgcatctgccaaccttgtggttcaacctaggcactctgtgatgtatg

SEQ ID NO: 323700 - DNA, 254 bp, Zea mays
cccacgcgtccgccatcatctggtatctagtctcatcaacaggggcatgtccactatccaggctatgttcatcacagtggtgtcagtgtacctggttttcttctgcaacctattctctgatgagctggatggactatgtaacatatcggattacaaatctatccaatatcactatgccggtttctgtactaaaacctctgagtgtcctagctatgtgaacctgggcgcattcctcatttggcctaatggcgtat

SEQ ID NO: 323701 - DNA, 321 bp, Zea mays
cccacgcgtacgtccacgcgtccgtttaattacaggtcatagctaagcatgtctcgcaggatgtcgtggcagacatacttcgatcagcacattcttatcgagatcgagcgccagttatagaccaggcctcatatactcagacattacgaaaccgatcctgaaaacacttcgctatatctcaaccattatggatagtaaagaggctgaaatgcgaattgcgttcacgaccgatgtttaacacgtggcacacatattttgtgatatttctgtctctacctacaacactatcaccaacatcgacatcaatattggcggagcacc

SEQ ID NO: 323702 - DNA, 255 bp, Zea mays
tcactgctaacatatcagttccaatttatctttagcacggccaataagctcaaatcggccgggattacttcatatacatgccaaaaattcaaccattcaaaatcatacttcaatcatatgcatattcaatcaactaattaacccatgacaacaatatacaagtcttacaaataataatgccaacattaatcgatagattactgatcatatcatttctactttgcttacatttttattcctaatcttctctaattt

SEQ ID NO: 323703 - DNA, 345 bp, Zea mays
ctcccgttcttggggggcaatcgcgaatcgcgctcctcgcggtagcggtcgattagccgggtccgcccagatccgccgcggctgcgctccagttccctgtcgcgataccctggatttcgtccgtggcgagtggctaccgcttgtgctccttttgtgacagctgaatctttgtggttcgaaggcgattgacttgggttcactgacgcggtgacgcccaatgagctcccacgtctccacatcgcggggtcttcatcccccaagcaagcttgggacgttggactcacccggtgcgtggcagccgccagcacctatggctcagcccgaagcatgccgcggtgatgacca

SEQ ID NO: 323704 - DNA, 365 bp, Zea mays
  unsure (1)..(365): unsure at all n locations
cccacgcgtccgcgcatgtagtttctgcagaagctagccaggcagacgagagagcgagtcaccgcgagaaggggatcgcggaaagtgagagcagaatcaacaatccacctgctcatcgagtcgatggagatgaaggttgctgcctcacggccaggatgcaagaaacgccccccgagccgtctccagaagcatgcgccagcgtcgctgcaactggagcaggctgtcgccagtgcggggacgggagcaccgtccgcggtgtggggtgacgggagggcgccgatcccgctcctgtcgccgctcgtcgtgtcgcccatggtgccggtctgggaggcggaccagacggggggcgccaggaagganggagg

SEQ ID NO: 323705 - DNA, 315 bp, Zea mays
caaatacatccacccatccttacacagactttcatttaacacatgaggcaaagctcctagcggcacgtacaatttgactaacatcctgataactatcaagacattacgtacacgcacgcattaaccttcacattaaaccaactagctatcataagaccatataactatcatacgagctaactactaatgcaagcctttacacaaactattaatatgatcactacattcttacatcatacaacaaacattcccatgataaaatacatagcatactagactacactacaaccactgatacaatcatctactttcact

SEQ ID NO: 323706 - DNA, 253 bp, Zea mays
attcccggtcgacccactcatccgctccgcctctttttgacccatacttataactttctcctcgcggtaacattccattagcctgggttaattagatccaccgctggtgcactccaattccatctcgcaataccctggatttagcccgacactaatccctacagcttattctacacctgtgacatctgattgttcctacttcgaaagcaatcaactagacttcacttactcaataacgcccataagatctctc

SEQ ID NO: 323707 - DNA, 296 bp, Zea mays
cccacgcgtccgggcgggcaaggccagtcttaagctcacgccgccgccgtcatcgtggacggcgacagctccgacctgacgacgaccaagctcgacgagctccgagcctatctgcagcacctgcagctggaaaaggaaagtcgcaccaagaaggtggcggaactcgtggctcagctgcactcgtcatccttggctctcggcatggatcccacagaggcgaacagtgtcatccatgttagcgccgaacgctcgcatgtgcagcccggcgacatataccaccgctccatatcagtgct

SEQ ID NO: 323708 - DNA, 224 bp, Zea mays
accacgcgtcctcgcgctcacagtttgccttttagctcacgccaactactaccttgtgcacggacacttctcccaccggaccactacatacctcaacgacctactaacctatctgcaacacatgcagatgaaaaaggtacgttgcaccaacatggtcgccgatctctcggctaatctgcacttgtcatccttggttttcgacatgcatcccacagaggctaaca

SEQ ID NO: 323709 - DNA, 310 bp, Zea mays
tcgcccactcgtccgcccactcgttcgcaccaactaattaaaatgaccaagaaggatgttggcgagcgccgtcgcggtcggatcctaccttggccgccggtctggcctcgggaggagaacgtgagatcacggagccaggagggtcgaagatgtgatgtggaatggctagtattgctctccagcgatcaccatggccgcggtgccgcactccgtcatggccagtaatatccgtactgcaatttacgtctttgcctctctatatgtattgctaccatagaatctaggttgcgatgcacctacattctacatt

SEQ ID NO: 323710 - DNA, 257 bp, Zea mays
ctcacgcgtccggacccacgcgttcgcgaatggcgttactttacctagaccatgacatgggggttattgcgataaacatccgagagacgcactggtatcttgctgtgatccatgcaagaaatatgcagatactagtgctcgagacacttgatacttcacaagaccgtaaagacctcactgactctattaaaggtctgcaatggcaaattgatatgatatctcaacgtacggagttataagactacacgtggtcagac

SEQ ID NO: 323711 - DNA, 243 bp, Zea mays
ccacgcgttcgtcacatctagcgttggttttggagctcgtgcaaaatacctggggattaggtcagttataaaaatagccaaggtgactgctgtgcacacttaaatcgtggcgcatcttccgagtcatggcgttcacgcatctacaaccgcgacacttcagactaacgtggacagccttggccgaactaaccatcgataccgcaattttaccgacagtctaatcctaaacgagtgccgttaccc

SEQ ID NO: 323712 - DNA, 326 bp, Zea mays
cccacgcgtgcgtcgactcgcgggtcgagtttcggcacatgctggtgcacctgaggacggggcagatcacgctgaacaacgtgctgaacatgatgctcatcaacctgtacatggaccactccaacgcgctgatccgcgacttgaaccgggactacaagctgcactagcggatcgacacgcacagcgactgcgacctggcgtccatcctcgcgtgcatcaaccactggatcatccacatgtgcatgtacagcttgatcgacgggctgatcgactcgacgaacattaccacgtccaacaccgagttcaacagccactacaacgacgat

SEQ ID NO: 323713 - DNA, 157 bp, Zea mays
tcccactcgtccggcttgactctctcgtgcttttacccatccgtcgtctagcatgactcatgggagattggcctgactacagcaatgacggtgcagtctcatgatcaccaccaccaccaccacctcgagttccctttcctcgtcagcttctgctctc

SEQ ID NO: 323714 - DNA, 212 bp, Zea mays
acgcgctacaggcgcaccatctacctgccatctcctttcacgccacgtatcctagaccacggacaggggcaccttttcactgacgctgtacatatccatataagacatcaaccctttacgaagcatcgcatacctcaaactcacactcaacctcaccaacatacacctcaagcacactgaccgacctcgacacactcatacttaccgatctc

SEQ ID NO: 323715 - DNA, 410 bp, Zea mays
gcaggagcaaacaatgaacacaagtcagatcaaaggaaaaggcaatatgaccttatcgaaggtcctccgaaaaggttaagaaaaggatgtttacatatccaaagcagtgatgatgatgtccaagagaactaaagatggttgtttaaaacaccaaatttgcttgcttctcacacgctatcttttgcaaactttagcctaatccgctgtaaagcatatttgcttgataaagtcccctgaactttcttttgatgcaaacaagatctccatgctgaatcaaacatggtagataaaagggcatatctctatagttctgacatgccaccttttgcggtctctaggaccaatattttggtgcctcaacaaatatgtatgtatgactaatttgttatcaactgcgcttagttcacaaa

SEQ ID NO: 323716 - DNA, 267 bp, Zea mays
  unsure (1)..(267): unsure at all n locations
cggacgcgtgggcgggcgctgatctacagctacaaggccgccgctagcgggttcgccgtcaagctcacgccggctcangtcgccgcgttgcagagtgagctccataattcaccggttaattctcccgtgctcttgctaatttacttttttgcgatgcttgcctgatttcctgtgcaaactcatggcgatttccccgtgtgctcttgtttgttggcctggccagagcattctgacattgtgcaagcgctgtctgacatgaagttcacc

SEQ ID NO: 323717 - DNA, 365 bp, Zea mays
  unsure (1)..(365): unsure at all n locations
cggacgcgtgggcggacgcgtgggcgccgatcgccctccgctcgctccaccgcggcgggcgatcgctcatctccccctaacctgccccgctcgcgattcccgaggcgaggtgccacccaccgcagatttcttccgacggacggttggctcgctcaccccctacttcgctgatcggatcgcgtgctgcccgaggtggaactttataattttgttgcgtgttttcataatgaaattagggaatgcctatggtgaaaaaaatgtanaggtgatgataaggcataggtgtttgacttagcctgccttagctatttctttgaagctaaggaaaataataatgggggtatggcctttaaaaataagggttg

SEQ ID NO: 323718 - DNA, 193 bp, Zea mays
cgcttgcacaccttgcgtctcgtctcccctctctctctgtcacacacacacacacacacgcgtcatgtcgggacgggaggggaggggaggtctagtgcgcgtacggatttcctatcctagccgcacgacgcgtgcgcggtcccggatcgacgatggccaatgcacgcaggccgccgctggcctgcgtcgagcg

SEQ ID NO: 323719 - DNA, 337 bp, Zea mays
cccacgcttccgaagaacttggattcagatatagaagttcctaaagctatacggcttgtccatccataatgctcgcttaacctggatgcctatgaatgatacacagcagatcaagcaattgacgttctagatagacttaacgatatgggagtgtaccctgttgctattttagcatccatatcacagagacgattgggaaggtcatcgagatgtcagctctgtggccattgaaaaatacaaatgcgttggtgctgctgatgagagctgtcataatatggtcgatgctcatgacataatacacgggaatattgcccatgttattaacatcaagctggct

SEQ ID NO: 323720 - DNA, 320 bp, Zea mays
cccacgcatacgttcatatacattttgcatttcctacccaggcagaccacacagggactcagcgctagaagtcgatcgcgtaaagtcataccagaatcaacactccacctgctcatcgagtcgatggagatcaacgtcgctgcctcacggccatgatacacgaaactccccccgatccgtctccagaagcatgcgccagcgtcactgcaactcgagcaggctgtcgccagcgctgcgactggagcaccgtccacagtgtggggagactggagggcgcctatcccgctcctgtcgccgatcgtcatgtcgcccatggttcc

SEQ ID NO: 323721 - DNA, 283 bp, Zea mays
tcccactctttcgtccactcgtccttcctccctttttttctttttcttttttttggtgtttcggtttttttttttttcctttttttttttatccttttttttttttctccaaatacataacccttatacatgaaaccttatgccccgtgttcaaaaacttatttttacgcacgctcctttaaacaagctttctgctacatccagccttatccgctagttcttccacttcgaaccctcatatattgcccttcttgaccatttcttttcttttttcaccttccac

SEQ ID NO: 323722 - DNA, 322 bp, Zea mays
ttgaagcccggcacgccgtcagttttccgtttcacttccagcccatgccatgcgggtcctggcccgcaacctcgagcgattcatgccagatccggccatgctcgacacatgatgacttacccgccggcgccgatggctgctctctcacgccaagcacaccagacaccatcgccgaccactaaggtgaaacctccgacactgtcactgtaactggatcacgctcgtcgacagctgccggactgaatgcaccgctcacggcctatctgatcgcgctgtttctcttcctcatcttctcgaagctctgcatgcagcccattcctcc

SEQ ID NO: 323723 - DNA, 316 bp, Zea mays
  unsure (1)..(316): unsure at all n locations
cccactcgtccgggcaagggacgtaagaagtattttnagattatagagccgttggttttagaggatttcaaaagattgctgtgtcaagggatgacaaactctgatcagacacatgatagacaaagaattgaggacccacgtggctttgctatgttggcttggacatgtctagagcgtagtgttctcgctatcatttgctcattttgtgataaactcttgaagcaatatgtcgtcgctttccctgaaattaatgatgaggtggtctacagctcccttgaattcctcatccttgctcgttatggactctgggatgttt

SEQ ID NO: 323724 - DNA, 441 bp, Zea mays
gaaataaaggccaacatacaggcgagggagagcttctcgccggggcgttcgtcggccatatgcactgttcatctccttcctctcagtgttctctgctttctagggtgtgagcgctctttcttgagtgagagggtccaacatttggtaccagagctaggatggagacgccgccggcaaaggatggcctcaagatgttcgacggcatgggctcgacgagtgccgcgatggagcgcgtcatcaacagcagctccgttgagctcccgctgctgaccaaggcgaattaccacgagtgggcgttggttatgcaggtctcgctggaggcgatggaactgtgggacgcggtggaggccgtgtgcaaggagcgtcccaaggatcggcgggcaatggccgccatcctgcgcggagtgccgccggagatgaaggcggtgctcgccgtgaaga

SEQ ID NO: 323725 - DNA, 423 bp, Zea mays
tcgttcacgcgttcggccactcgtccgtagacgttcaacgacggtggggacacgccggtgcacgtgtgcgcccgccatctacgactaggccatgtttcttcaatagatccgtcgtcgtgggctactacaataaccgagttaagcggaaagtcgcagtcaaagttcttggttttgcctgcattcacatctgaatcgagtacatgtgcatacacgcgtaccaaccttggattcctgtactgggtatgtatccaaagcccttaaatcttgctctgaggccaatgagaatgctacaactatgatatttatctatggtccatgactataagaaaaaaacaatgaacgagctaggggatgtggaagagcttgtgtctatgatgaccaatgtgacacctaggggtcaaaaggacctactgatatcattgt

SEQ ID NO: 323726 - DNA, 441 bp, Zea mays
gctacgcgtggcttctcctgcaatttggatccaaggcatcctctctagacgcttggactcggggccgttatggctgatcgtctctgaggagctattccctaactgaagcagattcattatcacactctctcctgtcggtcattggtgactctgccgacggccatgattatagactcgtaaagagcttacaatgtgtctccagtaatcccactacgtaagctactgatcaacgatcgagcatccgatgcatgccttcacatggtgcatgagagctatcttacatgcgtcaacgattgtacaaatgatccttcaaagacatttggatcaccataggacatctcttatgcactgatcacgatcttagaaatagaactgtcaactagtcaatctggcgaatgcatagccttcacaatgatgatcaacattcgctatatgcatcga

SEQ ID NO: 323727 - DNA, 339 bp, Zea mays
aattgcaacaccttaagtctcatttaccctatatgtctctcacacacacacatggaggactcgtcaaatcttgacacacaagtgggcccttgtcttatataccattcgatcgtctatgatggtcaatacttacctactactgcttccagcttcttcgctcttgtattgtaagacctaaattgaaagtaccggccgtgcaattacatcgtagcctctggaaatactccagactgaccaaacttacttgcttatcttcatatccacctttaacaacatgaccaattatcaaatatgccattcctatttgacctatccaagactttcacagccagtattgcc

SEQ ID NO: 323728 - DNA, 312 bp, Zea mays
gcaaagcataagagatgatctggaatctgttatctattagctcatgaaattaataaacactggatctatttacaagccagcaccgaaactagacactcacaatcccaaatataaataacctcaatcctacaaacatactaacacctcaccgagacactatgtaaatcatatccatcatatcttactacatactcttcttaaacatcatcactacgacatcaaacataaatcagcatcatcatatgccaataaacccttccgcgacccacttatcctcgaccgttaacaactacattatccatttcactctac

SEQ ID NO: 323729 - DNA, 375 bp, Zea mays
cgcacgcgtgcgcaaaagccctcggaccgtctaacgctctacatcgtatacatgcgcccgagagcctccggaactgtgaccgcggctgcacatactatgcagctcctgcactacactcctatagcgcggcgcggagcacgctgacatgaaatcagagccgaagcaggacactgggctgtatgtggttgccagagtggctgtcgcgacgatgaggacacctgtgcacatacttaatgcagcgtaggagtcaccgcaggctaagaacgcggtagcagctaattcagttgatacgaacaacaccttggcccagtgcgagctagtcatcgggagcatgctacgcagtcaactcacaaccttgaataatgacgtgacaga

SEQ ID NO: 323730 - DNA, 424 bp, Zea mays
tcgcccactcgtcctcccactcgtccgaaaaaaaaaaaaaaaaaaaaaaaaaaaaaaaaaaaaaagaaaaaaaaaaaaaaaaaaaataaaaaaaaaaaaaaaaaaaaaaacaaaaaaaaaaaaaaaaaaaaaaaaaaaaaaagggccacctatttaaaagacacaagcttacttttacaaaacattcaacactgaaaaaaccctatagtctcacataaattaaattaatatgagcatatgctttaaaacgtcatgactggtaaaacccaagagttccccaactaaatccctttaaaacaaattcacattttaaaagctgaattaaactctaaatgtcccggcacattaacctcttcaaaaattggggaaacccaaattgaaaatggtacactccatatacctataaattaatccctttggtttt

SEQ ID NO: 323731 - DNA, 371 bp, Zea mays
cggacgcgtgggccacatactagtcggggtaaacgatcgaacgagcacaggcacgcacgcgggatggcccgcgctcttgccctctccgccttactactcgtcgcctccgtcgacgaggctttcgccgcggaggccccggcagcatccccgaagcattcggactccacgccgtcaaaggcacccagcagttcgcccgacaagtctgataaggccctcacagcgtctgctgaaaatgctgaagatacaccaaaagcaaccccggccaaggccccggcgacagcctccaagtcagaggctcaacctctcgaggcacgcgactcctggtgcagcgctgcgtcacctactatcgagagcgccgcgtcagagaaggc

SEQ ID NO: 323732 - DNA, 359 bp, Zea mays
  unsure (1)..(359): unsure at all n locations
acgcccactcgttcgtccactcgttcggcatgtctgaggtgagcttntgcagggtcgcgttcctgctcgagtcgtgcgaggacgactactagatgcaccttgtcatggaactcttcaagggcagatagctatgagactacatgttagagctgaagatgtactacgtgctagtgatgctgtagctaagacactgaaattgtttggcccttactggataaaaaaccactcgtcaatttcattatgttatcgcatagtagaaggggaattcacagaaagcacataagcagactcacttatcagaccagactctctaagtagagtgtctaagtcttcaaaattttcccttaaatattttttaa

SEQ ID NO: 323733 - DNA, 105 bp, Zea mays
aaaaaaaaaaaaacaaaaaataaactataaaaaaaaaaaaaaaaaataaaaaaaaaaaagaaggaaaaatattataaaatgaaaaaaaaggcctgccgctatcat

SEQ ID NO: 323734 - DNA, 458 bp, Zea mays
caatttatcttacattgtttctccaaaacggttggattctagaaaaggatgctgtattgataatggacttgttgtccttggaacatgtttcttcgttctggatggttcagaagcagagccagaggagactacgagttagtgttgagcatgacctaggtgctagtgatgctgcaccaaagacactgagattgtttgtcccttactggataaaaaaccactcgtcaattccattatgttatcgcatagtagaaggggaatccacagaaagcacagaagcagactcacttagcagaccagactcgctaagtagagtgtctaagtcttcaaaattttcccttaaatattcttcaaagtctcttgtcagaagaggaacaatgtcgcacagaaatatgcaagtactggaagatattgaagattgtagcacagactatgtgatgctatcaccacaagattacttg

SEQ ID NO: 323735 - DNA, 337 bp, Zea mays
ataactttagatctgcttgaaaccttcaatttttaatcaaatcaggcacgatacttataaggggctattcaaacgtcaaaccggatcactaggatcccactatcaacttaatccaaattgttcattcaatatgtatatatatataattatatatccatctatctatatatataagataatgaggtatcattaatgcatgcactcaattacatccatgtctaactcattctttctcaactatatttgctctttccttggcagatatcttgatgcaagcataattcacattcatggaaatgatcacttactagttatccattatcaccattgaaccatt

SEQ ID NO: 323736 - DNA, 275 bp, Zea mays
aacagacgtgcggccacacgtaaactgacgagctgacaatgtctactgaccggatcggcacggctaggtcacgaaatgaagcccaaacgtggtgcgacattcacagttgggacaggagattaagtgacatggcctcaaatgcagcgacaacctacttggtcatggtatctgtcacttattgtacagctgttaagacatttcacaaaatcggactagagtgatacttaatacagtgtcgtttctactgtgacacctgcaagcgccggtgttcttga

SEQ ID NO: 323737 - DNA, 455 bp, Zea mays
agcggccgcccttttttgttttttttttttttttttttttttttttttttttttttgttttttttttttttttttttttttttttttttttttttttttattttttatttttttttttttttttttttgattttcccattataaataaaaaaaaaaacaaccccattaaggggggaacacaataaacaattttatcaccgaaaaatggctcagggagggaccttaaaattaaacattaatcaactaaagaacccctctaaaaatgatttttcaaaaaaacttacattgcacattggaggctttttattggtaggggaaaaaaaaataaagtcagccatttaaaaaaataaacgtccccctataaactgccagggtgagtttaattttacacggtttattctaaaaacaccggccagaaaaaaggggttaacctgcccccggaaaaacccttaccg

SEQ ID NO: 323738 - DNA, 201 bp, Zea mays
caaagcaataattgtatcagcatgaacaaaatggtatgaccatacgatcataggttgtaatatgttttctttccttcactgtgtaagtagaatgcaggttttcactgtgtaagcgttcttttatactctgctagtaactgtaaaaaaaaaccaaaaatacaaaaataaaaaaaaccaaaacaaaaacaaaacctagataat

SEQ ID NO: 323739 - DNA, 295 bp, Zea mays
gccaagcctacaccctaaggacactcaaattttgcctattggtgtcccccaaaatgatggcgagctctatatcagtgatatcggcatctcgatcgagtaaaatgaccatcaacaactttactggccggttgcaggtttcctttgccacctactatatgactgacaaactcttgttcgcgctcaccctatacaaccattcgcatgagatgacactgtctcaggccaccaatgtcaccgctaactcaaatcaggcgatctacatcgtttacaaagtgtatctttaattggtccatac

SEQ ID NO: 323740 - DNA, 462 bp, Zea mays
cccactcgtccgcccactcgtccgaataaatggcgcctcaaataacttataagaaaaaaaaaagatgaagagctacatgaattccattatacaaagaatttatttactctatataacctccatctctttgttttaaatgacatatgtgcttacgtatagccatgcaaagctcaacccttatcttctcagtgaagtttgtttgaaagtgtacctgtatttatgccttctccaggcgaaaaatggagttcaggttataagcatgcatttaagttcaaattagtggacatttaattgaaatgtattgttctaattttatcctctactgtacttgtgttccaatttatcctgtagtttttttaatgccagccagacagtgtaaacaaataattgtcagttttgccacgattgattgtagattgataagattcataagattgacttgagtcatattgacactattta

SEQ ID NO: 323741 - DNA, 220 bp, Zea mays
gtgtgcgcagccccgacggggcgcagtaccatgggcaggacgcgtgcgaagcccccgcagagacccctggtggcccgtggccctgatccggcttggaacatggccggtggccccgatgagccatggccgtgaatggcgaagcaaccatcagaaacaagaaagattaaacaaaatagtgataatgcgtaccacataatccttctgcacatttctgtttctt

SEQ ID NO: 323742 - DNA, 331 bp, Zea mays
cacacgcgtgctcgacatcgctcacaaaatcttcccatttcagcacgatctcatctaaatgggcgtcttccacatgtgcgcgaactatctcatggataggaatcacttcaaagaccatgcatccgccaatgacctgaccgactataagactctccagatgctccattacgtctaatcgaacatcctcatacgcttgcatgactcaatgatataccaaacgatcaaactgacgaccacccacacatggctagagaaagccaagctctagatcacatcccataaggagaccttccttaggctatagctcttgagaaccaacgtcattacgact

SEQ ID NO: 323743 - DNA, 249 bp, Zea mays
ctgctctgacatttttataagtacagacagggtcgctggagatttcaaggcagccagagagtgtcgcaaaacgcctggactcggtccacagacaaaggtgaattataacacgtgcccgcgtttttagtcctgccatcagatacatgaaactgaactcaggcttgttcggttctcctattgtggattgagtgagcttggttgggtttaaatccaatcaagtcaaactttttttaaatattttttaatctt

SEQ ID NO: 323744 - DNA, 282 bp, Zea mays
tagctgagcttctggatccacaacttgatgtctttgccggacaccatcacggtaatcacaccgggctactccaacaactcgactgacattcatactaccgcattgttcacctatggcgacatcgacccttgacttatccactaatagcatagcttgccatcagcgctcctcttcttttgtcactttagcactcaaccacttccgccgtactcttccgctgactgatgttaccattcgtgtaagctactcttccacatacactagcctactactattaaccaa

SEQ ID NO: 323745 - DNA, 259 bp, Zea mays
ccagacgtacgctgccgtgtcatctttatcagtccagacagcttctctgaagatttaaaggcactcagacagggtcgggcaactcctggactcggtccacagacaacacgtgtactatatcacgtgcccgcgttcctagtcctgtcatcagacacatgaaactgaactcaggcttactactattctactattgtggattgagtgagcttggctggcttaaatccaatcaaatcaaactttttataaatatatcttaatc

SEQ ID NO: 323746 - DNA, 190 bp, Zea mays
ggggtagacctacgcgtccgatcgaacccacgctagacgactgcaacccatgggcgaaccaactgaccgattaaccgaccaaggtgtatcctcgtctacgatatcttcctaggacaaagccggggccgttaagctggacgcaggggacgcaccggccagcactcatgaacggcataaaacgcaacggctg

SEQ ID NO: 323747 - DNA, 376 bp, Zea mays
acgacgcgtgcgcggacgcgcggccatgacttttctagacccgacatccaacggcatctgatcgaaacaagctacagcaacaccggaccacctgacctggacatgcatgcacacgtatactataatctaacaacgtagctgacctgggcaaattgccagcctgacaggggccagcgtgctcgaatgtctcactctcaccgacgactaactttccatcaaaattgattctcgttcatactccatagcatgcacagattgattgaactgctacttgagattcttgtcattgttattagagagagagacagagacagaacgattggcatagcatgcaaaattgtttggaagaagctagcaaagcagttccttgattgta

SEQ ID NO: 323748 - DNA, 374 bp, Zea mays
acttcagtcgacgcatcggctaactcttcgtcccatatttctggtcatgaacgcacacacaaccatgcgagacttttcacacgtgcactggttcaactaatctctccatctattcatacctatactacatatttaacaccataacttaccacatcaaattgcaaacctgacacaaatcactcgtcacgaatgtctcacagtgaccgtcgacacactcacgcttaatattcacccttaaccataatccataccatgcacacattgatcgaaatcctactagacattattagcattgatattacatagacatacaaacacagaacgattgccataccatgcataatactacgacagaagctactacatcaactcct

SEQ ID NO: 323749 - DNA, 316 bp, Zea mays
cccacgcgtccgcccacgcgtccgaaaaaattaaaaaaaaaaaaaaaaaaacaaaaaagagggaaaaaaaagggggcgcgctctataggagccccgctttcacacacgcgcatacgccacaatatactctcctatatagtcacataaattcaatttactgtgcccggctttacacaaccttgactctgaaaaccctgtggctacccaaatttatgtccttttggaacacatccctttttccagatgtcgcgttatcgaaaagacccccacccctttcgcttttcaacacttttgcacactctatatggaatgtgac

SEQ ID NO: 323750 - DNA, 434 bp, Zea mays
cccacgcgtccgcggacgcgtgggcggactcttgggacggcgacaacgcacagccaggccgggacttgcaacaacagtccctgaagttaccggcggctagcccatatgacaatttcctcagagctgctggctgttagaggtccagcttgcagcatccaaaacatcatttacatggactatggcaatttcaagatagccacgaactttccattccgcaggaaatcaaggaagaggtatgtccgtgtatgatgtcttagctagagactcaaccggattcgacacccattctttatgtatagctgtatatatgtataggttggctctttgctgctgctgatgctgctgctcttgccaatgcaacgagtagaaggactgggggggagcattgccttctatcacagactgtacatgtaaacatgttgcagaaatatatg

SEQ ID NO: 323751 - DNA, 307 bp, Zea mays
tcgcgcacgcgtccgctaatgccttggcggcgtctaatgctctacattccacagacgcgcacgagatcgtccgcaactcgtacctggctacacatactatgtcgagctcacggcactactctcctatagcgcggcgctggacacgctgacattaaatggcagccagaggcaaacatctgtggctgactgctggcggccagagtgtgacgtcgcgacgctgaagacacctgtgcacatagttaaggcagcgtaggagtcaccgcaggctaagagcgtcgtagcatctaattcagttgatacgaacaac

SEQ ID NO: 323752 - DNA, 361 bp, Zea mays
acgatcctaatccatggtcatagctcctaattctattctacatttaccaacaactaagcacacgcgaccgctgagtatatttcaagctctcaccggatcctgctcaatgaatcctaactcccttgacgtgaaagcctcagctgatgccactatatccacacccaagcatgcaccttataccacttccatccacattgacgttgcggccaaacagtctgacattgacaagacagaggaagacaagtatgatgcactaacatcgacggcaaatcaagacccagcatccaccactgatcctaaacatattgctggtcatttcaccacatatgaattcgcggacatcactgcatagcctaatatc

SEQ ID NO: 323753 - DNA, 438 bp, Zea mays
aacgtacttcgatcctcaagtgatcttaattgttatgaagctaccagctagtggagatcaggggcaatgtcaaacatcgggcaatccttccaggtcgatcaggcgcaggtccagggcgagtgccaggcggagcgctcaatgtatagatatatggacgtgtctcggtccaccgcctgcgccatgaccgacaccgacggagccgaggtcgacagcgcgcagcatgaggagcaccgcgccgcacggcaccgttcagcatgctgatgagcaagtggcgcagacggcggctgacgcgatggcagccgtcaaggacacagtggcagtcgcggccgtggccgtcaaggacacggtggcggacgcggaggcaggcgccaatgacaccgtgaccgacggccactgaccgactcacgcgcgtgaacacgacagcgtaccaacaatgct

SEQ ID NO: 323754 - DNA, 141 bp, Zea mays
cacatacacagactgacaagaatttttcacaaccctagaagacacactgccagagagatctcttcacaaaggcgtcgagcctctccactcggccatactcaacgacaacctcaactccctcgacaatcacggcttcaactc

SEQ ID NO: 323755 - DNA, 366 bp, Zea mays
cgaacgcttacgcttgctcggctgtgaacatttcacatggagattgacgcagcgagagctggggcgccttcatgggcatgcgagcgctaacatcggctacaaacgatgctagggcccataacgatcagatgtatgatgacatccgtctagactgagatcgatcagatcatgtactagagcgaccggcagcccacacgttagtatacgcgaaaggtggacacatagaacgattatgcatggcagctccttgctaaccggaccgctcgtactggagacagagactatctgtcatagagtactgcattgctgcctactactactagtccccaacgcttgtcggtagctactactacctcaccgtattac

SEQ ID NO: 323756 - DNA, 334 bp, Zea mays
tcttccactcactgaatgctttttgtttcccatcaaaaaatgattcacgtatggttgaatcatttccttatctagggttgcaatatcaagtcaattccagttctaaccttaactcaactctacaacgtcatgtaaattctaccttgtaattattcgtgccttggttgtttccgttgtttttttttctcccattgctttcaaaaacatggtttacaccttttaatcaaagaagattgtaatatactaatcactacttccttgcccttcaaaaaaataatatatttataattttatttatttttattattttattatatatttaattatataaaaa

SEQ ID NO: 323757 - DNA, 418 bp, Zea mays
actagaccagcgcgacatagcaactgaatggtgcgctggcagctgtagtcctaaagcatggggagcatgatgacctgggttctgcatctggtcatgtgggctcttatcatatactgagtccaagtggtgaacggcacattggctataaaatttatgtccgacagctgacttatgcacgcatgatcaaaataagaggcctcacaatgatgcagactcaacaagtccaccataaatgacatctgtcacccttcaaatgctaatagatactgaatgtctaggctggcttcatttgtggcaggtactttttgcgaacccatatgattgtggcgacaaccgacgatccataccatgggcacatctaccctgatctcaagcacaacgacactcgcgagacaatattgcttcgtccagatgaccc

SEQ ID NO: 323758 - DNA, 427 bp, Zea mays
tctttcttccactcgttctcccactcgtccgctagatctcgatgtccgcccttttttttttttttttagtaggtttttttttttttttttattttttttttttttttttttttttttttttttttttttttttttttttttttttttttttttttttttttatttttttttttttttcacaattttaaaaaaaatttctttttaaaatttcctactttctaaaaaaaaattttacaaaatttttccgccacccactttaaaaaataaaaaaatgattaattttatacccccccttaaatttttaaaaaaaacaattttttacccccaaaaaaaaaggacctccaattttttttccattaaaaatttttccactttgacacccttttttcccccttcaaaaaaattaaaaaccttttttttttttttc

SEQ ID NO: 323759 - DNA, 270 bp, Zea mays
cccacgcgtccggtgactgaaggcttcttgatgcccatgaaaaaatgatgcacgggtcttgaaacaaggccttagcgagtgttggagtagcaagtcagttccagttcgaacctcaacgcaactctacaacgtcatgtaagtgcgacctgtaattatgcgtgcctgggttgtttcggtggtttttttttctcccattgctttcagagacatggttgacgcctgttagtcaaagaagattgtaatatactaatcactactcccttgccctgc

SEQ ID NO: 323760 - DNA, 325 bp, Zea mays
gcgcgagcaggcactgagccacctcgcgattttgcacgtatccgcagaggtggccagcgagtggagctatgagatgccaggggccaatccggacccggatcgctctctaccggatagcgatggagagggggaggatgctattacaagcaatcagccgtcgcacgatcgatacgctgacttgcacgaccactatagtcctgttgcagataatgcatctaatcactagatgctgcttaggaagttccacttacaccatgacatgctcaactaacgaattcaccacctgcaacactaggtggattcagaggaggctaccaacgaccta

SEQ ID NO: 323761 - DNA, 358 bp, Zea mays
cccacgcgttcgcccacgcgtccgcagatgcttcgacgacagcagtggccttcaagcatggcgtcctcatgcgagtaagcatgggcagccttcgtcctagctggcataggcagactcctcctcgcacctgaagcgaatccagagtcactgcctgggctctgtaccaatgggcgaaattatacggcccatatacacgccaagagacggcaagctctccaccgcctgaagcccgggcctacggcagagaggaccttccatgcgggaacaggaggcttcagcccgcagtaaacatgacacagtgtccgtatggagatctacgtcgttcgaggactgagagagctacttctgcatatccctc

SEQ ID NO: 323762 - DNA, 380 bp, Zea mays
gccctacatcgtgagggccgtcctttttttttttttttgaaacctatccctcatctatagtgcgcattaaaacacgtatagggccgactcattctagtaaacgaaccaattaaacacattcaggctcactcccaacccccctaggtacccattctctgcatcaataactgtagcttcttcaccagcccagctaccatgatcatgttctctaactgccacaagcttatgataaccaaccaacttcacgccaagctagctgcctcctttatcgacagaatcctgaactgaacctactcactcatggagccgcttgttgctgccaccaacactttactagctgttgcccaaatccagtcgcaaactatcaacctacaacatcc

SEQ ID NO: 323763 - DNA, 446 bp, Zea mays
cgagagcagaaccaatactctgagctaaaacttatcacatagactcctgctcgagagaccggaggcgttagacgagaccgccgacgacgcacgagcgctcgatcccgagcgtctataaccttaggattcaagaagatccatcatccgaccggcttcctctacatcgcagaatgaaacggtcgcattacgacactgctcaagcagccaactgctgaccatgatcaagtggatcttgatgagtcgacgtatgaccctgaacttgataagttgcacgctgagagaattgctgcccttaagaaataggttgagaagcctgaagtgctaagaaggctatgtcacggtgaatacaggaaggtaattgaaggggacttccttggcgaggttactagcaatgaaagagtcatatgtcatacctatcaccgtgaatcttacagttgcatgatcat

SEQ ID NO: 323764 - DNA, 405 bp, Zea mays
cccacgccttcacccatctgacagaccagtcttccgcactaaacgatcctacattggcgtcgcgcactacaacaggcatattggcgtctccatcgatgaagcggacgactaacatgagttacagcctacgcctgacggcgatgcataccacctaagcgacaccttcggtcgaccacttactcccttcgacgaaacctgctacacctgcttcagtccctcatccttctactacgcaccgcactacgcctactccgagccgtacgactactctcaccactccaagccaaagcccatctacagcttccgacttcagcatgagcaacagtcgtattactgtagcggatactgatccaggcccgaacccgctgccgacgatggctgttgctatggatctcgctttggatc

SEQ ID NO: 323765 - DNA, 393 bp, Zea mays
tgatccacgagcacgcggagaggctccggcgcgcgctggccgacacccggcggcggcactaccgttcgctcgtcggcgcggccgatgcggctgctgctcggcggataagggagaaggagtcggaggcctgggaggccgcgcggcgccgcgccgacctggaggatcgggtcgcgcggctgagggcggaggcggcggcgtggcaggcaaaggagctcgcggaccagtccacggccgcggcgctccacgcgcagctgcagcacgcgaggcgcaaggccgccgacgccgaggaagggggcaacgcggcggacgacgccgggtcgtgcttcgtcgacccggacagggtggtggagatcgccccgccgtcggccaggccgtgccggtcgtgcaggctgc

SEQ ID NO: 323766 - DNA, 452 bp, Zea mays
cccacgcgtccgtgcacgcgtccgacaacgcttacgtgttatgcacgatgaggatcaatgcgtcgacatcaacactggtggcaggacgaactattgctcaagattatgaacaaggacacataacgctatcgcacgacgacagccatcgtattcgcgtaagaagatcaagtgcctcggagcagaccaaccatatgctggcgaacgctctgagcacctgtacatacctcaatgtgagtgacaacgtcgaaaacttctgacggacgcagtcattaacgcagatatacatggaacagctacagtccctgatgatcattgcgacgacttttccatactactcgtctcgcaacagcctgtacaagatctttgacgtcttgggacgtgttatacacatcaagatatgcgatttacaagatcctaacaccgtaaggactttgcaagtctgacactctttg

SEQ ID NO: 323767 - DNA, 259 bp, Zea mays
acgtccacgcgtccggagacattcatgaatcagatgtacaaactacggtacatacgcataactcgagcttaccctcataaagtgcggcgctgatcttagtaaggcattatccaggaaccttgctctcttcgcagacgccaccatcatcactagaaccgctaaccctatgaacgaacttaacattgatcacagtatcaggtccatcatgagccatgaattggctactccttatggaagtttcaaatccttggatcacacc

SEQ ID NO: 323768 - DNA, 148 bp, Zea mays
cggacgcgtgggcggacgcgtgggcggacgcgtgggcggacgcgtgggcggacgcgtgggctgtctccatctccatatatagctagagtgagacttcgctgttgtttaaaagagaagagttaagaaatggattgacaagttatataat

SEQ ID NO: 323769 - DNA, 266 bp, Zea mays
  unsure (1)..(266): unsure at all n locations
cggacgcgtgggggtgggcaatggggcagcaaccctgttttggtcggatagatggattcagggtcagagaattgctgaccttgcaccacaagtctttgcaacagttcccaagatgagaattagcaaaaggacagtacatgaagctcttactgatcactcttgggtgatggatatctagggagctctaactnttggagttattaatgagtttcttagtctctgggatttgctctccgtagtggtgttacagcctgggattgatgatg

SEQ ID NO: 323770 - DNA, 304 bp, Zea mays
ctcacgcgaccgtacatacatcacacaaattataaggaaaggattcgacctttacatctgaggtttacattgtctgaggaaatgatacgtacatctacgcgtcagcaatatcggcctaggtttccgctccctcgactacatccgaagcgatgatgccattcctaagccttatgcgctcatgtgtctcgactacctatacgaaaatacccgactacttcatgaagcgcagcgtctactgataaacatgccgtgcttgatccttaccctacgtgactgaaaccatatgatgctccaacacgagcct

SEQ ID NO: 323771 - DNA, 422 bp, Zea mays
actcgcgcgtgcgccaatagcatcacgctacgcatttacaatccatcacctttcatccggaactcgtacaattttaactggtagctgtattccaacatctgatgcacagcctaccgatctttcatcaaacgctaccgcaatcttgacgacaacaactagaacccacagaagtacgtgcagtacatcccagatacagtcgaccaacttctaggccagctcttccaatggcaacaatggtcctaacaaacactcttaacatcatatagtgatagtgactgcattattacagacagatgccactaacttcaacagtacagatttcttactaatcaaccaccagttacttctatcactacatataatatactagtgacataaacctcatctttgcatgcactacctaattttcttttcccataaaa

SEQ ID NO: 323772 - DNA, 298 bp, Zea mays
cccacgcgtccgggccggcgtctgcgttcctagctcgatcttgaaccatagggggcgggcatggcgcccagcagcagcatagcagtactgctgctcctcgtcgtcgccgtcgtcctctccaacgtcccctcctcgggcgccctggcctcctcgtcgtcgtctctgctgcaccagtcgtctcctcctgagagtgagactgagaccgactgtagcagcggagaatcttcgtcgtcgtcgtcgtcggacgaggaggaggccggcgagaacgataatgagaaggagcaggagatggagaagg

SEQ ID NO: 323773 - DNA, 320 bp, Zea mays
gggtatttgactgcaacacggcaaatctcctagagacccaaacatgccacctacatggggttacaacgatggaggcgacatgttctggtggacacgagcttattctcacatccagcctaaatgaggttaagatctgggatgccttctcggtatctgcagggcctttgcacacatttgaggcctgcaaagctgctaggtttaaccactctggaacttcatttgctgccctttctactgatacagctcaacgggaggttcagttgtatgatgtgcagacatatactcttgctacacagcttcctgataacactagcagttca

SEQ ID NO: 323774 - DNA, 317 bp, Zea mays
agcgaacctacaagaaatatggagaaaggagaagtggtagaattcactctgcctttccattcccccatccgccatggcggcgccgccggagctcgttgacgacacgatcgccgagatctgcctccgccttcccccggacgagcccgcgcacctcgtccgcgccgccctggtctccaggcgctggcgccgcatcctctccggcggggccttcctccgccggtaccgcgcgttccacggggcgccccctctgctcggcttcgtcgacaacaccatcgggctccacggcgccacggcccctcgcttctcccccaccacct

SEQ ID NO: 323775 - DNA, 155 bp, Zea mays
agccaacctccaatacctatatatatttcacaagtggatgaacatactcttccgtacgattatcttattcatcatcgccctcctattgcatctccttaacaactctatcatctagacattcctcagcataccacctcactaccccccacacatcg

SEQ ID NO: 323776 - DNA, 239 bp, Zea mays
attttgaaagagctcatctgatccatgtgccagcgagctaatatttaattttttttctatggttattttatggcaccacaccacccaagaaataagttatgttacatgtcccttcgtgcaccttgttgtgttgggttaatacggttatataaattgaaatacaatatgtatttaatatttttagagaaaaaaaaaactgcagaatacagctaaaggaaaactacaaactaacaaaataa

SEQ ID NO: 323777 - DNA, 312 bp, Zea mays
cggacgcgtgggggagcacagagctagctagccagccagccagcagccagcttgctcgccgcgcccgtccttcttcctcgcctccgttccgttccgttccgtcccgcccgccgccgccgccgcattcagggatggagatgaagaagatcgcctgcgccgtcctcgtcgccgcctcggcggccaccgtggcgctcgccgcggaggctccggctccgggccccaccagcggctcctccgccgtcgcgcccgccgtcggcgccgccctcggggccgccgtcgcctccttcttcgcctactacattcagtgagccg

SEQ ID NO: 323778 - DNA, 98 bp, Zea mays
atgtgttgaacccttatgtaagacacattcatgcgctctctcaagagcggtatgaatgcttctatgctgaactgatcactctcagttacgatattttt

SEQ ID NO: 323779 - DNA, 330 bp, Zea mays
aatagaagcataatgatcattactcttaatggtcaagacacactactgactcttcaaggttccgggctcgaaacgagggagcaagtcgcaattgacgatcaaatcttagatgttacacgtgactttgacctttcacatgttaaaaattaagaagtcgacacgctacactctgaaatgttatatattatggacctaggacctaaaatcttcaatatgtgatatatcatgcaatatgcggtctacatagatcattgatcctttaatgcatcacacatgacaatatgatctaagatcttataccagattctactgattactcatacttgatag

SEQ ID NO: 323780 - DNA, 316 bp, Zea mays
gttctgtcttcagtggtgcaaacaaaattggtgatggtggttttggttctgtcttcagtgacgcaaataacgactttgtgctactatgctgaggaacaagctttgtgacttattttggatttgagcagcacggtcataacattgctgatgccaagaaagatgatcctctatgttcactacatcttgcactatgtcctgcgtgttaccggccaaacaaaacaccttggagtgcagcgacgacaggaactacctctacaggaaccggtttaacgagtaatttgacgacgcgtgggtggagcagacctggtgggaagta

SEQ ID NO: 323781 - DNA, 343 bp, Zea mays
  unsure (1)..(343): unsure at all n locations
cccacgcgtccgcggacgcgtgggcgaacgatcagtctgagatgcatgcacgacgatcgatctacagctagcgttgcattgcatgacgatatggacctacactcgcgggcaaagcccatggacaccgncgtcgccgtcgcggtggcttgtcggcgccgccgccttcttcggccgggtgggcaaccccgccttaacaacaagcccaatggggtccaagccaaggccaacattctttttgaagaagtcgggtttaccaaccggcggaaaggcccgggcttcattagccgggccacgtggcaacttccggccgggtcaacgcttttccagcgtggattccagccta

SEQ ID NO: 323782 - DNA, 285 bp, Zea mays
attaactaatgcatgagctagcatggctgggaatgtcagaaccatgtggagttcaatgcgatcacatgttgcgagggctgccgcacatggtgtgaggtggtgagcgccgcatgatgctgaccatcccactgtccttcatacgctaggatgccagtcacactatgagctggactgtttgtgagctgtaccgacatggtatcatatgcctacgtgtgcatgttatgacacgagatttgccactaggaactacatgacctagagcctgtggggctccaataacgtgtg

SEQ ID NO: 323783 - DNA, 154 bp, Zea mays
gcgcacatgttagcaagatgagctcttttgttctatggttattttgtggaaccagaccacccaagaaataagtgatgctagatgtaccttctgaccttgttgtattgggttgatattattacataaactaaatacattatttatttaagatttt

SEQ ID NO: 323784 - DNA, 317 bp, Zea mays
atcgcactctcctccagcctccaggcttggcaagcgtgcttcacatgaccacatccatgtcgaacagcgccgctagcgagaagcaatcgcagcaggcaggccacaggcagcggcccccggcggcgtcggccgcggacgcggagatgcagagggtgttctgccgcatcgacgcggacggcgacggccggatctccgcctcggagctggccgcggtgacgcgcgccatctccccgccagcgagctcctcgcacgggcgccgcgaggtggccgccatgatggacgagctggacacggaccgcgacggcttcgtggacctc

SEQ ID NO: 323785 - DNA, 319 bp, Zea mays
cggacgcgtgggctagttctagatcgcgagcggcaagatcaaagagggtgtcgtcatggcgataatgcatccaggcattgctgcaggctccgcaacccttgcagggattatccttttcaaaaggccaaggagctaccttattcaacgagtacgacacatgtttggtagcaaggaagtaaccaccctatgcccgtttgattagcacataattcctgtaacttgatagattcacgctcttcaaagttaaccatctttcttgattcatactcttccaaataaattctccattttgcttatactaggtggctatctattcacc

SEQ ID NO: 323786 - DNA, 327 bp, Zea mays
cccacgcgtccggacgaggctctggggaactcttcggaagcatcgaagagacaacagggaaacagcgacaagaatgcaggctcgggagtggctctcggaagcaacaggagctggcatccatcgtctggtaaccctagtcggggcggccaggggaatcaccaacatgacagggactctcacagcggtgattcgcggcggggtagctcgaactacccccggaggtccgacaatcgtcatgaccatggcagtggtggttcgtcacgaccctcgtcaagagggcagtcccagagggggctatgtaaacactacgagagtggccactgcggg

SEQ ID NO: 323787 - DNA, 318 bp, Zea mays
cccgtgccctgtacctcctcgtcgcggctgtcgcggcgctcttagccacgcctgcgggcgtggacgcggccacgctggcggagatctgcaggggaaccgcgttccccgacatctgcaccagcacggtggtgagcgaggcgcacagcgccgaggtgttggacgccatggctgtatcgcacatgcacgtgcacatgttcaactcgcacatcgacgctgtgacgccccccattttggctgccgcgagctccttgcacgggcgccgcgaggtggtcgtcatgattgactatctggacactgaccgcgacggttttttggacc

SEQ ID NO: 323788 - DNA, 98 bp, Zea mays
cccactcgtcctaaaaaaaaaaaaaattaaataaaaaaaaaaaaaaaaaaaaaaaaaggaaagaataaataaaaaataaaaaaattaaaaaaaaataa

SEQ ID NO: 323789 - DNA, 380 bp, Zea mays
tccatgcacccatggactccgtcaccgcaccacattcggccagcaccaacgaaaatgtggcgcgccacagctgcagacctcttctacatcatcgccgtcgctgccctcagagcggccgatgcaccggcagagtcaccgaaggcaggctgtcctgccaaggcacctgccgagtaaccgaaggcacgcagccctgcaggtcctgacaaggcacccgagtctgctgccacgagaactgccccagctaaggcacctcaagccacctgcacacccgacgatgcacgctgacccatcgtcgtcgacgtctaggaagtctggtccagctgccgcgacgaccaccggcgtctctacaccgtcatattacacggacgaagagatgagcc

SEQ ID NO: 323790 - DNA, 333 bp, Zea mays
gccacgcgtacgacaactctgacgagcgggaccacctgtcattgtctgacccgccgctcgccggacggcagcgcgacgaggacccgattgccgcttactgctacaggacccagcatcgcgtgctacaccgctgatcgagcgaaccccatgcaccctgatcgctccgtccgatcgaccgcctaggggttacgcgtaccactggctccccgcgccttattggaggcggtcccagatacctcaaactcacttcgcagctggatccgctcgactcaacaccggcgaattcgagaagtggcatacgctgcagagctgctatgcgtacaagtagaacca

SEQ ID NO: 323791 - DNA, 451 bp, Zea mays
cccacgcgttcgcccacgcgtccgggacatctttaggactgcagtgacgcttcagatacccacagattcagataaaacatggcatatgtagtcatagtgctctccttctatttcctgtcacttgatgacctgtttcacaaagctcaattcatattaaaaaggatactctgcattctcctcatctttaagtacggtgatccatatttttataaacattgtcttggaaagctggaaggtgctatacattatccatgtgttaggtgggcaagtcatcttacgccaatgagaagcttacgttgaagtcaatgccttggcacaactaatgacatggaaaacaacggtctaagttaacatgggcttcagattgcattgctgggaaagatggaatggaattcaaattttggtggccgcacaagtgtgaagacttgaattcatatatatacttagttag

SEQ ID NO: 323792 - DNA, 432 bp, Zea mays
ggactatgactcgagcatgccatgctgtggcgatgacatatacaaatcgacgcacaagattgtcatatgtgacatcgagccacctgcattgatccgagagaactgtgggtgcgcattatggttgacgccacctgaatagatgtgtggcatgatggtcgatggcagtcaatgattgactgaacctgagaaaggttattgggctacaatctatgcagagctagatgtacttatgcccaatggaatgaagtgaatggcttcgtcgctagcaccttgttggcaaatgtacgaagatgttgatcatatacaccatggcaaatgtaacacgatacggtaagtgcttatggcatgcctggactaacctagtgtcgatccacctatagtgaagtagatgtgcaccgcatagcgctactgctttgcttattgactgcattc

SEQ ID NO: 323793 - DNA, 351 bp, Zea mays
cccacgcgtccgcccacgcgtccgacgacgcgtactatcgattcgcaagcggatggtcggcgtcttactatccaacaccgcgccggtccggattaattccttctcgaccggacagcgcaatgctgtgcctagatcgatcggtgcgaaggcaagtgatgccgctatatatatatatatatatatatatctatgtatgtatatgtatataggagattcttgtagcgagctcttaacgcgatgggtttacccgtcctctactactgcatttgcattggcggcgacgttgaattggcgacatgcaaggtcagcgttaggtacgtcgctacatgggaaacccccaaggtcattttg

SEQ ID NO: 323794 - DNA, 301 bp, Zea mays
aaaaaaaaaaaaaaaaaaaaaaaaaaaaaattaaaaataaaaaaaaaaaaaaaaaaaaaaaaggaaaaaaaaaaaaaaaagaaaaaataaaaaaaaaaaaaaaaaaaaaaaaaaaaaaaaaaaaaaaaataaaaaaggggtggcggttttaaagtttccaagttaagtttcgggggcttgcaatgcttaagtttttttttggggaaacttaatttaattctatgggcgtgatttttaaaaattcgtgtctggaaaaccttgggcgttaccaaatttaatggcttggagaaatatgcctttt

SEQ ID NO: 323795 - DNA, 312 bp, Zea mays
cgtttaagaaattcgccgcttgatgtgtggatccgtcgcggctgccgtcaagcatagacaccaagaaccagacctcggggtggatcatcggggtcgcggaggtctactggatggggtcaagaagtatccgggcaagtcgtctctgggaaccctgcttattgctcgccggatgctagcgccgtcgtggactgcgcggctccgagaagtcgaggtcgtcgcgacatatcccaggtaaagagccatccgataggatcgtagtgttgcgagcatcgtgttgctcggttggcggtgtagtttggggcattggcgtgc

SEQ ID NO: 323796 - DNA, 75 bp, Zea mays
ctccactcgtccgcccacgcgtcctgtcacgcgtcagaggactcttgcgcagacgcgtgtggggtttcacacaac

SEQ ID NO: 323797 - DNA, 454 bp, Zea mays
ggaactacagtgaaagataaatgtatgcatattacgtagagaaatgaaagataaatgctctggcatatgtatctgtacgtagactcagccagtcggcggctagcgatatcgccagcgacaggcgcagcggaccacggaggacaaagatctccgctttgaaagggacgcgacatgaacaaagacaaaggtcatgacacggagactcacggaccaaggaggcagataactgggaatacacctgtggaaacggtgaagggtcccaatctgcttgagcgagcaaaggaagagatcgaggcccttgccggagctgttcatactaagatggagcaccattccagtccccacgcgaagaaggatgaatcacataaggaaggcaaggaggggagcctgcacaaaataaaagcccacacggatgaaactcacggaacaagtgctgacatatatgagaacacac

SEQ ID NO: 323798 - DNA, 475 bp, Zea mays
cccacgcgtccgcccacgcgtccgcgggagcacagagctagctagccagccagccagcagccagcttgctcgccgcgcccgtccttcttcctcgcctccgttccgttccgttccgtcccgcccgccgccgccgccgcattcagggatggagatgaagaagatcgcctgcgccgtcctcgtcgccgcctcggcggccaccgtggcgctcgccgcggaggctccggctccgggccccaccagcggctcctccgccgtcgcgcccgccgtcggcgccgccctcggggccgccgtcgcctccttcttcgcctactacattcagtgagccggccgcggccggtcgcccggaggccgaagaagagacgaagcgggagagagagtgacatggctgcgcgcattccgatgcgtgggcatgtttttgattcgacacaccttttgtcctctttttctttgttccctctttctgcttaatttaacg

SEQ ID NO: 323799 - DNA, 262 bp, Zea mays
gcgatcgtaggagcagagagagacttcctcggcttcatcccatacagacgtcggcgtctcgacgggcgctaataagcagccgcgtccagggatggagatgaagaagatcgcctgcgccgtcctcatcgccggctcggccaccgtggcgctggccgcggaggcgccggctacgaattacaccagcgggtgcttcaccgtcagagccagcatcgtcggggccgccaggggctccttctctgcggactacagtgactgatccggc

SEQ ID NO: 323800 - DNA, 421 bp, Zea mays
  unsure (1)..(421): unsure at all n locations
gtgatccttgaacaaaattgttcccttgacatgtcccagatgatgagatgagtgtagccatagtttatctctaacttcctgctaagaaactgacagaaagtactttttttttccttctttcgatcttcgtaagggattgaagctgcactgctgcaggacagcagaaggcttctggtgcaaaatttgcaacctcctcctcgttggagtgcctgttcgcctcgctttaatctgtttctacaatgtttttgttttcatgtattgtagctgtaacagtctaagtagccgcgatggcaatcgtgggaagcaattgaacgaattggtgttgttactgtcgtttcggacactgaaagaccatctntctttgcttgctttgccccgaaaggaggaattttgcattaataattaaatacattcttgagtg

SEQ ID NO: 323801 - DNA, 151 bp, Zea mays
cgcacgcgtgggcggacgcatggtcggactcgtgtgctgacgcgtgggctgaatttgagggtattacaccgtcaacatccgcaggtgctcatagctgattctacacttatctccattctgtcttcgtccaccacactaatgctcaccccca

SEQ ID NO: 323802 - DNA, 469 bp, Zea mays
cccacgcgtccgaccacgcgtccgcttgcgcgtccgttgagagatagcaagcaactgcgtgcctttaggagacgcgacgtcgttcgtcatcaagatcagcgagtccttgctgagcgtgacccttgtgagcctgctgctatgtcgcctatgcagcaccgccgttgcccactataaagacatgcacgttctcggcattgtagactgctgcagcgacgcgtgcaaccccgagtccgattgccgcgtcgactagcggacatcatgctggctgatacggaatctgatgcgccggcgccgtcgccggcgccggtgacgtaatcctgttgaacgtgcaagctttcgtacagactatcacggtggtcaagaccgctaaccagttaacgtctcgaaagtgactgcgcctactactgctcttgccatattgatatatagatgctcatagtgagcttaagcctatgacgttcatgctatt

SEQ ID NO: 323803 - DNA, 237 bp, Zea mays
ctgactcaccggtctatactacaggttgtttcagcaggctacactacagagtttctcttgtgacacgacataacataaggctgtacagtctgctagtattagctgctgaatgcagatcacataacgcaagacgtttgtaaatggacaattcctcaggccccttgtgttcggcttgaggaaggtcgctgtgtacgactgaacctgatatacccgggcgagccatgaattggattccta

SEQ ID NO: 323804 - DNA, 387 bp, Zea mays
ccacgcgttcttcgacgctggcgcgggctcgaggaccttcccgaattagcgtccgctctgacttcagttgaccctgccttagccacatggctgcagccccatcgaattctgtttctggcgtgatggctgttcatgttcaccgacaccgtatcaaggtccgctatgtccaaactatcatgtgtgcaatgtcaactggaagagagcactgtgcaatctcgactggcattagcggtgatcaatccaagggcgtttcgcgtggatcatcatacaaagttatttgagcttacaacgccggttcggatacatccgttatcgttccatggctcagggagatctattgctgtaaagtcttctgtttcactgctgaagctggcagaggtgccattg

SEQ ID NO: 323805 - DNA, 392 bp, Zea mays
gccacgcgtccgcccacgcgtccgcccacgcgttcgctccagcgagttgtatccattgcacccctcgccgcgccccggcaccgagccggacggcggacgccctggacctcatgtgcttctcctgctcacgtaattggagcaacggccattatctgcttcgtcgcgcacgcatgttctcatattccacgcgcccccgccggtcgtaaccaccgggcaaccaccggccggctcactcagtacgccgccgcccaccaccagctcagcttcagccgtgcgacgcttgtaccccgccccgctttcagccgagcccctttccccttatatcaaccaaccccaccactctctactctctgtacccaatcgccactacgcgactgctagctactcgatcg

SEQ ID NO: 323806 - DNA, 351 bp, Zea mays
  unsure (1)..(351): unsure at all n locations
accacgcgtccgatgctttgtctnctgtctcgggcttctccgcgtgtctacggcctttctgtacgccgccctatacactcatcgacatagccatcgagagggccgtcaacagaaaccagagcggcaaacaccatggcgagctcgaggaccatcgtggcgctcctcgtgctcctactcgtgcttctcctggtgactttcgcggccaccgtcgacgcccacgttgttcgcgagctgctatgccaggaccaattccagcagacatgctaccaggtgcacttcaagaagatgtgccagatcttgacgaggctaacgagggtgacaacgccgctcgaactgatgctagcgtcgatg

SEQ ID NO: 323807 - DNA, 305 bp, Zea mays
accacgcgtacgccttctcatggatttgccttagaactctgacctagacctcgcctgtcacggggcgatctcatcagggatcgctctagtcctgacggcgattgtgctcttcctgtggttgacggctccagtgctgacaaggtacatctgttacgctgctaatcgtaatccgctacctatggcactgtgccatcatgccagccccaggctaagtgctgtgctgagagatcatcttcgtgcagctactcatctcccttacactatctagcgcagcacgctagaatctactacagtacgtcatcgct

SEQ ID NO: 323808 - DNA, 104 bp, Zea mays
ctcacagtgccaactgaagcttggcctgtgggcttactagctaggcctttaaagtctacacttgagtccttgcattaatccactcgggttacgccaatggaagc

SEQ ID NO: 323809 - DNA, 279 bp, Zea mays
cccacgcgtgcgccaacgcatacacccacgtactggcccactcgctgatagcactctgtcacgcacgtggcactctagcagcacttgatagcggcgcaacacgagctccgggcagtgtacgtcgccgccaccagagcgcgcgccgatccggagggcgaggtgtgatcgctggccgaacaggctgcgcatattgaagctgaggcgcggctcatgaccgctgcgctcgctgcgatctgccaagtgcacacctaccaccatgtactcgcctgagggcgcacc

SEQ ID NO: 323810 - DNA, 83 bp, Zea mays
ccgtccggattcccgagtcagaccacgcgtccgcctcgcgtaacgaccaagtgtgcattaaattccacaccatccaattaaac

SEQ ID NO: 323811 - DNA, 87 bp, Zea mays
acgcgtccgcccacgcgttcgcgccaagtgtgcggtgaaattgtaattatttgcaatgaatagaatgttatatctatacctaataat

SEQ ID NO: 323812 - DNA, 163 bp, Zea mays
tcgtctcgtgtgacgtatgacatccaccagtaattacaagtcgcgttgagatataactgaagcaaacagaatgggcgtgccgactctacagtgatccatagcttacagtacgcagtgcattgcgacggtcatagtctattctatatgtgtcagcctaagattc

SEQ ID NO: 323813 - DNA, 94 bp, Zea mays
actaggcgcaccggtgctgggaggacatgttttacgccatcagcggcgctaagcacgtcatgtgcatcacaggttggtcggtgtgcaccgagat

SEQ ID NO: 323814 - DNA, 245 bp, Zea mays
tcggacgagactggagtggcctgaagacggaggtctactatgaatgcatactgatcctgtgtcgggggcggttcgagttgttcacggcggtctaacttggtagatgcgtcagagacatggtgacaacggctagtatatctgtcggtctgaaagcgtggcgtaagacacgcatgccagtgttgttggctcgatactgtggaccacatggggctcaggcatccgttggcaaagttggcagagtgcga

SEQ ID NO: 323815 - DNA, 449 bp, Zea mays
  unsure (1)..(449): unsure at all n locations
ccactcgtccgtcgactcttggtcggacgcgtgggcaactagaagatggacaggaatgggtactggaagtggaatgctagcgacatgtactttgttgatgctactggtgcttgctattacgaccaacgtgtactccctgcattatgatatgacatggtcatcaaatgatgcctaagctgccaaatgaagaagcgatctacaattcaatagaagcggggatttataacgaacgacactcagatcagatggcattgctaccctataaagcgcatcgaacatatctggaactacaattattgcacaatcgnggactgaatgtaagactgtacgatcctatcagagcaccacgctctcactgagagtcctacatagacaactgctttgcgagttatgatctggaacgactcatcactaaccaagctcgtctcgaatgtcagccaatcgatact

SEQ ID NO: 323816 - DNA, 333 bp, Zea mays
tctggttgtgcacgcgcgcatgtcacaaccagatgctataatcatgggtgtcgtattcgctatcgtgctggtcaaagtcgagagcaacaatgacatacatagggtagatgattccggggtcgtaatcaaggattgtgagcatcacgcagatgcagaactctattctgtagcagccgaatcgtaggaagacgccaaagggcgggaggattatggccaagaggatctacaagaaggtgcaacagtaggcgtgcgccatgacgatctcgaagctggtcaggatcgggactgatatgttgctatgcgtagagcccggtgactagttctagatcggga

SEQ ID NO: 323817 - DNA, 334 bp, Zea mays
gcagaccataatccgtcctaccaatcgccttcacagatcggcggtccacccggaggctgcgatggcgtcgtcgcatgcttacatctacaagatgcatctccttcagagctaccgcatcgtctgtcacaccgacatgactaacgccatccatgcctactaatactactgctgcctagcgctgacgagagtcattagaatgtcactcatgcgtcaacttgtgctattactgaaaatacacctttgagatctgtgaagggctccaatctatttaagcgatcaaaggaatagtatctaggccttttcctgagctggtgatactaatatggagcaccat

SEQ ID NO: 323818 - DNA, 239 bp, Zea mays
actcgttcagatgcacttgatccggactaatgtacatcagcagcagaggacccagctggggtggtcgccacgcacgtcgtatcgcccttgttgtcgacatgcgccagtcattcggattccatgccaggcaagccggaatagggctgtcaaagcactgcatgcagataagtgtgcttgccgctgatgactgcgctactcgtgctatctgtggtcgtcgtgcacgcatgagtagcggccta

SEQ ID NO: 323819 - DNA, 295 bp, Zea mays
ttgcattgaggtcatgtgagcggccgaatgttttcatgaaattgcgacgtgctgagtaccgggtgttatgccaactgacatcgtggggtaatatgttaagccataagactggaatgacatgataagtgatccaaaaactggaatcatagatgtgcgtaacatgtatgacatactcataggatagcttaatgaaagctgtcgatccacgtacaaactcattcatagagattactacttgggttgaccatcaatttcaattggtgtaatcatgcaccctacggtcatggcgagatga

SEQ ID NO: 323820 - DNA, 96 bp, Zea mays
ggtgcgctggatataaataagcactgtatttaaggttaaacattccgctatgttcgctgtcgataaagagtgctatttacgctgctggcgttagtc

SEQ ID NO: 323821 - DNA, 445 bp, Zea mays
  unsure (1)..(445): unsure at all n locations
tgaagagagaggaggcggcgaagaatcagcagcagcaggaccccttcctgacgcagctgcggagcccacggatggagagctggtggtctgcctactacgccagcgtcctcaacttctaaccaaaatccacacaatccaacagctttatatgtaaagcgaaggcccacgctcacagtcgtcggcccaactgatgcccgtgcgccgcgcgctgggccgcacggcccaagagctaccaagcgcgggcacgcaccgcggcagcccaaggatctctccaccttatctccctgctcgggactcgggacctttacctatcttcttcggtcttccatgggagcgagctagagagaaggcgccatggatcaacagcttctcgtggatgactccaatcatattaacgatatactaacttataatgtgccaaaaaaaaaaaaanaagtttataatt

SEQ ID NO: 323822 - DNA, 235 bp, Zea mays
gcctgacgacatactgctcgtattcgacacggcgcccatgatcgtctgctctatcgggcacaccagctacctaggctggcaggaggggcagcgcgctcgggctctgatcgtggacccggagctcgaccggtgcaagcagcacgacatgatccgggtgacgtagaaactttagctgtcgacggcttatcaagctcttcacgggctataactgggtggcgctgacgcggcacttata

SEQ ID NO: 323823 - DNA, 169 bp, Zea mays
tcgcggactcgtgggcggacgcgtgggcggacgcgtgggaaaaaaaaaaaaaaaaaaaaaaaaaaaaaaaaaaaaaaaaaaaaaaaaaaaaaaaaaaaaaaaaaaaaaaaaaaaaaaaaaaaaaaaaaaaaaaaaaagaaaaaaaaaaaaaaaaaataaagttaataat

SEQ ID NO: 323824 - DNA, 241 bp, Zea mays
acccgtccgcggtcgtcgtccatcgcacgactcatacgatccacagatgtatacagctggaggagaggaaacgcgcgacacaggtgcagcaggctcatgaaccattacgcggctgccagctgacaaggttggcccttcatgcactcgaaagctactagatggaccacttggaaggagctctttgacttctactatagccaacctcacgcctctgtggtcaatactcggcatctcgaagata

SEQ ID NO: 323825 - DNA, 300 bp, Zea mays
  unsure (1)..(300): unsure at all n locations
cggacgcgtgggcggacgcgtgggcggacgcgtgtgcggacgcgtgggctgacgcgtgggcgctctcacctcattggggtcctggtgggcgaataagcaccaagccctncgcttggatcgaccatcgtgcgcgttccttgctcgcgtcgagagatttccaacgccgagctagcgcacagggaagggagagaaaagtgagtgccaccgcggggacgagggaaactcgactcaccacctatcgctccttggagttgtgtcctggggattctccgggcttggaggaggaaggttgaagcagct

SEQ ID NO: 323826 - DNA, 393 bp, Zea mays
ggctgccgctgtcccacatgtatttgtatattttcttcatggtcgagatttgcaggtacctcgtggagtagaggaactgttcagctcgagcgagtatacgattgtaaactcgtgttaagttactgaagcgattcgataattggactttaggatcatcatgcatgtatctttagtgcatgagagcataggattccagcaaattcaaatttcttgcagctgcacctcacttttaactccaaaggtgtgctctgtgttgctttgaagtcacttgtaacttcttcatatcgtttgtccctaagcagactgtcaaagtgctcaaaaaaagttttattcaatggatgcatccaagttctaagagaagatcatggagtaacttggtggcaagatttaaaa

SEQ ID NO: 323827 - DNA, 389 bp, Zea mays
cccacgcgttcgagaaggcttcatcacatgctcgggccatgagctatacgtgctggagctgggacaactggtggtggacgtgctcacctgcgtgacagtccatcgcagaacgagcagcaagcggccactgatgcaggcgccccggagcacgtggtcatcatggatctatcggtagtgcttctgaacgtgtgctacgatgcagtgaccattgctgtgtacatctcccagggcaagctgcctagtgttcaacaccggaatgcttgagttacgcctgtgccttggcaattgcactgtgaccatgcgcagactgatacataagctctacggcgcgacatccactctgtacttcgacgagacgcaagtggccaatacgctgacgatgcgctctg

SEQ ID NO: 323828 - DNA, 260 bp, Zea mays
aaaaggcttatcgactaatgaatacatccctttcttttggatccatgcttacgagcacgtacagacgggattaacatgtctagctgctaggatcctgagattacgacgacaggaattaatcttaaggtgtcattactatgtgtacccttgtactgcctgactaaatcgggatgttttacattacacttactgcagctttcgtgatagcaaagaggccctgttccaatcgcacttcccaacatatgcacaggctgaacggc

SEQ ID NO: 323829 - DNA, 376 bp, Zea mays
tcgcccacgcgttcgcgcttcttcttctttcattttcatatatagaccctaataggaccaagagcgtcgatgataacctggctaatttgggaatcaatccaattccaacccaaaggcaccgagcgtgatctccgtacgtgccgtcatggcctcgcaccgggcgctgctgctgctgctcctcgccgtcgcgctcgtcgctgcgctggccgctgtcgcatccgccgacgacgccaacgccaagcccaccatcctgacccccgtggcgcataccccgctggggtccttcgacggcgacaagccggcctctgacgacgacgccgtcgacgacgactaggacgccgtccctgtcggcgcgcccaacggtgccaccatgact

SEQ ID NO: 323830 - DNA, 64 bp, Zea mays
tgcaatgcgagccttgttccttgtatcgctcttgtgcaccgagcatttcgagaaggccatgtca

SEQ ID NO: 323831 - DNA, 373 bp, Zea mays
ccgacccacgcgtccgctgacgcgtgggctgacgcgtggtcggcggcttcctgcgtcgcgagctgtaggcctgactgggctggcatgccgcctcccggttggacgccgtcacgcggagggagatggctactcacgacacgggaccgagacagtgccgtcacgctgcgcgagttctacggagactggatcagcatgggacatgacagaatggggtgatggatgcacatgtctgcaagcgcggacagagactgagacggctcgctcaacgccgtcaaattcaacgacttcctgcatgctgatgacagcaatcaagatagcgtgatgctgaggctactcacggacacgctatgcgagatggaccacgacggagacg

SEQ ID NO: 323832 - DNA, 321 bp, Zea mays
gcagtcatctcctccatcaccaccaaactcaacaacagccagctcgcgaaaataatgaagagccgcagcatggcatcatcggccgcgctcttggtgctagccctcgcgctagtggcggccaccgccccacaggtagcggaggcaaagaagaagagagcggcggagagcggcgaggcggcggaggcgaagaagatccaggacgacttctgctcgacgctgtgcgagggcaagaaggggacggacctggtcgtgtgcaaggagtcctgcgcgctctcccagcagtccaacctggtgctgtacggcaggatccagttgcagggc

SEQ ID NO: 323833 - DNA, 308 bp, Zea mays
aaggactaaattattatactctaaatacatatacatatatagtattaacagagggatctgctggaaattgtaaggtataaaaatttatgatctatagcttgtgctgggcacaaccgcacgagctatatatgtagtttggttacctttttaatttgtggcagagatggcgaatttagttaggtatatacgtttgctttttgcaactttgcattgctatatggcaaattttgaagcatgtttatctgttgtactagctgaaaatgaattcgttctgtgctaacaatgtattcaataaatatctcgatttt

SEQ ID NO: 323834 - DNA, 72 bp, Zea mays
aaaaaaagaataaaatacaacaacaagcaaaatgtgaacacacactaaataccaaagagaaacgctaataag

SEQ ID NO: 323835 - DNA, 303 bp, Zea mays
cccacgcgtccgcccacgcgtccgcccacgcgtccgataacgatatatttatgacagggccaacaataatttgtaagctaaattcaagcattttattttatatttcaataaagaaagggagaaaagctacctcctgatcaaaaaaaaaaaaaaaaaaaaaaaaaaaaaaaaaaaaaaaaaaaaaaaaaaaaaaaaaaaaaagaaaaaaaaaaaaaaaaagagacaaaaaaaaaacaaaaaaataatctgactaagaaaaaaaaaagaaaaaagaaagaacttggtgagccttaatctttaggg

SEQ ID NO: 323836 - DNA, 243 bp, Zea mays
aaaaaaaaaaaaaaaaaaaaaaaaaaataaaaaaaaaaaaaaaaaaaaaaaaaaaaaagagaaaaaaaaaaaaaaaaatataaaaaaaaaaaaaaaaaaaaaataggaaatacggtgggatggttttaaggttcctgctgataaaattcggtgcactggctttagaattctattatggtgactggaaaaactgtggatttgcctaaattattgggcttggaaaattgttaaatttttgcagtt

SEQ ID NO: 323837 - DNA, 224 bp, Zea mays
ttttttttttttttaaccgccaacactttacactccagtgtcgatatccatcagggccagtgtttacaatttacagacaatcatgaccaggaaacagaaaagaattacacatattgagtcctggtgaaggacacccatattcagaggagaaccagtgcatatatgtcgtccaaaaaaaaaaaaaaaaagatatttgagcataattattttataaaatttattgt

SEQ ID NO: 323838 - DNA, 163 bp, Zea mays
aaaaaaaaaaaaaaaaaaaaaaaataaaattttaaaaaaaaaaaaaaaaaaaaaagaaaaaggggaaataaaaaaaataaaaaaaaaaaagggcggatgttttgggggtcctttttttggttccacgtttatgcaactttttttctatttttttgtgtctcct

SEQ ID NO: 323839 - DNA, 366 bp, Zea mays
  unsure (1)..(366): unsure at all n locations
acggagtcaagatcatagccatgctaatttcgatatggggntttcctttcatatctctatcgaaactatctcgacgataagaaggttaggaatgcttagggagattacttgggtctacaattttctttcatagatgtttagtttgtttcctgcgagatgatagatgttcattacttatgttaatttaagtacattttaccaggaggaaactatagcttttcagcatagctagaaaaatttccctgagttattattggtctctcttttttttttgcatatgcggcatatgtgtaagggtgtgggacaaggaaataaacatgatatatagntttataggtgttttttttctaaaaaaaaaaaaataaa

SEQ ID NO: 323840 - DNA, 255 bp, Zea mays
catgaccatcttcattgaccgcgacatttcgtctcccaccactgactcatggaacctgaactagatcttaaccaccgtgatcgcgctcgacacctacatatccatcatcactgacaactacttatacctcacccactacaccaacttcttcacgaacgatttatgattgaattacatcaactagaacgaccagttaacttatgccatagctatacctacaaaccatcatcatcatcaaggcgctcatcttcacaa

SEQ ID NO: 323841 - DNA, 244 bp, Zea mays
cccacgcgtccgcccacgcgtccgaaataaactatgaattagtgaattcaaaaaaaagaaaaaaaaaaaaaaaaaaaaaaaaaaaaaaaaaaaaaaaaaaaaaaaaaaaaaaaaaaaaaaaaaaaaaaaaaaaaaaaaaaaaaaaaaaaaaaaaaaaaaaaaaaaaaaaaaaaaaaaaaaaaaaaaaaaaaaaaaaaaaaaaagggggacccttttaaagggaaaaaattttgaaccgccgaat

SEQ ID NO: 323842 - DNA, 249 bp, Zea mays
gcgcactgcatgaggacgaggccagcgaagaagggtcacggatgtgcgctgcagttgcgggcgcggcggtgaccgccgcagttggagggtcggagcccgatggggcagcggcacgcctctgcaacagcctgcggggtctcggctcaagggcggtcggtgcacgtgcggggtcaggtgaagcaccagcccacgccagcgaccgccaggacggcccgcccggacgcccctggacagcccggtctcggagtc

SEQ ID NO: 323843 - DNA, 448 bp, Zea mays
gtcttcaagatgatgatgacatgaaagagcaagcatgaatggtacatacaaatgtgctattccatgcattaaggaatgatgctcaaaattttgcatatcctcctgaagggaaatattattgtgccgatacttggcaccatataagggtcaaaggtaccatgttcaagattggaggaggggacccgcaccaaatggtgaacaacaacactttaaccatttgcattgataacccgtaatatggtggagcgagcatttagggtattaaaatgaagtggagagttctactgaaaatgtcgttttacaaaatagaagatcaaaagatcatcgttgcagctactatgtgtttgcataactacatttgagaaaaccatgttttagataaggattttgtgaaatgtgatcggaatcctaaatatgtgcccacatttctaaaaaggtatgctatatt

SEQ ID NO: 323844 - DNA, 308 bp, Zea mays
  unsure (1)..(308): unsure at all n locations
ttgacgcgtgggcaagttcaacaaggtgtctttagctctgtagcggtatgcatggcttcgggtgccggtgccaccgtcaccggcagtgggactcgctcatcattgctcggtgagttnaacaacgtgccttcgatgatggtggcgtgagatacgcctgcaactcctaccaggtggctgcgactaggggcgtggcttcgggaggcggcgactccagctccatcctcacgacgactgttgggggccttcatttttcgaaggtccttaataacacggctaaccatctgttttcagcatattatgaagtatta

SEQ ID NO: 323845 - DNA, 233 bp, Zea mays
aaaaaaaaaaaaaaaaaaaaaaaaaaatataaaaaaaaaaaaaaaaaaaaaaaggaaaaaggaaaaaaaaaaaaaaaaaaaaaaaaaaaaaaaaaaaataaaaaaaaaaaaaaaataaaaaaaaatataataatttttaattataaaacatatggtattttaaaataaataaaaataatacaatttattatatcaaatattacataaaataagctataagaaaaacttaaaat

SEQ ID NO: 323846 - DNA, 210 bp, Zea mays
aaaaaacaaaacaaaaaaaaaaaaaaaaaaaaaaaaaaaaaaaaaaaaaaaagataataacaactaaacaacaaattattccctctatcattcaatcccacttatttatcatacttaacccaataatccattcccacataaactcatctctcagtccaatctaacgatctctaccttttcaattaccatacatcatctttacccaaaacc

SEQ ID NO: 323847 - DNA, 360 bp, Zea mays
accaaaccgacgatggcgtcgaataagacggtcctcatcgtcgcggcgatgcttctcatgacgctcgtgctggaggccgcccctccggcgaccgccatggactgcaaggccgggtgtgacgaggtcacgggcccactccacatgagcatggaggactgcatgaagaggcactacaacaacatcgcgcgtgcagttgctccggctaatgcatgaccggccggggggtgggagggggcttccgaccgttgctctggggctgggccgatgagacatgatgacacttcagtgccaaccatgcatgataccgtgtggtagattatgtgcaacgtgttcatgcttatttaattctgtgcttgagca

SEQ ID NO: 323848 - DNA, 379 bp, Zea mays
agatgagggtgctggtcgataatgggggaaagagctgagttccctctgcatatataggccggcggggaggagactctggggcatgggggaggaggagacatgacatgatggcgtcatggcgagcgagtgatgcgctctttcccagtcttctcttgcgtcgtactagctgacttttattgttactgccctaattctcaaggcagtgtctgttaaccaaatctcatgcatagttatctggtcattatgtaattaggagcttgcatttagctgcacgtttatgttcctaataaatatctagctgcatgtgtgtcgagcggttgtgcggccagaacaacgctgcgttcggtgtgcggctagggagtggtcaccgccatgcagt

SEQ ID NO: 323849 - DNA, 107 bp, Zea mays
gtagcaaaccaatcaaaaagaattgctacttctgtgaatgatttctgggcactagtggagcttttgaatggcaacttcccagggactacctttgtgagtccccactg

SEQ ID NO: 323850 - DNA, 433 bp, Zea mays
ggaccgatcaccgcacgccggtgtgcgcgtgcgtctggcgcacggccggcgtcctcctcccaacgcgccggaaataggcaggcggtgcatgcatgagcaggaagaggagagaaggaggcggcggcggaagaggcgctgggccggtggaccatcacggcggcggcaaggggtcggaggccggcgctgccgccaccgatgccgtgtccatggacggcggcctccgcgaggtgtctgtccccgtcgtcttctcggtttggtgcctcctcttcctcctgcgatcccagttcctccacagccaggccgacgacgacccttcgtcagagttctacgaggagcacggcatgcgcgacagctactgcaaggtgaggccgttggaggcctacgtgctcccctaccataacgactcgtgtcagtcctcctactcgcactcaca

SEQ ID NO: 323851 - DNA, 277 bp, Zea mays
gggggtgtaggcgggggcggcggccttggtacaggtggaggaggtggctttggaggtgggaaaggtggtggacttggcggaggtggtggccttggcagtggaggtggtgcaggcgtaggcggtggtcttggagggggtgccggtggaggcggcgaccttggaggtgggaaaggtggtggccttggtggagggggtggcctcggctgcgcgcgcgctcctctcttcggcgctctcgtaccgcctcgtcgcgtccaagccctactctttcttccccacg

SEQ ID NO: 323852 - DNA, 301 bp, Zea mays
cccacgcgtccgcggacgcgtggtgccccttctctcaccgccacatccgtcctgaggcgaggccacctacccggcgtccactcgttggccggtcgccggcagccggggcgggaccgcgtctcggtgctttctccagcgatcccgccgccccgcgtttcatggcgtaagtcctccagtctgatctaaaagacccccaatcttatgctgctgtactgcgtgaattacatattggcgatatcgcctttgtgtcaagagaacagtgcttgggttttggggttcaacaatggagcagggatctgga

SEQ ID NO: 323853 - DNA, 454 bp, Zea mays
cccacgcgtccgagccggcgcacgccgacgggcacagtagcgaccgcgagcgagccagagcatgggtgacactggcgcgaacatggcccactggggcgggctctacggccggggcggcgcgccggcgacgacggaggcggtgacgacggcaggaggcggcgggtcggtgtcgagccctacgtcgggcgggtcgggcggtagcccgagccgcgcgcagctgcagcccggggtcggggtggagggcgggcgcgtgggcaagcccgcgcggcggcggtcgcgcgcgtcccgccgcgcgcccgtcacgctgctcaacaccgacaccttcaacttccgcgccatggtgcagcagttcaccggcgtcccgcccgggccctacggccccggccccggcggcggcggggggcccgtcatcagcttcggcgccgagtacggcggcgcgcagctggtgcgcccg

SEQ ID NO: 323854 - DNA, 281 bp, Zea mays
cgagaaggcaagccgaggcggagccggaacgggaaggcgccgaagcgttcgcggtcgcggcttcgcgatttcggcaggaggatcgcctttgagagcttgcgctgggtggtggtggtggagcggcggcgaagatgactgcgccgcgcggtggcggagatgagccgccggcgttttcggctgcggcggtgcacgcctcggggaacgagccaatgacgccgacttccgcgctcgagtcgggacttaaccgacccggttcgaggggtgcgggcatggccaccttt

SEQ ID NO: 323855 - DNA, 435 bp, Zea mays
gtgggaattgatcggactttcttctcaacgcctcaacccaacccaccgaccagcccgaccggggggcggggggcgatggaagcggcgggcaacgaccggagggaggcggcgctaggcgccctctccgtgctccctgacgaggtgctctgcgccgtcgtcgacatcctctcgcccgctgacatcggacgcctcgcgtgcgtcagcagtgtcatgtacatactttgtaatgaagaacctctctggatgagcaaatgtctttcaatcgggggtcctcttgaatacaaagtttcctggaagaagacggcactatgtaggcttggtctatgttcagaaaataaggagatttggcagaagcctcgtcagttcgatggctttaattctttgtatctataccggagatggtatagatgttttactactttgaatagtttttcg

SEQ ID NO: 323856 - DNA, 434 bp, Zea mays
gtttgagctttcatcgtcactaaattctttttccccttgctcttgcacttagtgaggtggtggcttcgaaatttgaatgcctcatttttattcttctcatcttctctgtctttctcatccctttccacatgtgtgactactgactacatcacctaatacttaggttgaggttactccttttagccctgcctctcacaatgattgtgactagagtgtcaaatcttggaggcaagcaccttaagaacccagcatattttgctctcttgtgtgttctctagaaacatttggtggcaggtgtggtgtaaagtggggctgcattacctggcacctgggcctgagaacatgattttccaagattggtggagcaatgccgaaggccaggtttttaaagagaagagaaaaggttttaacacgttggtaatcctcgtggcttg

SEQ ID NO: 323857 - DNA, 88 bp, Zea mays
cccacgcgtccgcggacgcgtggggttgtgcgtagcttctctctatatatatacccgtatgtaaatggtcgacaaaatttgtttgacc

SEQ ID NO: 323858 - DNA, 435 bp, Zea mays
  unsure (1)..(435): unsure at all n locations
cccacgcgtccgcccacgcgtccgcgccatcattgtttggaaataccaatccaactcctggtacatcatcattatttgccacatcagtgacaaataatccaagtccattcggcactggctcattattcgctaacactcaatcagccccattatttccctcagcatttgctcaaccgacatcaagtacaccggctttctcctctggcagcctatttggctcaactaatccgggcagtctgtttagcagcagcggtccttcacttttttcaacaccaacatttcaaccatcggcccctgctcaaacttcgaacttattctccttccaacctgcaattcaaccagcttctacaggtgggattcccctgtttttccaatactacaaaccaagccttgatgggacagncggatgatcttttgctacttttcaaatgcaca

SEQ ID NO: 323859 - DNA, 218 bp, Zea mays
cccacgcgtccgtttaaacatttgtttcgttcttggtgcttagcaaatatgcatcgtgagactaacaatcagttacatagctagtgttgatgcttgtgtaacaaagatgaatctgttggagctgctagggtgccaaaggtggggtcccctattcggcagagctctggcagacggtaaattctatgaatcgattcgtttaggctttgttcggttatttc

SEQ ID NO: 323860 - DNA, 234 bp, Zea mays
ggtttctgatgtgccacatcaaacaccaatgctataccatacatgagaaagaccaaggcttgccaaaaaaaacaaaaacaagagtcaagaacacagaaaaagaccaaataccaaaacaaaaacaataaacaacaaaaaaaaaaaaaaaaaaaaaaaaaaaaaaaacaggggcggcccttttaaaaaacccaaatttacctaccctgcattacaacgtcatacctttatgatgca

SEQ ID NO: 323861 - DNA, 70 bp, Zea mays
aaaaaaaaaaaaaaaaaaaaaaaaaatttaaaaaaaaaaaaaaaaaaaaaaaaaaacaagaaagaaaaaa

SEQ ID NO: 323862 - DNA, 383 bp, Zea mays
cccacgcgtgcgcagacacgtgcgtcaacacgattgttcagaagggaactatgaggcgggcctacgaggcagacataccgactaatatgactctattggacggcatcttatcgaactaacgaactaacgcggactactacgcaatccgaacagagcttacgacagctacctaggatacagatcgagatgaatacgatcctcttcgacttcactgtatgaatgggcgactgggtcagcacactattgggatgaccaaaggccggaatcaacggcgcctcaactacttccgagtattactactacgctaccgatagcactggcgctaaagcatcctttggcaccaccgtactaacggacttcaccatgaactgtgcactatgaat

SEQ ID NO: 323863 - DNA, 370 bp, Zea mays
  unsure (1)..(370): unsure at all n locations
gttggcttcatgggccgacccactaaggcttgcctgctcggacctgttggcttcatgggctgatgggttntttttatttcggtaaaaattccaaaaaaaaatcgggtacccgaccaaaccggccgtaaaatgaccttccggttttgattccggtttccattaaaaatttccattccgaatctggtttccaattattccggtacccgtgaattcgaaccgaaaaattggttaaaatttaaaaaaaaaaaaaaaaaaaaaaaaaaaaaaaaaaaaaaaaaaaaaaaaagggccggcgcttttaggattccaggttacctacacgtgcatgtgaaatgatatatcttttatatggtgacccaaaattaaatta

SEQ ID NO: 323864 - DNA, 419 bp, Zea mays
  unsure (1)..(419): unsure at all n locations
gacgacgagttctccacccatccctctctcttcttcctccctctcgtcgctctctccgtcggcttcgcgtcggtcgtaagccgtcccagccggtgaggcgaggagcgtggaatatcgcgatgctcgattcaagctgcaacaatggcctcacccacggtcgccttcatccccaccgccgcgcccttgccggcctccccgtcgctgcgcctcgcatcagcgtaatccatcgtcgatgcgtccgggtcctcctccccggcctncacccactccggcctccccaatccggttgagccccgtcgacatccccactgtcgcgcccttgctggtctccccgtcgtggcgtctcgcgtcggcaccttccgtcgtcaacgcgttcgggtcctcctctccgaccttncgccactccggaaccagctctt

SEQ ID NO: 323865 - DNA, 279 bp, Zea mays
gacccacgcgtccggagcggcctcccttttttttttttttttttttttttttggttggtttttttttttttttttttttttttttttttttttttttttttttttttttttttttttttttaaaaaaacaccctaaattcctcaacacaaaaatgtttataaataaggtgcacaccaaaaaaaagtgatgggtttctcaaaaccccaataaaatcgtaatagcacccataatcataaaccccttgaaaaacctgtgatcggatcaggcccaacaaggac

SEQ ID NO: 323866 - DNA, 62 bp, Zea mays
cccacgcgtccgcggacgcgtgggaaaaaaaaaaaaaaaaaaaaaaaaataaagaaagaaaa

SEQ ID NO: 323867 - DNA, 81 bp, Zea mays
gtggtgacatcggtccccacctacattgatggtcatagagtctgcccttcgtttgtcagtcgggcaatttttcttgcatac

SEQ ID NO: 323868 - DNA, 66 bp, Zea mays
accacgcgtccgcgaacatggggcaatcctttcaggccgtcaaggctcatgcccagggcgagtgcc

SEQ ID NO: 323869 - DNA, 159 bp, Zea mays
ctagttctagatcgcgagcggtcgccctttttttttttttttgattggcggccggagcgagattgttgatgccttgttgggaggaggaggggaattggaggaatatatcccaacaagaatttgattagtaaaatcggacgcgtgggttctagatcgcga

SEQ ID NO: 323870 - DNA, 241 bp, Zea mays
  unsure (1)..(241): unsure at all n locations
cacatgcgtccgcccacacgtccgattttaaataaaaataaagctcgacgtcgtcgtcacctctctcgccgtccacgagtcacggcgagcggcgtcgacggcgggcgggggtcctggccgttcaccaccatgcctgaccccaccaccaaacccccttcgccacgcccccgccgtcgccgcaagctctgcggnctctgcctcgggaacgcgctcctcgcgctcctcgttggcgcgctcgttc

SEQ ID NO: 323871 - DNA, 76 bp, Zea mays
gcgtgggcggacgcgtgggttctagatcgctatctgcagctctccatctttaccgaataattcgtcctcttaattg

SEQ ID NO: 323872 - DNA, 248 bp, Zea mays
cccacgcgtccgaaaaaaaaaaaaaaaaaaaaaaaaaaaaaaaaaaaaaaaaaaaaaaaaaaaaaaaaaaaaaaagaagggggggccgaacagatggatgtaagcttcggttggcggggatgggaagtcattttctcttgtatcgtgtcattttcatttcatttccctgggtttttgttttgtcgcctctggaatggaacattccttttcgtaacttaagtgaattgcattacattaaattttccttt

SEQ ID NO: 323873 - DNA, 304 bp, Zea mays
ccacgcgtccgcctacttgtccgtgcaggttgctcaggctggaaatcatactattgaaaatttggctgcactcgttgtccactccgcgtttcgattgttcgtgaatacgcgtggttaacgaactttgaaaagaatcattctacttaaattcactgacgacgggacattctgtaacaccgtcaacatcaaagacgcctcagtgtatacatacgctggtgaaagcacacactcgtgtcagatgacaacaagttcatattgccttattttctcaggtggcactgaagcagcatcctgaccaagatga

SEQ ID NO: 323874 - DNA, 380 bp, Zea mays
aattattcttctgatctgctcctccaacaacaacatcgtcgtcaacgtcttcaaccatctctaccatctgctccggtccaccagaaacgggaagcaatttatgtaaaaaacatgggtggacgggaagacatgccgcattatgcaatactggctgatacaaacttcacatatacctgggaacccaaggatgagatccccaacttcttctaattcccgtccatcgtgatgcaccagagcggtaggcggatatagtgccaacaaaatggacagacgcctccgcatctttgtcacgttcgattagcccccgccagaaaactaccacatggagttcaacgagtattggaaaatcaacgaccaaaatagtccaaccccccatatgg

SEQ ID NO: 323875 - DNA, 231 bp, Zea mays
agactgcatctgagtcgtccaccgaagctcccgctggagctggcactggcgctgcaggtggacatccgcatcttcgtctattaccacaaacgggcatccaccctggggggggtgcctacggggttattattctccatagtcgtgtactaattccagtaaccttctacatgcctgcctacgacttcatggtccacgacggatactggtacagtagcgattacactgtcctgg

SEQ ID NO: 323876 - DNA, 141 bp, Zea mays
gatactcatgcaacttaaaagcatcacccggggggacggtcaaaagagattacatttaccgttcgtttgaatgacaaatccttagccgtgaaaaggctgaagtaaattaaatcaaaagcggtggaggtaaccacccttaaa

SEQ ID NO: 323877 - DNA, 268 bp, Zea mays
atgtggtacggccgattgaaaaaaaaaaaaaaaaaaaaaaaaaaaaaaaaaaaaaaaaaaaaaagaaagacaaacaaaaaaaaaaaaagaatagctaaccgggagagccccgccatggtccatcttaacttcctcgcaaaattaagttaacaggccgctccttttttattctcacggtctgattcgggggtggccctttaaaaaaaattggcttggagagaacacagccgtttccctagctaggcgaatctcccaaaactcccctttc

SEQ ID NO: 323878 - DNA, 395 bp, Zea mays
cgacgcgtgggttgttaaataaagtgcagtatcttcagattaatatctagtatgtgagacatatatttaatttaattttaaattattttttatggagagggtccactttaattttaaatttatttggggatggtctatcacactggcttgtcactgggtcctcgtctgccttaccgtcgttgtactataccatcaaatataattagtgtatgtcgtaacacacgagtattgtactagttgtttttattgttttggtgtcaccacttaagtgttggcttacattacactagtacaatgttcatgcattgcagcggcacataagaacaaatattatattttatcttaaccaaaaagtctagaaagggatgagttaaaaaagaattccaccctctttt

SEQ ID NO: 323879 - DNA, 59 bp, Zea mays
accacgcgtccgaaaaaacatgaagttttgtaaaagggactcaaatatgataatgtagg

SEQ ID NO: 323880 - DNA, 365 bp, Zea mays
cccacgcgtccgcggacgcgtgggttgttaaataaagtgcagtatcttcagattaatatctagtatgtgagacatatatttaatttaattttaaattattttttatggagagggtccactttaattttaaatttatttggggatggtctatcacactggcttgtcactgggtcctcgtctgccttaccgtcgttgtactatacccatcaatattaataagggattgtggaacccaacaattttggacctagtggttttaatggtttgggggtaacaacttaagggtgggttaacattacactattccattgttaatgcattgaaccggaccttagaaccaattttattatttaatcttacccaaa

SEQ ID NO: 323881 - DNA, 383 bp, Zea mays
ccttcttcggctctcaggagcgtcggccattgctgctggaaaagcagaccatggggagtccctagtgcgttctccaaatcagtcatgtcgatggcgatggacggaccacttttatgccgccctgcaatgcaggccaaatcgactgctgatgcgctgatcaacaactccctgaccagattctggcagcttgggaccatttgaaaatacacgaacgtatcaagattcatttgtcccatctatgatccatctactaagaacatacttacatgctgtagctacagctcgtcttctgacagcaatggatacatagctaaaaactttagcgacagtgatcaagattatagttaattctactgtgctcgcaccagctgaagtgaaaagag

SEQ ID NO: 323882 - DNA, 354 bp, Zea mays
aagtggtacggccgattgaaaaaaaaattaaataaaaaaaaaataaaaaaaaataaaatagaaatgatacaactacacaacattactaaaaccataaatttaatcaactccactataatccaactacctctacaatcattaatctaaatatttcttattcacatttatttatgcctattcacaaaaaatcgtactcttactgactttacatcttttcataatagctctacatttctctaatttttacaattgagaatcttaacctctctgtaacgctcatcataaataacttaatattccaaaatactctttacacctctatattcactctttacgacaatttcaacatacact

SEQ ID NO: 323883 - DNA, 306 bp, Zea mays
accacgcgtccgaaaaaaaaaaaaaaataaaaaaaaaaaaaaaaaaaaaaaaaaggaaggagaaaaaaaaaaaaaaaaaaaaaaaaaaaaaaaaaaaaaaaaaaaaaaatatataatataaaatagaaatatattaaaaaataaaaaaatatataatgttttttaatgtttatttgtgaaaaatatttttgacttgtattgtttttaatttgtttatttgaataaatttatttgttctgttgttgatttttgagatatgattatgccgtttgctgtttaaaatatttgttaagattgattggccaa

SEQ ID NO: 323884 - DNA, 174 bp, Zea mays
caactgcctccgagtcgtccgccgaggctcccgctggcgctggcgctggcgctgccggtggcgccgccgcctcggggccctccgccagcagcggcgcgcccgccctcgccgccgcgcccgccgcgctcctcttctccctcctcgcctactacctccactaagcgtgtgcgtgcg

SEQ ID NO: 323885 - DNA, 191 bp, Zea mays
aaaaaaaaaaaaaaaaaaaaaaaaaaattataaaaaaaaaaaaaatataaatatagagaagggaaaatatgcaatatagtaaagtgaaatagaatttaatgggatagatttaacttatggaaagtgacaagtgattatgagtttgggggatggtttaattgcaattttgtttacatttttaattctgatta

SEQ ID NO: 323886 - DNA, 290 bp, Zea mays
aaaaaacaaaagaaaacaaattataaaaaaaaacaaaaaaaaaaaactaaacaaagagaaggggaaaaatacaaatacatgatacgcaggcatctctctgggacccattctcgccttagcgccctcctacggggcggcggcgccgttcggaggcgccgagtacgcaccctgcgggaccttctacggccctgtcagtgccagcgggccatcggctgccgactccctggcgtatggcgccagcgcctttgccagaggtccgactgctgatgctccggcgactgcgacagcgg

SEQ ID NO: 323887 - DNA, 239 bp, Zea mays
ttcacgcgttcgaactgttccttcaacttcatcatcgtcgtcaacgtcttcaaccagggcgacctttctgttggttatcacctggcaccctatgcatttcttgaagaactaggggatcgacgggatgcctggcacgcaatgcgcgattctgcctaacaccgacttaacgtcccgtggcagtccaaggtccacatcctcagctttttctacttcctatccatcggtgtgcaaaaggcatt

SEQ ID NO: 323888 - DNA, 297 bp, Zea mays
acacgtgcacgaaaactttattcccgactcttgaaaaatgaggaccatgacgctgaacctggtagggatagaaagcgcactcatctatgcacgcatggtcctggcaccgctaaactccgaaccgaccttctacccatacataccgaccttcagagacgccgcctacgcacccgtctgtaccttctacggtccttctagcgtctgaggctcatctgctggcaacgctcactggtctggcgcctagcgtctggggacacggatgactgcctgatctccatgcaccgcaacaggagcaca

SEQ ID NO: 323889 - DNA, 118 bp, Zea mays
cccacgcgtccgcccacgcgtccgcccacgcgtccgaaaaaaaaaaaaaaaaggaatggataataaaaaaaaaaaaaaaaaaaaaaaaaaaaaataaaaaaatatataataaatataa

SEQ ID NO: 323890 - DNA, 360 bp, Zea mays
cccacgcgtccgcctactcgagcgtacaggagggtcaggctggacattgtacgctcgacaacaagactgcgattgaggaccagttttggattcgatcggctgtgaatacccgtggttaacgaattgtcaacggcataattctagtcaatgccaatgtcaggaccaactactggacaaggctgaacatctaatacgcttcataggacgcatactatggtgagagagctcatttgtaccaaatgccgacaagctaatattgacttagaaaatcaggttatactgaagcagaacactggccaagatgaacatgatgctacatgtccataagttgagccatattgcgttaggatgatatgcatg

SEQ ID NO: 323891 - DNA, 408 bp, Zea mays
  unsure (1)..(408): unsure at all n locations
agcagactccaataagagccagccagagaaactaataaaactctcgccgccgccatccgagcgaacaagccaaccgaccccgtccccaaagcaatccggcggcgacgtaccaccaccaccgcatgagcgagatggagatgaagaagatcctcttcgccgtncgtcgtcgatcattcgcccggctcgggacaccgcagtgctgggccttcaccgaggccgccgccgcgggcgccccaactgcctccgagtcgtccgccgaggcttccgctggcgctggcgctggcgctgccgctggcgccgtcgactcggggccctccgccagcagcggcgcgcccgtcctcgccgccgcgcccgtcgcgctcctgttctccctcctcgcctactaccttcactaagcgtgtgcgtgcg

SEQ ID NO: 323892 - DNA, 412 bp, Zea mays
cccacgcgtccgaaaaaaaaaagcagtttacctttaaaataataaatggataaaaaacgtactgtataaaaaaaagtttattggactgttatctaaagaaacggtcaaactaaatcgctctattcgcaattattctccatactacagacaattcacttagtacagatttaaagcactatgggtcccacaaggtacccatgacttttgagctctaatgcactattgaacacaacaactaggatgaccgctattgtcagagccatgaaggatcctcccacagacatctctattgcaaaaaagcccttcttaatttaagggcctgctccggaatgggcctttgctcaatcatttaacaattacgtggtaaagtctgctctattacctaccacatccataactctattgttggcac

SEQ ID NO: 323893 - DNA, 175 bp, Zea mays
  unsure (1)..(175): unsure at all n locations
cccactcgttcaactataantttttgcttttgttgcaacattcgattatcaagggttcgtatttaaaaatgttaattcaccgtttactgatcaagctatcaacctttcaatgcattcatcaatgatttaccatcatcaaagagataatctttcgccaatttcttagtatgatcag

SEQ ID NO: 323894 - DNA, 277 bp, Zea mays
cccacgcgtccggtgaaaaaaaaaaaattaaaaaaaaaaaaaaaaaaaaaaaaaaaaagaaaaaaaaaaaaaataaaaaaaaaataaaaaaaaaaaaaaaaaatgaaaatagatataaaagaatactagattaagtactcgtgcatgctacgtaatggtttttatattttgtatcctaaattaaattatagggccgtagttttaaatagtttgttctgataaaacatctgatgttactcatataaatggatttgtactaaatctgcttttcgcaatt

SEQ ID NO: 323895 - DNA, 72 bp, Zea mays
aaaaaaaaaaaaaaaaaaaaaaaaaaaaaaaaaaaaaaaaaaaaaaaaaaaaaaagaaaggaaaaaaaaaaa

SEQ ID NO: 323896 - DNA, 107 bp, Zea mays
gcggacgcgtgggcggacgcgataggctatatagtttatgtgatgatcatgatcgggttggttccattgcaaaaaatctttcgataagattgtatcgaatttgctaa

SEQ ID NO: 323897 - DNA, 241 bp, Zea mays
acgcgcacgcacacacgttgaagcattaactgccgtaacagatgcaccttatgtggccaggggacctacagtactgcttctgattgatccacaatagccatacgctacaactcatgctgcaccactctatgacgcgattaccgtatacgagccgaggtactcacaacatagtatcggtaatcaacacgcccttatgtcaacgagccatctacaagctagaccaacatcattatgctcaacc

SEQ ID NO: 323898 - DNA, 356 bp, Zea mays
ttggcttggaacctttgggctgatttatgtgcttgtttatgtgcttgtggatgtgcggggctgtacctcccttggcccgttggccggggggtaaatcagaatcaggaaagcgccaagctccgtcgaactagcacccatcttcccttagagcctgtggaagttggctagggttcttgatcccaacagtaacaggtgccacagcaggatgtataacgtgccatcccggggacttcccgcgcggtcggcctagcgaccgagacagacccggaaagagcccgccccgtcgaaccgccacctaacatctatcaaggtgcgctttcggccatacgaaaaaaagagaaatcccgataagagta

SEQ ID NO: 323899 - DNA, 392 bp, Zea mays
cttggaacctttgggctgatttatgtgcctggctctgcgtagtcgtcggcgaaagctccaggggtatgatacgctgacttgatgcgatccgaagagcgtgtcagacgctaacagctatggatatgttagtcgcggtccccgtcaatattgacacctactacgcatgcgcgatatggtcattaatcatcaataaggcgcctatgtctaagacagctacgcattcgaatacacgtgcgaatgatcccgataatccggtgctctgacgggaacgacggatagagtgtccttcggagttgagctcagatggtaccgatatgacgtatactaaggtgtctatgggtctatgtcggattcgatgaacaatagtcgccgttatacaactagagccactg

SEQ ID NO: 323900 - DNA, 405 bp, Zea mays
tggaacctttgggctgatttatgtgcttgcgaaggtatacggcgataagagtagagatcacataaccttagtcggtgcaacttaaggggcgtgatggggcgcataagtcatacgtctcgggcggtaaggcaatgcctaagtagtcggggtacacgtcgttctatttggcgttttcctgtaaagttatggcgttaacggatacgcgtagaatcggaactttggtaatctagctcacgttttacttctaggattaggaatacacttaggttagacgcatctactctttctatagcacgtagtgctagggggtcatttcaacattttacttatcgtcctggtatatcacgtactactaaggggtcccttcaatattctcatcctagtctccttcggcgtcgtcatata

SEQ ID NO: 323901 - DNA, 188 bp, Zea mays
cttggaacctttgggctgatttatgtgcatgtgtatgtacaggtctcgactattagtaagtcactggcggtcgtcgagtcacggaatcatattagggcaggtagtgcacctcttggtgcgtcgtcctaagttaatggcatcatttaatagtattcggacggttcgtaatactatgggtagctcattac

SEQ ID NO: 323902 - DNA, 493 bp, Zea mays
  unsure (1)..(493): unsure at all n locations
ggcttggaacctttgggctgatttatgtgcttgtctaaaaataccctagaagttaagcctaagtacactccaaagttcacagtcgacgttcgtacgagagaggaataaaaggaacacgccgaccctgagttacaccacatatacacagctcgctacgaacgtcgttacggaaccggattctacctcactatttccttaagcggcaaaaaaataatagccagaagggaatcctaagaaccttacctagtaccggaggaggtaaaagtcgacacagccggctctcgggtatcgaacccttccaccaagaagggaccgtccttcaagagttcgctataactcacgcacgctctcccttcggtcggtcgtccttggctaacttgtcccgggtcggaagaagtctatggaaaaggataagtctcgtagcccaatcggccgcacgagaaaggggtccccgcgccgtagctcgatgganaacctctagccgaccccataa

SEQ ID NO: 323903 - DNA, 483 bp, Zea mays
tggcttggaacctttgggctgatttatgtgcttgtggatgtgcgggtacagataggtgctcctgcatctgttcactcttgtgatttaaagtgcctgtttcctctttacctcctctctaccctctattattgttgttgtcatttttccctgataatattacgagggagcgtactctgacttatactggttaggttggcacttaggctggaaatgtgcgtcgggagtcgcatcgttctgagtacggtacctaggtcgacggctagacgtttggcgataagattaccgggggaggcgacgacgtccctaatattcctcctagcgagatcggtgtcgggaagtatgctttttgcgtcgcccccgccgattccgagtttatcgctactgacgaggcgaggatcggtattcactgttagtctccttacttcgagtagtctactagcggtaaggaggacgtagttaataatcctgtctgcggctatcata

SEQ ID NO: 323904 - DNA, 460 bp, Zea mays
ggttggaacctttgggctgatttatgtgcttgttgctgctgtgacggtggttcttcgttgttgctgttgctatatgttattgtagagtcagtcgttgatgaagataaggtgggtaacggttaaggtgttttcgttgtccttgctgtcgtctgcttctgttgttcctcctccttattattttcgtcgtatggtgtagggttgtgttgaaaatactctggaggctgaggttgtggcttgtgtttgtgtgcttgagtcgtcttgtgatgttattagttagtctgctgattcgttttctttggttaattctcttggtgtgggtgcttgggttctggtttctagtgcgtgtagtaatgtgtctcgggttggtggtgctaatattattggtcctattgctttgttgtgtgctgcgttggttttgcctgtgtgttgctctgttactgctcctgagtctcctgcggga

SEQ ID NO: 323905 - DNA, 439 bp, Zea mays
tggcttggaacctttgggctgatttatgtgcttggctgaaacggaataccaatacccctagtgccagaccgccgcccccgcgcgtgcggcacactcacacacatcggccgataaatcagcccggccgaccgagctcgactgccgccgggccacccgaaccgggcccgcgacaaaaaaaaataaaaagggtggttgtctcagaggacttaagtccatgcatgtgcgtacgtgatgctacagtctcctcacagcgctattcaaacctaacctatcggttgctgccccataatgctgcgatcgggaaaatttcggtgccatttaatccaactgttccgtagtatactttttccctgttagtcggtgcaacagtgaacaggtttgtattgactgtgtcctttaatagccgtgtagttcgaacggtgaacgggatgtgtttcgc

SEQ ID NO: 323906 - DNA, 95 bp, Zea mays
gacgacgagacttcgaagacgcagtaggagtactcgtccgtttaggcttatatatactagtcgggagaaatcgtacaattatacggtaaagcgtc

SEQ ID NO: 323907 - DNA, 477 bp, Zea mays
tggacctttgggctgatttagtgcttgaggagtcgcccggagtcgccgttccgataggaacgtctcgagggtcgtactcgtcctcgtcgatcctctggtcaaagcacgggacgtatccatcggcgacgaatcatacctacccgaatacaagtacacagcctgggtacgcgtccctctcgaggatatttattccccatctatcggaggtacggaaaagatcccgtgcgcgcacgacaccaactgcttcgacgtagtcttaagagagtccgataaactattcggcctcgcttgaatcgtcgttcggtcctacagcgattaaatcacaccgagccttcgtatcgatacgggcggagcaaggtcacgggacgcgagaataggcaaaaccgcttaaatctccgaaattaaggtcctcaccatcagcgtagaagcaagttaggacggtaggcctactatcatagtagacggtctaagcgcaaa

SEQ ID NO: 323908 - DNA, 416 bp, Zea mays
tggaacctttgggctgatttatgtgcatggatttatgtgcgtgcttatgtgcttgtttatgtgcttgtttatgtgcttgtaaatccataatggacggtcacggtgatggtgaagtcgagatcttttggtcattagtccgtctgtcggtggttgtatgtgttgactcgtgtttgtttgtcgtatgatggagacttgtgttggtgtaggtcttcatctggatgagtctactcctattgtgaaactcgccgtccttttcgggtgcggcacctcggtcaccgacgagctaaacgtaatacgcggaaagaggccactactcaccggcccggataatatcgaagcgaattggctagtccataggtagtcccagtcgataatcgccggctccggcgaacacaccctcggtgtcaactcccctg

SEQ ID NO: 323909 - DNA, 378 bp, Zea mays
tggcttggaacctttgggctgatttatgtgcttgtttatgtgcttgtttatgtgcttgtccccgctagccggataacttgtagtcttcttactctagctccttttttactttacttttaaggccgattggtgaaactagtagcttgagaattgtgagtcctcgttcgacttagttctactttgttacggatgaactcgaggagtatagtaatggtggtgggtatttttatttgtattatgggcatgagcggaagcctttggtggtgtcgagtgtgaatatgatgagtgcgtatgcgatggtgtcggatggtgcggcgaatgcgaatctgtcgcctatggcggttgcgcctgcggggtcgctgtcggtgatattggggt

SEQ ID NO: 323910 - DNA, 492 bp, Zea mays
tggcttggaacctttgggctgatttatgtgcttgtggatgtgcgggtggatgtgcgggtggatgtgcggggtggttctttatttacatattccgggtgggtgttgtgttgctgagggttacttagagtctgttacggtggttgcttggcttaatagggtttatgtttattagtatcgttgtcttgaggtgctgcgtttgatgattcttgcggttgcggtggtggtgagggttggtgatgttttatgttattgcctgtaggtcttggcgtaggctctgaaagggtactattagacgtggtggctagtggtgcctttattgtgctgtttggcgttagggtgctgtttcttctagtgccgcgatagtgattctaatacttggtagtattgtattcgtagtgaggcggttggtggtatttgtggtggtcgcgtggctgcgcgtcgtcgtccctttcgcgctacggcggaggctgcggcggtctgtatggcgtgtgt

SEQ ID NO: 323911 - DNA, 487 bp, Zea mays
cttggaacctttgggctgatttatgtgcttgtttatgtgcttgtgttaccggtggtggtgatgtgttaattactactagttagggtaattgtcgtgacagtattattaaatactgttgctaaagcgactattaagtatcatgtggaagaaggtgcgcggaagaatcgggcgcggtatatggaggatgattcgcctacgaatggtgttactcctaacttgcttggtggtgtttttaagtaggctgatattaatgagcgggcaaagtttaagttaggaattcatgccataaggtctatttgtcctcctggtatatcgcttcgtcgtatgggtaagttgcgtcgaaggttggcgggtactaagtcgacctcctcaatctacggttcggttacgttaggctgtgtcggtcgtgccctaccctacggaagaaagtaaggacggactataggccgctgcctcgtcaaccaactcatacatgcccgttcctaag

SEQ ID NO: 323912 - DNA, 180 bp, Zea mays
ttggaacctttgggctgatttatgtgcatgtgaatcgaaagggtgaggctgcatgcgtcgctgtactaattctccgaggattaccgacagtacagtggcgggactattatacacatgtggatagatctaagattatataccacactgactgtcctatcgatcatccggctaaccattaca

SEQ ID NO: 323913 - DNA, 440 bp, Zea mays
tggcttggaacctttgggctgatttatgtgcttgtttatgtgcttgtttatgtgcttgtttatgtgcttgtttatgtgcttgtggatgtgcgggacttaagagagaacgttgtagtatactctaatagctgttgtatgtgttgcttttgttgactctgtgtaatagttgttgtatacgttattttgtttctgtatttatggtacttgtgtttagacgccgtgggtggtgttgcttttgttgactttgtgtaatagttgttgtatacgttagttctggttctgtgtttatgatacttgtgtttggtcgccgtggttggtgttgcttctgttgattttctagacacaaagctatctcgccgcctcctaagatcatttgaagtgacctacctcttggcctagtatcgcctcctaagatcaatcgaagtgacctaccgacgacg

SEQ ID NO: 323914 - DNA, 413 bp, Zea mays
gaacctttgggctgatttatgtgcttgttccccctccgcggcggtaatactactactagcgcgggccgtagaaggagttgacgatccagaagccctccgtgccaaagagcgtatttaaaaccccaatatctttgagggtaagaagactcgcgaaatgacgcgcgttaatttcaaaggaaggttcactgatagagccagagtcgaccgactaacgtctactcccacccgcagtcagtcactacgtacgtgacgacggttcctccgaccaccaccaccctaccttctacgccgcccgtctccgtacgccccccttattatcaacaccgcttcaaccgacgtacataagccgctatctaaagtacccctcacgtcccatccaccggccaaacaaacataaaggtccatccccattc

SEQ ID NO: 323915 - DNA, 431 bp, Zea mays
tggcttggaacctttgggctgatttatgtgcttggcctcagactgtgagtgttgtttccccccccccccccctctacacacaggccattccccgggggccgtagcaggccagtagagccccgagtcctaaaatatcttactcgacactacaaaattattcgctcccgacactaacacattctctggtaattaaattaaactgagaaaacgggccctaggatattgactccttacagtagacggaagtcaggcataggcctccggattacccgcttcctatacgtcggtcaggaaatgtagacgcctctagggctcttcgcgccctactatcaggtccctcttccggaacgtctaagacaaaggtcgttcggctttacgcggtagttgccgttgcgacgtgacagttaccgctttaatgtacgcggacgttt

SEQ ID NO: 323916 - DNA, 304 bp, Zea mays
cttggcttggaacattgggctgattgagtgcttgatggtgcttctcatcctcgtcacaagccgattgaggcgtatgctgctcaccgcgctccggaattggcaaagaaaataagcgtagcatgttaagaagcatgcgtaggatacttgagaatatgacggataagatcacggcgtttggtactgagcaacactgggagaagatacggtgcgtgtacaattgttgtaataacaacggccgttagatgtagcgcatttgtgggacgtccatggacattacgacttcgtattgcatgggcataacatc

SEQ ID NO: 323917 - DNA, 447 bp, Zea mays
tgcttggaaccttgggctgatttagtgcttgagctagaggagagttcaggggccagtaattaaaatacgtttagtagggtgtcgatgcctaggtagtcgagtgttgtaatggatgggcctagcctgtagaattcgtctggagaaggtggtcccggatgggcgcataaagggtcttctgaggatattggagaggccactgttgcgaagtagtcgaatagggatgggtcttagggtaatggtgagccttctgctgaggcgtcgacgtctagttcgtcgtattatttgaattctgctaagtcgtcgggtcatagtattgatcttaattagtggacttcggctcatgagcatacgtttaggggtctgtcggaggattactcttcggatccgtttttgagtcggaagttttcgttgcggtatatgtggacgtggactgtggcgggtgtggtg

SEQ ID NO: 323918 - DNA, 472 bp, Zea mays
tggcttggaacctttgggctgatttatgtgcttgttgacttactccgggtgggtgttctgtgctgagggttagttaaagtccgttacggtggttgcgtggcttgatagggcttattattattattgttgtcttgaggtgctgcgcttggtaattcttgtggttgcggtggtggtgagggttgacgatgtttcgtgttagtgtttgtgggggtctgcgtaggcttgggagtgggattagggtttgtcgctgatggggtattagtattcgtattattactattattagtcgtggtggctggtggtgcctttattttgttgcttggggttggggtgttgtttcttctagtgtcgtgaaagtgattctaatactagggagtattgtcttcgtagtgaggcggttggtggtattgtggtgggtcgtgttgtcgcgcgtcgtcgtccttttcgtgctacggcggaggctgtggcgtct

SEQ ID NO: 323919 - DNA, 487 bp, Zea mays
  unsure (1)..(487): unsure at all n locations
tggcttggaacctttgggctgatttatgtgcttggctgttgttgttgttgttgaggagaagaaggcgtaggataatcctcgtctgatgtcgcgtgagggtaggaaggggacggattcggcggcgcgtaaggagcttcgtgattctctatagtgtcttaattcggcgtcgcatggttggacttagcgtaagggtaagcgtattgagtagaagggtactattgtgttgtagacgaaggcgcgttaagaggtgcgtgataaggatcatgcggctaaggtggtcgaggctattaaggttcgtaatattattcgtgttaaggagaagtagttctcgtctagtgagaatcgtaggaggcttcgtattttcttcttccttcgaatgtagagtatgtntgttggctgctgctcctcgttcgtccgtgcgatatcgaactatcgacatactacatacgtacgtacgggacgtgacgatgacccgacgtacgtacgt

SEQ ID NO: 323920 - DNA, 423 bp, Zea mays
  unsure (1)..(423): unsure at all n locations
tggaactttgggctgatttatgtgcatgtggatgtgcgggtggatgtgcgggtggatgtgcggggctgtcgtctgcttcgttcagtcgatggcttggttagtactattcttcgtctgtggttctgtttagtctttcttatttcttagcgagatgtagactcttcgtctgtggttctgtttagtctttcttatttcctggcgagatgtagactccggcgtgatggggtatcatggaggtagggcagcgtagccgcgtgcgcgccggcggttcggcctcagtaattgagaacgtctagagacgaaccatagagagacggtacgttcaataccgaaagaataccgtgataaggaccttagatccggcctagaatttacacntctagaacgtggaacacaaactaagaagaagtcgacgacgactca

SEQ ID NO: 323921 - DNA, 426 bp, Zea mays
  unsure (1)..(426): unsure at all n locations
ggttggaaccttgggctgatttagtgcttggataaagtaagtaaagtatggatggatggcatgggtctcgtatgtgggtgctgtgctgttcgggtttgttggatatacttttggtaacaacgaggttttttggttggtgttgtgcttctgttgttggtgttcgtgtgtcgtcgtcggttgtgattccttcggtggttggttcgccgatgatgcttctttcggtgttgcattcgtcgttgttgtcggtttcgctgtcgttgcgttcgttggtggcgattgtgttggtggngcttgggcatggtgtggtgttgggtgcggtggtgtcggtggaggtggttgcggtgcatgtgattctggagattgcgttatagtagctggctgatgagactctgtcgctgtcggttgcgtcgtggtggtgtgtgttgt

SEQ ID NO: 323922 - DNA, 348 bp, Zea mays
cttggaactttgggctgatttatgtgcttgtccgcctgtataaaaaaaaaaaaaaaaaaaaaacaaaaaaaaaaaaaaaaataagaaaaaaaaggggagggtggttgactcagaggacttaagtccatgcatgtgcgtacgtgatgctacagtctcctcacagagctattcaaacctaacctatcggttgctggcccataattccggaatcgggaaaatttcggtgcaatttaatccaactgttccgtagtataccttttccctgatagtcggtgcaccattgaagaggtttgtattgactgtttcctttaataggcgtgtatttcgaacggtaaacgggatattttt

SEQ ID NO: 323923 - DNA, 473 bp, Zea mays
cttggaacctttgggctgatttatgtgcttgtttatgtgcttgtgttcttgatgtcggaactaggtgacgggagatgtggatgttcatgtgaagtgggcgtcatctattgtagtcggtgatattgctctgtgggggactgttctcatttctattaagtatggtcgtagaccggctccgccgggtgatgagggtgtgtcggttgtgatggatgaggaggtgtggtgtcgtggggcagggggtggacgtgctgaaccggctgggtcggatcctaaggtgcgtgtcgaggtcgtcgttgatatggttgcggactgggttcggtgtcgtcctcttggatcggacgttcctgctaatcgtcatcttcatgagggcatgaaggacctgtacatagacatagccttcctccggctgttccgaattcgccgtctaacgtctattcttgagcgaaaactccgaatgatcgggtggacgttcg

SEQ ID NO: 323924 - DNA, 422 bp, Zea mays
  unsure (1)..(422): unsure at all n locations
gttggaacctttgggctgatttatgtgcttggtaagcatggtcttaaggctattccttattccgaaaaggggcgtggttttaatcattcggtgccgtcagctaagcatgctgatggtgatggcgataccgcggtggcggatgctaaggaaaagggtcttgatatgcatgagttttctaagtatcttcggggtgttactcggaggaaggatagtgataaattgtccaagggattttctattgcttgttctatcattgagggaggtattaagattgctcatgatgacgctactttcgttaatcggaaggttaatattgntcatattgntaaacaaccaatcccagcgtcgataacatcccaagctggttcacgtcagtcacatcagaccgggccggactttaagtaacgtaccatatacgtacg

SEQ ID NO: 323925 - DNA, 466 bp, Zea mays
tggcttggaacctttgggctgatttatgtgcttgtttatgtgcttgtttatgtgcttggagatcgacgctctatacgaataaatcgacgatggtcgtggtgggtagattattcccagtcgtcattgtccggcactaaaggacatcgatgtcgcgaatgggactgatgataggtgtgatagagatacaccaggcggataacgagcctgagattgagcacggtactgattaaagaggagacgcatgagttgctaacgccgaagtacgagccgtggaataagaaagtcgcctccccgcgaatgcatatgtatggtcaggcattatctaaagtttctgtgccgtgtacttatagtcgcagcatagtaactctatcacgtctgccatatggacgtgcgactattagtagtcccacatgcgagccgaacatctctcactcgtatatgacctgagtgtgccacacacaccatc

SEQ ID NO: 323926 - DNA, 487 bp, Zea mays
  unsure (1)..(487): unsure at all n locations
tgcttggaactttgggctgatttatgtgcttgaggagtcggcggatcgggaatataagagttaggagagcgggaaaacgtatgtccgtggatgtgatgcgtatatgataacgtcctcgggggtcgttagaacatcttaggactgtaagagtgattcaacgggtattgcgaagtccgcaccttagttggtagaggagggttagggtggtgtgcatcatgcgtcgtaagaaggtgcctccgatgatgtgctggttacacctggtccgtatgccgatttggtttcttttgctggagctgccctgcttaggttagggtttcctgtggtgatgcttggttggccttcggtgatggctattggtaaaggtgggtatgttgtgacgttttatgaacttactgatttcgccgcagtcgtagttatcatcgctgctagttcttagaagactactcnttgggaaactgacttttcgtagggtgttggcgcgcttgct

SEQ ID NO: 323927 - DNA, 453 bp, Zea mays
  unsure (1)..(453): unsure at all n locations
tggcttggaacctttgggctgatttatgtgcttgtttatgtgcttgtttatgtgcttgggacctttcatagaaccccccttcgcgtcgcgcgtcaccttctgtacgggcggtcggtcagtgtaccggaaagagctatctgacgacttcgatatcaagaccacaaggttttaataggcacatattggtcctcggtccaggtatcacatttttgctagagaatgagcgtcactaagttagagcgaggaatccggctaggccgttattctaaatgtaatcaggtgttgntgcgtcggcctcgtttcgcagaagtcgtagtgcacaaatgtattggtacatctaacaaatactgattatccccgcgtccgaaaaggttataaacgtcccccagtccggccggagccgcaggttccccggcgctgagcacacaggtaacaacgtagcgagaatattat

SEQ ID NO: 323928 - DNA, 468 bp, Zea mays
tggcttggaacctttgggctgatttatgtgcttggagtgtatatatatataattagactctttttaaacttatttgctggtattcttgtcctaagacgtagactcccgcgaaaatttcgattggtaagatcactatttctgaggcggagctgctcgatattaccgataatgccaaggttaagacttaggataaggagggtacttttttagattagtagtggtctactcctgtcggtaaatagtccgaggatgggtgtatgtccgtcgatcataatacttagaaggagagtatttcttattccgcgtcttgttctaggggaggtacgtagactcccgcgaaaatttcgattggtaagatcactatttctgaggcggagcttctcgatattaccgataatgctaaggttaagacttaggataaggagggtactttcttagattagtagtggtctactcccgtcgggaagt

SEQ ID NO: 323929 - DNA, 486 bp, Zea mays
tggcttggaacctttgggctgatttatgtgcttgtttatgtgcttgtgtcttcctatccttctgtcggtttacaaacacacactcacggactgttactgagtaaccacaactctatagaacaacaaatactacggggtaagttctatggtctgcttcttctgttgctgcggtgtcgtcgcttgttggttcttctttgtaggtgtcgggcaagggcaggggaggtaggggatatggcggtgttgctaatttgtaggctgttggtactcgtctctgtattttgcctttggaggcgcgtatgcttattgttgggtggtatgtgcttaagcatttggctactgataattcggttgcgtcgaatacgtatgcggatgtgcctgttaagtgtattgtgtaggtgtgtaagtatgctgtgaggctggtttgtattactttgttgtagtagatgtaggtgtctatgcctcgtgatattacgcatacgaatatgt

SEQ ID NO: 323930 - DNA, 486 bp, Zea mays
  unsure (1)..(486): unsure at all n locations
ggcttggaacctttgggctgatttatgtgcttgggattcctagatctacaaatatactttacatagggagaataaaaactcgatcggaatagtatgccacgtcagcgcgaacatctactccggaacagaataaagtaggagagacgactcggagctcgccggtcactcctcgtcacaccccccaagaggaagggttccaaagtcggtatcaagaaataaaagcacgacaaaaccagcgaaaagaaaacgtccattctggtagagacctcgcgtaaactccatttgttggagcctgctctacacccttatcaccgctgtctttcgtgacccgaagataggttagaccatctcctaacgaagaagtctccctgcgacgcacccacatgggaaggacattaacccgaccatgcacccgatcggatcgtatctaagcatttctaaacgggntcttaataatagtccgcctaataattaagcgtaagaacg

SEQ ID NO: 323931 - DNA, 235 bp, Zea mays
  unsure (1)..(235): unsure at all n locations
tggaantttgggatgatttatgtggatgtggatgtgagggtggatgtgtgggtgaagttggagaatgaagagttagttaagtaattaggtggggggggagtaatggtattgggactagggataaattatgagttaaattgagtggtgattgagtgtgaaatgataagataaaaaggagtaagtgagttaatgattgagagagtgtgaggatgaataagtaggttgggttgtatgg

SEQ ID NO: 323932 - DNA, 313 bp, Zea mays
ttggaaccttgggctgatttatgtgcatgtgcatgtgcatgtgtgttatcggtcccctaattaagtctgacgattaaccgcgcgaactaatgggcttcggctcatcaggccgaaccatcactgtggtgtggctactagcagggcaaaatcaattcgctctatgatggctcaaatttagtctatgcctttcaccggcgggcgaataacgtaatatccggcgaacgtcgtcctataacgacaggaagagttggtactaaaggactatccggtgatgtcatcaccaatgtccggtcggtataagttaggcactttc

SEQ ID NO: 323933 - DNA, 493 bp, Zea mays
  unsure (1)..(493): unsure at all n locations
tggcttggaacctttgggctgatttatgtgcttgtggatgtgcgggtcttcttgtttgcctttattgactctatgtctctctctccttcttgctgtgctggtgctgttactgttggttacgggccgtggcggtcttaaggaggttgcggttattggtaatattagtgttggtagtaaggcttcttggaggaagcttcttcttgctcttattggtgtaagttatattcntattatgctgttgctgcttcttggtgctgctgctaaggatgctgcgaaggacgtggtggtggttggtgaggcgacgatgtttgttgatgttgagaagttcactctcgctgattttaaggtagatgttactgcggcgacggatgttaagaaagaggagggtaataataaggcggttgcggaagaggactcgtccttcgaacttattacggttgatgaggtgtccgtcgcggaggaagggttttaggccgatgaattatctaaaact

SEQ ID NO: 323934 - DNA, 482 bp, Zea mays
tggttggaactttgggctgatttatgtgcttgtttatgtgcttgtttatgtgcttggttttatatatataaaagtaaaaagtactactataacaacggtttgtgtgcgcgcgccttctgcggcgtcttcttcggttgttgctgtggcggtgttgcccgtgggggtcgtgtgcgcggacgctgcggagggtaggcttacggtgcttgttgatgtgttcgaggtggtggtcgatgtgtttgtctttggctttgatcttgttctacttttggatctgttgctggaggtgtttcttagtagtagtctacttgatcagttgtgtataatgtagcctccgctacgactcactcagtaaacaaaaagactacacgctctgcccgacctctcggaacaatcaacagcacacacgtcgtgtttggacgacacacaaacacgcgtactaaacgtgcgtggtaaatgtacggaacgcgtccgttcagtcagtc

SEQ ID NO: 323935 - DNA, 484 bp, Zea mays
  unsure (1)..(484): unsure at all n locations
tggcttggaacctttgggctgatttatgtgcttgagagtgcctttttgtggtcttcttatggtaagagtctgtgcgtgcatggtcttactcgggagcttattgctaggaatgctaagcctgcgctggataagatggcgaagttggcgcataccactatttttattgaggttgtgtatacttaggttattgcggtgcgtgggtgtaagtatgggtcgtgggcttgtgcgtggagtggtgggtatgatcatgagggttcgctgcattggcttgttaagttggagatgcctgttgcggcggattcgcttacgacgtggtaggcgtgtactgatggtaaggttgttatggtgcgggcggatcttggtgtgtagtctggtgagtctcatcatgttgcggtgaagacgatttttagttctgggcctttggtgggtgcgcgtgttatgactggtgctgggggttatcctagtgggggtggtcctngtacgt

SEQ ID NO: 323936 - DNA, 489 bp, Zea mays
ttggcttggaacctttgggctgatttatgtgcttgtatgtttagtccagtctagtctaggcagtcacagccagtcagagagtcggatgatttttgtgtgattctagacagacccccaacggaggtgttagtagtgttattcttgctgcatgatggtggtggtggtcatgcttctgctgattcgctttcgatgtcgggtttgattgtgatgttatatttcgttgttcttcttctcttcgagttcgattatatattagttgttgttgttgttggccttagccttgttggtgcgtggtcgcctttgcgttctcctcgtaataagaagccttctaagctgtaggtgtctggtggttattagaatgtgtataagaaggagaggagtgcggggcggaatgtttattctcattctttgttgttggttgtggatatggtgctggtgctggctgttggtgttgctgctgtctgcgttgtgatgatgtttgctggtagt

SEQ ID NO: 323937 - DNA, 432 bp, Zea mays
tggcttggaacgtttgggctgatttatgtgcttggttatgggtactgcgtcagggatccatacggcgtctgttatggtgtctcctccgcattcggtgtatgatattgatggtcctattaatgttcctggtgcgtggcttactaaggagaatgataaggagtcgacggtggtatcgcattcgtaagcgagtacaacgagttaggtgtctactcctgggatttggctttggagtcggcatcctgcggactggattggtgtgtcgtcggcgactgatccttcggtggactagtcggaggtcatgtgtactgatgtgcatgttaatcgttagcctcgtaagacgtagggtactggtcgcggtcggggcggtattactcgggtgcgtattgccgctattcatcctttgtcggatgcgtctaagcccgctacttgtca

SEQ ID NO: 323938 - DNA, 478 bp, Zea mays
aacctttgggctgatttatgtgcttggactattggttgctgagtgagtagctctttaaccttatttaacaatcaacaatactcttctgagtgttaggccttccggattatcacacttaggagtgatgaagcgacttatttgttagttacggagacgaagaaggcttctcgtgttgtttctgctgttgttgttctggttattgttgcgtcggttctggctgttcttgaggtgtttcttgaggtgtttgttggtgtggttggcggcgtggtcggtttcagtgtaagtggtgttgttgctgctgttgcgtttgttgctggggtgtctgctgttcatccttctgttcatcattcttatcgagtgatgatgtgtggggtggtaatgccgggacgtactgcgcccggcctacttggacaaccaaccggcgccccccacccatgcgggccgtgaccgggcaaccggccgcccgcctgcctggcct

SEQ ID NO: 323939 - DNA, 398 bp, Zea mays
tttgggctgatttatgtgcttgattatgtgcatgcttatgtgcttgagtttgtctccggtagcgttacggccgtaaaacctcgggtgtgactctgtacggtatgagtcgtagaaaattgaccaaaaaaattaaacaatatattggcaaagcaactaaattaaatatgtgtcgatattgattgactaggtgattttgtcttaagaggaaacttattattgtggttggggttccttagactctgtcggaggtagtggtagtgatggtggccgcgagtgacggtgtctaatacgaagatttcgatgtacgtgtcggtgaaagtgccggtcgctacttagaagatggcgcctatgatcgcgtacgaggcgatgggtttgtgtttgtcgtaagatcatgagtc

SEQ ID NO: 323940 - DNA, 416 bp, Zea mays
ggcttggaacctttgggctgatttatgtgcttgtttatgtgcttggtggtggtgtcggcggcgatggtgattgattcgcgtttatttaaggataaggggcgtaagttgttgtaggagtatcctgattctagtacgtttgtgccttcttagactgtgtaggagaaggttggtactgcgtttactcttcactgtagggcggtacgtgtaaagtagggtggtacttggcatattactattgggaataagcatcctaatacggcgatgactattaatgcgggtggtgttggtgatactgtggtggcgctggcgaaggggagtaagtgtgctaagcggatggagacgaagtgtaatcgggggtaagcgcggtagattgaggaggattctattcgtgagctgtcgatgccttgggcgacgat

SEQ ID NO: 323941 - DNA, 455 bp, Zea mays
cttggaacctttgggctgatttatgtgcttggctcggcatattcttagtcctaagccggaggtggatgatacgttgacttgctgtgatactaagatggcgtctgaggctaatagttatgggtatgttagtgcggtgcccgcgaatattaaacctgcaggacgcgggtatgggattaagacgaataaggtgcctatgtctgagaagtttacggattcgaaaaagggtgcgaattatgctgttgctccggtgctgatgacgggaacgacggatagcggtgtccattcggagtattgctcggttggtgctgatagggcgtagactaagggttctaatgtgggtatgtcggattcgatgaacaatggtcggggttatactgctggttctgctcgtcagtagaagtagactcatattgaccagggtacgggtaaggctatacggaagttagctgcgaatg

SEQ ID NO: 323942 - DNA, 479 bp, Zea mays
  unsure (1)..(479): unsure at all n locations
tggcttggaacctttgggctgatttatgtgcttgtggatttggtggtggtgtcggttgtggtgtgctatgagcctggtgagtatggtggtgcgaatgacgcttactgaggtgctggtgatgcctatggcgacggagttggatatgacgtggtggtcgcctgtgggtgagtcgggttttgattgtggtgatacgcatactcatagttggtatcctaatttgatggcgtcggtgtcggggtggtagacggtggtgtcggagggtatggaggtgggtcatcgtatggtgcttgggacgcttgttactctgcttgcgtcgacgtagtcggcgggtgttggtggttatgcggcggtgctgtggcgttcgcatggtgggatatatgtgtcgtcggtttggccttcgttgtgtgttcctggggcgtgtgttattcctgcggatgttgatgatgaggttgntgcgtgtgttgnggcggcttttggtg

SEQ ID NO: 323943 - DNA, 457 bp, Zea mays
tggcttggaacctttgggctgatttatgtgcttgtggatgtgcgggtcccgtcgccgcgactccttctccttccggcctggccgagggacctagtgtgaagagttagtttcgtattcacagtaaggataagcatcgtaagttcgtatcgcctatcgtatctcccagtatcgcgcttcctccgtccggagttactattctctcggctcttggcccttccggtacgaagaccgttatacacgtgaacgttagaatcatttcggaagtcaggaagggcgccggtaaggtccccactattgtcccctgtctcggcgtcgacacgggtccttcgtccgtactaagcgggtccgcggcctcgcatactattaccaacgcacccaagccgcaccatggcgacgatcgggagggctcccccgagctcactatcggtcacggttccggcgggctgcttacggtctc

SEQ ID NO: 323944 - DNA, 476 bp, Zea mays
tggcttggaacctttgggctgatttatgtgcttggggatgcccggttaactaagactaggactaggaggcaaaagaacgtgttacactgcgtacgagcccggcggctctcatccccggcgacggctccgaaagagaaccattagtacgttcctttacatctgccgataggacgggcaacgaaaccataagatccatagtcgctaaggtacccctagccaccgtgaacctattctcatgcaccgactctctgcgcgcttcggactacgccgccctcgagtctatagtcccttcctgtaaggttaatagagtctccaggtaggtgatgccgggaatctcaaacctcccggccgctatacacggcggctagaccggtctcctcctgcacgagataacaactgtggaatccctaatttctacaagtgatacggacccgtacacgattgtctccgtaccggaatcccgccgtataacaacg

SEQ ID NO: 323945 - DNA, 484 bp, Zea mays
cttggcttggaacctttgggctgatttatgtgcttggctgctgatagttctgttaatcttcttgagtctgcgacttgttgttcgtgtctgtctgtggcggaatatgttaaaaattctgtgccttataaggccgacacttgcgataaagacggaccggaaaaggcccccgtcctaataagacccgacgtcgccacctaccccgtcggatcgaaagtcgccggagaaagcgcataaaagttcccgtcccaccacgattacaacgccgccggtataacaaactcctcggaagcaacggtagtctacggacgcaagaagccagcgcctctactactagtcgtagcccacgggctattcaagaatctatttcgtatcgaagaccccttctctatcttatacaatttacacggtagaattaaatccacggtagaggagacacgttgcgacactcattacccagaactcgaacggaacactaccccgtcca

SEQ ID NO: 323946 - DNA, 389 bp, Zea mays
ggcttggaaccattgggctgatttatgtagcttgcttatgtgcaatgtttatgcccccgttagatgtgttttaacttatacatataggtgcactacggtactacaatgtacatcaaatgaaccaaatgatccgcacaacgatttcatactgcgacgtaacatctgcttcgtcgcagaggacacgccttatcggaagatacctactacggccttcttcgacagcttacacgtcggatgcgcttacccacataatacctacccctatggatatcatatcgctcagtacttaaaagcactccccaagatgaacgtaccgtacataaatactaacatcgacggaagtacactcgcggataccactcaagattagaggagtttcgtcccgataa

SEQ ID NO: 323947 - DNA, 465 bp, Zea mays
tggcttggaacctttgggctgatttatgtgcttgcgtatgttcggttcgggtcggttgttcttgattattgcatgcttcttattgtggtggtgctggctggttctcgtttgatttgggtcgttcgtgagggtcctcgacggtttctgatgttgcttcccttcttcagcgtttagtcccaccgtagacttagtttctcgacttctgctcctccctattctcttaatacgaaggctaatattaagactaagtcggagttggctacggtgttgctgctgctttcgttgtagaatgttagtgagtcatttgatttggtgctattgtctagtcttaatatggtgtattattttgctcttgcgtttattatattcaggccgcttccactgcgtctgctgcctgggtatacggcgattttagttattgatatattggtgactatgtctattaagaagtaggatgataagttg

SEQ ID NO: 323948 - DNA, 460 bp, Zea mays
  unsure (1)..(460): unsure at all n locations
ggttggaacctttgggctgatttatgtgcttgtttatgtgcttgtggaaaaggggttagtggtcttgcattagctgcttagccattcgatgtaggagtctagtagtaatacggtgtagagaattgttgttgttgttcttctcctcgtgctaggtcatggtgcctagagatttttcggctcaagctcaataatagtttagatgaaacctatgctgtcttggttgccgttgttcctggctgctttcctttacgttcatggtgtgttgttctatggatttgctattgctccctatttgctagtcttctttgcgttgcacttagtgagtaacctcggtggcttcggtagtagtgatgtggcgccggagactgagagtgcgaggcggagtgcggcgggactgaagttcgagggtctggagtgctcgaggagtcgtanaagggtagtagagacggatgttgatgcg

SEQ ID NO: 323949 - DNA, 419 bp, Zea mays
tggcttggaacctttgggctgatttatgtgcttgttgaggttattgttgatggttcgtctactaatatgccttgtggttctgagggtgctcctgctgatggtcatgtggtggtgtctggaaggaagatgatggtgatgcgccgggttgctggtttgatgcgtgttcttcttcttggcggttcggatgtgggtgtgatggttgtttgtggtaattgtgttgatgctgatgctggttcttcttcgctgcggtctgatgtttgtttggtggtgcttgcgtcgcatgctagtcctggtagttctgtgtagtcgctgtcgaagtagattgctgagtctgtttggggttctgaggtgcttgggtggttgcctgctcgggttactaaggaggttaagcctagtgttgatgcgttggtgccgtcgtc

SEQ ID NO: 323950 - DNA, 61 bp, Zea mays
tttgggctgatttatgtgcttgtggatgtgcgtgtggatgtgcgggtggatgtccgggacc

SEQ ID NO: 323951 - DNA, 279 bp, Zea mays
cgtggtggcgttcgttacgtggtagtgaggcgaggttattgactgggtgtccggtcagtggtggagttcattaatgtctaacgagtgacggtctcgctcgtgatgtcatggaccctctccagtgctatggctcccggggtctcggtgcgtgagtccggcgatacttctgaaaataaaaagttcgtctctgggatcatcacttcaggaaaggacgcttatactcgtatgcccttaagagacttgatctccgtgactgggagttcggttaccgcggtatcc

SEQ ID NO: 323952 - DNA, 494 bp, Zea mays
  unsure (1)..(494): unsure at all n locations
gttggaacctttgggctgatttatgtgcttgggttaatgagcctccttcgtagacgtcgcgtgagtgttggtttgggtgtcccgcttagactacggatcttactgttgattcgggatcggaggctattaatgctaatgctattctttatgagagttctgcttctaatgctccttgtgttgttaggtgggataacgaggcggtagcgtaggtggatagatcgagggatctgtcgtcggaggcgacgtgggagttgcatggtgcacggctgctgctggtgttgtttgcggggacgagtggtagtggtactgttgatgcgaagtacgatagtgcggatacgaagtctgacggtactactgatgggtaggtggtattgagtgctgtagcgggggccctagaggactatcatggtggtcataattactcntcntaacattctgtccgactaccacccaaccgtgcctgcctacgccgaaagcctgactaaatcactaaa

SEQ ID NO: 323953 - DNA, 445 bp, Zea mays
ggcttggaacctttgggctgatttatgtgcttgaaaaaaataagaaaaaaaaaaaaaaaaaaaaccaaaaaaaaaaaaaaaaaaccaaaaaaaaaggagacaaaaaaaaaaaaaaaaaagaaaaaaggataagggtcgctgacccataagacttaagcccatgcatgtgcgaacgtaaagctacagtcccctcacattgcaattcaaaccaaccctatcggttgcatacccataatatcgggaacgtgaaaattccgttgcatttaaatccaccgtttccgacgtataccttttccctcttagccagtgcaacaaggattaggttggcattgaccgttaccattaatatccttctaactcgaacggggaacggtatctctttcgcattccaataccaaatgtcgtggccgccatggccatgtgtattgccattgccgtaaccgtt

SEQ ID NO: 323954 - DNA, 428 bp, Zea mays
tggcttggaacctttgggctgatttatgtgcttgtcaaccaaataacgagtaaccctccgcccactacgtaaagaaaatacgccccgtatggcacagacgcatcggaggtacgtaaacctcacaacgccccgagaggctaaaccccatacaccgagccgcggatccggatacccgataaaaaagagcgaggaaagaagcgtgtcctagccaccaatccgccagcacggtcggatactctctccgagcggacgtattcaacatatcgtaaaacacgcccccaataaaaagcccgcccgattccgcttcgatttacgattccatacaccgttgcctaagcaactttagtaataggcccaataattgcggcggcccttaagtcggctgaggttgcggttagccttagagtcgggggagaggttgcggctag

SEQ ID NO: 323955 - DNA, 473 bp, Zea mays
ttggcttggaacctttgggctgatttatgtgcttgggttagaggtcgcctattccggagattcgacgtggccacgagcatgattgggtgcggatggaacctggcttcttggacccctaagggttgttgggggtgtattggatattgtgtgacgcgtggcgtctccttggttgtcggatttcattcttggtcgaattgaccttagggccggtaggttgccaagtagaaaagacaatctcctttgacgtttttgttggtgctcttggatccttcaatgctgttgctcgttgttatgccttggtctgggaaactccaatttgacctttccctgggcgatgtgtgcgactgtgtcactcgttgggccctttttgctttccaagactggtccatttacgcgtaagcgttgcctatacggaattccctcgtctcctggttcctaaagcctctacccgaacacctgtcatcattattaag

SEQ ID NO: 323956 - DNA, 471 bp, Zea mays
tggcttggaacctttgggctgatttatgtgcttgtggatgtgcgggtgagtaagttccaatttggtaagatcttattattggctcccgtcatgatcgtcttgtttatacgtctcgggctggtgagtgtatttggtagtccgacggtgcttacgcggagccttcgagggggactgttaatttttccggtactaaggcgagtgataagacggagtttggtgagtcggcgaagtcgactgatacatcgaatttgatgaataagtttgggaggactattgctactataaggacgggggtagagaatactagggctaagccattctattccacttgtgtggcttgttaggtcggatagagcgctattcggactatcgatttgacgtatgggaatattactaagatcttccgtggatgaaagatctggttacccgatcttacctcggttgaggcatgggttcctcctgatgcgtatg

SEQ ID NO: 323957 - DNA, 483 bp, Zea mays
  unsure (1)..(483): unsure at all n locations
ttggttggaactttgggctgattttgtgcttgttataatttcgcgtagagcctccgtagctctactaaggcgataggaatgatacgggatacggaggttatttcgcgtttgaagttttaccctgcggctactttacggttagttattagttatacgacttttactgcggatactggtcgttcttctgttgtgtatggtgttgtggctatgactactattatgtttcttagtctgtaatctgcttagagttgtgcggattgtgttgggtaagttctagtgggggctatggctattgtgactttgcctttgggtgtggaggttggttcgttggatggtcgtgagaggatggattatactttactgttcgattctgcgtttaatcctcctgctgttattgtgtggcctggtgaggttgcggtgtggtatcgttgttgntcgtttatggttatggtggtgtatttttggttgagtcgtgctgctgtt

SEQ ID NO: 323958 - DNA, 371 bp, Zea mays
gaccatttttgtcgttagtgatagaagaagaagggggtttcctcttccggccgtacggtgttcattcttcgctcgtccgtgcgtacctgatctacatgtgtgggtgtctgtattattataattatgatttgacggtccctacgtgtctatatctaaacgtacgccgccgtactggagccgtcttcaataccagggagatacctgcggattcctatacgaagaatgtacgatgacactccactcctaaaactgatgagtagtagtagtattcggccgcagagaacataggggtcatcatcgaaagtcactacgacccccctgtgtctctcattagacaacgatcgctgacatgtctcgcacgaccacgaccc

SEQ ID NO: 323959 - DNA, 423 bp, Zea mays
tggcttggaacctttgggctgatttatgtgcttggtaaagtggagcttggaccgtagccttcctggcttacttggttgctatactagttatatgttgatgtgttgttagctgttgtatgagggggtttgcgacgttgaagaagacgggtgcgaatcttaaggtggaggtggtttgtgattgttgtcttgttgtggaggttgattgttgtgattgttaggagtgtgttaaggaggagtagcatcgggttgaggtcgagggttttaagctttgtgtcgtgtgttgttgggaggaggatgttgagaagtgtgttgaggttgtggtctgtaaggctgagaattgttgatctgttgaggtagaggttgatgttgctgttgtccttgtactggtgttgcttaaagttgtagtgtgtaaggtgccttgtg

SEQ ID NO: 323960 - DNA, 426 bp, Zea mays
cttggaacctttgggctgatttatgtgcttgtgtctgttttttcccttcttattcactcctcctagatgattagtaggaggcatgagtaagattgattcaggaggttctctctctttctcttttagttatttttgcagtgagagggagggtggaagaggacgagtgtgcttaggcctacaaagcgtgctatggctggggatggtgttgctggtaagattcgtacgtctactcttcatattcttaatattccttttattgatcacgccttgatagcgcccgacaatcctagcgttaatgccgcggccgacggcaatatcgctaattctggttctcgggataatcgtaggctagaggaccataatagatcgagattatcgagtcactgcggagtcgaagccccctcctcggtccctctatcgactagc

SEQ ID NO: 323961 - DNA, 452 bp, Zea mays
tggacctttgggctgatttatgtgcttgtatgaatgctggtgtggttagtctgatgcatattgcggaggcgaatgcgttggtgctggcgatagcgggggcgaatttgttgaagtcgatccctaaggtgtcggaagaggcttcgaatcatctcgctataactaagctggttaatggttaggtgtccattggtttcgctgagggggagtctaagcggccgcttggtaagcatgctgcgtgtagcttgacttcagctatcaatgaacttgggtttctattggtggtcatatacagattgcaatttctgacagtagtcggtaaacgttcatccaccatgcatacggcaatgaccagcctgttacacgacttagtgtccgaaactgacgggaccgttagtcctacctatcccagacctggcggatcaaaccaagtacgtagacgtagagtaaacctt

SEQ ID NO: 323962 - DNA, 459 bp, Zea mays
  unsure (1)..(459): unsure at all n locations
cttggcttggaacctttgggctgatttatgtgcttgtggatgtgcgggtggatgtgcgggctgtggatgtgcgggtcaatttaagataaaatacggacgcgaacgcgagaattacgcggctgctgacgtgggtataggccgtgacggtcgcggcgccggcgcctccggcgagtggtgtacggcgtggcttctttaaagcttttttaggtaagaatactatggttattcacggtaaggatcggtcggatgtcaaagtgatacggcacggtaagttgatgggcgttggctttgatgataatggcggcggtcgtgggcataaggatgcgaataagtttnttcctaacagtacgggtgtacgtggtaatacttttactcctaaggacggctcgggccgcgggcttcgtcctgagactaagcgtgacaagttcgcggagcgtcttggtaagtttgcggcggcgt

SEQ ID NO: 323963 - DNA, 437 bp, Zea mays
tggcttggaacctttgggctgatttatgtgcttggaaaaggaccggtctcgatggccgggtctgcgggctttggatttgaatttgatggtcgtcgggggaacgtctgagtcgtctgtgtagtgagagtgggttgatgtgcgttggttgggggatggattgggaatggtttttcagggggttccatttgggtgcagaataattgatctagaatcggcatggataaggggaacctgatcggtcaacctaaatacagtaccgtgatagcttcggaggacgtcgatgtaacgcgacccacgtttagagtctcgaacgctaaagggaagaaacctaattaagtgtgcgcaaatggtgggagcaatcacgatctcaccaatgcagttaaacgttctggtactcaaccagcgatgtgtacgaacggaccaatgagaccctgatc

SEQ ID NO: 323964 - DNA, 102 bp, Zea mays
ggcttggaactttgggctgatttatgtgcttgatcaggttcagacatgtaagtggttcattccccacctacttctcttctctctctctctatatgagatata

SEQ ID NO: 323965 - DNA, 133 bp, Zea mays
tggcttggaaccattgggctgatttatgtgcttggaagaggctagggatatcgcttctgtacatcatacgaagactacttacatggggatgtattcgtagctgtcgaatcatgtggcttatcacgtgagtata

SEQ ID NO: 323966 - DNA, 407 bp, Zea mays
cttggcttggaacctttgggctgatttatgtgcttgagcctttctttccaccataactccttctagtgttgttgtctttagatattgagtgtgatcgtttaattttgacttggtgacttgctcttcctccccttcttccctcgttgcttttgactatctgtaattacggtggtggtagtaggtggaggtgtggcgtgcgtctcgctttagaaggagtaggatacatagacgacgtctgttgttgatgcttattccggtattaagaatcgtgacccttagatggagtgtcacgctcccaagtgttgccttgatggtactcatactactaactccggtaagatacgggacaaatcttagtccgtagtgagggccactgccgttactgagaatttgtaggatactactgc

SEQ ID NO: 323967 - DNA, 328 bp, Zea mays
tggcttggaaccgttgggctgatttatgtgcttgagattctagttagctgactgcctaagaaaaacattagtccattaataatagtaggagtaagtttatttgcctgatgatacggtttgttcgggtgttggtgttgcgccggtgtcttcagcggtggctgtggtggcggttgtgccttctgtggcgttggttcgggtgaagcttgaggagtcgagtgtgacggtgccgtcggtggtgaacggtggtagtcgtgtgggtttgtataagcgtctgggtgtggcgggtcagcgtcatgcggatgatgtggaggagtctggatcgagtggt

SEQ ID NO: 323968 - DNA, 301 bp, Zea mays
tggcttggaacctttgggctgatttatgtgcttgattatgtgcctgtttatgtgcctcattatgtgcttgtttatgtacttgtagatgtgcggctcgtatataatgtaagtctacggttgatctatgtggtcgaagttatgcctaagtacgatttgcctgaggcatttaattaatccaattgtctaccttatagacttgctgagaaggaagataccggtatgaggtgtgagacgacggtgatgatgatcaggaagctcaagcctagtgggttccgtagggtgatgaatttgactgattggc

SEQ ID NO: 323969 - DNA, 324 bp, Zea mays
tggttggaacctttgggctgatttatgtgcttgaaagtaatgctgtcacgaatgtccggtcgttataagttagccactttcgcggcaatcccctcgatattctcagtcctaaatcttgaaggctcaaaggactgacaggttatgtccctatggcctgcacctgcatcggaaactagaactaaatgagtccccatttccccgccttatatgagaccctcgcctctgccgagtctactccaggatattcgtgccactccccaatagaacgcgttgtttagttaaatcttttattcgataacgctccttgtttggactggtttggtg

SEQ ID NO: 323970 - DNA, 345 bp, Zea mays
ttggaacctttgggctgatttatgtgcttggcttgaggttgtgctttgtgagaaggcttaccctcttactcttaagcggatggacggtaaataggagaagtttatcgcttgtatagaacttgacgaacaaagtctcggcgttacagcggtacagcttccgtcatagacgacccgaagcgccgccgtaagcccttggaatacgtcacccagtcggtccgaccccacagctaacgtcgaacaacaaacatcccccatgataaccgctcccactgccgtcaaccgtatctgtttcattcgaactagctacgcgaataccacggaacgtcctagccccgcataaatcaa

SEQ ID NO: 323971 - DNA, 409 bp, Zea mays
tggttggaacctttgggctgatttatgtgcttgtttatgtgcttggagattagtagtagggaatactgcttacttgagtcaagcaaccaggctgaaaacgatttgcgttagtagtagcagtagtagttggtgcgcgatgtcggcatcgtctggctcttgttcgtcgtcctcggccggcgccgtgtaggtggcagcggagccggcgttcgtcgacgacaacactgttgttgttgtcgtcggtatggtggcggatgacggtgagttgttctagtagcgtgtgattttggcgagtgcggaggaggtgcgttgtggtgtgcttgagatgtatgttggtgcggttcatgattatcgtacggtgctgtcgggtgttgatttgtgtagtaaggaagttggtaataagaatacgtat

SEQ ID NO: 323972 - DNA, 380 bp, Zea mays
tgcttggacctttgggctgatttatgtgcttgtttatgtgcttgtttatgtgcttgggttgagcttgaatgggtgcgtgttacgtgtacgtgatgtcgatgagtaatgataattatagagtttaattggaaggaggactggcattagtctatggtggtgttcgtattatatgttggtggtggtgttggttattttttctttgataggtatgtcctccgtgttctccgcgggacgtcatcatggacaatgcatgtttaatttatgttcccggtggtggtttagccgaggtcattcgggttgtgcccatgttgatgttgcgctgtcgttcttgtagtggatggcgttggtaacctaagtcgtttgtcttatcgcgatttcct

SEQ ID NO: 323973 - DNA, 452 bp, Zea mays
tgcttggacctttgggctgatttatgtgcttgggtggttttgttactggtttggttaaggatatgtcgggttggtggcgggagattgatgttgtgcatgcgtagcttaaggaggtggcgaaggatgcgctggcgtttattagtattactaggccttttgatgggatgctttggtcggcggtgttggtgtcggcgcatgttagtgtcgttaggacggtggatgttgatgcggggagttttaatcctaattcgatgcggaaggcggatgcggatttgcttcctagtcattcggcttgttctcctcctgttgatactgcgagtaaggttattaatgattctcatcctgatgcgcatactggtgggtgtaaggttgcgcttgggtcggattcgctgatggcggttggtggtgagtcggtggtgtttcatcataaggatcctgcggcgaatctgctg

SEQ ID NO: 323974 - DNA, 327 bp, Zea mays
tggcttggaacctttgggctgatttatgtgcttgactatgataagacggtgcgtatagataacgtgacgagagttccgccttcttcgggttctccgcgtactgcgtacggcgagaaggaagagctaaagggtactgacgtgaaagtgcttgggttcggtgggcctcctgatactattaagctgggtgttcctggtaacggtaagatagatagtatgaaggtcgtgtaagaggtacgtatactggtgcgtggtggtatcgcgaagtagataacttctacatttaagggtgatccgtccgctggataatctaatcctataggtttccgt

SEQ ID NO: 323975 - DNA, 253 bp, Zea mays
ttggcttggaacctttggactgatttatgtgcttgattgaacttttagattaaacagccgttgttgctgttgctgtactatagtcattgcagctccaaggctttggattggacttacccttagatatttaaggataagacttactgtctgccttaattagatcctcctcctcctcgtcttactgcccgactctgccacttaccttagcataacttgacttagttaattgacgctaacgacggtgtcgaattcg

SEQ ID NO: 323976 - DNA, 376 bp, Zea mays
tggcttggaacctttgggctgatttatgtgcttggttacgctccttaacgtaggggctcatgcggacgttactgctggacgtatcggcgacgttgggacctgtagacatgggaatagtaatcgtaatgattggattaattatggaaacggactcggggcgactaagaaggttgaagttgatactgagacgcatacgtgcatggacaacactgaatctgacaatacggatgcatacacggagaacgtgtggctatacgcgcgatcggaatattaatggatgtagtggatagtgctactctgggtgtacatcttgtcgtctgagagagagactgattctcttaagtctgatacgtagaattacactgtctacgggatt

SEQ ID NO: 323977 - DNA, 294 bp, Zea mays
cccacgcgtccgcggacgcgtggggtcgcatcctttccggtttgccggttggggggcaaacgagaactaggaaagtgttaagtcttgctgaatcagtatttactcctttccagagttcgcggaagccggtcagggcctccgactttaatagcaataggcgttatagtaggacgcacaatgcgttactttggggatcctttgtgtggctggttcagtgattgagatagatttggaaagagtttgttttgctgaattgttattcaatactcactaaggcgtgtccctgtttacatg

SEQ ID NO: 323978 - DNA, 205 bp, Zea mays
gtctggtacagctgctgctgaaagctgtatttggaccacatgtcgatccgacgtgacatgaggactgcgctagctgtcaacagtcacggacacaccagcttggcttttgctaacaccaaattcatatgatcgttacacgggaccaagatgaacaaggtcgacacgctcaagaagcccatggacttgaacatgtgcgtgaacgcac

SEQ ID NO: 323979 - DNA, 213 bp, Zea mays
cgcaggcgagggctctgctcaccagcaggatatcggtggctgtcgcccgatggaacagcaggatctgaggcagcgtattctgcggctgctccatgagggcaacggtactgtccaagagcacctggatggactgctacatcacgggaagttaaccatgcagcacgcatacttgaggacgtacatatggattgctgatagccgacgaccgactca

SEQ ID NO: 323980 - DNA, 339 bp, Zea mays
  unsure (1)..(339): unsure at all n locations
ccgtccggaacgagaagcaatagcaaagcaccggaccggacgtgtacgggtctctgcacgccgggcccgtcgcgtcgcggtcncgcgcgcgccggacaccatcccgcggcaagtaatgagggccccccgggcccggcgccgcgtctctcgcccgcnncggcgcctggcgcgccctgctgctggcnncgcgacacttcctgnngcggccggccctggttgaccgacngnntcctcccttggggcgccgtnnacctgctgctncgccgcnntggccctggggtcgctgccnnngtgcctggccgnngcggtgacncnngcgccgnngcggggtccccgggt

SEQ ID NO: 323981 - DNA, 68 bp, Zea mays
cttgttcgcacaaaaaaaaaaaaaaaaaaatttaaaaataaaaaaaaaaaaaaagaaaaaagagaaaa

SEQ ID NO: 323982 - DNA, 55 bp, Zea mays
aaaaaaaaaaaaaaaaaaaaaaaaaaaaaatttaaaaaaaaaaaaaaaaaaaaaa

SEQ ID NO: 323983 - DNA, 52 bp, Zea mays
ccgtccgcccacgccgtgccgctgcctctcgacgcttggaatctatggcgat

SEQ ID NO: 323984 - DNA, 433 bp, Zea mays
cccacgcgtccgcccacgcgtccggagacttatgtctcacatgaacaaactgatgacgagggcagcgggcagaccacctttagctacgaccgcttggtatcaaagtatactgacgctgtcaacgggatacgaccacaggctcacagagacatatttggtggacaatgagttcgagaccgagtttgtgatgaccaaagaggagttgtacgagcagtcaaggtgtaagcatgagttgcggaacaagaaagctgatcttttgtgaacttacacacacgggtaggtacgacacaaagccctcgcgttgcgcatcgacagctgtagtacagcaatctcaccatgctcggtataccgatgcgtgatcatcatgagctttatacgtgagttggatactctctatctgcacacgttttgagcgccttatatatattactat

SEQ ID NO: 323985 - DNA, 338 bp, Zea mays
gcaatttgaataaaataattgtagcccttgttggatgttgtgtttaattttataagcaagggcggggagatcggtcttcaaagtctattttcgtcatgttgcacgtgtgatttgccaggaagacggggcgaattcgtggtgctacctaaaagagaccccatctggtgcggttctggggttcgaggagcggcgaggcaggtgggaaatgagggatgtggtcgtggttgacgaagattgcgtccgcgtgcttgggcccggtccggaggtgcgcgcgtacgaagaaggatgatgacgacagcgataatggccgcggcgtcgccgacgacctgctgtggtcg

SEQ ID NO: 323986 - DNA, 470 bp, Zea mays
gagcgcacacacacacaaccagatctcccctaaatccacccgtcggcacctccgcttcaagatgcagatctttgtgaaaaccctgaccggcaagactatcaccctcgaggtggagtcgtctgacaccattgacaacgttaaggccaagatccaggacaaggagggcatccccccagaccagcagcggctcatcttcgctggcaaacagcttgaggacgggcgcacgcttgctgactacaacatccagaaggagagcaccctccaccttgtgctccgcctcaggggaggcatgcagatctttgtgaaaaccctgaccggcaagactatcaccctcgaggtggagtcctctgacaccattgacaacgtcaaggccaagatccaggacaaggagggcatcccttcagaccagcagcggctcatctttgctgggaagcagcttgaagactggcgcacgcttgccgactacaaca

SEQ ID NO: 323987 - DNA, 465 bp, Zea mays
cacgcccagcttagctcagctcaggtagctatagttagctagagagctggacgacccccgggcgacctcagatagatttttaatggaggcgccagcagcgccacctccgtcgtacgacggcggcggcggctacgtcctcgtcgacctgtccctgacgctgggcccgaccgcgacgccacaccctgccgcctcctcctctcctgagcctgaccacacaccagccgccgccgccgccggttccagttccgccggcgtgcggctgttcccgtgcctcttctgcaacaagaagttcctcaagtcgcaagcgctcggcggccaccagaacgcgcacaagaaggagaggagcgtggggtggaacgcccacctctacctcccgccgccggccgcggacacggcgtcggcgtcggtcgccggcgccgacgtcgctcgtgccgcgacgacgcccgtcggcagcagccacgcgct

SEQ ID NO: 323988 - DNA, 84 bp, Zea mays
aaaaaaaaaaaaaaaaaaaaaaaaaaaaaattataaaaaaaaaaaaaaaaaaaaaaaaaaacagaaacggaaaaaaggacacct

SEQ ID NO: 323989 - DNA, 314 bp, Zea mays
accatacgtcctctacccctcgcctgggttcaaactctccccagcccgggctgcctacgagaggctattcatgaccctcaacgcccgcctttcctcctagctcccacatttattgcagatccaacccattgagcctcaccttaattcacctctccaacatgacagtcaacaccaatatcaaactaccactccgcatggcgcccacttaatcccttccacggaacgccagctaactaccctacccaccttcaccgctcaacttcaacaccgcgcaccaccccatctacgagcccaccacacccatgatgtcctta

SEQ ID NO: 323990 - DNA, 53 bp, Zea mays
tgcacgcctggcctgggctggccgtctccgtccaccgtacgtcctccaccgcg

SEQ ID NO: 323991 - DNA, 110 bp, Zea mays
cggacgcgtgggcggacgcgtgggcggacgcttgggaaaaaaaaaaaaaaaaaaaaaaaaagagaaaggtaaaaaaaaaaaaaagaaaaaaaaagcctgcctatttatat

SEQ ID NO: 323992 - DNA, 226 bp, Zea mays
aaaaaaacaagaaaaaaaaaaaaaaaaaaatttcaatttcaaataaaaaaactacaaaaaaggggactgtataaaatacatacagacaataaaagtccggcgctgtcgctctttacacctcacgtttacctacatctgattccaacgctttatcctttctctaccttaacctaattcaattttactatcccgacaattacaacactttgcatattcttaacctttc

SEQ ID NO: 323993 - DNA, 445 bp, Zea mays
ctaattaaacaatgagcaatttcttgtttatcatgcaaagaaaacatgttttgcacggtatagatgtactggaggcatgcaaattctataatgttttgagaggtcaaattttacatattgagttgtggacttggacatttgacaaaaaagagtgaggaaagaagtgcgcttcagttattaacttgttagtatggctggacatctctcttgagtggatgcacctaatacactgcaaaatatgtttttaacaaaaagtttgtttgaccttgtcctgacccatgaccttacatattgccgttcaagtaatcccagcaacaggtttaacaaccgtggtggtttccaagctggtcgaagccgtggccagttccagagctgggggagaggccgtggtcagttccagagccgggggagaggccgtgcccagttccaaggacgaaggagaggc

SEQ ID NO: 323994 - DNA, 384 bp, Zea mays
tcgactagtctctagcatcgcgagcgggcctaccctttttttcttttctttttttctttttttattttatacggttttcgtttcagataaccgcggattagccatcttgtcaaacgatcaggatctaaaacactggagtcaagatccaacatcgtccatgttcaaacaactaggccctacccatcaccctagggggctccacattattcgacttgctgcacgggtcctattcagttgatcaccatacacgcctgcatagcggctcacgcgactcactagcgcggggcccatgcgcccacaacttattacgactcgtcaccaaccaaccaaaccaagccacccagcacgtgcactccaagcgtgtgagctgtgctctgctctacc

SEQ ID NO: 323995 - DNA, 236 bp, Zea mays
gcagaaggtcatggacactggcctggtgtataacatgacggacatggtttacgtgccggacgtgttccggctcaagtacacggtcgactaggcgagcacgatcatgtacacgaagatgtccgtgtagtgcgccaagctgtgaacgcttgtacaggaggaccttaactaccagttcatcaacgtcatcctcaaccagatggacttcaacgcgactgtcaaccggaacgtcaataacg

SEQ ID NO: 323996 - DNA, 271 bp, Zea mays
cccacgcgtccgcccacgcgtacgcccacgtttccgcccacgcgtccgaaaaaaaaaaaaagaaaaaagtaaaaaaaaaaaaaaaaaaaaaaaaaaaaaaaaaaaaaaaaaaaaaaataaaaaaaatgaaaaaaaaaataaaaaagaacagcctttttaaaggactaaatttaatgaaattttcattcaaaggacataatattaatttagggccgcctaaattcaattaagttacctagattaaaaaactctttcattgtaaataatctgg

SEQ ID NO: 323997 - DNA, 448 bp, Zea mays
cttggaaccttgggctgatttatgtgcttgtttatgtgcttgcttatgtgcttgcttatgtgcttgtttatgtgcttgtttatgtgcttgtggatgtgctgtggttggttctgttctatatctttgtttgctcttggtgacctacttatttaacaaagcacttaatttcaatgacttggactgttccattttgtgctacttatgtgaaccgacctgaccacttctggaccccttttgcccccccgcgggcccttcactcctcctgactggagcgtcagggcccgggtgtgtctggcgggtggtgcatcttagggctactgccagccggatgggtcagggcgtccctctattggtggaagggaagtgaacttaaatgacggagaagaagaaggcggtgactttgtcggcgcgttatggctatctgtggttggcggcggactctcctcat

SEQ ID NO: 323998 - DNA, 487 bp, Zea mays
ggcttggaacctttgggctgatttatgtgcttgaatcgggtcctgttctcgtcgagagataagaggaggcctgcgaagtcggttgatttgccgtcgggtaataggcatttagcgaaggtgtcgcattaggtgtctgttgctgtgcttacgcgttcgtaggaggatgtcgttagttggttggggactagtgatgctgctgtggtgtctcttccttctgttgatttgtaacatcatttctttggaggtatggaagtcgaatataagagtatgtacagtgggatagataacgacagtagcttcttcaggattgaaacggctagggtagatgatgatacgaagtacagacgattgcagagggggagtcaaccaatgggaaatacggtaaagggaggacccgtagagtcgctcgctcgtctctcctaactccttccctgcacaaggcatattatgcaggtaggacgcaatactacctagagagccaccgatt

SEQ ID NO: 323999 - DNA, 423 bp, Zea mays
tggcttggaacctttgggctgatttatgtgcttgtagtaagtacctcgtaactcttaggaaggtcgtttttaagaggattcaacacgaaccacggcggaaggcccggaggtggttgcggcggcagaggacacgacgttccggcgggcaaacgcactaaaaccagactcggtttccacaagggacattgcggttgcgccaaagaggcgatcggcgtatctgcatgcgcagagtccgacctaccgacgaagaccgctatagccaaaagagacgacaccgtcgatatattcatagctgtgatgttaccttgcgaattctgccacctaccgggtggcgaaatattaacgtatttgctctgaatattatactacgtccactagatcttaacgtggggatttcggaataataataaactacgacggaac

SEQ ID NO: 324000 - DNA, 504 bp, Zea mays
tggcttggaacctttgggctgatttatgtgcttgtttatgtgcttgtgtttgcgcattagggttatggtgatgcggatgcgcggctgtttgcgtctcttggttttggtgcttttcctgtgtttcattctgttgatgtgtcttgttaggatcgttaggtgggtcattctgcttcttaggctaaggctgatggttgtgcgtggcggaaggctggtagtcggactcttggttatcattattctcctgctattcgttttgtgccttctgctattgttggtggtaatggtgtttttggtgtccttgggcctaggccttagattattatgcatcgttatgctgaggcccaaccaggagtgagaggaagtagagattacggtcattctctcagtcgtcgtcttcgttgccgttcggcgcggcaacaatctctctcactctctctctctctctcgcttgtcgtcggtgccatcatcgtagcagcgtagcgacgtgggacgcaaaggaggggc

SEQ ID NO: 324001 - DNA, 328 bp, Zea mays
tggcttggaacctttgggctgatttatgtgcttgcctatgtacatgcatttgtgtcacacggggaaattacagtcttcggctgtcataaggcatcaataactcgctcttgcttgccacgatcgtttacttattgatatatcggattgaatgacctagacatatacgaaactccctctcttcgtatggccgacggagttgcactgcacgtcactgctagatattagcgagtcattaaaactacggggaaggagatcgtctagcggattattctctgactcgtgattgtccccggttgaatcggctgtgtcgacgagcgtatacgtgctc

SEQ ID NO: 324002 - DNA, 514 bp, Zea mays
cttggcttggaacctttgggctgatttatgtgcttgtttatgtgcttgcttatgtgcttgtttatgtgcttgtttatgtgcttgtccaccccgtgattgactttacctttatgtaaaggtattgagtgcgactcttgcttgcgttgttacggttctgtattgggtgtcgtcgtcgtcgtcttctgttgttgtgtctgctgtcgtgtcggttgtcgctgtacttgttgatgatgttaatgttaagtttattacttcgatttttgcggtgtacattttgtcggggcttcctgatggtgataagttggttctcgatgatgatgttgctgatgatgatgaggatgttgctttcgctggtgtgtttaatggggttattacgatcgagtttagggatgatgcttttgctttgtttggtgttgaagtaattgtgggtggtgttgctgctagtaatgtgtttgctgtatctgttagtgttgtggtgtgtgctcgtgttgctgctgtggctgttgtgggagtt

SEQ ID NO: 324003 - DNA, 505 bp, Zea mays
ggcttggaacctttgggctgatttatgtgcttgtggatgtgcgggtggatgtgcgggtccggaagtgagggaggagagcggagggagagggaggagtgaggtattggcgagcctgggaggtggtgcggggtccgtatgttggtttcatttttagtctatctattatgtctccgctcgattaatctctctctctctccactcttccttaagacctttttacccccccgccgccgctttttttacctccgtcaggactaccttccgactccctgtctgtcttagcatgttcgccccttagtcttggagactttactctggttattcttcgtggctcgtaagtcttaagaggttagaccttagtatagacccgaggctaacccgtttgtcgagtctgaactaacttgtctggtaataagcgctacccgcctttttgacttttgggtcctgacctgactgaacttgattcaaccgcaccgtgcgcgcgcgcgcccaattcctctctgtc

SEQ ID NO: 324004 - DNA, 503 bp, Zea mays
cttggcttggaacctttgggctgatttatgtgcttgcggatgtgcgggtggatgtgcgggtggatgtgcgggtgaggagtataagctcacgcgtcatagttcctgcgcttacgcgtcatttcctcctaggcctcatagaggagtatagggatgatctcgtagtcctagtcgcataaatgtaatcaccaagaagcctaaggacgtatccgtgaagtataagttagacagacgcagtcccggtttaatttgggggtcagatgaactggagccaccagttccggtagtaaataaggaatcgtagcctattcatattagggagttagaatcgatctttaggggagacatttttggggaggctaccgtctttgagtttgtaaagtccttcgttgtcataaagttcccggctaagtcggggctggaggaaaggctaccggctctcttaggaagacgagatggcttgacgtccttgcctcgcacagccttacggcctcggacgcgcatag

SEQ ID NO: 324005 - DNA, 407 bp, Zea mays
tgcttggaacctttgggctgatttatgtgcttgtcaactaaacctccgccgggacacaccttcttaaccttttcttcatctttaataaggtaataataactcgccttggttgttaaataaaattaaaaaaaaaatatatcgaatttaacaacttgactttatagaaatcccctctctggcttgcctgactgactgtcgttgcgctgcccgttacatattactagtatttaaaattacggttcgtaattcggtctagcgtgttattgctgctgtggtgattgctgtgttttgtattttctgtttcgtcgtgcttgtgcttgctcttcctcatgtgaggaagttggtgggtggtagttcgtggtcgtagtggtaggtgcgtcgtcagttgctggcggtgttgctgtggg

SEQ ID NO: 324006 - DNA, 416 bp, Zea mays
ggcttggaacgtttgggctgctttatgtgcttgtttatgtgcttggcctcagactgcgagtggttgattccctccgcccccccctgggataagggtttaataacacggctagcgtaccaacacacacagtggtgcaaataggcgtgactgctggagagcctatacgaactaatactgtaacatctatatatatatcgctctaatcggtgatcggtgcgtgcgaagtgactaaaatcgatttacgacggaaacatcggcaataccaatgcctaataagtgacgaatcgacagacaccacgacgcactatcgtgggattggaggaaggaatatgtgtgtaggtggtttcgtagatggaggagtctacgcgaagaggcatttaatcgtggttatactcagtgcgtctcgaaagagtgtt

SEQ ID NO: 324007 - DNA, 230 bp, Zea mays
tggcttggaacctttgggctgatttatgtgcttggaagaagagaaactccgggtttgagtagatcgaaacgtttgagggaaaaatttaagataacggttttccttaagtatgtccactaaattactaatttcaatacaccaagggatcgattcaacctatattttgaaaccaattggccggaaggaactgcctaccttttgggttaagctgtaatttagtaccccttgga

SEQ ID NO: 324008 - DNA, 425 bp, Zea mays
tggcttggaacctttgggctgatttatgtgcttgtttatgtgcttgaaacccaattccgcaacgtagtactcgagcctctccctttaaaatgcgcgtgtcgacacacttccacgttccgacagcgtctcctggcggccaccgagcctctctagtacgccaaaaaaaaaaacgaaaaagggtggttgtctcagaggacttaagtccatgcatgtgcgtacgtcatgctacagtctcctcacagcgctattcaaacctaacctatcggttgctgccccataatgcttagatcgggaaaatttcggtgccatttaatccaactgttccgtaatatactttttccctgctagtcggtgctacagtaaagaggcttgtattgactgtttcccttaatagccgtgtcattcgaacggtgaacgggatctgt

SEQ ID NO: 324009 - DNA, 344 bp, Zea mays
tggaactttgggctagatttagtgcatgttcacactttcctgttattactatacctagttagttaatacacacgctgtgtgctatagtcgtggcgtctccacatacttctgttgccgtcgtttctagtgtggataaagttttggtagagctattgaaggaaggtagcgtcgttaaggtattcgagctcgataagagaatcgtcgtttttgtcgaagtatttgaagttgtacctatatatgctgctgttgtcgttttactgttggtgcacacgaagctcggcgtagtcattgagttagttattgttcacatatttttcgaccttatggatgaggagccgagtttc

SEQ ID NO: 324010 - DNA, 501 bp, Zea mays
  unsure (1)..(501): unsure at all n locations
ttgcttggaaccttgggctgatttatgtgcctgtggatgtgcgggtggatgtgcgggtggatgtgcgggtggatgtgcgggtggatgtgcgggtggatgtgcgggtggatgtgcgggtggatgtgcggggtgtatattattgtacggaaccgtctctgatgtttgaccgagttgagtgacgcgagagaccgggagattacgtttctcttttgttattacggacctttgttcgcgcggttaatcgggtatcggaggacggtcccggtgtcctattggctaatcgggactacgtttagggtttgcgggacgacgtgagcccggtcgggagaacggagtcttgttgtagggttgtacgttgctgcgatcagttacgttattgntccttttgtcgtgtgaggatctgcgctactcgaaaagtaagccggcattcggacctctaagcgttaggagaagaataggcggcctaggaggagttataaggtgaggagcacgactcgactc

SEQ ID NO: 324011 - DNA, 326 bp, Zea mays
tttgggctgatttatgtgcctgtggatctgcgggtggatctgcgggtggatctgcgggaaaaaatacaaatagatataaaaatgggatatacggataaatatacgggatagatctacggaatgtatattaaatgtacggaaccgtctctgatgtttgaccgacttgagtgacgcgagagacctgcagattacgtttcactttagttattaccgacctttgttcgcgcggttaatcgggtatcgcaggacggtccccgtgtcctattggctaatcgggactacgtttagagttttcgggacgacattagccccctcggtagaacgga

SEQ ID NO: 324012 - DNA, 503 bp, Zea mays
tggcttggaacctttgggctgatttatgtgcttgaataatcccgtgctcctttgaactggggttcttattactcttaatcgtaattttattttacattgttgttgttcttgtcagggccccggagcgaggactgttgacgctgatggtctttaggtgttttccttgaggttgtggtgttttgtttttcggtattggtcatgcctgttgtggttttgttttcgttttaggttttgttgatcgtgttaagatttcgtgtaagtttgctcctattattgctgattagtcgtgtttttagatgtatggctatatttctattgcttgtgctactcttgtttgtattgcttctgataagtttcctatgtatactggttgtatttgtgctgtagagcgttctgctggagatagtattggtattgcttctgctattgcttgtaatgaataggccgattcctcgaagttagacataatagcgactccttgtaatgtcaagaccgatacgcct

SEQ ID NO: 324013 - DNA, 487 bp, Zea mays
tggcttggaacctttgggctgatttatgtgcttgtggatgtgcgggtaagtgagaagtgattgatctttgttgttgccgttagttacggatggtggcgatgattctgttgtttcgtatgagtaggctgtttctgtacctcttgttgttactctggttcttgattctgattccgttccttagtcttaggctgttgaggttacttaagttctttctggtccgtttaacgttgttgttttgctactactgctgtaagttgttttagagctacttcttgatgttattcatgttcctgttgcttaggttgttgactctgtgtgtgtagaggaggattgttgtgatgttgaggttcgttgagttgctaatgtttgagttgctgctaatgtttgtgctgctgtgtatgatgtttctcctgtttgtgattctgtcgttacttttgaggaatagcgggattatgatggtgatcatcctgagtgttttgctgagctt

SEQ ID NO: 324014 - DNA, 227 bp, Zea mays
gcttggaccttgggctgattagtgctgagttggggtgcgtggactgcggttgctcctggggttgtgtagtgcggggggttgggacatgacgagggagtctgtcagcgatgtagtccactgtgcggcgtcgtcccggtggggttgaactgctatgttgttgctcaatcggtatgtctcgcggtcattgagattgtttcggcgctgcgctaccgtagtagaatgtgtgg

SEQ ID NO: 324015 - DNA, 505 bp, Zea mays
gcttggaacctttgggctgatttatgtgcttggcatggctcgccggaacggaccaggcgcggtcagccccggcccggcgtacttctgcacgcgtccccgtaggaagacccctgcagggggcgcagtccgggagataatcgaagaaatacctataaagtacccctagaagcacggagtcacaatcgacctcgcgactacgaaggataagtacatcaggacgttctgtggacccggacccgccataccccttgacttactcgcgtccgatagggcctcagaggacgaatacgctacagacggaagaatagccgaagctaaaaggatcgccttaaaagaggaaacgctactgaaagatggcttcaagataaaaaagactcccgcgggcggcaccttattactctccattgaagacaaaccaaaggagtatcctctactgcacgggaaggcggccgagtactagaccacgtccgattacagtatcggatgtctatgcggtcccggaccc

SEQ ID NO: 324016 - DNA, 483 bp, Zea mays
tggcttggaacctttgggctgatttatgtgcttggtaagcattttgtcgggtagaagactgcgccttatactgagaagggtcgtaattttaatcatgcggttgcgtcggcgaagcccgcggtggatgacggtgatactgcgtcgacggaaacttaggataagccgctggtcgagcggaagtttacgaagtctctccggggtgttactcggaggacggatatcgttaaggtgtctaagggttttcctctcacttgttctattagtgagcttggtaagaaggctactgtcaaagatactactttggtgaatcggagatttgacgttgctcatatccttaatgcttaacctcatcagatcccgaaccgttcctgacctacttggtgtggtgggtcacggattcgtagtagtaagtcaaccaagccggttgacacacacacaacacacaacggaagtttcgggtcccgaccaccggggaagttttta

SEQ ID NO: 324017 - DNA, 262 bp, Zea mays
gcttggaactttgggctgatttatgtgcttgttcgcgctggccctgggcataggcatttccccgccgaaggctgcctgagtccccttcgggagcacggtacgggccatacatcctagtgttgcagtgttcggcacgagttctgcggagaagtaacggtcagcttatggggtctacatcctagtgtcgtagtgtccggcatctggattctggtctgaggtacccctctcattttcctccatttcgaaaaagtagggctattcc

SEQ ID NO: 324018 - DNA, 495 bp, Zea mays
  unsure (1)..(495): unsure at all n locations
tggcttggaacctttgggctgatttatgtgcttgggatctcgtagatagctcgcctggaagttccctaaattggaatattttttagtagagcgtttggaagaaactcacggatgctccgaagagaaggtccaaggaccccagtcaaggaacaaaccgtcggtatcagtacacagcactcactccccagaccctaatccttctgatcatcccctcaggcaggctgacccgctcccgcaggcgaagcgctgacccgctcgcgagagcgagattatacgaagtcagagagagaagacgttaacaagtcacctaggtcgttgtcgtcctgcgtccttgccttatcggttgggcggtccgaccgcccacgtagatccggtcaacaagtcacctagagtcagtttcntaacccgtccaagatagcgattcgngtgcgagaagggaaggaagatggtagtacacttgatagtgatgccctctgatgtcacgtcgtccatgac

SEQ ID NO: 324019 - DNA, 301 bp, Zea mays
ctttgggctgatttatgtgcttgtggatgtgcgggcgaggacacgaagaccatgcgaaagaatcctacgtacgtctcgaggggttgagcacctcagccagaagacggtgtgcactgatgtcatagactcgctcgactctccggttcctgatctagactcacatgcggagacgcgtagggcgcactcatatacttcgtcgaagaatcctgcccgcaaggccgagatcatcccatgggctagatcccgccgtctatcgcgactgctcgatatccgtgtatccccagcctgccgacgcagccgt

SEQ ID NO: 324020 - DNA, 487 bp, Zea mays
cttggaacctttgggctgatttatgtgcttgtttatgtgcttgtttatgtgcttgtggatgtgcgggactcaaagcctaatgtttgtattgtaagtgtaatatgttaatatttgagatttgatgtggttcctgttcctttcttgtgtgagggagacctgaggggagagaggcctctattcctgtgttcgtggccgtccggtgtagagctgctgtagacggattggcattagagggcggagaagttgtgggaggagcttttcactggtgttaatgagacttgtactatggtgtacggttggttttgtaatcatactattcacgtgtctgtttcgtcttaggataacgtaatagacgataccgctactaaggttacgggaagggtgactaataagatagccgttactgcggagtcctccaagagaaggaccgtcggctcttactagaacattctcaccgaacttaccgacacaatagatatccgggagt

SEQ ID NO: 324021 - DNA, 427 bp, Zea mays
gaacctttgggctgatttatgtgcctgcttatgtgcctggttatgtgcttggctagcaaataggtaaacggtttaacgcttgattacggccgcagttgcatctgcggacgtcactgaggacctgatgaccttagatcgtgttgacgttaattcggaattcgtatgcagtctcattgcgggtagtgtttgcattcctggttcctacaaggcagagatttgaagtcatgagaaattagtcatttctgtcggactctccggcctaggtgagaacgttactcataggccaatgacccgcaggaacttcgtccctgatggcacgaaaataacggggacgcgtcgaataactaactctacttttaggcgatagtaccgagctctttatatggacgccattgggcacagacggataccgtccgccttacagtct

SEQ ID NO: 324022 - DNA, 498 bp, Zea mays
cttggaactttgggctgatttatgtgcttgtttatgtgcttgcttatgtgcttcgttattattgttctgttctgctcttgtctctccttctggataaagttggggttgcctggtgggaggtaggggatgtatgggtaggtagttacgaatggtactaattttaatggtgggccttcgctgcatgggaatacggagagtcatgtgacgcgggcggtgattggtgcggtgctggttcctcctgtgctttctgagtgtcgtcttcgtacttattcctatattgtggaggatgatggtgctgaggaggaggaggattctgaggaggtttgttgtcttcctctttgtttgactttcgagcatcatcatgattggcttggtcttcttgttcctgctgttaagacgcgattcgattgaattgtgttccttcttgcttaagaaacgtgcggcgacatgacttgccctcggactcaccacgcgtctccgtccgacctgccgagctct

SEQ ID NO: 324023 - DNA, 474 bp, Zea mays
tggcttggaacctttgggctgatttatgtgcttgtggatgtgcgggtaaactcctggtccgccttctttcgcctcgaacgaaagccgtagatcgccagaacgtctaacgtgttccatacctaaaccctaaggttcgaccgaggccgaaacaaacatccgaaggttagactcgccttccacgcagtccgtccttttctgctcaggggtggagggagtcctcagccaggaacgtcggaccagcccgagaagccgtagatcgccagaacgtctaacgttcagcctcagctgtgagtggttgtctcagaggacttaagtccatgcatgtgcgtacgtgatgctacagtctcctcacagcgctattcaaacctaacctatcggttgctgccccataatgctgcgatcgggaaaatttcggtgccatttaatccaactgttccgtagtatactttttccctgttagtcggtgcaacagtg

SEQ ID NO: 324024 - DNA, 474 bp, Zea mays
tggcttggaacctttgggctgatttatgtgcttgggtcgttgctttctgtggagggggtggagtttggggatgtgttcgagcttaaggagcctgttgtggtgttgggtagtgtgaagtttgttgttagtgttgggcgtggtaatgatgttaagagagttgttgcgccttggagttatgagagtggtcttggaagtagtcttagtaatcctcttcctgttcctttaacatcggtggagatgctgttgaggaagaaggattctgctaatattgtgtcgcattagttgtcggagaaggagcgtgaatagttgttgctgctgttgctgttgtagtagtagtagtctgagttttttgcgctggttcctacggagacgatgatggaggaggagtggtggagtagtgatattgggcgtcgtcgtcgtggtcgtcgtcggcctgaccgtcttcggcggcattggcgttagcggcggtgacgt

SEQ ID NO: 324025 - DNA, 402 bp, Zea mays
gcttggaacctttgggctgatttatgtgcttcgttatgtgcttgtatgttcagtcctctcccttaaaagtacggtgcctatcgtttctctaccgtcacattattctctgactatcgcactgtccgcttcagtctgcggtaccactacagttggcgccgccgatacagtcttatgctttatcttctcattctccttcttgtagttatcctccgtatttctcttgatcttctgcttcttaggctccggggttttcatctgtatcttcttctccttctccttctccttccttttcaggttattatgtatcttgttcataatgatcttctccttatgcttacggccgggggtattcctcttcgtttgcgccttctgcttcttatggtctggagtatttttctgcat

SEQ ID NO: 324026 - DNA, 507 bp, Zea mays
  unsure (1)..(507): unsure at all n locations
tggcttggaacctttgggctgatttatgtgcttgtgccccctacttgttcctgttcttaattgtgcgtgtcttatgttcttcttaggaaagtgagagtcctcgtacaagaataataaactaaaagtgcgactagtctggcgttaataaaattctaataattaagccctacgctcgactctgatgcttagtccttactcgttcccgacttgcccgtcgaggtaaacgtcgaggatctcggcgtcggcttcggaatgaaggaccacgcgtacgcgtgtacttagtagtgtaatggtagaaagagctcgatcatagcttagggctcgaagaaagagcctagtcacaataagacttctaaggactcgaagaaggaacctcgtcgtaacggcatcgcagcctaggatttagagtcaggttaggctacctagtcttaaggcgactagtgtangaacgccgtcatcccttcagcctaagtcgggaacgtgaagaaggagaatactaagacctat

SEQ ID NO: 324027 - DNA, 464 bp, Zea mays
tggcttggaacctttgggctgatttatgtgcttgtttatgtgcctggaaagaatctgaactaacaaataggtagcacttacccgaattctcgaggcgctcagataaaattccgaagtcgatccacgaagaaggaacctaaacgccgaaggaagttggaatagaaactgagttcacgggcgattctaacattgaagtcgagaaaaaatccggctggtccgctagggaaaagcacgatatagacccccctacttcgcactggcacttcccggtcgcatgcttgcctcatattacgttccgccacgataatttagtgcatattaacctccccgacgctcctacctgaggtgaggagacaacactcggagtataaaggacatatatcttcgagtcgtcggttaaatgtgtgatagaacgcggaactgatgcgagtatcactctggttcataccgaacttcctagtcac

SEQ ID NO: 324028 - DNA, 172 bp, Zea mays
cccccaaccccccaacctaccaaaaggccccaaggggcgcgatattattttaaacacggaacaactaacgaactcttcacgtacctttaacccaactacggttttaccccaaaacgaccttccacccccaaggaccacttaaacacacgacatatacggaccaacctcacgg

SEQ ID NO: 324029 - DNA, 390 bp, Zea mays
tggcttggaacctttgggctgatttatgtgcttgtttatgtgcttggctatatactcgcctaaatcggtctgtgaatacgttttccataccatgtgcagcgactaaaccgacctcccacgtcgataatgcggcgaatgctatgaaaggggagtacgcaagaggaccaggatcgaatcctgccgagtaaacgtagggggtcggattacaacgatgacaaagacgctgactccagtcgatatgaacatgttacacgtcgcggattaggtcgcgtcgagagaatacgctaagtccactcatgccatgacattcgatatgaacgtgaggtagtacacgtccaatgcgtacgactttgacatatcatatagtccagtcgattgtgacctatagag

SEQ ID NO: 324030 - DNA, 490 bp, Zea mays
tggcttggaacctttgggctgatttatgtgcttgtaggccgtcccctccaaactaagaaaacgccccgctaagacagtcacatagctcggacgcttcccagctttagcccctcgtcccgggtagagtcacgtacataagcggcggaggttcggcggcaaaccgcccactaagactgtcagagtagccaaacccatcttcaccactcctcgggacagacccggtatattaccttttcctttaaaatttacgtacgcggctgcgggcaaattaaccgaagctaacaagaccttttacttcataaccgatgagataaccgtaatagcacgtacgcctccggtgggaaaagccgaagaaatatttagattctcgaaggacgctacaatctccctacacgagactaccttataaaaaggacttcgtcgtagcctaatgaaccacatagaatgaagcccacgaataataaagggaatcaaccccatctggggaatg

SEQ ID NO: 324031 - DNA, 506 bp, Zea mays
gttggaacctttgggctgatttatgtgcttgggtgaggaggatagggagttgagtgtaagagtcgaggtcctgttgtgaaattttagattctgtgttgttttccttttcttgtggtgctgcttctgtatgtctcttgacttaagacgcacaagtcggggagaggaaattgtgataaggcgtagtagcctacgattaccattggtgttagcgagaaggccgtttcctaggtatcgaaagtcagcgaccggtatccggaaggagtccccgatcctcctcacagttaattctaggccctcgcggctaacatctggtactccgaagacacccctaatagacacaaagaattcgacgtcgacacgacaacggcggaaggaacactctaaccccgtaacgactcataggccgacttctaggacaccgctacgtccgctacactacggtatacgaaagttgttataacgcgcgaacccatctgctaggaacctaacggcggatcgtagctaac

SEQ ID NO: 324032 - DNA, 374 bp, Zea mays
ggcttggaacctttgggctgatttatgtgcttgtttatgtgcttgagaagttgattacttctacgaataggcatgagtctgggtgtatgtctgggtagggtattcctgttaaggcgcattatggttggaattctgtgcttggtgagagtgcggttactaaggctactgataaggagaaggcgacgtgtgctggtacgactgattagactaagtgtgagactcttgctacgtgttctgcctgctattttaatgctgcgtagtcgtatgaggcgacggttagtaagagtaagacacatcctgttacggagcatgcctggggtggtgagtctcctcgttgtgctcgttgtgggtggtctaaggaggatattgtgaga

SEQ ID NO: 324033 - DNA, 515 bp, Zea mays
ggcttggaacctttgggctgatttatgtgcctgagatatttaccggaaactcgcaccctcaacccgccgggggacatcaggtgcacgaatcaggactcacgtagcgggaatcacactagatagccacctaaaaacgcattcgaatattaacagcatgccggagaatgccgtcctgattaggaccatcactcctgactcgaaatctcgacaagtagaaccgaagataaatgactgggcatccggggaacacggaacccacccatcgacggcccattcagcatccgttcattagttaggtgttttacgggatgatggtaaagacatagctctgggcaccaggacggtaaaggtagtgacagacaaacctcatcttaagcacacgccgggactatgcaagtcggcgtccgatttatacctaatgactcccggtaaaaggacgtccgctaaaagcgtgactacgcgtcaccttaacaatatacgacagactagcttctgaggaaggctcataggggttt

SEQ ID NO: 324034 - DNA, 295 bp, Zea mays
tggcttggaacctttgggccgattgatgtgcctgcagacgttgttggtacagtaaacgttgtagtaagccagatgagtacacgacgtagttcaactatcgtcgctcgaaaaggcaagacactgcaacgacgaccgaagcgacgtcacctccgatgcagaggacgtttcaaccgacgtcgataggacggagactgagaacatcacggataccgcgtgacaagagacgaatgtctccggtagatgctgactaactagctagggcgagagatactcatgcgatatactcgaatcccac

SEQ ID NO: 324035 - DNA, 504 bp, Zea mays
ggcttggaacctttgggctgatttatgtgcttgcttatgtgcttgtttatgtgcttgtttatgtgcttgcttatgtgcttgacggataatctcccagggtgtccggcgcacctgtatagaggaaaactaattctataaagactgaaagctgcttatataaggagaggttctcctgagcactcgacgatcgccttctatctccaaagaaccccgaccattctccccatgccgattccgaagtactaacggtcgacttaaagacctagaacgtctccggaaactcgaaggagcccgtaattcccccaagagcttctggaagtcacttcataaacgcgaacgaattccagaaaatatcgtagaccatacgacggaccagtaggaacggatgaaacggcccgagccggcctctcgagtaggccgataagcgaggattctcacgaagtcgacgtcaatacccatagagtaaaaggactcacaccagagtagcacagaagggcggacgcg

SEQ ID NO: 324036 - DNA, 444 bp, Zea mays
tggcttggaacctttgggctgatttatgtgcttgggtatggtggtgtagggtatggatgatacggatcataaggagtttttgttggtgttgtctcctgagtttggggagtctaagcttcggcttcctcattgtgttggtactgttgagcctgctgttattccttctccttctcatactcttacttctattgctacgggtgctcttaagcttattcttaagcgtgttattgctggtacttagggtactgttcggcttcctggtggtacgactcctgtttctgctcatcgtattgctggtactcttggtgggtatactaatttggtggcgattcctgggtcgccttcggtgaggaagccgctttctattagggtggggccccatactactacgtagcgttcgcgtgttacccgtggtgtgggtgcggctaacgggccctagtaggg

SEQ ID NO: 324037 - DNA, 499 bp, Zea mays
ttggcttggaacctttgggctgatttatgtgcttgtgcatgtctgtacggatgatgacggacttgcttattgccgttaccgtagccgttctgtctgcctccggcgatcgccgtcgtggcggctgatccggaagatgctattcgtattgtcgcctttacacaccaccgacgcgactcgacacgaccacacacgtacggcgatgggcccacgacaaccttacagatacaacccaacccaacccacgcacccgcgctaagctgcctcgcaactacgtgacgaaacacacgacccggccccttacccgcccgaaaaaaaaaagaatcccaaaaagtaaaataaatagaacgaaaaaaaagggtggttgtctcagaggacttaagtccatgcatgtgcgtacgtgatgctacagtctcctcacagcgctattcaaacctaacctatcggttgctgccccataatgctgcgatcgggaaaatttcggtgccatttaatccaactg

SEQ ID NO: 324038 - DNA, 396 bp, Zea mays
tggcttggaacctttgggctgatttatgtgcttgtttatgtgcttgcttatgtgcttgtaagacttctccggagcctaaggaagaaaaaccccagggtgaggaaaacacggacgttgcgaggcgcgggtcggctttccgctcgggaactgctccgccgccgtctcgcggaattgccgcctagacatcgtcaatgccataacgaaatcgttagtagcaggttccgacgggcacgtcgttcacctcgccagggactcgcggaagtacgaaatctcactggaaaacgctgcacgaatccccggtgtctaagccgatgcgtacgatattaagacgcatactcccctcttcgtaattaccgctgtcctggaccgactaggattggcggacttaagaccata

SEQ ID NO: 324039 - DNA, 481 bp, Zea mays
  unsure (1)..(481): unsure at all n locations
tggcttggaacctttgggctgatttatgtgcttgtggatgtgcgggtggatgtgcgggtgcttacttgagtcaagcaaccaggctgaaaacgatttgcgttagtagtagcagtagtagttggtgcgcgatgtcggcatcgtctggctcttgttcgtcgtcctcggccggcgccgtgtaggtggcagcggagccggcgttcgtcgacgacaacactgttgttgttgtcgtcggtatggtggcggatgacggtgagttgttctagtagcgtgtgattttggcgagtgcggaggaggtgcgttgtggtgtgcttgagatgtatgttggtgcggttcatgattatcgtacggtgctgtcgggtgttgatttgtgtagtaaggaggttggtaataagaatacgtatgggtcggtggcgtcggttattaggacggttactgattatgttgntagtattgagcttaagactgatgattctgtggagtc

SEQ ID NO: 324040 - DNA, 518 bp, Zea mays
tggcttggaacctttgggctgatttatgtgcttgtcatgctgagtttgaggattgtaagggtgctcctcggcataataagaagcctcagttgttgttgtctgtagagtcgaggatgtcattgcaggaacgggagtagaaattaggaggaggagatggcatctgttttaaagctcttgctaattcactcaactgccagctgctagctccccagatgggaagagagactacccgggtatagagatgaaggtccatcgtagcgttactgtcagagtcgttactaagcataagcaggtaaacctgctaatccagcgcgctttacgccgccccctccagctgcttgtcgtcgcaggtcccttggtggtggctgcccgcgcggccggtacttgcggttacgttcgcgtgcgtgcggttgtgtccgctgcgcgtgctcgctgctgtgccggtgctgctctcctgcgtcttttgcgcgccgccgcaaaataggaagacgcccctcggcgctcccggtggaacaata

SEQ ID NO: 324041 - DNA, 492 bp, Zea mays
cttggcttggaacctttgggctgatttatgtgcttgtcggtccgcactttctctctgctctcttagtcatggtagttggtgaaggccatttgaaagttgaattgaacaaccgaagttcaagttggaagtaccggttccaccgaaaagttcaagacttccgcttcccaagaattttccaccgtgggtcctccgtccaccggccgaacttgctccccctccctaataaccggcttggttacctccgaaccaacggaaaattgcggataaggcctccttatctcctccaaagagacgggccttaggcgctattggtaagaaaaagccgcgaatctgtacggcccctctacgttaacgccgttttatacccctccttttgcgcccccctcggtgattagaccggaaggtcccctttaagagctatggctccgaatctcacacggcacttgtggaacaactaccgcattcgaactacacatcgtaacgcggtagccc

SEQ ID NO: 324042 - DNA, 485 bp, Zea mays
tggcttggaacctttgggctgatttatgtgcttgactaaacttatggcccaacaatgaattgcgccaatccattacaataataatctaaccttcactgaaccttccttcactgaaccttcacagcaaaaccttcacaggacagaatgcatatagggcgcatataccacacacgaacgaaatacacctaccaatccaagtacatcttcccccccacccaacgagccgacaccaaccaaacactcccccccccagacccccgtaaaggccctacccatgttcaacttacactgagcagatttcgctgccgcgagaacctccaacctacgagccgcagggagggatccacgctattataaatagaaatcaaagtaagcgccggacccaaagtcggcgccaaggaccacaaaccgatccatcatattttggagcatgaaattaaggacatcgacactccggtagtaccttgagcaatcttctagtctgg

SEQ ID NO: 324043 - DNA, 468 bp, Zea mays
tggcttggaacctttgggctgatttatgtgcttggagataagtggtggtagtgagtagtaagttttgttggaagatgagaataaggagaaagagtggtagtcggttaaggagaaggtgcatgtggtggagaaggctgcttagtaggagacgtctaagcatgttaaggagaagggctcggcgcttttgattaatggtatggggcggcataggggtactgtttgggagcctgcggatgtttataatgagtcttgtgtgtgtcatggtgcgttcgttacgaagcgcgataattagtcggtgtggtaggtgtggtgtcggcttaatgttacgtgtaaggatcgttagacttcttatagtggttatgagcatggtcagagtgcgcctaggagtcatgatgatcggaatgttattgttagggaggttgctcctcggcggggtaaggaggaggttactcatgataaggataagga

SEQ ID NO: 324044 - DNA, 406 bp, Zea mays
gcttggaacctttgggctgatttatgtgcttgttgatgtgcggatctcaacatcgcctcgtaccacccccacggtattcgccgttgccaaagacttacggatatgcatagcattaacatacgaactcctatagcctatacaaaacaacctcgtcgatccgcgaataaagtaaatacaacaacctaacccggaaatacgcaactcgatcaagacacagccggactataaggatacggcttacgacagcgttacttatcatcacggtaagtgttccgctatcgctctcctagatcccattgcgaagactgctaataccggcgtcgtaaacgttttacttcaggcatccctaatgtcaagcggttatcacggcttcgcgcggtgcgccgtccgcatttacgtaaagcac

SEQ ID NO: 324045 - DNA, 501 bp, Zea mays
gcttggacctttgggctgatttatgtgcttgagacaaccggaagtcgtcctagtcctccgatcgcgctccatatcagcaaacccgccgctcatactacgacataccaacattcctccaaaactcacatcgtacggcatcccacacaaaccatcccgaccgcacataccactcaaacaacatatcaaaggcaaaaaaatgacccccccacgaacctagccaacctgcacacacataaaaacaaagcaagaaacgcgaccaagcccgaaacgccagccccatgaccgcgttatccggcccacgaacactcgcgcacgcatccccaagagcaaaataatagtacgccaaggttcaagcgtactcaagccacctcacacccaccgactacaaccaataacaaaatatgaggaggtcgtaaaccgccctaccacccctcctcctgcttgacgcagtactttacccacgcgcgtctctctttccaccccgccgacaaacaaccaaaa

SEQ ID NO: 324046 - DNA, 498 bp, Zea mays
  unsure (1)..(498): unsure at all n locations
ggcttggaacctttgggctgatttatgtgcttgaggaacccgactcctgagcggtcccgttctcgggcgcgtcgaacggcgtctctaatgttggagcggtcgtgggagctacttacttaccggaaaggggactcgtaggactcgctctattatccgcagaaagacccaatccgggcggcaacagggtctctgcgcgttgtccgggcggattactcctatcaccaggtcctaaaataagagggtcatgggtagtaatagagcttagaatatacgattttaatatcttcggtaacggtatccttttccttttcgagtcaaacggctccggaggcgaagcagtggcgatagttcccgttgattcgctacccgactcgttctcgaagttgtctagggagtcgggaacttacggctacgttcccgctcgcgtcggaaactcnggcagaccaatggagcgcgactcgtggaagcctctcgccatcgaaccttcgtagatgccta

SEQ ID NO: 324047 - DNA, 247 bp, Zea mays
ttggaactttgggctgatttagtgcttgggtaattacacgtagtggtgacggtcggcgcattggatcagtacatgcccattgttacgacagagatcactgagttcaagtatgtgtccacgtactgacgtgcgtgtatcatatttcacatagattcctatccataaggagggcgattacatagggttcataaaacgggttatatccgtacaaggatcgtcacgcgcgtgatatcggataccgactagc

SEQ ID NO: 324048 - DNA, 405 bp, Zea mays
tggcttggaactttgggctgatttatgtgcttgtttatgtgcttgtttatgtgcttgtcagtcacgcagtcgaacctggagttaggtctgagtgaggggggggtggaggtgagacggattatgtggtggatgtgtattggatggattcgacgattactatgtggtatgcgtcgaatgagtagagttggaattttgagctttgtggtgatcctattacttcgtctctttatactgcttctggtcgtaagcctgctgttcttgttgctaataaggttgggtctgtttagtctactgggtctgttggtgagattaatgcgtacggagaggagtagaagaagtcggatgcttcgcttaatgaggcgcctgctaaggtttctgctagtagtggctgtattcgtgcttccg

SEQ ID NO: 324049 - DNA, 496 bp, Zea mays
cttggaacctttgggctgatttatgtgcttcgttatgtgcgtggataagcactctgcaattccctgggtcttctccttcacttctgtgcctttggattaaatttcaacttgagtatttagtgccttaggtttcatttgtccttctctgtgttggttcccggggtctctatttcgagtggcaggaacttgtacggtcttagccgggcgttagaagtacttaagctgccggtgggagattgggaaacggtggaaaaagagggggtgagagccggggtggaagacacggaagagtgggagtaggaaagggaggtggacgatgcggatgcgaagacctgctgacctgatggtcttgatactcgttttgagtgtcgtgatgctggtattattattgctgttgactctaaggactgtgcagctgatgatcggtttaaagacggattcaccactttaaaggtcgtcagcgacgctaaatcaacaagtgcgggtatcaactcag

SEQ ID NO: 324050 - DNA, 513 bp, Zea mays
  unsure (1)..(513): unsure at all n locations
tgcttggaacctttgggctgatttatgtgcttgttaggactacgcgggattagtcttgacgaagtccccttaccccctccaggtacgtaatcttgacgaagtcgtcggttacgctgcttcttgttggttcacccttacggttatgataaaaccgaggactggccattattcattcgtgcttactggacgaattcacgctgtcgtcgtccaatcgtataccgagaccgagaccgcgcggccgctgtcgtcgtccaatcgtataccgagaccgagaccgcgcggcgccccgccctaggcctagttctattgttcatcgcggggaggataataccgcagccccagatcgtcgtctcataagcattcatcgtttcatcctacccctagggcgtttccaccctcaagttcgcacgacctggtcagtagacgctatcgcactccccctattatcgcgccggaaggaggccataccgtanaaacgtaacgcgccttcggcctccgttcgtggcgggtcac

SEQ ID NO: 324051 - DNA, 505 bp, Zea mays
tggcttggaacctttgggctgatttatgtgcttgcttatgtgcttgcttatgtgcttgtctcctggcggagacaaacattaggagacgaggacgaaggctccagaaaccattagaacacaagccatgcaaagaaagattgctgctaaaaattactcttatactattaaacggacaaattactaaaaagtacctcagtccaactccggatagaacaacccctaaagtaccactacaactacaacactctagttacatctcagaaagaggccccattagacatgacacggacttacggtaaaagttaaccttaaagcgtaccctaataggggtcgtaaacgataggtaaatatcccaaaaggactcacgggatactagcggtaaatatcccaaaaggactcacgggatactagcgtaccctaagttactacttcctacggcgtagattcacaattaaagcactagacccccccacagtacccccaaggaaacaaggagtcggatagc

SEQ ID NO: 324052 - DNA, 480 bp, Zea mays
tggcttggaacctttgggctgatttatgtgcttgggaagcgcggacgctaaccgcggcgtacgcgtccgggctcagcgtcataaatcgcggagtatttaccttaagccgcgcagcgggccctgggcgttccggtgaacgttcccgtacttcaatattcaaagcggtggataccgtgcgaggtcggtcctatagagtagtgagcattgtttgttattagaggcggaaggacaacgagttgtcacgtctcaggttaaccagggaatacgcgtttctcacggcagattatcactccccaaacaaaaaaaaaaaaaaaaaaaaaaaaaaaaaaaaaaaaaagggtggttgtctcagaggacttaagtccatgcatgtgcgtacgtgatgctacagtctcctcacagcgctattcaaacctaacctatcggttgctgccccataatgctgcgatcgggaaaatttcggtgccatttaatccaact

SEQ ID NO: 324053 - DNA, 406 bp, Zea mays
gctccgaacctttgggctgacttatctgcttgtggatctccgactccaaatgatccgtacgcgcctgggcacatctccacaaatcgggaaccacgtaatacgaatacgcgtaagcgtaaggatacgttccagctaaagagtgccacacgcgatcagtattcgaacgatagctgatactatcgcatggtacggtactacggagtagatactgcagtgattgctatgactattaatattgcaagcacgccaggtgaccatcgtcctcttactcattgaatacatctctacggacaatacaatagcaccgattcgacgttttggttatcgtactagtactggtagttcacgctggcctaaggatcacaaggatgctatggacactaatgctcatgatcgtatgtccaac

SEQ ID NO: 324054 - DNA, 418 bp, Zea mays
gcgggcccccccccccccggccccccccccccccccccccccccccccccccccccccccccccccccccccccccccccccccccccccccccccccccttaaatccccggaggggcaaaacaaaaagggaaaacccggcggaaaaccccagaaaaaagggggccccggccaaaaatagccccccccaaaaaaagacccaacccaaaaggggcaaaacgttaaaaaattcgggggcaaagggcccggacccacccggaaaacccaaataactggcaaaaagagcccagggcccccaaataacgccaaaaaacgcccccaaacgcagcgaaaacacccccggcgaaaaacccttcccaaaaaacgtaaaacacatcaaaaaacggtcaccccagaatcgcaccaaacccaaccccccg

SEQ ID NO: 324055 - DNA, 282 bp, Zea mays
ttggcttggaccttggctgattagtgctgttagtgctgtcaccgactgggtcgttggctcggtcaggacctttctgttttcggcagaaactcgttggatccttcggttaccatgagtcgtatattgcgagtgtcgagacccggagagcgttattgagtaaaccttcgggggtgctaataaactggagtctggacgggacgtttgcggtattggcgtgttttacctgcatacgcggttcggtcgcgataacatgataactcgggtggtgaaccgtcggctagc

SEQ ID NO: 324056 - DNA, 491 bp, Zea mays
tggcttggaacctttgggctgatttatgtgcttgggtaccctacccgtctaattaagtcttaacactagtacaagtgatactataggggagataagaggcggcctagggaccgttcccggaagcgagacgctaggcggtacactggaagcatgggtcgcgggttcttgtaccgctaatctttcctatgggactagaactaagatggttttggggtgtggagggcatgcggagaacgcgcatacagtagacgcgagtacggataacgccctgacggttactaggactatcggaaatcatggcgaatacttcgacgataaacacgatagtatcgtctctttcgcgacaagtaacaccataactaaggacgccgccggtgccaataccggggccgtcggcacaccggaagggtacctaggggataaccctagtaatacccgctcgcttaacgccctttctagcgcgtaactcgtatacttacggaaccgcctat

SEQ ID NO: 324057 - DNA, 134 bp, Zea mays
tttcatatgctgtacctgtagttacgggcactgattctgccgttggcgggaggaataagaagattaagtgtatagggttgaagcttgatgacgcccactctaagtcttccgctaagtctcattgccctccggct

SEQ ID NO: 324058 - DNA, 495 bp, Zea mays
gcttggaacctttgggctgatttatgtgcttgggaatgaagacggtccgcccaccagcctagccgttcttagtctaaattcgcgggtcccaaccacggacgtcggtatcggccccatactctaagcacatgaatccctcagccatccctcctataaggaacggacaacggaatagcgggagagaaaccctcacactatcgtatcggtcggcgtgaacaacggaagtctcccggcgaccacgctaagaggaatataacacgtttagtagcttcataaagcaagcgacatacccttccctaaacggacaaataaaaaacggaaggagggtcctcacgctatcgtcacggtaatagtcggaagttgacgggtagccgctacgctttgtaacgtcggccctatcctctaggcagcggagtccgaccctccacacttaagcgagggtacttatacgtgccgggataacggtcactgtaccatggtaatggtcgttatacg

SEQ ID NO: 324059 - DNA, 489 bp, Zea mays
ggcttggaacctttgggctgatttatgtgcttgaaaaattagtagtcagtgacggtcggagtttgggtatcgtctactgcttctgtggtcgttgctgtggcttcggttgtgtggttggtgctcgtaggtgggggagttgtggtggcggtggagactcgtacgaagatcttgctttttgattcgcgtattaggatggtggggaagtatgttaataagcataaggcggcggatgtggcgatggcgtcagagacgtaggcggatgtgcctaagaagtgtgcgaaggtggtgtggaggtctgttaaggaggaggctaagatggttgtgatgtttgaggtgtggagggtgtcgaattctcgtaagattcatcattcggatgttgctgataattctggtgttcgtaagtgtgttactggtccttgtgatgttgctattacttgtgttatgacgagtacggcggtgtaggatatgtagaatcgtgatgaggagcct

SEQ ID NO: 324060 - DNA, 501 bp, Zea mays
ggcttggaacctttgggctgatttatgtgcttgtttatgtgcttgtaagactagtagagttgatgctaagcatttgtagcggcctcgtttcgagtcttggtggccgacgtttaagtcttctgaattgaatttaaataataggactatgactgagaagtcggctgagtattttcggcctaagaaggggcataggttggttgctacgtcggtatagttgtatggtcttagtagttctaaggacgcttaggctgttcctagtaatgttgattataaggatagtagtattaaggcggaatagttggtggatagtcttccgaagttggtgagttcgaatgtgcctgatactactctttatcttagagggcctgattcgctaagttcgcctgaggcggattaagagtagaaggttagtaatctgtggcctacgatttagaaattggtgctggtgacagcgctaaagtcggagtagactgtcgagatagagtgtcctacggcgaagaa

SEQ ID NO: 324061 - DNA, 505 bp, Zea mays
ggcttggaacctttgggctgatttatgtgcttgctgaaacttctctttctcgagtcagactcccgcctttacttacgtcgatgtattcgtgtcatgtaccttgcgtcgaaacttcctttcgtttcaaaccttgctgacggaagcttgaagggagtatagagcagaggcgaaacctacgttaatctacgttaatctgcctcagttgcggagttgtgtttgaggaggattgtcgcggctcgttgaggttggttggccgggtatgtgttgtgccgggacgtacggccgtcggggttagattgtgtttgttttcgtgttggacttgaggttgaggttgtgtttccgtttggaggtagagtagcctgtcgtctgcggttatgtggaggttgagtgggttcgttcgtgtgtgttgggcggtgaggttgaatatcatctatactcgcgcatacgtagctgtcggggagttaggcggtgccttagattacggcgcttactgtgatgtcgagct

SEQ ID NO: 324062 - DNA, 410 bp, Zea mays
  unsure (1)..(410): unsure at all n locations
tggcttggaacctttgggctgatttatgtgcttgtttatgtgcttgtagtcctctggtccacggcgttagagttagattgatgcgttcagcagtgcatcactccagtcctaagagattgatttaggtaagacttaccgactgacggagtcgtccttctcgtctatgcggtcttcttccgtgtatgtttcggttcgttcggttcggatggttgttgtgtggtgttggtagctctggcgtcattcttcggatcatgctcgttataagtttagtgatgattgtaagtcgcttatggagatggttggtaatgcgacttagtgtaatgtgtggtcggggtctattgatcattgtccttcctcntgtgctactgcttgtcttggtactggtgaggagattcatgttttgtgtaata

SEQ ID NO: 324063 - DNA, 385 bp, Zea mays
tggcttcgaacctttgggctgatttatgtgcttggatgagtacctctagctatagaaaaccctttgcggttggaccgaatacttctatgcgctattggcctatgaggaatccacttttatcctaacctacattttcggactatttcacctccgcgacgctttgacggccgaagaggttacagattttactcgtaatagttatggaatattattagacgagaagaccgttactattaacgtcaccacaaacgcacttaacggacttaagtttatatctcccgtcggtactacagtatccgcgacgagtactgtactgacggcttgctcgatttgtagtacgacgctcgggaaggcctctggagtcgttacaggcggagtcatttcc

SEQ ID NO: 324064 - DNA, 491 bp, Zea mays
  unsure (1)..(491): unsure at all n locations
tgcttggacctttgggctgatttatgtgcttggtgaggagagtctggagtgggagggcatgggttgctggacgtctgtagtcgttattgttgttcgatggtcaccccaattttgtgtcttcgttgatgttgtatctgtttttggttcttctttgttctttagactctgtctgtctggtgttagccgttctgtagcccggactactctacattctggtgaagacgagggagacttcgtatacttagggagggtaacgcggtaattagaccggtgttaagcctcgggaggcggcgcgtgacgaatacggtaccgatttcattgggtggcatatcggtaaccttgattcctagccggagtgcgccaacgctcatcataacgaagttcntcgtggatgtcccgccttttgtgtcgcctctacggactccgagttcgggataacggatagcgcttggattggatttcacgggtagactccttgtccgataatcccg

SEQ ID NO: 324065 - DNA, 518 bp, Zea mays
gcttggaacctttgggctgatttatgtgcttgcttatgtgcttgaaaagccacgggtcctagccctatcgcgtaccggacacgcaatccctcggcgggatcacccccctcggagtccgcgaataagcccggggccggagtagctcacgtaggccccggcggggctctttcgtcgatagtatctcccgttcataaccctacagccgaaataaaaggatgcctgtccgaggaaaccgagacgcttccgagtagcgtcattttcggtaagtaagagcagaatactctaaccgcacggataaatcgaataatcgatgggaggaacccaacaagagtagagggggttcaactttacgaactcctagtagtagtagcccgccgtaaataatactaatcttcacagacaacgagtataactaaacctagtcccctcccggcagtacgagaactgccgcataacaccaaaaagggcgaagaaaacgttttcccaaaacccgcccccccgcatactcgacgcacaca

SEQ ID NO: 324066 - DNA, 509 bp, Zea mays
  unsure (1)..(509): unsure at all n locations
tggcttggacctttgggctgatttatgtgcttgtttatgtgcttgaagctagtcctagtccgtcaaatagccctacggtgagatccggagtacgaacatcctaggcatccactacgctacactagatctaccccccggtctacccaccatcgaaccaaaccgggacgaaagctgaaacgtaaaatccccagacggaacgtagactcctcgactcctacccggccgtcttcctagcgaagttactatactagataaacggtaactacggtacctaaatccaatccgccagtctcttcgcgagtagtacgaagttggcctcttcccgaccactaatcggtcctcgcctgcaatagacccggtacgtagcggtaatccggctaggtacagacctctccgagcttaattttagcaggaactaaactaagacgtcctatanaacacgaaaaatcggcgatatacgtatgccgacggaagcattacgtcggtttacgaggagaaaacctagaaca

SEQ ID NO: 324067 - DNA, 468 bp, Zea mays
tttgggctgatttatgtgcgtgtataggtaagggtgtcaattaacaacagtaagcgcgactactctgccgacttactccgtcaacgatttcgtgcgtttcctgtctctgctctgactttgatgatgtctttcctggtcttggtaaattatactaagctgtgacggagacgaagaaggctgttcgtgttgcttctgttgctgctgttcatggtattgcggcttctgttgatgaggttttggtgtttgtgtttattagtgttcgtctggtcgtgcctttggatgctggtgttgcgtcgagtgttcctgcgtctcttcctcctgatcatcattcgtagcataaccaatggaggactggagggagaggtcgtcggtcgttaccgttcgcacctggccggactttgcccacacacacacacacacacccaagcatcccaacccgtgctctgatacgctgatcgacttacctac

SEQ ID NO: 324068 - DNA, 452 bp, Zea mays
ggcttggaacctttgggctgatttatgtgcttgcttatgtgcttgcttatgtgcctgtgctgttaatgttaacaaacatatttgtgggcgtgagtttacagaatgtcgtaggggtgtgtgtcgactattaagtacacatacacagtatactgaccctccaccaccgtacgtatgcccacacaagcgtctaccgctccgtcgccgcaagcgttagtataagtacacacatggtgcccacacacatcatacatcttgactgcctaaaaaaaaaaaaaaaaaaaaaaaaaaaaaaaaaaaaaaaaaagaaaaaaaaaaaaaaaaaaagaaaaaaaacagaaacgaaataaagaaaacacaaaacaaaaaaaaaaaaaaaaaaacaaaccaaacgacaacacaaaaccaaaccaaccgaaagcaaaccgggtggcggcccgacgggaaaaatccgc

SEQ ID NO: 324069 - DNA, 504 bp, Zea mays
ggcttggaacctttgggctgatttatgtgcttgactaatcctcggatggtgggtactgagggtgggcggggtcggtgtactgggtcggggtctgttgcttagaagccgactaggcctgttgttaggacgttgacggcggctactagtcggaatttgacgccgattagcgtgcgcgtctacttgcgtatgttggtaacggcgcttcttgtttgcgtgtctactggttcttctgctgttgtggttctttctgttgctgtgtctctggacggtggtgggacggtggtgttcgcgcatgggcatgtggtggggagttttaatgggttggagaatcgggggaagtcgagttttgtgcataagtcgcgtggcgaggggaagtagtagcttttgactgatactgctattaagtaggttgcttttgttgctagttctgatatttctaactgtattcatggtgttattaatgttatgtctactaatgacggttatgatactatgtcggtgtcg

SEQ ID NO: 324070 - DNA, 490 bp, Zea mays
  unsure (1)..(490): unsure at all n locations
tggcttggaacctttgggctgatttatgtgcttgagaatgttatttctgcgcttcttgctactattggttctgctaatgctcctcttattcctgctgtgactgttattgttgataagactggatgttgtgtgtctccttcgtagggtggtatgtagacgactactctttagacttccgcggggatgcctactgggtcgtagcctggtacgagtgggatgggtgatactctggagtagcatgttacgcgtactgcgtcgcctgcgcgtgcgcatgcggttggtcctgtgcggctgcgggggtttacggggcggtcggcttttagtgagactcatttgtcggttgcgtggctggtggtgacgagtgctatggcggttgctaatacgcctcctatggttcctactgggtagactccttctatgtcgtctcgttattcntgtcctggttctcctcatcctcctggtgttcgggcgtcgtctacgatatctccta

SEQ ID NO: 324071 - DNA, 378 bp, Zea mays
cccacgcgtccgcccacgcgtccgcccacgcgtccgcccacgcgtccgcccacgcgtccgcccacgcgtccgggccggcctcgcctcacactcccgcccgcctccggcgattcatccacccaataaagtatccaaccctaacgatccggatcgccttaccccgcgtcatccacgcgaattgattcgattatcctcggattttccccgtttttttgtgggtttcctatcttcttcgatcggagtgctagggtttgggcgcgctcggtgggcggcgtactccagggtcatcgttagttggacgggctagggtgctttctcaccgggggaagggaagcgaatccaaacgatggagaagaagaaggtggcgatcccgctggt

SEQ ID NO: 324072 - DNA, 359 bp, Zea mays
gacccaagcgtccgccgcgctgtggagcggcggagagcaatccttctcttgtcaggcacgcctctggcgctcttgtggaggagccgcgtgccgacgagccatgcagatacggggtaacaacctaaccgacatgtgctgactcgtgatcaaagcaagattatagttcaagttggaatcatggcactgtagtagatatagagctatcacatagacttggcgcacgaatctgactgcggctactatggcaagcgccttgacactgcctttggagacttcaccgagaagatcgtcaacattggtgctgcaaatgccccattccaggtccttgcaacgctaagaggccactataggaccgcgtg

SEQ ID NO: 324073 - DNA, 308 bp, Zea mays
ctcacgcgttcgtacccacgatataggtggaaaccatagctcctggtcggatcacgctactaacgtcggtctccgtccgttctgactgcccatccaccgagcactggaccgacgatccgagtccacatgaaatccttctcttctgcaaggttgactgaccgtatgcgtatgctagctcagaacctagagtaccaaatcatggcaagggactgctcagtgcacggagttctgatctgcgatcgcttttgcccgaactggtcgcgctgatgagtgcacatgcgtctgattctgagtcaggaaaacatgat

SEQ ID NO: 324074 - DNA, 377 bp, Zea mays
cccacgcgtccggttctagatcgcgagcggccgcccttttttttttttttttgagaacaagtccccaacaatatactcactgcattaatatatatagcggtgtaaacaggttgatcgttggagagtacacatgaatcaacaacccaagacacacacacacactctcccaactggcgactcgcgtgcgtgaagcgatcaaaacacacccaagatgaaaatactggtaaaattcaagtacaagaagcgatgaactggtatatattattatgtatcactccgggaccgggggcggcaacacgcgcgcggccggccctgcagccggaggagctcagctgaagaggtacccaacggcggccacagcgagcgtgccggcagcg

SEQ ID NO: 324075 - DNA, 199 bp, Zea mays
cggaatggcagaatcgacccaagcgtcccgccacgcgtgcgaaatacaaccttgaaatgcttgatttgatgactgtttcccaatacgtatgcacggatatatacttaagccttgatactgctattcggtgagcaattgaactctctaagcatgtactatatctcaaaagaaagtatggcaggccgcatctatgaagtaa

SEQ ID NO: 324076 - DNA, 303 bp, Zea mays
cggacgcgtgggcggacgcgtgggcggacgcgtgggcggacgcgtgggcggacgcgtgggcggacgcgtgggcggacgcgtgggcggacgcgtggggcgcacaccaccgcatggaattgctctcgacgcccgattgagccgagcgatgtgagagattgggagaccatgccctctccccgccaccatggattcccgcctgtgtggccaactgggcactggaggatggctttggcgcttcaccggtcaactgggatcatgcccagggcccgtgggatgatgcgagtttggctgggagaatggagc

SEQ ID NO: 324077 - DNA, 252 bp, Zea mays
cggacgcgtgggcggacgcgtgggcggtcgcgtgggaaaaaaaaaaaaaaaaaaaaaagaaaagaaaaaaaaaaaaaaaaaaaaaaaaaaaaaaaaaaaaaaataaaaaaaaaaaaaaaaaaaataaaaataaaaaataaaaaaaaaaaaaagaaataaaaaattgatgaagtcgaagtagaatgcatcacatttttgcaaagaaaaagttaaatatatatcttgtcaaaaaagatttaaatgatcttattt

SEQ ID NO: 324078 - DNA, 273 bp, Zea mays
gcaccgcaagattcagaggaggacaaggcagagctcacggggctgcggaagccatggccaccaccgaggagaaggctctccttgtactcactaggcaaggaggggcgaaggcgccgcaggaagggaacgccgccaccgccatgcccgccgccacttgtaatctccgcgatgctctagctagctacagtacataacaatgcaatgagcgagcgaccggcaattcaaactccaatgccgtatgtaatcggtaagtaaagtacctgatcattaagt

SEQ ID NO: 324079 - DNA, 391 bp, Zea mays
ggactctgcagacagtctgttcggaagcctttcaatccggaacaccccccatcagagtgccggtaggaaatctatggacgtcttgaagagaaggcttaaagattgtaactaaggaataaatcgctggcactatcatatagtatctatctcttagatttcaacttcctcaactgctttactagagttggtcgacttgtctttgtaggagaagtgtctatacatctcgagagagtgacaccacatgaagctagacagagacgacgcctataagctattcaggctgacgatgctttacgcttacattccactggccgactggctcgaccgcttatgcagacttggctaatctgctattcagagctagcgccttcgattcgcttaagacagtgac

SEQ ID NO: 324080 - DNA, 257 bp, Zea mays
cggacgcgtgggcaaatcttcggcttgttcctccctgttctgaatgaaagttgcagactgttagaatgctcaatgcgccttacattcaaatttcaaggcctgattgaggttgaaataaatacttgaaggccagatctgttccttatgtagcttgcttcccctcgtctaggggcggagggagcttctagttaggaatgctggattagtttgagaagttgcagactgttagaatgctcaatgcctagttctagtcgcga

SEQ ID NO: 324081 - DNA, 318 bp, Zea mays
ggctgccgtacctggacgacggacccgtttccgacgacacgcctggttccacggacatgggcgccgcggcgggcgacctgaaggcgcgtgagatccgcatgctcggccgcatctctgacatagagctcgcgttgcagaaccaccagatcgggtcgctatgcatctccagcgacttctcatagaaaggcgaagtactcgcggagactaccgagaggaatatggacgtcgtcatgaccgcgctctgcctgccggactataacgagcgccaacagcccgccgagtactatgacccgtaccatcaggagctgcagccgcctg

SEQ ID NO: 324082 - DNA, 82 bp, Zea mays
attatattgtacctaagtattacttggcgtcccatgaatccgttgtaaatatcaagttgtaatttctactatcttcgttctc

SEQ ID NO: 324083 - DNA, 272 bp, Zea mays
tcgaagatgccgaaagcatagaaaataccgttacaagttaaaccagcatatgatgctgcctgatcactgctgtctgaaaaggtcagatatcgtgatgatgatggaatggattctattcttgacgtagatgatgtcctaattgatgctgacaggatggataacgatattactatggacattgtgcgataagagatgaacgcttgtggcagacgatgatcaatcagtcagggtgagagacttctacgtgacatatctgaagtttatgttgacac

SEQ ID NO: 324084 - DNA, 80 bp, Zea mays
aaaaaaaaaaaaaaaaaaaaaaaaaacaattttaaaaaaaaaaaaaaaaaaaaaaaaaaaaaagaaaatttgtcagacga

SEQ ID NO: 324085 - DNA, 273 bp, Zea mays
cgtacgcgcgcatggacgacgatggatccgtccaccgttgccattgcagttgcctcgctcgttcttggtgactgttgctgcggtggtcgacttggaagacgtcacctgcaccgctgttcccatatattattgatgtgatctgatatgattatatatgcatggtgacgggtttatgataattccatagacataatttaatttaatttatgtatttgtgtcaagtcgttctgtaatcatgcgatgaaatatatgatttggttttccatttgtttg

SEQ ID NO: 324086 - DNA, 207 bp, Zea mays
ctgacgcgttggcggacgcgtgggcgtactttttatctatatcagtgggagctaaatgacgggagggaccatatctacccacggacggtctctcacggtcattactgggggcagcgccatgatgccgttgtgtatattctacgttcacatagtggtcgtcgtacacatccaccacttactccaggagcgctacttctgtgacaaata

SEQ ID NO: 324087 - DNA, 439 bp, Zea mays
agataattggaagctgcttcagcttcttgactgtgtcttacactagtaaatttcttgtctacatcatgatacattaataccttcttaaaatctatactgcatggtactttatataaattactttgattgtatacattatctaaataatacactaaaggtaaaaaaacgatttttttatgaattcagttaattcgtatatatacaaaaataaagtaagaaatgtgattaagtttgaaatgttagttttacgattgtgccacttggtttatgaatatctgtgtatgtacttttaagagtaaaacaacagcatgttaaggcctaagtgcatctaagttattctatatttattgatcataattaacaataaaacacgaggaagctgcaaattgtttcattattttcttcttcgtccgatgtagcattccatttatgtgtgctc

SEQ ID NO: 324088 - DNA, 218 bp, Zea mays
ggtccggaatctcccgggctcgatcccacagcgatccgggcagacgatactgcagcaggctgatgtgctgcgggtgacctggaacgagcctatgcgtttgagccggcatcacgctttgacgatccgtatcactaagtgcgcagcgtgtattgcatctgatccgatggctcacgtactaccctcatatcagacgctatcagtataacaacgtgagtggt

SEQ ID NO: 324089 - DNA, 366 bp, Zea mays
  unsure (1)..(366): unsure at all n locations
ccaggatcatgtgggaccagctccgatgaagcttttccatttttcttaggcatgcaactccgatgaagctgctggccatgtcgtcctccgccggcctatttccatggccacgacaaaattgaggatcggttaccacctacctgcgtccatcggatgaacctatgtcgctgctgcttaactgcacattgagattgagattgtgtggttgtcgctgctgcttaactgcacattgagattgagattgtgtggtgttttgtttcaggttcagcctcaccgnctactgtggggaggacaacattgtagttntagactgctgctctacaagtacctactggcctacttcattttcagggtgcccttatttct

SEQ ID NO: 324090 - DNA, 324 bp, Zea mays
cccacgcgttcgcccacgcgttcgcccacgcgttcgcggacgcgtgggttttttttttgtttttttttttttttttttttttttttttttttttttttttttttttttttttttttttttttttttttttttttttttttttttttttattttattaatttatttttataatggttaaatgatatttgaaattgagaaagaatggttgttgctgctgaataaatgtacattgagattgagattttgtttaaaaatgtttaaagttcaaaataaccgggtactgatgggaggacaatattggagatttttaaaaatgctgtaaaa

SEQ ID NO: 324091 - DNA, 271 bp, Zea mays
cgtcacgcgtcggctgtcgcatccgcggctttccgcgtccgggcacgcattccctcacgcgtgcggggaattgtcggcgggaccaggaccatgccatgacggaggctgtagaccactagcgctgctatacggacagtggcacatagcaaattgcatcgggacgtgaaccaatctgtagtcgcatggcgactgcaccttgaatacatggtgccacattatgacatacaacctaggtacgagcactaacctggtcttgacgcagaatttgtgg

SEQ ID NO: 324092 - DNA, 186 bp, Zea mays
taccggaattgcagggccgacccaagcgacccgtcctgttgctggcgccactgtactggatattctgttataagtccgctctgattgcaattaagccaggatgaccatagcccgtgctgggcttgctgaatcgataagttgcatgatcacaacttctgtacgtgtgaaaaaagagacaaagcaaaa

SEQ ID NO: 324093 - DNA, 421 bp, Zea mays
tcgaaatcctctccctctgagctagatctttgttcccatccatgctgacgcacctgcgctacgcattccgtgctgaaatccttccctgccctaaattccgtcgatggaagtccgaagggagcacagagtagaggtgaaattcatgccaactcatgccaactcgttctagccgtggagccgcgcccgaggaggaccgctgtggtctgccgaggccggccggttgggcacgcgccgcgttgggatgcatggttgctggggccagaccgcgcccgcccctgcgccggatccgaggccgaggccgcgcccttgcccggaggcagagcagttcgctgctcgtggccacgcggaggccgagcgggcctgcctgcgcgcgccgggtggcgaggccgaacactactcacatctgtgtacatgcagtcgc

SEQ ID NO: 324094 - DNA, 326 bp, Zea mays
gaattcccgacccacgcgtcccgtccagcatcctcagccacagaaaatgctctgtggtcggatggcacattcttacacgtcacgtattgacgagcaactcatgcacagttctatttatacccctggatcaccctatacttgcgatgtccctatggtacaagaggccatagacgccatatgtaggatccacggatcatcaccagatgagaagatagacatcacctaagctattataaagaggctcgactggatccaagcccgcactctttgctggcatcatagcactggtgatgagcaatctaaccatgatccgaatgacccgcaga

SEQ ID NO: 324095 - DNA, 427 bp, Zea mays
  unsure (1)..(427): unsure at all n locations
cccacgcgtccgaagtcagcttcagcttgctaaacagtttcatggcgagacttggagcatgaatacttcaggtacttatcatgtcatatcagactcattttttggctcatttattactgaattaaattgggatgaaagtcgaaatgcaaaacttttagatggaatgcagatcttctgatcttcatttggttgctccttcagtgaagccatcacatcagacaaatggcaatcatggcattcaaacttaacttgttagctctcctgtgagcagcatgaagccggttctcctttgattatcaactggcttctgttcgtaacagatttggcatgcagtggcaacttggtcaagcatagattctcttgagtccaaccccagtaggaatcaaatcaagatgcttcacanaatatgaaaaactggtgacacaag

SEQ ID NO: 324096 - DNA, 112 bp, Zea mays
accacgcgttcgccttatcaacttccgtaccgttgagtacccccaaaggcacgggtcggatcatcttcactgaatgtcggaaattctagaaccgtacccacactacataatc

SEQ ID NO: 324097 - DNA, 366 bp, Zea mays
  unsure (1)..(366): unsure at all n locations
atcaacttctggacggcgggcatcgagggcgggtggggctggcgcatcgggctggggctcgccgtccagaagttgatcaggttcgccgccaggatgccgatggtggtcatcagctggaacccgatgttgaccagtgcgtgtgctcatccgtgcacgccggcaatggtgtcctccgcccgtgcgctcatcggcctcctcgtcgccgcggcctccctcgccgtcgcgctctcggatggcggcgggatggcggcgcctgtgtacgggtacgcggcggggagccccaacgggccggagaactgggggaagctgagccccgcgtacaagctgtgcggngaggggaagcagcagtccccgatcgacatcgtc

SEQ ID NO: 324098 - DNA, 357 bp, Zea mays
agaacgcctccgtagagttcttcgatatcactggtctctgcaacgactcatccaactacggggagatcgataccgacgagcagatcggacaccgcgcactatttctgcaggaccgcacgcatatgatcatgtaccagatccttgtgtggacgctcatacggctggagctaggcatgaactggactggctacatgtaggatcaatacgccatgggcatcgagctgatagagtacgtgcaccgtgccgagcttacgatagctggtgggcccattgagtggctggaccacatcgagatctacccggtggcctagcagtaggcagggatgtgcgtcacggcaaccgaatacatgtacttca

SEQ ID NO: 324099 - DNA, 230 bp, Zea mays
  unsure (1)..(230): unsure at all n locations
gatctgtatggtgattgtaagatcgataattaggttcagtgagcgcgatngactcgattgtttgactggctcgaatttcgataatttgcataagcctgacgtaatacccgcctaccttccgcgctgaatacgcggcgaaaaaaagggaaacacacacgagtaccccccgcaccccccggttagccgcagtcgccatcattatgcaaatagcatgtaaagctgcctgtacc

SEQ ID NO: 324100 - DNA, 429 bp, Zea mays
ggttggaactttgggctgtttatgtgctgccggtttcttctattgtgctgcgcttactcagacttaaagtctctctcgcggtacgctgtagttacggtgaagaatcatttgattgcgagtgttgagcatagtgaggtcgcggataaggttaggtgtaagtcttgagtttctactgttgagaagagtcgtgttttgtctacgtcttgttctgtgcggtatcttgtggggatgcctgatgcgctgctgaggattggtggcttacctggtatgacgaagtactagctggaaccggtctatggtgtcaatgtggggtcggatactgtggcgtggtcgtctgagtttactaaggaggagcctttaacttccctccatgttgaccctcattagtctgtgggagccgcggttgcggaggctattggcgggttcgag

SEQ ID NO: 324101 - DNA, 474 bp, Zea mays
ggcttggaacctttgggctgatttatgtgcttgtggatgtgcgggtggatgtgcgggttactccttcttgttattacgtctactgttggggaggatcatttctccttctcttcctctttctctttctctttctctttcgcggccgatcattgggctgctggtgaagggtgaatgatgttacgttggtggacttacgtagggtcggacttataaaagtcggacttgcggagggccggacctctcccgcagggtcggacttacggagggagcgtatggtgtctgctgtttagtctgaggcgtgagggtacgctcattcatttgaggattcatgactctacttacgtggatctggcacctatttcgcataggaatagggagaagacttcttcggccgctaagatgcaccggatcatttacgaagttacgattaaaactagcagtaggatcgctaaactcaccaacgacacgaaagaa

SEQ ID NO: 324102 - DNA, 387 bp, Zea mays
ggcttggaacctttgggctgatttatgtgcttgtttatgtgcttgagactgtgagtggttctttcccccccccccccccccccccccctggtaggtaagtcaacgcagttacaaacgggtaaagacaacatagtaccctcccggcacataagcccacttccttgcacgatagaaccttagtccacgccggaatatcctcaagcccgcgttgtaactaatatcgtatactctacccaaaaaatgaaggttcaacagacgcagaaaccaaatcaaaactcgaaagtcctataaaacgcccgcacttgtcttctcagtacccccggcgccgcaaattatattctcggccattccaatcagaaataagtaatcaattcgcacaccaactcg

SEQ ID NO: 324103 - DNA, 330 bp, Zea mays
  unsure (1)..(330): unsure at all n locations
gcttgtggatttgcgggtcagcctcagactgttgagtggtttttccccccccccccccccatagtgaatgggttctgtaggttctgcgtccctagtctacgcaccatagcacctttcacggtttgcgctaagtatgtatgtatcacacaaaacatatccacacatacatacgatgcgcatcatgataatgatgaagaagaacgaatagtcagtagatgcattggtggttgacctataagcgcatagaaaatgactgatcttatcttaatcacatacacttcatcacggtcnccgtcataatttgacggactaaaaagtacgtacgtacgc

SEQ ID NO: 324104 - DNA, 175 bp, Zea mays
tagtgcgtggaagtttaattaccttttcttagacatcttgcgatattatgtgatgcggggatagattcgcatttgcctgcttattcttcctttgatgggatctcgcctactcctgttaatgattgtcttacttcgcctgattttaagaatggttaggctgcttgtgagccttttg

SEQ ID NO: 324105 - DNA, 324 bp, Zea mays
gggaaaatgtaagatttcagtatttttgttttgctgttgatggttgttggagcagagagacggtggcggatgaagcgaatctggctcatgctggtggttcctttcatgaggttaatgaggagacgtcctgtgatgttcctgggcatcatggtattactgctcttgctaaggcgaccaacgactacgtcgctaaaggtaagcgccacggccccgccatccctatctattttagagtcgtcgagtaagtaaccgtgggtacggatggtaagaaaccacgtaattgcaccgcctgagcaaacgaagcgtgcataagagtttttgtga

SEQ ID NO: 324106 - DNA, 391 bp, Zea mays
ggttggaacctttgggctgatttatgtgcttggtgtattgttcttttgcgcttttctccctctgtttggtattgctgagtctggtcgggaggtagaataaatttacgagttacggtgaatctggtgctggggacggttgcgagtgatgagcgtaagtctaagccttaggagtctaagctgaagtgaagtccttggcctactatgcctaagactaatgagtagatgtagtaggcggcggcggataggtcggggtagttgggtgatattcatgatgatcctattggtcttacgtttgagagtgagcgttgtcatgttgctcctgatcctgatcctattattgatgagaatcgttagaagagtaagactccgcctactcttcggcctttggata

SEQ ID NO: 324107 - DNA, 408 bp, Zea mays
ggttggaacctttgggctgatttatgtgcttgtttatgtgcttggaaataataagatcgatagtgatgacgacgttatagtcgtgcagggcggctctgtcggcttctgcggttatggttacagttgttgtctttggtgccgggcccgctgctattggttgtactcatcgtgataatcgttgtgttgggcctgagataaatgcgctttatgttacttaaggtgtgatggcggagacggagcgttgttatcctgagctgtagtaggcttatgataaggtggacgtgatgatgggttttggtggtcggcataggacggagactagtggtgattattaggatgagactcgtgatgcgtgttcgtctaagagttttgaggtggatcgtgttgagactgattatctttgtgatt

SEQ ID NO: 324108 - DNA, 244 bp, Zea mays
ggttggaatttgggctgttttgtgctgatgggacctatattagttccctgggttcgtttccccaagtcctgtggggtgtgtacgtcggtcggaatcgctcctagactacggtcacgtggtcgctagaatttggtctcctcgatctctctacacgtacgaatggaattacggcgctacgactctgctgctatttgggtagtggtgctggaatgagtcggtgtaatttaggtgtggctctggtcac

SEQ ID NO: 324109 - DNA, 332 bp, Zea mays
gcttgggcgaagtaagtagtatatgagatgacacagagggagggactacggtctctccttgcgttgttgtgctaggagggcctgtgtcgacttcctctgtgcgtcgtagttctactacgtcggtggtggtgctcggtggtggtggtgcggatgatgatggtgctggcggcgataggtcgacgacggattggccttctagtcggtaggtgatgcataattggctgcatttgatggtggaagagaggtagtggtggccttaggcgcattgttgtaataccgagtatactgaggttattaattgggtgggtaattcgatgcatatgtctggtgag

SEQ ID NO: 324110 - DNA, 455 bp, Zea mays
gttggaactttgggctgatttatgtgcttgtggatgtgcgggtggatgtgcgggtgtctgatattaaggttttgtctaagcatttttccggtagttgtcccgtcgctaagcttggcggtcattgtactgtcgatgatgctacttttgtcgaccctaaggttggtattattcacaagattatatctagtactcaactagttctcgacgacgaaccacaccctaaaagagtctattcggcgtctacgccagtaagataacacccccctcacggtcaccccgcggtattaaattatttaagaaacacgcgacgtcatacgctttcctcgacgttccgccgcgccgggccgacaccaccatacaaatcaaacaaaccacccacccaagaccccaaaaaaaaaaaaaaaagggtggttgtctcagaggacttaagtccatgcatgtgcgtacgtgatgct

SEQ ID NO: 324111 - DNA, 377 bp, Zea mays
gttggaactttgggctgatttatgtgcttgcaaaaactagaaccgaaaatggcccgaccaccgcccccgcccgaaaacatacgacacttggccccaccgatatctgctagatcgtctcctaccttttgccgtcgtaccagggtacgtttttgctacgcagtagcacccgactcgtcctcgtcctacgggcttatacttcggcactcccaccttacaacgacacacacaccaaccaataaatcaaaatacgcacccaccccaggggcccgctgattggacgagtccgtctcggtcggcgtacggacggaagaagtgggactagtcgatgttgctgaatccgtcgtctactagagataaggctgtgtctggtagtattt

SEQ ID NO: 324112 - DNA, 379 bp, Zea mays
tggaacctttgggctgatttatgtgcttgttagagggtgttgttgtacgcttatgtggttttaaggaaggcggtggtggggtgaggggggctcgtcccggctgtgctcgtttggactcagctgggccttaggaggcgggggtgatgcgcgcggggtggtgatttcctgttggtgtggtctggttctggtggtacttcggtggtagcgagtgtggtgcctgcacgctatccttgggtgccgtgggcttcggtcgggcgcttgtgtagtaagggggtacgtggttggttgcgggctgtacgtgtgaagaaggcgtcgctcggtgttttagggtagggagtggtgttgtgtgcggaggctcggaactcggcgtgtgcggggc

SEQ ID NO: 324113 - DNA, 416 bp, Zea mays
gcgctggtaagttgttgatgatccgatgcggggtgggggaaataaaataatgtgggtagtgttatggtaagtgtgctttcgttatggtgtggatatagagagcggaaattggaaggggggaagagagacggaccttcttattctggtggtggtggtaggggaggtggttgcgttgttggaggatgatgctcgtcttgctcgttatgattgtccttggactttgcgttaggtgaatcgtctttaccggcctcgcggagagcgtactacttgtgcccggaaccacggattcttcgcataggtccgtaagcgctttacccgctgttgttccacaaactcatcggcgttcgtcgtaccactagggtaggaggacggcttataagtctaatgcacctcaggagagacctagtatcacaatc

SEQ ID NO: 324114 - DNA, 467 bp, Zea mays
ggcttggaacctttgggctgatttatgtgcttgtttatgtgcttgtttatgtgcttgcgtacaagggatcacaaggcgttacgacaactgaggaatccgctattaggatccgtaaatataataatcaaaccgaataatagtttaagttgcaaagtgcccctagcctaggacaagtctcggctaacccacgtcgttggtaatatcgcattaacattaccctccaaggtaaccgataccctattatcagtctcagcactagaaaacgaactaggaaacggttcggtcgggctaagcataaacgacgtcccggaggtagccagggagtcgcctagcggcgacgggtaggtaaagaaaggatggaaagggtaaaatgaagctttctccttcttgggcgcgtactataggtcgacgataagttttataccgacgaattcggtttaagtctcagtccactataaaatgcgtca

SEQ ID NO: 324115 - DNA, 464 bp, Zea mays
tggaacctttgggctgatttatgtgcttgtctggatggatggcttgttgggtggtcgtgttgtcaggcaagcaggcagtcagaggggcgtgttaattatgatgcagtatacgtaacggtatctgtggttgcggtgtcgttgctgcttctgactgctggttcggcgctcagtcgtatggaattgtagttacgtagatgactctgattgcatgttgcgcgcagttggttttggttattgtttatcgtcgttaatcgtttagcgacgatgatttggttacgcttgttgcatgtatggcttcgttctctgactgcatgttgcgagtaataggagcctcgcttggtgtcggaggctggcttccgcttcggtcagagtcagtttgtttgttggctatatggactggactctcttacttatctttagtcgcaacccgcccttgtcgtacccaaccggcccggacccgaaaa

SEQ ID NO: 324116 - DNA, 391 bp, Zea mays
  unsure (1)..(391): unsure at all n locations
acccaaaccgcaccccaacaagcaaaagaagctaggggagtaccaaagtcacgcccacattgcgcactaacggctaagaaggccttaccggaataaccaccacccaccctaagtcaccctggtctccctccaactcctaaaaagaaacgaaccttgcaacggcaatatgaaaaaagaaaaaaaaaggaagcgcggaaaaaacgataagaagacaccggaatactaacccgaaagagacgacagaagtgggagcctaccccggctacggcaccaagaaacggaactttaaaacggttttccatactctggtaaagtgcaaaggcatctacaccacaaactccgtcagaatagtctgccccccactagaagtcngcgacccagcccccgacgt

SEQ ID NO: 324117 - DNA, 420 bp, Zea mays
  unsure (1)..(420): unsure at all n locations
tgcgggtcaccccttcttcctatcgtattgtccgagcccgtctcatacgggaataaacgacacgtaaacatcgcccttacacgtcatcgtatccaagaagccagattcctagcccataccttcccttatagaggactaccgctagacagcctaatgtcgtcttaactcggaaattccagaggcgagggacgctacaggggactgcggatcataagccgccgtatagattcgtaagaaaccgtacaggtctagagcagagagaggagacgacgactaaggaggctccgaggacgaataaggcaggaccctataggcggggccgacggtcacagtttaaggtcgtttcgagccgatacatcgggtgacatacgcactagataccataaacgtagtcccagaggtagncggcatacgtagtaa

SEQ ID NO: 324118 - DNA, 454 bp, Zea mays
tggcttggaacctttgggctggtttaagttgcttgcccccccgatattctccattcctaaatcttgaaggctcaaaggactgacaggttatgtccggatggcctgcacctgcatcggaaactagaactaaatgagtccccatttccccgccttatatgagaccctcgcctctgccgagtctactccaagatattcgtgccactccccaatagacgcgttgttttagttaaatcttttattcgataacgctccttgtttggactggtttggtgaggttgggttccggagttaaaaggaggggtggcgttttgtccttgatttatggaacaagcaaaacaatgccaaaagcagcggcaccctatccgtgtttggaggtctttatccacttcatattctctaagctaccctataaagctggatcagagctaagtctaatagggctcctcccttttgt

SEQ ID NO: 324119 - DNA, 450 bp, Zea mays
ggttggaaccttttgggctgatttatgtgcttgtttatgtgcttgttcgtagctactcttcttattattattattaagtctaataatagttagtgtgtgaaaacaacgaagagttgtagtacggtactactggttgtgtctccggcgtcagtttctgtgtcagcggtggttattgttttataggcagtggaggtaaagaagaagagagtggtggagagtggtgaggtggtggaggtgaagaagacttaggatgatcctcgtctgatgtcgcgtgagggtaagaaggggatggattcggctgcgcgtaaggagcttcgtgtctctctttagtagcttaattcggcgtcgcatggtaggacttagcgtaagggtaagcgtattgagtagaagggtactatggtgttggttacgaaagctcgttaggaggagcgtgataaggtgcatgcggcg

SEQ ID NO: 324120 - DNA, 184 bp, Zea mays
ggcttggaacctttgggctgatttatgtgcttgtctacctccccccccccccccacacccccccccattattaccacatacaataatcgcggcggccccccacaaaaccaagagttaaaataaaatactactacccacatcactatatcaaaaaaaaaatcagcgttacccacccttttacacc

SEQ ID NO: 324121 - DNA, 402 bp, Zea mays
  unsure (1)..(402): unsure at all n locations
ggcttggaacctttgggctgatttatgtgcttgagtaggagtcataaccacccttaacaaacgaagtcatctccaagttacccgagaagggggacccaccagatagtttcaccgttagatcattcgatacagagattataatatccggagttatacacgccgtcagtccagacgtaggagcccggattaaggaataagcacccgtaggccagtataaggagaatgtgataactccctgtttaaaatcagacgaggcgtataagaagagggtcgacctacggcataagatggccctaagactacctgacccggtcgattccctctcgcaaacgccctccgctggtaccgactcactcgcccccggaagacgtaaacgaacaaaccggctcccgtcggcttcna

SEQ ID NO: 324122 - DNA, 398 bp, Zea mays
  unsure (1)..(398): unsure at all n locations
ggttggaacctttgggctgatttatgtgcttggtgagtggttgtctgtgactcagaatccgatgtgcggggtagacgtagttaggtgcgaggctcatctatggggcgcgacctgccctatacgacgagattcggaacttcgcgattgcgacggtgatgtgagatggtcaggtgaggtgtttcttaacttaagaatgggaaatttgcgctgttcgccggcatgtgggtagaagactgggcctgttacccttaagtccggcgttctgttgttcgggctctctgctctgggtcttgaagttgtttgtgtcggctcaccagggcaacccggcctagctcacctggacncacgaaaccctggggctcgaaaaacgagaattgaaacccttaaaaacaccccag

SEQ ID NO: 324123 - DNA, 415 bp, Zea mays
ggctttggacctttgggctgatttatgtgcttgtttatgtgcttgtacatcttctggctccaattcaataaaataaatttctacatactcgtgggccacacaccactaactggctcaaacacccagtcatctatccttttattcatcgcataacataacaccataatcaacataaaacgaataacgctcgttccattctccaatcatgacatagcctaaatctttcatctatacaatttcacttctcgaccacctctcacatatcacccatactaactacttacactatagcacgtacatacactctattatctcactccatcactcctgtacacctatgctaattcaccacaatatatccacccactactcaaacgccactacataaacctaactacaaattccctacaactac

SEQ ID NO: 324124 - DNA, 349 bp, Zea mays
  unsure (1)..(349): unsure at all n locations
ctttctgtggtggtggtggaatttgagttcgagcttcgtttttttgggtcaggccggctcttgttcttgtttcttagctctcccggtataattcgtagttgtcggtgtaggcggatacggactcgttaagttctgttgctgcgtcgtgtgttgtgtctagctatgccttcgaagagtgtaaagtcgtagaggagagctctaattagccttagcctatattatagtacccggcgagaccgccatagactaccgctgacggaagccgcgacacggtcgcaagataggccgtaagtacctaccctaagaaccccaccgtgaanaatccgctatctaacgacttaaacgagct

SEQ ID NO: 324125 - DNA, 404 bp, Zea mays
  unsure (1)..(404): unsure at all n locations
gcttgggttcggttataaccgtaagtgttgcttgccgtttttcggggcgctggacatggcttttagggtattggacttagtggtttangtcggtattgtcgttgttgctacggacgcggaggaagaagtaagacgaaggagtctctttgtcactcttccgttcaagtttcaagtacgggtaccggttgctgtcgtcgttgtttaagtagatgattttgtcgagttttatgtagacgatgtgagagtatgatttgctgttttttcattgttcgtattataaaaatatgaggaagagttttgttgttactttggtcagtcgtacggttacgttgatggttcttaatagtagtacgttagtacggcgggagtanatctagggtctagggttgcgcacccacgtcatg

SEQ ID NO: 324126 - DNA, 183 bp, Zea mays
cagtaacgtcggaataacaccgtcctcgacttatcacgttagagggaggctcatttaaatcacggctaacgagaaaacggcactaagctaatttgtatgccgctcgtttattaagggactaaagtatccgccatcgacaaagaccagcgaaaaagcgttttccatcaccacacatccgaaccg

SEQ ID NO: 324127 - DNA, 396 bp, Zea mays
cgttggtgtcttcgataatggtggcgtgcgtgggactaagaatgcgaattcgttatttcatagtggtacgatggtgcgtggtaatgcttttactcctaaggatggtaagggtcgcggtctacgtcatgaggcgagacgtaaggaaaaattcgagcgtctgggtaacttcgctatggcgcctactatagatacgaatcatgagttcactgtctttcattatcctgatccgagtggtaaggttcctggtctttcggtaaagtttgggtctaatgataagtcctgttatcgtggtactacggatgctgagcctagaagggcgtggcgtaagcattttgtcgggtagaagactgcgccttatactgagaaaggtcgtaattttaatcattcggttgcgtc

SEQ ID NO: 324128 - DNA, 466 bp, Zea mays
tttgggctgatttatgtgcttggtaacatgaatgctgcatgagaattccctcctccttcttagtccctcttcccctccgttgtggtaaaatattcctgttggtgagagtacggtgacggtgcattgcgcttcggaggctatttcggcgctggtaaacgattctaagaaagcgctgtctcctctttggatctgtactcatgttgcggtccttactcttggacctgattcttgtactttcctttatagtatttaagtagattatagtaatggtcgtaattttcgtcggaatgttgcggcatatccttttactttggtcgttgtcgatatttgtggttctgtatcttatgcgaggtcttgtgtttagtgctcacattcgggtgactgtgatactggtgaggcgcccgcgtttactgatgattcttcggttggtgttgataagggcggtgacttgaggtttgcgagtcat

SEQ ID NO: 324129 - DNA, 268 bp, Zea mays
ggcttggaacctttgggctgatttatgtgcttgaaaaaaaaaaaaaaaaaaaaaaaaaaacaaaaaaaaaaaaaaaaaaaaaaaaaaaaagagatgccccccctaaaaacacttatttctttccttctctccccttcttatccaatcctccccccccctcatttcaaaataaactaaccatttttttcccactaacccaacctttctgaaaactaaaaattcactcttctcaaaaattccactgccatataatccacctctcccctct

SEQ ID NO: 324130 - DNA, 465 bp, Zea mays
  unsure (1)..(465): unsure at all n locations
tggcttggaacctttgggctgatttatgtgcttgtttatgtgcttgtttatgtgcttgtttatgtgcttgagtccaaccgtgttatcggcggggacttcttctccgtaccgtaccgtaggctgcanccgagtagtagtaattatcgtataggacgctgcggtagatgcatgctgacgagtattctacgcgtgagactgagggttattattcgagtctcgttgttacagctggttatgatggtgttgcccgggtttagagtattgtacctttatagcctaagttagaggagacgattaatactaccaaggatcctgatgagttcgggccctcggttttgactggttctccttccggttttattaagcatacggctacttaaggtgagtttggtgtcgctacctgtgggaagaagggactcggaggtacaatcgcgaagaagattggataggtgtcggcgactggta

SEQ ID NO: 324131 - DNA, 481 bp, Zea mays
gttggaactttgggctgatttatgtgcttgtacgaatacgcataagagtaaggatacgtccactaaggatgctaacgacatactggggggggatacgttcaatatggatgggacgaatactaataatctacgtgttgctactaccatcaatattattacacgtgctggccatgatcgaactcttactcggtttcggattcttaaatcaaatacaatttgttcgattcgacgttatggttatggtacgagtaccatcagttcaaggtggcttaaggatgagaacgatccactcgacacgaattcacaacatcgtatgtccaataagatcgttaatggtccttctacacacgtacacgaagatatatctccttactctattagtcgtaagacttatcacgagaacactaagacggacgatctcggtcatttcactacgactgatacgaaccatcgttttaatacgacacgtatttctaacggc

SEQ ID NO: 324132 - DNA, 479 bp, Zea mays
tggaacctttgggcgtgatttatgtgcttgtttatgtgcttgtatagagatattaagtgccgaatctgttcaagtagtcactaattggtttcacaaagtcagatattgcatttacggtctgtgtcagtgctgctcccgctaccgttgtctcttctcctgctgttacggctgcagtattgacggttgaggtaaagcttgttgacgttttcgcggtcgatgtgttagttgacggattcagtgggttggtcgtcgtattcggtttttagggcgctgaaggttcgctaggtaacgaggacgatgacgacgatcttattaaccgaggttatatatgctggtttggccaaacccggaataagatacggaagaaaaacgagagtaacgctcccaaaattacgacaacgcgcggctacttatctacttacggacatacttccgtctctttctccccctccctcgccggacccctaacgcgccactac

SEQ ID NO: 324133 - DNA, 447 bp, Zea mays
ggttggaacctttgggctgatttatgtgcttgtcctgatactgagactgatggtaagttcgtaggttggactgcgtcgggatcgccgggggatattgccttcaaaatcgtagagaatccttgagtatcccgtataggggagaaaggaaccgttaagcttggtaagttctcgcggcataaggggctgatgccttataggactactttggggcctacgacttagggaggtgatcctattaatggtaatggtatggggggtgagcttactcatggtagtattactcctcttgatgagaatcctaagtatatttatgtcaaagttggcatgtcgcttacggtcaatcatgggtttgatcttaacggtctttagcctcctactattattgcagatgaaaattggccgtttaagaagtcggatgggtgttatgcggcgcctggtaaggcggcg

SEQ ID NO: 324134 - DNA, 264 bp, Zea mays
atgaacatccatcagttatgaacattcgcgaaaatagtaaaataaaaaacgggtattgtccgttaccacatacggaaatcctgcaaccctccaggaacgctatgcggtctgactgaggttaagttacgcatgcataagccgactaatcacccacgtacgtcgtcgtacgctctacacatgaaggtattacttctctgttgcttagtttcgggcctttctgcgctttcgggacacataggggtggttgtctcagaggacttaagt

SEQ ID NO: 324135 - DNA, 376 bp, Zea mays
tgcttgtttatgtgcttgtttatgtgcttgttttgcccattctcctaatcttaacttacggttcgtgtggactgtcttatgttggtggaggatgagtaatagtagaagtgtttgctctctcctctgttgcattagacgttttgtccttgttctatttattgggcggcgtcggtgttgacgattaggcgtagggtgtttgatgtgactttaggttttgtgtctgtggagcatcatgtgtagtggcctatggagggtggtccgtctactcttgagggtattactactctgttgcttggtttcgggcctttctgccgtttcgggacacataactcagaatagatcgacgtacggaggaaaggggatgacgtcgtctacg

SEQ ID NO: 324136 - DNA, 466 bp, Zea mays
ggttggaacctttgggctgatttatgtgcttgtggatgtgcgggtggatgtgcgggtctgactcgattttctttcttaaacttcgcccgatgtttctcttaaactacgtcagttgaaatgttttcttctaaactcgagtactaaactgatcttctactccttcgaaattacttatcttctttcaaacttctctagactaaacgttttcctctaaacacggagggtcggaggatgagcgaactgaaagaagaggttgagggggcgaccgggaccccctcctccaccccgttaaacataaactagtcatccgtcaaatgacacccgtctcggacaactcaaagcaatgatgagtaaacacaagactggcggactctagaaaaaggaaacaaccgacgagaaggactccttataataaataaaaaactaaaagggcttaactctaaaggaaacgcaaaaaatgacgaac

SEQ ID NO: 324137 - DNA, 465 bp, Zea mays
ggcttggaacctttgggctgatttatgtgcttggagtattattattattattagcatgggttgctcttgttgtagttgacgcatgtgcggtgggatgggtagttgttgttgttgttgttgacgcattagtagttgcatggatagttggcgcatgtgctgttgcatggttagttgttgttgttattggtgacgcatttgttgttgcatgtgtagttgttgttcttgttattatggaagattggtgtactgcctgtggaaggacgtcgcgtagggcccgttgtaactcgccgtcgtcgttctacggatgtgcgtcctcgactgcgcggctgattataagtttaagaaatgatgctccttcttcggttcgggctagggcgtttactagtgaggagtcgagactaattattgtgccgagtagtcggcggcagttcggtgttgcccgtactcccgtattgggaatgaagt

SEQ ID NO: 324138 - DNA, 177 bp, Zea mays
  unsure (1)..(177): unsure at all n locations
ggcttggaacctttgggctgatttatgtgcttggcaagagctgctcaacctaaccggcctccaccatatnttcctccacccttctcgcgtngcacccccacaattggtcggcgactcataagaatcaattaaacatcccacctacccacccatcgaccgccatgttcacccaaaccc

SEQ ID NO: 324139 - DNA, 450 bp, Zea mays
ggcttggaacctttgggctgatttatgtgcttggcctcctcctttctaacttaccgtaagtaataggaggagaaaaaataaggagtgagagtggcgtatcgatgtgtataaggtaaaatttaactggagttgcggattgggttggagacagggtctgaggttacggtaagtggaggtgagggtgtagggagtggtgagcttttatttgtcgttctagcggaggtggtagtgggggaggtgatgtcgtatacttggcgtgtgaatggtctcaagcctatggcgtagatggattcgggtgttatggcgggtgggcctaaggaggctgcagttgggagtcgtgatgcgttggtgttgtagtagtgctcgactcataagggttgtacttctaaggatgagtaaatttcagaaagtcatggtgccgagatagactatataacctatccggcgtgc

SEQ ID NO: 324140 - DNA, 297 bp, Zea mays
gggaaggggccgttcccaaggattaggggaaaaaaaaaggttcgaaatctaagaccaaaggcggcaactactattctaagaagtcgactaacggagtatctgtaagtatagcgctaagaatccgcgccgtattccccgagatgactagaatgtacccgacggccgggagcaacgggaacctgctgatcgaggcgccttagctcactacgaagtacgagggacggatcgggccgccttgcggcaatcccgccaacgctacttgggcagtttttagtaaggtaactgagtcccccgtcc

SEQ ID NO: 324141 - DNA, 450 bp, Zea mays
ggaactttgggcggatttatgtgcttgtgtagacttttattcgtcttgttgttggttattgtgccgtcttttctggtagttgaggcggtagaagtattacgctcgttgtgcgagaggtctcctaagtagtaataccatccttagaatccgattaagtatattcattcgaaagggtgtcctgatgcgactattcttgctgttactttttccgtatctgtcgttcttagtacgcctacgaccgggtgcggagcccataatacgctctacggggccgggaagaaagagcgactccttatcggccaatcaccgccctcgtccggtacggaagctacattgctgagatcgtgaagcttctcctgtccgtaaaacaacatggttaaacaataacctgatcatacccctgtaactaaccctcgcccgcacccgcgggcgcgaagcggtagcaatccg

SEQ ID NO: 324142 - DNA, 444 bp, Zea mays
  unsure (1)..(444): unsure at all n locations
tggaacctttgggctgatttatgtgcttgtggatgtgcgggtggatgtgcgggcccggttgttttttataaggttatctatttggggggtcttatcttctgattgtattgagtagaggactatacggtacttgttgccctgtcctcttctctgtttttgtgttcgtcttattgtgatggtatactttgttcttctagtactttgtactggtgggcttcttctgttgtttttaataatgtgattttctgctggtcttcggtttttgtgttgtgtgttcttaataataatgataatagtggggttgcggaggtgtttgattgttctgcggttgtggctgttcattcacatttgccttctgatggtgtgtattatgggtgtccntcctctatgtagccttttcctcctggtgtgtcgtcttgtttgtcggtttttgtggtctggtct

SEQ ID NO: 324143 - DNA, 445 bp, Zea mays
tggttggaactttgggctgtttagtgcctgtgctaccaaatacgacgccgttgggttgagggaatatctccaaattgaacagtctctgcgttctcgtacacacataattgcgccccaaatccccttctcctaagtcccccgaatttagaggttaaattatttcctaaaggcacaacgtaaggtccgaagcacgataagaacccgctagacctgctatttcggaggcgttcacgccgaaccgtatgatttttaaagacggtactaagcctaatcgctccgacggtcgtagctttagtcctactccgatctggactccctttaacttagaagcggacactgtacagactggtattattcccagcataggctgctcgtagaatcacgcacgaactcctatagcagaacccattacaactagaccccggtggcgtaatcggtccaaaac

SEQ ID NO: 324144 - DNA, 268 bp, Zea mays
ggggcggtggagtattcagtcggacgaaagaccattatctggtattgtccgatctgcttctccccaagagcgagagcgggggtatggtcgtcgtaaactttcgggtcctctaagagacagctacggacggagtaagtgctggagaaattcttcctagggatatgaaaagtgaggtaggtgctgatgctggtgggggtgatcttttattgctttttgttatttgttggctgagatggtattgtctctggggtcttggtaatctacttac

SEQ ID NO: 324145 - DNA, 363 bp, Zea mays
  unsure (1)..(363): unsure at all n locations
ggcttggaacctttgggctggtttaatttgcttgtttatgtgcttgtttatgtgcttgtggatgtgcgggttcgctttattcgttgtgggcgcgtgagtcggatngtcctgagcatcgtcataggcggattcctgttggtgatggtgcggattcgatgtataatgcgatggcgtttaagccgatggcggagacggttggcggtgtgaggtcagagttggaagttaagagtgcggcgacgttggaagcagcgtttggggcggtgcgttcggttcccaggaagtcgttgtggggagggttcgggactccgggtaatgcgtctacgtaagagcatactcgggagactgattatngaaaggggaaga

SEQ ID NO: 324146 - DNA, 297 bp, Zea mays
cttgtttatctgcttgtttatgtgcgtgtggatctcctcattcgccttattcattaccatcgcgtgagtccgatcgacctgagcatcgtcataagcgaattcctgtttatgatcgtccgaattctatgtataatccgatagactttaacccgatggctgagaccgttagaaatgtcagctcagaatttgaaattaaaagtacgtccacattctaggcagcgttttcctcgattcgttctgttcccatgaagtcgtagatgggagggttcctgactccgtgtaattcgtctacctaat

SEQ ID NO: 324147 - DNA, 355 bp, Zea mays
  unsure (1)..(355): unsure at all n locations
tgcttgaaaaaaaaaaaaaaaaaaaacaaaaaaaaccaccccccccncaaaaaaaaaaaaaaacaccgtgggacccaaaaaacaaagagggcgacaaaaaaaaaaaggggtggttgccccaaagaactaaagcccatcaatttgcgtacgtaatccaaaagtctccccacagcgctattcaaaccaaacctatcggttgttgcccaaaaatgctcgaatcggaaaaattccggtgccattaaatcaaactgtcccgaaaaaaacttttcccctgttagccggtcaaaaaataaaaaggtttgaattaactgttcccttaaatacccgtttaattcgaacggtaaacggaattttt

SEQ ID NO: 324148 - DNA, 293 bp, Zea mays
ggcttggaacctttgggctgatttatgtgcttgttagatgtggtctggatctgaaccccccctccactagtgtaaactctacagtatacgggggggacgtcaaacaggttcaatggcagtacacttcgcctccccacaaaggatactatctgatccgtgaacgcaacatcagagtaagcggtcccagacgttaagataacacgcggacgatcgtaagaggcatagaagaacctggattcccacccaaacgatctccgatatagctcaggctgaagcccatctctgttatagtc

SEQ ID NO: 324149 - DNA, 388 bp, Zea mays
ggttggaatttgggctgtttagtgctgttattgctggtgagggtgaggggtgggttgattacggagtagggtacggggtgccacggagttgatgctagtaagaatttcagtaggtgcatttaatcatagggttctgatccggtgcaatgaggggtggtgatgctctatcatatgtggagggctcggggtgagagatcataaggtatcctagaggtctgtaggattaagtaagcggatttcggatcatccagaatgagtagatacttgtaccgtcaaggatgacgactttggtttactagactccctgatgtttagtaaaagatgagagctgatacgaccgcgaccacacaacagacgactcgtccgtcgtgcgagttggcgtccgtac

SEQ ID NO: 324150 - DNA, 355 bp, Zea mays
gaacctttgggctgatttatgtgcttgtttatgtacttgtttatgtgcttgtccatctccttgcccatactgtggtcgattatgtaggccccaatatactcgacacggatttaatcacacaccgcaccttcaccaactcgatacctatcaagtcaaccgcgccccccttaaacaaaataaatataataccctcctccacaaaatgtataccccaatgttgcttgtctcagacgactcaagtccatgcatgtacgtacgtgatacaccattatctccacactgctattcaaacctaacataactgttgggtacacataataccgccatcatcaaaatttctttccaatttaatcca

SEQ ID NO: 324151 - DNA, 448 bp, Zea mays
gttggaactttgggctgatttatgtgcttgtttatgtgcttgtttatgtgcttgtgcatgtgcgggtaaaatacggtcgcgaacgcgagtgattacgcggctgccgacgtaggtataagccgtgacggccgcggtgccgcttcctccggcgagtggtgtacggcgtggcttctttaaagcttttttcggtaagaatactatggttattcacggtaaggatcggccagatgtcaaagtaatacggcacggtaagttgatgggcgttggctttgatgataacggcggtggtcgtgggcataaggatgcgaataagttttttcctaacagtacgggtgtgcgtggtaatacttttactcctaaggacggctcgggccgcgggcttcgtcctgagactaagcgtgacaagtccgcggagcgtcttggtaagtttgcggcggcgtatactatg

SEQ ID NO: 324152 - DNA, 257 bp, Zea mays
ttattcgtcccaaatcttcttctacttttattcattgccttattcatcctcatacctattcgcatcgctctctttctatctatgtctcttttgcatactaccggcatatttatattcctctctaaccgatctctgaccatttatttccccctgtccatcctctttgttcttctctttctttcctgttttctaatgatatcatttctactctaacttttgcgtacgatctgatctttcctttctactctactcattct

SEQ ID NO: 324153 - DNA, 447 bp, Zea mays
  unsure (1)..(447): unsure at all n locations
gttggaacctttgggctgatttatgtgcttgttagcccttggcagtacattattacgggttctcgtacacttgcgctctctcggaaggagagagtctcatngtgttgatggtagtagttggctggcgtagcgctgtgctgcttacgaggccgttggtgcggagagcggcgatcgtgagcgtgggaatccgggaagtgatgttgatgtgtcgggggcagagtagaaggtggtggtcttggtggttacggatgcgaaaattggcggagcggagggaatcgttgtcgttgcgctgggcggtatcttcgcgtggttgacacggtagaggagggcgtcgacgggtgctaagcgttagtcgttgtggcctagtgggacggcatctcatgatgagagtggttggttggcgcgtatcggtgcctgggatagagtctgcgattaggagaaatacgt

SEQ ID NO: 324154 - DNA, 438 bp, Zea mays
gttggaacctttgggctgatttatgtgcttggcagacaaaaagaatatttacccattagggccgtctcctcctacttcgtcaacttaaatggagatcgatattcttccgttaccgtcaatgtattactagaagtcgctaataaataaaaatactactactcgatgaccagtagttaaaagtacgcttcgtctgctctccggcgctagatgtggtcccgcctattgcttgctgcggatgtctcgtctagcgggtgacttaggggagaagggtatgaatttgtggttgttaaatacgggttgtacgagtgtgctgctgaatccgtgttagcagcagcgtattgcgcgggccggtccgtccaggagtacttggaggtcggatggttctataactcgcgttgattttgctctgacgcttgagtttcggcctcagactgtgag

SEQ ID NO: 324155 - DNA, 453 bp, Zea mays
tggcttggaacctttgggctgatttatgtgcttggccctaagcctctgctgccgtcctgagatcgttacggcggtcagcctgccgcgtatgtaggcttagaaaacataggccacgactgcataaaatccactactactcctcttgacttactaataactgttgagagtgactgagagacaaacaaagacgaagaaagcggtactactgctagttgcctctcctgcgtcagtttcgatgtcagcccgcgttttgtcgacagtagaggtaaagaagaagagagctgttgttgttgttgttgaggagaagaaggcgtaggataatcctcgtctgatgtcgcgtgagggtaggaaggggacggattcggcggcgcgtaaggagcttcgtgattctctatagtgtcttaattcggcgtcgcatggttggacttagcgtaagggtaagcgtattgagta

SEQ ID NO: 324156 - DNA, 261 bp, Zea mays
tggaacctttgggctgatttatgtgcttggttataatacatctattaaaatccagctccccctcctgccttcatcttcccatcttgaggcgcccacaaaacatgagtaagttttattattatttcaacaacaccgccgcatatcatactactacctctctatatccaattattaaaatgactcaacgaataatcccctcccacagatatttccccctccattatctactccaaatgtcgctcccatttactcgacaaacga

SEQ ID NO: 324157 - DNA, 167 bp, Zea mays
acgcatagggggatatttgctctatgagagcgtaggagtatagatgagcggataggtaatattgtgaagagtgtgtgtggttagtgtcgcttgatgtatagagtattgtattatatatcgtagtatatattatagtagtagtattgtattgtgaacgttgtacgata

SEQ ID NO: 324158 - DNA, 175 bp, Zea mays
cgctgggtattctctaatctaagccctatacatacgcttgggtaggatactcgataggatcgttggaggttttgggatgtttaatatgacgtactatacgtgatctactggatatgactatatattgtaccggtgcggcatgacgactctactggtttggatctaagcgaataca

SEQ ID NO: 324159 - DNA, 432 bp, Zea mays
aaacttagtagattgatgtgaattgagaaaaactttatgaaactctgcggttgtggtgattggaagaagaggatgatgatggatggagtggtgacggtgcgttttgtatccgtttcttgtctttcgtcttcttttgatttgtcatattgttccttggttgtggtgttattcgcccggagagtgctttgtggcggttgttgcttgtattcttgtcgtcgtcttggtggtgggggtggcgagtttgggtagttgttgtaagaagtcgcgtctgaggttacacttaagacagtaaggctcaaaggaagggccgtatctataataaacacggctacgggcggcatcgcgatcgatgacgtaagcgacgaacggtccgcctcggactagaaggcaaaccttcattttatagacagaggacccatagtaaccggtatc

SEQ ID NO: 324160 - DNA, 211 bp, Zea mays
  unsure (1)..(211): unsure at all n locations
tggcttgggacttttggcttgatttatttgcttgtttatgtgcttgactataggtcattttagcgacggggccggcgtcntaataaacggtcgggcggtagaaataagtcaaaaatacgcaatatacgttaccgctacatcgatttccaaacccatatattactatcacactcgccagcattaatcatacgttcccccttcgagaactaac

SEQ ID NO: 324161 - DNA, 283 bp, Zea mays
  unsure (1)..(283): unsure at all n locations
tcctactcgtcatccttatcattgttattctgctgagtgcggcacggctttttctaagaatgaggagtagtctatggatgggcattcagatattactgctgatcggactttgggtgtgtttaaggattcgtggtcntaggatccgttgagtcctgcgtgtattatggacttgaatgatgctacgtctaatcctcctacttatgagatggagggtacgctgtaggtgctggtggcggctactaatattcctgatgagtctgatgtgatgtcgtctgtcgttacg

SEQ ID NO: 324162 - DNA, 164 bp, Zea mays
  unsure (1)..(164): unsure at all n locations
cttatcctccctcagagtctggttcatatcctctccgctctcccattataagtgttcgtggtactactngtcatccttatcattattattctcatcagtgctgcacggctttttctaagaatgatgagtagtctatggattggcattcagatattactcctcat

SEQ ID NO: 324163 - DNA, 437 bp, Zea mays
tggcttggaacctttgggctgatttatgtgcttgagtagggtggtgttactgatgatcttgccactgttaaggctattgattattatactcggtggctgctgctaatgttggacgtagggataaggattctgtttatactgaggtgtatacggaggttcctaataagaagggtggggatgctaagcggtatacttatgatgattgactgtcgtctgtaccgtagggcttctccgtcgtattcatctcgtagccgtcgatgaaagaagacccgagtaaaacgcatcctagcgatcctaagacgaccgatactaacggacacgtacgtccctcgatgagaatcggtcatattggtgaagacggccccgagactctcgccttgctagaaaacgtagcggactccgtagaagttacttcaaagagactggaaagtaaggcg

SEQ ID NO: 324164 - DNA, 401 bp, Zea mays
tggaacctttgggctgatttatgtgcttgcgcgcccctctcagagctccttggtatattaccccaagaaagcccggttcctataggccagtgttctagtacggcgatatcaacccctcgtaacggcgggaaagagccctagtcaccgcagcgaggaaaggaccggatctctctaccacttcgggagtacggacgactcggaagtacaggaatgaagcgacgcctaaaggagccctcttcaactctatctcctcttcggagctcgtcaacgaggaaagggagaaacggtaagccgtaagagttaatggcccacttcccccggtcgtcttcagctgcaacgcccagggatagcggccggggccccccaccccccgacgctccccacggatacccccgcgcacg

SEQ ID NO: 324165 - DNA, 272 bp, Zea mays
ccgacgcgtgagcggacgcgtgtgccatcttccttcgacaccatgctcatcgacattggtgactaccctcttcctctccttctccttctccctctctctctccactgcgatgactaccaggtcattgctgaatgtccaacgacctcatgccggcctatacatgcaaggctggatccacagacactgcatccacggaatctagaactctttcatcaccactagattcatgtttgaaaagctcctgcctctgacgctagatctcatcaccaatg

SEQ ID NO: 324166 - DNA, 294 bp, Zea mays
aaaatcagaattgaaaacggtttgattattgtttttgtttgaaaatacatgatatcctattttattgacactcgtcagactgctcttcattccccgttgctgcattagggcatgcccccgtcatgtagcagtatttgatctgcttctgcttcatgggtccacatcctggtatctttattccataatgatatatatattaattaacaaactaaaacatgtatttattttacgggtttgtcgacggatgagcttgctctggcttgtgcatggatggaagaaccgagatcagctgac

SEQ ID NO: 324167 - DNA, 309 bp, Zea mays
cccacgcgttcgccgacgcattaaacggtctcgtgttcatgacatgtcatatacaaactgggccagggcagcctcgcttttgccttcgctttcatgcataggagatgtagagaatcaccaccggaccggcctgactctataccgtgtggcgctattggccacactgatatgctcaaggttggaatgtcctgtaagggctgagatagagctctaaagactgtcctgagcaatatgcaacgcgctgcgtcctacctcgtaaacattatggaatactacgtaacggtgaatggcattgtgatacactaagct

SEQ ID NO: 324168 - DNA, 275 bp, Zea mays
ttcattctttctatttctattttttacttttattctatcttttccttctcttcggacagttttttttctttctttatcaacaacgttaaaccccacccttcaatataatgaccccttacaaaaactaccccatttcaatgactgcaaattcttttgcttatactactaaggtaaatccacggatatacctgaattctcaaacaatcctatcactttgaacatacataccttaactaccaacctataaaatcctaccacttcgacttcaacaacaa

SEQ ID NO: 324169 - DNA, 304 bp, Zea mays
ccgacgcgtgcgcagacgcctcggtctatacctaacaaggcaacccggagacatcggcgagctctatgtcatgaatcagtctaaatagtgagctgctcactggccgacctactgaacaatacaatatgacgactgatacagaatgaacattggcgtgcttgcacacttagctacgatccagttcactcagcgtgctccctgaaccactagactctgattatgtgctatagactatgtacatcatactgacagtacgctagctgcatacagtgctgaccactgtatatgactacagcgcatattc

SEQ ID NO: 324170 - DNA, 401 bp, Zea mays
  unsure (1)..(401): unsure at all n locations
gcgagcggccgctcgcgatctagaaccggacgcgtggggcagatgcagccaggcatgacgtctacgcacggggtttcattcgtttcacatgatgagacctggaatcctgtgaccgtgatggcgacgcgagacggctaggcgaggcgccctccaatccaagaacgggaaacccgtgtcgcctgttggtacgcgggcagaagatcgggttcgccatttccaagcttggtgcctcgccgcctgggtctctcgtctcgggctccgaagccgcccgcgctggtctattagggtaatttggttcagtctattcggatttatgaaatntcggggtctgaaaaatgagaaccgaaatttccaaaaatattttaggaaccgaaccccgataaactcacaattttggttcg

SEQ ID NO: 324171 - DNA, 440 bp, Zea mays
  unsure (1)..(440): unsure at all n locations
cccacgcgtccgggcctggccacaattgcaagcgccgtccgttgccccctggggtgtcggatacggtccccagggcaccggatccagcggcccaggctggcaccgctgccgccgtcatggatgtggaggaagaagcaagatgaaggagctctcccgctatctccttgcctaagccctaagcatgggcattggccgtcgctgctgccgcccaagcagacgaccccgctgagccccacgcagatgacgcgagagcacgacccgtcgcccccctaccgcctgcaccacataaacacgaggaagagccccgtcgtcatcccggctagctgcatggccatgccgacggcctncaacagcagcatgccagcatggtgggagcaaactcagggctcaaggccgtgtatttatgctacgcataaaaaggtttgctatgtttcattttg

SEQ ID NO: 324172 - DNA, 268 bp, Zea mays
cccacgcgttcgaacacgcgtacgaccacgcgtacgtcgcaaaatggtcacttcatgttgagtttagtggatttggatagcaatgctggaacaagtctgcttctgatccactatgccagagggaggtctacccagactatggtcaatgagaaaatggtatcatgtcaagcagcacgtgttctgctggccaagggatcaatgggcttgttactggtaaggattaatgaataggtgccaattactattatatacttgaattgctgttatt

SEQ ID NO: 324173 - DNA, 127 bp, Zea mays
aaaaaaaaacaaacaaacaaaaaaaaattaaaaaaaaaaaaaaaaaaaaaaaacggaaaggaaaaacaatgaaatagtgatcaccaatacttactagtcatgaatccctgtgacaatagtacatcat

SEQ ID NO: 324174 - DNA, 259 bp, Zea mays
  unsure (1)..(259): unsure at all n locations
aaaaagtatgcctagctgcgactagagaaatacacagtatactgtctnttgtgagaggggtcggtcaatattgtaaacagggtatacgaatcgccgctgcttaaaactcatcatttaatcaactactcatcgtcctgaaaccatccactcctccctaaatcctctcagatcaaatgcctacttcttaaatatgaagcggctcgaggactagtcgaatctaaagaagacgccaaggagctgattacaatctttattatta

SEQ ID NO: 324175 - DNA, 436 bp, Zea mays
  unsure (1)..(436): unsure at all n locations
cggacgcgtgggcggacgcgtgggctcgatctgacccctccctccaaatcctgtttgagtccctctccaaatcatgctagccgaaacgcccctcctcaaatctgagcatcaaatcgactcctcatcttcctgaaaccatccactcctccctaaatcctctcagatcaaatgccccttctcaaatatggagggctggaggacgagtgaatcgaaagaagaggccgagggggtgattgggatttttcttcttattttgccaaatacaaatcagctacttgctaaacgatatttgctctggataatctaaagtaacgacgagcaaatataagatcggtggatctcagaaaaaggaaataattgatgagaaggatcttccacaacaaacanaaaatcaaaagggtccaatctcaagggaaatgtanaaaacgatgaatga

SEQ ID NO: 324176 - DNA, 95 bp, Zea mays
gagcaccaccaccaccaccagtacgggccgcctccgccgcagccgatgtacgcgtcggcgtacgggcagccgccgccgccgccgccgatgtacca

SEQ ID NO: 324177 - DNA, 117 bp, Zea mays
aaaaaaaaaaaaaaaaacaaaaacaaataaaaaaaaaaaaaaaaaaaaaaaaaaaaaaagaaaaaaaaaaaaaaaaaacaagaaaaaaaaaaaaaataaaggggcgcccgttttaac

SEQ ID NO: 324178 - DNA, 218 bp, Zea mays
cgacgaggctcggactcgaatttggggcggaacagcgcaaatctggtaggcacatgaggatgatgcggaagaggcgtaacgagagcatatgctgtgcttcaagaaagggcttgactcgacctgcgaatgtgattctggaggaagtggctgtggatgccgaggcaaatggggatgctgcaagagggatggaagacttcggtgctttagtgaaatgactc

SEQ ID NO: 324179 - DNA, 140 bp, Zea mays
ccacgcgtccgcccacgcgtccgcccacgcgtccgtctagatcgcggctggccacgcatgcgatgaccatctgatatggacggaactatatattgtattcctattaatctggcattttctaagctaattgttttttttcc

SEQ ID NO: 324180 - DNA, 309 bp, Zea mays
cggacgcgtgggcgacgctcgcatacactccaattccccacctcacctttgacatcagggtaggctgcagcggcagtggcctagcgccttcaatgccggcacctgcgagaaactactactcgtacccacctaccgttacaccgactatcgacgttcaccatgactagctagacctcacgcacgcactacccatgcaagactgctacaccgacacctactgtcaatggacactcgattactcgacgtttattcctgacatatccagactcatcatcatcactgcgccgttcgtcgacgctaccctcatct

SEQ ID NO: 324181 - DNA, 371 bp, Zea mays
cccacgcgtgcgcccacgcgtccgcgtatattctgacgactgccatgtatcttgctcatgtatgctcaaggctcattatcttgttcatgtattaagcatgtcatgaataactcaatacttattaaaaactgacttcattaatatttacaacaatcaagatgagcacgtggcggtagcgcaagtggtggtcaaagttcatctgggttacctctttggaagcggtgagccccccaaaccagcagtggcaccagctgtaaatgctccacctgctgctgcaagtgctccacctgctgagaaaccacctgctgcaaagcctgatggtaccagtcagatagctgctggagttaccagccattccaataactaccaca

SEQ ID NO: 324182 - DNA, 432 bp, Zea mays
ccagtttccggtagcataccaccatgggcctctgcatatccgtgtctctctggaaggagaagctctacggcgccgacggcagcagccggtcggtgcagtgtcgcgtcgtccatgaggttgccggcgtggagagtggtgactgcgagtgcgggaacttgggaagcgacgccgacgcgctgggggtagagcagaaggcggcggctccggcggccatggacgtgaaaaccggtggagtggagggaactgccgctgccgtgtcgggtggcactcctgtgcggccgatatggcagatgagggtgctgatgggcgtcaagtgccagctgccgcggttcagcgtgatggtactctacgacgagagcggccggccggtgtgcactggcgtccgggacagagctcgtgaccaggagaaacatgctgcagcgatttcagtgc

SEQ ID NO: 324183 - DNA, 276 bp, Zea mays
cggacgcgtggaccggtgccaggccttgccttattgcggtggtgcttagtccctcttggacacgtatcgacacaagccagcgcacgcgcggacatgaatgatggcggtgccatgaggccatcgactatgttctacgagcaataggcagacgtatgtacatatccaacagtgtgctcaggagtgctcgctctgtgccagatagctctgacgctacatcgtcatgtgctgatgtcacacgccgttatgaagagagtagtgcacggagcagccgatgag

SEQ ID NO: 324184 - DNA, 297 bp, Zea mays
tctacacgtacggcggcgtgctcaagcggccgggcctgatacaggccgacgccggactgatcatcgacgctgactacaaggtcgacatcctcagcgcgatcaacgcgccgaccgaggtggcgctacatgtcttcgcgagctctgatggtcaagatgggcgccctcgaggtcaaaaccggatacgaggcgagatcaggaaacgctgcgccctcgacaacaggcactaagccgccgaatgcatgcgcgagatggctgcattgctcggaggaaatccttgtgagacacacaacatgctct

SEQ ID NO: 324185 - DNA, 378 bp, Zea mays
cccacgcgtccgatcacaggctaccccagtgatggggttgctgctccagcagatccctgaatgggagaaactagctaaaggcatttcacacatgcaattgtgatactgactgtgaaacttacgcaccttcactatatgtgttagcaccttctagacgaatctgtcctgagaatgaatccactaatcatggattaaagacaaggaccatctgcctgttttacgatcacggtggtcctaaatattgatatgccaccattctgttgtatgttgatgatgccttattaacttacctacgaagcttcgtttagacgattttgcacctgatctacatatgctgctgcgtttctggtactgatcgcattgttttcataactttgc

SEQ ID NO: 324186 - DNA, 309 bp, Zea mays
acgcctacacgtacgacgtcgcgctcaagctgccgttcctgatccaatccgacgtcgcactgatcagcgacgctaactacacggccgacatcctcagcgcgatcaacgcgccgaccgaggtggccttacaggtcttcctgagctccatggtcaatatgggcgccatcgaggtcaaaaccgactaccgaggcgataccaggaaacactgctccctcgacaacaggcactaagccgccgaattcatgcgcgacatggctccattgctcgcatacaatccttgtgagacacacaacatgctctgcatctgca

SEQ ID NO: 324187 - DNA, 125 bp, Zea mays
agcagggcggcgccatcgacgactacgtcatcgccaaggtcactgaccaccacgtgtacctcgtctacgacgcctacatgcagacacatcgaccattgccagattgactctcgcactgaggtctc

SEQ ID NO: 324188 - DNA, 180 bp, Zea mays
aatccacatgtgttggagtggtttggtataaaatttaaactaaatgtcacacgggacgagtccaactgtccaacacacatatactaagatggatacgtggatatccaaacaagttaggtgtctagtgtctaggtttttgtttgtggtaatctgcaatataactttgagatcctttgtgtg

SEQ ID NO: 324189 - DNA, 268 bp, Zea mays
ggacaatcgcgtccaaccgccgctgcacaagactaggaagaggttcccggtaccggggccgccgctatgtcgtcgatgatgaacgccctgtaaaactggctggtgaacccgcgccgcaacccgttcgggcgcctccacatgaccgccgcttcttggggcttaaggaattccggcttgaggtccaagaccctgtccaaccctattttgaaccggacattaaggaagcgcttgggaaggttgctatggaggtggtcgacgcccgcattca

SEQ ID NO: 324190 - DNA, 368 bp, Zea mays
  unsure (1)..(368): unsure at all n locations
ccgcaacttctccctcggtgccctccgcgacaaggacgctcagcacggcggctccagggagcagtccatcaaggaggagaacgagcaagagggggatggtgaccatggggcgcgagtcggcggcgaggatccgggcttggtgggagggggatgcggcgagccggacctcgcctccttgtcggtggaggtggacgcgttcctcgcgggtcaggacgaggacgcggcgccggtgagcatcacggagacgacgctggagaggttcgcctncgncgtcgagctgctggtcgccaggtacgaaggagtcgaggacaggtgggcgtcggaggccggcagcgagccgactgcgctgctggccgcgataacgcgca

SEQ ID NO: 324191 - DNA, 386 bp, Zea mays
  unsure (1)..(386): unsure at all n locations
aagcactggtacgagcagtgctcctaccggagcaaggacgacccgaacggcaacaggatgtgcaaccagacgtgcggccagacctacaagggcgccgacgacggcgcgcccgcttgatcgacccgttgttcatcggcgcgcggattcaggtgcatattaagatcattttcaatatcttatacaatggttacgtcagcccatacatgagctcatgaatgagctcattgaatgttctacttatactatagcatatactagatgctagccttggtgctcatacatggattcactcatctatccactaattcctaccataaagtgagatgacctatgtgtagacatatatatgcatgaatatatgcattaaacagnattttaaaagggcg

SEQ ID NO: 324192 - DNA, 364 bp, Zea mays
gttctcaaaccaacctaggcaattcgccgcagcctctcaccctcgcgagtcccgacctgccgcagccgccgcacagatggcacccaaggcggagaagaagccggtggccaagaagcccgcggaggaggagcccgcgacagagaaggtggagaaggctccggcggggaagaagtccaaggccgagaagcgcctcccggcgggcaagtccaaggagggcggcgagggcaagaaggggaaaaagaaggcgaagaagtccgtggagacctacaagatctacatcttcaaggtgctgaagcaggtgcaccccgacatcggcatctcgtccaaggccatgtccatcatgaactccttcatcaacgacatc

SEQ ID NO: 324193 - DNA, 412 bp, Zea mays
aggaaactggagagcttagaggctctaaagaagactttcaagaaactagaccacgatgtaaatattcaagactttctaggctcgcgggttcagacagtcgaggagctatcagcagagcttgtctcgttgcagggtcaggtggcggagcttcaaaagcgtgtcagtgattggagcgatcctgagaaagttgacaatatcgacaatataagagcaatggagcaatctctcaaagaaactattaatcatatccaaatccataaggggaacttcggaaagcaacatctaatcgggctacagtatgctgctacccagttccagaccgacatgcagttgcctctaggactgcccggcgagtcaggcccttcgtcgtggttccaaaacggcggcactgatgggcaacaagccatgatgc

SEQ ID NO: 324194 - DNA, 230 bp, Zea mays
cctgcgctggcggccacccgtcagcgtactctcttctgcgcgtctacggcgctcgtgctctgcggaccacaatctgctcatcaagcactgctcgcttgcatgctcgcgtctccatgggtctactgtcaaacaggattgcgaaggctagcctctgagccggggatcatatctactcctggacggcagcgtgagcatacacacctcactggatacatgcatgccaccataag

SEQ ID NO: 324195 - DNA, 364 bp, Zea mays
  unsure (1)..(364): unsure at all n locations
cccacgcgtccgaaccctgaaattctgaacatcgatcgagtggcccagccaattccccgaggcatggcacgccgtcgtcttcaccatggcctccaactcgtgtgcctcgtcgccgtcgtgttgacggccgccccagctgcccatgcaatcttccatttcgacatccgtttcgacgccggcagcccgttcttcggcggcggccactccaggcatgacatgtggcgccgcgccgacctcgagagcaacgccaggctgtccaggagactcgccagggccctcggcaacaagcagagcggggccgncgccgacgccatcgtggaacccgacgtgacccttttccagtacacccagcaaggccactccc

SEQ ID NO: 324196 - DNA, 377 bp, Zea mays
cgcgctcctcggcctcccgctcccgtgcacctgcgcgcgcccgcacctgccctgcctgctctccttcctggcgcgctacccgtccctcgccgccggatccctccacgccgccctccgcgcccgcttcccattcgtcggccccaccgaggacgaggaccaccgtcaggagggggccgaggaggagggggaggagcaggccgtcgatgcgcggaaggaggaacgggaccttcgtcaccgcgaggaggcgcgcaccgagctacggcgggagctggagaaagagcgcagcgccgcggcgtcggcgaccgaggaggccatgtccatgatcctgcgcctgcagaagagaagtcggcgctggagatcgaggtgcgacagcagcg

SEQ ID NO: 324197 - DNA, 321 bp, Zea mays
cccacgcgtccgcccacgcgtccgcccacgcgtccgcgatcacgacaagatggcgtgcacaaacaatgcgatgagagccttgttcctcctggtcctcttctgcatcgtgcatggtgagaaggaagagtcaaagggcatcgatgcgaaagcgtccgggcctggtgggtccttcgacatcaccaagttgggcgcctccggcaatggcaagacagacagcacgaaggctgtgcaggaggcatgggcatcggcgtgcggcggcactgggaagcagacaatcctcatacccaaaggtgacttccttgtcggacaactcaacttcac

SEQ ID NO: 324198 - DNA, 349 bp, Zea mays
caattactatgtacgagatacaatgagtggaacatgaaaagcacgttctccgtgggaatttggatatggttgaacttccacggacaacgatttccttggaatcgccaccggcaagacgaatccacagattgcattcatccgaggggcgattaaaatcaaggggagcatcagtgcggcgcagaagttcacccctgacatcttccccaagcctgccaagctgtagaacgttagattgtattacttggtcgaggtgaataataatgtttgcaagcttcaattactatgtacgagatacaatgagtggaacatgaaaagcacgttcttcgtgggaatttggatatggttgaac

SEQ ID NO: 324199 - DNA, 349 bp, Zea mays
  unsure (1)..(349): unsure at all n locations
cccacgcgtccgcccacgcgtccgatcatttcttcggtataattgcaattgtacaatatattgtgataccttgtattttacttgatcaattgacaattatacttcactatgtatacagatgaaattttagattttacgtgatatatcaatatgtaattgatgggcctatgaaattctgagaattcagagaagtgttgatttgttgccggacacatcactcagccattgaattgttgccggacttgcttcttttgtttccttgttgaattctgttatatatggcagggattaaccgaatgaatattttgaggcanggattaaaccatagagggattaaacccccaaggga

SEQ ID NO: 324200 - DNA, 339 bp, Zea mays
gccagaaatgctagtcctttttatgctagattcagttactccccctcctaggatatactgaaacatagttcttattaacatatttcgttcgaatgaatgaaaatgaatcatacataaagaccacatttatagatttactaatgtatgtttagtctaaaaatactattttaagaccgagggggtactattttccgtggacgaattgaatgccagaaatacagcggaaagttttcgagatattgtctccaattatcagcaactagcgtctaattagacagtgattagtttctagagattaaattttagtttctccattttattttattctagttcctaaat

SEQ ID NO: 324201 - DNA, 238 bp, Zea mays
cccacgcgtccgctgacacatttccctttatgtaaatcaacaccaggtgtatgaccctgtcacaagtattacatgcgattgacacttaaagtcaaggtgatctctgatcccaaggcctacgcgatcacgcaattactcaccccctcaatattactatctagaaacacatcatgtctttaacaacaccgtctgaacataacgcttccgatgtacaaattataacccttgctcacgataa

SEQ ID NO: 324202 - DNA, 240 bp, Zea mays
tccacgcgttcgaagagattcgatgatttaaaaacccacacgacatgcatacgctggtgtagacatggattctctctgaagcgcgctggacactgtttaatcctgcaccgtgaggattagtctgtgtgagcatggctgccgtccgtatcgccgttactgctcccagcgtcgtctcccatgagttgctactcgatatcagatcttcttctctattctttcttaccattctctccaatagat

SEQ ID NO: 324203 - DNA, 323 bp, Zea mays
aggtcgcgagggcagacacaacatggctgcgaacgtgagaaccaagagggcgccgacgcgggcacatgttgcgtaagctgtgaccaccggcgtcgcgatgagctgtccacggcaccgtcactgagaagcgtctcgaaccacataacataacccgcacttcaggcaaggaccgcgtgcacgctgcagcactgtctcaagcatggcatacaggcgcctggtcagacgaccactgacaagaccattggtacaggggctgaagctagcaacactttattaacttggactcatgctggaacacacgtatcctgagcgagtgtctggga

SEQ ID NO: 324204 - DNA, 285 bp, Zea mays
cccacgcgttcgaggatgaggatggcagttcttacgttttatgagatgagatggtgctgtcaacttacgtaaaggcaatacgatgcatagaatagtgcccaagttgtgttatgtatttcgttcattccttgatcttgcatcaaagattcaaggctaagtcagcctgctgcaaaggttttggttgaatccttgtatactgccagataaagtgttacgatggtgcaatcttggattagcctttggcctacgaatacatcacgaacgggcaggcgatgctgaagatcc

SEQ ID NO: 324205 - DNA, 418 bp, Zea mays
  unsure (1)..(418): unsure at all n locations
cccacgcgtccggtcctgtacaagtgcctcgacacctgctccgaggacatcgaggaggccgtggcgcacctcagcgccctctcccgcgacttctccgacgccaagttcctcgaggtcaagtcctggctctcctccacgctcggcggcacctccacctgcgacgacgcatgcaaagacgcgcccgtcagcgacatcaagaacgcctgcatcaccaagagcttcgagtttgagaagctgctgcgcgtcacgctcgacctcatcaccgatgcctcagggtccatgtcggccgaggtcgcactgcctccgtcggcggcatcgggcgccagcgggccggcaccggcgccgttcggaggttacggctcgtccgctggcgccccggcctacggcgcgccgtctnctgctggtgacccagcttatg

SEQ ID NO: 324206 - DNA, 102 bp, Zea mays
ccgggtcgacccagcgtacgatcaatttgagacccccatgattgacaacttttgtgcaaaaaaaaaaaaaaaaaaaagggataaggaaaaaaaaaaaaagaa

SEQ ID NO: 324207 - DNA, 194 bp, Zea mays
tgttgatgtgggtgtttcgtcaactctgtactgtacaacacgactacagcgtgcgtgctgggtcgatcctatgctctcttgttgcaggattcaagtttgttgttgtccgttccttccctttggcaaaaaaaaaaaaataataaataaaaaaaaaaataaaaatgaaagtaaatttacaaattagaaaataaaaa

SEQ ID NO: 324208 - DNA, 254 bp, Zea mays
ggttgcggcaaacgcgcggaaataatgtgcttgcgtgattgtttttctctctctttttttggttaataatgtaaaacaggcatacggcgatgttttaacatgtaaactgagatgttgttactctttctcaaagcgagtatgtagccccagtttccatcatggcactcttctcgttctgaagctttgggatagtctcgccgctctcagctgactggtgtcgtattcttgaaaccttttatccgtgtcttggtctc

SEQ ID NO: 324209 - DNA, 355 bp, Zea mays
attatataggatgattacgaaggtaacatgtttgggacagtaacatttgcttgaaaaaaaaaaaaaaaaaaaaaaaaaaaaaaaaaaaaaaaaaaaaaaaaaaaaaaaaaaaaaaaaaaaaaaaaaaaaaaaaaaaaaaaaaaaaaaaaaaaaaaaaaaaaaaaaaaaaaaaaaataaaaaaaaaaaaaaataaaaaaaaaaatagaaaaaaaaaaaaaaaaaaaaaataaaataaaaaaaaaaaaaaaatatagtataaaaaaaaataataaaataataaaaaaaaaacattaaaaaaaattataattaaaaaaaagtgatttaaaaaaaaaggagaatgtataaataatatat

SEQ ID NO: 324210 - DNA, 394 bp, Zea mays
cccacgcgtccggaaaaggagctagatagttgtgaagaacgaattctgctcgtggatagaacgacgcttcttctatatcaggcacatgaagctaagaggcacatttcaatgattcatggacagatgggtaggcagaatagaaagatcaagctgagaggggcatgaatcttggctacagtgacgcaagaggtagcgatgacagtgtgcaacgactactagtgatgatgagactcaagaccatcatgaggaagagctctatgaaccatgtatggcacgaggagctaactgtgaccgtgacagataccatcataactctgaagatggaggtgttatacaaggacacgttcataactgacgatacgacgatggactcagatatcgacatgacaccgct

SEQ ID NO: 324211 - DNA, 429 bp, Zea mays
  unsure (1)..(429): unsure at all n locations
ggaagaaagacctcgtcagcagcgcgctgtaccagccgctggagaaggagggccagcagccgccgccgcaggaagagcagccgcagctggagccccccgtgtcggccttcatggagatgacgacggaggaggagcggcggaggggcgacgccgggtgctgctgctgcggctgctgctggttcgattactcttggtgctgccggtgcccgtggtggcgatgcggctgttgcatctgctcctgccccagcttctgccggtgcggctggtgcacatgagagatccaggagttggcgggagatcacttgttgcccggaacttcatttggtctcacgagaacgagatccgcgtcgcgcgcacctnctgcttgtgttttcggaggattattcggcagacagggtttggcgttggcatgtgcacgtcagctgacac

SEQ ID NO: 324212 - DNA, 127 bp, Zea mays
cccacgcgtccgaaaaaaaaaaattgctttaaaaaaaagaaaaaaaaagataatgggaggggtaaataaggaagaagggcataaataaatcaaaacattcgatgtcttccttaaaaaaatatgaggt

SEQ ID NO: 324213 - DNA, 70 bp, Zea mays
aaaaaaaaaaaaaaaaaaaaaaaaaaaaaatttaaaaaaaaaaaaaaaaaaaaaaaaaaaaggggaaaaa

SEQ ID NO: 324214 - DNA, 404 bp, Zea mays
accggatcggattcccggccagacctacccgtacgcgccgcatccgaaccatgtcttgtgcttgcgagaacgccagtgtgaccgacccgacgaagggaacagcgcaggtcacgcacagccagatgatccatggtgctactgctaactacactgatgctgcagacctgaagtggcgctcttgccggacaactgacgacctgcatatgcagaactgttttcgttatcgtgctgtttcatggagcctgcgctggtctgaatcctcctgcagcactggcaccatctcatactctgaccggtcttcctcctccagttatacgtccaccacaaggctcctccactgcttaggttcttggacgacaaagacggccacatctaactcgtgcacacgctgtgacagcttgacc

SEQ ID NO: 324215 - DNA, 426 bp, Zea mays
acccacgcgtgcgcccacgcatccgtatctttcctgtcatagaaagaacgacagaaagaaagaaagagagacggaacgaaagaaagtcgcacatcgcttgatgatgcattgttcaagagctcactacattaatgcgctgacatgtatggtgcttctgctggacaaatgggagcaagatatcctgacatgtttctggttctcctgctgcttcatggagccagtgctgctttgaatcctccaacagcacggccaaaatggcatactctgagcggtcttcctcctcaagtcatacctcgaggacgattctctgcgaccgcataggcttctgtaagacaaggctgacccttgataactcgacgactcgctctgagatcttgcccaagatggacaggacgtacaatctgtaaggagaggatgtcctactat

SEQ ID NO: 324216 - DNA, 166 bp, Zea mays
cccacgcgtccggcgacgcttgccgaaatagtgtaccacaggtgcgaaaccaacactgcagcagacagaatgactgcattttcctgacctgaataatacgttgattgtgcgtagtaaagctgtgacatccatcgttgaacagtaccgatcagacaaccggacagga

SEQ ID NO: 324217 - DNA, 107 bp, Zea mays
cccacgcgtccgcccacgcgtccgaaccactacgatacacccgttataggttgttatcggtaaacttttaacggtcattctatttcaaaagttttgcattttgcact

SEQ ID NO: 324218 - DNA, 345 bp, Zea mays
cttgcatgtaccggaatctctctcaatatccttttcacgactgtagcatatagccctgggagggatctaatctataacggacgagcgaatgtgctggaaaatctcatgcatcgaataggatatactccatcgaatcttctcaataatgatgtgtccatcatcctgaggccgctatgcatgtcagatattcatgaagcaaataactatgtggatccatgctttatcaagttcaatttgaaacgatgcgaatgcagattgacactttacaacttgagaaataaactaatggcagatctaatgttataatacattgtaaactctaaaattcttgtgtctgaaattttt

SEQ ID NO: 324219 - DNA, 66 bp, Zea mays
cccacgcgtccgaaaaaaaaaaaaaaattttattaaaaaaaaaaaaaaaaaaaaaaaaggggaagt

SEQ ID NO: 324220 - DNA, 439 bp, Zea mays
tgctattactagtatagtacgtgataaaaggcagccaggctggtgtgtgtggtgcagggtcttccatacacgcgcaagcatggtgccagtgccacgttccggcaggtcacatgggttggaagccggacggacggggtagggcgtccggtgctagtagcctctgacgaaagagacggaaggctgctttcgtgacattctattctatttgggggggtctaatccgccgtctctctgcagttttcttgttgcgtgtagcggtagtgcagcagcagtactacgttaaaaaaaaagaaaccgcgtggtgcatagtggagcacggggtttcgagaaaagaaagacgaccgggccacagggaaaaacgcccagagaagcctcaaaaaaggcaccctactaccttggtggtggtggcagtggtaggaacagtagacgacagcacgct

SEQ ID NO: 324221 - DNA, 199 bp, Zea mays
cttaagcaagatggaccgcccggcagacacacacctgactgacctgatgaccatcactcaggtcattcttaactaacaaatcccttacctctattgccgctactacttcaccattctgctctaccacatcatcctatgctacaagtatatcacctccgtcagtcaacaaggccgagctctcccagctcatctgactcac

SEQ ID NO: 324222 - DNA, 436 bp, Zea mays
cttcaagttcctcccatgttgctgccgtcgctggttcaccctgccactggaccaggactggtttaacgccgcgagctaggcggccagccaagacacgtgcaggtgcagacacggtggcgccgttgagcgtggccggcagcaccggaggttcggatggtggcgcccccacaaacttcctgaggacccccacgtggaagacgtcgtggagtctggcgccgggcgggagctgtaggcggacggccacgtcgttgatgacttcctcgacgcggcgcggcgctgggactcttgagcctggtggagacggtagcggacgtcgtcgaggaaggcagcgcgctcctccatctcttgcgccaccgcgggagcgcgcgcattcgccggctcataggaccggatggttggcgggtcgcgggcgtacaccacccggaatggcgtgtcg

SEQ ID NO: 324223 - DNA, 405 bp, Zea mays
cgtgcttacgctctcgtctcggctttgctgttgaaggaccagctgctagacgtggtgcactaatatccggagcatgtactgcacttcttcaatcgttgtatctatttataagttgtaatgttacttgaaaacagtgacaaggtaattatttacctgtctaagcagttgctgaatcaataaggaaaaaacacaacacatcatgataataatgaggcaatgcaaatacgacttttgtattgcttgatctagctagggtttgttactgcttgatctagccaggataagaatgccaaaacgatcccttaaattcaaaggccccaacgactgaatgaaagcagatccaaaaaaatgctcaaaaaaaagagcagttccacaaatgttccttcccctacctatggtgacctt

SEQ ID NO: 324224 - DNA, 149 bp, Zea mays
cggacgcgtgggtcgcggacgcgtgggctgacgcgtgggcggacgcgtgggcgacaggcatccgacagctatattatgttcgacggtgtaacaccctgaatttgagggtataaaatttcttctctaaataccaaccaaattcaggtgtt

SEQ ID NO: 324225 - DNA, 367 bp, Zea mays
cccacgcgtcacacgaccgcgatatcgtcggacatgccgagatatgacgataggagagcaccttacgggctgccacgattgaataatccttgatcgagtagctctcgaacggaatcgagagatcatgatctggatgctgactgttcgcaacgcaggtatgatcatagtgatgctgggtagcacgcttctaggcctgacgcctgtgcctttggactttgtcactcgtacacaggccacaattgaccctgaccatatactggctccagctaaccaagctgaccatgaccagatgcggctgaagacttaacaggctttgcaagacgctgaaagcgctgaagatgaacaacctttaggcgtagaagctcac

SEQ ID NO: 324226 - DNA, 352 bp, Zea mays
ggagcggttcggacgagcggaggaggatgacaggatggctaccggacgagcggttgcggtggccatggtggcggcggcggtggcggcggcggcgctgccgctgctcgtgggtggcgcgtacgcagactgctacaactacggtttcaccgactgcttgaccaaggacaggtccttgaaggactactgcagttacgcctgcgacaggacttgcgcgcccgacgcggcgccccggcgccccgtcgccggtctccccataaactgccagctggcctgcgtcagggactcctgcagccgtcgccgtgcagatgctaacgacatgaaggcctgttacgggcagtgctacgaccgttgc

SEQ ID NO: 324227 - DNA, 438 bp, Zea mays
gcaacaatcctcgcccaaattgtataatttcactcacccccaagagcgagcgaatcaacctgtgccggaacatacagagcaatcctcttgcactgccacgtacggtgcacgcaccatggctgtgtcccgcgccgtcctgctcctcgtcatcctcacgggggctgccgcgtcctcgcccacggattccactcctgaggatgccgataccaagccgagcatcctgacccccatcgcgcacagcccgctgggatctttcgaaggcgccgatgggcccgtcgccgacaacgccatcgacgacgatgacgcggcgcccgtgggctcacccatcggcaccaccatgacggagccggagccgcagctcgcgccccccgggctccccgatagcagcgccaccgctgcttccgtaggccacccagtcgctgctgctgctgttgccgc

SEQ ID NO: 324228 - DNA, 392 bp, Zea mays
accacgcgttcgatgactggaggccgctcctacttgcactgctatctcgataagctgattaccaacgcgcctgactgcccggcttcttacgacatagctacggttcgatccacgccttactgattgcaagcagggtgatagtcatgaagactatagctgaactttcaagctgtcaaagtagagaacttctgctgtaacgatactaaaagacccaatcgatctcgtatttagcacatatgagtactcagatgacgttgccgatcgatcttttgcgcatgcaaacttaacttatggcatgtttatgactacccatatgttcacaaagtgtcgtgcttgcaatgctttgaacatctgatcttggaagtacttggatccatagattaggtaagatc

SEQ ID NO: 324229 - DNA, 444 bp, Zea mays
tttcttcctggcggcggcgcccaaggccatgacggtgcggcctctcgtcggtgcgcttcggccaggcgtggcgtgtgggcgtcctctcctggcggacagggctcgaacccaaactccggctcaccgacgggcggcccggccaagcgggcgcggctcctgccccgacctcggcccgacgcgcgcgggtgcgggtcctccggcagcggccaggcggtcggcctcgaccccggtggtgcgcggtgcaggccccggcgcgcggccccccggtggcagcgcgggcagacggcccaagcgcgcggacgcgcggtctcccggcggtggcgcgggcagacccggcgctcgggggcgcgggcgtgcggccccccgtggcggcgcgggctaggcagggcgtgggcgcagccccacggcgggaccgcggcatggcagcgcgcgacacgcgggcac

SEQ ID NO: 324230 - DNA, 207 bp, Zea mays
tcccactcgtccgcccacgcgtccgccctcatttactcccatgccatcccggacgcggggggggattcttcctccttaacctgtatcgcctcggatcacaagcactggcaaaagtttacgctactgctgctgaaatactctgccgcacctatgtctaactacactggccgtactatacccaagttcttctaatgtgacttgaacaac

SEQ ID NO: 324231 - DNA, 203 bp, Zea mays
ctgactcgtgggaaaaaaaaataaataaactaataataacacgacaaaaaaaacctagacaaggaaaaaaccaaacgaataaaacaaagaaactactgaaccaagaaatacaacgggcggcagccttacaaaatccatgctgacgtactctttcatcaaccgtgatagtctccggtagtcacgctcctaaactcaaagttctt

SEQ ID NO: 324232 - DNA, 301 bp, Zea mays
ccgaccggagcgacgccgagtcacgcgccggccatgtccgccgttgcgactgctgcgagcgtgaggacacgcccgaggtactgacagaatggcgcgtggcctcagagttacaggcagtcgatcgacgtgctgagcgcggatgccataccgacgatgaactctatcatggcatcgagcccgaaccataccagattcggaagctacttggtacatgactgtagctgattgttactgaataaaggaaaggtcttggagctaccgttcatcaggtcattgctgacgggctagctgctgaagctga

SEQ ID NO: 324233 - DNA, 229 bp, Zea mays
cccactcgtccgcccacgcgtccgattacttgaaagcactctctggtgaacggatggttgatggagtccctgccctgtttgccaagccccagacttatatgaatctcagtggagaatctgtcggcccacttgctgcctattataaactgccacttaatcgtgtcctagtggctatcgatgacatggactagccatgtgcaggtctacgtctacaggcaaaatgctgttc

SEQ ID NO: 324234 - DNA, 213 bp, Zea mays
cccacgcgttcgagccagccagccagccgggtcctgccgcgtagctagcgtatgcgtacgcgtagccgtagcagcgtgtgctagaggggaagaaatgctggaggggaggtctcgtgtggaggacacggacatgccggctcggatgcatgacgctgagacgtctgctgcctcgcgcgcgctcgacctatttgacgtcgtcgactgctgcgccat

SEQ ID NO: 324235 - DNA, 143 bp, Zea mays
cattcgtcacgcatgcgtgacgcgcacgcgtcaacttgagccccgacttccaaaagctgctaagcgtagcactcaatatcatcatcgaagcgttctgcaccatgttcacatgcataacgctgacagcgctgaacgcatgatct

SEQ ID NO: 324236 - DNA, 285 bp, Zea mays
cccacgcgtccggcggccgcttttcgttaacttcagcctcgacttttataaaaatagaaaagcgtacgctcgaacctaatacacgaagcaaaccacaccatgtgcgcaggcatcgccctgccaccctccaacgccggagcgccctactacggcgcggcggcgccttccgggggctccgccgatgcccccgccggcgcctccgaaggccctgcgagcgccagcggcccgtctggtgacgactcgccggcgtccggtgctggtgccagcgcgtcagctgctgatgct

SEQ ID NO: 324237 - DNA, 241 bp, Zea mays
ggcgtccctgtggtccaacgtacgctgtacatggcgcaacacgtaagcttgaacgcgacattctatggcttgatcataaagggcgaatgcatagggcggaacgatactcaagagctagacgacgggcatctaatgcacgatccaggagtgtcgtcgatcaacacgatctatacgaactggaatgattgcatgcatatgaggattatgacgaacgacgttcagtgcctgtctaaagagatac

SEQ ID NO: 324238 - DNA, 339 bp, Zea mays
cccacgcgtccgtagatcgcgagcggccgccctttctttttgtttttttttgacaccgttggtctttctctttcgctctgtttaaaaaaagacattattatgatagccacttactgataacccctggtgacaatcttgtgagattatgcttggtgagcaccaccctaccaagtggcagttgctggataaactacagcctataagcggccccttgaacaacatggccttcttaactgggacaataacatcgcggaaccaacgtcagacgggtattcacatgctaacttactggtcacctaacattacaggcgaaacttttatctttacaatggctgggcg

SEQ ID NO: 324239 - DNA, 110 bp, Zea mays
gcgtacggaacgttctgtgtggcctgtattaacacggattgtactcctcaccatatcggctcggggggctacatgtctatagccttacgcgctaggggacgtcagaggcc

SEQ ID NO: 324240 - DNA, 374 bp, Zea mays
  unsure (1)..(374): unsure at all n locations
tccacgcgttcgtccacgcgttcgcacaaggcgaggccgagtcgagtagcgcgaccacaaggacacacaccgcgtcgagtctcacacggcagggcacgcgtcaaggcgatccgttccatgccgccgccgccgctgccggaggagaagccgcttgcgcggcgaaagccagagccgaagccgcctaagcccaagcccaaggggcctaggccgattgggccgttgcctcagcgggacggggaccccggcggcggcgtcgccacgtcccctccgctcctgttctgcggcgacggctgctccggcccgtgcgcctacttgccccagtgccagacgcctactncgtcgtaccctggtgccaccgtgcgcctccgatcgag

SEQ ID NO: 324241 - DNA, 323 bp, Zea mays
ccatgacgcgtgcagtgcatgagatcggcatggccaactcaactagctaggacggacgacacggaagcgacgtgaagtttctgatcaaaactctccgagatttggagaagaaccgcgagatgagaaaggggggagaggggaaggaaacttcacgtcgcttccatgacgcgtgcagtgcatgagatcggcatggccaactcaactagctaggacggacgacacggagaagaaaacagatcgcgccaacacgcataagatggaaaaaagtgtatggatagatagatagatactcgtcacaccgcatgcgcacttgcgcagcatct

SEQ ID NO: 324242 - DNA, 359 bp, Zea mays
cccacgcgtccgcccactcgtccgcccactcgttcgcggacgcgtgggtaaatgtgtctctgaggcctgtacagggagcattctcaaatatctgtaccttcaatggctactgttttaaggttagcatgtttggatgcgcttgggtgcactgcaggtgtcctacgactaatctctactggcggtgagcattatgatcctggaatgataatagtcttcgccccaagggcacctgtaccctcacgtgtgatcgtgggaattaggctctgatggatgcaatgttggaacgtgtactaacacacatagtgcgtttcagaactcgatttaaatgttagcctcagatgctaatgataacataaagt

SEQ ID NO: 324243 - DNA, 362 bp, Zea mays
gcgcatgactcgtgctgcgcatgagcatcgggatggccaactcaactagctaggacggacgacagggaagcgacttgaagtgtctgatcaaaactcttctagatttggagaagaacctctagatgagaaaggaggtataggtgaacgaaacttcacgtctcttgcatgacgcgtgcagtgcatgagatcgggatggtcaactcatctagctgtgactgacgacactgagaagacaacagatagcgtcaacactcattatatggataatagtgtatggatagatatatagatactcgtcacaccgaatgctcacttgcgcatgatctgctcctgaattccatcgttcctgaaccagtagatca

SEQ ID NO: 324244 - DNA, 334 bp, Zea mays
cacaagtagggttaggaaggctgcggccagcggcgagaggaggaggggtgggtcagcgatgactgggaaggcgaagccgaataagcacactgcgaatgagatcgccgtgatgatcgacgcggcgactactaaccggggcggcggcaaggccgggctggctgaccggctgtggcaggacaagggcggtcatgcgaagctggcgtgcccgctctgtcggactccggctcccgacatcgagtgcatgcagatccaccacgaggcgctccaccgcaagctccccttcgagccgtagtagctcctctacctgcactctttctgccgctctgctgctgtt

SEQ ID NO: 324245 - DNA, 417 bp, Zea mays
cccacgcgtccgcccacgcgtccgctttcacctccagcctcataagcctgcggttaggggggcataaccccaaccggagaggacggccgacggctacgagctacgtagccgtggtccggcgagtcggggattccagatgcttcaaaatcatcaaaaaggaaagctgcaagggggatgccaactccacagtacacatactgtgttgccagaacatctttccgagcacatgcactgggaataaccgctgcttgggtagtgcaatccataattgaagtatacagatgtttcatccgtaagcctagtgaggactgtgaagcactatcaagcgacggcaatgaacagtttgacgatatgaataaattcagattgttcgggaggaagatttatgggattaccatcaaaagttgtttctctttg

SEQ ID NO: 324246 - DNA, 399 bp, Zea mays
atttcccggtccgaccaacccttccgcggattcttaatatttccttagccttatcttatttaatttaaggatttgcgtcaagtccgtgtgtgatcattccatgaaatatatgatatgggtttccatttgtttgaaaaaaaataaaaataatacaaaaacaaaaaaataaaaataaaaaaacaaaaaaaaaaaaaaaaaatacaaaaaataaacaaaaaaaataaaaaataaaaaggggggcccctttttaaggtccaaagtttctaacccctgcattaaaagttaaaaccttttctttagcggccccaaattcaattaattggtcggcgttttaaaaccaccggacttggaaaaacccggggttccccaaattaataagtctggagaaaaatccccttt

SEQ ID NO: 324247 - DNA, 254 bp, Zea mays
attctgcaaatactgctagacttgcgtatcgttggatatgtcctatcaggaggtaaatgttgtttcaccatcagtccttaaatgcagacttaacatgatttattgccaagcgccactaccaataccttgctttaggtttaaacacgtcacagttacaggcagcctcagataccatagagtctataaacaagttattcaacaccctctcacatatatcggatcatatttagtttacaacggacaaaccttttttg

SEQ ID NO: 324248 - DNA, 141 bp, Zea mays
attatttaactattttgtatagaactccattatatattaaggatgtgacgttcatttcaaaaaaaaaaaaaaaaaaaaaaaaaaaaaaaaaaaaaaaaaaaaaaaaaaaaaaaacaaaaaaaaacaaacaacaacaaaaac

SEQ ID NO: 324249 - DNA, 331 bp, Zea mays
tctacgcgtacgactagatctagatccagatctagacctctatctcacatctcagggtccatttcgaatgtctaacatttttcattacgtccacgtctacaatgctaaacctcaccatcaataccacactcaactcaaacgacagcgctttaaacacaccggagcatacggaccatacatttctcacctgtactacaactggcccacctgcacctgtcatcaattgtcacagacgtggcaccacttgtccccaagctttaaggacacgacttttatctccccacatgcattcacgaacactttacgaacatgttccttagctttaccaaca

SEQ ID NO: 324250 - DNA, 317 bp, Zea mays
attggtggctcctcgagccattcatgatgttgctaccattctcatagacatttcagcagaagtgatcgatatcttatcttgccttcggatagagaagtggatacagagacacatggattgagaacatgatactgaagccgatccggcatatgtcaaccatcatggatggtcaagtcgcgcaaaggcaaatcttgttgcctaccgacgtttaacacgtggcacacatcggtaggaatggtcctggctacaccatcaacattgacctcatcagcaactacaatagttgcagagcacctaactggatcaaggattaccac

SEQ ID NO: 324251 - DNA, 67 bp, Zea mays
tcgtccacgccttcggccacgcgttcgtggacaccttggccaagatggcgttcatcaggcatatcgc

SEQ ID NO: 324252 - DNA, 55 bp, Zea mays
tctaaacttcattctgccaaccgtatctatactcttgcaaatctacacctttatt

SEQ ID NO: 324253 - DNA, 199 bp, Zea mays
ccctcctacacctttctccttttcttgccactgcataacaccttctccggcgagagcatggcgatggcgtaccgtgtcctgtaggtcaccctggtatcggctaatgacctcaagaaagtgacgctcttctcccggactcgcatctacgccttggcttccatgtacggattcgacctccgctttccttcccacagcaccc

SEQ ID NO: 324254 - DNA, 184 bp, Zea mays
tcgtgcgacgacgccttccacagacaacgcgatctttcgcctgtgtcctgctgtccatctttttcatcgggcatgtcgtcaacgaagtgtcaaccggcatccattcgaaatcgtacggccccgacgactcctccgacatcaccaaatcctgcacttccacctacggcaagacagacaactccat

SEQ ID NO: 324255 - DNA, 449 bp, Zea mays
cggacgcgtggggccaccatacatggctatatatatagccggcggcttacacaaatggagaaggttctccttgattgaagatctaatcaaaataggaaggatactaatcagctagctactttctctcctagccaatctccttctatgtttgctgcatgcacaatcaatcaggcggtcgccttctatgtttgctgcatgcgcaatcaatcagatgactactttccatcctagccactcacctgctgcgcatgtgcctttgctgcctgctcagctcggcgcacatcgcgggctctcctacgcctgacgtgtcaggagaatttgaactgctgcaaacactaaaagaactgcttggtgatgccagcactctgggagcacgtcaaagagctgcataagatgcattttcgattatgtcagatggagttgtgaaccgtgtatgggatttagtctgc

SEQ ID NO: 324256 - DNA, 205 bp, Zea mays
aaaaaagtgtaagctatagagagagagagagggtggctgagagaagagaacttatagcgaatgctgtacttggctgaagtcatgtatgcatctggagctctaacggaaatgtctttttgccaatggttttatttcggtttgggatctacacatttgctttgtaatgttaattacattagtacatacatgtttccagttatgtgtt

SEQ ID NO: 324257 - DNA, 404 bp, Zea mays
cccactcgtccgggccgccctttttttttttttttttatgcgtatgaacacctgtaaataatcgtgtattcacttgtcaaaaaaaattgtagtattcagcaaacgagaagctgtaggcacgcagattacaggcagcatcatcatcatctaataataataattcaatattactgcccacattacagcaccaacgacctatgaccaaaccacggagctcctctccatggaagcgaacggtgacaaaaacacgccaaaatggattttaaaaaaaaaaacctcaagagcgacattgcgcgcaacgtcatcctcctccgggcagtctaggaagcggcggcagggacagcaggggtttcctgctccttcgccagagactcccagtcgaccttctgttctagatcgcgagc

SEQ ID NO: 324258 - DNA, 379 bp, Zea mays
gaggaggggcctgcaggctgcagcagctggaggtaccctcttctcctcctgctcctctagtgtattctgcgtgccacgccctgcaatccctcgccaacattttgagccacgcgcgacgctgcctcttggcttggatccgcccgtgaaattcatccctgcgtcggctcacccacgcagcgccggcggcctccctcttgcgtacggagtagtaaaataagaattccggtcgcacctccgatccggccgtctttccatgagcggccggtttaaataggccggggacaaagatcgggcgcaggtgctggctggcacgcatcaggtttggctttcttttggtgctatctatctccttgttccctcggattgtccttgtcgttgt

SEQ ID NO: 324259 - DNA, 347 bp, Zea mays
gggttggcttctcctccccctccggttcgggttcgggttcgtgaggttctccggggttcggtttcgtgggtgagcggatcgagatggcggcgtctgatgttgagtaccgctgcttcgtcggcggcctcgcctgggccacggacgaccactccctccacaacgccttcagcacctactgcgaggtcctcgagtccaagatcatcctcgatcgggagacgcataggtcccgcggcttcggcttcgtcaccttctccacggaggaggcgatgcggaacgccatcgagggcatgaacggcaaggagctggacggtcgcaacatcaccgtcaacgaggcccagtcccgcggc

SEQ ID NO: 324260 - DNA, 338 bp, Zea mays
  unsure (1)..(338): unsure at all n locations
cccacgcgtacgtccacgcgtccgcacagtgatgcctttcgtggtggaagttgtccttgagattgcaaaattgtgtgatgtgtattcgatggagcgtcttcttgatgatgagagtgagggacaggttttatcggtcctgagtgaagctgggctttttggttgtggtggattgctaaaagatatggttttcttctgtagcaccgtgaatggtcgtacatatcatgatcggcaactcgagcctgattggcatatttacacgagtccttgagatgntcaccaatgagctaggtttatcaaatttcaactgcacatcttcccgcagcgacctgaaagaatag

SEQ ID NO: 324261 - DNA, 372 bp, Zea mays
gcgtacggtgctacctctgacgatgaggacgccgtgtaccgacccttcatgatgccggttggcaccatgtccggctccttgtatacagctacgatgaatccacctcagtgggaatctcactgataccttggtgcaacccactgctttgagcaaccacctctgcccgactcaacactgccactggcatatccatacagcggcacgatacatttccaagatggagcgcgctctccaggcctcatcaagggcacatattgaattcggatcatccctgcctctgaccagagtggattttgaatctgcagatggctctatcacctatacaaatgtacgagctgacattctgcattcattgcgatgccaaccgaaacc

SEQ ID NO: 324262 - DNA, 228 bp, Zea mays
cccacgcgttcgcggacgcgtggggtgatttgaaataattgggaataaatagttcgtgaatccctgaaacctgcatatttgtaattctggccagaaaaaaggaattgaagtcgtcacgccagttccaagccggccttattcctgttcttccggttaatgggttcaaccattttgcaccagccaaggaattccaaaagttccatgaaccaattggttgggccttcctta

SEQ ID NO: 324263 - DNA, 380 bp, Zea mays
caattaactagcttcttctagctctagctaggctcgtctgctgcaagaaggtaacagcgcaggcatggaggggaaggaggaggacgtccgcctgggcgccaacaagttctcggagcgccagcccatcggcacggcggcgcagggcacggacgacaaggactacaaggagcccccgccggcgccgctcttcgagcccggggagctcaagtcctggtccttctaccgcgccggcatcgccgagttcgtcgccaccttcctcttcctctacatctgcatcctcaccgtcatgggcgtctccaagtccaccttcaagtgcgccaccgtcggcatccagggcatcgcctggtccttcggcggcatgatcttcgccctcgtctact

SEQ ID NO: 324264 - DNA, 449 bp, Zea mays
atccaaccagctgccgagggaggaatcctagcggaacactgtccaggtgacggcggcgcgctaccggtgacgggggatacggcggcatcgtcccctcctccatccccggcgcggcggagccagcagccgtcctgcagatcagctcaacaaagataaccttgcgccgcctcctaagaagatcaagactacccagccaggttctacagaccctcaaaaccttaatcgttagatcatcgccgttctcatgaagaattccggaggaggcgccgcccatggcgatggcggcgacatctacaatgtccgggccgtcgagatcctcgccaacgaggccctcctgctccccatcaatgaggccgtcccaatctacgagaatctgctcgccactttccccacggccgccaaatactggaagcagtatgtcgaagcctacatggccaccaacaacgatg

SEQ ID NO: 324265 - DNA, 437 bp, Zea mays
cccacgcgtccgggtgggttggcttctcctccccctccggttcgggttcgggttcgtgaggttctccggggttcggtttcgtgggtgagcggatcgagatggcggcgtcggatgttgagtaccgctgcttcgtcggcggcctcgcctgggccacggacgaccactccctccacaacgccttcagcacctacggcgaggtcctcgagtccaagatcatcctcgatcgggagacgcagaggtcccgcggcttcggcttcgtcaccttctccacggaggaggcgatgcggaacgccatcgagggcatgaacggcaaggagctggacggccgcaacatcaccgtcaacgaggcccagtcccgcggcggccgtggaggcggcggcggcggcgggtacggtggtggccgtggaggcggcggctacagcggtggcgggcgccgt

SEQ ID NO: 324266 - DNA, 243 bp, Zea mays
cttgaggctgccttggagtgtcctcctgggtgcggtggtgcacaccgtgtgagtccacagagtggccacccttgtggtcatgaccggcaaagcaggccttgacacagttgtactggtgaacaatagccatcacctcacccttgatgctgacttggagtgtcctcctggtaccagcgcttttggtcacgtcgaagtgtatcctaacaggctgctgcttgtaggttttgacacaatggctgatac

SEQ ID NO: 324267 - DNA, 96 bp, Zea mays
cccacgcgtccggcggatgagtgcgacggctacgaggccggcccgctggtcgccgccgctggaaccggaaccggaaccattcccggttgaacccgg

SEQ ID NO: 324268 - DNA, 228 bp, Zea mays
cggacgcgtgggcggacgcgtgggtctttttttttctttatagtgaataacaatctatggatccatatatcaacttacacagagaagttcagtacgaaagcgaaagagacaataaacatcaaagttgaatcaggagacatatgcatgtacatatacataaatataaaagaacaaatttacggcgtctcgatgtgtttacgcatgcatatatccgcatgcatgcattgc

SEQ ID NO: 324269 - DNA, 171 bp, Zea mays
cggactcgtaggtcgactcagcgctttagttctgcttccagcagccgtaacgactgggtggggtgcatttacatacacggctggcctttcgagtgtctggctacgcacgcacatgttgtggatcttgtgttcgtaacactatatggactccctgagtctattatagaaatg

SEQ ID NO: 324270 - DNA, 83 bp, Zea mays
gacccactcgtccgaaagaaaaaaaaaaaaaaaaaaaattaaatttaaaaaaaaaaaaaaaaaaaaaaagaaaaaggaaaggt

SEQ ID NO: 324271 - DNA, 222 bp, Zea mays
acccactcgtccgcggacgcgttcgcggacgcgtgcgtttttttcaacgtctataccgaataacaatctatgtatccatatatcaacttacacagagaagttcactacgaaagcgaaagagacaataaacatcaaagttgaatcatgagacatatgcatgtacatatacataaatataaaagaacaattatactgaatctcgatatgtttacgcatgcatat

SEQ ID NO: 324272 - DNA, 197 bp, Zea mays
acccactcatccgtccacacgttcccgaacatgtacatgcttttcaacgacctgaccaattcctcgaccagggacactttcaacaccaatcgcatccacattggcaactaaatcggcatcacaatcaccaacaccatcatcaacatcggtaacgactgcatctacatctgcccctgcacctgcaacgtgaacatcaa

SEQ ID NO: 324273 - DNA, 68 bp, Zea mays
cttccaaatcatacatatcatttcacaaaccacattgctaactatacaatgaccattaaactaacccc

SEQ ID NO: 324274 - DNA, 201 bp, Zea mays
cctgtgcttatcttttcttatatatataccaccatttaaattctcgacggaatttttttgaccaccgtgagctgtcatatatgtcgtccattgatttgtgttaatctgacaaaagacgttgaaaaaaaaaaaaaaaaaaaaaaattataaaaatcaaaaaaaaaataataaaaaaaaaagcggtcgttctaaatgttccaa

SEQ ID NO: 324275 - DNA, 124 bp, Zea mays
cgcgcttctgttacacacgagacttctgttttcgttgagctaatcttacgacacctgcgtgatcgggttacagatgtgacacggcatccaaactccccacctgtaatgtcttgccaccggatcg

SEQ ID NO: 324276 - DNA, 343 bp, Zea mays
ctggcatccactcgtgctgatccctctttttccccgcaccatcgatcaagcttgacctggcggagttgatcatgcatggtttgaggttcttgtgcagactaaggaaccaggagctggaagaacatgggagtgaatcatatcactccaagggactctgcccctcctgtataatcctctgaaactcgactcgctctgtcaccctagtttctactttctagctgccaggaggaagaaatgtactgtaactaacagcaagcaaagcataagaatctgcatggctcacggtgtaattgttttttaaaaaaaattaaataagaatatatcgaaattaattagcatatat

SEQ ID NO: 324277 - DNA, 194 bp, Zea mays
gaataaccgggctgacccacgcgtccgcccaagagctcgcgcgcgacggccatcaacctgctccgtccgctcgcgctcctcggggccgtgctcggctgcgcactgagtccccacgccgatgccaccgtctgcgacgtcggcggccacgacaggtggatccagccgacggtcaaccacagcggcaggtacaacca

SEQ ID NO: 324278 - DNA, 244 bp, Zea mays
ggaccggcgtgagggaaacctagatgacccgttcctgggtcgggaccagagagccggccgggctgcgccttcgatcgccgccccgtcgcctagggttcccgcgcctgtagatcgggtttgggggacgaggaaggggagtgccaagtaagggaacgatggggcctaggcgctccaagcgcgtttcgtgggccgacggggccaatctctgcaaggtattgtgattacgtccttgtcggaatgggtt

SEQ ID NO: 324279 - DNA, 392 bp, Zea mays
cttggtctcaactgaggtcggactcgacgttgtcgacctcaaatcagggcaggagcgcaggctaagccagcctgggaactacaacgacttctatgtcttctcctttatgagcttctatactcgagactgtacaagcggctaggtaccgtgacccatgacgacacactaatcactgcaatactgacgcgaataatgagattgcctgtctcatctacagattcatcaagttgagtatgcaggtgctgtcatatgttcgttgcacgaatgacgtcatcgcaagaaacacatgccgtgaagccaacatattggtcggttatgctgctatgctctctagcatattcttagatgcataatgtatacgcagacgtatactttggtctcgtaatatgtgt

SEQ ID NO: 324280 - DNA, 322 bp, Zea mays
cccacgcgtccggccacgcgtccatggtttcgtccgcaaccatgtccctgcacctgagggcttcggtaagcaactgcctattctcattgcatggtacaggatcatgaactgtcgccttatcctgctctctgtcctgcgctcctgtgcactggttgcggatgcgtttgacatacgtggccaaagtactgactgcatatcaacgcgccacaacgatccgttgctgacgaatagccgttctaccactacttaaaacgccattgcatcgcgaggaccgtatgatgcgtgccgcaatgttagccttagaccatgcattgacattcac

SEQ ID NO: 324281 - DNA, 316 bp, Zea mays
  unsure (1)..(316): unsure at all n locations
cccacgcgtccgcggacgcgtgcgatcattcgtgcgctaccatctccgtccacctcatggatacatcaatcagcatgttctctaatcttctgcccatcgatgactctgatcaaattcttctatcttcaccaagcaacggaagattcaaaaatgatgccactgaacatattgctcttgcgtccttcaaccatgcaaaggacaataactatttctataatctntcatgtaaattattaacactcaatgtaatgcaaaaagtagcatatgacaaaagcttcaatcagcctttgtcttgcagaaactattcatccacttc

SEQ ID NO: 324282 - DNA, 316 bp, Zea mays
accaagcgtacgctaatatggcgctgctcgtagcctgggtgcgcctgcgccaccgactggggctgcgcacccggtacatgtcgaccacgttgtggagatacgcgtctcctgtcgagacggcgtatgatacggtgatcccagacgtcatcacaggcgagaccatcacggtcacgctctggcacggactagctggacgctgaatcgacgatgcatctgcagccgagcgttaccgggtccgatctcgacggtggtatctgcggctacgaggacctgaacaatgccgctcttgcatattatgatgggcatgcgctaacat

SEQ ID NO: 324283 - DNA, 381 bp, Zea mays
tgtgtctcctctcctacctccccgtctccctgcctggaagagaccgcaccagctcgtccgggagttccacccccaatccccacagcttcccgcaccaactaatccgcccaatttgcgggccactcccggcggaaattcgtgacaaagccgcggttttttcttccttttttctttcgctcccccgcccccgttttcccttttgactccgtcgccgggtctgctcctttattgctgcgcctgcctgattgtcttttctcgtctgaacgcgcggtattccgagggcggcgaccgcggattcgcctacggaagcggcgatttggtccacaggtggcgaaaggatgatggatttggggagattgctctagctagcgtggttctgat

SEQ ID NO: 324284 - DNA, 205 bp, Zea mays
cggacgcgtgggcggacgcgtggtatctttgcggccctttttttttcttatttcgcgtgtaaagatcaatcagcatgtcctaatctatgctctccattgttgccgcacatcaagtgtcttgatgttcaccacgttactgtacatacaaaattcttgcgtcttagcatatcgctcttgcgttattaaactggcaaaggaaaatgac

SEQ ID NO: 324285 - DNA, 338 bp, Zea mays
cccacgcgtccgcccacgcgtccggaaaaggggcatgggacacatcatgatcatggtatggtcttgttcctgcaaggacaaaaaacatagattagttatcttcagcatgtatgttcttttcttattttacacaactagcaaacatacgtttgtgtagcaagttagcaacagaatgcacagcttgttatgtagtcacatgggcgatttgtggcttggagatttattcaatgatcgtgccatctgttgcaattaaaaaaaaaaaaaaaaaaaaaaaaaaaaaaaaaaaaaaaaaaaaaaaaaaaaaaaaaaaaaaaataaaaaaaataaaaaaaaaataa

SEQ ID NO: 324286 - DNA, 167 bp, Zea mays
atttcttcgtttttagggaaatttggatccataccattaaaagatcaccactttggggccggaccattactatcttacttacatgagggcccacattaatcaatgacatgtacggtccatgatatatatctaaagtttggatcttttaatggtaaaaaaaacaaaaa

SEQ ID NO: 324287 - DNA, 217 bp, Zea mays
gacccacgcgtccgattgagcaccttctactcctccgtcgtgtaacaactcaacccccgcaaccgccacatcggccattttcacctgctcaaccaagcccaacaccctttacgggcaagccccagcttaagcctctctttacacacccaaagttgcgccccaagccactccaatctccgttgatgttgccgctgattaacaagtaactgaaaaagtt

SEQ ID NO: 324288 - DNA, 58 bp, Zea mays
cccacgcgtgcggtgagattgctgttacttttaccggcgaaccgcgaccacctcggag

SEQ ID NO: 324289 - DNA, 140 bp, Zea mays
acccacgcgtccgattgaagaggcgaagtggtcgccgaatgttcgcatgaagtcggcgtagcactggatgggggtgcgtcccttgagcactggcatcgcgtctcatcccatggagacgtactcgtagttccatcggtcaa

SEQ ID NO: 324290 - DNA, 311 bp, Zea mays
cccggcgggagccacgcgtccgcccacgcgtccgccgacgcgtgggtggtcgtcggggtgtactgcgcgagcaggtatggagctgttattggcaaccggcgtcatgcgccgaaaatggaagtcgaggacctgacggccggactggccagcggcaggatatgtgctgaggagaacatcgaccagctggtggctcctgaggcagaacgcccagccgatgccacggtcacggacacgctggctgattaacggaccattgtgccattgttgctgcgagagagatgtgcgtcagccaacatgtgtgctattgcttt

SEQ ID NO: 324291 - DNA, 337 bp, Zea mays
cccggcgggacgcacgcgtccgcggacgcgtccggcgcgcgccatcgattgtgtggggaggagggtggggcggaccctcggccatttgggatttgtgcgcgccattgacggcgtggggaggagggtggggcacagcagatggggaggagggcgcgatggggtggaacctcggcgacctaccatcgacagcgtgggcgttgatggcaacctcggatgatggggatcgtagagctgaggggtaggggatccttgacacctgcctttgatggtggggtaggagatccttgtcacattacgacgatggtggcgcggatgacaggcgttggtgcctgcacgc

SEQ ID NO: 324292 - DNA, 381 bp, Zea mays
cccacgcgtacgaccagccttcgcccaagcgttcgggctttccttcgggaaaggaaccaaaccagccggggcaaccgtgccgtcttcggttcttccatccgtcctaaccccggaaagtattcgaccacggaagcagcataacctccgtacatcccatccccggtcgcctgtactgtactcgtcccgctctagacgatcgatggccgccacggcagcggaagagatggaaaggattgtggaggcggaatgggatgagggtaagcaacggatgaggcataagcagcggcgccgaccgcttgcgctgccggcacggcctgtttcactcatgctcaatggggatggaagctgccggtatcgacgagagcagctacaactgcatga

SEQ ID NO: 324293 - DNA, 235 bp, Zea mays
ggcctagctcgctacggcatccatcatttgaacgaggagcaggatacaaacaccgtgccgccatacacaggtacgcaagaacgccactaacatggctaggctgcccttgagagcataggtggttctgtgcctcctgtttgcgacgcgggtcgcagggagccatcatcgtcaaggggatggtgtcattcgacaattggatcatctgcaaggtactggacaacttgaacaagaacct

SEQ ID NO: 324294 - DNA, 265 bp, Zea mays
cgcacgcctccggcgaacaccaccattttccctgcgatgcctataccaatcccggcggcgctctttcggggacgatgagctactacaatccccacggccatggcggcgcgcccccgtcttcgccgagcccctcccagtatgcgcccccgccgtctccccaagggtacccaatggacccgcacgcggagcgcgggatggagcaccaccaccaccaccagtacgggccgtcttcgccgtagccgatgtacgcgtcgtcgtacgggca

SEQ ID NO: 324295 - DNA, 390 bp, Zea mays
  unsure (1)..(390): unsure at all n locations
gagcccgagagcttcccttgccggcgagtattcagtccggctcacgcgatctgactttcgcggaggttcttgaatgtgatcgcatcattgcaacaaatccaagttaaacagattgctgacaacagcattgagcaagcattgatagaaaatcctcctaatgtgctgaaatggaagccatcagaaagagctaaacggtttcgacgatgcaggtcaactccctcagatcccaccgatcaaaaacctgcagaaaacggatctgtgcttaaagccaaagagttattcaaggagaaaaggccgagcttcatgcttgtaggcctcctccttttcgcctacctactagtgggtgtcatcatctnttacctattcatggatcaattatctgggaagaca

SEQ ID NO: 324296 - DNA, 287 bp, Zea mays
  unsure (1)..(287): unsure at all n locations
ggaaaacccggcgggacccacgcgtccggcgacgcgtccgaatatgctnaccagatatgagcgacacgtcaatagcaccgatcacgacacatttaacaaaggcgacagccaccacgcgaaccccagccgtgtacctactgggggcggctgtcgcggcactcttagtcacgcctgctgccgtggacgcaacaacactggcggcaatatggaggggaaccgcttttccagacatcagcaccaccacagtggggaccaagtcccagagctccgggttcttagacaccatg

SEQ ID NO: 324297 - DNA, 189 bp, Zea mays
tcgcgacgcgtacgactaggtctagatccctcgccgtcgcgctcgtccgcgtgctccgcggcgtcgatcttcccacattggccttcatgacgcctcaattctacaccttcttcgtcgggcccatcggcgcgctctacgcgatgtcgctctgggtcttcaacttcggctatatctacctggccggggcat

SEQ ID NO: 324298 - DNA, 334 bp, Zea mays
atgctgctctatgtggctgcctttgctttccatgcagccacaaggctggcccgcaggtgcgggttcaggccaccatgcatcctatccacgaggctggaccgcgccctccatggaaacttgtcatggttctacgaggacctggactgtatcatgcatgagcccgaggtctcgtctctggctcattgcaagagccaaggccggcttgcacggtacagcgatttcattgaataatgccttccatcatgcaacttggagctggtgccctataagaggccgtgtactatcaggcttcaacaattagcaggttgtcacttgctagcggcacaacatcatt

SEQ ID NO: 324299 - DNA, 236 bp, Zea mays
acgaatcctgctgaatctacaggcactaaatgggtatggtgtaattaatgagccgcgttgtatttaagccagctagtcattatagtgatatgttaactggggtattcattatttctgtaatactgtcaaatcttttttctaatttctctattaagccgagatatgtttctaaaacaaaaatatggaaaaaaaccttcacgtgtatagcattctacaacacaaaatatttataactg

SEQ ID NO: 324300 - DNA, 351 bp, Zea mays
cggacgcgtgggaaaaaaaaaaaaaaataaaaaaaaaaaaaaaaaaaaaaaaaaagagaaaaattaaaaaaaaaaaaaaaaaaaaaaaaacaaaaaaaaaaaaaaaaaaaaaaaaaaaaaaacaaaaaaaaaaaaaaaaaagagggggggccccatcaaaaggaccaaagctaaccgcccggggcagcaaagaaaaaacttttcttaaagggcacccaaaactaaattcacggggcgcagatcaaaaacggtgcaatgggaaaaacccgcggtttcccaacctaaatggaaaagggcaaaagccccgttgcaaaacgtgaataaaaaccaaaaggggcgtaacgattaccc

SEQ ID NO: 324301 - DNA, 311 bp, Zea mays
  unsure (1)..(311): unsure at all n locations
tcgnccacgcgttcggccacgcgttcgagcttaccaagagagccaggtgttggccaagaggggccaatcaggccaacggtccaggaaaaatccaaccttaccaacacagcagcagcaagccccacccgttcgacgacatggcccgctcggcgcccgcgccgtgttggcgctcctagtggcggtcgcggcggtggccgcgttcctcgcggtgccggcctcggcgaagtccggggagctgagcgcgatggggttgctggcggcgaagggcggcagcggcgcgggcccgcagaagtgctcgggcgcggtgggcg

SEQ ID NO: 324302 - DNA, 62 bp, Zea mays
cccacgcgtccggcgaggcggtatagtctatatgagaggcatgtatccagtagcgcgcttat

SEQ ID NO: 324303 - DNA, 397 bp, Zea mays
  unsure (1)..(397): unsure at all n locations
nccgcgcgttcgcaaaactggttttggttttaattgggtcacaaatgcctttggctggagtaattggttggttggtggtcatgtgaatgtccgagcttcccattttcaaaatgttaatatttcatatctgataaagtttataagtttattgtcgtcattaagatgggttaagaaggatgcctgctgtgttttaggatgaggctccatttggaagtcaatagtgcaacactgctcattccaatgatatacccccactacaaacagacacttggtcataattggctttcgcacattcatattcaatgtctcaaacttgttattacgattctgcggatggtctgacaaaaccctgggcatagtgtgattattgacactaatattagttccaaagcatttc

SEQ ID NO: 324304 - DNA, 305 bp, Zea mays
gaatacccgccgggacccacgcgtccgcggacgcctcctcccaccccttcggcttcgcgtgcgttttttttttggagcttaacagcagtttttaacacattggcatggcgcgcgagtgcatgatgcgtgactacacagcatgatacatgcttgtacaactagaggctacacatgttacgactggataccctatttactagctctgacgtacattactagtgctggaagataagtggtaacctgcaggaaaaatatagaccaaactcatcgcagggaaataagaaaattggacagatcgaaatcgc

SEQ ID NO: 324305 - DNA, 383 bp, Zea mays
  unsure (1)..(383): unsure at all n locations
cgcacgcgtccgcccacgcgtccgcatatctcgaacccagtaaatcaccagcgtacgaagcacattgagatcgatctacacttcgtccgtgagcgtgttgcggtcggtgctgttcgagtattgcatgttcctactgcctctcagtatgctgatatcttcaccaagggattgccttcatcggtgttcacaaaattcaggtctagtctgaacattcttccaggtggctgaccacgttcagactgcgggggggggggtgttggattactatatttagattgatcatcttccttgttttagtattgcatgtcaccattattgtatacgtgcatggcacggngatcaccttccatctctagtgcatggctatacttaaggtctgtttg

SEQ ID NO: 324306 - DNA, 375 bp, Zea mays
acgcttataccttcctacatacccttggcaatttcatggttccaccaaccacctttgttgggggggtcttttatttcatatccgcctaaataaaatggatttttgcttgtcttaggcatggactggaattatgtcctaatggaacaattgcatcgcttagatctaacggcttctaacattccatcatttcgtatgtagctacattttgtctccaatacccatgatttgctagctacataatatttctaatttttctaatcattagataataagttcatagtacatgaatactgcaatcagtccccgatccttgtggcatctatgtcaaacacttaactactcaaaacatacattggacaaatgcgagctcatata

SEQ ID NO: 324307 - DNA, 175 bp, Zea mays
  unsure (1)..(175): unsure at all n locations
cccacgcgtccgcccacgcgtccgccctcgcgtccgcggacacgtggacggacgcgggaggcctatcaaacaccctggccccnccccacncggangtncnccaccaaccctctcctggccgccgactaccgctagcacaccctgcaccacaggcagcgaccacccccgcagcagg

SEQ ID NO: 324308 - DNA, 319 bp, Zea mays
gacccacgcgtccgggcggatccgcctccgtaccatggagtcccgacggcgccacctcatggtgttcacgggggcgttcactgataggtggtggtcctcatgtactagatctcacgcctgcagggcaggctccctaacatgggtcgtcgcatcctcatggtactcacggtcgcgctcgtcgctcgcggcgcggaggccttgatctgcatctacgatcgggaacccttccgagaggtatacagagcctcctactctctggcccatagtattctgccagtcatctgctcccgaacgaagggacactcggatacgagccccc

SEQ ID NO: 324309 - DNA, 237 bp, Zea mays
actgcctacaccacttgatagacagtgttgggcttccattcggcggggatgacgtgcgtcgtagacagtcttagtgcctccctcggtggtgagtcggacggtgatggaagcccaacactgcctacaccacttgatagaccttttttatttttttattcaataaaaggatataaggtgtgtgacaacaacacaaatattgtattatctatgtatctcctatgcaatcccaattttatc

SEQ ID NO: 324310 - DNA, 381 bp, Zea mays
gtcaggctgactggattgctgctccattggtacagttgcacccgcggagatttaaagcagcgtttgtttggttgttcggtacataaatgcagactcgtctcgtgcaaaatatcaccctcagccaggcccgtccgagacggtcgccaagcacgtagtgcaacggcacgtaaaaagaggagagttgtagctatgttattctctgctatatctcttaattagaatatttaatcacagtactgattttatatctgtgtttctggtattttttaaacaaaactagaccacatatattgtataatatttaaagattttttgtacaatcttatctaatacacgttctgatacagacaaccaaacacgagctattaaaaaaaataaaaa

SEQ ID NO: 324311 - DNA, 365 bp, Zea mays
cggacgcgtgggcggacgcgtgggcggacgcgtgggcggacgcgtgggcggacgcgtgggcggacgcggggcggaagaggggatttcgagccgcggcgatcggggctagagtggccctcgacgcgtccgcgggtggaattgccgagaagccgagagagaggggttggagcggagttgcgggaggtgggagagaaggcggcgatggggcgcctgttcctgatgcacctggacggcaacgtctacagctgcaagcactgtaagacccacctcggcgttggcagcgacatcatctccaaggccttccagtgcatgcacggcaagggcgtacctctttcataaaggtgtcaacgtgacttctggagtaa

SEQ ID NO: 324312 - DNA, 291 bp, Zea mays
ccaacgcttacgacatatgggacactggattgaagacatcgatcggctcctgtgaacgtgcgtgagatcagctggcaagagatcctacgcgagctcatacgcaatggcagccgctcagcaggatcctcaacacgacgataaacccaacctgtatcccaacgagtctggccaacgtgcaatgcctcgtgcaacgtctgtgcatacctcatcggatcgatgatcgtccccattctcagacaaagtctgacacaacgcctgatgactgacctcatgaatgaacacttgcacgac

SEQ ID NO: 324313 - DNA, 331 bp, Zea mays
caaacccctcatccccatgagaccttacgagttggagcaaggctcagtgcccgcctgcccgggcgtgccgagcgatgccatggaggcgcgcgtccctgggcgtcgtcacgtcctcactccttgtccgactgcctgtcgccttgtctcgcattgcaggtcgtagacaacagacgagcagtagcagcatcacgaggcggccgggcccgggccacgccatgccggagaaggaggcgcaagccgccgcgttctgcggctaggcagtgatcgccgagttcgagtccctcacgcgggacgccgccttcgtgcagcgctacacgctgcgccggatcct

SEQ ID NO: 324314 - DNA, 222 bp, Zea mays
gagagagagacaccccagccgtccgagagcggtcggtcggctgtgctggtggaccaaaaagggcgagcgaccgtgccatgcatgcagcgcgctgacgaggcgttcggcacggctccgatccgcctccgctccaccaaccgaggattaggcgtcgtcgtcctgtgccacaggcgccacgcccagatcgtgtaccggctattggtgcgcgcgcgcgctcatggc

SEQ ID NO: 324315 - DNA, 70 bp, Zea mays
aatccgtatatgggatcttaatttgtacattaataagaaacaaagaatgtactacccacttattgcttct

SEQ ID NO: 324316 - DNA, 344 bp, Zea mays
ggaggtgccgacgcgggagctgttcgacgcgtgcagcatgcgcaacatcaccagccggtagcagagcgggcccaccatcatcgagctcaccgaccccggcgagcgcttctacttctgtggcgtcggcgagcactgcgaggccggccagaagctcgccatcaacgtgctcctcgtcccgccgccgccgccggacacggacgacgactgctccagcgccgcccgtctcccgggccacgcgggcgcggggctcgccgtcgtctgcatgtgcctcgtgtccgcgctgctgacaatggcggtgtgaatcggcacgctgccgccgtagattattggcgattgctggctga

SEQ ID NO: 324317 - DNA, 310 bp, Zea mays
tgtcgtctccaattcggcgataataacatacggaagagggaggaacagatttctcctggctatccataattgcggagttcgtcgtgatccgccatgctcgacgaccatccctttgctcaggatggcatctcgagccccatagcagcgcacatctttgacttctgcgacaatggcagcggcggcgacctcttcacggccgtgaacgtggcctcagacctgttcacggcgccatcagaggatgcctcgtcgtcgtccgtagtgacgacgcctttcgtgccctgcggccacggcgactacatgccgttgggca

SEQ ID NO: 324318 - DNA, 268 bp, Zea mays
cccacgcgtacgggacgcgtggtcggacgcgtgggcaggtgacgaggctcaagtgtgtgggcttcgggctcggtctgaccatgaaccactgcatgttcgacggcatcagcgccatggagttcagcaactcgtgggcggagactgctcgcggtgtctccgagctcaccgtaccgtcgttcctggaccgaagcgttctaaatgctctcgacccgtccgtgcccaccttaccccaccacgagttcgcctagatccccgacgtcttcgacac

SEQ ID NO: 324319 - DNA, 133 bp, Zea mays
aagacgcgtagactgtctcgtgcgctagttttcactttaacgcccattaagtctgtagtcggactgggcgagcttgccgatagtctcggcttcctgacctgctcttttcgagcggttggccatccactacatc

SEQ ID NO: 324320 - DNA, 389 bp, Zea mays
gcccatgcacggcaactgcagcacttccgcttccgcgacatcacgctccagcgggggctggggttgataccacttgcgccaccaccaccagcagcgcctgcacagccctcgcatggccggctcaggctccatgacgctccgggccagctcgttcaagcgcggctccggcggcaagatcgagctacatatcggctctacgcgctcgccaaggtgcgaccgcttgtggagcactttctcggactccgcggagtcgtacgttagcggactgctactgcaacatatccagcagaaccagctcctacggctacgactcttcaagccgccagtctccagcatcagcaccataggacttggtctggagatcctgcacaggagcaaactcggcaaca

SEQ ID NO: 324321 - DNA, 144 bp, Zea mays
gcggcaagacgttgctgccataatccttttacctttataaggataaccctggcactttgggcacgtataaaatacaatatgtacttggcgacatatacgatagatacccacatgtggaattgtatcttacattccaccaaatga

SEQ ID NO: 324322 - DNA, 342 bp, Zea mays
attcatcacaccttccgtttttaatttagcttcaaggccgccctacacggggcatggtccaatctaactgagccaatggcactgaaccctatgtctcgcgaacatcactaacatagctcttcgccacatcatatcatatcacctttgctatcttggattctgacttatacgcgtccagacataatccgtcacactgaatcttcactccactttatcaccaaccaatctctattaccaaatttgtcaatcaacatctccactaatactatgaacaattactatcgctgtccttttatcactaactaaaaactaacctttctcaccacattctaaccccaactc

SEQ ID NO: 324323 - DNA, 319 bp, Zea mays
aatgtttcagcggcgccggcgcatggggcggagggtctgtctgaacggcgaccggtgtccgccttgctgtccagacgcgaatcggatcatggcgcccccctgccagtctgccacctcaggcacactcagctgtcggtgtggtggcatgcctcggtatgctgacttcggctcttctcaacccttctgcctcgaggcctgcatctcctcgactcgtcgccgatctcttgtgatcctgtctcgacctcggccctcaactgaatattcaagacatggaggattacccagccataggtttcacttatctgggggagtttgatga

SEQ ID NO: 324324 - DNA, 433 bp, Zea mays
cccacgcgtccgcagcaacctcaggttatgtggggggtcgtcggcaaaacgacgctcgtggggcattggctacggcagaaactagtgtctggctgccattggttgtgggaggagcagaggaaaacaaattgttggttacactctgtactactgcgtcatgatattgtcggctttcgctttgtggcttttggaggaaaactggagatgtggcagctttggctttatggttcttggaggaacagccagagtgcatgagtcaaagcgctatattctctgtagtgaagtgaagcacgcacgcacgttgcttttccttcactccatcggccaccaagttattaatgcattgcatgccagctggcccatctgattcctagcgacaggaacatcattaagcaactagtactagaagtatgtaggttgatgtcgatgatgt

SEQ ID NO: 324325 - DNA, 127 bp, Zea mays
aaacacactgaacccaataatccgatcccacataaacttttctctttgtccgttcgatcgatcgctgccgagtcgtatgtcatacaccatcatcacccataaccattgtctgcaacctgtcttattt

SEQ ID NO: 324326 - DNA, 309 bp, Zea mays
cggacgcgtgggcgacggcgtcatgcatgcatggatatatacaccgtacctagtggtagactgatatataggtgatttctttttttctttttttgtgtgtgtggtttgatatcaacatccagtagctagctagcaaaccaagcactccgacccatttgcatgcctgcatgtattgacctgagcacctggtactgctgtgtgatgccattagaaaagcaagcaagagagcttgctagctagctacagctcaagtgatcaggggccaagagcacaaggcgtgcagctgattaattaagcaagtttcatccc

SEQ ID NO: 324327 - DNA, 364 bp, Zea mays
cggacgcgtgggtagttctagatcgcgagcttccgccctttttttttttttttttggttttgttttattttttttttttttttttttttttttttttttttttttttttttttttttttattattttttttttttatttctttttttatttttttttataattttattttttttttaaaaaaacataattatataattttattattataaaaattattactttaaaatttatttacaaaaaattattattttttttatcttttttaataaaaatcttttattaatattttattttttattaaattaaattattattataattcatttaattttaaatgtatcctttaacatatttattattttt

SEQ ID NO: 324328 - DNA, 122 bp, Zea mays
aaaaaacataaaaaaaaacaaaaaaaaaaagaaaaaataaataataataataaaaagaaaaagggaacaaatataaataataaaaaaaaataaataaataaataaaaaaggggtgctcgttt

SEQ ID NO: 324329 - DNA, 415 bp, Zea mays
cgcatacagcgagaagaagcccagcagcaagggcgcaagcgcaactgatcccgcacacgggtgatgttccacatccatgcctataggccactcacctcaccacgcagcgttaccggccgtactactatatctacatacgaccgtgggacaacgtcgaccggagctcgatcggcgcagttgccgcatgggcgtggctgtcaaagttcctttgtttctttcttgatttgtgcttgcgttgggttcggtgttccactttctttttatgtgattattaatcttgttttcaaaaaaaaaaaaaatgcaaaaagctgaccgcgctaaacaacaaaacaagtcacacgcccgaatcaggacggtcaatggacctagaccaagaactggccccaaaaaaaaaaaaagggcggccctttttaag

SEQ ID NO: 324330 - DNA, 455 bp, Zea mays
ggcttctcctccccctcttaccaagtcctcttcgggttagggttacttagggttttgtggaggggcgatggcggcggctgatgtggagtaccgttgcttcgtcggcgggcttgcctgggccaccagcaacgagtcgctggagaatgccttcgcctcctaccgcgagatcctcgactccaaggtcatcaccgaccgggagacggggaggtctcgcggcttcggcttcgttaccttctcctccgagaactccatgctcgacgctatcgagaacatgaacggcaaggagctcgacggccgtaacatcaccgttaaccaggcccagtcccgtggcggtggcggtggcggcggtggctacggcggcggtcgcggcggcggcggctatggtggcgggcgccgtgacggcggttatggcggcggtggcggctacggcggtcggcgcgagggtggtggcggcg

SEQ ID NO: 324331 - DNA, 473 bp, Zea mays
cccacgcgtccgcccacgcgtccgcccacgcgtccgcccacgcgtccgcccacgcgtgcgcccacgcgtccgcccacgcgtccggttgagtggcaacccggtagcacaataggagttgtgattgttgattcaagttactacgtaagtacgtatattagagcatgactaataatgcgaatattgttaaaatggatacgcaggagggcaggaggtgagcttttgcatgtctagatattagcagagtaacgagggatcgattgctatttgtgattgtccccggcccgtgtttggctactcaccgttcaatttcggtttctatcccaatgatagaggcgaaggtaaaggcatagagaccccaaacttaaatccaaaataaactacaggaagagagagggaagggaccacaggagagtcattaagtaaatccacttgttgtctgattagggtaggaaatgatgtctgaaagtgacgag

SEQ ID NO: 324332 - DNA, 171 bp, Zea mays
  unsure (1)..(171): unsure at all n locations
cggaattctccgggntcggacccacgccgtctcgcgccgcgactnggcgtcgaccaggccgccgccgctgtggagccgcnnctcgcgggcatanncgcggcgtcccgcgctttngctggcgcccntgtccgacgggcgcagatctcaacgagggggccagctttctcgtcg

SEQ ID NO: 324333 - DNA, 73 bp, Zea mays
cccacgcgtccgaaaaaaaaaaaaaaaaaataaaaaaaaaaaaaaaaaaaaaaaaaagaaagggaaaccaatt

SEQ ID NO: 324334 - DNA, 391 bp, Zea mays
cggacgcgtgggaaaaaaaaaaaaaaaaatttaaaataaaaaaaaaaaaaaaaaaaaataagagaaaaaaaaaaaaaaaaaaaaaaaaaaaaaaaaaaaaaaaaaaaaaaaaaatataaaattaaaaaaaaaaaaaaaaaaaaaaaaaataaagggtgaccttttaaatggtcaaaaatttctttacccttattttcaaaattatatttttttaatagtgacactaaatttaaattcttttcctactttttaaaaatttcttaattggaaaaactcttgcgttaataatttttatccattggacccaaaacctcttttgtcaagatgacataatagaaataaggccctatccattggattttcctaagattcctacacctttattgggaaa

SEQ ID NO: 324335 - DNA, 448 bp, Zea mays
  unsure (1)..(448): unsure at all n locations
cccgtccgatggcnctnntctaccagannnagctatggggaggggcntaccagacatngggtcggttgggacagccnnntcaacagcagtggtcagagctcatgcatggccattggcngnngatccantcnnaccatgtnnctgtggacccaacaacangnctagtgtttgggcttctaaacaaagtgannctcccgcnnacttggcatgctnnttggacatccnnntggtctcaaaagggcncnntgtcattggtgggcanngctacnntcggtnntgggcaccagcantnncttccgnngcccgggcccgggtgtccccaatgctnnnttgagtgagggggatgcactnnggcacattngctctgatgggaccaataaagtttcccaacttggagacacttcaagggatttatgagnggagtggacctattgatcttggggaaagc

SEQ ID NO: 324336 - DNA, 447 bp, Zea mays
cccacgcgtccgcaccttccatcgacaaaatggaggtaccgcgcctcccccagggtgcccttccatgcatggcgttgccgcggccgtccccgcaatcaactcccagatctcgtgctcacctccccgcaatcaaggtcgtcacgcccgatgaggatggccgcgagtcgccgcacggcggtccgggccccagcgatagctccggcgcaggcgcgaggaagaagctccggctcaccaatgagcagtcgacgctgctcgaggacaccttccgcgcccacaacatactctccaacgcgcagaagcaggagctcggacggcaggtggatctcagcgccaggcaggttcatatcgtcttctgcgtgtatgtagttggttcttcttcaattctctatgtggggaaaacattaattgggattttcccagcaatcagcttgataggcgacatcatca

SEQ ID NO: 324337 - DNA, 219 bp, Zea mays
cccggtcgacccacctccgccaccgtaccaacgctggctgatcttgttccatcatcaaataatggatgagtgctattacatatgtggcatcactcaaagcatgacttccatgttgaactatctttcaccttagcaaacctaatatactaatcgacattagaatcctctaaatacttataactatagcctcatttacttattccactgaaacacaacata

SEQ ID NO: 324338 - DNA, 305 bp, Zea mays
cccacgcgtccgggaaacccatctgtcatagactgcacttgtgagcttccaagaagttccttcgttccagcagacgagtatctttgtcttgcaacttgggataccagagctccaacaccataccaaattgaaaaagctgcacgttgggcttgtggaaagagatctgaggggaagccggtttatgtccattgcgcatttggttagaaatccaccttttgttataattaattacaggattggatcttgatgttcagattatgcacaaaattatattttctgctatttatgcaatatattaactgtca

SEQ ID NO: 324339 - DNA, 332 bp, Zea mays
gttctagatcgcgagcggcctcccttttttttttttttttttttttattcatttttatgggggtttgggaaataaattacctaatataaatttgctgatcaagcccaaaatggcttcattctcgtgcgatccacacgtcaacacacaaaagactgtgaaaatagattacggagatcactagaagctagcggaagactgtttggcatataggccttactctcgctaattcacatattcattgcccttatcacaatcctacatcaactgcttacactacactcaaaaacctctttaatctatgtaataacgaacagccttttctatacactctg

SEQ ID NO: 324340 - DNA, 383 bp, Zea mays
gggcgacgtggatgagctgctgatgtcgcgtctcgaggatggcgacacctgccagggcgagagtggagtcgcgatgacgctggccgtcgacacgaagcgcgcagcgctgagtgtatgcgctgagatgcttgtctacatgacgctggtgttcaacgagttgaggaatacgctcgagaagcactgtcagtggaggtatcagatccgatgagcatgtgcatgctcggtgctgatgcattctctagcaagcgcgtccggataaagacgctggtgatttgtggtgtggtgacacatgaatgaatgatacgagaggcttgttcccacgtccgtgtacgaggactatggaatagcaaatctggtgctaccaacgaggcattacctatatg

SEQ ID NO: 324341 - DNA, 81 bp, Zea mays
cccacgcgtccggctagcggttgcttcatttcattgttcattttttaaaaaattttatataccacgcctttgcattgagac

SEQ ID NO: 324342 - DNA, 284 bp, Zea mays
ctcgcgccaccgtccactgcgtcacacacataataatgaatggtaccgcccttttcctacgagatccggaacgattgaggcgaacacacgtacattcacccggaggcaataatggctttgaacccggcttcggcgatgactacagcctatggcgtgctattcctacgctaccggctcacgcgtgccgcggctctcaaccggtacctctgcgattacatcatccaggggaccatgtactgtgacacctgccgaaccacggacaggagcaacgtcagcgagtacat

SEQ ID NO: 324343 - DNA, 133 bp, Zea mays
cggacgcgtgggtttctggcgggcaatcgcttcacgccggcacggaggccctggcggctcaggccgttgactctacacgctggagcaagctcggcactgttggcgtaagcctcgacgctttcacgtggccttg

SEQ ID NO: 324344 - DNA, 281 bp, Zea mays
tcatctgacagcaagttggtacgtgtcctcgcgcgttcgattggacgatccagcccacggcacacggacatacgtgctgcctctgaggagcatgaacgacgatcatccatccacctgacgaagacaccatcaatacgacgaacatggcgatgaggtcgctagcactactggtcctactaatcctgatggtagtaggacgtggctcagacgatgctgtcataaatagagcagagagcctgctgatgcgattgccattactatggatcatgatccgccgaagg

SEQ ID NO: 324345 - DNA, 84 bp, Zea mays
cggacgcgtgggcggacgcgtgggcggacgcgtgggaaaaaaaaaaaaaaaaaaaaaaaagggcagacgatctaaaagaatcca

SEQ ID NO: 324346 - DNA, 88 bp, Zea mays
gacgtccatagttgctgtataaggcatgatttgccatcattctgttgcttcggtgatgcttgcaatgcaatgagaatgtgttggaacg

SEQ ID NO: 324347 - DNA, 207 bp, Zea mays
  unsure (1)..(207): unsure at all n locations
cacaatagtaccctgttgaggaactttgtggtcacttcttttctgatttggacttcggttgctcgcgatcgatgganggctggtactaatctttggagggatattaattccaactgggcttcaggtggcctgaaaaccagggttaccaaaccgccaggtaaatttggaccattaggaaggggtggaatggattaaaccgggccaagt

SEQ ID NO: 324348 - DNA, 174 bp, Zea mays
cccacgcgtccgcttttttcccctagttggaagttttcttactcaattgaatgaacgagggaacttattgcatactatcaaaaaaaaaaaaaaaaaaaaaaaaaaaaaaaaaaaaaaaaaaaaaaaaaaaaaaaaaggacggacaatataaaagaatcaagctataagaacaca

SEQ ID NO: 324349 - DNA, 408 bp, Zea mays
gataatggcataaaaaaaaaaaataaaaaattaaaaaaacaagacaaccatataaagaaagcgcaaacttacaaacacatacatgcaaccccgtcgctctactatacccacactctaaaacccattcattcgacgtcttaacacaactttggtactgccaaaacccagtcgactccccacttatttacaccgcagcaaatgcgaaaaccttcagcttacccaatttaaaacattccctgccaaaccccctttcccaacatttactcatcctgaatagcccatgacacaccccctttaccaacacattaaccccctcaatgtgcaaatggtacgcgccctgtaaccgctacattagcccgcggcctatcgcgctttccctcagctttaccgctacccttgctagccact

SEQ ID NO: 324350 - DNA, 119 bp, Zea mays
gcgcggggtgacgtcgcatggcgtcatcggcggcgtaacctatcgtaccatcgacggcacgtcgtccacgcccgaagccgtcagcctgctctgctccgagacgcagacgggcagcgggg

SEQ ID NO: 324351 - DNA, 51 bp, Zea mays
  unsure (1)..(51): unsure at all n locations
cccacgcgtccgcccacgcgtccgcaccatgatgaggcantatgtcttcat

SEQ ID NO: 324352 - DNA, 190 bp, Zea mays
ctagttctagatcgcgagctgccgcccttttttttttttttttttttttttttgtttttggtttttttttatttttttttttttaatttttttttaaaattttatttaatataacaaaaaaattttttatattcaattaatttatattaatcaaataatttaattttaatgtatcacattttcatactta

SEQ ID NO: 324353 - DNA, 182 bp, Zea mays
actattccttatctctgcacaccaccccatcaccttcatatcataacccatccaatcctaccacctgatcctcaccaccatatttccaccatatcctccatgaatatcatacagtcaccaataattacttatcctttacgctcacacacttccctactaccacatacactctaaacaccaaa

SEQ ID NO: 324354 - DNA, 320 bp, Zea mays
tgcacagccggcattcaatatgtacctgccgctcggcgccggccggtacgaatggacccgggtagccagcggttggtgacgacgtacatgcgcgggcgcgccggccggaaagctagcagcagtggcgcataagaatgacgagctaggaggaaggaaggagacgcgccactgggcaagtacatatacaaagtgaccgacgagcgtacagtggtatccgtgaatcatgtactagcatagacatagcatttgaacagcatgaggtgtacatacccccctagttcgttcagaagaatgctggtgactgtaactcctgtttctgc

SEQ ID NO: 324355 - DNA, 331 bp, Zea mays
cccacgcgtccggttctagatcgcgagcgggcccttttttttttttttttttttgttttggtttttttttttcagccttaggtactcactagcgtttccttctcattatacccttattcgttctcatacagatctcctggacgaagaaacatacaaaagctacatcaaaatcaaacggctattttgttctccttttgctcattaggagggctctccagttggctgtccgtgtccggttgggaggccccgggcgcactggggtgggcggctgcccgcctggccgggcagccgtaagcgccgagcggcgtgccggcatctccgttgcggtgtg

SEQ ID NO: 324356 - DNA, 328 bp, Zea mays
ggccgccgcggccgacggatgctggcgctgcggggtgtacccggcgaggccatcgagccggcgccgtgtggcgtcgctgatctccctcgcgcggacatcgcggctccgcgccgtgacggacgcgctcccggcgctccgtggcgcggcgcgcgaggctgccggatcgtcggcttggcctcggctcctaacggatcggccggagcttccggtccgataagcgggcggctggcctctcgagctacacgtgcgctacaaagctgggctctgctcgcgactgccccggaaggggcgcgcctgtggtgctcatgaacccgagctggcggcttcg

SEQ ID NO: 324357 - DNA, 303 bp, Zea mays
cggacgcgtgggcaagggaaggtcgaggcacgagagcgctagcggcggagctagcgagcacccggcgtcgggcgacggtggcgccatgggtggttggtactccgccattgcggccaccaggctgaagatgctgcgccgcggatgccggggtgccgctgccgtcctccccgtcgccagccacgacagcgtcaccggcaaggagaggaagaggaagtgcaggaagcacgcctctatcctgggcgactccggcaccgtcgacccggacttctcgcggcggtaccggctcggcgcggagcttgggcg

SEQ ID NO: 324358 - DNA, 136 bp, Zea mays
attgtatgcatgttctcctctcacatatgttgttggtgtgctgtatatataattaatttgttaactttttttcaggcacatatgtatgttgagatcaatacactagtagaaaaaggctcaaaacgcgttgtgcgat

SEQ ID NO: 324359 - DNA, 170 bp, Zea mays
gccacgcgtgcgggagcgagtgtcggaacagactcctaaacctccagcaggatcttactcggtctattgctatataacaacatgtctgtactgctgatcatagcacttagcattgtaccatgactagagcagtccatataactgcctttagataaaagggcggacgatat

SEQ ID NO: 324360 - DNA, 312 bp, Zea mays
actagttctagatcgccacaaccaaaaaataaaaaataaaaaaaaaaaaaaaaaaaaaaaagaaaaagaaaaaaataaaaaaaaaaaaaaaaaaaaaaaaaaaaaaaaaaaaaaaaaaaataaaaaaaaaaaaaaaaaaaaaaaaaagggcggcctttttaaagaatccaagtttatttacccgttcttgcaacttaaaactttttttatagggtaacttaaattaaattaactggccttctttttaaaacatcgaaattggaaaaaccttgtggttaccaaatttaatggctttggaaaaaatcccctttt

SEQ ID NO: 324361 - DNA, 404 bp, Zea mays
  unsure (1)..(404): unsure at all n locations
ccgtctcgtctcgtggtcacttanncaccattggcaagggagaattgggttgacctggtgccttgactcgcatcanggagagcttggcgagataattgcacctggtgctccagnnggcttcctcnngtcttcaacgcnttgttggtggagggaacccgggctctgggacttggtgtctcttcctcctggagccgcctagtctgttgaccctatggcaagaagtccaagctttcggtttcaccgtgtacccccatccccccaggtggtccaacatccgtggttggagcccatacccaacagtgtcctgtccacccacttctcttcctcgagcacacntgatgnttgctgtccttgctcgacnaatgaggccatctatgacnatctgtccgccgcttcccttgaca

SEQ ID NO: 324362 - DNA, 127 bp, Zea mays
cccacgcgtccgcattgttggttcttgtctctttttgtcatgaaaagaacgatgagctctatgattctcatcagctgataaatgtaatgtctgaatttctgtcggtgacaaattaatgatcccattc

SEQ ID NO: 324363 - DNA, 376 bp, Zea mays
cacacattcatactgttgcttggattatgctcaggacctgtggcacaggcactggatgacagggcttgggtgagagacatctccaccactctctctctacaaggaatacattaatacctcatgctttgggatatcatggaagggttggtgctttctcaagaagaagatcatcatatttggagacacgaggcttcgggaaggttttcttctaaatcctgttacaagtcattcttcagaggatccatcacttttgaaccttggaggagggcgtggaaatctgggcacctctgaaatgcaaagtattcttatggttggccattaagaataagtgttggactgcggataggctggagcggcgtgggatgttcacccgaca

SEQ ID NO: 324364 - DNA, 399 bp, Zea mays
  unsure (1)..(399): unsure at all n locations
cccacgcgtccgcccacgcgtccgcaaactttcgtgagttcatgaactatctgaagaacaggaacgtggatcttacaaatgtcaagctgagcctgtcagaaggtgaggaggacgagtggttcaggcacagggccagtagcctctcccagcttaacaacacggagagcagccaccccacgagtgcagaagactccaagtcccactcccaccccgctggcgctgctgacaaaggcaatggcactacaccaggcacgccaccatccacgagccatgataaaacaacgaccagcgcagcgacagcaggcacgccggccatgaagaggtcctcgtcgggcagcaagctgcagcgcaagaggcctncacggctggcagtgagcaagagccggctgggcaagggca

SEQ ID NO: 324365 - DNA, 443 bp, Zea mays
atatcgcatagtttttcgagatgccaagacatgatgcacttaaagctcttgaaatctacagaagggctggccaacaggtgactccagagttcacaagaggatgatcattaaagtatccgagactctaaaaggtcaagacactatgaacatgtactcttatttaggttattcgacacatttcaggctgggaatctatctgatttctacgagaattgccggggattagaacttgctaggaattttcagattcccactctgagggaggagagggcttgtactctgactagtcttcgctatgtgcactggattatgatatgacatcttttacatgagaaaattctcagccaccacaaacatttcttgctactatggaggactatgttaatgaagcttcacgcatggtccctgttcgagaacccctgatcatcgtatgagtactggaa

SEQ ID NO: 324366 - DNA, 356 bp, Zea mays
gtcacgcgtcccgtacggaggatcttgagtctgtgaatccgatcataacaacgcggttacgtcgctattgcgccggctcaccatcgagatccttctactagctaattcactaccaataactgctttcaatgcaagttcctaccacacatgaagaatctcatgctctgatatcacactcacacaactagatggagctactaggttatacatatatgtcgaaccacgggcactaggattcagacctattgtatcttattgagccctttatggcacatgcagcatcctgcatgactaatcatctgtaccactttgctacacaatcttgtggactttacaggcgtactccacattgcatt

SEQ ID NO: 324367 - DNA, 66 bp, Zea mays
cccacgcgtccgcggacgcgtgggcaaaaggttaaatatacatgccatttttggaggcatgttttt

SEQ ID NO: 324368 - DNA, 104 bp, Zea mays
cggactcgtgggcggacgcgtggtcggactcatgggtgaatgacatgctcgcatgtgatgcaggtttactattaatatactatgcattcatatattcccacttt

SEQ ID NO: 324369 - DNA, 232 bp, Zea mays
gatggggccaatccattgggccgctggagccactgcccgcgttgttctacaagagttaggtatcctcgcggttgacacagaaaggataaaattgcaagttgtgtctcagtttggcactcgaagggagcttgtgtgggtgttgttgttttttttttgtcatggcagcgtcgtctctaactctaaaggataccgcagtttctccaggtatttctgttaatagcgttatgtacct

SEQ ID NO: 324370 - DNA, 208 bp, Zea mays
gttgaacatctatgcatgcatggacgacgtcacttgcaacgctgttcccatatagtactactggtctgctatgaatatctatgcatgcatggtaacgggttgtgttatttaattattattattacgtagacattactatttaaaattcatgtgttcgcgtcaagtcgttctgtaatcttgtgatggaatatatatgatatttcctttt

SEQ ID NO: 324371 - DNA, 141 bp, Zea mays
gcgcccacgcgtccgcccacgcgtccgggaaagagttacatagttgcaaccaaaggcgcacacgaagctggttaaggaaatatccaaatctcggaagactaaccaaaccgtggaaacttacactgtacatgtcgttacgct

SEQ ID NO: 324372 - DNA, 336 bp, Zea mays
cacacgcgtacgcccacgcgtccgcccacgcgtccggggtccttcggggctttggcccctgttgacaagggtaatctgaaacttactagaacattcgagttcattatggtcagattggtatgtctcttgtaagtcaggctggtgactggaataaatcttgcatacctgaactcaataggcaccgatgcgtatgtaaccctactacttggcatgtagaaaattaagacgatcgtgaagaagagatctgtgaacacgatctggcacgatgagctaactctgaccgtcatagatccaagactagctctgaagctggaggtgttctacaatgacacgttc

SEQ ID NO: 324373 - DNA, 286 bp, Zea mays
cccacgcgtccgcccacgcgtccgattaagaattcattgaaaaatgaatgcaagcattcaggggatggtactgctcctaatgctagggtagcattcaaggttaatattatgtatgcaacatccatcaatgagtgagacacctgaatgagatcatgaccttacatactgatgtacatgcatactcgaggcatatgataccttactgctcaaacatttgacaactggcactatctataagtagatatgacctatctctctatcacagaaatcattgattgtgaccctg

SEQ ID NO: 324374 - DNA, 229 bp, Zea mays
atgcagctcacctaaaataaaaatctaaaattaaaaaacaactcaaataacaaaaggaaaggtaaaaatcaactcactaacaaatgcaaataacaatgcaaatcctactacttcctccaggccatcacactagctcctctacttgattatcttgctcgtgcttacaccgatcctgctgttcatctctaccctctacttcatgtctttcttcctccactataccatcttc

SEQ ID NO: 324375 - DNA, 245 bp, Zea mays
cccacgcgtccgaaacattgccatggccctggactggaagccccaactttcccaagcctgtggaaagcgccatgtgcctctacagaagccaccgcgtgatgaccagcttcatccggcagggtgggtacagtagctagctatagccctagtctgatgtaagaacaaatttatattatccatcccatattgtctttaaaaaaaaaaaaaaaaaaaaaaaaaaaaataaaaagataaaaagggtagac

SEQ ID NO: 324376 - DNA, 312 bp, Zea mays
tggttgccttgtctgctattttgacttatgcattatgagtgggatcaagatgtttagcaagcgttaagttgatgtcgcatttacatgaagtgcactgcagctgaatatttatatattcaattccatatccatacactacatatgatgctaagctaataaaaagtagatgtgtatgtatgagtgtcatattgaagtttatggtccaaaatatctttatagcctactatatataatctctacaatactttgctgaactacggcagttgatactcaatctcctcgaactcaacctaaacaacatgatcacgatct

SEQ ID NO: 324377 - DNA, 326 bp, Zea mays
aaaaaaaaaaaaaaacaaaataaatataaatattaaaaaaaaaaataaaaaataaacaaaagggataaatataaacataaaaaaaacaaaatacaaataaaaaaaaaaataaaaatctaaatacaggcaaaacgggcttgccgttttatgggccccaaccttcccttcccttcttttggatctcatatctcttctctggggtcccctacatttacttcgtttgcccctgttttacaccgcgttgcctggtaaatccctgcttttactcagtttatcccctttccagattttcctcttttggccatttggcaatttctctatatggc

SEQ ID NO: 324378 - DNA, 452 bp, Zea mays
cggacgcgtgggatcgcataaaaggagatcagcaggaggtggagccaaccgacgacggatcggtccctgcgacggaagagaccgagacctagcattggccgcgcgccggagtgggctgcactgcagtgcaggtgggtctcgcatcgcacgcgaggaggatgtaggctgtcgacgcccgggagaaaaggtgaaggtggagcgggtgggcaatgagccggcacctgcaccgctgcttcgcgtccacggggaccatgttcctgtgggcgctcttcctggtggccatgacggccacgtacctgagcgtgcactgcttcgtcgacagcacctccccgcgctacttcgcggcgtcctgtggcgggctgcactgggagcgccagatccgggcgtcggcgtcgacgcggcggcggtcggcgcctgggccgcccgcggggctgtccgtgctcgtcacgggc

SEQ ID NO: 324379 - DNA, 490 bp, Zea mays
gaattctccgggttcgactccacgtcgtgccggggaatttgagggggaaaattggaggggatttgaggtgtggaggtggggaatgaactgaatttccacttcaagtccccgggcattatctctcaatgtctctagtcattcaaatcagcccctgagggccctgttcgtttcaagctcaatccatatggataggggattgaatggttttaaatctctagcaagtcaaaatcattcctaattcctcatgttgggagagtgcatcagccgaaggtcctcaaactacaaattccaagttttatgatctgtttccagatcattcttcgtcacggcatgcctcagccgaaagctataaaatgaaaacgaaggtctggagcaagtaactgggaaacgaagaaggaatcaagtgacgtgcacgtaacgtcttcaagaggaacagaaagacgatatctctggtagattatgtagctcacgtgtataagatcaaaggtca

SEQ ID NO: 324380 - DNA, 454 bp, Zea mays
gatcgaccgctcgtacgggcacacgatgcatttgtacccacggacgcgcacggctcgattgggcgggttcaatgactcgggcatctagcgcgtacgctccaacatctgcgagaggcacgacctctgcgagcagcaccacatgagcctcagactcgtctgagcgtgcactagcgactagtacaacatgcgacacaccagcctgcgttgcggcaaggtcgtcgggctgccaatgccacaggccctacagcgaccgctagagcgttgaccgatagcacacggtgctgtacacaactaaaggaaagcgagaggggactctttctcgcgactacttgtataaccaggcttgtatgtcccctcctcgtttattctctctctctcttttttagttcgctttcgagggataataacccaactaaaaacacaaaagggctcaagactttatcatgcatgcatg

SEQ ID NO: 324381 - DNA, 351 bp, Zea mays
ctgactcgtgggaaaaaaaaaaaataaaaataaaaaaaaaaaaaaaaaaaaaaaaaaaaaagaaaaaagaaaaataataataaataaaaaaattaactaactcatacattctacttcataaattcttatataataaaacctatataaaattaattaaataatctatatacaacattaatacatattaaaacattatcatttcccaactccttttaatttctatcacatttccctttatacatcttgctcaatttgtcaacatgttcttacccatctatacttcctatcagttcctcaattctgaatggctattttttattaaccctctaattttacattaattgcagcggt

SEQ ID NO: 324382 - DNA, 367 bp, Zea mays
cacaactttcagatagatctacatctaactttaccagcctgcaccatgcgatttctacttcaggctcgtatctacgcttccaagacatctccataactaaatccactacatcaccttcacaacctctctcactacaaattcttcttgctagacacatactactgctatctctgacaccacctctattaccataaagagacctatcccattaatcactaatgctccatcatatgatatcaatgactgacagactttaatgtccttgacaaactccaccttgatcgctatttctacaaccacgactactccacatactggcttcacttcctaccaggtcttcaagactatgctcacatacctttattat

SEQ ID NO: 324383 - DNA, 462 bp, Zea mays
cggacgcgtgggtcttttctcatctatttccgcttcactctgattactcttaccttttcactctaaagacaaaagtggatttcacactttgaaatcctgtgcttaaagtgacctgtaggaataggagacctactcataggaacaaaaacaaaactatttttgtaggtatatataggtacttgaatgattgttcttatgacacttgtctgatttgattctttgattgagtgtgatgggttgtggagtaatgtccacaatcacatctgcatatacatatagaaaaaaaacggttataaaaatatctaaatgaactaggttatccctcatcaaagaatctagcctagcaaaatccatcttatcttgaaaaggtctatcctacattcatagatccatcttatcctaaaaaaaatagattctcatcttatcttgaaaagaattatcttatcctaatagatctatctg

SEQ ID NO: 324384 - DNA, 358 bp, Zea mays
cggacgcgtgggcggacgcgtgggcggacgcgtgggcggacgcgtgtgcggacgcgtggtgtgatgggtaccaggatgagaaacggattatgaagatattagtttcattttcatccatgaatagaagctaaaagtggtatcatatctatgaatggtttcaattgcttttctgttacaaccacattatttgctatatacgattcacagtacctgccagttgattccattggttgtttctgtaaaacaaatatcaatttgtcactagaatctgtgatgtttgtatgtaaacaggtactctattcatgtgagacatatatgtcttttctatcacaatgaagatgtcagaaaaaataaagga

SEQ ID NO: 324385 - DNA, 55 bp, Zea mays
aaaaaaaatacaaaaaaaaataaaaaaaaatttaaaagcaaaaaaactaaaaaaa

SEQ ID NO: 324386 - DNA, 272 bp, Zea mays
  unsure (1)..(272): unsure at all n locations
cncacgcctcccgcgaccccttggccttccttttcccggcccttccggccgcggccgttggggtggccgccttcgaaggcttccgccggccgaacaaggcccttccccaggccttcaaaggccggtggcggttcattcttaaccaattgaacggctttctcattgtccacctcaatcgcgccgctgaggcaccgcgacgacgcgcccgagaagtatgggggtggcgtcggggctcgccatgccgtgcaggcctcagctcagcgtctacatgc

SEQ ID NO: 324387 - DNA, 398 bp, Zea mays
acgcccacgcgtgcggactagttttagatcggtttaacttgggggctttaaaaaaccccgtcgcgaacggtttgcccagcccctcagagtcttcaatattcccacattccgcccaccaatcgactttacgccagtctcgcactcttctgaaagcgtctcgcgcgcctgttttagaaaggaaggaggacaattacgcagtgctctatgtccacatctggcacgcctgcatctaagtctggaacacccgctctggaaattactgactacagcacgtgactgcagcctgatggccaaaagcctggagataagaccgctgggcatcacgacattgaagacagatgagagcaatgtctgtcagaccatgataatctcgggtcatgcactcatccatggataca

SEQ ID NO: 324388 - DNA, 455 bp, Zea mays
cggacgcgtgggcggacgcgtgggaagcaagaaaactagaaaaggctcctcccgaccgcagcgcccctcatctccctcgaccccgacatccccgacccgatggcgcccaaggcggagaagaagccagcggagaagaagccggcggccgaggagaaggcggagaagacgaccgcagggaagaagcccaaggccgagaagcggctgcccgcgtccaagtcctccggcaaggagggcggcgagaagaaggggaagaagaaggccaagaagagcgtggagacctacaagatctacatcttcaaggtgctgaagcaggtgcaccccgacatcggcatatcctccaaggccatgtccatcatgaactccttcatcaacgacatctttgagaagctggccggcgaggccgccaagctggcgcggtacaacaagaagcccaccatcacgtcccgcgagatcca

SEQ ID NO: 324389 - DNA, 309 bp, Zea mays
atcaccatcatgtgctgctctagctgctgcgtcattatatattacatcgcgtatacgtataggtacggattcatacgtcttggaatcaattactgtgggtattgtattatacatatgcaggacacttagggcttgtacccgtgcctgtggctagtcattaatgagggagacatgcttttactgatctaatgtatgtagactcaattacatgctattacgatacgggatactatgcacactacttttccatcatcagcctgaattgagcgcttttgcgagagttgacactgtgtactcaaccactgtctg

SEQ ID NO: 324390 - DNA, 212 bp, Zea mays
acgcagaccccttgccgcacaggatcgaccaggtactactgagctcgcttgctgcatggctcgtgcccgggcgatagacttacctactgaatgctactactggagacgagagacggttagacggtgatcgccctcatgatactcggctagctgccggcgtcgacagactgcatcaacttgctacgggcttgctcacaccataagactacggt

SEQ ID NO: 324391 - DNA, 334 bp, Zea mays
gctagggacctactagctcagcgccatgcacacgtgtttgtctactacgtatggacctcgaggcttgtgcggtggcattggcgtgcatgctgatggtatgggatcatgggagtttggagctgctgtggaacacccttccaaagaagctgacttgtggtgtcaatgccacctgataccttgaacagaaacgactctttcctaggctggcgtgtatccacaaatctgtcgtcacatacacatcacgtacgagaagtaccatggaaattgtgtatactacagttgtttcatcagagaggattttacgcaatgactgtcacgccggagactacattat

SEQ ID NO: 324392 - DNA, 295 bp, Zea mays
  unsure (1)..(295): unsure at all n locations
gaggctacgacgtacgcatacggctgcgcgctcatggatgcaataggaaataatgagtcgcctgcctgatgggctagagcccggagaatggacttacctactggctgttatgactgaagctcggagaccgcttgggcgttgtacggcgtgcatgtacctgcgcctcacgtcgatgacatggacagattgaataaactgctcacgggcttggtgaaacaggagaggtagcatgacaagcactgcttgggagacttgacctcagtaagatgattctggctggnggccgtagattaca

SEQ ID NO: 324393 - DNA, 448 bp, Zea mays
  unsure (1)..(448): unsure at all n locations
cccacgcgtccgctgctgtttatgctcctgcaacaatgaatatgctccaaactcctccatgtcatagcaacagccatgaaaaagagtcaggtgcagttttttcaaatagctttaacatggccccatcagtgacacctacctccccttttcaacttatgtctccaagctcaaccaactacacttccactcaaatcttcgaggaaaccaacaatttagaggacacttcaagagtctttggaggtggggataacgaaagcaacaacagtgaggaaccggatcccaagccggctgtggagatggaagacctaaaccaaggcaatgatcatacttcgaataaaacagctaactgtcaagattaccgtatggtcctgcgcaaggacttgacatacagtgatgttggaaacattggaagaatcgtgctgccaaagaaagatgcanagcctaacct

SEQ ID NO: 324394 - DNA, 256 bp, Zea mays
acagcttgcatacagtagagcaggggaacgagaagttaacgacaggaaagtatacaggagaagagagagcagctgctgctcatgagagaagacaaggactatgccatacttgtagatatgatccacgctgcgcttctgaccattacctttttgcgtactgcagatagaagataatcgcacgatgacgtagcaactgaactgacatctgcatccgaactatctgaagtacgcctaggaattgcagacacattcttag

SEQ ID NO: 324395 - DNA, 429 bp, Zea mays
gcgcccacgcgtccgcccactcgtccagaaaactattcccttactatatccagcaaataaatatcggctttgttctcaaacccaagtatacacgcacacatatcaaacagacactcacccaataactccatactactacagggccatgtctactaccctcgacataacattgtcacctgctacctactaatgatcaactccatatctcccaccatccttgttacaaatctcaacttaataatgctctgcttcacactgccgagctgagaacacagtcaatctactacacccatcacactgccttgaatgtagccaccgcatcctctacactaaacacactcgtccaactctacaatctaaagcacgctgcacaatgacgaccccacaaaaacactcgacatggctgatctcttactcgtcactcaccta

SEQ ID NO: 324396 - DNA, 412 bp, Zea mays
acggacgcgcagtcgcccattccgcatctcgccctcccgtcccgtcccgtgccgtacgtccgtgctccgattggccgccgcccgcctcgccctcctcgtcaacaaaagcccaccggaagcgagcgagcgagccaccctccccgccggcgacaccgtccccgtcccgacactaccccgactcctactgaccgccggcgtggggtgcccgggctccaccttcggcgacgacaccgttcccgccgcgcgcgccctcaccgtctgctccgtttgcgggggtagccggtgctccggcctcggcagctcttaaagccccctgcctcacaacaagatccaaaattccgtactagacttcttctacctccccttccagaactttctcttttggcatcccggacggtcgatctcgaccccc

SEQ ID NO: 324397 - DNA, 458 bp, Zea mays
aaacaatttccaattccgttcctggaggacgtctgcacggggaccttcccagcgggcgacggccggctgcatccatggcggtggccttcctgctgctgggattgggtttcctccttggcctcctctccctggcgatcgcggaggggctggcgctcctttgggccatccgaagcctcacgcgccgcacatcggcctcacgcagcacgccgccgccatcactccccatccacccgacgccggcgcggtctgtgtctcgccacagcctcaaccgacaggacacctcatttcatccatccactgctgcagtattccacacgttcacgacctgtaccttaacacctttcccattctatctacgagtaaacagggcttcttatggatgctggagcaacccaaggatagcagcatcaatggcgctagcccagggatcagagacaggaagctcctcgtcgaggttt

SEQ ID NO: 324398 - DNA, 141 bp, Zea mays
cggacgcgtggggaaaaaattgtgaatctgttatgatgcgtctagaaaagccaaaacagattttgttatgtgcgtagaatttgttagagagacgagggaaatggattttatgcagtcattttgcatgcaaatgatttatag

SEQ ID NO: 324399 - DNA, 106 bp, Zea mays
ctatatatagtgtacatgtgacatatgatccacaactagctggtgatggactgggggaacaacagggatgtgtccgggatcaagctgatcagggccaacgttttac

SEQ ID NO: 324400 - DNA, 89 bp, Zea mays
cggacgcgtgggcggacgcgtgggctgacgcgtgggtgaatttgagggtataaaaggtcttctccaaataccaaccaaatttaggggtt

SEQ ID NO: 324401 - DNA, 347 bp, Zea mays
cggacgcgtgggcggacgcgtgggctttttttttttttttactagaaattgaaacttgatcaatctttcttaatctatatggattggtgtaaccgaacaagcacaaatgtgatctacttttacaaaattcgttcatgggagcacgggaaaaaaaaggaattcccacaccatggagactccaagaagaattgtgcgcatatgcatgttctaagtgctcgttcggatccagcagttgcccctgcgccatcgatccctgccgatcccggcctgggccctgcgcagccgggccttgtagtccttggcccacgcgcggagctgtgccttgagcttcttgaggtcggcggcgg

SEQ ID NO: 324402 - DNA, 263 bp, Zea mays
atcacacgtacgctcgcggttctgaaatacaccactgacgcagactgtctgaggtgggcaaccgcttcatgtgccagctgcttgggctagctaacgcaggtcggtcgcagaagcggccgtactctgtgtccatgatggagctcagcgaccccattgtgctgtacaacttgcccttcgacgtctacgagcacacgctgtacgtgcacgccaaccagcacatgatcaagccatgcgaggcgatccatgacgattactacatgatc

SEQ ID NO: 324403 - DNA, 355 bp, Zea mays
cgagggccagctccgccgcgcgcgcaaggcgctcaccgacgtcgccgcgctcctcgtcgacgacaccgccgcgtccggcgccggcggcgtcgcctccttcctgtcctgccaccgcaaccgctccttcggccgcgcgcgcgcctccccgtcgcgcagcgccggcgccagcgccagcgcctcagcctcagcctcccacttccgctccctctcctggagcgtgtcccgcacctggtccgccgcgcgccagctgcaggccattggggccggcctggccgcgccgcgcgcgcacgagccgggcctcgccgtccccgtctactccatgggctgcgtgctgcacctcaccgcgtgggcgctc

SEQ ID NO: 324404 - DNA, 429 bp, Zea mays
cggttcggaattctcgaggcaagcctcccgttcgatctctaccatccagggttgttttctgcatgctttccatggatggctcacagggggctaatgccctacatacagacaatctttcatgtccatacggtctacatcactcatctacttagtcatctggcgttcgctctctagcactaatattcttatgcgtgtatagctacttgatgaatctgatatagcgtcatccaaatccacttcagtggccgcattttcacatcttcatggatgtgaaatctctggcgaacctcaacttaatcgacttctacaagatcgcacttactccatctgtggtactacagctcatacttgtactgatcggcgttacttacagtacggcaccttgaatgtcatatagcgagcgcagtatactagctctttagtcactgc

SEQ ID NO: 324405 - DNA, 410 bp, Zea mays
  unsure (1)..(410): unsure at all n locations
aaacccaccattcaagggtcttagcagaaatgatgtactggatggttcagatagtgctgaagcccaaaacacacaagaaccttctactcgatggggtctaggggactcatctaatttggcatctggccttgaggatgcaaacccttcatatccttatcttcctacagttcttgaggaacctggttcttctttctccgaagctgcagaggatgatccattgccaggcatagaagggcttcgaatcacaggtgaaccttttcctggacaagaacttcaagcaggtggatactccatcaatggtaccacaacttgtaattttgagtgggtgcgccatttagaagacggctcagtaaatttcatagaaggagcaaagcagcctagctatgttgntactgccgatgatgtggaca

SEQ ID NO: 324406 - DNA, 226 bp, Zea mays
cccacgcgtccgcccacgcgtccggaggcaagggacgtaagaagtgcattacctggggtggtcccttaatgaatccacgctcctagacgcgtacatcgccatgttcgtcactgagtttctccgacagcttggcatgctgagcagttcgctaaatgttcttcgtgctgagaatgtcagctatgatcggcctagattcagcggtactgcgctcttaatcgacagggaa

SEQ ID NO: 324407 - DNA, 231 bp, Zea mays
gtagttcatatggcggaaggacactgtgtgcatgcatgttccatcgtgcgggctcggttttctttgaacacaacacagatgtagcaggcatgagcgatcgtgcgatggcatggctggctaacctgtctcggatgctaaatgaaacccgggttcctttctcaagtgttaggagcataactattgtcacatcaatggtcttgagccctaaatttcatttgtaggtcgttaatt

SEQ ID NO: 324408 - DNA, 114 bp, Zea mays
atcgacgaagactatgacaagcagttctgttgtccgaacattgattatgtgagcccattgatacgctaaatgtatgaactagtttttatttacaataaattactaattttttct

SEQ ID NO: 324409 - DNA, 130 bp, Zea mays
atcgaccaagactatgacaagcagttctgttgcacgaacattgattatgtgagccgggtgggacgctaaaagtatgaactagttcttatgtacaataaattactaattatatctaaaagaacggaagaat

SEQ ID NO: 324410 - DNA, 381 bp, Zea mays
gagaaaagaaaaatgaatacaaatgtttctgtttctgaagatgttggtaagaatgttggagttaagaaaggaggatccatggaaggggagcttgtagaaggagttaggaggagcagcaggttggagtctaatgatgaaatgaagattgcagataaggcagcagcaagagcaatggctaaagatgcattcattaacaaagatcatttctaacggctccttttaccattaaggagattaaaaaagtggttttcgagatgaaacataatagtgctcctggtccggatggttttcctgcggaattctttcaaaacttttgggatttgattcaaatggatgtttggaacttattcaaggatttttatgttggaaatcttgatattg

SEQ ID NO: 324411 - DNA, 136 bp, Zea mays
aaaaagcatcagctaacgatggctggagcccaggcactgctaatagcacttgcgggtgccgtagatgacctggacgggcggccagcgattgtaggcgatggagacggcgaggtggcggatatctggatgatgactt

SEQ ID NO: 324412 - DNA, 423 bp, Zea mays
agacttcttacgttttctatttgaactggacattgttgatgaaacaacccagttaaaagatattagagcagaaagtcactctataaataatgatggaacgaatgttgctgatgatggcttaggaaaatcaaattcaacgagtccgatgtcttcatctcaaagtgtgaaacagcttgataaaggaagtcctaatggccttgtgcgcagtgaatcatttgaaattcattccatatcacccgctaagcaactgacaacagcagtttctacgtgcaacgatgttgatgaatatttagagaaaacagcttttcagaagggtcgttttaaggtgatacatgattatagcaagcttgaaggagcaacgccaagagagaaggaattattagatcgtataagtagtttagagcaaatgcttcttgctaccca

SEQ ID NO: 324413 - DNA, 188 bp, Zea mays
cccacgcgtccggcgagaggcaagggacgtaagaagtcttctaattctatatcattcagttcgggtccgtgaacgtagcatctccttgtaaccatatatacatgcccgcgctatctatgagcattgcagacattcggataacgaacgttctcatctcaaaactcttctcctgatcctggctcaccggc

SEQ ID NO: 324414 - DNA, 374 bp, Zea mays
cccacgcgtccgaatcaacccttagtggtccgaaaggtggtccggtggcctggccgccacggccagcatggtgcccggtgcggcctcggtcagcgcgaggcgcagccccggcgcggcgcgggcgtggctgcccggccacggcacgagcgcgtatgcggcggcccagccctggcgcggcggcccccgtccccaacggcgcgaggcgtgttgccccctccgtctgcgcgcgagcgtactgctccggcagcgcggtcccggccaggcgcggttgcgcggcctggcgcggccctgacggctacggttctggcgccgcttcccgtggcgcgggagtcacccgacccagcggatctggcacggactcaactgtccggcac

SEQ ID NO: 324415 - DNA, 352 bp, Zea mays
cccacgcgtccgcagtaatgttgtaacttgaaaaaaaataagatttattttcattggaacaaaaaaaaaaaaaaaaaataaaaaaaaaaaaaaagggcggacactaatgcagatccaaaactaacatacacaaacatgcaaaaaaatagctcaacattaaaaaaaaaaaaaagggaattcacttttcgaggatccacatttacttccactggcaacacactggttatacccaatttaatcgcccttaaatccattacccgtgtccgcagtttgacatcatagcgactaggaaaacaccgaacgacctaacctaaatgccttcaagctgaatgcccatttggacacgctctgt

SEQ ID NO: 324416 - DNA, 157 bp, Zea mays
agctgttcagtcagcttctatagaattcgattgagtcaaaccattcaaaattaacataaacatataatcggttgagtagacgctatagtagtaatccgtcactttatagatcctaaaccccatggtcaactttatcttcccccgatacatacaatgg

SEQ ID NO: 324417 - DNA, 329 bp, Zea mays
cccattccaccgacgcgtacgcaccctgcaaataaaccctatagattatgatcaaaaacttccaaaattataaccggaagggagaaataggcgctcggcttaacaatctacacactaacattcatcatcttattacaacgcaacctatacaagttatctcttaaattgaatttaatagccgatcttatacaactgctggaactgaaaaaccacaacatcacccaccttaatcaactgtcagcaaatggtcatgaatccagattccctacactcctagatgcccaatcccaatacctttttcaaaagatactcatccaaacttgctgata

SEQ ID NO: 324418 - DNA, 250 bp, Zea mays
agccaacaaaaagagaaaacctaaataaaaaaagccaccctatacactaaaaaaaggaaacggggaaaagggcatggcgagagaaacgagagcaacacacacaatggggagctcaaagaccatagatgcgtacacactgccactaaacgagctcctgctccagactttcgcgaccaccgaaaaggtaaaaacagtgcacgaactgaattgaaaggaccaaatccaaaagacattcaaccaagtgcactaa

SEQ ID NO: 324419 - DNA, 271 bp, Zea mays
ctagttctagatcgcgagcggctgttctcgatctagaactagtgttctacatggcgagcttcccagcagggaggagcgacacgccgcctatcaccgtggcactggcactgtcacccccatgaaaccgcagcaacacgcgccttcctgttcctcgagcgatccagatcgggcgtccgatgtgttcctggaagcgtcaccgaggcataactcgccggtcccgatccccaccgcgcacaggcagcagcagcagccgcatccgtacttcaaggtc

SEQ ID NO: 324420 - DNA, 398 bp, Zea mays
aaaaaatgtgatgacaaaatgcagcatcaaaaacatgggagctaagcagccatctggcggcgcgatggccacatccaaatcccttctttacaagaagatacctacggtcgccgcatcgcgcaattgaaggcagaactcggatcggcgagtcagtcggcattgtgcatggatgaatctgggcctcgccgcccccgtctacgccatgggctgcgtgctccacctcaccgcgtgggcgctcgtggccgccgtcccgtgcccggaccgcggcaacgcgctgcaggcgcaccacctgccggccgcgccgtcgcgcgccgcgttcccgtgggcgccgaccctcctcgccttacaagaacgcctcgccgaggagggcaagcgcaaggacaggcgccactcgtgcg

SEQ ID NO: 324421 - DNA, 436 bp, Zea mays
ctctcctctctcatcaggagtatattgggcgggatccgagacggccgtgccgctggcattgctcgatcgaggagggaaaaaaaacaaaagggaagcaggcaggtcgtcgagaggggaggaattcgcaaaccatgctttcagcctccgatccttcctcgagtgcttgctgtctggcggaacttcaactgaaacagctgacctgactactagtgaagcaaataaccaggagagctctgtccaggacggtttagacaccacttgtgctaaggaaaacaagggaaacgacggtgtcgataatgctgctgagaactcgactcaaatttcagaatcctctgatggtggccaactatcactgcaggacaacaagatgggtgattctgatgctgcagatgcgaatagatcatcagcatcttcgacgatcgtgtctgaaagcaag

SEQ ID NO: 324422 - DNA, 164 bp, Zea mays
cccacgcgtccggcggccgccctttttttttttttttttttttttttttttttttgtttttgttttttattttttttttttttttttttttttttttttttatttttttttttttttttatttttttttttttttttttttttttttttttttttttttttatt

SEQ ID NO: 324423 - DNA, 240 bp, Zea mays
  unsure (1)..(240): unsure at all n locations
attcccgttcgaccgacgcgtacgcaataattttactaatcaaatacttgttgcgatatattcatccaattccactcacgcgtcctgagcaagcaacaacaatatgttccggccgacaaacaaaaccaaaaaaaaaacacactgaacccaataatcccactccacaaaaacttttatctcaagccattcgatcgatcacagncgtgtcgttctgcagacaccattaatacccagaaccat

SEQ ID NO: 324424 - DNA, 264 bp, Zea mays
cccacgcgtccgcggacgcgtgggtacaacggggacatataataacataatagctgatatacaaggtggcaacagatcgcaccaccagcaaccagcatccaaccacagaagggttctgcatgcaacacactgatgggatctgctaagccaacttgccatgaagaatcaattctgaccacacatactgtgcaggcacacttgactaccagctgagagcatcgcgcaccatagctctgatcaccacggtgtaaacaccacttgtgc

SEQ ID NO: 324425 - DNA, 407 bp, Zea mays
cgatcatatagatggaaacttttcactttaaaaaaaaaaaaaaaaaaaaaaagaagaaaaaataaaaaaaaaaaaaaaaaaaaaaaaaaaaaaaaaaaaaaaaaaaaaaaaaaaaaaaaaaaaaaaaaaaaaaaaaaaaacaaacattcaactacattccttttttaataaaaccacctaacttcatttaacttccctttatttttcaccttactttacttctaaaaccctgtctttacccattttaaaactcgtaaaatctcatcctactttaaacatttgcacttttatcaaataggccctttcccatcttccttcctaacaattttagccccctaaatggcccttttaacaatctttgtaacgcttaattaattactgaatctcccctttttcccccccttttt

SEQ ID NO: 324426 - DNA, 347 bp, Zea mays
ctagatcgcgagcggctgccctttttttttttttttttattatttttcttctggtgtttttttacaatactacctttcccatattttttttcatttcaaaaaatactaccactttaaacccatcatcttcaatgtctcgtacaatcccattcccaaaaagcattcccaacaaatgactgcgatatcattaatacccacttcgagttcaacaacccacataacaccaacagtagcaaattcattatacccttcaaatacatccacacccaccacatggccttcctatcacattcatggtcaacatccaccaaagttgacaaacgatcttcaaaatccaaacttacata

SEQ ID NO: 324427 - DNA, 403 bp, Zea mays
cccacgcgtccgcaggttataccgccttgcttcaatgggctttgcaacatttgggggcttccttcttgcaaagcgtgcaatacaacattttctagaaagaaagcgccggcatgaactgcaaaaaaggtgcctaactccttatgtcatttccttttagaacattcaaatccaattgaaatgtagtagcattatttaagtgtttgggtttttaaagaggtttatatttctgttttagccatggatagaatgtaagtgacttgtgctgttacgatttatttgtaagaactttgtaacctctgtatgcctatctattgacacatgtgcaacgtgtagctaattttaaatttgtagacgtcacatgaaattggagaagactatactgcagggtgattaagtgaatatg

SEQ ID NO: 324428 - DNA, 171 bp, Zea mays
cctctacacgttcatcgacagtaaccccatcgagtagggtcggtacgagtagaaaacgacgagccggctagaccaccatgagggagcgtcgaggacccatcagttgcgtcgccccctgcgtcctacctccccctcactccttcctgggctttacgctggccacactgccga

SEQ ID NO: 324429 - DNA, 263 bp, Zea mays
attcccattcgaccacgcgtacgcgtaccgttcgatctaacgttggtctaaaacctatctccctgcttcacctttcggctttgggtgccacagcacaacaccttaacctactatagcatgcttatggcataccatgtactgcaagtcaacttggtgttgaaaaatgacctcataatagtatcgctcttctatccgactcacatctactctatggcttacatcttcagatatccacttgccattacttcacacagcaactaagc

SEQ ID NO: 324430 - DNA, 64 bp, Zea mays
gttgtaatagtgattcaatcaatgtatctcgctttcaggtgcccatcaaggatgcgacagggtc

SEQ ID NO: 324431 - DNA, 301 bp, Zea mays
ttaattcctggaggacccactcgtccgattcaaagtctagtagaattcccttctattcatcccgctgtgcctcatcaaggtagatcaattcaaaagtatttgctgcccatactcctatttcatctccgtctaacaataccacaactatctcttctattactaaaccccctaatttatatcatatatctactcatcagttccactaatcaacttatcttttaattacaacaatctattccgactcattcttaacacttacacatctttcctcacttatcaaatctactccgtccaatttttt

SEQ ID NO: 324432 - DNA, 345 bp, Zea mays
gctctcgctctctgagtgacaagctcagaaattaaaatcgcttattagtcatatagggaatggtcacgtaggaatcttgcatgctagacaagaactcacaccatcaatacacacgaccaactggtaatggtagcggcctccttaattaccggcatgatgtgcttaaagaatgattattatttcaatcatactgtgcaccactacctggacaaattgctacctgagcacaagacatacattctcaagactgttgcatgatgctatcttgaactagcaagacatcactatggctcctgcgtcctgacgataatggttggtcattcaactgatgaacacagaaacaac

SEQ ID NO: 324433 - DNA, 402 bp, Zea mays
cccacgcgtccggatgctattcaaataggtacgatcttgatatatcttattggaaggtactacatactacatcatattatacatttaatcttattttctttagcctagtaggcctcatgttttagtttcgtacagggtctcgaattttctcgggacggccctggtaccaggcggtggtggcgcggggttggtgcagcgacgacctctttctcttctccaaggcacgcaacagtgatggtaagtcactcgggctcgggccacaaatgggaggaagcgaggagtcaaggagggaacatggtggagaatggaagtcgatgagaagggaagggacgccgcctcggcagtaggggcaggcgcctaccttggcatgacgacggaagccacaatggatggtgtcgcttg

SEQ ID NO: 324434 - DNA, 266 bp, Zea mays
catgcaattactttacctgctaatactataactccagctactatacacactacttcttctgcatttactattaaaaaaaccccaaatttaaagcattatacatatccgattaccgacaatggataatagcttttaaacacaatgaatctactttgactacccttactattgtacattttggataactcatagaaccacatactcttgattatttacaaaaacttaattctatccaaaacatgtactctaaatctgcaaaacttttc

SEQ ID NO: 324435 - DNA, 384 bp, Zea mays
taattccgggagccacccattcgtgcttacattcgttctaatcatctatttttttttgatacacgatccccaatattacacggatcgttcattcaagttcctggtctgccaaatctataactccagttactatacacactacttcttcttcatctactattataacaacctcaactttaaagcaaaatgcttatcatattacctacaatggaaacgtactttcaatcacaagactctactttgactatttattaatattgtaccatttcgtacaattcatataaccacatactcctgattatttacaactacttatatctatccaaaacatgtactcaaaatcttcaaaactttgcaactttgttcgtcatacatcatccaaac

SEQ ID NO: 324436 - DNA, 293 bp, Zea mays
atcattctgtcttcgcacatttttttttttttatgcaataaagatatacaagggtggtgtcttctgctcctgggtctgctcattctgacatttgcatttcaatatgtcatcaatactgctcgatctagtgtgagaaccaagggaaatttatattgaaaggtttatgaaacataccgacactgggaaatgacgaactatcatagacgtttacggtcgggagtcttccatgctgaactctatcatgcacttggactttggacttaatgcggatgatctacgactagagttatcta

SEQ ID NO: 324437 - DNA, 370 bp, Zea mays
acccaaaaaaaaacacaaaagctctataatgcctgcactaaacaaacaagacggggctagggcacgcttaacaatgggcacgcgatccctatgaggatattctgcgcgcttggtcactctagacatcctgaacatgtcaaccatagcattagaatgctgcaatcaatatctaacaatgcttgcaaaccagatgaaacaatggataagcactactacgtagatattactctttacaaaacatgggattatacaaaaagcctacagcttttggaaagatgcttatagatccaacatgactggagacaagccataactttgcaaaggctccctgaataaaaaaccaaaagagatggtctcattggcatggcta

SEQ ID NO: 324438 - DNA, 341 bp, Zea mays
aattcctggagcgacccactcctcgcacgcgtttctatactgatcaagttttatcttttattccatcaacatctacaacggtggtttatactgatcctatgacgactctgataaacatttagttacaatacattatcaacacttctctttctccttcaacaactctgagaattacatcatgaaaggtataataaacctccaagaaaagcaaatgaagaactttacgatacactatgcggacggtaatcttctatgactaattatatcctccactttcacttaccactctcttcgactaacttttgaacatagatatccattgcaaatccaaacctaaaatc

SEQ ID NO: 324439 - DNA, 230 bp, Zea mays
aggacgcgtgggcggacacatgggtcagacgctgccaatggaggcccatatggcactggggagacagacagtactaatgctgctcatgctgcatgtgcatctaggaacgacaatacttgaactgagactgctctcatacccgacggcgacttactgcgtagggatcttaacttgacaggcgattgcaaggaccacgtgaccatacaactgtactgtgacttggtcttaaa

SEQ ID NO: 324440 - DNA, 97 bp, Zea mays
cccacgcgtccgatccattcattgtatttgctttgccatttctcccctttctgttagtggcgatatgtaaagaggggagaatgggagacactattcg

SEQ ID NO: 324441 - DNA, 171 bp, Zea mays
gttgaaagcagatgtgacagccgttttaacgttcgtcttcactccagatccaattgcaaacgcgaactatcatgggggtgctcctctgcatgatattgcaaagcaaattgctacatacaatgctaccagcccatcatcactgcaacacaaggcacggacgacaactactac

SEQ ID NO: 324442 - DNA, 413 bp, Zea mays
gccgacaaagaagcaaacattcgccgcctcctgctgccgcaacctctcaaccgtgagcagtcagcgctgtacgggatcctcagcttgtaaaaaacacgcacacacacgcatggctcatccatccatccatccatgctacatttgcagtcatttgctgttattttccaatcctggttagttcttgtaagctaaccccgcatccgataagctaatcctgtaaatggcgcaaggagcatcagctctggactgctcctgttgtagagaaaaaaaaatactacagcttagagttggggaaggagggcaatctggaaattcatccaaagctttgtggcgtaacttgattatatatgtacttttgtaaaacctaccagttgtggttcaaatccaccggctactaactaactagcctatgc

SEQ ID NO: 324443 - DNA, 375 bp, Zea mays
  unsure (1)..(375): unsure at all n locations
ggccatggccgccgccgagccgccgtcgccctccgggatgggcttcttcggcatgctcaggttccgccgcagcgccaccgccgtcgcctccttcgacccggcgcaggacgatgagctcctcgcgctcgacgccctccagtcccacgttgccgcccgcctccaggcgctctccgcgcacgccacccctggccctggctccccgtcgctcctcaccctccctttcctctcggagctcctcgacgccgtcgtctcctctgacgacgccttccgcggagtgctcgcgctggccccagtcgccgncgcgatcgccaggccccccgccgaccgcctcgccggcgacctcctcgaccgcgccgtcaagacgctcgacgttct

SEQ ID NO: 324444 - DNA, 330 bp, Zea mays
cgcgacgcgtgggcgagtaccttcgcaaagatgaacgaatggtgtgacggatcatcaacgttgggcatggggtggagtgactcgacgaatacgcatctggtacagggcgcgtgactcgcggcaaagtctgctcaggcgtgctcttgatgtcttcaccgtggagcccccgcccaaggacagcaagctggagttgcatgagaatgtcactgtaacaccccaccttggagctagtactgtcgaggctcatgaaggcgtcgctatcgagattgcggaagccgggggtggtgcactgacaggggagctcgcagcaaccgctgtgaatgcgcccat

SEQ ID NO: 324445 - DNA, 112 bp, Zea mays
atgaatcgcagatcgtggattaatagaagaggtaaattttttttcaactattcacattaattagtgctgtactaggatcgattcaccgtctgtccgatcgaggcattccgcc

SEQ ID NO: 324446 - DNA, 246 bp, Zea mays
ctcacgcgttcggccaagccttccgggggccgaaaaaacccaggcaggtcatcggttcaggaaaaggcccacttagcaaccaccagcagcagcaggccaaccggttcgacgacatggccggcttcggggccggcgccgtgttggcgctcctagtggcggtcgcggcggtggccgcgttcctggcggtgccggcctcggcgaagtccggggagctgatcgcgatggggttgctggcggcaaagggcg

SEQ ID NO: 324447 - DNA, 337 bp, Zea mays
gatccctcgagtcttgtggggtgcgatccgcgatgctggcgcgggggcaaggggggtctcggtttgaattagttgatttcgcagttcagggtgcgcatctggtgagtagggatccagagaacgggcgttttgagccggatctaggggtagtggccactgggctagcttagccttccgctaatgacagtatagtgacgccccgtgcttttctggttctagaagggtgcgccaggtgctcttgctgtgtgatctttgtcgccttgtgacgctggggaccgggttattggcgggagtttgtcagaataatacataaagaactggtgccacgaaatcgggg

SEQ ID NO: 324448 - DNA, 168 bp, Zea mays
gtaactacgggcccgactccaatggttcggagtacttaatgaccaccgtagacgataaccggttgcccaagacgctggacggacgccacgtggtgttcggtacggtcgtgaaagggatggacgtcgtgcccaagatccaatcctagggtcaggttaaccgcgttccca

SEQ ID NO: 324449 - DNA, 264 bp, Zea mays
acgaacctgcctgtcacattgttcattttgactttctatgtcactgttacagctccacggaccggtttgtttgtcaagtgcttattgaacacaactaccacatagatacactaagcatccaaagaacagacggattcatcctgccaagacaccagctgctccaatcaccgatgtccctactgccttagcgcccatgacatgttctaatatctatccttaattcttaaagatggtcattaataaccccttctttaaaagctcacc

SEQ ID NO: 324450 - DNA, 97 bp, Zea mays
acggctcatgacaatggcgaatttggcatggaactgggttaaccttgcggaaaaaatggaactggggaaacaaaaatggtaataaatggttctaacc

SEQ ID NO: 324451 - DNA, 226 bp, Zea mays
cccacgcgtccgaaaaaaaaaaaaataaaataaaaaaaaaaaaaaaaaaaaaacaaaaaaaagaaaaaaaaaaccttaaaaaacataaacaaactcaacaccaaaaaaacaacaaaaaaaccacttaaccaacatactaaaacatcctcatgaagtacttcaccgacacctacgacctcttctgcatctccctcatgactaaactcctcagacgcatctactacac

SEQ ID NO: 324452 - DNA, 398 bp, Zea mays
cccacgcgtccgaggtccttcaaaggccatgatagctcctgcagtagctatcagagttcggtcactatctctgagaggtccttcaatgtctctgacagcatcttctatgtctgtaaaggaagaccaaactttctcacacaggtcacatgatgcaacagaatctgtgccgatgaatctgagcgcacgtcaaatcacactctctgtgtaatccatatgtgctgaatcaacatgctctgaaaatacttctgtgaactatgaaggcatcgctcatacttacagtgtgcttgtgttagtctctggatctaacgtctcatcgtttgacgctcttactcagagttatcacgtttcactttcttttcagatccattactgtcatgtaggaggcttcattacaacct

SEQ ID NO: 324453 - DNA, 387 bp, Zea mays
gactgcgtgcgtggatcagaaaatggggatccaaacgaaaagcgtgtagtacatggtgctgctcctgtcactgactgtatctgcggaacggaatatgatggaccgactacgcgctcatgcgcttccacctatacatcaccataacaaacgggctgcacgtgctgatcgagctgcctcaactggtactgtacgccatctactacaagaacacccataagatagtgcacgcacgcatgctcaaggcaggccaggtcgtcaagactcaagcggatgcccacggtagcagggactccaacaaccaccgctgtggcagaagcacatactgaggatcataactactacgacgtaatctggatgtgagcacactacacacaacaccaagcaaca

SEQ ID NO: 324454 - DNA, 263 bp, Zea mays
cctacgcgtacgccaacgcttccgctagcttaactgtgctgtccggaccaacaactcggggcccggttaactgatggccgcgcagagtgtcgtcaggtcgctcatctccatgctcgtcatttactgctgtttcgaccgcttctgcccgtacccgacctacaccgacattacgctgtgcttctatcacatagtgactccaactatgcatctgacacactaccactgtctacgctcaccaacagcgtgcatatgcacattgacct

SEQ ID NO: 324455 - DNA, 459 bp, Zea mays
cggacgcgtgggctcgaaagagccttccgccagcgaggctggtgccgcagaggagccgtcgacggccgaggccggcggcgcatcggccgacagcccgcctgagccgacccacacttcttcggactcgccagcggagtctcctggcccggccgctgaccacgagagcggcagcccgagcatgttgggtggcactggccttgccctggtcatgctggtcgcgaccgtcacgtcctccgccatgctttgtttctaaacgaccacgatcgctctgagtttaatatggtcatgcatgcatggctgtgggagccgatgactacgccttattacgagtctctgaatctctccttagggttttttaggctgttcgagtcatccttttcggtgttacctagcatctatgtatgttgttcgcgtatcgcctcgtaattgttaactacgatgaatgaattgttgcatagc

SEQ ID NO: 324456 - DNA, 116 bp, Zea mays
  unsure (1)..(116): unsure at all n locations
ntccggggctccgacgaaagggttggcattcaagttaaggtggtcgaccgaaaccccccggttcaggacgttctggaacaaattcttggctggaatttggaaggacaactggttcc

SEQ ID NO: 324457 - DNA, 300 bp, Zea mays
cggacgcgtgggtcaaaaaaaaaaaaaaaatatataaaaaaaaaaaaaaataaaaaataaagagaaaaaaaaaaaaaaaaaaaataaaaaaaaaaaaaaaaaaaataaaaataaaataaataaaaataaaaaaaataaatataataaattttataaaaataaatattacagcaactctattttatattcaccagcttattttctccttttattatacttaatacttttttatatgtttacacactttctaatttgatcaaacttctttaacactcctagctattgacaaaccttgtattt

SEQ ID NO: 324458 - DNA, 413 bp, Zea mays
gatcggacgggcacgggaagaccgcgtcaaaatccaccaccaactcgtcccggcccctgggacggcagaaacggacgcatcgtcgtgctcaccgcagggaatccgcgcgagcttcccccttccctacatccggaggcgcaaaaggcagggcctagtgcttccccatccccagttattttttcttcttcttctttaatttacagcaggaagccaggaactcaacccaagagggggaaaaaaaatcaatccccggagaccggagccctgagcaggtgaagaaatcctagaatctccagcacgtctgccccggtctccattgaccataaccatatgaggaagaaaaaaattgcttttccaggcatggcctgggatttgccgagatctccccttcccggcgtgcccaggcacagcca

SEQ ID NO: 324459 - DNA, 329 bp, Zea mays
accgtcacgccgtccgccaagccttccgccaacccttctgccaatccttccggaaaaaggtggttgctgttttaaccgaacaatcagtagatccatctgaagggtcctaaaggaattgcttccgaagaagatccggataagcctggcacactctctgatccgtttcaagccaatttaggcattataggtaaatcaatggatggagactcattgcattcatttgatatctctagtgaggcacatgaagacgaggcatgtggcacctcatggtggcgacaagtagttttggatgggttagagggtaaggataaaatccctctaaaagatta

SEQ ID NO: 324460 - DNA, 271 bp, Zea mays
ctcacacatccgaactcacctacttttactttttcagctggtcacaaaactacggggcatgttaaatacgaactgcatcaactacatcctcatatacttcctctcacgctacctaccgtctcattttctacctagacaaccttcttccatctcatataacctcatatccaaagctaataatacatcatataaccaacatgattaacgaccttcaccaaccccatcacctttcactcacccaacctttactccaacataacccatacatatc

SEQ ID NO: 324461 - DNA, 371 bp, Zea mays
cccgatcatcctcatcctctgctcctggacagtacagcacagcacaacacatcgaggtagagctagcatccatcaccggatctcagaaccatcatccgcaccagcagcacaccacggtcaaccttccacacacgcgcgcacacacacatggcgtcgcaccataagcaacttcatgctggagcctctgcatctgcgctctccgacgtgggcttcgacgactacctgtcacagatcgtgtagcggctaaccgaatacacgctgatgctcgagctgtctagcgtgttccggctgctgatggacccggcgctctgactcatcaccttcgacagcctccgacgcatcgcaccgctgctcggcctgtgcggcatgtc

SEQ ID NO: 324462 - DNA, 426 bp, Zea mays
cggacgcgtggggtcgaggacccgacgcttaagcggtcggcgggggcactcttcagcagggtgtggggtcctcacggccgagagatggtccgagagaggtccgaccgggcaatagatcagatggcgcatgacgaagaggttgaggaccttggcgatctagacggcacgctgcccgacagcatgctgcccgaggcctcgggggtggagttggcgccgccgtccgatgcgggcaagggccccttagcgacccccgcaccgactggagctagcgaggaccccgcgccagcccctgcgccgacgggtgaggacgcctcataggcggtgggcgaaccagctgccgaagaccccgcggcgacggctcgggccttcgcaggttccgacgtttgggcctgcccaagcaaccgctggtgacaatactgattttgt

SEQ ID NO: 324463 - DNA, 383 bp, Zea mays
  unsure (1)..(383): unsure at all n locations
gtcgaggacctcaagcacgcgctcgctctctctcctgctgcaagcacacaatcgaggcccaggttatcactagtaagagctgcgggtgccgtagcccaagccgtgccatactgtactgagtcaccactgcagagcgcgcgaagccaacgagcgtaccggtgacggtatcaagtatcgccagacctgattcattctgcaagacttcgtcaccgactacaactactgaaatatgatacaacgcataacggtacgtactgcagatggacaatggatgttatctaattactcacttattcgttcaacggcgnccttgactatgccgatgatatatggatgtgatgcgaacgtgaacctaccgatatgagcggctggattacatatgc

SEQ ID NO: 324464 - DNA, 443 bp, Zea mays
cccactcaaacaagctcgcatcaacttcgacgtacactgagcacaaataatctacgggtgcgtgtgctcatccgtgcacgccggcaatggtgtcctccgcccgtgcgctcatcgatctcctcgtcgccgctgcctccctcgccgtcgcgctctcagatagcctcggcatggacgcgattgagtacagctactcgtcggacacccccaacgtaccggagaactcaatgaagctgagccccgcgtacaagctgaacgtagaggtgaagcagcagccctcgatcgacatcatcaccaagcactccatcaccgtcgccagcctagacaccctcaatcgcacctacgacgccaccaacaccaccctcatcgacgattgccacgacatcacgctggcgctggagggcaaggtctggacccagacgctgaacggcaaggcgtacagcttc

SEQ ID NO: 324465 - DNA, 58 bp, Zea mays
aaaaaaaaaaaaaaaaaaaaaaaaaaaaaataaaaaaaaaaaaaaaaaaaaaaaaaag

SEQ ID NO: 324466 - DNA, 350 bp, Zea mays
cagagacaatgtggctgctccagactgtcttctcttgatcagcttgcatttgcagagagccgcgtcagcatgacatcatccacatccgatcaccatatgcaatcttccccctctattgcttgccaatacgtgtagaaccagacgatttctcactcgtaccgtctgatcgatgacttaatctactgtaacgacgacttcgcacaacatgtagatccgtggctgtctaaatgcgtctgaggcctctctactactagtgttgttgctaattgcaaactcatccagtgctcttggttctacgcttgaacttgcgtagtgtccggatcgacaggcacgtcctcgatctaactaca

SEQ ID NO: 324467 - DNA, 317 bp, Zea mays
gacctggccatgccaggtcgagctgcctgcatcctatttcatgtccaaacgcacgggtggatcacaggctacgcggctgttaattaatctacatacgtctgccttcaattactgaatctgcacgttgatacccatgatatgtcagactggtcaaatgagcttttcacaaacgaagtcctgatctgatttaatcatagatttaatgccatactcgtgtatctacttatacactttgtctaccactaaccacctttgtttgccaatgctctactgctctctatactacttatatactgtaacgagaacatgcgtaaggt

SEQ ID NO: 324468 - DNA, 240 bp, Zea mays
gggcgagcgacagctggctcgggttttttttgctactacatacacgtagtatcctgatccaaggctagaactgtagagccatgcatgctgccggatcggagagccgtgggccatggaccgatggcgtctctctcccccgcttgttttcggcctctcgtattttggctgtagttcttgctctctcgttctcgtggaatgaaacacgtacgtatggattatcctaccagcagatcgactaag

SEQ ID NO: 324469 - DNA, 400 bp, Zea mays
acgtgatggagatggtaaactggctaaggctctgtatgcaagacctcttactaatattgtcaaggacgtcgaagccaagatgaaaggtggacaatcaagttaaaagggctgggtctttcatgcaaacaaacttcacaggatggataatgacattgtttagttgaaaatatggtcccgcgcgcagcatacatacagagaagaatatgagttttgttttattcttatcttctttacgattttgctccctgtctgtcacaatcaaaccaattgtcagtcagtatgcatagtcgtacgctatagttctgtatcttcagcttatgtatgaagaatataatatcaattggatttggtatataaatcaaaggaccggccattatttcaacaaggttggtcctatacc

SEQ ID NO: 324470 - DNA, 344 bp, Zea mays
ttcgacccacgcgtacgcccacgcgttcgcccacgcgtccggtcagtgccggccctaccgatgggtcacacgaacagcgtctgcgataccatcatgatgacaatgtaagcgaccgagaagggcttacactccgctcctaccgatctcgccaaggacactgacgacttccataacgacttcatcttgcagacctcgcacctggactacattaacctgtatgacgactttcaagaagttatcgtccatatatacgcggtccatgtcagtaacgctcaccccatctgtaactaccattgcgtgcaccgcagatgtgatactatctatcgagaacgcagctgacgaag

SEQ ID NO: 324471 - DNA, 366 bp, Zea mays
cacgaggacaaccacggccgactggctatgaacgtgcttctgatccagatcgtcagcggcggcatagacaacgcggtcatccacgtgcctgaacaagggcaccgccgacttcacgaacctgacggacgcgaccgaggctctgcaagactgcgcgatgcacctgcatgacagcctcaagctggacttactactgcccatctgcatggccttcttactgaagtcttaacgcgcttgtaccacaactgccagcgctacaccagacaactactactgctctgccaggcggtgtccgactccgccgagaaaatgcgtaggctgccttacactgccatgaacagcactgctgcagtcaacaataactcccac

SEQ ID NO: 324472 - DNA, 332 bp, Zea mays
ctttgcgccatggatgccaacgaggaaaccccgttgtgtgccctgcccttcttgggcctcttattggcctcttcaacgccggcggggtcacctgccaagaacaaaacctcttgaaaggccaacaacaacaacctaatctgctggcccgagaactgcgtggcaacctgccggaatcaacggccacgcggacggccgctgcagctgggcatggtcgtggaggccgtattgccagtgcttgctggcggactgccaatagacgcgaaaggctgcgttgctttggcgtctggcttgctcgccgtcgccggcagacgaaggataaacgtacggtttgc

SEQ ID NO: 324473 - DNA, 97 bp, Zea mays
gtgactatgattctctgtctgtcacgtactgttcgatgtagattatcgctggcattgacctgtatatatgacaagtgcaagcgaacgccgaacgtat

SEQ ID NO: 324474 - DNA, 81 bp, Zea mays
cccacgcgtccggatcgtaacaatgcaaggttgtgttgtatataactcttgtgtttggaatgccgcccgtaattaatggtc

SEQ ID NO: 324475 - DNA, 423 bp, Zea mays
  unsure (1)..(423): unsure at all n locations
tccggttcctgaccttgaaaataacagcgacggctacaaagataacagcagtaacgacgctacgggctttgaggatgattcgtcaaagaagaccaactgattcgacctttctttaaagatttcgaaagaccaactgattcgacctttatttgaagatttcgatgagagccgcaggttgtctagttcattttttctccttttaacctctgtgctgtgcacgtatcttcgcgggcttgcaccagattgcagtctggtacatctcctttggcgccttcaattgagtccagaatttcacatgatctcctgtatccttctccattacagtccgctcttgccttatccatgtacatgctgctaccagacttggtgtaaataggactatgtgatgaacacgttcanaaaaaaaaaaaagggccggacgtt

SEQ ID NO: 324476 - DNA, 257 bp, Zea mays
ccgtcgctacctgtggacagacaaaactatcgagcgggggtcatagaccaacgacgaggtggccttcatggtgaactggatgctagattttcgagctctatgctggctctagtacttaatcaagacgatgctcttcgtcgcaaaagcgcgacgagactacgtgcacggtcaatgcctctgaccctcagtactcggtatactgtcacgtctgatacctgctgaacaactgttgcggctgctgcaagctgaccgagagc

SEQ ID NO: 324477 - DNA, 322 bp, Zea mays
cccacgcgtccgcccacgcgtccgctgtcgcgtgggcggacgcgcggtatcattggggggattgctattgaggtgatatctatatcatggtggtatgtaccgttgttcgttgtcatggatcttggctcaattactctgcaaagagcgtagagggacgtcttcactcgcttgctatgaccatgtccacaccgtgagttgccgatccagatactatgctgaacaacatgctcatgtgctacaatcatgtcgagatcatctgctaggactacgacatatactgtaatacttgtctttatggcgctgatcaagtctttgttctgca

SEQ ID NO: 324478 - DNA, 302 bp, Zea mays
ccgacgcgtcctacgacacccggaagttgatttatgagcttggctttatgcataagcgtgggattaccaaatcatgtggtacctctggtttctacatgttgcagactgtaaactgattcccttaagacgtgacactgcacatattgcctagcgtgcgaccagtgataccgggctatccgtatcactgatctacactgcttgctcaacatataggacacggattgctttcctatgacactgctctaggagcgaaatgtcatggataagcaggccatacaatactgagacttacagtcaatgct

SEQ ID NO: 324479 - DNA, 240 bp, Zea mays
cccacgcgtccgcgacccggaagtcacatagcggctcaggacttgtccatcatgcgggcatatcatctcctgttggaggtgaatctcgtgatcgctgatagtgtatctatagagtaatcttgtctagctaatgcgcctctcagccaaaattgtgctatctatcatgtctatgtgcgtataactgtctatgtatcatgcctcgataacatggacagagagtcctctcctgacagactggac

SEQ ID NO: 324480 - DNA, 257 bp, Zea mays
ccgacgcattcgttcattccaaatgattgacaatagatgcatcgggaatctactgagggggcttgtacagattgctgccgcgattaacgtcatgcacccgtggcccatgatcctgtgcggccaccatgccgtgctcccgatcactccttgccacggacactgatggctcaaattacgctcagtcaccataaggatgataccttactccttttactgtccctgtcatttcctccactgttgagacccggcaagggcaa

SEQ ID NO: 324481 - DNA, 401 bp, Zea mays
gactagttctagatcggcgttcagacgcctttgccaaaaagacgctacgtatcgggtgtattcgcgcagggtcaactgcatcaacaggaagatcacgaagctccagcagactgcggctagggttggcccgagggggctgttcgccgtgaagcagaagatggaaatgtacaagcgcgagaaggcggagctttacgacgtgatcaacaaaggaatgcaggagaacgagaggggcggcaacagcggtgctgggccttcgaatagggctgctgccggtccttcttcccatgaagctgctgccagcagtccttccaacactgccatcccttccgacggtgctgatacatcaaaggacgatgatgccagtccttacagcgttccctcttccaactgtgctggtcctt

SEQ ID NO: 324482 - DNA, 326 bp, Zea mays
ccgacgcgtgggcagacgcgcgggcggacgcgtgggcggacgcgtgctccgacgcgggggagcgaggcgcgagaaccgagtagccaccggctgatcaccgtctatcagtatccctcggggcgcgcgcgcgctcgagacatgccaaccgatcgccaggccggcagccatggccaagcacggaaagcgcagccacgacgcgcaggcgacgctaccactccaggacaacgagcggcggcaagtacccggccatgacggataacccgcagctgctgagggccctcattcccaaggagtacgtgaccgcagtgcctgcagctgctgctgac

SEQ ID NO: 324483 - DNA, 404 bp, Zea mays
cccacgcgtccgctcgttcgttcgttcggcggctgggttttttcaatttcaggtggtgtttgcaacttcggatcggatggatcatttatttgaacatgtttttggtttggtcagagttggatcatcatgaaaacatggaggtgacatatcagtcagacagtcaccaccaagatttgcaacgctttattcgtggatgggtcgtcgtggatgtttgcaaacaaaattccagcatatttctatcttttagtatatccgaatagagtagatggattggatagagcatggcacttgctttctgaatctgaacaccgacttttggaagtgctcttctgctcgatcaggtgggaggagtgaagttggttggactccagaccaagtcgctcgaaattattgatatatcaatt

SEQ ID NO: 324484 - DNA, 257 bp, Zea mays
cccacgcgtccggaccagcaatagggaacatcgtgcgtaccatctaagtcattaggggggaaatgacccgtgccagcggcagtatcaacctacagagtatgacgctggtactactagctgcttcatctgctgataatgggtgctgtcgcgtaagtgggagcgtaattgctgcctgctgctgatattattgccgtcgtcgatgctgacacatcagctgatgatcgataaccgcctcagctgtgatagaccatagtgag

SEQ ID NO: 324485 - DNA, 352 bp, Zea mays
acctatactgagcatacgcggtcatcaactgacaggacaactgaatagtaccagcggtgagtcaccgtccgcacactgaccgacatccacgagtcagcatgcgactactagtacaggacatcctctcgatgatgctcatgctacgggattagcacaagaccatgacggtggtgcatattgacagtaatcagaagaacgtccatacatgaccctatctgcgccagcactactaccgacgacagagatgacgctaattgagaacacacatgtcggatacacaccaaggctactacagaagacgtagaaagtgctgacatactggtatacattcagtaattgccagctgacgaac

SEQ ID NO: 324486 - DNA, 336 bp, Zea mays
cccacgcgtccgtgtatctctcctgtttcggccttgttcgcgtgttcccctcttttgctgaggccgacctctacacgggtcgacataaccattgagagggcggtcgagagaaactagagctgccgacaccatggggagctctaggaccattgttgcgaccaccgtgctcctactcggcctcgtactactggctttcgcagacaccgacaacgctcgtgttgttgcagaactgtttggttaggaccaagttcagtagacatgcatccaggtgcacttcaggaagaaatgcctgagcttgacaaggctcccgagggtgacagctctgcgcgaactgct

SEQ ID NO: 324487 - DNA, 400 bp, Zea mays
  unsure (1)..(400): unsure at all n locations
ccctccggcgactcatcgccggcgagccggtccgccacgccatagcctcgtcctgaagcgcacttaatcctacgtctcgttcctctctcgcccccggtaccctccataggcatgggaatggggtctgcgagagggggcgcagggggctggctccccggcgagcggtggcggcgggtcatcttcctcgctctggcggccgtctcgttcctcatctcactcatactcctcttcctatccgcgccgcgtctgcgcctcccaagtgtcgtcctgccttacaccaccggttccgcttctgccgtccgccgcgggcccggcgagccgccctgcctggcgtacctgctgaccggcgcgcgcggcgacgggcgccgnctnctcaggctcctnctcgcggtttaccacc

SEQ ID NO: 324488 - DNA, 283 bp, Zea mays
ccgacgcgtgcttcaacgcctccgggtttattcctgactcatatagacgctccatgcggcgggcttaagaattgtttaggggcctctgttcatcatggtaaacatgctaattatgttaacactggctgattgtatgggacctcttcagagcattcctttctccaaggttcttaaaaaaagtgactaaccatatgttttcagtgtaattatgaataggtataggaaactttggcttttgaatggaaaaactttctcatgacacaacgaatggaaataaaaggtg

SEQ ID NO: 324489 - DNA, 404 bp, Zea mays
cccacgcgtccgcggacgcgtgggtgcgtcacccgattcgggccgggctcgggacgcgtccttaacaagggcttcaacggcctaaggccttgagtttagccgaaccatggcttcaagcactggttcatttgatgggacctgttgggggcattcctcttccgaaggtcctcaaaaaatgtgactagccatatgttttcagtataattatgaatagttataggaagcttcggctttggaatggagaacttctctcatgacagaacgaatggaaataaagggtgggcgacgaagctagaatccaaaagactttagctggacatgttgacgaagctcaagtatgataacgactgaagaaggataaagaccatacagtcataataattcttgttaaaatcatagatagt

SEQ ID NO: 324490 - DNA, 230 bp, Zea mays
ctgacttttttttcttattatacgttttatgcgcatcttaaggtgttattgtagggggttttttttttgcagttggagtatgacaggtactaaactaatgcacaataaaaacaatgaatgcctctatgaaagacgagtaatgacactgctttgaaatgggcctgactgacgaaaaagaaaaaactgacggtactttttaaggacactattgaaagcacatgttctatgca

SEQ ID NO: 324491 - DNA, 345 bp, Zea mays
cagacaactcatagagacagggatgctaaatagggtactatgtggtggcttggatggcgtcatgcgggacattggtaagagcctcagagcggacgatggcactataccaatgcacgcgcactagcaacctgactgatgcgtttgacgagtacttcatgaagtctgccttcgggtgagactttgcacattattgtttcaaagaacggtactatgctctattgagccagagttgtaactactagcgagattgcatcacaaataccctgtgaattgggtggctcatgctacaggccatggtggagtgtcacgtacaaagctagactctgcgtgatttgctaccttaac

SEQ ID NO: 324492 - DNA, 396 bp, Zea mays
cccacgcgtccgcgtattttggggatttatgtagttatagcgaaatctagggatccggaaattaaaatgttattataacttaatacatttttgttggaacaattgtacaatgttctggatatttcctcaaagattttgtaggcatgtttatgtggttacatcacttgtattttattcttatgtactgtaagtgagctagaaatctgtgaagatctcaattagatactcatttcccttcctcatgtagtcatgtttttttgtttagacgatgcagtttctattggctcttgatattacctcatcagagttttttttctgcgctattgcagtaactctatttcttgatcaacatcaacatgtcgcgggaggataatgtttacatggccaagctggctg

SEQ ID NO: 324493 - DNA, 178 bp, Zea mays
tgcacgtatgcgcgaccatcgacgtgtgactcagatgtaggggactctgcaaccggggcaagctcgttggaactttggtttactcgatcaataaccacgtgaacacgctgagtctcgcagcatacactagccggtccgtgagctggtcaccgtgcaggtagaacttctaacacgccgt

SEQ ID NO: 324494 - DNA, 336 bp, Zea mays
  unsure (1)..(336): unsure at all n locations
cggggccgaccccagcaagaaggcctcctgcttcggcggcgggggcgaccaccacccggggaagcccggcccctccgcagcgaagctcgcgctcgcgtccttcctcggcgtcatcatcctcctcgccgccgacgcctcccttaccggcgccggcgcgcaccgncgnctgcggcagcagtacctgcattacgtcggcgttggcgttggcgttggcgttggaggcggaggcatcaccgactcgctctcgtggctctccgtgccggaccgccccaacttcaccgacgacctactcgcgcggtggctcgcgcccgggggttccccgtgccgggacgcgcg

SEQ ID NO: 324495 - DNA, 295 bp, Zea mays
tctagatcgcgaacggccgccctttttttttttttttattactattttctcagagagggtaacatcctctgcaataaaaatacttcacgagcttgtcctgacaagttctaactaattccgacaggaaggtcgatttgaagcatacaaaatgtcaacgtaaaaaatccaatcacacgtactcacacgtaaaccgaaaatgaacacctcagaacgtctctgcatcacgaatggcattgtgttattcctcctcatcgcactatcccatcaccacaccatgcttgtcatgatctagcta

SEQ ID NO: 324496 - DNA, 393 bp, Zea mays
cggacgcgtgggcggacgcgtgggtttccatatattggtaatagtttgattagcggtgctatattaacacttcacattctttaagatgacaacatagatattgtatggattcttagtgttgactcttccgagtcctagaactgtgtcaaccatcatataaagtagttgcttcttcatgtcagatagtctatttgattttgtattgatgtggacatatatatgcttgacattgtgattatttgctaaaaaaaaataaaaaaaaaaaaaactataaaaaaaaaaagaaataaaatgaaaaaaaaataagaaaataataacaaaatggaaccaaaaaaaaaaacaaaaaacgaaaaagaccgggaaaataaaaaaagggggcgccccttttaaagg

SEQ ID NO: 324497 - DNA, 289 bp, Zea mays
caggccttggcggcctcagcagcgcgggtgcgtggactcgacgacgcgcgggcactgcgcggtagcgcgagcgcgcggcacctcgggcgcgaggatgctaccccgtcgcctgggcaggcagccccggcgcacaagcacgagcgcggtccccagcagcgtgctggctcgtggccacggcgcgagtgcgctgccatggctgggcgaccaggcatcagcgcaagcacatcccaactcgggttacgccatggcaggggctgcgcccaccgtcgctgttcacttggacgcaaac

SEQ ID NO: 324498 - DNA, 400 bp, Zea mays
cccacgcgtccggacaaattcatatgaagtggttgataaagactagcatcagccttgagcccctgctggcacaacttcatcattgtggtcacgacttgactccagatgaatggaggatcatctataaccgccatgaccgtgaccttgttagttcgtctgcacaagatgatattgatgatgaatgggactttgaaaatgctcatgagattgtccttgaagcacctaacaatgttaatgactggtaccctatagattttctcgtatttcatccttacaaggagattgtcttcttttccttatcatggaagacaatatcttataatttgaataccacaaaggttcgacagctgggctgcgcagctcatataccggtgggcataaaaaccttgttttcatacac

SEQ ID NO: 324499 - DNA, 325 bp, Zea mays
cccacgcgtccgggaacgcacacaccgtccggtccccgatctccgatcccctcgtcgagccaaagatgcagatcttcgtcaagaccctcactggaaagactatcaccctcgaggtggagtcttctgacaccattgacaacgtcaaggccaagatccaggacaaggagggcatccccccggaccagcagcggctcatctttgctggcaagcagctcgaggacgggcgcacacttgccgactacaacatccagaaggagagcaccctccaccttgttctccgcctcaggggaggcatgcagatcttcgtcaagaccctcactggaaa

SEQ ID NO: 324500 - DNA, 303 bp, Zea mays
gccaaaatacatgtgaatttgtcagcttatcttttctggcccctacacaaactacgggggaggttttttcagcatctagcggactcacagcatatcaccttccatgacctctattccctctactaccttaatcgtcatattatcctgactattctatacctcttctgataccttcgcttactactatcttccctactacatcatacactgacgattttactaccaaacctgatacgcacggctatttaaccatgtcacctcatacattcttatccctaatttgacgcttgattacaaatactt

SEQ ID NO: 324501 - DNA, 170 bp, Zea mays
aaaataaaaaaataaaaaggtagaattaaaaaaaaaataagcaaaaaaaaaaaaaaataaaaaaataaaaaaaaaaaaaaaaaaaaaacatcaatatttaaaaaatccaaattaataaacaattacaaataaatatataaatataatataaaacaacataaatacaataa

SEQ ID NO: 324502 - DNA, 308 bp, Zea mays
cgccattcccgcctagcttttcttccgattgcttccagaaaatcgttgagccctcgctgacgtacggctgcgaccgtggggacgacgggctttgatccattaagcaacttaccaccaaatcaaaaggaggggagatgtgagacaaaggacaggagcgcctagcaaatcaaaaggagctggaaaacgaaccacgggaaggcaggatgatggaaagggacaatcgtcttcctaagcggttcgtaaccgagaaacgaattattgaggtgacctaaaaataaaattggggccggccccttgggtctgaatcg

SEQ ID NO: 324503 - DNA, 399 bp, Zea mays
cgccttggaaggcatccggcccgtcgaggctccttttgaagaggaagaggagttgggcttcgttgctgcgggttcccctgtccaggcggcttccgggtccctggttgctgcgtcacctcagggtcctccggttgcgccggtgagcgcgcccggtctgcctcctccggttgcgagttccggatcccgcctagctgttacggcggccgtcgcgcctttgtttgcggttgcgccgccggctgctgatccgccggtgtacaaccaggaggctcgggaatccctggcaggtctgggcgtgatagcttcgaccatcgagtcgggaatccgtccgtggcttcaggcgcttaacggtcgccttcggcaggcggagcatgggccctcagattgggagcgtcagctcgc

SEQ ID NO: 324504 - DNA, 422 bp, Zea mays
cgcacgcctgatgtcgacgcgccggtgtcccgtcggccgcctccataccgcgtgctgagacggctggcgctgccgtcatcagaggtggctgttccgtccaccgtggcgcggattggggaagacagctgcatggctgccggaccttcgccaggacagctcggaccggggacggcacgtgcatggcggctggcacttcgtcgttaatccctgaacaaagacagaactcccgaaatcaactttcccgccagttttgcagcctaaacatcaagcgcgccattgtttggcgccattttctctcgcagcctcaacctgatcaacccgttgctgctgctcccatccatccccgtgctgcagcttgcatcaccttcccgtgtgcgattcatgagagcccacagccactgtctctgagcgagcattgtatg

SEQ ID NO: 324505 - DNA, 258 bp, Zea mays
cccacgcgtccgggaacacctactccgatgatccatctactgcttggcctgaccggcgccgcggagcttggccatgttcctcttcttcttctcctccaggtccgtcacctcctgctgcttggcagcttcctcggcgccgccgggcgccgccgggaccgggttcactacaggttccccgctgccgcggagcttcgggccggagccggagccggacctatcctggtctccggcgctgacgaccaccccgccaggaacctt

SEQ ID NO: 324506 - DNA, 226 bp, Zea mays
cccacgcgttcgaaaaaaaaaaaaaaaaaaaaaaaaaaaaaaaaaaaaaaaaaaaaaaaagaaggaataaaaaaaaaaaaaaaaaaaaaaaaaaaaaaaaaaaaaaaaaaaaaaaaaaaaaaaaaaaaaaaaaaaaaaaaaactaaaaaaaaaaaacaaaaaaaaataattatgaaaaacatatattttaaaaaataaatataagacaacataagacataatattt

SEQ ID NO: 324507 - DNA, 415 bp, Zea mays
  unsure (1)..(415): unsure at all n locations
cccacgcgtccgtccacacatggtggcacacatggcgcgagaaatgcagaaggtggcctcccgcgaagcagtggccccaccgccctggccaagggttcacaattttggtatgaaattcctgaaattcccttgaattcagggtccgaaaggaatatgttttccgaaattgacgttgtttaatataaattatagcatttttgttttaaaaatattaaatttatttgattttgacgtaaaatgcctgaaatttcggaatttcctgcttttctgtggagccaatttttttccttttcagaaactgtgaaccctgcctcacttaggtgctctagccttcgccgncggaatccatccagattataagtgttcccgatctcgctatcttaccctatgttttacccacttaaaagaaactatt

SEQ ID NO: 324508 - DNA, 419 bp, Zea mays
  unsure (1)..(419): unsure at all n locations
cccacgcgtccgcccacgcgtccgcacgcaacgacgcgcctcggcctcgcagaaggaggggccaaaaaggaaaagagaaaagaggaaaagaacgcagggaatgggcaagcagcagcaggcgccaccggcgcggcggtccacggcgatgtcggcgcctccgccaccgaagcgccggaagaagaagggccggccttccctcctcgacctccagaagcggagcctccgcctcgagcagcagctccagcagcagcagcccaaggggcgacgctccaaccgccggagcgccggctccgcggacgaggacgacgacggccccgcctccggctccggccgccgcgagaagaagctgcgcctcgtcatgggccttcacgacggatcacccaaggtagaaaagacgaggaaagcgacngatgggcatg

SEQ ID NO: 324509 - DNA, 330 bp, Zea mays
cggacgcgtgggcggactcgtttgataaaaaaaaaaaaaaaaaataaaaaaggaagaaaaaaaaaaaaaataaaaaaaaaaaaaaaaaaaaaaaaaaaaaaaaaaaaaaaaaaaaaaaaaaaaaaaaaaaaaaaggggcgccctttttaaagaacccaattttccttacctttcctttcaacttcttactttttttttagtgccacctaatttaatttaattgcccttctttttacaactttttaattggaaaaaccctgcctttccccaatttaatccctttgcataaaatcccctttttgccacttggcttattaccaaaaaggccct

SEQ ID NO: 324510 - DNA, 334 bp, Zea mays
attacccaccccaaagagctaccctgaccatatttggccgcttcctcctctgcctggcggtaaccctagtccagccccccgagatctgctccgcgcgagcagccatggcggagacgctcgacatgaccctcgatgacatcatcaagaacaacaagaagagtaacccctcctccggcggggcccgccgcagccgctgcggatccgcccctggcggcagcaacggcggcgtcgggccgaccaagcgctccttcaagaaggctgggaacaagcacgcgccctaccagccgacgaaagcccctgacgctgacatgcatcacgacatgtaccctgcggt

SEQ ID NO: 324511 - DNA, 82 bp, Zea mays
cccacgcgtccgttcttttacttgaatattggttactgcattggtctttcactttaaggtcggtgactgcattgatcgaatt

SEQ ID NO: 324512 - DNA, 410 bp, Zea mays
cccacgcgtccgcccacgcgtccgcccacgcgtccgcccacgcgtccgcccacgcgtccgaaaaaaaaaaaaaaaaaaaaaaaaaaaaaaaaaaaaaaaaaaaaaaaaaaaaaaaaaaaaaaaaaaaaaaaaaaaaaaaaaaaaaaaaaaaaaaaaaaaaaaaaaaaaaaaaaaaaaaaaaaaaaaaaaaaaaaagggggcggttttaaaaaaaaaaaccaactttactctgcctgacaaccaaataaatcttttttaaggggggcaaaaaaaaataaattggcgggcctttaaaaaaaaaggactgggaaaaaaaaaccggggacaaaccaaattaaattggctgaaaaaaaactttttttaagcagggggaaaaaaaaaaaaaagggcccgaatggattttcctaaaa

SEQ ID NO: 324513 - DNA, 120 bp, Zea mays
cccacgcgtccgcccacgcgtatgcttacgcgtgggcggacacgtaggcagggctcggtcctaaaaaatcattaacgctccacaaactatcgacgtttttttaaactatgaatgatacta

SEQ ID NO: 324514 - DNA, 367 bp, Zea mays
cccacgcgtccgcccacgatttcggcgacgcgtgggcggacacgtaagcgggagcgggttaacaccatcaaggaagcggtcgtcgctccaaatactatgaataatctacagccgaacaaggtaaggcgactttatacatgagctacatcttagatatcgacctcaaggcgaacaccaagtccgacgataactaccatctatatgagtacaccgacttgtacactgacgtgcatgggctcaattactatagagagaacaacgacatagacaaagatgtccatatgatagattacaaacgtaagacgcatgacatggactggattgtagacatgactttcgaatgatgatatactcatacactgtatta

SEQ ID NO: 324515 - DNA, 375 bp, Zea mays
ggcaaggaccgggccgtcacgtacaattacggggagcacgacgagcgacatacgagaccgagcaagcgtcgccgacgccctaccgcttctatgcgatgggagccccgtacgacccatacgtggacgccaccaggctcattccgaggaccatgatgacctggaggtcggtctggttctggtcccagctggagtcgtacaatcacgatatcgcctgccacatgcacgtcagccacctcgagctcggcaacaggctgtacagcacgctgtccatgcactgtgacaagctcagtggccaggaacgacgcgatcggaaacaccctagcgaggaacagaccggaagcgcgcacgtgcacgagaaagccagctgactgcaac

SEQ ID NO: 324516 - DNA, 291 bp, Zea mays
cccactcgtccgcccacgcgtccgtttggaactaaaaaaaaaaaaaaaaaaaaaggaaaaaaaaaaaataaaaaaaaaaaaaaaaaaaaaaaaaaaaaatataggactaacccatctcaatgtatcctaacttacatacacatcattgcggatccctttttatcgtttcaattttccttacatctaatctactactccgtagtttttcttcgtcgtgactgtaaaaaccttaactttccccatcttaataaccttttaactgatacaactttggctaatctgaacttattc

SEQ ID NO: 324517 - DNA, 423 bp, Zea mays
cgaaattgttcgatattattgactgctttgttgtgctgtaccacaggcatctggagtatgttgatggttcataaaaatatgaatttgttccatattattgcctactttgttgtgcagtatcgcaggcagctggatcttgagcgaccttacacaaaaaagaaagaggttagtatatattgatgatataatctaaacaagagctactcgacttaacttaagtttcggcggatgggtagcttgattcttcgtgtggtctaatagaaagaaaatagttgcatcaaaattaattagggctctaatgacagctatttctaattgtttcagttacgttattacttagttctctgtatttcctatttgtttcactgagatcaaaattttgatatgtaattccatttttttctattagatccttacttacta

SEQ ID NO: 324518 - DNA, 113 bp, Zea mays
aaaaaaaataaaataaaaaaaaaaaataaaaaaataataaaataaatataaaaaagggaggaaaaaatataataaaaaaaaaaaaaaaaaaaaataaaataaaaaaaaagggc

SEQ ID NO: 324519 - DNA, 227 bp, Zea mays
tttactacttttatatttttcttaccaatattaattttttttttttctattacgggggggcagctgggattaatcccacctcaattgcatgcttcaaccatctccgaaacaaccaccgcatgaatctgtctttcccacaacacttcctgtccacacagatctccaagagcagcttggagaccgacaatttcgctagcaatcccatactatacaagcccgtccgaaca

SEQ ID NO: 324520 - DNA, 417 bp, Zea mays
cccacgcgtccgcccacgcgtccgcccacgcgtccgcccacgcgtccgcccacgcggccgcgcacattccgaagtggaggcattaatgtagatcatatcgctttcgatccaaaggagaccaaccgctttgttgctaccgattgcttggatggcaaagtgatgatttggagcctcgactctcccgaacctgaatatcatctgcctaagacggattttaagggtatcatgttcctggaattcttcacacgttatggtcggcagtgtttgattattgctcatgaagatcataaagcacacgtatgggactttcggttgcgcaaatttgtttctgagaagcgaaaattattatctcgtgaagcttctgtcttcttacgtcctaatgtatcgttactacttacaccttcatctaaaggcact

SEQ ID NO: 324521 - DNA, 181 bp, Zea mays
cggacgcgtgggcggacgcgtgggtttttttttttttttttttttttttttttttttttttatattgggtggtgtctttttttatgtgtctttcttatttactctttcttgctacccaacagctgacctatacaacacacgaaccaaatacaccggcccccgcattacaacgactagacgc

SEQ ID NO: 324522 - DNA, 417 bp, Zea mays
  unsure (1)..(417): unsure at all n locations
ggcagcaggcccgcagccaagagccaacgttgccacgcaggagaatatcagtgcgcgcaggaactggctctaagcgctctgcgcctccaagaacgcgtggaactccgccctggccctcgccagacgcggcgtgatgcacggcgatgatgggcacgacgacgacgacgacgcatccgccgccgccaccgtcgagaacctcacgtgcctctgcgaagacgtcgacgccctggccgagtcgagccgcgacgatgccgagttcttcagtatccccttcttcgccgcgggtggttcgccgtcgaacacgaacgccatcttgaccggcgcctccgcgtcgtcatccgcgcagctggtcttggccacctncgtcgcgtggcagtcgacggcgtcgtgctgcgcggccacatgcggcggcggaag

SEQ ID NO: 324523 - DNA, 60 bp, Zea mays
aaaaaaaaaaaaaaaaaaaaaaaaaataaaaaaaaaaaaaaaaaaaaaaaaaggagaagg

SEQ ID NO: 324524 - DNA, 189 bp, Zea mays
cggacgcgtgggaaaaaaaaaaaaaataaaaaaaaaaaaaaaaaaaaaaaaaaaagagaaagcaaaaaaaaaaaaaaaggacatacaaatctaaaggaatccaaaacttgggtacccgttcttgcgattccatacttattttatcgtgcttcctacatcaaatttattgtctggggtttcccaacttca

SEQ ID NO: 324525 - DNA, 379 bp, Zea mays
cggacgcgtgggctagatcgcgcgccgccctttttttttttttttttttttggttgttttttttttttttttttttttttttttttttttttttttttttttttttttttttttttttttttttttttttttttttttttaaaaaaaaaaaattaaaaaaatattaaattttaatttaaaaaaaaaaaatttttaaatttaaaaatttttaaaaaaaaaaaatttaaaaattaaataaaaaaaacttttttttaaaatgaaataaaaacgggaaaaaaaacacccagggaaaaaatccccaaaaaaaaaaagtataaggaaaaaaaattttttaaaaaaacttttaaaaaacctctaaaaaaaatttttttatatgggg

SEQ ID NO: 324526 - DNA, 240 bp, Zea mays
gttctagatcgcgagcggtcgccctttttttttttttttttttttttttttgtttgtttttttttttttttttttttttttttttttttttttttttttttttttttttttttttaaaaaaatttaaaaaaaaaacccccccaatttaaaacacaccggtgcccccacaaaaaaaaacaaaaattaagggccaattgttttctcaaggaaagaaaaaccggtcctgcggaactttggggg

SEQ ID NO: 324527 - DNA, 367 bp, Zea mays
cgcacgcgtccgaccacgcgtccgcaaataatctaccactgcgtgagctcatgcgtgcgcgcctgcaatggagtcctccgaccatgcgctcatcggcctaatagacgccgcagactccctcgccgtcgagctctcagatggcggcgggatggcagtgcctgagtactgatacgctgaagagagccacaacgagccgtagaactgggagaagctgaaccccgactacaagctgtgcactgaagggaagcaacagtccatgatcgacatcgttaccaaacaagccgttcacgccgtcagcctccacaccctcaatcgtacctacagcgccaccatacgacacgctcatcaacgatggccacgacatcac

SEQ ID NO: 324528 - DNA, 355 bp, Zea mays
cgaacgcgtgcgatctgaatccatgtgatcaacgagacaggacttatatctcgagcgggactattaccaggacgtgggaggagatcctgagggttaactgatagaggctttaagcatgctggttgaaaagcaccacaattgtggtttgaataaactgcttgaaacgcatcgagatgaacatatgcacgaatctggatgcatggaagatgaaggcgatgcaaacgagcagcctgacacgctatcattagaacaggctattctaatgataactagcataacacgagggaatgttttgagcaacccaaatgtgctttctgacgatatagatcgctgcatgagacacattttcgtacac

SEQ ID NO: 324529 - DNA, 335 bp, Zea mays
gcataagctctctataaatactgatgagctatctgctgtttcatgagcgtctgacatagccatatgtttactggactggccatgatattacctgggctaggctttgaccgtcccattcttgttggaccgcctggatgggcaagaatgggcacccaggtttgcagctctgatgcttaccgatcgctggacttcgtgcttgacatggcaggccgtgacgaagcaaatctgtggtcaggggacgactctagctaagtggacgaatacccctcgcatgatcagcaggcccagttcctcgtgtacgagagctcatgtttactacataggcccgtcgacag

SEQ ID NO: 324530 - DNA, 418 bp, Zea mays
aaaaaaaaaaaataaaaaaaaaaaaaaattaaaataaaaaaaaaaaaaaaaaaaaaggaggaaaaatttataaaaaaaaatacattcatataatcatacttttcacctacttctttactacttcttaccaactctttccttttctttggcgtcatctaaatccatttttttgtctgttacttttcaacttctcccattttactacccctgcctttatcccactttactgattttctgcttttgcctttttgccaacctctcgtactctttattcactcctgacaagcctaccttcctaacagtcctcctcctttaatgcttaatttgcctcatccttttccttctcttttatccctgcatttattttatttactcccacctttactttttctcttttcatttcctttactcccttttt

SEQ ID NO: 324531 - DNA, 395 bp, Zea mays
tcggactcgcgtacatcgagagatgcgtccctttgttaccttagttgaaaattcagtggcgctggggtatgtcgtgattctatcgttagttttctgctaaatcaacttaatgattgatcttaattatgtatggttgaggtgagagatcgaccatattagttctctgtacgtagtgaccgatctcgtatgaggacactatatgccagttttactgtgattattgatatgatcctcatgtaatcgatcgacatttagctcgatctgggaaggcgagaattatggaggacgtgcaatcgatcacagttcgcgtccactgatagcgtgctagattccggcatttcacagtgatactcatacatcttgcgatcgatctccagataatgcaccttgatctc

SEQ ID NO: 324532 - DNA, 218 bp, Zea mays
tcccactcgttcgtgttgatgctgtaaaaaaataaatattaaaaaaataaaaataaaaaaacaggtaaaatcaataaaataaataacaaaaagaaaaatttaaatattcatatattataaactaatacattaaactctctattttacatactgtactacacatacatgtacttatatttttaactaatctccctgtactacattacttacctcttgtc

SEQ ID NO: 324533 - DNA, 215 bp, Zea mays
gttctagatcgcgagcggccgcccttttttttttatttttttttttatctttttttttttgggctcgtttttttattttttatagcggataaccatctattggcccatatatcaattttcacaaaaaatatcattaccaaagcgaaacaaaaaataaacatctaaactgaaacatgaaacacattcactgacataaacctgactgtaaaaaaaca

SEQ ID NO: 324534 - DNA, 73 bp, Zea mays
tgagatttaatatcgagttgactggtggattaaaaaagaaaaaaaataaaaaaaagaaagggaaaaagaaaaa

SEQ ID NO: 324535 - DNA, 271 bp, Zea mays
gcgtctcctccctcggccggccgctcgtccgctcgctctcccccgcacgaatctccaggtgatggcggcgcgccgctgtcactgacgtctgcagcggtggccgcggcgagcgcgcgatcgctggcgatggccgtcgaggccagcatggagcgcgcgcgcgactgtcggcgccacgagcaccagctgatgcatcagccgcgcatccaccggcggtcggctcttgcgtccgtgacctcgttcacgatgcagtgggcatcagggtcggcgtctg

SEQ ID NO: 324536 - DNA, 412 bp, Zea mays
aaggggggcagcgagcgagcgagccacgtacgaagcggtaggtagcagcagtacgtgctggcgccaagctagtgccaatggcgagggcgatgctcgtggccctggcgctggtcgtggtggtggcggtggagatcgcgaccagcgcgttcgccggcaagatcagaatgaggatactagacagcatcgacgactcgatcatttacaacaacaggtccaacgcctcagcctggtacaacatgacctacttcgagtcggaatgccgcgtcttctattccgacatgaagctggctgatgagacgggatctgcaccggctcctgcaacgacgccgtagccgacgaccagttgaagcgaggaaagtggaccaaactgaaggcccggctactatcttttgctataactaaaaatagggcc

SEQ ID NO: 324537 - DNA, 304 bp, Zea mays
tcgctctcatttacccatgcccccaaccgcccgactcatacccgcgccgacaacccgattccacggcagcgccccaaatcccgttccaaccctagcctttcgccatgcgtttagatctcggtcggtcatgggaaactgatgccgctcgacggtcgctcacgcgcattaggacgtcagcttctcgcacttaccaggatccacctcgtcatggagctctggcagggctgctagttcttctaccgcatcatctcacgggagcactacaccgagcgcgccgtcaccaatgtcactctcaccatcgtcg

SEQ ID NO: 324538 - DNA, 284 bp, Zea mays
acgcgtgcaagtaggattttgatgaacacgacctgcttgtgtggtgctggatcgtactctgtgggtgaaggtgcttgacacgctggaaggcgagtgaaagcatgattctctgatcacgagacatgttgagaatagataaacacggacaacagctctgtacatggcagttggcaagctattgttacttgctaatcggttggtacctgaaatgatctctaagttggtctgttatcaaggcctgtacaccggatagagttgaagacgcaggatctaatagccaatga

SEQ ID NO: 324539 - DNA, 449 bp, Zea mays
gtaccgaacctgactatcaataggattgttcttcgtgataataactaggttcggataatggatgatggtcgcataggcctgctttatatggccctttactcccgtgttgttatggatctttgctaaaaacatgatcaagatatcagcttttaacaagtcaagggcgatttttacacatttaaagggaaatggcgcttataacaacttggggatcagcacaccctgtcgaagtacatggttgaaactaagatgcatagggacacctttatatctgaatctatccttgaagaggtataaccatatatgtaattcttcatataatgtttcacttgtcatgctaagatggataaagtaggtttttatgtgcacactgtattctgatctggatatactagcgcttttcatgataatgggcatgcttatttaaagaacatgatgatcatatactt

SEQ ID NO: 324540 - DNA, 294 bp, Zea mays
acggccactcgtacgctcactcttgcactgaccattggtcatgggctcgtcgtagagggtggcgtgtgattgaatgcatcctaacaacgacactaacgctcactttaatcaagtatgagtctccattcactgagattgagcgtgctcgttgcgataaacaccacccatgcttcgaacagcatttaacacgtcttgcttatataattttattggaccactatgtccaataatgacgtgattatacaccagatcatgattggtattcatactattctctaagccgaaacaatatat

SEQ ID NO: 324541 - DNA, 304 bp, Zea mays
cccacgcgtccgcccacgcgtccggtcgttgctgctgctcctccgatcttcttcgctcttggcctttccttcctcccagccgcgcgcgcggagggaaggagaagaagagattagaagggcgccggaaggagaagaacacagctacattgactagccaataactaggaaaaaaacaaaattagggtcggccgggcaggccgcggcgcgcggtgggcgcggaggggagcaggcttccacgcgctcttctctctgccttcatctgatcgatcggttcaagaacacgccggaattgaagtctcgcatt

SEQ ID NO: 324542 - DNA, 453 bp, Zea mays
  unsure (1)..(453): unsure at all n locations
tcgcccacgcgttcgcccacgcgtncgcggactcttggctcctgacccccaagttgaaattgagggccaacagctgataatggaatatgccaatgtgggtgcggaggacagtcacttgggcatgtcgaattcggttcagagtgctcttcctcacgggcttcgtcaggtgaaccggatgatgtgtcaattgatattgcttccatgacaaagcatactaataaaaaccccaaaaagaagaagttcttctctaagcttcggaaactggtgctgggaaaagggaaagagaaccgtgaaatttctactctggagaggagagtgtctatttcaagttgttccttcgatgacttcactggaagggattcacatgatagctattcttcgttcatggcagaaccaaacatgcctgatagtcgacggcatggtgatcatggctttggtacacattcttctttg

SEQ ID NO: 324543 - DNA, 281 bp, Zea mays
tctctgactctttggtttactcattcttcgaactcttgcaacattcttacctcacagggacttagttctcattcatttgaaggcagaccatgcatatcaaacaggaagacaccaggcctaacacgcatgcatcctactacatacaacaacacttacccgattgactatactacaccgatcaactgtctcttccttgccaggcctgtatacttatatgcatctgactaaatcaaatcttccatgcttctacgctgacgcttgcgactccccaaacttctacg

SEQ ID NO: 324544 - DNA, 399 bp, Zea mays
cccacgcgtccgtgatcacggtaagacatgtctgatgtatcatatacgctagatgaaggtgcttgcatatgaaactcggggcgcaacgcactggaatcacgcatatccctgtctatgaccagagaagagatgctatcactgctgcgcatgtgtggatacttcaggacactatgcatgtggctcattctgagctgcaaccgctagctgacccgctgtccgaactggtgtggtccatgcagagtatcgagctcatgcacgacacagataaagcaagttcacgtgctaggacacgtggcgtgtcctgtatggtcactattcacaggatcatcgtggcataagctcctgcatacatacttatgctagatctttcccaatttactataccgcctgaagaggata

SEQ ID NO: 324545 - DNA, 66 bp, Zea mays
aactctcgtaatccaccctttgtacattaccatctagagttgctcctttttttccatgagcggaag

SEQ ID NO: 324546 - DNA, 237 bp, Zea mays
cccactcatgcggctcccaatcattgcgattatgcactggttcctactgacactctggtgggtcgtgcatggcgcgagggaagaaccaatgggcatctatgcctactcgtcctggcctcctgggtccttgaacctcaacaagccggcctcaacgggcaatgccgagccttacacaactaacgctgtacacagccgcatgagcatcgctctgcacacgcactagtacgccgacaaccg

SEQ ID NO: 324547 - DNA, 370 bp, Zea mays
tcgcccacgcgttcgatgcggagattgaacaggagcatcatccagcagggctcagaccatgttcgctatgttgtcctctttgcactgctgtgcttctctattgtctacctcttgtcaaagttctctagaagatagttccgtctttggtgggcaaatctaggataccatgacttggatgtaatctaaagaaaggaaaaaactatcgtacttctgcctggccttgtatgctcagtcttttcgtcgaaaatcgaatcacactagaaatacccttcaaagatttatgctaacgtcatccactgatccctatgattggaactgttgggattgaattttttctaccgaataaaaagctactacgactgttacactc

SEQ ID NO: 324548 - DNA, 368 bp, Zea mays
cccacgcgtccgaaaacacgtacctccacgcgtacagcaaagactagttccatggagctcgtgtacacaggacatgactgagaagtctcccctcactgcaatgatcaaccaggagatgagcgcgctttctaccagcaaccggacctacacctaacgctatccgttgcaaagacgatcacggtcaacttaagagcatccggcaacacccagacaccactctcaagggcgcttactccaattactttaacctcgttgatgcctgcatataccaccatatcagcatatgccaaacggactaatgtaacctatcactgcacagttactagcctacaccaagactgtttacccatcaacctagctgggtcgac

SEQ ID NO: 324549 - DNA, 106 bp, Zea mays
gttctagatcgcgggcggccgcccttttttttttatctctttttttttttcttttatgttgggttttttcttttcttcattctttataaaacgcaaggggcctcct

SEQ ID NO: 324550 - DNA, 421 bp, Zea mays
gtgcgagcttacatggagacgctcaagaagaaccatcagaggctgctctgcgaggggctttcaagatcaaagaagtcgtccacagaccctcggcgcacgttctgccgcccgcatcccgcatccgcgccgcaacccgcagccgtccggcaaacgcccgcatctgcggtagcgccgcagccgcggtttccatcctcctgcaatcgccagcgcgccctccgcgctcctgccgtgatccactcctagatcccggaggcatgcgtcaagggcggcggtgaccatctcagtgggcatccgctgttgcgtcgcggccgagcgggatggcgtcgacaaggtcaaatctcgcccactgcatcactttgcgccacccctagggtccctcggttgttgatccccaacacagaccaccagccaccgaggcgcc

SEQ ID NO: 324551 - DNA, 302 bp, Zea mays
ctagcgaggagtacttcataagaaacattataactctaaacgaaaacgcgaacgggttctgggagaagctgaatggcagtaacgggatcgcatgctcaagcagaccgatctcgtccatgttcgtaatggtgtaactctacctgtactgtctgcaagggatcactgacgacatgtactcctgataccggcttcacaaggaagactcagtggttgctataactatgtgtgtcgatatatgcgaagactggctcccgatcaccttgaacatcgatccatcctctctctaagacgttctggacagt

SEQ ID NO: 324552 - DNA, 161 bp, Zea mays
ctctcgtactacatactcaatcaactaacccttctcatcaaccatcatcacacgcgcaaccgatcccaacacgctcgacgagcactccccatcttacgccgacatctccacaccccatgtcgctcccgacgccactccaatctcccttgacgtcgccgatc

SEQ ID NO: 324553 - DNA, 141 bp, Zea mays
gtcgaccggatcgtcccacgcgtccgtccagtgatatcaaagatggatgtacgcgtatggaaatacgcgatgaaccgaggtctggggattatttgcatgcacgactaatcatcactggcaccaccgaaacatctatctggg

SEQ ID NO: 324554 - DNA, 278 bp, Zea mays
ggcacgttgccctgcttgtatcaactgacgacgattgcatgcgagaatgactgcctatgaggcttggcttgcctatggacggtgaaactaggtgcactgttcgagaatgaaacgtacattagcatactcaacttataccacaaactgttttcaaaaaccggtgactttatccgcgctgcaaacattgaaaccatatacgacgtatgacatcaaagatcatggtggccatgacttcaactttacactctaagagggccatgcacatctcctgtacactc

SEQ ID NO: 324555 - DNA, 422 bp, Zea mays
cccacgcgtccgcccacgcgtccggtcatctctattctatcttcttcctctctactcaaagccggcgatcagggcaaacccagcctgatcgacgaggacggctagggggcataacccagccggcgacaacggaccacgactacgatctccgtagtcggggacctgctcacttgggcattacagcccttgacattgactgatacaaatctctgggccctcgtttgtcttatgttaccacttaccagaattgcaatcgatagtgacatctcttggtatattcatgaagacttacacgagttgtgatagctagcttggatagacagaatgccccaggtgtggctgagctaacccgggagctctcaacaaatcagaacacactcacagtcggtggactggacacaagtgatccccagacagctttg

SEQ ID NO: 324556 - DNA, 369 bp, Zea mays
ataaataataaagataataaaaaaaaaaaactttaaataatataaaataaaaaaaaaatgaaggatataaaaaaaaaaaaataaattaaataaaacaaaaaataattgtaaataattattggggttccctttttactggcccccttttttcctcctcttctttttactttgttgactttttttttttgttcccttgatttcttttttcctccctcgcttttacaaaacctgtgttggaactccctttgtttcccctactttaattccctttttcccattcccttttttcccggttgggttatttcccaatggcccttccccttttgtctttccccgcatttgctaatcataattgccttttggcccccc

SEQ ID NO: 324557 - DNA, 467 bp, Zea mays
ccaagatccaggacaaggacggcatcccaccggaccagcagcgtttgatcttcgctggcaagcaggtggaggatggccgcacccttgcggattacaacatccagaaggagagcacccttcacctggtgctccgtctcaggggtggcatgcagatctttgtgaagacactcactggcaagacaatcacccttgaggtggagtcttcggataccattgacaatgtcaaggccaagatccaggacaaggagggcatcccaccggaccagcagcgcctcatcttcgccggcaagcagctggaggatggccgcaccctggcggactacaacatccagaaggagagcaccctccacctggtgctccgcctcatgggtggcatgcagatttttgtgaagacattgactggcaagaccatcaccttggaggtggagagctctgacaccattgacaatgtgaaggccaagatccag

SEQ ID NO: 324558 - DNA, 64 bp, Zea mays
cccacgcgtccgcccacgcgtccgcccacgcgtccggttctagatcgcgagcggccgctcggga

SEQ ID NO: 324559 - DNA, 102 bp, Zea mays
cccacgcgtccgcccacgcgtccgtttttttctctcaaaaaaaaacgtcaggtaacgatagggggactaaaaaaaataaggacaacaacaaaataaaaaaca

SEQ ID NO: 324560 - DNA, 399 bp, Zea mays
accacgcgtccgacctcagacagacttcctgagagccatctcagtccgctggcagcagatgtacgatctgttatgagacgacgtatttagggatgtgtaggatgaagaggtgctgcgagccactcataggcgactctggcaacgctgagctggctgctgaagctcctgctgcctataccggcaatggctacacccaggccttgaacgtcgtcaagggtgtcaactctggctccgtcttaacgacctacattatctgaacgtccgtgacatgagaccgacccaagagcatgataacagctagggaccagagactcggaataatcagcactactctgatgatcaagctcgatcacgacgcaaatgctgaagtatgccctcacaccacaatcggcgatgaac

SEQ ID NO: 324561 - DNA, 347 bp, Zea mays
cccacgcgtccgcccacgcgtccgctcacgtttgcgattactctcttggacaactggccagggtcgtctttcacaatggacggttacatatatatccatacatcttataacaaacttcaatataaaagtcacatagatttaataattaggaaaaagaagtcataacactataagatcactggcttacattttgcccctttaaactaatcacaacttctgattacttctgcggattctagaatactacttgttaacgtcgactaattcgttcacagccaccacaaactaaagatatagagctataataatgataagcacaaacattaccctccaatattaatgctgat

SEQ ID NO: 324562 - DNA, 175 bp, Zea mays
ctgaccgcactcttacttttactattttttttacactatttttttttttttttcttactttattttttttagggacagttttattctatcattctcagtgatcaatactcctcactatacataatatacgaatactattattaatacaaacctcaatttaatgatcctctatcaa

SEQ ID NO: 324563 - DNA, 295 bp, Zea mays
cggacgcgtgggctcatgcgcgtcgcccactcgctcatcaagcgggccaccggtggggccgttgacgcgccggcgccggcgcccgccgcccgcgccaagattcattaattgattattaattcgttgattaatccgcggagcgccatacatatctcgatccatattgtatttgtttgtttatagtatatatcgatgtggggtacgtttatatgtacctgccattgtcatttcattaaaaaaaaaaacaaatacaaaaataaaaacagaaaaataatccataaaaatataaataaaa

SEQ ID NO: 324564 - DNA, 88 bp, Zea mays
aaaaaaaaaaaaacaaaaaaaaaaaaaaaaataaaaaaaaaaaaaaaaaaaaaaaaaggaagggaaaaaaattaaaaaaaaaaaaaaa

SEQ ID NO: 324565 - DNA, 399 bp, Zea mays
ctagaactagtctatcaccctcgaggtggagtcgtctgacaccattgacaacgtcaaggagggcatcccaccggaccagcagcgcctcatcttcgccggcaagcagctggaggatggccgcaccctggcggactacaacatccagaaggagagcaccctccacctggtgctccgcctcaggggtggcatgcagatttttgtgaagacattgactggcaagaccatcaccttggaggtggagagctctgacaccattgacaatgtgaaggccaagatccaggacaaggagggcattcccccagaccagcagcgtctgatctttgctggcaagcagctggaggatggtcgcaccctcgcggactacaacatccagaaggagagtacccttcaccttgtttt

SEQ ID NO: 324566 - DNA, 412 bp, Zea mays
gacaccgttacacccaacacaggtctacgagatgctgtcccttcacaagtctaaaacgtgggataacctaaagagatatgaaacccaaaccactgaccacagcgtcctgttaacactctgctatggaactttctctcatactcctgcacggatcttcattcctcaaaacctagcacctgagcttcatgattccattacagaatacatcccaccactactgactgataatccactacaaagagctcgtaatccccaatctactgctcaactacgccaaaaacatcatctaggaattgctccataccgactggatctggcggcatatgacactataccaagtcgcacgcacccatgacacttctttttcgctgtcctatatacaactgcttcttcgagtacgcacctacacaat

SEQ ID NO: 324567 - DNA, 328 bp, Zea mays
cggacgcgtgggcggacgcgtgggcgtactctcaagtctccaccgaaaatacaaaccagcggagggtatattcggtggagacttgagagtacgtgagaaagagagaggttacgaagagtgattatatatataatccgctggtttgtattttctttcttctttggatcatcacaaaaccaaccgatgtaattattattagaccgacgcctcacaatcttggaacttattcattatgctagtgtatatctgtaatcccattccataatgttaatgttgatttgtggtcacgtttcaatgagaaaaaaataattgccagtgcaaaaataat

SEQ ID NO: 324568 - DNA, 459 bp, Zea mays
cccacgcgtccgaacgacgacacacgaccatgcatgcatgagttggctacaaagaagggaggagcagctagctggtactggagatggatatggatgcatggggagaactacgtacgtgcgtacgtggaaagaacaaattaaagtagtcattttactcgcgcagagagagaaaagctttgtgagatggatcgtcaccagctagcttgcgtcgtcgtcgacggcgatgataagcaaataacattttacacgcagacagcagtagtaacagcaaatcgcgacccaccctccgccgcgaccgccatcgcgtccacggtacagcgtacagtcgtcctggtcgccgtcgcgcgcccacctcatcaagatcaggctttggccatgtccttgccgccgtcaactccttcgccaaccccagacccacccagagaggctagagcgaggccgcaggcggcggctgtggat

SEQ ID NO: 324569 - DNA, 329 bp, Zea mays
acgcaaagtgctttatcctgtggagctcagcatgctatctatgatctgtcatgcaactgaacgggtgtgagctaattgatgacaaacattgatgctagcatgaccaagatttacatggtactcctactggtacttcaaagcagaactgttctactggattaaaacatacattaggcaaatattgaggaactacaatattccttgatggatggaatgataactccaacttctgagattgatctagaattcataatcttggcatactacaaccattatgagtctaagtcagcgactctagaatttataatggatagaccttgcatgataat

SEQ ID NO: 324570 - DNA, 394 bp, Zea mays
cccacgcgtccgcccacgcgtccgaccagcgcagcagtttcagggcgtggtgaagggcagggaagctcaagcaagcatacaaggtgcgtagagaggatggttcgaccagtcagtggataggcccagagcttgtccaacctgaatacagtgcacagaaattttaagctaacacagttgtgcaggaacagtgagaaaacaacacttgcagcaaagcgaagaggcacctacctttcctggtcccgtaagtaggatcggtttctcggtttgttgaccccggcgccgctgaatagtttcaagacctgaaagaatttcaagaaattgatcaaagtctggattgaaatacgttatgctagcttaccattgacaaggcaaagagacagttgaactacggaaa

SEQ ID NO: 324571 - DNA, 432 bp, Zea mays
cggacgcgtgggcggacgcgtgggtgcattctttgcgatctcctttttcccccctcatcagatatgtgtacagtggcctgttgaatgcttcatagaagcatataggctgatgtctttttcatcactgtgcaacttgccaccaatattccatctctgtcgagtccaacacatatagaattgtactgtcttttttcaaagaggtgcagagatcatgcacaccaaagcagcagcagcatcctattgaagaccaggattttgaagaatctataactaatcaagaagcagaccattatgattgttggtacgagagcaggagatcaggtggcacgacaaaaagtatgctgagagcgcaaatgtattgttaagtaaccaggtgacattgtgctgcataacaaatgaatgaagtcaaatgaactgaataatttgtaaaaa

SEQ ID NO: 324572 - DNA, 286 bp, Zea mays
cacccgatctgaccaaatttacatttaactgaaattccccaattctattgcatctgcataattggaaatgacactaccactacctatacatattcccttccctcatcatcatccttaacctaaactaaccaaccaaccaattacaccaaaacatcacactacatgatctccacatactctatcacactaataaactacatccctcccaatacatctacaatacacacaatacctaccagattctccaatacaccattcacataaactctcaactcaaataacccaa

SEQ ID NO: 324573 - DNA, 267 bp, Zea mays
gcgcccacgcgtccgctagttctagatcgcgagcggcgcccttttttttcatttttttttttgggttttgttccaccattatcctgtttacaaaatactactgctccgtatatacggagaaactacatttaacgtaatcgaaaacaaacagctattaattagcaccatctccatacctgcataccaccttggcctaaacgacctgatcataacatttaattaattaattaagccaaagacctacaagccctaggatcgatgcctccc

SEQ ID NO: 324574 - DNA, 67 bp, Zea mays
aaaaaaaaaaaaaaaaaaaaaaaaaaaaaaaaaaaaaaaaaaaaaaaaaaaactagttctagggcgg

SEQ ID NO: 324575 - DNA, 382 bp, Zea mays
ggatgggcctcttaccattctttcttcaagtgcctgatgtaatgatgtagtgtattgtatgaatagataatgacatttactgcctagcttaatttttaccactgactatggtagcagcaagccactgatgcagcaaattattgttgcagtgactagctgcattgtagctgaagctagcagaagcgagcacataaaaatttataggcaatttataccttgtgagttattcatatcatcagctcatttttccttatggatttgtgaatatgaatgttgtggatgcagataattatgttatgtacccctagaaataccacaatgttgtaacaggtgaactagagcagagagagaatacattattccagattaacaaccttttctt

SEQ ID NO: 324576 - DNA, 77 bp, Zea mays
cggacgcgtgggcggacgcgtgggttctcgttcatggagaataatatttggtgttggagggtttactaaaacttatt

SEQ ID NO: 324577 - DNA, 290 bp, Zea mays
caccgtaccattccgtccgcagaggagagccctcccctccaccggcttacccgcccctgggccagcgatcgcgcctgcttccgggcgtcccagccttggtccggtcgccgggtgcggcgctggtcctggtttgggctctcccatggcatctctggagcacgaggtggtggtcgccatggcatctctggagcaggaggcggtggtcgccgcggtcgtcgtggagaacgtgacgccgtagcagcaaggcggaagttgtggcggcgcacgaggaggaggggataccggtagcg

SEQ ID NO: 324578 - DNA, 344 bp, Zea mays
gctttcgaggctagggttgcctcctcctcgtcgtcgtccacatggcgcgaatcctcatgcggctcctcctcctcgccgcggcggcggcggtggcggcgggggacggctgcctcaactccggctgcgtcgcgctgggctcctacctcgtcgcccgggaccagaacctcacctacatcgccagcctcttcggcaaaaacgactaccacacgctggcgccctacaaccccggcaccaccaacctggactacatccaggccggccagagcgtcaacatctccttcacctgcgactgccacacgttccccaactcggacgccacctacctcggcggctccttccagcac

SEQ ID NO: 324579 - DNA, 349 bp, Zea mays
acgcgtacgcctgtgctgacgcttgtgaaaaattataattatacatcaacaaaataaatataaagtaatggaaaaaaaataaaaaaaaaaaaaaaaaccaaaccttttaaaaaatccaaacattcatactactttctttcaacctcatatttttactttactattacctactttcatttaactactcccgctttttcaacctaattcactggtaaaacccttcttttccccaatttaatctccttctattacatccccttttctcaatttggcctcttttctatcaacccctctcctttcgactttcccaccctttccccactctaattcctcaattgtactccccctt

SEQ ID NO: 324580 - DNA, 121 bp, Zea mays
cggacgcgtgggaaaaaaaaaaaaaaaaaaaaaaaaaaaaaaaaaaaaaaaaaaaaaaaaagcgcggctcgatcagaaggggccggactaacatactcttgcatccaaaaatatatctaca

SEQ ID NO: 324581 - DNA, 267 bp, Zea mays
tcgcccacgcgtccgcccacgcgtcctaaaaataaaataaaaaaaaaaaaaaaaaaaatggaaagtaaaaattaaaaaaaaataaaaaaaaatatttaaaaaataaaaaaaaaaaaaataaaaaaaaaagggcggcctttttaaaggatccaagttttcttccccttcctttcaacttcttactttttttttattgttacctaaattcatttcattggccgtctttttacaactttttgactttaaaaaccttggttttccccaatt

SEQ ID NO: 324582 - DNA, 315 bp, Zea mays
cccacgcgtccgcggacgcgtggggcgagcggccgccctttttttttttttttcgattcacgatccttgtatattgcgcattattgaatccttgggcataccataccggcagtgggaggcatcccaaattcaaaagggagtcatctggtaactgatgttacaacttttctgtatgggaatgctgtgaacaatgtggtgcagagtttcacacactaactaaccttacattatgctagacagagatcctacttcctttgcttcagttcctcgaatctatgcagatgcagacactcgcagagagagctcatcaactgg

SEQ ID NO: 324583 - DNA, 136 bp, Zea mays
ctataacatgctaaatttgttctaaaaaataaaaaaaaaaaaaaaaacaaaaaaaaaaaagaataaatataaaaaaaaaaaaaaaaaaaaaaaataattataaaaaaaaaaaaaaaacactattcataatcataac

SEQ ID NO: 324584 - DNA, 269 bp, Zea mays
acggctgcgctcacacatactcctcattcaatatattccatcctctacattatatgtcaaaccaacagatgtcgttcatcgaccacaagtgctacccctgctcatacaacaacgtcaataaggcccctttcaacaacatgagcgcgtgttgcaacttacccatcttcaaagactgtctaagttgtatatcctgcttctagatcaactgctacaagccaacatactactctctcaagcaccttctacatgtacattacttacataaacta

SEQ ID NO: 324585 - DNA, 306 bp, Zea mays
acgcccacgcgtgcgaccagagagtcggtgagagggccccgccaccggcaataacccacccaggcccagtcagactcagagcctgcaggctgcagcgtgtcggcgtcccgtgctgctctgccgccctccggcgcctgtggcggtgacgcgcacatacgctggagtagctagctaggcaagcgagcggtggtggtggtcgagcacgtagcacaaccagccatgacgcgccgcgggacgctcccgctggcgctgctgctgctgctggcggcgacaaccaccgtgtccgggcagggccgacccgtgacg

SEQ ID NO: 324586 - DNA, 169 bp, Zea mays
gagataccttaaggctccacgaaataaaatactcatggctcgcccgatttgtgatcaaaaaggaaaaaggtacataatactacaaaaaaaaaaaacaaaaccaataatacacaaataaactaaaaccaaacaacaatacagctaaaccaaaactacataaacaagatca

SEQ ID NO: 324587 - DNA, 407 bp, Zea mays
aaaaaaaaaaaaaaaaaaaaaaaaaaaaaaaaaaaaaaaaaaacaataaaaaaaaaggaaggggtacactttacaagctcgcaaccttataactgttctattctgaccccatcaactctactatcatgcgccacctattttcaacctactcctctgttaatttacaactccctcgcttcaaaacctttgtcctgcacaaacttcttcgtcctgcagctcatccacctttcagcacatgtcctattatccttctgccctgcaactgacgatctttcctgaattcgaccttccctactgtcgcgcatcatgcacggtgaatggggttattactctccccggcaatgatactctagccctctgcctcttacccactcctcatccttttaacttcccatctttctacattc

SEQ ID NO: 324588 - DNA, 357 bp, Zea mays
accacgcgtccgaaaattataaaaagctatattctaagcatattgaaagggatggtgagttgtgattaaaaaaaaaaaagcagaaaaaaaaaaaaaaaaaaaaaaaaaaaaaaaaaaaaaaaaaaaaaaaaaaaaaaaaaaaaaaaaaaaaaaaaaaaaaaaaaaaaagggccgcccttttaaaagaaccaaacttaactacccctgcattccaacaaaaaacttttaaaaaagggaacccaaatttaatttaactgcccgcgttttaaaaacttagaaactggaaaacccttgccatacccaatttaaaccccttggcaaaaaatccccttttccaaacttggcaaaataccaaaa

SEQ ID NO: 324589 - DNA, 292 bp, Zea mays
cccactcgttctcggactcgtgttcgtactcttaggaaaaacaaataaacagaacatatcgggactaagggaactaattctgcaccaaaacaaattcaattacattcatacaccatatactaaaacttatacaacatccttccattctaaaacacccatttttacaccagtcatttcctacttattctatttataatcaactcatatatcttaacttaattaacaaaaactttccaccgctttaaatgatacaaccttacgtattcctacctaataccccctaactcttata

SEQ ID NO: 324590 - DNA, 308 bp, Zea mays
ctgaaatgagcattttatattaacgaggatttggccctattacacgaacagtacatataggactcgcatacaatttacaatttatagcataatcacaacttatatcatacaaatacacaaaaacacacttgactaactatataatccatttcgacactattatatctacacatgtgttacttgcactacttttatcaatactactcattggctataacatactcacattgacgagagctatgataatattaacactatattctattgcactatttccaccaatattctaataatgatgaccactttat

SEQ ID NO: 324591 - DNA, 93 bp, Zea mays
gacgcgcactgtaacagcgcattaagcgctgccactgtgttctatacgcgtatcgagaccaatgctcttgtcagcaccatagtttatgattct

SEQ ID NO: 324592 - DNA, 176 bp, Zea mays
cccacgcgtccgcccacgcgtccgatcaaaggaaaaaatgaaggcctatcaaatatgtcatgaggcacttattatataacgtcgtcaatccatttcttaactcttctcttttaaacaacagcgaagtctcactataactatatattcagatgactaatactcagaacgatgatgac

SEQ ID NO: 324593 - DNA, 91 bp, Zea mays
caacataaaactaataaactgtcacgatcactttcaactaacacccaaccaacacctcccaactcaatccaaaactacataccaccaccac

SEQ ID NO: 324594 - DNA, 374 bp, Zea mays
  unsure (1)..(374): unsure at all n locations
cggacgcgtgggcggacgcgtgggctgacgcgtgggctgacgcgtggggcaaacagcagtggattgttcacgctcacgagaaanaaggttntgcgtgtgatggaagcgagctggtgcttgcgtatgccagcaagctgcgattctgagtgtaacacataaggatgttctttcattcttcttttttgttcccttgttgcatcaaattgtgccttaaccacgtcgatgtgctgccaaattgtcaatccctgatacggtcaatcatggatggaccgactgcaatataaatatattataccacanaatagcgcgacctttgctacgaaaaaaaaaagcatcngntacgacatcgaatacaccgtctgcgccctcaaagt

SEQ ID NO: 324595 - DNA, 306 bp, Zea mays
cccacgcgttcggccacgctttcgacgagctacgcagagctaatggacacggcgcgctagggcggactcaaagtcaccagccgtcatgtccgttccagcaacggcggcgttacttctggtactcacgtcaccttccgaatgcacgtgcctgcccacggaagatatcgttagggactagtatctctgatcaccggccagtcaggccgccgcagctacaagcacgtgtcgctcgactgctacgtcatgtccgatgctgaggtacacatgcatgtgtagtgcttcatcgtctacatgcgcacgttcacg

SEQ ID NO: 324596 - DNA, 92 bp, Zea mays
cggacgcgtgggctcacgctggggttgcatgcagggaatgcttgcattcatttttcatttagttaagaattcattgaaattatgagttatat

SEQ ID NO: 324597 - DNA, 418 bp, Zea mays
gtcatgcgtacgcacctacatacgcatacgcatgcagtatacgctgcactatgcgctgcaggacaggccgcacatgctcaccgctgtcatgacctcgtccacctcgacttgcacctcgactcggcccttgacgtcgcccttcacgcccacggggaggctcacagctgctgcgccagctggtgcagcggcgagcgcactggtcaggtgtctgcttctctgcctgcacatcctcctgcgcatccttctcctcatctttcactccttcttctagactctctccatgatcccggacatcctcctggactacttcctatccgacttggtctacgctggagcgctcttctgtgcgctcctcctattcctgtggctgtttctgtttcggcttgcctttgcgctgccgctgccgctcgcgctccga

SEQ ID NO: 324598 - DNA, 428 bp, Zea mays
  unsure (1)..(428): unsure at all n locations
ctcactcgtgcgtattgacacagactcacggaacccggacacgagcacatacttgctgcagtgttgacgcttacgtctgcttcggcgtcatgattggtgctgctaagtgctccccgtacgatatgcagacgtacaacctgatagacacgcagagctggcacacgatccacgtgtacccggccgacatggacgtggagtcatactgacatcacgacatacgctggcatgtgataggcagacagttccaacatcctgggagcggcactaccatgcgtgagcgacctctacatgagcctttctgctagcctgcaccgattactactactaggagttcctgatggctcgactactgattacaggtgcctcanagacggctggcttctgctgcacgagtcactacggaggcacacgctaaaacgacgaacgac

SEQ ID NO: 324599 - DNA, 349 bp, Zea mays
  unsure (1)..(349): unsure at all n locations
gtcgactcgcacgcgtctcgtggcacgtttcaaatctgtggcccctctgcnngttcgagatnctgatctganngctggcaccagtcccactttgcgcgcatgggcggagggactncgtgagccgccaagccccaatctcactggcaaagttcggcggtagtgccagaagctcgcctggcgagcctcactcnnaccatcgtaggagaatctgnntcgtcgactctcgccgtaaagcccgtacgagaatnctcgcatctncgtggtctgtctgctactctcacgttctgtccactactctngatatcactcnnttctggaaagggctaagagggtggcaccgnnngtgttt

SEQ ID NO: 324600 - DNA, 321 bp, Zea mays
atacagctccatacacttacataccacgcctctaatctatacaacatgtgtcatcacctaggttctgggtccacatgcatgcatacattcaatattactcgcatcagatgcatgcatgcttcatatatcaatgattaaggttaaacattcatcaaaccatcactctatcaattgtacccaactactaattacatcttctcacacataactttccttataccaatatcttctactactacaaactaatcctccctacaaccatagatattaacaatgtattatgtactaatctcgtcttagctacaatcattcacgacctta

SEQ ID NO: 324601 - DNA, 399 bp, Zea mays
  unsure (1)..(399): unsure at all n locations
ctcactggaaggccgccgacctacgacccgcccaaggcggcggcgccctcaggcgagctgtggtcgtcccagcagaagccggggccggcggcgggcaacaccgacctggtgaccgtcgtggggtcgacgccggagggcgagtggctgaacaccgtggtggaccgggacctgcggggcgaggaggaggaggacacggaggagatggtgaagctgatcagggtcggcatggcgtgctgcgagagcaacgtggacaaccggtgggagctcaagaccgccatcgagaggatcgaggagctcaaggcgaaggagcgcnccgacgaggagcaagcgacggtgatcgacgatgactacagcgatgttgccttcaactgatcatcgacacgaaccggccgggaatcg

SEQ ID NO: 324602 - DNA, 399 bp, Zea mays
cccacgcgtccgcccacacatccggccacgcgtacgtccacgcatgcgcccacgcgtccggccacgggttctcagactcatgggcgccatgcgcactgccatcagcttgatcgtgatgggattcgtccgcttctttatcaagctcatgatgatccacatcaacagacatcatcgacgaattctgctgattcatgaccgtcactgactaacgagtggacaacgtcatctgcctcttgaccgcgcacctctagcataccgaatgcactgtgttgatgtgaacgactagtcccagggtctacctggtactctctcgtgcctgatgtcgaatattcatatgtgaagaagattcacttagatgttaccatgtgcaaacagaattgcatggctagttttcttttc

SEQ ID NO: 324603 - DNA, 383 bp, Zea mays
cggacgcgtgggcggacgcgtgggcggacgcgtgggcggacgcgtgggcggacgcgtggggtgaatcatcccctcgatcggcggggacggggccagggcatgaggcggcggcgacccgactcctgcccagctgattatacatccgtttacctggtattggcataaggagacccttggatgcgtgtaatgtttgtttgcagttctgataaggtgtgcaagaaggctcatgctactgggagcaatgcttgtatctcagttttgcttctgcgggttttttatccacaaattacattgttctcgttgatcacatttccataaaaccatttatcagtaggtcaccatgtagagcaaaagaagataagaaaaagttgcttcaacaaaaa

SEQ ID NO: 324604 - DNA, 160 bp, Zea mays
caatctcatgaggtcctgacctacagggaccgtaggtaccggtcgatgtctacgacttgcggcacgtcctccgtttcacggtaaggccgcttccagtccatcagccagcgcccgaagtcttcggagtccggacttcttccgttccttaacttcttctgcc

SEQ ID NO: 324605 - DNA, 167 bp, Zea mays
caaactcctgcgggaaacaaccacactgaccatagatacacggctatgcataagggatcgggtactatcttaggttctcggaatagtcactgacagcacaatgcctattatactagccagtttcaatcattccagactccacatactagcctactcagcagataacg

SEQ ID NO: 324606 - DNA, 105 bp, Zea mays
accaaggttaccaaaaaagttgctgttcctacccttccggccaataaccatggttctataaaaaccatttccttgaaacctaacgggcaattgaaaatgaccccc

SEQ ID NO: 324607 - DNA, 463 bp, Zea mays
gcgttcactcgtcctgttcaacaacatctccaccctccttccaaagaccaccatgagggctccggtcctctactcgctgctcaacctcgccaacgtcatcaccgtgcctctactactctacgtccatgaacatcatccggcacacacaatttcgacagcaaggctgacaaagaaactgctgctactaccgcgtctgacgatgagcataactgtatcaacaccatatccttcgacacatactgaccactcgacatgatcgccaacaagcccaacgaacaagtcttgaacgcacaagctacgccggcgactaacactgacacatattaccacaaaccaaacggtcaataacaatctgaaactgacacaggcaacgctgctgactatgaacaagccgacagataccatgcagctctaattcctgaccacacaccctatgaatttcccataaatatgtggaagctct

SEQ ID NO: 324608 - DNA, 488 bp, Zea mays
  unsure (1)..(488): unsure at all n locations
ccgtctcgggagaatctgtccgctcgtcctnnctcctcccgcctctctgcggctcctctcgcagaagagggcagtgctcgcncgcggcggtcgagcgcgacctcaactctccctttcgtgctcttcgcnctctcaaacggcccctcaagccgccaagaaatggannggagggcngccacgagccgcgaggaaccctgcaggtgcannngcggtgccgggccgccgtctggaaaccggctggcgaactgctncagcaccggcgaacgatnngccgagtgggagggacccatgtcggttgaagaagggatcccctggtnncgattacatnnngcttcggatgggtcctaactacannattccgcncacccannagctcnngctgagactnnntctggtattcaaggacccctcgttgatanttgatgggtctttctcgatgccgaaaaagagtnaattggattcttcttcagaaaataatgaaaagtttc

SEQ ID NO: 324609 - DNA, 260 bp, Zea mays
aaaaaaaaaaaaaactaaaaaaaaaaaaaattaaacaaaaaaataaataaaaacaaggaaagggaaaaactcaaaaaaaaataaacataaactactctataaacaaaactaacccaaacttgcttttctgtctctagctttagcttatcttgctcacttttctctcctcttcttttaatacccgtacacacactcgtacttctaaaattgaaactctttctctcttgtggtgcctgtgcaccattcttgcttgctttctt

SEQ ID NO: 324610 - DNA, 408 bp, Zea mays
cgcaaggagagcaccctccacctggtgctccgtctcaggggtggcatgcagatctttgtgaagacactcactggcaagacaatcacccttgaggtggagtcttcggataccattgacaatgtcaaggccaagatccaggacaaggagggcatcccaccggaccagcagcgcctcatcttcgccggcaagcagctggaggatggccgcaccctggcggactacaacatccagaaggagagcaccctccacctggtgctccgcctcaggggtggcatgcagatttttgtgaagacattgactggcaagaccatcaccttggaggtggagagctctgacaccattgacaatgtgaaggccaagatccaggacaaggagggcattcccccagaccagcagcgtctgatcttt

SEQ ID NO: 324611 - DNA, 424 bp, Zea mays
cccacgcgtccggcggccgcctttattttttttttttttttttttttttttttttttttttggtttttttttttttttttttttttttttttttttggggaacttatttttcttttgaacaatataacctctggcttaaaaattttgatattttaagttggaaattgtttaaccccataaagtggaacatttgaatgggccaatgttgaaatacctgttactagacccggtttcagtgaaaataaaatttcaagtcctgccaacaaaaaatatccccggggtggaaatttatggcccccataaactgcaactcattaaacggcttccaatggcaatcctaatttaaaaattggccttctaactaaggggactcttgttgcgccaagttgaccgcttaatacccttcagtgggttctttttcaag

SEQ ID NO: 324612 - DNA, 427 bp, Zea mays
cccacgcgtccgcggacgcgtgggcgacgactgcgggtcttaggcgacaccgtcacaaccgctgcgtctgcaccgtccagaagtgacgcctccaccttcctctacgcgcagacaccaattcgaccaccttcctcgccaacaccctcagcctcgaggagaacgaggtgtgtgtatcgcgttcatgaaagccatcgtgcctggtgggattgaattcgagatgtacttctctgtcaggagaaatggcgtgggatttggtttgtatctcgattcttctgtgtgcgtctaagtagatcgcggtcatctgtacaggctatagattggtgccttcttccaatctccccctctcttagttccccaccctctccgtcttccatttgtatattggagacctatatctgagatatcaccaggtctatcttttcattgt

SEQ ID NO: 324613 - DNA, 358 bp, Zea mays
gccacttaggcttgcgatcgcgtggcacgatctttgcgaaaaagcaccctggtctgctgccgaccgagtcgctaacaatcgatttccatgacacgtccccgcgtgggtgtcccatggcactggcgctgctgctctgtcggaggtccgcgcctgtgcgagcgtccgactcagcggtcactacgtgcaacccggcacgcaagcggcaagcccagcggggggggctgcgcggggatcactcacgggacggacagacagctgcgagttcagccactagatctggctggcatgagaggtaaggtgtggtggcgtctagcgactactgacacacatgcgcacattggtcgaattctttgtaatg

SEQ ID NO: 324614 - DNA, 318 bp, Zea mays
gttctagatgcgagcgccgcccttttttttttttttttttcttatagacaaattggatgtctgctagactagatcgcgtgtctatatatagatatagatacaatctgcttgaacgatcgccctcaaaactggatcaacaaacttaaaatacaaacaataataatagggaggaagatcctctccgtctgcgtacacagcacggccatcacctagtactacaacgacgacatccacaacatcatgaaggactatccccagccagatcacatcgtgcatacaggcctgtttgtaggacttaccaagtaccatcgtcatcca

SEQ ID NO: 324615 - DNA, 282 bp, Zea mays
gcatctggttcgggcgctgccacctgtggattagcgagaatgacggcgacaatgagctgtggaactgagacaatggcctagatctcaagaacgatccattagttcgaatttggacggtgccaggccaacacgtatacaagtagatcataagctacgactggatcatataacttgaagatttgaactacctagtctctaggacatacgatgaaactagagcgctggtagaggcaaacaaatgggacgtgtcagtgcacaaagactatctagctatggagagac

SEQ ID NO: 324616 - DNA, 480 bp, Zea mays
cccacgcgtccgcccacgcgtccgggagcacagagctagctagccagccagccagcagccagcttgctcgccgcgcccgtccttcttcctcgcctccgttccgttccgttccgtcccgcccgccgtcgccgccgcattcagggatggagatgaagaagatcgcctgcgccgtcctcgtcgccgcctcggcggccaccgtggcgctcgccgcggaggctccggctccgggccccaccagcggctcctccgccgtcgcgcccgccgtcggcgccgtcctcggggccgccgtcgcctccttcttcgcctactacattcagtgagccggccgcggccggtcgcccggaggccgaggaagagacgaagcgggagagagagtgacatggctgcgcgcattccgatgcgtgggcatgtttctgattcgacacaccttttgttctctttttctttgttccctctttctgcttaatttaacgaattgat

SEQ ID NO: 324617 - DNA, 267 bp, Zea mays
cagaataaaaaaaaaaaaaaaaaaaaaaaaattaaagaaaaaaaataaaaaaaaaaaaaaaaagaaataagaaaaaataaaaaaataaaaaaacgtacatacaaacaaaaagaaaaaaaaataatggaacaaaaatataaataacaaagggtcgtgtaaacaataggttaaccaaacttaataggctatcatcacacaacacttttgttgataaaactccctatattacaggcctttgccgattacgtatcggccccgtttttgaaa

SEQ ID NO: 324618 - DNA, 452 bp, Zea mays
cacacgcgtacgacaacacatgcgcgcactcttcctgagatgattcaatacctacagctgtaagccaagcatgagctgatgcttgacaacaggcatggcgcacggtcatgatctatttctgtacgaatggaagacgcatactgattagttccttcaggatcctattcggggcatcagagataaaatgctggtagagatcgcaacatgtgatacacagtgaggattcagacgctgatgcccattaactagacatagtgcctgctgcaaggcgccttgtacccgaattcatgatgtaccctgctggaatagtgagccctttttgaaagtgcttttaagtatgaatgccaccacgactgactagtatttgtgaatgatctttgtgtatctcacgacatacatggactttcatgttcttgcgatctaagaaagtactcataattttctagaagatt

SEQ ID NO: 324619 - DNA, 92 bp, Zea mays
attcaaagtctagtagaattgtgcgctggaggtgtcgacggcgttaggtcggcgaatgcacgggatgatttcttggctcgatgacctatttg

SEQ ID NO: 324620 - DNA, 309 bp, Zea mays
aaaaaacataacagcacaatggaaaggctccttataatgatcacaatatgaaaaaacataaagggggacatgaatgctagcttctggagccaaaagtcaaggcaataatcagaaagattgtacatcctatactgaaacactaaagggctgcccattttacatacccaagatgaccctcccctgacgtgaaagatgcatttctgtctttagtggccctaaaattaaattagctggcctagattttaacagtattattccgggaaaaccccagggtttactaagctaatggcctttatagaaaatcccttt

SEQ ID NO: 324621 - DNA, 395 bp, Zea mays
cccacgcgtccgcggactcgtgggcggacgcgtggaccaattactataatctggttaattatttctcagaaatggcttcatacaacaggtgaaaaagtttatgcgtgttctaaacatcaagtatccacctaccaaatgaatatttcatggtccttgttcatctagcacttacgtggcaccagtagtatacagatggctcatacttctgtcctactggatgcacatggtgttcctgatactcaagggttgcgtgacgccttggaacatcctcatctacatcttggagtacgattccctatacattactcatgtaccacgatcactaaactggacatgaagtctatggaacacgatagctcgacacatggtgctcggacttgttatagaaactgttc

SEQ ID NO: 324622 - DNA, 276 bp, Zea mays
cacacgccacgcagcgcacgcgacccacaaattacacgcgcggttagaggatggcgatgaagcgtccacttgggcaattgaccccaccagcgaccgctgctgcttcgtttctagctcgagagagtttagagggctgcttgattccgaagctccgagctcgagggattgaattgagcccccccaagatcagaatctggagcaacgggatttggcttcccgcttggtgcccctgattggagtacgcttcttttagggcggatgagaagctgctcggct

SEQ ID NO: 324623 - DNA, 433 bp, Zea mays
ggcgactgctacgtcgccaggagcggcatgttcatgctcgcgatggccctggtcctggtcacggaactgatcagcctcggcctcaacttggcgaccgaataggacgcggtggcctgggccacaacgctcagactagtgagaggcgatgagcgcgatgatacgtgcgtacgcggagctggcgtacgctgtacaactggactggcgatccaatcactacggcacgcacgctggcatgctggcagatgcaggggagaagcgcagcgccgaccaacaggaggctgctgataagcggaagggatagtgcgtgatgcataaggacacgaccgcgtacacaaccgtaagtagtaggcgttgagcgaactgaagtggttggacgaacgagcacagattgattatcgaatttatgccggtacgttagatctgctgcagtcgt

SEQ ID NO: 324624 - DNA, 421 bp, Zea mays
cccacgcgtccgcggacgcgtgggggagatatgccgccacgcacgaggaaaatcgcgcgtaagtccactggaccgattggtgtacctcggcaccagctggctccgagacatgaggagagcagcagcggcagtaatgaccccattggagacctagaagcccaggtggagcaacttcgaatggagctacgtcatagaaactaggtgtgggtagaagatggtcagcgtataaatgagttaagagctgacatctgccatttgcaagacgagcttgttgaacgggatttggcaatcgattcggctatcaactcatgttccattgcttgggatcgagaagccaaagctcgagcccgtgtggaggagcttagcacggtcgtcgacaacttgcaggtgtactgcaatacattacatgaagaagttcatg

SEQ ID NO: 324625 - DNA, 411 bp, Zea mays
actgccacgcattccgaatgacgagtctgcaccatatcttgacgctggcgagaattgtagagcgaatctgactgagttcaagatgaacgttagctaacgtgtgctccaggctcaggaaatgctatcaaagaagaacatgtcccagttgaatgagtatgccatcggcgtgctggaatcctcatccaattatctcatgccatcattctattgctaccccctagatatggacatcaacctgtgtcactcgtatagcacggatgggcctcactagacactactttcgacaggagctaatcctataaattcgaaagtgctgaatctcatgtaatgatcaagctgtcgaatgtgaactacatgctgcctgctactcaaaagatgtcctgcataaccacatgttctgctacctgcaac

SEQ ID NO: 324626 - DNA, 414 bp, Zea mays
cggacgcgtgggcggacgcgtgggctcagactcggcgtgcaagaaactagagagagtctgctgcgagaacttagagtgagtgctgaaggcagtgacctaagacattttatacatggtgccgatttttactgcatttttttctacattctttttttgtgatttgattatctaaacatgtgaattttcaggtcttcatattcttctatctcctagttttttaatattttttctttgcttataattgactgattataaatgtttttattctcttctttgattatttcctaattatattctctcgatctgttcaacttttaaactacgggctttttctttgtcttccctgtaactataatataataatgtatattatatacaagacgattcaacccttgcggtgttggtcatgttcct

SEQ ID NO: 324627 - DNA, 319 bp, Zea mays
cccacgcgtccgcccacgcgtacgcggacgcgtgggccgtgagatcgtggagcagagctggactttggactagtgcataaggatgctcgtcgtgcccgataggggcacaataagaaagcgtgaaaaaaaacacacccactccttgtgtttctggttcgacaggcttgtcgaaacattgaagaaccccagtgatcggtttgtagtctgtcgtcatcgttctgccccgatcaagagccccggttgctcatggtggcggctgtcgtaatgtagcggttgttgacctatcttctcatgaattgaaaggatcctgactatgtac

SEQ ID NO: 324628 - DNA, 194 bp, Zea mays
tcggggacatgcgcgcgcgcgcgccgttgtacatttgaatggtggcaactcgcaggccatggtccacgaggagaaagtatgcgtgcagaaggaggtgaaggaagacattaattaggtggtggtgattgtacctgtttttttttttgccttcttctttggtgatttgttgatagaaacaagtggtttttcaagta

SEQ ID NO: 324629 - DNA, 408 bp, Zea mays
cggacgcgtggggtgacacgcaaggagcagcagcagcagcagggctcgcccgacggcgacggcgccgacccggggcggttcaccttcgactcgtcgccggtgttcgtcccgccggcggcgctcgcgatgctgagcgtcgtcgccgtcgccgtcggagcgtggagggcggttaccggtggcggcggcggcggcggcggcggcccgggcgtcggggagttcgtgtgctgcgcctggcttctgctctgcttctggccgttcgtgaggggcctcgtcggcggcaggggaagctactgcatcccctggagcgtcaggatcaaggctgccctgctcgtggccgcgttcgtgcacctgtccacgcgcaagtaacttgcccgacccaggcgtcgacttaccactgctactagtgct

SEQ ID NO: 324630 - DNA, 337 bp, Zea mays
ccggaattaatggctcgaccgacccatgcgttcgcgcgggttggcttatcctgccccttcggaatccgttcctgcacattagagcatccggggttactgctcttgggtgaacgttccaaattcatcttcaaatggaagtaccacatcgttctcctcgacattctcatgtacaatgtatagcacttgctgcaaaacgtcttcaatacctatcttatagtggcaatacagacctactatcctcacccaatcaactcaaatggacatgatctactgattggttaagctatgcacagctgaagctaatcgtaacgatcctcgagggcatgaacgacttgta

SEQ ID NO: 324631 - DNA, 214 bp, Zea mays
ccacgcgtccgtccacgcgttcggactaaaaggagggagacatcaagcccaagtttggagggcccaaaggaggccttgggacctaattttgatggggtttgaaattcctgcccctggttaattttagggcccttaataatttctaatggattattaggaccttgggtaaccttgacggtttcctgtttcttaattggttttacacttgtttgac

SEQ ID NO: 324632 - DNA, 73 bp, Zea mays
aaaaaaaaaaaaaaaaaaaaaaaaaaaaaaaataaaaaaagataataaaaaaaaaaaaggaagaaaaaaaaaa

SEQ ID NO: 324633 - DNA, 74 bp, Zea mays
attcggaagacgacgcatatcttgccacgcgttcacatttagatcgagggagtaagtgagagtgagagccatta

SEQ ID NO: 324634 - DNA, 98 bp, Zea mays
gctttttgaagagtgcgttgtccacctgaaagaaaggttaaaagagaaagaacgtttgagggaggaagaaaaggcaaaaagagagaaagagcgtgagg

SEQ ID NO: 324635 - DNA, 76 bp, Zea mays
tcgtctggatgaagttattcttgtgggtggatccacccgaattcctgcagttcaagaacttgtggagaaacttact

SEQ ID NO: 324636 - DNA, 398 bp, Zea mays
aaaaaaaataaaaaaaaaaaaaaaaaaaaaataaaaaaaaaataaaaaaaaaggaagaagctgttaaaaattacatgcttacgttaacttgcttgcaattatttatattgttttattatcttcgcctaaagatatatattttttcattggttttacacattgtaagctagtgggatatccttgtcttaataaactttatttgactttgactatgtaccgttttcttaagtttggatattatagatttggcacgtactgatcttacattagaccaattatctggtcttacatgctaatgggacccgccattgtactgctctttaatcgcgatgggtctgaatgttacgcgcaacgtgatctcaacacttattagttgccatctgcctgctatatatggt

SEQ ID NO: 324637 - DNA, 343 bp, Zea mays
gcgtccatgcttgcgggcgcggctcatgtataggacagcggcatttgatagcggctgcggggatgctgtcactacggcggcctgcatgcactatcaccttctgatgttccagcgtgccactcttataccgttcaccgtttgcatacattccgcagccggcgacgtgtgagccttgaagttcttggtgttccacgactgtgttgttgtgagagactttggtgcgttaatagcgagtgagcatactctcatactcctttcgggatttcggctccttcatggcaatcatgcttgacacactgtcgtctatgaacaataatgactgttgcatgaaaagctatggtgc

SEQ ID NO: 324638 - DNA, 260 bp, Zea mays
cccacgcgtccgggcagaagcattgacaatctacccgtcaaatgagtcttctctgtggtttcatgatacaagagttcagttagacatgtcaatctgcaagtactgaggcaatgatatggttcaataaaaaaaaagaaaaaaaaaaaaagggctaaaaataaaaaaatccaaacttaaagaacatatataacaaataaataaacttataaataagatgacagttattttaaatagagttggccttgttttttaactattta

SEQ ID NO: 324639 - DNA, 321 bp, Zea mays
cccacgcgtccgaacagcttctatgaaaaaaaaaaaaaaaaaaaaaaataaaaaagaggaaaaaaaaaaaaaaaagaaaaaaaaaaaaaaaaaaaaaaaaaaaacaaaaaaaaatgaaatactaaaataaaaaaaaaaaataaaaaaaaaaaggccttaatttttatagattcaaactttaattacacataaattaaaatttttaacattttattataatacatttaaataaaataaattgcccttgttttaaaaatttttattattgtaaaaacctttttattatcaaaattatttcatttgaataatatacattttttt

SEQ ID NO: 324640 - DNA, 69 bp, Zea mays
tcgaaaaaaaaaacatacaaacaaataatatttatttaaaaaaaaaaaaaaaaaaataaaaggggggat

SEQ ID NO: 324641 - DNA, 415 bp, Zea mays
cccacgcgtccggcttgctggtgatgatacgcttactactgatgcacctatatctgagattgctcgcatgtcaatccataggcctgaggttgagcaatcgtcgaataaggattaggagatcagaggaacaggacagatatttggaagggtggaactggtacgctgaaagtgaagaacgttaaaaatggtgccgtcccatctaaagaccgagttgcaaagtctgacccttagcgccgcagcaattgaaggagatgtttggtttgaataatcaatctattttagatgaggtgatgtatcataagttcattccacaaatttggtggaataaatttattcctcatattatgactaattattaacctatgaggaataaaatcatggtggatcaacctattctattatctaaaccaaaagt

SEQ ID NO: 324642 - DNA, 81 bp, Zea mays
cacttttatcgattcaaaaaaaaaaaatataaaaaaaaaaaaaaaaaaaaaaaaaaaaggaaaaaaaagacaaccgatttg

SEQ ID NO: 324643 - DNA, 309 bp, Zea mays
atgcgtacgtaaatggattcaaatagatggatttatctcagcagggacaccgaaccacacaatgcagcttcacgactccgcgagggccaataaacagatcaggcactagagctgcacatacggcgaccaccactcagtgcttattcctcggcgaggtccttcttgacccatccgccgacaagggcgccgcggctgttgcagcagcctttctctttggcgacgccctttccggcgccccatcagcgggttcagaagccttcctcttttgctaagccctcggcacggtagccttcctttttgttgacgtcg

SEQ ID NO: 324644 - DNA, 370 bp, Zea mays
cccacgcgtccgcacacgcgttcacccacgcgtacggccacgcgtacggacaggcgtgcgcgcacgcgttcgaaaaaaaataaaaataaaaatgaaaaaaaaaaaaagagaaagaaaaagaaaaaaaaaaaatatgaaaataaagacaaaagaaataacaaaagcacttaaatacgagtcagaacaatactgaaccagtaattgctcaagcagattgaggagtagagatcagctatggtgtcatcatgcacgttgctgtgtctgcttcatgcaatggaactacagagaaaaaggtgaattcgaagttaaagaagtttgtgaggtatcctgttgtgaacatgtggttagggttcagacatttaaagctagg

SEQ ID NO: 324645 - DNA, 145 bp, Zea mays
cccttcttgttgaagtgtcgaccttaggtcctcgtgtccaatgtggcagctggggcagcatgaagacaaaagtcgtgggctcaataatcctggtgtcgaaaacagggctgtcaaggagcagatgggttgagcctgtaagaatgct

SEQ ID NO: 324646 - DNA, 374 bp, Zea mays
cccacgcgtccgaaaaaaaataaaaataaaaaaaaaaaaaaaaaaaaaaaaaaaaaaaggaagaaaaaaaaaaaacgcattctgaatcaaaaaaaaactttcatataattactcttgctaaaaaataaatttacctatgttttacttcgtaaattaattatatatgtgcattactaataacatgcgacccctattatcaagttcctattttattatcactattcttgcattgcattagttttcatattgatcgcacactcaagcttttcatgatctaggttcttaaattctactctcgctctatcatcgccttaacctcacatagatcataactttgtctttactcattcacctatctttaacacttctataat

SEQ ID NO: 324647 - DNA, 91 bp, Zea mays
cccacgcgtccgcggacgcgtggggtctggtttctacctgaccgtttcgctatctgatgcggaatctttaatatcataatagaaataaaaa

SEQ ID NO: 324648 - DNA, 174 bp, Zea mays
gcgtccacgcgtccgggaatgtatcacatgatggtacttctgggttgctgctgaagcagagagagccatagtcgggtcgggatttgtacccacctagctgaacctgaaccttgaagtttggtgcaattgcaatcgattttgtaccactcttttaaaaagggtatcggtcaatgc

SEQ ID NO: 324649 - DNA, 365 bp, Zea mays
aaaaaaaaaaaaaataaaaataaataaaataaataaaaaaaaaaaaattaaaaatgggggaaataaatattagatgaaaaaattaaataaataagaaaatttaaatgctaaaaaatggaggatatgtttataggttccacatttaccaaagtatgctttggaagtgtatttcattcatgttgcatgttaaattatacacaatgctatcttgtttaatacattctgacttgaaaatccttattgtgaattatttaattgtgcttactgcattttctattttagacagttaagcaagataagaatagtatttcgagaatatgacattatatgaatttagcatgatcattgcattaagggatcgctct

SEQ ID NO: 324650 - DNA, 288 bp, Zea mays
gcggtactgttgttggtatcaagttcaaagatggcattgtcctgtgtgtcgagagagctgctaacctcaaagatgatgcttgaaggatcaaaccgaacgtatccattcaaggcaccgtgactctggcttggatgttgctggactatcagcagatggcatcaaattgctcaaggaccagatcacaagctgacattgattaatagggtaatggtgaacccatttctgtgaagtactaggcttatcgacttacacggtatactcatttttacactgctgtactggtggatc

SEQ ID NO: 324651 - DNA, 304 bp, Zea mays
cttcaagctagctgatcagccaaaagggggcgaaagacggcgtttctgctcgccgtctttgttctctttccttggttttaaacgatttttctttctcttttcgttgcataaaaaaaaaaaaaaaaaaaaaaaaaaaaaaaaaaaaaaaaaaaaaaaaaaaaaaaaaaaaaaagaaaaaaaaaaaaaaaaaaacaaaaaaaaaaagaaataaaaaaaaaaaaaaaaaaaaaaaaaaaaaaaaaaaaacaaaaaaaaaaaaaaaaagcagctgagctctcaaaaatccgagtttaaaaacccttgg

SEQ ID NO: 324652 - DNA, 221 bp, Zea mays
tcgcttcaagctatctgatcaaccaatatgttaccaaagaccgcctttctgctcgccgtcggtttttaaaaacctttggtttaaacaatattactatctcttttcatagcataaaaaaaaaaaaaaattaaaaaaataaaacaaataaaataaaaaatttaaataaacacatcaatataataaataataaaaaacaaaataaaccttaaacataatcaaaa

SEQ ID NO: 324653 - DNA, 261 bp, Zea mays
ctcattcgatcggatgaactaatctattctgatggcatcatctaaacgtccttcgctgctctctgatgtgcagtcggggtgccattagcctttagataagactcactggacttcgttaaaggctactgatatctttaaataattctgtttttctctcaggtttttaaactttgaaacacaaatatgcacttatactgcacctactatataaacacacccatatcttaactaggtcactattactagaactgttgaaactgg

SEQ ID NO: 324654 - DNA, 374 bp, Zea mays
  unsure (1)..(374): unsure at all n locations
tcgcatgacagagggtctgcattcccagttgcaaaaagaaatgcaaatgttgacacaagagtttgacgggtcaacaaagaagctcagtgagttggaaaaaaataagttagacctggagagcatattgaaagaactgaataacaccattttaggtttgaactcggagaaggatgcaacactccttcagcaacagcagtctttacagaaagtatctgatttggagttagaactctcaaagatgcagttggaaatggagggtccttgaagacanctgtttgtgagcttgaagaaggatggttgagncgccatacagaaacanaaccagtcctttgaggtgcttaatacagaaacttggtgaggagataaatacattc

SEQ ID NO: 324655 - DNA, 197 bp, Zea mays
tcgtccacgcgttcgtacacacgtacgctcactctttctaaaaaaaattatataaatatagaggatgcatattaaataggacgcgtatacaaatatatatctaaatatgataataactaagtagtatcttatttatacacataagattactggagtgtattatgacttgaaatttgaagttaatactgtttcattga

SEQ ID NO: 324656 - DNA, 268 bp, Zea mays
tcgcggacgcgtggggctgcggcggcgttccgtaagatggggaagtacatgcgcaagcgcaggggggccgatggcgagggggtggccgcagtcgaggtctcgcaggttgatggtgtgcggacgaggtccaggtccgaggcggcaaccggtggcggtgtcgctaaagtcgctccgcctgagaggaagaaggcactgctggccgctgtgaacgaaactgcttcagaggagcctggtgccgtaggcggtggtggtggggactgctgaagct

SEQ ID NO: 324657 - DNA, 381 bp, Zea mays
ggtgggttggcttctcctccccctccggttcgggttcgggttcgtgaggttctccggggttcggtttcgtgggtgagcggatcgagatggcggcgtcggatgttgagtaccgctgcttcgtcggcggcctcgcctgggccacggacgaccactccctccacaacgccttcagcacctacggcgaggtcctcgagtccaagattatcctcgatcgggagacgcagaggtcccgcggcttcggcttcgtcaccttctccacggaggaggcgatgcggaacgccatcgagggcatgaacggcaaggagctggacggccgcaacatcaccgtcaacgaggcccagtcccgccgccgccttcgccctccgaatcccaatggcgtcc

SEQ ID NO: 324658 - DNA, 281 bp, Zea mays
cggactcgtgtgcgcgagcggccgccctttttttcactttttcattttattttgatgggcattccttcattgttcgttctttcaattttattcttctttctttctttccttctttccctttttatttccgttcttcgtccttactctcaacgatttcactggcagcgagtacgccctcttcaccgagcgctgacattcgctctccaggctcgtcggcgtcgatgtcacgaccgatgctgacttccgcgaggttaacctatctgtctactaatacatgcgac

SEQ ID NO: 324659 - DNA, 422 bp, Zea mays
cggacgcgtgggcggacgcgtgggcggctccgcgcgctagtatatggaggcgtgagcgccctggtcgtgctctttacctcccgaatttccgtgaaaactccaccgctcgtgcagtcgtgtgtgcagttgtgtcgcgccgctggtgaaacccctccacgccggtgttccatcccctgcgcgtggtcatgtgggtgtaccagcgtccgggagatccgtccgtgccctcgggacgagctaggcgaccccgaatcggggggaattccacaccgtagtgcgagacatgagcagaactacctgtctccgtggtcggctcgcttgcgcaggcaattcctaacgagccagtgactgatgatccaggtgttcagcaggtataggttgctgagcatgagctcattgaaggagaaagaacatgtggcccagga

SEQ ID NO: 324660 - DNA, 399 bp, Zea mays
gtccactaaatttagcggatagagtgctcctcctctcgtccaacaatgtccttgaagttatccgctaaattgtaccggcgtcttcagagacgctaaatgtggcggatcacgggcatcccctacacgtcggctcgtcttccttcccgcgacggggcggaattttccccctcacgttctcttcccgtcgcaaaggtcttgtccatggcgccggctagtttccggtgggatttctcggaggcggtctcggagctgggatcgaggggaccactcgggtcgaaggtgcctactcgcgataatcggccaagcgctgtgtgccctcctcgaagctcagtgccgagaaaatgaatcgcagcctggatctggcatcctcgtcgtcttcgattcaatcgacgcttctag

SEQ ID NO: 324661 - DNA, 445 bp, Zea mays
gcgaagcaaagcaaagcttcaaagcatcctcccctgcgagaagagaggaggacaatggggttcgtgctggtggtctctttgcacttcatcttcctctccatccttctcggcttcggctgcttcttcctcggcaagcacaggggccgggaggagatgcgaaccggcgtcggcgcgcaggtctacggcacgccgctgccgccgcccggcgtcgtcggagtctcatcgccgccgcctgagccgattcacgccaagaaacaagggcccgaagccgtctgattgagatccattcgtttctacctactactgcctatgttttggtgatgttggatttattctttcttctttattttcgtccagaccgtgtcgacgggtgtaagctgagagtgaatatatgtttgtgtctaaaaattgttcattgttacgacttacgaggggagggggtgat

SEQ ID NO: 324662 - DNA, 341 bp, Zea mays
ggatcacgatacaagtgctgatggtgattgatgaaaaaaaaaaaaaaaaaaaaaacgggaaatataataaataaaaaattaaaacaaaaaaacattctacataattattaaattataatgtaaattaattaaaattcactagttgacggtatacgacttcatgccttgtactaactcacgtataccgtaacttcactaaattgaaccatatgacaataaaacgactggcctagcttagcctaattgatggacctaaataatgtaccaaatgtgtgatatgcatattgattcttctcatcctacttgtctctacatattaagcactatagtattgcatttta

SEQ ID NO: 324663 - DNA, 261 bp, Zea mays
gcatcgcgcaggtgtgctgcaactgcagcgtctgcatggaggagtacttctgcgcagcctgcaacttcttggacgatgacgttgacaaggagcagattacattgcgacgattgactgctctgcaggtgcgtgcgtgcgtgtgtctgtacctctttttttgtttcttgggttctttacttcctttcattgaggccactgagttacaggacctgaggcgccggccacaaatcgcgattttagtaggaacccccccgtgggatt

SEQ ID NO: 324664 - DNA, 407 bp, Zea mays
aggaaccatacctggcactacacttcctcctcctatcacagctagcgcctgatctagggcgtgtgtgatcatgtctggcatcatctgcaagtgcaactgcggctacagctgctgctgcagcagctcatgcaactgcatgtgcaatgacgtggagaccgacgtcgacagcagcatcaagaccatggtcctcactgtgccgaccactaaggccagcaccagcggcttcgacgcgggcaccgagggcggcagctgcgactgcaacagctactgctgcagctccagctgcggctgctgctgctgcagctgcagctgaaccggcccgtcaggcctggcgatcgggcacgagagtcgagaggacaacgacgacgacgcgtataactatgcttaatagcatcgtctatatcaga

SEQ ID NO: 324665 - DNA, 63 bp, Zea mays
cccacgcgtacggtcaaaaaaaaaaaaaaaacaaaaaaaaaaaaaaaaagtcagccggggtta

SEQ ID NO: 324666 - DNA, 320 bp, Zea mays
ggcttctcctcccccaccggttcgtgttcaggttctggttcgtgggcgagagggaagagatggcggcgtcggacgttgagtaccgttgcttcgttggcggcctcgcctgggccaccgacgaccactccctcaacaacgccttcagcacctacggcgaggtcctcgagtcgaagatcatcctggatcgggagacgcagaggtcccgcggcttcggcttcgtcaccttctccacggaggacgcgatgcgcagtgccatcgagggcatgaacggcaaggagctctacggccgctacatcaccgttaacgaggcccagttccgc

SEQ ID NO: 324667 - DNA, 432 bp, Zea mays
  unsure (1)..(432): unsure at all n locations
cggacgcgtgggtgagaataagctgagctcggtaaactctaccaaggatcgttcttcgagagaatatacatattcagaaaggacttatgtgtcagatatgcaagtgaaaagtgtttcttcttcagacattcgaatcagtgtttccagtgcccttagcacatccagccatggctctatgaacaagagccatcaagcttctagttctggtcgttcgctctcctatttttctgctcaatatgcataaatgtgatctgatttgtgtagcttgctcgtcttgctaagatggaggttgagtatcgatgtatccagatcatagagattggtcttccaatgggtaaacatattangatgagagacaccccgggggtctaaaatctaatgttgagtccgcattgcaagttctgaattttgcaatataagttgactgatatg

SEQ ID NO: 324668 - DNA, 369 bp, Zea mays
aatttttcgtcgtatgcgaaactggagctccaaatatggaaatgctgctgaaagcgatttacgagctgcacacagacttcgttctgaagaatccgttctatgagatggagatgccgattcggtgcgagctgtttgaccacaacctggctcaggtgatccagaaggaccgagttgcgctcctgggtcggtgaaattggaaagcttttggtcctaaccataccatgtatcttgtactttcccccctttttctacattatgctcggacttactgtgcaattgtctcggccgaagacagctggtgaccaacaactgtttggtcctgactattagcaccgtatttggaacagatctaaaaataagaacctaaaa

SEQ ID NO: 324669 - DNA, 227 bp, Zea mays
aatttttcgtcgtatgcgaaactggatctccaaatatggaaatgctgctgaaagcgaggtactagctgtacacagacttcgttctgaagaatcagatctatgatatggagatgccaattcggtgcgagctgattgaccacaatctgcctcatgtgatccacaaggaccgcgttgcgctcctgtgacatggaactcataacgctttcggagctatatatacaatgtat

SEQ ID NO: 324670 - DNA, 206 bp, Zea mays
cccacgcgtccgaaaaaaaaaaaaaattaaaataaaaaaaaaaaaaaaaaaaaaaaaggaaaaaaaaaaaaaaatataaaaaataaaaaaaaaaaaaaaaattaattacaaaataataatttttttattttatattctaaattaatttctatattcaaaattattcaaatttatttttattaaaatcttatcaattacctaattta

SEQ ID NO: 324671 - DNA, 270 bp, Zea mays
tcgcccacgcgttcggccacgcgtcttaccacgcgtacgaccacgcgtccgatgaagagggttcttctgctctggcctactatctacgagagacaccccgttcggatccactacttgctgatcttcttggtcggacgttgcaattccaccatgctgattctggctcgtcaacatatcgtgctgacctttgatcctattggtcgtgcctcagacctgatggttctttttcttcagaatacgaatgagcgtcttctggctttgtgatgaaac

SEQ ID NO: 324672 - DNA, 443 bp, Zea mays
ctcgccggcgacgagatccaccgcaccgccttccttcccgtcttcccttggcattccgctgtgtcttgagaatgagtagggtaggagctccaggagcagttcttccccttctcacagaatcgccctccctgaggcaaccatcttaacaacaaaagaggctcgtacaatcacagctgcaactgctaaaccacttgtgcatgcaaagtatcaaaaaggaggccagacacaggttgatgaaacatctaaaaaggcaataaggatgtcaaatctgcagctttgccaacatgagtagtctatattcgcttccccgcaccctccacttccttgtcgtcgtgctgattccagatcaaggggtagtgatccggaaggtggctatggtttttgtaagtacgaggcttaagatcttgttcaaggaaggtggctatggtacttttgatcctctg

SEQ ID NO: 324673 - DNA, 397 bp, Zea mays
aataagacgacttgtttcattgattcttcaagagatcgagcttcttttgcaccacaaggtcgaggatgtcttgcagctgcggatcaagctgcggctgcggctcaagctgcaagtgcggcaagaagtaccctgacctggaggagacgagcaccgccgcgcagcccaccgtcgtcctcggggtggccccggagaagaaggccgcgcccgagttcgtcgaggccgcggcggagtccggcgaggccgcccacggctgcagctgcggtagcggctgcaagtgcgacccctgcaactgctgatcacatcgatcgacgaccatggatatgattattatctatctagcttgtggtggtggttgaacaataataagcgaggccgagctggctgccatacataggta

SEQ ID NO: 324674 - DNA, 69 bp, Zea mays
aaaaaacaaacaaaaaaacaaaaaaattttaaaaaaaaaaaaaaaaaaaaaaaaaaaaaaggagggaat

SEQ ID NO: 324675 - DNA, 160 bp, Zea mays
cccacgcgtccggacagataaagaccaggcaaactatattgaatgggagaggataaagccaatcaacatatgagaggtgattattttaatttgcaatttgtctacataataaattagatacgaaattgtttgtcaaaaaaaaaataatacaaaataaaaa

SEQ ID NO: 324676 - DNA, 275 bp, Zea mays
tcccgatcaacccacctccgcccacctccaaacccatcttctacttccaacactctttaaacactggggcgcacaactacggtctagtacacaatcaacaaactaatctcaaaacatactcaccaaaacttactatattcaacataaaaacacttactcaaaacactccttacatcctctacaacattatatttccacatctctaatacacaaagtcatctaatctctttcaacgatcaatccaaatgtcacaatgctatgctgaatcaatatat

SEQ ID NO: 324677 - DNA, 407 bp, Zea mays
aagccacccgttacgtaacacttgctgaatatgttatatgttatgtatggtgttctataacactataaggggaggcgtatttattgaggaatgatgtctatatatgcaactagactatacccatttaattctgggaatgactgctaattgtgtcaactaatactgaatggaactttgatatgcagagttaaaaggacactgtttcactatcgtcgcacaaactatatatatgtagcctaaatctaacttgaggactagaatcagaactgatggccctgtctgcataacaaggatgtccaatgagacactactggtttcacgcatggaatacttctcggaagtcatgaccgtttacaagccaaggcttcttacatcactgaagctataggcaatatattgatctgatg

SEQ ID NO: 324678 - DNA, 306 bp, Zea mays
tcgcccacgcgttcgcccacgcgtgcgcccacgcgtccgcccacgcgttcgcggacgcgtgggcaaagagatgtcgtgggaaaggaacgtgtcgtcctccctagatctttcactttggcgaattaggaggcacgtgtgataaataagagtcttgctagttcgtcgtcgtccatgttgtcatagatcctgtcttgtgtgttcatgttactgtgatgcaggcaattgtgtgttgtgttcgggcgttatttgctgtgttgtgcgttgccaatttgccagcttcagattatgtgtgaataaaaaagagaa

SEQ ID NO: 324679 - DNA, 242 bp, Zea mays
gttataatccgttaggtgagcaaaaaaaaaaaaaaaaaaaaaacaaaaaaataaaaagggacataaacactgcgcggtatcaacttgaaaccaatgttaaatatgatcaagcctgtccaatatgttaccttctcatctgataatcaaacgttgttctcttgcacactaattttaaacactccagttgaacttccttacttctatcattttaactttttaccatatatacctattttgatacc

SEQ ID NO: 324680 - DNA, 409 bp, Zea mays
cccacgcgtccggttgatttcagcaatgataattccattatctggacatctggtacttgtctttgatgtgcaatctgacttccattagcatctagataagatccaatgtttcccgttaatggctaccaattgatttaacttatacggttggtgactttggtatgcagattaagaagttcagggatgcacttgcaaagcacaaagcagataaatgtagccttggcccaacttggggactagaatcagaactgttggccctggctgcaaacaaggatgtccaaggagacactactggtttcaagcatggaagacttcgcggaggtcaggaccgctgacaagccaaggcttctgacatcactgaagctataggcaatatagggatctgatgacatgcgagagatgaaatgtg

SEQ ID NO: 324681 - DNA, 80 bp, Zea mays
gcgtccacgcgtacggccacgcgtgcgcccacgcgtgcgtacacgcgtccgaaaaaaaaaggagggttcaaataacatgg

SEQ ID NO: 324682 - DNA, 436 bp, Zea mays
gctaccctcccgcgggccctcctctctctcccacccttcctcctcccaccacatcctgcgtgtgtcagcccgtcgttggctccgccttctattgccgtagggaacacgcggcgtcgcccttgcgctcctcgccacatgctgttacaggctgtcgtacccgtgtccacggttgagggccttgtgccggtcatgttgaagaagaagcccatcgactagatctagctcgtcgtcgggcgcctctctgccgaagagagggagcgcctactacgaggtgccagctcgtgctgatgtcactactgcttccactcctcccagagtcccagtacacccccggcttgtggcatcgctgctcgccgcggccctgcacctgagccctgcctacatcccgagtcacacacctatcctttgaagaattaatggcgactggaagcaggtt

SEQ ID NO: 324683 - DNA, 58 bp, Zea mays
cggacgcgtgggctaccgggttattgagaataattatggctgtttacgttgttgctgg

SEQ ID NO: 324684 - DNA, 97 bp, Zea mays
cccacgcgtccgaccacgcgtatgctcactcgttcgctgaaggttcagaaacaaagttggattcttttatgaggttgcttacggagttgttgggaga

SEQ ID NO: 324685 - DNA, 85 bp, Zea mays
aatcaatatatataataaacattatcaaataacaaaactaaaaaaaaaaaaaaaaaaaaaggaaaaaaataaataacagcgagac

SEQ ID NO: 324686 - DNA, 59 bp, Zea mays
caaacgggcgacttggtaccaagacaggatgagccatccaccctgcattgccagagacg

SEQ ID NO: 324687 - DNA, 437 bp, Zea mays
cggacgcgtgggcggacgcgtgggttttgagatcaaacacaagatggtataagaaaccaataatacaatacagcacagacacagcaccctcaggccggcctcagaagaggaggaaaaagattaacaaaaaagattgaggggtagcataaaaaaaagaagtaaaatacaaccactactcttgttcatcatcatcatctcctacagtatcatcgtgtgcatggacccaggaagcagagctgcagcgttcttccctcctccgttccaggcacgaacgaacgcccggatcccggagccagagggctcggtcacattatatactcgtcgtactcacatcgcgtcaggtgccttattcgattccctaccgttcatcagctacgtacggtgtgcggatcagtcgaacaagctggcgatgtcgtctatgtcgacgaggatgagga

SEQ ID NO: 324688 - DNA, 227 bp, Zea mays
cagtaggcgcatatatttggcagcaggagctgcctctcacttgcttcgacgtatttctctatctatcgatactgttcaagggaccgaataaggtagagagagaaacttgtttgtgataggaaggagatacatgttcatgttcatttaggtgtcagttcatctgatgtctcagaagcaaaattgtgtttggagctcagtgacaccattttgtaatgcatgttcctttt

SEQ ID NO: 324689 - DNA, 273 bp, Zea mays
cccacgcgtccggcagtaataattttagaagatcgattcttaatattgatgacctattgtaatgtcttggtgcatgttaatggatggtatttctcaccgtgaccactctgcttagccggtaagaactgagccactgataaggactgaaactgctcacgtgctttgttgttagcagagtgctcatgattcaaggaagataattttccattttttctgtttggtcaacgaaacacacagaatgtgtactattgtacactgcatgctgttatttgc

SEQ ID NO: 324690 - DNA, 375 bp, Zea mays
cggacgcgtgggaaaaaaaaaaaaaatataaaacaaaaaaaaaaaaagaaagatgctataagggatactaaaataaagggtggtgctttcaacgattgcaatcttactataccattacttgccttgagttaactgtgctatagggttataacaactgcaactaattaaaccttgttttacaccaacttaattgcctagtcccatattaccacttaattaaaactgttttatacctataatgctttctcgcaattgcccttccaaacattaggactggcttaatcgccaatgagaatcactacgcacccataatgtatattctgacgcacctttaatcactcccttaataacctcttgatttgacgatactctata

SEQ ID NO: 324691 - DNA, 441 bp, Zea mays
cggacgcgtgggggcttctcctccccctccggttcgggttcgggttcgtgaggttctccggggttcggtttcgtgggtgagcggatcgagatggcggcgtcggatgttgagtaccgctgcttcgtcggcggcctcgcctgggccacggacgaccactccctccacaacgccttcagcacctacggcgaggtcctcgagtccaagattatcctcgatcgggagacgcagaggtcccgcggcttcggcttcgtcaccttctccacggaggaggcgatgcggaacgccatcgagggcatgaacggcaaggagctggacggccgcaacatcaccgtcaacgaggcccagtcccgcggcggccgtggaggcggcggcggcggctacggtggtggccgtggaggcggcggctacggcggtggcgggcgccgtgatggcggcggcggc

SEQ ID NO: 324692 - DNA, 393 bp, Zea mays
cttattcatcgattgtataagatgtttacagaacagtgcattgatccattaaatttatattgattgatatttttatagtggtaaaaaaaaaaaaaaaaaaaaaaaaaaaaaaaaaaaaaaaaaaaaaaaaaaaaaaaaaaaaaaaaaaaaaaaaaaaaaccaaaaattacaaacaaaaaaaaacaaaaaaataacaaaaaatattaaggcaccaaaattaaattaaacaagccccaattttaaaaaaatccaaacttgtaaaaaccttaatatacccaacttaaaagccttttaacaaaaccccctttttccaactggggttattaccaaaaagcccttaccaaatcacctttccaacaattgcacatccttaattgctaattgcaccccccc

SEQ ID NO: 324693 - DNA, 275 bp, Zea mays
cggacgcgtgggcggacgcgtgggctgacgcgtgggcggacgcgtgggaaaaaaaaaaaggaaaaaaaaaaaaaaaagaaaaaaaaaaaaaaaaaaaaaaaaaaaaaaaaaaaaaaaaaaaaaaaaaaaaaaaaaaaaataaaaaaaaaaaaaaaaaatgttggcttcataacttctttattttttaatgcaaggtatttactatttaaatagttttctttaaattaatttaaattatcaatttgtttaaaaagctttttaaatggtaaaacctt

SEQ ID NO: 324694 - DNA, 97 bp, Zea mays
cagcatcagcaggtggcaagatggctgtgctccactctccggtcggagtgaggagcatcgtgaccttcctggtggctttcttcatcctatccagctt

SEQ ID NO: 324695 - DNA, 129 bp, Zea mays
aaaaaaaaaaaaaaaaaaaaaaaaaaaaaaataaaaaaaaaaaaaaaaaaaaaagaaaaaagagtataatggttccaaaattacgtacacataaatacaacaaaaataaatctaatataaagaaaccta

SEQ ID NO: 324696 - DNA, 439 bp, Zea mays
cggacgcgtgggcggacgcgtgggctgacgcgtgggcggacgcgtgggcggacgcgtgggcgcggactgaccgtgacgctgcaccggccgtccgcgtcggcgcggcttatcggcgacgacgacgaagaccaggcgctgtgctccatctgcatcaccgcgctggtggccagtgagaaggtgaaggtgctcccgccctgcgtctactcatggctacggtcctaccccagctggccgctctgccgccggctactagtactcggcgacgccaatgtgtgatcagcggcgggccgatgccccgaccaggagtgcttaagcagcgcattactaggtaatgtaatggagatggcagcgaccaccgagaccgagtagtgagatctactagtactgagtgcgtatgtaattaaagactatactactaaaagaagcgcttatcaccaat

SEQ ID NO: 324697 - DNA, 76 bp, Zea mays
cggacgcatggggatatagcgagggctgaccgacgactcaatagaagcaaccgagacatggagcggcagatgaagg

SEQ ID NO: 324698 - DNA, 188 bp, Zea mays
  unsure (1)..(188): unsure at all n locations
ctccattattccatcccggcggctgctgcggctcgcggcgtgcgtgtcacactcactgatcagtatcccctcgggccgtactccttcctttgtccgntccgctgcgcatcttacggctcacggcattgccagtaggaacaaggtgtctgcgctgctcctctgcttgttgttcctggccgcggtcgtcg

SEQ ID NO: 324699 - DNA, 75 bp, Zea mays
aaaaaaaaaaaaaaaaaaaaaaaaaaaaaaaaaaaaaaaaaaaaaaaaaaagggcgggggctgtcgatgttccag

SEQ ID NO: 324700 - DNA, 322 bp, Zea mays
gtttgttcatcaaaaaaaaaaaaaaagccgctgcttcgatcgaacaaagtacaccaaaggtgcaggacgctctactaacacgccatcagccacacgtacatcatgcctgacctaccagcagatgcatgcatacacaacacatgaaccgtgtacattgaacacaccgtacgattatgcctcccgatcgagtgctagcactaactatcagaccatcacttgcccatatttctgagcaggactaacatgtacccgtcaagcttagctttctttgtccaccatgtacgttcacaagcatgagtagtcattcaggttcataatgaat

SEQ ID NO: 324701 - DNA, 235 bp, Zea mays
cttaccgcccgagtggtcagagcgagggcatgacgttgcggccatattccaggagcctggggctattggtggacaggagattggtccagagaaagccagcgtcaacttgtcaggctggagcacatgtttgatgggaggcatctaccatacggtctcaccaacacaggacaacagataccttagaacttgtcgaggcaagaagtcttggacaggttgaataggatcgctggactgg

SEQ ID NO: 324702 - DNA, 111 bp, Zea mays
cggacgcgtgggcggacgcgtgggctttttgaaaaagtctcaaattattacaaaaaaaagggaatataaaatgaaaggaaaaaatagaaaaaaaaaaaagggcggatgata

SEQ ID NO: 324703 - DNA, 258 bp, Zea mays
cggacgcgtgggcggacgcgtgggcggacgcgtgggcggacgcgtgggcggacgcgtgggaaaaaaaaaaaaaaaagaaaaaaaaaaaaaaaaaaaaaaaaaaaaaaaaaaaaaaaaaaaaaaaaaaaaaaaaaaaaaggggatgcctttttagaggatcaaatttaacttacgcgggtatgaaatgttatatctattatatagggtcaccaaaataaaataaactggccggagtttaaaaagatgaagattgaaaaa

SEQ ID NO: 324704 - DNA, 53 bp, Zea mays
gtctcactgagggccgcttgaactgagcctgcccctggcacatgcctgatcgg

SEQ ID NO: 324705 - DNA, 77 bp, Zea mays
ctcagactggccctgaacctgcacgtgatgcattcggatgtactgcttgaacagctacgctgagcgatgccatgagc

SEQ ID NO: 324706 - DNA, 97 bp, Zea mays
agcagatcaggatgcttcctgatgaatacgtccaaaggtacctggccttgataaatgcggctgttatcctgcgataacaatacctaggggtagcagt

SEQ ID NO: 324707 - DNA, 445 bp, Zea mays
gctgaacccgcctgcggacttgggtgctggccacccttcctcagccttcagagagaagttgagcgccggctcatcggatgatgaacatggctcggaggaggacaataaccttagctcagatgaagatggagaagaggaagaggaggaggaagagaaaggtgatggaaacaactggaagggctctgtggatccaaactctctggaagctgaagaaaagaacgggagctcggagagtctgatggcgctgcgaagagcaaagaacgctctactgttcgatctcgacaggaggctaatggacctgcaggcagctgatgcagtctcgaaaatggaggcggcgtcacgcttccgcgtccaggtgctcttcatctacacaccgaggcggcctgtcccttcagacgatccagcacagggggacacagtggagctgccgcagatccctggctcg

SEQ ID NO: 324708 - DNA, 259 bp, Zea mays
tcgcccacgcgtccgctagcaggaaataaaaaatctgtaagagagaaccagtataataaaggagtcaatatccagcaacgggtaccgatgtacgctagacgcaatcgtgctataataccgagacctacggctccagtgcccttagtgattgacagtctcgcacatgtagtcacctatcttgagccatcttaggtgtctaccaaatttgaagccctgcttggatggtgtgtcttcaattattgtatttataatttttctt

SEQ ID NO: 324709 - DNA, 316 bp, Zea mays
gatcgcgacggccgccctttttttattacacatttactgcactgtattgcaaaacattgaggggaagtcttactagattgggaggcaaactcatctaatcccgctcaatccacatgtattgagagctatacctacaagctcgcaatgtattccttgatttctgcttcccctaactcttaggtgcttaatgccaaactttatgaatctctttaaatagatcctatctagttcaatacactctggtcctttttaaatgcacagacatatttttatatgtctactttatacaattcaataactcatgagaactttacaa

SEQ ID NO: 324710 - DNA, 78 bp, Zea mays
cccacgcgtccgaaataaaaaaaaaatataaaaaaaaaaataaaaaaaaaaaaaaaaaagggaaaaataaaagaaaaa

SEQ ID NO: 324711 - DNA, 137 bp, Zea mays
ctcgagaagggcgccaaggtcatcctcgccagccacctgggtcgtccaaaaagtgtcaccccaaagtacagcttgaagcctcttgttccacgcttgtctgagctccttggagttgaaagtctgatggccaatgattg

SEQ ID NO: 324712 - DNA, 80 bp, Zea mays
aaaaaaaaaaaaataaaaaaaaaaatttttaaaaaaaaaaaaaaaaaaaaataaaaaggggaaaataaaaataaaggggg

SEQ ID NO: 324713 - DNA, 443 bp, Zea mays
ggaagtctcacatcactagctccatcgcaattggtatgggtggtgcttctgcacaaaagagaaaagatgtgcctgtctcactccccaaccaacttgtgaattgtcatgcatcgatcctagctagagcatctccgagagcaaaaacccttgttacagttttccaactcacattctactatatattaggatgtgttgggcacacatggaagtaaggcaaaatgatgcatcgacatgtgatacgtgagcacgtatttcaaaacccgataggttggttggagtgggcttcttaaaattattactccgaagcgtgcaattgagattgtagtattataatacccacgtatttgtaaatctggtatcgtcgatgctttaaacacccatctatatatagctcactcactgctgctgttactggcatttcttccctaatcccgttcctgaaa

SEQ ID NO: 324714 - DNA, 377 bp, Zea mays
aaagaggaacaaagctctaaatgagcaagctatttccttactgatgcctcattaccacatggtaattccacactacaagggtagaagcaaagaaacaaatgatgaggctgagggtaaacaatacaatgataaggatgttgatattggaaagccagtcttgacatcacgcacatcatgtcaggatgttccattgctcttacctcaagagcttgaacctcgtgaattatccagttcagatttaagggtgaatgatttagatattaaccattcagatcgtttaaacaagaagaactttaatcagcctttgctcaaccgaaaggcaaaactggattcttctcattaggatttacctattataatgtttgtagacaatttta

SEQ ID NO: 324715 - DNA, 456 bp, Zea mays
cgaccgcggcaccggccagtcgtggactccgaccaacgtcaccgcgcccctggacgccgtcatcgtggggttccgcgacctctgcctgcatgctgactacgctgggttcgtatcctttattgcctttcttgattgttttctattttttttctatttttatttgttttcttcttttgttttttttttatttttttattttttttttttatttttttcttttttttttttttttttttttattttatttatttatttttttttttttttttttttttttttatttttttttttcttattttttttattctatttttatttttttctattcttttgtttcttttttttattttttttattattttttattttttttattttttttatttattttttttttttttattatttattttttatatttttttttttttttttttttttttttttttatttatt

SEQ ID NO: 324716 - DNA, 353 bp, Zea mays
gcaacagcaagggagcaaggatactagtcagttgcgcaccttctgatggacaggctgaagcgacaagctttctgatgactactggtgctggcacgttcacttctacagcgacgattattacatatgtattgtagtggtagtctgttttctgacgacgctttggttttgaattgtttcatttttgtaattttttattttttttactagattggttgttggtatttgttattttttttttttttttatatttttttttttttattatatttttcttttttgttggattattttattttttttttttttatttttatttatcttatatttttttattttgtttattatctattttt

SEQ ID NO: 324717 - DNA, 285 bp, Zea mays
gctaaccttccagactcatttcacaacagcaatgttcatgcttacatgcccaaagtcttagtgaatgtcgtagcgttagcaatttttttttaaaaaaaagttccattgaatgactaattcttctcctgttgcatgctacagtaatgccctggagaaacgatcaaaagatatcgcaaacaggatgttacttgaagagggtgtactgcggcgttccacacgtgtccgggctcatccaaaggacatggcattcctcaagtacgtcaacaagtggaaggataactgatg

SEQ ID NO: 324718 - DNA, 52 bp, Zea mays
aaaaaaaaaaaaatatcaaaaaaaatttaaaaaaaaaaaaataacaaacaaa

SEQ ID NO: 324719 - DNA, 140 bp, Zea mays
gcgtccggccgagtgcaacgttatctgcgaggagggctttgaccacgaccttacccgctacagcgggcggttccgtcgctgccagatggtactcggcttcctcaccttcgtcctccttttcaccgtcttctgtctcatta

SEQ ID NO: 324720 - DNA, 104 bp, Zea mays
cgaggagacaggcgcaacgtcgaagtacccgacggcatgcctaaacatgttaacgacgagtggtaggtcttctgtcgtttgctgatcgtgagaacttttaatac

SEQ ID NO: 324721 - DNA, 357 bp, Zea mays
gataagaattgtggagctagattaaaggatacagttcttgactgggatgatgctttaccccctgaggagatgaatttggccacggagcattgtcgatcagctgatcttgttctatgtctaggaactagattactcctgcatgtaatatgcctctgatgtcaatcaagaagggggggacatagggaataatgttctggagatgaagaaacgcttgcgttggcttatctttttttcttttttatttttttttttatttatttttttattttttttattttttctttttttttatttttttatttttgttttttattattatttttatttttttatttatttttattttttattttttta

SEQ ID NO: 324722 - DNA, 162 bp, Zea mays
accacgcgttcggaaaagtaaacaagcgactcaaaaaatgacatgtgtacactcaactggatcgtgcggtggctacgacagatgaaaaatataaaagcgacctgtggacgtccagcgcgttagctacaagaaatgaataatcatgcgccacacgttatgata

SEQ ID NO: 324723 - DNA, 53 bp, Zea mays
aggaataggagaagctaaagacgatggtatctcaccaacagtcatcaacatca

SEQ ID NO: 324724 - DNA, 84 bp, Zea mays
gcgagcatcagatcgtcaccgtcgactgtcagccatcgggtcctcagggaggcatgctcgtcttcgtctccggttccatacgca

SEQ ID NO: 324725 - DNA, 173 bp, Zea mays
gaaaaccctaaaccctcgctacccggcggcggctacaagctcttcatagcaccatgaggccaccggctagaggaggacgtggtgggaggggaggcaggttcgatggcggcggccgtgggggcggctgctgctgccgtgggtttggcggtggtagaggctgtagaggggacagg

SEQ ID NO: 324726 - DNA, 202 bp, Zea mays
cgccacgcgtcccacaagatcgtttgcctcaagattttttctgccctgcatcgtcttaacaggccgggatatttttggatgctcggggcctaaagtgctcgagagcatagctcctaatttccttagtcttacgacattatatcatttatgctttctaatcttcttacttgttaaaacacttttaatcaagaaacttatcatc

SEQ ID NO: 324727 - DNA, 402 bp, Zea mays
cgtcacgcgtcgcgtccacacctcattaaataatagcttttctagagattaacaggcccacttcaagaacgtgcaaaggcataaatatgatgcgatttgttcttgcgatgtatgatatatttgccggaagcatcaccacatatatgttggggctttggttagtctcctcgttttttttcaaaggaggttgcatagggtacatagtgtcatcttttctatttcgttcctagatttgtcaagagatggcaattatttgttggagaaagctcgttgccacattctagtcattcttttcttagtggtttcactgctcatctagtttctgtaattctttaaattgaaggccaattgagcaaagtattaatttggagattgaattatgttactactgtcctatctatc

SEQ ID NO: 324728 - DNA, 111 bp, Zea mays
gactcgacctccgcttccagtcctccgccgtcgccgcgctgcaggaggccgtcgaggcctaccttgttggcctgttctaggttcacctaccttttctccatctcactccaa

SEQ ID NO: 324729 - DNA, 304 bp, Zea mays
tcgggacggataagcacgccaagatcaagttctgctgcgtgcagtccaaggccgcctagccatacctgatgctgttgggcatggacagggatgattgttctttatttattttttttttatatatatttatttatattttttttatttatttttaattattttttttttatttttttttattttttttttttttttttattttatttttattaattttttattttttttttttttttatttttatttttttttttatttatttatatatattttttttatatttttttttttttttttttttttt

SEQ ID NO: 324730 - DNA, 176 bp, Zea mays
tcgtcagattggagagggagacgaggtgggtgtcctaggggagagacccagttagctgcaggggtaggtcgtgttcggcgtccgtcttcggagagttccaagagattggtggtgcggctgtgggttccaagtggatccaccacatccagcgcctcattttgttcaatgtgtttgtt

SEQ ID NO: 324731 - DNA, 214 bp, Zea mays
tcggccacacgttcgagcgcattcctactcgcttttaaacatcaacaggccgtacacacgagcggtcacatgcatgcattgaggcgatcactgtcttgctaactatgatatatttgcacggaagcatcaccacatatatgatgccactctacgttagtgctctcgctatggctaaaaggatgttgcactactgtacatagtgcaatctcttaca

SEQ ID NO: 324732 - DNA, 131 bp, Zea mays
gtcggaagaacaggaagcggcatatcatttctcatacaggccctctttcgtatcgtgggggcgactatcgtccagagactaatatacggcgtctacttctgcaccatcggtctgtatgatctgtgatctta

SEQ ID NO: 324733 - DNA, 52 bp, Zea mays
tcgagcaaacaatagcgagcgagagagccttttagcctagagactagccagc

SEQ ID NO: 324734 - DNA, 169 bp, Zea mays
tactcggttccggatacccggctggactccacgcgtccgcggacgcgtgcgtttacgcgttcgtggttgcgtgataattgccaggcaggcaggtcgtgcaggagggcaagaagaccgaagaccgatccgtgcgggggctcgggactggaactgtacatgaccccaaaat

SEQ ID NO: 324735 - DNA, 90 bp, Zea mays
gcgcacgcgtacgccacgcgttcgaagaaggcacttcatgtgacatttaaaaagcctagtgggagtgttagcttatctgggcacgggttt

SEQ ID NO: 324736 - DNA, 444 bp, Zea mays
ctctccctcaaccgccgcctgctcctccgtcgcgattccgacacacccgcctgtgttagccccggagcaggccgcgggcactggaggtgggaggcggtggctggggtcagggggttgtggctctgcgccgccttcctcttcgcctactagcatgctcgccttctcatctccatccagcgagaaggatggtttattatatgcatacttcctagctttgtgattctgtgtcttttcttttttgtttgtctatcttttttttcttattcttgttgcttttctgtgttttcttttttttttgtttgttttttttctttgtcttatttattttttttttttatcttttttttttgttttttttctttttttgtttttgtttattttctatttttttttcttttttttttttttttgtgttattttttctttttttttttttattttttt

SEQ ID NO: 324737 - DNA, 88 bp, Zea mays
cggacgcgtgggtgagtgcacaagaatgtctccagcgaaaaaagacatattagtaaataggaataataataaaaaaaagaggaataaa

SEQ ID NO: 324738 - DNA, 330 bp, Zea mays
caggtatccaataatcttctatgggagtgcagtcttatatgttactttattgatagagatgtcttgtttttgaatctcatgataaagcttaccttggtttgatggtttcagttagcataactctctgattccatcgacttgctttaaggaaaaaagaattgcatgcatgtttcagcagtaccaactatactaagttactaacttatgtggatatgaaccttctatgcatttgtttttgtagaatttgtaagaaatatccgttttgctgttatttacttttgcttattattgtatgaagtttgaatggatgtgaggccctgtaatattctt

SEQ ID NO: 324739 - DNA, 294 bp, Zea mays
gtcggacaaaaactgcaacagcagtccttcctactgaattggagcagaagaacggagaggtcgaggaaaagtatatcaagcgactaacgacatttgtagaaaaacagtgctataagctacaagacttgctagctcggattgcagatggcggatcagaagtactgagaactgacgactttacgtgctcataatctggtcttatactgagcgctcatggatcttggtagctgtgtggctgcttgacgacccattgtgctcgacgacgccatcgtatttcacgtggcgaacatgtgc

SEQ ID NO: 324740 - DNA, 282 bp, Zea mays
caagatcgatgttctcaagtacagggatcttccgtagccacatccagtccagattgtgggtctgaggtttatacgtgtaaattcttctgctagtgagatcaagatgaagggtacaagagttgcatgaacccactaaccattggcggtcaaatgagttcttttaaatagcttcagattttcttgttatgtaccaaaccggtctgccactagtgcaatgatctcagaaacatagaggacatcttatgaaactatagaagcccatggctgttgttcccaccgtgc

SEQ ID NO: 324741 - DNA, 420 bp, Zea mays
cccacgcgtccgcggacgcgtgggaaaaaacaaaaaaataaaaaaaaaaataaaaaagggaaaatatggcacccggtgtaaataactcctgcattactctctcttacatgctctttcttttcaccttttcttatgtaccttaccttcattttctatccttatccttacaacaacgtgaccgttatacaactcactgtcctatttttactttcttctctatctcatcatccctttgccatatctttcttttatcctcttgtcctttttcattttttcttttccttttttttctattaaatcccccatttgttcctcctttttttacttttttattatctttatttctctcttttttttcccttcttatttgcttttaatttttttcttcttctttatttctttttttcttttttttttttt

SEQ ID NO: 324742 - DNA, 66 bp, Zea mays
gtaaaaaaaaaatattaaaaataaaaattttaaaataaaaataaaaatataaaaaaggggggcctt

SEQ ID NO: 324743 - DNA, 266 bp, Zea mays
gcgtgcgacaagtcacagcagacaaaagagccgtgcttttgcacaggccatactgtttgcaagaacgcgtctcatttgacaagtgacagcccatctgttttctgccaccacccgcttcgactaagttatgttcaaactgatagatcccgtcgctgagctcgagctagctcatgactcttatcatcctgctcaatgtgactgaatgccacttccatcagtgcaagcagactggtgcatctatacatgcgcttcatcttgtttaacgg

SEQ ID NO: 324744 - DNA, 448 bp, Zea mays
atccgatctgtttctagcatagatacctgtaaaatgtcggctacgtcgacagcctcagctgcacttgtatcagctatggacccgagcagagccggatgcaaggagcagctggctgcaaggggccggcaatcgctcgaagctacgacagacgcgtcctcgccggcaaggccggctcgcctaggagggccgtgcacgcctatgcgtaccacaagaacctggaggaccagctgcgcccggcgttcgtgccggacgatgtgatcggcagcgcccggagcccagacaagtactggagcccccaccccaagaccggcgtgttcggcccggcggcggtggaccccaagctggccgctggtggcgcgcctgacgccggcgcggatgctgcaagaggcacggtgctggaccagaaagtgtggttccgcccgctcgaggacgtcgagaaagccgcccc

SEQ ID NO: 324745 - DNA, 281 bp, Zea mays
accttatcacacttaagccactcacatacaaaatttctaacattatcctactcattacacacatatgccacatatgaacaaacgatccattatccagcaaaaaaaaaaaaaaacaataaaaaaaaaaaaattaaatattttaaaaaaatactgttatacatatacaatacattaaattattttaattccctttacttgacccatatggtaccattttaaattatcttactatgcacataaaatctcttatttcactgttcacctatattatccacatgctt

SEQ ID NO: 324746 - DNA, 252 bp, Zea mays
gatacgcggcctgagaggtctagtgcgcatccaagcagaccagattgacgcagtcaggttcctgccaacacgaagtgactgcaatatcttccacgctagagggattctgtgacagactctatatgatactttaagatgtagactgagcaagttgccgaacatatgaacgcacattatgtctgattcaagaacgatgagagagtcctcgaatcggatctcttcaccgaatccattatccagaccactgaattt

SEQ ID NO: 324747 - DNA, 175 bp, Zea mays
gaggagttttgcaacataatgcgcaagatctacatttaccccaagggggaggtccagaagatgaacttgaaatcattcgtgcccaggaaggaggaaccccaagcagcaggcgaaagctgagccgtcgacggcgcaaaccagtaggatgtctgcctgcactggaacaagcaatttt

SEQ ID NO: 324748 - DNA, 320 bp, Zea mays
caacgacattccgagcccatcattatcacctcatcttcacagcctactaccacgacgcatgcgcgggagatcttttaacctcaggtagcttaatataatgaatagaggtgcagacttcctcgatttacagatatagagtaagcaagcagcagaatctttactctgaatgcgaggtgcaatcttactatgaactatggttttgccatccatttgataagctcgttgatgtcactcgatcattactcgatgatattttggcttctccttatggcgcttcatctggttgatgctattctcttattgaactcgcgtgctcttat

SEQ ID NO: 324749 - DNA, 249 bp, Zea mays
  unsure (1)..(249): unsure at all n locations
tcgccacgcgtccgccacgcgttcgcccacgcgtncgnccacgcgtncgcttcctttttccaacctcaacttctctcaatgcttcttatgagcaaagtgctgataacgtgttgtaaatcagtggtaacgggacacgaaaatgtagagagaaagtgacagttgtattgatctcatgaaatgtgtacatatatatacatagtgaagagacaccacgaaaggtcgcaaaaaaaaaaaaattcnatattactt

SEQ ID NO: 324750 - DNA, 221 bp, Zea mays
cccacgcgtccggacgaggcacccttcagctacgggcagaggggtaaccttgacaggaacataggtcgtagggccctcgccgtcgctattttcttctcgtttgtgtcttgctgctctcgtggtgaactcgctactccagtgctctgcaatattaagcagaagctattgtattgtttgggtcgtttgtcagctaaattgaaatgcgatggacatttactagt

SEQ ID NO: 324751 - DNA, 201 bp, Zea mays
cacgcgttcgatggtgcgccctaattcggatgactccaaatactggatgaagcgtctacaatgtcggccaggttgtcatctcatctggtgctaaaggctgttcgtctaatgaacccgaagcgttgtgtgtgcggcatgggtagcctatgatccacttgactttatctgtcataggttgcctgtgctttcagactttgctgc

SEQ ID NO: 324752 - DNA, 340 bp, Zea mays
aagatgcgtacggactgttgtatggaacctatggctaattggcatgctatctgagagcgaggttctacactggatagctagagctcatgcgaccgaatagatggtggatgcattgatggtagagaggacatgtcccaatatgtgaggctgagcatcactgagacaactcgatcactcataccagttatcaaggagaatgttaagagtattacaaattgacgagccaccataaatctcagctgtgacctacttgttcatgattgatgctaacctgaccaagcattccatgcgttggatgaagttgatttagctaactgattcttgatatgaggtctatgct

SEQ ID NO: 324753 - DNA, 336 bp, Zea mays
gcgcgcggcggcgggcgtagccatgctccacaagttcgcgctcgcggtcaagaccaagaccatcgagttcttcgccgaggaggaggaggacgaggacgaggacgccgaccggtccgcgcgctctccgttgccgggggcggacggggtacttgccgggcagcgggttgtcgtgctgaagcccgacccggcgaaccctaaccctagcgcggatggggacgggaaggcggcgtccgggcaggaggccgccgtcgccgcggcgctcgcgacggcctcgtcgttccaggcggcgtacctgcacctgcaggccgcccacgcgccgttcctgccggacgcggc

SEQ ID NO: 324754 - DNA, 263 bp, Zea mays
  unsure (1)..(263): unsure at all n locations
tcgcccacgcgtncgcgacgacgacgaccggcggcgagcgcgtccggacgacgttccccgaagacagcggcaggggtcgggcgcccaccgacgtgccgggtgccaccgaggaagagaggggaggcgccggaggagacctcgagggcgttcggccgtacccggaaaacggcagcggcaggggccgtccgccgtggtactacacgggcttccaccgcggcaggcagcaagagcaagaacagcgggacttcgggatgagcgacacg

SEQ ID NO: 324755 - DNA, 65 bp, Zea mays
aaatacaaataatcggtacacggtccactttatgggccccaagaatgaaaaaaggggctagtggg

SEQ ID NO: 324756 - DNA, 63 bp, Zea mays
cggacgcgtgggcggactcgtgggaaaaaaaaaaataaaaaaaataataataagattataggg

SEQ ID NO: 324757 - DNA, 205 bp, Zea mays
tttcagaggtttagggaaaaggagaaagaaagggattgagatcataaccgcagaagggagatcctgaagcaggaagattagagcgatgaccaggataataggaaaaggaaacgaaggagtattagctcacttgaagataggaagaggaagaggcaacgtgaaaaggaagaagatttggcagataaaataagggaagaagaggaaa

SEQ ID NO: 324758 - DNA, 362 bp, Zea mays
atccaagctatggtctatctgtagtcaaatttcactcatcgctggacctagtcaacattgcgccttatgcaaccaaatgggtgaaagcttactctaagtagacatctacagaagatgacactaccaatataaactcataggaagcttactatgataaaccttactagtcctataaaagcccaaaaatctatgcacagactctagacattcaattctactaatagaaatttagttcatgtatctgattaacgatatatgagataacactatatagtcaacgtttcatctaacaattgctattatttactaatcatatattttgaccatttagtttaacattacttgttcactatttcatttta

SEQ ID NO: 324759 - DNA, 434 bp, Zea mays
cccacgcgtccgcggacgcgtgggaaaaatttaaaaaaaaaaaaaaaaaaaaaaaaaaaaaaaaaaaaaaaaaaaaaaaaaaaaaaaaaaaaaaaaaaaaaaaaaaaaaaaaaaaaaaaaaaaaaaaaaaaaaaaaaaaaaaaaaaaagggggggctgttttaaaggatcaaagtttatttacgtttgattgcaacgttatagtttttttatagggtaatctaatttaaattaattggccgtgtttttaaaacttgttatttggaaaaaccttgggtttcccaaatttaatggctttgaagaaattccctttttagcaagttggctaatttgcaaaagggctctaacgtttcgcttttccaaaaattttctaagtttaattggcaattgggaccctccttttaggggcttttaaaccccgtcgtttttggtgtt

SEQ ID NO: 324760 - DNA, 438 bp, Zea mays
  unsure (1)..(438): unsure at all n locations
ccatgtcgtttttgtcgtttaaggcgaacaataaattttgcttttgaataattttgctcaaggatagacatgtttcccggactctctccacaaacaggatccacaagtgctggctccacacaagcaaccatagtagaaagacattcaaatgctcggggtaccttgggctcatggaggtctgaatgtatcatccaaaagattgatgatacttgttcatggcttcgaaggttactaagaaggcctgaaattgatgacactgaagcatgccttaacatggagctaattgagtcaacagccacagaaaaatatgttttgccttctccttcaaaacctcctccaagttcagtagtggaggacatcaattntgtaacatccttcacacttctataaacagtaatattatctntaattgttgagaactgctntgcactgttccct

SEQ ID NO: 324761 - DNA, 319 bp, Zea mays
cggacgcgtgggctaattgtgactggttgcaacaatatgaaggtgcaggtagtgtggtccatgaggtggcgtgcagttggtagacgcagatggttctgtttaggatggtcacatgatagcagtttagccaccatccctctattcattttcatgctagtgcgtctggtagtcagctttgggttcctatagtaattgaggtttgagagagacatgaggattaggcatgcgcaagggcgacagacgctcatgactcatgagtttgatgtgcccatgtgcaattgacgggctgaggaagatcttagttgatcagttggtgaat

SEQ ID NO: 324762 - DNA, 88 bp, Zea mays
ggtaaacccgctagctgtgtaatcttgtttagctatcatgtatgcttgttactgcccagttacccttgaatctagcggcgcttttggt

SEQ ID NO: 324763 - DNA, 316 bp, Zea mays
atccaaggtatggtttatctgtggccgaatttcactcatcgcaggtccaagtcagcgttgcgcctgaggctgccaaatggctgaaggctgcctccgagtagacctctgcagaagaatatactactgatagagactcatgggtggctttgcatgctgtaccatactaggtctatagaagcccaaaaatctaggcacagactgtggacagtcaaaagtgctaatacaatttagtctcatgttagctgtacacgacatcatgagctatcaactagatagacaagggtgcatctaacacttgctcttggttgctaatcat

SEQ ID NO: 324764 - DNA, 156 bp, Zea mays
  unsure (1)..(156): unsure at all n locations
tgcacgtaccgtccgaatcccggtcgaccacgcgtccgnccacgcgttcgaaaaaaaaaaaaatatttttaaattaaaaataaaaaataaaaaaaaaagggcgtactttctaaaagggccaagcttacaaacacattcatgcaaaattataaacat

SEQ ID NO: 324765 - DNA, 396 bp, Zea mays
  unsure (1)..(396): unsure at all n locations
tcgcccacgcgtccgcccacgcgtccggcgggctggcggctggctttgggcgtgcagcaggtgtgggctagccgctttgggcgtgcggcggcacagcggcaccgacgcaccgtggtgggctggtgggcggtggcactgcggcagctgggcgcaggcactgcggtctgcggcagccgggcgctggcactgcggtctgcggcggccgggcgccgacaggagcagccgagcccttcggtcctctgcgtctcctccggttgcttcagagtctgcctttagtgctgctggccgggttgttgatccatatcgcaatcgncttgaccctgagatggtacaagcacttatatgcactaaaaattggattcgtgcatcaagaaaagattcagtaattattcattc

SEQ ID NO: 324766 - DNA, 81 bp, Zea mays
acaaggtgtaccactaccgggcgtacaacttcaccatcaacatgttctggtcgcccgttctggtgcgcggcccggagcccg

SEQ ID NO: 324767 - DNA, 250 bp, Zea mays
atcagtcttgtgcatggaggctgctgtttgttctctgtatcgtaggtgtctacgtttgcgaggaaattgtatccggtgtttctctttcttcaaattaaaccacgcacatgcagctgccgtactttttggaccattgaagtgtttcgtccgtgaaaaaggctccttttaccttaaaaaaaaaaaaaaaaaaaaaaaaaaaaaaaaaaaaaaaaaaaaaaaaaaaaagggcaaacaatttaaaagatcaaaa

SEQ ID NO: 324768 - DNA, 174 bp, Zea mays
catatactacggcggaacgggacggttgtttgccgcggccgtcggtccttgaaaaggtgggggcttttttggtcaatgggatcggttcccttggcattggtcttggagtccatgcttcccttaatggcaacccgccaagggggaaaaaacccacctaaccctttgggaaaattg

SEQ ID NO: 324769 - DNA, 67 bp, Zea mays
tcggttctagatcgcgggcgggcgctcgcgatctagaactaccagtcaatcgccagcggtcgtgggc

SEQ ID NO: 324770 - DNA, 177 bp, Zea mays
tgagaagggatgctcttaccttttcaatcagagccgtggaaccattgccaaatttgcatagcgttgacgacagatgaggggttgctgcagacattgcacattcaggcttaagcaccagctatagtctgaggtgtcggaatcacgactgagcagattcaacagcatctggatgagaat

SEQ ID NO: 324771 - DNA, 95 bp, Zea mays
gcgcccacgcgttcgttcacgcgttcgcccacgcgttcgcccacgcgtccgctcacgcgttcgcggacgcgtgggaaaaaataaaaaaaaaataa

SEQ ID NO: 324772 - DNA, 200 bp, Zea mays
tcatgttgaacttatatatatttccatccttttgcagttagtttgagtcgtatttgctgtgtaccaaacatgtattgcaaatttggaatttttgtaagctataataatgccagcacggcaatatccccacatgataaccccgaaatttgtatcgttcaaagttcaaaccatggtatcctaattcaaaaattttgcctttt

SEQ ID NO: 324773 - DNA, 60 bp, Zea mays
aaaaaaaaaaaaaaaaaaaaaaaaaaaaaaaaaaaaaaaaaaaacaaaaaaaaaaaaaaa

SEQ ID NO: 324774 - DNA, 142 bp, Zea mays
gtgttatattacattcagttgtggaaaaattgagtactatttctagcttctaagaaatgaagcatcctattatcgcatctaatggcgcaaagataatcgacaaaaaaaaaaatattttttaataatatttaatttatttttt

SEQ ID NO: 324775 - DNA, 57 bp, Zea mays
cccacgcgtccgttttttttttttttttttttttttgtttttttttttcttcttttt

SEQ ID NO: 324776 - DNA, 82 bp, Zea mays
tcgcccacgcgtccgtccacgcgtccgatcagttggtagataagatggagcaaactttctcttgtatgtaatgttgtcaggc

SEQ ID NO: 324777 - DNA, 212 bp, Zea mays
atctcctgatcctcgttcctctccgccccgcttgcgccgcgcctccgcccccgtctcctgtgagatcagctccggcggcacgcggatatgactacttcaaggctgtttgctgtcatgattagtgcaaagtttcagaataacattacaaatagggtgtttgtagtagataccactgtgaaaaagagcaatgactaccctgttggacctatagt

SEQ ID NO: 324778 - DNA, 320 bp, Zea mays
cggacgcgtgggtccggttcggaccggttttcacgccttcgaaggccgggcaggcaggcagcacccgcggagacgcggagcctccactcctgatcctgtcacccaccgtcttcgtcggtgctgttgcctcctatatcacccaccgcctctgaagaagaagacgcggattcgagggtaggtaactgctgaagaagaagatccggtacggagaagacgcggagcagtacttatccgatctggatgttggttaggttcatcctgatttgaacggtaatctcactgataacgagttcctgggatgaggaagcttgtcaattttt

SEQ ID NO: 324779 - DNA, 65 bp, Zea mays
aaaaaaaaaaaaaaaaaaaaaaaaaaaaaaaaaaaaaaaaaaaaaaaaaaaaaaaaaaaaagaaa

SEQ ID NO: 324780 - DNA, 468 bp, Zea mays
aaaaaaaaaaaaaaaaaaaaaaaaaaaaataaaaaaaaaaaaataaaaataaaaaaaaaaggatataaaaaaaaaaaaaaaaaaaaataaataaaaatatataaaaaatagaaattattttatttaaattaaaatttatttatatgttttatgattaaatatattttatttttttaaatatattttattttttattaattggtttttctttttttaaaattttttaattattatttcattttttttatctattttatttttatttttttttttatttatttttttatttatgttttatatttaattattttctttttataaatttttttattaaatttttgcttattttttttttttttttttaatcattttttatttttttcttttttttttgattttttattttttttttttcttttttattttttatattttgtatattttttttttttgtttttttattttttt

SEQ ID NO: 324781 - DNA, 456 bp, Zea mays
cacacgcgttcgtacatacaacgaagtaccatcaagctttgcctcgcttatgtgtgttagagtcattccctctgagaatgtttcataaatatatgtcaacttatcgattaagatatgcctataatggccatcttgatcttagatgggtcaggttgtcatatgtcctataaatattatctaacatagaaaaaaaaggaatacaaatataattgtcagccaaaaaatgtttcgatagcctgttaatggtctgtatttcatacgaatgtaacctttcaacagctttgattgatattatgtacctctacagatggcagcagtggaaattctatgtgtgcaactagaaccaagttaccgaccggtgattagcgcctattgagctcaatatgatattacagtttatttgtgctcaaccaccgatggcgtctttattactgtgcattgcatattcttggttag

SEQ ID NO: 324782 - DNA, 77 bp, Zea mays
cccacgcgtccgaaaaaaaaaaaaaaataataaaaaaaaaaaaaaaagcaaaaaaaaaaaagaataaataaaaataa

SEQ ID NO: 324783 - DNA, 122 bp, Zea mays
acgcgattgaaccgtgaccgtcatttggctggagaagtggatgataacatgttgagcgggctggtgtgtggtacccctaggcaagagtctaacaatcaactctgacatatgatggagtgact

SEQ ID NO: 324784 - DNA, 370 bp, Zea mays
gttgatcttttgctaggccaaaccagtttgttattttcttgtctaacaatactgccacgacataacattgggagctctgtacagatcaaagaattccatccttgtgtttgcatggacccagaaaatgcagatttaagaatgatgcgagtgatggaggcctatcaggtaactttgtgtactatagttgtgtgtttctacaagtgcgtatggatgctatcataataaccacgatcaaacatcatcaaacaactacaatttacagtgcaagtttggtgcgcaattggtggtgatattatcttctagacatatatagatttattaatttcccctttttagtagacattgcctatttttttctacaattgagttt

SEQ ID NO: 324785 - DNA, 467 bp, Zea mays
gcctgctatgctagcgctggatccagtgtgttggggacgcagatctatccgtgctcaactgtgatggtgacaatctggaagggaaaggtgttggtgctccatttgagcaggggaaaggggatgattcatcgccagcggaggtgcattggagcagcatggttcatcagactggtggtggcatcagcatcgtggactagagaggttgcgcttatgtgagagcctagagttcatggaccgatggtatgttgaggtgggatggtaggtggtattattttgtttttttctttttttttgttttttttttatatttttttattttatattctacttttattattatttatttctatttacttttatttacgtaatatatcttcttactttttttattttcttttctttttattattttttttttttttatatttttatttatgttttttatttatttttattttatttatttt

SEQ ID NO: 324786 - DNA, 404 bp, Zea mays
aacactgggtggtttcttttcggcttttatggtgcggagccttttaatctcagtttaagacttttaatattatatatttacatggctctgtgttctgtcttttaatgacctttttttttttctctgtgctgtatattttttttttttctttttttattttttttcattattttttttttttttttcttttcttttttgattttattagttttttttttttttttttcttattatttctttctatatttttttttatctttattttttttatttttttattttatattatgtttttgtatttttgattatttttattgtttttttgtcttatttattttttattttttttattttcttttttgttattttatattttttacttttttatttttatttattttttt

SEQ ID NO: 324787 - DNA, 256 bp, Zea mays
cagtgtaaaaatattagacaccaccctacgctgtgatagtgacttcaatgcatcagagctggggcagcatacatgatactcaacgaactttatgtgcgctagttatattatactaacacactactttacatcatgtgctctatcaatttgtaagatgatcaccaattaaatttatttactaatgcttacctgtcgctataattatattaattatctaaaatatttgtattctatgaatttgtattcaattgttttt

SEQ ID NO: 324788 - DNA, 101 bp, Zea mays
aaaaaaaaaaaaaaaaaaaaaaaaaaaaaaataaaaaaataaaaaagggcggcccaataaaagggtaccaggttacttacacatgtatgcgattaaatatt

SEQ ID NO: 324789 - DNA, 409 bp, Zea mays
cggacgcgtgggcgtggcaagtcatcatcgaggatgcccctctcctagagaagctggtcctctgccgccgctcggctgctgttgaatctttccagctactagtggtcagcgctccaagaataagggtcctgggatccctgtccttcagcatccccaagttggagattggtggcaccgtctttcaacccaccgtgcgccgtgtcaaccgtgtggggcctgacgatgttatcatggagaagcgcttgctgatgcaggccgtcatgctggcgacgactctgcgaaccgtcaagattttggcgctggaagatgcagattccatcgacatcgtcagcgactacttgaagtgttttccatgcttggaaaagctatacatctcggcatcacaaggatacagaagtgctggaagcta

SEQ ID NO: 324790 - DNA, 487 bp, Zea mays
cggactcgtgggcggacgcgtgggcagtttttgacacagactggtctgatgttgattgtcacatttttgtagcacatactcttaatgatcgggccaaaaagtctgttttcttgaatggttccttcctatttagggttgatatgtagtatcactgttgctgttgcacttttgtcacttgtttcatttagtttatggaattgtgccgttttctaatcggtaatggtagattttcatttctttactatttattgatttgtattacttgtttctattattatttttcattgttttattattctttttagtttttcttttttcttctttggtttttatttttgtttttgttttatgttttttttttttttatcttattattttttttgtttttttatttttttattattttttatttatcttatttttatttttttattttttttttttctttttttattattatttatttttttttttatttttaattttt

SEQ ID NO: 324791 - DNA, 241 bp, Zea mays
ctcattcttgcaatcaactgcagttgaaggcaagctttcaacaaccaatgctgcaactttatgatcactgacggtgagcgtctgtgctttaatgcctataatatgtatactcgtgacgatacatgctggctcgtgactgaacctaccactgttgatgtcacttgtcattatggttcgtttgttgcatcatatgtttcttttatacgatgtgaattacttattattttgttactttacttat

SEQ ID NO: 324792 - DNA, 51 bp, Zea mays
aaaaaaaaaaaaaaaaaaaaaaaaaaaaatataaacaaaaaaaaaaaaaaa

SEQ ID NO: 324793 - DNA, 368 bp, Zea mays
gcggaccgtggtctgaaactgaaacagccttcactaccattccccgctgacgctcgctgctcggaacacctgcttgtcgtttctactcccagcatgcttatgagccgtggtcgttccttcttctgtttcttgctttgtctttgttttctaattttttttttattgtttctttattttttttttcttctttttttttattatttttttatttttttttttcttttttatttttttttattctttttattataatttttttttttttttttttttttttttttatctctattttttttattattttcttctttatatattcttctttactgtttttttttttctattcttttttttttatttataatttt

SEQ ID NO: 324794 - DNA, 117 bp, Zea mays
acctcgagttctcctcaaccatattgaaagttacagcggctaaactatcggcgatgtctggcctctgcaagggcatgaagggtctgggcaagggcagtaccaatctctaccataagg

SEQ ID NO: 324795 - DNA, 52 bp, Zea mays
cccacgcgtccgaggacgcttgggcttctgttttatgtaaagactgaaactt

SEQ ID NO: 324796 - DNA, 417 bp, Zea mays
aacgtgtctgccgaggacaagacaacggggcagaagaacaagatcacaatcaccaacgacaagggccgtctctccaaggaggagatcgagaagatggttcaggacgctgagaagtacaagtctgaggatgaggagcacatgaagaaggtggaggccaagaactctctggagaactacttttacaacatgcgcattatgattaatgactagatgattgcgttttatcttgttgtctttgtctagattgttatttattatttttttactcagttatatttttgctttattcttattattttttctatttttattttatttatattctttttatttttctttttttgtttatttttttttatttttatatatttttattttttttttttttatgttttttttatttcttttttaattttt

SEQ ID NO: 324797 - DNA, 62 bp, Zea mays
cggacgcgtgggcacaaccatggggcaccaggcgcatcacggcacggactacaccgaggagc

SEQ ID NO: 324798 - DNA, 72 bp, Zea mays
cccacgcctaccacttggactaacactagaatgaaacttatatcgtggcatgtatctttcgagaactgcttt

SEQ ID NO: 324799 - DNA, 271 bp, Zea mays
cccacgcgtccgggcacaagccgacatatggcggctcagcctctcctacctcacgcccctgtcactgaggtgcgccgtggagcttggcatccctacggcgatctaccgccatggcggggctgcctcagccgctgagctggtcacggcgctgtctctcccctccactaagctgccgttcctccgccgcctgctgcggctcctcgccgcgtcgggcgtgttcaccgtcgacaagcagagctcggaggaggagcggtaccgcatcagccccgtg

SEQ ID NO: 324800 - DNA, 126 bp, Zea mays
gccacgcgtccgctccctatatggttgttcagtggatatacagatgcaggcatatgggtttcttgaactagatacagtatcaatacaatctagctttcaactttaacaccatggcatgcttgatac

SEQ ID NO: 324801 - DNA, 290 bp, Zea mays
gttctagatcgcgagcgccgcccttttttttttttattgttatgaatttaatagcattgcaagagacttgtgatatagaattgaatacaagaaatgtccacatgcatgtttatgcagatacaggtacaaccatccattctatcagataaaacataaacagtaaacaaatacaccttaccccctctgttagaatcagatttgcatctgaacctatagatctatcattggctaatggggatgttaaaacagaagaaactcatttttttcagctttctttaggcatgatcatt

SEQ ID NO: 324802 - DNA, 62 bp, Zea mays
cggacgcgtgggtacggcctcgactgctccatgtcgctggcaatagatgcccgtatatcata

SEQ ID NO: 324803 - DNA, 101 bp, Zea mays
cgccgttataaagctgattatgagctaaaaatataaatccaaaaaaaaaaaataaataataaggctaaattaaaaataaaaggccggcctttctaaatgga

SEQ ID NO: 324804 - DNA, 194 bp, Zea mays
aaaaaaaaaaaataataataaaaatataatatataaaaaaaaaaaaaaaaaaaataatggaagggttgccattttaaaggatccaatgctacttacacatgcatgcttcttcatagctctattatagtgttaccaaaatttaatttactggcctttgtttaacaacttcttgactggtaaaaccttgtctttac

SEQ ID NO: 324805 - DNA, 54 bp, Zea mays
aaaaatcaaaaacaaacttttaaaataaatttttaaaattcaagacaaaataac

SEQ ID NO: 324806 - DNA, 87 bp, Zea mays
cccacgcgtccgaaaaattaaaaacaaaaatttaaaaaaacaaacaaatcaaaaaacataagggaaaaattaaaaattaaaaagggc

SEQ ID NO: 324807 - DNA, 235 bp, Zea mays
cccacgcgtccgcccacgcgtccggcagattactcatctagccgaaacccaataactgtacctagggaatgtattgggatgctggagagaagcattgtatactttggttcatctatacactcgatcacaaaaggtcaaacaaggcaagatatacaggaatgcttgaaggaaggatatatctgtgtacggtcgttccaacggaagaccagaataccactacgcctatgttgcacac

SEQ ID NO: 324808 - DNA, 184 bp, Zea mays
gtccagcgtcggctcaattagtggatcgaatgcttagcagagtatgaatctgctaagagcgaatgtgggcgaatggatataacaccgtcgcttccacaacatgcaccagaagccaatgctaacgaggtcacctagtaactgcaccagttgcgttgattgttttgtttcaggcttatttactgac

SEQ ID NO: 324809 - DNA, 161 bp, Zea mays
ctttacattgaaatgctgtcgtttgtacatgttttttctgagttctacacctgcttgtcttgcttaaaaaaaaaaaaaaaaaaaaaaaaaaaaaaaaaaaaaaaaaaaaaaaaaaaaaaaaaaaaaaaaaaaaaaaaaaataaaaaattaaaaaaaaataa

SEQ ID NO: 324810 - DNA, 103 bp, Zea mays
cacacgcgtgcgtatgacgcctggtctactccttgcacatccccttcatcacctacgggtaggtacctctgtccaagatgattctcgatctggccacgaacag

SEQ ID NO: 324811 - DNA, 136 bp, Zea mays
cacgccaagcgcgtcaccatcatgtttaaggtcatgcagctcgcgcgccttataggatgcgggctcgcctaagcagtacggttgatgcgcatgcttgctactcaatttggtgcttaatttatcatattatggatga

SEQ ID NO: 324812 - DNA, 308 bp, Zea mays
gtcacgcgtacagcgaggcgaagtagatgagcgagatcacgagagtagcagtgaaacccaaacattagcaagtacacagagaccgaatgcgtagagaaagtacagtttattacaacagctcaagggcaaggacgcgaacgccaagatgtggaacatactggcctacacatttaccacgtatcgaatcaaaaagataatgctagcacatgaagattttggaaagattgcactagaactcgctgtatgagattccagatctcatgaatcgtgttgacaagatcatattgaccttacttatgaagaacctc

SEQ ID NO: 324813 - DNA, 298 bp, Zea mays
cggacgaccactccctccacaacgccttcagcacctacggcgaggtcctcgagtccaagattatcctcgatcgggagacgcagaggtcccgcggcttcggcttcgtcaccttctccacggaggaggcgatgcggaacgccatcgagggcatgaacggcaaggagctggacggccgcaacatcaccgtcaacgaggcccagtcccgcggcggccgtggaggctgcagctgcggctacggtggtggccgtggaagcggccgctacggctgttgcgggcgccgtgatggctgctgcggcta

SEQ ID NO: 324814 - DNA, 130 bp, Zea mays
cccacgcgtccgcccacgcgtccgggattttccgttttctattaggaatggctatatttgtgaacataaaaattagtaatctggagagggatttacaatattggaccattttaacctagacgagccaaac

SEQ ID NO: 324815 - DNA, 150 bp, Zea mays
atcacgcgtacggagaagagttgttcaagggttatgctacgagttgcgtggcggtccgcaggggcattctacgagtggtcaaggaccggttgtacattgtatacgagaaagcattagtcataattagctcactgcactaactcatagctt

SEQ ID NO: 324816 - DNA, 181 bp, Zea mays
atgacaccagcatgtttcctgtatcattttgctgtttttttttggttgttgctccggtttcaacaaggagccggaaacatgttttctgtatcgttttaggtctttgttcggttaatcctattacctatgaattggatgagattgaaaaaattaagaaataactttgacttgtttggaattt

SEQ ID NO: 324817 - DNA, 211 bp, Zea mays
ccaataattaagtgcactcctatggctcggactctatgaaaaaggacctgactactcattgggtcatatataatttatataaagaaaacctaaaacattaactaaaacatatataaattaactaaaaacctcaaatacatataataaaaaatattacgaccacaacatatatagtttcagattgttactaagtttcaatcatagttataac

SEQ ID NO: 324818 - DNA, 145 bp, Zea mays
cgacaagccaatcgaagccgagatacggccatggactccaccggcaccggagcagggggtaaggggaagaagggagcggccggtcgcaaggtcggctggccaaggaagaagtcggtgtctaggtccttgaatgccgtgctccagt

SEQ ID NO: 324819 - DNA, 197 bp, Zea mays
gaacaacaagcacaccccaccagcgtcacagcatgacgaccaagctgctgtcagctcgttgcagccttagcttggaatgtgttgcatgggttgttatatttatgatgaggaataaatttaattaactttgcataatttccaatgtatttgagtgagccgagataaacgtatgagacttgtggatacaaatggctaat

SEQ ID NO: 324820 - DNA, 299 bp, Zea mays
cggacgcgtgggcggacgcgtgggtgctaccgcaaaacaacaacatggatcttattggctgccacgatatacaaaaaaaaaaaaaaaaaaaaaaaaaaaaaaaaaaaagaaaaaaaaaaaaaaaaaaaaaaaaaaaaagaaacgcatataaaaaataataaaaaataatgtagaggggcatataagtacaaaacattacgaaagtttaaaaaaaaatgaatagcgaaaaaataatggcaacacaaatcaatatagaagagcatcatataaaacctttcaaaatggcaaaacatagaaaa

SEQ ID NO: 324821 - DNA, 164 bp, Zea mays
tgattttgttaagaataaactatttttttacttaaaaataacaacaaaaaaaaaagagattgtgattatatacaataaaaaaaataattacatattataaataaaatattaaatttgaatttattttttaatttaattacttaaatttaatctattatttatat

SEQ ID NO: 324822 - DNA, 188 bp, Zea mays
cccacgcgtccgcggacgcgtgggcgtacgcttaacttgccctgtgacccatgctatatctgctgtgggatttagtctagcaatgcactttgtgctcgagcgaatacttataaattatcaatgatgaaaaccaggctgtcgctttataggatccagcattactatacgccatgattcgccgggcatgc

SEQ ID NO: 324823 - DNA, 410 bp, Zea mays
cccacgcgtccgcatggaatcaaagagcattttcttgtcaccactgaactgaagttcaattgctttctcctcatgccgattgttgacaaactaccagcacttctaagacaagaccttgagtcagctttcgaagaggaacttgatagcatctttgatgtcactcagctgcgccagtcacttgggcagaagaagcgcttgttttgatctaattttttattttgttttttttttattttttaatattttattttttttgttttttatatttatttttttttatattttttttattttttattttatattttttttatgttttatttattttttttattattttttttattttttatatatttttatttttttgattttttttttttatatatttttttttttttttttatttt

SEQ ID NO: 324824 - DNA, 108 bp, Zea mays
cggacgcgtgcgcggacgcgtggggctgaattgtcgatatgcaagactttgtgctaacttaggtatatgatggtaatttgatggttaatagatgaggtcgtacatgtt

SEQ ID NO: 324825 - DNA, 180 bp, Zea mays
agaccatatcctgcatctctatgattactaactactgtgctccatcgacactcatggctgtggcgttcgagcgcatgaatgagatcagctacgttatgctgatgccagtcgccttgctattcctcaaaaggcgtacgggctatcatgactgactggcacttacttacgtctatgtgtatg

SEQ ID NO: 324826 - DNA, 234 bp, Zea mays
aacgtgttgattgaggagctgcctgccaacgttgctgaccttctgtgatcattgtgaagaaagacagaactaaaagaaaggtggtgggggtgatctggtaaggcttggttctgccgaaatattgtgggggaggagtgattatgtcggttttgttttcatgtttatatgttttttatttatcttgttatttttttttgatattttcttcttgttgtttattatattttttatttt

SEQ ID NO: 324827 - DNA, 366 bp, Zea mays
cccacgcgtccgcccacgcgtccgcgaggacccatccaagccgtccgaagaagctactactgaaggtggtgagcctgcacccgaggaagcacaataggattctttgttcacacaagctaggcacatagccgtacgtaccattccgtatgcttagttgccgtattgttgggaactgtttgtgcgtgtatttctgttagacgttccccgctggtttaggctgtgttttatattgctgttttgtctttttgaatgttgagaccatacaactgtcgatcattatctcataattgttgtaaaaatactataattgataatataattttattttcttggtttttttttattttttacttgttttttattttt

SEQ ID NO: 324828 - DNA, 338 bp, Zea mays
acctgcttgagctgctgcttgctgagcacgatcttgacgcgcatcgcgccctcggcggcgacgctctcccccgtggaacgctcgatggccgtggccgtctcggtgtccagctgcagccgcgggcacctgaccagccttcgcccgtccctcctgcacgtagccggcgcggcagcagcctgcagctccatggatcgcccgtctatccttcgatctggtaacgccagtaggcagtagtagctagagaacaacggaggaatattatgtaacatcactgtcacttgtgcgtgtccaagctagggtttttatgtagagagaagcggagcttacgagcgagacag

SEQ ID NO: 324829 - DNA, 154 bp, Zea mays
cggacgcgtgggcagaagccaagtgttctgatgatatgttttttcaattgtgttttttgtaattggttcagcgagcacatacatgatttatgacattgcatgtgctatctatgataaaaaaaatcggatgatcatgtcgaatttgaatgagtat

SEQ ID NO: 324830 - DNA, 280 bp, Zea mays
cccacgcgtccggtgactcggggcatgcatgttacgaacgcagactagattagtggattatgaagctgggtggcctaggtttatagtctgagaaggattctacttcggtgatcgttgcataggtgcaccttagatcatgactaccgtgcttacggttttgaatagggcatcgagagtctcttcatactggtgacctatgaaaagttatgtgtatataactgtccaaactgggctgttgctttcatagttggttaatctttgacatgtttatatggtctgt

SEQ ID NO: 324831 - DNA, 196 bp, Zea mays
gacacgcattcgcaataccgaagctgtactttttgtcgtcgctgccgacaatagcagaccagggctaaaggagagcaagatgaagcttatctacagtgacctacaggatcaggatgtggcatctcggaagaacatgacgcatttgaatgagtatgcgttcggggtgatgcaattataatcccattatcttatgcca

SEQ ID NO: 324832 - DNA, 201 bp, Zea mays
cggacgcgtgggcggacgcgtgggcttaccataacttttgggcaaagtaagcgctagcatctgggttgtactagtatgttgcacagatctgaataatgtgcataagattcttcaaaaaaaaaacacaaaaaaaacaaaaataaaaactattaagaaaaaaaaaaaccaaaattaaaaaattctaaaaagggtcggaccgtt

SEQ ID NO: 324833 - DNA, 245 bp, Zea mays
cccacgcgtgcgcgcacgcgtccgtgtacgcattcgtggcgtgatctcgtacatgctacggtgggaccagtacgggcacctcctgtgctacatcacgtacggcgtttacaaggacagggccatgtaccatcgcgccttctgcgactgctactgtctggctcgcttgctacaaacacgcgtttagttaattgtacatgtcctgcgctcgcttacgttcatgctctgtggtatgtactccatgatac

SEQ ID NO: 324834 - DNA, 401 bp, Zea mays
  unsure (1)..(401): unsure at all n locations
cggacgcgtgggtctgacgtcgtgtgtcatgacagctgttgggtcatcggcagtgccttaagtgaggaagaagagtcaactattcgcatccacgatacacctcatctagcaggtgtacttcatatatgactcatagtgcattaatatgacctctaattggataaatggctggcatctctctcttcttgatgacttcaaatggagttaacatcatactgatntgagatccttcatccaatgtgcatcggatgacgctcggacttacttgaatactatgtaacagctcacaataaattgcggtcttatatatcatattgtaatcgaacttctgatgatggattctgttgagatgattgccatggatttttataaaccattttgaatgtgtgacaagaataaca

SEQ ID NO: 324835 - DNA, 167 bp, Zea mays
ggatgggtacaacttcacgcagtgtcacggaaacgggaccaaatgattgaaatggttatactagtagggtgttactgtagttttcccagttgaatttaatttgcaactgagtttgtactcaaaaaaaaaaaaaaaaatataaaaaaagaaaataaaaaaaataaata

SEQ ID NO: 324836 - DNA, 211 bp, Zea mays
cccacgcgtccgggtcggttgaagggtgaagggtggagtttggttgaagggtcgagctatgctgacgttcgtcgattgaagggtggaggttgtttttttccagcaactggattgtatatggatggattggggcctgagttcgattctgcattctgcttgagcaataataagtctgagctattcctgtcaaaaaatataatagtttctaatt

SEQ ID NO: 324837 - DNA, 313 bp, Zea mays
cccacgcgtccggtcttcttcgacatgaccgtcggcggcgccccggcgggccggatcgtgatggagctgtacgccaacgaggtgcccaagaccgcggagaacttccgcgcgctgtgcacgggcgagaagggcgtgggcaagtccgggaagccgctccactacaagggctccaccttccaccgcgtcatccccgagttcatgtgccagggcggcgacttcacccgcggcaacggcaccggctgcgagtccatctacggcgagaagttccccgacgagaagttcgtgcgcaagcacaccgtccccggtgtgctct

SEQ ID NO: 324838 - DNA, 226 bp, Zea mays
aaaaaaaaaaaagaaaatttaaataatcaattttctatacaaaaacataaatcaagatccaacgcgggcattttcaaaaaactaggcagtacacattacgctaggtggcttcagattattcaacttgctacacggttccaattcaattgattaccatacactcattcatcgtggcgcacgccactcaccatacgcagtggacaaacccccacaacttattaccaat

SEQ ID NO: 324839 - DNA, 133 bp, Zea mays
cccactcgtccgaaaaaaaaaaaaattaagtaaaaaaaaaaaaaaatagaaaaaaaagaaaggaaaaaaaaaaaaaaaggggcggtcgctctggatgctgcatgttcttgtccgcctgtatgcctcgttttct

SEQ ID NO: 324840 - DNA, 68 bp, Zea mays
attacgcgtttgtaaaatataatgaccatccacttcaacgcctatgctaccctaaaatagggggggat

SEQ ID NO: 324841 - DNA, 55 bp, Zea mays
aaaaaaaaaaaaaaaaaataaaaaaaaaaaaaaaaaaaaaaaaaaaaaaaaaata

SEQ ID NO: 324842 - DNA, 399 bp, Zea mays
ttcaccagcgccaccttccacgccaaggctacgacgacaatggtggcgaggagcccgaacgccaagccggacaggcagaaggctgcagccctcgccgcggctgccgcgctcaacccggctctcctcagggagacgctcaagaaggttgaccgatgcatggcacggctgcaggagctgcagtacacggtagccggcggcgccaaggtcgtctccggcgtcagtctcagcccccgcagcacgcgcgggtacctccggaccagccttcggtgcaagcaggagaccgtcaggatgaggggcggcgcgtcggcgcagaagaggtccccaagcggcaagttcgggggcggcgtcggcggaaagggcgcgcagtggcgacgaatgtcgctgccggcgatgctgctc

SEQ ID NO: 324843 - DNA, 194 bp, Zea mays
cagaggcacagactagactacagagatgaatgacggaacgtcgtctgggggaggggcctgcgctgtattcatttatctgagggggacttttactcaatgctcatataatgctcatactctcccctctcataaaagtcacatctataatgaattcaacttttaatctatatttgtttgcctcgatttttctctca

SEQ ID NO: 324844 - DNA, 56 bp, Zea mays
cccacgcgttcgaaggaaacatatgttcctgctatttggaggtttagttggctcgc

SEQ ID NO: 324845 - DNA, 130 bp, Zea mays
ccactcgtttttctattctttcgtctacttattcgtttccccattattcttcttggtcgggattctgatgcttcactcgaggtcaatctcattaattcattagtggccttactggaattcatgatatact

SEQ ID NO: 324846 - DNA, 59 bp, Zea mays
acccctcacgcgtctctccactcttactactagttctagatctcaagaccccttcctaa

SEQ ID NO: 324847 - DNA, 54 bp, Zea mays
cccacgcgtccggcggctgtatgcaatgattgaactattaaaaaaagaatattt

SEQ ID NO: 324848 - DNA, 313 bp, Zea mays
aaaagacgaaattgttttcgaggaggcgaggcagttcatcatcaacatccatacggggaacctgcatctgcactcacctttggcgtcgctctactaatttgatttgcccctacaggtaccgcagagaataccgggcccattaagtcagctacacaggactctaaaggtgaagatcatgatataatgagctttggtactgggaaatgcgcgtttgccaagcgcctatatcatgaataggaccaaaacattgttagcttcgaggcagtcgtaccaaaccattgctatgcaaaggggactttgaatagaccgtccc

SEQ ID NO: 324849 - DNA, 54 bp, Zea mays
aaaaaaaaaaaaaaaaaaaaaaaaaaaaaaaaaaaaaaaaaaaagaaaaaaaaa

SEQ ID NO: 324850 - DNA, 63 bp, Zea mays
ctgacgcgtggcgtgctccgtaagcacctttatctgaatgtcgcagccctccactatcacaag

SEQ ID NO: 324851 - DNA, 374 bp, Zea mays
ccttctccagctccttccacactgcaggagaaggagaacaaggagttcttcgacaagtacaggcagtgtatctctgagaagttattctgtagctctttttattcttatatgatcttgtcttttttattttttttttttattttctttaaaatatctttttttgtttcttattcttgcttttattttttatgttttcttattatttactgtttattattttttgatgttttatttattttttctattaattattttttttttttttttattgtcttcttttattttttttttcttttatttttttttttttgtttttgttatttattgtttttctattttttttctttttttttttttttttttttttatttatt

SEQ ID NO: 324852 - DNA, 282 bp, Zea mays
gttgtgctctctatctttattcgatccacgcctaacatcgagccagccgtctagcgcgggtgtctccaccgacgacggcttcggcatgcctagccgtatcttacgaaggacagcgccacacccagatccccttgctgattcaatgcagaaccccagacagccagtacgccagcctctgctttcagctgctgtgctatatggatctggccgtatgtcaagcgcaattagcaccaccatgactaaaagcatggtgtacctgcacgtgtactgccatggcacaca

SEQ ID NO: 324853 - DNA, 74 bp, Zea mays
cactaacgaacgaactcttgctccgatcactttctagctgaggtcgacgatggctgctgtgctggactgcaaga

SEQ ID NO: 324854 - DNA, 118 bp, Zea mays
cccacgcgtccgctgactcgtccgcccactcttcctctaagcttgcgtacttgtagtagaggacggcctcaagcaacgccagagcgagatgtctagctttctaacatcatctcttctt

SEQ ID NO: 324855 - DNA, 110 bp, Zea mays
cggacgcgtgggctgcgccgggagataatatctgttgcagttctcgcatttagcggtactaaccttttgcagtactagcaacacgcagaagattagtaccgggaaatgcg

SEQ ID NO: 324856 - DNA, 88 bp, Zea mays
cccacgcgtccgctaaatttgttgtgctgtccgacagattctatgtctggtccttaaaaataaaggaataatgaatgtagtgtttttg

SEQ ID NO: 324857 - DNA, 454 bp, Zea mays
tccgtccggtcgtcaccggcatgagggtgataggcggttgaagtgcttcccgcagtagaacggtcatcactcgctcctggttgtttacctatgccagcataaggtggcctcagaccagcactcagagtaaactccgtctctctccaactggagtcgctcaagactcggttaatctcgatcgtgcaaccatgagctccatagccaggatgcggtgcaagggaactggtgaccaaccaaggcaggctgtggaactggcagcatggccccataagcgttgctcgatctcctcatcgctactggatggagagcagttggctagttgttagcgggttccctagtttctcttcctcttgtgttccccgtttcagtttgcttatagccccgaagactcttttcttccgtagtgtcggaatgcccaaggtctgtccctgtggatgtgttgcgtaactgggat

SEQ ID NO: 324858 - DNA, 103 bp, Zea mays
cccacgcgtctcgttaattgtatagatatttctctctacttcgagcaaaacactatatacgggggggtcttttaaaacgccggcgcggcctatgatgctttcc

SEQ ID NO: 324859 - DNA, 410 bp, Zea mays
aaaaaaaaaaaataaaaaaaaaaaatataattaaaaaaaaaaaaaataaaaaaaaaaaaaagaaaaaaataaatataaatgtaaaaaaaaaaaaaataaaaatgatataataaaataaaattaataaattatataaaatatttatatataattcatatttattattatgtgggggacctttttttacgtgtgggtatttttttgattcattgcttacttttaattttttattaattgtctttaattttattgaatctatatttcttttttaatcttttgttgtttattatttagtttgtacttttttaatcttttttagtaatatttatattttatcttttttgtttttttagttattttgttttgtttatttatgtttttttatttttattattatgtatttattttgg

SEQ ID NO: 324860 - DNA, 94 bp, Zea mays
tccgcttcaacgaggaatacgtatggactgtttcaagaccctagcacaaaaaaaatatagaaggataaataaaaacaatgcgtattaccatgaa

SEQ ID NO: 324861 - DNA, 226 bp, Zea mays
caactccgtccctctcttctcagcccagatatttctttcccccgtcctccctcgccttcgggtcgggttcaggagatatgcagcaccacctccggaccaccccgaccctccttctctctcgcgctatggcctagactgatgtgctcaaggttgtcatgtcctgtgagggctgagtctgagctgtcatgctggtcctgggcaagatgttagggtttaagtgctacca

SEQ ID NO: 324862 - DNA, 393 bp, Zea mays
ggtttccaaagccaagtgtgtgtactagcaaccagctagctcgggcggcagcaggcagccatcatgtcggaggagaagcaccaccacttcttcaaccaccacaagaaggacgaggagcagcccgccggcgagtacgggtactccgagaccgaggtggtcaccgccaccggcgagggcgagtacgagaggtacaagaaggaggagaaggagcacaagcacaagcagcacctcggcgaggccggcgccatcgccggcggcgccttcgcactctacgagaagcacgaggcgaagaaggaccccgagcacgcgcacaggcacaagatcacggaggaggtcgctgccgctgcggccgtcggcgcctgcggctacgtattccacgagcaccacgagaag

SEQ ID NO: 324863 - DNA, 82 bp, Zea mays
aaaaaaaaaaaaaaaaaaaaaaaaataaaataaaaaaaaaaaaaaaaaaaaaaaaaaaaaggggtagccaatactagcggga

SEQ ID NO: 324864 - DNA, 52 bp, Zea mays
  unsure (1)..(52): unsure at all n locations
ncaacgcgtccggttggcttctcctccccttccggttcggttccggttcctt

SEQ ID NO: 324865 - DNA, 241 bp, Zea mays
cccacgcgtccggccacgcgttcgaccacgcgtccgatgaaaacaaaataaaggatttcaagtgggcacttaaaaaaaaaaaaaaaaaaaaaaaaaaaaaaaaaaaaaaaaaaaaaaaaaaaaaaaaaaaaaaaaaaagaaaatataaaataaaaaaaaaaaaaaaagaaaaagataaaatataaaaaaagttcacatgattatcttgtaataccatacaaaataatctagtttaaagaat

SEQ ID NO: 324866 - DNA, 173 bp, Zea mays
cccacgcgtccggagagagtaagacaggcaggcaggccataacaaagattctcagactagagtacctgttattttactttaatatgtctctctcagactagagcgccttcttttacttgaatattggtgactgcattggtctttcactttaaaatcggtgactgcattgatcg

SEQ ID NO: 324867 - DNA, 129 bp, Zea mays
cggactcgtggaaaaaaaaaacattaaatataaaactaaaaaaaaaataaaaacaaaaaaagagcaattaagagaaaagcattcttatgaatacagccttaaattcaattaaatgcaacaaggcttaca

SEQ ID NO: 324868 - DNA, 319 bp, Zea mays
  unsure (1)..(319): unsure at all n locations
gcactgcacgtactcggtctcggaanttcccgtggtcgacaccacgtcgtctcgtatcatcatgcgccatatcatataatgggactccgtggtatgaatgcttcatcggcgatcaggacgttgccgtatttggcgtgtactcgtatgcattgcattaactgtagctgttcgtaggactacctattgtgacttgctgtatcgtaattaatatatatatatttggatgtctatgtaaataaaataaataaataaaaaataataaaaaaaaataaaaataaaataaaaataaaaaagaaaaataaaataaaaaaatggggca

SEQ ID NO: 324869 - DNA, 415 bp, Zea mays
cggacgcgtgggctcccgagccttgcctacctcaacaagcagcccgtgaagaggcccgtgaccgcccggcgcagggcgtcgtcgccgatgttggcctgcctcaacaagcagcccgtgaagccgcagcgcatcgcgcgggaggtggccacggacagcatcgcgcgcgccgcgctcagcggctcggacagccggagcatccggaagaggacgtcgcggcggctcacgcagagcccccgctcgtcgtcgttgaccagggcccgtggcggcggcggcggctgttcacccacaccaagaaacacctctcgtcgtcgttgaccagaagaaccaactgcgtgattcgcgttgctctttggagactggagacggcggcgtgactgcgtgcaggcagactcagacgacaccatgattctgcacg

SEQ ID NO: 324870 - DNA, 60 bp, Zea mays
cggacgcgtgggcggacgcgtgggcggacgcgtgggcggacgcgtgggcggacgcgtggg

SEQ ID NO: 324871 - DNA, 211 bp, Zea mays
cgttccgcaggatataagttatgcctgtggatgccagtcaaagtttgcgtattatttcggtaggtgcattgtaagtacttccgcggctgaaagtcttagtctaccttggtggtgatattgggagcatgctactccaaagcaaagtgcaccatcagagggtgcgtcgataccccgcggattgcgaaaacaggcttgcaaaagggttcgagta

SEQ ID NO: 324872 - DNA, 391 bp, Zea mays
taccacgcgttcggacccacacgtgcgcacaatgttgcgttgactcgtgggccgtcttaagaggggggtgttcaggtgctctgttgcgatgcagttacgggtggttgtgccgcgatgcaaatatttccgttatgaaaagtatacgagttgtatgacctttagattattaggaaatttaacagaataatagattgacatacttatgatcaaggttctgaaatgggatcttatatggtaaagagattaatatagcggatatttgcacattatgtataatctttcgtcgaggcttcctgtgcttcatattaaatttgtcctggaaaaaggtgtaccattctaactctacattaatctgacaaccctgttattcatttataaaatatataattta

SEQ ID NO: 324873 - DNA, 85 bp, Zea mays
aaaaaaaacaataaaaaaaataaaaaaaaaaaaaaaaaaaaaaaaaaaaaaaaaaaaaaaaaaagcaaaaaaaaaaaaaaaaaag

SEQ ID NO: 324874 - DNA, 464 bp, Zea mays
  unsure (1)..(464): unsure at all n locations
tgcacgtactcgtgtccgtgtaattcccgggttcgactccacgtcgtctcgaagggagttgtgagtctccaagtctgtccaagtaaatgacgcctgtgctccaagggacgacaatacattatgatggatcttacanctcctgtttcttgtaatgtcgttggctagtttgaggtccaggattttgaatntgtgtcctttaaaaaanaatgtatgntgttgtaggaactctttagttctgttggaaattttactgaataatggaagacatcttaggttcaaggttctgaaatgggatcttatatctcaatgagattatgatggtggatatctgcacatcatgtctaatctttgtcgagtcttcctgtgcttcagattaaattgtacctggaaaaaggtgtaccatcctcactctacattaatctgacaccccgttttacatgtaaatatattaatttttttttttt

SEQ ID NO: 324875 - DNA, 415 bp, Zea mays
ctccggcacggacaagcacgagtcggttctgaactcgtggtacgaggtgtccaacctgaggcagtactgcctgtacgggctctactgatacctcaagggcaccctgagcggccagttcaacaagatcttctaggctgtgttggcgctgccgtagtgtattcgccccacacttcgtactgtcggctgctccggatccttatgttgtgcttgatacacattctactagttgtcaggcgaacaggtatctcgtatgtatatttgagacctgttataacgctggctgagctctaccgtatgtaccgtaggcgtcatgtcagcgcgcttgttaacgttgctacaaatagtccattgttggcaaaactagacatgtcattttgttcatgtgttaattgatgagacattgcgtgacataatt

SEQ ID NO: 324876 - DNA, 87 bp, Zea mays
gtggacaacaataattatatggttgctgcaagccttcacgtgtttttgttgcctctctaccaactaagaataaatcaagctagcagc

SEQ ID NO: 324877 - DNA, 343 bp, Zea mays
ggctggcttctcctccccctcttaccaagtcctcctcgggttagggttccttagggttttgtggaggggcgatggcggcggctgatgtggagtaccgttgcttcgtcggcgggcttgcctgggccaccagcaacgagtcgctggagaatgccttcgcctcctacggcgagatcctcgactccaaggtcatcaccgaccgggagacggggaggtctcgcggcttcggcttcgttaccttctccttcgagaactccatgctcgacgctatcgagaacatgaacggcaaggagctcgacggccgtaacatcaccgttaaccaggcccagtcccgtggcggtggcta

SEQ ID NO: 324878 - DNA, 141 bp, Zea mays
ggccgtcgaggactgcggcgcggcgtcgttccaccggtgcgactcggtgcgcgtgcagggcgggcatacagcgggcaagagccgctgccggttgtacgaggtggagagcgcgggcgcagtggacatccgaccttacaaggg

SEQ ID NO: 324879 - DNA, 255 bp, Zea mays
aaaaaaaaaagtctatttctacagctaattattacacattcaaaaaaaaaaacctaacaaaggggactaaaaaaaaaaaataaacaaaaaaaataaaattcaaaataaaaaaaacgggcggccgttttagtcgttccaattttacgtccccttctattcatcaactttgctcttctattgtgtaacctaatttaaatcatctggcctttttttaacaacctctgtactggaaaacccctggttttcccaatctta

SEQ ID NO: 324880 - DNA, 262 bp, Zea mays
cccacgcgttcgctcctcgcatttcttcccatcccccttcgcaacccaaaccccaactcgcgcggcatcgatggcgcccaaggccgagaagaagcccgcggcgaagaagccggcggaggacgagcccgcggccgagaaggcgcccgccgggaagaagccgaaggcggagaagcgggtccccgctggcaagtccggtgccaaggacggccgcgagggcaagaagggcaagaagaacggcaagaagagcgtggagacctacaag

SEQ ID NO: 324881 - DNA, 386 bp, Zea mays
cttgagccttcagccacgcacactccctgcttgccttcgcgatcactactcttcctatcggggcacacgcaccgtccaagctgtgccactcaaattcagggccatcgcaaatccaccggctccccgatccggtcgtgtacccaaccggccgatcggatcctgccgtgtggattgaacgctgaattgtggatattcaagattttagaggaacatgggcatagcatggaagagttctatgctatagaatcatctaaaattgatgataaacaaatacatctatatggaattactgaaggacatggcggagcacgtgctgctgagtatttgaaggagcatttgtctgagaaccttatttatcattcatagttcatgactaacacaaaatt

SEQ ID NO: 324882 - DNA, 57 bp, Zea mays
cttcatcgtacaaccactcactctcccaacttttatatctgattaatatgattcact

SEQ ID NO: 324883 - DNA, 319 bp, Zea mays
  unsure (1)..(319): unsure at all n locations
cttcagtcttcagccacgcacactccctccttccctccccgatcactactctccctctccaggtgcacacccaccgccccacctctcccactcaaatccagggccatcgcagatccaccgcctccccgatccggtcgcctacccagccgcccgatcggatcctgcagtgtggatggaacgctgaattgtggatattcaagttttagaggaaaaagggcaagcatggaagatttctatgatataaaatcatctataattgatgnataacaaatacatctctttggaatttttgatggtcatggcggntcacgtgctgctg

SEQ ID NO: 324884 - DNA, 286 bp, Zea mays
  unsure (1)..(286): unsure at all n locations
cccacgcgtccgttccagtgtccatcagcacctcctgtgctgtgcattcctgagaaaccaaccccgccccctgcccccccacacgcacagtttagtgcccggagcccggaggcgtacgtgtacgtcgcatcccagcgcagcgatgccggtcaccgtcggcgcccggaccaccctcctcctcttcgccaccgcagtggtgctagcgtgcacttcagcgccgccggcatgccatgccgcgcacaacatcaccgccatcctcttcgggcaccgggacctngccgagttc

SEQ ID NO: 324885 - DNA, 131 bp, Zea mays
gccacgcgtacgaatcattattcatataacgttcttgtagcacaaaggctgttggacatgaggaacaggcattgtactattacggtcaatggcgtttaaatccggatggttcacttagggaatgatgatgt

SEQ ID NO: 324886 - DNA, 144 bp, Zea mays
aacggccaagcggaggaaacaaaagacaaaaaaggagcaagcagcacaaaagccgggggacaagaagaacaggcaggaaacaacaacggacaaaggcgaagaaagccggagggaacagaaagggaaggaagacgaccgcaaaaa

SEQ ID NO: 324887 - DNA, 177 bp, Zea mays
tcgaatacacatccctacacgctctcttctgcgcagttgaacaacagttcagactgccctccctggggaaggtcatgcaatgctatgtgcccactatcgaccacttctagcggatagacgagcagtgcgcattcatagtgcggctgtatgctgtgttaccgaatggacgcatgttgt

SEQ ID NO: 324888 - DNA, 52 bp, Zea mays
aacgcacgtacgtagagcgtttgactctcatgcatgccataacatgcagtct

SEQ ID NO: 324889 - DNA, 51 bp, Zea mays
aacacacgtctgtagaccgcttgatattcttgctattcttaacatatattc

SEQ ID NO: 324890 - DNA, 94 bp, Zea mays
accacacgtatgtagagagcttgatattcatgcttgtcttaataaacagtctcagacgatagtgcacgatatatcacgtacttatgtttatatt

SEQ ID NO: 324891 - DNA, 267 bp, Zea mays
gacgatctttggcgagtgtataatccttaaatttaagctagatcggtgctgctacctggagagagctgtgatgagaaaggctatctctgcagagagcctgatatttgaagactcatttgacggctaacatgtggtactagtttagacatatgtctggactgctatctctgaaaggttcgtcacggtctgctaagctcataatttttgaatatctgatagtcgaaataaggaaggatcatttatgtgtagcaatagctaaatgttatt

SEQ ID NO: 324892 - DNA, 81 bp, Zea mays
ccaatctatccgatctataatgacttctgcatgacatactaggcatagaagatgtgcatcggagtaattgagaactgcgaa

SEQ ID NO: 324893 - DNA, 198 bp, Zea mays
ccacgcgtccgtccacgcgtccgcacacgctttcgtgactatggttatccaacaagagttcggctatatttatggaagagctcatttcccgtttcatggacgagtaacagctgtcatggagacaggtacaagttcctatttatacatatttccaatttgggctgtcatgatacactactaccaactattcaattggac

SEQ ID NO: 324894 - DNA, 305 bp, Zea mays
accacgcgttcgcccacgcgtccgattacgcttacgagactatggatattcaacatacgtctggaatatatatggaggagcttatgtcccgttttatggatgagtaacagttggtatggtgacaggaacaagtacctattattcatattttcattttgggcagttttgaaacactactatcaactattcaatagtacaatgcttctacttgctacaattcttacatatgttacaattatcaactgaatcttctacagttgctgtatgttaccgtttatgatcagtaatattgaagatcatttgtt

SEQ ID NO: 324895 - DNA, 195 bp, Zea mays
tcgaccacgcgaaagattagacatgcagtttcgctttcttgactatggtcatccaacaagcgtcggcgtatatattatgaagagcttagaatccgatttatggtaggaccaacatcgggaatggagacatgtacaagttcctttaatacatatgactcatttagccaagcatgatacactactaccaactttaca

SEQ ID NO: 324896 - DNA, 67 bp, Zea mays
cttgtacgcatcgtaagaacatatcagatgggctatggacaactgctagaatcattttttcaagcta

SEQ ID NO: 324897 - DNA, 108 bp, Zea mays
acgcgttcgcccacgcttcctgcagattcttccatctgctgcctgctgttcctgatccagggaccgttgatcataagctagcatcttctgtgatgctcaaggtcatga

SEQ ID NO: 324898 - DNA, 351 bp, Zea mays
cccacgcgtccgcccacgcttacggcttacctgcagccaaaatgacgaatgggtcaccctgctggaattcttagccactgcgcttgcttgctactacctattccatgcataacagcgtgatcggaaccaaaattaaagttcctgaacattgctgtgatgaatgggtgaatcgtcaccttttactatgaaattagcaactgtttgcacgaagaacagctgtgcttgtccaactatctgggtaccgtacttacctatctctattgaacagtattttggttaaagtaatgggggagatactctttccatgctatgaaaaaaggtggaactacctttaattctaagattaagaaa

SEQ ID NO: 324899 - DNA, 163 bp, Zea mays
gccccgtactgcagtgcagtgcagcagtgtgctacccttctcagtcctcttactttatcacatacgcttgtcttcctcggggagatcttttcaacgaccgacagctcggaacgagtcttagaagccatggcgtcaaagaggctgctgcttgcggcgctgtgcg

SEQ ID NO: 324900 - DNA, 99 bp, Zea mays
tcgcggacgcgtgcgctgacgcttgggctttacattggcactccaagctgattacgagaacctgcggcaggtcatatgccatggcggcctggtcctatc

SEQ ID NO: 324901 - DNA, 224 bp, Zea mays
attttcgtgctaatggtgatatagcactggcatttggggtggactttgagaagtatgggatcggtgcaatgcctatgcagctaagtgctgcagattagtcggctccataccacatgcaactgatgatgatactctctactacaccaatcatcaaagaaatggatatctgtgaaatcctattcctatattcagcattgtattaagagttcacctataacacaact

SEQ ID NO: 324902 - DNA, 56 bp, Zea mays
tcgcttcatgtcaaattggggtgctttcttggaagttatccataagaagagagctg

SEQ ID NO: 324903 - DNA, 130 bp, Zea mays
cggagcgggcagcaacacacagccccaacccaaaacaagacgagacggggacacgccacaagaaaagaagcggaaccaaggggaagagaaagacagcagcgaagccacccacaaagaagcggacggacaa

SEQ ID NO: 324904 - DNA, 271 bp, Zea mays
gatagttgagagacacacctcaaaaaggatctagaaaagagaatatctcatccttttattttcatttcgtcttcttttcagctcaaattcatcatcgaaattacttgtagttatcaaaatggggacaataggcaaaactactacggccgctctttttctttgtcttcttctgtttcctattgtcttttccacgcctaatgacagattggttagaattggactcaaaaagagaaagattgaccggaacaatcggatggctgcacaccttgaa

SEQ ID NO: 324905 - DNA, 398 bp, Zea mays
aaaaatgtgaactgtgcatagcttgtattacagatccccaaataaatagtataaagtagcaccaagaaatgttacaaacacaacctaaaaaccagcagtaccatgcatcatagtaacaactaataaagaatttaaatgaaactgcgccatattattgttattgcattttactaaagttcccctaacaaagtaaatgagctcaatataacacctgtaatatatgataaagtgatgtaagaggtccaattctttcttcccctgcctgtcgggttaccgatttacatgttcaatccagctttacggaagagaacaggtaatgcacaaaccagaaagatgaaaggaacccgatcgtgccagtggccaacatgattgcgaggaccatgaagagagaatacccc

SEQ ID NO: 324906 - DNA, 274 bp, Zea mays
aattaacgcctttttcttctctttgctgagctctctcccccaacatcaccatggcagataggatataccctaaacaagcgacaaatggcaccgccgccgcaaccaacccttcttttccagccactaaagcacaacaatacggagcctcccgccctgtctaccgtccacaacccgaacgccaccgctaccgccgctcttgctgttcttgctgcctttggaccaccatagctatcctcgttctcatcctcatagccgccgtagcttctgctatatt

SEQ ID NO: 324907 - DNA, 185 bp, Zea mays
aataaaccttatcccttggtaaataattgtctctgtttcgatcgactttataaacagtagtataaaagatcgattatgtcgatgatgctgtacgtgaagagctagggagatatgttgtgaagggtatttggctacctagatggatgagtatggcggtaaaagaggtgctggtgggcttggaaagg

SEQ ID NO: 324908 - DNA, 232 bp, Zea mays
ttctcgagctttatcttttttttttctcaaaacaaaatcatttttattcaatcataaacttaccatgttgatataagaactaacttagaatcatggtctgactgtcctttacatcacttattcttaatacgaaagttccccatatcctgtaacttacaactctactgttgatatatatatatatatgcatgtatgtattgattgttaaaaggatcttgaaatttagatgaat

SEQ ID NO: 324909 - DNA, 237 bp, Zea mays
tcagacatagcaactggctatggtgttggtgcatttttgttcctcatggctagccaagcccttataatggttgccagcctatgcttatgctgtggaaaggctttgtacctctagtggttcaagggctcgggcaggcatcctttccattgattgctggttatttttcctaatagcctagatatgtttgttggccggatcattacggaatgcataccacacataataccgtaccatgtt

SEQ ID NO: 324910 - DNA, 68 bp, Zea mays
ttgctaaatgttgcccctatgcacttgtcaatatgatcagcaaccctgtcaattcaactgtgcctatc

SEQ ID NO: 324911 - DNA, 222 bp, Zea mays
accatttccaccatcctggccgtccacgtggcgctctcgtcttcttctcccactctcgacgtcgtcggcggcctttttctcccgattaaatcggaatgccgcggatccatcgccgagtgcctgatgctaagcggggaggagtcttcggacttcgatgctgagttcgccatggactccgagatcagcaggcgcattttagccaggacttgatacattagctac

SEQ ID NO: 324912 - DNA, 78 bp, Zea mays
gtcatctgcttcgtctaggtcttagcagaagttgataatgatggaattgtggccaaaagtggtgaaatgggatatgga

SEQ ID NO: 324913 - DNA, 80 bp, Zea mays
gggttttattgtttaggccttgacggtggttttcgccgtgacggtggttacggcggctgactagagtgggttagcgaatg

SEQ ID NO: 324914 - DNA, 215 bp, Zea mays
tctactgggcagttcattccacagaggaacaatggaatggtgaggggggggccttctggaataattggaaatagtatgcagcaagctgctcttccgttcgattatttaagtacttgtgatacaacttcctcattgatggctgctgatgattcaagatggatgaacatactacatcagaatcctgctttgcgggatccaatggggaaacaatattt

SEQ ID NO: 324915 - DNA, 77 bp, Zea mays
aaacaccgcatgaaactgatagtgatcgagaattcgactggaacgatgacccatatcaagtcaagcctaagcgaaga

SEQ ID NO: 324916 - DNA, 69 bp, Zea mays
aatggactcttagatgagattaccagagaacttttcacaagcataactgtcacagatgaattgtaaaac

SEQ ID NO: 324917 - DNA, 250 bp, Zea mays
aataactatctatctaacgtgtgcatcccgaactaggatcaccacaccggtctgtcatgaccatgagaacctacaacaaagcagtgctcctcgtccttgccatggtgatggcggtgctgtcgacagggatctgcacagcgccggcgccggcaccggcaccgagcttggaggagttcccgacgacgacagaagacacgtgtgtgaagatcctcgccgacagcggctgcgtccacaaccacaaggcgtgcca

SEQ ID NO: 324918 - DNA, 68 bp, Zea mays
aaaaaaaaaaaaaaaaaaaataaaaaaaaaaaaaaaaaaaaaaaaaaaaaaaaaaaaaaaaaaaaaaa

SEQ ID NO: 324919 - DNA, 229 bp, Zea mays
aagaagcgtctatgagatgtttgcattcagatttaggatgaacgcactcgtctatcaagaccaggatatcgtacaccaaaacactactactcgtcctagctcatgtggatgcctgactgtttacagggatctatacagcatgtgatcccgtactatcgccgatcttgtaggagttcttgtattcgactgattgcacttgattgattatctctcatctactgatgctgct

SEQ ID NO: 324920 - DNA, 257 bp, Zea mays
accagccctttttttcctgtcagcaactacccactggccactgcagccgagtgttcctttctagccttcacttctcagcacggcagccttcgatcccccgactgcagccgccagccgcgccatggagcaagcagccatgccgcaggttccccgcgtcaagctcggcatccaggggcttgaggtgtcgaagctggggttcgggtgcatggggctcacgggcacctacaacgcgccgctcggcgactaggccgtggccg

SEQ ID NO: 324921 - DNA, 243 bp, Zea mays
gacactcgaacatactcgtgagaagataacatacctcttgtgataacgatatcaaaatcgtagagctttgctagctgaaggtcgatgaaccccaggtaggaatagaatgtaccgcggcagacatgcgatctggaaaacaacattggcttggtatcctccgactatgactcgatagacgaaatctatcagtactacgactcttcttacgctcaggcgctacatgagaagccttgatccaactac

SEQ ID NO: 324922 - DNA, 189 bp, Zea mays
gagacgcgtgcgcgcacgcgtccgtctacgcgtccggtcacgcatgcgaatacgcgtcaggtgacacttgcggacgtgtctaatgaatgcacggagctgcataagaggatcttgtgctgcaaactttacactagagaataacgataagggagatcaggaaccacatatggttcatgaggaacactttat

SEQ ID NO: 324923 - DNA, 320 bp, Zea mays
gattaaaagtctaggagcataggcaggagtttttatgaatccagctactacactcactgcagtggattacattcttgatggcgatgacctgctcttcattacgtatggcactcttgtctacgaagaaatgagctttatgtgtgtgcaagttcggtctgtatgttttctttagatttgtttagtcattaccttatattgggcctttactctctatttttatgcattttgtcttttttttattttttctcttctttattttttacttttgttgtttttttttctttagttttgtctttatttttttttaatgttatttttaa

SEQ ID NO: 324924 - DNA, 468 bp, Zea mays
cccacgcgtccgcccacgcttccgctcacgctttctcttactcgtggtaaaaatacaaaaatataaaaataaaacaaaaaaaatattataaagtatcactcttatatcttacaatattaattctcccatttttatatttctcttatcttcattatttttttccattaccttattctcttatcttatttttatttttcttcttttacttctctttacatttctctcattgattttctttatctttttactttacttttttcttttttttctcttttcttcttacttttcttctctttcttattattcaatcgtttttttttttcttatttttcttttctttctcctctaatcttttatttctttttgttttctttcttttattttttttttcaatttttttatttttttttttatttatatttctctattatcctttttttttttttttttctttatttattttttttt

SEQ ID NO: 324925 - DNA, 361 bp, Zea mays
cggacgcgtgggcggacgcgtgggcggacgcttgggatttggaattcttgctggatcctgtgtgaatcctcttctattttccctctccattgttcctttattctatttcggttttgatggccagtacttgagtcaggtaatgtgtacaaagttgcgtctgatgctgcctgtcattgaattgtttggcatgtgaggaagatttaaattgaatattcaacttttgtggtcatgatagttgcacttatttttaccaataatattcattattaggattctttttttttcttccttttttttttatgttttattttacgttagtttttttatttttcttatcgttttattatatttctctttattt

SEQ ID NO: 324926 - DNA, 165 bp, Zea mays
gacctagctagcagtcctaatatccgaccattattatctactagacctaacttgctccgaggtagcattttactctgtgctgaaacagttgcaattcatttcttctgcgatcaaattattttggtgaatgtcatcatagaacgtcaccttctattatcttgtatg

SEQ ID NO: 324927 - DNA, 60 bp, Zea mays
acttgcttcaagcaggctactaccgatatgctttcgggttaataaacctaatgtactaac

SEQ ID NO: 324928 - DNA, 151 bp, Zea mays
cggacgcgtgggcggacgcgtgggcggactcgtgggccgacgcgtgtcgaggggcattacaggtgtcgtgttgaagaactgccttgagagaagagatttcactagctattcctcgaatatgaccttgcatgattctctcatgtcgacctat

SEQ ID NO: 324929 - DNA, 169 bp, Zea mays
cccacgcgtccgcccacgcgtccgtcacgcgttggtcagcctgccgttgaatctgtactcgggcctgtggaacgccgactactgggctacttgtggctgtcgcgagaagacggactggtttaactcgccttttgttgtctatctacttcggttttcactttgactgttt

SEQ ID NO: 324930 - DNA, 78 bp, Zea mays
cggacgcgtgggctgacacgtgtgcggacgcttgggataaaaaaagcaacaagtattgatggggtacggaaaaatggt

SEQ ID NO: 324931 - DNA, 330 bp, Zea mays
cccacgcgtccgtccacgcgtccgttttttgggtgatgagatgctaattgatgcctctgcggatggtttggatgtgcccgtgtaggtatcttgcgtgactcgtatgcacaagcttcggccacccgtggaaagcagaagacttggaggaagaagcgaaagtaatgatctttctcttccctatgtttttgtcatttggattcatttagctttgctcttgttctgtagtttatggtgcttctcgattagatcaccggtcctacgattgttaacttttcatgccgactcattgtggatcttgcagtggttcctacggtattaatttgtctgagt

SEQ ID NO: 324932 - DNA, 140 bp, Zea mays
gccacgcgtcctcgggaagtcgcgctacgccttcaagaaggctctaattgaagtcgatgcgggtcgattttaatggcccgagcaggttattaaggttactcgtagtacattctagaaccacccgacgaaagcataatact

SEQ ID NO: 324933 - DNA, 52 bp, Zea mays
tcacgcgtacgtttactcgtgcgttttagttttgatgagatgctaaaagatt

SEQ ID NO: 324934 - DNA, 452 bp, Zea mays
cccacgcgtccgacatgaccagggccctgcagctgcccgccgcgtgcaaggtcaagacgccgcccgtcagcaagtgccacgtttctgttcctggtgtgcccagcgcgtctcctgttccggctccctcgtccggggccccagacttcgggcagtcgccgacgccgtcgccgtcaaccccttcgggatcaccggcagcaacccggagccagaccagcggcgctccagcgccctccctagcgcgttccgtcgctgccggcctctcggcaccaccactggccttcacctttctcgctgtcgtgactcttttggttgtccggatcttgtgagctgtgctcatttattctatttcatgcgcttcgtccgtaccatcttacccctagtctgtcctcttatcattgtctttgttttgtttcttgtgagctttttcgtttcgtttttttacctctgttttt

SEQ ID NO: 324935 - DNA, 102 bp, Zea mays
aaaaaaaaaaaaaaaaaaataaaaaaaaaaaattttaaatttaaaaaaaaaaaaaaaaaaaaaaggaaaaaataaaaaaaaaaaaaagataaaaaaaaaaag

SEQ ID NO: 324936 - DNA, 295 bp, Zea mays
cccacgcgtccgcccacgcgtccgggagtccttgcggagaagcagctctgattgcacattccgaagtttgccggcttgcatcagcagatcattgtagaattttacaccccagaacattgccgtatcatctgaaatgggacaaacaaattacatcaggaggtaggttgctttatttttgttcttttctataaggatggcaagtttacttacttatgccaccaccatatggagtaagtggtttgtagtagaagctgaacaactgagtgatattatcaaagtttggatgctgagctac

SEQ ID NO: 324937 - DNA, 168 bp, Zea mays
cactttacgtaaacgaaatagcatgttaaacatcagaccaactgaactgtttttgattttccgtatcaaaagtatcgaggtacaaaaaggaactagtctacttttgtgcagcaccatctgttagcttccgagagataagctgcgcattttcgatctatttataggcat

SEQ ID NO: 324938 - DNA, 244 bp, Zea mays
accactcgtacgttgacgcgtcccataatgaattaaggcgtggtatcgacgagtacgctgttatacacttccagtattacagtcaggggttcatctgtaagcgcatcagatgaaccttgccaaaagcctgctgtctactggttgggatgtctttagaatccgctcctttagttattgaaacagttatgacggcatgttcttatggtcagctatacagctttgacttgattacaagcttaatgga

SEQ ID NO: 324939 - DNA, 245 bp, Zea mays
atcatgagttgagagatcaggctctgatcatcatcacagaagctgataaagctgcggcagagactggttttgcactgagaacattagccattccagtggaatgagtgcaacaaggaacatttaattgatattccaaggactcaagttgtgtcacctatggtaatggtccagacatatatgattactgtctttaccttgtatcatacaattaccttgttttatattctttctcttatctgtattaa

SEQ ID NO: 324940 - DNA, 345 bp, Zea mays
gcctcgcgtgcggtctaaacagtcgtgacaccattactgacactgcaactgtgtatactggtgagatactcatcaatatgctctttagatacacaaatgcttacgcaaatgctcaaccctactagcaacacttatgccacgaactacactactgactccagctctttaccgagtgctttaccagatgctgagccagcggttgatttgccgcttggacgggccaagtctcgtgcctagactgaatcattcattgtattgatccatgcgatgtaacctgcgggacaagctatcgaactggaggcctgagtgaacgcctgagctcgcgcttcaactcattctaaaaca

SEQ ID NO: 324941 - DNA, 228 bp, Zea mays
gagggagcgagtagaccgcgtgtttcgctatcgtgggactagaataagccatgccaatgaacatgagccgaatagaggctacgtactgttattgtatcagtactagtaccctatatatatgggcgcactacagttctgtgatgtaatggattctgctagtatttgactcttgtgcttttgtacagaaaaaaataaaaataaaaattaagagaaaaaatataataaaaa

SEQ ID NO: 324942 - DNA, 92 bp, Zea mays
gcgccaacttgctgaacggtctgatcaacgcgaccctggggactccgtccaggaggccgtgctgcacgctgatccaggggctggcagacctt

SEQ ID NO: 324943 - DNA, 459 bp, Zea mays
cccacgcgttcgaaacgagcgcaaagcaccgggttttcttttgcatttttcttggaatgcctgagcaaaggcagagctggcctggccagtggccaccattttattgttgaggcgtggagctttgtacatcacggttagtttggatgacactcatgttgtgcataactttgattgaataatactagtcttattatatactatatatatttttttaaattttttatttattttattgttgttttttatttttttttttttattgtttttttttttctcttttatttattatttttattgtttcttttttttttttatattttttttttattattttatattatttgttgttttttttaattgtatttatgttatttattcttctatttgttttatttatttattttttttttgttttaattttatttattgatctttttttttatttttttttttttaatt

SEQ ID NO: 324944 - DNA, 473 bp, Zea mays
cccacgcgtccgcccacgcgtccggaggcatactgttgctgccctgctggaataaatgtgctactttcccctgccttgttaagggaaagggttttgttcacgatgttaccttgtaaccttgtacttatgtttcatacttggaatgaatgttcatggaacaaaaatattcaaaataatatatttttaatattatatttaactattttaattatttattttaattttttttttttttcttttttttatttcttttttttatttttattcttttttttatttttttttatttgtttttcttaatatttatttatttttttttttttttattatatatttctaactctttttttttatttgttatttttattttatttttttttttattttatttttttttttattttcattctttttattttatttatttattattttttctcttatattagtttttttattatatattttatttc

SEQ ID NO: 324945 - DNA, 97 bp, Zea mays
tcgtctgattgtcttttctaacagttgctctttttgaatggctaatggtactgcgccctgtagtggctctttaagcgcgtttggtgtggtggtttct

SEQ ID NO: 324946 - DNA, 424 bp, Zea mays
gacatgatagctgctagagctggactaaagaaggttccttgggatggctatctgaaacacaaccgtcctagtcccaaacacactgaagagaaacaacgcatatttgccgaatctgtcttgatgagactggaggagaaatgaagggacgtcaagccgtacaagtgcacttcgttagggttttacatgcagctaccttgtaattcggttggcttccagaaaaaaaaatgtgagcctggacacgtcaagtgaccacctcagttttgttgtaaatttgttactagtttgataggattattagtatgtacttatcatgaaaagaattctcagtatgtgttttggctgcccattcaatgataggtcagtgattaacaccataataattattattttgttgtttttattcttattttattttttttttatt

SEQ ID NO: 324947 - DNA, 226 bp, Zea mays
gcgcaaagcaaatgaatcagcaggaagatcaagacaatcaatgagtccatagaacagttatgagggtcaagaaggtccaagcgatgtcgtcaaggatcagtctgaatgtggggtacatctgtttcagttgatattcgatacaagtttcttcctcttgagaacttatttgagtctgtgccttgtagttggctatggattcttgccttacttaatcactgtggattat

SEQ ID NO: 324948 - DNA, 172 bp, Zea mays
acggaagcatcatcattagctgcaacatctgaagatgatgaactaataatttgggagctttaaatgcaaagagatacacaagacgaggctgactccagagctaagatgaacgagcatgcaaatacacctgaataattctcagcaaaaattgtatctgcatatacacggccag

SEQ ID NO: 324949 - DNA, 324 bp, Zea mays
cggacgcgtgggctgtctgaacgcagcgcatctgcggcggcgatagggagagaggagagagtctgcacgatccagcatgccgagggaggagtcagcggcgggccggagaatattagcggcaactgcgcgaagaaagtggtcgatgcggctgtgaaagccggcaggaccatcatcgactgggacagcatggccaagttgctcgttaccgactaggctcgcaaggagttcgccgtccttcgacgcgctttctatgacgtcaaccaccatcttcagaccaagttctttcatgaaccccagccgattgaatgggagttctacataaat

SEQ ID NO: 324950 - DNA, 211 bp, Zea mays
ccatcacagctagctagcgttcctaatcaccgacgaataatctcttcttcacctcactaacaccgagctagcagctcgctctgtcctgcaacaatggccgctcgctcctcctcccagcagctggtcgcggctgcggtcctggcagcggcgctgctgctgctggctgctggggccgggacggcttctgctgctgtgagctgctgcgaggtga

SEQ ID NO: 324951 - DNA, 81 bp, Zea mays
cccacgcgtccgcccacgcgtccgaaaaaataaaaaaaaaataaaaaaaaaaaaaaaaaaagggcagaactatctaaatgg

SEQ ID NO: 324952 - DNA, 137 bp, Zea mays
ctttatgtgcacattttccatatgtgacccccttctccatataaggtgaacatattttactcttttgggctccttgtaatttcattagtaaaatctctacttaattattaatgctgcatagttaaaaatttataaaa

SEQ ID NO: 324953 - DNA, 288 bp, Zea mays
cccacgcgtccggatgccaacaaattcattggttgctagctgaaaaacaacacccacacatgcatatatacatgtaactggcacacatgagaaaattaaaggtagctagctagagagtcttgtgaaggttagccattccgttcctgtttgtgaaaagggtacaaaagctagctttcacttcacacatgagagaagaagctaaggagaagaggtacaggctgctgtgggtgggttcgatggtaggtgagacatcacaatgctatgttagatatggggtctattccatct

SEQ ID NO: 324954 - DNA, 54 bp, Zea mays
ggagaaaacaaaaatataacataaaaagatataaagaaaaaaataaaaaataaa

SEQ ID NO: 324955 - DNA, 225 bp, Zea mays
ccacgcgtccggcagcccctggtacggccccgaccgcgtcaagtacctcggcccgttctccggcgagcccacgagctacctcaccggcgagttccccggcgactacggctgggacaccgtcgggctgtacgccgaccccgagaccttcgccaagaaccgctagctggaggtgatccactcccgctgggccatgcttggcgcgctcggcttcgtttttcccttgct

SEQ ID NO: 324956 - DNA, 132 bp, Zea mays
tcggttgtaaaaaaaaaatactatatatagatattttaaaaaaaataataagaacaaataataaatgtttatataaaatataataattataaaaaaaaaaattaaattaaataaaaaataaatttaattata

SEQ ID NO: 324957 - DNA, 470 bp, Zea mays
gtttttctttttagccgcctgatcaactttttctcttatgttcatcttcacaagaaatggagcagcaacatttggacgatccacaacctgttgcatccctacctgcaagcctgcacctgttgtctctctagctattgtggtatttaccattgtgccttgtgatgctctgctttatgtccatcgtcatgttcgtttgtttatgttttattatctttttatttttctttgttttttcttttttatttttgtttttgtttatttttttcttatttttattttattttatttatcttttcttatttttttttttattatttttttatttttttttattttttttttttttatttttatatttctttttctttattatatttattttttaatttcttattttattctttttattatttttttttattatttttttttttattatttttatattttattgtttctttattattatt

SEQ ID NO: 324958 - DNA, 412 bp, Zea mays
ccacgcgtccgcagtcatctcaaacttatttatcatgtaatctgagatctccagttgatgtcaatgttggagatggctctgagacctcacctgggcagcataatggtctggtcactctctcttatataatggacttttttggatcaatgcttccaggctaaaatgttctatgaaattcttcatgtctgcttccactaattgcttccattgagcatggtgaggttagattttttgcatcaccataattgttttgagcctgttactttgctttcctctttgattgtctttgtcagtcttttgtttttttttatcttccaagtggaaacactttttctaattgttctattttactttattttttcttttgtttattcttttttttttattctttcttttttttttatttcttttt

SEQ ID NO: 324959 - DNA, 325 bp, Zea mays
ctgcgaatgcttgaggatgtgcctcgcatatttgaggctgatttccagtgcactctcgagatgagtactaagaactttgaagattattctgagcaccgtctcaaatttttttctctgctccgtgcaaatggcacccattgctttcgatcattaattcagcttttatgcttgcttctgttttattgtgtttttttgagtttttgtgcgattgtgcttttcttgtgtgtttattatagactgttcttagtttattttcgtgaatttttaattactttttggctcttgtgattctaatatattttttctttttcttttttttttcttt

SEQ ID NO: 324960 - DNA, 169 bp, Zea mays
tgcatatatctgttgaaatgctattatgttcaaataaaatatcaatagaccttatagggggtaattttaaaaattattcaggatgaaatattaatataatttaacattaaaacatattatataaattactataaatgtgcaacctcttttgaggttcctggattatata

SEQ ID NO: 324961 - DNA, 141 bp, Zea mays
gctgatgttccaccgcttcaggctcaacacattcctgacggtcgaggcaatgctgaacgcgctctaaggcatggacggcaaggacctggaccgtctcatcatgatggtctacaaggctcaatcgcgcctatgactttttag

SEQ ID NO: 324962 - DNA, 325 bp, Zea mays
tcggaacgactttacccaagaggaggaggatgagattcgcatggagaaccagtgggccttcgagtgattgttgtcttcctttccctggtgatagtggtggttcttttacaagaacacattgatgtctgcactgcactctacaatgctagtctatctacttaccaaattattgtgaaatagtagtatatatggtcgtgatggttgtatctctttttggattggatgtatgtcaagctggtgggtgctagttcgtctgtctggacttgttactagttaatatctcataatacatatataaaagtggatcttaaaaaaaataattttt

SEQ ID NO: 324963 - DNA, 192 bp, Zea mays
aagacacatccagggacagaccgagcaacacatgaagctcttgctgtgacattggatgtgagattctataccccttgcgattactcacgcatttacgtagactttcacattagtactcaccggtattgcaacggttatgacacagtttgagccactgtgtctcgtactgttaactcgaaacctatcttctag

SEQ ID NO: 324964 - DNA, 343 bp, Zea mays
gcccgccgtccccgctgccggcgccgtcgcggttgcctgccccatgtgccgtggcgcggtgaccggcaccgtgcaagtgttcttctcctagcaagctttaggaaaggggaaaatgctaaaagaaaaagcaagacaaaatcgttgctcctgccaaaaggaatgatccgtgaaaatggggaattgttcatgatagtccgttctctgcttctttttttttttctcttcctctctcagttgtttattataatccttctattagtatataagtcgatctcttctagtactgctaggaataggattagtgtcctgctttattttcccttggtttcttctggaaagcata

SEQ ID NO: 324965 - DNA, 231 bp, Zea mays
atttgaattttttttctttctccttctccctcctccctgtcccttctcattcttttttctggtagttttgtccagaaatcgaatggtgtgtttatttgatttagttttcttaattaccgtgccccgtggtaattaattatgtacttacttatatatatatatacattactccgaagaggatggagcactttgtataatagaggaatggtgatcgtacttacgggtgtgggc

SEQ ID NO: 324966 - DNA, 341 bp, Zea mays
gattaaagcttaatcttcttcctgtttcttatttccttaggagaatgcaatctctaacctgaatacagacgcacccatcgtggatagagcctgtcttgcacaagtttctttgtccccggtgccagtctataaaacaataagagaaactaagtgttaagtcatggtgtgtgtgctgtggaaaagaacaacccacatacacttaaggtaaatatatatttgtttagaagtacatttgtaattgtatcagaaccaaacaactatgcagttctgtttgaatggattccaggacaaaaaggaaaatttaaatttcaggaccaaacagccaacaattttaggacata

SEQ ID NO: 324967 - DNA, 84 bp, Zea mays
gcggcggtatgagttcaagaagacggccaggtaatgcgtcctcacgtcctatgaaatgccgtaaaggaggaacacggatgagtt

SEQ ID NO: 324968 - DNA, 268 bp, Zea mays
cggacgcgtgggcggacgcgtgggggaagaatagaaacccacagtagatcagcataatcttcactgttacacttgcacataattccgtttgcaccttggatttagagtgtataataattgcataatcaacattgtataaattctcacagacgaaacgagaaccacacacgtgaaattttccgatgggagttgtgggttcttgtatcgaggggcaggtccaggatttaaaggatgggcattcggaaaaaatattttatatatttttttt

SEQ ID NO: 324969 - DNA, 62 bp, Zea mays
tcgagcatcggctgctataactttaaacatatttattacacaaacactgattcactataatg

SEQ ID NO: 324970 - DNA, 231 bp, Zea mays
cccacgcgttcgtccacgcgtccgcccacgctttcgcccacgcgtccgtccacgcgtccgggtctagatcgccgtcgtcgccttctactgagagaagggagatctgcactggcccgtgctgtaatttatttgttatccgtgttgagccgttgattcctttcttttgttcttcttcttttcaccatttgtttttctttcatccgatatccatattccattcggctttctatt

SEQ ID NO: 324971 - DNA, 281 bp, Zea mays
attctacagccaatggagaaaggatgcctgctctgagccatatgtgaaccgctatcaccaggtccgtgagtcatgaggcgactaggagaaccatttctgcagccaagggagccctagaagcccgagcggtagcagccggaggagggcttgatgatcatcttgctccgtctgatgcgttgatgaactgtccgttgtggcttaaccagatgcttcctgaaaacccagatatttgacggacgaagtgcccaaaccacagacacttggacctgtacatacccatt

SEQ ID NO: 324972 - DNA, 355 bp, Zea mays
cccacgcgtccggaaccatgcgttttttttggcagctatcggatgtcggcgtggtcagccacgacgtgaggctcgccagcaccgactccttccaaggtctctctatcctctcccccaccccccacaggttcgcgatctgcgccggccgcgctcacctatctacttgctgcgttgttcgctcgcctgctgtgcctgcgcatgcagaccgtgtcgagcatagtcgggctggcctggcgttccagtacggcgtgcttgtgctgtagctgttgacggggcatttcccgggcgccgactgctagctcgtgcgctgggctcaagaccccggctcctgcgtctttctgcacccggatggtgg

SEQ ID NO: 324973 - DNA, 58 bp, Zea mays
gcgccacacacacgccgacgcgaaccaactaaccagctgggagtaggttcgccgtgct

SEQ ID NO: 324974 - DNA, 192 bp, Zea mays
gcttctcagcaaacgccctctcgaagttcacaagctgattggcgccaccatcatgatgacgcctgaccgcgtcaccatgcgccgcatctgtgctatcatcatccgctgggatgacattgactgatacctcagcgtcttgagtgctgataacgtgattaggccgtttgctgagaagcactacgccgatctggt

SEQ ID NO: 324975 - DNA, 97 bp, Zea mays
tgtcgacggcgtgctacgtcttagcactttttatagcgtcacctaagtgtaactcactggccttcgtttaacaacgtgtagacggggagaaccgtgg

SEQ ID NO: 324976 - DNA, 157 bp, Zea mays
cccacgcgtccggccgccctttttttttgttttttgttttttttatgaaaaagaagataatggtgctggattgacatagcagggattttatattagtcgttaaaaaaaaaaaaaaaataaaataattaaaattaaaaaatatataggttatttttat

SEQ ID NO: 324977 - DNA, 275 bp, Zea mays
ccggaacgacccactcgtccgacgcgtccgaccacacgatcgacgtctagcatgcgccgcgctacctatctacagatgagctgggtacgaggcatatcaacattgaccagctcagacgccacttctaatgcccctcaacatggtacttttcacattatgcaacgcatgcgactgaaagttcgcttcatcctagactattctacacttcatacactcactcctattcatgatcatgtagtcaacaatctcaaagccggttactagagagaattttt

SEQ ID NO: 324978 - DNA, 376 bp, Zea mays
ccactcgtcccgctccacgcaccacaccagagagtctgcatgtacgctagctagctatctgatgttttactgcgatcagggcttggttccatggcgcaaaaagtggccactcgaggctgctttgaccttctcttgtgagccttcgccgactcatgcggctgcaggtgcggcggatcctgcgctatcccagctgcggcctacactatctactagagctgaagcaatccttaagtgtatcaacgggtcatctgttacatatttgagtctttgctattgatggtttatctgccaagttatttttatttggcttttttgtggttactaggatttcttttttaaatgtattttattttgatttctttaatattttttttcc

SEQ ID NO: 324979 - DNA, 159 bp, Zea mays
atattttatttaattatgtcaaataaatggtagatctccgttaaaaaacaaataaataccgggggaaaaaaaaagaaaatgagagtgaataaaaaaaccaacaagaaagctaaaaaccgatatgaaaagagagcgaagatgatacaaaaaaaggggggg

SEQ ID NO: 324980 - DNA, 191 bp, Zea mays
cccacgcgacgacgagcgggcgacgcgagcaggacacgcttatggcagcgacaagccagcagcagcaaggggagcggggagcggcaaaaaaaggcaacccacggaaccgagagacgcacgagcagcacaacaaaaaagcagagagacagacaacacgcagaaacaacaggcaaacagaaacaacgagagcg

SEQ ID NO: 324981 - DNA, 74 bp, Zea mays
tcgttcgcggtacgcgtgtggagaaaggggtgacggttggaacgatacaactcttaagggtagatcgagcgcca

SEQ ID NO: 324982 - DNA, 205 bp, Zea mays
ctgaaaccgtcaaataataatcgttgtatacgtgtaaataataataataataaggtaataataataataataataataataataataataataataataataataataataataataataataaactttgcagggaacaagaccctggccggtagctgcatctgctgcattagggacacgcatgagatgatcaacgtggcggcca

SEQ ID NO: 324983 - DNA, 143 bp, Zea mays
ctcgcatcttcctgcgtcatccaagttctagcagcgcatcgctcggtttcggcaatgtcggggcgcggcaagggcggcaagggtttgggcaagggcggccccaagcgcaacctaagggtcttcgcgacaacattcaaggcatt

SEQ ID NO: 324984 - DNA, 58 bp, Zea mays
ccttgccaacctcctcgttgaccccgaggacgcccaggagatcatagacaggcaagct

SEQ ID NO: 324985 - DNA, 116 bp, Zea mays
tcgcagacgcgtgggtatgttgcggtaatgttatctcaaagtgcatcttcaaaatagcaactgccgtgggatacataccctgcgaatataactagaccatgcttgcttccgtctaa

SEQ ID NO: 324986 - DNA, 122 bp, Zea mays
cacaaaatggagataaaacttcataagttggcataaacaatggatcatctggagagggcgtaaaggcatgaagtggcaccactgattgagcaagcttttcaaatacattttgaggaacagaa

SEQ ID NO: 324987 - DNA, 99 bp, Zea mays
aaaaaaaataaaaaaaaccaaaaaataaaaattaaaaaaaaaaaaaaaaaaaaaaaaaaaagagaaaaaataggaaaaacattataaaaaataacgggc

SEQ ID NO: 324988 - DNA, 177 bp, Zea mays
acgaggaagagaagagacgcagccgggatcataggaagctgcacactttattgcttaaggagaaggcgttgattttcgggtcgccacctagtactagtaagacatgcagcttcaattggaggaccagcaactaccatacaaactcaaatagcgctggatgcatgaacttctgtgcca

SEQ ID NO: 324989 - DNA, 161 bp, Zea mays
gacacacgtccggatgaggtcatattcgaggaggaggaacatgattgacagacaacgagggcgcgcctcgaggacccgttaccgatcactagcagcatgcacagtgtcatggaatcctcattgacttaccgacagatccatatacatctagtactggttga

SEQ ID NO: 324990 - DNA, 130 bp, Zea mays
gctaaaacaacgcacgttctattcacatggatctcaacactactacgaccacactcgaaccaacggggggatcatgatgtatctatagcagcctatcacacaccaccatgcaacaccgccaccgcgccac

SEQ ID NO: 324991 - DNA, 59 bp, Zea mays
cggacgcgtgggcggactcgtggtggggagaagttaatctgcatctgctagagtaggca

SEQ ID NO: 324992 - DNA, 381 bp, Zea mays
agactgacgaaatagaagagatgtgattattattattattttcttcttgtttcccccatgcctagtaaaaacgcttgatcctagtagtatattatgtaggagaggtagataggagttgttgttgcgttaaacgatcgacaaatcgatcggtagaatgaattaatgggccagccagcagagtgtgatctcactatctgatgagtgataggatgtactccctctgtccggagatccagtattaaattaaatccacccagtgaaacaataaatacatcaacgagctagcatagacgatccacactacacaagcgaagcgaatctgctgctgatatcgtcggcgacgtgcatcttatctagcagtgttggcctttcccggaactc

SEQ ID NO: 324993 - DNA, 84 bp, Zea mays
ccacgcctccgctctgttactcgatgactctgttatacgttgttaaatgcctatatctgtgggtcctagaaaaaatctaaaata

SEQ ID NO: 324994 - DNA, 441 bp, Zea mays
gaataagtatcaattagtttgtctagatggataggttgccggtcataacagaaaagaactgaatgcttgctgtatgatcgcgtgtttacctaatttcatgctgactcatatatgaaatatgtacatatatcatgtttattggctgagcgaatttcatttatttgaggttagtataacctatattagatctgcctagtgatcatatctcatctataggggcgttcggtttatcttttatagtttcgttttaagttagaatttcttctaatctgtttaacttttattatctgatctgttttactgtttgaggttattttttttttttcttattttcttttatgtgtgatttttgtattattattattttttgtgttttttgttgtattcttttttttttttattttttaatattttgtcttatttccttaatgttttgatttt

SEQ ID NO: 324995 - DNA, 78 bp, Zea mays
tcgcccacgcgtccgaaaaaaaaaaataaaaattctaaaaaaaaaataaaaacaaaagaataaaggtaaaactaaaaa

SEQ ID NO: 324996 - DNA, 95 bp, Zea mays
aaaaaaaaaaaaaagaaaaataaaaaaaaaataaaaaaaaaaaaaaaaagaaaaaaaaaacaaaaaaaaacgaaaataaataaaaaaaaaaaaag

SEQ ID NO: 324997 - DNA, 93 bp, Zea mays
ataatgccaccaagaaagacatacctgctgctgagccgataattgttccaattgtactgaggatgtctgattttgatcacaaagcattgctag

SEQ ID NO: 324998 - DNA, 200 bp, Zea mays
cccacgcgtccgatgagttaatagccctaaaaaaataataaaaaaaaaaaaaaaaaaaaaaggaaaaaaaaaaataaaaaaataataaaataaaaaaaaataaaaaatttaaaaataataataaaaaatataaaaatataaaaataaaaaaatgggctacccctttaaatttcccatgtttacattcccatattttcaac

SEQ ID NO: 324999 - DNA, 91 bp, Zea mays
tacgcctttcttagtgctatgcttaattaatcagagcaaaccacgttacagtacattggaatttgggaccggttctgtatatattttaaag

SEQ ID NO: 325000 - DNA, 146 bp, Zea mays
cccacgcgtccgggtcccctgttctgatcgttctgttcctcacagcagcatccatatgctggggagcctttgaagcaagctgcccctcgtgcacaggagactgccgtgcacatcgagtacgttgaccgtcccgtggacgccgaccc

SEQ ID NO: 325001 - DNA, 145 bp, Zea mays
cggacgcgtgggccgacgcgtgggctgacgcgtgggcgcgagcggccgcccttttttggggggaagttctttttttttgttttggttttcttttttttttggattgcttctctcttttgacttgtttttgatttatttttattct

SEQ ID NO: 325002 - DNA, 88 bp, Zea mays
tcccactcgtccgcccactcgttcgcccactcgtcctaaaaaaaaaaatttaaggaaatatgtggaatactaaaaaaaaacaaagtac

SEQ ID NO: 325003 - DNA, 144 bp, Zea mays
acgcggacgcgtgggatacacatggattggataggattgggaataaccgaacaaggcctaagcggaatcatcaaagaagcgattgtgttctgactttttgatgtagttcttgtgacgtgcaatgctatccatgcgtcgcactcc

SEQ ID NO: 325004 - DNA, 446 bp, Zea mays
gttctagatcgcgagcggccaccccttcccgtctccaccccgacgccgaccgcactccgctggccgtccaccatcccagcgtgatggctgggaggaccgcgcctgccccctcccctccttctctctcacgccctactccctcgccgccccttcatcccagatcccgtcgctgattctggcgagagcaggggaagagtatgatgatgactattcgtgacagtgaattcctgggaggtgggggagaaaaggattgcgttctgtggaggttgttgtgcttgtgagaaggatttgttctctctcttttttctttcttgtttctttggccgtgtttcagtgacactgttgatggatcccagtgctttgcccgtttgatgcatcatggtggtggtggtgatgatggatgacatagtggtagggggtgtgtgctagttggtaatggggtattt

SEQ ID NO: 325005 - DNA, 193 bp, Zea mays
aggcgtacgggtacgcgtccgggagacgtcacgtcatgcatgatcatgagcctgatgcagtaacagcaaaccaagatggaaaaagctctatgaaggcttaaaagagagcacgtctcatcatgaatggcctattcattttattttgtgtatgtttcacttgccatgctttctgatgcatgttattccaaaattg

SEQ ID NO: 325006 - DNA, 65 bp, Zea mays
ttcccggtcgaccacgcgttcgccacgcgttcgccacgcgttcgccacgcgttcggacccacgcg

SEQ ID NO: 325007 - DNA, 52 bp, Zea mays
aaaaaaaaaaaaaaaaaaaaaaaaaaaaaaaaataaaaaaaaaaaaaaaaaa

SEQ ID NO: 325008 - DNA, 412 bp, Zea mays
atccttgacaacgtcactagcccctccgtgccccgctttgtccaccacgacagcatcgctggagcgcccaacctcccaatcgctgcccgcctcgccgacgcactccgccccctgctgtcaggcagcaattccaagagggatactgttccgcttatcgaggggcccaccccaaggcagaccaacggctatgactgcggtgtctatgtcatggccatcgccagggctttgtgcgcctggtggaagaatggccaggaccaacggggaggcgattggttccaggcggtgaggagcggggtggacgcccacagcgtcgaggccatgaggaccgacttgctgcagctaatcaacactctcatccaagaaaaggccaatgccaaattcgacacccatgggcgacactgacccagggtca

SEQ ID NO: 325009 - DNA, 87 bp, Zea mays
tcccactcgttcgaaaaaaaaattttaaaaaaaacataatatctataaataaaagggaatatgggaaaatttaataaaataaaaata

SEQ ID NO: 325010 - DNA, 118 bp, Zea mays
agtcatcaatcgcttaccttgtggatgtggttcttgcattggatgcatcgtgttggaacgggaaataaaataaaaaaaaatgataatcaaaaaaaataaaataaaaaaaaataaagac

SEQ ID NO: 325011 - DNA, 318 bp, Zea mays
gggatgttgctccttgaataataatcgtagtggccttggagcccttttcctgaaataagagcagcatcctagtgcttcactttgcaaaaaaaaaaaaaaaaaaaaaaaaaaaaaaaaaaaaaaaaaaaaaaaaaaaaaaaaaaaaaaaaaaaaaaaaaaaaaaaaaaaaaaaaaaaaaaaaaaaaaaaaaaaaaaaaaagggaatcaaatcaaaaatatcaaaacttaaaaaaattaataagaaataaaaaaaatatactaatgattaaccaaaataaaaacaaatatcaatttattaaaaactcaaacaaggaaaaa

SEQ ID NO: 325012 - DNA, 137 bp, Zea mays
tcgcagagcagtgctttcatatcagcccatattttttttctaatattgttgagtggtattgatggcaattgggaattgtatgatttacttgccttatgaataaagcttgaaagaaacaaaataaagattagtatttt

SEQ ID NO: 325013 - DNA, 193 bp, Zea mays
  unsure (1)..(193): unsure at all n locations
cggacgcgtgggaaaaaaaaaaaantaatttaaaaaaaaaaaaaaataaaaaaaacaaaagggaaaaaaaaaaaaaaaaaaaaaaaaaggacaaaaaatacttaaaaaaaaaaaaaaaggggcgcctgttttctaggtcccaagcttcctaacgcgtccttgcaacttattatttttgctatggtgtccccaa

SEQ ID NO: 325014 - DNA, 232 bp, Zea mays
cggacgcgtgggttactccacccgtttgtgttggattgacatggaccatcatatgaaaactgtttttttggaaaaaaaaaaaaaaaaaaaaaaaaaaaaaaaaaaaaaaaaaaaaaaaaaaaaaaaaaaaaaaaaaaaaaaaaagggatgtagtaataaaagtacaaaagattatttaaacatttcatgaaaaattaaaatattactaatatgttaattaaattaaataaat

SEQ ID NO: 325015 - DNA, 113 bp, Zea mays
aaaaaaaaaaatgtgaaaaacaataaaaacatttaaaaacatacatataaaaaaaaaaaaaaggggaaacaggcggtataaaaaaatataaaaaccaaattaaaggcatactc

SEQ ID NO: 325016 - DNA, 463 bp, Zea mays
tctcccactcgtcctctgactcgttggaaaaaatttaaaaaaataaaatataaacaggaataatgggctataaaataaataaaaatcatttaaaaatacactttctatttttaattttcatttttcttttctcttcctttatattcctttccttctctttctttatcttctattttctttttatttaccttcattttattaaatgttttttttttaaaacttttcttatttgataattctttttcttttttcatatttatttttttccatctctctcactttttttaattctgttttattttttaattttccttcactttctatctcttaattaatatttgcattttttttttattttttcattttcccctttactttttcttaattccctttctcttttatcttttactttccttttttccctttttcttttctatttctctttttttcctttcttttcttt

SEQ ID NO: 325017 - DNA, 136 bp, Zea mays
cggacgcgtgggctagatcgcgagcggccgccctttttttttttttcttttttttcttagtgtctttttttatttttattcgtttttttttaatgtttttttctcattgtttctcaatcccgagccccccataaaa

SEQ ID NO: 325018 - DNA, 109 bp, Zea mays
cattgggacaaatcatttctggcaaagtgggggttgggaaattaacccacgacagttttgtgcttagtttgtttcttcaatgaaagatgacagttgcgttttacctgtc

SEQ ID NO: 325019 - DNA, 221 bp, Zea mays
tcggagtcagagaggtgcagatcaatgcggcggtggtggtgcgccgccggcggtctttcccgctgcgttctctcgttctccacctccggcatagcattccatgcccgcccgctgtcggttaccctgatgccccaataatccttcattaccctgccttttttcctgttctgttcgaggcgccactctcttcagggattctgtcacctggttatcgctttttt

SEQ ID NO: 325020 - DNA, 256 bp, Zea mays
ctggacctcaatgaaaaggacttgattttgttcgcatctgtgcaggatcacaggatctgagtggttaggaaatatcaccatcttttttttgtgtgtgtgtggatggagttcatagctggagttgtcctgcgagattgaagcgaggtgttcctaggagccagaaggggcaccgcattggtttctgatgtacgcacactaacggtttctgaaatttgagctagtaatctgaatgaaatccaaaccgaataaccgatac

SEQ ID NO: 325021 - DNA, 426 bp, Zea mays
ggccgcccttttttttttttttttttttttttttttttttttttttgcaataaagatatacaactgtcatttgcactgttcctctgttcacttgtttgccactgagttacaatacgttatcagcactgctcgtgagagaacagagagaagtcgatgttgaaaggttgaagaaacaagcgagaaagggaaatgaagaactatcgtggacgttggcggacgggagtcttccatgcggaactctagcatgcacttggactttggacttcatgcgtctgtccgtcgacgtgagttatctattgcgaatccaaaccaaaaatcaatgtgtgtgtctgcaccacgatgacggctacgatgtggccggatgagaccttgttcggggtgcttgtgcctgcggagccagatccgcgtcgggaccatgcctgacca

SEQ ID NO: 325022 - DNA, 263 bp, Zea mays
tcggcctcgaccgccttctggccggaggcgaacttggtggcgatgtccatcagctcgctcgccctggtgggggtcttgcgacccaacttgctcaccaggtcacggcaagtggtgccggcgaggaacgcgccgatgacattcgagtcggtgatgttgggcagctcggtgcgctgcttcgagaatcgccggatgtagtcccggaaagactcttccggctactgccggcagcttttgagatcccaggaatttccggggcgcacgta

SEQ ID NO: 325023 - DNA, 153 bp, Zea mays
aaaaaaaaatatacaaaataattctaattatattataaaacaaaaaaataacaaaatctattgggaactattgaaataaaattaaaactacatccaataaataaaaaaagtggccgcccatttttaagctttccaattttcctcccccttcct

SEQ ID NO: 325024 - DNA, 318 bp, Zea mays
gacgaattacgagaaaaaaaagaaaaagaataaaacaatagccggaagccgaagtacagcgctgtcgcgaacgctccggtcctatactcctcctgacctcgattcccgcactacctagatctcgaactcccaccatcgccgccgccgcccatggcgaaggagttccccgtgccaccggtggtcttcacgccgtccaccccaacacaccgtcggcaccctcccccgggcatgggggactcccctccgcccgcgttcgcgccgccacgtccctccacctcatccgtcgtcaacccgctccctttcatgtcgttcgatgtc

SEQ ID NO: 325025 - DNA, 297 bp, Zea mays
gtgacccttgtcaaaatataaaaaagataaatgaaagaaatataaagcacaaaaaaggagaagagcattacaaaaggatggataaactcaagataataggtatagaaaaataaatatggtgaggactaatgttacaacaattgagaaaggcgtatggcgattttcatgtcccaaagttaacttgctgacctttcattgatattcggttgcacgtaggcaatgtattagaagttcactttcagtggtgttattgtgacataagtgcttatattgcgagttgaataagtttaatgtggt

SEQ ID NO: 325026 - DNA, 106 bp, Zea mays
gaccctgctgatgcagtccctgttaatgcatgcgtatgatgcctacttcatggggactagggaagttttgctgcaagcctctgagaatctgaatatacagtcatac

SEQ ID NO: 325027 - DNA, 322 bp, Zea mays
atccaggacaaggagggcatcccaccggaccagcagcgtttgatcttcgctggcaagcagctggaggatggccgcacccttgcggattacaacatccagaaggagagcaccctccacctggtgctccgtctcaggggtggtatgcagatctttgtgaagacactcactggcaagacaatcacccttgaggtggagtcttcggataccattgacaatgtcaaggccaagatccaggacaaggagggcatcccacccgaccagcagcgcctcatcttcgccggcaagcagctggaggatggccgcaccctggcggattacaaca

SEQ ID NO: 325028 - DNA, 81 bp, Zea mays
tcgtccacgcgtccgcccacgcgttcggctgaagatgtggactgggagaaccttttggagcacaggtctggggagctttgc

SEQ ID NO: 325029 - DNA, 71 bp, Zea mays
cgccaaaagtccagctctatgtgtctgcggctcgagccaagctctcaatatctgtcagtttaatttgcacg

SEQ ID NO: 325030 - DNA, 176 bp, Zea mays
aaaaaaaagaaaaaataaaaagataaaaaaaataaagaaaaaatgaaaaaaataatagggaagaaggaaagaatgaatacgaatgcatgaaatagacattaaaatagtatgaattgggctgctttgcaatgtcattggagagcgtttaactatgtatcacctgtatattcgttgat

SEQ ID NO: 325031 - DNA, 95 bp, Zea mays
cccacgcgtccgcccacgcgtccgaaaaaaaaaaaaaaaaaaaaaaaaaaaaaggaaaaaggcagaaataacaagggctgtcggccttctggctc

SEQ ID NO: 325032 - DNA, 433 bp, Zea mays
cggacgcgtgggcggacgcgtggggggatcggtgccgggctgtgaagtgaagaaaaatttcaaatcgagccagtttttgttctagtttagatcaaaacgaacatatataatggagtacactaaattctaaaccaggcctgttcgttcctccccgaacgaggactagaactagccaaactgttagaaacgaacggcctcctaggtcttgttcgtttacaccaatccagctctgtattaacaatctatgccacaatctattcccttagaccttgttcgtttatgagcgcctaggccaaaaaggcgtgtggaactacagtctaccgttcatatccgacgttgtagatcctagcgcgaatggttgacatcactagtcctgacatcaagcttggtgcaacgacgcgttacggacattaagattgtgtcacatatgtgc

SEQ ID NO: 325033 - DNA, 195 bp, Zea mays
cccacgcgtccgccttgagtaaggaaaatagggatgggcatggattaatccattgatctaggtcgcttaagtaaaaaaaaaaaaaaaaaaaaaaaaaaaaaaaaaaaaaaataaaaaaaaaaaaaaaaaaaaaaaaaaaaaaaaaaaaaaataaaaaaaaaaaaagaaaaaataaaaaaaaaagaaaaataaata

SEQ ID NO: 325034 - DNA, 370 bp, Zea mays
gaagaccagctcccctctcctgatcgtcctgttcctcacagcagcagccatggcggccgagccggagaagcaggcggcccccgcggcacaggagacggccgtgcacatcgggtacgttgaccgcccctaggacgccaaccctgaggagtccaaaatcggaaccttaaccccggtcttgggcaccaaccataaggccagggcccacaggttttacacattcacaggacacgcctccgagggttcttcgcgaaaagttaaccccacaacatgaaagggatctaagggcgaccccatgtgctccacattgtgcccagacacactctcccgatacacagggctgggtctcggactctccacggcgcgacacaca

SEQ ID NO: 325035 - DNA, 77 bp, Zea mays
ggaagagtgaaatgaggcatgagaagaagcctgatgatggagaaactaactcatctaagagtctcagtggctctgac

SEQ ID NO: 325036 - DNA, 64 bp, Zea mays
aaaaaaaaaaaaaaaaaaaaaaaaaaaaaaaaaaaaaaaaagggcggacgatctaaaaagacgg

SEQ ID NO: 325037 - DNA, 292 bp, Zea mays
cccacgcgttcgcccacgcgtccgcccacgcgttcgcccacgcgtccggagagatccggagcagccgcggtcccaccgaccccgccgccggtcgccctccatctcctcgccgctgcctctcgatctttgtacagtttctcttttcaataatcaagatgagccgtggtggtagtgccggtggtggtcaaagttctctgggttatcttcttggaagctgggagccccccaaaccagcattggcaccagctgcaagtgctccacctgttgtgaaaccatatgctgcaaagactga

SEQ ID NO: 325038 - DNA, 283 bp, Zea mays
cggacgcgtgggctgcgccgcagcaatggtggtttccctcgccgaataaatctcaccggtcgcgcttcttggcgtgttcctccgctcgcctgggcttcgatctccagccctcgcgtgagcgcgggtgccgacgcggcgccgtgttcatggcaacggaggattgggacctgcggtaggaggacgcctcgcctacgagttccagtttgacctttagaaccccttcatcaggcccggcgaccagccgaacggcaagcttcttgaaccccaagggcaacaagccgcc

SEQ ID NO: 325039 - DNA, 68 bp, Zea mays
accacgcgtgcgggaagcacaatatacaccaaaactctggtatagcaatagaaagaaggtggtaggct

SEQ ID NO: 325040 - DNA, 556 bp, Zea mays
  unsure (1)..(556): unsure at all n locations
tgcacgtactcggtctcgtgaattcccgggtacgactccacgtcgtctcgtcccacgtcgtctcgtcagtatctagtaacctgctgactattagtggtcaccggggtagagtgcccttggcgtgacgctgactcagcaatgcataatatggctccagtccaatctctcgatctccatccggcatccagctcgtcccgcaactccgcaanagctagcttctccggacttagtctagggtcttcgatctacgctcgcttagatctaagtcctctactcccggcatctcgagggtcgcatgcgttgatgggcggcggcatccggcggacgctaagggcggagggccgccaagtatggatcctcactcgaggaccgatgactgagttcgaagagcttcgagaatcgaccatagaatgggatgacccaggaagaaggcatacgaagccgtccagcatgtgggaggatgatntgggatgaccgatgacgtgaatcgatgaatttctctttgcatgctcaagggaagagcttggacggaagcaatggcccagaagagctgaag

SEQ ID NO: 325041 - DNA, 200 bp, Zea mays
aaaaaaaaaaaaaaaaaaaaaaaaaaaaaaaataaaaaaaaaaaaaaaaaaaaataaaaaaaggaaaaaaaaaaaaaaaaaaaaaaataaaaaaaataaaaataaaaataaaaaaaaaataaaaaaaaaaaattgtaaatatatataaaacaaaataaaatatagaaaaaatataattaaaaaaataaaaaaatataaaa

SEQ ID NO: 325042 - DNA, 477 bp, Zea mays
  unsure (1)..(477): unsure at all n locations
ggtgagatgttaggttcaggcaaatcaacaccaaagttgcttcagatgtatgttccttatgctgtttttgctgtcattgctattctacgtggactttgctcatgctctggacgcactactgctggttcatcacttgggccttctgcccggaagaagagggtctagatcagcagtgacacttggagaattttcggtttgagacagtggcgccagagcactaatgctggtcagaagacgattatctggatcaagtttctaatcctgggatttaacacggatgttgaaaaatccaaatagtgttagttgcctgttctctaagatttggtggttcgtttcccttgaatgtgatattcatcttgcctttatttncattttaccctttgattatatgtcttgctaactaagacattgttttgtttactggatgaactgattcaactctgggattgttctggcgaataaagttcataaatcctt

SEQ ID NO: 325043 - DNA, 117 bp, Zea mays
attgagccattggttatcagtgtataatctctatgaaggcattttggtggcagtggccttgtctgtcattggctacaacgttctagataaaaaaacatttaaattttgtggaagttg

SEQ ID NO: 325044 - DNA, 194 bp, Zea mays
ggatgtggcactaagagatcaccttagacagaggagagatgatgatgatgatgacatgatggggtttttgctccctatgctacatatattgggttctagttcaaacatagtaacggaaaagaagcgaaggcatacatcaaagttaagtggcgaagaacatgttcaggagttgctccaaggtcatttgaagaact

SEQ ID NO: 325045 - DNA, 112 bp, Zea mays
aaaaaaaaaaaaaaaaaaaaaaaataaaaaaaaaaaaaaaaaaagaaaaaaaaataatttaaagggaaaaatagaatacacataaatgcaaaaaaataaactaaaaaataat

SEQ ID NO: 325046 - DNA, 93 bp, Zea mays
aaaaaaaaaaaaaaaaaaaaaaaaaaaaaaaaaaaaaaagaaaaaaaaaaaaaaagaaataaagaaaaacaaaaacaaaaataaaaaaaaaag

SEQ ID NO: 325047 - DNA, 117 bp, Zea mays
aaaaaaaaaaaaaaaaaaaaaaaaaaaaaaaaaaaaaaaaaaaaaaaaaaaaaaaaaaaaaaagaaaaaaaaaaaaaaaaaaaaaaaaaaaaaaaaaaaaaaaaaaaaaaaaaaaag

SEQ ID NO: 325048 - DNA, 104 bp, Zea mays
aaaaaaaaaaaaaaaaaaaaaaaaaaaaaaataaaaaaaaaaaaaaaaaaaaaaggaaacagggaaaaaaaaaaaaaaaaaaaagacaaaaaaaaaaaaaaaaa

SEQ ID NO: 325049 - DNA, 356 bp, Zea mays
accacgcgtccgaccacgcgtccgacacagggcaaccagacaacaattacggacagcatatgactggccatcaggaggaaacagcaataaccaatgctgcaataggacaattttatgggcctaatatacacaatggggttccttattttggtgcacctgagccctcccttcctccagatgcaacaaacaccatttatgttgagggcctccctatcaactgtactagacgggaagttgcgcgtatccttgtgtggatgatgatttctctttctgatcttattatgaaactgagttgtttgctggtctttttccaccgctgaactataatctacattcaggtgctgtcaatccatatg

SEQ ID NO: 325050 - DNA, 323 bp, Zea mays
aatattatcagaagatgtctttataaaccacatattcattgtactgtacaatattgatgctgatatagggatctacttagcatatttgtgtgtgcatgcaccatgttattcacaatgctgtatccttatcttagttctttcaggacttccctgatcatttgcatgaaagggccgtttactctcagcaaatgtcatgattacgatttttttagtatcctaattgctgttagttgatagctgtaacttaagagtctgaaagaggctgggaaaaaatgatactggtgacttaccagcacctggttggtaataacttattccacttg

SEQ ID NO: 325051 - DNA, 96 bp, Zea mays
ctccagtacaagaccgatcgagagcccctcaatctggtccacgagcgcatgccggactagagtgcccaacaacatggtcccaaaggctgactaatc

SEQ ID NO: 325052 - DNA, 60 bp, Zea mays
cccacgcgtccgcccacgcgtccgccaaacgcggcccccttgccctctactacttctcct

SEQ ID NO: 325053 - DNA, 70 bp, Zea mays
cccacgcgtccgaaaaaaaaaaaaaaaaaaataaaaaaaaaaaaaaaaaaaaaagaaaaaagggaacgga

SEQ ID NO: 325054 - DNA, 293 bp, Zea mays
gctatgctggttatatgtatgtgaaagaaataatagaagcgttgcatcgtctatccaaaaagaaaaaaaagaaaaaaaaaaagaaaaaaaaaaaaaaagaaaaaaaaaaaaaaggaaaaaaaaaaaaaagaaggaaaaagggatgaggataagaaaagatgagagcgtacacggagaggcgagtgcaaggagagaggagtaagatagagacgcctaaagataaggaaggggccccgaacgaaaaacgtcagggccggaataaacatggggatgccagggaaaaacggggggac

SEQ ID NO: 325055 - DNA, 287 bp, Zea mays
ccaactcgtctgtgacactattgactatgctggcaactgcaggattcacgcatcgggctgcaggctaggactacggtcttgctgcactcatgactggtgtgcattcaagcaagatccggactacatgatcgaaggggttgaccgttctgaactaccgacacctgaagtatacgccaagcgtacgactagaccgctatagattgttatagcttacgatatgaggaagattgaagtagcgtgctaaatcatgatgaaatagagcatgaagtcactgccacacccgaaac

SEQ ID NO: 325056 - DNA, 417 bp, Zea mays
gaatcgacggaccgactccactcattcgaagaccgacctaatagacgtacatgcgcctcaaacaactccactgccaacagcgggtccggcgccttaaaacgtgtaaccatgatcaaactctggaattaaacatttataacgtcgatggccaaggaccatctcgcccaagctaaatcaaaggtttgtcattaggccaacggagaatgaaactatcacttatactttacttatctgaagttcatgagatggttgataaggctcagaggtagatacacctatgacataggacgggagaccataattcctaaaagaatatgtaccatatatacaacatgcatacgtttgccataggtgcatcaagatgcgtactgagaacgctatctaaatctttgataactacactcctagcaaccacag

SEQ ID NO: 325057 - DNA, 420 bp, Zea mays
acgcccacgcgtcggaccacgcgtccggaccaagttaaatttaaaactggtcataggtagcactagctaacggtggcatgtcattgcaccaaggatgactacatagatgctttggcctcctatggagaccagacactctgattattccgctgctacttatgaataatgctgatcattcagtccaagcaagacaagcgcgcactctcgtgtcaaagctcatcaggctaaccccctaaatgcacaggcaaggaggccggcccgaggccgcgcatgcaaatgctgcacccactctcgcaatttatgtagcttttcctccatgctcgcatgcactatctcataccgacactacacctgcatccaccgttcctacttgcgcggtctcttaccgtacacacctcattcgccaatagctagctgatc

SEQ ID NO: 325058 - DNA, 400 bp, Zea mays
tcgaaaggctgttgcgctatcagagcatcaagcttcacatctttctaatgcaacagatctgttggcatttatactgtcctagtctaagctaagccccagtttgcctaatccctcacgtattgatgtttggtcacctgagttattgcccctgcgaccattcaatgttgccccttagatgatggtcctggttaggtgtttgtagcatgctctttctttcaccagtttctcaactctttgtatgaaccaaactgtgcattaagtgttctctacttttactattatttctgtaatctggctaaaaggccattatactggcgccctttcctttacactggacttatctggaacgagaagagcacgtttacgtctacctgcttttttaggctattccatgtgaact

SEQ ID NO: 325059 - DNA, 265 bp, Zea mays
aaaaaacaatcaagacactaaactggttacaaaagaacacaaacaaaaagataaatggatgcgaaaaaaaaaagctatagaactgtagtctataaacattcattggcggtattctggactaaatctgacttgattggtcttcgctctcaggggagaatatactctgcctgttgactgaactggcagtgcgcatcctgctctatcgtcttcgttgaagtggacagcgtatgtgtgatggttcgtgaagatcactggtgtgatcatt

SEQ ID NO: 325060 - DNA, 401 bp, Zea mays
cggacgcgtgggcgaggtcgggcaaccttccccaggttggaagggacacgagcggatccgagcgaagcgaccgcgcgtccgcgccctccgtcgccaccaccatccgctccgccgtcactccatcgtcgtccacattgctgccatccgctctgccgctgctccatcgtcgtccttccccgaagcagtcgtgagcgagacgtgaggcgacggtgccctgcaccactgccaccgtctcggatttgtcgtccttcaccggcatctgtgcctcagtttgctgtcctgcactaccgtcttccgcggcactatagtggaggcaacacatgaaaccaacatggagaagaaaaatgaaatggcattccacataaagcttgtgaaaaagagttaaactcgtaatttattct

SEQ ID NO: 325061 - DNA, 420 bp, Zea mays
  unsure (1)..(420): unsure at all n locations
cccacgcgtccgcccacgcgtccgtccacgcgtccgcccacgcgtccgtccacgcgttcggccacgcgtccgcccacgcgttcgatgcaacggagacagcataccattttttttttaaaaaaatcttctcaggcaaggtgcagcatttgcaacggagatgttgatgaggcctccttatttcctaacctcgctctaagagcggtagctaccgtggtgaagatggaagacgataggaggctctttcacaatgcggcccttcgaaagcgcatgaaagaagtgactgagcatatggatgcccaaaggcgaaatggaagtagcaaggacagtattgagctggggctagaagctgaaagccctagagcgttcaaaggggtgcagtacccgtttgtggtgggtgagagagtnctgatcatgggaaac

SEQ ID NO: 325062 - DNA, 355 bp, Zea mays
gccacgcgtccgtcgtacgctcccggcatggtcccctattccccggctcgcgggtcgacgcccacgcggcttcgattgatcttatttcagtgctggtggcatgcggaccgatcgtgtccttgctaggccggccacatcaggcatggacgactgagacctggacttctgcaacccggtcacgtacctgtgccctggactcgtcactgaccctgccagcagctgctacatggacagatacttcaacgagatcctcaaagacactgagcagcacgcactgctagcacacgcacagctggcatcctgcgttgcacgagctatcgcacacactcacctgcgtccacgtggacaccaagat

SEQ ID NO: 325063 - DNA, 349 bp, Zea mays
gcgacgcgtgagccgacgcctgagccgtgtcgtgcgcttcatcaatctaatccaactccaaatagtccggcggtactaacgatctaagcctacgcacaatactattcgatgtcatgtcctcgaatcctggctttatgtccagtgacgaaagcatgatccggtatttcggcccgttcaagccaccgagctacaaccagtagatatgaaaaatcctctaggagctagagctatacaagatggacctgcactcgtacgacgacaaatcagatcggtacagcatcagctccggtgcgtcgtgggagcacgaaacgccgtcgtccaacgcatggctaatgatgacgatttgcct

SEQ ID NO: 325064 - DNA, 256 bp, Zea mays
taaaaaacataaaaaaaaaaaaaaaataaaaaaaaaaaaaaaaaaaaaaaaaaaaatgggaagggaaaaaaaaaaaaaaaaattaatacaaacggcctgcctccctcatagttccaaccattccgggactcctgcatgctacttccaacctttcctttggcttcacccaattcaatttccctgcccttcttttccctaattctaaactgctttaacccctttcttccccaatcttatttgcttaacccttcatttc

SEQ ID NO: 325065 - DNA, 51 bp, Zea mays
acataaaaaaacacataaaaaaaaaaaaataataaaaataaaaatcaaaat

SEQ ID NO: 325066 - DNA, 385 bp, Zea mays
acgacatactaagacgcatacggataaacatataaatcacaatcaaaaaaaaatcacaaatgcaagaggtaaaagggccatgtcacattcgggggccagcacttcaatatcgagaattccgcacgtttagttccgctgttatgcccgctgactcgacttggccacaaacaaccactgtctccagatctccttaatcacctaccgcgaaatccctgatttcactatcatatcactatcggtatacccataggtccttatggcagcaggttgcgtcaccttaatcagccccatgacgcaaatgcccatgcccaatttggcattatcacaatggtgctggacggccgcaatattagcgtcatgctgaacatgcttgccaacgatcacg

SEQ ID NO: 325067 - DNA, 276 bp, Zea mays
ccgacctcctctcaaaggagcagcggcggcttttttttaccctcctgtggattcgttctcgtgctgcgttccgctagcccatgtctactctgtactatctcataaaaaaaaatagatccagctgagacgttgttccctccctctttccctgtaccgtgtttcatggtgacttgtgacaatggatggtttctccttgtgcgtcgcccaaaaaaaaagaaaaacaaagatgcaatgatacacaaggaaagcctaagagaagcgagcgaaggtggaagc

SEQ ID NO: 325068 - DNA, 402 bp, Zea mays
gagagagaggaggcagcccatagcagtttcctttggacatttctgggcgggtgctctgtggtgctgcgatctgctgcgcaacgacgactaccctttatgatccgctgtgctttacgccttttccctactcgatctcttctccctacttcccaatgcaagcaaacagtcgtgtgtctgcagctttactttcttggtcattcttttcttgctgctacttttacagatgtataggaccgtcaagagcactgataagccgtctgcagcaacctcatcaggagggggagggccaactgttgacggtggtggcgggtccggcgactactaccacccgagcgattggccgctggctccattctcatcagctggtcaggacgtcagcccgcacgcgttcactggacaccg

SEQ ID NO: 325069 - DNA, 452 bp, Zea mays
cccacgcgtccgatctcctgatagagactaggaaacaagaagcagacgaatcacttgaagaggaaacgggacggatgacaagcgtggtgcgtcggtggctgggtagaggagcggctaacgccgactgtatgaggctgtccgcgggtggggagctggccgcgtcggtgattggggagctggccacgccggctggggtggatggaggcgcgccagtgactgcccagcagggatcgccgtgcggctcggccgctcgggatcatcagcgtttggggagggaggcagctggcatgtggaggaggctgcgcgatggaagattcgttgcctcgttggtgatcgcgaataggttcgctcaaccgaggcctcatatttacgtcctctacgttggagtcctatgttgatttggatcaaacttataaaataacagctttttttgaatgatccataagcaagtg

SEQ ID NO: 325070 - DNA, 310 bp, Zea mays
gcgtcatctcgtaagtccactcgtccatgctgctttcgataccatccttttgcaaaatctccttggggcccgatttcacggaactcggagtacactccggcgatgagattgcctcaatatgatgaacctgaggccctgatagaaacagttgacaatgggaattatccgtacgcttctaatcttctaccgtggcgataattcgactgctaggcacgctgcttcgacaagaatgggctagactaggtcaaaatatatcgtggtgacgtaccatacctacatcttcatagtgctcaagctgttgatcatatac

SEQ ID NO: 325071 - DNA, 466 bp, Zea mays
cccacgcgtccgcccactcgtccgcccactcgtccgcccacgcgtccgcccacgcgtccgtgtaggtcttcattatcttctcaaccatggtgtcggtactgcttcagatccttgctttaggttacatgaaagatccttctctaaatcctttgacatcaggaccatatggcctcatctttgcatcttatgtgccattcttctttgacattccaatctcaatgaagtttcgcatatttggactgagcttcagtgataagtcatttgtatatttggcaggactccagcttcttttctcatctggaagacgttccattgtacctggactttctggcatattggctgggcttctgtatcgcctgaatacatttggcgtccgtaggttgaagttcccagagttcgcaacatcgctcttctcgcagttgtcattgcccttttcaagcaatccatatcaagggttaccgatcac

SEQ ID NO: 325072 - DNA, 287 bp, Zea mays
aaaaaaaaaaaaaaaaaaaaaaaaaaaaaaaaaaaaaaaaaaaaaaaaaaaaaaaaaaaaagggaaaaaaaaaaaaaaaaaaaaaaaaaaaaaaaaaaaaaaaaaaaaaaaaaaaaaaaaaaaaaaaaaaaaaaaaaaaaaaaaaaaaaaaaaaaaaaaaaaaaaagggggcggacattttagagccatgtgattgggaaaactgttggggtgacaaaaattttttttattgggtggccttttttttatggcatggtggggtttttaaaaaagtggtccgggggaaa

SEQ ID NO: 325073 - DNA, 56 bp, Zea mays
aaataaaaaaaaacaaaaaaacaaacaaaagggctgccgctatataaggatccttt

SEQ ID NO: 325074 - DNA, 88 bp, Zea mays
cgatcggagtcgggaggatgatgcctttttcgacgggggcaccaccgaaaccgactcggacgagtcctcttcgcgtggggtgggggcc

SEQ ID NO: 325075 - DNA, 128 bp, Zea mays
ctttcttttgtaatcactctgatgatatatatcgtaatctggttataacttgtaaatgttgtaacttgtaaccattttgtaataaagaatttacgctgcaaaaaaaaaactaaccaaaagcaactaac

SEQ ID NO: 325076 - DNA, 247 bp, Zea mays
ccacgcgttcgcccacgcgtccgcccacgcgtccgcccacgcgtccgcccacgcgtccgcttgtaatacagtgaagcagccaacaaagaagatacaaaagagaccagagtagcggcaacattaagtattcatcgttggctgcttcactgtattacaagaaattgctagacttggattatttcagttgttttgaatcatgtactggttgcaccaaaaaaaaaagaagagaataagaccgagggaacac

SEQ ID NO: 325077 - DNA, 381 bp, Zea mays
cggtcccgggttcgaggcacgcgtcacgccaaccttgacacagagctccttatagccgtctgactgcatggccgcctcgaccaagaccgtcgccgggctactcaccgcggggctcctcagcgctggtcgcgtgcgaggcatgccagcgtgaagctggaggaggacacacttctgggaagcctggccccagcccccgcgccggccgtcggcggtgccgcggggctgcccgtcggcaagccaggggcgtgcgccgacgacgatctggtcgatatgagcgacttaatcgggatgtgatggcctcgggatcgagctgcgcatggcgggagatggagaggcgacaagctgcgatctggcatccatgagagagaggagagggggata

SEQ ID NO: 325078 - DNA, 128 bp, Zea mays
tcgcttgcaaaatcgcttgaaaaaaatataaatgtcctgccaaatactaacaccaaagggatctgtctacaactactaacaagcaatcatctttctcatgcatcaatattcagcttaaaacatttaaa

SEQ ID NO: 325079 - DNA, 322 bp, Zea mays
acgcacgcgctctctctatcccctataatcctttgccatatattgatccgtctctgttacttcggtaagggggtcttcttcccttttcccaccgaagttcccccttctttcatcgatatctttttttcctgtcaccggccgcgacagggttccgttttccttgctccggccggctgtaaaagctttcgggcctcttaggtgcctcaaatccggtggtgctcggtcttttggtcctgaatccagtgggaagggaaagggtcgcttcagtgttgggtgactccgagacatgcctgtgctctacgcttaccgagattaccggtgc

SEQ ID NO: 325080 - DNA, 64 bp, Zea mays
gtcgacccacccctccgcttgcagaatcgcttgaaaaaaatataaatgtcgtagctattattcg

SEQ ID NO: 325081 - DNA, 271 bp, Zea mays
tcgtccacgcgtccgctcatgattccttatcccgttcgcgagcgctacacacgctatgagctggtggctgaccaaagcgagttacgaccaactccagctccatcttgattctcgatgcctagcccctgtgcttaagaacctgccatgtccagctataatactgtcttagtattctagcaagtaccacagcacaacgttacttattactgctcaatcattattggcgatacggaacatcaagtaacttcgtaaactgatgagcatcctgacc

SEQ ID NO: 325082 - DNA, 152 bp, Zea mays
tccggaatcccggtggaccaccgtcgccaaatcttaactgactttattcaggagatattttcggctcaggaacaggcctatgctgccacagtttcgaagcgtctatttcatggccccaaagccgtacgaaacaggaaaaccacttacatata

SEQ ID NO: 325083 - DNA, 254 bp, Zea mays
caccgtcgccacctacagcaccgtcgtagttgcaaattgccgacttcggccggcgcgtgccttctgtcattccccggacgagatctcactcgacgagtagcttactctcaattgtcgctatctaccccagggcaatgctccaggaaggacggcgccgtgtatcaacacagacggggcgcgcagaagccgatcaagtgcttacatgcacccatgcgcgtcagaccagcgcaggtttcggcctcgtgcagactacc

SEQ ID NO: 325084 - DNA, 346 bp, Zea mays
actagttctagatcgcgacggccgccctttttttttttttctttttttttttttggtttttggcttttttttttttttgtttttgatttttttatccctaattcgatatgctcccggtatctttttgaagtttttaaataacttgaaaaccttgggccccacatgctacgataggttgttcccattcactgatcaggggacctgccttacaaagatttgcctgtttctggttaacaaagccatccccaaagcttatcagggattacaaacttgccctttgtagtcgcaccatatcgctcaatgctcaacttttactttgacatttccatttggcaaaattccctgg

SEQ ID NO: 325085 - DNA, 282 bp, Zea mays
aaaaaaaaaaaaaaaaaaaaaaaaaaaatttaaaaaaaaaaaaaaaaaaaaaaaaaaagggagaaaattttaaaagatcaaaagctcacaccaaaataaaatacaaaaaaaatacctgtgctatagtttcactgaatcgaagttcattgccccgagtttcccaactctttctactggaaaaaccctgactcaaccaaattcaatggccttgcattacattcctacatcctcggataccctagtagcgaccaggccctaacagttcgccctatatgacctttt

SEQ ID NO: 325086 - DNA, 117 bp, Zea mays
cccctatcgcggagttacccgtgatctataccacttccaccctgatacctcgttccattcaaaagcgcccctggcatgcatgtctacccaaagctatccatactttattcttgacaa

SEQ ID NO: 325087 - DNA, 390 bp, Zea mays
cggacgcgtgggcggacgcgtgggcggactcgtgggcaagtaacattgaccgcaaacgggtcatcgtccggtgcggtcaatgtaattaactaagcttctcaatcatacatagcttggcaaatgcctgagggctagctagacaaggtccgttgagctagcccctttgggaagaagggagaggaatggcgctggtggcccgttgagcgaggaagaggctattgagaacccgttaacaagaattgccagcagcatctggacaatcttgttaacagagttccaaaggttcaattccaagcggatacaatttccgagttggatcgagaagagtgcgtgcatacgtccgtccacgttcgtggttcgtataagctaggtttcatcaaccatgggcac

SEQ ID NO: 325088 - DNA, 101 bp, Zea mays
aaaaaaaaaaaaaaaaaaaaaaaaaaaaaaaaaaaaaaaaaaaaaaaaaaaaaaaacataagtgggcggacaaaaaaaatagataaaaaggccgtccgttt

SEQ ID NO: 325089 - DNA, 353 bp, Zea mays
cccacgcgtccgctctctcgtagccgcgtccacctcgcagcagcgaggccagccaaaagtagattcggcgccgtgggcctgccgtcctccagctgaggaggaaaggcagctatcggcgaggaagggtggtggactggtggtgctagcggtggtggtggtggtggtggtggaggatcccctctcacgtcaagcgctgtgtggaaagcataaaggcgggaggaggaggagagggcgaaggcgcatagctttcccgacgcacaaagcgaaaaggcttcataaagaagaaagcttccgtcttgggagggagagcgaggcatcctgcgtgtgagcgtgcgataaatagcggctccagg

SEQ ID NO: 325090 - DNA, 153 bp, Zea mays
cttttatgatagagcagatggtccgattcacaataagatcacatgatggaatggtcgtgaacattctcttaacatgataagaaatgcacataaaatacaggctcatgtaataggccatcaagtgagaaagaaatacagaacaattgctagcac

SEQ ID NO: 325091 - DNA, 215 bp, Zea mays
tcgcccacgcgtccgcggacagtttgccagaataatggcagcagcttgctcagctccgagaggaaaccagctgtgaggttatcaggaacttgtatggtttcaatttgtttgtggtttttaacacatggcagatcgatcatcctttgcctcaaatgaagtacacatattgctagtagctcgccttctgcatgctttgggatatgtatgcttcaata

SEQ ID NO: 325092 - DNA, 145 bp, Zea mays
cccacgcgtccgcccacgcgtccgcggacgcgtgggcaaatgaccatttgcatgtgtgtgatagtgtttcttctgtttgatactttgttgcctttttctgtctgaatgtatattttgaccattgattatgcaattattttatgtc

SEQ ID NO: 325093 - DNA, 265 bp, Zea mays
aaaaaaaaaaaacaaaaacaaaaaaaattaaaaaaaaaaaataaaaaaaaaaaaaaaaagagaaaagggcaaaaacgtgaggaaatcaaatcaaaataaacacatacctccgaaattggttcaccgttatcatgcacccaaattttaatccccttgctttccacttgatagacctcttcttgggaaacctaaattcattctccagttccaatagtttacaaaaatattcctctttaaaaccctggcctaatccactttaatcccc

SEQ ID NO: 325094 - DNA, 184 bp, Zea mays
ggcctaccacacctacaccatcctgttgaacccctacgccatgaccttcttcatgggggacctgggcgttcgccggtacgagcgccggaccgagctcaccttaaccgaccgccccatgtgggtctacggctccatctgggacacctacgactggggcaccgactactgacgggcccgatccgac

SEQ ID NO: 325095 - DNA, 63 bp, Zea mays
aaaaaaaaaaaaaaaaaaaaaaaaaaaaaaaaaaaaaaaaaaaaaaaaaagaaaaaaaaaaaa

SEQ ID NO: 325096 - DNA, 290 bp, Zea mays
cccacgcgtccgctagttctagatcgcgagcgggcgcccttttttttttgtttttttgttttttttttttttttttttttttttttttttttttttttttttttttttttttttttttttttttttttttttttttttttttttttttttttttttttttttttttttttttttttttttggttattttttttttaaaattttttattattttgttgttatttatatatttagggagatttttaaaaaattaaaattttatgtttattgatttataatattaaatttttt

SEQ ID NO: 325097 - DNA, 360 bp, Zea mays
gaccatacgagaggtcaggagcagacatagtgccggcaggctatgagcttgacgacctgatggtttatggacagtggctgaaggacgctggccaacattctgtaagagccgaggatctcgctcagctggtgttgaatgttctacagatggcgattggggaagctgagaggaacacagacgatctgctggaccagttgacagagctcgactatctgctccttgtgctccacttgatcacaaacctgctgctgaacagtctcattgagcaaatcagattgctgctcatggtaccagactgaccagtaactaccacaggaccgatgttcagaacaccagcggctgtcttacggactgtgcttc

SEQ ID NO: 325098 - DNA, 319 bp, Zea mays
aatacctgtcgctcttgagtgtgtgttcgaactaagagctcaagcaatgaccattgagtcacgagggcctgccagtgtgcgcgcgtgaacaagccatgtttactatgaagcacgggaactgcattcatcatccaaagctgtttctgaaaaaccttgtcaagattgcatgattaacaaacttagagagctgatattactacacaatgagcgttgagaggtaatgttgctatacaggagctctgaacgctcaaaacgtctgaccgtgtgacttgtccatggcacgctgtcaacacttaactcgagaaacaagttgaggagc

SEQ ID NO: 325099 - DNA, 372 bp, Zea mays
cccacgcgtccgcggacgcgtgggctgggcagatgcgttgagggcgcgtatgaaagtgcctcgcaaatatctgacttcttgaccaagtatgcctacaagtgatgaaagaagtggagcgctacttgttaattgtttatgttgcatagatgaggtgcctacgggaaaaaaaaagctttaatagtattttttattcttattttgtaaattgcatttctgttcttttttctgtcattaattacttatattttagttcaaaaaaaaaaaacctgaatggtagaatgggacgcaacactgaaaaggaacataaagcacagaagatgtaaaggatacgcacaagagtgaccgataaaaaaaagggggggcctttttaaa

SEQ ID NO: 325100 - DNA, 412 bp, Zea mays
cccacgcgtccgatttgctaggatcatggataagcatttgaaggcccttgctcctgtctatgtgggaacaaaattcatcaagcttgatgctgaaaatgctccattctttgtagccaaactggcaatcaaaaccttgccatgtgtaatattgttcaagtaagtgtacaagttattcattactcctacctatttgacaatgttttttgctgtttggtaccctgcaatcttcctacttcaccatactatcatccctgtcctatttcaggaagggtattgctgttgaccggttagttgggtttcaagatctcggaagtaaagacgatttttcaacaagagcgttggaaaacattctcaagatgaaagggataatcgatgagaagaagaaagatgacgacgatgatgatgaagaaag

SEQ ID NO: 325101 - DNA, 417 bp, Zea mays
cccacgcgtccgagcagcaaaaacacaggctacctcgatctctagctatagctaccagtgtcttcttcagttccttgagaggaggagagaacccaagaatataatggaggggaagaagagcagcctcgcctgctgctgcctgctcatgttcctgctgctgtcagcgcagcagcagcaggtggcgggcctgtccaagttctgccgctgctaccggaactgctacaccgactgcaggaagtccacgggccgctacccctgcaacgccaactgctttcaggactgcatcaacgggatgctgccgccggctccggcggaggtcgtcgtccccgccgactgccgcgacatctgcctcatgggcttctgcggctccatggagatcgccggtgacgccgtggctggggatgccgaggcgtgtgt

SEQ ID NO: 325102 - DNA, 247 bp, Zea mays
cccacgcgtccgaagacgaaggaaggaggcggatattgtgtggtggcaagtttatatgctttccatccatccatccatttaattctttttacactcgagtcattgaaattttgttctggtagttttgtgattgatttggtaggttggagatgattgtagtagagatgccattgtttgtggagtaacctacaggatattgttacaattgttgacatactatagatgtgcagataattctttcaagagt

SEQ ID NO: 325103 - DNA, 341 bp, Zea mays
cccacgcgtacgcgctgctcgccttgctggcgctcctcgcactggccatcgcgctcgtggtcgtgctcgtggtgaagccccgtaagccgcaaggtcgacctagaccaagtgtacatgcaatacatgctggtggcctcgccgacgtcaggcgccagcctgcttccatcgaccccaggcgccgactacatctgcatcaacatgacgctggtcttaaccggccagaaccccaacaaggtcggcatccggtacagcacgaccaagttcgacgtcatgtaccacggcgtgccgctcgagatggcggcagtgcccgggttcgagcagcccacgcacagcacccggct

SEQ ID NO: 325104 - DNA, 255 bp, Zea mays
cccacgcgtccgcccacgcgtccgcccacgcgtccgcccacgcgtccgcggacgcgtgggaaaaaaaaaaaaaaaaaaaaaaaaaaaaaaaaaaaaaaaaaaaaaaaaaaaaaaaaaaaaaaaaaaaaaaaaaagagaaaaacaaacaagattcaaagattacatcacaaacagagcaatccaactgaataaacataaaagcaagtaaaaatcagcaaaatgcccaacaagatccaacgttcgggacagggaaaa

SEQ ID NO: 325105 - DNA, 272 bp, Zea mays
cccacgcgtccgcccacgcgtccggttctagatcgcgagcggccgcccttttttttttttgtgcaaactttctaattacactgacttatttgtatgtggatgcccttaggatattatcgtcatttgttgtaaaaaggacagaataggttttatgttcaggtgtggttaactttcaggtaaaaaaaaataaaaaaaaaaaaaaaaaaaaaaaaaggacagaagatataaaacttataaaatatactaaaaaatgcaatactgataataaaaag

SEQ ID NO: 325106 - DNA, 420 bp, Zea mays
  unsure (1)..(420): unsure at all n locations
cggacgcgtgggcgagcgcgtcagcacgctgcagaacgagccggtgggactgggtctggatgggagtgggggtccagagccgccggcgacgcaagcgcatgatgtgcctcagcatccgcaaccggagccggagccacgtctgcctcagcagcccgaggggccatatgtctatcagccgccgaagcagtcctcgtcgtcgtcgtcagggacgaagaggccagctggagcgtcgccgacgctcatcaggaggaaggagaaggcgaagaagctgctggcggtctgcttaaccctgtgctgcatcctgttctggcttctggtggtctgcatcgggctcgccatcctggtggtgtaccttctgtaccaccccaaggggccccggatccacgtgagcaccgncacgctcaacgccgggtacatcga

SEQ ID NO: 325107 - DNA, 336 bp, Zea mays
accacgcgtccgaccaaattaaagatacagttcttcggaatgtgtgatgatctatactggacagatatatatatatatatatatatatatagtatttgtttaatatataactctgctagtatatatagtatttgttctgaattcaaaaagaaaaaaaaaaaaaagcaaaaagagcaaaacaaaaataaaaaaaaacagaacagggggccgctataaaggagcccatattacgcaacccgttataggaaagcatacatcttctaaacgagaccctgaagaaaaatcaacgggccgacttttaccaagcacagggctgggaaaaaccgggcctaaccc

SEQ ID NO: 325108 - DNA, 378 bp, Zea mays
ccatttcttgagggggggccattgcaggcccttgggtgtcttatgagggagggctcggtttatttcagttggctttgcagaatactgataactagaaaaagtagtaggacctcaccttcgtgtattatgatgatgcacatacaattttctgagtagaatggatgttgaatcatagaactaatgaataatatgaacactcgccttcgccccaaaaaaatatgaaaacgggaccctgattgagaacatgataaaagaaggaaaagatgtcgctcggcaagtgactatgaagctagttcacgaagccatgattgcaaagtaaaaatgacttatttctggatcgccggaattacattgaatgaacgggaatttaaataattg

SEQ ID NO: 325109 - DNA, 383 bp, Zea mays
aaacctgaagaacattatcttgtagcttctattctcgatggaatggatagacgggctatggcgacatcatggagtgccaagcctgctgaccagactgatatgagaacgtactcttatatgcctcgtaacgccaaatacattggggaggtctctgcacactatcagattgatcatggaatgctaaatgtattgcaagagaacgctaaactactcaatcaaatacaagtaaatattttaacatcacaggagtaattttcaattcgtctagataatacttttcaggcccataacaatattgaactttttcatcacgcaagaaggaacatcaatggtcttttacaaagcatgagccaaatttcctgaataatgagcaagatgtcccc

SEQ ID NO: 325110 - DNA, 241 bp, Zea mays
cccggtcgacccacaccacgcgtccgcccacgcgtccgcttacgcattcgataactcgtacgacatcatttgcgcataccagtcggggacaaacctctcgtctgctgccatgtacaacaccttcatcataaattggaattgattagacaaatatcaattatggcatgggcgaatgcgtcttactcttatatatcatatacacacaatcttcagccatgctagtggacacatattctagtgt

SEQ ID NO: 325111 - DNA, 351 bp, Zea mays
cccacgcgtccggcagctccacccttcactcagtcttaggctcttagctctaggctctagctagccgcgccactccttcgtgtagccatcagccttctcatcgccaccaatggccactgccgaggtccagaccccgaccgtcgtggcggccgaggaagcgcccgtggtggagaccccgccgccggccgtcgtgcccgaggagtctgcccccgccgaggccgaggctgaggctgaggctgaggctgctgctcctgctgctcccgaggagcttccggcggccgagcagcaggcagccgccgagccggaggccgctgctcctgctggtgccgaggagcccgccgcggccgaacc

SEQ ID NO: 325112 - DNA, 51 bp, Zea mays; identical to SEQ ID NO: 55481

SEQ ID NO: 325113 - DNA, 273 bp, Zea mays
cccacgcgtccgcccacgcgtccgcccacgcgtccgcccacgcgtccgcccacgcgtccgcaataaccggcagcagcaatccgataccaatcacagatatacagtaagccacatctactagctcgcgggtaggcatgcacagggcgcgggcgtcgtgcttcgccgtctcggtgatgcgcagcgccagccgcgcaggccgggccataggcgagtggatcggcatcgagccgtcgacggcggactctagggcggccggtggagcggcgaacgcac

SEQ ID NO: 325114 - DNA, 59 bp, Zea mays
aaaaaaaaaaaaaaaaaaaaaaaaaaaaaaaaaaaaaaaaaaaaaaaaaaaaaaaaaag

SEQ ID NO: 325115 - DNA, 407 bp, Zea mays
gttctagatcgcgagcgccgccctttttttttttttttagtttccaagttccaaccaagaatgccattgaacatcacttgcaaattcaatacttttattgaggagcacaactttctaaggcttataaatagcccaaaaaattctcctcttctgctgtatcaggcattcagagtttcagactcacaatatgcacccttccattcagatatacgccgttgtcctctgcatcgtacccagcttcctcagctgcaatgcagaagatgccagagcaccccagacccagagcagcctggttcttggccttagccatgtcagatccctgtacaccccatcactgacactagtgaactccacaggatacgacttcttggacatcgttgagccagtgacagcatacacagacggct

SEQ ID NO: 325116 - DNA, 207 bp, Zea mays
cctcacactcgtccctaaatttatttttttaaagcttatagtttgttccacaataagtggagattttatattgggcgggatcatactactaataaagtcattaatcctatcaacttcccgatcatcttatattccaataaaaaataaatcaatacacaccatttcatataaatctaatactcttacataaatttatacttaattaat

SEQ ID NO: 325117 - DNA, 416 bp, Zea mays
cgcctgcgcgtgcaggctcaccccgacgtgccccctcccctgccctccgcgcgcgatgcccccatggccctacaccgacgcagagctcgcccatgccaccgtgcacgtgccccggcggcgtcgcgatgcccgtgtatccccgccgtcgcgcgcctacgtcagcatgtacctggagcagaagcgatttcgacagcattgccgaggagctcaccgctgtgaaagtgtgttagtcccgtcccctccaggtcctgactctacaattcacttgtgtattcccccgaagcattacgagacagtctgcacggctcctatcaagcaatgaagacaacatcatggtttgctttttcaggagcttgaagtatggtgatagaaagactactgctcagtatttaaagtgtggatgtataggtgaaaaa

SEQ ID NO: 325118 - DNA, 296 bp, Zea mays
cccacgcgtccggccctttttttttttttttttttttttttttttttttttttttttggttgttttttttttttgtttgtttttttttttttttttttttttttaaaaaaaaaaaaaaaaaaaaaaaaaaaaaaaaaaaaaaaaaaaaaaaaaaaaaaaaaaaaaaaaaaaaaaagaaaaatgagggaaaaaaggacaaagtataaaaaatacatataaaagaaataaaaagaaaaaaaattaaaaaaaaaaaaaaaaatagaataaaagaaaagttaaaaaaatttatatgaagt

SEQ ID NO: 325119 - DNA, 240 bp, Zea mays
cccacgcgtccgcccacgcgtccgcccacgcgtccgaaaaaaaaaaaaaaaaaaaaaggaaaaaaaaaaaaaaaaagaaaaaaaaaaaaaaaaaaaaaaaaaaaaaaaaaaaaaaaaatataaaaaaaaaaaaaattaaattaaaaaaaatataaatatataaattttatataaaattaattaaattgaattaaatgtaaaaaattttataatttttaaaatggtaaaaatttaaatatt

SEQ ID NO: 325120 - DNA, 223 bp, Zea mays
gatgttccaagatgtactcagacaacagtgaacctacaggatctccagaacatcgtgggggcatctaaggagctgggcaaagtacttgccaacttatcgtgaccctgacaacttaatctcgctagtgcattactcatatctgctcctcctacaaatccttactctaccctatctttcacattaacgctaatcatcttgatggtctatacttcatcgtttacta

SEQ ID NO: 325121 - DNA, 371 bp, Zea mays
cccacgcgtccgcccacgcgtccggcctgggccaccagcaacgagtcgctggagaatgccttcgcctcctacggcgagatcctcgactccaaggtcatcaccgaccgggagacggggaggtctcgcggcttcggcttcgttaccttctcctccgagaactccatgctcgacgctatcgagaacatgaacggcaaggagctcgacggccgtaacatcaccgttaaccaggcccagtcccgtggcggtggcggtggcggcggtggctacggcggcggtcgcggcggcggcggctatggtggcgggcgccgtgacggcggttatggcggcggtggcggctacggcggtcggcgcgagggtggtggcggcggcta

SEQ ID NO: 325122 - DNA, 398 bp, Zea mays
ggaactagttaatctatagacttatatatcgtaatgtgttcaactggtggagccacagatttagcactgttgtaaatcggaaatagtgagtgatatgatcgtcggaagcatagcacgcaaaaacaagaaatgggacatggggtacatccttgagtggatgaatttatgctgtcatatagagcgcgaagtctgcttcctgcgagacaaaaagctatatgacgttcatacaagatggtgatgcaggatataacataagatcattgcttgttcagagaacagcgacatgtataaaaaatctatgatggtattactgcttagatgtatatttgagactgataagggcgatgtattcttggagataattgaatatttattagaaaaggggatgccgctctaaa

SEQ ID NO: 325123 - DNA, 407 bp, Zea mays
gccactcgtcagacgaaatgacaatcatccactttcaacacgagctgcatataatggatgggtgagtattgagcatggagctggaagcagcattggacaatatgcctttgccaagttcagacaatgggagctcaccgacatataccatgtgtgcaaacaatgtctagtcttatgggaataggggcaacacgctgtgactggtaatgcgtgtgcaactactgtagcgaggaacgctgtgcatatcttgcatattgcaacatgggccgaactgataaagaatttgatgttgacgctgtagtgttatagattgctgatagactattcagttgcaagatatgttactgactgttctagctccttcctcaaggctgcggtttgagttctttcgattctgcattgtatatgct

SEQ ID NO: 325124 - DNA, 296 bp, Zea mays
atcatacctacagtcgctcacagaaccttctacatgttcgccgtggcgatatcacatgcttggcacggctacggggcgagtccttcgcttatacaggagctcgacctgggcgagaacctgctctccggcgtgcttcacccgacgcttttcggtcacctaaccaagcttttgaagctgtagattcgatgatctctagtgatctcgtctctagtataaccaactctatccttgcacctatgtgttaggtacggatcagtaaaaacagttgctgttcaattcgacatatgtgcataatt

SEQ ID NO: 325125 - DNA, 329 bp, Zea mays
  unsure (1)..(329): unsure at all n locations
cccacgcgtccggcaaccggtccagcactttcacgctcagctccagcaatggctgcctccaccatggcgatctcctccacggcgatggccggcacccccatcaaggtgggctccttcggcgagggccgcatcaccatgcgcaagaccgtgggcaagcccaaggtggcggcgtccggcagcccctggtacggccccgaccgcgtcaagtacctcggccccttctccggcgagcccccgagctacctcaccggcgagttccccggcgactacggctgggacaccgncgggctgtccgncgaccccgagaccttcgccaagaaccgcgagct

SEQ ID NO: 325126 - DNA, 165 bp, Zea mays
actcaatttgtgcacatgcttgtacaggatgtgaacacctgaaccatcgacgctctgggacagctaatgagttgttcacgctacgacgggctgattgggcaagacacagtgacctgcatgaatatggtaatacgtctacgaatgtatgcagccacttgcacaatg

SEQ ID NO: 325127 - DNA, 94 bp, Zea mays
cccacgcgtccgcagagatgtaatatttcacttggtctttgatctttctgtttgcagtatggtacacattgattactcaacaaaacatactatc

SEQ ID NO: 325128 - DNA, 390 bp, Zea mays
cccacgcgtacgcccacgcgtacgcccactcgtccggtggagtaaagttgtgacatgcatcgttaaaaaaaggaggaaaaaaaaatagaaaaaaaaaagaaaaaaatatgataaaaataaaaaataatataattaaaattaaaagacgcaatagaagatgaaagagcgaaaagataactgaaataatacagacagaaaatggctgtagcttttgaagatctgattgtagtggcggtggaagctaagaaggtgggagctgaaaggaatgcactaattgagagcttgtggtcttattacaataaatgtgtaggcggtgtagaataccagttgcatagtatcttgcgcaattttaataaaagacggattccattggatggtgataatggaaaa

SEQ ID NO: 325129 - DNA, 388 bp, Zea mays
cccacgcgtccgcccacgcgtccggaccttggagacagccttgcatacaatagtctgaagggcttaattctccgcaacacttttagggcacaaaagaacgctgaagatgaaagctgcgtgatagccctcggcaaccttcggtcagaagttatcaagctgagaaatgaagccttggagaaggacaaaattctactttcattggtggatagagtgaaagaagatgaatcaaagttgaacactcaatccgaaacttataaagccgaaattgaagaccttcagaaaaaacttgctgaagctaatgagaactttgcacttgcaaaagctagccaagaaattagtgaatggtcgaaaactagactagagaaaaatgttgaagagcttcgtgaat

SEQ ID NO: 325130 - DNA, 291 bp, Zea mays
cccacgcgtccgcccacgcgtccgcccacgcgtccgcccacgcgtccgcccacgcgtccgcccacgcgtccgcccacgcgtccgcccacgcgtccgcccacgcgtccgggatccacgaaattgtcgctaatggctaaaaacaatggtagtatcttttttttactccttttcttttggctttcatgctacgggaagtttgaggggattcaattaattagagtatatgtaagtttggtttccagtcgaatctatcattcgttgcaccatcattcttccttgacacagtacacc

SEQ ID NO: 325131 - DNA, 421 bp, Zea mays
ggaagctggaaatgtccccaatggtgacgaggcacatcatccagcagaggctacactggacctcgctagagagcgacataagcttgtgatcgccaacgaaatcgatcaagtgaatgagaggctacaggcccttgaggcagacagggagtacataaaacagtgcgtgagggccttgaaaaggggaggcgaagggttcgatcttctccaggagatattgcagcatcttcgggacctaagaaggatcgagcagcgcggaaggaactctggggagctttcgcctcattacctacatctttacacggactgaagatcagctgcaaagtctcgtgcccaatattgcttgaagatggaaaccataagacaatgataatggggggggggggggaggattgtcgactaataactagcattggcattggag

SEQ ID NO: 325132 - DNA, 340 bp, Zea mays
tcccagacatcgagctctaccacatcgactccgtgcacgagctcaactcgtccggtgggctcgacgggtgggcactacacctcactgcatgaacgacctgacagtgaagcactgctgcatgtgccacacggagtctttcaatgaccttcctaatgaccgcctgttgacccagaccaactctgctgcgtcacgcgccaatagtcgctccccatcgccggcgtctgatactcgtccacgggatacacctctgccgcactctctccctactgcgacgccgaggacatccatgacatcgattttcttcctgacaaccgcatctagctcgagcaggtcattcatc

SEQ ID NO: 325133 - DNA, 54 bp, Zea mays
cccacgcgtccgcccacgcgtccgcccacgcgtccgactagttctagatcgcga

SEQ ID NO: 325134 - DNA, 388 bp, Zea mays
cccacgcgtccgctctgcttgtagaccgccgatgggtcagcttacaagcaggcgaccttagtcatcggagtcaacacgcgtgactgatgacgctagctgttgtctacgctgactgcatgtgtctagtcgataccttatgcctgtacgctaaactgtatagccagatcagatgctgacgaatatgtactgttagctaggacctgtgtgatcgcatgtacagctactagcatatcagctttgtcgcatgtaaaatgcaagcccaaagttgcagaacccggactgctcgtacaagtacatggtgaactactagctacaaggctgtaggcagagtctctgtcgactgtaactgtatgtcatcgattcactccagatgttaacttggcgtatc

SEQ ID NO: 325135 - DNA, 113 bp, Zea mays
aaaaaaaaaaaaaaaaaaaaaaaaaaaaaaaaaaaaaaaaaaaaaaaaaaaaaaaaaagggaaggaaaaataataaatgaaagaaaaaaataaacatgggtgtccactttcgg

SEQ ID NO: 325136 - DNA, 401 bp, Zea mays
  unsure (1)..(401): unsure at all n locations
cccacgcgtccggtgggcttctaccgcggtcttcgcaggccacgcgctagggtcccgctggatgcgccggcttctgcgtagccaccatcgaaggtccaactacctccgcacataaacagttgcgccaccacactcccagaatttctcccccacagcagtactaggtgcagagaacccccttcctccactcgacgtccagccatggcgcacgtcacacaagtctacttcatgttcgagctcctccatggacgcagggatcttccgcggttcagggagttttatggccgaaggcttctgctgtgtcaccacgggtcaaacagcgagggaaaacgcagagagagaggaaggagatggagccggatgtcgctgccgcgtnccacacggagagatccagaagaaga

SEQ ID NO: 325137 - DNA, 413 bp, Zea mays
cccacgcgtccgcccacgcgtccgccgtcacccaatacttgcaagcagggacttcttcagcgttgtgccgccggcagagaaggacgactacgatgatctgttcaaggtgcccctgtgttccctgccaagccctacaactacaagaagatagctgatctacttcgtgccgattgagctaacaaaggtgaagggacggcaagtcaatgccacggtctgcctccctgatgaatctgcgtccgtcttttgccgcatccgagaccaaaagggagagtccctggtatatgggctccactccatctcgtggcttctatagctagtgaaagtactacgccggcgagctcatgcgcagcatcgaccgcgccgaccagccgtcgggtgacatgtcgtcgagggcgatgactagcgccatggac

SEQ ID NO: 325138 - DNA, 125 bp, Zea mays
cccacgcgtccgtgatcttgtaatttgctatagggcagtatggcaatatctatggtatactcggatctaagataaaagcgagctgaccaaagcattaaagcagagatggacctataactgaataa

SEQ ID NO: 325139 - DNA, 284 bp, Zea mays
ggccagaagagctgaagtattatttctctactttatataaatgatttttatatggcagctacttttggaaccgttgatgtgctttggatgtgaaagtttttggacatcagtcggcaatttgacagcactgtacgtgttagttgtcgttaggatatgtctctagccgaaacgctagatccgccacaatgtctacgccccaactgtttttcttaaaaaagtgccgcaactgtttttctaaaaaaaaaaagagaaataaagaagtagatgcagaacaccaatttttt

SEQ ID NO: 325140 - DNA, 306 bp, Zea mays
acacaacacaccatgtctcgtagcttgctatttctagcggaggctttctatgatgatacttcggtattgaaccagcctagtgcgatgaaagtgacagaaaagagtcttgcagaaacattttctgagataatgaaaagcgctgaaagagaacgagctctaaatatgctcatttcactattgtgttcacattggctagcatggaagtgctgttattaggaaactgccgcaactgtatttctaaaaataaggattatctcaacttaattattatgcaacaaattaatcatttatgacaaatagggctat

SEQ ID NO: 325141 - DNA, 455 bp, Zea mays
gggagcatgaagaggcagcgcatgagcggtgcgcatgagcaaggttcgctttagtgtgctaaaactagctagtagctgcctccctcgatgcaagcatgaaatatgcaagcatgcgtgcatggctagctagcttctcaaactcaagttattaattagtatagttataaagctatatagccacttcaaacttgggacgagcgagctgaatcttctgtttttgttactatggtatggtgtgtgcatgaaggaaagaaaatgggaacacatggacatgcaagttgattagtaagagagtttcattgtatcccttatatatctttgtggtgcattattttttacttagttcgcgtatgtattattgtggggagtgggggaaatttgaagggttactgataaaccgctcgtaacatggggggtggtaagggtgtacacatgtataatctctggggtattat

SEQ ID NO: 325142 - DNA, 368 bp, Zea mays
ccgaggcttaagaggcagttcatgaacgatgcgcatgagcatggctcgttttagtggacagggactatcttgtagctgtctgagatgatgcaagcatgaaatatgcaactatgcttacttgggtagctagatcataacactcaacttattaattaacatagacataaagctatatccccacttgaaacatgcgactatcgagctcaatcttctgccattgctactatgatatgctatatgcatgacgacaccaatacgactataaatagacatacgctctgatgagctctgagagtgccgattggactgatcatatatctttgcggtgcattattctgtacagatgttggctatgcaagatgcaacgg

SEQ ID NO: 325143 - DNA, 69 bp, Zea mays
aaaaaaaaaaaaaaaaaaaaaaaaaaaaaaaaaaaaggacgaacgaatctgaaggatcgaaactgacaa

SEQ ID NO: 325144 - DNA, 428 bp, Zea mays
cacgtacacactaatggctaattcggatcaccgttaatccatgtgtattggctggtactgcggccacatagatcctgcgatcatccatatcaagctaaaactcattgtaatttatttcactacactggactcctcatgtctgtagaatgactgctcaaggtcttcagtgcgtcatactattgcaaacactcagttgatcattgtctaaggcatactacattatacttgtacactactcagcctatacgtccatatcgcttatgatgatcgccagctactcatgacataatacttttgattatctatactactacataccctattaagagattaagacagctagctgtcgatacatgtacgtgatatctcaatattactagggctcctaaagagtatcaccatatacatgctgtaatcggattaaacta

SEQ ID NO: 325145 - DNA, 68 bp, Zea mays
cggacgcgtgggtcttgtttaacaaacaaaagacagaaacacataaacaaataaaggaaaatggaggt

SEQ ID NO: 325146 - DNA, 238 bp, Zea mays
  unsure (1)..(238): unsure at all n locations
tgcacgtactcggtctcgtgaattcccgtggtcgactccacgtcgtctcgtcccacgtcgtctcgctttcaactggttctcttcgctcgctctgttcttagnnttctcgttttggggccttgaggggtgcactgnntggcggtgtgaaggggcttccctgggtctggtggctnggttggttgggttcaaatgtcgnnatggcgcnnaggtgtnnngctgcgatctttcggctcgtagc

SEQ ID NO: 325147 - DNA, 426 bp, Zea mays
gcagatcttcgtgaagactcttactggcaagacgatcacccttgaggtggagtcctcagacaccattgacaacgtcaaggccaagatccaggacaaggagggcattccaccggaccagcagcggctgatcttcgccggcaagcagctggaggatggtcgcaccttggctgactacaacatccagaaggagagcaccctccacttggtgctccgcctcaggggtggcatgcagatctttgtgaagacattgactggcaagaccatcaccttggaggtggagtcgtctgacacaatcgataatgtcaaagccaagatccaggacaaggaaggcattccaccggaccagcagcgcctgatctttgctggcaagcagctggaagatggccgtaccctcgccgactacaacatccagaaggagagcaccct

SEQ ID NO: 325148 - DNA, 166 bp, Zea mays
agcacggtgagcataaagctgggcttgccgcaccggaacgccggcgcggacgagcgcagcgagagctgcgagccggctatggacgagatacaacgcgaggtgtactcgaataaaggcgtgatgcttcagctgatgcggtggacacgtccgcgatgggccacggttg

SEQ ID NO: 325149 - DNA, 201 bp, Zea mays
aaaaaatgtcagcgtggttgaccttaagaagcataacaagcatgaaggatacctgaaactaggtcacaaactgacatcacacagtccattgaaagggttactggcttagggtcccgttaagttggctgtagtgctttgcagacgaacttccaacaggaaatgctctggtcgtgagaaaaaaacttagggacctgggaaatc

SEQ ID NO: 325150 - DNA, 304 bp, Zea mays
ggacatatctacatatttacatggtgcttgcaaatataacaaaggagaagataggaaccgggagcataacatgacatatcacattccatgaaagggctcactggattaagttgattcaagtctgactgtacagctgtgcagactaactaacaacagggactgcgctggtcatcgctatacgactaaggaccgtgggaactccttataatccactgatccaacacatgcttgctgagtaagatcttactgaattttaccgtgtgctgtaaacgactggaactatactgtttttctattctgatga

SEQ ID NO: 325151 - DNA, 229 bp, Zea mays
cccacgcgtccgaccacgcgtccgcccacgctttcgcccacgcgttcgaccaatctagatcggcgtcattgtccttatagatctccttgcacctcgttgccacacctatccccttatatccaccaagggtacatgatacttcataattgctgcgatgctggcacatctgcacactcatgcggttcactctgacagaattcgcctctaagcacgactacattctactaca

SEQ ID NO: 325152 - DNA, 433 bp, Zea mays
  unsure (1)..(433): unsure at all n locations
gcagcacctgcaggacattgagaaccagccagctaaccaaccaaccaaccggcggagccaaagccaagaaggaaggcaacgtgcccatccagtcaggatgtgcaactccaacgtcaagtccgcgggggtggcccagatcgacggccgcccggtgctgcagccggcgggcaaccgcgtggcggcgccggagccggacgcctcccgcccgctcaagaagtccctacagaagtcgctctccatgccggcctactacgacagcaatgccaccgcgggcgcccgtcctgcgccggccgagaacacccgcgcaagcgcagcggcttcgtctccgctgcctnccgcgaaagcgacgaatgcagctggcgctttacccgcggagaagagcggcaggcccaaggcggccaggatgccaggcgccgttgccgccccggtggtg

SEQ ID NO: 325153 - DNA, 262 bp, Zea mays
ctgcctacgcgcacctttcggccacggcgctgttgcagaaggcggcgcagacgggcgccagcgtcaccagcgcgggctacacccacatggcggcgcccgcgacaagcgccaccttcagcctcagtctgccatacctgcagaatacccagccacaccagcatcaggacggcgggatcatggccgggctctctaggacaggctcccacagccagtgctgcgaccaacgcgcggtccagaagcggacgcgaccgactgaccagtg

SEQ ID NO: 325154 - DNA, 292 bp, Zea mays
aaaaaaaaaaaaaaaaaaaaaaaaaaaaaaaaaaaaaaaaaaaaaaaaaaaaaaaaaaaaaaaagaataataaaaaaaaaaaaaaaaaataaaaaaaaaaaaaaaaaaaaaaaaaaaagtaaaaaaaaataaagtgtaatattataaataacatatatttaaaattttaaaaaatttgttggctgcttcgttgattagcatttactgcatttggattaagaagggattagctttgtaaaatctgtcggtaaaatattttattggtatgtgatttttaacgctgttaataaat

SEQ ID NO: 325155 - DNA, 441 bp, Zea mays
tgcctcgtactcgtctcggaattcctcgtgtcgactccacgtcgttccgctccacgacgtctcgaaaagaaaaataataatagaataataaataaaaagaaaaaaagaaaaatataaaataaaggagaacaataataaataagagtctataaattaatataatatataagtatgaagaaatatgaaaaggtatataatatacggtgttatggaatttgtaacttgatcgtgctatctttttgctgatatgtggtgtgtgctagaggtattcagtgtgttcttactgtacatgcatagtgtgcgcggtggacatggaggttgtggtggaaagctttatttgcttctggaacataggccttttatgtgttcctttactctatcaactacttggtgcaagatctgaaaagcttgaatggaccaggttctggtagtctatacatt

SEQ ID NO: 325156 - DNA, 308 bp, Zea mays
aaaaaaaataaaaaaaaaaaaaaaaataaagcaaaagaaaaaaacaaaagcaaaatggaaaaaccaggacagccggtcttgtggatccagagcttgggacgcgtgtctagagacgcctatctcttctatggcgcatgctagatgactaccactggctgccgtgttccaacttcgggtctgggaaaaccattttcaatgcccagcttattggccttgcagctcatccccatttcgccgagctggtgtaatgcccaagagtccctgaccgttcgtcctttccaacagtttgcgcacctgaatggctaatg

SEQ ID NO: 325157 - DNA, 271 bp, Zea mays
agaaggcctcagacattgctggaattcttcatcaatgtctatttgtgatcggtatggtagccaagtgctatggtacgcggtcccgcacagaggttgagttctggttggctggaaacttgcgtgcactgcaagctaagacttgaacatgaagcactattgcatgtgtgtgtattctcatttttttattaaccatctttttggtcgggtctatacaagtgtatttaccccattgcttagcagcaaagcattaccaatttggatcaaaacaatt

SEQ ID NO: 325158 - DNA, 366 bp, Zea mays
  unsure (1)..(366): unsure at all n locations
tgaagcagaggagtattggcatgatgctagaaaagacccagcaactcattcaattgatggtggaatatcattaaatgacattgcagaatttgatggtggggcaacaactgaagaaaggagcagcctagagaagcaccgatctgatgagggtgtgaagattgctgtctcccagaattttggtagtatgaatgaaaaagtggcaattgcacctacctcaagttttgagaatcaagaaggattgcagcagcctcgtgaagttcttccaaatgctaaactaagcaaaaataatgaccaagagaacagtgatgtgcatgatatacaagtggttgctacatnctgtgattcaaaaggacacaagtttggatc

SEQ ID NO: 325159 - DNA, 304 bp, Zea mays
cggacgcgtgggcggacgcgtgggctagatcgcgagccgccgccgcgccttggcacccccttcctccgtgtgagaccaagaaccatgggcttgtcctggattagcggtgtctttagttaaaattatcagtgagtagtagctagcttaagcagtgctccgatccgagatcagttcttccagcagacctgtgtaaatgagagtctcgccgccccgccccgccccggtgtaacgcatcgtcatgtgtaaaatctatccggacccgataaagttttgcccttctgtcaaaaaaaaagaacaacgatgc

SEQ ID NO: 325160 - DNA, 279 bp, Zea mays
cgctcttctccctcccctcgctctcggcggtcgacgtgcgctcccctggtgccatcgcttgtgcccggctcccgccatcgctggctccccgatggacctcgcggctagtgtggggccatggatccccgacggatcgagggtcgcgccgcctcatgagaaaaatcatctttttggctcgaacagaaaatacctgaagcttcaatttgacatcgtgtagcaatgaatgcgtgcaaagaatgctcttttacatgttgagaaatgagaaaaattagatgtcgt

SEQ ID NO: 325161 - DNA, 243 bp, Zea mays
cccacgcgtccgcccacgcgtacgaggacgcgtaggcggacgcttttgaagaggcgtctaactgtcagaatattatggcttgctgattaccatagatatatataaatgtactgaacatatggatttattgaaatcaggttaatgattaatgaacatcaggatcatttaatacatgaattagctgactaatcattagatatgtaaattgagatattatgaggaagttagtataacacatgatag

SEQ ID NO: 325162 - DNA, 361 bp, Zea mays
acgcccacgcgtatgtcgagacgttaatatcgatctctgctgacactattctctcaatgggactggtgttgtcactgggcagcgtttaacatggtgactttgcagaggagtccgtcaagagcagaacgaacgctaacattgcgagtactgtgacgccgtgcatcgaaagggtgaggatcaatgctcaatgggtcaacaacatgaaggacgaggctgactttggcaatgttctcaagaacctggcttactagcactgatcatagaggctccacttagatttctgggttattgctaatacctttatgtaaccttgttctttggaattagtcgattaataattggcacttttgtatgtttatta

SEQ ID NO: 325163 - DNA, 389 bp, Zea mays
cccacgcgtccgcccacgcgtccgggagtcggccagaatttgccgtagctctcgcccccgctcgccgtgcgcttctcgtcccattcccccgggatcgtagattctcgagctgagcagagctgagctgagctgagcgatggatcgcgagctcagccccaggggcaatgctccagggagagggagcggcggcgcgtcgtcatcgaagcacaagaacggcggcggcggcaagaagccgatcaaggtgctttacatcgccaaccccatgcgcgtccagaccagcgccgagggtttccgcgccctcgtgcaggagctcaccggccaacacgccgatcccttcaagtactgccccgacgaccttgactccggcgctgccgcacagggtctgagcc

SEQ ID NO: 325164 - DNA, 308 bp, Zea mays
tcccactcttcctcccactcttccttccactctttcgaaaaaaaaaaaaaaaaaaaaaaaaaagaaaatgagaaaataaaaaaaaaaaaaaaaaaaaataaataaaaaaaaaaacaataaaaaaaaaaaaaaaaaaaaaatataataaaaaaaaataaaaaaccaaaaaaaaaaaaaaaaaggaccccctttttaaaaaaacaaatttttattacccttgaatccaattttaaaattttttttttgggaaccaaaatttaaattaatttgcccgttttttaaaaaatccaactttaaaaaacctttat

SEQ ID NO: 325165 - DNA, 414 bp, Zea mays
ggttggcttctctcccctccggtcgggttcgggttcgagaggttctccggggttcgggtcggggtgagcggatcgagatggcggcgtcggatgttgagtaccgtgttcgtcggcggcctcgcctgggccacggacgaccactccctccacaacgccttcagcacctacggcgaggtcctcgagtccaagattatcctcgatcgggagacgcagaggtcccgcggcttcggcttcgtcaccttctccacggaggaggcgatgcggaacgccatcgagggcatgaacggcaaggagctggacggccgcaacatcaccgtcaacgaggcccagtcccgcggcggccgtggaggcggcggcggcggctacggtggtggccgtggaagcggcggctacggcggtggcgggcgccgtgat

SEQ ID NO: 325166 - DNA, 319 bp, Zea mays
cccacgcgtccgagtaatcttcggagggggtgcaaagttgttcgagccccaatgttttagatgctctatgctgtcgaagctgtgctgtgccattattgtagctgatttcgtctccattcacttcttttttcttgttagtaggctggtagtggtcgaattaatttgctttgtgttgccgctagtccatgtggactggtattgttcccctggatttatttggcaagcgtgtccgtgctcgctctagcgttttattgagcttttaaagtcatcgcattcaaaaaaaaagacaagaaacaaaaaaaataaaaaataaaacaca

SEQ ID NO: 325167 - DNA, 431 bp, Zea mays
  unsure (1)..(431): unsure at all n locations
cccacgcgtccgcggacgcgtgggattcatttcatctgctccatctccctctttgttcgccggcgtataataagcttcccctttctgcaactgatctgatccgggctgccgtgagctctgctcgctctgatggagttcaagagggatgtatggagcctgctcctcgtgctgctcctcgggcagctcgtcgccttctccatggccgcctcaagcttcgcctcctccctcattgctaatcttggagtcgatgccccactgacacagtctttcttagcctacctgttgctgaccttagtctatgtaccaatcgtcctgcgtcgacggcagaagctgcaaatagcttggtactggtacctagctctggccttctttgatgtacaggggaattatctngttgtgaaggcgtaccagtactcatacattaccagtgt

SEQ ID NO: 325168 - DNA, 456 bp, Zea mays
cccacgcgtccgagaacgggggcggcaaaagcggggccaagaacggcaagggcggcggcggcggcggcggcgtcgttgccccgggcggcgggaaccaggctgggcagggcaagccgaaaggcggcttccccggcggcgccggtctcggcgggccgatgatgggcggcgcgccgccgccgcatgcgggcatgatgatgaggccgccgaacatgatgggcggcgcgggcggtttccccggcatgggccagatgggcggccacccccacatgggtggcggcggcatgccgcatgcaggcgggggcgccgcgcacggcatgccggctggtggcagcatcagcatggccgctggcggaatgcctggggccgggttctttccgcgcggcgttggcggcggcatgccggccggcgcggagatgctgggcatgtcgcagctgcctccgcagcaacagcagcaca

SEQ ID NO: 325169 - DNA, 450 bp, Zea mays
cccacgcgtccggcagctcgtccccttccccccacttcttcctcagataaggagaggccccaggccagagaaaaaagcatcgaatttccccccccgttaattggcctgagccctcagccgtctaccagcagcagctagaggcagacaagctaggttttactgcttcattgagcacaaagatccgctgacctcttggtaaaaatccaaccttttttgtattgttttcttctgggaaaacctccttgtggtgcataaactgcgtagtacactctacaatttctggagaggaagctgagaactactatccatatctggcacgacccttgtcaagaaccatggctgttcacttgccatgaagctgcttgaactggaggcacctaaatgctgtggattgttcctatgcagatgatcggatcagtggtttcaggctccggggggttcgatcagatg

SEQ ID NO: 325170 - DNA, 289 bp, Zea mays
actcttacttagactctcgcttctgtggcatcatcagcttcacgtcaggacagtcttctgctgcggcatgagcgttttttaccctggctgcgataaccacttctgttcatgtcaagccgaaaggcgtcttccccatctgctccagtctctgccgtcctatgatgggctgctcgccgtcatctcatgctttcatgatgatgatgcctccgaacatgatgggcgtctctatctgtttacccagcatgggccagatggtccgtcacccccacatggttggctgctgcattcc

SEQ ID NO: 325171 - DNA, 213 bp, Zea mays
acgcccactcgtccgcttatgaacaatcttcactatatggttacgtctgttagcaaatcagaatggaaaagtatactcggtggtgagtggattcagagacaccgtaagatcgtgcagcaaaacgcttatcagtacatgagggtatcatgggcaaagattttccagacactctttattcaatgtttatagtggcattatttcttcattaccatt

SEQ ID NO: 325172 - DNA, 100 bp, Zea mays
aattctccgtgtcgactccactcgtacgcccacgcgttcgcccactcgttcgaataaaaaaaaaaaaaaaaaaaaaaaaaaaaaaaaaaaaggaaaagaa

SEQ ID NO: 325173 - DNA, 182 bp, Zea mays
ctttattgttacgtgacgtgtactggtatgttgtggtatggtttagcctgggttatcttgtaaaaggatctgaagtggttaaataatcgtgggtaatttcgtttttaaaaaaaaaaaaaaaaaaaaaaaaaaaaaaaaaaaaaaaaaaaaaaaaaaaaaaatataaaaaaacaaaaaataaa

SEQ ID NO: 325174 - DNA, 304 bp, Zea mays
aaaaaaaaaaaaaaaaaaaaaaaaaataaaattaaaaaaaaaaaaaaaaatgaacatgcggaaggaaaacatacacactagctgaactaaaatttcaaaaatctattaatttcaattgttcttcctaagttcacactattgcccttcaacttttcaacttgcatattactagaatccttcccatataatacctacgtatccttccgctgttcaccttttcagcgtacaacgtgatactatgtgctaccttcctttctttccttaatctgtgctgctctcttacatgctttgactgttctatccc

SEQ ID NO: 325175 - DNA, 277 bp, Zea mays
cccactcgttcgcccactcgttcgaaaaaaaaaaaaaaaaaaaaaaaaaaaaaaaaaaaaaaggaaaaaaaaaaaaaaaaaaaaaaatataaaaaaaaaaaaataaaaaaaaataaaataatatatagagactccttaattcatccaaatttccataccttttacatcgtaagccactggtataacactggggttcccaattttaatcagtctggccgcatattcaaaattataccatctggtataactctcaaagtttcccaattcatatcgcttt

SEQ ID NO: 325176 - DNA, 342 bp, Zea mays
cggacgcgtgggaaaaaaaaaaaaaaaaaaataaaaaaaaaaaaaaaaaaaaaaaaaaaaaagaaagaaaaaaaaaaaaaaaaaaaaaaaaaaaaaaaaaaaaaaaaaaaaaaaaaaaaaaaaaaaaaaaaaaaaaaaaaaaaaataaaaaaaaaaaagggcgccccttttaaaaaatcaaatttttcttaccgttactttaaattttaaaatttttttaaagggcccccaaaattaaatttattgccccttttttaaaaacttttaatttggaaaaaccttggttttcccaaattaaatccctttaaaaaaaaacccttttttccaaattggcttattacc

SEQ ID NO: 325177 - DNA, 63 bp, Zea mays
tgaacctgttgtctgttcctgttgaaagatttcccattttaagtgcaaacctgagtttctccg

SEQ ID NO: 325178 - DNA, 70 bp, Zea mays
aaaaaaaaaaaaaaaaaaaaaaaaaaaaaaaaaaaaaaaaaaaaaaaaaaaaaaaaaaaaaaagaaaaaa

SEQ ID NO: 325179 - DNA, 276 bp, Zea mays
aaaaaaaaaaaataatatacaaacaatacattatcataaaaataataaaaaaaaaaaaccctggtggagaaccaaaaaaaacttaataactaaaaccctcttaaaataaaaatccaacctttcaaaagccaataatcgggattatcattcacacattcaaattcctaaattacctaacttatccgaccatgctcaccttcttctaccacaaatcaatgatccttccccaattttataaatttactgacatgctaatattcacactttcccaaatta

SEQ ID NO: 325180 - DNA, 261 bp, Zea mays
cggacgcgtgggcggacgcgtgggggcgaattcttagacttggttaataagtaatttgtgagtggcgtattcacaaaggattttgtcgtatactaacaatgcccatgcatgtttactccgtaagtgcattcctaatcatgaagattatccaggatactacgagcataacaggattcatagggcaaaccacatgccgattctacaacgggcttaaaatccccgacattatcaacgatcaacctttaccccaacctgctctga

SEQ ID NO: 325181 - DNA, 90 bp, Zea mays
cgacgcacattgtatcggcccctttagcgcggctgacgtggtgattacacgcaacacatacgttgctcttgacatgggcctaacacacga

SEQ ID NO: 325182 - DNA, 420 bp, Zea mays
acggttggcttctcctccccctccggttcgggttcgggttcgtgaggttctccggggttcggtttcgtgggtgagcggatcgagatggcggcgtcggatgttgagtaccgctgcttcgtcggcggcctcgcctgggccacggacgaccactccctccacaacgccttcagcacctacggcgaggtcctcgagtccaagattatcctcgatcgggagacgcagaggtcccgcggcttcggcttcgtcaccttctccacggaggaggcgatgcggaacgccatcgagggcatgaacggcaaggagctggacggccgcaacatcaccgtcaacgaggcccagtcccgcggcggccgtggaggcggcggcggcggctacagtggtggccgtggaggcggcggctacggcggtggcgggcgccgt

SEQ ID NO: 325183 - DNA, 270 bp, Zea mays
tcaatcatcgttctcttaatattagctaagcctcgggctcggccgctacatcatcagccggcatctactactacagatccacatgacttctttaaacccttcatcgtaacgagatcagatatattattatatgtcaagagagccccaaaatggttctatgtatgtctgaaatctacctacttgaactgatgaaaatatattgtatgaatatttttgcaccatatgcttgttaaataaagactaatatgactaaatcgatcaaaaatttat

SEQ ID NO: 325184 - DNA, 383 bp, Zea mays
cccacgcgtccgcccacgcgtccgatcctcgatcgggagacgcagaggtcccgcgggttcgggttcgtcaccttctccacggaggaggcgatgcggaacgccatcgagggcatgaacggcaaggagctggacggccgcaacatcaccgtcaacgaggcccagtcccgcggcggccgtggaagcggcagcggcggctacggtggtggccgtggaagcggcggctactgcggtggcgggcgccgtgatggcggcagcagctacggcggtggcggcggcggctacggtggctgcagtggctacggtggtggtggtggcggctacggcggtggcaaccgtggcggcggctacggcaacttcgacgggaactggaggaactgagcggt

SEQ ID NO: 325185 - DNA, 358 bp, Zea mays
tcgggaaaccctagtccgtcatatctcacgatccactctagcaccaatcctagggaaggtgaggagcgatggctctcggcgtggtgtcggcgaagggcggctcggtcgcgggcatgaagaaggggtcggtttctttaaggatggtcttcttatagccagttaaggacttgttcacggaagtcgtctctttttgtacgtttaagtatgtgactttcagaattgccgcgtcaaatacccattgccctgcaagttgtgcattatcgtatttatgcgtgattgactgcaatgaacatattactactgctttatgtatttgctattgacgcatgcgcatagtttattgggtttccatattttc

SEQ ID NO: 325186 - DNA, 141 bp, Zea mays
tcttccttccactcttctctcccactcttcctaaaaaaaaaaaaaaaaaaaaaaaaaaaaaaaaagaaaaaataaaaaaaaaaaaaaaaaaaaaataaaaaaaaaataaaaaaaactaaaaaaaacactaatatctcaaaa

SEQ ID NO: 325187 - DNA, 74 bp, Zea mays
aaaaaaaaaaaaaaataaaaaaaaaaaaagaattaactaaaaaaaaaaaaaaaataaaaaaagagtagacatac

SEQ ID NO: 325188 - DNA, 185 bp, Zea mays
gttctagatcgcgagcggccgccctttattttttcttttactcttttttctttctaatataggtacgtttatcttttattgtttgatttttcatttactttccaaacttcattattctagaaaaaactcaaagatatttaatttaaaaatattaattctttgatcaaaaaaataaaaaaagttca

SEQ ID NO: 325189 - DNA, 355 bp, Zea mays
aataaaaaataacataaaaataatcaataaaataaaacaaaaaatacaaaataaattaaaaagggtacagagaatctaataaagaagataaaaatagaaaaacaaaatacaaaaagacaaaaaaaactaaaatataaaaatatggggcgcccattttaagttcctccatgtttacgtgcttggacttactcagtatatcatcttttatggtgaacctaattttaattctaatgccctctctttaaaaacttgatacctggtaaaccccttggttcaccccattttttcccctatcagtaaataccttttttataagctgacgttttctctaaaaggccctctcttttggcccttc

SEQ ID NO: 325190 - DNA, 115 bp, Zea mays
tacgagtatacctacgtgtatcgcggagtgtgggatttgtgtttgtgctgcccaaacagcaggatgctagaaaaaactcaaagatatttaagttaaaaattttaattcttggatc

SEQ ID NO: 325191 - DNA, 232 bp, Zea mays
gcggccacgccttcgaacttggagcacaagttcagttcgccgtactcttggtagcttggatgaaatggtactagcaaaccactaccaaaggtacacaaaaggctcgtggcaacttcagcttctgcttggtccggttctgtcacgaaagatcatcttcgggtcgagggttgacagaatctggggcattgacataccaccagattctgtcaacccttaaattcagagatacttg

SEQ ID NO: 325192 - DNA, 316 bp, Zea mays
tcactcgttacgcctacacatatcctctctacctggctcaatcactaaacaccacttacatatatggagggtagggctccatatgcctaacgcgcttgccactacctccttcataacataccaatatcctagcacacctcacgtataactggatccctgacacatgacatcttcgaagatacactcaagtgacacaaacttcacgctcttcagacgacgagaaccgacacttctaataaacacccttaggctccccctgctcataccgactgatatacctatacaccatactcatcatgatcgcgtggaacagcac

SEQ ID NO: 325193 - DNA, 372 bp, Zea mays
cccacgcgtccgaggaagtcgaaaggatgaacccaggtgccctgaactcaaggtctgaagatggtctatctgactcgctgggaagaggggttgcttccaaagatccccgaggaggccggtctacttcgggtcttgattcccagaaccggttatttggtcaatccgtgaagccctttgaagtgaatccgaccaaacgcgtgaatcttgccgcgtaaagagtgaatgggacaatgtgtgtatgcctccgggtaagccctgtggtacccagattgtgtcctcgcgccagtttaccctttaagctcagattttgggtgtgccctgtgctctggtctgtgctctagatattgtgtcacagcacgcaatgcatgcgcg

SEQ ID NO: 325194 - DNA, 308 bp, Zea mays
aaaaaacaaaaaaaaaaaaaaaataaaaataaattaaataaaataaaaaaaaaaaaaaaaagaagaaatataaaaaaaaaaaaaaaaaataaaaaaaaaataaaaataatataaaaaataaaaaaaaaaaaaaaaaaattaactattcccttttttaataaccaaaattatttcaccattaaattacatttaatatattatttttttatatctattttaacaaatttatttaccattttttaaaaactatttaactaataaaacctttataatccaaacatttatttttttaaaaaaaattctaattt

SEQ ID NO: 325195 - DNA, 247 bp, Zea mays
cccacgcgttcgcccacacgtccgaccactcttacgtccactcgtccgcacacacgtgcgcgtgttaacatttattcaggttagcctcataatttttctccatgcacaatagtgtgattcacttaaatttcatactttcattttgtcaggaaacatgcttcaccatataactaaccatatcctttattagtgtactttgccatttgccctatatggccttttctatcaagctcaacaatgctaattt

SEQ ID NO: 325196 - DNA, 92 bp, Zea mays
agttgaatgatcttcaatcagaggtatgcgtatacacataattaccagtgcctgtacgtctgaagtcttttgggacagcaaggattgtgact

SEQ ID NO: 325197 - DNA, 350 bp, Zea mays
tcgcccacgcgttcgcccacgcgtccggttctagatcgcgagcggccgtcctttttttttggttgttttttttttttttttttttttttttttttttttttttttttttttttttttttttttttttttttttttttttttttttttttttaaaatcctttatatcatttttttatattaaaattttaaataaatttttcctttttttgcaaaaaattaacatttattaataatccatatatttttttataaaattgtttataactttaattttttctttttaaaaaaaaaaaatcttttcttttttttataaaattaaaaaaattttttattttttaattaaataattt

SEQ ID NO: 325198 - DNA, 333 bp, Zea mays
  unsure (1)..(333): unsure at all n locations
ccaaacttcgcgacgcgcacaccagctcgccgtcggacgcaagcgctcacaggctgctgctgctccgtctcccgggcgccagctctgactccggacgcgttacttgaaggcatccatggcgcgcgtgctctgctcccggtcagcggtcctggcgcgccgtctcggggcccagccccagcccggcgtggttctgagccgtcggcacaaccacactcgccggcgcgcggtgaaggttcttgaagaggacgccgcggggccttctgcacctgcgacggacgcctncgagcagtcccggcggttggaggaggcgatcgacagcgccatggcgcggat

SEQ ID NO: 325199 - DNA, 169 bp, Zea mays
tcttctctcccactcttactcccactcttcctcccactcttactcatactctttttaaaaaaaaacgaagaaaatataaaaatccaactaaaaaataaaaacaaataactaacaaaacattcaaaacacccaaccataaactactaaacaataaaactaaacaacctaa

SEQ ID NO: 325200 - DNA, 266 bp, Zea mays
attcgtccactcgttcgcccacgcgttcgcccacgcgttcgcccacgcgtccgcggacgcgtgggaaaaaaaaaaaaaaaaaaaaaaaaaaaaaaaaaaaaaaaaaaaaaaaaaaaaaaaaaaaaaaaaaaaaaaaaaaaaaaaaataataaaaaactataactatataataaagaaaaattaaatggaactaaatgaacgtcaacacacacgtacatgacaacgaaaaccctatcgttagacaacttatttaaaattgagaaaaa

SEQ ID NO: 325201 - DNA, 399 bp, Zea mays
aattaaccatgaattaaatatgcctatcctaattttttaaaaacaaactaattttactgagggaaatgaaaaccctttccaaactagctctaaaggtagttaaactaaaccccattttccaaagaatttggaaaatctagttcattctctaaatcaagataatttaatacattcattttatacagccaaattaatttaaggtcattcgactattatcctccgttaccaaattggttgtgacgctggttgcttgcatttcattttatacacaaattatcccgaaccacgttcaactaaagcacaatttgatgcatcgcaaaaacaaaacataaaggcatgataacatcttcaatttccagacaatgggtgaatggtcctttagttgaggcccaactaatt

SEQ ID NO: 325202 - DNA, 283 bp, Zea mays
tcccactcgttctaaaaaaacaaacaatactttataaataaaaaaaaaaaaaaaataaagaaagccaatattaaacaacaacaactactaaaaactatcctacaccaaaaacccaaaataattcttccaaccattctccatcaactagcaccaccatttgttccacttttacctaactatttacagcctgttacatcttttttactagctcctcattcagccctaggtgctttatgacctacagtgatctctcatgacatccaagctttcttacatcaccatt

SEQ ID NO: 325203 - DNA, 65 bp, Zea mays
aaaaaaaaaaaaaaaaaaaaaaaaaaaaaaaaaaaaaaaaaaaaaaaaaaaaaaaaaagggaggg

SEQ ID NO: 325204 - DNA, 191 bp, Zea mays
gcttcccattgcgtcaagagattcttctgcccctgtcgttcaaactgttgttcttaatgttgtcatccactgccatggcttcaataagaatgtcctgaaagttctcaagggcatccaatgctttcatgacgtgactgttgactcctcgcaacacaatgtgactgtgactgtcaccgtggactcctacactc

SEQ ID NO: 325205 - DNA, 71 bp, Zea mays
tcgcggacgcgtgggcggacgcgtgggcggacgcgtgggcggacgcgtgggaaaaaaaaaaagggaagaat

SEQ ID NO: 325206 - DNA, 227 bp, Zea mays
ttcctcccactcttccgcccactcttcctaaataataaaacaaaacaaaaaaaaaaaaaaaagcgaggcaaaataaaaaaaatcccaaacaaactactacataacaacaacaaactaactaacaccaacaaaatccatactctactaatgtcaaccaaacaattctacctcttcaagctatccaatctcgtcatctcttcccgcttctaatttctccaaacctatct

SEQ ID NO: 325207 - DNA, 367 bp, Zea mays
ctttatatagctgaggattgtcaattgtgcttgtatatatagctgactagctgaggatgggggacctctcatcttcaattgtgcttgtttataactttatatagctgaggattgtcaattgtgcttgaaaaaaaaaaaaaaaaaaaaaaaaaaaaaaaaaaaaaaaaaaaaaaaaaaaaaaaaaaaaaaaaaaaaaaaaaaaaaaaaaaaaaaaaaaaaaaaaaaaaaaaaaaaaaaataaaaaaacactaaaataaaaaaaaaattaattttaaaaaaacacattaaattacaaaaaaacaaaataatatctctcattttttatataatcaacacctattattctcctatttctctatatttttta

SEQ ID NO: 325208 - DNA, 180 bp, Zea mays
gcacgcgtgcgcccacgcgtgcgactcgcggtttaggcaatcagcacgtgcgtatacacaacggcagttaactagctagctagctagcagtcgtagaatgacgatgaggggtctctctgttgcggtcgctctggtcgtggtggtggccgcggcctgccttgccgcgccgcggggcgcgga

SEQ ID NO: 325209 - DNA, 351 bp, Zea mays
cacgcgtccgcccactcgttcgcccacacgtccgtatagtctaagattacacatggggaggctacatgaagcatgtgacgacatgtgcttcagaaccgataacctatatattacgatctgtcgctacgagctcagttgtattggactacttcattaccgcgccaaaatgctcgtgcgtatgtctgcaatctacctcctgtaactgatgaaaatatgttggctgaatatcttgccaccatatgcttgctaaagaaggacaaatggactgggcgtccataaatctggatatacagggacaaagtttactaatgaaccaaagggtgatgcaacagtcacctattaggattcaca

SEQ ID NO: 325210 - DNA, 321 bp, Zea mays
ccacgcgtccgcaagttctgaagaggaggctaagttggcgagcgaagcggaggtccgtcgccgggaggcttgggccggagcatgttcctgacattacaaattagcccctagtcaccggaaggcttggaccggaacatggcaaagcatgtttctattgttaagtttgagatatgctcaagcttagttggtattataaattagcccctagtggttgttgccgccggcaagatgatgatgtattgtttgaggtggagtttgctattatgatgctacaaagaatttgtctcaaggttgagtttgtgatcatgttccctattagtt

SEQ ID NO: 325211 - DNA, 406 bp, Zea mays
tcggcccaagatgatgaggcttagaaccagaaaaattggcagaggaatatagttgccgactgtggggaggcctatacgagcccatgaatgccacgtctacacttacagcgcgatactgctgttgtctaattgcttattctagaggctttgcttgcaagcaaccaagcatgtgtgttggatttatcatcctgtctagtatgatggaccctgcttggatagtatgactaatatgtagagcaaagctagtacctaaaccaagatttttggtaaggggcatgtatacaggattatagccgatactgattgctgccggttgctgctgctggaacaatggcagagaatgtataatcgggctgttattggttcctaaatttcgtgatgtggagaaatgtaagacgagaaccgc

SEQ ID NO: 325212 - DNA, 380 bp, Zea mays
cccacgcgtccgcaatcaactagatatccccaacataaacataatcagtatataaatgtttggtctgggcactcccttagaccttagtacacatgttgaatttgtttggctgagttctatgggtgctttggataagttctttaggatttcgtatgtgttaacatgacatgttatctgacccttgttttaagcagtcgtaaatactacttatgtttccttttctgtggtagctttctgacttctgagtattgatgggttgatgtactatggacatatcttcacacagagcttgagatggactcccccaagatctctgaaaatgaagatgttgggcatctgatcacaccctaagaagcctgcatccgcatagcataggtagt

SEQ ID NO: 325213 - DNA, 145 bp, Zea mays
agtaattatgaggtttccataagggaggggaggagagaggagacgatagggacttcgtacggggtcgttcgcttgtgggttcttcttccctcctggcttcataaaggtggactaatggtagaacaatgttgtcaatctcagtcgt

SEQ ID NO: 325214 - DNA, 274 bp, Zea mays
cccacgcgtccggctgtttgcttagcttagcttagcaatataataataatgctagtcagttctcatccaaaaaaaaaaaaaaaaaaaaaaaaaaaaaaaaaaaaaaaaaaaaaaaaaaaaaaaaaaaaaaaaaaaaaaaaaaaaaaaaaaaaataaaaaaaaaaaaaaacaaaaaaaatgataaaaatgggatgcctcctaatggattcaacaaattattacttggacattttatcccaaaactattcattagagctacttaaattaatttcat

SEQ ID NO: 325215 - DNA, 152 bp, Zea mays
gcgccgcggaagacaccggcaccacgacccagcgcgccggcggcgagtccacgacgggcgaggcggacgggaaccggcgcctggaggaggccatccacggcgacagggagcgccgcgccgcgcccgaccggctccccgtcgtgccgggaggg

SEQ ID NO: 325216 - DNA, 293 bp, Zea mays
ccacgcgtccgcccacgcgttcgaaaaaaaaaaaaaactgcattatactttctacgggcgacatgatcatggattctgtgttagcatccgattatttgtactcttgattctttggttccatgctctctacggccatctccatgtcaatttgctttgccaacaatataatatcagcgtgccgtgccctcgtggatttccaaatggttatatgcatatgtactattgaaattgtcatatcagtttgcatacaataccaacgcgcctttgtagatttcacaatggatatatctgtt

SEQ ID NO: 325217 - DNA, 406 bp, Zea mays
gccacgcgtgctcactcactcagtcctttttgaatccgcggtctctcaagcaagcgctggagggctctcacaagcgaggaccaagaagatcgtaattctctacctgaaggtgtgctcaacttctcgatctggtactaattcactacaacgtactgtgcttacccaatatctgatttaatcatcatatatcttctctcgttcctggatgacatcgacactgattcctgtttatcatgatcgagcagcagtacgtacgcgcagcgtatgctcatcttattgcgccatgcatgatcatcatcatcatacatcaacaattgcacacacttcgtttgctgcacatgcgatcgccgtgcttcctatcgtatactgcctgattctggctgacaccaatcacaagcagatggga

SEQ ID NO: 325218 - DNA, 436 bp, Zea mays
cacaggcgtacagccacacgtgcagcgtcctgtgcatgcgctgaagtaccctgagcagggatatgacagatgcacggtatgtcatcgacattgtcccgttgctgaactgcatgatggtactgatctaatggactccgaacctacactgatcaaacctctggtaaaatgaactgcacgtgatggaaaaccataggaattgctgagaggtccactctattatgtcctggtgctgctgttcagcgttttagtcttctggcgtgagtcccccatcgggatcgtctccttgtcgatgatgagcggtggcgatggttttgctgacattgttgggaggaggtatggctcagcgaagctgccattcaatcggaagaagagctgggccgggagcatctcgatgttcatttctggtttcctgctgtccgcgatgatgatgctctac

SEQ ID NO: 325219 - DNA, 420 bp, Zea mays
ggtgaaactgctgaagatgttgtacgactactacgcttcgggcacatgacatcggttgagtcatggatagcagggaggcatcatccaaaattctgtcagctcgttgaccactatttatatgttccccttttagattgagactatgaatgatcgtatgctaatgatgtctggtgcacagtacattgcgcttgttaaccactatgtacatggcttatttagtgatagtgtaatcactcaactgtcggttgaccgttcaagttcataacattgaggttctttctttgctgcattggtctctaaagagccacaacatctgggcatctggctctatataaggcggcgttccttgtagcttcacactcaccactagcctcggcttatataacctttctactgttagcacaggcttattgcatgtgc

SEQ ID NO: 325220 - DNA, 270 bp, Zea mays
atgacgcgtcgcctgacgcaagttctctgagtaggcggactacacactgctgatcgcaggggtgggtatctacctaggcaggtgggtgattacgactaacagagatgggccttctctgcaagctgtggtacgacaccgtcgcaggcccatgcccggacacctggctctgtcggctccgcaagcagactgtgcgtgccgtcgccgtcaagatcagtgatccggccgtggacgcttcggcgttcgtgcctgcctcgacggcttttggtagct

SEQ ID NO: 325221 - DNA, 342 bp, Zea mays
ccgacgcgtgagctgacacctgatctgactcgtcatcggactcgtcggctgacgcgtggggccgaatccaccgcatgctcaaactgggactgagcatctactagtactgacaggcaccccaggctgacaccgacatgccccctctgaactatgacgcttgcgacaacaacatggacgaggtgctctaagctgagtgcattctcatctaggaaagagagagaacatcgcgtctcatctgtctgtcttaccacttatgctatgatccaatgagccccaggtatcctaacgctactattgtgtctgctgtcttctactccatcatgctgcttttttgcggcctca

SEQ ID NO: 325222 - DNA, 124 bp, Zea mays
gcggcaccaaggtaccggtgtcttcgatgcaaagtagtgtgaaacggctattgaggtttgtgaaaatcgactgtatgatgaggaattatgcaaataggaaaattgcgctgccgtggacttgatc

SEQ ID NO: 325223 - DNA, 454 bp, Zea mays
ggaagatgcccccaataatgcagatagtagtagtgaggttggaggtatgctgcataaacacataatggagaaaacagttacagaagcttttcaaattttggaacatgatgaaagaaacttgtacactgaccaagaggaatcagtatcatcaaacgagcaagttgatggatcttcattcctgagtaaaaaaatcagtaaaaccgaagatgcaatttatgaaaacacattcggtctatctgaaggattagaagaaagtgatagaagatgtccccatcatgcaacatgtagctctttctggggtccttgtagaaatgacacagactttactgatcaagtaacttcaagtatatctgattaaccgtttgctggtgctttctacttctctgatggtggttacagactcctgagaactttaactggtggatcaagaattccgtccctggtaataattgat

SEQ ID NO: 325224 - DNA, 227 bp, Zea mays
cccacgcgtccgaaaaaaaaaaaataaaaataaaaaaataaaaaggtatactatataaacggatggtgcatacaacagcgacggtaacaatataaaaattcttaactagagaaaactaaaatagggccctttcgttctaagtattccaacttatactactagtaaattcatggatttacctcacttattgggctactaaaacatattcaaatatgccattttttaaa

SEQ ID NO: 325225 - DNA, 80 bp, Zea mays
  unsure (1)..(80): unsure at all n locations
tcgtctcgtcaacaagggaagagnntggtgagggcttgnatggagtatgtgaaggggaaagccattggttnnngtgtttt

SEQ ID NO: 325226 - DNA, 313 bp, Zea mays
aaaaaaaaaaaaaaaaaaaaaaaaaaaaaaaaaaataaaaaaaaataaaaaaaaaaaaaaaaggaaggataaataaaaaggaaagaaaaaaaaaaaaaaaaaaaaaaaaaaaaaaaaaaaaaaaaaatctaaaatttaaaaaaaaatacgggcaactttttaaaatttccaagttttacaccatcatctttttaaatgtacaactttttttaaacggcattcttataaaaaccttttgttctggatttaaaaacggtttcaaaaaaaaacccttttaaaaaccatctttaatgccaatgagccattttccctt

SEQ ID NO: 325227 - DNA, 289 bp, Zea mays
  unsure (1)..(289): unsure at all n locations
cgnntccgcttctggttttggttttccctccacccaaacctctttcaannttccaccatttagacgacnngacgaagagcgagcgcnncgataagaaatctgcgcctgtgcacaanncgacgaagcnggaagggggtacccgtacctnntggagaatcccaagnnnaagctaannngaaatgggtcagccnnncagtttgcnnatccgaagcatggggcttgctatgnnntcaactgcnnaactattgggcaacactttatcctgnngtggtgaaatgggttgccaagc

SEQ ID NO: 325228 - DNA, 201 bp, Zea mays
aaaaaaaaaaaaaccaaaaaataacataaaacaaaaaaaaacaaccaaataaaaatgagacagcaacaaatctacataaaaaaaaaaatagatcaactcttcaaaaaaacctactttcctccctcaatcttactaacaccttactctcctctttccccccctaacttccatccactgcctttcctttctccacttgctttc

SEQ ID NO: 325229 - DNA, 396 bp, Zea mays
aatgtactaccctcctggatggtcttactccatcgcgaaacgctagtcttcctctaaagaaatctttagcaactaccgacaactccgaactaatcttaaaaaccatggcttcaaaaaagcttcttcttgccgctctttgccttgtggccgctgcgcttctctcccttccgtctgaatcccacagccttgaagacttctcaagcaacgaccccactccagagattcaaaccttcttcaatccccaagcccctgctctccctgaagcccttgacccgttcttcattcccgtctacaccattgccgctaaacctgatgccacgtcaatccccaccaccaacacctgcaccacacctgctgctgccgctggcaccttaccctctgcaagcactacttctt

SEQ ID NO: 325230 - DNA, 400 bp, Zea mays
cccacgcgtccgcccacgcgtccgtgaatactctcctttacttgcatgcttcattttgttggatatctgaatgaggtgccgaatataagcaaattcaagtgaaaaaaaaaaaaaaaaaaaaaaaaaaaaaaaaaaaaaaaaaaaaaaaaaaaaaaaaaaaaaaaaaaaaaaaaaaaaaaaaaaaaaaaaaaaaaaaaaaaaaaaaaaaaaaaaaaaaaaaaaaagaaaaaaaaaaaaaaaaaaaataaaaaataaaaacaaaaagagaaaaacaactaaaaaaatgaggaaaacattcaaaattaaacacaatttccctccttaaaaaaaaaccccccaacgtcatctatactgtccactaaaaaaaaaacggcgggactttttaaaaactttttttacc

SEQ ID NO: 325231 - DNA, 115 bp, Zea mays
cggacgcgtgggcagaagccaagtgttctgatgatttgttttttcaattgtgttttttggtattggttcagcaagcacatacatgatttatgacatggcatctgctatctttgtt

SEQ ID NO: 325232 - DNA, 448 bp, Zea mays
gagtgacatgaataaaacgaggaatccataaaacaagctgaattccttgtggtagccaatggagagtaccaggatcaaccgagtccacagtaccaggttcattttcttcttcttctcgtggtcatcgtgtcgccaaagttagtttattttattcctagtttgggggcattagtgccgtagatgcgtcattccacatccatctaggagggagcactgtcgtttactgtatacggatttcgtgatgtatcccgggaaatttttgtagatcggactcgtagaagaagagattgcaattgcaatactgtgtatcactctgatgttgtccagtttgagaacttgacaggtgtatgggatttgccccgaggctgctggttttcctgctgcttggtttgggaaaccgatctctcgattgtgagatacaggcaggtttgcgcacgagagtactctc

SEQ ID NO: 325233 - DNA, 90 bp, Zea mays
cagacgcgtgggcggactcatgggttaccgttgcgttggcgacaatgttgggaacagatttaaattggagtttatgcttgccatctactc

SEQ ID NO: 325234 - DNA, 358 bp, Zea mays
ctcagcgtggccctgaacctgtcgagatccatccggatgttctgcttgtccaggtacgctgagggaggccatgagccggttgccgtcggctccgtgaccggccgccgtgccccggcccggaggtagataggttggtgtatctatcgtccccgttgtcatgctctcaacaagttgacttaatcttcttcttcttctccgtcccccctttttatttttattatgtcactagcaagattcttttggtccattgttttgttgtgttgtttactgctgctacataaggaatcaatctcatgggaagatgatgagcaaaagcaaagcaagaccaggttgctgttataaatttatatatatatat

SEQ ID NO: 325235 - DNA, 80 bp, Zea mays
aaaaaaaaatacatccagaaaaccataccatcaatactaactctaaaaaatctaaaaactgcaggggcttccaaattttc

SEQ ID NO: 325236 - DNA, 128 bp, Zea mays
gccttttataaaaaaaaaaaaaaaaaaaaaaaaaaaaaaaaaaaaaaaaaaaaaatagggagaaaaaataaaataataagggccgcccgttctaaagcttccaactttaccgtctcttgcctgctaaa

SEQ ID NO: 325237 - DNA, 443 bp, Zea mays
ctcttcttggcctcctcgccctccgctccggagggcaagttaattgttgccagcgtcctctgttgctcgacctcgcctgagaatgggaaggaaaacaagcccgagaagggtatggaaaattcgaagcccgaaaacatggtttcaaacgggataaccatggcctcacctagatctcacaacagcacaacacgttccccataggaatcgaaattggaattgtaggccaggatgagccatgtcgcgggtacagatccacgtcgacgcggccatggcggcgagcagggagatgggcctcgacagtagtggtggcatggggagggaagaccacatggcacatgtcgtgtgtggacacgtaggggccgtggagccagcggcggcgcgaccaggcagagcgcgtgtcagagtgtctgcacctgcaggagatggagaggaggagcacgaga

SEQ ID NO: 325238 - DNA, 253 bp, Zea mays
cccacgcgtacgcccacgcgtacgcagtgatttatcatagcgaaagaaataaaaaagcggcggtgtttcttgataaaaaaaaaaaaaaaaaaaaaaaaacaaaaaaaaaaaaaacaaaaaaaaaaaaaaaagggtcaaaactttacaaatactaacatcaacgtacacattcaatcgactacaaacatgtaacatagagccacctaaacagaatcaactatcacatcttttaacaacataaagactaggaaaa

SEQ ID NO: 325239 - DNA, 377 bp, Zea mays
tcgcccactcgttcgtccatttatccgatgaaaatggctcactgagcactggctatatatagagggcggaacgcactaagactaaaacaacaaaggatgctgtaacaaaaactggtacataccaagcatggaatggagatgctgaagatgatgctcaacataaactcacagggaactctgtctcccataagttaccattaatatttccagataaacctcaacgttcaaaggcattgattcaatgtcatggtgactcgatcgatttaactagagatattattgcacttgacaagatagtagtttcaaatagtcctactgcaaaaccagatttgttgttggacctcataggaacaatatacacaacatctatagttcca

SEQ ID NO: 325240 - DNA, 418 bp, Zea mays
taaaaaaaaaaaaaaaaaaaaaaaaaaaaaaataaaaaaaaaaaaaaaaaaaaaaaaaaaaaaggaaaaaaaaaaaaaaaaaaaaaaaaaaaaaataaaaaaaaaaaaaaaaaaaaaaaaaaaaaaaaaaaaaaaaaaaaaaaaaaagtgcctacctttttaaagatcccctttttccttcctcttctttcaaattattaaccttttttcagtttgcccaaatatcaattacctcacctatcttttaaaaccatagcatttgaaaaacccttgtttttcccaattttaatcctttttaaaattatcccttttttcccttttggttattaccctaaaagcccccattattccccctttccaaatatttccccctccttattgcctattgtaccccccctttaattggtccttaaacccc

SEQ ID NO: 325241 - DNA, 405 bp, Zea mays
atcgatttggagctagggatgtaatatgatttagaaaatatccgaaccagtattgactaggttagagtcagtactgggtcggatggaatcttcggatatccgcactctttgcgataactggtacggatgcggatattgtattcggatatcgaattcgaatacaatatgtctgatatctgtcggatatcgaatatccggatattttctcggataaatcttctcggatatccggatagctgtgtgtattttgttgatctttttgtagaaagaaattaataatacacaaatattctcaaaaaataagaaggctaataagcaaactaactcacacaaattgagatgaatctaaactgaacgttatccagtaaataaaccttaaacagcaaaattaaaagggggggccgt

SEQ ID NO: 325242 - DNA, 168 bp, Zea mays
aatttattcctcatgttattgctaattatgagcttatgatgaataaaatggtaatgaatcaacttattatattccacaaaaaaaaaaaaaaaaaaaaaaaaaaaaaaaaaaaaaaaaaaaaaaaaaaaaaagaaaaaaagaaaaaaagatacaagaaaaaaaaacaca

SEQ ID NO: 325243 - DNA, 451 bp, Zea mays
cccaatgcggccgacgccggcgctcgacgccggcggacgcatggtaacaagcttcctatgcgccactgaatggatgcttccgtctccggccacgcaagtccacaccatctccgtacttccctcccgtcgcgacttcgccttctccaacctcacgatgtcgctcaggaatagcggcggcaacgagggagagagtggcagtactaagttccacgtagtacgggacgacctcctccacccgctcgccaacggcaacaaggcgcgcaagctcgacgccctcctgcccgtcctccgccgctgcggcgctactgacatcgttacgtgtgggggttgccagagcgcccatgccgcagctatcgcggttcactgtgccgaatggggaatcaggccacatatactactgagaggcgagcaactggatgttcccacagggtataatctcatctcattgatg

SEQ ID NO: 325244 - DNA, 68 bp, Zea mays
aaaaaaaatagaaaaaaaaaaaaagaaagaatagagaagaagaaaaagacaaacaaacaagggcgggc

SEQ ID NO: 325245 - DNA, 325 bp, Zea mays
cccactcctaccaccacacattctccagaattgctaacaaatctagacaagacttgctatgcgaacatccaagggacagcaggtcttacaaaacgcacaatcactccatatacatactacccttccaaggctacttgaacgactcaaacctgacaatacacactcatgactatcgacgacaactataaacagactggtacgacaaacttccacatacatccagactacctgatgcacctactcgccatcataatcaatgttcacatgctgaacaccatcatgcccatcctccgacgatctaactctactgacatccttacatgtg

SEQ ID NO: 325246 - DNA, 220 bp, Zea mays
tcttcctaaaaaaaaaaaaaaaaaaaaaaaatttaaaaaaaaaaaaaaaaaaaaaaaaaaaaaggaaaagtttaaacaacagtcctctacaaaatccaacttcttctcttcttcacttcttctcttttcctcccctttttacttacttcctttttttacatttcttccctctataaccctcacattacccaacttaatctccttcattcccataaaattt

SEQ ID NO: 325247 - DNA, 62 bp, Zea mays
cccactcgtccgaaaaaaaaaaaaaataaaaaaaaaaaaaaaaaaaaaaaaaaagggggggg

SEQ ID NO: 325248 - DNA, 205 bp, Zea mays
acgacgccacagcgtaccggcacagttcttatgtatcgagaaggcggtcatttcgagtcctatgtgaaatatggatacgtctgttgacgatagaaatcacctacgtgccttacgattctatttagcgatctaggaatacggtgtaatcagtacctgcttgttgacatatcgtatgcctatcgcttatgttgggtacccatgatgc

SEQ ID NO: 325249 - DNA, 419 bp, Zea mays
aaaaaacaaaaaaaaaaaaaaaaaaaaaaaataaaaaaaaaaaaaaaaaaaaaaaaaaaaagggaaataaaaaaaaataaaaaagaaaaaaaaaaaaaaaaaaaaaaaaaaacctttttttaatccgggggcggcccttttgcgggtcccatgtttccttccccctctttgcaacctttacctttttcttcggggccccctaattcaatttcctggcccctttttttacatctcgttctcggaaaaacccctggtttacccaatctaattgcctttcatccatatccccttttgcccctctggctttttcccaagatgccccgccccaattgcctttccaaccttttgcccgccctatttgctaactggaccccccctttaaggggccttttaaccccggcttttttttgggttccccc

SEQ ID NO: 325250 - DNA, 119 bp, Zea mays
tcccactcgtcctcccactcgttcgaaaaaaaaaaaaaaaaaaaaaaaaaaaaaaaaaaaggggaaaaaaaaaaaaaaaaaaaaaaaaataaaaaaaacataaaaaaacttaaaataat

SEQ ID NO: 325251 - DNA, 56 bp, Zea mays
actacgcatgccatcttgtatatgaacaatgtggctcagaatgtagccataataaa

SEQ ID NO: 325252 - DNA, 405 bp, Zea mays
gcagaagttacacttactactccactacttttcatacgccgatcccctctcctaggccggggcgcatcacacgaatgtagcccactaacactcacactaacgacgtttccagtgcataactaagacatcgtcgccaacatcaacttcaacttcacccgctacctctgcatctagcacaactaccacattgtaaagaccgacctgaccgtcaatatggataatgaaaagctccgcgtacgccacgaccacgacgtacgtcaaagcaccatacacagcgataacgactgacatctggtatcgcagtacatttcacgcacacgtattctggctacatcgacgattcataccatctgctgctgattgtgcgatacactgctactatgcatacatgtatcgtgctactat

SEQ ID NO: 325253 - DNA, 460 bp, Zea mays
ttttctcgtgattattttgtaggaaaaatggaaaaagccactgcaagctagggaatttgaattacttacctggatattgcttccttagagcaactatagcagttttgggggttgattctaagaaatgagtccatcagggctgcaaaccccattgctcctgagtcctgttgagggctgaggagcctactgttggtagcttagacgagcttaaaggaaccaagcctggcaaggcttgaggtcgtagaacatgtaagtcaagaaggtgaaggggatcatgtaaaagagcttgacaacctgcacattctatgtgtttgaaatacccactctgcctattgccatccaatgtttttcagagttctgcatgttaaccatcgaaagcaacttggatatgaaaacgcataaagcttgcaggtggtagactaaccgtaaggagtcgactttggggatgaccattaatacc

SEQ ID NO: 325254 - DNA, 432 bp, Zea mays
cggacgcgtggggaaaatgacagtcatcatggccaaataaccaccaagaactacttcttggcgcgactggtcgacgtggcacgctctggagagtcttcctcggctgaggtcatttggcttctgaacattaacagtgactgaaagcctttggtggatgatgtggatgaaagttccaaggaagaacattcatatactgataacctgataggcaataagaggaggtcttgattctcagataaacctgactatactgaatatggctccaaaaaatgttctgccctggcaagctacatggctgctccacaatcttcataggccatactgcagtggaatagttgacacatgacttagctcttgattagtatataaaaacggtttcactcggcttcactccgttaagccctctatcaatggtgagataatttcacatta

SEQ ID NO: 325255 - DNA, 321 bp, Zea mays
accacgcgtgcgaaaaaaaaaaaaaaaaatttagaaaaaaaaatgaaacctaaaaatataaagagatgagaaaatcaaatgaaacgtagacataaaaaaaatagataaacaaaaaaaaaactggtcctccgtttaagatgctccaagtttcaatacacgtccattcactaatagacacttcacttagggacgcctaatttcaatccactggccatcgttttcaaacttcgcaactgaaaaaaccttgtcttcacccaatttaatagctttggatcaaatccctttttgacaccatgggatactaacacaaagtgccttacc

SEQ ID NO: 325256 - DNA, 270 bp, Zea mays
ctaacaccttcttttctctatcgctttaacattcacacatcaattcaaacatcagggtaggcttaacctgatggttagatatcatacaagatcaattacatcaacgagctctgtaagggcctcactaagcgtcaccataacgttctactcaacatcattcacgatatcatgaatcctaatatcattacgcttactaataggcatgacatgaaacacatctacaatctcatctactatcagacccactacttgctcaacatctttctcaag

SEQ ID NO: 325257 - DNA, 320 bp, Zea mays
attatctgtttcacagatgtgcagagcatggagtaaatgctccatgtgctgctcgtggagacaataaaaaagtaatctcagcaaataataatgaataaggaggatgcaatgacgactagctgaacaggactaaaagccaagcaactcatcttgtaaacattaactaagctaccccaactacaaacatcttccattcatagatgccgacaagactatacttagagtattgtgtaccttgataataccatgagaaaggttaacattactgagctgaagaaattgctacgagcttagtcatgtgtatagatcgatgtatactc

SEQ ID NO: 325258 - DNA, 348 bp, Zea mays
gtacaagcttgcttagctgcttgatgttccccgggttggaatctggcatcaggctggctgtgatgcgattatgactgcactgtccctcatgaagcttatagaggccttcttaaacgggttaactgataaatattctggtgagtaacatggtcttggctttgatgctgtcaagaccacctatgctcaatgtgtcatggattattcaattaaagatgaactatttatgaaaattgagtaatctgattggagtcttcgtctgactgatctcaaaggcatacttgggttattgacataacggatttgatcactattttgctaaccaaaaatgccagtcgctatttgaggtcc

SEQ ID NO: 325259 - DNA, 132 bp, Zea mays
cccacgcgtccggaaaaaacatgaaaatacacagaaactaaatcataaaataaactaaacaggaaggaaaaaaccaaagaaaaagacactcataaaaaataaaaaaaaaaataaaaaaaaaggggcctcctt

SEQ ID NO: 325260 - DNA, 400 bp, Zea mays
cggacgcgtgggctgttatacattctgataatagcactgaggtgccatcaagccactcgcgcggagtgtcattatacgactgcgcggagtgtatgaaaaggatgtctaaagggtcgctcatcaaaacactgattgtgtacgcttacgacgctcaagcacatgagatcacatgaacactgatacgaccttctacatagacgctcactacgaactatatgctcaatatgtaactactgtgcataattcaacgacacttgtacattaaagagtgacaatcacacactgatactctcgcctctattgctgcagtctggcaggaacataagggacttcctaactaatatcaggtctcgcattaaatcactctggggacgtcgacatctgcctgatatgcttcaca

SEQ ID NO: 325261 - DNA, 411 bp, Zea mays
cccactcgtccgattgcgaacaacttattgtaatacacaactactatattttgtacaatggttacttttgtcttctgtgcaatgtctgctatgctcctaagatagcatcagccgaccacttctgtatgtatatatatgttaaaattttatgaatataatccagataaagacttgctcaaaaaaaataaaaaaaaagaaaacaaaaaaaagcaacaagaaaaagaaataattctaagaaaaacaatgataaaacataaaatggctacaaaaatcactgactccctgccaagttacatggcttgataacattttgtcaacgcgaatctgcatgaggatacttcacctagacttacctctgattcagcagacaaaaactggtacactctgcttgactctctttagttcgctaac

SEQ ID NO: 325262 - DNA, 385 bp, Zea mays
ttcactcgtcctatcactcgtgacataaaataatacacaaaatactattacaataactaagggaaatttagtaaaaataaacaacgtatgttgtcgttctattatatgatattatgttaatgtatgacatattctatttattaaatttttttgagtatgatctaaattaaataattctatgaataacattcaatatactgataacgtgaaaagcatgaagattacgtatttattctcatatcatcatgtatatctttaaaatggttgcataatttctaatactctgaaaattacatgtattctcaacattttcgctaaccgaatgtgcattgtaataattcatgtagagttacatctaattcagcatataaatacgtttacacta

SEQ ID NO: 325263 - DNA, 352 bp, Zea mays
aagacgcgtgggtccccattccaatacacagatctcgcacccgtaagtggacgacgaatctggcggtgcaaaagggccgaccgatgtcgaggttcaatgctaccgactgcgtgcctccgacggagacgctctaccatcgcgctacttaaacgcaaataactgaccgtcttgatacaactaattaactgtgaacacactggatttaccaagctgaatctcgcagcatcaaatgcctcattagtccagatgagcacttgttctaagacgccttgacgacatgtctttcataagaattgaacagatcactatgctgaatggcaaaacccctttaaactggcataaagcacactta

SEQ ID NO: 325264 - DNA, 63 bp, Zea mays
cggacgcgtgggaaaaaaaataacaacaaatcatataaaaaaaaagggcgacccttcgggggg

SEQ ID NO: 325265 - DNA, 86 bp, Zea mays
cccacgcgtacgaaaaaaaaaaaaccatataaaagaaaaaagaaaacaaaaaagaaaaaggggaaaagaaaaaaaaaaggtagcat

SEQ ID NO: 325266 - DNA, 386 bp, Zea mays
cccacgcgtccgggagagcaccctccacttggtgctgcgcctcaggggaggcatgcagaggttcgtgaagaccctgaccggcaagactatcaccctcgaggtggagtcttcagacaccatcgacaacgtcaaggccaagatccaggacaaggagggcattcccccagaccagcagcggctcatctttgctggaaagcagcttgaggacgggcgcacgcttgccgactacaacatccagaaggagagcaccctccacttggtgctgcgcctcaggggaggcatgcagatcttcgtgaagaccctgaccggcaagactatcaccctcgaggtggagtcttcagacaccatcgacaatgtcaaggccaagatccaggacaaggaaggca

SEQ ID NO: 325267 - DNA, 385 bp, Zea mays
cccacgcgtccgagaaaactgctgcagtggtgagatgtatagcatctgacctggacaggagaagaatatgtagtggtggtcgcaacggactcctgcggctttgggatgcaactacaagcatctaggactgatagatgttcatgtgaaaaggcaattgaccatgatgttgcatgccattttccttttagctaggaatttatgtgctatttagaggatgcgaaaggagccggactttgttctactgtttctttctcatctaaaaaaccctgcccagttgagtatatgtttgacgtcgtgtaaaattttgtttatattttcgggttcagatagccttacgtggctacgattttgtgagaactatgagaaacttgggaagttctgtact

SEQ ID NO: 325268 - DNA, 379 bp, Zea mays
cccacgcgtccgattctcatactataaacaattttctgtcgtaagaataatatcttgagggttaggtatcctttaaggtatgttgtaattcctctatgaagaatagactttagaacgtttgattctatttatattgaaccaactatagcttccttctagatttcaggaaaccattatcttgtgccaaacaatacttgactttatataggatagaattgttgtttatgatgatacttaggtaactgctgtacttggtattcagtgtgtaatatttttgttgtgtggattaatgttttaagtgctttatgtctcattagtgttaagcttagctcatcctgcttcgtcgtagtagttatttaacaataaggatctctttaaa

SEQ ID NO: 325269 - DNA, 258 bp, Zea mays
cccacgcgtccgcccacgcgtccgcccacgcgtccgcccacgcgtccgaaaaaaaaaaagaaaaagtaaaaaaaaaaaaaaaaaaaaaaaaaaaaaaaaaaaaaaaaaaaaaaaaaataaaaaaaaaaaaaaaaaaaaacaaataaaaaaaaaaaaaagaattaaaaaataataaaaaaaaaataataaataataaaaatatatcacactaaattaatttcattaaccttcgtattacaatttaacatattggaaaaa

SEQ ID NO: 325270 - DNA, 80 bp, Zea mays
aaaaaaaataaaaaaaaaaaaaaaaaaaaaaataaaaaaaaaaaaaaaaaaaaaaaaaaaaaaaaagagaaaaaaaaaag

SEQ ID NO: 325271 - DNA, 155 bp, Zea mays
tcgaaaaaaaaaaaaaaaaaaaaaaaaaaaaaaaaaaaataaaaaaaaaaaaaaaaaaaaaaaaaaaaaagaaaaataaaaaaaagggcggccactctaaaatactcctacttacatacactttcttgccccttctttgctcttctattctactt

SEQ ID NO: 325272 - DNA, 435 bp, Zea mays
gttatattattctataatagtacatacatatttcataatccatcgtgcatattcatgtcagggtgactgatatttcatagagctcagaactattcgtgaaaatggacatcgaatttgtaggaactgacgatgtacatattaattctcaggcacacgtggtttagtgacgatgaccaccctggttagactaatctgcgtaatacaaaaacggagtcggtctatgtaattaaaggctctagtgcttgatgatcaacataattatttgaactaatatatttctctagtgtgtatgtttatagtgtaaaggatgcggcgtggatttggacgaaagcaaatgggtgagcatgaagattaacacctcaaagaaatacattagaaaacttattgaagatctgtcaagatcatgcaggagtataaaacatgagacaatagaag

SEQ ID NO: 325273 - DNA, 286 bp, Zea mays
cccacgcgtccgatcgtcctgaatgctgagcagccttgtacagctcagggaagcgctgtcagtacaaaactaccagatataccattggtcgtgttcaaataacaaatgcttcggctttgttcatccgtcattaactatgagtgctgggatttgtttgtatgtgtgtcgtgctaccagtttcttctcctgtcgtctcacacaggtactgtattacgcatgtgttttctagtgtccgtgcggaagctgtattataagctgaaatatgtgcgtttgaaatttactagtt

SEQ ID NO: 325274 - DNA, 267 bp, Zea mays
aggtacagcacggctgtctgctatactagcctaacgttttggatcctgtgatcccgtgctggcggtcatcgtcagggcggacaactactacatcgaatgcgagccgatcgtggacctggaccaacggtagcgctctactgagacacagtcctacgaagatctctatgacaacctctgcgactgcggcgattggacccgcagccgctacacggcccccgtccacgtggactacgagaaggcggacgatcatcggcaagccccgcaagc

SEQ ID NO: 325275 - DNA, 383 bp, Zea mays
cgccaccttggagagcgcgcggtggagcttctcgttcagggtcgccatggacagctccatctcggccagtctcctctggagccgcgccacctactgcctcgtcctggccgtctcgtcctccagcctgctgatggagctcatcacgacgaggtcggctgccttgcgctctagctcctcgtcgtcgccgtcgtcgctggccagcgaaagcgacgacgcgaagaacggcagtgaggacgggaccaggtacatcgtcacgtattctgcaaccggcggccttggcacgggcaccgtctgtaggcttggagcagcatgcttgctgctgacactactatgctcttacttggcattgcaggtgacattgacaacacttggcttggagtggc

SEQ ID NO: 325276 - DNA, 53 bp, Zea mays
aaaaaacaaaaaaaaaaaaaaaaaaaaaaaaaaaaaaaaaaaaaaaaaaaaaa

SEQ ID NO: 325277 - DNA, 121 bp, Zea mays
cccacgcgtccgcccacgcgtccgcccacgcgtccgcccacgcgtccgcccacgcgtccgtgcacgcgttcgcccacgcgtccgcgatgatcctgtctctgttataaatatcattattatt

SEQ ID NO: 325278 - DNA, 175 bp, Zea mays
aaaaaacatacaaaaacacaaaaaaaacaaacaaacaaaaacacataaaaaaaacacaaaacgaacacgcgtacgaccacgcgtgcacgatgatcctgtatctgttataaatatcattattattaaaaaaataaaaaaacatgaaaataaaattacataaaaaaaattggacaaa

SEQ ID NO: 325279 - DNA, 371 bp, Zea mays
cgtctcgctcgcctcggacctcgccgtgcggcacactcgcagcgcgttccacttgttgggtgctggtggatttgcgtccgggccccgaaccgatcgagtcttttgcgatggcagcagcggctagtctccaaggggccgggcgatcagctgggagacttcgtcaggccgcgtcactggccggcaaggccagcactacccgaggagggccgtgcacgcctcgtcgtacgacacgaacccggaggagcaggtgcgcccggcgttcgtgccggacgatgtgatcagcagtgcagggagccccgacaagtactggagcccacagcccaagaccggcgtgttctggccggcggttgtggacaccaaccagctgggcg

SEQ ID NO: 325280 - DNA, 290 bp, Zea mays
cccactcgtccgctcacgcgtgctcccacgcgtacgaaaaaaaatataaaaaaaaaaaaggaaaaaaataataaaataaaaaaaaataaaaaaaaaaaaaaaaaaaaaaaataaaaaaaaaaaattaaaagtttatatggacgtgcattttgagctatctaagattgaaatcagttccttaaaagctataactgtattattagatgacttaattcaatttgaatgttcgtcttttcaaaacgataatgattgaaaaaaccgtgcagttaccgaagttaatcacctttgat

SEQ ID NO: 325281 - DNA, 442 bp, Zea mays
cccacgcgtccgcctccatttgattacattgtaggaactgacattgtttattcggagcatctgttgcaacctctaatggagacgattactgcattatctggtcctaaaacaaaaatattggtagcctctgtccccctttccagagattatttctgcaaagcagttgtttgagaaccactgaaccgctgctcgctatccacagctagggtacgagatccgttcgacaactgtccatgagaagatgatggaaatgtggaaaagcaatttcattgtgaaaacggtctctagatcgaagatggatgtgaaatatcagcatcctagcatacatctctacatgatggacctgaaggcaccattgatccctgaggttgaggctgccgacaatgggaactacgaagaagaggttgaagttgctgtgaatcaagaggaagacgaagatcct

SEQ ID NO: 325282 - DNA, 402 bp, Zea mays
gaaaaaggaaggatccgtgtgctgaccttggttgatccgacattgttaataaggctcaggtgatgacacgctctagtggagaccattactgcattatcctggtcctactacacatatatggctagcctatgaactactgtacctagataatttctgacaagcaggtgcacgagaaccactgaaccgatggtcggtatgcacagctcgggtacgagatccgctcgacaactgtgcatgacaagatgatggaaatgtggaaaagcaatttcattgtgaaaacggtctctagatcgaagacggatgtgaaatatcatgatactagcatacatctgtacatgatggacctgaaggcaccattgatccctgaggttgaggctgtcgactatgggaactactaagaag

SEQ ID NO: 325283 - DNA, 388 bp, Zea mays
gatgggagtaatggcactgtagaaattattaggattgaagtctatcacgttcttttgggggggaaagtatcctatgcgatcacaatcaacaagagccaagaagctgagacaacaattgaggaagataaggacttatatgagcaggggaagaaagccttgcaggagaacatacgtcaacagcatgctgccagcaccgatactcagaaactggtggataccaacgatcaagatcctgaggacgacatatcagatgcattcgccaaggcccgacagttgaagaatactgagaacagtgagacaacccccaaaactgagggtggctcagctgaaaaggggaccgctgtcaccggcaaaggtgattgaagtgcaaacctgaacacatggcctg

SEQ ID NO: 325284 - DNA, 78 bp, Zea mays
cccacgcgtccgaccacgcgtccggccaaatgttatataagatacataaatggtagatggagatcatctgtaagaatt

SEQ ID NO: 325285 - DNA, 451 bp, Zea mays
  unsure (1)..(451): unsure at all n locations
cggacgcgtgggcggacgcgtgggtttttttaaaagaaaggcggatagcaacataggaagttcagatagtcaccacatggagaggactacatgctcaaaatcaacaggaaacattgaagaacttgctgttgcagctacgtcagcaatggattgtacattatgtaaagaaaatcatttgagcatggaggaactccggatgatacatgttgcaaaatggaggacactctttcaacataacagattgcgccattggggtgttaggagaagtcctaagattcagttgtttcttgagctaaggctacaaaagccctctacgcctatagcttctgatagtatgtcaactccaacaaaagaacagtcatccctagagagcacaggaaaccttgatatcaccaaacttctggatgaactngaaataccatctcggttctagaatagcacatcgtcttca

SEQ ID NO: 325286 - DNA, 311 bp, Zea mays
atccggagcagccgcagtcccaccgaccccgccggcggtcgcccttcatcttcttgccggtgcctgttgtttctcttttcaataatcaagatgagccgtggtggtagtgcccgtggtggtcaaagttctctgggttatctctttggaagccgtgagccccccaaaccaacagtggcaccagcttcaagtgcttcacctgttgagaaaccatttgcttcaaagactgattccggccaacaagttgcttcttgggttaccaggccaaccaattacttccacaaggcttattgtcagaacacttgcaactttct

SEQ ID NO: 325287 - DNA, 438 bp, Zea mays
gattttagtaggcgggatagcttttctgctgtgcagccaggaaataacgtccctcaccagggtacagagttcaatgatcatccctctacccagttaccctattcacccccaccaccctcacagtcccagcatacttctccatcacaatcttattcctctccctcgtatcaggcaacaacagattacccttcttctgattttcacaaaccatcccccaattattcaactcccggctacacaagcacagatttccctaccaatgaagtccacaaaccaccttccaattattccccaccttcttacacaaggacagatcgcccttccaatgacggctacaatccttacagcaattggtaaccagatgtttcggcttacccttaagcatatcaacccccaccctacacatttgaccctcagcacaactcttaaaactactac

SEQ ID NO: 325288 - DNA, 231 bp, Zea mays
acgcccacgcgtacgctgacgattatgtccattccacacgcctctaccctatgcatcggcatcgtaacatctcgatcgcagtatccagagcgaggcgaggacaacatggcgcacattggaaggtggtggagaccatataccccgacgtgcttattgtccactgacggcaagtcaagaccgctggcattgctgaaaccctgtagctatggaacatggtcatctgtggacaac

SEQ ID NO: 325289 - DNA, 77 bp, Zea mays
cccacgcgtccgcccacgcgtccgcccacgcgtccgcccacgcgtccgcccacgcgtccggtagtgctagatcgcga

SEQ ID NO: 325290 - DNA, 191 bp, Zea mays
ataaggtaaggggcgacgaaaatggctccaacgaccgacaccaacgacgacagtggctacggcggctagcgcctacgcaagctgcacgcgatcgacgacactaaacttgaggtgaaaggtctggtggactccggagttaaatccatactgttcatcttacaacacccaccggaagccctgagcgaaataat

SEQ ID NO: 325291 - DNA, 281 bp, Zea mays
acccaggcgtacgagcgctcctaatcaccaactaacaatatcttcttcatctcactaacaccgcgctatcagggttcgggtctaatccaacaatgggcggccgctcctccttcaaacaactactcgcccccgctctacagacaattaccctcctgatcctctcagaagacgccgaaaccgcgtaatctactgaaagctactacaatttgactctcaaagtgctgccatcgccactttacaactattttcccagcgaattctacctcccctgcctgctacaa

SEQ ID NO: 325292 - DNA, 261 bp, Zea mays
ctccaaaccaaacgccccagccccaccgcacgcatacggcatacgcatccctcatctccctctcctggccttcccgccgcggcgccgcctctcctttccgaattccgactcccgcctccccggggtgcgtgtttccgcatccggctcgtccggcgatcctcgcgaggcctcctcgaccccgaccccgacccggcgcggccaccggttcaagacattcacaaaaaaacatgggtcatgatgaagctgtaggtactcagaatt

SEQ ID NO: 325293 - DNA, 301 bp, Zea mays
tcggactcttgggaaaaaaaaaaaaaaaaatataaaaaaaaaaaaaaaaaaaaaaaaaaaaagaaaaatataaaaaaaaaaaaaaaaaaaaaaaaaaacaaatttatataattatattttactatctcttaaatactattatatacacttttcttttatatatactaattttaattaacttttatttttttttaaatctttttattttttataaattcttttatacccaatttactactcttttatatttttattttatttttcattttttcttatatttcaatatttttacatctttttt

SEQ ID NO: 325294 - DNA, 205 bp, Zea mays
ctcataaatagatgaatgttcagaaaaaattaaattaaaaaaaaattatttaattaaaaagaaattgtataaataaataaatttaataatcaatttatttttaaattattatatctttttttccttctttttaactatattattttctcttattcttttttttttttttttcttttttcttctcttctttttttttttttttata

SEQ ID NO: 325295 - DNA, 460 bp, Zea mays
cccacgcgtccgcccacgcgtccggtacaagcaagtccaaaacttcgactggaggagcggggccgactggaagaccgccgccaacatcctcttcacggtgccccctaagcgcaaggagttcggctgtctatttagtggcccaatatgcacggagggagatcaaaaggatggaaggggaagcagaagagaaaaggaaaaaagacgaggaacttgagaaacaaaaacaggtcgaggaagaatctgccaaggaggatgctgattcaaagctttcgaaggtattagacaggctagatacactagagggtgtcgttaaggagattgtggatgacaaaaggaaactttcttcccctgatttaccgaccaaagaggaggttgcaaagaaaaatgaagcatctccggctaaggcttctgattccagaagctatggtcagccagtggtggctgccaatagtaaggacac

SEQ ID NO: 325296 - DNA, 138 bp, Zea mays
cccacgcgtgcgttgacgcgtgctgccatgcttgaaattttgacatagaaacgggagggcacctccactacaactaggcagcgcagatagttaggtcaaatcgatattgacctgagatgactgatcatagcttaaatt

SEQ ID NO: 325297 - DNA, 281 bp, Zea mays
cggacgcgtgggccgcggcgccgtcgtgccctgcggtgggaagcctggaaaccacgtcggacgttgatctcccgtgggacgctccagattaggaaatagtgtacccattcgtggagctcccgggaaccgtctgatggcggttgatcagataggattagatgttgggtactgtttcatctgatgggattgtgaccgtggatccacgggcggacgggcccgatgcgatctggttgtaattaaagccgaacaatagatccttaatcctgtggtcgtcattgtgc

SEQ ID NO: 325298 - DNA, 209 bp, Zea mays
acgcccacgcgtccgtccacgcgttcgaaaggatccgattgtcatggatttctcgaacttggagtttgaggagtgagctggaatgactaaattatggttgatgcagtacagatatattttgagcttgaagaaaaatggcgggcttagtcttgcactacaagaagacagagtgaaagaaaaggggaggcacttcttaagggaccaatttt

SEQ ID NO: 325299 - DNA, 305 bp, Zea mays
cccacgcgtccgcggacgcgtgggttctagatcgcgagcggccgcccttttttttttttggtttggtttttttaaaaaaaataaaccgctttatttgatatccgtcatttcaacgtaccaaatgaatagaaagatggccttgctgcgctcgtgcttgagtgcatgtttggtggttatactcgatcgatccattcagaaattacttgacacaggtatatattaaaaaacacacacattcaggaatacggggcaaacgatggaaatctaaagaatccgatgaaagggtatggaatatatatttcatc

SEQ ID NO: 325300 - DNA, 460 bp, Zea mays
gtcgccgaggcccacgctgccatggactggggccgccgcggccggcgtccgcgccgctggagacgcacgcacgtgggcgacgctctagtgccgaccgtacagggccgcatccacgcgccgacaggccggggccgagatgcgcctgcgccagagtgcgcctcgccggggctgtacccgtgcctgcggtacgccaaggccgactcttacgttggctctccaaagtggcgaaaagtaggttgtacgagtgtatggtgaagacgatggagatctcaccttgtatttcactctggaatcctacatgaacactcgatgtacagcagcagcagcgtcccgatgccgagcgtcatgaccgtcgaggagaaccgacagcgcgccatcgacggtaacaccaaccgctcggtggagagagactcgtgctgataacgtgtcaaagtctactcagtgataatcagattgagag

SEQ ID NO: 325301 - DNA, 83 bp, Zea mays
aaaaaaaaaaaaaaaaaaaaaaaaaaaaaaaaaaaaaaaaaaaaaaaaaggacaggggcggtcgatgttcaagattcaagttc

SEQ ID NO: 325302 - DNA, 250 bp, Zea mays
acaatcatcctagaaaaatgctaatttattgatatctgatccacttcaaaccaagtgtacgcggttattcccgcttaaaataccgccaataaaactacaattcatcccaaacctctaggtcaatttaacgcccaaccaacccacaacccaggcccagaacacagtctctagcccaatctataccccgaaatgcacgccgctttaaccccccctttgacaaaccccatatacattttcttatacgcggttt

SEQ ID NO: 325303 - DNA, 317 bp, Zea mays
gaattgccggctggacgccacgcgtgcggtcgtcatcatcagccccgggtgtggcgctggtcagctggtgaactgttcgagcttgtgttcgaacgatcagccgcggaccgtgagcccaccggatcaacagcaagccgcagattcccctggttgcagaactccgtcgaatcctgcgagtcctacacgcagacgcagctgcatcttctcttagtcatcactcatcgagccgatagcaccggcgcccggacgcttgatggaggctggtggcgaggagttcgcgatcggcgtgacgctatgcacgaagaccatcctggggg

SEQ ID NO: 325304 - DNA, 255 bp, Zea mays
ccgaaaacaaattttgcatctggtttttgaaagcaaaatttgttttcggtggccttctagaaaaaaaaaaaaaaaaaagaataaaaaaaaaaaaaaaaaaaattaaaaaaaaaaaaaataacaaaaaaaaaaataactgaacaagacattacaatcaaaaaatatgaacaatattgtgggaatgcacttgatatgcttcttcttacagatgaaaaaccacctggggctggacgcagatgtcaatccacgaactgt

SEQ ID NO: 325305 - DNA, 359 bp, Zea mays
cccacgcgtgcgaaaaaaaatgattatataataggaatataagaagaaatagataaccaacgtagagtgaataattgcctgcttcgaaaactgctaaaaaacttacaattaattccgattcttgtggggtcacttgaggagccagcaaaccaccaaccaagggtccgagagcaggtatctagagcaagatgtacggctagaaggtcgactggctgtaggagccgttgaccaagtcgttatacatcttcttatacacctgcttcctgacgtagatgccctaccacttgagctaagactacgcgttagagcacgccgtcgcgcaaggcatgccgtactggtcgccgttcttgtcgtcgtac

SEQ ID NO: 325306 - DNA, 427 bp, Zea mays
caaacaggaggattggaagcatttggatcagttcctgtggctgactgaacagagccagttttagcaaacttgtccctgtctgacagaacagcatcatcagccttccgtttctttgatggcagaatgcttctcttacaagtagagtaatcttcgatggcgatctgacgagcctgttaatcagcaggtttgtcgatacgaggtcaaaggcatcgcaaaaccctctgtactgccattgtttagccccccttcagacagatgccgtcgacgagatgatcgcttgagaacaaatttgagattggtatagtctgcatttttgtcgttagcatgtgtcgctagggattgctattgattttcttgtaatagcataatctttactgtagaataggcatcgggtgctaaccaatcctatgaacatataattaacatt

SEQ ID NO: 325307 - DNA, 172 bp, Zea mays
gcgacgacgcgttgggtcaatgggcaggctaaggctcctgcgctacgaatgtggacaagatacatgcattgtgtcatatcctgcaaagggtgtttaccgagccctcgcccattcagactacggcctgataactcttctggcaaccgatgatgcattgggtctccatctatgc

SEQ ID NO: 325308 - DNA, 311 bp, Zea mays
cggacgcgtgggttcgtagctaagaacgtacagggagagagagagagttgacagcagggagcggcaggaagggagaaaagcggaagagcgccgtcgacggcttacgtccagggtcgatccgtcctcaatagatggcttgtgaggatcgtagaggtgtactaatggtgtcttgaccttgacccactggaacttgtgcggtcgcatggcaatttctcgccgaagtggatgaaccaccgtaattccggcctttatcgtggcctgacctgtcgtcattttcactgccgtgcgaggacacgtgtcatcttgaaatg

SEQ ID NO: 325309 - DNA, 430 bp, Zea mays
cggacgcgtgggttgcaacttgttcactgttttcttccagctcgagctcaagtacgcgagaccagaccgacgctctcgagccgccgcaccggtacgtgccctgggtggtcgtcgacgggcagcccctgctagaggtaagttcctttctttcccctgaacttcaacggcgccgcctttgcccaactgtctgatcaaagttcattcccccgttggtgttggtggtgatgatgaacatgttctcgtcgatccaggattacgagaatttcgaggcttacatctgcaaggcttacaagggcactccaccgaaggcctgtgagggcctggaacgtctgcagatggccctcgagacagcggcggatgcgcgcaacggcgtcagctacaactccggtgtcagcaagcttgcgactgctgaagatgatggtggggagca

SEQ ID NO: 325310 - DNA, 380 bp, Zea mays
gcgagcggctcgcccttttgtcgaatacttttattcccaatctccttcagccattcccgtggtgcgtgtctctcttgcctatgtttctctctcttgaagaaaccccaataaggcccactaccaatgcgtacgatgacaggtctacgacgcgaacctgcgcccaacggaccccgctccggccaaccgtaccaacactgcccaagccgccaaggcagctcatccgcccggaaaaatgtgcaaccactacttctgaaaccccgagaacaatgttacgcatcaccgaccacgacctcgaggtccttcccaactgcgagaccaagccccatgccaacttcacgcccgacgagaggcccagaagcagcacatctactcagcagaac

SEQ ID NO: 325311 - DNA, 295 bp, Zea mays
gcagcttactggaactgctcaagtgcattttatttgaactactctcgtactctggagtagcccggatcattaacgcctatcactacagatcatcagcgctcatatgtgcctagctcaatctgctgtcgctctctatacgatctctacctcaagcaactggtttcagagcatcttgtggtatccacagatccatctgcttatctggtgctccagatagaacaattgagtgatgacctttatcctggcttcacaatctctcacctggatcatgaatagcaccattctgctacgtaca

SEQ ID NO: 325312 - DNA, 160 bp, Zea mays
cccactcgtactaaaaaaaaaaaaaaattacataaaaaaaaaaaaaaaaaaaaaaaaagagaaggattaaaaaaaaaaaaaaaaaaaaaaataaaaaaaaaaaaaaaaaaaaaaaaaaaaaaaaaaaaaaaaaaaaggggattatcttttaaaaattcaa

SEQ ID NO: 325313 - DNA, 303 bp, Zea mays
gccgcacctagagggacgcatccgccgacgcgtccgctacgccgacgatcatcgctacgatacttgcttgtcactgtcgccggaattcttgccaacagtcaagagcagccttaaccctggctcctctcatgatgaacgttatgtgggtctcctctccataagcggtgagaccgagacactagacatgatgccatcatcaagcactgcacctactgctctatgacctgcacgtggtcagaaaccacctcctgtcaagactgatagtaccagcaagatggctactgacagatccagccgcaccaa

SEQ ID NO: 325314 - DNA, 312 bp, Zea mays
cgccgggaccgccgcctctgcctcctcctcctcccctacctcttcagcgtcccacggagaaaccacgtgatgaggctgctgcggaggaggaggaggctgagctggcggtcctgtcccccggagtcctagaacgtgacgaccctgttgtccccgccgccttcgtcgttggctctgggaacagtgcaactgactacctgccgatgcctgagccttttgatcatgactccgccagttgcagtcttaactactgtaagctattgctctgcaagaaggtttcctgtcctatttacctgttctgcgactcttacatct

SEQ ID NO: 325315 - DNA, 308 bp, Zea mays
tcagcaactacaggctcgcatcctcctttcccccgcaattccgacgatcaacacgagggtacttccataaaactatctccggaattctttccaacagtcaagatcatccttaaccctagctcctctcatgatcaacgttatgtggctctcctctccataagctctgagaccgacacactaaccatgacaacatctgtaaccacctccacctactgctctatgacctccatcttctcataaaccacctcctatcaaaactgacactaccagcaagatgtctactgacataaccagccacaccaataact

SEQ ID NO: 325316 - DNA, 151 bp, Zea mays
cccacgcgtccgcccacgcgtccttcctcgcgtccgcccacgcgtccgaaaaaaagaagaaatattaaaaaaaaaaaaaaaaaaaaataaaaataagggcagacgatctataggttccatacttcacattcacatccatgctacttattat

SEQ ID NO: 325317 - DNA, 311 bp, Zea mays
gagagaaggaaaaatatccccaaaccctagctcccgatctcgatggcgaaccctggcgtgcttcttcgacatgaccgtcggcggcgccccggcgggccggatcgtgatggagctgtacgccaacgaggtgcccaagaccgcggagaacttccgcgcgctgtgcacgggcgagaagggcgtgggcaagtccgggaagccgctccactacaagggctccaccttccaccgcgtcatccccgagttcatgtgccagggcggcgacttcacccgcggcaacggcaccggcggcgagtccatctacggcgagaagt

SEQ ID NO: 325318 - DNA, 242 bp, Zea mays
gcaggctgttccacaaggcggctcatgtctagactaaccgtctgcacgtgccatgaggggatggtaagcgtggatataagcagcatgcacgtaggcatgacgagcttgacagtgcatctgctgctcacaaacagctactgtaccactgtcacatccttcgacctgataccgaaattgacaactccacgtacgctcggtcgagagtgcacgcaaactacagcacagaagaaactacgccgcct

SEQ ID NO: 325319 - DNA, 122 bp, Zea mays
gaaaaaaaaaaaaaaaaataaagagaagagtttaaattaaaaaaaaaataaaaaaaaaagaaaaaaagaataaaaaataaagaaataaaaaaaaaaaaaataaaaataacaatacttaaata

SEQ ID NO: 325320 - DNA, 170 bp, Zea mays
cccacgcgtccggcgacggcgcggtggctgcaggttgccgccatggcggtggcgctggtggcggagtgggcgacggcggcggcgcctcggaagcccgtggacgtgccgttccagaagaactacgtgccgacgtgggcgcaggaccacatccactacatcgacggcgggcg

SEQ ID NO: 325321 - DNA, 348 bp, Zea mays
tgggttggcttctcctccccctccggggcgggttcgggttcgtgaggttctccggggttcggtttcgtgggtgagcggatcgagatggcggcgtcggatgttgagtaccgctgcttcgtcggcggcctcgcctgggccacggacgaccactccctccacaacgccttcagcacctacggcgaggtcctcgagtccaagattatcctcgatcgggagacgcagaggtcccgcggcttcggcttcgtcaccttctccacggaggaggcgatgcggaacgccatcgagggcatgaacggcaaggagctggacggccgcaacatcaccgtcaacgaggcccagtcccgcggc

SEQ ID NO: 325322 - DNA, 275 bp, Zea mays
acagagaggcctgcgaataatgttccctgcttcgctgagacaggatctggtccatctgggctgctacaagcatgccgacactgcgagagatggataaagagggccctgtcgtcgctgagggcagctgtacatcctgatccctagcccgagccacaacactcttcgcacatggagctgtgcatgtactaggctgatgcatacgcgaagctgcctgtgctaccgtcgcgtctgcacaagttcgtcagctacaagtccgcgttcgcgcacttaggcgc

SEQ ID NO: 325323 - DNA, 80 bp, Zea mays
ctcagaaaaaaaaaagaaaaaaaaaaaaattttatataaaaaaaaaaaaaaaaaaaactaaagatgggttttaagccaaa

SEQ ID NO: 325324 - DNA, 159 bp, Zea mays
cttgtacttgtaccaaaaaaaaaattattaaaaaaaaaaaaaaaaaaaaacaaacagagggatcatataaaacattaaatacgcaaacatacaacttactaaactaattatattgtatcacctaaattcaatatctcttgtcaatttctaacaacttca

SEQ ID NO: 325325 - DNA, 279 bp, Zea mays
cggacgcgtgggcggacgcgtgggctgtacggccgcaacatcaccgtcaacgaggccgagtcccgctgcggccgcggaggcggcagcagcggctacggtggtggccgcggaggcggctgctactgcggcggctggcgccatgatggccactgctgctacagcggtatcggcggccgctacagtggcatcggcggctaccgtgttgttgatggcggctacggcggctgctaccgtggctgctgctaccgcaactccgacaggaactggaggaactgagcg

SEQ ID NO: 325326 - DNA, 222 bp, Zea mays
aaaaaacatacagaaacaaaaaaaaaaacaagataaaaggaagaacaaaaaaagaaaaaaaggaaagctagaaaccagaggtggggaagaccaacagcttgaccgtgactgcgagcccagatctccaggccggtctggcctaagatgacgtctgcaaagagcctgctggtcccacagacaaattgacatcgctggcgatgccagtgcaccagctggtgagac

SEQ ID NO: 325327 - DNA, 313 bp, Zea mays
agctaacgttggtgctggatatgctgcttttgttcaacacacgagacacgatgctgaggaaaagagatgcgatcataagtcagacagaaaatcgtagcaccactgtggtcgctctcattctgagcagtcagcgtatcatttagtgcctcagcaacatacttgtacattgcgggcgaggaaaagaaggaaacatgtaaaatcagtccgagggaaatggctccagaaaagcccctcagagcgacttgttgcctgatacaggtatcagaaacttaacgctttaggccaagaaaaagagaacagtgagcgttctgcc

SEQ ID NO: 325328 - DNA, 236 bp, Zea mays
ggccttgatgctagtgccgtccagttgttaaaaatacgctcaagcatgatgcataggggctatagatcgcggctgtctgaaattcccatgatagaactaacatataaacatggatattcaacacaggatagtacagttacacctccaaaattcatttcccgaagcgagcacatagacattcagattacatatctacctgcaggacaatgcactgaacgtgcatatacagaatcacc

SEQ ID NO: 325329 - DNA, 206 bp, Zea mays
cccactcgtccggtgacgaactcgaagcttgcgttctggtagtacaggtctgcagcaagcggtggtagagcgagaggtcgagaagatcaatagcatcactgtgtctgcgattctagttatccaggtcactctggtctctgatgacagctcctaaggacctgctggtctctctacgtattagctgggctgttgctgccagtgcacta

SEQ ID NO: 325330 - DNA, 251 bp, Zea mays
gccttgtgtattaggatttgagcttcactctggatgtagatgatccagccactgcctgatagtgataataataataatacgccctctcctaagccatgtactcgggtgttgttgtggagtgtgtggatgtgatacattccctagctgtattaaaagtgtaactgtaatatcgaaaggcacactccatcatgccacggggggcaattcttccgtccacttgctcatacgactcaccatcataaaaacaagca

SEQ ID NO: 325331 - DNA, 441 bp, Zea mays
ctcattggcatgctaatgaacacttgcatatcatctgagtgtggtattatgcatcctcacgggtcaggacagattggtgtgcttccataacatgattagtaagttttagtttttcttccttcttacttcagagatcttctaaagattggaactggagcagcaaaccatgtagaaagaagaaaagttaaccgactacatgttgaagtagtcatagtgattgcacatattgcatctgattcagattgttgtatggcaaattgctcgtccactcatgtttgaaccacgaaggttttagttatacattttcatttcctaaatagttgtttctcctaggccctagtgcggtacattccccatgccaagacaatcttattttaatttgacaatggaaatgacttgttcgtttgacttataacttactaacagttcaataactctcgt

SEQ ID NO: 325332 - DNA, 104 bp, Zea mays
acagggctctcaagataatttccggtctttagaactttgacaggagcagtgttgcatctgtaggcattttttcagataacggaggtgcatcccatgaacccata

SEQ ID NO: 325333 - DNA, 393 bp, Zea mays
  unsure (1)..(393): unsure at all n locations
ttcccgtcgacccaccgtcgcggactcgtgggtctgttggggattgtctctgggaactgctacaggagaagagccgatggtatgtacattatggtgttataataggtggcattggagcaacactctacggccgcagtgcccgactcgcgaccccagtggaggtcactgatggacaatgctggtcaacagaaccatctgagcggccaaacttacagaggttgnattaggctgcgctcatgcggcatctagaaggtcaacaacactagggaccatctgcacgcataagttgtaccagggcagcagtcagtcaaacttgcatgttacatccatgggccgtcaattcacgccatccgccatatatgcctaggatctgttcataacccttcatttgtt

SEQ ID NO: 325334 - DNA, 82 bp, Zea mays
aaaaaaaaaaaaaaaaaaaaaaaaaaaaattaaaaaaaaaaaaaaaaaaaaaaatggaggggttccttactaacgaaacaca

SEQ ID NO: 325335 - DNA, 70 bp, Zea mays
tcttgggaaaaaaaaaaattaattaaaaaaaaaaaaaaaaaaaaaaaaaagaagaagaacatttataaaa

SEQ ID NO: 325336 - DNA, 367 bp, Zea mays
cccacgcgtccgctcgccacgtttgaagggatgtacaaggaggaggtctcgtggttcgagcagcgtctccagcagctcgagctgccaatgcagcttgatttgccgccgcagccaccaccaccgcagctcccagtttctgtgccagtgcaagcgcccctgaggatgtggggtgggaggaggcccaagcccaaggctagggagccaaacaagagggagatggatgaggaggagaagcagaagctgacggtggagattgagaacctgcctgaggacaaagtgctgaatgtgctgcaaattgtgcacaagaggaacagagatccagcattgtcggcagaggttgtggagctagatttcgacgagctggata

SEQ ID NO: 325337 - DNA, 301 bp, Zea mays
ttcccggtcgacccactctcctcggactcttggtcggacacgtggaaaaaaaaaaaaaaaaaaaaaaaaaaaaaaaaagaaaaaaaaaaaaaaaaaaaaaaaaaaaaaaaaaaaaaaaaaaaaaaaaaaaaaaaaaaaaaaaaaaaaaaaaaataaaaaaaaaaaaaaaaaaaaaaaaaaaattaaaaacaaaaatccctagaaaaaacaaaaacaattcaccaattaaacacaatagcaacccatttaaataattaaaacattccaaaaaaataaaagttcataacataacaaaattcaa

SEQ ID NO: 325338 - DNA, 142 bp, Zea mays
aaacccgacccgacccactcgtccgcccacacgtccgcctacaccacaatcacttctccaaaataacaaatctacatatcggaagatttttttacattacccacaacccttccctacacaaaccaaacaaaaaataaaccac

SEQ ID NO: 325339 - DNA, 448 bp, Zea mays
atccagtaactgggagtgccgtaatgctgccaggagttgaagacgattgcgtctgggttgcacgtctggtcagatgctgtgaccctgacaatctccacaagtgggctccaggccagtatcaacgctctgggatcaaccgccactgttctcacatcagcagatgtgatggatgaaaactccttcagcaacccaaccaaggttgtgccggtaaagagcgatctgagcaatgctgcagagcagatgcaggtcacgctggctcctcgctccttcagctcgttcgatctcgccctggctcagtccaagcttgtagcggagatgtgagctaggctggtacactagtatacaatacaacgtgtgaagtgtggtacacatataccagcaaccacaggggttgccaagctgttgttagcatcttgaacacatggctttgtatggtgtataatgacat

SEQ ID NO: 325340 - DNA, 259 bp, Zea mays
cccactcttcctgtccaaacatattagatgctgctcttaaccaacctatccagcggagggttttcttctatattacagatattcaatctatactatagactctacaataatgaccaatacactaagcagacagaatttaaaaatagaattctcagatatacaactgtgcctcctattccatgaacccccatatctcagcaactcattctatagtcttaccactgtaaagacaactattcataacaccaatttcatatat

SEQ ID NO: 325341 - DNA, 435 bp, Zea mays
ctgactcgtgggttgccaggaagatgctatcttcacgacccacaatggttagctggggagatgttgacaaagttcctccatatgaatctatttgcaagcggctacgataagtacccctacacaatgacctctggttgactttgaaggatccttccgttgaaaactaaacaatcgcttgtatgaagtgccctagctcatgaactgcttttctttggggcattcaatttagtgagcttaggatttcagcagctacgttcagttgtaactgttccatagtagattaggaagactggcgatcatttttatgtccattttctgcgactatggatagcatgagtattctgctggcctgaattcccggtgtaaacggcttctgaaattttgaatcattgataaactaatagtgtttggtttgaggaaaaaaaaaaaataaag

SEQ ID NO: 325342 - DNA, 429 bp, Zea mays
cggactcgtgggctgcgatctcttctgtgcagtataaataatgcagcatgaggactgaagatctgcattgattggtgtaagaaaaagaagttttctagagattcacatagttgactagccgatgagaggcggagattgttggcgagatgtacaagcagaaatatcatcagcaaacaaaaggtactacagtaggtaaattacctactgtagtaccaggtaaaggacaagagacgattccctggtaagagatccacttgtcccgttccacccttactttccctctctctgctgctcgcaaatatccatctttgaaaccatatatcatcctgcaacatgaatccatccttgagtcctaaaccggtgttcctatcatttgctactgcaaagggcttctctttgcatgcttcagtcacatgaatgatgagctcg

SEQ ID NO: 325343 - DNA, 274 bp, Zea mays
gagaaaacagtgcccacatatgccttagtttttctttttcgcgtagaattttcttgatgagttcttcttttgctgttagagtgggtgcttgacaagttgacacttttttcgagagctgaaaatattagcttttgctgtacattctgtaaatttttccgttgactaggattcttctttgtacgtaacattcagctaactttttgtacatcaagcgaacccagaaaaaaaaaaaaaaaaaaaaaaaaaaaaaaaaaaaaaaaaaaaaaggcaaaaa

SEQ ID NO: 325344 - DNA, 398 bp, Zea mays
ctccactcgtccgcggacgcgtgggaaaaagggcggcacaacagaatacacacctcgaggggtaattctgctgcatgttgaggtgcctacatgacaagtctataatagcataggacgctgagattctcatggtctgatgcacatcctgtaactgaaggtcagatgcacagattctacagtgagcactgcattctggtgactctgtgctcattaagcgaacctgaatcatgcatataggccaaagattttacacctacagatagcactggagcattccaattgctggaagatcccataaaacctaaccaatgtccatgcttacaccataggctattttcagctgtgaatcttatgtcaagactaagtcatcctaggagcactttattgccccatgtgct

SEQ ID NO: 325345 - DNA, 59 bp, Zea mays
aaagaaaaaaaaaaaaaaaaaaaaataaattaaaaaaaaaaaaaaaaaaaaaaaaaaaa

SEQ ID NO: 325346 - DNA, 383 bp, Zea mays
aaaaaaaaaaaaaaaaaaaaaaaattaatttaaaaaaaaaaaaaaaaaaaaaaaaagaaggggaaaaattaaaaaaaataaaagaaaaaaaaaaaaaaaaatacaaaaaaataaaaaaaaatataatatagggccggcctttttaaatgtcccagctttacttccccttccttccgacttattacttcttttttgttgccccctaatttaatttcctggcccgtctttttccaacttgcgtcctggaaaaaccgtgggttccccaaattttttccccttgctgcacttccctttttgtccaacttactttatctttatcggccctttaccttttgcccttccaaacatttcccccaccttattgcctaatggtcccccccctt

SEQ ID NO: 325347 - DNA, 72 bp, Zea mays
aaagaaaaaaaaaaaaaaaaaaaaaaaaattataaaaaaaaaaaaaaaaaaaaaaaaaaacagaagggtttt

SEQ ID NO: 325348 - DNA, 169 bp, Zea mays
gtctcgttcaacgtctgcgcgcatggtgtgctcctgtaaataaacgtctgagtctgacgaactgacaatagattattgaccgcagccaaatctattgtgtctctggccaaataaatatttaatcacaaagaattctataactcacaaagtctaaagctgttttgttacg

SEQ ID NO: 325349 - DNA, 66 bp, Zea mays
cccacgcgtccgaaaaaaaaaaaaaaaataaaaaaaaaaaaaaaaagacaaacaaaaagggagaaa

SEQ ID NO: 325350 - DNA, 214 bp, Zea mays
gccgctcgaccgccgacacatcagcgcacacgtgggccaacccctccgcaggcgaggaggcgagcatcgcggataccgagcgggacgtgaaggcggaggatacggagaccgacgacgccgtgacggccggcgtcgataccgccgtcgaggccgacgttacgccggcggacgcggttacggccatcatgcaatcggatgccaaggtctcaaccga

SEQ ID NO: 325351 - DNA, 468 bp, Zea mays
  unsure (1)..(468): unsure at all n locations
cccgggctcgactccactgcgtctcgattgtttggccatganngtcctcgtcagaatacccttcanngtgttggaccattctactnnngatacaacgtgagcgagcatttgctgattggggcgctatgcaaggggcatcnnaaatgatatatgttcatcatagtattttagtaacccatntngagtaattcaatttctgttgtcacgtnncatgtatgtgactgannagtgtaaatttcttccttagctgggctcagagtgaagnnntttgttgggaatgtaaaaattagttttaatcgacatactgtggatttgggtttcaattccaatccaaaccctggtagtgtgccttcaaatttagtgctgtactattaagtttaaagttattattaatgtgaatattaaatatcaattttctgataaattgttgcctctgttgatacacttatcaaatagttaaaatggata

SEQ ID NO: 325352 - DNA, 296 bp, Zea mays
cggacgcgtgggcggacgcgtggggtgagcctgctgccgtcttcttccgccgccgtctgcgtccgtagagcagagcagatcagagagcggggaggaagaaaaaccgatcgatggcgtccaactacgtggacacaacgggcgaggagggacggttccacggccctcacagccacagcaccagcacgaccccgacgggcggcgcggcggcggcggcatcgccgcgcaacttccggcgcagcttctcctccgcgtcctccgcgggccacagccacggcggcggcggcggctgtgccaag

SEQ ID NO: 325353 - DNA, 372 bp, Zea mays
gcttcctattattttatacataggcctttcctaattatctcagtcacctaaaaacaatgcatatctagttcgtgtcatgatacggattccggagttcctgaatgccggtgaagagttgtggggttgtgacatggaggtgttcacgaagcagtagagcctagagtagaggaggaactgaggaaggtacagggacaaagtagctatccaagaggttgctgcctgatggtgacgtgaacagtgaactgcagcgatcgaaaatgttggccgttcgaacaccacaagttttttttttttgcttgatcaaaaatgtttccttcttgattggatgcgaatacgtgattctgtgcgctacaagcgtcatcggaggcccat

SEQ ID NO: 325354 - DNA, 322 bp, Zea mays
accacgcgcacgcccacgcgtacgatcgagtgccgacgacttggcaatcaccagcagcgacgacatggcggccaccagcagcaagcagccggcagccgccagaccggtgcagggcgcagccgccgcactgctcgtgatcgccgacgtcgcggtgtccgtgctcgacatgagcaccgagcaggtgagcgacatgaacaacgagcaggtcaagacgagccaccccgcggccgccacgacgacggacccctccgacgcgccggcgcaggcgtaccgcaactcgctgtccggggccgacaacaagtgccggatcggctacaacaac

SEQ ID NO: 325355 - DNA, 308 bp, Zea mays
cccacgcgtccgcggacgcgtgggaaaataaaaaaaaaaaaaaaaaaaaaaaaaagaaggaaaaaaaaaaaaaaaaaaaaaataaaaaaaaaaaaaaaaaaaaaaaaaaaaaaaaaaaataaaaaaaataataataaaaaaaaaggccttcctttttaaagtttccaattttacttacccttgcattttaactaataccttttatttagggtcacttaatttaatttaattgtccttctttttaaaactttttaattggaaaaaccttgtttttaccaaattaattcactttgtaaaaaattcttttt

SEQ ID NO: 325356 - DNA, 61 bp, Zea mays
cccacgcgtccgaaagaaacaaaaaaataaaaaaaaaaaaaaaaaaaaaaaaaccaagggg

SEQ ID NO: 325357 - DNA, 319 bp, Zea mays
  unsure (1)..(319): unsure at all n locations
gtattntatgtcttgttggttacctgtaatttaattaaaaccatcacttgtatcaagggatacacttcggtaccaactgatggatctcctttgatcatacacaagtcctttgatcacagtcacacagaagtgagaactaagttcacagctaagactcttagcgatacaagagatgcatttgtcgccacaaactcaatcaccatcatcttactcctcggactcagcctcgccactcttcttgttgcccttccttgagtaccgaagtgtattttatgtcttgttggttacctggaatttaattaagaccatcacttgtatc

SEQ ID NO: 325358 - DNA, 367 bp, Zea mays
aagaaaaagaataaaaaaaaaaaaaaaattaaaaaaaaaaaaaaaaaaaaaaaaaaaaagaaaaaataaaaaaaaaaaaaaaaaaaaaaaaaaaaaaaaaaaaaaaaaaaaataaaaaaaaataaaaaggggcggcccctttccattttaaaaaatgggggcttttttttaaccaaaaaggggggggtgaaattttttttaattttaaaaccctttgggaaaacattctggttcttttttggacccatttttttttccctttaaaaattctattttttttttggggccttaaccttgggttcctttttgttttcccccttttttaaaactttttttttggcctccccttcttaaaaatccctttttt

SEQ ID NO: 325359 - DNA, 82 bp, Zea mays
agcctatcaaagctattgatgtgcctcgtatcttgagctatatttgataagatgatgggggaagagaatatagaacaagaca

SEQ ID NO: 325360 - DNA, 292 bp, Zea mays
cccacgcgtccggcgcctcgacgtcctctccaccggcagatacatcctcaacctgtacgtccagaacctgctcgaccagtcctagctaccatatctgtatctgtactgtacatcagcatcgcttcactctgtatagatatacatacatatatatgttagctagtagcatcgaacacttgtcccggtgggtggcggacggagatagtgtttccctgcgtgctgctctgtgtaaactgaaaaatgcgagatgaggcataaagttcagtgaaaggttgcatacattttcttgaag

SEQ ID NO: 325361 - DNA, 86 bp, Zea mays
cccacgcgtccgcgcaactcgacgctgtaacacattttgattctctactcctgaagaggagcagcgaacgacatgatgacgtgtgt

SEQ ID NO: 325362 - DNA, 129 bp, Zea mays
gtaccagtgcccattcattactcgagcgttcttacatacagaagatctcgcctcccatggggggtgtagtcatccaggatgtgcaagagaggcgcgcacgcaatcaagcaagcttgaatagagactatc

SEQ ID NO: 325363 - DNA, 197 bp, Zea mays
atgaacaatatgtattatttaccaagagcggttgtgtcatgacattcgtgccagacgacagtgatggcgtcgtagcccccagccgctagactgggtgggcatcgagaaccaaacggttaacgatggcggtatatctcaaattattgtcttatttagttaggtctgatttgcgtctatgagtaagtgaaagaccacgt

SEQ ID NO: 325364 - DNA, 295 bp, Zea mays
gcagatcttcgtgaagactcttactggcaagacgatcacccttgaggtggagtcctcagacaccattgacaacgtcaaggccaagatccaggacaaggagggcattccaccggaccagcagcggctgatcttcgccggcaagcagctggaggatggtcgcaccttggctgactacaacatccagaaggagagcaccctccacttggtgctccgcctcaggggtggcatgcagatctttgtgaagacattgactggcaagaccatcaccttggaggtggagtcgtctgacacaatc

SEQ ID NO: 325365 - DNA, 89 bp, Zea mays
gccacgcgttcggcatacaccacgtacgtatacacacgggcacggaactagctagctcgctggcagtcgtacaatgaccatgaggggtc

SEQ ID NO: 325366 - DNA, 355 bp, Zea mays
cccacgcgtccggctccgctccggccacctccctcttcttcgactgagtaaacacgagcaggcgagcacgcgacccgacaacgctcgcgcggaggccgaaatgcccgctgctgctcctcttcccagtacgtagcagcggaacatcgtcgtgggtcgtccgccgttgccatcgtgtgacggcgtgaagggatcggatcgaaggaggccgcaagccaagcaaggatcaagaaatggcgtcgcgcggccacctgctgctactagcgctgctcgtgctggccgcggcggcagcggcagcgtcgggcggcgggcgacagcaccagcagcggcagcgcggcgggaggaagccgaagccggc

SEQ ID NO: 325367 - DNA, 246 bp, Zea mays
aaaaagaataagaaatagaacaaaatttgattgataccgcataaaaagattctatcataagtacgagttaatactataataaggaagatcttataaagatacttaaatgagagttgactgtccttgaggttccaacattacgactgcaaatacctgaacgataccgatcttaacaggtatgctaaatttaataatgtggccagcttattaaaacgtgaagaagggaaaacctttgggttttccaaa

SEQ ID NO: 325368 - DNA, 209 bp, Zea mays
attcagtagttgccttcgccttgctttgctgcttccgcctcaatgttctttcagaacgagaggtaaacgtggtgcacaggttctctgaattctgtacgccgtaggacaggggcgagcatgtcacggcgaatgaagaaacaatctctcctagaataactacatggcagcactcatcagtccatccttcccttcagcactctctcttgcac

SEQ ID NO: 325369 - DNA, 66 bp, Zea mays
aaaaaaaaaaaaaaaaaaaaaaaaaaaaaaattaaaaataagggcggcacgatattaatgaggcgg

SEQ ID NO: 325370 - DNA, 367 bp, Zea mays
cccacgcgttctcccacgcttccgttcagtattagacagccactagcactactacggtgacgactgctagaatggatctggtttctttgacaaggtgaatgtatttattcatgtcattttttattagattttaatttgtatttatgtttttttattatttattttattttttattttatttttatatctttttttattattattttagttatcattttttttttaattatattttttatttatttatttttttttttctttatatttttttttatattatattatttattattttatttttatttttatgttattttttatattatttatatattttttaatgattatatttttatttattattatt

SEQ ID NO: 325371 - DNA, 173 bp, Zea mays
cggactcgtgggctatctgccgctccagcctttcgctttggtttatccaccgactgctcgggcgacggctgcatgatggtgcaacgtctgacctacctcaagctgcacagctattccacttagtccaaccaatcacattttcgacaagaaccctgttggccagctcgaatacc

SEQ ID NO: 325372 - DNA, 228 bp, Zea mays
ggattttctcggtacatgaaaaaattactgtatattaaaacccgctcagctcgggtttcaggtgctccccgtgcttcacgggaatttggcgacaaaaaaaaaaaaaaaaaaaaaaataaaaaaaaaaaaaaaataaaaacaaaataaaaaaaaaaaaaaaactaaaataaaaaaaacgacgtgtaaattactattatatataaatacaaaatcgcatagataagaaga

SEQ ID NO: 325373 - DNA, 226 bp, Zea mays
gcgtcccgtcgcttccgggtacgtataactcgtacaacgacgtatctaccttgagcatcagctgcgtgcatttacgacactatgcgaacagatcatatgattgcggctatatatatatctatggctcgggtgtaacaataatgaccgctacatttcagagctatagtactatgacgtgaatcatatatagtcagtatatatacggaaggtctgctcgccgtactac

SEQ ID NO: 325374 - DNA, 223 bp, Zea mays
cgacatcctccacgacgccaccatgagggatgctcgcgtaggctgatcctgatgagctccggcttcggcacctgctgactgctgcttcatcctcgattgtaccaagcatgcatatacagactatgctatacaaactcatcaacctagttcactggcacttgcctgacataattattccacgagacatgatcaccaccattacctgatatatcactgtcatatc

SEQ ID NO: 325375 - DNA, 325 bp, Zea mays
accacgcattcaggtgttcttggcaacagtggcgagcatttatgccaaaactctagtgtctgatatacatgataccagttgtactctttgacacgcaaagatttactatgcaattgaccacctaacgaccagagttatccgcaagctttacaagtcgctttatcaaatctccacttgactgcagggaccattgattgatgctctgaatgacaataatcgtctatgctggtgcaacataaatttgggcttaagcatcgagatgatggctactggtcctactgatgcattctagcattcgcctacatactactcaatacatattgga

SEQ ID NO: 325376 - DNA, 196 bp, Zea mays
ggttcaggtgatacatacgaaaagccgaacttctgtgtcgagaagaggcataaggatttagctatactgaccattgcaggaaaaaactgcctgcgttatcaattataaaatttcacagatcagacatgaaggtaaagacatgaccgaagtgtttgaaatcacagtcatcaagaaaagaaaaaaatgatactaaaag

SEQ ID NO: 325377 - DNA, 300 bp, Zea mays
cttccgtgccagagctctcagtccgtggccttgttgactccgttggcccctcaagtttctcagggataaccgccatatcatgactcactactaatcgagcagcacaattttggtgtacggcattcaagtagcatttgactatctgagtgttatgctttaccaggcttttgcttttagtattgcctttatattgagtactactacaatacttcatgtcgctttgttttcaaaaatactttatgtcaattttgcaagtctgatttgctcgaaataagaggctcatgctgttgtgcggtgctt

SEQ ID NO: 325378 - DNA, 169 bp, Zea mays
aaaaaaaaaaaaaaaaaaaaaaaaaaaaaaaataaaaataaaaaaaaaaaaggggcacactctggatagaggtaaaattttacgcacgctcgcatgcgacgatatatctcttatattgtgtcccacatataaaatactgtggacggattttcaaaacgatgactctgaa

SEQ ID NO: 325379 - DNA, 123 bp, Zea mays
cgcgagccgttcaatcacaacaattatcaaacagttaaatcttaattctgaaatcctgacctcatagccggggtcctcttcatactctggcatgccaaattattcttaaacgttaacttcccc

SEQ ID NO: 325380 - DNA, 271 bp, Zea mays
gcaaggcgttcatgaagctctgaactcgcatgtatctcaactatatggtccccaaactaagggcgccccaagaaggactaacaggtttcggatgaagcgatgtggcaccactccattgtgacgcataccatcaataccatgtaccagcatgactggcaccttatttccaccaatatggctatggaagggctcatgaatgacgaggttctaagcactacctacctgaatgccgaagtactacttaggccacaagatgtcaatggatgacgat

SEQ ID NO: 325381 - DNA, 224 bp, Zea mays
acggtagattgctatgatggttgagatttactcttgaaccaaagatgttctatcttatatcctgaattagttatcccaaaaaaaaaaaaaaaaaaaaaaactaccaaaatactacaacataattaaaaaaaattcaccaattaaaaaaaatcttatagataatacaaaaagagcttattcattctactacctttttaaaaaaaatatgatgcccccacaaagta

SEQ ID NO: 325382 - DNA, 105 bp, Zea mays
cggacgcgtgggctgattttcccttttcaacagttgtcgtgaggctgtatcgtctggagtaaaaaaaaaaagctaaaagccggcactaataatgatattaacttg

SEQ ID NO: 325383 - DNA, 434 bp, Zea mays
agaaaaaccacccactcccatgttcgaccagtccccactctcctctcctccctgcgcatggatagccatgccgagcacctcgccagaaccgtcgcagcagccagagcccaccgtctccatgaatccagcggttccagctccgcccacccatgcagcgcgcctggtccctgcctcgtcctcgccctggccccaggtcgcggccaagtccggcgagcctggcatcccgacgcgggtgcacacgagcccgacgtcccggcgagccgtcctccctgtccctacgtatggctaggctcccctgcagcgcggacaggaggccatggcgcgcggctgagtgcccctgcgcagcggcgtcacgaccagcccctttcttctctgccatatacccctcttgctgcaagttgaagaaccggtcatggaggagaaaatagcctgag

SEQ ID NO: 325384 - DNA, 429 bp, Zea mays
cccacgcgtccggggtgctggcctgcatggccgtcgcgggctacctaatctggcgccacgagggccccagcgccgaccggcgtcccggcggctcgggctcgggggcggggctgtcgtccccgggcgctgcggctgactgcggcaaggagaggtgtcacggggtgctgtacgacgacgaggcgtggcggccgtgcctccgggacatccacccggcgtggctgctcgcctacaggctcatctccttcttcgtcctcctcagcctgctcgtcgtcattgtcatctgcgatggctgcagcatcttctactactacactcagtggaccttcattctggtgactatttacttcgggctcggcacggccctgtccatctacggctgcagcaggttcgccgaggagaacgtcgccgcggcggcggcggcggcagaca

SEQ ID NO: 325385 - DNA, 153 bp, Zea mays
aaaaaaaaaaaaaaaacaacataaaaaaagaattaaaatctaaaaataaaataataaaaaaaaagggacaaagagtgaaagcgctttaggggatccaggttctcgtactctcttatactatatccaaggtacagtatagcgtatcctaacttc

SEQ ID NO: 325386 - DNA, 452 bp, Zea mays
  unsure (1)..(452): unsure at all n locations
aacacaagctagccatggttagcagaaagattagtattgtcggagccatcacatctccaattgtggttgtggtggcactgacactattgatcacacttttggcaccgacagtagatgcacaaccatactcaacaatgccacctagcatgataggagatttattgccacggacgagagtacctccgtctgggcctagccatcctccacccatggcggcgatgccaccatcatggagaatgccatccgctggacctatgaagcctncttccatggcggcgatgtcacctgatgttgttggggatttgctaccacgaggacctagccatccgncaccaagggtagcgacgtcacctgatgttgttggggatttgctaccacgaggacctagccatccgtcaccaagggtggcgatgtcacctgatgttgttggggatttgctaccacgaggacct

SEQ ID NO: 325387 - DNA, 458 bp, Zea mays
tcggacgcgttggaaaaaaaaaaaataaaaattaaaaaaaaaaaaaactaaaaaaaaaaaaagaaaaaaaaatataaataaataatactataatattaaaactaaaatttaactctaatacatattcaatattattttccttcttttattcattatatttaatttatattttttctactttttatatattcttcttttttttatctcttttttcttatttttatttttttttttttttttctatttttcctttattttactactttttattttttaatattattatttcttttttataatatatttcttttaatatattttttatttttttcttatattattttctttttatttttttttatctattttatatattaatatctttatattttttttcttttttctatttttttctttattttttatattcttttatctctctttttttattttttttt

SEQ ID NO: 325388 - DNA, 121 bp, Zea mays
caacctgtatggttgccgtcacttgatccctgatggtctgatgagggccactgacgttatgatcggcggaaaggttgccgtggtctgcggatacggtgatgtctgcaagggttgggctgct

SEQ ID NO: 325389 - DNA, 122 bp, Zea mays
cccacgcgtccgaaaccgaccattcattcctttttccatggcgaggagggcgactgtgatggtgctcgcggcggcgctcgcggtccttctgctagcgtcttcatcgtcgaagacggcccccg

SEQ ID NO: 325390 - DNA, 119 bp, Zea mays
cccacgcgtccgatcagagtgcgctatatgttctaactcgaaaaagcttccctatactctgcgcatgatccaagcccgaaagactgtttcaactacaatcttatgatcagacactccat

SEQ ID NO: 325391 - DNA, 192 bp, Zea mays
aaaaaaaaaaatacacataaacaaacacaaaatttaaaaactaaaaaaaaaataataaaaaaaaaaaaaaaggtactaatattaataaataataaacataaactacaacataataaaaaataaaaatcatatcaactacaaaccattcattctttaacatcactataactatttgcactccttctcttatat

SEQ ID NO: 325392 - DNA, 71 bp, Zea mays
aaaaaaaaaaaaaaaaaaaaaaaattagaaaaaaaagaaaaaaaaaaaaaaaaaagggaaagggtaaaaaa

SEQ ID NO: 325393 - DNA, 140 bp, Zea mays
cccacgcgtccgactagatctagatctcgaggtccgtccttttttttttatatttatttttggtattttttttttttttttatttttttttttttttttttattttttgttttttttttttttttttttttttttttttt

SEQ ID NO: 325394 - DNA, 110 bp, Zea mays
aaaaaaaaaaaaaaaaaaaaaaaaaaaaaaattaaaaataaaacaacaacaaaaaaaaaaaaggaaaaggaaaaaaaaaaaaaaaaaaacaaaaaataaaaaaaaaaaaa

SEQ ID NO: 325395 - DNA, 453 bp, Zea mays
cccacgcgtccgctaacgcactctactccctcccacctgcctctccgtgcgacgggcgcgggtctttgtctcgcggcgtcggcgactcggtctcgggcgcggcactcggctgctccctactccaggagccggagccggagccggaggcctagtagatgaagacgttcgatccgtggccggtcttctttcgccgggagtggaagcgcaattggcccttcctcacggggttcgccatgaccggctgtatcatcactaatatgacggccaacttcaccgaggaggacctcaagaactccaagttcgtccaggagcacaagaagcgctgaccaaccagtaatctatgacatggacgccggatggcactggcagagggatggtgtacggtgttggccgaattgcctgtctggacagccagttatgttatgctggttgaatgaaaaattagcttctttt

SEQ ID NO: 325396 - DNA, 321 bp, Zea mays
cccacgcgtacgcccacgcgttcgatcacgcgtccgaagaaattggatggcactgggagcgtgagagacgaaacgtccgtgcgctatgtgccgctcactagcaaggacgcccagttgcacgcaagctgagtgagctatcatgtcaaaaaaaaaagttatcctgatttgacaaggtgaggcattcaatcgaatcgctacccttgtaaatgtattaatcctactgtctcattgaatgcactggcttggaaataatgtaaatgatggaacatcatggaacgtttgtttcccttcagctgccccggtgttcttacttactatgca

SEQ ID NO: 325397 - DNA, 188 bp, Zea mays
cacaagtgtagctgcggctaccaatggatctacactagctacaagacctacttccgtgcggtgaatatgatgcttgtgcttcgaactgggctgcactctgaggaccacactcttgtttgcattgtcattgagtatacctgcaaggagttactggacatctgcatagtgtacgtctgttacaagatgag

SEQ ID NO: 325398 - DNA, 418 bp, Zea mays
cccacgcgttcgctctgctcctactatgcgaaaccaaccactcaaactctagctacgtttggagatctgaagttgttgttcatagaaaggatcaacagggaattcttagaccaacatgaggaggaagaaatgcctcatgttattagtgttacaccagacatacaggaggccattggacgggaatgaggggctatctgcaaactatcttcttgagcaagctggtgaggaagattaagccagagtagttttcgtatgggtacaaacatagctttgcgtcaatcgatgccaggcaaatgcagaatgcttggtagccggtcagcgctatgtgtagaacacatactccggagatgaacatggatcacgagaactggaataattgctgtcagccatggacccatgacatcggctgtttcgcgca

SEQ ID NO: 325399 - DNA, 159 bp, Zea mays
  unsure (1)..(159): unsure at all n locations
ccacgcgtncgtccacgcgttcgttcacgcttgcgggaatggattcattacgattgtaccagcatggcttgttggtgtattctgttttttcttctattctaaataatctgattgttgtatccaatactgtactttttagcttaagaaagaaatacttta

SEQ ID NO: 325400 - DNA, 177 bp, Zea mays
tcgcccacgcgtccgcccacgcgtccagagaggctatcaccacgtacgtatacacacgggcacgtaactagctagctagctagcagtcgtagaatgacgatgaggggtctctctgttgcggtcgctctggtcgtggtggtggccgcggcctgtcttgccgcgccgcgatacgcggac

SEQ ID NO: 325401 - DNA, 113 bp, Zea mays
aaaaatttcaaaaattaaacaaaaaataaaaaaataaaagaaaaatgaaaaacataataacacatataaaaaaaacactaccaattcaaacacacaaaccttcatactttaaa

SEQ ID NO: 325402 - DNA, 134 bp, Zea mays
cccacgcgtccgctgtaatattatgcacctgaactttgtttattgtaaggacagtgaactttttaatgagttgggttgtactcttttttcctgtctaaaaaaaaaaaaaaaaaaaaaaaaaatattataattat

SEQ ID NO: 325403 - DNA, 158 bp, Zea mays
aaaaaaaaaaaaaaaaaaaaaaaataaaaaaaaaaaaaaaaaaaaaaaaaaaaaaaagaaaagaaaaaaaaaaaaaaaaaaaaaaaaaaaaaaaaaaaaaaaaaaaaaaaaaaaaaaaaaaaaaaaaaaaaaaaaaaaaagggccgattattaaaaag

SEQ ID NO: 325404 - DNA, 184 bp, Zea mays
gattagtaacactaatctagagaactgaatttaaacattttaaaactagtaacacgcatagggatctggtgacattcattgtgcacctgtaattatttcattacctataactatattcaacctcatatggtctaattttacgactttcttcacatcttcttttcaatcatatcatttttaaatt

SEQ ID NO: 325405 - DNA, 447 bp, Zea mays
gttctttcttagtttgtactctatccattctaaattataagtcattctaatattgtttgagcgacaagtttgattaaagctatagagaaaattatgaagattcatatcaaatgtaaaatctaaattaataagaatctagtgacatttagtatcataaatgttattattttaatgtacaacttaggttagacttaatatttctttgactcctcaagaaagttggactgacttaccatttaggatggagtatgatttattattgtcttataaaagcctggatcggtatactctgaatatctgagtacctacatgatgagtatttgtaagatgtgtgaaggtcgactgctaggtatacattgtcagtatgaaatggctatcgtcttcagctttctttcctggtcagtggacagtgaaatatttatacgatgtgttaatgtggactgctct

SEQ ID NO: 325406 - DNA, 273 bp, Zea mays
  unsure (1)..(273): unsure at all n locations
cccacgcgttcgctgacacgtgggcatttactgncgacgctgcagcaggaagccaaataggagagggtccatcgagtcgaccaccgaacacggttagggccgctgggctcgccgtggccacagcttatgaattcaattccccactccttaccggcgcccgctggattataaatagattccctcgtcactgtcgctgtctcggctggatcggattcaactcacctaccccaccctctcgatatcttcccagctttggctactttctacgccacc

SEQ ID NO: 325407 - DNA, 62 bp, Zea mays
cccacgcgttcgctaccctgctttgaaacataaaaggatgattaccatgccagcaatcttgc

SEQ ID NO: 325408 - DNA, 379 bp, Zea mays
cggacgcgtgggcggactcgtgtttactagtggatccattgctggacacttgatggcaacggcctttgctattcttgggggagcattcctggccaactacttgtccgagaagctggtttgcttgttaggagtagtattatttttgctctttgctgctgtattgtctttttggtgtaattctaatctatctgaagaatttgctagttaggggaaagacctcatagttccagtttggtcttagattatgaagatgaggggcaaacccaagtaggcttgagacatgctggatgtagatagacgttatacttatcagagatgatttctatgagcccaaatatctaccagacagactggaaactgcatcacatggacagcctac

SEQ ID NO: 325409 - DNA, 118 bp, Zea mays
  unsure (1)..(118): unsure at all n locations
cgccaagcgtgccttcgtgcactgatatgtttgcngctgctatagaagtggtggctactgaggtggctgcagctactgaggtggtggctattgtggtagcagccaaagctatgatgct

SEQ ID NO: 325410 - DNA, 121 bp, Zea mays
agcagatctaagctccaggcagcgttgagacatagtgagctagtgagtatcacgacatcaacaatgggttccctgaaggccgcgaagcccatcggagttgcggcgcatggcaaggagccgg

SEQ ID NO: 325411 - DNA, 399 bp, Zea mays
ggttgctgtgccttgtgcctgtaaaaataatatgatttgtttcatccaaaaaaaaaaaaaagggaaaaaggaaaaaaaaaaaaaaaaaaaaaaaaaaaaaaaaaaaaaaaaaaaaaaaaaaaaaaaaaaaaaaaaaaaaaaaaaaaaaagggcggcccttttaaagaatccaactttacttacccttacatccaaattaataatttttatatagtgcaacctaaattaaattaactgcccaacttttaaaaacgtattaacttgaaaaaccctgcgtttaccaaattaaattcccttgaataaaatccccttttcccaaattggcttaatatcaaaaaggcccgaaccaatcgcctttccaaaaagttgcccaccctaaatggcaaatggaacccccct

SEQ ID NO: 325412 - DNA, 437 bp, Zea mays
cccacgcgtccgcttctcctccccctccggttcgggttcgggttcgtgaggttctccggggggcggtttcgtgggtgagcggatcgagatggcggcgtcggatgttgagtaccgctgcttcgtcggcggcctcgcctgggccacggacgaccactccctccacaacgccttcagcacctacggcgaggtcctcgagtccaagattatcctcgatcgggagacgcagaggtcccgcggcttcggcttcgtcaccttctccacggaggaggcgatgcggaacgccatcgaaggcatgaacggcaaggagctggacggccgcaacatcaccgtcaacgaggcccagtcccgcggcggccgtggaggcggcggcggcggctacggtggtggccgtggaggcggcggctacggcggtggcgggcgccgtgatggcggcggcg

SEQ ID NO: 325413 - DNA, 198 bp, Zea mays
gtgaagatccccagttggacataactctttttattacgtgcaggcaatcaccacaaagtgtgtggggtttggctgcagtgcacgctattactccatggctgatggacagagctacgtcgagaagcatctttttggatatccaaaaagagctatcctttgacgaccggttcaaatccgactcaacccagatgacttaat

SEQ ID NO: 325414 - DNA, 210 bp, Zea mays
tcgcccacgcgtccgaaaaaaaaaaaaaaaaaaaaaaaaaaaaaaaaaaaaaaaaaaaaaaaaaagagaaaaaaaaaaaaaaaaaaaaaaaaaaaaaaaaaaaaaaaaaaaaaaaaaaaaaaaaaaaaaaaaaaaaaaaaaaaaaaaaaaaaatataaaaaaaaaaaggggtaatgagaaaaatcaaatgaaaaataaaaaaaaagagaa

SEQ ID NO: 325415 - DNA, 138 bp, Zea mays
aaaaaaaaaaaaaaaaaaaaaaaaaaaaaaaattaaaaaaaaaaaaaaaaaaaaaaaaaaaaaaagagaaataaaaaaaaaaaaaagggccatcccttctttaggaatccaaacttacttaccctttcttccaacaat

SEQ ID NO: 325416 - DNA, 232 bp, Zea mays
atactcacacacacacctatacccattgatgaacacattatttgacttcaaaactatctattacaagcgtcgccttatttctacttgtaactcatcaataaaaatataactcaaatctacaactcatactactttccaaatcttactacacaactttaaaatgctaaatctattttatctaacttaatgccatagtataaattcatctatataatatcttcactatctacat

SEQ ID NO: 325417 - DNA, 445 bp, Zea mays
cggacgcgtgggcggacgcgtgggcaccgccgttgttgcagatgttgggggacggctccggggggggacaggttggattcggatctgaggggcggcagcggcaggggcgggaggcgagcgccgccggaccaggtgttggagaacgtggcgtagaggaggaggactcggactcgtataattgaaatacgaagggacccttctgccttctccgtaaacgacggcgaccctgtgagccctcgcgccaaggatagggagcaacaggagaagtttggcggtccacgtcgacgagagcaacagtggtgagcctcgccgtgttgtgtcccgtcttcaatccgtgggcttgaagatttcctgttcacctgctgttctctacagcacactcattcctcaacgtgcctctaattgatgcaggattatcaacaactagttttggaaatcttgcaag

SEQ ID NO: 325418 - DNA, 407 bp, Zea mays
gtcagtcatgacaactactgagctatgtatgtttaagcgcatgttgccgaatgcagccgtgtgacggacatggtctcgaccatgaccggtgcaagacgcatggggaaccatggtgccaactctcacaaggtcaggagtcccaggtcgaagtcggtgattaggcgcctgaacgcgcttacttcatgggcgtatcaggccgtgatctttcggctactagcacaaggttaggtgctcgcagggcttctataccggcagtattctctacgactccgcatgctttgaataatatttcggtgaagatcatcgatctactttgcaatgctagatctgacttcacttagactcgacttatgagcagacaagtgatactgggcatcctgaacaactactagctggagatgctgctg

SEQ ID NO: 325419 - DNA, 410 bp, Zea mays
gttgcatgtaaaaggaagtcgtaagaattgtggtgtgcacaagcaatttggctcatggcaagggagaacagggattcacgagaagctgtggccacgatagaagcaggtgctgctgcgatcggtgtaaggacattcaaatgatgttaccagccaattgccaactgaaaccaacgtcctggatcaatagcaggaatcttgtgcccaatagtgttgcttggaaacaaaactgatgctcctcgggctcaagcctagtgtaggctgcattattcaaaggcggtatcatatcatttttattcctccccccaccaaaattcttgggagatgtcacttctgattttggaagctcatcatatgagttagtgcggtggactttgtagagacaaagtattttgaaaggatgctttgtcatc

SEQ ID NO: 325420 - DNA, 344 bp, Zea mays
ggagaattctattaagtctcccttcattttcgcttgagaaacaatccaagataattatggcgggtatgacattgcataacttcattagagatagtgctctacacgatagagattttgatgaagtaggagctaatagcctaagtcatgatgtacctgcaggtgagagtagtactagtacatctgatgagttagacatgagtgattttcaagatgcaattgctaatgcattagtgtcgtagttaacttagtgattgtaacagaacttatgatgtaatcaactccactaattattgtgtaaaaaaaaaatatagtataatgaagatagtataagcaatatatgaact

SEQ ID NO: 325421 - DNA, 445 bp, Zea mays
gtagctcggacccaaaattttcgttcgccgtgcacgtcgagcttcgtcacgtccgcctctgggtcttcgtcacatcacccgtcccctcgcgctccccactcacccccacctcctccgctctcgcaagctagacaggtgggagccgccgtcgtcgtagatgtcgaaggacggccccgactccgactcgttgtcgtcgtcgcagatatcgaaagacggccctgagtccgactcaccgacgttgcagatgtcgggggacggctccggcggcggggacaggtgggagccagatctgagcggcggcagcggctgaagcagcaggcgggcaccgccggaccaggtgctggggaacgtgactcggaggaggactccgactcgccgccgtcataggtgtcggaagacgatccctgctgcggggactggtgggagtattaccctcaaattagcg

SEQ ID NO: 325422 - DNA, 307 bp, Zea mays
cccacgcgtccgaaaaaaaaaaaaaaaaaaaaaaaaaaaaaaaaaaaaaaaaaaaaaagggaggaaaaaaaaaaaaaaaaaaaaaaaaaaaaaaaaaaaaaaaaaaaaaaaaaaaaaaaaaaaaaaaaaaaaaaaaaaaaaaaaaaaaaaaaaaaaaaaaattacagaaaattttttaaaaaaaaccttgttataacccaattaaataaaaattaaattattttcttttgtaatctaattattaaataaattgatagattttttaaaaaatgttttttgtaaaatttcgtatttttttctaatttat

SEQ ID NO: 325423 - DNA, 338 bp, Zea mays
cccacgcgtccgaaaaaaaaaaaaaaaaaaaaaaaaaaaaaaaaaaaaaaaaaaaggaaaaaaggaaaaaaaaaaaaaaaaaaaaaaaaaaaaaaaaacacaaacataaaaaaaaaaaaaaaaaaaaaaaaaaaaaaaataaaaaaaatgtacttctccaactaaagtcaccaactttaaattcactgaaattgaacttaaaactttttttctggtaaaactatatcaattcaaaagtcaatcgttttaaaacacatttgcctgaaaaaacctggcgtaccaaaattaaaaccctatctaataaaccttctatacccctgcagatcctatattaaaaa

SEQ ID NO: 325424 - DNA, 461 bp, Zea mays
gttctagatcgcgagcggcgcccttttttttttttttttttttttttttttttttttttttgttgtttttttattttttttttttttttttttttactaattatggagtgcctattatccattgcttatttattacaagctaaacttggtcgtacaatacttaacttgtatagttaaacacaccaccgtatactactagcctactaacttggaccgtttaccgtaaaccgtttaactagctaaatccccgatggatccatcggcggtgaatttcccctaccccctgattagtcgtcgtcgcttgccggatcattcccgcaggaacaactttacccgggcaacgtttttgcaacccgttaaaatgctcgcccggaccaacgccaggtacatttggtccattgcttggttgaatgcctttaacaatacccccttcgggtaccccgggtttactccgtaagttt

SEQ ID NO: 325425 - DNA, 425 bp, Zea mays
ttccactcatcctgttattttctttgcattctttaatatcatcattttccttgtaattgctgtctcattatatttttttctattaatttatcttttataattttaatattttatatttcttcttttatttatatttttttaattttttttttttatttttatttttatttttttttatttaatttatttatttattttttttattttctttatttatttttttattattttattttttattattttttttattatatttttatttatttatttttatttatttttttatttatttaattttattttattcctttatttatttttctttttttatttttatttttttttctattttttttatttattttattatatttatttttattaattttttattctttatatatttttatttatttttattt

SEQ ID NO: 325426 - DNA, 459 bp, Zea mays
gatccagcccacatctactccctccgaccctcgtcgcctccgcgctctccagcgatgacttgccgcgcctccatacctcgcaccagctcttttctctggccacttctcgcttgaaccgcctccgccgccccgacctcgccgcctcgctcctcgacctcctccttgcctccgccccgccctccccggggctccttgcgcgggcgctctccctctacccgggacccgacgatgcgctccgggccttctcctcgtctgcccccgccacccgctcccctcctccgcaccttctccgcgctacccggatacagtggttctccaagaaaggcgagacagccaagggggaggagctgcttgatgtgatggaatcaaaggaggtagccccgaattaccttacctacaatgctatcatgcaggggtattgcaaggaggggaatgtcggcgcagcgatgcgtgtgttca

SEQ ID NO: 325427 - DNA, 214 bp, Zea mays
tgaaaatctgtcctgcctgtgttagtccatctttgtctaaaaaaaaaaaaaaaaaaaaaaaaagaaaaaataaaaaaaaaaaaaaaaaaaaaaaaaaaaaaaaaaaaaacaaaaaaaataaaaaaaaaaagtcttacgatctaaactttccaacctaatttttttctttattgcaacacctaaactcaactaaaatgccacctaatttcaattt

SEQ ID NO: 325428 - DNA, 296 bp, Zea mays
tcgaaaaaaaaaaaaaaaaaaaaaaaaaaaaaaatttaataaaaaaaaaaaaaaacaaacaataataggggggacacatttacatatcgagtgtatacaaattacaaaagggtcctttccttttaaatgacccatacttaattccccctaattttaaatcaatagcccttgtaaaacactccctttaccaataaaaagcccgttgtaccaaaatctattttctggaaaaacattaccatttcccaaattaattccttttcaaatattccccatttgaccagctttaataacaacta

SEQ ID NO: 325429 - DNA, 393 bp, Zea mays
cccacgcgtacgcggacgcgtgctctgacgcttgtggtaacatcatagaaaaatgagcatggggatcaattacttttcgatagcaataatgctatctacaaacctccaaaacttattcttttaataataccaatattctattcgtacgtatgccattgtacttccaatatctatatcttctctgtatctaatatagcatgaatcttaattccacttatgtactactccaacttctgtagtctgtaaccacatggatctgcaaggaatactacatgcagtgttaatcatgatcctccttcatttacaatgccaaccttcaataccgcttatgttgacttgatcctgaaacttactgaatatgatttgaagatctggccacatatttatgaatac

SEQ ID NO: 325430 - DNA, 453 bp, Zea mays
ccgctgcttcgtcggcggcctcgcctgggccacggacgaccactccctccacaacgccttcggcgcctacggcgaggtcctcgagtccaagattatcctcgatcgggagacgcagaggtcccgcggcttcggcttcgtcaccttctccacggaggaggcgatgcggaacgccatcgagggcatgaacggcaaggagctggacggccgcaacatcaccgtcaacgaggcccagtcccgcggcggccgtggaggcggcggcggcggctacggtggtggccgtggaggcggcggctacggcggtggcgggcgccgtgatggcggcggcggctacggcggtggcggcggcggctacggtggcggcggtggctacggtggtggtggtggcggctacggcggtggcaaccgtggcggcggctacggcaactccgacgggaactggaggaactgagcggt

SEQ ID NO: 325431 - DNA, 246 bp, Zea mays
gctgctgctacggctaaccgaagaaaacaacgatatctccgcgtaccggatggcatcgtccgatggtttataggtagcttatgtcatagggtttaggataactggtagcatgtgataacctttgcattcttctagtccacgcttcctcgatttgccgttgagccgaaacgatgtattctatgctcgacgtgctataatagattacagcaattatgattatttactttacctgttcaatattagtgg

SEQ ID NO: 325432 - DNA, 426 bp, Zea mays
cggacgcgtgggcggcatgcacgcctcctgctccgagatgcagagggaaatgatcagcgccgactcgataaagcaggagctgttcaagaacgctggctatggcggatgctgcttgtataggggcatgtcatcatgttatgggaggatgattattatgttgcttttttatattaatcttatattatctttttttgtcttagtttttattttcattgttattttctttttttatttaatgtattttatttttattattttttttttttatttttttttattttattttttcttattacttttctttatttctattatttattatttggttttttaattttattttttttttttatatttttcttttattttatcttaatttatttttttactttttattttttatattgtttttttctatattttttt

SEQ ID NO: 325433 - DNA, 458 bp, Zea mays
cccacgcgtccggcttatgaaaagagccaacatgcttgtgtagttgcgtgtttctgcaggctgagggtaggatattttgtactgttccataagaaatttacacccaccagtttgatggaaacaaaagctattggcttacaggatcatgcttcggtttatttggcctgcaactttttatattgtgcactttttaatagcagacaacacatattatgatggcaccacagtataggggcagtgcagcatttaagtttttactcctcgtaatattacttattgtgattctgagctatattagggtgaaacaatttcataaattcatgaattataacttataagggaatagaaactggaatgtttctttgtgatgtcctaccttcctcacctgcatatctgtatccttgcacgatagctataatttaacagagaatgcaatagttttaaccatgtatagaaac

SEQ ID NO: 325434 - DNA, 361 bp, Zea mays
cccacgcgtccgcccacgcgtccggagatccttagcagccgcagtcccacctacccgcggcggctgtctccctccatctgtctcgcctattcctattgtttctctcttcaataatcaagatgagccgtggtggtagtgcctgttgtggtcaaagttctctgggttatctttctggaagcgctgagccttcataaccagcattggcaccagctgcaagcgcttcacttgctgataaaccatctcatgcatatactgattctgccaatcatattgctgcttatgttaccattcatacctataactactacaggggttattttatataacactgcctacttctttacagactgttctttatcct

SEQ ID NO: 325435 - DNA, 61 bp, Zea mays
tgaattggagtgcaagcaactcgtttagccctatcccattcccgcgcctagccaagagatc

SEQ ID NO: 325436 - DNA, 347 bp, Zea mays
cccacgcgtccgcttcgctctgcgtggcctggggtttctcgtgctgtggatgctgcattgcggaagcgagctcgccgcggcggtgcctccagaggccagccggagccggcgctgtacaacggaggcattctcaagttcggcagcagcagcagcggctgcggcgatccggacgggtaccgcacgacggagaccggcgtcttctccccggcgttcgtggtgtacaacctcaacaagaccaccatgtacaccttctcatgctgggtgaagctggaaggccacgctcttcatgaacgagtacaacgtcatcgagacctgcgacgacccctttttcaccgtcgacacgtacg

SEQ ID NO: 325437 - DNA, 360 bp, Zea mays
cctcggcaatgttctcaagaagctggcttacaagcactgatcagagacggtccactgtcatttgtgtgttagtcctagtaccgagatgtaactttgttctctggaataagtggattaataaagggcactttcgtttgtgtgtcgtcctgagctgccttgtccgtagattcttacaaactgttctgtgcgaaagctaccatgatagatatgcgtcgtcgcgtcgaattgattgattctatagcctgataattgattgagtatcgcccatgtcgcacaggagaacgataaatttgttccaaactaaaggggcatgacgactgggaaatcaaagatccaagccaaattccccgttgtagaacg

SEQ ID NO: 325438 - DNA, 212 bp, Zea mays
cgtccgaaataaaaacatttcggtctcatcttcttccacatccatcctccatcactccagctgggtggtctaggaccgacttagcgaatttcgaagcaagggactgaagaggaacctgaggaaggcgaaaatgatctaccggaactgggagctgttctcgtccacagtcgtcatttgggtcggcttcgccaccgtcagcctcgccgctatct

SEQ ID NO: 325439 - DNA, 396 bp, Zea mays
atcagcaagcatgagaagcgaatgaatgtacagtatacatgtcagtcgccaactgctagggctttatcgcgatccactatacatgcgtcagcatcaacggcgacggtcgcaaggatcgcgatgtaaactactgtaccagagattaacagatgatcccaatgactgctgaatatgtaaaactaacatgtgaacacattatcatatataatgacaagtatgttgctcactgcataactcctttaatctatctttgcactagctctatcacaagtcactgcggtgctaaaccatcattaatcaaatcgacgcctgattacaaagcttactatatgaccataaacacgtcggaactcatgtaccatactgtgatctatatgaatgctaagtacctacgac

SEQ ID NO: 325440 - DNA, 355 bp, Zea mays
gcaggctatagtatgcataaagtcacggtttctaagtgggtaccagctcaattttcaggggagtatcatagatctcgagagattggtctcatcagctactgctcctgatgatatcgatagctctggccttcacagctaaatgcatattcagcaaatcaaggatcccagaatagttctttggtttctgtttttacttcttttttctaggtgctcatgtaaatagtccttacaacttgtgaatgcgacttctattgctgtcccctgcacaatcccagggtcagaactgcagcgagcagctcgtgcttgcataactatgacacttcataatcatgtactcattgtggtagatcttgta

SEQ ID NO: 325441 - DNA, 330 bp, Zea mays
gaaaaaaaagaagaaaatttaaaaaaaaaaaaggcccaaccaaaagggcggacgaacaaaaaggaaaaagcaaaacaaagcaggaaagaaagagaaaacaaaagacaaaaaaggcacaaaaaaaaaaaacaaaggacaacagaaaaaaaaggacaaaaaggagaaaaaaacaagagaaaaaaaaaaaaaaaacaaaaagaacaaaaaaaacaacaaaaacacaaagagcaaaaataaaaaggacaaaaaaacaacagaaaaagaaaaaagaagaaaaacaaaagaacgaagaaaaaacacaacaggaaagagaagaaaaaaagacaagag

SEQ ID NO: 325442 - DNA, 169 bp, Zea mays
gcgcagacgcgtgggtcggtcttgtacgggttcacaaacattgatgttttcaaataactgtggttgatcgggatactttacggtgaattcatgagattaaatctgcaaagcactttaactctgctgttctatcgactttttaattccaacctacatcaacttgctcagg

SEQ ID NO: 325443 - DNA, 68 bp, Zea mays
cggacgcgtgggcggacgcgtgggcggattcttgggcggacgcgtgggaaaaaaaaaggggagaattt

SEQ ID NO: 325444 - DNA, 61 bp, Zea mays
aaaaaaaaaaaaaaaaaaaaaaaaaaatttaaaaaataaaaaaaaaaaaaaaaaaaaagta

SEQ ID NO: 325445 - DNA, 385 bp, Zea mays
gcacctcgtccggcgccgctgctacttggagcgccgacgagatcaagaaggccctccggtgggcgctcttcttcgaggagattttcaaggacctgctcgactcgggccagtacgaggattctgcaagagaactcgatgcggcactccttgagctcacttcaagtcccgagttccctaagggtcttgctgctgtacgttcagatttgctatccatggcaagggtgttggttatgcgacattttctgaaaccaaacacaatgagcgtggaaaacttttgtgctcttcttgaagcggttgctggcatggatattgatggcatttgtgctagtggtgcgcacaacgcatgcgagtatgctgagtcaatattgaatatgaatacatcatg

SEQ ID NO: 325446 - DNA, 119 bp, Zea mays
caacaaaaccccccaacagacccactttttctaaaagataatctaaaaccccctctactctaaccactactactattcttcaacaacacaccttacaccactcccatacctcacttcaa

SEQ ID NO: 325447 - DNA, 262 bp, Zea mays
cctacaaatagacgtcattttcagcgaataattgttgtgaaaatgtgtatgttgcattgaaattgtggccatacaagaaggaatcgaatgtagaacgatgatgtacgagatagacttggggtagcggtagcaccaattgaagaaaaccttgttcaaaatcaaaaccgattgagatggtttagactttagacatgtccaacagagagatctatagaggcaccattccgtagtgggatcttaacacatgataatactaggaaaa

SEQ ID NO: 325448 - DNA, 264 bp, Zea mays
gtccactcttcctcttacgccccaataccttattgtaaaacctacgcgatttcccttccaggaggatctttgcaatctcctacactacaacaaataacccatgaccatccacgattactgaattgcctcctgctttccagagtgcaatataatgcacattggctgcactgtatgctgttaacactgacactgttactcataacactttcaacacacaaacctcttcaggcctttatgcattaacatatatcgccactactatta

SEQ ID NO: 325449 - DNA, 402 bp, Zea mays
accgagtacgagcaaccgcttgcgtcagactcacactgacggagagtgatcactgattgcgggtcatggcaaccgtaactgaggaagttgctccggtcgtcaccgtctccgatgagccggcgccggaagcggcgaatgaggtggtggagaagcccgaggaggggaagaagcccgactaggagggtgacgagaggaagaaggccgaccccgccgtcgagaaggagaagaaggcgaggaagccgcggagcaggaagcccaagtccgtcgggctgcaccacccgccctatttcgaggtgagcaaagatgccgtcgtcgtcgtcgttcgtcttgtcggttactcatccgtgcttggattctcattctgatgatcggtcgctgtgtctgctggggacctgaggttat

SEQ ID NO: 325450 - DNA, 312 bp, Zea mays
tcatacgcggactcatatgaaaaaaaaaaaaaaatttaaaaaaaaaaaaaaaaaaaaaaaaaaaaaagaaaaaaaagaaaaaaaaaaaaaacaaaaaaaaaaaaaaaaaaacaaaaaaaaaaacaaaaaaaaaaaaaaaaaacaaaaaaaaataatatacctaaaacaaaaccaaaacctcaaaatataaaaaactaataaaactgaaaaaacatttaacataccaaaaataaaaataactaaaaaaaatcataaaaaaaaacaaaacacttaaaaatcaaataaaacacaaaaaaaaaaccctatcaaaca

SEQ ID NO: 325451 - DNA, 101 bp, Zea mays
tttcatcaaaccaacacactgctaattaatgtttatggatggatctatccaacaaaaaaatcgtctgttcttacgatgagcagggaatccccttaccgatc

SEQ ID NO: 325452 - DNA, 177 bp, Zea mays
ggagttttacattaaaaaataaaaaaaaacttaaaaaaaaaaaataaaaaaaaaaaaaaggggggcacatccaacatgttgggtgggtaatcattcttgtactacgacatggttcctattattttcaagtacttaacttcactcttatttcctttatttttacatctgtcgcactgc

SEQ ID NO: 325453 - DNA, 349 bp, Zea mays
caggcgcgtatgatgtaatcctaatcgcggttattgtgatggatctgtacttgtacttctggagtagatagactcacaaataccaggagaagcctccccgcaagtcgttcaggtatctgtctgcaggaactctcggtctgaatggtgcttttagcaaggttgccaattttgtgtagtattttgtcaaaactgaaggcctttggattagtttgtgctggtcagctagaaacctggaaacaacaaacttgttgagtagcgatgtttacaagaaatgtagcctttatgggctcttgtaaccctttctctcttatcatattttgttaaagaagcaaaatatccaccaaaactc

SEQ ID NO: 325454 - DNA, 148 bp, Zea mays
cccactcttacttccacgcctcctcaccaacaatatcgatttttttaccctcaagatagtgttctcacccttgacgatcataacacggtttctgggggcgccgtcaacaacaccatcaaccaccaaaacggacaccaacaatattttt

SEQ ID NO: 325455 - DNA, 338 bp, Zea mays
gccacgcgttcggagcactctgcaaggtttgacgcttgccctgacttgtggagagaaacgggggcacggaccactgctttagaagctgctttcatggagtcggagctggtggaggagctgctgcaaaacctgttggtgcgcgcgactgatcctgaggatcttgccaggtacacaggtgacgggtcaggtgactctagaggaaagcctatcacaaagcatagcacagcgaactggagagcatgtgcattgattacaggtaagacaacagtctgagctatgtgctaagcattgacacactcatatgagttctagaacgataaccagactagtcatgtcac

SEQ ID NO: 325456 - DNA, 402 bp, Zea mays
  unsure (1)..(402): unsure at all n locations
cccacgcgtccgcccacgcgtccggtcatatgaagatcatgtatttgtgattaaaccaagatagcatagcaaatgactcccctaagaatgagcacttacaacttctcgtgatgctataaggacgcacttacagatttttgcgtaaacaacgagcatcctagttgtgttttttaccagcaggcgctgctactcctgtcatacttcaaccatttgtattcacatggtcttaatggtttgatgacagctatcctgttttttgttcttatctaaaacacagtcacgcttcaaaaaaaaaaaaaaaagggcggccgctcgcgatctagacggacgcgtgggcgcgggtactacgccgngctccaaggcagcggctggcccggcgaggccgagctgtacgagaccccc

SEQ ID NO: 325457 - DNA, 175 bp, Zea mays
  unsure (1)..(175): unsure at all n locations
cccacgcgtccgcggacgcgtggtcggcaacttgtaaaggagcacgatttggcacataaactgatngttgaagatgaaattgcagaagcaatgctgcggcctttatagttgcaacatgcagcagatgaagcagttgtattagaggctgctctaattgctcagcttattacactta

SEQ ID NO: 325458 - DNA, 378 bp, Zea mays
taaaaaaaaaaaaaaaaaaaaaaaaaaaaataaaaaaaaaaaaaaaaaaaaaaaaaaaaaagaaaaaaaaaaaaaaaaaaaaaaaaaaaaaaaaaaaaaaaaaaaaaaaaaaaaaaaaataaaaaaaaaaaaagtctactataattaaaagataaaaacaattcatagcccttctattttaacaaataaattactttataaaaccctcaaattacaaaacataaccccctttaaaaaaattcccttttttaaaaaaaccttaatatcaaaaattaaatcacctttaaaaatatccaacttttacaaaatctcaatttaaaaaaaaaccccccatatatcacctcatcaaaaataatcacatcaaaaatatcaattaaa

SEQ ID NO: 325459 - DNA, 297 bp, Zea mays
aaaaaaaaaaaaaaaaaaaaaaaaaattaaataaaaaaaaaaaaaaaaaaaaaaaaaagaaagaaaaaataaaaaaaaaaaaaaaaaaaaaaaaaaaaaaaaaaaaaaaaaaaaaaaaaaaaaaaaaaaagggcgccctttttaaagaatcaaattttactaccccttcattccaatataaaatcttttttatagtgaaaccaaaattaaattaattttcctttttttaaaaatataattattggaaaaaccctttttttaccaatttaaatctcttttattaaaatcccttttttt

SEQ ID NO: 325460 - DNA, 422 bp, Zea mays
agcgaccggtccagcactttcacgctcagctccagcaatggctgcctcgaccatggcagtctcctccacggcgatggccggcacccccatcaaggtgggctccttcggcgagggccgcatcaccatgcgcaagaccgtgggcaagcccaaggtggcggcgtccggcagcccctggtacggccccgaccgcgtcaagtacctcggccccttctccggcgagcccccgagctacctcaccggcgagttccccggcgactacggctgggacaccgccgggctgtccgccgaccccgagaccttcgccaagaaccgcgagctggaggtgatccactcccgctgggccatgctcggcgcgctcggctgcgtcttccccgagctgctctcccgcaacggcgtcaagttcggcgaggccgtctggttca

SEQ ID NO: 325461 - DNA, 325 bp, Zea mays
cccactcgtccgaaaaaaaaaaaaaaaataaaaaaaaaaaaaaaaaaaaaggaaaaaaaagaaaaaaaaaaaaaaaaaaaaaaaaaaaaaaaaaaaaaaaacaaacaatataaaaaaaaaatagataacgcaatccaaaattacaacgatttacaactcctaaacaggaaccaaaactgaattaaccgaacctcttaaaaaaacatcacatactggaaaaaaccaaatctttaccaaactaaaaaccctggcaaaaaacaccttaattaccagctttaaaaaaaccaaaaagacccatacccatattcataacaaacattaacca

SEQ ID NO: 325462 - DNA, 295 bp, Zea mays
tagactgttcaatgcttgtcatggatgatgcatactttctattagctccatagttccatccgtctgtggaatcacttatgtgaggtccttccacctattctgcatctttttatgttatcatcatcctctcctgtaactttcattgaattcatagataaatatactcctataccttattttattaatctaatgtatttactttttcttttttttttcacactttttttttctttttttaataaatgcattaatttcattgtctgaatactctttttttataactttaattttattc

SEQ ID NO: 325463 - DNA, 415 bp, Zea mays
aataagcccagattcgttgcgcttggttggaatgcgaactgcttcgatgggctttgaggtcccatattgcagggcacatgggactggaaagtgggagtggaaattcgagaacaagccggtaaacatatactatgaggaacatgagcaggaggttgctgagaatatgaagaacattctcatgatccctacgatctctgatgtgagcactgtggaggagtggagggtggttgccaaagatattgttgggcggaaaggagaacttggctaccgtgttacaattgtcgattggcctggtcttggttattcagataggccatcactgaactacaatgctgatgtgatggagagctttctggttgaactaatgaattcaccaaacagtccagtcgcaaatgcagatgatgaactgatcatt

SEQ ID NO: 325464 - DNA, 77 bp, Zea mays
tcccactctttctcggactcttgggaaattaaaaaaaaaaaaaaaaaaaaagaaaaaaaagaaaaatttaagggcaa

SEQ ID NO: 325465 - DNA, 291 bp, Zea mays
aaaaaaaaaaaaaaaaaaaaaaaaaaaaaattataaaaaaaaaaaaaaaaaaaaaaaggggggagaaaaaaaaaacgagcgggagcaaacaaaaaaaaaaaaaaaaaaaaaaaaaaaccaaaagggcaatcactttaaaggaccaaaacaacgctttgactggtaaaacccttaacgatactaatctgaatccccaaaaatcaaatcacggtttcaccatttaaaactataacgatgagaaacccaccgatttcccaaactaacatttgctcaaccataaaccgctaatgg

SEQ ID NO: 325466 - DNA, 406 bp, Zea mays
tcttctccaatccatactattctcaatctgctgctactccgaacccagacgatactgggaccatatctctcctgtactgtagcttactcccctatccagaaccttatatctcaacctgcaaattggcagatccataccctgctgacccatatctctgctccgaccatgactgaccgccacagcctgagccgtacccttctgacccatatctctcattcacctacgatctcattccatatccagagccgtatctatactcctactgcttcttcctcccatacccggatccgaatccagatccatagccaccatacctcctacgcaacaggctcgttcctgaatccgtaacctcttccgtaagaccgcttttgatactgctttgatcagaacccatatttggacttta

SEQ ID NO: 325467 - DNA, 79 bp, Zea mays
aaaaaaaaaaaaaaaaaaattaaaaaaaaaatttaattaaaaaaaaaaaaaaaaaaataaaaagaaagagcttacttta

SEQ ID NO: 325468 - DNA, 449 bp, Zea mays
ctcaccccttgcgttctacctcttgcattctcttttgttcactccgcgtgttctctcgctcgcggcctcaccctgctcgctgtatcccactcgacggcgactgggcgacaaccgatgtctccctaaacctggtgcctaggtatctctgccggcgacgagcacctgccagctgcaggggtatgggaatggaggtcgttggtgctgaagcagcaccagcagagatcaaagtatctgatgatgtgaatctattccaatagaaggaaagcgaagcaactgcaaaagaacgtgaggaggcagctgttttcggttcagagataactaccaatgtcaccgatctggcaccttcaaaggatgtgaaggatgagtggcctgaatctaagcagacttatgccttctacttcatcaaggtccgctcatttgaggatcttaaactgagggcaaaaatcgag

SEQ ID NO: 325469 - DNA, 123 bp, Zea mays
cccacgcgtccggaatttggtgtacttgttaatgaaaattcggcttggacctgtgaaatgggtatgatctaaaatacggctggtctgatcctgaatgcaaccgcacaagagattgatctgtct

SEQ ID NO: 325470 - DNA, 443 bp, Zea mays
  unsure (1)..(443): unsure at all n locations
cccacgcgtccgcccacgcgtccgacggcaatgacatcaggatttgaaagtggcagccctagcattgctgaagtcttctgcgggtctcatagccaagcagaaagtcaggatgatttggaacatgagagaagagactggcaacgattttcccatgctgtgattggagaggaatctgaaagaacttggcgtgaaaatgcagacatgtcatctcatgaggggacagcagttgaagatgataataacgatcatcttccagaagcaaatgaagagtcaaccagtgttgatcaccttcctgaaggacttgaagggtctatcactgatggtagtcttcctgaagcgcaagaagatcagcatgacagtgatcatcttnctgcagtgcttgaagagctgattggaataatcactttcaagaatcacatggggaatggagaaaagatgatcgt

SEQ ID NO: 325471 - DNA, 450 bp, Zea mays
cggacgcgtggggtgcagacgacgcagcagcaggcggcggtgacgacgacgaccttgagggcacaagggatcctacggtggtcaggggctggcgacggttgaaggccgtgtccatggtggtcttcagcggcggcgcccgacccaacaccaccaccaccacgacgactatggaaatggagccgctgtatccgccccatgaggctcgaagtgacgcagatatcaggttgagaagcccacagcggaaggcacgtgaggtagaagaagccagcgtggtactcaagagtccacaccgaaagaccgctgttgcggctcatgtatcatcgcaggtacaacagccctcgctaccttcgcagcaacctgacgtggttggaaccaaaaattcagcagcggaagttgtaatggacgtcgcatcaccgaaaccacttcagggggcgttgtccatggcaaccc

SEQ ID NO: 325472 - DNA, 63 bp, Zea mays
cccacgcgtccgaaaaaaaaaaaaaaaaaaaaaaaaaaaaaaaaaaaaaagggaaaaaaagag

SEQ ID NO: 325473 - DNA, 125 bp, Zea mays
aaaaaaaaaaaaaaaaaaaaaaaaaaaaaataaaaaaaaaaaaaaaaaaaaaaaaaaaaggagaaaaaaaaaaaacaaaaaaaagaacaaaaaactacaaaacaaaaaaaaaaaacaacacaaaa

SEQ ID NO: 325474 - DNA, 282 bp, Zea mays
agaaaccatagagtttcagtgtgatgatgcatctggcttcgctggcaatgcgtgtggagcatccacatttatggtgccataacctccccttggcccaatagcatttgggcctttgcattaatgccgccatcaaagggtaccataagcgatagcaagcatcccggctggtacatgtaagtctaactgtcagtttagctatctcgtgtgtagctccctgagttttacaacattagtcgattttaccgggagttgcaataccatcatgtgtcacattgtttgtcc

SEQ ID NO: 325475 - DNA, 185 bp, Zea mays
aaaaaaaaaaaaaaaaaaaaaaaaaaaaatataaaaaaaaaaaaaaaaagacaaacggtaggggatctccaggctcccggcctcctgcctcctacatgctacgctcttctatattgtatcctgacaccaatatactgtccgctggtcgacaacgtacaacactgggaaatccctaaaccttccca

SEQ ID NO: 325476 - DNA, 405 bp, Zea mays
ggactggtggaacaagatgcacttctccggaactttcccacacgctaactcgtctttgtcaatacaagatatcaagaaattggttctgcaagcactgcgaagcaaagagcaagcactgcaacaccaggatactgatttgaactcaagaggcagctttatactgaaacgtatggaggcctacaaggactttgctcgctggagcgtcaacattgacttcgacgagagcatccttgtttggcacattgcaaccgaggtgttcatcaggaaatccaaggccagacatgcaaaagaactccttgaggctactgaggtactatccaactacttgatgttcttgcaggaggtgagatgtatgttatgccgcgcagcgcctggtagcatgttaggttttacgttctagatcgc

SEQ ID NO: 325477 - DNA, 392 bp, Zea mays
gatggaaaccagttaaattccttgcccaattgcgcaacttaatttagagtagagacacagttgctatataactttagtgcctatcattaaaaatatagtttgtctacttcgatagcaacggtatcaaaatctgactaccttatgaagtttggagtcttctcatttcttttggttagtgagggaacttgtagggggttcctttttaagaattgtcccagaagtttcttgccataaagctaggtgtatgtttcaatttccctggttctttgatgactagatatttttatttcaatgcaaacaggtagaattccgaacttcattttcagcaaaatgtgtacaagcaagcagcattctgcctgaactttctatcacgtactccaacaagaacatct

SEQ ID NO: 325478 - DNA, 92 bp, Zea mays
cccacgcgtccgcccacgcgtccgcggactcgtgggaaaaaaaaaaaaaaaaaaaagaaggaaaaggacgaccgatactatacagcatccaa

SEQ ID NO: 325479 - DNA, 383 bp, Zea mays
tcgcccacgcgtccgggtgggttggcttctcctccccctccggttcgggttcgggttcgtgaggttctccggggttcggtttcgtgggtgagcggatcgagatggcggcgtcggatgttgagtaccgctgcttcgtcggcggcctcgcctgggccacggacgaccactccctccacaacgccttcagcacctacggcgaggtcctcgagtccaagattatcctcgatcgggagacgcagaggtcccgcggcttcggcttcgtcaccttctccacggaggaggcgatgcggaacgccatcgagggcatgaacggcaaggagctggacggccgcaacatcaccgtcaacgaggcccagtcccgcggcggccgtggaggcggcggc

SEQ ID NO: 325480 - DNA, 373 bp, Zea mays
gaacatcgtcatatctgagtctcacccatttctcttcaaagggttccactagctcactcgggcttgaggtccttagctctacacttactgtactctagaacagccgataataccttgactgctaagatccatcgcttctgctctcctctactatgagacactctcttgaacatcacgtcttaatcctagatgacccgtaagaccagtgcacatctccaccatggttctccactctttatatctgctactagtaccgcatatcatctcggctcatgcattagagatcatgctacttgcaaccttctgttgcaagctgataaggtgctcacgtcgaatctcaacttatccactgtttttaaaattattctagcta

SEQ ID NO: 325481 - DNA, 395 bp, Zea mays
  unsure (1)..(395): unsure at all n locations
cccactcgttcgcccacgcgttcgcccactcgtccgtccacgcgttcgagttgctgagctagttcagaaggttgccgctgccattcaacaagatttgcccaaagtaatgaccaagatgaggttgtatttgcaaaatccatctactcggatgatcttattcaaacctatcaagacaaatatagttgaggctcatatacagctgcattcccttctgaagtcggagtactctagtgaagaaatgcaatccatcggtatgttgccgatacctgacctgcagtctcagcttgacagccttttgtagtttgcatacaccatacagcggcgctgctgtagtccatgttgacgttgcaatgcagttctttcaagtaacgcaagtaaagntgttaccacaattt

SEQ ID NO: 325482 - DNA, 266 bp, Zea mays
cccacgcgtccgcccacgcgtccgcccacgcgtccgatgaaaacaaaataaaggatttgaacttggcacttaaaaaaaaaaaaaaaaaaaaaaaaaaaaaaaaaaaaaaaaaaaaaaaaaaaaaaaaaaaaaaaaaaaaaaaaaaaaaaaaaaaaaaaaaaaaaaaaaaaaaaaaaataaaaaaaataaaaaaaaaagaaacaaaaaaaaaaaaataaaaaaactaaatatataaaatacaaaaatagaaaatctactaataaaaa

SEQ ID NO: 325483 - DNA, 296 bp, Zea mays
gcgcgggcgcgtgcgcccacgcgtccgcccacgcgtgcggtcaagagttctgaacataacaaccatatatggtgttttaagtgtttcgacatgtttacttccagtgtttctataacattattgagacagatatggagtgtactttgaggtagtttctgcaattcaagttatttggggattaataaatgattttaccagagcttcatcagtgtaaagacggagttcatatatcagaagccttatggagttcaagaacgggacaaccgcagcggaaataccgtgcttttgtcaaaatg

SEQ ID NO: 325484 - DNA, 433 bp, Zea mays
attggtgtgggcaccaaacctcaagaacagactcaagacccaaacaatctgcagaggcaacaacagtccatgaaccaactacttccattgagccaatctcaaaccaatcttgtccaggctcaggtccttatccagaatcaaatgcagcagcaacagcaaccaacatccatggctcaaaatcagcagccagctgccagccagtcactgatcctgccccagcagcagcaacaacagcaacaacatcaacaacaaaagttggtacatcaacagcagcagattttactgcagcagcaacaattgcagcaacagcaacaaaatcagcaacagctaaataagatggctgcacaaatgccaaatctggtatcacatcagccgcaactgtctgatcagcagcttcaactgcaactgttacaaaaactgcaacagcagcagc

SEQ ID NO: 325485 - DNA, 238 bp, Zea mays
agcggccttactactgcatgcgacgccctttcctttacactctttagaaatagttctcggggtgagccctacgctccaaggcattagatcttccatggaaagaagcagcacactaacaagcagcgtgtctgcacctgtcgtcacggaaatggaattgtaaaccattaaccttcagaatttctccatcgctactaatactcatgtttacgcaacagtggaatgtgtgatacctaataaa

SEQ ID NO: 325486 - DNA, 395 bp, Zea mays
cccacgcgttcgggcttctcctccccctccggttcgggttcgggttcgtgaggttctccggggttcggtttcgtgggtgagcggatcgagatggcggcgtcggatgttgagtaccgctgcttcgtcggcggcctcgcctgggccacggacgaccactccctccacaacgccttcagcacctacggcgaggtcctcgagtccaagattatcctcgatcgggagacgcagaggtcccgcggcttcggcttcgtcaccttctccacggaggaggcgatgcggaacgccatcgagggcatgaacggcaaggagctggacggccgcaacatcaccgtcaacgaggcccagtcccgcggcggccgtggatgctgcggcggcggctactgtggtggccgtgg

SEQ ID NO: 325487 - DNA, 326 bp, Zea mays
cggacgcgtgggggaaattcaacatatataataatgcaagcaccggaaataaaattctactgtgttctgtgaaaaaaaaaaaaaaaaaaaaaaaaaaaaaaaaaaaaaaaaaaaaaaaaaaaaaaaaaaaaaaaaaaaaaaaaaaaaaaaaaaaaaaaaaaaaaagaataatataacaaaaaaaataaaaaaaaaaaaaactaaaaataacaaatacaaaaactctacaaacataatagattacactaatttatagatttgcataacctatactttctgctctgaactaaaatcccattaaaacagcaaacttactgattaatcaa

SEQ ID NO: 325488 - DNA, 434 bp, Zea mays
gtacctgcctactcatgggacccttttgttcttctggatggggttcagggacatccagttggtgtgcatcatacaaattatgctccaagaccaaaatattcttctaataagcatgttgttccttctttgaaagcttcccacagtgcaaaatccacagcagatactgtcaaaggatcatcatcagctctagaaactgtaccaaatgctgccaatagcagcacatcatcaaagggtgcaaataaggcacctggtgcttccataacaaaaggatatcttccatctagcaagtttgtgatgcacagtaataaccaagcaaaaagcagtgtttatcaaagcaaaagcatcaatctgaaagaaagtggtagaagctggcacagcagtgagaagcttaaagccgagaagtagctaaatggacatggcgattctgaatctaa

SEQ ID NO: 325489 - DNA, 326 bp, Zea mays
cccacgcgtccgcccacgcgtccgcggtacaaagttagaaatggaaaattttcacgtaagagaaaaaaaaaaaaaaaaaaaaaaaaaaaaaaaaaaaaaaaaaaaaaaaaaaaaaaaaaaaaaaaaaaaaaaaaaaaaaaaaaaaaaaaaaaaaaaaaaaaaaaataaaaaaaaaaaagaaaataaaaaatatgaaatataataattgaaatacatggaaaaactattatgaaaaagctattactatgaaaaacaaagattatgctaaaaaaagcatcatatgtatagcacaaacatttattacactgataataagtatgtaatag

SEQ ID NO: 325490 - DNA, 281 bp, Zea mays
cggacgcgtgcgctgtcacggaatatgtacatatgtttcacaggggtatgccagcgcgggtaagcatctgtgctctgtgcgagcgatatgctggcatgagcagctgcaatgccttgagaccctatcttgaacgcaaattccttgtccgagctcaagatggctcacgtatatgacacgtcgatgagtaacattgacgtagctcatgccacatgtagcgtcaacatggtagaagcatatacctctacgtcggacaatatgaaagaactggatgtcacaatgcc

SEQ ID NO: 325491 - DNA, 91 bp, Zea mays
cctaccaccaccgctcacctcggttgggctttctcccctcttccgaacccgcttctcgcgccggattccggattccctctgctctttccct

SEQ ID NO: 325492 - DNA, 241 bp, Zea mays
ccagcgtcggacctgcccgctcgtaccgcttatttgagccggcggcccacaggggatctacgacccagtagacctaacgcgcgcggcccaggccgcgcggccgggacgcgacgccggcactcacggctcgtccccgccttctaccacccgacgatcgcgcggcggggagagtccgcccaccacgacacagcgggcgtctagagaccaagctacgaccggcagcagcatacctcttaggcac

SEQ ID NO: 325493 - DNA, 191 bp, Zea mays
gtccgtcagatcgcgagcggctgttcttttctttattctaatacccatctctatctaattatatgaagttttttatcatcaacatagccagctaaactcaaatcacaaattgaattaatcaatacacaaaaaccccaaatggaaccctcatctatctaaaccaataatatataatactacctgaacaagtc

SEQ ID NO: 325494 - DNA, 158 bp, Zea mays
cgcgtcgaaacattggatcatgcgatttgactcaaaagtctggtgggggagcaatgtagaagctagctgcactaaacctatcgaacgctctcatggctacgcacagatctcactgaccctgaagactggccgttaacagaactcacggatctacccat

SEQ ID NO: 325495 - DNA, 354 bp, Zea mays
cccacgcgtccgcccacgcgatttcccactcttacgaaaaaaaaaaaaaaaagagaaaaaaaaaaaaaaaaaaaagaaaaaaaaaaaaaaaaaaaaaaaaaaaaaaaaaaaaaaaaaaaaaaaaaaaagtacaacaaaaaaaaaaaaacctaagaaaataacaaatcaaaaaaaaaaaaaaataaaataaaaaaaaaaaccaaaaaaaaaaaaaatgacacctagaaaaaaacgaaaataacagaaaaaacacaaaaataaccaaaaaaaaaaaacataaaataaaaaaaacaaattaaacaaaacacataaaaaacaaaaaaatcaaaaaagaaaaaaaatacaaaaaaataa

SEQ ID NO: 325496 - DNA, 79 bp, Zea mays
cccacgcgtccgcccacgcgtccgttcgaaatctatgccacaacctgtacctaatccttcggttcgcttaccacttacc

SEQ ID NO: 325497 - DNA, 179 bp, Zea mays
ccacgcgtccgaagtcaagaaggaaatttattgccccctttttttcacctccaaggggggacttaagggggcatcataagtacctcagaagaaacctgccaaggtcgtcccaatgaaggaaccggttgaagagagaaaggatgctgctatgtatttggtgttattgatgtaaccaatga

SEQ ID NO: 325498 - DNA, 223 bp, Zea mays
acgcgtccgatcgacgtgcagacataccttaacaagcttaatatggtaccacgcatctattgaaaactgcgaaacttttaatccccaaccggggacttacatataattgaatattcagtaaagcattgcagtatggtgtatacagcgcaaattgtctgaatgaccccaccacaatgtaccccacctttattacaaataacatctaatcacacactaacataac

SEQ ID NO: 325499 - DNA, 454 bp, Zea mays
cccacgcgttcgcccactcgtccgcccaccttccgtttcacgcgtccgcccacgcgtccgtgcaaatcatgggatgcaaattagtaacagataatttattgactgctctatcaaagagctgcctgcaattggtagaacttggagctgcgggatgtaacagcataacagatgctggtatatctgctctggctgatggctgtcatcacataaaatcactagacataagcaaatgcatgaatttcctaactgaagagggagggagagagagagagagaatgttcctgtttatgtagagatggagtccaaaatttgtgtgcctgatgagttcttccccatatgatattaactgaaatagtatatcaattgaatgtattacattttaagttttaattcaatcgatcttaagagattaaaaataaaaaaaaaagggcgggccgtttagaagatccaagct

SEQ ID NO: 325500 - DNA, 167 bp, Zea mays
ccacgcgtccgcccacgcgtccgcccactcttccgaaaattataaaaccacccaaaaaaaaaaaaaaaaagagacaactttaaaaaaaaaacgaggcaaaaaaaaaacaaacaaacaaaaacaaaaaaagaaaaaaaaaacaagccaaaacaagaagacaagaccag

SEQ ID NO: 325501 - DNA, 210 bp, Zea mays
agcgatcccactcccgatcattcagctgattgctcactcttgcagctcggtcattctttagctgctctagctctagccctagctagtagctagccactcggtcgtgtagtcatcagccttctgatcgtcacccatggccactgcctaggtccagaccccgaccgtcgtggctaccgaggaagcgcctgtggtggagaccccggcttcgtc

SEQ ID NO: 325502 - DNA, 348 bp, Zea mays
tcaagatgcgggatgttgacctacgggttttccttctaatcgggaaggtaatggatatgtgcagaccaccactcattatctatatgaccctgattaacttctgacattcgcgtttgacacgagtgggtcaatgccaacaaatacaatcacaaaggaaaggaaaaagcacgagactgttgtcctggctgagcttgatcaaagaacaagacggctgagttcactcaagatggatggatagtttgtaaaatacaagttcttgaaagctgtagtcttggcctattctgcacctggttccacagcgtatgcttcactgagcgaaaaatcattggtctaccgaatactgcgaga

SEQ ID NO: 325503 - DNA, 123 bp, Zea mays
tcggttctagatcgcgagctgccgctttttgtttattttttttaacaaaccattgatgcattggaagttgtggcaaaataccacgaggtggttcaatacattactaacaaacaatgtttcgcc

SEQ ID NO: 325504 - DNA, 456 bp, Zea mays
cggacgcgtgggcggactcgtgttatggatctcgaaagatcagctcaaggttgaagttacgtcagtttttggatctgctgcaccttcactcaaagtgaatcttgtgcaagtgttgggatctgactctaaagtcatcactagtgagaacatggatcttcaatacgaccttgacaacaatgtccattacttggacattgctttcattgaaaattgatgttgggaaacactctattgtatttgagattttactttttgtacctttagctgagattgtttttgctactggttctagttacatataaagtgtttttgtctcatttttttataaaagtttatatggcttatattttttattttttttatgtttctctttttctttttatattatttttattttttttatttttttttttattttatttttttatttttttttttttatttttattttctttt

SEQ ID NO: 325505 - DNA, 111 bp, Zea mays
gttctagatcgcgggctgcctctcgcgaactagaactagtctctagatcgcgcgcgggggctctttattatcaaatgttggctgcgctggcattccacttgttagcccgtt

SEQ ID NO: 325506 - DNA, 356 bp, Zea mays
cacgcgttcgcggacgcgtgttcatcgtcggtttcggtgtctgcgcgccgagaaggaacaaaggaagactgtagctgtgcagagatagtgagccctctgggcgggtggccgccatacaacccgcacagcttcagccagttggtttgtttttattctacgcaacaacttcgaatgtcacaccattcacgtatgtttcgacccacacgacagatccgtcacccaattcagtgataacgaccgatgccatcaacattctgtttaggctcttgttctataaatttccggagaatttgatgccaaagagagctgcgcctgacaacctatctcctgagaacaacaacaacatgaagcaaccc

SEQ ID NO: 325507 - DNA, 125 bp, Zea mays
ggcggttacaagcaaggcagcagcacctgaccagcacgcgacagaggacacatataaccaagacccccggaggccacacgcaccctaggcagagacggaggaaaacaccaccagagaaaggagag

SEQ ID NO: 325508 - DNA, 167 bp, Zea mays
tcgctccatatgagtatcaatatgggcagatgattgtggtagataagattttaattgagctgcgaagtattggcatttgtccagagacagtgccaaagctgaatgaacggtgacgatgatgacgatattttttaaaaaaaaaaaaagaatgtacaaaagaagataac

SEQ ID NO: 325509 - DNA, 181 bp, Zea mays
ccggccgacccacgcgaccgaccacgcgaccgcccactcgggctgtcgagattgagagcggccgacctttacagcggataaggtgaatgaacaaatagggacgagcaaacagaagcatacgccaccgcgacaaaacacgaaacaactgacgaatagcgagccgctaccaggtagcagccca

SEQ ID NO: 325510 - DNA, 169 bp, Zea mays
cgatgctatactgaatgcttactggaattttgatcatcatatgtcactagtcgattaggggtgcactgagcagaggaaaccttggatttgcacttctactgatgccatgtcacctttcaaaaaaaaaaaaaaaaataaaattatataaaataaatagtagtacattata

SEQ ID NO: 325511 - DNA, 250 bp, Zea mays
gttctagatcgcgagcgcccgcccttctttttcatttttttcgattatctgaaatacgaggactgttttacttttaataaacaacgcggggcacagattagcgcattcatttatatatatgcccttggtaatgggcattactataccgctatggcgttggatgacctaaaattacattagtgactgggtccttcaaaaatgagaaacaactcaataatggaaagcattctccattacgagaagaacccaa

SEQ ID NO: 325512 - DNA, 277 bp, Zea mays
acccacgcgaacgcccgcgcgtccgaccggtcaggttttcttttaacaaaccccagaaagccaagagacaagtgaaggttcaacacaggaccggccatataattagaagacccaccggggcaacacacactatgaaaacccaacccaaggcgctgagggatcatggtagattaaagcgccgcgcacgccgaatattatgccatgaacatagatgaggccaatctgtgcagcttaaatcaaacacttatgaacgatagtttttaacattactggaaca

SEQ ID NO: 325513 - DNA, 233 bp, Zea mays
ccacgcgtccggcgcggcgtctgcggctgtccggcaggccacttgcaaccgcctcaagagcatgacaggccggctcggctgaaacgtcagcagggccaacacacccaacaaccccagcaagtgccgcatcagcgccgactcgcccagcacccacacacggcgactgacccaagaacaactgatccatggaaccacacgaggaagacgctcgaccgctagacggcaccgtacga

SEQ ID NO: 325514 - DNA, 218 bp, Zea mays
ggtttctgcacttaatttttgggcgacaatttcaagggagtaacgtggtagtgatttcgctccctttattatgatgaagttgtggcttgtatcaatgtcgtatctgcaatttgaaatatgtatatatgccatgtccgattagcaacaaaaaaaaaaaaaaaaaaaaaaaaaaaaaaaaaagaaaaacaaaataaaagatccaaagcataacaaacaaa

SEQ ID NO: 325515 - DNA, 200 bp, Zea mays
  unsure (1)..(200): unsure at all n locations
ggccggggtgaccttccaaggcattanttagctgacatatagaaagcaaggaagcggatgccgtgccagctgctgcacgcataaatcttgaatgtgctggttgagagttttttagttgctctgcaggattagacaatgttctaagactaccatgttttaagtctgctgatgctatattcatgaacgattttgcagctagc

SEQ ID NO: 325516 - DNA, 422 bp, Zea mays
  unsure (1)..(422): unsure at all n locations
gctgtcagaggtcgaagtttctcaacaaagcttttaccatgcacannaggagatctggtgtgccgtgatttaacgtgagaagctatcttggtataatggcacccacagnccatcaaatggcctgatccaaagcccaagctcaaagctcagtatcnagagggttgttaacaatctcaagggcgtcaatactgctgatgaaatgggcctgcacgtcaaagcaatgagagcactcaaaaccagacttcattggaagaagacttcacaggccaaagggctgaaaagtccatctcggcaagtttccctgtagattcccttgggccttgaagaaagtattcgattacccttccaggcagagtgaggttgacattggcagccctaaggcatatgacggagaagtgatctgaaaagcttgggcattccaa

SEQ ID NO: 325517 - DNA, 199 bp, Zea mays
cggacgcgtgggttttaaaggtaatagttgtatataagcagagttctctgacactcgagccattttaactggatgtcattttccaattgatacaaaaaaaaaaaaaaaaaaaaaaaaaaaaaaaaaaaaaaaaaaaaaaaaaaaaaaaaaaaaaaaaaaagaaaaaaaatgataaaaaaaaaaaaagtaaaacaaatta

SEQ ID NO: 325518 - DNA, 195 bp, Zea mays
tcgcgcgagcgttcgccctaaatttttcattttagaagcgaggcaaattgcccaggacactgattaaagaaatggggctgttccattccatgactgaatatgtcatgtacataacaccctattgccatacggtaacaaatgatagcaatctgttgcagacatagattattcgatgatgcttttaaagatatgcat

SEQ ID NO: 325519 - DNA, 143 bp, Zea mays
accacgcgtttgcctacgcgtttgccctttcgatcgcccacgcgtccgctgacgcgtgggttgacgcggcggatgtttgtaattccaatgatacaactcagatccaaaaaaaaaaaaattaaaaaaaattaaataaaacaaaa

SEQ ID NO: 325520 - DNA, 206 bp, Zea mays
  unsure (1)..(206): unsure at all n locations
agaagtcctagtgttactagctttcctttcgctgcatctcagagttcccaccttgggttggtagataataagaatgttattgatacacaaaggctagaagaagaaaagaaaaggctttaccgaagggagctactgctattgttctacttgttatatttgatgatgcaattggttatcatttatctactcttgatcagttnttataa

SEQ ID NO: 325521 - DNA, 386 bp, Zea mays
acccactcgtccgcccacgcgttcgcggtttcgtgggcttctcttggcccagaatgggggaatggctcgggggcctgttgacaatcctgctgagagtgaaatgtgcaagtttcaagtacttctaacttctaattacctgcattacaaatatcattttttcccaaatataacatagcatcaggtttttctctgttcatacttttttagtaacttaattcctttgagttatgtagtattaaaattatgattggctatcttttgatgcaatgaagttaatatctgtaactttttactatggaatctttctgactttaagttactaatatttgttttgagttctccatattgctctgatattattgatgtttgcaaccaaacttaagcta

SEQ ID NO: 325522 - DNA, 53 bp, Zea mays
cggacgcgtgggcggacgcgtgggcggtcgcgtgggcggacgcgtgggaaaaa

SEQ ID NO: 325523 - DNA, 62 bp, Zea mays
gacccacgcggccgccagccgccgtcggatcggattcgaactatagcaagcagctgcagccg

SEQ ID NO: 325524 - DNA, 443 bp, Zea mays
ccacgcgtccgctttgttatacaaatcttccatttttttgcttgtagcatctgcccgggttttccctgacaaacgtgtcatcaattaatttgtaaaaaaaatgatagattaagcggcgatcggcatgctctgccgtagcgccgactcgacacacgagacagcgtgtgagcagaagaccgaggtgagatttcgtacacactcatcccaaacggtctgaatcagaaggggaatcgctggcgcgtaggctatgaatactgtgagccaaagagatttgatattttattgctagctgcagatcagagaacctgaagtatattgatttcataggtggttcttgctggatcatgttaagctccatctcttataatagcttgaacttatacatatttggtacttgttttaaatttataatgcacagattattgatattcgtatagattgag

SEQ ID NO: 325525 - DNA, 224 bp, Zea mays
  unsure (1)..(224): unsure at all n locations
aaaagaggaaagggggatagcttaanctttccatccaccgnctctcagttgagactctagcgctttttcattccacagttatatctgtaggacggatgttcaaactctgctagattcagtctttctagctgagaactgagctgtagctgaaggttcagtcattcttcacgctcgagctactacatcttcttgctgctgagtgccgggagctgagatcgatcgag

SEQ ID NO: 325526 - DNA, 387 bp, Zea mays
  unsure (1)..(387): unsure at all n locations
cccacgcgtccgcccattcgtccgcggactcttgggctgctctgatttttgtttatctggtctgattgccaactgtccaggctagcctgaagtgtggtaactctatttgtaatgaaccctaggttttctttgagccttctgaggtgacctatcagaccttcaacgactgntatgtctccggttgcgatccagttcttgcatgcacatttttttcacaccggggaatacttgttcaccgtgagaaactacctacacgaacaaaattgtagcgtctagtctgtgacttatgttccatatactaactggaattaagttggtttaagttaacagtatttgtagttcggtttatgttatcttatgtttgttgcaaaattttatgatctttat

SEQ ID NO: 325527 - DNA, 227 bp, Zea mays
ggcagacgtgatcaattgaggctcgcattgcgcttggtgggcccactgcggcccgcaggggggccttgctggagcgcgctgttgtcagatgatatgcagggactcactgctgtgcagtaccgctagaatgcggctggtgctgaccgagtccaacatgagcacccgtacgaacgtcatgcttgctaggccggcttttgaggccctggccaagcccgggatggcccatg

SEQ ID NO: 325528 - DNA, 130 bp, Zea mays
cgcacgcgtccgcggtacgcgttggaactaagatgagctcatatgtcaccttggagaaggatatgctatacctagaaagaagggacaggatagggatgaactaaaaaaaaaagaacaacaaagacaaaaa

SEQ ID NO: 325529 - DNA, 421 bp, Zea mays
  unsure (1)..(421): unsure at all n locations
atctcctcgcatttcttcccatccctttttgcaacccaaaccccaactcgccccgcatcgatggcgcccaaggccgagaagaagcccgcggcgaagaagccggcggaggaggagcccgcggccgagaaggcgcccgccgggaagaagccgaaggcggagaagcgggtccccgctggcaagtccgctgccaaggagggcggcgagggcaagaggggcaagaagaagggcaagaagagcgtggagacctacaagatctacatcttcaaggtgctgaagcaggtgcacccggacattggcatcttctccaaggccatgtcgatcttgaactccttcattaacgatatcttcgagaagctcgctgctgaagccgncaagctcgcgcgctataacaagaagcctaccatcaccttccgtgagatcc

SEQ ID NO: 325530 - DNA, 306 bp, Zea mays
gacccactcgtccgtaaaattggaacgatatagagaagattagtatggcccctgcgcaaggatgacacgcacaaaaagagaaatggacccaacattttctatagtcgattttggtaaaaaaaaaaaaaaaaaaaaaaaaaaaaaaaaaaaaaaaaaaaaaaaaaaaaaaaaaaaaaaaaaaatgaaaaaaaataaaaaagaaccaaaaatttgtactactttaatacaacttaaaacaatataaatggtaataataaaattaaatttattggctttgatttttataatttaataaattgataaaac

SEQ ID NO: 325531 - DNA, 162 bp, Zea mays
cgacccactcgtccggtctagctttgtgtattgtaattttaattggtatacgtagccctatatgtgattaacggcttgactggacctatgagaatggtaagtttatttacgtggggtatggaaacatgaacattaatgaatgtgcaaatgggttgaggtcct

SEQ ID NO: 325532 - DNA, 220 bp, Zea mays
acccactcgtccgcctagctcgatcgagttcactctcagcatgacgctcactcttgcagctccacccttcagtcagttttaggctcttagctgtaggctctatctagccgcgccactccttcgtgtagccatcagccttctcatcgccaccaatggccactgccgaggtccagaccccgaccgtcgtggcggccgaggaagcgcccgtggtggagacccc

SEQ ID NO: 325533 - DNA, 329 bp, Zea mays
  unsure (1)..(329): unsure at all n locations
cccacgcgtccgcccttgcgtccgaccatgcgtancggctaacaacgaataccggcttgctctgaatgttgcttgtcatcatagctgtttttgcggtggttgtggtgatgctagcgatcgcctgcttgtcaaactttaccaagtccagtaagaaatgcaagagcgaatagctgtgagctgcataggagaaacgaagattcggtccagctataagctggatttcacactgaccagtgatcacctatgtcaaaccatgcctctgagcaggcaagagccagattgcaccacagcattaagcaatacactgcgtagtgcaatttgcaaagcgc

SEQ ID NO: 325534 - DNA, 364 bp, Zea mays
ctgattccagggaagttagactgaaaggtggcctagatgatctccaaaagcggcatcaagcccggtatcttggctataatgaactggttacacaagtgcctgcgtctaccagaccgtttataagacagatcgaagccctgcatgagacaactgctcaaacggcagaggctagggctgatgcggagagaaccttagactgtagcctacacgaagcacaagctgaagctgctgcttcagaagaaggagcagactgtagatcagagagtgtcacagagattattacggataacagtcctggagaccgagattgcaactcttagaacagagcatacacagctgaaccgatctctggaaaaggagaggc

SEQ ID NO: 325535 - DNA, 326 bp, Zea mays
cccacgcgtccgggctgaacttacctttggccatactggcaagacagttttgttcgtcctcctaggagtgggggccgtcgttctgttgtcatttttcattttcaagtattggcagaagaagaaaagggaggaacaacatgcacgtctactaaagctatttgaagaggatgatgacattgaggttgagcttggtcttagagactgataatcttcaatgtacagcaagagtatctcggctgaccaggttttgctggcttgccttcagagcattttcacgttaatgtaaagaatttgttgtatttaaacttggtagacccccacaagaa

SEQ ID NO: 325536 - DNA, 223 bp, Zea mays
ccacgcgtccgcgtcgaagaaaaatctttcgttaggtgatgagatgtctggaggaagaaagcaatggagagcaggctcattttgttccatgtgcctgcctgcgcatactgcctctctgtgcaaattggccgtactccatgaatcacactgcaattctaaaaacgcttagcgaaacgagaatgcaacacgtaataaacgaaaaacaccggttggctttacaatg

SEQ ID NO: 325537 - DNA, 207 bp, Zea mays
cctagcttgaaatgactgaccgtctctatacagccacctaaacttgaataaactggccggggacttaaaacgaatggactggaaaaactgtggctttacccagctgactcaccttgcaaaagatccgcatctagcgagcttgcgaacaagcgaacaggccggaacgcatagggatgcgaacagtagcgcagcatgaagggcgaatgg

SEQ ID NO: 325538 - DNA, 198 bp, Zea mays
  unsure (1)..(198): unsure at all n locations
gacccactcgtccgcctacgcgtccgatgtgactgtctngctggaatccctgagtaccagaggtttgatatggtgtgttatactgtgaacgtgggctagcctatgatctatgtctgcagtctgcaccatatgttgaactgctggactacaacagctcggatcaaaagccgaatgtacaaaattaaccaagaacaaaaa

SEQ ID NO: 325539 - DNA, 376 bp, Zea mays
attcatgttgcacaatgcaaaattgactcaagtgcatggggtattacagtgccttgtgtgaacctgcttatctcgtgcggtacagattaaataatggcacgaacacagaggttactttactgtacggccacacatgtctcaatcattctgtagcaatatatggaacggaacgagtgccgtgctaacacacgtcatataatcgactctgtacaacactaggcccgccattgggtgaccgcttcttggttctccaaggtgcagctgtcacttgagagcctactgatcatgattgtcgatacctgcgaatagtttgccggaacatggatcaaggttgtctgcatcagtttgggctgaatggaaaggataattaaaagga

SEQ ID NO: 325540 - DNA, 232 bp, Zea mays
aaaaaaaaaaaaagataaaaataaaaatttaggataccaaaccaaaaaaaaaacaaaaagggacgggccaacaagcaacaaaagacggccgaaacaaaaaacagagcgcacgagacgaacaaggacaaaagaagcaaacccacagccaggaaaaaggccgacgcgacagacaaaagaggaccagaagaccacaaaccgagacagaccagggcacccgcgcgaacaccaacca

SEQ ID NO: 325541 - DNA, 355 bp, Zea mays
acccactcgtccgagaaaagataaagggtctgtttggaacgttcatttttgataacaaaggaagcaaatcaaaagaaagtgatgcaattggcagcgaacaatgtattgcaacgacttctgaagagctggcttcaatattttcatcaactaactttgctccgccatctgagggaaggaacagttcactacgagatgatgaaaatgctgagctggacatagatgatatcgacattgatgacaacccacagaagccaaaaggtccacatttccctggtctaagtaaagataaaatcagcaagggactccaaacccttaaaggaaagttgaagcccaagactgaagaaatgataagctc

SEQ ID NO: 325542 - DNA, 302 bp, Zea mays
cccactcgtccgggtaaggatgctacatatgattttgacgttgcttggcacagcaagagtgccaaggagctaatgcatgactacttcattggggagttgaactcgtacccaactcctgagattcctgagatggaggttttcagataggaacacgacacacgatttgccaggaagcttatggacgttgtggtgcaatattggtcgatcccagccgctgtaattgggatatcagctgttgttgccatatagtgtgcgctaacgaagttaaagctgttgtgcatgttcctagctcgttcagatta

SEQ ID NO: 325543 - DNA, 280 bp, Zea mays
cccacgcgtccgcctacgcgtccgaaataaaataaaaagataccatttccaacaaaaaaaaaaaacaacaagagcagctttaaaagaccaaaaggagccacagcactaggaacaagcaacccaaccacactccgagaaactgatcaagaagtcccaaatgcctcttgtgacgaaaaaggcggactaaaaaaagtcaacagggaactacacgaataaagtgcaaaaaaccgcggaacaaccagagaactcagcgaaccatgacacgactactcacaaagga

SEQ ID NO: 325544 - DNA, 296 bp, Zea mays
acccacgcgtaccgcccacgcgtccgcccacgcgtccgcgcatgacataccaccctccgccccccgccgggcgtgcagggtggacgacaccacggccggccgaacgaacaccgccactgcacgactccacgcaagaccgcaatcgcaagagacgagcgttgcgccgcgcaaaaaccgggacgtgacgaaagccgccattgacagcatggccaaaggcacctcaatggatgatgatgatatcgagaagaccgatgcatctgccaagaaaagcaagaaaaagaagaccaaaaccaaag

SEQ ID NO: 325545 - DNA, 351 bp, Zea mays
acccacgcgtacgcggacgcgtagggcggtcgcgtgggcggatgcgttggccaaccagagcaaaagccaaacggaagcggcacgcgtaacaggaccaacaaagggaggagccaccagagcgagaacagcatcaccgactgcaagagcgagggcaataccggcgggtactgcaagctcggggctagcatgtgcaccaaagagtgtgaccgaagtactgacgctgctggtgctaataaagccccacagcagcatttgagttgatgagtagtaaagaagaacgcttttgttatgccagcgcaagctctagaattcgaggccgagatgaccaaaaataaatgattttgttactct

SEQ ID NO: 325546 - DNA, 116 bp, Zea mays
  unsure (1)..(116): unsure at all n locations
accacgcgtccgcgaggaaaatggactactacatgnaccataggattacacgcccaaggctcaggcagccggggcgggtgaatcaaacatggccacggacatgctcaagaagaacc

SEQ ID NO: 325547 - DNA, 186 bp, Zea mays
ccactcgtccgcgttcgcgtgggcggtcgcgtgggtgattatgtttgtaccgcgttagacccggaaggccggaagattgtacacgcggcctgatctggaaatggtactctccatcgggtagggtggcgggcataacagactcatataaccagcttgctcaacttaatctgtctgtcctgtatcaga

SEQ ID NO: 325548 - DNA, 240 bp, Zea mays
cctacgcgttcgacctcgcgtttggccatacatacggacgcgcagtcgcacattcggcatctagtcctcccgtcgtgacccgtacgcacgatctgcgattggccgacgcccggctcgccctcgtcaacaaaagcacaccgcaagcgagcgaaaccgagcaatagtgacactagaacgcacgggctagctgagcctggatggacgacctgaataatgaagcaactgcgtgatatgcatgtt

SEQ ID NO: 325549 - DNA, 166 bp, Zea mays
cctacgcgtccgtgatgacggacccagatccaatgacaggagaggaggcagggccgcgggcgcgttcagaattccgagcggcagcggcgctcctaatgcacgcggcacagatgtcccggaggccaatggcaagctcacggccaggcccttggagcatgctagccaa

SEQ ID NO: 325550 - DNA, 257 bp, Zea mays
  unsure (1)..(257): unsure at all n locations
ggtatagcatggggtttccatacaaaattagatgccaatcagaagangctggacaagggagaggactaacgaggaggccgggcctcacaaaggagacaacacccgagaagcaaaaaaaaggaaaagaccgcccgcccaaacggcacaaacaaagacacggacggcggcagcaacaagccgacgcacaagacgccctcaacgccaacgacgcgggcgacgccgaacaacgcgacgaccgcaaacaccaccgcggacgc

SEQ ID NO: 325551 - DNA, 275 bp, Zea mays
cccacgcgtccgccctcgcgtccggctttgtcttcttgaagattgttatcaacactggggtgatgctgagttacgtgtcgaatctcgccttctcgaggccaaggccgtgctcgacaagacgtcggacacgcccgctgaggccgagcagcggctgctcgagatcgaggacgtcgtgatggacagcagcggcgacagcggcgcgtggaaggaggtggcgacgaaggctggcgtacagcgcgtgttggcaacccgggtgacgctgcaagtcttccagc

SEQ ID NO: 325552 - DNA, 299 bp, Zea mays
tcgcctacgcgttcgcggtcgcgtgtgtgatgcgctgcattttatgattctattgccaggtcataggctattgttctgatgatccgtagctgcacatcacttattgcctatctttgtaggttttccactgtgaataggttagtctactacttttaacaatttggttcattctttttccaccacagatacacctgtacctagaatgctttaatagatcctcatacgaaatggacattgtacatttcttttaacaagtcagtctcttgctcattataatctggaaccatttgcaattaaaa

SEQ ID NO: 325553 - DNA, 242 bp, Zea mays
gattggtttcctcattaaatataatagcatacaatcaggagacgtagctgattattaaagagagggtaaaaaaaaaaaaaaggccgggcaaaaaaaaaaaaaaaaaaaaaaggaaaaaaaaaacaaaggagggccgcacagaaataacaaacagagaaaaaagggccaataagacagacgagagacagcggagagggcaccgatagagatgaaaagccggcgcatgtagaagaaagggggca

SEQ ID NO: 325554 - DNA, 168 bp, Zea mays
gacccacgcgtccgcccacgcgtccgaaatataaaataaaagataaaaattcaaaaccaaaaaagaaaaaaaagagaaaggataaaataaaaagagggccaggcaaaagaagcacaagcaaaccaaagagggcaacccacacaaaagtgccttgacggagggacccaa

SEQ ID NO: 325555 - DNA, 186 bp, Zea mays
  unsure (1)..(186): unsure at all n locations
gacccaggcgacccctgcgccgaagccaccgccgtagcaagcgtacattgaacacccacaaaccaagccacaaggcggggccaccgtcaaggagggcacaggacaacagaccaagcgccgacaaagaaccacgccgggagccacaccccacaagagagaccnggacccagcgaacggggcgcagca

SEQ ID NO: 325556 - DNA, 427 bp, Zea mays
  unsure (1)..(427): unsure at all n locations
gatgatcatgaactcttccttctttcnacgctgtaactgaagggtctcagtgttaggcacttaggctatctccagcaagataaaggccacgaatcccgggtgtggtgctggcgtggaggcagcaggcaagaagaagcagcagatctaccgatggaccgcgagtgaccgtgactgcgagctcatggggctcatgtggctgctgcagcgcaatgccacacggtacggagcggcggccacggccgtgatccgggccctaatggccgtggacgaggcgttcaccgcaggggtcgcggtggcggcagatacgggggcagccgtggcgtgctcgctgcccgtggacgacgacatgcccctnccggccgagtacgcgcaggtcagcagggccagcgacgcgcctcgtctctgctgcttcctgctcgtgctgctc

SEQ ID NO: 325557 - DNA, 51 bp, Zea mays
cctacgcgttcggattaattcttttggattactagtggaaaaacaacaaaa

SEQ ID NO: 325558 - DNA, 209 bp, Zea mays
  unsure (1)..(209): unsure at all n locations
aaagaacaacgcagggagccacaccccaaaanagaaagcnggaccaagcgaagggggcgcagccggacgcaagcgaccgnacaacggacaaccagcgcganaggcacaanccccgcagccggacaagcaaacggcgagcacnggaggccgagagcgagcacgagaggacggcccagcgacaagagcagaaaaggcaaacacacacaggc

SEQ ID NO: 325559 - DNA, 402 bp, Zea mays
  unsure (1)..(402): unsure at all n locations
cctacgcgtccgccttcgcgtccgccttttnattccatgcaaaacaacgtgtgggtttagaatgactaaccagttaaactatttgtcaccagctattatcaccaaaaatcatgcaggtaatatcaagaatataaaaactcggccggtggggaaagaccgccccacggtatttcactaagaagagctcaatcagagcatgagctggccccctcatacatagggatgtctcccctatggttcgggccttgacccatgctttgaggcccaacccacatgaccagcctcttacacgagggctcgttcacccatgccgactaagagaaccagcgagtgacgttttttttaccacagtctgaaatttgatctcacagggagtcgaacctaggatctgagtggtgctac

SEQ ID NO: 325560 - DNA, 267 bp, Zea mays
  unsure (1)..(267): unsure at all n locations
cgaccacgcgtccggttcacagtgccgactggaatccccgcttagataacgagaccnnaacggggccngccgagaacgctgnccgaaagcgggagcgaccgcaaccggggacgggaggagccggnccnccaacacacaaaagcgagggccacaaagcagccagagcccggaggcagacggcaccagacagagcancnagnncaggaagagccgcagaagaagggggcggaaaggacagggaccangagaagggggggaagaagaaaa

SEQ ID NO: 325561 - DNA, 301 bp, Zea mays
cggacgcgtgggctgtcgcgtgggaaattaaatatccaaagaaaaaaaaaacaaaaaaagaaagagtaaataaaaaaaaaggccgggccaaaaaaaaagggcggccgcgcaaaaagacccaagcaaacaaacgcgggcaggcaaccacgaagcgcgcaaacagaaacaccaaaaccgaagacacaggccacccaaaaacaacgcccaacccggaaaaacccaggaagcccccaaccaaaccgccgcgcaagacaaccaaagggcaccagcggacgcaacaacacaacagcccgcacgcacc

SEQ ID NO: 325562 - DNA, 439 bp, Zea mays
  unsure (1)..(439): unsure at all n locations
ctagtgcacctgattgtatttctcagtgttagatgctttacatggggtattaacaagatagtactgtaacactagagacaactgttgctaacttgatatacagaagagttccactgttggagcagcaagagtgcagtaattcagattctgtgatttgactcaataattgacatgattgcattattgagattataacttggagctgattatattcgttatctatgatagaaacctccaaatatgataagtttccctgtgaaaccatgctattttagccacgctggagttggttaaagcaccagttaacaacttccttttatgcataaaacaggagatgaacctggaggcacctncagcattgggaggtggatgtgcagcccccatgctaggagattcgatggaaaaggctccaagctcaccttggatgcctntctccatg

SEQ ID NO: 325563 - DNA, 88 bp, Zea mays
cccacgcgtccgcccacgcgtccgcggatgcgtgtgaaaaaaaaaaaaaaaaaaaaaaagggagaataaaaaaaaaaacagaagagac

SEQ ID NO: 325564 - DNA, 84 bp, Zea mays
aaaaaaaaaaaaaaaataaaaaaaaaatttaaatttaccaaaaaaaaaaaaaaaaaaaaagggaaagaaaaaaaaaaaaaaaag

SEQ ID NO: 325565 - DNA, 266 bp, Zea mays
tctagatcgcgagcgtacgtccgagattgatttgctggctcagaaggtagcgatcaggaatgttcttgtactaaagcgatcgtctgtatgggggatcaggaacgtacttggaacaacccaaggtttggtgacgatgacaatgtaaataatagaggtggctttggacgcggaaatcaaggcagagggagagggaggagttttgggggtggtggtggatcatcatggaatgaaggcaacagaaacggtgaattacgtggggtaaggtc

SEQ ID NO: 325566 - DNA, 256 bp, Zea mays
cggctcgacccactcgttcgcttgcaaacttagcgtcccagcttcgaataccgacccgcactggctcgatcacgggaggggctagttgccaggcgagaggccagtccgcaaacgataagatccgacgtggcctactgccgacatctcgggactgtgccgtgcgagtgcatcactcctggtccggccaaccaatgctccatccatgcatgagccaccaccacgccggtgcggcaacgtgcggcggcgccatactgtc

SEQ ID NO: 325567 - DNA, 418 bp, Zea mays
atttcaccgtgtcattaaacatttcttttacattgttatccctggccttagcatgcggttcctaaagcctccttccaatcaagttcatcctaaaattcttgaagtatggataggttcaatagatggaacccatgttccagtatcaatgtcacccgatcaagccgcaccattcaggaataggttgggagtagttgtacttggttccctgcagctgacaggaaatattggtcatatggagacagttctgcacagcgttctgagtgccgatatgagctatatatatgttgcatttctccatgtttgggctcagcatgtaatagaactgaaagaaggttgttgtgagacttgtatgacatgcttaaatttctggataaaatctagcatataataagtctattacatgcttaaatttctagag

SEQ ID NO: 325568 - DNA, 198 bp, Zea mays
ggaactcattggttaatagtgtgctttattaatattggtgatgctgatggaactgattttgctcccgttggacggcctgattggttactttgccctgttgactgtttgagaacgtaccgcccaggtttacttatacttactgctttttgacggtactgtacatacagttcgacaatttatttattggcagttcaattc

SEQ ID NO: 325569 - DNA, 430 bp, Zea mays
attacgcatgttccatcacagctggaatgcaaaccccggcgcgcccgaggaggggcgggttggattcaaaccgggcggggctaacaaaaaaggagcaggatgaagccgactactaacacggaacggaacaacgactactaaacgcgcccgatcacgccgcccgagaacgaagcaggaagtgactatgcgcccaaagaagcgcaagcgtctagcattgaacacattgcgggcatgagcagaaacagccgatcaaacaggtcatccagagacgccgatacaaaccgatataatacgttggcattaaaaacacgatagggctcagcatgtaatagaactgaaggaaggatgttgtgagacttgtatgacatgcttaaatttctggataaaatctagcatataataagtctattacatgcttaaatctctagag

SEQ ID NO: 325570 - DNA, 448 bp, Zea mays
gcgtacaccgagctactgcgctacctctacggcctcgagcgctggagcaacatgtacaagttccgcacgttcctcgacgaaggcgtgacggtgtcgatcggcatggacggcctcgcgtgccagtgccgctgccagcacaagccgctcgaacacatcgagtcgggccatacgcgccagctcgcgggcgagcccgatgcggcggtgttcccggacatcgccgagcgcctgagcattccgcagctgatcgccgcgtacacgatccatggcgcgtaccagctcgggatggagcacgagatcggctcgctgacgccgggcaagcgcgcggatctcgtcgtgctcgagaacgacctgttcgaagtcggccagtacgatatcggccgcatcgacgtcgcgctgacgatgatggacggcgacgtcacgcacgtcggcgacgatttcggcgcacgca

SEQ ID NO: 325571 - DNA, 304 bp, Zea mays
agcacagcaccgcatatagcgtacaggatatgtcttgagcgctggcactggcgtaccaaggaggcgcgcgtgaggaagctccaactgctgcggtcactgatgtcactgcaactgatcgaggagcacccgtcagactctgcagtgcacgtcacaccacgagctgtgcgagcgcaacatgagcgagttcatggtggagctgatacttctcgacatggctcctgccgatgcatagactagacgaagtgcgctacaacgcatctacaatgtacgagcggcatatgctggtcgtctgcatgaaacacac

SEQ ID NO: 325572 - DNA, 121 bp, Zea mays
cccgcgtccgataacacgaccgcagtaaacttacaggatagaattacaacctggcacacgaagaccagggaggcatacaaaaggaagctggaactgaaatgcacagagatgtaaccgcagc

SEQ ID NO: 325573 - DNA, 315 bp, Zea mays
  unsure (1)..(315): unsure at all n locations
ctacatccaacgggcatctccgttccgttccgatcctccgctccacgccgccaccgctcctgcgctcctcgcggctcaaacggtcaaatcgcagatccacaggaaaccccaagcggcggccgtccctgctgcggctctgcctccctctgctctccgattcgagcggattccatggccagagatgacgacggcgcgcccgcgcccggcgttccgggccaggtgtacctgcccgcgtggcgccgcgcgtacgaccgactcgtgaagatgctgcaccaggcgtacgcgcatgccgaggagctctncgtcgagcgcgag

SEQ ID NO: 325574 - DNA, 190 bp, Zea mays
attaaaaaaataaatttaaaaattttgataataaaacaaaaaaaaaaaaaaaaagagaaaggtaaattaatgacagcgcagtgcgctgaataaagcaaaaaacatacgggtggcagggctggggctttcctgctcaggtaccggatcttgctgctattggagcgagtgctatgctcctcgattgtattac

SEQ ID NO: 325575 - DNA, 344 bp, Zea mays
  unsure (1)..(344): unsure at all n locations
cataagcgtatgcgatccaagcttgcgtgcaggccctgaaccgaagaaatagaccaggtcaagcttaaagnagcaaccgtcattggagatggactggagtgaagaccatgggctggctgccacacgcatagacttgataacaaactgctagagtagcgggtgctgctttatgctgctttctaagcaactgagcaggtgtttgtgactgaaagaggtctcgttgatcaatctgacagctgcccaatgctggagtcaagcctctacttatgcagacggatgaccaacgagcgcccttattaccatcacgcagaaccgtacgaacttcacttgctctcgactatgca

SEQ ID NO: 325576 - DNA, 230 bp, Zea mays
ggcacgcgtgcgggctggcttgctgacatgggattgacctgtggacagacatgcaggagagcggaccgggtatggatgcacgaagggatttacgaagcgttcgtacaagcagtcatgagtgctgaggacagttacaatgtagaagacagtacatatgagagtacatcgattgacgcagcgactgacgaaactgctgagcagaacgtggatgacgcaatttctgacgcagc

SEQ ID NO: 325577 - DNA, 362 bp, Zea mays
ggcaagctgcataatttgggcgctgcgttagagctcaccgagcagcaggccaggcagctcaacttcgacctcgactcggcctacagtgcctttttggctgcgctgcccgccgctggtctgtaaccgggcgtggacctggttcgttctttacttctattacagtactatagatatctgtaatttcggtactgctattttattgttaataagaaagttctgttttctttatatactgtaaatatgtttatcgcatgatatacattcacatgacaacgcttgcaaatggcctgtagcctgtttacttgggtaaaaaaaaatatgggtataaggtgaaatgataagaagataggtagtggtaggtg

SEQ ID NO: 325578 - DNA, 267 bp, Zea mays
ggcccgacccactcgtccgcctacgcgtcctcgctcgcgcgcttcatttccaaccctaccacgcgcgcctcgaggggcgcgccttacgacactacgcgggcgccccaaacgcccgcgtagccgacctccgggccgacagcatccgcacgcagacggccgccctaggactacaccacccgctgcggctacgaaacagcaaccgaggcttagttctcccgatcgcgtaccgcgcggtctacagcgacgacagctaccgtggacaccagc

SEQ ID NO: 325579 - DNA, 361 bp, Zea mays
cgaaactcgagggcttacatgttgaccatgaaatgactatcaatgatccaaaactccttatggagatgatggatatacaggacgctgtcaatgatcccagtgatgctcaaaccctggagaccatccaatctcaggttaacgcaaagctctgaaacatgatgccgattccttccaggaggcatactacaagaaggatcttgaccgcgcataagaaaccacacaaagaatgacgtactatgaacgagcactagaagaaacagtctagaagctctgagcctgtcatctactgttacacctgccataagtggtaaggcatgtatcttttcctacgttcctagtacatcctgctgtagctgacgca

SEQ ID NO: 325580 - DNA, 389 bp, Zea mays
agccgccaagcacactcaccactctctcttcattacctccatataggccccctacattctttgatcagtgatcactctcgctgggtctcaccccctcccgcagacggccaaacagaacccacgcgtgcgcgcgcgcccacgagcgagcgatgcctcccctccgccgcgcgcgctccatcctgctcctcctccactacgtggccgcctcccacctcctgctgcgcgccgccgcggccacattgccggaccccgcgccgctcgacccggcactggtcgcgaccccggtgcagcccgccgccgccgttccggggggcacgatcccggcgttccccgcgcagtcggactcgctggcgggttcctcgtccacgtgcccgcttcgcccttccccg

SEQ ID NO: 325581 - DNA, 108 bp, Zea mays
gtggatgcggtttattcaaaaattttaaatataaaaacaaaaaaaaaaaaaaaaaaaaaaggaaaaataaaaaaaagggcggtcgatataaaaagaatggggggtcct

SEQ ID NO: 325582 - DNA, 282 bp, Zea mays
cccacgcgtccgcccacgcgtccgcccatgcgttcgcccacgcgtccgcccacgcgtccgaaaaaaaaaaaaaaaaaaaaaaaaaaaaaaaaaaaaaaaaaaaaaaaaaaaaaaaaaaaaaaaaaaaaaaaaaaaaaaaaaaaaaaaaaaaaaaaaaaagaagaatcaattttaaaggatcaaaaaattaaaaaaacaataaaaagaaggtaaaaaaaaataaatcgggtaaaacaaattaaataacctggccagtgttaaaaaaacttcatgactggaaaa

SEQ ID NO: 325583 - DNA, 313 bp, Zea mays
aaaaaaaaaaaaaaataacaaattgaaataaaaaaacaaaaaaaaaaaaaaacagacaaggggcaaccaaagaaagggacgcgcaagaaaacacacgcacgcaggcaacaaaagcagcgcgaacagagggagaccaaaaaagcaacaagccgggccaacgattgacagcggcggcgaccgggaaaaccctgccgcaccccaactaaatggccaggcagcacgtcacaccggccgccagctggcgtacgtgcagaccaggcccgaaccgaacgccgaggcgaccagtagcccagcctgaagggcgaagggcacg

SEQ ID NO: 325584 - DNA, 437 bp, Zea mays
catcagctaacagttcacgccttgcgctgccacaaagctcgcttatgtccattgccttcacgcggcacgcggcggccgggcttccgacgtcatggccaccaccaccggtgccgtcctgctcgtcttcctcgttgccattgccacgtgcgtctgccgctcaccattccccatcctgacgatggctgcggacgcggacaacggcaccagccacctgagcttcttcatgcacgacatcacgtaaggcgccagcccgaccgaagtgaaggtgatcaaggggcccggcgcggggtccacgctgaccgcgccggcgctgggcatgacgttcggcgacaccatggtgatcgacgacccgctgacggaggaggcgtcgcccgcgtacgccgagctgggccgcatgcatggcttctacatgctggcgtaccagaccggggcggtgc

SEQ ID NO: 325585 - DNA, 305 bp, Zea mays
cccacgcgtacggttgcgagtggctacaacaatccgccggaacccacccagcgcggcgcgaccggcgacccgtaccccctagcccggagagcgagagcgacggagctgaccgaggcgcagctgagcacgtactactgcagctacccgtccaagcgcatctacgtatccgctcggggcaggtgctactacatcagctccggccgcagctactacggacgcggcagcgcctacatcgtcttcacaggccgctgagccaagcacgccactcggaacatgtccaatgacgaggcccacgtctaccggga

SEQ ID NO: 325586 - DNA, 429 bp, Zea mays
cccacgcgtccgcccacgcgttcggcctagcaggaaataaaaaatctgtaagagagaaccaaaaaaaaaaaggagtcaatcgccggcgacgggtacgggtgtacgcttgaggcgatcggcagagaagaccgagaccgacggctccagtgccgctgtcactgccagtctgccacagctagccgcctagcttgatccgccttttgtgctgtgcggatatgagggccgcgcaggtcgatccgttccccgcggcgccgcccaagtcgcggctgaagcgcctcttcgagcgccagctgctgcgggtctcgccggccgagcgcctcccgtcggcgcctcccggtggcggggagaaggatgagctgccggagcctagctcgctgtgcctggacggcatggtgcggagcttcctggaggacggcggcggcggcggag

SEQ ID NO: 325587 - DNA, 59 bp, Zea mays
cccacgcgtccgaacgaaaggacttatactttgtttctaaaagcttcatgtggatcctc

SEQ ID NO: 325588 - DNA, 58 bp, Zea mays
tcgatcacgctttcgtgttagtatgccaacgtttatctgccggagaccagacagagag

SEQ ID NO: 325589 - DNA, 193 bp, Zea mays
cggacgcgtgggcggacgcgtgggtttggatctgcttgttctcgtgtctctgcttcatctgctttcgcttcatggtactgagtactgacgctgtgaagtggaacaagtactctctcccccaaaaaggccggtagacccaaacatcttttcttgcgggctggtaaagccaaaaatttttaaatgtactcgaacg

SEQ ID NO: 325590 - DNA, 324 bp, Zea mays
accacgcgtacggtttgttgcgatgttgccctttcttttacggacagacggtaacagaagttaagtgtcattgtacatattgaagatcgtgtcctattgaatacaatattgttctacggaaaacaaaaatgcactactacccaaatacaacaacgtcagggccttcacggacatcgtcgtcaagactgcgcagaagatcaaagctaataaatagacggcaactaggcccaatatgcctaatgtcgagaacgaaccactcttcacggtggagaagcccaacctgaacacgaaggaccagggcgacacgactgttagagacatgtt

SEQ ID NO: 325591 - DNA, 370 bp, Zea mays
attgagctctgagcatgcctctgctgtctgcccatctttgtattcacacatgaaaaccttggttggaagcttgttcagctgcatcataagaatccctttttaaaaaataaaaaaaatacaaaaaagaaaaaacataaaaccaaatatgaaaataataatacaatatataacgcactacataacacaaaaacacactactaactaactacaacagatataggatgacaaagcaatgggcaggacgatatgctctacccaagtatccaaccaattatttctatctctaaacacctctatatctgaacccaaatcctcaatgacaagataacttattcaaaacgtactcgtctaaaaacctatattttacaca

SEQ ID NO: 325592 - DNA, 182 bp, Zea mays
cccacgcgtccgcccacgcgttcgaaaaaaaaaaaaaaaaaaaaaaaaaaaaaaaaaaaaagaaaaaaaaaaaaaaaaaaaaaaaaaaaaaaaaaaaaaaaaaaaaaaaaaaaaaaaaacaaaaaaataaaaaatagaaaaagatgagaatgaacatcaccaccaataatctaattataatt

SEQ ID NO: 325593 - DNA, 127 bp, Zea mays
tcttcctaaaaaaaaaaaaaaaaaaaaaaaattaaaattaaaaaataaaaataaaaaaaaaaggaaaagaccaaataaaaacaataaaaaaaaattaacaaactatataactatatcttaattatat

SEQ ID NO: 325594 - DNA, 188 bp, Zea mays
cggactcgtgggttgatatcatccaagtgaccttttgaactagtttgcgttctgcacttgattacacttggaaaaaaaaaaaaaaaaaaaaaaaaaaaaaaaaaaaaaaaaaaaaaaaaaaaaaaaaaaaaaaaaaaaaaaaaaaaaaaaaaaaaaaagtaaaaagaatactaaacgcaaacatacaa

SEQ ID NO: 325595 - DNA, 406 bp, Zea mays
gggttggcttctcctccccctccggttcgggttcgggttcgtgaggttctccggggttcggtttcgtgggtgagcggatcgagatggcggcgtcggatgttgagtaccgctgcttcgtcggcggcctcgcctgggccacggacgaccactccctccacaacgccttcagcacctacggcgaggtcctcgagtccaagattatcctcgatcgggagacgcagaggtcccgcggcttcggcttcgtcaccttctccacggaggaggcgatgcggaacgccatcgagggcatgaacggcaaggagctggacggccgcaacatcaccgtcaacgaggcccattcccgctgcggccgtggaggcggctgcggcggctactgtggtggccgtggaggcggcggctacggcgg

SEQ ID NO: 325596 - DNA, 224 bp, Zea mays
acatcgtcctatttgtctctcacccaattcgtttcaaaaggttacgctagctcactcgagctggacgtccttagctctccacttactgtactattctacatctgataattcccgattgctaagctccatcgctgcagctactccgaccactttgagggcactctctcttacattacgtgtgattcctcgatgaccagtaagaccaggttatatctccaccatgg

SEQ ID NO: 325597 - DNA, 70 bp, Zea mays
aaaaaacgtaatatatatgtaaaaaacgattaaatttcaaaaagaaaaaaataacgggctggcgttgtga

SEQ ID NO: 325598 - DNA, 323 bp, Zea mays
gggaaggtgaccatattcagttcattcttcattcatccctcatcacgaaaccaaacaagagacggtgcagcttcaacccacttcaaccctgtaatcaaacaagaaattaggttcaacccatcacttaaaccaaacaaggaacatgtccgacccagcccacaaaaatgggttggtttcgacccaacccacttcattccgaaaccaaacgcactataagataactgagaggatcacagctacttgcacaaattgtttgcaggagttcagaatgtttacttgatctgcggctatttctgtaacctggtcctgaagtctgaattttg

SEQ ID NO: 325599 - DNA, 414 bp, Zea mays
cggacgcgtgggcggacgcgtgggcggactcgtgggcggacgcgtgggcggacgcgtgggcggacgcgtgggggcccgggcctgggcctgggcttcctcgcggtcagcggcgtggtggcgtccctcgcactcctcgtgatctggagcaaggtggttgcggccgttaccgtggcctccttctcactctacctggtcgagtccgtgaggtcgtcctcgctccccaggcggcggccccgggcggtggtgaccgagaggcggcttcccctggacggccgcgggcgcgtctcgccgatccgggaggttgacgcggcgaccgagccgtcgcggccgagctgctgctcggattccgacaggggaagcgacggccgcatgctgctcgtcgaagaaagcagcggcgtcctggacgaatcaagc

SEQ ID NO: 325600 - DNA, 245 bp, Zea mays
cccacgcgtccgtccactcgtcctcccacgcgtccggcataatttacagctccaatgctatgcgacatgcaaaaggtattaattatgaacacaacatccctgattaatacctcttgcataatttacagctccaatgctatgcgacatgcaaaaatagagagattaatcagggatgttgcgttcataattttgctaacctggtttagcagtatgttggtggacaaaaataatgaaccatggaacaa

SEQ ID NO: 325601 - DNA, 217 bp, Zea mays
gttggcttctcctccccctccggttcgggttcgggttcgtgaggttctccggggttcgggttcgtgggtgagcggatcgagatggcggcgtcggatgttgagtaccgctgcttcgtcggcggcctcgcctgggccacggacgaccactcccttcacaacgccttcagcacctacggcgaggtcctcgagtccaagattatcctcgatcgggagacgc

SEQ ID NO: 325602 - DNA, 247 bp, Zea mays
cggacgcgtgggaaaagaaactgctgatgatcctgttagcaatcagtagtttgaggctagttccacttgcactgtatccgatcactaaattggcatgtaaccatagagattattaggttactcataccacgctctgatgtccaaccattaatgtattggtataatgcgacgcagggtataccatgctcgtccattccacggcgcaacaaacctcgaagagttgatctgtattattcaagctggtgca

SEQ ID NO: 325603 - DNA, 219 bp, Zea mays
cgttcgtttgcgtccggattgctcggcgactccgacctcgtctcctgtgagatcagctgcggcggtacgcttatatgactactggacggcgtcttgctgacaggaagagtgactagttccagatgaacatcacacagagcggttctgcgcctgagaccacagtgacaaagagcaatgactaccctgtttgacctgtagcactgggagaattcacatttg

SEQ ID NO: 325604 - DNA, 173 bp, Zea mays
tatcacacttacgatctaattgagcttgacattacagttcaaaaaaaaaaaaaaaaaaaaaggaaaaaaaaaaaaaaaaaaaaaaaaaaaaaaaaaaaaaaaaaaaaaaaaaaaaaaaaaaaaaaaaaaaaaaaaaaaaaaaaataacaacatatataaaatatctaaatata

SEQ ID NO: 325605 - DNA, 198 bp, Zea mays
aaaaaaaaaaaaaaaaaaaaaaaaaaaaaataaaaaaaaaaaaaaaaaaaaaaaaaaaaaaggaaaaaaaaaaaaaaaaaaaaaaaaaaaaaaaaaaaaaaaaaaaaaaaaaaaaaaaaataaaataatgttaccaagcatttaaattttatttaattgtaaaaaccctatactaaatcaacttactaattcatttaa

SEQ ID NO: 325606 - DNA, 202 bp, Zea mays
ctcacacttacgaaccgcgttatctccgatctcgcattgatgacaatgctggcgtttgggctgacacctgacctgtacgggcctacgatctggtcgacctctgtcagataatgaactttcgaggatcaatactgagactctgaaacggttaccgcattccttgaaggcagcatgcacgcatgtctcccaatgatcacgcaga

SEQ ID NO: 325607 - DNA, 123 bp, Zea mays
cccactcgtccgaaaaaaaaaaaataaaatataaaaaaaaaaaaaaaaaaaaaaagaaaagggtaaataaaaaaaaaaaaaaaaaaaaagtaaatggaactacatgttactttattaagcata

SEQ ID NO: 325608 - DNA, 211 bp, Zea mays
cccacgcttgctccgactcgtggtctcacttcttcggtctgtatcaagacttcgggtcagggtttaattccatccgaatctcaagattgcataaatgtcagccatatgttcacacgtcaatcacttaccactacaatcataagaatggtgaccgaatctatggtctgctctacagagacttcaacatgataaactttatgctactgttgga

SEQ ID NO: 325609 - DNA, 201 bp, Zea mays
aaacagccacgtctcccagatctaactccctgcgactcacgaatcccagagagcctgcatggcgacgcaccgacactgcctccgactactgctcgtggacgccgacctcgccctcgccggcgtacctgctcgcgcggcgctgggctgaggtcgcggccagctgctgagcggataggacccgatccctgacgtgagcgactc

SEQ ID NO: 325610 - DNA, 311 bp, Zea mays
cccacgcgtccgcccacgcgtccgccacgcgtccgattgccgaggaactacttgtatttatgctttatagacttccctctgtagcgttgaaactttaattgacacgatcggattgaagcaaacaatgcatgtaacttagtttaaatctctggtctgtgtattgcaacaatggtgcagttcattttagcatgcatcgtcggcaagtttgtagttaggagtcgtgattgaaatgtttgtctttccaatcccggcacaggttttcttgtaatgctatgacgacaatctattcggattccatggttttgtggtgt

SEQ ID NO: 325611 - DNA, 414 bp, Zea mays
cccacgcgtccgcggactcgtgggctcgaccagctcaaccctagtatggtctagccaccaggctatgctgacgtggaggagaagctgacgctctcccatcgctccgatcagaccgaggcttatattacaggccactgcatggtgatatataatctatctgctgccctgctttggaatggcatccttgtaggctgctaccgagatgttcacgacatgagttgggctggagactgcacggttcagactatagggactggtgaaatcggttagatgacgcgacgactgattgcaacgccacgccgtagccgaactgccatatgacggtactgccgtgctatctgattgatccattgttgtatacgctcgcatgggatctgaattgtcttgtatagtgacacgtcaatagactacact

SEQ ID NO: 325612 - DNA, 349 bp, Zea mays
cccactcgttcgcccactcgtgcgctagaccagctaaagcctaggatgtacttgggtccaggctatattgacttgcctgagaagcttagaaactctaatcgctcagatcagaccgaagctgacattacatgtcactgcatggtaatgtataatctatctattgcactgctttggaattgcatcattgtatgcatcttccaagatgttcacttcatgacttcggatggaaacagtacggttcacactatatggacaggtgaaatcgacttgatgacacgataactgaatgcaacttcacggcatagcagaactgtcatatgatgttactggagtacgatctaatagatcc

SEQ ID NO: 325613 - DNA, 99 bp, Zea mays
aaaaaaaaaaaaaaaaaaaaaaaattaaacaaaaaaaaaaaaaaaaaaaaaaaaaggagaagggaaaagaaaaaggagtaagaataaagaaaatacaaa

SEQ ID NO: 325614 - DNA, 150 bp, Zea mays
cggtctcgtggtctgacgcgtgggtaaaaaaaataataagactgcaaccaattctggaaaagagcaaaaaactacgctggcaaaaaaggatacacctgacaaggtttgcagagactgaaagaactcaacgagctgtttatggatattctg

SEQ ID NO: 325615 - DNA, 411 bp, Zea mays
atgaactatgctggaaatacagtcagaagctctataccgattggagccatagcagtacagggtactgtgtacacagagactgtagaatcacccaagcccaaacttggaatgtggggggccatacaatttacactgtatagtctgtttctgtgaaatagctgaaaagttcatgggaagatcgtgtcaatatttcatatatatgtatcttgtttgacacagaacagacggagaaaaatattggtttcgcgcatatatgaaatttcaaaaatttcgctttttagaaatttggtacaatgctgaatggctttcaagaacttgcgtttcacaaaaaccttcatcctgttttgaaaatgggaccccacctgttgggccaaattaaaccccgcgggttttggggttaccccggggggg

SEQ ID NO: 325616 - DNA, 309 bp, Zea mays
tcggactcgtgggtcctgacgcttgtgctgtctcttggggttctagatcgctagcgccttccttttttttttttttttttttttttttttttttttttttttttttttttttttttttttttttttttttttttttttttttttttaaaggaattctaacatcgttcgtgtatacctttctttttacccctcaagggaaaaaactaaagttttgttcatctcccaccaaatcttttccattattcttggggtgacttgattttttacccatcccttgaactttgctgggccgaaatccgaaacctttgg

SEQ ID NO: 325617 - DNA, 201 bp, Zea mays
  unsure (1)..(201): unsure at all n locations
tcgtctcggaccctgcccnttgcagctcgtcatgggaagaagtcatggtgccctcacgtatggccccttgtgaaaggggtcgtgtcgtgaggggctgctcaaagtctcatcgagaaatngcatgccgtctcaagcttctgcgtgcccttgcctgaggacctgctgactcaggcccctgattatgtnncaagctgnngtgaa

SEQ ID NO: 325618 - DNA, 277 bp, Zea mays
cccacgcatgcggccactcgtgcgtctatatcgcgagctggcataaatacctatctgagtgttctggacaactgtctacttgttaagcactaaaacggcacgcatggtgcattgatgatatcagtatcaggcatacgaatcagactccacatatctagtggcgggttgtccctacttgagtaccgactcgagagcctcgtgcactgggtcggcctatatggtactctttgatctgatgttataaacctatgtggctattgctaggtaatgctaaaga

SEQ ID NO: 325619 - DNA, 175 bp, Zea mays
cccacgcgtccgaaaaaaaaaaaaaaaaattaaaataaaaaaaaaaaaaaacaaaaaaaaggaagggggacataaaaaatataggataccagctaacgtacgtcgtcttgcaacactctaaactcttttatatggccacctaattacaactcactggccgctaaaatacaacgta

SEQ ID NO: 325620 - DNA, 154 bp, Zea mays
caagaaatgtatttactttccagatgttttcccctccttttcaaattaaagatgttttggctttccagattttggtatgcttgtagttaaatctacactgtagataaagaaatgtttgtggagaagtaaaaatcccttatttggtcgtcatggt

SEQ ID NO: 325621 - DNA, 211 bp, Zea mays
gacgcgttcgcccacgcgtacgcggacgcgtgggaaaaaaaaaaaaaaaagcaaaaaaaagaaaaaaaaaaaaaaaaaaaaactaaaggtgaaaccatttatactatcaaaacttaattacgcatacagaacacataaaagtaaagcaaacatggtacaaaaaaaaaattaacagaccgcaattgtccaacgatctaaatgataaaacctt

SEQ ID NO: 325622 - DNA, 310 bp, Zea mays
accacgcgtccaaaaaaaaaaaaaaaaaaaaaaaaaaaaaataaaaaaaaaaaaaaaaaaaaaaaaaaaaagaaaaagttaaaaaaaaaaaaaaaaaaaaaaaaaaaaaaaaaaaaataaaaaaaaaaaaaaaaaaaaaaaaaaaaaaaaaaaataatacaacttaaaacaaacccttttaaactccccttactaaaaattttataaccaaaatataaaacattcctaatttaaaaaaccttcctaataataaaaaatatcccaattataaaaatccccaatatcccaactctcaaacaccctaataaaa

SEQ ID NO: 325623 - DNA, 253 bp, Zea mays
aaaaaaaaaaaaaaaaaaaaaaaaaaaaattaaaaaaaaaaaaaaaaaaaaaaaaaaaaaagaaaaaaaaaaaaaaaaaaaaaaaaaaaaaaaaaaaaaaaaaaaaaaaaaaaaaaaaaaaaaaaaaaaaaaaaaaaaaaaaaaaaaaaaataaaatataaaaaaaaaaaacaaaaacaaaaacataaataaaatatttataaaatattaaataattacaaaaatattataaatataaaaaaaaattacatat

SEQ ID NO: 325624 - DNA, 408 bp, Zea mays
cggacgcgtgggcggacgcgtgggcgtggttgagcggatcgagatggcggcgtcggatggtgagtaccgctgcttcgtcggcagcctcgcctgggccacggacgaccactccctccacaacgccttcagcacctacggcgaggtcctcgagtccaagattatcctcgatcgggagacgcagaggtcccgcggcttcggcttcgtcaccttctccacggaggaggcgatgctgaacgccatcgagggcatgaacggcaaggagctggacggccgctacatcaccgtcaacgaggcccagtcccgcggcggccgtggaggcggctgcagcagctaccgtggtggccgaggaggctgcggctacagcggtggcgggcgccgtgatggctgcggcggctacagcggtggctg

SEQ ID NO: 325625 - DNA, 52 bp, Zea mays
aaaacacataagcaatctgaaaaatcaaatttataaaaaaaaacaagggctc

SEQ ID NO: 325626 - DNA, 155 bp, Zea mays
aaaaaaaaaaaaaaaaaaaaaaaaaaaatttaaaaaacaaaaaaaaaaaaaaaaaaaaaagggatactaataaaaaaagtcacaaacaaaaacattcaatatcactacctattttatctatctaggtatttttatttatatttcctacattttac

SEQ ID NO: 325627 - DNA, 273 bp, Zea mays
catttgtaagctaggtgggcttcaacgacattaaaaataaataaataaatgtatgtaactactatccaaatttctcatataattttatttttcattatatatttacagtataataaacatactcgatacattcacacaaccatcctagtatataaatctgaactgatataaaactaaattaaaatatacaaacctatctctttaaaaaatcaaaacaaacatacacatgcattctacaatatatcattaactaatttaaatccaaatacaata

SEQ ID NO: 325628 - DNA, 321 bp, Zea mays
tagacgtacgcatcagtataagcttcctaaagctcgtgctcgctaacatacatagtcaaactgtatgaggtggcggggacaattgtatgctaggtgggcttcatggacattaactataaataaatgaataaatgtttgatgtatgaagatcagctctagtatgctatgtatgactccatattcgtcgtattatgacatggtgtgctcatgaagtcaagtgtgactagtgtatatattgtggaacgataacaattgcataattaaagggctgtgcagtggcattagaaaatactagcttaacgatgttgtcaatatgatcag

SEQ ID NO: 325629 - DNA, 285 bp, Zea mays
gatagacataggtttggtgagaataaggtttatgcctttaaggactaattacggcaggggggtcctagtatgatagacaagtaatataaatagtagagttattgtaagggaatattagagtgattaaatgtctatgactgataaaataagaataaggtttataaactatggcaagagatgaaggttgtgaaaatatatgtgcttcaagaagttagctatgatcatagtattataatgactgatgaaactcattcaaagcatgattatgatactcaagatatgata

SEQ ID NO: 325630 - DNA, 370 bp, Zea mays
cggacgcgtgggcggacgcgtgggcggactcgtgggctggcttctcctccccctcttaggcaatgtcctcgggttagggttccttacggttttgtggaggggcgatggcggcggctgatgtggagtaccgttgcttcgtcggcgggcttgcctgggccaccagcaacgagtcgctggagaatgccttcgcctcctacggcgagatcctcgactccaaggtcatcaccgaccgggagacggggaggtctcgcggcttcggcttcgttaccttctcctccgagaactccatgctcgacgctatcgagaacatgaacggcaaggagctcgacggccgtaacatcaccgttaaccaagcccagtcccgtggcgg

SEQ ID NO: 325631 - DNA, 106 bp, Zea mays
cccacgcgtccgaaaaaaaaaaaaaaaaataataatttaaaaaaaaaaaaaaaaaaaattgtaaaagttaaaattcaaaaaaaaaaaaacatgactcccattttat

SEQ ID NO: 325632 - DNA, 386 bp, Zea mays
cctacgcgttcgcccacgcgtcctcccattcgtccgatcactcattctgatcgcgagcggctgccctttatttttttttttttttttttattttttttttttttttttttttttttatttttttttttttttttttttttttttttaccaagccaaaatcttttttttattgatatatatatgttttggtatattttttgttttgtttacaaaatattatattattataatggttataaatacccattattgttacttttattgaaaacttctataataaatatgtttgttaatttaagatttttagctgacacgaacaaatttatttaaagcactattattttctaaaaatcttatcaaaaatttgcaatctttgtaatagcacc

SEQ ID NO: 325633 - DNA, 66 bp, Zea mays
aaaaaaaaaaaaaaaaaaaaaaaaaaaattataaaaaaaaaaaaaaaaaaggacggacgatggtaa

SEQ ID NO: 325634 - DNA, 386 bp, Zea mays
ggaattccgacctacgacgtatcgcccacgccgttcgcccacgccgtccgaaaaatgaattgtgacacagaggagctctactaagggcaatggtaacatcaagcaatcgagttgcataagatggaatgtgcagatcgagccaaatcaaaaagaggaacatcattactggagctccaattcatactacccgtcgactatatatgaacgaagcctgcctagagctcaacatgaagctgaatcagcagcatgtcaaatcgaaatagatggaaacgacttcacacaacaatagagcacgctgtactggctacaaatatgtttctccaactgctcggagaaagacctactgaacaatactagatactaataccattgcctacacattacag

SEQ ID NO: 325635 - DNA, 278 bp, Zea mays
cccacgcgtccgcaaagttatttcataaatttgctcgaatcatctttgattctgggcctggtagattcaacgcatacgcttgtaccaaatctgggcagtctgataagagccttaatcaatcatgcctgctattttctatggaagcagctatgacacatatgccccttcaactctatctacaactgcttcgtcagcaaagacaatcgatgacatgatcacgctctgtaaactaggataaacactttctgaaatacctacagaagtatacaatcagatct

SEQ ID NO: 325636 - DNA, 440 bp, Zea mays
aatatctggtcccaaccggtggcaacaagaacctttctgacagtcagttttgacttgccgctttgtcacggatgcaaaggccaaagacatgaggtgccagcaccttgatggaactgccattgagccacctacctgtccaaaatttggtgttaaccccgttgcccacctctgtctccactgcataatcaaacaaggcctaagtacaacccttaatcgagatcccaaaatctgcccaggcctcgtactaagagtgatcaaacaaccaggtgatttttcacaaatttgaactatgagattttatctgcactgaattgtttctgtttctccaacgccctgcaggctgcttttttcgatctcttatttcttttggattaggttcagaatttcagttttcatgcattcattcatgttccaggcagttttatatcctgaaaagaatt

SEQ ID NO: 325637 - DNA, 314 bp, Zea mays
caaatgcattgactagtggtgtgactagctatgccactacaggtgatgctatatctgagggcttcgaaagaggatcgactgcaggagcgcctgagaagggctcgagccttgaatatgccttgcaaaatgactcgactgcacagtaagctggtgtgacagcaactgggaacaacaccgatctcttcaaggacttgctaagctacttggtacagtaaggcacaccgtatggtacacctgatccttctgggtagatggaggtcatcatcgacatgatttgatcactgtaacaatcactatctcactgattgatcagc

SEQ ID NO: 325638 - DNA, 295 bp, Zea mays
caaagacttacgctgtcagtactttggatttcaatccttgcaagtactctacgggatgtgttaactaatatctcttttcacgcacagattccacatatcattacaaacttcatactactaagaaggttaatgcatttcacaccgactatatggttactccattacatcggtacatcaatgatccaaatgcacatgcaatcattaataatcaagctaccttacacattactgcgataacgaacaactcatattttgacccatcacattatgcactacattgtcactataaacatcc

SEQ ID NO: 325639 - DNA, 286 bp, Zea mays
attacctcggagacatcggtcgagctcaagattctatctgataaatggcggctgctcctggctggcctcattttccagtacatacatggtttggccgctcatggggttcattatctgcaccggccgggccctacccttcaagatcttggcttcatgattcttccggagcttgggaaagaaaggggttacatcagtgagacattgtttacattcgtcttcctcaccttcgtttagtctgaaggatgaaaggatgaaatgtccacaaaacactagttctagatcgcga

SEQ ID NO: 325640 - DNA, 395 bp, Zea mays
ggtgggttggcttctcctccccctccggttcgggttcgggttcgtgaggttctgcggggggcggtttcgtgggtgagcggatcgagatggcggcgtcggatgttgagtaccgctgcttcgtcggcggcctcgcctgggccacggacgaccactccctccacaacgccttcagcacctacggcgaggtcctcgagtccaagattatcctcgatcgggagacgcagaggtcccgcggcttcggcttcgtcaccttctccacggaggaggcgatgcggaacgccatcgagggcatgaacggcaaggagctggacggccgcaacatcaccgtcaacgaggcccagtcccgcggcggccgtggaggcggcggcggcggctacggtggtggccgtggaggc

SEQ ID NO: 325641 - DNA, 160 bp, Zea mays
gaattacccgggctcgactccacgtcgtctcgaaagaaacaaaaaacaaaaataaaaaaataaaatataaaaacaaaaaaaaaaagaaaaaaagaggaaaaaggtaaaaataataaaaaaaaataaaaaaatcaaaaataaaagtggcgcgccgttttaa

SEQ ID NO: 325642 - DNA, 110 bp, Zea mays
cccacgcgtgcgcccacgcgtccgaccacacgtcctgccacttgtccgctgcttcaaaaaaaaaaggctgtagtcaacttcaactaatacaactacaataaacccctaac

SEQ ID NO: 325643 - DNA, 132 bp, Zea mays
tccggatactccctaagcaccagctgcggcgtgcggtttatccatggctgtccgtaaagcaacaatgaggatgggtccaatgtgaaacgaatggtggctaagaataaagacccgtcgactcctgttctctaa

SEQ ID NO: 325644 - DNA, 243 bp, Zea mays
cccacgcgtacgcccacgcgtccgcccactcgtccgatggcttactaaaaaaagaaaaagaaaaaaaaaaaaaaaaaaaaaaaaaaaaaaaaaaaaaaaaaaaaaaaaaaaaaaaaaaaaaaaaaaaaaaaaaaaaaaaaaaaaaaaaaaaaaaaaaaaaaaaaaaaaaaaaaaaaaaataaaagagagaataacatactaacatactcaaaaaaaaaacaaatatactaataaaaaaataat

SEQ ID NO: 325645 - DNA, 74 bp, Zea mays
aaaaaaaaaaaaaaaaaaaaaaataaaaattaaaaaaaaaaaaaaaaaaaaaaaaggaaaagaaaaaaaaaaaa

SEQ ID NO: 325646 - DNA, 384 bp, Zea mays
aaaaaacatactaacacttcaacaaacacatttaaactttaaaaaacaaaaaatctacaaagtgagaggcgtcaataaactaaaccaaaaacaccagctatcaaatacactatcaatctcccagattgtccatactctctccttcattttcaactaagaaaacctgcttattccatataaattttctgctcgtattgtatcccagtctatccgttacctgagtcctgacattctggatttttacacttgcacagtgcattattgattttagaccatgttgacttgaacttttgttaatagggtatatttacacccttatgcaactgaactttgtgctcaagatactgcctctcatctgctccttttcttcatctacaacgcact

SEQ ID NO: 325647 - DNA, 62 bp, Zea mays
cggacgcgtgggcggacgcgtggtgaaaaaaaaaaaaaaaaaaaaaaaaaaaaagaaaaagg

SEQ ID NO: 325648 - DNA, 62 bp, Zea mays
cccacgcgtccgcccacgcgtcctcccactcgtccgcccacgcgtccggttctagatcggga

SEQ ID NO: 325649 - DNA, 277 bp, Zea mays
tcccacgcgtccgaaaaaaaaaaaataaaatttataaaaaaaaaaaaaaaaaaaaaaaaaaaagaaaaaattataaaaaatataaaaaatatataaaaaataaaaatctgtcgtactctcttcttgttccatttttactttccttttcttgcacctaattactttttatttactgtcacttaaattcatttcattgtccatatttttacaacttttcaaacttgaaaaacttttcgctttttccatctttttcaatttgctgtacttcccttttttt

SEQ ID NO: 325650 - DNA, 390 bp, Zea mays
attttgttcactaacatttccgccggcaactgaactctgttctccttagatatgcttgtttggtggctgaagaagctgaggcagccgaccagctgtcaaaggcactaacatttcccagattgtccaagttctataattcattaggaagaaagaaaacctgcatcttccagctgtatttgctgctcgtattgcagcacaatcaaaccgtaatctgagacgtgtgatactgttttttcagacttgcaaagtgcaacagtaatctgagacgatgaggacttgaacttgggtggtttgggtatattcacacccttaaccaactgaactaggagcacaagatacgccttggatcaaaagctatttttcatctagaaggcactgcttccaggtcgg

SEQ ID NO: 325651 - DNA, 323 bp, Zea mays
taaaaaaaaaaaaaaaaacaaacacaaacattaaaaatttaaaaacaaaaaaaaacaaaaaataaaaagtaaaaatttcaaaacttaataaaaccacaccccaaccccattaacacatcaaaacatctcttcccaaatactatcctcaaacatccattaaaacccctactctaccaatcaatcatcttcacttttaaactcttaactatacctctaacaacataccaaattacattatatatataattcaaacacatcatttctcactctttatatcatcacattatcaccaactacactcatttacctataacacaattacc

SEQ ID NO: 325652 - DNA, 60 bp, Zea mays
aaaaaaaaaaaaaaaaaaaaatttaaaaattaaaaaaaaaaaaaaaaaaaaaaagggcca

SEQ ID NO: 325653 - DNA, 171 bp, Zea mays
actatgcaagggcttacgatcccacacctatgaaagtgtgaagacagggtcggaataatggcacccgaggagtttgccgagatcgcctgccacaccaacgactagttctactcccgcatggccaaagccaatgaacaaggcaagctggcagtcatcgacttcaaggccccc

SEQ ID NO: 325654 - DNA, 108 bp, Zea mays
accacgcgtccgcccagaaatgccttggattgactttcgaggaccgctccgatcgaatgctctgggtgtaatctaaccaagagttgtgtaacatgatcaaaactatct

SEQ ID NO: 325655 - DNA, 175 bp, Zea mays
gcacctcggctacattcttttcgcctataccggcactcttgggtgcgtgtgcttcatactcacccgggccagagcaggtcacgccccaacacgacgcaccaccggcggtgccaaacctctaggactgcatcgccacaccacgcacgcccagtctggcgcccgacacccgcatgct

SEQ ID NO: 325656 - DNA, 263 bp, Zea mays
aagacacgtccacatgtccgccattcatttttatcatcagatgactgagagaaagatacgtgaacattaaaattcaatttgctaactctctctgcatatacaccctcagactctgtactcatgtacatctctctacatgctcgttcatcaatacaacttcattatctactaccataattacattgatatactataatcatatatcatacaatatatatctactaaaacatgaattactattattaaaatacacaataacatat

SEQ ID NO: 325657 - DNA, 95 bp, Zea mays
cccacgcgtccggcttccctgatactcctgtttaaagatttgtggattgggtgagacaagggtgattgagataactaagttctggggtcttgatc

SEQ ID NO: 325658 - DNA, 443 bp, Zea mays
gagctatggcgatggctcgtcgcggctctggtaggggccattgttggtcctcatgtactcggtcgtgatgctggttgattcaatgatgagtgcggttttctacttcacttgccggtcatcaaacttggacttcttggacgagcagggtggctcggttgaggagcttgagatgatgagggctggcagtttagatgcatttaggtgatgaagaagattggtttatttctcacgtgtgtatctgttcatagcatcataggagaataagtgagatggccatttgtcaagagccgcacagattgacaagtccttattggtggttacaagccatggtggcttatgtgtatgcatgggttgattagctgaagttggtgttgaaaggaacattttttgcagccatttggtatatccatgcttagtcaatagcggatttggatgggaaggct

SEQ ID NO: 325659 - DNA, 243 bp, Zea mays
cggacgcgtgggatgagatgtttctataggattgtaggtggggccatagcagaaagagggtgccggggtaaaatgcccacgagtttacttttgcagtgagtatgtcaatctaagctggcagatacttgatttgtaatagtctttgcgtgtgtttcgctcttcatgtggcatgttcagtttgatctatagttgtatctttcactttcacactgaaattgaaaagtaaagcgcaaatttccttgt

SEQ ID NO: 325660 - DNA, 433 bp, Zea mays
gtcatgccttcgtccacgcgttcgctgacgttttgagatgtacacactcgaaaccaaacggggggatgtggaaagacgtgtaaactgcctggtctgtcttctgtgacgaacggctcgtctttagaacaatggccatgtctatgacgagttgccaatagtacgcttactggctatgaacttgcacctacggcaacattttacacattttgagtgagaatcatgggaagatccatggatcgtctattatgatgtacgttgcctgcttaataatgggaccaatttcttctgctgagtttgctaaaggagcacaagaattttctgaatgcccatcatggtagaaaggttgagatcttggttggttcccgcgtggcaagatggctggtcctttccaggaagttgctttcaacacacctgacggaactgttagcgcacc

SEQ ID NO: 325661 - DNA, 287 bp, Zea mays
gaccacgctccgcgacgcgtgggcaagtcaagtagcaattgtctgaaccttttggctctcatgaagaattgacgatgtatcttttggttctcatgtttttactcaatggtgaacttgtaatgaacttgtaacagatgtgcttttgggagcagtttgcacatctgttgatgtgcacctatgttgtaagcacattgtatgtgttaatttggaactttggatgtttaatgtggtgaaaaaaaaaaaaaaaaaaaaaaaaaaaaaaaaataaataaaaaatatattaatat

SEQ ID NO: 325662 - DNA, 178 bp, Zea mays
catgccccctgttccatctgtgtgcatggcctgatgctgtactgcacactcggcccacacagcgcaacacaacacagtctgactgctagtgctagatgagccccctgttccatctgtgtgcgactttgtttgtgctgtgtcatctatctatctaactaatccatctatgctatcctct

SEQ ID NO: 325663 - DNA, 283 bp, Zea mays
tgtgtagagcatgttgtaaatgcttcatgtgctgttcgtttctagaaaaaataaaaaaaaaaaaaaagaacaaaaaaaaaaaaaaaaaaaaaaaaaaaaaaaaaaaaaaaaaaaatccaccaaaaaaaaaaaaaccaacacaaaaatcaccaaaatacaacaaaaatacaacaataatcaaaccaaaaaaaataaaaaaaaaacgtaaaaattaaacaaacttaacaagaagaaaacccctgaataaaccccaaaatataccccatgcaacataaaataaaaa

SEQ ID NO: 325664 - DNA, 249 bp, Zea mays
gcggcgcctggaacgcctcccgatttcgactttttcacgagagagcgatggcgctgactaagcggatcgtgacggtcgccgtggttctcccggcagtagcttctcttcaccaccgacatgctcatgctctgggccctgttgcgcaccaacgcgcgccagttccggcactggctcgaggacgacacggcctacgccgcatacaagtctgcacaagaagcatctgcaaagaaactcgactcgacgtgcccc

SEQ ID NO: 325665 - DNA, 310 bp, Zea mays
cccacgcgtccggaacacttgagctggaacaggctgcccgatcctgctacccaaactacggagctgtccttacctgagagaagagaactcgaagtgacatacactgaccatgtcatgatccccactctacgatctcggaaaggctacctcctgccaatacacaggccacacacactgacgcacgaaactacttggctctcgcaatctcgatcactactgccgacaccatctggatcacgtcctcggcaccaatgtcgtcccaccttatacgtatcgctgctgctcacatgagccggctattctgaccgat

SEQ ID NO: 325666 - DNA, 212 bp, Zea mays
taaaaaaaaaaaaaaaaaaaaaaaaaaaaaattaaaaaaaaaaaaaaaaaaaaaaaaaacaatgaaaatttttcactaacttaaaaacacaaacatacaaaaaacaaaaatctaaaataatttaacctaatttaaatctacttccctcatctttacaacttcctatactgttaaaacccatccttatcccaactaaatcaccattcatcata

SEQ ID NO: 325667 - DNA, 299 bp, Zea mays
acccacgcgtccacagacgcgtccgtattaaacttcataaattttatattatattatatcttaactaaaagacgtaaaattatactagtacgaagagaaactcaacaaaaaaaaaaaactaaaaaaaaaaaaaaaatggacgcacaatctaaagaatccaaacttaccaacacatacatgatacaacatatctcttctataaaatcacctaaattcaatacactatccatcacaagacaacaacttgactagtaaaaccctagcattaccaaacttaatcaacttacaaaacatccccc

SEQ ID NO: 325668 - DNA, 441 bp, Zea mays
tcggcacgccctcgcaagctcgctgtcggtacaacctagccgctgctccaccgcgcgtgtagctgctcgacgatatgcacaaccggctgcgtgtggtcatgctggtgttctgcgcagcgcttgcgcgacgccaccgatctgcgcagcgccttcgagtcgtcgtcgaaacccgcagtgagctccctgctgccccgtgctttttgtgttaaattaaaaggccgcaccaatgaatcacataataaattgtgtaatgattgtgtatatcgtttaatcgcagcccttgtcaacgtcacgccttgcgcatcgctcgtcggcaaagagcccaaactaatggcatgcatgcgcggcacgagtcggccaggttgttcgccttgaatgattcgtgattgttttatttacgtattttggtcgatgatgtgcgtgtgtgaatatgtgcgtgaa

SEQ ID NO: 325669 - DNA, 254 bp, Zea mays
cggacgcgtgggcggacgcgtgggttgaggttgcctctctaataacattcatctgttcctgggggggggtttctaagtcacgtagtaatacgtgtactcgcgaccagctgatgcggtcaacgctagctagtgattttgatttgtacaagccagatatattgtgcactagaatcatggcaaccgaggtcctatggagctcggatggcacatgtggaatgctaatcggctggaagatataggggatatgcaccgaa

SEQ ID NO: 325670 - DNA, 306 bp, Zea mays
aaaaaaaaaaaaaaaaatataaaaaaaatttttacaaataaaaaaaaaaaaaaaacaacaaagataaatttataaaaaatacatatcacaatcatccataacaaatatattcaatattgtacctccacattcaaactacttctacctattccttcaatttttcctctatctatcaatctccttaaccattcctgatcacctgtacatccatcctgcattctatgattctctttctattcatgacacacacaacaacttctattccgaatctttcttcaatcccatcttcaatattcatgcgatcta

SEQ ID NO: 325671 - DNA, 144 bp, Zea mays
cccacgcgtccgaccacgcgttcgaaaaaatttaaaaaaaaaaaaaaaaaaaaaaaaaaaaagaaaaaaaaaaaaaaaaaaaaaaaaaaaaaaaaaaaaaaaaaaaaaaaaaaaaaaaaaaaaaaaaaaaaaaaaaaaaaataa

SEQ ID NO: 325672 - DNA, 447 bp, Zea mays
cgcaagcgaggtctctcccgctggctcccttctctagctccggcgcccggccggatctcgcggcgtcgcgcccagctctgctgcctttcccatggcggactcccttaccctccagctccctcctgcaaccgagcggctccctggcgcacgcttgcttactgcgcgtgctcgacggacggagctctctagcgcgctcgcccatgccgcgcgcagccaagctagacctgcacgtacatctgactgctctagctatgacgccacgctagctcgccctggctgagatacggcgcttggcgcctgattctctgactctgtacctgctgccaaaggtttttcagtccgggccctgcttgatggaactcgacccgggccccttatgcatgcacggcttaacactgtgcccggtactaagcagtgcttcgtgaagcgctgaacttaactcggtct

SEQ ID NO: 325673 - DNA, 283 bp, Zea mays
gtcacatgaattacgaaccttggtggccagtttgtccggaaacacggttttggtggagaggcggccattatcttacaccacatgccatatagagttaagtatataatagtctatgggtgagaaagtgcacatatggaacgctgtatatagagggggctcaagaatctacagagcaactcatactctgtgatctaccaaaaaaaaaaaaaaaaaaaataataaaaaaaaaaaaataataaatataacgatttatttttaatttaattatatgaacaaacttttt

SEQ ID NO: 325674 - DNA, 319 bp, Zea mays
cggacgcgtgggaaaaaaaaaaaaaaatattttaaaaaaaaaaaaaaaaaaaaaaaaagagaagaaaataaaaaaaaaaaaaaaaaaaaggacaaccaagtggtcggcctccctgctggctcccactttcctcccgcgtgcttgcttcttctatcgctcctctctaagtccaacctaatttcaattcatttgtccgcttttttacatggtaaaacctgggaaaacccctgcttaccccacttgaatccccttccactttttccccctttcgccatttcgcttagtcccgaacaggtcgcccttgatagcctttcccaac

SEQ ID NO: 325675 - DNA, 303 bp, Zea mays
acgtcttgttccccccacccagcttaggcatgatatccaagcaaggctccacaccggctaagacagtcggacagaaaacaaaaaaaccacagcaccaggcaaaacaaaaggaagaaaaggtgtgtgtgtgtgcagttgttgcaattacccgcagttaagattttaagttaacattttcttttttttcattcttacgttgtagatgtgtcattgaaattatgtggttagaaggtggagtacataactgtgtgtgtatttataatagaggtttacttcattgaatcaagctagtgtgaattctac

SEQ ID NO: 325676 - DNA, 290 bp, Zea mays
gcgcacaaggtcttagaacctaatattgaagatgtgcgcaccatcgtctgctaggctacttgaaggtggtagttacataaattgcgtggctttaccagatggccatgctaagaaaactactattggaaagggattcgtacggattttggattctatctctgctcaccaagcttttgcaggagatttccctgcttaccaccgcaaatccttggctcgtatttctgaaccgcgccccaatacactacatgtttatgctgaagtgattcatataacaagcctagctgttcctt

SEQ ID NO: 325677 - DNA, 266 bp, Zea mays
aaaaaaaaaaaaaaaaaaaaaaaaaaataatttaaaaaaaaaaaaaaaaaaaaaaaaaagaagaaaaaaaaaaaaaaaaaaaaaaaaaaaaaaaaaaaaaaaaaaaaaaaaaaaaaaaaaaaaaaaaaaaaaaaaaagccgcccccttttaaaaacccccatctttaaaccctcgtcaaccactctttatctcttttaatatgtccccaaaattaaaaatccatcccccttcacataaaaactcactaattcaaaaaccccttact

SEQ ID NO: 325678 - DNA, 100 bp, Zea mays
ccagttttaaaacaactgagaaattgttgttttctccaaactgacaaatgcttacgggcgggtaattattgaaaggtcagagaacttctacagtgccttt

SEQ ID NO: 325679 - DNA, 326 bp, Zea mays
gatatcaagataggtccatcaaaatgtattattgattgacacagacaaatatatcaagaagattgttaattttttaaaaaaaaaaaaaaaaaaaaaaaaaaaaaaaaaaaaaaaaaaaaaaaaaaaaaaaaaaaaaaaaaaaaaaaaaaaaaagacaaatatataaattacaaatcttacaacaaaaaaaaacaaataattagattaccataaataaaaacacaatttaaataatttacaactttattaactaataaatcatattatgaaaaccaattaaataaccaaataaaaatttattatactctacacaattttttaaaata

SEQ ID NO: 325680 - DNA, 433 bp, Zea mays
gctgcaggttcgttcccgagaagttcgaggagatattcgccaggcacgcgaggacagtccgcgacgccctgacctcggacgagatcgaccagctgctccaagcgaacagagagcccggggactacagcggctggtaagtaattaatgacggtaatttccctccccgatgctcgctcctgcctgcagcaccagctctctcactctctccgtttgtcttttttctgtcctcgaaagggctggcgcggaagcggagtggaagatcctgtacagtctcggcaaggacggggacggcctcctccgcaaggacgtcgcgaggagcgtctacgacgggacactgttccaccggctcgcgcccagatggaaatctcccgacagcgacatggagagaagctgataagcgtggtccgggagaacctgaaccggtctggacatg

SEQ ID NO: 325681 - DNA, 104 bp, Zea mays
agcagctaaggagcctccgcctcgtcatgaatcatttgagcgtgttactgagccagtgcaagacattttcaataaatggagaggacctcttttaacgttattac

SEQ ID NO: 325682 - DNA, 354 bp, Zea mays
cccacgcgtacgcccacgcgttcgcccacgcgttctgggccagaggcgcagaaggcagtcgggggcatgaggaagaggaagaagaagcggcagcgagcgaggatgccgtgcctgaacgtgtcgaccaacgtgaacctggagggggtggacaccttcgccatcctcgtcgaagcctgcaagttcgtagccaacatcatcggtgagcccgaggtctacgcgatggttgttctcaagggttctgcgcatatggcatttcgaggttcccatgagccacaagattacgcgcagctggcttccatcggactgctgaaccctgagtgaacaagaggcttaacgatgaatctgctatatcct

SEQ ID NO: 325683 - DNA, 180 bp, Zea mays
ggcagctgagtcataatgttgccaagttcatttttgcactcccaactgtagattactgcagttcatctgtaaatttcaatcttgttcaagaagaatgatcatatattggcatgttttttcttagcagttgtataaaaaaaaaaaaaaaaaaaaaaaaaaaaaaaaaaaaaaaaataaaaa

SEQ ID NO: 325684 - DNA, 148 bp, Zea mays
cacacatctaaccacacactcccaaccaacaaccacagccccctccatacaccaatcatataacaccaaacctctaaaccatatacatctaaaacacctccaaccacaacaccctccacaaaccccaaccctaccactacataaacac

SEQ ID NO: 325685 - DNA, 64 bp, Zea mays
cccacgcgtccgaaaaaaaaaaaaaaaaaaaaaaaaaaaaaaaaaaagacaaacaaaataggga

SEQ ID NO: 325686 - DNA, 105 bp, Zea mays
gaaatttaacagcatgaacgacgactgttcataccggctcttgatttcgtggttagtgacgttgcaggtggtttgagtcgcgctacacgctgtacataccttttg

SEQ ID NO: 325687 - DNA, 361 bp, Zea mays
gctggcttctcctccccctcttaccaagtttttctcgggttagggttccttagggtggtagagatgttcgatggcggcggctgatgtggagtaccgttgcttcgtcggcgggcttgcctgggccaccagcaacgagtcgctggagaatgccttcgcctcctacggcgagatcctcgactccaaggtcatcaccgaccgggagacggggaggtctcgcggcttcggcttcgttaccttctcctccgagaactccatgctcgacgctatcgagaacatgaacggcaaggagctcgacggccgtaacatcaccgttaaccaggcccagtcccgtggcggtggcggtggctgcggtggctactgt

SEQ ID NO: 325688 - DNA, 68 bp, Zea mays
cccacgcgtccggtaaaaaaaaaaaaataattaaaaaaaaaaaaaaaaaaaaaaaaagggaagaaaat

SEQ ID NO: 325689 - DNA, 451 bp, Zea mays
  unsure (1)..(451): unsure at all n locations
cggacgcgtgggtgtcggcgtcggcagctacgacagcgagcacactccagtatttcgaagagaacaatcatgnggatccctacaagcttcttggtgttgatcaagatgcatctgaagaagaggtccggagtgcacggaattttcttctaaaacaatacgccggatatgaagaaagtgaagaggccattgaaggtgcttatgacaagataataatgaatagctacacagaccgtaagaaatccaaattcaatctgaaaagcaagctaaaagagcaagttgaaggatccccatcatggcttaaggcactgcttggatattttgaggtgccatcactagagatcatttcaaggagatttgccttttttgcgttctttgccgggtggagcattgcaacttctgctgagactgngcctgcctttcagcttgcgatgtcactcgcctcatgcatata

SEQ ID NO: 325690 - DNA, 97 bp, Zea mays
acccactcgtccgcatacaccaataccactactatacaacaaattttttctctcacacataaccaaacataagggtcggatttttcaacaatttaac

SEQ ID NO: 325691 - DNA, 205 bp, Zea mays
gacccacacttacgggcacacaaaaacacaaaaacaaaaaatttaaaaaaacacaaaaaaaaaaaaaaaaaaagagagaaatacacacaaaccaacaagacaaaacaaaacaaaaaaaaaaaaacaaaacaaaaaaaaaacaaaacacacacacaaaacaaacaacaaaaacaacataaaacatacaaaacaaaaacaaaaacaa

SEQ ID NO: 325692 - DNA, 61 bp, Zea mays
tcgaggacctgactgaggaccagatcgcctcgattcgggaggccttctcgctgttcgacac

SEQ ID NO: 325693 - DNA, 321 bp, Zea mays
gttggcttctcctccccctccggttcgggttcgggttcgtgaggttctccggggttcgggggcgggggtgagcggatcgagatggcgccctcccatgttgagtaccgctgcttcgtcggcggcctcgcctgggccacggacgaccactcccttcacaacgccttcagcacctacagcgaggtcctcgagtccaagattatcctcgatcgggagacgcaaaggtcccgcggcttcggcttcgtcaccttctccacggaggaagcgatgcggaacgccatcgagggcatgaacggcaaggagctggacggccgcaacatcacc

SEQ ID NO: 325694 - DNA, 493 bp, Zea mays
ggttggcttctcctccccctccggttcgggttcgggttcgtgaggttctccggggttcggggtcgtgggtgagcggatcgagatggcggcgtcggatgttgagtaccgctgcttcgtcggcggcctcgcctgggccacggacgaccactccctccacaacgccttcagcacctacggcgaggtcctcgagtccaagattatcctcgatcgggagacgcagaggtcccgcggcttcggcttcgtcaccttctccacggaggaggcgatgcggaacgccatcgagggcatgaacggcaaggagctggacggccgcaacatcaccgtcaacgaggcccagtcccgcggcggccgtggaggcggcggcggcggctacggtggtggccgtggaggcggcggctacggcggtggcgggcgccgtgatggcggctgcggctacggcggtggccgcggcggctacggtggccgcggtggctaccgtggtggtggtggcggc

SEQ ID NO: 325695 - DNA, 516 bp, Zea mays
cccacgcgttcgcccacgcgtccggccaataaatcacttgttaccctggaccaactgtatggaggtctcttttaacctgagaagcaaaaggaaaattgaccggctatgctgggcccgcaagaagaagagaacatccctcgtgccatcttcaacaagcatgccagcatcgccgagtgaagttcctgccgcggatttctaactgcccttcgttgaagagcaagcctgccctgtataataatttcatggtacattctttacatgcattggttggaaacgattctttcacattgctcatcaatggtgttgtaacctgcaacattctttatttggtttcatagggcattcagtcagtttacgggtggtagtttgtcggaacatgtacccaatttttctgatgaaacaaatgtttgagcttcaaaaaaaaaaaaaataaaaaaaaaaaaaaaattaaaataaataaaaaaataattaaaaaaaaaataaaaaaaaattaaaaaaaaaaaaaaaaaggggggg

SEQ ID NO: 325696 - DNA, 127 bp, Zea mays
cgtgtatgctactagccagttgtattgcacgaccggtcctaaagaagaggtttctttctggtcgctaaaaaaaaaaaaaaaaaaaaaaaaaaaaaaaaagggccccccaaaaaaaagaacacaaaca

SEQ ID NO: 325697 - DNA, 270 bp, Zea mays
atcgttcaacggcggagttaattcggcgcgcgtcgcggcgcgggctcgtcggtgtccgtcgctgccgtcaggctaatggcgccttttgggtttaacgagcgacgccgacgggcgccgtccgccgcgcgacgtggccggtgtgctttggtgcggggctccgggcgatccgccgtccgcgtgtggccatgatccgctcagggaacgcttggcctatcgacggtaggcgatcggagcgcacgggcgccggcgcgcgtcgttctccgttcatgc

SEQ ID NO: 325698 - DNA, 234 bp, Zea mays
gccaaccatctgaaggtccacatcaagaacacaacgtacatactctttaccctacagaaggtcactgtcaccatggtttaccaatacctgaacgacgtcatcggctactacgcgaaacttaccctccagcaattctaggatctcaacgagcaaccaggtgttatccaagttgtgccaatccaaacttaccagctacatggccctcaaatctgcactcaccatggcacgacacac

SEQ ID NO: 325699 - DNA, 422 bp, Zea mays
cagacgcgtgaacaggctcatccacatcaaccacggcatatgctggtgctgctgatgcggaggcgtgattctagggtctgaatgaatttacaaacattgtactacgctctttgcagcactcaactgagacataattgccatactttgactcttatgtgactttcgtcgagaatggactgctggattatctttttctgtgttgacgtaacgaggtcgataagaaactgttttgaaacctgagtggcaaactcaagtgttgcatagacaaggacataaagtaatgccacccgaactatgcaccttgcgtccttgcccggcttctaacaattgatgcccccccttgcatttttgtttgactgcctatttttcctgccccccgtttggttggggcaatgaggcgtagtggtcgataataaaaccca

SEQ ID NO: 325700 - DNA, 438 bp, Zea mays
cccacgcgtccgactagttctagatcgcgagccgccctttttttttttttttgcaccacgggttacgttagattcttatagagtagtagagatcgaataaatattatatgagccaaacttgtatacgcacatagacacggcacggccatgacaactatatataatatgggcacaagagctttatttatttaatttacacacgacgatgatgagcgaattgaaataaaggataatggaggatggagcaggtacgtagctagcagtagctcccctgctattattcgaattaaatctgacgcaagtaaacaccgatagcatcgacgagcctggttcccgcccgcgcatagaatcccacgatgctgctgccgatgggcgccgtgacggagaaacgcgtcccgttctcgacaccccaggggccccaggttctgctgctggtga

SEQ ID NO: 325701 - DNA, 416 bp, Zea mays
ggttgaaaaacctccaagaaaatggaaataataggaaggggggattcttcttatcagaggggaaaagcctccaagaaaatggaggtggaactagcgaatggaggtggaactagcagaaaattcatattacagaaagcactgccgacggatgatgtgaacagggcacaagcagataatatttaggacacttttagaaggcttcaatcaaaccatcttacttagaaaggagaagctgaggtgttgtccaaggatgggtatcgatctttcatggggttcaaccggccgctgctggacccttcatctaatatggacagtgaaagtcatctagtgcaacggaggaggcaataaggaaccgaagaagacatcaaggtttctcagaactcgttcaaatgacaactcgttagccatgcttgatt

SEQ ID NO: 325702 - DNA, 205 bp, Zea mays
cggacccgtggccggacccttggcccgaccggagtctaaattcaaaaccaccttggactggcggattttttttccacccacaccttgtctgcgccgtcgtttgctgcaacgatagccttccccgacctgctcttcaatctgcggaacctcttctacctgggcgcctaccaagcagtcatcaacaacagcgacgttccgggccttt

SEQ ID NO: 325703 - DNA, 226 bp, Zea mays
gaccatgtcattttttcaacaacgtccagaggttcatgaccatatgcataaacttgatgctgcatgtactacgattcatatcactcttacagatctgtctatatcaacattctgacctttcaaatgaaggaacaatcatcatattggattaatacattaacttaggctctgaagactctaacgaaatcaacgaatagaaatacacttggaaatcatatctcccggt

SEQ ID NO: 325704 - DNA, 312 bp, Zea mays
ctcccccaccggttcgtgttcaggttctggttcgtgggcgagagggaagagatggcggcggcggacgttgagtaccgttgcttcgttggcggcctcgcctgggccaccgacgaccactccctcaacaacgccttcagcacctacggcgaggtcctcgagtcgaagatcatcctggatcgggagacgcagaggtcccgcggcttcggcttcgtcaccttctccacggaggacgcgatgcgcagcgccatcgagggcatgaacggcaaggagctcgacggccgcaacatcaccgttaacgaggcccagtcccgc

SEQ ID NO: 325705 - DNA, 460 bp, Zea mays
  unsure (1)..(460): unsure at all n locations
cgcccacgccgtccggatttgtatttctatcacagctgacgcattttgaacccgtttcctttagatcgacgctgctgctatcttgggtcacatgctacatcaatntgggcaagnccgacctgagtattgtttcatttgaagtnaaaaaatcggaacgccaggtggtctgtattttggtcttaggttttcggtattgtacccgtcaacattgtaatctcttcttgaacttgcagntttcgctgtccctgaagccgagttttattatacacataatagacccgggatcgttgaccgtttttaaaataaaaaataatggtattcttaataaggtttatataagtgcaatagataatatcttacaaaagttttttttattaaatattaaaaaaggcgcggcccccctttttttttcaatatttttaattttttttatttttttccaaaaaaatggtcgttttat

SEQ ID NO: 325706 - DNA, 422 bp, Zea mays
cccacgcgtccgcccacgcgtccggggagcagctaaaatcctgaagatgagagtgagagggccttttgatcatgttctagcttagcttgttgcaagtgtgatttgaagcctagtgcgctggggtttcttttatggccatttctctctcattcctctacattcatgcgtgggtcatggataggcatgagaaaagattgtacgtacgtatcttgtgttcctgttcccaatgaatggatggaaccaaacgtgtgtccctttccaaaatacaatcaaaaaaattatctttaccgttacttgaaaactaacaaatttttttttgaattcaaactgtgaactcaagaaattttgtttttttggcttggtggggccccctttataaaattctttttttacctactatttttttcccaagatagtttttt

SEQ ID NO: 325707 - DNA, 410 bp, Zea mays
ctgtggcgtgatcgacccacgcgttcggagacctatatgccacaaagtttcgtgccctaaaatactctgctcgatgctgcttgcacgagactgcttgttgaccagatcattattgcaaagccggcacgaggtccaagaagagatgcccaatctggtggcgggatggacgaggattagttcgattatagttgttatctttgtatcacgtatgtgaagcttcagagcagatatcatactttatcttggctcttggttctagtaaaagtttggttgcctggagttcactacatgaacgtctgcaccgttgcgcatatatgacataggcaatccgtatgctacctgctggtgtattgcagttcggctgtattacatgattcattacaggggccgctccttcagttcatcacacc

SEQ ID NO: 325708 - DNA, 206 bp, Zea mays
tctttggaaaaaaaaaaaaaaaaaaacaaaaaagaaaaatttaaaaaaagagagagaaaaaaaaaaaaaaaaaaaaaaaaaaaaaaaaaaaaaaaaaaaaaaaaaaaaataaaaaaaaataaaaaaaaaacgtacaaacctttaaatcacaaaataaaaccacataaaaatataacccaaaaaattaaaaaaattatctacacatt

SEQ ID NO: 325709 - DNA, 317 bp, Zea mays
gacccacgcgtccggccacccgtgcagtgacagccttaccaagagcatgtccaagatgagttccaacctcaagggcgcggctaacacttctgcttacaactcatcataacaatgataagttctcaaagactatttcaagacctattataatacccctaatctgcaccttatgctgcccatgattcgacccatcatactaacactcataattaaacttatcaattattgatgcacatttgactggacatgttactattttttgagtaccatatggaggaccagaggtttgatatcttgaacgttcctgtgaacatcaa

SEQ ID NO: 325710 - DNA, 203 bp, Zea mays
gacacaaaaaaaaaaaaaaaaaaaaaaaataaaataactaaaaaaaatacaaaaaaaaaaggcaggtacttactcttttacataaaaactctacaatataataaatcattctttatatactatttcattacctcttatattcccccttttatgtacatatttcttcacattttatgatttcttcatactaaccattttaatta

SEQ ID NO: 325711 - DNA, 134 bp, Zea mays
gacacgcgtgcagtgacagccttaccaagaggatgtccaagatgagtgccaacctctatgcggcggctgacgcttctgcttacaactgatcataactatgatcagtgcttaaagactatttcaaggcatattat

SEQ ID NO: 325712 - DNA, 434 bp, Zea mays
cttacattagacaccgtgtaagtgatggatctaattactctgggtgctagcaaaatgcttcttttgctaccacccacggaggctgttgtttttttcactcaatctgtgatgtcttcttgcatacatgtcctactacatattgaacattgataagctacaacctaatggttacaagtcacctatactgcgtttggatgctggtattgaggcccagattttggaattggaattggtaaagccgaatttcagcgtttggatgctcacggaattcggaactggaaatccatcccaattcccctggtattcaactacacctgcaccccctccccttcaataccaagccccccacctcggtattgctcagaattcaattacacccgcatccaaacaacaacattggtattgcagatcaattccatttccctcagatttgg

SEQ ID NO: 325713 - DNA, 209 bp, Zea mays
cggcacgaagccggagttcgggctggccccgcagggggtcgagcaggcgctcgtggccggggaaaagttccggaaggagcttgacgagattgggttgccgttggtttcgccaagaattggtacttcgcggtttacagggcccggaacagtctagagtgctcccctgtgtgctgggtatcccctttgaagctcctagttgcgaagttggc

SEQ ID NO: 325714 - DNA, 631 bp, Zea mays
  unsure (1)..(631): unsure at all n locations
tcaaatctatcagcaaggtgctggttaaagtcagcttcatcgaagtcataatcatcttcgtcgtagccatcaaagtcatcatcacaatcatgctgcatatagtaatcctcttcttcttggatttgttggagttctggttctgatatttgcagagaactacttgagctggaaccagcttgatcgctggaagaaccctgtcaaacagtcggctagccagtaattataccaatcaaagcattaaaagaatgcacgaaaaggacaggcaaagtccttctgtttcgccatccactatgtttagtcagtcgtgtggacgatggactgattgccagttagtagtaccataaaaatatgaatagaacaaatgcatctttatcataaaggccaaaacaactgccgcaatgcttatcgcaatcctttgcaggataaaataaaatcacagggaagccatctcctgacagtgttcaccgatccgctagattaatcgaagaaacgaaatcaggtcaattatgaccggcattgcatcaatcaacccaagaaagacccccgatcgtaccatattcgctaccaactcatccncagcgaacacctcggcagtcggcactcgaattgacgcgtcaaaatcccaaaccct

SEQ ID NO: 325715 - DNA, 150 bp, Zea mays
gaccgcacgcgtccgagcactcctattctaacgcctattctgtctacgtttactaaacttctatctaccataccagtaggtctactattctatgcagataaacatacacatcaccatggtgccttccttataaatcccaatcctcaacat

SEQ ID NO: 325716 - DNA, 157 bp, Zea mays
caagaccatatccgacatcgagatgcgcctggctgcggctagagccgcccagcgggggggccaggccttttaaccggccaactcgacttcgaaggccaacaaggaacccggccgcgtaagaagttttttgtcattggccttttcaccacttttgctt

SEQ ID NO: 325717 - DNA, 210 bp, Zea mays
gcataagaacgtaaaaccatttgtgtcgcaatggttacctctaatgttcacctcttaaaaagaaaaaaaaaaaaaaaaaaaaaaaaaaaaaaaaaaaaaaaaaaaaaaaaaaaaaaaaaaaaaaaaaaaaaaaaaaaaaaaaacaaaaaaaaaaaaaaaaaaaaccaaacaaaaaaccaacaaatcaccaccaaacacaaaacccaaaaa

SEQ ID NO: 325718 - DNA, 109 bp, Zea mays
tcccactcttcctcccactcgtccacccactcttcctgtactgacaattaatttttaggcagactttattttaaaatacatataccactccctcttatattaaactttt

SEQ ID NO: 325719 - DNA, 231 bp, Zea mays
cttactcttggtctgactcgttggaaaaattaaaaaataaaaaaaaaaaaaaaaaaaaaaaagaaggatttaattaatttatatataaaatccattaaaattcccttcctttcttataatatccttctttattttcctcctctttcctttcttttttcttctttttttttttttccctctaataaaacttaacattcccctcttttttccactcttttatatttcttaaaa

SEQ ID NO: 325720 - DNA, 89 bp, Zea mays
ggtcgcccactcctacgttttaagaacaatctacagtaagtggcgttctgccgcaacaggacttccacactgaactagtttaagctgga

SEQ ID NO: 325721 - DNA, 185 bp, Zea mays
ctcttatcttgcataagcataagaagagagatccacatgtacaatgtagctgaatcatactgctacatctctatcgaagctatagccatagggctaagcccatgccaattcggcagccataaagatctcgggcccctgctgctgctgctggtactcaatctctcaaccctgaacgaaatacccat

SEQ ID NO: 325722 - DNA, 329 bp, Zea mays
ggctcggcagtcggcagtattagggtgtttagtttggtgatctctgagaacccagggagtcgtatgtgctgtaaaggtgaagctagaactagaacgccgctacatcagtcagtgccattaggcttagtacattcttcatgctacagctgtttcgtcaataaggaaactacgtgtatgatctgcggacggcaggcgaaaatagcacgtagtacaattccattcctacatatccggtctgttcttgctctgcatatttctttctctagaggggatgttatgtaacgcaatgcaacacccctacctggcgtgggtgtgggtgtttggagggg

SEQ ID NO: 325723 - DNA, 242 bp, Zea mays
acccacacatacagacacatttgcactctatttgtgacagttaaaataaacaaagacaaatatgggaaaatagaaaaatttaaaaaggtctggaagccttaacgtcatacaagtttagctagcacaaccatgatacgtaatggaacatgctatatggaccgcaaaataaagtccagtgtactacattcttaaacactatgaccgtaaaaaccatggtgatcccaaacttaatctcgttgcga

SEQ ID NO: 325724 - DNA, 88 bp, Zea mays
ttttaattaccgtgccccgtggtaattaattatgtacgtacttatatatgtatatacattacgccgaagaggaaggagcactttgtat

SEQ ID NO: 325725 - DNA, 230 bp, Zea mays
taccggttcggactgacccacgcgtccgcaagcccctgtacgacaccatggcgggtctggaggaaggggagaagagcgttgtcaagtgacacatgttggacctcagatcagatgaaacggtcttttctagtctctcgtgttcactacgaatgtgcaatagtgcaacatgtcgcgaggtgatgaattccacaaagacgaggtgacggagcagggcattcaaaagcccgcag

SEQ ID NO: 325726 - DNA, 299 bp, Zea mays
cggacgcgtgggcggacgcgtgggttctcctccccctcttaccaagtcctgctcaggtggagggttccttagggttttgtggaggggcgatggcggcggctgatgtggagtaccgttgcttcgtcggcgggcttgcctgggccaccagcaacgagtcgctggagaatgccttcgcctcctacggcgagatcctcgactccaaggtcatcaccgaccgggagacggggaggtgttgcggcttcggcttcgttaccttctcctccgagaactccatgctcgacgctttcgagaacatgaac

SEQ ID NO: 325727 - DNA, 503 bp, Zea mays
cggacgcgtgggcgagcatgggaaagaacatgcgagtatgcatgcaggctgcgcagccaggtggcctcatttgaaccatactgccagatgcacatccaccagcagcagcgccaatgccgatattgacggacgctgacgtcgcagaaccagccctctctgcgagaagcaacagcaccacagctgcatggacttggtatgccgcactcagaatgcgaacccatgtcttgagcatatccacattgctgatgctatgggcttgcctcctcatctgaagatagtcctggtcaacatcatacgcggcgtggcgcattagatctgacgattttcacattgagctgttaatagcaattactttccagcagctatatgtaacgtataatgacattgatctgtgcggtgttatggaggatggatggatgttgagcttgatacctcaaaggtggcacttgatcgtgctgccagatgtctctaggtacatatgggtacatacgtgtggatataca

SEQ ID NO: 325728 - DNA, 227 bp, Zea mays
ccacgcctccgagcacgccttgccggccgcctccgtatgagcgcggcgcgccctggggtccatcgcgcattaaaaacggctcccgaaggcaccctgcgtgatgcgtgccggctgtgttcaacctagcagcgcgttctctaattccacggcgctgaacggctgctaatcttcgaccttctcgccgacgcctatgaattagactgacacctgtcgttgccgctctatcg

SEQ ID NO: 325729 - DNA, 275 bp, Zea mays
cccacgcgtccggctactgtaccggccccggcctcttgtttaatctgaaatgctcattggatatccgcttacgaaacgcaaacacgtgctttggcacgttcgtcgtcgaaaagagaagagaatataccattttgctctcttgaaaaaaaaaaaaaaaaaaaaaaaaaaaaaataaaaaaaaaaaaaaaaaaaaaaaaaaaaaatataaaaaaaaagaaaaagaaaataaaaatattatttgttataaaaaataagaaaaaaaaaaaaaagggggg

SEQ ID NO: 325730 - DNA, 139 bp, Zea mays
cccacgcgtccgcccacgcgtccgcccactcgtccgaaaaaaaaaaaaaagaaaaaaagaaaaaaaaaaaaaaaaaaaaaaaaaaaaaaaaaaaaaaaaaaaaaaaaaaaaaaaaaaaaaataaaaagggatgaatttt

SEQ ID NO: 325731 - DNA, 398 bp, Zea mays
tccctggtctacccactcttcctcttactcttttggcaaaaaaaaaaaactataaaaaaaaaaaaaaaaaaaagaaaaaattgaaaattttaaaaataaaaataattaaaaaattaaaaacaatattattatattatttttttaattaaatttattttttattttttaatttttttatttttttttttttttttttttatttttctatatttttttattttttttttttttaaatctttttattttctatacttattttttttttttttttttccttttttttccttttttttttttttatctttttttcttttttttttctccatcattattttttttttttttttttattttcatttttattcctttttttttttttttatttttttatctttttt

SEQ ID NO: 325732 - DNA, 258 bp, Zea mays
gataaacatttgatatgcacagataataaaaatatatagtagtaaataataggccatagatatttttattatctgtggataaacatttgatatgcaaaaaaaaaaaaaaaaaaaaaaaaaaaaaaaaaaaaaaagggagaaaaaaaaaaaaaaaaaataaagaaataaaacaaaaataaaaaaatgataaataacatttattgccactaatcccaatttataaaaggagaaggtaaatcattgaaaaaaacactaggg

SEQ ID NO: 325733 - DNA, 188 bp, Zea mays
acgcatcgatttgaatgacaaccttctacataattgcccctgtaatttgtacactaattatgcggagagggagctactgcagtagagatgagctgatgtaaaaaaaaaaaaaaaaaaaaaaaaaaaaaaaaaaaaaaaaaaaaataaaaaaaaaaaaaaaaaaaaaaaaaaaagggcgaccgatttaa

SEQ ID NO: 325734 - DNA, 601 bp, Zea mays
  unsure (1)..(601): unsure at all n locations
cacgtcctccatagctctcctccaggagaggttcagaaacctgcagaaggtgaaggagatgagggaaggcagggagctgcagagggtgcacgctgctgatactactactaccaccaccaaccgcaccgcttcgtcgccgtcgtcctcgtcgtccctgtcgtcggctctcagcctcggcctccaacaggccgccaacgccaacgaccacccgaggtggttcttgcacccggacttgatccggccgtccaggccgctgcgcggacacgcgtgccacggcctcggcgccaccggtggtggtgtcgtcgtccagacgacgtcgccgccgccactaccgccgagctcatcgtggggaggagcgcagaattcgggctataggactgatatagatgtcgatacctcgctccatctgtaatctcttctataataagcacgtatggccgtgctgntctttcgttgcttttttttttggtatggcttgtcagtttcccggccttatttgcagctagctagcactacgtacttcttctgtcgtctcgcggcctgccttgtaactgcttgggtacttttactatatatgaggctttctatagatcgatgattt

SEQ ID NO: 325735 - DNA, 351 bp, Zea mays
  unsure (1)..(351): unsure at all n locations
cggacgcgtgggtgcggtcattgaaaaattgcataaggtactagtagtgactgtattgtgatctntgatctntatatatcttcttcttcttttctttaaaagagtgagttggatatgcatcgtcaatgcatgtacatatcacatatgggctagttagtagttaattaggagtacaattgataaactaccacatgtgacagtgaacagtatttttcatctcgtgcagcacacaggaatcttattcttgacgatctccagtgattccaaagactaaaacatgttcaactgtcttgtgattgattccttgcaggcacatcaatcgacctggggattgcgtacattcttatgctg

SEQ ID NO: 325736 - DNA, 219 bp, Zea mays
acccacgcatacgccgactcctgtaccctatcatttcgaaacagcgtcatgcactgatacatacatgaatcggtacgactggccatgtatattctatccagtagcaatctaatatagattttcttgtatcttcatcaacatcggcacctcacctgtacacatacgacaactcatgccataatacacgtactattgtttggctcacacctaggccatttt

SEQ ID NO: 325737 - DNA, 51 bp, Zea mays
atcacatcatactatttgcggatatataagcttaatcattcggatgcgtgg

SEQ ID NO: 325738 - DNA, 663 bp, Zea mays
  unsure (1)..(663): unsure at all n locations
atgaccgtttccttcctcgaccatgtccctctccagctagcttcctcccctccatgtcgttgcttcttcgtcgtcgccggccgtcgtcaccactttttgacgcgctagcgcctagctgctgctcgttcttccacctcgccagtctccatcaacgcggctccgtcgccctcacgcacgcgcgcatagatataaacataaacgccggctggcactggtagacattcttcactcccacgctagctacgcccactccccccgcgctatgcctatggccgaccgcgtccaccccatgccatctccctcctccccgccgcttccacctccgccagggcgacggcgacctgacgccgaccccgccacggagacgacgccgctgcacccgtccttcttccacgccatccgcggcctcgccaacgccaccgccaccgccaccggcgccgcagccccgctctcccccgcgctcgacgccgccgtgcgcgccgacaacgggcgcaacgggaaggtgggcgtggagtaccgcgcgggcggcgccgtcgcggtgtcctacgcggggcagcggctggccgcgggcccgtggcccgcgttccgccaggcgccgcggaacgtcacggtggtcgcgggccgttctttagnaaaggggggaaaaattttttcccccccccc

SEQ ID NO: 325739 - DNA, 291 bp, Zea mays
cccacgcgtccgcccacgcgtccgcccactcgtccgggcacgccacgcaagctctttgggtctgtatctcactcgatcgcagaggccacgctgctcaagttccctcagatctccgcattccgagtgaaggttggcaagcctcacgtcgcggtgcgaggcgttctggactacctgggcgtggagataacgaggcacagaatgaaagaatgagatgctgtacacatgttgttatttagagccagttcaatgctgatggcacttgtgtcataaccataatccacgcacgcttgt

SEQ ID NO: 325740 - DNA, 57 bp, Zea mays
tggagttttacattaaaaaaaacaaaattaaaaaaaaaaaaaaaaaaaaaggaaaaa

SEQ ID NO: 325741 - DNA, 346 bp, Zea mays
gtttctatgaggggaaatcttctgatttctaactcaggacattatgctcctggttttgggattggagctctcgaagaacttgatgttgaagatgaagatatttatgcatcaggttttgcttatgaacaaactgaagttgatattgagccttcaaaaactgccaatgacagtaattataaacttgatgacagaaaaagaggtttctatctgagctttaagattgcctcaaattctgaatacaaacttgaacggtaatgcttcctctgattcatacttttcttcatcttgatggaatagtgtgaactaccttcgaaagtctgggctttggtttttcattctaccttct

SEQ ID NO: 325742 - DNA, 89 bp, Zea mays
tcgcccacgcgtaccgcccacgccgtccgcccacgcgtccgcccacgcgtccgccgacgcgtgcgcccacgcgtccgcccacgcgtccg

SEQ ID NO: 325743 - DNA, 400 bp, Zea mays
gcagcaaagggatccaagaattgatcggtctcattggaatgatgatgacagaagtaagagacaattgctcctttggataattagaccttgggatcccggactgcattacatggcatgtggttgcttggggacaagcaacatttcgacggggcggtaatgtaacatccggattctgtgatatgtgtggtctgcctgaactctgaagacggtgtgcaagtataggtaaatgaagtctgaacttctgaagattttgatgagcaagctgattgggccatattagttgtgggccggaataccggtgtgtattcatataagtactaagaccatgtactcgaacagcagaaaggaaatattctagactttggttaccaaacaaagcatcttaagttgctttttgggg

SEQ ID NO: 325744 - DNA, 300 bp, Zea mays
cccacgcgtccgcggacgcgtggggaacttcctgggattaatacattttgttatcctagaaaaaaagagaaaaaaagaaaaaaaaaaaaaaaaaaaacaaaaaaaaaaaaaaaaaaaaaaaaaaaaataaaaaaaaaaaaaaaaaaaaaaaaaaaaaaaaaaaaaaaggggggccacttaaaaggatcaaagtttattaacccagtaattaaaataaaaaattttataaaagggcaacaaaaattaaatcaataggccttattttaaaaaattttaaatttgaaaaaacttggatttacc

SEQ ID NO: 325745 - DNA, 286 bp, Zea mays
aaaaaagctagctaaaacacaaaacaaaacaaaacaaacaacacaagatatcgagcaaaaaggcataatattggatcttgagtgcaacaaagtgctacaagaagatcaggaaggtcctctgcaaggtccaagacaaggtgagcatcaagaccatctcctactactagaagaacaacacggtgacagtgtccgggcccttcgactcctaggaggtcgcctacaggctcaccttctattctatcaaggtcatcaccgacatacacatcttttttgtgcttatgcttca

SEQ ID NO: 325746 - DNA, 339 bp, Zea mays
agacaatcaatcatggctcacccgcgcagtgtcgctgccgctgcccccctcctcctgctgcgtcgtccgccgccgccgccggcgcagcggggctcgtgtccgccgcgtcgccggcagccagcgacttcgtccgcaagtcgtgccgcacgacgcagtacccgtcggtgtgcgagcagagcctggcgtcgtacggcgggtcgccgccgccgcggagcccgcgggagctggcgcgcgccgcgctgtcggtgagcgcggaccgcgcgcgcgcctgatctgcatacgtggtccgcctgtgctaatccatctgcggcatatgctcgaagaaagtttttgggaacg

SEQ ID NO: 325747 - DNA, 229 bp, Zea mays
agagaattgacaaacctagtaattttctgcatgttcttgttcttagctattgactagggctagggacagtcaaagaacttggtaacattatgtgttaatccagatctaactaaatccactcagaacctggtgaacattaaacatgggaattctatacatcagcaaacaaggttaactagtaagtgatagcatgcaaccaaacagttatgctcccaataatacaaatgtt

SEQ ID NO: 325748 - DNA, 221 bp, Zea mays
accacgcgtccgcccacgcgtccgcccacgcgtccgaccacgcgtccgaaaaaaaaaagaaaaaaggaaaaaaataaaaaaaaaaataaaaaaaaaaaaaaaaaaaaataaaaaaaaagataaaaatatatctaaaaaacattatacatataataaataccacaagtaatacataaataacatataaaactaagtataatatatctatttgttttccaata

SEQ ID NO: 325749 - DNA, 201 bp, Zea mays
cccactcgtccgcggacgcgtgggaaattacaaaaaaaaaaaaaaaaaaaaaaaaaaaggaaaaaataaacatataagtaaaaaataaaaaataaaaaaaataaaaataaaatttggccgtcctttttaacgtttccaattttccttcccttttcttctatttttttttttttttttttgtcccccttaatttaaattttt

SEQ ID NO: 325750 - DNA, 242 bp, Zea mays
ttcccgttcttcccactctctctccactcgtatctacactcctacagttacgattccttataccatttatcatcacacaatctggattagcttttcttccattacgattatactcattttcatgacttcatttcttgcatcttccaatccaatttcaagatgctataactctcttaacatcacttctcatattctataatcatttatctcgagtcaacaattaagaactgcaatagttttta

SEQ ID NO: 325751 - DNA, 142 bp, Zea mays
cccactcgtacccacgcgtccggagagaccagaaacacctgactatggctcatcttttcgacaagccatccttccggagaccggttactcttgataaagactacatctcaatctcgcatgtcaacacacatctgcccatcct

SEQ ID NO: 325752 - DNA, 447 bp, Zea mays
ctactagtttatggacatcatttaagagttaatactgaggttgttgtttagcataagctcaggcaggctaatgttacaaaggtgaatatttttcttgaatacatgtgcattttcatgtctttaactctagatagatgcttgttgatgtggtaaagctgttgatccttatcttgctgattattatcaaaatttactcatgaccagtccatacttcatagcaggtatctttcataaaaggtttgtccttttgttccattggagaagtactaaaatgcacaggtatctaccgtgttccatctgccaagacaccaacgttcaacacaagcagcagttcagatagaccaccatcatcacaattgctcacaggatcatgtcagttcttacatccacatggtgttccttcttgataacggttagtgcctaccatggacagcggctagtacttgc

SEQ ID NO: 325753 - DNA, 130 bp, Zea mays
tcccacgcgtccggagctagcagctcgctctgtcctgcaacaatggccgctctggcctcctggcagcatctggtcgcggcggcggtcctggcaacggctctgctgctgctggcagctggggccgggaccg

SEQ ID NO: 325754 - DNA, 345 bp, Zea mays
cccacgcgtccggctacctcggcttccaaaccatggccgcctatcctacatgtggtgcctgcggagccgcttaggccagccggtcgggccagaggcatatccttgcctgggatgatctatctggtcgcgcgaggggtcgaaagggacgcttgactattgtcagcgcgggacgcaatgctttcagctgtgaaattattattcaggcttgaactaaaggtactgtacgaaggtcctacagtaatattattgaatcagagagaactgagtttagagggcaagaggaacaagaactgagtttagggtgaaagaggatgattacaaacaaatgaacgtgagagtgagcag

SEQ ID NO: 325755 - DNA, 97 bp, Zea mays
ctgacgcgtgggaaaaaaaaaaaaaaaaaattaaaaaaaaaaaaaaaccattataaaaaaatcgcaacttgggaacacatacatgcaaacatcctac

SEQ ID NO: 325756 - DNA, 316 bp, Zea mays
cctcattcccggtcgaccactcgtcctaaaaaacaaacaaaaaaaaaaaaaaaaaaaaattaaataaaaaaacaaaaaaaaaaaacaaaaagaaagaatacaaaaaaaaacaagacaaacaaaaccaacaaaaaaaaaacaaaaaaaaaaaaaacaaaacaacacaaaacttaacaaacaacacactcacaacaaccacgaaaactcaaaactcttcaacaacacacaaaaaaacaaaaataccaaatttctctatgaccacacactaactaatgatatccaactctccaccaccgccaataatgcaacccacaac

SEQ ID NO: 325757 - DNA, 224 bp, Zea mays
aaaccacggtattgcttaaaatcgagatgtctttggtttcattagaaaactgaagtattgatagagtatttcttttttttactgatgtcctgagtggagtttccaaaactcctaaaataccaagtttccaaacagtgtcatatgacaactgactttgctttttagcgtttttcaagattaaagttttccattcttttctatttaccttttacatgcggttattt

SEQ ID NO: 325758 - DNA, 353 bp, Zea mays
aggactcctgggtgcagctgcagcgtcagcagcaagtactcaaactcgctgctgccgatactgctacgtgggcaatggcgcctcccgacactgtcgccccatcatgcttctcttctcctgtgcttacacggtctccatgactgcatagcacttctgtatcaactgggcaacctgacgttgtcgctgaacctaactcgatatgcaaacttcaggctcatctcctcattgccagcaggcactctcttaagcgtttccttgcgaaacgcctcgtccggatcttcaggcaagactccatacgcagcgctaagtcattcgatggcatggagtcaccgatgattgacgtgacatgctta

SEQ ID NO: 325759 - DNA, 303 bp, Zea mays
gcgcccacgcgtccggaagcagaggagagagcatctagctagcgctgtcagacggggctgcctcgccaccgaccgctcgcgaagagatcgatggctcatgctgctacgctcgctgctgcaaccgcagacggcgtcctaatcggcctctgctgctgctccgtttccgaggccgacagcaacagcaccaacacgaggcacgcgtcgatagcccacggcctgtccttggactatctacaaacggatctggctcatggccgagtgcggcacgcggatgttcgagcaagacaccctgcgcatggacac

SEQ ID NO: 325760 - DNA, 413 bp, Zea mays
tcgcccactcgtccgctcttctttttttaaaaaaaaaacttcaccagctctagatccacactgttgcatgagtacagaaagtcattggcttcgagaggtagcgtggtcagccccaaaagatttgtgatgacaactcaaatatgagcttcaacatgctctcctgaagctcgaagcatcaaaaggcttcaacaacacagtaaaaggtggaaatgcaaattttttctttggagagagactaactactggtattgagttcttcatgtgcgaatagattgcaatttataacagtttattgcttactggattagcatcgtctaatcagatctggcttcaagttacttagaagtcttacagatcacagtgtccagtgattgtacaacctttttctttttaatccctgttcgatttgtttc

SEQ ID NO: 325761 - DNA, 57 bp, Zea mays
tgttatcttctactaccactcctgttcgacttctggttcgtaaggttctccgaaatt

SEQ ID NO: 325762 - DNA, 111 bp, Zea mays
tttcccgtgtctacccactcgtcctcccactcttcctataagttgctttgttcaaaaaaaaaaaaaaaaaaaaaaaaaaaaaaaaaaagaaggataaaatataaaaattca

SEQ ID NO: 325763 - DNA, 378 bp, Zea mays
gcggagacaacgaaggcctcctgcacctaccaaatgacatagccctactatttcatccatcgtgtcatcgagcacttgacacatacgcaccgcacgaagatgactactctgctcactacgaccaaggcactacctgaagctttcagaatctgtgatatccatcaagccataaagtgagagagaacgaaccataatagtgtgctggtatgccgtccgccaacccgcctagatatcttcgcttgtctgctctcaaccttgaatgaaaatctgatgaactctgctgaaaatatcgtctgtatgttgacatggatcatgattctatggtatctatctataatatctgtctcataagctttgatatgaagcgtgatctggttc

SEQ ID NO: 325764 - DNA, 312 bp, Zea mays
tcgcggacctgggcgaccgtggggaaatattcactttaagggatattaaggctacagaagacctaagtggtcatgccttcctatttttggctgacatgtgagttttagatatctctctcatttattcaacgggagtacttgaaaacatatccacatgctagtatattgatgatgcaaaaccatggaccagcagtgtgatgttgcatttccttgtgcatcacataatgagattgacaaggggaggctgttgcaatcagcaactttgttgctttcttgtcagtgtcaaatttgtctgcctgctaagctttgatt

SEQ ID NO: 325765 - DNA, 299 bp, Zea mays
gtggtcatccttggggcttggagtctttggaaacagagaaatagatgtgtttttgatggagctcggccgtgcctttctactttagaggatggattcaaagatgagatgtggatgtggttttctgcaggagccaagaacatgtgctccctttttgaccctggttagagaaaggaaagtcttgtagcctcttggtaggctggggtggtggtgtgtcgtgtggctggtacgtgttagcgtgtgtgtgttctattcgtctgtgtatgtttgcaagtttttcttgaatctttttatcttttttt

SEQ ID NO: 325766 - DNA, 295 bp, Zea mays
attccctgttctacccactcttcctaaaaaacatacaatacaacaaaaatacacaaatacaaaaacaaaaacaacacaactcatcaacacggacctataacatatactaaaactcaaaacatacaactaaacacaaaactaactaacatacataacaacataaaattcacctccaacaattacaaccctatcatccctatccttgcaactccccctactctccttcactatcaccatctatctctcccttttcttccacaccatcaaacccacacttacactcttttccatactt

SEQ ID NO: 325767 - DNA, 306 bp, Zea mays
ccaacccttccggttcctttcctccaaccttgtaaaaccgaaagttttttcccattcccctaaaaagccaaattcctagatcccaaacttcccaaaaagcccttccctattaacggttcctcccttgtaatgtaatagtcctggtcctccaaaaggtccacctaagtttcctcaacgattccaatcccaaaaattccttccgccagatttttaagaagggccctataaccccggtttgccctggccttcctaaccattgccacccaccattccaaattttataccttccttttgttccaattcttt

SEQ ID NO: 325768 - DNA, 214 bp, Zea mays
cactcgtacgcccacgcgtccgcccacatcgtccgcccacgcgtccgtccacgcgtccgcccacgcgtcctgccacacgtccgcacacgcgttcgggaaccgcaagccttccggttctacatcagatacttgtctagtgcctacatgcattccaaatcatatgcaaccactctgtacatatctgacttatctcacttagtatgggactgtgctt

SEQ ID NO: 325769 - DNA, 306 bp, Zea mays
acccactcctacccaccactcctcccacacctcataacaagaactctaccaacactacacactcaatctacacttcgcccactctgatccctttaaccatcactaaccacccgactacatccatatcctcctctcctaccacactaacaatatctaggacaccatcgacgcctccatcatctcactccactccaaccatctctcctattcttactatttctataacaatattaatgatctctataaccttttcaaccccattatatccaaaatttaccaatgctctttttcctacattttattctc

SEQ ID NO: 325770 - DNA, 291 bp, Zea mays
gaccaatcaactgatcttgctcctcgtaggaggaagcaaaaaaaaaaaaaaaagaaaaaaggaaaaaaaaaaaaaaaaaaaaaaaaaaaaaaaaaaaaaaaaaaaaaaaaaaaaaaaagaaaataaaacaaaataacaattctataatgacacttaaataaaataaaatagtccgaaaatttacaacattaaaaactaaaaaaacctcggagtaaataaacttaatcgactttaaaaacattaccattacgcaagttaacatattagcaaaaaataccttatcaaccagaa

SEQ ID NO: 325771 - DNA, 279 bp, Zea mays
tcttcctctcactcttgagaaaaaaaaactaaaaaaaacataaatacaaataatacaaatacaaaaaaaaaagaaaggtaatattaaaatctaaaaacatataatataaatcacttacaaaaatcacacataatctaactatgttaaagaatcaaaagtcaactttatagtgacatctaatactgttatcctctcaaaagtttaccaaattacaattagcttcaccttacttaaatagcattatttaacaactttccatacctacctaattatataaaa

SEQ ID NO: 325772 - DNA, 297 bp, Zea mays
ctcacgcgtgcgaatatcacactccgcaggtcactttcacctagtccaacctcatatatcggatgggctcctactatatctcatctatcctatgtcagctctttcagcgctcaccctaaactctctataatctatactaccagtcctctcctcagtctcatctaacactgtcatccttcacaagatgcacgaaatcacaataagcttcgcgttacgtaacttccaagtgtcaagaactcgactaatccaactaatcataatgatccgttactatagctctagatatactctagattt

SEQ ID NO: 325773 - DNA, 369 bp, Zea mays
tgcctcccttttttttttttttttttttttttttttttttttttttttttttttttttttttgttttttttgtatttttttttttttttttttttttttttattaaaaaatttaaaatattttaattttataaaaatggaaaaaattaaaaatattttttaaaaaggataaaatcaaaaaggaaaatttttttaaaaaaaaatcattaaaattttaaacttcttatgtaaataattttaaaatattgacttattaaaaaacttttttgtcaaaataaaaaaattcacttgaaatgtttttaaataatttaaaattataatttttttataaggcctattattaacaaaaattaaaaattgtccttttttt

SEQ ID NO: 325774 - DNA, 205 bp, Zea mays
tcccacgcgtcctcccactcgtcctaaaaaaataaaaaaaaaaaaaaaaaaaaaaaaaaaaaagaaaaatttgaaaaaaaaaaaaaaaaaaaaaaaaaaaaaaaaaaaataaaaaaaaaaaaaattttatttatattaaaattaaaaaaaaaaaaaatatattttaataaattaaaattaaatttaattttattaaaaattaaat

SEQ ID NO: 325775 - DNA, 261 bp, Zea mays
cccactcgtccggtctactctaggagaggaggctgttctgtggtggcctcacctgccctgcgatgagtatacaaaataacggagctctactcgggtagaaacctgatggcccgccgcttcccaccacttattcctttcagttccacacactcctccattctacgtctacgcctatacgctgccttacctcctgcttcgagctgctcgcgctaactgcgcgaccatcaatgctcactatgcagtatctacgttcggtggcat

SEQ ID NO: 325776 - DNA, 363 bp, Zea mays
cacctgtaaacaatgtacattcttccaatgtaagaccgcagcatactcaagaagtataccggtcaaatcccagttcaatcttctcatcatcgctgaatgtacagattcagttcaaagaatgaccggtctactggcatgatcacatatatcctcatgacattacatctgacgaactgctggattctacgtgaggcagcattgaacacaactcctactgaaaagaagcaagaatcatgctacttctggctgcagattgtttggcattgagataggttctgcagtatcaccagtggctactgttgctagtgttggccaggatcagccacctgctctgtcatttgacgttgaatctgatcagctggc

SEQ ID NO: 325777 - DNA, 369 bp, Zea mays
gaaatccccagctgagcctgcccaagctttctcattttcaagaccgcagcaaactcaggagtgataccattcaaatcccagttcaatcttctcatcatcgttgaatgtaggattcagttcaaagaatgaccgttctactccaatcaacagtcatttgtactggacaatgaggctgacgaactgttggattctactgaggcagcattgaacccaactcctactgaaaagaagcaggactctgctacttctggctgcagattgtttggcattgagataggttctgcagtatcaccagtggctactgatgctagtgttggccaggatcagccacctgctctgtcagttgacgttgaatctgatcagctggca

SEQ ID NO: 325778 - DNA, 282 bp, Zea mays
cacgtttgttgacagaatcaggaatgactgacgcgtatgacttatctagcgatactacaggtgcttaaaaccctgtgtctacaaaacccactgaatctgccagagttgaggccacatattctactgatattcaactggagaatgaagaagtagataagaaagaagaggaccagcatgcatacacaaccaatgatgatgtttctaaagagtattgtataatgctcaaatataaatctgcataaaataacaaggcctgattttttatctaatgtgcttgaatct

SEQ ID NO: 325779 - DNA, 179 bp, Zea mays
tcccggtctacccactcttctctaaaaaaaaaaaaaaaaaaaaaaaaaaaataaattaataaactaaatcatatcgtaataaatgaatgattagtataaactcctgtcatgttcaaacgtaatgattagacagtatataaagaaaaagataaaaggaattaaatatacaaaatatttaa

SEQ ID NO: 325780 - DNA, 220 bp, Zea mays
aattccctcgtctacccactcttccttccactcacattcccacaccttcaatttccattcctcatcatcaccatcctctatcagattggcttcctaacaatactatcctactcatattattacttcattccatccatacaccaatccaatctcatgattctataactctattattaccatatctaatattatataaccatcaaactctaatacactctta

SEQ ID NO: 325781 - DNA, 396 bp, Zea mays
ggcgtgctgaaatcggtatccagcacgttgattggcgtcagtcctgagtttgaggttgcgctctacacgttgtgcttttttgttggaggggaagataaccgcgtcgatattggcccgtatagtgtgaacgtcaagtgctaccgattggggaacaacaaaattggatcagcctttcccattgcagagaactgattatctggtgctatgcttctgcaggtaccatactgttcaatttgttgctgccatctgcaatcgtattgctacttgcactgctaaaaagttgacgaccgagactgaagttacttttcatgattttgttgctgtggatgtggaagctttccgatgtatattttctgcctttgtcatgtttatttactgatatgctgtttgttgatg

SEQ ID NO: 325782 - DNA, 442 bp, Zea mays
caccgactcggcgtagacaacctcctcgtcggtgccatggacaccaactgggtcttgtctctacttccggggcgtgcccgtctttgatatggccagcatgattgtcacttttgattccttctttggctatttcttattttttttctctttctttatttacttttttttattttcttattttattttttttttttttttattttatctttttttattttttaattttttattattttttttttttttttttttttttttttatcttttattattttattatatttttttgtaatttttttttttttttttttttattttttgtttttattattatattattattatttttttttttttttttttatatttttttttttttttattttatttttttttttattctatttttttttttttatttatattttatttttttttattt

SEQ ID NO: 325783 - DNA, 63 bp, Zea mays
ctgactcttgtgaaaaaaaaaaaaaaaattaaaaaaaaaaaaaaaaaaaaaaagggcaagggt

SEQ ID NO: 325784 - DNA, 388 bp, Zea mays
cagactgatgcgtgaatactgatcaaagggggctggaactcgagaacaatgagtggtgtgagtatgatcagttcagagttaggcaattcagttagtgcaaggatatttcaaattagttacccgacctctttttttattgcatattgatatctagaataagatcgatccaaatcacttgaatgctaattttgtcaaaagtatccttgtgtgcttaatttaaccaaactttgctaccttccgtcattacatgtatttatcagaattcgcaatttcgtcctattttgtaatatggtgaactgacctgactgtttgcttatttgcttgcttggtcccacctttttccctcaaaaaaaaagagactttttgctcatgagctttgagattgcca

SEQ ID NO: 325785 - DNA, 219 bp, Zea mays
tcggcggacaagcccccagaccggttgcctccattactgagctgtgcgtgcgtggtggcggtctgccttgtggctgcgccggtcatggtgatggtagagatggactgtggcgtaggaggaggaggaggtggaggactgtatgacgctcttaagatcatttctcatattctataagcatttatcttgagtcaacaattatgaactgtgatggtttttaag

SEQ ID NO: 325786 - DNA, 61 bp, Zea mays
tcggattgttttgcttgtattgttgagcttgtaaagaatatccaacatttgtttggacttc

SEQ ID NO: 325787 - DNA, 481 bp, Zea mays
ttcctcggtctactccactcgtcctctgactcttggtctgactctttttctagttctagatcgcgagcttcctaccttgtgttggtttattttttgttttggtttttctattcttttgttttatctttttttttttttattttttttatttttttttttttttttttatttttttctatttattttatgtttctatatttttttttttttctttttttctttttttatttttttttgttttttttcttttattttctctttttatttatttttctttttttatattatttttcttttttttttttttttttttatttttttttttttttttttttattttttttttttttttattttttttttttttttttttatattttttttttttttattctttttttttttttttttttttatttttttatttttcttttttttttttattttttttatttttttttttttttttttttttattttt

SEQ ID NO: 325788 - DNA, 55 bp, Zea mays
tgttctcctgagttcggcaacgtttttgttttcatctagattattaacacaaagg

SEQ ID NO: 325789 - DNA, 362 bp, Zea mays
ggccgctccttttttttttttttttttttttttttttcttttttttttttttttttttgtttggttttttttttttttttttccataaccagccaggacccttccttttgtatttccaccccacacaccaacatgacaaactttccaaaccaatcggactaaatccgagcaacccggcaaaatcaaactcagctcgaaaccggcttagcgcggaggcaaaccaggcccaagggtttcaagcccccttaggcaacaaaggacaggacaggaacaggaaaggcgaggcacttggacattggggcaaagaggggaaaaccagtttgcgaccagggtttttacggccgttaatgcaatgctccacg

SEQ ID NO: 325790 - DNA, 286 bp, Zea mays
tcggactcgtgggatccatctccttatgtgaaataacataacatgcagtgattaccatgggacgggttctgctagctgttaatacatgttgattgatcagcattggatgattgcgaatactaaacaagtcatccttcttcacaacaatttccaatactacctaatccatgtgtattgtgaataaccgcacaagccgtcatgtggtcggcgcatcatagtaatactacatgacagcctcttcatcttattactaatgtagtacatcatcatccccgataaaacataa

SEQ ID NO: 325791 - DNA, 293 bp, Zea mays
cccacgcgtccgcccacgcgtccgaaaaaaaaaaaaaaaaaaaaaaaaaaaaaggaaaaaggaaaaaaaaaaaaaaaaaaaaaaaaaaaaaaaaaaaaaaaaaaaaaaaaaaaaaaaaaaaaaaaaaaaaaaaaaaaaaaaaaaaaaaaaaaaaaaaaaaaaaaaaaaaaaaaaaaaaaaaattaataaaaaaaaaaaaaaatattaaaaaaagaaagatggaaaaataacagaataggaattgaaacaaatgaaaaaaacaacaatatgcgcaaattgaataagataatggg

SEQ ID NO: 325792 - DNA, 438 bp, Zea mays
  unsure (1)..(438): unsure at all n locations
gtcttcagatcccattgacaatgtcaaggccaagatccaggacaaggagggcatcccgcgcggaccagcagcgtcttatctttgccggcaagcagctggaggatggacgcacccttgcggattacaacattcagaaggagagcaccctccacctggtgctgcgcctcaagggaggaatgcagatcttcgtgaagacattgactggcaagaccatcaccttggaggttgagagctccgacaccattgataatgtgaaggccaagatccaggacaaggaaggtatccncccggaccagcagcggctgatcttcgccggcaagcagctggaggatggtcgcaccttggctgactacaacatccagaaggagagcaccctccatctggtgctccgcctgaggggcggtatgcagaatcttgtgaagaccttgactggcaaga

SEQ ID NO: 325793 - DNA, 429 bp, Zea mays
cccacgcgtccgcccacgcgtccgtgcagtggcaacttggtcaggcatagattgtcttggttccaaacccagtaggaatcaaatcaagatgcttcacaaaatatgagaaactggtgacacaagcacgttgatggaagtaccatgcaggcccatgaggagaaaattcagaatagatatgtttgaatgccacgtactgagcagcttggaggacattgacaattggcatgccacatactgtgttgtcaaaagcgcgacaggactcataggcttactcgtaagaagtctgaatctatggcttcacttagtcttggtggagaggctttttttttgttctttttttattattttattatttatattttttattctttttttattttttttttatttttttctgtttttcatatttatttattttttttttatttt

SEQ ID NO: 325794 - DNA, 445 bp, Zea mays
aactgcggattctttctttctctccattcttacgtttccatattaaaatggtatttgttcacttaaatggtaatatttttatctaattttcccattggtttttcaaaagttccttacctgattcccggtgattaaacaactaccttggactgacttataaaattttatttatttagaatggtccctttttttaatttaaataatttcttttttagattatcatattattttttcattttttatttttatatttcattattttatttttttaattttcttttttcttttttttctttaattatctttttgtttttttttatttttttttttatttgtttatattttttttatttttctatttttcttttttattttatttttttattctctttttttttttttttatttttttttatttttttttatttatattttatatattttt

SEQ ID NO: 325795 - DNA, 392 bp, Zea mays
  unsure (1)..(392): unsure at all n locations
tcgnccacgcgttcggccacgcgttcgctgcgattcaaaagaagacaacacatttccttccaagccattgttgcaacctgcatgtattgaaggagcttcattagctcatgttcgggatggccaaacttcaaccttgcttccatctatagcttcctcaagacctgcatgtgtcctcaattggagaagccttgtgccaaatagcgagcaatcttgacagatacatgaaagccctaagcaccaatttgaggagatggacatncacaggcgcttgcatttattagttgatgaggattattaacccgggacaacaaccattcactccactccaattcctacaaaggaaggtccagaactagcatcccagatgatcgaaggattcctccatgccacta

SEQ ID NO: 325796 - DNA, 356 bp, Zea mays
ctacactcgtccgaccacgcgtacgaaaaaaaaaaaaaaaaaaaaaaaaaaaaaaaaaaaggaagaaaaaaaaaaaaaaaaaaaaaaaaaaaaagaaaagaaaaaaaaaaaaaaaaaaaaagaactagaaagggaataaactaaaaggtagtttctaatggttcaactgagtgacaaactacgtaactacgagccagtgggcacaccaatgttagcgttaatacaagttgaaaggattattgtacaatcaaagcccaaaatctacagcaccgtataagacaaatgcaacagcaagcaagataactaggaacataaggccgaagaggtttgagacaaggcattggtcacggaagaga

SEQ ID NO: 325797 - DNA, 240 bp, Zea mays
tcttgccttctcgaatcggctgcaaccccacctcataccccacctcctcctccgctagggtttgggtgcgaggatcgacagtgtcgaccgctcctagtcttgcctaccgaggcccatgtgcctttctgattgtaacgtcactctatctcagttgcttctactctgttcatactaggctacttcgcacccattcattaaccaacatggtctatggctcgattgattctgttacttctagtc

SEQ ID NO: 325798 - DNA, 425 bp, Zea mays
cgcagagccagagcaaggcaagacgactcatatatagccacgcgaacacagttagatcgagggagtaagtaagagtgatagccataacggagctgatcgacacatgtgtgaccaggctaatctacatgcttgatgtgctgtaccgcttcgtcaacacatacatctaccgtcaatcggacagccactacgcagaataccgagaatgttacacacatacatgaaagctcgtagcacgcattttgacgagattgacattcacaggcactgccatttattacttgatgagatttattaacccgggacaacaaccattcactctactccaattcctacaaaggaaggtccagaactagcatcccagatgatcgaaggattcctccatgccactaatagtgacatgcctagtattaccattcaaggttgca

SEQ ID NO: 325799 - DNA, 123 bp, Zea mays
cccacgcgtccgcccacgcgccgcggacgcgtgggaaatggtcatgtatgagtgtgacagctatgaatggtcgaatgaaacctgtagcgtattatttgagtacgttttaagacaggttttttg

SEQ ID NO: 325800 - DNA, 71 bp, Zea mays
cggacgcgtgggttgttttgtttttttttgtctgtttcttgctgaaaaataagcaaaaaaaggagaaagaa

SEQ ID NO: 325801 - DNA, 313 bp, Zea mays
cctttatccaaaaaaaaaaaaaaaaaaaaaaaaaaaaaaaaaaaaaaaaaaaaaaaaaaaaaaaaaagaaaaaaaaaaaaaaaaaaaaaaaaaaaaaaaaaaaaaaaaaaaaaaaaaaaaaaaaaaaaaaaaaaaaaaaaaaaaaaaaaaaaaaaaaaaaaaaaaaaaaaaaaaaaaaaaaaaaaaataaaaaaaaaaaaaaaaaaaaaaaaaaaaaaaaaaaaataaaaaaaaaataaaaaataaataaaaaataaatttaaaataaaaaaaaaaaaattataaaataaaaaattttttttattataaataa

SEQ ID NO: 325802 - DNA, 84 bp, Zea mays
aaaaaaaaaaaaaatttaaaattaaaaaaaaaaaaaaaaaaaaaaaggtaaaagtaaaaataaaaaaaaaaataaaaataatac

SEQ ID NO: 325803 - DNA, 436 bp, Zea mays
cgatcacccttgaggtggagtcctcagacaccattgacaacgtcaaggccaagatccaggacaaggagggcattccaccggaccagcagcggctgatcttcgccggcaagcagctggaggatggtcgcaccttggctgactacaacatccagaaggagagcaccctccacttggtgctccgcctcaggggtggcatgcagatctttgtgaagacattgactggcaagaccatcaccttggaggtggagtcgtctgacacaatcgataatgtcaaagccaagatccaggacaaggagggcattccaccggaccagcagcgcctgatctttgctggcaagcagctggaggatggccgtaccctcgccgactacaacatccagaaggagagcacccttcacctggtgctccggttgcgaggtggtatgcagaatcttgt

SEQ ID NO: 325804 - DNA, 438 bp, Zea mays
gctccttgatgtcgtggagggcgttcaagagatttacagccagcgcgtgtatgtcgtactgtccaggtgttccctttcgtgccattatattccccaaaagcgagaatggaggcattattgatctccggttagggcatgaatttttgcagacgatggccagctgacgtagggttttgaggtatcagaatgtgcataatcatgtttatgttgtacaggtgtaaatcagccaagttattgattacaagtgtgacatgagaaatacacattaataaaaactccagctcggttgtacagagattgtgtttgaacccagaaattcatgtggttatgtcgtttgataatatatgtacctggcaggggtgaagctaggccttttttttgtcagctggccttgataattttctggatatctaatgaaaaaacgatgtcaataacaag

SEQ ID NO: 325805 - DNA, 333 bp, Zea mays
ttgactcgttgtctatgatcattcgactctatatacatacagctctagctagctctctgggcgtctaacctcgcttccggcatggctctcaatcacatcgtactcttgacctgctacattgccattaccgctctcaccttccgtccctgctcatcctcccttcccatagactcttgctagttcacactgcaaaacaacgctctcagcatactcatatacgcctccttacatcagagcttgataattcgcatcatcagtttcatcatcaaattctcgttctattcccatatatctgaatggaaccttctcctatcatatgtccaccttttgcat

SEQ ID NO: 325806 - DNA, 205 bp, Zea mays
tcgtgggtgaggctcaagatggtgaactagaagatcaagaagatgagccacctcaaaatgactgcaactgtcgagggggagtgattctgatgtttggctgttcgtttgcatgatgaccaggttttagtttgtctggccatgcttgggtcgcatcaatctgtgacacgatgaatatcactttgtcaacctattcttctcacaaaat

SEQ ID NO: 325807 - DNA, 440 bp, Zea mays
  unsure (1)..(440): unsure at all n locations
cccacgcgtccgcggacgcgtgggttgtggatgaagaggaacagtctggtaaatctgagtgctaatgaatctttgaactagctcataatatccttgattgtggatgaagaggaacatcacgcatccttgttctagtctatgtttggttaacacgcccaacagcagctctagggagatttctaccccttagatgctcagtttcaccaactagtttatcaacaacccctcagaatttttatcaacaacaattagtcggttgaactcctatttggacgattaatcaccgtttaatcgtggttagtgttacgatcagagttctagttgccctagtcgcgtcgtgcaccctaactgatcttgcaatggcgataaggccgactaattgcgactaatcgtgattagtcggacgactncaaaacatggctaggcacatgtatttgcaa

SEQ ID NO: 325808 - DNA, 272 bp, Zea mays
ttcccggtctacccactcgtcctcttctcgtgtgctgactctttggtccaaaaaaaatacaaacaataaaaaaaaaaaaaaggaaaaaaaataaaaaaaaaaaattcaaattaatataatttattacaatattatacaacattacatatcactttattaactcatctatatttacatctaattccacttcttttacccacttttttactactaatacccttcctaatcccaactctttctcaatttaatacattttcctttctttacctttc

SEQ ID NO: 325809 - DNA, 436 bp, Zea mays
  unsure (1)..(436): unsure at all n locations
caaatattttgcacgaccagaaaagttttatacttatccttgcagcgtttcaagatctgggttcttgcagatcctggaatgttgagtaaaacgttgtcttgtttggacagctgcagttttcagcggaataaataactataaccgtgttactgctagacacaaagccttctctgaacaaagcttgcacacatgttattagttcagctagcagcaatttcagtcagctatatagcgcgcctcattggttgactgaagtggtgaatgtctatgctcaggacccaaattaaaggcgatgcaacttcttgctgcgatgtcagctagccggatcagtttctggaggacattatattataatataatatgaagaatacatattatngtatatgtcatgggtatatttcatcttcagatgcttgtcctattatcttttattcat

SEQ ID NO: 325810 - DNA, 203 bp, Zea mays
acgaccacgcgtccggcttggcttggctgcgctagcgcacaccgaacccgtcaccgatgcagcgtcgccgcagatccgccacgaccgaccgatcgatccggccggcggcgggcgccatggcctcccccaacccccaggccgctgcactgcaagccgaggctgacgctgcaacattagagagcctcaacgagcacacactcagc

SEQ ID NO: 325811 - DNA, 60 bp, Zea mays
cgtttatttatatgtcagattaaagttttttccaaaaaaaaaaaaaaaaggccgcccgtg

SEQ ID NO: 325812 - DNA, 293 bp, Zea mays
ccggttcggaatattcccggtgtcgaccacaccgtccgcgctacgcatgcgcgtgctgcgctcttgttcgtgactcgctcggtcggcggaagaaggggcgcatcgatctgggcgctgctagctgcgagagcccaatatgcatccgaccatacaatcgactgaccgctctctctcggcagcgtctgaatctgcactcgggcgaccactcctctggcgtcaagtcactgcaccctatcggcctgcgtcgcatatttaactaaacgcctgcgcccataccaaacggagatctattg

SEQ ID NO: 325813 - DNA, 398 bp, Zea mays
gagaccgaaagcactgctgcaagctctatcgacactcgctagagcggcggaagaagggattccatcgagcggaacggtgctacctgcaacagaacaatatgactcggaccttaaaaaatcataccagtccctacatgaagcatacagaatgaaaaatgggtcgactcgcaatatccacaaatgaggctccatcatccttaggatccataattgacgcaccatcttcactgcacatttcaagaccgctagaagaagcaagcacgactacagatatagcctccgcggtactcgttccgaagagcttgacatggattacatggatcatcctgcttggtcaactctcatagagggttgcttgctaatgaacatgccacatacccaggacaccctcctgtact

SEQ ID NO: 325814 - DNA, 262 bp, Zea mays
cccacgcgtccgcccacgcgtccgcccacgcgtccgcccacgcgtccgcccacgcgtggcgatttgaagaggcagatggacagtgccctgcatgatgcctccgtgtttaggcttattatggacttgctcaaagttgttctgaataagtgccaggaaataaggcctctatcttatttaggcctctatcttcggggtagctgactaagtgttgttattgctacggaatccagaattctgtgaattgaaatgaattgtaccgatg

SEQ ID NO: 325815 - DNA, 140 bp, Zea mays
gcggcctacgccacctccccctcaccttccgccgtgcgccccgatccctcgccgcgagctcatctcgccgaggactggatcgccggagcccggaaggacatcgtgggtgtgtgtgtgtccttcgcacccatgcggggtta

SEQ ID NO: 325816 - DNA, 292 bp, Zea mays
aatccccgctcgacccacgccttcgaccacacatacgcttatcctgataaactaaacgcacataacacataccaaaaaaacttgcaaattttaaaccaatctatcccctccacacttccaaccccatctttccccctcatctctctactccaacgttccttacctacaattcaaagccctgtcttactatagatcaaccctgaaaaaaatctacctttcccaaacataattctcatcctagacaaacaccttcatccacctctattaaaagcgataaaaaccactcctattt

SEQ ID NO: 325817 - DNA, 71 bp, Zea mays
cccacgcgtccgaaaaaaaaaaaaaaataaaaaaaaaaaaaaaaaaaaaaaaaaaatttgtaaattaaaaa

SEQ ID NO: 325818 - DNA, 350 bp, Zea mays
cggcgcgtgggcttagctggtgaagataaaagctggccttgctgatcatatgcacaggcaaagactgatgggatccttggacttaacagtgcggcgataagctttcccagtcagcttgctagtcacgggattattgccaacgtttttggccattgtatcactaaagagcaaggtggtggaggatatatgtttctgggagatgattatgtacctagatggggagtaacatggacttctattcgaagtggtccagataacttatatcacacacaagcccaccatgtaaaatatggggatcagcaactccggaggcctgaacaggcaggaagcactgttcaagtaatttttga

SEQ ID NO: 325819 - DNA, 115 bp, Zea mays
tcgcggacgcgtgggattataaggcgcgaatctatccatctatctaatctactaacgcacggggatgcgtaacatcggcatgctgcgggcgcttgtcctggcgctcggggggggc

SEQ ID NO: 325820 - DNA, 285 bp, Zea mays
  unsure (1)..(285): unsure at all n locations
ggggaccctaactactgaaaatgaagtccgtactactacactcataagctatgggttgtcggttttatagaccctgtggacaccacacannacctgagccgattccttggcgaacattcagtgccgaccggataacactcaagagacgccaaatgtgtgtatgcaataaatggttgtgacgcataacacaaacgtgtttaataaaaagctgtctgcactcacccaatgtgtgtgcacaaatcaaaatttcgccctggttgctgtcgtggaaatatgttgaagagt

SEQ ID NO: 325821 - DNA, 308 bp, Zea mays
  unsure (1)..(308): unsure at all n locations
cgcaaacntccgcccacacgttcggtttctcgtccgcgaggaccatcatataactgtcgccttcctctcgttttaaacaaaatctgtctctgcacggggcgtcaacggcaggcggaaccacacgatcggcggcggcgggcgggagcacctggacttggcggtggagtctgtcatacgctgggcaggcacgcaccatcttgtgcaagcgacctcacttgagtcctacctcgtatgctagcactagcaacgtggattcgagcgccggagccgtcaacgatcgatgggtcgaattgttgaaaaaaaaagaa

SEQ ID NO: 325822 - DNA, 331 bp, Zea mays
  unsure (1)..(331): unsure at all n locations
gacccacgcgtaacgngcgacgcgtccgnccacgcgtccgcctatgctttcgtatcaacgtgcccattgngcctgtctctatatcaccatgcgtgtgaggctctactcctaagtcggttggtgtctggagggatgggaccaaacagaaaggagcaagaactttggggcgcaaggactgcgctacgatcttgagatatggtccatatggatgtcatgataacgatgcatgtacagaaaacctgtccgtgcctattcagtaatgntcgtgatgagtatcttccatcaaacacatgtaaaaattctaaaggtaatcttgattagtagcaaggga

SEQ ID NO: 325823 - DNA, 125 bp, Zea mays
cggaaacccggggggacccacgcgtccgggcacgcgtacgcgagcctgcattgttctccaggataaaaagaaaaggacaaacagtgtctaatacaaaaagaggtgaagggacatccaaaaaatat

SEQ ID NO: 325824 - DNA, 78 bp, Zea mays
agaacaaaaaaaaaaaaaaaaaaaaattttaaaaaaaaaaaaaaaaaaaaaaaaaaagggaggttttaaagaaggggg

SEQ ID NO: 325825 - DNA, 429 bp, Zea mays
ccagatcatccaggctcccagaatcagcctaagtgtgtcgtgccagcatgaaaggcacggccacggcgtgcccgtgtcggccccgaaaaatcaaatacacaaacttataggctcttaagcgtgttgcgcggacgggaggggtgtaagaggagcctcagaggggaggaaggagagggaagcggtggctgggaggtgagcaggtggcgtcgtgatggatgggggcaagggcgagtatgggagaggtgatagttggagtcaggagatggggatgggatgagcctatctcgacaggagtggggagtttagtaggttagactatagttaatgcgggagccaaatggctaggagaaaatttacctttgccataagcctttttccctcttttgtcttgaaggcctaaatccctcatttgggcctattggtgtttta

SEQ ID NO: 325826 - DNA, 428 bp, Zea mays
gaattatccgggccgacccactcgtccggccggaacgagatcgctagcatactgagctttaggcctacaggatgaagacgttcgaccggggaccggtcttcttcctccgggagtggaaacgcaactcgcaccttcctcacgctgttcatcatcaccggcttcatcatcaccaatatgacgaccaacttcaccgaggaggacctcaagaactccaagttcgttcaggaacacaagaagcgctctccaaccgggaatcgtccaaatcgcctgctgatgaaaaattagcccgctatttatcttgtctttattcttatctagatgcgtgcactctattgtaataatgcaataataagcaattggattgatccaacaatatccggctttttgatttgatccgattcccttacataatatgttcctcttttctt

SEQ ID NO: 325827 - DNA, 382 bp, Zea mays
cggacgcgtgggggcttctcctccccctcttaccaagtcctcctcgggttagggttcctgagggttttgtggaggggcgatggcggcggctgatgtggagtaccgttgcttcgtcggcgggcttgcctgggccaccagcaacgagtcgctggagaatgccttcgcctcctacggcgagatcctcgactccaaggtcatcaccgaccgggagacggggaggtctcgcggcttcggcttcgttaccttctcctccgagaactccatgctcgacgctatcgagaacatgaacggcaaggagctcgacggccgtaacatcaccgttaaccaggcccagtcccgtggcggtggcggtggccgcggtggctacggcggctgtcgcggc

SEQ ID NO: 325828 - DNA, 228 bp, Zea mays
gcattattttgaatctcaatattagcatgtcaatttgcaaaaaaaaaaaaggaaaaaaggaaaaaaaaaaaaaaaaaaaaaaaaaaaaaaaaaaaaaaaaagggaaaaagaaaaaaaggaataaaagaataaaaaacgagagaatgagaataaaaaaggggggctatagtgaaacgataaatgcaatatactggccgaaggtaaacaatgtattgactgggaaaaccc

SEQ ID NO: 325829 - DNA, 334 bp, Zea mays
caaacctgcagcaaaaaaaaaaaaaaaaaaaaaaaaaaaaaaaaaaaaaaaagaaaaaaggaaaaaaaaaaaaaaaaaaaaaaaaaaaaaaaaaaaaaaaaaaaaaaaaaaaaaaaaaaaaaaaaaaaaaaaaaaaaaaaaaaaaaaaaaaaaaaaaaaacagggcaaccaaaacaaaggaaccaacatctgtaacacctccttgaaaatcaaaacccttttgatacgcccaaaaaaaataaaacacaagcccggagtttcaacccaaataaattgaaaactctttatggaaaaaaaaccaaaaacaggagaaaaaatgcacattatacccaat

SEQ ID NO: 325830 - DNA, 262 bp, Zea mays
gtgtagtatttgttgttatttttatcaagattatttctcaaattgtagttttccatcagggtctagttactttttcttggtgggtagttagtggggacacatattagcgcaccattctttttggcagaatatttagcaagtttgtatacttcaggggtatgcagaatgaagtgctgttgcaaacttgctgtgtaactgccaatggcacaattgtttgtattttgcactataatgttgcacaaaatgtcggattgcaatcctc

SEQ ID NO: 325831 - DNA, 293 bp, Zea mays
  unsure (1)..(293): unsure at all n locations
ggatagaagtgattaagtgaagcgttcaatgttcagtgaagtggctgaaaacaccagacgaactgaactgataactacatgaccttcgaaggtcgtttattactgttgtctaagcgggcctgacatcttagtatattacacgagtaaaggaacaaaggagtgcgggaagtgggccagataagcaaacaattcttttgaatccatgtatcatcacgcagacatcttagacgctaggaccgagncttgcctcaaatgaaagccgatgaagaaaatggacaggaacagaccataat

SEQ ID NO: 325832 - DNA, 435 bp, Zea mays
ggagactcggagtcgggggcgccagcgtctcgcctcgccgtcagcagcagcagcagctgcacctccattccacggcttccgtcgtgcgcttcgtctgcacccacaaaggcgacggcgacggcagggggaggagatgaagctgaagcagctggagggcctcttgggtggcctgacccagttctccgaccccaagctggagctggagcagtatgcgacgggccctcacatcgcgtcgcggatgctctacatgacatgttcttggtattgatattgacccacagtcacttgaacttgctcaagaaaatgctgctgatctggagctggacatcgatttagtttggtctgacataaagaacttaaatctgaaagggaagagcaagtgggaagttttgtccttagctgaccaaacaagttcggcaacatatacctcttttg

SEQ ID NO: 325833 - DNA, 354 bp, Zea mays
ctctaggaaggcaaaaaagagagcctttttcatcttggtttgctaaaccagtttaatgatgaggttttggacttaccatgctttctgatacatgtaattccaattgagaatcatgatccgacaaattccttcgcattccatgcaccaccttcatgttccccacatcaaaatctgggtgaaattccgagatccatcacatatcagtacataatatgatgatcccacagctggagattagacagagatctttcgaagatgctagctgcaagctccaactgctatgatatggacaatgccaaagggacaaataaaatgcaacacgaaggaaaagatgaacagtactgggtacacccc

SEQ ID NO: 325834 - DNA, 424 bp, Zea mays
agaatatggctcgcttaagcacgaacagtcaactaacagttctgttgccccaatggtgcggggtccaccaccccagatgacagctagtgttccggtctccttcccagatcacaccactacttttcacaacataaactctacactgccgcctccacctgttctgaatcgtctgcctcctccagctattccttcagcagttaccatcaatccaccagcaagttcaagtcaagcaattagctttccaactggccgaaccagcggcttgaactattaccagaccctgatccatcagcatggaggggagaggcatgagccacagccacttcaacagcatggaatgcactttccaatgcatcatcgcactgtcgcttcccagtctagcgccactgatattgtcagcagtggtactatgccagctagggat

SEQ ID NO: 325835 - DNA, 378 bp, Zea mays
aattaactagcttcttctagctctagctaggctcgtctgctgcaagaaggtaacagcgcaggcatggaggggaaggaggaggacgtccgcctgggcgccaacaagttctcggagcgccagcccatcggcacggcggcgcagggcacggacgacaaggactacaaggagcccccgccggcgccgctcttcgagcccggggagctcaagtcctggtccttctaccgcgccggcatcgccgagttcgtcgccaccttcctcttcctctacatctccatcctcaccgtcatgggcgtctccaagtccacctccaagtgcgccaccgtcggcatccaaggcatcgcctggtccttcggggcatgatcttcgccctcgtctact

SEQ ID NO: 325836 - DNA, 242 bp, Zea mays
ccgacgcgtgcgccgacggctgacaccgatgttgacactgtggtggatgacgttgacgagggcactagggagaacgtcatctaagatggggactttcctatggagattagtatgagagcatgagatatatcatgtgggccgtactacggatgctaccattcatgctattattcaaattctagttctactactagctctactatcgtctatgctatcttgtagttaattgcgttgtcagttgc

SEQ ID NO: 325837 - DNA, 370 bp, Zea mays
accacgcgtccgctagttctagatcgcgagcggccgctcgcgatctagacgaaatgcttgggtgaccctagatatcaaccgatgcacgatccatctcgatcctgtgatcgaataccggcgtaggtactactaataaagtcaggccccgtcaaatgctttacatggtgattgaagtctggagcttctcagcaccaccatatattgtgttcagttcttgtgtttattgccatagctaccttttttttctctgatctacgagctagacgtagctttgtgcttggagattccactactatgtttcctctgtcctgtgtatgctttaacggagatgcacgttgtacccgtggtaatatatataaatttgcgttgt

SEQ ID NO: 325838 - DNA, 298 bp, Zea mays
  unsure (1)..(298): unsure at all n locations
cggacgcgtgggcaaaatcctccgaaccccgccgccgacgagcgagctatggcgctggcgcggcggctgctccgagatctccttcctcgataactccgccccgccaccgccaccaccgcctcctaagccattcaccattgaggaccgcccgggcgagcagtgggcccgcctgcgccgcgtgttccctgcggccgagggggaggaagaggaggtcagggtggacgccacgttggtcgacggcgcgctccctccctcccgctcgggcgcggacacgggcggtnccgcccagatgcatatc

SEQ ID NO: 325839 - DNA, 255 bp, Zea mays
cccactcgtccgcggactcgtggaaaaaaaaaaaaaaaaaaaaaaaaaaaaaaaaaaaagggaaaaggaaaaaaaaaaaaaaaaaaaaaaaaaaaaaaaaaaaaaaaaaaaaaaaaaaaaaaaaaaaaaaaaaaaaaaaaagaaagaaaaaaaaaaatataaaaaaaaaaaaaaaaagtacttgcgagccaataaatatatataaaatggcctaaatgcaaaaaaacagcccctggtaaaacaagggcacaacag

SEQ ID NO: 325840 - DNA, 256 bp, Zea mays
cccacgcgttcgcccacgcgttcgcccacgcgtccgtctgaatataacgaggaagataagcgaggataaccagagtgtgctggtttattgcttctcatgggttgtaattttcgttgttttactcgttatgaagaccgtgtgcgtgctgatcctgggctggatcctgtttgactcggtcctcaccgtgaagaacatacttgggatgctgctcgccgtgatgggcatggtggtctacagctgggccgtggaagcggag

SEQ ID NO: 325841 - DNA, 246 bp, Zea mays
cggacgcgtgggttgaatttgaagcctatggctgccaatatcttgtggaataagatatgtgtgtaatctggttgtggagatccaaaaatccacgcagatggaaaaaaaaaaaaaaaaaaaaaaaaaaaaaaaaaaaaaaaaaaaaaacaaaaaaagaaaaaaaaaaaaaaaaaaagaaaatagagagagagaattatctggtacatgtacacatgagcaacataacttgtgtaaatgatgaattat

SEQ ID NO: 325842 - DNA, 336 bp, Zea mays
  unsure (1)..(336): unsure at all n locations
cggacgcgtgggagcgaattcacagcagcaaacagtgtgaatcctgcaatctccaaacccaagcccggcggcgagatccgcgcggcaggcggacggggccgctcgaccgccttcgtgccgtgcgcgccttcccacctcttccgttctccgctccccgcgcccgcgaaggcgaattgctgaattgagggtggtggctcgtgcttgattttgattttgggggtcggtttcagttccaattcatgacggtgcggccggggtgggtggtgaaggtggcgcatggctcggcggnngngtggcagcgcgtggcgtgctacccggagacgctnccggctgacc

SEQ ID NO: 325843 - DNA, 224 bp, Zea mays
cccacgcgtccggtctgaacactatttgctcatgtttctggaaaaaaaaaaaaaaaaaagaaaaaaaagaaaaaaaaaaaaaaaaaaaaaaaaaaaaaaaaaaaaaaaaaaaaaaaaaaaaaaaaaaaaaaaaaaaaaaaaaaaaaaaaaaaaaaaaaaaatgacaaatcaaactaaaacaaatgaacataaatcaaaactaaacaaaataaaatcttagaaaa

SEQ ID NO: 325844 - DNA, 107 bp, Zea mays
aaaaaaaaaaaaaaaaaattataaaaaaattaaaaaaaaaaaataaaaaagggaaaaaagaagaaaaaaaaaaaaaaaaaaaaacaaaaaaaaaaaaaaaaaaaaaa

SEQ ID NO: 325845 - DNA, 298 bp, Zea mays
cggactcgtgggtcttaactcaaaaaaatttataaaaaaaaaaaaaaaaaaaaaaaaaaaaaaaaaaataaaaaaaaaggcaacccctttaaaaaaatccacaccttacttacccatccattcaacatcataacattttctataattttacctaaatttaatttacttgccttacttttacaacatcttaacttgtaaaacccttacattacccaacttaaatacctttcataacatccccctttttccagcttgcctaatatccaaaattcccaaacctatcgtcctttccaacaat

SEQ ID NO: 325846 - DNA, 306 bp, Zea mays
cggacgcgtgggcggacgcgtggtcggacgtttgggcggacgcgtgggcggacggggtcgcggactcgtgggcggacacgtgggccgacgcatgagcggacacgtgggtgactaaggagctggtacctagttcacacgaaatgtggactgttaggaaaggacgctatctgggtaggctgctgcgcaacacattgcgcaagaccgcacagagtctgagctatcacaaagcagctagtaacgctgaatatgaagacgacctgattggacatgctgttcgttagaggtagaggaagaccgagatttctg

SEQ ID NO: 325847 - DNA, 399 bp, Zea mays
caaacgccggcggagtcgtcagtcgtgcgttcccgtcccgttctgcccccacctggcctggggcgactccgtcactcttcctcttccgttccatttcaagatccctgcagccgtccgttcatccatccatccatccatccgttaagaggagaggggaagccggccggccggccggccggtggagcggagatgagggggcagacagagacaggcctgtggcgaggaggcgacggcgctgcggcgtggtgggtggccgtggtggccctgcagctgggccattcactgagccgcgcgcgggctgggctgctggagtccaacccgggcctggcctacaacttctaccagagcagctgccccagcgcggagtccatcgtccggagcgtcacctgggcgcaagtc

SEQ ID NO: 325848 - DNA, 196 bp, Zea mays
gccaagaggtgccatccataatgatatctcaggaaattgctaggcagcaagagtgacattagaactgaagccaacaaaaagatacataagagctatatacattgagacttatgactaactgtaaaaaattcttaccagctaaatgctgacatgatgaactgtaatgaaccctagagcacctttcaatggactggtt

SEQ ID NO: 325849 - DNA, 360 bp, Zea mays
atgtgagccggcatcttcctaaacatacgctctgttttctcgttcaccaggttctccgtagggcgaactcgatagctatcaaatccaaatctctgctttggatctacagttcagctacttcttcggctgcctcgacttgacaaccctctaccaattttttcaaaacgaacttagcacctacaaacacgtacttgattcccatattatcctcaatcttcacacacaaaattcacaagacttctgattaagaaccttctaaactgatgatgtcatacctaacgcacatgctggcataaacagctaacatcttgaatgacctaacatcactctcaactagttacactaactcagttggcttct

SEQ ID NO: 325850 - DNA, 190 bp, Zea mays
cggacacgtgggcggacgcgtgggcggactcttttggtataggcagtagaaaaaaaaaaaaagaaaaaaaaaaaacaaaaaaaaaaaaaaaaaaaaaaaaaaaaaaaaaaaaaaaaaaaaaaaaaacaaaacacaaacaaaaaaaaaaaaaaagaaaaacaaaaaaaaaaacaaataaacacaatgacac

SEQ ID NO: 325851 - DNA, 269 bp, Zea mays
ctctccctcacctctctctctcacgcctcgtgctctctcactcttatctctctgccccctggcgtcttgctacacacacgccgagcgccaggccggctcctccgcgccgagcgggcccaccggcggccccaccacgacgccgcggcatcctgccctgctccggccatccgcgccaaactaggtagcccgagccgagcgcgccaaacgaggccgcgatgtcgcgcagccgcccaacgccaaacgcccagcctcgcctagcgcgcatgcag

SEQ ID NO: 325852 - DNA, 259 bp, Zea mays
cccactcgtccgggaggtttagtttttcgtgtaacgctagcctaagattgatcgcgaaccggtccatttgaagaatcatgaccctaacagcattacacaaccacttcaaacctgaatgctctgacccccatgcaactgttacactttccctcctccaagctctagctcacattgcagaacacaatcaagacatcttgacaactcatcttcaccaaatcgccaccaactccaccaccaaaccttatgacatcacgacgtt

SEQ ID NO: 325853 - DNA, 514 bp, Zea mays
  unsure (1)..(514): unsure at all n locations
ggtccgtgaattcctcgtggtcgactccacgtcgtctcgctttcatnntcctgttggagggggtccttactcaaacttcatgtatnncagaaaaactctttgcannttcggtgcgtgcgagcaagtattggtgccatctctgcaaccagggtaccctcagtggtcagaaaatctttgtctgagggctccannagatatgcttctgtgatattcggacatnncttaggaaatcgagttcctgcagaatatatgccctcggaaattcgcaaaactaccagtccatcaatgccttgcatnggagatacatctgtggcctcaagnagaggaaacgctcaacgatccccttcttccttttcggattagcccgttgataatccaacctcgaataatgtaaggcataccaaacatttcttcgaaagcctntttcaagtggtgccgagatgtgatgtggcgaaggattttcttggctcgaccctttcatttcgtcgatctcatactattcttattctacatg

SEQ ID NO: 325854 - DNA, 157 bp, Zea mays
tcgcacttaaaaaaaaaaaataaaaaaaattataaaaaaaaaaaaaaaaataaaaaaaaaaagataaaatttaaaaaaaaataaataaaatacctataaaaaaaacaaaatactacattaatcctccattatatagactaaaattaataaatttaaa

SEQ ID NO: 325855 - DNA, 60 bp, Zea mays
aaaaaacaaaaaaaaaaaaaaaaaaaaaaattttaaaaaaaaaaaaaaaaaataaaagta

SEQ ID NO: 325856 - DNA, 238 bp, Zea mays
cggacgcgtggggaatgcttatgcttcaatgatccgtactcacgttaacttgtcccatgcggcttcacaagtcgcaaccctgcctgctgtacagtagtaaccatgcatgctgtagtctgccctatatgttgacgctgtcgttgtacctggcaacgtgtaattaactgccccggagacatctgtttttgccatctttaaaacgtatggatctcaataatatgacaagagttgcctgctt

SEQ ID NO: 325857 - DNA, 306 bp, Zea mays
tcgcgaactctatactccataacactattccttttattaatgtcaaaaaactaatactgaacatgtccatcaaaaaaagcgatacatctactaaaacacaccaacaaaatatctaaatcaactgaaatgcctgtaacctgtattatccatagcatagctcactttcaagtattttgctatccttaacattgataagacctctttctttacaccttctcttattccgtattcaatgcatataccttaaatttacccaactttacaggatttccaactgattactttaaaccagattcactttttata

SEQ ID NO: 325858 - DNA, 124 bp, Zea mays
gacccacgcgtcccagcagctctagcgcgactccaactttaactttttccaactccgacactctcacaagagacagcgaattcctacagcagaacaacaacctcctacactcacagcttaacat

SEQ ID NO: 325859 - DNA, 290 bp, Zea mays
cccacgcgtccgaaaaaaaataaaaaaaaattttttataaaaaaaaaaaaaaaaaataaaaaaggggggattttaaaaaacattaacaacactaaaaaaaaaacaaacaaaacaaaaaggcccgcttttctattggttcctagcttacttactcttgcttgcatcctaatacctttattctagtgccccctaaatccttttgattggccctttttttccaactttatccctgggaaaaccttttcttttcccactttattcccttttctgcccttgctcctttcccattt

SEQ ID NO: 325860 - DNA, 451 bp, Zea mays
  unsure (1)..(451): unsure at all n locations
gcgaacccgccggccgctgctccccacagaatttgtcgtacaaatcgagcaaggctcagccacggcccagtctcagtctcatacctcatagagtccaagaattgttgggaattagcagtccgcgcatgcgttcttcctctcctcctagcatcccatctcgtcgtcgcccagcccaccattgttgttgccgttgatatgttcgcgtactgctgctatctatctgtcctccttccaccgtttcttgttgctgatgacaaaggttagagccgtaggtagagatgatatatgtttagaggtgtacacaaggaatngtgactcgacaaaactttctcggcttttcaccatcgtgggaggacgacttggatcgggccaaaagattgcagggccgagacccctctgctcttgaacgatgatgccatgcacgccgtccgtcaaagaagtgatgcaacca

SEQ ID NO: 325861 - DNA, 126 bp, Zea mays
gccagtttaaagaaaaaaaaaaaaaaaaaaattttaaaaaaaaaaaaaaaaaaaaaaaaaaaagggaaaaaaaaaaaaaaaaaaaaaaaaaaaaaaaaaaaaaaaaaaaagggggggacgttttaa

SEQ ID NO: 325862 - DNA, 330 bp, Zea mays
cataacacatacacacgtacaaatattataaatttaaaaaaaatctaaacataacaatagctatgttcaatataaccaaaagcatatacctttgcataatctatgctaaataacttaccatattcatcgaatcatatatagacttatacttatttcttagaaaataatgatccctcgactcaatagatatatattactcacatcattacccatatctatcagcttacacttcaaaaatagactgatctgaccattaacatatcagaacatagatcatatatctgacccatacatacttcgctgaaacaacttgtatttatgcttcatgct

SEQ ID NO: 325863 - DNA, 341 bp, Zea mays
  unsure (1)..(341): unsure at all n locations
cccacgcgtccgcccacgcgtccgctcttcttcaccttactaacaccgtgctagcagctcgctctgtcctgcaacaatggccgctcgctcctcctcccagcagctggtcgcggcggcggtcctggcagcggcgctgctgctgctggcggcgggggccgggacggcgtcggcggcggtgagctgcggcgaggtgacgtcgtcggtggcgccgtgcctcgggtacgcgatgggcagcgcggcgtcgccctccgcggcgtgctgcagcggggtgcgctcgctcaacagccgcgcgtcgtcngcggcggaccggcaggccacctgcaactgcctcaagagcatga

SEQ ID NO: 325864 - DNA, 405 bp, Zea mays
cagatgcgtgcattatggtttacccgagagcaaagcctcatcaggcgcggtcccaggaatccggcaaggaggagatcaagaagcacgtactcatctgccgcgtgaagcgctcacccagcagcgtgctctcgaagcggtcgccgttccaggagataggcaacatcagcttgccacggcatcggtgaggaccgacgagcatgggtggcgatgttgctctgcgacctgtgtgagtgatggggctactgcagcggaactacgaagggttcagctgtaagcgggagagagagtagcatcgtgatcgatctgatcagcatctacgcaataaataatttatgtatgacccactgatgaataacgaagcctgacttctcgtcagatcggtagtaataatcataagcagtcagt

SEQ ID NO: 325865 - DNA, 366 bp, Zea mays
agctggacagcaggaagagccttggagttctacgcgaggagcgagctagtgattacctcgggcgtgctgtgcacggaaagttacccagcagatcgatcggactaggcgggtatgacaggatccagaggttgctagccatggcggaggaagcatctgcgcctgcggcgggaacagaagctccgtcatggatgatgactatggtgttaggggtacacaagagcgatcacagctcttactcgctgcaatgatcactgctgcacttttttccgtcaagccatatcgcatcagtccgcctgctcgcgtcacgcgaaataccaccgacggctgcgactgtggccttgacggtccaaacgctatagatgtgct

SEQ ID NO: 325866 - DNA, 429 bp, Zea mays
  unsure (1)..(429): unsure at all n locations
cccacgcgtccgcccacgcgtccggacgatgcaaaaggttcttgtgtacattgttacaatgagttcaaacttcatggatctggaaccaaatacaacaaggatttcacagtttatactaaacagctccaggcataccctatcgagcaactatttggccacagttgctccaaatacttccaaaagcatggtttttgatagaaattggcagaaaaaggccattgtttcagttatggaagctggtggtgtcaattggttagtagaacttctaagggttattcgaagattgaatttgaaagagcagtggactgacttgtcactccactntataactttgtactctctgaagtcaactatatctgaaaatgttcgtgcacaaaatcatttcagaagtatagggggaactggaggtctattaaatggactgggact

SEQ ID NO: 325867 - DNA, 327 bp, Zea mays
tcccacgcgtcctcccactcgtccgtccactctttctttaaaaaatatgcactggggactgggatcataaatataacacagagagtgtgtaagaagatgaacctgaggatacacgaacatacatgaacaatgaaccaacctataaaactaatacggaacacttttgtactggataatgaaattagctagcccatatacaattagaacattacaaattctatgaatgctacaaaattttaaactgtaaccatatcaaaaaaacttactacaatctgtatcttttaaaaatagaatagctaaaaacatttaagactaaacctactttga

SEQ ID NO: 325868 - DNA, 80 bp, Zea mays
aaaaaaaaaaaaaaaaaaaaaaaaaaaaaaaaaaaaaaaaaaaaaaaaaaaaaaggaaaaggggaaaaaaaaaaaaaaaa

SEQ ID NO: 325869 - DNA, 242 bp, Zea mays
cccacgcgtccgcccacgcgttcgcccacgcgtccgcccacgcgtacgcggacgcgtgggataaattccgtgaccagaagctaaaaaaaaaaaaaaaaaaaaaaaaaaaaaaaaaaaaaaaaaaaaaaaaaaaaaaaaaaaaaaaaaaaaaaaaaaaaaaaaaaaataaaaattaaaaaattaaagtaaaacaaaaatgaaaaaaatgaacttttttatacagccacctaaactggaaaaac

SEQ ID NO: 325870 - DNA, 169 bp, Zea mays
acgcccacgcgttcgctcacggctcagtatcactctatgctcgtggtcaatgtacttggtacgggggtgtgactactgtacccagaatgactgctacagtgattgtggattccttccaccactgttgcctgaccaggtccaaaggcttaagcacctcatatcgctaact

SEQ ID NO: 325871 - DNA, 446 bp, Zea mays
gggttggcttctcctccccctccggttcgggttcgggttcgtgaggttctccggggttcggtttcgtgggtgagcggatcgagatggcggcgtcggatgttgagtaccgctgcttcgtcggcggcctcgcctgggccacggacgaccactccctccacaacgccttcagcacctacggcgaggtcctcgagtccaagattatcctcgatcgggagacgcagaggtcccgcggcttcggcttcgtcaccttctccacggaggaggcgatgcggaacgccatcgagggcatgaacggcaaggagctggacggccgcaacatcaccgtcaacgaggcccagtcccgcggcggctacggcggtggcgggcgccgtgatggcggcggcggctacggcggtggcggctgcggctacggtggcggcggtggctacggtggtggtggtggcggc

SEQ ID NO: 325872 - DNA, 321 bp, Zea mays
gtggccccggacatggatcccccctcgccgagggtgtccggctgcgccttatgagccgtcgggcgcgggggctctggcggtactggccgcagggcacaggcacgccgtcggtccaagcccaggaagaagtgacggcgtagcaacacgtacgtacgtgcggtacgttgttggttgtgccatctgtaaagtccgggccatggttgttcgtgcgtgtacatgtttactatactaaatactatgggcatatatagatgagcttgctactcggtgatcggtatacgtacgccattatttaaggcaggatagttcctccttttttgg

SEQ ID NO: 325873 - DNA, 305 bp, Zea mays
cccacgcgtccgtccacgcgtccgcccacgcgtccgaaaaaaattataaaaaaaaaaagggagaaataaaaaaaaaaaaaaaaaaaaaaaaaaaaaaaaaaaaaaaaaaaaaaaaaaaaaaaaaaaaaaaatgggcggactgtttaaaggatcctattttactttcgcttgcttgcaattaatttgtttttttttagggttatttaaatttaattaactggccttttttttacaacttgctgattgaaaaaaccttggattttcttattttaattggcttgaaataaatctttttttagctggtt

SEQ ID NO: 325874 - DNA, 343 bp, Zea mays
tcgcccactcgttcgcccacgcgtccgttcactcgtccgccaaatattaactttgagagtctaggcaaaataaaatataacttatactttgagtggtagaaagtaattatttaagagtaaataaattctaatagttatgtgtatatcatctattgatttgtctaccttcattaattacagtgtgtactttctttgctaagctaaaattttcttgtcaacatgaatattaagtagtttacttgattgaagagttaaattatttttgaattgcataaattaatatcagaaattattaagtcatttggcagactttttctgagatcaacaaggctatgatatttcc

SEQ ID NO: 325875 - DNA, 240 bp, Zea mays
cccacgcgtccgcggacgcgtgggcggacgctttggggcagtagagactgtcagaggcaggcgcccttattcaactaatctggactgggctccctgcttatatcactacaatattatactactagtattggtgcttgatatcagtgtgtggctgtgctaataccagtgtaatactggttctactataatacagtcgtatcaggcatggcgtgcatcaagactggttgtgatagtagcaac

SEQ ID NO: 325876 - DNA, 249 bp, Zea mays
cccacgcgtccgcccacgcgtccgcccacgcgtccgcccacgcgtccggattctaaatttgggaaaaattaaaaaaatataaaaaaaaaaaaaaaaaaaaaaaaaggaaagaagataataaaggtctgggcgttctttcggttccttgcttgctttctggctgcttgcataggtgttatctattttttattgagtggtcgtttttttttattgtctggtcttttataaccttgggattgcctaatttat

SEQ ID NO: 325877 - DNA, 417 bp, Zea mays
ccgtcgcttaaccgtctccatgagagcgactctcatatttgcatgttaagctgatcaggggtcacctttgatttgcctaaaaaatgacatggcttactccgttcgcgtgatcaatctgtgatgcttccactttgagaactttcgactgaggacatgcatcacgaactttgcatcttgctaatatgttctatttcaccaatgtctacgcctcatcctacaggctctgtatataagtcctttgtccaaagctcggtgctcatagctagatgtggacatcatactatcattgtccatgggactttcaacaacactgtgcttatttcattgcacacagtgatatctgcatttgctgacagctggaacccttacatcatcgtggcacgtaaaattctattggaatcatgcctattatagttc

SEQ ID NO: 325878 - DNA, 439 bp, Zea mays
ccggctcgttcgcccacgcgtccgttcactcttccgcccacgcgtgcactgtccggtcagattctttcaccctatacagtgactctatgaacatcttccgtaagaaggaattcacctgatctcatatttcaaaagtagtcagtgcttgatgaataatggtcttgcaatgcacgactcgatggtactaatgaaaacaatgcgcttgtattccttgaaggaactatctctttgtcagcacctcataatttgtccacttcaaacaatctgatgcttgaatatacctgcttctgaattcacatctaggcttactgacatcaattgaacctcttgaaatatatttaattatattctatcctgagagtttgtattttaaacaaccttttcctcaattaattacaaatatttaacccatttcttaattcaaattaatttatttaaa

SEQ ID NO: 325879 - DNA, 311 bp, Zea mays
cccacgcgtccgagctcgaggcacaggactctttttataatttatccatccatggcttggtggaattccaatagcagcagcaacccgctggaagccatgggcgccttcttctcgaagcaggtggaccggcggaagttggtgaccaccgagaagcgggcgctggccacgcggctggcctccttcttcgtcacgttctctgggtctgagcaccggccttcgtaccttaagctgttttctgctgatctgggcgcctacttgtagtactcttatcatgtgtgacatctttttctctcaattttttttttattttt

SEQ ID NO: 325880 - DNA, 86 bp, Zea mays
cggacgcatgagctgaggagggccattactaatacagatgacgagcgactgaaaaagccggcactagccggcctgctgaattaagc

SEQ ID NO: 325881 - DNA, 209 bp, Zea mays
tacccgacccaactcatctcgtcagacctctcaaaaccgtcaacagtctttttttttttatacttctattttaatattatgattgctatttcttcaaatgaacctgaccttttccggatcattgttgtcacattttacaatatcctacacaattaaaccatatccatatacacattgtaccagctgctggaatttgcaagaccacctat

SEQ ID NO: 325882 - DNA, 380 bp, Zea mays
tcgcccacgcgttcgcccacgcgtccgcggactcgtgggttttttttttttttttttttttgttttgtttttttttttttttttttttttttttttttttttttttttttttttttttttttttttttttttttttttttttttttttttttttttttttttttttttttttttttttttttttttttttttttttttttttttttttttttttttttttttttaataaaaaaaaaaaatattaaataaaataaaaataataatataaaaaagatatataataaatatttttatataaatattatttttttatataatttttatattatatattattttttttttttttaaaatttatttatatttttattttttttaaa

SEQ ID NO: 325883 - DNA, 220 bp, Zea mays
agaattgttgatagcctgttttggggatttgagggcaactgcaaaaaagagctgtatggcaacgcttgcagtagaatcttggatctgggtaaaatgagatgtccatgtaagcatttgatattagttttttcagttatattgactaggaggatgtccatgtaagcatttgatattagttttttcgttaatctcgagaatgttactggtgccttttactgtt

SEQ ID NO: 325884 - DNA, 330 bp, Zea mays
cccacgcgtccgttttttttttttttttttttttttttttttttttttttttttttttggtttttttttatttatttattttttttttttttttttttttttttatttttttttttattttttttaaattttttaaaaaaaaaataaaaaaaaaaaaaaaaaaaaaaaaaaaaaaaaataaaatttttaaggagaaaaaaaaaaaaaaaaaaaaaaaaaaaaaaaaaaaaaaatttaaataatttacaaaaaaaaaatattataaaaaaaaaaaataaatttataaacaaaaaaaaataaaaaatttaaataaaaaaaaaaagtatttat

SEQ ID NO: 325885 - DNA, 112 bp, Zea mays
ggccgccctttttttttttttttttttttttttttttttttttaggagcaggcagctccggtagttctatgttggaaaatgttcttttcaaaattaaaagatgatttaactt

SEQ ID NO: 325886 - DNA, 351 bp, Zea mays
ggcttgtttgattggggaggggacatggctgatggggtgaaagagatgctagatgagtcgatcctcatggacgatgaagatacttatcaaagtactggcgtatgcaaattacgtaccatatgcgcataacttaaagtccgcactgacaagccagagtccctactgccacatgatgcccgggatctgaaactctatcaccagcacttcggcaaaatgttgatcgattgactaaatgctctgtccaaagaactcactatttgactgctacgatcatctgggcaccagcgcatattcagcacttttaagataattcccgacgacaggttataccaggatttgatggcgattgac

SEQ ID NO: 325887 - DNA, 117 bp, Zea mays
cccacgcgtccgaaaaaaaaaaaaaaaaattttaaaaaaaaaaaaaaaaaaaaaaaaaaaagggggaataaaaaaaaataaaaaaaaaaaaaaaaaaaaaaaaaaaaaaaaataaat

SEQ ID NO: 325888 - DNA, 315 bp, Zea mays
caaaatatgcaccctgatattgtctccacctacactcaatgaaatatcccacgaaaattgggaagccatttttatattaaaccactgcacacctttttcccacaacaaataccctatgtcttctatatacccacttttaattttcacctcacaaatactctctgtgtctgctattctttcaaaaataactccacatttttatacaccacaaccccaaattcaactcaaaatgtacacatatcaaatatcttattcacaactctatataaacacacattctacaatatatatacactcattccagtttcatcccaa

SEQ ID NO: 325889 - DNA, 456 bp, Zea mays
  unsure (1)..(456): unsure at all n locations
gggagcggcggcggcatggctacgccgcactgcttctccccaggctggagatcatggtcgtcgtcctggcgatgccgtgcgtcgcccaagcggcggcggcgctcatcaggggcgggaccacgtgcggcctggtggtcgggatcgtgctcaccgccgtcctgacgtcggtcctggtggccctgctgctgttcctgtctctgggcatcaccatgggcaagctgctgcagtacagggaggtgcaccatgaggaggggcaggaggagtaccactggtaccaggatctggcccgccgcgccgnctgcctgcccaggcttggcccgctcttcgaggacctgcgcggcccgcccaagtacatgcgtggcggtggaggcggcaagcgccgcgccgaaggcggcggaccagagcggcgggtcatcgcgtcggaggacgagaacgaggggtcgagggcgcccttgg

SEQ ID NO: 325890 - DNA, 444 bp, Zea mays
aaaatatgcactgagattttgtcttcacctacacataatgaaatagctagggaattttgggtaacattggtttggtttaaactttgcacggtttggcccacaacaaatgccatgggttttctatttgcccagagaaaactttcagcgcacaagtactcttggtttctgctttgcttccaattagaactgcagtgtttgagacgacagtaccataatttcaactaaagtgtacatcttcaatcttctttgcaaggctatatataaacacatgtaccatcatatatagattcggttggtggttgcatccaaagtagcacttctcatcctatgagtagtattccggtgtacaaccaacaggattggttcaccttggaaattatctcgagacaatttagaattgtgttgcactatagttattacatatgttgctttaaaattacaagc

SEQ ID NO: 325891 - DNA, 432 bp, Zea mays
  unsure (1)..(432): unsure at all n locations
cccatgctggtggcaaggacggagcaaatggcgacaaggctatgctgtcatcaagagatgcgagcgagagaccactgaaagctgagtggagacgctgaggtggcgaatcaaaaccccaaaccctccatttggttagtgcaactatttgggtcggtggatggcgtctgcagtttgctcaacttatttacagggttttgggtcatgccttttgtgatgtatagctgaagtattttcccggtttgttttgtttcccagacccccagacttacccctttcctttttcttnttctctccttcttctttctttcttttttttcttctttttcttttttttttctttttttcttttctctttttcattttttttttttttttttcttttcttccccttttcttttttttttcttttctcctttctttttttttcttttt

SEQ ID NO: 325892 - DNA, 221 bp, Zea mays
ttacaactgaattcgagaacaaacttatgagcatgatgtttcttttgcctgatttaaatgattgttattttacccatttatttaatcatttttaagttcattttgctgtacataataaaattgaaatcttttataaatcaatgaacaattttaaacaatatgattattataattctttttaattattttaccaaagatattctttttataatctacttttt

SEQ ID NO: 325893 - DNA, 318 bp, Zea mays
cccccctcccactccgggcagcagccagcatccagcaggcatggggatacccgtggtgggtggcgtcgcggcggcctactcgtgctcctcctccctcgccgcgccaccgagggccgccgccgccgcggcgagggcgccgagccgcgcgcacgtcgcggcggccgggatgtcctccagggcgtcctccttcgtcggtttctgctgatgcgacctttctgcggtggccgctattgttgcttgtctgtccattaagactggcttccatgaaatttgataggttctggtgttccaaaccgaaggatgaatcattgtttgtcc

SEQ ID NO: 325894 - DNA, 277 bp, Zea mays
ttcccgggcatgtcgacccacgcctccggttcaactcatggtccaaaccttaattttttctagctaaagaccttcagcataggagcaatgaaaggagttagcttggttctccatggatcatctggtctatctcatgaactctctaaagaatgcatatacattttgctcgagaaaatttaatgtgaacactcatgttcttaacaactacctggctgttcctcataaagccccaaaaagactttattcaagtgatggcgtctgctaaatatgcatttaa

SEQ ID NO: 325895 - DNA, 78 bp, Zea mays
ataccctacccgacccactcctcctaccccacttcctctcactcaaccttatattcttcctctacaacaacactaaac

SEQ ID NO: 325896 - DNA, 400 bp, Zea mays
ggataaagtgctaaactttaccatattaaatgcatacttgagtagagccgccattctcgcggtacgaggagcaaagctatcgaaggtggttggccgagcgtgaggaggggagagagtaaaaatagttgtcaatggtggggaggagacagaaaggagtttggtgaccaattttagcacagtttaacatctttggtgaagctaaagtgccgatgggtactaaactttagcacaacacttttagtcgccctgttgtttctttaatagctaaactttagtaaaaatgtttggtgctaaactttagcaaaggggaataaatgggtcttaggctgatgatttagctgggtgaaagctgaagacaattgcatgtcacgtaaaccaagcttggtagctcatataatgc

SEQ ID NO: 325897 - DNA, 355 bp, Zea mays
ctctatacatctcagaggaagtccagtttaagattcggcatggaaacactcttttgaaccgttgaagggatctgttcctctgagatgtatgagagtaatttgtagttatacaagattgcaatgacatgctggaagattaacatagacatgtacggatataacgaaagattaacatgtgctggaagcagtttcatacatacttgtgttgcagctgtatttaagagaatgagagatacaaaatcttttgagctaaattccatgacacaagtaacataagccccccggaacctaaaactttacctggattagggttcttcccctttaataaaaagatggtcacccttttgaacttgcc

SEQ ID NO: 325898 - DNA, 224 bp, Zea mays
aaaaaaaaaaaaaaaaaaaaaaaaaaaaaatttaaaaaaaaaaaaaaaaaaaaaaaaaaagggaaaaaaaaagaaaaaaaaataataaagaatactgattattataagagtacatgataaaaaaatagattatataaagtgagaataaaaaaataaaaggggggccggcttttaagaaccccaatgttttttaaatatgttgggattggtaatttttttttttt

SEQ ID NO: 325899 - DNA, 241 bp, Zea mays
tctgaagtacaccacggatgcttcatttgttaagcatattgaacagtctggagaaatagttgattcgatggtaatgtaggatatgcacacatttcatccactgggctttggctttattacatactctgaccctgctattgttgataaagtgatatatgacaatcattgttatcaatggatagcatgtttaaatttagagatccatacctaaaatgtttggtgcaatttatctttaatgatt

SEQ ID NO: 325900 - DNA, 185 bp, Zea mays
ccgactcgacccactcgtccgatcgcacatcatgaccaaacaccctacattactcgcacacaaacttacataacactcagggcatcctttcacatataacactcgcacacatattcagcaacctcaatccacacccaacaataactgctcaaaaaaaaacttataaacattaacactaactcacc

SEQ ID NO: 325901 - DNA, 234 bp, Zea mays
ctaaatctgacagtctgatttttttcccccgtcacacctgtgacctgtgtagctgacactgagctgtccttgatggagaagatgctgcatgtattgagctgatgttgtagccaaaaaaaaaaaaaaaaaaaaaaaaaaaaaaaaaaaaaaaaaaaaaaaaaaaaaaaaaaaaaaaaaaaaaaaaaaaaagtgaaaaaacaaaaaaaaagccacattaaataaatctattaataa

SEQ ID NO: 325902 - DNA, 162 bp, Zea mays
catcagagccatgccgttcaagagcaagttcttagctgccctggccgtgccgagacatgcgcagctcctagaaccggcgtattcctgtgaagtattgttgtctggccacgcctagtttctatgtcgattcctattaggcggctcttcatggctggtgctcac

SEQ ID NO: 325903 - DNA, 209 bp, Zea mays
taatcttcatttgattttatcttgttagtaaaaaaaaaaaaaaaaaaaaaaaaaaaaaagaaaaaaaaaaaaaaaaaaaaaaaaaaaaaaaaaaaaaaaaaaaaaaaaaaaaaaaaaaaaaaaaaaaaaaaaaaaaaaaaaaaaaaaaaaaaacaaaaaaaaatatataaaaaataaacaaaaaaaaaataaaaacaacaacaatcaat

SEQ ID NO: 325904 - DNA, 383 bp, Zea mays
  unsure (1)..(383): unsure at all n locations
actcggtctcggaattcctcggagtcgactccactgcgtctcgtcccacgtcgtctcggtatcgagngtgcgtcctttacaaatatcaacatcctgaggagtctctagcatcggcctgcgcaatgttgcggtcctttgggactcgaaggggtcggaagaaaggatgtgaatggcatgattcctgcttagcgactaaagtattacgagtatatctctctttcnggggaacctgatatcaagggatttgcaaggttaagtcatcaaccaccgaccgccgccaacctcaagcaagcttcctctgcacaaatgactcctgccattaatccagtcacacttattctcaaccaagcatcaatcatcgtcaaaatttgtccttccgctgg

SEQ ID NO: 325905 - DNA, 449 bp, Zea mays
cccacgcgtgcgcacacgcgtacgcccacgcgtccgaatgactgcaactggttggtcacgcaatggtggctcaaatgcttttccacgtactgtatctctatcatctgctggtaattacaacattaaccagtcgcttacaaggtcttccgttggttgcactgccaatggtgagcaaagtgttattactagcattgctccaagatttgaactcagtgcagcctgttgaagagcctgtgtccagttggacaagcagtggtgcacagcatgtaggtactgatcacaagcacacaggtgtaactttaccagatgttatgtctgaaccacttgtatatgcatcaatggttcaacgtttcagtcgcactgattattcgaaatgtctcaatgcacgagaaatgctgttagtgaatggactgaatactgttaacttaacttgaaatggctatttaaag

SEQ ID NO: 325906 - DNA, 417 bp, Zea mays
ctcactctcagctggtcgctcactcttgcagctccacccttcactcagtcttaggctcttagctctaggctctagctagccgcgccactccttcgtgtagccatcagccttctcatcgccaccaatggccactgccgaggtccagaccccgaccgtcgtggcggccgaggaagcgcccgtggtggagaccccgccgccggccgtcgtgcccgaggagtctgcccccgccgaggccgaggctgaggctgaggctgaggctgctgctcctgctgctcccgaggagcttccggcggccgagcagcaggcagccgccgagccggaggccgctgctcctgctggtgccgaggagcccgccgcggccgaaccggccgccgaggcggaggctgctgctcctgctggtcccgaggagactcccgc

SEQ ID NO: 325907 - DNA, 333 bp, Zea mays
cccacgcgtccgatgactgcgtcaacatctatgtgaaagaatggagagctagagagacgggctatatcagctggtaattcttgtgggtttttgcgtacgtgtcctccaaattacaagccccttttttgttgagattgtcgtctggtagtcagtaaacccgaataaaaaatgtatatattgttttggaatttgggaagtgaacaaaaaccttttgttcaaaaaaataacataccaaaccaaaaatttatatacacataacatgtagtacgttctatgaataataccaaaaataaaggactctatatattggatacttaataaaaggggttgcct

SEQ ID NO: 325908 - DNA, 344 bp, Zea mays
gtcgttctacatctcgagccggccctttttttttatgctgcccatctttttttagaggcggcaattccatccacgtacatatatacagtcccacaagctgtcagatacacctcaatacactccacctaacttcttacgctaaccttttcaatcagctatttaacgcatcccccaggacactccccaatacactcccctttacgcatacccaaagacactatatccatgcatcgacattattcctctcaataaaatcagagccaacaatctccgtccaaacctacacatctccataaaaaccttcataccctttaacaactgggccatacacgcctcctcatggt

SEQ ID NO: 325909 - DNA, 68 bp, Zea mays
acgacacatcagttttatacgaccacttatattaccgatgactctcttttaaaaatggagagatatat

SEQ ID NO: 325910 - DNA, 337 bp, Zea mays
ctctacgcgagcgggccgcttctgccatccattcgcgcgcggcgtactcggaaccggagagagggaggggaaggagcgcgagatggacaaggccaataagctgagcaccggagcgtgggagaaggctaccaagagcaggagccacgggttcacggcgctgatcgtagcggtggactacgcgttactgctcgtcttcgacggcttgctcgtctacctcgtcaggtcacggatcctctactccgccgccggctccgcctagaccgggccgcgttcgtggatctctctactatctttcacgttttttcggagtccatggctgctggagcaccgggatctt

SEQ ID NO: 325911 - DNA, 344 bp, Zea mays
gaggcggtggtgaagtgcccgcattgcctcagcgggttccttgacgagatggagaccgtgcgctgcacgcccgcggccgatgacggcgacggtgacggcgctgcggctcaagtgtaccccggctccgaccgtccgagctccatctgggcgcacgctattctcagcacggtcgacagctccgtccgacgccgtcgctaccggcggtagacggaggccggcggcgacgtctacgacgggaacgaccctgagttcgccctgcgccggcgttgcgtcaccgcgttcttgcggttcctgtacgagctccgggaccgacagctgcatcggctggaggctgctgccggggt

SEQ ID NO: 325912 - DNA, 394 bp, Zea mays
cccacgcgtccggttctagatcgcaagctgtcgccctttttttttttttttttttttttgtttttttttttttttttttttttttttttttttttttttttttttttttttttttttttataaaaaatcttttttttttcggaaattcccaaaaaaaaaaaaaatttaaaaatttttgcaacttttttttataattcaggataaaaaaaatttgtgggtttttttttcttttaaaataaacttggctttttaaaaaaaaaagggggggcctttttaaagattccaatttttctaccccttcttttgaaataataactttttttttagggcacctaaaattaatttacttgtgccgttttttaaaaatcttgacttggaaaaaccttgggtttcc

SEQ ID NO: 325913 - DNA, 317 bp, Zea mays
ctcacgcgtgcgcgtatgtggcccataacttttgctgatggctgattactaacaatgcgggaatgatcttccttcttaagacactaccgtcgatactaccactaccagctgacctacacgcagaagcgaccaaatgactaatatatagatcaatggcatattaatgcagtattcaactcttataccaatacatctatactaccacccatgatacctattcaggagacaatagcatcaacagcaaatatcaaactgactcttagtagatcaccctacccgaaacttgcatcattgcaagcagatgaggattcatagtt

SEQ ID NO: 325914 - DNA, 144 bp, Zea mays
accacacctaagctgaagcctctcattattattactaataacacacgtataatactacggggatattattacctctatacaaacttcagatcgttcaacaatatatcttataatcttcatattgaagggattcaatatctcttt

SEQ ID NO: 325915 - DNA, 132 bp, Zea mays
tcccacgcgtcctcccactcgtccgaaaaatttttataaaaatcaaaataataaatataagggagaattaaaaataattttaaaccttaataaattaaaaaaaattttaaaaaaactctaacttaataaaaa

SEQ ID NO: 325916 - DNA, 251 bp, Zea mays
cacagacctacgcggtattggtccattttttttaagaccaacatttgtttaagaatacaggaatattaggaagactgaacattcttccggcattattcccataacctaacaaactatacaaagagtgccttcagctagaccagatatggtagctgatccactaatgtcacaccaaaacggtgacaccatagaccctcacaacacactaaggttgataatgagcttatgatatattccccaacaaattctac

SEQ ID NO: 325917 - DNA, 76 bp, Zea mays
gccagaaagagcaaacagtagctccatcaatttcctttggcaagtaaaaccccctatagaagacattgcttgtcct

SEQ ID NO: 325918 - DNA, 149 bp, Zea mays
accacacagagcaaacactaccaccattttttcccatatcaaagcaaaactctctatgcgagacattcaccaatcctcaaaatccatacttacatacatagatatagatgaatacaaaaaatacaacttatgcatgatctgaacaacat

SEQ ID NO: 325919 - DNA, 160 bp, Zea mays
aacacacatacacagataagccaaacttttttacaaatacatcatacatactccaaacggggtggttcttcctcattgatgacatcacatgacctttttccaacgttgacctagcctttcttttcacgcactgcttgacccactgcaatgtcctttactt

SEQ ID NO: 325920 - DNA, 110 bp, Zea mays
aaaaaaaaacacttagcaaaagctcacacatttttttacaacatagtaaactaacctataggtgtgatagatataagataaacgagaaaggccctctctctatcttttta

SEQ ID NO: 325921 - DNA, 412 bp, Zea mays
agcttctgatagcagcaacgacatcaaccttcgtctaagccagattcaactagctgcatgcgtgcatacttacactgatacgtgggctgtaaagcgccgtgaactcccatcctatggctgacagagccagactacaaggtcgcctgagaccgacattaacccatggcgcacaatccggaggacgcgaccaagaccaagccctcaaacccattgccatagacgaaacccaacaatacctagccacccaagggcagcacctgagtacccagcgtccttgcaccaacacggcaaaagcccctactacaatgcggtcgtctgcccttccaaggagccccggacgcgcccgccagtcatgcgtgctacaggcgactgaactgccaagggccctgatacacgcacgactgacacgcgt

SEQ ID NO: 325922 - DNA, 255 bp, Zea mays
ctcaatcatccgtgctcctatactccatttttctacactgggcatgtccactccaactgggaaaactctagttcactatgcatctacagcaacctaatgtaccaacaacaacactattaccatgtcaccacacaatatagatattaaacgttcttcaccacacactgtactcatccttttacacaaaacttagccgccgtgctcttaccatcatgtttaaaacccaacagccagatattggctcaccatgacaac

SEQ ID NO: 325923 - DNA, 297 bp, Zea mays
gcagatgaggacctacctgaacggcctccacttttagtcggatgagcgtgcactatcgtatgcgagggctcttatcgatcagtggtagcatatcgacacggaagctactcttgacatggcacaaggactacttcaacgcgccgaactgctacccgcagaatgacgctgacatcgtcaagatgctcaagggcccggtgttggtcaacggcagttacatcgggcgatactgctcctacaagggctactcaatatgctgctgcctctaaaacatctccaagacgttcaccgagaccaaat

SEQ ID NO: 325924 - DNA, 209 bp, Zea mays
tccgcccacgcgtcctcccactcgttcggaacctaatttggatcgacaaacgatcgaacacaaggggggatttgtatcaaacctaccgacttatgttccacatctagattgtcacctacctaatgcaaggtcatttcaacacctgagcttgaataatcacctcatctgtgatctatattttgtccaccccactattaatgaccatacta

SEQ ID NO: 325925 - DNA, 380 bp, Zea mays
cccactcgtccgctgactcgtgggaaaatttaaaaaaaaaaaaaaaaaaaaaaaaaaaagggaaaaaaaaaaaaaaaaaaaaaaaaaaaaaaaaaaaaaaaaaaaaaaaaaaaaaaaaaaaaaaaaaaaaaaaaaaaataaaaaaaataggctttaccttttaaaatatcaaaacttactaacccttcctttcaactttttaattttcatatagattcatctaaatctaatcaattgaccagtatttaaaaacgttatacctgtaaaacctctggtattaccaaattaaaaccatttgcaaaaaattcccttttctcaagttgtctatatatcataaagacccttaccaattgctttttaaaaaattttaccatcctaaa

SEQ ID NO: 325926 - DNA, 69 bp, Zea mays
cccacgcgtccgaaaaaaaaaaaaaaaaattaaaaaaaaaaaaaaaaaaaagacaaaagagggtaaaga

SEQ ID NO: 325927 - DNA, 431 bp, Zea mays
cggacgcgtgggatcatgcgtgcccatactgccagcctctccctccatagatgacctcaacaacgaggaaaacctggctcgacattgaagtataggagcaccttgaggcgagggttggatttcaactcgttcttggaagacgaagaaagagcgctcgtaccgacaccggcttcagatggtgagctcacgggcacaggagggctcagcaccaccactggcatgcggacaggggggcgcgacgtcgcaagctccagcatgggccgcgatagggctgggcctggactcgccaccgcgagcctcgacatggtgagcactgggcgcggcctcaccaccgcgagcactacgcgcgacagagcacgaagtcggaatagtagcgttgtgtgcaacattggctctttgtccgcagggcgcggcaatggcgccacgatcgc

SEQ ID NO: 325928 - DNA, 328 bp, Zea mays
agcagttgaatatgaaagagagcaagatgacctattgaagctatcagggaaaaccagacaggtgggtctaatcgtgagctaaggcaccgaattcatgctggactcatcaaccgatggaactgctgcaatggccaatgcttatgttgaaaaacgagccttagcttgcacctgggaagctatcgagaaccagactccgatgtcggccttagaaccctatgagtctgtcccagaataggccgatgcttacgctgtatattaggctggtgaaactgctacatgcgaggatgtaccggtcaaatatcagtatggtcacgacgagccggaagcc

SEQ ID NO: 325929 - DNA, 398 bp, Zea mays
ccgacgcgtggggccgactacaccaccagtttatagcagacccgccgtcttcgttatcaggacgcatgtaaccctgcagctagatataaccagacacactcagacagagagatacatagagaagaggaagaagatatcagatgaggaagaccatccatgtgctattggagaagctgtagactaaactggctgtgactgttatatactattaaatagtgctgatcacattatagattcaaacggacaacatatggaccacctctacatgatagcacttgttaaaagagacactacgaacgtacgttaatccaagatggacattagtgaaattatatggcacagaattcatgacctcttaccagctaatgatgattcatcatctagtgcagtgaatggaa

SEQ ID NO: 325930 - DNA, 428 bp, Zea mays
aggcctcgtcatgtctcaggcgcgaggtctctggccgctgaccaacgacgcttgcatctgtactgtgatcagcctagctggagagtctattgtagcagtatgacgggttatcccacccgatcgtgaaactggcctgtgatcacgcggagcgagctgtaggcgctacccagaggtgttgggggctattctacgaactgggtcaccgcatagcagagcatggtgcttacggacgacttcttcggcatgacgagctccgaactgctatcgcaatacgggttccaccaagagactcagctgtcagtcaactgaggctagcttgctgcgtactaggcgaacccgatatatgtcaatatgttcatcacggccgagctgtttgttggctagcaggagagtctaagacagctcgctcgctactgcagctctggctc

SEQ ID NO: 325931 - DNA, 394 bp, Zea mays
tttcaagatccaaccagtccattctaaaggagatcagtcctgggtgttttggagggactgatgctaaagctcaaagtccaatactttggccacctcatgcgaagagttgactcattggaaaagaccctgatgctgggagggtttgggggcaggaggagaaggggacgacagaggatgagatggctggatggcatcaccgactcaatgggcgtgggtttgggtgaactcggggagttggtgatggacaggcaggcctggcgtgctgcgattcatggggtcgcaaagagtcagccatgactgagcgactgaactgaaccgagcctcagtttgcaaagttagacagttggaaatgcaagtttagatcccagggtttctgactggaaacttgatatct

SEQ ID NO: 325932 - DNA, 417 bp, Zea mays
ttatactgtaaattcactttgcccttgattattcagaagttcagaagtaagtgaatcctctccatgaccctaactgagcctttgcttagttttcaggaagaattgctatcctttaaatactaccctacaaaactgaacaaatcactgtccatatctttgggacagtctcctttccagataggccaggacaaggatacatacatttcactcatttatcacatgaagcagtatgtcataccagaaaaacatggcttaagaatcaaaggagacctgaattgtagttttgccaccgggtcccattatctcttcaggcaatttcctcagtttctctggatgcagattccgcatttataaaagggatagtcagaccctattggtaagattctgtaacttggtaaaaatcatatgccaaacacc

SEQ ID NO: 325933 - DNA, 423 bp, Zea mays
gtatactgcgacatcaagtccggcctgagccattcacaagggcataacaccctcagggctgttcatgatcgtaagatgaacacttgctacagctgtcaagcataatcgctgtcctgtacttactaagttagacatgtcagcagatgagctcgctatatctgtccctacaacctgcctttcagatcgaacgggacagagatgcatacattgaagtcatttatgagatcaagcagtatgtcatacgagaacaacatgcttaaccaatcacaggacacctgaattgaagttttgccaccggttcccattatctcttcaggcaatttcctcagtttctatggatgcatattccgtattgataaaagggatagtcaaaccctattggtaagattctgtaactggttaaaattcatatgccaaacaccc

SEQ ID NO: 325934 - DNA, 423 bp, Zea mays
  unsure (1)..(423): unsure at all n locations
gttcctgcagccctgcctcctctctctgctggaatcaagggggggcgcttctatcctggccaagggacccaaggccctggcccacccgcccacccccctgccccccagctgacatggaaaccccagccctctgggccccagccaggcagggtgagggggcatctctgccaatctacctcacgggcccacactctgccggccatgccatggatcatgggccgggaaggctctgggggcagaaacaccactccctggtcaccctctcaccccacactggcccacagcagccagagggtcccgggagaagagggggcagggaggagggcttggccccttcatggggaaggaaaccagcacgcctncattctccaggaggtgtccaagaagtgccttaaatggtttgcacagaccaggtggttggga

SEQ ID NO: 325935 - DNA, 387 bp, Zea mays
agaaaactactacatacgggtgcacatcctaatcactactgagtatcacagagagattgatacttatataagagtcctagagtatgcaactggtgaaaccagaggctacaatccagtattactgatacgagacatgtatgattctccactgttgtacatgtatgagcttggagtactgtatactttaacacactcaatactaggtagtggagagtacactgatgtacatcctaaatgcaccactctgttaacattttagatgaaagtacaccgagctccgatataggctactccagataacgctgcttaattgacactcgtagcttatggtaaatagttcttaagaagttcaaggccactaataatgtatagtacaagtacgcgctt

SEQ ID NO: 325936 - DNA, 388 bp, Zea mays
ggatcatacacattgaccaagcaggattcattcctggaggcaagaacagttcaacatatgcataccaataaattcggtatgtcacactaacagaatgaaagataaaaatcatatgattatctcaataggtgcaggaaaagttttgacataatttaacatctgttcattataaaaagtctcaacaaaccagctggaggaaagagatgcacctcagtacataaaggaaggccacgtatatcaagccccccctaacgccatactcaaagatgaaggactaaggactgttcccccaggaccagaatcaagacatggatgcccactctcatcacttctagtcaacagcactggaagtccaaaccagagaaatcaggcatgataaataaaagtc

SEQ ID NO: 325937 - DNA, 170 bp, Zea mays
aaatattatttaacactgttatatgcatacacaaatatggccggtgatacaatctctggctggtggcctaatcggagaggggatgttacgtggccgacgctgtgaagcccatattgtaactgtgcaagcctacgccgttcaagcctatggtggaagcacgtaggaagagt

SEQ ID NO: 325938 - DNA, 317 bp, Zea mays
cggacgcgtgggttcttatgtcagcaaagatgttaagttttactagataagcagaaaagataaatctcaaatgcagtgctatttactcttttcaaaacagttttcattttcttaagcacactgtacatttctgtagaacctgcattttttcttgcacgctaaaaacggtacttgcgtctggtgaattactgctgacagtttccacagaaaccctgtttcagtggaccaacattgtggcatggcagctaatgccagcattttggggaatagcagctaatctacaagtgaccttggttggttaactatgtttgtttgat

SEQ ID NO: 325939 - DNA, 346 bp, Zea mays
gctccttagaaatgcttaattcttatttcttaatccttaattcttatttccataaggcttagaaggaactctacaaattctaagtaactggctattattaataagagtaaaaaatctactatacttcaataaaatattttaagacaaaaaataggaagttgcatggtatagccgagttgactcactaaaattttatttacataatttttctaatatgaaaattacttgttttcagccccccttcacaattgtattttaaattaaggttattaatgttttaacctagatcatataatggtaaattaattttttaaatttgatatccgtactgaacttggaaaaactg

SEQ ID NO: 325940 - DNA, 393 bp, Zea mays
  unsure (1)..(393): unsure at all n locations
gccacgcaccccaccgtcttccccgtcaccatcatgttcgccatgaagtgcttgtcgctgctcaagttcctcatggacctcggctgcaacggcgagccctgcttctcgtgtctgtaccgcaacggcccgtacccgcccgccccgccgccctccaacaggttcaatgatgcgcccgcctcggacaaggcgcccagcgcggtccagttctgcgagttcctgtctgccccggacgtgagccgctgggcagggcccatcatcgatgtactcttggactacgtgggcaacgtgcagctctgctcgcggctgaaggagcatattgacagcttcgaggactgggctgtcattaaagagaaagcagaacctncaagacccctggctcatctgtgccggctg

SEQ ID NO: 325941 - DNA, 212 bp, Zea mays
accttcgtagacccctgggttctagatccttagctttcaccctttgctaatacttattcgaggtgatttttttgcaaccaaacaagtaataaatattatttagcacttttatctatttacaaatatacaacagcttatacactctctgcaaggggcagcaatcagagaggtgatgttacctgtcctacgctttgaagcccttattgaaactc

SEQ ID NO: 325942 - DNA, 399 bp, Zea mays
caccgagggggtgggctgggtagaggcggttaggatggagaggtgtgagtgcgtggccaggaggctgttggcccagggtgggggagaagtgaccagcgctctctgggtcttcccagggacagctggagagcagtgaaaccctcccctgcatgtgttcgtggctccgcgcagccaggcctcgccttggctcctctccagatcctacagcagggccaggactagggcctggcgagcagagcctctgggctggctgctggccctggcactcagctcctggcttcagggaagcacacagcagtggacggactgtcccaggagcacaggggtgatgcaacccacagctgagaagtgccttaatgctgggaggctgaaaagtgggggtggctcacagtcctggcc

SEQ ID NO: 325943 - DNA, 403 bp, Zea mays
cgcggagcgaacccgaccgaccgccgcccccagccaggattaattggcttcttccgtgaaagggggactcatcttcttgggagcccgaggggctttcaaggcgccatgctgctactgctgctgggcctgctgagcccggcggcctacggggctccgggaccggccccggggtccgcggagctgcgctcggacttctcggcggcgcgcaccaccccgctggagggcacgtcggagatggcggtgaccttcgacaaggtgtacgtgaacgtcgggggcgacttcgacccggccaccggccagttccgctgccgcgtgccgggcgcctacttcttatccttcactgcgggcaaggcgccgcacaagagcctgtccgtgatgctggtgcgcaaccgctacgaggtgc

SEQ ID NO: 325944 - DNA, 98 bp, Zea mays
gagttaataattgtaggacattttattatgtattaccttaatagcatggttaacggacgtcatcaaaatgcgggcaaacctatgatagggcatagcta

SEQ ID NO: 325945 - DNA, 423 bp, Zea mays
actgaaggcacttaaatgttgtattttatgtcataaaagggcaaacatgttaaaaacagataggtccttttatcaggatcatcattttacagaattggaaattggagccctgaaaggttcagtgatttgcctgaggagatcacagctgggaagtgatggagtgagggttcagactgtcttccttgtccatgcacttatccattgcctctactgtatcgcatgtgagtgtgcatgtgtgtataaaaatgtgcttctgattgcctgtaggagggttcacacgttgcagagcattagttctaggtagtgttaacagtttgctgcggccctttctgttaagtttcataggtgtgcacacatacatgagcaatagtgggatcatgctgtatatccagtttggatctttttgcactttgattggatatc

SEQ ID NO: 325946 - DNA, 417 bp, Zea mays
atttttatttaatctgtgtagtgttcaaaaaacatcattttgaaatagttacaaatatctaaaaatggaaatctttaatacaaactctgagtttctggcttttttaggaaagttaaataatctgaaatattggttctgcattagagctgagattaagtcgttaactttctcctctgtgttggatatatagttttcagtgtgcctgagtcctacatttcagtttgtgatatatagtcagactgagtgagttgatctcttgatatttcttttggttctacaatttaaatattcttgaattagaatttaatttttctctctagaaaagcattttctatactttgctctgtagaacaatgcttctacaaaagggtaacagatgacaaggtcttgacggtcaaataaaattggaaatgctga

SEQ ID NO: 325947 - DNA, 78 bp, Zea mays
aataatcagatgcgacctaatcaaacttacaagcctctgtgtaacataggatactacgggggtcacaaaaagtcagag

SEQ ID NO: 325948 - DNA, 419 bp, Zea mays
  unsure (1)..(419): unsure at all n locations
gtcaagaagcagcaattacaaccctgtacagaacaactggctggttcaggattgagaaaggagtacaacaagtctgtttatagtcatcctgtttatttaacttatatgcagagcacatcatgccaagttggatgagttacaagctggaatcaggattgcagggagaaatagcaacctcagacttgtggatgatatcactctaatgacagaaagcaaagaggaactaatgagacccttgatgaaggtaaaggaggagagtgaaaaagcccacttcagactcaatttgaaaaaaaaaaaacanaaaacaactaatatcaaggcatccggtcccatcgcttcatggcaaatagaaggggaaaaggtggaagcagtgacagatttcctcttcttaggctctaaaatcactggggattatgact

SEQ ID NO: 325949 - DNA, 430 bp, Zea mays
  unsure (1)..(430): unsure at all n locations
gtgaaagagctagacgtcttcaggctaaaatgatgactaatttagttatggccaaggaccgtttacaactattagaaagtggagctgttccaaaaagaaaagatccgttaacacatgctagtaattcactgcctcgttcaaaaacagttatgaaaactggacccacaggtctttcaggccaccatagagcacctagttgcagtggtttatccatggtttctggcgtgagacaaggacctggttctgcagctgccactcataagagtacaccaaaaacaaatagaacaaataagccttctacccctacaactgctgctcgtaaaaagaaagacttgaagaattttaggaatgtggacagcaaccttgctaaccttataatgaatgaaattgtggacaatgggacagctgttaaatntgatgatatagctgg

SEQ ID NO: 325950 - DNA, 228 bp, Zea mays
gtcaaagaccgccaactggaacttcataaagtatgtgctcagttattacggcacaagacagcggacgggaaactgagactcagtgttctgatgcttagaggagcgtgtaacagaggcatcatgcactatctatactagccagagacgaagcgagccaaatctctaggtcttggacgtacctatggcgtcgtatctgaattacataatccagagcagatgctaagaata

SEQ ID NO: 325951 - DNA, 340 bp, Zea mays
cccagggcaagctggtcgggtgatgggaggtagccagcctcctggctgtggcatggtgggtccaggcggctgcaggcatctcaacgtggaccactgggtgggtcagagccaggaaatggcccacctggctcttcacccccaaggttgtaccttttatgggagcagggttggggggcggagggctgctgcagatatgcaccagcctgggataccactatccaccagacctgttctgacgtcatgagtgtcaaacatgcctgccagccccgcatgagatgtcatgacaacactacgcacacccaataaagtgaatggatgacacacatcagatacaccaaga

SEQ ID NO: 325952 - DNA, 411 bp, Zea mays
atttggagccttgataagaatagcaggatgcttcacttcagcagtacatacacaaaaactggaaccatacagtaaagattttcacggcccttgaacaaggatgacacaaattcatgtagtgttctatgtatttacatgtggaataaaaaaaaaaaaaaactcatataaaaagagaacagatatgtggttaccagaggcgagaagtgggaggtaggagaattgggtgaaagtggtcaaagttacaaactttcagctaaaagataaataagtagtaaggatataatgtacaacatgatgactgtagttaacactattgtatacttgaaagttgctaagagcatacattccaaaagttcttacctcaagggaaaccaaaaactttataaccatataaggtgatggatgttaagt

SEQ ID NO: 325953 - DNA, 314 bp, Zea mays
attatttaatatgatcttcatctatccttagtgtatcagtgcatcttaggaaccaaggaggatgactctagaaaggctttatgtgctacgtaatacatgacatagattgaaaactatgaagagactgccggatatgtcaactagggaattctacagacagaattgtaagtgagtgatgaagacagacctgactggaactaattagaggatgaagatggtgtcacgtattacataccaattatctatggttgatatggtgagaagtttgacagtgtaatgataaagatacatctgattttgaatgctaggatgta

SEQ ID NO: 325954 - DNA, 403 bp, Zea mays
cagactcgtggtctgctgactctcaggcactgcgcacatactccatgtatgtacttcggagattagcactgtgggtgctaggggagtgcataactggaacgtgaataacttcccatgtggcctagaataaagctgactcctatctcctgatatgaggttcagggtagcctgatgacctctagtacctccaactatgaggtctgggcagtgcaaccaagagcatggatcagaagagagctgtgaatagccacgcatgggtagtgccatctcccactgaggcttcagtcactgacatccctcattccatggcagttggatataatataaccttacagaatatgggatgtgttgatgatcctcagctagactgctaccttgcgcctctgttctcagactggggctg

SEQ ID NO: 325955 - DNA, 250 bp, Zea mays
ctctaacgatgtctatggtgtttcagtttgctgagcctgactcactagtgtgactcagaagacggtgcaatgcagtcatcatgttagtggcctgtgagcaaggcatactgctcttgagcatttcaaagaaaggtcaacagagcctccattcttggatctgcaacttggtctctgtaagaggtcttctttaaatccaggacccaggataggaaaagggtttccctgacagtttacaggaaacctgcaggaa

SEQ ID NO: 325956 - DNA, 325 bp, Zea mays
attaaacaaaagggacctaatctatctttagagtctctgcgcatcttaggaaactatgaggtatgtgacaagacaggcttcagaatgcgagtaatacatagcaaatgttgcaacctacaaacagcctatatgatatgtctacaagcggcttctacagctgaattccaagtaaatagatgacccaatccaataatggacctaagaactgaatggacattttttcacagatgacatacacatgactaacaaacacatggtaagatgctcaacatcacttattatcaagagaatgctgatcaagaccgctatgatgtaccatttcacg

SEQ ID NO: 325957 - DNA, 306 bp, Zea mays
gacactcagatcgagcctggattatcgttcctatctatgaaaaacatctgcaacttagctgaaatgcaaaaggccggcttttgtgacagagaatacactaacaatacaatgcgctccactgctatctaattcatgtggtccgatcagctgattcacatatttaacgcgtatgggaatgacagtactagcattgtggtgcctggtatttatgtcacattacagaaggtacgacaaacataaaagctcttttacacgtgtgaagaagatgtcagaatattattgatggtaaatgctcataaaatggat

SEQ ID NO: 325958 - DNA, 162 bp, Zea mays
atcactgatctcgatctagatatacatatattgtatcttacggtatcatggtacatggaggcttactgctagtactgagtcgatttctgcgattatagaattgttcgatacacatactatttgtctacttgatagttatacaatcattttaaaaactagacc

SEQ ID NO: 325959 - DNA, 272 bp, Zea mays
gtcattcgccgccgactggaacttcatttagtgtgtggtcagctattaagttactaggaagatgacggcaaagcgtgatccaccttctgtgcttaaagagctctaacagtgtcacatacactatgtattctagatagatatgaaactgttttaatgaataaatattgtactatctatggtagagtagcttaaatactaatacacagatgatgctaagcatttcacaggcgtcatcgtcgggttaggaagtcacttactaggagtgccatgat

SEQ ID NO: 325960 - DNA, 420 bp, Zea mays
aaaaggaactggggttcagagtgattaggggtggggtgctcagggcttgccagctcagaggcagagctgaggtgaaacttcaggttgactgctctctgaagctgaattcttcctgtcctactacactccttctcatgaaatgagccctcgggaaggtctcagtgcgctgtgcatgctgatgacccagcccctgtgcacgaggccaattagctttgtagccagaggacaacaggtcaagccatagtgccgggggaggggaggggggcctgctacaggaaaaataagaagtgtgggtccccagttgggttaggatgtgtggctcttctcggaaacacgtagcatccctaagtcagagctttctgctacacttccggaagaggctcgagagctgaggctggggtccctctcccatgcccaggc

SEQ ID NO: 325961 - DNA, 368 bp, Zea mays
catacccatcgtctgcatgcttgggatacagacggtgctaagccctttcgacacgacccagattaggcctttctgtggcaagttatacattacttagcacgtgaatcgaggctcatgtgcacgaatccgctccttactaccattaatccatatcttatggtctgaggttacctgtgatgtaataaccgaggagctgaacttgtacagatgctatgaataactggccgtaacctgtcggattctgttaacatcattacattagaacctgatcgttagctcataatgaactgacatcaaataatggaataacaaatctgtctaaagggaccgacgatgtatatggaccgagctaacgaacatcctgcttg

SEQ ID NO: 325962 - DNA, 284 bp, Zea mays
tcgcttcactccttgatataagtctgggaaaaaaaaaaaaacactaattagaaaaattgcatgcatcctaatgttcacagaaccattactcacaatgcttaaaatatgaaagcaccctacgtgcctatcaacagatgacgatgataaaatggtgtgtgtgcgtgtccgactctgcaaccgacagttgtgtccgactctgcaatctcatggactgtggcctgccaggctgttctatccatggaattctttgggcaagaatactggagtagatagccactccctta

SEQ ID NO: 325963 - DNA, 407 bp, Zea mays
attatttcatatgatctccttctatcctttgtatatcattgaatattaggaaccaaggaatctgagtggtataaaggtcttctgtgctactaatacatgaaatagattgaaaactatgaagagactgccggatttgacaattagggaattttttgacagaattctcagtgagtgaagaagacagacctgactggaagtaattagagggtgaagtggctgtgacgtattggaaccaataatctttggttgctaaggtgagaaatttgacagtgaaatgaataagatacgtatgtttttgaatgtatgtcttttcttttaagcactagagactttcaatatttctgagaaagatggtgaccagagagcctcatcttgattcacctttgtgccttagatacttgtgtaat

SEQ ID NO: 325964 - DNA, 410 bp, Zea mays
  unsure (1)..(410): unsure at all n locations
cgaagccatcccggttctcgtgcagagaggagcggacgtggaccagcagtggggcccgctgcaaaatacagctcttcatgaagcaactctgcttggccgggcaggaagggagtgcatcgctgccttactgggatgcaacgccagcgtccagaagaagaatgcgagaggccagacggcatacgacctggccctggaaagtggggatgagcccatcacctcgctctttgctgctaagcttggcctggatgaacgctaagcctgaaagccccacgggcatcattcagagaagtcacccagctccggctgtgctgtgttcgcttccttccaaatgcatattcgaggtttggaaatcgagcttgagagccactcataagatnttaaaaactatgtgacagtgtaagccacccatg

SEQ ID NO: 325965 - DNA, 415 bp, Zea mays
atcgcgagcggccgcccttttttttttttattttttttttcttgataatttggatgtgatcttgtttttatcgcgcgtgacaaattacagtaattcaatcatgttattttaatgaattaaattaaaggtaaggtttaatggctgtttcctcctcgttaaaagtaattctgagctcacaggatcgatttaacattgtttagcctactggagcaaaattcctgatgcaggaaatgtgtcaggctctgccaaagtgatcggaatagaacctatgctaaccttcctataagcagttacctgtgggaattatgcaaaaaatcaatctcaactcaggttgaaagactcctttacgcatactgtattagttactaaagtatctgatatctacagatgtatattaaaataggatattcactct

SEQ ID NO: 325966 - DNA, 372 bp, Zea mays
ctgacgcgtggcctgctgtcaccttttaaagcacttcctttcctaaccgatcacagtggagcggtttcgatgcgggagctctggtacgtggcaggcgggcgtgcagctgggagtgtcccgtgtggtggacgctgctcacacaccttaggagcctgatcggcgcgtgcggagaagggacgcggagcggactcggccgggccttgttgggtcccgcgacggcgcatgcgcgcggggaccgcagctgctcactcgacgacctactttctacggagcccggccggagggctgatgccgcgctgctcatagcggcggctggacgttccgggagcctggcggtgaccgtggctattgctagagcgaaggttacaggtg

SEQ ID NO: 325967 - DNA, 422 bp, Zea mays
  unsure (1)..(422): unsure at all n locations
ccaggctctcctccaacagggaggccggggggccatggaggggcgagggctacagtgtctgggttaatcagaggctccacagagcggctggccgtttggggggccagtgaagttaagagccagcccacctactggggacgggggcctggggcccaagtcgagtctcttggggaggacgtgcagggtgcctgcccggaggagggtggggcccctgagacagcttgcctgcctgcagatgcggctggggcggggcaacagggaaggcctgcggaggccaggctgtcggcctaccggcctnccaggagctgctcagatcccatcgtcatccgggcacgtggggacttttaactctggtgacagtttcagctacctttgggtcagggactgaaactggagagggtgggggggtgggttcttttatg

SEQ ID NO: 325968 - DNA, 409 bp, Zea mays
catacgcatcgtctacttgcttgctatacctactgttgttcgtgctgatgaaacggcggacgctttctagcacgttcgacagtgctacaggcatgcacacgggtctgctgcgtcataagcaggaggaggacctgtacaatggcgtatgcataccaggtcctgtgtaggtgcctgtgctagactagcgcctcagctcgcaatggcatagatgctaccaatagcatcccaggtcgagatatgattctaaggagagcatgctgtatgagtgttggcagtcttagactagtgctgtacccctaactacgaacagggttcatggagatccgtgcattatcatcatagagcttggagactatgctgactgtacatgcacatagatgctttcaaacagtgccctcagagttttgtt

SEQ ID NO: 325969 - DNA, 229 bp, Zea mays
ctaacgcgttgcgttctagatctatagcgaatgtcccattacatattagtgatccaggaggctgatttgaccgcattagtcatcttctattattacctcactaaggctggagtcaattattctcttgctgactcagaattcaaggatcttacctaccttgaacttgattactttgtagaagacagactagattgtgatcactctacgacaaagaaatggctacaatgta

SEQ ID NO: 325970 - DNA, 262 bp, Zea mays
cgtattgcatatctgttctgagttcttgattcctgcagcggacccagagtcttttggattctaagcttggccaagacgagcatagtagtcatcagaagatataactgaaggttcatctgaatggcactgtgctggtgcctgtattcgagcttggggagatgacatatttatgatggtaatacgtgaagcctatctctttggggggtgtacagctagtgggactgagagcagtgcaagacatagtaagagtgtctgagctgca

SEQ ID NO: 325971 - DNA, 352 bp, Zea mays
tcgggcccactatggctccagtatttgacagccttgcttctctccccaaggttacaacctagtgtctgattcttccagctactccttggttacatcacagccagcttatggtcttcagcacttccaagagctgcaactccctccagcacttcttacctactctttcgctgccagctggagcttatgctcagctctgggcagtgctgatcacaacccttctgtgggggaaaagtgagttagagcatttggctccagttttggaaggcccctaccttacccataattctgaaggctcctgtagatctagaaccctccaatatcatcacctatctggctgcaagggtcataattt

SEQ ID NO: 325972 - DNA, 267 bp, Zea mays
atcgcgagcggccgaccttttttttttttttttttttttttttttttattttttttgtgtgttttttttttttttttttttttttttttttttttttttattatttatttttttaattttttaaaaaaaaaaatctttttaaaaatggcgggtacctttaaaaaactacaacgaatacaccgtggataatgaaaaaaggaaccccaacaaaaccacacattgtattcaaaaaacaacgggggcccataaagcggaaaaaacatcacg

SEQ ID NO: 325973 - DNA, 342 bp, Zea mays
ctaaacgatcgccagcctcttatctatttcttatgtgcttagttagtagtacccaatgctccactcacgacagtgctgaacgtctactgatatcatgctaggcgctctacgactgtcaatcattctaactcgatgctgtatgtcatgatcataacctgaatcctctgagttacttctaagatcgtatctgagagggtaccgtcgacttgaagcatacgaataatcttgagcacaagaacggcagtgccttagtactttcgaaaagacttactgctcatctacaaatagatgctgcctaaataaagatcttaacagatgactttcagtattgaggatccatga

SEQ ID NO: 325974 - DNA, 323 bp, Zea mays
catacccatcggctgctggctcgatattcctacgctgataagcaattactacacgaggcacctaaggtctaacggtgctacgtaatatgttcacttgcacgtgtatcgagtgtcatgtaacctaaactcagcgttgatagccatacatcatatcagatggatgaaggttacctgtcatatagtaccctagcatctaacctagaacagatgcaatgaataccttgccgcaccatgtctgactgacttaccacgattataccagagctctgatgcgactgttcataatggcactgacaccaaataatgaagcccagatctgtata

SEQ ID NO: 325975 - DNA, 189 bp, Zea mays
attatagatcgccagctgcacacctattcctacggtggtttgcaattactacacaagcaaaacttggtcgcactgcactacgttagatatgaggctgcgcgtgtattgcgtgataatgatgttagtatgaggcattactgtgatgttcaaaatctgtaacctgagagttacctgtgagataatacctga

SEQ ID NO: 325976 - DNA, 411 bp, Zea mays
tgattatctttaatcagtttttataagcaaattccattgttcctgctattggaacgtaacactgtttacacagcataattgaagttgcaggggagacaggctaaatctgacttcatctgtactcactttcactaagcattgaatggccttaccactcttctgcaagatggaggaagactgcaaaacttagtgcccatcacactgaaggaaggggtgtggctcttttcctgcttctgtactgctacctaactttgtggttagctttggattttaatatctgtatctgctttagattcaagcccataagttttgaagtgacttcagcttcattgtgaaatagctctcttcatatttcatagctacatttcaacaatgctgaactttctactttgatttttagatactttattt

SEQ ID NO: 325977 - DNA, 414 bp, Zea mays
gccaaagatgctaaaactatggaacacttgctctcttctcacacgctactaaagtaatgctcaagattctccaagccaggcttctacagtatatgaactgtgaactttctcatgctggatttaaaaaaggcacaggaaccagacatcaaattgcctacatccgctggatcatcacagatgcaggagagttgcagacaaacatctatttttgctttattggctatcccagattctttcactgtgtggatcacaaaataatgtagaaaagtcttaaagagatgggaataccagaccaccttatctgcttcctgggaaatctgcatgcaagtcaagaagcatcagttagaattggacatggagaaacagactggttccaaatcaggtaaggagtatgtcaaagctgcatattgtcac

SEQ ID NO: 325978 - DNA, 221 bp, Zea mays
agaaatgttaaaaatatacacatttgatactactaaagcttgaaagaagttttcaaggtgtaactttatgcaaggtgcagtccataatatctagtataggctctcaaaactgctgaaaattttatcctgaatcacgactgtaatgtctaccacttggaaccagtgcctcgtctgtaatcccatacattaagaaagttgctcatcatattccaaactatttt

SEQ ID NO: 325979 - DNA, 348 bp, Zea mays
agaaatgatcgacagctacacagtgaatactactgtagtttgcaagaagtacacaaggcgccactgatggcacggggcataggcataatatcttgtttagacgtgtcaaagactgctcgaatattttaaacctgaagcacgactgtacatgtattcatacgtggaaccagtgcgctcacctgtaagcctcatacactaggaacgttgcacatcttattcgcaacgaatatcgttcagcctggtatctatagagcctaactctgtagaagagatcgttagctaaacattatgtctgttgtaactcagataaggatctccacttctgatattgagtactgatattttttc

SEQ ID NO: 325980 - DNA, 351 bp, Zea mays
gataagctcgcagctcccatgtatctactcagcttgcagaactacacgagcgaacttgtgcagggccatcgcatgtatcttgttacactctcaaaactgtcattattttaacctgagcacgactgtaatgtctaccatctggaaccagtgactcacctgtaagctcataccctaggaacgttgcacatcttattccaaacaatatcgggctgtctggtgatctttagagccttactctgttaaagtgattgtcagccaaacattatgacggatgtgactcaaattagtgtttcccacttctgtatttagtaccggtatttttttttgaagtggcatatgtgactattttaa

SEQ ID NO: 325981 - DNA, 361 bp, Zea mays
cggacgcgtgggcggacgcgtgggaaacgaatcgccagtccaggttcgaagcacagagtccaagagactgttctatatatcagtgtctcttttgctgtctcgtatacagggttattgttaccatctttctaaattccatatataatgcgttagcatactgtattgtttttctttctggcttacttcactctataggctccagtttcatccacctcattagaactgattcagatgtattctttttaatggctgagtaatactccattgtgtatatgtaccactgctttcttatccattcatctgctgatggacatctaggttgcttccacgccctggctattataaacagtgctgcgatgaa

SEQ ID NO: 325982 - DNA, 245 bp, Zea mays
gtctctatttgctagtctcatatacactaatcattgatcaccatgctttctaaatgttcatacatacatacttttacctaccgaattgggtattataactagttactggactatattgaactcatattaatctatatcatgctaaatttatgtaagctatgtgtaccaaacatgtattggaatcttagtaagctataatatccccagcacagctataccctcacatgaaaaaagacataaaaggg

SEQ ID NO: 325983 - DNA, 107 bp, Zea mays
ggtttctgaaaaacacattatgaaaaaaacacaagagtctgaatgtatgttaatccgtaatccctggctgattatccctgtgttactaataaatgtcttgcaacaat

SEQ ID NO: 325984 - DNA, 335 bp, Zea mays
cgcgagcggccgcccttttttttttttttttgcagatatcattaaaagtgtattacgggatttcaatactcaagaacagtgcatactttccttgagacccgtggtcacagctctcattgttgggtgtggccacgaatggaggtcactcagtcacaaccccccttaggatgaaaatgaggaatagtcaacgtaacgcccaaacgtggctctttaatccccttctaattctgaatatttcgcgtgggtttactataatgtctattaatacatatccttaatgatgataggattagacaaaaaaagtgaaaattttcgtatctaaatcttcaaatcgc

SEQ ID NO: 325985 - DNA, 345 bp, Zea mays
tgtaaaaatactgaatcaccatgctgtatacctgaaacaaatataatattttaaattgactgtgctttcattttaagaaataccatggactaattcaacactttttcttttgattaaaataaaggattttagcaggaacgtcctgcttattaatggtggcaaccaactggactgtcaatgcttcctgcctcactctgcggtccattctgatatatcttatgcatgatatataatatgtggcttctaagagctgtgataatacattagatatcacaacggaatgttaattagaatgggccaggataattcacagtgatacggatcgctgaaataactttcaatgac

SEQ ID NO: 325986 - DNA, 269 bp, Zea mays
ggcattagtgctagatactagaaattttcatttccctgttgctattgatcagagagacaggcgttaattaaaaacaaatgtaagaaaggaaagttctcaccctgttagtcggtatctgtgtcctctgttactgaatcctctttggtctccctgttctggctggcatctgctctgctgctccactcttctccgtgtgacatcctgacttataccgacattatcatcgtacaatcttctcttttctcgtcatcttatgtggtgcaggtctc

SEQ ID NO: 325987 - DNA, 123 bp, Zea mays
cccacgcgtccgaaaaaaaaaaaaaaaaaaattaaaaaaaaaaaaaaaaaaaaaagaaaaaaagagaaaattaaaaaaataaaaatatcacaaacttatatacactaacatacaaaattttat

SEQ ID NO: 325988 - DNA, 130 bp, Zea mays
tctgactctttggaaaaaaaaaaaaaaatttaaaaaaaaaaaaaaaaaaaaaaaaaaaaaagaaaaaaaaaaaaacaaaaaatcataaaaaaatccaaaaattacatacacatacatacaacaatataaa

SEQ ID NO: 325989 - DNA, 125 bp, Zea mays
cccacgcgtccgaaaaaaaaaaaaaaatttaaaaaaaaaaaaaaaaaaaaaaaaaaaaaagaaaaaatgaaaaaaaaaaaaaaaaaaaaaaaaaaaataaaaaaaaaaaagggcgtcctttctta

SEQ ID NO: 325990 - DNA, 346 bp, Zea mays
gacccacgcgtccgccagaaaatgcactggaagacccagagtttcaccgactgcgacatcacccaactccttcgcctcactgtcacgctcatcggagcagcgaccgccgtgcccactgttattcttactttcccgttctaccccacctattgctcctccggctcggcagacacctctgactcgctcttctgtgacaactggatgctgcccgtagagacagccaacacaggcccctgaatctccataccctcgcgctgtggagcttcccccaacactacatggacagacctcactacacatatgactcctccgtcacctacgccgacgccctaaccttcacctccaa

SEQ ID NO: 325991 - DNA, 169 bp, Zea mays
acgacttgtttcattgattcttgaagagatctagcttcttttgcaccacaaggtcgaggatgtcttgcagctgctgatcaagctgctgctgcggctcaagctgcaagtgcggcaagaagtaccctgacctggaggagacgagcaccgccgcgcatgccaccgacattct

SEQ ID NO: 325992 - DNA, 144 bp, Zea mays
agcgagccaacaaacttgatcagggacggttgaattgataaaataaacgtggggtccaatataaattatgtggatcacattattatactgacatcacgttggcatgattttggaacttcaataatattatgatgtgctagattc

SEQ ID NO: 325993 - DNA, 386 bp, Zea mays
tgatcgtttcagtatcaacttccacgactcaccactcacgagcgaatacatctggatcaaggcacccagtgaccacacattgctacatagagagagtacacagactgaagcgcacacatcggttcatgcctacgtactctgatcgtggtaacattcatttactatacaccttttatcatctttgttatcttattttctacaccattctttactttttacatgctctattcgttctatcttaaaatactatttatcttttatatttttctattattactcccttttttttcttatttttatatttcattactttttattttttctctcactattttttctttatttattttttttaatttatttatttttttatttttttatttatt

SEQ ID NO: 325994 - DNA, 127 bp, Zea mays
cccacgcttcctcagacgcttgtgaaaaaattaaaaaattttttaaaaaaaaaaaaacaaaagaaaaattagaaaaaattaaaaaacaaacaaaaaacacaaaaaaacaaataacaaaaataataaa

SEQ ID NO: 325995 - DNA, 138 bp, Zea mays
aaaaaaaaaaaaaaaaaaaaaaaaaaaaaatttaaaaaaaataaaaaaaaaaaaaaaaaaagaaaaaataagaaaaaataaaaaaaaaaaaaaaaaaaaaaaaaaaaaaaaaaaaaaaaaaaaggccgcccgttttaa

SEQ ID NO: 325996 - DNA, 438 bp, Zea mays
aaaaaaaaattacaaaaaaaaaaaaaaaaaaacaaaaacaacgaaaaattataaaattaaatatacccaaaaaaaataaaaaaaaaataaacaaacaaaaaaaaacaaaaaatacaaaaaaaaaaacataaaaaaaaaaaaataaaaaaaaaaaatacaaaaaaaaaaaaaaaaaatataaaaaaaaacaaaaacaaaaacaaaaaaataaaaaaaaataaataaaaaaaaaaaaaataaaaaaaaaaaaaaaaaaaaataaaaacaataaaccaaataaacaaataaaaaaaaaaaaacaaaaaataaaaaaaaaaataaaaaaaaaaataaataaataacaaaaaaaaataaaaaacaaaaaaaaaaaatataaaaacaaataaaaaacaaaacaaaaaataaaataaaaacacaaaaaaaaaaatacatacaaaa

SEQ ID NO: 325997 - DNA, 73 bp, Zea mays
aaaaaaaaaaaaaaaaaaaaataaaaaaaatttaaaaaaaaaaaaaaaaaaaagggacaaccgctctatttaa

SEQ ID NO: 325998 - DNA, 260 bp, Zea mays
cccacgcgtccgcccacgcgtccgcccattcgttcgttgacgcatggacggacgcgtgggggttttcgagatcttactcttaaatagatgcaataattctacatcggactatgaaataataatagccagtactataattattaattataactccatatattaaacatcaaaaaacataaaacaataatcctattatgttatccgatgctaatgaatccagagctaaagaataggttcagcactctaaattcttaaaagat

SEQ ID NO: 325999 - DNA, 330 bp, Zea mays
tcttcctaaaaaaaaaaaaaaaaaaaaaaaaaaaaaaaattaaaaaaaaacaaccaaaataaaaaaaaccagcctaacttacacaaccatacaacaaccataccacatacctaaccccacctaaaaccaatccactaccccttattctacaacatcttaacttcaaaacccctgtctttccccaacttaatcaccttccaccccatccccctttcaccctcttctcttattacccaaaacccccttacccaccccccttaccaacctttcctcacccttaatacccaatctccccccccctttaaccccccattaaacacctccctttct

SEQ ID NO: 326000 - DNA, 206 bp, Zea mays
gcgtgcgcccacgcgtacggttgaatggcaaacaaatgttctggtcaaacgtaatgaagtagagaatgttggtcattttgcttgtgggcgctgggcgtcattacatgaccgtggtagggacagtgatgatgatgacgtccgttacagggactacgacgtggcagctcttgctaataacttaagtcatgcatttctttatgggatat

SEQ ID NO: 326001 - DNA, 114 bp, Zea mays
tcgcccactcgttcgcccacgcgtccgcccactcgtccgtttacgctttctaaaaaaaaaaattgataagtgtaaaaattaaaataatttataatataatataaaatattaata

SEQ ID NO: 326002 - DNA, 454 bp, Zea mays
aaaaaaaaaaaaaaaaaaaaaaattaaaaattaaaaaaaaaaaaaaaaataaaaggaaaaatgaaaataattaaaaaaaaaaaaaaaaaaaataaaaaaaaataaaaaaataatatatattaaaattaataaatattttttgtactttttttaactatttttatttttttataacttcttttatttttttactttttttttttttttacatatttttattttttttatatcttttttttacctatttttttctttaaaaaactttctttctttctttttttatttttttatatttttttttcttttttcctttatttgcttttttctttaatatccttttttttttttctttttttatttttttttttaatttttactttaaatattagtttcttctctctttttatcttttttttaatttgtctttttattattatatgtttttttttttctt

SEQ ID NO: 326003 - DNA, 125 bp, Zea mays
caaaagaaaaaaaaatatacaaaaaaaaaagaatgaataaaagaataaaaaaaaaaaaacaaagcgaatggataaaattaaaagggaggggaaaaaaaaagggcggccaaataaaagggtccaag

SEQ ID NO: 326004 - DNA, 118 bp, Zea mays
cccactcgtccgaaaaaaacaaaaaaaaatttaaaaaaaaaaaaaaaaaaaaaattaaaaagaaaaaagtaaaatttaaacatttaaaataattaatattaaaataataataaataaa

SEQ ID NO: 326005 - DNA, 251 bp, Zea mays
gttttagatcgcgagcggccgcgaccactaccacgacggcggccacagtagcagcagcagcgacagggactgagatctggtgtcgcagcacaggtgcaacacaagtatgcttgctggatggaggattcataccagctgatgctgatgtagtgtttcactggtgtcatgcatgcatgtatcgtgctattataatcaaaaagaaaaaagaaataacagtcacggatggtttgtttgccaaaaaaaaaaaacta

SEQ ID NO: 326006 - DNA, 86 bp, Zea mays
aattccctgcccgacccactcttcctcccactcgtcctaaaaaaaaaattttaaatttaaaaaaataaaaaaataaaaaataaaaa

SEQ ID NO: 326007 - DNA, 329 bp, Zea mays
cccacgcgtccgcccacgcgtactcccacgcgtccgattgctgttgaccgattgggtgcgtttcaagatctcagaggtaaagactattttccgacaagagcgttggaaaatattctcaagacgaaagggataattgatgacaagaagaaagatgacgacgatgacgatgaataaagcgaggctaagactaggagggttaggtcttcaactgctcaagactctgactcagactgaacctgagatgaggatcgatgactcaccgtttctgcactttggattttgtcagtatgattgttctgtgttgcgctgtactgtactgtaattgattt

SEQ ID NO: 326008 - DNA, 64 bp, Zea mays
taaaataaaaaaaaataaaaaataaaaaaaaaatatttaaaattaaaataaaaaaaaataaaaa

SEQ ID NO: 326009 - DNA, 297 bp, Zea mays
  unsure (1)..(297): unsure at all n locations
accggctccgggaattcctcggggtcgactccacgtcgnntccgtgcatcacggtagggcggatctggcntnctgacaccagtctnntcgtcttcttttacgacgaccgtnncaagagccggcgcggaaggggtggtgtcatcaggtnttctcgcgacccgtcctgggacaactgctgcgactnctcggcttacccacgttatcgacgccntngagtccgtacaagggactcnttgccatggcttgctngctgcaaggaatctcngnntcgctgggtggccccnaacggcaagggac

SEQ ID NO: 326010 - DNA, 173 bp, Zea mays
cccactcgtccgaaaaaaaaaaataaaaattaaaaaaaaaaaaaaaaaaaaaaaggaaacggatataaaatatccaaaactaacattcacttacatacaacaacataatctcttctataaactcacctaaattcaattaacttttccaactactaaacaacatctatactgtc

SEQ ID NO: 326011 - DNA, 283 bp, Zea mays
cggacgcgtgggcggacgcgtgggcgaaatatcagatgaatcacactatttcatacaaatgctggggatagcctttgagcaggccactactaccatgttgattttgtaacagcttgtgcagaatcataagaaaccctaggacttgaccgcagccccttgcgcctacatgtatgcgagcattctacttggcagttcttgtaaataatataaccatacagtaacttagcattcaaaatatataatgttatggtattgaaaagaatatggcacgtaccattggttg

SEQ ID NO: 326012 - DNA, 87 bp, Zea mays
tcgcccacgcgttcgcccacgcgtccgcccacgcgtccgcccacgcgtccgcccacgcgttcgcccaggcgtccgcggacgcgtggg

SEQ ID NO: 326013 - DNA, 192 bp, Zea mays
  unsure (1)..(192): unsure at all n locations
ttcccgggctcgactccacgtcgtctcgtcccactgcgtctcgaatcgcacngtngccttcgtgctcgtgcgactgcatttcattcaaatnnttctgccctagtnannacttgtcgatggnttaggatagnngggcctactcatgnnngtggtgacccgggttgacgtnngagaattatgggtnnntcgatt

SEQ ID NO: 326014 - DNA, 363 bp, Zea mays
cccacgcgtccggttggcttctcctccccctccggttcgggttcgggttcgtgaggttctccggggttcggtttcgtgggtgagcggatcgagatggcggcgtcggatgttgagtaccgctgcttcgtcggcggcctcgcctgggccacggacgaccactccctccacaacgccttcagcacctacggcgaggtcctcgagtccaagatcatcctcgatcgggagacgcagaggtcccgcggcttcggcttcggcaccttctccacggaggaggcgatgcggaacgccatcgagggcatgaacggcaaggagctggacggccgcaacatcaccgtcaacgaggcccagtcccgcggcgggcgt

SEQ ID NO: 326015 - DNA, 305 bp, Zea mays
acgtccactcgtccgatttattatatcacaaacattgatgctatcataatgatttaggttactgtgactcttgacgtatttgttgttacttttatggcaaccaatgaggcatctacttatgacagactggagtatttttgttagctcaaaaagactggtttctggtgacacatttattttcttgagtgtgacatcattacatgttaaagttgtcttgtacgttacatttatttcctggctttactaaatttttggatcaaccttctaactgttcttcatctaattgatgtgagaacaaatagctg

SEQ ID NO: 326016 - DNA, 329 bp, Zea mays
aaaaaaaaaaaaaaaaaaaaaattaaaaattaaaaaaaaaaaaaaaaaaaaaaaggaaaaggaaaaaataaaaaaaaaaaaaaaaaaaaaaaaaaaaaaaaaaaaaaaaaaaaaaaaaaaaaaaaaaaaaaaaaagggccgccctttttaaaggttccaattttcctaccccttcctttcaatctaatacctttttttttattgcccccaaatttaattcctttgcccttttttttaaaacttttaacctgaaaaaccctttcctttccccaactaattcccttttaataaaatccccttttccccatttggcttattatcctaaaagc

SEQ ID NO: 326017 - DNA, 341 bp, Zea mays
  unsure (1)..(341): unsure at all n locations
aagtggttcgagtgtgtgagtcatcgcctgtcgtggactccgaaatgaatggtgatatctatgctctgagcggggtcgaagcccagagtgaaacctttctggtggatggctttctgaagcgatacctgatcgtgcaatatcnngttcgtctgactttgggtatagtgggcgaaaggaactaatcgaatccatctagtatgctggttcccttccgaagttttctcctcagggatagtctggagctcctacactgagttctattcgggtataagcccaatgatttagaggcattcggggtgcgcaaacgctccttcgaccttatttcttcaaactttaaaata

SEQ ID NO: 326018 - DNA, 72 bp, Zea mays
cggacgcgtgggaaaaaaaaaaaaaaaaaaaatagaaataaaaaaaaaaaaaaaaaaaaaaaaggaaggggg

SEQ ID NO: 326019 - DNA, 74 bp, Zea mays
cccacgcgtccgcccacgcgtccgcccacgcgtccgtccacgcgtccgcccacgcgtccgggtctagatcgcga

SEQ ID NO: 326020 - DNA, 149 bp, Zea mays
cccacgcgtccgcccacgcgtccgcggactcgtgggaaaaaaaaaaaaaaaaaaataaaagggaaaaagaaaaaaaaaaaaaaaataaaaaaaaaaataaaaaaaaaaaaaaataaaaaaagacatccattttaggggatccattttta

SEQ ID NO: 326021 - DNA, 304 bp, Zea mays
gccaagcttctcaagccttggtacgcggccttcgtgaacagattcctcgccatggtcgcgctggcatctatcgtagccgccgcgctccggcgggcgtggccagcattcagcatggacgatgtcgtcggcagccttggcgccgcgcggccggtccacgtgctcatggcggtcatcctggctgccggcgtggcgaagctgaggcgcctgcgccggccgcgggacgtgtacctggtggagtacggctgcttccgaccgcggccgtgcttccgggcgccgttcgccacgtgcctggagcacgtgcacc

SEQ ID NO: 326022 - DNA, 138 bp, Zea mays
catcaatccatattctttctttctcaccataacttcctacacccttgtatattttaaaaggatctctcctccatcacacaatccattctatcttccatcacccatcctacaaacatcccaactcaaatttcacctcac

SEQ ID NO: 326023 - DNA, 120 bp, Zea mays
  unsure (1)..(120): unsure at all n locations
gcccacactatnacatccactcttacntcctctttcatccaacntaataactcttttatactcttacctaaattcaattcattttttctactttttacaacctaaaaacttcaaaaaccc

SEQ ID NO: 326024 - DNA, 278 bp, Zea mays
cccactcgtcctaaaaaaaaaaaaattaaaaaaaaaaaaaaaaaaaaaaaaaaaaatgtaaaaataaaaaagaaagaagggcaaaatatataaaaaaaaaaaaaattaaataaaaatacatacaaaataataaatattttattatgttacctaaattaaattttttaaacatctttttacaacataattaaataaaaaaacctttgtgttccccaatttaatctcttttaaaaaaatacccttttcgctaacttatttaatatctaaaaagccccaac

SEQ ID NO: 326025 - DNA, 257 bp, Zea mays
  unsure (1)..(257): unsure at all n locations
ttctaatcncgaaggccgccctttttttttttttttggttgggtaccatggcatgctgattttctgaggggagacgtcctatanactacagtaacaaaaaccaccttcaagccggcaagcttcaacccactttcacaaactattgagcaccaacatttttgatggcaatatatacacacttgtatttacaacttcaacgcttgaatctgaagaatcacaactcaaaaccaccattcaatttaacaaataaccaccgc

SEQ ID NO: 326026 - DNA, 192 bp, Zea mays
  unsure (1)..(192): unsure at all n locations
atgaaatgcttaagttttgtgcatctaacaaaatatatccaaagatcaangtcattgaaatttacactaggagcgaggctctctagaggcctgtaaatcgtgatgtgaaataccgctttgtaatttcagaaataatctattacctttgatgcgtccagccactgaacgagacatatacattgtatgttactt

SEQ ID NO: 326027 - DNA, 143 bp, Zea mays
ggctctcaggagagtgatatcaagtgtgctcctccctgctacacctactctgtaatgatacatgatcaagggcgactggttttctattgataactctctcatgatcgtactcttcttatctgggatgacggcaatgattatgc

SEQ ID NO: 326028 - DNA, 224 bp, Zea mays
aaaaaaaaaaaattaaaaaaacgatttattatataaaaaaaaaaaaaaaaaaaaattgtaaatttaaaaaaaaaaaaaaacaaaacattccaataaataaaacaatataaaatatctcttaaaaataaaaaaaatatactttctctttccccttctataattccctattttcttttcccctttttttcccccctctcatctcctcttctttccctctttctcta

SEQ ID NO: 326029 - DNA, 72 bp, Zea mays
  unsure (1)..(72): unsure at all n locations
aaaaaaaaaaaaanaaaaaaaagattttgtttttangangatattattataatatagggggcgttctctttg

SEQ ID NO: 326030 - DNA, 377 bp, Zea mays
  unsure (1)..(377): unsure at all n locations
gncgtttatgttccacaccgagaaatttctggttctcgtctgagcctctatcttagggacgaccttngcgttatctttgaacgggatgtgctcgncccagcgcaaagcgtccccacctgaccaatgtcttctcgcnctcggatcggcnctcggcgaggcccgggcccttggagcccaaaaggaaggggcggtgctcccgacttacgactccacggaagtatgtcaaataacacttcaaaagtagttggtatttcactttgtcgcccggaaggctctccacttatctctacancctctcaaagtcatattcacnacaagtcggactatgagtcaagcctcaacaagggtgcttctttcctccgctgattcccgccaag

SEQ ID NO: 326031 - DNA, 316 bp, Zea mays
cccacgcgtcctaaaaaaaaataaaatataattatccaataaaataataaaaaaaaaagacaaatgtaaaaaaaacaaaaataaaaaaattaatatctaacaaaaattatatttaaattaccttctattttctaaattctattatatacaagctctttctcttaaatttttctactttaattcccttttactttcttatcctttcttttttattcctgtctttcttaatcctttttattctttgtttttttcatatcccttttttttaaaaaactttttttatcccaaaatatttccctttatttaaatttccttt

SEQ ID NO: 326032 - DNA, 440 bp, Zea mays
gtttgggatttcattcgcaacaactgagcgcagggtaggaaggcacctccaaggaggaagaggggctcgcagacattgccatccaagctttctccacgacatcaactgacagcaccaacagagtggccagagcatgagcacgagcgcccccagctacactcccacagctgcagcccgtcgtcgcgtcgtcaccacgccacagcggacactgaccctgtcaccaaatgttggtgacatacacgagcgttactgctatctccaaaacgtcaagtagttagaatgtagattatccattcttaatatgatattctacaatctacatttctgtaaacaatgattattttaccttttcttgttgattgtgagcataactgtagagctcaaagagcttctctggatctgtcatgtgggttatggtttacatttgcacaccatgtggg

SEQ ID NO: 326033 - DNA, 365 bp, Zea mays
agagcatcgtggccagcggcctcgcccggcggtggctcgtgccagggtcctaagccattcgggtgccggaacccctggcagtggtcggcgacttctaacggcaccgggaccatccccgacaaggagatcctcaagatcgtcaaggagaacttcgacttcaggcccgggatgatcaccatcaaccttgacctcaagaagggcggcaacaggttcatcaagaccgccgcatacggtcactttggccgtgacgacgccgactttacctgggaagtggtcaagcccctaaagaaggcattcgcttaagaatgatttgtaaggtcactggacatgatgttcattttcgtcttgctctgctgatacctgca

SEQ ID NO: 326034 - DNA, 306 bp, Zea mays
gaatccatccccattcccatgagtttaaataaataattattttacacaccctacggtcggtggatttctcgctgagcggccctacacctttatcgtcgtcggcttcgccgacgttgctgtgttccgtcttttcgaccatggcttctgccaagatcagtgctgcccagcaagtggagaaccgaagcgcgctttccaaaaggtcacgtaaccacctttctgtaatggaaggggactggaaattgcctcaatgtggtaatgtcaacttcaattttagaaatgtttgaaaccgtggaacctgttgtgcac

SEQ ID NO: 326035 - DNA, 62 bp, Zea mays
acccagctcgctcgtcccatctgatcatgtcgtgcacctagtagcgacctgctctatcatca

SEQ ID NO: 326036 - DNA, 133 bp, Zea mays
tcggtgtgtgaacagtcttgggaacggcttcgttcacgccgtcgacgaggactgtgtcggggcggggcactttttagactgcgccgtgcgcccgagcccggaacgctctcagatcgtggagctgctgactttt

SEQ ID NO: 326037 - DNA, 349 bp, Zea mays
cacctgccttatctaacaacatatattccttctaacccatactttccacatcacaatctatttcctcctcatctaacctactatgacctaccttttatcacaaaaaactatctatacccctttttctacccacataattcataacataaccctaaaaatattattatttcacttacccccataaactcccacacatcctacacctcataacctacttcacaaactatcactataatccctcttcacactttcttcttctccccctctattaaaccaaccccattccctttcatatcctactctttatattatacacctacattacctaatctcaacttattcattcatt

SEQ ID NO: 326038 - DNA, 77 bp, Zea mays
aggacacctgcgttatcttataacagatttgccgccccagccaaacttctcacctgacgatttcttccttccggatc

SEQ ID NO: 326039 - DNA, 70 bp, Zea mays
tcattcgttgacgcgcgctctagcgcttccaagccattttactccatcctgcgaccacataacggagggg

SEQ ID NO: 326040 - DNA, 358 bp, Zea mays
acggttgacgtgtgtggaactagttacatctgtatacttatatcgtcatgtgttcaactgttagagccacttatctagcaatgttgaaaattggaaatagtgagtgatctgatcctcgtaagcatatcacacaaaatcaagatatggtacatgacgtacatccttgactggattattttttgatgccctatacagcgctaagtcttcttgctgcgagacaaaaagctatatcacgctcatacaacatggtggtacaagatataacatacgatcattgctcgttcaaatacaacccttagatccaatcctatttacaaacatacagatacgtttttccgactaatcttgcctacattga

SEQ ID NO: 326041 - DNA, 396 bp, Zea mays
tcccacgcgtccgaaaaaaaaaaaaaccaacttacttattaaccaaaaaaaaaaataaaaaaaggcaagtaaaaataaaaacgtacagtagaacaactaaaaaataacaaactaaaaacttaccacatctttatcaatccactaccaactatactcgtccaactcgcacatcttcatttcctacttctaccatacccaccatctaaacaaacatctactatctcataacacatactctgactctctaacaacacactatctcttcatcatctatacaatcacacttacacttatcctctatctaacttcctcactaaacccacacttcctttcactactatctctttctcatcattaacctcctcattgctcatcactcacctctcttttactctc

SEQ ID NO: 326042 - DNA, 139 bp, Zea mays
aaaaaaaaaaatgtttaatcctaccattcttattaacatactaaaaaaccaatataaggtgacggtatattctaataaattttataagattattatatatttatatcaaaatatcttcaataacattcaacaaataaaa

SEQ ID NO: 326043 - DNA, 62 bp, Zea mays
aaaaaaaaaataattaaaaaaattcctaaatctacaaaaaaaaaaaaaactcaaaaacaaaa

SEQ ID NO: 326044 - DNA, 61 bp, Zea mays
tcgccacgcgttcaaaaaaaaaaaaaaatcaattttattttaattaaaaaagggcttccct

SEQ ID NO: 326045 - DNA, 428 bp, Zea mays
tcgtttcagcgattgtctacataccttactatgtcattgcattcaacatcgcggcttcctaactgaggcatgcctactactgctttgagtccaccagcaacttatttgcatcgagtctgcattagaggcttgactcctccaaattaaactcggcgcacctttgctacaatttcagctcgatgcctacatgaactcgtcgctgtcactgctcttacaatctacgccttcttcgctctactcatatctcgatgatcgcatagactgacacaagacctcactcagatccagcaagaaactccatggaaaccaatgctggtatctgttctactttctgtacctgctaggtttgatacgataccactgactacgacaatacattctctgtttacgatcaacatgagtagacaaatatatgatcacaatgactc

SEQ ID NO: 326046 - DNA, 300 bp, Zea mays
gtctgacaacacagagcaattcttgataactagacacacaagggctttgacatcatcccagagcatacatgaggcgcgttagaccgcaagcgaagcaggctcccgcattgctctgagaccttcggcctcctacggatccactctgcacatgcacatagctgaggctaatctcttgtatgaaacaccatatgtatcatggtgcttgcagaattaactatctacaatgctaactgtgtctctcttaacagccttattaactgcttgcagtgcgcgatatgcgcgatgatgaccgaaaccttg

SEQ ID NO: 326047 - DNA, 332 bp, Zea mays
tcttactctctcacatcacacacgcacttcctgaccactttacctacaagcataccctttcttacaccgatcattctcaatgtaactgatcacattgaatctcttacttacctacctgcttcccaaataataccatctcctaacttcctgaacacagcactcaacaaagcaacctgcacaaaggtgatccagaccgaccacatccgaatacatagcatactcagccccaagctctaaacctactcaccctcaaaatatatcgcataacactactatacactcgaaacactaatctatcccacaagctactaccacactgctaaacttacctc

SEQ ID NO: 326048 - DNA, 210 bp, Zea mays
acgcccacgcgttcgaaaaaaaaaaaaaaaaataaaataaaaaaaaaaaaaaaaaaaaaaaaaagaaaaaaaaaaaaaaaaaggaaggaaaaaaaaaaaaaaaaaaaaaaaaaaaaaaaaaaaaaaaataaaaaaaaaaaaaataaaaaaaataaaaaataaaaaacaaaaatattctaactatataaaagatcttaatcacttatacta

SEQ ID NO: 326049 - DNA, 243 bp, Zea mays
cccacgcgtccgaaaaaaaaaaaaaaaaataaaaaaaaaaaaaaaaaaaaaaaaaagagaaagaaaaaaaaaaaaaaaaaagaaaaaaaaaaaaaaaaaaaaaaaaaaaaaaaaaaaaaaaaaaaaaaaaaaaaaaaatcacactaaaaatacacactaaaaaaaaacaatattagaagtcataaaagaccaaaataaaatagaaaaacaaacaacatgaaaaaaccaaccaaggaaagaaca

SEQ ID NO: 326050 - DNA, 200 bp, Zea mays
atcccttagtttggaggtgtggaggagctgtgtgagaaagtgtggttgaagagtgttgtttcgttgaagagaaaaaaaaaaaaaaaaaaaaaaaaaaaaaaaaaaaaaaaaaaaaaaaaaaaaaaaaaaaaaaaaaaaaataacaaaaaatcaataaatataaatcaaaaaaaactaaataaacaaaatacaaaataaaa

SEQ ID NO: 326051 - DNA, 95 bp, Zea mays
aaaaaaaaaaaaaaaaaaaaaaaaaaaaattaaaaaaaaaaaaaaaaaaaaaaaaaggaaagataaaaaaaaaaaaaaagaaaaaaactacaaac

SEQ ID NO: 326052 - DNA, 374 bp, Zea mays
acgcccaacgtacgacactcataccatgattttcttaacatatctaatcctacaaattatctaccggtaaaaatttaagtgtgttaccatgatatctacttagacaaatatatcatctattaactatatatacatctctatccaattatcacattcatcatatacctttatatatacttcacttttcatagacatcctaattgatatattatttcatacaccaaatacgtcatccttataaaaaacaccacagtcaatgtttaatcttcttcaatacaacaactagttcacttacaactacattatcctttaaccatattatttacctattctaactttacattcttttactgtcaatctaaaataataatcat

SEQ ID NO: 326053 - DNA, 424 bp, Zea mays
cccactcgtccggaaaaaacataatcaaaatacagaaaagttcactggtatcgtaagctgggcacattagatcacaacttttgcccctcttctctaaaacggaagctcatgttcatttcagcaattcagcttcaaccatttggcattcatgtaatatttcatacgagttaaagggctcatacctaatcaagtctgcgggtctccaattctgaaatacaaagataatttatgttctcatctttctgaaatgaacaagatgactggcttatgggttaaggtttttttatagagcaccatgacttatcaggtaaagttatagttgtgcacaaaatgtcattttttaatccttaatgcgtgtgctattcacacctgtcttctcttgcagttctgtgaacaaccctaacttatgtggtcctggcaccac

SEQ ID NO: 326054 - DNA, 172 bp, Zea mays
acgcccactcgtacgaccactcgtccgaccactcgttctcccactcgtccgaaaaaaaaaaaggaagggtaaaaaaaaaaagaaaggaaaaaaaaataataaaaaaaaaaaataaataataaaataaaactaaaatatataaaaaaatataaattaaaaatatattaataat

SEQ ID NO: 326055 - DNA, 293 bp, Zea mays
taaaaaaaataaaaaaaaaaataaataaaattaaaaaaaaaaaaaataaaaataaaaagtaaagaaaaatataaaaataagtgaatgatctataaatatatttataaatatattaatttatcttttttttatccttttttatcttattttataatttttctattttaagttaattcttcctttttttttcacacttttcctttataaaaattattttcttattctattttaatttatattctttaaatatctcattttttcaatctttattctatacaattttttctactttt

SEQ ID NO: 326056 - DNA, 414 bp, Zea mays
cccacgcgtccgcccacgcgtccgcttgtaagtatccatatctattggtggtatcgcatggatggtttttttcaatggaatttaatacgcgcccacattgatgtttacaaaatgatgcttgagttgtgtgtacggcagtaacggcacgagcaaatatttatgttgctctacctcatatgcttaatgtgtaattcagtaaatatccattaatacagaccataatggaattactagaaacttatattctcatattgtgctatatttatattgatgttttcaatggttattacactttttatagaactttgggtagaggagctcatttgccattgttccctaatatgcagagtaaattgtcgagagccatttgagctaatttttagtcaaccacctgttcgagttagctgtttcttc

SEQ ID NO: 326057 - DNA, 408 bp, Zea mays
acttcttcaaactaacttggggttcgaagtactttgaggtgtggtacgaggggggcagttggaccctccctgcaacgccgtacgctacatctaccgcagagtcctcggcatcaaccacatgtaccacaagccggtatggagaaggcacacggcctgcactgatgactccccacacgaaggtccttctacagacgattccccatcgtggcagtgctccaccattcgatcctgaaaggatactgagctcactgtctacggtgctgaactctgtcgtcgctgttaactacaggcatgtgcttgtccacatgaagagccattcatacaggcttacgcagcgtattaccatgggcacaactcttctcgttctcagaatcattctgcacttatcgcatgcgatcccactcaaca

SEQ ID NO: 326058 - DNA, 331 bp, Zea mays
aaaaaaaaaaaaaaaaaaaaaaaaaaaaatataaaaaaaaaaaaaaaaaaaaaaaaaaaaaaagaaagtaaaaaaaaaagggaagaaaaaaaaaaaaaaaaaaaaaaaaaaaaaaaaaaaaaaaaaaaaaaaaaaaaaaaaaaaaaaaaaaaaaaaaaaaaaatgggcttcctattttaaaaatccaaatttttattcacctttttattcatttataattttttataatgattccccaaattaatttaatatgtactttattattaaaactttttttctgaaaaaacccttccttacccaattataatatttttcaaaaaattcttttttt

SEQ ID NO: 326059 - DNA, 434 bp, Zea mays
cgacgctcagccgctcaggaatcgaaggagcgacgaagctaaaggagggcgcatcgaaggcgaattgaagcatgagggaatcgattaatcgtccgcctacgccgagcgcggtggaggatcgggacaaggagccttctctcgtagaaatcattaacatcaagtttgtagagagtggagagaaggagaagctgacggagctcctccgcgagcggctcgtcgagtgcggctggatggatgagatgaaggcattctgcagggactatgtaaggaagaaaggaagaaataatgtgagggtagatgacctcattcatgttattgttccgaaaggaagagcatcagtgcctgcttcggtgaaggcagaactcctgcaacgtatccggtccttcatggctaccacactttggtagtcatttatcgtgacggttggagctaca

SEQ ID NO: 326060 - DNA, 79 bp, Zea mays
attttggttcttattgcatgggatgtactgctctgtacataatcatttacatttggaccgaaccaaaaaaaaagaaaaa

SEQ ID NO: 326061 - DNA, 374 bp, Zea mays
caaatgctttcagagaagctataattggtaacactcttgatcttacagcagcccatcagaggataggtctcacgacacaatgacaggtcctactaatgaaacagacttattatcccatattcgacacttatatcgagcttgacattggtgaccacacatgcgatgatcaccacaagctattacttgcatatctagggattccaccctatgaactgtccccaggttgatcctacaatggtcacacatcattcagatgatctgctcaaagctcgagatgaaacgctccgtaccgaccagatacaacttataccggttctcactgatctcacgtgcgtacactcgccatttcgatcgtatgatcaccatcatatctc

SEQ ID NO: 326062 - DNA, 435 bp, Zea mays
cggacgcgtgggtctgtattatcaacctagcaacgcttcaagtgccggtatgctatcttggtgcgtgccatctgttagatttttctgttcttttaacaaccctttggtattactatattaggagatcctcggtgactgtggccgagctgcaatccagacacaaggctccatgaacaatccatttggatcaacttttgtatatggttatcagaatatcgctttcgaggtgatgaaaaacggatatattgcaactgtcaccctcttccaatcatgagtgtgccactacatgtgctgctgctctgagctctggctgcaacaatggtggttaacctgcagaaaggaagtatgccgtacttttgtgcttcagcagcagcaatttcgagtcgaagccaactctatggggcctggtgacggtgcttggtttatggaatggga

SEQ ID NO: 326063 - DNA, 219 bp, Zea mays
ggttcgatcgcaagcgccgtcggctgctcgaccaccagttgcggctcggcgatcgcgacggctttgcgcggctcggctacggcgcgccgtccgacgcgcagatgttcatcaagggctggctgttctatccgtacggcgcgccgttgccgccggtggccgccgaaatcgcgccggatcacccgcgcggtttctggctgacgcacgcgcagtggccggcgt

SEQ ID NO: 326064 - DNA, 278 bp, Zea mays
cccacgcgtccgcggacacgtgcacgaactcgtggccggtgcctgggggactaaatcaggggccgccagttctgaagagggctatggacaacctattcgtgttaatgaattggctgatcctctcgcacgttatgctgatctttcgacgctgtcactgctggctacggccttccagctgcggtgttattctgcgaggctctgatagggatgggccacatctcttcatgatagaaccctgacgagcttgctatacatactatactgctgcattcaccaag

SEQ ID NO: 326065 - DNA, 65 bp, Zea mays
acgcggacgcgtgggttaaatttaaataaaacatcatcattattagtttaaaaaagaaacaaaga

SEQ ID NO: 326066 - DNA, 227 bp, Zea mays
aaaaaaaaaaaaaaaaaaaaaaaattaaatataaaaaaaaaaaaaaaaaaaaaaaaaagaaagggaaaaaaaaaagagaaggaaaaaaaaaaaaaaaaaaaaaaaataaaataaaaaaaaataaaaaaagggccttcccttttatttaacccaattttcctttcccctcaattcaactcattaattttttattatgttcacctaatttaatttcatattcttttttt

SEQ ID NO: 326067 - DNA, 104 bp, Zea mays
gcgacctatggacctgcatcagactgctccccctaagttggccgatatttatgttacatagaatggtagccctggtctatggttaatgaacgcgctgtacaact

SEQ ID NO: 326068 - DNA, 281 bp, Zea mays
tcccacgcgtccgaaaaaatttaacacctttacaaaaaaaaacaaccaaaaagaaaaaaatgaacactaaccaaccgtactaagcttctacaccatacctaaaattcactcacaaacataacatccctcttattaaaaactaaacccaatctattgaccgtaaactatctaattcttacactacgaaatctcttccatttcccaatttatttcctttatttataccgacacattcactaattttcaaactcttatacaaaccaactcttttttttgaacct

SEQ ID NO: 326069 - DNA, 370 bp, Zea mays
  unsure (1)..(370): unsure at all n locations
cggacgcgtgggcggacgcgtgggaaaaaaaaaaaaanagaaaaaaaaaaaagaaaaaaagaaaaaaaaaaaaaggaaaaaggaaaaaaaaaaaaaaaaaaaaaaaaaaaaaaaaaaaaaaaaaaaaaaaaaaaaaaaaaaaaaaaaaataaaaaaaaaaaaaaaaaaaaaaaaaaaaaaaaaaaaaaaaatgaaaaaaaaataaaaaaaagaacatattttaaaaaaatttaataaattaaaaaaaaatggatttaaaaaaaaaaaataaatttaaataaaaaagatattattaaaaattaataaaaataataaaaagataataattaataagaaaataaaaaaatttaaaaatataaaaaaataaaaa

SEQ ID NO: 326070 - DNA, 334 bp, Zea mays
acgacgatggcggcgaacccctcgcgtcctcatccgaggcggctcgcctcgaggccgtgctccggcgtctcacgcgcggatgaggtccggatccgggtgcaccaggtcacgatccggggctgcgcccgcacgcgccgcgccgcggtcgaggcggcggtcggcccggacgtgtcgcgcgccgtcaccgtgcgggacctcgtgcgcgccgccgtcgccgctggtgaccggctccgttgcctcggcgccttcgacacagtctccatcaccctcgacgcggcgccgtccgggatccctggcagcgctgtcgtcgtcctcattgatgttgcggaggccc

SEQ ID NO: 326071 - DNA, 118 bp, Zea mays
tcttcctaaaaaaaaaaaaaaaaaaaaaataaaaaaaaaaaaaaaaaaaaaaaaaaaaaaagggaaaggaatataaaaaaatccaaacaaaacaaacacatactttcaacttcaatta

SEQ ID NO: 326072 - DNA, 163 bp, Zea mays
aaaaaaaaaaaaaaaaaaaaaaaaaagaataaaaaaaaaaaaaaaaaaaaaaaagaaaaaaggaaacatacaaaaggaaaaaaaaaaaaaaaaaaaaaaaaaaaaaaaaaaaaaaaaaaaaaccaaaaaaaaacgtcaaccttaactgggaaacccttttcat

SEQ ID NO: 326073 - DNA, 438 bp, Zea mays
cccacgcgtccggtcacttgctctccctccaacaagctaattaaggccggtgcatccctgttctagctcgttgcattatccatggctgaggagaagcaccaccaccaccacctgttccaccacaagaaggacgaggagcaggccgcggccggcgggtacggcgagtccgccgagtacacggaggccacggtgacggaggtcgtgtccacgggcgagaacgagtacgacgagtacaagaaggaggagaagcagcacaagcacaagcagcacctcggcgaggccggcgccatcgccgccggcgccttcgcactctacgagaagcacgaggcgaagaaggacccggagcacgcgcaccgtcacaagatcgaggaggaggtcgcggcggcggcggccgtcggctccggcggcttcgccttccacgagcaccacgagaagaag

SEQ ID NO: 326074 - DNA, 316 bp, Zea mays
cccacgcgtccgcccacgcgtccgcccacgcgtccgaaaaaaaaaaaaaaagaaaaaaagaaaaaaaaaaaaagaaaaaaaaaaaaaaaaaaaaaaaaaaaaaaaaaaaaaaaaaaaaaaaaaaaaaaaaaaaaaaaaaaaaaaaaaaaaaaaaaaaaaaaaaaaaaaaaaaaaaaaaaaaaaaaaaaaaaaaaaaaaaacaaaaaataaaaaaaaaaaaaatttacattacataaaattcaaatattaaatatataaaaaaatagccaaaaagataaaaacaaatcgccattataaaaaaaatcacaaccggaaa

SEQ ID NO: 326075 - DNA, 421 bp, Zea mays
gcgcccacgcgtccgtccacgcgtccgtggtttccaaagccaagtgtgtgtactagcaaccagctagctcgggcggcagcaggcagccatcatgtcggaggagaagcaccaccacttcttcaaccaccacaagaaggacgaggagcagcccgccggcgagtacgggtactccgagaccgaggtggtcaccgtcaccggcgagggcgagtacgagaggtacaagaaggaggagaaggagcacaagcacaagcagcacctcggcgaggccggcgccatcgccgtcggcgccttcgcactctacgagaagcacgaggcgaagaatgaccccgagcacgcgcacaggcacaagatcatggaggaagtcgctgccgcggcggccgtcggcgcctgcggctacgtattccacgagcaccacgagaag

SEQ ID NO: 326076 - DNA, 278 bp, Zea mays
cccacgcgtccgcccacgcgttcgaaaaaaaaaaaaaaaaaaaaaaaaaaagaaaaaaagaaaaaaaaaaaaaaaaaaaaaaaaaaaaaaaaaaaaaaaaaaaaaaaaaaaaaaaaaaaaaaaaaaaaaaataaataaaaaaaaaaaaaaataaaaaaaaaaaaaaaaaaataaatatattaaaaaaataattaaaataaaaaaaattgagttaccttataaaataacctaactgaaaaaacaattttaaaacccaactaaattatcttataggaaat

SEQ ID NO: 326077 - DNA, 149 bp, Zea mays
tcgcccactcgtccgcccactcgtccgtccactcgttcgcaccccgcctctgaagcaaatgcgatgcaattgcaatgcaagcaaaaaaaaaaaaaaaaaaaaaaaaaaaaaaaaaaaaaaaaaaaaaaaaaagggcagacaatataaaa

SEQ ID NO: 326078 - DNA, 334 bp, Zea mays
tcccacacatactaaaaaattataaataattaaaaaaaaaaaaataaaaaaaagaaaaatttgttaatataaaaaaggataaagtacaaaaaaataaaaactaatatacaccaatataaacataattatcttcaattctctgttcactctattataaccttctgactttgaaaaacttacttttttctacttaatccaactttaaacatagtccgtttaattcaattctttttaactgaacaattctgtacctttcccactttataacattttgtcagacttcctgtttaatggaattcatcttttatcggcacattcatctctacattctttt

SEQ ID NO: 326079 - DNA, 302 bp, Zea mays
ccactcgacgcacacatcccaaacaaaaccctaaaaaaatttttatgattaataaaaaacattcttggccaaggctatttgtacaaacttaatggcattaaggccaaaattttacactcttactatgaaataccaataccccctactttccctattaatcactacttcgatcccgaaagccccacaatttgaccagcttactatgatggtatcccatgctaatttatccagatcgattaattgctattagcactctaatttattcaaattaacaacagccggacacactaaccggccaatta

SEQ ID NO: 326080 - DNA, 341 bp, Zea mays
gtcgggcgttcgtaccactacggttcgggttcgggttcgtgaggttctccggggttcggggtcgtgggtgagcggatcgagatggcggcgtcggatgttgagtaccgctgcttcgtcggcggcctcgcctgggccacggacgaccactccctgcacaacgccttcagcacctacggcgaagtcctcgagtccaagatcatcctcgatcgggagacgcagaggtcccgcggcttcggcttcgtcaccttctccacggaggacgcgatgcggaacgccatcgagggcatgaacggcaaggagctggacggccgcaacatcaccgtcaacgaagcccagtcccg

SEQ ID NO: 326081 - DNA, 203 bp, Zea mays
aattcccaggcaggcaggttttcgaggattgcaggaagaccgaataccgatgcgtgctggggctcgttactggaactttacagtaccccaaaatctcatatccttcctgcccgcccgcccgttcccgtctactcgtcgttcttgtcttccgcgctccaccttctttttctcctacttcatcttaatcggatactctcatattc

SEQ ID NO: 326082 - DNA, 258 bp, Zea mays
gcgcatcgtctttgtgcttatgagcatggggatactcccatgcttttggcgcgcaccaactgggaacgtgtaagacgtctcgtggaccaagccatattactcgcgatggagagaagccttcctcgacaatgtcttgttccacatcatccagttctatgtcaaggagttgcctgacaacaccttagacttcttcaccctgtactactgtgttcctcgtcacctacccaagcctgtctacgaatccttctatgtcattct

SEQ ID NO: 326083 - DNA, 236 bp, Zea mays
aaaaaaaaaaaaaaaaaaaaaaaaaaaaaaaaaaaaaaaaaaaaaaaaaaaaaaggaaaagggaaaaaaaaaaaaaaaaaaaaaaaaaaaaaaaaaaaaaaaaaaaaaaaaaaaaaaaaaaaaaaaaaaaaaaaaaaaaaaaaaaaaaaaaaactaaaaaataaaataataacaaatataataaccttaaaaaaaaaaaataaaattacataaaaaatataataacataataataa

SEQ ID NO: 326084 - DNA, 446 bp, Zea mays
tcgcggacgcgtgggcttattcttaagggttcagccatatgttgacatcctctggaaagcaggggaaatctgtggagtcagcacagaaagatttcttggaggcaaagcaccttgccgcacaacttgttcttgatatccttgattctattgtaccccatgagaaccgcatattggtcaagcttcttgagacatttgaaattgagttgagagacatggcccgtgctttgtatgattcatagttggacgatggtgatctaatgaaagcacgtgaacatctcagacagcaagttaagcgctctatggaatcagaatccaatgcacttgctgtgactctaataacacatttttccatccaatgctgtgatgagtccttcatcatataattgattaaaaacaatcatttagagattgcagagcaattgtgctattttcatgggcaaggaaat

SEQ ID NO: 326085 - DNA, 112 bp, Zea mays
acgcccacgcgtccgaaaaaaaaacaaacttatgaacaaaaaacataaaaaaaaataacataggatatgataacgaataaagtgcagaaaaataaaaaaaggtctaccactt

SEQ ID NO: 326086 - DNA, 61 bp, Zea mays; identical to SEQ ID NO: 56735

SEQ ID NO: 326087 - DNA, 287 bp, Zea mays
cccacgcgtccgaaaaaaaaataaaaaaattaaaaaaaaaaaaaaaaaaaaaaaagaaaaagaaaaaataaaaaatataaaaaaaaaaaaaataataacaactaatttaaaataatcaaaagttctttccattttcaaccatacttctttcctttcctttattttcaacttatttcatttactttgctgtcctttaacttcatttaccctgcctactctttacatcatccccaatttaataaactttcgtcttttccaccttattcccttttccatatttccccttt

SEQ ID NO: 326088 - DNA, 317 bp, Zea mays
actcatacacccactcatcctattcgacagacttcgctttttcctcaagcatattcaaacaaggctcaggcgcatttctaaatcaaccacttccaaactactcccacacatatccaatttcatatccatactaaatattcacatttaatctacttacttgattattatattaaaatatataatcctgctacaacctaacttttcttactctactcacataactttcaaaacatactcatacatttcaataattcccaactacaataatctttatacactttatccactatttatatccatattactcaaattttatc

SEQ ID NO: 326089 - DNA, 63 bp, Zea mays; identical to SEQ ID NO: 61902

SEQ ID NO: 326090 - DNA, 417 bp, Zea mays
  unsure (1)..(417): unsure at all n locations
gttcaccttccgggtgcagcccaaccaccccaacctgcaggaagacgagtagctacagcgtgctggatagtgttctgcatgccgctctgaactgaagctgcaggaagacgagtagctacagcctgctggatagtgttctgcatgccgctctgaactggagctcctcacctgcagcttctttctcgcgtttcatcattcagcgttagctggtgatgataatgttggggcgaaggcgaagacgctatcattcgctcgatgccttcgtcgccttcgtcgtctcgcttcaccaacgacgccaaagacgccggtccaatgaggacttcgcgactggacttcgtgggcgtccttcgcccttctccattgcgagacgaaggcaagactccgacgatgtctgctagcctcacgtnctcatcgggt

SEQ ID NO: 326091 - DNA, 401 bp, Zea mays
  unsure (1)..(401): unsure at all n locations
tactcggtccgttgaattcccggggtcgagcccgacgcgtcacgtcccacgtccgtccgtcccatcgccgtctctgattctgttcagtaaggcttcgtgccttagtgaaatctctcgcgatctgtagnatgttagtgttgttgagtccaaaaaaaaanaaaaaangggccggcacgcttcttagaaaggatcctaagncattacgtnatcgcgtgccatgcngactgnntcatagctttcttctaattagtnggtcaccttaannattcatattcacttggcannngtcgttttaccaacngnntcgtgacctgnnggaaaactntnctggcgttaccccaaaacttaatcgccatttgcagcacaaaatccccctattcgccaagcttggcnnngtaata

SEQ ID NO: 326092 - DNA, 420 bp, Zea mays
tgaatgggtcggcgaagtggccttcagcggctatgggccggtcgtgcaaacgactggcgcagattgctgtgatggctggcttaacagcgggtatcacctgcaaggcgtgaccgcaaactcggaaagcatgggtgtcggtgtcgctacgacggtaacgacgcacgcggccgggcagcaaccggcgatgtggtcattttgcgttctcgacatggggacgacgacgggtgttccggccgcaccgaatctcagtgtgccgacgcaaacgaactcgattccttcgagcggtggacagcaattcgcgacgaacctgatcgttcacgcgccgtacattgacgaggccagtgtggcgactgcactgacgcttggggaagtcccgaatccggcaccggatctgggggcgcctgggcgacccatcatggt

SEQ ID NO: 326093 - DNA, 55 bp, Zea mays
ctagttctagatcgcgggcggccgctcgcgatcggacgcgtgggcggacccgtga

SEQ ID NO: 326094 - DNA, 371 bp, Zea mays
aaaaaaaaaaaaaaaaaaaaaaaaaaaaaaaaaaaaaaaaaaaaaaaaaaaaaaaaaaaaagaaaaaagaaaaaaaaaaaaaaaaaaaaaaaaaaaacaaaaaaaaaaaaaacaaaaaaaaaaggccgccccttttaaaaaacccaacttaactcccccttcattgcaactcaaaaccttttttaagggctccccaaaatcaaattacttgcccctcttttaaaaactcctaacctggaaaaaccctggctttcccaaattaaaaccctttcaaaaaaatccccttttcccaacatggcgaaaacccaaaaagcccctccccaatcccctttccaaaaacttccccaccctaaatggcaattggaaccccc

SEQ ID NO: 326095 - DNA, 369 bp, Zea mays
gcaaggtgttcgaccatcagctgtgccaaggcccatcggtaccatgtacagcaggataggggtgtttacacatattgacaggacacaactctccagtttaggctttgccaaaaacccatatagaataacgagcatactcaaacgaccaccactccaagcacaccatcatcgccaacctgacggagagcttctcgtactcccacataccatataaagagaatgcctcggaggagaaccctgtccatggtaccattatgctcttgcacatcatctggggatacgcatactaacatctaggaatatgtggtgacatacattgtccaaatgcttccaattcttgatgattacttttttatcgactgacttaac

SEQ ID NO: 326096 - DNA, 452 bp, Zea mays
cttcttttgctccctgctttctctagctagctctcggctcatcagcgcgctcacacgatgggatcgacaactactaaagcagcaccaccatattaccaggccggcggccgtatgcgattacccggcaaattagcacccgggttctgatcatcgtcagcccttggattcattccatcctcgttccattggtacggtacggtggccaagctaattaagaagcccacacccagcgtcgtcgatcgtgcttgtgcttccaattgctatcttcttccacatgtctccttcaccggcgccaagcagcggctgcagcctagcagtactagtaggcggcacgagtactgcagggtcgtccaacaagttcaggcacgccatcctcaggaacctgctcctacggctcagcaacaaggacggcgctgcgtcgccgtcgtggtccagtgccatgagcctgcgcg

SEQ ID NO: 326097 - DNA, 72 bp, Zea mays
aaaaaaaaaaaaaaaaaaaaaaataaatataatataaaaaaaataaaaacaaatcactctaagaggggtttt

SEQ ID NO: 326098 - DNA, 143 bp, Zea mays
gcatactataatgttactagacagagatagttatccaataaaaaacaaaatataaaaaggaacggttaacatataacacaggaacttcaacataaactatatcctccactctcctcaactactctctaaaacctactactctc

SEQ ID NO: 326099 - DNA, 223 bp, Zea mays
ctcccacactccttacctcatttgctttaatatcatcattcacaccttatggggctggttttaaaatagggtgggcccatcctactccatccacccaaccaaagtttaccacatcatatcctatttctcaagaacatcttccaacatcatccacaccaccatcctttctctcctctccatcatacatacatcctactccatccttctaccctaacctctcttc

SEQ ID NO: 326100 - DNA, 330 bp, Zea mays
cccacgcgtccgaaaaaaaaaaaaaaaaaaaaaaaaaaaaaaaaaaaaaaaaaaaaaaaaagaaaaaaaaaaaaaaaaaaaaaaaaaaaaaaaaaaaaaaaaaaaaaaaaaaaaaaaaaaaaaaaaaaaaaaaaaaaaaaaaaaaaaaaaaatttggatccttttaaatattcaaactttaccttcaattatattaaatttattattttttttataaaatcccttaaattgatttaattatctaatttttcaaacttttaaaactttttaaaaaatttgcattttacctattttaattttttataaaattttccccttttttcaattttt

SEQ ID NO: 326101 - DNA, 64 bp, Zea mays
cggacgcgtgggaaaaaaaaaaaaaaaaaaaaataaaaaaaaaaaaaaaaaaaaaaagagaaag

SEQ ID NO: 326102 - DNA, 82 bp, Zea mays
aaaaaaaaaagaaaaaaaaaaaaaaaaaaataaaattaaaaaaaaaaaaaaaaaaaaaaaagaaaaagaaaaaaaaaaaaaa

SEQ ID NO: 326103 - DNA, 313 bp, Zea mays
cggacgcgtgggaaaaaaaaaaaaaaataaattaaaaaaaaaaaaaaataaaacaacggaaaggtaacataactaaagatagaacaaaaaaaatctaaataaactactactaaatacatacccctattcacacactacgtcatcaaccatctattccacaccaatgccaattaccttccctttatcctattattactcaacgcctctaactcacaatccaagctatctaccactgcctctgctcggaccacgaccacaaccaccttaaggcgttcgcgcttcacgtgcccttaccattacctcattccttcct

SEQ ID NO: 326104 - DNA, 193 bp, Zea mays
aaaaaaaataaaaaataaaaaaaaaaaacatacaatataaaaaataaaaaaattaaaacaagaaacaggcaaaaatataaaatatactataaaaaaacctaaaattaatttcacttaccgggccttctcttctttttctctcttatttaccctcgcgtttccccacttaattacctttcttctcatccccctt

SEQ ID NO: 326105 - DNA, 401 bp, Zea mays
  unsure (1)..(401): unsure at all n locations
cccacgcgtccgctggtgtcctgtacatctcaagatgaaaaaaagcaccaccgtcctcggcatctccatcttggtcctctcccttgcctcccagttctcatggtgtgcagaagcagctgagggaagcgccggaatttccacagagcctgatctccaggtgcaagaacaagtgcacggcgatatgaaaaaccgcctggaaatgcagggtcgcaaccggaagcttggccatgaggtgaccacagtggagttgaagcatcacaggaggattaccagtgggcacaagggtggcagcgcgggtggaggcgccggcgccggtgccgcgggcgcaggcacgggtgggcataacgtgggcggcgggggcgccgtgacgaggccgtacagcttcaagaacggncgcggcg

SEQ ID NO: 326106 - DNA, 216 bp, Zea mays
tttaaacccaggtagccctcttgacaaatcttttaccatttctgactatgataaacatccgacctgccacaacattatctcatctatgaacactcaaacctctcttcaataaatactgaatcacaactccctacaattctatccttcctaccaattttccttcatcatttctacttatcacacccattttccattccataaattcctacccatttc

SEQ ID NO: 326107 - DNA, 265 bp, Zea mays
ctaattcccggtcgggggcgacccacgcgtacgcaactcccccgcaccgtaaccctagcagcagatcggccatggagagctgggctaccggtgtggggacaagcgttagctgcgccttcttcgcctccctcgagcgctgctcctgcatcaacctattcaccgacgactacgactacgacgaggaccacgactaggccaaagaccggtctctcatgctcgccgactacccacgccacgactacgccatcaagcccgatccagactc

SEQ ID NO: 326108 - DNA, 426 bp, Zea mays
gcaagtctcgctacgtagcagtgcaataaaaaaaagcagccgcaatggcgagcagcaccggggccctctcctccacggccttcgccggcaaggccgtgaacgtgccgtcgtcgtccgccttcggcgaggcccgcgtgacgatgcgcaagacggcggcgaaggccaagccggcggcggcgtccgggagcccgtggtacggccccgaccgcgtgctgtacctgggcccactgtccggcgagccgccgagctacctgacgggcgagttcccgggcgactacggctgggacaccgcggggctgtcggcggacccggagacgttcgccaagaaccgggagctggaagtgatccactcccgctgggccatgctgggcgcgctcggctgcgtcttcccggagcttctcggccgcaacggcgtcaagttcggcg

SEQ ID NO: 326109 - DNA, 397 bp, Zea mays
cccacgcgtccgcggacgcgtgggcggactcgtgggaaaaaaaaaaaaaaaaagaaaaaagaaaaaaaaaaaaaaaaaaaaaaaaaaaaaaaaaaaaaaaaaaaaaaaaaaaaaaaaaaaaaaaaaaaaaaaaaaaaaaaaaaaaaaaaaaaaaaaaaaaaaaaaaaaaaaaaaaaaaaaaaaataaaaaaaaaaaaaaaaataaaaaaaataattaaacataatattaaaaaaaatataaaatattaaaaaaaaaatacaaaaaataacatatcaaaacataaacatattattaaaaaaaaaaaatcaatatacaaaaaaaaaaaataaaatataaaaaaatatattaaaataaaataaaaaatttataaaaaataaataatataaacaatttatt

SEQ ID NO: 326110 - DNA, 71 bp, Zea mays
aaaaaaataacacaaaatacgattttacaattatataaaaaacaataataaacagggaaagggggctcctt

SEQ ID NO: 326111 - DNA, 346 bp, Zea mays
  unsure (1)..(346): unsure at all n locations
cccactctttctaaaaaaaaatttaatataaaaaaaaaaaaaaaaaaaaaaaggganagggtttaaataaaaaaaaagttttaaaaaaaacaaatataatattttaatttatttataaaattaaataaaataaaatatatttttaatattttataatttctttttttttaaaaaaatctatatatttttattttgactgcttcttatatttaatcactttttttaatttcactttatttaaatattttttctctttttaaacaattctaaaaataaaaattttctattttttttttaaattttttacttttataaaattatttattttatatcttttttttttttt

SEQ ID NO: 326112 - DNA, 129 bp, Zea mays
cccacgcgtacgagcaaacccatgttggccagcgcagcaagagaatttcgaaggaccgacacaaaatagtgcttgttagttgctgaattgtccatttaggcaacaaagtttttgaaaaccacaatattt

SEQ ID NO: 326113 - DNA, 164 bp, Zea mays
aaaaaaaaaaaaaacaaaaaaaaattataaaaaaacagcaatcgattttccggtttccgacatacaatcttgcttgtgcgtccatgcaatttatatatagtcctaaaatgatttcaaaaccaaactatctaaactcctctttacagactgagaaactgctaaaa

SEQ ID NO: 326114 - DNA, 284 bp, Zea mays
  unsure (1)..(284): unsure at all n locations
cccacacctcctaaaaaaaaaaaaaaaaaaaaaaaaaaaaaaaaaaaaaaaaagaaagacaaataatatatatgatacaaataaaaccacntgcccgccccttctaaagtatccaatattaccaccccattcttcccacaatatcacttttttatacgctcacttaatttcaataccctggccttacctttataaatactcttttaaaaaaaccctcttttaccccatcttaatatacttaaaagacatcctcttttcgccatttccaataatttcaaaaactt

SEQ ID NO: 326115 - DNA, 257 bp, Zea mays
caattttatttaataaaaataacctttttcattttaaacaccaccaccatggcccgccctactattactaaggcccaatgccttcttcttggcctttcccttgttcacccctacttctactatatccattttctttcataaataaaaaccgctttttaccttcaaaaaaaaaaaaaaaataaccaaaataacaaaaaaccttaattttaaacacatccatttacaatacatatttattactcaaataaatattatcc

SEQ ID NO: 326116 - DNA, 379 bp, Zea mays
ccgaatcgaagggcgacccagagcgtacccatcccgcttctttaccggcattctgtgatggctatacaagtctattcttccaaatggggtgcgctgcaaccggagcagtgctaacataacatactaccacctattccatgaaaactcgagtggagtggtaagcaacaatggtgatcccttgttttgggggatctttctgtacacgtgtaattatcgttaactcagttgtctatctataggcccatttcagcttgagttttatggataactcggcgatctatataggctcagctcacctgcaacgcacttcagttcaaaaacttcgatggtagcaaatgtttgtctgttcaaagttgtttgtatcaaaaaaaaaaaacaa

SEQ ID NO: 326117 - DNA, 92 bp, Zea mays
cggacgcgtgggcggacgcgtgggcggacgcgtgggcgaacacgttgaaaagggctggagaaatttaatgatgacggcacaaaaagggccgt

SEQ ID NO: 326118 - DNA, 90 bp, Zea mays
cacacccctgcactgaccctttctccctcacttgcaaaaagctctttactgagcgtagttcgctgattcattaaactgctctctcagaag

SEQ ID NO: 326119 - DNA, 362 bp, Zea mays
gggccaacccatccttccccctcgccctctggtctgagcggtctacctcgtccgctggttggtgccatagctggcccgactctcctgccgatgctctctctccctttccgggtttcccccgtggcccgagcgcaaattaccgggcctcagcccacagcaccggatgcttatgatgaaagacgggaggcggttgtcacccgagataatcgactcctactgactcgactggaagaagcatacggaagtggcgatcgaccattccgccgaggacaccgtgtgcacacgagtgcaggctcatgctcgaggcgcactcctgtgactagacctacgagtggcgtgccttcttcaacgagggcaacgac

SEQ ID NO: 326120 - DNA, 263 bp, Zea mays
  unsure (1)..(263): unsure at all n locations
ccccttcgccttctaatccgagactcctatctcnnnctcacgtctgggcacataacaaccccgactcccctcccnatcctctctctccttttcctcgtttcactcatcccacaaatcccacctacacggttctcacttcaaagctcagcactattattataaaatacaggagctgcttatcacccgagatactcaacacctactcacttcatatcatgaaacatacgaaagttttgatcatacattcctccaagacaatcttc

SEQ ID NO: 326121 - DNA, 187 bp, Zea mays
  unsure (1)..(187): unsure at all n locations
aaaaaaacacccccctcctaataaattcatttttaatataaaaaaaccaccnggccccccccctttaaaaaaaccaacttttcttccccttccttcccccataatatcctttttttatggcccccaaaatccaattccccccccccctttttacacccccggaccttgaaaaaccccccctttcccc

SEQ ID NO: 326122 - DNA, 215 bp, Zea mays
  unsure (1)..(215): unsure at all n locations
ataacacgttatcaacatctnntgcttggcctaatcacaacattattctgacaaactcanaaatttaattctctacaaatccttattctttccccctattcctaattactatagaaccttctcaaaatctctttatttacacctactgtctctattccttcactataatatatcctgacacgcacacattccccagattaaactttactaccttc

SEQ ID NO: 326123 - DNA, 295 bp, Zea mays
catgaagattatccatctgttgttcgggcactttaaggatggggacctcattcaacacataggctacgacactatctctcaaccaagatatttaagataacatgcatcacacctgtcgccaatcatattgaaccacgtcgagaacaagcaaatgcactctgtcaagtactcctaccatctcatgctacagatcttcctgctatggatatacttcattaccttctgccatcaatacacaatctgctaaaagatctgcatgctctagaccctgcccacacagaggctctacaaatca

SEQ ID NO: 326124 - DNA, 441 bp, Zea mays
  unsure (1)..(441): unsure at all n locations
ntcccccactcctccaaanaaaaaaaaaaattaaaaaaaaaataaaaaaaaaaaaaaaanaggtnnggttttattaaaaaataatgaagattatattaaaaattaacctantaaaatctagtctctaacccagataaccaaaaaaaaaggccccccccttttaaagaaccacaactttacttccccttccttccaanataaaaatttttttttaaggccccctaaattcaattccctccccccctttttacaccctcttaacttaaaaaacccttgctttccccaacttattccctttgaaaaaaatcccctttttcccaatttgcttaataacaaaaaaccccccaccaatcccctttcccaacattttccccccctaaatttcaaattgaaccccccctttaaccccccattaaccccggcggttttttttttttcccc

SEQ ID NO: 326125 - DNA, 116 bp, Zea mays
cgaccccttggcccaccggtccaggaccttccaaaattggcccccaccttcttcgcggggggggacaacaataataactccaattgccgccgccccttgttggccaaaaacaaaaa

SEQ ID NO: 326126 - DNA, 286 bp, Zea mays
  unsure (1)..(286): unsure at all n locations
cccacccgtncggttctttgcgaaggcaactgaatgtttccagaaagctgctgatgtggaacctgcaaatgagctgtacacgaaatcattatacttttcatcaatagcacctaaactagactctaagatcacatgcataacacttgtcaagcatgataacaaacatcctcatgctaaaatacatctcacttgtgaagaactaacaagatatgcacgctacatatcttccagctatgggtatacgtgattctcttctgccatcaatacacaatctgttgaaagatct

SEQ ID NO: 326127 - DNA, 366 bp, Zea mays
  unsure (1)..(366): unsure at all n locations
tctttgcaaatgctactaaatatttccaaaanncttctgggttcgctacctttaaatgatctgcacaccaactcattanacttntcatcaaatacacctaaactgcactcttatatccactatcaaattgcttctcaagctgcaacacaatcatcctcagcctcaaatccaactcaatcaattaacaataagaacaatgacacctacttctgttactatttttgtaaatctctaatccttttcgctttcatttctgcatttttttaattatcaaaatcaaacattccttccccacctgcaccatccacatttaaacttatctattcacaaaaattcttctcaaaatattctaacatacccccattt

SEQ ID NO: 326128 - DNA, 346 bp, Zea mays
  unsure (1)..(346): unsure at all n locations
cccacgcgtccgcccacacattacactactcgtacgcggacacattnttcgaggcatgctttctatcaaaaacagaacacataataaaaaaaaaaaaaaaaaaaaaaaaaaaaaaataaacataaaaaaaataaatattttttattctttttaaaaaaataaaattataatttcatcttaaaaaaaattttatattttttttataatataaaatatattttaattttttttcctaaaattttaaattttttttattttcaaaaaaattcaattaaccaactttatttttttaaaaataataatctctaaaaaccatgttgtaaacaaaataaaaaattttttaaaa

SEQ ID NO: 326129 - DNA, 262 bp, Zea mays
cggacgcgtgggaaaaaaaataaaaaaaaataaaaaaaaaaaaaaaaaaaaggaaaatatgaaaaaattaaaaaaagaggagaggctttttaacctaattctattttaaatactcgaatttgatattaatatattttttatatagacttctctattttaattactgtccctttttttttacaatgttttctcttacaaaattttggttatcccaatttaattcttcttgaaacatatccctttttaaacatttaatattata

SEQ ID NO: 326130 - DNA, 291 bp, Zea mays
tcacgatacttcacatgatatttgatcgttttaaatagctcacacaacactgattatctgtccaccttcaacccacacgcgaaaaatattcgacacgctctacttctgtacatacctatcatgctattactctatccacacatcaccctgctgtaccactttcaccaactcctaacgtacctaataccacatataacgataacatcaatgatatcatatacgaaaactcgtgtttacatgatgctcaccttacattctaagattataaagagctactttatacctctcaca

SEQ ID NO: 326131 - DNA, 243 bp, Zea mays
cccacgcgtgctcactaactatgtagttcctactaactcaaacctacttagggacaccggggtttcatacactcacgccatccattaattagatacattcatctatctacaattcatataatcacctcactctcactactacttgctcttcatggttccttacatcacacactctcagccccttttccaagactcgtctttcctgcagcgacttgccgtaccgcatctcgactactactgcat

SEQ ID NO: 326132 - DNA, 267 bp, Zea mays
cttattctacctttcattctaacttacatacgttcaatcataatcctacacacaatatctattatccactgacttttcataccaatcgctattcaccaattattataatcaacatgttcctcattccactactcttaattactttctcatcacactcattatttttttctaactaacctatctcactacattctaaacccagttcacattccctatttgtcttataacaatccaacactatttcaattcttcttcacactcataata

SEQ ID NO: 326133 - DNA, 184 bp, Zea mays
gacccacgcgaccgagcggccacgctcaccgactcctcacctttttcacgcgcaatgacactcggggccatctgctcatcttacaccaccggcggcgcctcactcaacagtaatgggcaccaacaagctgacaactccataggtctcctcctcctactcttactccttactcttctgcaataca

SEQ ID NO: 326134 - DNA, 229 bp, Zea mays
gacgctcctggcgcacacacgcgcaccatctccatgtccacaccacatgcatcttgtatgggaagggggcaacctagctgtggatcgacgatataacgcccaccctccgccatgttgcatgagcagcatgcgccgtcacccgcactgacatccctaccgatacacaccaaccccttcatccacctcaccttctatgacctggccaccaacttgatcgaccccatctctt

SEQ ID NO: 326135 - DNA, 308 bp, Zea mays
cttctgatggcaattatgatcattagatgccactgatactatacggcttacgtgaatctttatatgctgacttgcgtccaccttagacgatcgatgatagaataacgcatacctctatgctgccggctctgcttctgccgtcctggacagttaatttactcatgtgtaatctctatatgtcaatcatcagcatgactattgagctgatatgtcatggtattacaactatatagtcattaaaaccataatcaatgaccccaactatgcagagtaaattcactttgacattcatagcactgtgcataaat

SEQ ID NO: 326136 - DNA, 402 bp, Zea mays
cccacgcgtccggttctagatcgcgagcggccgccctttttttttttttttttgcattgcgaatttaggataataatatatatatataagcatccagtccaccaatccccagtctacaatacactcacgcctaaaacacacggcacgacgctttgaaggtccatcttgagcgcgcaacactagctcactttaggggtcgaccacaaacaaaataaagcgcgctgtcaagcttgaagaaatgagaaactaagggtggtagtagcgtactatatagttagctatcactagacctcaacttgatggagaaccaccgggatgagctcatcagtgttagtgtggagaatagttgcaggagtagttgatgggcacgtgcagacgagtaactcctcttgcgaggggctt

SEQ ID NO: 326137 - DNA, 242 bp, Zea mays
gacccactcgtccgcaggcacgttggctgacacgttttctccttattcaaccgacgcaaacaggagaagatttgctaacattaatcggtcttcaggtctaccaatgcatgactttttcctgctactaacattttgatcgtcctaagcaatattacttgtattgttctaccttttcacaaaccaatcatactatgttctacctcatgatttcttcaccttaatgtactatcaagtcatatcct

SEQ ID NO: 326138 - DNA, 297 bp, Zea mays
cggacgcgtgggcggacgcgtttgaaaaataaaaaaaaaaaaaaaaaaaaaaggaaaaaagaaaaattaaaaaaaaaaaaaaaaaaaaaaaaaaaaaaaaaaaaaaaaagaaaaaaattttataagttccaagtttacttactctttcttgcaacgtcatattttttttatagtgttacctaaatttattttattgcccgattttttaaaacgtcctgatttgaaaaaccttggagtttccaaacttaatggctttatagtacatattcgtttggtaacatggcatattatctaaaa

SEQ ID NO: 326139 - DNA, 231 bp, Zea mays
cccactcgaccgcccgcgcgtccgaatacacatatgaagaatatactcccacacataacaccagggaaatatgaaaattttaaaaaagcggagcgcttacaaaagatccaaaacgcaggaacacttaccgatcatcacgcaaaacacattattccaacaacagaaatcacaagttacacacaaccactcaatacacatataccatagacactacaaactagaaaacactct

SEQ ID NO: 326140 - DNA, 279 bp, Zea mays
accacacgttcggttaaaaagctcgtaattggaccttgttccggaccagacgctccgccgcacctcggtaacctatcgcatccagccttctatcaactatgctctcctgcacttaactgaccgcatcgtgccttcgtcgccgttacttcgaacaaattacagtgctcaaagcaatccatcgctctacatacattaccatgccataacaccataggattccgactctattgtggcggccttctcaatcatcttcacgattattagcaacagtcaccttca

SEQ ID NO: 326141 - DNA, 270 bp, Zea mays
cccacgcgtccgaaaaaaaaaaaaaaaaataaaaaaaaaaaaaaaaaaaaaaaaaaaaaagaaaaaataaaaaaaaaaaaaaaaaaaaaaaaaaaaaaaaaaaaaaaaaaaaaaaaaaaaaaaaaaaaaaaaaaaaaaaaaaaaaaaaaaaaaaaaaaaaaaaaaaaaaaataaaaaaaaaaaaaaaaaagccaaatatacaaaaaaaacaaaatttttctataattaaatacaactagtacaatattcatgagaagcaacaaaataaaa

SEQ ID NO: 326142 - DNA, 401 bp, Zea mays
acgcctggcaaagtcaaccagaaatatggacttgccacttcaactaaacataactaaaacaaggaaagagataacaaaactgtacaaaaaacccataaaaaactaaaaattaaaaatgtaacaaaaggatcatgactataatgctcaaaaaaaaagaagaaccaaaaatctttcacaaatggctctgccctacttagcaaacacttttatcgcattgtcctcgtgcattatcaggcaaacatcatgaggaaactgccttaccaccttctcatgtacaatctaaaatttcagaactgcctaaactcaatatgacccattacacctcctctacagatacatcctcttttcatactgagctatcttcttatgctgctcctgcaccataacatatccactcaaat

SEQ ID NO: 326143 - DNA, 215 bp, Zea mays
accacgcgtccgaaaaaaaaaaaaaaaaaataaaaaaaaaaaaaaaaaaaaaaaataaaaagaaaatttgataatataagaaaaactgaaaaaaaaacaaataaattaaatataatttaaaaaatacataaatataatttaacttaaagaaaaattaaacaaaatactattttgaaaacaaatataaatcaattactttatttcaatttacaata

SEQ ID NO: 326144 - DNA, 103 bp, Zea mays
cgacccactcgaccgaccactcctacgaaaacatttaagaacaccttattatgtcaaaaaaaaaaaataattaagagaaaaagtgagacattctaaatgatcg

SEQ ID NO: 326145 - DNA, 90 bp, Zea mays
aaagaaaaaaaaaaaaaaaaaaaaaaaaaataaaaaaaaaaaaaaaaaaaaaaaaaaaaaagagaaaataaaaataaaagaaagaaaaaa

SEQ ID NO: 326146 - DNA, 153 bp, Zea mays
acgactctgcccaatacttctcctatctcgtgcagacgtccatactcaaagggtacaccgtaaacacttaaatcgtgggatgacaaccagacacccaaaattctctgtgtctccaacatatgaacgacactgcatcacccatgtctgacaaca

SEQ ID NO: 326147 - DNA, 58 bp, Zea mays
aaaaaaaaaaaaaaaaaaaattaaaaaaaaaaaaaaaaaaaaaaaaaaaaaagagaaa

SEQ ID NO: 326148 - DNA, 104 bp, Zea mays
ctttcaatacatacaagatttttactttcgttgatctcatcttaacacaccggccttattgtttaacataagtctcagtcctgacctaactcatcatctcacaa

SEQ ID NO: 326149 - DNA, 82 bp, Zea mays
aaaaaacaacaaacacaaactcaaaaaacaaaaaaaataaaaaaaaaaagaaaaaaaaatgaaaaaaaataaaaaaaaagcc

SEQ ID NO: 326150 - DNA, 357 bp, Zea mays
cccacgcgtccgctgtatcctatgactttcaagtatctaggtccatgtaagctttttgtgggtgtctgtgttcaactgagacgtttttatccggagttgaacatcacaataaagcaaagtcactgataccatgtaaaaaaaaaaaaaaaaaaaaaaaaaaaaaaaaaaaaaaaaaaaaaaaaaaaaaaaaaaaaaataaaaaaaaaaaaaaaaaaaaaaaaaaaaaaaaaaaaaaaaataaaattaaatatttaaatataaaaaaaaaaaaaaaaaaagggggggcccttttaaaagaaccaagttttcctccccggggattccaatttaaacatttttattaggggcccccaaatt

SEQ ID NO: 326151 - DNA, 265 bp, Zea mays
tcccactcgtcctaaaaataaatatataatataaaaaaaaaaaataaaaaaaaggaaaaaatgaaaaatattaaaaaatagaaataataaaaaaataaaaaaaaaaactaaaaataaaataataataatattttacataatatacttatacatacaagtaaaacaacaatgatccatgtatttattattacgttcatacacttcatctatgtactcttctatatattacatgtaataattcatccgacaattaatttactacaca

SEQ ID NO: 326152 - DNA, 148 bp, Zea mays
gttctagaacgcgagcggtcgacctttttttttttttttttttttttttgtatttttgttttatttttaattttggttgctattattatctttattatatcaatatattatatctttttataacaaactgacttactaccttttaaat

SEQ ID NO: 326153 - DNA, 454 bp, Zea mays
ccgtctctccccgccgacgcggctcgatgccatgctcttcccacagttgcggcctcacctgcgccggcgcgtctccgatcgggtagctgcctctggcaccacctggtctcccgccgccaatgactccgaagacagcttcgacggctggtggtttcccgagtacgagaagcatatgaaacaggggaggaggaggatagggtttcagagcgctgtcgtggttgagttgggagcgtctgctgcgatcgcgattgctgggctggcgtggcgcttcccatcctccaggaagcatatacaacaactcattgttgcaccattacactatgttcaagataaattgtcaacaatggagtcgacagagataatcaaggcagatgcaagtgagagggaatctgatgaaatccaagtttctagcgcaacacatgataagatagctgaagcaataactgacgattca

SEQ ID NO: 326154 - DNA, 109 bp, Zea mays
aaaaaaaaaaaaaaaaaaaaaaaaaaaaaaaaaaaaaaaaaaaaaaaaaaactggcggcgcgtaaaaaataaaaaaagggcggacacaaacttcccacccctttaaaat

SEQ ID NO: 326155 - DNA, 132 bp, Zea mays
ctacatcaactacattcacctctacaacaaaatcaacaatttcaatcttacatttcccttctacccttacaatctctcctacaagctactctacattccctccaatatcatcaaacacatccacatcttcta

SEQ ID NO: 326156 - DNA, 207 bp, Zea mays
  unsure (1)..(207): unsure at all n locations
cctcactcttcacacnacgcccgtttttttaaagcttgcccgccacccaactaatactaaccactcttcctctatcatcaaccttctaatctccccatgccacttcctatctccataccctaccttcatcctacctataatctccattatatataccccatctccacccaccatcctccctattatcttcccccatctcctactcca

SEQ ID NO: 326157 - DNA, 309 bp, Zea mays
  unsure (1)..(309): unsure at all n locations
gtgccattcccctcccgctgtggaggttctgttagcccgctagaaaatatgactgtggatcgcttttgtgcctctgcccttctgtttttgggccccaaggacctatattttgcttgaaatgatactaccatagcttttcctgcccgaagtgctatgtggtgtttctgtgcgtttgggtgcaatgataggacgggatgagatgagaccctcaaattaggttgtttggttctgggtcaaagattgagacaagaatatcctagtattgtttnaaaaaaaaaaaaacaaanncaaactaaaaaaaaactcaac

SEQ ID NO: 326158 - DNA, 315 bp, Zea mays
cccactcttcctaaaaaaaaattatatttaaaaaaaaaaaaaaaaaaaaaaaaagaaaagttttatattaaaaagaaggaaataacaaaaaaaaaaaaaaggtcggtcaatctaaaaatatcctaacttacatacacatacatcaaaccccataactctcctataaacccccccaaacttcaatcatatccccccattttatcatcctgctcccttgctaaacctacccttttccccacttaatctacttgcaccacatcccctattccccatccttcctaataccaaaaagccccttacttattcccccttccc

SEQ ID NO: 326159 - DNA, 334 bp, Zea mays
cttggaaaaaaaaaaaaaattataattataaaaaaaaaaaaaaaaaaaaaagggacgtttaattaaaaaaaaaagaaggcccacaccctacaaaaatcaaaaaatatcttcaccttaaatacccaaaaaaaaaatctgccctcccctcataaaaaaacaaatttaatttccccttctttccaaaattaaaccttttaaaacacccccccaaaacaaaataaactccccgctttaaaaaaccctttccccaaaaaaaacctctttttaacaaatttaaatcttttaacaaaaaatccctttttcacaatttcataaaaaaaaaaaaaccccccca

SEQ ID NO: 326160 - DNA, 116 bp, Zea mays
  unsure (1)..(116): unsure at all n locations
aagaaaaaaaaaaaaaaaaaaattaaataaaaaaaaaaaaaaaaaaaaaaaaaggaaggaaaaaaaaaaaaaaaggaaggaaaaaaaaangggccgccccttttaaagaaccaaac

SEQ ID NO: 326161 - DNA, 297 bp, Zea mays
  unsure (1)..(297): unsure at all n locations
caaatcaatactaaacctaccattccactttcctttctcanattcttcaaatacctacctccacctattccttccaatctcctcttaactgccatcacctctctctcttgattcccattcatcctctaccacacctactttattttctctttagatctaccactactaccccaattttaccaacgcccatatctcgtctttcaactaaactattccaatccccactttcatacttctactcaactcccttattctatcattcaactctcttccttattaaacccattttcctcaaat

SEQ ID NO: 326162 - DNA, 337 bp, Zea mays
  unsure (1)..(337): unsure at all n locations
aacccaccgcaacccacgagagacnngaaaatttttncatcctcactttantactacatcaancnnanttccttcggctcgtttattttaaacagacgctactctacactacanntatatnttanaatttcttttttatatctattttttttcacctactctttatttgacgatctncttataactgtaaccacactcactcattactttttcttctgcttcacaatcactctcaacctttccattcttttcatcttatagatcatacaaaatatctactatttcttttatatatactttatccatactatcaacattataataaattttttccatt

SEQ ID NO: 326163 - DNA, 237 bp, Zea mays
acgcgcgcacgcgtacgtccacgcgttcgattacgcgttcgaaaaaaaaaaaaaaaaaaaaggaaaggttaaaaaaaaaggaggtataaaaaaaaaaaaaaaaaaaaaaaaaaaaatgaaaaggaaaaaatatatatattgtgagagataaaaaaaataaatatgtaaatttatataaaatgaaatgtgtgataaaaataatatttttattaaataaatttttttggttgatatttt

SEQ ID NO: 326164 - DNA, 223 bp, Zea mays
  unsure (1)..(223): unsure at all n locations
tgactgtttaataattatttcaaagaaaccatctatagtacgtgtggtctgagcaactcaaccttctgatcgtnacccatggccactgccgaagtccaaaccccgatnaactgnatttaccgtcacaggatcaatcacttccatccattgaacctatttaatatctccccaagaggctgtccccaactccaaagcctatgaatcagcacaatcttgccaacaa

SEQ ID NO: 326165 - DNA, 293 bp, Zea mays
acgcgcacgcgtaaactccctcgtccgcattcaccgagccgagcccggcacatacactacgggcgggcacgcacgcaccaggaccagcaccacaccacatgcatggtggaacctatcacgggcagctggctcccgaccaacatacattacaaccacctattgcttcaacaacaccaacgagatccccttacctcaactgcatttacgccaccgccatccatcaacctcctccacgacaactactcgcaatgtctaggtaaccacgttccgcgacatccaccctttgacacccg

SEQ ID NO: 326166 - DNA, 290 bp, Zea mays
cctgatgcaagattggagagtgaattgtgatgcccagcttcgtattctggtcttgtagcgttagtggaagaaaaggacaatcaaatgcagaagatagagaaagaaattaaggaactaaaggtatggcgtgatttcgtaggccgagttcctcatggacatcgtcagcaacgaagagatggcgctcatcgacaccgctaggagaagaaacttatcagtgatgggtctttataaccaaacaattttatgagcttaaaatgactttcttagcctcttttatacttagcacatgc

SEQ ID NO: 326167 - DNA, 374 bp, Zea mays
ggcattgctcagttttcagccccaatttctccaccatagtctgactgacaaaagtaggggaggtaccataatctaccaggatgagcatcacctgattctgaatcagagctcttactctcatgcaacactcatggtctgttccactgatggcatttaacgacagattgtgggactcctctcggttctggtcctcctggtccagatcatacaacacctcatccgacaacatctgccccatatcttccacagttaaactatgtaactgaggacctgttctcttggaacatttggcctgatgtccaggttcatacttctctccacacccaaaacataacccattcatcctcctaaaatccctcaactgcctcttcttc

SEQ ID NO: 326168 - DNA, 170 bp, Zea mays
caggaaaaaaaaaatatacataacacactttataaaagatctagctactaacaaagtaagacgcgttatgatagatggtgacggggtccggatgctccattatgtgcttgcagatctagcatgtgtgcccggcattgcaacttacgttcctctttttcactggtccatat

SEQ ID NO: 326169 - DNA, 450 bp, Zea mays
cccacgcgtccgcccacgcgtccggcaagtctcgctacgtagcagtgcaataaaagaaagcagccgcaatggcgagcagcaccatggccctctcctccacggccttcgccggcaaggccgtgaacgtgccgtcgtcgtccgccttcggcgaggcccgcgtgacgatgcgcaagacggcggcgaaggccaagccggcggcggcgtccgggagcccgtggtacggccccgaccgcgtgctgtacctgggcccactgtccggcgagccgccgagctacctgacgggcgagttcccgggcgactacggctgggacaccgcggtgctgtcggcggacccggagacgttcgccaagaaccgggagctggaggtgatccactcccgctgggccatgctgggcgcgctcggctgcgtcttcccggagcttctcgcccgcaacggcgtcaagttcggcg

SEQ ID NO: 326170 - DNA, 419 bp, Zea mays
agggcagcaagggccatgggatcgactgaactatgcatgatgctcatcattgcggcgagtgggatcagctcggtgctacctcgacggatcggacgctgcggcttccagcgacgcgttagtcacatatcgggcatatcatgttgcaagagaaggctctgaacatcacagctcggcgacaggctacctgccacgtacacgccgactaccatgcgtatgcatgcctcactgcgaatactctcattgaaggagcttagttcgcatattcacatgcatgcactcatacacgtaatgacgataattaactgtactacgtcggtcgacattgcttcgaactaaatgcgccgcgcgcagcttcagagaagaggcatcgggttacgtcggcgtataacacattcattaaggaagagatacccaggatc

SEQ ID NO: 326171 - DNA, 194 bp, Zea mays
tacacgatcgacgcatgcctacgcgtgcaggccgtattatctatcaggcatactcggactttgagcgaggatactgacagtcatgatacctcgacggatctgacagaactctggcctgacacacatcattcacattgctgcactatcaactttcgacagctggattggtacctaacatggcggtaacgatcgac

SEQ ID NO: 326172 - DNA, 132 bp, Zea mays
cccactcgtccgcccacgcgtactcccactcgttcgaaaaaaacataaaaattaaacaagtagatataactaaaatgatcaaaaataaaaatactttacaacaaattaaacttcaattaaaaatcttacaat

SEQ ID NO: 326173 - DNA, 264 bp, Zea mays
acccactcatcctcccactcgtcctaaaaaaaaaaaaaaatttattaaaaaaaaaaaaaaaaaaaaaaaaaagaaagaattaaaacaaaagaaagaaaaaccaaaaaaaaaaaaaaataaatattttatacaaaaaaaaaatgcccccccttttaaaattcccaactttcctaccccttcttttcaacttcatactttttctatactcccccctaaatcaatttcactccccccctttttccccccatctaaactttaaaaccc

SEQ ID NO: 326174 - DNA, 328 bp, Zea mays
acgatggccctagctctccctcgcattcgctttactcttgctcggtcagagacatccggtggcaccgttagaccgtcctgacgatcctcagctatctagctatggcccagactgttgagctcaacgatgctacgatctgtaacgtctttatgcgagctatcaaacctgtccatgacgagatgagacgcttcatcttctacatacgtatacatcatgaaccagatggctaccgtgaatgtcattgatactccttacgtcctactgttgacttgattcaagactggttaaaatacttccttctctaaggttgacgtcgatacaagtgaat

SEQ ID NO: 326175 - DNA, 395 bp, Zea mays
acccacgcgtccgacggcagtaggggccaggtgcacgtcttatctaagcggctgactcatcctctcgggcgcgatcctatgatcggtgataactcgacggatctgacgcccttagttccagcgacgcattattcacatatcggccctatcaagtttcaagggaaagctctgaacctcccatctcggcgtctggctacctagaattacactccgattaccaagcggatgcctgccaaacttctaatacattcaatgtaggcacttagttcgcatattaacctatattcactcgtacaggtagtgacgataattaactaagaggacgtcgctcgagattactcagcctacatagcgctgcacgcaacttcagtagcatattcatagtgttacctaaa

SEQ ID NO: 326176 - DNA, 181 bp, Zea mays
cccacagcgtccggcaaattacatcgagttaacatcgcgcgcgaacactgccagtctagggctgggttctttctatctcgacgacggccgcatgcacaccaactctggcttcagcgacagcttcttcagcaacaaccggccaacaatgggatggctacgacagtcctgtccacctagctac

SEQ ID NO: 326177 - DNA, 426 bp, Zea mays
cacacacacacacagacaagtggttaccaaagccaagtgtgtgtactagcaaccagctagctcgggcggcagcaggcagccatcatgtcggaggagaagcaccaccacttcttcaaccaccacaagaaggacgaggagcagcccgccggcgagtacgggtactccgagaccgaggtggtcaccgccaccggcgagggcgagtacgagaggtacaagaaggaggagaaggagcacaagcacaagcagcacctcggcgaggccggcgccatcgccgccggcgccttcgcactctacgagaagcacgaggcgaagaaggaccccgagcacgcgcacaggcacaagatcacggaggaggtcgctgccgcggcggccggcggcgccggcggctacgtattccacgagcaccacgagaagaagaaggaccac

SEQ ID NO: 326178 - DNA, 311 bp, Zea mays
gattccgtcgacattcgttatcatgtcatagctgtgaatacatttttgacagcgcgcgccatgcatccgggagcatactaagagggggcgggaccagaaggccgaaggagataaccttgcagcaatggaagaggatgatgacgaatatcaaataccgaaatcaaggcggctgagatgaggaatcaagaaagatgcttcaaagaacgtaagcgacgcccacatacagcagtaccacgcattcgccctaacattacagcagtcatctagtgattctacttgagctcagggcaacagattaaacatacactgat

SEQ ID NO: 326179 - DNA, 404 bp, Zea mays
gacgacttgtttcattgattcttgaagagatcgagcttcttttgcaccacaaggtcgaggatgtcttgcaactgcggatcaagctgcggctgcggctcaagctgcaagtgcggcaagaagtaccctgacctggaggagacgagcaccgccgcgcaggccaccgtcgtcctcggcgtggccccggagaagaaggccgcgcccgagttcgtcgaggccgcggcggagtccggcgaggccgcccacggctgcagctgcggtggcaactgcaagtgcgacccctgcaactgctgatcacatcgatcgacgaccatggatatgattattatctatctagcttgtggtggtggttgaacaataataagcgaggccgagctggctgccatacataggtattgggtggtgtg

SEQ ID NO: 326180 - DNA, 208 bp, Zea mays
cagacgcgtgggaaaaaaaaaacaaaatttaattaaataaaaaaaaaaaaaaactaaaaagcaagtataaacaaataaaaatataaatatctaacaaacacatacatacaactactaatactctaatatcattaccaataaatccatcttcattccccttactatataacatcctctctcctactatccaccatactctccaacttaa

SEQ ID NO: 326181 - DNA, 210 bp, Zea mays
cggacgcgtgggcggacgcgtgggaaaaaaaaaaaaaaaaaaaaaaaaaaaaaaaaaaagaaagaattataaaaaaaaaaaagaaaaaaaaaaaaaaaaaaaaaaaaaaaaaaattaaaaaaaaaaaaaaaaaaaaaaaaaaaaaaaaaaaaaaaaaaaaaaaaaaaataaaaaaaatacatataaaaacaactaaaataaaaacaaaaa

SEQ ID NO: 326182 - DNA, 71 bp, Zea mays
aaagaaaaaaaaaaaaaaaaaaaaaaaaataaaaaaaaaaaaaaaaaaaaaaaaaaaaaagggagaaaaaa

SEQ ID NO: 326183 - DNA, 346 bp, Zea mays
ctctcgctttcacactactctgcgttcatttaccctcttatctaccataatgctgaggcggctttcttagaaacctcaccttactcttacctactttcttttataacacttctaactgattcaaacattcttttactatgcaacacatcactatgaacttattaatactactctcctcttcatacggaacttgactgcttcacttatttctcctttctaatctgtacatctacgtcgtacataatacctcatattttttttccacgatgactatatactaaattaactatctcttagatatccttcaatcattacatcacctgacactaacaatctacctatctac

SEQ ID NO: 326184 - DNA, 419 bp, Zea mays
ctcgaggggagacacatctggtgcggaggttccctgttgttaccataaggctgaggctgctgtccgagaaaccgcagctcagttttgccaattttgatggggaacagtcctaattgattcaagcattctggtagttggcattgcagcatttggaacgtattaggaatatgctacagatcacaaggaacatgtctgcattacttggttcttggtttcaatatgtttgtctggggggtgcataatgtatcataatttgttttcacggtgtcaaaagactagcttagctgtccgctggatgtgctgcaatccgtgcatcacctgacactagcaatctgtttattctaccgaatggctcctggatatatagtcgttttctttagcttgacgtttgctttgtgggtactggtgggaaattcatc

SEQ ID NO: 326185 - DNA, 452 bp, Zea mays
atctttttcagatgataagtaaataaggcccgttctgacggttcgttatccagtttcggaaaaaggtgcttactagtgtctcgtcgttatccggggggagggttgtctccactctaaagaatgtgcattgattttattgctctaaagctcgcctaacttatttgacttgacaagaacagtggaagagaaagattctcaacgtctaacagctgctttagcttgaatcgggttgcgctgagttgagtgagtggaaatgagttgaaatatggaagcgagaacagctccgccgcttgagaagagacccagaattgctcataaaactctgtttcaacattttctgggtttagagcacattagaaatatggagtaggtaatccgcttggtttccctgatttctctatcttagatccgcataccatacccggttcagattggaaagccaaggtagtggc

SEQ ID NO: 326186 - DNA, 406 bp, Zea mays
attcccgacccgaccgcacgcgtccgcccgctcgtcctcacaaactacctactcttatcatcttgcactagatatctatatactgcaactcagaaaggttttatttcgacaatggcgacatacctcttcctactaatccgtccatcaaaatcatcatctgctactccgttctttatgtctctcaaaccagtactgatcactctcccttgcgctcctgctgacaataagcaacctctatccatctcttactctgtttattccaatgctaacgaccatgccttcaacatctctcccattccccttgtacattccaacattcacccaacttctactcctctatgggagatcaatgaatatggcaatgaaatcatgcttacattcttcaacttgtctgactctactacaa

SEQ ID NO: 326187 - DNA, 335 bp, Zea mays
cccacgcgtccgcccacacgtcctaaacataaaaaaaaaaaataaaaaaagaaagggcggagtctattcctgatcctgggaagcaatcgcactccaatgacacaattcttgttctatcatggtagctaacccaaattaacaactctatgattaacaccttgtgcaaatactaagaccacagcttctgtcaacttagttgctatgaatgtaatccctattttttcatctgacatcacatagacccagacaattcaactgaactgaataacatttagaacaactgaaagactaccaagatgcatcttcacaaaggacttttaacacggttgctatga

SEQ ID NO: 326188 - DNA, 211 bp, Zea mays
acccacgcgtccgcggacgcgtgggcgccctcttgttccttatcgacatctctgttctcgttgagctgacggtatattccaacggtaggttgtaacagatgttcctacacccacaaattacctacatgacaatgtctttcgcccggatcgctcctctgtggccggacgttttatccaacacgagcggcactgcaccaatgaggacccacag

SEQ ID NO: 326189 - DNA, 205 bp, Zea mays
cccacgcgtccgactgataggatcttaaggttttaatgagtacatgtaattcgggatagtagctaactctaacttaagaggcctggttggagttcacacttcacggggtaaaatagcagcccaaattacatgtactgataggatcttaaggttttaatgagttctgctttgtttttcaattattatatagttaatatttgtagtg

SEQ ID NO: 326190 - DNA, 256 bp, Zea mays
  unsure (1)..(256): unsure at all n locations
aagaaacctagctagctagctagtaagaggcacaggccggcaccatgtcgcaccaccatgcccagcacaattctcattctcacaaccgtacccaccaccactctcactctcactccggaggaggtggaggctgcggcggcngtggcgcctgcggtggaggcggctgcggagtggctatatgccactgcgattgctcacaccatgatcattcacctccaaggcaaccgttcttcccttcaccgcatcttccattttt

SEQ ID NO: 326191 - DNA, 236 bp, Zea mays
ctcactcttcactacccacttactatattcatttaactaagctgatgataacaaactggctaggtttcccctattgacgggtatccaaccactagcacaccctctttacaattttacgtcttttcccccccaattataccctctagattcattctcttaaactctaccctcccatattctctataaatacacaccttttaatgttataacccctaacttcccggaccctttctcac

SEQ ID NO: 326192 - DNA, 187 bp, Zea mays
  unsure (1)..(187): unsure at all n locations
gtactaccctcttagtttaatcatttaaataatcgcatgataataaacttgcnaggattcccctattggcggggagccaacccctatcagcccagcttgataatcttgcgtcctcaccgccccaattgtattctctagatgcgtcctcagctacttactcagcccaagttctctgtaaagagactcc

SEQ ID NO: 326193 - DNA, 427 bp, Zea mays
cgattctaaaatttacaatttacaatttacagctgtgcggaggcgggagcagggggcagcgagcacctagcagcgcgcggccggcgactccaccgagacacctcagccggccgcgcggtcgcggttgcctccggctggctcctcgcctcgatggtggggatgtaccagcaccaactccgcgacgaccccttcgacaccctaagcggcggccactgcgaggtacatggcggcggacagccgcggcagcgggtcgaggcgcttgccgacggaagaagcatgttgcgcggcgggggaagcggtatagttggcgccgcgggtggagatctaggggtgctagcgcggtggatgcgggaactcgcagcggatcccgtgggtccacttcccgcgccatcagagcacacggtgaggaagcggcacgtgctggcat

SEQ ID NO: 326194 - DNA, 302 bp, Zea mays
gagacacgcgtccaaacatacagctagatagcctctgcatgcctacgtacagcatggcgaagggccaactgctcctgggccttgtggcttcgcttggcgtgctggcattcttcttccttggcgggtaccaagacttctggattggcgacctattcggcggcggcacgccgggcgggtacccgtgcaagcccccgaaggacctgaccggcgaccactttcactatggggggcttggcaaccccggcaccgggcttaaacccttcaagaacttcctgggcttgggcgtcgtcaacacgtttccc

SEQ ID NO: 326195 - DNA, 190 bp, Zea mays
aaaaaaaaaaaaaaaaaataaaaaaaaaataaaaaaaaaaaaaaaaaaaaaaaaaaaaaaagaaagaataaaaaaaaatgaagagataaaaaaaaaaataaatcaactaaactattattttaaaattttttatttttaatactattaaattacttattttttcaactttacaaattttaaaaaccttata

SEQ ID NO: 326196 - DNA, 241 bp, Zea mays
acaaaaaaaaactacaaaaaaataaaaaaaaaaaaaaataaaaacaaaagggggagggtaaactggtactggcttaaggacttaaatttacaacctgcattattctatccttagccaggtacaagaatttctcattccccaacttttcaacggccgcactgccaaacgcttccccttccaaaccccaaaagacctgaaccgcatccaatttcaataatggggccttatcaaccccaggccc

SEQ ID NO: 326197 - DNA, 256 bp, Zea mays
cccacgcgtccaccctgcaactgctacattccacctgcagtcgtcacacgtactgacagttattatatagggcggcgctcgatcagtagcacatcaaacatggctatcatgataaatcgactagtcactgaagtacccaacaaatgacggtagtgcctctacttgacctatcgcagtacatttccctgtcgtacaagatctcatccttcccattcttctaccaactgtatcactgcctccacacacgcgccatcta

SEQ ID NO: 326198 - DNA, 307 bp, Zea mays
cccacgcgtccgaccactcatacacgtattcttcagaaaatatatttaaaataacttggcaccgtttcattcattcacgggatatactatttcatacaaacttacattacaactacatattctcaatcccatacccctaactttactttaaccacataacccctttaaaagcatattctcaatctccttctaatactgcataaacattcatcatgcaaatatcactttttgctacatcccattatccttaatgcatacaatcaaatctttcacttctacaaccacacttattataaaattactattc

SEQ ID NO: 326199 - DNA, 390 bp, Zea mays
cggactcgtggtaaaaataaaacataaaacaaaaacaaaaaaaaattaaacataaagggaaggctaactaaatataccagaaaatacatacacaaacattcaatgatatcacgcaaaaaacctttacctcaacttttacatctctcaccttcacaatcccctttcacctttggttgtaccgctacaaaccatattttaatgcattacttttcaatggcactctttccagcacttgaaaattccctataacatgctccatcctgccttcctacatcttcaacccatatgaagacatctgtagaacaaccacacatagagcaatcttcccatgatcattttctctttccaaaacttactaattctcaattccatattttattagatttcatt

SEQ ID NO: 326200 - DNA, 318 bp, Zea mays
cggacgcgtgggaaaaaaaaacaataaaaaaaaaaaaaaaaaaaaaaaaaaaaaaggtgggaataataaaaaaaagaggaaaaaaactgaaaagcaatcttaaactacaaccaggataaactaagccatggcgccctttctttcttcctgcctttgcacgtcgttctctctatacgctttcttctgcactggtgctataaacctaaataatggggccagtatcttcaaatccagtcacgctaaatcccattgcgttactaactttactaggggagtgcgcgctctcaatttccgtaacgccgacttcatcatatgcaa

SEQ ID NO: 326201 - DNA, 280 bp, Zea mays
cccactcgtcctcgtctacttcgtttttttacctctcacatatgctaatatcacggtcagcgctacttccaccatcgagaatcataactaaacactctctactaacatcgctcatcacacacactgtacacacatacttatttactccatcaccacgtcaatgatcatccattatattatatactctgttaccttcatctcaaccatttccaatcctgctctataagaacattcaaattccatctaaacaaactacgatcttttctagatcttccctcac

SEQ ID NO: 326202 - DNA, 414 bp, Zea mays
attcccgacccgacccacccttcccacgacccttcatcccacccctctttttcttactatcctcgaccattctcacacaaggcgatgtcttcccaaaactctgaatgtcaaattcaataaattcaaccaaactcaataaacttctcaattaactattactctcttaacatacccaaattccatttcatttaattattgactcccataaatgacttaactacattacaactatacttctatactatacatccaaaccacatccacattaactaacttaacccaatcactcatcaaataataccctaataatctttactctataccaacttttctaaattacttcatacttttattataatttacatcctccaaccacatttcaaataccactacttttaacgttattttacttat

SEQ ID NO: 326203 - DNA, 328 bp, Zea mays
cccacgcgtccgcccacgcgtcctcggactcgtgggaaaaaaaaaaaaaaaaaagaaaggaaaaaaaaaaaaaaaaaaaaaaaaaaaaaaaaaaaaaaaaaaataaaaaaaaaaaaaaaaaataaaaaaaaaaaaaaaaaaaaaacataaaattttaaatttcaaaaattttaattaaattaaattgaaaatttttttttttttttaagttttcttaaattaaattaattaactttatgttttaaaacttttttaatttaaaaaaccttttttttccccaatttaattacttttaaatttataaactttttgttacctcatattttat

SEQ ID NO: 326204 - DNA, 291 bp, Zea mays
aaaaaaaaaaaaaaaaaaaaaaataaaataaaaaaaaaaaaaaaaaaaaaaaaaagaaaagaaaaaaaaaaaaaaaagaaaaaaaaaaaaaaaaaaaaaaaaaaaaaaaaaaaaaaaaaaaaaaaaaaagggcgccctttttaaaaaatcaaaatttaattccccttcttttcaaatcaaaattttttttatggggcccccaaaattaaattaattgcccgttttttaaaaacttcataattggaaaaacctttgatttaccaaatttaattacttttgaaaaaatcccct

SEQ ID NO: 326205 - DNA, 244 bp, Zea mays
tcccgacccaagccacccctcccctgccaacccatctacttcatacatttctcattaccaatcataacattacatctatgagggcttactccatcttacagtcagcacctaccatcttatcttcatctgacctactatccttactactatatttacactgtataacataaaaactatcctacaaaataaatttcaaaatctctacactatcgtttaattcatcacttttcaaatactctctttc

SEQ ID NO: 326206 - DNA, 95 bp, Zea mays
aaaaaaaaaaaaaaaaaaaaaaaaaaaataaacaatataaaaaaatccaaaaattacaaacgcatgcatacaaaataaaaaaggctactataaaa

SEQ ID NO: 326207 - DNA, 353 bp, Zea mays
attaccgcccgacccatcgtccgccttcccctaatctaaaacatttttttttattctgacctcaatatttcaaccccagacagctatctttcaatccaaacactgcccattataaaccataagactttccaaattccatatatctattcaaatgctaaccaaacttttcataactatctcctaaaatccatataacaccttatccacaatttcatacatctcaatatacttcaaccattccacattcctaccatatctgtcatcatatcactatctacttatctaacagtccatcatccctaatcataattcacttcatcaactcctacagaacatccagaattcatctactt

SEQ ID NO: 326208 - DNA, 431 bp, Zea mays
ctctataaaagaatttattatggcccaagtgacactttaaatgttgtcttccattgaatgtcacctatatatggaagtgctaatggtaatgggtgagaaatggagaagtatggagttggaaacttggtggcgaatgaaatctgtagtgaaagaagtgtttgtgctctagtcatttccaacgcaccattttttaccaattcgtgggcttaataaagagtgggaaaaatggctgattagcatcaatttattctatactgtaattatgataatattacttcatcacaatactgtagatttttttttatcgaacgcagaagagttgcgtatcattatactaaaaagaaaaaaggtctaaaacagaccgatacaaaccgccgaagcggtaaaagaacgaaaataaaagagggttacaagacatcagagagaacccg

SEQ ID NO: 326209 - DNA, 293 bp, Zea mays
actcgtccgacgctccataatatgcttcattccatatccttttccatctctgtctctgacatcaactgggactgttatatacactcactctgccagaaatcatcaccgaacttctctccaatcaacgtccaaatactcaccttccttctctaatccactatgctgactctatattcattcttcatcttcctcttgatcaccaacgctgtatcacatgaccagatctctaccacttcaactactccatcttaacgcattcctttaaaaccaacctatcatttcaaattccatac

SEQ ID NO: 326210 - DNA, 287 bp, Zea mays
cattggcaaacaagggtgaactgatgggcgtaaagaaagcatcgtggtagatgtgaacgagccagtagaaaaaaagcgctagctctgcactagtccaggaaaaataaggttgtttacatgcaatctttcagtgtgtgatccctgaaacaatctttgaagtttctgaccggcagaataattttatttaagtattttagttgaatcagtgtacttttttttggatattctgcactcatgaagttaaaggatcaaaacttgtttctgaatgcagaaatgttttctctgtt

SEQ ID NO: 326211 - DNA, 244 bp, Zea mays
acccacgcatctcactcagcttataaaatatagatatcatttgtatcccatcctccacaatcacacgacggttactaactccaatctggtggatagtcatcactgaatacaagaaattcatcaccctatcactcaactatatcaaatcttccaagatcttactgtcctaatccatgatcaagcagcacttatagatcacattcattcccatatatacaatcctcttctagcgacttcctaacct

SEQ ID NO: 326212 - DNA, 399 bp, Zea mays
aaaaaaaaaaaaaaaataaaaaaaaaaaaataaaaaaaaaaaaaaaaaaaaaaaaaagaggggggaaaattcaaacaatctatggaataactcaaatttactaacacgtgcactcgatcttgattaaggcaccatagatctattgtaacataaactattgtcaataatgcaacatcataatgacctggatatcccgatcgaaacccccctttataccacttcaacaactgatttttttaacggatttaaaaatggcttgttaagattaaaccgaagaggatttcccaacaatttcgcaaactgactttacccttttgctcgccctttaagttcatctaaacccccggatgatctgtacttttccgcaattttacgcctcgaatttcaatataattcaca

SEQ ID NO: 326213 - DNA, 338 bp, Zea mays
attcccttctcgacccacacctcccatcgcacgtcccttgacaaaaccaccattctttcacctaatacaaaatccaattctatgttcggcttataaaccatgatgcgcatgtctcacactcaaatgaattcactcaaaggcaccaccactcatccagcctactgctcaattacactcatcactaccaaacttaccaaatccacacatatcaaccatagacaaactaatacatctatcttgattatatacctactgatccatttcctttcataattcacttatccatctactctcgataattaccataacaaacaagacctcatactcctaactatcta

SEQ ID NO: 326214 - DNA, 362 bp, Zea mays
agccgtcccgtgacatatacctaatatatttttcatcaatatgacgctcttcataggagggactcatatcaaaagcagacagacattcatgagattcaatgtcacaatgatcaacttcacatacatgaacagaaacatgaacacaagatggatcatttagccaaataaccactactacactaccataatttctaaaacagagcttcaaacaacacagaacacaatgatgcatccaaagctcaacacacaaactcaaccaatatttagattctcaataataaagccctacatatatccaaggaattcaccccaatcattatggctatcaacgatgcaaacattatggaaacacagtaacgaac

SEQ ID NO: 326215 - DNA, 85 bp, Zea mays
ggacgcgtgggcggacgggtgggcggacgcgtgggcggacgcgtgggctgctatcgaataataataaattggtgtcatgaagtgg

SEQ ID NO: 326216 - DNA, 100 bp, Zea mays
cttacacatcgcaagcaaacgaacaaatataataaataataaaaacatataaaaagaagaaaacacaaagcatgatggaataacggcatgaacactataa

SEQ ID NO: 326217 - DNA, 230 bp, Zea mays
aaaaaaaaaaaaaaaaaaaaaaaaaaaaaatttaaaaaaaaaaaaaaaaaaaaaaaaaaaaaagaaaaatatataaatacaaataactaaaacatactaaaaaataaataaaaaattataccttttattaatctaaaccttaattaaattaaaataaaccataaaattacactaaaaaatactcctctaacttttttacttccacaatttttttttcttccttctaattt

SEQ ID NO: 326218 - DNA, 250 bp, Zea mays
aacaaacataacaaaaataataaaatttaaatattcaaacaaaataaaaaaaatcaaggggcggatataatgacacacttagttatgcttatataaatacacctaccctatctatcttcacatctgacattattttacatgccccatatgttacattagattgtcacttaaaagcctttagacatcctactcaatcaatataaattcacgccattagctattcaaccaaacacctagatcaatttcatta

SEQ ID NO: 326219 - DNA, 103 bp, Zea mays
gtagttaggggccctaatggtagtagcttctcagtttgttcatcgccgtgggattcattgggcaagatatatgtatgaaatgaataaatattaaaacggtcgt

SEQ ID NO: 326220 - DNA, 62 bp, Zea mays
accacgcgtacgaccacgcgtgcggttgagaccgaaatgtagagattgaggagattcttcgg

SEQ ID NO: 326221 - DNA, 404 bp, Zea mays
gccctgcacactccccgcccagccgcaccagcaccagctcagctcagctcagcagtcatggctcgcccctgcagcagcagcagcagcgccgctgcccgcctcctcctcctgctcgccgccgtcgcagcggcgctccaggccgcgggcgccgcgccgccggtggccagcggcttcatccgcaaatcctgccgcgcgacgcagtacccgtcggtgtgcgagcagagcctcgcggcgtacggaggctccccgccgccgcggagcccgcgggagctggcgcacgccgcgctggcggtgagcgcggaccgcgctcgggcagcgtccgcgtacgtcggccgcctgtgcggctcccggtccggatccggcgacggcagcccccgccgcggcgccggcgcgaagaaggggtc

SEQ ID NO: 326222 - DNA, 388 bp, Zea mays
gccatgcacactcccagcccagccgtaccagcaccagctcagctcagctcagcagggatgggtcgcccctgcagcagcagcagcagcgccgatgcccgcctcctactactgctcgccgccgtcgcaacgacgctacaggccgcgggcgccgcgccgacggtggccaacggctacatccgcaaatcctgccgcgcgacgcagtacccgtcggagtacgagcagagcctcgcggcatacggaggctacccgccgccgcgatagcccgcacgagctggcgcacgccgcgctggcagcgagcgcagaccgagctcgggcagcgtccgcgtacgacggacgcctgtgcggattccggtccggatccggcgacgggagcccccgccgaggcgcc

SEQ ID NO: 326223 - DNA, 388 bp, Zea mays
aaaaaaaaaaaaaaaaaaaaaaaaaaaaaattaaaaaaaaaaaaaaaaaaaaaaaaaaaaaggaaaaaaaaaaaaaaaaaaaaaaaaaaaaaaaataaaaaaaaaaaataaaaaaaaaaaaaaaaaaaaaaaaaaaaatgggcgtcctttttaaaggttccatttttacttccccttgatttcaatttaaattttttttttttgtgtcccttaaatcaattaccttgtccccctttttcaaacttttaaattggaaaacccctttttttccctacttaaatcccttttaaaaaattcccctttttcccattttgattattaccaaaaagtcccccaccattcgcctttccaaaaatttgccccacctaatttttaaattgtacccccc

SEQ ID NO: 326224 - DNA, 346 bp, Zea mays
cccacgcgtccgatcactcgcacatgcaagcgctcgaaaaatgcgactggaaaacaggaggccgctgccgtgttaaacatagatgctcctaaacaagccttgacccaaatcgaggattgcgcgaaggatgagcgaagagacatcaagagccagctcgcagactaccctactactgataacgctcctgctgttgatgagctgaccacacctatcatggtgcaatacagacactcgtatattcatccagccccaagctacaagaaacgctacgaaaaaccatgatctttatatcaactcactgctcatgcttatcgggagtgcaacttacaagctgattcgaagaccg

SEQ ID NO: 326225 - DNA, 180 bp, Zea mays
gggcgcccgccgtgttgtgcgtacgtatttacgtatacatgtatgtatgtatatgcgcgcgtgtgatgcacgaataagcgtggctacgtaatctatcgtatgtatacgtgtgtgtatgcatgtgcttgtgtatgatcgtggtacgaggaccgaaaaaatgtatgcaactctgatttactt

SEQ ID NO: 326226 - DNA, 515 bp, Zea mays
  unsure (1)..(515): unsure at all n locations
tcgtctcgggctcgtcccttggccttacattggttccattgggctcagaggtctgttnctaccttggagactctgatgtcggttagtgagtaccgtaccgggtcgttggaccgggtattnncggtccttccgnngattttcaagggggcctgccgtggggccgcatccgtgatcactcgtcgcgaaaatgttgcggtgctttcttcnctggccgtctggaacccttaccttccggcttgaactntngattccagggcttggcgtggcccgttatagccatgaaaagataatctcttttcccgagggcccctcgcccgggcgtctttccggacttttcctaacngnntcgccgtcttggcctgccacagtcccggcttcnngggaaatcttaacncnncgattcccttttcgggtgaacgnnngcgtgatcgcgctatcttgccgggttttcccccggtcccttagggaatcggctttacccatgttgcaagttgccgttcacatgggaacctttc

SEQ ID NO: 326227 - DNA, 162 bp, Zea mays
ccgaaccgtgtccggacccctgtgctgacccccatgctactcgtataccgccagtgggacgctgtacacgcatctacgcttacgaagcgctgattgcgaaggcctacgtctaggatatgcgcacggagctcgaattctctggccaggaccttacagcgacgt

SEQ ID NO: 326228 - DNA, 341 bp, Zea mays
ggcagcagccatggcggaggagcccgccgatgtcgagacctcctccagctacgatgacgaagtcaccggcctaacggcactcgatccgtcacatcatcttaccaccggatccacccaggaacgcatacacttgtacccacactaaggttccagagcctctcttactacacgagaaataaccaaaatttccttaaaagtaacgatttttaactctcaccattgaactaccactcattctacacatgtaaagtcatttcagagattcgatctatagtcaatctaaacatgctcttgtttctcctcttagatctgcaagctctttcctttgtctctggcttcgc

SEQ ID NO: 326229 - DNA, 321 bp, Zea mays
acggccgccctttcttttattccttgcaatgaattccatccatactatccattacatggtccagacatggacaaattataaagaagaaaccacacagatgaacaccctatctcgttcacacaccttacccacatgaaaccaccatcacaaatcagagattgctgctacgctcttctttcgcctacaatctgccaagcaaaacgtatgattccctgtaaaccgacatccctattagctcacccacatcactcaatcaagaactgacttgtttaccggcaacatgcaaatcataagccgaacactcctaactgcgtcttgccc

SEQ ID NO: 326230 - DNA, 311 bp, Zea mays
aaaaaacataaaaaaaaacaaaaaaaaaaaatactaaaaatacaatacataaaaaaaagcaaggacaaaaaaaaaagaaagaaaacaaaaaaaaacaccaccataaaaatcaaacacattacccaaaaaaaaaccaccaacacaaacaggggattccttctaccctcttccatttacttcaatcttccatgcaacgcatatgctccgtttcagccctacctacctaaaaacctaccccccccactcaaaacagaacctactccaaaacccgcggcattccaaacataatcccctctcccccaaatgccttt

SEQ ID NO: 326231 - DNA, 362 bp, Zea mays
cgggcgtcgactcactcattcgatcacgcattctcacacacttgctttaccctatttcaactctagctcaaatgaccagcacttgtctagacttgagaccatcatgaaatgcaaggtatctgaagcgaaactgttactaaactggccgatgatgccagctatgaggtacacagctaccatcaaatcttacttaccaagacccacaaactatatgacgagtacgccacgaatgtggcaaatctgctctttcatgaaactgatgagaaaaggacgtacaaagttgaagagctgtagacgctcgataactcgcactacgactaccacaagattaagctgcggatgcaaaccgaaatgcagggctt

SEQ ID NO: 326232 - DNA, 206 bp, Zea mays
tcgtctcggctcatttcgtcgcgtcatgtgctacgttgagccatcattatgagtgctggtgccctgcattataagcctgtactgagtgccctgtttgtttaaggttcagggtttaggaatttgtgttcactcttactcactttggatttgcggtggtatttgtttgcttgagttatattgaggtaaatttaaacgttcatgatttc

SEQ ID NO: 326233 - DNA, 73 bp, Zea mays
aaaaaaaaaaaaaaaaaaaaaaaaaaaaaaataaaaaaaaaaaaaaaaaaaaaaaaaaaaaagaaaaaaaaaa

SEQ ID NO: 326234 - DNA, 84 bp, Zea mays
cggacgcaaaaaaaaacacaataataacaaaacaatactttgaatttaaaaaaaaacacaacaaaaaaaacaaaaagaaaatct

SEQ ID NO: 326235 - DNA, 459 bp, Zea mays
gcagttactgagagtgtgtgtgagagagaggatgggtggcagcggcagggctgctgtgctgctggccctggtggtggtggccgtgagcctggccgtggagatccaggccgacgccgggtacggttacggcggcgggtacaccccgacgccgacgccggccaccccgaccccgaagcccgagaagccccccaccaaggggccgaagccggacaagccgcccaaggagcacaagccgcccaaggagcacgggcccaagccggagaagccgcccaaggagcacaagtccgacgccgccacgtacaccccgagccccaaacccacgccgtcgacgtacactcccaccccgacgccccccaagccgacgccacccacatacacttcccgccctacgccccacaaacccacaccaaaacccactcccactccttcgacgtacacctcgacccccaagccttcgac

SEQ ID NO: 326236 - DNA, 169 bp, Zea mays
acgcggaagggagcttcgaggcggtccgccacttctcgttgatcgggcgggctgagccaatgtgacaggcctctatggcgcgaacgcactatacatcttcctggctggctgcaagcagactcccgctcttctaagctccattggtactctaaatcattaattcctcata

SEQ ID NO: 326237 - DNA, 462 bp, Zea mays
cacacacacgcaggcagcagtcaagcggccaacctctgtttcacaccgtacatgcgtgccacgcccacaccgcagcccccgatgtcgtcgcagcgcccgggccgtcaccagcgccgcgcgtcgcagagcgtgttcgtgctcccagagaacctggcctccctcgacgtcgacgcggcggccgacgcgggcgccaaggccggcgggccagaaggcgccggcgccggcgccgagcagcaggcgaggccgcccgcggggcgtcaccaccgccgcgccatgtccgtggccgcggccgtggcctccagggagcttgagctgatcaaggaggacctcggcagctacaactacaaggtcggcgcctgagagagagagagagagaggagccggcacgctgcgtcatgtgtatagagcttgtgggttaaccgtacccagagctggctttgatcgacgattaacagtggctta

SEQ ID NO: 326238 - DNA, 247 bp, Zea mays
gagcgacctgcggtgcgcgccccgccgggcaagctctaactccaccaatcatgccgcgcgcgccgacgccgccgcgccgtgctggcccccatcggcccagtgctgcaccatcggccgggatcctgggaccgagttgcgctatgcgatgaaactcggctgctgtcatctcgcgaacaataatgtagcgcggcggctatgggtcttagccgcacatgcagcagtgcgtgcgttatacatcgccagacgg

SEQ ID NO: 326239 - DNA, 458 bp, Zea mays
ccgacgccccgcaatttttcgcgttgccattttctccccaatctgtcggctaccgcgcgtcgctgctgtttcccgcgttgttttgcccacgcactcagtttagttggcagcggagtggaaagcgacgacggtgagagagaaagtggaggcggcggatgaaccgtcgaagacagtatgctgtcaacgacgacagtgacaagcagctgatgcgggagatcctgtccttcaccggtgggatgccgcaatggcagatggccgcacccgaggaacacgacgtcgacggcggaagggagcagcgaggtgcgttcgaaggagcaggtccacaccatcgtccaattgacgtcgacgaatcagatccacttgttgcttccgtgttcccttgcaacgacgacctatctgcaacaatggagctcgcgcccaataggaatggatacttttcgaggatgatggatgacaat

SEQ ID NO: 326240 - DNA, 306 bp, Zea mays
gttttagatcgcgagcggccgcgaccacgaccacgacggcggccacagtagcagcagcagcgacagcgactgagatctggtgtcgcagcacaggtgcaacacaagtatgcttgctggatggaggattcataccagctgatgctgatgtagtgtttcactggtgtcatgcatgcatgtatcgtgctattataatcaaaaagaaaaaagaaataacagtcagggatggtttgtttgccaaaaaaaaaaaaaaaaaaaaaaaaaaaaaaaaaaaaaaaaaaaaaaaaaaaaaaagggaggacgatataa

SEQ ID NO: 326241 - DNA, 67 bp, Zea mays
acgcgtccgcccacgcgtccgcggacgcgtgggtctgaagtaattgagctaaggaacgaaggtcttg

SEQ ID NO: 326242 - DNA, 249 bp, Zea mays
gcgctgacgcatgggatcccaactccaactctacctctctctttcgcctggcaaatcctcggcggggcgggagcctgcttattcaccggcgcggctgactgcttcttcgactacgcggatgcctgctgcagacgcgacgcggcagcctaccggtcgaacggatccgccgacgaacggatctcctgcgcctgatacatcttttgcacgcggactaccgattggaccgatctccgttgcctggtatatcct

SEQ ID NO: 326243 - DNA, 296 bp, Zea mays
aaaaaaaaaaaaaataaaaatataaaataaataaaaaaaataaaaaataataaaaagggaagggaactaattattaaacaaaacaaagggcctgccttatttagaggactccaggattttctgttcgccgtacccttacgacggccatactatttggtatagcggatctctattcgaattgatttcccgtgctttatcaatctttggcttgcgaactccctggtggtccgatctttagtgccttggatatacttcgccttttggcttgcttctttatcggcgccgaggcctgatcc

SEQ ID NO: 326244 - DNA, 171 bp, Zea mays
ctcacgcgtacgcctacacctatctttcttttccatactacagcctctcttctctgcaactcgtactactacaacttccttatctttcaacacatcttccatcccatccacatttcccacatcatactaatttaccacctcaacatcccctacaatccctccttttacacc

SEQ ID NO: 326245 - DNA, 248 bp, Zea mays
tgatcaggggcctggtgccaactgacgttgccgacattgttacattgcccagatgctgttcaccttggacacctgatacgactatgactactaccgcgcgtacactgaattatgtccttcggattttcaaaggatctctgaggcgcatcctacaccgagcaatgtgcagatctatttcttcctctgtaccctacctttggctaaaccgattcctagaatgacaggactttaatcataaaagataactc

SEQ ID NO: 326246 - DNA, 359 bp, Zea mays
cccacgcgtccgaataaaaatacacaaaaaattataattaaaaaaaaaaaacaaaaataaaaaagaaagcaaaaaacataaaataaaaataacaataaaaacaaaaaaaaagcaaataaaaaaaatacatcacctttgtcacttccaataatgagctatcagttcaaactttatcataactcctatcgattctcaatatatatgcccaaatccatgcgagacgctagtgattataatttctacatcttcttactacctagacttgctacaacttacctgcctctcttcaaagagttttttgttaacagatttgaagtctccctggttctgcctgaatttacttctgtaacgctttccat

SEQ ID NO: 326247 - DNA, 339 bp, Zea mays
ctgacgcgtagagcggaacgcgtgggcggacagcgtgagcggacgcgtgggagatgtggtaacgcgagaactgctattatgcatgcagcagccgtaagcattgctactagggtttcatgcggggcgaagcaattggtctatgccgcctgaacgcacggcggaatctgttaggcctacccgagctgcgtacgacggcagataaggcagacgtcgtcacggcaatgccggatatgcttgctgcggacccagcttttccagcgccattcacgccaaccaattgggtccacagacagctcgtctgttcagggtgctggaactttctcatgttgccagattgtg

SEQ ID NO: 326248 - DNA, 98 bp, Zea mays
cggacgcgtgggcggacgcgtgggaaaaaaactgaaaactataatatatagaatatatatggaaggggaaacatgaaacaaaaaggacgtgctctatc

SEQ ID NO: 326249 - DNA, 136 bp, Zea mays
gttctagatcgcgggcggccgctcgcgatctagaacccactccgcttttgcttggttccagtgggacgggagagggagaagctagctagctagcagcagctctgttggtgtgtgcgtcagtgtgggtgtggagggt

SEQ ID NO: 326250 - DNA, 261 bp, Zea mays
cccacgcgtccgaaaaagaaaaggcaaagtctaaggaatcccaatcaggcaagcaaaatgaggaaccggcttctgcagagttcggagatctcatctcatctgatctctcattttcgacctgctaatcctcctctcatttgcatacaatatactttatttgaacctcttcgtatctcatttctcatcatctccttcatctattcattatagactatttccttatactcttattaacctatcttacacttcattataggatta

SEQ ID NO: 326251 - DNA, 177 bp, Zea mays
cgcccgccgtgttgtgcgtacgtacgtacgtatacatgtatgtatgtatatgcgcgcgtgtgatgcacgaataagcgtggctacgtaatctatcgtatgtatacgtgtgtgtatgcatgtgcttgtgtatgatcgtggtacgaggaccgaaaaaatgtatgcaactctgatttactt

SEQ ID NO: 326252 - DNA, 387 bp, Zea mays
tctcacgccttgtcttgcctacctttttacgtttacatatatacaattatatctatgcgtctgttccacgcaaaaccaagactacactgactattacaagcttactagcatgcatgcataatcattattataataataataataaaactatctcactgatccactttgctctacctctatcaataatgaaacaactgtatttaccttcattacttaattgtgtatgcttttactcctactttccgatttcatcatgtctttaacatctcattaattcactatatttctataacaaataattttattaaaggtcgatcactctatattatccaatcttacttactcttacattcaacgttatatcttttatataatttaatctaaatt

SEQ ID NO: 326253 - DNA, 413 bp, Zea mays
ctgtttttagactggtcccctaataattatatatgaatggtgcaggacctgtttggtaggtgtgagagggaagtttttaatagccagtagcttcaaatttcctacaagggggcagattgtttctgttaactcaatctaactcaaaattcgaaataacactttggcctaaattaatcaagttttgtgaatcaaccaattcgagcataggtcaagggatcaagatttaagcaaatgtttaatcgtatcgagttctatatacttattaagcacttacctcatatatgaaggttccaccaggtactcaaagtggagtggaaggagggccatggtattttttttccttaaaacttcttaagtagtgttgcaaactcagggcctcttggctctggactaagcacaaaagccttaaattg

SEQ ID NO: 326254 - DNA, 79 bp, Zea mays
aaaaaaaaaaaaaaaaaaaaaaaaaaaaaatataaaaataaaaaaaaaaaaaaaaaaaaaaaagaaaaagggcaaccaa

SEQ ID NO: 326255 - DNA, 285 bp, Zea mays
  unsure (1)..(285): unsure at all n locations
ggtgagcgaggaaccccaccccacgtcgccctccccccacctttctctctagtctctagttgctagtctctacccccaggccccagccccccattcctgcctcttctctctctcggccacccgccccggccccaatgtcgccgcccctcgagccccacgactacatcggcctctccgccgncgccgcggcgccgncgaccccgacctnctcctcgtcgtcctcgtcctcgccggcgccccgcctcacccttcgnctcggcctgccgggctccgagtcccccgacc

SEQ ID NO: 326256 - DNA, 280 bp, Zea mays
cgactctagagcgatccaaggccttacttacgtcgtagcatgtcgactgtcatatgcttcttctatagtcgtcaccgtagaattcaatgtcgactggcacgtcgcttttacacagcgtcgtgacatgtggaaaactccttggcgttacgccatacttaagtcgcccttgcatgcacattcctccctttccgccatgcttggcgttaatatgcgatagaggcctcgcactcgatctgcccattcccaacaagtttgcgcagccctgaattggcgaatggga

SEQ ID NO: 326257 - DNA, 63 bp, Zea mays
gttaactccacaaggacagtcgatggtactttgattcacatctcagcccggttccgttgtgtg

SEQ ID NO: 326258 - DNA, 132 bp, Zea mays
aaaaaacattctaaacaaacaatacaataacatataaaaaaaaaaaccttaaatacatgataatggataaaacaaaaaaacccaaataaaaatgccaatttttcaaatgaaccaatttttccgaaaacaaca

SEQ ID NO: 326259 - DNA, 365 bp, Zea mays
catgcgcggaagagccatgggcagcgagcacgctgcggggtgcgatgctactcatgcggccgacgccgagcttgttgtacaacgcgtgggtgttcgtagcggacaacatcgcgcacatatgtaagcctgccgccatctctgtacgtgatgacgttaaacggcgtcagcacgcagtgcatctcgctgcacagcaccgtgaacgtctgcaacccctacgactaccactttggcatctgcgaggtgacctacacgctcctgtacgcctgcaaggtcgtggtgtgctccaccatgcgactacacctgctggatcctcgacagcctgtgcatctcgcttgagatgatcgtgaaggtgccctacgacttcc

SEQ ID NO: 326260 - DNA, 120 bp, Zea mays
cggacgcgtgctaaaaaaaaaaaaataaatataaaaaaaaaaaaactaaaataaatgtaatatgggaaaaaaaaacataaaaaaaaaatacaatagtccttgctctgttctggttccact

SEQ ID NO: 326261 - DNA, 199 bp, Zea mays
cgcaactgcgaagctccccccagttcccacggtttcccccacgacgccggcgatgggcaagcggaaacagcgcggcggcggcgacggagaacccggcccggaaagccgttcttgccgaagacacaagcccttcaacggggtcggtttcaaacttccctacaccttcaagtccttcgatctctaggcggtgtttatcgag

SEQ ID NO: 326262 - DNA, 309 bp, Zea mays
gtaccatgtgcgcacttacactcaacgcattttcggtggtgatcagcatagaggagagagtgggtatgatccatgagggggtgtaactagtcatatttatgacggagaacttgatcggtagcaggcccaagaaggtggtcgacgtttctgatgatgcatgtgagactatcaatgactgtaaacacttggtcaaaatgatcggcaaccacgagtacctcaatgacatggatggcctatgacgggctgtcaatgacgtacttcaggatgtctataccaagtcatacacagtatccacagtgctatagatgt

SEQ ID NO: 326263 - DNA, 270 bp, Zea mays
aaaaaaaaaaaaaaaaaaaaaaaaaaaaaaaataaaaatataaaaaaaaaaaaaaaaaaaaaaggaaaaagaaaaaaaaaaaaataataaaaatacaaaaaaaaaaggcccgccttttttacgtttccatgccttgggtttgccttcttttggcttccaggtttttttttgcggtcacctaactccctttttctgttctcgggtccccaactttacttcctgtgaccctccttgtgctaccctcctttttggaatctcctgtttttcccc

SEQ ID NO: 326264 - DNA, 215 bp, Zea mays
agatttaatcaatgccacttgcaattggagcgcgaacgccttaacgctattcacctcgtgcactgatcagaatcaccgcatgcacactggaatcttgacttagaagcgtgcatgcgtaccccttgacacaagaactcctaccgattggcttttcaacaaatcacaatgaccacttgaggcaatcaactgttgctctaggactaggtggatttact

SEQ ID NO: 326265 - DNA, 281 bp, Zea mays
cccacgcgtccgcaatttttcattcattatcattccttcatatgatagctaccttttgaaaattcagttgtaacatttctgatttaaatgaaagatacatctgaaagttcaaaaaaaaaaaaaaaaaaaaaaaaaaaaaaaaaaaaaaaataaaaaaaaaaaaaaaaaaaaaaaaaaaaaaaaataataaaaaacaaaagaaaatttaacccactggctttttaaccaaacgcaatgaacaaattgtgtgaattaaacagttactttcatactatggtgaa

SEQ ID NO: 326266 - DNA, 273 bp, Zea mays
ttccactcgtcctaccactcgttcgaccactctttctaaaaaaaataaaaaaaaaaaaaaaaggaaataattaaaaaaataaaaagatcataaaaaaaaaaaatataaaataaaatataataatataaaaaaaaattgaaaaagaaatctactaagtataaatattatgacgaataaaaaaattgtcaaagctacataaaatctgtactcattgtataaatactaacttatttaaatatacgtttatgaacataaaatttattatgttaaaaa

SEQ ID NO: 326267 - DNA, 200 bp, Zea mays
tacaggcattcggccactctctatcccacttctccaatagatcctacagctcttatactggggtaatggcaccctacaactggatcatcatcaggaacacagaccgcgactggagttgcagactgcgcatctacatgcagcattcttgccgagatcctcatagatccatactacccgatgctaaacaacatcctgaacta

SEQ ID NO: 326268 - DNA, 247 bp, Zea mays
tcgcgtacgcgtgggctgacgcgtggtcttacgcttgtgaaaaaaataaaaaatatacgagataggtaaatataaagacgtagcgaatgaaaaaagaaaacatctattatgtacgtccaacatattctgttaactaaccagcccattatagtcatggctactaattatagagcggtcatttctctagtactacttatgtgcatcgatagcccttaatgcttgcacggcccttaaactgacgttatgc

SEQ ID NO: 326269 - DNA, 173 bp, Zea mays
gacccacgacccactcctacgaatagccttcccaatctgcttttttatttaactcctatcatcatcaatgggagagctctcacatactcccggctgttacaccctgactaaataatcacttctaactattatgcatcacgacacactcttacctgcatcactaaaacacacat

SEQ ID NO: 326270 - DNA, 259 bp, Zea mays
gccacgcgtcgccacgcgtcgccactcgtcggcgacctgtcccacggcatgcgaggagggcatagccatggtgcggcgagcctttgcggcgcgaggcgctagcggtcgggctgctgcggcaccggacggcgcctacgcgcccgtcggtcccgtggcgatcttgctcctgcggtggccggaggcgccgggcggcatcgcggcgttcggtgcgcgcagggcgccagaaccggccggcagagcactgcacaacgcatactac

SEQ ID NO: 326271 - DNA, 118 bp, Zea mays
ttccactcgtctctgctagcggtcttcctcgatctagaactagataaaaaaaatacaaaaaatgataaaaaacaaaacgttaaatcaaattgtaaaatgtcttacaaatgctttaaaa

SEQ ID NO: 326272 - DNA, 374 bp, Zea mays
  unsure (1)..(374): unsure at all n locations
ccaaagatagaagtcaagagggaaaagcgatgcacaacgtggacagagacttgcatgttagtcagacaccttctagattgactgcactccctccaagtagagaaggttgcctggagatatatttgttaagtggagaaggggaaaaccgtacagttcactacanaaagctaagcgtggcttgaaatctgcatggtgctttctgtcgattattaattattcaatgatatagtacgaagttatacatagatgcgtatgtgagacccaatgaaaccaaatttagatatntggcataccatgctgttcttctgccaaaaagatgcaacgctcttctttacaaaggtctctctctagtggtgaagtcttagtggaactgt

SEQ ID NO: 326273 - DNA, 393 bp, Zea mays
ctctgcgtggcggcgctgtctggccacccaggggcgccgcccagcgcggcgcacccgccggggaccggcgtcgagccctgcttcgccgcgcccttcgtccccgtcgcgcggatgaagcgcgcggcagcgcaggcctagctggcttgccgcgatcgacgacaggcagagttggttaccgctgctacgacgcctacgcgtgacgcctgaagtgaatagacttgcttcgctcgtgtcgatctcggcatgtagcagcgaatcatcatgtaggacagggggcgctctcgctgtggtgcccagccccagtgagcaatggcatatagaacactccagtgactgtacttaaatcttatggaacttgggtctgctactgataactaatgaaccaatgttttc

SEQ ID NO: 326274 - DNA, 438 bp, Zea mays
cccacgcgtccggcgcccagggaggccaagacggaggccgcggacgccacgacggtcacggtagcgtcgacgtcgtcctccctactgcatgccgcgagcgttgccggcccggcggtgaggcacggtgacctgcccaccctgcaggtgccaacgcacctcggagtcgccgactggacgcagatgcaggacccgtttcagctgcgcagcccgtggcaggaccacctcttcttctctcccttagcccacctgctatactgaagtctgaactctgaagtgaggaaggtgcacgcgcaacttggaagaagtggtgaactgtatcaccgaaatgcggttcagctctgcaacggcgagccgtgatgctagcttagatgtgaattcggttgaggatatactgcacgaacaagtggaagtagaagaagaagtgagtactcgtatcgg

SEQ ID NO: 326275 - DNA, 354 bp, Zea mays
aaaaaaaaaaaaaaaaaaaaaaaaacaaaaaaaaacactaaaaaaaaaaaaaacaaccaacgggaaccaggaaaaaaaccctactaaaacagaccacaaaaaacaaaaaaaacaaataaaacaacaaaagggcccacccctatatggctcccaacctatcgaccacatccagactaggttaacgctgctacaacgcctacccataactcctgaaatgaccagactttatacactcgcgtccctgtaaaacccttgcagctacccatcatataggactggcggcactcccccttttgcccaccatgcccaattagcaatgggccctaaaacactccactgaccgaacttaagccc

SEQ ID NO: 326276 - DNA, 323 bp, Zea mays
tctcactctttcgctgacacctcagcaacatcttcagctctaccgacgagaatcccaatgggcgacaagtgcatttttacccgccatcagcacaatgccactacccatcactaatactacaaccaccaccctatgaacatgatcaaatctcagaatctgctacatacagcatttaatccgttcactatgcacccactattcgatctccaactctaccccaaccgctatcacatttacatctacagtctacacttcaaccctacatactctattctccatctgtacattgcgtctctgctaatccacgaaaactaccctactta

SEQ ID NO: 326277 - DNA, 279 bp, Zea mays
ctcttgctgattcgtgagggtggggagcttttggtggcggtgacatggctggctcgatgagatacgaggagagaatgattcatgctgaggtatgctacttctgtgtacagatgagatatatcatatttccaacctactcgctagtatgtgtatcataatataggtgctgactatatagaattagactgctctagtgagcttccaagaagttcattcgttccaacagacaagtatctttgccttgcaacttgggataccaaagctccaacaccgcaccag

SEQ ID NO: 326278 - DNA, 330 bp, Zea mays
acgcgtacttacacttgttcttactgtttctgtgacaactttgttgacgacgatctgggtgcatcatctaacggaccgacagatgcactacgagaggcacgacccaaagaacgacccatagcacacgcattggcacaacatcgaggcgggcgctgccgtgatcactgccctattcactgccaactatgaattcaacgagcacgacgacaagaacgcggccaaagacgcggcgaaggacgcagacgcggaccacgactccgaccgtaacaaggagtggcacaagaagcaccgatcgttctgctgatcaatctatcgattgaactatctact

SEQ ID NO: 326279 - DNA, 167 bp, Zea mays
cccacgcgtccacacacgcgtcctgtcgtggtcaccctgatgcaaccagacaagagcgacggtctaacacactttgcgtcgctgccaaaccgcccatcgtagcaactcgcctgcacggcattcggcgtcgaagccggctccgtcaagatcaaatactccctgcaaga

SEQ ID NO: 326280 - DNA, 338 bp, Zea mays
cttctcctccccctccggttcgggttcgggttcgtgaggttctccggggttcggtttcgggggtgagcggatcgagatggcggcgtcggatgttgagtaccgctgcttcgtcggcggcctcgcctgggccacggacgaccactcccttcacaacgccttcagcacctacggcgaggtcctcgagtccaagatcatcctcgatcgggagacgcagaggtcccgcggcttcggcttcgtcaccttctccacggaggaagcgatgcggaacgccatcgagggcatgaacggcaaggagctggacagtcgcaacatcaccgtcaacgaggcccagtcccgcg

SEQ ID NO: 326281 - DNA, 277 bp, Zea mays
taaaaaaaaaaaaaaaaaaaaaaaaaaaaaattaaaaaaaaaaaaaaaaaaaaaaaaaaaaaagaaaaataaaaaaaaaaaaaaaaaaaaaaaaaaaaaaaaaaaaaaaaaaaaaaaaaaaaaaaaaaaaaaaaaaaaaaaaaaaaaaaaaaaaagactgccccttttttaaattcccatatttcccccccctcaattccaatttttaaaaattttttttttgtcccccaaattcaattacatgtccctctttttaaaaattctttaccttgaaaaa

SEQ ID NO: 326282 - DNA, 336 bp, Zea mays
accacgcatgcggacagtgccaaacgcccattaaccaactgctgcacctaccgccgttaggccgggctagcacgcgcgcgtgctctctctctaccctccctgtgtgcactaaactactaggagtctaggtcggggctacgacaactggtcagagacgaccagcacccaccatgaaaagggttgctcctagcctactacagatagggatgtttacgatcaagctacaatgaaggattctcaggatattcagagcacaacagagttgcagtcatcagcacagggtactaatgaagtgcatagtcagcaaccaaacccgatgaccactgatgctcctgc

SEQ ID NO: 326283 - DNA, 354 bp, Zea mays
acccactcttcctctaagtttttaggctttattggtactgactttccatttttgaagagaatgtagaattcaagatctctgtctattatcatatgggatcgaaagtatccaatcttcacctaattccttattatcagcatttaacatccttgcatactgttcagttagtctgactcatctgagtatcaaccgtgattaaatcttacatcgtttgaatacttatatagtctgaacttttgatggtgctcatctcaccctaatttattattctcacagtatatgatctcttatccaaacaaataccactctatactacttaacactatatactgtcacgttaatagatttctctat

SEQ ID NO: 326284 - DNA, 363 bp, Zea mays
gacccactcgtccactttgacatccaatactctctgactatcatttaatatttggtataccaattcttttttctgtagagtgtacacttagtaagacaacgtgaaccaaacacaccttctttctataccaattatccctatatcacatctaaatatcactcaaatcatcaataatgcaaatgcctattacattcaattaatccttaaggaaaacatatcacacacgatataaccgcttaccttaacgctccttgcctatccactgaacaacacacactcttgtttcaccctggtataccgagaactcctggatcacttgaccatgtccacttcaatacactaattcaataccacctattccac

SEQ ID NO: 326285 - DNA, 403 bp, Zea mays
aattcctctggtctatctcactcttcctctgactctttttcttactcttgggaaaaaaaaaaaaatataaaaaaaaaaaaaaataaaaaagaaattggaaaaaaaaaaaaaaatataaaaaaataaaataataaaaaaaatataaaaaataatataataaaaaaatataaaaatatatatttaaataacaataaaaaaatttaataacatgtatacaagactatgtatctaaaattagaattattttctgtagaacatatgacatttgattaacttaaacttaaaaatcgcattgatgaaactgtttcaatgattgaagcatacctttaagcctataaaataattgtgtactacaattagcattcaactgaaagaatatactcatatttagctgaaccttgat

SEQ ID NO: 326286 - DNA, 332 bp, Zea mays
aaaaaaaaaaaaaaaaaaaaaaaaaaaaaattaaaaacaaaaaaaaaaaaaaaaaaaaaagcagaaaggtcaaaaataaaaaaagcgtacatacactaacatacaacatatataacaatgccatcccctttcatgaatccaatttactgtccccttctttacaacgtcatccaccgttcatatcccttccctaacctaacttaacctcctctcggtccataccctttccgccggcaaacctcttgctttcccaaacttaccctatttcaattccctcctctttctcccacttaccggaaacttgaacacgccctatagcttcgcttttccca

SEQ ID NO: 326287 - DNA, 81 bp, Zea mays
tcgctccactcgtctcgcccactcgtccggttctagatcgcgggcggccgctcgcgatctatactagttctagatcgcggt

SEQ ID NO: 326288 - DNA, 210 bp, Zea mays
cccactcttactcccactcttccttccactctttctaatctatatctctttctgccattcactatccatactggttccttttaaatctaatgcgacctaccctttcaactctaactccctaacatattttacaacatatcactattataatctcatttacactacctttaattctaacttataatccatcattcataatttttaacacct

SEQ ID NO: 326289 - DNA, 70 bp, Zea mays
cggacgcgtgggaaaaaaaaaaaaaaaaaataaaaaaaaaaaaaaaaaaaaaaaaaaaaagggaaaagaa

SEQ ID NO: 326290 - DNA, 57 bp, Zea mays
aaagaaaaaaaaaaaaaaaaaaaaaaaaaaataaaaaaaaaaaaaaaaaaaaaaaag

SEQ ID NO: 326291 - DNA, 225 bp, Zea mays
tttcatttaaaccaaactaaaaatataaaaaaaaaaaaaaaaaaaaaataaataaaggaaagcttaaaacataaaataaggacaaaaaaaaaaaaacaataaacaaaacaaaaaaaaaaactaaaaaaggcccacctttctgaaggacccaacctctctaacccatccttccaacactatacatttttttatggggcaccaaaataaattcacctggcccgattt

SEQ ID NO: 326292 - DNA, 223 bp, Zea mays
cggactcgtgggtcgaaaaaaaaaaaaaaataaaaaaaaaaaaaaaaaaaaaaaaaaaaagggaaaaaaaaaaaaaaaaaaaaggaaaaaatatataaaaaaataaaaaaataataaaaaataaatgcgacgccatattttttatatctggtcaactaaatttaattaactgacagatgttttaaaacgtggtgactggaaacaaaatgactttacccatctt

SEQ ID NO: 326293 - DNA, 274 bp, Zea mays
cccacgcgtccgcggacgcgtgctctcgcacatacggactctaaccatggctcctgacggggggcatagtagctacaacaggctacgacaggcacattcagtcatatgagcattcatgccattatacatgaagcaattgacattgacgtgcgctttgcaaattgtgatggccaagactatgtaacagaagccccaatctaagctatcacgatctgctaagaatcagtactgaatgatggttgcagtaacttaactgtactccgctatctgctaa

SEQ ID NO: 326294 - DNA, 269 bp, Zea mays
gcacacagctcgcacctaaagcagcgatctcttgatttttacaatccaacctaacgaccaggtcccgtaccattttcaaatatcactagagctaactaccttgacatatctatcttacaactcctaatttctaaaagatccataagacagactttcactgcttctattcccacttcaaatcaaaatcaaacgaacttttaccctcaagttccacactatatttctcttcctcttgatctcattttaccacaccttctttatcttttaac

SEQ ID NO: 326295 - DNA, 153 bp, Zea mays
taaaagaaaaaaaaaaaaaaaaaaaaaaaaattaaaaaaaaaaaaaaaaaaaaaaaaaaaatagaaaaaatataaaaaaaaaaaaaaaaaaaaaaaaaaaaaataaaaaaacaaacaaataaaaacaattatacaaaaattcaaaaaattcaa

SEQ ID NO: 326296 - DNA, 439 bp, Zea mays
gttaattctttctgaagtttgttgttgaagtacaacatggtatttcgattgacattccaagctattgttagtgcttggaccaaatagttctgcattattcttgcgatgcttgtgccgttgataaaaaggagaacaaatgccgttgataaaaaggagaacaaactgttcctccaggttctgcttgcattttctccatcaaagaatatcaaaacatttgctgttgtattcccaggtattggtggaagcatgtttaaccaatccgcagacgcgaagagtccatctacctctgataatagaaatcaaaacgacatgcttcctccgaccaaagcggccgagaagccactaaacggtactgcgacagagcagcagcctcgcctacggacgcttgggtccctcacgacacggacgggcagcaccagtgacatcagaaagctcatga

SEQ ID NO: 326297 - DNA, 143 bp, Zea mays
cagtcagactgtgttgtgttgtgctgtgtgggccgagtgtgcagtacagcatcaggccatgccccctgttccatctcatctgtgtgcgacttttgtttgtgctgtgtcatctatctatctaatccatctatgctatcctctat

SEQ ID NO: 326298 - DNA, 223 bp, Zea mays
cacttacactcctttaaccataatcccccacaccctatcttcccaccactcaattctaaccaaccacaattaccaattatatcaatcaatccatcctctaatcctctgcttaattaccatctacactcaatcatcactatcctacaactaacctttctcacaactctctaatcccatatcacattccctatattttaacgaacaatccaacacttccttaatt

SEQ ID NO: 326299 - DNA, 207 bp, Zea mays
  unsure (1)..(207): unsure at all n locations
accacgcgtccgaccacgcgtacgtccaatatcaagcgcctcccgacttcagcactcttaagtcancgtacactatcgccatggccgtgacatcgaccgccgtagtcgtgctatgcccgccgtccgtgtccggtcttctactggcaccggcttcaagacaagcgcgcgtgtcgttccactcggcgccatcgacagcacggctgtcca

SEQ ID NO: 326300 - DNA, 78 bp, Zea mays
aaagaaaaaaaaaaaaaaaaaaaaaaaaaataaaaaaaaaagacaaacaatctaggagaatggcaacttacaaacaca

SEQ ID NO: 326301 - DNA, 420 bp, Zea mays
aaaagaaaaaaaaaaaaaaaaaaaaaaaaaataaaaaaaaaaaaaaaaaaaaaaagagaaaaagaaaaaataaaaaaaaaaaaaaaaaaaaaaaaaaaaaaaaaaaaaaaaaaaaaaaaaaaaaaaaagggcaacctttttaaagaatcaaagtttacttactcagacatccaacttaaaagcttttatataggataactaaatttaaattcactggcacgattttaaaaacttcggaattgaaaaaaccttggctttaacaaacttaatggccttgaaaaaaatcccttttttgcaaattggctttttttccaaaaagcccaatacgaatggcctttccaaattttgccaaacccaaattggaaaaggaaaccccccttttagggcccattaaatcccggggtttttggggttaccccc

SEQ ID NO: 326302 - DNA, 66 bp, Zea mays
gctaagcctctgccacaagacagcaacatgtctgaggaggaggccaagaacgtggaggtggaggtc

SEQ ID NO: 326303 - DNA, 117 bp, Zea mays
cctactcgtgggaaaaaaaaaaacaacatttcaaaataaaaaaaacaaaaaaaaaaaaaaagaaaaaacaaaaattaaaaaaaaaaaaaaaaaaaaaaaaacaaaacctataacaaa

SEQ ID NO: 326304 - DNA, 436 bp, Zea mays
aatattttcaatccttttgcagttaatccaattaattttatgttgaatccggtagagagggcttctaagttagtagtacactctgtggctatttcactaaatttcttatgtgcttaagcttccgtcaaatccatggagtttttcttagtaagaccatattaaccttgtctatctatatcctctaagatcaacggtgttttcatacaagatttaccgatgtactgctaatgtcctatgccaatgaaatatgggaagcctgtagatatatggattttcattgctttgcagtcttttttgtgttttgtttctaatttttaaataggtcttgacctgccacctccaccttctaatatttaaataggtcatgacaatacacatgagtaagactataggatgatgacttggactactaatatttctgagatttatgtgagaa

SEQ ID NO: 326305 - DNA, 102 bp, Zea mays
aaaaaaaaaaaaaaaaaaaaaaaaaaaaaaaaaaaaaaaaaaaaaaaaaaaaaaaaaaaaaaggaaaaaaaaaaaaaaaaaaaaaaaaaaaaaaaaaagggt

SEQ ID NO: 326306 - DNA, 198 bp, Zea mays
acacttcacaccacacttactttttcgttcacctcttcacataacgaaaggggtatctctcaaaacacctgcgcgtccaaactcactcctcttctttcacatcaacaaaggtcatatcgtcacccatctccaactaccttcacccccttgccacctctaatgccaaatttaccaacaaagtatctattaacatagccc

SEQ ID NO: 326307 - DNA, 252 bp, Zea mays
aaagaaaaaaaaaaaattaaaaaaaaaaatttaaaaaaaaaaaaaaaaaaaaaaaaaaaaagaaaaaaataaaaaaaaaaaaaaaaaaaaacaaccatatctttaattccaaacttacatactcttccttgcaacatcttacctttttttttttgtcccctaatttcaattcactgaccttattttcacaccgtcttctctcttaaaccccttccgttacccatcttactccccttccaacacttccccttt

SEQ ID NO: 326308 - DNA, 57 bp, Zea mays
aaagaaaaaaaaaaaaaaaaaaataaaaaataaaaaaaaaaaaaaaaaaaaaaaaag

SEQ ID NO: 326309 - DNA, 282 bp, Zea mays
aattcgaccgtctacccactctcccactcccactcttccccctattctatatctcttcccaaacttctatatcatccaaagtcactttctcatacttaactcctcataaatcttctatattattacctaaatccaactcactctacctcaactttcaccctacccacttcaaaatccacaactcttcctaactaattcgcccaataccatatactctcttctaccgctatccttataaatcattactcctaacctatccccctttcaaacaaccatacaccc

SEQ ID NO: 326310 - DNA, 193 bp, Zea mays
acggactcactcaagccctacctccatctatgactacgatccctctagacgataaaacgttccggtctcacgcatgcctcgtgctaatattcctatactttctgctacattctcaacacataaattcctacaacagccccgtctctcgacactaccatactgatcaccaactatctagcacttatgacccata

SEQ ID NO: 326311 - DNA, 384 bp, Zea mays
gccgctcttgagtcctgccccaattatgacgatgatccccttatcctacttcaggggcctatctgccgaccacctgctgctcatcttctactctttcctgctgacaactcatgtcataaatatcaacacgaggaccgcctgactagctaacaaactgatgattaacgagcaagcttgaagagccagaatcagcgaggaggcgcggtacgtgccggtgcgcaagttgctgtaccagtccatgactcctgctacagctatgagctctacgacagcagaggcactgactgaagctgcatcgtacgagccgtacgaggtgagccacgcgtgcctgtgctgctcgccgtcgtcgtcgtcgatcaacggcagcagcagctgcgtatacac

SEQ ID NO: 326312 - DNA, 313 bp, Zea mays
accacgcttacgacaacgcgcacaacatcgattcatacatatctcattctatactccatagagcctgatctctttgaccggacgatcaagattcaacttatgccgatgctatcctggataactcacaactacagcttcacattacaaccaaacatactatagtcatccattatacttcacgaattgtaaacactcaaacttacatcacaatcaatactaaaatcaacccaattattaaagataatacaagctctgactatctctccaaaactgtacagaattttcaactccaactacctaacatagaacaaac

SEQ ID NO: 326313 - DNA, 173 bp, Zea mays
ctaagccctcatacactcaagctgtttacgtttagatccattttccctttcaaatgcgaatggtgtgtctcgtactctcggtgtgaagaaaagacgcgtgccttttcttctcgctgcaagttttcccttaccaaggttttgtgcatggaatggactgtatattattaatcata

SEQ ID NO: 326314 - DNA, 377 bp, Zea mays
cccacgcgtccgtccacgcgtccgcccacgcgtcctctcacgcgtccgcacagcttggagcacctgcaagacattgagaaccagccagccaaccaaccaaccggcggagccaaagccaagaaggaaggcaacttgtccgtccagtcaggatgtgcaactgcaacgtcaagtccgcgggcgtggcccagatcgacggccgtccggtgctgcagccggcggacaaccgcgtggcggcatcagagcctgacgcctaccaaccgctgaataagtcccttcagaagtcactctccatgccggcctactacgacagcaatgcctccgcaggcgctcgacctgcgccagacgagaacactacccgtacagcggctaattcgtct

SEQ ID NO: 326315 - DNA, 313 bp, Zea mays
aaaaaaaaaaaaaaataaaaaaaaaaaataattaacataaaaaaaaaacatacaaaaagggagtgaaaaaaataaagggacgagaaaaaaaaaaaaaaataacaatataattacaatcatatctaatccttctatttcttttccttttatccattattatttttctttatccttatttctacccttttttttattttccttctctttaaattctctttcttttttctttctccatctctttctccttctaatccttctcctttcaaattatttttctttttcttttttgtatttcttctcatcttttcttttt

SEQ ID NO: 326316 - DNA, 89 bp, Zea mays
caagagttgtacataaactactattgtccgaagcattaataaagagagagggggcaaatggggcgttggttttaaaaagggaagaaaaa

SEQ ID NO: 326317 - DNA, 101 bp, Zea mays
acaaatatccaaatccccaactctacagtcctttttccctccagcctgccactaaccttttcctactcaatcatcccaactctacttataaattacaacac

SEQ ID NO: 326318 - DNA, 99 bp, Zea mays
tcgcttattccaaggtcatctctttcctcttactgcccttgtactattaatagaagactcgggtgtggcaattatatgggagtgggccaaaatttattc

SEQ ID NO: 326319 - DNA, 215 bp, Zea mays
cccactcttcctcccacgcgtccttcaattcataatctcacaaaatgaccgtcagcgaaagcctatcagcatctctggctttaatcaatcattcgttcaccctgttctctatcgtactaactcttctcaatacattcaataatcatactatacatgatctatctcttacattatcacacatgatcaacatcatacatctctacaaactccttttg

SEQ ID NO: 326320 - DNA, 171 bp, Zea mays
cacggacccttggggcgctaactccctaaccttaatctttttctttctctatcaaataccccttttgctatctattattcttacttacaagcgttcattcataaatcatcacactttatcttcattccacttacttttcaaccaatctcgattaccaattctgtgaatcaa

SEQ ID NO: 326321 - DNA, 143 bp, Zea mays
cccacgcgtgcgtccactcatactggaccttgtccctcaccatagcatatatcactcacggagccttaacattcaggatgttgaacaacaacatcatctccattgcctacatcattggtacaggcatgattaccgtaaaggat

SEQ ID NO: 326322 - DNA, 164 bp, Zea mays
cccacgcgtgcgtccacccatatcggaccttctcgctcacccactcataccaaacttacggggcctgaccatttctcacgtccatcccatcttccatctacacttcatgcaacattattacacttgcgatcaacgtctaccacttataccacacctctttcatc

SEQ ID NO: 326323 - DNA, 311 bp, Zea mays
acgcccacgcgttcgacggcgcccttttttttttttttttttttttttttttttttttttggttgttttttttttttggttgagttttttttttttttttttttttttttttattttttttttttttttattttttttttttttttttattttttttttatttatatatttttttttattttataaaaaatgttgatgtacattaaataataaaaatttaacaccactctatttaaaaaataatatattttttataaagatacaaaaaaataatttacttgctattttataaaaattgttaataataaaaa

SEQ ID NO: 326324 - DNA, 370 bp, Zea mays
tcacactaggatggatctcacatgcagtcataatctgctatactaccttcgagtagggacaatatcaatgcctggatagaccagaaatcataacacgctactaaccaagcagtaacaacaagaaccattagcaagcaagcattatgacttaaatggactaacacataaccaagtcacacatcatgctcacatcctctttactgataacaaatcaccactaccaatcgggtgcatcaactacaaccttccacgcacgtacaatcactatcgcgttacaaacaatcagtatcctaaacctaacctttcgaaccactttctaaacccaattcacacagcttatcgacgcttaaacaatcaaacacttcgacaa

SEQ ID NO: 326325 - DNA, 255 bp, Zea mays
cccaagcgtgcgaaaactcgtactagaccttaactctgatatcttcagataaaacttatggggccttataaatctaaaggtagatccattatatgatctaaactgattatctgataattttagttgagatgatagtatagtaaatgtaccatactctggttttactataaatatacttcaatacttacatacatttaaattttcaaaacgactataacgaactacaccatccatagtgacaactcatactactac

SEQ ID NO: 326326 - DNA, 79 bp, Zea mays
aaaaaacataaaaaaaacaaaaaaaaaaaaataaaaaaaaaaaaaaaaaaaaaaaaaaaggaagggaaaaaaaaaaaag

SEQ ID NO: 326327 - DNA, 318 bp, Zea mays
aacataaaaaaggtaagaaaacctattcaataaaaaaataaagcactacaaacaacggggacggaccctaatctccagtggccatgaccctagatcgccatacatgtgcgactgacatctactagatccaccatacaagtgaatcgctctgcatcatactggtccgacccgctctattctcgtctactaccgcatatactacgccagcgcctgcattatccgcggcgctttccaagcagtcggcatctgcccgcggatgaacaagcaacttgacagttccaagtgtggcaccgtccgatggaactgttctcaacttta

SEQ ID NO: 326328 - DNA, 334 bp, Zea mays
cccacgcgtccggaacgactcactgcacgatccatcaatccgatcgatctgtcttgttcgtggagaggccaaacgtgtgcgatgggtaattatataagacgtgctcttcttcagatcatggtgaattgaaagactgccaaattaaggccacttgtgttgctttgattgtacggagagatcatgctgacgtgtacgtacgtgtaccgagatccgtttcaaatgcatgctttgattgtacagagagtggctcgtttggcatatagctccgctacatgattctctaatagggtaattccgtgtgattctctaacaaaagtgaatctgctatttgatg

SEQ ID NO: 326329 - DNA, 127 bp, Zea mays
aaaaaaaaaaaaaaaaaaaaaaaaaaaaaaaataaaaaaaaaaaaaaaaaaaaaaaaaggacgggcaatcataaatggctcaggcttacatactcatactttctacatacataattcttctattacc

SEQ ID NO: 326330 - DNA, 202 bp, Zea mays
tcttcctaaaaaaaaaaaaaaaaaaaaaaaaataaaattaaaaaaaaaaaaaaaaaaaaaaaaggaaaagataaaaaaaaaaaaaaaaaaaaaaaaaaaaaaaaaaaaaaaaaaaaaaaaaaaaattaaaaaaataaaaaaaaaaaaaaaatatatataaaaaaaaaacaataaaattagacaattttttaataatatacaa

SEQ ID NO: 326331 - DNA, 409 bp, Zea mays
cccacgcgtccgaaaaaaaaaaaaaaaaaaatataaaaaaaaaaccaacacataaataggcacatttaacaactcatgcatggcaaagtcaaatctcaaatatacatatacctaccaagcaatctactggccgctccatattcaactactctactctgtaacacccttgcctttccttacttaatcccatttcaacccatccgcctttcgccagccaacagcaataactaaaatacccattcctttccccatttcaaacattttcgcagcctttatagcacatgctactcaccctatcgctaatcttcatgcgcggctctcctttccactaacttcagcttctccattacactatgtaacgccctctgaccctctcctttaccttcattacttccctttttccccacct

SEQ ID NO: 326332 - DNA, 140 bp, Zea mays
ctgacgcgtgggaaaaaaataaaaataataattaaaaaaaaaaataaaacataaaaaaagaaggaaaaaaaatgacggccggtctgtaagaatccatgcttacactctcgttcctacaccactataattgtcatctaatc

SEQ ID NO: 326333 - DNA, 251 bp, Zea mays
acgcccacgcgtccgcccacgcgtccgcccacgcgtccgaaaaaaaaaaaaaaaaaaaaaaaaaagaaaaaaaaaaaaaaaaggaaaaaatataaaaaataaaaaaataaaaaaaacatacatactaaaaaaataaaaaataatttactttcacttaaatggaattaaattgccgttctttttacatccataattaatggttaaatcctggagtttccaaacttaattgccttgcaatacatttcattttt

SEQ ID NO: 326334 - DNA, 129 bp, Zea mays
cccacgcgtacgatataaaataagtgctggatagcccactatgtccgacgtcggaggcgaccggccggagactgcggaagggaggcgtgacgccgtccgcccgttccaaacaacggccgtccgccttaa

SEQ ID NO: 326335 - DNA, 77 bp, Zea mays
cccacgcgtccgcccacgcgtccgcccacgcgtccgcccacgcgtccgcccacgcgtccggtggttctagatcgcga

SEQ ID NO: 326336 - DNA, 398 bp, Zea mays
tcttcctaaaaaaaaaaaaaaaaaaaaaaaaataaaattaaaaaaaaaaaaaaaaaaaaaaaaggaaaagaaaaaataaaataaaaaaaaaaaaaaaaataaataaaaaaataataaaaatataaaaaaaactaaccttctttacacattctttctaccttattacctctatatatcttcacctttaatttaaaaaaattgtccctatttttacaatttttttatctcataaattccttttctttcaaaaattttttttttttctttttatcctaattttttcctttttctttacatcttttttgatcataaattaatattccttcctatcatttcttcaacctctttttttaatttatttttctcttatcttttcatttttcttttttttttttttt

SEQ ID NO: 326337 - DNA, 129 bp, Zea mays
cccacgcgtccgcggacgcattgacggccgcgtactacgcatataacttcactcaccgggtcgtgcttacataaccgcgagggacaacaagatccatattcaagctacacagaacgtctccacagctca

SEQ ID NO: 326338 - DNA, 308 bp, Zea mays
cccacgcgtccgcccacgcgtgcgcccacgcgtccgcacaggcgtccgcacatgggtagggggctcaggctatgcctaggccatgtccttgtccaagatgctgcacgtcgcctgccatggaggggtagtctcacggcctgaattcgcggaggcgccgtcgacggcaaggccgccacatctagcccgatcgcctgcgcactactgctgccgtagacgttcttggccgctgccatctgtgcgggcgccccgctactcctcggtaacctgagccagtgatgacgcatgcctgtcttctagaccgacgagag

SEQ ID NO: 326339 - DNA, 107 bp, Zea mays
cggacgcgtgggcgcaaggtaaccgagacgatgaaaaacagacttgtgtaataagtaaatgaacctataaaataccagtttaactgtttaaggagatttgcctcatt

SEQ ID NO: 326340 - DNA, 158 bp, Zea mays
ctttgttttcctaggggcgccacggattatcctgttcgcagctgaattttttcttgttggttttgctgttttcgctatctgtattgtagtcactgtgcaaaaaaaatcgttttgattgattggctgcaaaaagtgaagtgcgctattgcgctgtgact

SEQ ID NO: 326341 - DNA, 437 bp, Zea mays
gcaaggcagtgaacgtgccgtcgtctctcttcggcgaggcccgcgtgacgatgcgcaaggcggcggcgaaggcaaagccggcggcgagctccggcagcccgtggtacggccccgaccgcgtgctctacctgggcccgctgtccggcgcgcccccgagctacctgacgggcgagttcccgggcgactacggctgggacaccgcggggctgtcggcggacccggagacgttcgccaagaaccgggagctggaggtcatccactcccgctgggccatgctgggcgcgttgggctgcgtgttcccggagctgctcgcccgcaacggcgtcaagttcggcgaggccgtgtggttcaaggccgggtcgcagatcttcagcgagggtgggctggactacctcggcaacccgagcctgatccacgcgcagagcatcctcggcatc

SEQ ID NO: 326342 - DNA, 227 bp, Zea mays
ggcactcagcggttgcacctagcttgccgtaatcacccgcacgcacatcatcacggagggcttctatctgagcgccggcccatatctcttgtagatgacgcaaaatcaatcttctgttactcctactcttctccttctttctatcggggatactcatttcctgctatgcatgcacttctctatctctcactataatatataccatatataactttatgactcgcata

SEQ ID NO: 326343 - DNA, 233 bp, Zea mays
tcgcagacgcgtgggcggactcgtgagcggattcgtttacgaacctggactgactataggtaggggaggtactaggagcatgtgagtccggtatttatttgggcctttaaacgtaagcccttgactcatgcatgcatacaaattgatctatacttatcgttatctgatggaaggagtgccattttgtcgagttaatagatagtatcatttacccatttgaattctcctttgaa

SEQ ID NO: 326344 - DNA, 113 bp, Zea mays
cgacccgcgcgtccgctcgaactcaacccccgcccccttcacctgaatatcatgtccttcgtcctttccttatctggctgcttttttccactcgcctgcttctcctcaccttc

SEQ ID NO: 326345 - DNA, 149 bp, Zea mays
acgctttgttttcctaggggcgccacggagtatcctgttctcagctgaattttttcttgtaggttggtgtattcggtagttgtgttgtagtcactgtgctaaacaaatatttatgattgattggctgcaaaaagtgaagtgcgctattg

SEQ ID NO: 326346 - DNA, 299 bp, Zea mays
cctgtttctcaagctccttggctctagcttcagcttcctcacatctttcttcagcaagtgggagcttttctagaacactttcattctcctcttgtagcatatcaagctcatcgtgaagtgtagatgcctctcttttcagtcctgattctcttgagctatgaagcgctgcatcaaatcttttcggtcgagtgcgatccgctggaggctccacagccaccggtggaataggggacggtgttcgcagcgacttgttggttttgattggcgtgaccactgttgtggtgggtcgtgatgcaaca

SEQ ID NO: 326347 - DNA, 104 bp, Zea mays
taaataaaaaaacacacacaaaaatacaaaatataaaaactaaaaataaaaaaaactacaaaggaaactgacaaataaaaaagaacatatcaaacaaccctata

SEQ ID NO: 326348 - DNA, 249 bp, Zea mays
ccggtccatatattacatgggtcgacccgggcgtccgcccacgcgtacgatcatttgcagttcgaatgaataaattgttgcttactagaatgaatacgggcggaattggccattattctgtagtatcactgctcaccaatgggatataaaaaattaagtcagagtggtgatgaccaccctatcggcattatatgaagaagagactgattcaatggtctctgctgagaaaattcccgaaccccatcaata

SEQ ID NO: 326349 - DNA, 225 bp, Zea mays
ccggaattaaatggtcgacccaagcggcccctatcgagctgaccatcagcaaatgaacgatcacggttgcagctcgatcatcgccaagcagcacgtgggcatatgctctagccttaggtagtagctagacactcggacgagtaatcatcagtctattgatcgtgacaaattgacactgccgaggttcagacacacaccgtcgtggcgaccgactgaagcccagtg

SEQ ID NO: 326350 - DNA, 213 bp, Zea mays
gcgagggccgtcctttatttctatttttggatagccaagtggagagattacattatgaggtgggctctagatggacgctgggcagaacccaaactgcctttattcaacaatggtaggtaatgcagtttaacagtgcaggcacatgaggatccgatgtaattacgtcatctgcaagctccatccagatcacacgcactcggatcgcagttccaa

SEQ ID NO: 326351 - DNA, 380 bp, Zea mays
cccacgcgtgcgctaaagtggacgctgcgtgtcactacatgcgccgtgtgatactacgaggacgtactctgcggctacgaggaccgaatgctctactactagagctccatgaatgcctgctacatcatcataaactaatcgggcgagttcagctcccagtagaactagggctgaggatccatgttcggtcttgccgggggtgtcatcaaaaagatactccgaatggcatctgcatgattgctcactattgagccgcctactatatgcacctatctgatcatgagtgtcgagtctgtcaaaatgtatgtcgcctgggggaaaagaaatttaagttatatgaaatgaatatgctgttgatgtgtcaaaaaaaaatttacttt

SEQ ID NO: 326352 - DNA, 238 bp, Zea mays
catcgatctgcaagtctcgctacgtagcagtgcaataaaaaaaagcagccgcaatggcgggcagcaccatggccctctcctccacggccttcgccggcaaggccgtgaacgtgccgtcgtcgtccgccttcggcgaggcccgcgtgacgatgcgcaagacggcggcgaaggccaagccggcggcggcgtccgggagcccgtggtacggccccgaccgcgtgctggaccttgggcccac

SEQ ID NO: 326353 - DNA, 247 bp, Zea mays
ggtcctgaatattacatggtcggcccgcgcgtccgcggacgcgttggcggactcgtgggggcaaggttcgtggtttcacatttgacatcagctggggtgcgttggagtctctggagcttgactctgttgggctttctattgttccttctagcttggtatgcacgtactgtttatgtgtcgaagacgtgctggatatagtcttctatacagtcgtggtgcatgaagacgccgtctcacgggttcaacg

SEQ ID NO: 326354 - DNA, 186 bp, Zea mays
aaaaaaaatacaaaaaaaaaaaaaatagataaaaaacataaaaaaaaatccacatcactgggagggtgcccataggctgtagcgcgcatacgaactactacaatcattctatatagtctcctaaataaactacacagtgccatactttacaacaccctgactgggaaaaacctatacggacccaaa

SEQ ID NO: 326355 - DNA, 83 bp, Zea mays
gggcgttcgcccacgcgtccgaaaaaaaaaaaaaaaaatgataaattaaaagagaaaaaaagaaaaaaggggagggtgtcaat

SEQ ID NO: 326356 - DNA, 76 bp, Zea mays
cttcagttccgtcccgttcgtgacgacctgcgatccctggagggggagggtgaagtgtagggggaggcttgtcatg

SEQ ID NO: 326357 - DNA, 100 bp, Zea mays
cccacgcgtccgataaaaaaaacaatagtcttaatccaaaaatgcacacaaaaacaacaaggtaaatattcattgagtagaaaggacccatgcttaccta

SEQ ID NO: 326358 - DNA, 157 bp, Zea mays
tcggacgcgtgggctgacacgtgggtccatattgtaattacggcacgtattcagtggcgacttttatcatgggagagcaggatatagttgcataaaaaaaaaaattatttaaatttaaaatattacaataaataattataactattataaaatataa

SEQ ID NO: 326359 - DNA, 271 bp, Zea mays
attactacgggatcttacacacattcgtagtgctagggatgacctcaaaagaaaggtgttgggcttccggtcacccgctttatctgacatacatgagatccaagtttcttcgtctccattaagcaccaagaaggttgtgtactgcacttaaaggatctattgatggtactctgtttatggttgttcaggcaatgtggactcgggacttttggtttagcttctgataccttatgactgattggaaacaaagatgtatatcctctgtccaaaa

SEQ ID NO: 326360 - DNA, 111 bp, Zea mays
tcccactcgtcctcccactcgtccggtcatttgtgtaaaaaaaaaaaaaaaaaaaaaaaaaaaaaagaaaataaaaaaaaaaaaaaaaaaaaaaaaaaaaaaaaataatat

SEQ ID NO: 326361 - DNA, 302 bp, Zea mays
gcggcataccggcctggttcggagacctgaccagcctacggtcgctggtccgcgggcaggaccagctgaccggcaggatgcccgacgatctgctgcagggacagttccgggcggtagcactgtcgtccaaacagctgacggtcccaaccccgctcgactacgctctcgacgagatcaactctgtagacctctcccacagctagctgacgggcgaccgctcctaccagttcgacgtcgggcggaccagtactcatggacgacctgtcgtgtaactacctggactttgacctgatccatctggt

SEQ ID NO: 326362 - DNA, 53 bp, Zea mays
aaaaaaacaaaatacccaaaaataaaaaagggttactataaccggaaaaacaa

SEQ ID NO: 326363 - DNA, 196 bp, Zea mays
cccacgcgtccgcccacgcgtccgaaaaaaaatatcaccttataataaataccaaaatctaagggagcaaatacactaaacacatacataacatcatatccactgatatacataattgcaagttttgaatactgtttagatccatggatctcatgtctctcctacttgagctctttatgaaaaataaatcctctga

SEQ ID NO: 326364 - DNA, 236 bp, Zea mays
tcgcccacgcgtccgcccacgcgtccgaaaaaattaaaaaaaaaaataataaatataaatgagagggaaaaataaaaaaaataaaaaaacactataaaaatacaagacattactgtatctattactatctatattaatatgctcatccttttaaatatttaattttttttaccgttattttttaatatttaccttttcttttatgtcactatattttaacttattaatcatttttt

SEQ ID NO: 326365 - DNA, 258 bp, Zea mays
atgagatctaagcattcatgttagtgtccacctgagcatacttgatccaatggtacgacggaacaggaacgctgtgaccgagctctgtatgctacatatacgacatggccatggtcggaagcgctgttgtgtctgcgacctacacagaatttcggctggaaaaagcgcccgagatggacatatgacccaatctgagccctttcaggtgatgaaatctgcatacagtgggaatccatttgtcgtgggtactacactaga

SEQ ID NO: 326366 - DNA, 148 bp, Zea mays
ctcacacggactaacacgatttcaggcgcgtgtcaacaacacagatctagtcttatctatgggagtcctatgcaagcccaattatctcatggacacatttaaaaatgaatgcatatttttaatgaataatggttcaaaaattaaatta

SEQ ID NO: 326367 - DNA, 399 bp, Zea mays
cccacgcgtccgcccacgcgtccgcccactctttctcccacgcgtccgatttgcaaaggaatgagtttttcatttgccaatcgaccttcttcaaccctctagatcgaaaggccaattttttttttcttttagtttttgttattatttcgcattctttttaccttttcaattcttcaaaaattctctcgactgaattcacgtcagaacacggaatcataaagatcaattttttgcatcgtttttattaaaatttgtttgctaacaaaacatagaaataaaaaccaaaaaattgaaattccttatccgttttggcgaattgaactgcttgttcaattgtgtttgttgaattctatgcttatggaacctcttttgtactatgatattcttattcttcttgtt

SEQ ID NO: 326368 - DNA, 273 bp, Zea mays
gccagatcagttgggaagggagcttcgaggctggtcgtcctgacacgtggttcaagcgcgcggagctaatggcactggccgttggggcgcatacgccctaacatggatcgaatcgttcggtaagcagaagctccatatgctagattggattctcacttaaaggcatatatatctaatacctctcacaggagctacgcaccactttatgttgaatctagcgcgatgaccaatagtgtgaatcaactgttgctatgagactacgtggaatcacta

SEQ ID NO: 326369 - DNA, 134 bp, Zea mays
acaaacaaaaacacataaaaaaaaaatctattactaatcctaataacaaaaaaaaaaatgaaggattctattaaatcaagaacggcaacaataaaaagcttctcgcactttcccaccgtttctcctccctttgg

SEQ ID NO: 326370 - DNA, 103 bp, Zea mays
cccacgcgtccgagttgctgcacttaacctttactttggcggcctgaaatctggtgtgagggctggtgttatttgagatccagcaagacctggtcagaagtgg

SEQ ID NO: 326371 - DNA, 334 bp, Zea mays
cccactcattctgcacgcgtcctcataactagttgtgctcactatttagataaagagcaaggagctctaatttatttttggttttttgaatattcctaattattaaattaattcttgtctatgccagaatatttatatgtctcatttcatttccttgtgaagggatattatcttaaagctggaatatggtatattcatcatattatgtttaatctaggttgacccttgatatgaaataaatcatattgtcaggagaatacttgtgtgcacccccatcctctgacctagatgtgttactcatttctgaccttgctcagaataaaaaattcttacc

SEQ ID NO: 326372 - DNA, 387 bp, Zea mays
cggacgcgtgggtcgcccacgcgttcgccctcgcgttcggccacgcgtccgaaagccaggagggcgcagaggatgcagtatgttccgacaatcactaatcatactcaagtttggtgggttcctaatgttgttgttgtacatgaaaaggaagggatagaggttgtccatctagcttctggacgtacaatatgcaagcttcatttaaatgaaggaggccttcatgctgatattaatggagatggagttctggatcatgttcaggttgttggtggaaatggtattaaagagcagactgttgcgagtggatcaatggaagtgctgtaccctgttgggcaatcgctacatccggtgtgccagtgcgggagcaactttttaacgtctctatct

SEQ ID NO: 326373 - DNA, 287 bp, Zea mays
aaaacacatagcaaggataaattattgagcatgcagatcggataggcatgaaaaaagtaccggactgcaatagacttcattgtgggtttaccctaactaatatcttgccattcgtggctcatattctccagaagagatatggcatgatcaagcaaatgtaacaagtattcctttttggatggactctctgatgatgctcactttttcaaggttgaaaagtcatttctgctgttgattatctggcttttattttcactttctataacattgtgtttagaagacctttt

SEQ ID NO: 326374 - DNA, 244 bp, Zea mays
agtgaatcaatttccatgtctgaatattatcgaccaaagaaactgcgttcacaaattctatacttatcactagcgttccttcttggacccacaacacaacaatgtttcacacacagctggtggatcgttatacccaaatcgattctctagcagcaaatttatgtgatgttgtgacacatatacctactgtcgataaagttgccatagccaatgcaaatcttcaacacccataactccatcttca

SEQ ID NO: 326375 - DNA, 245 bp, Zea mays
ctgacgcctttactctgtctatctctacgctttattccttgaaatccactcatgtatccagggtactttattacataccgtggagacattaaccatgtttattcatctctctacatgctcgtatagattttcgaaatataaaaccacttcttaattccattcactacaccaccatcttttactacctcaaacttttccacatctctatcactactaccacctttatattcaactttcatactgtc

SEQ ID NO: 326376 - DNA, 93 bp, Zea mays
cccactcgtccgcccactcgtacgcccactcttcctcaaaatggctccgccagactgtccgtggggtttgccttcctcatggagatgatagtc

SEQ ID NO: 326377 - DNA, 55 bp, Zea mays
actcgttcgcggacgcgtgattcgacccatgcattctgttctacaacaagatgtc

SEQ ID NO: 326378 - DNA, 217 bp, Zea mays
cccacgcgtccgctcactcacactctaactcgaatactaacacttacaaacacacatacgcggcgcatatcaaccactcaaacactcaaacaatcaaaaaataatatttataaccaaaaacaatacccattatcactgctcttcttgctttcaccctacttgtctaacatattatctattactataccaatataaatacctctacctccaaatactt

SEQ ID NO: 326379 - DNA, 222 bp, Zea mays
tcccactcttccgttaactcacactctaactttaattctagcattaaaaaatacaactaaaagaaaaattataaaaaaattaaacactaaaaaaaaataaaaataaaataaatataaatacaacacacacattaacatacaaattattactttcaccatataaataatctcatattatcttaatcatattactaatataaatattctcttccatttaattac

SEQ ID NO: 326380 - DNA, 186 bp, Zea mays
taccaggcctacatccactcatccacataatttttcattattaggttttcttaattgtttgtgatagccataaaaacaaaggtcgccaaatcgcaaatcatattctattcttccacctcaacactatctccaatatcccttcaatctcctttataacttatcattctaatcctttccttatttctt

SEQ ID NO: 326381 - DNA, 231 bp, Zea mays
aaaaaaaaaaaaaaaaaaaaaaaaaaaaaattaaaaaaaaaaaaaaaaaaaaaaaaaaaagagaaaggtaaaaaacactaaaaaggttccgactctaaaacgcccttccttgccatgctatttcttttctatcgtgtcgcctaatctaatttcactgccctcttcgtttacttcggtaacccctgtattgtcccttgctttgccccatcttattcgtttcgcttcccatcc

SEQ ID NO: 326382 - DNA, 277 bp, Zea mays
ataacgactgagacagacgcatgagcagactctggtttcgaaaaacagaatcaaactaacttgtagggtttaaaaaaacacaagaaaaatgatataaaaagggctcaccgttctacagcatccaagttttctaacacatgttcaaaacccaatgaatttttccaacctgacaccgaatttcaactgaatgggcccggataaacacggcctggattctaaaaaccgtggcattgccccacttaatccccttggagtaaatcccctatcgtcaaatttg

SEQ ID NO: 326383 - DNA, 354 bp, Zea mays
ccctcgcctacattgatgcattggccaaatctctgcataccttggagacctgaatgcggttgagtgagacaaaccagacgtggacggaatatggcacttgatattctcaaggtccacctcaagaccaccgcacacatccctatatgcggctctctaacttgcgatggtcattatgtccttgtgaatcaattccacggttggcccatcaatgatcattaccgatacatctattgtactcaaatgtatgcgtatgagaacttgataacctcttcgtttgacaatctgttccaggtcggtatatcgtaacccgaggatctgtggattacatctaaactctggaatacttgatcatgc

SEQ ID NO: 326384 - DNA, 340 bp, Zea mays
  unsure (1)..(340): unsure at all n locations
cccacgcgtccggttggcttctcctccccctccggttcgggttcgggttcgtgaggttctccggggttcggtttcgtgggtgagcggatcgagatggcggcgtcggatgttgagtaccgctgcttcgtcggcggcctcgcctgggccacggacgaccactccctccacaacgccttcagcacctacggcgaggtcctcgagtccaagatcatcctcgatcgggagacgcagaggtcccgcggcttcggcttcgtcaccttctccacggaggaagcgatgcggaacgccatcgagggcatgaacggcaaggagctggacggncgcaacatcaccgtcaacg

SEQ ID NO: 326385 - DNA, 197 bp, Zea mays
caaaaaaaagcaaagtgccatgcaggtgcagatagaagtgtttattaactcttaaattgatcacacgaaatgattggacatcttctagcctacacatatgtacaaacttcatatacaaatcaatgcatatttttgtggctgaagcagatttctgtacctaattaggtttgcacacctgtgcacttgaaaagattcac

SEQ ID NO: 326386 - DNA, 329 bp, Zea mays
ggtgggcgcaccgcaactgagcctgtatagcacgagcgcgcccgtgagagtggaagagggggctggccccgccggcctgagcagatcatcggaaggcacaccgagctcttgccagctgcctccactccacccaatggcgatgccgagggcggagtcactccgcttactgggcctgctgaagcagcccgagtccgacgccggcgccccattcgagctcgacgagcgcgacgtggtgtgtccggcgtgcggtgggcagcaagacggttgtgccgccccgcctacgccgaggtgtcatgcgcacgccgtgccgctgtacatcttaggactgt

SEQ ID NO: 326387 - DNA, 240 bp, Zea mays
ctcactcgtcctaacgccttacggaatgcacttcgatgtgcttgctcgttcaaaagctactgggtgagggacttggctctaaagctcgccatactcttgatactctgccacctattgattacttcgtagctcaaaagtacacgtatctttaactcgtgcttacacacaatggggttacgcatgtcaagatcaaccgtatttttaaatcaccatctttgagaaaacggttgaaattatttt

SEQ ID NO: 326388 - DNA, 89 bp, Zea mays
tcgcgcccaagccgaccccaccgacgtacacccctttccccaagccttcgacacctaaaccgaccccggctacctacacttcaagccct

SEQ ID NO: 326389 - DNA, 442 bp, Zea mays
cccacgcgtccgcgctgggccaccagctttgaccgccgcctcccttcccctccgctactgctcctcctcaccccactcccccgcaggagcggcggcggcggcggcgaggtcgtaccccacatcggcgagcggcggcggcaccgccggaggcaaaggcaagatgttcgggcgcgcgccgaagaagagcgacaacaccaagtactacgagatcctcggggtgcccaagtcggcgtcccaggacgatctcaagaaggcctaccgcaaggctgctatcaagaaccaccccgacaagggcggtgaccccgagaagttcaaggagctcgcacaagcctatgaggttgtgagtgatccagagaaacgtgagatttatgatcaggatggtgaagatgcccttaacgaaggaatgggcggtggaggatcccatgttgatccatttgacatc

SEQ ID NO: 326390 - DNA, 255 bp, Zea mays
aaaaaaaaaaaaaaaaaaaataaaaaaaaaatttaaaaaaaaaaaaaaaaaaaaaaaaaaagaggaaaaataaaaaaaaaaaaaaaaaaaaaaaaaaaaaaaaaaaaaaaaaaggggcgtccgtttttaaggatccatctttacgacccctttcttgctacgtcttattttttttataatgctaccaaaattaatttcattgtccttctttttaaaacgttttgactggaaaaaccctggttttccccaacttat

SEQ ID NO: 326391 - DNA, 221 bp, Zea mays
cagacacgcttcttcatactcacatatcttcgcgacccaaatcgtacccgcttctctgagtcttatctcatttatcaccaatcgcgccgttaccgcatttcgacaacaccacgacggagtgcatctagctccacataggccaggccgtaattcagctctgaaacacatgctgtgagctagctctgtatcgagcatggcattcaagctgatggtcaaattcc

SEQ ID NO: 326392 - DNA, 116 bp, Zea mays
aaaaaaaaaaaaaaaaaaaaaaaaaaaaaattaaaaaaaaaaaaaaaaaaaaaaaaaaaaggagaaaaaaaaaaaaaaaaaaaaaaaaaaaaaaaaaaaaaaaaaaaaaaaaaaag

SEQ ID NO: 326393 - DNA, 264 bp, Zea mays
  unsure (1)..(264): unsure at all n locations
gaccgagccatcatccccccccgagccgtgccaaccaaaagccatccaccaacaacaacaagcccggccgcttccttgtccctgcccctccgttggtctcctttgcccatctcatcctctctctctctctccctctctctctctctggcggtcggcgtggctccgggggcgcgaagcgcgggcttcgcggggcgactcngccgcngcgacctgcanngttggtatgaaaggggtcacccacgcggcgccaaccacaagcgcccc

SEQ ID NO: 326394 - DNA, 127 bp, Zea mays
aaaacaaaaaaaaaaataataaacacaaatattaaaaacaaaaataaaacaataaacaaagcagacaattcaaaaattctctttatacaaaaaattattaaaaaaattaataaaattcactaataaa

SEQ ID NO: 326395 - DNA, 113 bp, Zea mays
aaggaggggaaaaggaccatactgttgattcatgagatcatgctagagatttttcctggcagggcgtgtaaaactgtcgaactatttgaacgaaagttgtacactgcagtatg

SEQ ID NO: 326396 - DNA, 215 bp, Zea mays
cccacgcgtacgcggacgcgtgggcggacgcgtggggaaatcctaaacggaagtgagacgcgcaatgggcgatccaccgcttgcgcgtcggtaccatgtccgctggaagcgagaggccgtacgccttctcgccctcgtcggcggtcccgggccccttctcccgcggctccggctccgctcccaccacggccgcgacagatagcactgggaggagc

SEQ ID NO: 326397 - DNA, 418 bp, Zea mays
ctgacgcgtacgcccacgcgtgcttcgacccttgagatcaaggcaaggtggtgctcgtggagtgctccctgctaggctcagtgtagtccatcctgatgctcgtcatcgcaactctcgtgttctttggtggcctgactaaccatggaactgatcaactatgcgacaaatttcatgtagtatgtcagtacaggacttctcattctaggtgtgctatacaaatctgtgctattgatgctaagatatgctgtgagctatggggagcacgcagaattctaccgagattcaggactggagctgtcccgagcatgcagcattgtcatgctccttgcctatgtaatctaccgtttcttgcaactgataacccacaagcagctatttcaacgccaaccccaagaggttgaagatggcgatgcttcag

SEQ ID NO: 326398 - DNA, 272 bp, Zea mays
tcgcccacgcgaccgctcacgcgacccgccatgagcgcgtcctcgctgggccacgaaacggtaggggcgcctgaagaccctggatactgcgtaccgctcccttgcgccttcgtccgtgccctgctcccaccgacgtggcattagagtatgatgatctcatttatcgctatcatattagctccctacaccaaagaccagagtcagatccgaagctacctcgccgcccagcaaggattttacccggacggagctctgcaacataggggggatcg

SEQ ID NO: 326399 - DNA, 58 bp, Zea mays
acccacgcgttcgcttttgttccacacgagatttctgaccacgtataactcatcttat

SEQ ID NO: 326400 - DNA, 53 bp, Zea mays
gacgtacgcgtacgtcacgcgtctgactagcactagatctttagtttacgata

SEQ ID NO: 326401 - DNA, 338 bp, Zea mays
ccggaattgaagggtcgagtcaagcgacgcgttagatcacgagtgcgagcacgtgtttcgaaagaagaagggcatagcaatgtacaacggaatgggcaccatacctgtcatacctgcgacgatgctcttaagaggtcttctagacgatgtctgcttccgcaccaccgacggcagatacagacacgcccgtcacacgacatcgactaatcgaatatgattcccaagagctttggcccttgtggtccaccgttgaaatgcttgtacttccctattaaagacaccttccttccgggatggcgcttcaacgacctggtggacaagggcttcgccgactggca

SEQ ID NO: 326402 - DNA, 208 bp, Zea mays
tagagtaatgctactggtattataagctagatggatgtgtgcctgtatctacacgggcatggtgtttatcaatcgtgtacacagtctgtaaacggtgtatcttggatgcatgttgtcgcgagcagagtacgtaggtatgaaccgatgtgtgcgcttgtgtctgactactctatctatgtagcaatgagttgtcagtgtgtgctttgat

SEQ ID NO: 326403 - DNA, 320 bp, Zea mays
cggacgcgtgagcggactcgtacgtgctaatgctaaataaggatggctgaatgtgggtgcagcaatcatcacttccggagatccgatttacactccatccgaccagcctacttctgaggatcaagaagcgacatgaattttaactcttgagtgccatcagcccaatatacctgatgttactgttatgacacctgtagcttgaaactactatagtctaattgattgatacgtcatgctttcacagctcgctttacaactggacattcatatcttacaagcttctatccatttagtccgcaaccgatttatggtacagatca

SEQ ID NO: 326404 - DNA, 323 bp, Zea mays
tgaaattcatctttactgatcggaggaagattatgttattcagcccgagactcgagatgggggagcttgaaatgataagagaaggacccacccattaattaaactattccatggactttgtccgcttcccttaaggcaccggttgtctccggaacaaaactctcttataaacaagattttttaatccaaccaaatgcctattggtgctacactgtattctgatatgccacttaatgacactggcttccacatattgactcatgaaaaataggttctctatggaaaagaaacactcctaggaaaatatgaagctcctatcataa

SEQ ID NO: 326405 - DNA, 108 bp, Zea mays
caactgactctcaatgtaacatcgcattcacctcgtctgaactaacggttactctcatactaacctatacacttatcagcgccctatcacccattggtttaaatttat

SEQ ID NO: 326406 - DNA, 215 bp, Zea mays
cccacgcgtccgtttattcttttttttatttttttttttttttttttattttttagataagtattttttttttttttttttaaaagaaacctaactaaaaaaaaaatacccacagaatgaacataaaaaaacacacccacaaaaaaccatcaccaaaaaacacaaaaaacaacgcaacatcaaacaaaaccacaaccacaacaactaacacagac

SEQ ID NO: 326407 - DNA, 203 bp, Zea mays
tcggtgatatcttctgtgtgtgtgtgtgtgtgtttgtgtgcatggctccagtcccggaggcaggcccgataggtcttcctataaggtgatccactgccaaatacacatcgaaacgtacatgtcggtcacagggaaacacattgcgaacctctacccgggcatttaatgggtcccgtacaaagtcccgttgtacgccatgaaga

SEQ ID NO: 326408 - DNA, 108 bp, Zea mays
tcttcctaaaaaaaaaaaaaaaaaaaaaaaaaaaaaatttaaaaaaaaaaaaaaacaaacactctaaaaagatccagaataacatactcatacatacaacaacataaa

SEQ ID NO: 326409 - DNA, 55 bp, Zea mays
tcttactaccacgctttcttataaccacaacttttcttcttcctttacaatacca

SEQ ID NO: 326410 - DNA, 182 bp, Zea mays
acgcccacgcctacaccttagagaagtgcgcatttaccatataaaaggctcacacgatctgtgggataggataccatcattcatgataactgcaccgatctcacggatcttcaagacatcgacgcatcatccaaatgttctgccctatcaactctcatatagaatatcaataacctaccatc

SEQ ID NO: 326411 - DNA, 203 bp, Zea mays
aaaactaaaaaaaagggggggataatataacatgggccgacgctttttccgatcccattcttgctccccctctcttgccagaacacactttccctgtagtgtcccctaattcaatctaactgcccctgtttttataaacgcttctcctgggaaacccctggctttcccacctttactcgctttactatccttcccattctctt

SEQ ID NO: 326412 - DNA, 89 bp, Zea mays
tcgaaaaaaaaaaaaaaaaaaaaaaaaaaaacaataaaacaaacaaataaaaaataaacagatatggcaacctaaaaaaaaaagaaaaa

SEQ ID NO: 326413 - DNA, 233 bp, Zea mays
cccacgcgtccgtttgcatgttggctatgttgtgtaagctctatttatggtggtctcgctgagacgggtatttggcttcgcagttatctagctatgtgatgtactgttgtcttgtccctgggtattatatggtacactgcagccagtaatagtaaaaaaaaaaaaaaaaagacaaaacaagaacaaaaagaaaaaaaaaaaagcaaaaaaaaaaacaaaaaagagcacatagt

SEQ ID NO: 326414 - DNA, 325 bp, Zea mays
aaaaaacaaaaaaaaaaaaaaaaaaaaaaaataaaaaaaaaaaaaaaaaaaaaaaaagcaaagaaaaattttattaaacttcaaaaacatcataactaaaacaaaaacagaacaaaaacaacacgaaaaataaaaaacaacactacaggacctcctaaacaaaatccactaccaaggcccatgacaagaaaatcaaaaccaattgcaaagcgctaccgaatacaaaaatcaaaagcaagaacataaaaaaaaagcgccaccggaaacaccaaccaaaccaaaatccaaacccctaccccaaaaacccccttacccgaaccgccaa

SEQ ID NO: 326415 - DNA, 365 bp, Zea mays
aaaaaaaaaaaaaaaaaaacaaaaaaaaaatttaattaaaaaaaaaaaaaaaaaaaaaaagagaagagaataaaaaaaaaaaaaaaaaaaggacacccaattttacaggaaaccgggctttctttcccttgcattcaacttcatacctcttctattgggtcactttttttcttttttttttccctctttttacaacttcttttctggcaaatccctggcgttccctatcttaatccctttgcttcccatccttgtttccctatttggccatttatcttaaaggcccgaaccaatctccctttttacccttttctcatgcttattggtaaattttaccccccctttttccgcccattaagctccct

SEQ ID NO: 326416 - DNA, 231 bp, Zea mays
attttgagatgaatattgtgtaagttatgaataaaatagttaaccactgtgccgttgtctagaaaatctgcatgacacgaataatccacgtacacggctgtactaaaaagatgatgaatctgtggtggctaaaaaaagggaaatagaaaagtctggtaataaaagttgtttctgaacaaaaaaaaaaaaaaaaaaaaaaaaaaaaaaaaaaaaaaaaataaataaaaagga

SEQ ID NO: 326417 - DNA, 341 bp, Zea mays
tctcctctcttctctaaaaaaaaaaaaaaaaaaaaaaaaataaaattaaaaaaaaaaaaaaaaaaaaaaaaagaaaaggaaaaaaaaaaaaaaaaaaaaaaaaaaaaaaaaaaaaaataaaaaatcccaacgcttcctccaacccttccttttttaattccggtgcgcccgttttaacggctccatgtttacttacacttccttgcaacttcttattttttttttagggtcacttaattttatttccttgcccctttttttccaacttgctaactgggataccctttcctttccctagcttattcgctttgcagaatttccctttttctccagttgccctt

SEQ ID NO: 326418 - DNA, 300 bp, Zea mays
gccgagcccaaccgcacaagcgcgcgaggcaggagagagagagaggcggggagcaaaacagtggaggggaaagaggaggacgtgcgcctgggcgccaacaagttctcggagcgccagcccatcgggacggcggcgcagggcgccgctgacgacaaggactacaaggagcccccgccggcgccgctgttcgagcccggggagctcaagtcctggtccttctaccgcgcgggcatcgccgagttcgtcgccaccttcctcttcctctacatcaccatcctcaccgtcatgggcgtctccaag

SEQ ID NO: 326419 - DNA, 126 bp, Zea mays
tcttacacttgtccggacacgtgctcttactttcctcaccagattcctcttctcgttaagcgctggttatatcacctcctttgcactttcaacctacttcccctcctattcaaactccccacctta

SEQ ID NO: 326420 - DNA, 214 bp, Zea mays
acatggccgattatgaggttacggtccgattacttgctttgcatgctcttgtctggcgtgcagatgctgtttacctcgacaaggtaactcgggaaacattaccaacaggcattcacgatttccaaggttaccagacctacagggagcaacctggcccagattttactctgacaacgtgcgtttgctattgcggacgctgtaagctacctcccgc

SEQ ID NO: 326421 - DNA, 184 bp, Zea mays
atatggactattataaggacacgttttcattacaaactttccatactttattccggcatagacatgctattctccttagcaacctatactccttattacaaaccaacatccatcatacaatacctacatcaccagatttacacatatcaacttaccatcaaatcaaatataaccatatccattt

SEQ ID NO: 326422 - DNA, 431 bp, Zea mays
  unsure (1)..(431): unsure at all n locations
cttggcgcatggatgggtactggcgaagtatgccctcgcaggatgccgtcattgggcgatcagttggtgcgaagtcctgccttcgccttggatctgcggggtcggaacccggccgcgtttgtgcgtgaagtggaggccgaggcctcaaggattgtagggcgatacgtgccgaagaagaaaaccttgcggagttgggatattcgcggttctaatgttcgtttgaaccgtgttttcgagttgaaccgtctgccatatggcggttacccgggagacgacgatgctggtgttgtcgaccgccggggaaaagggcggctgctgcggtcgacgagggcccttcgcggggagttgtgccggccgcgaccactaaaaagaggaaactaggtactgcagttgangggttgggggtctccgaccgttttgctgtcgatttg

SEQ ID NO: 326423 - DNA, 64 bp, Zea mays
ggctgtctttgcttttgtaattgaaaaaaaaaaaccccgacttcggtagcaatacattttgttg

SEQ ID NO: 326424 - DNA, 117 bp, Zea mays
tcttcctaaaaaacataaaaaaaaaaaaaaataaaaaataaaaaaaaaaaataaacctacaaaagaaaggtaaaaattaaaacttacttgcacatcctttctaaactcccattctta

SEQ ID NO: 326425 - DNA, 291 bp, Zea mays
gaggagaagccctctagtggtactgggacctaatttgcttctttaacccatgattggaccgcttggtctgtagaaaaggaggatggaacctttgaaattccagaatcctgttgaaaggtcaaccccgaaaaaacctaccactgttgcaaaggagccaggtaaaactccgaagatgaagaagcttagaaacctcagatccagatatggacacagttcacaacatattctcgttgcccacacccaattcatccgaggctctgttacacactctatgtggaacaccacaggtgt

SEQ ID NO: 326426 - DNA, 199 bp, Zea mays
acggaattcggttctacacatgatcactggtctccttgagctcaccttacaacacccgaggtacggtgcatcagatgtccctggacagtaaatctggctaaacgacaatgactgtcggccggatcggaaccacaagacataactcttgacccagaacgaggcgccgtgtcccgacttcctaacatcgacttatgccgac

SEQ ID NO: 326427 - DNA, 88 bp, Zea mays
cccacgcgttcgactaaacaatatcactggtctacttgagctcaccttacaacacatgaggggcggtgcaacagatgcggctggacaa

SEQ ID NO: 326428 - DNA, 273 bp, Zea mays
tccacaacgtacgcttagaggaaggctgcaggtgctcctccgtaagccgagacgagggtatggcaccatccctgtgagtaccaacactactaatgcagctcgccatgctctatcagtaccgaccatggttgctaactagatctccgacttagagaaaaacactaataataccgcacatgctatcttttcaccactagattttcaaacgatcgccatcaccaatagcatgaatctcatgcacctgtccaactccgtcaaactactattcttcta

SEQ ID NO: 326429 - DNA, 359 bp, Zea mays
acgcgttacgcgtcccctgacgcgtatgcagtaaattctctattctcaacactgctgaacaaatccggctatgggttatgtatatttgcaatttgtcttatgaagacattctaccatatgatctcgcctatgactttactgatttttgctccacttctagtgctgccttagtttctcacatgcatgttgactagatgccatttactaatatctaccgctactgattctgttcttactatgcaatcttctataagctaccttattacacttatgctagacccacgatacctgtatgaccacatcctttactgctactactacttttaccttgattttcgaaatcgcgcattctttcttct

SEQ ID NO: 326430 - DNA, 104 bp, Zea mays
aaaaaaaaaaaaaaaaaaaaaaaaaaaaaaaaaaaaaaaaaaaaaaaaaaaaaaaaaaagaaaaaaaaaaaaaaaaaaaaaaaaaaaaaaaaaaaaaaaaaaag

SEQ ID NO: 326431 - DNA, 381 bp, Zea mays
cccacgcgtccgcccacgcgtccggggttggcttctcctccccctccggttcgggttcgggttcgtgaggttctccggggttcggtttcgtgggtgagcggatcgagatggcggcgtcagatgttgagtaccgctgcttcgtcggcggcctcgcctgggccacggacgaccactccctccacaacgccttcagcacctacggcgaggtcctcgagtccaagatcatcctcgatcgggagacgcagaggtcccgcggcttcggcttcgtcaccttctccacggaggaggcgatgcggaacgccatcgagggcatgaacggctaggagctggacggacgcaacatcaccgtcaacgaggcccagtcccgcggcggccgtggag

SEQ ID NO: 326432 - DNA, 122 bp, Zea mays
caaagcgtaagatagaaatgccggcttcgattcactaacaaggaggcagggaggaaagacctaaaagatcctctccacttgaagttgtaccaaatggtatatgatatcgcctttccctttcc

SEQ ID NO: 326433 - DNA, 422 bp, Zea mays
  unsure (1)..(422): unsure at all n locations
atcgcgagcggcgccagctcgattgggctcggggaggagtggaggagatggccggggctggtgtggatgaaacggagctcgggcaggcgaggggtgaggggacggctcggatacagtggcggggtggtcgctgaggccggtgcgagcattaatggcgaggtgacggggcgtgaggcggtgaacgcgcaggtgatggcatgggcgggacgaaggtcctgacaggcgggcctgggctgccagtgggagagcggcgcgagagggagagaggtggagccgctgaacggtggggccggtttgtcaggtgcggcgcgggcgcgcgcagctgggccgcttgggtcgggggaggagagggggaaagagcatgcgcgacgcggcttgggctaaaatcggcccatccganggggggagggttttttcttttt

SEQ ID NO: 326434 - DNA, 354 bp, Zea mays
cccacgcgtccgaaaaaaaaaaaaaaaaaaaaaaaaaaaaaaaaaaaaaaaaaaaaaaaggaaaaggaaaaaaaaaaaaaaaaaaaaaaaaaaaaaaaaaaaaaaaaaaaaaaaaaaaaaggaaaaaaaataaaaaaaggggcgggtttatttaaagggtccaagctaaaataaagcttttttataaggtaatgtatttttaattgggtgccctaatttaaaaaaaggggcgactggtaaaaaccttgggtttgggaaaaaaattggtttacccaaattaaacgttttgaaagaaaatccctttttgaaaaggtgggtaaaaatcaaaatgcccaaaacttttgcactttgaaa

SEQ ID NO: 326435 - DNA, 436 bp, Zea mays
aaaaaagaaaagaaaaaaaaacaaagataaagaagaaggaaaaataaaaaacaaaagagtgaagaggaacaagagaaaaaaaaaagaaagaaaaaagaaaaaaaagagcagaaaaataaaaaaaaaggaaaaaaaaaaaaaacaaaaaacaaaagaaaaaaataaaaaaaaaaataaaaaaaaaaaaaaaaggaaaagaaagaagtaaatagaaaaaaaaaagggaaagaaaggaaaaataaaaggaaagaaaagaaaaagaggaacaagaggaaaaaagaatgaaaaaaaggaacagtaaaagacaaagaataaaagaaaaaaaaccaaagcaaaaatgaaaaaaaaaaaccaaacaatttaaaggaatgaaaaaacgaatgaccaaaaaaaggaaaattgagaaaaaaaaaaacgaaggaaaaacgaatgaaaa

SEQ ID NO: 326436 - DNA, 420 bp, Zea mays
cccacgcgtccgatctccttcagcatcgatccgcccgcccctccctccaccagcagcagcaatccgtttttcaccgtgcctttccactcaccaccagccgccggcccccaggccacaggcccaagccaagccgcgcggcgtcactcccaaaccctagctcgcccgcagtcgccggtgatgtcgtccccttcgtcgtcccctgcgcggaggcgggagatgggggagggcggcgagctccccgtccccgtgcccgtgcccgcctccgtcgtcggcgacgacaaggtcctggcggcggcgcagcacatcgtcaagtcgctcgccacgtccaagaacgccgccgacgacatgatccgcatcctctccggattcgaccaccgcctctcctccatcacctccgacctcttcccgtccccgtccccc

SEQ ID NO: 326437 - DNA, 96 bp, Zea mays
cccactcgtccaatctcctttatcatttttcctcccgcccttccctccaccagcatcggtaattctctttttcaccgtgcctttccactcaccacc

SEQ ID NO: 326438 - DNA, 407 bp, Zea mays
aaaaaaaaaaaaaaaaaaaaaaaaaaataaaaaaaaaaaaaaaaaaaaaaaaaaaaaagggaaaggaaaaaaaaaaaaaaaaaaaaaaaaaaaaaaaaaaaaaaaaaaaaaaaaaaaaaaaaaaaaaaaaaaaaaaaaaaaaaaaaaaaaaaaggggtaaatcttttaagaatggaaaaatattgtaatgatacaaaaaaattaaaattttattaaattgggcttaaaataaataaatttagagccaatattaaaaaaaccgtactgggtaaaaaaacagggtgtcaaaaaaaaaaagggattggaaaaaaaactttttttgaaaattaagcgaaaaagaaaaaaaggttactcgaagcgtttttgaaaaaattggcaacactctaaaggcaaatgaataccctttt

SEQ ID NO: 326439 - DNA, 251 bp, Zea mays
cccacgcgtccgcccacgcgtccgaaaaaaaaaaaaaaaaaaaaaaaaaaaaaaaaaagagaaaaaaaaaaaaaaaaaaaaaaaaaaaaaaaaaaaaaaaaaaaaaaaaaaaaaaaaaaaaaaaaaaaaaaaaaaaaaaaatgaaaatataaatacacataattagataaagaaaaataaaaagaaaaaattgaaagttacagaaataaaaaaaaattaaaataaactaaagaaaaaaaacattagataaa

SEQ ID NO: 326440 - DNA, 321 bp, Zea mays
acggttctagatcgcgggcggtcgctcgcgatctataactaggttctacatcacattcgggggctggttaaactcataatatgacagctcctttatttttaaacaatatgttcctctatagccaaacttacaaccaaacaatttgttacggttttataacgtcctgaattccaaaactcttatcctaaccaacttaatatgcttcgattacaacccacttaataaatctaacatcattaaaaataattctatttcaattacacctttacaacacacacttatcctacacatcttaattcatttcacattgtatcactacat

SEQ ID NO: 326441 - DNA, 351 bp, Zea mays
gattagtaaactttgtgatatgtgaattgctcctttctatagatggctagttgaaccctgctggtcataataatctggatctgatttgctcttcatttacattgctaggcctagggattagggattgaattccgcaatgcttgacaaatagtgaagttcatactgttatccatgagcactgagcagtatctgccaagacttttttattctgtcgagaagtgataactattccttagatctgctaggtgtgtttggtgtgcaaagggttttgtggtgttaagtgttgcacttggctagactatagactatttaaagtgtgttgatcagagacgaagttgggagttgggacat

SEQ ID NO: 326442 - DNA, 164 bp, Zea mays
cagacacatactccgacgcgttggctttgactgcaaaggtgccaatatgagaggtgagtctactttctacacttccagttagcaccaacacatacctaattaagcatgataataacgttcgtatgatatctatatgtgctgcttatgaggaaactacaaagcca

SEQ ID NO: 326443 - DNA, 79 bp, Zea mays
aaaaaaaaaaaaaaaaaaaaaaaaaaaaaaaaaaaaaaaaaaaaaaaaaaaaaaaaaaaggaagggggcaaccaatctt

SEQ ID NO: 326444 - DNA, 283 bp, Zea mays
atacatcatcctatgcacgtgtacatatataatttgagcttgtccaatacatgttatatccactataaaaactatattcttatacactctccttttcacaaaactaccttattattatcgctcatatagacatcttctacattcttctctacccttaaaaatctttcactcccaatcttcttactagattcttttaatcaactaagtctttaacaccccatgtacttacccctttcctccacaacctaatattaacttaaacactaaatatcaattacataac

SEQ ID NO: 326445 - DNA, 180 bp, Zea mays
aaataaaaaaaaaaatactaaaaaccatttatatataataaaaaaaaaactaaaataacggctattggtaccattttaaactaccaatttaaacgaccactaatcttttaattattatcaccttacttcctcttatatatatatatcttgctctttataaaacttaaatttctttcaatt

SEQ ID NO: 326446 - DNA, 56 bp, Zea mays
aaaaaaaaaaaacaataataaaaaaaatactaaattataacaaaaaataaaaaaaa

SEQ ID NO: 326447 - DNA, 228 bp, Zea mays
cctcccttggtgggctaactccctaactcagctcatggcactcgcccatcagacgctaacgctcttacctaggattctgacttcgacgagctcagtcatcatctgatacaccgtatcttcactcaaatgcctttacaaataatctcgatcacacaaatctgttaatcaacggcttctctaccactctctataaccactattgcgaatcaaccattactattgtactac

SEQ ID NO: 326448 - DNA, 212 bp, Zea mays
cactcgtacgcccacacgttctcgttcatgaaaaactttagcttattcgcccactctgcgctctcttagtccagttacaatgatttctggagagtgctccatcatcaaatgtagttcttctccatcaacccaagctcctacacactcaaccatattcttcgataactcaaccatatacacaccatcactttccacaacatatataaaattct

SEQ ID NO: 326449 - DNA, 389 bp, Zea mays
cccacgcgtccgcccacgcgtccgaaaaaaaaaaaaaaaaaaaaaaaaaaaaaaaaaaagaaaaaaaaaaaaaaaaaaaaaaaaaaaaaaaaaaaaaaaaaaaaaaaaaaaaaaaaaaaaaaaaaaaaaaagaaaaaagaaaaaaaaaaaaagggggtagctttaatataattcagagtttacttaatttaaaatggaaatggaataaaatttttttaaaggacaaaaaatcaaaaaaattggagggtttataaaaataagtcgtttgggaaaaaaacgggttgtaacgaattcagtttcttaaaaaaaaagccgcttaatgaacagttgaaaaaatcgaacaaggaaggattaaaaaccgtttgaagggtattttggacattaaaagg

SEQ ID NO: 326450 - DNA, 268 bp, Zea mays
cccacgcgtccggtttgctggtccttgtggttatctaaaacacaagtatatatatagggatcgggagctattttgatgctggcgatcatggttctaacgcccttggttttttgggcccgttcctttagctaacgattctgtttgttaatttcttcgggtttttttggagtacagtgatcatgaacctgtgctctaattgccacaaggggattattactcatcctgatcaggccaatctggtattcttcggttatttcttgaatttttt

SEQ ID NO: 326451 - DNA, 55 bp, Zea mays
ccgacgcgtccgcggacgcgtgggctgtacgcgtgggctaagttctagatcgcga

SEQ ID NO: 326452 - DNA, 271 bp, Zea mays
cagtccacgcgatcgctatttctagatctccagcggttgccctatgggatcgtctgtacatgcatcggactgaggcacactgcattgcagttaaggacgccatagtgcactacgagctaccgagccatcccttctatggacccatactatgtgtgaataactgtcccttcttcagcagcgcggccaccatcaacatgtgctctaagtgccacaaggagatgattacgaaccacgatcaggccaagctggctgcctcctctatcgacagcat

SEQ ID NO: 326453 - DNA, 193 bp, Zea mays
atcgctagttctagatcgcgagcggttgccctatgggatcgtttttacatacaagggacttggacaaactgcattgcagctcggcacggcatagtgtatacgatccgaccgatcgatcccttttattgacaaacaaaacctgtgcacaagggaccttcattgaatgccctgcgcaccatcaacatgtctatct

SEQ ID NO: 326454 - DNA, 529 bp, Zea mays
  unsure (1)..(529): unsure at all n locations
tcgtctcgtgtcgagtcgacggtggttcaggaaactctgagtatgtcgccaaggggaagctgtactgagctggggagggcccgtcacgtggctcgcagccgcttggctcgacgccttagatgcttctgtgannagggttcgtagcttggtagcaacgccctgtcagggacccctgataagaatggtgaatcttactgcctgatgcgggtgcgaagcccagaggtaaatctctgagtggaggcttcgaagncgatacctgacagtgcataatcgtatcgtcatgactttgggtatatggggccgataagacttaatgcgaacccattcttagtagnnctggttccactcacgaagtcttcctctcagggaatagctggagtcccacaacgagtgtctagtcgggtaaaggccaatggattagtagtgcatcgggggccgcaacgtcccttcgacgtattctcaaacctttaaatagtgtaggacgggcgcggctagcttcggtgaagccgtgcncacggaatcgtggagc

SEQ ID NO: 326455 - DNA, 431 bp, Zea mays
gggaattgctgagaggtccactctattatgtcctggtgctgctgttcagcgttttagtcttctggcgtgagtcccccatcgggatcgtctccttgtcgatgatgagcggtggcgatggtactcccgtccccagtatctaatagcacgatgtcgttttgtagaacgccgttgcatttgattgtttgtgccatataacttgcaggttttgctgacattgtcgggaggaggtatggctcagcgaagctgccattcaatcggaagaagagctgggccgggagcatctcgatgttcatttctggtttcctgctgtccgcgatgatgatgctctacttctcaagcctgggttacattgatgttatctgggaagaggcacttggtaagctggcgcttgttgcactagcagcaacagtagtggagtgcgtccctgtgac

SEQ ID NO: 326456 - DNA, 289 bp, Zea mays
acagaatctagtaaagattgagaaaaacattttttttgagaaaaaaaaaaaaaaaaaaaaaaaagaaaaaaaaaaaaaaaaaaaaaaaaaaaaaaaaaaaaaaaaaaaaaaaaaaaaaaattacatacaaaaaaataaaaaataatataaatataatataatgtaaactaaattgaatgaactggacaacgttttacaatggcaaaaaatgtaaaaaccctgaacgctaataaacttaaatgacattgcaccatataccactttctacatctgacataatatccaaaag

SEQ ID NO: 326457 - DNA, 294 bp, Zea mays
aaaaaaaaaaaaaaaaaaaaaaaaaaaaaaaaaaaaaaaaaaaaaaaaaaaaaaaaaagggaaaaaaaaaaaaaaaaaaaaaaaaaaaaaaaaaaaaaaaaaaaaaaaaaaaaaaaggaaaaaaaaaataaaagatcaggggggtgcttttttgagctcctaacttaagagctcggtaatacggacgccaaaggacaattaacgggccgccaaattaaaatttggggcccgggaaaacaaaggctccgacggggtaaacccctggttgcaacatccttatctgccaggggtcaa

SEQ ID NO: 326458 - DNA, 398 bp, Zea mays
cccacgcgtccgggtgggttggcttctcctccccctccggttcgggttcgggttcgtgaggttctccggggttcggtttcgtgggtgagcggatcgagatggcggcgtcggatgttgagtaccgctgcttcgtcggcggcctcgcctgggccacggacgaccactccctccacaacgccttcagcacctacggcgaggtcctcgagtccaagatcatcctcgatcgggagacgcagaggtcccgcggcttcggcttcgtcaccttctccacggaggaggcgatgcggaacgccatcgagggcatgaacggcaaggagctggacggccgcaacatcaccgtcaacgaggcccagtcccgcggcggccgtggaggcggcggcggcggcgggtacggtggt

SEQ ID NO: 326459 - DNA, 158 bp, Zea mays
tacccttttcactctttcacactctccatatctacagcgtcagcattcgcaacctttctcaacccttccctactccaaatccaccttatctcccacactccctactaacccttcattaccctccaactcctaactaccaaacaatttatcctttaaat

SEQ ID NO: 326460 - DNA, 396 bp, Zea mays
cggacgcgtgggcggacacgtgggcggacgcgtgggcggactcttggtcgacatgtggacttacagtgtttgtataacggtattgagactgaatggagtgtactttgaggtagtttctgaaaaacaaagaaatgaatgcaataagagaaaagacagagtaaaaaaacggacaacgagtaaagcggatgacgagacttgacatgataacacaaccgttggattactgcactggctacagttgcgcaattagtggccgatgtggcggttctagctcgccaccgacgacgcgcagtactaatgctggatagccgggacgactgactgtgcgtgaaccggtgaaacaggcagtgactgcatgctctcatggtatggcactatcgatagtgtagtatgtat

SEQ ID NO: 326461 - DNA, 319 bp, Zea mays
cggacgcgtgggcggacgcgtggggtcaaactttgctggcagtttttaaaacagttttttaagggaaatcagggtatatttcaaaaaaaaaaaaaaaaaaaaaaaaaaaaaaaaaaaaaaaaaaaaaaaaaaaaaaaaaaaaaaaaaaaaaaaaaaaaaaaaaaaaaaaaaaaaaaaaaaaaaattaaaaaaaaaaaaaaataaaataaaaaattaatttaaaaaaaaaataaaaaaaggaaatcgatctagattatacaaaaacatgactgggaaaaaactactgttacgaaatataatagtgttgccaaaaatcaaa

SEQ ID NO: 326462 - DNA, 82 bp, Zea mays
cccacgcgtccgaaaaaaaaaaaaaaaaaaaaaaaaaaaaaaaaaaaaaaaaaaaaaaaaaaaaaagaaaaaaaaggaaaaa

SEQ ID NO: 326463 - DNA, 252 bp, Zea mays
  unsure (1)..(252): unsure at all n locations
cccacacgtncgcggacacttgttttcctacgctttttcagactcttgttcctatgccctttcgtgagaactagatttatcgctcggtgatcattatgacacattggttggtacagcaatcaaacatgtgatattcctacatgcttgctttgcataatgcgtatatctactgttaaatatttatatataaccagtattacgtcaaactatacaactacacgagcagtccttctagaatatccaagctttaca

SEQ ID NO: 326464 - DNA, 441 bp, Zea mays
gctgcgcagcgcgagcgcggaaggcgcgatgcggcgcgcggtggaggccgcgcgcgcggccgaggcagacgggatgctcgcggtatcggtgctgccgggcttttcgctcgcggacattcccgcaccctgcatcagcgtggtcgtggtggccgatggcgatcgggccgcggccgatgcggtggccgagcgcatcgcgcggcagatctgggatgagcgcgacgcgttcgtctaccgcagcgcaccgctggcggaatcggttgcgcaggccgcggcgctcgcgcgcggcgcggaccgcccggtgctgatgctcgatcacggcgacaactgcatgtcgggcggcccgtgcgacacgatggacctgctcgaagccgcgctcgcgcacgggctcgacggcatcgtcagcgggccgctgtgcgacccgcaagccgtcgcggcgctgat

SEQ ID NO: 326465 - DNA, 65 bp, Zea mays
cccacgcgtccgcccttttcgagtctgtactgaaactgctgagagatttgcagttgtgatctatg

SEQ ID NO: 326466 - DNA, 65 bp, Zea mays
cccacgcgtccgcccttttcgagtctgtactgaaactgctgagagatttgcaggtgggatctatg

SEQ ID NO: 326467 - DNA, 265 bp, Zea mays
ttgctattccctcatcttctcatctccctttatatgatctttccacactaatctcaaatagggccttttggtcctatttaatgaacccatctatcacaatgactctgttttccattccccctatatacccatcctctacatcaataactgtatcttcttcttcatctctattaccatcaacatgtactctaatcaccacaattatattataactaatcatgatcattccaatctcactgcctactctatctacatcatctttaac

SEQ ID NO: 326468 - DNA, 77 bp, Zea mays
cccacgcgtccgcccacgcgtccgaaaaaaaaaaaaaaaaaaaaaaaaaaaaaaaaaaggggagttctagatcgcga

SEQ ID NO: 326469 - DNA, 293 bp, Zea mays
cccacgcgtccggtatatactctctttgtcctaaaaaaaaaaaaaaaaaaaaaaaaaaaaaaaaagaaaaaaaaaaaaaaaaaaaaaaaaaaaaaaaaaaaaaaaaaaaaaaaaaaaaaaaataaaaaaaaaaaaaaaaaaaaaaaaaaaaaaaaaaaaaaaaaaaaccaaaacacaaataaacaaccaaaaaaatcacaaaaacagaaaaaccaaaactactaaagaaatcaaaacccaaaaaagcatgttcccgaattcgaaaacaaggtagaagacccagatgcacaggc

SEQ ID NO: 326470 - DNA, 332 bp, Zea mays
accaacgtacgaccacgcgtacgctcctcgacagcagcagacgaaggttacacgggcgggaggcctagtagatccagcctaacctgcacccatgtgcgacatggacaatctcatgatctgtgtccttaatgaacccgactggccgtccttctgcactcatcgctacaggcaaaaccttgctttcaccaaacttactggccttgctggatatatggcttaccccagatcacgttactccaactatgctcgatcctatcgccgttcgtatcacctgcgcaacctagttgtgaactgggactggccttttatgccaacgttaacccacattgtct

SEQ ID NO: 326471 - DNA, 351 bp, Zea mays
gggaacatcaccgtgtagtgtacgtacatatctacgctagctactactactactgagtgtggaaaccttgtggttcacatgaaacgaaagaatacgctgcaaaaatgtactagcgaaaagaaagaggaaaggggacaagtacatgtacaatacgacgctgcttccctccctccggcggccatttctgcatcatcgtcgtcgagattcctggtgcggtgcggtgcggtgcggtgctgtgcgtcgtggcgtgcgtgcgtacggatcgtcatgtcggcctgctgcttccgcggctggaggacgaggacgagccggagtggccgctgccccccagcttcctgctgatgctgtgga

SEQ ID NO: 326472 - DNA, 346 bp, Zea mays
tcgcccacgcgttcgcccacgcgtccggaaaaaaaaaaaaaaaaaaaaaaaaaaaaaaagaaggaaaaaaaaaaaaaaaaaaaaaaaaaaaaaaaaaaaaattaaaaaaaaaaaaaaaaaaaaaaaaaaaaaaaaaaaaaaaataaaaaaaaaaaaaaaaaaaaaaaaaaaaaataaaaaagggggccatttttaaaatttcaaatttttaaaacccttgaaattaacttatttaatttttttttgggaaattaaaatttaatcaatttgcctattttttaaaaagttatgatttgaaaaaccttggatttacccaattaatttgattggaaaaaaataccttttt

SEQ ID NO: 326473 - DNA, 201 bp, Zea mays
aaaaaaaaaaaaaaaaaaaaaaaaaaaataaaaaaaaaaaaaaaaaaaaaaaaaaagaaggaaaaaaaaaaaaaaaaaaaaaaataaaaaaaaaaaaaaaaaaaaaaaaaaaaaaaaaaaaaaaaaataaaaaaaaaaaaggggcgccccttttaacggccccatgtttaattcccctttcttgcccctttttattttttt

SEQ ID NO: 326474 - DNA, 141 bp, Zea mays
cccacgcgtccgcggacgcgtgggccgtcgtctctgtttgcgtttctgtcaagtgtgcatggaataatactgtaactgtgtttcctgccgggcaatgcactgtgatatgatgcccaacgaataaatgtcgcttttattttt

SEQ ID NO: 326475 - DNA, 369 bp, Zea mays
cccacgcgtccgcccacgcgtccgaaaataaaaaaaaataaaaaaaaaaaaaaaaaaaagaaagaaaaaaaaaaaaaaaaaggaaaaaaaaaaaaaaaaaaaaaaaaaaaaaataaaaaaaaaaaaaataaaaaaaaaaaaaaagggcgccctttttaaaggatccaagtttactttctcttacatccaacgttatattttttttatagtgtaacctaaattaaattttttggccacctttttaaaaattcttaattggaaaaacccttgcttttcccaacttaatacctttgaagaacatccctttttctccatttggcttattaccaaaaaggcctctacctttttcctttccaaacattttcccat

SEQ ID NO: 326476 - DNA, 335 bp, Zea mays
tcccaatcgacgactcatacaaccactcattctcccactcatcctaaataaaataaaaaaaaaaaaaaaaaataaaaaaaaagcagaatattataaaaatttagaccactaataaataataaaaacaaaaaaaacaataaaaaaaattaaaaacataataaaatttaaatccccccttttacacaatccaacttttacttcatcattcattctaattctaacattttaaatatttctacctaattaaatatatttatccatccttttccattatcttaatttaaaaaaccttttcattccccatcctaaattctcttaataacaaacctttttat

SEQ ID NO: 326477 - DNA, 394 bp, Zea mays
cggacgcgtgggctatgaacttaccgtgaccgcttgttggtaaacctctttctgtgtgttttatccaagatggtgcatctgattctattggggtaagatcccgtatttgccgttcgttcaatagactcaaatagtgcagtgtcatcagaaaaagcaaactgcacacatgaaaccttatgggtttctttggcagacatcgcctttattaatggacatctttaaattagcttgtaccgatacatgctatgtccattagagaaacgacatcctgaggcactcgccttcgctccggactgtcttagggttatcgctgatatagatatggtttacatgcttctatacccttagaactctttcgctccgaatctcgggacgagattcttttaagggggga

SEQ ID NO: 326478 - DNA, 340 bp, Zea mays
tcgcccacgcgttcgtccacgcctaattttctttaagaccacgaacgactctagtgtcgcgggattaaccgagcggcttgaagagccacgaacaaaagctgcaaaacgctttcaaaatactgaaaaggaatcttcacaagtttcaggcagaaactgcttctcccctacaatcggcctctcaacgcatacgctacatgttgtcccatgaccctccacagccagaacacttcttcgtggctctcgagagcaacgcgcctatgcaacctacataccatactatggacatgaaccagtatccagagccagcgcctggcggctgttaccctcctcctttgattgc

SEQ ID NO: 326479 - DNA, 101 bp, Zea mays
aaaaaaacaaaaaaaaaaaaaaaaaaaatttaataaaaataaataaaaaaaaaaaaaaaaggagggaaaaacaaaaaaaaaaataaaaaaaaaaaaaaaaa

SEQ ID NO: 326480 - DNA, 118 bp, Zea mays
tccacgcacgctctccttcacactacatactttttgacactccttcacttctaaatacggggcgttttccaatagggatgaaggtcccctaaagatagataactatgactttgaaaag

SEQ ID NO: 326481 - DNA, 96 bp, Zea mays
atacgacccaatcttcttactcctacatgcctttttttagctctcttatattgacacctattgtaggtctattaccagagttggcaacctcccaac

SEQ ID NO: 326482 - DNA, 439 bp, Zea mays
gacaggcgtcttcgtactcgcctatctccgcgacccaaagcgttcccccttctcccatggttctctcatttctcaccaccgccgccgctaccccctttcgacaacaccatgagggagtgcatctcgatccacatcggccaggccggtatccaggtcggaaacgcgtgctgggagctgtactgcctcgagcatggcattcaggctgatggtcagatgcccggtgacaagaccattgggggaggtgatgatgctttcaacaccttcttcagtgagactggcgctgggaagcacgtcccccgtgctgtttttgttgaccttgagcccactgtcatcgatgaggtgaggactggcacctatcgccagctcttccatcctgagcagctcatcagtggcaaggaggatgcagccaacaacttcgctcgtggtcactacaccattg

SEQ ID NO: 326483 - DNA, 217 bp, Zea mays
acaaatatcattttccaatgctaatttttttatcatgaatcttacttcttcaatcatggttgtgttatctccatggctactactctatcatttccttatcaataccattctatctatcttaaatctatttacctaaaattttcttcttaaaactcttttctttattatcctctcctaatatttcactatttcaaatacaactttacattctttctac

SEQ ID NO: 326484 - DNA, 359 bp, Zea mays
ccaagctttccattccgtcgtatcgtgtgatcccgcctccggtatgaatgattcgcgtgttttgatttcgatctgatccgtcgcactgtttgactcggccccggccgggtactgagggatccaaatccaagggaatggatcaggcggcagccatgagccccagcccacgcgccgccgccggcatccactgggaggcacacgggcggcttctcacggcgtgcctcgtcgtgctcaacgtcctcctcgtcctcctcgtctacgcctacttctggcgcttcttctcgcgctcgcgcacgcgcggcggcggcggcggcggcggcggcgaggacgacgactcggccgatggggcgtcggcgtct

SEQ ID NO: 326485 - DNA, 70 bp, Zea mays
cccacgcgtccgcccacgcgtccgcccacgcgtccgaaaaaaaaaaaaaaaaaaaaatggaagggaaaaa

SEQ ID NO: 326486 - DNA, 82 bp, Zea mays
aagaggacgcaaactacaaaaataaaaaaaacaaaaaaaaacaaatataaaaaaaaaaaaaaaaaaaaagcggggggtgtaa

SEQ ID NO: 326487 - DNA, 84 bp, Zea mays
gacccacgcgcgcccacgcgtccgcccacgcgtccgcccacgcgtccgtccacgcgtccgccgacgcgtccgcccacgcgtccg

SEQ ID NO: 326488 - DNA, 230 bp, Zea mays
cggactcgtgggcggacgcgtgggtttttttttttattttttttttattcttatttttggatgtgttttattttttatttattttttttttttcttatttttttcatcattctttttacttttcttatccccactgtccaagtccccttgtccacacctttttgagtcaggtagcccacgtaccggaaaaacctccgacggccgcctttcccgatcattctgctttcttt

SEQ ID NO: 326489 - DNA, 367 bp, Zea mays
cccacgcgtccgcccacgcgtccgaccacgcgtccgcccacgcgtccgaaaaaaaggaggaaaaaaaaaaaaaaaagaaaaaaaaaaaagggcggccgcggccggcttacccgttcccggagctcaactcggctgggcgattggaggtccacaccctgttcaatcctacaccagagcagttcctcaaggcgcaacgggtggtgcaacctaacttcttgtacatccagggccagcagctctaggattagaaggaaattggctcacttgtatggggggaccccgatgtctctgatccgcaagcatttaacactcttatcagcccaccattcccaacaatagtatatttggaagttcccattggtgaaaa

SEQ ID NO: 326490 - DNA, 330 bp, Zea mays
acgcatgcgtaaactcacacgccctggcgaggatcctgtttccaatcccctcattccaaattgaccacgaagacccttaattccggatccggggggaaaaccccggtttttttcccgaacttaacttcttcacatcccttgaatatgcttccgttcccgggccccaccgtctattcaaggcttcattccgtctcaacttggaaacaatgtgctcgctaagtctccttgccagtttccggccatacattgcccaaaaacaagcactggctcaatgctgtccattatgttggtcatgcagagcccaattgggaaagaacccaagataacatc

SEQ ID NO: 326491 - DNA, 83 bp, Zea mays
gccacgcgttcgaccacgcgtgcgcccacgcgttcggccacgcgtgcgaaaaaaaaaaaagcgggagaacaaaaaaagaataa

SEQ ID NO: 326492 - DNA, 163 bp, Zea mays
acgcggacgcgtccgtccacgcgtccgcccacgcgtccgcccacgcgtccgctggccctaagattgtgtcttgaaacaagtttaaaattaagattactcgtggcaaaaaaaaaaaaaaaaaaaaaaaaaaacataaaaaaaaaaaaaaaaaacaataaacaaa

SEQ ID NO: 326493 - DNA, 402 bp, Zea mays
  unsure (1)..(402): unsure at all n locations
tcgcccacgcgtgcggcacatgacagtgatcaggaggaagcagaactaggttcagacatcagagggatacaaaaaaatgcggtggatggttaaagtcatggagagagcacaacagaagacagctgccttctgaagcacaagatagatgaagaatccaagggtgatgaacaacaagaattaggtgttacagtggatgatgacttggtgcatgaagacacgcttgaaactgacaatgctatcgagcatacagatgatggtcaacacgaccaggatcaaagaaccctgaaaggcaaacgaggacacaaaacctgcaagcatcgcanacaatgacgatgttgagattgtaactgagacacctactggactccaagctcctgtggagtcacgtatgactgattctga

SEQ ID NO: 326494 - DNA, 337 bp, Zea mays
cccacgcgtccggatacactgagagatattttagccgtagcccgtagccgttcattgtaggactataggtggctggctgtctcgagtattggtaaagactgttcggagtgcgtcgttcgttctcgtccagaacagctgggttctgggcatccggggaagaaacggaggcgttgacgcgtgtgtgtaggttcagaagaaaccccaataagataattgcgttgttatatgatgccgctcgcattattaggacgaaaaaacaaaagaagaatgagaactcggatacataggtgcacacacgacctaattgctagaataaagctcccacagaccgcttatg

SEQ ID NO: 326495 - DNA, 304 bp, Zea mays
acaacgcgtacggatacatctgagagaaaatataaacaaaaacaataaaacgaacataggggggctatatgtggctgacctcgactttagtatcgctaaagactgatccgattgctttgttctttctcgtccaaaacataatgtatttgcccattctttacagaaacggaactggaaacacccttgtgttgcctaacataataccctagtaagataattgcgttgctatatgatgcctattgcattattaggacgaaccgattggtctttctaacattttcgcagcctgaatggataaaggaac

SEQ ID NO: 326496 - DNA, 338 bp, Zea mays
cctgcgcgtacgcacacgcttgcgtcaaagatactgccttgcttgagcaggtccgaactaaggctaacagcccaactgcgactggttgatgatggcacacgtagccaggtcgagggaccctgctactttgatacccggatctatggtaaggctaagccgaccactaaactaggactcccagaaggtgctcctgaatcagataacaggctggcgcctgctctgattgtcagatccggtgcataatgaccacttgacgaatggcactgccgatgaggcagcgacccagaatgctgctatcggtgatatcatctatctatggcaggatctgcatcttccac

SEQ ID NO: 326497 - DNA, 372 bp, Zea mays
ctcctccccctacggttcgggttcgggttcgtgaggttctccggagttcggtttcgtgggtgagcggatcgagatggcggcgtcagatgttgagtaccgatgcttcgtcggcggcctctcctgggccacggacgaccactccctccacaacgccttcagcacctacggcgaggtcctcgagtccaagatcatcctcgatcgggagacgcagaggtcccgcggcttcggcttcgtcaccttctgcacggaggaggcgatgcggaacgccatcgagggcatgaacggcaaggagctggacggtcggaacatcaccggtaacgaagcccagtcccgcggctgccgtcgaggctgcagcggcagcgggtacagtgg

SEQ ID NO: 326498 - DNA, 357 bp, Zea mays
tcgcccacgcgtccgattgaatggtacttatttaaaaaaaaataaaaaaaaaaaaaaaaaaaagaaaaaaaataaaaaaaaaaaaaaaaagataaaaaaataaaaataaaaaaaataaaaaaataaaaataaaaaaaaaaaaaggccgttcattcaaaaagagtggagctcctttaagataggttatcaatggcaaaaccatttcctatccgaagacaattaaattccatggctaaggtttttaaaccgcttgcatgttaaaaactatgccttacgcaatcgaattgatttacagaaattaaccctttatggcgaatgtgactttccacaaagcccagtattaatcacgtttcccaa

SEQ ID NO: 326499 - DNA, 298 bp, Zea mays
cccacgcgtccgcccacgcgttcgtacgcttgtgcttccctactacgtcccctgggctaggtgtgctgccatccggctccgggagacgaacgtggacagaataacgcagacctctatggtaccggactgtattatgccgtcccaggcgattaatttactagtgtgttcgaatctatatgttataacagcacctacgtgtattaagacggtatgtaaagctgttgcatctatattaggtgtgaaaccatcattaacgtcatcaactatgccatatataaaaagcatggcggccggttta

SEQ ID NO: 326500 - DNA, 143 bp, Zea mays
cccacgcgtccgaaaaaaaaaaaaaaaaaataaaaaacaaacaaactaaaaaataacaaacgggagtacacaatcatacggatacaaaaactaaaaaataatgaaacctaaacggccatcctctttactgcgtcccacttttc

SEQ ID NO: 326501 - DNA, 348 bp, Zea mays
ggtgggttggcttctcctcccccttcggttcgggttcgggttcgtgaggttctccggggttcggtttcgtgggtgagcggatcgagatggcggcgtcggatgttgagtaccgctgcttcgtcggcggcctcgcctgggccacggacgaccactccctccacaacgccttcagcacctacggcgaggtcctcgagtccaagatcatcctcgatcgggagacgcagaggtcccgcggcttcggcttcgtcaccttcttcacggaggaggcgatgcggaacgccatcgagggcatgaacggcaaggagctggacggccgcaacatcaccgtcaacgaggcccagtcccgcg

SEQ ID NO: 326502 - DNA, 115 bp, Zea mays
ccgggcatgatctgatctgatctgagctcgtctttggatatggattactaggacactgacgtggagtgcttctagatgcccgggtagaaagcgaagaatcccttcaccattacca

SEQ ID NO: 326503 - DNA, 399 bp, Zea mays
aaaaaaaaaaaaaaaaaaaaaaaaaaaaaaattaaaataaaaaaaaaaaaaaaaaaaaaaagggaaaaaaaaaaaaaaaaaaaaaaaaaaaaaaaaaaaaaaaaaaaaaaaaaaaaaaaaaaaaaaaaaaaaaaaaaaaaaaaaaaaaggggggccccttttaaaggtccaaattttacttccccttccttgcaaattcttatttttttttttgggcccccaaatttaattcacttggccgttttttaaaaacaccgaacttggaaaaaccctggttttcccaattttattccctttgaaaaaaatcccctttttcccatttggcttattaccaaaaaggcccaccccaatcgcctttccaaaaatttgcaaccccttattggcaattggtacccccct

SEQ ID NO: 326504 - DNA, 211 bp, Zea mays
aaaaaaaaaaaaaaaaaaaaaaataaaaaattaaatataaataaaaaaaaaaaaaaaaaaaggaaagactaaaataataaaaattaaaaatcaataatataaataaatatataaattaatttaaaaattaaaaaaatttaaaaatattcttattaaacaattaaaaaaaactttatcttttttaaattatccaatttttttttctttttat

SEQ ID NO: 326505 - DNA, 131 bp, Zea mays
ccacgcgtccggtcacttgctctacctgctacacgctaattaacgccggtccatccctagtctaggtcgattcattatccatggctgaatagaatctccaccaccacctcttgttccaccacaacatggac

SEQ ID NO: 326506 - DNA, 401 bp, Zea mays
  unsure (1)..(401): unsure at all n locations
acgtttatgtttcgtcctgcggcctagcttgaagtcaattttcattggatccgtgatctcgtttccaaaaaaaaaagtttgaaactggatctgagttgaagatcttggtccgtagttaccccagtaccccacctttacttagatctgagcatgtaaggtactctttttgtttccttctgcaattttatgctatgtcatttagttgtttttagtttgattgagaagcacgtgaagagtaatttcggtaaatagagaggatcggtgcttcaaaatggagtatgagtttattatgaccttttgagattccaaatactgtcgactntatgataaaatacttgaaagttgaaactgtcctttctggtaagtccgtaactctttcgaagttctgaagttgcatttgc

SEQ ID NO: 326507 - DNA, 216 bp, Zea mays
cccgcgcgtccgcccacgcgtccgctgactcttgggaacgatccctccttccaagaacaggttctgttttagggtcgaacaggatcatgttctgaggccccgtccaactaatggtttcatgagtccaatcatggttagagctgttggcgacattgatatgggtagaaaaccagtggcttgtgattagcctatgatggcggctgaaattggtgattt

SEQ ID NO: 326508 - DNA, 439 bp, Zea mays
cccacgcgtccggtcacttgctctccctccaacaagctaattaaggccggtccatccctcgtctagctcgtttcattatccatggctgaggagaagcaccaccaccaccacctgttccaccacaagaaggacgaggagcaggccgcggccggcgggtacggcgagtccgccgagtacacggaggccacggtgacggaggtcgtgtccacgggcgagaacgagtacgacgagtacaagaaggaggagaagcagcacaagcacaagcagcacctcggcgaggccggcgccatcgccgccggcgccttcgcactctacgagaagcacgaggcgaagaaggacccggagcacgcgcaccgtcacaagatcgaggaggaagtcgcggcggcggcggccgtcggctccggcggcttcgccttccacgagcaccacgagaagaaga

SEQ ID NO: 326509 - DNA, 72 bp, Zea mays
aaaaaaaaaaaaaaaaaaaaaaaaaaaaaaataaaaaaaaaaaaaaaaaaaaaaaaaggcgggcgatataaa

SEQ ID NO: 326510 - DNA, 56 bp, Zea mays
ctgagctccaaagaatctagcagctaggagcaggccgtgtatacgccatccaccac

SEQ ID NO: 326511 - DNA, 55 bp, Zea mays
gaaaccaagagaaaggagaccggtctatcttaaaagtgagcttcggcttacaagg

SEQ ID NO: 326512 - DNA, 106 bp, Zea mays
aatcccggtcgaccacgcgtccgaaaaaaaaaaaaaaaaaaaaaaaaaaaaaataaaaataaaaaaaaaaaacaaaaaaaaaaaaaaaggggacaaccgatctaaa

SEQ ID NO: 326513 - DNA, 409 bp, Zea mays
  unsure (1)..(409): unsure at all n locations
cgggattggaaacgtgtaaccacctccagcctaaacacagtcaccaccacctacacccccggtgtctcctctccttccattgccacagtcggccttctccgtggaagccggcgggccgccgcctcctttgtccctgtcgtcgtgctcttccgtaccgccattccctagcactgtccacgggcgagatctcgcgtgtacggtgtacctcgtttccctcggcgggtggatcagtgacggcttggtcgagatggacgatgtggttgatgacatcatctgtggaacggatgcggcggttgccgtcgaggatggggccagtgggacgcccgcaatgcctagcttatggtgccagggtgaggaagagcataggaagggcaatgaggacaactcangtgagagcgaggtgattaac

SEQ ID NO: 326514 - DNA, 232 bp, Zea mays
acccttcttccgcgaccccagcatcccgctcacttactacaacatgctgtactcctatatcgacccgccattcgctatcactatcgacatgcgacacacggactttaccgtgcacgatctcttacaccggatggccgatcagtgactactaggacgagaccgacgacacggttcataacatcatctgttacaacgataacctcattcacagggtcgacatgagccagtggga

SEQ ID NO: 326515 - DNA, 223 bp, Zea mays
ggctggagaagtggccatctatgtatcctgtagagcaatgcacaacctatacaatacggcgacgacattcatatgctcatgcagtactgatattataatataaccatatacatatccaaaagtcataccatcaagctacatgaacggcgaataatataacaaaacacttgggaataaggtaattgagctatatcatatgtagagctatagctggcttgatgaa

SEQ ID NO: 326516 - DNA, 85 bp, Zea mays
tcttcctaaaaaaaataaaaaataaaacaaattttataaaaaaaaaaaaacaacaaaaaaaaaaaaaagaaatatataaacaacc

SEQ ID NO: 326517 - DNA, 329 bp, Zea mays
taaaaaaaaaaaaaaaaaaaaaaaaattttaaaaaaaaaaaaaaaaaaaaaaaaacaagcagtgattaataaaaaaggccggagtgctctttcattccactctttcgtactcttacattcaaccttatatttatttcatagcccaacctaattcaaattcactacccgtataaaccacaacttttcaacacttaaaacccttactttacataacttattcaccttgtaacacattcccctttcgcccttttacttattaccttccaggcccttacccatcgccatttccaacattatctcaccctttattgtcaacattaacccccctt

SEQ ID NO: 326518 - DNA, 280 bp, Zea mays
cccactcgtccgattacccttcacctgactcttctctaaataaaaacacactcaaagtgggtcaatataaatatgctaatgcaacaaaaaaaaaatcaaacactccaaaatatttcaatattcctgatcttcatattgttaatctagtctcatactacactcttaaatttacttacaatccttataagattaacttctctacaatttcttgctttgaaaaccacatcattattcaaaattacaccaatctttactcattcaaatttccaaccctgcttta

SEQ ID NO: 326519 - DNA, 271 bp, Zea mays
cggacgcgtgggaaaaaaaaaaaaaaaattaaaaaaaaaaaaaaaaaaaaaaaaaaagagaggtgtaaagctccatactagaataccgcgttacattctacgtgcttgctacttttatagcgcttccatacttcaatctaattgcactttagtgtcacctattttaaatggaataaccttggaattacacaacttaaccgcggttaaacccatttgcaacacatccaaattgcgtcatatcgcataggcctttagagatctggcttaataa

SEQ ID NO: 326520 - DNA, 103 bp, Zea mays
aaaaaaaaaaaaaaaaaaaaaaaaaaaattaaaaaaaaaaaaaaaaaaaaaaaaaaaaaaagaaaaaaaaaaaaaaaaaaaaaaaaaaaaaaaaaaaaaaaag

SEQ ID NO: 326521 - DNA, 160 bp, Zea mays
cccactcgtccgataatacaaagatttctcttctctcgtaaactaagctagctacgggggtccatcataaacgagcaatgtctattgataccgaaatatctcatgttaatcacaattacccatattgtacctcatctagaatactaatatctacactctt

SEQ ID NO: 326522 - DNA, 54 bp, Zea mays
cagactcctgggaaaaaaacaaactttctttcaaatctaaaatcacaaacaaac

SEQ ID NO: 326523 - DNA, 284 bp, Zea mays
cggactcgtggtctgacgcgtgggcggactcgtgggaaaaaaaaaaaaaaaaacatggagtgaaaaaaaaaaaaaaaaaataatacaacaaccattctaaaaatacccttctttcgtactcaaatctacaacatcttaaattttcctattgaacctcctatctttaatatcccgacctacgttctacaacatcttaactacaacttccctttccttcccccacatattcttctttcagttcatcctttttacgaacactgtattaaatacctataattccccaa

SEQ ID NO: 326524 - DNA, 433 bp, Zea mays
gtcttacgcctccaaaaccctagcccgtgctcggccggcgacgaggatgcctggtatgccgacggacggtggcggcgcaatggtaccttttacaggggagcctggccaaggggcgcccccgccggcacccgtgcggccaatccgccacggcgtggcgccgcccatcttccgcatctacgtctcctggtccagcggcaaccttctgcaggtcgcgtgcctccgcccgccgaattcggacggtggcggcggcacggaggaggtcgttgggagtgtggtggaggtgaatctcggcgacggtggcagcggtggctcggaggccgaggagaaaattgacgaggcggagatgcggaagatcgagtacgggtcagtgccggccttcgcgctgctgcagagcaggaagaacaccctcgcagatgttgctactatgtcgcac

SEQ ID NO: 326525 - DNA, 369 bp, Zea mays
aaacaattccagttccattacaatcccgttccacgcgatgccaaaacaacgtttgcgggaggcttgacagcggacatgggagacctcgccgcctcgctcacgccttacccgcacagcgcgccgctctacctgctctacgacgccaccagtatcgccaacgccagccgcggcctagcgccgccgccgtcgctcctgggcgactacggctgcggcttcgagttcgccactactccgacgcttattaacggctgcggcacggcgctgcgcgcgtgcgccagcgacgtgtctgcggcggtcttcgcgggcgagctgttcccgctgagcctgccgccgctgctgcatcggctgcccgttcgctcggctggagcc

SEQ ID NO: 326526 - DNA, 439 bp, Zea mays
  unsure (1)..(439): unsure at all n locations
aagtttaatgacctacgtcagtttctgcgtactaaaaactattcgctagttgagtcgttgcggcatattcaaaattattagctacagttgttcctgcatgcgccagattctcatgtgagatgataaaaacgtcataattatttgctaagtttaatgacctacgtcagtttctgcgtactaaaaactattcgctagttgagtcgttccggcatattcaaaattattagctacagttgttcctgcatgcgtctaatgtccttcggtgaacttgtctgtcattatcatttaaaaacgtatctagatgcattatggaagatttttagtttcctttgttatatttgagaagttatatattgtatataccgagagatgcacctgtgtattatttgttgtagcttcgaatgcgagacgtatggttgcagtcattntattgtagtta

SEQ ID NO: 326527 - DNA, 166 bp, Zea mays
cccactcgtccgaaaaaaaaaaaaatatttaaaaaaaaaaaaaaaaaataaaaacaggagggacaaatccataaaaatataaatacacactaatatacaaaaaaactaatctaccatactctatattgcctattcttaacttgtcttggctcaccacagtcttctt

SEQ ID NO: 326528 - DNA, 308 bp, Zea mays
ccacgcgttcgcccacgcgttcgccgactccttcgaatcggagcccgtgtccgtcgccggcggcttcgccattcgcctccggtgcccacgagctacgcttcctcctcttcgtacgctccgtctcatgacgtgaaagagtataaactgtcatgactgacaggcttctcacgaatctaatcttcatgtgctgaaccgtcgatcgcacggccatgctgcaagcctacccccatgccatcatcaatgcatacaaaactggaactgcccaagaagctataacatggtattagactgactaacaatgccatgac

SEQ ID NO: 326529 - DNA, 186 bp, Zea mays
tcgttcacacatccatctcaatcagcacaagaaggttactcttcaagatacacacttgcatcacccgtggtatgtcattacctttagggtctacctattcccacttatcataagcataaccctcagacttatcatctacacccacacccacacacgatctacaaacacataccgtcaatactgacc

SEQ ID NO: 326530 - DNA, 349 bp, Zea mays
acgcggactcgtgggcggactcgtgggcggactcttgggaaaaaaaaaaaaaaaaaaaaaaaagggaaaataaaaaaaaaaaaaaaaaaaaaaaataaaaaaaaaaaaaataaaaaaaaaataaataaaaaaaaataaaatattaaataaaataaaataaatttattttaataagttcaatttttacaacaatctttaatgaaaaaactttatcattaacctaatttaatataatttaaattaaattcccctttttcaaaattgattaatatggaaaaatcctgttataacctacttttataaaatttgcgtaaacttaattttaaaatattatactctttttaaaaat

SEQ ID NO: 326531 - DNA, 220 bp, Zea mays
gccgcgcatgcctttagcgacggctctgtcgttggctggctccaagctactcgccggggctagtcgcgtcatcgcgcaacacggcgcgtagagcatcatcacccggcccatgttccagaacatgctgaaccacaatgtctacagccggtgccagggcgccttctacacctacttcgactccatcgaagcctccatcaagttcctcagcttcagcaccacc

SEQ ID NO: 326532 - DNA, 216 bp, Zea mays
cacgcgtctcggaaaaattattttattaaaaaaaatttaaaaaaaaaaaaaaaaaaagggcgggcgcgtcttttagaaacagggttgggggcccctccattcaacggggtagcctttttatagggtccacttaaatgaactcatttgtccgacgtttaaaacgtatattactgggaaaaaccttgatttaactgacttaatttttttaacgtccaa

SEQ ID NO: 326533 - DNA, 299 bp, Zea mays
  unsure (1)..(299): unsure at all n locations
gggcaccctatggtacatgattcgcgttgtcaagaacacncacttcatcgggcaccgttacattacacgcggcataccctcnctccaanccncattaatagtctccatatcaaccaaccaattcgaccccatgttacacacttctgcacaaaaaacaatacaacatctcctactagagctcccttccctacacgcaaatactaaggctacattaaaacccttctgaccttcactatattgcctcaactatgatcgacaccatcgcctgcgtcattcacaacatacattctccctgggtg

SEQ ID NO: 326534 - DNA, 70 bp, Zea mays
aaaaaaacaaaaaaaacaaaaaaggggaaatggttgaaaaaaataaaaggaaaaaaacacgggcgcccct

SEQ ID NO: 326535 - DNA, 179 bp, Zea mays
ccacgcgtccttccactcgtccgcccacgcttccgttttaaaaaaaaaaaaaaaaaaaaaaagaaaatgtttaatttattaaataacaaaacacaaatacacaaactcctaaaacccacaccactctaatatttccatcctcccgcatcccacataacaaccccattttttttcctttt

SEQ ID NO: 326536 - DNA, 119 bp, Zea mays
  unsure (1)..(119): unsure at all n locations
acgctcactctttattgcactcgtgcgctttatatataangacaaggggctagttatttgtcatgagtagttgctaggtgttgtagacccatacatctatagactggtgagtaagggac

SEQ ID NO: 326537 - DNA, 171 bp, Zea mays
ttttatattggagtggccagctcaccagacagtttgaatccctggcactcttctacttgagctgcttgattggagagatgtacattgccacacaggaaaaactggcatttctgtaagcccagttaatttttgctcggccaaaaaaaattaatgcgatgtttggtttctatg

SEQ ID NO: 326538 - DNA, 362 bp, Zea mays
  unsure (1)..(362): unsure at all n locations
ccgcccttttttttttttttttttttttttntttttnnnttttttttttggcagggggaagggtcatcttcttaccttgaaactgaggtacttcatttctattagataattgctgctaaaatatggttacattattaacgtctggctgtttcgtcacgcagctaccaacatatctatatcttctccgtgatctgcataacaaattagataatttgaatccttcaatcaagccttttcttagtacttctaaagcaaaatatactcctactcattgccataagagtacacaagattttcttgacaaaatccagccactattcttagttttaaggaagcatctggatggagcagtttcaatgatc

SEQ ID NO: 326539 - DNA, 128 bp, Zea mays
gatacccgctcgcccacctcgtaaaaaaaacaaaacattcaatttaaaaaaaaaaaaaaaaaacgggaaaagtaaatttaaaaagggcgagccaaaccaacctaaactcaacaacccccccaacaaaa

SEQ ID NO: 326540 - DNA, 196 bp, Zea mays
  unsure (1)..(196): unsure at all n locations
ttgttcgcttttccaatatagggttcgttnggtgctcaaaaaaaaaaagagaattgttaaatttaaaaaaaaagggcgcccactctaaaaaatccaaacaaaacttacccctccttaccacgtcataactcttctataatgtcccctcccttcacttcacttcccgccgttttactacatcgtaactcctaaaacc

SEQ ID NO: 326541 - DNA, 53 bp, Zea mays
ctaagatgaaccatgtttgtgcaatagtggtgtgtttttgtttcctgctggtt

SEQ ID NO: 326542 - DNA, 277 bp, Zea mays
cccactcgtccgcccacgcgtccgattaaaaatataaaaaaaaaaaaaaaaaaaacggaaaatgtaaaattttagaaaaaaaaaaaaccacaaacaaaaaaaaaaagggcgccccttttaaaaaatccgggcttactttcccattccttcaacatcataccttttttataggtcccctaaatttaattcactcccctaaattttacaacctccctactttaaaacccctttctttccccaacttaattccctttccccacattcccctttttccaac

SEQ ID NO: 326543 - DNA, 308 bp, Zea mays
cgtactcttgggtcgaaattaaaatttataaaaaaaaaaaaaaaaaaaaagcaaatgttaaatttaaaaaaaaccaaacccaaacacaaaaaaaaaaaaaaaaaaaaaaaaacgccccctccccctaacaaaaaccagccttcccccctctaacattcctcaactttaccctcccttcataccaaccctaaattcattcttttgcccccccttatacaaattcttttccctatattccccatcttctccccttttaaaccctttgctacccctaccttttttcccctcctccctttaccccatttacc

SEQ ID NO: 326544 - DNA, 201 bp, Zea mays
  unsure (1)..(201): unsure at all n locations
cggactcctgggtactaccataactttaatgggaggttcagtcgcgtgaacaatggcgccaatcaagctgtggccgcgtaaaggcatcaaggcggtangcttacatcaaactaggaaaccataagctacattcaaatgaacttaatgccaggattattcttaataagaacattgctttcaaacaacttgggtatttttttt

SEQ ID NO: 326545 - DNA, 132 bp, Zea mays
gtccgaccacgcgtccgcccacgcgtccgcccacgcgttcgcccacgcgtccgaaaaaaaggggactggttaatttaaagaagggagagcgcaacaccctccgctttaaaggatccgacgctccttacacag

SEQ ID NO: 326546 - DNA, 312 bp, Zea mays
acgaccacgcgtccgaaaaaaacgtaatcaacacaaacaaattaaaaatcaaaaaaaaaaacacaaacaaagggcattggtcaaaattaaaaaacagagccacacaccccaccatacaaaaacataacacccaaatcaacccacctaaacccaacccactagccaaaaattaaacaacgttcatacttggcaacccctttaaaaaaaccaaattacattacacccaacacaaccccacttcctcccctaaactcccactcaaacaaacaccccccggtcgccctataaaaaaattcctcaatcaaaaacccc

SEQ ID NO: 326547 - DNA, 154 bp, Zea mays
cccacgcgtccgcccacgcgtacgcttacgcgtccgcccacgcgtccggcgacgcggtcgcctacgcgtgcgagaaaaaaaaaaaaaaaaaaaaaaaaaaaaaaaaaaaaaaaaaaaaaaaggggggtcgatttaaaagaaaaaaaataaaagg

SEQ ID NO: 326548 - DNA, 84 bp, Zea mays
cggactcgtgggaaaaaaatttaaaaaaaaaaaaaaaaaaaaaaaaaaaaggaaaaaggtaaaattaaaaaggggggccgattt

SEQ ID NO: 326549 - DNA, 85 bp, Zea mays
cccacgcgtccgcccacgcgtccgcttacgcgtccgcccacgcgtccgccgacgcgtgcgcggacgcgtgggttctagatcgcga

SEQ ID NO: 326550 - DNA, 118 bp, Zea mays
cggacgcgtgggcggacgcgtgggctgacgcgtgggcggacgcgtgggagaaaaagtgaaatttaaaaaaggaaaaaaaaaaaaaaaaaaaaaaaagataaaactaaaaaaaggggcg

SEQ ID NO: 326551 - DNA, 149 bp, Zea mays
acgacccacgcgtccgaccacgcgtgcgcaaaaaacaaaacttctactttcaaccttagcaaataaaaattgggctgtgtttattaagaaaccagagccgacccacacatccattcaaccacatacctacactatacccacaccaaaca

SEQ ID NO: 326552 - DNA, 190 bp, Zea mays
aaaaaaaaaacattttttattttacaaaaaaaaaaacacaaaaagggaaaggttaaaattaaaaaatggacaatccaaaactacgcacctcacactggctacccctcttatagatccacgtttattacacttctatccattattaaactcttttataatttatccaaacttcaattcattgacctaactt

SEQ ID NO: 326553 - DNA, 346 bp, Zea mays
cccacgcgtccgcccacgcgtccggttggcttctcctccccctccggttcgggttcgggttcgtgaggttctccggggttcggtttcgtgggtgagcggatcgagatggcggcgtcggatgttgagtaccgctgcttcgtcggcggcctctcctgggccacggacgaccactttcttcacaacgccttcagcacctacggcgaggtccttgatttcaagatcattctttatcgttagacgcataggtcccgcggcttcggcttcttcaccttctgcacggaggtagcgatgcggaacgccatcgaaggcatgaacggcaaggagctggactgtctgaacatcaccg

SEQ ID NO: 326554 - DNA, 120 bp, Zea mays
aatatattataaaaaaaaaaaaaaattaataaaaaaaaaaaaaaaaaaaaaaaaaagggaggaaaaaaaaaaaaaaaaaaaaagataaaaaaaaaaaaaaaaaaataaaaaaggataagc

SEQ ID NO: 326555 - DNA, 61 bp, Zea mays
aaaaaaaaaaaaaaaaaaaaaaaaaaaaaaaagggaaaaaggaaaaaaaaaagatagaaaa

SEQ ID NO: 326556 - DNA, 54 bp, Zea mays
aaaaaaaaataaaataataaaaaaaaaaaaaataaaaaaaaaaaaaaaaaaaac

SEQ ID NO: 326557 - DNA, 209 bp, Zea mays
aaaaaaaaaaataaaaaaaaaaataaatttaaaaaaaaaaaaaaaaaaaaaaaaaaaaagggaggataaaaaaaaaaaaaaaaaaggtctaccaatttaacaattcacaactttcttccgctttcattcaacataatatccttttttatagccgtaattattttaaattcattttccttaatttatcaacttcatcattttaaaaaccc

SEQ ID NO: 326558 - DNA, 323 bp, Zea mays
tcgaagaacttgagatagtactacgctttctttactatcagtgagtatcatgtttaaaagagaagttgtttatttgtatctcatcttctgagtcattcgtcgctgcaatcctcaacgacaacctcattccacttgcttcattgtcctgcatcatactttgttacagttctcttgtaataattggcttctgcttcatatgcagctagtaataatattttattctcttgtcatatccttatgaaactttattcttgtaataagtcggctttacctcttcggagtttcttatacataaactcattctatttctcttgagcacttaa

SEQ ID NO: 326559 - DNA, 151 bp, Zea mays
gagcagagagagactttctcgcctacatcccatcccgccgccgccgtctctacggtcgctaatgagccggggcatccagggatggagatgaagaagatcgcctgcgccgttcttgtctccgcctcggccacctgggcgctggccgcggagg

SEQ ID NO: 326560 - DNA, 328 bp, Zea mays
gtcaactggtgtgggcagaacttggtaagcaagcaggagcggccatgcctgacggagtgacggtggaaggcggaggcgcgcctttcgcatcgcaccctctgagctctgaccctgctccgcgaagtttttttttttccttcttttttgacaaaagcagccgcttcatcaagcatctagacggccggttcggtgcgggtcgcggaagtacagcccaggtggcctgccggcctgttgtttggtcaagctgagtgggcgcgcgcgtagccatgcctcactcaactgctgacctgtaacatcgaaatggtctgctctgcgtctcgtggtccgc

SEQ ID NO: 326561 - DNA, 187 bp, Zea mays
cccacgcgtccgcccacgcgtccgaaaaaaataaaaaaaaaaaaaaaaaaaaaaaaagaaaaagagaaaaaatataaaaaaaaaaaaacagaccaaccaatctataacaatctcatcttcccatacgcttgcatcctacatcctatccattctatcgtcccccttaatttcacttcactgcccttta

SEQ ID NO: 326562 - DNA, 110 bp, Zea mays
attgtcggactccactgggctcgacctgtgcttcgcgctgccggccccgacgtctgctcctggggccatggtgcctatcatgacgctccacttcgacagcgccaacatgg

SEQ ID NO: 326563 - DNA, 206 bp, Zea mays
cttctggctaaaggagcagccgtctcttgttggaaggtcacatcatgtgtctcttaagacgcggtacaaagatcagtaccacgagccgtctaccaaaaggaggaagctcccattcaaaaagtgcatctgcacaccaacaatgcttgatctatttacttcgcatcatgactccctgcattttagctaccgacaaccctattggccta

SEQ ID NO: 326564 - DNA, 204 bp, Zea mays
tcgggagaaccgagagcagagagacatggctccctaccaccagcagcgggcgctgctcctggtccactcgtcttcctcctcctgcttcttgccccgtcccttgccggctcgtggggaaaggagggccacatcatggtctgcaagatcgcctagatagtcctgtcggataaggcagttgctgctgtgaaggcgtttctgccggag

SEQ ID NO: 326565 - DNA, 233 bp, Zea mays
cggtcctgaattcgccggagtcgactccacgtcgtctcgctccactgcgtcacgctccacgcctgtccgcaagggtgcctgaagcagtgtgcacctcggacatctggcatctgggtgcaaggtccatgtccatctatgaactctcttcatcaaccgacatcgttctgagaagtctcgccgtgcgaggtcggccatagctcgctccgcttacaacatagatagcccactcatca

SEQ ID NO: 326566 - DNA, 230 bp, Zea mays
gcagcgagtacatacatactaggcagccaggcagccatggcgcccaccgtgatgatggcctcgtcggccaccgccgtcgctccgttccaggggctcaagtccaccgccagcctccccgtcgcccgccgctcctccagaagcctcggcaacgtcagcaacggcggaaggatccggtgcatgcaggtgtggccggcctacggcaacaagaagttcgagacgctgtcgtacct

SEQ ID NO: 326567 - DNA, 71 bp, Zea mays
  unsure (1)..(71): unsure at all n locations
tcgaaaaaaaagaaaattaaaaaaaaaaatattaaanaaaaaaaaaaaaaaaaaaaaaaaaaagagggaat

SEQ ID NO: 326568 - DNA, 77 bp, Zea mays
gcgccacttgccagctagagccatccttaatatcttgcagttactgagagtgtgcgtgggagagaggatgggtggca

SEQ ID NO: 326569 - DNA, 208 bp, Zea mays
tcgcggacgcgttggcggacgcgtgggcggacgcgtggacttcggtccatgctgatcggccaagggtccgagatccgcctgcgtcaggtaacggtcctatcttgatctcgtagtggcacctgcgcctggatgtagggattcggtggaggatggcgtgaaggctgtggggctgatctacgcctttgtcgcgcgcggcatcgcggtgctg

SEQ ID NO: 326570 - DNA, 219 bp, Zea mays
  unsure (1)..(219): unsure at all n locations
cccggtcgcccacgcgtcgcacgcgctcgcccgcgtncgccagcttccggtcctgccaaaacccttcggcagcggcgccggccgacgacgcggcggacccctctcggatctcttccctcctacgcctcatcccctctgcatctttatctgagagaagcggaggtggggaagaattgggcgccttctcacccggaggcggcagcggcaagggtgggggtg

SEQ ID NO: 326571 - DNA, 112 bp, Zea mays
tgaaaaaaaaaaaaaaatataataaaaaaaataaaaaataaaaaaaaaaaaaaaaaaataaaaagagaaaagggaaaaattaatgaaataataaaaaaaaaaaagggcggcc

SEQ ID NO: 326572 - DNA, 295 bp, Zea mays
cacgcgtccgcccacgctgccgcccacgcttccggtcctccgcaaaaccctcctccatgcggggcctgccgccgccgcggcggtcccctctcggatctcttccctcctccgcctcatcccctctgcatctttttctgaggtaagcggaggtggggaagaattgggcgccttctcaccctgaggctgcggcggcaggggtgggggtggagaaccaatgtatctttgactgtgattccggcctcaccaatgaccatttcgacggatcctcgccctccgtctatgcgtctgtcccttc

SEQ ID NO: 326573 - DNA, 72 bp, Zea mays
aaaaaaaaaaaaacaaaaaaaaaaataaaataaataaaaaaaaaaaaaaaaaaaaaagaaagggggcctaaa

SEQ ID NO: 326574 - DNA, 375 bp, Zea mays
cggacacgtgggaccaggctgacctcgcgcagatcacgaaccactgcctcaacaagggcgtgaccctgaaccacagccactgacatatgaatcaccagaaactgaaccgaattcgctgtatctgaactaaccaggctctattgcaactgcaatagaataccagaatgctttggcactagctattgaatcgattgattatgctccgaaagctgctaccacttttggaaatggactcactgcctgccaactggcccttgtgacagcaccaacctcacatgagaccgccgttgccccaagcacgatactggccttaactctgcacttgctgactcttgacagcctgcactactaggctaaccgtacagcgagccagcc

SEQ ID NO: 326575 - DNA, 430 bp, Zea mays
  unsure (1)..(430): unsure at all n locations
gccaggaacaccttgccggcctgggtgctgaggaacacgcgggcggacccgtccgggtgcgccggcatgttgaggtaggagccgttgccgacgcgctccaggaacatgctgcggagcggcagcgccgccgggcgggtggagttgaacgccgcgccgccgccgtccaggcacggcgacctgccggcgccgcccagcgagccgcagaactcgcccgcggactgccacagggtaacggatgtagagacgacgtgagtatcactggtttaatcatagacgttaccttgtaatggcgtgatcatgttcattttggagtgtgggtagtcccctagttttttataacagcgaatctctcgtctacgcctccaaatcgtcgaagccgcacctaatgacctncataatggcaaatttctctctatcagtggagcaacca

SEQ ID NO: 326576 - DNA, 143 bp, Zea mays
tctaccatgcttacctctctcttatccagaaccacatccacaacaagggcgggtcccttaaccccaactgggggcatattaatcaccagaaactgaaacgaattcaatctatctcaacgaacctaactctattacaacttcaa

SEQ ID NO: 326577 - DNA, 391 bp, Zea mays
cggacgcgtggtactaaaccaatgcgatctctacccattgctgtgaatgtcaaaggcaaggactaaaatcaatcacgggtaaacaatacaatagatactataactatatataaagaaacactaatcctgagggtctaattatttacagcacctgattttatttacgagattttcactgaccctatttactatatagctacacctaagttcaatgtaacggccttggtttaatcagctcggaatgaagaaactcttgagcttgcctatattactactttgtgaaatgactccctttgtgtaggttgacttataacctaaaggcccaagtcaaataccactacctataacgttatcatacttattgccaatggcgacagcccttcacccgccc

SEQ ID NO: 326578 - DNA, 73 bp, Zea mays
cggacgcgtgggcggacgcgtgggcggactcttgggtcgatgtcggctcttccagcaccggagtctatatcgc

SEQ ID NO: 326579 - DNA, 56 bp, Zea mays
cggactcgtgggaaaaaacaaaaaaaaaatttaaaaaaaaactcaactaaaaacac

SEQ ID NO: 326580 - DNA, 325 bp, Zea mays
tctaatcttaatatctcctactactaccattatctgcaccaacgggctcttcgggggagcgctcctgctcgccgttgccttgctcgccgcctcctcttactaataagcccatgcggccatacaagataagaaggcgtaggtccaacactggcacggcatccactgctacccctagcacagctgccacgacagctgatgctaacttgagcacggatgttgccgttgatgatgatacccgtactgtcggtgtggctgctgcaaccgcgggtaccatgacgtctgcctgagctgctcccacccttatcagattccagatcatatgtac

SEQ ID NO: 326581 - DNA, 255 bp, Zea mays
  unsure (1)..(255): unsure at all n locations
cctctcggcatgaacccgagttgccagggttaggcaggtgccgttaacgcatgaaacagataaccttctttcccgaggctccaccgctcggctgttcttccggacccttcctaatcgnntcgccgtcttggccgccacagtcccaggcttcgtggagaactcttaatccnncgattcccttcttcgggtgaccgcgcccgtgatcgcgtctanntctgctcgggtttctccctcgtcccctttagggaaatcggc

SEQ ID NO: 326582 - DNA, 135 bp, Zea mays
aaaaaaaaaaaaaaaaaaaaaaaaaaaaaataaaattcaaacaatcaaaaaaaaaccaaagggacaggctcaaacatacaaaaaactaaacactactataatatcaccataatatcaattcacttctcgcctttt

SEQ ID NO: 326583 - DNA, 307 bp, Zea mays
tcgctcacacattacagtcatgcatgtgcaactttgaactaattcaaactggacaactgctatgggctcatataatctgatataggatgactgatcgtacctgatactcttattaccggcgacatattagagctaatacttgcataacaccttgacatgcttgaagagcgcattaacttgataaatagctgacacggactatgaccgctcaattgatgatacataatcacttaaccgatcgcaaggtctacggacacgagacgcatcatacatatctctagcctatcaactttagatagtaacattg

SEQ ID NO: 326584 - DNA, 157 bp, Zea mays
aacacgcgttcaatattagggtcaaaaattaataaaatagctaaccactgcaacgggacgtgcaaattccgaatatcagctgtaatgcaactacacaggtcaactacaccgattctgactttaccgtggataatatactggatataactgactctgt

SEQ ID NO: 326585 - DNA, 70 bp, Zea mays
taccggtaccaaatactaacaaactatttaaacaacccttccactaaaagacatcattgatgctaatgta

SEQ ID NO: 326586 - DNA, 342 bp, Zea mays
ggtgggttggcttctcctccccctccggttcgggttcgggttcgtgaggttctccggggtgcggtttcgtgggtgagcggatcgagatggcggcgtcagatgttgagtaccgctgcttcgtcggcggcctcgcctgggccacggacgaccactccctccacaacgccttcagcacctactgcgaggtcctcgagtccaagatcatcctcgatcgggagacgcagaggtccctcggcttcggcttcgtcaccttctccactgatgaggctatgcggaacgccatctagggcatgaactgcatggagctggacggtcgtaacatcaccgtcaactaagcccatt

SEQ ID NO: 326587 - DNA, 190 bp, Zea mays
aaaaaacatacaaaataatacagaaaataaaaattaaacaataacaataaacatacataagattacgttagaataagaagatgtatatgtaaataaaaaaaaaaaaaaataaaaaaaaaaaaaaaaaaaaaaaaaaaaaaaaaaaaaaaaaaaaaaaaaaaaaaaacattaaaaaatacacaatttaata

SEQ ID NO: 326588 - DNA, 433 bp, Zea mays
ccagaagacaaggaaagagaaagagctgttaataaggttagtaagaagcctaacagggggggcaataatataccaggtttcacgagtgcaggtgtgagattggcagcctttcctgggcctggtgtgaagaaagtgaaaaagattgtcatcaagaagattgttaggaagattggtgccaaagataaacaaactagtagttcaaccgtcccagaaaaggacatcattgatgctaatgtaaatgcctctgaaaaagaagaagctaatgcaaatgtttctgagaaagaagaaagtgagatcacaacatcatcttttgagaaggatgctatttctgcacacaatttggtcagtactagtgatacagctggagttgttaacagtgtggaggtccaaaaggaacaaaatagtgatttggtaaatctgaagaaaacaatgc

SEQ ID NO: 326589 - DNA, 244 bp, Zea mays
gacagtctctctgcatgtgtccgtgcgtgtcagagtgtgtgtcagaactatagcagtggcggttgcgtactgcgagtgacatgggctcaattaagagatcgtcatctggtctggtggctgtagtggtgctcgttgccccatgtgtgccgctgaagattgtgtctatgattggcttcatatactatgactatctactctcatgtatagcagaatgggtcctggtatatcaagcatgttacagtct

SEQ ID NO: 326590 - DNA, 203 bp, Zea mays
catcctatcttgaaatatttcatctcatctcaatctgatctagatcccacctaatctaacatttaaccttcataatgctttccacattaaattcattataccataatactattaacatatcttaccctaaataaatacctttttactaacccagtccataaacatctatccaaacctaacatcatttgtcatctttatctcat

SEQ ID NO: 326591 - DNA, 400 bp, Zea mays
  unsure (1)..(400): unsure at all n locations
gaatttcccgggtgcgacgccacgtcgtctcggctcaaccttangtattattccacaccttaaaatatttattatgtcttagtacatgatctccatctnntatcttagagaagaggtctnnnctcttanntcttaagtgngatggtcgatcttaaatcttgaatnnaatatttctatcttaatttcaaattctgatcctttagatcccactctatatctatacccatgtaagttatgatatatgcctggtcgacataaataaaatattagtgcccatttaattctatataaccatnnntcttatccctaaattaataccctttggacttaatcccgtcccataatacaacataccctaactctacattccataggtttggtctaaatccaattttgtttc

SEQ ID NO: 326592 - DNA, 241 bp, Zea mays
gcatgcgtacaacgtcgtctaacgcatcgtaaactcatgtgctccccctggcaccgactggttctagagaaatgatgtcattctcttcaatgctgctaaagggggactcaacactgtcttaaaatgacggtagacgtgtctaggtcagtaataagagtgtgtaaaatctgaatgagatacgaatacctctgcaatgatgaaaatctaatgatgcgcgtatctcattagataacaaggcggt

SEQ ID NO: 326593 - DNA, 308 bp, Zea mays
ctgacgcgtgggtgcgtctgtggtattcgtctattacaaggatggtgccactaatgggagattcctctatttgtctcatggtcttaaggagatcaagtgctaggcgtgcggcgaaattagttacccatgttgggtactatctatgtactattattatatccaaaactatagttgtcctggctgaattgaactcaaaagggtttgtttgagaaaaaattgtcccaagattggattgcttgttaaagctcaatattgttattgaagtgttaaaaaaaagtagtctatccctaaaataaaaatcaaaaaga

SEQ ID NO: 326594 - DNA, 96 bp, Zea mays
aaataaataaaacatcatataaaattatatttatctactaagaataaaataaatgcggaagggctaaaatcaaattgggcggtggctcttaaatgc

SEQ ID NO: 326595 - DNA, 199 bp, Zea mays
acgcgtacgcgcacgcgtacgcgattcgattacgactcgactcgactgctcgttcacggtggacatccactccatggacgagcgcgagcgccagctgcatcaccgtattctgggatacccatgcatgcccaagcaagaatgaccactgacgctagtctcgggggccgtacggcgacgtgcacggccactagcgacctgc

SEQ ID NO: 326596 - DNA, 84 bp, Zea mays
acgctcacccttactcttacccgtaccacacatacatttgtcgttctcatattagctcagggttagggcaccatgtgcattgac

SEQ ID NO: 326597 - DNA, 259 bp, Zea mays
gtacgcctcccctggtgaagaaacctgagttgctcaccgaacctgaccatcagcaggtggggattatccaaagggacggtcgactgtgatcctaactcaataactcgagttgtagcacgcctatagcaacacccaatgattgctaactatgattgtaccttacatacccagaagaatctttcgtcgcacgctaaatcaatactaatgtccaaacaactaatctctattaccaattgtgtcaatagactaatccattcat

SEQ ID NO: 326598 - DNA, 293 bp, Zea mays
tcggccgccctttgatattttttttccacacgatattactgttctcgttgatctcaggttagggcacctgcgttatgtttcaaccgatctgccgacctaaccaaactttccacccggatctgtcttgcgaggccatcccttcgatccaaacggaccttcgatgccaacgtttcgacccaccgaatatttcaaatcacggtataagtagtggtactttactagcgcccggatgctactacttatcctacacctctaaagataactacacatattaagactttttgtcaaactca

SEQ ID NO: 326599 - DNA, 258 bp, Zea mays
actcattcttccgcccctccagatttcttttcttccatttcacattttatgacacctactctagattggaacacttctaccgacccatccacacttctcacctcacaatcactttccccaccatccaacctcttacgccctgacttgtatccaaaaatatatcctttgccccaatttcaacccacgtaataagtttaataaccacaaaattagttatatttcacttacacccgtatgcttccacttattctacacctc

SEQ ID NO: 326600 - DNA, 209 bp, Zea mays
aaacacataaaacgtccttaaaaacccattaaacaaatgatatcaaaactaactgggctagagacacatgccagaccttctaacatatccaatcttaccttcccatccatgcaacttactatatcttctatcctgatccctacattacaatccaatgcacgatgtctacaacattgtatactgcaaaaaccctaccctcacccaactta

SEQ ID NO: 326601 - DNA, 289 bp, Zea mays
tcgcccactcgtccgcccactcgtcctttgactcttgggcggacgcgtaggtctagagcgaagtctgcctcccttcttgggcatgtttaccgactacagggtgaacgtattcattacagcagcacctaacatgaccatgattgtaatcataatactagtaccagtcgcaatctcatttctacagtgcttaaacctatcaatcaacctaaccgactaagggctactatggatgaaggactggaatcgtgcatcaatctcgctcacaattcttacctggacgaccgcggaa

SEQ ID NO: 326602 - DNA, 202 bp, Zea mays
ccgtgacttcatcaagaacatgatcactggtacctcccaggctgactgtgctgtccttatcagtgactccaccactggtggttttgaggctggtatctccaaggatggccagacccgtgaacatgctctccttgcgttcacccttggagtgaagcagatgatttgctgctgcaacaagatggatgctaccactccgaaatac

SEQ ID NO: 326603 - DNA, 109 bp, Zea mays
cttaattcccgcttcgacccactcttccgccctcacttcatcaataacattatcactcttttctcccacgctaactaaactttccttaggggggacttcaccactggtg

SEQ ID NO: 326604 - DNA, 204 bp, Zea mays
cccactcgtccgaaaaaaaaaaaaaaataaaaaaaaaaaaaaaaaactaaacaaaaaatgaggggggactctaccaatagaaggttataaacactctctcatgcaaggataatcaatactctagaacatgctctaattacattaacctttcgaattattacatatcatttactgttacaacacgatggattcacccattaataa

SEQ ID NO: 326605 - DNA, 263 bp, Zea mays
ggggtgttgtggagtctgcagctggctactgaaggcggagccatggggaggggccgctggactgagcggtcaacaatcaacgcagcacttgaagcccgaacgcgtaaaagctacagcttcgcttgcaccaatccctatgctttaacgcgaagcttcatttgacggaccactacagacactgataggacaaaaacatttcagccaatctgtgtcgacaaagacgagtttcaacagcgatgatcctaactaaacaaggtgtatta

SEQ ID NO: 326606 - DNA, 260 bp, Zea mays
ccgacgctttgtccgacacgtgatttctgttctacacgagatcatattaagacaactgcgagggttattaacaattctgccgcactatacaaacttcccacctcacagaatctcccgaccagataatgcaatcaagcccgatcaatccagccaagacgatattactgtccaaaattacgaacctcgctatacatataatcacctacatacttgaattaactcactagatcccgaaagttcactcgtactctacagctaat

SEQ ID NO: 326607 - DNA, 187 bp, Zea mays
acgccacagctgccacagagacatcatacagcggtactactggcgagtctgagctgaagaggatgatgaggatgaggataagcagcaacacacaccgacgacggagagcgaatatgcaccgcatcgagctgtagctcgtccgcggcctgtgcgcactggcagtgcccgctgtacacggcggcaatga

SEQ ID NO: 326608 - DNA, 219 bp, Zea mays
acgctcggcccattcgtagttcaacacccgccaacagtcttcgcgcggagagcgcaatcaacagacagaggaactgctggaagctagcatcttacccactcataagctatggcagttcatcgcaccctctttgcttgcgcgtcgtcgcatgctacgcactacaatggcggcctgaccgcgcctgtgcatcggacgcaccctgcctgtcgggctgtctcg

SEQ ID NO: 326609 - DNA, 117 bp, Zea mays
tcccacgctttcgcccacacatcaatcctgctctaaacaagaactccctcctacacctgcgagagctatcaaacaagctaacgcggctaacatacaccccaccagactcaatctctc

SEQ ID NO: 326610 - DNA, 328 bp, Zea mays
gcgctcgccgctatcattcgtttctggagacccttctagccccgccgtcaccacaccaccaatggcaggactcggatcaaaggccctcgccgtggtcgccgtcctggcggccgtcgtcctctcggtggcctccgcggccgaggcgcccgcgcccagccccgtcttcgccgtcgccggcgcgtcagcgccgttcgtcgcggccctcgtcgcctacttcgtcgccttcctcttcgtccgcgtcctgcactgagcctatggtgcctttccaccgtcgtcgtcgtctagatctatttattggagtggcatttcagtagtacttgttctaggg

SEQ ID NO: 326611 - DNA, 216 bp, Zea mays
tcgccttcggatgaaggatcccctttctttacctggaggacatccaactgaggctcatgaaaaactacggatagagtcgaccactgtgcgctggcttacgccatgaacgatgagttctgcagagtgctccatcagcatatgaagttcttctccagcaacccatgctcacgtctcactcaagacgtgtacgaagataaatgagcatagtatacacac

SEQ ID NO: 326612 - DNA, 212 bp, Zea mays
tcttcctcccacgcttcctctaaaagcaccatataattttccctccaacatcacattctcagtgtgcatgtctttccttacacgtacataatgtcatatcacatatgaaatattgatcaatgacattcaaacaatgttcatacaaaataacaagctaaaccatctcttttactcacaatgaatacctcctctacactataaactcaagtact

SEQ ID NO: 326613 - DNA, 56 bp, Zea mays
cccactcgttcgcccacgcgtccgttgacgcgttcgttaaaactagcgctgtttac

SEQ ID NO: 326614 - DNA, 143 bp, Zea mays
gaaatgacttgtgtatgacataggatacatggtatgactataagtactaaaattaaaaacgggggctattattctgaattaagaaggaataaaaatttaaagaattattctataaattattttaaaattaaaaataataataa

SEQ ID NO: 326615 - DNA, 196 bp, Zea mays
gccacgcgaccgaacatgcgtacgtgccaacgtcttcagctccgatcggccattcgagacggggccttgtacacgtacggcggatccatgcatgactacagaccgacggaataagtaaactcaccctaaaactagtcagagctcactcgcacgctgacgctcacacttatactacacgtgctcagtaagaccacag

SEQ ID NO: 326616 - DNA, 338 bp, Zea mays
cgtccgtaccatttctgattctgcttctcgacgcccgaggaaggcccatgagggggccaggtcctgtcattacccatggctgaacacaaccaccagctctagcagctcggagcagctcaagcatgacgacagaacacgacgggttcggcgcctacagccagtaccccaactacaagaacgactccttgaccgaaatctactgctccgtctagaacaattacgtcgagtacattaatgcattgaaccaacgcatgcacaagcagcacactctgagacgcctatgacatcgaccgcggctcctccgcactctacgacaagcactatgcaaagaacgaccc

SEQ ID NO: 326617 - DNA, 199 bp, Zea mays
gccagcgccatggtcacgtcgactaccgccgacgccgtgctgtacccgacgtccgtggtcgggcttcgcctgaagccatttaccggggcgccccaagccgttccgcccgaaaacgggcgcggcggtccgtggcggagcgcgcggaactgagcccttcgctggtgatcagcctgagcacgggcgtgtcgatcttcctggg

SEQ ID NO: 326618 - DNA, 192 bp, Zea mays
ggttcgcgaggtcccattttgctttcccccctgtcttgcagtgcgttgatgcacctcggggcttttgtggccctccgctgctacttaagctctccgcccgtacacggcttcatctctcatggcactcgctgtcttctgatagctgctgctatatctacttcactaacctaagaagcgtctgtaggtctggat

SEQ ID NO: 326619 - DNA, 248 bp, Zea mays
tcttcctcccatgcctcctccctctcctaccttcctacttaacaatatctgtcctccctatctaaactgcgtttcctacacttgcatccgaaacaatcaactttacactcctttctacccactgattaactttaataactctcaaagtatcattattacacttactccctcactcatacaataattctacaccaataacatcatttcacaaaatcttactacatttcatctcaacaaatacttcttta

SEQ ID NO: 326620 - DNA, 173 bp, Zea mays
cggactcgtgggggccggcggcgaggtcgttactgagcctaccggtccacttggcgtgctcaagggcttcaaggacctgcctcccgggatgccttccgtgctcttcgtgactgcattaacttgcttttgtgggttccggtcattcttttacacaacgactggattggcccgga

SEQ ID NO: 326621 - DNA, 299 bp, Zea mays
ctcgatctaacgcctgcttcctccatcactcttatactcatggcgacaccatctctaatttgcgcgcaatatactcatcactttattctctacaacacaaacgtcaccgttctcaaattcatctccaaaatgaccacccactactcgtattttatcaatctgtctcatataaaatttactcaaagcaatgcttagcgatcggagctcaactcctagctaaatatcaactagagcaccaacgtatctatcctcatctatccttctatcatattatacttcacactataaaccttatttaa

SEQ ID NO: 326622 - DNA, 310 bp, Zea mays
ggagagtgagcctgtcagtgtattgtgtctggcgtggtcaagaaccaaatcaatgttggaccgaccgactgagagtttggagtgtgtatgatttgctattactctagtagagtgtgggtatacctgggcagaatgtgtcctcaaaagttgggggcctgtctgtgtactgtgtgcgatggacgccctaagtaaaaaaaaagggcaggtgatggtcgtgctccaggtgatggtcgccctaatcagagaatgtatgctaaaaaaaaagccagagtgtttggctcctggttcatgttatgctgaatcttggaat

SEQ ID NO: 326623 - DNA, 65 bp, Zea mays
aaaaaaaaaaaaaaaaaaaataaaaaaaaattttttaaacaaaatccaaaatatatcttaggagg

SEQ ID NO: 326624 - DNA, 356 bp, Zea mays
gccacgcgtgcgaccacgcgtccgcccacgcgtacggccacgcgtccgaccacgcgttcgccgacgcgtacgtccacgcgttcggacccacacgttcggccacgcgtacgcccacgcgtgcgaccacgcgtgcgaaaaaaaagcacaccggacaccgaacgatgatgcagtgctcttacgggcgatgggaccctacctatagctgaaccgatataaaagggcggccggtttataggccccaaagataagtcttcgcgatgccaccgcatacgttttctgacgtgctacccaaatgcaaatgacgggacgtccggtctcaacaaatttaatggcgaaaccctgtcgggtcacaaccg

SEQ ID NO: 326625 - DNA, 141 bp, Zea mays
cctgctcctgccggactgcaggaatgtcgttactcagcctagcaaaccgcttggcccagcgaacattcctgaaacacccttaactctagatggcatactttctgctatagactgccagttcctcaatcataaagttacaac

SEQ ID NO: 326626 - DNA, 266 bp, Zea mays
ttcacgctgacgatcactcttcctgtcacactctttgataccctctccaccactcatttcagggaggattcgatcacgcgtactgacgaccacatacaggtacacgttctaaaacccatccgaccacgactacgcaagactacaacagatgaataggtctgttataaaatctacttaaagcaattgttagtgataggtgctccaacctctatgaaaaaatgcactatcggtacacaccattctaggcgcaactatgctactatcac

SEQ ID NO: 326627 - DNA, 72 bp, Zea mays
cccacgcgtacgcccacgcgtacgtccacgctttcgtccactcgttcgaaaaaaaaaaaaaaaggaagaatt

SEQ ID NO: 326628 - DNA, 210 bp, Zea mays
cagaaagttagctagctgctatcgtggaagtgcccatatgcgagagagagaggcaagctagcggggagggtctttacaggctagccagccagctggtagctcctgcggacaaggcgatggttggtgccaactttaactttggaccgagcttcggcttggtctttccggaagaagctcccttgtggtcaataaagacaccatttaccttaa

SEQ ID NO: 326629 - DNA, 258 bp, Zea mays
cggactcatgggcacggatatcacagcttgctttcatgtgctagcttactctggcatcatggggatcgtgaacctggtctagctatagcgtcgaagaggaactagtacttagacgctcgcgactctggcgatgaccgttctgatggcgaccaacggacagtgttcaagtgcagacgcgcgaccggctatagaccggtgaagcgcgtacaggacgatactcccgctccttccgtcggtgctaatagacaggatgatgcc

SEQ ID NO: 326630 - DNA, 199 bp, Zea mays
tcctgattcccggtcgacccaccgtcctccacgcgtcgaaaaaaataaaaaaaaaaatatataaaaaataaaaaaaaaaaatattaaagggaaaatcaataaatcaaatatgaacacaaaaaaaaaaaaaacataaattaaaaaatatactattttataattccattcaaaataacaccatataccttatctgatatac

SEQ ID NO: 326631 - DNA, 253 bp, Zea mays
cgggccgaccgcactcgtacgcccactcgttcgcccactcgtactaaaaattaaaaaaaaaaaaaaaaaaaaaaagaaaaaaaaaaaaaaaaaaaaaaaaaaaagaacaaaaaaaacaaaaaaaaaacaaaaaaaaaaaaaaaaaaaaaaaaaaaaaaaaaaaaattaaatatcacagacaaaacaataaaataacaaccaaaacataataaaataataaacaaacacaacatataataaatacaactactaa

SEQ ID NO: 326632 - DNA, 74 bp, Zea mays
gtcgatggtgatggaggagcctctttaatcgctgaagtcttcattgtgcgtgtgtagctgaattctttcatttc

SEQ ID NO: 326633 - DNA, 125 bp, Zea mays
  unsure (1)..(125): unsure at all n locations
aaaaaacatacgncactctttcggataacatttttacaaatcagtaaatatataaacaagggggggtataaaaaaagggccggccgttttaaaggacccaactttccttccccttccttccaact

SEQ ID NO: 326634 - DNA, 149 bp, Zea mays
tcctgattcccggtcgacccactcttctccactcgtactccacacgtccgaccacgctttcgtccactcgttcgatataaaaataaggggaaaataaaacaaatctaactaataacaaataaaaataataaaataaataaaaactaaaa

SEQ ID NO: 326635 - DNA, 226 bp, Zea mays
gctctacacgttctaacattccttccgccatccttctacctcatacattttgtatagagacaaattcactaatatgggtgcacatcgagataccactgactcactctataaacattatcaatgatcaaattaatctgcttattctacatcgagcatatcacttatcacggattatctaagatgtaccgaacgatacgccttgccaacaatacatcagcctgaatat

SEQ ID NO: 326636 - DNA, 183 bp, Zea mays
ctcacgcgtgcgcccactggtacgttcacgcgtacgcccactcgttcgtcgaccggtggctcggcgaggagggcagctatctagcttagtacgtgtactggtccaacggccgtgagacctagaaccccatcgtctacaacaagcatttctctttgaagaacttattgaagctgtgcggcaggc

SEQ ID NO: 326637 - DNA, 142 bp, Zea mays
aaaaaaaaaaaataaaaaaaaaaaaaaaaaaattttttaattaaaaaaaaaataaaaaaaaaaaaagaaaaatttaaaaaataaaaaaaaaaaaaaccaaaaataaaaaaaaaataaacattttaaaaaattccattataaa

SEQ ID NO: 326638 - DNA, 69 bp, Zea mays
aaaaaaaaaaaagaaaaaaaaaaaaaaaaagttttttattaaaaaaaaaaaaaaaaaaaaaaaaagaaa

SEQ ID NO: 326639 - DNA, 338 bp, Zea mays
  unsure (1)..(338): unsure at all n locations
aggtgggttggcttctcctccccctccggttcgggttcgggttcgtgaggttctgcggggttcggtttcgtgggtgagcggatcgagatggcggcgtctgatgttgagtaccgctgcttcgtcggcggcctcgcctgggccacggacgaccactccctccacaacgccttcagcacctacggcgaggttctcgagtccaagatcatcctctatcgtgtgactcataggttccgcggcttcggcttcgtcaccttctccacggaggaggctatgcgtaactccatcganggcatgaacggcaaggagctggacggccgtaacatcaccgtcaacgaggc

SEQ ID NO: 326640 - DNA, 128 bp, Zea mays
cttttattttgtttaccaaacttttttatttttattgaaactggatcaacacatattttttctttttactacaaaaattaaaagtaaatcttcctttttaaatttgtcccacccgacacacttttttt

SEQ ID NO: 326641 - DNA, 338 bp, Zea mays
acgcccacgcgtccgcccacgcgtccaggtttgggttatccttgaggatgatgcctaactggaaatgcaggccttcttgacccttgcacatgatgagggcaattcaccgtctgcagattttgtgttaccgaaagctgaatgctttaacaacgaacaagcgatctcttatgctctctgcttttctctgcatccctgctatcttaggagattacccttgcgtaagcacgagatccataagcacctacgacgtgacttttaccaacagatcacgaattgtttcagggcgttcattatcacactactccattacaatatccttatcaatctactcaccacac

SEQ ID NO: 326642 - DNA, 318 bp, Zea mays
  unsure (1)..(318): unsure at all n locations
ccggctcgacccacgcatgcgttcgtgcctactggagcagcctacattggttcgaaaggccacatgctgttcaccttgaagaggcgggtgcaggtatcgagtaccacgcgtccgtcnaccagaatgaggtaccttccgattcacaagggcgcatctgcgccgcaccaaacaccgatcgatgtgctgtgcttcatgactcgctgcaccctacctaccgatgaccctattccactattcgctggcctgtatgctcatgacatgaccctttcctaggccccatgctgcatgtacagacttactaactttttcatctgacgc

SEQ ID NO: 326643 - DNA, 77 bp, Zea mays
aaaactaaaaaaaaaaaataatgaattcacaaaaataaaattcaaaaaaataaaacagggggagttaaaactaaaaa

SEQ ID NO: 326644 - DNA, 143 bp, Zea mays
aaaaaaaaaaaaaaaaaataaaaataataaaaaaaaaaaaaaaaaaaaaaaaaaaaaaagaaaaaaaaaaaaaaaaaaaaaaaaaaaaaaaaaaaaaaaataaaaaaaaaaaaaaaaaaaaaaaaaaataaataataaaaaaa

SEQ ID NO: 326645 - DNA, 172 bp, Zea mays
gccacgcgtccgctttcttcttcttcttcttctttacacaagcgtgctccttcttctcgtgtgcgtagtatctagctcacaacaggggaagaccagaagaaacaaggccgccgccgccgctgcagcaacaacatacaccttttgccctggccccattggcatccttgaccac

SEQ ID NO: 326646 - DNA, 77 bp, Zea mays
aaaaaaaaaaataaaaaataaaaatgataaaaaaaaaaaaaaaaaaaaaaaaaaaagaggggataaaaaggaaagaa

SEQ ID NO: 326647 - DNA, 326 bp, Zea mays
atctcgttctcgccactattattctgcacagcaacgcatcaagccttctagaaccatgtcgccgtcgccacaccacaacccgtcgaagcgaagcaagcaatggccggagtcggatcgaaggccctcgccgttgccgccgttctggcggacgtctccctctcggtggccgtcgcggccgaggcgccggcgcccagccccgtctacgatgtcgtcgcgttgtctgttgtcttctcctgggtcctcggcgccttcgtcgccgtcttcctcttcgtcgacgttcgccactgatgccttgtggcctcgtgcctgcaggctacctagcagta

SEQ ID NO: 326648 - DNA, 172 bp, Zea mays
gattgagatatatacacgcgcatccaaacaatttctatgcccttaggaaatgggttgtttgactgccttgtgtaaacttcgctggagacctgtggtttggaactatgctcacggctacgatgggatcagattattttgagtattgatgacacgagtatatgtcgattgtttt

SEQ ID NO: 326649 - DNA, 187 bp, Zea mays
acggtctgggccgaaccaagggctgccgttccgtttcaaatacctgcgacccttctccagggaaccgtggaactaccacaccggccaggtccccaactactacggctgacacacctataggctctacatattcccctagacatttaccaacaacctctatctgaaagatatccactcatacttggcc

SEQ ID NO: 326650 - DNA, 211 bp, Zea mays
cccactcgtccgcttgtgcgcgttgttatatgttgtttatgtgaggctgcatgcgcttggtatttgttgtttatgtgaggctgcatgctaatgattaactctggtctttatgtccatgtgagaaggctaataaattatctctttattttggttcgtgaaaaaggatgtttgaccctcgagacgagtaactacatatggtctgatacttact

SEQ ID NO: 326651 - DNA, 399 bp, Zea mays
gagaaatccaggcaggtttcatgactggcagtgcaaaggcgaaggaaggtgacgttttctttgtgccggctcacaccaagggctggaaacgagccgagctcagtttggcttggtgcggtagcttggatcggctcggcttgtctactcaacaagctacaaaaggaggctcggcttgttatcagctcaccttgtctactgaacaagctataaaaggaggctcggctcgttattagctcacgaggaggctcggctcgttattagctcacgagccaccttgtctactgaacaagctataaaaggaggctcggctcgttattagctcacgagccaaacaaactcgcgagctgcaatttgataaataatattatattatataatgaattaatagtttatcgatgt

SEQ ID NO: 326652 - DNA, 197 bp, Zea mays
aaaacacataacaccaaaaacaaaacatttacatttaaaaaaacacggtcccccacccagggccagggttatttctaacgggggcatgcgcctacaattactctactatactaccatctacaattcaatcacttcaccgttatcacaacatatcttaccaccttaaaaataatgtatccatataacttaatcccata

SEQ ID NO: 326653 - DNA, 540 bp, Zea mays
  unsure (1)..(540): unsure at all n locations
tcgcacgcgcgtccgtctgggaagggagccttcgagtgcggctccgctcgcggacgcgtacggcgcgggctgggcgtgagtccaataggcactgggctccgttggtggcgccgaaccgcctctaacttgtgggtacgtgggccgggccgtgcgaggccagaggcntgccggttggctagactttggnnattctgnnactgtagaggcgttacaaagtcatannatccggcaccacagagtagcttttcgcgcccacttggcatttttcaactcaagtcgccgatgacccatatgtgtgtgagatcaatcggtatccttctcgtactttaggttgaagttacctaaatcgcggtcgctggtcaattcagtangnnggtaaaacctaactnnctgtctcaacgacgagtctttaatcctcagcttcaactgttccctaaattggtgggtgaaaccaanntccaacacttttggtgannattctgcttttcacaatgatacgtgaagaagccccgtacatcgaagggaaatcaaaaaagcaac

SEQ ID NO: 326654 - DNA, 399 bp, Zea mays
aaagaaaaaaaaaaaaaaaaaaaaaaaaaaaaaaaaaaaaaaaaaaaaaaaaaaaaaaaaggagaaaaaaaaaaaaacaaaaaagaaaaaaaaaaaaaaaaaaaaaaaaaaaaaaaaaaaaaaaaaaacaaaaaaaaaaaaaaaaaaagcggcgccccacaacagagacccaggcaacccacccccggcacacaaaccaaaacccccaccaacgcacccccaaaaaaaaaaccacgaccccaacaaaaaaacccgaggaccgagaaaaaaccaaagcaacccccaaaaaaaacgcaagaacggaacccccccagccccagcgcagaaaacacaacaaaagcccaaaacacgcaccgcgcaacaaaaacacaaaccacagaaggaaaaaggggcccaccc

SEQ ID NO: 326655 - DNA, 103 bp, Zea mays
aattctcggaattgaccgactgcgacccacgcgtgcgtccagccacgcgtccgcccacgcgtccgcccacgcgtccgcccacgcgtccggttctagatcgcga

SEQ ID NO: 326656 - DNA, 90 bp, Zea mays
cgacccacgcatccgcccacgcgtccgcccactcgtccgcccactcttccgttcactcgtacacccactctttcggatctttgataactt

SEQ ID NO: 326657 - DNA, 339 bp, Zea mays
cggactcgtgggcggactcttttgaaaatttaaaatataaaaaatataaaaatgaaaaaagctaacattctaaaaaataaaaaaataaataatcaaacattatttatattcccttcttactttctcttcctttctacgttttcatttttcttttcttttccttactttttcttcactttccttttttttcccctattttctcttctattacccatcttttaccccatcttatttgctttacaccacatcctcctttctttaattccctttctatccatcagttttttaccattttcctttatcaccatttccccttcctgaatcgtcttttctaccctt

SEQ ID NO: 326658 - DNA, 89 bp, Zea mays
aaaaaaaaaaaaaaaaaaaaaaaaaaaaaataaaaaatacaaaaaataaaaaaaaaaaaaagcaaacgggcaaaatcatgaaagggcat

SEQ ID NO: 326659 - DNA, 363 bp, Zea mays
cccacgcgtccgcccacgcgtccgcccactcgtccgtccacgcgtccgcgcacgcttgggcaatctgaccaccactggacagtgcactgtactctacagcaacgacagaaaagtgagcagcacacagcagcagctgctgccatgcacgcttggagatctctcctaccgagcttcgtgctcgccgtgctggccgctcaagccttgctagctgtggtccaatccaagaccggccccgtggagcatgcgagccaagcatgtgacgacgtgaacaagccctactgcgtgcccgtgatagacccgcgctcgctcccagcgaccggcggctggcacggcatcactcccgtgacgccattgcacggaagc

SEQ ID NO: 326660 - DNA, 81 bp, Zea mays
tcgcccacacacacgtctacacgctcaggtgtttctacacaaactcaaaaacaaggctaacggaccgactatctacaacaa

SEQ ID NO: 326661 - DNA, 230 bp, Zea mays
gacccacgcgaacgaccgcacgtccgaaaaaaaaaaaaaaaaatataaacaaaaaaaaaaaaaaaaagcgaaaaagaaaaaaaacaaaaaaagacaaacacaaacaaaaaaaaaacaaaaacaaaaaaacaaaaaaaaaaacaaaaaaaaacaaaacctgcctaccacccaaaataacccaaaccccactccacagccaccaaacttaagaaccctttaaaatacccccc

SEQ ID NO: 326662 - DNA, 85 bp, Zea mays
accacgcgtccgaaaaaaaaaaaaaaaaatacaaaataaaagaaaaacaaaaaacaaaaagagaaagggcaaaaataaggaagac

SEQ ID NO: 326663 - DNA, 456 bp, Zea mays
cggacgcgtgggcggacgcgtggggttcagattcgtttgaggcaaacaggaggaggttgggtttcatggctcggtcttcagttttaccagtgcatgactttttcctgctagtaacattttgttcgtaataagcaatattacttctattgtcctgccttttcacaaacaaatgatactgtgttctacctcatggtttcttcaccgtcatgttttctgttgtcaggtccttgagctagtggagtcaccaattgttcctgtgactgtcatgttttctgtgtttgttcgactattgcagatctgcagtagcttgtagctccatttggttgtttcatatcacatgactctgttgacacttgccacttgctagttgcgtgcaaccgtggttctattctgtctggcataatgctttttatctcattgtaaagagaggggtcaacgggcactggagcaaagatt

SEQ ID NO: 326664 - DNA, 238 bp, Zea mays
gacgcacgcgttcgcccacgcgttctcggacgcgtgggtacggacgcatgagaaagaaagataaaataaaaaaaaaggaaagaaaaaaaaaaacaaaaaaaaaaaaaagataataaaaaaaagagcagaacaagcaatatgacctaatattgatatggcttgtcacaaacaaattatactgcgtattacgatatgtgaatgtaaagcaatatgtttactgttaaaagatcctaattat

SEQ ID NO: 326665 - DNA, 279 bp, Zea mays
attgcgcatgcgaaccttcgtgaacgcagttacgatttagcccgccatatccattatgaggagcgggcgaacataatcgcacatgccgttgtgatgacaactccctaacccagatctgctctgacgttgtgcaacagttcctagtactgcctcgaatatttaattcaagacattcacttatagtcagacttactataacttctctccactggctgctaacactaatacaacgtctaactgtgtgaatcaacggctcctgtcctgctatgctgaattact

SEQ ID NO: 326666 - DNA, 458 bp, Zea mays
gtagttatctgtaatgtctataagtaccgtaacggtagtcgttagaactctcgcttttgtgttatgtccaattctgtcgccctataaacgaggcaaagtgtgcattgattaatataaacggaggcaatgtagaaacaatagtagcacctaatataaacagaggcatttttacaactttgttctgaacgtgaacgtcttgaatccggcacaggttttaggcattcctttgcgtgctacactggcatgcaacagcaacatgctgtacaggtggtgcactccattagttcttatggcaacgacaatcaatttttttttaaatgacaattattcttggatagtagatatcttgtatacatttgtttagtttgttgccttttcttttctcctaaacattttaattaatcactaattacttagttattgcaagcacttcaaaaatgaagggccaaaatttattt

SEQ ID NO: 326667 - DNA, 311 bp, Zea mays
cccgcgcgttcgaaaacgaccaccgaactttaagcactgaactgtccaagcgggggactgtcagatagcaaggagcgtgtcgcgctgctcctggcggaactctctgatgctagtctgctgtcactagccccggtcggcgccgctacgacatgcgcacctacgcaactgaccccgtacgcacccgccatcgttctgaacactgcgctcaccgcacaacactacgccattctcaatgaacacccgcagacctgctattaccagtacaagatgaaccccatcatgcaacgctacatctactgccccaacggcta

SEQ ID NO: 326668 - DNA, 245 bp, Zea mays
cccacgcgtccgcccacgcgtccgggcaaaacggatccgtaacttcgggaaaaggattgggtctgagggttgggctcgggggtcccggccccgaacccgtcggctgctggcggaatgctcgagctgctcgcgcggcgagagcgggccgccgcgtgccggccgggggacggaccgggaacggccccctctggggccttccccgggcgtcgaacaaccgactcagaactggtacgggtatatcaagc

SEQ ID NO: 326669 - DNA, 269 bp, Zea mays
cagagtagaagttttctctcagaacctctagtatctgttttcaagtttagctctgaatggatgataagcatgtcgttcagtttgttcttaaaaaaaaaaaaaaaaaaaaaaaaaaaaaaaaaaaaaaaaaaaaaaaaaaaaaaaaaaaaaaaaaaaaaaaaaaaaaaaaaaaaaaaaaaaaaaaaaaaatatgtgtaacataaataaaaacaaatgaaacaaaaataaaaaaaaatcaagactgggggttctctttagggtacccaact

SEQ ID NO: 326670 - DNA, 350 bp, Zea mays
gcagactattcagtaccacgccatatgattatggaccgcctaagtcaacataggagactgtacaatttagaaggtgaaggccatggtaaataacctggctgctcaaacacagtatcacggctcgctgaaaccctacagcacactcccaaattgctagcattgcattctaacttatactcagctagtcatcatacagcaaacatgcatcttaatcccactttctatcaaatcaatcgctatcaccaatattgtgaatcaacagatcatgtagcactaagctatacatctatgatagcaaagccattactcagcacaaacttacatttcacactacaatctacacccatctt

SEQ ID NO: 326671 - DNA, 316 bp, Zea mays
acgatcacactcgcatccgatctattgaagatgcaatgcactccttcacgtatagggagcctctctacctaacgaatagcatcaagctaactacaaacctaccttcagcatgtgtctactagctaatcatatcgtgtgtacgagtatgaaagatgatgtactgtcaccaactcacttgtgtatgataaaggatacatgataagactatcactactaaaaaaaacatataaagaaagagcataaccaacttaaaatgtaaaaagctaaagtagaagaaaaacctaagatcaatatgaataaaaaggacgtcctcatc

SEQ ID NO: 326672 - DNA, 317 bp, Zea mays
aaagaaaaaaaaaaaaaaaaaaaaaaaaatataaaaaaaaaaaaaaaaaaaaaaaaaaaaaaaaaaaattttacaaaaacaaccatccaacctaactcaccactactatactgccacctaactcccatctactcacccttaatttacaacctcttacctatcatttccaccgtcgctccccatcaaaacccccttgttacccatcttactttacccgactcgcttaatcatttccacccctactcttatatctcttctaacccttccaccatcctttctcaccactactacactctctatctccaatcattatcccc

SEQ ID NO: 326673 - DNA, 322 bp, Zea mays
accacacatacactaacacatttacaaactcatagaaaaaaaaaacaaaaaggcaaacggaaaaattataaaaaaaaaaaacgcaaacaaaaatataaaaataaaaaaaaaaaaaaaaaaaaaaaaataaaaaaaaacaatataaaccattattaattataatataaccgtttataagactaaacaaactacagtgaagcctctaacttaaacagacaagataaatataaatgagactaaaatataaaacttaaaaattaataaaaacatctattaccaaaataactacacacgatacatcacaatatgatgaactcacact

SEQ ID NO: 326674 - DNA, 72 bp, Zea mays
ctctgcttcagcatatatgtagttgtgtctactggtttttgcagttgttaaaaaaaaaagaaaaaggaaaaa

SEQ ID NO: 326675 - DNA, 129 bp, Zea mays
ctgacgcgtgggctgactcgtgggcggactcgtgggaaaaaaaaaaaaaaaaaaaaaaagaaaaattaaaaaataaaaaaaggtaaaaaaaataaaaaaatactatacaaataaaaaaagcgtcgtcct

SEQ ID NO: 326676 - DNA, 337 bp, Zea mays
cccacacgtacgcccactcttgctccgacttatgcttataccaatacaaaaaaaaaaaaggaacattgtaaaatttcaaacggtctaaacaaacccagataccatacacattcataccacttcatcactctacaatatcaacacttacctccccttacattctaccactttacacaacttcaaaactaccaaaacccaatccattcccaacttatttccaactatataactcatacaaccttacactcaccaaatttcttagacttccaaaccacccacatttatccacataaatatatcccgaatagcacatgacaaactccctttaacaacactt

SEQ ID NO: 326677 - DNA, 263 bp, Zea mays
acccactcgtccgcccacgcgttcgcccactcattttaccattcttcccaatagatgacctcaacgccaactgtcaaaattaacaggtgttgagcttcccgtctatatctgatactacctgctactatttacatattgatgtgaattcctctgctgaagaaacactgatcaacgttatgaacccatacacaataaccaaccatcgcaagctccacacaaaggctgatcacaaacatatcctttaagccatcaaactttatagc

SEQ ID NO: 326678 - DNA, 487 bp, Zea mays
  unsure (1)..(487): unsure at all n locations
ctgctcgtactcggtctcggaattgcccgggtgcgactccacgtcgtctcgtcggaccgcctgtgggttttggttccactaccgagtatttctgggttctcgttgagcctcatcgtgtaggacagtcctgnncgttatcttgttaaccagagtgtgctcgcctcctagccaaaccttccccactctgaccaatgtnncttccgcctcggnnatcggcccggcgtaggcctggnngccttggagccaaaagggagggtgtcggtgccccgctttccgaacctcacggannataagtaaaataacccgttaaaagtanngtggtatttcacttttgcgcccggagggctccnncacttatcctacanncctctcaaggtcatttcacanaagtcggacttagagtcnaagctcaacaggggtnncttctttccccgcttggattccgccaaaagcccgttcccctttggcttgtggttttccgctggat

SEQ ID NO: 326679 - DNA, 184 bp, Zea mays
ccgacgcgtgcgttgaacaccacacgaattttctgaccaatatgatcatatgggactacgcactctttaaccataaacagatgttcctaccaatgaagacagcttagattacaatataattcgcccatatctttctaaatacaactgacctggaaacagatatgatactctactaatccctatg

SEQ ID NO: 326680 - DNA, 227 bp, Zea mays
acacacgtacgacatgactctatagactttggcttctaacaaggcaggatggcagcgtgctccgggaggactgtgacagtggcaagcgcccctcgaggccctaacggcctactgcggccacctcaagcgctccgagcagatcgacctcccgtctagctggcagacatgactgaaaactcgttcagttcaaggagcttactccgtatgatcctgactgctactacatc

SEQ ID NO: 326681 - DNA, 531 bp, Zea mays
  unsure (1)..(531): unsure at all n locations
gcgactcatacacggtcctacccagtctccatcgacaatcgaggatctcgacgtctcacaaggactgatgctgcagtcggtctgaacactggggagctggtagtcttatgcaaggcagaatgaccacaggtagaacacatgagaagtattaatgctcaacaagcatgctgtccgtacactatgtcggctacatctgtcgagatttatggaaantgaacgcctgatggattgaggcttgacagaatgatggtagctaaccatctgatcgtgagactcacagaaggaataggataaatgtgtatggtctagaagaccatccactcagacaagaccatanttccgttcctgtaatatgggttagattgatccccgataagactagaagccatggcgaatttagtatggagttaacataagaacagctacgttgatacttagataccattgcgcttcaggagtattgactcacagggttaagtgcaatggtaagtagcatgagaaaacctaactgagggattacaaaatgacatt

SEQ ID NO: 326682 - DNA, 140 bp, Zea mays
cggactcgtgggaaaaaaaaaaaaaaaaaaaaaaaaaaaaaaaaaaaaaaaaaagggaggagaaataaaaaaaaaaagaaaaaataaaaaaaaaaaaaaaaaaaaaaaaaaaaaaaaaaaaaaaggggaggcccttttaa

SEQ ID NO: 326683 - DNA, 345 bp, Zea mays
cccgtcccgacccactcttcctacaactctttctaacaactaaattttctttcaaaacactataaccaattctataagatagctttatatcctaggactggaatccaataactatctcatctctaacatcactataataaaaataacctatctcactacaatcttaaaacatctcatacacacctattttcaactaaaacaattccaacactttccacatacttctttacaattatacgatgattccccatctatagatcaaaaaacaacttctctatcaacacttatctacctcacaccaaatatcccttttgtaacattactaacacctctatcttcccactc

SEQ ID NO: 326684 - DNA, 248 bp, Zea mays
tcttcctcctactcttgggaaaaaaaaaatttaattaaaaaaaaaaaaaaacaaaaaaaaaagatagaataatactatagtgctggaaaaaaaaaactataaaaaaaacaaaacatcaaaaaaaaaaaaaataacctcgtctcttttcaatcttccactcttatctcctctcctattcaacactgtactctccaactctttctgcctaattcttatcaattatcccaattttcccaaacttaatgatc

SEQ ID NO: 326685 - DNA, 180 bp, Zea mays
actgcacctaccaaacacactccaacatctaattaataaactatctacctcaccatgcatgcatgcattattacttagagaacacaactatatacctacatctcatattaaccatgcgcatgtattactttactacactcatatccatcaatcaaaaataaatcaaatcaaactatactc

SEQ ID NO: 326686 - DNA, 335 bp, Zea mays
cccacgcgtccggcagagtacatggagtcgacgtggcgcgcgaagacggtcggcccaggggtgccgtgtttctatctcgacgacggacggatgccgggcaactcgggcttcggcgtgagcttcttcatcagtaacgcgccaacaatgggatggctggacaggcaagccatctgctccgtggtccttgctttctacgggaccgtctacagcctggactacgaccagctcggcgagctcggcaacgggctgcgcgattcccgttgggcgatcatcagggtcgagaggcccgacgaggcgcagaacctgtctcaagatctcgacgacgcctgcaggga

SEQ ID NO: 326687 - DNA, 231 bp, Zea mays
acttctactaatcaacaagggacggctacttataaagtgggctgagacaagcatcctattcacatcattacttcattaacacctgaaacctcaaactacgtagatctaaatgatcaattacatgcacactcacctattcgtcatgatctattacatactaatcatactaactaatacccacctgttccacactacatttatcctctcaatgagcatactttaatacaccat

SEQ ID NO: 326688 - DNA, 396 bp, Zea mays
attcccggccgacccactcttcctcccactcttcctaaaacatagatattatttcacactctaatactaatgaaccaagggctgcttctttctatcggtgcgactaaccacatcctgttcacatcattcacccatcacagaatattatcccatatcacacccaccatagtatatatatacatgcatacacccctcttcgtcatcattaattactaacaaaccctctacatcactattcacctaccacctattccaactcaccatacaatttcgctactaccactgatcattcatcttctttattctaacctacaatccacgacaacacacctctaaatcctatatcaccctcatacataatataaaacaccctaccatacttcacttctcatcctt

SEQ ID NO: 326689 - DNA, 351 bp, Zea mays
cccacgcgtccgcccacgcgtccggtcctggtgctcgcctccgcccaaggccacggccgacgacgccatgctgcagcggttcgcgctggcgcccgccgacccggcgtctaactccatctccttcaacgtccgcggaaccagctgcagcggccggccgagtgcccgccagcgccgcggaagccggtgtgggcgcctccgctgccttcgacgcccgccaacaagcgcagcaggccgtctccgccctcctccgcggcgccggctcgccgggccttcttccccgtcgcgcgacctcaccaccgtgttctgctccctgccgcccaagaagcggatccgcgtggtgtgaccctggcg

SEQ ID NO: 326690 - DNA, 158 bp, Zea mays
ctacatcgatatactgacgatattcatgttaccttggagcacttctagcattaacaccttccagaggccgtcgacagtatttggccctgaagacattaagcggtccatcttgtcactgcagtacactggggaactcgctgcgctctttgagtctactg

SEQ ID NO: 326691 - DNA, 188 bp, Zea mays
tcggattcccggtcgacccactctctcttcatctagcctctaaacatacaaatatatttacacgacttctacgttcataacggtcgttttcttaactcggtgtcccataattattctctatgctctaacacatcattctcccttaccttcaaactgtcctagcatatacctacgcatcacaactctct

SEQ ID NO: 326692 - DNA, 364 bp, Zea mays
aataaaaacaaaaaaaactagaaaaaaaaaaaaaaaaaaaaaaaacacaaaaaaaaagggggggacaaatatacaaggcggggacggactcccgtcctgacggtgccttgcttccggctcgtgcctgcgaggccttgccttttatccaaggggaggttcgttgaatcgattgccacccactttacaacttcttgaccgggaaaacccttggtttaccactcttactcgcttgctaccacttacccttcttcctaacggtctttcacacaatctggctcgagccaagctcacttccctcctttttccccgcttatttcgccaatggcactccctttgctgcggttcctttagatcggagactggg

SEQ ID NO: 326693 - DNA, 76 bp, Zea mays
aaaaaaaaaaaaaaaaaacaaaaaaagtttattaaaaaaaaaaaaaaaaaaaacaaaaaggcggaaaaaaaaaaaa

SEQ ID NO: 326694 - DNA, 330 bp, Zea mays
aaaaaaaaaaaaaaaaaaaaaaaaaaaaaaaaaaaatatattacataaaaaaaactgacaggcaggtgtatactgattggatgaaaaaggtcgaccgatatcgaggacccacttttacgatccacgtgttgctacgcacaaattcgatgtataaaggcccctatattgaaaccaagttccaatgttttacacgtagttaaacatgaaaaccctggggaaacccaccttatttcccttgtaataaataccctttaaaacacttgttttaaaaactaaaagaccctcaacaatctcctttccaaacagtcttttcaacctgtttcgcaaatg

SEQ ID NO: 326695 - DNA, 116 bp, Zea mays
gtcgagcggtccgacaaaatctaaaactaataaatagatcaaaagcaaaaaatatagaggggccaatctaaaaaacgggtgcatacaaacaaaatggccagcctatattgtcaatt

SEQ ID NO: 326696 - DNA, 282 bp, Zea mays
cccactcgttcgaaaaaaaacataatatttatacaaaaaatactaaaataccaaatactagatgcgatccaatctaatgcggagcttgatgatcgcataactaaaactactatataccttccactacctctatgctaaaccagtaattccatcatataaagggctcctcatcacatctgggctccattttccatacgatcctcataatagcctgtccaccctattaccatgcccacttctcttatcttttcccctgtcttcaaaccatttgaacctcaaaat

SEQ ID NO: 326697 - DNA, 215 bp, Zea mays
acccgacaaagtcccaccagactcacctctacgtccaaacctatttttgacgctacaccatacctactgctgaacctaatgcactcttcgcggtcccttcaacacataacactactcttcccaatgcccccttctatttctacacactttctaacgtcgtaatctgacgatacatcccaaatgcggaaatcttaacacctattcctttatcatca

SEQ ID NO: 326698 - DNA, 76 bp, Zea mays
aacacacatccgaaaaaaataaccttatttcaaagcataatcaatacaaaatccagggggattcatacaaaaacag

SEQ ID NO: 326699 - DNA, 188 bp, Zea mays
ctagttctagatcgcgagcggccgccctttttgtaattgttggttaaaggttttttttggggggtatcaatatcttggttggtgtttattaattatgactctattcattttgtaatagccggtgggagtacaattatgcagctgtattgtctgctaaaaaaaaaaaaacagccaaaaaacacaaaaat

SEQ ID NO: 326700 - DNA, 285 bp, Zea mays
cccacgcgtccgctcacgcgtcctaaacaaaaaaaaaaaaaaaaaaaaaaaaaagggctgcctatatgcctgatcctgagtaacaagggcgctcctacgacatagatcttggtctatcaagggagctaacacaaattcactaactctttgatcaacaacttgtgaagagaataaaacgacaccatctcacaactaagttgctttgaaagtattcgctattctttcatgtgacatcacagagaaagcactcattcaagatgaactgaagaacatttatgaacaact

SEQ ID NO: 326701 - DNA, 302 bp, Zea mays
tcccactcgtccgtccactctttcgcacactcgttctctcgtccggtcgaaatgaagctgagaggctttcctcctcggcgggtagatcttcctgacttacccaactacacagatcctaatgtctctaacacccttacgtccatctaggccgtcctctagcatatgctccagttgctatcttgcattctattttacaggcttactgttattaactctcacacttgttcttctttcctatgtctcttcaactattacttatgacaaacctattaaatcatctgttactctcgtactataatcaa

SEQ ID NO: 326702 - DNA, 381 bp, Zea mays
cccactcatactcacatacactgatatccttaactgcctcatgagataggtctagggggggtgcttatctcaggggactggcgatgtatacaatcatacctatccatccgaccaagctggtgacgttgcaatctcttacgacacaatcgtgaaggtgattcacatcgcttacacattacaggtacaggagcaacctgctttcgacccagagtcaatgtgatattacataaaaagatacatcatgaatttgactgctgagtgctacacttatactgcacatgtcatgtcattggacatcgtcggtctaaactaatgcttaactagcaagctgttggaccttgaatccgtcgatcccgatagcttgaatgacgatacgctcga

SEQ ID NO: 326703 - DNA, 408 bp, Zea mays
ctcacgctcggctctcaagcacgcgcttggccctgctcgcttcttgtcgcgcgcgcaggcttgttgctcgctcggcttcctacctctctcttcccatggccggcttccagacccggctgcactccatcgccggccagtcgctcgcccatgccgagctcctggcgccggatcccctgtgagctttctccgtcggccatggatgccggtgagcttatcccttggtgccgcgagctcgctgtagagttttaagcacgcttcttccctgctgcgcagctccctcagcgttcctcccgtgcttgcgctcgcccatggtggctccctgtgctcggcgctccagctcgtccggccgcggcctcgtcgaactgctttgccttccatggccgcgtcaagcttgggaccctgcttgct

SEQ ID NO: 326704 - DNA, 378 bp, Zea mays
cggactcgtgtgaaaaacaaaaaaaaaaactaaaacaaaaaataaaaaaaaaaaaaaaaaggaaacaatcatgggagaaccaaacttacaaactcttacctacttcattaactactaccttatccaaccacctatatcttacttaccttacctccattatccacattatggactttgacttcccttaccttacccaatttattcgcttatacactatcaccctttatgatttcttgaatgacaacatctagtcccacacctaacaaccatccaaccatatccacgacatagaccttcattctcaccagaccatgtatgctccattacttcctctcgctttgccggctccgcccatgcctgacatatctcttcctacac

SEQ ID NO: 326705 - DNA, 418 bp, Zea mays
cggacgcgtgggcggactcttgggctgactcgtgggctgcaaaggattcagcacgccgcgggttgcgaagggagcttctaggcagccctacaccacacgtcaatcgggctggctgagacaatggcacagactcttggcggcgcgaacgcgactaactgatcctcccgccggcggccagcagatgctctggctgctagcatgcaaccttacttagacgcggcaacacattatacagctcaacatatcctagaccctctagatcaaatacatactccgaaatcacatatgtaaggatgaactactgcctcttatactaggggctatgactatagaatggcgatcattaggccattaaacatgacttgcttgacaacattctaaatgaagatctcgtcatcttaatgcaagagatcgatct

SEQ ID NO: 326706 - DNA, 389 bp, Zea mays
  unsure (1)..(389): unsure at all n locations
ctgactcttggtcaaactcttagactgactcatgtacgcacacgtgggcggactttcgggtggattantcaagaacaaaataactcacaaaattaacattaacactagatgcaataacaccctaaaatatgactgaatcgattcctgataagaaattcatccttaatatctcgaatcatgacttataagcatactgaaattatccattatacttatgattctctccaatgactttgcaacgtagatcaatgaacttgtccctgaataaatattatatctacaactatgttcatttactatcacctaaaattcatcatcgctcataatctaacctgtctcataaaattttgacctaacttacattccatattactagtttaactgtctat

SEQ ID NO: 326707 - DNA, 403 bp, Zea mays
cacactcgtgtgcaaacacttagcatgactcttatcctgactcgctggctaactcctaagcactctcatatgtaacgatcaacactcctctaccaatcatacctttgcgaccactatttaatctcaagatatctcaactctcttccaaatgtgacaataatctcttccgtattaaattctctacacttcacatgcaaagatattcttttctggaatcatattccaaacctattcactgtatatcttgaaccctcactttactcaccttgggtcctacaaactcggtctaattattcaacagcaaatgaaattgacatgctcaatactgaccaatgttttgatagtactgacccagttaatattccctgacattcagtgtatctgcatacgcccatgtttccca

SEQ ID NO: 326708 - DNA, 312 bp, Zea mays
cccacgcgttcgaggaaggggaggtacggtccggagacagcagcgaggagcgcggtgccggttcccgctgcggcagcgaaggcggcggcatcctggagggtgtatgaacgccacgaggacgaggacgaggaccagggcggtcgcgctgctgggccccagggcacgaggagtgcaacgaacaggagaaccgcatggagggagaagaggtaggggagtgtgaagagggggtgcggacgtaatgcggcggaggaagcggctgtggacgacactgggagagagtctatccgagtccgcggattgtggtgcgatcga

SEQ ID NO: 326709 - DNA, 157 bp, Zea mays
gcacattgcaagtaatgaattataatggtttatcactgacagattcgcacagatctttgagagcatgtactctcgacacaaagcgcatctcaagatcattacagagcttaaagcgtccgatactctcgttgctacactgcaaacaagtgtgcatcac

SEQ ID NO: 326710 - DNA, 308 bp, Zea mays
gcgggaaaacaggagccgtttatattacacggtttaaccgggtttatattaaactacatcagggattgtctagagtatttaaaaatgagcgctactacggaccaaatatattacgccatacaacctcctgacaattacatgggcatctaatcatctacatgggtagaactagagcgttaagaactagaagtcactgtttcgagtgaaaatgtactttgtgaagatgtaacttttttcaggaattgcaccattgccgtcatcaatcccaagagtgcttcattcttttgtacaaatgcttcaatcatata

SEQ ID NO: 326711 - DNA, 132 bp, Zea mays
ccggtggcactccataccatacgtattccatttttttatctcactttctacaatttacttctggggaactactggggcagcattaaccaaacatgtgaccattcattaaactactcacagtacgtcctccat

SEQ ID NO: 326712 - DNA, 351 bp, Zea mays
cccacgcgtccgcccacgcgtccgcccactcgtccgcccacgcgtccggccacgcgtccggcaacgcaaatctctgttatgctgccaccggccggcaaagtagtggtacactaatataatgctctccggtttgattggtggctcttgtggtgtgtgggagccacgtaatctttgcttggaagggaattgcgttgtacaatgatgaaatgggccgggtaatgcatgggactctggtcaagtatttcgagttaaaaaaaaaaaacatccaaatttaaactaatgaagaaataaataaaaggctaattccgtaaagttcttatcaataggtttacattctgaattgagttaatg

SEQ ID NO: 326713 - DNA, 262 bp, Zea mays
gtcacagtgactactgcctctacacgcgctctgaggatgagctgcggggacaaccagacgtcacctgggaccgcacctccgaccgcgcacaaggagctgcgcaatgtcgccgagcaagctgaccaggagaccaagaaggagctcacggcggattagcagatacctagacatgtgcctcgtacatctcaccatatactgtacgtatgataggctcaagatctagctccatgatcagcgaatcacatctgcaacaaatacaaaa

SEQ ID NO: 326714 - DNA, 381 bp, Zea mays
aaacaaaaactgctctccttctagaccttatacaaaaaattaaaacgagccaaacatggagaaatttaaaaactcctgactttctaaagcatccaaatttccctccccataccttccaatttataactcttttatagtgcaacctaaactaaattcacttgcccacattttacaactttctgaccggtaaaacccttacattacccaactcaatggccttgcctgacaatccccattttctaacttgcgcaaatgccaacacgccctaactcatcatattttccaacaattccccttccttaatgcccaatgatacacctccttttaccggtcattaaacaccttatgatcttggtgatacatctcaaaatttacctttac

SEQ ID NO: 326715 - DNA, 346 bp, Zea mays
gatatatacaaaatcggaagaggtcaaatgagggcttttggaaaacctattgctgtagaatacacatcatatgccggtgaaaccccatctttatctatgtctgtacaccacaactcgaaacaatatgctatcacaacactaccaactacttttgatcacggctttcctgctctgtcagaccctattacacatactgcgaactctattcataatggtactgggaacaaccatacacatgagaatcattggttgtctcaggatgagcctcactctgcagttcagttcacaggcatttaggcatctgttgatcaatatctatctgtggcatcactggaccaacctatgt

SEQ ID NO: 326716 - DNA, 302 bp, Zea mays
cccactcgtccgaaaaaaaaaaaaaaagattaaaaaaaaaaaaaaaaaaaaaaaaaaaaagaaaaaataaaaaaaaaaaaaaaaaaaaaaaaaaaaaaaaaaaaaaaaaaaaaaaaaaaaaaaaaaaaaaaaaaaaggacagacctaatctaaaaaaatccaaattttacttcccctttcttgcaaccaattactttttcttttggttcccctaatttaatttaactggcctgtatttaaaaactttttaactggaaaaaccttaactttcccaaactaataaaactttaagcaaatcccct

SEQ ID NO: 326717 - DNA, 339 bp, Zea mays
ccggaccaacccttccaacaatcgaatcgaatttcggagcccaccaacttctaaaccccttgcgggtcaatacaggggagattcaaggaacctcttaaggggcattaacaaggccttcttctaaatgccacaagacaaaaccctgtttagagaccctgttttactgcctcctgtggcgaaaaattatgcgaatgagaaagctttcttttatgactacaaaaaagaccacctcaaactcttccaactgtggtgtgctgatgcttaaatatacactatactggagtgatacaaactgatatatgtaagcttttgcatctcgagtcaatgtgaacaaacaca

SEQ ID NO: 326718 - DNA, 359 bp, Zea mays
cggacgcgtgggcggacgcgtgggttgccgtctcccttttgcgtgagcaaagaaagagggcgagaagagcagtcgccatgtctggcatcatccacaagatcgaggagaagctccacatggggggcgaccacaagaaggaggatgagcaccacaagaaggccgaggagcaccacaagaaggaggagggggagcaccacaagaaggacggcggggagcataaggaaggcatcgtggagaagatcaaggacaagatcaccggcgagcacggcgacaagtccggcgaccacaaggaaaagaaggacaagaaaaagacgaaggagaagaagaagcacggcgagggccacgaccacgaccacgac

SEQ ID NO: 326719 - DNA, 447 bp, Zea mays
cccacgcgtccggttggcttctcctccccctccggttcgggttcgggttcgtgaggttcgccggggttcggtttcgtgggtgagcggatcgagatggcggcgtcggatgttgagtaccgctgcttcgtcggcggcctcgcctgggccacggacgaccactccctccacaacgccttcagcacctacggcgaggtcctcgagtccaagatcatcctcgatcgggagacgcagaggtcccgcggcttcggcttcgtcaccttctccacggaggaggcgatgcggaacgccatcgagggcatgaacggcaaggagctggacggccgcaacatcaccgtcaacgaggcccagtcccgcggcggccgtggaggcggcggcggcggcgggtacggtggtggccgtggaggcggcggctacggcggtggcgggcgccgtgatggcggcggcggc

SEQ ID NO: 326720 - DNA, 459 bp, Zea mays
gccaaacagggcgactcacaactgttacaacgccaaaactgccatgtttctcacgaggcagacagggatcctactaaaggcattttttgtcacaaaaacatgctacgttcaaggaatgcactcctgctgagctagcggcctatgccttcaaaccagcaactgaaaccggaatatcatatgacaactaagcatcatgcatgctgctcagcaccatacctagacagacgctgcacgtttagcccaatctgcaaatcagaacctacagattctgcctgaattatgaacttctttccctactgcacttctcgatatggtgctcatcatgtgagtgaatcagatcttacttattgtcgattcgctagaagtgtgactggtaattggagtctataaacccgtgttaggcttcttacatacaactgttactacacccaagttagtagaacccttggactacttgcc

SEQ ID NO: 326721 - DNA, 156 bp, Zea mays
tccacgccacgcgtgtcgaccactcgtctccccacgcgttctcagaatctcataatactgatctcactgatccagtatgtctagggctaatggagacactccaagggtctctgcggcccatctgccaactctcgggctatcactcctctgcgctgt

SEQ ID NO: 326722 - DNA, 271 bp, Zea mays
  unsure (1)..(271): unsure at all n locations
cgtctaatggaggcatagaatgcaaatgttttatttgccaaacgtgaactaagtgattanaacactttctcatatgagaaactcacgaagtctttttatcagttactactttttgtatactcgtttgcttaatctctcgatattcattctccaatgattccatatcatttaattactacttgagttacttcattatacttttcctttccttttattggtaattattcatctttattttaacttattttgtattatttatcttctaattctt

SEQ ID NO: 326723 - DNA, 308 bp, Zea mays
cccacgcgtccgaaaaaaaaaaaaaaaaaaaaaaaaaaaaaaaaaaaaaaaaaaaaaaaaaaaaagagaaaaaaaaaaaaaaaaaaaaaaaaaaaaaaaaaaaaaaaaaaaaaataaaaaaaaaaaaaaaaaaaaaaaaaaaagggcgccctttataaagaaccaaagttaaattacccttacttccaacataaaacctcttataaagacaaccttaaatcaaattaattgcccattgtttaaaaacctcaaaactggaaaaaccttgacatttccaaatttaataaccttaaaaaaaatcccctttt

SEQ ID NO: 326724 - DNA, 351 bp, Zea mays
  unsure (1)..(351): unsure at all n locations
accacgcgtccggagtggaatatggcaaccaatgagtcggtgtcgtgtctcagcaactatacaaggcacttagcgagccttagatgggcaatgtggatgactgtatgggttggaccatgcaactcaatcagtatcggatcacagatatngccttgacaaatcccggattattacagctactgcgtgccatagtttttttttatggcagatccatcttgagcattatagactgtcccggtactacttgtagactaagacaaaagtgatcttactgatcttttgattaaaatctataactattaaataaaatgttgtttgcaccttaattaagtaaattttttacatttaata

SEQ ID NO: 326725 - DNA, 206 bp, Zea mays
agcatgttgaattaaattgattaatgtgatactctattactcgtaccatttatcataaggttctgtatgcgaaaaaaaaaaaaaaaagaaaaaaaaaaaaaaaaaaaaaaaaaaaaaaaaaaaaaaaaaaaaaaaaaaaaaaaaaaaaaaaaaaaaaataaaaaaaaaaatattaaaaaacaaacaagaatttatattcattcaaa

SEQ ID NO: 326726 - DNA, 180 bp, Zea mays
  unsure (1)..(180): unsure at all n locations
cggacgcgtgggcggacgcgtgggtgcacagataacttatacgctttatctatgcatggcnaactgggagcactcgagacagcagcagcggctttagttgagatgcatagataaagcgtataagttatctgtggtctagcgcgtacgtggaagcttgtggaggagcttggtgttgactac

SEQ ID NO: 326727 - DNA, 211 bp, Zea mays
tccttaattcccaggtctacccactcttcctcccactcttcctcccactcttcctttaaaaaaaaaaaccaaaacaaaatacataaaagaaacaaatacaaaaacaaaaataagcccctacaatttttcaacaaacccacaatatcccatcataacaacataccaaacttcttatctctttccaccctcttacccaacctccaccttttcc

SEQ ID NO: 326728 - DNA, 152 bp, Zea mays
cccacgcgtcctaaaaaaaaaaaaaaaaataattttaaaaaataaaataatatataaaaaaataaaagaaatatttaaaaattcaaacaataaaaacaataatacaaattactaaactaataaaatttatataatattatacaaatcttaat

SEQ ID NO: 326729 - DNA, 339 bp, Zea mays
tccttaattcccggatccacccactcatccgtccacacgtccgtaacacaacactatattactcattcataaacatatactcattactaagacatctgttaacttcatcatgacaaaaagcatttgctcatcccactatcattttcatatacaattacactccctaactacacaattatactctattatcaagaataacataccataactaagctatcatattctacataaatcgtgctatcctttcactataattatataccttacaccttcaatataataactacttaaatctttcttcatttactacataacaccatatctagattaaacctatat

SEQ ID NO: 326730 - DNA, 52 bp, Zea mays
aaaaaaaaaaagaaaaaaaaaaaaaattaaaaattaaaaaaaaaaaaaaaaa

SEQ ID NO: 326731 - DNA, 251 bp, Zea mays
atttattcttttatttattctttttatttttttatttttattttaattattaatttttaggttctagtatattttaattcttgtttagctcatcttacaacatcaatcaaatcactaacaaatcaaccacacaacccaaactcccaaaccaacaaattcctaaaccttaatcaaacacaacaaaataaaacatttatccaataacaaataaacaaaaaacctaaaaaaaacctaataaccaacaaaattac

SEQ ID NO: 326732 - DNA, 202 bp, Zea mays
tccacgcactcgtgaactcatctctttaacatttccacaatctatggaacaacataggattagtgggcttcatcttcaaacgacgataattgctgttatggctatcagtctgcacaaccattacctagttcatagaaaaaagattctgccaaaccaacatacagcaagacccattctacatcttgaatgcaacacttattta

SEQ ID NO: 326733 - DNA, 96 bp, Zea mays
cccgggtccacccaagccttccaaaaaaaaaaaaaaaaaaaaaaaaaaaaaaaaaatttaaaaaaaaaaaaaaaaaaaaaaaaaaaaaaaggaaaa

SEQ ID NO: 326734 - DNA, 245 bp, Zea mays
ccccctccaagccggctctgaaatttgaggcccaaagccccgttggcccccatcgccacgccgccggccacgccccagacgtaccccgccgccgtcgtcgtcttccgctcccttcgcgcgcagccctcgttccgccgtccgggtccgagcgcgctcgcttcttcttcccacgtcggacaggttaagtgtggcttcatcgcgtgagtagttgcagttagcgtggcttttcttcgtgcttgctcctg

SEQ ID NO: 326735 - DNA, 131 bp, Zea mays
cggacgcgtgggctagggtatccagtgggaagacgtgtagcctctagttgtacatgcatgtatgatgctgtgtagcaccgcatcatgcacaccacaccaatgcaaatgagttataaatgtttttaagctcc

SEQ ID NO: 326736 - DNA, 412 bp, Zea mays
cccacgcgtccgtccacacgtacgtccatgcatttgaacagctgcccatccaattctgggttgctgtccatccaacaagcgaattatggaccatgcatagatgttgtagctcgtcttattatgcatggctgactagatgcacgacaactacatcatggtttaccataccaaggtcatggagcatgtcctttgactcttagacggctagtgctccgaatcacctaggccaactgacagatgtcttttctctggaccataacgacttcgtcgagatcgagatcgatgacacgctggagatgctcaagcatctatgtcggtgaggtcagacatatcagcggcgaactgatccactttacgacaatcacgatgcccataatgacccatatcacgctcactgacctcaagtatttat

SEQ ID NO: 326737 - DNA, 105 bp, Zea mays
aaaaaaaaaaaaaaaaaaaaaaaaaaaaaaaaaataaaaataaaaaaaatccaaacaaaaaaacggtacattcaaaaaaataagctagaatataatgtaaccata

SEQ ID NO: 326738 - DNA, 295 bp, Zea mays
cccacgcgtccgaaaaaaaaaaaaaaaaaattttaaataaaaaaaaaaaaaaaaaaaaaaaggaaaaaatattaaaaaaaaaaaaaaaaaatacatataaaattaaaaatacatacataaatattaaatttcttttatatatagttatttaaatttattctactcttatttttattaacatttttttttttaaaccattcctaatctaaactttattaattttctttaaaatcatttttttcttattttctatatttttacattagtatattcttttctattttcttatcaaatt

SEQ ID NO: 326739 - DNA, 52 bp, Zea mays
gcgcagacacctgcgacgactctctcggactcatcggacaaccgctgcatct

SEQ ID NO: 326740 - DNA, 205 bp, Zea mays
  unsure (1)..(205): unsure at all n locations
aattacccgggtccggacccacgccgtctctngatcacctnncttcgcctaagctagggcctgccactggccanngcaggtgccaccntngccatctctggctctggcgtctcgcaagggcacacgacccggcccgtcctggcacacagtntnggccatggcntgaccanntagccanncgatggggcgctgctnnngaagcccg

SEQ ID NO: 326741 - DNA, 55 bp, Zea mays
cccacgcgtaacacgtacgcacgttttaacacgtgcttcaacaggtttattgtga

SEQ ID NO: 326742 - DNA, 51 bp, Zea mays
aaaaaaaaaaaaaaaataaaaaaaaaaaaatacaaaaaaaaaaaaaaaaaa

SEQ ID NO: 326743 - DNA, 169 bp, Zea mays
acgcccacgcgtccggtgcagtggattctcatgttccgtccaggccttctacaagcacgggcacggcgcgcaatttgtttagaaaccctccatccttctttcattcttaccacaattctctcatcgatacctgttccgactttttaatctcacttattccaacttgctt

SEQ ID NO: 326744 - DNA, 284 bp, Zea mays
cccacgcgtccgcccacgcgtccgctcacatgtcgggagcgataccactaccaataagcagcctatcgtttaatgttgcgatggcaccagtcgatataagctctaagtataccatgaaggcctaccgaggcgacagccgctcctactacgagtggagacccgtcgagatgtccatgcatgggcgctgcctaatcggagaagccgagctctctgtcgaccgcggaagcctcgcgcttggaaactactgctactcagccaaggtcgcctacgtagtctaaggcacg

SEQ ID NO: 326745 - DNA, 131 bp, Zea mays
aaaaaaaaaaaaaaaaaaaaaaaaaaaaataaaaaaaaaaaaaaaaaaaaaaaaaaaaaggaataaagaaaaaaaaaaaaaaaaaaaaaaaaaaaaaaaaaaaaaaaaaaaataaaaaaaaataaaaaaaa

SEQ ID NO: 326746 - DNA, 55 bp, Zea mays
gggccgacccacgcgtacgcccacgcgtacgcccacgcgtccgcccacgcgtccg

SEQ ID NO: 326747 - DNA, 52 bp, Zea mays
acgctcacgctaccgcatatgatagatattctttttctcatcagcaatttaa

SEQ ID NO: 326748 - DNA, 192 bp, Zea mays
cccacgcgtccgagagtgtgtgtgagagagaggatgggtggcagcggcagggctgctctgctgctggccctggtggtggtggccgtgagcctggccgtggagatccaggccgacgccgggtacggttacggcggcgggtacaccccgacgccgacgccggccaccccgaccccgaagcccgagaagcccccc

SEQ ID NO: 326749 - DNA, 465 bp, Zea mays
cccacgcgtccggcaagtctgcctccattggttccgtggaggagttatttgaagaagggtctgcaatgctagaagaaaggtatgcttgctcttccaatgttccactgcattcgtcttgtgttaatttctgtcagtatcattttctctcgttttcatcttgggtttttggccctgtttggcacagcttattttcagcttcttcacaaatttaagcagaagttctgccaaacagccagcttctacagcagcttattagttcagctgcttctcagaatacactaaaagcagccaacaagcagaagctgcctttcaccagcttctcagataagctgctttttcaacaagcagcagttgtgccaaacaaggccttttaatgtacatataatgtgtgggatggtaagatactagcatgctaccttgagccttgtcattttcttagcatatctggacaggcttgtttatttc

SEQ ID NO: 326750 - DNA, 67 bp, Zea mays
aaaaaaaaaaaaaaaaaaaaaaaaataaaaataaaaaaaaaaaaaaaaaaaaaaaaaaaaaaaaaag

SEQ ID NO: 326751 - DNA, 125 bp, Zea mays
acgcttacgctaagactgactccattgttcccgtgaatcaactatttcaaaaaccgggggtacggctcgaagcaaacgatcctcaggctctcactgtcccacccgatttccctcccggttatttc

SEQ ID NO: 326752 - DNA, 185 bp, Zea mays
cggacgcgtgggaaaaaaaaaaaaaaaaaatataaaaaaaaaaaaaaaaaaaaaaaaaaaaaggaaaaaaaaaaaaaaaaaaaaaaaaaaaaaaataaaaaaaaaacaaaatatttaaaaaaaaaaaaatatataataaaataaaataatatatattaactttttataattttttacctatttaa

SEQ ID NO: 326753 - DNA, 310 bp, Zea mays
cccacgcgtccgcggacgcgtgcggttactgtcgtgacatgttcagcggcgcacgagacatatgatataccatgctcaacctagtagcgtgtgcaggatatggccaataattgcactggatctgatcatacagataatgataaagaaaggctcgctccactaatagcttattggagcactttactagacgttcgcatatctcgcgaccattaaagggtaatatctatcacatcatcacaactagtacgccatactgagtgaaagatagcatgatcgctttgcattaccagtactgcgcctgactcgctta

SEQ ID NO: 326754 - DNA, 83 bp, Zea mays
cccacgcgtccgaaaaaaaaaaaaaaaaaaaaaaaaaaaaaaaaaaaaaagacaaacagtgtaaagggtccaaagcttacaaa

SEQ ID NO: 326755 - DNA, 263 bp, Zea mays
tacctccctctttctatctccccctttccaacatgacctcctgctagctcccgtcagaacgcctcccagatcccagactcatctctctaccccactcgaacgaaagccggcgctcgacatgggagggtgccacgcgaaaccgctcacgcaggacgcggactgctcgccgtcacacgctgcgccttcgaccccgcccccgggcaacgctacccccggccccgggaaaaatcacttttcggtgtccccgttcttcgcgttctcca

SEQ ID NO: 326756 - DNA, 432 bp, Zea mays
  unsure (1)..(432): unsure at all n locations
actgcgccattggccagctagagccggccagaagagcttgcagttactgagagtgtgtggganagagaggatgggtggcagcggcagggctgctctgctgctggccctggtggtggtggccgtgagcctggccgtggagatccaggccgacgccgggtacggttacggcggcgggtacaccccgacgccgacgccggccaccccgaccccgaagcccgagaagccccccaccaaggggccgaagccggacaagccgcccaaggagcacaagccgcccaaggagcacgggcccaagccggagaagccgcccaaggagcacaagccgacgccggccacgtacaccccgagccccaaacccacgccgtcgacgtacactcccaccccgacgccccccaagccgacgccacccacatacacttccggccctacgcc

SEQ ID NO: 326757 - DNA, 157 bp, Zea mays
cccactcgttcgaaaaaaaaaaaaaagattaaaattaaaaaaaaaaaaaaaaaaaaaaaagaaaaagtaaaaatgaaaatatagaaaaaataaatattaaatcataatcaattaatataatattaaacaaaaatttaatcaaaatatataaattaaa

SEQ ID NO: 326758 - DNA, 266 bp, Zea mays
aacaaacaaacaatataaaaaaaaaagactacaaaaattatactaattatcatcgggaagcgcacattcatacagggtcgatacctaacttatcacttcacatcaatgactaatactgacacatcactttacatcatgcatcatctcttaaagataactctactcctataactctaactgacatctccagacaatccctctttaacatattatcagatgctacccaaacagccactctacctgatcggccattaaatccgtctcta

SEQ ID NO: 326759 - DNA, 426 bp, Zea mays
ctccgaccaccttccccgtttcaattcgggtcactccctgcagtctccactcgccgctcccgcgaccccagagctctctctcgctctccctccctcttcctagctccccctttccggcatggcctcctgctagctcccgtcggaacgcctcccagatcccagacgcagcgcgctaccccacgcgagcgaaggccggcgcgcgacatgggagggtgccacgcgaagccgctcacgcaggacgcggacggctcgccgccgcacgcggcgccggcgaccccgcccccgggcaacgctacccccggccccgggaagaagcactgggcggtgtccccgttcttcgcgttctccacgccgagcccgagccccgcgcaccacctcttcggcggctccgcggcgtcgccgcgcaagtcccccgctcccccgggc

SEQ ID NO: 326760 - DNA, 235 bp, Zea mays
ccagcgtccgaaaaaaaaaaaatagaataaaaaaaaaaaaaaaagggctatcgtctgggggatcctatcttaggtccacgctcatgcacacttgtatgctgattatataatgtctcctatagttacacctactgtccatcgatttacacctcgttttactgcgaaatcactggcaaaacccatgttaatcgcatcttaatacatcttgcatttcatcatctgtttgtactacctg

SEQ ID NO: 326761 - DNA, 61 bp, Zea mays
aaaaaaaaaaaaaaaaaaaaaaaaaagaataaaaaaaaaaaaaaaaaaaaaaaaaaaaaag

SEQ ID NO: 326762 - DNA, 430 bp, Zea mays
aaaaaaaaaaaaataaaaaaaaaaaaaaataaaaaaaaaaaaataaaaaaaaaacaaaaagagaaaaaataaaaagtaaataaaacaaaaaataacaaaaaaactggttctcccctttaaaggtctcagatttacttccccttacttcctacgcattctcttttttttattgccacataaatctatttacctggcccttttttaacaccttctcatttggaaaaaccctggttttacccaattatattgcttttaaaactattcctttttctcctattaccctaatactgaaaaaccctttcccgatcgatattcccaacattttggccccctaaatgcctaatgtgacgccccttttcacctcatattaatcccatggatccttcactttacacctaaccttaccatttcctttgccttctccttatac

SEQ ID NO: 326763 - DNA, 434 bp, Zea mays
cccacgcgtccgcccacgcgtccgcgcacgcgtccgcccacgcgtccgcccacgcgtcgggtcttcttcagcaaggagcagggccctcgccaaattaggcacagcaccttcaagcacacacaagttccgatgctttcacaaagtccaagcaccaaggataactagggaatggaatccactttggacccgatcatggacttggaaactttctctatgccaccaagcatctaggctatcatcagtctgagcacattagcctagcacccacttgtgttgaaatctttctctataacccaagttatgatgtattgaaaccttttttcttataggtatgagtgaccaagaggtagcagattatatgaaaagtttggcaattcgggtttctggttttgatgtgccaaggccaataaaaaactttgaggattgtgggtttc

SEQ ID NO: 326764 - DNA, 302 bp, Zea mays
ctcagacctccatccctcaagaaacgagaccttacatatgataccactccttaacataaaacaaacgcttaatcaacaaaaacaacactaatcacaacaccctgatcatcccctaaattacacatctacatcaaaaaaatgcaccttaattacgacaatataacaactgtaacttgatcccgttccatataacattacacctcaaccattaatgcataaccataacattcattataacaaagatcatcaacctatttcctttacaaatcctacagtacatcacctcataagaccaatcccta

SEQ ID NO: 326765 - DNA, 134 bp, Zea mays
cccaagcgtccgcccacgcgtccgagaataaataaaaaaaaaaaaaaaaaaaaaaaattgataaaaaaaaaaaataaaaaaaaaaaaacaacaataaaaaaaacataaaaaaaaaaaaaaaaggtcggcctttt

SEQ ID NO: 326766 - DNA, 381 bp, Zea mays
gttctagatcgccgcccttaccatttttgtttacgttttataatattctgtcacagtcctgggttctgtaccgtaatcttatctgtctctgttgctcaattctattgtgcacacaaacactttgctctattctcttctgcacacacacacacacacctcatagagcgaccagatcaaatcaaactataataacagtagttctagtcttgccattctacatagaaccagcttgctcagacctctcggcgcacacaggcaaccgcaccgacgctgtcgccgcctcttcctctgcaaagcttgaggccttgctgattaagccacggatattgaacatcgactggcccgcgtcaaagtcgacgatcgccgatgcgagaagtttct

SEQ ID NO: 326767 - DNA, 141 bp, Zea mays
acgcgtccggttctagatcgcgagcggccgctcgcgatctagagggacgcgtgggcggactcgtggtataaacaaaacttactactcgacgtcactgacagtgtcaggtacaacagaggtatacaaaaatacataataact

SEQ ID NO: 326768 - DNA, 279 bp, Zea mays
cccacacgttcgcccactcatcctccgcactcgtacaccagaagatactttgatcgctacgagcccttatacgcgcagagctacaccatatatcatacatactatatatatccaacatgcctttacacatacatatctataataataacccccattccttaacacgcctaatccactaacaacacatcctcctccacactactgcttcaccactaactagttatctccaaaaaggcctctccactaatactcacatatccttgctacacgccacacccc

SEQ ID NO: 326769 - DNA, 432 bp, Zea mays
gcttcatagctttctcatccagtatctcatgcataaagaagctcggacgtcatgtccctgatgcagcgaacaccaattcaccagttcagcgagcattgtggctactcttggatctggagaatctcatgcctctttatatattatggatctttctgaagctgttgacttggcaatcggaccatggactacctacagagttcattcacttgatcgaacaatgtggacagctgattgtagttctgatggcacacatgcagctttcggttcggaccttggtgctggtctgatcgatttggaaacaaggggatcatcgtgggtatgtcgttctaaaagcgacattctttccctgaaatttgtgcactcgggaaaagttgtgctatgtgggctacggaatgggagtatagcccctggtgatgtacggcaaaaacagca

SEQ ID NO: 326770 - DNA, 239 bp, Zea mays
aaaaaaactaaataccataaaataaagctaaaaaaaaaaaaaactaaacaacaaggactagacataatcaaaaaaaagagtaaccaatactataacacccaaaatacaccaaactaaatagacttgaccctttgatcaacccaaccttcattctcctctactccaacttctaaaccacctataccaacacgtacaccaataactctgatctcctcatacttactccactgccaataaac

SEQ ID NO: 326771 - DNA, 140 bp, Zea mays
tcatactgatcttcctactaggactttaaaaaatgtatacaactctaatttacttacatataagattggtgttacattaaaaaaaaggtattaataataaaaaaaaaattatacataaatataaaataattttaatacat

SEQ ID NO: 326772 - DNA, 289 bp, Zea mays
cccacgcgtccgaaaaaaaaaaaaagataaaaaaaaaaaaaaaaaaaaaaaaaaggaaaggaaaaaataaaaaaaaaaagggaaaaaaaaaaaaaaaaaaaaaaaaaaaaaaaaaaaaaaaaaaaagggcggccgttttaaagaacccaagttaacctaccctggcttgcaacgtaaaacctcttttataggggcaccaaaatcaaattaattgcccgtcttttaaaaactactgaactggaaaaaccctggctttccccaactaaatccctttgaaacaaatcccctt

SEQ ID NO: 326773 - DNA, 209 bp, Zea mays
gggacacgttggttgaatatcggagggaccctgtggaaactgcacttgtgatgaaagagggagcaagacacactctgaaatgatttcacgacgaagcccggcattctataattagcatccttgaaaggatgatggctatcattatcgatggaagattcctgatgtacgcaatcgaccgaactatattggacagactatgtgcactgagg

SEQ ID NO: 326774 - DNA, 375 bp, Zea mays
gccacacgatcctagattaaccgatggtcctgctcatgactagaaccaagctgatcgtgggggctggatgcgcccacaaacactaaggcgacctagacagcatgacgatgaccatgttccagaaactgctaaggcacctgaaccacatcataagcctaagcaactatctacacctacgacgccataatggacatcggaaggacactgacgacgatcagcaccaccatggactagcagacgctcaagcactagctttgcagataatacgtgctgacttacaagcaaacgctcagaggatgtgcaactgatatgcgaagaccagctactagagatactgaccaatgagagacacttgacagacagaaccaacctact

SEQ ID NO: 326775 - DNA, 194 bp, Zea mays
cccacgcgtccgctcacgcgttcgatgactattgtggaaattgcacgtgggattaaaaatgcagcaaaacaagggtctgcgatgattagaagccgaacttacgtactctttaatgcgcccccatagctggaatatggcgtcacactattgaaggtaaatggctaatgtacgcacaacgaccgaactgtggaaaa

SEQ ID NO: 326776 - DNA, 375 bp, Zea mays
tcccgttcgacgacgcgtccggggacgcgtcggccactcatcctcacaggatgctacatcttttataacacgcagacatagagctatagggggttgtgcagcacgagataatgatgactacccctagacgagctgcctaaggtgctgaacgaacgaaacttacaacatgctaaccttcttggtctacctaataaccaccatgctgctaatggcactaacgctcatcatataactctcgagtcaggattaaattgtgtatgccacccacactggtacatccagagcacttatgccacaaatcgccaatgcctttacgaaagcctgcactgcctatgcagcaacattgcgagacacgcttacatatcacatgccaac

SEQ ID NO: 326777 - DNA, 131 bp, Zea mays
aactgggttttctacaatcctcctgggatccatactggcattctttctatgctgttggactgattgtaactaaataccgaaccactgacatatcaaaatcccaatactatgctgcctacattaattccatc

SEQ ID NO: 326778 - DNA, 244 bp, Zea mays
tcgaagaaaacatacaaaaaaacataaaaaaacttaaaaataaattaaactaaaaaaaaaaaagggaaaaaataagggaacctgcctccgttttaaagattcctaccttactatcccttacttccgccactacagatttaacacacggagacgttaataaagttacttgccctccgatttataacattactactgtgaaaacccttgctactcctaatttaatctactatcagaaaatctccct

SEQ ID NO: 326779 - DNA, 160 bp, Zea mays
cccacgcgtccggggattttcattctcctaagcaaaattagttcatttgcttttgtgaggataggttggaaaaatggtgttttcaaactagcccttagataaaaaaaaaaaaaaaaaaaaaaaaaaaaaaaagaaaaaaaatataaaagatacaagaaaa

SEQ ID NO: 326780 - DNA, 262 bp, Zea mays
ccaacctaaaaacgtaacccgatttttaccatgattttacacatccctaaattgtacgctaatcgtatgaattaaaacccacagaaagccaccaaaaaacacacaatatccacttcctattcactccctcaaccccccctcaaactaaaccccatctccctttcaaacccactcgaatgtcaatgtaaacttatcaataggaccctacactccacttcatacatgcccaccactccaacttaccatccaaaccttctcctca

SEQ ID NO: 326781 - DNA, 193 bp, Zea mays
attccctgtcgacccactcttcctaaaaaaaaaaaaaaaaaaaaataaaaaaaattaaaaaaaaaaaaaaaaaaaaaaaaaaaaatgaaaaatataaaaaaaaaaaaaataaccaaaaataataaaataaaaactataaaaaaaaaaaataattatactattttatactatccaatcttactttctctttcat

SEQ ID NO: 326782 - DNA, 354 bp, Zea mays
ggctcacgcaccagtaccgctcgcgctggtacccggagcacttcttggaggcgacgacggcgcacgcggagcatggacccgcgaggtccgctgaggcggccccctgctacgaccggttccccttggacgacatcgacgatgcgtgcgagctgcggtggtgatcgtcgtaggaggcggcaaaccccgcggcgtcgactacgaagtagcgcgaggcggcgctgcgcacggcaacgacggccgcggagaagagcacgagcccgacgaccgacgcttggatcaccgccgaaaggtccagtcccaagcccgcgcccgcgcccgcgccaccgtcttcggtgccgacccccagcatctaat

SEQ ID NO: 326783 - DNA, 250 bp, Zea mays
aaaaaaaaaaaaaaaaaaaaaaaaaaaaaaaaaaaaaaaaaaaaaaaaaaaaaaaaaaaaagaaaaaaaagggaaaaaaaaaaaaaaaaaaaaaaaaaaaaaaaaaaaatacaataaaaaaaaaaaaaaaataggttgagtgacaaggggtccaaacattcaaccaacgattttctaagatgtacaggacggtatgaagattgctaaaagaagagatattcgcccctgtgcaaacgatcctcatggtaaa

SEQ ID NO: 326784 - DNA, 263 bp, Zea mays
cccacgcgtccggacccacgcgttcgaccacgcgtccgctcactcgttcgcccacgcgtgcgaaaaaaaagagaaaaaaaaaaaaaaaaaaaaaaaaaaaaaaaaaaaaaaaaaaaataaaaaatataaaaaaaaaataattaacaaaagcaaacatatgataatattaaattctcattttaaacctataaatcataattcgtggcagacaatatataacctcaattactgttaaaacaaataacgatcacaaacttaatcaa

SEQ ID NO: 326785 - DNA, 285 bp, Zea mays
gcggcactcatcctaaatacaacgatcacacccctggcggttgatgacatgctgaccagcgacttattagataaaccctctcccacctagcaatacctatctcataccatcaacgctctttaccccaacttcctgtgctgaactcagatcaagtggtgcatccacacctccctctactgcagcaccgcactccataaccagatcatattccactttagtttcaccccaaaccctccaaacaatcgcgtcgagaactccattatcccacaatctctatataaccat

SEQ ID NO: 326786 - DNA, 357 bp, Zea mays
gagacgcggagcagccgcagggccaccgacctcgccgccggtcgacctgcatatcctgggcgctgcctgtggttgatctttggaataatcaacatgatcctggtgggcagtgccggtgcgggtcaaagctctgtgggccatctttaccgaagcagcgagcccgccaaaccaaccatggcaccagctgtaagtgctcgacgtgctgagaaaccatatggtgccaagactgacgcgggcaagcacgacgctgctggaggtaccaaccaaagcaatagctaccacaaggctgatgggcagaacactggcaagttgcatacagaccgtcctgtatacaacgtgcacgctggtgctggcggt

SEQ ID NO: 326787 - DNA, 257 bp, Zea mays
atctcctaccatcctacagctttcacccagcatttgtgctcccgtatccttggtcatccccagacccacttccgcttcgtatcctttccctctctgtctaaaccacaacagcctcttccagcataacaatattcacctaatattcagctcatccgctctcctataaaaacgaaacgcaaatccaaaaaaaaaaaaaccccttcctcacgacacattgtccgctcccttttgacccatgatatatctctcttggatct

SEQ ID NO: 326788 - DNA, 245 bp, Zea mays
ccggcccttccgtccacgcgtgcttccgctcttgtcctcattattgctatcgccgagcgggtcttcttgggtgaccacgcctccgcgcatcatcgcgtctccagcatcatcaccccgcccatgttccatagcattctcatccaccgccacaactgcggtttccattgctccttctacacctaccacgcattcatacaagacatcagcaacttcccaaacttctttaccaccgtctactagcacac

SEQ ID NO: 326789 - DNA, 318 bp, Zea mays
attcccttctcgacgcactcaatcgcccactccttctctctatccttccacactttatatctcctctactacaaagcatctttgggcacctttctaatcttttaacatatttgccatcccatccaaactcctcatcttacaatttcttcctcacatatcattcctgctataccctgccttccaacctatattatagacttatccccactttcaacctactgactatgttaaataacgtcaaaaccacttctatctcacttacacctctattctcccacttatcctacaactttctaatcattttacacaatcttacta

SEQ ID NO: 326790 - DNA, 326 bp, Zea mays
cccacgcgttcgcccacgcgtccgagatcgcgagcggccgttctttttttttttttttttgtttttttgtggcaaagaaataacaagcatatttataagaatatccattttggcactggaatttggccctacttcagtttactaaattatgatctgccacttcatgtcactcctgtcctgtgtacattcatcaagaacaagatgcagaagaacgaaccttaatctatctatgtatgtaaagcctaaactcccacccaaattaacaatggatcgatcaattggagtccaaggcaatcaatggtaacagcaacagttctatatatact

SEQ ID NO: 326791 - DNA, 318 bp, Zea mays
ccgtctccgacctacgcgtccgaacaaaccaaacaaaaaaaaaaacaaaaaaaaaaacaaaaaataaaaaaaaataaaaaaaggagaaaataaaagaaaaaataaaaataaaatatatacaaatacaacctaaaattaaaaacccttcaatataacttccttgctccattcttaaattccctaacttctatcaatttccccattttatacatcaaccttctttaaaaaaaccttcctattccctaacccttttactttcataaaacttcccctttcccctcctttttatctttaaataaattccccttttaacaaatt

SEQ ID NO: 326792 - DNA, 343 bp, Zea mays
ctcacgcgaccatgatgcagaccatgatagatggataactactcttaagagtcctctaggcgtatatcaattcggatatatacaaatacatacagaaatgcaagcatagaggataggctcatggcttggctcattgctttggaaatagacatggtacatgccataatacataacaaggaacaggagagccaactgaatagccagatgcatgtaaggatccataagagatcatagaagagatcatcttaatagcaagcttatctactagaatttctagattcattagatgatcgattacataagataatacgtactattctaagttctatacaatagcctgaag

SEQ ID NO: 326793 - DNA, 198 bp, Zea mays
aaaacacaataaacctcacataaaaacaaatcaaacaaacaaacaaaaaaaagccaaacatgcaaacactaaaaaacaacataattaacactcctattacaccacctaacaatcatatcactaaacctcacccaacatcataactaacatacaaaacccacctacttaccctacttaaaccatacttaattacatccc

SEQ ID NO: 326794 - DNA, 281 bp, Zea mays
cccacgcgtccggcgaaaaaccttctttttcaaacaaaacctcgataaaagcggagaccatctaacgagaccggcaggccttcttaacagaaccctcaaacccaacaaacttcggacctaacaatgtcatacaccccaaacacccccgcaacaccaacacctgaagccaaaacgaagagccgaaccccactagatacccacacaatacctaaaaccacggtaaacgtagcggctacatcattacccaccgaagctcccactcaacctacacccatcacaac

SEQ ID NO: 326795 - DNA, 193 bp, Zea mays
aaaaaaaaaaaaggattttaatttttaggaaattaaaaaaaaaaaaccaaaaagggaaaaaagaaaaagggccaaagccccctaaaaaaattaattttttaacccccccccccaacaacaaaacaactaaaaaaacaaacaaaaaaccaaaaaaactaaacaaaaaaaaatacatacaaaaaaccaacacacc

SEQ ID NO: 326796 - DNA, 226 bp, Zea mays
aaaaatcaccgggactgtttcggaaccctagccctacccctaccgccattcatgcattctctgagctcaactctatctcttcaagctctgtatcatccctatcctgattaagattatctccatactacatcaacagaagggggacaaggtctacaccaccaaaagagtacctcttgggtccaacgcatctgctcacccactcgttctacctgatgacaagtactct

SEQ ID NO: 326797 - DNA, 272 bp, Zea mays
aaaataaaaaaaaaaaaaagaaaaataaaaaaaatataaaaaataataaaaaaaaaataaaaaataaaaaaataaaaagaaaataaataaaaaaaatattaaataaatagaaaaaaaatataataaatataaaaaaataaaaataaaaataaaaaaaatataaatataaaaataaaaaaaaaaaaaaaaaaaaaaataaaaataaaaaaaaataaaaaataaaaaaaaaaaataaaaaataaaaataaataaaaaaaaaaaaaaaaaaaaaa

SEQ ID NO: 326798 - DNA, 346 bp, Zea mays
  unsure (1)..(346): unsure at all n locations
aattcccattcgaccgcactcaaactcccactcttcctaaacttcctaacttctcttctctttatcgtantaaattttacaatctggggaaatctataacagaggctcatactccttaaccatcataagctcgatcatcaacaaaatataactactttgtacaccatcatgactctataagtatacatgatataagatcaatatatacttcttttatgataacatatcatgttccttctctatttgttatcactgataattctctcaattcatcaaaccatatatctcctttatctattatcaaactatccataaacaattctgcaaattttcaacaaattaatac

SEQ ID NO: 326799 - DNA, 277 bp, Zea mays
aaaaaaaaaaaaaaaaataaaaaaaaaaaaaaaaaaaaaacaaaaaaaaaaataaaaaaaataaaaacaaaaaaaataaaaaaaaaaaaaaaaaaaaaaaaaaaaaaataaaaaaaaaaaaaaaaaaaaaaatataaacaaaaaataaaaaaaataaaacaaaaaaaaaaaaacaataaaaaaaaaaaaaaataaaaaaaaaaaaaaaaaaaaaaaaaaaaaaaaaacaaaataataataaaaaaaaaaaaaataaaacaaaacaaaaaaaaacaaa

SEQ ID NO: 326800 - DNA, 270 bp, Zea mays
aaaaaaaaactagaaataaacaaaaaagacaaacaaaaaaaagaaaaagtttaaaagcaaaaaaggcccgccaaaaaaaaaaacaaacaataaaaacaaacaacaaaaaaaataaaccctataaaaaaaacaacaaacaaaataatcaaaaacaaaaacaaaaacacccaaaacaaaaaaaaccaaaaataaaacacaaaaccccaaaaaaaaaacaacaacaaaaaaaaaaacccaaaaaacccaaaaaaaaaaataacaaaacaaaaa

SEQ ID NO: 326801 - DNA, 69 bp, Zea mays
cggacgcgtgggaaaaaaaaaagaaaaaaaaattataattaaaaaaaaaaataaaaaaaaaaaaaagga

SEQ ID NO: 326802 - DNA, 357 bp, Zea mays
gcgctgaagaaggacgtgttcgtggcgttccccaacgtgctgggcttcgtcttcggcgtcgcacagatggcgctgtacatggcgtacagcaggaacaggaagcccgcggcggcgctggtgatactaccggagcagtccaaggaggaggcggccgagggcaaggccagctgcggcggcgccgaggtgcaccccatcgacatcgcggaggtccacgacctgcaggccgtggtcgtcgacgtagacgtggagcctgtcacctacgccgctgcgtccggtatggtcgacggcagtgtcggcaggcctagggcgccggagcagctggtgatcaagcccgacatggtcaccgtcattgcggcg

SEQ ID NO: 326803 - DNA, 160 bp, Zea mays
aaaaaaaaaaaagaaaaaaaaaaaaaaaaaaaatgacaatcgataatacaatgatacaagctcaaagactcgggcatccaacatcctaggtcttacatactgtaacgtaaaaccaaatcactgttcagtgacctacaatatacaaactggtaacaaccat

SEQ ID NO: 326804 - DNA, 64 bp, Zea mays
aaaaaaaaaaaatgccttgtggtggcaacaccttctatttcagttaactctctataactaacaa

SEQ ID NO: 326805 - DNA, 168 bp, Zea mays
aaaaaaaaaaaaaaaaaaaaaaaaaaaaaaaaaaaaaaaaaaaaaaaaaaaaaaaaaaagaaaaaaaaaaaaaaaaaaaaaaagaaaaaaaaaaaaaaaaaaaaaaaaaaaaaaaaaaaaaaaaacgaaaaacataaaaaaaaaaaaaggctagaatgcactagcatt

SEQ ID NO: 326806 - DNA, 85 bp, Zea mays
cccacgcgtccgcttttaaaatgaaataaaaattaaaaaaaaaaaataaataaaaaaaggagaaggttaaaaataaaagtaaaga

SEQ ID NO: 326807 - DNA, 149 bp, Zea mays
ctcttcctaaaaaaaaaaaaaaaaaaaaaaaaaaataaaattaaaaaaaaaaaaaaaaaaaaaaaaaaaaaaagaaaaaattaaaaaaaaaaaaaaaaaaaaaaaaaaataaataaattttaaaaattattcaatctaacaaatacaaa

SEQ ID NO: 326808 - DNA, 436 bp, Zea mays
cccacgcgtccgcccacgcgttcgcccactcgttcgcccacgcgtccggagaaaaagagctacttcgcgcgtagaatggaacggttgcgcagtactaaaatatggaggcttctattgtacccatcctactaggaaattatgagccagttgatgaggcatgaattatttcacgacttggccgcggttagtgtgaaaaggcgacgctgctatatatggtcatcacccttggtttgtccggtcgccagatatcacgattatcatatttatcggttgtaatataagcttcttgtattagcatatggtttaatattttttttcaaatgggatgaagtcctgcgtgatatcctatctgtaaataggaaggcactagcagatcttgaccaatgtacaactggttttttttttgagaaacttggaataagaattattggtcacc

SEQ ID NO: 326809 - DNA, 424 bp, Zea mays
gctggcttctcctccccctcttaccaagtcctcttcgggttagggttacttagggttttgtggaggggcgatggcggcggctgatgtggagtaccgttgcttcgtcggcgggcttgcctgggccaccagcaacgagtcgctggagaatgccttcgcctcctacggcgagatcctcgactccaaggtcatcaccgaccgggagacggggaggtctcgcggcttcggcttcgttaccttctcctccgagaactccatgctcgacgctatcgagaacatgaacggcaaggagctcgacggccgtaacatcaccgttaaccaggcccagtcccgtggcggtggcggtggcggcggtggctacggcggcagtcgcagcggcagcggctattgtggcgggcgccgtgacggcggttattgcggcggtggc

SEQ ID NO: 326810 - DNA, 60 bp, Zea mays
cccacgcgtccgcccacgcgtccgcccacgcgttcgcccacgcgtccgcccacgcgtccg

SEQ ID NO: 326811 - DNA, 211 bp, Zea mays
aaaaaaaaaaaaaaaaaaaaaaaaaaataaaattcaaacaaaaaaaaaaaaaaaaaaaagggaaagcaaaaataaaccaatattagagaatccaaaccaaaataatccaacatataaaatcttatcatctctactatttccccctactgcaatgcactgaccaacttcttacaatttgtccacttgttaaacctctactttacccaactta

SEQ ID NO: 326812 - DNA, 317 bp, Zea mays
gccacgcttccgacgcttgagctgacgctgggtcagcacgtatatggtcagggccggtccgtccagcttgggagaatatatcggctatgtcaaggatgcgatatggtgatgcagtaaaacttatgtaatgcttgaggatgcttcaaatgggttttctagtgctggaacttaccatttcaagtctgaccctgtccaatgcacccgcaaagtgaggtcgacgtgcagctagacttgacacactttctgcttttctagcttatttgtgtgctttggtttcttctatttcaagagaccgaagcctaaatcaactgaacacc

SEQ ID NO: 326813 - DNA, 176 bp, Zea mays
taaaaaaaaaaaaaaaaaaaaaaaaaaaatttttaaaaaaaaaaaaaaaaaaaaaaaacaagcaaaatttataaaaaaaaaaattaaataaacataaaatacaaaaaaataacatattctttaatatcaacctaaattctattcactctcctactttaaacaacattctctatttc

SEQ ID NO: 326814 - DNA, 410 bp, Zea mays
cccacgcgtccgaaaaaaaaaaaaaaaatttataaaaaaaaaaaaaaaaaaaaaaaaaaaaaaaaaaataaaaaaaaaaaaaaaaaaaaaaaaaaaaaaaaaaaaaaaaaaaaaaaaaaaaaaaaaaaaaaaaaaaaaaaaaaaaaaaaaaaaaaaaaaggggcgccctttttaaagttcccaattttacttccccttccttccaaatttaaattttttttttagggtcccctaattaaaattaattgcccttttttttaaaacttttaaatttgaaaaaccttggttttcccaaatttaaacccttttaaaaatttcccctttttcccactttggttaataccaaaaagccccccaccattccccttttcaaaaaatttcccacctttaatggaaattggaacccccct

SEQ ID NO: 326815 - DNA, 452 bp, Zea mays
gacggctgacctgattgggagcacgccgctgccgttggagttgacgccccggcctggagccaccgtcatcgaggggggattgccgcgttcgccgccgctcgcggttacggttggcctcgcactcgctagtcgctactgatggttccaagagcaaaggcccatgttgtttgggatccagtaggcccaatcaagccgttgactccgaggagagccgctgccgatgtcctcgcctcttgccgacaccttcacccactcccagcaggccaggccagcacacattggcgcttctcgccggagaagggtgggcggaggatgccctgcctggcccctgccaattgacggccacatggcttcttctagcagttgcaggcaagtagataaacctaccacgacgagcaaacgcagatctgtagcctagtacctcgtcttcactacttctcgttcggggtggt

SEQ ID NO: 326816 - DNA, 335 bp, Zea mays
cctcccctatccattggtggcctattctttctagttctatgactattctactgccattgatcttcatctgtatcatcatctgcaatatcatctttcctccctctcctctctctactagtccctctccttctacccctccaactcctaccttctcgatgttcatgatgagcttcttgctgctattaatgattcctaagaaggtcttctccatttgaagctctctatgctacttaatcaagtatattatatctttccatataatgaatcaatatcccaatcaccctaattttctattgactcattatatccctattaattttatccatacccacttt

SEQ ID NO: 326817 - DNA, 159 bp, Zea mays
tccacgcgttcgaccacttctttttccactctttcttccaggctttcgtgcactcttccgttcgggcgttcggccactcgttctttcactcttcctcccacgcgttcaaccactcgtacgtcacgcttactctatatctcgagcagcctttctataagt

SEQ ID NO: 326818 - DNA, 288 bp, Zea mays
ttcctggttcgacccagcgcgtacgcacgcgttagcgcattcgttcggtcaggtgcaatcttgcggggcgcagatcttcagattgcttacgggctacaggtataattgcgtgacactcatttgactgattctaagctcggaagtgcaaatgttcttggagctatcacatgatctacagactgatcctgtagcttgatactgcgtatactgttctttacagatgcatcgtatgcaatgcggcaggaccatctgcagagttcagaactcattcatgagcgacaacacgaa

SEQ ID NO: 326819 - DNA, 350 bp, Zea mays
gtgaaaaacacgcaaacaaggaagatactgaggatccagagccgaagaagagatcagatcctacggaggatccggagccaaagaaagagccaaagaagagaccagagcctactgagggggttcagcaaaagaagagaagtcaaaaacacgcaaacaaggaaaatgagttggtggtggaatgaatagacttcgtgagagatactgagatattcctgtcactaatggatgccaagagattggcgatgcttgtattctttgagaagaggtcatgttgacgcgtttggacatggtttctggaaacatccttgaaaggctgttgtttgcttcggttgatgacaatgggaaacctt

SEQ ID NO: 326820 - DNA, 383 bp, Zea mays
  unsure (1)..(383): unsure at all n locations
ccccatctcaattctcccacccggccgccggcaccacacgcgcgctccgggagccacaacgacggatggcgagggcgcgcctccctctcctcctcctcctcctcgtggcgttcctcgccggcacaggctccacggcggcccgacacgccgcgcccgcacccgcgtccgcgccccgggcgtcgccgtccatctccgcggcgcccgagtacggggcgccgctcccgcgccttccgaaccagcaccagcacccgcaccccttcgcgctggcgccgtcgcaggcgctggcgccggacataatgcccgtgctgccgtctncggccgaggacggcgccgcgccgcgccggccccggcgtcggcgctcctgctgctggctgtgccgtggc

SEQ ID NO: 326821 - DNA, 441 bp, Zea mays
ggccgccctgcgcatatgtcgcgcccacgaatctcgccatttgatccgatcgtagcatcgcgcggggttgttaaatcatgtggcatggttcttccggggatatatatgcgcaagccgggagggcctggctctacctgggcaaaacgccattaccaacgtgtaggcggtaagggagtagtggtcgccgccatcgggtgcttacacgaccgcttgcagtccgggtggaggtttgggagcttcgcgagcgcgataggaaagcatatcaaccctcaatttggcaaggaacgtcgtggtctggtggggattcttcaccggaattgggtggcagcgcggagctttcccaccccgtggaccagtttgggcacccccgcaaccccgacgagcaagtgaccgatgacccaggtgttcagcatgagaaaattgctaggcatgagctcgttg

SEQ ID NO: 326822 - DNA, 445 bp, Zea mays
cgcacgcgtccgcggacgcgtgggagcgggagagggagaaggaggaagacgacctggaggcgtaccagattcggctggtgctagagatgagcgcgcgggacaatccggaggagatggagatggaggtcgccaagcagcttagtctgggcttctgccctccacatggatcccctgcggaggtcctcgcggtccgataccggaatttcaatgcccttggctatgacgacaaaatattggatggattttatgatctgttttatgttggaaatgggccagcagcagttactatgccctcttttgctgagctacgagtccggccattttcacataaagtcgattgggaagctgtgttggtccacagaggtgaagaccctgagcctatgaaacttcagcaggaggccttaatcatgaatcatgaacttcattcgagaacttcagaatctgt

SEQ ID NO: 326823 - DNA, 419 bp, Zea mays
cccacgcgttcgcgtacccatcatcataattcatacagatacagtgtagtactagtaggaaggagtggcatagatagaaccaaaacaggacaggaggatgaagaacggttcggcgcggttggttgacgccataaactctctctctctctctctctctctcgccttaaataaatgaacggccgaattggaacctactagcaataagtttcgtcagcgccgcgcgcgcacatgtgcagggtgccgtgcgagtacaagcacaggaacctgtcggtgagggtgcaggagaagaggcgctccccggggggccctggcgacctcgccatcaggtttctctaccatggcggccagaccgacatcgtcgccgtcgacgtcgcgcatgtcgggagtcgggttattgctgatacaacggagctttcttg

SEQ ID NO: 326824 - DNA, 208 bp, Zea mays
agaggcccagagtttttcgttcttgttttgttttctgtagagagaattaccaacctcatctgtggattgcaattgcgctatgtaaatccccaagttgaaagttgtttccttatcttgagaagtataacaaggtatgctggctgcgtcgaaatatattacatacactgcagccatgatttgcgtgttgtatagtaatgcatcttaagct

SEQ ID NO: 326825 - DNA, 196 bp, Zea mays
tcgcccacgcgtcctcccactcgtcctcccactcgttcgaaaaaaaaaaaaaaaaaaaagaaaaaaaagaaaaaaaaaaaaaagaaaaaaaaaaaaaaaaaaaaaaaaaaaaaaaaaacaaaaaaaacaaaaaataaaacaaaaattaatctacaataaactaaataaaatataaatcaatatacaaaaaaatcaa

SEQ ID NO: 326826 - DNA, 298 bp, Zea mays
taaaaaaaaaaaaaaaaaaaaaaaaaaaaaaaaaaaaaaaaaattcaaacaaaataaaaaaatacaaggttaatttgaaataaattaaaaggaattaaaaattacataaaattacataaattaaaattaacttaaccatattttaaaacatcttaaatcttcaaaaccctatcctttcccaacctaattacctttaaacccattatccttttaccaacttacttaataaccaataatccctcaaaaaatccaattttaaaaaatttttcaaccttaatttataattttaatcctcctt

SEQ ID NO: 326827 - DNA, 318 bp, Zea mays
tcccactcgttctcccactcgttctcccactcgttctcccactcgtccgaaaaaaaaaaaaaaaaagagaaaattaaaaaaagaaaaaaaagaaaaaaaaaaaaaagacaaacaatctaaaggctccaattttaacatatcctgccttctacctcatagctccaatattatatcccttaatattaatcccctaacactaattttacaacctccttactacaaaaaccttaccgttaaaaaacttaatctccttaaataaaatcccttttttcccatcttgctttataccgatgaggtcctaaccaatagcccttccca

SEQ ID NO: 326828 - DNA, 52 bp, Zea mays
tgaaaaaataaataaaatccaacacacactcacactggcgactctggacagc

SEQ ID NO: 326829 - DNA, 253 bp, Zea mays
tctcagactcgtggtctgactcgtgttctgactcgtttgaaaaaaaaaaaaaaaaaaaaaaaaaaaaagaaaaaaagaaaaaaaaaaaaaaaaaaaaaaaaaaaaaaaaaaaaaaaaaaaaaaaaaaaaaaaaaaaaaaaaaaaaaaaaaaaataaaaaaaaaaaaattataaaaaaaaaaaaattaataaaaataaaaaactaaataaaatataaaaaaatattaattaaataaaataataactaataaaaa

SEQ ID NO: 326830 - DNA, 299 bp, Zea mays
taattccctgttctacccactcttcctaaaaaaaaaaaaaaaaaaaaaaaaaaaaaaaaattttaaaaaaaaaaaaaaaaaaaaaaaaaaaaatgaaaactttgcggtctataaatcggactctccttctctcttgctctcctcttttcttacctctttctttcttgtcaccttactttcatttaattctccttcattttacaacatttttcctttgttaaactcctttcttacccaaataaccctcctttcaccccttttaacttacttcctcttcatccatctctattaattccctc

SEQ ID NO: 326831 - DNA, 229 bp, Zea mays
  unsure (1)..(229): unsure at all n locations
tcgtgcacgcgtctcggattaactcttgaaacaacaacgtattaattatctcttgctataaaacaggtctggggttttatcgtttcttaccatttgcgtaactatgagtaatcgagaagcatatttcaagtcccaggcaantttcaataanttatctggtctctagacaccagaataataatagacatttattcctcatattatacacatataagttcaaattctcaat

SEQ ID NO: 326832 - DNA, 219 bp, Zea mays
cccactcgtccggaacttgctgatagtgatgtattgcaaattaagaattgtttggattttgttagaaaaaaaaaaaaagaaaaaaaaaaaaaaaaaaaaaaaaaaaaaaaaaaaaaaaaaaaaaaaaaaaaaaaaaaaaaaaaaaaaaaaaaaaaaaaaaatacaaaaaaaaaaataataaataaaacaaaacttaaataaaaaaacaagtaagttaat

SEQ ID NO: 326833 - DNA, 443 bp, Zea mays
caggagaccttggcactgcaagatttgtcctgctttcgatgctctgcttggtgtactgatccgggtactattcctgcttcacgtgacttgtggattgttgagtatgttcaggttgttgagggcaatgttggagaaactatggctctagctacccaatcactattagtttttccgttgccttccgaccgaacgattctaattcacagtctggtcttcctatggattctgtgaatgacggtgatcaaagtaatggccactatggacatgccaatcagggattgtctcaggggcttggtgcatttgggggtgggagatcttgcccattcctgagggatgggcgtaattcatccttgggacgcgcatctagagaccgttcagggacttgccagccaccagttaccaaccaggggacagcttgccagatatcgtgcatcgttgacact

SEQ ID NO: 326834 - DNA, 173 bp, Zea mays
gctcctcgctcctgagcaccctttgccggcttgctacgaggactcctttctcgcgctttagggggtatctgccttgggcggtgacccctgtctgtctcgccatggctacatgcccctcatcaaactagccaactacagctccttctacaacatcgttcacaacttatccatga

SEQ ID NO: 326835 - DNA, 409 bp, Zea mays
cgtcacccatggccactgccgaggtccagaccccgaccgtcgtggcgaccgaggaagcgccggtggtggagaccccggctccgcccgccgtcgtgcccgaggaggctgcccccgccgccgaggccaaggtggaggagccagctgccccggcggagaccgagccagctgccgccgctgagcccgaggcggcccccgtggcggcggaggaagagacgccaaaggaggaagagacggcaaaggaggcggagccggagccggagccggcggcggctgaagaggtgaaggaggaagcggcagcgcccgctgccgagacagaagcagaaccggcagccgctgagcccgaggctgctgctgctgctgaggagcccgcggcggctgagccggccgctgaggagcccgagaaggccga

SEQ ID NO: 326836 - DNA, 163 bp, Zea mays
tcgcggactcgtgggctgactcgtgggtgtaactcgtatgtgcttgaattctccatggcagctggtcgtgccatcggtagagttaggtcccgtttgttttgaggaactaaaaattaatccctctattttagtcaaaaaaaaataaaaaaaaaaataataaata

SEQ ID NO: 326837 - DNA, 271 bp, Zea mays
gcttctcctccccctccggttcgggttcgggttcgtgaggttctccggggttcgggttcgtgggggagcggatcgagatggcggcgtctgatgttgagtaccgctgcttcgtcggcggtctcgcctgggccacggacgaccactccctccacaacgccttcagcacctactgcgaggtcctcgagtccaagatcatcctcgatcgggagacgcagaggtcccgcggcttctgcttcgtcaccttcttcacggatgaggcgatgcggaacgc

SEQ ID NO: 326838 - DNA, 118 bp, Zea mays
acgcgtgttcggactcgtggttcggagcatcaccacaccagccttggtccagggctatcacgagctattcagtggagacgaagagggctacagctcagaggctgcaggttgtcgccat

SEQ ID NO: 326839 - DNA, 96 bp, Zea mays
aaaaaaaaaaaaaaaaaaaaaaaaaaaaataaaaaaaaaaaaaaaaaaaaaaaaaaaggaagaaaaaataaaaaaaaaaggaaaaaaaaaaaaaag

SEQ ID NO: 326840 - DNA, 233 bp, Zea mays
taaaaaaaaaaaaaaaaaaaaaaaaattattaaaaaaaaaaaaaaaaaaaaaaaaaaaagaagaaaatttaaaaaaaaaaaaaaaaaaaaacaaataaaaaaaaaaaaaaaaaaaaaaaaatatctcttttttttcaaattctcattccttacttcttctttttaattttttattcttctcttttctaccctcatttcaattcctttttctttcttaaactatttcttctcct

SEQ ID NO: 326841 - DNA, 86 bp, Zea mays
tccacgcgtccgcttttaaaatgaaaaaaaaaaataaaattaaaaaaaaaaaaaaaaaaaaaaaaaggaaagggatattataaaaa

SEQ ID NO: 326842 - DNA, 457 bp, Zea mays
cccacgcgtccgttggcttctcctccccctccggttcgggttcgggttcgtgaggttctccggggttcggtttcgtgggtgagcggatcgagatggcggcgtcggatgttgagtaccgctgcttcgtcggcggcctcgcctgggccacggacgaccactccctccacaacgccttcagcacctacggcgaggtcctcgagtccaagatcatcctcgatcgggagacgcagaggtcccgcggcttcggcttcgtcaccttctccacggaggaggcgatgcggaacgccatcgagggcatgaacggcaaggagctggacggccgcaacatcaccgtcaacgaggcccagtcccgcggcggccgtggaggcggcggcggcggcgggtacggtggtggccgtggaggcggcggctacggcggtggcgggcgccgtgatggcggcggcggctacggccgggg

SEQ ID NO: 326843 - DNA, 251 bp, Zea mays
tcccgtcacccacctccgcggaccgtcgtcacccattcgtcagtactcccttttagctgacatatcaaatccagggtggctgatactcctaaccttacctgtcaaatactatccactggtattgcttccacaagatcctgattgctacatgtttagcttatccatagagcctacacaccttagcctctttccatgtcatgcttcatgtaagtgaccttgaacattctatcaatttttatgataatgcccta

SEQ ID NO: 326844 - DNA, 145 bp, Zea mays
cccacgcgtccgcctacgcttgggcacgtccattttacaagcgcttggtcataatcatccgagcgtggatattctagctagctacgggcatatattttgctgtgtatatctgtatgtgtatcgacggtctcatcacctacctcta

SEQ ID NO: 326845 - DNA, 274 bp, Zea mays
attgatgcgctcgtgaggcttaccggaattactgcagagggccaaggtgtgaatgggggagtccttaacaggttcttgagcctaaactccagatgttgctgaagcacaagctacagctgctgatgaggaagacaattatgatgttgacctccatgttcaggagactcaacatgagcacaaagctgctgaagatcgtactgcaacgtccaatgcttctatcacgataacagaatctttaatgtcatgagatttacttgatgtgaatccatatgac

SEQ ID NO: 326846 - DNA, 204 bp, Zea mays
aaaaaaaaaacgcatacacatacacaaaaacatttacatttatatataaatttaaaacatcaaacgggaagggctaaacaaaagttcgagtaagaaaaaaaaaggggcggccactttatagagacaaaatttaccacctctttaattatatcccatatctctactgtggtgttacctaatttaaattaactgaccttgatctaa

SEQ ID NO: 326847 - DNA, 388 bp, Zea mays
tcggcaccacacaaccaatgccggctgtcccttgcacgcgcaccagcaccaccacgacccatggccgacaccggcaacccgccgaccaagcccaccaaagcctccgcccccttcgtcgtaattgacgccgtcagcgccaacaaggcccgcgacggtggcgccgatgccccgacaccgtcggcggggcacggccgccgctggctgcagcgggcgtgctgcggcgtagccatcgccggcgcgctggccgcggctgcggtgctgtcgctgtcgctcaccgtgctcagggtgcgggacccgacgctgtccatggagtccgtggccgtcaggcgcttcagcgtgcgcctggacgccgcgttcccggcgcgcccgctgcggatcaacgtcacgc

SEQ ID NO: 326848 - DNA, 167 bp, Zea mays
caataaataacaaccatcttcacaaacattctaccacctagctacttatatgccataactaaacttaactgacaaatcttatacgtcaactgaactatatgatgatctctgccatcctccccaacgttaccctgctattgctctaaacgttatacctctcctccatt

SEQ ID NO: 326849 - DNA, 116 bp, Zea mays
cgaacgcctccgctcatacttgggcgcacagtttttagtaatgcttttcaggaacgaaagtaggggtcgtttaaaggtcttaagatgcatatcactcctctacaacattctctaca

SEQ ID NO: 326850 - DNA, 410 bp, Zea mays
acaaaagctccaattatacttcaacaacagagtttccgtagagatacccagtcacgatggtaaggatgacctatacgtcaaagtatacgtaacagtagactactaccttcactgccaacagagttcgatggagatccaggtatctggctaatcaactactcttagagaggtcaatctagaactgaactaggaagaaattgctgacatgctcagaagactggacacactatatatatatagcatctaccttgagcatagcaacctcacgctcaagaattgcgacgtatgactcatgttgatacaggaaattccttgcaatctgtgagaactgcaagcaaatgctattgccaaaatatacaatgcactataatgtgtattataatcatttttttcgaaacttatttgtgcaa

SEQ ID NO: 326851 - DNA, 206 bp, Zea mays
gcgcccacgcgtccgctcacccttggccgtcttcgacgagcgccaccacggtaggatgacggggcttaggaaccacaatatcaagacgtttacctgcaagacgatcgtgaaggaccttagctcgtacaataaggtatgttccaaggacgctgccaagactcccgacttgataaagtatgccgctgatacctactacctgttacagc

SEQ ID NO: 326852 - DNA, 327 bp, Zea mays
ggtacctatatgtcttaggagcctatattttacgtcacctttgatcatactagtcgggagggtctacatcagaatatgcgaacaccaggttgacttgtactatgtggtttaagatgatgatgcgtgattgtcaacgggtagcatctcatgtcgagttgtatattgatcaacgcgtgagttattcgttcgtgcaaccctggcggttaacttgtaatgtgtaagtttcgagcacaatgatagcgatctatggttgatgtgaaggccattcagtctcgtgctaattgactatgatcgcacaaggactaattctagttcttgaatgattga

SEQ ID NO: 326853 - DNA, 404 bp, Zea mays
cccacgcgtccgaccacgcgtaagatccatgcctgtaggaatagattgccataacaacggttggggtcctttcaccttattagcatgcttatcgcacctaaacgacctaccgtgtacaagtctatacaaatgattacgcatggtcactatgtatgcttacctgctcactggcatcgctgatgtccttagaccaaagaccaaaaccgtctgcaactattctagacgacacactaccatagcctgatgaacatcatttgagcaaccgctagatcatagagatgctctgatacagacaccaagtattagatctactagacaagtcatgtatagtagtacatcgtagttaatgacaaccttgatctcaacttcctataaaaacaatctgtcatgattatatgtgacat

SEQ ID NO: 326854 - DNA, 151 bp, Zea mays
tcccacgcgtccgtccatccttgtccatactccttacctgacaatgtcttcctcccatatgggccgttccatttttaatcttggaatcactattacattcaatactcatttcttttcacattcaatacataatattacgttataaactatt

SEQ ID NO: 326855 - DNA, 69 bp, Zea mays
caggacgtatatttttactgaaatgtttctccgaaaaaaaaaaaaaaaaaaaaaaagaggaggaatttt

SEQ ID NO: 326856 - DNA, 397 bp, Zea mays
cgacgcgctcgccaaggacctaatctcgatgtacctcataccgcagttcaagatcgactggagggtgcgttgcacggtcggcagctgcttgtcgcgccactaccacatgttcttcacctgcgcggcttacttcatcagcttgcgcaccaagtacggctacctgctctctggcaccgcacactggctcaggctacagaccaccacgtactgcccaattgtggactagactctaccaagcgagaagtacttcaccgccgaaaccggccgaactacacgtgctctgctacagacgcgccgtctatgtacgccacaactagtcatgtagcatactgcaaagcggtaacaaatgaactgatacacaagttggtataaaaactatatgaacaagtgtgaggtg

SEQ ID NO: 326857 - DNA, 156 bp, Zea mays
cggacgcgtgggctagttctagatcgcgagcgtgtgccctatctgttttttttttctatggttgggactcaggagaaatcgggggatgcttgtcgctctgctacgacataccgtgcaccagcgtgggtacctcattgagcttgctcaccaagtatg

SEQ ID NO: 326858 - DNA, 348 bp, Zea mays
gacccactcctccgttcaagagcttcctaaatgaaacttttattttgatatatgccaaaaaaaaaaaaaaggaagattttaaaaaaaaagaaagacaaaaaaaaaaaaaaaaaaataaaaaaaaaaaaaaaaaaaaaaaaaaaaaaaaaaaaaaaaaatgcctaccatatctaaataatccaaacttacttaccccttctttcaaacttcatacctctccaataatttcccctaaatccaatttattcacctccatttaacaccaatctaacttttaaaaccttacctttacctaatttaatacatctccacaaaatccccttttccccaactttttttaaaccaaaa

SEQ ID NO: 326859 - DNA, 252 bp, Zea mays
cgacggcttcctatacctgagatccttcttacggaaccaactgacactacttacaggaggtgaccgtccagactcatacgtccacctaaaactctcagcaaccataagaccattaattgaatacagggactacactgactgatgagctcgttgtgtccagagatcattccttaagaactataacatagcgatatcctatgataccaaggattacacatgcacgtaacgagacaaaagcgatcatgcggaaaa

SEQ ID NO: 326860 - DNA, 419 bp, Zea mays
taaaaaaaaaaaaaaaaaaaaaaaaaaaaattaatataaaaaaaaaaaaaaaaaataaaaaaagggaaggatttattaaaaatacatgattacttttatattaatttataattatttaatttaatatttttattatatttctttttaattcttatttttttttttatcatccttttttcttaccttattttttttcctgtataataattattaatttttcttattatttttctattatatatttattattttttctttttacaatttttttatttttttttttttttaatattatttttctatttttttattattattttcttttttttttattttttatttttattttttcttttttattttttttatttttttattatttttttcttttttttttattatttatttttttttattta

SEQ ID NO: 326861 - DNA, 239 bp, Zea mays
ccgagacttccgaaaccttcacgcgctcgtacgagggagttgcaaactgcccggcggcggacgacgactagaccgatgatgccccctacaacgctgccgaatcagcggggggccatatccgatcaagcgaggacaccaccagagaccgaccggatcccgaccgcgctggctgagatcggtgggcggttcatgagctatgatctgcctgatcacatattacgaccgccgattttgggttc

SEQ ID NO: 326862 - DNA, 132 bp, Zea mays
tcgttgggaagggagcttcgaggcgggccggcgcggttcgttggccgggcgggctgaaccaatggcacgggcccttggggccccaacgccctaacctgggtcggggccggccgccaacaaaagccccggttg

SEQ ID NO: 326863 - DNA, 53 bp, Zea mays
cccacgcgtccgcccacgcgtccgcccacgcgttcgctagttctagatcgcga

SEQ ID NO: 326864 - DNA, 256 bp, Zea mays
  unsure (1)..(256): unsure at all n locations
cccacagcgggcgaccacgcgtgcgccaacgcgggcggcaacgcggccgacgaaaaaaaggggaaggaaagcaacaagagcaacggggccgcccgaacanaggagcaaagccaaggcacacgaaaacgcgacgcacggaggaggccaaacgggcaaggaaaaaaaagcgcaacgccgaagaaagacaacacaaggagagggaaaaccacggcggcacccaagagagagagcgggggacgcgcaacaaaaagcacaa

SEQ ID NO: 326865 - DNA, 197 bp, Zea mays
  unsure (1)..(197): unsure at all n locations
gaagcccaagacccacagccccgnccncgccaagaaaggcanggacaaggagcggcagcgggacgcgcnggncacgcangagcnnggacngcaggacancaacaaggccggcgaccggcnccggcaggggaaaagacngcgcngcagccncngganggacaaggacaagnaacggaaggagaggggcggccggacca

SEQ ID NO: 326866 - DNA, 89 bp, Zea mays
cttttattctcaaagcgttgataaaaagctttctcttcatctgtatattttattgttaatgaaagaaataaaccactatatatttcgac

SEQ ID NO: 326867 - DNA, 278 bp, Zea mays
  unsure (1)..(278): unsure at all n locations
ggggcgaaaggggaggggaaccancaaggagccggggcccncccaagaaaaccaaaagaaagcgggagcccacacaaganccaacgggaaaagccaangangagaggcancgggggcgcaacgcccgcgaccaaaacacaaacacnaaacaggnaggaccgcccggcngccncggagagcccggccacggaaccaggagccccaagggggccacaaaccggcaagcagaacaggcgaagcaggaagaaccggaagccggggnacggggccaaacagcg

SEQ ID NO: 326868 - DNA, 405 bp, Zea mays
cccacgcgtccgcggacgcgtggggtaccctgacctggaggagacgagcaccgccgcgcgggccaccgtcgtcctcggcgtggccccggagaagaaggccgcgcccgagttcgtcgaggccgcggcggagtccggcgaggccgcccacggctgcagctgcggtggcaactgcaagtgcgacccctgcaactgctgatcacatcgatcgacgaccatggatatgattattatctatctagcttgtggtggtggttgaacaataataagcgaggccgagctggctgccatacataggtattgtgtggtgtgtgtgagagagagagaaacagagttcttcagtttgctatctctctctgcatgtttggcgtcagtctttgtgctcatgtacctacgtgtgtctacctg

SEQ ID NO: 326869 - DNA, 100 bp, Zea mays
cccacgcgtccgcccacgcgtccgcggacgcgtccggccacgcgtccgcccacgcgtgcgggcacgcgtccgcccacgcgtccgctagttctaatcgcga

SEQ ID NO: 326870 - DNA, 356 bp, Zea mays
ccgacgcgtccgcgtactcgtaccgacgcccttttcaatgtccacgaaatctatactctcgacgtgcttatctcacgacatgtccgatctgttgtaacagatgtcccggcccagccgaactcagcacctgacactgtcttccacgccgatatgacctgctagcgactgccttggagcctaaacgagtggctgtgcaccgcttgcgacccacgtactgcgtatataacgctgatgtactggtatttcaatcgtgcacagaggctccaacttatcctacaactgtcacgtcatctgccaatgtctgactaacgtcaacctgaacatgatctgccttaacggctgattccgccaaagca

SEQ ID NO: 326871 - DNA, 147 bp, Zea mays
cagacgcgtgcgcgcacgcgtgggcgcccttttcttgcacacggcaactatactctcggcggggttctttcacgacatgtcggagatgttcacacagatgcccacgcgcagccgatctccacatctgacaataccttacacgccgat

SEQ ID NO: 326872 - DNA, 335 bp, Zea mays
cccacgcgtccgcccacgcgtccgtgaaaaaaaaaaaaaaaaaaaaaaaaaaaaaggaaagaaaaaaaaaaaaaaaagggaaaaaaaaaaaaaaaaaaaaaaaaaaaaaaaaaaaaaaaaaaaaaaaagggggggccgttaaaaaggaacaaaggttaacgaacccgagaatgcaaaaaaaaaaatttggtatagggtcaccaaaattaaattaacgggccggggtttaaaaacggagaaactggaaaaacccgggcgaaaccaaaataaatgggctggaagaaaaaaaccttttcgccagttagcctaatggcaaaaaggcccgaaccgatcgc

SEQ ID NO: 326873 - DNA, 406 bp, Zea mays
cggacgcgtgcgcggacgcgtgggcggactcgtggctccgagggcagacagacttcctgtggagccttaacgtaatatgaataagaagctcattgggtgccccattgtgacttgcattccaaatgactctactgcaaaatctgatatgtatgctgctgtctcttctgtcttggctccatatgtaagatcaaaagcacataaccctgatgtgtctgctgttaagttaaatggcaatgggccaagtttgcacggcattgtcctgaccgataatggcaccaccagtgaagagggtctatctacatcaaaatcaaggtaggaccataatgcagctgacaatgagcttttaccgtttcagctttcattgactgatgaaaaaggtagtacacaaaatgctatagacatggat

SEQ ID NO: 326874 - DNA, 318 bp, Zea mays
  unsure (1)..(318): unsure at all n locations
cccacgcgnccgcccacgcgnccgcggacgcgngggcgcccgccgncgcccncgcccagcgccgggggagcncggagacccggagncnncccccacccccanaacgnccacaacngccgagcccngcgnngccgccggcgggcgccgcaagccgngcgngcccgcgggaaccccganngggagnnaacnaacggaagnnnacaanngancaacaagacnnagnccaacccnacgagacaaaacaccanggnnacccnnnccaacagcngggcaagcgnagaaaggcagacaaaangnngggcgcaaagaaggaaagga

SEQ ID NO: 326875 - DNA, 310 bp, Zea mays
  unsure (1)..(310): unsure at all n locations
cggaancccgggccgacccacgcggccgcccacgcgnccgcccacnaaaacacggacacgagagacaacagaaaaaacacacaccaagggaagggggggcggccgcacaagaggacccaacccaaccnacgcgcgcacgcgacggcacagcccngcgagagcggcacccaaagccaaaaaacaggccgcgcgcaaacaaccccggaacgggaaaaacccacgcaagaccacacaaaancgcccggcagcacacccccccaacgcaggcgggcagaanagcgaacaggcccgaaccgagcgcccgcccaaa

SEQ ID NO: 326876 - DNA, 262 bp, Zea mays
  unsure (1)..(262): unsure at all n locations
ccccnccnnnccaaaaccccccccggcgccaggcacggggacggcccacccgagcgcggggagcacnagcagccgccgggaaaccaccagaacagcgccaacaaggcccccgcnccncggcaacaagccgcccagacggacaccgccgcgcccccgcaaccgaaagccagcgccggcgacgccacggagaagcngcngcccgccgncgcagccgagggccccaccaggggggggccagacaccaagacgaggggaaagaaga

SEQ ID NO: 326877 - DNA, 244 bp, Zea mays
  unsure (1)..(244): unsure at all n locations
accccgcccccaggcgggaggccnaanccgagcgggccgaccnacacnccaagccccagaccaacgacgcccaagccgaccccaccgacgnacacgcccccccccaagccaccgacaccaaagccgaccccggcgacgaacacaccaagcccaacgccaccggcgaccaagccgagcacgcccaagccagagcccgccaacgaacacccccccgccaaagccgccnacacccaagccgaccccg

SEQ ID NO: 326878 - DNA, 111 bp, Zea mays
cggacgcgtgggcggacgcgtgggcggacgcgtgggcggacgcgtgggcggacgcgtgggaaaaaaaaaaaaaaaaaaaaaaaaaaaaaaaaaggacagacaatataaaaa

SEQ ID NO: 326879 - DNA, 407 bp, Zea mays
ctgacgcgttgggtacctccctccatctgatcgcgtccgtcagctctcgccgcgcaatcagcttaatctattccggcagaaggggacgaccacaggtccagcacaatcgagcacaaacttcagaaccaatccttttaccatatttacggatcacttttgctaacttttcattactacatcgatacaaacgccatactctgaccactttggagacctgatcctgctacgagctccacactctgtataaccgcataccatcataccaaacatcactgacctacaacagcacaccacatactgttcaatgctcgtatctgttacactctcttaatacgatatgttacataacacattataggttttgacaaaaattctgcattcaagatcaatattactttaaaaatata

SEQ ID NO: 326880 - DNA, 330 bp, Zea mays
  unsure (1)..(330): unsure at all n locations
ccgggncgaccgccgcggccgaaaaaaaaaaaaaaaaaaaaaaaaaaaaaaaaaaaaaaaaaaaaaaaaaaaaagggcaacgggacggggggaaccaaaacaggacggacccacacaaacaacaaaaaaaaaacaaggggcggccccccaaaaggaaccaaaccgcccgccccgggacaacaacgngaacagggaaaacccgggccccccaaaacaaaaacaccggccggcgcancccaacgncgccaccgggaaaaccaggagaaagccccccacacaacccccgaaccaaaacccccgcaacccgaagggcgaaaaagacacgccccc

SEQ ID NO: 326881 - DNA, 301 bp, Zea mays
  unsure (1)..(301): unsure at all n locations
cccacgcgnccgcccacgcggccgactagnncnagancgncagcaagcgcaccaggggagcagcgaagcncggagacggagagcngaagccngcaggcaagcggaagnncaacaccaaggaagaggagccagaacagnacnggcagaccgcgggggagagggagggggagaaccccangangacaccccngcccnacancancancnncggcagggccacccccnncgacaaccgcgccaacgccnncgccaaaggcnggaacaaggncccngngcgaagaccgnaacgcgancagccagc

SEQ ID NO: 326882 - DNA, 451 bp, Zea mays
  unsure (1)..(451): unsure at all n locations
cccacgcgtccggcacgttctgggttggaagggtcaatagagcatttggttgaagaagacggactggagaaggatgcttagtaaaaaaggagaaatcctcactaaggagttagctgagcttctagagttggtgaggttgaaagaagcagagatagctgaaaacaatgcccggatccatgaagttcaagaaagaatcagtgcagtggtctccagattccatggttctcagtcagatattgacttgaagctcagttccttgaaggaagaccaaagtaaagtggatctagagactgaagcacttttgttgaagaagaatgaaattgataagttcattactttaacagatcaaaaggattcagagttgagggacataattggtgcttgttcctctgaagcanaagcttgtcgacaatcagttgaaataagaagaaagcttgcatcatcgatcttg

SEQ ID NO: 326883 - DNA, 110 bp, Zea mays
ccgggccgcccccgcgtccgaaaaaaaaaaaaaaaaaaaaaaaaaaaaaaaaaaaaaaaaaaaaaaaaaaaaaaaaaaaaaggaggggaaaaaaaaaaagggggggaggg

SEQ ID NO: 326884 - DNA, 225 bp, Zea mays
  unsure (1)..(225): unsure at all n locations
ccggggcgacgccgcgtccgnnnnaaaaannnaaaaaaaaaaaaaaaaaaaaaaaaaaaaaaaaaaaaaaaaaaaaaggaaggagaaaaaaaaaaaagaggaagggggcggacggccnaggggaacaaagganacanacgcgggcaggcgaggaaaaaacncaaaaaagggggcaccgaaacacaaaaaacgggccgacgggcaacaacgaaaaaacggggaaaa

SEQ ID NO: 326885 - DNA, 281 bp, Zea mays
tattcggttgccatttgctgtcaacatgggtcccgtgttgctgtcttcatttgtctattatctatgcatatttcaggtccacagatacgtggaaggtctttgttgggctatgagatactactatcaacgtgtttgttcatggcagtggtatgtaaatattgaccatctactgtgagaatttgctatcgcattttctgtggcagataaaacatcacttgattgagtgtgaaagtattattcttcactttttttgcaaagcgcaggagaactgcgcatcatta

SEQ ID NO: 326886 - DNA, 145 bp, Zea mays
cccacgcgtccgacaaaccttatatgcacacgtaagctgacgagttcgaggacgcgtggggtcacacgtctgtaacaaccttgatcttcagtgaaggattcgagttgtatcactccatgcgagaccctaaagaagagcaactatg

SEQ ID NO: 326887 - DNA, 445 bp, Zea mays
cccactcgttctaaaaaaaaaatttattataaaaaaaaaaaaaaaaaaaaaaaaaaaaaggattatattttataaaaaaaatataatatatatataaaaataattaaataataataaaatatattatatattaaatataatatttttttttttctttttatttttaaaattttttattttttaaactcatttttatctttttattaattttttttttataatatattttttattttttctttattttattttttataattttttttttttaacattttttttttattttttttaatttcttattttatattttttattcttttttatttttttattttttaatattttaattttttatctttttattttctatttttttttaatattatttttttataatttttattaaaacctcattatttttttttttttctcaatttttttt

SEQ ID NO: 326888 - DNA, 279 bp, Zea mays
  unsure (1)..(279): unsure at all n locations
agatgtggccgaccccagctcaaacctatcccaccatgactaatgtcttcccgctccggatccggcccctggcgaggctcggtgccttgtgagcgcaaaagggaggggctggtgcgcccgctatccgacctcactggaatatagtaaaatacacgtctaaaagtaagtggtattttcacttttgcgcccggaggcttcccaactctatacctacacctctcaaagtcagtttcacaanagtccggacttagaagtcaaagcttcaacaggnngtcttct

SEQ ID NO: 326889 - DNA, 132 bp, Zea mays
gccaaacattaagcccataagatggctttaccataggcaacagaagctgtctaggggtgtcatattgtgaaggtttgggtccgcactggacatcttcagcaactaaccctgtaacttgcgagttgacggccc

SEQ ID NO: 326890 - DNA, 60 bp, Zea mays
cggcccgacccacgcatcctccgactcgttctcaaacacatattcttttactaaccacac

SEQ ID NO: 326891 - DNA, 306 bp, Zea mays
aaaaaaaaaaaaaaaaaaaaaaatatattataggcaaaccatataaaaaaaaacaagggggggtactcatacatgcaaacaaataaactaaactataaagacacctaaatataaatttaatgtaacaaaaattaacggccttctcttttttaaaaaccctgccttttcctcccacttgaataccccttgcaacacatttcttcttttggccacctaacttaattgccatgagccccgttctacacgcccttcccaacaaaacccctgccttaaccaaaaataagaccctccctgtaaatgcccttt

SEQ ID NO: 326892 - DNA, 82 bp, Zea mays
  unsure (1)..(82): unsure at all n locations
cggacgcgtgggaaaaaaaaaaccagtaatagnaacatgaactaaatgtactgttgcgatgcccggatccagagagaaaaac

SEQ ID NO: 326893 - DNA, 339 bp, Zea mays
aaaaaaaaaaaaaaaaaaaaaaatttaataaaaaaaaaaaaaaaaaaaaaaaaactgaaggaaaaattaggccgggcgttcctttattaacgatcttactttcctcttctttcaattccatatctttgttatcttgtcccctaacttaaattcattcgacgggattttataactcaactcttgggaaatcaatttccatacctcccttaactgactcgtcttgcattacttattttctagatgaagcagataacctaagacttccgctccatctcgtttttctaacaatacctttacctaaaattattttggatatctccctctcttttttttttaatt

SEQ ID NO: 326894 - DNA, 98 bp, Zea mays
gggggagcgacgcgttcgaaaaaaaataaaaaataatataaaaaaattttatttttataaaaaaaaaaaaatataatggggcgggggttttataagta

SEQ ID NO: 326895 - DNA, 128 bp, Zea mays
gaaaaaccggcgcgagccacgcgtccgcccacacatccacccacgcatcctttttttttctgctatacaaccccaatctccgggggctgtattattaggagccctccctctcttatgagacctacatg

SEQ ID NO: 326896 - DNA, 224 bp, Zea mays
cccactcgtcctaaaaataaatttattttataaaaaaaaaaaaaaaaataaaaagagggattttttaaaaaaaaatataataacacctataaaaatttttaaactaaaaaatcttatacatacaaactcctaactcttatatatttaaccgcccccctcttttaattatccaactttacttcccttttttttcaaaattttatttttttattatgtccccctaa

SEQ ID NO: 326897 - DNA, 108 bp, Zea mays
tctacacctccagcgaccgctcttaatttacaaccccacacgtccgactagttgtaggtctctaggccgcccttgcacaccaacaataaaccgttgtttgccatgaat

SEQ ID NO: 326898 - DNA, 110 bp, Zea mays
cggacgcgtgggcggacgcgtgggcggacgcgtgggcggacgcgtgggcggacgcgtgggcggacgcgtgggcggacgcgtgggcggacgcgtggggttctagatcgcga

SEQ ID NO: 326899 - DNA, 280 bp, Zea mays
aatcaaaatcaaacttattttttacccttaccttccacacaaaatggctgtgctttttaaactgatcttaccacacctcatctaacttttaacacatattccatcccatccaaactacccaacttacaatctcttcctccctgatctgcccttctaagcctaaccttcaatccaaaataaagatcttatcccctatttctacccacaaaaataatcaaccatccttataaatatttaatttttactatctcaccactaactcccatttattctacaccct

SEQ ID NO: 326900 - DNA, 178 bp, Zea mays
  unsure (1)..(178): unsure at all n locations
ccacgcatacaaccttctcctcgaagctggagctccttttcacccacctacccaccgcccccggggtcgtttatttgctatgagattactccccccaaaactcctcctncttcaccacttccatgcccaaagtcaatcgcttcttcctctcactgtaacgcccctaactcaacaatct

SEQ ID NO: 326901 - DNA, 237 bp, Zea mays
agctgcggtattatattcaccagaagctggacaccaacgggcgggggttgcatcatgtggtgcccgactagcagcaagtcatgtccttgatgaactaccgtctctacgtcgacgcctacgaccccgacggccgcaccgtgccctacattgacgtggtgtacgagcagttctggacccgcaccacccagattaacttcttcaacccggtgctctgagctccctgaaaccatactgaca

SEQ ID NO: 326902 - DNA, 67 bp, Zea mays
cccacgcgtccgcccacgcgtccgcccacgcgtccgcccacgcgtccgcccacgcgtacgatcgcga

SEQ ID NO: 326903 - DNA, 60 bp, Zea mays
aaaaaaaaaaaaaaaaaaaaaaaaaaaaaataaaaaaaaaaaaaaaaaaaaaaaaaaaaa

SEQ ID NO: 326904 - DNA, 78 bp, Zea mays
tcggattccatgctttggcggtgaacatgaatgtgttctactccacacgagacgcacatgcgtgggagatcgttcacg

SEQ ID NO: 326905 - DNA, 113 bp, Zea mays
cacacgcgtccgccacacgcgtccgcccacgcgtccgcccacgcgtccgaaaaaaaaaaaaaagggaaagggaaaaaaaaaaaaaaagaacaaaaaaataaaaaaaagggcat

SEQ ID NO: 326906 - DNA, 394 bp, Zea mays
cgatctgcaagtctcgctacgtagcagtgcaataaaaaaaagcagccgcaatggcgagcagcaccatggccctctcctccacggccttcgccggcaaggccgtgaacgtgccgtcgtcgtccgccttcggcgaggcccgcgtgacgatgcgcaagacggcggcgaaggccaagccggcggcggcgtccgggagcccgtggtacggccccgaccgcgtgctgtacctgggcccactgtccggcgagccgccgagctacctgacgggcgagttcccgggcgactacggctgggacaccgcggggcttgtcggcggacccggagacgttcgccaagaaccgggagctggaagtgatccactcccgctgggccatgcttggcgcgctcggctgcgtct

SEQ ID NO: 326907 - DNA, 121 bp, Zea mays
cccacgcgtccgcccacgcgttcgaaaaaaaaaaaaataaaaaaaaaaaaaaaaataagtgcataggaaaaaaaataaaatattaaaaaaataaaaaaaaaaaaacaaagacaatctatat

SEQ ID NO: 326908 - DNA, 369 bp, Zea mays
  unsure (1)..(369): unsure at all n locations
cccacgcgtccgcttgtttttgttttattttcttggtaggggggagtcgtcttctccatgtctccttagcctaggagaacgagagatccagaggcaaaagcttcagggtttgtacaaattctagatctaaccggactaaccagaaaacaaaacaaaaaaagacgaaagcatgagccacttcgccgccgccatgaagagcccccttgcggtcgccgtcgccgcgcccgccggcgccgccgacgctaagagcccgctcttctgccccaagccgcggcgccccgcggcgccgctgcggtgccaccagagcggcggcttctccgacgccggcacggatctgctcgacctnctcctctcgaaaggcgacgagag

SEQ ID NO: 326909 - DNA, 170 bp, Zea mays
  unsure (1)..(170): unsure at all n locations
agatatgccanacttcacacccctgaactatcttttgctatgacgtggatctacccttctcggtgccattgccttctaattattttgaactttccgatagggagcaaactacacttcttccacttaatcgggctgcaacataagcaccttttacctagttctgacactga

SEQ ID NO: 326910 - DNA, 168 bp, Zea mays
aattctatcaaaggatataaagtttaccatcatctagtccgacaacatgaatggcatttgacatcttgtgccgatcctaaaccactagtcctctctcatcatagaactctatctatcatcaccataaagaacatgccttacaccataaacaaggactagaccaaactc

SEQ ID NO: 326911 - DNA, 455 bp, Zea mays
cgctcctcctggtgatcccgcaccgtgctgtgtccgctccatcttcctccgccaccatgctgatcgccggtgcgagggcatgtctacctacccgaggacctacgatctcatccatgcggactcggtattcaccctgtacaggaacagggagaagatcctcctggttgtcaagacgtattggactacccatgaggccatgaccaagatcagtagcaggactgtcaagtaaaattctcaatgttgataagcatttttcatgtttggatttgtaccaccgtttctagctccttgagctagtgatctcttgacggtttgtgcttgctgttctttctggacagtacttgctcggataggaaatttaacatgtgggggaaggaagggtaggtagtaagacccctggcccctgcaaagttttcttcaattccgaattgtgtccaaatggtaaatagaagtca

SEQ ID NO: 326912 - DNA, 315 bp, Zea mays
  unsure (1)..(315): unsure at all n locations
cttgaagagatcgagcttcttttgcaccacaaggtcgaggatgtcttgcaactgcggatcaagctgcggctgcngctcaagctgcaagtgcggcaagaagtaccctgacctggaggagacgagcaccgccgcgcaggccaccgtcgtcctcggcgtggccccggagaagaaggccgcgcccgagttcgtcgaggccgcggcggagtccggcgaggcccgccacggctgcagctgcggtggcaacttgcagtgcgacccctgcaactgctgatcacatcgatcgacgaccatggatatgattattatctatctaac

SEQ ID NO: 326913 - DNA, 228 bp, Zea mays
cggacgcgtgggcggacgcgtgggcggacgtttgtgcttgagcgccgttcatcggaatcggtcctactagccagtcgactctatctgatcggccaatgccatgcaccaggctctatatgtgcagtataataactcaagttatactgctcttgcaattcgtacgatgcattccaccaattctaaaccatactttaacgctgttattgtcacatcgcctacagttccctt

SEQ ID NO: 326914 - DNA, 228 bp, Zea mays
acgccgcgaatcacagacgcgtctatgtcagcttgctgcgctgtactaccctgccctgggatcatatggcacgtgagcccggacgagcgagagcgagggagaggcatggctgctccgaagctcgcgacgctggcgctggccgtgctcctggcggagaccgtgttggctcccccagcacgcggagcgcgcggccatgtcgtgttccaccgcgtacagcacgctgatgcc

SEQ ID NO: 326915 - DNA, 214 bp, Zea mays
cggacgcgtgggcggacgcgtgggcggactcttgggaaaaaaaaaaaaaaaaaaaaaaaaagaaaaagaaaaaaaaaaaaaatgaaaaaaatatatataaatacaaaacttacgtaaacttatattaaaaattatataatattatatatacataactaaaatgaaaaaaaatggtggtagttttaaaatttccaagcttattaaaacccttttt

SEQ ID NO: 326916 - DNA, 323 bp, Zea mays
cccacgcgtccgtccacgcgttcgcccacgcgtccgcccacgcgttcgctgacgacgggactggggctcacagatactggaagctaattgatcgatgtatagaattcaatctgacttgatcatattacctaggtgcatcctttggtatatgcttatatacgtcgaatcttgtagaggcttactttaaaatcattcaattgtataatgattttggcacatgaatcaatagaatatataaacatccaagctgactcaagggcaattgcaactttgatgctgataacaaatattcttactaacagtttttcatgctgggtaatatt

SEQ ID NO: 326917 - DNA, 164 bp, Zea mays
ctgactcgtgggaaaaaaaaaaaattttaaaataaaaaaaaaaaaaaaaaaaaaaagggaataatttataaaaaaataaaaatattaaatacataaaaataataaattattaactattatataatttaacaatatattaaatttattatcctatctttttataa

SEQ ID NO: 326918 - DNA, 66 bp, Zea mays
aaaaaaaaaaaaaaaaaaaaaaaaaaaaaaaaaaaaaaaaaaaaaaaaggacaaacgcgggtatgt

SEQ ID NO: 326919 - DNA, 131 bp, Zea mays
ggaggatcacgctgacactgagacgcttcggttatggaatacgacatgaggacacgggggatgagagcctatagctagcccgagcaagcctaacttaacaccatggacatgttatgccactgatccagcta

SEQ ID NO: 326920 - DNA, 284 bp, Zea mays
ccacgcgtccgaaaaaaaaaaaaaaaaaattaaaaaaaaaaaaaaaaaaaaaaaaaaaaatgaaaaatataaaaaaattaacaaacataaaaattatttaaaaaattataaaaaaaatcacacctttctataaccataaagatatttaattatacaataaactgtattaaataaactaaaaaaattggttcacttttttaaattatactgttttgtacatctcttgtctatacttgatttttttttttattgactcttaaaacaattttttgactcggtttttt

SEQ ID NO: 326921 - DNA, 62 bp, Zea mays
cccacgcgtccgtttttttttttttttttttttttttttatcggtctttttataggatcggg

SEQ ID NO: 326922 - DNA, 184 bp, Zea mays
gtgagacacaatacgaggtccatgcattcgcttcagtcatgactaacggctatcgggtcctggagtacattgtcgcgcagtccatcatcttccagatctacgacgtgcccatcaacgcacttgttagcttacacttcatcctgtacttcgacatagactacacgctcatgtttcatcatctgaa

SEQ ID NO: 326923 - DNA, 375 bp, Zea mays
cccacgcgtccgcttaagttgttgtcgtaaaaaaaaaaaaataaaaacctacaataaaaagtgacaaataacaaaataaaataaaaaacaaatacaataaaaataacctacaaaatcaactaccacatacaaataaagcaacaaacaacacaaaataaccaggcctgactctttaaaggtacccactttaaataacagtacctcacacttaaaaaccttcttaaaggtaatcattacaatattaatccctcaactattatacaacgtatggcttgtaaaaaccctgcattacccaaaattaaatctctaatagcaaatcccctttttgctgcctttaaaaaacccaaaaatcccccaccctatcgccttttcaaa

SEQ ID NO: 326924 - DNA, 60 bp, Zea mays
cccacgcgtccgaaaaaaaaaaaaaaaaaaaaaaaaaaaaaaaaaaaaaaaaaaaagaaa

SEQ ID NO: 326925 - DNA, 415 bp, Zea mays
  unsure (1)..(415): unsure at all n locations
cggacgcgtgggcggcaaccctcagaacctggtcatcgccgtgcagagcggcatctccttcggcggcttcgtcttcggcatcctcccggccacgctcgtcggctccgtagtcaacgccgccatcctgctcgccctctactggaaccagctggacggcggatgcaagcccgccgccggagcccaggaggtggtcgccgtgcccaccgaggtcgtcgaggaggaggacgtcacgtcgcaccgcttctcgcccggcaacatgtcgcaccttctncttcgacgcgcccagtcccagcaggtgccggccggctacgacgacgcggcgaatcaagaccccgtcaagccgcccaacggcgtccaccacagaaggaaagcagcggtgaacggcgattgcgacggcgacggcgaccgctactac

SEQ ID NO: 326926 - DNA, 98 bp, Zea mays
tgctgagattacagcaacagtggcctacggcagtttactactgttttgtgcaaaagaaaagggaaaaaaaaaaaaaaaaaaaaaaaaaaaaaaataaa

SEQ ID NO: 326927 - DNA, 81 bp, Zea mays
aaaaaaaaaaaaaaaaaaaaaaaaaaaaaaaataaaaaaaaaaaaaaaaaaaaaaaagaaaggggggacaatataaagagc

SEQ ID NO: 326928 - DNA, 451 bp, Zea mays
attcctgatgctgatttggtaagatgactttcattgttcttcagcatttgctgcatacagagctttgattatcaatacagtagatttttcttgggtcttgaccatattcagagggaggtcacaaaagaccctctggctacaatttcagtgggtttgtcataggcttaatttttttattagcaaattgttctggacttgtgtcaccaagcatttttgtaagggtgagagtaataattattttgtaactagctaacatcaagcattttcttggcttcttcaacattttttcatctgttcttttctgatctgaaagctgcatgaattagtcctgcattcctatacaggcaatagttctgttacttcagctatataatttatatggcaaatacacgttacaaagttgcatttcttcacagccatatcttcatgagtcccgacatcgtcatgccat

SEQ ID NO: 326929 - DNA, 321 bp, Zea mays
actagttctagatcgcgagcggcgccctttttttttttttttttttttttttttattatgtgcattattattttttcttttttttttctttttttcttttttttttttttttttttcttttttttttggggcaaaacccattttcccttttttttttgcccctaaaccttcttttcatacctcaggccattcggatcctttccaatttccccccgtcttttttcccctcctttaaacagtgccccccttccccactttcgttttcatcacccttaaatggttaaaaaaacccaggcccttttttttaaccaatcccccggg

SEQ ID NO: 326930 - DNA, 427 bp, Zea mays
tctccccgcacttttctcctctcctcatctccttgccctcgacttccgcctgcaaaccccaggcccgcctccgtcccgtccacgcctccgcctcagcgtccacctcgccggagctgctcggcaagtccgcgctccgccgcatctccgacaagctccgtagcctcggctacctcgagaccgtctccgagccccccactccggccccgaacaagagcggggacgccccctcccccggcgagatattcgtgcccaccccggcccagcttccgcgccaccgcgtcggctccaccctagacccgagctgggccacgggcgacggtgaggctagctccacctcgcggcagcggcggaggggccgcgggcgcgatgcgtcggggtcaccttcggcgccgccgtccgcggcggagttggcgctaccgcgggacga

SEQ ID NO: 326931 - DNA, 316 bp, Zea mays
cggacgcgtgggcgacggagttcaggcctcctccacgaaacttcatccatgatccgggtggattctgggcgtggtgctgtgttcacaaacaccagtctgtcagtcctgtgttgtgtattctgcttttcgatacagattttggaccaatcaaatcctgcattgcgctgcttgccagctagaaaactcctacttcggacccgaacaataacggggactctacctttccctgcgagatattcttgaccacacccgagcaaattttcgaggcaccgcgtacggttcacccttttaaacaaggtgggccactttcgaaggt

SEQ ID NO: 326932 - DNA, 298 bp, Zea mays
aaaaatacaaccataaaacaaaaaaaattccaatcaaaaaaaaaaataaaaacaacaaggagaaaggacaaattcaataaaacaacagccaatacttaaaaaacctctatcactacacggccctcctcctattctgaccctttttaccttccccacccttccaactacttagcttttccttgccacaacttccttcacttccattgcccccccttttacaactccgggcctcgaaaaccctatggacctcaaaccttattccctttccagactatccccttttctccaactcacttat

SEQ ID NO: 326933 - DNA, 370 bp, Zea mays
cccacgcgtccggttgagacaattttgttattggagctagagtgctgaattgaggagcgacatgaatatgcccaagagattagagagacggccaacctgagtatcttgctctgttgcggggttttgcctgcttatgaagctgtgtatggtgattctgttgttgtatgtttatgagtaggctctgactagcgaggatattctgagtgtagaacgtcgaatctagattttttgagggtctgatgttgtttgccattgtcggccggcatttttgtattgcttattgcgaggattttcgtttcttgacgcctgtttctagggacatcatgattggacatttggaatgcaaacaatttctttgtggtgttgggtt

SEQ ID NO: 326934 - DNA, 99 bp, Zea mays
cccacgcgtccgcccacgcgtccgcccacgcgtccgcccacgcgtccgcccacgcgtccgcccacgcgtgcgcccacgcgtccgctagttctagatcgc

SEQ ID NO: 326935 - DNA, 84 bp, Zea mays
aaaaaaaaaaaaaaaaaaaaaaaaaaaaaaataaaaaaaaaaaaaaaaaaaaaaaaaaaaaggaaaaaattataaaaaaaaaaa

SEQ ID NO: 326936 - DNA, 258 bp, Zea mays
cccacgcgttcgctgaatggacattttactactctgcgttcgctctctctctactgatatagtatatatgtggtgtgtctatatatgtgtgcacgtggttttcgctcagctttttatcaacgctttgtgaataaaagctgtctcttcatctgtaaaaaaaaaaaagaaataaaataaatataaaataaaaaaataatatattatagaaaaaaaataaataaaaaaataaaaaatataaaaataaatattatattgttt

SEQ ID NO: 326937 - DNA, 327 bp, Zea mays
gcgtaaaaaacagaaagatgagaatgaaaaaatattaaagaaagaaaaacaagtaaaggctaaagaaaaaaaaaaatgctaaagctagtctttaaagataatcaagaacaaactgagaactgagacacaaacaaggggtgcaacggttttcaggattcgagatttcttgtcccatggttgaaagctttaaccatctatatcgggtcagttaaataagtgcaatggccttgtttttaaaaacctgttaatgggaaaaccctgggggtttccaaatttaatccccttgaaaaaaatcgccatttgccaggttgagaaattttgaaaaag

SEQ ID NO: 326938 - DNA, 490 bp, Zea mays
cccaggtctctaggcgactacgtgatgacctgctgaagatcaaatcagaggctcctcagcatgcatatctaggacagaaatcaaaccagccccggacaaatgagtttcatgaatacagtccagcaccagcaccagcacgtcgtcatctgaataacccagcccagtccttggactgcgagatctctgaacccccagctcatcagctcacaggcacaaaggagaacagtcttaaggtgaaactgctgcaagcaaggctagaggggcagcacgctcggctgagcgcgtcagtgttccccctgatcagcacaagaaggaagtgatgccactcgtgagcttccatgatttcgatccgcaacacagagttgcaattgtaagatagctgaatattgttagctcgaggcaattggactcggtgtgaatcctagatccagccgcgtatgttgtagatttgatctgctaactgtcagactagaatcgaatcaagatggac

SEQ ID NO: 326939 - DNA, 259 bp, Zea mays
gtgtgtgtgtctctgcatggacattttcctactctgcgttttttctctctctactgatatagtatatatgtggtgtgtctatatatgtgtgcacgtggttttcgctcggctttttatcaacgctttgagaataaaagctttctcttcatctgtaaaaaataaaaaataaaaaaaaaaaaaaaatgaaataaaaaaaaaaaaagtaataaataataataaataaaaaaaaattagtaatatgttaaaaatgttatttgtt

SEQ ID NO: 326940 - DNA, 76 bp, Zea mays
  unsure (1)..(76): unsure at all n locations
cgnntccggagtctanntcttctgcatggatggggatggtgannaaaaaaactnnncaaattgtgnnaatcgcaac

SEQ ID NO: 326941 - DNA, 192 bp, Zea mays
cccacgcgtccgagagagttgactgaaagtgtttctgcggtgcgacaatacgcatttcttgagacttggaacttcatgtcgcatactttaaatttcatgtttcggacttaaaaaacaaaaattaagacaaattatacttgctaaactataaaatactcagattacataacctataaaattataattaaaggc

SEQ ID NO: 326942 - DNA, 343 bp, Zea mays
cccacgcgtccgaaaaaaaaaacaaacagaaaaaaaaaaaaaaaaaaaaaaaaaaaaaaaaaggaaaagggaaaaaaaaaaaaaaaaaaaaaaaaaaaaaaataaaaaacaaaaatttttataacacaaaaaaaaaaaaacaaaaaaaaaagggcgccccccctaaaaaacccaacctaaccaacccaaacatccaaccacaaaccaccccaatagggcccccaaaatcaaatccaaggcccgccagattaaaaacgcctaaacgggaaaaacccgggagaaccccaactaaaacgcaggccaaaacaaccccctatccccaacgggggtaaaaccaaaaagc

SEQ ID NO: 326943 - DNA, 98 bp, Zea mays
cccacgcgtccgcccacgcgtccgcccacgcgtccgcccacgcgtccgcccacgcgtccgggcacgcgtccgcccacgcgtccggttctagatcgcga

SEQ ID NO: 326944 - DNA, 331 bp, Zea mays
cgtccacccgatcccctgacccgtcgccttgacccgtacgcgttctagatctacaagcgggaccggctccatctatcacaaactcacgctacacgtacgctgcgaatgcgatagctatatctatagcgatacgctacatctcaaattactggcactgcgccgtacaactacaacgactgtgacaaccataaccctaccgatatcaatcttaatggactagatgcacatttcgccatctgccgctatcgcaataacgcccacacccataatcattgccaacagtaacacattctcaatcgcgaatgggactcgcactctcgctgtacattaa

SEQ ID NO: 326945 - DNA, 70 bp, Zea mays
gcgaagcgaatccagatgcaactccgagggatgctcgaaacgcttctgacgtgcaaatcgtgcgtctgac

SEQ ID NO: 326946 - DNA, 488 bp, Zea mays
ccaagaacggaatgggcgtccttctgaagtaggtccttctgcaaaaagcagtagtaaatcggcctcacattctgatggacctgcttccggttctcttgctgagtccaatgaaataaatcaaggtcttactcgcggtagcagtctgacaggagcaactggtaatggtgtgcttggagaagctatcttagatcagtctgatgagcatgttagcagtgccttgaatcacaggaaagggaaccttgtattggaacatgatggtagaaatggttcggtagcgtcttataggggagttctttcagaagaggaccgtgattcttatcccggccatgctcggaaggactctgctgaaagtattgggagtgatttgagttctttaagaggaagtgaattatctgttccaggggctagtaattccctttgggatggtgctgtggtggatggacatgttagtcaaacagaacatcttactggtttagatatgccatctt

SEQ ID NO: 326947 - DNA, 401 bp, Zea mays
gctgaacatggagaaagaattttagaggaccttgttatttccttagctgatgtgattgctagtatttatctggagcttatgtcagtggatggtgatatgtctgctgaagttgttggttccagcttggttctatgttctctgtcaaccagagaaactcaaaaagctgcgcaatgaggtgggcattaattggtggttgcaccaatacttcaagtcagttggtttcaatgtatgaggacaggttcgagttatatgttctatgcagcaaaaaatacgaaaaaacagccgacaatcaagctgagagggcaaattggtggaggattgcatctgggcagcctaatgtccttactcttgattatgttaacatcagtccattttcccttcagcaagaaggacaaaggaat

SEQ ID NO: 326948 - DNA, 369 bp, Zea mays
ctcactctacgctggtcgctcactcttgcagctccacccttcactcagtcttggtctcggattagctctaggctctagctagccgcgccactccttcgtgtagccatcagccttctcatcgccaccaatggccactgccgaggtccagaccccgaccgtcgtggcggccgaggaagcgcccgtggtggagaccccgccgccggccgtcgtgcccgaggagtctgcccccgccgaggccgaggccgaggccgaggctgctgctcctgctgatcccgaggagcttcccgcggccgagcagcaggcagccgccgaggcggaggccgcggctcctgctggtgccgaggagcccgtcgcggccgaaccggccgc

SEQ ID NO: 326949 - DNA, 283 bp, Zea mays
cccacgcgtccgaaaaaaaaatatgtatatataaaaaaaaaaaatataaataaaattaagaggaaaaaaaaaaaaaaaaagtaaaaaaaaaaaaaaaaaaaataaaaaaaaaaaagggtgctggttttataggttctaattttactcacccttgtttgcaaccgtatacatctcatattggtggatttaaatcgaattcattggctgaagttttaaaaccttgaaattggtaaaatatgttcgatagttattttaattgttttgcatgctaatgtttttttgc

SEQ ID NO: 326950 - DNA, 460 bp, Zea mays
cttgtgcagccgcccctctctctctaggtttggaggacgcccctctcactcctccacccatgggcagccgccaccccacctcccccatcaaaccatagccgccccctcctcaagcccttctctccaaggtgccattcctttcccgctcggatctacgtcgcgttggtgcatgtctccaattggattttggtggagggaagaagaagggaggaaagggggaggattcaaggtgattttgagattgtaccttgtttaattgtgttgtaatccaattgattatatgtttacctatccgaatcggtagaggtgctgtcctgaaattttgtgggtgggcgaacagcagtagttctagggatttctgggaatttttcgtgggtaattagtggggatcagtgggtgaatcatgtagagctttgtcatacctttccaacgggtacttatgcgctcgattcggagttat

SEQ ID NO: 326951 - DNA, 298 bp, Zea mays
gaactcgtacagctactcatgcaatgcttgaccacatcatccactcactacaacagcggtttggggtcggtcagaggaccttgcctatgatcatcctctagctcactatcatactcttcaccctgaaacggctgatgcaaagattccagctgctgcccacgcggagctggacaagataccacaccactgataagctcaggcagctaagcaaccacatcatcgaacataccaccatcgtctgcaagcccctctatgcctagacctcaatgcgtcgaatcctgcacgcgccctcagcata

SEQ ID NO: 326952 - DNA, 73 bp, Zea mays
cccacgcgtccgtttttgtgcccttaccatactctgctgttgcttgagaatatgttattagtctgtcctagct

SEQ ID NO: 326953 - DNA, 78 bp, Zea mays
tccggtctctgaattcccggagtcgacgccgacgcgtctcggttcgacacctagcgtctcttgatcctacatactaca

SEQ ID NO: 326954 - DNA, 380 bp, Zea mays
cggacgcgtgggaaaaaaaaaaaataaaaaataaaaaaaaaaaaaaaaaaaaaaaaaagaaggcgaaaatataaaaaaaaaaaaaaaaaaaaaaaaaaatactaaaaaaaaaaatatactataaaaaaaaataaatataataaaaataaactacaattaaaaaactacttgactattaaaaactttcaatttttgaaatcaatccttttatagaacatattttttaatgcgcatcccaaattaaatgaagatggctcgacttttaaaaccttctgaactttaaaacatcatgaatcactaatttaactcgctttggatcaaatcattttttgcggagttgcagtattttcaacaagaccagaccggttaacttttcaaaa

SEQ ID NO: 326955 - DNA, 348 bp, Zea mays
gagccatcaagatcgcagaggagctgcctcattgcaattaggagtacatatatattgccttgatcttatgcttagtagaacaaactgaacatatcatatatcatctattgtgttttttctcttaacatacctctggtcacattccatacttttactccttatatattacatataactatgcaatatataactttattaattcctacctatgcttatcatcaggttgaactctgaactttgacttccaaaactgcacaatcatcacacgcatgtgcacaggaccgaagtttccagccagccaatgctgagccgcactcatggaattcgcgtgcccttttaacaattacc

SEQ ID NO: 326956 - DNA, 57 bp, Zea mays
aaaaaaaaaaaaaaaaaaaaaaaaaaaaaaaataataaaaaaaaaaaaaaaaaaaag

SEQ ID NO: 326957 - DNA, 395 bp, Zea mays
gtccgccaccgcgcccgcgctgagcgacgccatcgacgtgacgctgaccgccaggaaccccaacaagaagctggtgtacgtctacgacgacttcgccgtgacggccgccacggccgccaacgccgtgccgctgggcgcggccaccgcgcccgggttcgcgcacgaggccggcaacgtcaccgtcatccgggccaccgtctccgcgtccgcgctcgcggtcgaccccgccgcggccggctccgacgtcaagaggtccggcgagttccccatcgtcctggacctggagaccagggccggcgtccgggttggcgcgctcaggaccaagaagatcggcatcctggtgcactgcgacggcgtcaaggtggccgcgcccgcgcccgcgccggccaaggaga

SEQ ID NO: 326958 - DNA, 308 bp, Zea mays
cggacgcgtgggtttcctaggggcgccacggataacaaagacatctctctagtcctgaactgcagcgcgtacagcatactacagcagccacaggtctgtctgtcactccactctgtctactctctactctgaagtctgaactcaatctcacacggatgatacacgaactagggagatgtctttgttttcctaggggcgccacggattagcctgttcgcagctgaattttttcttgtttttttttttctgttttcgctatctgtattgtagtcactgtgcaaaaaaaatcgttttgattgattggctgc

SEQ ID NO: 326959 - DNA, 95 bp, Zea mays
cccacgcgtccgcccacgcgttcgaaataaataaaaaaaaaaaaaataaaataaatatgtaggaaaaaaataaaaaaaaataaaacttaaataat

SEQ ID NO: 326960 - DNA, 294 bp, Zea mays
ggatcccggtcgcccacgcgtccgcccatcatatcttaccttatcgtatccttatttaccttcaaaacttacatggtactgtacctattagacctcttaacttacttgttatacttacactccatgataaccattgtatcattttttttttaaccaatattatatatagacttttatcataaaaatgattttaaaatctatgctcacatatatgatcactttttatacacattttttatccttttctcaatactgtatcaaacacattatatactttgtaaacatcttctattt

SEQ ID NO: 326961 - DNA, 93 bp, Zea mays
cggacgcgtgggcggacgcttctatcaaatatttcttctatttagaaatctaaatttaatggaagggttcttaaatttaaaagtcattaatat

SEQ ID NO: 326962 - DNA, 355 bp, Zea mays
gctcgacgagcaagacgagagcggcccggatggacgccggaggcggtgaagtgagatggctgagaaagaagtcctaggattttttagaacgactgtcaagtctagccatccattcattcccctgtcgaatcaatccgggggctaagatttacgtaattctttttttcttcttctttgctcttctccccacccccactattttaaataatcctccagtgtaaatacatgtactactgcggtttggccacgccagccagcattgttgcaacttggaagtgaaaggaaaaacattcgtttttttacttctgctaaaaaaaaaaaaaattataaaaaattaaatataataattattatt

SEQ ID NO: 326963 - DNA, 102 bp, Zea mays
aaaaaaaaaaaaaaaaaaaaaaaaaaaaaaaaaaaaaaaaaaaaaaaaaaaaaaaaaaagggaaagggaaaaaaaaaaaaaaaaaaaaaaaaaaaaaaaaag

SEQ ID NO: 326964 - DNA, 277 bp, Zea mays
cccacgcgtccgtgctgacgctcgccgccgtgggcttcccgcacgacgccgcgcgcgggtcgcggacgcccaacagccccgagaggtgaaaaccccggctcccggcctggagtacgcccaaggtctggcccaacagcaacccgcggccggcaaccaagccggctggatcggttggctggacacgcttgaagccgccgaccaagtgccgcggctgggcaactgggcgcacggctttcaacgggcctggattgaccggtggatcgaactaaggccgacc

SEQ ID NO: 326965 - DNA, 360 bp, Zea mays
cccacgcgtccgaccacgcgtacgcccacgcgtccggccacgcgttcgcaaatccccccttggccttgcgagggggctgaggggaggtggtacgtggtagtggtagtggtagggtatacaggagtgctctgcccatggagaaggcggggcaacaacgccatgtcatcggcaggcagcaggcaagaaggcgcccgcgctggggctgcagaagcagaactcggggtcgacgtgacatcgagcgcgacgaggcttgggagcgccggcgcagggagcatgcgcagcgggggcacagcgctgctgcgcgctcgcagcgtcacggacgacgaccttgacgagcttcgaggatgcatcgaactgggc

SEQ ID NO: 326966 - DNA, 345 bp, Zea mays
  unsure (1)..(345): unsure at all n locations
cccacgcgtccgggtgggttggcttctcctccccctccggttcgggttcgggttcgtgaggttctccggggttcggtttcgtgggtgagcggatcgagatggcggcgtcggatgttgagtaccgctgcttcgtcggcggcctcgcctgggccacggacgaccactccctccacaacgccttcagcacctacggcgaggtcctcgagtccaagatcatcctcgatcgggagacgcaaaggtcccgcggcttcggcttcgtcaccttctacacggaggaggcgatgctgaacgccatcgagggcatgaacggcaaggagctggacggncgcaacatcaccgtcaacg

SEQ ID NO: 326967 - DNA, 320 bp, Zea mays
tcccggtcgacccaccgtcgaaaaaaaaaaaacacaaaacaacacaattatttgtcacaactgatacaattcacggagcgatttaaaaaatactgttaaaaactctacatgcaccactttcatgctttctacgacccctttattaccctcacctgccatcttttaacaatgcagtgactggcaaaatcctggtatcaccctatttaaacgcttctctcaacaatctcttttccacaccttacgttatcgcaactttgcccatccccatttccttaccctccaaaccctctaccttaatggccaaattacccccccctata

SEQ ID NO: 326968 - DNA, 192 bp, Zea mays
gagatcagaccatgagttacaggacatatcgtctgatcatacgacatggacagggacagcgtatcgtacatgtggggggaatatgaactttcgatgctgggactggggccgagcactgtggatactgctgccagagacttactaaaagaacatatatatgcagctctagagagtggctatacatgcaaggaa

SEQ ID NO: 326969 - DNA, 455 bp, Zea mays
ctcgaatcgaataaataatcatagtcagagctagcaagcaatgcaattgacatctggtatctcaattgatgacctaacagttctaatgcgctgacacctagtagtcccatctgcacatgccatcgtcttgattgtgtcgctgtcttgattgtgtcgctgcctacctatgttggcacatcattgttgtatggatatacatgtctaaaatgggccaggtttgctaggcggcccatggcctggcacagtttaacctggcttgagcatgatccggcccgttgtccactgggcccatgctagtctggcttgatcaccgtgtcgtgcatgggccttaggtgcagcacgacgggctagacccggtacagatcggttttttttccctatttttcataaaaaatatccttattatgcttgattatagaatataaaacaaaaaatatgtgtgtaaaggtggagtg

SEQ ID NO: 326970 - DNA, 397 bp, Zea mays
cccacgcgtccgcccacgcgtccgcttccgttctcaaaccaacctaggcaattcgccgcggcctgtcaccctcgcgagtcccgacctcccgcagccgccgcacagatggcacccaaggcggagaagaagccggtggccaagaagcccgcggaggaggagcccgcgacagagaaggtggagaaggctccggcggggaagaagcccaaggccgagaagcgccttccggcgggcaagtccaaggagggcggcgagggcaagaaggggaaaaagaaggcgaagaagtccgtggagacctacaagatctacatctttaaggtgctgaagcaggtgcaccccgacatcggcatctcgtccaaggccatgtccatcatgaactccttcatcaacgacatcttcg

SEQ ID NO: 326971 - DNA, 214 bp, Zea mays
cccacgcgtccgcccacgcgtccggagattcagagttacctggtctctatgtttctctagcctaccccaacttgcttgggataaaaggctttgttgttgttgttggaatgtaagattgtttgtttttgaagccaaaaaaaaaaaaaaaaaaaaaaaaaaaaaaaaaaaaataaaaaaaaaaaaagataaactaaataaaaaacatagctaaaaa

SEQ ID NO: 326972 - DNA, 423 bp, Zea mays
cgtcccccccgagcctcaccaatcgccggccctccgcaggcagggaagggcggttgggcggccggccggccggagatctgattgctcttatcttctcccctcccgttcatccaatctgctgtcaccatatctgatctccctctccccctgattgcccgcggtggccattgcctcgctcgcgtctccttcgccgcgcttctaggaagattcggcggcgtgcccatttgtcggtcgtagccttaaccagttcttccccaactccgagctccttccttgcttgggagcagctgcacacacatccgcccaggatattagttagcgtggaggatggcgtccagggacttcctccgcgtcttcggcgccggtgagggggcgggcccgccgggggacgccggcgccggccagcccgacgacgacgagctc

SEQ ID NO: 326973 - DNA, 77 bp, Zea mays
aaaatgttgaaagagaccaacacctgctacttcgacagccaacacaataactcccctatacaggcaaaatggcaaca

SEQ ID NO: 326974 - DNA, 369 bp, Zea mays
  unsure (1)..(369): unsure at all n locations
cccggaagncccgggacgacccacgcacccgcccacgcgaccgaacacacgagcgaagagagggaaggaaggaaggaaccagaacggcacagagaaggccgaagggagaaggcaagccagagcagnacaccaggcgacgaagcaagcggcacgaggaggcggacaagggagnggncggcgcgccgccggcgagagccagagaaacgaccaagagcgcgcccacagagacgcgacgacacccgcgccagccgagacgccaagagcnacagccggccgaacagagcacggcgacgcgcaagccagacccgagcgagcccancagaggacacagaccagcagccgaccgacacggaaagaagncaccagcca

SEQ ID NO: 326975 - DNA, 415 bp, Zea mays
  unsure (1)..(415): unsure at all n locations
cgcacacgtccgaaagaaactgcggcgncttttcctgccaaacgataatccgtctgcacgaacaagggtggctgaactatagaggcccttgattacacaggccgatccgtgtgtctggttggatgcaccgggggagaaactgcattcacaaatcctcaaagcacattctgcatgtctcactattctgcatgaccaggctcaacgggtgcaagaaacaacagctagccagacccgttagaaacggacgctcggcgcgtacgcacgcgtgcaggcccggcagagagccaagcccgctagaaacggacgcacggcgcgaacgcgcacttgcaagcccggtgcagccacacccgtacggaccaggctggcacagtgtatgaaaccagaaatgcggtatgtgactgacatggagatgcaa

SEQ ID NO: 326976 - DNA, 204 bp, Zea mays
cctccctctcctgatcccccacctgctctttcttcgtccaacgcatctctccccttatcagccatcttggcaaaatcgccatttctgccactttagatgctctttaagctgcaacatcatttccataacatgaccaatcacacctaccttaaaactctctaccatattatcaccttcttttccatccctcttgcacttacttcc

SEQ ID NO: 326977 - DNA, 341 bp, Zea mays
  unsure (1)..(341): unsure at all n locations
gcgcgcaaacgaacacangaaggacgactggtatgctctttgaaccattatgataggacacgggagaccgggcatagcctattaagctttgcgaacgacatgactacttgaaacaggcctacgggcaaaaagtccttcactgaccctaagtgaagcacgccgactggcatagtactactactacgtgctactgaggatttcacacaatgctggcaactcaagctgttggcgacatccatcagctgtaaaagatctttcagcgctagatgatgactcgaattacgtactataggaacacgaaacagagcctacattcctcacggacatcttcaagtgccatc

SEQ ID NO: 326978 - DNA, 238 bp, Zea mays
ctcgtgcgatgggcgccgagaaacaacacacaatgctgactgatgaccgcaccatgccaggcaggaaatgatcgtgagcatggcggtggccggcgcgatcatcggcgcggccgtcggcgggtggaccacggaccggctcgggcggcgggcgtcgatcctggtggccgactgcctcttcttcgtgggctcagtgagaatggcgtaggccacgcgccccgcgctgctcgtggtgggccgt

SEQ ID NO: 326979 - DNA, 419 bp, Zea mays
aacgaacgaacgaacaaaaagcaacagagataaagcaaaaaaaagatgacaaaaaaacaagagaggacagaaaaaaaaaaaagcgaaagaaacaaaagagaacaaagcaaaaaaaaaaaacaaacaaaaaaaaaaaaaccacaaacaaaaagggggccccctccaaagggccccagggtcaactccccggccttccaacgctaaatgactaatagggggagcccaacgctcaatcccgggcccggggttcaacaacttcgtaccgggaaaaccccgggcgtcccccaagaaaaccccgtggcacaacacccccttttcgccagcggggatacaaccaaagggccccaacccaaacgcctttccaaaaatgtgcccccccaaaagggcaaacgggaccccccctgaacgggcccataaac

SEQ ID NO: 326980 - DNA, 319 bp, Zea mays
  unsure (1)..(319): unsure at all n locations
cttcaaccaccacaagaaggacgaggagcatcccgtcggcgagtacgggtactccgagagcgangtggtcaccgtcaccggcgagggcgagtactagaggtacaagaaggaggagaaggagcacaagcacaagcagcacctcggcgaggccggcgccatcgccgccggcgccttcgcactctacgagaagcacgaggcgaagaaggaccccgagcacgcgcacaggcacaagatcacggaggaggtcgctgccgcggcggccgtcggcgccggcggctacgtattccacgagcaccacgagaagaagaaggaccacaag

SEQ ID NO: 326981 - DNA, 175 bp, Zea mays
cacacacgtccgttcggtgacaatgcgttctgcccctggcacgagccagtggcgttaaggggagccacataaagggacagacttcacagaacccaactcaaggaaactggatcgggcctataaagccaaagatttgaacctatcaggacatcactgccgcaggaccatcccaacg

SEQ ID NO: 326982 - DNA, 347 bp, Zea mays
cccacgcgtccgaaaaaaaaaaaaaaaaaaaaaaaaaaaaaaaaaaaaaaaaaaaaaaaagaaaaaagaaaaaaaaaaaaaaaaaaaaaaaaaaaaaaaaaaaaaaaaaaaaaaaaaaaaaaaaaaaaaaaaaaaaaaaaaaaaaaaaaaaaaaaaaaaaaaaaaaaaaaaagggcgcaacaaaaaaaagaccaaaagaaaaaacaaagatataccacaaaatgaaagcaaaaaaggagagaacaaaaaaaattacactgccagaaattaaaaaaatcaaaaaaaaaaaaaacacgcgacatacaaaacaaaaaccagacggaaaaaaataaaaaaatacaaacagg

SEQ ID NO: 326983 - DNA, 260 bp, Zea mays
  unsure (1)..(260): unsure at all n locations
cccacgcgnccgagcagncacaatacggcacacggaaacagcgcgccagaggcgggacaggcaaacgcgaagacgaaaagagagaagcaacggaaacccacggacaagggcgaagaacgaacgcggcacgggcagcaanagggcaaaacaaaccnggcgcacgacggnccaaacacaacgcacgaaccgaacacgggggcgaacagaccaacacagggggaagaccgcagcacaacgacaggaacagccgacagccaagg

SEQ ID NO: 326984 - DNA, 51 bp, Zea mays
cccacgcgtgcgattactcgctccacgtctcaccgcaacaactcaccacca

SEQ ID NO: 326985 - DNA, 359 bp, Zea mays
gcgcccacgcgtccgccgtgatttttctttgcgcaacgctgctgtaagcctgtaatggtgaattgctagctatggttatgccgttatgaaggaagaaagtgtatgcatgcatggtagggtaaagagtgggtaattaatatcgttgatcaaaaaaaaaaaaaaaaaaaaaaaaaaaaaaaaaaaaaaaaaaaaaaaaaaaaaaaaaaaaaaaaaaaaaaaaaaaaaaaagaaaaaagaaaaaaagctaattacttgaaaaaaaaaaaaaaacaaaaaggtgcgacctttttaaaattaaatgctgctggacagacaaatggcggggccgtaaatttttatagggttaccaaattttaaaa

SEQ ID NO: 326986 - DNA, 383 bp, Zea mays
agcacgcctcccgttacgaaatcagctactattctgaccaactcagaacctcttctctatcgactgatccaatagcacgggcccttggtgcgctaatgccataactatgctcctctactccctcgagcataggcaccagatgatagctatgattcttacttatatgcattcaaccataatccgtcacactataactctgctccactagcttttcaacccatcgcgattaccacttgtatgaatcaacagttcatctcatactatgctgaattactaatctacagctcactcattaattcagtcaaactatcctttctcacgaccgtctaaactcattttacttctcatatcgtccggttaacaatcctacacttaactaattc

SEQ ID NO: 326987 - DNA, 194 bp, Zea mays
cctgcactgaaatgagatcatatagcggattaaaggagctacgaaccatcagggatacggtgcagcatatgatgtagctgctaggccagatgtacactgacctactatggatctcgatgtacgccgaggagatttggatacaggatgagcgtactctgacgaagaaaataacatggaatccagagatgcatagt

SEQ ID NO: 326988 - DNA, 139 bp, Zea mays
tatacttctcttttccaatatacggtgccttttgtgctaaaaaaaaaaacacttatctaacgacatacccgacaactaaacacaaacaacacaccactaaaaaaccaaatacacctacacacactaacacataatccac

SEQ ID NO: 326989 - DNA, 209 bp, Zea mays
aaaaaaaaaaaaaaaagaacaaaaaaaaactcaaaaaaaaacacaaaaaaaaagggaataggaaataataaagggccatacaaactcctcaaaccacaatttcctacccctccatccaaaacaataagactggtacaacgatcccaaaagacaatcaaatccccgttttctaacaacggaattactgaaataaccttaaaactaccaaa

SEQ ID NO: 326990 - DNA, 51 bp, Zea mays
aaaaaaaaaaaaaacaaacaaataaaaaattaaaaaaaaaaaaccacaacc

SEQ ID NO: 326991 - DNA, 343 bp, Zea mays
aaaaaaaaaaacaaaccataaaacaaaaaatctaaaaaaaaacacctaaaaaaaaaaaaaaaggcatacttcgacaaaaactgtggcccctctaaacgatccaaacttccttactcatccttgcaatccattacatacttctctagtgtactctaattacaattaattacccaccattttaaaacctcatgcattcgaaaaaaatgcctctaccaaacttattaatctttaatcacatcctcattttctcatttgcccaaatatcaaacatcaccccatcaatctgccttcctaacaattccctactctccattgtgcatagaacccaccctttagttctcca

SEQ ID NO: 326992 - DNA, 168 bp, Zea mays
  unsure (1)..(168): unsure at all n locations
cgacgcacgcacccacgcacccggccagaagaccggccggcccacncggcggctacggaggagaccaccgcggcngtggagagggaccaccagaggcacgagcaccggacggcaacacacaccgggcaacaacgggcacgcgaccgccaccaacagcaagagcgacaa

SEQ ID NO: 326993 - DNA, 112 bp, Zea mays
  unsure (1)..(112): unsure at all n locations
gcgagaggaaccaagcgaacggacgcgagcaagcgacgccagggcacggcgatagaggcacctaaaagcaaaacacaggcagacgncgaacaacgacgagacagggaaaacc

SEQ ID NO: 326994 - DNA, 326 bp, Zea mays
gactcttgctcccactcttcctctaaggattaacggtccttatattcttctttgcagtatttgaccaaaaagttgttaatgccctcatgacaacctagtctggtctattccatgttggataattgtttgtggttcgtccattaaattccacatttcaagggagattgtttatcattattcccaagctgtcatagatatcattatcgcatggtctgtaacatgaccataatcttctaacatgactctggtttttttatcatactactatctaaccttttcgtcatttatttcctatatatggttactctatatccttagtctaatta

SEQ ID NO: 326995 - DNA, 326 bp, Zea mays
  unsure (1)..(326): unsure at all n locations
agccacgagcggcccaagcgcgccgcgaagcaaacnacgccgacggcnacggcagcggggggagaggcgccgacggccgccgagcngaagacagcggcggccgaggcgcaacccggcggcgcgcgagngaaggggngggncacccaggcccacaaaggcccgaaccacaacgcgcgccgcgngaaacggcaacaagacgaacagcaaacaacacatgaaccggagacggggagcggagagacgcncgcgncacaacaacacacacagaccggcagcaaaaagcaacggaacgcgccggacgcacncaaagcacggaagaaagaggc

SEQ ID NO: 326996 - DNA, 315 bp, Zea mays
gttctagatgcgagcggctgcccttttttttttttttttttttgcgacgcacaaggagaagaccatccattgtcacaagtcatcatgaaacacggtacagggaaggagggagggaacaacgtctcagctggatctatttttttttatgagaataatccaaatagacattggctaaccgaacccaacacgagaaccaatccacaggagggttaaaaaaaccggcggttgttctttgaaaagaagtccgtccattagaagaatgaccaggccatcgccgagaccaacggcaaggccaagcccgcggttaacccaagc

SEQ ID NO: 326997 - DNA, 253 bp, Zea mays
acgcacgcgttagctgttaaatgtaatccatccttttttatgtacatgattatctttagacaccttcgggatcttttaacaaatggggctgcccaaccaaacttcccacctgacaatgtctttcgccccgatctgaccatctaagccttgccttttaaccaaaaataaggtcctgtcccctctttctacccaccgaaataagtaaataaccttaaaagtattggtattttacttgctcccggaagcttccact

SEQ ID NO: 326998 - DNA, 85 bp, Zea mays
actcgtgtctcggcgcgtacgagggcacggacccaacccccgtcggagagagagatggcattggtggcggatatgcagcccctct

SEQ ID NO: 326999 - DNA, 345 bp, Zea mays
gcaaccggtccaacactttcacgctcagcttcagcaatggctgcctccaccatggcgatctcctccacggcgatggccggcacccccatcaaggtgggttccttcggcgagggccgcatcaccatgcgcaagaccgtgggcaagcccaaggtggcggcgtccggcagcccctggtacggccccgaccgcgtcaagtacctcggccccttctccggcgagcccccgagctacctcaccggcgagttccccggcgactacggctgggacaccgtcgggctgtccgtcgaccccgagacattcgccaagaaccgcgagctggaggtgatccactcccgctgggccatg

SEQ ID NO: 327000 - DNA, 77 bp, Zea mays
aaaaaaaaaaaaaaaaaaaaaaaaaaaaaaaaaaaaaaaaaaaaaaaaaaaagggaaaaaaaagaaaaaaaaaaaaa

SEQ ID NO: 327001 - DNA, 307 bp, Zea mays
cccacgcgtccgaaaaaaaaaaataaaaaaaaaaaaaaaaaaaaaaaaaaaaaagaaaaaagaaaaaaaaaaaaaaaaggaaaaaaaaaaaataaaaaaaaaaaaaaaaaaaaaaaaaaaaaaaaaaaaaaaaggtctcccttttcaaagattcaaactttacttcccctttcttccaacttttaaattcttttaaaggttcacctaattaaattttatggcccgttttttaaaaaccttttccctggaaaacccttagtttaaccaaattaaatcaccttccattaaatcctcttttcaacttttt

SEQ ID NO: 327002 - DNA, 80 bp, Zea mays
aaaaaaaaaaaaaaaaaaaaaaaaaaaaaaataaaaaaaaaaaaaaaaaaaaaaaaaaaaaaggaaaaagaaaaaaaaag

SEQ ID NO: 327003 - DNA, 215 bp, Zea mays
tcttcctaaaacacataaaaaaacaaatttaaaaaaaaaaaaacaaaacaaaaaaaaaaagaaaaattctgaaatattcaaaaacttctactaaacataaacaaaaataaaaataaatcaaattgcttccttgccaattaataaccaaattaacatccccttacatctcaactcatatctttccataactcacccctaatatcatttaactcccc

SEQ ID NO: 327004 - DNA, 298 bp, Zea mays
aaaaaaaaaaaaaaaaaaaaaaaaaaaaaaaaaaaaaaaaaaaaaaaaaaaaaaaaaaaaggaaaaaagaaaaaaaaaaaaaaaaaaaaaaaaaataaaaaaaaaaaaaaaaaaaaaaaaaaaaaaaaaaaggggcgccctttttaaaggttccaagtttatttacccttccttccaacttaaaaccttttttttagggcccccaaatttcaatccattgcccgtctttttaaaacttttatactggaaaaaccttgggtttccccaacttaatccctttgaaaaaaatccccttttt

SEQ ID NO: 327005 - DNA, 202 bp, Zea mays
cggacgcgtgggaaaaaaaaaaaaaaaaaaaaaaaaaaaaaaaaaaaaaaaaaaaaaaaaagaaaaagaaaaaaaaaaaaaaaaaaaaaaaaaaaaaaaaaaaaataaaaaaaaataaaaaaaaaaaaaaaaaaaaaaaaaggggggcctttttaaaagatccaaatttaatttccttttaatttaaatttaaaactttttt

SEQ ID NO: 327006 - DNA, 384 bp, Zea mays
aaaaaaaaaaaaaaaaaaaaaaaaaaaaaaaaaaaaaaaaaaaaaaaaaaaaggaaaaaaaaggaaaaaaaaaaaaaaaaaaaaaaaaaaaaaaaaaaaaaaaaaaaaaaaaaaaaaaaaaaaaaaaaaaaaaagggccggcctttttaaaggaccaaattttacttccccttacttgcaacatatttattctttttttgtgtcccttaatttaatttaattgcccttcttttaaaaacgtttcatttggaaaaaccttgcctttaccaaattaaatcgctttgcaaaaattccctttttcccaatttggcttattaccaaataggccagcaccttttgccttttcaaacatttccccaccctaaatggcaatttgaaccccct

SEQ ID NO: 327007 - DNA, 408 bp, Zea mays
tcgcggacgcgtgggctgacgcgtgggcggactcgtgggttctgcgggccgcgttcgataggtggaatgggaagctcatgaggaaatgaatgaaggggggattacatgtttgtggctggtgattgttgaataatctgtgctgggttttaactgcgcccggatgcctgtactgtctcttattttttttgctagcaatagttatgctgcctgcaacttcatgcctactgtctgtactatttgttttgactgtgtgtaagtctattgttattgatcattgataccctgtcgactgcctctaccctttttgtaaaatattttaatttatttttttatttttcttgtatttttcttttcttttgtttttctttattttagttgttatatttttattttttttttattagtttt

SEQ ID NO: 327008 - DNA, 244 bp, Zea mays
gtaaggataagtataggaagagtgccactatgtggatgcaaaaggccaaggcagctatggagaatggagggagttcggacaagaatattacagaattcatcgctaagtattctttaagttaattttcaaagatttcgtaaaaaatataattttcaaaggtaaaaaaaaaaaaaaaaaaaaaaataaaaataaaaaaaaaataaaaaaaaaaaatatttaaactttttaaagaattccaatttta

SEQ ID NO: 327009 - DNA, 173 bp, Zea mays
cccacgcgtccgcccacgcgtccgcccacgcgtccgcggacgcgtccgcccacgcgtccgaaaaaaaaaaaaaaaaaaaaaaaaaaaaaaaaaaaaaaggacaaaagatataaaagataaaaaaattacatacacatgaatgaaaagtaataaataatggtatagtggtacta

SEQ ID NO: 327010 - DNA, 397 bp, Zea mays
ccaagatccaggacaaggagggcatcccaccggaccagcagcgcctcatctgtggccggcaggcagctggaggatggccgcaccctggcggactacaacatccagaaggagagcaccctccacctggtgctccgcctcaggggtggcatgcagatttttgtgaagacattgactggcaagaccatcaccttggaggtggagagctctgacaccattgacaatgtgaaggccaagatccaggacaaggagggcattcccccagaccagcagcgtctgatctttgctggcaagcagctggaggatggtcgcaccctcgcggactacaacatccagaaggagagtacccttcaccttgttctccgcctcaggggtggtatgcagatctttgtgaagaccc

SEQ ID NO: 327011 - DNA, 273 bp, Zea mays
acccacacactctcatacgcacaatctacacgactcaactgaacagatccatcgactccacaccgacgccactgttacttgggacgctactactactactcccctcctcgctcctcctcctgctacgctcgcgaggcaagcgcacggctacccccatacccatcgaaactgccgatgctcatcaccacgacatgactcaccaactcacccgcccaaatcgaacccctgctgacacgcctatctaagcgttacagtcccatcacggctctccgc

SEQ ID NO: 327012 - DNA, 386 bp, Zea mays
gctacgcgtgcatggtcgcgtacggcaatgccacctgcttcctcttcatcgtgaaccacagcactgcgctgtagctccgcatcgtcatgcaaggtcaaggcgccgccggtcatccagtgcacatgcatggttagcggcacctgcactgactccgtgcaacgagctagctgcggcacctgaagaggcagatgccgacgcgcctgcagatgccgcttcagcagatggagcctaaagctctacagactcaaataatgcagctagctcactgctcttcatatgctcattgcttgctgcctgctaactagtggtgatacaactattgttgccatgttactaatcagtaatgatgcatctcccttggtcatgactatgtacttacctatgat

SEQ ID NO: 327013 - DNA, 99 bp, Zea mays
aaaaaaaaaaaaaaaaaaataaaaaaaaaaaaaagaaaaaaaaaaaaaaaagagaaaaaaatgaaaaaaaaaaaaaaaaaaaaaaaaaaaaaaaaaaag

SEQ ID NO: 327014 - DNA, 403 bp, Zea mays
cggacgcgtgggcggacgcgtgggccagaagagcttgcagttactgagagtgtgtgtgagagagaggatgggtggcagcggcagggctgctctgctgctggccctggtggtggtggccgtgagcctggccgtggagatccaggccgacgtcgggtacggttacggcggcgggtacaccccgacgccgacgccggccaccccgaccccgaagcccgagaagccccccaccaaggggccgaagccggacaagccgcccaaggagcacaagccgcccaaggagcacgggcccaagccggagaagccgcccaaggagcacaagccgacgccgtccacgtacaccccgagccccaaacccacgccgccgacgtacactcccaccccgacgccccccaagccgacgccc

SEQ ID NO: 327015 - DNA, 505 bp, Zea mays
tctaaaaaaaataaaaaaaaaaatataaaaaaataaaaaaaaaaataaaaaaaaaataaaaaaaaaaaaagggtaatatttaaaattatggaaaataatttatttataatataattttttaaattttatttttatttatattcaattatattattattttaaattgtttattatttttaaatttctattctttttaatttttatttttcttttaattatattttttttatatttttatttcttttttaatttttaattttttttcctttttttactttcttttcctttttattctttttatttttttatttctatatttttttttataatttttccttttcttatttttttttcttttttttttttattatttttttatattttttttatttttttatttattattttttttttttattttttttttatctcattttttatttttttattattttttattattttttacttttatatttttttattttttttttttttttttttt

SEQ ID NO: 327016 - DNA, 270 bp, Zea mays
acgcgtcctgccacgcttccgaccacacttccggcagaatggtaagggaactattcaatatgacggacctaatgggtctacaaattcaagtgagaacaattcattgtgtgacctatattccaagcttgctaatgatgcaaggctatatggtgcatgtgacaatgatcaaagccacttgccgtcaacttcttaagttttaccgtttgcatactccaattcatattattttctaaccttcaagtttacctgacttgcttattggcacccctt

SEQ ID NO: 327017 - DNA, 223 bp, Zea mays
ggctcgcgttgcgagtctaacctgacgatggaaactacaatggttgtcggaaggatatggcccgtgtgaacatgaactgtagcctggagtagaggcaaacaccgtggttcgaccaacttaatagccctaatggctggattggtaatgagataataatatcgcgcctatactacaactatctctacatttatgactagattgctgactataggactacagggga

SEQ ID NO: 327018 - DNA, 330 bp, Zea mays
cccacgcgtccgcgcgagcggccgcccttttttttttttttttcttattttcttctctttgtttttttttttttggataaaaaacactcccacactcgtcgggcccctagacaacgccaacatctacactaaccttactgacaccagctccaccgggaatgcacacccaccctcaacccccaacacctggactacaggcccaccgacgtcgcccactatgaggaccacacgttacaccgaaactcgcacgccagcactcagcaccttctcctgcgacacgcccagccccaccacgagccgaccggctacaactactcatcgaacgaagac

SEQ ID NO: 327019 - DNA, 370 bp, Zea mays
actcgtccgaaaaataaaaaaaaaaatttaaaaaaaattttaaaaaaaaaaaataaaaggaaaatatagggatatttaaaaaaaaaaacaatcaatcaaaaaaggcctccctcttttcatgttccaagtttacttactcttcctttccacactctttctctcctttactctcatctcatttcacttctctgaccctcttttttcaacctccttccttctaaaactctgtttttccccatcttaatccccttgctccccatcaccttttctccactttacctaatcactaatagccctttacccttcgctttcctaaacattttcacatcctatttgccaaatggatcactccctttaaacgacctttacc

SEQ ID NO: 327020 - DNA, 99 bp, Zea mays
aaaaaaaaaaaaataaagtaaaaaaaaaaattaaaaaaaaaaaaaaaagaggaaaaaaaaagagaataaaaaaaaaaaaaaaaaaaaaaaaaaaaaaag

SEQ ID NO: 327021 - DNA, 371 bp, Zea mays
aggacgcgtggtcggcgacggttataacctgggcatcgccgagcagagcggcatctccgggggcggcttctgcttcggcatgctcccggccacgctcgtcgggtacgaagtcaacgccgacattctgctcgatgtttactggaaccagctggacggcggatgcaagcccgtcgtaggagcacaagacgtggacgccgggcccaccgaagtcgtcgaggatgaggacgtcacgtgacaccgatactcgcacgccaccatgtggcaccttcttctgcgacacgcccagtcacagcaggtgccgatcggctactactacgcatggaatgaagacctcgtgaagccgcccaacggcgtgccacacacaaggaaag

SEQ ID NO: 327022 - DNA, 390 bp, Zea mays
accaatccttcccccttacactggatagagttagagctagacttccaactccagatcgctcgtaccctatgggggcatacgactttccagctctacttctgctcatatcagcactccttctcctaccggtaacagatgccccgtcgctcgaactctcgccatctgacaccaacttcctctccgatcagatccatcccaacgtcctattgcatcccgactacgctatcatctacgattcccaccccacctatcatcccaccttacgccttcaagtaatacatctaccatattgccacatactgtgcactcatattataaatacacttcatcagtcctgttagcattcaccacttcagaagctctaaactaccttgcatgtttctggatata

SEQ ID NO: 327023 - DNA, 320 bp, Zea mays
  unsure (1)..(320): unsure at all n locations
tcccactcgtccacccactcttccacnaatttgtaaaatacctccttatcgtacgatttcgcaaattcataaacattatcattccaattccatatcaaacatattctctcctctcaacattaataacaaatataacaaaattctcattctatctttccaaaactctatatatcctgaaacacaatcacatcttttttatcttcacccctcatttccatatatacattgttacaatcaaacattctaataacaaaacacaactctatttatttatttatccactactcaaaaaattttcttattaaaccaactataaaatc

SEQ ID NO: 327024 - DNA, 182 bp, Zea mays
aaaaaaaaaaaaaaaaaaaaaaaaaaaaaattaaaaaaaaattaaaaataacaagacctctggttacatccggggtcatgctacctcgtatcctattctataatatcacctaatttcactccaaaattcatccacttacacctccttttacaactaaaaccctgacattacccaacttattc

SEQ ID NO: 327025 - DNA, 168 bp, Zea mays
cccacgcgtccgcccacgcgtccgcggactcttgggcagtgaacgagtacttggatactcgagtttatgatgtttgttcggtttatatcttccttgtaataagtcaaaaataatgttttttttgtttcgaatggagcattaaaagaaggggactgatggacacctatc

SEQ ID NO: 327026 - DNA, 357 bp, Zea mays
cccacgcgtccgatatcttcaatgcaaaacctgtgtcgaacagttatgtagtcttggctggattaatcaaagggacaccgtaatttcttggagccaaaaaaaaaaaaaaaaaaaaaaaaaaaaaaaaaaaaaaaaaaaaaaaaaaaaaaaaaaaaaaaaaaaaaaaaataaaaaaaaaaaaaaaaaaaaaaaaaaaaaaaaaaaaaaaaaaaaaaaaaaaaaaaaaaaaaaaaaaaaagggtggccctttaaaaaagttcaaaattaacaaaccttaaattcaaagaaaaaagttttttaaaatggaaccaaaattaaaataaatggacctcatttaaaaaacttataaattggaaa

SEQ ID NO: 327027 - DNA, 270 bp, Zea mays
cccacgcgtccgcagactcttaggctgagtccattatagaaatgtttatgccaaaaaaagaaaaaaaaacaaaataaaaaaaaaaataaacaaataacactcaccctttctactcgaacactctaacatccatctacatgcacatctatcacactcacataaagctacctaaaatcattacttagaccctttcattactaatccgttactcggaaaacccttgcctctcccaaatcaatcaacctcaatgacatattgctttaatcaact

SEQ ID NO: 327028 - DNA, 265 bp, Zea mays
aaaaaaaataaaaaaaaataaaaaaaaaaataaaaaaaaaaaaaaaaaaggaaaaaaaaaagaaaaaataaaaaaaaaaaaaaaaaaataaaaaaataaaaataaaaaataaaataaaaaaaatgctatcctattttaaagattttaaaattaccattaccttaaattcctaactataattattacatattcgccttaaatcaaattcatttataatttttttacattctactaacttgaaaaactatcctattactaaattata

SEQ ID NO: 327029 - DNA, 335 bp, Zea mays
tccacgcgtctccccctattctccgcccgtctactccatcgctcccctggcgcaaacctcgtaaccctctgccaatgtctacgaccgacatcaacacctacccatcatacttatctcatcatgtcccctaaccagactatcatctcataaccccaccttagcgtaccatgtaatccctatagtttagtatcccactcgtacttccgcacatctactctattccgatcctacgacctactctaacattcttcgttccaagcaacgtctgtgatcccctgacacactattatctcaaacacttactacttaccctagtgcacccatcatcaaacata

SEQ ID NO: 327030 - DNA, 422 bp, Zea mays
  unsure (1)..(422): unsure at all n locations
tcgtgcgcgacttttcccttgcgctatcatnnngttccattggctcagaggcgtgttcacgcgttggagaccctgggtnngcggtgtatgagtaccgactcgggccgtgtgaccggagattcgagtgccttccggagttttcaatgggcctgccggggtgcgcactcggacactcgcgcgatgntgcggtgctttcttccggcctgctggacgcctactcttccggctttgaatccgattccaggnnngttggcgggctcgttatatgcagaaagagataacctctatcccgagggcccccgcgcgtgcgtctttcggactttcctaactgtcgctcgtcttgccagccaacgtcaccggcttcgggagaatcttaacgccgatttccctttcggggtgactgcgcgttgagtcgcgctatc

SEQ ID NO: 327031 - DNA, 191 bp, Zea mays
cggacactttcgtccactctttcgcccacttttccagacccactcctccggccacacgttgtgccactcttactgcgactcctgcgtgccgacacttccaaggtgcatcttgccatgtgcatgatcttcaactccaccaacgtcacacaagtgttctctcttatcaacagctaaatctacctcatgtactc

SEQ ID NO: 327032 - DNA, 189 bp, Zea mays
cccacgcgtccgaaaaataaataaacatattaaaactaaaagaaaaatgagaaaaaatcctgggacaatctaaaatagtaccacacaacaaacccaatccactgcatcattattgcaaagcgccagcagtccttcaccataatacaattttactcggctaataacggcacacttggtgtattactacat

SEQ ID NO: 327033 - DNA, 182 bp, Zea mays
cccacgcgtccgcccacgcgtccgcccactcttccgcccacgcattcgcccactcgtcctggcacgcttccgccgacgcgtcctcccacgcgtacgcccacacgtcctaaaaaaaaaaaaaaaaaaaaaaaaaaaaaaaaaaaaaaaaaaaaaaaaaaaaaaaaaaaaaaatggctgccaaa

SEQ ID NO: 327034 - DNA, 449 bp, Zea mays
ggttgcggcacacccttcggaagcaagccagtttgctctagggctgactgatggtggtgtgtttgtgttggggcctttggaatcggagagaaaatggggaaatcctccaccagtagagaatgggtctgctagcaacttgtccacaccgcctcctaatggagcttcaagttctgaccaaccagaaagatgattaagaagttggaactggtagatttttcgtggcacgagtctaaccaagaaggtatccttcaaagttaatgaaacaaattggaacttctttatttaaattccttggcatgatatgtatagaacatttatttataacgtattgatgcaatttaggagtttgacaataagctgccatgatttactcagaaatatgatcaatataatcatgtgaacatagaatatagtgtatgtttttgccaacagattaatttctcttttac

SEQ ID NO: 327035 - DNA, 328 bp, Zea mays
accacgcgtccgaaaaaaaaaaaaaaaaatttaaaaaaaaaaaaaaaaaaaaaaaaaaaaaggaaaaaaaaaaaagggaaaaaaaaaaaaaaaaaaaaaaaaaaaaaaaaaaaaaaaaaaaaaaaaaaaaaaaaaaaaaaaaaaaaaaaaaaaaaaaaagagttagaagctataaagaactaaatctaaacaccacaacttcgcaacactaaatctttaaaaaatgcccacaaaaataaaatcaaaatcaaaggtttataaaatactaggatgaataaaaatcggggagcacccaacaaaaatggaaaactaaaaaataccattaaaa

SEQ ID NO: 327036 - DNA, 262 bp, Zea mays
ccgtgtggttcgttcttccaggcctggcactactccacatttggttctggaggaaagagtggcaaggtgcgatggtcatctggatggtagcacggcccaacccgagccactgctcgtgatggcaaaccgccagcggtccttggccggcgtacagttttactcggctaaaaccggcccccttggtgtattaccagattaccaacaaccttcgacgcagccccagaattcacatcccaaccgtgtgtaaaggttgtctgatccc

SEQ ID NO: 327037 - DNA, 212 bp, Zea mays
gttcgacgcacgcgtcctaccgtacgcacctagcttctaatcataaattcgttccacacctacctacgtccctcgtccgagctttaacatcttgcgcgcaccccacaaaacttaactactagccatgatcacagatctatatgctctcatcaaatatggcttaataattcacttaaaacatcttaccctctaataaaattaccagtatattt

SEQ ID NO: 327038 - DNA, 172 bp, Zea mays
cgggtcgacctcacgcgttcgaaaaaaacataacaacaaacaaaaataaatttaaaaaaaaatttttaaaaaacaaaaaatggtgaaatataaggagatttatcatatgacacatacatcatatattaacaacttataccaatctacacaaactttgatgcttcaactattt

SEQ ID NO: 327039 - DNA, 368 bp, Zea mays
taccggtcgaccacgcgtccgagcgcttcaacacctacctctctaccaacttcctgccaccgtttaactctacacctctcggccatctatcggaactaatcttagcctatctgctacctctgttaacatatctgacctcacaacacacctttagcccttacatgttattcactaccgataatgccactaacgcatcctctacaagaacctgacacgctacgattccccaatatcaaactccctaatcagtgaactcacggtaaaacacttaagactctactatcattactatgctcattatcattctacacatgtcatgtcatttcaataaaaatgtactaacttaacagctcaataatatcttctct

SEQ ID NO: 327040 - DNA, 334 bp, Zea mays
accaatttctatcacacattctattactcttctcctccaccccacattgggacacttgcgacatttatcaacagatacgccctgcccacccaaactcacatatctcacactatcttccctccacatcttcccatacatatccgcatctataaacccataggatgacacacttccaaacttccatcctacacaatacctcattttccatccacatactgcgtattcctacttccctaccaactagaccacgactgctactcctctcaacttatctaatcctgcaagactatactttatcccaacagcttcctatgattcctctaattacatccac

SEQ ID NO: 327041 - DNA, 83 bp, Zea mays
cccacgcgttcgcggacgcgtgggaaaaaatgaaaaacgaacggatcagaaaaaaagagcgggcgcttgtcagccgctatgct

SEQ ID NO: 327042 - DNA, 300 bp, Zea mays
cgaccgactcgtccgtccagcatccagcaaattcaaagctgctatagaatcacaatgacacacatgtctgaaaactgatcacaactactgattaactaatgcaccgacaatgcacatttaacaacgacattgccaccacttaccttaatgcgaactaatgcactacagtgctacccagcccagacacagctcattagggtcatgctcctggtaagcacagtatactttcccagcactggtagccatgcacgatacgacctagatccagacagctaactaagtctaattgctaacttggct

SEQ ID NO: 327043 - DNA, 398 bp, Zea mays
  unsure (1)..(398): unsure at all n locations
cccacgcgtccgacaaactcaaagctgctaagaatcagctcagacgcatccccgaagactaatcacaactactgattaactaagggtgtgtttggaacctttaacaggtttgtccagccttaccttaatgtgaattaaggcacgaggtgcttgccagcccaggcaagctaatttggttcttcctcctggtcagcaaggaaaacttttcctgcactggtagtgaggcaggagaagtccaggatccaaacagctaactaagtctaatttcttgcttggctaggcaaaagattgtttgccgaatcttccaaacatgctctaaggcagtaatgcttatctctggcaagaacttcctttntttttgaaacgaaccaggcaggagagctgccgattatattaat

SEQ ID NO: 327044 - DNA, 320 bp, Zea mays
cccacgcgtccgacaaacttaaagttgatatgaatcatctgatactcatggccctaatactgagtgacatctactgaataactaaacatatgttccgaacctataacaactttgtacatgactaccttaatctgaattatcggaccagttactccccaccttagacacgctaattaggttcttgctcctgttcagaaccgaaaactattcctgatctcgtatagagtcatgataagtcaattatccacacaggttactaattatactttacttgctaagctatgctaaaaattgacagctcgaatcttgcatacatgctc

SEQ ID NO: 327045 - DNA, 195 bp, Zea mays
ctcacgcatacgcccacgcacaccctagctgcttcacaactcgcggtctaaagactgaccagtcaccattagcaagtgcatctaccatggcgtcactaatatactatctcctgactaaccaaactccaactcttcgtagagtacagatacacgcacctattcaacgtcatgaaccactgcaataccacgctaaga

SEQ ID NO: 327046 - DNA, 302 bp, Zea mays
aaaaaaaaaaaaaaaaaaaaaaaaaaaaaattaaaaaaaaaaaaaaagaaaaaaaaaaaaaagaaaaaaaaaaaaaaaaaaaaaaaaaaaaaaaaaaaaaaaaaaaaaaaaaaaaaaaaaaaaaaaaaaaaaaaattctgctatctttttaaaaaccccaatttaattaccccctctttcctaacaaaaaattttctttaaactacccaaaatttaattaaattcatcctgtttaaacaactacttccttaaaaaaacctttttttaccaaaattaaatcctttcaatttatttcccctttt

SEQ ID NO: 327047 - DNA, 390 bp, Zea mays
taccggtcttgaattcgtggcgacgacgcatccgtacaagattcatatgttcttgcgtacagagctataactctaaaagcatgcggacctaaccgagacaacaatgctactagctatgtgtgtttagagcgagcgagggaaaaaagaaaacatctaagatatactccaacatcttcgtttgattaacccgcccagtaaagccatgggtactaattatagagcggtcatttctctagtactcctcgtgtgcatcgctagccgatcgaccttgggtgccgctgaaactgacgtttaacagaatcgctcgtcagtccctttgatgtttgtgttcggtgattcgctggtcgatgtcggaaacaataacttcctgccgacttctgcaccccgtgc

SEQ ID NO: 327048 - DNA, 458 bp, Zea mays
accgtcgttcaattcctggctcgacaccacgcgtgcgcacaaccttgctagcttgccggagccgctatacctgacagagtgggggctgaaagcgggggcgcacctttcgcatctcaccctctgaactctgaccctgctccgcgaagttgtttccttttcttctattatgacaaatgcagtcgcttgatcaagcatctagacggccgtttcactcccgttcacggaagtacagaccacgtgtcctgccggactttgtttcggtcaagctgagtgtgcacacgcgtatccatgccttactcaactgctgacctgtaacatctaaatggtctgctctgcgtcacgtggtactcatcagcaaacacttgacagccttttcaccgatcaccaacgcctcgttgccttgccactggctgagcattgacccgcagctatttgccttgcacgcacgacacccgtat

SEQ ID NO: 327049 - DNA, 479 bp, Zea mays
cgtcgacccattcgctgctcgaaacacgcgtccgcacaacttgctaagctagccggatacgccatccctgacaaactgggcgctgaaacatggagcgcactcttccgcatatcacatctcttaactatgactcctggtccgcgaaaatgctttgttttaatcaaacatgacaaatgcactcgtttcatcaagcatttagacggtcgtttcactcccggtgaaagaactacagggcgactatcccgccgcactttgtttcggtcaagctgagtctcctcacgcctatccatgccttactcaactgctgacctgtaacatcgaaacggtctgctgtacgtcgagtggtacgcttgagcaaacaatctacagcctattcaccgatcaccagtgcccaattgccttgccactcgctgagcattgacccgcagctatttaccttgcgcacacgacacccgtatatactccaactcgggcgtttc

SEQ ID NO: 327050 - DNA, 246 bp, Zea mays
tgctctttgtggactcgcaaaaaaaaaaaaaaaaaaaaaaaaaaagaaaaaaaaaaaaaaggaaaaaaaaaaaaaaaaaaaaaaaaaaaaaaaaaaaaaaaaaaaaaaaaaaaaaaaaaaaaaaaaaaaaaaaaaaaaaaaaaataaaaaaaaaaaaataaaacaaaaaataaaaaaaaaaaaaattcactagaaaaaaaattaaaaaaaacaaatattagaaaatcacaataatattcaaaaatt

SEQ ID NO: 327051 - DNA, 220 bp, Zea mays
ctcctcgctcgacccactcctactcccacgcctaccagttttaccataaacccttactaccactaatcacgggactataacattgcgagcactagcccaacatcacattgcatcaccatactaaaataccgtccaacttcttcctcataatcaaccacacgcattccaatagcacctaccacttctaaatcagctattccactcccgacaaacgcaccct

SEQ ID NO: 327052 - DNA, 398 bp, Zea mays
cggacgcgtgggcaaaaaaaaaaaaaaaattataaaaaaaaaaaaaaaggaaaaaaaaaaaagaaaaaataaaaaaaaaaaaaaaaaaaaaaaaaaaaaaaaaaaaagggcgccccttttatcgtatccattcttacttccccttccttccaacttcttacctcttctttattgccccctaatttcatttcactgcccgtctttttacaacttcttcccttgcaaacccctgccttttcccaacttattcccctttcaccacatccccttttcgccaattggcttaatcccaaaaaccccctaaccgatcgcctttcccaactttttcccatcctaaatgccaaatggacccctccttttaccggccctttaacccctcctgttttggtggttacccc

SEQ ID NO: 327053 - DNA, 95 bp, Zea mays
aaaaaaaataaaaaatcacataaaaaacaatctatacgcaaacgcttggagaaattcatactgagacacgtgtgcatgccttgtagccactatga

SEQ ID NO: 327054 - DNA, 278 bp, Zea mays
cccacgcgtccgaaaaaaaaaaaaaaaaaaataaaaaaaaaaaaaggggaaaaaacaaaaaggaaaaaaaaaaaaaaaaaaaaaaaaaaaaaaaaaaaaaaaaaaaaaaaaaaaaaaagggacagaataatttaaaagaacaaagctaacatacacatcaaactaactccaaaactcttcaaaagagtaaacaaatataaattaattgaccaaatttaaaaaaagagtgaaacttaaaaaaccctgatttcaccaaactaaaccccatgcaacgaaaa

SEQ ID NO: 327055 - DNA, 105 bp, Zea mays
aaaaaaaaacatacaaaaaaaaaaaaaaaatataaaaaaaaaaataaaaaaaaaaaaaaaagagagaaaaaaaaaaaaaaacaaataaaaaaaaacaaaaagggc

SEQ ID NO: 327056 - DNA, 317 bp, Zea mays
cgtcgacccactcgtcctcgaacgcctcgtacaaaaaaacacccagttctgagtcggaagtttgactcccgcacaacggggcaacacaaaacgggtacaacatcacatccctccgacatcatcctgaagaccgcactcatcacaccagcaccttgtagcattaccgcatcaaccgacaccatcaccaccttaacctacaaactcaccgctacactcaatgcacctccccaacttacatatccatgacacctacttctcttgcctacattagctcattgcacacactcaggcaaccttggacacctgatacgacaatc

SEQ ID NO: 327057 - DNA, 369 bp, Zea mays
acaaatcaaactcaaaccaccctttaacgtttaactacacacgatatacgtgctctacagagtcatcatataagagagaactccgttatgcttgaccctatgcccactctcgaaacaaactcgacacgtgacaaagaattccgacccgatcggcccaagttaaataccactactattaacaatgagttacttatcccccggttccgaagcgggacatacgtcccatatcttgaatacaagggccatcctaattgcgcccatccgctcggactacatctacacgtctaaagttattctcatactctacatatagtaaaagacaacacaggtgtccttagatgatcacatcgacaacacaaatcccttggc

SEQ ID NO: 327058 - DNA, 315 bp, Zea mays
aaaacacataaaccaaaaaaacaaaaaaaaataaaaaaaaaaaatgagagaaaaaaaaaaagcgtaaatactaacaaaaacaatactcacaaggccatgacctccaccctgctcaccctttacttctctatcatccgacctaattctacttatctagcctctcttctacaaatttaaatcctatgcaatctttcacctttaccaactttaaatcccttgatacacctaacgttaccatctatctctttaatcccatttatgcattcacctatcgccctaccatataacgaacccattcttacttgcgaaccttac

SEQ ID NO: 327059 - DNA, 296 bp, Zea mays
aaaacgcatgcacctttaaccaaatgcaagattatagtcctgaataggcgaactaacatgcgagatccattaagcagcgatcgatccagacaactgataccacactaatcaaactctacatgctcgcaaattacccaattcttacacatctaggtctacataacaaatatcaataccatgcacattagaccctgacaatcataataaccccaatctaaatgacttaaataggatccattgtaccgcaaatctattgccatcattcggaatcattccagatccaatcccgtatattt

SEQ ID NO: 327060 - DNA, 403 bp, Zea mays
cggacgcagtcgtccgacgcctcgtaaaaaatttacccaaccaaattaacgggcttgtcctggtctcatagaagggggaccccgttgatcttgactctaatacgacttgtaaaatgacttgagacctgtaaaataagcgtgagcctaagctctcaagtcaaataccactactactaacgtaatattacttatttcgtgaatcctaagcagttcaccgtccgtccttttggctacaaggcccggtctcttcgtgccgatccggactaactacatcttcatgtctaaaagcatgctcaatactcacatttattaaacgataacacaggtgtcctaacatgaccatatcaagaacagatttctagtacctaacaaaatgctaaatgctcgtcacattctcaatttc

SEQ ID NO: 327061 - DNA, 408 bp, Zea mays
ctcgaaccatcgtccgacacgcgtccggcgtatttgccgtggagatttcaggcctgcggcgaggattgcaccttgtgaatccgcggagaaggcgaccagctgcaccatggcctacagactgctcaaccgctacatcaggcataaccgtaccgtagctgccgatctaggactcgctatcagaactgaatcctatgcatacaggacctagacagacatccaaaagggtgagacgctgaaagagaccatggatctcttcccacacatcgctacattctgctcagatgctgccactaacgaagccctcgatacgaggtaaccagagaagcgccaactgactatcccatatggcggtaaggtccttcagttacatgactttcctgctgataatgcacacgaccatgatcaaat

SEQ ID NO: 327062 - DNA, 213 bp, Zea mays
cccactcgtccgagctttaccacaaccaatttaacaaactcttccgagtcatcttacatggaaaacttttatgatcatgactctaataccactatccaaatgactatatacctataacataactatgaccattagctcccaagtcaaacaccactacttttaacgaaatatcactcattcccttaatctcaagcattacacctaccctccttt

SEQ ID NO: 327063 - DNA, 360 bp, Zea mays
cggacgcgtgggccgggggccagttaaagatggtggtatggtatggtagcggcgttgtgggagatgcgtgatgggaccatggttacggaccatgatgatgacgctgcgttccatttagctctctgctgcctgcttctgtattaaagaagtggttcgatgtctcagaactgaatacgatgcaaagaggacgtcaacagacatggaaaaagggggagacagagaaagagaccatggatctcttaccccagatcgctggattcaaaatgggaggctggctctaaagaagccaatgttacgaaggagccatagaagcgccaactgactatatagtatggcctaaatgaacttgtgggccatgac

SEQ ID NO: 327064 - DNA, 293 bp, Zea mays
taccactcttccgcccactcttccgatatattaaaaaaaaaaaaaagaaaaaaataaaaaagagaaaaataaaaaaaatataactactaataaaaaaaaaaaaaaaataaataaaatataaaaaaaaataccaaacaaactctaaaaaagattctctaaaatacaaaaaaaaaaaaaccttatttcataaaatcaacagagttaatatttattacgactacatgcatattcatctcactcatctaaaatgctattacctgaactccctgcaattaatgcagcttatctctatt

SEQ ID NO: 327065 - DNA, 394 bp, Zea mays
gcgtagatcgcgagcggctgccttttttttttttttttttgtttttattttttgtcttttttggggatttttggtggggtaaggacacttgaatttataccagaaaaagaagaaagagagagagagagagatgattcagcggaaatcctacaattgtgcctacatgttcctggatgttttacatgctaccatgcatgttattgcctagcttgattcgatctgtgcacactgactgccagaaccagcattaaaagcgtttgtagtcctagagggacttacgcaagctacgcaaccgaacgggtacgtactaacgctagctagtcagcccttcagatggcctttaactcgggggcaaaaagtcgttcctgtccaacgaccatggtaatatggtcct

SEQ ID NO: 327066 - DNA, 399 bp, Zea mays
aaaaaaacacgtacacaaaaagataaaacattaaaaaaaaaaaaaaactaataaaaaaaaaagggaaaaatgccgaggcgttctacatgacccaagctaacttacacagccatgcgcaagctaacgttttctatacagtaacctaacaccaattaattggacttcgttctaaaagctcgtgactgtgaaaaccatgcgttaacaaaaattaaaggccttgcgcatacataaggcattcgcaaactggctaaatagcgattaggcccccaccaatagctattacaaacagttccacagactgaatcactaatgggaccccccatgtaccggcgcataaatcacataatctgagatgtaaacccccagcatgcccggtaaaattacaactaccctaccgcc

SEQ ID NO: 327067 - DNA, 163 bp, Zea mays
ctaccctcccagtacacctaagaaattatagcgctcataacaacacatctgatgtccatacaatatcatccaataacatcatagtatctacctcatattgtacaagaatccgacatcgcagaaattacaaaatgaaacactctgaagaattaatacaatcata

SEQ ID NO: 327068 - DNA, 298 bp, Zea mays
caagaaccgaccggctcatacccttctgccttcgatgcgctcatggccggaactgaccgggggcagcactacaagccgagacttaaaacaaacaacagagctcaaaccaagccatcgctctcaatacataaacataagacaacatcatactattcccgtcctatcgattaggcattataaatcggagtaatgaacaatactcacacccgggagccttcatataaaatagtgacatatcaaattctaatagttagaaacgactatcacatggtaaagcctgatcaaaggaaattatgat

SEQ ID NO: 327069 - DNA, 247 bp, Zea mays
ggctaaccgaccggcttgacccttatgaactttatgccatggtctccggaattgctcgacgcgtgctttcatccgggctactctgatcaaattctagagcccaaacatagccatcggtccggatacattaccatccaataactctatactatcgccctccaattcacttgcacttcggcactggcataatcattactcggttcaccgacggctattcatcatctatcttcagacccgaatgctcttg

SEQ ID NO: 327070 - DNA, 338 bp, Zea mays
aatgccgtaagtttttgatcccaagcctgattcttggactggtctagggaacctatccggggttgtcaccgtcagagttgacttgcattctttgctcctgatcctgtcggttaccgtggatcacatttcctgttgaattacacaaaagcctactggtttctaatagattgctgccacctacaatattatgacgctgctgaactttaaaagcaaccaaatgcggccgaagatctaaagcatccaagtttacctattcgtgaatgcgacgttatagatcttctattacgtcacctaactgcaattgaatgtccatcgcattacaacgtatggactcacaa

SEQ ID NO: 327071 - DNA, 113 bp, Zea mays
ccggacgcgtgggcggacgcgtgggtgagttgtcagtgttcttgttcttcaaactctcttagttcgttaattatgtgtatgcgtggcgtggataaaggttcgagagattcgtt

SEQ ID NO: 327072 - DNA, 367 bp, Zea mays
tccgtccgtcttcatctttatccgagagttcctgtgcagtcagtgtgaaaagaagccacgattttagcacgagcgagcgaggggtctggatgaagtcctctcccaagtcttcgatatcgtctatgtcagcccagtcaaaggtgtatcgccgacacggtcggtcgcaacacctctccgagactgtcattcgatcttctgcaagggtgaaccaagatccgatttcgaggagagtcaacgggtggatcttgttcaaagtctcaagcaccctcacaacccgaattcaaaaataatataaccccatgggacaaggtgacccgcaatttgttgatggaaagattcaaaactatttgaaaagtcatgccgattt

SEQ ID NO: 327073 - DNA, 304 bp, Zea mays
cggacgcgtgggcggactcgtgggctccatcttacaccccttcgccaaagcctccgacaccgaagcctaccccgccgacgtacaccccttcttccaagcctccgacgcccaagccgaccccgccgacgtacactccaagccccaagccttccacacacccgacgcccaagccgaccccaccgacgtacacccctttcccaaaaggctcgacgcccaagccgaccccaccgacgtacacccctttcccaaagccttcgacacccaagccgaccccaccgacgtacacttccacaccgaagccggc

SEQ ID NO: 327074 - DNA, 162 bp, Zea mays
cgacccactcttcctctttctctttttcggactcgtgggaaaattttttttttaaaaaaaaaaaaaaaaaaaaaaggaaaggttttattttatatattaggtgtcctttcaaacgcccccctccataaaaatacaataacttttaaaaacattcactttaat

SEQ ID NO: 327075 - DNA, 288 bp, Zea mays
acccacgcgtccggaaaaaaaaaaaaaaaaataaaaaaaaatttttattattaaaaaaaaaaaaaaaaattgaaagagtctaattttactccgcccccctccccctcctttctttctttttaattaaaccaaaattcaattcacttgcctcttttttccaaacttttgggcttgcaaacctctttcataaaccaaatttatccccttttaaaaaaattcccctttttttttgttgtcccaaaaaaaaaaaaaccccccccctttttcaaacccaaaaattttccaaaa

SEQ ID NO: 327076 - DNA, 284 bp, Zea mays
gccacgctcgccacgcgtcgccactctccccaaggaggtgcgacagaggaacgaaacctccgcgacgaagccgcggagtcagactgacctaccggccacttgcggctaagggcttaaggacctgctccgggatgcgccggctctcggatgcatacctggctctgggttccgtcatcttacgacacgctggatgggcgggagattacacggaccccaggggcaacgccaatctggcgtaacgaaggtcgagtcggcgttcgctgtactaactggtattctaggtc

SEQ ID NO: 327077 - DNA, 90 bp, Zea mays
aaaaaaaaaaaaaaaaaaaaaaaaataaaattaaaaaaaaaaaaaaaaaaaaaaaaaggaaagagaaaaaaaaaaaaaaaaaaaaaaagg

SEQ ID NO: 327078 - DNA, 294 bp, Zea mays
cccacgcgtccgcccacgcgtccgcggagtgcgagccagccggcgagctacaacccctgtgatgcagccgcgtctgccccgatgatgaccaccatggcgccggcgatgcacgatccgttctacgcctcgaacgggtacgcggcgccgcacggcgtgcagatggcggcgatggctcaccaccagcagcagcagcaggttttcatgctgcagcagcagatgatggcgccggcgccggcggtccaccacccgatgcagatgcagcagaaccccgcgaaccctttcggcaaccccttc

SEQ ID NO: 327079 - DNA, 378 bp, Zea mays
cccacgcgtccgcccacgcgttcggccaactcgtcgttcaagccgtccgggaaaaggaccggggtgggttgggttaattctaaccgagttgagcagtgtgcttagtgctactggtttctgcctggagagctgatcaaaggatatctgtagcgtgttgttatctgatctgaaagggagtgcttgacctccaacgttgttcaactcgattttgctagcgtttcagtagggtttttctagacttgcaaacgttatgctttcgtcagattctgaagcgtctgcatcctttcctttttcatctatgtactggggctcttgtgtgtgactggaaattcgttaccaagttgctatgctggaacatggaaaagaaaaaaaagagat

SEQ ID NO: 327080 - DNA, 230 bp, Zea mays
  unsure (1)..(230): unsure at all n locations
gaaaaaaaaaaaannnnattccatttttaccttttttttctaaaaaaaaaaaaaaaaaggaaaggtaaaatttaaaaagggggggggggggcctcccaattaaaaaaacccaaattcccgtgcccgcgaatgcaaaactattttttttgtttaccgaaaccaaaattaaatgcacgggccttacaacaacaacaccgggaaaaccaaaaccctacccaaaccaaacttaa

SEQ ID NO: 327081 - DNA, 274 bp, Zea mays
  unsure (1)..(274): unsure at all n locations
aaaatctcccactcatcccacacccctcaantcattttacaaatttcacccttgattcaacctcaacaatttcttctttcccctcttattacttcaatcccattcccttatctaaaatttcactttatactttacatcttacctttcaatcttattaattcattcattcacttcatttattttattacctttcatttttctaccttaatattactatttattctttccatccatttacccattctttttttttattttcttcaactttttcaat

SEQ ID NO: 327082 - DNA, 233 bp, Zea mays
  unsure (1)..(233): unsure at all n locations
cggacgcgtgggtctctatatcgcgagggccgcccttttttttttttttttttttttttgggtttgttttttttttattttgtttaggtaatnataaattntattttttttttttttttttccccggaaaaaacccacccccccccccccggggacaatttaaaaaaaaaaaaaaccccggccccccaaaaccaaaattccaaccccccaaaaaaaatttcacattttttttt

SEQ ID NO: 327083 - DNA, 168 bp, Zea mays
tttatagggaaacaaaaggtaaaaaacattgggttggcgtaaaaaaaacatggtgacttgaaaaaccattgttttacctaaaattaagaggccagaagaaaataaacccttcttgccagctcactctttttcaaaaatgccccccccaattagaccttcccaaaaatt

SEQ ID NO: 327084 - DNA, 82 bp, Zea mays
ctagttctaggcggccgcccgcgttctaattcgtttcccttaagattacctgaggccacggcgagttctatcgggtaaagcc

SEQ ID NO: 327085 - DNA, 427 bp, Zea mays
gagagagcaataggagttttgaagtagcgttttctcattctaaaagttggaacacaccacgcaattaggaaccaagtgaaaatagcagctgcggcagtgttgttccataatattatacggatgcacaacggggatgaaggttggttgaatagccaaacaagtaacatatcgccagaaacttttgttgatcttcctggaggagacaattactatagcaatgatgttgtgtcacttaatagccaagtggataatgggaactctgttagagatatgattgcattgaatatgtggaatgattatagtcaacatcgttcatgatatatcaagaatgtttggaagaggatctcctaggatgaacttgatccaagctgcaactatgaaaaaaatatcccccagatctactactaacaagcgcaagaagagaaca

SEQ ID NO: 327086 - DNA, 355 bp, Zea mays
ccactcttcctcttactctttttccgactcgtggttttactcttgggccgacgcgtgggaaaaaaaaaaggagaaaatttaaaaaaaaaaaaaccaaaaacaaaaaaaaataaaaacttacaaaaatcggcatcctacataaacaacacacaattataagttcccttttattcaacaacatactcctttaataaatcccccttaactcaattgtctgtcctctttaaaaaaaacaaactccctggaaatacccttcctttacccatctttctttctttccaacacttttcccttttatgccccttccttttaacctataatccccgaaaatacctttttttcccccattttctcc

SEQ ID NO: 327087 - DNA, 69 bp, Zea mays
aaaaaaaaaaaaaaaaaaaaaaaaaaaagaaaaaaaaaaaaaaataaaaaaaaaaaaaaaagggaggat

SEQ ID NO: 327088 - DNA, 424 bp, Zea mays
  unsure (1)..(424): unsure at all n locations
ctcaaaactgcacatcttgactgaacaagcctgaaacatgatttatttgtagttgggattgctgcatttcagacttttgtttcttatgtacaccacatttatgtttttgtcaaaaaatagtcctggtcttgtcctattgaaatataaatctctgatacaactggtcatgaaagtgtttatatcacctttatctgcacgatcaggttggcgcctatgcggtttatatgtggaggcatagaagattttttgggaattctagggagagtttagaacatattgtgcgtgtggttgtcctgaatatggtactgctccactntttttctgcttattttattttgccttcgtttcaaaaactttctttgttctatctgcaacattttctttttcatagggtatgggcctcctttcagggggattgataact

SEQ ID NO: 327089 - DNA, 268 bp, Zea mays
tagatcgatcgacctctgtttatatgtatagcgagtcgtccgtagtcacgtcatgtgtgtatcattctttgcgctcccagcagttttgtttcctttcatattctctacaaaattttctaccaatttaattgatactttatgtcacagtgtatatgtttatgtgtcatttgtttttctttagaatggcttttatgagatgtttttcttgcatagaagttctattatttaagtcatgattatgcaagtacatagtagacgtttttactat

SEQ ID NO: 327090 - DNA, 184 bp, Zea mays
cccacgcgtccgcccacgcgtccgtaagcatataaataagcgaagaagaagaaattggtgggtaaaaaaaaaaaaaaaaaaaaaaaaaaaaaaaaaaaaaaaaaaaaaaaaaaaaaaaaaaaaaaaaaaaaaaaaaaaaaaaaaaaaaaaaaaaaaaaaaaaaaaaaaaaaataaaaaaataaa

SEQ ID NO: 327091 - DNA, 194 bp, Zea mays
cccacgcgtccgcccacgcgtccgcccacgcgttcgaaaaaaaaaaaaaaaaaaaaaaaaaaagaaaaatttaaaaaaaaaaaaaagaaaaaaaaaaaaaaaaaaaaaaaaaaaaataataaaaaaataaataaaaaaaaaaaaaagggcgtcctttttaaagaatccaaatttacttacccttgctttcaaaa

SEQ ID NO: 327092 - DNA, 134 bp, Zea mays
cccacgcgtccgcccacgcgtccgcggacgcgtgggttttttcttttagtttttgggtggggttttttttttttttggttttttttttttttttcccatgcctgcctctaccctttcgcccacccctccggcaa

SEQ ID NO: 327093 - DNA, 62 bp, Zea mays
aaaaaaaaaaaaaaaaaaaaaaaaaaaaaaaaatcaaacaaaataaaaaaaaacaaacttac

SEQ ID NO: 327094 - DNA, 402 bp, Zea mays
aaaaaaaaaaaaaaaaaataaaaaaaaaataaaaaaaaaaaaaaaaaaaaaaaaaagaaatgaaaaaaaaaaataaaaaaaaaaaaaaaaataaaaaaataaaaaaaaaaaaaaaaaataaaaataaaaaaaaaaaaaaaaaaaaaaaatattatggccccctctttttagttccccaattttatttccctttcttttcatttttttcttttttttttatttcctctttatttaatttcctttccctttttttaaaaactttttctttgtaaaacccttttttttctcaatttaattcctcttttaatatatctctttttccccatttctttaattacttaaataccccccatctattcccttttccaaaatttttccatccttaattccttttttttcccc

SEQ ID NO: 327095 - DNA, 407 bp, Zea mays
cggacgcgtgggcggacgcgtgggccgcagcgcacagcgtgcccggcgccctggcgtgcagtgcccacgcgcttggccccagccgggcccccgccccagccccatggtcgctcctcacggcctacgagctcgcccctggccacaggcagcagggcgcccgcgcatagcccaagcagcccttgctgaccgtcccctccagcgcgtggtgctcctgccagccggcgggcgtagcaagcccccgtccctccgagcgtgaagatcatgccgaactagccccggcagtccccatggcaacctatgttcctgtgttcgtgggcatatgcagagaggaggaataaatgccacgctcgatcccacctctttccaaatctccgtggctaaattttgtgtggcctagtgtgtgactt

SEQ ID NO: 327096 - DNA, 64 bp, Zea mays
catacaaaaaactaaactatcataatcacaatagcattaaaaaacagataaacaaacaagaaga

SEQ ID NO: 327097 - DNA, 97 bp, Zea mays
cccacgcgtccggaacaaatttgatagcacctgatgttgccttagacgactaaatcaatgaggtgacaccagtaactatcatgtcttaatcaaaaca

SEQ ID NO: 327098 - DNA, 286 bp, Zea mays
cccacgcgtccgaaaaaaaaaaaaaaaaaaaaaaaaaaaaaaaaaaaaaaaagggcggacaggggggaggatctaaactatacctaggtcaccttcccacgcattcgatgttatatatcgtcacttaagttcactaaattgaatcgactgtccacaacttttacaactgggaaaactcgtaaaaccactgaacttacatcaactttaaacgacatgcagcattatcccagtttgcgcagatagcgaagatagccaaaagggatcgcaccttatcaacatttgcaac

SEQ ID NO: 327099 - DNA, 66 bp, Zea mays
aaaaaaaaaaaaaaaattaaaaaaaaaaaaaaaaaaaaaaaaaaaaaagaaaagtttaaaaaatgc

SEQ ID NO: 327100 - DNA, 75 bp, Zea mays
aaaaagaaaaaaaaaaaaaaaaaaaaaaaaaattaaaaaaaaaaaaaaaaaaaaaaaaaaaaaagaaaaaaaaaa

SEQ ID NO: 327101 - DNA, 433 bp, Zea mays
ggccggagctccctcctctccctcttccatggccggcgtccccttcagctccaactcgggctccatcccatggcgcccggccgcctcttctcccccatggcgctcctcccctgctcctccgacgcggcggcttccggctcgctcgaccggccatggtggccgcgcaagcctcctggccgcgggcggctctagcccaggccaccttcgcgcccggggttatggcgcgcgtccctacgcctagctaggcgcctagcctttgtctccgtcgcgccgatccgcgctcgccaaggtcacccgccatcgcccagctcagcggcttcccctgctacaaagttcgtcgtctgtccgtacgtcgcctgctgcttatatcctagccaggtcaaccttgtcatggtgctggagctctcggggatccggcatgtcgtctacttgc

SEQ ID NO: 327102 - DNA, 150 bp, Zea mays
cccacgcgtccgaaaaaaaaaaaaaaaaataaaaaaaaataaaaaaaaaaaaaaaaaatagaaaaaaaaaaaaaaaaaaaaaaaaaaaaataaaatatatataaaaaaaaaataaaaaaaaataaaataaaaataaaaaaaaataaacaa

SEQ ID NO: 327103 - DNA, 52 bp, Zea mays
acccgtgactcgtcgcctgacgcaggggcgcgagggaatcataacaagggct

SEQ ID NO: 327104 - DNA, 223 bp, Zea mays
taaaaaaaataaaaaaaaaaacaaaaaataaaattaaaaacaaaaaaaaaaacacataataacaaaaaaaataataaaaaatttaataaacctaaaaaaaaaatacatttaccaaaaaaataccactattacatttctaaaacccctctttatacccaacttactcatattacatcacatttcctctccttctacttacttacaacacatacaatctctcttc

SEQ ID NO: 327105 - DNA, 158 bp, Zea mays
tacttactacactacatgtgctgcatcgctgagctcagctcatgacaccaggggggtgtgcaaacacaagaacgagctaaaccatactcttgacctgatgatatattcccttcaggtcagatagcctaggagccgactgacatgccagcgctactact

SEQ ID NO: 327106 - DNA, 269 bp, Zea mays
aaaaataaaataacgggttttggttttctaaaaaaaacaaaaaaaaaacggcgagggtttactctaaaagggaaccaatcttacctcccctttcttacaactaaataaatcttttatacccttacctaaatccaattcactttctcttcatttaactcttatttaataataaaacactcttctaacccatattaatttcataaaaacaaaacttactatctccatctactctaataaaaaaaatcccataaccaatctgcctatctaac

SEQ ID NO: 327107 - DNA, 222 bp, Zea mays
cgcgagagaccgatagcgaacaaatatgcttggtttaaaaaaaaaaaaaaaaaaaaaaaggaaatgtttaaatttaaagtgttgttctcccaatttaaaaaaaacaaaattaacaatctcttgccccctacataaaattcccttctttatttccccctaattccaaatttctttcccttttttttacaacccttaacctctaaatccctcgctttacccaac

SEQ ID NO: 327108 - DNA, 229 bp, Zea mays
  unsure (1)..(229): unsure at all n locations
cccacgcgtncgnccacgcgtgcggattttcctactctgcgttttttctctctctactgatatagtatatatgtggggtgtctatatatgtgtgcacgtggttttcgctcggctttttatcaacgctttgagaataaaagctttctcttcatctgtatattttatttttaatgaaagaaataaaccactatatatttcgacaaaaaaaaaaaaaaaaaagggaggacca

SEQ ID NO: 327109 - DNA, 62 bp, Zea mays
  unsure (1)..(62): unsure at all n locations
aaaaaaaaaaaaannnnnaaaaaaaggtttggataaaaaaaaaaaaaaaaaaaaaaaaggag

SEQ ID NO: 327110 - DNA, 184 bp, Zea mays
  unsure (1)..(184): unsure at all n locations
cggacgcgtgggcggacgcgtgggatcttgattttgttatctatctggtgtggagtttttagttgttcatggtgtcanacatgttgcancgtcagtgttaagtcaggaagtgcctgagtatgcacctgttcagttattatgttttgatatggtttctcaatttcttaggataactctgtagtct

SEQ ID NO: 327111 - DNA, 246 bp, Zea mays
  unsure (1)..(246): unsure at all n locations
cagactcntgggcgaacgcgttacgccttcctttttttttttttttccacacgacattgctgttctccaatgactcatcttaacacacctcccttatattttaacaaacatgcctccccaaccaaaattcacacctaacaatggttttccaccttatcaatctctttaaatacattcctcatagccaaacatatttgttttccactcttttcaatttacactaaccataaaattttattctaaatt

SEQ ID NO: 327112 - DNA, 309 bp, Zea mays
ttagcaatgttgcatgagatgcataaactgcctgaactaagaagagacaatcatgcgcaagttgtattaactaataatcgcagaagggcttcttacacagcgctcgaaatacaagcaacatggataacatataatgatttcaactcaaatcaaataacacttaccataaagtcttatgctaataggaacgtgatttgacaattattccattatatctagagagtaaatgcttggtaacatgaaaatagaacaacttttaaatcattatttctatgaccatttcatttaacttcatagtaaaaattaggc

SEQ ID NO: 327113 - DNA, 67 bp, Zea mays
  unsure (1)..(67): unsure at all n locations
cccacccgtccnaaaaaaggatttcatttaaaaaaacaaaaaaaanccccgcgtctctgatataata

SEQ ID NO: 327114 - DNA, 235 bp, Zea mays
aagcattctgctgaactttccaaccgtttagacaagcaaaattaatcactaatggaaagatattttacaatggtgcatgagttgcataaactgcatgtacaagaaaagacaatcattcgcaacttttattaactaaaaatcacagaacggctagctcccaatctctataaataaaatcaacatggataacataatatgagttcaactttaaactaaaaacattaaccataaattt

SEQ ID NO: 327115 - DNA, 219 bp, Zea mays
aagactccttgtcaaacgcttttggatattaaaaaaacaaaatcaaacactaagggaaggtatatttatcaatgttccatgaattacataaaacttcatttaataaaaatagacaatcattcacaacttttattaactaatttatatcagaagttctttttctaatatctctagatataaaatcatcatggttaaaatattttgttttcaatttaaaac

SEQ ID NO: 327116 - DNA, 117 bp, Zea mays
cttgcttgtactttataatgatttcgtcatatggttctcaatatttgctattgttagtgatgttagcatcataatcttgagtactacacaatactaatatagtacatactttttgtt

SEQ ID NO: 327117 - DNA, 395 bp, Zea mays
gcccaagaggagaaaatgctaatggcaagatcttctaaggataaatttgaacatcttcaaagccagtatgtagatttgacatcagaaaacaatgctctcaaaactgaaattgaagaactgaagtccagactcatagagttgcagagaactcaagaaattgttatggttcaacatgttgaagaatgccaagtggctgaagataagatcagaactacaagggagaattcagaagttactagaagattctacctttgctgaaaatcacaagcaagagttgcttcaaaagattttgaagctagaatcagataatcaggaactcctaggacaaatgcagtccattatggaagagaaatcaaataatgctgaatctctgcatggagagataactaagcgtg

SEQ ID NO: 327118 - DNA, 281 bp, Zea mays
ctatacatactaaatactatgagagagctagcctgccacatcttctgcttcttcaagagagatcttcttaaattattctatcttccacagctgctgcaacacctgatatgtttgtttgtgttgttattaattattaaggatagctagctcacctttattatttttaataataattcttatctgtacttaactatatcaatcatacttatttatacacttatatttatttgttttaccgtaacttgaatgcttataaaatgtaatttcattgtcttcttttt

SEQ ID NO: 327119 - DNA, 287 bp, Zea mays
ctctgatgctgctggatctgggagatgagccatgactacacactcagggggcggggctaactatccgccgccagcccacatacatacgaaacactaacagagagctagcccccctcagatgctgcttctccaacacacacctccctaaagtattctatcaaccaaagccgctgctacacctgatatgtttgtttggggtgttattaattaggacggactagctagctgatctatattatcgtacacaataatgctacgctgtacctatctataacaagcacacaaat

SEQ ID NO: 327120 - DNA, 171 bp, Zea mays
acttgagacgctccacgtggcccatcatttcaaagactccggcgagcaagcctacaaggggttcgccctagctgacgtcttcggcgcctccaacttcaacgacgagcgcttccaagatagcggctgcgttttccggagttactaagggggctatctcaccgccgaccactc

SEQ ID NO: 327121 - DNA, 263 bp, Zea mays
aaaaaaaaaaatatataaaaaaaaattttacacccaaagaaaaaaaaaaaaaaaaaccggggccaataaaaaaaagggggccgcactcaaaaaacctccattttacttacccatacattcaaccttttccctcttctattatgtctcctaaactaaaatccctgaccccaaacttttaaaccctatacttttgaaaaacctacggataccccaacttaatctccttttcccacataccccctttgcccacaagcttaacacct

SEQ ID NO: 327122 - DNA, 385 bp, Zea mays
cccacgcgtccgcccacgcgtccgcccacgcgtccgtcgatctgcaagtctcgctacgtgagcagtgcaataaaaaaaagcagccgcaatggcgagcagcaccatggccctctcctccacggccttcgccggcaaggccgtgaacgtgccgtcgtcgtccgccttcggcgaggcccgcgtgacgatgcgcaagacggcggcgaaggccaagccggcggcggcgtccgggagcccgtggtacggccccgaccgcgtgctgtacctgggcccactgtccggcgagccgccgagctacctgacgggcgagttcccgggcgactacggctgggacaccgcggggctgtcggcggacccggagacgttcgccaagaaccgggagctggag

SEQ ID NO: 327123 - DNA, 358 bp, Zea mays
cgacccacgcgtgcgcccacgcgtccgcccacgcgtccgcccacgcgtgcgctactccgtcaccctcaccgtggggggatgggtactggttttactgggagccgcattaaggatccggaatggtcggcaagatcaccgtcaactaattaagctagctatcgatcgatatccattcatgtattagctgttgcttcctgctttgtactccgccgatctgtccatctctacatgttttcgtcttcacacaacaacctctgctacgactacgtatatatgcatgctactagctgattgattttaacgaccaggccgaccccgaaagctagcttggaccaaaaaaaaaaaaaatatctaattg

SEQ ID NO: 327124 - DNA, 113 bp, Zea mays
cggacgcgtggtaaaaaaaaaaaaagattaaaattaaaaaaaaaaaaaaaaaaataaaatgtaaatgtaaaaattaataaaataataaaaaattaactctaaaatattaaaaa

SEQ ID NO: 327125 - DNA, 207 bp, Zea mays
gcgctctgatcattaaggttatgtgcattcgattgctcgctggcattgccaggattgtgggtgctggggtatgttcatgatgttgtaagcttaatgaacggctggtaatggtatatgtagtaccaccaccctctgtaatctcagctgctgtggcaactttgactcttttcggaatactcacttgtactgcgtagaacagaaataaaa

SEQ ID NO: 327126 - DNA, 151 bp, Zea mays
gactatgcccttcgatcccataatacatgattacttaatggatcgcactaccttcgcgccaatgactcaccatacaaatacatgccctatccacttccgatagtacaatacgtccctaccctggaggacactcgtaacgcctaattataat

SEQ ID NO: 327127 - DNA, 132 bp, Zea mays
taaaaaaaaaaaaaaaaaaaaaaaaaaagttaaagattaaaaaaaaaaaatataaaaaaaaagaaaattgtaaatttttaaatgctactaaatatataattatatattctatcctattatttaatttttttt

SEQ ID NO: 327128 - DNA, 203 bp, Zea mays
tcatcctaaaaaacaaaaaaaaaaaaaaaaaaaaattaaaaaacaaacaaaaaaaaaaaaaaaaaaagaaaaaatacaaaaaacagaaaaacaaaacaaaacaaaaaaaaaaactccacccaatcatactcaccccctctaacatccactctcattcacccatacatccacctctcacattccccccactttccccccaaaac

SEQ ID NO: 327129 - DNA, 362 bp, Zea mays
ggtcgatactagcttaactgacaagagacagatcgcccatgagcatgtccacgcgagcggactccaccacgcgccagctgctggtcgccgcctgggaaccggcggctaagcctagcaagctgagctcgcacctcacgctgccgtcgatcgtacatgcgcggaccggccccgctcctcgcgtccacctaggaggcgtagcaggcgcctaaggggatcgtgaccccgcatgattgccccaccacggcggacccgatctccaagtgatgcacaaccggcctgatccccatggcgcacttgtacaagttttacaccatcacatagacctacaccaccgagcacgtgctatagatgatcaccggagg

SEQ ID NO: 327130 - DNA, 276 bp, Zea mays
acgcccacgcgtccgaaaaaaaaaaaaagaaaaaaaaaaaaaaaaaaaaaaaaaaaaaaaaaagaaaaaaaaaaaaaaaaaaaaaaaaaaaaaaaaaaaaaaaaaaaaaaaaaaaaaaaaaaaaaaaaaaaaaaaaaaaaaaaaaaaaaaaaataaaaaaaaaaaaaaaaaaaaaaataatttaaaaaataaaaatattttaatttaaaaaatttaaaaaataaatatttttttttaatttaaaaaaatttaaaaattagtgggttattttaaaaa

SEQ ID NO: 327131 - DNA, 392 bp, Zea mays
atgcgaaaaaaaaaaaaaaaataaaaaaaaagattaaaaaattaaaaataacataaaaaaaaaaaggaaaaagtgataaattaaaaagttataatgaaaaataaaataaaataataaataataataaaattattaaatcatttatatttatatttttcttattaattattataaatacttatcttatttttaaaaaatattttttataattttttcatattattcttttatattactaatttttttataatatacttttattttattctataatatccttatacttttttttttttaattttactaattttatttttatttatttaattttttattttttaataatttatctcatattccttctttttaattataattattatttttttttt

SEQ ID NO: 327132 - DNA, 240 bp, Zea mays
aaaaaaaaaataaaaaaaaaaaaacgaataacaaaaacaaaaaaaaaaacttaatgatccgacaaaacacaaaaggaaagacacataaatcaaaaaataaggcctactcttttaatagctccactcttctttccccttacttcacatatactagattttctatcacctcccttaaatctattcaactgctcgagctttaacaacttccaaattttgaactccttgcccattcctacctta

SEQ ID NO: 327133 - DNA, 51 bp, Zea mays
tcccggtcgaggccgcgtacgcccacgcgttcggttctagatcgcgagctt

SEQ ID NO: 327134 - DNA, 71 bp, Zea mays
gcgaaaaaaaaaaaaaaaaaaaaaaaaaaagattaaaaataaaaaaaaaaaaaaaaaaaaaaaagggaaaa

SEQ ID NO: 327135 - DNA, 77 bp, Zea mays
aaaaaaaaaaaaaaaaaaaaaaaaacaattctagatacataagcaaacaatctagagaatgggagctatcatactca

SEQ ID NO: 327136 - DNA, 63 bp, Zea mays
gtttaccggacattttggcagatcgcatggtacggagacgaatttgcatatttgttttctcgt

SEQ ID NO: 327137 - DNA, 292 bp, Zea mays
caattcccaattccaggcacgacgccacgcgtcccataaaaaaaactaaaactaataaaaagttaaaaacaacaaaacaaaaaaaaacagaaacagcataataaaaaaaactcatattaaaaaaaaaacataaacttaccatcaagagatctacaatgagtctcatcatcactgactactgcatgcccctacattacacgataccatcttctcaaacgcatgtaagggtcctcatatctcaaagacattccgatggtgatcatttcatcttataacctgcctttcccgatca

SEQ ID NO: 327138 - DNA, 445 bp, Zea mays
cccacgcgtccgtgcatcctgataatacattgtggcaatagctgtgtgctgcaccatgtgatgctgatatattgtatctgttatcctagatggtggccagtatcggagcacacagctgttgcatcctgataatacattgtggcaataccacgtggtgcacgccaatttctcctttccctgcatagctttattgacaattgatatgcttagccgtggggttctttatttatttgttgtagccttgcctcaaatgtcgattgggcagcttggctgacagattagtttttttttccctccctacgggcagatgcttgtttaaagacagcaattcttgtactccgtagctaagaatgaatgccatataaatgttgcagtagataagcatcaaggagtgtaagatgaagatggcagttcttttggtttatgagatgagatggtgctctaa

SEQ ID NO: 327139 - DNA, 371 bp, Zea mays
cccacgcgtccggtcttctccatccggtgttcgattgtgcgctgtcgcaacctctgtcgggactgccctttctcagtccgcttctacatctgcagtgagacgcgtattgaatctcatcgaatccatgggcagctactcgaataccaacacaagcggcggggccagcgacaaggaggacaagaacgaggacaaggtctaaggcaaggactcgtcgaagccatacttcaaggagaacgaatgggtcctcgcctaccactgccacgtcctctacgaggccaacgttcacaggatcgaagaccatgaatacgaatggcactactttggccattatctcagctggaataagaactgggatgaatgccttgcaaatg

SEQ ID NO: 327140 - DNA, 373 bp, Zea mays
cccactcgtccgaacacacatacaaaatttaaaaaaaaaaaaaaaaaaaaaaaaaaaaaagaaaaaataaaaaaaaatataaataaaacatataaaataaaaaaacatataatatataataaaaaaaaaaaaaaaaaaactttttaaaaaaacaaaatttacttccctttttataaaacccaattttttttcttagggtaccttaaattaaatttttttatccggtattttacaattaatttaatttgaaaaacttttacattaccaaatttaataaacttttagaaattcccattttaaccactttgcaaaaaatccaattttcccaaactgattaatttttaaaaaatttcccaaccttaaattttaaaaa

SEQ ID NO: 327141 - DNA, 345 bp, Zea mays
cacacgcgtcgttgcgaagggagctgggaagcgagctgccacgccgcctggcgcggccggtctgacccaatggctcagccaatggcaccgcgaactgcctaacgaacgtcctaacgtgcgtcgagcagagccgccagctgatacctcggatgctgacttagatgctgacagacatgatccgacacacagtagcttacacccactgtctttgcaactaagtgcgatgaccaactctatgactaaacgggtgatttaacactaggtcgaattactatcggaatgactatatcagtacggtcatactaacctgtatcacgacctgcttaacgcaggtcacgatccata

SEQ ID NO: 327142 - DNA, 91 bp, Zea mays
aattcgcggcaaaaggaaaacaaaaaaaaaaaaaaaaaaaaaaaaaaaaaaaaatggacagacgatttaaaaagatccagggtgacgggcc

SEQ ID NO: 327143 - DNA, 164 bp, Zea mays
cccacgcgtccgcccacgcgtccgctccgctgggccaccagctttgaccgccgcctcccgtcccctgcgctactgctcctcctcaccccactcccccgcaggagcggcggcggcggcggcgaggtcgtaccccacatcggcgagcggcggcggcaccgccggag

SEQ ID NO: 327144 - DNA, 71 bp, Zea mays
cccacgcgtccgaaaaaaaaaaaaaggataaaaaaaaaaaaaaaaaaaaaaaaaaaaaaagagaaaggaaa

SEQ ID NO: 327145 - DNA, 295 bp, Zea mays
acgcccacgcgtccgcccacgcgttcgaaaatataaaaaaaaaaaaaaaaaaaaaaaaaaaaaagaaaaagtaaaaaaaaaaaaaaaataaaaaaaaaaaaaaaaaaaaaaaaaaaaaaaaaaataaaaaaatacttaatttaataaaaaaaaaatttaatttaatagttattttatttaaacacctaaatataataaaatcctaaaatttctaaaattaactgcctttaaaaacattaccattacccaatttaatcttttattaaaacattcttaattaataaacttttttaat

SEQ ID NO: 327146 - DNA, 283 bp, Zea mays
aaaaaaaaaaaaaaaaaaaaaaaaaaaaataaaaaaaaaaaaaaaaaaaaaaagaaaaaaagaaaaaaaaaaaaagaaaaaaaaaaaaaaaaaaaaaaaaaaaaaaaaaaaaaaaaaaggaaacatcatatataaatctatactttagttactctacattgaaacctaatatttattctttggctgtacttaaatcactttatgtgtcctaaattcttaaacatatgtattggaaaacctttgctttatcccaagttaatcctattgtacataatacctattt

SEQ ID NO: 327147 - DNA, 211 bp, Zea mays
gcgtccacacgtccgactgtacaaaaaaaaaattaagataaaaattaaaaaaaaaaaataaaaggataattttaaaattaagaggattgtaaataaacaaaattaaaaaataaaatatttttaaaaatcattttattaatattaatgcttaaattttttaaaattatttttatttattattttaatttaaatttaatttaaatatttttaa

SEQ ID NO: 327148 - DNA, 386 bp, Zea mays
tcatacgctcactcgtggtctgacacatacccgaacttcacattccaaaccctactctggaacatggtgaacttttaacagagcttgatcttatgctaactcctccatcaatatcaccattttccacaccaaacacacattaaaccatgcattcactccactactccagattaatctttcacacatgctctaaaacatacttacttgcactccgcccatcctacattattcttttctcttaatactcctctatccatctattatctacttccttcaacccttttcataacaacctttttacatcacaaaaactcaatcctattaatccaatcattatacacaataccttcactacaactactaatctattattacactaataatat

SEQ ID NO: 327149 - DNA, 381 bp, Zea mays
cggacgcgtgggcggacgcgtgggtcaaaaaaaaaaaaaaaaaaaaaaaaaagaaaaaagaaaaaaaaaaaaaaaaaaaaaaaaaaaaaaaaaaaaaaaaaaaaaaaaaaaaaaaaaaaaaaaaaaaaaaaaaaaaaaaaaaaaaaaaaaaaataaataaaaaaagggtggccctttttaaaaattcaatgtttattatcctacaaatctcatgtcattattttttttttagtttacctaaattaaaattctttggcctctttttaaaatattcctttttgtaaaaacctttatgtgcccaaatttatcgcctttctaaaaaatccccttttttcaatggtgattattactaaaaatgcccctccgaattaactttccaaa

SEQ ID NO: 327150 - DNA, 151 bp, Zea mays
aaaaaaaaaaaaaaaaaaaaataaaaaataaaaaaaaaaaaaaaaaaaaaaaaagaaaaagaaaaaataaaaaaaaaaaaaaaaaaaaaaaaaaaaaaaaaaaataaaaaaaaaaaaaaaaaaaaaaaaaattaaaaactataaatttttt

SEQ ID NO: 327151 - DNA, 57 bp, Zea mays
cggacgcgtgggaaaaaaaaaaaaaaaaaaaaaaaaaaaaaaaaaaaaaaaaaggga

SEQ ID NO: 327152 - DNA, 318 bp, Zea mays
cccacgcgtccgcccacgcgtcctaggccatcaacaattttacatatacactactctctggggtaacgatatctaacggtctacattccctccatgctaataggctaacctgtcctctatttaatctctttcatatgttgaaattgacttgtacttactaacactcttggctgacttacatatacatgagctcagctatagatctctgcctttattacacatcctcaactgagtactaatccattctcattctactatattggccttattaactatattaccacttctttaccatctttaacaaagacctccactttt

SEQ ID NO: 327153 - DNA, 280 bp, Zea mays
ccaatttccgaatcgaccgcacgcatgcacccactcgtccgcccacgcctactacctttcagaccacgctctatcacactacatacacgatcagcggctatatcaaggttcacagttgctcctggtcccaatttatcctcactctgcattctatatgatacagtccttatcaaccattattatgactcaacccaactatcctaaacttatattcactcctacaaccctattaattacgatacaaatcacatcttccataacatcacctatatacgcacta

SEQ ID NO: 327154 - DNA, 270 bp, Zea mays
tcatccttccaccaaaaagccaaaagattataatgattcgattttagcccttcttaaaatgtaacctgttctagaacctctttcacactcatatcacttccttgtactacttaaaaaataaccacatactcatatccaatttttcataatcaactacttaacatgctaattaaccatattatgaaatactaacttttaatcattcatcttattaaatactataccatatccataattatattcaacataagacacattcaaatacctcta

SEQ ID NO: 327155 - DNA, 74 bp, Zea mays
tcccactcgtccgaaaaaaaaaaaaaaaattaaaaataaaaaaaaaaaaaaaaaataaaaagaaaaagtaaaaa

SEQ ID NO: 327156 - DNA, 202 bp, Zea mays
aaaatatcaaattacagcaaaattgattcaacatcaacatattcagaccatggcaagggtcattttctatgaggaatatgcctctaatttaaccaactaccaattcttatcacatatgagtatttgttcataatccctcaagatgcattaatttcatcctacatttcctccaactaccaactaatattggttatcatacttc

SEQ ID NO: 327157 - DNA, 164 bp, Zea mays
cggacgcgtgggaaaaaaaaaaaaaaaaataaaaaaaaaaaaaaaaaaaaaaaaataaaggggatatgaaaaaataaaaaaaaaaatataaaaaatattaaacttcataaaattttcaatcaagtctaagtgctttcaaatgtcttcaccatagtttactactt

SEQ ID NO: 327158 - DNA, 135 bp, Zea mays
cgccaatgatatctgaagcggcacgcgttctctggagcagcatggaggcatttcacttcgtctgcggcatcattgggcatggggttctgcaaataggttaaactatgctctaacatacactgtattttgcgagta

SEQ ID NO: 327159 - DNA, 171 bp, Zea mays
cggacgcgtgggcggacgcgtgggaaaaaaaaaaaaaaaaaaaaaaaaaaaaagagaaagggaaaaataataaggatacaaaaattaaaaacacatacatacaaaaaaatggcgtcttctttataggttcctagtttcctttcacttgctttcgatttactactttttttt

SEQ ID NO: 327160 - DNA, 418 bp, Zea mays
ggaaaattcattattgaaagttttaccatcagcttccaagacatctttagtagagttagtgaccgtatttggtgtcatttcacatgatttatcttcaggtgctgcaatcaagatttaggagagttattaagctaccataaactatgtgaaaaacagtgttttcaactatggtacattctgcatgcgaagtatctagcatgctgatcaaaagaatcattaaccatagggaccaaaaatggttgaatttatttctccagtaggttatctctaaagcataaatgtttaggtacaaatttaagcaaaaaaagggtgaatgaaggttactgcccaacatgaccaatgaaaatcgaaggatctctgaattactgttgaagaccaagggaaggtatgctttcagtcaatcaggtatgacaaatga

SEQ ID NO: 327161 - DNA, 173 bp, Zea mays
gtgagtgagagagagacagatagatcgtctagcgttcgacgaccatggctaggcaacgagaattgggttccatgctggcgggtgctctgctcgttgcatacgacgtttgcgtacattcctacaaccgtgcactccatcgtcgtctgctacatgcacgctgggcaacaacctgc

SEQ ID NO: 327162 - DNA, 324 bp, Zea mays
gtgggtcggcttctcctacccctacggttcgggttcgggttcgtgaggttctggggcggtgggcttcgtgggtgagcggatcgagatggcggcgtctgatgttgagtaccgctgcttcgtcggcggcctgccctgggccacggacgaccactccctccacaacgccttgagcacctacggcgaggtcctagagtccaagatcattctcgatcgggagacgcagaggtcccgctgattctgcttcgtcaccttctccacggaagaggccatgcggaacgccatcgagggcatgaacggtaaggagctggacggacgcaacatcac

SEQ ID NO: 327163 - DNA, 150 bp, Zea mays
aaaaaaaaaaaaataaaaaaaaaaaaaaataaaaattaaagacaaaaaatataaaaaaaacgaacatgtttaaatccaacatgtgaatcatttaactatattataatgtcaattaaattccaataaaatggtccaatttttactatttta

SEQ ID NO: 327164 - DNA, 262 bp, Zea mays
cccacgcgtccgaggacggctcacgaatggctacaaccttgccgatttagtcgcgcgacgtctggggttcaagatgagtccacctccaggccccccagccggccacgccctacctcctggccccacccacggcgcagcacttcccccagtgcatcctcatctcttccctcagcaacctctgatgcacaggttcccgcaccgtactcaactacgaccacccctaccccatcaccagcgtctcacacgcttatcatcaatatca

SEQ ID NO: 327165 - DNA, 446 bp, Zea mays
  unsure (1)..(446): unsure at all n locations
tggagaaccgccatgggatttcaccggcgactgaaccccggccggctccctcgcccctggcaccgttcaacgccgtcagcctcccccctttctctggaacgtgggcccacgcccacggcgtccgccgtgccgtcccccgctcctcgtgggccgtctgggcccaattggccgcggccgcgcgctcccgaccaggccgaaatcccccccccccggcccggttaacctggaattccttttcttttttccttttcccattttcacatatataattatatgttgatattttatgcaccaaaaatagtttaaataaattatagggcacaaaaataataaggtataataattggcacaccccagtaagtcaccatgattgatgtattgttcttatttgtgcttgttagcggaagagggatcagatcctncggaatttgtagctccgggacaag

SEQ ID NO: 327166 - DNA, 357 bp, Zea mays
cgaaagaaaaaaaaaaaaaaaaaaaaaaaaaataaataaaaaaaaaaaaaaaaaaaaaaaaaggaaggattaaaaaaaaaaaagaggcagcaaaaaaaaaaaaaaaaaaaaaaaagaaaaaaaaaaaaaaaaaaaaaaaaaaaaaaaaaaaaaaaaaaaaaaaaaaaaaaaaaaaaacaaagaaaatcaaaaaaaaaccaaagaaaaaccaaataagaaaaaaaaagaatacaccaaaaatatcagaacacaaaaataaaaaaaaaagacaaacacgaaaaaacacaatggaaccataaaaaaaacaaagaaagacaaaaggaaagatacccataaaaaaaacacataaaaacaaaa

SEQ ID NO: 327167 - DNA, 289 bp, Zea mays
gtccgcccagcgctttcgcccactcgttcgcccactctttcgaaaacaaaaaaaaaaaaaaaaaaggaaggtttaaaaaaaaaaaagggcgccccaaaaaaaaaaccaaaacaaaaaaaaacaaacatacaacaaaaaaaaaacgccaaccgttcaacataacccaaatttactgacccttccatcccaactaaaaccactgctaaaaccccacctaaacccaactaaatggccttgcataaaaaacccctaaacccagaaaaccctacagctaaccaacccaaacccc

SEQ ID NO: 327168 - DNA, 307 bp, Zea mays
tgcggacttatgtgacataactttcatttataagtaccacaagagaatcagcaggcacggttactcaagtaacgggccctagtacgatccatctagcaatacattgcagaaactagagcctaaaagaaccaacacaaaaaactgcgctttcaccacggcatcctacgagctgcacgaacacgacagaagccatatacacacaactctctgtgatcacataatcgctagactcaactcgtactacgtaatgaaaggaataactagtggcctacaaaacaggccacttactatcaagactcaccaaact

SEQ ID NO: 327169 - DNA, 60 bp, Zea mays
cggacgcgtgggcacaagtacgctgcgaatctcagtttcatagacccgcgcacagatcga

SEQ ID NO: 327170 - DNA, 243 bp, Zea mays
cccacgcgtccgcccacacgtccaaataaaataaaaaaaaaaaaaaaaaaaaaaaaaaggaaagaaaaaaaaaaaaaaaaaaaaaagaaaaaaaaaaaaaaaaaaaaaaaaaaaaaaaaaaaataaaaataaaaaaataaaataagaaccgaaaaaaatacaattgcaaaaatgcatataactcataagttagaaaacaaatatgaactaaccactgacgtgaaagaaaatacaatggaaata

SEQ ID NO: 327171 - DNA, 299 bp, Zea mays
tccgcagcaggtaccatgacaagattaatttgaaaatgaggacggccctgacgaactgcagagtcaaatggagcatgatcatgacattgggaccaccataagggataatgattatgcctcatgcagctacctggattactggtgaggctgagcaaggagaggattctggtgagtcgggcgacgatgatgaagatgatgatgatgaagacgatgacgaagatgatgaggatgaagaagacgatgatgatgatgaagaggatcatgaggaagaaagcaagccagcatggaagtcaggatct

SEQ ID NO: 327172 - DNA, 205 bp, Zea mays
tcaacaggagcatgatcaggacatagggaccaccataagggataagatgatgcctcatgcagcttactgcgttactgatgaggctgtgcaaggtgaggataatgttgagctgggccacgattatgaagatgatgatgatgaatacgatgaccaagatgactatgatgaaaaagaggatcatgatgaggcagcgcataatgaggac

SEQ ID NO: 327173 - DNA, 246 bp, Zea mays
cacgcgtcgccacgcgtcgcggaccgggtttacttagctcaaaaagaaaaaaaaaaagaaggggaattaaaagaaaaaagaaaaaaaaaaaaaaaaaaaaaaaaaaaaaaaaaaaaaaaaaaataaaaaaaaaaaaaaaaaaaagtaaaaacaaatataaaataaacacacaaaactaaaaaaaaaatcagcacgatcaaaaacaagcaactgaacaaaaaacgacaaaataaaacaaatgaatca

SEQ ID NO: 327174 - DNA, 413 bp, Zea mays
ctcgtccgcccgctcgtccgaaaggtttcagcacgcctccttttcccaaggtagcttctaagcttcggtcggtttctcaacgacctgggcggcttaaccaatgtcacgttcccttggaacgcgaacgccctaaccaccttccgtgcctacagcgagcatacactcacattgctatcttgaattcttactcaaaggcctacaaccataactcgtcacactcgatcatctacccaatctccaatcaacccttcgccttttccaatttttttaaacaactttacccatacgactaggtataaacactaacacagcgccgtcatcagactgacaaaaccaaaccctactaccacattccaaacccactcgaacttcccaacatcatagtgtacattacatcacacttcaaaaatcac

SEQ ID NO: 327175 - DNA, 374 bp, Zea mays
gggttggcttctcctccccctccggttcggtttcgttttcgtgaggttctccggggttcggtgtcgtgggtgagcggatcgagatggcggcgtcggatgttgagtaccgctgcttcgtcggcggcctcgcctgggccacggacgaccactccctccacaacgccttcagcacctacggcgaggtcctcgagtccaagatcatcctcgatcgggagacgcagaggtcccgcggcttcagcttcgtcaccttctccacggaggaggcgatgcggaacgccatcgagggcatgaacggcaaggagctggacggccgcaacatcaccgtcaacgaggcccagtcccgcggcggcagctgcgggtacggtggtggccgt

SEQ ID NO: 327176 - DNA, 353 bp, Zea mays
gttgtgatggctaaaacttatgactttgattataactcgagcttctacatgcaaagggcagagttatatttggaagggtgatagaccatgacataaggtaactgctaacaaatttgcaatatatcacaagcatcgctcttcaatggcagacactgttcaattaagaaggccagctgctacaacttccaatataaatgctgatattgtgagaacatccactctgcaatctgcatctctaccgaaacaagaatacttaacaattacattcaagatctatactttaagaaaacgtgactagagtgcattatgtgtgtccagctcaaatatcctcattgtcacaaaatctactatcc

SEQ ID NO: 327177 - DNA, 91 bp, Zea mays
cccacgcgtccgaaaaataaaaaattttatttataaaaaaaaaaaaaaaaaaaaaaagaggaagagtaaaataaaaaaaaaaaaagggcca

SEQ ID NO: 327178 - DNA, 291 bp, Zea mays
ccactcgtccgtaaaaaaaaaaaaaaaatcaaacaaaaaaatatttaaaaaacacccaaaaaacccaatccggaagactttaaaaaaaaaacaggaagtaacaaaaaccaaacacattaatatctaacaaactaaaatgaatacaatctaaaatcccttaaccaccatccaacttaacgcaactcctaaaccaaacaacctcaataattccaactacaatagcatatattcacactgtttcaaaaaaaaaactcctagaaaaacctctgacctaaccaaccttttcccctt

SEQ ID NO: 327179 - DNA, 225 bp, Zea mays
tcacgcgttcggttacgcgtccggggacgcgtgggaaaagggaagggaaaaaataaaaaaaaagaagggaaaaaaaaaaaaaaaaaaaaaaaaaaaaaaaaaggacgggagatatagagggataaagagtaattagacttaaatgcgactaaatatatattcgatagcgtgagataaattaaatttaggggctagtagttttaaaaataacgagactgtgaaaac

SEQ ID NO: 327180 - DNA, 338 bp, Zea mays
cggacgcgtgggcaggccgcggccggcgggtacggttagtccgccgagtacacggaggccacggtgacggaggtcgtgtccacgggcgagaacgagtacgacgagtacaagaaggaggagaagcagcacatgcacaagcagcacctcggcgaggccggcgccatcgccgtcggcgccttcgcactctacgagaagcacgaggcgaagaaggacccggagcacgcgcaccgtcacaagatcgaggaggaggtcgcggcggcggctgtcgtcggctccggcggcttcgccttccacgagcaccactagaagaagaaggaccacatggaggccgatgaggc

SEQ ID NO: 327181 - DNA, 98 bp, Zea mays
tcgcccactcgtccgcccactcgtccgaaaatttattaaaaaaaaaaaaaaaaaaaaaaaacagaggggttttataaaaaaatgcgggcttacaaaaa

SEQ ID NO: 327182 - DNA, 452 bp, Zea mays
gaggaggcccgcgagcccgaggccgtcgcgctgccgttacgcgctgtcggcgtgcgacctcgggtgccggaggaaggcgggcgcgtgggagacggccgtcacggaggccgccgcgagcctcagcaaggacagcttctccacgtccaagatctggatggcgtcggccgccgggagagaggaagacggccgccggcccggccagagacgagccgcgtcgttccggtggccggcgatcgcctcgggcgcctgcaagtggcaccgcagggacgaggaacctttcgacgtcgaggcgggaagccccggcggcgacaatgccgtctcgtctctgacagaagagaggccaccgtcggtggctatggcggcgatggtctgggtcgccggcggggggcacgggagccattcgtgatccgcattggtttgcacgttggttcaagttcaacacactacacaca

SEQ ID NO: 327183 - DNA, 286 bp, Zea mays
cccacgcgtccgcagactcatgccgcatgtttaactacactctcaatctctctgctaccgaggagtacgctaattaagggatctatcgtggatacgaagtggactggaaccagctttatgattaacaaggacagcttctccacgtccaagatctggatggcgtcggccgccggtagagacgaagacggccgccggcccggccagagacgagccgcgtcgttccggtggccggcgatcgcctctggcgcctgcaagtggcaccgcacggacgaggaacctttcgacg

SEQ ID NO: 327184 - DNA, 431 bp, Zea mays
ctcaagcgacacggcacacttacggtcactcttcctccaagactacatgtacaacgtgcgagtggtatgaagctatgaagactggacatgtgatcgaatggttagtactggtaacaaactatcacacttccatgtggttagtacttggcagaacacatatacacttccatgttagccacctgtagcaaccgacataacataatggccatgcgatcattagcataacatataactgcacatggacaaccatgatgagcacatgaaactgctagacatatgccctctggagatgttgatgagaccagctgacatcatgcatactgcatagttggcaagatgtaagtacatatagactactcctacagtccctaattatgatatgaatgtggctcgccctgctgtctataaccatcatcacacagtcaaatgtg

SEQ ID NO: 327185 - DNA, 440 bp, Zea mays
  unsure (1)..(440): unsure at all n locations
ccgaacccggactccggcggcggcggctcctgcgtctccaccgagtccgacgaggacgcctcgtcgcgttccccggacgtggtgcggcgtagcctgccgcaggagcgcgcggtcctcctggagcgggagccctcgctgccgccgtcgcaggccgtggacggcggcgacgacgacgacgacgacctggacgccacgtggaacgccatcatgcagaagacgcgcccggcggctccggcttccacccctccagctccagctccagctcccgctcccgccgcgcaccatcagcaacggccgtcgccgagggcccgggacccgtcggtcggcgccgaggagatgaaccggcggttcgacgacttcatcaagaagaaccgcaactccttcggccggcaataggcgacctccgttacgatccgaccaccttcccgncgtacgatgcg

SEQ ID NO: 327186 - DNA, 290 bp, Zea mays
ccgaaaaaaagaaaaataaaataattaaaaaaattttatattacaacaaaaaaaaaaacaaaataagaagactatcataaagcctacgggggcataaaataaaagcttccttccccatgcttccaacttcatacctatgtccacgtgtcacctaattccaattccactgccctaagctattacaacttacatactggaaaaaccttccctttccccaacttaatcactttgcacctaatcaccattcctcaatctgatcttcattgccaaaaaccccaacccaatccccc

SEQ ID NO: 327187 - DNA, 353 bp, Zea mays
aattccgacccacgcgtacgcggacgcgtgggtaccatctcggctgcgactgtcgtttgaagctgacggtcttgtgtttgggggcgattaagtagctaattctgagattggccatctgatttctgagatgagctcccatgttcataatatttgcgctgtgctaaatgaggtataatcaataagtgcttatgctccaattcttttatggtgaccatctaaaatagaaaacagtatgacaattgctatgtcatcaaacatgatcatcatggcaaatcttatatcccaagctgtttatatgctcaacaggccgcacttgaagaaatctatatcagtttgaggaaaactccagctga

SEQ ID NO: 327188 - DNA, 454 bp, Zea mays
gtcgtggagggtgttctggagggtggcaagttcctgtctttgaggttgtgctcaggcgtggtgtgaggtgctgatccaagcccatcaagcagcacttgcctgacagtggtttccatattcgttgcatggcttgcaagggaggggaagctgtctgtgatcggaccactatccatctaatcatcaaggcggaagcaagttgtcctaccattcccgatgctctcatagtggtgatcacgcggtacaaggggaggagtttctgcatgctatcctagtttgctctggacagaggtgagtgtgcattgagattaagctttgctctggacagagggaggccaaagtaagtttgggggaagccttccaacttggcaccgcgttgcaggatcgaggtgaattaaccggctcgatgttgtgggtcaacatgaatgggaacaagggtgctctcatcgtaattgat

SEQ ID NO: 327189 - DNA, 200 bp, Zea mays
gacctcgacttaatctctatgactctaacaccattgctatgactaactctaatcacactcatgagatgatcaaatcagatgcgcccgaacacttacatcctgattcatttaaggctatcaacgactaacgcattcccatgtactacagccccattattcatgtccagctgttcatccacttctctgtataatagcccaac

SEQ ID NO: 327190 - DNA, 188 bp, Zea mays
acccacgcgtccgccgacgcgtacgcttacgcccacaatttacgctaacgcacactcacccacactacacgtacggattaaacgaaaagggggccagaacacgagcctaacggagacaaaccagctctcctgggcgcccgtaacccctgctagcctcgccagggtcggaccagctctccgagtcgact

SEQ ID NO: 327191 - DNA, 353 bp, Zea mays
cccacgcgtccgcccacgcgttttccctctcgtccgcggacgcgtgggcgaacgcgtggtcggacgcgtcgtcggacgcgtgggaagaactgggtaatcatgaccgagtccctgagacgtactagatgataaatgtactacgtcgtatcatggccgtggaaggggccgtggggatcgtggtagttatagaggctgatactgagggggatacagtcgtggtctaactgctgctgctacattcattgaagatcaagctcagttaccaagcctcagtgggaagtgaaaggctcacaaatgatgatgtcacctatcgttgtgttgtctgctagttggtatttatttatatttaaatt

SEQ ID NO: 327192 - DNA, 386 bp, Zea mays
caaaaacatggatcaaaatcaacaagataagttgaacatttgcggcggtctaggaaagacagtgaccatcaaaggagtttctcaaatcaggctggtgtttctacagtagatggactagaagattttcccatgggtaagtctcagaatgtgcatacgtttaatgaggaagaatttgagagaagtacggcagcagcggctatgaaagaggctatggataaagctgaggcaaagttcaaacatgccaaggaagtacgagagagagagcgtgatgcaaagcttagaaatagagaacaacaggaacgagataatgtaataaggtcgtatgcccaggatcgtgaggacaaagagagaaaggaaagactagaacaagaaagagagatgaggca

SEQ ID NO: 327193 - DNA, 244 bp, Zea mays
gaaaaaaaaggtgcagaatgtcctaaaaaaataaaaaaaaaaaaaaaaaaaaaaaaaggaaaaataaaaaaaaaaaaaaaaaaaaaaaaaaaaaaaaaaaaaaaaaaaaaaaaaaaaaaaaaaaaaaaaaaaaaaaaaaaaaaacaaaaaaaaaaaacaataaaaaaaaaacaaaaaaaaagaaaaatgaacaaccactacaaaactaatgaagtcacctacaaaaatgatcaaaagaccaata

SEQ ID NO: 327194 - DNA, 355 bp, Zea mays
cccacgcgtccggggttggcttttccttcccctccggttcgggttcgggttcgtgaggttctccggggttcggtttcgtgggtgagcggatcgagatggcggcgtcggatgttgagtaccgctgcttcgtcggcggcctcgcctgggccacggacgaccactccctccacaacgccttcagcacctacggcgaggtcctcgagtccaagatcatcctcgatcgggagacgcagaggtcccgcggcttcggcttcgtcaccttctccacggaggaggcgatgcggaacgccatcgagggcatgaacggcaaggagctggacggccgcaacatcaccgtcaacgaggcccagtcccg

SEQ ID NO: 327195 - DNA, 172 bp, Zea mays
cccacgcgtccgctcacacgttttcattctccagctcagacacgtgcaccgaggcgcgtatctattagacgaaggccgggccatccaagccaacgtactcactaacagaacagcatagccactacagtatgccgatgattaccaacaccttaagcaccagcctacaaccccg

SEQ ID NO: 327196 - DNA, 309 bp, Zea mays
aaaaaaaaaaaaaataaaaaatttttataaaaaaaaaaaaaaaaaaaaaaaaaagaaaagataaattaaaaaaaaaaaaggaaaaaattaaaaaattattaaatttcaaaattttctttcttatttatccttctttccatttttttctattgttctttcctttttcaatttaattctttcattttttttaattttttcctcattttaatacctttgctttacttatttttttctcttttctgtttattcccttttggcctcttttctttttttcttacatgcctttatttttcctctttcccatttttt

SEQ ID NO: 327197 - DNA, 208 bp, Zea mays
cccacgcgtccgaacaaaaaattagatataataactaataacaactaaaaaaaagcaggaaaaatctccaaaaaaactaggcctccacactatcaacaacccccatctctacatctgcctaaatccatcatcttatcacttctctaactctccctaccactaatctaccgctcctccttctacaacttcgcgattctaaaaaccctgg

SEQ ID NO: 327198 - DNA, 220 bp, Zea mays
gcgcgggccactcacatcaccgcatttaatgcaaagcatatactaaccacaaaggggcgggggcatgagggacgcagtgatgtacataaagacgggagccaacctctgcccagccgatccgatgattcaagaaaactcgaccgatcgcacgggaccgagcacccaaaggcagcaccaaaaagaatgcccgagaaccaacaggggaaagggcgcataacgc

SEQ ID NO: 327199 - DNA, 126 bp, Zea mays
cggacgcatgggctgacgcgtgtgagtacagacctaacctgatcaacaaattggggggggcgttcgatgctcatctaggagacctcacgcagaggcaactactagctgccggtgccacaatcaatg

SEQ ID NO: 327200 - DNA, 233 bp, Zea mays
cggactcctctcattactcgattcttttctcatctaactcaatcaacaaatgagatgggtaaattacaacgtataaccgcaactttaaactcaaactaatactacaatctatttacacaaacaacatcatccacatttaccgaaaatccttaattccctcaaccaaaacaaccagatccataaccaatacttcaacacataactttcaataaaaataattccccaacacacat

SEQ ID NO: 327201 - DNA, 238 bp, Zea mays
accactcatccacccactcctctacctacacatacacaagcacccaaataacgagaggattatttaacaaccttgttggcataccacacaccataccacatcaaacctcacgtaacaccaatagcaacaatcacatccactacgccatcatccaactatacaccatacccatcaaataccccccctccttcccacacgaccacccttacccccaactcttcctcttaaaacaccccat

SEQ ID NO: 327202 - DNA, 315 bp, Zea mays
aaaggtctgaaaccccgtcctctacttttggatatatgagtacttggataactggatggttatgggacatcctttgtagaggtccactaagcatcctatattacacctcatgtatcaggaatagctaatggcacatagtcaatggaaggatcatatgttccctctttcccatgatatatgccctcttttatccgtaagtctaccttggccttctactctgccgctaaaagctctgcattctgcattgtcgacaggagagtgcttgctatatgactgcaacctatactggtggcggatcaccattctgaatagggc

SEQ ID NO: 327203 - DNA, 267 bp, Zea mays
gcgcgcacgcgtacgatcactgtgctttagtacaagcaagccaaatatgcacacgagtgggagtcgacaagctcactccgagaggaaaggatgaagtggtggcgtatgaggccactgcagaagcgaaacatctaatatgtgagcggagatccctgaattgcatggatcgagtgaactagtctctgagaaactatggggagtgaacttgatggctctgtgaaactgtgctatgcgaactagatggctatatgaaacgaccatgtgaag

SEQ ID NO: 327204 - DNA, 249 bp, Zea mays
gcgcccacgcgtccgcccacgcgtttgcctacgcgtccgcccacgcgtccgcccacgcgtccgaaaaaaaaaaaaaaaaaaaaaaaaaaaaaaaaaaaaaaaaaaaaaaaaaaaaaaaaaaaaaaaaaaaaaaaaaaaaaaaaaaaaaaaaaaaaaaaaaaaaaaaaaaaaaaaaaaaaaaaaaaacaaaaaaaaaaaaaaaaaaaaaaaagaaagaaaaaaggggtgcttcattaagaatgacaaatt

SEQ ID NO: 327205 - DNA, 325 bp, Zea mays
cccacgcgtccgaaaaaaaaaaataaataaaaaaaaaaaaaaaaaaaaaaaaaaagaagaaaaaaaaaaaaaaaaaaaaaaaaaaaaaaaaaaaaaaaaaaaaaaaaaaaaaaaaaaaaaaaaaaaaaaaaaataaaaaataaaaaaaaaaaacaaaaaaaaaattaaataaaaaaaaaaataaaaaaaaaaaaaaaagtaaaaacaaataacataacaaaacttaaacaaaaataaaacaaaatccctttataaacaaataacaaattatctaataggccttaacatataacgcttcccaacatttgccaatcctaaatgccca

SEQ ID NO: 327206 - DNA, 328 bp, Zea mays
aaaaaaaaaaaaaaaaaaaaaaataaaataaaaaaaaaaaaaaaaaaaaaaaaaaggaaagaaaaagtacccacataacgtggtgacgatatctagcaaaaagatgaaactaaaatggaactaccgttcccgcccgatgcaaagctaaggtgcggggagatcgggcccttgggtacgaccaagccttgacctgcatcgcgcccatcaatctctgcagcttgcgctgatggtgggtaccagacgcgtttaggaatgttgggggtacccctaattatggcacccggcacacagatactagtgtctacactatttgggtctattcggttga

SEQ ID NO: 327207 - DNA, 339 bp, Zea mays
atcattttgtaatggtagtggccaattgaattggagagtgggttaagttttcacatgtgatgactatatataaggcatcatatggagtttagaggtgcaaaaaaaaaaaaaaaaaaaaaaaaaaaaaaaaaaaaaaaaaaaaaaaaaaaaaaaaaaaaaaaaaaaaaaaaaaaaaaaaaaaaaaaaaaaaaaaaaaaaaaaaaaaaaaaaaaaaaaaaaagggcggcccctttaaaggaacaaagttaaattacccgagaatgcaaacaaatagcttttaaaaagggtaacctaaattaaatcaactggccgtggttttaaaaaatggtgactggaaaa

SEQ ID NO: 327208 - DNA, 61 bp, Zea mays
cccacgcgtccgataaaaaataaaaataaaaaaaaaaaaaaaaaaaaaaaaagggaggaat

SEQ ID NO: 327209 - DNA, 314 bp, Zea mays
cactcgtccgatctgcatcaggctccctcgacccacgattttaaacccaaccatgcactatattggggggtgtcttcatgaacaggcacgggacatcctgatgcttgagctcgctaggctcaactgtggccaagggagagcgcttcacctcatggagctcaatgacctgtcactaccatcaatggcgctatacaacactgctacacctgctgacacaccataccctgcaagagactgatgcactcaagcaccttgctgttctgcataccagccaaaccaatcacgtccacaatgctgatggtcagaacactggc

SEQ ID NO: 327210 - DNA, 135 bp, Zea mays
aaaaaaaaaaaaaaaacgagaaaatttttcaaaaaaaaaagggcgccaaaaaaacacttcaccacatcatcacccatccacaactacatcagcttacacactatagtaccacatatttttacataaaactcactt

SEQ ID NO: 327211 - DNA, 348 bp, Zea mays
  unsure (1)..(348): unsure at all n locations
tcgtctcgtcggacgccccgtggggtnnctcatgtctctgcttcgtcgtctctnnngtggagctacctannggtgacncggtgcgcggactcgttccnttnacgccactgtggccgtcganntccagccctcnnngtcggcttttctnnntcgcaccntncgtcactncgtgcgggtcangnncacctcaccaggggttcatttaaatgggnncagagaccggggtgttctaaccccnnctcttnntggaaggggtatgnnaagcatgggtgaaggggcagagaacgnnngagtcattcttcnnaccaagccnnncttccttggggatgtcttgcaagcccaaatctt

SEQ ID NO: 327212 - DNA, 123 bp, Zea mays
cccactcgtccggcactccgaccgtttcttatggagcttcgaggccgcccgtcgcgtcgcgtttttcaaacaggctgaggcaatggcacgggcccttcgtggcgcgaacgccctaacatgtct

SEQ ID NO: 327213 - DNA, 176 bp, Zea mays
cccactcgtccgaaagaaaaaaaaaaaaataaaaaaaaaaatttataaaaaaaaaaaaaaaaaaaaaacaaaggagggattccaaaacaaacagacgcatacatacaacaaaaataacatcaaacatattacaaccataaatacaattcaacttccatcaatctacaacctaatac

SEQ ID NO: 327214 - DNA, 253 bp, Zea mays
ccacgcgtccgcactggcctcgggaagttaacccaagggtttaaaaccccgccacgaacgagaaagaagcagctgtttcaaaccacggggggcccgaaaaaccatcaccgacccatcacacgcaccaacaccaccacctgaaacaccacaaaagagaccacaagcacgccgcacgcccaagacaccataagaccgccgagcacacacacgacacaatcactaaaccgagccccacagacgacaaccagtacga

SEQ ID NO: 327215 - DNA, 296 bp, Zea mays
ccacgcgtccgcccacgcgtccgaaaaatcatacaaaaattttttatacaaaacaaaactaaaaaaaaaacgaagatttaaaaaaaaaaacaggaaaaccaaaaaaaccaaaaaaaaaaaaaaaaacggccaacctctctataatacccaagtttacataccctgccatccacttgcaatagcttccaacaccgccacccaaactaaattcatggcccgcttttatccaactctattcctgaaaaaacccaaccattacccaacttataccaattgcccaaacttccactttaaca

SEQ ID NO: 327216 - DNA, 95 bp, Zea mays
cccacgcatcctctgactcgtggcattatttaaaaaaaaaaaaaaaaaaaaaaaaaggagaaaatattaaaaaaaaaagggcgaccaatttaaac

SEQ ID NO: 327217 - DNA, 138 bp, Zea mays
actcgtccgcccacgcgtcctgtcaataaaaaaaattatataaaaaaaaaaaaaaaaaaaaaataaaaagaaaatttaaaaaaaaaaaaagaaacaaaaaaaaaaaaaaaaaaaaataaaaaaaataaaatataaaat

SEQ ID NO: 327218 - DNA, 282 bp, Zea mays
acccactcgtcctctcactcttaccataaatcactcctttcttttgcgcatactatctaaatactaatgtagccttctaataactcattccctcctaaattcacctcaaaatagcttcaacccacaccaatcctatctcgtaaacccaataattacatgcatcatcgtcccatctccctcaacctattatcaaacatcaaatacccattactacgccatcttcttccactagccattccacctaatctttatctccaaataccccatttttccaaccaaaac

SEQ ID NO: 327219 - DNA, 269 bp, Zea mays
ctcacgcgtaccataaatcagtcgattgttctgactatagtatctacagactaagggaggcttctataatatgattccgggctaagattacctcaagatatcttgagcccacacaaattctatcctgttaagccaatgatcagaaccatatgtctctcatcgcactccacatattatcacaccttaaatatgtattaccacacatctgcttcgatgagcactgccacgtaatctatatcttcaaaccggacatttttggcaagcacaac

SEQ ID NO: 327220 - DNA, 185 bp, Zea mays
caaacaaacccaacaaaaacagaccagcgaaacaagtaaaccaaaaaccaacatcacagaccctcctaaccataaaaagacaacacataaaaaatataacccaatcaccacacatcttaactcactagccaatcaccggaaacttcagcctcaaaacccacattttaacaacaaaactaataaaa

SEQ ID NO: 327221 - DNA, 195 bp, Zea mays
cgtccgacccacgcatacgcccacgcgtccgaacactcaaacaaaaaattatataaaaaaaaaaaaaaaaaaaaaaaaaagaaggattaaaaaaaaaaaaaggccgaaaaaaaaaaaataaaaaaaaaaaataaaaaacaaaaaaataaaaaaactaaaatattattataaataaatataaaattaaaaaataaa

SEQ ID NO: 327222 - DNA, 167 bp, Zea mays
ccacgcgttctaaaaataaaaaaaaaattattttaaaaaaaaaaaaaaaaaaaaaaaaaaagaaattttataaaaaaaaaaaggcaatcaaaaaaaaaaaaaaaaataaaaaaaaaaaaaaaaaaaaaaataaaaaaataaatcctattaaaaaataatcaaaacaa

SEQ ID NO: 327223 - DNA, 415 bp, Zea mays
gctctaggctctagctagccgcgctacttcttcgtgtagccatcaaccttctcatcgccaccaatggccactgcggaggtccagaccccgaccgtcgtggcggccgaggaagcgcccgtggtggagaccccgccgccggccgtcgtgcccgaggagtctgcccccgccgaggccgaggccgaggccgaggctgctgctcctgctgatcccgaggagcttcccgcggccgagcagcaggcagccgccgaggcggaggccgcggctcctgctggtgccgaggagcccgtcgcggccgaaccggccgcctatgctgaggctgctgctcctgctggtcccgatgagactcctgcggtcgagcaggaggcagccgtcgaggaggaggctgctgctgctcctcctgctggtgcctaggagc

SEQ ID NO: 327224 - DNA, 234 bp, Zea mays
acccactcgtccgctgtgtctgggcttttgtatggtcaggcttttcagagttgtcatggacttatgggggtgttagtatattggttgcgctgaatctataataaaaacgaggtaaactaggacaatgatgatgtggccgtgtgtatttaatgtattctgttcacaattaaaaaaaaaaaaataaaataaaaacaaataaaataaaaaaaaacaaaaatacagtatagataaaaa

SEQ ID NO: 327225 - DNA, 294 bp, Zea mays
acgcgtccgcgcacgcgcgcctcaataacaaaacccattggtacaaccccaccaccgacaacacgctccgcaccttaaaagacaccagcggcgcccacaacacccggcaccaacaacaagagagcactgcacaaagcaacaacatcgcaaagcgacacattcagcacccgataagcaccacatgacccccgacacacccaaaggcccggaggacccgaagaaaaaagacctacagacactttggggcaaccgccactgatagccctaggcgaacaaccgcgactactacaacaa

SEQ ID NO: 327226 - DNA, 350 bp, Zea mays
cggacgcgtgggaaaaaaacaccaaaacatttaattacaaaacaaaacaacaacaaaaaaggaggattttaaaaaacaaaaagacgcccaaaaaaacaaccaactatcaaacccaaaaacagaactccagatcaatcgccataacggcacccacctactcaccattccagacttattcacttctgcctaagccaaagctaccatcgatatcgcttactcaaacgacttcactcaccactgcagcctaccgccactaaatgccgatgcttacatagacaactatcgtatatctgagactcatccattgcttgctcaaaccattttcgaatcatgaataaacatgattttta

SEQ ID NO: 327227 - DNA, 369 bp, Zea mays
acccactcgtccgtggagccccccgcttgttccgccatttatcatcgcccgaacaaagctacatccggcagacatttttaaaaaggcggggggcccaacaaaagatccccaacaatcaatcccaagaaccatctccagatcaatcacctcaataccacccaccttctcaccatctccaaacttcttcacttcttcccatgccaatgccttcaacgacatatctcaatctaaacactttactcaccatagcatcatttctcactctaatcttctattcttactttaacaacaatcttacatctaatacttatccttttctttctcaattccattaaattatcataaatcatcaacaatataacacacatt

SEQ ID NO: 327228 - DNA, 253 bp, Zea mays
cccacgcgtccggtcgaaaaaaaaaataataaaaaaaaaaaaaaaaaaaaaaaaaaaaagaaaaaaataaaaaaaaaaaaagaaaaaaaaaaaaaaaaaaaaaaaaaaaaaaaaaaaaaaaaaaaaaaaaaaaaaaaaaaaaaaaaaaaaaaaaaaaaaaaaaaattaaaacaaattaataaaaaaaaaaacatataaaaatacaaaacaaaataattaataaaaaaataaacccataacaatataaaattaa

SEQ ID NO: 327229 - DNA, 318 bp, Zea mays
cccactcgtcctcccacgcatactctcactctacccattaatctaacccttctccataaaccatctcgggggcatatattatacactccgaaggcacaaaactcatacttagtgacctaaataccaaaaccatgtccttaacactacaaaatcacacactttacaatctaactcctatccctactaatcatattccatcacatatcctgcaccacatatttactaataacagatagctacacacaattcttacacatattcagatactcatacttattatccatccttactcgaattgcactacatttctctaaccct

SEQ ID NO: 327230 - DNA, 468 bp, Zea mays
ccggccgaccgacgcgtccggtctgattactattagcgattggttgtcttagatagggtgtcgggtgtccaatgttttggttggttttttttacaggagagagagctggccaaggctgccgggaaactggccgactgccagaagacgatagcttcactgagcagccagctgaaatcgttggccgatttcgacgagttcctccctgaaaccgagactagtggcgccgactcagccgacgcctgggacggcgacctgaagctgctccaccctgcaagctatcccacgcagattggctgtttggcagtcacatgagtcacgatcctcgttggcaggtgggcggagaaactgtttttgttcgggttccaccgcatgattgctgtggtgagattgccatgatcttccaccacatgccatatagagttaagtttataatagtctataggtgagaaaatgttcatatgaaagctg

SEQ ID NO: 327231 - DNA, 375 bp, Zea mays
ccggccgacccacgcgtccgcccacgcatccgcaagatcctccaaccttttattcccgaacaaagctacaaccagaaaggagggttttaaaaacagccggcgcggcaaaagaacgccagcgaacaaacccaacaaggatcaccagatcaaccaccttaacagcacccacctactcaccattccagacttctacaccagtgcctacgcaaagacctacatccataacgatcattctaaagactatactcaccaaagcaacatgctaccactaaacggccaagctcacccagacaactatcggacatccgagacggaaccaatgctcgctcaaaccatttcggaatcatgaatatacatgatttttacagacattaa

SEQ ID NO: 327232 - DNA, 87 bp, Zea mays
acccacgcgtccgaaaagacacaaaaaaaattcaaacaaattaataaaaacaaaaaaaaaaaaaaaaaaaagggagaaatattaaaa

SEQ ID NO: 327233 - DNA, 247 bp, Zea mays
ctgggagccaatgcaggcttcgagtacatcatccaactttaaatgttcaagtgcttatcacaaacatgaaaggctgtgatagagaaatgttgcttcactgaccaaacatcatattcatgataaatgatctatgtgtcaagattaggagggaactgtgctatggagatcacgacttatgactctaaccaataatgatgatgagctagaaaggtaaaatatcatgcacaatgactgatgtctggacccg

SEQ ID NO: 327234 - DNA, 207 bp, Zea mays
cccacgcgtccgaaaaatataaaaaaaaataatatatatccaaataaaaaaaaaaaaaaaaggaggaatttattaaaaaaaaaagggaaaacaaaaaaaaggacgacctttctgatgcatccttgcttccgaatgcttgcatcctaattcatatcctttcttttgtccaaacttaattcaattgactgcccttttacttccaacttc

SEQ ID NO: 327235 - DNA, 429 bp, Zea mays
  unsure (1)..(429): unsure at all n locations
ccacgcgtccgcccacgcgtccgagacaagtggtttccaatgcttagtgtgtgtactagcaaccagctagctcgggcggcagcaggcagccatcatgtcggaggagaagcaccaccacttcttcaaccaccacaagaaggacgaggagcagcccgccggcgagtacgggtactccgagaccgaggtggtcaccgtcaccggcgagggcgagtacgagaggtacaagaaggaggagaaggagcacaagcacaagcagcacctcggcgaggccggcgccatcgccgncggcgccttcgcactctacgagaagcacgaggcgaagaaggaccccgagcacgcgcacaggcacaagatcacggangaggtcgctgccgcggcagccgtcggcgccggcggctacgtattccacgagcaccacgagaagaagaa

SEQ ID NO: 327236 - DNA, 71 bp, Zea mays
aaaaaaaaaaaaataattaaaaaaatttataaaaaaaaaaaaaaaaaaaaaaaaaaaaagggaaaaaaaag

SEQ ID NO: 327237 - DNA, 87 bp, Zea mays
cccacgcgtccgaaatttaaaaaaaattaaaaaaaaacaaaaaaaaaaaaaaaaaaaggggaaaatttaaaaaataaatggggcctc

SEQ ID NO: 327238 - DNA, 211 bp, Zea mays
ttaaaaggaccgccatttgaccaccgcacaccacccgacatgcatcacacacccttccagtgatcccatcctcccgcacaaccgataccctcaacagcgtcccgttaaacagaaaatataactattcccgatgcctccgccggcgtctccatacatactaaacacgcccactgccaatacctcccatctctggaaatcctaaccatattcc

SEQ ID NO: 327239 - DNA, 108 bp, Zea mays
atgacagctcgagaaaaccccctaactcgccacaccgtgtaagacgtggggcaaggtctcgaatgactggcgtaaatgcacgtagcgggaatcgtttgaaagtgaaag

SEQ ID NO: 327240 - DNA, 191 bp, Zea mays
ccacgcgtccgaagaaaagaaacccattaaaaaaaaatttaattataaaacaaaaaaaaaaaaaaaaaaagcaagatcaaaaaaaaaaaaaggcagccaaacaacaaaaaaaaaaaaacaaaaaaaaaacaaaaaaaaaattaaactagaccgccatttaaaaacaccatctactgcaaaaaccctctcaa

SEQ ID NO: 327241 - DNA, 176 bp, Zea mays
cccacgcgtccgaaaaaaaaaaaaaaaatatataaaaaaaaaaaaaaaaaaaaaaaaaaaaaagaaaaaaaaaaaaaaaaaaaaaaaaaaaaaaaaaaaaaaaaaaaaaaaaaaaaaaaaaaaaaaaaaaaaaaaaaaaaaaaaaaataaaaaaaaaaaaaaaaaaataaaaccaa

SEQ ID NO: 327242 - DNA, 431 bp, Zea mays
cggacgcgtgggcggacgcgtgggcgtgtcgcttgggcggacgcgtgggtctgaattgctcagaactgtatcattaatcaaaacctctggtggactgctcatttgcactctgccaatgtgcagtcattaagaatgtcctgccctagtgcagtggtgagggctgtctctctgaatcctcaggtcgcggttcgaatcagtctatctacatttatggggaaaagcttgcctctatttatctcttccatagacccccccccccccctgcgaacctcgggtactgggtctgttttattccttgttagtcgatactggcacctttgagtttctcgtgtggggtttttttagcctggtcaattgtatgagctgattagtgctgagtttagagctaaacaagtagaggtacattccacatggtagacatgttttatatt

SEQ ID NO: 327243 - DNA, 126 bp, Zea mays
acaaagcataacaccaacttaaaaaaaattttaaacaaacaaaaagacaaacaccataacgtatcaatttaacatttcccaagactcctaaaaactaacaaaccaatataacaactaaaattaaaa

SEQ ID NO: 327244 - DNA, 125 bp, Zea mays
cccacgcgctactccaactatgaaatctgtttgcaccccacagacattaagacgccctaggagtgcattataaaatgtcttgtgactcataaaaactcacatgttacttcttcctttaatatcaa

SEQ ID NO: 327245 - DNA, 185 bp, Zea mays
gaataccggctcgacccaccgtccgtcgggtcaatccgagtacgcgccgtctacctcgaagcccgcgagtgggccgacggcggatttaagaggccagcaggcgcctacaatctatcacctcacgagcatctctagcattccaccaggctcccactgcttcgtgcccgcatcccctgagcccaacc

SEQ ID NO: 327246 - DNA, 275 bp, Zea mays
acgtctggctgcagagcactatagccctgctgttttcccttgccgccttgcgtattgtgtttacggggcacaatatagcaagagctgttgcctacagaggagcaactgccgtatatggcttcatctcgccgtggcttgacatgctcgtgtcagacatgctctccgtctgggccatcacactcagcattctcctctgtggctacagcttatacttccctatatcaatatacaatcctgccgttagtgcggctatagcagctggtggcggatggggc

SEQ ID NO: 327247 - DNA, 188 bp, Zea mays
ctgaatcgaacaggaacagaaaccgattggatttgcaacacaccagacgaaccatgggctggtttatatacacacatgggcgccagactatcactagaacagcctctatgaatggcagacttgacacatcaaatggcctccaatctacactgccgctcaacataccgctaatgccataacgaacgaag

SEQ ID NO: 327248 - DNA, 143 bp, Zea mays
cccacgcgtccgggcatcacgaatgtgtaacctcaaagccctggtcacctcactactgtgcatctcggcgttgtcgtcgtcgccatggccatgcaccgcaaccggtcaactgggccgcaagcccctggtcaccggcgtcacca

SEQ ID NO: 327249 - DNA, 301 bp, Zea mays
cggacgcgtgggtttgattatttgttgtctttgtagtccttatttggtgtcgcatttgttaggtgtgtgttacatgaagaccatatgtgagctagcgatggcttcttgaggtgatggctgtgtttgtacatgaaaaccatatgtgagctagcgatggcttcttgaggtgatggcttctatgagatagctctatgaggccagggtcgtcactgggggatgaaggtcctgaaaaatatagttactgctctgtacatgtgccggtacatttcattcaaaaaaggatggcacaaggacatggcct

SEQ ID NO: 327250 - DNA, 410 bp, Zea mays
cgggcgcgtccgcctacgcgttcgatttatttgaggatgcgagcaagaacaaggaggtgaggtagtttgagcgggtggggcgcaggcgctacgagtactcgacgcctacgtggacggtgtttgccacggatgatcccaacgcgcagtggaacatgctggtgaagaaagactcgtacacgccggcgtgcccctacgcgtacccggacggaggcgagagctggcacatgaccgggcacctgtgcatccctaggaggtgctgctgattgtgacattggattttggattgcatccttcttcgtcgttacgagcagctaccagctactgcgaccttttattcccaaattagtaataaaccactagggaattagcagggctcttgttgcacctgatgatgacatcagcggagccct

SEQ ID NO: 327251 - DNA, 344 bp, Zea mays
cccacgcgtccggttactcgtgccgagcacttgatctcggacgaatgcatctacttcaacatggagaggatttagctgtaatcacatggcctaagtattctctaggacctccgtagtgctgtgatcaaactaaacatcgtgattcatcgtgaccgtaccagttctgactccgacggtcgacgccaccggaaagcccccgatggggccgaccccggttcctcccgccgtcgggacgcaacaggctgctctcgccgcccaagccaatgtagcatagccagatgagccgacggataccgagccaggtcccgccagttcaaccgttatagccaatgcttttgccgaag

SEQ ID NO: 327252 - DNA, 279 bp, Zea mays
ccgcacgcgtccgaaaaaaaaaaaaaaataaataaaaaaaaaaaaaaaaaaaaaaaaaagaaaagaaaaaaaaaaaaaaaaaaaagaaaaaaaaaaaaaaaaaaaaaaaaaaaaaaaaaaaaaaaaaaaaaaataaaaaaaaaaaaaaaaacaaaaaaaaaacaagaaataaattcaaattataaaaaaataaaaatataaaaaaaaggagaacattaaaaatgattaaaaccccaaattaaaaaaaattgaaaaattaaaaaaacactatcgactatt

SEQ ID NO: 327253 - DNA, 326 bp, Zea mays
gcgaatcctgctagccaacaacgccgttagttaaagcccatgcgccatggcgacacaggaggataaaaaaaaaacaaaggcagcaaaaaaaaaacataccaaaaaaaaaaaagacacccagaaaacaaaaaaacaacctaaataaagcaacacaattcaacacaaacacacatatacaccataacttacatctaacaaaatcgacctacgcatccaaaaccacagcacccaatcagaccacagcaacggctgcaacccctgctagaacgccacgaaacacatacccatcccggctgccaaaaacacccgcggactaacactccacg

SEQ ID NO: 327254 - DNA, 126 bp, Zea mays
accacgcgtccgccgactcctcagtcgaattaaaacctaaacaacaaacaccaaaaaaaagagagagactacaaaaaataacttaaaccagacacacaaagatcaaaagagagaaaccagctacaa

SEQ ID NO: 327255 - DNA, 91 bp, Zea mays
cccacgcgtccgccctacgcgtccgaataaaataaaaaaaaaaaaaaaaaaaaaaaaagagaaggttaaaaaaaaaaagagtgcaagaaaa

SEQ ID NO: 327256 - DNA, 403 bp, Zea mays
  unsure (1)..(403): unsure at all n locations
gcgcatcctgctcgcctcctctgctgatanggaaagcgtatgtgtgatggtgacagtgattaaaaaaaaaaaaaaaaaggaaaaaaaaaaaaaaaaaaaaaaaaaaaaaaaaaaaaaaaaaaaaaaaaaaaaaaaaaaaaaaaaaaaaaaaaaaaaaaaaaaaaaaaaaaaaaaaaaaaaaaaaaaaaaaaaaaaaaaaaggggggggccctttaaaagatccaaaatttacaaccccggaaatgcaactaaaaaatttttcaaaggggaccccaaaataaaatacaggggccggatttaaaaaacgtagaaacgggaaaaacctgggataaaccaaactaaaaaaaatttacccttggaaaaaaatccccttttcccaaagtggcgtaaaaccaaaaaggcc

SEQ ID NO: 327257 - DNA, 101 bp, Zea mays
ggcctcctggatctcctgggacatatggtgtttgacacccagcagatcataaagaggcctcaaggtggccacatgggctacatcaaccaggcgctcttatc

SEQ ID NO: 327258 - DNA, 442 bp, Zea mays
ccggttcgggattcgaccctcgcgtcacgcgtgctacaacaggccttatatgaactacaatgttattcgtgctgataacatggtgatccaggcaatctttctattggatatgcttaacaaggacatcaattccttctccatgagagtcagcccctcaaatcaactttggaacccaaatggtcaagcctttggacggaaagttcagcaaaggtaatcgattaaagaggcttcacagcagtggctgagggacccaggagttgtggggcgtcacagataatcggcatggaatttagtagtttataacagtgcctgaaggagctaggatttatgaatcattctccaccaccttgaggtactcaccggagccagaatttatgaatcgttgtccaccatctcgagatatgatattgacatgaccaaatgcatttactgtgggttctac

SEQ ID NO: 327259 - DNA, 88 bp, Zea mays
tcgaaaaaaaatatatgcaaaaaaaaaaaaatacataataaaaaactaaaaaaaaataaaaagggaggctagttctaaaccgcaagct

SEQ ID NO: 327260 - DNA, 357 bp, Zea mays
ctaagttaggattttaaacttagttgtacatgggttacgcgagagcacatacacaggccgcaccgtacagacatggactacatcaagcacgcgctgactatattcaccgactttgttagcagctcttggactgatgcttgccattatgatgaagaacgcacaggagaaatcccaagacgagaagaggaagacgcggtagctgctgaatgaataggatgacatatggtgccagggccactacttcatagtaccatgtactcctatcctattgtactcataataataatacgacgaaagatgactggtgggaaatgaatattgggtcctgctaaaaaaaaaaatgggttaattccaatc

SEQ ID NO: 327261 - DNA, 387 bp, Zea mays
cggacgcgtgggcggacgcgtgggcggacgcgtgggcggacgcgtgggcttgcagctgcacccttcactcagtcttagtctcttattagctctaggctctagctagccgcgccactccttcgtgtagccatcagccttctcatcgccaccaatggccactgccgaggtccagaccccgaccgtcgtggcggccgaggaagcgcccgtggtggagaccccgccgccggccgtcgtgcccgaggagtctgcccccgccgaggccgaggccgaggccgaggctgctgctcctgctgatcccgaggagcttcccgcggccgagcagcaggcagccgccgaggcggaggccgcggctcctgctggtgccgaggagcccgtcgcggccgaacc

SEQ ID NO: 327262 - DNA, 376 bp, Zea mays
gcgagagggaagagatggcggcgtcggacgttgagtaccgttgcttcgttggcggcctcgcctgggccaccgacgaccactccctcaacaacgccttcagcacctacggcgaggtcctcgagtcgaagatcatcctggatcgggagacgcagaggtcccgcggcttcggcttcgtcaccttctccacggaggacgcgatgcgcagcgccatcgagggcatgaacggcaaggagctcgacggccgcaacatcaccgttaacgaggcccagtcccgcggcggccgtggaagcggcggtggcggatacggtggcgggcgccgtgatggaggcggctacggcggtggcggtggaagctacggcggtggtcgtggaggcta

SEQ ID NO: 327263 - DNA, 378 bp, Zea mays
tcgtccactcgttcgcagactcgtgggttttttttttttttttttttttttttttttttttgtttgggtttttttttttttttgttttttttttttttttttttttttttttttttttttttttttttttaaaaaaaacggggttaaaaaaatttttttaaaaaaaaccttttaatgggggggcatttttttcccacaaaaccaaaaaaagggggaaaataaaaaaaaaaaatttcagggggacggttttatttcccatccgtgatttccacccgtcaaaaaacctgatggggaatgttttttttttaaaaacccgggggccctccaaaatttcaagggggggcccttcaccgttttatttcggataaaaaatttttt

SEQ ID NO: 327264 - DNA, 212 bp, Zea mays
gactcgcgtacgtagctcatcaagtatcttctcagggagatccttcgggagatcatacagatgctcaaatgacttgagtcatgacgtgagacctgaggtcatagattgtgtctgcgatattggaggcgacatactctatgacgttcgctatactactgcagattgcatagttcaatgcaacttacattacgacttgtctcattaacttgcgc

SEQ ID NO: 327265 - DNA, 263 bp, Zea mays
gacgaataatctcttcttcacctcactaacaccagctagcaactctttctctcctgcaataatggccgctcgctcctcctcctcccagccgcagctggtcgcggcggcggcggtcctggcagcggcgctgctgctgctggcggcgggggccgggacggcgtcggcggcggtgagctgcggcgaggtgacgtcgtcggtggcgccgtgcctcgggtacgcgatgggcagcgcggcgtcgccctccggggggtgctgcaacgggg

SEQ ID NO: 327266 - DNA, 126 bp, Zea mays
cccggtcgcccactcgtccgacaaaaaccctgactcaccttataaactaatcgcacctctttctatcggagggctttctatggctactcctactacacaccattcttgccaggattataactgtca

SEQ ID NO: 327267 - DNA, 375 bp, Zea mays
ctttcttgaatgtcagtttgggactttgggtacctctagctggtcatgtttgggcttttggttacctgcaccgatgtgatatgttgcatccatttacatacacaagcaactatgcacgctggtggtgaggtgtattgaactgtccttgattattgaggcctagtgtacgttgtgcagttgtttgtccagcctatggtgggttgtctacatctccatgaaatgagatggagagctgatggataaaggataatgttggttggacatatggtcataattacataagtttgattaggctcacagagtcacagtgatttgaactaccgtgacttgattgacatatcttcgggtatgtgattcccaaagtagccattgggt

SEQ ID NO: 327268 - DNA, 237 bp, Zea mays
gcgttcgtgtgtgctgtagcatgtcggcatcctacagtgctttagagtttatagatagatggcctaccgttattaatacgagatgttgatcagaaaaaaaaaaaaaaaaaaaaaaaaaaaaaaaaaaaaaaaaaaaaaaaaaaaaaaaaaaaaaaaaaaaagtaaaaaaaaaaaaaaaaaaaagaagaaaaataaagaaagaaaaaaaataaaatacacagtgcatgcaaaaacaaa

SEQ ID NO: 327269 - DNA, 327 bp, Zea mays
tgaacatatatacctacgattagctttgggtgctcatcagtcatcaccggccatatcaccagccatatacagggtgctgtacttgaggaggcaagagacccatatccacacagtgctgcttatcgtagtcccgggtaccaggaatggctccggttgccagcctgagaacctcattgccagttaagcatcgatgggccaacgctagaccgccatccattatgtcggacacattatgctgtgaggttcttttattctttcttgcactaccttgtccaggctggcaaccggagccattcctggtacccgggtctacgatatgcagctctg

SEQ ID NO: 327270 - DNA, 216 bp, Zea mays
ctgaggcaagttcgacatgcctgaacgcatgtagtgaggctcaagaacaagaatccgcaccttcgtgcccctgaaccaatacttatggtatttgggtaccatctgatgtcataaccaaagagcaacatgttaacagatgctttgaaaaactgtaccgtaactgtcggattcttttaagtacattatagtaaagacttgagcgttagctcaaaatga

SEQ ID NO: 327271 - DNA, 285 bp, Zea mays
tcgggcggaggctgctgctcctgctggtcccgaggagactcctgcggtcgagcaggacgcagccgccgaggaggaggctgctgctgctcctactgctggtgccgaggagcccgccgcggccgagcctgtcgccgaggcagaggctgctgctcccgaggagctcgccgcggacgagccggaggctcctgctcctgctcctgctggtccccaggagccggccgacgaggcggaagctgctgctcctgaggagcccgagaaggccagccagtgatgccgtgcgcacgc

SEQ ID NO: 327272 - DNA, 413 bp, Zea mays
tcgcacgcgcccgctcctcttcgccctcgtcttcctccatcccacggtcccacctgtccctctcaccgcctcgttattttttcgcccccatctttgaacgccgggactccaactccaccgctcctccctcttcgttccctccgatcccgcccctataaatccagtcgcctcagccgccacagcgggccgcaagcacgcatccacacagctcactgctgctcccgtcttcccgtgtcctgtcgtgctcccgtcgccgggggcggaagggttcgcgaggccggcgggcggttagggatttctccggagtcccgcgatggcgaagctgtacgtgcaggcgttcccgcccgcggatctgaacaagaacaccgagtggttcatgtatccgggcgtctggacgacctacatcctcattg

SEQ ID NO: 327273 - DNA, 277 bp, Zea mays
tcgcccactcgtccgcccactcgtccgatattttcttgttttagtcaagatgctcaaaaggttggaaaaatccaagtgactgcctttcagtcagaggatgaactacaggatgaatctcatgtacatgactgtatggctgactacagattaagtgaggccttattgtctaaggttacctgtgatgtagtaaccgaggagctgaatgtgaacagatgctctgaatatctgtacttcacatgtagtattgttttaagatcgttatatgagagtttgagcg

SEQ ID NO: 327274 - DNA, 364 bp, Zea mays
ggtgttcggacgtggcatctatttttgacggaagctggtgtgaattgtagatcgttgtggtattagattacagtatttaaactgctagtttcctggtttcaaagttttttcaccacaaatactggaggtgttcatgccttgcatgatttgtacatcttaccatgtagtatgaagcgatcgaatcgtaggtgacattacaaacgcagagaggcatacttatcagatagtgagttacaaaagtgtttttggcatgaccaaggatgcattctaccgtctagccaaattggaagcaagaactacagaagcgaaaagcaaatctatggtaaagagaacacgccttgtctcatgcgcttgctacaaaatg

SEQ ID NO: 327275 - DNA, 400 bp, Zea mays
  unsure (1)..(400): unsure at all n locations
aaaaatcttcatttcacatatagaattttctttctttcatttcattgcagggctttcttgttggttcttatgggctgacgtgggcactcaataactcaagcaaagtccttaaattagcaatccttaacagtcctcttacagtttcttctccagtccctggattgtttcagcagctaaaatggccactctttggtgaatttacttgtcaaaatgctgttttggctgagcgtttcattgaagcagatatatgctgaaattggaaaaggctgatgtatacaggttaccgtatctatccagtggcgctcctggattcgctttgcttgaagctgncaggaagatcaatttcaagatgtactaaatagaattttcgccggatttttgtccaaacgttgggaaaaac

SEQ ID NO: 327276 - DNA, 185 bp, Zea mays
gacagacctaccatagtagagcacatggatgatcacatcgatatagacaacctgatggcagagctgatggtgaatctagactataatctcgactatggtaccaccgatgggaccatcatggcgggagctatggtagagcctgctgagaagcttgctgagcatcttattgagcgtattatggaggc

SEQ ID NO: 327277 - DNA, 329 bp, Zea mays
cccacgcgtccgaccacgcgtccgaaaaaaaatacaaataataaaatataaaggaaaagagatataatactggagggcgctttagaggaaatgaacagaaaggatgtccgactgtgacgtgtctgagctttcaggcgcgttatcctattctctttcatttgccgttgtactgatttcgttaccctacaaagtacctaatgaatctacacattttgcgtctatctatattttcaccttaactgaaccagagtcattgctatgaagccctttgtatacgacttgcataccggttgcgaattaagcgtcacaattggcgcgctcttcgtgga

SEQ ID NO: 327278 - DNA, 338 bp, Zea mays
ggcttctcctccccctccggttcgggttcgggttcgtgaggttctccggggttcggtttcgtgggtgagcggatcgagatggcggcgtcggatgttgagtaccgctgcttcgtcggcggcctcgcctgggccacggacgaccactccctccacaacgccttcagcacctacggcgaggtcctcgagtccaagatcatcctcgatcgggagacgcagaggtcccgcggcttcggcttcgtcaccttctccacggaggaggcgatgcggaacgccatcgagggcatgaacgggaaggagctggacggccgtaacatcaccgtcaacgaggcccaatcccg

SEQ ID NO: 327279 - DNA, 144 bp, Zea mays
catgacagggaattctagtatataaatatacctatccttatcagctgattacatattaacatgactagtatcaaccttttactatatatgacatagaagataaatgcgtatcaataatcaaagattattaacatataagcttat

SEQ ID NO: 327280 - DNA, 417 bp, Zea mays
acgcggacgcgtggggcaatatcaattgtagtttgtgctttcttggcatcgtgcggactgagttttaatgtctagtgtgctacctttttgggatcaaattagatatgcactatttttaagtggaagtatgcttagaatacttctacaaagtcctaggattttgcagattttgtttgagcagctaactaaaggctcctaagtgatgaaggaaacatagctgagcagcaaatgaaacacaactttccttttttggagcagaataccaattcttcaactgagtttgccttggttttttagctggacggtgatgagtttctgggctaaataaaacctacaaagatggctcttctctggtctacgattctggggactgaaatgcaagcatgtgtgatctgtctgatgtctgccaagaaaaag

SEQ ID NO: 327281 - DNA, 403 bp, Zea mays
cacagacaagtggtttccaaagccaagtgtgtgtactagcaaccagctagctcgggcggcagcaggcagccatcatgtcggaggagaagcaccaccacttcttcaaccaccacaagaaggacgaggagcagcccgccggcgagtacgggtactccgagaccgaggtggtcaccgccaccggcgagggcgagtacgagaggtacaagaaggaggagaaggagcacaagcacaagcagcacctcggcgaggccggcgccatcgtcgacggcgccttcgcactctacgagaagcacgaggcgaagaaggaccccgagcacgcgcacaggcacaagatcacggaggaggtcgctgccgcggcggccgtcggcgccggcggctacgtattccacgagcaccacgagaa

SEQ ID NO: 327282 - DNA, 323 bp, Zea mays
accggccgatccggtcgcccacgctcgtcgagaagactgaggaatactaccctctttaacccataagtcgaataagaagcagttttcatttggaatatatattggcaaggttatttcaatagacattacagatgagccatcacatgccatggggaggtcgaatgagaatctgtaactgataaacttattaaaaatagtaagtatatagtaaaaagttattgtagagaaaatgtaatcgaagtttatgccacttgattgtttaacgtggggaatctttgatgttcggggaggtaccactaagttcattgttgattttcatatat

SEQ ID NO: 327283 - DNA, 248 bp, Zea mays
cggacgcgtgggcggacgcgtgggtgcttagctcggtggtctaatgccgttcgggtattactatcgacaactgctaaaacagagtggtcctatcctgtataaggagcactctggtgtaaatattggatttagaccgatggctgatgaacctacaagcttcttatatgcctcatatacatatttcttgatacacacaagtgcgtctaaatgtcacataaccttgcacccttactaggtcttaccgcttt

SEQ ID NO: 327284 - DNA, 170 bp, Zea mays
atgaacatgacgagaagtcacctaaccctattctagacacaaattaaagtgggagtgaagtaagtgagtgggtcatttagtaactgtatattggcaaaatgaagtaaaacaatagacaaagtacagatgtagccccatcacgtgccattggtagagggtcgaattgatga

SEQ ID NO: 327285 - DNA, 252 bp, Zea mays
tcgcggacgcgtgggaattgagattaaagttagtttttctaggagtgtattgaatcactctgtgactttccaaaggctaggatagacttatttctgagcaaaaatatatatgcagccattggaagtaaccatttggtcattgaatttggaatttgatcatgtggaacattttagaatatttgccaagcatatacctacttaaacaaaaaggtctacacatttgcacaactgttaaccaactgatttctgcaa

SEQ ID NO: 327286 - DNA, 143 bp, Zea mays
gccacgcgtgctctaacatgtctatctaccactactactacccatcatcaacgggccggcacacactacacacactctaatctatccacacagccaacacagataccgacaatacaggaggatgaagatctcagcaaaatgtc

SEQ ID NO: 327287 - DNA, 419 bp, Zea mays
cgggttcgtgaggttctccggggttcggtttcgtgggtgagcggatcgagatggcggggtcggatgttgagtaccgctgcttcgtcggcggcctcgcctgggccacggacgaccactccctccacaacgccttcagcacctacggcgaggtcctcgagtccaagatcatcctcgatcgggagacgcagaggtcccgcggcttcggcttcgtcaccttctccacggaggaggcgatgcggaacgccatcgaaggcatgaacggcaaggagctggacggccgcaacatcaccgtcaacgaggcccagtcccgcggcggccgtggaagcggcggcggcggcgggtacggtggtggccgtggaggcggcggctacggcggttggcggcgccgtgatggcgggcgcggctacggcggtggcggc

SEQ ID NO: 327288 - DNA, 198 bp, Zea mays
tgcacgcctgcgaacataggttcactgtttgcgatccactcgggaatgatatagatcgaggtactcatatgcctattataaccgatgcgtacccatgcatgaattgaagctatcatgtgagcgaaagcacactgagggctaggttggaacaatcacagcttgtgaataataatttgctaagaaatcgaaatgaataac

SEQ ID NO: 327289 - DNA, 421 bp, Zea mays
aaacaaatatggtttcagtgatatccgtccatatttgattcgattacatccctaatccaactcgtcgggccacaaccgcggtggcggaggcagtgctctggtcatctagcggacgatgcgggatgtcggaggcggagcaccataccctatggtcactcgcaccatctacgacaaccgggttgtgatgatgaaggtcatgatggaggcgcgtggactgtgggaggcagttgacaccaggaacgtcgagcgcaacgaggattggtgggctatggaggcgatcctacgagcggttcctgcagagatgcatcagtccttgggggcgaaaacgacggcaaaggaggcctgtgacaacctgaagactatgcgaaccggctcagggctagtaaagcggtcaagatacaacaactgcggcaggagtacg

SEQ ID NO: 327290 - DNA, 171 bp, Zea mays
  unsure (1)..(171): unsure at all n locations
gtgaacatgggtgtgggggagctacatgcaggtatcggtcgttgaagagagatctcctgagaggagtatctgcttcgcgttccagctgaaaaagcacgccggaagagaagagagtacaacggncggtcgatcagctaacgatggatcgatcattttttgcccatatttatt

SEQ ID NO: 327291 - DNA, 259 bp, Zea mays
acgcccacgcgtacggccgcggaccaccgtggtagagagccccggctgcccgccgctccgcgcgctcaccaccgacatcctcggcctcgtcaaagtcgtcgaggcccacgcgaggccggcgggcgccggcaaggtcgtcgagacgtggggcgcgcctgacgcttgccgtgccatcgttgctggctagctagccgatcgtgccgccgaacccggcttggctggggcgaggaggaacagcgtggttgagctgctgaaaacc

SEQ ID NO: 327292 - DNA, 158 bp, Zea mays
aattactctcttttactggttcattcaataattcaatttgatgcttggaaaccactggataataaatacaaatgctatggtatgattttgtgaattctgatcgctcaaaaaaaaaacaaataaaaaaaataataataaaaaaaataaaaaaaaaagaa

SEQ ID NO: 327293 - DNA, 354 bp, Zea mays
acgcgacccactgacagcacattagcagacttagatggagagcatgtgcatcatggacatagaacagctacccagcttgctaatgatgctgatgcgaaatggatagacttacaattaagcactgcacatatctatttcaatcatccctaatgcactcaagcagttataaccaaaatggtttcaagtggcccgtaacctgggcgcaatcaagtgcggacccctaatgtgtattagcatctgacgcgggggctgtgccctaatacagatggaagatgaacctaccagtcacttacagaatagctcataacgtggcattctaaaatggagtatcatttgtgattagttagacgtgaa

SEQ ID NO: 327294 - DNA, 431 bp, Zea mays
cccacgcgtccgggagcattcgagaagcttcacatggggggcgaccacaagaaggaggatgagcaccacaagaaggccgaggagcaccacaagaaggaggagggggagcaccacaagaaggacggcggagagcataaggaaggcatcgtggagaagatcaaggacaagatcaccggcgagcacggcgacaagtccggcgaccacaaggaaaagaaggacaagaaaaagaagaaggagaagaagaagcacggcgagggccacgaccacgaccacgacggcggccacagtagcagcagcaacgacagcgactgagatctggtgttgcagcacaggtgcaacacaagtatgcttgctggatggaagattcataccagctgatggctgatgaagtgtttcactggtggcatgcatgcatgtatcgtgctattata

SEQ ID NO: 327295 - DNA, 203 bp, Zea mays
cccacgcgtgcgggagcattcgagaagcttcacatggggggcgaccacacgaaggatgaggaccaccacaagagggacgacgatcaccacaagaaggatgatggctagcaccacaagaaggacgggcgtgagcataaagaaagcatggaggataagatcagggacacgatcaccgtcgagcaccacaacatggccggcgacca

SEQ ID NO: 327296 - DNA, 346 bp, Zea mays
atttattcctctgcgtgcatgaggtgtccagcgcccgatagggcgcttccttttctagtaggtttggaattttttttaggcagaggaggccctggattgtaaccaggactcgaggggccaggaacgaatcccatgcgggcgatgagaagacgtgcggcggcagcgcaagcgagaagacaaggtgtcgatgagcagggatcgtgacgacgacatccttcccgccgtcggcaacctccactacgctgtcaagcttctatccagttggtctctctctcttttgttagctagggtacttgagttgagccatttagtggtcctagtgttcatggtagtggactagaggcgt

SEQ ID NO: 327297 - DNA, 114 bp, Zea mays
cccacgcgtccgcacgagttcagaaccgactcgtgcttgtatccagacctgttttaaggctgtctgaactctaccgttgcccgttggtgtcattttagcgccctttttttggtc

SEQ ID NO: 327298 - DNA, 51 bp, Zea mays
ccagcgttcgccacgctcggaaaagggaacaaaaagaaacacttcttctgg

SEQ ID NO: 327299 - DNA, 400 bp, Zea mays
gaaacttctttccagttgcttggaagttttggagaattggaggatttgcttgcacctttcagtcaagacatccaggaaaatatatgtagaaagaaatttacactaccagaaacttctttccagttggcacccccgaatcccctgcgtacagcacctcatccaaccatcccgttctgtaggttcaaagaagtaaaaaacggacgtcattcgtcagttgtggaaatgaagcactacgacttgtgcacaatgaatttgaatgaagtgttgtcgagagtagaagagatgtcacaagaagaagcatctgtttgcggtcttatggatatggatgagcctagtcctcccagttgtgatgattcagttgaggttgatgacgacagttgctatgaaggtttaactgatg

SEQ ID NO: 327300 - DNA, 196 bp, Zea mays
cccacgcttccaaggaccacgacgctaccttcgtgtgctttcgttccagctttccttggccggcatctttacttcctacggaagccgtcgtgccagtcgccgcccgtcgcgatgggtaacacggtggcactggcgctgatccggcggtgcaagtacctggcatcctccctgatgacgcctcttctgcctagaagcg

SEQ ID NO: 327301 - DNA, 58 bp, Zea mays
cccaggcgttcggtcatatggatctcacttactgttctctcaagggctttgtgtaaca

SEQ ID NO: 327302 - DNA, 172 bp, Zea mays
ctgatatacctgttttacactcttcagatgttgcacatctattctcacattttatgttactcatctgtcaatggatcacgactttccatacacctttacctaggaagctatgcagattaacactactatgccttcacaaatatccactaccttcataaaacccactacattt

SEQ ID NO: 327303 - DNA, 420 bp, Zea mays
gactggtacaaagcataaaaacccaccacttttcatcgcacagactactgccataatgttgcgtccgatctcacaagcgaccctgcatgttctcaaccaagctactaaccagtgcttccctcatgtaacgaacctaccccacgctcgcatatgaagaacactgcgctcacctgcaacaaccaaccgtacaacactctgcaactacaacgctcattcatgttcatcatactaatgatgtgcatcaaacgacacgtacagtacaggtactccagcaacaccagctaccgaaacgtgccccacaccgaagcactcgtcaagccttcgaccccaacctgcgagcactatgacatcatcatattcacaaactgcgacttactatgaagcaacagcaggagctcccgcatgaggtgccctgtcaac

SEQ ID NO: 327304 - DNA, 77 bp, Zea mays
ccggaacatccgggccgacccacgcggccggacgggaggcggctgccaacacgccgcagtagaacctgaacggagaa

SEQ ID NO: 327305 - DNA, 191 bp, Zea mays
aatggtttccttcttttttcactcttcattttaacttttacacatatcacttttaaattcagattccgttcatttgtacacggccttaacctactacaacactatcccaaactcaacatccatctacaccagcaatcactctattcacctataatgacctaatccatctaaatcctctaacatacactcaa

SEQ ID NO: 327306 - DNA, 399 bp, Zea mays
cctgctctcacttacattgcttttaacaatgtaatgctcaaatcatctcaaccaggttccgcaacttttccaatgtgcacaagctttacatgaaagtcttctaccctaatcttcaattagaaccatttctaatctcagcaatctagtctaattcttgaatctttaaactcaggaacatgccacataaacttctaaagtatcatctgacaattatgcaagcatatcacacgaataaactcgactattagatgcacataccaccaattctgcatgatacaacactaatacaacagatactacataatcaaattaacttcaacgttaattgcatcatatgctctcaatagccctaaacatttgacaatctaatatatcttactatgtacaatcatggcttaa

SEQ ID NO: 327307 - DNA, 332 bp, Zea mays
taccgacccaacccacccatccactcagtcataaaatatactcctccgttgactttaaaatcaactaacaggtcacaaatagtttagtaacaaatatttgagaacagagacaattaaccaatattcatagatcattgatcatattatccaaaacgttttgatactacaagacagattatatgcacaagcctattcacaagatatgactccctcagaactaccctacccaaacaccaacccctgaaatgaaccaaggaatatttatttaaaaacataaaatctctgactacaacaaatcacagctcacaaaccaacaatgcttcctgctgact

SEQ ID NO: 327308 - DNA, 439 bp, Zea mays
atcaggctctcttattacagtctaaatagttttcatactggactgcatgtgctaatgggctgatccatttttcgtacagaaacatatctctacttcccggcaaagatcaaacaaacgacatagaaaggtacaacaccaaattataccaattgatcgaccaatttaacatgcagacggccctatattcttgcctaattctagacgacttcatctaattcactaccaaccaggactacatcagtaacaacctcttgttatccgtatactcttcttccgtcaacaccgatgtcaatatcaatgacgtcatcaagctcaagctacacgacagaagatccagactaatccgctacgttaagcttgactttgcttgcgccgaaagcagcagcaccaacaatgacgaccgctacaacaacaacaacctacacaacaacgacaacaa

SEQ ID NO: 327309 - DNA, 276 bp, Zea mays
atccaactcccgaacagcatctgttctctcactcttgcacatcaatcattatttaggtgctcgatacctagcctatagccctagctagtagctagccactcagtcgcgtagtcatcaaccttctcatccgtacccatggccactgccgaggtccataccctgaccgtcgtggcgaccgacgaagcgccagttgtggagaccccatctacgaccgatcgtccagcccgacgaggctgcccccgtcgtcgaggccaatgtagacgaaccagctgcccc

SEQ ID NO: 327310 - DNA, 432 bp, Zea mays
ctccgcgcacgccgccgcccctcgacgatttcacgttctcgccgtcgtctctggtctcgcggtcaagtgctacctggcgtgcgtcctcgccgcccgctacgcccgcctcggcgaacccgatgccgcgcgcggggtcttcaacgccgacggctgctgccgctacgcgacgccgcccaagccgctgctgtacaacgccatgctccgtggctacctctgcctgggcctcccgcgcgaggccgttgcgctcctgcgcgccatgcttgcgtccggctcctgcgcgcccgaccgccacacgtatcacctggccgccacggcctgcgcgcgcgccccggaccttgggctaggccgccgcttcgaggctggcgccgcggcctgtgggctcgcggtgtccgaccttctggtggccactgcactcatcgggatgcatgccga

SEQ ID NO: 327311 - DNA, 411 bp, Zea mays
cccacgcgtccgcggacgcgtttttctatttctagatcgcgagcggccgctcggggtctaggtcgctatcggctgccctttagttttttttatgtatccctttcccatccccgtgatggcttgagagctgttctccatctcctaggaggcgcaatattccacctccatcacggaagcgttacagaagaaagagcagtccgagtgtcattagctctccagttactgcatctcaaagttcccaccttgggttggaagagaataagaatgctattgatacgcaaaggctacaagaagaaaataaaaggcatttccgaagaaagatactgctgtaattccgcttgttatatctgatgatgcaactggtgatcctttatctacttttgatcagttttgataattcgtttttggatc

SEQ ID NO: 327312 - DNA, 189 bp, Zea mays
actcagcactccctctggcccaaccacgtacctgtgcccacccggctacgcgaccttcccgatctgccataacctaccccaagctcccaaccgatccgtctcctgctacgtcgcgtccctcaggcgcccctcacgaccgcacgcgtccgcctgtgtctcgaccgggtacacggactcttcaccttcacg

SEQ ID NO: 327313 - DNA, 157 bp, Zea mays
cccacagcgtccgcccacgcgtccggggactttaacgttacctaccctatatgggaggaggaggccgggctaacaatgtgcagaccaccgaccttacagctcaagtgcgacagtagccgaacgtacctgatcagatccgactaccaagcctaccaag

SEQ ID NO: 327314 - DNA, 430 bp, Zea mays
cccacgcgttcgccaactccatcgctagcgcatatgccaatacaatctgaagtccaggggtgccttcttagaaacgaacggataactgacacttgcatataatcatctaggaaacttggtgctgacactatatacatcagggatcacgcctgaaaccaacatcgtaccttcatacatggcacctgaattgactctcatatcgctcacatctaccaacaagtgataattatacacattccgagcaatagcacttgatatgctgtcatgcacaagcccagacatgccagtccgaaaaactgtcgtcttgctgtgatatcttgtcatctatccactcctagattatatgccgaatgatattcatcatccattcatgacaggtgctcactgctacgccgatctgataaccgaaacaagaactctgcctattcct

SEQ ID NO: 327315 - DNA, 291 bp, Zea mays
tccacgcgtccgcccactctacctaggactccaactttacctaccatatatacatacatgagcccgggtgcaccttgatcggaccaccaaccttacagctcaattccaacagtagccccacgttcctcatcatattcacataccaagcctaccaagtgctcgacatctattactagaacaacttcttccacatggtcagactcacaaccttccactcagcatcggctgccaaccgccaaccgtcaacctctcactcttatatcccaatacattcgtattaagcacagccaa

SEQ ID NO: 327316 - DNA, 365 bp, Zea mays
acatatcaaataatcttccgcccgatttataaaaaaattcagacctccccactaatatcactctataacctatcctccacaatataaacctcattatatcacacaaacacccatatcaatcaatctctcacatcctctattttctactattatatatcacattttcctttccttaaaaatccaacccttctctacatcacaaccatcaatcacactaccactcacatatttaatcatcatcatatctctcatactctatttacatcctcttactcaacacatcttctaactccaatttttaccattaactaccaattctatacttttacataaacataattcaaccccctcccaaacatattcta

SEQ ID NO: 327317 - DNA, 227 bp, Zea mays
cccacgcgtccgctatcacacaaccgtactttccgtttacatactaaggaccaaactcaccgttatggtcaaccttactcgagacatccttattaacaataatttcaactacatcttcaatgcccacatgattcacactaacatgcttatgaacaagcccttactacacttgatcatcacaattctcatattcatcaacttacatgcatacataagctatattgaca

SEQ ID NO: 327318 - DNA, 210 bp, Zea mays
gacccacgcgtccgcccacacgtccaatatcacgtccaacaccttcacatttaaccttatccagatcctatttcagacctagttcaattatctaaaggttgtccaaatccatatcaagatccactacctcatccaaaaccataacctgcacatgcgccctattcacaccctaaacctataccataaccacatccaaatccttaacctcaa

SEQ ID NO: 327319 - DNA, 222 bp, Zea mays
gtaaatttccctaagtaaagactgattaatatctaattagtggtccacatttcaagaaaattaataaaaaaaaaaaaaccccaaaaaaaaaaaaaaaaaaaaaaaaaaaaaaaaaaacaaaaaaaaaaaaaaaaaaacaaaacaaaaccaaaaacacaaaaccaaaacaacaaacaaaaacaataacaacaaaaaaatacaaacacaaaaaaaaaaaccaaa

SEQ ID NO: 327320 - DNA, 309 bp, Zea mays
cccacgcgtccgccctaaactcccctcctttctccttacaataccgcgaggcgaaagctgagctcgcgtagcctctttcccacaccttcgcctgtgcctatactcctgcacaaataaccccttcgagtgcggttgctgctgcttcatctgcggtatttcttccacacactgactcggtatccattctacggacagaccgaccaatcgacccatccgtccaccgagagccatgaggcacaagcagatccacagcaagcagaacactagcagccaccggcgacgatcgcactcctttcatcatcagccttc

SEQ ID NO: 327321 - DNA, 53 bp, Zea mays
aaaaaaaaaaaaaaaaaaaaaatttaaattttaaataaaaaaaaaaataaaaa

SEQ ID NO: 327322 - DNA, 313 bp, Zea mays
acccactcgagcgatcgactatctcaacatccaattttcatattctcagcttccatctaatacaacatgcaaaagtccaattatactttcccaaccacttacccaaccctaacatgacacaatcctcttcctcttcgcagactccgtacagcatcccatcaacttctatccctacatatcacaacattcatctatcacacatagactctcacacccttaaccaaacctgcaatgactaccagaacaccactcatctattgtcgtctcagtacgaattcttctgagaaaccatctttaccattatccaaccacc

SEQ ID NO: 327323 - DNA, 464 bp, Zea mays
ccgagtccgagtcgtccgtctcctgcccgtttccttttccgggcgcctccgccccgtttctgcgcggcattcttcggcgccgccgtcctgagccgtcgcacgcgccaccggggcgcctccggcgcgcgctccctacgccggctccgccccgccgccatgggctccagagtccttcacttagacgttcctgcacattctgaggcctatcttatgagaaatgtaccagggagtgtaagtagccctcgcacgaatggtgaaaagggtctctttcgaaatcagaatgcggggttcactgcacttgcaagtcctgtgaggagagaaatcggaaacagatcgtctacaaggtccttctgtgttgaagacaatgacttggaagatggtaagacctcaaaagaaagggagggttctgcacagtcactcaggctcccaaagattcagaatcaggctctcttatctggtctggc

SEQ ID NO: 327324 - DNA, 264 bp, Zea mays
cacagaccctggtgcagtgctcatcacttatagccgttgccgcaaccgcttgctagcgctgggctctgtaatcctatcttccgggaaacgtcgactcgacatagcctcccagacggagacgatcgccttgccaccagagaccaaccaactgctatgattcatcatcaagaccttatactccaacaccgagatctgcctaagtgagcccactagcaactccaggactgccttgcattcgatcacgaccgcgagtatgacgagcac

SEQ ID NO: 327325 - DNA, 440 bp, Zea mays
gacccactcgtccgctcagtcttagtctcttattagctctaggctctttctagccgcgccactccttcgtgtagggatcgttcttctcatcgccaccaatggccactgccgaggtccagaccccgaccgtcgtggcggccgatgaagcgcccgtggtggagaccccgtcgccggccgtcgtgcccgaggagtctgcccccgtcgaggccgaggccgaggccgaggctgctgcttctgctgatcccgaggagcttcccgcggccgagcagcaggcatccgccgatgcggaggccgctgctcctgctggagccgatgatcccgtctcggtcgatccggccgtcgaggcggaggctgctgctcctgctggtcccgaggagactcctgcggtcgagcaggatgcagccgccgaggaggatgctgctgctgctcctcctgctggt

SEQ ID NO: 327326 - DNA, 300 bp, Zea mays
acccacgcgtccgcccacacattcgtccactcctcctactatttctagttcgccagcgcccgcccttatctctgtgctcgctcatactttctttcgtgaaaggttttctctacatttcctcctatacttatactttctcctttcattcttatatcaaccctctgctatccctcatcataaacacattctactccaacacagacatcttcctcagggaactcattacaaactactcctatgcctttccccagatcataccctctagcacaacaaacaccttcaaacctaatacccataaat

SEQ ID NO: 327327 - DNA, 438 bp, Zea mays
cccacgcgtccgcgcggtaaatttttcttttaatctctcatgtgttgtctgatagggtcacgaatctttccaaagtcccacataatatcttactctaggctgcctttaacaatgtcactaacatgtaccttcaggatccacatgtcaatgtcatctacttgctagaaatcatgattctgatcatgaagctcatcttgtaatacaactgaaagtgaagctcgacttataagacaactatacaaagtaagacactccataattcacaacagatcaaacgatgtctgttgctttgattgatgacccttgctgtgctcattgatactcactcgcatacttaatcctcttccccatttgtggtgatagccacaacccaagatacattctaaactgcagttagaactcatttgacatataacgcttacttcaacggttaatcac

SEQ ID NO: 327328 - DNA, 330 bp, Zea mays
cccactcgtccgaaaaaaaaatttaactttttaaatctaaataaaaaaaactaagaggatgagtaaactttccaaagtcccaaataatatcttactttaagaattccatcaacaatctcactaacaactaccttcagaatccacatctcaatctcaactacttgctagaaatcatgattctgatcaggaaactcatcttgaaatacaactgaaagtgtagctcatcttataagacaacttcacaaaataagacactccataattcacaacatatcaaacgatgacttttgctcctattgatgaccctttctgtgctcattgcatctctct

SEQ ID NO: 327329 - DNA, 226 bp, Zea mays
atatgcgaatgacatccggatgaaaccagtaataataaggaattgagaactcaatagatcagggataacggacttacaaagcaacgaccgcatgacctgtagaatgacaccacccatctaaaagatacaggctaacaaacgcatgcatgcaaagcaatacatgtcatataagaaagcctaaattgacacaactgatcgtctagtaacaacgaagcctcatgtaaaa

SEQ ID NO: 327330 - DNA, 436 bp, Zea mays
gcgcggacgcgtgggttcaggagttgttagactttacttcgcaagaaaggctccctggggtgtggagggaacaggtaaacaccgctggctggttttctcgttacatgtacatatatttccgtatagcaacacatcaaacccattgctagattgattcactgtggagaaaatgcggtacgtaccagtttcggacttggatgaagagtacaggtctagttgccattgtagagatggataggatagatgggtcgagtcgttggtaaggtatgtagagagacaaaggaggagggacgtggctagtgtggttcatgtcatttgcatatatatatagtatatgatatgccttttcggtggtctgtggtgctgatactactatacatatagatcatgctgacatttgtggtgatgaatcaaaagatgtatctaaggtcttttc

SEQ ID NO: 327331 - DNA, 345 bp, Zea mays
acccactcgtgcgcaagatcactttgcgtgcagcattctattttccgaaatcgagggtttggttagggagaggtccgcttgtaacagttgacagggacgagatggacgccagcggacgcggcgtctaggtcgccgttctctgcatgctgctggtcttcgccatcttccccctcctcctctggcgccgccgctccgatgccgtcacctccgataaccaccgcgtcccgctccagcccctccagtaggatcacgtgctgcacggtcgcgcgtcggcgcgaccgatgcttaagatgcctgaagctgccggaacatgctcctatactgcgtcaactactcgcaatgctg

SEQ ID NO: 327332 - DNA, 58 bp, Zea mays
  unsure (1)..(58): unsure at all n locations
actagttttagatcgcattgccgccctttttttcnnattttattagacagaagccaca

SEQ ID NO: 327333 - DNA, 148 bp, Zea mays
ggccgaccacgcgtccgcggacgctaggcagactcgcgggtagattttgagtgtccgcccagaccgtaaccataggcgtaagtgtaaactttcaaccggccacggaaacgtaaatagcagaattacatagaccatagacacactacta

SEQ ID NO: 327334 - DNA, 371 bp, Zea mays
tgccgcggcgtcgggctcgtggcttttgccgtatacatacccggcccgtttcacgatctctctagtctctccctggccccaaggcatcgcccgaccgccgtctcgtcccctcctccgacctctcgacccatccccaccctacacccactctgcccctggctgcgcgcgttccagttggtgtgcgtgcgtgcgtgtccatggggaacacgccgtcgtgcataccgcttgcgcccgcggggggcggcgcctcggcggcggcgaccagcgcagccaccgaggtgatccacgcggacggcaccgtcacccggctggcgcgcccggtgcgcgcgtcggagctcatgctccaccacccgggccggttcgtctgcgac

SEQ ID NO: 327335 - DNA, 459 bp, Zea mays
cccacgcgtccgcccactcgtccgcccacttttccggcggcaaaaccctccctaatccccgtttctcgccatccccaccaccccatttccaccgccagattcggtgccgttaggatcgatttcttgtgcatcttggagcatctacaaggggtgggcgactcagcaaaatctgctggcatctcctctcttttcttgcatcgaattttgtaattgccgactgaaccgtgcagagaagtcttgacaagcgcatgggcggaggtggagatggggaatcgtgcgatctcctccaagtcctttttgagggggccttggctggaagagctgctggtgttgttgttgaaacagctttatatcctattgatacgataaagaccaggcttcaggctgcacaaggcggaagtaaaattcaatggacagcgcttctgcaatttttggtggagtatatgaaccagctaaaag

SEQ ID NO: 327336 - DNA, 53 bp, Zea mays
aaagaaaaaaaaaaaaaaaaaattaaaaattaataaaaaaaaaaaaaaaaaaa

SEQ ID NO: 327337 - DNA, 133 bp, Zea mays
accgaccacgcgtccgctcacgcgtacgcaaacacatgatagccattaggcctttaaagcacactcccttctatcgagccatagactcacattctgggataagattgtcagatcgacgagatgcatacctaac

SEQ ID NO: 327338 - DNA, 264 bp, Zea mays
atcgcgagcggccgccctttttttttactttttattattttttttttttttttttttttggtttgggtttaattttatttggggggaaccccaaaccaaattgaccgccgaaaaaagttttgtggccaaaaacttagccacaaacacattaaacatgcgggaaaaatgctttcccaaaccctacgacgaacttacataaataaggggatctaccacaaacggcccggcctttgtctaaagcgacacatggtttaacccctccct

SEQ ID NO: 327339 - DNA, 387 bp, Zea mays
ctcgggcgttctctgctctcgcgttctcccacctctgttcgccgattaataccgcccgcgcgtccgggcaccagatcgacatacattctactcccacggtcgctacaatggggaacccgccggagctgtaccacaagatcctcaacatccccaaggacacctcgccgcaagaacttcgagccgcgtacaaaggcctcgtcacgaaatggcacccctacaagcacccgccatcgtacaggccggaagccgaagcgcgctttaaggccatcagcgatgcctaccacgcgctcctagaccagcaagagaacagggccgtgttcgggccgtgcaacggcagccgggcgggcgagagggctggcggaggctccggttcgcgcgtggagagga

SEQ ID NO: 327340 - DNA, 437 bp, Zea mays
cttaaatagtccataacagcacttcagctttaagtttattatttatataagaggatgaaagtgcaagtctacaacttactagaccagtagagtagtagactatgaccaaggtccaagaaggcaacacctatatgagatcatcatccagcttgaattgatcaccagcagctccagattcttcttcatcatcaattgctttttctgcagcatcttggtcattttgagttggctcttgatgatcattttcgttgtgactgtcactgccactgccatctccttgctgcaagtcctgagctactgtaactttttggcgcttcctactcctaacataggtctcggagtaggtcctcccaccacgtgtagctgctgccctaggcaagtttctgccctgggtagcttgagttgcacctaaaacttcatctactgcactccaaagc

SEQ ID NO: 327341 - DNA, 157 bp, Zea mays
ccagcatccaatggaagcagaggaaaactgatgaaactggagcaactgcaggcaaagctaatcgacccgatgcggctgcaagacaagcatagcagctggccaagaaacgcaaggtggatgcatgaacccctgagaatacacacaggagcaggaaacc

SEQ ID NO: 327342 - DNA, 447 bp, Zea mays
ggaaaaaaaactcgcctttttctctctgctttttcatgaacgccatggaaaatctcgagcgctcgctgtgattcctgcgagtacccaagcccaaccaagccctagcccggcagccattctcttcgcgccacatcgcacgacctccccgaagcagacgtgcccgctgcccgtccgtcccccgtggccatggccgcgacgtggtcttcgtcttgctgcgccgcgaccgcgtcgagcagcgctctgcttcgtcatgcccgcgtcaagagcgcgccttgggtagccggtgccagccggagtagctacaggcagcggcggcggcggcgggagctgtacatccgcgccacggtcgcggcgccgtcgtcggccgtggtctacgcggacgccggcgccgacaacgtggcctcgctgaagatcaagctcctgagcgcggtgttcgggctgaaccgt

SEQ ID NO: 327343 - DNA, 344 bp, Zea mays
cccacgcgtccgcccactcgtccgcggacgcgtgggcttacgcgtgggctgctccgagcggcgtagtgggcatcgtcgcaggcgtggcggcggagttcgtgaagctcaccttccgtgccctgtatatgcgcctggctggtccaggcagcagggagatgactgtgccgggaaggccatccgaccagctgggcaggaaagtcgtcactgacaggcccgtgtacgacggccgtggcgcctactcccgtctcgtggctcgcatacaaggagtcacggtccttgtccgtaacgcatacgccttgttcaccatggtggtcgaaaccgactggctttagggttccacgctc

SEQ ID NO: 327344 - DNA, 155 bp, Zea mays
cggacgcgtgggatcatacgaaaaccctctttgcgagtagcgctctccgtcccacacacgggcgccggagacttcggagtgcgcacctgccttcacgacttgtcgtgctcgtgcgctactcttctcgagcgccgcgcggagcacggggacattaa

SEQ ID NO: 327345 - DNA, 155 bp, Zea mays
cccacgcgttcgcccacgcgttcgaccaatttgccaatgccacatcgggatttggggaagagaggctcatcaagcatggtcactcacgtgatctataccatggtgtgctccaagacgggactgccgtggtggtgaagaagatcactttgcgcgtg

SEQ ID NO: 327346 - DNA, 373 bp, Zea mays
acccactcgtccgcccacgcgtccgctctctacaagtccatatttcccattcacacacactacgcacgcacacgggagacatggacgctcagccaaagcatccacacacagctctcttcctactacacttcatactagctagtctctgagccctctagactctagccacttacacacgcgccaacgccaataatttccataacatacaaagcaacagcaattgcgaagacttcgacgagagatgcaagatgcatggactactgttctccaaacgacacgcagcagccacttaagatgcatgctccgccctaccctcagaatgacctgagcattcgattctacacgttctaacacgacctagaccaattcatca

SEQ ID NO: 327347 - DNA, 166 bp, Zea mays
attgactttcaaaacaaatatagaggatctcatatggtccatgtatacgacttttacaagcccgatcgtgcgagtgaatatccaatgccatgaggtagcatgtttgtgatagctttccatcaaccaccgtatattcactcgcatgatcgctcttgttaaagtcgta

SEQ ID NO: 327348 - DNA, 304 bp, Zea mays
gccggacatgcgggcatgtgagcaaggacttcttatctacaggaatcatcaccatacccggctactgggacggatcagaacagcacttgcaatggctactagcacactcaagagagctcatcgctctggagcgtagcaagctgtagctgctgcaccaaatggcgccgccataagatactcctagatgctactgcctccagagctcgacgacatcgatacgtccggcactcgccatgcggatatacaacaccgggcagtgatcttacacacgcatggcatccagctctcttgacgactcactata

SEQ ID NO: 327349 - DNA, 303 bp, Zea mays
cccacgcgtccgcccactcgtcctgtagattttcgtgccttcgtcgtccgtgccggtgcggggcgtgttggccgtgccgaccgtccgtccaccccctctcctcttcccggcgccggctacagcgggagggactccctgggaggaatggccgtggtgagggctccgctcggcgcggtggctgtggccgctctcgtcgtcgccatcttcatgccggccgtcgcatcggcgcaggcaccggcgcccgcgcccaccagcgacggtacgctgcctctctctctttctctctcctaccccttccttttt

SEQ ID NO: 327350 - DNA, 202 bp, Zea mays
tgttgctcccccgtgctctcgggggaaggtttagagttgcgcgcgagagagatctaggggagaggtgggcaggtggtcctggaacgaatctgttgtcggcgttcatcggtcatgtggcgcaggtgccggctgagctgctggcggctgacagtcagacgccttttcccaaaactaaggcaccagatctggggcgtcacttcct

SEQ ID NO: 327351 - DNA, 70 bp, Zea mays
gacccactcgtccgcccacgcgtccgataaacttgtaatcattttgtaataaagaatttatttccgctgc

SEQ ID NO: 327352 - DNA, 54 bp, Zea mays
cccacgcgtgcgcccacgcgtgcgcccacttgtcctttatggcgatgtcgcgct

SEQ ID NO: 327353 - DNA, 128 bp, Zea mays
gccgacccactcgtccgaccaggcgtccggtcgttcacgtaatcatttttcagtttcctgccatacgcacggaccagggtaagggtactgtctatattgctgcccggactaggtcccaaaacacaagc

SEQ ID NO: 327354 - DNA, 171 bp, Zea mays
gacccacgcgtccgccaggccatcgccacagccatttacgaaatgaagaacaccaacaaccacgaggtgacacgcaacattgcaacgggcaagcgagcactcaacacagacaacacagctacgtgcactggagactaaccgaccacaagagaagaatgcattctaccagac

SEQ ID NO: 327355 - DNA, 450 bp, Zea mays
tccggatgggcgtctgcgtactcgcctacctcctttgctcattacctttcccccttctcccaatggccgccggcgatccatcccgtaacgcgacaccatgagggagtgcatttcgatccacattggccatgccggtatccaggtcggaaacgcgtgctgggagctgtactgccttgagcatggcattcaggctgacggtcagatgcccggtgacaagaccattgggggaggtgatgatgctttcaacaccttcttcagtgagactggtgctgggaagcacgtgccccgtgctgtttttgttgaccttgaacccactgtcatcgatgaggtgagaactggcacctaccgccagctcttccaccctgagcagctcatcattgggaaggaggatgcagtcaacaactttgcccgtggtcactacaccattggcaaggagattgttgacctgtg

SEQ ID NO: 327356 - DNA, 156 bp, Zea mays
ctagagaaacgtttcaaagattggttgacttctcaatggctggtataactatacatcacagtgaatttctgaaatcgatctggccttctctatctgatgtcattactctagttagggttgcaccacgctgaagtatgattgtgctaataacttcac

SEQ ID NO: 327357 - DNA, 461 bp, Zea mays
acccactcgtccggccacgcgtccgaccaaatcagctcttgtgtggttagtttacaggaatgttcttgtgtggggctcatgttgagttttccattttatttatgtagccaaagtagatgtattatgcatgtcgtcgtttggaaacttgacaaaccgattatacttgtttaggttgcttcagaaaagatgcttgagaaactgaaacataaatctggaagatgtgagcctgctttagaaaaggctattgtggaactggagcatggtataaacggtttgaagtattttgtttgccttgatccacggttgtaggtttgttctgccactgataccaggtgaagcttcacccttcagatccctgtcgtgacgaatggttcgtgggtgctggggagggattggatccgttggattcatgagatgtgtggattgttcctgccagatatcgtgacatgtgtttagatcta

SEQ ID NO: 327358 - DNA, 215 bp, Zea mays
agaacgcatatgaacactcatgcgaacgattcgatttacgaatggtccctagataccatgaggaggtggaatctcagcatagagcagcacgcatatgatagggccaacaagatctaggagggcaacagggacgatagggatgcaaagcgatcgggataagacggcaaggtcagaagctcgcagatgagaccatgatcaagcatgtcgagacgagt

SEQ ID NO: 327359 - DNA, 419 bp, Zea mays
ccgggccgacccacgcgttcgcggacgcgtgggcggcaggcgccggaggttttgctttccgggctacatggccaacacggaggcgtggcgcgccaaggcgcggtcccagagcgcgccccgccagcgcaccgacgcgctggagcggctgcccagccgcaggaagcaggggacgccgcccagggccgtcgccaggatgcacttgcagcgctcgtcgtcgctggccggcaactactcctccccgtggtcgtcgtcggctgccaggctcgacgtctccgctagttgtcgctcaaggacagcgagtgcggctccaccagcttcgtgctcaccgccgtcaccctctacagccggacgcggtcgctcgtcggctccgaggtgcgccgtggcctgtactgagaggagctagctcgtgttcctggcga

SEQ ID NO: 327360 - DNA, 396 bp, Zea mays
gacccacgcgtccgcccacgcgtccgatctagtttcgcttcactttgccgccgcattttaatttataccgaaagtatctaccttcacctcacaaatatgtgtgtctaccactttctgggtctggagatagtatggtacacacacttctatttgacatggtgttagagtgttaaagcaaccataagagacataagagactagacaaatcattttgtaaaggtaaatttggttattatcagaaaaaaacatctccaaccgactttgtaatagctcttcaaatttagtagctctctatctcttcaccttcacctttactttctaatctacttcacttgctgctattcagtttgttggtttacagagtctcggttagattagtctactttttttttttga

SEQ ID NO: 327361 - DNA, 227 bp, Zea mays
gccacgcgtcgcccacctccgaaaattttattttaacaaaaaaaaaaaaaaagaaaggttaaaaaaaaaaaaataaaaaaaaagtgctgacggcttcttccccctaaccacgcgaggcagaaccctgctcccagggagggggcctgcggctgtccccaaggagttcctgccgctggctaccacccactctccgggctttctggcgcctccatgggcaaggacggttt

SEQ ID NO: 327362 - DNA, 132 bp, Zea mays
ggagcccgtcgcggccgaaccggccgccgtggcggaggctgctgctcctgctggtcccgaggagactcctgcggtcgagcaggaggcagccgccgaggaggaggctgctgctgctcctcctgctggtgccga

SEQ ID NO: 327363 - DNA, 391 bp, Zea mays
acggttaggatagtgcatagaaaacgattaaattatcgttcgatatgtgaataatggtaaaggggcaggcgattttaggtgatctgtacatggatgcttcactgctgaaagagtgttttaaagataatttacatgtgccgatttaatttatcattggacaatatatactctttgacaaaacccttgattcatcaaaattcttgggtttttatctctggcatattctaaaatattaaacggatattttaacttatgtattgtctatttaatattgatagaaatcaaccgttttattccaaaaactttgcctttgctttttttcattaccttcctatatagatgcacaatatgcatctaaactttctataattttacatctatagctttattg

SEQ ID NO: 327364 - DNA, 67 bp, Zea mays
cccacgcgtccgcccacgcgtccgtttacgtgtccgcccacgcgtccgactagttcgagagggcggt

SEQ ID NO: 327365 - DNA, 406 bp, Zea mays
aatcccttccgacccagagcgacgcatacgtccgcaaacccaaggtcacgatcttgattttataccctcgagcagctttcttggaccggaatatgagtggcaatggtttttgatgccaacctactacgttacaagacgggcaaccagattggttatggaaccaaccaaatgtgcagcatgcacaccttattcaagtctggtggcaccaatagatatatgctatgtctagttaaattctttgtagcgctgcgccgatgaagcctaacatggtgcgagttttgttgtttcgccttttgtacagtatatatctttgcccaatcatttcgtcatgatatgatatcaactgatgggtatagttttggtcggacccacggaaagcaatgggaaaaaaatctactaggtgtgt

SEQ ID NO: 327366 - DNA, 173 bp, Zea mays
aaaagaacataaaaaaaataaaaaattaaaatgtcaaacaaaaaaaaaaaacctaggggacggagcattcatacaacgtgaatggctatactataatctcacctaagttaacaatgaaatgaacgtcgctagacatcgcagggactgtgaaaacactaacattacccaaatta

SEQ ID NO: 327367 - DNA, 157 bp, Zea mays
ccaacgcgtacgtatactcgaagcttcactttgtggtggacgcgccaaacattatggtcaggagcatcatccgggacagcgctgacatcaagcctatgacatacagccaggacactaaggatatgctcaagatctacaaggatcacgatcaccacgc

SEQ ID NO: 327368 - DNA, 309 bp, Zea mays
cgaccacgcgtccgctacgcgaggcgtccggacacttgcagcttgcctctgatgacggctgagagagaagtgctcccgctctttccttatcttttcctttcccttaggatcggacgatgaagatggttgcattttttaatggccttatgcatttatgctgcttgtaatgaactattattccgtcataactaccagttactcatcatgtgctcttttttttattaaaaaatggacttagttcttttcaaccgagccttatgctagtaacctctcaagtctgccaacatatgcaccaagcaaggagatgga

SEQ ID NO: 327369 - DNA, 274 bp, Zea mays
tatgatttgaaaaagggggattgattgttccaccatggaccacattagaccagttaggcaccctaagaatcgtgtcctgtcagttaccataacttcaggtcgaagaactgagcttcgcaaattactaccaaactatacacatacactgtggttgaaatattattctattgaatctctgatcagccagaaacattggactcgtaatttggatgagatctgggtattggctcttgttcctagatcctgtttattgaaacttagtgaaaaacatgtc

SEQ ID NO: 327370 - DNA, 378 bp, Zea mays
ccggcccgacccacgcgtccgcccgacgcgtccgcccacgcgtcctcaccttctgatcacggagtgatcaacttcgtgaatcctaatctgggtgcaaatctgagtttgacaatcctgctagataattatagtgttagtgaaataagcataagttatgcgacattaggcatcataaatttttatgtatgtgcttaatttggcaaggaacaaaaatagtcgggaagaggactttgtgcagatgggagagcttcagtatttcagcaatatttttcgatggacaaaaaaaaaaattaaaaagtataagatatggattggtaaaatatcttggaataggatagaattgcccaatttttggaaattaatgcttgtactcattag

SEQ ID NO: 327371 - DNA, 313 bp, Zea mays
  unsure (1)..(313): unsure at all n locations
gcagttgcttcagagagctaccgccaccatctattgagctactgcctctgaccaagtccggggctgcgctgcgcctgctatgtcgtcgtcctcgcccgtatcggcggtctcatcagccactgcgccgcacgtcgtggacgactgcctcggcatcgtgcagcttcttagcgatggcaccgtgacgcgctccgcggactactccgacatccctctcctgggcgaggtgccgtccaacctgcccgtccagtggaaggacgtcgtctacgaccccgcgcacgcggctcgnnctcgcatgtacaggcccaccgacacc

SEQ ID NO: 327372 - DNA, 287 bp, Zea mays
gacgcacgcgtccgcccacgcgtccgcccactcgtccgtccacttttccggccgcctgtcccagatccagagaaaggcataacgggcgtggagccagttgggccagggaagatttaaccagtcgggcccggaaggagcctaagggttggatctgatgctaccaggtcgctgagcatcgctacggaagggggcagcttctgattccggcagatggctcctgaaatgatggaggaggggcaatcagctttctataccggggatgacgctctcttgtcatcaggttttgg

SEQ ID NO: 327373 - DNA, 192 bp, Zea mays
cggctagacccacgcgtccaccgacacttgcaaacactcgtccgccttcacgtttttgaactcataagtggaaccctgatcatgtggtccatcttaccgttcttctcttatgccatcgtaccatggaaccgccctcttgacaacttgactatccacatgccttaacgagccaacagcaacataaacggatac

SEQ ID NO: 327374 - DNA, 267 bp, Zea mays
acccacgcgtccgcgtagtctttgggctaatgtatgaagttctgctcgagactgcacccagagcacattggtacatttgaatcagttgctaaccaataacttcaccgaactcaaacttctcgtacacatttgcgttctaaagacgatcctccaataatcctctcactaaatcatcaatgcctttaagcacaaaactctcttgtcctctatcactgtgctgatctacggtcttcaaacaaagaacattctcactcaacatacaatgca

SEQ ID NO: 327375 - DNA, 188 bp, Zea mays
agcgcgactgccgtactttttaattttttttttttactttttttttaggcccttcgctcattttaaaaggtttttagactttaaatttatttaattcatatttttttaaaaaaataaagtttttttaaacagaaacaagattctttaaaaaaaaccaccataacaacaaatttccaaaaaccaccaaa

SEQ ID NO: 327376 - DNA, 215 bp, Zea mays
acattacaaaactacatactccatacacacgcactactaatcatattacaaaccattttactacctatcaatattcatatatacccccgacacttaccatccctacacttacatactacactttgaccttcagaccaccctacatacatcacatctagacaacatactctatgaccccctcaatactttctactaaatacacaattaaattcccc

SEQ ID NO: 327377 - DNA, 300 bp, Zea mays
caatcatcacattttccttataactcactcacactatcacatcgaaaagttaacttaaaaaaataccacgacctacctcaaattaagctaacacattcttcattcaaccttcaccaaacattatataaaccaaaaaacttcttaccatgtaaacactatatcacaccaacatccatattcacacaatcaccttcatcatctttctcacttcaatttcattcacaatacttttaaccttataactacctatataccccttaacaacaacactcacatctcttaaaatatttcacatataat

SEQ ID NO: 327378 - DNA, 255 bp, Zea mays
cgcacgcgtccgcccacgcttccgcttacataggtttagctccatcaccgacaccagacctatttccaaggcccatccccccatccactgcgacggatcaagacgcgacctccaacccaactggttagactcataccttatcttgacactctccctcgaactctaccactactgagctcctaaccttctagaaaccactaccgcacccgctctgccaaaccaatcaaacacaataccgagctactcaactagaac

SEQ ID NO: 327379 - DNA, 252 bp, Zea mays
gcacatgcaaatagaatttagatcttcctgcttcactttcatgtgtatttatctttcaaatgctatatggatccgttccacatgcaattagccttgcatccaattctcattataaaaaacccaattatgtccactgctaatacaactcatattattcacatgatttctactaccaatcataataaaatattttaaatcataacttcattcaatcaatcataatctgtttctatcaaacaaaacatacacact

SEQ ID NO: 327380 - DNA, 348 bp, Zea mays
cccactcgtactacacacgcctcctcacaaactatcactgtgctcaataacaaagaaaatataacctataacacgaacgttttccttctaaatcaaactgctccttctactcctccctgcactcctcctactcctacaccaatctcaaccaatactataacgcaccttctatacttcttcaatccactacaaatccctactcccctcccctctccattcttccttccctccacattttcttctccgcctctgttgatgacccacatatcacatccactgtctaataccttttcactgactcagacatctcctaccaacactacaacccctacctccaccaccaccacc

SEQ ID NO: 327381 - DNA, 246 bp, Zea mays
cccactcgtcctcggacctattaaaatacgcccactcgttgtcacttctcctccctcctcccatccatagcatcttgtccctcttcaacattcatctcttcaccttttcctcccccacattgatccttgaccctcgtactcctttcttgattcctactccgattaatctcttaccaagattaaccttccccttctccacgctcgcactctcactctcacatacattcttcttaccacatctttaaa

SEQ ID NO: 327382 - DNA, 245 bp, Zea mays
cccactcgtccgcccacgcttccgtgtacccgtactagtaaatatttatgcatcaagctctatagattcgcatatcgacaataattcacaactatactattttagcctcatctcatgtacatatgcattatcttgactaaagatgtctcaacctctatctcacttcttccctgctcactcgatatctatcgaaatgacaagcttaaaacaagttattttgtcacacaataaaaaacaaaagtctt

SEQ ID NO: 327383 - DNA, 372 bp, Zea mays
tgcaagccctctttgttcagtattactggagtgcataaccgcaaaactatcatatgtttctgtaaggcttcctgtgtaaatttgacttaggtctgtcaagtctattctattgctggtagctcacatttttgtattccatggccagattgatctccatgaagctcgtcaaagcattgaacagcatgaatccccagagaatatcttccgcgctgtccttgaaactgctgctcaggcccatggtgaagataacagcattcagggcatggtcgaagaacttgccactgatcaagagcttgccgatgactacatgaaacttttgatggaacaagttctgcagaggatacagtcagagtcgcagtcggggaccaagcc

SEQ ID NO: 327384 - DNA, 392 bp, Zea mays
acctacttacataagaactgaattatagatttgaatattcatgtttctgggatgatcttataataacatactcggtttacttaattaataaccaaattctttgttatttcacattaaataatgattaacactcctactcatacacttattttctgtgaacatgaaagcattttctaaacagtccttttctgtatccactgaacttgcaatattttgttatgctcaatgttttttcaatatgatgccctttttcatagttatgtttaaattcacaaacacatgaatttttttttcttaaacgcgcacgatagctgcacatcattaaattaagacaagaaatcagtccaaaatgtaccaaattacaatgccaatatctgcaaaacacataacac

SEQ ID NO: 327385 - DNA, 275 bp, Zea mays
actccccgccctcaaaaatctctcctacaccttactatcctccctctcttccaactctccacccatccacaagctctctatttcgtcctgcaccttctcacccactgcattcatctccttgctccagtcatcccccctcctctaaaacctctccctcaatctcctcctcatcatatcacacacttccctatcctccagttccatttctcaacatatcaaatttccacctactatgtccctactattctcttacctcaaagatctatataacactc

SEQ ID NO: 327386 - DNA, 279 bp, Zea mays
aggcatctcactctccgctggtcgctttctcgttttacttcacccttcactcagtctgagtctcgtattatctctaggctctagctagccgcgccactccttcatgtagccatcagccttctcatcgccaccaatggccactgccgaagtccagaccccgaccgtcgtggcagccgatgaagcgcccgtggtggagaccccgccgccggccgacgtgcccgaggagtctgcccccgccgaggccgaggccgaggccgaagctgctgctcctgctgatcc

SEQ ID NO: 327387 - DNA, 434 bp, Zea mays
  unsure (1)..(434): unsure at all n locations
catattacctcaacccaacgaatantttatagctctcacatttcatcataatggatgcatttcttgaaaacttactcatcactcctcacgctctattcatccacaatttcatattatattactttcttattctatcttccctcatactattcaacaaatcttcattacaactatctaactcctactccaacatcctattgcagatcaaaatcgaccatatcaaaatatcacttccctagacattcccatgcattaaactttacattaaacctcctaaatcatcttcattaaataatcatcaaaattcatcacacacataataataatccccattatttcataaaccgacacttatctaataccttacttccattgaactttgaatttatcgtcattaaataatcaaagcattatttattcatactcaataatat

SEQ ID NO: 327388 - DNA, 210 bp, Zea mays
ccactcatcctaaaaaacaaacaaaaaaacaaaaaaaataaaaaatttaaaaaaaaaaacaaacaaaacagcaaaaagcaaaattcaaaaaaaccaaacccacaccaaaaaacaacaaaacaaaaaaacacaaaaactcaccaaaaacccataaaaatacccaaaaaaaaaaacccaacacaacacaaaaaacacctacaaaccccacat

SEQ ID NO: 327389 - DNA, 178 bp, Zea mays
agcaaaagcaacaaggctttagcacattcaagaaccacacctcctcccggagcctagaatcatttacacatgctgcggccgcaagtgcagatgcggctccagctgctcctgcggcaactgatgcaacggctgcggtatgtaccctgacatggagaccgtcgccaccagcagcgtcaag

SEQ ID NO: 327390 - DNA, 424 bp, Zea mays
agagtaagaacatgcccagttagcacatttgtggcacttggaaagagtatgggatactgtaccgttcaacagagcagagaccaatttgtggcccattgaagctagaaaacagacatgtctgggattgcacaaagaagatatcagctggaaaccagaagtgtaataatcataaggattacctatctttcgtaagaggtgcagtgccacgcagccacgcagcaagcactccaaatggtttagaaaaggaggcggctaattcaaataaatccgctgacaacggaagtcccgtaaggccaatcttgccagagttattgctttcttgtcatgacatcaatagccaagagaggtccccatcatctagtgctcatcaatcatacttccctgctgcaaatgatcgaccactggagactatagagtttggatc

SEQ ID NO: 327391 - DNA, 342 bp, Zea mays
gaccacgcgtcctcacagacatacagtgaccctacctatcggctgagttccacgaagagcacggcaaccatagggaagggttgattcataaacttcaccggcgacccatactactacttctgactgtagttcaacgagtgcattatcctcttccaccagccctccaactgcagcctactccgctaatactatctcgagatcctccaccactccaatgaattccatcccacgaacatgatctacaaatatgatcaacttcagatcataacttcttctcttaatgccaacgaataaacttatgctaccccttctgctgcatcacaccattagtcttcctgtcta

SEQ ID NO: 327392 - DNA, 440 bp, Zea mays
gaccgacgggttcgattgggttattcgtggacaagatcaccgtttatgctggctgcgtcaatggcactaagaaagcatgcatgaaacatatagcctactgaacagtcttattcagaggaaaaccgtccaggttgtgcgtgtgttgctgtgccaagagtactcttaccagaagatgcaacggaaccaacaactggcatcaagttccccactgtactcgaagacaattccaatctgactacagaggtccttgttggaatgggttttagaagcatgcgaataatgagggtcaaaaatctgaatctttatgcctttggattatatatacaacctgattctgtctgcaagaagctgggtccaaagtacgcttatattccagatgctgagttaaaggatcacccagatttctatgaagatcttctgagggaaaatattgacatgac

SEQ ID NO: 327393 - DNA, 211 bp, Zea mays
  unsure (1)..(211): unsure at all n locations
cgctcgagccacgcgtccgggcctacttgcttttcttcccagatgtctacttttacacactcatatgcaacgtgacganatttgcgcaacatcacaagcaaccaccacctgcattacaacacctgtgacaacccaccgaaccaactccctcactacttcactctcgtcgacttcaacggcatgcttaacactaacgccccctctacaagga

SEQ ID NO: 327394 - DNA, 232 bp, Zea mays
ccacgcgtcgcgcacctccgatctgttatcctttccttcgacatcgctactacagattagttgatatctgacctgtggccggaggcggtactactgaagatcatgattgctttcttttcttttgttgtgtgattctcttggtgggtcactggtctcatgcatgcgatctctgtataaattcaccgactctttaggaactgattactattggctattcgctattatgagtata

SEQ ID NO: 327395 - DNA, 189 bp, Zea mays
gattcccgctcgactccacgcgtccgcccactcatcccaccacacttacctataaactaatcataccatactcacagagaccagtgacatttcaaatccaaccaacaactaaaactacctacatcacaactcatgaaaaccattctactatcaaccaacaacacatcacaacatactctaaccacatcc

SEQ ID NO: 327396 - DNA, 149 bp, Zea mays
cccactcatcctaacatacatactattactctcacacctttaccactacacactcaaatccaaccatcagatcattgttaaaatcacaatcttctaccaccatcattacaacaccttctacaacctaccttactaactccctcactcct

SEQ ID NO: 327397 - DNA, 348 bp, Zea mays
  unsure (1)..(348): unsure at all n locations
aaaagccataacagattcttttgtttccactgacattatcatttctgcaagcatacatataaaaagtatactgcctcttacactatttataatctttcnacactcaatattgaactttcccccaaatgtatacccatttctcatgattgtcaaatatttgttgtctttataatgattcaaacatgatttattattgctcataaactatttcttacattgcattatgaaacaaattgttatcgtattccacatctttttcatatattattgtaatatccttattcctaacaaaaaaaaaaatctcatttaaagcatattcattccaaaaaaaacaaattcctattatta

SEQ ID NO: 327398 - DNA, 253 bp, Zea mays
acccacgcgtccggggatctctggcttctccccgtcccgttcctgcttaccttccttgtatagccgaatagcgaaacgactgctctcgcgagctcgacgctagatgtaccttctgctgcgcccactgcccgcttgtgtactataatgtcacagcgcccctgagccgccacctgacccaaactatacgttcccttcggcccttagacgctgaagccgctcaagtaaacttcacccaccggatactacttctaca

SEQ ID NO: 327399 - DNA, 431 bp, Zea mays
gggagtcgtctccctgtactgctgcctgcccgctgcgctcaccggtgacggctcctgctcgcgccgccggagcccatcccaccgcacgctgcaccgtcgtccgcctctgcaatttgcgccgccggtccccgtcaatgtcgattgccgtctgcctcgctatccatgcggcctgactccatcccgtcggttgctgctcccattcccccacaccgtgcgccctgctactccgcacgtttgacaactccgaactccatctgctcattcatcgtctcgtccattcctacaggtatgaacactcttcgaaatgtgcctactcggtattagggatatcttgggtctagcgaggaagatgacgaaaggttcctctcgccaatacctacggtttcggccgcagatcgagccagtggccccaacttgtgcgcgagcgaacg

SEQ ID NO: 327400 - DNA, 189 bp, Zea mays
ggggcttggcctccgctcgatgttcagctaccttacagaccgtcctcggctaggttacgttacttgcaggatagtatcaacgaaccaggagaaagaaatcgcgactaaagaacttggcagctgctctatgagtacaccacgtgctcatcgcttcgccacaacgtcgttcaagcagctcgtgacatcgac

SEQ ID NO: 327401 - DNA, 175 bp, Zea mays
cgcacacgagcgcacacaattccagtttcccgagacgagcgcgacggcggacacagggcatatcaaaagcacccagaccacacacatggagccagccaaggagcacgagcgcatcaaggccaccggcaagaacgccgagatgtggccctacgtaccctacacgctcaccacctac

SEQ ID NO: 327402 - DNA, 425 bp, Zea mays
cctaaacttcttaaaccaatactttcaccacctcctaaaattcattatacgccggatctctttaacatattttccatccatttaacaacacataaaaaatcatcttcatcttcaaacgaccataatttctttaatagcttccactcttcacaaccaatacctatttcatataaaaaacatttctccaaaccatcataaatcaatacccattctacatctttaatttaatacttatttaaagactcaccaactcttccattatcctcaactccagctctttcccaactaaactctaataatgatatcattaatttattttataatctatgtttttcactccaatattgtattacctttctcttcccatcaacaacatctttcgctcatctctcatcagcaaactcttctaattactctctcaaact

SEQ ID NO: 327403 - DNA, 315 bp, Zea mays
ccaccccacccacacacccccccccccacccccccccccaccaccccccaccccaccccacccccccccaccacccacaacccacccccacccacccccaccccacacccatccccccccaccaccccacctccccaccccccccacccccccccccccccccaccacccacccccccacaccccccacccccccccacccacaaccccccccccaccccccccacccccccccccccccccccccccaccaacccccccccaccaaccacacccaccccccccacaccccccacccccccaccccccccccccc

SEQ ID NO: 327404 - DNA, 255 bp, Zea mays
acattcacttactcttttaacttctttccaatatcaacatttatatactaaaatatcctctttattcatttttttctattttcatactttaacaaactctaacaaatacttaatcttaatcaccccacacactttcctaatactatatatctctttcaccttctttattctcatccttctaattaaccaacactattctccataaattatcatatttttcatatacaattttatcctatattttcttaatttctt

SEQ ID NO: 327405 - DNA, 253 bp, Zea mays
tactcttaccacatatatccaacattaaccaacaactaacatctaattccccactatactctaatacaattccaatctcactacacaagtcctcttatcaataccctttaaaatcatcctaataatcaatctcaaaaatcttaatctttatacccttttcattatatatacaacctcattctctctacaacacacttcttccaaactacacttatattccacatacttacttaacacatcacccacatttcta

SEQ ID NO: 327406 - DNA, 96 bp, Zea mays
ttttcatcacaaattcataaaaaacaattcttaaactcataaattttaacatctcaaaccttacaacaaaaaacttaatttttctctttctatatt

SEQ ID NO: 327407 - DNA, 348 bp, Zea mays
  unsure (1)..(348): unsure at all n locations
ttcaccacctcctaanaataattatgggacggatctttttaaaatattatcagcccatttaacaacacacaaatactcaacttcatcttcaaactactataatttctcttataacttccactcttcacaaccattacctcattcacataaaaaatattcttccaaaccatcataaatcaatacccattctacatctctaatataatacttatttaaatactcaccatctctaccattatcctcatctccatctttttcccaatttaactctaataattatatcatcactttctttcataatctatttttttcactccaatattttatcacctttcnctacccatcaac

SEQ ID NO: 327408 - DNA, 348 bp, Zea mays
  unsure (1)..(348): unsure at all n locations
cgagagaatcgtgagcagatcgtgtgacctgtctcttattggcgtcttccgtaggcggttgcgganacggttgctgtggcctgggccggggccgttgctggctgtttgttcgttgcccatcgatacactcctcccttgccttacccgcatgcaatccgtgtgtgtgtgtgctctgcctctgctcgccggcgttggtttcgtgtgtcgcctgcctgtcgtcctcaccgcaacgctactcgttaccagctatcaactagcattgccttctccttccgctacaagaatctgacgagcccccctccctaccgtaccgcgctgttcccagctcgctcctttccaaagtgtact

SEQ ID NO: 327409 - DNA, 255 bp, Zea mays
gtcctcccacgcgtccgcttactcgtggggcggctccccttttttcttcttttaaaaataacatcgtctcatatgccacactctcgatcaacaacaacagatcagttcatcttcaccatcacatcctcctccctctaccacaaaaaaaggaagggggaaaaatgaaatcatctcaacgcctgtacaaaaaatgccgccttttccacagttgtccttgccatgtcctacgccgtaccgttttctatactgctgtga

SEQ ID NO: 327410 - DNA, 126 bp, Zea mays
cacccactcgtccgcccacgcgtccgaaaacaaaactttaaattttataaaaaataaaaaaacacaaaaagatacagaaaaaattaaacaaaaacaaaaccaaacactaaacacaatcttcaaaaa

SEQ ID NO: 327411 - DNA, 169 bp, Zea mays
gacccacgcgtccgaaaagaaaaaaaaaaaaataaaaattaaattataaaaaaaaaaaaaacgacaaccgggtcaggccgactttgcattagtccaggcccatgcgaagtaataactatccaatcgaatcacctaaatccaactcactgtccgtccttttacaacacct

SEQ ID NO: 327412 - DNA, 351 bp, Zea mays
cggacgcgtgggcggactcttgggtgctagttggtatctaaagctctctccctcctctcttgtcatatactcacatgctgctattttcttttcagattgaggagatgcatcgtgaactttgcagcttggtaatatgctttattccaccaatgtctacgcctcagcctccaggctctgtatttaggtcctttgtacaaagtttggtgctcaaagctagaggtggagatcataggatggttgtcaatgggactttcaacaacactgtgcttatttcattgtacacagtaatcctacatttgttgtcaaaaaaaaaaaaaaaaaatttatatttaaaattataaattaataatt

SEQ ID NO: 327413 - DNA, 127 bp, Zea mays
cccacgcgtccggtggaaggcggcggggcttaggctctggcccttggagcggatgaggaagtccgggcactgctgctgctgatcggcggctgcctccatcttggcgccagcgagcgcagcagcgtcg

SEQ ID NO: 327414 - DNA, 163 bp, Zea mays
agatcgcgtgcggccaccctttttttttctctttttttttttttttttttttagcgttagggtaatttataccctaaactgatattatcattcctcactttatatcccattttttcttaaatcatataatttactatttttataaccccaaatttatcccaaa

SEQ ID NO: 327415 - DNA, 436 bp, Zea mays
cccacgcgtgcgcccacacgtcctctttctgtttaggaaaatggagtacttgagggagcgcgctaactgtgcctcgctggtattctggagtctggacgaagctacagacgcaagagtcatctgttgatgttgactaatgtgagtgaactagacgagactgactttggtatatagtggcctcgcagtattgaatcagcaccttctacgtaggacgtacatacagcctgtagttacctctcttctgggaaatccaatggcaggttattagtttgacccatagcgccacactgatcaggaatcgattcgtatatagtgaccagcgtgatcaagaactaacacggatgccgttctgaatacaataatacgtacaacccattcgtgctacctgcaatataattggataagtcctgccagtctggttcactactgtaacata

SEQ ID NO: 327416 - DNA, 260 bp, Zea mays
  unsure (1)..(260): unsure at all n locations
cccacgcgtccgcccacgctttcgcaagaatttatcgataagaatgctgttacgatttcaaaggtggcgctacatatgcatctgcagctatggagtanggatttgttctagccactattgcccttatttttcaatatgtggaaaggtgtgagttacaaaggggaaactgcttccacgaaagagcccacgttctctgagagctcttcagtgatctcaaaacctgtgccttttaacgcccatatcaaccagatcattcccga

SEQ ID NO: 327417 - DNA, 253 bp, Zea mays
cccacgcgttcgcccactcgtccgcagagtctcctttatctgctggccccaaaaccctaggttagtgggagccgccgccggcgccgtgggtgctgatccttctccctcggaggctgccgctacaccagccagagaagatcaacagcactacgccgccgtcgcgactggcggagtttcgggcgaatcgtgctatgcagcggcgcctcctgctggtggaggcggcgcagacgatgccgtggagcccgtggtcatc

SEQ ID NO: 327418 - DNA, 246 bp, Zea mays
gtccgcctggttccacttccaccactgcgatcactagcgctacaccgaagccacgttttgtgtggtccttcaatacgcctactccgggcttcggattcggcacaacgtttgccccttgctcccggaaatctttgcaaaccggcgccgttactgtccggcaaggcaaccccgtttttcggccggcgttgatctggagatgctcttttcacggtgtttttttttggttacactcccccttccgtcctg

SEQ ID NO: 327419 - DNA, 224 bp, Zea mays
cccgcacttcctgcactcgcactttagaatgcactactcatccgcccgacgacgggctcggtcatactgatgatacaccggcgcccatgtttaaaaacgtcactaactttagccagatactaggcgcatcatccacaagcgacgagcacacacgaattactggccaatacatgacattgctcatgtcctttgccgagcaccctcctttaccataccttattgaa

SEQ ID NO: 327420 - DNA, 339 bp, Zea mays
  unsure (1)..(339): unsure at all n locations
gtggacttgcacagaattggcagagctggtcgcttttgccggaaaggtgctgtgttcaagttgctgtgtggtcaaaccgataatgttgtgatgaagaagatcgaggactatttccagcacagtgtgcctgaggttcggaattggcaacttgaagaagattttgaggctgctctcaaggatgcatgtttactttaaagtaaccaccgaaacttgtggtgttttttgctgagcctgctgcacaacgttattgagctctttctgctcttcctgtggcagcactgattnttaccggtgatttttttttcgctgaacgtgctggacaagcgtgctgtgctctta

SEQ ID NO: 327421 - DNA, 154 bp, Zea mays
gtccgcacacggccacaccacacttagctttccccatcgcgcgcacactctctcggtctggccctcccagtcccagcgtttgcggtccagtccagagagctcgagcagccatggcggctcccctgttcctcctcctcctgctgctggctatgtt

SEQ ID NO: 327422 - DNA, 142 bp, Zea mays
gacctgttcaaggccgctgcggtcgactgttccgtttccctcttttgcaaggtgcctccggcccggcttcctcggaagaacttcccgaaccaattaaggaccttattcctgaataccggtccgccgttaccaaaccggcccc

SEQ ID NO: 327423 - DNA, 388 bp, Zea mays
gcacaggctgagtcttgacttgcctctacattatgcgcttttgctggttatagtcggtacgggtaaccgttttttatcctagtcctataaggctataacataaggcgcgtgtgtcatctctagacatgcgtacatcgatgtagtagtataaagagaattaaatatattcctcagtctttgaactaaaggtggttatgccttatatacttatatactgggactgagggagtatatttctgcagacaatatgttagctatgatcaaaccttgaatctcatgtctaattgaaagcatctcttaaccaggaaaaggatgctagggacattgaaattcctaatatcagatgggacgtctttgaactcatgatgagatttatctatacagggtc

SEQ ID NO: 327424 - DNA, 126 bp, Zea mays
cccacgcgtacgcccactcgtactttcactttttggctcacgctttttctcactaggtgggtttattttaacatgaatctatccacattttcttagcacataaattacataatcattatacacaaa

SEQ ID NO: 327425 - DNA, 290 bp, Zea mays
tcgcacgcgttcgaaaaaaataaaaaaaaaattataaattacaaaaaaaaaaaaaaaaaaaaaagaacacggtttaaaaaaatcctggcccactcaaaactaccaaaccttactttccctagcatacaacttcatatcctattctataatctcacctaaattcaacacactgtcacacgtttaacaccttcaaaaccgtaaaaacacccaccttacccaacttaatcaccttgcaacatattccattttcacaaatttccataataccaaaaaatcccacacttaccaac

SEQ ID NO: 327426 - DNA, 289 bp, Zea mays
cttggtccaagggttttgtcgattcgaggtttagatttagtcaaatgctagcgcacttaggagtactgacctaaggtatgccatatctaacgtacttccaaaatcttcgggttgatccttaaccagctggtttagctctggacgatatgccatggcaaaccatttcataagaaactaattccaatttgactcttaaagatgaaactgaagaagtaaaatagggtcatggactccgagggatcaaagctatcattcgcttccttgcaaagttttatggatcttatagact

SEQ ID NO: 327427 - DNA, 56 bp, Zea mays
aaaggaacaggaacatagacagcaacccatacaatttagaacaagaacccagccca

SEQ ID NO: 327428 - DNA, 319 bp, Zea mays
acccacgcgtgcgcgccgaaggagaccagatggtggttccatgacgacacggtgtaattgagcgccggacaggcttccttgctgtggtatatctcgtcaaggggagattggggatgatttaggcctatttgtaagcatccctctatcggattgcgaagcttaccttgctgtggtggtgtgttaaatgagttgcacacatgtgtcgagtctgagaatacatattaccatcatcaatgatataagtaatatagaataagcatgagtgtaaaaaacaatgtatatattcattaatctcttgcgtgtgttggtgttttcagca

SEQ ID NO: 327429 - DNA, 73 bp, Zea mays
aaaaagaaaaaaaaaaaaataaaaaaaacaattttaaatacaaacaaaaaaaaaaaaagaacaagaccgggtt

SEQ ID NO: 327430 - DNA, 390 bp, Zea mays
gcgcgggcgcgtgggcggacgcgtggtcggactcgtgggcggacgcgtgggacctcggtcgcgcagccctcacccagcatggtgctccagctccactgcgccacaccgaccatcaccatctctccgcctcccgcccgccctcgtcactacccccaccacctctacggcgccagcggagcgctcccggccccagctcgcggcctcgggcaacttccccgcctcctcctcgtcggcgtcagagacccgcgcgcggacggagcggtctgccacgtgaggaggcaggtgcggtacgacgaggaagacgaggaggaggaggacggcgaggagtggggccacaacgaggacgtcgcgaggattgaacggtacagcgaggacccccgcgaccaggcg

SEQ ID NO: 327431 - DNA, 289 bp, Zea mays
atccagctcactctccactggtcgtttactcttgcagctccacccttcactcagtgttagtgtgttattagctataggctctagctatccgcgccactccttcgtgtatccatcagccttctcatcgccaccaatggccactgtcgaggtccagaccccgaccgtcttggcctccgatgaagctcccgtcgtggagaccccgccgtcagccgtcgtgcccgaggagtctgcccccgcctaagccgatgccgaagccgaagctgctgctcctgctgatcccgacgagctt

SEQ ID NO: 327432 - DNA, 318 bp, Zea mays
tattcccgtgctcgacccactcgtcctcccgctcttacattgactcatattttgacttttaatcaaacccttattttaaacgatttgttaatttctacaattgaactgataacatatacatcctctatcatcacctatttcatactctttcaaacactaaatcatgacatttctattattactttcattcatccacatatcttttacacattcttgatcatacataaacaccataatttcacaatccatacttatttcctcacacatcttatatcatattacatctaccaaacaatatttttaaaaatcatttatact

SEQ ID NO: 327433 - DNA, 259 bp, Zea mays
cccggcccgacccactcgtgcgcccgctcgttctcccactcgtcctcacactcttcatccaacgcgaccaatcgagggatcgctctaattgaaccgagctcgagccccagacaatggaaccagatacccacacaacatccatctacccaggccaaccaatgggcaactacaaaacaagactcaccacatacattaacgaccctccaaatcacccatcagacacaatacaatcacctacacacaaacaacacataccaat

SEQ ID NO: 327434 - DNA, 141 bp, Zea mays
gaattcccttctctacccactcttcctcttactctttttctgactctttttaaaatttaaaaaaaaaaaaaaaaaaaaaagagaaaagaaaaaatattaaaaaaaaaaaaaacaaaaaaaaaggatcaaccattctaaaat

SEQ ID NO: 327435 - DNA, 386 bp, Zea mays
gcgctacggtccctcatcacttgttcctctacgttcggccacctagctcgccgcgcgcgcaagcgtgcgccaccacccactctactagcttagtctcccctcgtgcagcgcgacgacagccagcaatggccgccgcccagtgaggcagggtcgcagtgacggcacgagacgcacacccacgggcgctggcggcatgccgggcgacgcctacgacctcctgtgcgccgaggacgacgccgccggcagcgccctgctgtgcaccaccgacgacgacgacgggtgctgctccgctgtcgaggaggactcggcggcggcggcggcctccatcgccgagctcatcggcggcgaagcccagtactcgcccaagccggactaccccgacaggc

SEQ ID NO: 327436 - DNA, 252 bp, Zea mays
ccttccgccataacaatatatcttctttactttttacttcattattctcctaaccttctttggatcgcgtctaattcttcttctcattcattcttttactaattactataatcacatccattactacctaactaactcccatttcctccactattcaaccttaatcaatatctatcatactcaccatcatatctttccatcattctattaccacatcattctctacatcatttaataacccctttccttatt

SEQ ID NO: 327437 - DNA, 435 bp, Zea mays
ccggccgacccactcgtccgccactcgtccgcccactcgtcctccactcgtccggccaacccctactcgcgcggctgcggcgccatcacccagtgcaggggctgatgcctgcctgatgatttccgttccgtttcgtccccagctattagtcgggtcttcaatttaaagaagaagacatgcatggagcgatgtcgtcgtctttgctgtgcgctatagcctttctcgtccgcctgaggcacgcatgactcgtccgtcgattattgtgctgcagtggacatgtgtatgtgctcctgtttctagcatatccccttgctttcaggaagaaagtgaaagtaattatatatatgatgatcgtgtaataattttcgtctacgagggagaatgaccttgtcatgcagaaaagatcaattcaagtggctcagcgttcggattaaa

SEQ ID NO: 327438 - DNA, 392 bp, Zea mays
gacccactcgtgcggtcggcccttttttttttctttttcatggttaaagaacatcagtttctcatcgggtatggaacattacattagtttcccgtgacaaaaaaggacatgagggaaaaaacgatgaagatacaacaagaaatcgaaaccttctcatgctgttagattggttaactgacctacacaatttgtcaaacaactcaaccaagcactacgtgagggccttattatacaagtgtgttcaagcacatataacagcttgagcgactagaatcatgcgcgagctcatctctaagctttgagctctttattcatctaccctccaccgtgtgtatgctatctatggccagcatatagtggcagtaccgtatgaatgtgcgtgcatgccatac

SEQ ID NO: 327439 - DNA, 376 bp, Zea mays
atcaggcttctcatcgccaccaatgtgccactttcgaggtccagaccccgaccgtcgtggcgggcgaggaagcgcccgtggtggagaccccgccgccggccgtcgtgcccgaggagtctgcccccgccgaggccgaggccgaggccgaggctgctgctcctgctgatcccgaggagcttcccgcggccgagcagcaggcagccgccgaggcggaggccgcggctcctgctggtgccgaggagcccgtcgcggccgaaccggccgccgaggcggaggctgctgctcctgctggtcccgaggagactcctgcggtcgagcaggatgcagccgccgaggaggaagctgctgctgctccttctgctggtgccgaggagcc

SEQ ID NO: 327440 - DNA, 396 bp, Zea mays
ggagctaggtggctttaaactagaccaactcatggattgacatccaaatttgtcttgcggagacggaatctatgcggtttaggcgtgcacccatatcctcaaccaccctagctgggctcagctttcttctatgcactactttgatccctggtcgttactgttacttgaggtggttttgatttgtttgggtgtggtcgtgttcttttgctcctggtgcatttgcaatcttctgacctgtgaggggcgtgttgtttgtattacattcttcttaatgcaatgatgtgcatttctcccgtgtatttgagaaaaaagtataaataagatgggaaataagatacctttttttgttatctttcccaaaagtttttttttcctgagaaacggaatagctgtatt

SEQ ID NO: 327441 - DNA, 433 bp, Zea mays
aggacgcgctcccgtcgttcccgctttcgattgcggcggcggtcatgaacggtggctgcgggctcatcgtggacccagcctctggtctgccaaccgcgctgtcatcagctgcggcggcggcaacggccgtgtccggcggcagcaccacggagaaccccatcctcacggcgctgttcaaggagatggtacgcgcgatgctgagcgtcgtcggcagcggcggtggcaccacggcacttcaggggctggagccaccgccccctatcgcgggggtgccgatggaaggggagaagtggcggcagcagcggatccgggagctggaggtgtacctgcgtcggatggacctgctgcaggaccaggccagggcggcgctggaggaactcaggtccgcgccgcacgccgggggcatgaacacttgattgtcttgggttcagca

SEQ ID NO: 327442 - DNA, 405 bp, Zea mays
cccacgcgtccgccgacgctcaacctgcacttcgccacttcacacgccttctgaccgggagtgagatctctctagcgctccttgtcctgcttgacttgccttactcagcatcatccaagaccactagccacctagatctctacctgagcttcctatcctctggagaccgaccgacatagtgccccaatacgaaagactattgccttagagacaaatcagattacgagagccttgtcctgacctgatcccaccgtcgtacgctatacagcctcgagtacatcaactactgcgcgcttcaacggaacaacgtgccctgctcccaaacggatccagctactacaactgtcaccccggcggccagaccaacccctaccactcgagaatgctcccgcatcacccgatgcc

SEQ ID NO: 327443 - DNA, 436 bp, Zea mays
gcgcaggaagcaagtgcacactcccactttccctctccactcccgcgcgcctcgcccgcgaccggggcctgtggtggtggaggcggcggccatggcggagctgcggcactcgatggcggtgcgctcgtccaactcccccgccaagcgcgattccgacaccttcgcggcgttgtcccccttcctcctgtccccctccacccgcggcagccgcggcggcggcggcggggacgacgacggcaaggacgctcaccgctcgtcccctctcctctcgcatcaccaccacaagcgtgtccacctgctgacgtccccgttccgctccctcctcgcactcgaggaccccaggtcctccgtcgactcgtcctcctaccggatcctgcttgctctcctcgcgctccttctcgccgctgtgatcttctgcgcgcccttgttctggtcc

SEQ ID NO: 327444 - DNA, 455 bp, Zea mays
gcgcgcgcacacacacaaccagatcttccccatatccacccgtcggcacctccgctggaagaggcagatctttgtgaaaaccctgaccggcaagactatcaccctcgaggtggagtcgtctgacaccattgacaacgttaaggccaagatccaggacaaggagggcatccccccagaccagcagcggctcatcttcgctggcaaacagcttgaggacgggcgcacgcttgctgactacaacatccagaaggagagcaccctccaccttgtgctccgcctcaggggaggcatgcagatctttgtgaaaaccctgaccggcaagactatcaccctcgaggtggagtcctctgacaccattgacaacgtcaaggccaagatccaggacaaggagggcatcccttcagaccagcaacggctcatctttgctgggaagcagcttgaggacgggcgcacgc

SEQ ID NO: 327445 - DNA, 168 bp, Zea mays
cccacgcgtccgcggacgcgtgggctaggcttctccccgggcctccgactccgagtgggacacgctgttctactcgctcctgttgcgcgaccaattcgccttcttcgacgcccgctccttccaatcccttgacaggctgttcaacgccttccccctgcagaagaaccc

SEQ ID NO: 327446 - DNA, 425 bp, Zea mays
ccctcactccccgttccactgctcctacactttcgaccagatgacgagaggcttgggggccgatcccatatcatagtgcctggcgctaggagcagcggcggtggtgctgctcgtagcagcggcgctgccttaccaggcatctggagtcgacgtgacgaccgtactctcggtgtatcccaacttcgcggactttgcgcgtatgatggcatacacccacgtggtcagcgagctgtcctggagatcgtgaatgacgctactgtccgtgccgaatgccaacctgccgtagtcaccctaggctttcatagctagcgccagcgccgacattgccgacgtgctgaagtatcacgttctgctggagtacctctacgcctgcgacctggaccgcctctatccctccgggaagctcgtgacgactctgtttcaaa

SEQ ID NO: 327447 - DNA, 434 bp, Zea mays
gggcccacgcgtccgcccacgcgtccgtctacgtttccggctggccatgaggaggcgagagccgtgacctcgatccccttctcttgcacgcaggctccatgccttttcttcgtctctgcgggccgctgtcgcgtcgtgtctgcgaagaatggaggaggcggaggcatcaagcagtagtacgacttctggctaattgagcccatcatgtttagtggtgccggtagagacgacgccgtcgtcgtcgtcccactcaagaacatgggcaggcgagggagctttcgttgtgggaatcagatttgaagcggcgagaggtggtgggttgtgcttgatcggtggtgtgctcatgccttctgttttgtggctgtaggatatcaagaggaggaaagaggcgctgaagaatggtgcagatccacatttgtttttgcataattgct

SEQ ID NO: 327448 - DNA, 226 bp, Zea mays
gacccactcgtccgctggaatgaaagatactattgattgtgcatgaagtcttgtcccctgtgatagcacacatgtgctggaatgaaagatactattgattgtgcaaaaattcatgaaaacttcttgctatccagaaaataatcgatttcatacatcaatcataacacgtatcatatttcttatttaaaaaaaaaacacaatacaaacatttaaatacaacccacca

SEQ ID NO: 327449 - DNA, 264 bp, Zea mays
ccttcctgcatctagttttcacttctaatcgtcgccaagagagaaggccttcggggtccttttcaaccggcgccgccgactctcgtgttcctccccgcgtcctcgttctccttgctgctggacccgctcgtggggatcgacctgatttctcctgtgctggcttccaaggtagaaacgaagtcttttgttacatcatggccttaccaactgcagcgcctattttgcttgaccagaaccaacagctcaatataggcaacagggcca

SEQ ID NO: 327450 - DNA, 383 bp, Zea mays
cggacgcgtggggcgatgccgagcttcctttcgtcgggcgccgtcaccatctgcgagatgaaccgctacctcgttgcggcggatgccctctccgacgaccgcgccaaggacgcatatggggatgtcctcgggatggtgttcgccccgattccgttccagccggaggctcttcttctcgccagccgcgagcctgctgctcctgccgcggaccaagtcgagcctgctgacactgtgcccaccgctggtttggcagccaccatatccgacttcttcaggctgatggtcttccctccactagacccaaatctgctagaagaatttgacactcagaaagtaagttggtacccatacaagcatttgctagcattcgtgtctgggaagaa

SEQ ID NO: 327451 - DNA, 404 bp, Zea mays
gacccactcgtccgctgactcttgcgtgcctcgagcacgacctttggcctgcattgccgtggcggcggttgcgctcctctcgccgacgctcggagcggagatggtcgagcggcagttcgtggagtgggtgcgctacatgggcggcctacggcacagcacgttccatcagcacgcgctggaccgcgcgtgcacatcgtactcgctcgtcgtcgacgcgaaccctgcgttcggagacttcacgaccatagatgccgccgtcgactcgctcccagacatgaacctcgtacgcgtcgccatcagggtcaaccgcagcacctacactgagaaggtgagcatcttagcgatgcgcgcgtgcatcaccgtggatggcgccggagcggacagcacgatcgttcactggggcg

SEQ ID NO: 327452 - DNA, 416 bp, Zea mays
tcttcctgcaactatcgttcacaccgaattgttggcaagagagggaccgttcctcttcccgttcaaccggcgccgccgactcgcgtgttcctccccgcgtcctcgttctccttgctgctggacccgctagtggggatcgacctgatttctcctgtgctggctttcaaggtagaaaagaagtctttcgttccatcatggccttaccaactccagcgcctattttggttgacgagaaccaacagataaatagaggtaagagggccaatggaccaagggccaaagggctgaagccatgcgagaatcctggcaatcaagggaggagagctcttaaagatttgtccaacttctctaaaggcactggtttgaaggacactttcaccctgaaagagaagtcccagcagaaaactcgtaataat

SEQ ID NO: 327453 - DNA, 128 bp, Zea mays
cccgctcttgcgatcttaatcatctcactttggctttcatgtatgctgctatgggtcaggttacgatctattttggcctagctagtccaggcagtacaaagcgccaaactgctgaagaacatgtgcta

SEQ ID NO: 327454 - DNA, 295 bp, Zea mays
aataaactaacaggtaacaattagtttgaggttcaatatataactactagcgccagacaattctaatccttacttcatcatcatccatcacttcattcccaacttcttaccactcccaaccacatctatccactacgcctcattctatgatattactcacctctaatcaatcataataaacttcaaccaccacaacaacccatcaaatctcacttcaatgttcttaaatattctgatctacaacacatcatctctcccaaaccaacaatgctttctgctgccttttatcattcca

SEQ ID NO: 327455 - DNA, 316 bp, Zea mays
gaccgacgcgttcgacatggcttcaaaccggtggccaatttccgtatagaagtgtgcgcatcttctttcgggtacgtgtgcatttgatgccatgacgacctgttccacaactacgagatcattaaaaatcggttcaagctctagccatgcaacttatcgagcctgaccatcaccttgcgttttcagtacggctgctaactcatatacgtgctcgtgctcatcttgcacgactactgagacagcgacatggtgtaggccgccctcaagcatgacaccttactacactaggagcacgttcacgaatactggggctgca

SEQ ID NO: 327456 - DNA, 337 bp, Zea mays
  unsure (1)..(337): unsure at all n locations
ccgacgcgtgcgcccacgcgtccgcccttgcgttttgatccggagcagccgcagtcccgccnacgtcgacttcggtcgccctccatctcctcgccgctgcctctcgtttctcttttcaataatcaagatgagccgtggtggtagtgccggtggtggtcaaagttctctgggttatctctttggaagcggtgagccccccaaaccagcagtggcaccagctgcaagtgctccacctgttgagaaaccatctgctgcaaagactgatgcggccaagccatgtgctgctgggggtaccagccaaaccaataactaccacagggctgatgggcaggacact

SEQ ID NO: 327457 - DNA, 66 bp, Zea mays
ccgacgcgtccggcagtatgtttatcattatgacgacgactactatccatatgcaattgtccgtat

SEQ ID NO: 327458 - DNA, 330 bp, Zea mays
gacccactcgtccgcttgggcgtccggtactatggggatctcttttgaactgagccacatgatcctgatcggcccgaatgtctcctaaccggacgatatcatcacctcgtaccatatcctgacactgaagtggcacgctgacaagcactcgccgtcgtacaggccgtaagcctatgcgcgcttcaaggccatcagcgaggcctactacgcgctcctggaccatcaagacaacaggtgcgcgttctagctgtgcaacaacggtcgtacgggtgataggactcgcagcgccttcgctggcgcacacggctgccatggccgaggatgaggatg

SEQ ID NO: 327459 - DNA, 204 bp, Zea mays
  unsure (1)..(204): unsure at all n locations
catggcactagtagatctcattgctgtattttncttgggnggaaagatcacagggaccctgggacggcacgttatggtatacaccgcaattatcctctatgcgctctctacgtcatcacttgcaatatggacttgagacatgaccttgactaaatatcatataaaatgtgaagcaatgtccatataaaatttcaggtgcatatg

SEQ ID NO: 327460 - DNA, 455 bp, Zea mays
atcggttacatgttacagggatccatttacttataaacaaacttgtttcgggcttagggcagatttacccaaaactgaacttttgcaaattacttcaaattcttccacaccacttgtagagctccaaatatgaaattttttcacttttacaagctccacaactttgatatatggacttttcacaaattctcaatggattttaaattccacttttgagactaatttatactttcaaatgtgactactatttctccaaaccacctctcaactttgatccaccactaaaagcaaagttactacttaatcaaagatccaacttcggtactcacaacttatggccaaaaaggcccttatttatggacttgctttgattatgcaccatttcactcttgggctcaatttatggttttgaagtccatccctctccttaagcgatcctttcacttgatttacac

SEQ ID NO: 327461 - DNA, 246 bp, Zea mays
  unsure (1)..(246): unsure at all n locations
gcgaccgtcgccaccgtccgcctgncttggcccgccactactccgtggtactgttaattccggcgctctcccactgtgaccggccgctagcgacgacagagctgctctattcttaaacaaatggcaccgtccagtacccaaaccttttgaacaacctgcacgaaagccgtattgtcaaactcagtgggtatgagtcaagggttatcttgcttctgggactcatatataatctacacttgccaacac

SEQ ID NO: 327462 - DNA, 189 bp, Zea mays
  unsure (1)..(189): unsure at all n locations
cacccactcgtccgggacacgtcgtgttcgcatcactgtttaccatataacaacanggcataaataaatagtaaagtccaacattcccataagtaaaaccaacaaaaacaactaaacacacaaaaaactacaaaaaaacaaaaaaaaaaaaaatccaaaaaaaataacaaaaacaaaaaaaaagctcca

SEQ ID NO: 327463 - DNA, 427 bp, Zea mays
aaaaaaaaaaaaaaaaaaaaaaaaaaaaaaaaaaaaaaaaaaaaaaaaaaaaaaaaaaaagaaaaaaaaaaaaaaaaaaaaaacaaaaacaaaaaaaaaaaaaaaaaaaaaaaaaaaaaaaaaaaaaaaaaaaaaaaaaaaacaaaaaaaaaaaaaaaaaaaccaaccccccaaaaaaaacacaaatcaacaaacccaacaaacccaaaaccaacaccttcaaaaagacaccccaaaacaaaaaacccgccccctctttaaaaaccaacataccgaaaaaaaccctgcttcaaccaaaaaaaaatacctcaaaaaaaacccccttaaacccaacaaacaaaaaacaaaaaacccccacccaaaaccccctccaaaaaaatacccaaaaaaaaaaacaaaaaacacccccccaccaaaccaccaaaaa

SEQ ID NO: 327464 - DNA, 288 bp, Zea mays
cggactcaagtgcttaaacagtacgcttttcagtttgaaaattaagctctcttgctagagtacatgtatgtttatactattcaaactctactgtattagacttgcatctggaattcattactccgtatctgctatcaggttataaggtataagctgtgacaatcattgatatgaccattagcatcatgaatgataacatataggcttctctgactgcgcatgacaaagtatgcattctatcaactttgcatgcgaactgacacagaattgcaatggttgatgattgaa

SEQ ID NO: 327465 - DNA, 205 bp, Zea mays
cggacgcgtgcggtcttcgcttacacttaccactttccccgcctgcttcctgcagtcgcgtacgggtatccatgcgcccacggagaagatggcctactctactccaatctgccttagctcaagctctggtcgaggaggcagaggccggtgccagctggcggactgagaggtaggtagcagcttgcggttgcggaagggaagctgc

SEQ ID NO: 327466 - DNA, 222 bp, Zea mays
  unsure (1)..(222): unsure at all n locations
atgagcatgtgatcgctcactcttgcatctcgattattctntagctgctctagctctggcctctgtccctatctaataactagccactctgtcgtgtactcatcaaccttctgatcgtcaaccatggccactgcctagatccatacccccaccctcgtggcgacctaagaagcaccagtaatgtagaccccagctccgcccgccgtcttgcccgacgaggct

SEQ ID NO: 327467 - DNA, 378 bp, Zea mays
aggacgcgtacgaccacgcgttcgcttttggtaagttgctcgatacaccggtggcaacgtactattttcaaagatagaagcccacgacatgatcgctcgtctttcgaacaaagaatgatggaatcaaaagatatgtatataaaatacacaagttgcaagagttgtcttttaacagcatatatatgatgctctatatatgatcaacgggagagagagaaaactaacaatccttcctggttttgaaattctgaaccaggtgcctggaggaaggagctgacgagttcttgctaaaacctgggcggctatcagacatgaacaagctcaagccccacatactgaaaagcagatgcaaccaggaacagcaccagcaaagtgaca

SEQ ID NO: 327468 - DNA, 345 bp, Zea mays
ccgacgcggccgcttctccttagaatatgagcattacgagccacccagcaactacttgatcaggttcttcagctctctctctgtccgtcgacacaccaagctagccatgcaggaggagtatgggtacaaccgtagaagagagagagagagagagagagctaacaccacccaccactgtccctagctagcttatttacaggcgttcgtgatcaccaacagcttctcgtgagaaagagtgcaacgggccggccgggcagaagaggtagctgggagctagagagaaaaaaagggtgcaccgagctacccacgccagggaggaagggaggagtgagccatcagtcgacc

SEQ ID NO: 327469 - DNA, 267 bp, Zea mays
cggacgcgtgggcgcccttattttctatatttttttttttttttttgactcacgaaccgttgttttatttatttccaagtccaaatttctttaaagaataacattactatctgattcactacaacaagccaccagttccattccatcccattctttcagactcacactgcacacacaacatttacaggcaccataacgattaccatgcaacaacatatcttgtccacttcttaggacagacttataaaggcaccttttcaccttaca

SEQ ID NO: 327470 - DNA, 380 bp, Zea mays
ccgacgcgtccgctccgacgagtcccttctccacgctatcgacgaggcgcgggaggatgtgccgtctccggagaagctcgtcgcggcgaccgacgacgaccccgacgacggtgccgctgccgggtgcgtgctctacagccccagcccctacgtgaggaagctcttcaccttcaataacatgaagggcgggcactacaacaggtccttcccggtgacccgccccgacgagtacgcgctcttcttcgccaactgcgccccggggtcgctcgtctccatgaccgtccgtaccgagatgtacaacgtcggcgccgacggctccaaggactacctccccgtcgggcaggcgcctgttgccgtcatccacggcgtcttcgcgctct

SEQ ID NO: 327471 - DNA, 323 bp, Zea mays
tgataataataataataatattatcattttcaacaatcggcagctcccctcaggcaacgaccacttcttcaccatgagcacctacgaccctctcacaccacactccccaaccgccagcttctacccactgtccatcaccaacttccccacggcaatgcaacagggctcctactgctactttccgctccgacaactaccacctctgcaactacggcagcggcggcttcaacgtggtctcggacgccgccacggcgtacagcgccccctacacagtcagcatcgtcaacatttacaacttcagcaacaacaacggcacctgcacc

SEQ ID NO: 327472 - DNA, 464 bp, Zea mays
gactgttatacaatatgtcctcacacaatatctaattcgacgttgaaaaagacgtcggggagtaatacttattcaaaagagcaatgtatcttgaacaagaacgagttcaaaatgaaaaactcgttgttgaggttaggcaacaagacgtccaactgcataagcaaaggcatgaggataggattatgaccatggatctgactgtactgccagaagaacaaaagaaatactacttatctttactgtctaagatcatgagccaactacctagtgtttgacatatgtgtgccattttcaaagcacttcaatatgtttctcgtgttcatgtcagtgtttcacatcatgttttgtccaaacaggcgtaagtggttttatctcaaatagtttgtgtcattgcttccatggtatctattgttttaatatctgttaggcgtccatgtttgtcaaatcataggtgtcattgatac

SEQ ID NO: 327473 - DNA, 196 bp, Zea mays
ccaacgctttcttcaactcgtacactagcttaacttattcatgcactcacatctagggtgcggcactttaaacatctaacccacaacttcactattgataaccaacatcaatactccaacatttcactacatctatacgcatcatacctatctaactgcagacatagcatcaactttctacctgaaccatatcatc

SEQ ID NO: 327474 - DNA, 54 bp, Zea mays
gcgacacgaacgaccacgcagaataaattacaatcaaaacagcagacgctagac

SEQ ID NO: 327475 - DNA, 199 bp, Zea mays
gacccactcgtccggtagcactaccacattcacaaggctttaatttacacgcctctttgccaacttcacccgggaggtttctctgaacatatctctgatccaatctctcggcatgaataacttcatacctaaacgacatctcatcaagaataatctccccatggtgcaatactaactcaatctccttatatagcatgca

SEQ ID NO: 327476 - DNA, 339 bp, Zea mays
cccaggcgtccggttattaagctatgggctttataccttgcatatggctgtgcaaaatgaggttctgcactgtagactgtactggtcacgtggtgaagtttgaaataagagatcggatgagtaacgttgctagagatagccttactgacgataagtcattcttatgtcttgttttcttctgcgcaaggacgtattggccagaaatgtttcatagaccgggaatacagtttacaggagaaagcatgaatgcgttatgcatccatgcgccgttctcctgactagtggactgaaaccgaatgagttttcagtggcatagaaataccaaggccatattattca

SEQ ID NO: 327477 - DNA, 372 bp, Zea mays
gcgctattatcgatgttgctgacacgatatcgttgttcaacaagctgcaagagctatcgatgtgcaagctttgccctgatatttccagtaatcacctaccaagccatgcaatgagctctgtgatattggctatggcatcaaatctggcacgtgccgatcttgaagaccgtagtccaagcacactttagcacaggagtatgacgtccattttgctggtggattgtgaccatattagcttgtggcctactgacaattcagatgatcgagtttgagaaagattgaccatgtcacattcattgtactctgcttgctcgcttagtgcatttggttcacgaatgcatgcatcatgctgaacgctgtggtttgaacgaa

SEQ ID NO: 327478 - DNA, 375 bp, Zea mays
aggaggcgccgggatcattcttcagtttcggaccttcgcctccactccctggttgatggagtggtttggatatgtggcggtggcagcagactctcctccgccggctcccgccgcctatggcggtggcacaggctccggcgtcctgggcggccgaccgtctggtatgctactacgggtctacgccggaggcgagggagggaaaggcggcgcctttgcaggcgcggggcatggtctacaggttccagatgcgcgccaagggcggcgacggcggcaatggctgcgtcagcctccggcgctctaagtccaaccgccacggcatgcctgacggtggtaatggacggaagggtggtgatgtaattcttgagtgctcacgtt

SEQ ID NO: 327479 - DNA, 350 bp, Zea mays
gccactcgttcacaaacccactgacttcattaactcctccaaacactgaaccaactaggcaggcctaattacaaatgctcctaccactaacataaaggcacctacaactcctaaaaaggacgcaaccccaaacaatgctgactctgctaccctcccagacaccaaactctattccaccaacgccaataactactctccctgccttcacactagccaaaaccccccctcaataccacctatacaaacccctattccatccatactgatccaatcacaataccctcagtagctctatattcgcccatagctccatcattaatctcaacgctacctctacacctgcaaaaact

SEQ ID NO: 327480 - DNA, 219 bp, Zea mays
gtggcacggactgaaccaaaggtaacgtaggaatctattataatgactagtcatccagggatgagtcccctttgtctcattgcgcggagctctcaattgatcgaaagttttgtagagagcagagagcattcacttcagattacctggaactactgccatgtattctgctggtaaactcgataagaattctttgatcctgtccagcacgaattttatgca

SEQ ID NO: 327481 - DNA, 448 bp, Zea mays
gcgttcggacgggacgcgcttgtaacactaacgcgctttgtttacctacatcagatattcgactaccagtgagtctttaacataccgggactactagcataccttgcctcactttccatctattctatgaaaacctgcgtactgaactaggactctagatactagctctcattactacattataccgctcaatatgcatggcctaatgacagttaaacaatcatgcaaacatcatactaactcacattctacatgatccaaacttacgaactcattcattctaaaacataattttaatatactgccactttagatgaacccactttacgtactcatacatcctacttactagcaaatccctggcgtcacccaacttaaatgcactgcacgacatactactatctccagactgcgaaatatctaacattacccaacttattgcccttgc

SEQ ID NO: 327482 - DNA, 320 bp, Zea mays
gtgccatccctcgcctgccttttcacgtttgcgccgcccgctcgacagccacggggcagcgcgcctcgccgctcagctgcccggcacccgcccttcctcgccgagctcaggatcgacgtctcccgcaccttcttcgcgcccgttccgggctccgcatccggcctctcccccgtccccaaccccattccgcagcaggcgaccagcacaacttctctaatcctccgtctcgcattctgctctcctgcgctcctactccgcgtcccgccacccttcgtacgcacaagtttactatgtctgggatggcatctgatgattcacct

SEQ ID NO: 327483 - DNA, 377 bp, Zea mays
ggagaaagaacagaatgctgttatgtttgcactgaagaagcaggagaagcgcgccaaggggactgtcatcatgatgatgaagtgtgaagaagatgagtcatctgagtcaagcgagagcgattgtgaggacgaggcaaccatgaatgccgagcagggcttggtgatctcaacagcgtttcccgaggttgttgcatcaagcatctcagctgtccccgcgatggagtgtgataaggctgcagtgaaggccatgaagaaaatggagaaggaacaaatgaaggccatgaagaagtatggagaaggaacagaagaaggctgctaataaggccatgaagatggagaaggaagcaaagaagatggcaatggctacactgaatggc

SEQ ID NO: 327484 - DNA, 261 bp, Zea mays
ggaggacgagccgtgaccattcagccttcacctcacccccccatcgcccgggttcgtgccaccatccactcctgcttcccggccttcctacttcatcccaacaaccgctacttcttacaggcctgccgaccgttgctcttcgcaactaaacccttggcagcttccgcccgttaccttgccttcctaccgcttgctttccgaataaaaaccgcccaaccctggccaccgaaaccttgtccggcctaacctcttcccgggttt

SEQ ID NO: 327485 - DNA, 383 bp, Zea mays
ctttgggctgatttatgtgcttgtttatgtgcttgtggatgtgcgggaaaccacaacaaaaaataaaaaaaaataatacaacagggaaggccccaaatcaaaataatgaaactcataatatatcaaaatcaacaacatacgccaatatttaataagaataagtacaaatcagacattaacgacggtatcctacgtaaatattgaaactctcaagaagctttaaacttcaaactcccatcgctagctcgatgtcgtcacagatcacagtttcgagttcatactgccatctattcgcactaataattctagctacatggactttgcctcactcatataccgatagaccgaaccctgtaccttaccactacccgtcttcaaagcaa

SEQ ID NO: 327486 - DNA, 480 bp, Zea mays
tttgggctgctttatgtgcttgtttatgtgcttgtttatgtgcttgggactcctcttggtattcctcgagtaaaataccacaaaggacgaccctatctaaataatcgacgccgtaattgtcgaagtcctcagctagggcagctttaagaagaaaaggtacaagcccgacagcggcgacggtatcctacgtaagtgccgcagccgcaagaagcttaaacgttcgaaatcccatcgcgagcgccccgtcgtcggagctcaccgcctcgagttccgcctgcgcactggtcgcacgaataattagagctacatggaaatcgcctcactcatgtggtaatagaccgaactctgtaacttaccagtacccgtcttcaaagcaacctacatactcgagttcggctcggaatcaagggatcctcttaacaaaatcttcgtcctagtctgctataaaaggggacgtaaccgtaagaagctgctacgctc

SEQ ID NO: 327487 - DNA, 141 bp, Zea mays
gggaacagaaatgtttggtgcctgttttatcgaactccagttctcttgtcatttttctttgtgctatagtctgtattatggatgcgtatgagtattgagatgattctgcatttgaattgtcggcttaaaaaaaaaagacaa

SEQ ID NO: 327488 - DNA, 167 bp, Zea mays
  unsure (1)..(167): unsure at all n locations
ctgtgcagaaatgtttggtgcctgttttatttttcttgcataaaagtcacaagcactganaggtggctcccctatttaaagcttcggaaaagggtttaacccaaccggttttccccatctggtggggaacttccgtgcttattgcgcgttccttacaattttccacc

SEQ ID NO: 327489 - DNA, 416 bp, Zea mays
tggctctggacctttgggctggtttatctgcttggattcttagagatataaaaggtaccaggagtcataccagtagtcggctcactcgatatttgctaggacgcctacgatagagtatcccctcatcataggtccccgtaacataacttcaacgcagtagaatgcgcagcaaatttctttaaataagtcgctctcgcacccgtagacatatagagtagcgaaattaaagactggacacccgacgagcctaatagctcactagccgcacactagaagttactccatacgcccatagacagggagtactgcgggttacccgaacatctagaggactccataagtccgatcgccggggtagaggacttagaaaacgcaaccctcgtttaaagacactaagaaaatgacaacgactcccc

SEQ ID NO: 327490 - DNA, 224 bp, Zea mays
aaaaaacaaagcggccccactctatcatgatcccaacttacctaccccatcattccacctaaaaactattctatagcttcacctaaactccattcaatctccgtcatcttacaacactccttactcggaaaacccttgccttacccaacctaatcaccattcaacataatcccctttcttccacctgccttataaccaaaaaaccctcacccaacctcctttcc

SEQ ID NO: 327491 - DNA, 452 bp, Zea mays
gacctttgggctgatttagtgcttgaatgttcttgtcgtaactagtttttgtggccagtccgtttcgttttcgatttcgagcgtcagcctctgttgccatgcaaggtcctccggttccgtgcttcttgctccctgccgtcgacatactgaggcaccaaagaagtcgttcgaccttgggcagtagaggctgttgttgttcgtagtaacggttgatcctcttcggtctatggcgtccggcccttcaccttctatacctaatctaggtacggtgacccactggcttaatggcgatgttggtcttgctgtccctgctgcggcactccactctgattcggcggtttcgcctgttcgtccgtgtcatcatgagtagccggactagtagtatctttaaaagtgtgtgagggctaaggtcggggcccggagttctatgatttcctccatcactacgccta

SEQ ID NO: 327492 - DNA, 467 bp, Zea mays
gacctttgggctgatttagtgcttgtttatgtgcttgggaatcctttcaggcgtcaaaagagggccatcggccagaggaggcgacgccccagagtgcccggtcggaacagacatctccgcgtccgacaaaatagggatgtccatagaaggaaaattagcagcgatcctcaccgtcctctcggtacacgaggagatagaggcttcctgctccgtcgtcgtagcggagaaaatagtaccgtatttaaccgtaaacgtcacaacgaataaggtcgaatcatctaagccggacaccttgactataagcggctagtccatactgttcggacccggccgcccggtcgaagcagacgggagcccagccgtagcgggtatcccggaccgggcgtacgactgccccgaaatcaaagtactgttaatcgaatcgagagattccagaaattggtcggagcccacgccgctaagcgaag

SEQ ID NO: 327493 - DNA, 466 bp, Zea mays
gacctttgggctggtttatgtgcttgtttatgtgcttgtttatgtgcttgattatctccttctttatgtgcttgattatgtgcgtggtgatgtgcttggctagtcacgaggaaggtgaatagcccgttaaggagtacggctcggcccccacggaggtactcgtcaaaatcgtataaaatgctgaggaggtacctaccaagattgtcggcataacacataagaaaacttaagacggtacacccgacgcactaaacgagcttaatgggactaaagccggtcacgtcgcctttaatctactcggaggcggcgtcggtctgcttctataggtcggcggtcgtcgtagccgagtggcggtagtaagctacataaccgtaagggcctcttttgtagcactccgacgcccgttcacagtcggttttggacgacccgactccctagttactatgccctaacttacgaataaatt

SEQ ID NO: 327494 - DNA, 275 bp, Zea mays
gcgtgcgtgaagatatgcaccttgcaggtcaccgtgtactgtctctaatacatcaacatggaccggcactcaaagtgtcatggcgccactctctcacgctgctcgttgatgcttgcttccgctgcaatccggctgccgatgccgcttatacagtgctcagtctctctatagatcgcagctcgctgcactgcaaacagctgtaacagcagccgcttgcagccaaccgaacacgccctttcatacttattcaatatcacaagtctgtcctgagatct

SEQ ID NO: 327495 - DNA, 308 bp, Zea mays
ctttagtagtgttaccaatgctgtgaataccggatagtgtgtgttcggtttaggatcacctgtgtgtagatagaagttgtttgacgttttgggctacaatttctaaattgttgctttggatttttccccatattatcttacatctgttattaatttgattccttagtattttgtctcacttatgaagattttaaaacaataatataagtccttttacctcttgtagtctcactatttcaagtttctgctttaaaatacctgataggtacccctttgcgaagacaatgcctctgatgtgtgctggattc

SEQ ID NO: 327496 - DNA, 63 bp, Zea mays
gttttgtgtttctatgtggttaattggttaccctttggaatgaaaatccactgaatttgggtt

SEQ ID NO: 327497 - DNA, 279 bp, Zea mays
gtcaggtgtacgtcagtaacaccagttattatctcttgctcttgtgcaataatggcgggtggatcattctgctctcaggcggagctcttggtcgctggtacacgcgtgcgatcggcgcatgtaatgatcccagctggggccagcacacgcgacatgatgcagcgagatgctgagaggtgacgtgactagctgtggcgcgcgcctcgggtaccgcgatgggcagaagcggagtcggcgtcaccggcaatgctcggatactagtgcgcatagctcaacagc

SEQ ID NO: 327498 - DNA, 442 bp, Zea mays
ggacctttgggctgctttatgtgcttggaaactcctcaaagtcccacgcggacaccgaacctatcggtctttacatataaccccccgagaagcccaatacctgatacaacaccgtcgagtcctcggagcacccacgggacgccttcagctattgaaatgtacggagataaacagtcaaagaggaggagaagggcgcacatccaaacccctccaatccctctacaaacgacagtactcactcctccgatgagagcccgaataaaacctccgaatcgaaagaaacagaggtcgaaacggtcaatacagccgagcgggagtgtagattcgtctaagaaagagaggagtggtcgtgcgcaccctactagcgggaaaacaccgcctgccccgatacgaggtcagttaacgaggacgccgggacgtccgtacctattctcgaataaac

SEQ ID NO: 327499 - DNA, 442 bp, Zea mays
ggctctggacctttgggctgctttatgtgcttggccgaggtctttaagattgattcagatccccggaaagcttccgcattggccgtcgcggtatagataaccggttacgccgtcgtgatagcgagtacgctcaacgcggtagcgctacctatatatacatccaacagcgtagaattcgtacctatcgccccggtgctaaagccttcttccggggagatgcccttagccttagctcactcacctctcctccataactaccggcggtcgcgtctcagtcgtcgctatagagtcgaatccctacacggccggacccacgggcgtcacgatgcttaattccgtacctgccccttgtaatactcctctgaagaggggtacgaacgggaagcttgctagcggtacgaaccatcacgtccgttcgctaacaacgctgacggctacatcg

SEQ ID NO: 327500 - DNA, 293 bp, Zea mays
ggacctttgggctgatttatgtgcttgactcccgcccagccgctcccgccatcgagacgaatctgaagtaagagactaacttaaaatgctaagcacccgtccatacttagatagaataagcccgacacagcactgaaggatataaatagataaagaaattatatagaataaaatcgttaagacaacgacattatataagagaaaaaatagtgaggctgggctcgaaattgtacgtacttacacatacattaggatttacgccggtctccacaccccagaaccaaataaatcca

SEQ ID NO: 327501 - DNA, 469 bp, Zea mays
  unsure (1)..(469): unsure at all n locations
gacctttgggctggtctatgtgcttgtttatgtgcttgtttatgtgcttggtttgaacaagggttattggaaggtgcgtttgttgttcgtgctctttttgatgtttatgttgatgtttatgttgcttctggataagcgttttactgatgtgtcgaagtctggtgtgcgtgcggatacctctgggaatgaggcgtatactggtgatgttaatgctaagcgtcgtttgtctgcgaagggtactgttgggtctcttgtggtggtgcgttcgcgtattgttactaaggttaaggcgtcggatactcttgctcatgcgtttactgtgtcggaggcgtctgctaatcgtggtcgtgaggctttgttaggtcataaacgtatccaaatgatcttaccttaccctactttactctattacgtgcgtatagtgaggctcntccccgtttctttgaacgtanagcccgaaaggtctgct

SEQ ID NO: 327502 - DNA, 195 bp, Zea mays
ccaacgcctatgcctgttcaaacgctgccttttgttagtcacagtgaatgcttgtgttccggtatgatctgtataggcgaactgctcgtagaaaacaagtcaacaacatcaaaacttgtatggtccagtgggcctgactagtccttaaaaaaatttgttcacttgcaaaacacataaataattataataaaaggt

SEQ ID NO: 327503 - DNA, 216 bp, Zea mays
cccacgcgtgcgctaaatacaaacagcatttaaatatacatgtccaaagtattaacactaggggcgggctttaagcacaactgcaactaggattgatcactcatcatcataagtaaggtgtaatgaatgagacgaagttattggtttaccaaccaagatgtaatgatgttgctgtgaaatcaattggcttagattcgactgatgatttcgaagata

SEQ ID NO: 327504 - DNA, 253 bp, Zea mays
cccacgcgttcgcccacgcgtacgatcacgcgttcaccgactcgtatgacattattgatgaggagcttagcgttcgcggtcagagggcttacttcttgcaggagttagcacaccggtcctagaactgcgaacgcatggatgccaatgtctaagctcacagacttcgtctcatgcgctaactaccattcacttgagctgcatgatactcaggagaaccttacgcaatgtgctgacgaccttggcattccatttg

SEQ ID NO: 327505 - DNA, 411 bp, Zea mays
tttggctgatttagtgctcgtttatgtgcctgtttatgtgcttgtttatctgcttgtggatgtgcgggctgacttttatagagttagggtgcgtaggtgggtgggtgggtgagtgagtgagaggaaaagttaaggtggtagtagcaggtagttattactaacaaagaaggcttaagtacgctgggggcgcgggcgccttggaatggtgcggcgaggtcggcggagaatttgatgctggggaatgtggtggtggtgttgggtaagtgtaaggtgtcgtcgtatatgttgcttggggaggcggctatgcttcatgttcagtcggagtgtaagtcggtggtgtctggtcgggagtgtcatcatgttggtggtcgagatggtcgtagtcttggttcgtcgtagcattataagtgt

SEQ ID NO: 327506 - DNA, 467 bp, Zea mays
cggctctggacctttgggctggtttatgtgcttggttggatgttgagttttagatggttcctcctacgagtttaattcttgcgtctgacgtggtggtggttcctgcgttgggtatggatggtgttggtaagtgttgtttgttgcggtgggtgtgggataataatggctctgtggatgtgtcggatcgtagtgattattattagtagtagtagtagtaggagtggactgcttctgtggtgatgttgctgctgcgtctgtcggttagactgcgtctttcggattgctgtgctgagcctggtgctaagaataggagtctgcggtcgttttcttgtggtcgtgaggttatggtgttggtgttggttgatttgcgggagacagagttgctgctggaggatcatatgcgtgctactctttgtgggttcaatttgaggatggcgtatactcctggtgattgtgctgcggaaggt

SEQ ID NO: 327507 - DNA, 407 bp, Zea mays
gtggaagagatgaagacaacatcctggaggcgtctgctggacaagggaaggcagaagagaagctcggtgatgatatctacaaatctgagatatctgatcaagaaataacagcaaggacaggtgctactctggaaggtagcttcgaagaggatatttcatcggaccaagaggcaaatgatgatgatgaagatgagtgccatgtgaaatctgatggcgaatcagaggacactgaggagcaagatctggaggatcaacagagcatgccagatgatgtctctaaaatagagatttctgaggacaccgtctctggtgacggatgcaaagaggatttttctgaagaagtaacctcggcagctgtgttagcagatgatgtgtttgaacaatatgacaacactgtggatgatgtg

SEQ ID NO: 327508 - DNA, 203 bp, Zea mays
ctttggctgatttatgtgcttgaaaaaaaacaaaaaaaaaaacaaaaaaaacccaaccaaaaaaaaaaaaaaaaaaataaaaaagacaggcgcctataaggacatgagtatggttaagtaatactactactctttatacaccttgatgcaaatctaaccaaattgttgatgattatcaatcctctaatcgacaaaatattcat

SEQ ID NO: 327509 - DNA, 498 bp, Zea mays
ggttggacctttgggctgatttagtgcttgtagagtcgttgagagcgcgtcgcgtcccgtctactcattgattgactgactctggtacggtggatcgggggttggcgtcgactgggtcggcgtctcctacttcgtctcttttgggttcgtctccttagacttttggtaagggttggactactgagcctggtaatccttagattagtggttctcttacttctacttatgttgctactcatcctgtttcttctgttactccttcttctgttgctggtgcttatacccattctggtcagtctgctgttggtgggtcgagtgaggtcagttgtcgtcggtatgtggtggtttggtttggttcggtcgcacccgatactaactcgggcggtcggaccaggcatcgtgcggcgtggaggtacacatcatcacacatacccatacgcctactctgactcgtccgtcagtcgtacgccgacccacccagtcatcatcccactaatg

SEQ ID NO: 327510 - DNA, 443 bp, Zea mays
gctctggacctttgggctgatttatgtgcttgcggtctcctaaaggagcgacgcccttacagcactgcggtcacgtctttaggccgacccgtgggtaccacgcgtaacggctttagcattctccaattagggggcttcttcggttccaccgtagtagtcagtatccgatacctataacgagatactatgaaaggcctaacggacgatagacgccgttacggtaactaatttagtagattagacgactgtggcctacgcgtggttcactcccgagtaagctcataattaatcggtttattagtggatatctttcattacgattgtagtagacggtattagtacttgcgcgactacgtacgcaaccaatctagcctcgtccagtcataagcgaccgcagtcatgtaatcgcgggaagcacggttcacctcactccgcacagagaa

SEQ ID NO: 327511 - DNA, 432 bp, Zea mays
  unsure (1)..(432): unsure at all n locations
tttgggctggtttatgtgcttgtttatgtgcttgtttatgtgcttgtttatgtgcttgctctctcacctgccttttgttctattgtgagttagttgctctgtcagggccctgttgttgttgttgttgctgttgttgtcacgttctgttgtagtctaggaaggctcgttttatgtttagtcttttgcgtcgtcttagcgaggaatttgttatagttagtatgttaggtcttcttcttagtcttcgcctgagacggcggcggtcttacgcccggaggaaccgggcttattaccggtctaggcacggtgcccggtatgggcagcgttacggtattatagggtcgcgacgtcgcaccaggcttttggattacctagtacgagatcgccgttctagaagtcgtcgtcgtcgttttcgttttcntagcgacgaacgtc

SEQ ID NO: 327512 - DNA, 67 bp, Zea mays
aacaagcattccaaacatgcatacaaaaactttttttaaaaataataaagggctcctcgatatggat

SEQ ID NO: 327513 - DNA, 228 bp, Zea mays
  unsure (1)..(228): unsure at all n locations
ggatcgtcaacggcgcccggccccagcggttgtttcgtgcgcggtctgagggtagctggaggcagcgaccgctgctccactaangcggtcgcgccgctntaagagcgcttatgccccaaagcgaagcgttacccgtcctcaatcgtgtgcttagtgccgctttttggaaccctgtttgatttttaatggagatacacttatttgaaatataattgatccccagatata

SEQ ID NO: 327514 - DNA, 468 bp, Zea mays
gacctttgggctggtttatgtgcttggcatcttctcttcttttctcgtcgtagctcctcgcttgtcgtagactacggaggaggaagggcggtatgagcgctcgtacgggcttcgagagctgtgcgagtagtgaagtagcctatggacggccggacggagggtaacgattagtcgtcgagtcgtcgtcgtcttcatcggctgattactagcccgcacccgcttacgttctgagcagttggttgctcctccgtttcggtccgcttagccttggaaggtggctaagtttggcgaggtgcggatagagattggtaagctagagactggtaacagcgagtcttagtaggagttcatccgcatcttccactcatttgccccaaggcctttcctcctgcgtcgacttctgctccttcctgacctactccgatcgactttcatcgttttagaatcgcattggcgagagtagaagac

SEQ ID NO: 327515 - DNA, 349 bp, Zea mays
cccacgcgtccgccctcttgcttcttcttcttcttgttcacacaagcgtgctccttctgcgcgtgtgctaagtagctagctcacaacagaagaggacgagaggaagcaaggcggcggaagcggctgcagcaacaacatacaccgctggccgtggcgacatgggcatcctggaccacatgtctcatgtgtgcagcatcacagagacgaaggacgcgctcaagctcaagaagaagcgaccgctgcaagtcatgcttgactgtaatcattatatatttaattgcctcccatgcatatgcatgcatgcctgatgagtgtagatgcatgggcagtggttgcagacagtgaacat

SEQ ID NO: 327516 - DNA, 482 bp, Zea mays
  unsure (1)..(482): unsure at all n locations
ggacctttgggctgatttatgtgcttggtaaaactcgtatgagagatagatgatgagcacggctgagtggaggatgttgttgttgtgtgttgatgggttgttacaattgatcattgtaagaagtcgtctaatcgtagggagtctgagctgtgtgctggtattgcgagagaaagttccaaaaacgtaaagagggaccccattaagatcgaagatgatccgaaactctcgtagagtgcggggtaaacaaccggagaggcctcttgattctccgacaacgaatgtcccaccgcgaaggttagtagcggcttttgacacgcggctggccgttgaagcaaagcagataaggagaagccgatactcggaatctgcgccgcatccgatacgatgattccgataacaacgtgtatctccntatgggaggcggacttagcggcacacaatacgtactacgaagacttaggaaacgctagccatctcgtcgc

SEQ ID NO: 327517 - DNA, 374 bp, Zea mays
cacggcccggcacctctgggctgatttagtgcttggttatgtacttggggtaagaaagaaggtcccctacacggagtgggaaatggagtgccaggtggtatgcctcgtcggcagggacctccactgcgacttccacaggggttaactgcgcggtttactcctcgaggttcgcctactgagtctgagactaagactgagactatgactctacctattacgttacgtcaggtgcacgacttcgggactaacgtccgaagtaagtaccggggtatgtagaacgtcctcacggtcgaacacacaatcgaacacggcgttattgacgtcattagcgaattgactctcctagggactctcttgatcctgatcgttacatt

SEQ ID NO: 327518 - DNA, 271 bp, Zea mays
gacaaacgtagatttcgatgaggaccattttgtgatttcagaagatggatcatatacaggggaggagattcatacattacgaggataccatgggaggcatgagccagtggtgccatatgttgaggcaattattgaggatgatgctgatgctgatgctgaaggggatgccagttcatcagggtctactatggacactgaaagtgcattagatgttcatgaagatgcaatcgagttcgaatcagccgacggccatgaatgctatcttgagaat

SEQ ID NO: 327519 - DNA, 431 bp, Zea mays
cggacgcgtggggcgagatggcggttgccttcggggacatggcggaggaggcctacgggaagaccagggcgcgccgcccgcccggccccggctccggccctggtcccgccctcgtctcgcgccgcgagcacgtgtccatgcgcgacggggccggcggcggacaccggacctgcgtcgtcgtgcgcggcagggagcgggagatcgcggtggatctcgtctcgcgcgcgcagggccagggccaggggcgggagcgggacagggccgaggtcggcatgtcggtctccgtcgacggcgatcgcgtgctccacgtccgccgcctgcgctggaagttccgcggcaccgagaagctggacctcggcgccggcgaccgcgtactcgtctcctgggaccttcacgactggctctttcccgcgcgcgaagcctctccaccc

SEQ ID NO: 327520 - DNA, 164 bp, Zea mays
tctaataattctaatgagaaggctatgaatgaacagccgaagagactgtcccacgtttcgcgtctgtatcacggaacgacatctgacgcggcggtttcgaaaatgtataaatcgagaaggtatgtacgggcggcgcccactgagaccataatcgtcattaacgt

SEQ ID NO: 327521 - DNA, 453 bp, Zea mays
ggacctttgggctggtttatgtgcttgttctgagtatggtactgagttccacggtatcacgtttagcgacattatggccggtgctgtagacgaggttcctaatatgcctcctagtgagattggcctcggtaagtacgcgttgagggttactcctgctgattccgagtttatcgctaccgacgaggcctgtatcggtctgcattgttaatctccttatttagagtagtctactctgggtaaggaagatgtagtcaataatcccgtttgcggttatcatatcgccgggaaggagaccgctgactcacgttcggattgcgcgtgtaagtccgtagataatcgtatcgggtcgtagggacctccggcgcctaacgtcgccggcggcgggatcggtctcggatccgggctatccccaccggagtgttccctagccgaccacggtaagaaacttaagtc

SEQ ID NO: 327522 - DNA, 167 bp, Zea mays
gagggatactccagatgattccgagtttatcgctatcgacgaggcctgtatcgctctgcattgttaatctccttatttatactagtctactccggattacgaagatgtattcaataatcccgattgtggttgtcatatcgccgtcaatgagaccgttgactcacgtt

SEQ ID NO: 327523 - DNA, 457 bp, Zea mays
gacctttgggctagattcagtgcatgagaagataaccatctacacaaatcacacacgatataaagagaagataaccatctacgcctagcaagccgtcccgactacagataagggcagacatacgctgtaccgaggtagttacgggaactataaggcgcaaatctctatgacctaaggtattcgattataaatcgaagacaaccactacgtggcgcctagacacggcgcaaatctctatgacgtaacccgatctcccgcatatcgtaaacacataaccactacgtgcgcctagacacggagtagcccgcgtatcgtcttatactatactcataatcgctcagaagaaaaaaaaagcgtctaatcaacaagtggcctccttaaacagaaagacaatcgtccaacccatcagatatacgctgacttttgctcgaattagtttttaagctcccagtcccgc

SEQ ID NO: 327524 - DNA, 293 bp, Zea mays
cagacgtgcaatacagtgacctgaccaccatgcgtatccaccacaactactccacatgatggagaacctaagatcctgcagaggagaggaagaggagcatgaagaggagatggtcggcaccgttggcaagaggccagtagcgctagcaacggactgatcggagggtagccgagcggtcctgtatacctctgctgccaacctgctacgagacatcgaccaccagctgctgctgcacgtcatcaatgagcccgactacgagcagaacgaggccattctatgggaatccaccggat

SEQ ID NO: 327525 - DNA, 366 bp, Zea mays
  unsure (1)..(366): unsure at all n locations
cccacgcgtccgcggacgcgtgggcaaattgtcccatcccgtgctccttcccgatcgcatcgggtgctcctncccgatcccatgcctccgctccagatccgcacgccgncaccggatccgcagccagcgcggccggcatggaagagacgccgccggggcagcgcccgcagccgccgccggcgcacgcgtctnnctcgttcgcctcggcgcccttcacaccgncgncgcgcgtcttctctccaggcctcgccgccgcgcggggcacgcccagccccggctcggggcccggccacgcgctgccgcacctcagcacgccacccggcccggccgtcttctcctcgccgctgcgccctgcggccgtgccct

SEQ ID NO: 327526 - DNA, 87 bp, Zea mays
cccacgcgtccgcccacgcgtgcgctattatactcgctcaattggaattgcttatacgtaaggagtgattgacgaaactaagcacaa

SEQ ID NO: 327527 - DNA, 375 bp, Zea mays
  unsure (1)..(375): unsure at all n locations
tttgggctggtttatgtgcttggacttggctcgacgccctcgaagcagccgccgtcgatgagcccgagcataaggacttcgccgacggtctcgcgcttaagtattagggtacttgacattctcccggagacggcctatgatcggcgccttgttctctcggaattggcctcgccggcgttattacttgcgctcatactgagtagcatgagagggatcttctcaagattggtagggacctataggatgtttccgtcttgtcggccgacgccgtgtctaagtctcttaagacgtaagagcatatcggatgtctcgtttttattgctactatacanaccccgaagagcgccccagaacgagccgaggtgtccatataaa

SEQ ID NO: 327528 - DNA, 369 bp, Zea mays
tggctctggacctttgggctggtttatgtgcttgtttatgtgcttgtacttacttatttatttatctagatttagtcgtatttctctgtcttcccagcgtgttattgttggttacggtcgttcgtttattgcttctttttattatacggttagcttagtgtatagacacagtagtaactatccaacgtcagtcttctctttttgcgagttgcagtcctatctcgtacgtatcttggttacgggtttacggtcacacaagttgtcgagtcgtgacgttatagtattgtgtggttctaagtagtcttccctcctagtagtatagtcagtcagttacggggagtaagggggcggtgtctgtgtcgtcgtctc

SEQ ID NO: 327529 - DNA, 349 bp, Zea mays
tttgggctgatttagtgcttggagggccacactacgcaacctctcaatacccgtcagaacaggaccgaaggcccacgaggtcgccgggcgctacgcctagatggaatacaaaaaaaagggtggttgtctcagaggacttaagtccatgcatgtgcgtacgtgatgctacagtctcctcacagcgctattcaaacctaacctatcggttgatgccccataatgctacgatcgggaaaatttcggtgccatttaatccaacagttccgtactatacttattccctgttagtcggtgcaacagtgaagaggtttgtattgactgtttcctttaatagccgtgtaattcgaac

SEQ ID NO: 327530 - DNA, 181 bp, Zea mays
tactcggattgccagacgacccacgcgtccgcccacgcgtccgtgaatccctggtcatacttatatttgtctcatgaaatttggtacaggggggaatgctttaaaacgccctgaatcattttataaatcacatatgtctctattgctgttaaaaaaaaaacaaaaaaaaagggcctgacgg

SEQ ID NO: 327531 - DNA, 291 bp, Zea mays
tccggactagctttagatcacacggggtgccattgactctaggtcgcgaaggggagggctctcaaaacactatctgcctgcaaccgactatgaacaccttcaagctgagatttcaccgtgctcagcgatcaagccaattacagatactcgacaagcttcgcacatctactagacataccactcacgcgcctcagtaaccagactaatagacgctccctggtgtcagtattctacaccgacttatgcatagcttcctgctacgacctaaccggtgacatcgtatgactgcgc

SEQ ID NO: 327532 - DNA, 471 bp, Zea mays
tttgggctggattatgtgcttgtttatgtgcttgggtttgtgattggatctccgttctggtaagtcttataagttcgagctacgcatgtcgtaagtatataaaggagataaaaccaaggcctatcactgcgggatatcgatcgacggactagcccctgacctcagtcacgatagaggcgatttgcccgaacctatttccggaaacggttaagcgacaaaaggccgggattaaggaccgtctggcacgcgtgcgggcgaaaagaggaagtcaaagacattcgtaaagacgggccacggcgagtgaggtcttttattaaagaccttaggcggagtaatctcgactccttatatggagtccactgttgctaatgggaagatacttggtggcgtaaaggtagagagcgacagcgagtctcgacataacgtaccggagagccttaaagtctgagaggagcagcagtagtgctgtac

SEQ ID NO: 327533 - DNA, 285 bp, Zea mays
cccacgcgtccgggtgggttggcttctccttcccctccggttcgggttcgggttcgtgaggttctccggggttcggtttcgtgggtgagcggatcgagatggcggcgtcggatgttgagtaccgctgcttcgtcggcggcctcgcctgggccacggacgaccactccctccacaacgccttcagcacctacggcgaggtcctcgagtccaagatcatcctcgatcgggagacgcagaggtcccgcggcttcggcttcgtcaccttctccacggaggaggcgatgc

SEQ ID NO: 327534 - DNA, 197 bp, Zea mays
gccaccgacccacctctctcatagcactagcagcaatggaggtggagatcctcgagtcctgcatggtgaaacccagcgacgacatagggacgccgccgccgcccatgcacgtggtctggctctccaacctcgatctactcgtggccaggagccacacgcccaccgtatacgtgtaccggcccagccctgacccggac

SEQ ID NO: 327535 - DNA, 105 bp, Zea mays
cccacgcgtccgcccacgcgtccgcctactcgtccgaaaaaaaaaaaaaaaaaaaaggggggattattaaaatagattggggggttaataaatttaagatgggtg

SEQ ID NO: 327536 - DNA, 324 bp, Zea mays
acccacgcgtacgtcctattattcccccactcccccgggttataatcgccaccaccagaccacaccacagcagccgtttattacactggagccgcgcccacaacaaccgccaaaaccgctagtatcatgccgcccacaaccaaaagccataccagctacagaagacaccgccctcgacgccaccgtatgcctcaatagcaatcaagacgaagagaaacccaccgaacccgccctgctccagaaacccaaacttcctaagctcaagtcgtaatagcatcagctacacaactcctagcaacacacaagcccactgtacacctacgt

SEQ ID NO: 327537 - DNA, 75 bp, Zea mays
ggcccggacgaaccgccccgacccacccacgcgttcgtccactcatacaaaaaaaaaaacaatttaatattcaac

SEQ ID NO: 327538 - DNA, 70 bp, Zea mays
ccgggaaggaatggccggacccacgcgtccgcggacgcgtgggcggacgcgtgggctagttctatatcgc

SEQ ID NO: 327539 - DNA, 441 bp, Zea mays
cggacgcgtgggcggacgcgtgggcggactcgtgggccacaagaaggaggatgagcaccagaagaaggccgaggagcaccacaagaaggaggagggggagcaccacaagaaggacggcggggagcataaggaaggcatcgtggagaagatcaaggacaagatcaccggcgagcacggcgacaagtccggcgaccacaaggaaaagaaggacaagaaaaagaagaaggagaagaagaagcacggcgagggccacgaccacgaccacgacggcggccacagtagcagcagcagcgacagcgactgagatctggtgtcgcagcacaggtgcaacacaagtatgcttgctggatggaggattcataccagctgatgctgatgtagtgtttcactggtgtcatgcatgcatgtatcgggctattataatcaaaaagaaaaaagaaa

SEQ ID NO: 327540 - DNA, 334 bp, Zea mays
gcaactccctcgcttcctgcacccacattttcgcggcgctacctgcctacccagatcccgctcgccggtggtgccctcctcagtcctcactctcccgccgctggcgccgccggagcgagggggactgcccaaaccctactaggactagcagtaggaggcggaggggcgagatccggcggaggccgccccgatgggggacttcaacgtggcactggtgatcgtggcggcggtggtcagcgtgctggtgctgctcgtcagcgtctaccttctcgtcaactaccagcaccccgacgacgtcaaccaggcctacttccccaagctcgtcgtcgtgctc

SEQ ID NO: 327541 - DNA, 376 bp, Zea mays
ccttgtagctgacttcaaccacatggtaccatcttagcagagtagcaatggctatcaaacagagcatcagcttcacgctgcgtgttcttgctgatctatccctcctactcttttgcgtcctgcttgcacctgtatgttcagccacaccagccacagctcctgctgttctcctgcaagtgaagtccggcctcactgaccccggaggcgtcctctctggctggtcactggaggccgacgtgtgttcatggcatggtattacgtgcctgcccggtgaggtctcaccgggcattgtgacaggcctcaacctgtccgggcacggcctgtcaggcgtgataccgccggcgatgagtggcctcatctccatcgagtccattga

SEQ ID NO: 327542 - DNA, 224 bp, Zea mays
cgggggccgggacggcgtcggcggcggtgagctgcggcgaggtgacgtcttcggtggcgccgtgcctcgggtacgcgatgggcagcgcggcgtcgccctccgcggcgtgctgcagcggggtgcgctcgctcaacagccgcgcgtcgtcagcggcggaccggcaggccacctgcaactgcctcaagagcatgacgggccggctcggcggcagcatcagcatggcc

SEQ ID NO: 327543 - DNA, 260 bp, Zea mays
agccagcacacgcacactgttctttcgacttccatctcggccggagcagaagatggaggtggctctgggaacggccaagtatctccttggccatgttcagaacaatatctccgacgactggatgaattcctacgtgtccagcgccgagctcggcaccaaccttaacatgatcaaagagaagatgcggtacgctagagtgctgctggacgtggccaaaaagagggacgacgtcgtcgccggggaccccaaccggctggagc

SEQ ID NO: 327544 - DNA, 314 bp, Zea mays
cggaacccggccgacccacgcgtccgcccacgcgtacgcggacacctaggcttgatacgttgctggatgcaccatgaatacgaggggggtctctgcatggtaaacggggcatgtgacgacatgaaccgctctcagctatacaagttatgctgctatgatctcgcatgccacctgcttgagctataccaacacaagcacaagcggactaagatgctcgaggcactcggcgtcctccgtgacatgcaccataatgtcgccaacgtgatcctaccaggacatgctgaaacgtacacggttcatacgaatatgactgt

SEQ ID NO: 327545 - DNA, 177 bp, Zea mays
accgggccgacccacgccgttgatctccactattaactttccgccaatttataattactgctaagaccccaaacacaaggcgcgactttaagaacggtgtgcgctccctctactacacctcccttgttagaaaaggacagcttctgtttctaaagctactaatgccgtcagaaagcc

SEQ ID NO: 327546 - DNA, 414 bp, Zea mays
gtcttcgtactcgcctacctccgcggctcatacctttcccccttctcccaattcccgccgccgctccatcccgtaacgcgacaccatgagggagtgcatttcgatccacatcggccaggccggtatccaggtcggaaacgcgtgctgggagctgtactgccttgagcatggcattcaggctgacggtcagatgcccggtgacaagaccattgggggaggtgatgatgctttcaacaccttcttcagtgagactggtgctgggaagcacgtgccccgtgctgtttttgttgaccttgaacccactgtcatcgatgaggtgagaactggcacctaccgccagctcttccaccctgagcagctcatcagtgggaaagaggatgcaaccaacaactttgcccgtggtcactacaccat

SEQ ID NO: 327547 - DNA, 322 bp, Zea mays
ccgtccggcctactctttcttggataattgactctggatgattgacacagacaagcacacagctcaagctgcaggcatgttgtgcgtgcatactatcgtgctgaactattctgaacaatatctgagataataactaacaaagaaccagacctacaacagagcttacaaaatagcgttgagtgctgtgaacagtgctaagaacctgattatgatatgaagtatgacttcatgtaagactacaacggacctgatgctggacgatatgcagctggatgggcttgtggcgatcctcatgaacatcctgatgtacgcacagattgag

SEQ ID NO: 327548 - DNA, 284 bp, Zea mays
  unsure (1)..(284): unsure at all n locations
ctggaatgctacccaggcatagcttgctaccttatacttttgcttgtgaganggcgggagtactataatatgttgggtggacttaatgattgngaatggtatgtgttacataattgtttaaatggaggtattggttgantgatgaggattaattattgaaaaaaaaaattgggggcatgtggtagataagtaatgatgtttaaatagagagaaatagattatttatttaaattgttatgatatatatatttatatttatgtatatatatatatatatatatata

SEQ ID NO: 327549 - DNA, 413 bp, Zea mays
gtcttcgtactcgcctacctccgcggctcatacctttcccccttctcccaattcccgccgccgctccatcccgtaacgcgacaccatgagggagtgcatttcgatccacatcggccaggccggtatccaggtcggaaacgcgtgctgggagctgtactgccttgagcatggcattcaggctgacggtcagatgcccggtgacaagaccattgggggaggtgatgatgctttcaacaccttcttcagtgagactggtgctgggaagcacgtgccccgtgctgtttttgttgaccttgaacccactgtcatcgatgaggtgagaactggcacctaccgccagctcttccaccctgagcagctcatcagtgggaaagaagatgcagccaacaacttttgccgtggtcactacacca

SEQ ID NO: 327550 - DNA, 300 bp, Zea mays
accagtgtctattctttaccctgcgcggttcttcttaatctctaatgatctgaaacagaggaacagagtaaaaggagcagagaaagcttcatcttctaggctttccttgttagaaaaggctgcttctgttttgaaggctactagtgccgggagaaagccctctgctgccaattcgatcagtagctctgtgttaagtattggatcaaggccaaaggccttgagaagaagctgggaaggaaacacggatattaaaggaaaaggcaattcagaatcaaagacagccaaacctgacaagaagtc

SEQ ID NO: 327551 - DNA, 316 bp, Zea mays
  unsure (1)..(316): unsure at all n locations
ggcttctcctccccctccggttcgggttcgggttcgtgaggttctccggggttcggtttcgtgggtgagcggatcgagatggcggcgtcngatgttgagtaccgctgcttcgtcggcggcctcgcctgggccacggacgaccactccctccacaacgccttcagcacctacggcgaggtcctcgagtccaagatcatcctcgatcgggagacgcaaaggtcccgcggcttcggcttcgtcaccttcttcacggaggaggcgatgcggaacgccatcgagggcatgaacggcaaggagctggacgggcgcaacatca

SEQ ID NO: 327552 - DNA, 121 bp, Zea mays
cggaaaggctgttttgtggtgtgatccggtggtgttcttggtgttgttgagaactgctttggtttggtgtatcagcttttgttgccgggtaaaacgcctgtgagctgtgatgtgatgcttc

SEQ ID NO: 327553 - DNA, 305 bp, Zea mays
  unsure (1)..(305): unsure at all n locations
acgccttcgganaaaaaaaaaaacttgataattttacgtcaagcccacacttnaagggggtgtttttggacgggcgtctgggaggtccaaactacccgaccctctcaaaaaacagcgtagaccatcttaaggggaaacttaaattaaaaccaagggtcaggcgcgttcgatcagagcaacgagcaacacacagacgtaaccgaacgacaaaagatgtacatgcacgcacacgtccataaactgagtaatcgtaaaaacgacagcaccgatcaaaaatctcacaaataccgaagtttcactgggaa

SEQ ID NO: 327554 - DNA, 269 bp, Zea mays
cccacgcgtccgccaacgcatggacatactcgtctgcgcacttggaccagggataataggtttcattgtcgtaccggggttgaacatttatactttgtaaactccgcaacttccaacacccttagagctatatccactcttacgactactacttacggtgctaccatcgagactattcatataaggggataggcgtccgacgtctagcttgttctaagtttctcaactgcaagggtgctactgcttacgcgcttggaatgctatcgttc

SEQ ID NO: 327555 - DNA, 407 bp, Zea mays
gaagctgagacgacgatgaagaacaatgtttgaaccctagaagcgtcaaaagatggcaaagtgagagatgccagaaatggagaaaacaatggcactgaagatggtgggaatgaaggaatgaggagtgggaatgttggtagcaatgcagaagctgaagagtctcacggtcatggaaataatgaacgcgcagaacataccgaagatgacaagggtcaggaatgtagccacaatgagaacagtgcaagtgtaggaatccttggcgatggagacagtgaagctagagaaggcgatataaatgcggaagcggaacaaagtcaagcagacggtggcggcaatagtaaagcggaagatgctgagcacaatgaatacaccaaaactgacgccaattcaagcaagaatggtactac

SEQ ID NO: 327556 - DNA, 215 bp, Zea mays
caggttcagatgacatggttaaaatcacagttgcagggggactctgaactggcggaggaggctcatgttatacatgtgggcgtgaaagcacccgtccacgagatattcatgatctgcaaattgctcatctccggctatgtatccagcgtagtgtctatggctgctacagctccacttgaaccatcgaaaatattgctagacgtttaaaatccgca

SEQ ID NO: 327557 - DNA, 330 bp, Zea mays
cggacgcgtgggcgctagggctcgccctttttttttttttttttttccagtacgacatgatatgatgcaatacatagatacggtacaagaggttaactgatctgatcggatcggacatttatatcccagctggggcagcatgcaatgggcattcttcagtttggtctgaacggccggcagtaatataatggtgatcttggagcctcatgacaaacaagaggagacagcaggggaaagctagatgcgttttgagacaatgcatgatgcttcgtcacgtacagtatttgtaaatgccaactgctcgtgtccatcaaattgatgaatgggcta

SEQ ID NO: 327558 - DNA, 278 bp, Zea mays
  unsure (1)..(278): unsure at all n locations
cccacgcgtccgcccacgcgtncgcttacgtgntgtcggacgcgtgggcttgcgcgaagggggttacgccccctgtgcctcgcttccatgagaccccacagcagcggcaggaaacattcccacaccagacgccgagatccatgccagtggctcgatcttcctcaacgatggctgcctatccgacctcgctgtggacctgctgctcgccgtcgcgtgtgcactttttactccgagcagaagccccagatctgcgcaagccccgcgttattatcgacctc

SEQ ID NO: 327559 - DNA, 183 bp, Zea mays
  unsure (1)..(183): unsure at all n locations
aggaaccgggtgcggacccacgccgtcnncgcaaattgtattctttcatttagatnnctgtctgagtgttgtataacttannaatgganngcagtagtattctatcagtgagttggtacccctgggttactgagtatttaattttgttttcataatcttatcctnntacagacgattgcactt

SEQ ID NO: 327560 - DNA, 403 bp, Zea mays
gacctttggtctgctttatgtgcttgggagcttcgaatttaattgaacttctccacccatcacttattatacgactcacttcacaatggcggtagcctcatactaagcacctatagtccacggacccgcggagaagaccgctataccctaaaagctagtcggcccctaagtctccacctagccctatctgtgttaagaagtcgcggaagtacccggcctcccgtacggaacgaatacacacgacggccgtcgttagtcagacacctaacacctaaactctagcgaatcgtaagcttaccataataatgattgactcagagaccctataaacttactaccattcatagaataatgtttcagggttctctagtaagtccacttcgacttagtcaactctcacgtt

SEQ ID NO: 327561 - DNA, 269 bp, Zea mays
taaagggttgctgtctcagaggacttaagtccatgcatgtccgtacgtgatgctacaatcactccacagggcgattcaaaccgaacctatcggatgctgccccataatgctccgatcgggcaaatttcggtgccattgaatccaactcttccgtagcataccttttccctgatagacggtgcaactgttaataggattgtattgactgtgtccgttaatagtcgtctagctcgaactgttaacgggatttctatcgcagcggagtacca

SEQ ID NO: 327562 - DNA, 362 bp, Zea mays
gacctttggtctgatttagtgcttgaagtaccggacgtcttcaccccttacgccaatggcgacgacccggaggtcgccgcctacgctcgcgagtctgttgtagaacggtgctagataccctacctagacgcagcggcggataccgcacgtcattggtgacccggttacaacgaaaccgacgagttgcttcctatttaattcaagacgcataaggcgaccaggaattacgtaagcgtgtcagagacccactaaaggaagccgccagagctcgggaagactctaaaggaagacaccgacaggccaaatataaaggctagtatcacatccaacgaggaaccctagaatagtaaagatcacgcctt

SEQ ID NO: 327563 - DNA, 402 bp, Zea mays
catgaaaaaatatatataggggaggggaaaacccctctgctcctccttttgcgtccgttagtcgttgaagctggtgagtctcttgaaagtggtggtcacgggccttagttaggtagacaagttatcgtgatgcactgtggtgctgcctgaggagtctgttgttgctgttaagtagtactttgtggcgtttacggatgtcggggttcctctgtgtgttcgtcttaatgctcttgcttctcctggtcgctctggtactgtccctaagcctgtggagacggatcatgctgtgaaggccgacgacccggcggaggtgcttaagctaaccctaataccgttcctcacggccgagtgagatacctagattgatatcgctaggaaattagggagttacataaggaactc

SEQ ID NO: 327564 - DNA, 193 bp, Zea mays
tttggtctgatttatgtgcttgtttatgtgcttgtttatgtgcttgatgcccatcattggtggtgagtgtgcttggatgatgccttttgaagttagtgttaggggctggttgttaattattccgttggttttaattaaggaaaagggggaaggttttgaaggaaatcctaaggttgcttggttgcttttggaa

SEQ ID NO: 327565 - DNA, 369 bp, Zea mays
tgcgtgtttatgtgcttggatcagcctcacgattcgtagtctgtggaggttacggcggagcctaataagaaggataggactcctaattctagaggtgctgtttcgggtaatttggcgtcggagcctgtgatggatcctaatgtttgagttgagcatcctcggctgtatggttctactcttgatgttattcattgtgcgcctattcttgttcgtaatcatctttggcatgctattgagcatcatggtggtctgtcgctgttgtcgcgtgtttgggcgacgaattaggcgatgtgtgagattagttgtcctgctgataagcatgatgctatgtctgatgctcgttctctgctggcgtctctctagcttaag

SEQ ID NO: 327566 - DNA, 476 bp, Zea mays
acccctggccctggacctttggtctgatttatgtgcttgtttgctcctctcttgtatctgacatttcacttccgatcagtcttgactcggcatgagacggttggtaagacgaaggagccagatggtgttagtttcgttaagactcctaccggtgggtctcttaaggacataagtacgagcatacctaaagaataccccgggaagcacggggacacaaccgacgtcgctacaacgaaggattgtcatatataaaagtttagaggtcccggtcccaccatccccgtcgactttatcgccgccgatagagcgaccgatgacgaatacgccactaacggaaaattggccgaaaccaagagaatgactttcaagggagtcgtcttcccgaaagaccctaagatgaagaagacccccgccggcggaccatttctagtctcaaaaggagacgaacctaaggaaactcccctaagcccgggaag

SEQ ID NO: 327567 - DNA, 471 bp, Zea mays
ggcctggaccattggtctgatttatgtgcttgttgatgtgcctgtttatgtgcctgtggccgtgcggggcgtccgcgatccgtcgcgagcctaagcaccggcctgaggagaagacgagagaatgtcatagtaacgtcttaaatggactcgtctaatacgttcggctgattgtttcagcccgcgcggctcatttcagatagaaccactcgtcgcgccggtccgcgcatcccgaccgcattttaagcaccccgaagcctcgaatccaccctcgtcaaccggcgctcgaagcggacaaaaaaaaaaaaaaagaagaaaaaaaaaaaaaaaaaaagggtggttgtctcagaggacttaagtccatgcatgtgcgtacgtgatgctacagtctcctcacagcgctattcaaacctaacctatcggttgctgccccataatgctgcgatcgggaaaatttcggtgccatttaatcca

SEQ ID NO: 327568 - DNA, 432 bp, Zea mays
  unsure (1)..(432): unsure at all n locations
tttggtctgatttagtgcttgataccctcagagagtcaagaatgccgcactacaggacaccagggaaagtataggaatctcctcccccttacgaatccagtttcggaagtcgtcctccttccttatacggcgtcaggacacacaataaatcgacggatcctacgtgataatagcatagagacagaggacattaagaggcgccgagtttaaacacccataacacgtaatcacgggaaatcctcggatatgttgtanatcacaaggagaatacgcccgcccccgagactgagaaataggaacccggatccaagttaacgaaccgcttaggatatcgctcaacgcccgtcaacagggcctggctgcatagagagccgttctcctgtacggtcgaccccggagcgtcctacagaaacgagtccagcggcgtctcca

SEQ ID NO: 327569 - DNA, 285 bp, Zea mays
tttgggctgattagtgctgttatgtgctggagcgcaatatgtaggtccccaacagcttcgaaatcgtcagtcgccgtaccatcggtcatatcaagcgacaaacaaaaactactcacggaaccacaatacaaaaaaaacgatcgttggcgcatgtctcataggaccaaagtccatcgtacgtagtacgtcatgctacaggctacgcaatacgatcgtaacacataggttgtcggtcgataatccatcaatcggcaatcagacacaagtcattagtatgtcttccac

SEQ ID NO: 327570 - DNA, 407 bp, Zea mays
  unsure (1)..(407): unsure at all n locations
ggacctttgggctggtttatgtgcttgcacaatctcgtattttactggagatctggagctgggggtgttagtgctctgttctgttgctagtagtagtagtagtcgtattcttaccttatggtccttgctgcgtgtcctgctcgtatttataaaggtgatggtgatggtagggggaggagacgaagtcgaagtagtcggagggttctccgggcggttcgatttagcctcttgattttaaggcatcgtcgatcgtgttattgnntattgttttattctccgggcggttccctccctccttccctctgcatttcgtctgaccctgttctgtttaattttgataaaagggaaggggaaaagtggaagagcactcgatccccgttattaacggtgcgcccccccataatgag

SEQ ID NO: 327571 - DNA, 324 bp, Zea mays
ggacctttgggctggtttatgtgcttgtggatgtgcgggcactgtcggcaggcgacactaccttcttagaaacgtcctagaagccgatacactcggtcactagatattacttctagaccaagtgcgccgatattgcctgagtacatattcccggggcgtcccatcccgccgaggccgataccgagtccctagaggatccgttatccaaggaggtatatgttaccggagaactctcttaaactaagaccgaggagtcattcgaagccgagtgagtacctgcctattcagaccctgaacgcgattacaagttggagtacctaacct

SEQ ID NO: 327572 - DNA, 462 bp, Zea mays
cttggccctggacctttgggctgatttatgtgcttgggttcatcggcctagggatacgtcctacaagtaccgagactcttagagttgagttcgagtatggaaggcattaccccgcctagtcctgttcagcgcccgggacggtttaacggcctaaacttggtctagcgttcggtcattaaaacgggaataaaggatagtcattttgactaaccgcgacgccgcgcgcccgcgggcacgcctctctcggagcccgagtcgcggccaccccactgcgccggccgactgcgcccgaaacgtccaacctaggatcgcgatactctgagccgccccaaaaaaaaaaaaaaagggtggttgtctcagaggacttaagtccatgcatgtgcgtacgtgatgctacagtctcctcacagcgctattcaaacctaacctatcggttgctgccccataatgctgcgatcggga

SEQ ID NO: 327573 - DNA, 461 bp, Zea mays
  unsure (1)..(461): unsure at all n locations
ggacctttgggctgatttatgtgcttgtttatgtgcttgtagatcttctcttgtctcacatttctttcattctgttgctgttgctggactcgttacgggggtgcataagcatgctctggagccacggagaaggaagtaacttgatgcgacgtggcctgcctaatgtgcgtgtcgccgggagcataggtagtagttggttactgcttgttctataaggtttatttgttttgataaggtttgttgttctggtcctaaggttaagtaggggcacgccgcccattgtgcttgcgcgaggtgcggcggtaggaagaggttcgcgttgaagggcaccgctcacggtaagtttaagtattagggcactatttagtctaagccttagaggaataagagactcgccgtcgaggaatgggtcggatgaaagtccggcggatctagggcctctaatcntcatcgggcgaacg

SEQ ID NO: 327574 - DNA, 290 bp, Zea mays
ggacctttgggctgatttatgtgcttgtggatgtgcaggtacatctgcgcctggcctacatgtgtaacattccggttaaaaagtccgggtcactaccaaagtgacattggatgacgcgtagcacttaataccgatctaagttcacgatacatcacaatactaacacaactctagccaggcgcatcgtatctagtgtatcaccgtaatttcgagaacgtcaaaatcttatgataggttaatacatactgtacgtaagataaataccggcactcagacgatcctacaaccgc

SEQ ID NO: 327575 - DNA, 445 bp, Zea mays
ggacctttgggctgatttatgtgcttgtggctgtgcgggactaggaaggagtacccgaagacgatacctgctaaactttaagacatgaaaccctggtggatggacgagttcgagaagtaagacgccgattttacgggcttccccggcggaacaacgacagagcgtggaattaactaattcaccgagaaagcgtccgtagtcgaagacgtagagcgccgcacccgttcactggtccacgacgatagcgtagagccgtgtgaatcttttcgcgggtattacccttatcgtattcgcactgacaagcggtcctatactaacgtaatacgtttttcgcgtaagcataatacctggaaaagtagtagcagtagcggaagcgaagaagcacgaacgtagctcgtccgataacgtaaactcggcctaatcctcgcctttgcgtcaacgcaat

SEQ ID NO: 327576 - DNA, 429 bp, Zea mays
  unsure (1)..(429): unsure at all n locations
ggacctttgggctgatttatgtgcttgtttatgtgcttgtagtacgccgaggaggtagagagaacgggcacagataacacggacgcggaagtttctaagaagacgaataaaaataagaagtcagcgaagaagtcggtaaagaagcattacgtcccttccgtactcgaggtcactaccaagtaaaccttctgctcctccggcttcggctccaataaggtaggaaaacctttcattccggcgatatattaggaactttccgagcttaaggccaatgagataaaggtcatagccaagccttagtcgaagaaggcgtcccgtacgggcgccgtcgccggtaatcgtggtacggacgagaagtagactccttagaacgcgtaaacgagcgctaatccntctgcgctgtctccgaaaaagaaacggtagaacgcg

SEQ ID NO: 327577 - DNA, 420 bp, Zea mays
ggacctttgggctggtttatgtgcttgtttatgtgcttgatctgcgtcggagaaggttgctatgtttacggtgtttggtgttggtgtgtagcttagtgttcatactcatgagtctcctaatgaggattcttgggtgggttttgcgctggaggtgaatcggggttcgcctcatgggaatggtattttggcgcattcttcgtatgcgcttggcgtggatgggccttcggggaatgatatgatggattggattcctcgtgcggttgttgatgatgtggattagaaggtggcgtaggtggttacggatcgggtgcgtgggtttgggtgtgttgatcgtatggtgacatagtttgggtaggtgcgtcattagtttgatgatgcgtgtagttatgtgctgcctgtgcctgatgttcatcattagct

SEQ ID NO: 327578 - DNA, 258 bp, Zea mays
ctttggctgatttagtgcttgaaaaaaaaaaaaaaacaaaaaaaaaaacccaaaccaaaaaaaaacacataagacataaggagaatgccttaacgggcgtgttcccacaggccttacgcccctgcatttccgtcacgtcatgacacaatctcgtcccagggctcttcaaacgtaaaaattcggttgcagcctaatactgctgcgatcgggaaaacttcggccccgttaaacccagctgctccgtagaatactttatcc

SEQ ID NO: 327579 - DNA, 436 bp, Zea mays
  unsure (1)..(436): unsure at all n locations
ggacctttgggctgatttatgtgcttgggaggaggttggtgatggtgatagtacctagagttctgtgtccggggtgtccgataatagtcctccagctggtggtgttgggacataggcggctaagaatccttgttatggtccgtatgggaagggtgtgctggcgaagactctgggaggttgcggtggtagcgggagtgtccacctgatgttgaagaaggtatcgtcgacgtgtggtgagatcaatacgtcatcgacgagtttaggagaggtctcgtaccttaacggcgcctattacgccgatgccgagatcgggaaggccgctgtagaacggtggcccgagaaggacggagtcgacactataacgtgagataccgttaacgatagtaagggagtgtagccggaatttcntgggctgatacctccgggttcggacgat

SEQ ID NO: 327580 - DNA, 474 bp, Zea mays
  unsure (1)..(474): unsure at all n locations
gcttggccctggacctttggtctgatttatgtgcttgtttatgtgcttgagtaaattaacaaagcacgagagggggagagatatagaggttctatcgtatatatcgctccgctctctagctttagagtccctccggactgtgaggaacttatcggaaaccccgtaaccgcagcagagaatcgcactgcttgatgaaggcgtacggcgccggttacgggctatggtagggaatagagatgagtaggctggtgtctcttttttagtctaccgacttcgcttctgtcacaaggcagcttcgtggcggttcttgaaccctatctgactgaatatgatacgaagtggttatgtggtgttagctttttctcggtcgtgacgattaacttgaatgacgacggccatggtgcggctgggacggaggtggatgtagatgtggatgtggatgangagacgacggtgcgtggtggtggtngggag

SEQ ID NO: 327581 - DNA, 399 bp, Zea mays
cttggccttggacctttgggctgatttatgtgcttgtttatgtgcttgcgaacgaataaataacacacaatgaacggacgggtacgcacactgctacgtgtacgctttatgatgagatgggagcacattatggcgcagcagcaccacaccaacaaccaacacagcacgcttattcccgcccgacatcatcaagggtcacgcaccgaggtaaaaaaaaaaaaaaaaaaaaaaaagggtggttgtctcagaggacttaagtccatgcatgtgcgtacgtgatgctacagtctcctcacagcgctattcaaacctaacctatcggttgctgccccataatgctgcgatcgggaaaatttcggtgccatttaatccaactgttccgtagtatactttttccct

SEQ ID NO: 327582 - DNA, 310 bp, Zea mays
cttggcctggaccattggtctgctttatgtgcttgattgaatgcatgagaatgaatccgtaccaacagtgtacggacgggtacgtactcgtatgcgtgtacgctttatgatgagatgggaggacattattgcgcagcataagcacaccaacaacgaacgacagcacgcatattcagggatgacatcagtaacggtcacagacgagggtaaatcaaaaagagcgtagggctaatatacaagacactcagactcatctccatccgtctgactacgtcacgatcccggcgcggcacattgcgctccaaacgta

SEQ ID NO: 327583 - DNA, 213 bp, Zea mays
taaaaaaacaccgggtagccgtccacgtcacgggggtaggggagttacctcttacgccgttcatagctcccacttcatcactatattaactcaactcatccgaggcactttaggtctagtcgatcaacgaagttgatgaaaagtccccgacccaactaacatacccacacatctaacctaaggatacctcaggaactcatcggatcataccac

SEQ ID NO: 327584 - DNA, 398 bp, Zea mays
ggacctttgggctggtttatgtgcttgcttaatcggtgacgtaaagaatatccgcgaagcactcgaccaagaggaatactacgggaacacacgacgcggacatatgcgtcacaatatgaagaccaagagaagacggcagctccaccggcgctccgagcatcgactagctctcgatagataacgagccgccagaaacggtttaaaagcggaaaaccgccggagccgacccgaccagcggcgctatacgcgacgtcttacacgaacggctggataagatcgacctagaacgggagcccaagagggacttgctaagcgaaatcccctacgcggccgttcatgatcccggcactaagtacaacaccccgagatgaccgatactacacggacgtaaaacaata

SEQ ID NO: 327585 - DNA, 388 bp, Zea mays
ggacctttgggctgatttatgtgcttgtttatgtgcttgcgtaaaacttattccccacgttcgtaactacgatcttcggcggcgtgtccgactctgtaatcgcatcatcgggaaactgcacaactcctaccggttaacacaccaatctttaggcggtttaatgcgcgacactatagtccgcaatatccgtcgttactgacgaagaggtcgacacctcgacacactccaatcgtttcggcggaagctctcacctgactccagtgacccacgaccgtacgcttcggacaaagtttaaagccgggatagcgcgtcccggcgccgccgtcagctaagtagtaaccacttccgtaagcggtgagaaaggaacgtgtcacgtaacgttaaacgt

SEQ ID NO: 327586 - DNA, 460 bp, Zea mays
ggacctttgggctgatttatgtgcttgtggatgtgcggggcctaataccacgtccattaacccaaaaacagagtctatacatccgtacgtacccacgccgccttcaccgaaagaacagacaacaaaataaggtcacgaaacgacaggggtaacacggcttacccgtccgcgaggcgagaaacaaaagaacgaaaaacacagaccagcgtcgcccctcgaacctacccgacgaaatcggcgccgcctcccgaaccgcccaaaaatgagcgtcacccttcgaatatcactctaaatcagcgccgccctacggaccttttttccgctggagaagaactcctaccccaactatcgactccattacccagaactcaaaatccgactacgcagcgctctattcactagcctctaccacgtctcctcccccacgtcctagagcccacaccgtcaaacacgagcaaag

SEQ ID NO: 327587 - DNA, 327 bp, Zea mays
tttgggctgatttatgtgcttgatcccggggaatagacacacacataaaccacctagactccgcggtcgcgtcaacgtacatcggtcaccgtctgttcatgcttcttttctttttactcgttacttaagagtcctacgtaatcgcctaagcctcattattataagagagccacatcctaataccgaggaataatgcatgtctatgcgtccggggcgtcgggaccggccgcagtccttgtacagaatgtcgtcgtacagccaagaaaggcggcggtattaccgactccgaattatgttccagctatatactagtcgcggagttcatat

SEQ ID NO: 327588 - DNA, 461 bp, Zea mays
tttgggctgatttagtgcttgactacagccaataagctcaatgaggatccgaagtattcgaaaggaacaatagtgatacacaggacgatgagcaaatccttagctaggtatctcatacacgcactagggaccccatacttgccgaaggcgccctccgaaggggattgcacatgtcactcactagaagacgactaaatcaagccgcgctgcgggctcatagacaagaccatcgtaacccatcacgatccggctctcgaagccgctatcgcggtaaggaaaattgagctcctgacgtaaagatcgtgttaaggcctataaaggtgagccggagtcagcatagacgttctatacaatactacactcgacatagataagactcgtacgtagtcactctccgacacctaagagcatgtatgaaattcctgcgtgacaggaacagatgtgagagagaccgaccttca

SEQ ID NO: 327589 - DNA, 398 bp, Zea mays
gcttggcttggacctttgggctgatttatgtgcttgggtggagcctaggcctgcggttggtggcccttgtatttgttctattcctcatagtcttcatcattatattaaggctattgatggttctctgtctcgtggttttgcgtcggattaggctaaggccgcgttcgctaaggtgcagcgaaacgtactgtgagagtgttgagcgatggctcgtctcgtctgatgctcgcagtcgcgtcttctgcgaccaggagtggtgggccgtgaaagcgcggctgaacctcggatttccaggaacgcgactacggagcgtcgagtcgcgtgacgcgtcgcactgaaacccagctgactacgcgcctctcatatgcccgtaacccgtgcccctaacttggcaccga

SEQ ID NO: 327590 - DNA, 376 bp, Zea mays
ggacctttgggctgatttatgtgcttggttaatttcaaggcataccacgagattatcggtttagagactcgggaggacctaaaggggaaggcggacacatctaccggcggaaccggaataggtgggataacactcggcgtcggttgcccttctaaggagaaaaacctcggaaccaaggccaccggcaccgagttcctcgaaagcaatacatctcttggcggaaaattcggcttatacaagacctagggaaccggcgtaggacccgccttaaggaatccggacagtgacacctccgacgaagcaaccgagacactaagcgacgaagtcgccgagatagtaaaataaccggtcgcctaggaaagaccatcggccggaa

SEQ ID NO: 327591 - DNA, 304 bp, Zea mays
gaaaaaaagaaaaaaaaaaaacaaaaaccccatactcaaaaaaaaaaaaaaaaaaaaaaaaagaaagaaccaaaaaaaaaaaaagaagagattaaaaaaaaaaaaaaagggtaattgtcccaaaggacttaaatccatccatgtccgtccgtcatgctacaatcccctcacaaggctattaaaaccaaaccaatcgtttgcttacaaataatactccgatcggaaaaatttcgaatccatttaatccaactgtcccctataatactttttccctcttagccggagcaaaagtaaaaaggtttta

SEQ ID NO: 327592 - DNA, 189 bp, Zea mays
ggacctttgggctgatttatgtgcttgtttatgtgcttgggtcatccttctgctagccgccgttagtaattttcatgcattacatcgcttgggctgattatacattactccggttcggatattcgggtcgttctgtcttgtccatgtgtctgtggatgtgttgagctgttggttgaattagctggttgc

SEQ ID NO: 327593 - DNA, 296 bp, Zea mays
ggacctttgggctgatttatgtgcttgtttatgtgcttgtctatgtgctttgccccagagtcgaaaaagcacacgacggactggagaatcaggtaatagcctccatccgaagtcgtttactgccgctaagaggtcgggtctcacgataaagtcgcggaaacctataaacgagcaggagttcccgttacggtctcctagataacaaataagcgtccgctcgacgtaactcgcgttacggtatggtacacgtcagacggtgagagctgcgtcgtcgattcaacctacctcggtaacga

SEQ ID NO: 327594 - DNA, 440 bp, Zea mays
ggacctttgggctgcattatgtgcttgtttatgtgcttgaataccccgcggcgtcagcggtacagacgctaatagaaacaaacggggcaagggactcacttaagaaaacgaggtctaagtcgggggtcatcctcgaattcgcgaaattaccggagaagttcctagccggatccgcgaaggacgattccgcgaaattactagagaagttcctactcggattcgcgatgggggaattcgcaaagttattggagaagttcctagtcggattcgcgaaggatgagttcacgaaattactggagaagttcctcgtcgaattcgcgaagaatgaatttagcgagttagtctcagtcggagaaaataactgagtctttagggcaagttagatcataagcctcttaaacaacgtaggcaccgacgtattagcagctaagtacgacaat

SEQ ID NO: 327595 - DNA, 260 bp, Zea mays
ccaacaccgataaaggatgagctcgaggtccttataccactgtgctgtttccacccttccccccgtggtacctagttccttcgcccacgtctatttagaaatgtcgttgatagcaaaagacgtcgtcgactaaccgagcgtttgagcgtgtcatactgtatcggactctaatagtggcaagacttccgagagccactgttttcaaaaatgccacataacgacgagtatcaccgaagcctcgtcacgtggtatggatctac

SEQ ID NO: 327596 - DNA, 407 bp, Zea mays
tttgggctgattatgtgctgaggaatcgtggaccaagaggcttacccgagcgttagttaccagtaataaaactgtcgacactttcttcgacgagcatctgcggtgtaagcatggatagaagttaaccaacggccttttatatttgatgggccatcataaacgtagtattgctaggggtcgcttagtaaggaagtatgctgagtgacgcgcagatgatttggtgacgtcaactgcgatacatgaacgtgagtatagctatatttagtcgttagtatagatcgtttagattcagaagactagcaaactgctgtcttacctcggaagtgtggtgagtacgttcccgtattcagacggttacgcagaactctaagttcctgacccctgaccgtagtagtagtaacgattac

SEQ ID NO: 327597 - DNA, 483 bp, Zea mays
  unsure (1)..(483): unsure at all n locations
ttggccttggacctttgggctgatttatgtgcttgtttatgtgcttgtcccgtcacatgtccccaagtataccgcctaaactcccgatgattaccactaactatttcgtcgagaccgcgaacacgtccgttaagagttcgttcggaagtgtaatgcctccttctatgcccgccgtgtcgaagcctccggccggtcacggttccgagtctctctgttcggccttctctactaccccttattcgaaaaggaagcattcacgtaagatggaggaagaagcgagagtggtacgggtcttagcggactcgggacacaatattagggcattaaacgatacgtctactgtaatagccgcctcgcgtcatctagctaccgtgttcccgaccaccttgcctggcgctgtacatcccgtttctggacggtccacagtangaaactagacttcgagagcccatgccttcagtcatgagagtcatggatgaacgc

SEQ ID NO: 327598 - DNA, 426 bp, Zea mays
ggacctttgggctgatttatgtgcttgtttatgtgcttggcttagctaagtaaagcgccagcgtaagcgtcaagactatcgatttacgtgaggccggcgataggggcaatagcggaagacgtaggttcagtataagtagcgatactagtgatgagagcctacgtagcagtacgagtagtatgaagttctataaggtgaatgacctgtggcgggaggtgacttagatggttagagtcagagatgggacttccggattgagctaccctaggtcgtcgaagagatcaggtcttagtgacaccggtagtgcgcactctctggaatcgagcgggattgtgagtcaccctgtgacgaaggctacggataaggtactatccgtaggttggaaaaagtcgtcctgggtctaaatagagaaggagaccccgtaac

SEQ ID NO: 327599 - DNA, 417 bp, Zea mays
  unsure (1)..(417): unsure at all n locations
ggacctttgggctgattagtgcttgttagtgcttggttatgtgcatggaacgagagccgaagaagcacacagtcggactgtagaagcaggtagtaacctccatccgaagtcgtttactcgcgctaagaggtcgggtcacacgattaagtcgaggaaacgtataaacgagcatgagttcccgttacggtctccgagataacaaatacgcgtccgctcgacgtagatcgcgttacgatatggagcacgccagatggtgagagctacgtcgtcgtttcaatctacctctgtagcgaaacgccggagatagtcagagatctcctccaagttagtacctaagagaaggattcgagccacgagtaatatatcgtgtcgagatagtcngcaagtccctattacacgcacaggtcagtcttagtc

SEQ ID NO: 327600 - DNA, 398 bp, Zea mays
ggacctttgggctgatttatgtgcttgtctacccttacccgttctgtctgttccctcttctcttatcttatcttaccttaatgtagtggttctgttttgtcccacaggttgttgtttgtgttatactgttattgctctgtattgctgtggttatttacctctctctgcttactgtactgtcttggtctttagtgtaactgacttacttgctttcaggcgcgtcctagtcacgtagcctagtagtgcgtccttttcagagggaaaagtgcgcacgagtttagcgaggaaaggtagcggaggccacgggagcgagaggacgaggactaatcggcgtagtactaggtgtaatacggtatcaaggaggacgcgccctagcgtaaggggcgtcgtgagtagta

SEQ ID NO: 327601 - DNA, 347 bp, Zea mays
  unsure (1)..(347): unsure at all n locations
ctttggctgatttatgtgcttgcctccacctcccagcacaaaaagacacacatccgctcgaaaggntcgagtctcgtagtagggttagacatcattgctgcagatggggcggacgtgcgtatacgagtctcgtcagatgtcattcttcgagaggtcacgttcctactggagagggtaccttcgccgttatcggcgtatctcacgtcgtcaagcattggtacgaggcgtctaaggagctcggtttcgacgggtcagacgctatacgggttcgtatcgatcaaggcattctaaacaacggttagggtccccagcgctctagtacggtatactccctgaagtccgtcacc

SEQ ID NO: 327602 - DNA, 289 bp, Zea mays
ctttgtctgattttgtgcttgaaaaaaaacaaaaaaaaaaaaaccaaaacacaaaaaaaaaaaaaaaaaaaaaaagaaaagggaaaaacaaaaaaaaaaaaagggaaaacacctcaaacgccttaagtcccactatcctacgaacctaatccaccacccacttccctcgagaatttcccacccaaccgttcgtttccccgccccacattgctcccctcgcaaataaccttcccggccatttactccccccctcccgtactatacatcctcccatttactcggtccccca

SEQ ID NO: 327603 - DNA, 333 bp, Zea mays
tggcttgcgacctttgggctgatttatgtgcttggtgtcgcttaagggtgctttgcctatgcctcgctacggtcgagtctcccggtaaggttataggtcgtcgttgcggatagggcggccttacgtatacgcctctcgtcttttataattcttcgggaagtcccgttcctactggaaaaggtaccttcggcgttatcggcgtaattcccgtcgtcaaacattgctacgaagcgtctaaggagctcggtttcgacgggtccgacgctataccggtgcctcccggtgacggcattcgcaacaacggttagcctcccgagcgctcgaatacggtat

SEQ ID NO: 327604 - DNA, 428 bp, Zea mays
ctttgggctgatttatgtgcttgtaagcaatttatttgttctttttctcccccctgtttttcttcttacttacggcgtgaagaaagcgcaagtacttaagtatcccgctggaggagagggaaagagaggactaactaactaacctgcttcaaacccaatttcttcaaaaattatccacaccatcatccccacccacacaaacttgcttttactttaattacttgttagtttatttgttttgttcgacttgctttagtgaccgtcacgagcccaggcgaccccattatagactccttctcccccccgagcacgcaaacaaagcccgaggcttaggtctgctacgcaaacctgggagtgagcgaaactgggcatgcaggaaccaggagtagagggataagaaggttcggtcgtccggtaatagtaataag

SEQ ID NO: 327605 - DNA, 444 bp, Zea mays
tggccttggacctttgggctgctttatgtgcttcgttataaagtattgacgcgacgcgcatcccacccctattattccacgcacgcaaccgctctgtacgccacactaagagaagcatctcaccttcaaaaaaaaaaaaaaaagggtggttgtctcagaggacttaagtccatgcatgtgcgtacgtgatgctacagtctcctcacagcgctattcaaacctaacctatcggttgctgccccataatgctgcgatcgggaaaatttcggtgccatttaatccaactgttccgtagtatactttttccctgttagtcggtgcaacagtgaagaggtttgtattgactgtttcctttaatagccgtgtagttcgaacggtgaacgggatgtgtttcgcagtggtgtaccaagtgtggtgggcgcggcggccatgtgtagtgcgatt

SEQ ID NO: 327606 - DNA, 251 bp, Zea mays
ctgtaaaactcggacgtccacgtcaagtctccctacctatttcagatctgtgtttaggctggggtcgctctcgtctctcagggtcgggcgacgctccacgacgaatgcgaggccaacattttcgagatagatatctcggatcgtcgaccatagtttatggctattcaacaccataatcgccacttcactgacttcccttcaacatcacctcggaacgcttattggtctaatctcgttggcagatatgacgc

SEQ ID NO: 327607 - DNA, 132 bp, Zea mays
tttggtctgatttatgtgcttggctcagcctcagactgtgagtggttgcctgttctatcggcacgcttccttgcgccttcgatcgcggacgctctggccgccgattctattgctagaactgagaagggggtt

SEQ ID NO: 327608 - DNA, 404 bp, Zea mays
ggacctttgggctgctttatgtgcttgtttatgtgcatggttatgtgcatgttcacatgcctgtggatgtgcgggtcgtgctgtgtctacgagttagttgctttttcagcgtttgtttacttgatagttgtaggtcctcagtccccgctttagatggtaggttgttatttgttaggttgtacttggtgattgcttggtttcgatgtggcgatcgtgactcttcttgcctcatgcgtgttatttcgaactggcgaggtggacattcgtaagtattgattcgtttcggcctggtggactttcgagagttcactcgttaattggcctagaaatctttgacttgtatgggttaaggttgacctgtgtcttcgtaattccttcgtgtgcataatagtcagtgacaaatc

SEQ ID NO: 327609 - DNA, 363 bp, Zea mays
ggaactttgggtctgtttatgtgcttgaaaaaaaaaaaaaaaaaaaaaaaaaaacccaaaccaaaaaaaaaaaaaaaaaaaaaaaaggaaaagaaaaaacaaaaatcccccccccccccccaaaaacacaacaccaccacaaaaaaaaaaaggggtggttctcccaaaggatttaagtcaatgcatgtgggtccgtaatgcaaaattcacctaacggggttattaaaactaaacctatgggttgctgcccaaaaatgcgagaatgggaaaaatttcggtgcatttaaatcaaactgttccgaaaaaaacttttccccctttaatcggtcaaaaattaaaaaggtttgaattaactgttccctt

SEQ ID NO: 327610 - DNA, 415 bp, Zea mays
ggacctttgggctgctttatgtgcttgtttatgtgcttgtttatgtgcttgttcctgtgcctgtcataagacaatagaaatccgcgacccgcaacccgacactaagtccgcggacgggtgaatttctagtggatcctagcgtcgaagacgccagcagtactctaggcttccgttataatatccgcccaaagttccgccgtgagtacggccgcgtccgccgggaagacgaacacgccgaagtcgcaacactccgcgggtaagacgacccggtggccgaggaaaccggaactgtctccatagaagcgatgatgactgcctcgccggtggccgatgaaaggctaggctcgtacgaagacctcgacgatgaccatactgacgacttaacctccctctcggaactcgacctaatcgacga

SEQ ID NO: 327611 - DNA, 460 bp, Zea mays
  unsure (1)..(460): unsure at all n locations
tttgggctgctttatgtgcttggcccatttgtaggtaccgcaccaccggtcctgcatacatccgacggaatgttgggacgccgtcatcaaaatcgccccacgaagaaatacgccggtctagtagtgtacgtagtaagtcacgacggtaaataacgtgggtaacaatccattcgattgaagcgtaagggtactcaactacgtaagcagcaatacgatcctcgataattagctctactaagttctttaactagccggcgtcgtaagcctctacgacggcggcaacgcttaaagataagacttggaatgactcattttcgaaagcggtataaacattagttacgactaaagctaatagagcctcataggcgtcgnaggtctataagccttgtccagatgcaacagtggatacgggcgggcaatcctcgtaagtagcgtacccgacgtcgtaaaagatacaacg

SEQ ID NO: 327612 - DNA, 389 bp, Zea mays
ggacctttgggctgatttatgtgcttgtaagatcgaggtcatacgaggtctacgccggcctcctcgagctcgcggcggagacttagggtatatcggattaagtaaaagtcgtttacagttcttcgtaaggtcccaccagcgtaaatagttggtaataatagtagtttcacctcctccgtacgttatcccatttaaatcggggacagtcctcggctctacggctgcgctagaggaaaatagaactagtagggcccggtacgcggtcgcagactctagatcgtagaccactcgcaatgacgacgccgccgaaggaggtcgcccaatagcgtaagtaagacaatccacatccacgttccaggataagcaacaccgtcccttctcgacgaaaa

SEQ ID NO: 327613 - DNA, 436 bp, Zea mays
tggctctggacctttgggctgatttatgtgcttgtggtcatggccctaattcggtcgcttccccgactattactgctatttcggaagcttcgtctcggatgaggcggaaaaatagtattggccttatgggggtacaccagtcatccaattgacccccacaggcgcccgcgacggctagcgaaggaggcctgcacctcccgcctgaacacccctgtgcgcacgtagccgcaacgcttgtacccgtcgtgcgacgcgcgtacgcgctccggatccgttgccttgacgttccccgcgtcgtctggaacggagacggaacgacgacccttgttgtaccctttacgtcgtgaacggcggcagactcggcacacctcgccgcgacatcgcgatcgatccacggcgcgcccggcccacggagctatctcacgtcccacgaggc

SEQ ID NO: 327614 - DNA, 423 bp, Zea mays
  unsure (1)..(423): unsure at all n locations
tggccttggacctttgggctgatttatgtgcttgtttatgtgcttgtttatgtgcctgaccccccctagggagtaaaggcatactagatgtagagttcaatagcaaaaaagactaaccagcgccggatacacgcgctacacgttccgagtaagagcataacgtcgcccccgcgttgcaagcaccgcactccccttagaatccgaacgtctcccgccgagaacgaagtaatccgacccctctcaccccctcacccttccccctttacaaccttaaacacatcaggtaataccacggcccctacacccttcgcctatcagcagccctccgaccacctctccaacggtccgttctacaatcngacagaatccgaacatcgtcaaggttcctcccggacgcctagcatcaaggaatcacaacctcag

SEQ ID NO: 327615 - DNA, 419 bp, Zea mays
ggacctttgggctgctttatgtgcttgtataaaaggactaaggacgaaaccgagtccggtaacggttcgttagacactagaagtatctggtaacgctcttaggtagcaaaagatgttgggcccgaggccgcccgggacaaggactccgtcgaagacctctttccgttccggcatccgtttccggacttaagttgacctctttcgagcagtccttgcccgattctcgcgggatgtacgaccatttgtataacggctaaggtttcggagcatgccggctccgtcttgtagggtagcgagagggctctcaacccttcggagaaggtcgtagaagggtcggcagagggtggaaagaaggagactcctatgttaacgcatcctccctccgcctggaagttctcctcggaacgagtctccggact

SEQ ID NO: 327616 - DNA, 442 bp, Zea mays
ttggacctttgggctgctttatgtgcttgtttatgtgcttggggtacggtgctgtcgtaggattcgtcgtctctgaataatttgtcggatggtggttcgttgtagcttggtcggggggtgtcggtgggttcggttatgtcggattcgcttaatgctggttctgcgggtgttacattggggcttacggtggtttcgatggggtcttggccttcggtgtcggattataattgttcgatgggggttgcgttagttgagtctgtttggtcgtttagtactggtgtgtcgcattcgaatggtaataattcgatggggatgtcggagcctctggttgggcctcattagtgtacggggtggtggcctgtgctgcgggataattttgggtcgcgtcataatgctgtggttgcggatgtggcttatgtgttgctgggtgcggcggcgcgta

SEQ ID NO: 327617 - DNA, 371 bp, Zea mays
ggaactttgggctgctttatgtgcttggtaggcgtatcggtagaacggttcccgaccatatcatatcaaagttccgcctagcaacgcccaaccctacacggaccgcggaccgaaaaaaaaaaaagaaaaaaaaaaaaaaaaacaaaaaaaaaaaaaaaaaaaaaaaaaaaaaaagaaaatgacgaaatggacccaattcaatccaagaagcataatgacaatacaaattacttaagggtgttcacatacccaccaaagggagtggcaagacatcgtgaagactcccaacgaatacaccgacaagccaaataaaaaggctagtatcaaatctaacgacgaacaataggatagtaaacatcaaagctttaata

SEQ ID NO: 327618 - DNA, 273 bp, Zea mays
ctgatttatgtgcttgaaaaaaaaaaaaaaaaaaaaaaaaaaacccaaacccaaaaaaaaaaaaaaaaaaaaaaaggggagggatgacccaaaagaatatacaacaataaatatgaatacttaattatacagtctaccacacaggggtatttaaaccgaagttatcggttgcttccactatatatccgaaatcgacaaaattttcgcggccttattataaacggttccttaggataccgttccacaagttaccgttggaaaaatttacaggtt

SEQ ID NO: 327619 - DNA, 434 bp, Zea mays
ggacctttgggctgatttatgtgcttgggagcggggacgaagtaacctagcaaagctcgtagggagtctcccggtacgtcctagaagaccgacggcgataaccacttagagatttcgcgttgtacgcctactactaacgtaggttagggaccttggtcctcacggggtattgctaagagtccctccgatttaaagattatcgtaaagacctacgcctcgggcaataagcactagagtaagtcctctgaggcgaccgacgtcagcgagccgttagaaacccccggcggaattcgttgacgcgaaggcggccgtacgaaggtcgataaaggtttccggaaggattttgaaactccgaagacggcctaaagcggcgacgggaggcgcggactatctggcatggttctccctgaggtcttggagaaaacgacccgcga

SEQ ID NO: 327620 - DNA, 460 bp, Zea mays
tggccttggacctttgggctgatttatgtgcttgtcgcaagcagtggcccttggcactcagccgtccgtctcctcctccttgtcgagggtgggtgatcacctccgcttccttcttgataacaaattaatgggttcgagactctatcgcgagatgtcgcaaacaaggaaatacggaagccgggagtcagctaccgaggatgagccaggtttcgcctgcccatactggaccgtatttgaaaccaccttggtcaactaaagcccacacaaaccacagaagtaacttggtctggaactgccttgatttattaacttgatataaatgaataaggttccagtggcgcgtacttagggggtccccgcggtctaacacgcgacgttcccctgttttcgtcgacccctcgcaaacaaaatgacgtcgggagttactggcgcgaccgaatcagcgtctcggcacgtgcgt

SEQ ID NO: 327621 - DNA, 429 bp, Zea mays
ggacctttggtctgatttatgtgcttgtttatgtgcttggttggtgttccttatgctcttagcttgatatcttgatctatcgtttgcgtgttggtttaatttggtgtaacggttgctgatcttgtagttttgaggtttctgacgttcttttgatctgtttcgtgagtttattctcgacttcttgttctcttgtcattaacgtgtgtgtcttgtccatcttgtagatgtccgtgtcttccgattatagttcatgtcgctaagtaggatatggtttctcggatttgcgtatttgctcttgttactagcgtcggtattgatgatggtcaatgtcgttctactgttgctgattcactcgatgttatggattctggggatctgcatatgaatttgggttgacattcgtcgacttgagcatttggtgaggagtct

SEQ ID NO: 327622 - DNA, 434 bp, Zea mays
  unsure (1)..(434): unsure at all n locations
tttgggctgatttatgtgttgaaccgaagtatcgagggctctccataagcacnacgaatttaccccgcgccttccccgtaatcatgaacacgggtctcgtgacttccgtaacggactcggcgcgatacgactcgacgaccttcccccttaacccctcacccaggaaatagcgaccattatagtctacatccctcgcgatccgtagggacggacgggattaaatcacctcacccttatagtccgcgtcattagcaatcctcgcacttccaacgtagtaaattatactagaagaggtgaagtcgatgccacgtctcgtggcggcctcgacgtattctccactttaactggaccgggaggccccgcggttcgtagagtatccctatagaggaatagcgatttaataaaagtcctctggttccgggatacgggatgcg

SEQ ID NO: 327623 - DNA, 193 bp, Zea mays
gacctttgggtctgtttatgtgcttgaaaacaaaacaacatccgtaattagaacctcaaaaataacaaaggttactatcgcagggactaagtccatgcgaattcgtacgtgaagaagctgtcggcggacgagtttgttcatgccaagctgatcgtttggtagaacataatggtggaatcgtgaaaatttcgcg

SEQ ID NO: 327624 - DNA, 419 bp, Zea mays
ggacctttgggctgatttagtgcttggaaatccaaacggagtagcagcactcactacaccggcattttcgccatcgagcacaaccccgaactcacgcatcgctacaaacgagacaaaagggtggttgtctcagaggacttaagtccatgcatgtgcgtacgtgatgctacagtctcctcacagcgctattcaaacctaacctatcggttgctgccccataatgctgcgatcgggaaaatttcggtgccatttaatccaactgttccgtagtatactttttccctgttagtcggtgcaacagtgaagaggtttgtattgactgtttcctttaatagccgtgtagttcgaacggtgaacgggatgtgtttcgcagtggtgtaccaagtgtggtgggcgcggcggccatgtgtagtgcgatt

SEQ ID NO: 327625 - DNA, 132 bp, Zea mays
attataattatttttttctctttttttttattttttttttttttattatttttttttttttattttttattttattttttttattttattttttttatttttttattttttttttttttctttatttttttt

SEQ ID NO: 327626 - DNA, 400 bp, Zea mays
tttgggctggtttctgtgcttgtttatgtgcttgtttatgtgcttgaagccacacggtccggctccgcgtctgcttgacgagtacggtttctgtcgttgcttcttcgtcgcgtggtggtgtgcggtcgtagtaggtggtggaggtgtgtttttattatacggatattgatagtagtactgatacggattgtggtagtgatgatcctcctcttactgcggggcatctgttggaggattcgatgtagtatgattggtctgctaggtcgcctgaggagcgggcggttaagcattgtaaggtgcatggtagtcctgaggagaagtcgtgttggcctgaggcgcctaaggataattcgtattatactgatgaggttaataggaaggaggctattagtcatcggtc

SEQ ID NO: 327627 - DNA, 430 bp, Zea mays
  unsure (1)..(430): unsure at all n locations
tttgggctggtttatgtgcttgtttatgtgcttgtgttcgcgtccggtacgtgcgaagtcgacactagaaacaagacgaccgtcttattctcgctaaattccgaaggcccaacgctaccagatgatcccgatgacgtcgaaggtggtcttaagtcggaatgacctctatgggagatgtcggacttactaccgctacggaaggatgcggagcggtctaagcttactattagttcgttgacctcgtctaagggtactgctattgtggaagatgtgaggaaggttgcggaggtgggggtggttggtccgactgcgcttaattatggtgtttggtagtcggatcacgtgttggttattactctggtgtctgaagaggcggccaaggtggcggtggnggtcgcgttggcgtcggcggatggtggtgcttggtgtg

SEQ ID NO: 327628 - DNA, 404 bp, Zea mays
ggttggccctttgggctggtttatgtgcttgtttatgtgcttgtttatgtgcttgtttatcgtgcctggctgtctcctgaggttactcatgactaggtggtgtttatggactcgaattttaatttggaacttctttttatgcgtgcttctgttagttttcatgctaggttctctcctattcctgtagaggctgatgataatggtcattataattagatcccttttactatttattttgatgagcatagttctcctcctgttaatcgtgtgttggagattagtgctagtacggaggcttgtattgatacgcataatattaatttggatggtattagggatcattctcttgctggtacggttctcgctttaatgactcatgttcctcctgttgctcgtcacgctgc

SEQ ID NO: 327629 - DNA, 444 bp, Zea mays
ggacctttgggctgatttatgtgcttggacgccctcagcttcaagagagtcagggctcgaaaagaaccctaccgcaaaaaaacaccgcgacacgggagaagtcaccggagaaaacgagttacgtatcccgccgttcatagttcgcaattcatcattatattaagtcaactcgggcgaggcactttgcgtctagtgtatcaccgaagttgcggagaagtcgccgtcgtaggggacgggcctagccaccgaacttaaggataccaccggaactcataggatcttaccaccggacgattatggataagcttgccattacacctattaaaagtaagcataggccattggacgctactgcggaaatgtaaacgcttgccacgtacggtccttccgtcttaaaagtatcgcgtacgcaacgacgtcgaacggcgcccgtaagccgacaag

SEQ ID NO: 327630 - DNA, 435 bp, Zea mays
gctggacctttgggctgatttatgtgcttgggctcccctaacgcctttaaacgctctcctggatcctaccgacgagccaactaaggtagacgaccccgatacgaactcgatcgccgacacgtcccacgagtcgaatctataagacacggcctacgacgacctcgaggccactaactacccctacgacgacctcgaggtcattaacgattcctacgacggtaagggtgcattcggcgtcgaccattataagatcgcggcgtttgagagcagtagtaatacgaactaagattcgtagaatgaggagctagtaataatcctcgacgcgaaactcgcgtcgttaaagcctctatagactaacccgtcctataacgattcgagttcgttcgacgacgacaagctagtggcgatcctcaccgtaaaccgactccctacact

SEQ ID NO: 327631 - DNA, 398 bp, Zea mays
tcttctttcttgtctgtcctgaatttagggtttcccccaagttctgggtgacttggtcacataactcgtcagggcccttcttggttggtttggctacgctcctgctggtggtgtcttcttcttctttttcttctattgctgtcggttaggggttggctcgttagaggttgtttgctgttgttgctacttcgtagtaggtgcctattcgctgagtggcggatgttttacggtcttggagctattgtcttggtcctacggatggggacgacggggtttcgtaaaacgtagcaatatccgcgtcgtaaaataaggaggaccccgctgtcacctccctccacgtcctgcggcgttttcccctcaaaacccctaggataaacccctaaaaatcgctacttccc

SEQ ID NO: 327632 - DNA, 475 bp, Zea mays
tggcctggacctttgggctgatttatgtgcttgtttatgtgcttgtttatgtgcttgggaacgcgaagacacggggaatactattagaccttaccgacgtcctcgaggatagaaaaagacccaacgtaacctctgaggagtcctaaaccgaatagttaaagggagggaccgtaagaagcgagctcgacgttccggtaaccgttctagaagcaggccatttcgccgcggcttgcttactacacgcctccggcggatgggtaacggagaccgcgcataatgatgaaaaatcgactaagcactctgtaattgtggcgtaagcagacttagaaaggttcgccccagcggataaacactcaaccgacgtagccgaaaccgacgccgacgtaccggtcgatatagtcgggaacgccgcgaccggcggaaccacggagtacactgagtaggtcggcacatacctaggcgacctagtacgcct

SEQ ID NO: 327633 - DNA, 354 bp, Zea mays
ggacctttgggctgatttatgtgcttgtttatgtgcttggtgttttgtggttttgctgggcttcttctttcttgtctgtctggaattagaggttctgtgatgctctgtgttacgtgggtctgtgactcgtcagggcccttcttggtgggtgtggttacgctgctggtggtggtgtcttcttcttctttttcttctattgctgtcggttaggggttggctcgttagaggttgtttgctgttgttgctacttcgtagtaggtgcttattcgctgagtggcggatgttttaaggtcttggggctattgtgttggtcctgcggagggggacgacggggtttcgtaaaaggtagcagta

SEQ ID NO: 327634 - DNA, 426 bp, Zea mays
tggacctttgggctgatttatgtgcttgaccgacggagaatacggggttacccacgcctgtacacccgacccgagagtcggaggagataagactatgtaggtcccgaaactcacacgtcggaggagtaaggttacttaagcagaggtcggcaagtaagtatgattggagaagcccgagacttcagtcaaaactaagtcgatatcgtagttacggatgctgagtccaagaggcggctactaagaaggtacatgagacggattccgtttagccgcatagttaacgatatcactatcataaccctctaaggacaggggcgccgtccagtccgcagtaattgacgataacgcccacccccgcatcctgaatcacgcccgaaagtacgctccctcccctagatagcggccgatcggcaaactaaccgtaga

SEQ ID NO: 327635 - DNA, 445 bp, Zea mays
tggacctttggtctgatttatgtgcttgtaaaactcggacgtccacgtgaagtctccttaagtatttccgctctgcgtttaggcggaggtctctgtcgtctctcccggtcgggcgacgctcgacgacgaaggcgaggccgcctttttcgggatagttatctcggctcgtcgaccatagtttatggctgttcaacaccttaatcgccgcttcacggacttcctttcaacttcacctcggaacgcttgtggctctaatctcgttgtcagataggacgccgtcaggagcccggccgacctgtcaagagcagacgccgctcgcccgtaagaaataaagccggctaaccgtgactgttgtatagccccgctaacgccaggtgtcgacctcgataacaatcctacccgctcgtttctggccggggtaagcggcggggcgtcgaccctccgg

SEQ ID NO: 327636 - DNA, 333 bp, Zea mays
tttgggctgatttatgtgcttgtttatgtgcttgaccgcccccgctctcacggaccatagtcataatagctcaaacagtcgaccgcaacttgaagtgaatagcttaaatagctctccgccccgagccattaagggaccccccgcgcgatctcgacaaaagacgcaatcgaacgccccaccacagcccacattacccgaattgcatccccaccgtctgttaaaaaaaaaaaaaaaaaaaaaaaaaaaaaaaaaaaaaataaaaataaaaaaaaaaacgacaaaaaaaagataaacataacactctataaaacaaggatacgcattaccgaaagc

SEQ ID NO: 327637 - DNA, 427 bp, Zea mays
tgcttgattaagcttaatctaacgaaacatccgactctaagctcgacatcgaccctacagttatataggacccctcgagcctacgtcagatccatcgtataacatacccaacccttaacactcagacaccataatacctacttagtacgaaatcgccgcgtcgaccctccgaatcacacactacgccacaagtaaccaaaaaactcctctcatccgaacgcgtcagaccgattacattcaggttcccgcccttcctaaaatcaaaccgattcacaacgcgcgataaagggagcatcgtctaattgacccacggcgccccgagtcaaacacacgcgtttcgcccagcatcgacctaagcacaagccattcgaccagcgaattttagattaacttttagcagaacttcgcctaccaggagtacgggaac

SEQ ID NO: 327638 - DNA, 428 bp, Zea mays
cattaacctcgggattaatgaaactgtgaaattatcagaatcaaatggatgcaagactgaacactttgtaggacccagtaaaattaatgctaataatactatttcttgtggagagggaggcgaacaatcagaaagaatactgcaggatgcaaatggaaatggccagccaatccatcagtcccagtatcttggtgagaccagtataggcaatgccacgcccgctcaacaagagaccagtaatggcaaggcctcacatgctgaacaatgttttgaggggtcatctcaccaaaaagagcatgcaaactctttaagaaacaaacgccaacttgaagaagataagtttcagaaaatgcttgctaagtcagcttcttctgagcttcggctgtctgtatggatggaatgatgctataattttatgcgctcgcaaa

SEQ ID NO: 327639 - DNA, 388 bp, Zea mays
gacccacgcgtccggaagagacacttccgcagaaagaaaatgatccagctgatgatgccaaggagaatggagtagcttaatcgcaagaaaaatgaagaatgaatacaattaacttctctgctggaggggcagtaacacgcagaatcaaaaccatggcagtatttgttggtagttgtatttgcttttgctccatgtagcctctactccaaaacactttcttgacttgatatgatgctgtataattctagtgtcctatcagttttcagcttgcttatggtgcaattaaaattctatgtgcctgatgaaattgttcttatgaatgaagaatgataccaggactatgttcgttggcaaaaaaaaaaaaaaaaaaataaaaatggaagaaaaa

SEQ ID NO: 327640 - DNA, 293 bp, Zea mays
atggtcaagactctttcaacaaggcctgactccaagcccaagagcggttcatacaggtgcaaggctcggcgaaaactgggacatatatgggggtggcaataataaaaaaggtgtttctgaaacactagtgctcaatatgtcaactctgacatggtcagttgttatcactctggaaagacacgttcctcttgccacagagggcatgactctagtgcatatcaattacactgggtatgattatatcgtctctttttgaggatacactggacgatacaacaacgcggtgtacactc

SEQ ID NO: 327641 - DNA, 336 bp, Zea mays
cggacgcgtggggcagtgcaggtcgctttcttccccaaaattttgaaccccgaaccctaggtctgctcctcagttaccccgtgtccatggacatcggcggcagcggcggcatcatattgtcgcccggatcggaggatgataagtttgcgcggaggcgctcccgccgtgtgagcttcgcggacaccaccgcggtgcacgtgttcgaccgcgacgaggacttcgagacgccttccgaggagcgcgagcccgactccacccccgcacccccttctcccaggaggtcctcggttggccgggaggttgaggacgacactgaggaggatttcaaccgccccc

SEQ ID NO: 327642 - DNA, 280 bp, Zea mays
accaatcttcatttactatacaaatttatttttaaaacttcacccttcactcaagggtaggttcttattatctctaggctataactcaacactccactcttattacataccatcaaacttatcatctacaccaaagaccactttcatagtccagacatcaaccttcacgacgaccgcttaatcacccattgtgcagacatcaacgactggcgcattgcccgagcagtctactcccaccaacgcccaagcccataccaacgctgctactactgctcatccc

SEQ ID NO: 327643 - DNA, 444 bp, Zea mays
  unsure (1)..(444): unsure at all n locations
gacagggatgagctcaccccacaaggttttcctgagccccggaggcggggccacgcgctgggaagccctctcaggaaacgccgccaggacaggaagcagattggaggagaaaaaccgcaatcttcattcgcggaaaatccaggtgcttatgggagcattttcacagaataactagaataacgaggtatttgggttttttaagcaccggggtgttaagtcttccttcaagaatcacctattgctgaaaggttgttttattcggcggaagtttcaacatgtcagagcagcctgccccgtccgggacaggtttcaccgtcgggagacaacatgcctgtccttcgncctcccagccacaacgtgtccttctgtgcacgtttcagctgaaaccttgcatttagttttctaactcagagggtttgtcaatcttttacctgcgaactcctg

SEQ ID NO: 327644 - DNA, 321 bp, Zea mays
cccactcttacaccaaatatcaactttaaactcccattttattcacaaccccatccacctacacatccggcaagttcttacccaccacccgcccgcccaacaacaccaccacccctacaaccacccacaccctattcaaaaacacaacataaccaaaaccaatctaccaccaattttccaccacaaactaccatcacccctccataccaaatccccaacacttacctatccaaccctaatactacaaactcaaacatacactaaatttaccacactcactcaaccaaatcacccacacacttcacaacaacctccatacca

SEQ ID NO: 327645 - DNA, 372 bp, Zea mays
  unsure (1)..(372): unsure at all n locations
cgcccgcgaggggccggggtcggggtcgcctgggccatgcgcgcgggctgggcagggggcgtgcggtgcgcagagcggagcggcctcggagcctgagccgcccggggccggggccggggagccgcgcggggccggccggccggggggaggggagcgatgcggcgccggcgggcggcagtggccgcgggtttctgcgcctacttcctgctgggctccgtactcaacgtgctcttcgctccgggctcggagcctncgaggccaggccagtcccctgagccttcgccggccccgggtccgggccgtcgcggaggccgaggggagctggcccggcagatccgggcgcgctacgatgaagtgcagcgctattcccgc

SEQ ID NO: 327646 - DNA, 201 bp, Zea mays
gccggatctataaccctaggtgcagcggcctagattgcccccaagcgctcggctccacctgcggcgactgacctcccgggtgcctcctacgaggagaccgactatggttcgggctcctacgaggaggaggaggacgatgaggacgacgatgatttgtagaccgatctctcaccgtctaccgaagatatcgagagcgatgct

SEQ ID NO: 327647 - DNA, 435 bp, Zea mays
  unsure (1)..(435): unsure at all n locations
cccttcccctttagggaggtccagcctcgcaagctgaaacctcccctcggctcagggctgggccaggcggccacagcaggactggccacacccacgccgcacctcatccgtgcacgcgtcggagcacggccagccttccgccacgagccagctgggaagggccgcggctgcctaaagccccagtcaacccagcctgtgtctgagcagacagggcgaacaagcaggccacaccgtctcgagggaggaggccagatgcggccagcgtctccaacagggtgaccatccgctcggcttgctgagcgtttaaacaaatgtttagacaggctgtggggactcccctgagttgagccctggccagnggtccggtgctgtcgcgggaaacctncagcctttttcttcaaaccactcagctcatgtgttttgcactgactagta

SEQ ID NO: 327648 - DNA, 172 bp, Zea mays
cccacgcgtccgtttttttttttttttttttttttttttttttttttttttttttgattggtttttttttatttttttttaatttatttttttttcttaatattatatttaaaatttattatttactattaaaaaatcaaaaaaaaataattaaaagtcaatccaatcttat

SEQ ID NO: 327649 - DNA, 79 bp, Zea mays
gaataacccggaccgacccactcgtccgcccacgcatacgtacatttattattttcttttttaccctatcttcttttta

SEQ ID NO: 327650 - DNA, 407 bp, Zea mays
cccacgcgtccgcggactcgtgggcggactcttggggtgatccggaacctccctgagaagtgcccttactagacaacactgccttatcctgcaccctatctggagcttctcctggcatttatatggtgtcttatggtttcttgtctgtcgctgacaacgttggcgcttaagatatttggaataggactacaccttccatagtttacgttgaactctgtggtgctgaagcagctgttgccattatggcggaaattgctgacgcctgattgaacatgtacagtttttattcagttaaacaactgggcaaaaaagttagatgctcatattcatcacacaaaattgtacttgtcaggttatttatatacgttacctgaatactatctatcactctaatatattaatcactc

SEQ ID NO: 327651 - DNA, 348 bp, Zea mays
cgcttaagtacaattcaatgcactccttcttatctccactcatataaactagtaagggatggttctaatacccttcccgcctgttgaaaaaccacctcaattaccctcttacaccaaacgaaacaccattcatcctccaaactctaagcatttctacaaacacaaacttttatttaactgcttgtgatagactaatcgaactctacggtttcacgtccctttacaataacacgtacaccaaatcctctctccttacccatcaatctttctagaacatgcattgcaacacaaatgctgctctcgactactatgtttcagtcaacaactactcctatgtcttcacattct

SEQ ID NO: 327652 - DNA, 338 bp, Zea mays
gacccacgcgtacgcccaggcgtacgaccactcatcttcccactttaccttcaacacctctgctctcaatacacgacatgtaccacacaccatagctactgcccacgctaaccatgcatccaacaccagccagactcccacttaaataacacctcactcttaaaaatatcgacccactcgacaatcacaagaacgctttgacataccaacttctggacctacgagcaacaaatatttttactcggactataccacctcagattccacttacaccctgcatcttctaaccaaatctttcttgaacgatacccttcactacttgatcaacaaatttgcct

SEQ ID NO: 327653 - DNA, 213 bp, Zea mays
ttattccatgacgtacccatacagccacacccctacagcacctacatcaaacgatcgattctaccacacctctttcaaaacgctcctacaaatacatcaaacatggacatatgaactatatactcaacatcataaaccagatttactatctacacatgcgacatacattatactgacgcattatatacaaatttatcatccacactctatcga

SEQ ID NO: 327654 - DNA, 348 bp, Zea mays
tcgtccacgcgttcgcccacgcgtccgcccacgcgtccgcggacgcgtgggggcggctgttcgcgggggagccgacgccggcgctgctgcgcacgctcgccgcgctgcaggcgctgtccgtgggcccgctggtggacgcggccactgcggcgctgcggtcgccggcggtggccggcagcgcgctgggccgggccgccgccagggccacggcgtaccggcacttctgcgcgggcgagaccgccggcgaggccgcggcggccgtgcgccggctgtggcgcggcggcatgggcgggatcctcgactacgggatcgaggacgccgaggacggcggcgcgtgcgaccgcaacg

SEQ ID NO: 327655 - DNA, 182 bp, Zea mays
gtcgccctcaagggcgactcgggggcgactcgctcgcaccgccgccgccaacccggaaagcagtacagcccggccgccgccgcctctcctccggctaccggcggtggcagccagcggcggcgccccaaaaagggcctgccccgcaccccttcctctcctccctctctctcccacccacccct

SEQ ID NO: 327656 - DNA, 337 bp, Zea mays
gcaccctgctgcagatgcacacacagacacttacagctagcaatgccgggggcaggcaggggcccgtacgtacgtgtctctttctctctctcatcttgtcaccgtacctatctagagtgtgtgtgttcgtactaattaaaatgttcttgtcgtcgtcgtctgtgcatgcatgtaccatgtcgtcgtgcatgtctattatgtgtgtgtcgtcgtgtcgatcggtacgtatagatgcctgttgttagcatgtgtgtcattacctagtcgtgtgtagtgtatgtatgtgcttgccgggcaaaagttgcatctagctaaacagtagtattactttttaaaa

SEQ ID NO: 327657 - DNA, 210 bp, Zea mays
cccacgcctaccaaaaaaaaaaacttttatatcaaataataaaaaaacaaaataaacgaaaggttaaaataaacaaaatactaaccaacaaaaaaaaaaacaaaccacctcaccacttaacaaaaataaacccatctaggatctccatgcagacttgatctcaatcacatagatcccttacttataccaactcattacaacaaactcctt

SEQ ID NO: 327658 - DNA, 374 bp, Zea mays
ggaagtacacatcccaatcacccgtgtcaggattcactctcaggagctgggtggcaggaaagtcaatagcccctgtggcaattgcaggaccagctggagcagggttgcggtgtctccacggtgctctcgccctgcccatggccaccccagactctgatctccaggaaccccatagcccctctccacctcaccccatgttgatgcccaaggtcactcttgctacccgctgggcccccaaacccccactgcctctcttacttacccccatccatcacctggttttgactaatgctgcttccctctctgggcctggctgccaggatcttgtgtccctaagtccctctctttaaagaacttctgcgggtcagactctg

SEQ ID NO: 327659 - DNA, 396 bp, Zea mays
catcctacttgtccagaaggtaaatttacacagccagaaagaaaaggcatcggctgagctgtcagatcaggacaggctgtggatctgtggcggtactctgaaagctggagctgcagcacaccccttttgtattgctcaccctcggtaaagagagagagggctgggaggaaaagtagttcatctaggaaactgtcctgggaaccaaacttctgatttcttttgcaaccctctgcattccatctctatgagccaccattggattacacaatgacatggagaatgggaccccgtttcactatgctgctggccatgtggctagtgtgtggatcagaaccccacccccatgccactattataggcagccacggaggacggacagtgcctttggtttttccg

SEQ ID NO: 327660 - DNA, 262 bp, Zea mays
cccacgcgtccgcccacgcgtccgttagcactggcgctgatgtcgatggacgaggcgctgggtgcatctgccgctgacgcggtggtgacattgctgtgggtgctgcgcgtctccacgctgggggcctcgacgacggcggtgacgttctacctgaagctgcagggcgtgcacttctcactcctggtcacagactgcctaatatccatgctgctgttcaagttcaatatactttgagacgcaatcctgggagctagcttaaacc

SEQ ID NO: 327661 - DNA, 129 bp, Zea mays
cacacataaacaccatacaccggcaagttttaaacacatttgccctcacactccctactcactcaacacattacatcaacccctcatcacaaactcatcttacttcaacctcatatactatctttctcc

SEQ ID NO: 327662 - DNA, 377 bp, Zea mays
gccgacggctcgactccactagtcgctggtaccctctgcaacaaagccgcctccacctgagcacctattgagctcttccccttcctcgtgggttgtgcgagccctctaccggcgcgcagtacaggggctgattgggtgatcaaacccgcaagatttggttttgtgatttgggagcaggaggcggtggcaatatgccttgcccactccgttttttgttgagctggatggtagcttggcgttcctaattttggacctctggcttaaaagcgaaaaaaatacccctgcaggaatataaggcgagatctactggaacttcaggaacttcgtctaaaagtttccgtgatctgtacaatatgaagtactcgagctacttaaac

SEQ ID NO: 327663 - DNA, 64 bp, Zea mays
aaagaaaaaaaaaaaaaaaaaaaattaaaataaaaaaaaaaaaaaaaaaaaaaaagggaagagg

SEQ ID NO: 327664 - DNA, 215 bp, Zea mays
aaaaaaaaaaaaaaaaaaaaaaaaaaaaaataaaaaaaaaaaaaaaaaaaaaaaaagaaaggaaaaaaaaaaaaaaaaaaaaaaaaaaaaaaaaaaaaaaaaaaaaaaaaaaaaaaaaaaaaaaaaaaaaaaaaaaaaaaaaaaaaaaaaataaaaaaaaataaaaaaaaaataaaaaaaaaacaaaaatttataaaacttaaaatattaaaaaa

SEQ ID NO: 327665 - DNA, 452 bp, Zea mays
  unsure (1)..(452): unsure at all n locations
gcgacagcaagaaagcggaccccaacctgctggggggcgccatggtcggcgggcccgacgggaacgacggcttcaaggactcgcgcaacaccttcgggcagaacgagccgacgctggtaggcaacgccggcctcgtcgcggccctggtggctctcaccagcagcggcaggggagtcggcgtaaccgccgtcgacaagaacaccatgttctccgccgtgccgccaatgttccccgccgcgccgncaccaccgtcatcatggaagccatgacgaccgtgaacattcatggtcatacgattttttgtgatcgatcacgtacgcgcgcgaattctcttctgtacaataccacacgtaaattaacagtacgtgtaagcaaatatatagtacgtagcgcacggtggatcatcggncggacatgcttcacgtgtgatggttntctatggataatgagtg

SEQ ID NO: 327666 - DNA, 446 bp, Zea mays
gacctttgggctgatttatgtgcttggaactgtaccctccgtctcccggctctcttagaactacttcttggttagtggcctccggggcatctgcctgaccgtcctattacctcccttcgtcttcgtctcccggtaccccccctatcttctttactgaaccgctaacttaggaactcctttgagacctgtccgtttatttcccctcccctaagcggactcgaatccgggagggaattttgacgtagttgtggcatggagaagtatgatagttgtcgttggggtggcatgtgtcgcattatcctggtattagtggtgttgttgctgttgttgttattgttgcgatttacttgcctgacgccactaaagctaggtcctaaacgtagtccgtcgggtaaagaagaaatccagccggaacggcatccaaagctatagtattcatagggggg

SEQ ID NO: 327667 - DNA, 430 bp, Zea mays
aacctttgggctgatttatgtgcttgtttatgtgcttgtttatgtgcttgggtcgccggtagcctcggactaaacggcaatggttgggaataaattggcaaactcgaaagttagcgaccttattactgagagcctgagatatgaacccagcacataggcccgcccctcggagaccgaagaggggacagcgtatacagaaaaatcgcctatcgcggcccactgagaccccagccgacatcgttgaagcacaaccgcgtagactgtaagaccggccgctcgtcacgtccaccgtccacggtacgaccctctgctaagccgcatccgagctagcaccctcgtatggtcaccaactctcatacggcatctcgcctaaaaaaaaaaaaaaaagggtggttgtctcagaggacttaagtccatgcatgtgcgtacg

SEQ ID NO: 327668 - DNA, 321 bp, Zea mays
cctgatttatgtgcttgtttatgtgttgaaaaaaaaaaaaaaaaaacacaaacccaaaaaaaaaaaaaaaaataaaaagggaatggataaaccaacacgagtttgtgccaccatattactacgtgataatacaatcaactcacagcgtaatccaaacccaacctaaccgttgatggcacataatatacagatcaatcaaatttcggtgccaactaatccaacagttcacttctatacatctcccccgttaatacgtgcaaaatttaacagcttcgcatcgactgtccactttactagccgtttagatcgaacgttcaaccg

SEQ ID NO: 327669 - DNA, 429 bp, Zea mays
aacctttgggctgatttatgtgcttgtaaagtcccataataaagatttacccttacaaagaatattaaacaaacaagataccacttatataaaaaaccataaacaaacacgcagggctaattaaaagttcgtactctagcctcgccatgtacgcacatctcgtatcctaaaggatacgccctagagccaagatcatatcgaaaaatcgtcgcggagcactacaatactgccccgcttcacctgacgtaggcgatgaccgtactcttacttagataggacgtagtaatacaaacacatacaatgcgaaccgcggattaagttacggaactagtacaggcggatcaggttgagataatataaaagtacgtgcactaaacgccatagcaagagacgctaatacgcctagaattacgaacggcgctagaacta

SEQ ID NO: 327670 - DNA, 426 bp, Zea mays
cttggctctggacctttgggctgatttatgtgcttgtttatgtgcttgggtgattgatgccgtcgccatctttgtgttgccggcggacgtggtttgagaggtgtttgttgatgttttggtggtgttcgtcgttgatgtgaagttcgttaaggttaacaaggttattgcgttcaagaagtgtgttagtttgatttatttgttgcatgttgagacggctctggaggtgactatgctgtctaaggagaggatggggcttagtagtcatgtgaccgttaagcctgcggaggataagtataaggttaagtctacgtttaatccttgtaagtcctcgaatgcctagtctaagaagtctgctgttggtcgtaagtcgattaaggcgcagaatctgcataagtcgctgcatgttattcagttgaactttaagtt

SEQ ID NO: 327671 - DNA, 435 bp, Zea mays
  unsure (1)..(435): unsure at all n locations
tggctctggaactttgggctgatttatgtgcttgtggatgtgcgggtggccgtcccgtcgaacggtcgacttgacttggccaattctctgttagtaggcgtgcttggaatgttctttctggtgctagtcgtctgtaatgtgtctctgttactgggtcgtcggattgtcgtggtgatgtgaattgcgatgaggttgtttcgttgtattttgttgatgttagaggtctgtggtgtttctctgttgtaattgggtcgttgtattgtcgtggtgaggtgaattgggatgaggttgtttcattggttttcgtggtcgtggtggtgttgttgtcttgtggggataggcgtattcgtcttagcgtttggagtcggagtcttgatgggcagctttggatgtatatgacttggngttttgtgtttgcggcttatccgaatgata

SEQ ID NO: 327672 - DNA, 440 bp, Zea mays
gaacctttgggctgatttatgtgcttgggcgtcttcacatagtgacgcagccccatacttaactattacgccaccatgaggggccggggaaaattcacctaaaatctacccatttcccaccccaaaactaaagtatattctataccattccccgtattaccgggagccacgaagtaccggttcgctcaaccctacgtgaaagggttcatagtcgagccggtcatgcggcacgagcagtatcttccaggcttcgaacccagtctcgtacgggagtaaacccgagcacgacttcaaaatacttgtctgctcgctttatgttaaagtataagctcaacgtctggtttcgactgcggacggctagtgacgtacgggcctgcggtggccctcagatccgtgcgatgctcctccagcataacgcctaaggtacgctcgatcccccc

SEQ ID NO: 327673 - DNA, 60 bp, Zea mays
tcgcggacgcgtgggcggacgcgtgggcagttttagagacctgtggacctgtactggtat

SEQ ID NO: 327674 - DNA, 320 bp, Zea mays
aattggtcctaaaatgacctattttactattttaaattctgaattttaagtataagactgtgttttatatatcaattcagttctaacatgtgttagtgcgtctaaactcaatatttagactgcaaattgtactatgcattgtacatacttgtctgattgtaaaatgaaaattgcagactcgtttatgaaacagcttccgcatctagctgtggaaaattactgctgtgatatgccatatcctgacttgagcttttctgaggtcacgtctgccgttgtacatgataacctgtagcctcacataccacgctggtgcccgagct

SEQ ID NO: 327675 - DNA, 428 bp, Zea mays
  unsure (1)..(428): unsure at all n locations
ctttgggctgatttatgtgcttgtctaatcctgatgttgagaggatgatgttccctaaggagtggttggttccgctgatcttggctaaggattgtgtcggcggtgtgatgttcgttagggagtgtggggtcgtggtgatgttcggcagggagtggattgttgtggtgctgttggtgtcgagtctcgtgctgccgaggaagagtagtagtgcgtcgtttaggtcgattaggagtaagagtcccgctgtggatagggactagtagtactttaggacttttaagagtttaccttttatcgagaagagtctggcgagtcgtatagttctgagggtgatgaggagggcggttaaggaggaagagtttcttctgttcntcctcgacgacgagtctggaagtctggntatacttattaagaagtgactggtgata

SEQ ID NO: 327676 - DNA, 438 bp, Zea mays
aacctttgggctgatttatgtgcttggaggagacggacctctggctagcacctaccggaaacgccgatcacgtgcgtatcttagaagaagcgtagtagtatcctaacctccgcggaatcgctaatagagccataacttcgatcgataagcccgggtaattaaaaggccccgtccatgcggaacccgcggaagccgaagtcgcctaggaagtcactaagccgaatgagctagagccgtatggctgttaatctaaggcggtattgaagaggatcaatgccttcgggacgaagtaattttgtggctgaggccctaacttgcattacggttattttcatacgaggttgcacggccacagcttccacggccacgggagaccttttagaccttgttgtttgtgaagattccacccccgaagtctggcctttacccggtagaata

SEQ ID NO: 327677 - DNA, 423 bp, Zea mays
tggctctggaacctttgggctgatttatgtgcttgggcgagaataaagagtcgtgggctggggccccgacccgccggacgacactccgccgggccacaaagtcgaacgattaacggacaccggtaccataacagatatatcaaaaacacacgtcgaaagctagaaataaaacataacagagccgcgaagaaggcacccccgataatcacgtactgcattcactccggcggtgaaactaatcctatcgacggactcaccaatttaaaactcatagcgggaatcttcgtacataccgtctacgaggcctcctcggagaaggaacataacggaaaggccgtcgacgcgcggctacgtggagcgatgttacatgcgacgtcgatgactattactttcgagacaagaaattacttacggcctccgaag

SEQ ID NO: 327678 - DNA, 224 bp, Zea mays
cggtcggcggtggcgggtactccattcctcggcggcgggcccggccgaaggtacgggtacccgccgggttcacgtcgcgagagtgtcgcgacgcgggcattaaacaacggagtctggtccacgtgcaaaaaaaaaaaagggcacaaacagaaaaaaaaaaaaagggggggtgtctcacaggggtttaatccctacatgtgcgcacacgatagcgcacactcccc

SEQ ID NO: 327679 - DNA, 290 bp, Zea mays
ctttaggctgatttatgtgcttgtaagcaagtcgggactttatctccccagactcgtggataggcgtcaagctccggggatggacgtaccaccaagcgggaaggacgtagtaacgtggtcacagcttctacactcagtcgtcgtcgaccactacacaattcttcaccgttagacacataattcgatacggcttctcgcaagtcgaacgtcacgaatgtctagcccctcgacctttaagccacggactatttaaaacgtcacgaagaatcctcgaagcgaaatactgatac

SEQ ID NO: 327680 - DNA, 162 bp, Zea mays
tattctagcgcgattcattacagaagccctcgctgaacaacaccctactgcatacaaccgcattgccactcataaaggatatagatcactatgaaatatataaaggctatgatgctataaactcagcatcttagaggtcatatatgatcctgatccttacat

SEQ ID NO: 327681 - DNA, 405 bp, Zea mays
gaacctttgggctgatttatgtgcttgtttatgtgcttggaccgagtccgctttatctctcctacgccgaagaaactaaaggttcgcgcgtcttcttattacggggcgaggagtcgtttccgctagtacctcgtaggataagcgccagcgatcgggaggttcctaggagtactgatacggacgtcgaggtaagaccgacgtaatatacgaaatgactacttgaaaaataaaggatctacgctgatgaagacgaaccgaccgtctcgaacgtccggtgctgcacaggctgttaaataagagaagtcaccaagaaaaaaccctcattcgactcatcctaaacacacgaagaataggccagggttcctaccgaaggcatcggcgatagtgatacgtccgcgtcgaacg

SEQ ID NO: 327682 - DNA, 430 bp, Zea mays
gaacctttgggctgatttatgtgcttgtggatgtgcggtggatgtgcgggtggatccccgggtcgatgtgcgggcgtcaataggcagcgatcgtccaaccaccgttccccggccatccactgcgggggtagctcccttttcattgcttgagcccccaccacgccacacccgtacacctctagacacataattcgacctcgctcgtaagaagtcgggcttaaagcatgtccacaccttagacgtcgagccaaaggactatttagaccctcacgaagactcctcgagggaaaacaccgatacgatcgccaggtcagcagcaagtcataacggctctagtaccggtatagcctgagacgtacccgagaagctctccggtccatggccgtaaaagacgaacttcaacatcgaccacggccgtccgaagataccc

SEQ ID NO: 327683 - DNA, 422 bp, Zea mays
ggaactttgggctgatttatgtgcttggagagtctggtctttcatatgatactactccggatgttgttttgtcttctgtctcttctgctgtggttgagctttctcttgtggtggtggtgggtgatggtgtgtatttgggtcatcttgatgagggtattcgtatggcggatgttgttggagtgggtgcgggtctgggtttggagtcgtggtgttcggaggagtgttggtttgggtgtactactgatactatgtatgtgcatgcgttggattcctcggtgcctgtgttgggggtcgctatggggtttccggcttattctaaggagcttacggtgaatgggcttgagcataattcgctggagtcgtggccggagcgttatacgggtatttatgctgatgtgttaggttatacgaattaaggttat

SEQ ID NO: 327684 - DNA, 436 bp, Zea mays
tggaacctttgggctgatttatgtgcttgagaaggtagagtactccttattctggggacgagggcggtgttgttgttgcgtattattgggctagtgctgctggtgtggtgctgctgcttacggttacgggtggtggtggtggtggttggtgcgtctgtgagtgcgagtgttctgctgcggggtcttagacttcggcgtattattattattatggttggtatgggtatgggtatgtgtatgtggtgaatgcagcttcgaagtagacggcgaggttgtgtgttgttgtcggtctgtgttatggttatggtcgttatgttcctctgcgtagcccttctaaggttcgtcattctcgtaagtgggagtccagtttcgataaggatgctcacacgcacagaggcgattaggggcctcgtagtgaggagcgttggcggtagta

SEQ ID NO: 327685 - DNA, 449 bp, Zea mays
cgtctgcattggctctggaacctttgggctgatttatgtgcttgagacaaacaaaagctcgccagtctctaagcgcaacgtacctgagtatccgacaacgactagacatataccttccctagaggaagtaagtccatcgaggcttcctgcgatctacccgccggcaatctcaggatagcgacgaccctccgtaccctcttaaatgtaggcctacgcgaatatatatcaaacataccgagacatgtcgacagggctaaaagctcccttaagggtggaaacataagaaaagagtagcttataggattaatcattatcctcagttgggacctcccgctagtcccactacacctaccgttcgtcgaagtcgaagaaaccttcaactaagcctaagagaagagattagctgacatccacaggaagggtatcgaaaaccccactcttaatttcct

SEQ ID NO: 327686 - DNA, 445 bp, Zea mays
tggctctggaacctttgggctgatttatgtgcttgtggatgtgcgggcttcgaaatcgcctagccaatctaggttttacgtgtccgtcgccgccagcctccctggaactttcgacgttccttccagcttatccgtccccgatcggaccgaggtaaacgtatcgctaattgggagttatcgactctaggcccttatacatgagttaggccacttcgcgaaagcatcgaacaccgacggtggggtacagacattgcacaatcataggagtatccgccgctctggaataaaccgccgcgaacttcgccccgcacaacagcccctccgaacacaagtgaatgcagttcaataggttaaagcttacgcaacggggcccataatagcaacaatccgtagagcgacgcaagtgagccgccgagtagcaaacaaaacatctccgctttaaaaa

SEQ ID NO: 327687 - DNA, 433 bp, Zea mays
tggtctggacctttgggctgatttatgtgcttgtttatgtgcttgttaagccgcagccgtctcttcttgagaatttctgttgttgttgtttattggagtcttggcccgtagcctcctgtcgaaggttacggattatgataggtttccatacggcgaccggcgacggcggcgaccgaattccgccatccgccagtaatcggtaccgaacctgttgagtatgctggtcaccctgtcggaggcgacgggttattagtcatacaccctataggacttaaatcttaagtattacgggattatggctcgggacgtactaacggcgcccgctaagcccccggaaaagaacagtagaaaaggctgtccccgcttgcttaaatcaaaaggaaagagagcgaccgaaccgggagtcggtcgtggctcactcgggcctggaacg

SEQ ID NO: 327688 - DNA, 418 bp, Zea mays
  unsure (1)..(418): unsure at all n locations
aacctttgggctgatttatgtgcttggcgaaggagtcgatggagtggactaaagcctcggacgaggagactggtgttctcgttgaggattcggattcttcaaatattccgaaagtcctcctgcttagtggtagtaatgagacgacggcgaggaatcttattaagcctgatgctgagaggtggngtaatgggagtatgaggactgagactcgtcgcgttatanattttgaggcgtcgccgcttatggcaagtgtgtcggaggcgtcgggttcggagactgagtagcgtgcggcgagtcgtcctagtgatcccggtacgtangttctccgtctataagaggaggaggaggatggcaacaacaagaggtaagcctcaagtattgatgagacaaaataggttccgccctggagcgtcggtca

SEQ ID NO: 327689 - DNA, 434 bp, Zea mays
ctttgggctgatttatgtgcttggagtattcacaatcttaacagccccgttacccgcctatctcggccctgaaaaggctacgtgagaaaatctgcctcccggatggtgattattggctttatctcgtagcaagaagacagacactaccgccggagagttaacagagcccgattcgttaagtccgaagtaagaagtactaatggcattttacgatctacttctcgaatggaaggggcggttggttaccatattggacgggtcggatgaggttgtttagagacggtcccattagaagacgctagataaggcttagctcgcgacggagagatcgtggaaaatagccattaattccaagtagtgccgactcctactcactaggtaacattccgccgaatcgtcgaccaggacctcccaattagtccgagccggcggac

SEQ ID NO: 327690 - DNA, 192 bp, Zea mays
tgatttatgtgcttgtatatgtgcttgcatacccggtatacccgcacaacccaaaaaaaacaatataagaaaaagggaaaggctctaaccgaaaaaacgaaaagtatgacatcaacctcgttagttgtaaaaaagacacaaacgacgccgattcagtagagacctaatcgttgactctgaagtaagatgtac

SEQ ID NO: 327691 - DNA, 424 bp, Zea mays
tggctctggaacctttgggctgatttatgtgcttgtttatgtgcttgtttatgtgcttgcttatctgcttgtggatgtgcgggtggagtaatgttgttgttgttactcctagttcacttgtgtcggatggtaataaggtgaggactggtgagtctggtgtgacgaggttgtcggcggagtcttctgagtatggtagtatggtagtgaggaaagatgtggttctggttactcctaattcgcgtatgtcgtatgagaataagctgtgggttattaagagtggggttgctgatgcgatgtcgagggttgctgttcgtgttggggatggtctcggtcttggtctgtcggcggatgagctctcggttgcttctgtgtcgtcgctgggtgattatgaggtggcggaggaggctggtgagatgggtggtgc

SEQ ID NO: 327692 - DNA, 437 bp, Zea mays
tggctctggaacctttgggctgatttatgtgcttgagtatccccagatcaggtagcccccagccccaggtattccgaaacgctcactctatctagctacagagggcccgaagtagttctcctgtacccgtaggggaagctccgttctcccacaacccttttgaattttatccaccagggcccgcctggccacccctacttacacggaccggaggggaccgacatggacccggagagaccccgatccatcagagaccgaaatttttctaacttggtctaacatacacggaccggggccgaattgaataagggagttcgcggcgtcgggctcgtttacccacgcccacaccgggtacacagaatcagagaagagcaaacgacgccctcacataagtatcgacactgagggaacgctcacccttccccctacatctttac

SEQ ID NO: 327693 - DNA, 267 bp, Zea mays
gaacgaaggttggctgtcttactcgtcgttaaatgtaggctgatgtacaagtcgtggctatggtagccatctcgtcgtgctcggtcgtcgctatttacgatggccctagttgtagcgagtcgtactcagagaatgcctgatcgcagtatagacttcaaggcatctaacgggtactgtcgtacacgttcttgtggtgcgtctgtatagggagtgtctgtctaatagtctcgtgtacctacgtagacgaatggtacgctattcgtaatc

SEQ ID NO: 327694 - DNA, 441 bp, Zea mays
tggctctggaacctttgggctgatttatgtgcttgagttctccatctacgacgaagtcccctccctaagggatacttattcctcttagtcccgtgtcggaacagacgagaaactcgcgggccttcttccttagtccgcgcccgtattaaccgacgagtaccctttagacgacgtcttaccgaccctcctcggtccctgcgctacattatccgacgcgaaaatagacggcgcacttctcggcaggatgtcagacccggtactcagctccgacgcgggtctcgtcgtattttaagttctaggggacgtactcttagacgatcgtaacccgagactcgcgtcgataactgttccctaacctttgcacgagacgtattcctaggatagtgccgtagtaacggtttgctaacacgcctgcagcgctaccctcgtcgcgtaaagagc

SEQ ID NO: 327695 - DNA, 439 bp, Zea mays
gaacctttggtctgatttatgtgcttgtttatgtgcttgtttatgtgcttgtttatcctgcttgggtacgtaaaaacggattcggggtgaccgatcggcataaagggtcgtagttcccagcgagctacgtcagaataaagggcctcataagggccaaatcctatagggaaccggtcgtaccgtcggaagaggagtccctctgtaggggaatcctagcgccattagtgggcgaataacccgggaaacggaaaggatcgtaagaaagtatcgactgcgagacagcgcggttattaacggccaccgccacgaacattcctccggaaaaagacgaagacgacaagcggaagggtacgggaaattaagagtcttccgaccaccccggagaacacgaagtaagcaaagtatgctacgttcacggctttctcgggtattgcggcac

SEQ ID NO: 327696 - DNA, 435 bp, Zea mays
gaacctttgggctgatttatgtgcttggggagtcatcagagaaggcctagaagattcatcattcggctagttctgccgataatgatcgatgcttagggggattcgcccgtcgttcctaagactcgaccacgtctctacggctcgcaccgccgcacggccggatttaataacacctccgtacttttgatcataggctcgactgttacgaaagtcctcgcctacccgagtctgggggagcttgtcagctccaccccctccgaccctctccggtccctcggaattacatgaactaacaagaaacgagtcgcgcctatcccttaaaaaaaaaaaaaaagaaaaaaagaaaaatacaataaatacaaaaaaaaaaaaaaagggtggttgtctcagaggacttaagtccatgcatgtgcgtacgtgatgctacagtctcct

SEQ ID NO: 327697 - DNA, 375 bp, Zea mays
tggctctggaacctttgggctgatttatgtgcttgtggatgtgcgggtcccggagagtcaggtaccccgtcgggcgtcgcttacggcacggcggaggtctcgcccaggaggcatatagaataaggaacggacgaagagctggttcataaaaatatcgctgagggtacaatcgggactactctgaaaattactctaaagaaagggacgtccgaagcgcataatctcccgagtgaggaaggtaaaaaggagcctaataaggtccacagtgtactgccccatttacgtacggacacatctcatgaacgtcacgaagacgcggttctcggaagcgaaacttggagtgcggcgccggtcgggtggatgccccacgagaaa

SEQ ID NO: 327698 - DNA, 440 bp, Zea mays
tggctctggacctttgggctgatttatgtgcttgagaaagggcttgaactgaacttgcggcgcatcgttttccttctttttataagttgttggtgttgttgcgaggatcttggtgaacggtgctttgtgctgttctgggttcttcttgttgttgtgttggtgttatatcaggttcttcaaggagccacgtatacgctagaagtcataatagctaatccctagtcccggccctcgtcatactcgaacgtctaaactcgttgagaagacgtcaccatccattcaactttctcttacattaagcccggagcaggctacccgtcctagataatggagataagcccgaggtcgccgcgtttcctacgggcgaactcgcaatcgacggaatctccgtcaatcctccaaagaaattcggagatagagctgaggtcgacgaattcaca

SEQ ID NO: 327699 - DNA, 418 bp, Zea mays
tggctctggaacctttgggctgatttatgtgcttgtacagagacaagcggcggagaccggattactctcggtaattgcccggacccatacgacttcagaacaccggtaacggtcgtcgtctaatattgcccatccgaagatgagcatgacgaacacatcgtaataaataacaatgtcgtcgcgccccgttgtctcacaccctcgaccccgacggtttcctcgtcttcgaggtacataccgattaccatcaatagcgacgacgaagacgacgtactcgtcacccctctgtcaccctccccgagagttgtcggacccccgtcgttacgtcacaccacggtccgggtcaccagcactacgtagtgctaaagataaagataggaagaagtaacgtcgccattaatggaagcggtgactacct

SEQ ID NO: 327700 - DNA, 432 bp, Zea mays
tggcctggacctttgggctgatttatgtgcttgtttatgtgcttgtaagggtcggcccaacgccctagtaataagccagcgtaagacccggcaaacgttcctccgaatccagtggaaataacgttactaccgccacggacgacgcagacacttagtcagtcgcgtgactcgctccgcctgtcgtcgccggcatagtaggataatgtcgtattatacgctgcaggtcgacctcctacgagaatacacactaaattccttccgactagtccgccgaggcacataaataagcttgaaccggggacttgccggagaaaggtattccatcgggattatcgtatatcttcgtcctaaaagagaatcccccgaaaggtacctagatcactaaactctagggagggaaaacttcccccggaggactcgttaccgaactag

SEQ ID NO: 327701 - DNA, 441 bp, Zea mays
tggaacctttgggctgatttatgtgcttgtagaaggaatgggaaacggagtgagtaaaccacaggtccgtcgcctagagagtcataagagaagtatacgaaagggtacctgttgaggcctgagtcaaggtcgaaagaacagtaccagaaaggactattctagtatgctaaagagtacttgtagaagtttatgagaaagaagagaaggtaattgtctaagtagtctcggagtaggtcctaagggaagtcagaacgaaagtagaatgcgtagttgccgagagagtaatcgtcgaagtctgggagagggtaaccgaaaaggtaaaagtcgtcgtagacgtaaaggagtgaaccgggaagcctaggcttctccctaaggacagccccaaagtattcaactaggataactaatacgaggtactactctagaagatggtccacaaca

SEQ ID NO: 327702 - DNA, 162 bp, Zea mays
cccacacatccgaaaaaaaaaaaaaaaatttaaaaaaaaaaaaaaaaaaaaaaaaaaaaaagaaaaaaaaaaaaaaaaaaaaggaaaaaaaaaaaaaacaaaaaaaaaaaaaaaaaaaaaaaaaaaaacaacaaacacaaaataaataaaaaatcagcaccc

SEQ ID NO: 327703 - DNA, 439 bp, Zea mays
gaacctttgggctgatttatgtgcttggccctctctctgctgtgtaatactagagcctaagtgaggaatttagcttagctttgggaacggagcgtgcaccgggtgcggccggttgtgatcctgtgtcggcggtggttgatatccttgttgcgtagagcacctctgcttataagattgatgaggataaggcgacggcgtctgatctgtaaaagtcgacgggtgtcctaggggagttcggcgactgggcgtaacccatggagcctacatagaagaattcatattcgcattagccttggaatattactttgtctctaattgttgttgttgttaatcctatatgtggtgaatctgttatagtttcctgtaagaacttacacacggctaacaccacctccggcggccacgacaaggacgccggcgtcctttctcatcatactga

SEQ ID NO: 327704 - DNA, 434 bp, Zea mays
aacctttgggctgatttatgtgcttgtggatgtgcgggcctgttgttgctgttcgcctctcgccgttgctgttacggggagaagggtcgtgagacgtcactgttagactaagaataagttacattttaagcttaggcatcgttgcggcgctttcgattttaagactaggactcatgacgccggtacgaagagaaagggcgccgacgagccttttcatcgcgcgtattccgctctccgggagaaggagaacgctcttagcgaggtctccgaggtcgtttgcaccgttcgtaataagcatacgattaagctcgtaggaaaggacgttccttattcctgggcttgggcctattttccttacgcttcctgcactaataagacgtccctgcgcgtcggggtcgacaggtcttagatcggaacgaagggcgttcccggta

SEQ ID NO: 327705 - DNA, 443 bp, Zea mays
  unsure (1)..(443): unsure at all n locations
gaacctttgggctgatttatgtgcttgtggatgtgcgggtcagtataagtacagcgcaggggtccggtattcaagcaaggttcgagagttacggtacttaaggttgggtctcctccggtctctaattcttcgcctcctatggcggttaatgttcgtggtagtcgtttgattttaatgtttttggctgagttattgatgctgttcttcgtcgtcattttatttttcctgcttagtggtaagcgtttgtcgaatgtgtctaagcctggtgcgcgtgttgacgcgtctggttctgctaaaggtgaggccggtaaggcgttcgttgagttgcgtcgcatttctactaaaggttccgtggatcctgaagttgttgctcgttctcgtatggntactaaggttaatgcgtctggtgctgctactgacgcttttactaagtctagtgtttt

SEQ ID NO: 327706 - DNA, 446 bp, Zea mays
tggctctggaacctttgggctgatttatgtgcttgagagaaacggtcatttaaggacgagcgggaattcacaaactttccatcggccggacccgggtaaatcactcgcatcttatcgaggtttaaacgtgacaagcgcggtactaataattcccgtttcctcgtccccaaggaactactaagtttaaccttaaagtaaaagaaaataaggctcttacagaatctcgatcgcgatccgctcggtattgatgcgagacaacaccccgggccgcttgctggcggcaaacaccacgcggcccttccccggctagccaccgccggactattccggcgttgcattaccggtacccggtaagctacgcacactaccccgcacattggcaaaccgcctaagatggcacgaagatatgtccactcattagccatcgcaaaaagcatcggcaaaaa

SEQ ID NO: 327707 - DNA, 441 bp, Zea mays
tggcctggaacctttgggctgatttatgtgcttgcgcaatcggaagtgaggctctggcgttgccgtttctcgttctgcatgcttctggtgtcgtgggagtgcgtaccgccgagtgagcgtggttaagtaatgtgggtctgaggagacgacgtcgagtgggtatggtggtgggaggtgttcgcctatggtgctgtagcggtaggagtctgagtattaggtgtctactcctaagcatacggttctgggtgtgtttgcgttgtatgattctgcttcattgtcttgttctgttattggtgctgatattgtgtttctttctgttcctttgttgtagttcctgttgctgtcggtgcatcggggtcgtcatggtgtgggggtgttgcctggttgtaaggtggtggaggatatggagttggcgtggcgttggtggatggatggtaagaa

SEQ ID NO: 327708 - DNA, 427 bp, Zea mays
tggctctggacctttgggctgatttatgtgcttgccgctgcgttcataagagtagggcgggttcagctccacggaatactcttattcgtccatcgtcaaagtcccgttcacaaaaccgcaatgttataaatatcccataaggtcctcttccggcgaatcattatattcgggaaacgtcccaccctccccgcattgcggagcggtccgtactcacgccacacatcggcgttacagcaacccctagaagtatagcgaagagcccccaccacccctacccccgccgcatctcgatacgcgagtttcacaagcacggtaaccccggtatggccccgtagcagaaaaaaaaaaaatcgaaaaaaaaaaagggtggttgtctcagaggacttaagtccatgcatgtgcgtacgtgatgctacagtctcctcac

SEQ ID NO: 327709 - DNA, 386 bp, Zea mays
tggctctggacctttgggctgatttatgtgcttgtttatgtgcttgtttagtctgtctgctttcactcgactaggctgagtattcagcagtgattcgtctgactactagcgcagagcgctggcaggcgctcgctctctccggcggtcggccgtaatggctacggtgatgctgctctgctgggcgtttccgtcgtcgtcgcgttcgggtgcgtcggcgcttcgtcttcctgtggtgggtagtccggattaggagtcggatactatgcggggtgatgggtggggtaaggcttccgataatgggtggtcgtcgatgtcgctgtcggattgtatgcttggtcttgggccttagctttggtatgagcattcgcctggtaagactgatacgt

SEQ ID NO: 327710 - DNA, 430 bp, Zea mays
  unsure (1)..(430): unsure at all n locations
ctttgggctgatttatgtgcttggagtgataaacaagggccttctgggttgcccatcgattattcgatgttcttagtctcacgagctggttcttaatgatttgtgtagtaaagtagttggcttctttgttgttgttgttgatacgggtgggggttgtgtgtaggcgaataaggtttataagagttgtcctgtgcttaaggtcctttgttatatgtataagactgataaggctaggagtgggaagctagagattagttattgtgttgtcgcaaagggggtttgtgttgnttgtacttagtagagtaaggtgacttgcgacaaaaaatgcgtcgtcccgtcgaaggagaagtgtctgctaatcggattcctaagtgtattatgtgctaccgcctctgccggttccctcctactaataaacgctggactatcc

SEQ ID NO: 327711 - DNA, 272 bp, Zea mays
catagataagtcgtgttttgaagggttcttgtgaataagataaaggcttagatacatttggttgtatgaacgggttttttttaggtgtatctagtgtttggagaaccgcaacatgatgtctatgttgtacatgacctaagtgcatttctctaccaccagcactcttgcccaagcatggtagaccatttgtgtttaatgttcattacatgctaataaaagatactggtgggaaggttaaggttatggttttaggcacaccaaacaagagggag

SEQ ID NO: 327712 - DNA, 403 bp, Zea mays
ctttgggctgatttatgtgcttgtggatgtgcgggcgaatactaagggctcgcctgattcgattcgctagatcgccgtcgatacgactaagggtaagatattagatgagacctgtaagattcctaacactaagaacgatcctattttcgaggaggaagaggagacttgtagggagaattagcgggttcctgagcaaggaggcgtcggactcaccgacgttcaagcccggcggcgctcatcatcacgctcatctcacgccgcttcaacggccgcaagcaccccgggagctatcccgtccgtgaacgctctgtgcaagatccacgcggctaacggctggccaccaatccaccattacgaaagtatcccgctcgtcgtttcaagaggcccagctttacccgtacca

SEQ ID NO: 327713 - DNA, 445 bp, Zea mays
aacctttgggctgatttatgtgcttgtgtcatcttcacgtagaaaaggcctccaccctagcagaactcgaaatctagggtaaccggcgttatgagcacagaaaatcaaaggtgaaggctgagataacataaaaacgctaaaagtattctacgggagaggactccgaaatgccgaactctaaagagtcctagtaatcagagtagtagtcggagagcctatcgaaatacactagaattaggaagagttagtccacgtctgagctaaccctggagtcttaatggaaggagaagctgtcgtaggaggagaataaggcctcgtagaaggagtctgtggagaagtagaaagtttagtggaagtaagcgtaacggggttaaatttaatagtagattagcctgctccttctgcgtcctacgacaagggaagtcgttttaataataaacaaccc

SEQ ID NO: 327714 - DNA, 424 bp, Zea mays
  unsure (1)..(424): unsure at all n locations
gaacctttgggctgatttatgtgcttgggtagtgggagtagtagccttgttctcggcctgattttattggtgatccttatattcatggtacttctcggaattttaagtatgctactcctacggcggatgatacgtttactagggatccttgtaattcggagagtaagggggcggtgccttttaagagttagttgacgtggtctcatcttagttcgcggaatgtggatgatcgggtgatgtagggtgggtgtgctaagatggatcggctttatgtttttcctcttgttcttcattgtgggcctaaggttgatgtccgtgctgttgctgtgggtggttggatttgtcgtggtgttattgctggtattgagggtattggtgtttttgctcttgctgntggtgttggggatcggcataattaggagtc

SEQ ID NO: 327715 - DNA, 192 bp, Zea mays
aacctttggtctgatttatgtgcttgataagaatcaagacgtgcctttcccagacccaactagaaatacaggaaattagggccatggggtacataaaatcggacgtcgattacttgatttcacacacattacgaaagtcgtcatagatgcataactatgtactgcagaagttcaaatatatccactcagatt

SEQ ID NO: 327716 - DNA, 443 bp, Zea mays
tggcctggaacctttgggctgatttatgtgcttgtggatgtgcgggaaagaaagcctcatacgcgtaaagtactcttcgtcgggtcttcagtcgtaccggattccacagttaggtaatctcccacgaagagacctctcacacggtcggctagtcggggtccgatttcttcataacgaagtctcgctccggaggcttaagagtggaatcagaaccagtatcataaaatagcgaagtcgcggttaacgttcccagtcgtctaactcacactctggtaacatatccctcggcgcatcgtctcgtctagccgatgcttagcgagaaggaagaaaccgaatagataccgaagagcctccacaccatctgcccggactgtctaaaaggcggactacgcttaatcgcctcgcatgcacctgtactagattccttgaaaggagtatgcgcg

SEQ ID NO: 327717 - DNA, 444 bp, Zea mays
tggcctggaacctttgggctgatttatgtgcttgtttatgtgcttgtttatgtgcttctttatctgcttggatttatgtgcttgtagaagcacgattcccttaattcccggggcggctagcgtaaatttcgacattgcgcccgaagcggcttctgactccgacaaatacaagtgacacgagcgggacacgccgatagtcgacccggagccggcggaaagaaccgacggacatcatgacgcggcccacggaattcacgaatttaaacacccaaaccggcggaaacttaacaaggaccccgcccctctctgataacggccctgcggataagacggagtacacattaccccgtagatcttcgtcggctacaataaaagattcttaaagtacggtcatgagtgaataaagactaatttactaatacgggaaacaaggatcccgcacat

SEQ ID NO: 327718 - DNA, 333 bp, Zea mays
cccacgcgtccgcggacgcgtggggcagttagcggagggtgcccaactcgtcggacccgcggcacaaccgctgaagcgcctgccattcgtgctgcttccacggttccacctctgctgttagttatacataccgtacctctggtcgcatgctttttggctgcacaatgtggcttggtattcagacttcagagaatttaattgcgtatacgagagtaaatgtagctgattttggtctagctggtttgccgtttcgagcgcttgtaaacacaaattcgtcggcagtttacaccgggccgtgtgtatataaatttcctgaagtctgtgtcttcgctc

SEQ ID NO: 327719 - DNA, 435 bp, Zea mays
tttgggctgatttatgtgcttgtttatgtgcttgttagattattgtcccttctcatgagcatgctgtcaaaggaagtacttcggatacttcgcgcagttaggaggaccctttgtcggactcatgtacgaggactgtgactaagattgtggaagtgccgtagcattcgtacctgctggaaatcggtgctattggatatggtagtgctctggtgcttattacatcttctgataataattctgcattgaagtctattgagcctctgaggctacgcatgtcgcctaagaagagtgagatcatcctcgccgccggcgtcggagcgacgactatcggtagttcctcagagaaagtctcgaatgatgatttgctttgtcatggtctggcgccgacgaattcggagagtgatgcgcataggcctggtggtgcttcgacggtgt

SEQ ID NO: 327720 - DNA, 431 bp, Zea mays
  unsure (1)..(431): unsure at all n locations
ggaactttgggctgatttatgtgcttggaggaacggaagtaattggtgtagttctgcagtttctggtgttgtagataatctatttggtggcggtgttgtcggttccttcgtcggggaagcggtgtggtgaacgtgagggtagtccttttattacacttcgtccttggcatggtgaggagtcttcaccgctgtactactttcttaagttagcgactctgcatatgtagaagatgcggaagatggtgctcggtgagttgacgtatgttgagagtgggcatcggtggtttcgtttcgatggtcttgcagatgcggctactgtctagagtatcggttctgttgaggcttagaaggggctacccgacgtcgaaaagaaaatagcgatatcttaaagtgaatctgcanggaacgtactaaaggcgaagtagactatg

SEQ ID NO: 327721 - DNA, 436 bp, Zea mays
ctttgggctgatttatgtgcttgtggatgtgcgggtagtggtattggtgcgccttcgttccggatggctggtttgaagtggcgtaataagtattccttattgtgtacttagaagtgttggcctctggtgacgacgctgtttactgaggtgtagggtcgaggatttgtttgatgctacgctgttgctaaattgaatggttaagactaagcaggatttggcgtaatgagttattgcccaaccttcagggcctccggagcgcccccccccctctctctgctgctgagctaaaaaaagaaaaaagaaaagaaacggctaaaatgtgtggatagcgagcccggatgctcgcgcaccctggcgattcgcgcccccccccctctcggagggtccccggcttgtacgcaacccagttgggcccgcgatccgcgatcccgcgagc

SEQ ID NO: 327722 - DNA, 389 bp, Zea mays
  unsure (1)..(389): unsure at all n locations
gaacctttgggctgatttatgtgcttggtgtgagatcgtttagtagccgtcactataccccgagaaacgaacggcttaccggtagcgcgtcagtagccgtttagtagctgccgctcagcgccgagacgcgagtgttacaggtagcccgttcggcgcaacaaaaacgggcgcactagataatgcccaaactccgacgaaattgcgcaccgtattcgcggcacactgttaaatcccatctacctagtaccacattataggcgtaacgtcgaacgagcaaagcccggtgacaaaaaaaagaaaaaaaagggtggttgtctcagaggacttaagtccatgcatgtgcgtacgtgatgctacagtctcctcacagcgctattcanacctaacct

SEQ ID NO: 327723 - DNA, 436 bp, Zea mays
ggtcggaacctttgggctgatttatgtgcttgtcctcctccgacgccatcttttcgctatcaggcaccgagatgtctggcggcactcctattagaccgactaatagaaatatcataacttttataaagaaaagctaggcgcctctaatcgtcgtcgataattagatttaagcgggcacttgggcgccgtaaggcgagtgcgaaacggtcatagataataagtcttccggcgaacccgattctgcgggtaccttattcgttttaagaggtccgttctagaccgaggccatacctgatactgacgttaacggaaccgcgattgctctagttaaagacaaggtcattgggaaggagtagaatactattacatgacttctgggcgggtcgctagaggtcgatacttagaagacggcgtaagaagtcgagtcgtacgttta

SEQ ID NO: 327724 - DNA, 452 bp, Zea mays
  unsure (1)..(452): unsure at all n locations
tggctctggacctttgggctgatttatgtgcttgtggatgtgcgggtggatgtgcgggggagtatagagtcagtcagttagttagttagtagtgagtccgtctgttgtgtttgcgtcctccttctgttcttgccttgccttgccttgctttgtttgttgttgttgttgtacctagggacggagacgaagaagactgttcgtgttgcttctgctgttgttctggtggttattgcggtgtctgttgtggaggtcttggtcttgggttttattagtggtcttcttgttgctgtgtttgttgctggtgttgnttctggngttgatgctgttcttcctcctgttcatcatacctagcgagttggttgtggttggctgtttggaggttgaagaagagatgaagtgggagagagagcgatacggtcgtgtgtaccttgacgtgcgggtacgcccccccc

SEQ ID NO: 327725 - DNA, 441 bp, Zea mays
tggctctggacctttgggctgatttatgtgcttggtgttggttacggtgtctgtccctgatgagcctgggtgttttcctactacttcgtgggagtaggagaagaagatgtgttccagggggtctgatgtgtagaaggttaatactgttctggttaaggttgctgtgtggacttcttgtatgctgtccggatttaagggtacggacaagacgtcttagctttttgatggtgatgctactactataaacgacggagtgattacttcggagtagacggacgccgataattagacagtaaagtcgacggcggagtcgctttgcagctaagatcacgaaactggggacggcattattggggcggcagctacggtaggggtctcctctgagtaggtcgagaagtcctcggagtgcggcacctattttaccagggcggtcgaaggtca

SEQ ID NO: 327726 - DNA, 455 bp, Zea mays
  unsure (1)..(455): unsure at all n locations
ttggctctggacctttgggctgatttatgtgcttgtcccctaccgtcctagctatgtcgcggctccttaaggatattaatcttcggaagtcactggggttactggcatgagtgcagggagtgcgggaggccttacagaggtcacggcggcgggtgcgacgagcaccatggtaacggtggtggtgggcacggtcattgtaggctcttgttcgttacgcatctccttcatagggagagctgggaccaccactttcttcataaggatagttgggatcatttctttcatagggatggtagggatcatctcttcatctatagggatttctgggatcatcatgaaagtaggggcggttggggtcatctgttgntcatccacggcggcggcaggctaaggagggattgactggccctattgcactggacgttagaaaggcgtcatggcggaagttgtttttt

SEQ ID NO: 327727 - DNA, 290 bp, Zea mays
ccgtccgaatgcttcagggatattagttgctagtcttggtgtatgtgatgcagctcacgtgacggatgacaagtgggacgggtcgtctcgtgcatagaaagattcaggcgtttcgctgaaccagcactttccatgtccgctgaagtatttcacaggtagctccagggaaagtatgtggatgctgaaggaaacgtgtgaaagagtttccagtggtgttcttggatggcaaggtatgcatgaccgtccctgagcaagtcaattctacattggttggacggcaattgagcgaa

SEQ ID NO: 327728 - DNA, 343 bp, Zea mays
acgcacacgcgctcaagaccgcattataaccaataattccaatctcacaatcgggcctagtacagggaaaacggtaaaccttctggtaccttacccctctcaacaagcttctagggaccgtgattacataacatgaaccaaaggctaatgacgtccatgaacgacaccggcgatgcacgatgaggacattaacattgcaactgatgcatgcatatgcaggaaatgatgccaacagccagaataccgaaatgctctttatatgaggtaggtcaagtgaagaagagcatgaggataacgacacagaaaacaagtccagagacaactaggcgatcaacccgacata

SEQ ID NO: 327729 - DNA, 241 bp, Zea mays
ccaataggcatcggtttagcattaatttaaacgtctttgagaaaaatcatcgtagatgtgcgccatccgttttcatgagttgctaatataccagaaattgttccatgtcaaaagccttgagaagatttcccacggtgattttcatacgctttactatgccatgtaccttcaagtcagcacaatcaatcagggcccttaacttacacggtctcgcaggctcgcaactggtcatttgtgtacc

SEQ ID NO: 327730 - DNA, 412 bp, Zea mays
cacaatacgaactgcagtttccaatactcattgagttacggaaagcagcggaggggaagcggtgtatcatatgtgaaactgtcaacttggaattcaaagaaattggttctatgtgtggtgggccttaggagaacaccagatctagacatttgttgaaacaacttaccattggcccagacaattctttagcacgaatgatggatcttgcaaccacaaggaagctcgcgatgaaaaataaaattgtttttggcacaagtgaccattggccggcccctactttgactgctaacatgggttctgtaagagctgtttcccactctggtatgtccttgcttaccatcgatcaccgaccttgggcgctgattgtgctgtgacagttagtatgccataactattctatacgtggtttgag

SEQ ID NO: 327731 - DNA, 111 bp, Zea mays
cccacgcgtacgctgtgtcggatggtgtcactcctgtagcccccggtgctccgggcgtgcgtgatgtcgaggtcttgggacctaaagacactctcagggccagggatgtgt

SEQ ID NO: 327732 - DNA, 254 bp, Zea mays
cccacgcgtccgctcacgcgtacgtcgacgcttggggtttaaaactgtcaattggcgtgtggggcatcatactcttatgtgtcggcgtcagtttgtttgcgtcatcagtttcgttgtctgttgcatgtcacggcttacttatgtgcttatggattgctactatacaagtattcgttttggatgtgttaaaaagacatgaaaatggagctacatgccagaagacagacggaggcttctttggaagctgctctgac

SEQ ID NO: 327733 - DNA, 434 bp, Zea mays
  unsure (1)..(434): unsure at all n locations
cccacgcgtccgggatggttcactggccactatcttccagctcgcaaattcgacgcttgctgaagtgctgctgttgcggctccatcgccggaccgtgccctcctcctgcacccgagctcctcttaaggtcctggtacatctcctcgatcaacggcttccacagacgaaccctcgcatttatgaaccaatttgaaacctggtacaaatgcaaaaccactcgaatccatcattaccccatctcgccaaaaaagaatcgaatttgaaacgagtctggtgggatttcgatctgtgcttggttcctggtgaggctgctccttgccgncagcacgtncttctcatggtccttgggatacctgagcagagcanagcagagcgcgattctgatcatggccaacaatgtcgatagacgatttgcacagcaacgtcgcgggaca

SEQ ID NO: 327734 - DNA, 264 bp, Zea mays
accacgcgtgcggcaccgcgagaactcgtttaatgctaactgtgtaccagtgtgaccctggacgctcattgggtacgtgaacaaggatgctcatgctgcattacagtgctaatgttggtctcatgggcaatactactgatacatatctctacggtgtcattgagattgttatacacagcaaacgttggactgaaccttcatatgataatggatggtgccactctagtgtttaaggctgtatagaaaatgaatgcggtcgatatt

SEQ ID NO: 327735 - DNA, 287 bp, Zea mays
aaaaagaataaaaaaaaaaaaaaaaaaaaaatttaaaaaaattaaaaaaaaaaaaaaataaatagaaaatatgaaaaaaataaataaataaaaaaaaaaaaaaattaataatatatataaaatttcttttaaattccttttccatcttatacttcaacctatttcacaactaactatttgatttatcaaccaatttttaaaatatacaaatttaaaccactataatcattattaaccatctcttaaaaaaaaatagatttaaaaaaaaatttgaaatttcatttttc

SEQ ID NO: 327736 - DNA, 310 bp, Zea mays
aaaaaaaaaaaaaaaaaaaaaaaaaaaaaatattaaaaaataaaaaaaaaaaaaaaataatagggaaaaattaaaaaataaaaaaaataaaaaaatataaataaaaaataaaaaaaaaaataataattaaaaattataaaaaaataacaaaaataaaaataaacaaataaaataacaaaattaatcattaaagtcaacttttttaaatagatacaaatatatgttgtacaacttaggttaaaactttattaataacacactaatggactttaataacctcttcttaaaaattattaataattaaaaacac

SEQ ID NO: 327737 - DNA, 419 bp, Zea mays
gcaacatctctgaatatatcggcttatcaactgcatgcactgcatttgaattggatataatgtgtcagtaagatgcagctctgctcttgatcttttctggttgacgagcatgtatggtccttgcaaagcgatcattggtccaaagcgactttaatctgacgagacctcctcatttttaggttttttggtatttagaaccagaataatttgtgcatactcattactcccttggatctgaaacaaatgtcgttatattgaatgagtggttctctgatgcactaataacctgatagccggagaatcactaacattatatgcaagaactttatctaaaagccagtcaccatggccccctgagaaccccgacatgctgcaactgaggcaagcttttatgctcaagatcttgatgaggtattcat

SEQ ID NO: 327738 - DNA, 419 bp, Zea mays
cccacgcgtacgatcaatgtgcaatcggttaataagtgccatttgtgttagttgctgaggtatgtaatatatacctagtggagttcacactttacatgtgcaatttatggttattagattgcgcaacatcaaatcaatgtagcatgcttctgtaccttcaaggttcgtccttgtgaactctgatgtacttctgattaaagttttcattccaaatgtttatttggtcatgttgccgctaatttatcagctccagtgtcgtcaatctcattggacatacctgcccggtctcaacatgaggttagtctggcaattggaagagtatgctggttactagaaatatggatatggaatgcatctaccaacaaaatttagaattccagtgcatgggatgcacattaacaagtgtaatgctatacatt

SEQ ID NO: 327739 - DNA, 431 bp, Zea mays
cagcgacagtgcaggcgagcgatgaagctgtcgagactttgagaaggtaaattcgacaagggaagagacggacagctcagacgtttatcccgtgattctatctttctatctcctcaaccctcaagacgcaataactataacatgcactagagtatgaagaaacgcaagacgtccccgacatctactccgtctttgcaaaaactgtctcaatgatatctccatgaagacatcctaaggctaatcactgatcatgtctaatgactcatatcgcacagtcattaacgcaacagcatatgtctccaaagagctcaacgccaaggacactaccatgtaggcaggtcatcagcggcttccatagaatagacaaagtgcccactgcagggcaaacggtcctccatgggcaaggcctaatcaaagcatctgtatatgca

SEQ ID NO: 327740 - DNA, 359 bp, Zea mays
cggacgcgtgggcccggagaagcgtgggctttcgatcctgggcgacgacgacggcgccgcgggggctggggcggatgaggaggagcagctgcccgagccgaagcggccgcgcgcgtgtgtcgccacgctcgaccacgtccccggcgcggcggtgtccttggttctggtgaccgatgagacggaggactcgcctggctcgggcagaggcgactgcggcgacggcgcgtcgttctcgatccagcacgcgcggagcggcttcgtggcgttggagaccacgcccaagttcgggtccttcaacccgccgggggaagcctagctggcggccctagatctgaagcatgcgcggcacgaagccgacg

SEQ ID NO: 327741 - DNA, 143 bp, Zea mays
gtcgcacatgaataatgattctacagaatttaaaaaaaaaaaaaaaaaaaaaaaaaaaaagaaaaataaaaaaaaaaaaaaagaaaaaaaaaaaaaaaaaaaaaaaaaaaaatgaaccaaaattaagagcacataaatgcaac

SEQ ID NO: 327742 - DNA, 371 bp, Zea mays
cccacgcgtacggcagcagcctaccactgtaccatccgaccgatcaaccaaagtaagccgggcgtaaacagccagacaaccggcactgactcactagctaggtgcaactggtacacaagccatcgtgaacgctatgtactgtgaatccatccatcctctcagtcgaccttcgaccgctagctgatctatacgacgtaacagactagcacgcagcagctaataatggcgctgggcctagcactgcgtacggttatgaggcgctcgggcagtaactactcgcgcgttgcggatgcagcactgcgcctctacgtctccgggtcgtcggctgcttacactgcgcagaaacggcagctcgacaactggcttatcct

SEQ ID NO: 327743 - DNA, 398 bp, Zea mays
tcgcccacgcgttcggggctgagcccactattcttgccattgccagcatgcctatttggacgggagcttcgactacgcattcgcaagacgtgtggaaaggggactgaagctcgcacacctggtctgatccaccggcccgcggaacggatccagggcatccgcattctaggatcgcgtcgcgtcgcgtgccgccgcttgaaatccccggatcggtgcaattggcccctggctgcactcgataacccagccgtagggtagttgcctgtcgatctcgctgctggagctggttaactacctggccatttgtggatttgtgtgcctgcttgattttggtgcatgcatggtcgtggtgaatcccctgcttggggtgtctgaactaggggttgggccttcaagat

SEQ ID NO: 327744 - DNA, 380 bp, Zea mays
gacaatactacgaccaatcgtaagcacatttatacataaaacacgtgaaccaatacctagggggtgattcagatgatcattatgtgatcatggaaaactacctagtgggatcattttgcgttgctggatatggatggggagaagtgtccagcacatggtgcttgcagattcggtttgtatgagttgatgatttctctgtggggcgttgcaaggaagatgggggtcgaggagaggcatgcgcagaatagctcctaggatgagcattccaagaacctcattgtcgatgccatgatgctggactcccgggctgtcaatctcgacaaggggccaccctgtcgctctggacaagggggctgccctaaggtcctgtttttgctttc

SEQ ID NO: 327745 - DNA, 431 bp, Zea mays
acgcgtacgggtttatcctcaacagacacatcatatgcacttccagaatactacatatgcacagcggcaaacccaaggtgctttgatgcaacctgtacatgtgtcccaccaacaaacacatgtttctcatcatcctgcaccgatgcgtccttcattggcaggccatcagccagctttgcagcatccttaggcccagggaattcaacatacattacaacatgaaaaacatattgggtttcatgctcagtggccaacaatgtattccaacattccttcccaagcaccaccacagggattgtctgtgcactcatctgtttcctcacaatcagtttaatcataccagcaaggaatgtcttcatcacaacagatgcatttccaaccttgtcaggcatatacacaacagcatggtactggcaatactggacaacatg

SEQ ID NO: 327746 - DNA, 127 bp, Zea mays
cccacgcgttcgcgcacgcgtaggcaaacttttgagactttatacaacatgacctttaatagcgaatttgagcaatattatggggaataaaacattagatttactcatcaaacacaacattaaaatg

SEQ ID NO: 327747 - DNA, 417 bp, Zea mays
ctgtcacacacacacacacagacaagtggtttccaaagccaagtgtgtgtactagcaacgagctagctcgggcggcagcaggcagccatcatgtcggaggagaagcaccaccacttcttcaaccaccacaagaaggacgaggagcagtccgccagtaacgacgggtactccgagaccgaggtggtcaccgccaccggcgagggcgagtacgagaggtacaagaaggaggagaaggagcacaagcacaagcagcacctctgcgaggccggcgccatcgccgccggcgccttcgcactctacgagaagcacgaggcgaagaaggaccccgagcacgcgcacaggcacaagatcacggaagaggtcgctgccgcggcagccgtcggcgccggcggctacgtattccacgagcaccactag

SEQ ID NO: 327748 - DNA, 450 bp, Zea mays
gtcccttgatgcatgaaatttatgaagatttgactgcttgttgtcaaaaaaggcaacactgctgagttcttggataacactgaactttttttttggataaatatccttccctcagtgttgctataggcagtttctcaaaagcatcgcttagttttgcttgtaccttacgatagacaacgactattgtgcaatcaggtctaaggttcaaacgagtctcctggtctgttagatcatgatccaaccgtatatcatatttaacacttagacccttacatcaccaactcatgaagctttataaaaaacctaacaaaccacagtcatatctacccctaaggtctaattgcacctaaggatcaagagactcgcttgcacacttgcacctaaggtctaattgcacaacaatcggtgccccttactgcattacacaaatgacattttatttttacccct

SEQ ID NO: 327749 - DNA, 161 bp, Zea mays
gttgtcttaacatgtatgtttctcgtctttcaaaataataataagatgtgagtctgatagaaaactaggatgtgaaaattttatatctataataatgtatgctattcgttttttgtgcagttattgtacattaccattttatcgaatttgtgtgtcattgc

SEQ ID NO: 327750 - DNA, 250 bp, Zea mays
cgccggcatataccacgattttagtacggtttataaatgcttcattccagctacttcaagcggggacatttgctcatcatactgcagctgatgttatcattataatcgcggaatcagggcagatatccaatgacctgaaaccaaggttaaaacatgtcacatgcataaacagcatctgacgataccatttgcctagcttcttgagacggctatgccagacatgatgccctgctgaactatgacttgaccc

SEQ ID NO: 327751 - DNA, 494 bp, Zea mays
  unsure (1)..(494): unsure at all n locations
ntcgagcccaacgtcgtctcgcccacgacgtctcggtagcttggaagtagaaagctaacatgnncttgcaacaaatgctgtngnnctgcgtatgctcgagtgagactctataggagggggtttctctgcccatgtgatatgtagtcacggtgtgcacccgaactattggtgtccacttgctcgaagattttacctctccatgtaggaagtcacggagagctcgactgtttcggccatgtccggaaccttctacagctcagcaaanattggctcgttggaaaagggcacggctcaaaggccgtgatgaagtcttatgtcaaaacagttgtctgactacataattgcagcacttgttgaagcactgcacaaggagccagaaacagaaatgtgctcatccatgctggattctttaaacgagtgtatgcagctttcgggtcttttgctcgatgaagcccaagtacgagctatcatagatgagattaaaaacgtcatta

SEQ ID NO: 327752 - DNA, 237 bp, Zea mays
gccaaaattaaaaacctgtgtctaacagttatgtagtctaggctccattaatcgaacggaggccgtaatttcttggaaaaaaaacaaaaaaaaaaaaaaaaaaaaaaaaacaaaaaaaaaaaaaaaaaaaaaaaaaaaaaaaaacaaaaataaaaaaaaccaaataaaaaaaaaaaaactgaaatatcaaaactaacagaacaaaaaataattagaaagaaaactaataaagaccaa

SEQ ID NO: 327753 - DNA, 444 bp, Zea mays
  unsure (1)..(444): unsure at all n locations
tcggtcccttcggcaggtctttgttggggccttcactggcgactagcacccaccaattactgggtgtacatctgtatgctcatggcctttgcttggtcccacccttatcccaacctattgatggaatctgagaatttggcaaggtctaccaaaggggtcgtagaaatttaaattccaagggatagtgatcttctggtgcatctagcagcacaagttgggaacgctctaactgagcgccatgcatttatcaacgagttcattaaatttgntgatgatgtagaaatttatttgcactacatcctcaacatataccacgtgttaggcaagatggtcgtgcatcatacttcttccatagaagttttgagccctacatcaatgagaatgatgtaaataactgctggaagaaaattggaagtactagatccatcatcctgnatggaacac

SEQ ID NO: 327754 - DNA, 238 bp, Zea mays
actgcagggtctctagaagaaagttaagaagatttcaaataaatcagttgaaacaggcaaaattgtcatctttaaagtgctcaaacatgtacacacatacatttgcatctcatccaaatacatgtccataatatactaccacatctactacatcattattacacacactatcactatcatacaatcttatactttacctcattatgcccaccattccatcctactaaatccacaccta

SEQ ID NO: 327755 - DNA, 306 bp, Zea mays
cacacgcgtccgatcacgcgtacggctagctaagaatgcgacgacgggacttgcacgaacgatgctgctggaatgcctaagctcgaccagtcgctcgtactctgcctgaaggccgattccgccgcggcgtccgtggcgcggaccttcttcgactgcgagcagctcctgctgcacaatggcgacaaccactacctgctgaccacggagcacgccgacacgctcccctacagcatcaatctatccacgcactaagtcacaggccgtttcttcaacgggctcaacatgcacgacatcgtcagcgagcac

SEQ ID NO: 327756 - DNA, 386 bp, Zea mays
cccacgcgtccgcccacgcgtccgcccacgcgtgcgtccacgcgttcggacaaatcgaaagccaagaggagatggccatttggaaagtccaagcactcggagccttccatatcgacggtgccaggcactgctccagcagtagctccgttgccatcaccaccagcaactcagccccactctctggagatcaaagatgtcaatccagttgaaacagacagtgagcagaacaagcatgcctactccgttgcgcttgcgtctgctgtcgctgctgaagctgcagcagttgctgcccaggctgctgcggaagttgtccgcctcacagcagttaccacggctgcaccaaagatgcctgttagttcgagggaagaacttgccgccaccaagat

SEQ ID NO: 327757 - DNA, 264 bp, Zea mays
cccacgcgtccgaaaatatccccaaaccctagctcccgatctcgatggcgaaccctcgcgtcttcttcgacatgaccgtcggcggcgccccggcgggccggatcgtgatggagctgtacgccaacgaggtgcccaagaccgcggagaacttccgcgcgctgtgcacgggcgagaagggcgtgggcaagtcccggaagccgctccaatacaagggcttcaccttccaccgcgtcatacccgagttcatgttccatggctgcgact

SEQ ID NO: 327758 - DNA, 330 bp, Zea mays
gtaaagcgcaatcaaattagactgggccttcaattggagtctgcaccaaagctggtcaatgattggatgttgcaccgcagctgtatatgcccataataagctgaaggtttatcctattgatctgatccctatgtcatatcatgattaaacataaataatggtaacctaattacgatcacttgatgtatgttagatacctatagatgcctttgtggcttagtagctgggcattgatgtgggtcaaaatgcgatggtgcattaatgcttatgtacctactatgagcttgtgggaccataaagacaaagtcttcatagaagatcttaacttta

SEQ ID NO: 327759 - DNA, 335 bp, Zea mays
acgcacaagcgttcgctagggatagatttagatcgagcggccagcttgatggatcctggagatgatgatgaagcggagggggttgaccacgaatatcatgtaagcactataggcactaggaatgatctaaagcatgcataaccgtgtgatagctgatgacagtcgacgggtggtgacgttgctgatacatcgtgatgaaccagttcccggcgcatggccacatcacgcggatgctgcagttaggcaagcacgtcagtctctgagcctgctggtgatcttggtccacagcgagataaattatcgactgcacctgctggtgctagggctgaacgagc

SEQ ID NO: 327760 - DNA, 244 bp, Zea mays
atctccgatttttagttttaaggcccagctttttggaaccgggtaggggctaatttcggaagcctaaggcccacgagtagcaagttagccctttaagtactaacaaatggcttaagctgacataaccattggcaagctgactgcaggtgacgctcatagacaccaactagacatcaagactattccataccctgcacccggacccatcactccaatgctgcctcatgccaagcttcttcatact

SEQ ID NO: 327761 - DNA, 216 bp, Zea mays
cccacgcgtccgcggacgcgtgggcgagtacacggtggcggtgcggcggatggcgtgcgcgctgctggacctgatggcagaggcgctgaacatccccggcggcgcctgccactcagcacgagggactcgacccagccgaggcggccgctaccggcaatgcgctagcttccgtacccaaacgtggggccatactactgcttctcgccctgccgtcga

SEQ ID NO: 327762 - DNA, 170 bp, Zea mays
atcattgtgtcgtccttggtccttgctactgtacggtcgtcctcaagcagtagtagagacactggcataaccgtcagcagttagctacatgcatagtccaggatgatctgatgttacgcagagcagatgttgtagaacaggcttttgtattttgctgccggttacatgtt

SEQ ID NO: 327763 - DNA, 275 bp, Zea mays
ccaacacgttcgatcgaacaaggacggatgcctggccttctctggtaaattaaacgtcggataccatggcatatagacatgctgcatccggacacagagttgacagaaccaagggtctgtcaactggattgtaggaatacacatagctttctccgatgcggacattcatgagttgggtttcaacgttgtatgcgaggtgtacaacctgatgtagcacatggtctactgcctctagtaaaacatctagggcacattgagcggacacctgaactaga

SEQ ID NO: 327764 - DNA, 61 bp, Zea mays
attcccgtcgcacgcgtctctcttagcgtatcaagatgctgtcatatccggatctgtgtca

SEQ ID NO: 327765 - DNA, 204 bp, Zea mays
aagatccttatgacatactcgacttctattacgaccgtctcaaatatattactggcgaaggtaactttcataggggtgcgggcacattcaaagactgctacctcctctatcgcctctagctaacactgactgaaccagtccaacttctcataatgctactcctctcatggaatccacactatgaatatgctgagatagctatac

SEQ ID NO: 327766 - DNA, 320 bp, Zea mays
gacaatggtcacgatcctcttctccgtttacactgatgggcttctcaggaaccgagttgcggagttgagcaggatggtcaaggttactcatgcgatgaagaggctgtgaaaaagccagtttggatggatagccacgatgcccaaggttcagatatctctgctgccactattgcttctgtgggagatggctctaatggtttaagcatgtcacagcctaatgccactgaacctactggttgtcctcttaccaatggggttatagacaaagacatcagctcttcactagatgaaataagatctgagaagactgacgatatttt

SEQ ID NO: 327767 - DNA, 187 bp, Zea mays
aaaaaaaaaaaaaaaaaaaaaaaaaaaaaattaaaaaaaaaaagaaaaacaaaaaaaaaggggaaaagggtcctcagctcttgcggtatccaggtcttactctacccctgcatgcggacctcatagtcgattcaatggatggcacctaatactcaattacactgaggggcagacttacaacgttaca

SEQ ID NO: 327768 - DNA, 261 bp, Zea mays
ctcccccgggaatggtatcgctcgctgggatatacgacatgtaccgactgagcctgctggcccccctgcccaacagcttgaataccgtgtccatacttccgattccgagcattaagcttgacccccagcttcagatgaccaggactaccacgtccagcgcgaggaataataatggctctctcgggcttatcctgtgccccaaataccagatgttcttcccgctttggatccaccactactgtgcctcttacacgccgtttc

SEQ ID NO: 327769 - DNA, 246 bp, Zea mays
gctgcatattatccatttggagtcgatgtgtacttatcaccacagaaactcaatcatatatctcgatttggccaactttctggcattcaacttttcaaccaggttccaacttttttggggggcaaaggacaaggcccaatatatcccggttcaatatttcaaaaatggaacaattgggaaagggataagcttttgtttgtactttaaggctttctgatggttacttgaaaagagctttcacattca

SEQ ID NO: 327770 - DNA, 436 bp, Zea mays
ttggtcggaaccattgggctgatttatgtgcttggtaaagaacaatagagacaacgtaaacgacctcccaccccatggcggccgtcgccggttggcgtccgaatagatattgctatgtcaaaatgcctccgatacccgatacacatagttttgatcaagaggaactccgtagaatcggacggtaagtgaagccccggacactccaagcccgccctgctttagcccgaagagccctcagctaaatcaggggacacgtaccgcaggtagaacgtaggctatactccccccccccgggcgggcaggcaggaaagcgtcgtcccgtccatcgcgcggtccgcaaagttagaacgcaagacatacgggtggtagtccatgccaggacagaccgagttagctccattacctcccccgaaggaaacgtacccgtactcgacgc

SEQ ID NO: 327771 - DNA, 418 bp, Zea mays
  unsure (1)..(418): unsure at all n locations
gtgttagctcggtaatggatttaatgtttgtaaatttagactgatttaagggctctctctctgtgagcaccaagagaccatgaagaaatttctctntacttattgggatcccttacttatttgaagaagaacaagtgacaatgtagcaccatacgacactaagctgaatggctgatattgtgtgtgggcagcgagatgaccaaggactgatcactggttactgagaatgagtaagaagcaattgtgctaggataggccatagatgtattgtcgctcaatattgtttgtactgcactaggctgtgtgcatattctttttggataatatatgtttgggacattgaattttttatttgcaattgtctttggtgtaaagaaatagatagttcgctttgctgtgtgaataaaatggggctctg

SEQ ID NO: 327772 - DNA, 437 bp, Zea mays
  unsure (1)..(437): unsure at all n locations
aggcgttaaagtggggtgggtttagggtgttatgggaggacggattcaaaaccctatccgggataccatgtgggagaccctaaccctaatgagggggtgagtgatgtattaatagactgtgttaggtgggcctggcccattaccggcgtgagatagtaaatacacggcgtagaaccctaaaccggtacattaacatcacccactgtgtaatctctttgacgaatagcaacacggtaagtagagcgatcaatacgataatggcgatcacgaagagaagtccacatctgatgagactaataaaagtgaacaatcttggtagcacattgatccttcacactagcagcaagaacaaaacttgcacgagcatnctcatcgaaccacaacttgtaagcatcgaattgagactcatgatgccatgggatgatcaaaatcagcaa

SEQ ID NO: 327773 - DNA, 444 bp, Zea mays
  unsure (1)..(444): unsure at all n locations
ctttgggctgatttatgtgcttgtctagacccggggagcatcggagcagtaaggccattcatccgcatgatgcatgttaacgtgattcgcgcagtcgcgagcagctcaacgccgtagcgatacgcaacggtgtatttttgcttcatcaatagacgtccatcggagaccgttacagtcgactccgcaacccgccacagggtagcacgaacacacccacggcagtccgaactcacccgcggaccaaaaaaaaaaaaaaaaaaaaaaaagggtggttgtctcagaggacttaagtccatgcatgtgcgtacgtgatgctacagtctcctcacagcgctattcaaacctaacctatcggttgctgccccataatgctgcgatcgggaaaatttcggtgccatttaatccaactgttccgtagtatacnttttccctgttagtcggtgc

SEQ ID NO: 327774 - DNA, 450 bp, Zea mays
aacctttgggctgatttatgtgcttgaccgagcgacgggtcttttaaacccgcttgcctcgccggcgcctccgggtctcataagggagaccggcttctctcggggctgctagaccttccacattacgacgaagcccgtccttcccgagattactgccgagtccactcataagtacgtcgcgttcgccttgaagctcgagcgtagtaagatcatttagccgggcaccagtcccgtcggcggccatgccgttggcgctcctcgcgtcaccgacctctatttggtcgataattccgcgctcccttcgaataacgttaagggagtcatagcgggagacgtcgccaagaagtccggctctcggggctctcctatcagaggatccttctcctgcactgctacgaccggcatttccatcggcgtctagcggggaacccatgacgtacctaaagcgac

SEQ ID NO: 327775 - DNA, 405 bp, Zea mays
cttaagaagtaaaggtgaccccttccgccgatcctaaagcggataggaatgaataaggctgcctggtaatgggtgatagactcggtcctgtcttgattcatcatgaccattttaaacgcaagcagtattaatgaatcttaactctccaaagtccatacagatgaatagtgagaatagacgtaaaacactacaggggccacgtaaaatgaccgcaggagatcagcatgcgtacccgacaaactcagcacagtaaaccccttcctatatgaggccgaaccaggagacaacatatgcaacatactggtcaaaggccgctatgattagctataatttttccacgggacgttgacggatatgcatttcgagtaaatgtaaactggtagcaaattagttgactcatatacg

SEQ ID NO: 327776 - DNA, 365 bp, Zea mays
ctttcggctgatttatgtgcttgtttatgtgcttgtttatgtgcttccccatgcgccgatccatatgcggatatgaatgagaggcgagtacggtaataggtgatcgattcggtacggacttgactcatcatgacccttgtatacctagtactattaatgtatcgtaacatcccaaagcctctacccatcaatagtgagaatagacgtatcaacacaacatccgccacgatgactaatctcaggagatcggatcgttacccgacgcaatcagctcaatatatcgccacccatatgatgatcatccaggaaacaccatatacgacatacttaccatagaccgctataactaggcataatttttccac

SEQ ID NO: 327777 - DNA, 467 bp, Zea mays
gatttatgtgcttgtgttctcgaaagcctggagttgttggtttccctgttctttctcttgttctttgcgtttaaggttaacagcccctaagcggtaacggtggattaggtcaattaatttatcgcttcctacaagtctggcggttagccttattcgtgtctgactactctcgaaggcgcatgggtttgcaatacacgtttactcgctctactccacgaaaggagacccgttataaggaatcatacgatttagagttcccggggtttcctaacgctcgccagtggcggtactaacgctttagcgacgtagattttgtctcgcgtcaacgtcttcgtcgagaaaggaggtaagaatcctacgaccgaccctacgacgggtggcgccctagtcgtcggcctaaagatcgtcgtcgtctttactgagtgcgcgaagtcgtccacctagaattaagacgagacgaccaagct

SEQ ID NO: 327778 - DNA, 442 bp, Zea mays
tggttggaacctttgggctgatttatgtgcttgtttatgtgcttgtttatgtgcttgtatttgcacagggtccgtgcccgatgcaacgggctgcgcgttacatggaatactgccctcggacaaataggttgaagaaaggcttcgggatactaattcaggacggcctccagagttagcggcctgcggcgatcattttcctcttacgagactaccggtcagggaatgatcatttcctcctaaggatgagtagaaggagaagtctgttggccttcacaatacgccggggccaaatcatcatattctatggcctcttaaaaatactgacactctattaaatcatctattcgcgtctaatatcgatgatgttcatgttagctaagaagccaatgggttcgatgggaagtttaccggcttcttcacgggaaacttacggactcatacg

SEQ ID NO: 327779 - DNA, 398 bp, Zea mays
tcgactgcacgcgtccgccacgcgttctccacgcgtgaactgacttattcgcgcacccattttcctccatccatagcgtcactgcaaaggggacatttcacacagaatcaagtaccatctatatgcaaaacaaacatacacacctagacaatactttcattacatactcatgacaatctctaaaacaactcaccaacttcttgcacccatatagcatggatctcgcgcaggccataacactcaatcgaagacccctctacgaacgtcggctaccaataactatctccaacccaactttaaccatcaattcatatcccccatatactctaccaaccattacacataatcaatgatcaacatctaattgaacattcatccattctactatccctgcaata

SEQ ID NO: 327780 - DNA, 487 bp, Zea mays
ggaactttgggctgatttatgtgcttgaaacctcgctgtcttaacctggatgaggagcacgttgcggactttctcgactaggccttttgggtggaactctaaagttttactcttacttgtgttagtggtgctgtaatttgtagattagtatgtgatttctacgccttggccaggaggcttagtcctatcttccttcaagtgtaaattttcgatcgaagaagagaccgaggtcaccacgtcggggggtcttacccgacactattctacacgaaccggaaacctcaggaatactaacaagaccgcacatttgaatccaccgttcccgattctcgaaagagcgccaccgaagttacgctgacacggaagcgcgcgccccccccaacctagctcggaagccggtcgccgagatacttacccttagcatcttgtatacgcaatcgagtaaattgcgaatatacccagccttccgtagaagcgccgagtacga

SEQ ID NO: 327781 - DNA, 328 bp, Zea mays
aacctttgggctgatttatgtgcttgggacatttccaccgaggatttcgctagttccctcggctagtctgccgatagtcctctggaggtggcacacagtaaaaagtggatgttcctcggccctcgtacggattcgcggtaccgaagtattataagtattcattgcccgtccccgcaggagtatatacctcggtttacctccccgccgtagactggcgtaccgacctcctaccgggaaccctgtcgaaacacccgatccgtatacacctggcgaaatccaatcccctaacgatagcagggcaaaccaacgggtaaccctcccgcccttc

SEQ ID NO: 327782 - DNA, 459 bp, Zea mays
  unsure (1)..(459): unsure at all n locations
ctttgggctgatttatgtgcttggccgcccggacgctacgcacgtagtacgcgcaggaaccttccaaccacgtcaaacccgcgctgcggcgggccctaccaggcgcggtcctactaaccggatcaggcctcggcccgtacatacccgcggtcgcactcgggcttctacaccgtctcgcctatcaccaaggtcgcctaacgcggctgaaccgactcaaaaaccgtcttacacgacattacatagtcaaaggccgggttactacggtccgataagaaacgcctagaacccggattattcgcgcacttagtactagtctacctagccaggactttagctcctgattcatcattctagacatagtcggaggtagcctcccggggaaccgggatcgtgtccggcgagtctttcttccaccccacactatgagtagtctgtccactangaagtgagctaaaagtc

SEQ ID NO: 327783 - DNA, 381 bp, Zea mays
ggctccgaacctttgggctgatttatgtgcttgagaccccgatgatggcgctggtgacgaatccacctccttctcggaactcgacctaattggcgaccccgcggataccgatcttgtactattcattcccttcagcgatgacgtaacggaactactaaccattaacctacccgtctggaaccgcctaaccaacggtatcttaagcccagccctcgtaacgaaaggaatatgcgcgaagaagggaactatgataaagccgagtgccctccgggttttcgacgcacatgatttcctcaccatcctcgatctgtatatggcgaaagggtattacatgagcctaatcaaaggcaatcataaacataagattcctaagagtagtag

SEQ ID NO: 327784 - DNA, 443 bp, Zea mays
tggcttggaacctttgggctgatttatgtgcttgtttacttctctgtctgttaggagaactagttgttgccgtcgtcgttgtgcttatagaacggggggccctgcgaagatctacaagattaacgtgcaccctaaatgcccttaagcgaaacctaagagaaggtgggtcggtaagatagatcatagggttaggacaaggtcgaccaattaagataaaaataagcataatatatttaaacatagacccgccgcgtgacccattaataaggatactatcgtttaaactacactcgtcagcacagtgggcgacacggcctccgtcctcgttcatctgtacgagccgttatgacacggctccgaagccggctcgattaatcacgtagtcgttcatcgtatcggttcctcgccggtctgttgcgcgtctaagacttgcggcccggact

SEQ ID NO: 327785 - DNA, 376 bp, Zea mays
cctttgggctgatttatgtgcttgttaagcctcatgttaagctgcgtttctatgcggttgttactgcgtggctggcgacggagtaggtggctgttaaggagtttaggacgggtgttcttactacttgttctcctccttatgatcgccctgctaacggccgcgatgtgcttacttcttcggacgatatcctgatgcctattggtgagaagaatgttggagtgaatgttaatcttgcttgtgggcatgaggcgactgatgttactaagatgtaggctgaagtagttcgtaagggtattgcgctgcgtgttgatactgctgttccggtgctctgcgatgttgcggatccgtctggaggtttaatacggaatgcgtagtc

SEQ ID NO: 327786 - DNA, 299 bp, Zea mays
acctttgggctgatttatgtgcttgaaaaaaaaaaaaaaaaaaaaaaaaccaaagcccaatgaaacaaaaaaatatggatccgtacgtgtgcgtacgtaaggctatacacgcctctccgtgatattccagcctccccactcggttattcccccctaacgtatcggttgggaaaacatactggtcctataggcaaactttcccggcctttacatccacccggttagtcggttccattgtccctaggtttcggttgactgttgccacggatagccgtgtcggtctccctgaaaacgggatt

SEQ ID NO: 327787 - DNA, 413 bp, Zea mays
gaacctttggctgatttatgtgcttgtcctggtaatgtgtcgctgtcgcatgaggaccgttatgcgtatgtgactgtgtgggatcatggggtgtcgatggtgtagaattggtagagtacgtcggaggatatggggcctctgcctgctaatcgttgggcgatggggcttggtgtgtctcattcgggttgtgttcggggtattcctctttgtgctgctcctgttcatatttatacggatgatactactgcttttaatgggcggcctaatcggggtgattttaattgtgagtcgatggcgcctcatgggtagcataagcgtatgggtttgggtgtgattcacgttggtttggcggtgcggctgtatgagtctattgatgatcaggttaagtttcctactctgtctagtcctactga

SEQ ID NO: 327788 - DNA, 478 bp, Zea mays
accgacttacgcgtccgcccacgcgtacgctgggatgagataatcgttttgtgggcttagtttttctactcttaccggatacatatgcaactgaggtaacttttaaaaactcatttaaatcttgtaggatatgcccaaggcacggaagtaccaaagtaagagctttccattgctcgactcactagaactgttatttgatggtgagcacacctccatccacctcaccgggcacacatgcatagccacactacctacagctggaaaaggctgagaagagctgtgctatacgctgataccttttgttttactaaaacaaatatgttactgtgataggtcctattcctgaaaggggacagaaatcgccttccagcgtacctcagaatggtggtgaaaatgttgacgatggaggcaacaataccagcacaatcccagcaaacagcattaggacctcaaggcatagatgatctcgacacgctgc

SEQ ID NO: 327789 - DNA, 473 bp, Zea mays
gaactttgggctgatttatgtgcttgtccgaaaggggagagagagagagagaagacacagagcagagagagagagagagaggagcgggagatgtgtgagaggtcgttgcgcagggattgcagatctagtgatcgtgaaggagggacaaggggacggttgggactggattgactaggtaggatcgggagttggctgccgcgtggaagaaggtatttattgttgttgttaagaaggacgagaaggttgctaatgttgtgtgttgtgttggcgtggagactgacattacgaagaagcataatgtcggcatgaataaggtggtacttagtggcatactttctaatattaagtgttctgatgatgatattgaaaattctgtttacgagtgagccttaagcgactcgaagaagaactctacgtaagtaaagtctgacaagaagtcgatataggtataatccgtctaagacgacaacgag

SEQ ID NO: 327790 - DNA, 486 bp, Zea mays
ttggaacctttgggctgatttatgtgcttgtttatgtgcttggttatttttgtgtttccttctttccgctgagcttaaacttaggccacagagttcgctgtgttgttgtctgtagttgtctgttgtttggcatactctttttgtgttctctttcgtcttcggaccctattgactcggtacgtcccatcgctttgctacatggcggtagtgggagttgtttttccttcgttcttatagtctacgttacgtacggttgacttacctttctagactgggaccgttgtagatacgttgccgtccttttgccagtcctctttccgctatatttttctgtcctgcctcgtgcagccctggggcccgatattgtccgctcactttgccttcacagtccccagggccctgagtctaaatcttgtgttggtactctagccgtcgtaagcggtggtggtaagtcagaggtagtaatcgtacattccgtaagaaaaa

SEQ ID NO: 327791 - DNA, 453 bp, Zea mays
tggcttggaacctttgggctgatttatgtgcttgggggtggttaataaggatgagtgacggtgattaaggctactcgtccttccgcgtctgtacgttcgtcttctgttgctgttccctttgcgctcgtctcgtggtagtaggcgaagaagggtggtggtggaggtggaggtggaggtagcgccagtggaagtggaggtggtaattcgaactttcgggagcgtctgtttaagcgtgggctgtggcgtcttaagatgtagcataggaaggttcgttctattccacgcaataagcgtcgtgttaagcgttctcgtgcgttattggggcctcatggtaataagggtgttcgttttcgtcataataatcggaaaattaaggaaggagggtttaagcgttttcagaagacttattgtagtctttgcttgttaccgcttttctcctcttgaactcggaat

SEQ ID NO: 327792 - DNA, 486 bp, Zea mays
tggctcggaacctttgggctgatttatgtgcttgtttatgtgcttgtttatgtgcttgcttatccgcttgtttatgtgcttgcttatgtgcttcgttatgtccctggcatccgatcgtttcgatccgcatccacaagaagaatggaaaattcgtcgttacctaacacggaattggcgtaaccgtcggcccccctagcgaggacagtgccaaaccaggcgactcggacgcgaacgactaggaacccaccgaagtcataaaggagttaggttccattcctacggccgtaaaacccgacggtacctccgggtcaggtccctaggaaacactcgccgggaacgtaatattcgcgcggcacaatacggcaaaataaggctctactagcgatttcgcccctctcactcggcccaattgatacgtcggcgaaggagaaggcggcgaaaccgcgcccggcggaacggacctcagctatcataagggcgactata

SEQ ID NO: 327793 - DNA, 445 bp, Zea mays
tggcttggaacctttgggctgatttatgtgcttgtttgagtgttaacggtcgtatgcatttcgccattttaagcgtcgtcgtaatgatgagtaggagtagtggcctggttggtgcgcatagtttcttagtgacgggcttgctggtttctaatgataatagtgtcgttgttggtgctgcttctttgacggtcggtgtcgggtggtcgtcgacttcggttcgtcgtctgtctgctgtctctcatcattctggtgtgcgacgactgcgcgaggatgagatgttgtcttttgtcgttgtccgtcgccgccggggcgctcctccttccagtttcccctcccctcttctcagcggtagcggtaggtaagagagaattccgcgacgacgggtgtatcgtatcgttccttattggcggaggagagtcgggtaacgcgaggttttcgcaaactc

SEQ ID NO: 327794 - DNA, 268 bp, Zea mays
  unsure (1)..(268): unsure at all n locations
cgccacgcgtactccacgcgtgcggtnctttcttgatactccattattgacagctatgctattacacttcagggacaatattctggaagctggtatgcaaaggctgacaagttcgtgttcagttataaatcacatggaacctattggtgaccttaatcatgtatctgttctacgcgaggacatgacatacatgcatcatagaaaatttcacgccatgatttcaaagttagcttaaaacacacaactgtattcagcgcacatcaatcat

SEQ ID NO: 327795 - DNA, 386 bp, Zea mays
gaagacgttacttgcctcgaatagatggatctaattctttcaagtttatagcatcagtcgtggctcttattccagcgctgcatccactcgtaacactaatattaatttctataccgatatacactctgcatgtacctcctatgtttattgtaaactttacaaacttcatcatctaaaatcacaacctatactccatggtgcttcatcatctgaaatccttccaacatcatgctccaaatacaattatagctacaattgccgaaaaccctaactcgattaaccttaataacattacccttacccataattgacaaccactgtgatgctcagatttcatttagcagaatactgctcccttttatttataattctgctccattcttcac

SEQ ID NO: 327796 - DNA, 482 bp, Zea mays
ctttgggctgatttatgtgcttgtttatgtgcttgtttatgtgcttgtggatccgcgggctgtgagtagttaagaacctaatgggtatggcttgtttatttcttgcccttgtccttctttcttatgctgctctggctccttctcttcgcaactttgcgatatgggcggtcgtgatggtgaactagactttcatttgcggtgccggctgcgaaccggtgttgctctttttcgttagttggacctttcgtcccgcctctaggtaataccccgcctatcagcgcggcagtcccgccgaccggagcgtgtaacgcgaggtcgcgtgggaaaggcatgctgcgacgatgaagaaaagtccgaccccaaaggcggaaacgcctacaccacaataagtaacgagggtcgggattagaagaccgtagaagtacatagagacgggaaaatcgccgccgtaaaccctagtgtccttcggcgcgggttacgtt

SEQ ID NO: 327797 - DNA, 371 bp, Zea mays
  unsure (1)..(371): unsure at all n locations
gaacctttgggctgatttatgtgcttgcttatgtgcctgtgatttatgtgcttgttcctgtgcctggcgagttgttttgttgtcttcgagttacgtctcttactctggcgctatatatcttgtacatgtgattcatgagagctgagcgatagtgagtgagtgagtgagtgaagttacggtctcntgtatttcggtactgaagaatgtttcacttcctgtgtctggtggtgtggtttggttgctggtggtgcgtgtgaggggggcgatgatggctgtgtcttttgattctcttcatgatcctggtgtgtcggagttggttactctgggggagactacgtgttcgtattattagaagtattatgttattcatg

SEQ ID NO: 327798 - DNA, 467 bp, Zea mays
tggaacctttgggctgatttatgtgcttgtagttcccgaaaagaaaatttattttattgctgtggcggattaggtggatgagtaggaacggtgcatgtggtgaggtggaagaagtgggcgggttgtcatgaggcgggttggattactggttagggtattcctgttaaggctaagcctgttgctgatgttgatattggtgtgtttgctggtacgaaagggtctgatagggagattactcctgtttattgtacgtcttattagactaaaagggaaacactaactacgaagactgcaagatactttaatacagctaggtccaacgaggcgccggtagggaagatgaagacacatacaactccggaatccgctatcggaggtgaatcgcccgacaaaacagtttgacacgggaagtcatgcgagaacgaagttaggaagcacccttagtagtccaccgacgttaccgacca

SEQ ID NO: 327799 - DNA, 379 bp, Zea mays
  unsure (1)..(379): unsure at all n locations
tggcttggaacctttgggctgatttatgtgctctgtttatgtgcttggatcgtgtacgtcgactcctctggtcgtgtgtgtgggtaactagagttgtggtatagagtaccgaacctatctggggctggcgggctagtctagtgtggtggtgattccgagacgagctgtgtggtgtagataggaggggttgggggtggaggtgtggtgaggtctaaggtgctngtgggcgttgtctcctctgcgtggtactccgagtattcgtatgtatttcgtgtcgagtttgatggtgatgtttaatgataacgcggcgttggggagtggccgtggtggtctgggtatgtttcgtgttgaggtgctcgctgtgccgttggcggtggcg

SEQ ID NO: 327800 - DNA, 438 bp, Zea mays
tggcttggaacctttgggctgatttatgtgcttgcccttacccaagcggacaaataagccacgccaagaaggcccctacgcgatcgtaacggtagtactaggtaactgacgggtcacagctacgctttgtagcgtcggacccctcgagtaggccgcggagccggatcctccgcatttgagtgagggtacttacagatgtcgggataacggtccttgcaccatcgtaacggtcgttatgacggactagctcgtgtcgacttcaagtaagttaaggtgctgtttaagagatgagatataagagatctcgtggatcatatagccctttagctaatacgctaaggataagcgggttaagaactctcattccgtcgggacacgtcacgggtgaattgcggttcaatactgcatgccgtcgattcaagtcgcgcccgacgcaca

SEQ ID NO: 327801 - DNA, 324 bp, Zea mays
tggttggaacctttgggctgatttatgtgcttgtttatgtgcttggggacgtcccgacgcgcatacggggccctcaaaaaattccgacataaggacgggggaatcctcccaagaagtatatacattaaactttacgactaggccctaacctctcccctagggagtgttaacgccggattctcccaaaaaatttgggcttacgaacacgaccatattcgccggctacgtagcgccgtaaggtccggccacctaggaatcgtcgccacactatgggcataattaactctagcctaacacgggtccggtacattagagtacgactag

SEQ ID NO: 327802 - DNA, 374 bp, Zea mays
ggtctggacctttgggctgatttatgtgcttggagcagtcccgccctaacccatttcttcccccccttaggtcccgtggtcgaaagtgagtacgtagtcaattgcttgcttctcggacctattgcgtaggtcggagtataatcctggtaagcctttgcgtgcgattgttggtgagatgactgtggcgatcgagggtgagtgatggcatcattcggatgcgtcggaggtgcgcttggttggtgtggctcgtcttactgatatggatcgtgtcgtggatcccgtgttgttgtctgatcatgcggaggttttggttcctggcggtagttaaggtagtgatgaattgatgtagttggtttggactcgtggtatcggga

SEQ ID NO: 327803 - DNA, 471 bp, Zea mays
gaacctattgggctgatttatgtgcttgtgtgctgatattattgcttttactgaggacctgaccggcgagtctaagaagccggcggaggaggggaaggctaagcatactggtccgctagaggttagtttagatataacttgttgcgtgtatgttgcgtactttactattgttgcgtagacggagcggctgtctcggctttgagatactgagtttgagactgcgttatctcgtagagaaccggggaccggaaccgcggtccatagcttaaccggttgcggaccccccggcggaagaggagcgatatagtaagccctcctcgaactcagctcgtaaaggtacttaagacccataatagaaagtccggagaagaataagtagacccattcgaaaacagaagacccggttaagaagcattagcgtagtttagtctagtcagtctcagttcgggcctcgtactaaggggacgacgc

SEQ ID NO: 327804 - DNA, 424 bp, Zea mays
  unsure (1)..(424): unsure at all n locations
tggaacctttgggctgatttatgtgcttgtggatgtgcgggtggatgtgcggggcctcagcactgtgagtggttgtctcagaggacttaagtccatgcatgtgcgtacgtgatgctacagtctcctcacagcgctattcaaacctaacctatcggttgctgccccataatgctgcgatcgggaaaatttcggtgccatttaatccaactgttccgtagtatactttttccctgttagtcggtgcaacagtgaagaggtttgtattgactgtttcctttaatagccgtgtagttcgaacggtgaacgggatgtgtttcgcagtggtgtaccaagtgtggtgggcgcggcggccatgtgtagtgcgattgtcatatccgttagtgtttcagtgtttgtcttccctgtcnctcctttccttccctct

SEQ ID NO: 327805 - DNA, 195 bp, Zea mays
tggcttggaacctttgggctgatttatgtgcttgaaagctttaaaggttgttggtgtttcttagcttattacgggtgtgtagcttccttcgtctggtggtatcgctgctgttagggtttttgtgggtcctggtggctttcaccttcgtgtatgtttcccttaactcggttatcccgctgtttggttttggggggt

SEQ ID NO: 327806 - DNA, 469 bp, Zea mays
  unsure (1)..(469): unsure at all n locations
ggcttggaacctttgggctgatttatgtgcttgcgaagagttcgcgcacgcaaacgtaaagtaccataacgttacaccaagatggtgctaactgtgggtcaaagtcgaactagaatgaaagtccactaaggggtgcaagtttcactcttacgagctatgctactagtacgttccgaaaagggttaggggagtcggaggctggccctctaatctaaagctagacgataaggaagagaatcttgatctgagctataaagagaactagaatggagccgtgttttataggagtggttaattgctaattttcttgctctttaatggcgtactgctagtcaactagggtaggtagctgcgaacgacgacctanaatctatagtcgaagagaccctagttttcgagtcagacacggtagtagccccgcatagaaaatgtcagcgggtagtaataatacggcgctgactggctgcgg

SEQ ID NO: 327807 - DNA, 399 bp, Zea mays
ggcttggaacctttgggctgatttatgtgcttgagattactccggccttaggaacgcatccttccgggtcgaagaagttgtaggaatgcgtcgactctaccgtgcattcgaaggaagtaatcgtgcagcacaacgatatgttcccgttacgaagagaaaacctgccccgtagcccaacaacaaatacccccagataacccgggctatctcggccggatagggcatataactcatgctctagcacccccgcctccacggctctggcaccgaacgttcaggcgagccccccccagtcgcgtataaaaaaatagccaaatctgacggcactctaatcgtcggagaaacgtcagcgtttcacccccggtcgcggaaccggaaactcggaacgtacttaccccg

SEQ ID NO: 327808 - DNA, 375 bp, Zea mays
gtcgactacgcgtccgcccacgcgttcgtgcaggctgagtggctgatatggtacgacgactgttacgtcgctcagggggccatgaccatgcgttctgcttgtactgtggaataaataaatgatgggttatggtactctttatctggtagagtttggcagcttgtgctttgagggatgtaatagtggccccgatgtttgtattttcatggcgagccggaaattttgtggaataaaaaaaaaaaaaaaaaatataaaaaataaatagataaaaaaaaacaacttgtaacagactcattaaacgcagaaaaaaaaataataaacgcacaaagttaccattaaaaataaaaagggcgccctttttaaaggacccaagtt

SEQ ID NO: 327809 - DNA, 360 bp, Zea mays
gaactttgggctgatttatgtgcttgtttatgtgcttgtggagtatagccctgttgcctacgacttcctcgtagggacatcacggggccttattgatcttataggagaattctattcatgaaggtatcgagacggtgatgcatgtctaaggctactacaggaaggtcagaagtccactgagtagtgaatacggagacggcgtcgatgacgtcgagaagtttacaaggtggtgttagaaagttgatctcgagtcgatgataggcaaggaggataacggtggccgttctccgttaagggtcgggtaagggtcggtttccgagttaaaactcgggagctgattagatgggaatggtagttagt

SEQ ID NO: 327810 - DNA, 175 bp, Zea mays
tggaacctttgggctgatttatgtgcttgagttcgttccgtccctggtgagagaggaagcacgtggccgagactagggtaacgggtggggtggaggtgtccggttagttggatggctacgtgaatggggtttgggcggaagagaaatccgatccctcctggtggtagtccgggaa

SEQ ID NO: 327811 - DNA, 400 bp, Zea mays
ggaacctttgggctgatttatgtgcttgtttatgtgcttgtggatgtgcgggtccggacaggacgataacatacttggtaaagagggtagatcaatttgttcctgccacaccgactagtaaacaaggtaatagtgagtcccttaatagcacggcacgtcatagtaaaatgtccggaggttatatagaggatcattcgaaaacctagctctgacctcttgggtccggtcccccgaatacccttcctatttgcacttaaaagacctcgaaaagtcaacgccactgagataaatcgggccgataagaagctagaccctaaatcggcctactaacgtttgcgcttggtcgcggaagttaacgactgaagatacgcataaagaagagaccggcgaagtggagtca

SEQ ID NO: 327812 - DNA, 365 bp, Zea mays
  unsure (1)..(365): unsure at all n locations
ggaacctttgggctgatttatgtgcttgtcctttctatatacttcgccctccgttgtatcagaaatgctgacttagtaacggtcgtcattttgattactgcctcggcgtttgctcggggtaccggttatcctgcattaacgtctgaggctggtaagtggtcgtctgtatgtagtgtatcgttttctattgctattgcgtctgcaacgttgccgttcgtagaggtgaagtgggtgcttgagactattgagtatacatgttagtaggaagttcctggttctgttacttgtccntattactcgttagtggcggaatttttaattgattatctgggtactgaggagcatacactttgtcatgcgtagtc

SEQ ID NO: 327813 - DNA, 467 bp, Zea mays
tggcttcgaacctttgggctgatttatgtgcttgtctcccgcgacgtcggggaccttgccggtacccccggattggaccaccctaacgttgcttacgctaaccttagacgataaggcgcaatcgatacacccaccgggcggtcgtgaactttaaaatatcccacttcgacgccgaccgggccggagaaggcctccgaaagaaaacgagttcactttcaaatccgctatcgccgcgaacttggggaattttctcggagtccccaccttaaggttcacgtccgagagaaccctagactcgcgtaaaaacgtcggcgtacggtccgcggccgataacattcacgagcatcccacgcacgacggaacggagtatcatcgtccagaagacgtctacaccgctaattctcctctgcctctaaaggtccacggaacgacggggcggtgcgcaggacataccgtacccttaaacg

SEQ ID NO: 327814 - DNA, 203 bp, Zea mays
ctttgggctgatttatgtgcttgtttatgtgcttgtttatgtgcttcccaaaaacacaaaaataaaaaaaaaaaaaaaattaataggtaaacattaaataaataaatacatatatcccctataccattaatcactacttttatctatcttacttctactccaccaaactggataattcatattcatatactgcttttactttc

SEQ ID NO: 327815 - DNA, 338 bp, Zea mays
ggctccgaacctttgggctgatttatgtgcttgtgccctagtattgtgtgtaactggcctgtccccctttctccttcactgtttgttggtgttgcgtgtgttgtttgcttgtcctagcatgatgctgagtaaggggaggcaaaagcctgcccggtgcgtgttacgcccaagaagcctctcctagaagacacactcggatagaactaagccaaggtcctcgcataatgaaagaccttgtaaagcactgtcgacgagcattttagttccgaattcccgtcagacgatccgtccttaaaaaagctattcacgaccggcggcaaacgttaaaactactccaa

SEQ ID NO: 327816 - DNA, 435 bp, Zea mays
aacctttgggctgatttatgtgcttgtgtatactctgcagaactagcttcccgatcccaatagtcacactaatcgcctaactgacgtttccactaggccccggcggaagcggactactccccgtacttgacgacttgcccctcctcaaggaagggttcctataaaacccttaaccgcatagtcgggagattcactagttcgcaagtggttcatccgtataattcgagcggattgtgcgggattaaatcgcggagcaccgcgtacccgtccactagtagcacacagcaaccctccttccgtggttctaacccaggcattccggagacgctctaacctttcccgtaatcggcgttgctcggtactgaaggtagccacccgcggtcatattaataataaccgagcgcgctcccgccgacgtcggaaccgtagacaccg

SEQ ID NO: 327817 - DNA, 388 bp, Zea mays
ctttgggctgatttatgtgcttgtggatgtgcgggctgattatgtgcttgttccacgtgctaaaggtatatgccgggctcatgagcatccttgtacgtgtcgaattgtgtcggcggtaaggtcggaaataagggcgtcgaagtcgtctccatcctttctataagatacgccctcaaattcggtataacgaacaaccgctattacgaggctacgaacaagtataatcgctatggtgcgcgtcggggtagcggggtcgctgttaaggatacgtagtccgcgaagtagcgtcggagttgcttctactgttgagtagtctgcgagggcaacctaagtatgtcaacgtagctcggcttcataacagtgacttccggctcctattcatactcct

SEQ ID NO: 327818 - DNA, 285 bp, Zea mays
ccgccgacgcgtgggctgacgcgtgggcatgatgattggtgcgctctttagagatgttaactagagggggtgtttaatgtggtatttctaatgatttaggggtaacaaataaggctatttcaggcgaaactttacttactacgcaggctatcctaccttgacacggatcgcaaacttgtactcctcaacctcaaaggctgtaacatcctgattctgcccaccacgatcacagagtcgctctccaacttctgtctcttacatctgtgcgcatgttataatgtacat

SEQ ID NO: 327819 - DNA, 360 bp, Zea mays
  unsure (1)..(360): unsure at all n locations
tgggctgatttatgtgcttgtttatgtgcttgaaaaccttttttaaaaaataacaagctatccgcctactactactagagcaaatatagtagaatttcagtgtgttgccttcttgatgatctatactttatttatctatttattttacggtggttaagtctcttattagtgttgatgttttggttctggcgtggtctcttgtagtagtgtaagtggtcgtgacttagtttcctcntttgtgtcctcctcctcttctgtcggttgggattaatttggttcctttgtactgttgtactgttaccgttgctgactctcttgatgagcttgttcctgttgctaagcgggttgcgtagaatcatt

SEQ ID NO: 327820 - DNA, 349 bp, Zea mays
  unsure (1)..(349): unsure at all n locations
aacctttgggctgatttatgtgcttgtttatgtgcttgtttatgcgtcgggcgaggcactatcataatatcgtctgcggcgcgtagaaggcctcctagaatcataaaaactcctaggacaccaccgtcactccgggcacggacgagtctagcgaggacgataagtcgatagctgtttgcgtaagaaagacctagtgcccttcgagttagttcccttacgctgtcgaagccnctatgggcgtcttaggaaagcacgcggagtcgaaggaaagtgcgaagagcccttagggcgccccggacgggaagcacgacgaattcttcgagtagctacctcatacggccggcggtac

SEQ ID NO: 327821 - DNA, 312 bp, Zea mays
tgatttatgtgcttgtttatgtgcttgaaaaaaaaaaaaaaaaacccaaacctcaaaaaaaaaaaaaaaaaaaaagaagaaacgcaaaaaaaaaaaaaagggtggttgtctcagaggacttaagtccatgcatgtgcgtacgtgatgctacagtctcctcacagggctattcaaacctaacctatcggttgctgccccataatgctgcgatcgggaaaatttcggtgccatttaatccaactgttccgtagtatactttttccctgttagtcggtgcaacagttaagaggtttgtattgaatgtttccctta

SEQ ID NO: 327822 - DNA, 483 bp, Zea mays
tggcttggaacctttgggctgatttatgtgcttgtgttgctccttttactctgtgtagtgtcatcgttggtcgcttggagctttgattattgcttctggtcttttgttgcgaacttactactttgcaacggagattcgtttgctggcgaagaatacttctccgtcggatctggagggaaagtgtgctgttgcaaagcatcatagtgacgatcggttcatctcacttgtgaagtcggttcctgagaagctggcacccattaaaatttagaaagtgaacgtcggaatggaagccgagaccgcaacgcccgatggctaaaccgcggcacataagcctacttaagattcgtatccccccgccatcggaggagaagaagagaatgagtccaccccagtactagcctcctagggacctctcgacgtcgctgaatgatcctctaaaaatacggcccgataaaggatagtatctgagaacccggacacgac

SEQ ID NO: 327823 - DNA, 353 bp, Zea mays
gatttatgtgcttgtttatgtgcttggcagttcccatgctctccgtcagcgtcagcatggcagcattcacggcttcacgcttgcgtgttaccgtcggactcgacgaatatcatcagcctgagactcgtgtctttgcgcattacggactcgggtactcgtccggcatttgcatgtttcgttactgacctgcttaaggaagggcaaggcgaggcggcgatttgatgttagttagacgagacgagacttaccgaagttgatagttgagggccgggcgcaaaacacggagctgacgagcgcggcgcccccctcgctttgaggcgaaggatatagatcgccgcctgccgtctccgctt

SEQ ID NO: 327824 - DNA, 376 bp, Zea mays
tggcttggaacctttgggctgatttatgtgcttgtttatgtgcttgtggtaacatgtggagaaccgcctcgtgaaggtcgtccgcacggcggtattcaagagtactactcttcatttataggctcggaaagggtaagggctgaggaagcggaagtccgattagagtgatgggcctcctgcgtaacctgaggtattggtgtcgaggaagacacggcccgcgttaagtataaaagagaagggatggataccgcgtaagagtttcgaggttccggatactggtacttacgaagcgtctttttgcacacctaaggaggtagtccaagtttaacaacggaagatcgcttacggaccttcgacttcgtatagtgtccgtcgg

SEQ ID NO: 327825 - DNA, 343 bp, Zea mays
tttgggctgattttgtgcttgtggatgtgcgggtccggttttgttccttgctctccattgtatacgtgtgctggggtgtgcggatacagtcgtccggtggttatatttggaagtggaacgggtgctggttaagtgttggtgggtttgggtgcgtctttttcctcggctgctggtgggtctgcgggggtgccggtgggtaatcgggttgggggtaggaattagaagctggctttgggtactcctaagcctgggggatctggctcctgaaggtgggtaatccaatgctaaatggatggttaaaggggccaataatgggtggttcctttcatgggaggattccccc

SEQ ID NO: 327826 - DNA, 145 bp, Zea mays
aactgaaaaactcattggaaaacttgagaagcagataactgattttaacgcggataatgtagcatgcctaaagactttgcaactgatgaagaaagcaatcgcccttgttctacatgtggctgaagaataacagatctcgattgaa

SEQ ID NO: 327827 - DNA, 149 bp, Zea mays
atagacagagtttcatagcgcaagatgcggatggtgcacaggccactagcttgacagcttcgacgggatcctgcgatagctataccatgcagctcaggatgcctactacagcgcatgggatgcgccactatagcgcactaatctcatga

SEQ ID NO: 327828 - DNA, 238 bp, Zea mays
  unsure (1)..(238): unsure at all n locations
tgggacagctgccttaataaagtcaagattttgcttcacaagatcgatggtgtgtaccagagcactgttaatgcggctgagggcaaggtgaccgtgtnntaccgctggcctatagtacaattgtccgtgtcaaggacttattgactattacttcacctcatccttgattgtgattcaaaatattactcaccttgactaattttatattgaaacaaacgtacgattagaaaagtatact

SEQ ID NO: 327829 - DNA, 407 bp, Zea mays
aacctcttggctgatttatgtgcttgtcgatgtgcgggtggatctgcggctggatccccagcctcgagtgcggatggatgtgcgggtggatgtgcgagtcgttggacggtcgaaacggtcgtcacgatatatcgagtccccaatcgctcggaccctcgtcgcgataccgaaccttcacttgcactagaaatcacccggactacacctattcaccatgcctaaagcatagatatatgcataatggataatcgagaagtctcagcgatacgtatatctaaggatcttaagatttcctctcctagcgataagttggctattgctcccggtaccaacgatttcgaggaaacttcacggggcgaggtcggtgtcgaacacgctgcggagcatactgatgctcctatcgataa

SEQ ID NO: 327830 - DNA, 367 bp, Zea mays
ctttgggctgatttatgtgcttggtagattatttcggatattagtaagacttaccctaataaggacgccgggtaagtgacttcggagagtcatctgagggcgccggagagtccggtccctaataccgccctgcgggctgatgacgcttcccctgctgataggctgaccaggaaatcgagcgacaattctaagcttcgagcctcccacttcgtatcgaagtcctttagtaaaaaggccccagacgctcggcggcgaagtcgtataagaaaggcgtgcgatcgcagcactggcatcagggcgaccccgtcgattcagagagacgtaagttctcaatcccgtaagaacgtataacgtaaagcagtgcgct

SEQ ID NO: 327831 - DNA, 358 bp, Zea mays
  unsure (1)..(358): unsure at all n locations
ctttgggctgatttatgtgcttgtttatgtgcttggtttgtgttgttgagtctggtgattgntcttgtcttgctaatgaggcgtcttgttctgctgaggagcctagtggtgctgttacggatacntaggaggagacgttggtggatgatttgtcgtcgtgctttcggtagtcgtttcatttggtcgttgntacgtttactggtgttttgtatacgtcttatcatcgacgaccgttcctattaattatattattacatactcgaggtcgctagtcggggtcggccggtaataagataagaagaaccggtcgttctctaataatacctatactcatcattcattcggtcgtcccgagaac

SEQ ID NO: 327832 - DNA, 481 bp, Zea mays
tggcttggaacctttgggctgatttatgtgcttgtggatgtgcgggtcatgttctgtcagtgttccttgtgaattgatctttgagaggttgagattattttgacgcttgttacggagattgatactaatgtgttgttgtttgttttagttggtgagggacttcttgcggctggcttgcttcctctacatccttgtaagtttaataagtgtcctgagacttagaagcggaatgtttctgtgtctcgggtacgggacactgctgctgataatcgggttactcggtggaattatactacggactcacgtactgagcgttaagtgaattaagtcagtgtgattagtgaggagcgtatcgctgtccggggcgctcgcaactacgttccctatccctatcgtcctaataggcggtccaagatctgttaagcgcgtttaccagacaatagcgagcgggagccttagaaacaccgttatcagccttcgg

SEQ ID NO: 327833 - DNA, 389 bp, Zea mays
cctttgggctgatttatgtgcttgtttatgtgcttggtttggtggtgtgaagtgcagggcgagaacactggagcctggtgacgctgaagtggtagggattgttgaaatattagaattgtcatgtgcggaagttgaattccggctagaagactaatgaaattgagtttgggggtaggccttgattctcgctagaaactattggtgctcgctagtgtcgttgggactaaactgatcggaaatgtagacatggaaaacataagtttaccgccgagttagtaaaacgttagaagcgcaacaagtgaaatgcctggtaagtacattacaatgcacgtagagaccgtcttaaggattctggtacacgcgtcaagcgtcgtatacgcgccaacgag

SEQ ID NO: 327834 - DNA, 191 bp, Zea mays
ttgggttgatttagtgcttgttttgtgcttgtcttgttagttcccagtccctcgcgaaaacatttgagactggtgacagggatgttccggcgattgattaagtattataattgacatttgctgaagtttaattaccggttagaaaactaatagaaatttactttaaatctaaagattattttacgcttcaa

SEQ ID NO: 327835 - DNA, 378 bp, Zea mays
actttgggctgattttgtgcttgttctaaggggtcgtaggaacctaagttcgcccaagagggcgtcagtgttcaaggacgctcttcctcttacgcgtgagttcgaagtctaaagtaaagccgtagaacaaggagttacgtctttccgcgcaaccctacaagatcataatttcaccagggtccgcccggccgcgctcgcactgaagggaaccgaacgcgaccaaccccttcctcacctcaacagaggggccccaactcttcttaacatctcctaacttatattcaattgaataagtttccaacacgacactccataccgttgcactcgcgcaacactacgaacaaaacccgtcaccacgcacctcaaggcccacgaatc

SEQ ID NO: 327836 - DNA, 216 bp, Zea mays
atttttctgcgcttggaaccaacgaattctcacaaaacatcagcgaactcgtcggcttgatgggcgtagaggctttgcgtcgcaatctggataatcacatttatttattgtggcgcgaatcctggatggccgcagcatctgtgtcagttgtcacctctgtttctttcaatcctacttgactcagaacataaaaaaaaagattcatgaaaaaacaac

SEQ ID NO: 327837 - DNA, 389 bp, Zea mays
  unsure (1)..(389): unsure at all n locations
cccacgcgtccggtacgcggtgcgccactgccgggtgcgctccgagctcctcgcgctgggcatccgccagcgctacacgctcgccgacgcgcaccacgcctacgccgagtcgctgcgcgccgtcggcgccctgctgcacgacttcctccgcggggtccagtcgctgccgccgncgnncgccgagcccgcgctccgnctnccgcagcagcggaagggcgacggcctccctgccgcgtcgccgccggccgcgatggcgtgctcctccggcgccggcgacgcgccggccgtcgccaagcaggtccgcatcgcccccgacgacgggcatatccagttctncgacggcgactccgattccgaggatgggcacatcaagttccactccgacgaag

SEQ ID NO: 327838 - DNA, 79 bp, Zea mays
cccacgcgtccgtcacatgcatagagcaatttcttttcacgtacatacggacttacagcgacaggatcaaataacgcac

SEQ ID NO: 327839 - DNA, 371 bp, Zea mays
cacaaacaacacccggcggccaaactagtttagagcgctgactgctccaccctccttgctgcttcgctcgccttggtggacaccgcaggccgcagcgcgtagcttgtaacgtttccggaggccgacatggagcgtggccgcagcagcacctcttcctcttgccggtccttgctgctcctcctactcctcctagtctgcttctcccacggcgcggcggtggcggcagcggctgctcggcttctgactacacctgaagcagctgctggcgatcctcctctggctcttcgccaagcggagagtaatggcgccacggcggcagctgccgacgacggcctcgtgatgactgaagaaagtgacgctgacgccacgag

SEQ ID NO: 327840 - DNA, 424 bp, Zea mays
  unsure (1)..(424): unsure at all n locations
gagcaaaaacatttcagtctcgttatggcataattatacacatgtttcattgagattaatgtattttcactgtagtttaacaatcgcaatctgctgccactatccatcatgcagcaacaacaaagcctttgtcagtggcgaaagcaggacagaaatttaagtgggaccaaacaaaatcgcaaagcaactagacaagaccgtgaaactgatctctggtggatgtggacgcactaaacatggaaatggctcactatgagtggcattntaccatgaaatagtgaaaaggataatgagaaagaaagcactcatgtcgaagtgtttgagcagactagttgtggtaactatatctcgtctagcaaccataccagtaaaatcatgaaatgttgatggctgataagaattgtggtgcacctttacaatcaat

SEQ ID NO: 327841 - DNA, 286 bp, Zea mays
cacacaccccacctacctacctagctagctggagtaggaagccggccagcaaggaaggaatacctcgtggcaatttcgtcccctcctctcttggattcttccatggaggagcaaggtgagcgacacatccagcttcagctactgctcctccctgcgcctgcaggtcatcatcaagtcctgcgtgacgtaccggcggcggtgccagccagcgccgtggagcccccccagctggaccttgatctgaccatgaacattgggcccaggccggattcaacgggccaaacac

SEQ ID NO: 327842 - DNA, 298 bp, Zea mays
agaccggaggagcccactcctgcatgtaactcagatactccacccgagagtccgcaccaagttacattacaccttaactttcacttcagaagaagaaagccgaaccggattcccagaagccttgttccttgggttcttcttccgtgggccgttgggccgccggccggggttgttgggccaaaacccgaatgatttctgggaacatgtgttcaccggggctgaccgcaatggggcctttgtccgtggccatgttcctggggtacgggtcggtccggtgggggggcattttaacggggga

SEQ ID NO: 327843 - DNA, 74 bp, Zea mays
cgccgccttcgcggaccgccgccgttccgttgctgcgaaagtctcgtcgccctcgggcattggcaccggcatgc

SEQ ID NO: 327844 - DNA, 170 bp, Zea mays
gacccacgcgtccgaaagaacaaaatgacaataaaaaatttaaatatcaaaaaaaaaaaaaaaaaaaagagaaaggaataaataaaaaccggagaaaggcaatccatcaaatgtgtccgccgatctgcagcaccctacctttccttccggtgctcccaacttcgtctctt

SEQ ID NO: 327845 - DNA, 257 bp, Zea mays
cccacgcgtccgcggactcgtgggctgactgtgtgaaaaaaaaaattaaataaggaaggtctaatttaaaaaattgaagtgatatataaaaaaatataaaataacattatacaaaaaaatagtgcactccattttaatattccaagctatcgtcccctagcttactacacataacatcatctattttttaacctaattttatttacttggctcattattcataacattatgatttgcaaaaatcattatttacctaa

SEQ ID NO: 327846 - DNA, 333 bp, Zea mays
tcccacccacacgtacgcgtccgaaatctctaaattaaaataaaaattttaaattttaaaaaaaaaaaaaaaaaaaaaagaaaagctaaaaatcaaaaaacgccatctctcaacaacaacaaaaacataaacatatcacacaaacaaccaacgcaccccctcaccaaaacccctccatcccaccccatcaacccacctactccttccaaaaaatgcacccactaaacccatctcactccccatcacttcacactctctataaacccaaaaaccaacagttacccaaacaccataaatcactacaccttcccttacttcccactttctacataa

SEQ ID NO: 327847 - DNA, 85 bp, Zea mays
gaacatttatactattgagtgattgattttttattaaaacaaaaaaaaaaataaaggtaaggaaaactaaaacacataaaaatga

SEQ ID NO: 327848 - DNA, 453 bp, Zea mays
cccacgcgtacgcacaattgttgtggtacgtacacgtgggtgctacgtcagaactaatggcttgatatatcgtgcaaaccctgctctagataaaaaaaaaaacaaataaaaagaaaccaaaaaaaaataaaaaaaaaaaaacttaaaaaaactaaaacaaaaaacctatcaaagaaactgatataagaaaacgaaggcaaactttgaagcatggaacattagtatgggattgaactcataagagctatgaatcatggccaacgtattctgtgcttaagtgtgtttactgggttgtcttattcgttatgggttatcaatcatgttaccaaactaaccactatctcaatatgtgctgtgtactatgcactatctgaataaaaatgcagaattactcctaaaaaaaagagtcctctaacaatgacatttcttaaattaggtttagtttaaaccatt

SEQ ID NO: 327849 - DNA, 237 bp, Zea mays
cccaggcatccgcccactcatcctcgggtttgcgttccacccaccccctcgcgtctcgaggtaggtttctaatcctcgagggccgccccacacaaaccgagctcccacccgcttctctttccgccatccaagaggccccacccctgataccacgcttacggcactgaattaggagattaaccatcgccaagcgaacttacggcggcacttcttgcaaacgctcttgacgcccatcta

SEQ ID NO: 327850 - DNA, 190 bp, Zea mays
cggtcgaccacgcgtccgcccacgcgtccgaccaattgcattcaaatttatgttctaaatttagcatctatactatgggaacggtaaaattcttacttggctcaatacatattatggtagatacactttaggtaactcaattcaaaattcaattaccatacatctaaacaataattcctgagcataccaa

SEQ ID NO: 327851 - DNA, 110 bp, Zea mays
gcacagactagttgccagtcatgaactttttcagtctgatgtaaaattgggaaagttatggggaatggttgaacaaaaagaaaaaacttaaagcaaactggggccttcga

SEQ ID NO: 327852 - DNA, 265 bp, Zea mays
gcctggcaactgtgctgtacaggaacctgtatagaaagacgaagttcactatctgagaggatacctgtgggactgaacctgggatcgttgaagcgagaaatacagcagaagcatatgtccatactcgaaatgctgaccttgaaacggtctctgggcaattactacacaggcaagaactgcgggtatatcgggtaccacagccttaaaggcggatatgtgactgcagatgaaaaggtgccaagagaactggaccctgacacgactg

SEQ ID NO: 327853 - DNA, 318 bp, Zea mays
cccacgcgtccggtggagagctgccacagggttctagccttgctctcccatccgcatgagcccgcgcaggtcaggagcatagctttggggacggacgaagcatgcaccaagttcaagaaggtggtctccctgctcagcaatggaggagagggaacaggagaagccggaccatcaagcgcaagcgcaagcggaagccattctagagctaagcttggtagccgaagacagaatccaagggtcttggactaaaaagggtttctggacaggaacaacccggtcgtggggcttgacaagggcggccattcttcttcttccttc

SEQ ID NO: 327854 - DNA, 473 bp, Zea mays
gcagttcttcgttgcaatagaacaattgtgttttccgaatctaatgcatgtgtcatgggctgagtatccccggacagcagggccttgactacgcagttcgtagtcacgacccgtcttctccggcaaggttttgcccctcagccgcaggctccttggtgatgtcgtcaacatcatcttcctcgatgccctccaggaggaacagccgctggcagacacggttgtgaccccgggtgtacttctcgtcgcagttgtagcagaggcctttgcggcgccgctcctcttgctccgcctgggtgagtcgcttgatctggcagccctcgacggagatcatcgtgggtgctgctgctcggggacctagcggcgccgacagaggccgtggcggggcccgggatatcggggcggcgtactgctcacgcggctggaattgcctggccaggctcatggtggctgccaggtactgtgggttctggatg

SEQ ID NO: 327855 - DNA, 321 bp, Zea mays
  unsure (1)..(321): unsure at all n locations
cccacgcgtccgcggacgcgtgggctaactctagacgtcgcccggccgccgccatggaccccgacggcgacccgggcttccaccgcaacgaggccatctccgcggtccaggatgtcgaccagtactatggcgacgacgacgacttcgacgacctctacaacgacgtcaacgtcggggacggcttactccacgcctcccaccaggcgccgncgtcgctgccgtcgtcaccttcgactcagcaggccccaccgccgcagaagcaccagctccctccgncgtcccagcagctgccgccgacccagcagcatccacctggccacg

SEQ ID NO: 327856 - DNA, 428 bp, Zea mays
ggtgggttggcttctcctccccctccggtttgggttcgggttcgtgaggttctccggggttcggtttcgtgggtgagcggatcgagatggcggcgtcggatgttgagtaccgctgcttcgtcggcggcctcgcctgggccacggacgaccactccctccacaacgccttcagcacctacggcgaggtcctcgagtccaagatcatcctcgatcgggagacgcagaggtcccgcggcttcggcttcgtcaccttctccacggaggaggcgatgcggaacgccatcgagggcatgaacggcaaggagctggacggccgcaacatcaccgtcaacgaggcccagtcccgcggcggccgtggaggcggcggcggcggcgggtacggtggtggccgtggaggcggcggctaccgcggtggcgggcgccgtgat

SEQ ID NO: 327857 - DNA, 357 bp, Zea mays
  unsure (1)..(357): unsure at all n locations
gaccccgacccacgcgtacgcntgggttcgcttaccatatttcttgaatgttataagcctactttcgcgtccgtgactcgcatgattctacctaggtgggcactgatctaacgccctagaactctattaaccccctcttcaatacaaaaggcgtgcacctccagctcatactggatgcccagatcgagccctgtgcctacgttaggtgggaacaaaggaggcccacaggatccgctttatgaaatggatgcacacgatagaccgtggagatcccaccttctcaatgcgggagatccacaagagtcaactgcggatctatcaactcgattagcactctcccctgactgcgtgatctgt

SEQ ID NO: 327858 - DNA, 355 bp, Zea mays
cccacgcgtccgccgacgcgtggcttctttaggagcctagctcattgatcatcgggagggcttctttgcaaaaaatgccatcaagtatagctaagctgatgtagacaggctctgacactcgttgctagaaatgaactctggaaattaacttgagtcccccaatgattgcacactgtaaccccgctgggatatatatgtgacaactctcacgctaatgtaacgaatgctgctgccaagaataaatgatctatctggctggtgacaaatgctgctgacaaggggcgatcgtctaacaggctccaagcttacctagccggtcatgcaccttcatgactcttaaattgtgtcacctaaa

SEQ ID NO: 327859 - DNA, 308 bp, Zea mays
acggaagcccagtgcgaaagaacatagactgagagcaagagagtgaggaccacatggatgagtctacttgagcacgtgcgcggaataaccgtatagaatcacaagcagggtttgatgaacccaactgatttaaacaactacagactctcagatggcaccagatgttacatctgactgaaatctacagcaaaaagcgttgaagctaaacccacacaagacactataatacgacttgctcctccactaacactcaacgctgaggagcttgaagaaacatccaaggcacttagatacgtacctgaacatga

SEQ ID NO: 327860 - DNA, 413 bp, Zea mays
cccacgcgtccgcccacgcgtccggatttatttataggaatttgttagtggaatacagggagtattgcagaaatcagcgttttttttcacaggagaaatgtgggtttcaggaaaaaagcactgcattccaaaggggacctgaaattcgtgctagattcatgtacaattcttacattccaaagaggcccaaatgccagcaagctaggatcactggtctctcttggacctgtgcttcctggtgccatccttcctgctccatcaaccatcatgttgactttatgaagctgatcagatggggatgcttgggaaccatggagtgggtttgctttggcttctggttcgggttttattaggtgatatgggatctagcctgtaatcgatgtttttttatttggttcattgtaaatttatat

SEQ ID NO: 327861 - DNA, 128 bp, Zea mays
cggccgacccacgcgtccgtggaacagaacgctccgcaccaatcaattttcgaacccatgatatgccattacagacgggcttaatcactgtctgcgccgtccagcctcaactctttcacactgcccca

SEQ ID NO: 327862 - DNA, 435 bp, Zea mays
  unsure (1)..(435): unsure at all n locations
cccagttgacgaagagggagctgctgccgttgtcctggcccagctcgagagaagtcttttggtcttggcctcttgctgccgctgccccccaatcggcgccgctttgcttcctggtttccgcaaggttccacacatcagcatccgagacttgggatggaaggcacggcgtcttcttggagccgcgactagggtgggaaggaaagttacttgctgccgtcttcgcggtctttgcgcangcagggtagagccggagatcagagatcttggtgcagacaagtccttcggcgtgcagggtaaatatcgcctacttcttcttcagatatatatgcttgtcggcgaagtcctttcgcgttccgatcatcagcttttcttccaatttgtagttctctctaagcggaatctttgngttcttgaaagagagagagagagagagag

SEQ ID NO: 327863 - DNA, 425 bp, Zea mays
cccacgcgtccgcccacgcgtccgtccacgcgtccgctgctgtccagcagttatatatctgtcattttcatgtgcacactatcaagctatatcagtcattcagtactggggtttaagcagcaatgcagcatcctgaatcatgtgttaaatgataacaacaataatgatttaaaaaataagaccttgtcgtccccaccaggccacagacctgggttatcaatgcttaagattccaattgattctactgaaaataccttttctattgataggtatgggcttctacgaggaaccctcagggctccagccctgggctggatgatgtacaatgttctggtgagcaatgaaaagtcgatccagtctcagtacaagtcccacgtctacgccaaccctgacaacgtgacgccagatatcatcgagagccgata

SEQ ID NO: 327864 - DNA, 293 bp, Zea mays
tgttgagccaaccggatttactttaattactagactcatagacattagcacgggaacctcacatatcgatgcctcacgttccattatcaattccaatgaggggacaaccactcactgcgctgtctgctacaagactaactaccttgtgcactacctcacacgcacgacatgcgcatgtgctacaggcggttcttccgcttcctccacttcaaggggtacgttcagctcgtgaactacaacttcttcgactgagtgctctacttgattcattacttctaccccatggtcctgaa

SEQ ID NO: 327865 - DNA, 231 bp, Zea mays
atgcataatatggtggtatggtatagacgataccctaaatacaattgactgagtagggacatgaccacgactggactgagtagaccctaacatgacataacgatgtctataagtagcagattcacatatgactatctgacgggataactatgaggctcgaactgattgccctagcgatcaatgacgcaacatgggagtacattagatcacgatgagtatctgagaattgag

SEQ ID NO: 327866 - DNA, 439 bp, Zea mays
acgcccacgcgtacggcgaaagacccatacatagatgcgatcgacttgaagaaggcttgtaacggaacgttaaaaaatattatatggtggtatggagaaacataacaaaatacgttagattcattaaggacatgtacaacaatgttatgaatagtgttgaacaagttataaggatgtatataactttttgattaaaataggactatatcaagggtcaactttgagcctttacctttctgccctagtgatagatgatgtcacaagggaatacatgagatgaacatgaatatatgagatatgtggctatacaagaatggatcgagttcaaaatgatgatatacgctatagattataagtagcactagcaccaattaaagaaaaacatattcaacatcgattgagatagtttggacatgtacaacggagatcccaaacacac

SEQ ID NO: 327867 - DNA, 447 bp, Zea mays
  unsure (1)..(447): unsure at all n locations
aaggagattctcctcgccccttccactagactactggagtacccgacggcccgaggcggcgagctcgtcggcgactgaccgccgccggagcagccgccgcctcccgctggttcctgtaccacagcctcgcaggagcgcctccgttcgctacgccacccgccactgtgctgtcggaaggcagctcggactactcgcgccgnctcggcttctccgcgctcgccgccccttcgncggcgtgatcaaggatggagctacatcgtgaacctgctgaagctattctgaatgccataaaatttgatctcatgacgagtacggatatggaaaaattgagcagcatgagcataatcgaagtgagtgatgtcactagtccgaagctaggattaccaaatggttccctgcaatgtgagacttgtggatcacaacgtggacgcgactgtgatgggcatt

SEQ ID NO: 327868 - DNA, 438 bp, Zea mays
  unsure (1)..(438): unsure at all n locations
cccacgcgtccgactgtattttgtaatgtaacatttggtgtggtggatgcaattccatgatagcgaatggcataagatttaatgctaagaagaaacaagttggaaattattactctaccaaggtatatactagagcgaagagcgaacaacaatctaagattgcagcaagaaaggtccagcaaggatggagtcaggacttttatccatgcgagaaggaaccagattatgtacatgtatatgtgtggatagaactaaccgccgatattatcctaaatctaagcacggtcacccacaaaaaatgtgtaatttgcttcttcccagacatacgaaatgtgttatgcggactatgttggctattggaaaggcattctaaatgccgtctgtaatgtttgatggttataaactatngtcgtgctatgtaatatgcggtcttgacat

SEQ ID NO: 327869 - DNA, 291 bp, Zea mays
cccggcccgacccacgcgtccggtcggcccttcgctccaagagcattttagttctcggggtaatacacgtccgagggtcgggtgtactttgcaagcggcgaggtgaacccaccggatctttaaacctagctgatgcccaactcgttattcaacttagatgcgacaattgcactggaaagggcatcgctaattaagctaaacatgtttgaccaaaagctcatttggacaccatcgcaaagtgtgagcaccactcaaaagtatgggataaaaatacactgaaagacacatgtg

SEQ ID NO: 327870 - DNA, 402 bp, Zea mays
ggtgggttggcttctcctccccctccggttcgggttcgggttcgtgaggttctccggggttcggtttcgtgggtgagcggatcgagatggcggcgtcggatgttgagtaccgctgcttcgtcggcggcctcgcctgggccacggacgaccactccctccacaacgccttcagcacctacggcgaggtcctcgagtccaagatcatcctcgatcgggagacgcagaggtcccgcggcttcggcttcgtcaccttctccacggaggaggcgatgcggaacgccatcgagggcatgaacggcaaggagctggacggccgcaacatcaccgtcaacgaggcccagtcccgcggcggccgtggaggcggcggccgcggcgggtacggtggtggcccgtgaggcggcg

SEQ ID NO: 327871 - DNA, 429 bp, Zea mays
cccacgcgtccgctttgctacaatgatatataatttatttgtaaatatatggcaccaagatttgtgtattctttgcatttcctttattaatatatctgaattatgaagcataactattacccaactggttatagaagtaagttgtgttttctctagttttaatgttatcataaataagtttaaacatgtttgaacaataacttatttgaacaccgtagcaatgtgtgagcactcttcaaatgtttggtataaaaatacttgtaaatagatttgttagttcttactgcgaaccaaggatggtttcgattctgtggcgctgacggtgtttcacgcgacctgtagcaggtccgacaactgcctagaggcacacactagagcagacagaaaggatctctgtatactctctgtgatcttggaatcagatcgttt

SEQ ID NO: 327872 - DNA, 347 bp, Zea mays
cccacgcgtccgcccacgcgtccgtccacgtgtccgaaaaaaaaaaaaaaaaaaaaaaaggggaaaaaaaaaaaaaaaaaaaaaaaaaaaaaaaaaaaaaaaaaaaaaaaaaaaaaaaaaaaaaaggaaagaaaatataaaagaaaaaaagcattaagattgctacagtgaaacaaaaatggtttagtttagcaacacaaaaatacaatatacatgggggtggattaacaacgtattaaagggggaaaacaattgagatacatgaacttagattggatggaagcacatttcattttggtcaattggtgataattggtaaaaggagcagaaggatggcattatgaaaa

SEQ ID NO: 327873 - DNA, 334 bp, Zea mays
tccacttgtcctccgccccatattcgggctattctaactcacgatgttctccggcaccaggacctcccgcggggccacccactctacgtccaccggtggtgggggtggctcgccttccaacaggggcgggcccgcgccctcggccttcgagtaggtctccacgccagccagcgagagcaccgtcgcccgccggctaaaccgacttgacccccacggcgacgacgctccatcgtcgcaaccagccacgagcaagaagaaaaagagaggggcacgggcagttggtcctgacaaaaatggccgtggattgcgtcaatttaacatgagagtatgtgag

SEQ ID NO: 327874 - DNA, 106 bp, Zea mays
  unsure (1)..(106): unsure at all n locations
agacgttttatcatcatgttttgttgcttttggttcttgaacagcgtttgcagctagctgtaatgctttaattcgactttctatatattgntgaaccgtgttgtcg

SEQ ID NO: 327875 - DNA, 137 bp, Zea mays
gccgatcatccaaagacacgttggcgttaataacgattagaatgaacaaagggctcggaaaaagttccatttgatcgctcccctccggggaaaattgagtggaggattccaaaaaaacccccaaaacgaggcccatt

SEQ ID NO: 327876 - DNA, 350 bp, Zea mays
aaaattggaaaagttgattctgggggtgacccgagtcgggaaaggagaagagaaagggggagatctagagggcgggaacgtgatgctaggggtagggattctggatcatgatagcaggggtcgtgactctgatcgcgagagggatcggagacgtcgctctagggatagaagttcaggacactcatacaaggagaaatcaaggcgccatccatcacacgaccgagttgactactacagttcgcattcatctcgtgaaaaagatcggcatagacaccattgatcccgggtctgcagggctttgctgcatggagaccaccacatggcattgccgacaagatcatgaaaacttg

SEQ ID NO: 327877 - DNA, 412 bp, Zea mays
  unsure (1)..(412): unsure at all n locations
aagagttagagaatgaagggattgtttttgtggaaaaaattattcagaagcacttttgctcctggtttaagaagcatgtgagtttcaagttcatatcctcagcatcaataattgacttattttcaccatggatttttttatgtcttcagattgcaagtttgcgttttgtcgatggagaagacattgatgatgacctatatgcattggcatgcgaacctgatttgcgagttcgaattttttctgcatgtcttgttgatggtgtccggtaccacaccattgaccgtgagagaaatagaagaacccaaaatagtggagtcatggttgagggcactcataataatgaatgcattgatttttatggctgcttaaaagaaattatcgagttgcagtataactcanatttgatggagca

SEQ ID NO: 327878 - DNA, 279 bp, Zea mays
  unsure (1)..(279): unsure at all n locations
cgttgcaagaagatcttgggaccccggcattgttctgctaacggccgaagtgatgccttggaggtgaggcactattctcctctattgtaattccctaaccttggacgcaacctgatccccaagaaagaccgtgcagcgcgggctgctcgttgatcatgccagcggggaacagcaagcagacaaagcagcacgcaccacgggccttcgctggtctgcctgcctgtgcaggcgtcgngtaaatgtattgtatttgcagggatcctgtttacagcgctagta

SEQ ID NO: 327879 - DNA, 270 bp, Zea mays
tttttgggcattattaaaccttcgcacacttctatgcataaagtgctccggggtgcacccaagatctgggaaagcatattatcaaaagcttgatctatcacactggatgtcagagtttggcagccatatctaatcaatcattctcagtcattacgcaacatgtttgacaacactatttaggaagacatgttgacagataatcatataagcgctaatggatcatacacatcacacttcctctctgctagcacgcctaaacacacagatgca

SEQ ID NO: 327880 - DNA, 304 bp, Zea mays
ggcacctggcacaactattccaagtaaagggcgtcattgctgctccctattttggtccatatagtgctgctacatcattcaaacgcctatttaaacaatcttttcctctactgtacaagtactttcaagaagctcctgcaaatacggtctgctggactgacattatccattggatgtgggcactcttcatggaaagttggggatcatggagaaatgagtgtctgaatcttagccccattcctttcacagatccagtaaccaatcttcctttgtggcatgtgcgagaggagtcacctttattact

SEQ ID NO: 327881 - DNA, 237 bp, Zea mays
  unsure (1)..(237): unsure at all n locations
gcgcccacgcgtncgnatacctcatgtcattataaaatagtaagtatatgcctagagagcggagcgaggagcgagcgagctcactccgtgttcaatcgagagagctcgtttagcttggccaacgacgagcagagcagtagctatgatagatccatggcgaacgcgggcatgaagccggtggccggactcctgctggtgctcaacttgtgcatgtacgtcatcctggcggcggtgggc

SEQ ID NO: 327882 - DNA, 221 bp, Zea mays
ctttggaatatcttttcttgttgcctacaagttgtgtttctttttgcttactatgtggactctgttagcaggagtcttcatttgcgccagcacctgctgaacctacactggatcatttaagatccttggcgaggaagctgcttgctggttatattgacatacccacaatcacaaacctgagatggtccctgggatactattaaaagatggaaactattgac

SEQ ID NO: 327883 - DNA, 306 bp, Zea mays
  unsure (1)..(306): unsure at all n locations
aaatttcctttgctcccccaaanctaccggtaatgggaattcattttgatctttaaactttgtaaccatcttttacttgagcttcatttaatcaatttgatgcactgctcattaaattaattggaacataactttctgtcactagatctggttgagcagctttagaactctaacatatctaaaagcataagaagttaatgtattttataatcaaaatgactcatcttgacaaaattgaattacttctggattatggttcaccttatgatatttggagctgctgattccaatattattttcaatctt

SEQ ID NO: 327884 - DNA, 462 bp, Zea mays
tcggggcttctttgaaaactggtggaagattgttttttttctggccctttttcttttcggggtccttgtaaggttttctttttgcttgcttgcacatgggattcctacatccatgaatcgtgatatccgtcgtctaacctagtacgcaattctagctagtaaccagcaggatcaaatatacttcctttttcttcataaaaaaaaatatatagattcccattacaagtgctagctagtgcgcatgcactaactggtatagaatagatagatacaatattattctcgttggtgggcggagatgaaatatactatcgatcacgttgtatttgagaacgtagagaatatgttagtacacaacgactatatatagctaggcagcatgcaggtggccacgtactcattatcaatcacgttggattatgtctttgtcattatatataactctataaaaacctaatatga

SEQ ID NO: 327885 - DNA, 390 bp, Zea mays
  unsure (1)..(390): unsure at all n locations
agagacaataccttgcaacactggctgttcctttctctttttttttgttttttcccgttcacaaatatgcttcttctgtagtcgtaattttacagttagctacaataatctaataacatagcaattccagaatttgagccgaagttgtggttgaagcctgtacttatcattattttccatatatacacaactaatacagaatatgacaccacanaaagtattcttcaagagaactaaatagatatttgcactaacacttgctcttgtctcatcctaaatttgacattatctgaaggttataaaatagtgagctacaactgatacaacccactgcaaccgaagaagaaattcagaattcctagccaccaaactacgaagacaaaaatgtcg

SEQ ID NO: 327886 - DNA, 370 bp, Zea mays
  unsure (1)..(370): unsure at all n locations
cccacgcgtccgcccacgcgttcgcttttcaccacacctcctcctcctcctgctcctagcacagctagcgcctgctccccttnccctgtgatcatgtcttgcagcagcggcaagtgcgactgcggctccagctgctcctgcggcagctcatgcaactgcatgtcccctaacgtggagaccgccgccgccagcagcatcaagaccatggtcctcgctgcgccgaccaccaaggccagcgccggcggcttcgaggcggccaccgagggcggcggctgcgactgcaacacctgcaagtgcggcaccagctgcggctgctcctgctgcagctgcaactgagcgccggccggcccggcgatggcgcgcacgagtc

SEQ ID NO: 327887 - DNA, 143 bp, Zea mays
  unsure (1)..(143): unsure at all n locations
gctatncntacggaaatttttctgctctctcatactcccactcgtgcgctcgggagagcggctcgcataacggaagaacccaaatccaatacaactgcaaaccttctaacattcaaaatacaaacacaaggtagtcgactcac

SEQ ID NO: 327888 - DNA, 89 bp, Zea mays
  unsure (1)..(89): unsure at all n locations
cccacgcgtccgnntaaaaaaatttatttttttaaaaaaaaaaaaaaaaaaaagggaggagtttttaaaagggcgggcggtttaaaaga

SEQ ID NO: 327889 - DNA, 139 bp, Zea mays
gaccggaacggaatgcccgacccaacccacccgtccgcccactctttacgtccacgcatctattttttactatatcactagaacattctacactgagctcgttgctagcttagtggctcctcgctgagactccactatg

SEQ ID NO: 327890 - DNA, 307 bp, Zea mays
atgtacttgtctcctccacagttattaagccgcccatccttgtagcggttatatcaggtgagaaacacacccacactgtcaccagaggacagacagcgggcggcgtacgcagtcgcgatcacgagcacggacgagcggtcacgcgaaacatcacagtcaaaagagaaacccagccaacagactggaggcgcccatgcgcgccttcattacaaacacagaaaagaccgaccccacgccagatcagagagtccggcgcgcgcgcgctcgcgtcgctcagaccccagagagagaccagagcagagcgcgc

SEQ ID NO: 327891 - DNA, 252 bp, Zea mays
acacacaccccgcacaccgcaccagctcagctcagctcagctgaccaagacaatcaatcatggctctgccgcgccagggtcgctgccgctgcccccctcctcctgctgctgctcgtcgccgccgcagcgcagctcgtgtcctccgtgtcgccggcagacagcgacattcgtcacaagtcctgccgcacgacccattacccgcccgcttgcgagcagagcctggcctcgtacaggagctcgtcttccacgcgg

SEQ ID NO: 327892 - DNA, 300 bp, Zea mays
accgctcggacgtgcgcgcttaacgcaacggctcagccctcagaccgagcaccaggcatcggattctgatcgtaccgccggtggactaccgcttgagttggcagcagagacttgacagtggctccaacaaggcaacacattccatcggcaccaacccagcgcggcgccaccggcgacccgtgcccactttctaggagagcgatagccacggagctgacctctgcgcaactgagcacgtactactgcacctgcacgctcaaggccatctacgtgctcattgcgcggcaaggtctacgacgt

SEQ ID NO: 327893 - DNA, 139 bp, Zea mays
tggctctggacctttgggctgatttatgtgcttgtttatgtgcttgtttatgtgcttgtcgatgtgcgggtcgtagaagctgccccgagagaggaccaagtagttctacctaggagcggaccgattattcagttcacaa

SEQ ID NO: 327894 - DNA, 438 bp, Zea mays
  unsure (1)..(438): unsure at all n locations
ggcctggacctttgggctgatttatgtgcttgacgtatgcttagacgcgactatacccaatacatctacagacctacanaggagaaaatagataccccacaagacggagtaggcgcctaagagttcatcgtggctaaaggggaggttcatatatttgatgcccaaccttacgacaataaaccacgggagagtaaggtctatagagaaagtggagctcgcggccgagaagacggaagaaccgggacctaaattaaatcacgcgatataggaacgttctactacaacgcatgtctaccgcgaccgcgcactacaggtttggtatgcgcccgacgagtccgcgattctgtagaataaagcgtattcactcctgccgaatctgacgtcggaagttcatcgtacgaatcgtccgtatatagaagtagactggtcgtcggacat

SEQ ID NO: 327895 - DNA, 468 bp, Zea mays
tggcttggaactttgggctgatttatgtgcttgggaaggggtatggcggagagcggagaatcggagatgtagtggagtttctgttcccctgactcggcttcgtcttcgtcgtttggcagtttgttgagggagatgtcgtcgattcgatgaatcgagtttatggatgagaaggaggggtatattatgtaggagattggaggagagtgtgtgtgtggacttattctgcacatatctcttctcctcctcttgcgcttccggtctagacccagccgtcgtgttgtcctccaggaccgaccgtcgtcctatttagcgactgtgctgctactcctgtgcccgtccaactgttcggccgtcgtactggccccccccccggcgccgcgcggccgggggcgtgggtataaggcccttcttcgcccagttcggaccggcgcaggaccctgacgcgactgacgttggttgaaaataaaa

SEQ ID NO: 327896 - DNA, 363 bp, Zea mays
aacacatgctcctgcgcgttctactcacacacttagcgcctacaccgctcaccatgcgatcgagtctgacagcaccggcaagtgccaatgactctacagctgatcatgcagtagctaatgcatctgactgggcaatactgtgcataccgaccaacccagcaggatgaaaaccatgatccttgctgcttctaccaccaagggaagggcacgcagcttacaggcgggcaactacggccgtactagcgactgtaacagctgaaagcgatgtaccagttgatgctgctcactgtgtacgatgtaactcagcggccgccggtcctacagactgctctcacgactactaccgaatgaccaccacgagag

SEQ ID NO: 327897 - DNA, 463 bp, Zea mays
tggacctttgggctgcattatgtgcttgtttatgtgcttggttctgctgatcgcagcggttcagtgatcgtcgcggcgtctaggagtagcttctgcgatgtgaagtaggcctcttcttatgtgggtttcctcaagacagtgcgtgttatggtcgtcgtgccgcgtgagaggggtgcttaggctgctacgaatttaaataaggaacacgatacgtctaagctatagaccgtagacagtaaagtaagtcaccgggaatgatgtcttgataattattatatgttctaggcccggtcagcagatagtactgatgatgaggaatagaagacggtattgaaaggagttgcacctgctctaactctatagccttttactaagaaaacttgtaaggaccgtattcattcgagtatcttagtaacgaagactttcgaaattacgtaaaacacttacgttcgtgagaatcggt

SEQ ID NO: 327898 - DNA, 102 bp, Zea mays
gtcgcacacggtcacctacgctttgactttcgcatagtatatgccacactcactataaccggagtgggcatatacgtatactgaggggtcatgcctcaaatt

SEQ ID NO: 327899 - DNA, 371 bp, Zea mays
gacctttgggctgctttatgtgcttgtttatgtgcatggtcctcttctttgtattggccttcgcctaggcctcggcctgcgggtgagagggaagagatggtggtgctagatgtcgagcattgaggtcctgacggtggttctgatcgggttattgatgattatccttctaataatgttccgagtattcatcgtgaggcttctgagctgaagactacttcggactgggagatgtagaggctttgtggtcctggtcctgctattcctcttatggaggatgtgacgtgtagtgttactgagggtacgaatcgtcaggagtctgatggttgtaatactattgccaatgaggtttagctttgtggtagttgcggagg

SEQ ID NO: 327900 - DNA, 443 bp, Zea mays
  unsure (1)..(443): unsure at all n locations
tttgggctgatttatgtgcttgtttatgtgcttgtggatgtgcgggttatcttagtatcgaatatccgaccgacctagcaggcagtcagtcagtcgaactataacggacttcattaagccttgcttgcttagcagttatgatatgatggcgatgatgatgaatgtgggtgtcttcgcgcggaatgataatgaggtgtcgatcgcggggttctgtggctttacttcgtcggaggatcattattcgactgagaaggcggtgtatcctgtgtgtgagtgtacattggagtgtgcggcgtatgtgtgtggggttcntgataagggtcctcctgagcgtatttatgatgcgatgctgtcgatgcgtgttgatccttcgtgtgtgtttggtgcgtggatgtttgcgactgcgtgtcctctgatggcgacttatgagtgggggcttttgg

SEQ ID NO: 327901 - DNA, 459 bp, Zea mays
  unsure (1)..(459): unsure at all n locations
ggacctttgggctggtttatgtgcttgtttatgtgcttgtttatgtgcttgcttatgtgcttgcttatgtgcttgtttatgtggttgggtctccacttacgggtcgaatagatatcatcatctgaccgtaactaaccattgaaaaaacgaatccgaggagaaaacgccgtcgaatccgtataaaaagaaacggatagacgggtcaaccccgaagaggcccgatatctacctaaaaattaatgagtagatcgcttaagaaacgtcaaattcagttactaagcataataaggtggcgtaagaggaagatgaatcgttattcgagaaatccgtgacagtaaacgcaggctggtaagacgtaaaaaagtacccggaagagtacgcgcttaacccgacgctactaaatacagcctagatttcaggaattacgtctgatatggccgcaccncagctctcatcaac

SEQ ID NO: 327902 - DNA, 286 bp, Zea mays
gacacacgcgtgcaaagactcatgagctgtttcgttgtacatgccacacgcactacacgcagggcagcgctattcatatatagagaggttagctatagctcgcacatatatgtaactaactaactaactggctcgctagcgtcgatccgtacagcacagccaaagcatctagaatcaatgcaaaggagaaccctgccagtgtgctagtactaccagcgcattttaccaaactgaccttcagaaacctgtacatccgccaggccgggccgtgcctcatggagctaac

SEQ ID NO: 327903 - DNA, 464 bp, Zea mays
tttgggctgatttatgtgcttgttgagactgagcgtaagtagatccgcgccgacccataacccgtttggcggccgtcaacgacacgggacgaaatggccgttggcccggtcgtcaccaaggccgcgcaactcgacgggtaaccctagtacctcaacgtttcaacgacgaactcccggttacccgtcgcctcgttcaataaaaacaaacgtcgattgactcacaaaggcacaacgtaaaacaaagggtggttgactcataggacttaagtccatgcatgtacgtacgtgatgctacagtctcctcacagcgctattcaaacctaacctatcggttgctgccccataatactgagatcgggaaaatttcggtgccatttaatccaactgttccgtagcatacttttcccctgttagtcggtgcaacactcaagaggtttgaattgactgcttccatgaatagccgt

SEQ ID NO: 327904 - DNA, 343 bp, Zea mays
tggctctggaactttgggctggtttatgtgcttggcgctctcgtagtttctactagtggcgttgtcttcgttggaggttgttattgtgaataagtctttgttgcggtctctttctgctggtagtgctgctgttctccttattggcattgtggttattagtaagaagtggaagtgggatggtagtagtggtgatgatgatgattgcggtgaggctgcggatgggactgagtctaaccctgatgttgtgttgtcgtttttcgagcggtaatgtcgttctgatactaagctggggtagacttatcatcataatatgaggatgaagaagtggatgcgtaaggatttt

SEQ ID NO: 327905 - DNA, 490 bp, Zea mays
ggacctttgggctgcattagtgcttggttatgtgcttggcgtgacggccctactaaaattaggaaaccgtccgtgtcacattcgtcttggtctacatccgtgaagcccctactatcttccctatataagcaactagcgcggaacgcgccgacgacaccgtaatcggcccaatctgcgactaccacgaaaaacgtctttacgtaacgctaaccacgatcgggacttggcctcgtctctcgtagcacagcaaaaacaagcctaagcactccgacccaagaatgccgtgcggacaccccagctaagtagccgccaggcttacgaaacccttagtcgagctagaaaaggatagcgaacaccgcatattcgagaaagtcaaacccataaagtaaccagagaggtcccacctaaacgcccgggtatcaaaacccgctgagtttttggtagatcctacattactccactaaaccccaagcaatgagtagttcttcgg

SEQ ID NO: 327906 - DNA, 430 bp, Zea mays
  unsure (1)..(430): unsure at all n locations
tggttggacctttgggctgatttagcgcttggattttatcgagtaggccgagaccgataatcctacggcttaatagtccgacggaatgcttagagagcggggtcggcgtaaatagaagtccggagtaaacgttacttccgtggccctatccgtcgcgcgtaaagtcggagtcacggcgaagaagaccttctcccattagtatactgtanactccgtcgggaataaaatctcggcgtctttcgcattcgttcccaacgcgaccaacggagggctatacgtcggaaataagtccgttacgtaggagcctacgacttcnttaatcggcgttcntctgcctaaggaggttacgaagacgggagccgaagcgcattataattcgaagagtacaactaagaagaagcatggctaggacgtgataaacgccggggac

SEQ ID NO: 327907 - DNA, 384 bp, Zea mays
atcacacgtacgatgctgaacttgaggcgtttgctttactagagactccaactgaaccacggcatagggttgatcgtgataggcttactagatatccgcctactaatgcatctaagcatactatggctcatatacaggcccagctctacagcacaatcacatgcattagatggtggcaaagaccatgatcctcatgcaacctcatatgctgtcacgaacactcacagcaacatggatcctgttgtacagataagtatctctcagttacatgacatcactgcgctaaaggccaatcaaggatacaggaaaagacatgtgtcacatgagaaaatttctgatgagacagcaattgcttgaataaccactggaaatattaagaaaaat

SEQ ID NO: 327908 - DNA, 423 bp, Zea mays
tggcttgggacctttgggctgatttatgtgcttgtggatgtgcgggtggctgtgcgggtcagcctcagactgtgagtggttgtttccaccggcggggcccccccctacgcccccccggcccctcctcggcgccctatgccctctaactcgtcaacgaaacggaagtattcgatgctagactacattcggcggtaatcacttaccaaatcgaatcccatcgcaatcgtatcgcctaactaatcgcagtggtcaaccagtcagtccgtcattcgttggggtcacggtaaacgtacaaatcgatacaagctattaggagcaagcgcaatctctgagcttcgtctccgccatcgcccgggcatcgatcgcgctatcttatcatcacccaagaactacagtagcaagcccatcagcgctctcgtcgct

SEQ ID NO: 327909 - DNA, 445 bp, Zea mays
ggacctttgggctgatttagtgcttggaagccgcggatataatcgcggacaagtacgacgaactgaaggagtaagaggaaggcgccctggtcgagtaagacgagaagtaaggagaggaagtagaagaaaaaggaaaagaaacggacgttgacgagaagtaagaagaggaagtagaagaaaaaggcctcgtcgacgagaaagacgaagacgaaggcgattagaagacggaagagaacaaggaggagatcttgaagaacaagaaagtaaggagcgttagggacagaagttagggaaacgacaacaaatacgacggactaaaactcagggaagttaaaagcccgtcgaatattttaagtttacacggcattgactgcttctaatgcgagaggaaaacagcggaaaagccggccgaagcgaccgagaaagagttaaataggaaccctgc

SEQ ID NO: 327910 - DNA, 453 bp, Zea mays
tggctctggacctttgggctggtttatgtgcttgtttatgtgcttgtttatgtgcttgtggatctgcgggttggcgttgaaggtttcggatagacggtttgcactccggatgagagtgtagtagtcgttagtcttgaaactggcggttggactgtttacctctcagagttgcggagttgtgttggtgcgacgagaagaacagccggggtcgagaacgagatgacagttgagccgacgaagactcgtattctgaagtctaagtcttccgtgcttgtactagtcctttcgcttccggcgccgtatcaggtcgggaaaccccgactgcgagaccccccccacttctacttttgatcgtcgctgcgttccttctccgtttttccgacgccgcaaattaaatcaacgcgtgtcggcgcccggcggcctgacgtaaccccggcccgagcgatacgtcag

SEQ ID NO: 327911 - DNA, 196 bp, Zea mays
cccacgcgtccgaaaagtaacaagagtagttcaaggctgaatgcacggaggacgaggccgggaaccggacgaccgcagtcactgtcccaaccgcattcaaacttgcaacaggtatgccaatctacaggttccatgcttccgaccccgatcatggaagagactgcctactttttattgatacctaaaatgaactcac

SEQ ID NO: 327912 - DNA, 285 bp, Zea mays
cagacgcgtggtcagacgcgtgggctaacttgtcacgagcgcaccgtcgcacgttggggatgtccccaccggcgacgggatcccgaccggagccctaattccaaggggtaaacgatgaggccgtacgcggtggggacgggctgcatgtgcgtgtggaggctgaaagcgggggccgtcgctggtgccgcaagcccggagttgatggtggtgccggcgtctggtccagctcgggtggacgaagccgggaagcacgcagtgatggcgcgtacaaggctttccgggcgc

SEQ ID NO: 327913 - DNA, 429 bp, Zea mays
cccacgcgtccgcccacgcgtccgcccactcgtccgcggacgcgtgggtggatctgagactggattatttagagggagtaaatgtataggttaatggtagctactactttgacttatcaatcgtcccgcacatgggtccgacttaagaacaccttgcttcaggcgctcaagatgctgacgcacggccgggacgattgataagtcaaattagttgattcacctggatctcagcctcagatatttagagggagtaaatgcataggtcaatggtagctactagttttttcggcttatatgttagtgtctagtgcctctattcgtaagcacgagtgagaggatgcaccagcgtatctgagaatggcttcacagttctaagagacgaactagtagcgataactgttgatatttacatgaagaacatgctcaaaa

SEQ ID NO: 327914 - DNA, 308 bp, Zea mays
ggacctttgggctgatttatgtgcttgacgacgaggcgccgaccgtcggacccggcctgcagggctacgtcgcgggagataccgtcggcgctaggcctaaggccgccaaggcgctcggcgcgctgtcgtccgtatctcctaaggagaagaaggagaagttaaggctccagactatccctggcagctaagaacggcgcaaatcgtttaaggtcacaccgctaaagccaaagcctcgtcagtaatagagtcgccaaactcgagtcgcattcccccgccaataccgccgtagcaccatagagcctcgccct

SEQ ID NO: 327915 - DNA, 492 bp, Zea mays
tggctctggacctttgggctgatttatgtgcttgtttatgtgcttgtggatgtgcgggttggttattctcctcctttttgcgtagtctgagtcgacctggtgggtctcgttttaatacttatttattcctgcttaactttgacttaagattgcgttgcgacttggtagtagtccttgtgtggttacgggtatgggtgtggcggtggcggtggtgttggattgggttaagtaggggtgggttggtggctattcgcggaagaaggtatcgtcttatcctctttctcgtcctgctacgggtcctcctatgggtcctgtgttccttcttcgtcttcttcggaagcttgttgttgatatttcttagtattatttgatgtattgctttggggattgttctgttgatctttgtgcggttgctgatgtgtgtgttatttcgctcttgaatgtggaggttgctgacgtgtctcttgctggagttatggcggatccgggtga

SEQ ID NO: 327916 - DNA, 481 bp, Zea mays
tggctctggacctttgggctgatttagtgcttgtttagtgcttgaaatttcagtgagtcgtccttcagcacacaaacgagtattatgtgcgcgcggcttcctcgaagccctggtggtggtgcatgcagtggtggctctaattttaggtgagtctggtcttggctatttgctgacttatgtaattacgctgaggaggaagattagggagtttaaggaggagaatgccatttccggatttatcgcttgcgaaggagagcccgctcccggcgccgtctatactcccgtacttcctaacgatattcctacctacgctatcgacccgctcgggagggaaatcccggcctggactatcggcggtacgaaggccaaggtcgactgcgtcgagctgctcatccacgtcgtcacgtccgtcgtctaagacgccgtatagtgccgtaaggagtctggcactattgtgtcgtataccaagtcctgcgtaatc

SEQ ID NO: 327917 - DNA, 324 bp, Zea mays
cctacaccttcaccatcacctaaccgtagtcttgctcagtctggcaagggccagacacaggggaaggatcaaccaaactcacagtgaccgtatcaagaacaagtacaacaacggttacaacgaccacatgctacagactatcatccatcacaagtaagacagactgcatcgcatcagaacactcttactactgatacagccgtcacccacggcaaatgatggaggccatccagaccatcttactgccgagacggatccgcgtctgacccctacaagtgcacctactgaatcaactcatgaacttactgcagtggaaacaaacat

SEQ ID NO: 327918 - DNA, 419 bp, Zea mays
cccacgcgtccgcccacgcgtccgaatcactgtctggatgatgagtgaactacattgtacatgtttgagtttgttgagttatattgtccgtggacaagctgtatctggatgtggtcaaccggcttcaggggctcatgcggctggcctgtttttgctctgtgctggacgtctagtaagtctgcaactctacatcatatgttatgtagtgagtgatgttcagttcatgttctgaattcttaatgaaatgtgatctgaatgcctgacaattctagtattcataatttctatgatgctctgaaatctgaatgttcaatggtgttctgaaatctgaatcgtccactctccactgtccagttctagtattcatattcgttttgcttggtaatttggttactttgatattgccttctatatgctat

SEQ ID NO: 327919 - DNA, 344 bp, Zea mays
ggctgtcggcgtccttgtcctcgtccgccttcatcttcgtcgaggaggaggacggggagggctacgaggaggaggaggacctggcctcggacgcgggggcacgccgtggacgtgccgctgccgatgcgtcggctgctgactaacacggtgctgaacgtgtccgccgacgcggcgctggcgttcgtggagcagggcgtcggcggtagcggcggcggcggaaaggcgtgcggcatcaacggcttcaagggtgggctcggggacggcgacaggggcagcatcctgtccatcacggacgcccactaccggcagatgatcgaggcggacccgggcaactcgttgctcct

SEQ ID NO: 327920 - DNA, 347 bp, Zea mays
tgcttgatcgaaggtcgcgtaggcgtacgtcccccagagcatataactagagtcgggtgatgcccacgactcgttgaacgatacttcaggcagtacatcactattggcgatacccatagaacttcgttagacagattcagaactctacattcggtaagggccgacgaaaaatcgacgttggaaatcggactctattagtggatattccgactaatttcgaaacatgagtacctcatgcataaggatctaacccgttacgatagctaatagtctcccgtgctactcatatatctaattcaactccaacatgcgcgacaccatgcgtgggtcgtctaggaaggataact

SEQ ID NO: 327921 - DNA, 184 bp, Zea mays
cttatgtcgaacaatcattctttgcgtttagatggcatagatctttttcttaattctatcttatcctcgttgatgactctcttgaaagtactcttctttagtcacgatcatcatgtcgtcctagactgtctataggtgaggatttactaatattgtgattcactattctacacttttaagttcg

SEQ ID NO: 327922 - DNA, 334 bp, Zea mays
ttggttggacctttgggctgattatgtgctgttatgtgctgttattgctgcctgacctgatcgtacgtattgtatggttctcgcgaccattctgatctgatcgtaccgattgtatgttggagtgtcaatttggcggctaagttgtttgggtccgtaagtgtcttcctatgagctgagttggatgtttgtgcatagtgggtgatggagggatagattgtgggtctgagcggagtttgtcctccatatcttctgccggaatgagctagctaagtgaagttcccctctagttcttcatgatgggatatgtcagtggtcgcctctctgccgtgtggtc

SEQ ID NO: 327923 - DNA, 216 bp, Zea mays
tttgggctgatttatgtgcttgtaaataacgttaatctatggtcagcaactcctaggaaacgaccacttcagtcatatcgatcggagtagcgtcccgttatttgtgagcattgagtccaccgggctcgtagtcgtcgacacagacgaagacctcgtcgagaacgattatgcatgagattacgaataatttggtcaagggagttcagtgagtactga

SEQ ID NO: 327924 - DNA, 306 bp, Zea mays
  unsure (1)..(306): unsure at all n locations
tgatgattgttctcaagttgaaccctagtgtaactgataaaactcgtgaaaccaagggtatgcaactctggaactcaaacgttctactcgaggattgatggttcacataaatgtgggaacacgtaggaaaaactatgcatcttcgatttaggttgcaaaagagggagcttgaactcattacctgagccatcacaactttcttctctgcaacttggttacaggttatgcccttgctaaagggataatgcaaagatccctacaacaccaattagaattggggaagacgaacctnctnctcagtctcct

SEQ ID NO: 327925 - DNA, 289 bp, Zea mays
gacctttgggctggtttatgtgcttgatctttcgtatggtattgagttcttccatctctccttttaaacttcctcttttcttggaaccgggttaacagtttgtcgtgtcgatagctgtgattctggctggggaagaagtcctgtctttgcgttgtatactgggagaggagtcttttgtcttagttctgatagatgtccttccgttgctggttctcatggcaggtggtcatcgtgctcgtgacgagtcgtcatgctcgtcttgagctggtagtgtaggatgaggagttta

SEQ ID NO: 327926 - DNA, 409 bp, Zea mays
ggacctttgggctgatttatgtgcttgagtctagctaaatagtatacgagcatctcggccaggattgataattgtccgtgacgtacgacggggatggctacagggtagttagaggctgctatttagtcgccgtcgtggaagtcgatggtcgagtcgtagtcgttagcgtctgtgtcggcggacctcgacgtacattgctctaagactccgttggcgcatacgcgcggccttaataatacgacgcacgatagcgttgactcgatgatgttgtatactaaccggactggcgcttgcatgagtgattcgcataagcagtagacgttcgagtagtgttgctcctttacgattgactatgacactaacgcggattaaagagtcgtcacgatgaggatcctcacgaagtagaacg

SEQ ID NO: 327927 - DNA, 409 bp, Zea mays
tttgggctgatttagtgcttgggatgtcgtacctacgtgatctgttgaggataggcctcataattgtccttttcgtactacctcgatggttaaggggtagttagacgctgttatttggtcgccttcgtggaggtctaaggccgagtcgaagtcgttagcgtctgtgtcggcggacctcgacttacatgggtctaagactccgctggcgcatacgcgcggccttaagaatacgctgcacgatagcgttaactcgatgatgttggatactaagcggtctggcgcttggttgagtgattcggataagcatagagcgttggagtagcgttgctcctttacgattgactatgacactaaggcggggaaagagtcgtctgaggaggatcctgcgaagtagaacgagggtcgggcg

SEQ ID NO: 327928 - DNA, 215 bp, Zea mays
cggacgcgtgcgcggacgcgtgggaaaaataaaaaaaaaaaaaaaaaaaaaaaaaaaaaaaagaaaaaaaaaaaaaaaaaaaaaaaaaaaaaaaaaaaagaaaaaaaaaaaaaaaaaaaaaaaaaaaataacaacaaaaaaaaaaaaactaagaaaaatataaatacaaagacacataaagcccctcagaataccacacaatttattaacaaacc

SEQ ID NO: 327929 - DNA, 470 bp, Zea mays
ggacctttgggctgatttatgtgcttgtttatgtgcttgtttatgtgcttgtcagtcaaagtaataaggtagtagtataagtaagaatggatattcttctttcctgttcgcgactacgctgctccgtcgtggtggtaagcgtgggcgtggtcttagtcgtcttcgtggtagtggacgtaatggtcgtggcacgcatttcgatgcggagattgttgttattagtagtgctaagattatggcttctgttgtgttgattattaaggttagtgttggtggtcctgaggtggttattgagggtggtggtcgtgatcgtaatattcgtaagcgtggtattagtcgtggtcgtcttcgtcgtagtcgtaatcgagttggtttggtctggtgacggtgtatgagagctgagaggatgatgatgaggaggtgcacaacaaacacaacagtggtgcttagcaaacaagacttcgctaatc

SEQ ID NO: 327930 - DNA, 435 bp, Zea mays
  unsure (1)..(435): unsure at all n locations
tttgggctgatttatgtgcttgtttatgtgcttggttgcataataccagcgcactcctcgtagtacatacctgcataggggtggtgttatccgaaaaactactcgttctctacttatcggaatagacgatggtcacactacgtagaataaacctgaaggtggccgagtacgttagaaacacgcgtctgtccggactggaaggttaactaaccacgtcgagaagagtcggtaaaccccacccgttaaacagcgacacgtacacatcgagcaacacactccgcttcgcactcntacgcaggaagatctccacaagactaagactcttataggactcgaacggtagaacgctattcctcataactcgtagttctaggatcatccgaggcgtcctaatcttcgcgatcggaggcagcggagtcgccttcgcaaattacg

SEQ ID NO: 327931 - DNA, 483 bp, Zea mays
  unsure (1)..(483): unsure at all n locations
gaactttgggctggtttatgtgcttgtttatgtgcttgtttatgtgcttgtttatgtgcttgggcgttccgattaatccaggaacccggcgcctcgctctcgtcgatacgctaaattccttagtacgcctgcccggggcgtgtacaaagatacgaatcgcgaggaacgacataagcatagcatggaaacctgatagcactcgtccgcggcctaagttgggccgaataccgaagacagtagagcccgggtacgtaccagacgcactgcggcatcggagaaacacctggcgcagtcgccggccctcgcccttgccctccttagtagccattcgcgcctatcattctaaccgcgcttttctacgagctacgattgcaccctagagcccacgccggttaccttcgtatctcaggcagttgtaatcggtattacncgcgagagccaaatcacggccgccggccgtaccactctcgcggttcgcgacac

SEQ ID NO: 327932 - DNA, 486 bp, Zea mays
gaactttgggctgatttatgtgcttgtttatgtgcttgtttatgtgcttgcttatctgcttgtttatgtgcttgattatgtgcatgggtgatttactgatcacggaaggaaggtgtgagttggaggtggatggtggaaaggttgggggttcattgatgctggagttggtgtattcgtagggttagttgttgtatgagcatgggcatggtatgccttagggtttctgatacttctttgctgggcctttgtagatcgttttgctcattgggtctggtggtggtggtggtggtggtggtcactataattagaagtagctgcatgtgttcgtggagatgcatcatgtttaggggcattaggttgcattaggtcacggcttcgccgtcgaaggaagattcgcgagaacgacgtgctctttacgccgcggttctggtccaagtcggcgctcgcctacaatcgggccccctccggtcgttaccttacggccta

SEQ ID NO: 327933 - DNA, 448 bp, Zea mays
ttccaggtttcgtccgcttacagagggagggagagagagagagagttagattggagccacacgatgctgagatggaggtacgggagcatatcattatggctctgacgacggagcaccgcgacggacactatcgtacctcttgactgaaatcgcaacccttatcgagacaaagactgtgctcgacaccgtaaagccatgccgttattcatacactatatctagtttgcatctggcatgaggtcctctttaattgaaacacttgatccatgtatccataaatctgggctatcttagctagtatctaatgaaaatgatatgaagaatcctgacatattcacagcccatgattagtacaatcatctatcaaatcttacttctgataccgtcttgcatgcattggctaaagatgatcttaaagacgaaaggatcatacattcattaattactg

SEQ ID NO: 327934 - DNA, 282 bp, Zea mays
cttgcagtaggaagacggagctgcaatttttggcgacagctgatattcgacgaccactggagctgcaatttaccgtgaaaatagaaatcccttgccaaactagccatcaatgatgggaaaacctgcgtgctggatgatgaaactttatattagttctcatgagtaccttgtaccgaccaattgtgtggcctaatccagtaagtcatctttgtaaaatcatactaactcttattgtaactggatttggttccgaattaattcattttaaaaaaaacaaaaata

SEQ ID NO: 327935 - DNA, 496 bp, Zea mays
ggacctttgggctgatttatgtgcttgtttatgtgcttgggatcatttggcgcaagcgagtggggcgtagactgcgtttgacttggctgaatttggtaagtttgttatccctaagactcttgtcctcatcgacaaaattactgagaaggggaagtcggccactgatgctaagcaccctcctcctcatgcgtatctggagatttgtgatactcgtggagagatccttcgtttagtgattggtgatcctgcgtcgctttattagtagatgtcgttaggtcctatcttgttgggtcttcatatgactcatacgaagaccgctggggatgataatgaggagtcgagtcgtactctgcctgggcctagtactggtcctgctgtgcttagtcgaatgtgcttgagttcgggtatgagaggtagttagtttacggacgcaaaccatgcggagtatatctcgcacttcacgatccctaagcactcaggcttacgcaagtccccc

SEQ ID NO: 327936 - DNA, 296 bp, Zea mays
gacccacgcgtccgggtgggttggcttctcctccccctccggttcgggttcgggttcgtgaggttctccgggggtcggtttcgtgggtgagcggatcgagatggctgcgtcagatgttgagtaccgctgcttcgtcggcggcctcgcctgggccacggacgaccactccctgcacaacgccttcagcacctacggcgaggtcctcgagtccaagatcatcctcgatcgggagacgcagatgtcccgcggcttcagcttcgtcaccttcttcacggaggaggcgatgcggaacgcca

SEQ ID NO: 327937 - DNA, 136 bp, Zea mays
cccacgcgtccgagcatatcgagaagaatttagattaaacaaaaatgcctgaaaatatgcgtaaggtaatgatgctcgtttttatggaacacatatgatgtcctttgtttaagtcgtttccagtaaatatattatg

SEQ ID NO: 327938 - DNA, 361 bp, Zea mays
ctagatcgcgagggccgcccttttttttttttttttttaatcaggactccctgcaagaagaatgagttcagtcatttttgtcattctctgtctctctccactgagattcaacacgttatcagacactttgctctccaacgaaggccatcatcgtgaagtgcactgcacacaccagtatgctacacggccggcggtgtggtaactgctatcatcatccatgacaagatgaacaagcaagatcacgattagcgtttgcagaccgcgacgagaggcagcacgccagcgtcgccaggccggactcgctcctgcgcgacactcagtgagtaacctattacgaacctaaagcaatatcgtctctcct

SEQ ID NO: 327939 - DNA, 271 bp, Zea mays
atctgcaacgggcaaaatataaaccactaacacatcaccgattaccattcatcacacatttcacaacacaaacctcccaacacatccaacacctaataatcatgtctcgtcatgacccacacctatcaatacttcctacacattttccgaatcttcaaatccttttgaatcatccttataacctaaacctccattacctactacacagtatctccatatactcctgacccacatattccgacttcctcctaccaatttttctccaaaaccc

SEQ ID NO: 327940 - DNA, 165 bp, Zea mays
gctgagtattagcgcatactgctagactgccactgtcgtctgtgctatgcatgcttttgagctcgagtgatgtttgaggaaccagtgatcgtgttgatggtgctgaacattggaacctgcagtacagtgtagcatgatgcttgcttgctgggccacggcccgttc

SEQ ID NO: 327941 - DNA, 424 bp, Zea mays
cgcgtacgtttagtattttttttttttttttttttttttttttttttttttttttttttttttttttgagcaattaacaactgaaaacgttattttatatgcaaagtagtagtaagacagttttgcatcacttatgagtacaaagacataagacatcgttatctatttttcagcaaataaaacactggcaaacaacgaaaatttttatcatatcggactaataaacactactaagctgtaataacctgcgagtgtaataagaaccaaacaaagaaaaaaagaagatccagccctaattagcactaactacttagctagcggtagccattaggcgattatcaagcgcattcatttcatgccatatcggggtcatggatcacggtctccgggcttgggccctgacaaacaccgggagagggcccca

SEQ ID NO: 327942 - DNA, 464 bp, Zea mays
ccgcccttttttggtttgtttttttttttttttttttaacatgtttgttctagtagctttttgagactgagcgcatattactcggcgaacttcaagcttaccaccaaaaccagtaagcctcctcgaactaacataagagattacacatccatacttcccaaggctacccgccactaagagatccagatttcaaaacattacatttgaacgagactttggatgaatcacattagcttgcaaaatacgataaccagtaaatggagaacattacatttgaaccagactttggatgaatcacatcccacatggctttcaaaataactctgtttcgaccagatcagttgctccaacaaatatggtgatagccgaacaatcaagtgccaatatcatcttcgaagcatcggaccaggcttgaagtaccctacaaagttggggatgtgactgctccattgtttcatgtgaac

SEQ ID NO: 327943 - DNA, 435 bp, Zea mays
catctgcaaggtacaattggcaaatgaagctgacgatcttgaggccgacggcgcgggccgcgagagcgtctgctccatctgcaaggtgcaattggcaaatgaaaaacagctgaccgatcactatggatcaaagcatccaaaggagaaacctccgagcacatcgagcaccgaataaccatggctggtcgtgacgcagaaatatagatcctgcttggctggtttgaggatctttaagtccgtctgatccatgccttggacctcaacgtcagttatatactctctagtgtgtgcatttcctcttgtttcaggtattgtgttgtcgtgctgccaatgtgtctccaaagtccaaactgtatgtggtcaccatggcattgggatgatgcgaaaaaattatgagcgtatctatgttccaatgtttgtgtggcttacaagatg

SEQ ID NO: 327944 - DNA, 322 bp, Zea mays
gtcagccgttcatccaaccgaaccgatatttgccttacatccacaccatgatccctattgtcaacgttactacgcatctcaagccggtcacatccagcttcagcccagaagaccactgtcttccaacatataccgaatacatacacctccatatacagtggtgataactacaactttaccatatacagcacatacacagtgataccaatgacacatctacattacataaacaaccaaatcatccatcttcttacattatacaattcaacttacctcataatagccaccaaaattagttactaaaactactgcaacatgctta

SEQ ID NO: 327945 - DNA, 175 bp, Zea mays
aaatttaaacttcagtaccacatctatattaaataccatcaacaacacatacaactatgaaaaaaacagctacttatacaattgcatcaacaaacaaacaagcaccaactactacaacaacaatacatcatatgatgaaccaaataattcctcaacttccaataaccaatccaat

SEQ ID NO: 327946 - DNA, 73 bp, Zea mays
cggaccgacccactcgtccgcccgcgcactcggaaaaaacctacaactattatcaagaaaacctcaaaccact

SEQ ID NO: 327947 - DNA, 212 bp, Zea mays
attcccggtcgaccacgcgtcgccacgcgtcgccacctccgaaaaatatattatcactaaacaaaaaaaaaaagggggtttaatttaaggtgacgataaatctcatcttcaaactgtaatatactatagtgtacctaatttaattactagtcatcgtttacaacacgactatcgaaaaactttggaatacccaattaatatttctaagcata

SEQ ID NO: 327948 - DNA, 299 bp, Zea mays
ccaggcgtacgggcaggcgtgcagacaagccttcgcacactcgcgttctatgaccgccacatgagcatcggctcaggcgagggacatcagtgccacatcaacatctcgttcaacgcgggaaacctgtaccaagtcacgtacacttgcaatgcgcggaagtactccgtcttcacttgctacccacaagaaaggcccggactacttgttggatcatacgcacatgacacaccctgaaacgatcaccaatcacactagcttgacatacactgtcctgacaactagatctatggcattggttg

SEQ ID NO: 327949 - DNA, 75 bp, Zea mays
cccacgcgtccgcccacgcgtccgtgaaagtgtaacacgctacattttgaacacagaaggttaccaacatggggt

SEQ ID NO: 327950 - DNA, 395 bp, Zea mays
aaacagggctcgtggtttttcattggcccacttggcctctgatctgcccttggagcttggatctcttatcttagtttatttatattatggatggcatggcaacctggattcagagaaccagtaggtactgaaaaaataatccaaaatgatcgagtatccactgcccaggctcgttactgcaatactgccttcgtgaatcgtgcctctgcctcccaatctggcatggggcagtgggcctcagttcttccttcaccactagccccttttccctttcaagtcccttttgaaattttctctctctacaatttcttatacaaaagtgaatcgaattctgggatttttttaataaaaaaattccgggtacagaaagacagtgacggagatacgaaccaaac

SEQ ID NO: 327951 - DNA, 267 bp, Zea mays
gacccactcgtccggtgcggttcctccacatatcgtatcggagtgaattccatcacacagagatcaataactcgggaagaccaacttagcctatggtagagcttgcttataaaccaaactacataaatatcatgacgatcattccaacttacgacccattgcccaatgaattacatagtaccttagcctgtactacataaacgacatcaagcttactactaccattaagctgcatgccttataaaaacaggcacactaggtctgtca

SEQ ID NO: 327952 - DNA, 117 bp, Zea mays
gagctgcattactgtcataaaaacaaaatttttaaaaaaaaaaaaaaaaaaaaaaaaagaaggcataaataaatcatactacaatctaatcaataaaaatatactttttaaatcaca

SEQ ID NO: 327953 - DNA, 409 bp, Zea mays
gcggtccgcaaggcacttacccagaaggcatatcccatgcagcttgtgttattgagcagtagcatgcgatctattgcgagtgcgagttatgtagacaagagattagtggacatgccatatgcagacgcttactatgatttatacactagttgtcaaactagtagtcaatctgtcattgcaaggagccttctcatgagaaggaccatgcaaagtggcctccacaacgggttttagaacagtacgtactccaaagggaagtccgctggcaacactcttagaaaatctatgatagtatctagtatactgttcaggtagctgatctgctacaccaactacttcatcctaatgctaaatatcataaccattaacgcaacgaagacactcatggccatatgttttgccatgaact

SEQ ID NO: 327954 - DNA, 174 bp, Zea mays
cccacgcgtccgcccacgcgtccgaaaaaaaaaataaaaaaaaaaaaaaaaaaaaaaaaaagaaagaaaaaaaaaaaaaaaaaaaaaggaaaaaaaaaaaaaaaaaaaaaaaaaaaaaaaaaaaaaaaaaaaaaaaaaaaaaaaaaaaaaaaaaaaaaaaaaaaacaacagcac

SEQ ID NO: 327955 - DNA, 412 bp, Zea mays
ggcgcacgacgaggactgctaccggtggattacctccccggacatcctctgctaccggtgggccgtcttgcagggccggcgtgatggagcaggtgcgccaggactggcacaagatctttgtgctcgacgtcgccgtgctcgccgctctcgtctgcatctgctcatgcgggtgttgcgccttcaggaacgctcgccgctcccggtcccagtacccatacggggtaaaccaaacgtccaagataaacccacgctgggactactggtggcgatgatggggtggtagaagagaacagatctactaggctagctgtagcttctcaatgcctggatgatattttgatccagtcttctgtggaaaaagataaaataacacttgggatcaaaaagacatgaatttgtccaacataaaaag

SEQ ID NO: 327956 - DNA, 442 bp, Zea mays
cccacgcgtccggatgcgcgcctctctccctcccatacaaccaggccacaagcgcccgagcggctgaaaccctagctcgccgtcgtgctcggctcgccaccccgcgccagctcctttcaggccctaaccgttcgccgtcgcgcattcgagcactcgcggaagcgcacctagtgccatggcgaagaagcggaagcgcaccgacgcccccgcagaggcgaccggcgcagagaagcctgacgactctgcgccggcgcgcccggagcgcacgctcttcggcttcaaggacccggtccccgacgccgagcccgccttcgcgggcgccgaggccgcggtggcgccgttccggaacagggagaaggtactcatcacctgctcccgccgaatcacgtataggtgagtgctccctggtttttccgcttgcagtcttgtgagatgggtgatt

SEQ ID NO: 327957 - DNA, 455 bp, Zea mays
cccacgcgtccgcccacgcgtccggtttagtgaagaactgctttaggagaaacttgccccgctttgtccccttattagctaatcttattcgctgcgagcataactctggagaagttcaagttgcactgtatgatatcttccaatcatcaataggccccataatatcagcatagcgtatattgtttcctcgccagttgtacaattttgtcagattgtggtataagaaaagggtacagctttacagtactgtaaatgattcatggttgaggcatttctggtgttgaagctacatggaacatcgacccagatgtctaaacaaggtttttgctgcgcacatttgccattcttttttctaacattcactgggtaatcattgacacgttaaagaggatggacattggaataagtccctaattcctgttttggtgtcatttcccccctttcatcttggctct

SEQ ID NO: 327958 - DNA, 108 bp, Zea mays
gtgttgtgtgggtgcagcacaacacaacactctgctcgccgcctgatgcgacgtatagcgtcggtttctatacatcttatgtctatacactaaaacagtataacaaaa

SEQ ID NO: 327959 - DNA, 412 bp, Zea mays
gagtttcttggagtctatattgtgccatatttatttatttttctttcaatatcttatggtgttatggattttcatccttttgctagaggtattgtttttgtattaactattaaagcaaacacatgtattgtctcactgaggacgcttatttatgataatatcttattgttaaaatgaggtcaggactaacatgctcatgcttgtcttagatggtaaggaagtcagtagaactcgaagacaacatttcttttgatagcatatgatattatcagattatttttattgagaatgcctggattttttgggggatctgatatatgatgcactttctcaggcactgcggtttatacagaattgttttttagactatgtgctttatgctcccaccccctctcttttccatacaaaatgc

SEQ ID NO: 327960 - DNA, 194 bp, Zea mays
tttgctgattagtgctggtcagggcacgcagtttgccgcttaactacagccaatgatggagccacgggcctacgtcccgtcttatgaaggttcgtcgcgacccttagtatttcgcccctatacgaggaggagaatactcagaaactaaaaggactcttgagcgcaatcaaagggcatcccgagaaatagaaacg

SEQ ID NO: 327961 - DNA, 463 bp, Zea mays
gacctttgggctgctttatgtgcttgtttatgtgcttgtttatgtgcttgagatagcctaaaccttacatccctacgttacgggatcaggacttgacgaatcccataagaacgtcagggagaatcgcggcggaaagcacagcgtcttatcgaacgtcgcacgcgtagaggtcgcttaagtcactaataaccgtatatgggacactaacaagtaacatactccggacttcgtccgtttggacgacgactcgccgagttttaagatcgcagtagagatagacggaatgagtaggccgacgtcagagctcgtagacccctcatccggccttaaacgcgtagaagtccacatacctcacttcatgtccgggggaacgacgacatagcctaggagagttctggcacttgtaaggggataaccggagtacggaaatgacatagttacgtaccgttccataaccacgaca

SEQ ID NO: 327962 - DNA, 440 bp, Zea mays
gggctgatttagtgcttggaaagaaacagtccctaagaagtaaaacgcgtcggaagacactcatgtcggcgtctacaccgcaacagatatagtcgtcgtctacgagaaaacaccggtatcgaccgaggtaggcaatacagaattactagaatcaaccgtagacacggacgtttagacagtaaaagtaaaggaagaagtaccgagcagaaaagacacttccgacaaagcagaaagacggacgctcgtgcgcgaagaagagagtcggtccgaagaccacaattgggacgataataggcacaatctcagttgaggcgtttattcgaactcgaagtgcgtagaaaaagtctgcacttccgccaataagaccttagtatccgccgaaatctcagcggtaaagattaaggtacgggaggagaaattgcgctcgctccccacgcacg

SEQ ID NO: 327963 - DNA, 459 bp, Zea mays
ctttgggctgatttatgtgctctgttatgtgcttgtttatgtgcttgcgctcccttaagattattcggccacgtccccgccgagcccgaagacttctgcgacgtcgaggaggtaaccgtcggatgggacggacataatcccgacggatattgctcaagagcggaggtcgtctacggcggcagaggcaacgtccttctgtacgactgcctaagcggtcccggcggtggcggcggagtatgctgcggcgcgctgagatatctagagcactgcgcctccgctatcggatcgttcctcctcgtactacggtaggacccaaaggactacacgtggaaggtcggcgacgcccggcctctcgaagcgcactgtgaaagtcgcggtattgcacgaaccgcggatcatataaaccacgacgacacgaaacacgtcgcaagcttacaacatacctttccgctctacgat

SEQ ID NO: 327964 - DNA, 447 bp, Zea mays
tggctctggaactttgggctgatttatgtgcttgtggatgtgcgggcgggaatcgaggcaaaacaattttgtaattgtatttatatttcgtgtgcgtctctctcgttttacttgtgtgttttcttcttcttattgtttgctttgttgttgttgttgtttggttgctcggcggtgacggtgcattgggtggatgatgatcatgatcattctcctaaggcggcgtctactggtgatcttggtgctggtaagcttaattcgtctctgtgtcctatgtgtaatgagcctagttctgagcttaagcttattactggtgctgagcctgttatttgtagtacttatgctgaggataaagctgctaaggtttagactcgggatattgctggttaggaaagacattgtgtcactatgaagtgtgcatcattgtgagtggcaggggtgtcggctgcg

SEQ ID NO: 327965 - DNA, 414 bp, Zea mays
tcctgtatgagtgtaatattacctatccattagcctgaagtggaggtgattggtaattcgtggtggagacgctaggtaggggtaagggtggtaaggggtctgggaagggtggtgtgaagtgctattggaaggcgtcgtgtgataatacttaggggactatgaagttggtgacttggaggtcggtgaggaggggcggtgcgaagtgtactcttgggtcgactcatgaggagatttgtggtgcgtctaagactccctctgagaacgctacttgtgatgtcgcgattcatatggagtatgtttgctgtaaaattgctattgtcacggatgctgcgcatgtttctaaatgttagggttgtatctctcacggtcctggtggtcaggccaggcgcgggcaaccgttcgcttaggcgctct

SEQ ID NO: 327966 - DNA, 393 bp, Zea mays
ggctctggacctttgggctgatttatgtgcttggtccggcctacccgtctacggacctatgcatcttggttacttagccgttcgcgtcgcggttaccgaagtctcgaaatcccactgtgaaagggatacctttggttacgctaagtaaactgttttaaagccttaggatgggaccagggtgtcggtagatagcttgaccacaggggagacatgcggtccggggacgaccacgggcattgaacctataaataataagctattgatcgactcgccttttgttgaacggggggccggcgttactcctggtgaagagcgttaaaagtgtggtacgtcggcgaaggctgtcggtgatgttactacgacgctggtgatgtcgactacgatgtttggtga

SEQ ID NO: 327967 - DNA, 153 bp, Zea mays
cccgcgcgtccggttactccaacctatattttttcgcatgcataaggggctatggctgaagaatcgtttcaaaatatttatggccgcataatcactctcaaaaaacaaaaaaaccaacaaaaacaaaataaaccaataaaaaaaacttaaaaa

SEQ ID NO: 327968 - DNA, 414 bp, Zea mays
gacctttgggctgatttagtgcttggtctaatagggttctcgtacacgtcgtacgcgagtcatccgtaggttagttacggtgtgcaggatatcctcgccgttcgtaagtcgaaagtgtgtaatgttagcacctcgccctcgctgtcatagaaaaccgcataagccccgccaccctccggctaaattcggcacatgtatctaggagaacccctggccagtgcattgcataggtagtcaaaattgagcaatcgccccgatcctagcccgtgaacgagacgtcccgccccagctggaaggacctattacgtcacggcagtggtggttggtacttggcgagagacggaggactttcgaattgcattgtgttgttgttacgcgttacgtttacgtacgtcgcgatcaattcgtatgccc

SEQ ID NO: 327969 - DNA, 468 bp, Zea mays
gacctttgggctgatttatgtgcttgggcacgccaggagtctagcgttcggtccccatccgagtttaggcgcccccaatcccgccgcgttctagcccacgtagcacgataccggccacgcgtaactcttcggtacgcttataaattagtacatcacgcatcccggttagttcgactcaataacagggctcctcggagtcgtcgcccactgataccggttaattttaataacgacgcacttttaccgtcacgacaacgccagcttaacgacgctctaggccttctcgcattagctccctaattacgaccaggagacctcgtccgtcggaaagccgggaataacctctcgccgaatccgtcacgccgcgccgcttcacgccaagcggagccttcccagacctgagtttgccccaccataaaaaaccgcacaaggagcttcaaacctgcgaaatcaccctgcgaatcaact

SEQ ID NO: 327970 - DNA, 438 bp, Zea mays
tttgggctgctttatgtgcttgtggaagcggctgttgtatccctcgaggcccctagccgattcagtaacttcctcggatatcggtctttaagtagcggttattacgcgcatacggacgttaagtactgcccactaggggaagttaacgtagcattctcggacgctcaccgtacctacatagactcctatagcgtctgagcgcccgtggcgcgtctcccgcggaacgcacttcaacgctttacctacactttacatcgtccctacctatctcgactcaaactcgcctagacaggcgcccacaaggcttaggacctaagaagggcgacccccccccgaaacggtcatccactacaggattagtcggcataacagtacctgaataatatcgtgaccgacccccgccttcaagacgccacctaacgcatgccgatcattcgt

SEQ ID NO: 327971 - DNA, 401 bp, Zea mays
ggacctttgggctgatttatgtgcttgtttatgtgcttgtttatgtgcttgcctatctgcttgtttatgtgcttgtggatgtgcgggctgcaaccccacacgacgaaaccacgcgtactcctagccgcccccgttctatcgtctcgcaaggatacacaaaaccggcacccgcatccctcaaggcctcttccggaacggcagagccccatagggaattccttactactagccgtcgatacagtctgaatctgatgccctcctcctgttagccgtggtctcggacaaatctgaagtcgattcacttaagcctgatgatgggtttcctccttcaggttaacctagtccggtggacgcagtgcataccatgacctcggaaagggcctagacacatcacctttact

SEQ ID NO: 327972 - DNA, 331 bp, Zea mays
ctttgggctgatttatgtgcttgtggatgtgcgggtggatgtgcgggccgatcagcattctcctgtgtctcctaatgagagttagccgtttgggttgattcctgagtgtaatcatggtgctcctcatttaaattagtacaaggcgcatgattctgagcctgcatctggtgtgcgtagtcgtcgttagggtactggaggatctcggcggtagtgagaatggtagggtgagtattagtattcaatcgctgagttccgcgaacgtgatcattacgtaggtgcggagtgcggtggatgtaacgcgtcgcgagtactggtcttaggtggtgtcgga

SEQ ID NO: 327973 - DNA, 179 bp, Zea mays
cccacgcgtccggttactccaacctatatgtttttgcatggataatgttttttggctgaggaattggctcgtcatatttatatatgcattttcactctcaaaaaaaaaaaaaaaaaaaaaaaaaaaaaaaaaaaaaaaaaaaaaaaaaaaaaaaaaaaaaaaaaaaaaaaaaaagggca

SEQ ID NO: 327974 - DNA, 388 bp, Zea mays
gacctttgggctgatttatgtgcttgtggatgtgcgggtgactttagggttgtctcggtggcggtggtgtgccgagacggtcgatatcgatagtgtggagattgagaaagagaagacggcagtggacgacgggggtaagtttgtagagtctctgaagagtgtgaggaagaagtcgtagaagtaggagtggtaggtggaatgcaaagtggtttgaaaagtggtggagaaggagtgatggtgtgttgatacagagtggtggaggtgcgagcgggaggatgtctccgttgttgtgttgctggacgaggtttgggttgagacggcggtggtgtggtgggagatgtggtgtgagtgggcgggttggtgggtggaggagtgtggggtgtgagtc

SEQ ID NO: 327975 - DNA, 386 bp, Zea mays
gacctttgggctgcatttatgtgcttgattactctatctcttgtcggctgtctatctccgtcgtcttatttcctatctagctccagggctccaccagtctcaggtctcagtcagttgtgttatcttcctgcgcagttactagttcctctactgttattaacggttatcgttgaggcttagattttgattgctgcggtggttgaggaagtgtttgcggcggagattttgttgttggttgctgcgtttgaggagctcgtttttgttgaggttgaggttgaggttgaggtcgtcgtcttcgtcgactttgaggagtcctttgtggttgagtagtaggtagttgttgaggtggaggttgtggtcttcgtcggcgttgaggagtttgctgt

SEQ ID NO: 327976 - DNA, 406 bp, Zea mays
tttgggcttgtttatgtgcttgtttatgtgcttgggagtttgttgtggttgacttcgctgttgaggtagaggtcgtcgtctttgaggagtctgttgtggatgagttggaggtcttcgtcttcgtcttcgtcggcttttaggagttggttgttgaggtggaggtcgtcgtcttcgaggagtttgagaaggttagtgagcgaggttgcgtgtatgtagtggtggtggttagggtttaggttttaggggactggtgcgtgtgtgcggtggagcagctcgctgtgtgtgcatacggtagcacgatatgggaccccgtcgcctagcatgtcatggtcatcggtgctctctcgcgcgcgcgcgtgcgcgcgctgcatgcagtttggcatgcagtcagtagcgatcgctgtgc

SEQ ID NO: 327977 - DNA, 421 bp, Zea mays
  unsure (1)..(421): unsure at all n locations
gacctttgggctgtttagtgctgcccattctcctaatgaatagcacctacatccgaactcatcgtgcttatgttagagtcatataacgaaaatagggtgcataccagacgacgctagatcctactacttaaccccgtcggtatagcggtaggatagagcaatatgcgccgacccggtcaaagggcctctccccgaggagcccacgaagtgcggcggaaattccgttacgtccgtcgagtgtccttcgtatgaggcggtacccaagtctcggaaagtgttcaaacacggggtccgaggagggcacttagtgccgatcgatccggtgctgtggacaaacaactgaagtattagacgagccgctgtcccgcaatggaaacgatcngagcgacgttggatatcgcggtgcgcgagtccccacgcg

SEQ ID NO: 327978 - DNA, 396 bp, Zea mays
gacctttgggtctgtttatgtgcttgtcagtagtcgaaaaggagttgtaggcacggtctcatatggagcacgtcacccccacggatctgaggaaccctctttgactgagtatcggtcataccgggaagtcaaggctaaacccttccggaatcaaacccactactcatgatatataggtcttgcataacggtgggagagcccgtatataggaatgcgtttttagttgctggccgctccttaggaaagccctattaagagccttaagtggtagtcattttgctgtctaggcgaatcatgagtcgaacgcgtcgggaatttgagggtttaggtggacgtagcgtgtcacgtaccttacttttgtactagtggcggagtttggtggtgcggcgttcgggt

SEQ ID NO: 327979 - DNA, 268 bp, Zea mays
cctttgggctgctttatgtgcttggagaagtgcaatataatgtagtgagtcgcacggtccaatttctatggttgctcgtagaacggggtgttactctgtgtcgtcttcgatttcgtcatcgtcggttctgatggtggttatgtgttcggtgcttgttgatcgtgtgggtgacaagcctttggtggggtgcgtgcatgtgctgcgtgaggattcgttgaatcgggtgtgcgctatcggtgcatgattgctaaatcttcgctgggtcctg

SEQ ID NO: 327980 - DNA, 364 bp, Zea mays
aaagaaaaaaaaattttataaaaaaaaaaatttaaaaaaaaaaaaaaggagaaaccaatcaaaggaaaaacaaaataccaaaaacagaaaatcaacaacatacaacataatatccactcaacacactcacatcacaactgtacaaaaaatcacaacaaagggcactcccctaaacctccctccttccttccaactcccctccccatgaatcacctttttacatgatcccctaaatccaaatatctctccctctttctaacaaccctaacacgggaaaacccccgtatgcccacccttacacacccttgagacccactatcaatttccccctttcacgaggatacttacaccccccccctatctc

SEQ ID NO: 327981 - DNA, 315 bp, Zea mays
tttgggctggtttatgtgcttgggaaatttcagttgttacactctatgactccactcctattaagttgagggaaggcgacgagtgacggcgtgtggtgcggcgcttgtcaacggtggtctggctgtgggtaagaagaatgggctggcccttcctatcactgatcgtattaagttagcggaggataagactacggacgctgttctgtctcagaagccttcgtaggagtgtactaaggctgttggtagtaacgtcggtaattctcgtgatcttgctattacgctctgtgagaagattaaggctattgcgattctcga

SEQ ID NO: 327982 - DNA, 396 bp, Zea mays
tgcttgtatatattcgccgcatcgcttaaaaaaaaccactccctataaaaaaaaaaaaaaaaaaaagagaaaggacaaaaagaaaaaaaaagaaaaaaaaaaaaaaaaaaaaaaaaaaaaacacacatgtacaaaaaaaaaaaaaaaaggggggttatcccaaaggatttaagcccagacatttgcgtccgtaatgatacagacccctcaccgggtttttaaaaccaaacctaacggttggggcccaaaaatctagcaatcggaaaaatttcggggccattaaatcaaacttttccgtacaaaaatttttcccagttagacggtgcaaaattaaaaaggtttgaataaacggttcccttaaaaaaccgtttaattcaaaaggtaaacggaattttt

SEQ ID NO: 327983 - DNA, 468 bp, Zea mays
tttgggctgctttatgtgcttgtctaaatacgactaatcagtcgaggctacccacaccccttaaccaaagaccctcgaggattagtccacgctgaggcgtataaaacgtaacggcagtcccacctagaaattatccatttcagaggaagtcgccgaagttctaaaaggcccttagaccacctttatgcgtccgcctaattgaaactcggagcctcggaagcgtattgaccgtaattaatctcatcgggaggggatctagcattataacgtagcttaaaggcctccgctagcgcgtaataccagcgatcaagtagtatggttccggcatctacccgcaaaaccgcaaggcatcgagacattactattcctgaaagactgaaaacaactcgactcccggtacttaactgcgtatgacgaggtacgttacttaccccagcggcccgtcgcctgctatcgagacgtcgccgc

SEQ ID NO: 327984 - DNA, 321 bp, Zea mays
tgggctgtttagtgcttgggaaattatggtggtgccttcgtctcccatttggttgaaccgtcgttggctatttgagatccgtagacactgactcgaccgtggtacgacttgcctactcgtcgagattggtggggaagactgacggttaagcaccatgctttgtctgaggtctggaaaagtataggccgaacatgaggcatattggtctgcggctaactgggtttcaagcctataatcctgctgagccctgctatataaagccactcatagagacacgtcggatcgccccccctaaacgcgcggatacaatcgacaacgaac

SEQ ID NO: 327985 - DNA, 389 bp, Zea mays
ggacctttgggctgctttatgtgcttgtttgagattactgatgagtactccctcgtactcgtaacggtcgttgtcattgcgcttgctttttgtactaagtcgggtctttaggggtcagaggctcttgtgtagggttctggtcgtacgggtacgcttgttcctcatggcttgtttaagtttgagttcgatacgactaagtctacttattatgttgctgttgttggggctatttcttccgatattcttgatacgcatggtttgtatattaatgagacttcgtcaggtaaggtgtcctaaggtggcgcaagggagaaggctgagtcggttattaagcccgttgctcttcctgttgatggtaagtgtgagacttgtggcgatttggtgcacgc

SEQ ID NO: 327986 - DNA, 456 bp, Zea mays
ttggctctggacctttgggctgatttatgtgcttgagtaggctgagtactcctgatgttccagtccggaccgtttcgaatgattatcctactaagtgtgctctgcggcatgataatgagcggggtcatagtaattgtgctgctgattcgacttgttatacgcctaagatttagcaggtcagcagagagacagaccctcgttctttcactgcgggctgcttttaacggttcccggctgtagattactcccgtcgtccgctcacgtcgagaacaaacgcgaatggcgttttcggatgtcggacttacgtcggccccggatatgtcgctcccccgcgcccaatccactcgtcgttgcttcgcaatgaacctgtaagccccagcctccccgcgtcccgccaaagaacaaataacgaggccctagccccggcggttttaaaaaaaaaaaaaaagggtggtt

SEQ ID NO: 327987 - DNA, 438 bp, Zea mays
  unsure (1)..(438): unsure at all n locations
gtgctgcctgtactatactaacttgcaagtgttacgtcggcgacggccaggcgcaccactcggcggcccggccagcccacccagagaccacctagccatggcgtccaggtgcttcttccccagggacgcgtccggcgccgacggccggcaccagcagtcgaagggcgcggcggaggccctcgagcagctgcgccacggcgggcgcctcctgtcccgggaggacgtgggcggcgcggtgcgcgtcaggatcgtcgtcagcaggcgcgagctcaagcagatggtcgcggcgctcggcgacgacgacggcgctggcgcggcggcggcggcggccaccagcgagcgccgtcaccggcagcgtggcgcgggcgcgggcgcgggagcggggccgggcgccgagcagaggctgcagtcgctgcngcggcgcagcgcgcggagggc

SEQ ID NO: 327988 - DNA, 376 bp, Zea mays
  unsure (1)..(376): unsure at all n locations
tttgggctgatttatgtgcttgctaggaagccggcgtatattccttcggaccctagccctagaggtcatcgggagataatggaggagaattcggataggtctagggagtctcacctggaggccgaagataagaccgacgggaccgataggcaaaccgacccgttagactggctggttgactggccttagtacctaatttacaatgagtccggaatctccgcgttctaccgggatctccgcataacgctcgggcgcgcgacccacacacacacacaaagtcgcaatacgcaacatcggaggacataactcccaataaagaaggcggtggtcgccttacctaaaagatagnaccaagcttttggattacctagtacga

SEQ ID NO: 327989 - DNA, 393 bp, Zea mays
ggacctttgggctggtttatgtgcttgtctagggagtttcctaagctcgaggttgccctttctgagaaggtctacgctcttacccttaggaggattgacggtaagtaggagaagttaatcgcttgtatagaactggacgatcaagggtcggtgtgttacggtgatacagcttccttcatagacgacccgaagtgccgccgtaagccctcgagatccgacacccagccggtcagacccgtaactaacgtcgaagaacaaacatcacccgtgataacggatcacccataacgctgcgacgtccctggcgtcaaccgtatccgtttccgttaaactaagtacgcgaatcaacggaacgtcctagccccgcgtagcccggcaaaaaaacagaacacc

SEQ ID NO: 327990 - DNA, 496 bp, Zea mays
tttgggctgatttatgtgcttgtcgtagcgtcatcctctgcccatcgtcgtcccgagcaaaaccgttaaagaaacctccggacagaccggccgtacgggtaaagaacccaaaagctctagacttatcggaggaaggtcgtaaatcgggcctagccactagcgaaggatagcatgagaagacaaagaaacctactctgatcgtaagaagcgaaggcgttataacctcgcacggaggcggttgattatagtactctagaagagggcctccctccgaattcataaccacaatagacgccagcatgctaacgtaaacccggtaagaggaagctcccggattagccactcgcgccaaggagcccaggatagagagcgaagtcgcggaatccgtaaacgacatctatcacggcccagtcggcgttgcgactcttaacgactaagagaggcgcgagtgtaccctaaaggtctcctatctcggcaccacccggacaaaccgtct

SEQ ID NO: 327991 - DNA, 491 bp, Zea mays
  unsure (1)..(491): unsure at all n locations
tggtctggacctttgggctgatttatgtgcttgtgcttgtaagcgttctgtttgtatcgatcactagcgcctgcccgcggagtattggaatcatgaaggctgcccataggtgtcatgttctttcccctccttctgctggtgctgatagtgacgagaacgagccagtcacttccgaacctacatactcctcggcggaaatcacggactgttatcctggtaacgcgcgtgagtccgacactacgccttactcggagaaagcgtatcctacgtcggaagagacggcgacgaacggccgtaccgcggagataagcaaatagaatactccggtattaacataatccacggagaaaatccttcgaaacagcgacacttacccgcgcagccccttacttatccggtataaccgttcgctcgttttcncttacaaaaccctttctcgcacgcgagagcgtaaaataactctcgcaattacggagcaccgaaccgattcg

SEQ ID NO: 327992 - DNA, 318 bp, Zea mays
tggttgatttatgtgcttgtttatgtgcttgaaaaaaaaaaaacaaaacaaaaaaaaaaaaaaaaaaaaaaaaaaggagaagagaaaaaaaaaaaaaaaaaaaaagaaaaaaaaaaaaaaaaaagaaaagaagaataaagagaaaaaaaaaaaaaaggaagataaaatgagaaagataaagaaaattacaatagttgtaaaaaagagtaagaggtataaaatagcacggaggcgattcaatataaagggatataagtaggacaacactagaattgatgtcaacaatataagtcaggatgcttacgtaaatgtcgtaag

SEQ ID NO: 327993 - DNA, 450 bp, Zea mays
gacctttgggctgatttagtgcttggaggccagtcacagtccgtatactcacccactcaatcaatcaatcggtcagtcagtctgacgtgtagagtaaagtgaaagtagtaagaagtaaagtaacggagaatttcgtgagcgcgtcagcctcattagtgtagcctattaaatctattcctggaaattcgcatacttgttgggttgggttgggtagtagggagacaattgaggagggtaggcgtgattcggataggagacatgcgagcaatccttttgctcatgatggttgtggttttgatgttagttccgcggtttgtgcgtaggggactattagtgaaactgggaatgtgtattaatcgcctgctgacgcgcctgatattgataggtctaagggtcttatgtctgctattaacggtgcgacaatggttgggctcgatgagcgggtgactc

SEQ ID NO: 327994 - DNA, 411 bp, Zea mays
tttgggctcgtttatgtgcttgtggctgtgcgggtggatgtgcgggggtgactcgcctcagggtcagggagagcgatggaaagtgatgtggtgtgagtgaggagggttaaggtgaagaggggaagtattgtattaggatttccgcctgatgttgttgttctcgactcttgtgaggccgctaggacctaacacgctgattagtatacctgtcatccttcgtatgtcgccgggtaacgccagaataatgtaggttccttagatagtggcgaagagtttcctgctctcaagtcctcctagttaagccatgaaggccttaagttcgaagattcttaagaaatcggacgctcttgttacggtcgcacataaggcgaagtccgctgggttcgaaggcgaagagtatgagcccgacgt

SEQ ID NO: 327995 - DNA, 417 bp, Zea mays
tttgggctgatttatgtgcttgtggatgtgcgggtggatgtgcgggtggatctgcgcgctattaatagtgttcctgagttactgcgtacgacggttaagcgtgatttttgttacggtaagcatacggtacgtcgttctacgcattgcggcgacgcggcctttaaggatgcgaatgtcgtcgcggttataactaagattaagtgtattacttagcctgcggatcggcgtttgatcggtcctaagcgtggaactaatcattagttctttagtgctgcttttggtggcgattcggttaaggcgtagtgcgttgcgcgtacgactcttaatcttattagcgccgcggaggctcctctttgtaccgattataagcctgattctacgcatgttaagtgtgttcctgcgtatcggcatgctggc

SEQ ID NO: 327996 - DNA, 463 bp, Zea mays
ggacctttgggctgctttatgtgcttgtttatgtgcttgtttatgtgcttgctccgcgcgtagccatacccatagtcgcgaagaagatcgccctctggtcctcctcaccagcagccctaacgggtcacggcgccgcctcatttataccgggcggtacaatactaagagccgtcgtctccggccctactcaccccgccgtcctagaagtctccgaatccgccgaaaactcgggaaacactaacgatcctctcggaaagataaggtcaccttcagcgccgttcgctgtcgcatccgacgtcattcccactactcggacacccctacattctctcagaatcccggagaagtcgtagtcgtggagaagtacggtaaaatccgaaccacacagaaagcccataaacctctccgtcgcgctagcgtccactctaactgtccggacacgtcatgagtcacaccctaacgt

SEQ ID NO: 327997 - DNA, 406 bp, Zea mays
ctggctctggacctttgggctgatttatgtgcttgtttatgtgcttgtttatgtgcttgcgtcactggcgtcgtaggacccggaaatgcgtcacccgaccagaagatgagtgcttcgataagcgggcattcacacttcgcacggattacccctccgcagtagcccgccctgtactcttacgcaccctctaacccggagatcggagagagaataatagagagaaatcgacgccgaggataattacagaagcaaccggccatgtccgagaggaggaacccggtaaatagggatcacaccccggagagcgaccccggcctccacccgaaacctccacgccgtgctaacatatcgacaacccttaacgctcggccgcgtcctcatgaagacttaaaaccttccggattaa

SEQ ID NO: 327998 - DNA, 433 bp, Zea mays
ggctctggacctttgggctgatttagtgcttggtaaagcgacaatctcgcagtcgacttacccatagaggtacctcccctcagtatcccgtgggataccgaaccctagaagtagaaaggcggaatcacaggtgaaaaacacgaataaacaaagataagcctacgatctggaataaatatgctatgacgatcggccccaaccccgccaagagaacctgactacccgcccgatacggcctagcgaaacagaaattgctagccccagcagtacttaatcaaaggacgcccatacgagtcgccacctctaaactctatggctcgagtgggcccgtctgtttaccggtaatacccctaggcccagctaagcggtaacaagtcgcttcccggcgagtataggctcgcataggaccatccgcgcctgcgaccggcctcat

SEQ ID NO: 327999 - DNA, 446 bp, Zea mays
  unsure (1)..(446): unsure at all n locations
gacctttgggctgatttatgtgcttgttggaacgatacttccttagaccctcctacctatcctcgggcgaggagaacggtctcagactgtaggaatcacaagtagtccgcggaaatcatagccgagacggtaaataaggccggagccgtcgacaccgccgggagggccgccgaggactcgaaagacgaaagcgagtttcatagaagaacggcgacggaaataactgagaaggcggcagttaatccgggcgtactagacaccgacgtctgctcggaggagtcgtccaccgacggcactccgcacgtcccttaagagtagatcagcgacgatgtanacgccacgtcaaacggccccggagtcgcggccaacgtatccggatagagagccaagtttcattccttctagacncgcggcatcactaagcggtgaccggaataatagagcgt

SEQ ID NO: 328000 - DNA, 411 bp, Zea mays
tttgggctgatttatgtgcttgtttatgtgcttgtttatgtgcttgtttatgtgcttcgaaggtaattctatatagccttaggagtagaactccttcaatccttcgtctcttccactaacagagtctctgaatgacgaaaaattcttcgagctcagaaggtccgtcggcaccacttccaagaacctcccggatgtaaaggacctcgtgaaaaaggaatcatcgatctagtaacgggcaagtgcggatttactcactaaaccgaagaccaaggagctgccgtcggcgatatcaggactcctggcctacgacgtaaggtacattctcctataagctaccgtcaaggccgtcctaaccgagacattatgctgagaacggtaagactctaccgttaaaccatcggagaatacgat

SEQ ID NO: 328001 - DNA, 477 bp, Zea mays
  unsure (1)..(477): unsure at all n locations
tttgggctgatttatgtgcttgggaggaagcgactctttcctggttcgttcccaggcacatatagggttggtagtgttgttttcgcgtcggtaccctctccaagccccaatatttagcacggaattacagtgttacggacggacggacggctctcctcctcctcttggcccgagccccctcggcgccgggcaggtacattcgctgctcgctagtgcagatacaaaacaaaaggctctcgggatgtctgtttacgcacgcacgcacacgacgcgaagcgacttaaggcggcctgtgcatcacggtaacaaatgcgcgggaaagtgacgcactgctgacgatcgctgttgttcgtacggacggtatgggaacccatctctcgggccaccacataacgtggtagtcggtcacgtcgacgtcgcgttaatcgttactacccatcttaaaaaaaacanaaataccgnggcacgcgcgcgaag

SEQ ID NO: 328002 - DNA, 375 bp, Zea mays
tgcttgttcgaaggaaaacggaccgccggattaggattggagtcatcacatcgtcgcttagacgagcgagagcgttcctacggacaagcctacacgttttcataaggaagtcgtattaagttctgtttcagaccacgtcgtcgtccgtagaggagaggcgtttatcattcctccggtaaacgcccaatttcctagcgcaaagtaacgccccgatatccagtagcgagtcggcaaccccgccctcccttccgttcaatcgtcatactttgtagtcgcgctcccagaaccggtctcggcatacaagacgcgagttacggccaccattagggtcagacccactcccgtctctcgccacctaagtcgactaagcacctt

SEQ ID NO: 328003 - DNA, 445 bp, Zea mays
ttgggctggattatgtgcttgtggatgtgcgggcgtgtgtctcgacttgccctgtatctgtcggtatgttgtagtgaagtgcggcgtcggatactgagggtatgatgagttttactctgcctgcgatggatgcgtctccttttcatgtttgtgataatgcttgtatgtattcggatgttattcatcttatttgtgagattaaggatgatactgtttcgtcgtgtgtctaggctgagtaggattcagttgaaggtgctgttggtgttgctttggctttgtttgatggtgttggtaaggattgtgctgctgatgtttcggctgttaatgcggaggttacgactgtggtggacaggaagataattctgtcgaagtagccgtagggttatactcggaggatcgggcctgagcgttaagaaactaagggggcggcgcctgatgatgcgtt

SEQ ID NO: 328004 - DNA, 474 bp, Zea mays
  unsure (1)..(474): unsure at all n locations
ggtctggacctttgggctgcattatgtgcttgtttatgtgcttggtcctttagagatcttagctacggtgactctttagactctatgtacgaccttcggttacttcctcttcggttgttgttcctgttgttgttttagtcgtgtccgtggatggtgatgatgcggcggtttccattgaacttatgcctgagaaggaggctggaaaggattgtggtgtttctgctgagcctcatgtttttcggcgcggctatcgtaagaagtccgtcttcgagcacgaaagatccggcgtaagccccaagaaagtcaaactcgctccgaccgtcaaggtcgaccgcgacgagtataagagcccgcgtagtaagcacggagcccttgggcacttaataacttaacggcctttgaaaggacttccggagtttaaaaagcacgaaagataatgtatcgtagaagtttcngtcgaaccctctaacatcg

SEQ ID NO: 328005 - DNA, 403 bp, Zea mays
  unsure (1)..(403): unsure at all n locations
tttgggctgctttatgtgcttgagagttcatagacgccggactctcctagacccttaagcactatggacgacggcactgaggccgccagtaaggagtagaatcttctctaccgagtctagaacgtgagaaaacttgaaaactggggacgttctcgcgacggtctccgtccttacgtaaacagacggcggaattcatggcagcattccgtagtcgtcggactcccccgatcgcggcgggaccatattttccgtagtatgccggcccaagaaattccatccgttcagaccgtggcggtcgggaaccataggcagtcngaacagggccacggcggacgtatcgctctgaagttggctacctccatacacggtccgttgcggcagagaaaccaggatcacgtctcgg

SEQ ID NO: 328006 - DNA, 487 bp, Zea mays
  unsure (1)..(487): unsure at all n locations
tttgggctgatttatgtgcttgtccgtcaccaaaataatagacaacgttgtcccagactaaaaggcgtcaaatagagcgtggtccgtcccagccgctaccgtagtcgcgacgtcctcctcggtacccgccggtcctccgccacttactcccggctcggaaccttccgctctcgctccggccaccaccggacggacaccggccatcggaatgcccacttcgcgcggcgcaccctcctcctcgtataacgctgccctagacatccgtgccgtaacggaagagcgggccgtctacttgatagaatatatagtttcggatgaggccacttttcgtgcggagttcgttatggtgaatgaactttcgcatagaagtaggtaggcgatgcctgagtcggcgaatgcggcgaattaggcgactattaatgcgctgcataggaatccttttttgtagtcgatgttcncgcatcataattagctggngttatcgacg

SEQ ID NO: 328007 - DNA, 436 bp, Zea mays
tttgggttgatttatgtgcttgtttatgtgcttgtcaacactaatcgctacgcgagcacacgttccgatacctctaaagagtagcggagtttcgtcccgataaccctcaaggcttcgtctcttactcgtctttcgtcgattgattttaatttggatgatttctccgctttggagaccgtttatacgcataagatggattggttgaagcatgagctgatggtttgtagtcggatgtagaagcatgtgacgggtcgatgaatgtcccttcgtctgctcgggtgttaccgcctttccggacccgccgccggctgcacgcactttcgacttactcaggactactgcaccgcaccgcagcgcacgcacgctgctggttcattactgccgttacttattacagcgaggcggccggatacgtcctgttcacacgtattcgcgt

SEQ ID NO: 328008 - DNA, 433 bp, Zea mays
cctttgggctgatttatgtgcttgtttattgcttgggcccttagaacacatggcccggctggtattacaagaccgtctgtcggaagtcacgcatctgccactatcctctagaaagacgtcggtctccactcgggtcttttcgcgcattaagcgaatctaacgaaacctccacgtcgtaatgaggtcactaagtatccgatcttataggaaagaagggacgaggtacatcctacgctctcttcgagaaccgtagaaatcatccgcggaccgcaccacctacacgatagggacccgatatcaaatccgtagagggtacttaagccggtcgtcgggaaggcatacaaattatcacggaagtaagtcgacttatgccccgcccggaataaaaacccgccagaggaatccaccgaagtcaagtccgacgagcctacta

SEQ ID NO: 328009 - DNA, 224 bp, Zea mays
ccactcgtccgattgaaacgccatttttaaaaacaaaaataataaaaaaaaaaaaaagaaaaaataaaacgggccatatctaaataccatcctgacatactcctttcatgccatatcatatactcttctatcatgtctcctacatctaattgactgccccccgttctaccacttctttcctgcggcacccctgccttttcccaattcaatctcctttcctacca

SEQ ID NO: 328010 - DNA, 246 bp, Zea mays
ttatgtgcttggtacactgtagagacgcataaatgacttacccatacacacattccatagatatagtttaccagtaccgcctaaggaagtctcaatatagatgacgtcgtaaccaaaccaagtcattacgacggttacgaccataacatagaggccgaacttcgatagtagatcgccagggtacgaaccggacacaatcgatcgagaggggtacatcacgcggatacggattaaaccaaagtcgtc

SEQ ID NO: 328011 - DNA, 450 bp, Zea mays
accgagacgaagaggatactaaacatcccccagctctaaggaaacggtaccgtccccatgcggcggcccatagccaacccgtaccgtattgagcggcggcagagattgcttaaactttctactaggagaacggcatttggtattacctgacctactcgtagcggatatcacgaggaggtcttcggagtacgtcggcgccttcgggtatacacacttatcactaccgtcgcgtcacgaggccacgttcttattataatatgccgagcaagagaccggtgagtatagggcgacacttccttacggagtatgtccgctagcaatctacgatacaaatcacggagataccatcgtctacattaagaacgtcgactacggaagggagtcacctataaacattccgcataatccagacgccaattagcataacgcgtctaaactcgtcactcccag

SEQ ID NO: 328012 - DNA, 378 bp, Zea mays
  unsure (1)..(378): unsure at all n locations
tgcttgtttatgtgcttggtattctatggcctatccctctgcgttgctgcgggagcggcgcggctgcgcggtcaaattcgcctgtggtgtgttatccgttgcgtgatatggtcgtgtagtgacgcggtagatgtgtagtccgtcatcatctactgccgtggcggctgctgttgatgtttcttttgatcgggtggcggttgtggtggtggggtggcgtatgatgcttatgttagctaagatgcatgataagcgtactgtgtcgttgatgtanggtgttatgtcggtgcggattcatgatgtgtggaatgtgatgtcggatgtggtgcctatgggtcttcctactctgttgctgggtcgggcggttcggggtgcgaatgt

SEQ ID NO: 328013 - DNA, 459 bp, Zea mays
ctttgggctgatttatgtgcttgtttatgtgcttgtagatacttacgcatagccttagcgtagcaaaagaacgaatgcggtaaacgtaaagaggacactggtatccccgcccccgcctacaacccgacgacggtccaggccgccgctggaactcactcttttcgcagccgcataacgttaaaacacagccggaagccccagtcggcatattaccagggcgtcgcaccaattccccccatctccgcgtagcaaagacctcccccgctaaaaaaaaaaaaaaagggtggttgtctcagaggacttaagtccatgcatgtgcgtacgtgatgctacagtctcctcacagcgctattcaaacctaacctatcggttgctgccccataatgctgcgatcgggaaaatttcggtgccatttaatccaactgttccgtagtatactttttccctgttagtcggtgc

SEQ ID NO: 328014 - DNA, 345 bp, Zea mays
  unsure (1)..(345): unsure at all n locations
tctagggttcattagatatggntggcgttattatccttaccgtcgaggatactaaacccttattggtcctgctttcgtgcctcgcccgttctaaggactcacacagtgtctcacgtcccgcgttgtccgcggtacttctattagaatcttgtctgtctaagacatcgtggcgtcttggtgttcgggattcgttaccggaggctactatcgtatgcgtcttcggatccgccgagtcctattctgagaaatcataggctggtgattgcgggtccgtcgtgtccctcgttcgcgttaactcggaggcttcgccttccgctaagattttcgagcgtatcgacctgggta

SEQ ID NO: 328015 - DNA, 423 bp, Zea mays
tttgggctgatttatgtgcttggtcttcaaccatcgtcataggcgcggtaaccccgtcgtaacttcagagtcggacgagaatgcgaacaagtagccttgtgcacccgaagtcgtcttatacgaactaagaggcgccttcgtcaagaggttagtattagaccatccctcgcgacgtcatatagtgaatgtccgagtccatcgcgtccctaagtgtcggattctacgccgtaagaagagtctaggtttcatagtcccttagttaggaggcggcccctaggacgcgcaaaccgagcgctactcctctttcctaggcttacgacccgcaagagagccggaccccggtacttagcccccctatagaatactatttacccgagtcggagaaacatgtttccgtgaaggggccctacgcgacgcgtcaaa

SEQ ID NO: 328016 - DNA, 256 bp, Zea mays
tggtcggaacattgggctgatttagtgcttgtctgccttctcgtctttccccgtaattcttcgctacacaggttatcgcgattcgtcctttcggtgtagccgtgtactcttacagttattctggaagtctgaggttgaggacttatacacacagtactcgctccccacatcaggccccagcccccgggagaactcatatggtgtacaagtcaggcagtccctcctaacaactccggcttagcttaataagtccttt

SEQ ID NO: 328017 - DNA, 315 bp, Zea mays
  unsure (1)..(315): unsure at all n locations
tttgggctgatttatgtgcttgtttatgtgcttgaacgttcggttacatccacgcttttcgacatagccctagtcaacgatcggctagctacaatataggagggtaagtgaagtacgtcgaagtcggtatggtggacgatggagaatcctcgtgttggggctagtgtgctactcgtatgcgaacggagcaagtcggatggtgtcgtaagtagtactggggaagacgcgtgggctacggtatggaaaagtgcggatgagttcggggagttgntgggtgcggcttcaagtgtagttatactggcgcgggcgtttgcg

SEQ ID NO: 328018 - DNA, 476 bp, Zea mays
tttgggctgatttatgtgcttgcgtggccctagccgtatgagacactaaccgcgaacttagcgccctccccgatatcttgagggttgacataatcgctctcacgaagtggagaagggcgaagtgagaatccgaagcaaacgggtagtactacaagaagtaggctttcgataccgaggaccccacacacgaaaaggttaaaataccgatactgctaagcaaggtaataatactcccggctaaggcggagaaaaaggctggagccctcctagccacaaaagccggagtcttagacaatcgggaggtagcctccggaggtaccaaaagtacgaggccactcggcgaagtttttgcagacatgaagggtcgcgaaaaagtcggcctctcttccttatttaaggaaagaagacccgtagcctcgacactaatcacgacgctaagttagataaatgacgaagccatatacgtcgtcgcggaa

SEQ ID NO: 328019 - DNA, 405 bp, Zea mays
cttggctccgaacctttgggctgatttatgtgcttgtggatgtgcgggtcgcggatctggacgaccactaacgactgctgctcactgtacacgaatgggtgcacacgagacacccgcccgtgagagagcctagcccgttaccgacgctcgcagtccacgaagtttccagccagccgttatcgccgccttcggcatccgcacgaaccgggccacgaaaacgaagagccgcgccacgagccgcaccccgcgactaaaaaaaaaaaaaaaagaaaaaacacaaccaaacacaaaaaaaaaaaaaaagggtggttgtctcagaggacttaagtccatgcatgtgcgtacgtgatgctacagtctcctcacagcgctattcaaacctaacctatcggttgctgccccata

SEQ ID NO: 328020 - DNA, 449 bp, Zea mays
tgcttaagtcttcactcatggttattaacagccttgatttgcaagtgttaatgttttacccgttatcatttcattgtgtattggtaaagtgtagtgttaggttgtagtccgtaagggtaggtggtggtgggtagggtaattgttatcgtagttgagacttggtggttagtggtaattggtggggggtaggtggctgggattcggcgctggctcatagttagatagtagtagtagtagtgcgatattatcattgcacggcttatcgtcttcccgtcggcgctgcttatcgtcttctcgtaatgctgcccgactcttcgcgtagctcgtatatgtgcgccgaaggagccgaccttcgcatagtatatgacagtataaattctcatcggcctaccttcggcatcattgcggcaactcgattcgtcacactgtcccgtccaccactcacacct

SEQ ID NO: 328021 - DNA, 325 bp, Zea mays
tgcttgtttatgtgcttgtttatgtgcttggctgatcccaaaacttgtatggctgaggcggagggtaggattgcaaagtcgtagacccgggatatagtacggtaggagtggcctaggattactatgagtagtcatcattgaggagtctatgggacaaccaccgcccacgatactatggatacggagagtcctaataatgcgaagtagcggtccgacgagactgattgacatgttaatgatagtgcacgtaagtcctctgccggcaataaacgcgactcggttgagaatagggtcgctgatatcctagcagtataggtccatgtcg

SEQ ID NO: 328022 - DNA, 113 bp, Zea mays
ggccttaagaagtgttgtagtagtagtggtagtaattaccattaggtggtgggtctgatgacgattcctgagtagaatagttggagtcatgtgattacgttggagctgttgca

SEQ ID NO: 328023 - DNA, 377 bp, Zea mays
  unsure (1)..(377): unsure at all n locations
gatttatgtgcttgagtcggtccacccgtcctagccgaagacgccgagtaaatttactttaccccaatcgacgagatcagcttcacacggctaagcgaggagtaagcagatggcctccgcttcgtactggaaagttgggagtaattcgccttccctaaggcggccacatctggattacggtacgacgcgttaaacagtacttcaagactaaggttcntcctaaatcatctatagcttacgtaaggactagactcacacgccggaaacgcggacgcaccggactccctcaaggagtagccggatctgaggccaaaattcgaagaataaggagtggaggacggtccacccgttctagcggaacacgccgagtaaatata

SEQ ID NO: 328024 - DNA, 228 bp, Zea mays
  unsure (1)..(228): unsure at all n locations
gggcggccgagaggcataccccngatgagaagaatgttaagacctctgaaggcgatactcgtaagttagggtggtatggccgtaagaggtgtggtggtcgtggcggtggtaattaccattagctgctgggtctgatgacgattccttagtagaatagttcgagtcatgtgattacgttggagctgttgcctaaggatctgatcattgtatactagcctgcgttgagtt

SEQ ID NO: 328025 - DNA, 433 bp, Zea mays
tggcctggaacctttgggctgatttatgtgcttgtggatgtgcgggtggatgtgcgggtggacgtgcgggtctgtgtgagatcggatctagacggacggttcgcaccccagccgcagaagggggtaaacccgtattgcagcattacggtacggtcacacgtggaatcgccgaccgacgagctgccgcatggcccgctgatccgacgacacgccgacgcgggagttttcgaacgaggtggcaccaacggaaacacaggacggtaacgataactaaaaaaaaaaaaaaaaaagggtggttgtctcagaggacttaagtccatgcatgtgcgtacgtgatgctacagtctcctcacagcgctattcaaacctaacctatcggttgctgccccataatgctgcgatcgggaaaatttcggtgccatttaatccaact

SEQ ID NO: 328026 - DNA, 209 bp, Zea mays
gatttatgtgcttgtcggattgtcgggcggacgagaggcataacgatgatgagaagaatgttaagacctctgaagcggatactggtaagttagggtggtatggccttaagaggtgtggtggtagtggtggtggtaattactattagctgttgcgtctgatgacgattcttgagtagaatagttggagtcatgtgattacgttggagctg

SEQ ID NO: 328027 - DNA, 100 bp, Zea mays
ctttcttctcattttctgcttcaaaaaaaaaaaaaaaaacaaaaaaaaacaacacaaaaaaaaaaaaaaaaaaaaaaaaaaacagtaacccccaaaacaa

SEQ ID NO: 328028 - DNA, 212 bp, Zea mays
ttgggttgatttatgtgcttggattgattgctgttatcagcgtcgcgtctccacgtggacgggagtgttacggagaggctggggcgtcctgagaaggtatatagtaataccggtatgaggattaaggaagacgatgagtggactaccgttaattcctgggtctaatgacaattgcgtaggagtatagctcgaatcgtgttattaccttcgag

SEQ ID NO: 328029 - DNA, 324 bp, Zea mays
cctagatctacacatattctcgagagccactttcgccaaggtccccataagccataagtgggcctgcgggttctacaaaacgcgaataaccaaaatcacctgctcaacggacgcatcatcggcaagacagcaggtttctgtaccaatctgagccttcgtgtctatctgattgcaggaataaatcgtattgcggttaacatgaactccacatgtatctagcgttgataccatgccaagaggtggtgtgcaccgaacatgagctccacatctatgcgtcactctgcatggaagtctgagcccttgactcactttagccacaaacag

SEQ ID NO: 328030 - DNA, 310 bp, Zea mays
gcgtcacgtccacagctggtcgccagtgttacggcgaggctggtgcgtcctgagaaggtgtatatgaataagggtgtgcggattaaggaggaggatgagtggtcggcggtgcatgcctgggtgtatggagaggggcgtcggtgtctgtcgcttaacgtggtggggtcgtcgtgtcgtggtaagagtcgtaggtcgtgtcggacgaatcattcgtgtatggattccaagtgtggtaatcctattgatgatgaggatgagtctactacctgctcgtatagctcctcgcgtaataagcgagcgagtgcgccgt

SEQ ID NO: 328031 - DNA, 348 bp, Zea mays
tttgggctgatttatgtgcttgaggcgagtcttttcatcactattgctcatgccgccatgagcttcgcaatttcagaccgtagggtttctacgcttctctgtttctggaagaactggcgaaaattatgaacggcaggcgttgcgatggagaacgtagtggcgttcgcgtgaatggtggttttcgaaattgtcgcctatctggactagtacgcggagagcggcgtgacggcggaagatctcgtggtgcttatggcggtcttagagctaatcctcgatgtaaactaagtcactgaggatgtagctttagaagatggggcggattaagacatagcgataaacgccgacgct

SEQ ID NO: 328032 - DNA, 141 bp, Zea mays
tttatgtgcctgttcctcgcccttggtcaaagatctcaggaactctaggggtacgcatattgtggagactcctacgtattgtccttcatcgctcagtgtgacttagatcccaaacttacaaaaagttgaccggcctcacat

SEQ ID NO: 328033 - DNA, 459 bp, Zea mays
tggcccggacctttgggctgatttatgtgcttggaggaattccgtcaagtcgaacgacgagtctcacgaggcgtattagactacgatctgtagggcctaagaagcctctggcgccggcgaaaaatcagattaggccagcgagacgctaagcaggccgatcctggacatcagaactcacgtagaaaaggtgaaagactctaactgttaggtaccgacctgcaaacacgtttttgccgtcaccgcgaccgggacagcggcgacgtctcctcgggcgaagaataagacacggcgatcggcgttactccgtgaccctatagccactacgtcggaattagtcgagccgctccgctcctttctgcgtaattacacgcccgactgcggctttaaaaagaaaagaaaagacggtctgacggcccactttgtactcgttgacctaagtgatcatcccagtcactaaaa

SEQ ID NO: 328034 - DNA, 478 bp, Zea mays
  unsure (1)..(478): unsure at all n locations
tggcccggaacctttggtctgatttatgtgcttgtttatgtgcttgtttatgtgcttgtttatctccttgaccttaggccgaccccgatttagggaggcgctccgactgagtcccgacatgcccacgtctaaaacccggagaccactataaggagatatttctactgcctagcccacttttatgatcactaacacccttttaacccacacccaacccgaggtgcctctagcccgcctaggcccccaacaatagcttcgacgaaatcgtgcaccccaggacgacgccggatagagagaacgcaattaacatagccgcgacgacctaattcctatccacacttcacctaccctaactagggttagagttagcctctccggacgtaatcgtaaccgtcctcgataagacttccccaccggatctccaccgcatcggcgctacaccttacggngcaattaccgtgtagcggtgaaacgtcgg

SEQ ID NO: 328035 - DNA, 247 bp, Zea mays
tgcttgagcgggtacagcgaccaataaagatatcgccaagaatacgctttcgtgtaagtctcgggagcgaggtctgcgttcattgccgataggatccgttaagttacgtctagccttccgagaaatacactccccattaaagtagcggaacggtccaatagtacgtctcggataacgccacccgaatccgtcttgaatacgtccacgcccaaaggcccatccacaattctcgcagcgagctctcgtc

SEQ ID NO: 328036 - DNA, 443 bp, Zea mays
  unsure (1)..(443): unsure at all n locations
gaactttgggctgatttatgtgcttgtttatgtgcttgggagttttgagaatttaccatcaccctcctttttgctgctatcttctcgtgtctctctgctatcttatcttagttttcctctcagactctctcttttttcttctatatgtatctatctctgctatcgaggtcagtcatcagtcgacatcggaagctcggaatatgtatcgctatccgtctgccctaaggattcgtttcgcgttaaccaagcagcatgttgctgcatggctagtctcgagtcagtctcctgcgtctgtgacggtgctggagcgggaaacggttacgggggcggagtctggtacgggaacgggtggtatgcattattataatgttcntagtactattattgtgttgacgacgacgagtagttacttttatagttatagttgtggtgttgttagtcat

SEQ ID NO: 328037 - DNA, 381 bp, Zea mays
tggctccgaacctttgggctgatttatgtgcttgtttaggtgcctagaatgctgacgagactactcgtcgttataccggcgattgggtctccaggggggatttcacgaaggttactgataaggagacgggttagaagtatgctttcgctaatactaccggaattaggacccgtgatcgtgatcggtctcatgttgactttgacggtaccatcgcacctaggatggaatctaatgtgcagatagatattcgggcgcacgcgggagcgcacatcgaactcggtgtctccgtcgccgagtttgagtacgtaactacggacatctgtcggactatatacccacatccagtacgactgtacgtccgtccatccggccaaaaagggt

SEQ ID NO: 328038 - DNA, 478 bp, Zea mays
  unsure (1)..(478): unsure at all n locations
tggctcggaacctttgggctgatttatgtgcttgtttatgtgcttgggaggttgtggtggtggcctgggggttgtagggtgctgggatttaggtggggccgtgcttttgtggtcgttgtggtggagtagtctgttgttggccggttattgcggtctgccgtagctgtcggggaggtttcttgtggtcgggtgttgtgttgtgttgatatgcctgagaagtccaacaagacaggactgggtatgcatagtaatgcgcattgggtgagggatattgctctcggttggactgctgtctccaaaaaggcttgtcctgacaattctgagttagaaagtgctaagcccacggtttgggaaacatcgacttcaaggagatctgattattttaatactactaaaccagagggtccggctattcntaggacgctacgtaattccccattccgtcctgagcatacggagtacgactccgtcggctccg

SEQ ID NO: 328039 - DNA, 438 bp, Zea mays
tggctcggaacctttgggctgatttagtgcttgtttgcgcctattaaggctgattagtctaccctgggtatcaatgggtatatttctattgggggggctgctagtgttatttctgcgttgggttgtgtgtgtttgggtgtatttgttggtggtctgctttgtgtgttgtgtactgttgagcgttccgctggggatgagattggtgctactgcacctattgcttgtaatgattaagccgacccgtcgaagtttgacgttatggcgactccgtgtaacgttaaaactgatacgcctaaaggactaacgaggtccgtagcggataaacgggggtggaccgaggtcatagagttagttagtcccatagcgaaggaagataataatccgctttccgcagagcacgaaccggccaatgcggtcgaacaattgctgaagtgccct

SEQ ID NO: 328040 - DNA, 463 bp, Zea mays
tgtatgtgcttgagtctgcgtccgtaagccctcaagatcctaccgtcccccgatagggtagggcgaaagcgtcgaaactccctcttacttgaagtcagccgtaattgtaggagacggaaaaaacgaccccggcgacaaaaaactccaagaaggataacgaaccctcgaagggaaaacgcgagaatctagacaccgtctccgcgaagtctaccgaagagtgcgagtcaatgaagaagtaaacagagaaaccgaaaaattaaaaggagatatccgagctttcgcgctgactatcataggtagaaaggaaataaggttgtcatgttagcaccttagatgttttcctcagttaagaagatacgttagtgataagctaagaactccagtacacgcgtccgctaacaccttgccggcgcttgccatagtccgttgggatcctcgaagttcgagacacgaacacgccatc

SEQ ID NO: 328041 - DNA, 101 bp, Zea mays
tcctacggtggcgcggacttgaagtcatccgacggtggatgagactcatattacgtacacggtgacgaatcagactacgaccgatcatgaaaccgcgacgg

SEQ ID NO: 328042 - DNA, 336 bp, Zea mays
tttgggctgatttatgtgcttgcccggcctagaggataaaatactaacaaaccactacacggtaatacgcgcaccaaaccgaggttagaaatcgtaaagtctagactactccacccgtaacgcctaatttacatacacaccaatacgcaagtaacccataaggtacttagaatcatcataaagaagtacccaagtagtggcttaataaatcgtttaagtacctaagagctactataattgtgagtaaattccttacaccactagtcaacagcactactaaacgtattagcgtcctaagagttattccagcaataacatacgagatactaagctcat

SEQ ID NO: 328043 - DNA, 223 bp, Zea mays
tggctccgaacctttgggctgatttatgtgcttgtatctcttgtcggctatctatctccgtcaccttatttccaatctaactccagctctccaggagtctcaagtctcaatcagttgtgttatcttcctgcgcagttactagttcctctactgttattaacggttatcgttgaagcttagattttgattgctgcggtagttgatgaaatgtttagcgcggaga

SEQ ID NO: 328044 - DNA, 358 bp, Zea mays
tggttctgctcctaaggcgtgatcgtttccgctgcaccctgcacccatccttaccgccctgggggaggctcctgatctcggggtcgaatgtcagtgtgcagtccgtcgatgataaatctgttctaatccctggcgggccctggaatctcaaccatagtccatataaccgttccggtcaaatcgtccggtcggtatcacccccagctactcgactactcactgcgcgctccgggccaacccggtatgcggaaagtgaccggcctagtgagcccacttcccaagagtaactaagtctaaacgaccagtcctcttctaagactcaaaactacgctcccattcccctcccctcctctacaat

SEQ ID NO: 328045 - DNA, 430 bp, Zea mays
tttggtctgatttatgtgcttgtctgttgatcccgttgcttatctttttgccctacttgtgttgcctgttgggataggagggagagcacagtattaggacgttggtgatgttgatgactactggtgtttcttcggggtcgggtatttagacgcatctaaatgtctcttgtaagtcttttcatacgtgttacttacgggagtacccgccggggacgggctctggcgtagcgcccgcgaattagtcggcaaaggccgacgagaagtctaaggaggattctgataagacgtccgagtgtgttaggtcagttaatgagtagtgtcataccggggaatcgtagcgattacgaagtgtacgtcggaaattctacccttcggtacctacgccactccgtacaaccacttcatcgtaccttttaagtgcgcatctagt

SEQ ID NO: 328046 - DNA, 111 bp, Zea mays
  unsure (1)..(111): unsure at all n locations
cccacgcgtccgcccacgcgtccgggtctttccagtcaatgtcaatggtgtcagagctctgggcctttgtngtttttgtcttgccggtcggtgttttcacatctttcttct

SEQ ID NO: 328047 - DNA, 116 bp, Zea mays
aaaaaaaaaaaaaaaaaataaaaaaaaaatttttaaaaataaaaaaaaaaaaaaaaaaacaagaaaaattgaaaaattttaaaaggacaataaacaaaaaaactcaataacaaaaa

SEQ ID NO: 328048 - DNA, 422 bp, Zea mays
  unsure (1)..(422): unsure at all n locations
ctttgggctgatttatgtgcttggccgccaattacgcaaggggagatatcgctcaggtttctaatatatgggtgattccaagtgacgacccccgantgctaaagcgctgcttccgtaggctttgggcgtctcctgaccgcgcatggcgaggtcgacgagtcgggttttccttcggcgtacaaggctaagttcgagtctagacggaataatcatcttcggaatatacaggttaattccacgccttcggagcttttggcgggtgctcgtcctcttcatataaatatgagtcctgattcgtcgtaatctcatgataagactattgtcgatcatgtccataagccttcgtctaatcggcctaagaggcctttgtagcataggctttatgatcctcatactgttggtcaaagtcatcttgggtatca

SEQ ID NO: 328049 - DNA, 486 bp, Zea mays
  unsure (1)..(486): unsure at all n locations
tttgggctgatttatgtgcttggccggacttcggtctagaaggaatgtcagtcacacgtccaatatacgtaagctgaatgcggggcctggggagtcgggtagaaggaaaagaggtcttcagtcaaagccgctctgtttcgttcgtagggtgtgtgtaatggtcccgattcaatggttcttgcccgtcggaactggaacagccgagaataaagcggtgaatgggcgtgcaatgtgcgggaactcgttgaatagcctgggttaaacttcgaagaaagtctaaaagtgtcgcccgacgagttcgtgcagcaccaggcagccggctaggcaaaggtcgattaagttaacgacgtccagtcggctcccctggacgactagttatatcgggatcgagatatggtttggatctttatggngggtagtagcggggaactccggataacgggtgaaagtttgacttagtaacactgtgcgagcgaagaagggtac

SEQ ID NO: 328050 - DNA, 477 bp, Zea mays
ctttgggctgatttatgtgcttgtatagatataagctgctgcaggtagtgagtcctctcttctctttatgtactgtgttaagggagagagagagactgttgtcttttcctctggtgctggcggcgtgggcgtttctttcttctgagtgagactcgctcggctatagactcactcgataaaacggcgaagactcgtcgtactggcgtcggtcacgctggcggtttaattacggttgctaccgtttctaagcgtttagataccgaagctgctgctgccgatactcttaagttttgtaccgaggttcggaatagcgatatttcgttaactcatgagttcggctctgacgacgccgcgaagtagcgtaggggtaggaattctcctcctagtatcgacgccgagaagtatgctgtcgaggtcgataccactcccgctctggcgaatatttttattaagatttgcgggtccggagtcggtaag

SEQ ID NO: 328051 - DNA, 484 bp, Zea mays
aacctttgggctgatttatgtgcttgtgcgccttctcgccccgttagggttaattccgttaatgggctgagccgaattaatgttagcatgagagaagaggggccggggaggcagatgagcggtgcagggaatctggctgcggggtggcagagcgagtgagcgagagagaggtagggtcgctatgagtgcgggtaggtgactgtgggagtgacgatgatggtggttggtacgttggggccgttggcgggtctggttgttgtggtcggggcctttgtggtgtttgaggcggtggctagggatgtggcgactggtcggccttgtggtgagcctgtagttgtctcagaggacttaagtccatgcatgtgcgtacgtgatgctacagtctcctcacagcgctattcaaacctaacctatcggttgctgccccataatgctgcgatcgggaaaatttcggtgccatttaatccaactgttccgtagtata

SEQ ID NO: 328052 - DNA, 416 bp, Zea mays
ctttgggctgatttatgtgcttggaaagacccacctacgctgggccctgcccccacaactaatctagtccgcgctcgtactcggggcagttcgagtcctcgaccagccaccaacccaccctagcttgccggactccgtgcttcggcacagctcgcgaaaggccctgatggagacctacccggacccacccaacagctcggacgacaaaaaaaatacaagataaaaaaaaaagggtggttgtctcagaggacttaagtccatgcatgtgcgtacgtgatgctacagtctcctcacagcgctattcaaacctaacctatcggttgctgccccataatgctgcgatcgggaaaatttcggtgccatttaatccaactgttccgtagtatactttttccctgttagtcgggtgcacagtg

SEQ ID NO: 328053 - DNA, 365 bp, Zea mays
atttatgtgcttggaaagacccacctacgctcggccctgcctctaccactaatctaatccgcgctcgtactcagcgcacctcaaatccgcgagggggcaccaaaccaccctaactttcccgactccctgcttcggcacaactcgccaaaagccattattgagatctacccggacccactcaacaacttcgacgactaaaaaaaaacctattaaaaacaaaagggttgctttctcaaaagaattaaatccatgcatctccgtaccttattctacagtctcctcacagcgctattcatacctaacctatcggtatgtcccccataatcctccgatcgcgaaaatttcgcttccatttaatccaactc

SEQ ID NO: 328054 - DNA, 449 bp, Zea mays
tttgggctgatttatgtgcttgtaatagtaatggtagtacccgttccgatacctccaaggaatagcggagcttcgtcccaatcgctctaaaggcctcttcgctaactcgtctatcgtctatggatttaaatttcgacgacttctccgctttcgagaccgtctatacgcataagattgatagggttaagcacgagcttattgtatgtcttcggatatagaagcacgttacgggtcagaagtaaggtcaaaagtcggttaaatcggcgaacgcgttggattttaaactgccactattcaaacaattagctaagctgtaagcacgaacggatccccgaggattaccgcgtttcgccgaatctacgcaccattccgcgaaaaaaaaaaaaaaaaaaaacacaaaaaaaaaaaaagggtggttgtctcagaggacttaagtccatgcatgtgcg

SEQ ID NO: 328055 - DNA, 483 bp, Zea mays
ctttgggctgatttatgtgcttgtttatgtgcttgtttatgtgcttgtttatccccctgtggatgtgcgggcacatcgtcctgggcgcgcgcggcccgcgggcggctcgctcgccccttaccctcactctacgagtattaattagataattcacgagaatcctagacactgtcacgactggtgggttaatttgcataatacagggactccgaataatcctacggagacacctcgtattgtagctttcttccttaagaataatccttgagttagggctttagcagagtaaggcccatagtaactgtgcgtgttagtaaggggccctacgagctcaaatacggacaaattcgccggggatcctgaaccgagcaggaagttagcactacgggacgaattctggctagtagtcgacactagggatccggagggcggctcagggggctcatcggatgagaaagaaggtaggacagtttacgtgccttt

SEQ ID NO: 328056 - DNA, 471 bp, Zea mays
tggctcggaacctttgggctgatttatgtgcttgtttatgtgcttggactcatagtcggttagccgcgggctaacggcgatctttaagtagcatgaaaactcccggccatagaaatttcgctaagggtaacgtagagaatcgctttttagttcgtagcgaaggctatatgctgggtcgacttttagtcactcgccaaggtgttggccggaagactcgattcattcttaaagcccctgggaagcgcgggtttcctattcgtcagagcgattggaagaccccgcttcgtattcgccaagatgtaatagagaaccgagtacttattccttacggcgctatagagagccgacttctaggtgaaggcgctatagaaggaaacgggactcgtcgcccgttcgttataagtcttatacttcttcgccccgtagaaatttaaggatccgttcgccttcaaatagtgggagttcactaat

SEQ ID NO: 328057 - DNA, 436 bp, Zea mays
aaccattgggctgatttatgtgcttgtatgtatgcctgctcaaagtccgactaccccgaggatcagatgtagaggttagctgagggggaatccacacccgaggggactgctacgcttactaacgaagcctaccgcgataaaccctataaagcgccgacgctcgactatccctcgcatctactgcgtccttccgcgatccctacgcacggacgtattcataataccgagaggactacgaacgtatacgtttcgagggatctgcgtacagcgcgtcatacgcttaataatatgctaacggatactaatttagagaatttcactacggacgaatcatgtatctacgtctctgtcgataagaacgatcagctagctactgactctccaacctcgtcgacttagatcgactcatcgattcatggacctacatcgtacgatt

SEQ ID NO: 328058 - DNA, 499 bp, Zea mays
gaactttggtctgatttatgtgcttgtccagctatcggctcgactcggttcagtcccgctcgagaggctccaatcgaagatacgggccgagccccgcttctcaggcggacgtcgtcgactaaagtcgtcctatctacaaaatcagtttcatcattagaagtaataccgatacccgtagatcgactagacgaactaaaaccatcttcactaacgctagtacttaaaggagctatcctactatcggctcgattatcccctagcgttattcgccttagttgccttcctcccagccgtctagtcaccttcctgaaggtacaagaacatctaagcgtaccttagatagcgcaagtaaccagtctaagaccgtctctaatacacggacaccccgaccctataacctcccctaaacgcttaatactcgcaggtactcgtcccgtcactctaaccaaagttccacccggtagcacacaattagcatctctactccttcgatgagtca

SEQ ID NO: 328059 - DNA, 432 bp, Zea mays
tttgggctgatttatgtgcttgtacgggcttgactaaaagaatcatatgaacctccgtggcctacttacgtttcgtaaacctgggaggaggaagttctattactactttaacattcgattcgtccctactacggtctcggacgcctggagtggttacagtcgtagtagcgttctcccatagaaggcctagagtaccagaagacaatgcagagaagatggtggaagtggtgactgaggcgactgatctggcggtggaggtgattgagaaggctgttgatgaggccgtgtaagtgccttttggtagcgaaatctctaagtaggtagttcttaagaccaagatgactgtggacgagactgaggaagacgttgataaagtcgaggtttcgaccgagaaggccgatgagacaaagaaagaggcggacctaactgctg

SEQ ID NO: 328060 - DNA, 453 bp, Zea mays
  unsure (1)..(453): unsure at all n locations
cccacgcgtccgggttgctccagctgagttttcatcatcttccgcttcagacatcgataatgttaaataaccagagcacagttgctaaggctgtttctgcaagaggtgtatactctcctcagattgctagcaattccatatctcggaacaatcatcatttgatgggattgctttcttatgcagaggacacaaataattcatttgagggaaccagaaaatcacaaacttcattttcagcttatctttctggcattgggaagaatcaggtggatgaagttgctcttgtaaggaaagtacttgatttcaagtttcataatgtcaaaggattgctgcaactgattcgtcattcgttggagtctatcaaccatganagtgggtaatgatctaccaagtataggtatcttggnaaaagagataatgatgggaagggtgctttggcaactgtgctataca

SEQ ID NO: 328061 - DNA, 465 bp, Zea mays
aacctttgggttgatttatgtgcttgtccggactagagagtagtatactgagcatcccacttcctgtgcccttagcatcatagaatcgccggaatagtagttttgcgaagacggttaaggttgattgtaggtgctagaaggaagattgaggtcggggccatagaacttcccgtcgcaaacctcgaacggtgtccgttcttttcgtacttcccccgttcgctgagccgagtttcctgctctcgctacgtccgagttttgcggaggcttacgccaaacctacctactaaacgccctctcttctcttctcttctccgctccctcgtcttttcgtcgactccacccactctcagtaggccaacggtccgctagacctggcagcggtccgcaacccatagaatatcacgaagagcgaagatctaagctacagtcccggcacagaacccgtggacatccgcctgagcacca

SEQ ID NO: 328062 - DNA, 360 bp, Zea mays
ctttgggctgatttatgtgcttgcagtgactcctccccgaacgtcaggtcctcacgcatgttaaacgatacacgtcgtacgtgcgcagctctatttaggcggcggcgtgtcttaatgatgtcatctagacctctctcgctatagtcttacatgatgatgcacttcgtgatcgctaccaatttacggtgtataagttgctcgaattgttcaagattagatttctttatttgctgatgctcggtgaagttcaagaagttcgaagtatttaagggtaccattctgcatttagtgttcgggtattaactgcttaagagttttcctcattttcggggtgctggcttacttaagggttttactatg

SEQ ID NO: 328063 - DNA, 494 bp, Zea mays
ctttgggctgatttatgtgcttggatgtatgtattcagtgctgctattgacttacagcttgacacgcgctctaagcgccgcgcgggtgtgtctctgttgttcattttcgcttcgtagcgccgtgcagcacacggcctcatgattcatatgcatcgtcgtcatcatcgtgcgtcaatcccaactcgacggtagcttatagtcagtcagtatactattcttcgcaagcaacgcgtccactcacacgcgtattgattggaattggaggtgcgtgcatgtcgactcgttatgaagttcatcagcagccaaacgcaatgcaattcgtaggtaaccaagtagggtgtcgtcacacacagtgcaaccaaccgcgtgcacgggcacggcggcctgaccactggacgcgcaactttcgcatgcggttgggtttgcgttaaatgcatggcgattcgcgtaggtctcgcgcgctgacgacgccgcatctcgacaacgacacaact

SEQ ID NO: 328064 - DNA, 496 bp, Zea mays
  unsure (1)..(496): unsure at all n locations
ttgggctgagatatatgtgcttgctcgcagctatcatttagaagttggtatacaccgaattcaaaatcttcgttaaaagttagagctaggtcatcggcctaaagatcacccccgccgggaacccagttcatagcacagagtgcgaataagccaaggaaccccccgaggaggtcggcgaagccgccgacgcctgcccggtcatccccgacgacgggagccctaagggccccggatacgccgaacctgtcatcgccgaagtcgtctagaaggtctccgaacccgccggctacgattcgacgggatggttctcaaggaccgatacggtcattgagaggggcgtacatatcttcagtagtgggaaggataatggcctccctaagaagcctgtcttaaggctaggtaatattgcgcccaccaagggtcccgatattctcggcggagaagattagacttgtattgtctccgaagagtacccccnactacgcggagacactat

SEQ ID NO: 328065 - DNA, 498 bp, Zea mays
aaccattgggttgatttatgtgcttgtgtaggcgcttcaagacgagtctaatgagcctagaaactctgcgcggaataaaagggcaggggtctgcccgacctcgacccgtagcatgaacatgaattgcgaaagtgcggttcactgacttcccagattcctggagcccgaagtcagaggcgctagaaaagccattatagggacaatcggtccgcggtagttaagtgcctacagtgatgccgtcccccgacttcctgacgctggtctccttcactaccgcgaagtagaacctattaagcgccggaccgcctatttattaacagggaatgcgagtcgggaccagattgctgcgagataggccagccccatttcatcgacgattgtgttgtgacagcaacctaattcagcatgagaggaattgccgacctatataaccggctactgtgtccggccgaaaagttagcggtgtgaagtcattgcgcgttcgaccacgatcgaatg

SEQ ID NO: 328066 - DNA, 460 bp, Zea mays
gatttatgtgcttgtttgggatctgctacggaggtgaataggtccgagattcctgatgattcaattgcgactgggggtcgtcccgattttgattctgatggtggtctggacatgtttctggagtaggcgttggtcggaaggactaggcgttgtaagagtccgatgttagaggtatctcgtaagtcgaagagacggtctgagctcgattagtagatgtcgtcactcgcagaggttagtgttagttcgtgctctcgcgtagtggtcgcgcatacaccggtgtcgacggcgcattgctcagcatggacgcgtccatatgggtagtaaccacgttgtcgagagagaggcttttctaatgttatcgatgaccccgtcctatattgcaccgcatccacgctgaacggatacattaccattactgacgtctgacctggtctagcccggtagatagaactatcatctc

SEQ ID NO: 328067 - DNA, 439 bp, Zea mays
cccacgcgtccggcgagcggccgcctttttttttttttttttttgattaaaagatgtttggggatttatacctaattgttgataaacgcgcgcagggcgcgcgctctggactagtatatattacatcgactaggtacacatgcttctctaaacatacagttgaaccaactacttctcgacaacaaatgacagacacatcaggatgtaattaagggattatacatggcattaggaaatctatgacctatcgctatatatgacggcacaaatgttttgactaaattgccacctaaaatgttgaaactagtactttacaggagacagttgtgacgaaagttaccagtgctagctacaccgaagagtacctcttcatggtatcgatggctcaactgctctgaagcattcatggacgcagtctccagtcagaaatatgtgagct

SEQ ID NO: 328068 - DNA, 82 bp, Zea mays
cgggccgacctactcgtccgaaaaaaaaaaaaaaaaataaaaaaattattttaaaaaaaaagacaaacaaatctaaggatcg

SEQ ID NO: 328069 - DNA, 379 bp, Zea mays
gcgcgccgtagagccataaggcatctgagttgctccatagtagtacatgccaccatatgacggggagcggtgccggacctaaagccaggcagcggattcctactgagttcagggaagtgcagaacgactgtagtacctccgtagcgtatgccaagtctctggaacctgaaacagtgggttgagacttataatggtaagcatgcagcacattgcacacgcttgcttgctactctcctaagacttaactttgttaccggagtagctgtcgagactatggacatatatactcatatgtacatgcgaacagtcacctatggacatcgacatagaacatggtcatgctgttgtagacaagcaatggagccatgcactgacagta

SEQ ID NO: 328070 - DNA, 430 bp, Zea mays
  unsure (1)..(430): unsure at all n locations
aaatgtacttcgctgacaaataatcatggttcctaattttaatctccaaatatgtgtaggaagtggatgacccatggcaggttgatatgtcggaattatgtctaagtgaaggcctctctcgtaacatgccagacaatggtgcagaaaatggcaccgagggaggaggctctagagttaaatatgctgtgatggatgttcccatcaccttaccttcgttgaaaccagcttttgacaagcctaaccccaaacaaggcattggtatgctgtcatggagcagcgacagccactatttcttcaccaggaatgacaacatgccaactgttctttggatatgggatatatgccgncttgagcttgccgctgtgctcgtgcagaaagatccaatccgtgctgcagcatgggaccctacctgcacacgccttgtttatgc

SEQ ID NO: 328071 - DNA, 427 bp, Zea mays
attcccggtcgaccacgcgtcgaccgtcgtcgcgcccgccgtcagatctagctatctggcaccactgcgttgcgcgagtgcacaataaccatgtgatccggatgattcacggtgctcttttgtagcccattgtatccctctaccgggtgaccggagctagactaacaagtcttcggcgccaccggttgccgatttgggttggcggtacaaggagccaccgtgctaacctcagtttgtatgcttgctttttcttgttcgcacttcgtgtcttcagctttccttcattttgttcttgtccactcggttttcgtatggatctttgattgtctgaggctctggatctatgaactaggagaaatgcgataatatattgcaaatgatttagagtttcaggcttaatcgcgagcttggtatatgattaatttat

SEQ ID NO: 328072 - DNA, 418 bp, Zea mays
cggacgcgtgggcggactcgtgggcggattctttggtggccacctgcgttggcttccaggaggcatccgtcagacaccgtggccgcggctgcgcgacacagcctcacgcccagatcgagcgggcgagcccaagctcccatccggcgatccccgactccccgtcgtccgtccgcccgaggcccgagctcgtcgcgccgctggacggaccacggacgggcgagctcggtcagctccctgctcaccgcgccgccgctggacggaccacggacgggcgccgctcggtcacctcgctccctgctcaccgcgccgcgtccgtccgagctctcaccggtcaccgcgctccctgctcccaggtgccagccaccgagccgggcagctgaccgtaccgcgccgtcgtcagaccgagcgccgtccgagc

SEQ ID NO: 328073 - DNA, 431 bp, Zea mays
  unsure (1)..(431): unsure at all n locations
cggacgcgtgggctatagcaaccggtccatcactttcacgctcagcttcagcaatggctgcctgcaccatggcgatctcctccacggcgatggccggcacccccatcaaggtgggttccttcggcgagggccgcatcaccatgcgcaagaccgtgggcaagcccaaggtggcggcgtccggcagcccctggtacggccccgaccgcgtcaagtacctcggccccttctccggcgagcccccgagctacctcaccggcgagttccccggcgactacggctgggacaccgncgggctgtccgccgaccccgagacattcgccaagaaccgcgagctggaagtgatccactcccgctgggccatgctcggcgcgctcggctgcgtcttccccgagctgctcttccgcaacggcgtcaagttcggcgaggccgtc

SEQ ID NO: 328074 - DNA, 306 bp, Zea mays
  unsure (1)..(306): unsure at all n locations
gtggtggacgcgctccttgccgagggccttttgaagcgcctcctctgcctgcagcgctgcgagctctgcggctcgctcgcggacacggacgaggagggctgcccaaaggcgaaacccgaggacgccaaagccggtggctttctcctcgtgccctgccttcctctggtgtatctgtggtggcgtcgccagggcgacggcgccgcggacgcggacacggaagagcggccgttcgtgagcgctgtggcgcggttcgcggtgcangtggaggtgggcgtggggttgagcccgcgggagaagcgtgaggcg

SEQ ID NO: 328075 - DNA, 429 bp, Zea mays
cgcacgcgtcgcagcacgccacacgtaatttccgaagtctacaacatgtgccaaacccggcgcgaaatctgcctcttcttgcggctttcgttcccgcttctggccaaattcctccaaaacctgacgagctggatgaccagctcgagggtccatgccgggtgatccgagcagtgatctgagcccagtcctggatccaagcgggaatccatacttgatctcctacatcagctacgcgatcgatcgatccaccgatagatgctgcggcctcagccacaatgtgagacatagctgtggatatacctgctgctatgcgaaatgggcatgcatagaggacttctatgagacatactatgatagagatgatggtcatatagatggtcatataggaggtcttgatggacatggtgatggtcatggtgcagattatgt

SEQ ID NO: 328076 - DNA, 90 bp, Zea mays
cccacgcgtccgattcatttgttaagaagttaacgaggtaaaggatgtaaatgatgccgggggctttgctgaatatgaaagttgaacagt

SEQ ID NO: 328077 - DNA, 260 bp, Zea mays
aaatatacacgctcaacatatcaacttcataacataatcactcctcctctcatacatccaagcttatccaaacgatcacatcatctaccttcacacactcacatcaacctcacatcaaatccttccccttccttttctacaccttctacttgtaacaccccttccccacatcacttaaacgatcatcaaactcttctacaactatccactaaagctattcaataccaatcccgtcactggcatatatactaatctcaaaa

SEQ ID NO: 328078 - DNA, 319 bp, Zea mays
agtagatcgccgtcgtccccttccgaaatcttctttcgtgtattcctccccaccgcaagaggttgcttttccttccatctacggaggcattccttcccttcggctttcaaccacaagaacttcaacttcaacccggcttggccgccgccgaagaccccattttggaaaatccaaatggaacacccctggcccattaacaatcagaatccgtttctggggctaacctcttaacagggcccccttggcaaacccgggcaacaacattgcgcttcggggcgctccattggccgttggaaaccctgtaacggggagcccccca

SEQ ID NO: 328079 - DNA, 81 bp, Zea mays
cgcgtccgctcactctggagagcacgacaaagtgaatgctgtggagatttggcttgaaaataagcatgacgatttgagaac

SEQ ID NO: 328080 - DNA, 317 bp, Zea mays
aaagaaaaaaaaaaaaaaaaaaaaaataattaaaaaaaaaaaaaaaaaaaaaaaaaagaaaaaaaaaaaaaaaaaaaaaaaaaaacaaaaaaaaaaaaaaaaaaaaaaaaaaaaaaaaaaaaaaaaaaaaaaaaaaaaaaacgccgaccacttaaaagaacccaacataacttacatggccccacaaaacaaaaacattcaaaaagttcccccaaaatcaactaaaataccccagtagaaaaaacataaaaactcaaaaacccctaacaatcacaaaataaacctaccgcaaagaaatccccattcaacaaggagcc

SEQ ID NO: 328081 - DNA, 242 bp, Zea mays
cgcgtccgaaaaaaaaaaaaataaataaaaaaaataatttaaaaaaaaaaaaaaaaaaaaaaagggagggatttttaaaaaacacagtctgcctacaaaacaataactatttacatactatcctaataaacaccttctacataccttcactttcaacacctacctgtctcaagtttatgcgcctcttcttttaatcttcgtccctccacatttccctgtcgtaaccctgcaacttatacaca

SEQ ID NO: 328082 - DNA, 403 bp, Zea mays
cccacgcgtccgcggacgcgttggcggacttttttgattcaaaacggataaagagaaatggagagctttaccttaatgtgggctgcaattttgccgagatatttggagaaaattctgtagcttctattcttgggtctcttctagatatcttgcttcttaagaaagatgtgaagcaaaagtcgcgtttattacaacctcttttccagattctatcgaagcttctttctgatcaatgggtctcagatattggtagtcagtataacgaccaacaagatacctcatctgaaatccctgatttatctaactttgtcaaagaagttcaacacttggtactgctggccctcaaagatattacagataccctaccatcgggtcaccatgatgcaatggtcaacagctccca

SEQ ID NO: 328083 - DNA, 433 bp, Zea mays
agccaacctgaatggctctttagctgttgttcatggcccaactcccagtatggacattgggattctgatggactctggtaagggtctctgggtcaaacaatacatcatacagttcaaagagtatgccagttttcaatatgtgcatccattggtggtattacgtgacggaagggtggtcctatataaagaagacatgcagcttttacagatctatgacccaagaactaacacactcacagattcagtggaggtgtgccatttttctgcagttgctttgtttggaggaaatctactgagcttatagtatatttttgtcgctgggcataatttatggcaaactgcattcttaccgacataagctgcaaatgtaaagcttaggacactagtagcttagctaataataggatagaattcccaaatctattttggtaag

SEQ ID NO: 328084 - DNA, 400 bp, Zea mays
cccacgcgtccgcggacgcgtggggttccttaagtttcctcccggcaaggaggagaacagggcgtataaatatgagggcgagagaccaagtgtacccctttcctctgcatccactcttacgtagtgtctgttgcatcttgcatggaccgtcattacctcctgtttcttgacagtgtttgtcacctctcaccggccagggctcccactaatagaaataaaacttttgttctaagcaaaaaaaaaaaaaaaaaaaaaaaaaaaaaaaaaataaaaaaaacaaaaacataaaaaaaaaaatatataaaaaaaagaaaaatataaaaacaaacaaataaaaaaaaaaaaaaaaggggcgccccttttaaaggacccaagtttactaccccttgctttgcaacgt

SEQ ID NO: 328085 - DNA, 100 bp, Zea mays
gcaaggtccagaccgaccagctgtatgtttatgcatgatgccgtgccgtctcgttgtcagctggttcagtagtgatgcttactttcttgtcgttgttgct

SEQ ID NO: 328086 - DNA, 306 bp, Zea mays
actatataatagaattagaaatatgtttgttcaaaatgcttgttgttctattgtacctgaactatcttatatttcatttataaataatgaaataatgataaccaaggtgaccgattggaaatgattatagctgagagttattggatccagtattattagtagtttggtttacacagcagaaattaagaaatctgtgcatttgctgatatgagaacagaagggtactagctggttttggttagattttgggcccctgaatacattgtgatgttttgccccctcgattagtgcagtctgcttggtacg

SEQ ID NO: 328087 - DNA, 438 bp, Zea mays
caagcatcacagttcgttactttgttcctgtacaatttgttgatgtcactggaatcacgggggggaaaggttttgcagtatgtattcttcttgtcctaattttctgtgatttcacttgtcaagacagttcactactttgctgtaaacgagataagctatcaccagggttttagttgtgtttcttactttctttctgcaacatctctatttgattagttgaaatgacaccagagtgaattatgcaagagatatttgtaatacttaagtttctagtttatgccctgaatttaaattgctccatttcaaacatttatttgattaaaattggtctctcgcaatttatatgttagcttttctgataaaaaaagaaacactgtatgtgtttctttcagttggtgtaatattttctgtagtgcatgtgagcacgataccccttgg

SEQ ID NO: 328088 - DNA, 393 bp, Zea mays
cccacgcgtccgcccacgcgtccgcccactcgttttcccacgcgtccggccgcaaggtgagcccaattgcctatcctggaacaggaaaaacagcaatagctaaggggccccgcctgtatctaccatctatgagggcgcctccacatgaatcagtattacacatctgtatctgaaacatgtcagacactgtgccgcaaggttaatcccagatgatgaaaagaaactgcgtacaccatgtccatcagaaatactagttccaattccgacacatgcgctgggcatcaaggtcaacaccgggagtttttattattattattccagaatgcgcacggtaatttgaaaatgaaattgtggtggaaactgtggaatccgctaatccggtgcggatctgca

SEQ ID NO: 328089 - DNA, 345 bp, Zea mays
cggactcgtgggctgactcgtgggctcaatgcagtttgggtaaaaaaaaaaaaagagaggataaatttaaactaaagaaacggtaaaaataaaaaaaaaaaaaaaaaaaaaaaaaggtctgccgtttttcagcttccatactttcgtttccgtacttgccacttcatttttcttttttcgtgtttccttatttctgttcattggcttttctttttacaacttcgtgacttggaaaaccttgccttttcccatttttataccccttgtccccttattccccttttgccatcctcagctttatatgcctttaggccttaaccctttttcccttcccacctttttttc

SEQ ID NO: 328090 - DNA, 279 bp, Zea mays
cccacgcgtccgcccactcgtccgcccacttgttttgctttgttcacgaacaaaaccggagggggttcattagctaccaggaaagttaccaaacttaaccacttgaattaccttccaaacataacggccagcaccatgtgccacatggtcaattcaatgtccagcttaatggcaccaggtggaccttaaaaccatagaccaaaccaaacttgaacacctaccttccccattcttacgccttattaaaccgcaccaaggcaaaccaatgcttccaaaaca

SEQ ID NO: 328091 - DNA, 409 bp, Zea mays
cttctgtcaccgcagcaacaagggaagtgttcaagaaggaagaatccaataccaattgggacttccttggcccggatttggcctgcgctgagtgagttaccaggagtaccagggaatcgaagaagatagccgaaaagttgaaggaagcaaaggggttgagcaagcaagaagaacaggtatgtggaggtaagtagtttggtatgggtctggtatgccttcatcacccaatttacagactacttatatccgatcaatatgggccaattacaatccacgggccatacggcacaatttcacaatactatgaccaccctgagtgatgcacatgcgtgacaggatggcggtggcgaactggcgagatggagaaaagggaaagcggcaggggattatgagccaggatggaaccacc

SEQ ID NO: 328092 - DNA, 348 bp, Zea mays
ccaagccttcacaaccatccgagccgatttctaccagctcacataacgctaaaccctacggacggttctacaactttatggagaatctcttccgcatcatactggagccactttgcttcatccttctattcggctgctgccgaatagaatggtggatctgactgatgatgacaatactaggctacctgcccggaatcatctacccgacctatgtaccacttggtctcgactctcaccagtatgagaggtaatactacacgctgggttagagcatctggttgtgccaatccagtctaaacacttgattggaaatcactatctctttctctatgcggatcgtgtgacatg

SEQ ID NO: 328093 - DNA, 407 bp, Zea mays
cttgcatcggccgccggtcctccatccatttgtttagctagcaacgacgacacgctagccagggatcgtagccgaccggggtctgcgcgcgggcattcagttcgccatggcgcgcctgctccgcgccgcggccggcctcgcgctcctcctggccgtccttgccccggcggcgtcggcgggcggcgacctggcccagctgggcgccgccgtcgagacgcggcgcggcggcgggcaggacgacgtgccgcggcggcacggtgggcgagtgcatggagtacctggacgtagacgcggagggcgaggcggacgtggcgggcatggccaccggcggcggcggcggcaagcgccgggtgctgcagggcggcttcggctacatcggctacgacgcgctgcgcagggacaacgtg

SEQ ID NO: 328094 - DNA, 252 bp, Zea mays
cccacgcgtccgctgagctccgcctttgtgtttccagggtccgggtcgccggaccgccgggtcgtggttgccaccgcgaccaccctggacctgctcccggccaagggcgccaagcgcgggttttctgacgaggcgcccccggcatcgactgttgccactgccggaaagggaaagaaggtggcagacgaggagttcgactagaagaaagtggcagcgaccccggaaccgggcgacaaagcacaagtggtggga

SEQ ID NO: 328095 - DNA, 125 bp, Zea mays
actctcctaacatgctatcacttctttgaagtacatctaattattcactcttgcatgaagtacttcatttctttttattctgcatcttagattctacatgattattgttcctataatacagacca

SEQ ID NO: 328096 - DNA, 349 bp, Zea mays
gttaatctaccactctcactagaatgcccttggcaataaatacaaccttttcacacattggaaggttcggtacctttttcggtagcacttgttactattattgcctgggactatcacgagagagtggctgaacaaccgctcacgaattgctgattagtgaggctccggacgctttgctgatgtcgacaggtgtattttttaccagggggctaaccgtgagaggggcacatactcttgtcgcgactgatgactcgggcttactggatcatgacatatacagactcctggtgcgctttaacaaagtgacttatgatgttgaatgcggtgacgtccttaaagtgcttgacat

SEQ ID NO: 328097 - DNA, 249 bp, Zea mays
agctcacccacgcatataacaagatttttttttgatcctacaccgaaaccctcaaggtggtgtctcgtacttagtgcgaacccaaatacaaatatcaccctccgaaatacagagcaccggtctttacacaccacgagataaaactcatggagcaacctgatgcatactagaaaaaatctgtatacaaacatcggaaagatagcatattttcggcagaactactaccaaatgggttgcatgacacacgac

SEQ ID NO: 328098 - DNA, 350 bp, Zea mays
  unsure (1)..(350): unsure at all n locations
gtctggagtctagactcagngttgttaacttaagtttaatcatcttagcaactacggtacgtgaccctgagcgcctggttgttggcaaacaaccgacaccttgggcctacaccttaaaaggttttgcgccgacattggcttttcataagtgctcaatcgggatctatcccctcgagcatagagaaaaagtatcaattttgacaagggggtccaatattctttaagcatgcctacctcaatttgccacaagccagaatgccatgatatgatcgatgaaatggctgttgccggcaaatgactttcaaggatcaattgtctttcaagaaccacaccttgtattggattacggg

SEQ ID NO: 328099 - DNA, 56 bp, Zea mays
cccacgcgtccgagattattgatttggcgtcgttgaccggcgcttgcgttgtcgca

SEQ ID NO: 328100 - DNA, 123 bp, Zea mays
accacgcgtaagccaataaacagctttctatcttaacatagactgaataccagcaggtggagtcatttacacaattcgatgccaaatcttaacattatctttcgccatcacatgctctgaaat

SEQ ID NO: 328101 - DNA, 283 bp, Zea mays
cggacgcgtgggcggacgcgtgggcgccttcctccgcggctcaaacctttcccccttctggcaattcccgccgccgctccatgccgtaacgcgacaccatgagggagtgcatttcgatccacatcggccaggccggtatccaggtcggaaacgcgtgctgggagctgtactgccttgagcatggcattcaggctgacggtcagatgcccggtgacaagaccattgggggaggtgatgatgctttcaacaccttcttcagtgagactggtgctgggaagcacgt

SEQ ID NO: 328102 - DNA, 303 bp, Zea mays
aaggcaggcaggaatgcatctgccatttgaacagagcaacctgcacattatttatggatgcctgttcaatggagggcttggtcattacatgttcgtatatactagaaaaaacagaatattagcattaatccatagttaattaaagtatgttaatgcgcctgttctttggtgagtactgtaatcatatgacttgggactgggaaattttcacagaaagaatggatgtgagatacacaaaaattaatgccgtggtcaaaaaaagaaaaggcctgcaactctggatcaatcctatataaaagggcg

SEQ ID NO: 328103 - DNA, 379 bp, Zea mays
cccacgcgtccgcccacgcgtccgcccacgctttcgaagaaatcagatgaagtgaccaagagcaatgtgactatataataataataaaattaacagaagaggtacatacagtttcactttaattttgaaatgcaacagcagcttgatgtctctattgaaccctagaaacaactgaaggagaaaatactcttccacaaggaataggattctcatttgtgctagcagaatcagagttaattgcatcattagttctaggaacctgctggggtgaactttaccacccagaagaggcataaccaatttcttagaaagaccaccactgttaatcttgtcatcaatggtcaatatatttcttttggacaagtcatttattataagt

SEQ ID NO: 328104 - DNA, 408 bp, Zea mays
cccacgcgtccgcccacgcgtccgctctgatctgttgcaagggcacgcctagggtttctggccttgcctatactgtttgtggcggataagtcgtcctatcctagagggagacgccctggagcctggaatggctggctttgcagtgctcttccagcttgtgtggatgtcgttgctgcacatctaacagcagtggctgatgcctagaggtgtgttctttagttcagatctatcctgttttacagtactaggttaatgaacatagtgacagacacaatccaaatttattacaaaatagtaaataagcaaaaaactatatttcgacttacatagcatggtagctattttttcaaatagattgcgccagatcaaaacacaacgacagactatttttatgttctccaatgcatg

SEQ ID NO: 328105 - DNA, 281 bp, Zea mays
aggagctcgcacaagcctatgaggttttgtttgatccagagaaacgtgagatttatgatgagtatggtgaagatgcccttaaggaaggaatgggcggtggaggatcccatgttgatccatttgacatcttctcatcattttttggaccctcttttggaggaggtggtggaagcagcaggggaagaaggcaaaggaggggagaagatgtagtccacccacttaaagtttctctggaagatctttacaatggcacctcaaagaagctctctctttcgcgcaat

SEQ ID NO: 328106 - DNA, 52 bp, Zea mays
acaacacgtacgaccactcttgaggcactttatttccagagacagcaggtct

SEQ ID NO: 328107 - DNA, 267 bp, Zea mays
ccttcagtctctgggcaccaaaatttccgtttcgattgccgccgcttttgccaaggtcagggttccgggccttgttctcgggttttgccttcggcccgccaaaggcccccgccggccccccaaaggccgacccatcccccaaccttttcgcttccggttaaagcaggcgtcccccaagtgaaggcctttaaaaaagcctttgcggagtttggggaagttttgcttgctcaagttgtgaccgatcgtgtcagtgggttttctaaggga

SEQ ID NO: 328108 - DNA, 204 bp, Zea mays
  unsure (1)..(204): unsure at all n locations
gcgaccaggggaccccgcggcggcgcccgagcgcnccgagccgcggcgcagcaccaggcccncgcccccgcgacggcggcggcggcggcagaaggccaggagcgggacgcgcagaagaagcagcccgacgaccagaacgcccgcgacgccgcgcgccacnccgccgaggagaggcagcgccaacaacagcgcggagccaacgcc

SEQ ID NO: 328109 - DNA, 240 bp, Zea mays
  unsure (1)..(240): unsure at all n locations
gcngngnganccgagacangccggcnncncgngggaaaggaaaaaaaggcacagacggacgagaacnggacgcaaaagcgngnccangancgcgnaagcanggcgaaaccanncaaaaggcaaancagagaagaacangggcagggcnaagcacgggaacnnggagggaccaacgaccgngngccgcgagaccagcnaggaggaaaggagaaacgngnngacaaacaacaggacgaggag

SEQ ID NO: 328110 - DNA, 371 bp, Zea mays
  unsure (1)..(371): unsure at all n locations
cccacgcgtccgcccacgcgtccgttgacgcgtgggcgcatataaaggtgtcgatggaaggaattctacttttttttgctgatgaagaaagtgaagtangtgcaatcgatttccccattattttattacttgcattttgattatttaaattgttattcctattggtgcgactactagagttaatattacaggtaaaaatcttacgaatacaatagaaataccattgggtggtgctggagtacctatttcgtcacaaggttgtgattcctgccatgttttttttttctgcattggtagtttcacttccaaagcttttctagcttcgtggtaaggtaaagagncactactctgctatngtactagatctcatg

SEQ ID NO: 328111 - DNA, 325 bp, Zea mays
  unsure (1)..(325): unsure at all n locations
cagatccagagnacttttgcaggaactgatggttattgctggtagatactcttttaatcggttattattttggtcagcttatggtaagggtctgatgatctagtgttgcatgcacattagtcttgctgtttcagggaggcgcggacacaagtatataccactcagtcgacttcaaattgtgctcgatgatgagggctattactcctcggtgctcttttccatctgtgtcatcatgcaaagaaattgaagttacaccttctagatctgtctatcacttgtaaattggggctgttgatgctgctgcaaagatacgatatctggatac

SEQ ID NO: 328112 - DNA, 415 bp, Zea mays
  unsure (1)..(415): unsure at all n locations
cgncgagcaggcccgcnncggcgncgncnccggcgcggacatactcgcgnncgcggccagggacagcgncgcactcnggaggcacggcnngnnagngncagnggacgccngccgnnngannnnaacccgacanngagagncnacanggannnggaanccaangcnggactagacngaaaagcacatgngncngggcgaccttnttttgacgcacatgatgccgcgtgcagctgcctgaaagaactcgatgcattgccgggcccgggcatgggtccaactcccaactttatttttttacagtatttgcttactcttcaatccatccattcatncatccatccatccgtacgtataggccggcgggaacgcgttccaggtgccggccgggcggcgggacaggttcctgtcgcgcgcg

SEQ ID NO: 328113 - DNA, 183 bp, Zea mays
  unsure (1)..(183): unsure at all n locations
gaccgaccatggccaccggggccgacaaccgcgacggcatgggctaccagacccgcgncgggctccgactcgccgacgcgctctccttcccacccccattccccgccagcaacttcgacttctacccgctctccctccacgtcgcgctcagacttcttgccagcggcgcgggtggcgccactc

SEQ ID NO: 328114 - DNA, 298 bp, Zea mays
cccacgcgtccgtccacgcgtccgtttacgcgtccggttttgttcacggacaaaagcggaggaacttcattacttaggaaaaatttaaccgaacttaaccactggaattaccttccaaacattacggccgggaccatgtgccacaaggtcaattcatggtcaagcttaagggccccaagtgtgccttaaaagcagagaccaaaccaagcttggacaccaaccttcacttttcttacggttttttaaaacggaccagggcaaaccaatggttccaaaacatttgggcaaaaacttgacc

SEQ ID NO: 328115 - DNA, 302 bp, Zea mays
cccacgcgtccgcccacgcgtccgttcacgcgtccgcccacgcgtccgctcgtagagagagggaaaaatatccccagaccctagctcccgatctcgatggcgaaccctcgcgtcttcttcgacatgaccgtcggcggcgccccggcgggccggatcgtgatggagctgtacgccaacgaggtgcccaagaccgcggagaacttccgcgcgctgtgcacgggcgaaaagggcgtgggcaagtccgggaagccgctccactacaagggctccaccttccaccgcgtcatccccgagttcatgtg

SEQ ID NO: 328116 - DNA, 425 bp, Zea mays
  unsure (1)..(425): unsure at all n locations
cgagngccccgganggggagacagccannnngngaatcnggggtagatgtacaagatngggtcattcatctcatgacaatatgctcgccgcatctctgtcgggtagtttaagcccagttggatggttggttgtggttagcgttacattgatcaattctttgaagcagcatccaagacgaccagctctagtttcagaaaaaagagggccttccgattccataaccagggtggtccaagatccagaattggttcttggtggttaaaaaaggtaccattttaaatatatgtaaaggttgtcactgaattaactgcttggtgatgttgtaagttgcaacaatccgtgaagattcaatgcatgaattttcttattgcaaaaaaaaaaattttttggttgtggttatttttattaaaaaaaaaaggggcgg

SEQ ID NO: 328117 - DNA, 303 bp, Zea mays
  unsure (1)..(303): unsure at all n locations
cccacgcgtncgtccacgcgtncgactgcgcgggcatcggccccggtgtctacgacatccactcccccaggatcccgtcggctgaagagatcgccgaccgcatcgacaagatgctggcggtgctggacaccaacatcctctgggtgaaccccgactgcggcctcaagacccgcaagtacacggaggtcaaagcccgcctgaccaacatggtctccgccgctaagctcatccgcacccagctcgccagcgccaagtgagcaccttttttttgcctttttcgtttccgaggagggcgtcgtcgat

SEQ ID NO: 328118 - DNA, 323 bp, Zea mays
cccacgcgtccgcacagccgccgccgccgtcgccaccgccgcacggggccgcccggcgcggcgggggaggtggaggggggtggtactggcgcgcagtcgcgttcccgctcgtcgtcgcgctcggctgcctcctgtccttcgccttcatcctcgccgtcgtttccgcgctctaggcaagcggaagcaagtgcttcttcgttcaggccacatgcattttcacgcctcaacaatatttacctttgctgttagtggttcatccggtattctgtttcgtactgaactccttcgtgtcatgatatcattgcactgcaaggaaaaaataa

SEQ ID NO: 328119 - DNA, 62 bp, Zea mays
aaaaaaaaaaaaaaaaaaaaaaaaaaaaaaaaaaaaaaaaaaaaaaaaaaaaaagggaaggg

SEQ ID NO: 328120 - DNA, 349 bp, Zea mays
  unsure (1)..(349): unsure at all n locations
cggacgcgnngggaccnggcgnacaggaggacgacccaacccaagcggcacacaggaaggaagaggangccgccgccgccgccgagcgggccgcnggcgcagccgcaggacccgaaccacgcggcggcgcaggagggccggnaccgcaacagccaggccggggacgccgacgcggccacggcggcggaggcccggggccggcacgcgccggggcacgaggccgagaccgccgagcacgacgaccggcacccggcgcaggagcacgaggccgcgaccaccgacgggccggaccacgnggaccnccaggccggccgacgacgcgggcacgccgacaccaacgccggcgcgg

SEQ ID NO: 328121 - DNA, 357 bp, Zea mays
gatgtatgacgtcgttgtccactttgtttctgggtggcgtcaagatgggaccggccgtggtatgtgactgtggtaagtatgcgactaaggagctgtagtgtgttcttccaaccacatgcactagcactgtgggtttgctttgggcagctgcaagatttggaaatttatgaatgcgatgatcttgtctactggccggagaaagtattccaaagcttgatttccttgcggaggctagagatttacagttgcaagaacctaattggatacgcagcggcggtggcgaatggtcctgaccaggaagcaatgagccagttgcttttgccccatctagagtctctaaagatattggggtgtgaa

SEQ ID NO: 328122 - DNA, 199 bp, Zea mays
  unsure (1)..(199): unsure at all n locations
ccccgaggaagacgcggagcacggcngcagcngcngcngcaaggaagcgggcaacggagccngctccggcgaaggcagngccggccaagaaggaagacgaggcagcggnngccgagnngaaagggaggaagaggggcaagaaggaagccgaggcggagacggcggccaccgagccgaaagggaggaagagggacaagaa

SEQ ID NO: 328123 - DNA, 207 bp, Zea mays
  unsure (1)..(207): unsure at all n locations
cggacgcgngggcagcagggaagcanggcaaagggccaacannnaanaccngggaacggccacnnnggggngccaggngggacaangggnnnacanacnangaagnaaaccgcaggcngaanaaggcaacgcaganggcngcnggcanaagagancgancaaancagncngacangagggcagacaggaaggcannnaaccganggg

SEQ ID NO: 328124 - DNA, 402 bp, Zea mays
atagatttggttttactcaagggccttctacgggagcacgagtaccagatctatcgtgtgaaatatccgtgttcgtgacaatttcacactctcctaacatggtatcacttgtttgaagtacatctaattattcactcttgtttgaagtacttcatttctttttattcggcatcttagattctgggtgattttggtttttatagggcagacctggtgcagtagtgagagctgtttcaccaagtcaccaagtcatgggttcgaagtaacctcttcacattttcgtgggaaaagcttgccttggtttatccctttccgagaccccactcatgtgggagcctccgacattgtgtctaccctttttataagcctacactcgtttcaaagcatgcatatactgctttc

SEQ ID NO: 328125 - DNA, 100 bp, Zea mays
  unsure (1)..(100): unsure at all n locations
cccacgcggccgaacagagaaagcnganganacagannnggngangnnganaggaaagggncaggggaaaaaggaacacagacnacaggccgaaggaaga

SEQ ID NO: 328126 - DNA, 366 bp, Zea mays
  unsure (1)..(366): unsure at all n locations
cggacgcgngggcggacgcgngggncgacccacgcggccgcggacgcgngggcggacgcgggggcggncacagaggccgacaggaagaacgannngncgccggagaacgncaagacgnccggcgnancccgcgacggggaaaagagnaaggcacgagagcagnngccnggaaaggcgacgcaaaaggggcaggangaggcgcngacgnacncggcccgggaagcgccaccggancccgggagaaggaaggccaaaggagggaaaacaacaaagagacccagcagcagccggctgcagaagcttggcaagagccgggttaccaaattcgttcttcaggaaatactgagcatcaccattgaagaattt

SEQ ID NO: 328127 - DNA, 99 bp, Zea mays
  unsure (1)..(99): unsure at all n locations
tcgnccacgcgttcggccacgcgttcgaagagatcatactagcagcaaagaggtaagaaaccttggcaagccaatcgatttagcaagcccgtactacat

SEQ ID NO: 328128 - DNA, 365 bp, Zea mays
  unsure (1)..(365): unsure at all n locations
gactagntctagacgagattagttgaatttacatgcatatgtttccatcttaagaagctgtccgcgacagaagtctacaatgatgcctccatggtcgtcgccggcggtcaagccaagtaggggatgcaggaggaggggtcccgcggcgaggatgagtggatcaagtgggctagaggcaagacttggccatcccttggctcatggtcgcggggttgggcgctctagtgtggcgcgagctccgtggttctactgtgggccacaccagcgtgggagctctaacgcgtggtggagttgcctctgttgggtgggcgtggtgtgatgttaagaaggtggcagccggcggcccgtatcggggcggttggtgg

SEQ ID NO: 328129 - DNA, 368 bp, Zea mays
caagaaaactagaaaaggctcctcccgaccgcaacgcccctcatctccctcgaccccgggatccccgacccgatggcgcccaaggcggagaagaagccagcggagaagaagccggcggccgaggagaaggcggagaagacgaccgcagggaagaagcccaaggccgagaagcggctgcccgcgtccaagtcctccggcaaggagggcggcgagaagaaggggaagaagaaggccaagaagagcgtggagacctacaagatctacatcttcaaggtgctgaagcaggtgcaccccgacatcggcatatcctccaaggccatgtccatcatgaactccttcatcaacgacatctttgagaagctggccgg

SEQ ID NO: 328130 - DNA, 320 bp, Zea mays
  unsure (1)..(320): unsure at all n locations
ngcgccggngcggcggagggagaagagnggcggcggcgggccggcggcgagnacaggcgagggcccgagcagaggccccggcaaacgcgcagcgcacacaaacacacaccagcccagcaccgagagaacagccggcggccggcgagaagagccgcggcacgggcgcggggaaggaccggcacaacaccaggancgcccccgagggacgccngnaccaaggcgaggacgcgnncaaggcggagaagacagccggaggcacggcgaacggcgnccgcggcgcggacaccgacagcggcgacacccagaagaaagccccggac

SEQ ID NO: 328131 - DNA, 179 bp, Zea mays
  unsure (1)..(179): unsure at all n locations
gcaagaagaacgacgncgcccgcggcacngcacaacggcncagncgaggcacccaangcggaccggcaccagngagaagaggcggcaaanangggccggcnccggcacggcccgggggggacnacgagcacaggcgcancgngannaacaagcncggcgggagggcgccagcaagcaac

SEQ ID NO: 328132 - DNA, 370 bp, Zea mays
  unsure (1)..(370): unsure at all n locations
agcgccccgnagngcagngcagngcagcagngngcnaccnccncagnccncncacaccaggacaagcgccagncagccgcaaaagcgcggagcgaggcncagaagcgaaggcgnccaagaggcngcagcnggcggcgcagngcgaggaggcggcggcgcggcgcgccgagcggacggaggcccacggccnggaggacggcgcaagcagcgacgcgacgccggagaagcagaccnncnacaagcccgaggccgcggcgcacccggaggcccaggacgcngagcacaagcccgccgnncaccaggccgcgaagccggaagccacggcgagcccgaccaccaccaccggcaccacggcggcggcggcgggcac

SEQ ID NO: 328133 - DNA, 303 bp, Zea mays
  unsure (1)..(303): unsure at all n locations
ccggccggaanccggggcgcccagcgccgaaagncaaanggacacagagaagaagaacacaggaacgagcnncgcccgggaccgagacccgggcgagcaangaggcnaaacacgggacgggggacggcaagcccgggagggcgaggagggancnaaagcaangccaancgggggagaaccagcgagccagcagcagcagccacgcanncacgccaacaaggcaagggaagggaagnccgaacgggcagaggggaccaggaaaccgaaaaaaaaaaaaagaaaaaaaaaaaaggaaaaaaacaa

SEQ ID NO: 328134 - DNA, 300 bp, Zea mays
  unsure (1)..(300): unsure at all n locations
ccggccnccccgaaanaagcggaaagggcaacccggnccacgggacggagcccccaaaccgaacccncccgagcacgcccggcgaaggggancacgagcaggccggagccgcgggacagccngcnggggnaccaggagaacaacgcggaggngncgaacgcggcgccggcggggcaggngcgggcggcgcaggagaaccgggaccagcaggccgcgcagcagcccgggggcgcgggagcgggcgcggacgacgacggcggggaccggcacgcggcgacgggccccggcccgggcccgggc

SEQ ID NO: 328135 - DNA, 277 bp, Zea mays
aaaaaaaaaaaaaaaaaaaaaaaaatttaattaaaaaaaaaaaaaaaaaaaaaaaaaaaaggaaaaaaaaaaaaaatagaaaaaaaaaaaaaaaaaaaaaaaaaaaaaaaaaaaaaaaaaaaaaaaaaaaaaaaaaaaaaataataaaaaaaaaaaaaaaaaaatataataaaaaaaaggggggactttttaaaagttccaagtttatacttcccttattttgaaaaatttatttttttttttgggtcaaaaaaaatttttttaactgcctgttttt

SEQ ID NO: 328136 - DNA, 371 bp, Zea mays
cccacgcgtacgagtcaagttaccgtttcaaaggatgtttcttctagggaagcttcaaaggacgtcacatggatgggagcttcatggaaatgccaacgaagtctgaagcactacaaatctttctgccgtacaggaattactatctcggtgcatagctttgtatacattatgggtgaagagatgaacagacttattgcttatgtggaagatctctatgaggatacaaattcctgcaacatggtcaaggtacaatggtttggcaaagctgatgaagttggtgttctgttgcccatggattttgatgacagggagattttcttttctctgggacggcaagatctcaatgtaatatgtattgacggattggctgc

SEQ ID NO: 328137 - DNA, 373 bp, Zea mays
gagaggggaaggtcagcgtcaccagcaaccccgtcaggacctcgacctcaccgtcggcgacttctaggaggatgagatcgaccccgagctgcgctagtccttacagcgaaacagcagggtcctcgccatttcgggggattgttaccctgtccctggaacacgctgaacacgaagcagctgccagaggcggagccccctgcgaacaacgagctgctcacgacgaagcacgcgagagggggcggcgcgtagggagcccccacactggcaactcatccttggcttatgcgaattggcggacacccactggtttgggtgatgctgtcggtctgcgccagatgccctccactgtcgtcgatgtcagatcactgcctat

SEQ ID NO: 328138 - DNA, 356 bp, Zea mays
ctcattattattgcgaaacttgaatagaaaagttttgacctgtcttacgaagcatttatagttattattgaaaaaaaaaaaaaaaaaaaaaaaataaaaaaaaaaaaaaaaaaaaaaaaaaaaaaaaaaataaaaaaaaaaaaaaaaaatgaacataaaacacaaaaaaaggggaaccttctaaaagatgcaaagctccgatgcgaacaatgagatgctaacgatgaagcacacgagaacgtacatgaaagtaaggagcccccatactagaaactcatacttgggaaaaccgaattggcacccaactaaagcctttggcgataaattccctttttaccagatgccctaaaatggaa

SEQ ID NO: 328139 - DNA, 131 bp, Zea mays
cccacgcgtccgcccacgcgtccgcccactcgttctcccacgcgtccgcttgcagttatggaaccttgttatattgtatcctgcaatttgttttttgcaacttataagagtaattttatttgatgagtctt

SEQ ID NO: 328140 - DNA, 379 bp, Zea mays
gcctgcaggggcgaggcggcgttctgcagtctggagtgcatggagcggcacatgacgcaggaggagtggaaggacaagtgcgcggtgacgtcgatcaaggacgctgccgcgggctcggccaaggtcaagggccgccgtgccggcttcggcaaggctgggggcacggtggccgcagcatgacgacgatgctgatttgctgaacctacacctagctacctagctaccaccagcttctcctcaactagccagctgcaagctccgattattcacccgtgcaaccatctatatactaaccatgcatcatatatgatatatccccagctagctcaatcgattattaattatttgttatccggatccatcgctcatcgctgcatgc

SEQ ID NO: 328141 - DNA, 196 bp, Zea mays
acaatggtgcatgctaaggatgctccatcaaccgaaccactgctaggaaggaagcatccgtagcgctaggattacgattagccctgtatctttgatattgctcctgataatcattaccaatgtgaaatggattatattttgaaaataccatcttgatgatgaatgacaaccaaaaatgattgagaacaggcgtgga

SEQ ID NO: 328142 - DNA, 337 bp, Zea mays
attgccgtctcccttttgcgtgagcaaagaaagagagcgagaagagcagtcgccatgtgtggcatcatccacaagatcgaggagaagctccacatggggggcgaccacaagaaggaggatgagcaccacaagaaggccgaggagcaccacaagaaggaggagggggagcaccacaagaaggacggcggggagcataaggaaggcatcgtggagaagatcaaggacaagatcaccggcgagcacggcgacaagtccggcgaccacaaggaaaagaaggacaagaaaaagaagaaggagaagaagaagcacggccagggccacgaccacgaccacgacg

SEQ ID NO: 328143 - DNA, 253 bp, Zea mays
tttggcggatgaagtgccacgccatatgatggattggcttcattggtcaagaaaggttggcagaaaccaggaccaccacgcccgaaccgtgctggacaaaatcatgccgccagaagttgtagggagaagcttggtgaagtccatgagataggaatttggtgagatcacatagcagattgccagaaaagtgctctatgaaatattggtagaagcactgggtgggttcgggatattggctccgcggccacaaatg

SEQ ID NO: 328144 - DNA, 361 bp, Zea mays
cagagacctgcttgaagggcatgcagctgttgcttctgatgcgcgccacagcttgttggagcggatcaacacctccactgagttggcccacatatcgagaagcatgagctcgatcttggaggctgatggccaaggaagtctgcgcggacatgccctgtggctcactgcagatatgacgagcaacggcagcggaatggacgttggtaaattctgccaagacgatgtttcaagatgtccttataaaacagtgaacctacaggatctgcagaacaccttgattgcatctaaagagcttgtaaaagcacttgcccacatatcgggacctgcagaaccgaattcgtctagcgtatcactcatttct

SEQ ID NO: 328145 - DNA, 285 bp, Zea mays
gcagatgagcaggtcgtccgcagtcgttgccggatgaggcgcagtggttgtggctgcataatgctccaaattccaaaggaaagaagggctcagtgagcaaactgggtgatcatgcatttgttggcatgcagtttgtatgaagagaattggaagtctgaaacgcgtagattagacggtagcaccaagccgctctagaaacattggctgattgtcagacttacactgctggttctgtttctgaaattcaaatgccacttcttaaattccattatatcctggtgggag

SEQ ID NO: 328146 - DNA, 249 bp, Zea mays
gctgcacgccaccgtcgagcgcgcacccacggcatgggcgcagccgatatctgcagcacgatggctctactggaagcaccgctagttggatgcagaagttgccgcaaggaaagctggagcatctgcgaagcgagctgattatatcgctttagcagcgggtcacatgaacggtcgcgagctgttccaaacatgaccctgagtgttcgacaacagcttttactgagatcgtgtactgctactgaatctgca

SEQ ID NO: 328147 - DNA, 59 bp, Zea mays
gtcctgtttttcttttagggttcgctgcagatttaaggtacacattacttgatctacag

SEQ ID NO: 328148 - DNA, 214 bp, Zea mays
actaactgttgcatcttctgactccccttctcgcatagagccgaggttatctagcttcagagcacggacaccaccaaataaatccatatctcgcagaacatgcttgcactagacatcagtcaactcttactaccagagaatcaaatcataaccctgtctaagctccaaagctaccacaaactcaacatctcactatccttgagactatccatct

SEQ ID NO: 328149 - DNA, 377 bp, Zea mays
cggacgcgtgggaaaaatatgataatagttataaaaaaaagataactataaaaacgaggggtataaaaaaaaaatacaaaacgcaatatactgaagcacttattacccctaacacagagatcaagtggaaggaccgacattcccgtgacttcaatgaaagtctgtgatgaagttctggtgaggaaacagggcgccaaccgtcacactgggatagagattcaggagtttattgttgagagatgaatatggaaactctgaatgcaccagttttcacgtcattgcgaacatactaatgatgtttgattgcaacatacatctgttctgttggttaagattgtgagattccattgcagcgtaatatcgtttgggcccctttt

SEQ ID NO: 328150 - DNA, 342 bp, Zea mays
tcgcccacgcgttcggttattgctgggctatccactttttactgctatgcaagagctggcagcgggggtgctattagagattgtatcaccgttgtttgttcatcacacaactcacagctgttaaccaccacacatgtatccaaagtaaaggcatttgaacgctgaagtgcaacacgcaccctaaccatgcacgatcgacctgtagacgacggcaccgactccgtcatccatgctacattcaccgatcaccctcaggacgactcgcctgagcccaatgtcaactgcagctcaaccttgacccgaacttggcattttgctggaaccattccacttggctggaac

SEQ ID NO: 328151 - DNA, 82 bp, Zea mays
  unsure (1)..(82): unsure at all n locations
gcgggagccacgcgtgggcccacgggtgctagatcgcgagcggtcttcccagnaaccaggcagacgaggacggaaggaaaaa

SEQ ID NO: 328152 - DNA, 231 bp, Zea mays
gctgaatgctcagaagatcactcacaagttagtgaaacgaagataccagatgctggtcgtatgggagtaatatgtgcacacactcatggcaagctctattatgacgaattactgagcctgcgctctaatcaatcgaccgcaagacgctcagcctatgatgactcccttgcggcttgaccttacatatacctacagcccaatggacattcacgagggttgccactactctta

SEQ ID NO: 328153 - DNA, 231 bp, Zea mays
tctagatcgcgagggccagcctttttttttactttaatctaacctcaactcctgaaccgagcagcctgtttttttgaacgaagaataacatggggatatattacgaccttttcatttgcaatacagtttacaattggacacacccctgcaaacacacacctttttcaaccaatggatttggcaccagaggggcccctagaccctctaaaaaacagggaggatcatggtttt

SEQ ID NO: 328154 - DNA, 213 bp, Zea mays
aaaaaaaaaaaaaaaaatcaaaaaatcattttttaaactacacaaaacttacttcggagaggctaattactaacaatggtaaaagaaaacaactactatcaaagggataaggtcaaagaatcattactgaactatttcaagagaagcacttctggaaaacacattgaattacttgattggacttttaaaaaaaggcttcccggttgatcaaac

SEQ ID NO: 328155 - DNA, 115 bp, Zea mays
  unsure (1)..(115): unsure at all n locations
tcgcccacgcgtccgcggacgcgtgggccacaaggtcagtttgagcattggtttcaaaggtcattaaatatttatcctgagtgaaaattttcacaccagaagagtnatattcttt

SEQ ID NO: 328156 - DNA, 84 bp, Zea mays
cgtacacaacccttagctacgctccagtgtctttaccggccggctgccctgatgccgagcacggcgtttgcagtggtggagctt

SEQ ID NO: 328157 - DNA, 378 bp, Zea mays
atttgatatccatcaataaaatcgataaattatattatggtgcaccttatcttttattttactagaacacagtgcaacttctatatattcttatttgtaacttggatatgctgcaaaaataataaatattactagatccttgcaaagagaaggagaaataataaaatctagaaaagaataatacaagggagctttgaaatgaaatattatctatatacaaaccttctatggattgaaaagaccgtttaatctggtactggatttcattatatttgattcagctcctcagtgcaggtatgtactgacttcagtatcatgtttattttatgttctgaagtacaaatgcctttgtagggccataaatactttgcttttact

SEQ ID NO: 328158 - DNA, 387 bp, Zea mays
caccgactgagcagtgggtgggggatatttagcggttcttgatcctgcaagaaagggggccatggcgcgagcggctagcatgccagcggcaactgcggtcgggatcgtggtcgtgatgcttctggccgtcggcttccccctcgcggaaggtaaatcgtgcacgaacgcgttgcctggattgacctcacacacggagcgcgctgaggctcatttgcaggcagcggcgccggctacggtgctccagcccatgattcaccgacaccgacatggtcacgagcaggaccttaccccgacggacgaatacacctggatgtagctcatgccacacccggcgcttcagttcgaggaggcgttcgactggcttatgctctaccgtgagctacgggg

SEQ ID NO: 328159 - DNA, 227 bp, Zea mays
ggatacccgggccgacccactcgttcggactgactgagcagtgtttgggggatatttatcgggtcttgatcctgcaagaaaggggggccatgttcgagcggcaagcatgccaacggccactgcggtccggatcgtggtcctgatgcttcttgccgcccgctttccgctcacagaaggtaaatcgtgcacgaacgcgtatccggggattgaccttgcacacggagcgc

SEQ ID NO: 328160 - DNA, 337 bp, Zea mays
acgcgtacgcttgaccacagacacgagcgaattgagtctatgcgcaactgtgccgtgcagccatggcgactagggtacggctcaccaccctactcctacacttactacttgttggcacccacttcaccagccgagtagctaaaactgattcctaggaaaatgctgatgcagctgaagttggtgaatgcgctgatctaggtattgaggctgatgatacacagagttccagcgacggacctttaagccctgctactggcgtacagacagtagtatgattccccaaacatgctggcaaaatagcactagcacgtgaagaaactgaattactagttggtct

SEQ ID NO: 328161 - DNA, 296 bp, Zea mays
ctccaccagggaggctactgcggtggcattgtggcctggggtagaggagctgttgcagcggttgcgctacttcaacctgactgtggcaatctgctatgcaaagggcatgccaactaatgaggtgctctactcatctacattattattacatgcctctaaaggtgtatcttcagaagttcacatcgaccgtatttgcttactctagccatacttacccatcatggtccatggggcgtgtatattatcatgccatcttcaaagaatggcatcaatgctacaaaaatgaatgagaaatc

SEQ ID NO: 328162 - DNA, 239 bp, Zea mays
ctcacgcgtccgggcacgcgtgcttgttttgataacgcttatccatgatcatgcgtcacatgtgctctactatgagccatgactggttagcagctacatagagtatatacatactagtgacgtcatttagtgagcgacgtgatgattacagtcgtattatgctataaatccactatatcaccatggcaggatgagtgtgctaatgtataactacccatcatgggccagtcggtatatat

SEQ ID NO: 328163 - DNA, 286 bp, Zea mays
attatgtgcttaattgccaatcactatgcttcgactacggctgcttggaatccctaggctttctccgtccaagcctatgaggtgctccagctggacaaaccctagacgcctacggcgtcatggcgagcagtaacgactcacaacgacacatttcacgtatcgacgacgtcatctacaaagttcgagaggattgaatcacctacggaatctggaacgccaggctaaacgaggtccaagctcattgggagatgaaaaaggctcaatgtggcccaaacattgggaacat

SEQ ID NO: 328164 - DNA, 396 bp, Zea mays
gtctcgattcccgatcgaccacgcgtccgggacgcgtggctcgacatgattaaccgtttattcttccaactgacggatcagaaatgggtcgacacgtacgccaacatcatcgatctcaatcaggatgttaactgaatacggcaccagatcgagagcgagctgtagctacaagatctccagagaatagaggacatgccatcgacacatgttaaccgtatgatagcaatggaccctgatggtggtacccgacatcgacacaagatactgcaggtacatacacttcaacaagaagcatgcaggctagaaccacgtacacagcgcgcatggtgaatacatgttcatggactgatgatgtcatgttgatttcaattgcgctgaaaacgttacctactacga

SEQ ID NO: 328165 - DNA, 328 bp, Zea mays
cccacgcgtccggttccctgataccgactaggtacctttggaactgaaagtaggcagagtgatcttattcatgaacggtatctgctgttgatgaatgtcaagcttcattgtaaatgtcattgatgatcacaacagtggactatttgacccgtcgctagatgggctgtcaggtagtctcatacgcaacgcggtgagatcacttggatccgttagaagaccgccgagcacacaatgaccgtcatcacacagacccattaacggatcatgtagatctaatgtcgacagaccacacagacacatcatcgttagctcttataattataggaat

SEQ ID NO: 328166 - DNA, 353 bp, Zea mays
cccacgcgttcgcccacgcgtccggacatggccttaccaacctttccacaaggttcatccggtttacctccttagtaagggtcaatggcaaggagacatctaatggcaatctttctactaagaactcgtcgagaaagacatcttgcacagccgaggagaaaccacaatgcaatgggagcttaaatggtggtggcggctctgccgatgagaagtcaactgtaggtatggagcaacacaatggtgttcagaagaatgttggcagtagcaaggtccagccacatggacatgcaactgaatagagtgggacttatagtacatagacaacagaaaactgaagagacgaggagttgaat

SEQ ID NO: 328167 - DNA, 318 bp, Zea mays
cccacgcgtccgcccacgcgtccgcccactcgttcgaccacgcgtacgcccacgcgtgcgctcttattcacctcactaacaccagctagcaactctttctctactgcaataatggccgctcgctcctcctactcccagccgcagctggtcgcggcggcggcggtcctggcagcggcgctgctgctgctggcggcggcggccgggacggcgtcggcggcggtgagctgccgcgaggtgacgtcgtcggtggcgccgtgcctcgggtacgcgatgggcagcgcggcgtcgccctccgcggcgtgctgcagcgaggtgcgc

SEQ ID NO: 328168 - DNA, 285 bp, Zea mays
  unsure (1)..(285): unsure at all n locations
gcagcagctatgtaccatggacccagatttagctggngagctgcgcgtgatgaaccatgagctgcagcatcaaacgattgattggagcagcaactgttctgcaacatggaccttgacttatcaagtgaagcctttgtgatgaaccatgaacttttgagaaaactatgtatggagcatcagcatatgtatacttgtgtgcctccaaaggtagaaccctacggcagaagaatgtcgtgtttgttactgagataaagcttcattaaccgtagattcgacagaatagct

SEQ ID NO: 328169 - DNA, 365 bp, Zea mays
tcgcccacgcgttcgcccacgcgtccgggcttctcctccccctccggttcgggttcgggttcgtgaggttctccggggttcggtttcgtgggtgagcggatcgagatggcggcgtcagatgttgagtaccgctgcttcgtcggcggcctcgcctgggccacggacgaccactccctacacaacgccttcagcacctacggcgaggtcctcgagtccaagatcatcctcgatcgggagacgcagaggtcccgcggcttcggcttcgtcaccttctccacggaggaggcgatgcggaacgccatcgagggcatgaacggcaaggagctggacggccgcaacatcaccgtcaacgaggcccaatcccg

SEQ ID NO: 328170 - DNA, 363 bp, Zea mays
cccacgcgtccggttggcttctcctccctctccggttcgggttcgggttcgtgaggttctccggggttcggtttcgtgggtgagcggatcgagatggcggcgtcggatgttgagtaccgctgcttcgtcggcggcctcgcctgggccacggacgaccactccctccacaacgccttcagcacctacggcgaggtcctcgagtccaagatcatcctcgatcgggagacgcagaggtcccgcggcttcggcttcgtcaccttctccacggaggaggcgatgcggaacgccatcgaaggcatgaacggcaaggagctggacggtcgcaacatcaccgtcaacgaggcccagtcccgcggcggccgt

SEQ ID NO: 328171 - DNA, 370 bp, Zea mays
  unsure (1)..(370): unsure at all n locations
tgatattgcaaccacactaagaagggatatcacaaatacaatcctcacagatctaattaaaccagaaatagatcttcagaacttcttcaacaattatgataagtttttggaggagaaacgcctagctgaacaacatgctgactaccttggggctcaaataacgcacagggtagcaccactgcatctgctttggcaagctgccaattcatatactccaacactttttgagatgttcagaatggaatatgaacagatctcaaagtgtgtggtctatagttgtggtgagattggaccaatatctgagtaccaggtcactgtcaaagacaggcctcanggtcaatttgttagatttgactcaacagaatgtatg

SEQ ID NO: 328172 - DNA, 487 bp, Zea mays
  unsure (1)..(487): unsure at all n locations
ggtctcggaattctccgggntcgactccacgtctgtctcgtatcatttcatgactccaactccagtcaagttgtttcgtaccatcgactatgtctatgcgaagggatggacgagtatggttcgtacgctggagaattgactctgcaagccgattgatcaagtgcagtctacatgcgtttgggcgactcctgatctagctcgcggacatgcagatcggcaaagtggcttcaggtccccagataatggcgctggcanagtgacaagtcgccgtcaaatgtcgtctggtggcaaaggtcaaagcaggaaggtcttctctgagggcttgcagaaccgtggaaatcgggnggagggtggaacctggaagctggaagtaggatacccactcaagtcagtagaagtttaaaatccaacctgtagggctaatatgtgattgcatgttatcatggtgttgcgacacaaagtccctgatgcctcttgatcatctttc

SEQ ID NO: 328173 - DNA, 121 bp, Zea mays
cccacgcgtccaatactcatgcacttattactaaacaacgcacacaaaaaaaccggtggatcaacttcataaccgaggacatgatacccaatacaccaaaagaaatccaggagactcatac

SEQ ID NO: 328174 - DNA, 333 bp, Zea mays
cccacgcgtccgcgactcatgcatagaatactaaaaaacgcacaaaaaaaactcaggaggggaaattaaaaaaaccacataaaacaaaaaaaaaaacaaataaaaataaaaagaaccaacaaaaaaaaaccaattgctctaagcaaaataaatgctatgcacccatatatttcatccagctagcttgcacatatggtaatctaaattgtctactgagaccgttctcctgaccaacctagcctagacaaaacttattgtcacccaaccgacaaacttggactgcaattccccttgtagcacttgctgaattacttaccagacaacaccctatgg

SEQ ID NO: 328175 - DNA, 258 bp, Zea mays
ggtcatacagtatagagccggtggcagattaattcctgtctgctgtgggtaaagcttatcttctgctttcgtgttttttcttgcttctttcgattatggtgtatgtcataatgtattagctgattatactgtccctgctcatcggactttattacgcttcattaagttaggctgattactgcttaacgggcgaaaaaagccctgaccaacacaagctaacaggcccaatcccgacatcagtagcacaactggggcact

SEQ ID NO: 328176 - DNA, 269 bp, Zea mays
ccactccccatttctcagcgtgcgcgctctttctctctcctttgtggtaactggcggcggccgacgccgacgccctagctcacgtcttcgtcggtcccttcccagtcttcgtcgggtacttcgacgactacgagaacaaacgaggaattcaaggatacactcgctggactgaagaatagagaaacatgtctgatggaggtgcgaaagatttttaccgggcgaaaaagaaaggaggcctggagaaaacaggttgatactgacagaacaag

SEQ ID NO: 328177 - DNA, 426 bp, Zea mays
gtaaggccaaagcatatgttactagatatggaaattagacatacagaaactggcatattcacctttgataagactattgacttggctcatcctgccaattttgttgcacaagatggaaggctagaaagtatagcatacgatgtttcgaataatcatgcacataggacagactataaaaacgaatcttctgttggactcccagaaactgttgtgactcagagctcacttattgacttcactgacaattgttttgaagacaaaagggcttcaattgataaattgttacctaccaataatctagactggccattgaaggataagctcaattctacaacagactatgacatttgtaggcctattaatgatgatgaacgatcagacgacgaatcagtgcctaacatcagttataccagtcgtgtagtgata

SEQ ID NO: 328178 - DNA, 169 bp, Zea mays
ctgtcctgtcgctccctccaccacacacttttactgaacacgcgcgcgcgcacgccattacgctgccgtagcgtgcggtgtgccgtcaattcaaaccaccaatagcaatgcctgcgacgtccgcaaactgcgccaccgccggcgtcgccgtcgcgagggacgacatgtt

SEQ ID NO: 328179 - DNA, 453 bp, Zea mays
tcggccacgcgtacggaaactccgagcccaagtctgataggaggacccctctggttaccacattcaatttaagttcctggaaagcaaatatattaaattttggaggaagaacctaaggaccgaactggatccttgcctacccgaggaattaaatcgagcgactagaatctaggtccaaaaaaatctaggccctaaacctagccgcctagaaccggctaatcgagcgactaatcggccctaatcgtcgactagtcggacgaccagggcgaccaggtactctagtcaagtcggctgcctaatcgagctctgctaaccgactagcccgactaatcgagactaatcgcgattagtcggacgacttgaaaacacagtttagctcttaaagaggagctaaactttagtctgtttctttagctcttggatccaaacagacccttagaatacaagtgaatc

SEQ ID NO: 328180 - DNA, 448 bp, Zea mays
gcaagataccctttcatatggaattctgttcaagcattgcaaatccttgtgtatcctccatttagttggatccaaagatgggcaccactcaaatttcttgtgcagggaattcaggttattcaatttctcatctctccacaacgcatgctatttcgttccttgacataggggaaagacagaaactatccatgccactgttgtttttgtcagtcacaacaacagtaagtgagctgtcctccaagcgtgatgatgaaccagataacaatacagaacattctgaaacaaatgaattggcatcaacttctggcacaagtgatgctgctgatggcacaaaggaaatcgtacaagagaactggcttgtgttacttttcagggagcttgagaagcaaggcatcactttacccgagaggtttactgaagatgaattacgcagattttatgttgctgc

SEQ ID NO: 328181 - DNA, 59 bp, Zea mays
aaaaaaaataaaaaaaaaaagaaaaatagataataaaaaaaaaaaaaaaaaaaatggaa

SEQ ID NO: 328182 - DNA, 134 bp, Zea mays
cccacgcgtccgtgaaagatcagcagcaatgtcaagcactcgcctccatgaaataagttgtctgaccaaagaacgtatttgcattatgtattgtgccagtgcagcgggtgtattaaaaaaatgtgcattttaat

SEQ ID NO: 328183 - DNA, 348 bp, Zea mays
cggacgcgtgggaaaaaaaaaaaaaaaaaataaaaaaaaaaaaaaaaaaaaaaaagaaaagggatataaaaaaactcaaaattaaaaaaaaaaaaatacaaaaaataaaaatataaataaaaataacaaaaaaaaaggtttaccgttttacagtttccaagtttacgactggaaaaacccaggtgttacctattttattgggcacccaaaaaaaaatccttttgccagttttttaaaaaactcaaaagggcaaaacctttggcttttccaaataattcgctattctgaatattcatttttaccccccttttaaagtaccataaaagccccaagcaatggcttttccaa

SEQ ID NO: 328184 - DNA, 280 bp, Zea mays
ttcccgctcgaccacgcgtccgtttttcgtccactttattactgatcgcatgcatctgagcacggctgctaccagaaagggcaggttcgatcggtctagtgtgaactcggctttgaataactagtctgtggacaagggctagttcggtgatgtgtatggaacggtcgtcactgagtcatgcacgatttggtatccacgtgattatggtcgacggtttgaggaactctctgatccatcatgacacaaagttgatgctgcgcgaacgaccggatatcattct

SEQ ID NO: 328185 - DNA, 326 bp, Zea mays
aaagaacttgggcccgcctctcgtctcttaccgcacatgcgcgtcggaccgcgtctacatagctgcttgccgtcgacacccgcagccgcaatggccgtcgcccacgcgccgacgagccagggcgtgctaccgctcctgctcgtcgccgcgctcgtggcggcgttgtcggccagctgcgccgcgggcaggagctagaagctgtacacggccatgttgagcttcagagactcgctctgcgacgccggctacctcatcgggaacggcacgcccaaggcgcttaccagcgcgcgcgctacctacgggatgaccttgttacgaagcccacc

SEQ ID NO: 328186 - DNA, 336 bp, Zea mays
aaaaaaaaaaaaaaaaaaaaaaaaaaaaaaaaaaaaaaaaaaaaaaaaaaaaaaagaaaaggaaagaaaaacgaatttgaagtcacctagattccgtacacttgcatacgaggtcatggcttttgtgttgggaaacctgaacgcaattgaataggccgcttgtttacaacaaccggggtgtcaaaagttatactgtgcgcaatgcatgttccatggctgacatatggattcacaacgaagtcgcccataccaaagcgccctgagcccaatctccattgccttcattagctctgcccgcatggtgcatggcccatggccgattccggcgctttctgc

SEQ ID NO: 328187 - DNA, 272 bp, Zea mays
cattattgccgtctcccttttgcgtgagcaaagaaagagagcgagaagagcagtcgccatgtctggcatcatccacatgatcgaggagaagctccacatggggggcgaccacaagaaggaggatgagcaccacaagaaggccgaggagcaccacaagaaggaggagggggagcaccacaagaaggacggcggggagcataaggaaggcatcgtggagaagatcaaggacaagatcaccggcgagcacggcgacaagtccggcgaccacaagg

SEQ ID NO: 328188 - DNA, 330 bp, Zea mays
cccacgcgtccggcatcgaaacatggtagataaataaaggacttgacgatttgtaacgcagtagctggtgcgtgcgtggtgtggtggtaagaaattcttctgctgcctgtgttcttgtagcctcctcgtcctcgcccaccctgttggtacgtgtacggtgtacgtagtctgccgccgcgcgctgttcgtgttcgtcgtgtctcgtgtctgtattatactcgtcctccccatcaaaaaaaaagttgttccatgtacgtgtgcactgtcgagtgatgtttggctggacgtgatcgtgattactcctggaaactatccggcgcgtgcagatcg

SEQ ID NO: 328189 - DNA, 145 bp, Zea mays
cagtgacacgcacggctacttttgcggacttccatacgtctgacccgcgggggccacttccaaccttgccgtgacccgaatggccccagatggaaacttggcagcaacttccagcttgcctgaaaggctgatagtgcatatacgc

SEQ ID NO: 328190 - DNA, 363 bp, Zea mays
  unsure (1)..(363): unsure at all n locations
cggacgcgtgggtccgctagggtttctcccaaaatcgccgccgcagccgccgccgccatcagccatggccgctgacacttcgaagcccttcttccccgcggcgccgcactcggctctccgcccctccaggagcgccgnctcgcgcgcgttccctgagagctcctactggcgcgccttccgctcctcggagctcttgtccgacgccggcttccccgtcaccgatctcaccttcgcctcctctgtggaagacagagctgcccctaccctcgccgcttcctggtccacctacgtgcacgtcttcttcttcgaccccctcgagaagctccgtaggatctctgtcgcgggcgatctagccttcttccc

SEQ ID NO: 328191 - DNA, 448 bp, Zea mays
  unsure (1)..(448): unsure at all n locations
ctcgcatactccccacgccgccgccgctcgacggagccaggctcgcagccgctccgccgcaaggtgtcagcacccatcgtggtcaactctatcttcgtctccccatgcgtgctcgccagatccccctctgtctccagtccaccaccgtggtcgggcccgctcgcctcctccgtcgacctcatccgctggctcccttcctcctcgtcgtcgccgtcatcagccacggccccacctccggccccttcgtctctcacatcctcctccccttctccgaccccgtcttccggctcgcctccgtcccgctcccgttcgtgagcgagagggcaacttatgtgttatttcaggcagtgtaaatttgtcagttccgatgtgggaaaagaatttttcaacggatgctngtgctatcccctgggctaaactgtgtgagaccaaaggattgatgtctctg

SEQ ID NO: 328192 - DNA, 448 bp, Zea mays
cagctcgccaagtcccacgcaaccgtgctgctccctcgtcgtcgtccgttcctactttgccccgtcctatgccgcctcgctttgatgtgtgtcgtcatctttaatcccagtaactcttccgatacgcgtcttgtcatgtttcacctcgtggtcagccccatctgggtcatgggggcggaagatctcaacactgcttcatatggctgttttagatgttgtttgcggggtagagaaagttattgtgataaatgattttcgccctctcatcacattcgcaatcctcgtcaatcatcgctggtttgagagaaattaccataagatatggagaagaaagtgaagccgcaccacaccgtcaggtgttcaacgacatgctcgagccaggatttatcagcattcttgtgagtagtgagtcatgtttgatgctgggtagttgaatttatttttctta

SEQ ID NO: 328193 - DNA, 122 bp, Zea mays
tcgtaggtagaccacgtgctcgcaaccttgtttttctctaggtccgagtcctgctgggatggcgacccacatgactgatacttctgctccgtttgtggatgcttaatcacaggagctcttct

SEQ ID NO: 328194 - DNA, 319 bp, Zea mays
gttctagatcgcgagcggccgcccttttttttttttttttttttttttttttttttttgttttttttttttttttttttttttttttttttttttttttttttttttttttttttttttttttttttttttttaaacccccccaaaaaaaatcgggggaaaaaaaaaaaggcgtttgttgttacactgggcaaaaacccggagctttattcttcaccatgtaggggttaacctggcccggttaaaggctttttttttaaatagggaaattactttggccaagcttcccccaagtttggggctttgtcgtcaatgggaaa

SEQ ID NO: 328195 - DNA, 129 bp, Zea mays
acgctgacgcgagtactgacacgtacaccggctttgatcccgcggccaaccgctggcgcacgcttctgcctagctgtgaccgcaacaccgacactgacagagaccggacagatttctgggcccataggc

SEQ ID NO: 328196 - DNA, 382 bp, Zea mays
  unsure (1)..(382): unsure at all n locations
gttgtttatttacctatcaacttatttaagctggattatataatctagaaggtaagcaaacatggccttggagtgcagaatttcccagcatcatcatgcaaatgattttatcttacatattgatactagtagtaaatatttttggagtcgactattctgtcgctaattctggtacttcacaactaaaccatatatatctctgtcttggatttcagaaaagtccacaagtatggaaagagcacaaccggcgagaggtgggacttggtagtcgacgaggagacatactacgaggcggagccccattacggatgggccgatgtcgtcggagactcgacgcagctgctgtccatacagccccgtgagaggccaccncgcgtgttcc

SEQ ID NO: 328197 - DNA, 282 bp, Zea mays
aaacaagatgtgctttgcatacacatctctagttatccatattagattgaatgcggaccatgtgtgctgaaaaatctagcttgcacggagcggtgatcataaacgatatcgtgcatccctacctcgacatcgtccttgtcatggaactagacattggcatgctgacacatatcaatatgcactgcacacatgactgtgttgatcctgattgggaccaaaaacatgtgcccgttcaaccaggaagtatctattatgcaggcactgcaagtgacccatccaacc

SEQ ID NO: 328198 - DNA, 344 bp, Zea mays
attagatatagggaaacagtcatgattgttcatctactaaattgtaaacatatcattataccattcgttaatagtgttctatgatgaagctgcactgttctggatttcatgattggttttgtggctttgatattaatttcttctgattgcctcttttcactataatatattggagaagaaatgttctggatggtggacaaaaaggattattggccaatagaatttttgggcttttcggttgaagatccaattggacatttgggtttcaccccagaaatttaatcctggtttatacttaaccacttgggcattttcactttggttattcattcgatgtaacatgc

SEQ ID NO: 328199 - DNA, 135 bp, Zea mays
cccacgcgtccgcccacgcgtcctaaaaaaaataaaaaaaaaaaaaaaaaaaaggaaaggtaaaattaaaaaaaaaataaaaataaaaaaaatttttaatttaaaaaaatatataaaaaaaaagggctgccattt

SEQ ID NO: 328200 - DNA, 295 bp, Zea mays
tccacgcgttcgaccacgcgtccgtccacgcgtccgaaaaaaaaaaaaaaaaagagaaaggaaataaaaaaaaaaaaaaaaaaaaaaaaaaaaaaaaaaaaaaaaaaaaatatagaaaaaaaaaaaaaaattaaaaaaataaaaaaaaaaaataaggttaaaaaaaaaaaaaaaaataaaggggggggtctttaaagagatccaggttttttaaaatggttttcctatttcaaaaattttttattggggaccataatgcaaaataacgtgctcgtttttaaaaacagtgggtatt

SEQ ID NO: 328201 - DNA, 398 bp, Zea mays
agccttcgggctttacacttcttggcatcacataaaaccagtgcaagcagaagcagcgcaatggcgagcagcaccatggccctctcctccacagccttcgccggcaaggcagtgaacgtgccgtcgtctctcttcggcgaggcccgcgtgacgatgcgcaagacggcggcgaaggcaaagccggcggcgagctccggcagcccgtggtacggccccgaccgcgtgctctacctgggcccgctgtccggcgcgcccccgagctacctgacgggcgagttcccgggcgactacggctgggacaccgcggggctgtcggcggacccggagacgttcgccaagaaccgggagctggaggtcatccactcccgcttggccatgctgggcgcgttgggctgcgt

SEQ ID NO: 328202 - DNA, 70 bp, Zea mays
acgcccacgcgtccgaaaaaaaaaataaaaaaaaaaaaaaaaaaaaaaaaaaactagttctagatcgcga

SEQ ID NO: 328203 - DNA, 54 bp, Zea mays
agtacatgcccaaacgcctagttgtccataacgtactgcacggtcaagcacctc

SEQ ID NO: 328204 - DNA, 446 bp, Zea mays
gttggcttctcctccccctccggttcgggttcgggttcgtgaggttctccggggttcggtttcgtgggtgagcggatcgagatggcggcgtcggatgttgagtaccgctgcttcgtcggcggcctcgcctgggccacggacgaccactccctccacaacgccttcagcacctacggcgaggtcctcgagtccaagatcatcctcgatcgggagacgcagaggtcccgcggcttcggcttcgtcaccttctccacggaggaggcgatgcggaacgccatcgagggcatgaacggcaaggagctggacggccgcaacatcaccgtcaacgaggcccagtcccgcggcggccgtggaggcggcggcggcggcgggtacggtggtggccgtggaggcggcggctacggcggtggcgggcgccgtgatggcggcggcggctacggcggtgg

SEQ ID NO: 328205 - DNA, 432 bp, Zea mays
  unsure (1)..(432): unsure at all n locations
ccgtccgcgtgaccgccgtgggctnacgccaccanctcgagtaccctccatcttcccttctcaaggtaccgaaagttccgnaatctgttcgagtacctcngnntcgccgcccgtctggttttggccccccttttccacagccccgtcgcttgtctgtcagcagggtacctcnnccagagctcttcatnnctccatttcnncacggctcagggtgaatccaactggagttccatttcnncacgctgnngcctctattggcgttcgttctccttccaccagaaaaggatgcnnaccgccagaaattgggagtccccccagaacctggattgaccaagctcttgattgggccctcgccggaaaatgggagtccccccaaggcgccaactcaaccttaatcccttctcaacgagataagttgtcgacantcaatgg

SEQ ID NO: 328206 - DNA, 387 bp, Zea mays
cccacgcgtccgctccgctgggccaccagctttgaccgccgcctcccttcccctccgcgactgctcctcctcaccccactcccccgcaggagcggcggcggcggcggcgaggtcgtaccccacatcggcgagcggcggcggcaccgccggaggcaaaggcaagatgttcgggcgcgcgccgaagaagagcgacaacaccaagtactacgagatcctcggggtgcccaagtcggcgtcccaggacgatctcaagaaggcctaccgcaaggctgctatcaagaaccaccccgacaagggcggtgaccccgagaagttcaaggagctcgcacaagcctatgaggttttgagtgatccagagaaacgtgagatttatgatcagtatggtga

SEQ ID NO: 328207 - DNA, 68 bp, Zea mays
cccacgcgtccgaaaaaaaaaaaaaaaataaaaaaaaaaaaaaaaaaaaaaaaaaggagggacattct

SEQ ID NO: 328208 - DNA, 202 bp, Zea mays
cccacgcatacgaaaaaaaaaaaataaattttaaaaaaaaaaaaaaaaaaaaaaagaaagtgtaaattttaataataaataaataaatatattaaaataaaaaattattaattttttaaaatagatataaaataatatatttaaaaaaataaaattatatatataatatattttaaatatatattttaaaattaattttatt

SEQ ID NO: 328209 - DNA, 54 bp, Zea mays
cggacgcgtgggcacaagttgggttctgaatggcattgactgtgtttgctgatc

SEQ ID NO: 328210 - DNA, 110 bp, Zea mays
ccaaaaaaaaaaaaaaaaaaaaaaaaacataaaaaaaaaaatgaaacaaaaaaatgaagaggccagagaaaattataaaaaaaggaaaaaaataacatagagacagtgga

SEQ ID NO: 328211 - DNA, 106 bp, Zea mays
cccacgcgtccgcccacgcgtccgcccacgcgtccgcccacgcgtacgcccacgcgttgggggacgcgtgcgaggacgcgtattccgttgcggagaccgattcgtt

SEQ ID NO: 328212 - DNA, 202 bp, Zea mays
ctctctttctctctctattctttccatccccgcttctgggaagctcatcagccatggacgacgcctcgggagagggagaagcttcgatgttcgagaccagccatgtccttggcgccctgctggccttctcggcgatgctggcgtccggctgggaccggtgtacgaccggcacaagcgcggcgcccgggttcgtgcccggaaa

SEQ ID NO: 328213 - DNA, 94 bp, Zea mays
tcgacccacgcgtccgcccacgcgtccgaaaaaaaaaaaaaaaaaaaaaaaaaaaaaaggaaaatataaaaaataaaaaaaatataaaataaaa

SEQ ID NO: 328214 - DNA, 300 bp, Zea mays
acgaaatactcagatgttatattacatagcgtgtttaacctcatgacgtgcaccacaatctagtggccgctgtccgtatgcctagtgataagcaccgccacaacctagacgctaaggtgatagacagcacaatggacagcagtgtatgctacatctacgtgcagagctacctatattgccaatgcgttgtctgacggtgaacagctctttacctatactacatatgagctagtcatgcttacacaggttaccagagactgcatgccatgtactattggagagatacgtcaattttagggt

SEQ ID NO: 328215 - DNA, 188 bp, Zea mays
gaattcggcagacccacgcgttcggggtaatataacgcgacgcgttattttaaaactccgcagaacattgctacgcgagaccttatcgtcgccatgccttctaagggacagggctggtaccctatcaccaacgtgtggcacaggggttaacctgccatagatgaccactatgcccatggaccgaaggg

SEQ ID NO: 328216 - DNA, 190 bp, Zea mays
  unsure (1)..(190): unsure at all n locations
cccacgcgtccgcccacgcgtccgttcattctncgcgcacacacacaagacgggggggggttacacaaaagaaaggcagcgccaatatcaacaacaacacatccctcaccacatcagagatatgcaaagactaaccaaactataatactaacacacacgactaatgccatcacaaagacctaaccttaca

SEQ ID NO: 328217 - DNA, 418 bp, Zea mays
cccacgcgtgcgcccacgcgtccgttcctttcgttcgttgactgaaagaattacgcgttagattacacatatgtgagtcaacgccactagagagcacaacggccgcctaccaataggatacaagcatgtcaaaaccaatgtgattggaacaggctacagactattgggtacacaatatgcttgttttttacatatatgcctagaaacatcatgtggacgccgtattatgccgccttaaccaggtcatggagacgccttaggccctgttcgtttatcctgaaattcctcccgagaatcgttccaactgatcaaagcttatataaattagtgaagaaatccgacccagattcattccagaacgaccattcccggggaaccgaacatgcccattcccggggaaccgaacatgccctaaact

SEQ ID NO: 328218 - DNA, 356 bp, Zea mays
gagatgcctgatgtgccaaccataaccctgacatttgctgcggacaagagcttgcaagctgttaatcctatcttgccatttaatgacaaacagggggcacttgccgggttctgcttagctgtgctgccatcaacagaacccattggaattattgcccagaatttcctggttggataccatgttgttttcgacagagaaagcatgaagctgggctggtaccgctccgaatgtaagccatatccatctgccatggaaatagaccaaattctaccattcacctggtactccggaagtgctaaacatgtggtaccgtccattccttgcgagcacaggccacgacgttgaggacagcacga

SEQ ID NO: 328219 - DNA, 243 bp, Zea mays
cggtcgaccacgcgtccgtgacggatacgatgttaaatggaactttattatgagcagcgacagaatgaatgaagtgtgaactctttcactatcaggacggacgcaaactgcaaatactaactgctcatgtgatcaatcataagagtaagagatcgcgtttgaaacattagcaattagcgtaaggaaagaccttgctactgaacgaatgacatcaagtataaatggttcgacacatatatttca

SEQ ID NO: 328220 - DNA, 340 bp, Zea mays
  unsure (1)..(340): unsure at all n locations
cccacgcgtccgaaggaattaagcgatggtgcctgcgccgggaggcccgggacggagagggagatgcatgctgctgcttctgggggctctcgccctcgcattgcccggcgctgcgactgcgaccgcgtggcctcaccctcacggcggcgccgccgnccccgccgcgggtgcgggcaggccgggcggcgccgagcgctggtacagggatctcgcactcaggaggatggagagcgtcagatcctccttcggggccagaagagatttggcgacggcttccgcgagcgcgcgggtgtaccacgtgacggactacggcgcggaccccgaccgcgccgncgacgcc

SEQ ID NO: 328221 - DNA, 283 bp, Zea mays
cggacgcgtgggaaaaagaatcaaaaatttcagtttaaagaaaagaaaagaaaaaaagaggaaagggctaagccgaatgaatggaaaaggtaaaaaaaaaaaaaaaaaaggcgggtctacttaaaggtgccacctttacggtcatgataatgcaacgaattacctttttgctactggtcctgaaaaataatggagtctgtctataatctcaactacatggttggtaaaaccttgccgtgaaacaattatctgggctactgttaattacatatttttgaggcta

SEQ ID NO: 328222 - DNA, 77 bp, Zea mays
cggacgcgtgggtttttttggggttcattttaatgaaaaaaaaagaaaaaaaatgaaaaaggaaatagggcatgctg

SEQ ID NO: 328223 - DNA, 324 bp, Zea mays
cccacgcgtccgccctttcgtccgttatttcaacagctatcaccaccgccagcacgatggctgttaccagcacgcgtcgggtcgacacactccaggagctcctggcagcggcttcaccgctgctgagcgcagctcacaacgacgcccctaaggctacggctgcggggaaagctgctccagggacggctgcaccctcacattccgtcgcatgcgctgccgacgctgaccctctcacaaacttgaacaaagcgctcaatgacgaccagatcagcgagttcaaacatgctgctgcacgacacgcgcgtggacacgcagctcaacact

SEQ ID NO: 328224 - DNA, 196 bp, Zea mays
  unsure (1)..(196): unsure at all n locations
ttcccgggctcgactccacgtcgtctcgtcccacgtccgtccgtcccacgcccgtccggttcgttctcagagagnngcctgcgagggagggggctcatcttgggggagtcaacannaccttgaggggatgannggtttgtggccnnngtgggttctcaagggcngccagcntttggtcgaccccttgnngtgaagc

SEQ ID NO: 328225 - DNA, 330 bp, Zea mays
cggacgcgtgggcggacgcgtgggccggtgttcgttttcgtgggtgagcggatcgagatggcggcgtcggatgttgagtaccgctgcttcgtcggcggcctcgcctgggccacggacgaccactccctccacaacgccttcagcacctacggcgaggtcctcgagtccaagatcatcctcgatcgggagacgcagaggtcccgcggcttcggcttcgtcaccttctccacggaggaggcgatgcggaacgccatcgagggcatgaacggcaaggagctggacggccgcaacatcaccgtcaacgaggcccagtcccgcggcggccgtgga

SEQ ID NO: 328226 - DNA, 344 bp, Zea mays
ggaggcggcaacaatggcgaacagcggattcgtgttatatatccgagagcacgactagcatggagggggcgtcaggcgtacgacgacttcgacgggacacgccagatctcgtggttgtcgagttcgtttgactccaaccgtggccatgcgtcgggacactggctacgcgggtcccacgtaggctgcccattttgggacccttgtcttcagacacgtgcatttttacagtatctcgttttagaactgaattctacattaactatcacagtgcaagtgtatatcaccctctgggtcctaaactatatttagatcgttttggaatactccctagtggtaatagactc

SEQ ID NO: 328227 - DNA, 118 bp, Zea mays
cccacgcgtccgcagaagatcaattgctttccaaatccacgctgacaccaactcgacgagctgcgcgccaagcaccaaagctccgatgggccgcactaaacagactgctcgcaagtcg

SEQ ID NO: 328228 - DNA, 305 bp, Zea mays
acttgattaaccagcctttggtttggctcgtcctccctctccggatctctcccgtttctgtgtggcgagagagacatgggccggggtgggaggacgatgcatctagctgttgacgatgacgaaaaatttgtgatgatcgtggatatcaagtgtaaagatctagagaggatgatgatgtaactttttctctattttcttttcttttttgttatacgtccacacacatactttgctaataccatgctctgcagaagtgcctgtactagctcaattcctataaactaaactattataccctgtgttct

SEQ ID NO: 328229 - DNA, 223 bp, Zea mays
aaaaaacgtgagcagattcgagtagaattttatttcaacgccctgcaacaaggtagcggggctgattgctatataacatgcacgaacattatcatagcaagccatatgcaacgggccaaatagttcacgtggaagagtatgaacatgagtcagagtggctcaaatcgataactcgccgacataaacgataaaggctaattttcagtacatgcataacctgtat

SEQ ID NO: 328230 - DNA, 93 bp, Zea mays
aaaaaaaaaaaaaagattgaataaaaaaatttttaatttaaaaaaatgaaaaaaaaaaaaagggactaattgaataaaaaacaagcataaact

SEQ ID NO: 328231 - DNA, 357 bp, Zea mays
cggccgacccacgcgtacgcgcaagctcgcgccttttatgccggaccatgaagtcgcgtcggacagcatgacggtcggggagggtctgctcatgatggacgatgaagagagggtacggccatgctgagatcccgaccagtggctatcgcaagctgcgcgtctgactgcgacgtcgcctagtcaagaactacgaccagatcagggacaaccgctgcaaaaactgtccatttgtatagatggacagagagcacgacatcaccgtgaactagaccaccccgaactttactggaattatctgtctgatggaccccactctgagctaggcagcccgttggttgaaaattggcaggttcatta

SEQ ID NO: 328232 - DNA, 336 bp, Zea mays
gggaagcgtcttcacgcgactgctcgtgatcttctgacatcgtcgactcagctgatcctggcgcgcgccaacaatcagaccttcacgtcataccgcatcctccgctcgccgacctcccgcgcccggtccttgagcacccgcagctggccggcggcgtcgtgctgcgcgaacatcttcctcacaaaccatggaggccacaggaggtagcgcaagaggccgctcctgcggaggtgcacgtcggggttgccgcggtacacgtacttgtcgatgcagttgttgcagtcgttggcgaggatacggacctggttcatccacgtgcgcacctgcacgccgtgc

SEQ ID NO: 328233 - DNA, 423 bp, Zea mays
cggacgcgtgggttcatacatcctgccattcaaaggtcatcctgagaggctaacgcatagcgctgaaactatactgtagcaagtagcctttcgtgactgcagagacctagccatccagatctaaatggctgcctgttcatagctaaaatgcatagcaccattattcatttgcaacactatcattcgatttctacgagctattcatgtactgctcggatgccagtcttcttgactctaatgctatctccatcagtgtactcatcctgatcatcttatttcaaactacactatgcgaacaatgcagtctatagtacaaacagcgttctgcacagtcacatgcacgtttagctggctataccctaacagtaaggatccatgcagaaaacttagtttctaatactacagtaggtcaaatttacacac

SEQ ID NO: 328234 - DNA, 245 bp, Zea mays
cccacgcgtccggatggtcactaatttttacaagcattttaaaactcataaatattggatacattttaaattggaattgtatttaatcattgccttttgtgatcactccgataatcggtttatggcaacctattggaaccaaaaacaataaatcaactggttgaacagataactattactttgctattcatgaggactgtcatgcacgccataagggttgttgctgcatagatagagtttgtgat

SEQ ID NO: 328235 - DNA, 327 bp, Zea mays
cccacgcgtccgaaaaaaaaaaaattaaataaaaaaaaaaaaaaaaaaaaaaaaaaaaaagaaaaaaaaaaaaaaaaaaaaaaataaataaaaaaaaaaaaaaaataaaaaaaaaaaaaaaaaaaataaaaaaaaagaaataaaaaaaaaaagggggtgaacttttagaagataaaagtttatgatcgggtatttatgaggactaacatttaattaaggggagctaaaattgaattgatgggacttgtttataaacatgatgtcattggaaaaacagcgggctgaccaagataaatcccatggtataaataccatttttgaaaagtg

SEQ ID NO: 328236 - DNA, 152 bp, Zea mays
gatcgcgagcggctgcccttttttttttttttttttttttttttttttttttttttttttttttttacgggtttctgcatctgtaatagctatttttttaagcgcaaaacatgtcttctctttggtgctataaaaagcctatagtttcaccc

SEQ ID NO: 328237 - DNA, 269 bp, Zea mays
gctacggcggcggtggatgaggaggtggtggtgggtatggcggtggcacaaggacctaaaactaggtgccgtagcaatacaagctacacacgctgttacaattgcgacggcgcctaaaactactgaaagagctaatcgggcgcattcatatacagcatcacatcaattctcagtatcctactgtcattctgatacatatacagcagctcaaatgatatcaagctgcaaacactgctcttatcactgagcaagattgataatgactgata

SEQ ID NO: 328238 - DNA, 255 bp, Zea mays
gagacacgtcagtggactcgtgcatgacttcgtttgctatggccatgacaccattcgggagcgagtgcaacatgagccttgcagcttatctacagtctaggcctttggctcgcgtgcggactgctggtcttggccctagcacatggccactaccgacgtgcaggacagcacgcagctgtcgaccgagagctactacgacggcggctagccccgcctgccttctcagcatcaggaccggaggctggacgggcgggc

SEQ ID NO: 328239 - DNA, 51 bp, Zea mays
cccacgcgtccgcggacgcgtgggttgttgcgtgggctagttctagatcgc

SEQ ID NO: 328240 - DNA, 328 bp, Zea mays
cggacgcgtgggcagtgtgtgtgtcgtagctatagcagtgcccggtgcggactgcgagtgacatgggctaaataaagtgtgcgtcgtctggtctggtggtggtagtggggcgcggtgccccatgtgtgccgctgcagcttgtgtctctgtgttgcttcatgttctctgtctatctactctcatgtatggcagtttgggtacgggtatatcaagcatgttcagtcttctttggttgaaaaaaacaaagaaattggacagaaaattagcatttactctaccaacatcatgctacgctacaatggatatccgatagctcctgaagacttac

SEQ ID NO: 328241 - DNA, 336 bp, Zea mays
ggcgtcttcgtactcgcctacctccgcggttcaaacctttcccccttctcccaattcccgccgccgctccatcccgtaacgcgacaccatgagggagtgcatttcgatccacatcggccaggccggtatccaggtcggaaacgcgtgctgggagctgtactgccttgagcatggcattcaggctgacggtcagatgcccggtgacaagaccattgggggaggtgatgatgctttcaacaccttcttcagtgagactggtgctgggaagcacgtgccccgtgctgtttttgttgaccttgaacccactgtcatcgatgaggtgagaactggcaccct

SEQ ID NO: 328242 - DNA, 111 bp, Zea mays
attacgcgtacgctgtttcgaacgggagtaccatttcctagtagaagatagagtactcggtcggctacggcacgatatggctggacacataccagatcatcgacgccaacc

SEQ ID NO: 328243 - DNA, 263 bp, Zea mays
gaataatctcttcttcacctcactaacactagctagcaactctttctctcctgcaataatggccgctcgctcctcctcctcccagccgcagctggtcgcggcggcggcggtcctggcagcggcgctgctgctgctggcggcgggggccgggacggcgtcggcggcggtgagctgcggcgaggtgacgtcgtcggtggcgccgtgcctcgggtacgcgatgggcagcgcggcgtcgccctccgcggcgtgctgcagcggggtgc

SEQ ID NO: 328244 - DNA, 262 bp, Zea mays
cccacgcgtccgggcgaggggcgactggttgagcgcttcgtctagacagcccagctgcgcatttggatgcaaattacgtgtggaggatggagtaaaatactgagcaagggagagggaagaggagacggtcttttcttttcttgagccgaggagggggatcaggtggagtgagcgaaggggaggttctgccgccggcaatggagatgaatcttccggcggagagcccactctgctcccggggccggcccgccctagtcgtgcg

SEQ ID NO: 328245 - DNA, 300 bp, Zea mays
acgcccacgcgttcgcactttcagatcaacaatatcattaaggcaggcgagcacaacctcgcggagcttgagctgttgtagatgcacaacatgacatactgcaccgaaattgcccactacggggacacccggaaacgcaaggagatcgtcgaacaggaccacacaactgggcatagcagtgaacaacaaactggccaggatctacaacctgtacggccactgaaatagacattagaaagcggtgatacacgctggcagacaataatggagcgaaaaacctgcaacatgacataccatgcc

SEQ ID NO: 328246 - DNA, 64 bp, Zea mays
acgaaaaaaaaaaaataaaataaaaatttaaattaaaaactaaaaaaaaaaaaaataaaataag

SEQ ID NO: 328247 - DNA, 171 bp, Zea mays
aaaaaaaataaaaaaaataaaaaaaaggaatatgattaaaaaaaaaaaaaaaaaaaatgagcgaaagctttagtaagatacaaacatacaaacgcgtgcatgcaaagacatagaaagtatgatagagttacctaaatgtagttttctaaggccagcttaagaacgtcacta

SEQ ID NO: 328248 - DNA, 174 bp, Zea mays
ctcatgctctcgttccgcacgcgttctattttccgatcgcttcggtttgcgttgccacaggcttacctctgtgccccagtcgattcgcgtgagcctttcttggaaggaacgatcgaacacacctgcatgatgatcaagcgcgcccgcgtgcagagcggcctgatcgaggactat

SEQ ID NO: 328249 - DNA, 329 bp, Zea mays
gatcgacgacgacaactacgcgctttcttttccgctggagactcgctggctggggaagagcgtcgactaatggttgacaggcaatcagatgcagcgcgcgacagctacaggcggctagccaggggctcacatcgatgcaacaggccactaacgcacgccagcgatgaacgcaacgctgcatgaggcccataagcatctggacagcgaagcatctgcccatgatgcggggacatcaactgtatgcaagcgctccggccagctgctagatgggataaactagcgagacgagctatgctgcacactacaccactaatagccgtgcacgaacc

SEQ ID NO: 328250 - DNA, 257 bp, Zea mays
cccacgcgtcctcccacgcgtccttcctctcgtccgcccacgcgtccggttctagatcgcgagcggccgccctttttttttttttttttttttttttttttttttttttttttttttttttttttttttttttttttttttttttttttttttttttttttttttttttttttttttttttttttttttttttttttttttttttttttttctttttttctttttttctctttcttttttctaatttgttctttttt

SEQ ID NO: 328251 - DNA, 119 bp, Zea mays
ctgatcatgtaatttatattggatatattaggcttttgaggagactggaagtagatggatcacgatcaccatgtaatttgtaaaatggggctactgttactgtaataaaggcacatgtc

SEQ ID NO: 328252 - DNA, 369 bp, Zea mays
cggccgacccacgcgtccgcccacgcgtgcgcagacgcgtgggagagtaaattatacctctgatcataaaattgagcgtcggcttcaatagatggatgcagaacaattatgacgaacggattcatgtgatgggcaatctaatcggtgaggcacggaatcaacatcaggatcactagcacaaaacattcactccagaacaaatgggggtgagcatggttctcagcaactgcaaaccctgtatcgcgtcgactctctagatggctaccagatgcatgacagtgaacattctcttgaaaaactgcctaagtatcgacaacgatacagcatgccgctgcaatcttatgtgatatgagaagaaacattgaatcg

SEQ ID NO: 328253 - DNA, 367 bp, Zea mays
gtttttagtaaaaaggggaaaaggttctttccaacagttttgtagatgagctccttaaagattaaaaagttgtcaaatatcctctccaacttgtaagtttgtgcagtcaagaggaactatgtatcggctccccatccagcgtttttctcaggagaccggaataaattggatgcatgagtaaatttagaaaataaaggcttccagatgaggaagcggtaagagacaaagaaactattaaaaatgattggttggttagaaatagtttgaggtttcccaatgcataattgtttagtaggctattatagcagactagagaacaataaactttaaggttgctattttttttttgttaacttgctagatctgt

SEQ ID NO: 328254 - DNA, 295 bp, Zea mays
ggctggcgtcatacggtcccacggttcttgtggagccgcggaccgatggtcatcgtggggcatcatctgcaggcaggaccacgccacggccagcatcgcgcgcgactcaggacgcactatgagactggaaggcggagacccgtgaggagcactggaggtgcaccgagcggatcctagactggagcgagacgagcgggcgcgcactacatggacgaagcgggagacaagccacgctgctcaccacaagggaggcaaggactaggacgactacgagaagaccgtcaagatgcccgag

SEQ ID NO: 328255 - DNA, 250 bp, Zea mays
cggtaccgcaacgagctggacatgaacgttcgcctgggcgggcatgaaggacggagggggtagctataattatagacgatgaatatagacacacatcatgctgagatccgcaccagtatagaaaactaagctgcacgcctgtctgtaattcggatgtagaaacatctacaaggcatccatgaatacagattgcaaaatctgaccatcatttcaaaatatgcagagaactctacaacgactacatctgcac

SEQ ID NO: 328256 - DNA, 339 bp, Zea mays
cccacgcgtccggcggtgtcgtcgtggttctcgccgcgcgcatgggcgggatctgcgctctgcagcgcgcgtggtgacctaccacaggcacactgaccggctgccggctgggatactgagagactgcatgtctttttccgtgccgcgcgctggaattcgcacggccctaccacgagcacgtgccgtacggggcgtcagcgcgtgctggatcgaagagggatgcgagctgagagagcgcgcctgatgagaggctgagacgagacctgatgcggcccacacctgcacgtgtccgtataatctgttcagagtgttcgtaatcgatcttttcaaatttttctc

SEQ ID NO: 328257 - DNA, 372 bp, Zea mays
  unsure (1)..(372): unsure at all n locations
cccacgcgtccggaataatctcttcttcacctcactaacaccagctagcaactctttctctcctgcaataatggccgctcgctcctcctcctcccagccgcagctggtcgcggcggcggcggtcctggcagcggcgctgctgctgctggcggcgggggccgggacggcgtcggcggcggtgagctgcggcgaggtgacgtcgtcggtggcgccgtgcctcgggtacgcgatgggcagcgcggcgtcgccctccgcggcgtgctgcagcggggtgcgctcgctcaacagccgcgcgtcgtcggcggcggaccggcaggccacctgcaactgcctcaagagcatgacgggccggctcggcggcngcgtcagcat

SEQ ID NO: 328258 - DNA, 267 bp, Zea mays
gccaaacagatggcgtaccaactatgcattggacgatggaaagggtatcgagtcctctgctgcgtcaactgcgccgatgcgcactatgagctacatggtggtgctagttgacgtctgtagatataaggtactggccaattcgtcatgcgacggaatcaccaagctgcgatgctacaaccacagcagcaatcgcttggactcctgatggtacaagacagagctgctctacgacgtcgacgccaacgtgatcaaggaggagttcatgca

SEQ ID NO: 328259 - DNA, 280 bp, Zea mays
cccacgcgtccgcccacgcgtccgaaatataaatataaaaaaaaaaaaaaaaaaaaaaaagaaaaaaaaaaaaaaaaaaaaaaaaaaaaaaaaaaaaaaaaaaaaaaaagaaaaaaaaaaaaaaaaaaaaaaaaaggaaaaaaaaaaaaaaaagggggggcgtttttaaaggtcaaaattttggatacggttttataaaataaagatggaaaaaacgtgcccttaaataaaataacaggggcgcagtatatacacctttggacaggtgaaaaccttgggg

SEQ ID NO: 328260 - DNA, 79 bp, Zea mays
cccacgcgtccggccatgagtccgagcgttaagtttggctggccgcttaggaactgctgggcaggttctacgggcgggc

SEQ ID NO: 328261 - DNA, 470 bp, Zea mays
  unsure (1)..(470): unsure at all n locations
aggttttgaattaccgtttcgacaccacgcctccggatccacttctgcccatacttcctccatttatatccatcgaagtgcggtgcttgtgtcacaattgaacctgtgtgttgtgcattcttcctaagagaagggggtaactattttaagcccaagtaaatgacacacaagtaaacatatatatataaacttcttttgctacacaccttctcttatttccaatttctttagcttcctcccncagcatgtggctctccacgccgctattcttaccacgttttcttctatatttgataagattggcctgcttcttactgttatcaccaggttcgagaaaggagaggaccttacctgaggaactggatatatcttgaaagatttgctgaacaagcttctcctgcctactacagggatcaagtgttggtacgataaggtcatataggcccttcatgagagccctttggtggttc

SEQ ID NO: 328262 - DNA, 120 bp, Zea mays
aagaaaaatactggctgataatagacattttcttaaacaactcctgactgcagagctgcgcgtgccgtctgcacatctgatctagctatttcagttggtacaaaaagggggcgctcgtca

SEQ ID NO: 328263 - DNA, 60 bp, Zea mays
aattcctactggtaccactcctccgaaaaaaaaaaaaattaaaaaaaaaaattttttaac

SEQ ID NO: 328264 - DNA, 222 bp, Zea mays
gtcattgctcgcgtgacgcgtcggctacttcatcaggcgtcccatcatagggcattacggagggtagatgcgttatgctacagatcatgtaaattcgacctgatcgcaactagagtacctactatatacaatgtgaacctacctagactgtttagatcatctgacatagagcaccactagcttatggatcagacttctatgagtcaggagttactcttgcta

SEQ ID NO: 328265 - DNA, 202 bp, Zea mays
gacgcgctggcttctcttcaccctcctgttccttgtacggatcatgaggtactccgaggtccggttaccgggtcacccgatcgagactcaatcctgagatgttgaataccgatgcttctgacgctgactcaattgctccaatggcgaccaatagctccacaacgcctgcatcacctactgataggtacatgcatgcaatatc

SEQ ID NO: 328266 - DNA, 296 bp, Zea mays
gcttgctactgaacagggaatctataacgctacgtaaaggtcgttcactggacgaggaattactacatagtgactgtaaaaaatcagtcgttaccgaattaaagtgatcatcaggacatccatctttaagaaggcgacggttgatggaagatgcacatgagagacgaacgctctaacaggtgcacaatctgtatgaccaatgggacgcacccatacacggttgttctatatgaatggtataacagggtacgctctgggagatcgattctgatatcagcgctctatagcccgctgct

SEQ ID NO: 328267 - DNA, 384 bp, Zea mays
tcggttgactggtcgtagattgttgtacgaccttttttggtacaatgacgattacatcttgtacgattacttcttggagaaagaaaagttacacaaattcagttttgctcaatctaggtttaatttcataacttctcgagttatggttcctgtttttaacgtttgggttttactaaactgcttctgatttaatatctttctggtctcactcttagtcttcgttcgacctttgcaaaattagatacaattttctgctcgttccacacaattttgctcctctcttggtggtttagatgtgagtttccttagatcaatacgtgtagcccaagcacattaaagtcaacatccatgttgcttggtcatacacaaaggttagtctttttt

SEQ ID NO: 328268 - DNA, 323 bp, Zea mays
cctactcctgcgatatgctacaggcttttttgtcttgctgcttatctgcctattgtgagggccgtacttattaggatctgggcctgcaagaaccggcacaactgcaacagctgtgatcgcttgcagctgactcatcgcattaaacggccacagagatgtttatataatggaactggcctcatactaattcatcgagctgaatgtatgtctccatagtcttgcacccaacttcgaactcattagctctttattgttgcagaacagttgctgtcagactgctatactgtgatgatatgatccattctttgtggacacagagatta

SEQ ID NO: 328269 - DNA, 455 bp, Zea mays
ccctttcgacccacgcgttcgcccacgcgtccgcccacgcgttcgcggactcgtgggctctattttgaattttgatgatagggctttaattgaaattgcggatatgttgaacataagtcttgggagtaataaagaagaaattaaatcaaatcttaagtctatcaaagaaatggagaaagataggcaaaataataaggtctcggaacctgaatctaaattgaaaagattggaacaggatagagataaacttttagaaaatgaatgtgaaggagatggaggagatgattcaaagtttgttagaaagtgggtctgagaaagaagttgaggaaccattggacaaagaaaaaatggtcagaaaagagaaaaaagtttctcttagaaaaaaaggaaaaattattcccccaaaataggtgtaaaccaaataaagggaggaaacataaacaaaaaaatatcag

SEQ ID NO: 328270 - DNA, 100 bp, Zea mays
cccacgcgtccgcggacgcgtgggcaatgatccacagcatcgttgatatatataatatagagagaaaattctctgcacggtcaatgcagttttatccggt

SEQ ID NO: 328271 - DNA, 347 bp, Zea mays
ctagttctagatcgcgacggccgccctttttttttttttttttttttttttttttggtgggttttttttttttttttttttttttttttttttttttttttttttgaaacccccatggaaaccttaactccaaagctccattacaaaaacggcttggaaattggaattctactaccgtttttaggctgtttaaaaatacccgaagattcccaaaaaaaaaacccaaaaaaaccccaattggatctttactccctttactgaactgggtctccttttccttgcctactacagtactactagtgggatccgtccatttgacaagacaacacccgggcccaaacggaaac

SEQ ID NO: 328272 - DNA, 284 bp, Zea mays
ctagttctagatcgctacggacgcctttttttttcttctatttttcaccttttaacgccgttttttttaattgtttcatcttcatttattttttctttattttcagaaacccccattaaacccccaactccaaatctcctttcaaaaaaccttttgaaaattctaatccaacttccagtactaggcttttaaacattaccaatacattcccaaaaaaaaaaccaaacaaaaccccagccggatatatacacgctctactgattaacatatccttttccaggcca

SEQ ID NO: 328273 - DNA, 173 bp, Zea mays
ccactcgtccgcgcaacggccgcctttttttagatccgtgtaatcacccgcttaggtggggatttttgccacagtggaggctatattttcgacactttttattgcaaaacgctatcgaaactcaaacgtcaaatcagcggtgtgaaaaccttttgaaaatgaagatccagcag

SEQ ID NO: 328274 - DNA, 438 bp, Zea mays
ctccactcgtcctcccactcgtccgcccactcgtccgcccactcgttcgcggacgcgtggggggactcggggaagctcgcttatccgagcgcatctgctaagtcgtttgctcttcatggttatctgaaggttttttatttcaccttgaatattgactactgacattaccattacctttttgttgggactaaagtttagtatattcgtcttattgtttagtccttatctgtataattattttatttttatattatatgtaatacttctaaatatcattcaaatatttgatgttctaaatatcattcaaatatttgatgtgaaaaccataatttttttatattttcataaaaaaaattttttttataaatctaaaatgaaaaatctcttttatttttcaaattaaaatatttatttttttttgaaaaaatatttattatt

SEQ ID NO: 328275 - DNA, 430 bp, Zea mays
cccacgcgttcgcccacgcgtccgcccacgcgtccgatgcactctctcatggtgactccgaaatttcacagccaaaacgcaagcagcaaaggagcactactcagactttgagagtggttggaggagaaattgattccaactgcagcccatcagttctagaagaaaaatgttcaaagaatgaacatgatgcagtcccagttggtttatgtgggaagggaccacaaaatccccaagcagagcattcagaggatatttcagtgtctgcatctgaaccgtcgaacggacctggtgttgtggactctgaggacaaggatgaagcagatgaggagtctgacgatgaaggcgaggacgaggaggaagagaagacgtcatcggcgaagaagctgtggcgtttcctcatcacatgatttatttatctttgtcgtacgat

SEQ ID NO: 328276 - DNA, 402 bp, Zea mays
cccacgcgttcgcccacgcgtccgctgacgcgtgggggaggcagctctgcttcctagctacgatagggttggaatagagaatttcatccgtgcaaaatatgaggacaagagatgggtaccaaggaatggaacatcaaaatcttcgtccagtgttcgagatgagaagagccaagagtttccggctagtgctaataggagtggacatggtcatagatcttcatttgagcaaaaccgtgcttcgacagctcttccgagcaaagttgcacatgcagcttcaaggatatcctctcaggcatcacctcagcccccgaaggtagaaacaccagttccaaaggtggttttacctcctcagtcacagaaatcccccgccaaagttgatgcaacaccggctaaagttgagaa

SEQ ID NO: 328277 - DNA, 330 bp, Zea mays
  unsure (1)..(330): unsure at all n locations
ataggaaaatcagccaggactttttattatccatggatgagagtgaaacgccgcgtcgcggtcgccgtcctggcgggcaaaacctcgcgcgaagcgcctctctctcactccgttcgtctcaccccaaattagcgagacctagaagaatcttgaaagtgatcgctccagcgcgtgccgccgtcgtcttctnctnctcttcctcatcctnctccacggaacagacgaggactggcctagccaagccacgccacgccaagagcgtatactgtacgtacatcgtttgccgagcatgtggcatagtactactatacgtatatatagaaaaaaaca

SEQ ID NO: 328278 - DNA, 287 bp, Zea mays
cccacgcgtccgcgacgcatgcattgaattctaaggaacgcactaaaaagactctatgggggagtttcataatctaaatatgatcaaaatcagagcctatgaagataagtgagccattcagaaaataacgaaaggctctctcaaagtcaccgctatgcatccgtatctttcatacaacttgcttgccattatgtgtacatcaattgactaatgatgaggctacttctgaccgacctgaactggaaaaaccttattgtcaccggactgacatccatggtctacaattc

SEQ ID NO: 328279 - DNA, 401 bp, Zea mays
ggactatcaaggtcgctgagcaccagctgttgagaagattagccggtgaggagccaaaggaggatgcctaggttgacccttgttttattcattcacccccgttttgccttcccgggatagatagcttcatcagacaacacagcctagctacacaatgtgcagacgacgcccaactaaaagctcaatctgacaacagagccacggctcccagagacgtcggcacgtcgcactagtcaagcagcgctaggatgttgtgcttaggcgcactcgctgaggggactgcaggccgtgacctagcaccgctgctgtcaggctcgaaccgcaggcctggcaagtccgtgctcaccctcgtgctctgcttactgatgacatacagcataaccaataagggaacagtagtc

SEQ ID NO: 328280 - DNA, 434 bp, Zea mays
cccacgcgtccggtttaagctatttatgagctttttattaaagtaatgtttaataatgtggttcataactcattaaccttagatatataacatatatcttctctaaaaggttaaaaaggtttaatattgttctaacgtgttttatcatcctataaactcttaatcttagacatatgtgatatgtctaagattaagagtttataggatgataaattggtgaacctaatatttgtatattttaattaagatatttttaagctcatgtcttgttttataaagtatagaacacacatttttgaaaagaatacttttttattataacctttgcgtgtaatgttttcgaaaagtgaatactctttctgttaagctttcttttagctatgcgtatggtgaatgtcgtatgttattgagtggtgtttgcttcttcttgtttt

SEQ ID NO: 328281 - DNA, 353 bp, Zea mays
tcgggcaagcgtacctgtattaacaggacatttgtctgttgcttcagctgcagtctgtacccacgaggactcctctgccgtttcgtaagccctccaatataccgagcgcaccaagtcaaaagcatctgatatctatgcccacacctagatcaacctgtctgttgccatacacgcagaggctttacaacagactttgaaagagaaagctcgtctattgcaggaacagacatggttcgctacgaaatcacacgactactcacacaatgatgatgtatctagcgctgagaaggctgctggtaaacaggacctgcttagcatagaccacaaggctaacgccaaggacgtccaagaca

SEQ ID NO: 328282 - DNA, 201 bp, Zea mays
cctacccctacggttcgggttcgggttcgtgaggttctccggggttcggtttcgtgggtgagcggatcgagatggcggcgtcggatgttgagtaccgctgcttcgtcggcggcctcgcctgggccacggacgaccacttccttcacaacgccttcagcacctacggcgaggtcctcgagtccaagatcattctcgatcggg

SEQ ID NO: 328283 - DNA, 283 bp, Zea mays
ggtagtcgagatagccttggaactgcacattaatattaactgtacatgtataaatagttgtcgtgagcgcacaccatgtaatcgtcgaaattcatccatgtgttgtgacattttttgagcacagttgaacatgtgatggagcctggaggcaagtcattctcaaaaaatactacttctacactaaactgatgttgcaacgcgcgcttgacgtcgagatggccatgtcgctgctcgtgctcgacgtggcgtacttgattggctatggattcgaggggatcgatgg

SEQ ID NO: 328284 - DNA, 85 bp, Zea mays
gtgatttatgattggtgctaccttgggctcaaaaacatgtgaacagtcgttctatgaaaggcgatgtgtacacacatgttctttg

SEQ ID NO: 328285 - DNA, 360 bp, Zea mays
cccacgcgtacgggtgggttggcttctcctgcccctccggttcgggttcgggttcgtgaggttgttcggggttcggtttcgtgggtgagcggatcgagatggcggcgtcggatgttgagtaccgctgcttcgtcggcggcctcgcctgggccacggacgaccactccctccacaacgccttcagcacctacggcgaggtcctcgagtccaagatcatcctcgatcgggagacgcagaggtcccgcggcttcggcttcgtcaccttctccacggaggaggcgatgcggaacgccatcgagggcatgaacggcaaggagctggacggccgcaacatcaccgtcaacgaggcccagtcccgcg

SEQ ID NO: 328286 - DNA, 147 bp, Zea mays
atgattgatattggtagggagacgatcaagctgaggacccccaatccttatctttggagcgaagaccatacttttgagtctattggcactccgaagaatgttgtatgccagcttcattagccactcccatacagtgtgtcctgaaat

SEQ ID NO: 328287 - DNA, 427 bp, Zea mays
  unsure (1)..(427): unsure at all n locations
tcgtccacgcgttcggagagtcctgccatccacaagttcttagcttttgcgagattgagatgcggctgggacaaacgacagaagaggaagaacagaaaaatggggatggaagatggatcttcanatgggaaccagcaaccggtgcataaagaatacgagatgagaccacaccacttcttccagtcaaggtggaggangacgaggggtttcatgagttcaatggagcttcattctctggggcagttttcaatctgtcgaccaccatagttggggctggaattatggctcttccagcaagtatcaagatgctgggcatcatcccggngattctgatgatcatccttgtggcactgctcacagaggcatccatcgacatgcttgtaaggtgcagccaccatggcaagattacatcatatgggtggttgat

SEQ ID NO: 328288 - DNA, 375 bp, Zea mays
  unsure (1)..(375): unsure at all n locations
ncgccacgcgttcgccaagagccagttgttctttgccataaagaaccttataccagaagttcttttatgctgtgggaactaatttctctacatagttaagcacatggtcgtgaccacgtatgtcgtggataccatttgcgcttncttttcccattactaaaaatattatggtcacaatttgcactttaagttataatgcagcacagtgcttcactgtctgagtctacaacaacaacaacaaagcctttttggtccaagcacgttggggtaggctagagatgaaatcccatatgaaaacctcagagctcaaccccaaagaaaagaaaagggagataaagggcaaagagaacccgaaaacgacgaaacggggaaaca

SEQ ID NO: 328289 - DNA, 455 bp, Zea mays
agcgcccaacccgccggcggacccaacgcttccgacagtagcacagccacctccgccacggcgccggccaccaagatcgcctcagacagaacctccacccctggcaccaccaccttctggaattcctgtcgaaccttccccaaccagtccctcaccgacgtccgcagatccttcgatccccactccctctagcccctcgtctccagggacgacaccgtccacaccaggctctggtggcactccatcggtgccagccccagcaacgccaggtgactcagttagcccggtaacaaccgggggccaaggttccaacaagtcgtcgagtccagcctcgcagagcagcagctcctcagtagacagtggtggactgtcttctggtgcaaaggcatgcattggggtagtcgttgccattcttgtgcttagtttggttggagcagcattttggtacaagaaga

SEQ ID NO: 328290 - DNA, 349 bp, Zea mays
ccccgatctcgtcgagaggaagcccaatttcgaaaccgtcgccgtattccaatggcgcccaaggccgagaagaagcccgccgccaagaagcctgcggaggaggagccggcggcggagaaggccacggcggggaagaagcccaaggccgagaagcggctccccgcgggcaagtccgcaggcaaggagggtggcgagaagaaggggaagaagaaggcaaagaagtcggtggagacgtacaagatctacatctttaaggtgctgaagcaggtgcacccggacattggcatctcgtccaaggccatgtccatcatgaactccttcatcaacgacatcttcgagaagctggcgg

SEQ ID NO: 328291 - DNA, 383 bp, Zea mays
ggagaaggacgggtgcctgaccctggggttgcatacgcgcccgctcatcgccacctcggcgtggcgcgtcgccgctccgtgacgtccccaccgccccccgtacctcgccggcacagcacagcacaaaagcacagtggaagctaagacgtcagtgaacgctgctgaactgcagatagcgactgtggggccacaacggtcctcgccggagcgacgagatggacacttggagtccgaccggatcggcctgtgttcgttcctgtttccggtcccccccttctctcttccccgttgttccttcaacccgtcaactatggtagcccgtagccctactgctacgtttaaatgtgtattactattacgtgtaattcctcccagcgctgata

SEQ ID NO: 328292 - DNA, 365 bp, Zea mays
cccacgcgtgcgggactttccggaccccttgtcgtggctcgaagagatgatcgagacatacgtgcagactatcgccaagggcgtccgtagttatgaggaggccaagaagaggatgtatgctactagtgcgaccacttacgttggatgtcaggctgtaatgaccgaggaatatgtcacagaaattactctggtgaagcactggagtagtattcattctgcctagattcatatacatatgcagaaacaaacgagtacggaagacacatatatgactattgtgtcatcagtccatgaccaccagctgttcattataacagaccatatagaactgtcaggaaccgtgtctacccagggaactaccatta

SEQ ID NO: 328293 - DNA, 221 bp, Zea mays
tttccgcggacgctttggaaaaaaattatacaaatttttaaaaaacaaaaaaaaaaatgaggaacttgggacaacacaaataaaactaatgtacttagaatggcactggaaaaacattctaagctattcctttggttcccacaaacaattggtccaaatggtttccgatccttatgacaaaacgcttactgagaaaccttggcaaaccttaaaggcccctt

SEQ ID NO: 328294 - DNA, 65 bp, Zea mays
tggacgcgtgggaaaaaaattttccaaaatttaaaaaacagaacacgaataaagggaccttgggc

SEQ ID NO: 328295 - DNA, 334 bp, Zea mays
cggacgcgtgggttgaaatgttggaaatatatcgcgggctagaaggacgatggccagactatgtactctactactctgcttcatccttctcagtaaacttcatatacatacatatcggacaaaaatgatcctacagtctattatggcactggcatacatgggcatgacaaaaataacggcgtagacattatgaacaagatattgactaatgaaagctatgctatacatatgaggcacaggaagaacattgagcagatcaagatgatcgatacgatgaccatgaatttgctctacatgctgaattagatgttgctcaggatctaacatggacaac

SEQ ID NO: 328296 - DNA, 365 bp, Zea mays
  unsure (1)..(365): unsure at all n locations
cagacacatgggccgacacaaaaggaaacttgaagacaaggtcttcggccccgatgccttcgctgctcacctcacccgcctgcctacccttcgccgtacactctgctcgactnctgcatcggagctctccaccgtcgcggacccttcctgcaccaccgcgacgccgactcggtgcacttcctcgcgccgcgcaagaagacccgaccgcccctcgcgatgagctggcttgagaagctgggtctgagcgggcttggaggtagcccgcgcgcgtccgacgcgtcggcagcgctggcgcacgggcccgacgaggaccaggccgcgccggggaacgagatcacgcaattacgcgccggctgcttctgggg

SEQ ID NO: 328297 - DNA, 447 bp, Zea mays
gcaaagaataacagagataatgcaaatgattctttattttacggtggttgctgttggccgttgcttgaacagacaccgtcacgctaaaacgttcttgacatttgacatatacagccccgactaagaggaatcttgcagaactggatggcaagcgaagttttggatatcttaagtttgtttcgtcccagtttgaagagtttctagtcaaactaggggatatgcattgtaggcagaatgcaggtcacatcttttttttttgggtgggtaggtaggaaagtgctgctttgcttactgtgtggcttgtaaagccagaatgtaggatacatgggcggcagcttacgttaggatagattgagccagtcttaccattcttttgaaaggaatgcattttgcatctgatgtaaagctatttttggtggccattctctggtataatccatactgaag

SEQ ID NO: 328298 - DNA, 370 bp, Zea mays
  unsure (1)..(370): unsure at all n locations
aggcaataatatgctttgttcgtttcatgttcgtagtccttattcatgtatgatgtgatgatctcccctctgatttgtgtaagttgttcacttgctaatctctttctcgcttctcagaggtaaggactaatgaagttactggtatgcacctaggacattggtttagttgatttccgttctaaaatggtagtgaatgactgaaacttgccagtggaaaccagttcataaggtggcaaggggaggcatggtgagtccggccctttccaatcgcctaggtttaggcacatcagcacatgtaaggtgaggcaaggtgatgccatatgccagagcgtaacaaggngcttgcccagtccaccagacagctcatatg

SEQ ID NO: 328299 - DNA, 338 bp, Zea mays
  unsure (1)..(338): unsure at all n locations
cggacgcgtgggcggacgcgttggtctagttcgcgacgcgcccttttttttgtttttttatgttcaaaaaatgtccacacgaatgctggcgagcagagccgattcaacaaagcgaatgcaggaaaaagaacagaaatcaatgctgatcagtgatcactaaagccagtatctccctaccagatcgtctgaagcgcgaaagatgagagaacgcagcggctgctgacaagtgacgacgactactgccacgagaagggcatcgacgacgaggtgccgncgtccgaagagccctcgccgacggcgcttgccgcgccgacgtggaacattccgccgtagttcat

SEQ ID NO: 328300 - DNA, 452 bp, Zea mays
cccacgcgtccgcccacgcgttcgcccactcttccgtcgcgagcggtcgccctttttttgggttttttccagtaattctatctgtctctgtttattattatcatctacttacaagcaattaggataattatcccaatcaaaaacacgtgacttctctatagccctatacagctgcttccacctccagcagttctgacttcagaacaagcccagccatgctagaacttcagccacagctggacgatggcgtgccaaccaatagttagcccatgatgtcagctacacatttctgatcagtgagaattcgtcatcgtgtaccttgctatgtgtttcttaatttctgtctatgtacactggaatcacacccagggatctgttaggatgatgattagtgtgactttgatgctgacaagggggctggaggccctggttgacacaggcagtcaggaaaa

SEQ ID NO: 328301 - DNA, 388 bp, Zea mays
cccacgcgtccgcccacgcgtccgcccacgtgtccgatttattttgactcatctgccctaccttctctgggttttaggagaattcaattgataagttcattgttaatagtaagcagcaagtgcatcggatgaacggggggtggctcggcacaccttgatttctttctttctcaatctaacgctctcgtgtttcttcttggtcacactgatcagagagcaggttttccatgacatgatggtggcgcctaattttgctggtcgtgtgtgccggatatcgcgatgtcagcagatcggcatgaaatgctgtcgaaaagggagaaagccacaaacttcaaaccagactatgatattgatatccatatgaaggtcttagctatgagtgggcaag

SEQ ID NO: 328302 - DNA, 155 bp, Zea mays
cccacgcgtccgaaaaataaaacaaaattataataaaattttaaaaaaaaaaaaaaaaaaagggaaaattggaaaatataaaaggaaaaaagggctcacattttaagggccagaatttttttctgtctcatctggggtttcagtttttttttcct

SEQ ID NO: 328303 - DNA, 100 bp, Zea mays
aaataaaaaaaaaaaattaatttaaaaaaataataaaaaaaaaaaaacaaaagaaaaaaaaggaaaaaattttaaaaaaacacaagaatacaaaataaaa

SEQ ID NO: 328304 - DNA, 333 bp, Zea mays
cgcgctcctttcccacgtctggcgctccgttcccctcccaggatggcgctcacattccatcgacgggcctcaccttccatcgacaccgaggaagttcctgttcccgcatcgcgtggcgcgtgccaccgtttctgcacgaacgccatgtcgggtgtcggcccacctctgtgaagcggttttgccgccggctatggaaggggatctgtgttcgttctcattcctctattcccctcccagatcacgtgctgattccagccggtccctcaatcaacgccattgcccccgcaatcccctttcaccgacggcgcggacctttcaacgacgaagccgatc

SEQ ID NO: 328305 - DNA, 227 bp, Zea mays
ctccgggagcgcacgctggcggccatgctttaggccaaggacgcgctgcgcgagggcggtgaatcggaggccacactggccgggctggtggacgactggaaacgtacttgacgtggttgctgtggattatgttggaagggggtgggggttacgcgacactgttcgccatctatggactttacatcggaacgagaccttctagatgatcaattatgtcctggtaccag

SEQ ID NO: 328306 - DNA, 99 bp, Zea mays
caatgatgtgcatcactgcattatgaacgtacgtttggtaattgttgtgcaattctttgtacttgtggacaagtgctgtattctacacattgtttgcat

SEQ ID NO: 328307 - DNA, 142 bp, Zea mays
  unsure (1)..(142): unsure at all n locations
cagacgccctctacttctctctagttagtgttcatttcaaactcttggccgncgnctcgctctctgttcgccgcgccccgccgcagaaatggcgctgccgaatcagcaggttgtggattaccccagcttcaagctcgtcatc

SEQ ID NO: 328308 - DNA, 305 bp, Zea mays
tccacgcgtccgctcttattagctttaggctctagctagccgctccactccttcgtgtagccatcagccttctcatcgccaccaatggccactggcgaggtccagaccccgaccgtcgtggcggccgaggaagcgcccgtggtggagaccccgccgccggccgtcgtgcccgaggagtctgccctcgccgaggccgaggccgaggccgaggctgctgctcctgctgatcccgaggagcttcccgcgggcgagcagcaggcagccgccgaggcggaggccgcggctcctgctggtgccgaggagcc

SEQ ID NO: 328309 - DNA, 301 bp, Zea mays
gcgtccacgcgtccgctcttattagctctaggctctagctagccgcgccgctccttcgcgtggccatcaggcttctcatcgccaccaatggccactggcgaggtccagaccccgaccgtcgtggcggccgacgaagcgcccgtggtggagaccccggcgacggccgtcgtgcccgaggagtctggcctcgccgaggccgacgccgatgccgaggctgctgcttctgctgatcccgaggagctttccgtggtcgagcagcaggcagtcgacgaggcagaggccgctgctactgctggtgccg

SEQ ID NO: 328310 - DNA, 248 bp, Zea mays
aattcccgttctactccacgcgtccgattcgaaatagctcaggctgactttcacctcgactactactagcaccgaactttgcgcgggaatggacccccctctgcaggaccgctaccagacacacttgacggatcacatatggactctgggaaccaacaggcggtgctgtaccgtcagctactattcttgatcccctctgagccctcttcttcatctcatgcttaaatatgcacacatgcttccgtaac

SEQ ID NO: 328311 - DNA, 224 bp, Zea mays
tcggaccgacgtcatcgacttctgtattggcgtcctcgataatacaggcactgcaacggcagagtgagagctgctttctgagcttgtgtactcgctgaacttgtcggtagccaaatacacggtgctctatgccttccaaccgtctgatgtgctgaatagccctttgcccttgctgcttggtacgcatactccctagaagaacactaacttctccaaaactgttc

SEQ ID NO: 328312 - DNA, 446 bp, Zea mays
cattgcttatatatgtagcatgaactcgtgcatcccattcccagcaactaagcctaaccgtctgctccaccacttctgttccttgtataccttagtcaacaatgcacacacttgccatagcagctctgcacctgttgcagcttctagcaacaataccaacactatcctcacaagacacagaggcaattcccggttgcacctccagatgccacaacataagcataccttaccccttcggtatcggcgatgagcgatgctacttacatgaggggttcaagctcgcgtgcaagacggaagaacagcctccggtgctgtacatgaacagcgctggatatcgagttgtgaaaattaagctgaaccctagggtcgtgtacctcgacactcgtttccaccaactgttggggaaaagcagctatggcgagagctggaacctcagcctggacaac

SEQ ID NO: 328313 - DNA, 133 bp, Zea mays
  unsure (1)..(133): unsure at all n locations
acggntcgagatagctcatgttcgatttcagctcgacttctcctggatcagacctatgagctgggaatgcacctacctctgcatgatagctaaccgagacgcacgacgtatcattatatggactctggcatcc

SEQ ID NO: 328314 - DNA, 299 bp, Zea mays
aaaaaaaaaaaaaaaaataaaaaaaaaaaataaaaaaaaaaataaaaaaaaaaaaaaagggggaataaaaaaaaaaaaaaaaaaaaaaaaaaaaaaaaaaaaaaaaaaaaaaaaaaaaaaataaaaaaaaaaaaggggcggcctttttaaaggatccaacttaacttactcatccttccaactataaaatttttttttaggtccccttaaattaaataaattgtccgttgttttaaaacttttgcaactggaaaaaccctggctttccccaatttaataaccttgtataaaatcccctt

SEQ ID NO: 328315 - DNA, 319 bp, Zea mays
gactcatcctttggaagaagagatgctagagttttacatgatcaagtagtgatatacgcgaccctacacatgtgagttttcacttgtattgactaagggaatgcttagacttctgtccccttgtcaatattgggttgttgaatacttagccatttggatgtagaaccccaggaaatggtgcagtatgcgatttggagtgctggcagcttgtaaaacaaatctgtgctagcagtccaccatttgtttacatctccaaatcttgtttgaaacttgcatgtgaacgcaggccttcgtctcaaaatataatttgttttagatt

SEQ ID NO: 328316 - DNA, 202 bp, Zea mays
tgcatgcgtacgttcacgcattcgactgcgatcgcgctgctgctgctcatgatgcgtacgagggttgataagttattgagacaagctgctggcataatctggttggctgatgactatcttatggaccctattgattatcccatggaggggttatccaaccttggaaccttaccttaaccgttccattgattcttaccctttc

SEQ ID NO: 328317 - DNA, 475 bp, Zea mays
gctaaatcagtaagtgtcgctaaactttttggctaatgtcttagagctgctcttacatttgtaatcgagaggtgcatcgtgtgtggtttccaggatggggctggggacctggactactcggcgtcgtgctcggcgtcggcgtcgggaggctccacctccaacttctccgggccgtccagcggcagcggcagcgggtctgccaacaaggtggactctccgattctcggcctcgtcaccgaggccgacagcatcacaagaacagcccggccgcagcacagccatacggcaacgggacaataacagtgtgacactcacgaatatacttgctcgcccgtcttacaccattgtttgacagtttttacaatgcttaactttttaggtgagtggttggttgctgggaatgtacagtatttgggtcaaaattcaaaatgtttcagaggcttaatccaatgaaacaggccctggttttttaaaa

SEQ ID NO: 328318 - DNA, 166 bp, Zea mays
gctgtatcaatatgtgtctctagcctttttggctaacgtcttagagctgctcttacattgggtgtctacaggtgcatctggtggggtttccacgatcgatctgtctacctggactacttgagtgtccactctgctgtctgcgtctgtaggctccacctccaacttc

SEQ ID NO: 328319 - DNA, 71 bp, Zea mays
aaaaaaaaaaaaaaaaataaaaaaaaaaataaaataaaaaaaaataaaaaaaaaaaagaaggaaaaataaa

SEQ ID NO: 328320 - DNA, 198 bp, Zea mays
cccacgcgtccgcccacgcgtccttaaaaaaaaaaaaaaaaaaaaaaaaaaaaaaaaaaaaggaaaaaaaaaaaaaaaaaaaaaaaaaaaaaaaaaaaaaaaaaaaagaaaaaaaaaaaaaaaagaaaacaaaaaatggaggagaaaggttatggaataacaaaccaaaaaccaatgaccagaatactatacttaaaa

SEQ ID NO: 328321 - DNA, 361 bp, Zea mays
cccacgcgtccgttttttttttgtcgttctctgcttttcttcaggagtagagaatcaaagtgtgttacagcgtcgagttgcgtatctatacatatttgcagagcgagaagtcatcatttgtaaactcctcgatacaacaaagaacgtaaggtgaaggcgtgaagctatataggggaaggggaacccaaggaatggcgatacaacacataaggaacataaaaggcaccttcttgatgctaagttgaaaagaggagctttaggcatatctgatttgaatgttgacgaccgaactgttaacctagctgatataactaacagcacataggagaacaaaggtggaaagaatgctgctctagttgag

SEQ ID NO: 328322 - DNA, 110 bp, Zea mays
aaaaaaaaaaaaaaaaaaaaaaaaaaaaattaaaaaaaaaaaaaaaaaaaaaaaaaaaaaagaagaaaaaaaaaaaaaaaaaaaaaaaaaaaaaaaaaaaaaaaaaaaaa

SEQ ID NO: 328323 - DNA, 256 bp, Zea mays
cacacacacaaccagatctcccccaaatccacccgtcggcacctccgcttcaagatgcagatctttgtgaaaaccctgaccggcaagactatcaccctcgaggtggagtcgtctgacaccattgacaacgttaaggccaagatccaggacaaggagggcattcccccagaccagcagcggctcatcttcgctggcaaacagcttgaggaccggcgcacgcttgctgactacaacattcagaaggagagcacccttc

SEQ ID NO: 328324 - DNA, 464 bp, Zea mays
  unsure (1)..(464): unsure at all n locations
tgatgcattgctgggctcttttttgtgctcaatgatggctataactggttttatttttccaatcatcatcaataaccacaaaatccttttaatcccaaaccaggtgggggtaggctgaattggaacccaaccggagccacaaaataaatggtatgcatgtggatggctggtttttcattggctctattaaagcctaatctttggacatattctatcctttcatgtcttcttttattatcttttcccatgttaactntggtctttctctgcctctcttcctattactatcacattttaggatcccattatgcactggtgcctctggaggtctccattgacatgtncaaaccatctcaatctgtgttggacaaacttctttttttaatcatgtataagttaaagaaatatgctatgacaaacagacaaatgcactggcatactaatattcatgggttagatgtttg

SEQ ID NO: 328325 - DNA, 298 bp, Zea mays
cccacgcgtccgcccacgcgtccgctcagcataactaaacaccagcaaaaaaaatgcaattcacatcattgatttcagtgatctgtccattggggatcctatatgtgacataattccgctgcacttggatattttccggggtgatagtgaccttctcaaggaatttctacggagctatcaacttccccttctgaggggggaatcaaccaccgatgtctacagatcagtgcgaaactcgaagttcagcaaggcatcatatcgcgcgatgtgctactgtatattacacgaagacaacgtc

SEQ ID NO: 328326 - DNA, 352 bp, Zea mays
gcttctcaggaagacgatgaagattaagaacatccactacaatctgacggaagatcaatggaaggggaagaatctgtcccaggtggtgttggcgggtcagctactgctgatgcattccatttggattaggatctgctactttaggtcttgtaagtttgattagctactgctgttcagattttagaggtgctattgcttctgctgtatgatgtttgagtttgatattcatatttcagacctgatgttgcttatatattgtctaatatctttaaaatctgattcagagaatcatatatattatatatcaagtatattatgtagtatataactatatactgtagtgtatatatat

SEQ ID NO: 328327 - DNA, 304 bp, Zea mays
gacagcggctacaacagcaagtccggcactgatgactacggccgtggcgaaggtggctacaacaagtcgggcggcgatgacgactacggccgcagcggcggcgatgggtacggcaggtccggcggcgacgactacggccgtggcaccggcggcggtggctacaacaagtccggcggcggagacgactacggccgcagcggcggcgacgactacggccgtggcaccggcggcggcgggtacaacaagttcggagacgacggctacgacagcgggtacaacagatcgggcaccaccaacgacgacg

SEQ ID NO: 328328 - DNA, 333 bp, Zea mays
gtgggttggcttctccttcccctccggttcgggttcgggttcgtgaggttctccggggtgcggtttcgtgggtgagcggatcgagatggcggcgtcggatgttgagtaccgctgcttcgtcggcggcctcgcctgggccacggacgaccactccctccacaacgccttcagcacctacggcgaggtcctcgagtccaagatcatcctcgatcgggagacgcagaggtcccgcggcttcggcttcgtcaccttcttcacggaggaggcgatgcggaacgccatcgagggcatgaacggcaaggagctggactgccgcaacatcaccgtcaacga

SEQ ID NO: 328329 - DNA, 230 bp, Zea mays
gttctcgacagaacggaaagctattggtttttgtgcggatagaatttaagccttttttacgtggtgcacgttgtgaagtaattgctttgagtctcttgtgagctggtttaaccgttaaaaaaaaaagactaatacataaaaaaaagaaataaaaatgaaataaaaaactggcttgaaagcatattaaagctaaaaggattagtaaactgaaagagagcgtttacagaact

SEQ ID NO: 328330 - DNA, 218 bp, Zea mays
gccacacgtccgtagctaagctctttgcttacaatcagtgaaatccatcatgattgatctggggacatgtgtgtggaaggagttgttcttactatggaggatgctggccgtatggtgcgaagtcgcttatgctacgactctgcaatgactcatggatatgtgagtactgccatggatgatatttgatgcctctgaatgacaagatctgattattgact

SEQ ID NO: 328331 - DNA, 357 bp, Zea mays
cccacgcgtccgcccacgcgttcgcccacgcgtccgcccacgcgtccgcccacgcgtccgcggacgcgtggggaagaacaatcagacaaaatgatccagtcattgacaaccatcaacaaattctttttctggaaccgttgtagtgtacaagagatcaagctttggttttgtacataatggtgccctggttagacctatttcctgactgtagttattggcttgaagtctagtttggggaaggttcttgttgccagctaccttgcagttgcggtatttgagcagatagtgtattctaactatgcatactaatagatgaccggcttcggtgtttttggatattttatggtttggatcaat

SEQ ID NO: 328332 - DNA, 127 bp, Zea mays
ctgaactctatttctactgaagcagagcctgtgttgtatgtgtgttgggagaatgtgatatgtgatgtcaagctcaaacttcttctcatcctttcatgtctttaatatatatatatatatatttttt

SEQ ID NO: 328333 - DNA, 74 bp, Zea mays
cgacccacgcgtccgcccacgcgtccgcccacgcgtccgcccacgcgtccgggcgtggtatcgctttcgcgtct

SEQ ID NO: 328334 - DNA, 423 bp, Zea mays
cccacgcgtacggattgaggaatccttacttgcatctctagaaaagaggaagaccggacgtgagccaccctatggctcagactctaagaagctcaagattagaatccattgcggaagtggagcgcaaggcgtctgatctgagtgctggtgtataccattgtgctgtgccactgttgataatgtacatgtatgggctgtttgtttctccggagatctcgctgcggcgtctactgcaacaagattatggcgacacggccagaaacaacatgatgcgaaacctgaagccgactctaatagcactgtactcaatgctcgatgcacggcatgctattctattacagggccatatgacctacggaggagcgacaactggtgaatctagtggaccgagtgtatgcgctggatgcgggcgacgaggcacgt

SEQ ID NO: 328335 - DNA, 331 bp, Zea mays
gccacgcgtacgagccaagctccacttcaccgacacgctgcgctcgagcccgcccgagccgcccgctagatccatggcgcggctgctcccgtcggccgcggcagcggtcatcgtggccgacgtcatgatggcggacctgccgaacgcccaggcggcgtctgactcgccggctgcagacgacgcgccgtcgggcacgaaccacaccgttggccgcggatacgagcggttattggacggccacagcaacgccttgttcgaggactactgcgactggtacatccgcgagaccttgtacctcggggacaacctcattatcgagacgaacgacaac

SEQ ID NO: 328336 - DNA, 276 bp, Zea mays
agagaaggaaaaatatccccaaaccctagctcccgatctcgatggcgaaccctcgcgtctgtcttcgacatgaccgtcggcggcgccccggcgggccggatcgtgatggagctgtacgccaacgaggtgcccaagaccgcggagaacttgcgcgcgctgtgcacgggcgagaagggcgtgggcaagtccgggagccgctccactacaagggctgcaccttgcaccgcgtcatccccgagttcatgtgccagggcggcgactttacccgcggcaacg

SEQ ID NO: 328337 - DNA, 427 bp, Zea mays
  unsure (1)..(427): unsure at all n locations
atccgtgtcgcagtgccacccatcgatccacaggtcgacgccggtgtgtcttgccacctttgccacaaatcaatctgcaggtctgtgttcttatcttcccttcttgcttctcaatctgttgactgccacaactncggtcttgttagatcccatggcagcgaccagtgagttcaaatgtttctgcttctacatctactgangccagtggcagcgaagactggctggagggaatggtcacagaatatcttgttgagacatttgctgattacttcggtgacgttaaaatgtatattgaagaaagaccatttcgaagatttgtggaagcttgcatagaagaaacaatcgtggtctatgttgatcatctnctttcccagaaagttgaaagtagaatgcggattctggcagatatgagagatctagcttcaac

SEQ ID NO: 328338 - DNA, 416 bp, Zea mays
tctagatctgtcagctccttccacaaatagcctaatgacatcatttcaacacaatcgggataggcatcggcctgtgtgcatggaggaactccataaatcgctttccatcgtcttattcatcacttgtatagctggagctgtagcataccctgatggttctgaattattgtcccataaggcaatcccacagccgcaggattttccaagtgagcagctatatcgctcctacctggtaatccagcgcttcaagagcacaattaccagcgaccccaagaacgttaccgcattctggatcggcaatgatatctgcggagaagcgacctacgtgggtttctactgcggagtactgcctgggcgaagtaacaagctgacagtcacagcggtcattttgaatggatatagactacatgcaccga

SEQ ID NO: 328339 - DNA, 303 bp, Zea mays
cccacgcgtccggtgggcctcagcgacgacagctatgcgagggggccgtatgcagcggcgcatccactgcagttgagagggtgcgcgaagaaggcgatctctccccaagacgcggctgacgacatagtgcatctcggcggccagccgtggaggcggggtgctcgtcagactgtgttccatcttatgataaaccctgacgatgtcgaggaatgtggaggcctcgttgctgatcgaggagccgccgtcgcccgaggtcggagagggagtggatggtgatgaaggggacgtcgtgctggtgagcga

SEQ ID NO: 328340 - DNA, 371 bp, Zea mays
cccacgcgtccgcgacgaccgcgtcctctgctgcggcctcgacctgctccacttcttcacgcgcgactcctccttccagccggcggaccgcgccgccgtctcctcctcgtccccgctctccgccggcgcgagcaggccgtcgtgcacgcgccggagcctcgacgccgtccaggccccgcgctggatcgagttctggagcgacgccgcgtccgaccgccgccgccgcgactcctcgtcctcggaagcctccaccgcctcctcatcctcctcgtcgtcgtcgtcaggatgcccatcgccaccccggcggccaaccccgcggtgggtcgacagctacctcgacgagctggggtcaatgctgaaggaagggggct

SEQ ID NO: 328341 - DNA, 319 bp, Zea mays
ccctgctccattctcagccgccgccaatcccttcccgtgctccgcaaccgctgagtgagaagaagagatggccggcaagggcgatggcccggctatcggcatcgatctcggcacgacgtactcttgcgtcggcgtgtggcagcacgaccgcgtcgagatcattgccaacgaccagggtaaccgcaccacgccctcgtacgtcgccttcaccgactccgagcgcctcatcggagatgcggccaagaaccaggtcggcatgaaccccatcaacaccgtctttgatgccaagcgtctcatcggcaggaagttcaatgatgcg

SEQ ID NO: 328342 - DNA, 166 bp, Zea mays
ccagggtcaagctggccagcctcgtcccccgtccaaaatctgacgaataatggtgatgcaggaccttaattggcctttaatttggcctatcaaggatgatgaagatgaaacttcttacaaaactgacaccaccgaagtttaattattttgaggttcttacactaca

SEQ ID NO: 328343 - DNA, 260 bp, Zea mays
ggggatgggcggcagcaccagcctgggaccggcggacaacaccctggacgccgccgcggggggcctgctccccagcgccgtatccctcgccgccgccgccgccagcctctacttgctcgccctgctgcagcattgattacgtgctctagctgctagctatgcggtccgtgaaaaagaaagggggcacagcggatagtactggagaatgtgaatcggttcggttggctgcaggacggatccgatttcacttcacccatctt

SEQ ID NO: 328344 - DNA, 247 bp, Zea mays
actaaccaagtgctgcatcactataaacattaaaaaattaggacactatctttctcactagtacatttggatactattaccccacaccatcctctactattacacctccatattacgatacatcatacaaccatctatacaagacactccttttcgttccacatcctacaataacatcctatccctatctttctacatccccctctaactctctctcttcaacctcttctccatcatgcttacccaa

SEQ ID NO: 328345 - DNA, 250 bp, Zea mays
acttggcgtatccttgcctgacatgtctagtctgactatcaatgggaaaaccttacttagagcttgcagagcacttgattttacagcaccaagtgcatcatgcacgaccactagatttctagctgctctatcaatgggcaaacacttgatctctgaagagcactcgatctgtacggcatggcacattggagtacaacattgaaatgctctgaaacaatgatggtccttcagaaataactagcaccgatgg

SEQ ID NO: 328346 - DNA, 413 bp, Zea mays
aaaaaatcttgacactttatagtacagtcaacagtcattataaagggaataagcatacaagccttagtcatcaaacctatttctttatttcgtagctgcatccaccaacttatagtgaaatatcttaatccaccaaagatatttttccttattggtccacatatgaacatagcagtggcatccatatacatttccaacatttgtgtcactgaaattcataaataagaatataaagaggaaatacaatatttaccaaagaagagtttgttgtcacttttagactggagtatccgagcttgcagggtcttgttctgaaaaaattataactagcttatcatgatccaaaactgtagttttaaagtagactaaataaaaccaagattaatttgagaaacgacacaaaacaaattttg

SEQ ID NO: 328347 - DNA, 423 bp, Zea mays
caagttgtagttggtcctcgctagttgcggccatttgcgagagttgccagactccctgacgacacgctcaatcacgacatcccatggacaacgtgtgtcatgggttcgcgagtggcaggcgttgtgggtccatgcgacacgacaacgaacggcttggcgatggtgtgcgtggtagggtcttgtcatcggagccatcacctttgctagatgtacccgtcttgtctgtgccggtggcgtccggctatggctctgacttggtgacaccatggtggcgcaaggtcctcacatacagctccaatgcgagttgttaggcctcgacccgacgttatatgcaggcggcgaggacgagagctcaatgaatagcgagttcaacgccacaccaacacaagctagaacacttggaacacgaacgggtttggtgct

SEQ ID NO: 328348 - DNA, 263 bp, Zea mays
cccacgcgtccggttctagatcgcgagcggccgccctttttttttttttttttttcagaaccagttaatccgttcacataatcacatgaaaactagtgtcatcaagaaatgaagagaacacatattagcatactgatgatgcgaaactctccagtttccacgccttgatgaaattgtacatctctcaagaccagatatagatatggttcctgtcggaggtagcaagagctcctagtccgcaccatgcacttgccaagacgggt

SEQ ID NO: 328349 - DNA, 293 bp, Zea mays
gcgagaggaggatggcagccgaacaggatcatggtagtggtggttaagcatcagcatcggcgacgaggacgacgctgagaggcttctccgttcttgacggtactgtcaccgatgcggagccatcacaatgggacctctgtctccgctcaggggtatcccttcgccagcattctacaattctgctgcgtcactgctgatgctgtccaagtcgctcttcctgtactgctgaacacagacctatacttgatcggatacatgctctctgagggatttttcattagacaggccctgtg

SEQ ID NO: 328350 - DNA, 402 bp, Zea mays
ccggcccaaccctctcgttcgccaaggcttaacatgacatggccccttgctttaaaatctcatttctcaaaatgactctggggcctctttttcaaaaacttttccctccttcttcctactgtcaccgttccgcaacaagcacaaagtgattgttctgtgagcacaaggtaattaatttgggaagagaagaatattatggcgcaacacaattcatacttttgggttttcccttttagaatatatttacacacacttttccttaattccttccttcctattttagatgaccttgcctttaaccacccattttaaagcttttttttgcccaatgattggtggttggccctttgggtttggaccctaactatttggggtgatatatattgggaaactttttggtcc

SEQ ID NO: 328351 - DNA, 426 bp, Zea mays
gttcagtagtgtgctatgacaatgagatgtttagcgtgaaagtgctcgcgtcaggcacttgggcggatgtcacccgcgtgctcatgtgcctctacgagaaggaggcgcactaacatcatgatccgcggcgacgcctacctcggcaccaaacgcatgccccagtacctcaagctgcagatcgaaggcgaggcgctcacctactatgacgagatcctcaccatatccgactccacggggattctgcgccacatgtcccacacgtacgcgaatcagggcaacctgtacctgattggcacgggcgcgctggaccgggcgtacatcgagcagtagctgcagactgaggcgcacagcttctacgcacccaacgccgacatggtctacagactcgacttcctgcctgctaccctgcccatgcagaacgacaac

SEQ ID NO: 328352 - DNA, 171 bp, Zea mays
ccaacactgacatcaccggtgggggctggggaggagagggagagccttctttaagatcagtagatcaccacaccctcacccctgctcattgcccccctctcacacacgcacacacactctctctctcccattgtgtcactgtaactagcaatggagctctaaaaatttggg

SEQ ID NO: 328353 - DNA, 381 bp, Zea mays
cccacgcgtccgctcatcgcatcgcacgcatcgcacagacactccactgcacgcgcagcagtggcgacgaccacctcgccgccgctgcagctcgccaccgcctcccgcccgcacgcctccgcctccggcggtggcggggttctcctcgcgggcggttccggaggtggggtcgcgccgggtcggggtcggggtcgagggcgattgcagcggcgggtgtcggcgcgcagcgtggcgagcgatcgggacgtgcaaggccccgtctcgcccgcggaagggcttccaaatgtgctaaactccatcggctcatctgccattgcatcaaacatcaagcaccatgcagagttcgctcccttggtctctccagatcacttttctcccctg

SEQ ID NO: 328354 - DNA, 254 bp, Zea mays
  unsure (1)..(254): unsure at all n locations
accacgcgtccgagcggccacccgttcctcttcctcgtacgactacaacgaccgccatccgtcgccatggctggcctcaccaccacgctgctgctcctgctgctgcgctccgccgcgctcgcgtccggcgccacggcgggcgacgacagcggattcacgaccttcaaggtgttcttccacgacatcgtggcggggacgagcccgacggccatccgcatcgcgcagggggcggcgtncagcaccttgtacaccag

SEQ ID NO: 328355 - DNA, 289 bp, Zea mays
ctcctgtccctctccgcatccaagggttgtagccatccgcattcaccggaccccaccggggatggccgtttgagtgagttcccgtaccaaggttcttcggtcttggaagcctaagggacaccgggtcggaatgaggggccgccattgcgagcgacgtgcccattgacccggagctcgagcagatcgactgcgagatccacgatatctttcgggcccttcaaaatggatttcaaaagattgattagatttaagattcaaataggcaagcttagcaattggaagatcttac

SEQ ID NO: 328356 - DNA, 114 bp, Zea mays
cgcagagaccgggagccagatccgtttgcgaaagccgaggctgaagaaattggtttcgacgggcaggagaatactggcattaattttgatggctattaagacattcctgtttag

SEQ ID NO: 328357 - DNA, 160 bp, Zea mays
cccacgcgtccgcccacgcgtccgtgcagatccgtctttgggttgtgatccatttaacatggctgcctgcgttctggtgccagcatctgggggtgttggattactgtatcgttatttggttccggtttgttggccggatttttacaattgcttatctggt

SEQ ID NO: 328358 - DNA, 333 bp, Zea mays
atttaattgcaatttcgtggtcgaacaagaatattttatgataaccaattaatgtattatgcgacaagtatccgatatccgatcaaataatatccgtatccgtcacttatccgcccggataaatatccggtccctgtatccgtatccgtcccgtttctaactatccgtatccgatcccgaatccgttttaaatacattagggtaggatacgagatgagctactatccgtcccgtatccgccgttttcacccctacgattaatgatgttggcgtaggagtagtttatttattaaacgtgcagtgcagctatgggcgctcgggcgcctttcgccg

SEQ ID NO: 328359 - DNA, 289 bp, Zea mays
tgaattatcacgcgatcgtccaatccaacattttgaactgctacccctataaaggctcccttctatccttcgcctgccttctatgttctaactcttatatactgatccctaaattcaatctactgtccttcaatctacaatttcgtaactatgccaaccacattgtcttcaaacaaaaccgctttaatcaacattcaattgaccacatcttacatactaacctatagtcccatttccaacgatctatataacattttcacaaacttaattgctaatactactcccccta

SEQ ID NO: 328360 - DNA, 257 bp, Zea mays
cgagatgacccagcatcacttgtacattttcaactatctcacaaaaaactgtcaacccgaatcatttcatctgctgcttgggctctaacaatcatgaactgatcagcaattactcactaaaataactcaatcacttctaacatacctatgacacagacattgtcttcatcaattaccgctgaaatcacgtatgaatgtaccatgtatttacatacaaagttagtagttttatttttcaataatttagataatttttt

SEQ ID NO: 328361 - DNA, 454 bp, Zea mays
  unsure (1)..(454): unsure at all n locations
cggacgcgtgggcgggctcgcctcggccgctctggcgcttgtgcggtgggtgaagcgcgggtgctggtgcgggaagcctcgccagacctagcgctgccgactgccgagctgggtgtgggcgcgaggagtcgacgggaagacaagggtgaggatcagaaggatacggtgccactgcttatgtgacattcaaggaacgctttgccttggaaactgcagtattgctcagtggggctactattgtggatcagccagtatgcataacctattgnggacaacctgagggaacttttaatttctgggacaggccaacttgngaggttgaagaggaaatcgaatacaggaactaccaaacatgccagtacaacactactncgcagggaagctttacagtggctcaagatatcatgaggacgatgctagaaaaggggtacgtgctcagcaaggatgctttggc

SEQ ID NO: 328362 - DNA, 253 bp, Zea mays
cccacgcgtccgcccacgcgtccgcgacgaggagcttttagtccagacaacaccctactatatggactgaggataaatgctgattctaaaatatgtaggtgcatttcagcgtagtgtactatacgaacgaattaggaactagctgaaggctttacgtgtactcttatagtcttatttctagtagggcaggagttggtgacttaaaaaaaaaaaaaaaaaaaaaaaaaaaaaaaaaaaaaaaaaaaaaagaaaa

SEQ ID NO: 328363 - DNA, 288 bp, Zea mays
caagagctggtactcatggatactttcttctatgacaagctgtgtgtacatgtgtgaattgattatgatgtgccggcaattgtgcttatcatacttaagtgaatagatagagaaaccgaccacacggaggaaaagtacatacctaaggcacttaattgcaatggcatcgtactatttactattattctgtgacaagctgcacgaacatgtttgttctcattacgatgagccccctatagtttatgaactacaacttgtacacagatgatgatatgccctacatacata

SEQ ID NO: 328364 - DNA, 348 bp, Zea mays
gtccctccttcccgtctatgtgtttactgcaccaccgtggagcgaacattcatggcatctggctccattccttcctttgcttataagtgaccattatttatcctctactagtctctttcatgctacatcgaatctaaattccacttcacatttgcacattcatgctctacttctattacaacccgtatgatccatccattacactactatgttctttactgcatctactaatcttcatccgacttgacgcctaaacaaaatcggaccacctgagtgaacttttaaaattatttaccagacaacttgcaaagctaaacaagcactattctacacgaactaccaaacatt

SEQ ID NO: 328365 - DNA, 343 bp, Zea mays
tcgacccacgcgtccgtggcttctcctccccctccggttcgggttcgggttcgtgaggttctccggggttcggtttcgtgggtgagcggatcgagatggcggcgtcggatgttgagtaccgctgcttcgtcggcggcctcgcctgggccacggacgaccactccctccacaacgccttcagcacctacggcgaggtcctcgagtccaagatcatcctcgatcgggagacgcagaagtcccgcggcttcggcttcgtcaccttctccacggacgaagcgatgcggaacgccatccagggcatgaacggcaaggagctggacggccgcaacatcaccgtcaacga

SEQ ID NO: 328366 - DNA, 71 bp, Zea mays
attcccggtcgacccaccgtcgcccacgcgtcggagatcccctctccaatttctataaatcatatacctgg

SEQ ID NO: 328367 - DNA, 54 bp, Zea mays; identical to SEQ ID NO: 96262

SEQ ID NO: 328368 - DNA, 315 bp, Zea mays
ctgtacgcgtgggttcggaccaacaacaacaacaccggcattcgacgcgacgacggcgaaaagcgaaccgcaaaggcccggctcccccgtctaacgggggtaccggcaagcaacggcaacccacccgtaacggcccccccccctcggaccccaatccgtccggcggacttccgcccagtcccggtacggggggggccggggacccctacggcacaggggccaaggctacacgcccccgaccgcctactgtgcccggggcgggtacggcaacgtcgtgcacgtcgcgcacgaggtcggcgacgagagggcttacta

SEQ ID NO: 328369 - DNA, 162 bp, Zea mays
gcaacgcaactgcaggtgactgatacaacttcatcgacattagataaactatggtgtacaggaacggtaaagcgagccttgagcctactaaacaccataccgcaagacaccaccatcagaccagtacgcgccgaccaacgtgtgctcctataccgtacatca

SEQ ID NO: 328370 - DNA, 234 bp, Zea mays
gaactacccactcgacccactcatccactcctcatttcatatacaacatttcaaaataggagatcatctccaaaactacgatacttgtgtgcttcatatgctcaccatcctgtccaactattacatctaaatccaaccacctgatctcactcatattcatttaacatcatgaccatcatccactacctcaacaactactacaatcctcttttctacttcaatcacaattatact

SEQ ID NO: 328371 - DNA, 264 bp, Zea mays
gccagcatggaacccctgaagtccccagaactaagctattggaacgacttgttattccatggcatccaaagtccaaatgttagtttgctaagctccataatgctgtggcatcgtattgcgaaaacattgattgggagaacattagtacatgaatacttgatcttcataggtcagctttcatgcatgtgcacacatggaaaatacatagtcttagggctagcttatttatgcggttatgtaccacgatgatgttgaatcattagt

SEQ ID NO: 328372 - DNA, 352 bp, Zea mays
cggacgcgtgggcggacgcgtgggttctgataccatttatggtctggaagatgatgtgcggaatttgtttaggggatgctgtgtacagtgtactgtcttttaccagtcacggagtgtttttgttgtgttgtcacagaactacatacgatctggccagttgatctcttagttccattgggcatggttggtgttcggtaaatagaaaaggacatcactgtccatatacagcaaatgtgcactaattacgctttaccgaagtattgatggaaatctaatcactttctaaaggtcctcgtatgtgcaagattgcttattattattacttaccacgactttattatatgatcacagt

SEQ ID NO: 328373 - DNA, 109 bp, Zea mays
gccgccgccgctgcagtgtccatagccaccgcaggagactgagatggggggttttgtcaagacccacaagagcaatgcgtacttcaagcgtttccaggtgaagttcaag

SEQ ID NO: 328374 - DNA, 240 bp, Zea mays
cccacgcgtccgcccacgcgttcgaaaggtagcaccggatcggagcaggcgatacggctgcgacgacaatggctgcaacaagggtttccccggttcttctcttgctgctcaccgtccagctcagcttgctcttccgtctacctgactcccgcttcaccctctccttcacccttgcctcggaaccagagcatcaaaacgccaagcatcatcgccagcccgagctgctggtgcagtcaactt

SEQ ID NO: 328375 - DNA, 214 bp, Zea mays
ctagttctagatcgcgagcggccttatatctcaccatggttttactttctgcgcatagacctgcaacttctggaaataattgttgaaatttactctgcaaaaaaaaaaaaaaaaaaaaaaaaaaaaaaaaaaaaaaaaaaaaaaaaaaaaaaaaaaagaaaaacaaaacaaaaaaaaaaatagaacagaaactgaacgatgctagaaaaaataa

SEQ ID NO: 328376 - DNA, 366 bp, Zea mays
tcgcaccaatttgtttgactaaattttaagaataatatacattcaatacatccttcaaaatttgccaagtctgttaaaaaaactatgtaaaagtctgaaatgaatttgtggtatgtttgattatatttgtcagtgtagttaaagttactagaagatttgctcttcacatccttgattggctagtggtttatttaccagtttgtgacattcaaagattcgtttctgatcatgaaggttatttgtgcattaagaatcttctaaaacttaatacattgattggttgatgagtaactgattcgcaatgcaacgggcacaagaccttttttttaaaaaaggtaacttatgctatcttatttggttaaaaat

SEQ ID NO: 328377 - DNA, 287 bp, Zea mays
aattacctactcgacccactctttctcaccagatctgcttgactaacttttaagaattttatacattcaatacatccttcgaaattttgcgagtttgttaccaaaactacttcaaactctaatatgaatctacgctatattcaataatatttcactctctcaattaatgtactaccaaatatcattataagatcctcctaatgttagaagataccagtctaacctcttgcgttgctcatctcacaattacccactaaagggagctgtacattcaaagtgaagctcta

SEQ ID NO: 328378 - DNA, 218 bp, Zea mays
gaacgacccacgcgtccgagcgaacagagcactgaagcagagcgagcgagctgtcttgccaaactctcacggccgacggcacaatggcgagctatatagcgctgttactgcccctgctactgctggccttgccggtggccacgcgcctggcgtacgccatctgctcattcgagaagatcccggcgatgcgtgcgtacacttcatacagaggacctgcc

SEQ ID NO: 328379 - DNA, 260 bp, Zea mays
cacgcttgtaccaaactatcgagagcatccaatctagatctacactatatgcaggtaacgtgtgatgtcttgatgattatcttaccttcattgaatctgtattgatagatgctgatctgcgatcgaagccaaaggatgtaaatgtgtacctaggattccatgtgaaggttaacgtgcctgatatgtaacctgtaaaaacgtactatcaaatatatacctaatcaggacaaatacctgaaaacaaacaaaaacatggcata

SEQ ID NO: 328380 - DNA, 180 bp, Zea mays
cccacgcgttcgcccactcgtcctaaaaaataaaaaataaaaaaaaaaaaataaaaaaatttgaaaaaaaaaaaaaaaaaataaatatacacattactgaaataaaaaattaatagtaaaaattatattcaatatcaaaatttatggtctgacaaattacattttaagcttttcctattg

SEQ ID NO: 328381 - DNA, 222 bp, Zea mays
ggaaaagaaaagagggctaaaaacctagcattcccctgctcgccgatgctgtgggacgatgcaaccatgggcgcagggggcaccagccacttatgataccccgagtcacagcactagggctactgaagccgatgtgagtgcaaggcgatgcagacgcatacttagaaccagggtattggaccggccgcctctgagatcaaagttgaatgaggactagatgcg

SEQ ID NO: 328382 - DNA, 250 bp, Zea mays
agccaagtttcgcgtgcttgtgccctcactcgatgcagagtatgctgctcggattcagtgggcgctgagagggtcccaggcatacaacagttagagcgttttaacatgttgcgtgtgttgccagactgatgcattgcggtttgttttcgatagtgagttatatgtgcggaggcgcagtcctgtataactgagacatgatgacctaacaagcagctcgtatctgttttttatacataatgcctactatgga

SEQ ID NO: 328383 - DNA, 274 bp, Zea mays
acggggtctggctcccgctttataactaacgtctttagtttcagggcaccgcggcacggacgccggctgggtcgccgtaggcaccgacttgggcggaggctccggggctgggaacgagggcagcggcccggccatcatcctcggcagcttccagcagcagaactacctggtggagtacgacctggagaaggagaggctggggttccgacggcagtcatgcacgtcgtcgccgtcgtgagggctcacgacgtcagcatggcggggatcggagtgg

SEQ ID NO: 328384 - DNA, 118 bp, Zea mays
agcggtttgattctgttgggtgcttttctttctgtttttttaggatgcaaagaactcggattcacaaactttgttggcttcactgctgatttttttaataattaggcatttcagtggt

SEQ ID NO: 328385 - DNA, 142 bp, Zea mays
cccacgcgtccgcccacgcgtccggttagttacctggtgctaacgaagtatactcacggggaggggctaattttacctccgtcacaagcatttattaaaacatcattctaaaattcaaacccatgaacactcagacctaacc

SEQ ID NO: 328386 - DNA, 240 bp, Zea mays
accacgcgtacgccctttcgtgcgaccatttgtccttttacacgatgcaaagaagatgggtgtaccttctatggccacatctctgatgtcactcataagagtatggcccttagatgctgacgaactttagctctataatccataaaacatggcctaacaccctaaacgaatcagcctgacgaaccacaagcatctgacctgctacgtatccgatccaggcccctaagtgcaactcactgt

SEQ ID NO: 328387 - DNA, 361 bp, Zea mays
acgaataatctcttcttcacctcactaacatcagctatcaactctttctctcctgcaataatggccgctcgctcctcctcctcccagccgcagctggtcgcggcggcggcggtcctggcagcggcgctgctgctgctggcggcgggggccgggacggcgtcggcggcggtgagctgcggcgaggtgacgtcgtcggtggcgccgtgcctcgggtacgcgatgggcagcgcggcgtcgccctccgcggcgtgctgcagcggggtgcgctcgctcaacagccgcgcgtcgtcggcggcggaccggcaggccacctgcaactgcctcaagagcatgactggccggctcggcggcggcgtcagca

SEQ ID NO: 328388 - DNA, 373 bp, Zea mays
gaaccttcatagtcatagactcataggtactaatgttacctgtctggacagtggatggggaccatagatcctttgccactcattcttagttataactaaaaatgcttcaaattaaatcaaatcgtcttccatttttttctctctctggtattaattcaagcaactgtataatgcttttgcctggtagatctaattaaaccaaatctctgcttataattctctgattgggatcttaacttacaatcaactaacctagacttgtcagctccagttcatgctgctttccattccatcagtaatgtagcatgcatcagtactgtaatcaatcgatggacgaataattgtgcttcattgttgtagtgactaatcaaat

SEQ ID NO: 328389 - DNA, 353 bp, Zea mays
gccacgcgtgctgcctgcttgatgtgcgatttggccagcaaccaatggcaggagctgcccaagtacgtcaatgccgacggcgaggccagcgagttactgggcggcttgtccttacagcccacagtggaggtcaccggataagcgcttatggctatagcgttactaccattaattgcttcatacattaaggcgcattaattacgggtgggatactactccgagtgaatgatttcttcgagtgtgtgagcatgtacttactgctgtcatgtcatatgacattgacattattggtcttgaataaaatcacagatactgtgcgcatgactactgcactgaactggcggtcgctctac

SEQ ID NO: 328390 - DNA, 371 bp, Zea mays
  unsure (1)..(371): unsure at all n locations
ctgtcacacacacacacacagacaagtggtttccaaagccaagtgtgtgtactagcaaccagctagctcgggcggcagcaggcagccatcatgtcggaggagaagcaccaccacttcttcaaccaccacaagaaggacgaggagcagcccgccggcgagtacgggtactccgagaccgaggtggtcaccgccaccggcgagggcgagtacgagaggtacaagaaggaggagaaggagcacaagcacaagcagcacctcggcgaggccggcgccatcgccgncggcgccttcgcactctacgagaagcacgaggcgaagaaggaccccgagcacgcgcacaggcacaagatcacggaggaggtcgctgccgc

SEQ ID NO: 328391 - DNA, 319 bp, Zea mays
attagctgagaagctggctgcagtcaggagttcatagggcggcacatcactggatgccgctgacaaagtttgagtcttctatgcaacgaacaacgagctgtgcggtgcagtttgtgatttcctggcaattcgtttctatgtgatttcaccagccccagcctcaccgccgagtgcttcattttttttatggtttctcatcctaatcatcatcgggaaccaactaatgaagcactgcgcgcccattttccccatggtttctctgtaatcaactagaagtgatcaagtaccaagcagtgtacaatgcgatgctccctaggac

SEQ ID NO: 328392 - DNA, 322 bp, Zea mays
cccacgcgtccgaaaaataaaaaaaaaaattataaataaaaaaaaaaaaaaaaaaaaaaaaggaaaaagaaaaaaaaaaaaaaaaaaaaaaaaaaaaaaaaaaaaaaaaaaaaaaaaaaaaaaaaaaaaaaaaaaaaaaaaaaaaaaaaaaaaaaaaggggcggcctttttaaaggttcaaagtttacatccccggattttaaaagtaaaaccttttttatcggcaccccaaattcaaattaatggcccgctttttaaaaaggcttagttgggaaaacccttgggatgcccaaatttaatggcttttaggaaaatccccttt

SEQ ID NO: 328393 - DNA, 370 bp, Zea mays
ggcttctcctcccccaccggttcgtgtttttgttctggttcgtgggcgagagggaagagatggcggcgtcggacgttgagtaccgttgcttcgttggcggcctcgcctgggccaccgacgaccactccctcaacaacgccttcagcacctacggcgaggtcctcgagtcgaagatcatcctggatcgggagacgcagaggtcccgcggcttcggcttcgtcaccttctccacggaggacgcgatgcgcagcgccatcgagggcatgaacggcaaggagctcgacggccgcaacatcaccgttaacgaggcccagtcccgcggcggccgtggaggcggcggtggcggatacggtggcgggcgccgtgatgg

SEQ ID NO: 328394 - DNA, 66 bp, Zea mays
tcgcattgtcacagacgagtcgacagttatgttggacggaacgtcgcctgaggtaggggcgggcca

SEQ ID NO: 328395 - DNA, 163 bp, Zea mays
tcttttttcccactatttgtccctttccttttcttgtccatgatcgaaaaccgcgagcggcttctcttcagaaaacgctgtcccatattcctcaccgcgctcataacacacatgaccatgttcgccaaaccgatgttccacagtcgacgacatcatgcgacag

SEQ ID NO: 328396 - DNA, 352 bp, Zea mays
gaggtgggttggcttctcctccccctccgtttcgggttcgggttcgtgaggttctccggggttcggtttcgtgggtgagcggatcgagatggcggcgtcggatgttgagtaccgctgcttcgtcggcggcctcgcctgggccacggacgaccactccctccacaacgccttcagcacctacggcgaggtcctcgagtccaagatcatcctcgatcgggagacgcagaggtcccgcggcttcggcttcgtcaccttctccacggaggaggcgatgcggaacgccatcgagggcatgaacggcaaggagctggacggccgcaacatcaccgtcaacgaggcccagtcccgcggc

SEQ ID NO: 328397 - DNA, 274 bp, Zea mays
gtagttgccatatgttcagtaattttttcctattaaattgtttatgtatagaaaattatgcgagaaaaatggaatggttaagatctttacaaaaaaaaaaaaaaaaaaaaaaaaaaaaaaaaaaaaaagaaaaacaaaaaaaaaaaaaacaagacttacagacacatgcaagcaaataactaaattataaaatgagctaccttaaattaattgactggccatcgatatacaactgactgacaagaaaaaacctgtacgtaaccaaattaatcgg

SEQ ID NO: 328398 - DNA, 241 bp, Zea mays
gctcaagttctcgcgctcacattcaaatatatgttcactcaatcgcggcataagctgcggtgcggccatggacgccagcggagccggtagcaatggccaataacggggcagttgggcgcaaggctggtggccccagcatgaagtccgagtcgcagaccgtcaaggccaggctacacatcttcggcatggacatcgggctctacctaatgaacgggcggtacgtctcaagcgtgcacaccgg

SEQ ID NO: 328399 - DNA, 379 bp, Zea mays
ggagaaggagaaagagaaggagcgggcgctgcggcgcgaggagagggaccgcgaggagcgggagagttccaggcggcgcggggatgcggatggagaggaggacgacgaccgggaccgcaagcggcgccgccggtcctcgcaccaccaccaccgggacccagagccggagccggagcctgcatcccgggaagaggaggaggtggacgccgaggaggctgagcgccggcgccagcggaagaaggaggaggacatggaggccgagcagcagcgcctcgacgacgagatggagcgccggcgccggcgcgtcaaggagtggcaggagaagcgccgcgagcagcagcagcaggacggcagtgttgccagtggcgcttctgctgct

SEQ ID NO: 328400 - DNA, 299 bp, Zea mays
agcagaggcaccccgaagcgcggcagagtatcatgcggcgcggggatgcagactgagaggaggacgacgaccgtgaccgcaaggctgcgccggcctgacctcgcaccaccaccacacggacccagagcccgagccagagcctgaatcccgggaagagcaggatgtggacgccgctgaggctgagcgcccgtgccagcgcaagaaggaggaggacacgaaggccgcacacaagcgccattacaacaagatggagcgccagcgccggcgcgttaaggagtcgccggagaagcgccccgagc

SEQ ID NO: 328401 - DNA, 175 bp, Zea mays
aaaggagaatggtgcatgcaagggttgctctcatcaaccgtagcagtggaaggaaggaagccaccgtcgggcttggcttatgctaggcagtgtttctttggtattgctcctcatagtctttcccaatctgaaagtgattctcttttaaaaattccatctgatgatgattccaacc

SEQ ID NO: 328402 - DNA, 385 bp, Zea mays
ccttctcgcgctctcgagattcttcccactttcacactgaagattcccgccgcctcccctgtgtcggcgctgctgccagcgctagcaccgatgccaccttgtcttgcctctttccatccaccgtcatcgccgctacctatggcttccacgtcgggccgtctcttgcctcatcctgttccccgccgctgctctcgccacccactatcggaggcattgtgtccagcaacatggttaagagggtatgctgtctgagcgccagggagatccgaacggtgatgccctctactcgcttcccattgtcagtggggctgccatagttggagagtggcggcgtagcatgccgacgactgcgagttcctcaacatgtactccggtaccaagcaat

SEQ ID NO: 328403 - DNA, 404 bp, Zea mays
cggacgcgtgggcacacatatatttgtatttatacataataagtatttcttttttttgtgtgaattctggaacggtattgacaagcatggtcgagacacccatgtctcacatcatatgaacatgtcggtgattgatttgagctactgatggtttattcacttaagcaatctttcttgtgagtgtagagcttgagaatacttagctcattattcttgtctttttttgggcaggattcaaacaaaccagtacattaccaccatggttcttgattcattatcatcacctcacaggaggtcccaaaacacattcttcgtgtcatctgcaaaaaagcctcagtcatctcgtgacgacagttggtctgcactgggtgagcgacaccggtttcttctgacgacacttcctg

SEQ ID NO: 328404 - DNA, 362 bp, Zea mays
  unsure (1)..(362): unsure at all n locations
cacctctgctaccccaacaaaaccaggactacgcctcgcgcggcgctgtcatgctcccggcgttcggcaacccgctctgggtaccggaggacgtcgacgaccagcagcagcaccacgcgccgccgccgacgcccatggggttggggccggggcaggggcacgatgaacagaacctcctggccctggcctccgccgccgccatgggggccggcggtattttcagctcgccagcggtgctcgacgacgactggtacttcgaccccgtggctgtggccgncgncgccggcgctcaggggcagctgctcctggcaccgncgggcccagcgcccgacgccgggtcgcagatgttctcgctcttcaac

SEQ ID NO: 328405 - DNA, 307 bp, Zea mays
cggacgcgtgggtcttttaactcatgcttttattttctgatctgttttgaaatcaaacgggcttttttccttggttccggcactaacttactacaaggactactccttgaaccaacatttgatactcaactctgtacccttaatactgctcacatatcttccatttaccaaccaactaacataaaaacccacccgcataagaatctaccctaaacttaccattccatgaccaaaacatccaattcgaaaaacaggcttattactactaaatcctaatgaatgaccacgtctaaatttttaagagaat

SEQ ID NO: 328406 - DNA, 76 bp, Zea mays
cttttgtactccgttgaaaccccatctttttttgtttccttattgactctgaagcccgttgaaaccggccattatt

SEQ ID NO: 328407 - DNA, 466 bp, Zea mays
  unsure (1)..(466): unsure at all n locations
aaaaagataggtgaacggggacgtccaatatccccagcgcaaccatggttggagatcatctgtttcagtttgcagaattggttaacaacttgttgcacaaacttttagtaaagatttatgtagattgcaataagagctgcagtccctagcatgttggccatcacttgcgtccttcctatggccgctaagaagcgatacaagcccattgacatttgatgcatggcaaaaagtaccagaaagtgctggaggatcctgccataagcaatggaatttcatttcttgcttttacctattgaagttgaagcatcagaagtcattcagcatgcaagtaccaggagatgagtacctgatagcagaaggttctagcacaagctanttgctttcatcacaaggttcctgggctttggatctatgcggcagcatgggaattcgattaaaacctgaacgtcgtcgtagcatgtgcact

SEQ ID NO: 328408 - DNA, 150 bp, Zea mays
acgaaaagaacatctgctgtgaggcaaggaattttccttgaggctgcagcacagaacccatgggacggtacagcttaggctatgtcaaaattttgggattatgaatatcaacgaatggtatgccctaaggcggctgttattgaaaagact

SEQ ID NO: 328409 - DNA, 425 bp, Zea mays
  unsure (1)..(425): unsure at all n locations
gaacgagaagttcttgaaggaattttttcttaagaggccgtaccttgagacagagaagagtaagtcctatctagataatatccaggaattgtcagatgaagaggagctcgagattcaggaagagtatgagcatgcttataattaccggcatgaggaggccatggcatcaggggcagtggtggcggatcgggtgttgggacattccagggttgttgaaggttcggtgaggaagaaggagagcagcagaaagcagcagcgcaagagcaaagaggagcggatggcccgtgttaagcaagagcaggcagaggagctgaagcatctcaagaatttgaagaagaaagagattgcagagaagcttgagaggatccgaatgattgctgggattgaaggagatgctgcttgtaagnctggtgctgatgacttgg

SEQ ID NO: 328410 - DNA, 93 bp, Zea mays
aaaaaaaaaaaaaaaataaaaaattaaaattaaaaaaaaaaaaaaaaaaaaaaaaaaaaaaaaaaaaaaaaaaaaaaaaaaaaaaaaaaaaaa

SEQ ID NO: 328411 - DNA, 319 bp, Zea mays
gtcaaactagctgtggaatgggggcaacgtttacagtacatatgtctgcacttatgacactgggactgaacgacattctgaggacagaaattgacatcacatgcttgacagatgctcagactgtgatctgactggcatttctggatcgcaaacctattcttactacaagattgacgcttatacatatcaagtgcacacacacaggagttgcacatacttgactgccgattgttactccaaaacgggtcggcttacgagtcgtaacgatcatgatgctactcggtacgcctaatctgtatggcactatggtggctaacac

SEQ ID NO: 328412 - DNA, 436 bp, Zea mays
cccacgcgtccggcccgtcgcggtcgaactggccgccgacgcggaggctgctgctcctgctggtcccgacgagactcctgcggtcgagcaggacgcagccgccgaggaggaggctgctgctgctcctcctgctggtgccgaggagcccgccgcggacgagcctgtcgccgaggcagaggctgctgctcccgaggagctcgccgcggacgagccggaggctcctgctcctgctcctgctggtccccaggagccggccgccgaggccgacgctgctgatcctgacgagcccgagatggccaccgagtgaggccgtgcgcacgcagcggcggcagccagggcccaggccccaagggatcggcatgcgcgcgtggcggtgtagtcttttgcgcgcgtacatcgcagtatgacacgggattttgcttgccagtacgctacg

SEQ ID NO: 328413 - DNA, 223 bp, Zea mays
gatgaatcggttatttgtgtaatgcacactagtcttttcagcgggacagtttgcatacggcaacaggtctacagtcatcagatgtacagtcgtcaagccggttgcattcggaacgtcgccatgcctatgcttgttatcccaccaacctacttacacgtatccaccgatcctttaaaaccgctcaatttgtacacgatgtgctggctttcacaagatgcaaagc

SEQ ID NO: 328414 - DNA, 468 bp, Zea mays
  unsure (1)..(468): unsure at all n locations
gagaaggaaaaatatccccaaaccctagctcccgatctcgatggcgaaccctcgcgtcttcttcgacatgaccgtcggcggcgccccggcgggccggatcgtgatggagctgtacgccaacgaggtgcccaagaccgcggagaacttccgcgcgctgtgcacgggcgagaagggcgtgggcaagtccgggaagccgctccactacaagggctccaccttccaccgcgtcatccccgagttcatgtgccagggcggcgacttcacccgcggcaacggcaccggcggcgagtccatctacggcgagaagttccccgacgagaagttcgtgcgcaagcacaccgtccccggtgtgctctccatggccaacgccgggcccaacaccaacggcttccagttcttcatctgcaccgtcgcgaccccttggctcgacngcaagcacgtcgtcttcggcaggtcgtcgagggcatg

SEQ ID NO: 328415 - DNA, 356 bp, Zea mays
ggcttgatgtgaacaaagagcctttcaagttcacaggcatatatattaggaaggctggatgatgacatcaaagagctgtacctagttatagaaattggacatcaccctataaggatgaccaaggatgtgctaagtacattggaatacatccagattttccgaactaagcgagcgaagtgaacgaggcaaatggagatgaacacttagatgctggtcaaaagggcaggggtcctaatgggaaggactgaagatgaggattcaccggcaagataaatggatgcaactagtaagacacctgaggatgcgacagtatgagagcaaagagatgggcatgttaaacctgatagtcccgacta

SEQ ID NO: 328416 - DNA, 379 bp, Zea mays
ggaacagaaggaatgttctggaggaagaaattacatcgagtagattggtcttcgatcctccggacatctcgcttgagaaaactgtacactcgctcgcggacgcaaacacgatggttgctagtatttacacgctcacgccggctggccggtcgacccgcgcaggctcgtctcgacgaagaagagaaggattcttggcacgcaccaccaggggggggggcgtcattccgcggcaacgactgccgctggccgcgtgcggaggctcgggctccgcggctgccgcagcatctcgatcagcgactccgccttggttttgagcttggggcgggcggaagaggactgggagagggcgacgaggggcgggatggcgccctcgcgggcg

SEQ ID NO: 328417 - DNA, 391 bp, Zea mays
  unsure (1)..(391): unsure at all n locations
cggacgcgtgggctttggccctgtttggatccttcaagcccggctagagctagagctaggttctagctctaactctagcccaaactagctctagctctctacgtgtttggatccaagggctagtttacaataaatgctattttataatcatttgtctcgtttaaacctttccttatccggatttagtgtggcaaactcttgtgtggcttctcccacacacaaataacacaaataaatttattttcacaaatcaaacatccaaatcacaataaattagtaaattacaatagtcgaaaatgcattcaataagaaattagacaaaacaaatccgttgttttcctgttctttccaatgtggccagccgtgcccctncactacctttccatggatc

SEQ ID NO: 328418 - DNA, 462 bp, Zea mays
accttatccttgcctttgggagtaagccctacctacatctggaggcttcgtcgagccttggaaggcctttttgttgattacggctaatttccaatggcagctgagatgtaacaaatttgctcagttcagttctctaggaaaagttcccgtggttcagcaatgtgattggtttcataggttttttcgtgtgttggtgatcaaagcaatctggtgtaagcttgcgtagttgacatcagagtttgtttcttatggttaggttcttttgcttttcatcctctactgcacatcacagatccaaggaggttttttccccagcagatgaaaccatgcatgcagcgtcaaagaaggattatcagttggagtccatgactggctcagttcgttcaaaccagatgacagaagaaaataaccgttcagctgttagtggtcattgtggcagtagcccatcatctcatcaagaat

SEQ ID NO: 328419 - DNA, 279 bp, Zea mays
gtgcctactgggagaatacatttggggtatcatcgtaggtagattatagctcactaataggaatgatgactgtggagagtttttctggtaccagagaagggcagaaggcacggaaatcctcctgttcccgtctgttatataccttatcgtaggctgatatgcccaacagtatgtcagttttaggcggtgccataggacatgaggctggatccagtgccatttttcgatcatactttttatctattatactgttccagtgaaaaaaaaataatgtatgtg

SEQ ID NO: 328420 - DNA, 466 bp, Zea mays
cccacgcgtccgcccacgcgtccgcccactcgtccggaactctagaagaaatcctaagagagaagccactaacgactaatgaacatcaatggagatctctagttggaatttggtgccaagagcaacataagaaattatgttccacaaactctcgttgtgcaaaagaacagaagactgcacacacatgtgggaggaaaagccttgctagattaaaaaaagagatggaaacaagaactaaacgaaaggttcataggatagaactatgggaggcagctcataaaaagaagaatggtagatacacaacagaaaaggcagagacactgatggctgcatcttatgaggaatttaaaaaaggcgagggaacaacgatggtaatcgtctttcatctaaagattacaatgaaatgttcaatgatattgttgccaagggatttcaaagcacgtgggtactatgatgataagtactg

SEQ ID NO: 328421 - DNA, 272 bp, Zea mays
cccacgcgtccgcgctcgcggactgccattcgacccaacacgcactggacctcgcttgcgatgatgaatctattcactcggtgaagagtgactgctcctgtgcaactacagcctctttatctaccatgtaagactttaccttacgcagttctgcacttgtaaacggacgcttaaccacactgcagacctggtcctgctcatcaccatatgtgtcactggcaggcaaccatcatgagtcctcctcatcgtccatattctggtcgactttatta

SEQ ID NO: 328422 - DNA, 340 bp, Zea mays
gtgtcttttgatttaccttcacctgaattcgagtctcgtgatactaccattctggggtgcggtaatcaacctgtatgtggatgggaaggttgtaagttttaaatcttggaccggcagaggaacaatgtgggacccatatataagattctcaagtctggttacttaggattggttaatgaaaacctattttaatgaggctggtacaaagcagtggtctgtgaaggaaagaagcagtgcgatatgagaatactcctgctgagcggaatcatgctgatatattgagacgctctttgatttgagatttggaaagccacttcgagctggcactacatcttaagct

SEQ ID NO: 328423 - DNA, 227 bp, Zea mays
ccatcctccattatcctttatttcaattctttcatcatcgtcgtgtgtaaattaaataaataaagctcttgtgcccatattaaaaaaaaaaaaaaaaaaaaaaaaaaaaaaaaaaaaaaaaaaaaaaaaaaaaaaaaaaaaaaaaaaaaaaaaaaaaaaaaaaaaaaaaaaaaaaaaaaaaaaaaaaaaaaaaaaaaaaaaaaaaaaaaaaaaaaaaagagagagca

SEQ ID NO: 328424 - DNA, 200 bp, Zea mays
ctacgcgtagacggtctcctgtgcagattcaggtgttaaccttatggactgctttcatgcgacggcatacttctaatctcgctggatctaaacgcaatatagagacctatattctacaacttcgtatctgataaaaacctttcgttaatcaatttaaggacttggcataagatcctccaatatcatgcatgacaagtact

SEQ ID NO: 328425 - DNA, 62 bp, Zea mays
aaaaaacatacaaaatttcgaaaaaaattataattttaaatcaaaaaaaaaaaaaaagggaa

SEQ ID NO: 328426 - DNA, 219 bp, Zea mays
  unsure (1)..(219): unsure at all n locations
cggacgcgtggggccgtgctgcccagaatancatctctcacccatggccgcggccaccgccgggcgccccatgcagagccgaacccccaactagcatcagcgaccgcccagcagacagcagaggaggagcgcggcaaatcctcggcgccccaccaccactcacatcacaaggcggactacacgcaccacaccatacgccgagccgaggagcgcccgcac

SEQ ID NO: 328427 - DNA, 384 bp, Zea mays
cccacgcgtccgcccactcgtccgcccactcgttcgcccacgcgtccgctatgacattgtgaccttaaaaaaaaaaaaaaaaaaaaaaaaaaaaaaaaaaaaaaaaaaaaaaaaaaaaaaaaaaaaaaaaaaaaaaaaaaaaaaaaaaaaaaaaaaaaaaaaaaaaaaaaaaaaaaaaaaaaaaaaaaaaaaaaaaggggggcctataaaaaaaaccaaatttaactaacacggcaaaggaataaaaaaattttaaaaaggggaaaccaaaataaaataaaagggacacgtttaaaaaaagattaaaattggaaaaacctgtggaaaaacaaaaaaaacccccatgaaaaaaaattccatatagaaagggagggaaaaaggaaa

SEQ ID NO: 328428 - DNA, 181 bp, Zea mays
cattttggtgctatggttctgactcaatgttatgtgacttgtgatgtggttttgtcgtgtggtgtgtgttttgctgccatgttcctccaaatgacccgggggttctgtcgtgttagggatgatatgcttggtgtacagcatcaaaatgttttaaatcttaaaagtgatgttgcctggcttt

SEQ ID NO: 328429 - DNA, 279 bp, Zea mays
gcccacgcgtcgccaccgtcgccattttcctgacccgggccaggccatatgggttggaaaggcagttggtaaccttcccttggtcaatggcaagggccaattagagaaacacaatgacttcttccttaacaagcctcttggtgggggtcctgccggaagggtgaagcggaagaaccagaagaaggcctcatggggcggcgacgctgaggaggacgaggagtagagggccacgtagggattctgcgaccgcaattggttgaaatgtgaggtggacacttt

SEQ ID NO: 328430 - DNA, 309 bp, Zea mays
acgtgagctgacgctgtcactcgcgatagttgctagagagagagagagagagagagggcccgagagccgaggacgagtgcagtctggctggcgtgatgctgcttcggagcgcgtcctcgccgctgctcaactgcgggcgcgcgccggctgccacggcgatcgtcgagcacctggccgtggttacgccgatgttatcaccggcagtggctgcgcctaggcaagggccggtgctgcgccgcgccatgtacgacggggaccatatcgcgccgatcgtgcccaagaaggacgattgacacggcatggcgccga

SEQ ID NO: 328431 - DNA, 310 bp, Zea mays
cccacgcgtccgcccacgcgtgcggccaatcccttattgcgacctgcgttccgccaaaaccctacggccatggacggcggacgcagcggtgtagggcgaggaggagttgaggcaagtgtcatggtgggcggaggagttgagccgatcagcggcgctagagactgcagacacttggagactcgcagatagacgctgaagcttgagcacaagctgtactactgcaatctgaacgataactccaggcggaggtacctcaagatatgcgcatagactctctacacgcgctctacaatcattgctctcggcaact

SEQ ID NO: 328432 - DNA, 285 bp, Zea mays
cccgacccgaccgacgcgaccgacttgagcggacgcggtaacacgcgagattagattaccagacagagagagagagagagggcgagagccaaagacaagcggggggaggcaagcgagatgctacatcggagcgcgaccacaccgacgcgcaacagcaggcgcacaccagacagacgagaaaacagtcgagcaccacaaagaagaaacgccgcagaaaacaccaacagaggcgacgccaaggcacggaccgggacaggaccaagccaagcccaaaggagaccaaaa

SEQ ID NO: 328433 - DNA, 378 bp, Zea mays
gacgccgctcccttgtctttccaacgtcttatctcgatccgcccgtcgcggcccccagatctctctctgctttagcgcaactcgcgctccggtgcgcgtccactcatcgcgatcgcctgctcgaccgatcgatagctcaagcacgacgagaggagagctacctatcgcagttgcgcgtcttccttcttgctcactctcagtctcttgctcgctcgccagctctttcccacttgcatggatccctccgggcctggcccgtcgtcggtcgtgggggcaggaggcggcgaggcaccggccgtggcgccgcagcggccggcgcagctgagtaggtacgagtcgcagaagcggagggactggaacacgttcctgcagtacctg

SEQ ID NO: 328434 - DNA, 206 bp, Zea mays
ttcccgtcgccacgcgtccgattaccgacttaatgaacgctgactcacctctgtcctatactggaaccagagcacggttacgtggacacggagcgcgacaaagacgatcgtgagcaccctcggtgagacgggtctcactgagatacctgggtcagaacgcgcaaaagtacacggggcgatggttctgtccactgacctcaccgaat

SEQ ID NO: 328435 - DNA, 389 bp, Zea mays
gaactgcatccatctattccaggagcatgtcatattgagcctcatgcacctgctctagaggagcttcaacgacaccaagtggcacgtgtaccgactgtgcgttctgaaagctagcctgaacctagcgctccagatcgagatgatcaaactcgaggcgaagcacagaagtactactatcttcggactacaacggactgaagtccggagaaactacctgagcctatgacagtttcggagagctctgatgacataactgaatgagtcgaatctactagagcacaaggaccgaagtgctagtttaacagagtgaccaaactgtcaggacggactattcctgacgagttaaaagatgcacgggaattgccagacaaggtatcagatcaacaacc

SEQ ID NO: 328436 - DNA, 72 bp, Zea mays
cggacgcgtgggaaaaaaaaaaataaaaatataaaaaaaaaaaaaaaaaaaaaaaaaaaggaaaacatacga

SEQ ID NO: 328437 - DNA, 423 bp, Zea mays
  unsure (1)..(423): unsure at all n locations
gtcggaacattcgtccctcactagctagttcgtagcagaatcattctgagaggctacccatcctgatgatgcatggttgtcttcaactccttccggtttcatttcatggaaatcagttggtagataagatcgagcaaactttctcttgtatgtaatgttgtcatgggaaaaaaaaaagaaaatacagtgtaaaggcacactggcagacaagccatagatatgaataggtatgtgtgttgttgaaggaatgtgctgtgatgcgcatgggggattggtgatgacaagcaggccgttttgagtctccatatcacctatgcagaatcagctgtagaaaaaaaggtagcaaattgtggaagtcgaaccaattgttttgcaaacataaaanaagatgaatgtttgttggcgagttcgttgcgagaaaaa

SEQ ID NO: 328438 - DNA, 266 bp, Zea mays
cccacgcgtccgcccacgcgtacgcccactcgtccgttttttttttttttttattttgtggtttgattttattgttatggatttttattaatattttcgaggggactttctaaaagacacaaccgaaattaagaatgaatgcgaacgcaaaaatattaaaaaagggaaccaaaatgcaaataagatgaccgacgactaacaacatgggaactgggaaaacactagggatacccaactaaaaagggttgaaaaagaaaaacttttag

SEQ ID NO: 328439 - DNA, 367 bp, Zea mays
  unsure (1)..(367): unsure at all n locations
cccacgcgtccgcttaagggttcctgtactagaaaatctcgcccgttacgggaacagcagctcaaatgggagtccaagcagtgagggtcaaggatccttgttggatcagtacaatggtgtacatgatgcttcccatggcttgcatcggaagcgaaaaaagcaccttgatggtgccggcgatgatgatcatgcagatgcctatagtaacaaaatgatggaggatcactaccgtgcgatgctcagtgaacatgtccagaagtaccgaaggtcaaagtttaaggaaggtgcttttatttccgatccttctcaggtggcaatcccccanattaaacacaaaaacggtgggtaaaaagttatgaagcacatt

SEQ ID NO: 328440 - DNA, 428 bp, Zea mays
cgctcggatcccttcttcctccatttcactccaccgtcgcctccgcctgcaaatccattgctagactcgagctgtagctgcgagcgagctcagcttggggctcaggcctgtagggtgatagccttactgctcctggtgctcatcgcctaggaccttggtctgtctgtttagggctgtcgcggctgcaggagccgatgatcgtcggatgcagccgatgctgctagcgtacgcatatagtgaggactgaacggctcgctgggcacgcgatctgatgagtggatgctacagcgattgacgtagacgcactatccatcatgcagggcgccatgcttcggaacctcactgacaagctattctagaagaggaataacgcccagctcgagattgaggggattgttaagcaacttgcaatggctgaagaacattag

SEQ ID NO: 328441 - DNA, 434 bp, Zea mays
cccacgcgtccgcccacgcgtccgcaggcttaacatccatacaactggggttacgaaccccgaacaacttgattcgtagaccacacaactatggggacacaaatcatccccacttaattttggacctgtacaactagggtacacacctgacacgtcctgtccaaagaccaaaggctgttaatccaatctcttggcaccacaactcacctagaagagcatcactgataatgacttacaactatctctacaaaaaaaaaacagccaagcatgcctggacaaccatgctagtccaaaatccaaatgtcagggcaactactcaaagctgcctgtacaaaaccaaaaactaataaggaaaaagagtggcatcaaactagatggaaagtgccaagctacagagctggaatagcctagtgaaaccttcaagaaggtaatga

SEQ ID NO: 328442 - DNA, 461 bp, Zea mays
aaaatatccccaaaccctagctcccgatttcgattgcgaaccctcgcgtcttcttcgacatgaccgtcggcggcgccccggcgggccggatcgtgatggagctgtacgccaacgaggtgcccaagaccgcggagaacttccgcgcgctgtgcacgggcgagaagggcgtgggcaagtccgggaagccgctccactacaagggctccaccttccaccgcgtcatccccgagttcatgtgccagggcggcgacttcacccgcggcaacggcaccggcggcgagtccatctacggcgagaagttccccgacgagaagttcgtgcgcaagcacaccgtccccggtgtgctctccatggccaacgccgggcccaacaccaacggcttccagttcttcatctgcaccgtcgcgaccccttggctcgacggcaagcacgtcgtcttcggccaggtcgtcgagggcatg

SEQ ID NO: 328443 - DNA, 413 bp, Zea mays
cccacgcgtccgtggacgcgtgggttgactcgtgggcgctgggccaccagctttgaccgccgccttccttcccctgcgctactgctcctcctcaccccactcccccgcaggagcggcggcggcggcggcgaggtcgtaccccacatcggcgagcggcggcggcaccgccggaggcaaaggcaagatgttcgggcgcgcgccgaagaagagtgacaacaccaagtactacgagatcctcggggtgcccaagtcggcgtcccaggacgatctcaagaaggcctaccgcaaggctgctatcaagaaccaccccgacaagggcggtgaccccgagaagttcaaggagctcgcacaagcctatgaggttttgagtgatccagagaaacgtgagatttatgatcagtatggtgaagatg

SEQ ID NO: 328444 - DNA, 237 bp, Zea mays
gtccaatgcacgagcacatggatggtctgtttgcatggtctagtttttttttgtgaacagacaaatgaactcacatgtacgcctccatactgcagcagcagcagccgccgccgccgtctcggagctcgagctcctagtcccccggggcccaggcggcggcgccatggaccagctccggcccgagccggccgcgggcgcgcggcacgagatcgagaagacggcggcgccggacgtgga

SEQ ID NO: 328445 - DNA, 106 bp, Zea mays
cccacgcgtacgcgcgctcagaagccgcatccaatccaacagggcgcagggagagaagaggccaggtcagaagagagggggccgggcacaccaacgcggcgcagaa

SEQ ID NO: 328446 - DNA, 72 bp, Zea mays
aaaaaaaaaaaaaaaattaaaaagacggtcttatataatagaaaccaagctaacgaacacgggcaggctaaa

SEQ ID NO: 328447 - DNA, 363 bp, Zea mays
  unsure (1)..(363): unsure at all n locations
cggaccgcgtgggccggactgcgtgaggcaccactgnnctcttataacccatagtaccaaagcgaaggtaacgtcacgatggcaaccttccaatgggttagtctttcgtcttgcatctgcccttagtttctatcttctcccttctccaagtgctcgtccccttgtgcccacctcatgtgggtggctttggttcccacccagttctatgactcattcgtgcccccaagggcgaaggacgaattgtgccagtccacttgtgtgcacagagccctgtggcccaagggagacccacggatggctggtcatacttnntagtcagacctgcnnatttccatgaaactgctttgtcaaagggcttgcgat

SEQ ID NO: 328448 - DNA, 392 bp, Zea mays
aaaaaaaaaaaaaaaaataaaatcaaaatttatataataaaaaaaaaaaaaaaagcaaagtggacgtgatcataatgatataagacactagaaagaatgaactagatgatattacatgatcttacaaatatatctcttccaatctgattaacgcataaatagaaatgggccatcgttcgctgctattatctgagtccgatgatgatccagctgatgtaggcactgaaaaacataacatatttactgttactgaagatggctctttaacacaaccggcataagtgcctcctatgcatgggcaaaggatttctgatcagttccattgtcccgttgaatcacgagagacatgtgaaactgctgaatctttccgaaatccacctgaaagcaacatg

SEQ ID NO: 328449 - DNA, 295 bp, Zea mays
cccacgcgtccgtccattcgtgcgttcaataaatccaaaataaagcgtgctcactggactgatcattatgatagtggacggtgcaagaatgaacttgatgattaccatgatcttccagatatatctcttccatctgataaacaaatgaaaagaaatcggcatacgtcgctactattatctcactacgatgatgatccagctgatgtatgtactgaaaaacatagcatatatactgatactgaacgctgtttcttcccacaaccttcagacgtgccacctatacatgagcgacgga

SEQ ID NO: 328450 - DNA, 324 bp, Zea mays
cccacgcgtccgggctctctacacgtctatgacgctgcatcacgtagcgttcggcatcgcggcgttgatgaggtcctgtgacaagcgattggagttcatataggtgtggaggctcctgctcagcgacctgcactgctacctgtcgctggaccacaaggtgcgcgagtacaacatgttcaccgcgcacacacagctcatggtcatcacgatctcgaccgacacggccgacgttacactacactcacctgcagactcaccgctccgacatacgtatctcctgtatctgatcactgacgattcgcctcgaactatcaggattgcgct

SEQ ID NO: 328451 - DNA, 195 bp, Zea mays
gagcacttatgtactcaattaattggacttggctttacattcgggacgggtaatcaacaactggaacagtagatagtctgagagtggccatccaggaggcagaagccaatcccgaccatgttggagacactgagcggagcacaccgagtcctgctgactaacggtctcgacttcgatgacaccgcgctcacgctc

SEQ ID NO: 328452 - DNA, 327 bp, Zea mays
cccacgcgtccggttctagatcgcgagcgtccgcccttttttttttttttttttttttggttttttttttttgtttttttttcttttttattttttttttttttcaaactaaactcaaccatgggttcaattcaactaaagccgttgagatttttaaaaatcgttcgtcacaatgaacatttttaacccatttaaaccatcatgggggcacatgattttaacaaaacaccgttaaaagttagttttgcaaaaccaggaaggcgaacttgggggaacatacacgccctgggtgtacccaaggattaggagtggaccccatgaaaagtt

SEQ ID NO: 328453 - DNA, 384 bp, Zea mays
  unsure (1)..(384): unsure at all n locations
cccacgcgtccgcccacgcgtccgactacttctccctctccgtcgcgacacaggccacggcgggcggcggcggaggcttccgtgcggctcttggcggattgaacgcccactcgagctgcgccggctgctgtttcagccgtccttagatagaccctgctttcctcccgggcaaatccaagttgcccaaatgccgacaccagtgaagtcggtgctgcccgtagtgctcctcggctgcggcggcgtcggccgctacctactccggcacatcgtctcctgccgtaccctccacgccaaccagggcgtggccatgcgggtggtgggcgtcgccgatagctcctncctgctcgtcgtcgaagatgtccactccaccggcctagatgacgc

SEQ ID NO: 328454 - DNA, 325 bp, Zea mays
cccacgcgtccgcaaaattcgacatgtactgagtccaacaacttccacggtaccgaacagtaaagcattcgataaaaagcctcttccagcgtcaccggcggcttggattaggatccaggatcagaagatttctgtaccggcttaattgttaatgtatttttggtgtgtgcaacatctcccaccagatggtgttaacacttgtagtgtgtgatgctaaaaaaaaaaaaaaaaaaaaaaaaaaaaaaaaaaaaaagaacaaaaacacaaaaaaaacaaaaataaacccaaaaagactatgacaacattgaaaaatggatagaacaag

SEQ ID NO: 328455 - DNA, 300 bp, Zea mays
ccgacccacgacccacgcccacgcccacgcaaacgcacactcagcgtccccttaaaacgatcaccacccacaacacgggcaggacacaatacccggggcgacgcccacacgaccaacaaaccggcacacacaccgcagatccaaacacataccctaccacacagacaaaaccgcgggatagaagatgacccccgccgggcacaaccacaaccccccaacaagacacaccgcgggaccacagcagcaacgtgctacaacaacaacaccaacaaccgcgctgaacggcaacaacacaaagac

SEQ ID NO: 328456 - DNA, 262 bp, Zea mays
aaaaaaaaaaaaaaaaaaaaaaataaaaataaaaaaaaaaaaaaaaaaaaaaagagaaaagagaaaaaaaaaaaaaagaaagacacaaaaaaaaaaaaaaaaaaaaaaaaaagaaaaaaaaaaaaaaagaaaacacaaaaaaaaaaaaaggagaccaaaaaaaaggcgaacgaatggactgaacaaaaaagccaaccagcaacgccatcctctgccacgccgaaaacggtatgatcggcgactatacccggggccgactata

SEQ ID NO: 328457 - DNA, 282 bp, Zea mays
cccacgcgtgggaaaaaaaaaaaaaaaaaataaattataaaaaaaaaaaaaaaaaaaaaaggaaaggataaaaaaaaaaaaaagaaaaaaaaaaaaaaaaaaaaaaaaaagacaaacaaaaaaaaaggaacaaaagtaaacaaagaagaacagacaaaaataaaagacccaagagagactaactaaaataaaatacaatagtaaaaagaataaaaaataggatcactggaaaaagatatcaatgaacataacataagatgggtaaagaaagaatacactttg

SEQ ID NO: 328458 - DNA, 184 bp, Zea mays
ggaaaacaactccacccgcaccgtcacactcgtagggcacgactagcacgaccagggcccggtgaaacaccctggggcgcatccaatgccacatacaaagccaccaatccgacaacgacaccaacatatccctagacaaacctgtcggcgatcgacgggccagacgactagagcggaacaacca

SEQ ID NO: 328459 - DNA, 200 bp, Zea mays
ctagttctagatcgcgagcggcttttccttaatcgactaccacaaaaacaaaaaggaaggtttaaactaaaaaaggggacggaccatatcaaacaaaaaaaagaaagaaacaaaatcaaccaagaccaggacacaaaaaacagatcaaacaacacaacacaccgagaacactaaacagacatcaccgaaaaaggcaacaa

SEQ ID NO: 328460 - DNA, 437 bp, Zea mays
ggagaatagtattatgctaagcttatgcttcggcccctttcgtcggctccagtcccggctcggcgttgctcctcccctccattccctgtcggcctcttgcgctttccggcctcggattctttgtcgtgtgcgccccctccgttgcatctcgctgcttctccttcttcttcgctttgcatctgagttgagctggagcatcgatcccgtccgcctcgtcctccccgacgcggcttcggctggactccaccgcgctctttagttcggtttccccgtcagagcttccaacctgttctactcggtttagattttggagctagagtttccaaagcaaaagctttccttttttttccctccctcccctttgcatttggcatgaggggaaacgctgcggtttcgccccttttctgagcatgctgtccttgaacaaaatgcatttt

SEQ ID NO: 328461 - DNA, 376 bp, Zea mays
gactccggtcaacaccataatcagttcgactaattttcgagttcaccaccagatggtctgttccattaagattcagcgggcatgtgtctacctacgtcatcactttaatcctacaccctattcggtatagtcttagtcactgaatcctacagctggtcagaacttgagggcataagcataccctcatggctcgcaacagcactcgctgaacgtatgcttaaagcatctggatcagatactctttgaccaggaaacgcatcgtcggcggctagaaacgcattagtattgagtacatgtccaacttcctacgcgtcaagactagctgcattggtacacgagccctagttcaggagcataccggccgttacgatgacct

SEQ ID NO: 328462 - DNA, 243 bp, Zea mays
  unsure (1)..(243): unsure at all n locations
cccacgcgtccgcccacgcgtccgttcaggtgntcttgaaataaaacggaggggactgtattctagagtctagacaaatggaggcgacttgggtgtcagctctgagcaaaatctattggatcatctcaagtcaaaagagaaacagaacaagcactacaaataaatgctgcatgtgctacaacaatatgttttttttgtccatgcatgtgaaagtgaaataattaactattgtgtggatggagt

SEQ ID NO: 328463 - DNA, 430 bp, Zea mays
caattttgcaatatgcacggcattttattttgctatatctattataggctacctcatgtttggagacaagatgctctcataaataactttcaatcttctgaaagattcatttgcagcaaaagttgcacgatggaccacgataactattattgtcggtttctctgattcaattaagtgggaacccttggtagtgattcaattaagtgagaagtgagaaccctcattgtgctatttttttgtttcaggtgatcattcctttcacaaaatattctttagtgataaaaccattagcttagagtatggaagggttgtgtccagcaaggtttatgacggatagtcttcgctgttatgctgcgtactcgatgtgttgcctttctcctaccattctttgggttggtatctatctttgtagccgaagaaacaatcctga

SEQ ID NO: 328464 - DNA, 341 bp, Zea mays
aaaaaaaaaaaaaaaacataaaaattataaaataacaaaaaaaaaaaaaaaaaaaaagggcagggaaaaaaaggaagcgaagagaagacaaaatacatggacaaacaaccaacgcaaaacaggggcgtccgagctcgagctcccaggctaaacgcccctaccttgcccccgccatgcaccagcttcggcccgcgccggtccaacgcacgccccgcgagatcgccaggacggcaccgccaaacccccggccggccccaacggctgcggctcccgagccataccgcctgccgcccttgcgctagcagggaatcggcctcgggacctccccggtcccgcccatc

SEQ ID NO: 328465 - DNA, 270 bp, Zea mays
  unsure (1)..(270): unsure at all n locations
ccaggagttggttgttaaacttgttaatagtangaaacagctggcgcagaaggatggtgagctaatgtaagcagaggaggaagttcaagtattgcaagaaaagaaccaggaactctgtggagttgttagatctctacaggttgcaactgaaggtgctaacgtggtggacggtgaactgtaggagctaatcacaagactgatttaacagtgatatctcacggatgtagaaattctacgctggtaataatacgattaagcatggtcattcat

SEQ ID NO: 328466 - DNA, 446 bp, Zea mays
ctctccttttgctcggaacgcacacaccgtccggtccccgttctccgatcccctcgtcgatccaaagatgcagatcttcgtcaagaccctcactggaaagactatcaccctcgaggtggagtcttctgacaccattgacaacgtcaaggccaagatccaggacaaggagggcatccccccggaccagcagcggctcatctttgctggcaagcagctcgaggacgggcgcacacttgccgactacaacatccagaaggagagcaccctccaccttgttctccgcctcaggggaggcatgcagatcttcgtcaagaccctcactggaaagactatcaccctcgaggtggagtcttctgacaccatcgacaacgtcaaggccaagatccaggacaaggagggcatccctccagaccagcagcggctcatttttgccggcaagcagctcg

SEQ ID NO: 328467 - DNA, 176 bp, Zea mays
tcgcccacgcgtccgcggacgcgtggtaaatttcttagggaagttgtagtttttccgcaaaggttaaataataaaaattaaaaaaaaaataataaaaaaataaaaaaaaaaaaaaaaaaaaaaaaaaaaaaaaaaaataaaagaaaaaaaaaaaaaaaaaggggggcccgttttaa

SEQ ID NO: 328468 - DNA, 248 bp, Zea mays
cggacgcgtgggcggactcgtgggcggacttgagttttgacgcgtgggcggacacgtgggcggcgatctagtcggctgcgtgcggcgcagcgatagcggggcaaaaccagctgctgatcgtcgtgccgactttgacgatgctcggcgcaatgaaggcgccactagttagcgccacccgctggcacgcgctgttgaagaagaagtcatactcgctcacgggccagttgcgggccttcatcaagaagatc

SEQ ID NO: 328469 - DNA, 218 bp, Zea mays
cgccacagacaacagcgaccgaggccacccagagccgaagcagcgcccggaccaaccaccgacgcaacggacgaaaccgcgaacagcagaaggctacacgacaacccgcccccgcaagaacgaacgcatgacccggaacgagcccaggcccacaacaaagacgaccaacacaaaagagagacctaaaggccggcaaaagggtacaagtgccaagccaa

SEQ ID NO: 328470 - DNA, 321 bp, Zea mays
gaatacaatttgatgttgtgagctctcatttgtaccagcttctgcttgattcctatctcaccctttattgatgggattaggaggaattcctgccaccaaggacaacgggatttgccattttggcgctgtctggacttaacactgaagctgctgatctttctcttgtactggtaatagataggtttatacctggaattaatcgaataccatatttttttttgaaacacatactaatttatttgctttctataccattgaaattttgtcatgtattgttggtggaagtactattgtgctttgaaggaattgaaagactttgat

SEQ ID NO: 328471 - DNA, 88 bp, Zea mays
aaaaaaaaaaaaaaaactaaaaaataaatataataaaaaaaaaaaaaaaaaaaacaaaaagggaaaaaaagggcggacaatatggaga

SEQ ID NO: 328472 - DNA, 367 bp, Zea mays
tcgggaaggggcacggtggaaagttgaaaacttgaaactcagcggagcccctcggcttttcatcttctcctgctcctgctgcccggtagccccccgagggagacgctgctgacctgacgaactgagcccacggacgagaaggaggggcacaccacgcaggagacctggagagagcgcgcgcgcggatccacctcgtatacactctcctcttcttctccgtgtccttggctcagatttagttgctgcgccgcttcttaggattgattgctgcttcacccagtgatcgcgtcgtcatcttcgcgtttgcttaatcgcctggttgctgcatccgttttttttttggtgttgtgtggttgggggtgccggc

SEQ ID NO: 328473 - DNA, 292 bp, Zea mays
gccacctcgccacgcgtttccattctcgcataaatggcctatatgctagcgctatttgcaccttgcagtaagtcatggtttcaagacctgcatatttgcgagatggaccttgctttgcttgcttagagatggtgcaagatttcctatcaagtgagctgggcagcgagcattatcaactgacaaaggtttcggatcccttttgtaataaagaaactgatgatccgcatactgagcgcggattaatgtcctttgatgttatatatgacagaatatagaaatagcagatgttagc

SEQ ID NO: 328474 - DNA, 384 bp, Zea mays
  unsure (1)..(384): unsure at all n locations
cccacgcgtccgatgagcagacttgttgttatattcttcaatggagttatgggtgctattgtangaaacacagctggtccaggtnattcttttcccagtcaaccaccgctatggcctaggggcttcattcagcagcatcctttggattgcaacatgatgagacacattaatttttctaatgcatcctatggtccaacaacaatgtgggctcccattcagacaggaaatataagttccgaatcaaccatgctaccagccacacaatctgcagtatattggaatcattatatgaactttgtcaggaatcctcttggttcagttcgaggaaatccttttccagattcgttttcaggtacaaatactagtacacctttgcagggttcg

SEQ ID NO: 328475 - DNA, 389 bp, Zea mays
  unsure (1)..(389): unsure at all n locations
cgccacgcgtnccgtccattattgccgtctcccttttgcgtgagcaaaaaaagaaaacgagaagagcaatccccatgtctggcatcatccacaagatcgaggagaagctccacatggggggcgaccacaagaaggaggatgagcaccacaagaaggccgaggagcaccacaagaaggaggagggggagcaccacaagaaggacggcggggagcataaagaaagcatcgtggagaagatcaaggacaagatcaccggcgagcacggcgacaagtccggcgaccacaaggaaaagaaagacaagaaaaagaagaaggagaagaagaagcacggcgagggccacgaccacgaccacgacggcggtcacagtagcagcagcagcgacagcgac

SEQ ID NO: 328476 - DNA, 311 bp, Zea mays
actagtgcgagattaatatgcttattaggatgagatggatccatgaagataagacggaatctcttgcggttagcaagatctattaggatatgatagaatcttattgaaataagatggatctattaatattagaaagactattgtctgataagatgggtctattgaaataagagagaatcttttaagaatagaaggatctatatgaaatagatgatctccgctgtttaggtatcttatggactctatctatgattatatgtatatgcacatgtaattatggacattactccacaacccatcacactcaatta

SEQ ID NO: 328477 - DNA, 321 bp, Zea mays
  unsure (1)..(321): unsure at all n locations
ccggcccgacgcacgcgtccgcccaccccttcgaccaaatctttatatctttctagctatcagcctttcangccgccacggtgcattctgcagctctctcgactncacactanancgagcgagctgccacagacaaggacacaatgccacccatacccaagagaggcgagcatctcctggtcctcctagttgtcgcatgcgctgccaccgccgccaccgccgtcggcaccgtccccttctacccgtccgcggagtcctctcccgccgctcactgctacggcactctttacccggagctcttcctgtccacactcgcataca

SEQ ID NO: 328478 - DNA, 332 bp, Zea mays
cggacgcgtgggggctcatgctcaggttattcaatcactctgcctggaggaaaataatgggcaaggggggtatccatatggtccaaggttcaactccctgacttattttttcactaagactcaaggattcgaaattgaaaccatgctttctcccttgacgatgaaacttccaggggttcggtgggaaatgcaagtacctggaagagagcaagtgccttggcatttgcatcaacacatgcaaactgcccactcagactttcttcaaagatcacatgggtgttgatttgtacatggagccaaattttgaagactatagctgccagttcaacttc

SEQ ID NO: 328479 - DNA, 254 bp, Zea mays
gaaaggctgacaacaacatatgacgacacagattccatgcaagggacatttaacactaatgcacagatgcacgtaggaagaaataatcagcaccttataaacggatgcaacgggaacccagcaacgttacctccgactgaactatcagtactggaagactccacgtttaaggtcgttcgcttgtcgcctgaagagagaaaggaaaagatccataggttcataaagaaactgaacgagagaaatttcctccaaaa

SEQ ID NO: 328480 - DNA, 403 bp, Zea mays
gattcacaagaagtaaacagcttagcatggtgagggatgacatccaatggaaacgtaaaatgtacacgaaagctctaatagaaaagataagcaacttgtaccagatacgcacaacaaccaatatgtagatgtacaacgtgaaaattcttatgtcagaacaatcagaagtacaaatatcaaggccttctgattctggccgttctagtttcattacaagagaagtgttcacataatgtgattcatagacagcttctgcaatttctttaatcctggcaagttttcagttagcaacagtaagtccatatttggttatttttatttttatgttattttatttaattatttttattttttttttttatttactttatgtttattttttttttatttttttttttttttt

SEQ ID NO: 328481 - DNA, 269 bp, Zea mays
ttaaccaatttcaacttaataaactatctcattaaaatacacagcttaataaaactctctagtatctccaacatacattattattctgccataacaatcatcactctttaaatattatcatatattaatagaccatacaatttaccttaatatactataaatatcctaattttaacccaatcttattccacatttcaaatcacttatgtgaaatatctttttattaccatacatcaacaccacatttttttatattttactaaaatatt

SEQ ID NO: 328482 - DNA, 306 bp, Zea mays
ctacgcctacaacatgcgcaacacgatcaaagacgagaagatcgcgtccaagctggctgccgacgacaagaagaagatcgaggacgccatcgacgcggccatcagctggctggacgccaaccagctcgccgaggcggacgagttcgatgacaagatgaaggagctggagagcctttgcaaccccatcatcgccaagatgtaccagggcgcgggtgccgacatgggtggcgccggcggcatggacgaggacgctccggctggaagcggtggccctggccccaagatcgaggaggtggactaagcgga

SEQ ID NO: 328483 - DNA, 406 bp, Zea mays
aatgtctgctgctggtaggactgttgagactgtgctgtacttggctggtttgggcaatgtcaaaacaaaggtgtgattcttgagtcccagctatcactatcagtcctttttcaaaattgtgatttcctttctattttttcttctgcagattatcggatcaaggaacccacttaatgtgattaaagctctcttcatagctttgaatgctgtatgtgcccatttcttgctcaaaatctgcccaattcaatctcctcatccttgatatttatttgtttatagatcatcttctctaatttatcaatcattttgcttccagattgaaactcctaaggatgtccaacagaagtttgggcgtactgtcgtcgagtcatatttattgtgatcatcatggttgtttggaggacac

SEQ ID NO: 328484 - DNA, 228 bp, Zea mays
  unsure (1)..(228): unsure at all n locations
tttttttttttttttttttnntnnganttnttntttttgtttttgtaaaattttaaatggtttaaagaaaaaaaaattttaaatttttttttttttttnnngaaaaaaaagnnnaaaaaaaaaaaaaatttttttaaaaatttttcccttgtaggaggttgaaattaaaaaaaaagcatggtggaaaaaaaaaaaaaaaaattttaaaaatgaccccctctttctttt

SEQ ID NO: 328485 - DNA, 447 bp, Zea mays
  unsure (1)..(447): unsure at all n locations
ctcaaatnttcaaactctagttttctcttatataacccacgccaacanaaacggggctcggttaatttactagtgtgccccgacaccnacaaaaccacccaatattaacttccttcattcttattctatttttactaccataattactatttaacctgttattttcttcctaactttctttaacacttttattgattatctctttctcttataaaccaatctattttccattttcaatcattaatatttatttttttttatttattaaatttttatatttttttttattaattttattttatttaatattttttttttcccttttttatttattttatttaatttaaatttttttttattttattttattcttttttttattataatattttaattttattcttttattatattttttttctatttatataattttttttctttttt

SEQ ID NO: 328486 - DNA, 178 bp, Zea mays
cccacgcgtccggagcattccatcaattttcaatttcgtcccccaaaaaaagcggacgttaaattttaattggggaagctaatacaaataaccaatacaacaacaaatactataatcaactcatgtgacatctaaaatactatcttcttcccataatttttttttatcaaactttata

SEQ ID NO: 328487 - DNA, 280 bp, Zea mays
ggaattccgggcgaccagcgttcgccagcgttcgccagcgttcgttggtcctgtgaggaccctccatcatattaagagaagaccagcagcatctatcattgtctgctcaacccgggagtggcactttagcttcataccagcacctgtggtagctgctccagctgcagtctctgccaaagaggacttctttcctgttttggaagccccccagaccagcaagcgcaccaagtcaaaagcatctgatatctgtgcccagaccgagaacaactctgttatagta

SEQ ID NO: 328488 - DNA, 321 bp, Zea mays
  unsure (1)..(321): unsure at all n locations
gcggggctcgggtgcncccttcgctgcccttccccctccgcgtccccggctccccggtggccgccgctccaccgctgcccacggcgcggcccgcccgggcctncccgctccctcctgccgcccgcgcggcgtttcaagcccctagacatgaagaagggacatagtaggaactcaccgaagaccttcagctcatctggacactcgggggttaaactaaacaacgaaggtctcgtcaacgacaggctcctaataaattgtggagaggatcaagattgtgtgctcggtggcatagttgccctgggaaagtttgatgctctccac

SEQ ID NO: 328489 - DNA, 372 bp, Zea mays
cagcgtcgagagctggccaagatgaaagacctaagggggtctcaaaggtgaagactgcctagaccattggctagctcttttgttgaggactcgctttctccacaaagcttctcgcagctcaggagttgcggcttcccaggcttccagctcctaaaatgtacttattcacgtaccaagggatttgatctgccgtaagtattatgcgagatttgttccaccatttacgatcaactgtatagttctaaagatcccctcaaccaacatgctgcggatttgaagggcaatcatcaggaacatgtccgcatgaaacgtatgcaagagtgagatgccaaatcagatgatgacgtttcaaaaggtgaaagacatttttgt

SEQ ID NO: 328490 - DNA, 191 bp, Zea mays
gggtgaggaaagtcagggactacttcagctatgtgacgtacgctacactgcatgagtgagctgtgtcggcatgagtaggagacaagtgcctcgatagtattttggctaattgttccagtactgtattcatgatgtgcacactgctctgtactactggtgtgcatgtgattgttgtacattatttgctcttc

SEQ ID NO: 328491 - DNA, 72 bp, Zea mays
  unsure (1)..(72): unsure at all n locations
aaaaaaaaaaaaaaattaaattttaattttctaaaaaaaaaaaaaaaannggggggaatgtaaaaaataaaa

SEQ ID NO: 328492 - DNA, 222 bp, Zea mays
gcgcccacgcgtccgaagaataagataagaccattttaagaggaaacaaacaaaaataagaaatagctaatgaggtcaaaggcgtaggtgctgaatagacattgatgatcttgcgtgcgtttagacacaaaggctgatatctacagtcgtttgaattgatttcattttgcttgagcctcattttaatacatttgaaatggcgatgctctaggatgaactcta

SEQ ID NO: 328493 - DNA, 337 bp, Zea mays
cgacccacgcgtgagccaagccttccgcccacgcgtccgcccacgcttacgaccatatgggatggccatatggcctcccagtgagactgctcaatcgagcgatgcgctcaagacattctgagatacatgggatacctcaaggctgtctggcacgtcagcactctctattgcgcagttacaaagatgcaggttccaaactcagatggcgctatcacttgccgaccagctgcaaggctgctaccaacttaatggcacgtcagatgccgctaaagtggaatatgctggccaatggtcgcgtctcatctacatagcactagccagaaagccttattgattc

SEQ ID NO: 328494 - DNA, 309 bp, Zea mays
agaccgatgactgtcacactagatgattacatgaatcttgtcacatctaaactgaactgaattgatgacgacatggcccgaatggtcgcttctggaatcattggtaactggcacaacatttttgaataagctgattcacagaattccatgctgacactatttaagtcaagcgtatcggcaaacctacagcgcagaatcacaccgcgtagaatggaatgacgacgaatagggactaacgaatagaattgtctaagcacgtatgcttaaaaggatacaactgaatggatctgagcgcttcaattgattgat

SEQ ID NO: 328495 - DNA, 408 bp, Zea mays
agaccgatgatggtcacctagagatgcaatcatatgtttgctcataaactcaaatcattggcagacgacatggactgcttgatcgactgtggattcattgttgagggggacaacattgtaggcgatggcgtatgacggaattccatgcggataccattaaagtcaagacgttcggcaagcgtacggcgcagaatcgcactgcggacaatggaatgacgacgaatagggactaacgaatggaatggtctaagcacgtgtgctgaaaaggatactgctggacggatctgtaagcatcgattgattgatgatatgcataacttgaaatggatgaccaaggcataggcgaactaagtttgtggcaaagcacatgctgctgcatgaatctacagtaaccgaagcagacgaatc

SEQ ID NO: 328496 - DNA, 394 bp, Zea mays
cccacgcgtccgattttctttgaatgcgttcaacgggaccattgctattgcttgcaaggcctttttccttgccagtcaatataattgtgaatttgaggctctgagcatgtgctagaatgggcatccataatagtaaatataagaaacagtttttagtactaatttattcagtattatccaaagaagaatttagtggaactgttttgagtgtgttgtatagttatgctaattctctcatctatttgcggctcactacaacgatgtttacagtacttcatttctgaacttggttttcaatggaattgcctagcatctgcattgtaatttttcatgctccggtcatctcagattgtgaatacttatgttttctgtaataatcatgggtcattttgac

SEQ ID NO: 328497 - DNA, 286 bp, Zea mays
accacgcgttcgaacacgaacttattgggttttactggacgattggtcttgcagggaagggcgcaatgctaatggctgtgatacgagaccaaccttcaacagtgccgagtcagtcaatgcatctgctgaaaaacatggattggatactgacgtacagaaacagtatacacctgttatgaaacctaaagcctactctcacaacttcaagtgtaaaggccccatgtacgcggtatatgcatgagctcaaggacactaccagcatgtgaccctgacaccggaatgaagc

SEQ ID NO: 328498 - DNA, 142 bp, Zea mays
tttccactgattggcgataggtccgttttccttttgtaaaagtggccgtgtgactgtattgtgcattcacagaagatgtatcggacattcttaagtttttgattttgtttctctgtaacaatgtatcaaggcacgatggtct

SEQ ID NO: 328499 - DNA, 206 bp, Zea mays
cggacgcgtgggattattatttattgttttttaatttattttttttatttagataactgggaacttaatgattaatattattattttttttttatgctctgtacaattctgatagtgataaggacaaaaagtgatgagatcttggttggcacaatgaacattggttctcgggaagagagagagagagagagatagacagagagaaa

SEQ ID NO: 328500 - DNA, 307 bp, Zea mays
aaaaaaaaaaaaaaaaataaattaaaaaatttaaaaaaaaaaaaaaaaaaatgaaaaaaaaagaaaaaaaaaaaaaaagaaaataaaaaaaggaaagcagcaagcgataaattaaaggtgctgtgcgataacatacatcgcattacgaatctctgtgatccctatgatggacttgaacggtccggtaaagcacatttttggactcatctaccaggatacccgcgtaatgctcaacatctttgtgcagaacgtaattagctactctgtaacctataacgagcaaggccgtttgaagagcgtcaccgag

SEQ ID NO: 328501 - DNA, 399 bp, Zea mays
aggacatgtactatatcacctgaatgcgttcgaaccatctacacctgtgaaggagactgtcatactcattgaccgcatacgaaagaacacacgaaagtagcgcgaaggctctgtgctgaaaaaatgagccttcaaagatcaaaacgaaatctcttgttaacactctgcttagccttgaagattgcacgataagctgcttatggcacgcttgatgcctgctgttccactaagcactattttactttgacattcctaactcaagcactatcaacatgttgagaaggaggaacagtgtccatagaagtgctcaggtgatcaaatggatgctgagcagacggcaatgaaatacaatgagaacatatgaactgatggcatgtgcactccagaaggataatagag

SEQ ID NO: 328502 - DNA, 379 bp, Zea mays
cccacgcgtccgcccacgcgtgtctcgactcatgacgatagctccgtcgttgacctaactaacaccgcgtgacagctagctctctcgcgcaataatagccgagaagctgagtgcttgtgacagccgcagatggtcgcggcggcggcggacctggcagccgcgctgctgctgctggcggaggtggccgagacggcgtcagaggcggtgagctgcggcgaggtgacgtcgacagtggcgccgtgcctcgggtacgcgatgggcagcgcggcgtcgccctccgcggcgtgctgcagcggagtgcgctcgctcaacagccgcgcgtcgtcggcggcggacacggatgccacctgcaactgcctcaagagcatgacgggccagc

SEQ ID NO: 328503 - DNA, 99 bp, Zea mays
ttactttacagatttatgccggatagtatattcacgacattcctctcaaccatgacgatgcacaagcaagcacacagttacaagcaagccttttttact

SEQ ID NO: 328504 - DNA, 362 bp, Zea mays
acgactcgtcctggcactcgtcgtaaatttttaagctttatgtattgccatgtttttgagatgcaacgaagcataatgaggagtttatatgatctgaagtatctatgtttgttgatatatccatgtgaagagatcaaagttgtgtgattgctgagtccatctattgagcaaatgctgcattgtatctattcaaatcatacttctgaatattgattgttctgcatgtattgctatagcatgacaggatatgttagataggattgaacaaattgcattggtatttaatatgtcaccagaagcgaattgaggaggctgtgttatctgaactgtcacttgatgatacatcgttcatggacttcaaa

SEQ ID NO: 328505 - DNA, 422 bp, Zea mays
gcgcccacgcgtccgcggctggagatgacatttagggcgggctctatgtggttcctaagatggtgtcgcagggggtgcctctggcgaatctccacttacgatccacgagacctggggtggatgagatcccgttaccactgcttgttaagttctcgatgagctgtaggatctttcgagacaacgcgctttaccagacaggactgttccttttccaattggctcaaattgcgttcaacaatcgaaactcagtctccaacggtgccagaatggaacgtgctctcaagttaatttggagtacactcacttgatgtacttcatgcaccaccgataattcccaagtcactcaacagagcctacatgacctttctatgctttcgctctaatgaccactcactttgggttgttttgctgtgaaagaaaca

SEQ ID NO: 328506 - DNA, 96 bp, Zea mays
gcgagggacttgcgctagctgtacaggtacgttttagcagacttcagaaacaagccgctgtcggcaaacggggagctcacttcagacgatccaaat

SEQ ID NO: 328507 - DNA, 256 bp, Zea mays
cgactccacgcttgcgaaacacatacgtcctgactgctagacgacaggttcagcagatatctcacgtcgacctcgctaggccattggggtaacctccgtctatagtccgtgccaccatagacaccggcatcttatcacaatgcaagcccacgctcgctatcgactactgtatcatctctctatactgcgaccaatcatctgttcaattgactgtcactttcaaccatactattggtgcaacctctggtgatctcaa

SEQ ID NO: 328508 - DNA, 132 bp, Zea mays
gcgctacactagaaagggaacatcggatgcttgaaaccatcacaactggctgcattaggaatgatgcatggacttggatactagggtctaactgacgactgagatcgtcagcctcaagggggacgccaggga

SEQ ID NO: 328509 - DNA, 241 bp, Zea mays
cctccgctccctagcaaagttaaatcagagctgctgaccataacagcttccggcattatggcccatggatgtcctaggatacctgcgaataattcaccaacttgaatgaccaacagctacaagtgattaggccctaccctattaaatatacgaccttacgtactcactgatttgaaagaatcagatcttttatatggtcaacgctataccatcaactgtacgtagttgctcacccatgcct

SEQ ID NO: 328510 - DNA, 443 bp, Zea mays
cccctcgtccctttcctggaaacggatcttaggtcgccgtcgctgtcgagtactccacggcgccgagacgtttcgtcgtcgcctagacattccacgccaccaccgagtactccatcttccctctcaggtacgagttcccatctttcgagtactcgtcgccgccgctgttttgcccttttccacgccgtcgctgctgcagcagaaaggatgcaccgccagaaatggagtccccccagaactggatgaccaagctcttgattggccctcgccggaaatggagtccccccaggcgcaaccaaccttatccctctcaacgagatagttgtcgacatcaatggaacatttgtgccttcactgagtgctcccgcgccaaccaacacaggcttctccctcaccattgatgaggtagacaacacggtcacttggtgacaaaacgcagttta

SEQ ID NO: 328511 - DNA, 272 bp, Zea mays
tgcatcgttcggtagacgttcacgttttcgacgctgtcgcttcctgatctggggccttactaatccgcggtgacttgcccaccggctcgctgtcctgctcctcgatttcacacctgattgctgacacagatctgggctagcctgcatcgctcgcaccgtcttgtgtgcaattctgcttgtcattggaaactatcccctgtctcaccgggtcaagggcaccggcagatacactactgatgtggccatgcctgacacctatacgtccatggctg

SEQ ID NO: 328512 - DNA, 324 bp, Zea mays
gcgcctgtcctcgctcttggaccaaggccgtggctgcggcgtacggaggtttagcgctggcgggatccgtttcgtgacgctcgagggcgtctgcagtttggactcccgtctggagtcgctggtcacctgccgttgagccaacatgcacgtgacaaagagcggttcgcggcgcgttcgattggaggccgtatcgcgcgggagctttgcggctccgatggcattggactgggatatattcagcgtggcgccgttggaactcctgctggacgtgacgaacgaccgcggtgacacgatggactatcagtcgttctgcatcgaggagct

SEQ ID NO: 328513 - DNA, 263 bp, Zea mays
  unsure (1)..(263): unsure at all n locations
cccacgcgtccggatcctgccaatatttttgttactccaactgtcnatacccccaaatcaccctatctcaaatgctatcttatacaagatactggggccctcctttcaactgctccaaacatcaacaaaaccttacatcttctcctactacaatcacatcattaactacacccacatccttaacaaatcctccgataacatcaaacatgactacgctactactaatcacaccattattattcctacaccatcttatataactc

SEQ ID NO: 328514 - DNA, 325 bp, Zea mays
  unsure (1)..(325): unsure at all n locations
gatggcttctatctccncttcggttcgggttctggttcgtgaggatcttccggggttcggtttgttgggtgagcggatcgagatggcggcgtcggatgttgagtaccgctgcttcgacggcggcctcgcctgtgccacggacgaccactccctgcacaacgccttcagcacctacggcgaggtcctcgagtccaagatcatcctcgatcgggagacgcagaggtcccgcggcttcggcttcgtcaccttctccaccgaagaggcgatgccgaacgccatcgagggcatgaacggctaggagctggacggtcgcaacatcaccgtc

SEQ ID NO: 328515 - DNA, 249 bp, Zea mays
gatcgtgctaattctacttctacttcggaatttccgtcggtcccggtgcctcggattgtcaacgaccggatgaagtcgctgcagcaggatctgtggttcatcgtgcgatggcggcggagcctaccgtgcggggctacggtccagacgacgccgtcgacgtcgtccgtggggctgtctcagacgctatctgcggtgccctgagcgatcgtgcccatgacgacccggacttaggcgccgtatgtgcgcctg

SEQ ID NO: 328516 - DNA, 301 bp, Zea mays
gcataaggaaccaccatgggcagcacataagcattcccattttacttttaggactgaaagtcaggtagatgtgttctagttgaagggggggggggtgttctggaacttgggtaaatgggggaattctgaatacagtgcaaatagaagtctgctccctttggatattgatcatgcatgaagcaaaatgttatatctgaaaagcgcgtaccttgtaccatagtatctagtcttaggtgctccttgcattaatatatagtacctgaatatggcccaaattatgtatctggataacacatgtagc

SEQ ID NO: 328517 - DNA, 159 bp, Zea mays
tttttcgggatagctgtggctggacgattctatttcggaacacgaatgtcctagggaaaggggtcttatgcagatggattagggcctgtgttgcttgggggcttcacacttgctttaataactgggtgcatcctccttctggatgggcagagtcaattc

SEQ ID NO: 328518 - DNA, 319 bp, Zea mays
cttcttcatgtttcaaatgggacttcatacttttatgtttttccatcaagctatgggatgggctttcttgttctttatacttgtgtgcttctttcaactgctccaaatatttaaatagcttacatgtgctcttgttacattcagattgttaaggagaaccaaatgcttcacaaaggctctgttgagattgaagatgattttgctactcttgctgataagagtatttttcctggggattttctctgggtcagagactctgaaatatatgagaaccgtgacattgcagatgagatttcagaacaaaaggatgatatgctac

SEQ ID NO: 328519 - DNA, 261 bp, Zea mays
accacgcgtccacccactcgtccacccacgcttacgaaaaaaaaaaacacaaaaacacaaaaagaaaacattaaaaaaaccacaaagcccacacaaaaaaaacaaaaaaaaacaaacaaccaaaaccaaacaaacaccaaacaacaaacaaaaattaacttcacaaccacacaactaacaacctcttcaccatccaaaacctcacaaacctttacaaacacaaaccccaacccatccccaaacaccccccagtcaccaaaa

SEQ ID NO: 328520 - DNA, 329 bp, Zea mays
ccacgcgtacaccgtatatacttcaacttgtcgtcccaaaagcactaccgtcgcgagttctacacgccgtcagctggaccccgaccctcctgcatcgctggaggacttaaacgagggcggattggccgcgttgggcgccgcggcgtcccgacgatcatgggtacaggagacggaagacgggtcgacagcaccggcaagccacgatcacgagcgcacttttgagacgagaactggcgatcggcggacttcttcgatgcacatatatagcgtaggcatttccatttgcgaacttttgctgatttctactactggctatacactagcaacca

SEQ ID NO: 328521 - DNA, 434 bp, Zea mays
actacgcgttcggttctagatcgctagcggttttccttcttaatctgttaatgcacttccatagctcagttatctcaccttgtagcttataaatcatgttattcaggttgtgatactgcataacccacaagtcgatgattacagctggctagatagctatcaacaatcgattgatcatgttcacagcttaagaactatttatcctggtgtcagtgatactagcactgcatttgccactccattctctttccctgggaagatacacacacaagggaccaatgaaaagacttggcaagatttccacctttttgagccttcaaaacagaacatgttccaaacttaccacctaagaaatctgcaaagtggtcaaatggattaacaagatccagcaaattctatctggtctagcagttaccatgtgtgatttggtaact

SEQ ID NO: 328522 - DNA, 58 bp, Zea mays
cccacgcgtgcgaaaagataaaaaagtcttattcttcccgatcaaaccatgcataaac

SEQ ID NO: 328523 - DNA, 308 bp, Zea mays
  unsure (1)..(308): unsure at all n locations
cggacgcgtgggcaatgttcttttgcatgtgggtagtggctntgtcaacctcgacgaattgcaggtggtgcacacaaacttttgccagaaggcactagactagctgtcactcttcgtggtgatgaatcatacgagcagctagatattcttaaggatgttgatgatataacaatgttgttacataatggtccatatgttgaggagaagacaggcagggtgcatgctgctaggaggttatttgagtacttacaggccaatggcttgaacttccctgtaattcatcacataaatttccctgaaaccattga

SEQ ID NO: 328524 - DNA, 98 bp, Zea mays
tcgggcttcttcttaaatagagctgagaagagtcatttatttcagcagcaaggaatttccacgagtagtggaaaaggtaccttcacaacaaaacccat

SEQ ID NO: 328525 - DNA, 233 bp, Zea mays
ttctgagctatccaaaccactcacagattgattttcacctaacgttgatgactctctacgtctggcgtcactgcatattctggctcctatccaacacattgacacacacgatctaacttttcatccagtgaagacgcacatagatccatcatcatactatagatcagacagctgacaacacgctcgatactcctactgcatcaacgaactcccactattatccttcatccata

SEQ ID NO: 328526 - DNA, 361 bp, Zea mays
gccacgcgtccgattaagaatttcatattagttctaaacacattggaagtcacaaaggaggatgaggtctaagcctataaggtgttcaaggaccctgagtccctgacaatcgacaaatttccttgagtgcgtgcactgatgatagagatattgtattgatgtggttgacgcatgagatgactaagcaggtatatctaacgttaactacatatcctaatgttagactacccgtctagggcttggggtgttccccctgtaattaccaactcaccctctgtattgggcctggcccatttaccaagtctattaataccactcctagccctgattaaggttatggttctcattccaacatggtatc

SEQ ID NO: 328527 - DNA, 373 bp, Zea mays
cagactctaacgcagtcactcatactgacttttatgcgactaggcttaaatatgacctaccgtcatttttaagtcacgcatattcgaccacaacacatccaaatacaatggactaaccacaaagaaacacacaatcacaacatctttaccatttttctggcttactgcaagcaaatactatacccagttacttgatgtgctcaaatcttacccctattcacgagttttacttataccagatccttcatacacattcatgctacaaaatataacccatctgttgcacctaataatctgccaccaatcttcatgcaggagacttcataacatgtaagctatcccaatactcatactacgcatcatgttcccaata

SEQ ID NO: 328528 - DNA, 358 bp, Zea mays
ctagttctagatcgcgagcggccgccctttttttttttttcttttattttttttttgtgcttcgattggtcatgttgatctcgagagcaagatgccatggccaaccatgaggtactcgtttcacggagatggtatatgatataggtgatcggagtgatattttacatggtgcatatagtaacttgtcgaactgagaatgttttacctgtgatgtacatcggacttggaagctttgtatcattgatacaccttttcaatggtggcgaataaatttacagcagatgttttcaataacctttttaaaaaaaaaaaactgccttaaggactaaagttaccatagaacaaatttaattaaaac

SEQ ID NO: 328529 - DNA, 396 bp, Zea mays
tcaggtctcatgtgccacatactgacccattttctattcattcgcaatcgaaccataccagcagccattctgacccacctactgcgccggaatcctgagaccacttgcaccatgcacacagcatatcccaagaaactaccatcaccactatcgagcagcctatagctattgatcaagttgaacctgtcaacctcaatgtacatgaacttgtggtcgatgatcatcaacctggctatgctccaaggcgtgaatctgctacgctggataaacctgcatgtacttccaaaacggatgattcaaatgagattcgtgaagatagcatatcactggaaaatcagttagaaatttgcaatgcaactactatgtctgatgagtgttcctccacaaatgcaaatg

SEQ ID NO: 328530 - DNA, 271 bp, Zea mays
cccactcgtccgcccacgcttccgcccacgttttcgtttactcttaggctgactcattttctagtgcagttcaccacccttcccaattccccatcttctccacgatccaacacaaccccaccttcacatcaagcaatacaccgtcgtgtacccaatccagccacacaagtccacactctacacagtccctcgatcccctccccctcttccttctcccaattctcctcgatctatccttctgctgtcctcgcatctatagcctttcaaaacc

SEQ ID NO: 328531 - DNA, 334 bp, Zea mays
aaaaaaaatactaccactctttctaaacttttttatcaaaaatataaactttaaacaaaactagtgatctttaaataattatatgacacaaaaaacaatcaaaaaaaaaaaaaggccgaccttcctaaagaatccaaatttacttacacattcatccaactcaataactattttatattacccccaaatattaattcacttgccaaatttttaaaacatcaatatttgaaaaaccctgttttaccccaataaaatatcctttgacaaaatccccttttctccagatatcatataagcaaaaagccccaatcacatagacctttcaaaaattttc

SEQ ID NO: 328532 - DNA, 94 bp, Zea mays
aaaaaaaaaaaaaaaaaaattaaaaaaaaagttttatttaacaaaaaaaaaaaaaaaaaaaaaaagaaaagaattaaaagaaaaaaagagaaaa

SEQ ID NO: 328533 - DNA, 321 bp, Zea mays
accacgcgtacgaccactcctgctcccactgtgtgctcagaagctatgccacctgttgacacacgaccacataacaaagcacttgcgcaatcaccataccaaccgtccctgcaaacatctctccgtttcatcgcaatatcccagaaccaacttcagctttattaccggcctgtcacactttatggaatttcacaatcccataaatctgatcttgtttgccgtaacgatcgataaccttctttgctcaaaatgtaccgattgcatcgaacgaatggccaatagcctcacctggctactaatcatttctctgaacttcacatt

SEQ ID NO: 328534 - DNA, 290 bp, Zea mays
cccacgcgtccgcccacgcgttcgcccacgcgttcgtttctagatcgcgagcggccgccctttggtttgttttttaagtttttttgggtttttcttttttttttttttttttttttttttttaaacttaaaccaaaaaaacccttaatttactttttttaaatcgtaaactttttttttaaaagatccaaatttaaatactcttgcattctaattcaaaactcttttataatgccacctaaatttaaattaatggccctcattttaaaaaattatgaattttaaaaacct

SEQ ID NO: 328535 - DNA, 265 bp, Zea mays
cccacgcgtccgcccacgcttccgcaaggttaaacatttatgattgtatgcaatgctccaatcggtgtggaaaaaaaaaaaaaaagaaagaaaaaaaaaaaaaaaaaaaaaaaaaaaaaaaaaaaaaaaaaaaaaaaaaaaaaaaaaaaaaaaaaaaaaaaaaaaaaaaaaaaaaggccgcccattttaaagaacccaagcttactaacccaatcatgcaaccatataattattctataatgtcaccaaaatccaattcactgcc

SEQ ID NO: 328536 - DNA, 447 bp, Zea mays
  unsure (1)..(447): unsure at all n locations
atcgcctcctgcgcagcgcttcagtcaccgcttgcgcagcccccgccaacgccgaacgcgccagcggcgaactcgccgccccaggcgcctgcagccggaaacccgccgccggcgccccaggcgccgccggcaggcaacccgccacctgcgcccaccgccactccacctccggccccgaccactccgcccccggccccgaccacacctnccccggctcccacaacgtccgccccggcgccgacaactccgccaccgtctcccccggcaagcccgccgcccgctcccgccaccccgccaccgtctccacccatggcgccacctnccgccacgccccctccacccgccaccccgccgccaccggccgcgcccacgccggccccgagcgtggccccgactccccctgccgtggcgacaccggctgcgtcccccaagagcccgaagacgccc

SEQ ID NO: 328537 - DNA, 163 bp, Zea mays
caccggaaacccgccgccggcgccccaggcgccgccggcaggcaacccgccacctgcgcccaccgccactccacctccggccccgaccactccgaccccggccccgaccacacctacctcggctcccacaacgccgtccccggcgccgacaactacgtcaccg

SEQ ID NO: 328538 - DNA, 217 bp, Zea mays
cacacgcttacgctagctcaatccagactatataccatacacctgcttcatccctactccgtggtgtactcactataaccggagcctgacatagtgatcgaaccatcttagtcacgctatttatttaacagctgatacaaattgatgtagcaacaaagtttttcaaaactgctattcatatttttatgtgattgaataattttacacaaatacacgt

SEQ ID NO: 328539 - DNA, 365 bp, Zea mays
aattccgtcgacccaccgtcgctacctcgcgacctactctgacttcactcttatctccaccgatccatgagctataaactctaactccgccggccactccttccccaacacccaacacatctcaacctctgctatgcgcaatgcatacatccagaccgaatcacgccgtcccttgccaaaaatctcccaatgtgatgaccacgatcccgcttgcccaaaccgatttactttcatattccacaaacccagacatgaccaaaactgctgcaactgccaatacacaggatcatctttcaagcaccccacaactgataagctagactcttatcctgcataaccctgctccaagaaatcccttcgctgtc

SEQ ID NO: 328540 - DNA, 105 bp, Zea mays
ctcagcgtgcaacgacactagcatcatggttttcttattatccggtgttcagcgtcctggcgaaagggagccatactcagatgaagggattgcttccatgacgac

SEQ ID NO: 328541 - DNA, 169 bp, Zea mays
ctcaagcctacacacatgcattatctctatttttaccatatcaatggactaattaacattcacgaccatcttaaacttacccgagccctacaaaaccagcctaatccaacttacttatgtactataccatctttactacttatactacaaccagctgtcttaccaacac

SEQ ID NO: 328542 - DNA, 397 bp, Zea mays
ttcccggtcgagcacgcgtccgcccacgcgtccgccacgcgttcgaccacgcttacgtacgatccttcttcactgctgcaggggaggagggctctctcgttacgcccgaccatgcacgggtggttgtacttgaatcacccgaggcagcatcagaagaagcagaaactcgagaagtttgtctttgatcaattacgaacaggcttgcatctgggcgtgggctctatttgcagcgtgtgctactacataatctactggtacattcatatcatatgacatttactattttttgcaccttgagacattgcttagtacttctgtgttgccttgtgaaaagagagtggtaaggcttggatccgctgatgctcttgtttaaaaaaaaaacacttccagactaaag

SEQ ID NO: 328543 - DNA, 346 bp, Zea mays
cgcgttcgcccacgcgttctcccactcttgcttttcaaccttcttcactgctacacgggacgagcgcaatttcgatgcgccctaggaggcactggtgcctgtactagaatcacccgaagcatcatcataagaagcagaaactcgataagtttgtctatgatcaattacgaactggcttgcatctgggcttgccctctttttacagtgtgagctactacataatctactgttacattcatatcatatcacatttcctattttttgccacttgagacattgcttaatacttttgtgttgccttgtgaaaagagaatggtaaggttttgatctgctgatactcttgttt

SEQ ID NO: 328544 - DNA, 239 bp, Zea mays
  unsure (1)..(239): unsure at all n locations
gggtccggcccacgcgtctcgcacacaggatgaacgggtgtgnggcatgtgtgttgttatttctgccgtgtgtgtatgtatacagggtgcggctgtatgggtagatcaggctatatatataacagactgtgtgctggtctattattgccctcatttcaaatacttatttttttcgccggtattaataatattattacatggagtatggcattagtataaaaaaactatgataacaaaaa

SEQ ID NO: 328545 - DNA, 155 bp, Zea mays
gcccacgctcgcccacgctcgccacgctttcgcgacctggctcaggtagagtggagcacgttcacagatccagcattatgataaactgccattgcaattaaccttgaaaccaactagatcttaaagacttctaaaataccatgaacatattatca

SEQ ID NO: 328546 - DNA, 297 bp, Zea mays
cccacgcgtccgctaacgcttgaattcacacttacactgtatactacttcacaacctcatcccgctcgagaattttcatgagacagcgaggagaatctatcctatatacaccttgactaacagcaagagctataaactgtcaataacagctctacagttcaaaagctctatcaactacctgatcgactactaattaccattgatacacttatattcaagtccactgaagaccttttacaaccctacatcattactattatatgctattgcaatccatgaaactccacacacttcaat

SEQ ID NO: 328547 - DNA, 447 bp, Zea mays
  unsure (1)..(447): unsure at all n locations
cccacgcgtccgcaggtttatctgcttccctttcgcgtgttcacccggcgagagcagcgtcggtgaacggatttcctttttccctgagcgaagctcggattctgttgcaactaaccggatcactcgcctaccgtgctaatcgcttgcgggccggctcccctagacttagaacccagtagccttataaaaccgagccatcccttttcgcttatgtcttgtccgccattatcgagagcagaggaatttgagcgatgccgccaacattgatttcgggctgcgttcgggttggggccacggtgtactgccagggcgcttcgccagggcacaatgactgtggccgtggcaccggtactaggaaaagagcatcagaagtcctattatccctcattggagttagagctccgncgtggacccaaatatcgccgtggtctgggttctgtgctgcgt

SEQ ID NO: 328548 - DNA, 309 bp, Zea mays
accacccgtccgccaggccatcgcgccgctttcagaattccctttaactttttgacacgatgcgaacccataagagctaggggactactataacaagctagggccataactctactttcattctctactcatcactggacaactccgcgcaggaactacacctcaccaacccgatactctccacccaggaataacgataacaccgtacactactatcttcccctttcatcgcctcaccgatcactcccacttataccagtacgacatacttacatacaactaccaattaacactctctagctcctgtga

SEQ ID NO: 328549 - DNA, 281 bp, Zea mays
ccacgcgtccgtttgttgtttttttttttttttcttaattttatattccacttatctctcatctttctgggaggtttttttttttggaaaagggccaatgcttatggcaaaaaattttaactgcctaatttcttcaccacgctttccgcgaaaccaccggctatttaaaggaaaaccccggtaaaaaccatttcaaaacgcgcacacttcactattgaaaaacctatccattagaaaaaaaagggataaagaaaaccccctaaaaaaaccgttccccaacc

SEQ ID NO: 328550 - DNA, 118 bp, Zea mays
cccacgcgtccgcatgcatcaaccagcatttactgcggatcgatgggtgctgttacccgcgtcaggctttattctaagttaaatcctaaggaaaaaaaatggtgcttcttggtgctgc

SEQ ID NO: 328551 - DNA, 273 bp, Zea mays
acaactgccaattcaattacaatatgctaatactctcatatgccatcataaacttatacatttaaataatgttagtcctctagaggactcaaagtcatgacgagttcaacatgtactacatatctgatctcataactatacgtggattgtataccagctcaaacaacttcattttaaaagttaacaaagaatctctttgatacttatttaaagagcctgaaatatcacatagattattttaataaactatccaaataatactatgaatattta

SEQ ID NO: 328552 - DNA, 397 bp, Zea mays
cccacgcgtccgcccactcgtccgcccactcgttcggcttcgggctctacgtccccagggtgtgtgccacacccacactgagcgatatacgaaaaccgacggcgcctggcccctaggacctagtcacagacccttgatctttcttcgacgcgcccccgggcatggcgaaccgcagtgttgccatgggcttggccctcgcgttcgtggccatgaccgcgctctgttgcgcgccgggcgccgcggagttgccccggctggagcactcggccaggagcgaacgatcgctgaagctgctcgtcgtcggggacttgggacgcagggggactcacaaccagtccccgggtcgcgacccgatgggaagggtccgggagaagctcgatatcgactttggtatatc

SEQ ID NO: 328553 - DNA, 356 bp, Zea mays
cagaggacatcttggattttaacactgaatttactctttaatcacttatataattgatggcgggtaacggagtagttgaataggttagaccatgtatgattgatctattcacttcgatgacgatccttcacccaacttgtatggctacctacgcctgcttactgcttacacagggctagcgctcatgctggagctcactgagaccagggctggatgctttttcacaaatggatgggctgcggatgcctttcagttgtagcacaagtcttccacctgaactgacgattttctgacatgatacgcgtttgatctcagctgctgcttcatgcgagattactactatttatgtgtatctc

SEQ ID NO: 328554 - DNA, 398 bp, Zea mays
  unsure (1)..(398): unsure at all n locations
gcgnccacgcgtccgcttgtctctgttgacactcttatctatgaccatctctgcgctgagccagtgagcgaggacgttcagagctgcgacattgtcgccttcaacaagatctaaatttccttgtgatggtggcaatggtggttggtgggcactgtaccagcctaatttataattttccatgagcatcttcaagagtttttctaaattatcatttggagtcatttacataaaaagcactttctatatctttttaatctcaacaacttttctatatcttgttggcaccatctttagctagcgagaaacctggatggctggaatagaagataactatatttagacaatacttttagtaattcttgtgtgatcggatgcataatggcttggtctggctgggt

SEQ ID NO: 328555 - DNA, 124 bp, Zea mays
  unsure (1)..(124): unsure at all n locations
cgggtccgacccacgcgtnccgaaaaatgcaaaaagaaaaaattattaaaaaataaatttttaaaattctaaaaaacaaaaaagaataagaaaagaggaaaaagggtaaaaaaaagggctggcg

SEQ ID NO: 328556 - DNA, 352 bp, Zea mays
ctcttcttcacctcactaacaccagctagtaactctttctctcctgcaataatggccggtcgctcctcctcctcccagccgcagctggtcgcggcggcggcggtcctggcagcggcgctgctgctgctggcggcgggggccgggacggcgtcggcggcggtgagctgcggcgaggtgacgtcgtcggtggcgccgtgcctcgggtacgcgatgggcagcgcggcgtcgccctccgcggcgtgctgcagcggggtgcgctcgctcaacagccgcgcgtcgtcggcggcggaccggcaggccacctgcaactgcctcaagagcatgacgggccggctcggcggcggcgtcagca

SEQ ID NO: 328557 - DNA, 439 bp, Zea mays
  unsure (1)..(439): unsure at all n locations
cccacgcgtccgatcatacctgatgaacttttggtcttattttcaaatggccaagactaccggttggcattaaaatggaacaagcatagtgtcagggcctaaggaggcccacggaggggctgcgacagcagcagccatgggccctccaagggggattagataaggatagttagagataagattagaagattagttgagattatttaggagattagttgagattatctaggaaggttatcagttagtagtttgttgagagtttttaggagagttttaaggagataaggatcagtagctagataggggcggccaatcggcctatttatgtaatcaatggatgagaaataaagcaagcaagaacggggaagaccaatggggcatctnctgagagaacgagcatattcatttatattgctctggaagtatttaactagtttac

SEQ ID NO: 328558 - DNA, 256 bp, Zea mays
ccggcgggaaattggaactgtggtaaaatgttagtgaggatttgttacacgagtcttcacatgatataagttctccgactatggattgcgacaataattcaaaaaaaaaaaaaaaaaaaaaaaaaaaaaaaaaaaaaaaaaaaaaaaaaaaaaaaatacaaacacaagcatacaacaaaataataataaataatagagtaacctaaattaaattaactggtccgcagattcacaactttcactactgggaaacccc

SEQ ID NO: 328559 - DNA, 331 bp, Zea mays
cccacgcgtccggatcttcccagccatcttcacatccttgaagagcacggatgctagcgatggttccgagaacgcgctgatggatgagctgcaggcactgcatgagcatctgaaagctcatggcccctacatcaacggctagaacgcatcaccagctgatcttagcatggtgacaaagctcttcacacctccaggtcggactggagcatgacaaaggctggcagatgcccgaacatctaaccaacgtccacgcctacaccaaggctgctttcagccgtgaatctgttgtcaagactaatgcatacgatgagcacgtgattgcaggatgggc

SEQ ID NO: 328560 - DNA, 442 bp, Zea mays
cccacgcgtccggatagattacttatacctttaaccttcagaatacaatcataggagcactggaaaattatcggaggacatgatatcatcacatgacatgaaacgactagaggcgtattcaaacaattcaaaccgattatccatgtgatgctggatctagtacccatgcttgcacatcagtattttttacacaggcttccaatgtgattacatggtgcatatacagttcgtatgttctgtctaagcctgcacgacaacgacataggcactgcgaatggagatctcgctatagaaagggcacatggtctatcaaacttcatacagacaatgaagaaactgcatggttaccttcataacattggaaggaaaaaaatcggaacaaccttacctcgactgaaatacattgaaatgccctcttttagcaaatcgatggatgaggacc

SEQ ID NO: 328561 - DNA, 320 bp, Zea mays
  unsure (1)..(320): unsure at all n locations
gcgacggaggaacgcctgggcggccgtnttgttgggctccaccgcggtctggttcggcggcgatcttgtgggatacagcttcctctacgtactcttgaaaactagcagagcaagcaagccagccactttacctagctagtgttccggctgattccactggcgacgattcgagtttgagaagcacgtgggggcggagtcgaagaaccagaacggtaacattctnctcaccaacgacaagttgctctacgacctgtttcacgagctcagaaattggcccccttgtgcggaggagtttcgggcgaacgccggggtactcatga

SEQ ID NO: 328562 - DNA, 358 bp, Zea mays
cgacacctggtctgactcttcggattacctatacaattacacaaaaaacaaaactaaaaagggcacggggcaaataaaaaaaggaaccaggcaacaaaaccataaaggaaaccctttatgaagaccaaactaacaatcacctccatatcaagctctacaactaatatacgtataccaacatttaaacaaatggccctgctataacaaccaccttacttgcaaacccttgacgtaacctaaattacaccactagtcatgaaaagctcttctaaaccatgacctaaacctgaaaaggtcctactacacgtactttaccaacaggtgcgcactctaataaagcaactacaccaccccttac

SEQ ID NO: 328563 - DNA, 161 bp, Zea mays
ggacgcgatgaaaatttcatctcaaatttgcgaacatgtccagagcgcggggctacgggtccaacacccgagtggatgagctaaactcagaacctgctattcctgaggtattacctgctccggaagagatcatggattactgtagatctaaaatgataaca

SEQ ID NO: 328564 - DNA, 240 bp, Zea mays
gcggcaagccagctcgcgagctggcctgtggctttatccaacaacaatttcttatatagaatcagagttagcatataatagtagtactgagtcgataattaatttatgctatttgagattactatacaaaattgatatattatctatattatattagtgatatattaattctactaatttaaaatatttttaagagtttatattataatttagagagcagatgtacatttatgggtaggc

SEQ ID NO: 328565 - DNA, 443 bp, Zea mays
  unsure (1)..(443): unsure at all n locations
cccacgcgtccgttttttttctttatgattccttcctaatatgtatgatgagttagttgttgtctcattctagttttgtcttaggcaaaaaaaaaaaaaatccatgatcttgttggcatgaagtgtttgaagttgtgactaaagctatgactagttggagtcttgagatgtttattttctatatgcccatacacttacatgactaggaagtttttttttctctagtatatttaattcttctgcactagggcaacaattatcatatattcggaattcatggttcctttgtattttagtttatgttgttgcacatcagttttctgttcatattaaattatgggttcacatatataagctgcatgtttggtcgaattgttaattttgcttgtcaaggaggatgcacacctagattagacaangtggttcttatgcatgtagtcagt

SEQ ID NO: 328566 - DNA, 342 bp, Zea mays
cccggactggctggtgatggcatgctcggtgtccgatctccaggacaccttcacggggagcaatctgcgctgatatggtgagcgcttatataaggtggcctactacagtcatgtaaaggctacaggccctcaaggctaaagacgcccaaaagatatccgcgcacactgaagaggctgttggatcgctctagcatgagcccgatgcacacgtggatcatacgagcgacactacgacttcgactgccagaactgactctggccttacgatattgaagatctgatgcatgcatctacgactagagtgtagcctacaattgctttcaaagacatgtatcactgtct

SEQ ID NO: 328567 - DNA, 277 bp, Zea mays
cacagactggctggagatggcatgctcgggttccgatctccaggacaactgcacggagagcgcacaccgctgatatggtggcgccttataaaaggtggcctactacactcatgtaaggctgacagccctcaaggcaggagccgcccaaagctaatccgggcacactgcagcggctgttgcatcgctctaccatgcgaccgatgcaaacctggatcatccgagcgacactacgacttcgactgccagatatgaccctgggcttaccatattgaatatc

SEQ ID NO: 328568 - DNA, 416 bp, Zea mays
cgaaccacgcctgcgcagacgcgtgggttgatctgtagcatccttttgtcactgtttaattagatgatctgcagccgcgcaatcatgctgcacacaaggactgcagtaatgaaaatcatgcacatgatatgccaaatggcttgggtttgaatcattctttcaactggtcgaccatgaactccaatagatcatcaaaaatcaagcccttatgggaggggagctgtgacgatgttgacatgtgtgagtttgcagacaaggatgaatatgcaccagtaggatctagctataatcctatgtcagaaccatttgataactgggaaaacaagtttgacacaagcccagagcaaagttctcatgaaccaatggaaattggtgaattggtcatacatgcttaaagcaggataactgagaatgat

SEQ ID NO: 328569 - DNA, 168 bp, Zea mays
gctgatatcagatgctgcacactctgacttctctgacacgaacacctattacatgacggcgaacatcatccttggctgatgtcacgaattgatcataagacatttccaataactcggactccattacccaaagcacatcaccgtgatcgctgaatgcaccaagggaat

SEQ ID NO: 328570 - DNA, 372 bp, Zea mays
tcgacccacgcgtacgcggacgcgtgggcggactcttgggacgcgtttctaggaggtttcagtttgcacaaccctgcggatacctggtgcaaggatgcatataacctgcttcagaacttggacataaggtgacttctgcgcatggatattctattagatacaatcaacctttccaaaaaagtgttcagagcatgttaagagaatcaaccttacatccagaaaggctatgctgacaagaaatgttatgaaaagatcccaccgtctatcacggtgaacctttctgaaagctgatctgagacaaactcgatatgcgggcaacaaggaccggaggctctttcttccatgaccacgccatggtgtatgcgataaatg

SEQ ID NO: 328571 - DNA, 310 bp, Zea mays
gccacgctcgccacgcgttgccaccttcgccaccgtcgccacgcgtcgtcgaccttcgtttgagcttgatgacacgtgcgattttgacaccatagacctcatatctacatattagaagccccgtcgacttacgggagcgtcccgatccggcgttgacacgtgtgatcgcaaccctaatcggatgtaatgcattgtagcagcgtggcctgagtcgtgaccgtgtcttttctcgcgcttccttcaacgcctctcgctaaagatccaccgatttttgctgggagtcgagagcgtgataccgggacgacgacca

SEQ ID NO: 328572 - DNA, 412 bp, Zea mays
gttctagatcgcgagcggcccccttttttttttttttttaaaaacaactcatcgatgtgagtatacaccaacgaatggctgaataacacagtaggacgatggaatgaaggaggtagaacagaataacaccatgcattgatgccctgctatctatggcgccgggtgagtgacaaggctgagaaaattgaactctgctactatagcgtggaaaatgaagagcaacaaggaatggaaattaacgggccgggactcttccggtgtacaaggaaggaacgtactccatcagttcatggtgttaccgtagctcgacgacccgccgagaatgtgcggatgatgtcctccggcaccggcaccgtacagccccgtgggaggagccatcgacatcgaggtgccggtgccggcgcccgaacca

SEQ ID NO: 328573 - DNA, 440 bp, Zea mays
cgtcgacagtgcacaaggccacaaggattgacttgacctctttcgctttgagatggtgtaccgtggtagaggggaggatgctgggggctacgtgttggaggacgatgactagtatgaccaggatgcgcatgtggctcgccttgaggaagagaacctgaccctaaaggagaggctcttcttgatggagcaagaggttggtgacatgaggcgccgcctggaggctcttgaggcaaaattttcgctaggtggtggtgttggaggtggcgagaatgaagtggaagaagctcctgctcagaatgatgcagagaggatccatacttggccagagaatagcagcgaggatgatgtatagatggttgatgcgggaactgagaaaggcggatcacaaacttatggtgccatgacttcagagaaatcttgcggggatgataccaacaatt

SEQ ID NO: 328574 - DNA, 256 bp, Zea mays
cggacgcgtgggctttggacatattccttttgaccttgccgtgaagtgctaaaaaggcaaggtcatggtgaatacagggagatcactgaaagggaccttcttggggagggtactggccatgaaaaagtcatttgccatttttaccacccgagattttcaccgttgaagaaccatggtaaccctttaaaaggcctttgcccaactttatggggacacaaaattttaaaagcttgactctaaaaatgctacatttttt

SEQ ID NO: 328575 - DNA, 431 bp, Zea mays
cgaaccacgcctgcgcacgatgccgtgggcgccaacagcggctggctttatgacgttgaccggcgttcgaggactgggacactaagagcggcgctctgtgggactactgcatggacttctgcaagatccgagagatgcgcaagcagaacaagaaggagctcttccgcgccagcctctgaggctacgacgacctcttagaccacgcccacgtccactcccaaaatccgcaagccaacagcgcccagcccaagcttggacgaccctgccccgtcggcgaccggcgaccgctccacgcccgcgaccactccccaacgggagggaagaagttcctgagctacttgcagtgctgaatcaaggcctgaagaggagctgccgcaatgctaagcctgagtgcctgcgctttgtcgcagcagaacacttgtgagcaatta

SEQ ID NO: 328576 - DNA, 265 bp, Zea mays
cccacgcgtccgcccacgcgtccgcggactcttgggcggacgcgtggggtctctagtgggggtagtaggatttgcggtgcgtgtgttgtctagtgtgtgctggaatagctgtggctgtgttcccgtcgtgtctgtggcctgtgtaggctgtctgtagtatactgggttgttggatgtatgcgttctggccgcaagactgatgtcatgctgttgctgcttactacagtttgcagtctgaaataaaaacttgtttgatgagcactgt

SEQ ID NO: 328577 - DNA, 258 bp, Zea mays
tcgcggacaaaaaaaaaaaaaaaaaaaaaaaaattataaaaaatttaaaaaaaaaaaaaaaaaaaagagaaaaagaaaaaaattaaaaagaaaaaaaaaaaaaaaaaaaaaaaaaaacataaaaaaaaaaaaataaaaaaaaaaaaaaaaaaaaaaaaaacaataaacataaataaaaaaaaaaaaaataaatatgggatatctatgaaatggctaatgtaaattacaaacataatccaaagacaattgtaatagaag

SEQ ID NO: 328578 - DNA, 219 bp, Zea mays
acgagcacttccatcctgctgatcggtaagtgcttctctaattcttagtatctacgaccttatctggactgtggccgtctcactggaggctaacgataacatggattcatgcaccgacgatggtaatctgggcgtaaccttttgctctgtacttcctatgatgatgtcttctactggagcctgctttgacagatctgggcttagccttaaaaacaataa

SEQ ID NO: 328579 - DNA, 317 bp, Zea mays
cccacgcgtacgtgcattgctttctcaccgtgaacacttacagcgcgcgcttcaaggtctagtactgattgcatgctcaggacgacaggatcatacggcagactcaaccactcctgtgatgtagaggctaatctcaaacagcctggtgaaccagaccgatcagatgaacgtggcccttagggactgtccattcatcagggaggccaaacccaatggatcattcactgtactagatgaagtctcgtaggataggtcatggaggatctgactatgctgccaatggtgcttaaaatgctgtcagcacatgaaagcccatt

SEQ ID NO: 328580 - DNA, 380 bp, Zea mays
actgtctctacctcttgctacttgtgccgtttcctcgtccgggctcctccgctcaagtccaggagtgcagtgcgctgtccaagcgccgccccaccaggtgctagcggtgccacctccacctccaaggtaaacccacacctactacctgtgtgcttcgtaaggcctatctacacctgcaggctgcagccaccagcacagggatatgtaccagcctgctcgtttcagctggaacagtattctccagttttggattggaacatgcagccacagccaaaagtagctgaagcgattggagttgtagcttttcggggataatcaaatgatatgagagtggatgttgcggatcatgtataagctttagactgccgactgattcactt

SEQ ID NO: 328581 - DNA, 386 bp, Zea mays
aaaaaacaaaaaaaaacttcaaaaaaaattataaaaaaaaaaataaacaaaaaaaacaaaggggacattttacataaaaagcgggtaccaccaaaactataaacaaaacacttgaatattgaaaggctaccacgtttctcgaggtccggatcatggtcaaaaaccatgatcctaaccgttcattctcatgaaggtctaattgcaattctagcgcagtcacttttcacagggatgattgctaaaactctccatgacacctatttcaatgtcttgaaatagcattcacttctattatgatgcacctatgtagataaggtcccagcgcatgtgacttttcaactgctgactcatataattgggaatagtacccccccttatggttgcct

SEQ ID NO: 328582 - DNA, 130 bp, Zea mays
cggacgcgtgggcaaaatgctccttgagtaaaacaacatactgcaagtcaatgaagtcgaatttattaacatggacaccgacacaaaacatcctgatcctcatcacaactaccttctgactagcttatta

SEQ ID NO: 328583 - DNA, 65 bp, Zea mays
cccacgcgtccgcacctgaaggagatcatcccggaggagtgggagcaagcagcagccgtcggtgg

SEQ ID NO: 328584 - DNA, 420 bp, Zea mays
ctacggcaatcttatgctgggtgaccgggagaattactacggcattgggaaacacacatattgtgcctatgccattgatacacttggcagaacccaaccttatgtccagtccaaacgagataatcccgaactttttcacttgaactacactttagtatggcaatcaaacatcccttggagcatctacgagaatctttataaattgcactatctaaattaccatttaaagagtcatttacattaacaccgtgttctatatcttgtccatgtgcatcattatttctatgtaatgtatgtactacaacgagccattcacgtgcagaactctttggctaacgatactccgtctctacatgactagtctattcacattactatttaaataacttgtttgaagctatttttataccaacatctata

SEQ ID NO: 328585 - DNA, 250 bp, Zea mays
cccgcgctaaataagaactgttttaaaatgttattgaccattcattactccaaggttcacagtggatatactatcggactatggattgcaaccataattgataaaaggtcatacatcgcaaaaatgacataaataatactctgacatatatgagcatacaactagatccatacaactattcaataattaaataggctgaacacatttacgtagatagattactacattacagtgtcttactgattctatc

SEQ ID NO: 328586 - DNA, 140 bp, Zea mays
tcgcggacgcgtgggcggacgcttggcaaaaattcttaaacatttatgaaaaatataaaactaaaggaaaatggggccaaattcaaaaggccatagacaacaacaaataaaaaaaaacatataaaacaaactaaaagggg

SEQ ID NO: 328587 - DNA, 284 bp, Zea mays
tccatgcgtatggccacacgctttatcctctttaacaccagatcatatccacaggaacatcgggaatctcccaaagtgccatgatgcgttcatcgtcagtggcttacactgtgctcctatgctctgattcataacccaactccatgtgcttcatgctatagcagctgagctctggcatcttgattccgtgtacttacagtcttgaatagctctcggactatctaccatcctcatgcccccgttaaacgctgtctcgggcggtccttcgccttgcagcttgatca

SEQ ID NO: 328588 - DNA, 278 bp, Zea mays
gcctacatttcttcatcggctcgtaaactcctcacctaggagacctgatgcgggggggtttacgaccgggcgggggcggaattcatgcctccggatttacaagggccgtcggtgagcgcacccgacactgcgctgattgctgtgctcgttcagcactagaccttacctactgctaaaccaactacatcggcggcgtgcctgcaaccatataacatatgtctttccgaggcctctggcgacgtcctcggaattcctaacactgaccgtatgccttcacg

SEQ ID NO: 328589 - DNA, 303 bp, Zea mays
cgtcgcacgctgcgattctttctgaaattcttaccattcttatactatcctacacggcatttgggctcgttgctggatgtcggacgctgctatctgcctgccgctcactccacgccccaatgtgccactcccactcgggccgtcccaccaccgggaggcgctaggctactatgtctctgccctagcctagtcgccgtcgcgtcgtcgcagcaccgagcgaatgcgagcccaacatcacagcgctcatgtcaagggcgcgagcaaggctttctcgtcgctgctggacaagttctacgacgcgct

SEQ ID NO: 328590 - DNA, 287 bp, Zea mays
agcctgataacttatgggttatggctcatccgataatcagggttgtgatgcagaacataaccgatgataccgcccagaacagcaagaacagacctgtccacagcagcaacgactacctgatcgacaggacttacaccgacactgctggtatgtctatcatgtacgttaccgatctcttcaactcgtaagacttcgagcacgacaagttcaatgacttgctccacgataagaacggtatcacaatatacgcgaccatggtatacaaccagagatgcattataaagtaa

SEQ ID NO: 328591 - DNA, 318 bp, Zea mays
gcgcccacgcgttcgcggactcgtgggcggacgtgtgggctttatcattggttttggaacctgcggcgggaaggttctgccggcacttccctgagccaacacgtcttggtatcagatctccggagtctcaacgatctcagctatcagagagttgtctcaacggtctcaactatcaaagagttcatgccgctatctagcaaggctgctatgtaactgaacgatatgaatatgggttgatttcctgggctgttgaagatgaggagactgatgctctgttgcgcaataaaatcgcttcaccattttaaaaaataaattaaa

SEQ ID NO: 328592 - DNA, 124 bp, Zea mays
tcgcggaaaggctgttttgcggtgtgatccggtgtcgttctttttgttgctgagaactgctttgggttggtgtatcagcttttgatgccgggtaaaacgcctgtgagctgtgatgtgatgcttc

SEQ ID NO: 328593 - DNA, 171 bp, Zea mays
cccacgcgttcggagtcctgctttttcgccttctttccctgcaccatctcctagagcattggtggcttcatttaaggaccgatgtgtggcatcaaaccctccgctattcatccgcttgtacatgtcatgcaagcttgcttgctgggactgatgcgcgacacctccctttaa

SEQ ID NO: 328594 - DNA, 460 bp, Zea mays
cggacgcgtgggcggacgcgtgggcggacgtttgggcggacgcgtgggcggacgcgtgggcggacgcgtgggagagaaggaaaaatatccccaaaccctagctcccgatctcgatggcgaaccctcgcgtcttcttcgacatgaccgtcggcggcgccccggcgggccggatcgtgatggagctgtacgccaacgaggtgcccaagaccgcggagaacttccgcgcgctgtgcacgggcgagaagggcgtgggcaagtccgggaagccgctccactacaagggctccaccttccaccgcgtcatccccgagttcatgtgccagggcggcgacttcacccgcggcaacggcaccggcggcgagtccatctacggcgagaagttccccgacgagaagttcgtgcgcaagcacaccgtccccggtgtgctctccatggccaacgccgggcccaacaccaacgg

SEQ ID NO: 328595 - DNA, 197 bp, Zea mays
tctttctaactgctttgtttaactttaaaatcttattatttactcaacaaacagcaacaggcaccggtctctcctgctccagtggcttgcagatcaatatcaatccctgcctgccttggcaccaccaccaccaaccagcagcacgagcatgacacattggctggcttcagtctaaaaaaaacccccagatgccatgg

SEQ ID NO: 328596 - DNA, 463 bp, Zea mays
  unsure (1)..(463): unsure at all n locations
ccgggccgagcacgcgtncgggacgcgtgggagagaggttttatcgcaatttgaaattatttgctgatcgagacagcatcggtttagaattgagacagttaaagagaaaaagagaagatgaggagttgcatgtggagcgtaaaaaggcacagttggttgataccaagaaaatttctattgacaatagtcatgcagctgctgtggatacctctgagctagtagttgaaatgatgcaagtgaaggaagacattgagaaccaagaattagttgtgcagaaaattaatttgaaacttacagatgctttgcaagaagagaataatagaagagcgtcttacaaggacttcattgagtctgtacatgctgaaatggggtctattagcgatgctgagcgtgaattgcagcttgttgaagaaaaaatacatgatgctgagcaagagaaggctcactatgaacgtgttatgga

SEQ ID NO: 328597 - DNA, 362 bp, Zea mays
cccacgcgtccgctagttctagatcgcgagtggccgttctttttttttttttttttttcttgttttgggtttttttttttagcttcgggagggcctgcacattttgctgcacaatatgaaaataaatcttccaggatcttgatcgagttagatgaccagaaagtagcatggacaatttggaaaaaaatccaattggaatctaccgttcttgattcattaattttaaccttgcctaacgcatttcagtctactatattggtacttgacgtttcgatttatgtgcactctttgatcattctgtaattcttgtaacatggtattttattgccatctgaaatggtccacaaccagcaaatatagtt

SEQ ID NO: 328598 - DNA, 456 bp, Zea mays
  unsure (1)..(456): unsure at all n locations
cggacgcgtgggcggactcgtgggatagccttcaatctaacaaagccaccgcttaggctgagttcgctgatggcatggcccgggtgagcaaggcagcaaatggcagcagtttgctggccaattgttccttttagccttggcacctgttatttttaaatctttatgaattttgtctctttattttgcccaaaatacccttttcatatttcggactcatagaacttcaaatgtctcagtgctgcacatattatggagctgcaggacttcaattgtcttgtagcctagtttcagttaaaacatggtaatttggatatttcgtcatgattacatcggtatttatgttggtgtcgggcaattacatatattttgtgtttaaaagttagccctgggaatagtgaaatcctggctatgccaccggtatagtttggacatangcaacaacatattgtctcatat

SEQ ID NO: 328599 - DNA, 68 bp, Zea mays
cggacgcgtgggaaaaaaattaaaaaaaatttttaaaaaaaaaaaaaaaaaggggaaaaagagggaag

SEQ ID NO: 328600 - DNA, 92 bp, Zea mays
  unsure (1)..(92): unsure at all n locations
ccggntggaaaaccggccgacccagcgccgactagtaaaagcaggatggtcaataaaattttaaaaaaaaaaaaaaagggaaaaaagggaag

SEQ ID NO: 328601 - DNA, 320 bp, Zea mays
  unsure (1)..(320): unsure at all n locations
ggagaaacaggggcgacccacgcgttcgcccattttncgcngacctgttgtccgacgtttaatcatctcaatacattcgagacatggggctggtctggacccaactagcaccacataacaccacacacaatgcaccgtagtgtgcgctgaatacaccatctcccaaccgaaattggacagagtgagcccaggacgggcaaaaactctcctactgttgattgcaaagaacaggacacaaggaggtccggtgacctagcagaggggggacgactgcggaggacccgagcctcacctacccaaagaccagtgcatctgtacca

SEQ ID NO: 328602 - DNA, 435 bp, Zea mays
  unsure (1)..(435): unsure at all n locations
acaagaaatagaacgcgagcggccgcccattttttaaaaaaataaaaaaaggggnnacgggcgggggttaaaaggggaacgggaaaaaaaaaaaaaacccccccaagaaaccctgggcaagggcggaggctaccaccacggccttttttttgcgggttcttaaaccagaaatccccccctttggggtccttaagggaccgcgggaagaaccccaaaaaaacaaaaaaaaaaaaaaggggggggcccccaaaagaaaccaagcttaaggacccgggcaggcgacaaaaaaacttttctaaaaggggacccaaaacaaaaccaccggccggggtttgacaaaccccggagggggaaaacccgggggaacccaaaaaaaccccttggagaagatcaccttttgcaagtggggacacaaaaaaaagccccccaaacccc

SEQ ID NO: 328603 - DNA, 326 bp, Zea mays
aaaaaaaaaaaaaaaacataaaaaaaaaatttttaaattaaaaaaaaaaaaaaaaaaaaaagaaaaaaagaaaaaaaaaaaaaggaaaaaaaaaaaaaaaaaaaaaaaaaaaaaaaaaaaaaaaaaaaaaaaaaaaaaaaaaaaaaaaggggcgcccttttaaaaaatccaaaatttactaacccgtaaatgcaagttaaaaacttttttaaagggcccctaaaaataaataaattgcccaatttttaaaaaatacaaaattggaaaaaccttggggttcccaaaataaatcgctttgaaaaaaatccccttttgacaacttgggt

SEQ ID NO: 328604 - DNA, 317 bp, Zea mays
  unsure (1)..(317): unsure at all n locations
ggccgacgccacgcgtccgcccacgcttacgcgatgagtttctctctgttgcggccgctctgatcgagggggtggccggggcctgcctcgccgcgccgcggggcgcggacnactacgccgaatgcgcggagacgaccatggacacggtggtgatgatgctggcgctcgacgcgctggaccaggacgacacctgctgcgcgccgagcgcgcttaatgccatgaggtgcacggcatccttaagcatattcctactcatggacatgtactggaacgtccaaacacccccaacaagccacgaataaaaggcttggacccca

SEQ ID NO: 328605 - DNA, 300 bp, Zea mays
cagaggcgatggctcccttgcatattacttttccaatttatatctgaccaatctatttaggctacgtggacttactctcgaggaaacatgtatccacaacaagcaagtcaaaaacccatcactggcactaccgatgaacagcaattgtctcaagctacctttaccctaaatttagctatgacctgaacgtccacatggtttacactatctacacacttactactgataatatgataaggttgatacttacacatctaacaagaatagcatctgtgaagaaatcgatctttgtgaagattt

SEQ ID NO: 328606 - DNA, 461 bp, Zea mays
gcctgggaggccaccaatgcggtgttcgatcttggtgcgggcactggacccgggtgacgcgtgcaatatcatgggcctgctgctcatccaggacaacagcgacaaggagctcatccgcttcgccttcggccccgaccacctcctccacgccttcgtctccgccgcgcgcgccgacctcgtcgccaagcccgcgttcccgccgtcgaccgtgctgggcccgctccaccagacctggggaccgacgtcgcacccgagccctaccgccggctccgaccacccacaccaggcccacttcgacgacgacctcgcgctcggctacgacttcgacggcgccggcgccggcgctgacgcgttcttccccgacgactacgactgctggtcaccggtcggcgccgtccaccggcggagcttctcgctcagagacgccgaggccgtcgccgtcaccggaagcgtctcgtgga

SEQ ID NO: 328607 - DNA, 153 bp, Zea mays
gccgacccacgcatgcgataatctcttcttcacctcactaacaccagttagcaactctatctctactgcaataatggggggtcgcgcctacttctcccagccgcagctggtcgcggcggcggcggtactggcaggggcgctgctgctgctggc

SEQ ID NO: 328608 - DNA, 139 bp, Zea mays
cacaggcgtacgtctaggtagctagcaacgtgtgcgaaaaggtctacgtttagcgatgttgcgcatgaaccacacatgggcccatcctgtccttagtagccagatcaacggacccaacaatgatagccttatgaggcac

SEQ ID NO: 328609 - DNA, 140 bp, Zea mays
gcggccaatcacacacgcatttatattagcttgtttcgcagcaggacgctgtggatgggatcagggctgacgtgagagcgggcgagagagagcgagggagaggcctggctagatgcaaggttgcgacgatggtggtggcc

SEQ ID NO: 328610 - DNA, 131 bp, Zea mays
gcaggctctcctgctccccgcgcgggccgttccgccgacgccggcgatgcttcggcagcgggcggtttctgcctgcgcgtgtgcgtcgcaggtctgccgccccctattcggtgccgccagttgcatctcct

SEQ ID NO: 328611 - DNA, 106 bp, Zea mays
gggttggcttctcctccccctcttgttcgttttcggggacgtgaggttctacggggttcggggtcgtgggttagcggatcgagatggcggcgtcggatgttgagta

SEQ ID NO: 328612 - DNA, 443 bp, Zea mays
  unsure (1)..(443): unsure at all n locations
cacgcgtncgaaaggagagtatggaagctattgtccagcttttgattaattttgcacaaaacacttctgcggacgaaaaggttctttctgatggtgggactgatgttaaagaccaatgcaccaagtttggtctcggggataatgtcaaggtacacaatgtttgctcacctcatcgactcgagccatgtgagggttcagcgtggaggttcgtcgaggcctgctgctcgtagctcctgtcgctccactcaagatccagcagaagtggagcaactacgagaagaacttaggcgacatcaagattccttgaagcaacaagctgcgcaacatgaatactatgctacacaaccaggtatgggatatttgccgccaccaccatggagatatcctacacattcaatggggccttggggacgccccccatggccaacacaaccacttccatt

SEQ ID NO: 328613 - DNA, 130 bp, Zea mays
tggaccggccatggccgcacctttttgcacgtttcgcgcctggcattactactgagtctatggatgatcacggttgtgctcatgcgtgtggaggtgccgatcccgtcgtcgttgaaaggcgaggtgctca

SEQ ID NO: 328614 - DNA, 443 bp, Zea mays
  unsure (1)..(443): unsure at all n locations
gacccangcgtgcgagtaattntgcatcagctgcaagngaacgttttgcccgacttactggattgaagcaggcaggggacatagagaagttagagatgtcagcaacgccgaccacaacagtgtgtatttcatcggtagagcaacagggagctgcttctttaagtgcgaagattaccaatgcttctgtttctgaaggacagaagaatcctggaaattatatgccttctgccatttcaattcccgtggggagccatgttctgggcctgggcgcaacaagtattgaagaaacaactgccactatgataactcaggctcctgcagtttcaaaatcagaacgaagaaaacttccaagaggcagtcaacaaggtattcagtttgagagttcagcatcaaaaacaaagatggtatcagctgtggaaccagcacctgcaaatgttgaatgc

SEQ ID NO: 328615 - DNA, 388 bp, Zea mays
atgcgcccacgcgtccgcacggtcacatccctcttttgcacgatgccagacccggacgtcgtgtggggtaatacgctgatctcaggctactgccagcgcggcatgttccggaactcgatgggccagtctatggagatgtctcaccgtggtgttgccctcgacaggacgactctcgctgtcctgctcaaggcatgctatgacttggacgacactgacacttggtgtccagatccatgcgctagcggtgaagacgggcctggagacggatgtccgggccgggagcgctctcgtcgacatgtatggcaagtgcaggagcttggatgacgcgctgcgcttctttcatgggaagggtgagaggaattcgggctcgtggggtgcggcgatcgct

SEQ ID NO: 328616 - DNA, 297 bp, Zea mays
  unsure (1)..(297): unsure at all n locations
cgtgcgaatgtgctacttcgagttcctgcccttgtttcagcccgtgtccgacgacgccgatcccgggcatcncgggctcgtggacctggtccacgtcaaactcgggcacgagtacaagctcgtcgtcaccacctactcaggtgcggagcgggtgatgaaaatggaacagctgctagctgatgagtcagtgacactagcttgctagctaacgaacgtacacgcacgctcgccgtgcaactgtaggtctgtaccggtaccgtgtgggcgacatgctgcgcgtggccgggttcaagaacc

SEQ ID NO: 328617 - DNA, 268 bp, Zea mays
aattactgggccgacccactcgttcgttcatgcgttcgtgctttttgacggtactgttcatatttttcgacatgggatttcttgtcagttcaaggcagccattttaaatttctaggggcacgagagcatgtgttaccctggatatcaatttcatgctgctttttgtaatagttcatgcttgtgtttggttaataaatatgtatttaataaaaataattggctgtctgtttataggattccagtgtacgatcgcgtgctttcgtttgtt

SEQ ID NO: 328618 - DNA, 83 bp, Zea mays
gaaaaaaaaaaaaaaaaaattaaaaaatataaaaaataaaaaataaaaaaaggaaaaaagaggaaaaaaaaaaagaggagaag

SEQ ID NO: 328619 - DNA, 110 bp, Zea mays
aaagaaaaaaaaaaaaaaaaaaaaaaaaaattaaaaaagaggaaagaaaaaagagaaaaagggagaaaaaaaagaaaggacaaggaaaaggacgaaaaaaaaaaaggaaa

SEQ ID NO: 328620 - DNA, 223 bp, Zea mays
  unsure (1)..(223): unsure at all n locations
caaaagggttttnncaaagccactatcaggagttcttttcaatgtcctagaccgcaaataacagaggaggttgaggctcatatctcacacctatcaacaaaattttacttttcccgttttatttatttctaattattgccacccctctattatggtatatcaaatagtagcagttagcaaaccttccattccaacataatatcttcagaaatattacaccaaa

SEQ ID NO: 328621 - DNA, 145 bp, Zea mays
  unsure (1)..(145): unsure at all n locations
agcgtacggagatacagaagatcgtatcaccaccttttttttcattttgagcantgtgtgtatcagtgagttttggggagtgacataatatggtgaatgtggatagagaaaagaaggaaacaattgaaaccaatcctagggaaat

SEQ ID NO: 328622 - DNA, 337 bp, Zea mays
  unsure (1)..(337): unsure at all n locations
acgccggcggcacgcgtccgccactcgtcgcccacgtgttcgtctttgctaaggacgccggtttgttatcatagctggtctagcctgcatccacctgttgtcaaaatctttcaacccaccgaaagcaagcatcgcccacgattacattcataggcaaaactgcccaatccgccattttgtgagccatataatttctttttttataacaaggcgtcagcaggagagcaactatatttatatacatctttcctgatctgtccctgtccggcnacaagaacaccaccaataaggatctcatcactacgagtaagcggcacgaccgaattatttaactact

SEQ ID NO: 328623 - DNA, 324 bp, Zea mays
acgcatcatctcgcctcccgtggtcgacgagctttcgtccatgtttaagtggctgcactcacagttggccaggaactgctggaacgctgaactcgtcccttttgccccaatcttcttcggcaaaccacatcctctggcctctgacaggtcacaagtcccatgggtgccgatgatgaagagcccgccgacgatctgctgagcatatagctatgatatgtcaagagcgtaagagcgcaagcgtgcatcggcgtgaactacggctaggtggcgggcaacctgccgtcgacggacgagacggcaaggctgctcaagtcgacgtccatt

SEQ ID NO: 328624 - DNA, 142 bp, Zea mays
  unsure (1)..(142): unsure at all n locations
tcgaacgggtctacatcgcgagcggatgcccttaggtttttttcttattgttgcgtaagggtctgtgtgggatanagctcataagcttgggaccaaatctagcaggagatccgcctcatgaaactggaacgatggttcatga

SEQ ID NO: 328625 - DNA, 409 bp, Zea mays
cctgtttttttttttttttttttttttttttttttttttttgatgtttttagtgtttttgggtaggtttttatttttttttggaaacccaaccccccataaatgggtttttattggctatatatgatcaggggcttttgaaagacgagggtgccatgaatattttttctacaatataagctgagttctaaaagagtcaaatgagatttaatcagacttaagtttatgagatgcgctttcggtaattaggagccccacaggggtggggcagctttaaaatttttccatgaggcccaaaaacattgtccaatcaataacccgagtcataggatagctcctgaaaaagaagtttggggtcaccatcgaaaaggtatatttttcccagtttaacaattttgggggggcttaaa

SEQ ID NO: 328626 - DNA, 321 bp, Zea mays
acgcataggtgttctcctccccagccgccagatttgtatccaaccgccgaggaacatgaacgacggcgcccttagcatcctttgtgtgatactgttcttgcactgccaggccgtgcccgttcccactggtgatggcgagtatctcaactagaccttaccgacaacagagtgcgaaagcaagtgagggtgcgcgcacgtcagaaaagagccaaggagaaatcaaatggcccaaaaaagaacaagaatatatctgccatcgccttttgaaccttgccctacgaccaaaacctgacgcctactctctctgttcatgctctttct

SEQ ID NO: 328627 - DNA, 414 bp, Zea mays
gcgtccgtttgttttcctttcctttctactactaatttaaaataattttgttgtcaccaaccaatcgggcgcggcggctaaccaatcctgccccttcccaggcactctcaccgtcccttcgccttattcattggcctgggcccgtccctcccacccacttacaggtgggccctaatcgtggaatcggcatctccagctggtcgacctgcagcatattcacacatccgacacacccactttgtttgcccgttgccgatccgttccgtttcagttgcccgtgtgagcgaggggaacggtacgccgccggcgccgctgctgcgacgcgtgctcgcgccgccacccgacgacgacctggtccgacttcgcgttcgcgccgtcgcggcagcccgcttcatcggcgctggaagcccacca

SEQ ID NO: 328628 - DNA, 352 bp, Zea mays
ggccgacccacgcgttcgcgtatctccagcgacggtagcgggcgaggtttacgcgtttgcgaagcttagtagtggatgcgggaggcggcagccatggccttgatggagaagctcaagatctttgtcgttaaggagcccttagtcgcggcctcctgcctcatcgctggattcggtctctttcttgcatgagttgtgcggccaatcctggaagcatggtagaccgtgtaacaagtttcttcttctcttctaaatgatgtgggtgcatgtgtcaccggcgagaaaaagtagtgaacttgcattgttttctcatgccaatggtgccccacattttcttccccgtggtttttctggc

SEQ ID NO: 328629 - DNA, 124 bp, Zea mays
cgagggcgagaagattgcgtccattctgccgttcgatgacgagacggagatgcaggacgccgtgtatgctgtcataaggtagctggacgccaaccagctcgccgaggcggacgagttcgaggac

SEQ ID NO: 328630 - DNA, 103 bp, Zea mays
cccacccactcgtcctcccactcttcctcccactcgtccgttaaataatataaaaaaaaaaaaaaaaaaaaaaaaagaagtttttaaaaaaaaagggggcccc

SEQ ID NO: 328631 - DNA, 324 bp, Zea mays
cggccgacccacgcgtccgcttagaaaaaagactcaccatcgattcattttcccttcccgatagttctgaatcgatagggtcattctcgagagcagggggacgcgcccaccgcgatggctcgaaccaagcaccatgccgtgaggaacacagtgtataatcccatgattaatctccatttcgatcgctcatgtggtgcgagtacctcctcgactccggtgagcgcgtgcgtgcagacatcagttccctccttttgcctttcttgagggctgctcttacttgcttgcatgctgtttgatggtatgcaagaaatggctgcttggacc

SEQ ID NO: 328632 - DNA, 324 bp, Zea mays
  unsure (1)..(324): unsure at all n locations
ctcctcagcaactnccataccccaggctcttttttacctgagcgagccnaccaaccnntttncctttcttatcctcctccttcaatataaattactccnatgtatccaatcatatccatcatatttttcttttcatcctccattattcctactattaattccaactaaatctccctctccccctatgaagaattcaacatttataatttgcaccttttttaatcttataaaaaaaatatcaagcaatagtattaacgcaaagataatcatgtttaaatacacaagaaaatttattactctatacaatttaattcttctcccatc

SEQ ID NO: 328633 - DNA, 380 bp, Zea mays
cccacgcgtccgcccactcgtccgctgtctcgtgggcggatgggcaagtgatgccatgcgttatgtgaacgtggaggtggtgggcgtggacacgcgaccggacatcgaaagagcagtctcgtttagggagaagccgaggacgagcatggcgccgccgccgctgccgacgacgcgagatggacggaagagcttggaggcagcgccgtaccacgatgtccttgacctgaagcagctgctcgatctggctgacaaggaaggccgggtggccgtgtatgggaacaaaaggaactccgacaccagcagcgtgagcagcgtcagtagcagcagcagcggcggcacaaccagcatcagcagcgctagcaccatcggtggcgcgagcc

SEQ ID NO: 328634 - DNA, 322 bp, Zea mays
tacttctatatctcaatcagacgcccctttttttatcttatcctaatatcatttactagatttttttaacatgttagtgagccaccccaactcatctccattcattaacatattatttttattttctttcaatcttcaatatcattaatctcaacaaaaaaaacaaaatttcataactattcttcttttaaaatcccaccgttaaaccaaaattattcaacccacacatttaatcaaaaatcaccttcatcatctaaaaactactttaaacaccaaacaacgaacccccctaaaaattcccaaatgacaccactgaacaatt

SEQ ID NO: 328635 - DNA, 286 bp, Zea mays
aacgacgagaggtgcaatttctccaataaaagccggaacaacggcagccggcgcgtcccggtggccggagccggtggtggcggggactctctgctgaagagatcgtccagcatgagagacgccccggcgatcggccgcggctcctcggccggtgcgggcgggtgcgcggcgcatcatccgccgtcgttctcgagccggtgcgcggggctggtgaatgagcatcgggcgcgcttctacatcatgcgccgctgcgtgaccatgctcgtctgctggaaggaccgctcgt

SEQ ID NO: 328636 - DNA, 364 bp, Zea mays
tctgactctccgctgttcgctcactcttgtagctccacccttcactcagtcttaggctgttattatctctaggctctagggagccgcgccactccttcgtgtagccatcagccttctcatcgccaccaatggccactgccgaggtccagaccccgaccgtcgtggcggccgaggaagcgcccgtggtggagaccccgccgccggccgtcgtgcccgaagagtctgcccccgccgaggccgaggccgaggccgaggctgctgctcctgctgatcccgaggagcttcccgcggccgagcagcaggcagccgccgaggcggaggccgcggctcctgctggtgccgaggagcccgtcgcggccgaacc

SEQ ID NO: 328637 - DNA, 265 bp, Zea mays
gtgaacatccaatcttatatgccttttctgctatcagcagcaccagaatgcctaccacgataattattacatgccggggtggcctctactaacactcacaaccctttctcttaaacatctatgtatacaaatgtacgctaattgctcattatatcacatttcttgttataccacccatggcgctagccaacaccatctcatataacctctcgaacatgctcccattcccagtttgttcttctaaaaacactaacaccgaccaccc

SEQ ID NO: 328638 - DNA, 352 bp, Zea mays
gcggccgcccttttattttttcttattattgttttttcttttttttatttcttaccccggattttttaacgggggtggggcgcccggaggaaaaacctgaaactttttttccctctttataataagaacttaccgactgcttccataccatctgataggaaaaaccatcaacctttgctgtataaaccaacacttgataccaaaaaatttcaagaaccaacccttctttatcagggtgccaaacaagttcccaaccagaaaacaaaacgggagatcttcttcaatttttaagaaccttatatttttccacattcccggggccttcccaaaggcctgcccatgggtgaacccc

SEQ ID NO: 328639 - DNA, 329 bp, Zea mays
  unsure (1)..(329): unsure at all n locations
ttttaccggagcggaggctctgttttgccccctttgccgatcggaaaaagttggctgccactgacctttttaatttgaccagaactgttgactcagccacgggtttccaaccaaaggtcctgggctcttggatggagctgaccctgccagagggatgggagcaaaaaggaagaactcagcttgtcaccctgggctcangcaggttctgcgtcgcaaggttcatgaatgagatgtttgatccatacgggagtggatatgttttattgaccggtgtggagatcgttcctcattttgacaatctcactggtaatgacngtagtagtggcagt

SEQ ID NO: 328640 - DNA, 226 bp, Zea mays
  unsure (1)..(226): unsure at all n locations
acccactcgtccgctcacccaacacccgtattgagcggctggtgagggatcggatcgtcggcggctatggaagacgattttcagagggcagcgggccccacctctaacnaccttgactattacgcgaaatcccatttcgtgtcatacgcactgtcctttcgcgttaaatgataatttttccaagggtcccctcctcttgacgatcccagatcacgtccgcttcctt

SEQ ID NO: 328641 - DNA, 216 bp, Zea mays
cttatacactcattattaaatcattttctagtaaacatcattaaatagctcttagggggagccatatgagtgtgtgtgcgggacaccagattataactcatcatcctacttgacatccaaatacactttatacagactcccctctcacatttcaaacaatcaaaaaccatacggttccccccctaatatatttccaaaatcacgtacccgttcatc

SEQ ID NO: 328642 - DNA, 107 bp, Zea mays
cggccgacccacgcgtccgcccacgcgtccgactgaaacgagttatttatgatcttaaggctgcatacagcatgagagtctattttaaacggcggaggggcccacaa

SEQ ID NO: 328643 - DNA, 112 bp, Zea mays
  unsure (1)..(112): unsure at all n locations
cccacgcgtncggaatgatggatatcgtgtctatgcaagtttccaaaagggaccccatagctgcttctgtctctgttgacgggaaagaaaaaccctgcnaccccctcaagca

SEQ ID NO: 328644 - DNA, 74 bp, Zea mays
ggtattcttacattcttttgcactgcttttttcaacttcgatcaattgccacctaatcggggggacaacaaaaa

SEQ ID NO: 328645 - DNA, 277 bp, Zea mays
taccatgaccgagcgaccgtagcaagggaaaaggtcggcggcgcaagcagcggcccagaaaagtcggaccggccgtcaaggcggctgcagtcccgtcgcggatcggcgctacctgaaaaggccgtacccacgctggcactggcccccgtctacctcgcgccgtctgagtacctgcgcgagttctggagttggcaggaacgcgcgaaagacacagaaacgcgcatatcccggccactgctcctgcgatccgacgacgagagctgggagctgctgcagc

SEQ ID NO: 328646 - DNA, 438 bp, Zea mays
tcggttcacaaggctgttggtcatagaacttttactgcagagactgtgaagctagagatcgttgtgttgttatcctaccatacacttttgaacgcacaggactgccatgctgctatgcttggccgactatcatatgctgtcgagtctgttatgcagacccttgtcggactccgcattagcgtaacgattctcaacatacttaggatcctgggcactagacacatgtacatctggcttaactcgttgcacaaccatagggccttatagggcgtgaccatgattgtcgctgatcatactggcacttacgaccagatggtcataactgccatacctttctagagcacgatttacgctgaccaggtcatactttgacatgccatgatccagaacggactgttacctgtgatggctacttgactgacaacgcctagcatgaat

SEQ ID NO: 328647 - DNA, 247 bp, Zea mays
tcgtcacgcgtccgcccacgcgttcggatcttcacacatgagctggagttctttgtttggagaaatggtacctttacaaattgttttatagaagtgacttttcattattatagtaaagaatgtgtgtgatctctatgcttgcttcattttgatcctgttattttgtattaaaaaatccctgtttgaggggaaacaatacttaggatcctgggcattagattgatgtagttgtaacttaagtcgattg

SEQ ID NO: 328648 - DNA, 226 bp, Zea mays
cccacgcgtgcggtcttatgtgacatatctatccttggtatctagtacaagtgtttcggttggcgtgatggctcaattaacgtgtgctagtacgatgcatctagcagtacactgcagaagctcgaggttgacagaaccaacgcgttgaactgcgctttgaccatggtattctacgagctgcacggtcacgacagatgcgatatgcagacaacttgttgtgagcaca

SEQ ID NO: 328649 - DNA, 278 bp, Zea mays
cgcagctccgctgccctgctctccacctcctccagacctccaccatggacgagccgccggtgcatccaccgtcccttccccatgccctcaccaccgccgagtaacaccttctcggtgctggagctcgaggcagcgatcgccgggcacgccgacttctgccacgcgctctgcaggcgcccgacgccggccacggccgaacggctcatcgcaacggtgccgcagctgcttcgcggcgcccacgccggcggcaaggaagaaaaaaccctggtggttgttga

SEQ ID NO: 328650 - DNA, 119 bp, Zea mays
tcggaacaatgttgacgctgtttttctcattggtcatgctaagttaatttaccatctttgtgatatgcataatgaactgattagcaaatgacctcagtaggtgaacccagttgtatgct

SEQ ID NO: 328651 - DNA, 276 bp, Zea mays
attagcatgtcctaggaaaagaagtgacttatacttgttgcaatgacaagggcaactggtgttaaacatatcatattcatatgcttttgttcatttttcttttacaattccttgcatattaagcaaataattggtttaatattataaggagaaaattaagcaaccattggctttgtacccaggtgtatgtccggttcaaaatgaattttctgatcaagctgacaatacattttgcaatgctttgtcttaattgctgaaacattgtatcggtaacga

SEQ ID NO: 328652 - DNA, 301 bp, Zea mays
gatcgtttcagtatcaacttccacgactcatcactcacgagcgaatacatctggatcaaaggacccactggccacacattactgcatagagagagtacacagacagaagcgcacacatcggttcatgcctacgtactctgctcgcggcaacatgcatccacgatacaccgtttacgaactgtgtatacaattgctaaacaccatgcatgactataaactttcacacattggtctagctcaaaatagccccatccctactgaacttcgcaacggtttgcaagatcttattgggattgggtac

SEQ ID NO: 328653 - DNA, 95 bp, Zea mays
aaaaaaaaaaaaaaaaaaaaaaaaaaatttaaattaaaagacagacgatctaaaaaatgcgaaacgtaaatactcatgcatgcaaacgtctaact

SEQ ID NO: 328654 - DNA, 173 bp, Zea mays
caccaatgggaaccataacatgggtgaaagccttattatattggggaaagggttccacgggttggggttgaaaaatagaacccggtctttttggaatcccttattccttaccaccatgctttctcctttttggttaaagtcccccaattttggaaaaatttaccaaataaagg

SEQ ID NO: 328655 - DNA, 151 bp, Zea mays
cccactccttcgactactcgtttacaaacttctgttcaaatacctaatctacatctccacagttcaactcaaaacacattgcgacctataagccttaaaataccggccattaaagcacaaatttcctatttcatttattctatctacactt

SEQ ID NO: 328656 - DNA, 284 bp, Zea mays
  unsure (1)..(284): unsure at all n locations
ttcgacccactcgtccgcccacgcgtccgcccactcgttcgcccacttttccgcttctttcccctccccttcctgtcagtncgtcttaaaacggttttgcgcacaccttgtcgttctcggtttcctcttctgccggtctgcccagtcctcacggcttcctttttctttcgggccactcttcggcctcttacttgctgcgctcggcctttctgcgcattgctcctctgttccccccgtcagtccgttcctgagcccagccgcttcgcgttcccttgattccaccc

SEQ ID NO: 328657 - DNA, 412 bp, Zea mays
cccacgcgtccgcccacgcgtccggcctcgcgtccgcccacgcgtccgtccacgcgtgggggcggaaacatccaatccccgggccaccactacctgcctgcccgtgcccacgcttcttctcttctactccccaagccccagccccagctaccgggccccctgctgtctgttccaccagcgtcggcctagctacctgccccgcccctctccgagtaccgtcggaagcctcagctgaaggatctggcctgggcgccctccggacgacgggacaagttctgtatggtcttcatgaagttcagcactagctagaagacatattcacacgcatcagctatcaaattgcaagcttagaattggcctcaaagctgggacatgcttgtcttaccagaagccactgatagcttggagttgt

SEQ ID NO: 328658 - DNA, 383 bp, Zea mays
agctgacggacacatatatacatgtgctcatgcatgcgggaatttctttctttgttctgcgtcttcttcattgcacccccttttaagaatagttggtaccgaactgtccattctgtaatttattataaattcggtaattattacaaatactgtggttaataaagaatgttccaccagcgtaagactaactacctgcccgaaccctctacgagtacaagacagaagcctcaactgaaggatctgagcctgagcgccctccggacgacaagaacaggttctgctttttatagataccatttatcactagctagaatacatattcacacgcatcatctatcacaccgcaagcttataattgacctcaaagtttacacatgcttgtc

SEQ ID NO: 328659 - DNA, 284 bp, Zea mays
cccacgcgtccggagagtctgacatgatttttagtactacgagcaggactaatactaggcggtgctgatgaactggagcgaagggatctcataacttgctgttgctcggctccgccattcgctcgctggctgtgtccgctgcctcagccttcactctccgttctagcttgaatggacaattgtaagataacccgactaactcgacgcttttaagatctcttctaggtaagctatcgccagcgattccctgcgggaagaagaacagataaggaacctgtcttgat

SEQ ID NO: 328660 - DNA, 377 bp, Zea mays
caaccgcgccatcgttaccgactcaccgtcgactcttgctcactcactcgcactctccggccagatcagagcgctcgcttccaatagcggcgtcttgtacgagaaagcctgcgcagtaagccatggcacactaatgacaccctgagaagatgcaagaggcctccaagcttagcgcctacgatccaaccaagattaacaaagctaataacgttgtcatacaatagccttttgatgaagtagacaagcttgcagagaagacacaatcactagacatgcactgaaccagctgaacataactatactggacaggacaagaatcatatgaagcaggtgcatcctgagcaaagtatagatgaccgtgaatataaggatgacac

SEQ ID NO: 328661 - DNA, 294 bp, Zea mays
cccactcgtccgcacacacctcctcagatgtgtcttctataccatttaaaccttttacctagacgactatcaatcttaatcaggcaaatacaaatacttaaactagcactttcaccaacaatattctctataaatctcaatattctcaagcccattctttaacatattatatactttcgaatcttactctacaaacctgctattattgaaaactcatttattccattactttatacacttaacttatattataatataaagtatttgttctacattaaatcccaatatgctttt

SEQ ID NO: 328662 - DNA, 204 bp, Zea mays
taacacaccacatcttctcttcataccattctttaaccccctagattattcatccctttcatgcttcatttaaaataatttaggcacctaccatttattatccactaactatttaataccctatctctttatatccttttcctattctcaattcttcaccttctcttcttcttttacctactctataccctcttttccttctac

SEQ ID NO: 328663 - DNA, 110 bp, Zea mays
tgatatgtacatctggaaaacggaccgactatacaagctccctgaattctggcattgtgcgtggaagaaaaaaaaactaaaaacggcgaacaacaccaaaactaccttaa

SEQ ID NO: 328664 - DNA, 262 bp, Zea mays
cccacgcgtccgcccacgcgtccgcccacttgttcggacgcagaggaactaaatgctggtgcgatccattggattgtgtcatgcctcgctgcacattggaagatctgaaaggatgcgatccatcgcttaatgcaaaagttctccaagatgttcttgctggccaaatgggttcgattgcagatgcccttgttctaaatgccgtggcatccctacttgtcattggtaaagtgaaaaattacatgactgtgttgctttagcacat

SEQ ID NO: 328665 - DNA, 158 bp, Zea mays
atagcatgctatgattctaacactgttttattgttatgttaattctggacatttttcacagaaccatctttgtagcatttccctttttttatcctcgctaacaaatgtaaaaatacggatcttgtgatgctgtcttagttatttgatctggtgagctg

SEQ ID NO: 328666 - DNA, 332 bp, Zea mays
attctcaccaaagtacctctatgcctgcgctgcaacagtgtgcacatatgtcggagggtcgatcatagctatgactgcattatacagttgtgctgttttcaagttcagggcgagaagctacagggataaatccctgtaatcagactaatgattagctgttctgatttaatggacatttgtaagaattcagaaagggagggtatcttggcctattctctcgttgtacaacatcgtactcacatgtttccagaccatgcaatccctgcaagggcctttacacattaaaaaaaagaatgaaaaaaccctgacgttacccaaccttaaaaagcctt

SEQ ID NO: 328667 - DNA, 344 bp, Zea mays
ctcagacgaacacacctgattttccacatttcttgaacctatttattcctatcgcatctggaggggcagttcctgctacatacatgggatacaaccgatacagttccctcaccttcaatgtctactccagagcacccaacatagccaaaaacctccacattgcgaattgatgaaacgcccacaccagtacctgccactgataatacgtccacttaacagccagaccacgctcggataatctcatccgagagtaaggcacatatctactaagaccaccgtacatctgccgctgatacaggcgctcaattagctcatcgagcatcctgcggacccaataccgttca

SEQ ID NO: 328668 - DNA, 293 bp, Zea mays
  unsure (1)..(293): unsure at all n locations
acccacgcgtgccgcagaaaacccatggaagggtcactttgtgcctcgcttcatgatagtctggttgcgaaagggtatacccctccagcgtgttggcgcggactctnntttcggcccctgaagcggagtttcttggcaagcccctgtggcttttgggggtccctcgagcccccggatggagaaaagtacccgtcaagggtcaaaggtccccgaggctnaagcggagccgacccgnngctgcaggaggggtggtcccggaccctgctcaagaaacccatcctgctcgtgatgaa

SEQ ID NO: 328669 - DNA, 423 bp, Zea mays
ggagctgcaggcggcgatgtcgatgccactggcttccgtgccaacgacgtcgttgttgccgccgcctactactgctccggcggcttccgtgtcaatgacgtcgtcgtcatcgttgccgcctgctactgctagcagtagcgctgctccggccgccggcgacaagggacttcttgacgacatggtgccgtcggcgatgaggcacgggcggtagttgactaattactcggctagctaattagtacaatgatgacgaagcatacgatggagctgcccatcagattatttggagctctattattaatctctgattaattggacagagacaggaagaattgattgtaacatatgcatatacatacatattaattatctatatatagctacggactaagcgagcgagcttctacagaatgggcgccgggt

SEQ ID NO: 328670 - DNA, 141 bp, Zea mays
accactcgaccgagtactctcaataccacttgtttcagggccaaccacctcatccttgtggcggccttctagtgctgcgggggatcccaggtcaaggacatggtggtaatagccgcctgctgcttctgatagcagcaaagc

SEQ ID NO: 328671 - DNA, 433 bp, Zea mays
gagctctgagctggttgctgccgccaggattggaggagtgcgcgcgcgcgcaagtgagcggtcactgagctgtggacgtgaattgcgatcatccgttctcgctttctggggctcggctgctgtggccatggcgccggcgccgtcgccgtacgcgcgggtgatggaggacatggtcaagggccgggagtacgccacgcagctgaaggcgctgctccgggagtcgcccgaggccagccgcctcgtggaccggatcttgcacgccatatccctcaccatccagacggcctctcgggcgtggcgcacttggggtacgacgacacgttcgatctggaagacattgtgttcggctccatcaccggcggcatgtatgctgctgagtactgacggccggacgacgactgctcgacctgctgtgtgttggaggagagtagga

SEQ ID NO: 328672 - DNA, 148 bp, Zea mays
  unsure (1)..(148): unsure at all n locations
ggggaaggaaatacataactntaacttactcattaatttttacacacgcaattacttataatctgccttgcggatttacaacattttgcatccttcccaaccntgctcttaataatacaacacttaatacctatcacaaccaattctt

SEQ ID NO: 328673 - DNA, 366 bp, Zea mays
tcggagaagtattcggtcttgaagcgacctccttgattctaatatttgagatgccatcaagaagctgttgcagtggtctatatgtcattgacctgtcaaatgtttgtttgagttaacttgcaaatggaattgtgggatcctacattggctaaaggaattaagattttcttagcaacatcaactccactctttggacacgtagctactaattacaccgtgaactaccagaaggccgctattcagttgagctgcagtggcaatggatatggaatgcatgcaggcccttcgccaccacgcagagcagaagccagcaaatttgatgatgatgttaatccacgttacactcatggatatcaagggggtggt

SEQ ID NO: 328674 - DNA, 157 bp, Zea mays
  unsure (1)..(157): unsure at all n locations
cccacgcgtccgcccacgcgtncgatgccgtttgcgtaagatctcgccacaaggaggtgttgagctgttgatggtaaattaaaattcaaatgttgcaaaaaatgttttaacaatctgtgctatttatttgtgaatagaacgcacatttgttactact

SEQ ID NO: 328675 - DNA, 313 bp, Zea mays
accacgcatacgactaaaacgaactcttaatccacaaatggaccttaacaccatgtatgggcggcctgacgctctgacaaacttccatctcggatgtttcacatgccttgtcgtcagatttttctcaaactcactcacattctgcatatattgtataacaactaacagatggctctggccacagatacacagacacatggtgtcatggcggtacccacggtcttcctgttgaaaacgcacatatgcatgccaaccgttctggtaccccatgtgatccaaaggaaaccacaatatctgctaccgtgcctgatgg

SEQ ID NO: 328676 - DNA, 195 bp, Zea mays
cgcgtccgcccacgcgttcgcagacacacctacacatgcttttttacagtattccatacaatacacggcgactactttgccatgcctactccccacttataactactcaccaaacacacataccagtctacccctctatgccagatccctttatggccccaaatctattgatcatcaccaaacagacatgagttt

SEQ ID NO: 328677 - DNA, 198 bp, Zea mays
cccacgcgtccgcccacgcgttcgcccactcgttcgcccacgcgtccgcccacgcgtccgggcacgcgtccgaaaaaaaaaaaaaaaaaaaaaaaaaaaaaaaaaaaaaaaaaaaaaaaaaagaaaaaaaaaaaaaaagaaaacaaaaaaaaaaaaaaaaaaaatgcaaaaaaaaaggggggccatattagtaagccc

SEQ ID NO: 328678 - DNA, 390 bp, Zea mays
tgaaaatataagaaatgaattaaaaaaaagatcttggctgccaactggaccgcttcgagggcgactggccgagcagcccagctagcaagccagccagctgtcgtaaggaccgtgggatcgtgcggccaggagggagctgagagatagacccgcacacgcaagttgtgagagagggagagaaggagctgaagctgaacggcggcggcgggctgaacagactctccgagatcttcggcgagattagtctgggctgatgctcatccggttggctcctccccttctcagctccttaaaggcatggcgcgtgtaccagagtcggctcctctcggtttttctttctccagtttgctgttccagtcacaagttgatcgatccgttcggtccctgtgt

SEQ ID NO: 328679 - DNA, 133 bp, Zea mays
cccacgcgtccgcccacgcgtccgcccactcgtccggtgttactgtatgatggcaaggacgttttgctgccgaaggttatgttttgaagttcatgctaccttttaaagtacggattaccttgtgcctatgttc

SEQ ID NO: 328680 - DNA, 304 bp, Zea mays
cggacgcgtgggcggacgcatgggcggacttcgttggcggactcgtgggcggacgcgtgggcgagatgtgtcgttcgttgtatcatgtatgggtgtttatggctttcggtctactagatttttgtgagaaaaaaaaagcttaataaaacacaaaaaattcactcacctaatacccacccgatacaccctagacgttaaaatactatgatgtcatcaccggagggcccaaaaacactctctacccacgacaagaatgtcgacgcctgcacgacggccaaagcgcgccttgatgagatgttcaatg

SEQ ID NO: 328681 - DNA, 419 bp, Zea mays
  unsure (1)..(419): unsure at all n locations
cggaatggaangggncggagcccgacgccgtccgcacttgnnagtgagcatgccanncannggagcctgtcttagcttatgcctnnagtacaggtngnngagtggaagtgtggtggtggggatgtgtcaaaccccaaatcagaaccgaanaaaaaagaaaagcagcagctagaagaaagaagaacacccactctaccagcagcaagcaggcaatcaagcaaccagcanntaacgaaatgtcgatccaagtacctgcgaccagcacaanggaccctgcgagcggcagcgtctgtaccgtcgcttctgcgccgccctggtgggcgtcatcgtgctcgtcctcctcatcgtgctcatcgtctggctcgtcctccgccccaccaagcctcgcttcttcctcaacgacgtgagcatcgtgtgca

SEQ ID NO: 328682 - DNA, 183 bp, Zea mays
cggacgcgtggggttttgcgtggtcagattcttatcgcatcactggtagaaaacattcggctgtgggactaaaaaaattaactagaagacagcagagacaattgtagcactagcataccaacgacagattgcataatatcataagtggtaagacccacagaacagacccgatgtattctctct

SEQ ID NO: 328683 - DNA, 112 bp, Zea mays
aaagacggccgaccgcggagaaaagtttagtgcacttctagacacgacttgtgagctacatagtcaggcccatgagttcaagaaacagggggtgtagattcgtcggaagaca

SEQ ID NO: 328684 - DNA, 459 bp, Zea mays
cccacgcgtccgtccacgcgtccgagtcctactaccgactaagaccgactcagctggggggaccctcaaaccgcaccagccatggacgggccgcgttggacggaagaggtggacgacctggtcgacgccggcgacgtcgacggcgccatcgtcctccttgagtccgtcgtctacgatttgtcaacctccgctgctccccctgccactgaccttcgactcgccacggcgctcggcgacctcgcggacctgcacgccgtccggtgagacaccctccgagccgacgagctccgtgcccgcgccatccgccttcggtcccgcgccacggtccctgggactgggaccctagggtttggttccccccctcgtagtccttggtgctcttggaaatcgttggtggaagcccttcgctcaggcctcatgtttcaactgcttagttattgctctattgggctattatta

SEQ ID NO: 328685 - DNA, 91 bp, Zea mays
aaaaaaaaaaaaaaaaaaaaaaaaaaaaaattaaaaaaaaaaaaaaaaaaaaaaaaaaaaaagagagaaaaaaaaaaaaaaaaaaaaaaaa

SEQ ID NO: 328686 - DNA, 309 bp, Zea mays
ggacgaattttctaagttccaaaactttttttcatccaaatttcggggaaactgagttaggctgcttgagtgacgcctaggtatctactctggaacgtgtccttgtaaatgccttaatggtcaatctgagttttttttccccttgattattcttcgctcatgtatgtttccaaattccaaggtagcggtctgcgagagttgatgattctaccttgacatatcgaacccaatttgtaaataaggcgagcagcttgtacttcgttcaactgactggatcttccgagttttacccacagaccgagccccgta

SEQ ID NO: 328687 - DNA, 450 bp, Zea mays
  unsure (1)..(450): unsure at all n locations
cggacgcgtggtcggacgcgtgggcctggattgtcacagatggcaggtatattgatcaagagtggtgagctattctaaggaagcttgtgaacaatatacctgctgtcctggagtgtcacagatggcaaagatttgcgcttagggaaggaggaagaatggtcggtgctggagtcgtctccaaagttcttagctgatcagtttctactttcttctccgtagtctggttgcaactgttgatggttagcacattctttatcttcaattattggaagaaacatttttgcgccaattacatgaaagtggttgcagttttaagggtctgttcaatccctctccaagatattgtaagtgtatgaaatcttctaagcaaactgttaaatacattgcacccgatcaggtatataagcanagactgtattctctcattactagacaaaaaaaatgaaagga

SEQ ID NO: 328688 - DNA, 305 bp, Zea mays
ccactcgtcctcccacgcgttctcccactcttgctcctacatattctcagatggcatgcatattgatcaacagtcgggttctattctaacgaagcttgtcaacaatatacctgctatcctctagtgttacagatggcaaagatttccccttaatgaatgaggaataatagtccgtgctctactcgtcttcaaagttcttagctgatcaacttctactttcttcttcgtagtcatgttgcaactgttgatgcttagcacattctttatcttcaattattgtaacaaacattcttgctccaattaca

SEQ ID NO: 328689 - DNA, 318 bp, Zea mays
atccggcgcaatacaatttcttgacatgactggaatgctaaatctggagtctacgcgcagggcagcaagatacacctgaatcgaagtgaacactccgatactggacgcattactcacgctcatgtgcctacatcaacatcctcaacggatatacaactgggtgcttctacgtcgatgggagcagcacgacattttaacgattacgaagacatattgcaaaaatggcacatattaacctaactactggattcacatgaaggatgcagtgatccttcttaaactggactgaattgcacaatatgccctgtgaaatctaaa

SEQ ID NO: 328690 - DNA, 265 bp, Zea mays
ctgacgcgtgggcggactcgtgggcttacgtttagtccgacgcctgggctgactcggggggtcgatcgccaataatggagtttccgtaccaccaccactaccacagccatcgccgatactactacgaatacgaccgcataggcccgcctcccccggtctactgcggctacggccagccaccgacacccgacccgtacggtcgcgcgcccgttgaccccgatccgtacggtcgacctccgacccagtccgtgtacatgagggccgg

SEQ ID NO: 328691 - DNA, 282 bp, Zea mays
gccacgcgttcgcccacgcgtacgtgccaatcccccgctctgccgactaccgccaggcccgggcgccagcctgcaaagtgcaaacccagctagagcttagagctagcatggagtccggcgccccgtgcccgctcgcgcacgcgcaccccgtggacctgcgctggctgctctcggtcgccgtcggcggactcttcgcgctgatgctggtgcttctggccacctccccgtcgttccgggtcgcctacacctcgcccttcccgcgcctttttactcggccccgcg

SEQ ID NO: 328692 - DNA, 452 bp, Zea mays
gccaggcgttctgatcgaccggcatatctgtctgatacttctgcaccagtcatcggaccaggcgggtgcgcatgtcgacgatgcctcatcacttaaacaccttgctggtctatgaccttgtgcatggtacagatccatatcggggctatagccctttgcaagcatgacgatgcatgtctcccccttgcagaacatacaacaccagggccctgctgctaaccaaaaccaacgcctgatgcctgattcatcgatggattaccctggaaatggcgtccacaaggatgtacagctcctgaacaagttctgaattcatgtccctgatatgcatgacctagttaacggcatgttcagtctccacgtaatgggcatgttcggttccccgggaatggtcgatctggaatgaatcctggccggagttcttcactaattatataagctttgatcagttggaa

SEQ ID NO: 328693 - DNA, 314 bp, Zea mays
ccttcgcctcctacggcgagatcctcgacttcaaggtcatcaccgaccgggagacggggagggctcgcggcttcagcttcgttaccttctcctccgagaactccatgctcgacgctatcgagaacatgaacggcaaggagctcgacggccgtaacatcaccgttaaccaggcccagtcccgtggcggtggcggtggcggcggtggctacggcggccgtcgcggcggcggcggctatggtggcgggcgccgtgaccgcggttatggcggcggtggcggctaccgcggtcggcacgagggtggtggcggcggctac

SEQ ID NO: 328694 - DNA, 408 bp, Zea mays
ctccgatcaccatacaaccgtgaccggaggtatgatcctgcactgccctcactattacgcggcgggtgcacattcccactatgcctgatcacttaaacaccttgcttatctatgaccttctgcatcgtacagatccatctcggggctatagccctttgcaagcacgacgatgcatatttcccccttgcagaacatactacaccagggccctgctactaaccaacaccaacgcctgatgactgattcattcatgtattcccctggctatgacgcccacatggatgtacagtccctggacaagttctgaatttacgtccatgatattcatgacctacttaacgtcatgttcactctcacgtaaatagtcatgttcgctttcccggaaatggttcttctggaatgaatcct

SEQ ID NO: 328695 - DNA, 261 bp, Zea mays
ctcaggccaactctttagcgaatttccgatctgctatccacacccagattcataagcatcgtggtgatcaaggatctcgtgaacgtggacgatgaaaccctagagatcaccatggagatcaggactgtatacagtactgtctgtcctgtggccatctctgagaatgtctagggcccagtgtaccacccaattgtccacatactacttgaatatcgcatcactcatcgcactcatgtccttgaacatgatctagaaaaagct

SEQ ID NO: 328696 - DNA, 102 bp, Zea mays
aaaaagaaaaaaaaaaaaaaaaaaaataaatttataaaaaaaaaaaaaaaaaaaaaaagggtgagaaaatttaaaaaaaaaagaaagagcacaaaaaaaaaa

SEQ ID NO: 328697 - DNA, 197 bp, Zea mays
  unsure (1)..(197): unsure at all n locations
acaacacattcnatacattttcctcataacttcagcctgcaagatgacttataaacagggtggggtatacactctcagatacatccaataaaacaagacacctttccctgtacacactcaatttttaaacaccataatcgctaacatcaaacctatttttactacccgcacattcacagtactcaccaaaatcctat

SEQ ID NO: 328698 - DNA, 394 bp, Zea mays
cttatgttcatacgacaattatcatgtcaattttatctatcatatcagtcgtcaaggatttgttaggagtttcaatctctactagtgtctgtttcaaaaatattatcagtaagtcgcatgatctttattacagcacactaaaagcattaatattactaggttgatgcccttgctatcaatatagctgtcgattgatctgttacattttctaaaatatttcctattattctctgattttttatgattttttgaacaattttgtctcatgaagcgtttttagccccttggatgccaaacattggcaagtaaatacaatgcaggttatgacaactttaattctggcatttgttttaatcattatctgatctgcaattaatctatcacaagcacattc

SEQ ID NO: 328699 - DNA, 301 bp, Zea mays
cttagacctccctccccacgaacgagatcctctaacgtacttctttcttcagaggagctaggttgcctggccggtcgcgctgcgctccatctttggtgcgcttgtcccgaggcgccgtcgcataaagcagcagccccactttcgcggcggcggcgcactcacggtccctcgtcacacggaagtcctaaaggagagagccaggattcgcccatgctcggtggccgtgatcctctggccccgttcctcgtcgcttacttgaagcgtgcggcgcgcctacgctgcggcgagcagctgcacgcgc

SEQ ID NO: 328700 - DNA, 66 bp, Zea mays
cccacgcgtccgcaccgaattccagtttgatttccttgcccgcctaaaaaaaaaaaaagggggaag

SEQ ID NO: 328701 - DNA, 88 bp, Zea mays
  unsure (1)..(88): unsure at all n locations
gaancccgggcgacccacgctccgaaaaaaaaaaaaaaaaataaaaaaaattatttaaaaaaaaagggcggccctctaggaggggcaa

SEQ ID NO: 328702 - DNA, 307 bp, Zea mays
attaagaaagatacaactttgcaaggatatttttaaaggaaggcaaagctgtgagtgatagagtaacatgaaaccagaggcgtatctggtgacgatgagaatacaaggagatctagagcttatcactttccaaattttgatgacatcaatattagcatggtaggaaaaaatatatgcaggcacgatgtataacaaagcccgtgcagcaccaactagatgtcgtacaatcatgttgatgctctgatccttccaactgatctccacgcagcacatggtctacaaatctgtccagtccagctgtttcgcg

SEQ ID NO: 328703 - DNA, 279 bp, Zea mays
tactgtagagtgtgcccgaggcccgttcgtcggagctctagcgcccggcctcgcccgcccctggctgccgcgcccgcccccggccccaaccaccgtgcccgccggcgcgcgttccctcgaccgcgcttgccggagctcctgcccccggccctgcccgccgtgcccatataacctgccaaaaccgagcgaaccacatcctgtcaacgttggtggcaggcgatccaaggaaagcgatgacggcgtacgaccccaaagacgacgtcaaccgcctcttcgctt

SEQ ID NO: 328704 - DNA, 205 bp, Zea mays
tcatttatcaaattagttaaagcattacatttcaatatttctatatcacatcttgggacaggtatattacctcttaccatctctcccctcccaatccatctctctactttaactatcaccttcactcaattcactacccaccatcttacatcttcctaactcttcaaaccctgacaataccctatctactcaccttatatcacat

SEQ ID NO: 328705 - DNA, 320 bp, Zea mays
  unsure (1)..(320): unsure at all n locations
gacccgggcgtcccgtccaatcgggcatacggttaaaaggcactttaaattcacaaatggacctgatcgcaangtatgggcgcctcgacggtatgacatatttgcatctccggatgtattacataccttgtactcacatcatactcaaactcacgcacattgcgcatatattatataacaagttaccgctggttatggacaccgatccacagacacatggtgtcatggcggaacccacggtgttcctgccgaaaacgcacatatgcatgccaaccgctatgaaaccccatgtgatccataagaaaccaacatatctgcta

SEQ ID NO: 328706 - DNA, 372 bp, Zea mays
gtccgactcctcttgacccgaacgctgtctgcgcgcgacgacctctggctgcagacgcgtgtgctgcaccagcgctctctcgcttacccgacccgagttgcccaacacgagactcgtcgctactggaccgcaccgacgttcgacggacggccccagtggggctgctgggctcttggccttgcgccgttcggcttgcctgtccgacgcgcgtgctcgtcctcgtgctcgtgctcgccttctgcagctgcctcctcgactgcggtccaccaaattagttcagtttgatcttctagctagtaaccggaactagaactagcttagttttacagaaactataaattcacaccatgaaccctctgaacgcggactgga

SEQ ID NO: 328707 - DNA, 136 bp, Zea mays
tcgccacgcgtccgcccacgcgtccgcccactcttacgtccacgcgtccgtgctcatgtcttggctccgcgtttggaatttgcgttttcaatccggtattgaaggtataataattaacaactagtacggcggcaac

SEQ ID NO: 328708 - DNA, 446 bp, Zea mays
cccacgcgtccggtcttaaattttatgccatgattgtgtgttttaagtcgtattttgcagggttttccggcgacggctcagagaagctcagctacgtagaggagctccgctggagaggacgaccaccagagataggcgctttgttgcggtggctcatactcgctcgacgacggcggcagtgtggatctcggtcggggagtacgcgcggaggcgctctgctgcagtgctgcagattcgctcgtcggctgcggcggcggtgatgtggatctcggccggtgagtacgcgcggaagttctctgctgcagattcgctcgtcagccgcgacgtggagaaggtcgacggcagggctttgaatcctctgtggtgcgaaatcgctcggcgggacagagtcgctgttccaactagctggacgagagctgtacgaacaaggaaaatcccattttctc

SEQ ID NO: 328709 - DNA, 291 bp, Zea mays
cccacgcctccactcacgtcgcaaagtttttgtgcccagcgataaccacaacacaacaggaagccaaaatgagaaccccggtccgcacgtagcccatgggaatggctttccttcccctattgctctccgccctcatcgtctcctgcgacacgcaatcgccggactaatcgccgtccgcgtggaatgctcctccggtcaccggctcagatccgaggagctctgtcgcgccaccgacaactgcggactctgcgccgcatggctctgtcgcaacacctacgacaactgcgggct

SEQ ID NO: 328710 - DNA, 165 bp, Zea mays
cccacgcgtccggatactgtgatgttgcttcttcaaatgagtatttattcgtttggaacacctggagaatgtgggtttgtcaattatcagcccatgaagaatatttggaccaccgtggggtgttgtcctgagcatggctccttgttttgaaacatacaaagcaat

SEQ ID NO: 328711 - DNA, 129 bp, Zea mays
accacgcttatgtcaacgcaaacaagtactctcattctatacccttactgacatttctgagcatggaatattcctgtttcggtctgcggctcaccgtgcctacattacatcaaagaagcccatacctaa

SEQ ID NO: 328712 - DNA, 231 bp, Zea mays
aaaaaaaaaaaaaaaaataaaaaaattattttctaaagacacaaactaaaaaaaaaaacggcgggctgatttcaaacttcctgctattcacaacctttttactgcgccaacccaactactattactctccacctattttcactcttcgcgcaggtagctctctatctttccccagccaaaatgccgatgccactcactctcataatcttacccctcatcactaccttgctc

SEQ ID NO: 328713 - DNA, 431 bp, Zea mays
  unsure (1)..(431): unsure at all n locations
cggacgcgtgggacacggcgctgcagggtaaagatctcccccgctcgccggtctctctgcgcaggccagcaggacgaagaagaagccggccgggaagacccaggcctgaccgcctgagctaggggagaggaggacgacgatggggctgctgtctcagcgggtggagcggtcggagatggagcccggcgaccacatctacacctggcgcgccggctacacctactcccaccacgggatttacgtcggcggcagcaaggtggtgcacttcacgcggaagagggaggcgggcggcgcgggtctggactcggccatcgccgtgtccagcctnctnctctcgcggggctcggacgagtgccccagcttcccggactgcggcttccagctccccgacagcggcgtggtgctgacctgcgtggactgctttctcggcg

SEQ ID NO: 328714 - DNA, 283 bp, Zea mays
ccgacgcttacgaacatgtgccacattaactataaacagctgtcctacttgagagactgagcgtattattacgatgatgaggaggaaactcaacagcgcatccacacgatggagagcgaatatccaccgcgtcacgccagtgctctgagcctactagtgcgctctggcaggaccagctgtcggcatctaaacttacagccttctctcgcacagcaactccgaagatgttcctaccaaatcagatctggtttactgcacagcagcatcagacgcccaccccata

SEQ ID NO: 328715 - DNA, 270 bp, Zea mays
  unsure (1)..(270): unsure at all n locations
ccctgtctctctctctctttttctctctctctcggtaggccgatccaccagaccatttggggcaaccaggtcggcggcggcggncttcaagggtggaaccctttcgacgtgatccgcagcttcccgtcgacgcccgagtcgctaatgtcgcagatcgacgcggtcatcgtctccaccgagtacgcccgcgcctgcgccctcctcgacccctcccaagtctcagcctcgtcgccgcccgagatcgatcccgtaggccagggggaccgggga

SEQ ID NO: 328716 - DNA, 353 bp, Zea mays
  unsure (1)..(353): unsure at all n locations
cccacgcgtccggtcacttgctctccctccaacaagctaattaangccgggccatccggcttctagctcgtttcattatgcatggctgangagaagcaccaccaccaccacctgttccaccacaagaaggacgaggagcatgccgcggccggcgggtacggcgagtccgccgagtacacggaggccacggtgacggaggtcgtgtccacgggcgagaacgagtacgacgagtacaagaaggaggagaagcagcacaagcacaagcagcacctcggcgaggccggcgccatcgccgccggcgccttcgcactctacgagaagcacgaggcgaagaatgacccggagcacgcgca

SEQ ID NO: 328717 - DNA, 355 bp, Zea mays
  unsure (1)..(355): unsure at all n locations
cggtttcggaattacccggctgcgacgccacgtcgnntccgcccgactcgtcccgtcccgagttgtcagtcatatatgataaaaatttaaacncataacgttcagaagggggacagtcgtcaacgttgagaacgcanaatgtctttttgagggtgatacccatctagaggcatcaaagaagaaaatcgtctgctatatcaacacatncctcaatgcagntgaaatcacttaagagaattgcggaccaccaaatagagatggaaaggtacctcaaagcttggttgatagaagtttnttcccctttgtgctgaaaaagataggcatgccacccgttttgacttgtcccagaagagca

SEQ ID NO: 328718 - DNA, 174 bp, Zea mays
gggtgaaaaacatacggacttctagtatatgagaagaggaatcctaatcgtagtaatgatatcttagtagatatgtgcttactctcttgttaattttttgtcttgagaggactatatatactgataaagtgataatttattcagagaataaaaaatgggctccatgctttgtct

SEQ ID NO: 328719 - DNA, 196 bp, Zea mays
ttggaagaaccacgcgtacgaaaaaaaacaatgcaattaacattcatatttttacatttgaactccaaacaaaacttaaagaaaccaaagcacaattcacatataaatacattctccccccactttcaaactaccagacttaattatacttaccttcaacggtttcctttttttatctcatgaccataaataattt

SEQ ID NO: 328720 - DNA, 247 bp, Zea mays
ttgaccctttccatttttattacatatttcgataaaactaaaaataaagagtttctgtgcggattatgcacgctctgaatccttaaaattatatgcaaaggtatttaatcaaggcaattttttcatctatatttcccaaccggatgtacaccacttgcatggtaccaagtactatatatataaaaccaaatgttattttttgttaagccctcaaattattcatgcgagctcgcttataatatcaaat

SEQ ID NO: 328721 - DNA, 186 bp, Zea mays
accaaatctttaaaggtaaaccgataattctttctttgaagaagaagggggggacaacaagaagaaggtagaggtaactcaataaatctactgctgtccggggaattaattcaaagcttatttgctgcaccttggctttctttaaaaatagcttcatcttgtgtatccccatctgggtacaaaaac

SEQ ID NO: 328722 - DNA, 417 bp, Zea mays
ctgcaggacgactctagatgatcccctcggggaattccaattccactatttcaattaataaggaggcaaaaatgttcagatatgagttggaattataagatttcttattaggcctatcctgaagccaaaggaaatgagatcggaattcctcggggaattccaattccacattttcaagaaataaggaggcaaaaatgttcatatatgaattggaattatttgttttcttattaggcctatcctgaagccaaaggaaatgagatcggaattcctcggggaattccaatttcacattttcaagaaataaggaggcaaaaatgttcatatatgaattggaattatttgttttcttattaagcctatcctgaagccaaaggaaatgagatcggaattccatgggggtaccgagctcgaatt

SEQ ID NO: 328723 - DNA, 370 bp, Zea mays
gactctgcgctgtgatcaacgtgccgtcatgctgtcctccttggtgccctgtgctgtgatcaacgtgccgctatgctgttctcaatagtgactgtgctgtgatcaacgtgccgctatgctgtcctctttagtgacttgtgctgtgatcaacgtgctgttatgttgtcctctttagaggagtgctaggtagaagggagtattgaacaagttatgttgtgtggcacgacacatgtggtgatcagcgagtagagacctagactggagaatggttctattgttgtatatcatctaggggatgatccatgtgacacaatgtagggctaactggtgacgtgtcagtttcatatgtattctgtccaggtcaggggtg

SEQ ID NO: 328724 - DNA, 267 bp, Zea mays
atagcacttggtccagctagctaggagagagagctttgtttacgcggcggcaagatgaacaggaagccaggagactgggactgcagggcgtgccagcacctcaacttcagccgtcgggatgcatgccagcgctgcagtgaaccacgtggagttggtgatcggcacaaacgtggctgcgacttgtgaggacgtggtggatcctcctttgacagacactgtcgtgctgtctgagatgtcctaactggactggggtactgttcactgagg

SEQ ID NO: 328725 - DNA, 414 bp, Zea mays
gcctcacgcagttacgcgctccaccacgccacctccctctactcactcatgttgttttccgtccatccgcccaccggttcgtagcccgcgccgcaaaaccctagccccgggaggatcgcggggcgcctccgcggtgccagcgacgtggctcgtttgatccgattgctggtcgagccccgccctcgctgccgcgcttcgctccggctgtgcagcggcgtgagcaccgagcacactcgcgaatggggaactgctagggtgcttggatcaaggatgggagccctcaccctggggcctcagttgtagcaagcacctcttgctttgagttctttgtgagtcaactttgctagtccaacagggggtgagggttgactgggtgtttgtatctcatatagctgagcctgacttgattcttct

SEQ ID NO: 328726 - DNA, 192 bp, Zea mays
gaagaagagactgagaaatctctggacttacaagattaggtctgaagtgtgaataggattccaaagccaaaaccgaaggtcgagaagaatacagcgtaggaggaagaacctgctttcacggagaaaaccacctattcggaatctgtacccgacaagggtgaatacactgatacgtgtcataaatctaatgct

SEQ ID NO: 328727 - DNA, 322 bp, Zea mays
gatgcccgtgttctcagccaacgccgaggcagcgcagcagggggcatcgacacccgcgcatatcctagaagtacgccacctgacgtctcgctgcgcgcagcggacgcgcgcgcgcatcgtcccatacgttctgacccctctcgaaggccgtcttgaggagctcgcgacccatgtgaactctcatcggctgtcagaacccgtatcttcgatcgaccactcgcacactctttctcgtgctcgacggcaggatggccagaggtggtatacgctgcgtgcgacggtgcatgccggggggcactgctttgcggcggagctagggaac

SEQ ID NO: 328728 - DNA, 327 bp, Zea mays
ggtcgaccactgtgctttttgttcgacacgggtgacatgaggagacgatgctttctggaggcgacaacgttgttgattttgttgtctgctcgggattcgtgacccgacacttcttgatcatcgggaccacgatcattgcgacttatatgatattgaggcatctcgagctccatgctaagctgcatggcatccttaacaaccgaagtcaatgtatgcaaggaagaaaatgagtttaaagataaaattgtgtgcataggaaagcaaaaaaaagaaagagagatgtaatgttattttctctcatggctctaaactccaggtttacatatg

SEQ ID NO: 328729 - DNA, 321 bp, Zea mays
caatggccgagttagtcttttgcgtatactcatgattgatggctactgaagtgatgtaatactagcatgtgtgttaaagtatatagagcttggtggcttaaggagtggcgacaaccctatacaataaaatcaaatacacaaatttaaaagtgacaggtcctgcaatacatatatttacttggctatgataggataactgaacaggacacctctctatataagctctataatatcagaattttatggtgaaaatgagacaaagctattcacaaaaagaatgtttatgaccaatgtataacccgctgattacattactaaata

SEQ ID NO: 328730 - DNA, 393 bp, Zea mays
cctcggggaattccaattccactttttcaagaaataaggaggcaaaaatgttcatatatgaattggaattatttgttttcttattaggcctatcctgaagccaaaggaaatgagatcggaattcctcggggaattccaattccacattttcaagaaataaggaggcaaaaatgttcatatatgaattggaattatttgttttcttattaggcctatcctgaagccaaaggaaatgagatcggaattcctcggggaattccaattccacattttcaagaaataaagaagcaaaaatgttcatatatgaattggaattatttgttttcttattaggcctatcctgaagccaaaggaaatgagatcggaattcctcgggggtaccgagctcgaatt

SEQ ID NO: 328731 - DNA, 394 bp, Zea mays
cctcggggaattccaattccactttttcaagaaataaggaggcaaaaatgttcatatatgaattggaattatttgttttcttattaggcctatcctgaagccaaaggaaatgagatcggaattcctcggggaattccaattccacattttcaagaaataaggaggcaaaaatgttcatatatgaattggaattatttgttttcttattaggcctatcctgaagccaaaggaaatgagatcggaattcctcggggaattccaattccacattttcaagaaataaggaggcaaaaatgttcatatatgaattggaattatttgttttcttattaggcctatcctgaagccaaaggaaattgagatcggaattcctcgggggtaccgagctcgaatt

SEQ ID NO: 328732 - DNA, 162 bp, Zea mays
cacgatcaattgaccggtttattcaaatatatatcgaggataggtacacgggtaattaagaagaccctggcctccaatattctctgggaaccaagatataatttagatgatagtcgtagggatcccaatatcattaggaaggtcatccaaggcttgctaatt

SEQ ID NO: 328733 - DNA, 81 bp, Zea mays
ccaaaccagaagccaaaggaaaggagaccggaaacccacggggaaaaccaaaaccacaaaaccaagaaaaaaggaggcaaa

SEQ ID NO: 328734 - DNA, 395 bp, Zea mays
agagacatgcttgcatgcctggatgtcgactctagatgagccaattgcagaaccactattccattatatcaagaggcaaagatgctcggatgtgagatgtgaataggagttatctgattaggcatatcgtgtagcctgaggccatgagatctgagatccgaattgctatgcgaattccacatttcacatgatcaaggatgcggaagcgttcattgtatatataggaattggaagtattcgtattaggcctatgccgatcccgaaggcaatgggaacgggatcccaaggggaattcgaattccacattctcaagatctagggatgcagaagtgttcatgtatcaataggaattgttagtattcgtatttaggactatgctgaatccgaaggaaatg

SEQ ID NO: 328735 - DNA, 113 bp, Zea mays
tcctgatagattgtcgtttatgtgcatagcggatgaatgtatggcaacccttttttggtgggtctttgcaacaattaatatctatcatttacttcatacatgacaatatcttg

SEQ ID NO: 328736 - DNA, 280 bp, Zea mays
ggtttgactattacatggtgatacgataagtaacatggtaaggaatgtggcaaatctagaacaaaacaggtatatttttttctccatcgccccaaaaaactcaaaccctatgattgatatcgttgcactaaccaacttattgatttatagccttcattgaagatgaaactggtgttgcaagtgctggagtaccccaacctgacgtagctgtaaacgacgctcaagacgaacgagaccttgctgccgatcggaaatgcttaggagacaccacacttgaatg

SEQ ID NO: 328737 - DNA, 131 bp, Zea mays
tgctccaggggcccgggcggcggctcgccgcgtctcggcgccgcggcttcagcaccgtccgcgtcccacgggaggcgtcgcctcaccttcagcttcaggtgccagtcgaccagcgtcgacaagcagcatga

SEQ ID NO: 328738 - DNA, 391 bp, Zea mays
  unsure (1)..(391): unsure at all n locations
atgcatgcagtagtaggtatangacgatcaaaaaattaaggaccgtggggtgcatctaataatcaagaacgctaggcaatgtgggcatatactacgtatatcattatcagaaggtggggtgctctataagaaacagtctctacgggaaataaaatcgtaaaagtcaactactcggggatctcactcggtgcaaagtagtgcaaaatacgctatctgtagctaccgtacaagctgcacagtttggaatactatgtgggcctggtgattgaaaagaaatctgaggggggcctgcaaacaggtaagaatgggaagtccaatggaaccgaaatggtggatttaaaaatgtaacaagaactaatataacccaaaagtagaaaaatggaattggatt

SEQ ID NO: 328739 - DNA, 201 bp, Zea mays
gttgcaatggtgagcgaatcttgtagtgctgcctgccaagcgagggagagaactactgaacaactcgagtgcatacttcaaggttctgtgatgcaacaggcctaagaacaggcaggggtcttcctatctagacaggctgcaatgtatagagatgcttgtaatgcagcctacatcggagctggataggtgcatggataggca

SEQ ID NO: 328740 - DNA, 306 bp, Zea mays
gtgatgttctcctgggttcggtttcgtgggtgagcggatcgagatggcggcgtcggatgttgagtaccgctgcttcgtcggcggcctcgcctgggccacggacgaccactccctccacaacgccttcagcacctacggcgaggtcctcgagtccaagatcatcctcgatcgggagacgcagaggtcccgcggcttcggcttcgtcaccttcttcacggaggaggcgatgcggaacgccatcgagggcatgaacggcaaggagctggacggccggaacattaccgtcaacgaggcccagtcccgcgg

SEQ ID NO: 328741 - DNA, 404 bp, Zea mays
aattagactcgagggcttttacagttatagagagcccatatgctgcacggcttgagttagaggcacctactgatcaattctaataagcgccactgtatcactgcatgcctgatactggcggtggcacacaactgcttatggtggtgatggccactcagacagcgtccgcgacgacgtgccaccaacgcggagcatcacgccggctgctgtggcaagtgacctgccactacagcgcctgtaactgccgcactttcccgacatatggctgggcgtgctgcagcacttgctggtagctagctagctagctagctagtgtgaattcttccgtgcgcgcgcgcgcgcagcctttgcataaccctcttgcttagctcatgttcagtaatagccggatgcttgcctcgtcg

SEQ ID NO: 328742 - DNA, 175 bp, Zea mays
accgacgccaactacagtttaagagagtccatctgctcgttgccttgattttgtggaacgaagcgatggctcgcagcggcgccatggtttcctgcatgctgctcctggtggtggcggcgcaactgctcatggtggtgatggtcacgcagacagcggcggcggcagcgggcgacca

SEQ ID NO: 328743 - DNA, 219 bp, Zea mays
acagatcttaacatgcgtttctacgaatttgttgtcctgcacgaggacgccactgcggtgtgaactctgttatgctttttgacatgcattaattcttctcgcgttcgcggagtacccatctgtctattagaggagccaggactggatgccttactaaacgggatgacttgatctatcttcgccaatgtgcacgcactcacgtatgagactcttgcgccc

SEQ ID NO: 328744 - DNA, 410 bp, Zea mays
gcgaatcacagtcgcgcctatctcagcttgctgcactgccctgccatcatatcaatatcatatcgtacgtgagcccggccgagagcgagggagaggcatggctgctccgaagctcgcgacgctggcgctggccgtgctcctggcggcgacacgggtggctacccctgccgcggtgcgcgcggtgatgtagtgctccaccgggtacagcacgctcatgtcgtgcgtgccgatcgttcatattggcaaagccatgccagcctatattaggtacggatttattcctttcacgatagcgctgaagccctgcagatatgtggacgcacctctagacgccattctacgatgcttgaaaactacgtttcagcaatcggtagcacaaattctccccagctacagaagccgactatatg

SEQ ID NO: 328745 - DNA, 146 bp, Zea mays
gacgcaaaccagccggtatatggcgacgaagcatgtcgccgctatacgacgccgtatccggaacccgcaagccccgcgatcggaaccccaaaacgcatgcccatggcacaccctcaagaaaggcggaggcaacgctggacgtatat

SEQ ID NO: 328746 - DNA, 153 bp, Zea mays
atgacgcacgctgcactcatacttgaactgcgaactctgctcgagtggagttctcctttatccaaattcaaagtcacatcggcgaaactctctgctatgtctggccgctgaatggaccggtaggctctggtcaagggcctgtgccaagcccga

SEQ ID NO: 328747 - DNA, 337 bp, Zea mays
tagatcgcgagttgccgccctttttttttttttgatgtgtgtgtgtgtgtgttgggtgggggacttgaacgctgcattggtgcctgaaggcgtgcttcatgtacgacattgctcgctcttcgaactccagtttccaaagcggacgccggacgccgtgcttgaagcagatgtggtgcggatgggagatggcggtgtagacttccctactgcatgggtggtccatgtctggggcagagcggctgcgtgggactgagccgtcggatttttgtgtcatcccagctcgtttggtttaaatcggttaaaatcgaaagtgtgtttggtttaaaaataataaaaa

SEQ ID NO: 328748 - DNA, 247 bp, Zea mays
tagtgctatcacaatgaacagtttgctctcgatctcaccgacaccgaggaaggagagatcaatggcgtccgagcaaggaatcgtgatcacgtgccacagcacggctgattttgacgcccacatgaccaacggccaccaacacgacgagcttcacgtcatcgacttcactgccggctggtaccacccattctccgccagtgccgcactgctaggtcaacacccccatgaaggcactcaagtcgggatc

SEQ ID NO: 328749 - DNA, 406 bp, Zea mays
actgggtcgagggctgtaactttaggcctttttgcgaaggtgacccaagattaggcgctggtaggagctctgctctattatgtgggcatgtagaactagcgcgcgcaccagctgggccgactcgatgcaggccatgtggaagaagaagaagtagcgctggctaaataggaagagccgtaaaatgaggcagagatctacataggtgcattttgataccgacgatgggcagctcatcctgtgccatggatctgaccctttacaaggatatgatcagattgcatactgtctttcgacgtacacgtcaaaggtgtaacccgtgttgtgttatgcgactagatagcgcgattatatacttacgatttggttattgaactgagatgccgtcagtgtaatattatttggattt

SEQ ID NO: 328750 - DNA, 420 bp, Zea mays
gatgccaatgttctaccccaacgccgacccggctcagcaccacgcctcgacgccgacgctcctcctcgccgtacgccacctgccgttccccggcgttcaccggacgcgcgcgctccccggccccgacgtcctgacccctctcgcccgccggctccaggagcttgcgtccgcggcgacctgccacccgttcctgaagccgctctttgccgcccactcacacctttcttccttttcccagggcaggaggcggctggtggcggcgcggcgtgcgacggtgctgtccggggggcactgcttctcggcggtgctagggaactcggtggccgggttggtggtgtccaacggcatcaacaacttcctcaacctctacaacacggtgctcgtcgtcaggctcgtgctcacgtggttccccaacacgcc

SEQ ID NO: 328751 - DNA, 255 bp, Zea mays
ggccggtcggtttctcctcccccaccggttcgtgttcaggttctggttcgtgggcgagagggaagagatggcggcgtcggacgttgagtaccgttgcttcgttggcggcctcgcctgggccaccgacgaccactccctcaacaacgccttcagcacctacggcgaggtcctcgagtcgaagatcatcctggatcgggagacgcagaggtcccgcggcttctgcttcgtcaccttcttcacggaggacgcgatgcg

SEQ ID NO: 328752 - DNA, 212 bp, Zea mays
ggcctagatttatccattcacaatgccgactgactcgtcgatccgaggtctgccttcaattgcgccattcggcgaacgcgtggatcttcttgtgaaaaaaaggtatttgtatgtggccatcgcaatatgagagggtggtatatcccaagtgtttgatgcgcgcatttgtgacatcacatttgtgtgctatatagctgtgagagagcgctcat

SEQ ID NO: 328753 - DNA, 327 bp, Zea mays
cgcctcgcgcgcgaccagctgctcgcctgctcctcctgcgggggcggcgccgccgtccgccgccggtaccgtcgcctcggcccgcccgccagcgccagcgccggtcccgtgctgtcacccgtcgacagggacgactactgcgcctcggacgccgaggccgcggcccctcgcgactcggccgacgactaatacaacgtcgtcagcctcaaggtcagcctgctcggcgactgccagattggcaagaccagcttcatggttaagtatgtgggagatgactgtgtttagcataacggcttgcatatgacaggcctgaatctcatggacaag

SEQ ID NO: 328754 - DNA, 349 bp, Zea mays
cctcggggaattccaattccacattttcaagaaataaggaggcaaaaatgttcatatatgaattggaattatttgttttcttattaggcctatcctgaagccaaaggaaatgagatcggaattcctcggggaattccaattccacattttcaagaaataaggaggcaaaaatgttcatatatgaattggaattatttgttttcttattaggcctatcctgaagccaaaggaaatgagatcggaattcctcggggaattccaattccacattttcaagaaataatgaggcatgaatgttcatatatgaattggaattatttgttttcttattaggcctatcctgaagcca

SEQ ID NO: 328755 - DNA, 277 bp, Zea mays
cctcggggaattccaattccacattttcatgaaataaggaggcaaaaatgttcatatatgaattggaattatttgttttcttattaggcctatcctgaagccaaaggaaatgagatcggaattcctcggggaattccaattccacattttcaagaaataaggaggcaaaaatgttcatatatgaattggaattatttgttttcttattaggcctatcctgaagccaaaggaaatgagatcggaattcctcggggaattccaatttcacattttcaag

SEQ ID NO: 328756 - DNA, 254 bp, Zea mays
ccgactatggttcggcgttcgatgggttccgctacgacacggcggcgattcaggccgctgtagacgcctgcgctgcggcgggcgggggccgcgttcttctcccggcgccgggcaactacctgacagcgaccgtccaactccgctcgcgggtggtgctggaggtgccccccggagcgcggcttctgggcggtaccaggcaggcggactacccgcccgagtcgcgccggtggtacgttgttctggccgagaacacc

SEQ ID NO: 328757 - DNA, 193 bp, Zea mays
aaacaatggacttgttgcggtaccgggacgaagtctctgtgtttgagatcagtggcgccatagcgccatggtgaggtaactggacaaatgggtcccagatgtagctgtgtaaactgctcctgacctggaggtgatggaggtggtctccctttttagtggaaaaaaaccaaggtagtcctgatgttagtttagt

SEQ ID NO: 328758 - DNA, 393 bp, Zea mays
cctcggggaattttatttccattttttcaagaaataaggaggcaaaaatgttcatatatgaattggaattatttgttttcttattaggcctatcctgaagccaaaggaaatgagatcggaattcctcggggaattccaattccacattttcaagaaataaggaggcaaaaatgttcatatatgaattggaattatttgttttcttattaggcctatcctgaagccaaaggaaatgagatcggaattcctcggggaattccaattccacattttcaagaaataaggaggcaaaaatgttcatatttgaattggaattatttggtttcttattaggcctatcctgaagccaaaggaaatgagatcggaattcctcgggggtaccgagctcgaatt

SEQ ID NO: 328759 - DNA, 141 bp, Zea mays
gctggcgctcagttgcttcgaggagctcctcgactgcgccgtggcggacgtcgcgtcggagtgccaccgcatcgcgcgcctcggcctggaccgcagcgtcgacggcgaggaggaggagctccgcgtctgggcggcacgtgc

SEQ ID NO: 328760 - DNA, 342 bp, Zea mays
cctcggggaattccaattccacattttcaagaaataaggaggcaaaaatgttcatatatgaattggaattatttgttttcttattaggcctatcctgaagccaaaggaaatgagatcggaattcctcggggaattccaattccacattttcaagaaataaggaggcaaaaatgttcatatatgaattggaattatatgttttcttattaggcctatcctgaagccaaaggaaatgagatcggaattcctcggggaattccaattccacattttcaagaaataaggaggctaaaatgttcatatatgaattggaagtatttgttttcttattaggcctatcct

SEQ ID NO: 328761 - DNA, 393 bp, Zea mays
cctcggggaattcctattccattttttcaagaaataaggaggcaaaaatgttcatatatgaattggaattatttgttttcttattaggcctatcctgaagccaaaggaaatgagatcggaattcctcggggaattccaattccacattttcaagaaataaggaggcaaaaatgttcatatatgaattggaattatttgttttcttattaggcctatcctgaagccaaaggaaatgagatcggaattcctcggggaattccaattccacattttcaagaaataaggaggcaaaaatgttcatatatgaattggaattatttgttttcttattaggcctatcctgaagccaaaggaaatgagatcggaattcctcgggggtaccgagctcgaatt

SEQ ID NO: 328762 - DNA, 393 bp, Zea mays
cctcggggaattcttattccactgtttcaagaaataaggaggcaaaaatgttcatatatgaattggaattatttgttttcttattaggcctatcctgaagccaaaggaaatgagatcggaattcctcggggaattccaattccacattttcaagaaataaggaggcaaaaatgttcatatatgaattggaattatttgttttcttattaggcctatcctgaagccaaaggaaatgagatcggaattcctcggggaattccaattccacattttcaagaaataaggaggcaaaaatgttcatatatgaattggaattatttgttttcttattaggcctatcctgaagccaaaggaaatgagatcggaattcctcgggggtaccgagctcgaatt

SEQ ID NO: 328763 - DNA, 358 bp, Zea mays
attgcttcagttatatcgtgatcaacatgccgcgttagaatatatactattataatgtgttatctaaaatatgaggacgcccattcagttggcacattgacgttgtgtgcatgcaccacaattgcaacattgacgatggagctcaataccaccacacgtgatgtcatggacgaagttgtcgtccaagcacatgatgattattctttcctcgctcatcgatcggtttttgtatattgtgtttttcttggtggttccctcattgcttggaagattaagaagcagttagcagtttccctgtttgagtacaaaggttcagttgtgtgctaattctcttgctacgggagaggtgacttgggta

SEQ ID NO: 328764 - DNA, 98 bp, Zea mays
aaggctcctactgtctttatatttggtaattcagccgtaggtcgacattgcctccagagatgttatgaattggtcaggtttcctggctgctcactgtt

SEQ ID NO: 328765 - DNA, 313 bp, Zea mays
gcctctaaattatcggttactaagtctaataccctcaaattcgattaagcgacatcggcatatgctactgtagttgcctaatatgccctatgtacaattgctgccactaccttgacgcattcggtacgtacagacatgactgagggtacagtagatgctgaggcagttacaacagcggaaacatctgctactgtcattgcaacattctccaacactacttgaactacgacgggtactgcaggaactctacgctgaaggccacgacttcaacatattctactggatgccctattgtttacacctaatgcataat

SEQ ID NO: 328766 - DNA, 352 bp, Zea mays
aaactaaaaggtgatcaactaccatgcattacctcagtgcaaggtatgtaaggaaccagggcttgagaggcgtcaggaccgtctatcctatcaattagtcattcgtgtggaaaagaagatcgagcaccatacattagtgcaagttatgtaggggtaaccaaggctttagaggcgccggaaccatccatcctaccaatggaaacaaagaaggcggtagagggaagcggtaaagtagagcctcacctcatgttctatggcaagacatgtattcctgccgacgttcttagactcaaggtgtattagaatttcttgctgagaggccagggtcatacctgaaggggatgtggagggt

SEQ ID NO: 328767 - DNA, 393 bp, Zea mays
cctcggggaattccaattccattttttcaagaaataaggaggcaaaaatgttgatatatgaattggaattatttgttttcttattaggcctatcctgaagccaaaggaaatgagatcggaattcctcggggaattccaattccacattttcaagaaataaggaggcaaaaatgttcatatatgaattggaattatttgttttcttattaggcctatcctgaagccaaaggaaatgagatcggaattcctcggggaattccaattccacattttcaagaaataaggaggcaaaaatgttcatatatgaattggaattatttgttttcttattaagcctatcctgaagccaaaggaaatgagatcggaattcctcgggggtaccgagctcgaatt

SEQ ID NO: 328768 - DNA, 173 bp, Zea mays
cataaaatagttcatattatgaagttggaattattatgctttcttattaaggcctatcgctgaagccaaaggaaatgagatcggaattcctcggggaattccaattccacattttcaagatataaggaggcaaatatgttcatatatgaattggaattatttgttttcttatt

SEQ ID NO: 328769 - DNA, 330 bp, Zea mays
ctatcgtgcatactgctttcatccgctctgccgccgctccatcgtcgtgcttccccgacgcagtcgcgagcgggacgtgaggcgacggtgccctccaccaccgccaccgtctcggatttgtcgctctccgccgccatctctgccctcggttcactgtgctccaccgtcgtctttcgcggcacgatgtacattacaatgttgtctccaagacacaggacatggtcttctccaagatccagtacaagggcgtcttctccaagatccaaaccccaatgctagtgagcgcatgaaacccacctggagaagagaaatgaaatggcattccacatg

SEQ ID NO: 328770 - DNA, 319 bp, Zea mays
gttgttgttctgacagcgcacgagctcctcctccgccgccgtgcgaagaacgccgatgcgacgacgctgctgaacatcgtccgaaggtgactgggatcgccaagagaagagagacgaaccgtcgtcggagcacggctcggttttttatctgcgctatggtggtggtgttcgcggcggcgctgttgctggcttgctgggagcaggaccaccaccccagtaacgagctgtacttcgtagtacctacttaggcctggttcgtttctgctggattggtgggtccgaacgatttctaactgaattactttgttaatgtatataa

SEQ ID NO: 328771 - DNA, 299 bp, Zea mays
tttttaacccccccttcctcagctccaccatcgtaataagttccttcctacgctctcctctgcgacctcaaatcccagacgccacccacacccccaccacatcaaggtggtggaatgcctccgcctcccatgtctatgccaccaccgacttcaccaccatctaggtaaacacatgcaatggacagtaccgtctggtcaatgtgtaagctgtaactgtagactaaggatgctggttcctttcatgtctccatgtaacttcgtcaacactaggttgagaggaggtttgagaggtaacctga

SEQ ID NO: 328772 - DNA, 116 bp, Zea mays
gttcatagctttacctcagggaaggtgagcacgtgatcccagggcatatgcaagtgtaatagctacaaagcgtgcaagacgtcttacagatccatcatctaacggacgaatgggct

SEQ ID NO: 328773 - DNA, 347 bp, Zea mays
cctcggggaattccaattccactttttcaagaaataaggaggcaaaaatgttcatatatgaattggaattatttgttttcttattaggcctatcctgaagccaaaggaaatgagatcggaattcctcggggaattccaattccacattttcaagaaataaggaggcaaaaatgttcatatatgaattggaattatttgttttcttattaggcctatcctgaagccaaaggaaatgagatcggaattcctcggggaattccaattccacattttcaagaaataatgaggcaaaaatgttcatatatgaattggaatcatttgttttcttattaggcctatcctgaagc

SEQ ID NO: 328774 - DNA, 393 bp, Zea mays
cctcggggaattccaattccacattttcatgaaataaggaggcaaaaatgttcatatatgaattggaattatttgttttcttattaggcctatcctgaagccaaaggaaatgagatcggaattcctcggggaattccaattccacattttcaagaaataaggaggcaaaaatgttcatatatgaattggaattatttgttttcttattaggcctatcctgaagccaaaggaaatgagatcggaattcctcggggaattccaattccacattttcaagaaataaggaggcaaaaatgttcatatatgaattggaattatttgttttcttattaggcctatcctgaagccaaaggaaatgagatcggaattcctcgggggtaccgagctcgaatt

SEQ ID NO: 328775 - DNA, 342 bp, Zea mays
gggttggcttttcctccttctccggttcgggttcgggttcgtgaggttgtccggggttcggtttcgtgggtgagcggatcgagatggcggcgtcggatgttgagtaccgctgcttcgtcggcggcctcgcctgggccacggacgaccactccctccacaacgccttcagcacctacggcgaggtcctcgagtccaagatcatcctcgatcgggagacgcagaggtcccgcggcttcagcttcgtcaccttctgcacggaggaagcgatgcggaacgccatcgagggcatgaacgggaaggagctggacggccgcaacatcaccgtcaacgaggcccagtccc

SEQ ID NO: 328776 - DNA, 424 bp, Zea mays
gcagaagacattgaggcttaccgtatgaagaggattcaccatgacgatcctatgaaagattttctcaactaaaagtgtggtaaatgtccgcactgccgtataacattggtggcaccctgccttgcagtgaagctgtgtaattgtaagatagactatgtacctgtccgaaccagggtggtgctgtaaactactctagtctagaatggctatgctttttacaagctgcgtgttgaaatgacatgatttctgatatcagaatccttgcttccatagttcccgtatccaagacacgggagccttcttcaggtgtatctaaccagaaacatgtggacatttttaccttaaatttgaccgacccgtcttattttaaaaaaatcataataattattattaaaaaaaaaaaataaaaaaaaaaaaaaaatta

SEQ ID NO: 328777 - DNA, 393 bp, Zea mays
  unsure (1)..(393): unsure at all n locations
cctcggggaattccaattccattttttcaagaaataaggaggcaaaaatgttcatatatgaattggaattatttgttttcttattaggcctatcctgaagccaaaggaaatgagatcggaattcctcggggaattccaattccacattttcaagaaataaggaggcaaaaatgttcatatatgaattggaattatttgttttcttattaggcctatcctgaagccaaaggaaatgagatcggaattcctcggggaattccaattccacattttcaagaaataaggaggcaaaaatgttcatatatgaattggaattatttgttttcttattaggcctatcctgaagccaaaggaaatgagatcggaattcctcggnggtaccgagctcgaatt

SEQ ID NO: 328778 - DNA, 421 bp, Zea mays
ctgctggttctttgactcagtcttctgccccgataggttttgctgttgtttctcagtcttccaccgagagatcactttctactcctactttaggatcgacgcatgggtcacctggtttgtactggccctcgccgctatgattctcagcgtctttgggagcatgactggctttgtcttccttccaatgtgcctgccggtcttgatggatctgcttctggtgcttctacctcgtcgtttgcctagtggcttcatcgtctgggtcatctttgtggcactcgtctatctatgttaattcgtcgaggtcttttaggttcagttttagatcatgagtccttacatcattgtctgggttgacgtttaggcaaacccattctacttccttatcattctagtgagtcagtgtcccatcgcacttttgatc

SEQ ID NO: 328779 - DNA, 156 bp, Zea mays
gccgccaaggtgtggggattatgaggatgatgacctagaggatgaggaagacgatgagaaggcagacgaggacaaggccgactctgatgccgaggatagcaaggattctgatgatgagaagcagcacgacgagctctagatggcgaggatgatgtt

SEQ ID NO: 328780 - DNA, 185 bp, Zea mays
gtgataaataatagggcttaggattagaccatctcaaaaaaggaaaaggacaataaagaaagcaaaaaaagacaaagccaactataaaaccaaaaataaaaaaagaatctaatgataagaaacaacacaaaaaagctctaaaaaaagggcggccatcctctagtcgcctactagacccctgaatt

SEQ ID NO: 328781 - DNA, 420 bp, Zea mays
  unsure (1)..(420): unsure at all n locations
ttcatatntatattcagttttgtaaaattatcgaaagaaactatgccagccaatttaggcagcttgtattttatttattaaaaaggaataagattacaaggggctaaaaaacccttgcagaatatttacaagaaaggggagcgggggagagagaatacaattcaaatatgtccacaaaactggaagctggagagggagaggcagaaggaggagagggagactgaataatattacaaagaggttggtgatagttagtcttatagtatgaggtagccgaagttgcaagtggcaccagcaacgaataagttatcttagtataatcacatgtttatgaagaatacacattatcaattgtcccggttccctttactttcaggtacctggagagcaaaccaacgcattggcaccctacccacactg

SEQ ID NO: 328782 - DNA, 269 bp, Zea mays
atcatcactgatgaccctgccttggccaagacttttgcagaggagacctgtggcaagcacaaggaggcagaaaaggctgcttttgatgaggccgagaaaaaaaaggaagaagaggatgccgccaagggtggggatgatgaggatgatgacctagaggatgaggaagacgatgagaaggcagacgaggacaaggccgactctgatgccgaggatggcaaggattctgatgatgagaagcacgacgagctctagatggcgaggatgatgtt

SEQ ID NO: 328783 - DNA, 400 bp, Zea mays
aacatgaaagatttgggagatctgcttcaggggaaaaaaaaagaaaaaaaaaaaaaaaaaaaaaaaaaaaaaaaaaaaaaaaaaaaaaaaaaaaaaaaaaaaaaaaaaaaaaaaaaaaaaaaaaaaaaaaaaaaaaaaaaaaaaaaaaaaaaaaaaagggccgccccccaccaaggaaccccgccaccccggaattaaatccggacccggtccctgaagccttccaaccttccctaaaagggggccatataaaacctggcctaaaccagggcaaaaccggttcccggggaaaaatggtaacccgttaaaattccaaaaaactatccaacccgaaacctaaaagggaaaacccgggggtcccaaaggagtaaccaacccaacataaatggcattcccctaa

SEQ ID NO: 328784 - DNA, 343 bp, Zea mays
gttctagatcgttagtgctgcaaatgccatcgtttgagagcttgttggaatgtgtttagacttgagtatgatcatctcaattgtgtgttgcagctgttgtaagggtgctattggacttgatggctccttttatgtttggtcactcaattttgtagtgaacagaaatttgtctaaaaaaaaaaaaaaaaaaaaaaaaaaaaaaaaaaaaaaaaaaaaaaaaaaaaaaaaaaaaaaaaaaaaataataaaaaaaaaaaaaaaaaaaaaaaattacaaaacatttattattaaatttataaatatattatattataataattaataaaaaaggggggtcgccattt

SEQ ID NO: 328785 - DNA, 386 bp, Zea mays
  unsure (1)..(386): unsure at all n locations
ctcaagcccatatctgtctttgagctataactcgcanaaaatgttcatatatgaattggaattatttgttttcttattaggcctatcctgaagccaaaggaaatgagatcggaattcctcggggaattccaattccacattttcaagaaataaggaggcaaaaatgttcatatatgaattggaattatttgttttcttattaggcctatcctgaagccaaaggaaatgagatcggaattcctcggggaattccaattccacattttcaagaaataaggaggcaaaaatgttcatatatgaattggaattatttgttttcttattaggcctatcctgaagccaaaggaaatgagatcggaattcctcgggggtaccgagctcgaatt

SEQ ID NO: 328786 - DNA, 231 bp, Zea mays
aaatgttgatatatgaattgctatcatttggcgttcgtattacgcctatactctaacctaaggaaatgtctatggaattcctaggcgaatctcaactcctcattctcaagaaataatgcggctataatggtcatttactatttggtattatttgccatcttattactgctatactgcagcctaagggaatgcaatcggtatttcttggggaattccaattccgccttttca

SEQ ID NO: 328787 - DNA, 393 bp, Zea mays
cctcggggaattccaattccacattttctttaaataaggaggcaaaaatgttcatatatgaattggaattatttgttttcttattaggcctatcctgaagccaaaggaaatgagatcggaattcctcggggaattccaattccacattttcaagaaataaggaggcaaaaatgttcatatatgaattggaattatttgttttcttattaggcctatcctgaagccaaaggaaatgagatcggaattcctcggggaattccaattccacattttcaagaaataaggaggcaaaaatgttcatatatgaattggaattatttgttttcttattaggcctatcctgaagccaaaggaaatgagatcggaattcctcgggggtaccgagctcgaatt

SEQ ID NO: 328788 - DNA, 415 bp, Zea mays
cacccaaggagacgctgttcaatggtgtcatttcgataagcaactacgacactgatgaagcaccttcgccgcaacctgtatcgttggtatctgatgagatagacatttctgaatcatcaccttcgccatctccgtcgccacatacagtggatgagatggacaactctgaggagtcaccttcacctttgtctcacaccatagaactccaaatgtttgaggtaccaaccacctcatgcaataatgaagaggacgaggaggatgacgattcttttagagaatgggagagtgattaaatgttgtcatcagttaacaacacctcaattgtagataggcatcagcgatatgatgtaatataagtggagacatgtctgtcgcatggatttgcttgaaatggtcagacatgtttgatgcgtat

SEQ ID NO: 328789 - DNA, 417 bp, Zea mays
atctttactcaagtaaattttcttgctaacacttgtaaggcttagcttgttaaatgttaatcctataaaaagttgcttccatcatgtcattgtaacattgttgttcaatccatctttacacaagtaatttttcccttaataacgcttgtaagtcttaggttggtttcagtgcatctgacacttatcgaccgccacatcagttaccgatcacgttctcgaccatcgtcaggtcttatctatcgcagcgctcccctttaccgacagcttgcaaccacatcaatactatatcaacttttcttttatatacttgtagttgaaatgaaacacaatgttttatcaaaacaaaaactcattcgagtacataattaagcaaataaaatttacgtaatttataaaaacaaattaaacaactcggtc

SEQ ID NO: 328790 - DNA, 384 bp, Zea mays
cgacgatgacttgcggcgcataccgacggggcctaaccctgtgcacaacagatagctagctgatcgtgcatgcagcccagcaagatccatcaatcctataagacgagaggagcaagcaacgagaaatgcaatgcaagccaagccaccagagttcagggctttcttggtacttacgagcgagctcatcatcatctcctaccaccctctgttctgttctgttcaccacggacatggaccagaagacacgatagcgatcggcagtagtggttgagcttcaggagttgcgaaaactctctggacgctgtcgtccattaatttcctcctcttcttttttttgttcttcccgagcttttcgtctgccagcaccgggtgtatattcttcct

SEQ ID NO: 328791 - DNA, 418 bp, Zea mays
  unsure (1)..(418): unsure at all n locations
cctctgcccactgctccactcaccagtcaccacaatggcgtctgaatccgaggcctgcagctgggagccgcacctgctccaccccaacggcactgagccgctgcaccggatcgccgtggactactgcccggaggcgtgcctncacgagcgccacgcgggggagatccacgtcacctacgacgaccgcggcggcgcgcgctggcgctcctgctgccggttcctgcccggcagcgccgtggccaccacgatccgcgcgccggcggtggacacgtcgggactcaactacaacatctacttgtcctccctggagggttccgccgaccaggacgagatcgacttcgagttcctcggccacgacaagcgcgctgtccagacaactactacgtcggcggcaacggcgggcgggagcagatccacg

SEQ ID NO: 328792 - DNA, 393 bp, Zea mays
cctcggggaattccaattccattattccaagaaataaggaggcaaaaatgttgatatatgaattggaattatttgttctcttattaggcctatcctgaagccaaaggaaatgagatcggaattcctcggggaattccaattccacattttcaagaaataaggaggcaaaaatgttcatatatgaattggaattatttgttatcttattaggcctatcctgaagccaaaggaaatgagatcggaattcctcggggaattccaattccacattttcaagaaataacgaggcaaaaatgttcatatatgaattggaattatttgttttcttattaggcctatcctgaagccaaaggaaatgagatcggaattcctcgggggtaccgagctcgaatt

SEQ ID NO: 328793 - DNA, 147 bp, Zea mays
cctcggggaattgcaattccacattctctagaaataaggaggcaaaaatgttcatatatgaattggaattatttgttttcttattaagcctatcctgaagccaaaggaaatgagatcggaattcctcgggggtaccgagctcgaatt

SEQ ID NO: 328794 - DNA, 406 bp, Zea mays
tggtggttcgttggttgtgttgtgtgcgtgtgtttcagtgatgagctcctttgtttttctttctcgtggatctatcgatggatgaacatgaatgaatgaaccgaactgcacagctccggtgtgagctgatgcattcatgcatgcataaagaagcaaaaatgtacatatatgaataggaataatacgttaaacttattaagcctatcctgaaacccaaggataatgagatcggaattcctcagggaaatatccaactccacattttaaagaaatggggcggccccaaatgttcatatatgaatcccaggaattaatttccgaaccggtccctatagtgaaaccagttgaccttatatcgggagttcctagagtttgccgaactcggggcccatatagtcacccgggt

SEQ ID NO: 328795 - DNA, 228 bp, Zea mays
caaaaatgttcatatatgaattggaattatgcgctatcttattaggcctatcctgaagccaaaggaaatgagatcggaattcctcggggaattccaattccacattttcaagaaataaggaggcaaaaatgttcatatatgaattggaattatttgttttcttattaggcctatcctgaagccaaaggaaatgagatcggaattcctcgggggtaccgagctcgaatt

SEQ ID NO: 328796 - DNA, 401 bp, Zea mays
atgaaaggaaaaagggttaaagtttgaatgttatctcataggaatgtgaggcataaggtaacttgcaatcagaaaacaaacacaacattggtgccaacgattatagagcacctgaggcctcaatgttgtttgttctgtcaaggccggctccagtgttgtagttggtcctatagaaaggatggttgttgattgaaccatttgggctgggtggtcattataattatagacgattggtaacacaatcatgaagtggtagaaatatctcacattactgactagggggattggatcccttttgtttatgacggggctcaaattgccgaagatcctcaaaaccttttgttttcagaatgagaaagtgtgttcaggaacaatatgaagcatagaggaagccatccttc

SEQ ID NO: 328797 - DNA, 240 bp, Zea mays
  unsure (1)..(240): unsure at all n locations
cggataaaattaggccnattacatcatcgcgcaatggaagcaggtcaaggagagctgggcttgcatcatgcgaacgaagctcttctggagatccaagcgacccaaaccgaatgggcagctttgccccgattagcagcatacgcccattgagtgcgcaaagggcacatcattcacgtgtaacattagatcaatacatgatcttggtcaataatgggaaggtcttcacataatgactctatc

SEQ ID NO: 328798 - DNA, 286 bp, Zea mays
gtgtggccgcttgcgactagatcgtcgtgttcaacggctccgtgacaaggaaccaggcgtagactacttgtggtacggttggcagctcttacacgcgtgcgcgctcgtcatggagcacttctaactcgtggtttctgaatttatctctttagagcaagtttaataatgggtctttaataatagtgcttacattgggctctaaatcttttccatgtcatttagagccaacaataaaaaatattcatataacgatgttgactaataaaaaagaaataatgaaaagggc

SEQ ID NO: 328799 - DNA, 342 bp, Zea mays
  unsure (1)..(342): unsure at all n locations
ttgctgtatcccgaagaaatcngctgctgctgccagcccggccaagaaagggcgatatttattagggatcattaagtattcctattaagcctatcctgaacccaaaggaaatgagatcggaattcctcggggaattccaatttcacattttcaagaaacgtaatattgtcagtagctctagattcgtcggtagctccagcatgagtgtcggtggtagttctgtgcctgtaaaaacttgggatagntgatcgcgtgtgatcagacgtcatactcctacagtctctatgaacaagctaagctataataatattttgctatcctatgatccccgggttgttggct

SEQ ID NO: 328800 - DNA, 393 bp, Zea mays; identical to SEQ ID NO: 94872

SEQ ID NO: 328801 - DNA, 268 bp, Zea mays
acaacaggaacaggctgcgccggggacccaggtggagggttgagagctgcaatccgctggcttgtgatctgcatctagtcaattcccatggaggaattgcattggcattggactgtaccgtatctaataggtcacctatatcatttgtgaagatcaggatcacctatatcatttgtgaagatcaggattatccggtctataataactaaacatacaaataaaatgtccaccgaggtttctggtgattctttatgtcattgttgacccc

SEQ ID NO: 328802 - DNA, 407 bp, Zea mays
cttcagcgatggctccgatcctatctctatcggggcactgggtcgtcccatgcaggaggaagtccacgacgcacacatgctatcacacgctaggtgagtcaggaacagaccacagcatgaccgctaggctcgacctgcagcctgcttgctcgatccgtcatctgcctacatcattcacgccagtcgacatctctcggctgaaggtatgccgacggccatcgacagtgccatggcacacagagcattactacgctaccacgctcgacgaccctgatacccacgacatcggcgattgtgcagctggtactactgccaaccatggttcagcgatcaagcctactgacgttattatccatcgtcagacgatgctggatcgcggtcagacctatggctactccatgtgcact

SEQ ID NO: 328803 - DNA, 54 bp, Zea mays
ccatgcacaacctaagctgttacacagagatccgcaccagagggaattgtggca

SEQ ID NO: 328804 - DNA, 297 bp, Zea mays
  unsure (1)..(297): unsure at all n locations
ctcatgtttatggatttcaagactccaggttatttagaatgagcgtgatgtgtaactacattgcatgtgcagagcaaatgaactcgcagtccagtgcattacagttgcttgtacaacaataacaagatagagggaaggggggcaggcatgaagaacttcatttgctctgctcatgtttatggatttcaagactccaggttatttagaatgagcgtgatgtgtaactacattgcatgtgttcccgttgcaagtaaaatcatgatttccaggattgctcangcataaaaaanacnnnna

SEQ ID NO: 328805 - DNA, 365 bp, Zea mays
cagaacagcagctttattgatcaaatctggattcatcgaccttgataatgtctattctcacttgcttccaaatgacgacgaggcgtttgagcattttgattctttcatttcaagaagaattgatgaggttggtatttcttataaatctgtaactggccaagagagtagcatgaaagggagtggcaagaaggttgatggatggaaaactttagaagtttcttgaagtaaaagccttatgtacagccatcccttcatgtgacatatactgcatggttatgttacacgttgttgtcttgtctaactatgtacaatattttccccttttgtcgtaatgaaaaacagaaagagctttagtttttttcttc

SEQ ID NO: 328806 - DNA, 400 bp, Zea mays
gatatttagactatttgcaactctctgctctatatcacactatacaaccacgtgatttagattctaccctctacttttctccttcccgcagcggttcccccaaaattcacccatttaccctactacaacgataattttattattttctatacatttgcatcatctattatcatttttttcctcgactaacaaacactagcgtgcgtggatagcgaggcaagaggttgtataaggttgtctgcacggtttgccgcgcgagctccacctccccttgcatgccaattgtagtagaaccccacgcgtgcatcgcttgccgctacgtgacccccgagcagaccgtttctctctccttcctttcctggcgtgtcactgttcactagcgctaccactgtatggcact

SEQ ID NO: 328807 - DNA, 411 bp, Zea mays
agagacctgctagcatgcctgcacgcctactctagcagatcccatatgggaactccctttccctttcttcaagatatcacgctgcacaaccgcgcgtatatgaatcggccctatacgtttccccattacgcctatgctgaagccaaaggcactgagatccgcatctacagcggaattccaattacacattatacagatgcatcgtggcttatcagttcatatctgaactggcattctctagcgtgctattatgcctatcctgaagccaaaggaaatgagatcggactgcctggcggactagcaattccacattttgcatacctatggaagcacaactgtacacatacgactcggaacgatacgtgaccttattacggctatgctgaatccaaaggaaatgatatcggaatt

SEQ ID NO: 328808 - DNA, 199 bp, Zea mays
accttgtctttatcgcgagcggtcgccccttctgatgctttgatatgacggccgcggtcgattgtgtgtctagttggccggtctactgcaatttgtactgtatcatcgtttcaaggtgttccagttactagcccatatggtgtaatattatcacagctattatcaatggaaagccctcagttatatcctcaaaaaaata

SEQ ID NO: 328809 - DNA, 429 bp, Zea mays
gagacttacgagcatgcatgcacgcctactttagctgatactttggctgaagtctaaatccttatcgccagcacctgctgcggcacgctacggttatatactaatcgactacaagaggaccataaccaggccatatcttgaagcccaccgtaacgaacctggaatgcctccaggacatcaaactctacatttgcaagtactacagaggcatagacgcgcacatatgacagggcaccatctggtttcataccaggtctatcctgaagccaatatcaacgtgaacggaagaccaggtgcactcccaatgccacagcgctaacacacaactacgcagaactgctgatatcataatagaacttattcggctccttattaggcatatactgacaccaaaggagatgatacacgctttcctagaaactaccgagc

SEQ ID NO: 328810 - DNA, 417 bp, Zea mays
gtcttctggtttccccagatctcccaccggggaaccctacccggcgtccgcctcggtcgtcccggcgtgcgccaaggtcgccgatcgcatcgtgcgcgtcctcgccatcgatctcgagggggcgcgccgcgaggtcgtcggcctctccgggcagacactcctccgcgcgctcgccaacgcggagctcatcgagccggcctcccaccgcctcgaggatatcgacgcgtgctccgccgagtgcgaggtccacatcgcgcaggagtggctcgacaagctgccgtcaccgtcctacgaggagcggtacgtgctcacgcgcgcgtccaggaaccgcgagctcaacaagcacgcgcgcctgggctgccaggtcgtcctcacgccggagctgcatggcatggtcgtcgctgtccccgagcctaa

SEQ ID NO: 328811 - DNA, 394 bp, Zea mays
cctcggggaattccaattccactattttcaagaaataaggaggcaaaaatgttcatatatgaattggaattatttgttttcttattaggcctatcctgaagccaaaggaaatgagatcggaattcctcggggaattccaattccacattttcaagaaataaggaggcaaaaatgttcatatatgaattggaattatttgttttcttattaggcctatcctgaagccaaaggaaatgagatcggaattcctcggggaattccaattccacattttcaagaaataaggaggcaaaaatgttcatatatgaatcggaattatttgttttcttattaggcctatcctgaagccaaaggaaatgagatcggaattcctcggaggtaccgagctcgaatt

SEQ ID NO: 328812 - DNA, 394 bp, Zea mays
  unsure (1)..(394): unsure at all n locations
cctcggggaattttatattccatattttcaagaaataaggaggcaaaaatgttcatatatgaattggaattatttgttttcttattaggcctatcctgaagccaaaggaaatgagatcggaattcctcggggaattccaattccacattttcaagaaataaggaggcaaaaatgttcatatatgaattggaattatttgttttcttattaggcctatcctgaagccaaaggaaatgagatcggaattcctcggggaattccaattccacattttcaagaaataaggaggcaaaaatgttcatatatgaattggaattatttgttttcttattaggcctatcctgaagccaaaggaaatgagatcggaattcctcggnggtaccgagctcgaatt

SEQ ID NO: 328813 - DNA, 394 bp, Zea mays
cctcggggaattttatattccttattttcaagaaataaggaggcaaaaatgttcatatatgaattggaattatttgttttcttattaggcctatcctgaagccaaaggaaatgagatcggaattcctcggggaattccaattccacattttcaagaaataaggaggcaaaaatgttcatatatgaattggaattatttgttttcttattaggcctatcctgaagccaaaggaaatgagatcggaattcctcggggaattccaattccacattttcaagaaataaggaggcaaaaatgttcatatatgaattggaattatttgttttcttattaggcctatcctgaagccaaaggaaatgagatcggaattcctcgggggtaccgagctcgaatt

SEQ ID NO: 328814 - DNA, 394 bp, Zea mays
  unsure (1)..(394): unsure at all n locations
cctcggggaattcctactccatattttcaagaaataaggaggcaaaggtgttcatatatgaattggaattatttgttttcttattaggcctatcctgaagccaaaggaaatgagatcggaattcctcggggaattccaattccacattttcaagaaataaggaggcaaaaatgttcatatatgaattggaattatttgttttcttattaggcctatcctgaagccaaaggaaatgagatcggaattcctcggggaattccaattccacattttcaagaaataaggaggcaaaaatgttcatatatgaatnggaattatttgttttcttattaagcctatcctgaaagccaaaggaaatgagatcggaattcctcgggggtaccgagctcgaatt

SEQ ID NO: 328815 - DNA, 393 bp, Zea mays
  unsure (1)..(393): unsure at all n locations
cctcggggaattccaattccattttntttagaaataaggaggcaaaaatgttcatatatgaattggaattatttgttttcttattaggcctatcctgaagccaaaggaaatgagatcggaattcctcggggaattccaattccacattttcaagaaataaggaggcaaaaatgttcatatatgaattggaattatttgttttcttattaggcctatcctgaagccaaaggaaatgagatcggaattcctcggggaattccaatttcacattttcaaaaaataaagaagcaaaaatgttcatatatgaattggaattatttgttntcttattaggcctatcctgaagccaaaggaaatgagatcggaattcctcgggggtaccgagctcgaatt

SEQ ID NO: 328816 - DNA, 362 bp, Zea mays
gcagtattacttgatattagtcatttctttgaggttttccttgatgattttcacgcatgtatgtatgctgctacctacgtgtatgcatgcatcactatggctgttacgcctttgatcacaagacaactacgtagctaggatcgtcctagtgtgttgacgacgtttggtatgtgcatgcgcaatgcctcatcacatcaagtgtgtaataatattagtttgcaggtataattatgcatttgattaaaatacacgagccaaagagctaattggctgaaagccgaacatccggatataggagtggccttacaatgataaaaggcgggtcaccgactagcatgttcgtcgaccaggaaatcaattct

SEQ ID NO: 328817 - DNA, 395 bp, Zea mays
cctcggggaattccatattccactattttcaagaaataaggaggcaaaaatgttcatatatgaattggaattatttgttttcttattaggcctatcctgaagccaaaggaaatgagatcggaattcctcggggaattccaattccacattttcaagaaataaggaggcaaaaatgttcatatatgaattggaattatttgttttcttattaggcctatcctgaagccaaaggaaatgagatcggaattcctcggggaattccaattccacattttcaagaaataaggaggcaaaaatgttcatatatgaattggaattatttgttttcttattaggcctatcctgaagccaaaggaaatgagatcggaattcctcgggggtaccgagctcgaatt

SEQ ID NO: 328818 - DNA, 247 bp, Zea mays
gaataatgaattggcattccacatgaagcttgtggggaagtgttaaactcgtaattgattctagtgccgaagttcctaaccaagagacttgtaccatttttatattatatttctatctatatgtgtgaatagagatgaccttatatgatgtgactatggatgaattagcttcggtggatgttatatggtattcaaattaaactttaaaaaagtataccataaatattgtgtaatataataaaaaggt

SEQ ID NO: 328819 - DNA, 119 bp, Zea mays
atcgcttacatgctctgtctgaaagaacaacaacatagaagcggaaattctaaaatgacaagcgaggaaagaaaaataataagaactaaagaatgatgataaatggagctaaataaaaa

SEQ ID NO: 328820 - DNA, 294 bp, Zea mays
gcctgcaggtctactctagatgatcccctcggggaataccaattccatatgaccttgttatacggaggcaaaaatgttgatatagggatagtaataatgggtcttctaattaggcctatcctgaacccaaaggaattgagatcggaattcttgggggaatcccaatcccaaattttaaggaataagggaggcaaaaaggtcaaattttgattgggaatatattggttacctaataaggcctatcttgaacccaaaggaaataaaaccgaaattcctcggggaatccacaattca

SEQ ID NO: 328821 - DNA, 344 bp, Zea mays
cctcggggaattccattgccactctttcaagaaataaggaggcaaaaatgttcatatatgaattggaattatttgttttcttattaggcctatcctgaagccaaaggaaatgagatcggaattcctcggggaattccaattccacattttcaagaaataaggtggcataaatgttcatatatgaattggaattatttgttttcttattaggcctatcctgaagccaaaggaaatgagatcggaattcctcggggaattccaattccacattttcaagaaattatgaatgcaaaaatgttcatatatgaattggaattatttgttttcttattaagcctattctt

SEQ ID NO: 328822 - DNA, 308 bp, Zea mays
gacttatccgttatctgcagcaatggctacacccggggttggattgtacacactactaactggtacataacgtaccaagaagaagctgaagacaccgatgagcagtatgaccaatcagggccatccgtgacatactgaccaggatgcagacactgatgagatggatgaaccactgtcataacaacgccaatgacattggctgaatcaagaacatttacctttaactgatgcgtctattggaaggccttcacactaacagccgacatcaggcaacgccgcagtgtatacaactgctataaaactgacaa

SEQ ID NO: 328823 - DNA, 277 bp, Zea mays
catcgcgcccactttccctatctgcgcacgctgcgactgcgcacatctgagaatggctgtccgttgcaccatgatggaagcctctccattgacgtaatacgatgaggcacgatctatgacagacgtgcaacgcaccattgaacatgcacgtgccgtaagtgcgccccgcgactacacccctaacgcccagcgaagaatcgtaggcagtcgcctatccactgcccgttatcatgaccatggaggaagcactggatacctaactgctcgctttgcgctg

SEQ ID NO: 328824 - DNA, 120 bp, Zea mays
aaattattagttgttttagctcagctctggatagtgatgtctatatccaaagacatgtaaaacatataaatcaaatgttatatgaatatattaattgtcgaaaatgaattttaatttggg

SEQ ID NO: 328825 - DNA, 150 bp, Zea mays
tggtcgtgctagttctagatcgcgatttgccgccacttacaaaggcacggggagacgggagaaaaaatactgcaatcatacagcgatggcaccgggggaaataaactctggttattgcataacattacgacaacgtgtcacacgttcgac

SEQ ID NO: 328826 - DNA, 186 bp, Zea mays
aatttatgcattaggtgttcggactatacttgatgcaagatggcaatatccaagatgttatgttcgtactatacatcggtcactagaatgccacgatatatgcacatatcgcagggactctatgactatgattattggaactaagacattagttgctaaaagtatgaattcctgttcactgaaaca

SEQ ID NO: 328827 - DNA, 281 bp, Zea mays
  unsure (1)..(281): unsure at all n locations
gaatgcncnnacgtatagtngcgacnnatatcgcataggactcttnnttgtctaatgaattatnnttgttcttaaaacaaatttgttgcttaaannagtttcgtttccctggttcactttgaaacattnnntccttggaacaaattttcanntttgttccaacactttttcacttgtaagtggccaggtgtcnaatgcacccaatcattttgaaatactcttttctttaaatttttcatctaaatttcagaaatttnttcaattggtagggtgacttgaag

SEQ ID NO: 328828 - DNA, 394 bp, Zea mays
cctcggggaattccaattccatattttcaagaaataaggaggcaaaaatgttcatatatgaattggaattatttgttttcttattaggcctatcctgaagccaaaggaaatgagatcggaattcctcggggaattccaattccacattttcaagaaataaggaggcaaaaatgttcatatatgaattggaattatttgttttcttattaggcctatcctgaagccaaaggaaatgagatcggaattcctcgggggaattccaattccacattttcaagaaataaggaggcaaaaatgttcatatatgaattggaattatttgttttcttattaggcctatcctgaagccaaaggaaatgagatcggaattcctcgggggtaccgagctcgaatt

SEQ ID NO: 328829 - DNA, 411 bp, Zea mays
  unsure (1)..(411): unsure at all n locations
tgactgcaatctgcaatacatcatctagactagatctctctgtttcttgggcgtatatattcctacataagtacgctctgatcttcttccagctcgctcgctcgctcgatcgatcgatcgctcggcgcgcgccagtagataaatttatatatctctacacgtcatggggcctcagcaaggccggcggtcgaacggcggcgcggcggcgcggagcaaggaggaggaggaggtggggggcgcgaagaaggtggtgcgctaccgcgagtgccagcgcaaccacgcggcgtccctgggcgggcacgccgtggacgggtgccgccgactgcgactgcgactgctcctccaccacctncggcgcctgaagtgaactcatctacggtgaatcgcctcgccggcggctggccacgccgc

SEQ ID NO: 328830 - DNA, 92 bp, Zea mays
aaaattgtattttacattccataatatgatttgataacaaatttgcacaaggtttgagagtaaattcaaattcaaatttaaacctagaagag

SEQ ID NO: 328831 - DNA, 393 bp, Zea mays
  unsure (1)..(393): unsure at all n locations
cctcggngaattccaattccacattttcaaganataaggaggcaaaaatgttcgtatatgaattggaattatttgttttcttattaggcctatcctgaagccaaaggaaatgagatcggaattcctcggggaattccaattccacattttcaagaaataaggaggcaaaaatgttcatatatgaattggaattatttgttttcttattaggcctatcctgaagccaaaggaaatgagatcggaattcctcggggaattccaattccacattttcaagaaataaggaggcaaaaatgttcatatatgaattggaattatntgntttcttattaggcctatcctgaagccaaaggaaatgagatcggaatntcctcggggtaccgagctcgaatt

SEQ ID NO: 328832 - DNA, 108 bp, Zea mays
gtttgtagaattgtaaccatgaagcaacttgttgttgggtggctcgctggatgttgagactaacccttcatgtgaaggacaaatatgtagtattcatgcctctacatt

SEQ ID NO: 328833 - DNA, 431 bp, Zea mays
agacttgcttgcatgcctggcgcggactctgaggatcccttggggaaattccaattccacattttcaagaaataatgaggcataaatgttgatatatgaattggaattatttgttttcttattaggcctatcctgaagccaatggaaatgagatcggaattcctcggggaattccaattccacattttcaagaaataaggaggcaaaaatgttcatatatgaattggaattatttgttttcttattaggcctatcctgaagccaaaggaaatgagatcggaattcctcggggaattccaattccacattttcaagaaataaggaggcaaaaatgttcatatatgaattggaattatttgttttcttattaggcctatcctgaagccaaaggaaatgagatcggaattcctcggcggtaccgagctcgaatt

SEQ ID NO: 328834 - DNA, 426 bp, Zea mays
ctatgacttctcggcgcggactttttaagttcccttcggggaattccaattccacattttcaagaaataaggaggcaaaaatgttcatatatgaattggaattatttgctttcttattaggcctatcctgaagccaaaggaaatgagatcggaattcctcggggaattccaattccacattttcaagaaataaggaggcaaaaatgttcatatatgaattggaattatttgttttcttattaggcctatcctgaagccaaaggaaatgagatcggaattcctcggggaattccaattccacattttcaagaaataaggaggcaaaaatgttcatatatgaattggaattatttgttttcttattaggcctatcctgaagccaaaggaaatgagatcggaattcctcgggggtaccgagctcgaatt

SEQ ID NO: 328835 - DNA, 393 bp, Zea mays
  unsure (1)..(393): unsure at all n locations
cctcggggaattccaattccacattttcaagaaataaggaggcaaaaatgttgatatatgaattggaattatttgttttcttattaggcctatcctgaagccaaaggaaatgagatcggaattcctcggggaattccaattccacattttcaagaaataaggaggcaaaaatgttcatatatgaattggaattatttgttttcttattaggcctatcctgaagccaaaggaaatgagatcggaattcctcggggaattccaattccacattttcaagaaataaggaggcaaaaatgttcatatatgaattggaattatttgttttcttattaggcctatcctgaagccaaaggaaatgagatcggaattcctcggnggtaccgagctcgaatt

SEQ ID NO: 328836 - DNA, 393 bp, Zea mays
cctcggggaattccaattccacattttcaagaaataaggaggcaaaaatgttgatatatgaattggaattatttgttttcttattaggcctatcctgaagccaaaggaaatgagatcggaattcctcggggaattccaattccacattttcaagaaataaggaggcaaaaatgttcatatatgaattggaattatttgttttcttattaggcctatcctgaagccaaaggaaatgagatcggaattcctcggggaattccaattccacattttcaagaaataaggaggcaaaaatgttcatatatgaattggaattatttgttttcttattaggcctatcctgaagccaaaggaaatgagatcggaattcctcgggggtaccgagctcgaatt

SEQ ID NO: 328837 - DNA, 386 bp, Zea mays
tatgacgtctcatgcacgcgcacaaactcggaaatccgctccagcccatattttatttaagaaacctatttacccgctattcgaagagtttaaaaacacattggcagccaacaccaaaaatcatcaccaaacaacaaaaacaaaacaaaatacaaaaaaacaacaaaaaaaaaaaaccaaaaaaaaaaccaaaaaaaaaaaaaaggcccccccccccctacaaaccctttcaccccggaattaaatcccgcacctatcccttcagccttccaaatttccccaatagtgagcctttttaaaccctaccttaaccatggccaaaactgttccccgggtaaaattgcaatccgttcacattcccacacaacttacaacccgaaacctta

SEQ ID NO: 328838 - DNA, 423 bp, Zea mays
tcggttcaggggtttcggaaggttctccggggttcggtttcgtgggtgaagcgatctagatggcggcgtccgatgttgagtaccgctgcttcgtcggcggcctcgcctgggccacggacgaccactccctccacaacgccttcagcacctacggcgaggtcctcgagtccaagatcatcctcgatcgggagacgcagaggtcccgcggcttcggcttcgtcaccttctccacggaggaggcgatgcggaacgccatcgagggcatgaacggcaaggagctggacggccgcaacatcaccgtcaacgaggcccagtcccgcggcggccgtggaggaggcggcggcggcgggtacggtggtggccgtggaggcggcggctactgcggtggcgggcgccgtgatggcggcggcagctacggcggtg

SEQ ID NO: 328839 - DNA, 443 bp, Zea mays
tctatgacatctcatgcgcgcgcacacaaactctgaattttgctctagagcctctcattctattgctgaaccaatactcttctctaacgagcactccaacgtgtcgatctcccaccccactaactacgaccccagatccctcgtctgcacgacatcttcgaaccctaatctactgatcaggatatacgtactgttgtaccacttgcaccccttccccatcaacctcaaggacattgtcttcatcaagaacctcctaactcacatcaacgacctatctgaatgccatatgttcgacaatctaatacacgcgataccacacttgtaataactgtcacttacatgttcccttcacaactctgctatctaagtcccacatgtatgcgacagacaacctaacctccttttgttactctgattatcacttacctgcgctctgcttaaaa

SEQ ID NO: 328840 - DNA, 414 bp, Zea mays
taattccaaatcagtagtgtgagattctaatgattaccttggaagaaaaaagctcatgttattcaggtccgtcgaagatcagcagtaaatgtatgcaattgaatatgaaaatatttttttaggcatacgcacatacaacatgatgtgaacacatctacctacatctccattaactacgcctcttttaaaagatgccattgtgtgcatctgcggtttctacagaagctctattagatacgtctgtgatcatacctcgactgctgagcaaatagagaatgaccaaatggcgaattgttgaaatgaaggcattctagttggaaatgttgtaaataccccaaatattgcctgtctgtcgtaatagttcatttgggacgtctggggggtgcatggtttcttttggtgattggtcgcccc

SEQ ID NO: 328841 - DNA, 393 bp, Zea mays
  unsure (1)..(393): unsure at all n locations
cctcggggaattccaattccacattttcaagaaataaggaggcaaaaatgttgatatatgaattggaattatttgttttcttattaggcctatcctgaagccaaaggaaatgagatcggaattcctcggggaattccaattccacattttcaagaaataaggaggcaaaaatgttcatatatgaattggaattatttgttttcttattaggcctatcctgaagccaaaggaaatgagatcggaattcctcggggaattccaattccacattttcaagaaataaggaggcaaaaatgttcatatatgaattggaattatttgttntcttattaggcctatcctgaagccaaaggaaatgagatcggaattcctcggnggtaccgagctcgaatt

SEQ ID NO: 328842 - DNA, 393 bp, Zea mays
cctcggggaattccaattccacattttcaagaaataaggaggcaaaaatgttgataggtgaattggaattatttgttttcttattaggcctatcctgaagccaaaggaaatgagatcggaattcctcggggaattccaattccacattttcaagaaataaggaggcaaaaatgttcatatatgaattggaattatttgttttcttattaggcctatcctgaagccaaaggaaatgagatcggaattcctcggggaattccaattccacattttcaagaaataaggaggcaaaaatgttcatatatgaattggaattatttgttttcttattaggcctatcctgaagccaaaggaattgagatcggaattcctcgggggtaccgagctcgaatt

SEQ ID NO: 328843 - DNA, 393 bp, Zea mays
  unsure (1)..(393): unsure at all n locations
cctcggggaattccaattccacattttcaagaaataaggaggcaaaaatgttgatatatgaattggaattatttgttttcttattaggcctatcctgaagccaaaggaaatgagatcggaattcctcggggaattccaattccacattttcaagaaataaggaggcaaaaatgttcatatatgaattggaattatttgttttcttattaggcctatcctgaagccaaaggaaatgagatcggaattcctcggggaattccaattccacattttcaagaaataaggaggcaaaaatgttcatatatgaattggaattatttgttttcttattaggcctatcctgaaaccaaaagaaatgagatcggaatntcctcggggtaccgagctcgaatt

SEQ ID NO: 328844 - DNA, 391 bp, Zea mays
aaaaaaaaattaaaaaaataaaaaaaaaaaaaaaaaaaaagaaaaattaaaaaaataaaaaaaacaaaaaaaaaaaaaaaaaaaaaaaaaaaaaaaaaaaaaaaaaaaaaaaaaaaaaaaaaggccgccccccacctattaacctcttcaccccggaatttaattccgaaccgttcccttaagccttcccatttttccttatagtaagtctttttaaactttgcctaaatcatgccaataacttttccctttgaaaaatttttttcctttaacatttccacaaaacttacaacccgaaaccttaaattttaaaccctgggttccctaataattaacctaactcactttaattccttttccctaattgccctttttccattcgaaaaacctt

SEQ ID NO: 328845 - DNA, 106 bp, Zea mays
aaaaaaaaaaaaaaaaaaaaaaaaaaaaaaaaaaaaaaaaaaggaagaaaaaaaaaaaaaaaaaaaaaaaaaaaaaaaaaaaaaaaaaaaaaaaaaaaaaaaaaag

SEQ ID NO: 328846 - DNA, 423 bp, Zea mays
  unsure (1)..(423): unsure at all n locations
tgggttgagccattaagaatcgcccggtcccactgccaccggcctgcctgccggcgncgaatacctcccatggcgccgtcaccaggctgtacgtcagcggtctttcgttccgcacaaccgaacggagcctccgggacgcgttcgagaagtttggtgaccttacggaaggtgacagagcccgagatgagcgaatgtctgtgttttaaattcagaattattgaaaatttgctccgtgcttgctactccagtttgtctcgtgatggatagagtagcgaagcgaccgagaggtttcgctttcctttcttacaccggggaggaggaagccaggggcgccatggaagggatgcacgggaaggtgaaagatgtccagatcgtcggatgctcgtgtgatagatagtctgtgcttgtagcttacgttctatc

SEQ ID NO: 328847 - DNA, 224 bp, Zea mays
ttctacacaacattcgatcccatctcataaatcgtcaatccattcatacctaacgattcatctaactactattaatataccatgcgctcactgcctgattctcagttcatcaactcttctttccaactccttcaattaatcgatcaccgctctgctatatgccttctgcaaacttgtcgctatctcatatcttattctcaccatatatacgttcaacatctgat

SEQ ID NO: 328848 - DNA, 130 bp, Zea mays
gccatcctcttatccagacctgacagactgatgctggtgcatgattataacaatgtctcatccctagtcatactctctccatgatttgtgaatctatacatactcctgtttttggatactgttaccctag

SEQ ID NO: 328849 - DNA, 393 bp, Zea mays
cctcggggaattccaattccacattttcaagaaataaggatgcaaaaatgttgatatatgaattggaattatttgttttcttattaggcctatcctgaagccaaaggaaatgagatcggaattcctcggggaattccaattccacattttcaagaaataaggaggcaaaaatgttcatatatgaattggaattatttgttttcttattaggcctatcctgaagccaaaggaaatgagatcggaattcctcggagaattccaattccacattttcaagacataaggaggcataaatgttcatatatgaatcggaattatttgttttcttattaggcctatcctgaagccaaaggaaatgagatcggaattcctacgtggtaccgagctcgaatt

SEQ ID NO: 328850 - DNA, 129 bp, Zea mays
tctatgacgtctcatgcaccccttacctaaacctcgaatttcgcttccaagaaaaaaaaatctaaaaaaaaaaacaaaaaaaaaaaaaaaaaagacatattaaaaaaggccgtcctcaccctaacaaaa

SEQ ID NO: 328851 - DNA, 356 bp, Zea mays
aggaaagatccttaaccaaaattcggttcacctgtcatgggggtggcgaagagaatgtatttgccagctcgagagtcatctagtgagttgttctgctatacaggtcttgtagcgagcacatctccgtggggactgcttggattctgcagtgcctgctagcgttatcctgcaaagaagacttgctaccggaatattgcctgtttactgctctgtcaggctattagaatggtcaccggttcaaggattgtcgctagtagctttgatgttggctataaccgttcggaaagcgtgactgcatgggcttatattggcactaacctatctttgtcaccatggatagacgctagcaatcttac

SEQ ID NO: 328852 - DNA, 393 bp, Zea mays
cctcggggaattccaattccacattttcaagaaataaggaggcaaaagtgttgatatatgaattggaattatttgttttcttattaggcctatcctgaagccaaaggaaatgagatcggaattcctcggggaattccaattccacattttcaagaaataaggaggcaaaaatgttcatatatgaattggaattatttgttttcttattaggcctatcctgaagccaaaggaaatgagatcggaattcctcggggaattccaattccacattatcaagaaataaggaggcaaaaatgttcatatatgaattggaattatctgtgatcttattaggcctatcctgaagccatgggaaatgagatcggaattcttcgggggtaccgagctcgaatt

SEQ ID NO: 328853 - DNA, 205 bp, Zea mays
atcaagaagagtgaatcatggtgttgactttagatgtgttggtgaaagtagggggggcaacttgagagaaggtgatcagacagttgtaatgtaataccttttaggcttttactgcctaaaaaaaaaaaaaggagaaagaaaaaataatgaaatagaaaaaacaggaaatttattaagaaccgttacctgaaggcaaaccagtttt

SEQ ID NO: 328854 - DNA, 161 bp, Zea mays
atggagcgcagaaaaagaaaaagaataggctaaggcaaaggagggagagtcaggcaagcagaaaggaagaaccagatgctgcgaacggagatgtgactataaataatcgaagagcaccggtcgggcagctaagtgcaccgttgtcacgagctgcgctagcg

SEQ ID NO: 328855 - DNA, 59 bp, Zea mays
ctttgccttaaacttgaccagcaactctatcctgtctctgggctaatattacaattgtt

SEQ ID NO: 328856 - DNA, 350 bp, Zea mays
gtacatcgagccgtaaccgcacgacaaggccagaactgctgctaagtcatggtccctataaggccatccatatgatgccatgcgctctcaagcatgacagacatggaccatgacctaagagatcgccaaacgcgcatggactattaatataccacgcgcttacatgtgaaaactacatcggacgctgctgtgcagcaaccttcacgttctgccgattctttgcctgctttctcccttgtgtaagacgtaccctttttcatagctaacactgactgtatctcagacctgtgcaggtcggtctgtcaaagatgtgctctatacaaaatctgcctcttcaggcaaagctatta

SEQ ID NO: 328857 - DNA, 393 bp, Zea mays
cctcggggaattccaattccacattttcaagaaataaggaggcaaaaaggttgatatatgaattggaattatttgttttcttattaggcctatcctgaagccaaaggaaatgagatcggaattcctcggggaattccaattccacattttcaagaaataaggaggcaaaaatgttcatatatgaattggaattatttgttttcttattaggcctatcctgaagccaaaggaaatgagatcggaattcctcggggaattccaattccacattttcaagaaataaggaggcaaaaatgttcatatatgaattggaattatttgttttcttattaggcctatcctgaagccaaaggaaatgagatcggaattcctcgggggtaccgagctcgaatt

SEQ ID NO: 328858 - DNA, 183 bp, Zea mays
catgaatttgtgtggttactacatctagctaatagggtgcatgacacgacaaatgaagtgtctcattgagtaggcttgtgaggcatcagcaatacttgcggatgaaccaattaccgacacaactgtttagaccttgtgtgttgctaccggcacacatttgatgctgagaataaaacttgatta

SEQ ID NO: 328859 - DNA, 282 bp, Zea mays
  unsure (1)..(282): unsure at all n locations
ccttcaccacgccaccgactccggctctcgctcccccctcgccgcgccggccgaacgccacgatgcgtcacctnctcctctcccgcttccttcgccgcggtggcggcagcggcattcccaacggccaataccaacaacttccccttcttccgggccttttcttcttccccttcccgggcttcttggaccccaaagttccgaaggtccccggcctacccccggttttttttcggctggcgggccgggacctactattccttcccgttcccggccaacgcgctg

SEQ ID NO: 328860 - DNA, 272 bp, Zea mays
ctcaaatcctatgctattcttggtactggacaacgagccacttgagtgcactattcagacttagactcttcatgatccctatcctcaaggcatattacaaggcatgtgaccagatccaaggccagcgatacgaagttgacatgtaccaagaagtctatgatgtccgtacatcaatatgatatacttcgcatcttattatgcttttctaacggccgatgcgctcaagatgtaaattcattacgcaataatctaccttgcatctatactttatt

SEQ ID NO: 328861 - DNA, 333 bp, Zea mays
gcggcctttttttttttttttaacttcccgagcaatggaatgcccactttatatattcagcatccatatggacattaacagagctgtgaacgttggtagccacaatacccactttataatgaaggtctagattacgagtgccgcggtgccgccacagaaggtctagtcgtctttcttgcggtcggggtgaaggtcagcataatcagcagggccatagactccgaacagttcctcaagaaagcccttcttgctgctcggatcacaccccatgtcccggcacagctgatcattgtaccagatgtgaaggagccctatacaggacctgcggaagta

SEQ ID NO: 328862 - DNA, 393 bp, Zea mays
  unsure (1)..(393): unsure at all n locations
cctcggggaattccaattccacattttcaagaaataaggaggcaaaaatgttcatatatgaattggaattatttgttttcttattaggcctatcctgaagccaaaggaaatgagatcggaattcctcggggaattccaattccacattttcaagaaataaggaggcaaaaatgttcatatatgaattggaattatttgttttcttattaggcctatcctgaagccaaaggaaatgagatcggaattcctcggggaattccaattccacattttcaagaaataaggaggcaaaaatgttcatatatgaattggaattatttgttttcttattaggcctatcctgaagccaaaggaaatgagatcggaattcctcgngggtaccgagctcgaatt

SEQ ID NO: 328863 - DNA, 386 bp, Zea mays
cattattgccgtctcccttttgcgtgagcaaagaaagagagcgagaagcagtcgccatgtctggcatcatccacaagatcgaggagaagctccacatggggggcgaccacaagaataaggaggaggagcaccacaagaaggccgaggagcaccacaagaaggaggagggggagcaccacaagaaggacggcggggagcacaaggaaggcatcgtggagaagatcaaggacaagatcaccggcgagcacggcgacaagtccggcgaccacaaggagaagaaggacaagaagaagaaggataagaagaagcacggcgagggccacgaccacgacggcggccacagtagcagcagcagcgacagcgactgagatctggtgtcgcagcac

SEQ ID NO: 328864 - DNA, 403 bp, Zea mays
cggctcgagcctgctcctaccgcatctatatgctcagggctagcggtggcaacggtggccttcagcaagcttgggatccttctaaggcacgatgctctagtcagcggggtcaacgattgctcgtctactgcaaggtataatcgcttgcggatcatgtctactgtacctgtccattgttgatactgactatgccgttttccaccgtcacacaagagaagcatcttcttttgccttggagtaactgtgtcatgtcggtccagaccaacggtgcctgtgaggctgaggttgagacacgttcagctcgaactgcatgtgagatgtggtatccgatgcactggtctgatggaggtccttgggatgcatgatctattaaacaatgatgcttgcgatgtttacattgctg

SEQ ID NO: 328865 - DNA, 311 bp, Zea mays
ccaagctcgatggcggctttcacattgcctatgacggacaggctggtaagtaggacctcatgtgctttgctgtagagctcgtggttcttattgcgaggagattgcccattgggctgtgacggtgattaatgttctgcctgctcagccattaacacactgtctgcgatccaaagggtatggatggccttcaagagtcatcaccctggtaactggggaaaaaccatacccgttgtaagcatggtggcgagtttttggattggggcttcgctttgatagaacatatcatctgtggcgtcaatgattactgtata

SEQ ID NO: 328866 - DNA, 410 bp, Zea mays
cacaataatagccttatatatagtactattgtatcacatggcgatccgttaattaatacgatactcatatatggctcgtgcattggccatttatcgtcattattagcaatcacagtcatgctgcaggatcaggtgttgtgaagtagtcgcgttcaaacaagagactgcaacaaacctcaagagggataatctatatcacagtcgttcccgacatccaatggagagatggcttgctgtttctaaagtctggacatgtgtccatgaacgaacaactgaacatgcgtgcaaaacgaacgattgaataagcaaaacaaatcagaagagaagagattacagattcatcggcgaagccttgaaagcatgccatatggtcttgtcgggaaagttctcctacaagtagacttacacct

SEQ ID NO: 328867 - DNA, 382 bp, Zea mays
gtgctcatggtgttccttctacttgttcttttttggacaccgcctgctcaccaagaatcgacaatatgatgttggtgaaaatatttggctccattactattttgtagttaagtaacttctcaggtaacaccttttgtttgggcgccgatgatgtcgcacacgtggccctaaattactcccatgcggaaaaactatatgtgtttaacatttcgcttgccatttcgcttgcagctcagccgagttagaagttgaggcaactatatgatggcagccacatgtgtcctcgtttttcaaattaacgaatctggttcttctttgaaaaacagaagctggactaaaaaggtttagctttatagctgctattaaaaaacaattttgtagt

SEQ ID NO: 328868 - DNA, 107 bp, Zea mays
gcaagatggattgctgctctgctccgtgtatgtgtttgtgtttctttgttagccatactttgttcggatgtgattcatggtgtgacattttgcgcgccatttcatgc

SEQ ID NO: 328869 - DNA, 393 bp, Zea mays
  unsure (1)..(393): unsure at all n locations
tctcggtgaattccaattccacattttcaagaaataaggaggcaaaaatgttcatatatgaattggaattatttggtttcttattaggcctatcctgaagccaaaggaaatgagatcggaattcctcggggaattccaattccacattttcaagaaataaggaggcaaaaatgttcatatatgaattggaattattagttttcttattaggcctatcctgaagccaaaggaaatgagatcggaattcctcggggaattccaattccacattttcaagaaataaggaggcaaaaatgttcatatatgaattggaattatttgttttcttattaggcctatcctgaagccaaaggaaatgagatcggaattcctcggnggtaccgagctcgaatt

SEQ ID NO: 328870 - DNA, 393 bp, Zea mays
cctcggggaattccaattccacattttcaagaaataaggaggcaaaaatgtgcatatatgaattggaattatttgttttcttattaggcctatcctgaagccaaaggaaatgagatcggaattcctcggggaattccaattccacattttcaagaaataaggaggcaaaaatgttcatatatgaattggaattatttgttttcttattaggcctatcctgaagccaaaggaaatgagatcggaattcctcggggaattccaattccacattttcaagaaataaggaggcaaaaatgttcatatatgaattggaattatttgttttcttattaagcctatcctgaagccaaaggaaatgagatcggaattcctcgggggtaccgagctcgaatt

SEQ ID NO: 328871 - DNA, 389 bp, Zea mays
gagctatcgaaccacgttacgcaccatagaacatacccgtgagaagctaagaccccgtcgttgctcaccacagcatcatcgacgagccgtgctagctcaaggatggagaacaacaggcagcagcagcatgcgccgtcgacgccaggtcagatcctgatgcgatcgactgagagtacgagtaacatggatgctgagacatgacgtgcatgcaggctacccgactgcggctgcaagcttgtagcaggaacacgtaggcacgaaaggacgactccggcagaagacgacgcttctcggggataaaggcttcatcgaatgatgcatctaggcgctctgatgatgctggatctgcgagatgtgctgcgactaggcacgcagctagcggtcatcta

SEQ ID NO: 328872 - DNA, 391 bp, Zea mays
  unsure (1)..(391): unsure at all n locations
gctggtgcagcataccgcagcgcctttccattccatttggcctttgctccgcctccgctcacctccggaatcgatgtcctcgtctgacctctcctgctcggtttggttggcgtacggcgacgtggaaagctcacccgtatagtagtagaataatgcaatgcgatggaatatgaccctcctgtcatctcccccaatcacatctcgactgaattattcaatactcaatgctgctgagcagctgctgtggtgccgccgtcgccttctcctaatccagctgctccaacctagctcacgtcgcttccaatagacgccaccagccatcgcccgtcctcgcctcagtagcagtgcgagtccccggccgcttacttcatgcctncatggatcccgtcgc

SEQ ID NO: 328873 - DNA, 311 bp, Zea mays
gactagcatttcggttaatgtccattcctcattctgaaccaataacgtcgctgatatgagggcagatgaatcggtcccattcgcaggctcattaggcctatgctgtagccgtcggcgctgaaatcggaattgcttacctaatgccagttccacatattcaagatgtaatgaagcaaaaacactcatacattaattctaccaatgaaggtttcttattattcctattctgatgccaaacgctacgacatctccattgctccgcgaattcaaatgccacatcttctctaaataatgacgcaaatacgttcata

SEQ ID NO: 328874 - DNA, 353 bp, Zea mays
aaaaaaaaaaaaaaaaaaaaaaaaaaaaaaaaaaaaaaaaaagaaaaaaaaaaaaaaaaaaaaaaaaaaaaaaaaaaaaaaaaaaaaaaaaacaagaaaaaaaaaaaaaaaaatgaaaaaaaaaaaaaaaaaaaaaaaaaaaaaaaaaaaaaaaaaatagcgcgtcgcatatgaaatcacaatcagcacgcactttaataaagaaatatgctcacagggggccacacattaccgtaactcgggcacataaaaaataaccccggaccggtaaaaagagaggtcacagcgataaatatagtgagcgctaaaaagagctcgaaataatcatggccatagttattccctgtgagcaa

SEQ ID NO: 328875 - DNA, 393 bp, Zea mays
cctcggggaattccaattccacattttcaagaaataaggaggcaaaaatgtgcatatatgaattggaattatttgttttcttattaggcctatcctgaagccaaaggaaatgagatcggaattcctcggggaattccaattccacattttcaagaaataaggaggcaaaaatgttcatatatgaattggaattatttgttttcttattaggcctatcctgaagccaaaggaaatgagatcggaattcctcggggaattccaattccacattttcaagaaataaggaggcaaaaatgttcatatatgaattggaattatctgttttcttattaggcctatcctgaagccaaaggaaatgagatcggaattcctcgggggtaccgagctcgaatt

SEQ ID NO: 328876 - DNA, 261 bp, Zea mays
aaagatctaacacgtcatcgcgcgcgtcacacaaactctgaaaattcatctagaggtactatcttatgcggccatcagcatctgctctttcggagagatctctacctggcgtgggacgccatgcactcacgctcaagactgtcaacgccaacaaagtaagagatcgtagttcgcacctggagtattagaataccgaccgctatcatattaaaattacactcgaatgctactgtgcagcaaccttcacatacaaacgggtct

SEQ ID NO: 328877 - DNA, 393 bp, Zea mays
cctcggggaattccaattccacattttcaagaaataaggaggcaaaaatgttcatatatgaattggaattatttgttttcttattaggcctatcctgaagccaaaggaaatgagatcggaattcctcggggaattccaattccacattttcaagaaataaggaggcaaaaatgttcatatatgaattggaattattagttttcttattaggcctatcctgaagccaaaggaaatgagatcggaattcctcggggaattccaattccacattttcaagaaataaggaggcaaaaatgttcatatatgaattggaattatttgttttcttattaggcctatcctgaagccaaaggaaatgagatcggaattcctcgggggtaccgagctcgaatt

SEQ ID NO: 328878 - DNA, 390 bp, Zea mays
gccagccatcctactgtcacacacacacacacacacagacaagtggtttccaaagccaagtgtgtgtactagcaaccagctagctcgggcggcagcaggcagccatcatgtcggaggagaagcaccaccacttcttcaaccaccacaagaaggacgaggagcagcccgccggcgagtacgggtactccgagaccgaggtggtcaccgtcaccggcgagggcgagtacgagaggtacaagaaggaggagaaggagcacaagcacaagcagcacctcggcgaggccggcgccatcgccgccggcgccttcgcactctacgagaagcacgaggcgaagaaggaccccgagcacgcgcacaggcacaagatcacggaggaggtcgctgccgcgg

SEQ ID NO: 328879 - DNA, 297 bp, Zea mays
cctagctaaaggataaaggttccaagtgtctaaagtactgaagacagggctagctccttattttttgttgtcaaaaaaatcgtgtatgattgcaacaatactgacaaaatatggttgtactttatattttggcatattgtccacaaaacaagtttcttatttttatgcgttttacgatattttctttttttaatttgaattttgcatttccttcttctaagttgctatgtaaaaaaaagagctacactacttactccaacgtcaaggccgaactcgtacagagcctaatcacctaag

SEQ ID NO: 328880 - DNA, 393 bp, Zea mays
cctctctgaattccaattccacattttcaagaaataaggaggcaaaaatatgcatatatgaattggaattatctgttttcttattaggcctatcctgaagccaaaggaaatgagatcggaattcctcggcgaattccaattccacattctcaagaaataaggaggcaaaaatgttcatatatgaattggaattattcgttttcttattaggcctatcctgaagccaaaggaaatgagatcggaattcctctgggaattccaattccacattttcaagaaataaggaggcaaacatgttcatatatgaattgcaattatctgttttcttattaggcctatcctgaagccaaaggaaatgagatcggaattcctcgtaggtaccgagctcgaatt

SEQ ID NO: 328881 - DNA, 293 bp, Zea mays
agattatggtgtcttcgatccgggaagaatccggtattcctagaaaggaaaataagttaatatctggttttttgaatgggatttgaaccttgcctggaaatctcaaggatggtatgcctcgtgaaaaagaaaatggaaggacttcgtgatgcacgatgttgatgccgcatcatacaaaaaagttgatatcattctgcgttgctatgatgcctatgattaagaacttcaccgagaaacagtatcaccctgctgaagtcgcgcacattctcgattcggcactgtcaagcgtacaa

SEQ ID NO: 328882 - DNA, 392 bp, Zea mays
gagcgcgcattatctgttgttagattgagttgagtgcatgagggacgacggttgcattgcatgcggccgttattattgcgaggctgcatgcttgtgacgtgacgcctactcgactcacggtaccttgacctgctctacaagtatttgtctccaagaaatttgtatttctaataggctttttttaaccatctattcttgtagtataattattacgtattgaaataatagtgtgtacctttgatttcctccaaaaatcctaaaaaagcatatatttattttaattttaaaataactctgctttgcttcaaaaaaaacacaacaacaaagaactgaccaaactgaaaagagaggccaccatcgagaacggaagaaaaaaaaaaaggggcggccgc

SEQ ID NO: 328883 - DNA, 399 bp, Zea mays
ggtcctcgtgcctaactagatatgctgaagtctccagcagagagaaaaggcagggaagattcgttcctgatctaaccctttcatttcagaagaactggctgactagcattgcctctttctgacaccatggcgcagagcaccccaagagagctccaggaacctggcggtttatgtatgagcagttgagcacagatcacagacatggcggagcagccaagcagatggatgatacctagggctaggagtccactggcctgtgtctcctgtccacactccacacaagtagcacaagcaccaacgagggtgacgcgagctcgctacttcatgttcagcaggcagacaggaaggcagaggatcgaagcagcagactcacgcagctcccgctcctggctctggcac

SEQ ID NO: 328884 - DNA, 376 bp, Zea mays
aagcaaagtactaacatggccataaagggctgaagagccatcgagactcattgaatggcaaagttaagaacacgtattacgtatctcatgtacccgccaggggctgcatcagaaatggcatatatgcataactatcgcacaagatctgtctatggtcgccaatatgtacacaggagcttaggagaaataggtttgattagtatgaatatgatgtagccaaaggtgaccagagcgagagtgcgtatgcaatatcaatcatggactagctagtaatgaaccctgtcaattgtacggagatggatagagagatggagtggcgatatgagtgctatgcgatgcgcaaacgaagtgacactatcgctgcatgctggctctg

SEQ ID NO: 328885 - DNA, 313 bp, Zea mays
cttccaccatgaataatctttgctgcagtggagcttcatgtcggcgaacaatgcaaacgttgtacttctttcatgcgattgagtagttgatgttttacttctgttgccaccaacagttgaacgctgtacttgcagattgataagatctccgtgctttctaaaaaaaaaaaaaactaaagaaaatcacactgatattactgaaacaatataataaaaaaaaaaaaaacaagacacgcatgtgcaccaaataaaaatactacagaaccgctgaataaattccgatccgtgccaacgggggtgatcccgatttaga

SEQ ID NO: 328886 - DNA, 391 bp, Zea mays
ttggtcgagctccatccgaattcttctagaggtcttacttcataaatgtggagatatgaattggaattatttgttttcttattaggcctatcctgaagccaaaggaaatgagatcggaattcctcggggaattccaattccacattttcaagaaataacgaggcaaaaatgttcatatatgaattggaattatttgttttcttattaggcctatcctgaagccaaaggaaatgagatcggaattcctcggggaattccaattccacattttcaagaaataaggaggcaaaaatgttcatatatgaattggaattatttgttttcttattaggcctatcctgaagccaaaggaaatgagatcggaattcctcgggggtaccgagctcgaatt

SEQ ID NO: 328887 - DNA, 360 bp, Zea mays
atcaaaagacatcgcagacaagacgttacttgaagagggggtgctgcgccgttccacacgtgtccgggcccagccaaaggacaatccgtccatggcattcctcaagtatgtcaacaagtggagggataactgaagtactctgagctatgtacgcttttgctcggttaggtcgttgcagtgactcgccatactcatggctggtttactgacacctcattagctagtgaaacctgtatcagaacctacttatcttctgtctgttcgcttttaaatcgtaacttagctgtcatgtgtgttcacaaatgaacccctgcgaccactccgtaattgaactatgctaggctttaccgtttttagaac

SEQ ID NO: 328888 - DNA, 399 bp, Zea mays
ggatcccttgggggaattccaattccacattttcaagaaataaggaggcaaaaatgtgcatatatgaattggaattattggttttcttattaggcctatcctgaagccaaaggaaatgagatcggaattcctcggggaattccaattccacattttcaagatataaggaggcaaaaatgttcatatatgaattggaattatttgttttcttattaggcctatcctgaagccaaaggaaatgagatcggaattcctcggggaattccaattccacattttcaagaaataaggaggcaaaaatgttcatatatgaattggaattatttgttttcttattaagcctatcctgaagccaaaggaaatgagatcggaattcctcggaggtaccgagctcgaatt

SEQ ID NO: 328889 - DNA, 393 bp, Zea mays
  unsure (1)..(393): unsure at all n locations
cctcggggaattccaattccacattttcaagaaataaggaggcaaaaatgggcatatatgaattggaattatttgttttcttattaggcctatcctgaagccaaaggaaatgagatcggaattcctcggggaattccaattccacattttcaagaaataaggaggcaaaaatgttcatatatgaattggaattatttgttttcttattaggcctatcctgaatccaaaggaaatgagatcggaattcctcggggaattccaattccacattttcaagaaataaggaggcaaaaatgttcatatatgaattggaattatttgttttcttattaggcctatcctgaagccaaaggaaatgagatcggaattcctcggnggtaccgagctcgaatt

SEQ ID NO: 328890 - DNA, 270 bp, Zea mays
cctcggggaattccaattccacattttcaagaaataaggaggcataaatgtgcatatatgaattggaattatttgttttcttattaggcctatcctgaagccaaaggaaatgagatcggaattcctcggggaattccaattccacattttcaagaaataaggaggcaaaaatgttcatatatgaattggaattatttgttttcttattaggcctatcctgaagccaaaggaaatgagatcggaattcctcggtggtaccgagctcgaatt

SEQ ID NO: 328891 - DNA, 404 bp, Zea mays
cctcggggaattccaattcctcattttcaagaaataaggaggcaaaaatgagcatatatgaattggaattatttgttttcttattaggcctatcctgaagccaaaggaaatgagatcggaattcctcggggaattccaattccacattttcaagaaataaggaggcaaaaatgttcatatatgaattggaattatttgttttcttattaggcctatcctgaagccaaaggaaatgagatcggaattcctcggggaattccaattccacattttcaagaaataaagaggcaaaaatgttcatatatgaattggaattatttggtttattattatgcctatcctgaagccaaaggaaatgagatcggaattcctcggtggtaccgagctcgaattccctataatga

SEQ ID NO: 328892 - DNA, 393 bp, Zea mays
ccttggggaattccaattccacatttttaagaaataaagaggcaaaaatgttcgtatatgaattggaattatttgttttcttattaggcctatcctgaagccaaaggaaatgagatcggaattcctcggggaattccaattccacattttcaagaaataaggaggcaaaaatgttcatatatgaattggaattatttgttttcttattaggcctatcctgaagccaaaggaaatgagatcggaattcctcggggaattccaattccacattttcaagaaataaggaggcaaaaatgttcatatatgaattggaattatttgttttcttattaggcctatcctgaagccaaaagaaatgagatcggaattccttcggggtaccgagctcgaatt

SEQ ID NO: 328893 - DNA, 381 bp, Zea mays
  unsure (1)..(381): unsure at all n locations
tcgcttcaaggtggggtgggcttttcctccccctccggtccgggttcgggtgcgtgaggttctccggngttcggtttcgtgggtgagcggatcgagatggcggcgtcggatgttgagtaccgctgcttcgtcggcggcctcgcctgggccacggacgaccactccctacacaacgccttcagcacctacggcgaggtcctcgagtccaagatcatcctcgatcgggagacgcagaggtcccgcggcttcggcttcgtcaccttctccacggaggaggcgatgcggaacgccatcgagggcatgaacggcaaggagctggacggccgcaacatcaccgtcaacgaggcccagtcccgcggcggccgtggaggcggcggcggc

SEQ ID NO: 328894 - DNA, 65 bp, Zea mays
tcgctccaaccttctttcatcctattgactagatgttttacttcaaaaaaggaataattttctac

SEQ ID NO: 328895 - DNA, 393 bp, Zea mays
cctcggggaattccaattccacattttcaagaaataaggaggcaaaaatgggcatatatgaattggaattatttgttttcttattaggcctatcctgaagccaaaggaaatgagatcggaattcctcggggaattccaattccacattttcaagaaataaggaggcaaaaatgttcatatatgaattggaattatttgttttcttattaggcctatcctgaagccaaaggaaatgagatcggaattcctcggggaattccaattccacattttcaagaaataaggaggcaaaaatgttcatatatgaattggaattatttgttttcttattaggcctatcctgaagccaaaggaaatgagatcggaattcctcgggggtaccgagctcgaatt

SEQ ID NO: 328896 - DNA, 393 bp, Zea mays
cctcggggaattccaattccacattttcaagaaataaggaggcaaaaatgtgcatatatgaattggaattatttgttttcttattaggcctatcctgaagccaaaggaaatgagatcggaattcctcggggaattccaattccacattttcaagaaataaggaggcaaaaatgttcatatatgaattggaattatttgttttcttattaggcctatcctgaagccaaaggaaatgagatcggaattcctcggggaattccaattccacattttcaagaaataaggaggcaaaaatgttcatatatgaattggaattatttgttttcttattaggcctatcctgaagccaaaggaaatgagatcggaattcctcgggggtaccgagctcgaatt

SEQ ID NO: 328897 - DNA, 89 bp, Zea mays
gtgtttcttatctcgctggattgtacgagcagaagcaccccggctgtctctgtaaaatataggcccttctgaagtgctgcttctttcct

SEQ ID NO: 328898 - DNA, 428 bp, Zea mays
gatcgatggaaaagcccattccgggcccctgtcaatggtcggggaacctcctggccaaaaagtcaaggtagtttggatcgcactgaccgaagagtctggtctgctctgggagcttttgactccggtttgaatcgaaggcaaaggaggcgcaaccaaaagcaggacattttggacatggcggtccagcaaagatcacgctcctctgaatgcagggtggtagtagaaatgtaccaaaggaaggggaaaaaaaggagcaaaggttttgaaggttgacaaagctgagacgggacgggacgaccaaactaaaggcagctcgacgatgacggtgacgaggcgatgctgctgacatcaggcatgcgaagtagctatagccgcgtagttggctttgttctgtaatttcccgaccattttccatttgtaaaagagag

SEQ ID NO: 328899 - DNA, 392 bp, Zea mays
tccgcctcgagggtgtggtggaattttaattggaaaagattccaaccagtgaaccataggttggcaatttcatggtggtgagcattagtgatacatatttgtattttcttctaagctactgcttaagctgttgatcctgctaatccctacatctgagctagcatttagctttagcatgtatgcttaatgcggtgctaaattattggaaactcctttcattgagttttgacatgaaaaatctttgttaggtccagcactccagttaatgatgcaagtagttttgttctgttatcattcccctgtagatttttctatttttagtgtaagtttgtatctgttatcagggtaaaaaaaaaaacaaaaaaaaaaaaaaaaaaaataaagatacaaaa

SEQ ID NO: 328900 - DNA, 375 bp, Zea mays
agaagatctatgacgtctcatgcactcctacatactctcggatgtcgtctagacatacactcctccccatttacaagcatgacacatatcgtggctctagtaacatgtggcgaatccctcctggactatcaagataccacgcgctgaaccgtgcaagcttcatggtaccctataacgtttagatcatgccgcttaccaggattcatgtaccgctttatccgttttccatgcgactctctctatgatatgtcaatctgcacctataacaatgcagagccagaccttaggtcgaaagtgacgcccgtccacatagtcctccatccacatgccatcgcgtcacatgatccgcaactacatgtactgagatcataatgc

SEQ ID NO: 328901 - DNA, 296 bp, Zea mays
aaaactaaagatgacaaaaagtctaccaataaaaaaaacaaaaaaacaaaacaaacaacacttactccaagaaactatacatcatctacaatataacaggcattaccataaaaccacaaacactttacatcctaaatcttccgctacatctcctatttcaccatatcgaactgaaatcccaaaccgacctacaatgtcatacctatcctcattgtctcgctcatatcaagcacattgagttcctaccgacttgtgtctacatgaacacacaagattatgctccattcactgttaat

SEQ ID NO: 328902 - DNA, 408 bp, Zea mays
cccccgatctcgtctagaggaagcccattcccgaaaccgggggcctattccaatggcgcccaaggccgagaagaagcccgccgccaagaagcctgcggaggaggagccggcggcggagaaggccacggcggtgaagaagcccaaggccgagaagcggctccccgcgggcaagtccgcaggcaaggagggtggcgagaagaaggggaagaagaaggcaaagaagtcggtggagacgtacaagatctacatcttcaaggtgctgaagcaggtgcacccggacattggcatctcgtccaaggccatgtccatcatgaactccttcatcaacgacatcttcgagaagctggcggcggaggcggccaagctggcgcggtacaacaagaagcctaccattacgtaccgcgagat

SEQ ID NO: 328903 - DNA, 405 bp, Zea mays
  unsure (1)..(405): unsure at all n locations
ccggtttcctttttggtccggcgtgctttttggcaagccggggctaagccttttccaataacttcttgagaaagatgccccaaaagccggaaacatgggaaggaaccttggttctttcaacatgaacctcttctggatcttgaacaacggcggaaaacctttgaacctgcttggccggggtcgaagcattattgaacttccttccggcaattctcggaatgacggtcctggcgtggggaacttccttggccgacctcgtcgcggacgttgcccctggccagggctgggcagcctacgatcgccgtcgccggctgcttcgctggcccgatgttcaacatgctggtcgggctgngaaccgnccttgggtacagacggcgagagtgtatcccggagcttttgtgctcg

SEQ ID NO: 328904 - DNA, 393 bp, Zea mays
cctcggggaattccaattccacattttcaagaaataaggaggcaaaaatgtggatagatgaattggaattatttgttttcttattaggcctatcctgaagccaaaggaaatgagatcggaattcctcggggaattccaattccacattttcaagaaataaggaggcaaaaatgttcatatatgaattggaattatttgttttcttattaggcctatcctgaagccaaaggaaatgagatcggaattcctcggggaattccaattccacattttcaagaaataaggaggcaaaaatgttcatatatgaattggaattatttgttttcttattaggcctatcctgaagccaaaggaaatgagatcggaattccttcggggtaccgagctcgaatt

SEQ ID NO: 328905 - DNA, 129 bp, Zea mays
actacagaggtttggagggggttaaatcactaacaagtcaaaatcttgctcaaaaccctttgatctcaaaaaaaaaaaagataacaaaaaaagaaacaacaagctgaaaccaaaaaacatagagataag

SEQ ID NO: 328906 - DNA, 278 bp, Zea mays
agcgcctggtgaacgaagtattgcaggagtatcctcaaggtgctcttatcaaggttatggcaagcggaaactcagtagagagacgtctcagtgtttcatattggagggaccattctaacatctcttgggtcgctacatcaaatgtgactttccaaatcaaagcatgaatagcatgtggcttcctatattcagagaaaatcccctcgaagcacaggaaggaatatgtacacccaatattatgctatacgaaccttattgctgtcaaaggattacttggg

SEQ ID NO: 328907 - DNA, 393 bp, Zea mays
cctcggtgaattccaattccacattttcaagatataaggaggcaaaaatggtgatatatgaattggaattatttgatttcttattaggcctatcctgaagccaaaggaaatgagatcggaattcctcggggaattccaattccacattttcaagaaataaggaggcaaaaatgttcatatatgaatcggaattatttggtttcttattaggcctatcctgaagccaaaggaaatgagatcggaatttctcggggaattccaattccacattttcaagaaataaggaggcaaaaatgttcatatatgaattggaattatttgttttcttattaagcctatcctgaagccaaaggaaatgagatcggaattcctcgggggtaccgagctcgaatt

SEQ ID NO: 328908 - DNA, 59 bp, Zea mays
cctaggaaattttatggggtacctactgtagttaaggcccgatttggtttgagggacta

SEQ ID NO: 328909 - DNA, 140 bp, Zea mays
cagggctgcgcccctgccttattcttctccttgactatagggttgtgcccctgattcttctctgtaaccatctgtgatgtacaccattgatctatatattcacacgacagccactcctataggtgtggattatttcatct

SEQ ID NO: 328910 - DNA, 292 bp, Zea mays
ttgaggctcaacccgattggtccacttaggtccaatttgttctgaggggctgggccccgcctaactacctatcagcaggtccaccagatgtgaaccaccaaactatgccatggttagtttcagaaacatttaatgctatcgtctacatgtgattcaaagggcttcataaatatgaattataaaacatgggatgcctttcgaagtataaacaacgaaatatcgtgtgtatattaggataaactcatttcatgtacatgatcgcgccctattctaacggacttcaagatatttg

SEQ ID NO: 328911 - DNA, 415 bp, Zea mays
caaccacgcgctacgcccccgatggctcacctccggctcctcttctcatactcgcggcggaacccgcagcgccaccgcctgctctcactcttccacttctcctccgacgccaagtccagctccgactcgccgccgcctcctcccatcaagcccgtctcctacgctccgaagccgcagcagcaggccccgcccgaggagtctgccgccccgacaaccccggacgttgcccctagggaccaatccccactgccacgacggcctcagcagccgatgccgccgcgggagtggacgcggcaggatatgcggtacgtgaaggacgcggcgcccgcgatctcgcccgtctcgtacccgtccagggtcgcgccgctgccggaggaccgtccggtcggcggcgaggtggaggaggtgcaggacg

SEQ ID NO: 328912 - DNA, 147 bp, Zea mays
cctcggggaattccaattccacattttcaagaaataaggaggcaaaaatgtggatatatgaattggaattatttgttttcttattaggcctatcctgaagccaaaggaaatgagatcggaattcctcgggggtaccgagctcgaatt

SEQ ID NO: 328913 - DNA, 337 bp, Zea mays
cctcggtgaattccaattccacattttcaagaaataaggaggcaaaaatgttcatatatgaattggaattatttgttttcttattaggcctatcctgaagccaaaggaaatgagatcggaattcctcggggaattccaattccacattttcaagaaataaggaggcaaaaatgttcatatatgaattggaattatttgttttcttattaggcctatcctgaagccaaaggaaatgagatcggaattcctcggggaattccaattccacattttcaagaaataaggaagcaaaaatgttcatatatgaattggaattatttggtttcttattaagcct

SEQ ID NO: 328914 - DNA, 125 bp, Zea mays
aaaaaaataaaaaacaataaaaaaaataaaaaaaaaaggaagaaaaaaataaaaaaaaataaaaaaaaaaaaaaaaaaaaaaaaaaaaaaaaaaaaaaataaaaaaaaataaaaaaaaaaaaaaa

SEQ ID NO: 328915 - DNA, 393 bp, Zea mays
cctcggggaattccaattccacattttcaagaaataaggaggcaaagatgtgcatatatgaattggaattatttgttttcttattaggcctatcctgaagccaaaggaaatgagatcggaattcctcggggaattccaattccacattttcaagaaataaggaggcaaaaatgttcatatatgaattggaattatttgttttcttattaggcctatcctgaagccaaaggaaatgagatcggaattcctcggggaattccaattccacattttcaagaaataaggaggcaaaaatgttcatatatgaattggaattatttgttttcttattaggcctatcctgaagccaaaggaaatgagatcggaattcctcgggggtaccgagctcgaatt

SEQ ID NO: 328916 - DNA, 208 bp, Zea mays
gcggtatgttcgtgcagccagccttttgccgcctgtgttaatgctaaatctgattttacttaagcagtgtgaggggaagtgggttggtgtattggtaagctattgaaggaattcaatccctggtattgtattactttctccaacgttaaatgttgtagttcgcctgttatgaataagaaatataagaaaaaattttagggcgtgtgct

SEQ ID NO: 328917 - DNA, 393 bp, Zea mays
  unsure (1)..(393): unsure at all n locations
cctcggtgaattccaattccacattttcaagaaataaggaggcaaaaatgtggatatatgaattggaattatttgttttcttattaggcctatcctgaagccaaaggaaatgagatcggaattcctcggggaattccaattccacattttcaagaaataaggaggcaaaaatgttcatatatgaattggaattatttgttttcttattaggcctatcctgaagccaaaggaaatgagatcggaattcctcggggaattccaattccacattttcaagaaataaggaggcaaaaatgttcatatatgaattggaattatttgttttcttattaggcctatcctgaagccaaaggaaatgagatcggaattcctcggnggtaccgagctcgaatt

SEQ ID NO: 328918 - DNA, 393 bp, Zea mays
cctcggtgaattccaattccacattttcaagaaataaggaggcaaaaatgtggatatatgaattggaattatctgttttcttattaggcctatcctgaagccaaaggaaatgagatcggaattcctcggggaattccaattccacattttcaagatataaggaggcaaaaatgttcatatatgaattgtaattatttgttttcttattaggcctatcctgaagccaaaggaaatgagatcggaattcctcggagaattccaattccacattttcaagaaataacgaggcaaaaatgttcatatatgaataggaattatttgtgtgctcattaggcctatcctgaagccaaatgtaatgagatcggaattcctcgggggtaccgagctcgaatt

SEQ ID NO: 328919 - DNA, 317 bp, Zea mays
ttctcctcccccaccggttcgtgttcaggttctggttcgtgggcgagagggaagagatggcggcgtcggacgttgagtaccgttgcttcgttggcggcctcgcctgggccaccgacgaccactccctcaacaacgccttcagcacctacggcgaggtcctcgagtcgaagatcatcctggatcgggagacgcagaggtcccgcggcttcggcttcgtcaccttctccacggaggacgcgatgcgcagcgccatcgagggcatgaacggcaaggagctcgacggccgcaacatcaccgttaacgaggcccagtcccgc

SEQ ID NO: 328920 - DNA, 330 bp, Zea mays
gttcctttatcgtatttcctctgctgtattttccatgcaggatcttgactgatgtatgctcatgctcagcacctccaataaagcgagacatgctatagcattgttgaatgcaagtgggtatgcagtttgcagtatgcttatgttgaattgatgtaacttagccgaactgaaagaggctgccccagcttgattggaacagaggaatttgctgctgttttaaaaaaaaaaagaaaaaaaaaaaaaaaaaaaaataaaaaataatacctaaataaaaaagctaactgagatcataaagtacattggacaaactgaaaaaaaaaaggggcggcc

SEQ ID NO: 328921 - DNA, 54 bp, Zea mays
aacaggggtaccaatatgatagatactactgctactgagtataattttgttttc

SEQ ID NO: 328922 - DNA, 393 bp, Zea mays
cctcggtgaattccaattccacattttcaagaaataaggaggcaaaggtgttcatatatgaattggaattatttgttttcttattaggcctatcctgaagccaaaggaaatgagatcggaattcctcggggaattccaattccacattttcaagaaataaggaggcaaaaatgttcatatatgaattggaattatttgttttcttattaggcctatcctgaagccaaaggaaatgagatcggaattcctcggggaattccaattccacattttcaagaaataaggaggcaaaaatgttcatatatgaattggaattatttgttttcttattaggcctatcctgaagccaaaggaaatgagatcggaattcctcgggggtaccgagctcgaatt

SEQ ID NO: 328923 - DNA, 394 bp, Zea mays
cctcggggaattccaattccacattttcaagaaataaggaggcaaaaatgttcatatatgaattggaattatttgttttcttattaggcctatcctgaagccaaaggaaatgagatcggaattcctcggggaattccaattccacattttcaagaaataaggaggcaaaaatgttcatatatgaattggaattatttgttttcttattaggcctatcctgaagccaaagggaaatgagatcggaattcctcggggaattccaattccacattttcaagaaataaggaggcaaaaatgttcatatatgaattggaattatttgttttcttattaggcctatcctgaagccaaaggaaatgagatcggaattcctcgggggtaccgagctcgaatt

SEQ ID NO: 328924 - DNA, 330 bp, Zea mays
tccagaatgtgcgttctacgcacaaaccttctacatgcgccgacggacgacggcgcggcggtaccctctcggatctcttcccttcttcgcctcattccctctgcctcttgttctgaggtcagcagacgtggggaagaatggggcgcctactcacccggaagcagcaggcgcagatgtgcatgtgtggaacgaatggagctccacctggtataccggcctcaccgaagaccatttcgacgggtcctcgacctccgtcggacgttctgttccttacgagtcagcgcccgtgtctcgtgagcggtcatacattcacgctatggatgagtggga

SEQ ID NO: 328925 - DNA, 393 bp, Zea mays
  unsure (1)..(393): unsure at all n locations
cctcggggaattccaattccacattttcaagaaataaggaggcaaaaatgtgcatatatgaattggaattatttgttttcttattaggcctatcctgaagccaaaggaaatgagatcggaattcctcggggaattccaattccacattttcaagaaataaggaggcaaaaatgttcatatatgaattggaattatttgttttcttattaggcctatcctgaagccaaaggaaatgagatcggaattcctcggggaattccaattccacattttcaagaaataaggaggcaaaaatgttcatatatgaattggaattatttgttttcttattaggcctatcctgaagccaaaggaaatgagatcggaattcctcggnggtaccgagctcgaatt

SEQ ID NO: 328926 - DNA, 393 bp, Zea mays
  unsure (1)..(393): unsure at all n locations
cctcggggaattccaattccacattttcaagaaataaggaggcaaaaatgttgatatatgaattggaattatttgttttcttattaggcctatcctgaagccaaaggaaatgagatcggaattcctcggggaattccaattccacattttcaagaaataaggaggcaaaaatgttcatatatgaattggaattatttgttttcttattaggcctatcctgaagccaaaggaaatgagatcggaattcctcggggaattccaattccacattttcaagaaataaggaggcaaaaatgttcatatatgaattggaattatttgttttcttattaggcctatcctgaaaccaaaggaaatgagatcggaattcctcggnggtaccgagctcgaatt

SEQ ID NO: 328927 - DNA, 403 bp, Zea mays
tgcccatctgatgatctcccgctagcttccttcttgctaggcccgcagtccccagtccccacccgctgcgccctcgccatggatccgagctccgaaatcatactggacactccatacttccgcatctacagcgaccgccgcatcgaccgcttgatgggcaccgaaacggtgccggccggctttgatcccagcaccggcgtcacctccaaagatgtcgtcatagacagcgacgccggcctctacgtccgccaggcccagcctgcgggacatgccgtgcgagagggtgctcgtgtgcggggcggagctggactccctgctgccgagggacagggcctactacgaggccctcgcggcaagcgggtggagcggcacggtggagtggttcgagtcccagggccaggac

SEQ ID NO: 328928 - DNA, 190 bp, Zea mays
ctacttttaggggaagccttttttttaatcgtttttttccgatgcttaattttggtaccttttcgtaaaaccatcacatcaagtaagtcctgatcaatattcaggtcagaatcatcatggacactactatccatgtttatgtgatcaacaagggaagggacctccacatttggggtcatactatttttgc

SEQ ID NO: 328929 - DNA, 56 bp, Zea mays
aaaaaaaaaaaaaaaaaaaaaaaaaaaaaaaaaaaaaaaaaggaaaaaaaaaaaag

SEQ ID NO: 328930 - DNA, 327 bp, Zea mays
cctcggggaattccaattccacattttcaagaaataaggaggcaaaaatgttgatatatgaattggaattatttgttttcttattaggcctatcctgaagccaaaggaaatgagatcggaattcctcggggaattccaattccacattttcaagaaataaggaggcaaaaatgttcatatatgaattggaattatttgttttcttattaggcctatcctgaagccaaaggaaatgagatcggaattcctcggggaattccaattccacattttcaagaaataaagaggcaaaaaatgttcatatatgaattggaatttaattgtttc

SEQ ID NO: 328931 - DNA, 394 bp, Zea mays
  unsure (1)..(394): unsure at all n locations
cctcggngaattccaattccacattttcaagaaataaggaggcaaaaatgttgatatatgaattggaattatttgttttcttattaggcctatcctgaagccaaaggaaatgagatcggaattcctcggggaattccaattccacattttcaagaaataaggaggcaaaaatgttcatatatgaattggaattatttgttttcttattaggcctatcctgaagccaaaggaaatgagatcggaattcctcggggaattccaattccacattttcaagaaataaggaggcaaaaatgttcatatatgaattggaattatttgttttcttattaggcctatcctgaagccaaaaggaattgagatcggaattcctcggnggtaccgagctcgaatt

SEQ ID NO: 328932 - DNA, 342 bp, Zea mays
gagaattactgctcttacgcttctgatatcagttcgtgaggttctccggggttcggtttcgtgggtgagcggatcgagatggcggcgtcggatgttgagtaccgctgcttcgtcggcggcctcgcctgggccacggacgaccactccctccacaacgccttcagcacctacggcgaggtcctcgagtccaagatcatcctcgatcgggagacgcagaggtcccgcggcttctgcttcgtcaccttctccacggaggaggcgatgcggaacgccatcgagggcatgaacggcaaggagctggacggccgcatcatcaccgtcaacgaggcccagtcccgcggc

SEQ ID NO: 328933 - DNA, 271 bp, Zea mays
gcctattcaagtcgactactttagctatcaaaagcaaagccggggtagtagagatagccttggaactgcacatttctattaactggacatgtataaatagttctcgtgagcgcacaccatgtaatcgtcgaaattcatccatgtgttgtgacaaattgaaaatatatgaaaagaaattatatgataatttattaaatactatcttgtatacaaatcaaatgaaatcataattccatttctaatttaaaattggacatttctcattatatta

SEQ ID NO: 328934 - DNA, 340 bp, Zea mays
cgcacacctaacgcaactgcaactgcaactgcaagagcgcgccacagctgaaaccaacagttccacacgaagcccaataaaaagggggaccctctccctctggcgaattccatccgtcggggcgtaaactgcgatcgaccagaccatggacaatatcctggccttctacatcctgagctcatcaacggctgacatcattgctgacggactgtactggtactagaacgagatgatctagtttgagctcaagtacaagatcaggatccggaaggctgacaatgactcagaggacgaaggctgcaagaacgaaggcactgcacatggagttcttggtgggcct

SEQ ID NO: 328935 - DNA, 118 bp, Zea mays
aaaaaaaaaaaaaaaaaaaaaaaaaaaaaaaaaaaaaagaaaagaaaaaaaaaaaaaaaaaaaaaaaaaaaaaaaaaaaaaaaaaaaaaaaaaaaaaaaaaaaaaaaaaaaaaagggc

SEQ ID NO: 328936 - DNA, 366 bp, Zea mays
  unsure (1)..(366): unsure at all n locations
cctcggggaattccaattccacattttcaagaaataaggaggcaaaaatgttcatatatgaattggaattatttgttttcttattaggcctatcctgaagccaaaggaaatgagatcggaattcctcggggaattccaattccacattttcaagaaataaggaggcaaaaatgttcatatatgaattggaattatttgttttcttattaggcctatcctgaagccaaaggaaatgagatcggaattcctcggngaattccaattccacattttcaagaaataaggaggcaaaaatgttcatatatgaattggaattatttgttttcttattaggcctatcctgaagccaaaggaaatgagatcgga

SEQ ID NO: 328937 - DNA, 325 bp, Zea mays
ggcagctgtgaaggccatggcggatcctgatgacttctgcaggaatgagcagagcatccctcctcttcccgctgcaaaaggatggggctccatttgagtggtcgtttgtttcgtagctcagcctggtggtggatttcttgtctacgtttgtgaattgtgatcacggctgaggatttgcatgggtgaagtgtagaatgcactgttgtattccgtgttctgttgagctgagttctctttgatttgtttttaaaaaaaaaaaaaaaaaaaaaaaaaaaaaaaaaaaaaaaaaaaaaaaaaaaaaaaaaaaaaagggcggccgccgact

SEQ ID NO: 328938 - DNA, 366 bp, Zea mays
cgagggaggaggagcactgccgacacgcatgctaatgctgaaaggatgcgagctaaaactgtagagctttgccttttcaaggacttgtaaaatgtaagtgccggctccatgattgcggagcacatacccaaaccttgctgtttgtttattcttcttccgcactcgcatcttccaagaatctcaagtgattttagcttcttgggatgcttgatgaatactaccagtatgaatgatcttggccaaatggggaccagacattgtacatgcaaaaaaaaaaaaaaaaaataataaaaaaaataaaaaaaataaaaaaaaaaaaaaaaaattaaaaaataaaaaaataatataaaaattaatatattaaaa

SEQ ID NO: 328939 - DNA, 76 bp, Zea mays
gtgactgtttgttgggggagatgttgcttgtggatgtgaaccatggtgctaggcatatgtgggttcagcgttcaag

SEQ ID NO: 328940 - DNA, 76 bp, Zea mays
aaaaaaaaaaaaaaacaaaaaaaaaaaataaaaaaaaaagaaagagaaaaaaaaaaaaaaaaaaaaaaaaaaaaaa

SEQ ID NO: 328941 - DNA, 76 bp, Zea mays
aaaaaaaaaaaaaaacaaaaaaaaaaaataaaaaaaaaggaaaaaaaaaaaaaaaaaaaaaaaaaaaaaaaaaaaa

SEQ ID NO: 328942 - DNA, 270 bp, Zea mays; identical to SEQ ID NO: 95026

SEQ ID NO: 328943 - DNA, 366 bp, Zea mays
cctcggggaattccaattccacattttcaagaaataaggaggcaaaaatgttcatatatgaattggaattatttgttttcttattaggcctatcctgaagccaaaggaaatgagatcggaattcctcggggaattccaattccacattttcaagaaataaggaggcaaaaatgttcatatatgaattggaattatttgttttcttattaggcctatcctgaagccaaaggaaatgagatcggaattcctcggggaattccaattccacattttcaagaaataaggaggcaaaaatgttcatatatgaattggaattatttgttttcttattaagcctatcctgaagccaaaggaaatgagatcgga

SEQ ID NO: 328944 - DNA, 174 bp, Zea mays
gagcatattcttgtcaatggtcgattatttataaccgtgctcgcatgtcaccctgggaacggatgtgtcccagttggaaaaagaactctattttcttaccgattgttaatgaactttgtattattaaccgtccagttccactttaaaccatttggaatccaacctctttttttt

SEQ ID NO: 328945 - DNA, 279 bp, Zea mays
cctcggggaattccaattccacattttcaagaaataaggaggcaagaatgttcatatatgaattggaattatttgttttcttattaggcctatcctgaagccaaaggaaatgagatcggaattcctcggggaattccaattccacattttcaagaaataaggaggcaaaaatgttcatatatgaattggaattatttgttttcttattaggcctatcctgaagccaaaggaaatgagatcggaattcctcggggaattccaattccacattttcaaaga

SEQ ID NO: 328946 - DNA, 270 bp, Zea mays
cctcggggaattccaattccacattttcaagaaataaggaggcaaaaatgtgcatatatgaattggaattatttgttttcttattaggcctatcctgaagccaaaggaaatgagatcggaattcctcggggaattccaattccacattttcaagaaataaggaggcaaaaatgttcatatatgaattggaattatttgttttcttattaggcctatcctgaagccaaaggaaatgagatcggaattcctcgggggtaccgagctcgaatt

SEQ ID NO: 328947 - DNA, 355 bp, Zea mays
gttggcttctcctccccctccggttcgggttcgggttcgggaggttctcgggggttcggtttcgtgggtgagcggatcgagatggcggcgtcggatgttgagtaccgctgcttcgtcggcggcctcgcctgggccacggacgaccactccctccacaacgccttcagcacctacggcgaggtcctcgagtccaagatcatccttgatcgggagacgcataggtcccgcggcttcggcttcgtcaccttctccacggaggaggcgatgcggaacgccatcgagggcatgaacggcaaggagctggacggtcgcaacatcaccgtcaacgaggcccagtcccgcggctgccgtggat

SEQ ID NO: 328948 - DNA, 62 bp, Zea mays
gtgctttgaagctcacttcgttctgtgaaaaaaaaaaggtaaggaaaaaaaatagaggaaaa

SEQ ID NO: 328949 - DNA, 342 bp, Zea mays
gtcagatcttgtagctttatttagtcagggagttaaatagtgttagtacttacctaaaagccaccaagaccactaatttcaagcttaactaactacagctcaagaacttgagcccgcagaagccaattgatgtagagaagtaaaggatatgggtgcacacatctacactcgataattcagcaaaaaaatcgaagttagtaggcataataaaacttataattagatcagatccggatacgaatggctcgagttagggtttcaatgctcggtttcagactgcagagggaagagaaaagggtggacatacctgattggtacggatcgccgacgaacacctggcgt

SEQ ID NO: 328950 - DNA, 283 bp, Zea mays
  unsure (1)..(283): unsure at all n locations
acaccacataaccaccaccagctagcagcagcagtttcggagggagcttaccgncgctgctagtgcctgacaactgtcgtgtgctgtgctagctccgagaagcttagcgcgagccaaaagccaaaagaagctttcgccggccgggtgatcgaaatccgccgaatgggaacccgactgtgctggcttcggctcgggagctggccggtactactaagcccaccaagcggggttccaaccagccgcggcggccgtccagaaaggtccggccaaccaacaaggacgg

SEQ ID NO: 328951 - DNA, 287 bp, Zea mays
gagaaaggttccatgtgaacggcacatggctcagatggtgatagttgttgtaactagtcatcttggacatagtaaaggaaagagagctcgaaggcttgaacacactcaaaaaaaaaaaaaaaaaaaaaaaaaaaaaaaaaaaaaaaaaaaaaaaaaaaaaaaaaaaaaaaaaaaaaaaaaaaaaaaaaaaaaaaaaaaaaaaaaaaaggaaaaaaaaaacatattgtacatataaaaaaagaaaataaattaaacacgaaaaaccaaaatgggcgcccactttcctt

SEQ ID NO: 328952 - DNA, 321 bp, Zea mays
ctcctgtcgtgatcttgcttcgtcagatgcgctggtgagtcggagcaacgccctgctggcgagccgtccgtcccagctccaccatggcgcctcctctcgcgaggtgaatctcccccaggaatggacgtattgaaagcgccgaatcggcaccgctgacgatctcccctaggttgacgggtcatatttgagacaaaaattactgtcgctaatgctagggataggtaggaaggggtagcgtttgctcgcgtgggttagagcgagagtgtgcatagttgtttgactaggaagttggaggcagcaggggttgcatcatcttttgcg

SEQ ID NO: 328953 - DNA, 321 bp, Zea mays
caaaagctgctagcctgtatcctgctacctacactgattcacctaaggcattcacagatggagcgtatgatcgacagtttatgactgcctccaccagcatctgaaatccacactgatgaactgcgctaatatacatgaacaggactgcaagtctatgttatgcataggatagcacctacacatatgatgaacagtcaccgtcagacaggccatacaccatcacactggaagccaacagatccagacgaggctctcggacacggcccacatgcactggcacatactgcagtcaggctacgttcacccgatcacaaaacgtac

SEQ ID NO: 328954 - DNA, 84 bp, Zea mays
tgcctgttttggtgtttccatggtgtaagcctgcacactttgatttgctaaaatagcaagtaccaatctagtgatgcgaactcc

SEQ ID NO: 328955 - DNA, 377 bp, Zea mays
cctcggggaattccaattccacattttcaagaaataaggaggcagggatgttcatatatgaattggaattatttgttttcttattaggcctatcctgaagccaaaggaaatgagatcggaattcctcggggaattccaattccacattttcaagaaataaggaggcaaaaatgttcatatatgaattggaattatttgttttcttattaggcctatcctgaagccaaaggaaatgagatcggaattcctcggggaattccaattccacattttcaagaaataaggaggcaaaaatgttcatatatgaattggaattatttgttttcttattaagcctatcctgaagccaaaggaaatgagatccgaaatccctgggg

SEQ ID NO: 328956 - DNA, 344 bp, Zea mays
cggtccaatcgtactcatgcggattaatgcgacgtgacgaggtttggtttttggaaggtagaagctaaaccaaagactttatcctaacgagcatgttactttaaagccgactttctcgcatttgaaattgaaaatatctgtgaatctgtttttagcgactttattttgaatgggagaactttcccatataggcctttggtgagtttctgaatgtatatagttttccattcctatgtactttcccagatatcgtcctaattgaaatacgtgtatggatatttcagggacgtacccctgggaaacaatttgtcaagtaatttcaaggaagcctgtacttgtttggt

SEQ ID NO: 328957 - DNA, 394 bp, Zea mays
cctcggggaattccaattccacattttcaagaaataaggaggcaaaaatgttcatatatgaattggaattatttgttttcttattaggcctatcctgaagccaaaggaaatgagatcggaattcctcggggaattccaattccacattttcaagaaataaggaggcaaaaatgttcatatatgaattggaattatttgttttcttattaggcctatcctgaagccaaaggaaatgagatcggaattcctcggggaattccaattccacattttcaagaaataaggaggcaaaaatgttcatatatgaattggaattatttggtttcttaatagggctaatcttgagcccaaagaaaatgagatcggaattcctcgggggtaccgagctcgaatt

SEQ ID NO: 328958 - DNA, 383 bp, Zea mays
tccaacttcacattttcaagtaaataaggaggcaaaaatgttcatatatgaattggaattatttgttttcttattaggcctatcctgaagccaaaggaaatgagatcggaattcctcggggaattccaattccacattttcaagaaataaggaggcaaaaatgttcatatatgaattggaattatttgttttcttattaggcctatcctgaagccaaaggaaatgagatcggaattcctcggggaattccaattccacattttcaagaaataaggaggcaaaaatgttcatatatgaattggaattatttgttttcttattaggcctatcctgaaaccaaaggaaatgagatcggaattcctcgggggtaccgagctcgaatt

SEQ ID NO: 328959 - DNA, 383 bp, Zea mays
ctcagggtcaccgtcccgaagatcaaggacgaggagcgcaaggacgtcttcgagatcaagatcgagtagggggtgtgcatcggatgggtccttccaggtctcgtagttgcagtagtccatatcgtagttgcagtccatatccatatcgtagttgccatgagctagtcgtgctagtagtttcaattactggagtgcagtagtcgtttctgttgcagagcagtcgtagtactagtagctttctggtggtgctccgtctcgtgcctgatgcgaggcagcgtatacctttctgttggtcttgcaaagttcagttccctggatggcgacgatcactgacgatcttgtgatgaacttcaaatggtaatggaatctgcagttaataatcg

SEQ ID NO: 328960 - DNA, 380 bp, Zea mays
cctcggggaattccaattccacattttcaagaaataaggaggcaaaaatgttcatatatgaattggaattatttgttttcttattaggcctatcctgaagccaaaggaaatgagatcggaattcctcggggaattccaattccacattttcaagaaataaggaggcaaaaatgttcatatatgaattggaattatttgttttcttattaggcctatcctgaagccaaaggaaatgagatcggaattcctcggggaattccaattccacattttcaagaaataacgaggcaaaaatgttcatatatgaattggaattatttggtttcttattaagcctatcctgaagccaaacgaaatgagatcggaattcctcgggggta

SEQ ID NO: 328961 - DNA, 393 bp, Zea mays
cctcggggaattccaattccacattttcaagaaataaggaggcaaaaatgttcatatatgaattggaattatttgttttcttattaggcctatcctgaagccaaaggaaatgagatcggaattcctcggggaattccaattccacattttcaagaaataaggaggcaaaaatgttcatatatgaattggaattatttgttttcttattaggcctatcctgaagccaaaggaaatgagatcggaattcctcggggaattccaattccacattttcaagaaataaggaggcaaaaatgttcatatatgaattggaattatttgttttcttattaggcctatcctgaagccaaaggaaatgagatcggaattcctcgggggtaccgaactcgaatt

SEQ ID NO: 328962 - DNA, 379 bp, Zea mays
gttgttacatgattagtccaaatcatgaattacacaactaaccactgttatcatgtcagatggaagattgaagtacacttcatatcttagctttcatgagtagtatgcatctattggtatttcatatacaagattagatgcttaggcatacaacactataccacgtataatgtaatgacaaaagagtttgtcatactcattgcccttccctttttaatgtgcttatatatttgctttcaagcaaaatatatgaatacaaagtgttagtctacaacataatgtagacacatactcataaaaaaaaaaaaaaaaaaaaaaaaaaaaaaaaaaaaaaaaaaaaaaaaaaaaaaaaaaaaaaaaaaaaaaagggcggcccccc

SEQ ID NO: 328963 - DNA, 413 bp, Zea mays
caccaactggggggaaaaaacgcacgcaagaggagaaaacaatccgcaaatcggcgctcggcttccgtgcctccgccgatccgccgcaaccgcgtcgtccgtccccccgttcggtcgccgccctctttcccgcctcccttctcggcctccgtcctcctcctcgtgcttcatgtctgcgctcttcaacttccactcgttcgtgacggtggtgctgctgctgatctgcacttgcacgtacctcaagatgcacttcccctccctcctaatccgccggacagggttccgtggtttcttttggaaggctgctaggataggtgaacgccttagcccctgggtagccattgggtgctctgtgatgggcatatcaattttattttggtgaaattggaagatttgtatggccttctttgctg

SEQ ID NO: 328964 - DNA, 429 bp, Zea mays
cctcggggaattccaattccacattttcaagaaataaggaggcaaaaatgttcatatatgaattggaattatttgttttcttattaggcctatcctgaagccaaaggaaatgagatcggaattcctcggggaattccaattccacattttcaagaaataaggaggcaaaaatgttcatatatgaattggaattatttgttttcttattaggcctatcctgaagccaaaggaaatgagatcggaattcctcggggaattccaattccacattttcaagaaataaggaggcaaaaatgttcatatatgaattggaattatttgttttcttattaggcctatcctgaagccaaaggaaatgagatcggaattcctcggggaattccaattccacattttcaagaaataaggaggcaaaaatgttcatatatg

SEQ ID NO: 328965 - DNA, 345 bp, Zea mays
gttggcttctcctccccctccggttcgggttcgggttcgtgaggttctccggggttcggtttcgtgggtgagcggatcgagatggcggcgtcggatgttgagtaccgctgcttcgtcggcggcctcgcctgggccacggacgaccactccctccacaacgccttcagcacctacggcgaggtcctcgagtccaagatcatcctcgatcgggagacgcagaggtcccgcggcttcggcttcgtcaccttctccacggaggaggcgatgcggaacgccatcgagggcatgaacggcaaggagctggacggccgcaacatcaccgtcaacgaggcccagtcccgcggc

SEQ ID NO: 328966 - DNA, 379 bp, Zea mays
cctcggggaattccaattccacattttcaagaaataaggaggcaaaaatgttcatatatgaattggaattatttgttttcttattaggcctatcctgaagccaaaggaaatgagatcggaattcctcggggaattccaattccacattttcaagaaataaggaggcaaaaatgttcatatatgaattggaattatttgttttcttattaggcctatcctgaagccaaaggaaatgagatcggaattcctcggggaattccaattccacattttcaagaaataaggaggcaaaaatgttcatatatgaattggaattatttgttttcttattaggcctatcctgaagccaaaggaaatgagatcggaattcctcgggggt

SEQ ID NO: 328967 - DNA, 392 bp, Zea mays
cctcggggaattccaattccacattttcaagaaataaggaggcaaaaatgttcatatatgaattggaattatttgttttcttattaggcctatcctgaagccaaaggaaatgagatcggaattcctcggggaattccaattccacattttcaagaaataaggaggcaaaaatgttcatatatgaattggaattatttgttttcttattaggcctatcctgaagccaaaggaaatgagatcggaattcctcggggaattccaattccacattttcaagaaataaggaggcaaaaatgttcatatatgaattggaattatttgttttcttattaggcctatcctgaagccaaaggaaatgagatcggaattccttcggggtaccgagctcaaat

SEQ ID NO: 328968 - DNA, 399 bp, Zea mays
ctatagccgactgacatctgctacgaccggctataacgcggctagctcaaatgcagacgcggacgccatccatactccatctcgtgcattggctatcaaagcaacggacgctctcatgggcaccggaccttggaagaattcaatgacaaggtctgcaaagtcctagctatagttaccctattgtcgcatctgtctctacgctcaagaaggtaccgctacgcgcatcacatcggaatctgaactgccaacctacctcacagccgatccggagcacctggcccatatagtaccataactcctcagatacgctgtgaaggacaaacttgaagtctcgcatcgtccaacgccacgtgcatgctggcgatccggaacgacgaggagctcgataagctgctgacc

SEQ ID NO: 328969 - DNA, 104 bp, Zea mays
tgataagattgcagttttgtttatcctggttgaaaatggaattggtgttgagacatggttatccttgctatattatctataaaacgacgcatgcattgaatact

SEQ ID NO: 328970 - DNA, 213 bp, Zea mays
cagcgtctgacgcggcttccacagctgacaaacaacagtagcttggagcacaactggagcaggtcatgtgacctacctatgcttgataagctgaagccttgactttgctgtccacccccagtgttttgattttgctgtcctcggattgaatactttctccatccagaggacaacatcattgcttgttaccagggggcaaccttgcccccctcc

SEQ ID NO: 328971 - DNA, 154 bp, Zea mays
aaaaaaaatataaaaacataaaaaaaatatacacaaactagaaataaaaaaaaaaaaaaaaaatataaaacaaacataaaaacaaacaaaaaaaaaaaaaaaaaaataaaaaaaagggcgcccacccactattaagcttgctaaccccgaaatt

SEQ ID NO: 328972 - DNA, 253 bp, Zea mays
aggacaactgccgaagatgccgcttgttttggacaggcgaatagctgatgtcacttttcactcttggttgatcttctggtagagtgacgaaggcgtgatggtgaatatgaactgatctgctgttgtcgattgcgagtgaggcatattacatgagatcgttagtttttacatcccatagtacaatctggaggctggatcgtgtagccctaacgtcgatggatcggttttcgcatctacggcatgaacgtgcgga

SEQ ID NO: 328973 - DNA, 338 bp, Zea mays
gtggaaatttccttcatcgctcaaggtgcaaccaactgtgtcaacctatcccaggttcatgcagtccacaacgccaagagcttctacgagatttagcacgagacgatgctaaggaagaagtacgcgcacaaagacaaggagtacgactcgatgcttgctgtgttacgctagatcccgccccaactcatcctttatgacaacattctcacacactatgcttagaacgcggatggcctctgaaccttttctcaacccatgcttggcgttgttgcctgatgtcttgaatcattatgacacgcgttcggtacttgattttttatgaagcccaataagattgg

SEQ ID NO: 328974 - DNA, 393 bp, Zea mays
  unsure (1)..(393): unsure at all n locations
cctcggggaattccaattccacattttcaagaaataaggaggcaaaaatgttcatatatgaattggaattatttgttttcttattaggcctatcctgaagccaaaggaaatgagatcggaattcctcggggaattccaattccacattttcaagaaataaggaggcaaaaatgttcatatatgaattggaattatttgttttcttattaggcctatcctgaagccaaaggaaatgagatcggaattcctcggggaattccaattccacattttcaagaaataaggaggcaaaaatgttcatatatgaattggaattatttgttttcttattaggcctatcctgaagccaaaggaaatgagatcggaattcctcggnggtaccgagctcgaatt

SEQ ID NO: 328975 - DNA, 394 bp, Zea mays
cctcggtgaattccaattccacattttcaagaaataaggaggcacaaatgttcatatatgaattggaattatttgttttcttattaggcctatcctgaagccaaaggaaatgagatcggaattcctcggggaattccaattccacattttcaagaaataaggaggcaaaaatgttcatatatgaattggaattatttgttttcttattaggcctatcctgaagccaaaggaaatgagatcggaattcctcggggaattccaattccacattttcaagaaataaggaagcaaaaatgttcatatatgaattggaattatttgctttcttattaggcctatcctgaagccaaaagaaatgagatcggaattcctcgggggtaccgagctcgaattt

SEQ ID NO: 328976 - DNA, 347 bp, Zea mays
ctcaagcagtaatgctgggctgctactgtacgtgaagttgcacgatggagaccgactgtgcgcatgcactgggcacggccagattctatctgatggccttaaagttcactacactacatatactccatcacctgtagtagctgcgcaacgctagtgacctgattaagactaaggagcactgaaacgatcttgaagatgacctaatctagaccgtggatattgtggtctacgctaagcacattagatggtgactcgaaccgaatccaattaagcctggctccctacagtaagcttttcacacatacagagatcacgctgtgcgtatctgaggatgcagcagctattac

SEQ ID NO: 328977 - DNA, 89 bp, Zea mays
aaaaaaaaaaaaaaaaaaaaaaaaaaaaaaaaaaaaaaaaaaaaaaaaaaaaaaaaaaaaaaaaaaaaaaaaaaaaaaaaaaaaaaaaa

SEQ ID NO: 328978 - DNA, 263 bp, Zea mays
ctcaaacggccgaaccgttgcttggattggagtgagaggagtgaccgtttagttagctcgagagagccgagagaacccaagaagcaagggcatggcttccttgcccgatcccacggtgtactacccgacgtcctccaacgccatcctgcgcgcgcatccgtccgccgccgccgcggcgtccaggggctcgttcggcccggtcttcgccgtgctcgcggtgatctccttcctcgccgtgtccgcctgcgtcgtcggcaggctgt

SEQ ID NO: 328979 - DNA, 405 bp, Zea mays
cctcggggaattccaattccacattttcaagaaataaggaggcaaaaatgttcatatatgaattggaattatttgttttcttattaggcctatcctgaagccaaaggaaatgagatcggaattcctcggggaattccaattccacattttcaagaaataaggaggcaaaaatgttcatatatgaattggaattatttgttttcttattaggcctatcctgaagccaaaggaaatgagatcggaattcctcggggaattccaattccacattttcaagaaataaggaggcaaaaatgttcatatatgaattggaattatttgttttcttattaggcctatcctgaagccaaaggaaatgagatcggaattcctcgggggtaccgagctcgaattcctatagtgagt

SEQ ID NO: 328980 - DNA, 388 bp, Zea mays
cgggcagatcgcgctcatgcggtggatcactgacgatattggatgctaaggaagtgtctttcgtccagaatggtttatacctcaaggttcaagttactctcgtaaggtttcaagctaagcagcatggttttgctcactctattaggcctgttactaatttcaatgaattggcgctgcacttcattgaatgtatgtatgtgcatttggaaaatgtccggccaaagatgaaggatcaattccctcgtgctgttcaagcaaatgtgtctgctcacgagatgcaagctcaagtcgctcacacagttcaaacaaatgtgcctgcttatatgcccttctctggtggagtaagagagcatcacgttgattttgctcctgaagtaaaccaagggcg

SEQ ID NO: 328981 - DNA, 411 bp, Zea mays
  unsure (1)..(411): unsure at all n locations
gattcttgcagctactagagagactatatgtcagcaccttgagggggttgaggcgcagatgcaggctgacgtggacaaattggtcaatgcaggcaggtctaaaaggaaacgcctagaatctacatttgaagatcaacaagaaaagttaagaattcttcatgagaagttcaaggaggaggtcaacaagcagcttctgaattgcaggagttctcttgaggattttgaatcctaccatgcagaacttaagggagtagctgacaagcaaaaatcatcccacaagaagctcctagcaaatgccgagaaaacagtaggcgctcagctcaacgatgcagaaaccaaaatcgcagaggtccagaagagagcacgggagaggatgaatggcctgnaatacttgctcaaggagctgatcac

SEQ ID NO: 328982 - DNA, 242 bp, Zea mays
gcagtgcaggtgtttaattgtgtgatagtgacgaccgtggcctgtcaagtgtcatatagcaagacagcttcttgtaataatttatattaattttcaaggccaatcattaattcttaaaaaaaataatcaattaaaaaaataaaaaaaaaaaagaaacaaaaaagggccggccccaaattaggaagttgttgaaccgggaatttaattccgaacgggaacttgaaggctaaccagttttcctt

SEQ ID NO: 328983 - DNA, 435 bp, Zea mays
  unsure (1)..(435): unsure at all n locations
acactatagaagagctgcctgcacgtctgctctagacgatcccctcggngaattccaattccacattttcaagaaataaggaggcaaaaatggtcatatgtgaattggaattatttgttttcttattaggcctatcctgaagccaaaggaaatgagatcggaattcctcggggaattccaattccacattttcaagaaataaggaggcaaaaatgttcatatatgaattggaattatttgttttcttattaagcctatcctgaagccaaaggaaatgagatcggaattcctcggggaattccaattccacattttcaagaaataaggaggcaaaaatgttcatatatgaattggaattatttgttttcttattaggcctatcctgaagccaaaggaaatgagatcggaattcctcgggggtaccgagctcgaatt

SEQ ID NO: 328984 - DNA, 174 bp, Zea mays
  unsure (1)..(174): unsure at all n locations
cgtccactccatcaaaaaaaanaaaaaaaaaaaaaaaaggaaaaaggaaaaaaaaaaaaaaaaaaaaaaaaaataaaaaaaaaataaaaaaaaaaaaaaaaaaaaaaaaaaaaaaaaaaaaaaaaaaaaaaaaaaaaaaaaaaaagggcgccccccaattatggaccttttcac

SEQ ID NO: 328985 - DNA, 166 bp, Zea mays
ctctcctctactaacttcccttcatttatatgggtctcggatcatcttaggatcagccatcaacctgcacggtgcatgcccctctgctaaccaaacccgctccagaacgcatcacctcactaccaccaaagaactaggtttcgcacacctccatatccattctaca

SEQ ID NO: 328986 - DNA, 338 bp, Zea mays
cctcggggaattccaattccacattttcaagaaataaggaggcaaaaatggtcatatatgaattggaattatttgttttcttattaggcctatcctgaagccaaaggaaatgagatcggaattcctcggggaattccaattccacattttcaagaaataaggaggcaaaaatgttcatatatgaattggaattatttgttttcttattaggcctatcctgaagccaaaggaaatgagatcggaattcctcggggaattccaattccacattttcaagaaataaggaggcaaaaatgttcatatatgaattggaattatttgttttcttattaggccta

SEQ ID NO: 328987 - DNA, 381 bp, Zea mays
cctcggggaattccaattccacattttcaagaaataaggaggcaaaaatggtcatatgtgaattggaattatttgttttcttattaggcctatcctgaagccaaaggaaatgagatcggaattcctcggggaattccaattccacattttcaagaaataaggaggcaaaaatgttcatatatgaattggaattatttgttttcttattaggcctatcctgaagccaaaggaaatgagatcggaattcctcggggaattccaattccacattttcaagaaataaggaggcaaaaatgttcatatatgaattggaattatttgttttcttattaagcctatcctgaagccaaaggaaatgagatcggaattcctcgggggtac

SEQ ID NO: 328988 - DNA, 362 bp, Zea mays
cctcggggaattccaattccacattttcaagaaataaggaggcaaaaatgttcatatatgaattggaattatttgttttcttattaggcctatcctgaagccaaaggaaatgagatcggaattcctcggggaattccaattccacattttcaagaaataaggaggcaaaaatgttcatatatgaattggaattatttgatttcttattaggcctatcctgaagccaaaggaaatgagatcggaattcctcggggaattccaattccacattttcaagaaataaggaggcaaaaatgttcatatatgaattggaattatttgctttcttattaggcctatcctgaagccaaaggaaatgagat

SEQ ID NO: 328989 - DNA, 377 bp, Zea mays
cctcggggaattccaattccacattttcaagaaataaggaggcaaaaatggtcatatatgaattggaattatttgttttcttattaggcctatcctgaagccaaaggaaatgagatcggaattcctcggggaattccaattccacattttcaagaaataaggaggcaaaaatgttcatatatgaattggaattatttgttttcttattaggcctatcctgaagccaaaggaaatgagatcggaattcctcggggaattccaattccacattttcaagaaataaggaggcaaaaatgttcatatatgaattggaattatttgctttcttattaagcctatcctgaagccaaaggaaatgagatcggaattccttgggg

SEQ ID NO: 328990 - DNA, 332 bp, Zea mays
atttgttactcacaattgaaccatgtaagtatttttattgttaaataacacacatgaaaaaatgtgtgaggtaatttagtacaataataatttctccttttacatcatgatagtgtagttatttccatagtttattgcagcatgaatgtttgctttcaccaaatatgtgataacttaagtatttgctttctatgattcatgttattgattatagttactagtccattaatttgtgcttatgtatgggtacaatattggaaacataagtactattatcagaagttcatgtttaaaataatatgtccatttaattaaataccataactttgtct

SEQ ID NO: 328991 - DNA, 393 bp, Zea mays
cctcggggaattccaattccacattttcaagaaataaggaggcaaaaatggtcatatatgaattggaattatttgttttcttattaggcctatcctgaagccaaaggaaatgagatcggaattcctcggggaattccaattccacattttcaagaaataaggaggcaaaaatgttcatatatgaattggaattatttgttttcttattaggcctatcctgaagccaaaggaaatgagatcggaattcctcggggaattccaattccacattttcaagaaataaggaggcaaaaatgttcatatatgaattggaattatttgttttcttattaggcctatcctgaagccaaaggaaatgagatcggaattcctcgggggtaccgagctcgaatt

SEQ ID NO: 328992 - DNA, 393 bp, Zea mays
  unsure (1)..(393): unsure at all n locations
cctcggggaattccaattccacattttcaagaaataaggaggcgaaaatggtcatatatgaattggaattatttgttttcttattaggcctatcctgaagccaaaggaaatgagatcggaattcctcggggaattccaattccacattttcaagaaataaggaggcaaaaatgttcatatatgaattggaattatttgttttcttattaggcctatcctgaagccaaaggaaatgagatcggaattcctcggggaattccaattccacattttcaagaaataaggaggcaaaaatgttcatatatgaattggaattatttgttttcttattaggcctatcctgaagccaaaggaaatgagatcggaattcctcggnggtaccgagctcgaatt

SEQ ID NO: 328993 - DNA, 76 bp, Zea mays
catgcgacttggacacgatttcgcgatctcgatgactgactcagtccacccagccaaccaactgacgggctcgcgc

SEQ ID NO: 328994 - DNA, 317 bp, Zea mays
agaggacgtggtggtgggagaagtcggctggcaaggaagagggaaaaaaaaaggggaaaggcggcgaggaaggagaagaggaaaggctacttcagcgacgagagtgatgaggacgaggactaagcttcagtgtatcctgctaatgttgttgtgttttgacaatagatctaacgttagttacgtgatcaacagctttgtgtatcagtgtatgaatgctagctttttaaatttcagaagttatggctgattacttgtttcagacttcgtcttgtcactgtactgttttcttgattattaagcttattatccgtccgaac

SEQ ID NO: 328995 - DNA, 273 bp, Zea mays
gcgatcgctattcgcgagctgccagtagacggggaaaggatctgttgatctccacgacacccaaagacgaacgaacgaacgaactgacgggctgccgcaggagggagggggagccgtccacattattgcttgtattttttttcactcttttgtttattgttgagaataataatgaatcacgtggtggatgtaaactctgtggattgttgttggtgtgtcttccagatggggaaaaataggagaaaaagaaaggcagccaacataaaataaaaa

SEQ ID NO: 328996 - DNA, 393 bp, Zea mays
  unsure (1)..(393): unsure at all n locations
cctcggggaattccaattccacattttcaagaaataaggaggcaaaaatggtcatatatgaattggaattatttgttttcttattaggcctatcctgaagccaaaggaaatgagatcggaattcctcggggaattccaattccacattttcaagaaataaggaggcaaaaatgttcatatatgaattggaattatttgttttcttattaggcctatcctgaagccaaaggaaatgagatcggaattcctcggggaattccaattccacattttcaagaaataaggaggcaaaaatgttcatatatgaattggaattatttgttttcttattaggcctatcctgaagccaaaggaaatgagatcggaattcctcggnggtaccgagctcgaatt

SEQ ID NO: 328997 - DNA, 379 bp, Zea mays
cctcggggaattccaattccacattttcaagaaataaggaggcaaaaatgttcatatatgaattggaattatttgttttcttattaggcctatcctgaagccaaaggaaatgagatcggaattcctcggggaattccaattccacattttcaagaaataaggaggcaaaaatgttcatatatgaattggaattatttgttttcttattaggcctatcctgaagccaaaggaaatgagatcggaattcctcggggaattccaattccacattttcaagaaataaggaggcaaaaatgttcatatatgaattggaattatttggtttcttattaggcctatcctgaagccaaaggaaatgagatcggaattcctcgggggt

SEQ ID NO: 328998 - DNA, 100 bp, Zea mays
aggcacctgaggacaaggacttcgccaaggagccacctgctcttggagctcaactccatctcggcgtccttaactcacagaactcggaagaaagctgcgc

SEQ ID NO: 328999 - DNA, 393 bp, Zea mays
cctcggggaattccaattccacattttcaagaaataaggaggcaaaaatggtcatatatgaattggaattatttgttttcttattaggcctatcctgaagccaaaggaaatgagatcggaattcctcggggaattccaattccacattttcaagaaataaggaggcaaaaatgttcatatatgaattggaattatttgttttcttattaggcctatcctgaagccaaaggaaatgagatcggaattcctcggggaattccaattccacattttcaagaaataaggaggcaaaaatgttcatatatgaattggaattatttgttttcttattaggcctatcctgaagccaaaggaaatgagatcggaattccttcggggtaccgagctcgaatt

SEQ ID NO: 329000 - DNA, 392 bp, Zea mays
cctcggggaattccaattccacattttcaagaaataaggaggcgaaaatggtcatatatgaattggaattatttgttttcttattaggcctatcctgaagccaaaggaaatgagatcggaattcctcggggaattccaattccacattttcaagaaataaggaggcaaaaatgttcatatatgaattggaattatttgttttcttattaggcctatcctgaagccaaaggaaatgagatcggaattcctcggggaattccaattccacattttcaagaaataaggaggcaaaaatgttcatatatgaattggaattatttgtttcttattaggcctatcctgaagccaaaggaaatgagatcggaattcctcgggggtaccgagctcgaatt

SEQ ID NO: 329001 - DNA, 395 bp, Zea mays
ttggcttctcctccccctccggttcgggttcgggttcgggaggttctccggggttcggtttcgtgggtgggcggatcgagatggcggcgtcggatgttgagtaccgctgcttcgtcggcggcctcgcctgggccacggacgaccactccctccacaacgccttcagcacctacggcgaggtcctcgagtccaagatcatcctcgatcgggagacgcagaggtcccgcggcttcggcttcgtcaccttctccacggaagaggcgatgcggaacgccatcgagggcatgaacggcaaggagctggacggccgcaacatcaccgtcaacgaggcccagtcccgcggcggccgttgaggcggcggcggcggctacggtggtggccgtggaggcggcggc

SEQ ID NO: 329002 - DNA, 384 bp, Zea mays
ggagaagaataggataaataaagatggagagcttgttagatcttctacaaaaactagaacacagaagtaattattgttctattatccttctagtctttttttattgcaactgatttgatttaccatcttaggggcaatattgaagatgcattgcagaaaatacaggcaatcattgatgctgcatcatatgttcctccacccccaacagaagaccaaaagaaaaagattgaaaaaattgctgcagtcgctgaaaggaagagacttcagaataagaaggtgctttcacagaagaaggaatttagacggaacagaactagctgggattgatgcaagcttgttctcggggtagcaaaagcattcggctgatccttacagcagtggtgt

SEQ ID NO: 329003 - DNA, 358 bp, Zea mays
cctcggggaattccaattccacattttcaagaaataaggaggcaaaaatggtcatatatgaattggaattatttgttttcttattaggcctatcctgaagccaaaggaaatgagatcggaattcctcggggaattccaattccacattttcaagaaataaggaggcaaaaatgttcatatatgaattggaattatttgttttcttattaggcctatcctgaagccaaaggaaatgagatcggaattcctcggggaattccaattccacattttcaagaaataaggaggcaaaaatgttcatatatgaattggaattatttgttttcttattaggcctatcctgaagccaaaggaaatg

SEQ ID NO: 329004 - DNA, 393 bp, Zea mays
  unsure (1)..(393): unsure at all n locations
cctcggggaattccaattccacattttcaagaaataaggaggcaaaaatggtcatatatgaattggaattatttgttttcttattaggcctatcctgaagccaaaggaaatgagatcggaattcctcggggaattccaattccacattttcaagaaataaggaggcaaaaatgttcatatatgaattggaattatttgttttcttattaggcctatcctgaagccaaaggaaatgagatcggaattcctcggggaattccaattccacattttcaagaaataaagaagcaaaaatgttcatatatgaattggaattatttgttttcttattaggcctatcctgaagccaaaagaaatgagatcggaattcctcggnggtaccgagctcgaatt

SEQ ID NO: 329005 - DNA, 347 bp, Zea mays
ggaagatatgtatgagtttgcaggtgaagctaacattgaggtagcatgcatgaccttgaccagcgagacaatgggaactgaggatgataagcctgaagcctcagggaatgaggtcggatatccggtcagcattgcaagtcgacacctgctgaactacaggggtgagaatgatcatctgtgattgggccatataggtggtcttatgatggctatcctgaggacggaggcattgagatctgaagaccttgtgatgaaacaatctccacattatcaataacgcccgatgcagacgtggtcatcgatgattcgtactgatctatggcaatatcaggcctatactgcggcct

SEQ ID NO: 329006 - DNA, 360 bp, Zea mays
cctcggggaattccaattccacattttcaagaaataaggaggcaaaaatggtcatatatgaattggaattatttgttttcttattaggcctatcctgaagccaaaggaaatgagatcggaattcctcggggaattccaattccacattttcaagaaataaggaggcaaaaatgttcatatatgaattggaattatttgttttcttattaggcctatcctgaagccaaaggaaatgagatcggaattcctcggggaattccaattccacattttcaagaaataaggaggcaaaaatgttcatatatgaattggaattatttgttttcttattaagcctatcctgaagccaaaggaaatgag

SEQ ID NO: 329007 - DNA, 388 bp, Zea mays
ctagaacatgattggagaagtaagccacggccgccaccctggatccgtgggatacgatctgcgtggcctcgaggttggggcagggagcttcaccaaccttcactggtcatggtcgttgctttacgctcgggccgccggtaatttgtcgccgggcatcggaatcgctgcgggtccgcttgctcaccgtggtcggaccaaacggcgctgcaatcattgtgcggccacgaggatctgaagaatcaccctagtaactggaatctcaagtgcgaggagaagaacaggtggttcaagaggagccacacaacgaggagttcgattcgatctaggtggcgtcttccagttgactttattgcgccaaggacgatccttagtttgttttatatttaac

SEQ ID NO: 329008 - DNA, 385 bp, Zea mays
ataaattcttcgttctacttcaaaaaaaaaaagaaaaagaaaaaaaaaaaaaaaaaagaaaaaaaaaaaaaaaaaaaaaaaaaaaaaaaaaaaaaaaaaaaaaaaaaaaaaaaaaaaaaaaaaaaaaaaaaaaaaaaaaaaaaaaaaaaaaagggcggccgacaataagagagaacctaaacccggaaaaaaattaggaaccgcaccctgtaggggacaaaatttccctaaagaggaccggattaaaacaaggagcaaaaaaggcaaaaaattgtacccggggaaaaatagtaaaccgtaaacattaccaaccaagatccaaccccaaaccaaaaggtcaaaaccatgggcgcccaaaaaggcggataaatcaaaataaatggca

SEQ ID NO: 329009 - DNA, 326 bp, Zea mays
cctcggggaattccaattccacattttcaagaaataaggaggcaaaaatgttcatatatgaattggaattatttgttttcttattaggcctatcctgaagccaaaggaaatgagatcggaattcctcggggaattccaattccacattttcaagaaataaggaggcaaaaatgttcatatatgaattggaattatttgttttcttattaggcctatcctgaagccaaaggaaatgagatcggaattcctcggggaattccaattccacattttcaagaaataaagaggcaaaaatgttcatatatgaattggaattaatttgtttc

SEQ ID NO: 329010 - DNA, 272 bp, Zea mays
ccccgggtaaaaaatttctgaaattttcaccctcccacgaaaaaagggcaaaaaaatgccccggggacaaaacaaacggcacccccaggggcaacccaccccttttggcttttggggcccaaaatttaccacccgattgacaaaacttaccaagcggagtcaatcccccaagttggggggtcccccaaaaaaacgaccatggcccttaactcccgaaaggcctttttttcccccccgggccttttgaaccggggaaaaaaaaacccaaaggg

SEQ ID NO: 329011 - DNA, 358 bp, Zea mays
cctcggggaattccaattccacattttcaagaaataaggaggcaaaaatgttcatatatgaattggaattatttgttttcttattaggcctatcctgaagccaaaggaaatgagatcggaattcctcggggaattccaattccacattttcaagaaataaggaggcaaaaatgttcatatatgaattggaattatttgttttcttattaggcctatcctgaagccaaaggaaatgagatcggaattcctcggggaattccaattccacattttcaagaaataaggaggcaaaaatgttcatatatgaattggaattatttgttttcttattaggcctatcctgaagccaaaggaaatg

SEQ ID NO: 329012 - DNA, 368 bp, Zea mays
ctaaaatttcccccactcgccagtcgcagcagcacctgtggcagccatggacgccagcggagccggtagcaaggggaagaagggggcggccgggcgcaaggcaggcggccccaggaagaagtcggtgacgcggtccgtcaaggccgggctgcagttccccgtcggccggatcgggcgctacctcaagaagggccggtacgcgcagcgcgtgggcactggcgcccccgtctacctcgccgccgtcctggagtacctcgccgccgaggttctggagttggcagggaacgcggcgaaagacaacaagaagacgcgcatcatcccgcgccacgtgctcctggcgatccgcaacgacgaggagctcgggaagc

SEQ ID NO: 329013 - DNA, 393 bp, Zea mays
cctcggggaattccaattccacattttcaagaaataaggaggcaaaaatgttcatatgtgaattggaattatttgttttcttattaggcctatcctgaagccaaaggaaatgagatcggaattcctcggggaattccaattccacattttcaagaaataaggaggcaaaaatgttcatatatgaattggaattatttgttttcttattaggcctatcctgaagccaaaggaaatgagatcggaattcctcggggaattccaattccacattttcaagaaataaagaggcaaaaatgttcatatatgaattggaattatttggtttcttattaggcctatcctgaaaccaaaggaaatgagatcggaattcctcgggggtaccgagctcgaatt

SEQ ID NO: 329014 - DNA, 394 bp, Zea mays
  unsure (1)..(394): unsure at all n locations
cctcggggaattccaattccacattttcaagaaataaggaggcgaaaatggtcatatatgaattggaattatttgttttcttattaggcctatcctgaagccaaaggaaatgagatcggaattcctcggggaattccaattccacattttcaagaaataaggaggcaaaaatgttcatatatgaattggaattatttgttttcttattaggcctatcctgaagccaaaggaaatgagatcggaattcctcggggaattccaattccacattttcaagaaataaggaggcaaaaatgttcatatatgaattggaattatttgttttcttattaggcctatcctgaagccaaaggaaatgagatcggaattcctcggnggtaccgagctcgaaatt

SEQ ID NO: 329015 - DNA, 99 bp, Zea mays
tagatatgtttttttactcttcgtggggcagttttgtactggtggattcataaggactctgattatggtgcgttcggaacttataataataagcacatg

SEQ ID NO: 329016 - DNA, 364 bp, Zea mays
cctcggggaattccaattccacattttcaagaaataaggaggcaaaaatgttcatatatgaattggaattatttgttttcttattaggcctatcctgaagccaaaggaaatgagatcggaattcctcggggaattccaattccacattttcaagaaataaggaggcaaaaatgttcatatatgaattggaattatttgttttcttattaggcctatcctgaagccaaaggaaatgagatcggaattcctcggggaattccaattccacattttcaagaaataaggaggcaaaaatgttcatatatgaattggaattatttgttttcttattaagcctatcctgaagccaaaggaaatgagatcg

SEQ ID NO: 329017 - DNA, 247 bp, Zea mays
atcagaccctgctgcccaagaaagctggtcagaagggggacatcggctctgcctcccaggagttctaagcgtttcggcggaatgaggagagggaccgccccctgtttctgtctcgtccgcgtggttgtgtttcagctctgcggtttttgggggagtgctgtcgatgagttgggattgatatgggttgtggggatgtaaacaaacgcagcgcgttgtttcatgaatgaatgatggatagaaggaacat

SEQ ID NO: 329018 - DNA, 363 bp, Zea mays
gaaatggcgtgcttgttacaggctttggtaagttatattattgagaattgcaaagtgtatctgttatctttcttcagactgacatggtcacttaatgttaaattgctatttttgctaaaaaaaaaaaaaaaaaaaaaaaaaaaaaaaaaaaaaaaaaaaaaaaaaaaaaaaaaaaaaaaaaaaaaaaaaaaaaaaaaaaaaaaaaaaaaaaaaaaaaaaaaaaaaaggggcgccccccaattatggacttcgtcaccccggaaataaattccgacccggtccttggaggcttcccagttttccttatagggggtccatttaaaccttggccaaatcatggccaaacctttttccgggggaaaa

SEQ ID NO: 329019 - DNA, 97 bp, Zea mays
atcatctcttgctacatctgttatggtagccattcctcataagagatccatctcaactgtggaaaatacatatactgattcagcgggaggttccaaa

SEQ ID NO: 329020 - DNA, 199 bp, Zea mays
gagcctctgaggtgctgctcctcctcctcctcttgcttcttggttactggattgcagatcgatgttctacatccgttcgtgctcttgtccatagataaataagataaaatgtgcttaaatttgtgttctttcttctctcggaagagttgttgctgaaattatacttttgaagtgatcaatcacaagtcaatttgttctc

SEQ ID NO: 329021 - DNA, 142 bp, Zea mays
tacttggcgagttacaatatatttatgtggtgtctgaaatgttctagaacctctaaatctctactactattaaggctgtaagagtagtcggccattcccgtgttctgccaccattgctgttctgccattcccgttctgccac

SEQ ID NO: 329022 - DNA, 221 bp, Zea mays
gtgcgactaggagggcaggagagagcgaataggagacctatcgattgaatttgtgcagtgaagggagtcttgtccataggatatgttctcttaacgtaaatgtttaatgagtttgcacatggtgcatattgagtttgttgccaccataaacctgcaccaagatatgaaaccaatattacaatgaaaggagacttactgattgtccaagcaagacttaaaaa

SEQ ID NO: 329023 - DNA, 377 bp, Zea mays
cctcggggaattccaattccacattttcaagaaataaggaggcaaaaatgttcatatatgaattggaattatttgttttcttattaggcctatcctgaagccaaaggaaatgagatcggaattcctcggggaattccaattccacattttcaagaaataaggaggcaaaaatgttcatatatgaattggaattatttgttttcttattaggcctatcctgaagccaaaggaaatgagatcggaattcctcggggaattccaattccacattttcaagaaataaggaggcaaaaatgttcatatatgaattggaattatttgttttcttattaggcctatcctgaaaccaaaggaaatgagatcggaaatcctcgggg

SEQ ID NO: 329024 - DNA, 273 bp, Zea mays
gaatagtcattcagaggtgtagtgactacagcacaggaacaagatgagtgttcatctgaatatatgcttagcaaagcgagaattggtatggaaagatcattgtgtttcttttcttttttgttttttgggtgaggaagaggagtttattattcacgtatgctaatcaaggtttaacatatgctgtaaaaagaggattgtattcatttactactcagtgtacgtaaaaccttgttttcataaggatagatgctaatgcagcgagatgttctcatc

SEQ ID NO: 329025 - DNA, 349 bp, Zea mays
ggcgatgcggaacgccatcgagggcatgaacggcaaggagctggacggccgcaacatcaccgtcaacgaggcccagtcccgcggcggccgtggaggcggcggcggcggcgggtacggtggtggccgtggaggcggcggctacggcggtggcgggcgccgtgatggcggcggcggctacggcggtggcggcggctacggtggtggcggcggcggctacggtggtggtggcggcggctacggcggtggcaaccgtggcggcggctacggcaactccgacgggaactggaagaactgagcggtggggcccgcgcggccaagttatcctgttcgctaccgtgttggttaccct

SEQ ID NO: 329026 - DNA, 279 bp, Zea mays
gaagatcaagaactgaggtgctgctcctagtcagtttcatggacaatgttgggctgtattgctgtgtggttgttgaacggtgtttgtttacccaacatttgggccttctgttatgttttaccttgttgtcgatgacactactatatgacaaaaaaaaaaaaaaaaaaaaataaaaaaaaaaaaaaaaaaaaaaaaaaaaaaaaaaaaaaaaaaaaaaaaaaaaaaaaaatgtaaaaaaaaaaaaaaattaaaaaaaaaaagggcggcccccaaatttgg

SEQ ID NO: 329027 - DNA, 239 bp, Zea mays
gtttcctcacagccacagcaccagcacgaccccgacgggcggcgcggcggcggcggcggcatcgccgcgcaacttccggcgcagcttctcctccgcgtcctccgcgggccacagccacggcggcggcggcggcggtgccaagtgcgtgtgcgcgcccgcgacccacgccgggtcgttcaagtgccggctccaccgcaccaactcccagggccacggtcacggccacccgcacccgtccc

SEQ ID NO: 329028 - DNA, 231 bp, Zea mays
cgctcgtctcgcctggcctagctagctgcctgccttggcttgcttgctacgtcgtgtactatacacagcgagaggaaggaggagcaagaaaagaaagaaaagagagagagtcgcttcctttcctccaacttattccatggagacctcttctcacaagcgggcgcgggaggcggtcgacctcgccgccgccgccggagaggccgtgtggccggaggccgacgccaagaggct

SEQ ID NO: 329029 - DNA, 145 bp, Zea mays
agattctgaattgaattctatatccgtaaccgcttgccagtgcgtgttctgagttaatattatctttccatgatatcttggtaaaaaaaaaaaaaaaaaaattggtaaaataaaaaagaaaaaatgaaaacatattataacatgc

SEQ ID NO: 329030 - DNA, 352 bp, Zea mays
cgcagtcctgtcgtaggaatgggatgaggccgggcccgctccctccttcctcctcggcgcttctcccgtgacaagcctccattctccagtccgtgagcactccactccctgtctccgcttttgtttctctcgtcccaacctccccttttctgcgggtttgatccgcacggtacaggataggggaggatggatttgtccaggttcgcctccggcgtcgggcccagcagcgtggccccgcgggcgggcctgcagatcggcgccgccgagaatggcttccgggcctgctccctgcggcgagcacggcaccgcggcggcgggaacgggaacctcacggccggcgggttcaccctgc

SEQ ID NO: 329031 - DNA, 122 bp, Zea mays
agcaccgcacgagtcacacactcatggtgaaaatagatcagaattaggttggcgattgacctatgctggatatatataacaatcaagaaagcaccactagggcctcctttggtagagctctt

SEQ ID NO: 329032 - DNA, 328 bp, Zea mays
agcagcacatccaaccacgatcatggatttgggcccaggcaatggcaacccgccctacagactatctatgaggcctaggttttccttaagaagggaaatatagctttttttcttagagagagaataggaaccccattcattcattcatacatgcatattcttttttcttgttcttccttccggtgacgatggaagggcaagttgtgcatacaccctgtaaaggcataaccctctttggtgcagtcatttataagaaatcagaagagtaaaatgtatagatggtctctgaatttgtcaagagatgtcaaaaaaaaaaaagagaattagg

SEQ ID NO: 329033 - DNA, 370 bp, Zea mays
  unsure (1)..(370): unsure at all n locations
atgcactcgaccttcaccaggcttacaggagcaattccgatggtatatgactagctctccaacgctgtagtaataagtctgtctagcaacgatctgatgtgaactattactgtcgatgggcctttctcatccttatctgtacgaagtctggagaccaacatgatgatctacgaatcagaactacaaggattgttatcattatgattcctgatgccatatgccgagcgaccgtagtccatctgtgaaagccgataggacgttagccaggatagtagtatcaatagagaccatatctgcaataatgacnatgactatatataagtatgataataatacgacatttggtaatgagatcataacaagtcctgat

SEQ ID NO: 329034 - DNA, 244 bp, Zea mays
atgagaaggagtctctttcttcaaagattgcaaaggttgggtgagcattcctcttcactcttagaatcaatacgctcagccacaatggttcccccacccaccaaaaatacactgttgccctacacatgctcacctactgtggtgttctgactccattgatgagtgtatcaaaataggaagaagtttttccttaaagtttctcaaactattctaaggggtgttattttatattttggcaaggagt

SEQ ID NO: 329035 - DNA, 316 bp, Zea mays
  unsure (1)..(316): unsure at all n locations
acgcgctccacggcgactatgtccgcgaccttgaggcctnccactcccgcatctgcaagcgcgtcaagatggagtcccatggctgcctgcagctagcagaggaagtggacaaggaacagcagaagatagccgacaagatcgccgagcgcgccgagctggtgaagacctcttacaagaagttcgtggctgaagtgcaggcgtccacatcccgtgtgtgcaaggtgactgtccctgagatgacgaagtccatggagagggctattgatggcttgcgcagtcgctacatctncgctataccatcagcttagctggtgct

SEQ ID NO: 329036 - DNA, 403 bp, Zea mays
cctcggggaattccaattccacattttcaagaaataaggaggcaaaaatgttcatatatgaattggaattatttgttttcttattaggcctatcctgaagccaaaggaaatgagatcggaattcctcggggaattccaattccacattttcaagaaataaggaggcaaaaatgttcatatatgaattggaattatttgttttcttattaggcctatcctgaagccaaaggaaatgagatcggaattcctcggggaattccaattccacattttcaagaaataaggaggcaaaaatgttcatatatgaattggaattatttgttttcttattaggcctatcctgaagccaaaggaaatgagatcggaattcctcgggggtaccgagctcgaatttcctatagtg

SEQ ID NO: 329037 - DNA, 294 bp, Zea mays
atcctaggatccttgtcatcctcctcaaactctctgctgcacaaaggcaaaagtatcaaaattcaattattgaaccatcttaaaatttacataaagtagagctgcaagttgtcaagcactcaagctatttcaaggtcagaggaacaagataacaagtcattgcaggcttcaagcaaaagagtacaacaattattacataagtctaaagtttaaagttctcaaatgaaagtccactgataattgatgtactatctaaagcaaatcttcatccacttgaaatgcattttcagtccc

SEQ ID NO: 329038 - DNA, 92 bp, Zea mays
gatgatggatctttttacttgtttcttgtacaaatgcatacgggtgttaatgaaatactgtgcgtaatatattttaataaaaataataaaaa

SEQ ID NO: 329039 - DNA, 380 bp, Zea mays
cctcggtgaattccaattccacattttcaagaaataaggaggcaaaaatgttcatatatgaattggaattatttgttttcttattaggcctatcctgaagccaaaggaaatgagatcggaattcctcggggaattccaattccacattttcaagaaataaggaggcaaaaatgttcatatatgaattggaattatttgttttcttattaggcctatcctgaagccaaaggaaatgagatcggaattcctcggggaattccaattccacattttcaagaaataaggaggcaaaaatgttcatatatgaattggaattatttgttttcttattaggcctatcctgaagccaaaggaaatgagatcggaattcctcgggggta

SEQ ID NO: 329040 - DNA, 372 bp, Zea mays
cctcggggaattccaattccacattttcaagaaataaggaggcaaaaatgttcatatatgaattggaattatttgttttcttattaggcctatcctgaagccaaaggaaatgagatcggaattcctcggggaattccaattccacattttcaagaaataaggaggcaaaaatgttcatatatgaattggaattatttgttttcttattaggcctatcctgaagccaaaggaaatgagatcggaattcctcggggaattccaattccacattttcaagaaataaggaggcaaaaatgttcatatatgaattggaattatttgttttcttattaggcctatcctgaaaccaaaggaaatgagatcggaattcct

SEQ ID NO: 329041 - DNA, 323 bp, Zea mays
ccgcgctcgtcctcggcgccgccgccgcagccgctacactgggttccgcgccactgttggagacttggagcacaacgatttcttcgtttggccactgttggagccaaacacgagagtagtcatgctgccaccgctctcgcaccttcagcgtcgccttctcgccgcagacccaaagttccttgctccgccccttttccgctcattctcccgcgccacctgaccggcagcacgcaagccgaccaccgccgtggctgtcctctgggacctggccgcttcccacccgccctctactctcccgctttacgacgccgtcgtgcgccttc

SEQ ID NO: 329042 - DNA, 196 bp, Zea mays
ataaaatgtttcctctaacaagtgaagggcactgtttttattgtctcgtgggccacagatgcctgctgaacaatttatgttcatttcttcttttcttaaagaagcatgcactaagaacatgaaggatgcatgccatggaaagtttttgaaagtcattgaaacgtatgagctcctcatgcaatgcattattctcctt

SEQ ID NO: 329043 - DNA, 333 bp, Zea mays
ctcctcgccatcacataaaaccagtgcaagcagaagcagcgcaatggcgagcagcaccatggccctctcctccacagccttcgccggcaaggcagtgaacgtgccgtcgtctctcttcggcgaggcccgcgtgacgatgcgcaagacggcggcgaaggcaaagccggcggcgagctccggcagcccgtggtacggccccgaccgcgtgctctacctgggcccgctgtccggcgcgcccccgagctacctgacgggcgagttcccgggcgactacggctgggacaccgcggggctgtcggcggacccggagacgttcgccaagaaccgggagct

SEQ ID NO: 329044 - DNA, 395 bp, Zea mays
  unsure (1)..(395): unsure at all n locations
aacaacccatccgctccatctgcgagcaagctctagcgagctagcagcatgcaggccctatgacgctcgccatcctcatccgggagcgtggccatgcctccgnccgcctcttcccccacccccggtgcccctttcacacaccccccggaccgctgtcctgcccctctccccttgcacacccactcccttctaccatcttcatgcttggcgccctcaccaccttcccgaccgcctctgagctcatcggctttccccatagcccgaacgagatatttgcgtccgacccgcccatcgacgtggacgccatcatggagaacgagctacggaagaaggacggcggtgcggatgtggaacatctcagatctgtaactctatttccggcgacctgggtcggg

SEQ ID NO: 329045 - DNA, 234 bp, Zea mays
atggcgacaaagttaagacgagtacaacaaggggatgacgacgacggagtcgagcgcttctaccttgtgtcgatcggatacaacaataacagaacataagcggaattgggctgttttagagagttgtggagttcgattgttggcatgatggtggatgtgtgctgtatttttgccttcatgtacttactattttttttccaaatcacatcatattcaacatatatataagaagac

SEQ ID NO: 329046 - DNA, 127 bp, Zea mays
gggtgctattggactcgatggctccttttatgtttggtcactcaattctgtagtgaacagaaatttctggttgcctcaagtttgctgtctgagatgcttatattatttattttgttctatggtggac

SEQ ID NO: 329047 - DNA, 393 bp, Zea mays
cctcggggaattccaattccacattttcaagaaataaggaggcaaaagtgttcatatatgaattggaattatttgttttcttattaggcctatcctgaagccaaaggaaatgagatcggaattcctcggggaattccaattccacattttcaagaaataaggaggcaaaaatgttcatatatgaattggaattatttgttttcttattaggcctatcctgaagccaaaggaaatgagatcggaattcctcggggaattccaattccacattttcaagaaataaggaggcaaaaatgttcatatatgaattggaattatttgttttcttattaggcctatcctgaagccaaaggaaatgagatcggaattcctaggcggtaccgagctcgaatt

SEQ ID NO: 329048 - DNA, 393 bp, Zea mays
cctcggggaattccaattccacattttcaagaaataaggaggcaaaaatggtcatatatgaattggaattatttgttttcttattaggcctatcctgaagccaaaggaaatgagatcggaattcctcggggaattccaattccacattttcaagaaataaggaggcaaaaatgttcatatatgaattggaattatttgttttcttattaagcctatcctgaagccaaaggaaatgagatcggaattcctcggggaattccaattccacattttcaagaaataaggaggcaaaaatgttcatatatgaattggaattatttggtttcttattaggcctatcctgaagccaaaggaaatgagatcggaattcctcgggggtaccgagctcgaatt

SEQ ID NO: 329049 - DNA, 360 bp, Zea mays
  unsure (1)..(360): unsure at all n locations
cctcggggaattccaattccacattttcaagaaataaggaggcaaaaatgttcatatatgaattggaattatttgttttcttattaggcctatcctgaagccaaaggaaatgagatcggaattcctcggggaattccaattccacattttcaagaaataaggaggcaaaaatgttcatatatgaattggaattatttgttttcttattaggcctatcctgaagccaaaggaaatgagatcggaattcctcggggaattccaattccacattttcaagaaataaggaggcaaaaatgttcatatatgaattggaattatttgntttcttattaggcctatcctgaagccaaaggaaatgag

SEQ ID NO: 329050 - DNA, 362 bp, Zea mays
aaggaaacaacatgtgccaacccctctctgaaacctccaacgacaaatccactcctctacatgcaatttgtcgtcaatctttgagtcatcacactaattggattgtgtgttggtgtgtgcatcatgttcatcctcacgaaggtcctattttgtggtagtgtcttcttcttcctctaagaattttcttattttatcaagcaagaggcacttgatccttgctagcatttctcatctggtgttgggtgaacagatcctgccattctctatagacacgtgttctttcttgtgtgaagttatgtgcacctattgtggccagcgcttgtgaatcctattatcaaggtggctctctaactttgccggtt

SEQ ID NO: 329051 - DNA, 350 bp, Zea mays
cccgcgaccgcgacatcgaccgtcatcgcgaccgagaccgcgacatcgaccgtcatcgcgaccgagaccgcgaccgggaccgggacagggacagggacagggatcgcgagcgagaccaccgccgcgagcgcgagcgcgagcggaagcgctcccgctcccggtccccgtcggcggatcgggaccgctcccaccgccgccactctcattcgcaccgaggccgtccttccccctctcccgacgccggccgccacaagcgccgccgcgaggcgtcccctgcctccgcggaccatcaccataaggaggataagaaggctgccgactctcacgcgacacccggcggaggggacatc

SEQ ID NO: 329052 - DNA, 338 bp, Zea mays
cctcggggaattccaattccacattttcaagaaataaggaggcaaaaatgttcatatatgaattggaattatttgttttcttattaggcctatcctgaagccaaaggaaatgagatcggaattcctcggggaattccaattccacattttcaagaaataaggaggcaaaaatgttcatatatgaattggaattatttgttttcttattaggcctatcctgaagccaaaggaaatgagatcggaattcctcggggaattccaattccacattttcaagaaataaggaggcaaaaatgttcatatatgaattggaattatttgttttcttattaagccta

SEQ ID NO: 329053 - DNA, 414 bp, Zea mays
ctgcattgcatgcttgatcactcgcctcgctcgttgcatcttagataatttaattttgataatggattcaagatatatcaccctatgcatctttcttgtacttgtcttacatggagatacaactttggcagaaacctgcaagcagtttcctaaatggagtccactctgctttagtgcaatttgcaaggcaagttgttttatagagggaaagttctccgatggttactatgtaaaggggcatagatgttgttcaactggatatgaatacgtgtgtaattgtcttttgtgtaaaaattagttatctagtgacatgtgggactatctccttttgttcctatctgtcatctaggagtgctgtctaaataattattcggtaaaatagttaactagtatgtttactatttagagttatgt

SEQ ID NO: 329054 - DNA, 312 bp, Zea mays
ttggcgaccaccaatgaatgatgacactgactggggtgtcaacatcgcagctggttttgtttggtctcatgttgcatcactcgctgctccacgatgccttgctatggttggggggagatttgctccatccaccccacgccggtcaggcgacagagcctccgctgcgtcgtctcatccgtctggtgagttgccactgtcttagaatctgagtggtacggtacgtgtggatctcgcgcgcgtgtaaacctagtattatgtactacaaactgtcatcatcggagatcactcgaataagatatcgatcttgagatt

SEQ ID NO: 329055 - DNA, 133 bp, Zea mays
atccgcatagcgttaacttttttcgcttttccagaaacttggatgcctggtcacaagctgaaaggtctgatagataaccgcatactctggaatcgataacgttctggttacattcacaactgattgactcttt

SEQ ID NO: 329056 - DNA, 89 bp, Zea mays
gttcctttactcgtgtaatatactccgatgtcaggcccgcttaaacaacagtaataaacgaccttcgaaggtcatgtagttatcagttc

SEQ ID NO: 329057 - DNA, 243 bp, Zea mays
caagaaataaggaggcaaaaatgttcatatatgaattggaattatttgttttcttattaagcctatcctgaagccaaaggaaatgagatcggaattcctcggggaattccaattccacattttcaagaaataaggaggcaaaaatgttcatatatgaattggaattatttgttttcttattaggcctatcctgaagccaaaggaaatgagatcggaattcctcgggggtaccgagctcgaatt

SEQ ID NO: 329058 - DNA, 392 bp, Zea mays
cctcggggaattccaattccacattttcaagaaataaggaggcaaaaatgttcatatatgaattggaattatttgttttcttattaggcctatcctgaagccaaaggaaatgagatcggaattcctcggggaattccaattccacattttcaagaaataaggaggcaaaaatgttcatatatgaattggaattatttgttttcttattaggcctatcctgaagccaaaggaaatgagatcggaattcctcggggaattccaattccacattttcaagaaataaggaggcaaaaatgttcatatatgaattggaattatttgttttcttattaggcctatcctgaagccaaaggaaatgagatcggaattcctcggtggtaccgagctcgaat

SEQ ID NO: 329059 - DNA, 228 bp, Zea mays
atcataattccgcgttcttttcatagattgcagacgcggggaggatattcctcatggctgttacaatgaactcgctctgtcagaataagcaccttacgcagctaaaatacactgttgacctgaacatgctcacatactgggatgctgatactgaatttataagggtatgacaatataattaagttactccttatagatgctcgaactaatgtaaagattttacattct

SEQ ID NO: 329060 - DNA, 393 bp, Zea mays
  unsure (1)..(393): unsure at all n locations
cctcggggaattccaattccacattttcaagaaataaggaggcaaaaatgttcatatatgaattggaattatttgttttcttattaggcctatcctgaagccaaaggaaatgagatcggaattcctcggggaattccaattccacattttcaagaaataaggaggcaaaaatgttcatatatgaattggaattatttgttttcttattaggcctatcctgaagccaaaggaaatgagatcggaattcctcggggaattccaattccacattttcaagaaataaagaagcaaanatgttcatatatgaattggaattatttgttttcttattaagcctatcctgaaaccaaaagaaatgagatcggaattccttcggggtaccgagctcgaatt

SEQ ID NO: 329061 - DNA, 380 bp, Zea mays
cctcggggaattccaattccacattttcaagaaataaggaggcaaaaatgttcatatatgaattggaattatttgttttcttattaggcctatcctgaagccaaaggaaatgagatcggaattcctcggggaattccaattccacattttcaagaaataaggaggcaaaaatgttcatatatgaattggaattatttgttttcttattaggcctatcctgaagccaaaggaaatgagatcggaattcctcggggaattccaattccacattttcaagaaataaggaggcaaaaatgttcatatatgaattggaattatttgttttcttattaggcctatcctgaagccaaaggaaatgagatcggaattcctcgggggta

SEQ ID NO: 329062 - DNA, 331 bp, Zea mays
  unsure (1)..(331): unsure at all n locations
tgatggataggaccaacgccaaagctggtgcttcaaacgatgaacgtgagggggctcagcattgctcatgtaaaaaagtcacctgcagatgtacagaagcaagaagctggaccacgagtctgctggagctggacacgatagagcagccatctactccggttctcaattctcatctcaattctctctcccctccgccttcccccacccccgccttcaaattttagtttagttntatctactccacagaagcatactgcacacgtacatagaaaacgccatggactacgtactgcatcatttccttaaccatcgtcgctgctcaattttggca

SEQ ID NO: 329063 - DNA, 92 bp, Zea mays
gatctagctagctatctgtaaatgatctagttgtgaatgatattataattgtgatgcttttgtgaatatataattgtggtgcttttgtgttt

SEQ ID NO: 329064 - DNA, 318 bp, Zea mays
acaacaaccaaaaagagtacacactaacaacaggagcacggactacaaaaagacaccaaaaaagagaaagaagaaaacaaacaccaagcccaaaaaagaacaaacacaaacacaaaaaggggcggcccccacctgctggacttgtatacccgggaataaatcacgacccgggccatgcggctgcacaaggtttgcctaaacagagactgcttaacgctcggcttaatggtggacaactttgacccccgctacaaatggaagtgcggtcacaattatgcctacaatccgaccgcgagacttaaagcgcaaacccggggg

SEQ ID NO: 329065 - DNA, 206 bp, Zea mays
gcgaggtcctcgagtccaagatcatcctcgatcgggagacgcagaggtcccgcggcttcggcttcgtcaccttcttcacggaggaggcgatgcggaacgccatctagggcatgaacggctaggagctggacggccgtaacatcaccgtcaacgaggcccattcccgcggtggctcgtagaggcggcggcagctgctacggtggtgg

SEQ ID NO: 329066 - DNA, 246 bp, Zea mays
gccctcgcgttaacgcgctcgtctcgcctggcctagctagctgcctgccttggcttgcttgctacgtcgtgtactatacacagcgagaggaaggaggagcaagaaaagaaagaaaagagagagagtcgcttcctttcctccaacttattccatggagacctcttctcacaagcgggcgcgggaggcggtcgacctcgccgccgccgccggagaggccgtgtggccggaggccgacgccaagaggct

SEQ ID NO: 329067 - DNA, 77 bp, Zea mays
aattcggcttgaggaaaaaacatggggactaaataaacatgcaagaagccgtgggaaaccataaagttctgctttgg

SEQ ID NO: 329068 - DNA, 393 bp, Zea mays
  unsure (1)..(393): unsure at all n locations
cctcggggaattccaattccacattttcaagaaataaggaggcaaaaatgttcatatatgaattggaattatttgttttcttattaggcctatcctgaagccaaaggaaatgagatcggaattcctcggggaattccaattccacattttcaagaaataaggaggcaaaaatgttcatatatgaattggaattatttgttttcttattaagcctatcctgaagccaaaggaaatgagatcggaattcctcggggaattccaattccacattttcaagaaataatgaggcaaaaatgttgatatatgaattggaattatttgttgtcttattaggcctatcctgaagccaaaggaaatgagatcggaattcctcggnggtaccgagctcgaatt

SEQ ID NO: 329069 - DNA, 270 bp, Zea mays
cctcggggaattccaattccacattttcaagaaataaggaggcaaaaatgttcatatatgaattggaattatttgttttcttattaagcctatcctgaagccaaaggaaatgagatcggaattcctcggggaattccaattccacattttcaagaaataaggaggcaaaaatgttcatatatgaattggaattatttgttttcttattaggcctatcctgaagccaaaggaaatgagatcggaattcctcgggggtaccgagctcgaatt

SEQ ID NO: 329070 - DNA, 357 bp, Zea mays
ggcatcttatggaagttttcataatggtaacctggcatctgtatgcagagaattggtattatcttccagagttagaaatcagatttggggcttggaaaaaggatttcactgacgcattctgtatgcagctccactgaatcaaataagaagcaaggcttgttgctggcttgtctattttcgctctcctatcattttcaatgagctctcagcttttgctcttagttttcatccttttttcctttgaggaaaattttgcccttccttattgtacttgcctcgaaatttgacaaccagacacttgaattgcttttttaccgtgagaagtcatgtaacatgaatcagaagacattttctttc

SEQ ID NO: 329071 - DNA, 334 bp, Zea mays
cacacgacaagcttccatcatcgcgtcggcccgttgaagctggctcagagatggaaagaaggacggtggagctaggaaggaagttcatcagaaggacgacaagtgaggcgatgagtcgcgcttatggatggagaccagtggctagacgtattgccggttgattcgtgtgttctggtttcgcttgtctggtctacctggtggtgttccttttggctgcttcgcatttgctttatggttgtaatgatgcttgtactcctttgtgttgtgtgtggtttttctcgtttcctgtctggagagatgttgtaataagtggtatatgtgcgctgggcgttct

SEQ ID NO: 329072 - DNA, 115 bp, Zea mays
ctgggaagaagataagcgacaaaggggggcaactaggaacacacaacatgcaaagatgcacgctatcatggaccatataaacgcagaccttgaccaacagaaacagacagcacaa

SEQ ID NO: 329073 - DNA, 176 bp, Zea mays
gagctccagctcgggtgcgcatgggagagaagactgatgactgatgaggcacacgtacgtaatgtgtcgtcgtaagtgtgaaccatgcatgcatgcaggccggtgagtgtaggggtaaattaaatggtcgtcggagctgtcattatgtgaaccttatttccttttatttattacac

SEQ ID NO: 329074 - DNA, 261 bp, Zea mays
ccatataattctatacatagtccatacatagtctataaacaaactcactactcactcatgcgggctgtgggagttttggccactccctcctccgccaccaggaaggtggccacttcctcaagaaccatggacgaggtagtcttggacgttaacagcacccttcgatccctgagcatgtgacactgaaccctgcaattcatcaatcattcaaataaggttgtgttttgatatccctatacctatacattgctatgtttggtc

SEQ ID NO: 329075 - DNA, 313 bp, Zea mays
ggctctaactctaaggcaaagcatcatctagctaatgtacgtctaagtttagactatcttcagccgcttactcatacttatacccatattcaaactctactctacgaacagtacagtctatagtgtagaacagtgcaggacaatgcttatgggtaaattttggatgaacagctgaagtcggccttagaaggctattggagaaaataattaagcatgcataatacaacatacatacacttgcattctctttcttggttgggtgataaggtgcattcgttctgatcctttcggatgagagtatatttttcaaccc

SEQ ID NO: 329076 - DNA, 316 bp, Zea mays
cctcggggaattccaattccacattttcaagaaataaggaggcaaaaatggtcatatatgaattggaattatttgttttcttattaggcctatcctgaagccaaaggaaatgagatcggaattcctcggggaattccaattccacattttcaagaaataaggaggcaaaaatgttcatatatgaattggaattatttgttttcttattaggcctatcctgaagccaaaggaaatgagatcggaaattctcggggaatccgaataccacatttacaagatgtaaggaggcaaaaatgttaatatatgaattggaatt

SEQ ID NO: 329077 - DNA, 184 bp, Zea mays
accatttggtagccatgaatgaagtcacatagaaactatggagaaacaataatgctatgagccgagataccatatcatcatttcttatgtgtttttagcatttgtattatatgacactttcatgacaaagatatatattgctgctcatgttcaccagcaattgaagttatattattttgttttt

SEQ ID NO: 329078 - DNA, 358 bp, Zea mays
cctcggggaattccaattccacattttcaagaaataaggaggcaaaaatgttcatatatgaattggaattatttgttttcttattaggcctatcctgaagccaaaggaaatgagatcggaattcctcggggaattccaattccacattttcaagaaataaggaggcaaaaatgttcatatatgaattggaattatttgttttcttattaggcctatcctgaagccaaaggaaatgagatcggaattcctcggggaattccaattccacattttcaagaaataaggaggcaaaaatgttcatatatgaattggaattatttgttttcttattaggcctatcctgaagccaaaagaaatg

SEQ ID NO: 329079 - DNA, 261 bp, Zea mays
gaagcaagcagcctaggtagcagcctcagcaaggggaaggggcatgtaacatttgattttacccttttacattttagctcatgatactcaagctgcccatgtgtaccattacttcctatagaagaaaatacttgagagaaattttgaaggctagtttggaaactctattttttccaaggtatttctatttttcaaggggaaatgaaatattttttcgtggaaaaatagaaatctctagaaaaaaaaaaaaaaaggaacggg

SEQ ID NO: 329080 - DNA, 395 bp, Zea mays
ctcttccgcttacacttcagcatcagggagctcgccgtggcctgttcttttggcggcgcaccaggatacgcggccccgggatagttcgacaggcggggcggaggatccggcatgtacgggcaagcgatgaagggaacttcgaccagaaccagtacaactggtcctcgttctttttctacgacagctccttggtcaacctgaggtacgagctggggcgacggcaggatgactggaacgaggacatgctcgccttcacgctgtgcatgcggcctggctcgcatggccggttaatgccaatggtcaccgacctgcctggcagcttagaccccatgagcatcgtcgtcttgaggaccggatcaccagctgctgcggcattagtgtatccggaccaacac

SEQ ID NO: 329081 - DNA, 132 bp, Zea mays
gtaggaggacacgcggatagcagccctgagtagcacccgggacaaagcaacacccgggatggaactacacacgagaggctgtacatagatcaggtatgaggtgcaattattgatgcaacgggctggcgatca

SEQ ID NO: 329082 - DNA, 343 bp, Zea mays
cctcggggaattccaattccacattttcaagaaataaggaggcaaaaatgttcatatatgaattggaattatttgttttcttattaggcctatcctgaagccaaaggaaatgagatcggaattcctcggggaattccaattccacattttcaagaaataaggaggcaaaaatgttcatatatgaattggaattatttgttttcttattaggcctatcctgaagccaaaggaaatgagatcggaattcctcggggaattccaattccacattttcaagaaataaggaggcaaaaatgttcatatatgaattggaattatttgttttcttattaggcctatcctg

SEQ ID NO: 329083 - DNA, 197 bp, Zea mays
  unsure (1)..(197): unsure at all n locations
gccaagaagcggaaagagccccaggagcgccataagccggaggaagnggaaggacagaaagagcaaaaagaagagagaacacaggaggaaggaccgaagagaaaaaaaggggacggagggncaggaggcaggaaagcgaccaagaggaagaaaaagaagaaaaggaaggagcaaggngagaaccccccaaaagcgga

SEQ ID NO: 329084 - DNA, 66 bp, Zea mays
  unsure (1)..(66): unsure at all n locations
tcgacccacgnccacacgacacgaaccaccggcaccaacgagcagccgcaccacgcacccagcgca

SEQ ID NO: 329085 - DNA, 142 bp, Zea mays
cgcacttcactctacagcatcgtcagaaaagtgagcagcagcatcagctgctgccacgaacgcgtggagatcattcctcgcgaggcttctgctcgccatgctggccgtgcaagccttggtggccgaggtccagaccaggacc

SEQ ID NO: 329086 - DNA, 337 bp, Zea mays
gggcgcacgagactagggatttccccctggaaatacgagaacaggaatgatgcggaaccttattaggcctatcctgaagccaaaggaaatgagatcggaattcctcggggaattccaattccacattttcaagaaataaggaggcaaaaatgttcatatatgaattggaattatttgttttcttattaggcctatcctgaagccaaaggaaatgagatcggaattcctcggggaattccaattccacattttcaagaaataaggaggcaaaaatgttcatatatgaattggaattatttgttttcttattaggcctatcctgaagccaaaggaaatg

SEQ ID NO: 329087 - DNA, 102 bp, Zea mays
gatgtaagcgaaagaagaggtgtaggttgaatgaatgctgatggatcgctgctatatatttttgcccccaaacaaggcaagtttaggtgtttttagccttgc

SEQ ID NO: 329088 - DNA, 158 bp, Zea mays
cacctctaacacccaatcacatgcacgaacagcagctgcagcagcagcaggatcaggtgctaaacgtcagagtgctaatggatggtagaccaggcttggtgaacggcatcgctgaaggtatacaagcttatatactagcagatggaaacaaacaagaa

SEQ ID NO: 329089 - DNA, 416 bp, Zea mays
gtttcaagttgttgcgcctgaaacgcatttaagagagaatcggggttcttgtatttcacccctgacaacgactgggctctattcattaaatgttaaccacaaaacccgctatacaataaagataattacgaggatgaaatcgatcaaaaaaattcaaggcaaaccaggtcattttcagaggtactcattggttcaggttctggagactcctatagaagaaagaaacacatcaacaaattctcgatgtgtgtcaagcctttgaagtggtggcgatggaagtctttgtgaatcatggatggtgatcaaatgcaagacttgagtgtggctagtggtattcatagtcacgatatttagttccatcaagttagcttcattattcaagcacctgttcattgagttaataattgacgtgtaat

SEQ ID NO: 329090 - DNA, 248 bp, Zea mays
gagcaggtcgtcgtacctgcaggacgcactctccgtcttcaccaaaatcctttgcagcgatccgtagcacaagggtccacggtgttgccgtaatctgggtgaagggaagtgaagcctacaggcaacacaccgaatagtttgtatgtctcatgtttggtacttgtagaaaaaataggaatgtataactatgacctgatgttgctccggtgaatttgtaactccgtctgaagacatgtgtcgggattttc

SEQ ID NO: 329091 - DNA, 128 bp, Zea mays
aaaaaaaaaaaaaaaaaaaaaaaaaaaaaaaaaaaaaaggaaaaaaaaaaaaaaaaaaaaaaaaaaaaaaaaaaaaaaaaaaaaaaaaaaaaaaaaaaaaaaaaaaaaaaaaaaaaaaaaaaaggggg

SEQ ID NO: 329092 - DNA, 366 bp, Zea mays
cctcggggaattccaattccacattttcaagaaataaggaggcaaaaatgttcatatatgaattggaattatttgttttcttattaggcctatcctgaagccaaaggaaatgagatcggaattcctcggggaattccaattccacattttcaagaaataaggaggcaaaaatgttcatatatgaattggaattatttgttttcttattaggcctatcctgaagccaaaggaaatgagatcggaattcctcggggaattccaattccacattttcaagaaataaggaggcaaaaatgttcatatatgaattggaattatttgttttcttattaggcctatcctgaagccaaaggaaatgagatcgga

SEQ ID NO: 329093 - DNA, 344 bp, Zea mays
cctcggggaattccaattccacattttcaagaaataaggaggcaaaaatgttcatatatgaattggaattatttgttttcttattaggcctatcctgaagccaaaggaaatgagatcggaattcctcggggaattccaattccacattttcaagaaataaggaggcaaaaatgttcatatatgaattggaattatttgttttcttattaggcctatcctgaagccaaaggaaatgagatcggaattcctcggggaattccaattccacattttcaagaaataaggaggcaaaaatgttcatatatgaattggaattatttgttttcttattaggcctatcctga

SEQ ID NO: 329094 - DNA, 271 bp, Zea mays
cactatagaagagctatgatgcacgctgaccttagacgtgaactcggaatgaggctcgtgactgtgaatcggttcaacggaaccaaaggctgtcatattcatcactcgcgacaacgggagcgatgacctattcatccatgaagcctacatcaaggacgacggcttccgtagtcttaacgacggtgatgacgttgaatacaccgtcaggagcggctgctactgtctgagctcgggctcctcgatgtcacttgttcccggctagtggtgaagc

SEQ ID NO: 329095 - DNA, 393 bp, Zea mays
cctcggtgaattccaattccacattttcaagaaataaggaggcaaaaatgttcatatatgaattggaattatttgttttcttattaggcctatcctgaagccaaaggaaatgagatcggaattcctcggggaattccaattccacattttcaagaaataaggaggcaaaaatgttcatatatgaattggaattatttgttttcttattaggcctatcctgaagccaaaggaaatgagatcggaattcctcggggaattccaattccacattttcaagaaataaggaggcaaaaatgttcatatatgaattggaattatttgttttcttattaggcctatcctgaagccaaaggaaatgagatcggaattcctcgggggtaccgagctcgaatt

SEQ ID NO: 329096 - DNA, 171 bp, Zea mays
aaaaaaaaaaaaagggggggtgccacgatttaggggggcgtaaaccggggattttattttggaccggttatttgatggttaaaattttttttttttaaggggtgtttaaaacggttggattaaatgggtttaaattgattttttgggaaaatttgttagcggtaaaaattt

SEQ ID NO: 329097 - DNA, 376 bp, Zea mays
aaagctagcacggatgttgatacaactggaacagatgtccagcacgggagcattgaaggtttgcttgcaatgagtttctgaatggatggtcttttattatgggttttttaaatatctttcctctttctgctggtaattttttttccgacgtataccatgttgagctatctgacccttttcattgttcctacttcacaaagctactaaagccaacgctgctggtgatgcacctggagcattttttcaaaagcagtgtgctaaagctgctgatgttattaccattgacgacgatgacgaggacaacagtcatcgttgttataaagaagaacaaacagcagtagttgatcttgaagctgattatgctggggataaccat

SEQ ID NO: 329098 - DNA, 396 bp, Zea mays
cctcggggaattccaattccacattttcaagaaataaggaggcaaaaatgttcatatatgaattggaattatttgttttcttattaggcctatcctgaagccaaaggaaatgagatcggaattcctcggggaattccaattccacattttcaagaaataaggaggcaaaaatgttcatatatgaattggaattatttgttttcttattaggcctatcctgaagccaaaggaaatgagatcggaattcctcggggaattccaattccacattttcaagaaataaggaggcaaaaatgttcatatatgaattggaattatttgttttcttattaggcctatcctgaagccaaaggaaatgagatcggaattcctcggggaattccaattccacatttt

SEQ ID NO: 329099 - DNA, 360 bp, Zea mays
aacagcttcaagcacaggtaaccacgctagcagaagaatgccggcacaggagcctgaaagttcggttgtacaaacggaaacttgaggaaacctggttgatagtgagggacgaggccacgaagtgcgaagctgcagaagagattataaaggttttaacgaatcagaggaacgctttgtcaaacaaacttttagatggtctggaactagatggttccagtatcgtgcttaaccaacccgacaaagttcttgccacttgcaaaacccaaccgttaaacagcatcagggatcaacacaacgcagaggcagaggaagttttggatacgcgatccacagggttttccaaacacgtcgcgggggatg

SEQ ID NO: 329100 - DNA, 303 bp, Zea mays
ggccccgttttgttcctgcaccccacccgtcctgcgaggctcctgcgccatgccgtcatacgcgcaccaccatagcagccctctggatgataccagtatggacgcgctgaagtgtaacaacaacagcgccccgtcagaggagaccgcggaggacgccgacaccgccggagcgctcgtcgagaaagacggggtctcggtcgaggacttgctggaccttgaggagtctgacgagcctgacaaggacggttccgagcctgaagacgatgactccccgacggtacccgactaggcctaggagaggtc

SEQ ID NO: 329101 - DNA, 263 bp, Zea mays
tattcttggcacacaggaggaacagggcgggtgaagtagaagtccgggtgagattcgagggttttggtgcgggtgaagatgagtgggtgaatgtcaagaatataataaaacacgatcacatctgatagagtgtttcaagatccgatattctcaggttgatgcggccatagttctaattatgaagacgtttatggttctgagccacattcttgtaataaccgatctttatcagcagtttatgtttcctgttaagccatttgtta

SEQ ID NO: 329102 - DNA, 399 bp, Zea mays
cctcggggaattccaattccacattttcaagaaataaggaggcaaaaatgttcatatatgaattggaattatttgttttcttattaggcctatcctgaagccaaaggaaatgagatcggaattcctcggggaattccaattccacattttcaagaaataaggaggcaaaaatgttcatatatgaattggaattatttgttttcttattaggcctatcctgaagccaaaggaaatgagatcggaattcctcggggaattccaattccacattttcaagaaataaggaggcaaaaatgttcatatatgaattggaattatttgttttcttattaggcctatcctgaagccaaaggaaatgagatcggaattcctcgggggtaccgagctcgaattccctat

SEQ ID NO: 329103 - DNA, 112 bp, Zea mays
aaaaaaaaaaaaaaaaaaaaaaaaaaaaaaaaaaaaaaaaaaaaaaaaaaaaaaaaaaaaaaaaaaaaaaaaaaaaaaaaaaaaaaaaaaaaaaaaaaaaaaaaaaaaaaag

SEQ ID NO: 329104 - DNA, 76 bp, Zea mays
aaaaaaaaaaaaaaaaaaaaaaaaaaaaaaaaaaaaaaaaaaaaaaaaaaaaaaaaaaaaaaaaaaaaaaaaaaaa

SEQ ID NO: 329105 - DNA, 339 bp, Zea mays
gcttcatgttgctagatagcatcttatctttatcttatgaaaaagaaaaaaaaaaaaaaaaaaaaaaaaaaaaaaaaaaaaaaaaaaaaaaaaaaaaaaaaaaaaaaaaaaaaaaaaaaaaaaaaaaaaaaaaaaaaaaaaaaaaaaaaaaaaaaaaaaaaaaaaaaaaaaaaaaaaaaaaaaaaaaaaaaaaaaaaaaaaaagggggggccccccaaaaggagggccggaacccgggaaaaaaattccggcggggtccgttggggggcccaaatttcccaaaaggggggggcttaaaaacgtggggcaaaaagggccaaaagagttacccggggaaaa

SEQ ID NO: 329106 - DNA, 397 bp, Zea mays
cctcgggtgaattccaattccacattttcaagaaataaggaggcaaaaatgttcatatatgaattggaattatttgttttcttattaggcctatcctgaagccaaaggaaatgagatcggaattcctcggggaattccaattccacattttcaagaaataaggaggcaaaaatgttcatatatgaattggaattatttgttttcttattaggcctatcctgaagccaaaggaaatgagatcggaattcctcggggaattccaattccacattttcaagaaataatgaggcaaaaatgttcatatatgaattggaattatttgctttcttattaggcctatcctgaagccaaaggaaatgagatcggaattcctcgggggtaccgagcttgaattccc

SEQ ID NO: 329107 - DNA, 172 bp, Zea mays
gaaacctgagatgcgcaagtaagctgagcgaggggaggcttgtgctgtctgagaagctgtatttcgagggcagacctcgcagcctgctcatgcattttgaggtcttggaagcgatggatatataatgtaatgtaagctgatactcgataggtctgataagcgatggatatat

SEQ ID NO: 329108 - DNA, 387 bp, Zea mays
cctcggggaattccaattccacattttcaagaaataaggaggcaaaaatgttcatatatgaattggaattatttgttttcttattaggcctatcctgaagccaaaggaaatgagatcggaattcctcggggaattccaattccacattttcaagaaataaggaggcaaaaatgttcatatatgaattggaattatttgttttcttattaggcctatcctgaagccaaaggaaatgagatcggaattcctcggggaattccaattccacattttcaagaaataaggaggcaaaaatgttcatatatgaattggaattatttgttttcttattaggcctatcctgaagccaaaggaaatgagatcggaattcctcgggggtaccgaact

SEQ ID NO: 329109 - DNA, 406 bp, Zea mays
tggaggctgcagcatcggtggaggcggcggatctggtggtgttgggagctttttcttttggggtttttttctttttttcctcttgttttttttttttttttttcttttctttttttttatttctttttttttcttttgttttttttttttttttttattatttttctttttttctcttttcattttgtcttttttcttttattttttttttttctttatttttttttttttttcttttttttcttttctttcttttttatcttattgttatgtttttttcttttttctttctcttttcttttttttttttattttgttctttatctttatctcttttcttctttctgttttctttttttttatttcttttttttctttctttttttgttattcttttttttttttt

SEQ ID NO: 329110 - DNA, 368 bp, Zea mays
aagatttggaggcccatatttaggtaacaatatcatttgaaaaagggtacctaatacgaggtatattttaagtagaagtgtgaaatatgcttttagattctccgcgatagagcatgcctgctccgtggatgcttgtattttcttgtagttatcacattacaaggtttaatgattgttggagagtgagggcctaggcaaggggctctcaatctaacaattgaaacacaaagtcctggaaccaccaactccctactttgcttttaccaaagtctctaagtttttgtgagtgctaggtagacaaggcttcaccacgaacatggactaagggatgactctgaacaaaaaccacacccaaagataagaaaaag

SEQ ID NO: 329111 - DNA, 194 bp, Zea mays
ctcgagccgcactctcaaaaaaaaaaaaaaaaaaaaaagaaaaaaaaaaaaaaaagaaaaaaaaaaaaaaaaaaaaaaaaaagaaaaaaaaaaaaaaaaaaaaaaaaaaaaaaaaaaaaaaaaaaaaaaaaaaaaaaaaaaaaaaaaaaaaaaagggggggcccccgattagggagctggtaaacccggaaata

SEQ ID NO: 329112 - DNA, 319 bp, Zea mays
gtgactcaccaccatattcagctgacgatccagaaggagggttcatagcaatatcttgcggtgctggccgttggaatacttgaagcgacaaccaaaggggagaaaatacatagcacttattctaaagtttgtcaaggatcatatgggagctctgctttttggtggaggaagaacttatgaaagttgaggaacaatcagtggagctggagatggattataaggagagatgatgttgaaacaacagtcatttcttgatctcaacgtgagaaatacgctctgtcctataagtgatgattcctggatctgaatgtgtgaaata

SEQ ID NO: 329113 - DNA, 363 bp, Zea mays
cctcggggaattccaattccacattttcaagaaataaggaggcaaaaatgttcatatatgaattggaattatttgttttcttattaggcctatcctgaagccaaaggaaatgagatcggaattcctcggggaattccaattccacattttcaagaaataaggaggcaaaaatgttcatatatgaattggaattatttgttttcttattaggcctatcctgaagccaaaggaaatgagatcggaattcctcggggaattccaattccacattttcaagaaataaggaggcaaaaatgttcatatatgaattggaattatttgttttcttattaggcctatcctgaaaccaaaggaaatgagatc

SEQ ID NO: 329114 - DNA, 386 bp, Zea mays
cctcggtgaattccaattccacattttcaagaaataaggaggcaaaaatgttcatatatgaattggaattatttgttttcttattaggcctatcctgaagccaaaggaaatgagatcggaattcctcggggaattccaattccacattttcaagaaataaggaggcaaaaatgttcatatatgaattggaattatttgttttcttattaggcctatcctgaagccaaaggaaatgagatcggaattcctcggggaattccaattccacattttcaagaaataaggaggcaaaaatgttcatatatgaattggaattatttgttctcttattaggcctatcctgaagccaaaggaaatgagatcggaattcctcgggggtaccgagc

SEQ ID NO: 329115 - DNA, 235 bp, Zea mays
ctcgagccgctctagccaacatgactcatgttgaattgtgtacaacttcaactaagacgtcttttgtgtttaacccaccgtccactctgtatgctcactgagtctagaaaaacatttatagcttggcctctgatctttctggaatttgggacgcagtccaggaaataaagaaaatagggaaaaagagtttagaaaaaaaattaagaatataataaagccaaaggaaatgagatca

SEQ ID NO: 329116 - DNA, 391 bp, Zea mays
cctcggggaattccaattccacattttcaagaaataaggaggcaaaaatgttcatatatgaattggaattatttgttttcttattaggcctatcctgaagccaaaggaaatgagatcggaattcctcggggaattccaattccacattttcaagaaataaggaggcaaaaatgttcatatatgaattggaattatttgttttcttattaggcctatcctgaagccaaaggaaatgagatcggaattcctcggggaattccaattccacattttcaagaaataaggaggcaaaaatgttcatatatgaattggaattatttgttttcttattaggcctatcctgaagccaaaggaaatgagatcggaatttcctcggggtaccgagctcgaa

SEQ ID NO: 329117 - DNA, 370 bp, Zea mays
ggcagcagcacaagcaagaaccacacctcctcccttcgcctgtgatcatgtcgtcttgctgcggcggcaagtgcgggtgcggctccagctgctcctgcggcagcggatgcaacggctgcggtatgtaccctgacgtggagaccgccgccaccagcagcgtcaagaccacggtcctcgccgcgccgaccaccaaggccagcgccggcggcttcgaggcggccaccgagggcggcggctgcgactgcaacacctgcaagtgcggcaccagctgcggctgctcctgctgcagctgcaactgagctggcccggcccggcgatggcgcacgagagtcgagaggaggaagacgacgacgaggcgtataaatataat

SEQ ID NO: 329118 - DNA, 306 bp, Zea mays
cgacgagcggtattacgtacgagagggccgcacttctctaccaccgttaaacggtggcgacgtttgaccctctgaccgcataggctctataaccggatcagatggttactaagcttgtcattacggatgctcgccatgcgtttacgagtgaacctatgtggactgactagattagatgatcgcttagcaaatcaggttttgcatactggccgatgtgaccgtcgaatgcttttgcatactgcactgggtgcgaacttaatccgggatgagctgcgacagattgatcttcatcagctgtgtacatat

SEQ ID NO: 329119 - DNA, 397 bp, Zea mays
cctcggggaattccaattccacattttcaagaaataaggaggcaaaaatgttcatatatgaattggaattatttgttttcttattaggcctatcctgaagccaaaggaaatgagatcggaattcctcggggaattccaattccacattttcaagaaataaggaggcaaaaatgttcatatatgaattggaattatttgttttcttattaggcctatcctgaagccaaaggaaatgagatcggaattcctcggggaattccaattccacattttcaagaaataaggaggcaaaaatgttcatatatgaattggaattatttgttttcttattaggcctatcctgaagccaaaggaaatgagatcggaattcctcgggggtaccgagctcgaattccct

SEQ ID NO: 329120 - DNA, 292 bp, Zea mays
gccgcaatgattcctgctcgtctcccactcgccctccgaaagcgaagtgagcttctgcagataaggaaggaggccgacattatcgcaacacgccacctcatctaatcgaggcgagagacaggggaggaggaggaaaacggaagaaatcttcatcaagcaacaggaagcgagagcgtgcgatttcatctttcttcctttccggtcaccccaggtgaatcaccaaccgggcggtgcgccataagctagggtttcgcggggcgcggcatcaggctcgtctttcgcagtctcggct

SEQ ID NO: 329121 - DNA, 372 bp, Zea mays
acagaagctattgaggaattgaatgagcctgatggagagcctgatgatgacgatgaagaggttgaggataatgaggacgagctgaattcgaagctgcagagtgtgaaggttgagcaggatgattgaccgagttggtatcgagatataagcctgtcgcagggtcttgataactgagttatctacaatgctgttgatctttggttttgtagtcggtttttgttatgaaaaaccagaaccagctatcttgtgacttgtgcaatctgattatagattagaactgctcttatttattcgtttatattaatgacatcgttccattacaaatggcctgatatatagatgctacctattttcccaacaaaaaagaacgga

SEQ ID NO: 329122 - DNA, 359 bp, Zea mays
ggcctggatcttggcggcgcgcggggtaggccccggcggctacgcgggcgcgggttccacccgccatggcggttcagatccggacacctccgacgtgggcgagcgcgagtgcccccggcggcgcggccttagcagcgtcaactggccaggcgcggcggcctcggccctgcggcgggcggccccgttgcgggcgcacaaccccagcgaggctcggcggccatggcgtgcgtgcagccaatatggcgaccatggcgcgcgcgggaccggcggcgctaagccccaacgacgcgcgtggccggcgctcggcgcggcccgcggccaggtcggcgcgcgcggccgacgcacggcgcagcacgcgg

SEQ ID NO: 329123 - DNA, 291 bp, Zea mays
ggccgccctttttttttttttttttttttttttttgtgcatgcatgcatcagctcacaacggagctgtgcagttcggttcattcattcatgttcatccatcgatagatccacgagaaagaaaaaaaaaggagcaaatcactgaaacacacgcgcacacaaccaacaaaccaccaaatccaacagattaagcgaccggagcactccaactaattaaccatgcatgcatatagcacagcacaggcagctacgccttgccctcgttggccttccggaaggccgccgcctgcgcc

SEQ ID NO: 329124 - DNA, 437 bp, Zea mays
  unsure (1)..(437): unsure at all n locations
tatgacttcgcatgctctcnttgcatgtctactctagcagatcccctagctgaattccaattccacattttcaagaaataaggaggcaaaaatgggcatatatgaattggaattatttgttttcttattaggcctatcctgaagccaaaggaaatgagatcggaattcctcggggaattccaattccacattttcaagaaataaggaggcaaaaatgttcatatatgaattggaattatttgttttcttattaggcctatcctgaagccaaaggaaatgagatcggaattcctcggggaattccaattccacattttcaagaaataaggaggcaaaaatgttcatatatgaattggaattatttgttttcttattaggcctatcctgaagccaaaggaaatgagatcggaattcctcgggggtaccgagctcgaatt

SEQ ID NO: 329125 - DNA, 359 bp, Zea mays
caagaatgctctaagacctatatgttaaccttttggcattgttaaatggattttaggaagtcgtataaaaaaaaaaaaaaaaaaaaaaaaaaaaaaaaaaaaaaaaaaaaaaaaaaaaaaaaaaaaaaaaaaaaaaaaaaaaaaaaaaaaaaaaaaaaaaaaaaaaaaaaaaaaaaaaaaaaaaaaaaaaaaaaaaaaaaaaaaaaaaaaaggggggcccctcaattatgaaacttgaaaccccggaattaaatccggaccggataactgaaggtgaaaaaatttcccctaatgggggcaatttaaaacctggggaaaataagggaaaaagctgttccgggggaaaaatacttttcccc

SEQ ID NO: 329126 - DNA, 169 bp, Zea mays
gtagaatcgtgatcgatcaattttgtggtttctttttacttgctatcttagtaccacttaattttgtggtgatcttttgtaagggttattttcttgtggagctcattacttgttatctacattttgtaatgcaattcaaggtatgttcaacttaactaatttctccctc

SEQ ID NO: 329127 - DNA, 393 bp, Zea mays
  unsure (1)..(393): unsure at all n locations
cctcggggaattccaattccacattttcaagaaataaggaggcaaaaatggtcatatatgaattggagttatttgttttcttattaggcctatcctgaagccaaaggaaatgagatcggaattcctcggggaattccaattccacattttcaagaaataaggaggcaaaaatgttcatatatgaattggaattatttgttttcttattaggcctatcctgaagccaaaggaaatgagatcggaattcctcggggaattccaattccacattttcaagaaataaggaggcaaaaatgttcatatatgaattggaattatttgttttcttattaggcctatcctgaagccaaaggaaatgagatcggaattcctcggnggtaccgagctcgaatt

SEQ ID NO: 329128 - DNA, 397 bp, Zea mays
aatgaactcaaagactaatcagtcagatgactcaccatttttctgtggcacttggtttccctagttttagcttagtacagtttcataagagctcgaacaaagtataacatatgaaaatattcagaggatctaggtttgcacaaagaaagtttgtgagctaaactgctgctaaatcctgcaacttttttagtacttcaattcgtaagggtcatacatagtatccatcatggtcactacttactcgatgtaaacgcctatggctccagtccaccttgtgctcccttgaatccttgatactcggaatcacgggtctctctgcctctggacgttaatttgttgtgtcgctctggagcgttaatcgattgtttgatgttcatcttcttgattatgctgacca

SEQ ID NO: 329129 - DNA, 389 bp, Zea mays
cctcggggaattccaattccacattttcaagaaataaggaggcaaaaatgttcatatatgaattggaattatttgttttcttattaggcctatcctgaagccaaaggaaatgagatcggaattcctcggggaattccaattccacattttcaagaaataaggaggcaaaaatgttcatatatgaattggaattatttgttttcttattaggcctatcctgaagccaaaggaaatgagatcggaattcctcggggaattccaattccacattttcaagaaataaggaggcaaaaatgttcatatatgaattggaattatttgttttcttattaggcctatcctgaagccaaaggaaatgagatcggaattcctcgggggtaccgagctcg

SEQ ID NO: 329130 - DNA, 366 bp, Zea mays
cctcggggaattccaattccacattttcaagaaataaggaggcaaaaatgttcatatatgaattggaattatttgggttcttattaggcctatcctgaagccaaaggaaatgagatcggaattcctcggggaattccaattccacattttcaagaaataaggaggcaaaaatgttcatatatgaattggaattatttgttttcttattaggcctatcctgaagccaaaggaaatgagatcggaattcctcggggaattccaattccacattttcaagaaataaggaagcaaaaatgttcatatatgaattggaattatttgttttcttattaggcctatccttgagccaaaagaaatgagatcgga

SEQ ID NO: 329131 - DNA, 85 bp, Zea mays
cttttttgtccattaaaaaaagtattcattattataatttagaaacctgtgccagattaaaataatgaatacttttttgtccatt

SEQ ID NO: 329132 - DNA, 393 bp, Zea mays
cctcggggaattccaattccacattttcaagaaataaggaggcaaaaatgttcatatgggaattggaattatttgttttcttattaggcctatcctgaagccaaaggaaatgagatcggaattcctcggggaattccaattccacattttcaagaaataaggaggcaaaaatgttcatatatgaattggaattatttgttttcttattaggcctatcctgaagccaaaggaaatgagatcggaattcctcggggaattccaattccacattttcaagaaataaggaggcaaaaatgttcatatatgaattggaattatttgttttcttattaggcctatcctgaagccaaaggaaatgagatcggaattcctcgggggtaccgagctcgaatt

SEQ ID NO: 329133 - DNA, 366 bp, Zea mays
cctcggggaattccaattccacattttcaagaaataaggaggcaaaaatggtcatatatgaattggaagtatttgttttcttattaggcctatcctgaagccaaaggaaatgagatcggaattcctcggggaattccaattccacattttcaagaaataaggaggcaaaaatgttcatatatgaattggaattatttgttttcttattaggcctatcctgaagccaaaggaaatgagatcggaattcctcggggaattccaattccacattttcaagaaataaggaggcaaaaatgttcatatatgaattggaattatttgttttcttattaggcctatcctgaagccaaaggaaatgagatcgga

SEQ ID NO: 329134 - DNA, 378 bp, Zea mays
cctcggggaattccaattccacattttcaagaaataaggaggcaaaaatgttcatatatgaattggaattatttgttttcttattaggcctatcctgaagccaaaggaaatgagatcggaattcctcggggaattccaattccacattttcaagaaataaggaggcaaaaatgttcatatatgaattggaattatttgttttcttattaggcctatcctgaagccaaaggaaatgagatcggaattcctcggggaattccaattccacattttcaagaaataaggaggcaaaaatgttcatatatgaattggaattatttgttttcttattaggcctatcctgaaaccaaaggaaatgagatcggaattcctcggggg

SEQ ID NO: 329135 - DNA, 377 bp, Zea mays
cctcggggaattccaattccacattttcaagaaataaggaggcaaaaatggtcatatatgaattggaattatttgttttcttattaggcctatcctgaagccaaaggaaatgagatcggaattcctcggggaattccaattccacattttcaagaaataaggaggcaaaaatgttcatatatgaattggaattatttgttttcttattaggcctatcctgaagccaaaggaaatgagatcggaattcctcggggaattccaattccacattttcaagaaataaggaggcaaaaatgttcatatatgaattggaattatttgttttcttattaggcctatcctgaagccaaaggaaatgagatcggaattcctcgggg

SEQ ID NO: 329136 - DNA, 249 bp, Zea mays
gacatgggcagggcctcgtaagccgccttgaacttccagattttgacctggccccggaaacggaccaacctaacggggtaattataataataaatttggctacctccaagtgaaaagcctaagggtccagaattccaatcctgcctgcagcttatctaatatccctaggttggtgggtcctggctcaaaagagtcagccggttgcctttggtttggtttggtaatggtaatagataaaggtaagcgatt

SEQ ID NO: 329137 - DNA, 352 bp, Zea mays
actagttctaagatcgcgagcggccgccctttttttttggttttttgtttttttttttgaactcacaacaagtatccatggttaagtatcgcctccggctcggatagaaacaaacatactactagttcacaaatcgcccacaaacgacaaagccagaactgataacgacaacatttacagccatacgtgctggcccttattgacggcgacgactgatctgatctcatttaggcagacgcagtcgcaggcgcaggcgcggcatgcttctcgatcagggccaggagctcgtccttcctggcacccacgatggtcgcgaccgtcttgccgttcttgacgaagtggaaggtcggca

SEQ ID NO: 329138 - DNA, 223 bp, Zea mays
gcaaaccaatccctagtgcctagtcgcctgatctggggagaacgcatctgagactgattttcgagtcaaagctactgctcgtttgaaggggagccacctgtgcggttgcgctcctctttgctcgttgggttttggttcaagagggggaaaccttcgtggagactgaagaggaaggccaagttcgagggtgttcctcgtccactcttctcgatccgcaatgcgt

SEQ ID NO: 329139 - DNA, 114 bp, Zea mays
aaaaaaaaataaaaaaaaaaaaaaaaaaaaaacaaaaagggaaaaaaaaaaaaaaaagaaaaaaaaaaaaaaaaaaaaaaaaaaaaaaaaaaaaaaaaaaaaaaaaaaaaaggg

SEQ ID NO: 329140 - DNA, 393 bp, Zea mays
cctcggggaattccaattccacattttcaagaaataaggaggcaaaaatgttcatatatgaattggaattatttgttttcttattaggcctatcctgaagccaaaggaaatgagatcggaattcctcggggaattccaattccacattttcaagaaataaggaggcaaaaatgttcatatatgaattggaattatttgttttcttattaggcctatcctgaagccaaaggaaatgagatcggaattcctcggggaattccaattccacattttcaagaaataaggaggcaaaaatgttcatatatgaattggaattatttgttttcttattaggcctatcctgaagccaaaggaaatgagatcggaattcctcggtggtaccgagctcgaatt

SEQ ID NO: 329141 - DNA, 386 bp, Zea mays
acccctcacccgccgcagccaatccctccccagcagccgtcgtcgccaccgctgcagcgcggaggcgaccccccatcgccgccaagatgcagatcttcgtgaagaccctgacggggaaaacgatcacgttggaggtggagtcctcggacaccatcgacaacgtgaaggccaagatacaggacaaggagggcatcccgccggaccagcagcggctaatcttcgccggcaagcagctcgaggacggccgcaccctcgccgactacaacatccagaaggagtccaccctccacctggtgctccgcctccgaggtggcgccaagaagcgcaagaagaagacgtacaccaagcccaagaagatcaagcacaagcaccatgagggtaagctc

SEQ ID NO: 329142 - DNA, 337 bp, Zea mays
aaacccagtaactcgcatattcctccgtgatccaagttctagcagcgcacctctcggaatcggcattagtcagtctcgtcttaggcctatccgggtctgcacagggacggacaccgagcatccactcggaagaatcctgaatcgacaacattcaagacatcacgaagccgacgatcccatatctgactaggaattacgtcgtctagcacatcgcctatcttatatacgaggggaccgacatcgtgcttaatagctgaatgtacaacttcaaattttacgcagtcacgtacgccgagctctcacttcttaagaccgactccttcatggatgtattata

SEQ ID NO: 329143 - DNA, 316 bp, Zea mays
ccacaagcgacgcctaacgattacagctagccaagccgtattcttgtgcagctacggagcattacgagtcctgtcttgatggaagcaatgatggctgccaaggtcctcctaactccttgcttccggttcaagaaggtgcccagaaccttggcttctttccccttggcccaacaacaacgtctgggtaatttctggcttggttgaagaaccaagcccgttgacaagaagaagggtaacttgaagcgctttttcaatggcaacggcgggccgtcgaacggcgtcttgtcgtcctccgaaagaatggttcttgacacct

SEQ ID NO: 329144 - DNA, 160 bp, Zea mays
ctagttctagatcgcgagcggccgcacttctatgtttgagtcatagcagttattttactagtgtttttgttgtcaaacatatgaagtgcaccatataatctacactttaattaacaaaaagacatatagataaaacaaaaaatacgatgagagcgctcct

SEQ ID NO: 329145 - DNA, 307 bp, Zea mays
  unsure (1)..(307): unsure at all n locations
agacgggaagtantagagtaggatatgacgggtgatgcgttgggtaccttgaattctgttaaagttattgatttggttgaagaatcgacctgtcccgatccagatcaagacctgaggtatggacgcaaacaggcaccctagtttaactcagcagctgctggctgcggagcactgagctcagcataccgtcaatgccgctagagctgtcatgtcatctaggctcatgcatcctatacatgtaggctaaccgtaaaatatccgtataccgtgcccatatggacgcttaattttagagtaaggtttgctc

SEQ ID NO: 329146 - DNA, 394 bp, Zea mays
cctcggggaattccaattccacattttcaagaaataaggaggcaaaaatgttcatatatgaattggaattatttgttttcttattaggcctatcctgaagccaaaggaaatgagatcggaattcctcggggaattccaattccacattttcaagaaataaggaggcaaaaatgttcatatatgaattggaattatttgttttcttattaggcctatcctgaagccaaaggaaatgagatcggaattcctcggggaattccaattccacattttcaagaaataaggaagcaaaaatgttcatatatgaattggaattatttggtttcttattaagcctatcctgaaacccaaagaaaatgagatcggaattcctcgggggtaccgagctcgaatt

SEQ ID NO: 329147 - DNA, 385 bp, Zea mays
tatgacatctcatgcacgcgttcctcacctcgtaagctggctctaggcactgagtcgagagatacggcacctcgacagctccaatggcaattgagaaggacatccagaaggcccttgaggaataattttttgtgagcttgtctcgtctcatccaccacacacttgcagcagaaataggcacttgctgaaatatttcgtcgtagtaacattcagaccggacgtctttgcttatctgtagtaaaaattctgtgtaatgttaccctccttttcgccttccgttcgtgtaagtagaggttgtattaagtagccatcatctgctagcttttgccctttctgtgtgaagaagtgaagacatggtatattgatgcaaaacttaacgttggtg

SEQ ID NO: 329148 - DNA, 381 bp, Zea mays
cctcggggaattccaattccacattttcaagaaataaggaggcaaaaatgtgtcatatatgaattggaattatttgttttcttattaggcctatcctgaagccaaaggaaatgagatcggaattcctcggggaattccaattccacattttcaagaaataaggaggcaaaaatgttcatatatgaattggaattatttgttttcttattaggcctatcctgaagccaaaggaaatgagatcggaattcctcggggaattccaattccacattttcaagaaataaggaggcaaaaatgttcatatatgaattggaattatttgttttcttattaggcctatcctgaagccaaaggaaatgagatcggaattcctcgggggta

SEQ ID NO: 329149 - DNA, 122 bp, Zea mays
tcgctcctgaattcccgggtcgaccgcacgcgtacgaattattgcaaatactcgttaagccttgtttagttattttcatttcatttggattaaatgccgttgaaagaaattaggaggagaag

SEQ ID NO: 329150 - DNA, 190 bp, Zea mays
ccactcgttcattcattctatcattacaattcccaacctaaccttcttccccatatcccggatgaaccttaaattctacagggacctcattaacccttccatatacttctatctcatatatcatcaccaaaccattcatctcttcaaccacatttttaccacatatccttttaaaatcatttccaaccac

SEQ ID NO: 329151 - DNA, 258 bp, Zea mays
tccggaatttcccgggtcggaccgacgcgtaacgcctcgaaggagtgaggaggtggtgtgaatcgctcaagaaagaagcggcttctgtcgtcgccgccgaacgcgcttaagccattcggtggggtagcaccagtggaagacgtggtggcggacaagttcgtgacggttgtgaaggaggcgatcaagaagcatgaggcggatgacgagaatgatgaggcaatgcggaagtttcagggcagtcgtgtgaggaccgcgttt

SEQ ID NO: 329152 - DNA, 174 bp, Zea mays
catattcaagttctactacaacttctcctacgacctttatgaaaccttctcggccgttaacacaatattgcgggagcccacctacaccaatttcctctatctcaaatcttatctcttcttcactctctgacacaccttcacctacgaagacacctacaaataccttcccaatac

SEQ ID NO: 329153 - DNA, 243 bp, Zea mays
cttgatcatctacaacataacagaagaatttatacctgctacagaaaatatttgatgcgagtgtgtttacaacattcggggagtcctacatcaacaatctaatcaattcctttattatcatcataatgttctgattacaaaaatcaacttagatctacatcaataaactttcgttgctatccatgtttctgaccaatttcaatcaatctatctttcactttcatacacttattcttctattaa

SEQ ID NO: 329154 - DNA, 147 bp, Zea mays
tatcttatctctaaacataatcattttttactcccatatcattcacacataaatcccgactttattataaacttggctggcaccacacatcaatatcatcactaacacatcatcaactcacacaaattactacctcatcaattatac

SEQ ID NO: 329155 - DNA, 112 bp, Zea mays
acccacctaccaattcacaaccccattccattattttttcactctcatctattccttgcgtattttaaaactgggagcctataaacaacatctacacttatccatcttatca

SEQ ID NO: 329156 - DNA, 324 bp, Zea mays
ccggtccggaattcccgggtcgaccgacgcgtacgcccacgcgtccgcccacgcgtccgtgcgtatactggagctgatgcaggtacaagtggttcaggtggaggatccggtggggcgagtgcaggtaccagtgctaccgtgggtgctggtgtctccggaggtgccaaagttggtggtggcgtaggaggaaatgcaggaggaagtggcaacgtctatactggaaccggtgccgatgcaggcgtttctggtggaggatccggtggcgccgatgctggtattggagctaccataggtgctggtgtctccggaagcgtcaaatttggt

SEQ ID NO: 329157 - DNA, 249 bp, Zea mays
acgtcttactataacctttctccctccttcacctttctccttttcttgccactgcaaaggagctttttctacaatagcatggcgattgcataccctgtcctgtacgtcaccctcttgtcttcaaattacctcaagaaagtgtcgctcttctcccggactcgcatctactccctggcttccatctccggattctacctcctcatcccttcccacagcacccaaacataccacatcaactgcttcaacccc

SEQ ID NO: 329158 - DNA, 237 bp, Zea mays
acccacaccacacactcaatttcaacaaccccaaactcacattattttctccatttctcattaacttcctctggcgtatttttaaaaatctggggacccatataaaacacaaattcaatattctttccatcttatcattttataacttcaaacatcaccaataacatattcttccatactttcttatcatatcccacttctaccatttcaccttcttattccctacacttattacac

SEQ ID NO: 329159 - DNA, 209 bp, Zea mays
tataaacttttattatccataataattccaggtccaatcctatgtaaactaacactgcctaatcaaaatttatataaattatgaatcttttcgcccaccaatctctaatatgctaatcttcttcagtcgtcactctcccgtctctaatctactgcctctatccaatcatttcacctcttgcagctctccccccttcatctaaatcctca

SEQ ID NO: 329160 - DNA, 193 bp, Zea mays
ctttctttaacatataaactcttttcgttttttacaatgaaactatccataaaaggcttctttcaattaaaagtttgccgatccatattacttcaataaatttatccaaccactcaattactaccaaaaccacatttcaaaatcttacaagcatattttccatttcttataaccaaacttccacttatattaa

SEQ ID NO: 329161 - DNA, 250 bp, Zea mays
catcccccgcaggccaaacacgaagccaccttttacattttgctcgatacaaaatcacaaccgtagggactaaactacgggcagctttacccatctcaaacatctttactctcccacacaatctatctaattactctggttactacaagaatactaccaccgccaatcctcccatcgcatcacttctctctaataaataatccatagaacatactcagacttatctactcaagaacaatatactcactcc

SEQ ID NO: 329162 - DNA, 303 bp, Zea mays
tatataaaccactggtttctccatcaatggttcaaccatacagaaccgctcattataaaagtttgctcactcaacaaaaaatcctcttattcaattgactcaatactatcaacttaactctaaaatcctatttaaagcacaaacttcaccctttattcacacatttacactctataccatattcatctcatacacctattcaaccttcttcaaccactccaaactccatccataaataatcttaaaattactccacacaattaaccctcttcactaaaatcacttacaccttcaatagcttca

SEQ ID NO: 329163 - DNA, 51 bp, Zea mays
tcacttttccctgttctttaaccatttacaattctactgcactccatctct

SEQ ID NO: 329164 - DNA, 233 bp, Zea mays
attcccggctcgaccgactcctaacacactcatgggatgcatgcccactgcacacatatcactaatggctcacctgtcataattctgatgcatttttaacctgggctactgctcctattactcaactttctatcatcctcctaccctgtatactcgctctctcgatcctacccttattagcataaattccaaaccccccaatgaattccatactatttcaatatctctacttt

SEQ ID NO: 329165 - DNA, 115 bp, Zea mays
gcctttcgtactacatatatgtgctgcatcaatcagtttgttcgactaggtattattctgggtcggggaaatacctcacggggggaggagtataacaagccgatctataccgcac

SEQ ID NO: 329166 - DNA, 333 bp, Zea mays
aattcccgggtcgaccgacgcgtacgctccgttagcacgagctgcagggagggagtttggattagaaacagagctaccggcacaatgggcagctttctaaaatcggacgtcctggcgctcaccgccatcgttactgttgggtaccagctgctgctcttcatcatcacagatctcctcctgttcgataaggtcaccgatttctcacgcagtacaaattttatcataatcgccatcctaacattaacttttaatggagcatgtcattttcatcacattgtgctcacaatgcttgtcaccaatttgtgtcttccactaagattatttttattcatt

SEQ ID NO: 329167 - DNA, 148 bp, Zea mays
aaactaatcaatcactctctctcttctcattctctcccttcaccactctttacctctaactcaatcccattcttttcataacataaattcctctaacacaactctcatactaccacttttccacacatacccaaccaacacactaaca

SEQ ID NO: 329168 - DNA, 302 bp, Zea mays
atcctatcctaccacttctctaaccacacaccaactcttccctaacaactacagaatactcgcccaactttaataccacctcaacaccatcccacaactgtacacgaatcaaaatcttctacctcaacataaaaggtaactaccaccagtaccttgcttagatcaaatcttattcatacaccaaacattcttcatacagcaccatcaatccctacaaaaatgctcatgacatcgctctttcatactctactaccacccaccccattaagccttccccttctcttaacattctcaacttctac

SEQ ID NO: 329169 - DNA, 93 bp, Zea mays
ctcctcctcaattcctcgatcgacccacgcgtacacaaacacttgggctttagaggaatatacatttgcactttaatcaagcacttcatagtc

SEQ ID NO: 329170 - DNA, 298 bp, Zea mays
cttcaatacccccaaaatgctatcatatttttcacagctcatccacttcctctatcgtatgtttaataaaaaagggatccatataaatcaaaaatctaaaattttatctatcttatcatctaataactataaaaactatcaataacaaatccatacatactttcttatcttatcctactttaaccaattaaactactctaaccgtacactcatcacacaattatttactttcacacaaattccttaaaaaccttctttcttatcccattactttttttatccaacacattaaaacttt

SEQ ID NO: 329171 - DNA, 174 bp, Zea mays
gccgccgctcccgatctacaacctttggaaatcctttccttatctggtcatcttcgctcgggtataataatatggatgccgatgcactacttaacaaggacaatcacatataaaatgatcagaaggcatatcatgttaacttgcttaattaccattccaacatggttgaaacct

SEQ ID NO: 329172 - DNA, 185 bp, Zea mays
ataacacatgtgagctcgaccatgggatccctctctaataacatcatggtcaaaaacggcaggcttaaaaaaatcggcggcggcacaaactaccgaccccctaaagtgccacccagacccaacatcaccaccaactacaactgcaaatggctcaccactagagccaccttttactgtcagaccaa

SEQ ID NO: 329173 - DNA, 272 bp, Zea mays
  unsure (1)..(272): unsure at all n locations
aattccctaaccgacccactcgtaactaaacactattactataacaacataaaataactttgattaaaaaaccaaacctaccctaaaaacgcgacggttaaaaaatactgcaggacaaacctcctccccctttaaaatatccaacctttcttcccccacaattcaacttacttactcttttttaatctcccctaaaaccaattcacttaccccatttttccaaccatccctcttcaaaaaccctacacttacccaatttaatcnactttcaa

SEQ ID NO: 329174 - DNA, 187 bp, Zea mays
aattcccgggtcgacccacgcgtacgatattccttaaaaatggagtacaagggattgttgagaactgcttttgttcatgatattaatgtagatgatgaatatttgttgcaaaaaaaaaaaaaaaaaaaaaaaaaaaaaaaaaaaaaaaaacattaaaaacaaaataaaaaaaaataaatcaagacac

SEQ ID NO: 329175 - DNA, 217 bp, Zea mays
ctcaatttctgtatccctatctaatttcttttactcacccatctaatcatcaaccggacggtttaaaactaacgtgcggcagacacactacactccaaacctttccatctaaatataaattgctacttatcacttcctacacatattacactttttaccataacacttttcctccatcaacatcccctctctatcttcatacctcactaccccttct

SEQ ID NO: 329176 - DNA, 308 bp, Zea mays
gaattcccggatcgacccacgcgtacgcagaaatgcctggtttctatgcatagggtgaatattatctaagtcgttttgctgtcgatggtgaggataaacataaactgtctcacgcacaacacattgctaccgatgacacccacatacgtctgtcttcaaggtctcatcatacttaacaccaactctctcatttgaatattccatatcaacaacggacacattatcaaactactacctccacccattatacccatacccattactgctctccacccttttattgttccacccttcctactagccatact

SEQ ID NO: 329177 - DNA, 228 bp, Zea mays
acgcgtaccgtataaagtgcaatttcacgcagttaccatctgttggtatctcactaggagctgaaaaagaggcgaaaacctctgggctgactgaagaagtacctgaggataggatagctgtgcaggcttccgatgcggtctagctaaattgtaaccagaatagcaggactagcacgactacgccgaatgacaatgtgatccacgaccattctagtgacacatgatcat

SEQ ID NO: 329178 - DNA, 217 bp, Zea mays
gtccgtaattcccgggtcgagccagcgcgtccgcccacgcgtacgcggacgcgtggactttggaaggacatctgttgactttgtgatgccaatatggtagggattagttacctagggaggaattctaccttgacattgagcctaagtggggccatttgatggacctgcacctggctgctgaatctgtgctagaaggtcctgctctagttttatacat

SEQ ID NO: 329179 - DNA, 307 bp, Zea mays
gacaaaagcatggcggcgggctacggcgaggaactcctgggcagggtgtcgggcctggtggcggcgtgcacagtgcgcgtgtcgcgcgcgacgcggcgcctcctccggcgccaccagaagaagaggccaacgaagcaccaccagacgacggccgacgtggtggcagcggcgctgtgcgcgcgtggggcggccatcgacaagggcagggcgtcctcggggtcggcgggcgaggtggccctctggagccggcggatcctgatgggggagcgctgccagccgctggacttcgcgggcgccatccactacg

SEQ ID NO: 329180 - DNA, 269 bp, Zea mays
ggatatttaaaatatttgatctttaatatcctacaacttaaatctaaaagtaagtagaatgggggcggcgggcacaagttgcaggtgaggacatcatttcgaaacttgaaaggtgcatgcatcatcttaacatgaagctccactcattttagattaattgttggtgacctgatgctccaacttgaatatgttgaaccaaacaatgtcagaatacatcaatccaaacattcccagtacatcaaggaattgctggtgccacctgcacttat

SEQ ID NO: 329181 - DNA, 125 bp, Zea mays
attcccgggtccacccacgcatccaatatcacccacatactacatctatactttccttctacttatatctcaaactactttcaggagggtattttcctaagctacacttctctatcctaattctt

SEQ ID NO: 329182 - DNA, 69 bp, Zea mays
actcggtccttaattcccgggtcgagccacgcgtccggtcagagctctctaacccacaatatcatagca

SEQ ID NO: 329183 - DNA, 179 bp, Zea mays
acttcctctaatgaacatcgaaatatttacaacactgaatctacattcatcattggcgagctttaataattagtcagactaccttgcttgcaaccatgatattatatatattacctatgatcaaattatacaaattaactttaaatataactactatcataaccattttcaatattttt

SEQ ID NO: 329184 - DNA, 401 bp, Zea mays
gccatttgcccggttgcgcccgcccccggaccgcagaattcgagcaccaacgcctgggggccgtggtcacctggcgtggctcttccggcctgtggattatgtgggcggaaggatagggatggagcctggaggaggggagagacgcgtccggtgacgtcccctgtccaccgttttgagtaggagcgctgtcaacgtggcgaggattcaaggaggacagacagtccatggcaggttgatcacaatatcaactgtttgttttaggtaggagccctgacaacttgacatccgacaccgtgacattgaggtgtgctccggaggcttctctcggatagtttaaattttggaacttgattgctggtcgaggtgaaatatttatactccatggcctgattgcagtgctt

SEQ ID NO: 329185 - DNA, 232 bp, Zea mays
ccaattgcctcttattacattattacaatagagtgcacgcatctagatgaaataataagacaggtggattgatcaaaatcagaagccgcttatggctattctcgtcaagttttcgagtgtgtggatgtccacgtagctctcttggactgggatctgaatgatagacacttccttggtggtggatgcgccattgtctatcagggtacctagttagtgcctctcgttggttatg

SEQ ID NO: 329186 - DNA, 285 bp, Zea mays
cccacgcgtccgatcacgcgtacgcatgaatctatccttgcacccatcatcttcgtgactctaggacatcgcaccagacgaactaagcatgtcactcgccacagctgctggtctcttctacatcctcgatgtcgatgcgctaagcgcggccgaggcaccggcagagataccgaaggcacgcactcctgacaaggcaccggacgagtcactgaaggcaggcaatcctgcagctgctggcaaggcacccgagtctgctgccactagaactgcccccgctaaggcacc

SEQ ID NO: 329187 - DNA, 304 bp, Zea mays
cgccgtcctctcctcgccggtacttcactgagggcgaagaaaaaagtggcagtatattctgccactgacccaagagccaagatcatggcgtcatcttcctgcgtccgcctccatcacctgccgtccacctttcgccggtcgtccgcccctggcgccccaaccaacctccagttccgcgcggcgagctgccggtggcggcggcgggttctcgttcccggcgcggcatctcctcccctacgcctctgcgccacgggttccccgcagccgcctcttggcagtgacagcaacgctccgttgtcccgcg

SEQ ID NO: 329188 - DNA, 407 bp, Zea mays
atttcaagttgggattaaaaaaatccttgtctgtcccatgacaaagcataggtctaatacccggctgtgatcgcggttgttctgatatgtgctactatgccactgtgtatggatggaccaggggtttgggggttttctcgacctgcatgagaagctcttaatataatgctcagggctatcttaccccccgcatgtccagttttttatatgtttcatgcggtctaaatttagtgttatgttagttctcttattttcaaggtggtactccccctgttccaaaataagagtcattctcgcttcttgagaagtaaagttaatataaaacataattagtaacactaggtaaatattcgaatgtattttcataataaagttatttggggatttaaatgtggataatattttct

SEQ ID NO: 329189 - DNA, 377 bp, Zea mays
cgttcgctaattagttgcatcaacactgagcaggtgacatcatgcaagctgtggcatcaagtgggagagtcattcaaacctccaaagacatgcacaaccgtttcatggactttctataacttctatgagaagagagagcaagattgataaaaagacttgccaaaatcaaagaggagcagggacagattgatgaggctgttggtttgatgtaagaagttgtaagtttgcaccatactgaatttggaccagcgtaccggatttgtcaaggctacgctttgattgaatacgagaagtttgaagaagttcaggctgcaataaaagatctggatggagctgacctttataaacaaataatgagtgttgattgggcatttagc

SEQ ID NO: 329190 - DNA, 203 bp, Zea mays
cggacgcgtgggcgcgtcgtcgtcgtccctcttgaaacaaaagaagctattttgacaccggacgcacacacacagaggagagaagataagaaaaccaggggcaaggcatccagcgccgctagcttaagcaaggcaaggcaagagaatccgtacgtttaggtgcaagtcgtaggtaagatggacgcggaccaacagggcgtggt

SEQ ID NO: 329191 - DNA, 269 bp, Zea mays
ggcacgtgcgatggtgcccgagcgcgcgcggtggtgaaccccagggcgtgcggtggctcctcgattcggagttgcggcggcggttcccaaattcataggcgtgatggcggcggctccctaatctggagggcgagctgcggcggggccctgaggcgggcgagcagtggtggcgccccatgaggcgcgactgtctccagcgacagttgccatgctaggcacatgtgggtctaacggcgacgacggtcttgcgagacacgtgttgcgagggt

SEQ ID NO: 329192 - DNA, 153 bp, Zea mays
ttcccggtcgaccacgcgtccggggagccaacatataactccctcatttgtattctacacggtatgctatggacctggggggggttcttactaagttgaggtatattgcatgagatagcatgcaccggttaccatatatactatttatacttc

SEQ ID NO: 329193 - DNA, 80 bp, Zea mays
cttccttaattccccggtcgacccacacatcctcactttttctacactacaatctcaaactcttctacataatcacaaca

SEQ ID NO: 329194 - DNA, 408 bp, Zea mays
cagacgacgaggcgacgacaccgcccactctctgtcaacacgaggagagagtagactgcggcagcggagtgcagagagcggacgcaacgcaacaccgtccactctttgtcactgatgatcgaattgaggagcgcactgaagctaaccgccttcgccgccgatgagtcgcctcctctcgcggcagcaccttgccgtcgtccgtcgatctgcaccctttgcgtgcgtgtccaggtgatcccgcctctcgccccctttccccgcgatcaatcgcgcgtgcaaactgaggtgtcgttgcgtggtctgatgcgaattggggggatcgcactaatggtggaaatggaaccatgtgactgttcgccaggctacatgcgtgtgttcacacttttcaaactgacaggatatgttttt

SEQ ID NO: 329195 - DNA, 314 bp, Zea mays
ccagcgtgcacgaggtcctttgcgtgggggcagccagggaccaacacagatccagcgtggacgtggctggcacaaagacgacatgcagaaaatggagcatgcattgaatgccatgaggaacaatagatatcgtacattacttttgttcttgatgtccaaacctctactgttcctctttctccaacaacaagttctttcttttctggcgagcaaaagtgctgataacgtgttagagcgcagtgaaaacgagactcgagagaatagagaaaatgacagttgtcgatctttattgcagagattctgggttatataaa

SEQ ID NO: 329196 - DNA, 77 bp, Zea mays
agcatcgatctacccccatcttccaggatagccttccaccacaataatcataaacacctgtcatagtcaaatctctc

SEQ ID NO: 329197 - DNA, 77 bp, Zea mays
ttcccggtcgactcactcatcctccgcaagtgacctatatcaccatatcacattactccatacatatttcatcatac

SEQ ID NO: 329198 - DNA, 380 bp, Zea mays
  unsure (1)..(380): unsure at all n locations
cggacgcgtgggctggcggcgacacatttttttatccactgacaccctcccgacctccatcaggtccctcgtcgtcgccccatccagaaccgaggttctggccgctgcgttctccctcttgtgcttcgacccgctggtggcgattagtgctcgcgtcaaccgccttgtccaccccctctaattccccctccgcaagccattgcctcgtagatttcttcgcgctgccactgtcgcctccggaatttccacccgccattgttgccgtgagagggacctcgccgggatcggngtgccgctcgaattgagtaggtcgaggagctcctctacgcctcgacgagcgtgtccgcgacaccaacactagggatggagcccctgtcgac

SEQ ID NO: 329199 - DNA, 207 bp, Zea mays
cacgcatccatcaaagaaacaagatcacacatacaatacctctctagctcgccaccaacaatggcctgcgatgtactccatcatgctcgccacaactgcacttgctacgtcttttgtgattgtttcgtgctccacccctctcaccttctacgtcttctatatgctccaaacctttccaccttttccttaccctcaacattgtcacca

SEQ ID NO: 329200 - DNA, 305 bp, Zea mays
cctaattcccggtcgagcactcgtccgctcctcctcaactatcactgctacctcaatgtattccacttcagcctcagctcgctcatgaaggagtttaatcagtagggcggggctgcacactacctgcctcaccctctcatacttatcaccggatatcatcatcaagaaaggctactactgcaccctggcctacatctgattcttcagtctcatcctattcgtactcctcgcctgctacctctcgttccacgactcctacctagtgcatatgtacctcatgatcaccatagcctacctcaagtacc

SEQ ID NO: 329201 - DNA, 343 bp, Zea mays
attggactgtttgcgatgccaattgtacagatcaagacgcgtattggactaagtttgccgaggtcatgggtatagattcatgaggcgtgttgacgccgctggctgtgctggaccacatccatgcacacaaccatgcgagtagtctggtgaccgacctcattgcaccctcccattcacttctctgcagcagcgacgttcatgcatggtgatcaacgaagaggtttcttctttcctgattttcctcttacacaaaactatttgttcaatggattttcctatacgatctgtgtaccttctttatgctttcaagtcgtaagaattattgtgtcaacatttttaggct

SEQ ID NO: 329202 - DNA, 342 bp, Zea mays
tcggtccgaattcccgggtcgacctacgcgtccgcgcctcatcgtcgttcagctcccttcaccgttaactgcaatgatctcaaccgccacgtgctcgttatactcgagcagagcctcaccaacttcaccaagatcctccacatcgacgccagcttcatcaacataatcaaaccgctttcatcgtcacttacagcgcgaactgtcacaccatgatcacctacatatgctcagccagcttcttctaactaacatagctgcatctataataaattgaagcctctaataattagccatcgttctctatagttcctttctttcttcgttttagtatatgcacctttt

SEQ ID NO: 329203 - DNA, 404 bp, Zea mays
cctgaattcccgggtcgagccactcgtccgctcaatcgctatacttggagctgagatggatgtgaggtcctcacctgagttagtcaagcgattggttcaagccctttgggtgaactcacggctaggtcactttgtcaagatcttccctgctgtggcacatggatggagcgtgatatacagcctatatgatgcagctgccgtgatgagcgctgaggatgcctttgccgacatgctcgactgggtcgaacccgaacctatagtgaactctgcaccttgtaataataatgcgtattccattgtcctgcaatcggatctagctgctgcagggctgccatccagagttgaacacatcatctagacatcattatgtagctcgtacccagattaagaccctatattataca

SEQ ID NO: 329204 - DNA, 419 bp, Zea mays
gcacaatcctcgcacctatctgacacatttctcattatcacctcctatattactcgaagtgcttcaaaaccgtgctgtgcactcaaattttgctatcacaaacactacaatgaaacaccactcatccatagaacacactattgctcctgaccaggctccagctgcttcatacacctaccctcctcctgcgccagcatccatgacatggccccatctaactcctgaacatacacaagatgttcatataaaaacacttattacaaatcccacctacatattgtaccactactgtctaccatatatccttactcaacaacgcaacatcatctaaatctactaccacccacgattaccaccagatatccacggatcatgccttaataattccctacgactatattctatcaatcgttacctct

SEQ ID NO: 329205 - DNA, 228 bp, Zea mays
cccacgcgtccggtattctgcctcatgcgtgtaatgtttcgtcgtctactcatgtagttttattgcgatgtcaaaaaaaaaaaaaaaaaaaaaaaaaaaaaaaaaaaaaaaaaaaaaaaaaaaaaaaaactaacactataaaagatccaaccttacttacgaataaatgcaacttgataacattttctatagtgcaaactaaattgaacaaacattccattgtttaac

SEQ ID NO: 329206 - DNA, 575 bp, Zea mays
  unsure (1)..(575): unsure at all n locations
gcacgtactcggtctcgtgaattcccgtggtcgactccacgtccgtccgtgatccgatcaattggcaagagggagccaagataccatccactcgtagcatcccacacgcaggtacggaagagagggcgactaacaatgngtcgaggctgtngccttggtagcgnngcggtggnnntctgtgccttcctnggttagcgatcaggtgccgtcagggggcccatttcagcgctcgaggggaatgggtgtcantnnttgatcaatttganntcagctgcaagggtaccctgggcannactgcgacaagggaactctgggccccgagggccttcccgcctcaggggaaactccgccatacgactacactccgcggtctgcaactccgatcactcggcttgtctgtcggctgatcaaatatctctctggtnncgatgtgcgcgccaatgtcannatgtcgcaacgcgccgtgcatggtaccaaaggcctcaaagcgtgtggtgctcgcgtgttgtgtattatattacacancatgcattnatacattgggtcgtcgatcgttactggatgcatggcaactg

SEQ ID NO: 329207 - DNA, 239 bp, Zea mays
ttctgcgacaccatgtattttaacacgcatgacaccatctgctcttctggaccggtcataacgttcgagggcgcctgcacctccaagatcatgctgcaactcttcgtccaagacttttactcgtgccaccgtccctttacccaagcctcgcgttcccaaccccattgggaaattttaccaggagctcaacccgattgtccacaactccatggctctttccaacattttattaaccactc

SEQ ID NO: 329208 - DNA, 404 bp, Zea mays
agaaaaaacgacgtcagtgcgtcaggtgttcggcgccgtatttgcttgtgacttgataagtacgttttctttctggggggagtcctagtcctgagtgactttaagttccaacaaaatctcggtagaatcattatgcattgctcttctgacaataacatccccaacctagacaaaaagatgatgaaacctaacgcccgattgcatactaatgcataattatggtacttatgtcacgaggtggaactcacaatataatctagcacagagaagccaccaagataactcaacttgtacgctaatgtcataaaaatgcgaaaaataaccatttatccatcagtgtcaccatgctcgatttgctcacaccatattacatctaaccactgcgcaactacacagtgtaaagc

SEQ ID NO: 329209 - DNA, 366 bp, Zea mays
ctaattccgggtcgagcacgcgtcgcgccgcgcgcgcaacagcacatcgctcttcatctacctggcgagtgagcgtccagaccgggaggctttaaccgtggaccttcacatgtcagtgaacgatatctcctgaacgactacctgcttactggcaacacgcacattcctgcgactccgcggcctctccaaagcggtccaggccatgcccatctcacgcctaccaactcgctcatatgcacgcgcacacgcagaagtatggcgtcgatatgacacaccctgaatcatcactgctactgacccatccatcagtggtctgacccatttcacagggccacgtgagatccaccgtatggtcactgtgtgtag

SEQ ID NO: 329210 - DNA, 54 bp, Zea mays
tctaccttcctaattcccggtcgacccactctccggactcccactacctacaca

SEQ ID NO: 329211 - DNA, 579 bp, Zea mays
  unsure (1)..(579): unsure at all n locations
aattctctcgggtcgagcccacgccgtctcggctcgtccgtgggaacaaaccgtcgagggagaccgcgtctatcttcgtggacacccanntcgttcggtgccaacgcggtccaatctcctcgagggacaccggtntnnatcaggcnnagcagggcgaatggggcggcattctggcagcngtctcgcacaaaacgaccccacataccaccagcttgtatcgctcgctncgggcccggcccggcttggacaacccnntcgcagtgggggcctgctcgnngtttcttcggaggggcttcatctgctncatttatgatnngttttctttcgcccccgttggtattctattanngtttcaccaatatagaagaaaataggtacctgggtgaactttttaaaagggttgaggggttgttcgnntcttccctttttcttaaacctcttaaaaacccgacaatannaagtattgtatggataccaccaccannataatattatagaccangnntaaagtagtatttagttctaaatatataatgtgtaaagttttgggtattagaatatatatcttttccttttata

SEQ ID NO: 329212 - DNA, 214 bp, Zea mays
taccttcctaattccccggtcgacccactcttcctgtcacaccttctcttccctctactcctttctattcaactcaccctaccattcctattaggttgcttttaaaacacatcataccactcatataactaatctaacatacaattccatacccaatatcactcccactatcactctcaaacccatactttccaaatattctatcacaaatata

SEQ ID NO: 329213 - DNA, 365 bp, Zea mays
gggatgttttaaacagtcaagaattcatatattagagtgcatatatatatatataattctgggagacgttaataatcgagacggcacgcatgttccatcctgccatcattctgcttctcctgctcattgcgaccacccatgtaagctcaagcagcaaaagaattctagaaggacacctagctattacttggggcatgcatgacgtcagacaactgcgcctacgctttccacgatcaaaccttcatctgcgaccatttcagcacctttcaccgtcagttcatctgcactaaaccgcgctaaattaacctactttcggcatctctatcgtggacttttattctatttaatgacttacttgatttttt

SEQ ID NO: 329214 - DNA, 438 bp, Zea mays
  unsure (1)..(438): unsure at all n locations
gctccttctgcctgaccttgtacgacgacgacgatactttgtgcttgcgcaggacgaccgagagctgggccctctaggagtgcagcctggtccagatggcgccctcgtcctatgctcctgggcaccgggaccaccttgtggaagcgcgcccaccggccgccgacagcccggcgctccacggtgaccttcaccctgggcgcgccctgcggctggcgcccggcagtggacttcaacttattgcgaccggcgctgtacactaccttcagaaacataaccgctgcatgcagccgcgcacgcgacgcgctatatggtgcgacgtgcggtctggccgaatgcgcactactgtcttacctgacacgtgcactacgagggtgancagctgctccgtgattgtngactcacactgtggtaccacagcatgtatgcaataggctgcaa

SEQ ID NO: 329215 - DNA, 217 bp, Zea mays
actcggtccttaattcccgggtcgacccacgcgtacgcccacgcttccggattggtctaaaaataaatataatacttataaaaaaaaaaataaagaaaagttttaaaaaaaaaaaaagccaaccacatctaaaaaaatccatacttacttacactttcatacaacttcatatctcttctatattttcacctatattcaatttactatctcttctttt

SEQ ID NO: 329216 - DNA, 341 bp, Zea mays
actcaatccccaattcccgtgtcgacccactcatcccaaaaaaaaaaaacaaaaaaacaaaaaacaaaaaaaaaaaaaaaaaaaaaaaaaaaaacgcactttataaaaaatccaaccttacctacccttacctcctactccaaatctcttctataacataacctaaatccaattcactccccaacctaatacaacatcttcactatcaaaaccctactaatacccaactaaatcaccttgacccacatcacccctttttccaatttacctattaacaaaaataccctcacaaatcaaccttatcatcaaattctcatactcatcacttaattatactcacc
